United States Patent Application Publication US 2015/0232836 A1 - sequence listing, part 26

SEQ ID NO: 961800 - DNA, 15 bp, Homo sapiens
tacgtacatatatag

SEQ ID NO: 961801 - DNA, 15 bp, Homo sapiens
acgtacatatatagt

SEQ ID NO: 961802 - DNA, 15 bp, Homo sapiens
cgtacatatatagtg

SEQ ID NO: 961803 - DNA, 15 bp, Homo sapiens
gtacatatatagtgc

SEQ ID NO: 961804 - DNA, 15 bp, Homo sapiens
tacatatatagtgca

SEQ ID NO: 961805 - DNA, 15 bp, Homo sapiens
acatatatagtgcaa

SEQ ID NO: 961806 - DNA, 15 bp, Homo sapiens
catatatagtgcaaa

SEQ ID NO: 961807 - DNA, 15 bp, Homo sapiens
atatatagtgcaaat

SEQ ID NO: 961808 - DNA, 15 bp, Homo sapiens
tatatagtgcaaatg

SEQ ID NO: 961809 - DNA, 15 bp, Homo sapiens
atatagtgcaaatgg

SEQ ID NO: 961810 - DNA, 15 bp, Homo sapiens
tatagtgcaaatggg

SEQ ID NO: 961811 - DNA, 15 bp, Homo sapiens
atagtgcaaatggga

SEQ ID NO: 961812 - DNA, 15 bp, Homo sapiens
tagtgcaaatgggaa

SEQ ID NO: 961813 - DNA, 15 bp, Homo sapiens
agtgcaaatgggaaa

SEQ ID NO: 961814 - DNA, 15 bp, Homo sapiens
gtgcaaatgggaaag

SEQ ID NO: 961815 - DNA, 15 bp, Homo sapiens
tgcaaatgggaaagt

SEQ ID NO: 961816 - DNA, 15 bp, Homo sapiens
gcaaatgggaaagtg

SEQ ID NO: 961817 - DNA, 15 bp, Homo sapiens
caaatgggaaagtgt

SEQ ID NO: 961818 - DNA, 15 bp, Homo sapiens
aaatgggaaagtgtg

SEQ ID NO: 961819 - DNA, 15 bp, Homo sapiens
aatgggaaagtgtgt

SEQ ID NO: 961820 - DNA, 15 bp, Homo sapiens
atgggaaagtgtgta

SEQ ID NO: 961821 - DNA, 15 bp, Homo sapiens
tgggaaagtgtgtaa

SEQ ID NO: 961822 - DNA, 15 bp, Homo sapiens
gggaaagtgtgtaag

SEQ ID NO: 961823 - DNA, 15 bp, Homo sapiens
ggaaagtgtgtaaga

SEQ ID NO: 961824 - DNA, 15 bp, Homo sapiens
gaaagtgtgtaagat

SEQ ID NO: 961825 - DNA, 15 bp, Homo sapiens
aaagtgtgtaagatt

SEQ ID NO: 961826 - DNA, 15 bp, Homo sapiens
aagtgtgtaagattt

SEQ ID NO: 961827 - DNA, 15 bp, Homo sapiens
agtgtgtaagattta

SEQ ID NO: 961828 - DNA, 15 bp, Homo sapiens
gtgtgtaagatttag

SEQ ID NO: 961829 - DNA, 15 bp, Homo sapiens
tgtgtaagatttaga

SEQ ID NO: 961830 - DNA, 15 bp, Homo sapiens
gtgtaagatttagaa

SEQ ID NO: 961831 - DNA, 15 bp, Homo sapiens
tgtaagatttagaaa

SEQ ID NO: 961832 - DNA, 15 bp, Homo sapiens
gtaagatttagaaaa

SEQ ID NO: 961833 - DNA, 15 bp, Homo sapiens
taagatttagaaaaa

SEQ ID NO: 961834 - DNA, 15 bp, Homo sapiens
aagatttagaaaaag

SEQ ID NO: 961835 - DNA, 15 bp, Homo sapiens
agatttagaaaaagc

SEQ ID NO: 961836 - DNA, 15 bp, Homo sapiens
gatttagaaaaagca

SEQ ID NO: 961837 - DNA, 15 bp, Homo sapiens
atttagaaaaagcat

SEQ ID NO: 961838 - DNA, 15 bp, Homo sapiens
tttagaaaaagcatt

SEQ ID NO: 961839 - DNA, 15 bp, Homo sapiens
ttagaaaaagcatta

SEQ ID NO: 961840 - DNA, 15 bp, Homo sapiens
tagaaaaagcattaa

SEQ ID NO: 961841 - DNA, 15 bp, Homo sapiens
agaaaaagcattaac

SEQ ID NO: 961842 - DNA, 15 bp, Homo sapiens
gaaaaagcattaact

SEQ ID NO: 961843 - DNA, 15 bp, Homo sapiens
aaaaagcattaacta

SEQ ID NO: 961844 - DNA, 15 bp, Homo sapiens
aaaagcattaactat

SEQ ID NO: 961845 - DNA, 15 bp, Homo sapiens
aaagcattaactatt

SEQ ID NO: 961846 - DNA, 15 bp, Homo sapiens
aagcattaactatta

SEQ ID NO: 961847 - DNA, 15 bp, Homo sapiens
agcattaactattag

SEQ ID NO: 961848 - DNA, 15 bp, Homo sapiens
gcattaactattagt

SEQ ID NO: 961849 - DNA, 15 bp, Homo sapiens
cattaactattagta

SEQ ID NO: 961850 - DNA, 15 bp, Homo sapiens
attaactattagtaa

SEQ ID NO: 961851 - DNA, 15 bp, Homo sapiens
ttaactattagtaaa

SEQ ID NO: 961852 - DNA, 15 bp, Homo sapiens
taactattagtaaac

SEQ ID NO: 961853 - DNA, 15 bp, Homo sapiens
aactattagtaaact

SEQ ID NO: 961854 - DNA, 15 bp, Homo sapiens
actattagtaaactt

SEQ ID NO: 961855 - DNA, 15 bp, Homo sapiens
ctattagtaaacttt

SEQ ID NO: 961856 - DNA, 15 bp, Homo sapiens
tattagtaaacttta

SEQ ID NO: 961857 - DNA, 15 bp, Homo sapiens
attagtaaactttat

SEQ ID NO: 961858 - DNA, 15 bp, Homo sapiens
ttagtaaactttatc

SEQ ID NO: 961859 - DNA, 15 bp, Homo sapiens
tagtaaactttatct

SEQ ID NO: 961860 - DNA, 15 bp, Homo sapiens
agtaaactttatctt

SEQ ID NO: 961861 - DNA, 15 bp, Homo sapiens
gtaaactttatctta

SEQ ID NO: 961862 - DNA, 15 bp, Homo sapiens
taaactttatcttaa

SEQ ID NO: 961863 - DNA, 15 bp, Homo sapiens
aaactttatcttaag

SEQ ID NO: 961864 - DNA, 15 bp, Homo sapiens
aactttatcttaagc

SEQ ID NO: 961865 - DNA, 15 bp, Homo sapiens
actttatcttaagct

SEQ ID NO: 961866 - DNA, 15 bp, Homo sapiens
ctttatcttaagctc

SEQ ID NO: 961867 - DNA, 15 bp, Homo sapiens
tttatcttaagctct

SEQ ID NO: 961868 - DNA, 15 bp, Homo sapiens
ttatcttaagctcta

SEQ ID NO: 961869 - DNA, 15 bp, Homo sapiens
tatcttaagctctaa

SEQ ID NO: 961870 - DNA, 15 bp, Homo sapiens
atcttaagctctaac

SEQ ID NO: 961871 - DNA, 15 bp, Homo sapiens
tcttaagctctaact

SEQ ID NO: 961872 - DNA, 15 bp, Homo sapiens
cttaagctctaactt

SEQ ID NO: 961873 - DNA, 15 bp, Homo sapiens
ttaagctctaacttt

SEQ ID NO: 961874 - DNA, 15 bp, Homo sapiens
taagctctaactttt

SEQ ID NO: 961875 - DNA, 15 bp, Homo sapiens
aagctctaacttttg

SEQ ID NO: 961876 - DNA, 15 bp, Homo sapiens
agctctaacttttga

SEQ ID NO: 961877 - DNA, 15 bp, Homo sapiens
gctctaacttttgat

SEQ ID NO: 961878 - DNA, 15 bp, Homo sapiens
ctctaacttttgatt

SEQ ID NO: 961879 - DNA, 15 bp, Homo sapiens
tctaacttttgatta

SEQ ID NO: 961880 - DNA, 15 bp, Homo sapiens
ctaacttttgattag

SEQ ID NO: 961881 - DNA, 15 bp, Homo sapiens
taacttttgattagt

SEQ ID NO: 961882 - DNA, 15 bp, Homo sapiens
aacttttgattagtt

SEQ ID NO: 961883 - DNA, 15 bp, Homo sapiens
acttttgattagttc

SEQ ID NO: 961884 - DNA, 15 bp, Homo sapiens
cttttgattagttcc

SEQ ID NO: 961885 - DNA, 15 bp, Homo sapiens
ttttgattagttcct

SEQ ID NO: 961886 - DNA, 15 bp, Homo sapiens
tttgattagttccta

SEQ ID NO: 961887 - DNA, 15 bp, Homo sapiens
ttgattagttcctac

SEQ ID NO: 961888 - DNA, 15 bp, Homo sapiens
tgattagttcctaca

SEQ ID NO: 961889 - DNA, 15 bp, Homo sapiens
gattagttcctacaa

SEQ ID NO: 961890 - DNA, 15 bp, Homo sapiens
attagttcctacaaa

SEQ ID NO: 961891 - DNA, 15 bp, Homo sapiens
ttagttcctacaaaa

SEQ ID NO: 961892 - DNA, 15 bp, Homo sapiens
tagttcctacaaaaa

SEQ ID NO: 961893 - DNA, 15 bp, Homo sapiens
agttcctacaaaaat

SEQ ID NO: 961894 - DNA, 15 bp, Homo sapiens
gttcctacaaaaatt

SEQ ID NO: 961895 - DNA, 15 bp, Homo sapiens
ttcctacaaaaatta

SEQ ID NO: 961896 - DNA, 15 bp, Homo sapiens
tcctacaaaaattag

SEQ ID NO: 961897 - DNA, 15 bp, Homo sapiens
cctacaaaaattagt

SEQ ID NO: 961898 - DNA, 15 bp, Homo sapiens
ctacaaaaattagtg

SEQ ID NO: 961899 - DNA, 15 bp, Homo sapiens
tacaaaaattagtga

SEQ ID NO: 961900 - DNA, 15 bp, Homo sapiens
acaaaaattagtgaa

SEQ ID NO: 961901 - DNA, 15 bp, Homo sapiens
caaaaattagtgaat

SEQ ID NO: 961902 - DNA, 15 bp, Homo sapiens
aaaaattagtgaata

SEQ ID NO: 961903 - DNA, 15 bp, Homo sapiens
aaaattagtgaatat

SEQ ID NO: 961904 - DNA, 15 bp, Homo sapiens
aaattagtgaatatg

SEQ ID NO: 961905 - DNA, 15 bp, Homo sapiens
aattagtgaatatgc

SEQ ID NO: 961906 - DNA, 15 bp, Homo sapiens
attagtgaatatgca

SEQ ID NO: 961907 - DNA, 15 bp, Homo sapiens
ttagtgaatatgcat

SEQ ID NO: 961908 - DNA, 15 bp, Homo sapiens
tagtgaatatgcatt

SEQ ID NO: 961909 - DNA, 15 bp, Homo sapiens
agtgaatatgcattt

SEQ ID NO: 961910 - DNA, 15 bp, Homo sapiens
gtgaatatgcatttt

SEQ ID NO: 961911 - DNA, 15 bp, Homo sapiens
tgaatatgcattttc

SEQ ID NO: 961912 - DNA, 15 bp, Homo sapiens
gaatatgcattttct

SEQ ID NO: 961913 - DNA, 15 bp, Homo sapiens
aatatgcattttcta

SEQ ID NO: 961914 - DNA, 15 bp, Homo sapiens
atatgcattttctaa

SEQ ID NO: 961915 - DNA, 15 bp, Homo sapiens
tatgcattttctaat

SEQ ID NO: 961916 - DNA, 15 bp, Homo sapiens
atgcattttctaatt

SEQ ID NO: 961917 - DNA, 15 bp, Homo sapiens
tgcattttctaattt

SEQ ID NO: 961918 - DNA, 15 bp, Homo sapiens
gcattttctaattta

SEQ ID NO: 961919 - DNA, 15 bp, Homo sapiens
cattttctaatttag

SEQ ID NO: 961920 - DNA, 15 bp, Homo sapiens
attttctaatttagt

SEQ ID NO: 961921 - DNA, 15 bp, Homo sapiens
ttttctaatttagtg

SEQ ID NO: 961922 - DNA, 15 bp, Homo sapiens
tttctaatttagtgc

SEQ ID NO: 961923 - DNA, 15 bp, Homo sapiens
ttctaatttagtgct

SEQ ID NO: 961924 - DNA, 15 bp, Homo sapiens
tctaatttagtgctt

SEQ ID NO: 961925 - DNA, 15 bp, Homo sapiens
ctaatttagtgcttt

SEQ ID NO: 961926 - DNA, 15 bp, Homo sapiens
taatttagtgctttt

SEQ ID NO: 961927 - DNA, 15 bp, Homo sapiens
aatttagtgcttttt

SEQ ID NO: 961928 - DNA, 15 bp, Homo sapiens
atttagtgctttttt

SEQ ID NO: 961929 - DNA, 15 bp, Homo sapiens
tttagtgcttttttt

SEQ ID NO: 961930 - DNA, 15 bp, Homo sapiens
ttagtgctttttttt

SEQ ID NO: 961931 - DNA, 15 bp, Homo sapiens
tagtgcttttttttt

SEQ ID NO: 961932 - DNA, 15 bp, Homo sapiens
agtgctttttttttt

SEQ ID NO: 961933 - DNA, 15 bp, Homo sapiens
gtgcttttttttttt

SEQ ID NO: 961934 - DNA, 15 bp, Homo sapiens
tgctttttttttttt

SEQ ID NO: 961935 - DNA, 15 bp, Homo sapiens
gcttttttttttttt

SEQ ID NO: 961936 - DNA, 15 bp, Homo sapiens
cttttttttttttta

SEQ ID NO: 961937 - DNA, 15 bp, Homo sapiens
tttttttttttttac

SEQ ID NO: 961938 - DNA, 15 bp, Homo sapiens
ttttttttttttaca

SEQ ID NO: 961939 - DNA, 15 bp, Homo sapiens
tttttttttttacaa

SEQ ID NO: 961940 - DNA, 15 bp, Homo sapiens
ttttttttttacaat

SEQ ID NO: 961941 - DNA, 15 bp, Homo sapiens
tttttttttacaatt

SEQ ID NO: 961942 - DNA, 15 bp, Homo sapiens
ttttttttacaattg

SEQ ID NO: 961943 - DNA, 15 bp, Homo sapiens
tttttttacaattgg

SEQ ID NO: 961944 - DNA, 15 bp, Homo sapiens
ttttttacaattggt

SEQ ID NO: 961945 - DNA, 15 bp, Homo sapiens
tttttacaattggtg

SEQ ID NO: 961946 - DNA, 15 bp, Homo sapiens
ttttacaattggtgt

SEQ ID NO: 961947 - DNA, 15 bp, Homo sapiens
tttacaattggtgtt

SEQ ID NO: 961948 - DNA, 15 bp, Homo sapiens
ttacaattggtgttc

SEQ ID NO: 961949 - DNA, 15 bp, Homo sapiens
tacaattggtgttca

SEQ ID NO: 961950 - DNA, 15 bp, Homo sapiens
acaattggtgttcac

SEQ ID NO: 961951 - DNA, 15 bp, Homo sapiens
caattggtgttcact

SEQ ID NO: 961952 - DNA, 15 bp, Homo sapiens
aattggtgttcactt

SEQ ID NO: 961953 - DNA, 15 bp, Homo sapiens
attggtgttcactta

SEQ ID NO: 961954 - DNA, 15 bp, Homo sapiens
ttggtgttcacttaa

SEQ ID NO: 961955 - DNA, 15 bp, Homo sapiens
tggtgttcacttaat

SEQ ID NO: 961956 - DNA, 15 bp, Homo sapiens
ggtgttcacttaatg

SEQ ID NO: 961957 - DNA, 15 bp, Homo sapiens
gtgttcacttaatgt

SEQ ID NO: 961958 - DNA, 15 bp, Homo sapiens
tgttcacttaatgtt

SEQ ID NO: 961959 - DNA, 15 bp, Homo sapiens
gttcacttaatgtta

SEQ ID NO: 961960 - DNA, 15 bp, Homo sapiens
ttcacttaatgttat

SEQ ID NO: 961961 - DNA, 15 bp, Homo sapiens
tcacttaatgttata

SEQ ID NO: 961962 - DNA, 15 bp, Homo sapiens
cacttaatgttatat

SEQ ID NO: 961963 - DNA, 15 bp, Homo sapiens
acttaatgttatatt

SEQ ID NO: 961964 - DNA, 15 bp, Homo sapiens
cttaatgttatatta

SEQ ID NO: 961965 - DNA, 15 bp, Homo sapiens
ttaatgttatattag

SEQ ID NO: 961966 - DNA, 15 bp, Homo sapiens
taatgttatattaga

SEQ ID NO: 961967 - DNA, 15 bp, Homo sapiens
aatgttatattagat

SEQ ID NO: 961968 - DNA, 15 bp, Homo sapiens
atgttatattagata

SEQ ID NO: 961969 - DNA, 15 bp, Homo sapiens
tgttatattagataa

SEQ ID NO: 961970 - DNA, 15 bp, Homo sapiens
gttatattagataaa

SEQ ID NO: 961971 - DNA, 15 bp, Homo sapiens
ttatattagataaat

SEQ ID NO: 961972 - DNA, 15 bp, Homo sapiens
tatattagataaatg

SEQ ID NO: 961973 - DNA, 15 bp, Homo sapiens
atattagataaatga

SEQ ID NO: 961974 - DNA, 15 bp, Homo sapiens
tattagataaatgaa

SEQ ID NO: 961975 - DNA, 15 bp, Homo sapiens
attagataaatgaat

SEQ ID NO: 961976 - DNA, 15 bp, Homo sapiens
ttagataaatgaata

SEQ ID NO: 961977 - DNA, 15 bp, Homo sapiens
tagataaatgaatag

SEQ ID NO: 961978 - DNA, 15 bp, Homo sapiens
agataaatgaatagc

SEQ ID NO: 961979 - DNA, 15 bp, Homo sapiens
gataaatgaatagca

SEQ ID NO: 961980 - DNA, 15 bp, Homo sapiens
ataaatgaatagcaa

SEQ ID NO: 961981 - DNA, 15 bp, Homo sapiens
taaatgaatagcaaa

SEQ ID NO: 961982 - DNA, 15 bp, Homo sapiens
aaatgaatagcaaaa

SEQ ID NO: 961983 - DNA, 15 bp, Homo sapiens
aatgaatagcaaaaa

SEQ ID NO: 961984 - DNA, 15 bp, Homo sapiens
atgaatagcaaaaat

SEQ ID NO: 961985 - DNA, 15 bp, Homo sapiens
tgaatagcaaaaata

SEQ ID NO: 961986 - DNA, 15 bp, Homo sapiens
gaatagcaaaaataa

SEQ ID NO: 961987 - DNA, 15 bp, Homo sapiens
aatagcaaaaataag

SEQ ID NO: 961988 - DNA, 15 bp, Homo sapiens
atagcaaaaataagg

SEQ ID NO: 961989 - DNA, 15 bp, Homo sapiens
tagcaaaaataaggt

SEQ ID NO: 961990 - DNA, 15 bp, Homo sapiens
agcaaaaataaggta

SEQ ID NO: 961991 - DNA, 15 bp, Homo sapiens
gcaaaaataaggtac

SEQ ID NO: 961992 - DNA, 15 bp, Homo sapiens
caaaaataaggtact

SEQ ID NO: 961993 - DNA, 15 bp, Homo sapiens
aaaaataaggtactt

SEQ ID NO: 961994 - DNA, 15 bp, Homo sapiens
aaaataaggtacttt

SEQ ID NO: 961995 - DNA, 15 bp, Homo sapiens
aaataaggtacttta

SEQ ID NO: 961996 - DNA, 15 bp, Homo sapiens
aataaggtactttag

SEQ ID NO: 961997 - DNA, 15 bp, Homo sapiens
ataaggtactttaga

SEQ ID NO: 961998 - DNA, 15 bp, Homo sapiens
taaggtactttagag

SEQ ID NO: 961999 - DNA, 15 bp, Homo sapiens
aaggtactttagagt

SEQ ID NO: 962000 - DNA, 15 bp, Homo sapiens
aggtactttagagtt

SEQ ID NO: 962001 - DNA, 15 bp, Homo sapiens
ggtactttagagttg

SEQ ID NO: 962002 - DNA, 15 bp, Homo sapiens
gtactttagagttga

SEQ ID NO: 962003 - DNA, 15 bp, Homo sapiens
tactttagagttgat

SEQ ID NO: 962004 - DNA, 15 bp, Homo sapiens
actttagagttgatt

SEQ ID NO: 962005 - DNA, 15 bp, Homo sapiens
ctttagagttgattg

SEQ ID NO: 962006 - DNA, 15 bp, Homo sapiens
tttagagttgattgt

SEQ ID NO: 962007 - DNA, 15 bp, Homo sapiens
ttagagttgattgtt

SEQ ID NO: 962008 - DNA, 15 bp, Homo sapiens
tagagttgattgttt

SEQ ID NO: 962009 - DNA, 15 bp, Homo sapiens
agagttgattgtttt

SEQ ID NO: 962010 - DNA, 15 bp, Homo sapiens
gagttgattgttttg

SEQ ID NO: 962011 - DNA, 15 bp, Homo sapiens
agttgattgttttgc

SEQ ID NO: 962012 - DNA, 15 bp, Homo sapiens
gttgattgttttgcc

SEQ ID NO: 962013 - DNA, 15 bp, Homo sapiens
ttgattgttttgcct

SEQ ID NO: 962014 - DNA, 15 bp, Homo sapiens
tgattgttttgcctt

SEQ ID NO: 962015 - DNA, 15 bp, Homo sapiens
gattgttttgcctta

SEQ ID NO: 962016 - DNA, 15 bp, Homo sapiens
attgttttgccttac

SEQ ID NO: 962017 - DNA, 15 bp, Homo sapiens
ttgttttgccttaca

SEQ ID NO: 962018 - DNA, 15 bp, Homo sapiens
tgttttgccttacaa

SEQ ID NO: 962019 - DNA, 15 bp, Homo sapiens
gttttgccttacaaa

SEQ ID NO: 962020 - DNA, 15 bp, Homo sapiens
ttttgccttacaaac

SEQ ID NO: 962021 - DNA, 15 bp, Homo sapiens
tttgccttacaaact

SEQ ID NO: 962022 - DNA, 15 bp, Homo sapiens
ttgccttacaaactt

SEQ ID NO: 962023 - DNA, 15 bp, Homo sapiens
tgccttacaaacttc

SEQ ID NO: 962024 - DNA, 15 bp, Homo sapiens
gccttacaaacttct

SEQ ID NO: 962025 - DNA, 15 bp, Homo sapiens
ccttacaaacttcta

SEQ ID NO: 962026 - DNA, 15 bp, Homo sapiens
cttacaaacttctaa

SEQ ID NO: 962027 - DNA, 15 bp, Homo sapiens
ttacaaacttctaat

SEQ ID NO: 962028 - DNA, 15 bp, Homo sapiens
tacaaacttctaatc

SEQ ID NO: 962029 - DNA, 15 bp, Homo sapiens
acaaacttctaatcc

SEQ ID NO: 962030 - DNA, 15 bp, Homo sapiens
caaacttctaatcca

SEQ ID NO: 962031 - DNA, 15 bp, Homo sapiens
aaacttctaatccat

SEQ ID NO: 962032 - DNA, 15 bp, Homo sapiens
aacttctaatccatc

SEQ ID NO: 962033 - DNA, 15 bp, Homo sapiens
acttctaatccatcc

SEQ ID NO: 962034 - DNA, 15 bp, Homo sapiens
cttctaatccatcca

SEQ ID NO: 962035 - DNA, 15 bp, Homo sapiens
ttctaatccatccag

SEQ ID NO: 962036 - DNA, 15 bp, Homo sapiens
tctaatccatccagc

SEQ ID NO: 962037 - DNA, 15 bp, Homo sapiens
ctaatccatccagct

SEQ ID NO: 962038 - DNA, 15 bp, Homo sapiens
taatccatccagctg

SEQ ID NO: 962039 - DNA, 15 bp, Homo sapiens
aatccatccagctgt

SEQ ID NO: 962040 - DNA, 15 bp, Homo sapiens
atccatccagctgta

SEQ ID NO: 962041 - DNA, 15 bp, Homo sapiens
tccatccagctgtat

SEQ ID NO: 962042 - DNA, 15 bp, Homo sapiens
ccatccagctgtatt

SEQ ID NO: 962043 - DNA, 15 bp, Homo sapiens
catccagctgtattt

SEQ ID NO: 962044 - DNA, 15 bp, Homo sapiens
atccagctgtattta

SEQ ID NO: 962045 - DNA, 15 bp, Homo sapiens
tccagctgtatttag

SEQ ID NO: 962046 - DNA, 15 bp, Homo sapiens
ccagctgtatttaga

SEQ ID NO: 962047 - DNA, 15 bp, Homo sapiens
cagctgtatttagaa

SEQ ID NO: 962048 - DNA, 15 bp, Homo sapiens
agctgtatttagaag

SEQ ID NO: 962049 - DNA, 15 bp, Homo sapiens
gctgtatttagaagt

SEQ ID NO: 962050 - DNA, 15 bp, Homo sapiens
ctgtatttagaagta

SEQ ID NO: 962051 - DNA, 15 bp, Homo sapiens
tgtatttagaagtaa

SEQ ID NO: 962052 - DNA, 15 bp, Homo sapiens
gtatttagaagtaag

SEQ ID NO: 962053 - DNA, 15 bp, Homo sapiens
tatttagaagtaaga

SEQ ID NO: 962054 - DNA, 15 bp, Homo sapiens
atttagaagtaagat

SEQ ID NO: 962055 - DNA, 15 bp, Homo sapiens
tttagaagtaagatc

SEQ ID NO: 962056 - DNA, 15 bp, Homo sapiens
ttagaagtaagatct

SEQ ID NO: 962057 - DNA, 15 bp, Homo sapiens
tagaagtaagatctc

SEQ ID NO: 962058 - DNA, 15 bp, Homo sapiens
agaagtaagatctca

SEQ ID NO: 962059 - DNA, 15 bp, Homo sapiens
gaagtaagatctcac

SEQ ID NO: 962060 - DNA, 15 bp, Homo sapiens
aagtaagatctcact

SEQ ID NO: 962061 - DNA, 15 bp, Homo sapiens
agtaagatctcacta

SEQ ID NO: 962062 - DNA, 15 bp, Homo sapiens
gtaagatctcactac

SEQ ID NO: 962063 - DNA, 15 bp, Homo sapiens
taagatctcactaca

SEQ ID NO: 962064 - DNA, 15 bp, Homo sapiens
aagatctcactacag

SEQ ID NO: 962065 - DNA, 15 bp, Homo sapiens
agatctcactacagc

SEQ ID NO: 962066 - DNA, 15 bp, Homo sapiens
gatctcactacagcg

SEQ ID NO: 962067 - DNA, 15 bp, Homo sapiens
atctcactacagcga

SEQ ID NO: 962068 - DNA, 15 bp, Homo sapiens
tctcactacagcgaa

SEQ ID NO: 962069 - DNA, 15 bp, Homo sapiens
ctcactacagcgaat

SEQ ID NO: 962070 - DNA, 15 bp, Homo sapiens
tcactacagcgaatt

SEQ ID NO: 962071 - DNA, 15 bp, Homo sapiens
cactacagcgaatta

SEQ ID NO: 962072 - DNA, 15 bp, Homo sapiens
actacagcgaattat

SEQ ID NO: 962073 - DNA, 15 bp, Homo sapiens
ctacagcgaattata

SEQ ID NO: 962074 - DNA, 15 bp, Homo sapiens
tacagcgaattatat

SEQ ID NO: 962075 - DNA, 15 bp, Homo sapiens
acagcgaattatatc

SEQ ID NO: 962076 - DNA, 15 bp, Homo sapiens
cagcgaattatatca

SEQ ID NO: 962077 - DNA, 15 bp, Homo sapiens
agcgaattatatcag

SEQ ID NO: 962078 - DNA, 15 bp, Homo sapiens
gcgaattatatcagt

SEQ ID NO: 962079 - DNA, 15 bp, Homo sapiens
cgaattatatcagta

SEQ ID NO: 962080 - DNA, 15 bp, Homo sapiens
gaattatatcagtaa

SEQ ID NO: 962081 - DNA, 15 bp, Homo sapiens
aattatatcagtaaa

SEQ ID NO: 962082 - DNA, 15 bp, Homo sapiens
attatatcagtaaaa

SEQ ID NO: 962083 - DNA, 15 bp, Homo sapiens
ttatatcagtaaaat

SEQ ID NO: 962084 - DNA, 15 bp, Homo sapiens
tatatcagtaaaatt

SEQ ID NO: 962085 - DNA, 15 bp, Homo sapiens
atatcagtaaaattt

SEQ ID NO: 962086 - DNA, 15 bp, Homo sapiens
tatcagtaaaatttt

SEQ ID NO: 962087 - DNA, 15 bp, Homo sapiens
atcagtaaaattttg

SEQ ID NO: 962088 - DNA, 15 bp, Homo sapiens
tcagtaaaattttgt

SEQ ID NO: 962089 - DNA, 15 bp, Homo sapiens
cagtaaaattttgtt

SEQ ID NO: 962090 - DNA, 15 bp, Homo sapiens
agtaaaattttgtta

SEQ ID NO: 962091 - DNA, 15 bp, Homo sapiens
gtaaaattttgttac

SEQ ID NO: 962092 - DNA, 15 bp, Homo sapiens
taaaattttgttaca

SEQ ID NO: 962093 - DNA, 15 bp, Homo sapiens
aaattttgttacagt

SEQ ID NO: 962094 - DNA, 15 bp, Homo sapiens
aattttgttacagtg

SEQ ID NO: 962095 - DNA, 15 bp, Homo sapiens
attttgttacagtgt

SEQ ID NO: 962096 - DNA, 15 bp, Homo sapiens
ttttgttacagtgtt

SEQ ID NO: 962097 - DNA, 15 bp, Homo sapiens
tttgttacagtgttg

SEQ ID NO: 962098 - DNA, 15 bp, Homo sapiens
ttgttacagtgttgt

SEQ ID NO: 962099 - DNA, 15 bp, Homo sapiens
tgttacagtgttgtg

SEQ ID NO: 962100 - DNA, 15 bp, Homo sapiens
gttacagtgttgtgc

SEQ ID NO: 962101 - DNA, 15 bp, Homo sapiens
ttacagtgttgtgca

SEQ ID NO: 962102 - DNA, 15 bp, Homo sapiens
tacagtgttgtgcag

SEQ ID NO: 962103 - DNA, 15 bp, Homo sapiens
acagtgttgtgcagt

SEQ ID NO: 962104 - DNA, 15 bp, Homo sapiens
cagtgttgtgcagtg

SEQ ID NO: 962105 - DNA, 15 bp, Homo sapiens
agtgttgtgcagtgt

SEQ ID NO: 962106 - DNA, 15 bp, Homo sapiens
gtgttgtgcagtgtc

SEQ ID NO: 962107 - DNA, 15 bp, Homo sapiens
tgttgtgcagtgtcc

SEQ ID NO: 962108 - DNA, 15 bp, Homo sapiens
gttgtgcagtgtcct

SEQ ID NO: 962109 - DNA, 15 bp, Homo sapiens
ttgtgcagtgtccta

SEQ ID NO: 962110 - DNA, 15 bp, Homo sapiens
tgtgcagtgtcctaa

SEQ ID NO: 962111 - DNA, 15 bp, Homo sapiens
gtgcagtgtcctaag

SEQ ID NO: 962112 - DNA, 15 bp, Homo sapiens
tgcagtgtcctaaga

SEQ ID NO: 962113 - DNA, 15 bp, Homo sapiens
gcagtgtcctaagat

SEQ ID NO: 962114 - DNA, 15 bp, Homo sapiens
cagtgtcctaagatg

SEQ ID NO: 962115 - DNA, 15 bp, Homo sapiens
agtgtcctaagatgt

SEQ ID NO: 962116 - DNA, 15 bp, Homo sapiens
gtgtcctaagatgta

SEQ ID NO: 962117 - DNA, 15 bp, Homo sapiens
tgtcctaagatgtat

SEQ ID NO: 962118 - DNA, 15 bp, Homo sapiens
gtcctaagatgtata

SEQ ID NO: 962119 - DNA, 15 bp, Homo sapiens
tcctaagatgtatac

SEQ ID NO: 962120 - DNA, 15 bp, Homo sapiens
cctaagatgtatact

SEQ ID NO: 962121 - DNA, 15 bp, Homo sapiens
ctaagatgtatacta

SEQ ID NO: 962122 - DNA, 15 bp, Homo sapiens
taagatgtatactaa

SEQ ID NO: 962123 - DNA, 15 bp, Homo sapiens
aagatgtatactaag

SEQ ID NO: 962124 - DNA, 15 bp, Homo sapiens
agatgtatactaagt

SEQ ID NO: 962125 - DNA, 15 bp, Homo sapiens
gatgtatactaagtt

SEQ ID NO: 962126 - DNA, 15 bp, Homo sapiens
atgtatactaagttc

SEQ ID NO: 962127 - DNA, 15 bp, Homo sapiens
tgtatactaagttcc

SEQ ID NO: 962128 - DNA, 15 bp, Homo sapiens
gtatactaagttcct

SEQ ID NO: 962129 - DNA, 15 bp, Homo sapiens
tatactaagttcctt

SEQ ID NO: 962130 - DNA, 15 bp, Homo sapiens
atactaagttccttc

SEQ ID NO: 962131 - DNA, 15 bp, Homo sapiens
tactaagttccttca

SEQ ID NO: 962132 - DNA, 15 bp, Homo sapiens
actaagttccttcag

SEQ ID NO: 962133 - DNA, 15 bp, Homo sapiens
ctaagttccttcagt

SEQ ID NO: 962134 - DNA, 15 bp, Homo sapiens
taagttccttcagtg

SEQ ID NO: 962135 - DNA, 15 bp, Homo sapiens
aagttccttcagtgg

SEQ ID NO: 962136 - DNA, 15 bp, Homo sapiens
agttccttcagtggc

SEQ ID NO: 962137 - DNA, 15 bp, Homo sapiens
gttccttcagtggct

SEQ ID NO: 962138 - DNA, 15 bp, Homo sapiens
ttccttcagtggctt

SEQ ID NO: 962139 - DNA, 15 bp, Homo sapiens
tccttcagtggcttt

SEQ ID NO: 962140 - DNA, 15 bp, Homo sapiens
ccttcagtggctttt

SEQ ID NO: 962141 - DNA, 15 bp, Homo sapiens
cttcagtggcttttt

SEQ ID NO: 962142 - DNA, 15 bp, Homo sapiens
ttcagtggctttttt

SEQ ID NO: 962143 - DNA, 15 bp, Homo sapiens
tcagtggcttttttt

SEQ ID NO: 962144 - DNA, 15 bp, Homo sapiens
cagtggctttttttg

SEQ ID NO: 962145 - DNA, 15 bp, Homo sapiens
agtggctttttttgc

SEQ ID NO: 962146 - DNA, 15 bp, Homo sapiens
gtggctttttttgcc

SEQ ID NO: 962147 - DNA, 15 bp, Homo sapiens
tggctttttttgcca

SEQ ID NO: 962148 - DNA, 15 bp, Homo sapiens
ggctttttttgccat

SEQ ID NO: 962149 - DNA, 15 bp, Homo sapiens
gctttttttgccatg

SEQ ID NO: 962150 - DNA, 15 bp, Homo sapiens
ctttttttgccatgt

SEQ ID NO: 962151 - DNA, 15 bp, Homo sapiens
tttttttgccatgtt

SEQ ID NO: 962152 - DNA, 15 bp, Homo sapiens
ttttttgccatgttt

SEQ ID NO: 962153 - DNA, 15 bp, Homo sapiens
tttttgccatgtttt

SEQ ID NO: 962154 - DNA, 15 bp, Homo sapiens
ttttgccatgtttta

SEQ ID NO: 962155 - DNA, 15 bp, Homo sapiens
tttgccatgttttat

SEQ ID NO: 962156 - DNA, 15 bp, Homo sapiens
ttgccatgttttata

SEQ ID NO: 962157 - DNA, 15 bp, Homo sapiens
tgccatgttttataa

SEQ ID NO: 962158 - DNA, 15 bp, Homo sapiens
gccatgttttataac

SEQ ID NO: 962159 - DNA, 15 bp, Homo sapiens
ccatgttttataaca

SEQ ID NO: 962160 - DNA, 15 bp, Homo sapiens
catgttttataacag

SEQ ID NO: 962161 - DNA, 15 bp, Homo sapiens
atgttttataacaga

SEQ ID NO: 962162 - DNA, 15 bp, Homo sapiens
tgttttataacagat

SEQ ID NO: 962163 - DNA, 15 bp, Homo sapiens
gttttataacagata

SEQ ID NO: 962164 - DNA, 15 bp, Homo sapiens
ttttataacagataa

SEQ ID NO: 962165 - DNA, 15 bp, Homo sapiens
tttataacagataat

SEQ ID NO: 962166 - DNA, 15 bp, Homo sapiens
ttataacagataatt

SEQ ID NO: 962167 - DNA, 15 bp, Homo sapiens
tataacagataattt

SEQ ID NO: 962168 - DNA, 15 bp, Homo sapiens
ataacagataatttt

SEQ ID NO: 962169 - DNA, 15 bp, Homo sapiens
taacagataattttg

SEQ ID NO: 962170 - DNA, 15 bp, Homo sapiens
aacagataattttgt

SEQ ID NO: 962171 - DNA, 15 bp, Homo sapiens
acagataattttgtt

SEQ ID NO: 962172 - DNA, 15 bp, Homo sapiens
cagataattttgtta

SEQ ID NO: 962173 - DNA, 15 bp, Homo sapiens
agataattttgttat

SEQ ID NO: 962174 - DNA, 15 bp, Homo sapiens
gataattttgttata

SEQ ID NO: 962175 - DNA, 15 bp, Homo sapiens
ataattttgttataa

SEQ ID NO: 962176 - DNA, 15 bp, Homo sapiens
taattttgttataat

SEQ ID NO: 962177 - DNA, 15 bp, Homo sapiens
aattttgttataatg

SEQ ID NO: 962178 - DNA, 15 bp, Homo sapiens
attttgttataatga

SEQ ID NO: 962179 - DNA, 15 bp, Homo sapiens
ttttgttataatgag

SEQ ID NO: 962180 - DNA, 15 bp, Homo sapiens
gttataatgagaaaa

SEQ ID NO: 962181 - DNA, 15 bp, Homo sapiens
ttataatgagaaaag

SEQ ID NO: 962182 - DNA, 15 bp, Homo sapiens
tataatgagaaaagg

SEQ ID NO: 962183 - DNA, 15 bp, Homo sapiens
ataatgagaaaagga

SEQ ID NO: 962184 - DNA, 15 bp, Homo sapiens
taatgagaaaaggaa

SEQ ID NO: 962185 - DNA, 15 bp, Homo sapiens
aatgagaaaaggaaa

SEQ ID NO: 962186 - DNA, 15 bp, Homo sapiens
atgagaaaaggaaac

SEQ ID NO: 962187 - DNA, 15 bp, Homo sapiens
tgagaaaaggaaact

SEQ ID NO: 962188 - DNA, 15 bp, Homo sapiens
gagaaaaggaaactt

SEQ ID NO: 962189 - DNA, 15 bp, Homo sapiens
agaaaaggaaacttg

SEQ ID NO: 962190 - DNA, 15 bp, Homo sapiens
gaaaaggaaacttgg

SEQ ID NO: 962191 - DNA, 15 bp, Homo sapiens
aaaaggaaacttgga

SEQ ID NO: 962192 - DNA, 15 bp, Homo sapiens
aaaggaaacttggat

SEQ ID NO: 962193 - DNA, 15 bp, Homo sapiens
aaggaaacttggatg

SEQ ID NO: 962194 - DNA, 15 bp, Homo sapiens
aggaaacttggatgt

SEQ ID NO: 962195 - DNA, 15 bp, Homo sapiens
ggaaacttggatgtg

SEQ ID NO: 962196 - DNA, 15 bp, Homo sapiens
gaaacttggatgtgt

SEQ ID NO: 962197 - DNA, 15 bp, Homo sapiens
aaacttggatgtgtt

SEQ ID NO: 962198 - DNA, 15 bp, Homo sapiens
aacttggatgtgttg

SEQ ID NO: 962199 - DNA, 15 bp, Homo sapiens
acttggatgtgttgc

SEQ ID NO: 962200 - DNA, 15 bp, Homo sapiens
cttggatgtgttgct

SEQ ID NO: 962201 - DNA, 15 bp, Homo sapiens
ttggatgtgttgctg

SEQ ID NO: 962202 - DNA, 15 bp, Homo sapiens
tggatgtgttgctgt

SEQ ID NO: 962203 - DNA, 15 bp, Homo sapiens
ggatgtgttgctgtc

SEQ ID NO: 962204 - DNA, 15 bp, Homo sapiens
gatgtgttgctgtct

SEQ ID NO: 962205 - DNA, 15 bp, Homo sapiens
atgtgttgctgtcta

SEQ ID NO: 962206 - DNA, 15 bp, Homo sapiens
tgtgttgctgtctat

SEQ ID NO: 962207 - DNA, 15 bp, Homo sapiens
gtgttgctgtctata

SEQ ID NO: 962208 - DNA, 15 bp, Homo sapiens
tgttgctgtctatat

SEQ ID NO: 962209 - DNA, 15 bp, Homo sapiens
gttgctgtctatatt

SEQ ID NO: 962210 - DNA, 15 bp, Homo sapiens
ttgctgtctatattg

SEQ ID NO: 962211 - DNA, 15 bp, Homo sapiens
tgctgtctatattgt

SEQ ID NO: 962212 - DNA, 15 bp, Homo sapiens
gctgtctatattgtg

SEQ ID NO: 962213 - DNA, 15 bp, Homo sapiens
ctgtctatattgtgt

SEQ ID NO: 962214 - DNA, 15 bp, Homo sapiens
tgtctatattgtgtt

SEQ ID NO: 962215 - DNA, 15 bp, Homo sapiens
gtctatattgtgtta

SEQ ID NO: 962216 - DNA, 15 bp, Homo sapiens
tctatattgtgttag

SEQ ID NO: 962217 - DNA, 15 bp, Homo sapiens
ctatattgtgttagg

SEQ ID NO: 962218 - DNA, 15 bp, Homo sapiens
tatattgtgttaggc

SEQ ID NO: 962219 - DNA, 15 bp, Homo sapiens
atattgtgttaggct

SEQ ID NO: 962220 - DNA, 15 bp, Homo sapiens
tattgtgttaggctc

SEQ ID NO: 962221 - DNA, 15 bp, Homo sapiens
attgtgttaggctca

SEQ ID NO: 962222 - DNA, 15 bp, Homo sapiens
ttgtgttaggctcag

SEQ ID NO: 962223 - DNA, 15 bp, Homo sapiens
tgtgttaggctcagg

SEQ ID NO: 962224 - DNA, 15 bp, Homo sapiens
gtgttaggctcaggc

SEQ ID NO: 962225 - DNA, 15 bp, Homo sapiens
tgttaggctcaggca

SEQ ID NO: 962226 - DNA, 15 bp, Homo sapiens
gttaggctcaggcag

SEQ ID NO: 962227 - DNA, 15 bp, Homo sapiens
ttaggctcaggcagg

SEQ ID NO: 962228 - DNA, 15 bp, Homo sapiens
taggctcaggcagga

SEQ ID NO: 962229 - DNA, 15 bp, Homo sapiens
aggctcaggcaggat

SEQ ID NO: 962230 - DNA, 15 bp, Homo sapiens
ggctcaggcaggatg

SEQ ID NO: 962231 - DNA, 15 bp, Homo sapiens
gctcaggcaggatgc

SEQ ID NO: 962232 - DNA, 15 bp, Homo sapiens
ctcaggcaggatgct

SEQ ID NO: 962233 - DNA, 15 bp, Homo sapiens
tcaggcaggatgctg

SEQ ID NO: 962234 - DNA, 15 bp, Homo sapiens
caggcaggatgctgt

SEQ ID NO: 962235 - DNA, 15 bp, Homo sapiens
aggcaggatgctgtg

SEQ ID NO: 962236 - DNA, 15 bp, Homo sapiens
ggcaggatgctgtgg

SEQ ID NO: 962237 - DNA, 15 bp, Homo sapiens
gcaggatgctgtggc

SEQ ID NO: 962238 - DNA, 15 bp, Homo sapiens
caggatgctgtggct

SEQ ID NO: 962239 - DNA, 15 bp, Homo sapiens
aggatgctgtggctt

SEQ ID NO: 962240 - DNA, 15 bp, Homo sapiens
ggatgctgtggctta

SEQ ID NO: 962241 - DNA, 15 bp, Homo sapiens
gatgctgtggcttac

SEQ ID NO: 962242 - DNA, 15 bp, Homo sapiens
atgctgtggcttact

SEQ ID NO: 962243 - DNA, 15 bp, Homo sapiens
tgctgtggcttactc

SEQ ID NO: 962244 - DNA, 15 bp, Homo sapiens
gctgtggcttactca

SEQ ID NO: 962245 - DNA, 15 bp, Homo sapiens
ctgtggcttactcat

SEQ ID NO: 962246 - DNA, 15 bp, Homo sapiens
tgtggcttactcatt

SEQ ID NO: 962247 - DNA, 15 bp, Homo sapiens
gtggcttactcattt

SEQ ID NO: 962248 - DNA, 15 bp, Homo sapiens
tggcttactcattta

SEQ ID NO: 962249 - DNA, 15 bp, Homo sapiens
ggcttactcatttaa

SEQ ID NO: 962250 - DNA, 15 bp, Homo sapiens
gcttactcatttaat

SEQ ID NO: 962251 - DNA, 15 bp, Homo sapiens
cttactcatttaatc

SEQ ID NO: 962252 - DNA, 15 bp, Homo sapiens
ttactcatttaatca

SEQ ID NO: 962253 - DNA, 15 bp, Homo sapiens
tactcatttaatcac

SEQ ID NO: 962254 - DNA, 15 bp, Homo sapiens
actcatttaatcact

SEQ ID NO: 962255 - DNA, 15 bp, Homo sapiens
ctcatttaatcactt

SEQ ID NO: 962256 - DNA, 15 bp, Homo sapiens
tcatttaatcacttt

SEQ ID NO: 962257 - DNA, 15 bp, Homo sapiens
catttaatcactttg

SEQ ID NO: 962258 - DNA, 15 bp, Homo sapiens
atttaatcactttgg

SEQ ID NO: 962259 - DNA, 15 bp, Homo sapiens
tttaatcactttggg

SEQ ID NO: 962260 - DNA, 15 bp, Homo sapiens
ttaatcactttggga

SEQ ID NO: 962261 - DNA, 15 bp, Homo sapiens
taatcactttgggag

SEQ ID NO: 962262 - DNA, 15 bp, Homo sapiens
aatcactttgggagg

SEQ ID NO: 962263 - DNA, 15 bp, Homo sapiens
atcactttgggaggc

SEQ ID NO: 962264 - DNA, 15 bp, Homo sapiens
tcactttgggaggca

SEQ ID NO: 962265 - DNA, 15 bp, Homo sapiens
cactttgggaggcag

SEQ ID NO: 962266 - DNA, 15 bp, Homo sapiens
actttgggaggcagg

SEQ ID NO: 962267 - DNA, 15 bp, Homo sapiens
ctttgggaggcaggg

SEQ ID NO: 962268 - DNA, 15 bp, Homo sapiens
tttgggaggcagggg

SEQ ID NO: 962269 - DNA, 15 bp, Homo sapiens
ttgggaggcaggggc

SEQ ID NO: 962270 - DNA, 15 bp, Homo sapiens
tgggaggcaggggca

SEQ ID NO: 962271 - DNA, 15 bp, Homo sapiens
gggaggcaggggcag

SEQ ID NO: 962272 - DNA, 15 bp, Homo sapiens
ggaggcaggggcagg

SEQ ID NO: 962273 - DNA, 15 bp, Homo sapiens
gaggcaggggcagga

SEQ ID NO: 962274 - DNA, 15 bp, Homo sapiens
aggcaggggcaggaa

SEQ ID NO: 962275 - DNA, 15 bp, Homo sapiens
ggcaggggcaggaag

SEQ ID NO: 962276 - DNA, 15 bp, Homo sapiens
gcaggggcaggaaga

SEQ ID NO: 962277 - DNA, 15 bp, Homo sapiens
caggggcaggaagat

SEQ ID NO: 962278 - DNA, 15 bp, Homo sapiens
aggggcaggaagatt

SEQ ID NO: 962279 - DNA, 15 bp, Homo sapiens
ggggcaggaagattg

SEQ ID NO: 962280 - DNA, 15 bp, Homo sapiens
gggcaggaagattgc

SEQ ID NO: 962281 - DNA, 15 bp, Homo sapiens
ggcaggaagattgct

SEQ ID NO: 962282 - DNA, 15 bp, Homo sapiens
gcaggaagattgctt

SEQ ID NO: 962283 - DNA, 15 bp, Homo sapiens
caggaagattgcttg

SEQ ID NO: 962284 - DNA, 15 bp, Homo sapiens
aggaagattgcttga

SEQ ID NO: 962285 - DNA, 15 bp, Homo sapiens
gaagattgcttgagg

SEQ ID NO: 962286 - DNA, 15 bp, Homo sapiens
aagattgcttgaggc

SEQ ID NO: 962287 - DNA, 15 bp, Homo sapiens
agattgcttgaggcc

SEQ ID NO: 962288 - DNA, 15 bp, Homo sapiens
gattgcttgaggcca

SEQ ID NO: 962289 - DNA, 15 bp, Homo sapiens
attgcttgaggccaa

SEQ ID NO: 962290 - DNA, 15 bp, Homo sapiens
ttgcttgaggccaag

SEQ ID NO: 962291 - DNA, 15 bp, Homo sapiens
tgcttgaggccaaga

SEQ ID NO: 962292 - DNA, 15 bp, Homo sapiens
gcttgaggccaagag

SEQ ID NO: 962293 - DNA, 15 bp, Homo sapiens
cttgaggccaagagt

SEQ ID NO: 962294 - DNA, 15 bp, Homo sapiens
ttgaggccaagagtt

SEQ ID NO: 962295 - DNA, 15 bp, Homo sapiens
tgaggccaagagttt

SEQ ID NO: 962296 - DNA, 15 bp, Homo sapiens
gaggccaagagtttg

SEQ ID NO: 962297 - DNA, 15 bp, Homo sapiens
aggccaagagtttga

SEQ ID NO: 962298 - DNA, 15 bp, Homo sapiens
ggccaagagtttgag

SEQ ID NO: 962299 - DNA, 15 bp, Homo sapiens
gccaagagtttgaga

SEQ ID NO: 962300 - DNA, 15 bp, Homo sapiens
ccaagagtttgagat

SEQ ID NO: 962301 - DNA, 15 bp, Homo sapiens
caagagtttgagatc

SEQ ID NO: 962302 - DNA, 15 bp, Homo sapiens
aagagtttgagatca

SEQ ID NO: 962303 - DNA, 15 bp, Homo sapiens
agagtttgagatcag

SEQ ID NO: 962304 - DNA, 15 bp, Homo sapiens
gagtttgagatcagc

SEQ ID NO: 962305 - DNA, 15 bp, Homo sapiens
agtttgagatcagct

SEQ ID NO: 962306 - DNA, 15 bp, Homo sapiens
gtttgagatcagctt

SEQ ID NO: 962307 - DNA, 15 bp, Homo sapiens
tttgagatcagcttg

SEQ ID NO: 962308 - DNA, 15 bp, Homo sapiens
ttgagatcagcttgg

SEQ ID NO: 962309 - DNA, 15 bp, Homo sapiens
tgagatcagcttggg

SEQ ID NO: 962310 - DNA, 15 bp, Homo sapiens
gagatcagcttgggc

SEQ ID NO: 962311 - DNA, 15 bp, Homo sapiens
agatcagcttgggca

SEQ ID NO: 962312 - DNA, 15 bp, Homo sapiens
gatcagcttgggcag

SEQ ID NO: 962313 - DNA, 15 bp, Homo sapiens
atcagcttgggcagc

SEQ ID NO: 962314 - DNA, 15 bp, Homo sapiens
tcagcttgggcagca

SEQ ID NO: 962315 - DNA, 15 bp, Homo sapiens
cagcttgggcagcat

SEQ ID NO: 962316 - DNA, 15 bp, Homo sapiens
agcttgggcagcata

SEQ ID NO: 962317 - DNA, 15 bp, Homo sapiens
gcttgggcagcatag

SEQ ID NO: 962318 - DNA, 15 bp, Homo sapiens
cttgggcagcatagc

SEQ ID NO: 962319 - DNA, 15 bp, Homo sapiens
ttgggcagcatagcc

SEQ ID NO: 962320 - DNA, 15 bp, Homo sapiens
tgggcagcatagcca

SEQ ID NO: 962321 - DNA, 15 bp, Homo sapiens
gggcagcatagccag

SEQ ID NO: 962322 - DNA, 15 bp, Homo sapiens
ggcagcatagccaga

SEQ ID NO: 962323 - DNA, 15 bp, Homo sapiens
gcagcatagccagac

SEQ ID NO: 962324 - DNA, 15 bp, Homo sapiens
cagcatagccagacc

SEQ ID NO: 962325 - DNA, 15 bp, Homo sapiens
agcatagccagaccc

SEQ ID NO: 962326 - DNA, 15 bp, Homo sapiens
gcatagccagaccct

SEQ ID NO: 962327 - DNA, 15 bp, Homo sapiens
catagccagaccctg

SEQ ID NO: 962328 - DNA, 15 bp, Homo sapiens
atagccagaccctgt

SEQ ID NO: 962329 - DNA, 15 bp, Homo sapiens
tagccagaccctgtc

SEQ ID NO: 962330 - DNA, 15 bp, Homo sapiens
agccagaccctgtct

SEQ ID NO: 962331 - DNA, 15 bp, Homo sapiens
gccagaccctgtctc

SEQ ID NO: 962332 - DNA, 15 bp, Homo sapiens
ccagaccctgtctct

SEQ ID NO: 962333 - DNA, 15 bp, Homo sapiens
cagaccctgtctcta

SEQ ID NO: 962334 - DNA, 15 bp, Homo sapiens
agaccctgtctctac

SEQ ID NO: 962335 - DNA, 15 bp, Homo sapiens
gaccctgtctctaca

SEQ ID NO: 962336 - DNA, 15 bp, Homo sapiens
accctgtctctacaa

SEQ ID NO: 962337 - DNA, 15 bp, Homo sapiens
ccctgtctctacaaa

SEQ ID NO: 962338 - DNA, 15 bp, Homo sapiens
cctgtctctacaaaa

SEQ ID NO: 962339 - DNA, 15 bp, Homo sapiens
ctgtctctacaaaaa

SEQ ID NO: 962340 - DNA, 15 bp, Homo sapiens
tgtctctacaaaaaa

SEQ ID NO: 962341 - DNA, 15 bp, Homo sapiens
tctctacaaaaaatt

SEQ ID NO: 962342 - DNA, 15 bp, Homo sapiens
ctctacaaaaaattt

SEQ ID NO: 962343 - DNA, 15 bp, Homo sapiens
tctacaaaaaattta

SEQ ID NO: 962344 - DNA, 15 bp, Homo sapiens
ctacaaaaaatttag

SEQ ID NO: 962345 - DNA, 15 bp, Homo sapiens
tacaaaaaatttaga

SEQ ID NO: 962346 - DNA, 15 bp, Homo sapiens
acaaaaaatttagac

SEQ ID NO: 962347 - DNA, 15 bp, Homo sapiens
caaaaaatttagaca

SEQ ID NO: 962348 - DNA, 15 bp, Homo sapiens
aaaaaatttagacag

SEQ ID NO: 962349 - DNA, 15 bp, Homo sapiens
aaaaatttagacaga

SEQ ID NO: 962350 - DNA, 15 bp, Homo sapiens
aaaatttagacagat

SEQ ID NO: 962351 - DNA, 15 bp, Homo sapiens
aaatttagacagatg

SEQ ID NO: 962352 - DNA, 15 bp, Homo sapiens
aatttagacagatgt

SEQ ID NO: 962353 - DNA, 15 bp, Homo sapiens
atttagacagatgtg

SEQ ID NO: 962354 - DNA, 15 bp, Homo sapiens
tttagacagatgtgg

SEQ ID NO: 962355 - DNA, 15 bp, Homo sapiens
ttagacagatgtggt

SEQ ID NO: 962356 - DNA, 15 bp, Homo sapiens
tagacagatgtggtg

SEQ ID NO: 962357 - DNA, 15 bp, Homo sapiens
agacagatgtggtgg

SEQ ID NO: 962358 - DNA, 15 bp, Homo sapiens
gacagatgtggtgga

SEQ ID NO: 962359 - DNA, 15 bp, Homo sapiens
acagatgtggtggaa

SEQ ID NO: 962360 - DNA, 15 bp, Homo sapiens
cagatgtggtggaac

SEQ ID NO: 962361 - DNA, 15 bp, Homo sapiens
agatgtggtggaaca

SEQ ID NO: 962362 - DNA, 15 bp, Homo sapiens
gatgtggtggaacac

SEQ ID NO: 962363 - DNA, 15 bp, Homo sapiens
atgtggtggaacaca

SEQ ID NO: 962364 - DNA, 15 bp, Homo sapiens
tgtggtggaacacat

SEQ ID NO: 962365 - DNA, 15 bp, Homo sapiens
gtggtggaacacatt

SEQ ID NO: 962366 - DNA, 15 bp, Homo sapiens
tggtggaacacattt

SEQ ID NO: 962367 - DNA, 15 bp, Homo sapiens
ggtggaacacatttg

SEQ ID NO: 962368 - DNA, 15 bp, Homo sapiens
gtggaacacatttgt

SEQ ID NO: 962369 - DNA, 15 bp, Homo sapiens
tggaacacatttgta

SEQ ID NO: 962370 - DNA, 15 bp, Homo sapiens
ggaacacatttgtag

SEQ ID NO: 962371 - DNA, 15 bp, Homo sapiens
gaacacatttgtagt

SEQ ID NO: 962372 - DNA, 15 bp, Homo sapiens
aacacatttgtagtc

SEQ ID NO: 962373 - DNA, 15 bp, Homo sapiens
acacatttgtagtcc

SEQ ID NO: 962374 - DNA, 15 bp, Homo sapiens
cacatttgtagtcct

SEQ ID NO: 962375 - DNA, 15 bp, Homo sapiens
acatttgtagtccta

SEQ ID NO: 962376 - DNA, 15 bp, Homo sapiens
catttgtagtcctag

SEQ ID NO: 962377 - DNA, 15 bp, Homo sapiens
atttgtagtcctagc

SEQ ID NO: 962378 - DNA, 15 bp, Homo sapiens
tttgtagtcctagct

SEQ ID NO: 962379 - DNA, 15 bp, Homo sapiens
ttgtagtcctagcta

SEQ ID NO: 962380 - DNA, 15 bp, Homo sapiens
tgtagtcctagctat

SEQ ID NO: 962381 - DNA, 15 bp, Homo sapiens
gtagtcctagctatt

SEQ ID NO: 962382 - DNA, 15 bp, Homo sapiens
tagtcctagctatta

SEQ ID NO: 962383 - DNA, 15 bp, Homo sapiens
agtcctagctattag

SEQ ID NO: 962384 - DNA, 15 bp, Homo sapiens
gtcctagctattagg

SEQ ID NO: 962385 - DNA, 15 bp, Homo sapiens
tcctagctattaggg

SEQ ID NO: 962386 - DNA, 15 bp, Homo sapiens
cctagctattaggga

SEQ ID NO: 962387 - DNA, 15 bp, Homo sapiens
ctagctattagggag

SEQ ID NO: 962388 - DNA, 15 bp, Homo sapiens
tagctattagggagg

SEQ ID NO: 962389 - DNA, 15 bp, Homo sapiens
agctattagggaggc

SEQ ID NO: 962390 - DNA, 15 bp, Homo sapiens
gctattagggaggct

SEQ ID NO: 962391 - DNA, 15 bp, Homo sapiens
ctattagggaggctg

SEQ ID NO: 962392 - DNA, 15 bp, Homo sapiens
tattagggaggctgt

SEQ ID NO: 962393 - DNA, 15 bp, Homo sapiens
attagggaggctgtg

SEQ ID NO: 962394 - DNA, 15 bp, Homo sapiens
ttagggaggctgtgg

SEQ ID NO: 962395 - DNA, 15 bp, Homo sapiens
tagggaggctgtggt

SEQ ID NO: 962396 - DNA, 15 bp, Homo sapiens
agggaggctgtggtg

SEQ ID NO: 962397 - DNA, 15 bp, Homo sapiens
gggaggctgtggtgg

SEQ ID NO: 962398 - DNA, 15 bp, Homo sapiens
ggaggctgtggtggg

SEQ ID NO: 962399 - DNA, 15 bp, Homo sapiens
gaggctgtggtggga

SEQ ID NO: 962400 - DNA, 15 bp, Homo sapiens
aggctgtggtgggag

SEQ ID NO: 962401 - DNA, 15 bp, Homo sapiens
ggctgtggtgggagg

SEQ ID NO: 962402 - DNA, 15 bp, Homo sapiens
gctgtggtgggagga

SEQ ID NO: 962403 - DNA, 15 bp, Homo sapiens
ctgtggtgggaggat

SEQ ID NO: 962404 - DNA, 15 bp, Homo sapiens
tgtggtgggaggatc

SEQ ID NO: 962405 - DNA, 15 bp, Homo sapiens
gtggtgggaggatca

SEQ ID NO: 962406 - DNA, 15 bp, Homo sapiens
tggtgggaggatcat

SEQ ID NO: 962407 - DNA, 15 bp, Homo sapiens
ggtgggaggatcatt

SEQ ID NO: 962408 - DNA, 15 bp, Homo sapiens
gtgggaggatcattt

SEQ ID NO: 962409 - DNA, 15 bp, Homo sapiens
tgggaggatcatttg

SEQ ID NO: 962410 - DNA, 15 bp, Homo sapiens
gggaggatcatttga

SEQ ID NO: 962411 - DNA, 15 bp, Homo sapiens
ggaggatcatttgag

SEQ ID NO: 962412 - DNA, 15 bp, Homo sapiens
gaggatcatttgagc

SEQ ID NO: 962413 - DNA, 15 bp, Homo sapiens
aggatcatttgagcc

SEQ ID NO: 962414 - DNA, 15 bp, Homo sapiens
ggatcatttgagccc

SEQ ID NO: 962415 - DNA, 15 bp, Homo sapiens
gatcatttgagccca

SEQ ID NO: 962416 - DNA, 15 bp, Homo sapiens
atcatttgagcccag

SEQ ID NO: 962417 - DNA, 15 bp, Homo sapiens
tcatttgagcccagg

SEQ ID NO: 962418 - DNA, 15 bp, Homo sapiens
catttgagcccagga

SEQ ID NO: 962419 - DNA, 15 bp, Homo sapiens
atttgagcccaggag

SEQ ID NO: 962420 - DNA, 15 bp, Homo sapiens
tttgagcccaggagt

SEQ ID NO: 962421 - DNA, 15 bp, Homo sapiens
ttgagcccaggagtt

SEQ ID NO: 962422 - DNA, 15 bp, Homo sapiens
tgagcccaggagttt

SEQ ID NO: 962423 - DNA, 15 bp, Homo sapiens
gagcccaggagtttg

SEQ ID NO: 962424 - DNA, 15 bp, Homo sapiens
agcccaggagtttga

SEQ ID NO: 962425 - DNA, 15 bp, Homo sapiens
gcccaggagtttgat

SEQ ID NO: 962426 - DNA, 15 bp, Homo sapiens
cccaggagtttgatg

SEQ ID NO: 962427 - DNA, 15 bp, Homo sapiens
ccaggagtttgatgt

SEQ ID NO: 962428 - DNA, 15 bp, Homo sapiens
caggagtttgatgtt

SEQ ID NO: 962429 - DNA, 15 bp, Homo sapiens
aggagtttgatgtta

SEQ ID NO: 962430 - DNA, 15 bp, Homo sapiens
ggagtttgatgttac

SEQ ID NO: 962431 - DNA, 15 bp, Homo sapiens
gagtttgatgttaca

SEQ ID NO: 962432 - DNA, 15 bp, Homo sapiens
agtttgatgttacat

SEQ ID NO: 962433 - DNA, 15 bp, Homo sapiens
gtttgatgttacatt

SEQ ID NO: 962434 - DNA, 15 bp, Homo sapiens
tttgatgttacattg

SEQ ID NO: 962435 - DNA, 15 bp, Homo sapiens
ttgatgttacattgc

SEQ ID NO: 962436 - DNA, 15 bp, Homo sapiens
tgatgttacattgcc

SEQ ID NO: 962437 - DNA, 15 bp, Homo sapiens
gatgttacattgccc

SEQ ID NO: 962438 - DNA, 15 bp, Homo sapiens
atgttacattgccct

SEQ ID NO: 962439 - DNA, 15 bp, Homo sapiens
tgttacattgcccta

SEQ ID NO: 962440 - DNA, 15 bp, Homo sapiens
gttacattgccctat

SEQ ID NO: 962441 - DNA, 15 bp, Homo sapiens
ttacattgccctatt

SEQ ID NO: 962442 - DNA, 15 bp, Homo sapiens
tacattgccctattg

SEQ ID NO: 962443 - DNA, 15 bp, Homo sapiens
acattgccctattgc

SEQ ID NO: 962444 - DNA, 15 bp, Homo sapiens
cattgccctattgca

SEQ ID NO: 962445 - DNA, 15 bp, Homo sapiens
attgccctattgcac

SEQ ID NO: 962446 - DNA, 15 bp, Homo sapiens
ttgccctattgcact

SEQ ID NO: 962447 - DNA, 15 bp, Homo sapiens
tgccctattgcactc

SEQ ID NO: 962448 - DNA, 15 bp, Homo sapiens
gccctattgcactcc

SEQ ID NO: 962449 - DNA, 15 bp, Homo sapiens
ccctattgcactcca

SEQ ID NO: 962450 - DNA, 15 bp, Homo sapiens
cctattgcactccag

SEQ ID NO: 962451 - DNA, 15 bp, Homo sapiens
ctattgcactccaga

SEQ ID NO: 962452 - DNA, 15 bp, Homo sapiens
tattgcactccagac

SEQ ID NO: 962453 - DNA, 15 bp, Homo sapiens
attgcactccagact

SEQ ID NO: 962454 - DNA, 15 bp, Homo sapiens
ttgcactccagactg

SEQ ID NO: 962455 - DNA, 15 bp, Homo sapiens
tgcactccagactgg

SEQ ID NO: 962456 - DNA, 15 bp, Homo sapiens
gcactccagactggg

SEQ ID NO: 962457 - DNA, 15 bp, Homo sapiens
cactccagactgggc

SEQ ID NO: 962458 - DNA, 15 bp, Homo sapiens
actccagactgggca

SEQ ID NO: 962459 - DNA, 15 bp, Homo sapiens
ctccagactgggcaa

SEQ ID NO: 962460 - DNA, 15 bp, Homo sapiens
tccagactgggcaac

SEQ ID NO: 962461 - DNA, 15 bp, Homo sapiens
ccagactgggcaaca

SEQ ID NO: 962462 - DNA, 15 bp, Homo sapiens
cagactgggcaacag

SEQ ID NO: 962463 - DNA, 15 bp, Homo sapiens
agactgggcaacaga

SEQ ID NO: 962464 - DNA, 15 bp, Homo sapiens
gactgggcaacagag

SEQ ID NO: 962465 - DNA, 15 bp, Homo sapiens
actgggcaacagagt

SEQ ID NO: 962466 - DNA, 15 bp, Homo sapiens
ctgggcaacagagtg

SEQ ID NO: 962467 - DNA, 15 bp, Homo sapiens
tgggcaacagagtga

SEQ ID NO: 962468 - DNA, 15 bp, Homo sapiens
gggcaacagagtgag

SEQ ID NO: 962469 - DNA, 15 bp, Homo sapiens
ggcaacagagtgaga

SEQ ID NO: 962470 - DNA, 15 bp, Homo sapiens
gcaacagagtgagac

SEQ ID NO: 962471 - DNA, 15 bp, Homo sapiens
caacagagtgagacc

SEQ ID NO: 962472 - DNA, 15 bp, Homo sapiens
aacagagtgagacct

SEQ ID NO: 962473 - DNA, 15 bp, Homo sapiens
acagagtgagacctg

SEQ ID NO: 962474 - DNA, 15 bp, Homo sapiens
cagagtgagacctgt

SEQ ID NO: 962475 - DNA, 15 bp, Homo sapiens
agagtgagacctgtc

SEQ ID NO: 962476 - DNA, 15 bp, Homo sapiens
gagtgagacctgtct

SEQ ID NO: 962477 - DNA, 15 bp, Homo sapiens
agtgagacctgtctc

SEQ ID NO: 962478 - DNA, 15 bp, Homo sapiens
gtgagacctgtctct

SEQ ID NO: 962479 - DNA, 15 bp, Homo sapiens
tgagacctgtctcta

SEQ ID NO: 962480 - DNA, 15 bp, Homo sapiens
gagacctgtctctaa

SEQ ID NO: 962481 - DNA, 15 bp, Homo sapiens
agacctgtctctaaa

SEQ ID NO: 962482 - DNA, 15 bp, Homo sapiens
gacctgtctctaaaa

SEQ ID NO: 962483 - DNA, 15 bp, Homo sapiens
acctgtctctaaaat

SEQ ID NO: 962484 - DNA, 15 bp, Homo sapiens
cctgtctctaaaata

SEQ ID NO: 962485 - DNA, 15 bp, Homo sapiens
ctgtctctaaaataa

SEQ ID NO: 962486 - DNA, 15 bp, Homo sapiens
tgtctctaaaataat

SEQ ID NO: 962487 - DNA, 15 bp, Homo sapiens
gtctctaaaataata

SEQ ID NO: 962488 - DNA, 15 bp, Homo sapiens
tctctaaaataataa

SEQ ID NO: 962489 - DNA, 15 bp, Homo sapiens
ctctaaaataataat

SEQ ID NO: 962490 - DNA, 15 bp, Homo sapiens
tctaaaataataata

SEQ ID NO: 962491 - DNA, 15 bp, Homo sapiens
ctaaaataataataa

SEQ ID NO: 962492 - DNA, 15 bp, Homo sapiens
taaaataataataat

SEQ ID NO: 962493 - DNA, 15 bp, Homo sapiens
aaaataataataatg

SEQ ID NO: 962494 - DNA, 15 bp, Homo sapiens
aaataataataatga

SEQ ID NO: 962495 - DNA, 15 bp, Homo sapiens
aataataataatgat

SEQ ID NO: 962496 - DNA, 15 bp, Homo sapiens
taataataatgataa

SEQ ID NO: 962497 - DNA, 15 bp, Homo sapiens
aataataatgataat

SEQ ID NO: 962498 - DNA, 15 bp, Homo sapiens
ataataatgataatg

SEQ ID NO: 962499 - DNA, 15 bp, Homo sapiens
taataatgataatga

SEQ ID NO: 962500 - DNA, 15 bp, Homo sapiens
aataatgataatgat

SEQ ID NO: 962501 - DNA, 15 bp, Homo sapiens
ataatgataatgata

SEQ ID NO: 962502 - DNA, 15 bp, Homo sapiens
taatgataatgataa

SEQ ID NO: 962503 - DNA, 15 bp, Homo sapiens
aatgataatgataaa

SEQ ID NO: 962504 - DNA, 15 bp, Homo sapiens
atgataatgataaat

SEQ ID NO: 962505 - DNA, 15 bp, Homo sapiens
tgataatgataaatg

SEQ ID NO: 962506 - DNA, 15 bp, Homo sapiens
gataatgataaatgg

SEQ ID NO: 962507 - DNA, 15 bp, Homo sapiens
ataatgataaatggt

SEQ ID NO: 962508 - DNA, 15 bp, Homo sapiens
taatgataaatggtg

SEQ ID NO: 962509 - DNA, 15 bp, Homo sapiens
aatgataaatggtgt

SEQ ID NO: 962510 - DNA, 15 bp, Homo sapiens
atgataaatggtgtt

SEQ ID NO: 962511 - DNA, 15 bp, Homo sapiens
tgataaatggtgtta

SEQ ID NO: 962512 - DNA, 15 bp, Homo sapiens
gataaatggtgttag

SEQ ID NO: 962513 - DNA, 15 bp, Homo sapiens
ataaatggtgttagg

SEQ ID NO: 962514 - DNA, 15 bp, Homo sapiens
taaatggtgttaggc

SEQ ID NO: 962515 - DNA, 15 bp, Homo sapiens
aaatggtgttaggct

SEQ ID NO: 962516 - DNA, 15 bp, Homo sapiens
aatggtgttaggctc

SEQ ID NO: 962517 - DNA, 15 bp, Homo sapiens
atggtgttaggctct

SEQ ID NO: 962518 - DNA, 15 bp, Homo sapiens
tggtgttaggctctg

SEQ ID NO: 962519 - DNA, 15 bp, Homo sapiens
ggtgttaggctctgt

SEQ ID NO: 962520 - DNA, 15 bp, Homo sapiens
gtgttaggctctgtg

SEQ ID NO: 962521 - DNA, 15 bp, Homo sapiens
tgttaggctctgtgc

SEQ ID NO: 962522 - DNA, 15 bp, Homo sapiens
gttaggctctgtgcc

SEQ ID NO: 962523 - DNA, 15 bp, Homo sapiens
ttaggctctgtgcct

SEQ ID NO: 962524 - DNA, 15 bp, Homo sapiens
taggctctgtgccta

SEQ ID NO: 962525 - DNA, 15 bp, Homo sapiens
aggctctgtgcctaa

SEQ ID NO: 962526 - DNA, 15 bp, Homo sapiens
ggctctgtgcctaag

SEQ ID NO: 962527 - DNA, 15 bp, Homo sapiens
gctctgtgcctaagt

SEQ ID NO: 962528 - DNA, 15 bp, Homo sapiens
ctctgtgcctaagta

SEQ ID NO: 962529 - DNA, 15 bp, Homo sapiens
tctgtgcctaagtat

SEQ ID NO: 962530 - DNA, 15 bp, Homo sapiens
ctgtgcctaagtata

SEQ ID NO: 962531 - DNA, 15 bp, Homo sapiens
tgtgcctaagtatat

SEQ ID NO: 962532 - DNA, 15 bp, Homo sapiens
gtgcctaagtatatt

SEQ ID NO: 962533 - DNA, 15 bp, Homo sapiens
tgcctaagtatattt

SEQ ID NO: 962534 - DNA, 15 bp, Homo sapiens
gcctaagtatatttt

SEQ ID NO: 962535 - DNA, 15 bp, Homo sapiens
cctaagtatattttt

SEQ ID NO: 962536 - DNA, 15 bp, Homo sapiens
ctaagtatatttttc

SEQ ID NO: 962537 - DNA, 15 bp, Homo sapiens
taagtatatttttca

SEQ ID NO: 962538 - DNA, 15 bp, Homo sapiens
aagtatatttttcac

SEQ ID NO: 962539 - DNA, 15 bp, Homo sapiens
agtatatttttcaca

SEQ ID NO: 962540 - DNA, 15 bp, Homo sapiens
gtatatttttcacat

SEQ ID NO: 962541 - DNA, 15 bp, Homo sapiens
tatatttttcacata

SEQ ID NO: 962542 - DNA, 15 bp, Homo sapiens
atatttttcacatag

SEQ ID NO: 962543 - DNA, 15 bp, Homo sapiens
tatttttcacatagg

SEQ ID NO: 962544 - DNA, 15 bp, Homo sapiens
atttttcacataggc

SEQ ID NO: 962545 - DNA, 15 bp, Homo sapiens
tttttcacataggct

SEQ ID NO: 962546 - DNA, 15 bp, Homo sapiens
ttttcacataggctg

SEQ ID NO: 962547 - DNA, 15 bp, Homo sapiens
tttcacataggctgg

SEQ ID NO: 962548 - DNA, 15 bp, Homo sapiens
ttcacataggctggg

SEQ ID NO: 962549 - DNA, 15 bp, Homo sapiens
tcacataggctgggt

SEQ ID NO: 962550 - DNA, 15 bp, Homo sapiens
cacataggctgggta

SEQ ID NO: 962551 - DNA, 15 bp, Homo sapiens
acataggctgggtaa

SEQ ID NO: 962552 - DNA, 15 bp, Homo sapiens
cataggctgggtaaa

SEQ ID NO: 962553 - DNA, 15 bp, Homo sapiens
ataggctgggtaaag

SEQ ID NO: 962554 - DNA, 15 bp, Homo sapiens
taggctgggtaaagt

SEQ ID NO: 962555 - DNA, 15 bp, Homo sapiens
aggctgggtaaagtg

SEQ ID NO: 962556 - DNA, 15 bp, Homo sapiens
ggctgggtaaagtgg

SEQ ID NO: 962557 - DNA, 15 bp, Homo sapiens
gctgggtaaagtggc

SEQ ID NO: 962558 - DNA, 15 bp, Homo sapiens
ctgggtaaagtggct

SEQ ID NO: 962559 - DNA, 15 bp, Homo sapiens
tgggtaaagtggctc

SEQ ID NO: 962560 - DNA, 15 bp, Homo sapiens
gggtaaagtggctca

SEQ ID NO: 962561 - DNA, 15 bp, Homo sapiens
ggtaaagtggctcat

SEQ ID NO: 962562 - DNA, 15 bp, Homo sapiens
gtaaagtggctcatg

SEQ ID NO: 962563 - DNA, 15 bp, Homo sapiens
taaagtggctcatgc

SEQ ID NO: 962564 - DNA, 15 bp, Homo sapiens
aaagtggctcatgcc

SEQ ID NO: 962565 - DNA, 15 bp, Homo sapiens
aagtggctcatgcct

SEQ ID NO: 962566 - DNA, 15 bp, Homo sapiens
agtggctcatgcctg

SEQ ID NO: 962567 - DNA, 15 bp, Homo sapiens
gtggctcatgcctgc

SEQ ID NO: 962568 - DNA, 15 bp, Homo sapiens
tggctcatgcctgca

SEQ ID NO: 962569 - DNA, 15 bp, Homo sapiens
ggctcatgcctgcaa

SEQ ID NO: 962570 - DNA, 15 bp, Homo sapiens
gctcatgcctgcaat

SEQ ID NO: 962571 - DNA, 15 bp, Homo sapiens
ctcatgcctgcaatc

SEQ ID NO: 962572 - DNA, 15 bp, Homo sapiens
tcatgcctgcaatcc

SEQ ID NO: 962573 - DNA, 15 bp, Homo sapiens
catgcctgcaatccc

SEQ ID NO: 962574 - DNA, 15 bp, Homo sapiens
atgcctgcaatccca

SEQ ID NO: 962575 - DNA, 15 bp, Homo sapiens
tgcctgcaatcccag

SEQ ID NO: 962576 - DNA, 15 bp, Homo sapiens
gcctgcaatcccagc

SEQ ID NO: 962577 - DNA, 15 bp, Homo sapiens
cctgcaatcccagca

SEQ ID NO: 962578 - DNA, 15 bp, Homo sapiens
ctgcaatcccagcac

SEQ ID NO: 962579 - DNA, 15 bp, Homo sapiens
tgcaatcccagcact

SEQ ID NO: 962580 - DNA, 15 bp, Homo sapiens
gcaatcccagcactt

SEQ ID NO: 962581 - DNA, 15 bp, Homo sapiens
caatcccagcacttt

SEQ ID NO: 962582 - DNA, 15 bp, Homo sapiens
ggaggccaaggcagc

SEQ ID NO: 962583 - DNA, 15 bp, Homo sapiens
gaggccaaggcagca

SEQ ID NO: 962584 - DNA, 15 bp, Homo sapiens
aggccaaggcagcag

SEQ ID NO: 962585 - DNA, 15 bp, Homo sapiens
ggccaaggcagcagg

SEQ ID NO: 962586 - DNA, 15 bp, Homo sapiens
gccaaggcagcagga

SEQ ID NO: 962587 - DNA, 15 bp, Homo sapiens
ccaaggcagcaggag

SEQ ID NO: 962588 - DNA, 15 bp, Homo sapiens
caaggcagcaggagc

SEQ ID NO: 962589 - DNA, 15 bp, Homo sapiens
aaggcagcaggagca

SEQ ID NO: 962590 - DNA, 15 bp, Homo sapiens
aggcagcaggagcat

SEQ ID NO: 962591 - DNA, 15 bp, Homo sapiens
ggcagcaggagcatt

SEQ ID NO: 962592 - DNA, 15 bp, Homo sapiens
gcagcaggagcattt

SEQ ID NO: 962593 - DNA, 15 bp, Homo sapiens
cagcaggagcatttg

SEQ ID NO: 962594 - DNA, 15 bp, Homo sapiens
agcaggagcatttga

SEQ ID NO: 962595 - DNA, 15 bp, Homo sapiens
gcaggagcatttgag

SEQ ID NO: 962596 - DNA, 15 bp, Homo sapiens
caggagcatttgagg

SEQ ID NO: 962597 - DNA, 15 bp, Homo sapiens
aggagcatttgaggc

SEQ ID NO: 962598 - DNA, 15 bp, Homo sapiens
ggagcatttgaggcc

SEQ ID NO: 962599 - DNA, 15 bp, Homo sapiens
gagcatttgaggcca

SEQ ID NO: 962600 - DNA, 15 bp, Homo sapiens
agcatttgaggccag

SEQ ID NO: 962601 - DNA, 15 bp, Homo sapiens
gcatttgaggccagg

SEQ ID NO: 962602 - DNA, 15 bp, Homo sapiens
catttgaggccagga

SEQ ID NO: 962603 - DNA, 15 bp, Homo sapiens
atttgaggccaggag

SEQ ID NO: 962604 - DNA, 15 bp, Homo sapiens
tttgaggccaggagt

SEQ ID NO: 962605 - DNA, 15 bp, Homo sapiens
ttgaggccaggagtc

SEQ ID NO: 962606 - DNA, 15 bp, Homo sapiens
tgaggccaggagtca

SEQ ID NO: 962607 - DNA, 15 bp, Homo sapiens
gaggccaggagtcaa

SEQ ID NO: 962608 - DNA, 15 bp, Homo sapiens
aggccaggagtcaaa

SEQ ID NO: 962609 - DNA, 15 bp, Homo sapiens
ggccaggagtcaaag

SEQ ID NO: 962610 - DNA, 15 bp, Homo sapiens
gccaggagtcaaaga

SEQ ID NO: 962611 - DNA, 15 bp, Homo sapiens
ccaggagtcaaagac

SEQ ID NO: 962612 - DNA, 15 bp, Homo sapiens
caggagtcaaagacc

SEQ ID NO: 962613 - DNA, 15 bp, Homo sapiens
aggagtcaaagacca

SEQ ID NO: 962614 - DNA, 15 bp, Homo sapiens
ggagtcaaagaccag

SEQ ID NO: 962615 - DNA, 15 bp, Homo sapiens
gagtcaaagaccagc

SEQ ID NO: 962616 - DNA, 15 bp, Homo sapiens
agtcaaagaccagcc

SEQ ID NO: 962617 - DNA, 15 bp, Homo sapiens
gtcaaagaccagcct

SEQ ID NO: 962618 - DNA, 15 bp, Homo sapiens
tcaaagaccagcctt

SEQ ID NO: 962619 - DNA, 15 bp, Homo sapiens
caaagaccagccttg

SEQ ID NO: 962620 - DNA, 15 bp, Homo sapiens
aaagaccagccttga

SEQ ID NO: 962621 - DNA, 15 bp, Homo sapiens
aagaccagccttgag

SEQ ID NO: 962622 - DNA, 15 bp, Homo sapiens
agaccagccttgaga

SEQ ID NO: 962623 - DNA, 15 bp, Homo sapiens
gaccagccttgagag

SEQ ID NO: 962624 - DNA, 15 bp, Homo sapiens
accagccttgagaga

SEQ ID NO: 962625 - DNA, 15 bp, Homo sapiens
ccagccttgagagac

SEQ ID NO: 962626 - DNA, 15 bp, Homo sapiens
cagccttgagagacc

SEQ ID NO: 962627 - DNA, 15 bp, Homo sapiens
agccttgagagaccc

SEQ ID NO: 962628 - DNA, 15 bp, Homo sapiens
gccttgagagacccc

SEQ ID NO: 962629 - DNA, 15 bp, Homo sapiens
ccttgagagacccca

SEQ ID NO: 962630 - DNA, 15 bp, Homo sapiens
cttgagagaccccat

SEQ ID NO: 962631 - DNA, 15 bp, Homo sapiens
ttgagagaccccatc

SEQ ID NO: 962632 - DNA, 15 bp, Homo sapiens
tgagagaccccatct

SEQ ID NO: 962633 - DNA, 15 bp, Homo sapiens
gagagaccccatctc

SEQ ID NO: 962634 - DNA, 15 bp, Homo sapiens
agagaccccatctct

SEQ ID NO: 962635 - DNA, 15 bp, Homo sapiens
gagaccccatctcta

SEQ ID NO: 962636 - DNA, 15 bp, Homo sapiens
agaccccatctctac

SEQ ID NO: 962637 - DNA, 15 bp, Homo sapiens
gaccccatctctacc

SEQ ID NO: 962638 - DNA, 15 bp, Homo sapiens
accccatctctacca

SEQ ID NO: 962639 - DNA, 15 bp, Homo sapiens
ccccatctctaccag

SEQ ID NO: 962640 - DNA, 15 bp, Homo sapiens
cccatctctaccaga

SEQ ID NO: 962641 - DNA, 15 bp, Homo sapiens
ccatctctaccagaa

SEQ ID NO: 962642 - DNA, 15 bp, Homo sapiens
catctctaccagaaa

SEQ ID NO: 962643 - DNA, 15 bp, Homo sapiens
atctctaccagaaaa

SEQ ID NO: 962644 - DNA, 15 bp, Homo sapiens
tctctaccagaaaaa

SEQ ID NO: 962645 - DNA, 15 bp, Homo sapiens
ctctaccagaaaaaa

SEQ ID NO: 962646 - DNA, 15 bp, Homo sapiens
tctaccagaaaaaaa

SEQ ID NO: 962647 - DNA, 15 bp, Homo sapiens
ctaccagaaaaaaaa

SEQ ID NO: 962648 - DNA, 15 bp, Homo sapiens
taccagaaaaaaaaa

SEQ ID NO: 962649 - DNA, 15 bp, Homo sapiens
accagaaaaaaaaaa

SEQ ID NO: 962650 - DNA, 15 bp, Homo sapiens
ccagaaaaaaaaaaa

SEQ ID NO: 962651 - DNA, 15 bp, Homo sapiens
cagaaaaaaaaaaaa

SEQ ID NO: 962652 - DNA, 15 bp, Homo sapiens
agaaaaaaaaaaaaa

SEQ ID NO: 962653 - DNA, 15 bp, Homo sapiens
gaaaaaaaaaaaaaa

SEQ ID NO: 962654 - DNA, 15 bp, Homo sapiens
aaaaaaaaaaaaaag

SEQ ID NO: 962655 - DNA, 15 bp, Homo sapiens
aaaaaaaaaaaagaa

SEQ ID NO: 962656 - DNA, 15 bp, Homo sapiens
aaaaaaaaaaagaaa

SEQ ID NO: 962657 - DNA, 15 bp, Homo sapiens
aaaaaaaaaagaaac

SEQ ID NO: 962658 - DNA, 15 bp, Homo sapiens
aaaaaaaaagaaaca

SEQ ID NO: 962659 - DNA, 15 bp, Homo sapiens
aaaaaaaagaaacaa

SEQ ID NO: 962660 - DNA, 15 bp, Homo sapiens
aaaaaaagaaacaat

SEQ ID NO: 962661 - DNA, 15 bp, Homo sapiens
aaaaaagaaacaatt

SEQ ID NO: 962662 - DNA, 15 bp, Homo sapiens
aaaaagaaacaatta

SEQ ID NO: 962663 - DNA, 15 bp, Homo sapiens
aaaagaaacaattag

SEQ ID NO: 962664 - DNA, 15 bp, Homo sapiens
aaagaaacaattagc

SEQ ID NO: 962665 - DNA, 15 bp, Homo sapiens
aagaaacaattagct

SEQ ID NO: 962666 - DNA, 15 bp, Homo sapiens
agaaacaattagctg

SEQ ID NO: 962667 - DNA, 15 bp, Homo sapiens
gaaacaattagctgg

SEQ ID NO: 962668 - DNA, 15 bp, Homo sapiens
aaacaattagctggg

SEQ ID NO: 962669 - DNA, 15 bp, Homo sapiens
aacaattagctgggt

SEQ ID NO: 962670 - DNA, 15 bp, Homo sapiens
acaattagctgggtg

SEQ ID NO: 962671 - DNA, 15 bp, Homo sapiens
caattagctgggtgt

SEQ ID NO: 962672 - DNA, 15 bp, Homo sapiens
aattagctgggtgtg

SEQ ID NO: 962673 - DNA, 15 bp, Homo sapiens
attagctgggtgtga

SEQ ID NO: 962674 - DNA, 15 bp, Homo sapiens
ttagctgggtgtgat

SEQ ID NO: 962675 - DNA, 15 bp, Homo sapiens
tagctgggtgtgatt

SEQ ID NO: 962676 - DNA, 15 bp, Homo sapiens
agctgggtgtgattg

SEQ ID NO: 962677 - DNA, 15 bp, Homo sapiens
gctgggtgtgattgt

SEQ ID NO: 962678 - DNA, 15 bp, Homo sapiens
ctgggtgtgattgtg

SEQ ID NO: 962679 - DNA, 15 bp, Homo sapiens
tgggtgtgattgtgc

SEQ ID NO: 962680 - DNA, 15 bp, Homo sapiens
gggtgtgattgtgca

SEQ ID NO: 962681 - DNA, 15 bp, Homo sapiens
ggtgtgattgtgcac

SEQ ID NO: 962682 - DNA, 15 bp, Homo sapiens
gtgtgattgtgcaca

SEQ ID NO: 962683 - DNA, 15 bp, Homo sapiens
tgtgattgtgcacac

SEQ ID NO: 962684 - DNA, 15 bp, Homo sapiens
gtgattgtgcacacc

SEQ ID NO: 962685 - DNA, 15 bp, Homo sapiens
tgattgtgcacacct

SEQ ID NO: 962686 - DNA, 15 bp, Homo sapiens
gattgtgcacacctg

SEQ ID NO: 962687 - DNA, 15 bp, Homo sapiens
attgtgcacacctgt

SEQ ID NO: 962688 - DNA, 15 bp, Homo sapiens
ttgtgcacacctgta

SEQ ID NO: 962689 - DNA, 15 bp, Homo sapiens
tgtgcacacctgtag

SEQ ID NO: 962690 - DNA, 15 bp, Homo sapiens
gtgcacacctgtagt

SEQ ID NO: 962691 - DNA, 15 bp, Homo sapiens
tgcacacctgtagtc

SEQ ID NO: 962692 - DNA, 15 bp, Homo sapiens
gcacacctgtagtcc

SEQ ID NO: 962693 - DNA, 15 bp, Homo sapiens
cacacctgtagtcct

SEQ ID NO: 962694 - DNA, 15 bp, Homo sapiens
acacctgtagtccta

SEQ ID NO: 962695 - DNA, 15 bp, Homo sapiens
cacctgtagtcctag

SEQ ID NO: 962696 - DNA, 15 bp, Homo sapiens
acctgtagtcctagc

SEQ ID NO: 962697 - DNA, 15 bp, Homo sapiens
cctgtagtcctagct

SEQ ID NO: 962698 - DNA, 15 bp, Homo sapiens
ctgtagtcctagcta

SEQ ID NO: 962699 - DNA, 15 bp, Homo sapiens
tgtagtcctagctac

SEQ ID NO: 962700 - DNA, 15 bp, Homo sapiens
gtagtcctagctact

SEQ ID NO: 962701 - DNA, 15 bp, Homo sapiens
tagtcctagctactc

SEQ ID NO: 962702 - DNA, 15 bp, Homo sapiens
agtcctagctactcg

SEQ ID NO: 962703 - DNA, 15 bp, Homo sapiens
gtcctagctactcgg

SEQ ID NO: 962704 - DNA, 15 bp, Homo sapiens
tcctagctactcggg

SEQ ID NO: 962705 - DNA, 15 bp, Homo sapiens
cctagctactcggga

SEQ ID NO: 962706 - DNA, 15 bp, Homo sapiens
ctagctactcgggag

SEQ ID NO: 962707 - DNA, 15 bp, Homo sapiens
tagctactcgggagg

SEQ ID NO: 962708 - DNA, 15 bp, Homo sapiens
tcgggaggcagaggt

SEQ ID NO: 962709 - DNA, 15 bp, Homo sapiens
cgggaggcagaggtg

SEQ ID NO: 962710 - DNA, 15 bp, Homo sapiens
gggaggcagaggtgg

SEQ ID NO: 962711 - DNA, 15 bp, Homo sapiens
ggaggcagaggtggg

SEQ ID NO: 962712 - DNA, 15 bp, Homo sapiens
gaggcagaggtgggc

SEQ ID NO: 962713 - DNA, 15 bp, Homo sapiens
aggcagaggtgggca

SEQ ID NO: 962714 - DNA, 15 bp, Homo sapiens
ggcagaggtgggcag

SEQ ID NO: 962715 - DNA, 15 bp, Homo sapiens
gcagaggtgggcaga

SEQ ID NO: 962716 - DNA, 15 bp, Homo sapiens
cagaggtgggcagat

SEQ ID NO: 962717 - DNA, 15 bp, Homo sapiens
agaggtgggcagatc

SEQ ID NO: 962718 - DNA, 15 bp, Homo sapiens
gaggtgggcagatca

SEQ ID NO: 962719 - DNA, 15 bp, Homo sapiens
aggtgggcagatcac

SEQ ID NO: 962720 - DNA, 15 bp, Homo sapiens
ggtgggcagatcact

SEQ ID NO: 962721 - DNA, 15 bp, Homo sapiens
gtgggcagatcactt

SEQ ID NO: 962722 - DNA, 15 bp, Homo sapiens
tgggcagatcacttg

SEQ ID NO: 962723 - DNA, 15 bp, Homo sapiens
gggcagatcacttga

SEQ ID NO: 962724 - DNA, 15 bp, Homo sapiens
gcagatcacttgagc

SEQ ID NO: 962725 - DNA, 15 bp, Homo sapiens
cagatcacttgagcc

SEQ ID NO: 962726 - DNA, 15 bp, Homo sapiens
agatcacttgagccc

SEQ ID NO: 962727 - DNA, 15 bp, Homo sapiens
gatcacttgagccca

SEQ ID NO: 962728 - DNA, 15 bp, Homo sapiens
atcacttgagcccag

SEQ ID NO: 962729 - DNA, 15 bp, Homo sapiens
tcacttgagcccagg

SEQ ID NO: 962730 - DNA, 15 bp, Homo sapiens
cacttgagcccagga

SEQ ID NO: 962731 - DNA, 15 bp, Homo sapiens
acttgagcccaggag

SEQ ID NO: 962732 - DNA, 15 bp, Homo sapiens
cttgagcccaggagt

SEQ ID NO: 962733 - DNA, 15 bp, Homo sapiens
gcccaggagtttgag

SEQ ID NO: 962734 - DNA, 15 bp, Homo sapiens
cccaggagtttgagg

SEQ ID NO: 962735 - DNA, 15 bp, Homo sapiens
ccaggagtttgaggt

SEQ ID NO: 962736 - DNA, 15 bp, Homo sapiens
caggagtttgaggtt

SEQ ID NO: 962737 - DNA, 15 bp, Homo sapiens
aggagtttgaggtta

SEQ ID NO: 962738 - DNA, 15 bp, Homo sapiens
ggagtttgaggttat

SEQ ID NO: 962739 - DNA, 15 bp, Homo sapiens
gagtttgaggttata

SEQ ID NO: 962740 - DNA, 15 bp, Homo sapiens
agtttgaggttatag

SEQ ID NO: 962741 - DNA, 15 bp, Homo sapiens
gtttgaggttatagt

SEQ ID NO: 962742 - DNA, 15 bp, Homo sapiens
tttgaggttatagtg

SEQ ID NO: 962743 - DNA, 15 bp, Homo sapiens
ttgaggttatagtga

SEQ ID NO: 962744 - DNA, 15 bp, Homo sapiens
tgaggttatagtgag

SEQ ID NO: 962745 - DNA, 15 bp, Homo sapiens
gaggttatagtgagc

SEQ ID NO: 962746 - DNA, 15 bp, Homo sapiens
aggttatagtgagct

SEQ ID NO: 962747 - DNA, 15 bp, Homo sapiens
ggttatagtgagcta

SEQ ID NO: 962748 - DNA, 15 bp, Homo sapiens
gttatagtgagctaa

SEQ ID NO: 962749 - DNA, 15 bp, Homo sapiens
ttatagtgagctaag

SEQ ID NO: 962750 - DNA, 15 bp, Homo sapiens
tatagtgagctaaga

SEQ ID NO: 962751 - DNA, 15 bp, Homo sapiens
atagtgagctaagat

SEQ ID NO: 962752 - DNA, 15 bp, Homo sapiens
tagtgagctaagatt

SEQ ID NO: 962753 - DNA, 15 bp, Homo sapiens
agtgagctaagattg

SEQ ID NO: 962754 - DNA, 15 bp, Homo sapiens
gtgagctaagattgt

SEQ ID NO: 962755 - DNA, 15 bp, Homo sapiens
tgagctaagattgtg

SEQ ID NO: 962756 - DNA, 15 bp, Homo sapiens
gagctaagattgtgc

SEQ ID NO: 962757 - DNA, 15 bp, Homo sapiens
agctaagattgtgcc

SEQ ID NO: 962758 - DNA, 15 bp, Homo sapiens
gctaagattgtgcca

SEQ ID NO: 962759 - DNA, 15 bp, Homo sapiens
ctaagattgtgccac

SEQ ID NO: 962760 - DNA, 15 bp, Homo sapiens
taagattgtgccact

SEQ ID NO: 962761 - DNA, 15 bp, Homo sapiens
aagattgtgccactg

SEQ ID NO: 962762 - DNA, 15 bp, Homo sapiens
ccactgcactccaga

SEQ ID NO: 962763 - DNA, 15 bp, Homo sapiens
cactgcactccagac

SEQ ID NO: 962764 - DNA, 15 bp, Homo sapiens
actgcactccagact

SEQ ID NO: 962765 - DNA, 15 bp, Homo sapiens
ctgcactccagactg

SEQ ID NO: 962766 - DNA, 15 bp, Homo sapiens
actgggcaacagagc

SEQ ID NO: 962767 - DNA, 15 bp, Homo sapiens
ctgggcaacagagca

SEQ ID NO: 962768 - DNA, 15 bp, Homo sapiens
tgggcaacagagcaa

SEQ ID NO: 962769 - DNA, 15 bp, Homo sapiens
gggcaacagagcaag

SEQ ID NO: 962770 - DNA, 15 bp, Homo sapiens
ggcaacagagcaaga

SEQ ID NO: 962771 - DNA, 15 bp, Homo sapiens
gcaacagagcaagac

SEQ ID NO: 962772 - DNA, 15 bp, Homo sapiens
caacagagcaagact

SEQ ID NO: 962773 - DNA, 15 bp, Homo sapiens
aacagagcaagactg

SEQ ID NO: 962774 - DNA, 15 bp, Homo sapiens
acagagcaagactgt

SEQ ID NO: 962775 - DNA, 15 bp, Homo sapiens
cagagcaagactgtc

SEQ ID NO: 962776 - DNA, 15 bp, Homo sapiens
agagcaagactgtct

SEQ ID NO: 962777 - DNA, 15 bp, Homo sapiens
gagcaagactgtctc

SEQ ID NO: 962778 - DNA, 15 bp, Homo sapiens
agcaagactgtctca

SEQ ID NO: 962779 - DNA, 15 bp, Homo sapiens
gcaagactgtctcaa

SEQ ID NO: 962780 - DNA, 15 bp, Homo sapiens
caagactgtctcaaa

SEQ ID NO: 962781 - DNA, 15 bp, Homo sapiens
aagactgtctcaaac

SEQ ID NO: 962782 - DNA, 15 bp, Homo sapiens
agactgtctcaaaca

SEQ ID NO: 962783 - DNA, 15 bp, Homo sapiens
gactgtctcaaacaa

SEQ ID NO: 962784 - DNA, 15 bp, Homo sapiens
actgtctcaaacaaa

SEQ ID NO: 962785 - DNA, 15 bp, Homo sapiens
ctgtctcaaacaaaa

SEQ ID NO: 962786 - DNA, 15 bp, Homo sapiens
tgtctcaaacaaaaa

SEQ ID NO: 962787 - DNA, 15 bp, Homo sapiens
gtctcaaacaaaaac

SEQ ID NO: 962788 - DNA, 15 bp, Homo sapiens
tctcaaacaaaaaca

SEQ ID NO: 962789 - DNA, 15 bp, Homo sapiens
ctcaaacaaaaacaa

SEQ ID NO: 962790 - DNA, 15 bp, Homo sapiens
tcaaacaaaaacaaa

SEQ ID NO: 962791 - DNA, 15 bp, Homo sapiens
caaacaaaaacaaac

SEQ ID NO: 962792 - DNA, 15 bp, Homo sapiens
aaacaaaaacaaaca

SEQ ID NO: 962793 - DNA, 15 bp, Homo sapiens
aacaaaaacaaacaa

SEQ ID NO: 962794 - DNA, 15 bp, Homo sapiens
acaaaaacaaacaaa

SEQ ID NO: 962795 - DNA, 15 bp, Homo sapiens
caaaaacaaacaaac

SEQ ID NO: 962796 - DNA, 15 bp, Homo sapiens
aaaaacaaacaaaca

SEQ ID NO: 962797 - DNA, 15 bp, Homo sapiens
aaaacaaacaaacaa

SEQ ID NO: 962798 - DNA, 15 bp, Homo sapiens
aacaaacaaacaaaa

SEQ ID NO: 962799 - DNA, 15 bp, Homo sapiens
acaaacaaacaaaaa

SEQ ID NO: 962800 - DNA, 15 bp, Homo sapiens
caaacaaacaaaaag

SEQ ID NO: 962801 - DNA, 44065 bp, Homo sapiens
ctgggcgcgtcttgatgctctcaacagcagccctcaggattctggactgtgggtcccacattccagataccatttgtggaatggctggatgagaaaattgcaacagcaccctcatttccagttaagggaatgggcgggttaccaggaggtttgacactcttgaagggaggttaacaactgatgcaagaagtaaggaatcgtgtttgagtgcacagactctagcataaacacacctaccttcaatttctagctctgtcactgtcactctgaatttatcacctctgcaacaggactaaagccatctaatttattggattgtgaggactaaaagataatatatgtgggcatttagcacagtgtcgggcacatagttcgccttccgtaaccagtagtaaccagtaacagcggggagctgttagtaactatagggctgaggggtgggggaaggaagcagttactaaaaccaggcgagagcgagagcggtagctgtggctgtacgagagagtaaccaactggaaccgtgtcgttcagtagaggaaagcaagcaatgccaacttttcaccaagtaaggtgagattctatagttgtagccagtgctgagacgtcagcccaaagcagggacagagtggagaagacccacctctctgttctcccagctctgatatccagctggggtcttccgctggctggatccaccaggaagccagaagacagtggagctaggtctgtgtagtctgtagaggtcagcctactaggcacaatgcctggagggagaaatagaaaatatccagcacaccatttcttttttttgtttgtttttacactttaagctctagggtacatgtgcacaacgtgcaggtttgttacctatgtatacatgtgccgtgttggtgtgttgcacccattaagttgtcatttacattaggtgtatctcctaatgctatccctcccccctccccccaccccacaacaggccccggtgtgtgatgtcccccttcctgtgtccaagtgttctcattgttcaattcccacctatgagtgagaacatgcggtgtttggttttttgtccttgcgatagtttgctgagaatgatggtttccagcttcatccacgtccctacaaaggacatgaactcatcattttttatggctgcatagtattccagcacaccatttctacaaccttgggtttattgtgtttggaagcctagatccaaaggaaggaatgctgccactagaagaccccgtcactgaattgaattgaatttcaattcattgattcgaaagctgaaactgccctctggtcactttgattcctcacagtgacagaatggtatgattcatcccaaataccaaaaggaaattgggttacatctatatattgagggcaagaagaactatgcatgacacctggagattcactgggcacttcttaatactgccgtgtgccataataatgattatcagataactgaagtaatgcagaaatttcagatcatgaagaaattaaagtgttgaagcataccagataaaaaaatcctgatctacctaggtgttggcatagggcaggggaaacatacataagtaaatgagtaggaagctatgattattaattttagccttgcaacaagctctagaggcaggaattatagtagctctccatttaaaatgttaattacttcttccctgactctcttttcctattaccctgcataaagagtagtggtggagataaatattacaatttagtttctgggtgagaatgtgcctgaactgacatcccctcaaggcaatatggcagctgatgaggcttgttaaggaaaatcaaagctggacaatagctgtagcagtaaaaatagatttttattcagcaacttttgaaatagggggaaagagaccttggtaaagaactgggctcaattctgaatacagtaaggataagtggggatttatagccgaggagcaggttgtgtggatgggggtggggtccgtggatggaaaattactaagaagagacagcaagggtaggggaaatccttgctaaactgacctaacaggattcttgctaaaggtaggccagggtaagcagacatcacctgggggctggtgggggtaaggaatttgatcagatattgagagtggtcaaacattcagggtgggaagatcctctctaaactgacttagcaggattcttgccaacactgattctgcaaggatgaacactgcagcccaaggtcaatatctaatcaaggagatggcttagaggagcctgactaaagtttggtcgaggagaaatcttgtcagactctgtcattctcatatgtaagggatgagctgctcttcatctgagcaaaggaaaagaataaattctgggtgacaaaacaattagactgtctaggttttctgtttgccttccatcatattcattctcctcacttccctgccctgttctataccccaaagctgacctctttggacggcaccacctgggctctcctcagctggtttccatttgagtttggacagcgggaggcattcagggagatgggaggcaggaggaaaaagacatcagggtatattttctctgttctttctctgtttggggctgagtatctggtggtggttgtgtttctccacaattgcagctcttggcaagcagtcccttctccatggctccagctccatgggctctggaaacacttttctcctttgctatgtagcctagagagagcgcagtcttcctgctgttgctagactctggatgactcaactggatggttctcttagtcatactcctttaagtagtgtcttcactaatatctctttaatcaaaccaactgagtaaaattctgattcctgatggatacatgttaaaccgaaaacacacattataaattttcttgtatgtatgatgtttttcataattttaaaacataagtgaaaaaagtgaccatagaaaaatatgcccaggaaattgaaaaaaaaagtcttggtatagatattggacacattttataaaatgtggagtaagagggttaaaggaaatttatttcagaatcaaatggcatataactttaactggtatgtgaattattttcagttgtatgaatttgtgaatatatatgtgtacatttttatgcatatatataaatatgtgttttatatcatcttgcattataacataaggatttttatgttgctacattgcatttatatttaccatttttaacagctaaaggattttcaataagtgtgtatgtaacaacttccattgctggatatttctcagtatatatatgtatatatacatatgtgtgtatacatatatatatacatatgtgtatatatacatatgtatgtatatgtatatgtacgtatgtatgtgtatatatacatacatgtgtgtatacgcatatatacatatgtgtatatatacacgtatatacatgtgtgtatatatacacgtatatacgtgtgtatatacacacgtatatacatgtgtgtatatacatgtgtgtatatacacacgtatatacgtgtgtatatacacacgtatatacatgtgtgtatatacacacgtatatacatgtgtgtatatatacgtgtgtatatatataaacacatatatatatgcacatgcatatgtatacactgagttaagtagtataaatattttagagaaaattgatgtaaaatcctcaactcatttgatgctccctatcccaggacagtaaaaattgcccaatatttccttggacctccataaagaagcagtttttcaaaaaataaagtgtttggaagtttaagatgtgcctagcagtgtctccttttaacagagatgctttcacaaggatttgaatttccccattgagctgggaaccaggtttagccaagaacttcggtctgtgaaggactgcaaatagttgcacagtgtggggctgaggctagaacctccttaatattaaaccattctgggatggtgctccccaaattctggattttaaccttcactccaatcctggggcacctctgtagcttgggcatgacctggacacaagctttgtgtaagccttctttggacttcatccattcctcaacggtgacaccatgtggcagtgtaatataatggcatcagtggactcagatcctgttctctccctacctagagatttttaagattaagatatgtaattcacaaccataaaatgtaccaccttaaattgtacaatttattggtttttcatacattcaaaaagttgtacaaccaccaccattatctaattccataacattttcttcaccctagaaagaaacctcatacctattagcagccactccccaaactccccattctccccattcccccagtttctggggacccctaacctactttttgtttttatagatttgcctattctggacattttatataaatggaagcctacaatctatggccttttgtgtctggctccttttacttagtatgatcaaggttcatccaagttgtagcatgtaccagtacttcatttctttttatgtctgattaatgttccaatgtatggatataccacattttgtttatccattcaaaattgtggggcatttggattgttcccattttttttgctgtcataaataatgctgctaagtttttgtatgaacgtatgttttcaattctcttgggtatatatgtaaaagcagaattgctgggtcatatggtaactctgcatttaactttttggagttgaacaaatacaccatgccagcagtgaataaggatgctgatttcactatacctttgcacaatagttaagagcataaacactggaaccagatgtctgggttcgaatcccagctgtgctatctcctagctgtgtcgtttagacaagttactaaagctctgtgcctcagtgtccacatctctaaaatagaggcaataatagtaccttccttacaggattgttgtaagatttaaatgagctaatatgtgtaaatcacaaaaatagggtctgacattttttaaatggtatatgttttaccattgctgctattttaatctttattataattattgtgttttgttttgttaatttgatagctttaaaaggtaatgatacagtttattgatgtttgttatgaaaaggagtaattggagaagataaaaatgtaaggggtaataaagtcaaggaaggttttttgagctgaaaatgattatatttcagagtgtaacctgaataaaactgaggcttcacatggctcagtccatgcatgtaatagcattctaagaaaacataaactgaatgaaaacgtaaactgtgaagcatgaagaataatgagggtcttcaccttatgctttctgaaggagtccccgcaaatgcttcacacagcatattgaacaagaaactcctaaaatcttctctagatatttctctctttcctattttttcccactgacagtagcaccttatatctatcctcctcaactgcgaggtcactacagcactatactaagcccctgttaacttccttctcttgaaacccatgcaactcacatgatcctattctcagcctgtgaatctcagcctcctgcaatcctgtgaaattcaacttggtctcctactctgaatgtgtataaaaataacagagaacagttcctgaactctgatgagtaaaatgatctaccttattacatgtggtattataataaataaatatacattaatttctttccccattttccagcacacagctcctaaaagacttgtaacttcctgagtgataggtatgctaggtaaattttttgttctatgtgaccttcgactccagttcttgacacagagctcctgatcccttggaatttccatagtgataggagcatctttcattctcctgaagtaacttggtgggcttctggatgggagctggtcacaagaatgaccaagccatgattagaagcttggaactttcacctcctacctcatcctgtgaaaaggggagaggggctgaagattgaggtaacaattgctgatgtgtacatgatgaagtccccataaaaatccctaaatgaggggatttggagaggttctggaggtgctgaacgtggaggtgcttggagggtggcctatccagttcatctccagagttcacacactcacctaagtgctgatgcccacctgatggcatttctcagcctccgaggctttccttctttgtacttagtcaaaagaatgctctaatccagtctatcattgatgggcatttgggttggttccaagtctttgctattgtgaatagtgccgcaacaaacatacgtgtgcatgtgtctttatagtagcatgatttataatcctttgggtatatacccagtaatgagatcgctgggtcaaatggtatttctagttctagatccttgaggaattaccacactgtcttccacaatgcttgaactagtttacagtcccaccaacagtgtaaaagtgttcctatttctccacatcctctccagcacctgttgtttcctgactttttaatgatcgccattctaactggtgtgagatggtatctcattgtggttttgatttgcatttgtctgatggccagtgatgatgagcattttttcatgtgtctgttggctacataaatgtcctcttttgagaaatgtctgttcatatccttcgcccactttgtgatgggattgtttttctcttgtaaatttgtttgagttctttgtagattctggatattagccctttgtcagatgagtagatagattaaggaaatatggcacatatacaccatggaatactatgcagccataaaaaaggatgagttcatgttctttgtaaggacatggatgaagctggaaaccatcattctcagcaaactattgcaaaaacaaaaaaccaaacaccgcgtgttctcactcataggtgggaattgaataatgagaacacttggacacatggtggggaacatcacacactggaacctgtcgtggggttgggggaggggggagggaaagcattaggagatatacctaatgtaaatgacgagttaatgggtgcagcacaccaacatggcacatgtatacatatgtaacaaacctgtacgttgtgcacatgcaccctagaacttaaagtataataaaaaaaaagaattctctaatccatggaataagtgttgaataatgaaattctgatattgtgtttaatgatatactgcactattcagaatatttgtacttaccttcgagtctctcttctaaaagatgccaaacccccttacacgaagtagaaaacgtcaaatatctaaatattgtatcttaataatgttcaaacattaaatgtttcaaatattccaatgtttagaatcataaaaaaaaaacataagaattgttttaaaaaaatgctctaaacttaacccacagcccttcttgtgaatttctccaaaataactggagcctggttaatagcaagcctcaggagcatggctttgaaatactgtcaacatactgccaccaatttctccatttccagaaaagactgtaattttttctttagaaatcatgattttcttgattggtttagactggtttccagtagttcacttaccaggaaagtttctgttttgtttttagacttccttaatttagagaatgcacataatattgaaactggctatagtatcctactctggaaaagcatattaaatacatacaaatatatatttaatgtatataaatacaaatatatatgtaatgtatataaatatatacaaatatatgtgtgtgtgagtatgtatcttccttgatttccttttatccattaccactaatatccctcaataagtcctactggttctacttccaaattatattttgaacatgctctacagaaacagctcctaaagattttccagcctccatgaatgtaagtcccctccatattccattcttcgtaccacagctagagtggtatttttagaacattcatcaggcaactaccctgctctaagccatctggtggcttttcattgcaagtagaatgcaacctctcccctagtcctcaaggctcttcatgatatgatttgaccctcccatccctcttcctcactctctacccacaattctcttcttttcatccttggaacttgccaagcttgttccacccgtatagtctttgtacctgtctcttcccatggccaaatatgctcttttggcagatctttccatggttatcttcatgattcatttctcagatatcacctcttacacatttcctgaccaccataactaaaggaacctcacacctgtgcactataccatattgctctgacttgtcttcttttttcttgtataggacttttcggtatctgaaatttttatttattaatttctgtttggaacatatctctctcagagcagaaaggtcttgctgtcctttcaaggaaatggtggggaaaagaaaaattctcattcttttatgatgagcctacaaaaataaatgggttaaatgggttcttgatccagttcaccttaagtgtggttaccaaaggaaatgattcacaaggtgactatttcatttgtgtgacactcacttatgttattagttctaggatattaaatcaagaaatattttctaggatcccctgaaagagtatctctcaattgtaaactttatctttagtggcattttgttgatttattgagattccctagatttaaaatatttaccacagagtgttccccaactcccacagcatttatccaggccataactacttatgtctggatttatgaacttattgtgggtgggggaaattgttggaggtctcatctttgttttaaagtacctgtggcatggggtctgccctttgaaggcaagagctcttcacctgcccagctcttccccagcttaggacaggaaggagagagacacagtgtgagcgagagaagcatctgattgtgagtgtcagatgaggacagctgctactctctggtcacccatacatgttaattacccctgtcatttaaaccattgttttgtgtaactagaacaaagtattctttccacgaagtctgtttgacacgagacacatataggatgtgagtctatgacaagggtaggggcaacaaatgtgaggggttggatggaaacagaggaagagaaatgagcattgcatagggcagtggtttaaaaccctacatgatcaaaaatagaacctggagacaaatcttgatattgtctttatacataataaaatgcattttaaaatattcgatgcaaacaaagcagtttgtcatgtcttttgttttgagtctctttagtatatgctgcttttgaagatcaagaacatttactggaaattgctccttcaccaggaatttgctcacatctcttcaggtccacttataagatcttgaaatcagtcctcctgagatcagtacaaacgaggatcatctctcctgctttagaagcaaaagtggcaagcagggtagacagaggcagaaggaaggatggtactgataaatcagccaaattagatggaagaaagcgaattacagctgtacttgcaaagaactcttggctcattttttcccttaaatattaaatcactagttttcaaaacttcaaatgtgaacatgactcacctgaggacaatgttaaaatgttgacctccaagaccctgcccccaagtttggatcccaggcagaaccctggaatctgtattttaaacattaaccccaagtcgagtgtaatgcaagtaaccatcagagacactctgagaaacagcacattggcaatgatgaatttatatgtctaaaaatgaatagagtagatgttacatgaataggaagtggtggtattcaagatgaccatagtatctagctcttcagccctggctccccactgctcttctcccatctcagcacttctccatctatttcgtccaaataaaaaaattcacacagagtttcaggacttaaccccccactcattaaccatctgttttgctttacatatttttctgaggtaataaaatttctctttttctaaacacagcctgtttttcaatctccgggtagttgatcaattgtatgggaaaatgaatggctgaagggtagaaacaggtgggaaagatgaacaaaaacacgaatcctcacattactaatacgcaaatcactgagcagcaagctgagcaaataccctcaattcccatcagcaactttagagaaaggcaaattccgtttgcctcattgatcatttaggtagaccctgaacactgctttcataaaacaaaaacaaaatacccatccccagtttaaaaaattattcatagatcatccaggccatctaggaggatatgatttaatcctggctacttggtaaattatttgcccaagttaactcagctagttagtggtagatggctctgaagccagttgtttttttttgttttgttttttgcagacctcaagagtcatgatgaactagcagatcataaagtttatgccctgggtcttgaccatttttagaaaaataaaacattaaatgaaaatatcagagggcattgcagatagtagatctaagtattttttcatgaaacttgttgtacatgtgtgtgtcatacacagactatatatatgcagtacctgtaaactgtattgccacataatgtctatattttcctagaggtcacagtcaccaaagttgggaagtcacccaacttcgggaactttgggaagtcacccaaacttacagtcaccaaaattgctctattctactatgtgacctcaaaagtgatttgaaagaaggaacatctgagctgggcccaaaccctattgcaattttattggggccaaagagaactccatgctcctgccaaatcaaggcagtgtcagcctcaataatttcccagataaaaataaaaatctgtgatacaatcagaatgtgaaaattcttattttggaagcaaatgtcataaccaatgcaagggctatctcaatattcattcattatgcagtattttgaactgcagttgaaatgaataagaaggaaaggcaaacaacgaagagtccaatttctcaatttagaaaaagagaaaaaaaagaaaagggagcacacaggcacggtggctcaagcctgtaatatcagcactttggcggatcacttgaggtcaaggagttcgagaaaagagagcacctagaagttcagcgcgggataatacttaagtaaattatgacaccatcgtctgtcatcttgggcccattcactaacccaaagctttcaaaagggctttcttaaccctcacctagaataggcttccgcagccttaatccttagggtggcagaatatcagggaccctgagcattcttaaaagatgtagctcgggatgggaagttcttttaatgacaaagcaaatgaagtttcattatgtcgaggaactttgaggaagtcacagaatccacgatttaaaaatatatttcctattatacacccatacacacacacacacacctactttctagaataaaaaccaaagccatatgggtctgctgctgactttttatatgttgtagagttatatcaagttatgtcaagatgttcagtcaccttgaagaggcttttatcagaaagggggacgcctttctgataaaggttaaggggtaaccttaagctcttacccctctgaaggtaaaatcaaggtgcgttcagatgttggcttgttgtaaatttctttttttattaataacatactaaatgtggatttgctttaatcttcgaaactcttcccggtgaaaatctcatttacaagaaaactggactgacatgtttcactttctgtttcatttctatacacagctttattcctaggacaccaacactagatacctaaactgaaagcttccgccgatttcaccgaaggtcaggaaagtccaacgcccggcaaactggatttgctgccttgggcagaggtgggcgggaccccgcctccgggcctggcgcaacgctgagcagctggcgcgtcccgcgcggccccagttctgcgcagcttcccgaggctccgcaccagccgcgcttctgtccgcctgcaggtagggagcgttgttcctccgcgggtgcccacggcccagtatctctggctagctcgctgggcactttaggacggagggtctctacaccctttctttgggatggagagaggagaagggaaagggaacgcgatggtctagggggcagtagagccaattacctgttggggttaataagaacaggcaatgcatctggccttcctccaggcgcgattcagttttgctctaaaaataatttatacctctaaaaataaataagataggtagtataggataggtagtcattcttatgcgactgtgtgttcagaatatagctctgatgctaggctggaggtctggacacgggtccaagtccaccgccagctgcttgctagtaacatgacttgtgtaagttatcccagctgcagcatctaagtaagtctcttcctgcgctaagcaggtccaggatccctgaacggaatttatttgctctgtccattctgagaacccaaaggagtcctaaaagaggaatggaggagcctaagaataaaaatagtataataaaacatttcttagacacattgaccttggcctatgtcaaagttcagtctgggtttgtcttataacacaaggagtaaaagtaccattgttctacctctttttttaatacttgaaaaaaatttactgtggatgcttttctatgaattaaataaccttctaaaaaatgttttcattgctgcattcgattagattgggtaactaaatgaaattaattcctcactgttgggtataaaggttatttacagtggttctgtcttagccattcactgaactcattgcatatatatctctggaatattgctgattgtttccttcaagtaaacttagaagtgtaactacttagtcaaagagcctgaatattttaaaggccttttgaagaaaactgaaaatgctttccagaaaggatgtatcagttgacaatgacagtcgtcaacagtatttaaggagaactatgatactctgaagaaaaacttagcctttctcagtaaaagtaggtaggcagaggccacatgacagcagttagagtgtggtcttcaaggaagtcacagaaatactgtggggaattgaaaccccatgtggaaaatgtacaagagtgtctcagtgtgactgagaaggaggttgggcatggggtttcatggagtttaataaagtttggtcacttagtagaggtttaataaatcaactgtcttaatctttgatcctacttaagaattttttttttgtttttgtagagatggggctcttgttatgttgcccaggctgttctcgaactcctagcctcaggcgatcctccctcctcaggctccagaagtcctgggattactggcgggagccaccatgcaggcctcttgctcctacttttgagaaaggaagtttaaccggttttttttgtctttttttttttttttttgagacagagtctcactctgttgcccatgctggagtgcagtggtgcaatctcagctcactgcctcccgggttcaagtgattctcctgcctcagcctcccgagtagctgggactacaggcacctgccaccacgcccagctaatttttgtatttttagtagaaatggggtttcaccatattggccaggctgatctcgaactcctgacctcaggtgatccgcctgcctcggcctcccaaagtgctgggattacaggcatgagccactgctcctggctgcttaactttttctctatctcatcctcctacccatcctacccttggaagatagagaagtagtattagttccatagtgttatactgggcttcccccagggacaaacccacttccccaacctgaatgagccatcacttcttccccagtttacatttcattgctctttaaatgtctccattcggatatgggaattcacatatggtcataattcttacctgaagaagatgtcagtcttcttctcttagaccaactgccctgatatgaggtttagaggttaaagaacatgtgtgtatttacatgatctttgtattctgccttttcgtccctcactaatgacagctgcaccccaaggaaatggagctgtggaagagagggtttgataagaaattaagtaaatattggatctaatccatcaccctccaggaagcctttattactcctaaaaatttcaaccaaattcattaaaggacaagaactccaccagagtaggccataaacattggcaaaattagttgtaatccatgactagatttaatgtccctttgttttattcccatatggttataatgctttgcttggcattaggggtattttaagttttcttctgcctagtaagtgaatttgtgtttataatacaataatcataaaatatcacattaatattttataactgtacagttataaaatattttataagtaatatttatattttataagtaatattttataactgtacagttaactctggcccaaggaaaagatagtctgatagatgctgcagccccattttagcaaatgtgacctcacaggcctgaatgccatcgctattccacatctacaggatagacggaaaggaaagaaataaaaaaataggtacctaacactggcaagaggatgatgactcatgttatttcacttaacctttttatcttttaacatgaaggactcatacaggttgataagaaaccagtgacataaacagaccaaaaaatgatcagatctttcaaattagcaaaaaaataatattttttaaacaatgggtgaaaatacagtgtaacagtaccaattatcaacatgtgttgagaaccagaaaaatgttctttttctttgatcagcaacactatttgggaaaatctatcctcagggcctagcctggggccctggcacacagtaggcactcaacgaatatttgctgaacacacaaatacttatgatattttaaaaaattggcaacaatctgatacctaacaatagagggattaaatattatggaactgttaaataagatgcttatgaataccatgcagtaagatgggcaatatttatgccataagctttaatgaaacaaatgggtattaaatgtatgataaggttataaattactttttaaaagattacagggaaaaaaattgaaagatatacactgaaatgttttttgctcacagtggtgacaaggtttctcagcactggcactgttgacgttttaggctgtatgtctttgctgtgggaggctggcctgtgcactgcagggtgtttggcagcactcttggcctctgcccctagatagcaatagcagtcctccctcaaccagcccaattttgacaaccaaaaatgtttccaggcatcaccagatgctccctgggtgagagtgatgaaatagtaggggattttccccttcttttcttattttctgtaattccattatattactttaataataaagaaaaaaacataaaaaataaacgaatgttattattctacgtcagtttggatgtttggactccattttggggttctttccattatatcacttggtctgctaaacattctacggtttggtaaggtgaagtgattcatgaaattttggttttatttttttcctgatactaaaaataaaacattctttcacttggaaatttggacacagaacaccaaaaaaaatccataatctcatctctctttttctgtcttttccttccttttttccctttaaaaacaataaagagtgaaacctacctgttctccctctaatttaattcctaaatataatcactgtcaatatcttggacatttcctgtgtctaaacacacacacacacttttttttttcagcaaaagtggatttctgctacatgtagtgttctgcaacttactttctatgtgtttacaaaatcagtacatgtacatatgctgaattcagtccttaatggtattatattttgtgaatataccaaaatttgtttaaccacttagacaatctaggatattctcagtttgctgttatgagcaatgctcttcctttacatatacagacatatatatatatatgtgtgtgtgtgtgtttttgttttagtaggatagatttctaggagagggtgaaaggtcttatgacatccgcatttacgattgtaataggaagtatcaaagtgccccctaaagaaaaaaatcctcccattagtgggtaagaaagcctatttgttcatatcttcacaaacactaaatattagaaatatttacaattgtggtcaagctcataagtgaaaatggtatttcatatcttatattttttattgtgagattgaacatctttcatatgtttacatgtcacctgtatttcttattctctgaactatatgttatgacctttcactttttttcctcatgggttatgtgtagtttgtatagttgtcttattgattgttaggagctatttatatattaggaacattaatctcctgtcttatatatacgtggcatcgattagttgatcatttgtgagttcatgtctgtatacaaagattggagaggcactaagagggaaaacttacctctttcttatcaaagtttgtaaatatatgtataacagaagagggagaaaatattaataaatgcacagattggctgaaatagagtataaatcttttactcccctacttcaacataaactgcaaaaggagagtgacttttctttcactctgacttccgtattcctcatgcttaaaatagtgcctagcacagaagaggtgctcaatcagtgtttgctaaacgaaataattagtcacatttcaagcaggatgactaaatgaagaatagaatctaggcagatactctggaagagtggctgtgagtcattcatatcttagtatgaattagtcaaatccaactctctccccttcccactccccactgttagtagaagaatctgtttattgagagaatagatttataatttagaataagtgagaggggcagaagaggagattttgaaggatggcacctgaaggaggactagcatggctgagacagtgaagtggaagccttgaatagctaaagggtaagatgaaagtatttagctgtagggggaaaaagcattgacaggttggaaaagtaaaagtcagattctccttgctctgaaattttgtacagggcaggttctactaggtatgttacaatgcagaaaaaacatgaaataattgagaggaatttggtgcaatattatcttcttggcttcttttgagtgggcagatttttttcacggcctgtaactataataaatttgaaacttctcatcttttagtaacttttttcacttaagtttatgtggctgtgggcaatggaatgaagatattgaacttccaattccctgttgggtttccacaattacaagtcaatcatgactggttattagaagactatttcagttagaaccaccaagtcccatattgtcatattgtatgtttaattattaagtgaagcagtcttcttttcgtgttttccataattagggcattccagaaagatgaggatatttgctgtctttatattcatgacctactggcatttgctgaacggtaagacaccaaatccttccattaggttctatattttaaatattttaaccatgagtttaaaactaaaatgatcatttaaaatgcatgcaattttcttatagagagaacattctattctttcttctactttacacaatggcaaagtcttctttctactttacgcaatgataaagttacctgtgtcattttgtaaaaatatagagaatatagacaaattgaaagacacaaaataatctattacccatttcccagggttaactactgaaaatatctggggaaatggcctgtatgtatacatttatttgtttgctttcaacaaggccaagatcctttgatctttcagtcttggttgctctgtgacatgcctttcctgatgaggatactttaaggaagaattgtaagatacatggaaaatgtcaggctaacacagtactggcatcaccctgtgctctttcctgaactccataccaatgtacttcttgccagaaaactgatcaaaagtttagggaagtaaaaagagatgactgttagaatctaccattccctctatgtaggaagcaaataggtgtcctgtcaaaggacattctggggatgtctacatgaaaccaactctccctggttgtaaggactccatctccatataatatttatacagtaatatatgtttataaattgtgggggcaacttgtttagctaattttattattctgctattgggacactgtgtctcagcatgagatatagtgtcccaaaacatatttcaagcccattggataaaatatgtgtttagcaagttcttaaatataatgataacataaccgaccagataaagtgatttataaacgctgtgccaattttgtaaatgtttcgaggaattttcccttttctgaagattgtccttctttctttttagcatttactgtcacggttcccaaggacctatatgtggtagagtatggtagcaatatgacaattgaatgcaaattcccagtagaaaaacaattagacctggctgcactaattgtctattgggaaatggaggataagaacattattcaatttgtgcatggagaggaagacctgaaggttcagcatagtagctacagacagagggcccggctgttgaaggaccagctctccctgggaaatgctgcacttcagatcacagatgtgaaattgcaggatgcaggggtgtaccgctgcatgatcagctatggtggtgccgactacaagcgaattactgtgaaagtcaatggtaagaattattatagatgagaggcctgatctttattgaaaacatattccaagtgttgaagacttttcattcttgtaagtccatacttattttcaaacagaacagcatagtctgttcattcattcattcaattcatgaattcattcacataattatccaatttcttgagcacctatttgatagtcactggaaatccagagacaaacaacacagagccatgttctacagtatgtacagttttccaaaaagaatttctagtctttacttttttattacaaatggaatacgtatacttgcaaataattcagatactgtggaagagatcaaatgaattgcaaaagtgtccctcctcccttcaccactatctcccatggcatgcagagagagtaaccattatttgtgtgtccctccagaaatttttttattcaactactatttttttattttattaggtccgtcagttttccttttttgagcctctctatatcaaatgcaaataaatatattcagaacaaaccccactgtaaggttcacattaaaaaagacttgaagtcaccctatgaagacaaaaaataatcacattaagtgtgaaagaacctattcttccagtacaggataagccatacttactgggcatatattcatcttgaaaatctatactgatgttgtcttggggaattgaaaaggaactaggagtgttagttcctcggtattgacccacagttatgttatcaggtcacttgagttcaaagttttgtgttggcactagctaagtaaaggaaaacacctctgctttcattgttgagtttcacagaattgagagctgaaaggatcccaggcaggagcagctaatccaaactcccacaaagaacaaaaatcccccagaggatcttctgttcttatatttcctgcaatggcgtccctgtcatatcccacaatggcctccctgccatttggatatcccttccatatcctgttgaaattactccctaatagtaagctgaaatctgcccctctagttgtagtcttgggattatttcatttacatgatgaccttttaatatttgactagaattaaatcatctccccttggtctttccattcctgggctaactaccatcaatctgagggctaacaatacaagtagaaaaagtatacatttgtcactgatcactgatcaattattaatcaatgatcactgataactataaactcaaaaacaaaatcatgtggggattaagagaaatgtatcagttttatgttgtatttctggtccctgatactggctcaggtaatgccactattgtcaagaagataccacttgtaaagtagatttaattttcattatattttaccatatgcttctccattcatgacatctcttgagatgttgtggtttatactttcagtttttctccagtccatccgcaaatatcaggcatctactgtgttccaagatattaaagaaatcatcatgacttagcctcatcaacagcattgctagatctgggatggaaaggaagagtataatcctggcagtcaggaagaaggcagcataaagtataagtttctgcttccaaaaaaggtctctcatcagcctgtagggagtgtgtagggaagggacagctgtccttgtagtagggaagggttttattcaggtcgtctgggctccataatatcccttgtgtatctgcagtctcctttgccatggatcaacacaataggaaatcttccggcactgatggtttttccaagggggagttcttcctggagcaaagcaaatgaccaaccaggtttgaggacctgatttgtttgacaattccattttgtattgtaaattacttaattggcattctactcccaatccatcttgtcatttgcatacagtggttttgggattgagttcagctataccaaaagtctgaaccttctgcacttagaacaaggcaaccaccaagcttcacttgcactgaggccgtgtctccaatggaaatgaggcagctggcttgcaggagcttcccaactcagggaagtagaactcctgagtcacctccatatgcaaatgatttcacagtaatgctgttgaacttcacttcccatcacagcaaatgtgtggtaacatagcttccccacaggagtttactcaccatggtattttaaaggtgaaacatttcaaaactgaaatttgaaagaatttagttttggattcactcaattatcactatcacttcgggtgttattgcacctttcttgtttgtgagtttaaatgccagactctcaggccactaactttcaattaaaagtgtttttctttaatcgctgaacctaacagcagggaaaacgaaatgttcattcagactttcagaaccttcaatgagattaggcagctgaaagatcaaagtgttgcatagttgtcccgataaagctatttggatcatatggaccaaatcgactgctgtcattccccaccaaccccatctctccccaaaattcccagccctgtttaagtgttctctgtagcatttatctctatctagtatattgtgtagcatatcatatcatacttttctgttttgtttattgtctctctcctcctagaatataaactccacaagcacaaagatttgggcctgttttataatattgttgcatccccagggcctgatatacagcagagtggtggtacgaaaagagcacacaaaaaaatatttgttgagtcaatgaatgaatgatttcctcaaataggattagcctaaaattttggaaacatgaacagatttggatatgtgaaaatttatttccagactgttcatcaggaactgttagcagcttctaaagggtacactggagcagcagtagtaaaaggaggaagaggagcagctctgctactgctactatcgagtactactacaattagcacttgcttattctgtgtgttaggccctgtactgaacactctgtctaaattagttcatttcctcctggaaatgactctagggggtaagtgcttcatcatgtaagatgagtatttttcacattttgttgtgtctgaaatctgagtgtgtctttcaatgatggaatctttgattccatgataagtggtattattcccattttaaggatgaggaaactgaggtccaaagaaattaagtaatttgcccaaattcacccagcctagaaaatgataaagctagttctaaacccaagcagattagctctgaagtctgggcccttaataaccactttttattgcctatatttgtacctctggtgtacgtatcaagttatatgttgacttcaaaactatcatgaccttttcttggttttgattgtccaacattagtatagtgttctgggtctgcaaaaattttgattactcatctcatctgtaaaacattttgaactcgtgtgtttgtgcatgcacatttgtgtgtaattataaaaattttactttctgttaatatataagttgtatcataagaaactgccgtttttgaagagcaaaaaaaggttgaatgttaccagttacatctggttcaacctaatagacatttgtacaaaaacagacattttaagaggttgaaataaaaatttaataaacaatattttcagtttttactaattgtgatgcttcactatcattagctaatatgtcaaggcataatataccttagggtgaactttatcattaacaaaggtggatggtgtcaataatcttgaggtttgtgtttttttatataacactgcgaggtctaattaagtacttactgtttaccacctcatacagtggccgataaaaagtgtcacttctgctgtttcctctgggttgtgcttgaattattagtattatcttcagtcctcagtttctttgtgggaaactttttaattagttgtttaattttgtaagatggttagtttagtcaaaattagataagagaatttgaaaatccgtagctaccccaaagcaacctacacataagaactattatttttgtgttttgaaatcataattttattgatttccagtgtttccactggtagtggtttcattgatataggagtatcaaaacatcactcattatttatttcagtttcatttgatcctagccgttttgtattaactctctgtgaagaaattacctcacaaatctattgctgtccttggtaaaggaatggagaattaaggctctagatcattagtggttacactatagtattagaagtaaaaaaaagattataccaacaaaataagaacatgttaatgtacttgtaatgaataaacatgaataaagctcttatgctatataggtgcactaaacaatctactagaattgtcagcaaactacgtatcttaatcctgaaagggtcccaaaccaatgatctaaaattgaatcaaactttcttccttgagcataattacttaaatgatttattaaaatagccagcatttaaaagcttaaaatgtaaatatcataatgtggtatcctagatagcatcccagaacagaaaaaggatattagggaaaaactggaggaatggaataaattatgcagtttagttattaataatgtactaacgtccttagttatgacgattgtaccatggtaatgtaagatactaacaatagaggaaaccgggtaaggagtatacagtaactctatactatctttgcaacttttttgtaaatttaaaacttctaaaataaagaacaaatttaaacattaaaaagtatcaccaggaacatatatcactgtttacagatgaaatactatgtattttcatatctaatttctgatcattgacttcaaatcagaaaagtgaatgacacctcaaaatcaggttttctgtttactgaagtctaagaaaagaaagcataccagctggagagattcatgtttataaagacagatttataacaacaaaaataaaatatccaagaataaatttaagaagaagcactttactgagaaacatatgaaaacctgaacaaatggagagggatattttgtatttgaatagaaagacttctggtttaaagataattctctttaaattattttttgtagaaatttaaggggtacaagagcagtgttgtcacatggatatattacatagtggtgaagtctggggttttagtgtaaattaatctttacattttgtttgagcccaataaatgtaccaacatgatttttatagaaagatagtcattcctattaatccaaacttgtcccaactttgaattgaattgaggcagagctagcaggtgttccccacggctgaggcatctgaacattaagcatatccctctgagaaccagcctgcattgatactctttctaatgtggacagcatcaagctatgtacgtagttctgtgctcagcaaaagccctgacttctttttgtttatgtcctagccccatacaacaaaatcaaccaaagaattttggttgtggatccagtcacctctgaacatgaactgacatgtcaggctgagggctaccccaaggccgaagtcatctggacaagcagtgaccatcaagtcctgagtggtaagaccaccaccaccaattccaagagagaggagaagcttttcaatgtgaccagcacactgagaatcaacacaacaactaatgagattttctactgcacttttaggagattagatcctgaggaaaaccatacagctgaattggtcatcccaggtaatattctgaatgtgtccattaaaatatgtctaacactgtcccctagcacctagcatgatgtctgcctatcatagtcattcagtgattgttgaataaatgaatgaatgaataacactatgtttacaaaatatatcctaattcctcacctccattcatccaaaccatattgttacttaataaacattcagcagatatttatggaatataccttttgttccatgcattgtagtactcattggatacacatagaataataagactcagttcacactcttcaggaaacagataaaaaactaagaaacaaacaaaaaacaggcaatccaacaccatgtgggaaatgctttcatagccgggaaacctggggaatacctgagaggaatactcaattcaggccttgtttcaggaatccaaatcctggcacatcagagctgcttccctctttccagggtggcaggaaataaatggaacatatttttctatcttatgccaaacatgagggaccctttctccccggtgcctctcccaaggtagtctacaatatttcaactctagcagtctgcttagtgcatagaacatgaggctgtgtgtccctgggcaaattactagacttctgtgtgcttcactttccctgtaggattataatctactgagcaagcttattgtaagggtcagattagcaacagtgtatgaaaatgatttgagaccattgcctgcacaaattcaactatttttttttatctcactactctacagaagtaggtagggtgggagacagagtctgatgagaggctcagaatgtgaaagaaagtgaggcgagtgagcatgatatttaatataaacacaaagatattctgagaagagctgctcactgccccctcccccaatacatgttgataggaaaatgccacgtacttcagcaaaaacaactgaaaaattagatagaaaagtcaatcaataggaaaagataatccaggacggtgttgtgaacagaaagagggggaaaaaactttagaaaatgatggggatgctcttactggggtacgagtcctcaggtattgaactggctttcagtaaaagctagattagtgggttcctgccatttacaagctgttttatgacaacttacttgttgggtggcctacagtaactcacctaactgcactgagtctgtttcctcatctgtaaattggggatttttttttaaatacctggcatgcctaactcataaagttgttctgaaactgaaataaaacatacgtgaacaggcattgtaaactgtaagttacggaaaaagctggctgttgttgtgtctttaaagtttcacctgggtagtcaaagatggatcatgggtctcagtggagagctgagccaggcaggagctgactaagggtgagaggtgggagttagcagcctctgaacatctgtgtaccatgggaccccctttcctcctgcatggtaccccagacaaggagcctagtaagagatactaatggcttgttgtccagagatgttcaaactgcagagaaagataagacaacaagcattggcctccaatcatgatgacagataggaggaggtgggagctccttagcagtgctggttggccttccatgttctactgtgggccatctctgccatgtactgtaggctactagcttctatattaaagaatgcaagaggggccaggagcggaggctcatgcctgtaatctcagcactttgggaggccaaggtgggcagatcacttgaggtcaggagtttgtgaccagcctggccaacatggtgaaactctgcctttactaaaaatataaaaattagctgggtgtggtggtgtgcacctgtaatcccagctactcgggagactgaggcacaagaattgcttgaacctgggaggcggaagttgcagtgagcccagattgcgccactgcactccaccctgggcaacagagaaagactctgcctcaaaaaaaaaaaaaaaaagcaagaggaagtgaaataatcaaggccgccatttaatagtgagcagccactccatgtggtactgtgcaagcacattataaatattagcctcacaagaaatgtattagcatttgtattttgtacactggttaagtatcttgcccaagacctcaaaactggttaagggcagcagaatttagccccagcaccaccttttcaaagcctgggcttctcacacttctccatgctgttcccattttaacacaggtatctcgccattccagccactcaaactttggcatttaagaaaattatcctaaagctaaactaaacttcaaggatgaccattctcctgaccccttcccatcaaaattttatctttagtcagtttgttttcgttttgttttgtttttcagaactacctctggcacatcctccaaatgaaaggactcacttggtaattctgggagccatcttattatgccttggtgtagcactgacattcatcttccgtttaagaaaaggtagtatttccttaattgcagtggtctccactgggggtgaggaaggggtgagaattggatcatggctgcaaggaaacccgacttaacctctgcaaggtggtgcaaaggcattccactgttcaacagcaattatattgaagctgagtgggatcactgggtgaagatgaagcgtaaggggtgaggggcaggagaatgggtatggatggaggtagaagatgcagtgtcatacagtttttttctatcatgaaaataaccacagacttacagaagagaaagagctaaaatgcccgtcattttcagttgcattttagtcttgcattagttgcaaccagctggtttctgggtaccctaagtaataaaaatagttcctctgtagaactgtagtatgtttaccatagagtattttgcaaaatttttggtagaggatgttacataatttgcatgtgttcatttctccatttacctgtgggaacaattaaaatccaggaaaatgagtatattcaaataatttcctcccatttaagatgagtcagagtaaataattcctccaatacttagagaagtataccaagagatccagtgatggtatagagttgtctgatgttaaatagggaagtagaatatggaaggggattccaatagtcgttgaaaaattccccataaccccttacatgggggaaagtagtgttaactgagagagtagagataagctgtttccaaaaattatattcttaacaggactgagatagccagaatataaggatcaagtttcaatgacagtaagatcctgagatggagttgatttgcacaaagaaataattgttgccagcatgcattttgaatatttctctggaaaaaaagattagttggcagtagaaatggatagaaatcaatagatattaaaatacctcagaatttggttcatctctgggaaaagatgaaaaataaaagtgtatactcctcaagaacatctaggatcaaaagcatgtgccctacactattgaattaattaacctcataagttgggacctgtggaataaggatgtccaccagacttcctagggattacaaatgtttcacagaacttgaaatttaaacttgggtcactgtatgggatgtagagctgtgctatatggaaataaaaatgatttctttttctcaagggagaatgatggatgtgaaaaaatgtggcatccaagatacaaactcaaagaagcaaagtggtaagaatatcagaaggaattgggaagtaaaagtcaaaggaaacaaaaagctaaagcaataacaaagagaaatccatcagtcataatctcctctccttttaaagaatgctggttcccctttgcctcacagctaacacaagaactcctccaccgtctgaggaggtttaggagcagggaaggggaaggagtcagcttcatttgctaatcttctgttgccctgcaccctagcagctccttgcagcaggggacaaggatgacttaggtggatggataattaattgattctaaaatattgtgtgtcagtattgtaatactatgttaattgcaccatgcacggtatctcatttaatcccccaccccttgccattaccaaagagagagagagagagagagagagaaatactagaatttatcctcattttacagtagagaaaacagagggtcaagaagataatgtaaagtgcccaagaacacacagctgatcacaaaaatcaagcttgggggccattagcctaaccacagacccttactcttaacccatctgcttcaatccattttgctacaaatgtttacatttataagcagggcagaaaaacctcatccaggttattgaactaagaagaaagttatattaaggtttctaatttttttaatgtagttagaaaccaaacttaacaatgagcccaagtttaaagcagtctaattaacctggacaagctcaggcaagtttcattctgtggcccatagcatcatctgtgttgtaaagctaagtagcaaatgttgtttgggtcatgctgggggacaagccatcccaatttgctcaggactgaggggttttccaggatatcatgtaaggataattgggtacaaatataacctgctgctttctctcatttcaaatttatcatttatcatatcagcaactatgagttatgttttttattagatttcttgttactttttccccagaccacttcccatgaaattaatatactattatcactctccagatacacatttggaggagacgtaatccagcattggaacttctgatcttcaagcagggattctcaacctgtggtttaggggttcatcggggctgagcgtgacaagaggaaggaatgggcccgtgggatgcaggcaatgtgggacttaaaaggcccaagcactgaaaatggaacctggcgaaagcagaggaggagaatgaagaaagatggagtcaaacagggagcctggagggagaccttgatactttcaaatgcctgaggggctcatcgacgcctgtgacagggagaaaggatacttctgaacaaggagcctccaagcaaatcatccattgctcatcctaggaagacgggttgagaatccctaatttgagggtcagttcctgcagaagtgccctttgcctccactcaatgcctcaatttgttttctgcatgactgagagtctcagtgttggaacgggacagtatttatgtatgagtttttcctatttattttgagtctgtgaggtcttcttgtcatgtgagtgtggttgtgaatgatttcttttgaagatatattgtagtagatgttacaattttgtcgccaaactaaacttgctgcttaatgatttgctcacatctagtaaaacatggagtatttgtaaggtgcttggtctcctctataactacaagtatacattggaagcataaagatcaaaccgttggttgcataggatgtcacctttatttaacccattaatactctggttgacctaatcttattctcagacctcaagtgtctgtgcagtatctgttccatttaaatatcagctttacaattatgtggtagcctacacacataatctcatttcatcgctgtaaccaccctgttgtgataaccactattattttacccatcgtacagctgaggaagcaaacagattaagtaacttgcccaaaccagtaaatagcagacctcagactgccacccactgtccttttataatacaatttacagctatattttactttaagcaattcttttattcaaaaaccatttattaagtgcccttgcaatatcaatcgctgtgccaggcattgaatctacagatgtgagcaagacaaagtacctgtcctcaaggagctcatagtataatgaggagattaacaagaaaatgtattattacaatttagtccagtgtcatagcataaggatgatgcgaggggaaaacccgagcagtgttgccaagaggaggaaataggccaatgtggtctgggacggttggatatacttaaacatcttaataatcagagtaattttcatttacaaagagaggtcggtacttaaaataaccctgaaaaataacactggaattccttttctagcattatatttattcctgatttgcctttgccatataatctaatgcttgtttatatagtgtctggtattgtttaacagttctgtcttttctatttaaatgccactaaattttaaattcatacctttccatgattcaaaattcaaaagatcccatgggagatggttggaaaatctccacttcatcctccaagccattcaagtttcctttccagaagcaactgctactgcctttcattcatatgttcttctaaagatagtctacatttggaaatgtatgttaaaagcacgtatttttaaaatttttttcctaaatagtaacacattgtatgtctgctgtgtactttgctatttttatttattttagtgtttcttatatagcagatggaatgaatttgaagttcccagggctgaggatccatgccttctttgtttctaagttatctttcccatagcttttcattatctttcatatgatccagtatatgttaaatatgtcctacatatacatttagacaaccaccatttgttaagtatttgctctaggacagagtttggatttgtttatgtttgctcaaaaggagacccatgggctctccagggtgcactgagtcaatctagtcctaaaaagcaatcttattattaactctgtatgacagaatcatgtctggaacttttgttttctgctttctgtcaagtataaacttcactttgatgctgtacttgcaaaatcacattttctttctggaaattccggcagtgtaccttgactgctagctaccctgtgccagaaaagcctcattcgttgtgcttgaacccttgaatgccaccagctgtcatcactacacagccctcctaagaggcttcctggaggtttcgagattcagatgccctgggagatcccagagtttcctttccctcttggccatattctggtgtcaatgacaaggagtaccttggctttgccacatgtcaaggctgaagaaacagtgtctccaacagagctccttgtgttatctgtttgtacatgtgcatttgtacagtaattggtgtgacagtgttctttgtgtgaattacaggcaagaattgtggctgagcaaggcacatagtctactcagtctattcctaagtcctaactcctccttgtggtgttggatttgtaaggcactttatcccttttgtctcatgtttcatcgtaaatggcataggcagagatgatacctaattctgcatttgattgtcactttttgtacctgcattaatttaataaaatattcttatttattttgttacttggtacaccagcatgtccattttcttgtttattttgtgtttaataaaatgttcagtttaacatcccagtggagaaagttacttggaatatttgcagccttgttcctagttcttttttcattgcttatacagcatgtttttatacagcatgcttttgaatcctgcacaatgaaaaaagtatcaaaagattttattttaaaaaagaatgtattgaaaattttcattctctctcattcggcagcttcctttaggaccataccaagaagagtcaaaatcctgtcatctacattgaagatctaagggagagagggtgggagagaaggagtggaacccaatagaactatagggaaacaaagggacttacctctaagaaagtacttttcccagatctgtaaacgggtatgcaatccagtgtgtaggaagatagatgtattgcagtcttcaagttttgaaaataaagcgaggaaactagaactaagccaagttgaggattaagggctagcaatggttaggaccatagatctgtggttttaaacaagcatgacaaaacttatcattcaaggaagtatagaccttttaatgtgtcatccggtgagattttagtcatgaaattccattttaaaagactatcacttatttgaatcagatactcttaaaggattataatggctatttctaagaatatgtgtttgactctagatgcttttgtttgtttgtttttgagacagagttttgctcttgtcacccaggctggagtgcaatggcactatctcagctcactgcaacctccgcctccaggttcaactgattctcctgcctcagcccctcgagtagctgggattacaggcacctgccaccactcctggctaatttttgtacttttagtagagacagggtttcacaatgttggccaggctgatctcgaactcctgacctcaggtgatccacccatctcagcctcccaaagggctgggattacaggtgtgagccacggtgcctggcctctggatgttttcagtagtaatgatgatgcactatttatgctagcccttgggcagtcaaagcaataaaaatgtgtgctagacatcaagatatctggccttcctaatcaggaaaggatatggagaactagtcttcctggcttgccttggtggtatggaaattttgtgacacttgaggggtctgtattatagaaaagttaatatgaaaatggttcataagctttcattaaacttttgttctagtcccttttacaagtgtgtgcctgtctgccacaagtaggcctaatatattttttaagttttatttttaattgacatataattgacttttttttattattatactttaagttctagggtacatgtgcacaaaatgtaggtttgttacatatgtatacatgtgccatgttggtgtgctgcacccattaactcgtcatttacattaggtacatctcctaatactatccctccctcctccccgtaccccacgacaggccccggtgtgtgatgttccccatcctgtgtccaagtgttctcattgttcatttcccacctatgagtgagaacatgcggtgtttggttttttgtccttgcaatagtttgctgagaatggtttccagcttcatccacgtccctacaaaggacatgaactcatccttttctatggctgcatagtattccatggggtatatgtgccacattttcttactccagtctatcattggtggacatttgggttggttccaagtctttgctattgtgaatagtgctgcaataaacatacatgtgcatgtgtctttatagcagcatgatttataatcctttgggtatatacccagtaatgggatggctgggtcaaatggtatttctagttctagatccctgaggaattgccacactgtcttccacaatggttgaactagtttacactcccaccaacagtgtaaaagcgttcctatttctccacatcctctccagcacctgttgtttcctgactttttaatgatcgccattctaactggtgtgagatggtatctcattgtggttttgatttgtatttctctgatggccagtgatggtgagctttttttcatgtgtctgttggctgcataaatgtcttcttttgagaagtgtctgttcatatccttcacccactttttgatggggttgtttgattttttcttgtagatttgtttaagttctttgtagattctggatattagccctttgtcagatgggtagattgtaaaaatgttctcccattctgtaggttgcctgttcactctgatggtagtttcttttgctgtgcagaagctctttagtttaattagatcccatttgtcaattttggcttttgttgccattgcttccagtgttttagtcatgaagtccttgcccatgcctatgtcctgaatggtattgcttaggttttcttctagggtatttatggttttaggtctaacatttaagtctttaatccatcttgaattaatttttgtataaggtgtaaggaagggatccagtttcagctttctacatatggctagccagttttcccagcaccatttattaaatagggaatcctttccccatttcttgtttttgtcaggtttgtcaaagatcagatggttgtggatgtgtggtattatttctgagggctctgttctgttccattggtctagatctctgtttcagtaccagtaccatgctgttgtggttactgtagccctatagtatagtttgaagtcaggtagcgtgatgcctccagcttttttcttttggcttaggattgtcttggcaatgcaggctcttttttgattccatatgaactttaaagtagttttttccaattctgtgaagaaagtcattggtaacttgatggggatggcattgaatctataaattaccttgggcagtagggccatttcacgatattgattcttcctatccatgagcatggaatgttcttccttcggtttgtgtcctcttttatttcattgagcagtggtttgtagttctccttgaagaggtccttcacatcccttataagatggattcctaggtattttattctctttgaagcaattgtgaatgggagttcactcatgatttggctctgtgtttgtctgttgttggtgtataggaacgcttgtgatttttgcacattgattttgtatcctgagactttgctgaagttgcttatcagcttaaggagattttgcgctgagacgatggggatttctaaatacacaatcatgtcatctgcaaacagggacaatttgacttcctcttttcctaactgaataccctttatttctttctcttgtctgactgccctggccagaacttccaacactgtgttgaataggagtggtgagagaggacatccctgtcttgtgccagttttccaagggaattcttccagtttttgcccattcagtatgatattggctgtggatttgtcataactagctcttattattttgagatacgtcccatcaatacctagtttattgagagtttttagcatgaagcgctgttgaattttgtcgaaggccttttctgcatctattgagataaacatatagtttttgtctttggttctgtttatatgatggattacgtttattgatttgcgttacgttgaaccagccttgcatcccagggatgaagccaacttcatggtggtggataagctttttgatgtgctgctggattcagtttgccagtattttactgaggatttttgcatcgacgttcatcagggatattggtctaaaattctctttttttgttgtgtctctgccaggctttggtatcaggatgatgctggccttataaaatgagtcagggaggattccctctttttctattgattagcatagtttcagaaggaatggtaccagctcctctttgtacctctggtagaattcagctgtgaatccatcttgtcctggactttttttggttggtaggctattaattattgcctcaatttcagagcatgttattggtctattcagagattcaaattcttcctggtttagtcttgggagggtgtatgtgtccaggaatttatccatttcttctagattttctagtttatttacgtagaggtatttatattattctctgatagtagtttgtatttctgtgggatcagtagtgatatcccctttatcattttttattgcatctatttgatttttctctcttttcttctttattagtcttgctagcggtctatcaattttgttgatcttttcaaaaaaccagctcctggattcattgattttttgaagggtttttcatggctctatctcctccagttctgctctgatcttagttatttcttgccttctgctagcttttgaatgtgtttgctcttgcttctctagttcttttaattgtgaggttaaggtgtcaattttagatctttcctggtttctcttgtgggcatttagtgctctaaatttccctctccacactgctttaaatgtgtcccagagattctggtatgttgtgtctttgttctcgttggtttcaaagaacatctttatttctgccttcattttgttatgtacccagtagtcattcaggagcaggttgttcagtgtttagtttccatgtagttgagcagttttgagtgagtttcttaatcctgagttctagtttgattgcactgtggtctgagagacagtttgttataatttctgttcttttacatttgctgaggagtgctttacttccaacaatgtggtcagttttggagtaagtgtgatgtggtgctgagaagaatgtatattctgttgatttgtggggagagttctgtagatgtctattacatccacttggtgcagagctgagttcaagtcctggatattcttgttaactttctgtctcattgatctgttaatgttgacagtggggtgttaaagtctcccattattattgtgtgggagtctaagtctctttgtaggtctctaaggacttgctttatgaatctgggtgctcctgtactaggtgcatatatatttaggatagttagctcttcttgttgaattgatccctttaccattacataatggccttctttgtctcttttgatctttgttggtttaaagtctgttttatcagagactaggattgcaacccctgcttttctttgttttccatttgcttggtagatcttcctccatccctttattttgagcctatgtgtgtctctgcacgtgagatgggtctcctgaatacagcacactgatgggtcatgaccctttatccaatttgctagtctgtgtcttttaattggatcatttagcccatttacatttaaggttactattgttatgtgtgaatttgatcctgtcattatgatgttagctggttattttgcgcattagttgatgcagtttcttcctagcattgatggtctttacaatttggcatgtttttgcagtggctggtactggttgttcctttccatgtttagtgcttccttcaggagctcttgtaatgcaggcctggtggtgacaaaatctctcagcatttgcttgtctataaaggattttatttctctttcacttatgaagcttagtttggctggatatgaaattctgggttgaaaattcttttctttaggaatgttgaatattggcccccactctcttctggcttgtagagtttctgctgagagatccgctgttagtctgatgggcttccctttgtgggtaactcgacctttctctctggctgcccttaacattttttccttcatttcaattttggtgaatttgaaaattatgtgtcttggagttgctcttctcaagaagtatctttgtggtgttctctgtatttcctgaatttgaatgttggcctgccttgctaggttggggaagttctcctggataatatcctgaagagtgttttccaacttggttccattctcaccatcactttcaggtacaccagtaagacgtagatttggtcttttcacatagtcccatatttctgggaggttttgttcatttcattttactcttttttctctaaacttctcttcttgcttcatttcattcatttgatcttcaatcactgataccctttcttccagttgatcgaattggctattgaagcttgtgcatgtgtcacatagttctcatgccatgtgttttcagcttcatccagtcatttaaggtcttctctatgctgtttattatagttagccatttgtctaatcttttttcaaggtttttagcttgtttgcgatgggttcaaacatcctcctttagctcagagaagtttgttattaccagtagtctgaagccttcttctgtcaactcgtcaaagtcattctccgtccagctttgttccatttctggtgaggagctgcgttcctttggagaagaaaaggtgctctgatttttagaattttcagcttttctgctatagtttctccccatctttgtggttttatctacctttggtctttgatgatggtgatgtacagatggggttttggtgtggatgtcctttctgtttgttagttttccttctgacagtcagcaccctcagctgcaggtctgatggagtttgctggaggtccactccagatcctatttgcctgtgtttcaccagtggaggcttcagaacagcaaatattgtagaacagcagatgctgctgcctgatccttcctctggaagcttcatctcagaggggcacccggctgtatgaggtgtcagtcggcccctactgggaggtgcctcccagttaggctactcaggggacaggaacccacttgaggaggcagtctgtccgttctcagatctcaaactccgtgctgggagaaacactactctcttcaaagctgtcagtcagacagagacatttaagtctgcagaagtttctgctgccttttgttcagctatgccctgtcccaagaagtggagtctaaagaggcaggcaggcctcgttgagctgcagtgggctccacgcagttcgagcttccgtgtcgctttgtttacctactcaagcctcagcaatgacgggcacccctcccccagcctccctaccaccttgcagttggatctcagactgctgtgctagcagtgagtgaggctccatgggcatgggaccctccgagccaggcgcgggatacaatctcctggtgtgctgtttgctaaaaaccattggaaaagtgcagtattagggcgggagtgtcccggttttccaggtactgtctgtaatggcttcccttggctaggaaagggaattccccgaccccttgcacttcctgggtgaggcaatgccctgccatgcttcggcgcaccctccatgggctgcacccactgtctgtcaagccccagtgaaatgaacccagtacctcagttggaaatgcagaaatcacccatcttctgcgtcactcacactgggagctatagactggagctgttcctatttggccatcttggaatctccctacccattttccataattgacatatttatagggtacagtgtaatgttttgatagaagtatacattgtgtaattatcaaatcagggtaattagcatattcttttcctcaaatatttatcatttatttgtgataagaacattcaaaatattctctcctagttattttgagttatacagtataatactgttaaccacagtcaccctatgtattagtccattttcacagtgttataaaaatactacctgagactaggtaatttataaaggaaagaagtttaattgactcaaagttctgtatggttggggaggcctcaggaaactcacaatcatggtggaaggggaagcagtcaccttcctcacaaggcagtaagaggagagagagcaaagagggaagagccctttatgaaactatcagctcttatgagaattaactcactatcatgagaacaggatgggggaaaccacccccatgatacaatcacctccctccctcaacacgtggggattacaagtttctcccatgacatgtggggatcacaattcgagatgagatttgtgtgaggacagagccaaactgtatcaccctactatgcaatagaacaccagaacttattccttctatctaactataagtttgtacctgttgaccgatctctactaatctcccctcctcatgcccccaaccctctccagcctctggtaaccactaccctactttctacttctgtgatatcaaccttttaacattccacatatgagtgagatcatttagtatttgtgtttctttgcctggctatttcacttaacataattatcctctagttttatccatgttgccacaaatgacaggatttcatttgttatggctgaatactattctattttgtgtgtgtgtgtgtgtgtgtgtgtgtgtgtgtgtgtgtgtgtgtacaccacattttttctttcttttttttttttaaagagatggagtcttgctatgttgcctaggctggccttgaactcctatcgtcccacccacagcctccagagtagctgggaatataggcacatgccactgcacctggcttatataccaccttttcctcatccattcatctgttgatggacacttaagttgattccatagcttcactattgtgaatagtgctgcaataaacctagcagtgtagatgtctatttatgtctttatttatttaactattttatttatttattctttatttaactattttaaagctgagaaattcaaaattaacttttgttctattgatatatttggccaaatttgttaagacagatacacctgtttttagaatttttcctatcccaggcttccaaagtttcaagaaaattgatataataaaccaacttattcccattataatttaaacatttccgaaattatttccattttaaaagaagttaatgtttgaccaatgaagcaattgtcaatgatggggttttattatgagtttaataatgatatttaccatttattgagcatgtaccttatgcaaggtcttcatctgtcaatcatctcttctttctgcaaatacaagacttagcaagcttggagtaagttatgaatgctaacatatgtgagatcaaatagtctctttctagggcactgaaggtctttggggacttaaaaactcgattacaatgattcagtcatataagagaaaattgcaacacacacacacacataaaacagaaaagaactatttgtacatgccaggaaacactgctctaagagttgctttattctaggtgactatgaaaggaaaaaaaaaatctaactatagagaagttaaaaaatgtacatatatttgggaagaataggaaatttcaccaaaggcctggagtcactcaaacccgagttccaatcttcttagatgtaaattaacttcattgaaccagtttactttaaaaattcttgtttttattaaaaatttcaattactattaaaattatatttttaattaaaaatactttaaaaattaaagtgtatagtttttctatttatcttaaatattcaaataattgtgaattaaagttgtgccagcttgaagatttaaagtgataggcttaataattttggaacttttcttaatgtcaaagttaactagagcttcttttctttttcaaattacacatttaaaattccggcatcagttcctttttgagtcatctaggtctctcacgtcagtaaatattgagctactgtaaagctgaagttacttacgtagtaacataacttacttaggggagatttgtaaatgtttattttggataagctatgtcttatttttgttttgcttttgagaaagatacttctcattctttgctaatttcaaacaaacagctttatagtagaaagcaattatttctataactcaagttaaataattctgtctattctttagtcaaattgaaaataagacataacaaaacaatgacccccttgccttggtttctaacttttcagaggtgaacacaaccataaatggtaactaacttacagtagtgcctactgtatccactaagcattatgtagaatacagaggtgacccagacatgcaccctgcccttaaaaaacatgaagattgaaacatattatcatgatttacaggcatagctcctcctcctccaaaaacaaaacaatacaaaacacacaaataactgtgtttgtcagaaatacagacaccaagtgttaaaatgtcagaaaatagggcagcttgaactcaacctttgcactctctagcacttgaattatattttatcaaacctttgttaagttagttcatgtattttggtgcctcagtggttctaatccaagtatagtatttttgtagatccatctgtcccagtgctgcataacagcactagaacatgtggaagagatttaacaaatagtattagctatgatatgtatatattagtatatattacatgtcaggaagtgttctgagttctttacgtgtactaattcatttagccttcccaataaccctatgcggaaagttattaccatcttctcttgacagataaagaaaccaagccacagaaagtttaggtaacttggccgaagtcatgctactaataagttatggccccaggatgtgagcacagtttgacttcacagtttgctcttataccctacactatgctacccctaaataattattcgagtcatgttaatgaggggattttaaaaacttgacagtattggaacagtatatatagtaagctgatacttccctgggttggacaactccagaagcaatctgatgtttgtttgcctgtatatttttgtttttctaggcaatgggggctaatctcactagtacttctgtagactgtctagcatatgtctttcggtgaatctttgaactcgttttccatttggtatatatctgatggtacaattgctgaattcttggtatatacataagaatagaatttctaggtcatggtataggattgctggaaactgtaccaatttgcattcccaccagcagggcataggagttccagttgccttgcatttttcccaatattttctgcctctttcattttaggtgactatgcagagacatcacattttggttttaatttgcatgactctgatgactaatggagtcaaactcattttcatatatttattggccatttgtcaataaagttttatgaggtgtcttttcaagtgatttgcccattttttaaattaggttttctgcctaattcctaattgtgtaggaattcttagcgtattctagatacaagcccttcgtcagagacataaactgaaaatctcttctcccattctgcaggatgtctgttctctcttcacggagtcttttgaggaagtgaagttcttactttacatagttcaatttaccaatttttttcctcatggctagcacttttttgtgtcctgtgtaagcaaactttgcctactccaaggtcatgaagatttcttccatgttttcttctaaatctctatcattttatttttcacatttagatctgtaatccttctggaattatttttttgcatatggtgtgagataggagttaaaatacattttcatgtggacattcaattgtccctacaccatttactgaaaataccatcctttcccccactatactgcagtgtcacctttctcataaactagttgactatatctatacctatgtctctatctatgtctatctacctacctgtatatatctgtttatggagtctgttctattacattgatcagctcatttgttttttttttttgtctagaaaattttgctaaagcagtattaatgagtttgaatcttgcctcttggggctgtgacaacacttcaggttgtgattcctcacctgcagccctatccatgccatggcaaccaccgaggcatccatcctgtggttatctatacaatgcataataaagacctcagctggcctcggcggctcacgcctgtaatcccagcactttgggaggccaaggcaggcagatcacgtgagcacaggagttcgagactagcctgagtaacacggcaaaaccccatctctccaaaaaataaaaaaattagctgagc

SEQ ID NO: 962802 - DNA, 44065 bp, Homo sapiens
gctcagctaatttttttattttttggagagatggggttttgccgtgttactcaggctagtctcgaactcctgtgctcacgtgatctgcctgccttggcctcccaaagtgctgggattacaggcgtgagccgccgaggccagctgaggtctttattatgcattgtatagataaccacaggatggatgcctcggtggttgccatggcatggatagggctgcaggtgaggaatcacaacctgaagtgttgtcacagccccaagaggcaagattcaaactcattaatactgctttagcaaaattttctagacaaaaaaaaaaaacaaatgagctgatcaatgtaatagaacagactccataaacagatatatacaggtaggtagatagacatagatagagacataggtatagatatagtcaactagtttatgagaaaggtgacactgcagtatagtgggggaaaggatggtattttcagtaaatggtgtagggacaattgaatgtccacatgaaaatgtattttaactcctatctcacaccatatgcaaaaaaataattccagaaggattacagatctaaatgtgaaaaataaaatgatagagatttagaagaaaacatggaagaaatcttcatgaccttggagtaggcaaagtttgcttacacaggacacaaaaaagtgctagccatgaggaaaaaaattggtaaattgaactatgtaaagtaagaacttcacttcctcaaaagactccgtgaagagagaacagacatcctgcagaatgggagaagagattttcagtttatgtctctgacgaagggcttgtatctagaatacgctaagaattcctacacaattaggaattaggcagaaaacctaatttaaaaaatgggcaaatcacttgaaaagacacctcataaaactttattgacaaatggccaataaatatatgaaaatgagtttgactccattagtcatcagagtcatgcaaattaaaaccaaaatgtgatgtctctgcatagtcacctaaaatgaaagaggcagaaaatattgggaaaaatgcaaggcaactggaactcctatgccctgctggtgggaatgcaaattggtacagtttccagcaatcctataccatgacctagaaattctattcttatgtatataccaagaattcagcaattgtaccatcagatatataccaaatggaaaacgagttcaaagattcaccgaaagacatatgctagacagtctacagaagtactagtgagattagcccccattgcctagaaaaacaaaaatatacaggcaaacaaacatcagattgcttctggagttgtccaacccagggaagtatcagcttactatatatactgttccaatactgtcaagtttttaaaatcccctcattaacatgactcgaataattatttaggggtagcatagtgtagggtataagagcaaactgtgaagtcaaactgtgctcacatcctggggccataacttattagtagcatgacttcggccaagttacctaaactttctgtggcttggtttctttatctgtcaagagaagatggtaataactttccgcatagggttattgggaaggctaaatgaattagtacacgtaaagaactcagaacacttcctgacatgtaatatatactaatatatacatatcatagctaatactatttgttaaatctcttccacatgttctagtgctgttatgcagcactgggacagatggatctacaaaaatactatacttggattagaaccactgaggcaccaaaatacatgaactaacttaacaaaggtttgataaaatataattcaagtgctagagagtgcaaaggttgagttcaagctgccctattttctgacattttaacacttggtgtctgtatttctgacaaacacagttatttgtgtgttttgtattgttttgtttttggaggaggaggagctatgcctgtaaatcatgataatatgtttcaatcttcatgttttttaagggcagggtgcatgtctgggtcacctctgtattctacataatgcttagtggatacagtaggcactactgtaagttagttaccatttatggttgtgttcacctctgaaaagttagaaaccaaggcaagggggtcattgttttgttatgtcttattttcaatttgactaaagaatagacagaattatttaacttgagttatagaaataattgctttctactataaagctgtttgtttgaaattagcaaagaatgagaagtatctttctcaaaagcaaaacaaaaataagacatagcttatccaaaataaacatttacaaatctcccctaagtaagttatgttactacgtaagtaacttcagctttacagtagctcaatatttactgacgtgagagacctagatgactcaaaaaggaactgatgccggaattttaaatgtgtaatttgaaaaagaaaagaagctctagttaactttgacattaagaaaagttccaaaattattaagcctatcactttaaatcttcaagctggcacaactttaattcacaattatttgaatatttaagataaatagaaaaactatacactttaatttttaaagtatttttaattaaaaatataattttaatagtaattgaaatttttaataaaaacaagaatttttaaagtaaactggttcaatgaagttaatttacatctaagaagattggaactcgggtttgagtgactccaggcctttggtgaaatttcctattcttcccaaatatatgtacattttttaacttctctatagttagattttttttttcctttcatagtcacctagaataaagcaactcttagagcagtgtttcctggcatgtacaaatagttcttttctgttttatgtgtgtgtgtgtgttgcaattttctcttatatgactgaatcattgtaatcgagtttttaagtccccaaagaccttcagtgccctagaaagagactatttgatctcacatatgttagcattcataacttactccaagcttgctaagtcttgtatttgcagaaagaagagatgattgacagatgaagaccttgcataaggtacatgctcaataaatggtaaatatcattattaaactcataataaaaccccatcattgacaattgcttcattggtcaaacattaacttcttttaaaatggaaataatttcggaaatgtttaaattataatgggaataagttggtttattatatcaattttcttgaaactttggaagcctgggataggaaaaattctaaaaacaggtgtatctgtcttaacaaatttggccaaatatatcaatagaacaaaagttaattttgaatttctcagctttaaaatagttaaataaagaataaataaataaaatagttaaataaataaagacataaatagacatctacactgctaggtttattgcagcactattcacaatagtgaagctatggaatcaacttaagtgtccatcaacagatgaatggatgaggaaaaggtggtatataagccaggtgcagtggcatgtgcctatattcccagctactctggaggctgtgggtgggacgataggagttcaaggccagcctaggcaacatagcaagactccatctctttaaaaaaaaaaaagaaagaaaaaatgtggtgtacacacacacacacacacacacacacacacacacacacacacacaaaatagaatagtattcagccataacaaatgaaatcctgtcatttgtggcaacatggataaaactagaggataattatgttaagtgaaatagccaggcaaagaaacacaaatactaaatgatctcactcatatgtggaatgttaaaaggttgatatcacagaagtagaaagtagggtagtggttaccagaggctggagagggttgggggcatgaggaggggagattagtagagatcggtcaacaggtacaaacttatagttagatagaaggaataagttctggtgttctattgcatagtagggtgatacagtttggctctgtcctcacacaaatctcatctcgaattgtgatccccacatgtcatgggagaaacttgtaatccccacgtgttgagggagggaggtgattgtatcatgggggtggtttcccccatcctgttctcatgatagtgagttaattctcataagagctgatagtttcataaagggctcttccctctttgctctctctcctcttactgccttgtgaggaaggtgactgcttccccttccaccatgattgtgagtttcctgaggcctccccaaccatacagaactttgagtcaattaaacttctttcctttataaattacctagtctcaggtagtatttttataacactgtgaaaatggactaatacatagggtgactgtggttaacagtattatactgtataactcaaaataactaggagagaatattttgaatgttcttatcacaaataaatgataaatatttgaggaaaagaatatgctaattaccctgatttgataattacacaatgtatacttctatcaaaacattacactgtaccctataaatatgtcaattatggaaaatgggtagggagattccaagatggccaaataggaacagctccagtctatagctcccagtgtgagtgacgcagaagatgggtgatttctgcatttccaactgaggtactgggttcatttcactggggcttgacagacagtgggtgcagcccatggagggtgcgccgaagcatggcagggcattgcctcacccaggaagtgcaaggggtcggggaattccctttcctagccaagggaagccattacagacagtacctggaaaaccgggacactcccgccctaatactgcacttttccaatggtttttagcaaacagcacaccaggagattgtatcccgcgcctggctcggagggtcccatgcccatggagcctcactcactgctagcacagcagtctgagatccaactgcaaggtggtagggaggctgggggaggggtgcccgtcattgctgaggcttgagtaggtaaacaaagcgacacggaagctcgaactgcgtggagcccactgcagctcaacgaggcctgcctgcctctttagactccacttcttgggacagggcatagctgaacaaaaggcagcagaaacttctgcagacttaaatgtctctgtctgactgacagctttgaagagagtagtgtttctcccagcacggagtttgagatctgagaacggacagactgcctcctcaagtgggttcctgtcccctgagtagcctaactgggaggcacctcccagtaggggccgactgacacctcatacagccgggtgcccctctgagatgaagcttccagaggaaggatcaggcagcagcatctgctgttctacaatatttgctgttctgaagcctccactggtgaaacacaggcaaataggatctggagtggacctccagcaaactccatcagacctgcagctgagggtgctgactgtcagaaggaaaactaacaaacagaaaggacatccacaccaaaaccccatctgtacatcaccatcatcaaagaccaaaggtagataaaaccacaaagatggggagaaactatagcagaaaagctgaaaattctaaaaatcagagcaccttttcttctccaaaggaacgcagctcctcaccagaaatggaacaaagctggacggagaatgactttgacgagttgacagaagaaggcttcagactactggtaataacaaacttctctgagctaaaggaggatgtttgaacccatcgcaaacaagctaaaaaccttgaaaaaagattagacaaatggctaactataataaacagcatagagaagaccttaaatgactggatgaagctgaaaacacatggcatgagaactatgtgacacatgcacaagcttcaatagccaattcgatcaactggaagaaagggtatcagtgattgaagatcaaatgaatgaaatgaagcaagaagagaagtttagagaaaaaagagtaaaatgaaatgaacaaaacctcccagaaatatgggactatgtgaaaagaccaaatctacgtcttactggtgtacctgaaagtgatggtgagaatggaaccaagttggaaaacactcttcaggatattatccaggagaacttccccaacctagcaaggcaggccaacattcaaattcaggaaatacagagaacaccacaaagatacttcttgagaagagcaactccaagacacataattttcaaattcaccaaaattgaaatgaaggaaaaaatgttaagggcagccagagagaaaggtcgagttacccacaaagggaagcccatcagactaacagcggatctctcagcagaaactctacaagccagaagagagtgggggccaatattcaacattcctaaagaaaagaattttcaacccagaatttcatatccagccaaactaagcttcataagtgaaagagaaataaaatcctttatagacaagcaaatgctgagagattttgtcaccaccaggcctgcattacaagagctcctgaaggaagcactaaacatggaaaggaacaaccagtaccagccactgcaaaaacatgccaaattgtaaagaccatcaatgctaggaagaaactgcatcaactaatgcgcaaaataaccagctaacatcataatgacaggatcaaattcacacataacaatagtaaccttaaatgtaaatgggctaaatgatccaattaaaagacacagactagcaaattggataaagggtcatgacccatcagtgtgctgtattcaggagacccatctcacgtgcagagacacacataggctcaaaataaagggatggaggaagatctaccaagcaaatggaaaacaaagaaaagcaggggttgcaatcctagtctctgataaaacagactttaaaccaacaaagatcaaaagagacaaagaaggccattatgtaatggtaaagggatcaattcaacaagaagagctaactatcctaaatatatatgcacctagtacaggagcacccagattcataaagcaagtccttagagacctacaaagagacttagactcccacacaataataatgggagactttaacaccccactgtcaacattaacagatcaatgagacagaaagttaacaagaatatccaggacttgaactcagctctgcaccaagtggatgtaatagacatctacagaactctccccacaaatcaacagaatatacattcttctcagcaccacatcacacttactccaaaactgaccacattgttggaagtaaagcactcctcagcaaatgtaaaagaacagaaattataacaaactgtctctcagaccacagtgcaatcaaactagaactcaggattaagaaactcactcaaaactgctcaactacatggaaactaaacactgaacaacctgctcctgaatgactactgggtacataacaaaatgaaggcagaaataaagatgttctttgaaaccaacgagaacaaagacacaacataccagaatctctgggacacatttaaagcagtgtggagagggaaatttagagcactaaatgcccacaagagaaaccaggaaagatctaaaattgacaccttaacctcacaattaaaagaactagagaagcaagagcaaacacattcaaaagctagcagaaggcaagaaataactaagatcagagcagaactggaggagatagagccatgaaaaacccttcaaaaaatcaatgaatccaggagctggttttttgaaaagatcaacaaaattgatagaccgctagcaagactaataaagaagaaaagagagaaaaatcaaatagatgcaataaaaaatgataaaggggatatcactactgatcccacagaaatacaaactactatcagagaataatataaatacctctacgtaaataaactagaaaatctagaagaaatggataaattcctggacacatacaccctcccaagactaaaccaggaagaatttgaatctctgaatagaccaataacatgctctgaaattgaggcaataattaatagcctaccaaccaaaaaaagtccaggacaagatggattcacagctgaattctaccagaggtacaaagaggagctggtaccattccttctgaaactatgctaatcaatagaaaaagagggaatcctccctgactcattttataaggccagcatcatcctgataccaaagcctggcagagacacaacaaaaaaagagaattttagaccaatatccctgatgaacgtcgatgcaaaaatcctcagtaaaatactggcaaactgaatccagcagcacatcaaaaagcttatccaccaccatgaagttggcttcatccctgggatgcaaggctggttcaacgtaacgcaaatcaataaacgtaatccatcatataaacagaaccaaagacaaaaactatatgtttatctcaatagatgcagaaaaggccttcgacaaaattcaacagcgcttcatgctaaaaactctcaataaactaggtattgatgggacgtatctcaaaataataagagctagttatgacaaatccacagccaatatcatactgaatgggcaaaaactggaagaattcccttggaaaactggcacaagacagggatgtcctctctcaccactcctattcaacacagtgttggaagttctggccagggcagtcagacaagagaaagaaataaagggtattcagttaggaaaagaggaagtcaaattgtccctgtttgcagatgacatgattgtgtatttagaaatccccatcgtctcagcgcaaaatctccttaagctgataagcaacttcagcaaagtctcaggatacaaaatcaatgtgcaaaaatcacaagcgttcctatacaccaacaacagacaaacacagagccaaatcatgagtgaactcccattcacaattgcttcaaagagaataaaatacctaggaatccatcttataagggatgtgaaggacctcttcaaggagaactacaaaccactgctcaatgaaataaaagaggacacaaaccgaaggaagaacattccatgctcatggataggaagaatcaatatcgtgaaatggccctactgcccaaggtaatttatagattcaatgccatccccatcaagttaccaatgactttcttcacagaattggaaaaaactactttaaagttcatatggaatcaaaaaagagcctgcattgccaagacaatcctaagccaaaagaaaaaagctggaggcatcacgctacctgacttcaaactatactatagggctacagtaaccacaacagcatggtactggtactgaaacagagatctagaccaatggaacagaacagagccctcagaaataataccacacatccacaaccatctgatctttgacaaacctgacaaaaacaagaaatggggaaaggattccctatttaataaatggtgctgggaaaactggctagccatatgtagaaagctgaaactggatcccttccttacaccttatacaaaaattaattcaagatggattaaagacttaaatgttagacctaaaaccataaataccctagaagaaaacctaagcaataccattcaggacataggcatgggcaaggacttcatgactaaaacactggaagcaatggcaacaaaagccaaaattgacaaatgggatctaattaaactaaagagcttctgcacagcaaaagaaactaccatcagagtgaacaggcaacctacagaatgggagaacatttttacaatctacccatctgacaaagggctaatatccagaatctacaaagaacttaaacaaatctacaagaaaaaatcaaacaaccccatcaaaaagtgggtgaaggatatgaacagacacttctcaaaagaagacatttatgcagccaacagacacatgaaaaaaagctcaccatcactggccatcagagaaatacaaatcaaaaccacaatgagataccatctcacaccagttagaatggcgatcattaaaaagtcaggaaacaacaggtgctggagaggatgtggagaaataggaacgcttttacactgttggtgggagtgtaaactagttcaaccattgtggaagacagtgtggcaattcctcagggatctagaactagaaataccatttgacccagccatcccattactgggtatatacccaaaggattataaatcatgctgctataaagacacatgcacatgtatgtttattgcagcactattcacaatagcaaagacttggaaccaacccaaatgtccaccaatgatagactggagtaagaaaatgtggcacatataccccatggaatactatgcagccatagaaaaggatgagttcatgtcctttgtagggacgtggatgaagctggaaaccattctcagcaaactattgcaaggacaaaaaaccaaacaccgcatgttctcactcataggtgggaaatgaacaatgagaacacttggacacaggatggggaacatcacacaccggggcctgtcgtggggtacggggaggagggagggatagtattaggagatgtacctaatgtaaatgacgagttaatgggtgcagcacaccaacatggcacatgtatacatatgtaacaaacctacattttgtgcacatgtaccctagaacttaaagtataataataaaaaaaagtcaattatatgtcaattaaaaataaaacttaaaaaatatattaggcctacttgtggcagacaggcacacacttgtaaaagggactagaacaaaagtttaatgaaagcttatgaaccattttcatattaacttttctataatacagacccctcaagtgtcacaaaatttccataccaccaaggcaagccaggaagactagttctccatatcctttcctgattaggaaggccagatatcttgatgtctagcacacatttttattgctttgactgcccaagggctagcataaatagtgcatcatcattactactgaaaacatccagaggccaggcaccgtggctcacacctgtaatcccagccctttgggaggctgagatgggtggatcacctgaggtcaggagttcgagatcagcctggccaacattgtgaaaccctgtctctactaaaagtacaaaaattagccaggagtggtggcaggtgcctgtaatcccagctactcgaggggctgaggcaggagaatcagttgaacctggaggcggaggttgcagtgagctgagatagtgccattgcactccagcctgggtgacaagagcaaaactctgtctcaaaaacaaacaaacaaaagcatctagagtcaaacacatattcttagaaatagccattataatcctttaagagtatctgattcaaataagtgatagtcttttaaaatggaatttcatgactaaaatctcaccggatgacacattaaaaggtctatacttccttgaatgataagttttgtcatgcttgtttaaaaccacagatctatggtcctaaccattgctagcccttaatcctcaacttggcttagttctagtttcctcgctttattttcaaaacttgaagactgcaatacatctatcttcctacacactggattgcatacccgtttacagatctgggaaaagtactttcttagaggtaagtccctttgtttccctatagttctattgggttccactccttctctcccaccctctctcccttagatcttcaatgtagatgacaggattttgactcttcttggtatggtcctaaaggaagctgccgaatgagagagaatgaaaattttcaatacattcttttttaaaataaaatcttttgatacttttttcattgtgcaggattcaaaagcatgctgtataaaaacatgctgtataagcaatgaaaaaagaactaggaacaaggctgcaaatattccaagtaactttctccactgggatgttaaactgaacattttattaaacacaaaataaacaagaaaatggacatgctggtgtaccaagtaacaaaataaataagaatattttattaaattaatgcaggtacaaaaagtgacaatcaaatgcagaattaggtatcatctctgcctatgccatttacgatgaaacatgagacaaaagggataaagtgccttacaaatccaacaccacaaggaggagttaggacttaggaatagactgagtagactatgtgccttgctcagccacaattcttgcctgtaattcacacaaagaacactgtcacaccaattactgtacaaatgcacatgtacaaacagataacacaaggagctctgttggagacactgtttcttcagccttgacatgtggcaaagccaaggtactccttgtcattgacaccagaatatggccaagagggaaaggaaactctgggatctcccagggcatctgaatctcgaaacctccaggaagcctcttaggagggctgtgtagtgatgacagctggtggcattcaagggttcaagcacaacgaatgaggcttttctggcacagggtagctagcagtcaaggtacactgccggaatttccagaaagaaaatgtgattttgcaagtacagcatcaaagtgaagtttatacttgacagaaagcagaaaacaaaagttccagacatgattctgtcatacagagttaataataagattgctttttaggactagattgactcagtgcaccctggagagcccatgggtctccttttgagcaaacataaacaaatccaaactctgtcctagagcaaatacttaacaaatggtggttgtctaaatgtatatgtaggacatatttaacatatactggatcatatgaaagataatgaaaagctatgggaaagataacttagaaacaaagaaggcatggatcctcagccctgggaacttcaaattcattccatctgctatataagaaacactaaaataaataaaaatagcaaagtacacagcagacatacaatgtgttactatttaggaaaaaaattttaaaaatacgtgcttttaacatacatttccaaatgtagactatctttagaagaacatatgaatgaaaggcagtagcagttgcttctggaaaggaaacttgaatggcttggaggatgaagtggagattttccaaccatctcccatgggatcttttgaattttgaatcatggaaaggtatgaatttaaaatttagtggcatttaaatagaaaagacagaactgttaaacaataccagacactatataaacaagcattagattatatggcaaaggcaaatcaggaataaatataatgctagaaaaggaattccagtgttatttttcagggttattttaagtaccgacctctctttgtaaatgaaaattactctgattattaagatgtttaagtatatccaaccgtcccagaccacattggcctatttcctcctcttggcaacactgctcgggttttcccctcgcatcatccttatgctatgacactggactaaattgtaataatacattttcttgttaatctcctcattatactatgagctccttgaggacaggtactttgtcttgctcacatctgtagattcaatgcctggcacagcgattgatattgcaagggcacttaataaatggtttttgaataaaagaattgcttaaagtaaaatatagctgtaaattgtattataaaaggacagtgggtggcagtctgaggtctgctatttactggtttgggcaagttacttaatctgtttgcttcctcagctgtacgatgggtaaaataatagtggttatcacaacagggtggttacagcgatgaaatgagattatgtgtgtaggctaccacataattgtaaagctgatatttaaatggaacagatactgcacagacacttgaggtctgagaataagattaggtcaaccagagtattaatgggttaaataaaggtgacatcctatgcaaccaacggtttgatctttatgcttccaatgtatacttgtagttatagaggagaccaagcaccttacaaatactccatgttttactagatgtgagcaaatcattaagcagcaagtttagtttggcgacaaaattgtaacatctactacaatatatcttcaaaagaaatcattcacaaccacactcacatgacaagaagacctcacagactcaaaataaataggaaaaactcatacataaatactgtcccgttccaacactgagactctcagtcatgcagaaaacaaattgaggcattgagtggaggcaaagggcacttctgcaggaactgaccctcaaattagggattctcaacccgtcttcctaggatgagcaatggatgatttgcttggaggctccttgttcagaagtatcctttctccctgtcacaggcgtcgatgagcccctcaggcatttgaaagtatcaaggtctccctccaggctccctgtttgactccatctttcttcattctcctcctctgctttcgccaggttccattttcagtgcttgggccttttaagtcccacattgcctgcatcccacgggcccattccttcctcttgtcacgctcagccccgatgaacccctaaaccacaggttgagaatccctgcttgaagatcagaagttccaatgctggattacgtctcctccaaatgtgtatctggagagtgataatagtatattaatttcatgggaagtggtctggggaaaaagtaacaagaaatctaataaaaaacataactcatagttgctgatatgataaatgataaatttgaaatgagagaaagcagcaggttatatttgtacccaattatccttacatgatatcctggaaaacccctcagtcctgagcaaattgggatggcttgtcccccagcatgacccaaacaacatttgctacttagctttacaacacagatgatgctatgggccacagaatgaaacttgcctgagcttgtccaggttaattagactgctttaaacttgggctcattgttaagtttggtttctaactacattaaaaaaattagaaaccttaatataactttcttcttagttcaataacctggatgaggtttttctgccctgcttataaatgtaaacatttgtagcaaaatggattgaagcagatgggttaagagtaagggtctgtggttaggctaatggcccccaagcttgatttttgtgatcagctgtgtgttcttgggcactttacattatcttcttgaccctctgttttctctactgtaaaatgaggataaattctagtatttctctctctctctctctctctctctttggtaatggcaaggggtgggggattaaatgagataccgtgcatggtgcaattaacatagtattacaatactgacacacaatattttagaatcaattaattatccatccacctaagtcatccttgtcccctgctgcaaggagctgctagggtgcagggcaacagaagattagcaaatgaagctgactccttccccttccctgctcctaaacctcctcagacggtggaggagttcttgtgttagctgtgaggcaaaggggaaccagcattctttaaaaggagaggagattatgactgatggatttctctttgttattgctttagctttttgtttcctttgacttttacttcccaattccttctgatattcttaccactttgcttctttgagtttgtatcttggatgccacattttttcacatccatcattctcccttgagaaaaagaaatcatttttatttccatatagcacagctctacatcccatacagtgacccaagtttaaatttcaagttctgtgaaacatttgtaatccctaggaagtctggtggacatccttattccacaggtcccaacttatgaggttaattaattcaatagtgtagggcacatgcttttgatcctagatgttcttgaggagtatacacttttatttttcatcttttcccagagatgaaccaaattctgaggtattttaatatctattgatttctatccatttctactgccaactaatctttttttccagagaaatattcaaaatgcatgctggcaacaattatttctttgtgcaaatcaactccatctcaggatcttactgtcattgaaacttgatccttatattctggctatctcagtcctgttaagaatataatttttggaaacagcttatctctactctctcagttaacactactttcccccatgtaaggggttatggggaatttttcaacgactattggaatccccttccatattctacttccctatttaacatcagacaactctataccatcactggatctcttggtatacttctctaagtattggaggaattatttactctgactcatcttaaatgggaggaaattatttgaatatactcattttcctggattttaattgttcccacaggtaaatggagaaatgaacacatgcaaattatgtaacatcctctaccaaaaattttgcaaaatactctatggtaaacatactacagttctacagaggaactatttttattacttagggtacccagaaaccagctggttgcaactaatgcaagactaaaatgcaactgaaaatgacgggcattttagctctttctcttctgtaagtctgtggttattttcatgatagaaaaaaactgtatgacactgcatcttctacctccatccatacccattctcctgcccctcaccccttacgcttcatcttcacccagtgatcccactcagcttcaatataattgctgttgaacagtggaatgcctttgcaccaccttgcagaggttaagtcgggtttccttgcagccatgatccaattctcaccccttcctcacccccagtggagaccactgcaattaaggaaatactaccttttcttaaacggaagatgaatgtcagtgctacaccaaggcataataagatggctcccagaattaccaagtgagtcctttcatttggaggatgtgccagaggtagttctgaaaaacaaaacaaaacgaaaacaaactgactaaagataaaattttgatgggaaggggtcaggagaatggtcatccttgaagtttagtttagctttaggataattttcttaaatgccaaagtttgagtggctggaatggcgagatacctgtgttaaaatgggaacagcatggagaagtgtgagaagcccaggctttgaaaaggtggtgctggggctaaattctgctgcccttaaccagttttgaggtcttgggcaagatacttaaccagtgtacaaaatacaaatgctaatacatttcttgtgaggctaatatttataatgtgcttgcacagtaccacatggagtggctgctcactattaaatggcggccttgattatttcacttcctcttgctttttttttttttttttgaggcagagtctttctctgttgcccagggtggagtgcagtggcgcaatctgggctcactgcaacttccgcctcccaggttcaagcaattcttgtgcctcagtctcccgagtagctgggattacaggtgcacaccaccacacccagctaatttttatatttttagtaaaggcagagtttcaccatgttggccaggctggtcacaaactcctgacctcaagtgatctgcccaccttggcctcccaaagtgctgagattacaggcatgagcctccgctcctggcccctcttgcattctttaatatagaagctagtagcctacagtacatggcagagatggcccacagtagaacatggaaggccaaccagcactgctaaggagctcccacctcctcctatctgtcatcatgattggaggccaatgcttgttgtcttatctttctctgcagtttgaacatctctggacaacaagccattagtatctcttactaggctccttgtctggggtaccatgcaggaggaaagggggtcccatggtacacagatgttcagaggctgctaactcccacctctcacccttagtcagctcctgcctggctcagctctccactgagacccatgatccatctttgactacccaggtgaaactttaaagacacaacaacagccagctttttccgtaacttacagtttacaatgcctgttcacgtatgttttatttcagtttcagaacaactttatgagttaggcatgccaggtatttaaaaaaaaatccccaatttacagatgaggaaacagactcagtgcagttaggtgagttactgtaggccacccaacaagtaagttgtcataaaacagcttgtaaatggcaggaacccactaatctagcttttactgaaagccagttcaatacctgaggactcgtaccccagtaagagcatccccatcattttctaaagttttttccccctctttctgttcacaacaccgtcctggattatcttttcctattgattgacttttctatctaatttttcagttgtttttgctgaagtacgtggcattttcctatcaacatgtattgggggagggggcagtgagcagctcttctcagaatatctttgtgtttatattaaatatcatgctcactcgcctcactttctttcacattctgagcctctcatcagactctgtctcccaccctacctacttctgtagagtagtgagataaaaaaaaatagttgaatttgtgcaggcaatggtctcaaatcattttcatacactgttgctaatctgacccttacaataagcttgctcagtagattataatcctacagggaaagtgaagcacacagaagtctagtaatttgcccagggacacacagcctcatgttctatgcactaagcagactgctagagttgaaatattgtagactaccttgggagaggcaccggggagaaagggtccctcatgtttggcataagatagaaaaatatgttccatttatttcctgccaccctggaaagagggaagcagctctgatgtgccaggatttggattcctgaaacaaggcctgaattgagtattcctctcaggtattccccaggtttcccggctatgaaagcatttcccacatggtgttggattgcctgttttttgtttgtttcttagttttttatctgtttcctgaagagtgtgaactgagtcttattattctatgtgtatccaatgagtactacaatgcatggaacaaaaggtatattccataaatatctgctgaatgtttattaagtaacaatatggtttggatgaatggaggtgaggaattaggatatattttgtaaacatagtgttattcattcattcatttattcaacaatcactgaatgactatgataggcagacatcatgctaggtgctaggggacagtgttagacatattttaatggacacattcagaatattacctgggatgaccaattcagctgtatggttttcctcaggatctaatctcctaaaagtgcagtagaaaatctcattagttgttgtgttgattctcagtgtgctggtcacattgaaaagcttctcctctctcttggaattggtggtggtggtcttaccactcaggacttgatggtcactgcttgtccagatgacttcggccttggggtagccctcagcctgacatgtcagttcatgttcagaggtgactggatccacaaccaaaattctttggttgattttgttgtatggggctaggacataaacaaaaagaagtcagggcttttgctgagcacagaactacgtacatagcttgatgctgtccacattagaaagagtatcaatgcaggctggttctcagagggatatgcttaatgttcagatgcctcagccgtggggaacacctgctagctctgcctcaattcaattcaaagttgggacaagtttggattaataggaatgactatctttctataaaaatcatgttggtacatttattgggctcaaacaaaatgtaaagattaatttacactaaaaccccagacttcaccactatgtaatatatccatgtgacaacactgctcttgtaccccttaaatttctacaaaaaataatttaaagagaattatctttaaaccagaagtctttctattcaaatacaaaatatccctctccatttgttcaggttttcatatgtttctcagtaaagtgcttcttcttaaatttattcttggatattttatttttgttgttataaatctgtctttataaacatgaatctctccagctggtatgctttcttttcttagacttcagtaaacagaaaacctgattttgaggtgtcattcacttttctgatttgaagtcaatgatcagaaattagatatgaaaatacatagtatttcatctgtaaacagtgatatatgttcctggtgatactttttaatgtttaaatttgttctttattttagaagttttaaatttacaaaaaagttgcaaagatagtatagagttactgtatactccttacccggtttcctctattgttagtatcttacattaccatggtacaatcgtcataactaaggacgttagtacattattaataactaaactgcataatttattccattcctccagtttttccctaatatcctttttctgttctgggatgctatctaggataccacattatgatatttacattttaagcttttaaatgctggctattttaataaatcatttaagtaattatgctcaaggaagaaagtttgattcaattttagatcattggtttgggaccctttcaggattaagatacgtagtttgctgacaattctagtagattgtttagtgcacctatatagcataagagctttattcatgtttattcattacaagtacattaacatgttcttattttgttggtataatcttttttttacttctaatactatagtgtaaccactaatgatctagagccttaattctccattcctttaccaaggacagcaatagatttgtgaggtaatttcttcacagagagttaatacaaaacggctaggatcaaatgaaactgaaataaataatgagtgatgttttgatactcctatatcaatgaaaccactaccagtggaaacactggaaatcaataaaattatgatttcaaaacacaaaaataatagttcttatgtgtaggttgctttggggtagctacggattttcaaattctcttatctaattttgactaaactaaccatcttacaaaattaaacaactaattaaaaagtttcccacaaagaaactgaggactgaagataatactaataattcaagcacaacccagaggaaacagcagaagtgacactttttatcggccactgtatgaggtggtaaacagtaagtacttaattagacctcgcagtgttatataaaaaaacacaaacctcaagattattgacaccatccacctttgttaatgataaagttcaccctaaggtatattatgccttgacatattagctaatgatagtgaagcatcacaattagtaaaaactgaaaatattgtttattaaatttttatttcaacctcttaaaatgtctgtttttgtacaaatgtctattaggttgaaccagatgtaactggtaacattcaacctttttttgctcttcaaaaacggcagtttcttatgatacaacttatatattaacagaaagtaaaatttttataattacacacaaatgtgcatgcacaaacacacgagttcaaaatgttttacagatgagatgagtaatcaaaatttttgcagacccagaacactatactaatgttggacaatcaaaaccaagaaaaggtcatgatagttttgaagtcaacatataacttgatacgtacaccagaggtacaaatataggcaataaaaagtggttattaagggcccagacttcagagctaatctgcttgggtttagaactagctttatcattttctaggctgggtgaatttgggcaaattacttaatttctttggacctcagtttcctcatccttaaaatgggaataataccacttatcatggaatcaaagattccatcattgaaagacacactcagatttcagacacaacaaaatgtgaaaaatactcatcttacatgatgaagcacttaccccctagagtcatttccaggaggaaatgaactaatttagacagagtgttcagtacagggcctaacacacagaataagcaagtgctaattgtagtagtactcgatagtagcagtagcagagctgctcctcttcctccttttactactgctgctccagtgtaccctttagaagctgctaacagttcctgatgaacagtctggaaataaattttcacatatccaaatctgttcatgtttccaaaattttaggctaatcctatttgaggaaatcattcattcattgactcaacaaatatttttttgtgtgctcttttcgtaccaccactctgctgtatatcaggccctggggatgcaacaatattataaaacaggcccaaatctttgtgcttgtggagtttatattctaggaggagagagacaataaacaaaacagaaaagtatgatatgatatgctacacaatatactagatagagataaatgctacagagaacacttaaacagggctgggaattttggggagagatggggttggtggggaatgacagcagtcgatttggtccatatgatccaaatagctttatcgggacaactatgcaacactttgatctttcagctgcctaatctcattgaaggttctgaaagtctgaatgaacatttcgttttccctgctgttaggttcagcgattaaagaaaaacacttttaattgaaagttagtggcctgagagtctggcatttaaactcacaaacaagaaaggtgcaataacacccgaagtgatagtgataattgagtgaatccaaaactaaattctttcaaatttcagttttgaaatgtttcacctttaaaataccatggtgagtaaactcctgtggggaagctatgttaccacacatttgctgtgatgggaagtgaagttcaacagcattactgtgaaatcatttgcatatggaggtgactcaggagttctacttccctgagttgggaagctcctgcaagccagctgcctcatttccattggagacacggcctcagtgcaagtgaagcttggtggttgccttgttctaagtgcagaaggttcagacttttggtatagctgaactcaatcccaaaaccactgtatgcaaatgacaagatggattgggagtagaatgccaattaagtaatttacaatacaaaatggaattgtcaaacaaatcaggtcctcaaacctggttggtcatttgctttgctccaggaagaactcccccttggaaaaaccatcagtgccggaagatttcctattgtgttgatccatggcaaaggagactgcagatacacaagggatattatggagcccagacgacctgaataaaacccttccctactacaaggacagctgtcccttccctacacactccctacaggctgatgagagaccttttttggaagcagaaacttatactttatgctgccttcttcctgactgccaggattatactcttcctttccatcccagatctagcaatgctgttgatgaggctaagtcatgatgatttctttaatatcttggaacacagtagatgcctgatatttgcggatggactggagaaaaactgaaagtataaaccacaacatctcaagagatgtcatgaatggagaagcatatggtaaaatataatgaaaattaaatctactttacaagtggtatcttcttgacaatagtggcattacctgagccagtatcagggaccagaaatacaacataaaactgatacatttctcttaatccccacatgattttgtttttgagtttatagttatcagtgatcattgattaataattgatcagtgatcagtgacaaatgtatactttttctacttgtattgttagccctcagattgatggtagttagcccaggaatggaaagaccaaggggagatgatttaattctagtcaaatattaaaaggtcatcatgtaaatgaaataatcccaagactacaactagaggggcagatttcagcttactattagggagtaatttcaacaggatatggaagggatatccaaatggcagggaggccattgtgggatatgacagggacgccattgcaggaaatataagaacagaagatcctctgggggatttttgttctttgtgggagtttggattagctgctcctgcctgggatcctttcagctctcaattctgtgaaactcaacaatgaaagcagaggtgttttcctttacttagctagtgccaacacaaaactttgaactcaagtgacctgataacataactgtgggtcaataccgaggaactaacactcctagttccttttcaattccccaagacaacatcagtatagattttcaagatgaatatatgcccagtaagtatggcttatcctgtactggaagaataggttctttcacacttaatgtgattattttttgtcttcatagggtgacttcaagtcttttttaatgtgaaccttacagtggggtttgttctgaatatatttatttgcatttgatatagagaggctcaaaaaaggaaaactgacggacctaataaaataaaaaaatagtagttgaataaaaaaatttctggagggacacacaaataatggttactctctctgcatgccatgggagatagtggtgaagggaggagggacacttttgcaattcatttgatctcttccacagtatctgaattatttgcaagtatacgtattccatttgtaataaaaaagtaaagactagaaattctttttggaaaactgtacatactgtagaacatggctctgtgttgtttgtctctggatttccagtgactatcaaataggtgctcaagaaattggataattatgtgaatgaattcatgaattgaatgaatgaatgaacagactatgctgttctgtttgaaaataagtatggacttacaagaatgaaaagtcttcaacacttggaatatgttttcaataaagatcaggcctctcatctataataattcttaccattgactttcacagtaattcgcttgtagtcggcaccaccatagctgatcatgcagcggtacacccctgcatcctgcaatttcacatctgtgatctgaagtgcagcatttcccagggagagctggtccttcaacagccgggccctctgtctgtagctactatgctgaaccttcaggtcttcctctccatgcacaaattgaataatgttcttatcctccatttcccaatagacaattagtgcagccaggtctaattgtttttctactgggaatttgcattcaattgtcatattgctaccatactctaccacatataggtccttgggaaccgtgacagtaaatgctaaaaagaaagaaggacaatcttcagaaaagggaaaattcctcgaaacatttacaaaattggcacagcgtttataaatcactttatctggtcggttatgttatcattatatttaagaacttgctaaacacatattttatccaatgggcttgaaatatgttttgggacactatatctcatgctgagacacagtgtcccaatagcagaataataaaattagctaaacaagttgcccccacaatttataaacatatattactgtataaatattatatggagatggagtccttacaaccagggagagttggtttcatgtagacatccccagaatgtcctttgacaggacacctatttgcttcctacatagagggaatggtagattctaacagtcatctctttttacttccctaaacttttgatcagttttctggcaagaagtacattggtatggagttcaggaaagagcacagggtgatgccagtactgtgttagcctgacattttccatgtatcttacaattcttccttaaagtatcctcatcaggaaaggcatgtcacagagcaaccaagactgaaagatcaaaggatcttggccttgttgaaagcaaacaaataaatgtatacatacaggccatttccccagatattttcagtagttaaccctgggaaatgggtaatagattattttgtgtctttcaatttgtctatattctctatatttttacaaaatgacacaggtaactttatcattgcgtaaagtagaaagaagactttgccattgtgtaaagtagaagaaagaatagaatgttctctctataagaaaattgcatgcattttaaatgatcattttagttttaaactcatggttaaaatatttaaaatatagaacctaatggaaggatttggtgtcttaccgttcagcaaatgccagtaggtcatgaatataaagacagcaaatatcctcatctttctggaatgccctaattatggaaaacacgaaaagaagactgcttcacttaataattaaacatacaatatgacaatatgggacttggtggttctaactgaaatagtcttctaataaccagtcatgattgacttgtaattgtggaaacccaacagggaattggaagttcaatatcttcattccattgcccacagccacataaacttaagtgaaaaaagttactaaaagatgagaagtttcaaatttattatagttacaggccgtgaaaaaaatctgcccactcaaaagaagccaagaagataatattgcaccaaattcctctcaattatttcatgttttttctgcattgtaacatacctagtagaacctgccctgtacaaaatttcagagcaaggagaatctgacttttacttttccaacctgtcaatgctttttccccctacagctaaatactttcatcttaccctttagctattcaaggcttccacttcactgtctcagccatgctagtcctccttcaggtgccatccttcaaaatctcctcttctgcccctctcacttattctaaattataaatctattctctcaataaacagattcttctactaacagtggggagtgggaaggggagagagttggatttgactaattcatactaagatatgaatgactcacagccactcttccagagtatctgcctagattctattcttcatttagtcatcctgcttgaaatgtgactaattatttcgtttagcaaacactgattgagcacctcttctgtgctaggcactattttaagcatgaggaatacggaagtcagagtgaaagaaaagtcactctccttttgcagtttatgttgaagtaggggagtaaaagatttatactctatttcagccaatctgtgcatttattaatattttctccctcttctgttatacatatatttacaaactttgataagaaagaggtaagttttccctcttagtgcctctccaatctttgtatacagacatgaactcacaaatgatcaactaatcgatgccacgtatatataagacaggagattaatgttcctaatatataaatagctcctaacaatcaataagacaactatacaaactacacataacccatgaggaaaaaaagtgaaaggtcataacatatagttcagagaataagaaatacaggtgacatgtaaacatatgaaagatgttcaatctcacaataaaaaatataagatatgaaataccattttcacttatgagcttgaccacaattgtaaatatttctaatatttagtgtttgtgaagatatgaacaaataggctttcttacccactaatgggaggatttttttctttagggggcactttgatacttcctattacaatcgtaaatgcggatgtcataagacctttcaccctctcctagaaatctatcctactaaaacaaaaacacacacacacacatatatatatatatgtctgtatatgtaaaggaagagcattgctcataacagcaaactgagaatatcctagattgtctaagtggttaaacaaattttggtatattcacaaaatataataccattaaggactgaattcagcatatgtacatgtactgattttgtaaacacatagaaagtaagttgcagaacactacatgtagcagaaatccacttttgctgaaaaaaaaaagtgtgtgtgtgtgtttagacacaggaaatgtccaagatattgacagtgattatatttaggaattaaattagagggagaacaggtaggtttcactctttattgtttttaaagggaaaaaaggaaggaaaagacagaaaaagagagatgagattatggattttttttggtgttctgtgtccaaatttccaagtgaaagaatgttttatttttagtatcaggaaaaaaataaaaccaaaatttcatgaatcacttcaccttaccaaaccgtagaatgtttagcagaccaagtgatataatggaaagaaccccaaaatggagtccaaacatccaaactgacgtagaataataacattcgtttattttttatgtttttttctttattattaaagtaatataatggaattacagaaaataagaaaagaaggggaaaatcccctactatttcatcactctcacccagggagcatctggtgatgcctggaaacatttttggttgtcaaaattgggctggttgagggaggactgctattgctatctaggggcagaggccaagagtgctgccaaacaccctgcagtgcacaggccagcctcccacagcaaagacatacagcctaaaacgtcaacagtgccagtgctgagaaaccttgtcaccactgtgagcaaaaaacatttcagtgtatatctttcaatttttttccctgtaatcttttaaaaagtaatttataaccttatcatacatttaatacccatttgtttcattaaagcttatggcataaatattgcccatcttactgcatggtattcataagcatcttatttaacagttccataatatttaatccctctattgttaggtatcagattgttgccaattttttaaaatatcataagtatttgtgtgttcagcaaatattcgttgagtgcctactgtgtgccagggccccaggctaggccctgaggatagattttcccaaatagtgttgctgatcaaagaaaaagaacatttttctggttctcaacacatgttgataattggtactgttacactgtattttcacccattgtttaaaaaatattatttttttgctaatttgaaagatctgatcattttttggtctgtttatgtcactggtttcttatcaacctgtatgagtccttcatgttaaaagataaaaaggttaagtgaaataacatgagtcatcatcctcttgccagtgttaggtacctatttttttatttctttcctttccgtctatcctgtagatgtggaatagcgatggcattcaggcctgtgaggtcacatttgctaaaatggggctgcagcatctatcagactatcttttccttgggccagagttaactgtacagttataaaatattacttataaaatataaatattacttataaaatattttataactgtacagttataaaatattaatgtgatattttatgattattgtattataaacacaaattcacttactaggcagaagaaaacttaaaatacccctaatgccaagcaaagcattataaccatatgggaataaaacaaagggacattaaatctagtcatggattacaactaattttgccaatgtttatggcctactctggtggagttcttgtcctttaatgaatttggttgaaatttttaggagtaataaaggcttcctggagggtgatggattagatccaatatttacttaatttcttatcaaaccctctcttccacagctccatttccttggggtgcagctgtcattagtgagggacgaaaaggcagaatacaaagatcatgtaaatacacacatgttctttaacctctaaacctcatatcagggcagttggtctaagagaagaagactgacatcttcttcaggtaagaattatgaccatatgtgaattcccatatccgaatggagacatttaaagagcaatgaaatgtaaactggggaagaagtgatggctcattcaggttggggaagtgggtttgtccctgggggaagcccagtataacactatggaactaatactacttctctatcttccaagggtaggatgggtaggaggatgagatagagaaaaagttaagcagccaggagcagtggctcatgcctgtaatcccagcactttgggaggccgaggcaggcggatcacctgaggtcaggagttcgagatcagcctggccaatatggtgaaaccccatttctactaaaaatacaaaaattagctgggcgtggtggcaggtgcctgtagtcccagctactcgggaggctgaggcaggagaatcacttgaacccgggaggcagtgagctgagattgcaccactgcactccagcatgggcaacagagtgagactctgtctcaaaaaaaaaaaaaaaaagacaaaaaaaaccggttaaacttcctttctcaaaagtaggagcaagaggcctgcatggtggctcccgccagtaatcccaggacttctggagcctgaggagggaggatcgcctgaggctaggagttcgagaacagcctgggcaacataacaagagccccatctctacaaaaacaaaaaaaaaattcttaagtaggatcaaagattaagacagttgatttattaaacctctactaagtgaccaaactttattaaactccatgaaaccccatgcccaacctccttctcagtcacactgagacactcttgtacattttccacatggggtttcaattccccacagtatttctgtgacttccttgaagaccacactctaactgctgtcatgtggcctctgcctacctacttttactgagaaaggctaagtttttcttcagagtatcatagttctccttaaatactgttgacgactgtcattgtcaactgatacatcctttctggaaagcattttcagttttcttcaaaaggcctttaaaatattcaggctctttgactaagtagttacacttctaagtttacttgaaggaaacaatcagcaatattccagagatatatatgcaatgagttcagtgaatggctaagacagaaccactgtaaataacctttatacccaacagtgaggaattaatttcatttagttacccaatctaatcgaatgcagcaatgaaaacattttttagaaggttatttaattcatagaaaagcatccacagtaaatttttttcaagtattaaaaaaagaggtagaacaatggtacttttactccttgtgttataagacaaacccagactgaactttgacataggccaaggtcaatgtgtctaagaaatgttttattatactatttttattcttaggctcctccattcctcttttaggactcctttgggttctcagaatggacagagcaaataaattccgttcagggatcctggacctgcttagcgcaggaagagacttacttagatgctgcagctgggataacttacacaagtcatgttactagcaagcagctggcggtggacttggacccgtgtccagacctccagcctagcatcagagctatattctgaacacacagtcgcataagaatgactacctatcctatactacctatcttatttatttttagaggtataaattatttttagagcaaaactgaatcgcgcctggaggaaggccagatgcattgcctgttcttattaaccccaacaggtaattggctctactgccccctagaccatcgcgttccctttcccttctcctctctccatcccaaagaaagggtgtagagaccctccgtcctaaagtgcccagcgagctagccagagatactgggccgtgggcacccgcggaggaacaacgctccctacctgcaggcggacagaagcgcggctggtgcggagcctcgggaagctgcgcagaactggggccgcgcgggacgcgccagctgctcagcgttgcgccaggcccggaggcggggtcccgcccacctctgcccaaggcagcaaatccagtttgccgggcgttggactttcctgaccttcggtgaaatcggcggaagctttcagtttaggtatctagtgttggtgtcctaggaataaagctgtgtatagaaatgaaacagaaagtgaaacatgtcagtccagttttcttgtaaatgagattttcaccgggaagagtttcgaagattaaagcaaatccacatttagtatgttattaataaaaaaagaaatttacaacaagccaacatctgaacgcaccttgattttaccttcagaggggtaagagcttaaggttaccccttaacctttatcagaaaggcgtccccctttctgataaaagcctcttcaaggtgactgaacatcttgacataacttgatataactctacaacatataaaaagtcagcagcagacccatatggctttggtttttattctagaaagtaggtgtgtgtgtgtgtgtatgggtgtataataggaaatatatttttaaatcgtggattctgtgacttcctcaaagttcctcgacataatgaaacttcatttgctttgtcattaaaagaacttcccatcccgagctacatcttttaagaatgctcagggtccctgatattctgccaccctaaggattaaggctgcggaagcctattctaggtgagggttaagaaagcccttttgaaagctttgggttagtgaatgggcccaagatgacagacgatggtgtcataatttacttaagtattatcccgcgctgaacttctaggtgctctcttttctcgaactccttgacctcaagtgatccgccaaagtgctgatattacaggcttgagccaccgtgcctgtgtgctcccttttcttttttttctctttttctaaattgagaaattggactcttcgttgtttgcctttccttcttattcatttcaactgcagttcaaaatactgcataatgaatgaatattgagatagcccttgcattggttatgacatttgcttccaaaataagaattttcacattctgattgtatcacagatttttatttttatctgggaaattattgaggctgacactgccttgatttggcaggagcatggagttctctttggccccaataaaattgcaatagggtttgggcccagctcagatgttccttctttcaaatcacttttgaggtcacatagtagaatagagcaattttggtgactgtaagtttgggtgacttcccaaagttcccgaagttgggtgacttcccaactttggtgactgtgacctctaggaaaatatagacattatgtggcaatacagtttacaggtactgcatatatatagtctgtgtatgacacacacatgtacaacaagtttcatgaaaaaatacttagatctactatctgcaatgccctctgatattttcatttaatgttttatttttctaaaaatggtcaagacccagggcataaactttatgatctgctagttcatcatgactcttgaggtctgcaaaaaacaaaacaaaaaaaaacaactggcttcagagccatctaccactaactagctgagttaacttgggcaaataatttaccaagtagccaggattaaatcatatcctcctagatggcctggatgatctatgaataattttttaaactggggatgggtattttgtttttgttttatgaaagcagtgttcagggtctacctaaatgatcaatgaggcaaacggaatttgcctttctctaaagttgctgatgggaattgagggtatttgctcagcttgctgctcagtgatttgcgtattagtaatgtgaggattcgtgtttttgttcatctttcccacctgtttctacccttcagccattcattttcccatacaattgatcaactacccggagattgaaaaacaggctgtgtttagaaaaagagaaattttattacctcagaaaaatatgtaaagcaaaacagatggttaatgagtggggggttaagtcctgaaactctgtgtgaatttttttatttggacgaaatagatggagaagtgctgagatgggagaagagcagtggggagccagggctgaagagctagatactatggtcatcttgaataccaccacttcctattcatgtaacatctactctattcatttttagacatataaattcatcattgccaatgtgctgtttctcagagtgtctctgatggttacttgcattacactcgacttggggttaatgtttaaaatacagattccagggttctgcctgggatccaaacttgggggcagggtcttggaggtcaacattttaacattgtcctcaggtgagtcatgttcacatttgaagttttgaaaactagtgatttaatatttaagggaaaaaatgagccaagagttctttgcaagtacagctgtaattcgctttcttccatctaatttggctgatttatcagtaccatccttccttctgcctctgtctaccctgcttgccacttttgcttctaaagcaggagagatgatcctcgtttgtactgatctcaggaggactgatttcaagatcttataagtggacctgaagagatgtgagcaaattcctggtgaaggagcaatttccagtaaatgttcttgatcttcaaaagcagcatatactaaagagactcaaaacaaaagacatgacaaactgctttgtttgcatcgaatattttaaaatgcattttattatgtataaagacaatatcaagatttgtctccaggttctatttttgatcatgtagggttttaaaccactgccctatgcaatgctcatttctcttcctctgtttccatccaacccctcacatttgttgcccctacccttgtcatagactcacatcctatatgtgtctcgtgtcaaacagacttcgtggaaagaatactttgttctagttacacaaaacaatggtttaaatgacaggggtaattaacatgtatgggtgaccagagagtagcagctgtcctcatctgacactcacaatcagatgcttctctcgctcacactgtgtctctctccttcctgtcctaagctggggaagagctgggcaggtgaagagctcttgccttcaaagggcagaccccatgccacaggtactttaaaacaaagatgagacctccaacaatttcccccacccacaataagttcataaatccagacataagtagttatggcctggataaatgctgtgggagttggggaacactctgtggtaaatattttaaatctagggaatctcaataaatcaacaaaatgccactaaagataaagtttacaattgagagatactctttcaggggatcctagaaaatatttcttgatttaatatcctagaactaataacataagtgagtgtcacacaaatgaaatagtcaccttgtgaatcatttcctttggtaaccacacttaaggtgaactggatcaagaacccatttaacccatttatttttgtaggctcatcataaaagaatgagaatttttcttttccccaccatttccttgaaaggacagcaagacctttctgctctgagagagatatgttccaaacagaaattaataaataaaaatttcagataccgaaaagtcctatacaagaaaaaagaagacaagtcagagcaatatggtatagtgcacaggtgtgaggttcctttagttatggtggtcaggaaatgtgtaagaggtgatatctgagaaatgaatcatgaagataaccatggaaagatctgccaaaagagcatatttggccatgggaagagacaggtacaaagactatacgggtggaacaagcttggcaagttccaaggatgaaaagaagagaattgtgggtagagagtgaggaagagggatgggagggtcaaatcatatcatgaagagccttgaggactaggggagaggttgcattctacttgcaatgaaaagccaccagatggcttagagcagggtagttgcctgatgaatgttctaaaaataccactctagctgtggtacgaagaatggaatatggaggggacttacattcatggaggctggaaaatctttaggagctgtttctgtagagcatgttcaaaatataatttggaagtagaaccagtaggacttattgagggatattagtggtaatggataaaaggaaatcaaggaagatacatactcacacacacatatatttgtatatatttatatacattacatatatatttgtatttatatacattaaatatatatttgtatgtatttaatatgcttttccagagtaggatactatagccagtttcaatattatgtgcattctctaaattaaggaagtctaaaaacaaaacagaaactttcctggtaagtgaactactggaaaccagtctaaaccaatcaagaaaatcatgatttctaaagaaaaaattacagtcttttctggaaatggagaaattggtggcagtatgttgacagtatttcaaagccatgctcctgaggcttgctattaaccaggctccagttattttggagaaattcacaagaagggctgtgggttaagtttagagcatttttttaaaacaattcttatgttttttttttatgattctaaacattggaatatttgaaacatttaatgtttgaacattattaagatacaatatttagatatttgacgttttctacttcgtgtaagggggtttggcatcttttagaagagagactcgaaggtaagtacaaatattctgaatagtgcagtatatcattaaacacaatatcagaatttcattattcaacacttattccatggattagagaattctttttttttattatactttaagttctagggtgcatgtgcacaacgtacaggtttgttacatatgtatacatgtgccatgttggtgtgctgcacccattaactcgtcatttacattaggtatatctcctaatgctttccctcccccctcccccaaccccacgacaggttccagtgtgtgatgttccccaccatgtgtccaagtgttctcattattcaattcccacctatgagtgagaacacgcggtgtttggttttttgtttttgcaatagtttgctgagaatgatggtttccagcttcatccatgtccttacaaagaacatgaactcatccttttttatggctgcatagtattccatggtgtatatgtgccatatttccttaatctatctactcatctgacaaagggctaatatccagaatctacaaagaactcaaacaaatttacaagagaaaaacaatcccatcacaaagtgggcgaaggatatgaacagacatttctcaaaagaggacatttatgtagccaacagacacatgaaaaaatgctcatcatcactggccatcagacaaatgcaaatcaaaaccacaatgagataccatctcacaccagttagaatggcgatcattaaaaagtcaggaaacaacaggtgctggagaggatgtggagaaataggaacacttttacactgttggtgggactgtaaactagttcaagcattgtggaagacagtgtggtaattcctcaaggatctagaactagaaataccatttgacccagcgatctcattactgggtatatacccaaaggattataaatcatgctactataaagacacatgcacacgtatgtttgttgcggcactattcacaatagcaaagacttggaaccaacccaaatgcccatcaatgatagactggattagagcattcttttgactaagtacaaagaaggaaagcctcggaggctgagaaatgccatcaggtgggcatcagcacttaggtgagtgtgtgaactctggagatgaactggataggccaccctccaagcacctccacgttcagcacctccagaacctctccaaatcccctcatttagggatttttatggggacttcatcatgtacacatcagcaattgttacctcaatcttcagcccctctccccttttcacaggatgaggtaggaggtgaaagttccaagcttctaatcatggcttggtcattcttgtgaccagctcccatccagaagcccaccaagttacttcaggagaatgaaagatgctcctatcactatggaaattccaagggatcaggagctctgtgtcaagaactggagtcgaaggtcacatagaacaaaaaatttacctagcatacctatcactcaggaagttacaagtcttttaggagctgtgtgctggaaaatggggaaagaaattaatgtatatttatttattataataccacatgtaataaggtagatcattttactcatcagagttcaggaactgttctctgttatttttatacacattcagagtaggagaccaagttgaatttcacaggattgcaggaggctgagattcacaggctgagaataggatcatgtgagttgcatgggtttcaagagaaggaagttaacaggggcttagtatagtgctgtagtgacctcgcagttgaggaggatagatataaggtgctactgtcagtgggaaaaaataggaaagagagaaatatctagagaagattttaggagtttcttgttcaatatgctgtgtgaagcatttgcggggactccttcagaaagcataaggtgaagaccctcattattcttcatgcttcacagtttacgttttcattcagtttatgttttcttagaatgctattacatgcatggactgagccatgtgaagcctcagttttattcaggttacactctgaaatataatcattttcagctcaaaaaaccttccttgactttattaccccttacatttttatcttctccaattactccttttcataacaaacatcaataaactgtatcattaccttttaaagctatcaaattaacaaaacaaaacacaataattataataaagattaaaatagcagcaatggtaaaacatataccatttaaaaaatgtcagaccctatttttgtgatttacacatattagctcatttaaatcttacaacaatcctgtaaggaaggtactattattgcctctattttagagatgtggacactgaggcacagagctttagtaacttgtctaaacgacacagctaggagatagcacagctgggattcgaacccagacatctggttccagtgtttatgctcttaactattgtgcaaaggtatagtgaaatcagcatccttattcactgctggcatggtgtatttgttcaactccaaaaagttaaatgcagagttaccatatgacccagcaattctgcttttacatatatacccaagagaattgaaaacatacgttcatacaaaaacttagcagcattatttatgacagcaaaaaaaatgggaacaatccaaatgccccacaattttgaatggataaacaaaatgtggtatatccatacattggaacattaatcagacataaaaagaaatgaagtactggtacatgctacaacttggatgaaccttgatcatactaagtaaaaggagccagacacaaaaggccatagattgtaggcttccatttatataaaatgtccagaataggcaaatctataaaaacaaaaagtaggttaggggtccccagaaactgggggaatggggagaatggggagtttggggagtggctgctaataggtatgaggtttctttctagggtgaagaaaatgttatggaattagataatggtggtggttgtacaactttttgaatgtatgaaaaaccaataaattgtacaatttaaggtggtacattttatggttgtgaattacatatcttaatcttaaaaatctctaggtagggagagaacaggatctgagtccactgatgccattatattacactgccacatggtgtcaccgttgaggaatggatgaagtccaaagaaggcttacacaaagcttgtgtccaggtcatgcccaagctacagaggtgccccaggattggagtgaaggttaaaatccagaatttggggagcaccatcccagaatggtttaatattaaggaggttctagcctcagccccacactgtgcaactatttgcagtccttcacagaccgaagttcttggctaaacctggttcccagctcaatggggaaattcaaatccttgtgaaagcatctctgttaaaaggagacactgctaggcacatcttaaacttccaaacactttattttttgaaaaactgcttctttatggaggtccaaggaaatattgggcaatttttactgtcctgggatagggagcatcaaatgagttgaggattttacatcaattttctctaaaatatttatactacttaactcagtgtatacatatgcatgtgcatatatatatgtgtttatatatatacacacgtatatatacacacatgtatatacgtgtgtatatacacacatgtatatacgtgtgtatatacacacgtatatacgtgtgtatatacacacatgtatatacacacatgtatatacgtgtgtatatacacacgtatatacgtgtatatatacacacatgtatatacgtgtatatatacacatatgtatatatgcgtatacacacatgtatgtatatatacacatacatacgtacatatacatatacatacatatgtatatatacacatatgtatatatatatgtatacacacatatgtatatatacatatatatactgagaaatatccagcaatggaagttgttacatacacacttattgaaaatcctttagctgttaaaaatggtaaatataaatgcaatgtagcaacataaaaatccttatgttataatgcaagatgatataaaacacatatttatatatatgcataaaaatgtacacatatatattcacaaattcatacaactgaaaataattcacataccagttaaagttatatgccatttgattctgaaataaatttcctttaaccctcttactccacattttataaaatgtgtccaatatctataccaagactttttttttcaatttcctgggcatatttttctatggtcacttttttcacttatgttttaaaattatgaaaaacatcatacatacaagaaaatttataatgtgtgttttcggtttaacatgtatccatcaggaatcagaattttactcagttggtttgattaaagagatattagtgaagacactacttaaaggagtatgactaagagaaccatccagttgagtcatccagagtctagcaacagcaggaagactgcgctctctctaggctacatagcaaaggagaaaagtgtttccagagcccatggagctggagccatggagaagggactgcttgccaagagctgcaattgtggagaaacacaaccaccaccagatactcagccccaaacagagaaagaacagagaaaatataccctgatgtctttttcctcctgcctcccatctccctgaatgcctcccgctgtccaaactcaaatggaaaccagctgaggagagcccaggtggtgccgtccaaagaggtcagctttggggtatagaacagggcagggaagtgaggagaatgaatatgatggaaggcaaacagaaaacctagacagtctaattgttttgtcacccagaatttattcttttcctttgctcagatgaagagcagctcatcccttacatatgagaatgacagagtctgacaagatttctcctcgaccaaactttagtcaggctcctctaagccatctccttgattagatattgaccttgggctgcagtgttcatccttgcagaatcagtgttggcaagaatcctgctaagtcagtttagagaggatcttcccaccctgaatgtttgaccactctcaatatctgatcaaattccttacccccaccagcccccaggtgatgtctgcttaccctggcctacctttagcaagaatcctgttaggtcagtttagcaaggatttcccctacccttgctgtctcttcttagtaattttccatccacggaccccacccccatccacacaacctgctcctcggctataaatccccacttatccttactgtattcagaattgagcccagttctttaccaaggtctctttccccctatttcaaaagttgctgaataaaaatctatttttactgctacagctattgtccagctttgattttccttaacaagcctcatcagctgccatattgccttgaggggatgtcagttcaggcacattctcacccagaaactaaattgtaatatttatctccaccactactctttatgcagggtaataggaaaagagagtcagggaagaagtaattaacattttaaatggagagctactataattcctgcctctagagcttgttgcaaggctaaaattaataatcatagcttcctactcatttacttatgtatgtttcccctgccctatgccaacacctaggtagatcaggatttttttatctggtatgcttcaacactttaatttcttcatgatctgaaatttctgcattacttcagttatctgataatcattattatggcacacggcagtattaagaagtgcccagtgaatctccaggtgtcatgcatagttcttcttgccctcaatatatagatgtaacccaatttccttttggtatttgggatgaatcataccattctgtcactgtgaggaatcaaagtgaccagagggcagtttcagctttcgaatcaatgaattgaaattcaattcaattcagtgacggggtcttctagtggcagcattccttcctttggatctaggcttccaaacacaataaacccaaggttgtagaaatggtgtgctggaatactatgcagccataaaaaatgatgagttcatgtcctttgtagggacgtggatgaagctggaaaccatcattctcagcaaactatcgcaaggacaaaaaaccaaacaccgcatgttctcactcataggtgggaattgaacaatgagaacacttggacacaggaagggggacatcacacaccggggcctgttgtggggtggggggaggggggagggatagcattaggagatacacctaatgtaaatgacaacttaatgggtgcaacacaccaacacggcacatgtatacataggtaacaaacctgcacgttgtgcacatgtaccctagagcttaaagtgtaaaaacaaacaaaaaaaagaaatggtgtgctggatattttctatttctccctccaggcattgtgcctagtaggctgacctctacagactacacagacctagctccactgtcttctggcttcctggtggatccagccagcggaagaccccagctggatatcagagctgggagaacagagaggtgggtcttctccactctgtccctgctttgggctgacgtctcagcactggctacaactatagaatctcaccttacttggtgaaaagttggcattgcttgctttcctctactgaacgacacggttccagttggttactctctcgtacagccacagctaccgctctcgctctcgcctggttttagtaactgcttccttcccccacccctcagccctatagttactaacagctccccgctgttactggttactactggttacggaaggcgaactatgtgcccgacactgtgctaaatgcccacatatattatcttttagtcctcacaatccaataaattagatggctttagtcctgttgcagaggtgataaattcagagtgacagtgacagagctagaaattgaaggtaggtgtgtttatgctagagtctgtgcactcaaacacgattccttacttcttgcatcagttgttaacctcccttcaagagtgtcaaacctcctggtaacccgcccattcccttaactggaaatgagggtgctgttgcaattttctcatccagccattccacaaatggtatctggaatgtgggacccacagtccagaatcctgagggctgctgttgagagcatcaagacgcgcccag

SEQ ID NO: 962803 - DNA, 44657 bp, Mus musculus
tgaaactatgtaggtagcgaccctacaacacttaggatgcattcttttcatggaagaagggctgaatttaaccaatgaggtcggtttgcaaagtttgcagtgaggataggagcctgatgcaattcagatactgccgtgcacacagataagtgtgcagtgaaattgacgcgccattctgtacaaaaacctcatggtgaccaaaatctctcccactcatgacctctctgatgctcctggcagggcttagagaaatagggagaaaagcagaaaattgcagttgagctgcacggagctccttgctcgatgcaccagcgcccccttctggacgcaggttccaagtgcttccctctttagtttgctaaagctgcataccggccaccactgcgcctccctcaccccccaaaaaacagagaccacgatctggctagtttaaacgataggaaaaaaaaagagagagggtttttgtttgtttgtttttgtttttgtctcagttctggaatctagaaatcaaaaaaatcaatgtatttgattcctggacaagctgtgaggagatctctgtcactggcttgtaaatgacatatttggggcacatgattaaatttcctcttaaaagtcaacaacatatcagattaatacccaccctaaggatttattttaacttgatcacctctgtaaagacccagtctccaaatgaagtcatattggggttgggtttccagcatacaagttgttgaggggatttcacaccagccagtaactgatggtaagtaatttggtgagtttttgtttaaaataacctttgttctgtggaagctacgtgagcctcaggtgtgacatgtccactgtagagtcgggaatccaagataggacaaatagaacgtctgtctgctggaaaacgaaggtagtgtgttggaaggtacaactggagccgttctcttgcctctggccagtcaggtgaccaccaaggaccttgaacattctgtacattcttgatgggtaggtcaaaaaaaaaaaaaaagcaaggccctagctaccggagctgagcgatctcttgctttcgtgccagtgaacaaccctggggcatgaaacgaagcaaacgcctccacactcctcctgttcatggttcctcacagaagcagtagattcccgacactcagtgttccccatacctgacccacatccacagagtgcatgggctttgagtagcaggaggaagtgacatcggtacttagctcacactgcttccgtgcagtgacggactcctctggtgtaggagtctctggttttctgtaacttccaagaggaataaagaggaatagaatcctcagatcttcacagatcctgaggtcatgtagtctgatataagaatgaaactcttgtagtttccacccacacgccattcttatttctgagatactgggctgattcctaacctatacgtctcctctggccattgctccattacagtaagacttgcccattctttcccttttccccaaaggaaccattatcccacaccgaaacttaagtttttaacatcagtggggtatggtggtacataccaatactcctattactgaagagacagacaggaggactacaagctcaaggccatcttagactacataaccagcttgaagctagcctgggctatatgaaaccctaacacttaaaaaatatttttaatagcaatgatagcaacacctaatataagcaagaggcattatagtacacattctatataatgtacattctatataatgtgcataatttttacttcttggagcatctcggaagtgtgtattgcctctagggtacagaccaggagaccgaggaccggtcatgtgcacagtcaggatgctatgaattgattcatccgggtgtctaggttatctctcacttgtactgcccaagagtagggctttctactcttagagccataacagaccacaggggcctcatcatgaccattgtctaaaaccttagcaaaacaatttaggtcgaacattttaacattcagctgtgtaatattttaaaatactttgacagcttatattagataattcagcaatctgttcgacttttttttttctaaacatctactgtacaatccaaggtcaagtaccacagtctataacagtttcctagtgcagctttaacaagttatgatcaatggttaaagggccaaaacgggctggcgaggctctgtctctctgtttctttggcttttccagcttattaaggttgcctgcattttttggcccatggccctggttctctccatcttcaaagccagtagagtgcttctcaggttatgactatgtttaagacttttatgggtaacagtataacatctaattctctctctctctctctctctctctctctctctctctctctttctctctctctctctctctctctctctctctcacacacacacacacacacacacacacacacacacacacacacacgttcttataaaggtcctggaagttacaatggatccatgttgataatccatgataacacttctttagatgaacacattgtaaattccctttccatgtaaggcatcatattcctaatatactcacaggttttaggagttcagaatgcctcgaggaagagccatattctgttcataatatactctaagcaattacctagtggtatagaaattttggctcaagtatctggattggagacatgggctgttcaccagttatttggtcatccacttcaccttgtctttgaggatggagcccaggagcgtcttaattaggagtcaaagggagtcgaagagactgtgcctctagagcaccattctagaaacttaacaggattaggaacatggcatcttaactagcacatacctgaagccgagcatgcgtaaccatgaactcctgttggtttttcatgttttcgttcatagatttcgagaatataaaccccatcttgacctaaagtggaaaatgcaaggcatatttaaataacagactctgtgcatccttatacaggctctggactcctatcaactgggatgagagagagagagagagagagagagagatgacctagggaacagtgtaaattctatgtagctgtctaccctcaggcatacttcttacccagcctgagcatccttctctcagccaagaacagctgactgaaatgatttcccatctctccctgctctgtgaacacacagtgccacgttacctcggttttcccttctataagtctaatgtgattcaccttcataccagctgttctgacagacaggaagaccatgcatctgaggatgtgagttcagaactgtcgtctgtccctcttgaccttgtgtcttaagatgtaagtgtcttagggtcaattcttcagtatttctcctgacgtctcatgctcccctccttctctgacacaggtctcatcctcttgcagctgatttccccctagccagttttctccagcctcgccttcattctctccacgttaccgaggctctcaaaagggcagggtgaggatgctcacacgcctttgcaaatggatccccaggaatgggaagtttgtgtgagtgtatatattcattcatgtgcgtgagtgcaggtgggtgtgtgccacagcgctcctccaggtcagagggtaaccctgggtattgttctgcacgttccaccttgtttgagacagtctttccggaatgttcctcttagctgtgtaccccaggctagctggtcgggagcgtccagggatcctcctgtgtctgcctctcatctcaccactgcaattacagatgtgtgcctctgtgcccaggtcgtcattgatgtgcaagctttcagcacaggtcttcatgattgcatggcaagtgctttacccaccaagccatctcctcagcccagaaatggagttttaaaatgaccacatggtagagtttctccattatttccaatggaagttatagcacaataagctcattgcaagttggaaataccattgagagaaaactgcatttattacaccgaatatacaccgaacattgtggtttatcttagccgatgttactgttctcagaaacacttaggttagcctgaagaagtacagacctttttttttataataatatgctcaatatagttcattgaattttacagtaaaattaaaaaatagaatggctgttttgttttactagcctgggacatgaattcaaattttgattttctttccccttatgatctatatcgccttttttaccatcatttccttaaaaactgacttgagccaccctctacatcaggcatggccttgttatttaggtataacagctaccccagagggctataaactatgggtaagaactcctaactttgttctaaatataactgagtatgttcagagaaacactttggttagttattggtttttcagaagaccataaggcccggggggggggggcgggggggcgtgtcacaacatctccactctcttcagtgctgtcttaggctgttaaatacctttccaccacagcagcccgtctcaatgcttcacagccaggatttatgtataatctgaggaaatcccggacaacagttatttccacagctttcctcataaggaaatccctgggtttagagtaacctagcagatgagcatggagaacaggggtagttcgaatcagttgggatggttaccctgttagtcgggctccaggggagtatgaactgacagcctggtttcaatgatttccgtgtattctgacaaagacgaagatcgcaccctggaattaagcagcccttgagccaatcagctgcgaggctgagcagaggctgaactacttcccaggaaggaagagagagccttccacagccctgggacatcatgattcctcctgactctcactgtcccacttagcaccctaccagcagcggcagagggcactcatcgtggaggggtctctagccgtttgctctcttatctaagtattggcagctcacatgagtcatttccagctgagcctgcaggagaagtgttatcatccatcatgatagtctctgtggcttctatttcacacaaataattgcacaaaataaggaatgcttgacagaagatcaaccttgtcaggctgctcaacatcctttagttttcttttgcatgtcggagcagacggttgaatttttacatctgctgcaagcatcttcaaacatcttcaaagaaaccgactgttttctagtacacacacacacacacacacactctcccctcagtcccttggcctaagggggttagctctccatcccttgaagtggtcggacaatctttcagtcaatcgtctagagaagagaagagaaacactttgaaaagctagctaggatttaggcttacctccttctgggccttgctctcttggacttggactttggatgtgtcgggggaaatctcaggtacacggttaaatatagaaggcaaacaggagtgtccctctggagatctcacctgccaatgagcatgccacaccctgtaacttcacccttgaacagtgtttccaacctcttctgaccatacctaacaaagccatgttgcactctttccttaggatgtcccaaatacctccaaatgtctctctcccagagacacgatattatcagcgataagtaagcgtggccccaaactgacttattacaggcaacacagacaaccaccatgtcctataggatggaggatacagatgtgagtccaggctgctcctggatttttgtttgtttgtttgttttgggttgaggatggggaggcaggcgtgtctcctgttccaagaggccatgattcaaattactctggaaaggcgtgttgggaagggtgtcctgattgtacagatcccagacagactttccctggtcatccttggaacctggattccatttagaaggaaagaaattctacacgatttctgtcatccagatttcttccctgatttagtaccagaatttttggctagtcacaacatcactatcattctcaataactcttccaaaccaagtcccctagcaggaagcacataacctctgggggtgttttgttttgtttccactctcgctctgttgagccagtttagcgtcatataggtatttccctaaaggaattccattttcctgtccattgcactctgcagtcttgtcccaacttggtgacaatggtacagagagatcacactcacagaactgggttggcaatacctgtcagcctcggaggcatcagcaagaacccagagccctggccttccctgcccagccagagctgcagctgtgcgggaccgtgcgacggagccgacccctccctcccaggtgtctgtgacccgaaacactcacgcgacacggtgcggggacggtgaccgcagcagaggcctctagccagagctccagagcgatcagcgcagggacagtaccttgcttcggcagagccccaggattggttggctatgacagtggatcacgagcttcaaccaatcagcgtggcctttggctcccttaagcgctcgggtgcccgcggaggcctggggtgttcttccggtgcaggcgcctggagccgggaggtgggcggggcgggacagaaccgcaaattccaacctgcatggtcttgtaaggtgcgtgattttgagggaaggcccaaggaagcagcgtggaaatgtttcaagtcctcggagtccggtgcctcaaaaacaaaacaaaaacaacaacaaaacccatcaccaaatctcgcttaaaggtaaccagggaacaaaagcagacagtgaccagaatttccgtatttccctatgcgttttccatatttcgtactcctaccagaattgtctgtctatagtacaactccgaacttcactaggaaacactggacccattagcacttactatgtaaccggttggggaaatagtatgtgaatcacaacctttaggaagggctctgcattagcatgtgttggctccacaccttagagaaggcaatctagcctcttccaggcatatctagcctcgcaggcttgtatagatgtttttagttccagtgttccttattctgacttttagatccctcattccaaacattacttggatgggaaaattgcaacagaatctttatttagttctatttgtgggaggagatgggtgttgctaggagtaaatgcttttggagagaaacaagtagcccatccctaaggtaggaagtagtgtctatacgtgcagactaaacttgtctccgttctgttcccagctctgtaacctgtacgaggaacagaggtcgttgtaccttcagataaacactgtgggaaccaagaatgttaaacacacagggttgtagcttcaaagagaaagatttagaatgtgttttccgcccagaagactgggagcagaagtggttaacatttgcactgtgtgtgcgagacctcaccagatccttccctcatcatgagctgtttttctcagtcaatctatagaacctatctttatggataatgtcacatgcagtcaccctagagaccccatcttaatctatgttctaccttttcaaagacttacatattctagatagttcgtataaatgaaacggacttcttttgtttttgttattttttttttgttgttgttgttgatgctgttgttgtttgagacagggtttctctgtgtagccctggctgtcctggaactcactctgtagaccaggctggcctcgaactcagaaatttgcctgcctctgtctcccaagtgctgggattaaaggcgtgcaccaccatgccgagctgacttcttttactttaacactagtgtgtgtgtgtgtgtgtgtgtgtgtgtgtgtgtgtgtgtatctaagctatagtaggggctggtgagatggctcagtgggtaaacatgcttaccaccctgagacccagttctatttctgggctccacatagtggaagggaagaacccattattgttagctgtcttctgacatccctaactgttccacgtatgagtgtgcacttgcgcacacagagagtaaatacatgttaaatggaaagaaaaattaaacaggtaaactatagcatggattatggctccatttcttgttgggactaaatagtagtccagtgtatgactataaggcattttgtgtgtccattgagaccgatggacatttgcatgattctatttagtctagtatgaagaacattgctagttttgtgagcatgttgtcagttgtcttgggtagtaggggtagaatggctggggcatacagtagtaagtcaaggccttaaaatccacacactgtgattgatggcagtggatgaggacgctcacctgacagtccacctgtgtggccgctgtgtagcagacactggggcatcgttccgggtttcactcccacttgtatcctttcctgaacacgtaagcttccacaagttacttgagcgagatgtctccaattacacagccctgaagtggaggtgactccaggaagcacaactcataatacaagttaggtaacctagtgtatgcacccgttttactattactgacacttttaatcattactgtgatttcatcttattaatttgataggcttttttttttttaaatgatgctgtagccaaggaagactattccgagcaggggccgccggtacatctcagagtgtaacctgaatcagatgaagcttcatgtggcgcagcccaagcatttcatagcatcccaagagaagcttgactggggaagccctggggaatagtgatgagggtgtgggctttagccttcctaggctgtatgtaaataaccgcacagctgatgagcaggaaacttgtagctgtttctctttagggtgcttttcagctgtgatgtcagtattgactaagcacctgcttgctaacttccttctcctgcaacccatgcaacgcacatgaccctgctctcaacctgtgaatctcagcctgttctcctcccctgagtgatcttttcctcttcctcctcctcctcttcctcattccccttcagaaaatagtccctgagctctgagaactagggctgtagagagcttatccagttacgggcaccccaaagcaccaaggtttgattcttagcagcttacaactaactgtaactccagacccacgcagcctgacccttgcttctggcactctccaatgactttgcattaccactgggaaccaacctttctccttaaccctccaggccctctgagacgtgatgagagccagcctttcagtctagactgcagcacagtaatattctctgcaggaactgtccacgcttgctccccttcagcctttgcagtttgtccctcctgcaggttgggtatctccggaatcactttgtgtagtgccttacccttgagatggttgcttggtcttcatcgtcagctaagcagactgggagcagcaaggaggtttatctccctgaaatgagtaggccaggtggggtatgaacaggaaacagcaagattagaaatgacattagagatttgttccactcttcagtcttggctagccgctgtttttctcttgtctgaccgtttctctattcattttgtccaaatcacaaaaactcatatcattttcagggatacttatctccttgcctaggctattttggcttatgtgtatttttgagatggtgattttatacacacacacacacacacacacacacacacacacacacacacacatatatacatgtatacatgtatgtgtgtgtgtataaaagtcacatcctcactttctatttctggaggataccaaaacttcattaagggggcatggacaacttcatgggagaataaatgtcggaggagtagaaacaggtggaggagtgggggtggggcgactcttcagattactcatatgcaaatcagcgaaagcagcaggccccagttcccatggagagcttcagagagaccaggttcagtcaccccttgccttctctgtggagaatttatgtagactgtaagcaatgctttaacaaaacaaacaaaaccaaaccacctcacctcttctagctttagaaggaattcacatatcatagagactactaagggggtgtggcttaatcctcacctctcagatccttatggaaccaagggaactcagctaaggagtgggtctctaaagtgaattttttacagatctgaatagtcacaaccatactaacatatcataaagcttggccaggcgtggtggcgcacacctttaatcccagcactggggaggcagaggcaggcggatttctgagttcgaggccagcctggtctacagagttccaggacacagagaaaccctgtctcgaaaaaccaaaaacaaacaaacaaacaaacaaacacaaacctattaactagaaatatgttttgtctgtgcacgtgtatatacacacacatatgtttagactgaatttccacatataaagtctatattttattttcagtcagccaactaatgttatctctaactttaattgctttattctattattggggttcaaaagacatttggaagagggactatctcagctgaggctctggtcttattccaattttattgttgctgtttagagtgccacattctctatagatcctttaggcagcatcaaccccaatgacttccaagttaaaaatggagatgctttgagaatgtgaaaatctcattacaactaagccagcggacaccccagtattcacccagtgcactactttggaatagtagttttagtaagtaagtgggggaaagcagagaatgaagaaggcccttgaagtccaacagtgaaatgtttaaagatgacagtgctctgtggagttcccaaggttttgtcttggaaaaagtccacacttccagttcgcagaaagtctttctcaacatcatttagaatagacttcccccacctggatcccgagactggccgtgatccacagcgttcacaaagggcacggttcgagatgggaagttcttgaacggcaagacaactggtttcattatgtcgaggaactttgaggaagtcaccaaatccacgatttaaaaatatatttcctattatacagacacacctactttctagaattaaaactgagtcatttgcttgatattaactctataggttgtataactctatatgtaaagtcatgtcaagactgtcacgtatccacgtatccagaaagggcttgaaagagatggggaatcggatggtaatttgaagtgtctggattctgaagataaaatttaagtcagagatcttatgacttcagatattttgcttctaaagcgctcactgctcaagcctgaagatttgaaattcgggtcctcattacccataataaatgcagtgatggcccatttctgagaccctagccctggcagcaggggcgcggatggggatccctggaccacgctggccggctagtttggccagctgcgagcccgaggttaggtaagagagaccctctttcaaaaatcaaggtgggagctgtagaggaaggcaacctatgtggatctccaagcacacgctcccccccacccccacccccgacctcaggttccactcccacccaaaatagagctgagttgtttactctggactgtttctttgagggaacctgatttacaagaaagctaatgcaggtttcactttcacttttagtttcgtttttaaatagtgtttgtttgtttttgtttttatcgacagcctctcagtagcagcccggttgtcttggagctctctctatagaccagagactcacctgccactggctcctgagtactggaattaaggcgtgtgtcaccgcaccgaagcctagtttcgttttttcttaaactgtgaatatcccaaagctgactctaaagtcatccgcaggaaatactatgagataaactcatgctcaaagggactgggtggcttcggtttcacagacagcggaggttggacaaggcttccgcggagtgggcggggctctgaactcgagataagaccaggaaatcgtggtccccaagcctcatgccaggctgcacttgcacgtcgcgggccagtctcctcgcctgcaggtaagggagcatcttctcgcggaatccgcttgcagggcactttaaagagccagaatccctagacctttttaggacggagaagggaaccggtttcctgggaaagttaagaactcagaatccgcagttttgtgtgtttatggatcttgtgggtaggtagctgggtcagaagagatgaattaattggtcctagcgcgacttgactgtttgctagcaatgactgggtctttccacttgaagcatctccggaggtcccttcctctgtcgaggtctaggatgctggagcttaagattttcattctatctgcccagagaacctaaaggatttttggaagaaaatgtcccaaacagttcttagatacagtgacctaggctatgttaaagtttaggttggggttgtcataagaggtgaaagtacaatattctatctttttttaaaaataaattattacaggtgctttcctatgaattacttagccagtttttttttaattgctatattccattgtgctgggttattaaagggcatcactctcccactgaggaatgcacaggttagtaatagtgccttactagctcagtcatccactgaccatctgtgtatgtgactgtctggaatatggctaggtatttcatttagataaactcttatatgtataagtacttcattatgtttgagtgtctgaaaggcctttgtgtagaaaaaaaaaaaacaacaacctgagaatacattccagaaagtatccgcagctgatgatgatagtgaccaagcggtgtttaaggagaactttatacagggaaaatattcacctttcccagctgagcatcatagataggaagacatgatagtggttatatgctgctctaaggagggatggagaagggatggatttgagcacagggttcaggatcatttgatagaatttgaaaactgggtaaattttcactcttttgagaaaggaagtttgcatctgcttcccctccccgccccaggcactcttcccccccccatccccccccgtgccccccccccccatgggaagataaagaagtggcgttccaagatcttcatctggacttcccctgggacaaacctatttccccatcttgaatgagcgtcacttctttactttaaactctgttctgtgaaaggctctcagctcttgtctgggaatttgtgaaaggttacagtttcttgccggagggagggagaaggtgaccctggactcttagcccatgtaagaggtgcaggtttagaggtcaaaggccatgctgatttacatggtccctgaatttccccttttgatctactgctcacacctgcaccctgagagccagggaggggaggatatgatactgaagaaggtgactatcagacccaacccatcacctttcagactttatactaagctttaaagcagactcataagcaatagataactgttccaactgagtctgccatcaacgtaggaaaaattaggtacagtcttcagtggatatcatgtacctcattgtgactgtctagtactcggcttggccatttctcccagggcctcattgcaacagtcactgtgtcctcacaggcctggatgtcatcctgcctcatctgcttgggcagatgaactggagagatatgattaataatgagtcatttgattttgctctttttgtaaatgtccttggtttggtttggtttgtttattttttgttttgttgttgttgtttgtttttattttcatgctcttgttgttgtttgagacagagtctcactatgtagcccaggctagcctcttcccccagtctctcagatgctgttgcatctgcccttttctaacatcaatgattcataataatcagcaagaaggctatgaccttaacagtcaaaataagtaatcaggtaattattgagagctaaatatttatttaaacaaatcaagttgcatttttcaagaattgaatggggggatctaaaaagtaatgtttgtgctgcacaaagatgtagtggtatcagttgccatagtctttctccctagatccgcagatctccttagggaaatctataattcaagcctaaacttggacctggtacacaactggtactcgcccaaacattggccaagcacacacatatttgtgactctgaaaaaagggacaacacataacagcaaaggcgctccgtgttaggggcctgttaaatacaagacttggggaaattatgccataatcttacattttaaaaatggctattacatgtgtgagacaacgggggctggagagatacctcagaggtactaggcacacatatggcaagcagatgtacaagcaggcaaaacattcttaaaaaacaaaaacaaaaccccaaaacagatttctttctatattatttatatggggttctgcctgcgtgtacacctgaagggcagaggagagcaccaggtctcataggtggttggttgtaagctaccatatggttgctaggaattaaactcaggactttggtaagagcagccagtgctcttaacctctgagccatccctccagtcccagacaaaacactcttacacataaaataaatcaatctttaaaagtgtagaggaaaatggctgaacagaaactattgacagacatgctgagagtggtcaccgtttctccagcttggcactggtggtgctgtaggccatctcagtgtctgtcaccttggggcggggcggggggcgggagggggggaaggcggcagggcagggtcttggcagcatctcgggcctctatttcatcacatcagtaacagctctccttcgtcccaagcaagctttggcaaccaaataaatatgttagccaatattaccaaacggtccctagaggagaatgtgtgtaatgtgcctacattcgtttttataacaacaccaacaatatccaaccataaaaataaactgaaatggtcactctacctcagtgacaacgtctgagctccgtttcagggtccctcacaagaaattcgataggtgtaatgatttatttttcctaataagtaaaatgattattcactcatttgaaaattggacacacacacaaaaaaatgaagaaaaaatttgctatttcatctctccttttctatctctttccctttaaaaaaagtataaatgtgggctaaagagatggctcagcagttaagagcactggctgctcttccggaggtactgagttcaaactgcaccaaccacatggtggctcacaaccatctgtaatgggatctgatgccctcttctggtgtgtctagagacagtgacagtgtactcacatacataaaataagtaaaaaaaaaaaaaacaaaacttttttttaagtataaatgtgtaagaacttacctgtcttccctataaaagccacaattacctttgcagataatcactgtcaggcagtgtcttcaagagaagtggggttgttctacgacacaagaatatttttgtttatatactaccctctaagctccttcctacttctctgcaaactcatcccctgtgcatatactgaaatctatccgtcacggtattttgagtatacacagttatccgtcacggtattttgagtatacacagttttattagctaatacatggggtatttcaagtctgggactgttgttggctgtgtcatctctgttacatatgacttatattttctaagatgaatttccaagacaggaatagagagatcatacgacatgcacagttaaagttttaagagattacaaaattgacctttaagaagctatacaatttcacatcctttccaggaaaggtcaagaaatccctgtatcttcactaatgctacctatgaggagtctgtaattttggtagagcagaaggtccaaatggtatcacagatcctccatggactttcttatcgagagcgttctttccgcttttattgattatccttcgagctatgtgagactctcatccgtcttcctcttgaccgatgtatagttttctcactgagttcagaggctaggatgcagaagccgtcctcgtcagctttatacacctttcagattgactgtgaatgagcacacaggtcagagagacggtaagggaagacctactctcccatgaacgttgtaaacatgcgaataacacagaagcagaaaatgtaaactattagactggctggaatgtagcgctcacctttgagcccactcctttagacaccggtttcatggaagaatggctcctgtttcccacctgctgcttcagcagtgccccaaatagtgccagattcagaggagatactcagtgtttgccgagtgaattaggaaagtgttcagcggaggggacactagcattcagacatccagaccttagagtaaccgggccagatggaagtctccttccttcccatagctgttaccactgtactgtctttactggggaaaagatttatcatgtggaataggtgcgaggcagaggtgagattttaatggggaggaagcattgaaaagtgaaagtgaaaattggatgctctttgctttgaagctttgcctaaagcaggttttagctttcaaatacgtttcaatgttgaaagaacgcatgatacatatggaggggggcctggggggggtccttggctgagtttgaatgtacattaacaatctggggggctaataactcaatgtaaagctgctgatcccatcatactgacttctttccacttggttctacatggctttgagttacaaaatgaaagcattgaattttgaactgttcagctgtgtttccacacttgcaaatcggttgttggccagccctcagaattgcttcagttacagctggctcgtctgctctttccagactggcttttagggcttatgtatatatgagaaggacacatttactagtgtctccttgctctgctattgaaattaagcagacctctctgtgtttcccgttactagatagttcccaaaacatgaggatatttgctggcattatattcacagcctgctgtcacttgctacggggtaagtcaccaaatcttttcagtgggttctatattttcaatattttagctatgaattaaaaatggaagtaatttgtggggtgtgtatgtgtgtgtatatgtgtgtgtagaggggggtctgtgtgtatgtgcagttgctaggcacacataaagcgttcataggacaacctagagcttagtcctcaccttctaccttgtttgagacaaggtctcttatttgttgtacattgctgagtcctgtagttcggctagctcagaacctcctgggggctctcctgtctccacctcccagtccactgagattgtaggcacatgctactgcacctggcttctacctggtctctggggatttgaacttgggtccatgggctacacagcaagtcgtttacttactgggcaatcactccatcccctaagataattataaggaatataccttgcttatccaaacacattctcattctcctttgccataaataagttacttggcaaatatattgtatgtatttttaataaataaataaaatcttaaaaataaataaaattatttgtgaagacaaaaaaaataagttacttggaaaggatgaaggaaaatactggagctttgggtgtggtttagtagtagaacacttggctgatgtaaaaaaaaagccctaggtgcaatcccaacaccagaaacaaatgaaggaatgaacaacaaccgcccccaccccccaggggatgaatataaaaatatcaggtaatacagaactaacaggtgatccgtttcctatgaataactactgaacattcccagggaggtggcccactgataatatatttttatttattggttccttttaaacaagactgggaatatattatctagcttgcatcaccaccaccaccccccacccccgccccatgaagttatttcaaagaagaattttagtgttcatgtgattccctaaataaaatgatagtaaccttttacccaggttttcagatgtgtttggaggagttttctgtcttctgagggctggtcctctttccttttcagcgtttactatcacggctccaaaggacttgtacgtggtggagtatggcagcaacgtcacgatggagtgcagattccctgtagaacgggagctggacctgcttgcgttagtggtgtactgggaaaaggaagatgagcaagtgattcagtttgtggcaggagaggaggaccttaagcctcagcacagcaacttcagggggagagcctcgctgccaaaggaccagcttttgaagggaaatgctgcccttcagatcacagacgtcaagctgcaggacgcaggcgtttactgctgcataatcagctacggtggtgcggactacaagcgaatcacgctgaaagtcaatggtaagaattaccctggatggggaaggcttcatccgtatttaaaacagctccctaatgttgagagctcttcattcttgagagttcgcacgcacttctcacagaacaacagcagcctgttcttctcgctcgtttgttcattcgttcgttcacacacttcaccagtgaaaaagcctagcactgtgtgtttgatagtaacttgagattcagtaccagataatactcagccatgctttgcagtcagtaccatgatcttgcaaaggtgaaatgccaggtgtttgtttcttatcataaatgcaatatataatatattacatagatgtatagatataactgtgtaacatgcaataagatataatatgcatatatttcatataacataatgtataatatataatgtataataatatatactacaatatatagttatatgcatagttatatattgcatttatgataaaaagcaaacacctggcatttcacttttgcaagctttttgaattacttgtaaatatatatacatgcaaacatacatacacacacatgtttttttacaagtaatttgaatgtcatggaaagaaatagaatcataaaaatgtccctcctccctaactaccatcttctaagcataaatatacagtaactactatttgtacatccctccatgactttttgattggattactgtttatatttaatctatcaggcttagcacattttctttcctttgaatacctccatacaaaattcaatgtgtgtttatatatatatgtatatatatagttatatcatatcatatatcatacaaagttttatatatgtatacatatataaacacacatatctacacatacatacacattttttatatatatacacaatatataatgtatatgtgtgtgtgtgtgcatatacctctatatctatctatctatctatctatctatctatctatctatctatctatctatagcttctactgtaagggtcactttttaaaaaattaaggttaatctatgaaggatgagaagtgaagatcttaagtgtagaagaagccgttcttccacagagatggtacaggctacactcagcaggcatgcattcattttcagggcctgcatctctgggagtgctgaggaggaactatgagtgtaagttcctgggtaacgagccacagaaatgtcatcaggtcccttgagttcacggttctgggttggaactaactaagggaaggaaaacaccttgctaaccacccctgctttcactgttgggttgcatagacctgagagcttcactcatcgcaggcgtgcacacagccagcccagttgcccaccaggactggaaatccccaaggctctcctcttcacatacctcccacagtggtgtccctcgaatcaggtccctttcgtggtctgcggaaacttcaccttgatggacactgagccgaaccccgtcttctccaggcagacgttgcagatggtctgcctgctccttttcggttttcataataactttaaaactatttggctagaatcagatagtctccttcgatctttttactcctaaactagtgtgaagctcaatattatacataggaaaaattcacattcctcataagggatcacggcagttattaacgcaatcttatgtagagattaggaaaaatgtgtccattcgacagtttattaatgggtctgtgatggtgggtcgcttagagcttatgaagatgccacttgccttatttcggtgcttggctctaacttccattaccttttacttacaattcttcatttgtgacactcatgaaaggagactcgggatatggttgttaatatcttgagcagctgttagtacatcagcaaatatgaggctcctgtttggttccaagatttttaaagacattgtgaagctggaaggccatgagcagtcaaagttgctggacctggggcactggaaggagctcaaggcgggcagtcaggaagaagggagcagggtgtaagcctctgtgacaagaggtctctcatggcttgttaggagtaggtgactctggtaaggaggaatttactctagattatgtgctcagtgatatctctgataccaaagacaatcttttggagcgcacggcttctccacggagggacctgtgatgcggcaaagctggtatccaagcagtcttgaaggcctgcttgactattttgttttcttacagaaatcactacgtcgatattttactcccagttcaccttgccatttgcatgcacgttagctggtctaggccaagagtctgaaccttggttgtggctcaaatctgtaatctcagctatgtgggaagctgaggcaggagaatcgcgcaattaggacttgtctgagctacgaacatatagcaggttcaagagcagcctgggcaatttggcaagatccgttctcaaagacatacatacatacatatatttggcaagatccgttctcaaagacatacatacatacatacatttggcaagatccgttctcaaagacatacatacatgcatgcatgcataaatacatgtataaatgaatataaaattaaaataggaacaggactgaggacatgcccagtgatgtacaggaccctggtttcagtttctagcaccatggtcgctggcatgcaaaagctttccatgtcaaggaagtagaactcctgaattctgtgctatgcaaatgacttcacagcaaggttccttcccatcactgcaagtgtgtggtggtgaagcagccctacagggagttcactcgccatggggttttaaaggtgaattatttcaaaactgaaatctgaaagagtgtagttttggattaactcagtttttattatctctttggataatgttctaccttcaaaggtttacagaagaccctcaggcatcaggcttttaattgaaaaatattcagctttaatcactgacctcaatatcagaaaagaatgaagtgtccatttagtagtcctcggaccgtagatggcattaagcagctgtaagaaacacgctcatcacatggttcaacaattaaggattgccatggtgcacccgatcccccagctctgtttaaaccttttctctgtcatctatgcctatctaagatgtctcagcatatcatgcttattgtctctttccttctcttgaacacaagctctaggggtaggggctttggtcagttttattgttggacctgttggccttgacgtattatgaaggggcagtgtaataagaaaagaaaaccgtgtttgttgatggaatggtttaaaaaaaaattagcttaaaatgtatgctatacgaacgggcatgaatctgggagattttagactgttccttgtgagccgtaggaactttcttgtttctgtgttcacagtcctccgcagctgtgctcatggtcctccacatctgcctaacaacagcaggggtagatgttataattaacactcacagaacacctgatatgtgagaggttgtgccctgggcttcttgctcatatgaattcatttcatctttaacataactcttcgggggaggcacttgcccatgaccatggcttgttttctttcctatcgactatctttcaaatcggaatgtgtctttccctaggtgacatctcagattcaatgttacacagcactgctgtgcccattttcaggcattaaaaatgcgatccgcctaaattccaccccgataaaattatgcagccaggttcggaacccaactagcccatctctaaaaatctatgcccttcctagcctcgctttgttgcctgtctttgtacctctggagtgggtatcaaggaacagaatggctttaaacatgatttgaacttttcctggtttttgatcacagcagtaacagagtgttctagagataagccagaggtttgaaaacaaacagaacttgtctttgaggtgttataaacatgtgtgtgattataaaggatatatctggtgccaataggtatagcttatattataagaaatggccattgtgaagatcagaaggagataactcactgatttcaggtggttgattcaatctaacacatgatatattctgaaactgtacaaaaaagatattcaaaagaagaaacacatggaacaaagagtatatggaaattctgacaactcagaatcagtgtatgttaagatgaagttcatgattaacaaatggagatggtcgcagtcatcctgaagcttattttagccaatgctttatcacatccaactcaatcttcgttttttttttttcagatggatcttcccatttttaattaaccttatcatgatagcccctagtaaggcatgtcctgacatttcttttctttttttttatagcttatgtttctttttttaaaaatttttttactacatattttcctcaattacatttccaatgctatcccaaaagtcccccataccctcctcccccactcccctacccacccactcccactttttggccctggggttcccctgtactgggggatataaagtctgcgtgtccaatgggcctctctttccagtgatggcctactaggccatcttttgatacatatgcagcttgagtcaagagctccggggtactggttagttcatagtgttgttccacctatagggttgcagatccctttagttccttgggtgctttctctagcttctccattgggagccctgtgatccatccaatagctgactgtgagcatccacttctgtgtttgctaggtcccggccaagtctcacaagagacagctatttcagggtcctttcagcatatgcttgctagtgtatgcaatggtgtcatcgtttggaggctaattatgggatggctccctggatatggcagtctctaaatggtccatccttttgtctcagctccaaactttgtctctgtaactcctttcaatcttcgtttttaatgtccgaaaatgactggtaacgtcactgcttacatttccctttgctttgtgttgaattgtgagctttatctttgatctggagtttctttaagaagactttgtaatgtgcttatttttaaagatggtgaattcaattaaagatagacaagagggacgggtctgtatttcatctggtagagtgcttacctgccattcatgaagttctggttcgatccccggcacagcatagaaccacatgcggtggcaactcagttgcctgtgaccccagcactcaggagctagaggcaggttacctttgactacacagcaagttcaaggctagcctggtctacatgcaactcttcctcaaagggaaaacaaaacaaaaatagacaggagaattggaaacatccatagaaacccaaatatgaatcaatagactcccctcttcctgtgtcagacattcagactcagtgacagccgtcaccgtttatgaggcatgactgattttacagatcctagagcaagcgtgcacaattctggtgtttcctgcctgcgtcctcacacacacgctcaccttagggacggaggcagcggaggtctagtcagtttcagacgaatccactcatcagctgctcaccatggtcttctaggtgaagcagaactctccttccatcagcacccgtgaaaaacaaaagtggaaagcagatatttcactccgaatgctttatcattggcagtgatttcaaatttaaaccactaatttcccagaagaattaggtcacgggccatgtggcattagaccctattgtggtgacattatttcctgatgtgcctatttaataatgtatagtggtctcatctttatttagttggtcttgaatgtgataaatacaagactgggcaagtgttcatcaaagctgttacttgaaattgtaattatacctattttgttggtggtgttttttcttggttcatggacaaccaaacacattacggctttgctttgtcttagctactctgtgtcaagttcctgtgaaaataccgtattacagtgctcttattacatctttggtaatgaagtagtcacctaagcccctatcctgggctctctatggctcactaaagaatcgtaagttggataatgattgctgaagaaatagatatgttttatttacattgaggtagaaagacctgtggtttctaggtaacagtttacttaacttagttgctacatctagtttgcactcagtaaacaccctggtgtggtttttacaacaacaaggttgttcctgaagcccaaacatggcccagatttgaatagaagacctgaggcagactaacactcactccctgctgccaaagtagcagagccggggacatatttctccaatagccagcccgagttgatgctctttgtaagcagacaccacaaagccacacggctagccctaagatgggagagccctgacctctctttgcttctgacctagccccataccgcaaaatcaaccagagaatttccgtggatccagccacttctgagcatgaactaatatgtcaggccgagggttatccagaagctgaggtaatctggacaaacagtgaccaccaacccgtgagtgggaagagaagtgtcaccacttcccggacagaggggatgcttctcaatgtgaccagcagtctgagggtcaacgccacagcgaatgatgttttctactgtacgttttggagatcacagccagggcaaaaccacacagcggagctgatcatcccaggtgagttgcctaactcgtccccggattcctagcacgatggccatccgccatagtcatttagcagtagttggccgagtgtatgaatacatgaaacttacattggctagacgtattctagttcctctttctcttgcgtgcaagccataatgctacttggtcaacactcagcaagaattaagtgtttgctcctgacagacagtatgttagtcattgagtattcgtggctggataggacataagttactctgctccaggaaacaggtgacagtcgcatgtaggagatgctcttgtaacttgggcaccacgggcaacgtgagagcaagcttatgcttcaggaatgtaaacctttgtcacatcaaagctgccctcttccctcccgggctgctgtagtagaaagcaaatgcattgcctttttttgtatcttatattcaacaggaagaatcctttcttcccatactcctcttcagggcattccctgatacttcaactccaggaagtctgcctgtgcatagaacacgaggctgatgcctatgggcaaccgactagctgggttgtaactcaccaggccagggcattgtagggatagaatgagctgcacgaaaatgattgtaggaaaatcgtttgagaattcagctgtctttaaaattcatttaccttacagaaatagggccacaggagacagtttggtgagaggctcagagcattatatgaatatgaacccagaggtactcactctgaggagggttgcttctgcctccatcgacacccctttcccaatgtatgtcaacagtacattgatgtctagagatagctctgtgaagtttagagaagatatataaaactacattaaaaagtcaaccaatatgaaaaatgaagcccaggatgggcgtggagccaaaaggagcacacaagtttggaaaaatgtaaaataaaaaggaagacactctaactagaattggacttttccataaaagctatattgttggtttcctaccattaaatgttttatggggctggagacgttgtagctcagttgggagagtacttgcctagcatccacaatgctctgaccccagcgccatataaacgtatatagggctcacctatagtctaaacactttggtggtggaagccggagggtcagttcaaggtcatcctcagcttcatagcaagttcaaggccagtatggactgactacaagagaccctgcctcaaagacaaaacaagcaaacatcatcataataaaacagcaaaaagctgttctctggccatttctttgtaggacatcctggagtaacttaaccactctgagtgtctcttctcatctgtaacttgggttcatagtgggaccaaataggagctgagttacaacaggagatggaagttagcaatctcagagcatcccagagccctgggacccatttttctctttctcaaaactccaggcagagaaacagggagatgttaatgactggagtgcccaagagtctcagacatggaagaaacacaacccgcactggtccacatttgtgggagacagaagcggcttagcagtgccccgctttcccatgttcgggagttggccttccacaccaagtcagccattactgtctatattaatgagtgcacaaggaagttactgcactaaggttaccatttaatattgcagtcactttctgtggcaacatgtcacaggcctggagttcttctctgtgctgctcccagtttcttaggagatctgtcttcttcttccaacccttacctggacattaactttcagtgattaagattaccctaagaccaaactatatttcaggagtcatcattcccctgactatggcgcagcaaagccttaccttccatcagcttctctttatccttttccagaactgcctgcaacacatcctccacagaacaggactcactgggtgcttctgggatccatcctgttgttcctcattgtagtgtccacggtcctcctcttcttgagaaaacaaggtatttcctccattgctgtactgcctgcagggaagtgcatgagggtcccttcaccattgccttgagcaggcagtgccagagatggtaccaccctgacaagaacagacccacatcacagggcgtcctacactgcacgctagctgaacctcaccaggaaacactgacttgaaaggtgctgccctccattccctgggcttgctttcagttacacagagtaagttttaacagtgactctggtgtactgagtcttccttaagtcctgttcacattgttgctctgcgacatctcctaccttggagctcggtgttggaccctgttgtaatatgaagaggtatcagttggacaagggcgtagggaagctaaaagacttagctttcaaggcgtgggggagggggagggcattgtgaggttccctgttcagcggttcagagtaaagctgggcagcacacaagtttagacaacaaggaagatgctctaactggggttggaggtcaatggtgcagggataggtagcaatggaggctaaagaagaaagccataaggtttctttctacagactctgaagacagagcactgtggtgcctattggtctcaggtgaactcaagtcttgtgttccttacaccacctattgagctgggttctggataccctaagtggaaaaacacttctgtctaaaaagagctgtggcatctttaccacaaagcactttttttttttgcaagatttctgaagacgaaatgacacagtttttaaaataatttccatatatttatttcagtacttacccataagaatgactgaaatctaggaaaatgaatatattcaaataatgccttcctattgtaaagtgacttagagtaaaccttttcaccaaatactttgaaatgcataccaagtgagccaatgatgcatggacttgtgtgaagccaaatggggaaatagaatatgggagggaacatcaatcatcagagaggaattccccatcacccttttggagggcgcgtgtatgggaaaagtgttgtaactggggcggtagcgaccagctgcttccaaagaataagccctgagcagaaccaagagggttgccagggtgtgaagattaagcttcagagacacatctggcttagggctagcctaggacttgcacaggaccgcagttgttgcctaatggcatctgggatgattggctgaggatgaggaaagcagagagtcagttaggtggtaagctagctcaggatgtgggacgtttctgagggaagggtggaagacaaagtagacagtcctaaaaaccatctgagaatgaaagtatgtaccctaaattgttgaataattaactttgcggcgtgggatctggaataaggaagttcacgggctaaaagcctggtgattaggggattgatcggtgtctcctaaaaaccttaagttgaaaatcgagtccctgtgggttgtagtagcatcttgctataaggaattaagattgatttcttcttctttagtgagaatgctagatgtggagaaatgtggcgttgaagatacaagctcaaaaaaccgaaatggtaagtgtgagtaacgagggaggggcaagccgagggaatgagtgggacagagcagccaagcagggtcctgcaagggctgcagttccagcgctctgtaggctgaggcagggggatagggagttccaggccagcaaccacacagccaaaacaaaacaaacaaaacaaaaaacaaagcaaaaggaagagcagaaaaagctactgttaccaacaagagacatactttagccgtgatctcctctccttccaaaggaagctgtttgtgggggctgctggttcctctgcctaaggatcgccacatctgagaaaactctgggtttgctgctgcggtgtctgtgtggtagccctgcaaccagggacgctgttgacttatttgaatgggcatttgattaagcaaatgattctgctgtgtggttagctgttaactgtttcatgtgtatgatatggcatttcatttcatcatcctgcccccaatcagataaatatgagaatcatctccattgtatagtagggaaaacagggctgagaagataatgcgaggtgcctaagaacacacagacttgctaccacagacgtccgttctttgctaggtgcttcaatctatgctgctactaatgtctgtatttataagagtagaaaactctgcccgggcgttggtggcccacgcctttaatcccagcactcgggaggcagaggtagtcggatttctgagtttgaggccagcctggtctacagagtgagttccaggacagccaggctacacagagaaaccctgtctcgaaaaaaatcaaaaaagaaaaaagaacaagaaaactctaactgaactatcttgtagtaaattacagtgtgttctaattcattttagtgttgttagaaaccaaacagtaaggccaggcagaactaaagtggtttcgctaacttgggcagacccaagcaggttccctcctgtacattaccatttattctgctgagtcaccctgaggaaccggcctggcttgctcaagactgaggatttctcagccatgaacactttccattttaaaactagggcagtcccggacaagcaaggatggttagtcatccttcatcatgtaagggtagtcagacataggtagtatctgtctctgtcttacggcaacgttactatctgctctagcaaacatcccatttgtttatcttacatatcatacgtttcccccccacatattccctgcccctgtgaaattattatactatgatcactctccagatacacaattcgaggagacgtaagcagtgttgaaccctctgatcgtcgattggcagcttgtggtctgtgaaagaaagggcccatgggacatgagtccaaagactcaagatggaacctgagggagagaaccaagaaagtgttgggagaggagcctggaacaacggacattttttccagggagacactgctaagcaagttgcccatcagtcgtcttgggaaatggattgagggttcctggcttagcagctggtccttgcacagtgaccttttcctctgctcagtgccgggatgagagatggagtcatgagtgttgaagaataagtgccttctatttattttgagtctgtgtgttctcactttgggcatgtaattatgactggtgaattctgacgacatgatagatcttaagatgtagtcaccaaactcaactgctgcttagcatcctccgtaactactgatacaagcagggaacacagaggtcacctgcttggtttgacaggctcttgctgtctgactcaaataatctttatttttcagtcctcaaggctcttcgatagcagttgttctgtatcagccttataggtgtcaggtatagcactcaacatctcatctcattacaatagcaaccctcatcaccatagcaacagctaacctctgttatcctcacttcatagccaggaagctgagcgactaagtcacttgcccacagagtatcagctctcagatttctgttcttcagccactgtcctttcaggatagaatttgtcgttaagaaattaatttaaaaactgattattgagtagcattgtatatcaatcacaacatgccttgtgcactgtgctggcctctgagcataaagatgtacgccggagtaccggtcggacatgtttatgtgtgttaaatactcagagaaatgttcattaacaaggagcttgcattttagagacactggaaagtaactccagttcattgtctagcattacatttacctcatttgctatccttgccatacagtctcttgttctccatgaagtgtcatgaatcttgttgaatagttcttttattttttaaatgtttctatttaaatgatattgacatctgaggcgatagctcagttggtaaaaccctttcctcacaagtgtgaaaccctgagtcttatccctagaacccacataaaaaacagttgcgtatgtttgtgcatgcttttgatcccagcactagggaggcagaggcaggcagatcctgagctctcattgaccacccagcctagcctacatggttagctccaggcctacaggagctggcagagcctgaaaaacgatgcctagacacacacacacacacacacacacacacacacacacacacacaccatgtactcatagacctaagtgcaccctcctacacatgcacacacatacaattcaaacacaaatcaacagggaattgtctcagaatggtccccaagacaaagaagaagaaaaacaccaaaccagctctattccctcagcctatcctctctactccttcctagaagcaactactattgtttttgtatataaatttacccaacgacagttaatatgtagaatatatattaaagtgtctgtcaatatatattatctctttctttctttcttcctttctttctttctttctttctttctttctttctttctttctttctttcttccttccttccttccttccttccttccttccttcctttctttctttctttctttttttctgtctatctgtacctaaatggttgctcactatgcattttctgtgctcttcgccctttttatttaatgtatggatatttatgctgcttccagaatggatctaaagctctttgtttctaggttttctcccccatccttctaggcatctctcacactgtctaggccagacaccatgtctgctgcctgaatctgtagacaccatttataaagcacgtactcaccgagtttgtatttggcttgttctgtgtctgattaaagggagaccatgagtccccagggtacactgagttaccccagtaccaagggggagccttgtttgtgtctccatggcagaagcaggcctggagccattttggtttcttccttgacttctctcaaacacagacgcctcacttgctcattacaggttctcctttgggaatgtcagcattgctccttgactgctggctgccctggaaggagcccattagctctgtgtgagcccttgacagctactgcctctccttaccacaggggcctctaagatactgttacctagaggtcttgaggatctgtgttctctggggggaggaaaggaggaggaacccagaactttcttacagttttccttgttctgtcacatgtcaagactgaaggaacaggctgggctacgtagtgagatcctgtctcaaaggaaagacgagcatagccgaacccccggtggaaccccctctgttacctgttcacacaagcttattgatgagtctcatgttaatgtcttgtttgtatgaagtttaagaaaatatcgggttgggcaacacattctatttattcattttatttgaaatcttaatgccatctcatggtgttggattggtgtggcactttattcttttgtgttgtgtataaccataaattttattttgcatcagattgtcaatgtattgcattaatttaataaatatttttatttattaaacatttgtttttcttttttttttttaaattcctccccactagcccctccctgtctcctcagagaaggggaagcccccttgggtatcacctgaccctgggatatccaatcatagtaggcctaagcacatcctctcccactgaggcccaaccaggaagcccagttaagagaagggaatccaatggcaggcaacagaatcagagaagacctccgctccagcctttaaggggacccacatgaagaccacgctacacatcttctatgaatatgtagtgggtccaggtacagcccctgcatgctcattggttggtggtctctgtgagctcacctgggcccagcttagttgactctgtaggtcttcttattgtgtccttgacccctctggctcactcagttctgtcccagtctcttccatgagactcctccaataccacctgatgtttagctgtgggtctctgcatcagttcccatttgctgctaggtgaagcctctcaggagagttatgctaggtttctgtctggatgttctttgtgtgaccagcctggtgaggatggcagagtggtgactggacaatggacagtcgagttggggacagcacatagctagctcagggcagctgggatttggtttttgctttctttcaaatcattccagtttgacctccagtggggaaaaaaaaagtctcttagaatatttgcattcctggctttattcttttttccacacagcatttatgtatatacagcatgctattgaatcctgaatgatgaatattatcaaaataacttatttaaggaatttattaggagctggagagagcttagtggttaagagcacttgctgttcttttggaggacacaggttcagctcatagcattcaaatggttactcacaaccaccttccaggcaatcaagccaatcaagtgccctcttctggcctccgagggtactatggtacacatggtgtctatacatacatgcaggcaaaacatgcaaactcataaaatagaaatagatctttatatatattgagacattttggtctgtttcattttaaggatttaataaaaactatcaaaagtcttccacccaaaatggagatctggggtgggtgggtgggagggaggagcaagagtgggcctcacagagtggaggacctgaagggcatgctcagatcagtgaacacagggatacacaagcagcaacatgaagctgtgtctgcttcagccttcaggctctgaagagaaagtgagaatcctggagctaagtaaagttcagggcttggacccaagactttcctagaaccataaggaaatctgtagttttcaaacaaacaccaccacagtcaccattaaagaaagtgcgtgtcgggctggagagatggctcagtggttaagagcaccgactgctctcccagaggtcccgagttcaattcccagtaaccacatggtggctcacaaccatctgtaatggagtttgataccctttcctggtgtgtccgaagacagagacagtgtactcatataaataaaataaatcttaaaaaaaaaaaaaaggaaaaaaaaacgaaagaaagaacatgtgtggcattcaatgcattgtctctcttgaccacgtcttcagcaattcaacttaaagaagcttgtgatctttggataatttcttaaaaccagatactctctcaaaacatggttggtatttctaataacatatgatagactctggatgtttataaatgaagatctgcatctttgtagtaataatggcacactatctcagcccccctggaaactgagcccctggacagtcaaggagtttaccatcagaaggcttcctggcaggattgcatcacgtgccaacatgttggggaatgtattttctctgaacagcttggtctccttccactctgtgtctttggagtctaagggtaagccttcctctcccctggtccccacccaagctgagaaatacaaagtgccatttaactccagaaattaatatgccatttccattacaaacatctcagcgacttaccattatattttactgggcactatgagggagtcagagatacaccccatgccttgcagtcttgccaaagagacaacgtaaaaattcatttaaaacatttatttaattaaaacagtcaaattaaacaaacttaaagaatcatttgaaaccatccatccgtgtgttagaacatgagagtttagaacatggtgcctgggaagagtgagaagagaactctgagcagatgaggtttgatttggatatggtttgtccctcaaacagtcttgtgctggatgcgtcatctccaaagtggtggcgtagatgggatggagcctttaatagatggtggctggtcctggggaggattggtgggtttctgtgggaagtgagtcaggtcatacgattactggggaaagctagccttactctccttggctgggattaatccatatcatggttgatctaatgagatctcagggtccttcactagctctttctctatgatcccttgtgcacactgctctctgcacacactcggctcctgccccgtgaggttgctcactctgctttgatgccatcagaggctgttgccaggtgtcgagtgccaaattggactctgatgcctctgaaagcacaagataaataaactccttttccttgtaagataaccatcctaaaatttaaactgaaagtcaatctgaagggccagccgtccttcacagaggacagcagtctctgaagcatgaagaagatgccaacccttgatagcacagaaagtgacttcttccagacagtggggatatcaaatggcacggcccctgtactggatggtctggcaatttctatcagcttacaaatgacctagcatttctgcaaattgtcacacgtatacgcttatccattgcacttttattcgggagtggccaaacattaaaaacttcacttgtaattttggcctaacagaggtggggctttttctggtcagtaatttggtgcctttgttgagtcttgaaatcccctgagtctggctttccctctcattttaatgtcttgctttcttcctgggaagtctgtctgtctgctttgagagtagctgtcctgccttcaaaaccacaacaagcttgaactaagtcaccaatgcaaaggtctatgaaaccaaataaaatgatctctttctaagacactggaggtgttgaagacttcaaaaataattttaataatccaggcatttagggaaaaaagtacaaacagacagacaaacataaaacctatttgtacaagccaggaccctgactactcattgtgaaagaaaaacccatcggtactgagaaacctacttgtatttgggaaggacaggaagttgacttaacgcccatgacctcaggcatgacgtcagaggctctctgacttctctgaacctgtttcatatggtaagtggagtcaggacgacccacttgatatctaagtgcccagcagaccacttggtattagtaggcaacaagaaacccatgtattggtatagctgacttcaggaaatggtctattaaattattttaagatccagaagctctgtatccatccagatcattactgttatggaggacttaattaaatgctggctttaaaagtattaagtttttaaaatattttttttttaaagtttaaagttatttttagatttgtttattttctactgtgggtttgaatgtcttgcttctatgcatgtaaattcctcacacgcatcactggtacccacagaggacaggagaggatctcgtggaactgaagccatggatagctatgagccaccatgtggatgatgggagctgaaacggggtcctctgcaagatcaatgtctggttttagccactgagccacgtctcctcccacctgcaaagtgtttagcttctacatttgtcattgattagtgcatgcactaattaaagttgtggcagactgaagagctacattgatgcacattgatgttggagttttcataatgtcaaaattaattggagtttcttttcaatttgtgtgcgtaaatttcgggcatcaatttctttagagacatttgggccttccatgccagtaaatgctgaattactgcaaagctaaacttagactggatgacatagtcaccagatgttgcgtttagggtagaccatgtttgattttgtttttagaaaagatactttattctttatttcacgacaaagagctttctatctggaagctatccctcttttcacaactgaaaacggtacaaccatgatccagctggggtcaaactggattggggtctacacacaataaatgataaataccttctttgttctcagttcactgggtgcctactatccacacctggcatcttggggaatacgtaagtgacttagacatccccttcaagaatatgaaggctgaaatacactcttgggtttatgggaatagctcctcttcctacagaagctgaacagcacaaaagccagaaaactgtcagaataaaccatggacgtctacggtcacttatccctctgtgtcatgaacttcctgaggaagacctttgctgcatagctcccacccactggtcacttagaagtagtctggttcatcagaccaactgtcacaagatggcggtgcttgtgtccaaagggtcccttagtcacttaataatgaccctaaagccattcttaatggtggtgatggaaatgctggtataccaataagaagtcatatcatgcgtcccttttaagtgaaagtgtaaaaaaatttgactcaataaggaaaaaaaaattatatcccgaggctgctaagatttacattgcaacaacacattttaagaatgagaaactattcctataattttattatagcatagaactataattattctaattataatctttaatcttataagttttaatctttctatgcataatctataaattaacacttgttatatgtatcacatatctgtatgcatgtatgtggagaaaacaaaggatagaaaaggctcagtactacctactatcaagattccacaggagtctgaggtgcagcccacaaatataaggtataaaggtctagggagatggctcagcagttaagagcacatactgccctatgagggatctaagtttggttccctgcacttatgtctaccagctgacaattgcctgtgactccagcttcagagaaatcggctgcttctggcctctgccagcaactgcactcatgtgcacacaccccaacacagatacacatacatacacataattaaaaataaaataaatctttaaaaaaaaagacaccgaagatagactgtctatgttcgtgattttgtagtgatccttaagtggtcccggataccagtcagacacatggctgagactcttcctctgcagctgctaacgggttgtctgtcacctctgtcgatgaagtaactccatgaagagaagttcacggcacgtattacagctggtcagcctttccccacagctagcattatttttgcattctgtcgtaaacatattttgcttactcaaaatcaatgaagaattatttcccctttccttctaaattctctgttattttctgtttcacgtttagatgaaatccttccagaatcaggttttagtttttgtgggttttttttcacatatgagacagggatcaaatcacatttttgtatatagatctggttgtccttgtaccatttactgtgttgaaaatatcacgtccccattttactgccatgtcaaaagaccgtgtcaaaaaacaaatatcatttactttttcataggttgttttgtctgttatgatgaccaactcatttattttgggtgtctagaaaattctattagagcagtactagtgagttttaactctgcttctctgggactaggctaacttttaaggctatgatatttccaactgtagccatagacataccatgacagccagtcagggttccagcctgtgggttgtcacgtggtgtattgctgacttcgtgcccacggtccccccaagtctctattcagcccctgtctttctctatgtctgcctctccataagaacaaatcattatcctttaaccatgtgtctgttggatatctctcctctcttaaaataacatcttaaaagcaacagaaaatagatttgcatcgtgttttgtttcatttttaaatgatatcacacttacctatgtcattttcaatgaatttttttctactgtaaatgtggtagcattgggttttaacaaatattatctactctttccctaaaactgctagatatttcagatctggaagaggtgatttctactccagtgtggcaatcactgtaaggcagtatgccatttcaattgtaacttaaacacctataggtgtgtttataactgtaccttcctagaatgtctttgagcgccctcagtgttgcgggagactctatgttgtttcatagtagagccttgtggaaacacccaaggtgaatttcttgttctcttggcctcacattggctttctgactgggctgaaacatggtgggtggtgcccagcgtctcttcatttctgtccatggcataaactgagggagtgagcgctgtcccaaagaacttggccactctgaaccaagctgctgtttgactttttaaggtttgcatggattaccagatgaatgaaaaaaataaataaaagaaatagagaaaaagacagctcctaaggactccggtttttattagacatataagggaaagttcaggcagaagcagagatactcaggagagtccggagtgaacttggccagcaaactgggccacatgaggtgatgggggaggtgagaggggagcaccagaagccaagagggcaggagctggggaaccaagagactgaaagggcaagagactaaaaaggacctgcagagcccaaatgggttatatagggaagagcagctgggggaagggtaacccagccctgttcctgagctggagaagtttagggtaccaggtgtggtgtgccagccatgaggactctgtaacaggcagagcctgagggatgctgggagaacctggtggccagcatcagccttgatatagtaaacacctcggccatttgtgctgggtttgagacccaacagctataagtaaggacttgccctgtaaccaggacgagacagaccaccttccactgacctacatagaaaaggacatctgaacaaagtcatggttttttttctctatggataatgggatattaatgatctacataacaatggtgtcatctccagattctaacagcctcgtatagactaattgtagctggctcctaactagtttctgtttcctgattttagttccatcttttcagcacttgtaagaaggtcagcagcatccttgaagacatttctgtcatcacagcatcttcttggtcagggagcctaggtggttttattgactggatcacaaagccaaaataccatagcctctctatttaagattcccataatcagacaccagcctgtttttttttttttttaattttccttcttttataacaggatgggcaaacattttctgttgagggtcaggcagggaatattcaggcttgagggccatatggtctctgccattactcctcaattctgccctggtagtgcaaagaaggaatatatattgtgtgagtcagctttgggtcaccataataaaaatactgaaagagaaaaatcatcataaagaaaggaatatttgctttgtttcacagttcagagatttttgatttcattgtttctggaactgtgatgagaaacagcattgtagcagaaggcttggccaggaggcaaaggaaaaaggagaggataaaacataccctttaaaggaataattccagcaacatgctccctccaaataggcctctactttttacatttctttttctttttctttctttctttttcttttcttttttttccgagacaaggtttctctgaatagccctggctgtcctggaactcactttgtacaccaggctggcctcgaactcagaaatctgcctgcctctgcctcccaagtgctgggattaaaggcgtgcgcctccattgcccgacttactttcttcatttcaatgaatatcccagcacgtatagacaaagctttcaatacatgagcctttgagggggatagacaggatttccctcaggataccagagctttccttagggctgtttcttatcatttctaggctatgttatttgaacttattttactaactagaaaaaagggtgcatttcctcacctcgttgaccatgtaatcattaatctggccctttacccttgcctgtaggcagtcatcctactcatgaaatcttatctctgatccctcccacttctaaaaacaataactgatgccaaatgaataaactcacaggcagccattgagattagagataggcctccatataccaaatgctgtttgaggaacaatgtgtcagaggccccaaaccttccatgccaaatgtcaaagtatttcccaaggtctttggaaacacaaacctgctagaaagactaaaggttatttatttagctcatttaaaaaaaaaaccctataccatcaaacaatgtaacaaaactctaaaacagaatagtggaatgaacatgaactagagttatatctgatctgaattatgtctggctactgcttacatgtctaaacttgcatatatatcttaacttgtgtgttgatttcatcacatatgtactggagccaaagatagtatctggctagaagagttactagggcaattacatgagttagtacatgcaaaaacattgattggaccatatataagttggaaaaataatatatatgttctgtcagacatgaaataaaattcacaacagcaaacaaagtcaacacaccgacctagataagcagtgtgcgccgggtaaccattcaaggacacaggtcaacaacgactctagtccctttaacacaggaatgttcgttttcttaggagtgttacatatacctgtttggactaaaagcaaaaagaagctcaacaaaagttttttttttttttttaagcaaggtttggaaacacaggatttcttcatgttgtattggtggactgtcacaggatatgtacaggatgatcgtctgagccaaattcccatcgtctttgcaactccagttgtgcctactttcacaagatcatggccactgaacccattctcccacaggagggggtgtggggagggccctgagactctcacctgtgtctctagcctcacctcccagccagttgtatgcaattcataataaataataaataatgattgataataaattaataaataattttatttattttaactggtcatggattcagggaaggactggaatacagaggctagagagggaggaggctccaacctctggtcatgggggagtcatccaggctgggttcagacattccagcatagctgctttaaagttccttcaggcccttaactccttcctcactcattgctctgtaagtaagcttaatccacgtattggtttctctagagtgaactctagtgatactgtatctctggttgttgttgggagcttagaaagagggcaagatgtttgtgtctccttgcaacagaattttagcaatacctggcagagcttcatttcaagggaagctgaaaaagtctagttgcctgggagaaagtggtatatgcgtgtaaagtgagggcaagagagggtatcaaaatgactatatttattgctcagtatctatgtaaagcctacagtgagttgtggtatttatagaatttagaatctattgagtcttttttttttttagttgtttaatcagtttttaagcatctttaaatatgtatttgccacagactggacttagtcagtccctcaacccacaggagaagtcagggtcctggttctcaggtggacaaggagttggagggatgacaaacagacatggacatcagagagtgtgttgtatctgaatgtaatttctcaaagcgagcatcagacgtatattacagaagaaaacaaagaagttaggtgacacatcagccaaggtacaaagaagttatctgacacaaaacagagaaatgcatacataaagactgacaggaaccaggcagtggttaaaactgagataaaaggtggccctttctaaagtcaaccattctaggagccaggtgaggatttcacaccatagtcacaatgtatgctattcctctgaaccttgtgagagcttgcaccagggggttctgctctagcagaccttttcatgaataatgcaacactctagttcctccttaaaccacaaccctccttcctagaccattgtaaattcctgcatatgggagtaacttggctgctcttttaagtacccttagggaatctccatttgtcagaggaactcaccaactatcttctaatatgtaatgtagtctgccatacctgactgtagtgaggagtctaagtatactttgttgaattagacctgagatttctagctcctatctggcaaattgcaatgcctgatttcttatcaacactggaggcattttgtctgaatgagttacattcttacaaaattccaagcccatagtctgctcaaggactgcctaggacatccggacattagtgaaaggccaggaagcaaagttcaatctaacttagctatttgtcaaatcattccttggaggcacctataataaaaacaatactgaaagaaagcacacagaaccattcaccgactgacacaggacaagtttggagcatttgtgctaccgaatgccaaggttccaggagactaagtttgtgtccaagcttttgggcttgtcacacagtttggcatgtatttattgttttatgtataggagtatttgcagaatgtatttctgtgtggtatttgtatgcaatgcctattggaccccctgggactaaagttacagaaggttatgagggagattgtgggtgctgggaattgaacctgagtcctctggaaaagcaatcagtgcttttaactgctgagtcatatctccaacctcaaaataaattttaaaaatgattttattccctatggtctaggactactaatgaagaatccttcattttattactttattctttttacttttctaggaaatttttctttttcttttttttttctttttcttttctcttttctctctctctcttccttccttgataccttccttccttcctttctttctttctttctttctttctttctttctttctttctttctttcttccctttctttctttctttctttctttctttctttctttctttctttctttctttcttttgtcttaaaaccaaaatactggtatttcctcaagtgatggattgctttactttggccctaaatcttggaactattgtcagggttggcttagaaagactagaaatcatttcatcctattgttcaagtaacttttatgggatatttgctagatgtcaagcttccagtgagatgctgagaacaaagaaggaatatcccgagggatcaaagaataaggcttctggtctcctggaacacacattctaagtgagaaattactgtgaagataaagaacagaaaaaaaaaaaaacatgtcagggcagaacactcgccaataaggggccacactgatgggtggcagagttgggagccaactttaagtagggtgggcgggacagggctttttgaaaaagacacacttaaatgggctttctattacaaacctgatgaagccctagccagaagcacaagattcatcaaaacactaataaagtgtttgtcaagttcaagaaaaggaagtgtgaggccagagagtgacggacatgggtgtgaaagccacaaggtgagtctaaagctcaccatgcaatttccaagacagatagtacagttagtacaatgggaaggatttgaaagtttttaatgtcattttcagcaggactgtgagcct

SEQ ID NO: 962804 - DNA, 44657 bp, Mus musculus
aggctcacagtcctgctgaaaatgacattaaaaactttcaaatccttcccattgtactaactgtactatctgtcttggaaattgcatggtgagctttagactcaccttgtggctttcacacccatgtccgtcactctctggcctcacacttccttttcttgaacttgacaaacactttattagtgttttgatgaatcttgtgcttctggctagggcttcatcaggtttgtaatagaaagcccatttaagtgtgtctttttcaaaaagccctgtcccgcccaccctacttaaagttggctcccaactctgccacccatcagtgtggccccttattggcgagtgttctgccctgacatgtttttttttttttctgttctttatcttcacagtaatttctcacttagaatgtgtgttccaggagaccagaagccttattctttgatccctcgggatattccttctttgttctcagcatctcactggaagcttgacatctagcaaatatcccataaaagttacttgaacaataggatgaaatgatttctagtctttctaagccaaccctgacaatagttccaagatttagggccaaagtaaagcaatccatcacttgaggaaataccagtattttggttttaagacaaaagaaagaaagaaagaaagaaagaaagaaagaaagaaagaaagaaagaaagaaagggaagaaagaaagaaagaaagaaagaaagaaagaaagaaagaaagaaagaaaggaaggaaggaaggtatcaaggaaggaagagagagagagaaaagagaaaagaaaaagaaaaaaaaaagaaaaagaaaaatttcctagaaaagtaaaaagaataaagtaataaaatgaaggattcttcattagtagtcctagaccatagggaataaaatcatttttaaaatttattttgaggttggagatatgactcagcagttaaaagcactgattgcttttccagaggactcaggttcaattcccagcacccacaatctccctcataaccttctgtaactttagtcccagggggtccaataggcattgcatacaaataccacacagaaatacattctgcaaatactcctatacataaaacaataaatacatgccaaactgtgtgacaagcccaaaagcttggacacaaacttagtctcctggaaccttggcattcggtagcacaaatgctccaaacttgtcctgtgtcagtcggtgaatggttctgtgtgctttctttcagtattgtttttattataggtgcctccaaggaatgatttgacaaatagctaagttagattgaactttgcttcctggcctttcactaatgtccggatgtcctaggcagtccttgagcagactatgggcttggaattttgtaagaatgtaactcattcagacaaaatgcctccagtgttgataagaaatcaggcattgcaatttgccagataggagctagaaatctcaggtctaattcaacaaagtatacttagactcctcactacagtcaggtatggcagactacattacatattagaagatagttggtgagttcctctgacaaatggagattccctaagggtacttaaaagagcagccaagttactcccatatgcaggaatttacaatggtctaggaaggagggttgtggtttaaggaggaactagagtgttgcattattcatgaaaaggtctgctagagcagaaccccctggtgcaagctctcacaaggttcagaggaatagcatacattgtgactatggtgtgaaatcctcacctggctcctagaatggttgactttagaaagggccaccttttatctcagttttaaccactgcctggttcctgtcagtctttatgtatgcatttctctgttttgtgtcagataacttctttgtaccttggctgatgtgtcacctaacttctttgttttcttctgtaatatacgtctgatgctcgctttgagaaattacattcagatacaacacactctctgatgtccatgtctgtttgtcatccctccaactccttgtccacctgagaaccaggaccctgacttctcctgtgggttgagggactgactaagtccagtctgtggcaaatacatatttaaagatgcttaaaaactgattaaacaactaaaaaaaaaaaagactcaatagattctaaattctataaataccacaactcactgtaggctttacatagatactgagcaataaatatagtcattttgataccctctcttgccctcactttacacgcatataccactttctcccaggcaactagactttttcagcttcccttgaaatgaagctctgccaggtattgctaaaattctgttgcaaggagacacaaacatcttgccctctttctaagctcccaacaacaaccagagatacagtatcactagagttcactctagagaaaccaatacgtggattaagcttacttacagagcaatgagtgaggaaggagttaagggcctgaaggaactttaaagcagctatgctggaatgtctgaacccagcctggatgactcccccatgaccagaggttggagcctcctccctctctagcctctgtattccagtccttccctgaatccatgaccagttaaaataaataaaattatttattaatttattatcaatcattatttattatttattatgaattgcatacaactggctgggaggtgaggctagagacacaggtgagagtctcagggccctccccacaccccctcctgtgggagaatgggttcagtggccatgatcttgtgaaagtaggcacaactggagttgcaaagacgatgggaatttggctcagacgatcatcctgtacatatcctgtgacagtccaccaatacaacatgaagaaatcctgtgtttccaaaccttgcttaaaaaaaaaaaaaaaacttttgttgagcttctttttgcttttagtccaaacaggtatatgtaacactcctaagaaaacgaacattcctgtgttaaagggactagagtcgttgttgacctgtgtccttgaatggttacccggcgcacactgcttatctaggtcggtgtgttgactttgtttgctgttgtgaattttatttcatgtctgacagaacatatatattatttttccaacttatatatggtccaatcaatgtttttgcatgtactaactcatgtaattgccctagtaactcttctagccagatactatctttggctccagtacatatgtgatgaaatcaacacacaagttaagatatatatgcaagtttagacatgtaagcagtagccagacataattcagatcagatataactctagttcatgttcattccactattctgttttagagttttgttacattgtttgatggtatagggttttttttttaaatgagctaaataaataacctttagtctttctagcaggtttgtgtttccaaagaccttgggaaatactttgacatttggcatggaaggtttggggcctctgacacattgttcctcaaacagcatttggtatatggaggcctatctctaatctcaatggctgcctgtgagtttattcatttggcatcagttattgtttttagaagtgggagggatcagagataagatttcatgagtaggatgactgcctacaggcaagggtaaagggccagattaatgattacatggtcaacgaggtgaggaaatgcacccttttttctagttagtaaaataagttcaaataacatagcctagaaatgataagaaacagccctaaggaaagctctggtatcctgagggaaatcctgtctatccccctcaaaggctcatgtattgaaagctttgtctatacgtgctgggatattcattgaaatgaagaaagtaagtcgggcaatggaggcgcacgcctttaatcccagcacttgggaggcagaggcaggcagatttctgagttcgaggccagcctggtgtacaaagtgagttccaggacagccagggctattcagagaaaccttgtctcggaaaaaaaagaaaagaaaaagaaagaaagaaaaagaaaaagaaatgtaaaaagtagaggcctatttggagggagcatgttgctggaattattcctttaaagggtatgttttatcctctcctttttcctttgcctcctggccaagccttctgctacaatgctgtttctcatcacagttccagaaacaatgaaatcaaaaatctctgaactgtgaaacaaagcaaatattcctttctttatgatgatttttctctttcagtatttttattatggtgacccaaagctgactcacacaatatatattccttctttgcactaccagggcagaattgaggagtaatggcagagaccatatggccctcaagcctgaatattccctgcctgaccctcaacagaaaatgtttgcccatcctgttataaaagaaggaaaattaaaaaaaaaaaaaaacaggctggtgtctgattatgggaatcttaaatagagaggctatggtattttggctttgtgatccagtcaataaaaccacctaggctccctgaccaagaagatgctgtgatgacagaaatgtcttcaaggatgctgctgaccttcttacaagtgctgaaaagatggaactaaaatcaggaaacagaaactagttaggagccagctacaattagtctatacgaggctgttagaatctggagatgacaccattgttatgtagatcattaatatcccattatccatagagaaaaaaaaccatgactttgttcagatgtccttttctatgtaggtcagtggaaggtggtctgtctcgtcctggttacagggcaagtccttacttatagctgttgggtctcaaacccagcacaaatggccgaggtgtttactatatcaaggctgatgctggccaccaggttctcccagcatccctcaggctctgcctgttacagagtcctcatggctggcacaccacacctggtaccctaaacttctccagctcaggaacagggctgggttacccttcccccagctgctcttccctatataacccatttgggctctgcaggtcctttttagtctcttgccctttcagtctcttggttccccagctcctgccctcttggcttctggtgctcccctctcacctcccccatcacctcatgtggcccagtttgctggccaagttcactccggactctcctgagtatctctgcttctgcctgaactttcccttatatgtctaataaaaaccggagtccttaggagctgtctttttctctatttcttttatttatttttttcattcatctggtaatccatgcaaaccttaaaaagtcaaacagcagcttggttcagagtggccaagttctttgggacagcgctcactccctcagtttatgccatggacagaaatgaagagacgctgggcaccacccaccatgtttcagcccagtcagaaagccaatgtgaggccaagagaacaagaaattcaccttgggtgtttccacaaggctctactatgaaacaacatagagtctcccgcaacactgagggcgctcaaagacattctaggaaggtacagttataaacacacctataggtgtttaagttacaattgaaatggcatactgccttacagtgattgccacactggagtagaaatcacctcttccagatctgaaatatctagcagttttagggaaagagtagataatatttgttaaaacccaatgctaccacatttacagtagaaaaaaattcattgaaaatgacataggtaagtgtgatatcatttaaaaatgaaacaaaacacgatgcaaatctattttctgttgcttttaagatgttattttaagagaggagagatatccaacagacacatggttaaaggataatgatttgttcttatggagaggcagacatagagaaagacaggggctgaatagagacttggggggaccgtgggcacgaagtcagcaatacaccacgtgacaacccacaggctggaaccctgactggctgtcatggtatgtctatggctacagttggaaatatcatagccttaaaagttagcctagtcccagagaagcagagttaaaactcactagtactgctctaatagaattttctagacacccaaaataaatgagttggtcatcataacagacaaaacaacctatgaaaaagtaaatgatatttgttttttgacacggtcttttgacatggcagtaaaatggggacgtgatattttcaacacagtaaatggtacaaggacaaccagatctatatacaaaaatgtgatttgatccctgtctcatatgtgaaaaaaaacccacaaaaactaaaacctgattctggaaggatttcatctaaacgtgaaacagaaaataacagagaatttagaaggaaaggggaaataattcttcattgattttgagtaagcaaaatatgtttacgacagaatgcaaaaataatgctagctgtggggaaaggctgaccagctgtaatacgtgccgtgaacttctcttcatggagttacttcatcgacagaggtgacagacaacccgttagcagctgcagaggaagagtctcagccatgtgtctgactggtatccgggaccacttaaggatcactacaaaatcacgaacatagacagtctatcttcggtgtctttttttttaaagatttattttatttttaattatgtgtatgtatgtgtatctgtgttggggtgtgtgcacatgagtgcagttgctggcagaggccagaagcagccgatttctctgaagctggagtcacaggcaattgtcagctggtagacataagtgcagggaaccaaacttagatccctcatagggcagtatgtgctcttaactgctgagccatctccctagacctttataccttatatttgtgggctgcacctcagactcctgtggaatcttgatagtaggtagtactgagccttttctatcctttgttttctccacatacatgcatacagatatgtgatacatataacaagtgttaatttatagattatgcatagaaagattaaaacttataagattaaagattataattagaataattatagttctatgctataataaaattataggaatagtttctcattcttaaaatgtgttgttgcaatgtaaatcttagcagcctcgggatataatttttttttccttattgagtcaaatttttttacactttcacttaaaagggacgcatgatatgacttcttattggtataccagcatttccatcaccaccattaagaatggctttagggtcattattaagtgactaagggaccctttggacacaagcaccgccatcttgtgacagttggtctgatgaaccagactacttctaagtgaccagtgggtgggagctatgcagcaaaggtcttcctcaggaagttcatgacacagagggataagtgaccgtagacgtccatggtttattctgacagttttctggcttttgtgctgttcagcttctgtaggaagaggagctattcccataaacccaagagtgtatttcagccttcatattcttgaaggggatgtctaagtcacttacgtattccccaagatgccaggtgtggatagtaggcacccagtgaactgagaacaaagaaggtatttatcatttattgtgtgtagaccccaatccagtttgaccccagctggatcatggttgtaccgttttcagttgtgaaaagagggatagcttccagatagaaagctctttgtcgtgaaataaagaataaagtatcttttctaaaaacaaaatcaaacatggtctaccctaaacgcaacatctggtgactatgtcatccagtctaagtttagctttgcagtaattcagcatttactggcatggaaggcccaaatgtctctaaagaaattgatgcccgaaatttacgcacacaaattgaaaagaaactccaattaattttgacattatgaaaactccaacatcaatgtgcatcaatgtagctcttcagtctgccacaactttaattagtgcatgcactaatcaatgacaaatgtagaagctaaacactttgcaggtgggaggagacgtggctcagtggctaaaaccagacattgatcttgcagaggaccccgtttcagctcccatcatccacatggtggctcatagctatccatggcttcagttccacgagatcctctcctgtcctctgtgggtaccagtgatgcgtgtgaggaatttacatgcatagaagcaagacattcaaacccacagtagaaaataaacaaatctaaaaataactttaaactttaaaaaaaaaatattttaaaaacttaatacttttaaagccagcatttaattaagtcctccataacagtaatgatctggatggatacagagcttctggatcttaaaataatttaatagaccatttcctgaagtcagctataccaatacatgggtttcttgttgcctactaataccaagtggtctgctgggcacttagatatcaagtgggtcgtcctgactccacttaccatatgaaacaggttcagagaagtcagagagcctctgacgtcatgcctgaggtcatgggcgttaagtcaacttcctgtccttcccaaatacaagtaggtttctcagtaccgatgggtttttctttcacaatgagtagtcagggtcctggcttgtacaaataggttttatgtttgtctgtctgtttgtacttttttccctaaatgcctggattattaaaattatttttgaagtcttcaacacctccagtgtcttagaaagagatcattttatttggtttcatagacctttgcattggtgacttagttcaagcttgttgtggttttgaaggcaggacagctactctcaaagcagacagacagacttcccaggaagaaagcaagacattaaaatgagagggaaagccagactcaggggatttcaagactcaacaaaggcaccaaattactgaccagaaaaagccccacctctgttaggccaaaattacaagtgaagtttttaatgtttggccactcccgaataaaagtgcaatggataagcgtatacgtgtgacaatttgcagaaatgctaggtcatttgtaagctgatagaaattgccagaccatccagtacaggggccgtgccatttgatatccccactgtctggaagaagtcactttctgtgctatcaagggttggcatcttcttcatgcttcagagactgctgtcctctgtgaaggacggctggcccttcagattgactttcagtttaaattttaggatggttatcttacaaggaaaaggagtttatttatcttgtgctttcagaggcatcagagtccaatttggcactcgacacctggcaacagcctctgatggcatcaaagcagagtgagcaacctcacggggcaggagccgagtgtgtgcagagagcagtgtgcacaagggatcatagagaaagagctagtgaaggaccctgagatctcattagatcaaccatgatatggattaatcccagccaaggagagtaaggctagctttccccagtaatcgtatgacctgactcacttcccacagaaacccaccaatcctccccaggaccagccaccatctattaaaggctccatcccatctacgccaccactttggagatgacgcatccagcacaagactgtttgagggacaaaccatatccaaatcaaacctcatctgctcagagttctcttctcactcttcccaggcaccatgttctaaactctcatgttctaacacacggatggatggtttcaaatgattctttaagtttgtttaatttgactgttttaattaaataaatgttttaaatgaatttttacgttgtctctttggcaagactgcaaggcatggggtgtatctctgactccctcatagtgcccagtaaaatataatggtaagtcgctgagatgtttgtaatggaaatggcatattaatttctggagttaaatggcactttgtatttctcagcttgggtggggaccaggggagaggaaggcttacccttagactccaaagacacagagtggaaggagaccaagctgttcagagaaaatacattccccaacatgttggcacgtgatgcaatcctgccaggaagccttctgatggtaaactccttgactgtccaggggctcagtttccaggggggctgagatagtgtgccattattactacaaagatgcagatcttcatttataaacatccagagtctatcatatgttattagaaataccaaccatgttttgagagagtatctggttttaagaaattatccaaagatcacaagcttctttaagttgaattgctgaagacgtggtcaagagagacaatgcattgaatgccacacatgttctttctttcgtttttttttccttttttttttttttaagatttattttatttatatgagtacactgtctctgtcttcggacacaccaggaaagggtatcaaactccattacagatggttgtgagccaccatgtggttactgggaattgaactcgggacctctgggagagcagtcggtgctcttaaccactgagccatctctccagcccgacacgcactttctttaatggtgactgtggtggtgtttgtttgaaaactacagatttccttatggttctaggaaagtcttgggtccaagccctgaactttacttagctccaggattctcactttctcttcagagcctgaaggctgaagcagacacagcttcatgttgctgcttgtgtatccctgtgttcactgatctgagcatgcccttcaggtcctccactctgtgaggcccactcttgctcctccctcccacccacccaccccagatctccattttgggtggaagacttttgatagtttttattaaatccttaaaatgaaacagaccaaaatgtctcaatatatataaagatctatttctattttatgagtttgcatgttttgcctgcatgtatgtatagacaccatgtgtaccatagtaccctcggaggccagaagagggcacttgattggcttgattgcctggaaggtggttgtgagtaaccatttgaatgctatgagctgaacctgtgtcctccaaaagaacagcaagtgctcttaaccactaagctctctccagctcctaataaattccttaaataagttattttgataatattcatcattcaggattcaatagcatgctgtatatacataaatgctgtgtggaaaaaagaataaagccaggaatgcaaatattctaagagactttttttttccccactggaggtcaaactggaatgatttgaaagaaagcaaaaaccaaatcccagctgccctgagctagctatgtgctgtccccaactcgactgtccattgtccagtcaccactctgccatcctcaccaggctggtcacacaaagaacatccagacagaaacctagcataactctcctgagaggcttcacctagcagcaaatgggaactgatgcagagacccacagctaaacatcaggtggtattggaggagtctcatggaagagactgggacagaactgagtgagccagaggggtcaaggacacaataagaagacctacagagtcaactaagctgggcccaggtgagctcacagagaccaccaaccaatgagcatgcaggggctgtacctggacccactacatattcatagaagatgtgtagcgtggtcttcatgtgggtccccttaaaggctggagcggaggtcttctctgattctgttgcctgccattggattcccttctcttaactgggcttcctggttgggcctcagtgggagaggatgtgcttaggcctactatgattggatatcccagggtcaggtgatacccaagggggcttccccttctctgaggagacagggaggggctagtggggaggaatttaaaaaaaaaaaagaaaaacaaatgtttaataaataaaaatatttattaaattaatgcaatacattgacaatctgatgcaaaataaaatttatggttatacacaacacaaaagaataaagtgccacaccaatccaacaccatgagatggcattaagatttcaaataaaatgaataaatagaatgtgttgcccaacccgatattttcttaaacttcatacaaacaagacattaacatgagactcatcaataagcttgtgtgaacaggtaacagagggggttccaccgggggttcggctatgctcgtctttcctttgagacaggatctcactacgtagcccagcctgttccttcagtcttgacatgtgacagaacaaggaaaactgtaagaaagttctgggttcctcctcctttcctccccccagagaacacagatcctcaagacctctaggtaacagtatcttagaggcccctgtggtaaggagaggcagtagctgtcaagggctcacacagagctaatgggctccttccagggcagccagcagtcaaggagcaatgctgacattcccaaaggagaacctgtaatgagcaagtgaggcgtctgtgtttgagagaagtcaaggaagaaaccaaaatggctccaggcctgcttctgccatggagacacaaacaaggctcccccttggtactggggtaactcagtgtaccctggggactcatggtctccctttaatcagacacagaacaagccaaatacaaactcggtgagtacgtgctttataaatggtgtctacagattcaggcagcagacatggtgtctggcctagacagtgtgagagatgcctagaaggatgggggagaaaacctagaaacaaagagctttagatccattctggaagcagcataaatatccatacattaaataaaaagggcgaagagcacagaaaatgcatagtgagcaaccatttaggtacagatagacagaaaaaaagaaagaaagaaagaaaggaaggaaggaaggaaggaaggaaggaaggaaggaagaaagaaagaaagaaagaaagaaagaaagaaagaaagaaagaaagaaaggaagaaagaaagaaagagataatatatattgacagacactttaatatatattctacatattaactgtcgttgggtaaatttatatacaaaaacaatagtagttgcttctaggaaggagtagagaggataggctgagggaatagagctggtttggtgtttttcttcttctttgtcttggggaccattctgagacaattccctgttgatttgtgtttgaattgtatgtgtgtgcatgtgtaggagggtgcacttaggtctatgagtacatggtgtgtgtgtgtgtgtgtgtgtgtgtgtgtgtgtgtgtgtgtgtctaggcatcgtttttcaggctctgccagctcctgtaggcctggagctaaccatgtaggctaggctgggtggtcaatgagagctcaggatctgcctgcctctgcctccctagtgctgggatcaaaagcatgcacaaacatacgcaactgttttttatgtgggttctagggataagactcagggtttcacacttgtgaggaaagggttttaccaactgagctatcgcctcagatgtcaatatcatttaaatagaaacatttaaaaaataaaagaactattcaacaagattcatgacacttcatggagaacaagagactgtatggcaaggatagcaaatgaggtaaatgtaatgctagacaatgaactggagttactttccagtgtctctaaaatgcaagctccttgttaatgaacatttctctgagtatttaacacacataaacatgtccgaccggtactccggcgtacatctttatgctcagaggccagcacagtgcacaaggcatgttgtgattgatatacaatgctactcaataatcagtttttaaattaatttcttaacgacaaattctatcctgaaaggacagtggctgaagaacagaaatctgagagctgatactctgtgggcaagtgacttagtcgctcagcttcctggctatgaagtgaggataacagaggttagctgttgctatggtgatgagggttgctattgtaatgagatgagatgttgagtgctatacctgacacctataaggctgatacagaacaactgctatcgaagagccttgaggactgaaaaataaagattatttgagtcagacagcaagagcctgtcaaaccaagcaggtgacctctgtgttccctgcttgtatcagtagttacggaggatgctaagcagcagttgagtttggtgactacatcttaagatctatcatgtcgtcagaattcaccagtcataattacatgcccaaagtgagaacacacagactcaaaataaatagaaggcacttattcttcaacactcatgactccatctctcatcccggcactgagcagaggaaaaggtcactgtgcaaggaccagctgctaagccaggaaccctcaatccatttcccaagacgactgatgggcaacttgcttagcagtgtctccctggaaaaaatgtccgttgttccaggctcctctcccaacactttcttggttctctccctcaggttccatcttgagtctttggactcatgtcccatgggccctttctttcacagaccacaagctgccaatcgacgatcagagggttcaacactgcttacgtctcctcgaattgtgtatctggagagtgatcatagtataataatttcacaggggcagggaatatgtgggggggaaacgtatgatatgtaagataaacaaatgggatgtttgctagagcagatagtaacgttgccgtaagacagagacagatactacctatgtctgactacccttacatgatgaaggatgactaaccatccttgcttgtccgggactgccctagttttaaaatggaaagtgttcatggctgagaaatcctcagtcttgagcaagccaggccggttcctcagggtgactcagcagaataaatggtaatgtacaggagggaacctgcttgggtctgcccaagttagcgaaaccactttagttctgcctggccttactgtttggtttctaacaacactaaaatgaattagaacacactgtaatttactacaagatagttcagttagagttttcttgttcttttttcttttttgatttttttcgagacagggtttctctgtgtagcctggctgtcctggaactcactctgtagaccaggctggcctcaaactcagaaatccgactacctctgcctcccgagtgctgggattaaaggcgtgggccaccaacgcccgggcagagttttctactcttataaatacagacattagtagcagcatagattgaagcacctagcaaagaacggacgtctgtggtagcaagtctgtgtgttcttaggcacctcgcattatcttctcagccctgttttccctactatacaatggagatgattctcatatttatctgattgggggcaggatgatgaaatgaaatgccatatcatacacatgaaacagttaacagctaaccacacagcagaatcatttgcttaatcaaatgcccattcaaataagtcaacagcgtccctggttgcagggctaccacacagacaccgcagcagcaaacccagagttttctcagatgtggcgatccttaggcagaggaaccagcagcccccacaaacagcttcctttggaaggagaggagatcacggctaaagtatgtctcttgttggtaacagtagctttttctgctcttccttttgctttgttttttgttttgtttgttttgttttggctgtgtggttgctggcctggaactccctatccccctgcctcagcctacagagcgctggaactgcagcccttgcaggaccctgcttggctgctctgtcccactcattccctcggcttgcccctccctcgttactcacacttaccatttcggttttttgagcttgtatcttcaacgccacatttctccacatctagcattctcactaaagaagaagaaatcaatcttaattccttatagcaagatgctactacaacccacagggactcgattttcaacttaaggtttttaggagacaccgatcaatcccctaatcaccaggcttttagcccgtgaacttccttattccagatcccacgccgcaaagttaattattcaacaatttagggtacatactttcattctcagatggtttttaggactgtctactttgtcttccacccttccctcagaaacgtcccacatcctgagctagcttaccacctaactgactctctgctttcctcatcctcagccaatcatcccagatgccattaggcaacaactgcggtcctgtgcaagtcctaggctagccctaagccagatgtgtctctgaagcttaatcttcacaccctggcaaccctcttggttctgctcagggcttattctttggaagcagctggtcgctaccgccccagttacaacacttttcccatacacgcgccctccaaaagggtgatggggaattcctctctgatgattgatgttccctcccatattctatttccccatttggcttcacacaagtccatgcatcattggctcacttggtatgcatttcaaagtatttggtgaaaaggtttactctaagtcactttacaataggaaggcattatttgaatatattcattttcctagatttcagtcattcttatgggtaagtactgaaataaatatatggaaattattttaaaaactgtgtcatttcgtcttcagaaatcttgcaaaaaaaaaaagtgctttgtggtaaagatgccacagctctttttagacagaagtgtttttccacttagggtatccagaacccagctcaataggtggtgtaaggaacacaagacttgagttcacctgagaccaataggcaccacagtgctctgtcttcagagtctgtagaaagaaaccttatggctttcttctttagcctccattgctacctatccctgcaccattgacctccaaccccagttagagcatcttccttgttgtctaaacttgtgtgctgcccagctttactctgaaccgctgaacagggaacctcacaatgccctccccctcccccacgccttgaaagctaagtcttttagcttccctacgcccttgtccaactgatacctcttcatattacaacagggtccaacaccgagctccaaggtaggagatgtcgcagagcaacaatgtgaacaggacttaaggaagactcagtacaccagagtcactgttaaaacttactctgtgtaactgaaagcaagcccagggaatggagggcagcacctttcaagtcagtgtttcctggtgaggttcagctagcgtgcagtgtaggacgccctgtgatgtgggtctgttcttgtcagggtggtaccatctctggcactgcctgctcaaggcaatggtgaagggaccctcatgcacttccctgcaggcagtacagcaatggaggaaataccttgttttctcaagaagaggaggaccgtggacactacaatgaggaacaacaggatggatcccagaagcacccagtgagtcctgttctgtggaggatgtgttgcaggcagttctggaaaaggataaagagaagctgatggaaggtaaggctttgctgcgccatagtcaggggaatgatgactcctgaaatatagtttggtcttagggtaatcttaatcactgaaagttaatgtccaggtaagggttggaagaagaagacagatctcctaagaaactgggagcagcacagagaagaactccaggcctgtgacatgttgccacagaaagtgactgcaatattaaatggtaaccttagtgcagtaacttccttgtgcactcattaatatagacagtaatggctgacttggtgtggaaggccaactcccgaacatgggaaagcggggcactgctaagccgcttctgtctcccacaaatgtggaccagtgcgggttgtgtttcttccatgtctgagactcttgggcactccagtcattaacatctccctgtttctctgcctggagttttgagaaagagaaaaatgggtcccagggctctgggatgctctgagattgctaacttccatctcctgttgtaactcagctcctatttggtcccactatgaacccaagttacagatgagaagagacactcagagtggttaagttactccaggatgtcctacaaagaaatggccagagaacagctttttgctgttttattatgatgatgtttgcttgttttgtctttgaggcagggtctcttgtagtcagtccatactggccttgaacttgctatgaagctgaggatgaccttgaactgaccctccggcttccaccaccaaagtgtttagactataggtgagccctatatacgtttatatggcgctggggtcagagcattgtggatgctaggcaagtactctcccaactgagctacaacgtctccagccccataaaacatttaatggtaggaaaccaacaatatagcttttatggaaaagtccaattctagttagagtgtcttcctttttattttacatttttccaaacttgtgtgctccttttggctccacgcccatcctgggcttcatttttcatattggttgactttttaatgtagttttatatatcttctctaaacttcacagagctatctctagacatcaatgtactgttgacatacattgggaaaggggtgtcgatggaggcagaagcaaccctcctcagagtgagtacctctgggttcatattcatataatgctctgagcctctcaccaaactgtctcctgtggccctatttctgtaaggtaaatgaattttaaagacagctgaattctcaaacgattttcctacaatcattttcgtgcagctcattctatccctacaatgccctggcctggtgagttacaacccagctagtcggttgcccataggcatcagcctcgtgttctatgcacaggcagacttcctggagttgaagtatcagggaatgccctgaagaggagtatgggaagaaaggattcttcctgttgaatataagatacaaaaaaaggcaatgcatttgctttctactacagcagcccgggagggaagagggcagctttgatgtgacaaaggtttacattcctgaagcataagcttgctctcacgttgcccgtggtgcccaagttacaagagcatctcctacatgcgactgtcacctgtttcctggagcagagtaacttatgtcctatccagccacgaatactcaatgactaacatactgtctgtcaggagcaaacacttaattcttgctgagtgttgaccaagtagcattatggcttgcacgcaagagaaagaggaactagaatacgtctagccaatgtaagtttcatgtattcatacactcggccaactactgctaaatgactatggcggatggccatcgtgctaggaatccggggacgagttaggcaactcacctgggatgatcagctccgctgtgtggttttgccctggctgtgatctccaaaacgtacagtagaaaacatcattcgctgtggcgttgaccctcagactgctggtcacattgagaagcatcccctctgtccgggaagtggtgacacttctcttcccactcacgggttggtggtcactgtttgtccagattacctcagcttctggataaccctcggcctgacatattagttcatgctcagaagtggctggatccacggaaattctctggttgattttgcggtatggggctaggtcagaagcaaagagaggtcagggctctcccatcttagggctagccgtgtggctttgtggtgtctgcttacaaagagcatcaactcgggctggctattggagaaatatgtccccggctctgctactttggcagcagggagtgagtgttagtctgcctcaggtcttctattcaaatctgggccatgtttgggcttcaggaacaaccttgttgttgtaaaaaccacaccagggtgtttactgagtgcaaactagatgtagcaactaagttaagtaaactgttacctagaaaccacaggtctttctacctcaatgtaaataaaacatatctatttcttcagcaatcattatccaacttacgattctttagtgagccatagagagcccaggataggggcttaggtgactacttcattaccaaagatgtaataagagcactgtaatacggtattttcacaggaacttgacacagagtagctaagacaaagcaaagccgtaatgtgtttggttgtccatgaaccaagaaaaaacaccaccaacaaaataggtataattacaatttcaagtaacagctttgatgaacacttgcccagtcttgtatttatcacattcaagaccaactaaataaagatgagaccactatacattattaaataggcacatcaggaaataatgtcaccacaatagggtctaatgccacatggcccgtgacctaattcttctgggaaattagtggtttaaatttgaaatcactgccaatgataaagcattcggagtgaaatatctgctttccacttttgtttttcacgggtgctgatggaaggagagttctgcttcacctagaagaccatggtgagcagctgatgagtggattcgtctgaaactgactagacctccgctgcctccgtccctaaggtgagcgtgtgtgtgaggacgcaggcaggaaacaccagaattgtgcacgcttgctctaggatctgtaaaatcagtcatgcctcataaacggtgacggctgtcactgagtctgaatgtctgacacaggaagaggggagtctattgattcatatttgggtttctatggatgtttccaattctcctgtctatttttgttttgttttccctttgaggaagagttgcatgtagaccaggctagccttgaacttgctgtgtagtcaaaggtaacctgcctctagctcctgagtgctggggtcacaggcaactgagttgccaccgcatgtggttctatgctgtgccggggatcgaaccagaacttcatgaatggcaggtaagcactctaccagatgaaatacagacccgtccctcttgtctatctttaattgaattcaccatctttaaaaataagcacattacaaagtcttcttaaagaaactccagatcaaagataaagctcacaattcaacacaaagcaaagggaaatgtaagcagtgacgttaccagtcattttcggacattaaaaacgaagattgaaaggagttacagagacaaagtttggagctgagacaaaaggatggaccatttagagactgccatatccagggagccatcccataattagcctccaaacgatgacaccattgcatacactagcaagcatatgctgaaaggaccctgaaatagctgtctcttgtgagacttggccgggacctagcaaacacagaagtggatgctcacagtcagctattggatggatcacagggctcccaatggagaagctagagaaagcacccaaggaactaaagggatctgcaaccctataggtggaacaacactatgaactaaccagtaccccggagctcttgactcaagctgcatatgtatcaaaagatggcctagtaggccatcactggaaagagaggcccattggacacgcagactttatatcccccagtacaggggaaccccagggccaaaaagtgggagtgggtgggtaggggagtgggggaggagggtatgggggacttttgggatagcattggaaatgtaattgaggaaaatatgtagtaaaaaaatttttaaaaaaagaaacataagctataaaaaaaaagaaaagaaatgtcaggacatgccttactaggggctatcatgataaggttaattaaaaatgggaagatccatctgaaaaaaaaaaaacgaagattgagttggatgtgataaagcattggctaaaataagcttcaggatgactgcgaccatctccatttgttaatcatgaacttcatcttaacatacactgattctgagttgtcagaatttccatatactctttgttccatgtgtttcttcttttgaatatcttttttgtacagtttcagaatatatcatgtgttagattgaatcaaccacctgaaatcagtgagttatctccttctgatcttcacaatggccatttcttataatataagctatacctattggcaccagatatatcctttataatcacacacatgtttataacacctcaaagacaagttctgtttgttttcaaacctctggcttatctctagaacactctgttactgctgtgatcaaaaaccaggaaaagttcaaatcatgtttaaagccattctgttccttgatacccactccagaggtacaaagacaggcaacaaagcgaggctaggaagggcatagatttttagagatgggctagttgggttccgaacctggctgcataattttatcggggtggaatttaggcggatcgcatttttaatgcctgaaaatgggcacagcagtgctgtgtaacattgaatctgagatgtcacctagggaaagacacattccgatttgaaagatagtcgataggaaagaaaacaagccatggtcatgggcaagtgcctcccccgaagagttatgttaaagatgaaatgaattcatatgagcaagaagcccagggcacaacctctcacatatcaggtgttctgtgagtgttaattataacatctacccctgctgttgttaggcagatgtggaggaccatgagcacagctgcggaggactgtgaacacagaaacaagaaagttcctacggctcacaaggaacagtctaaaatctcccagattcatgcccgttcgtatagcatacattttaagctaatttttttttaaaccattccatcaacaaacacggttttcttttcttattacactgccccttcataatacgtcaaggccaacaggtccaacaataaaactgaccaaagcccctacccctagagcttgtgttcaagagaaggaaagagacaataagcatgatatgctgagacatcttagataggcatagatgacagagaaaaggtttaaacagagctgggggatcgggtgcaccatggcaatccttaattgttgaaccatgtgatgagcgtgtttcttacagctgcttaatgccatctacggtccgaggactactaaatggacacttcattcttttctgatattgaggtcagtgattaaagctgaatatttttcaattaaaagcctgatgcctgagggtcttctgtaaacctttgaaggtagaacattatccaaagagataataaaaactgagttaatccaaaactacactctttcagatttcagttttgaaataattcacctttaaaaccccatggcgagtgaactccctgtagggctgcttcaccaccacacacttgcagtgatgggaaggaaccttgctgtgaagtcatttgcatagcacagaattcaggagttctacttccttgacatggaaagcttttgcatgccagcgaccatggtgctagaaactgaaaccagggtcctgtacatcactgggcatgtcctcagtcctgttcctattttaattttatattcatttatacatgtatttatgcatgcatgcatgtatgtatgtctttgagaacggatcttgccaaatgtatgtatgtatgtatgtctttgagaacggatcttgccaaatatatgtatgtatgtatgtctttgagaacggatcttgccaaattgcccaggctgctcttgaacctgctatatgttcgtagctcagacaagtcctaattgcgcgattctcctgcctcagcttcccacatagctgagattacagatttgagccacaaccaaggttcagactcttggcctagaccagctaacgtgcatgcaaatggcaaggtgaactgggagtaaaatatcgacgtagtgatttctgtaagaaaacaaaatagtcaagcaggccttcaagactgcttggataccagctttgccgcatcacaggtccctccgtggagaagccgtgcgctccaaaagattgtctttggtatcagagatatcactgagcacataatctagagtaaattcctccttaccagagtcacctactcctaacaagccatgagagacctcttgtcacagaggcttacaccctgctcccttcttcctgactgcccgccttgagctccttccagtgccccaggtccagcaactttgactgctcatggccttccagcttcacaatgtctttaaaaatcttggaaccaaacaggagcctcatatttgctgatgtactaacagctgctcaagatattaacaaccatatcccgagtctcctttcatgagtgtcacaaatgaagaattgtaagtaaaaggtaatggaagttagagccaagcaccgaaataaggcaagtggcatcttcataagctctaagcgacccaccatcacagacccattaataaactgtcgaatggacacatttttcctaatctctacataagattgcgttaataactgccgtgatcccttatgaggaatgtgaatttttcctatgtataatattgagcttcacactagtttaggagtaaaaagatcgaaggagactatctgattctagccaaatagttttaaagttattatgaaaaccgaaaaggagcaggcagaccatctgcaacgtctgcctggagaagacggggttcggctcagtgtccatcaaggtgaagtttccgcagaccacgaaagggacctgattcgagggacaccactgtgggaggtatgtgaagaggagagccttggggatttccagtcctggtgggcaactgggctggctgtgtgcacgcctgcgatgagtgaagctctcaggtctatgcaacccaacagtgaaagcaggggtggttagcaaggtgttttccttcccttagttagttccaacccagaaccgtgaactcaagggacctgatgacatttctgtggctcgttacccaggaacttacactcatagttcctcctcagcactcccagagatgcaggccctgaaaatgaatgcatgcctgctgagtgtagcctgtaccatctctgtggaagaacggcttcttctacacttaagatcttcacttctcatccttcatagattaaccttaattttttaaaaagtgacccttacagtagaagctatagatagatagatagatagatagatagatagatagatagatagatagatatagaggtatatgcacacacacacacatatacattatatattgtgtatatatataaaaaatgtgtatgtatgtgtagatatgtgtgtttatatatgtatacatatataaaactttgtatgatatatgatatgatataactatatatatacatatatatataaacacacattgaattttgtatggaggtattcaaaggaaagaaaatgtgctaagcctgatagattaaatataaacagtaatccaatcaaaaagtcatggagggatgtacaaatagtagttactgtatatttatgcttagaagatggtagttagggaggagggacatttttatgattctatttctttccatgacattcaaattacttgtaaaaaaacatgtgtgtgtatgtatgtttgcatgtatatatatttacaagtaattcaaaaagcttgcaaaagtgaaatgccaggtgtttgctttttatcataaatgcaatatataactatgcatataactatatattgtagtatatattattatacattatatattatacattatgttatatgaaatatatgcatattatatcttattgcatgttacacagttatatctatacatctatgtaatatattatatattgcatttatgataagaaacaaacacctggcatttcacctttgcaagatcatggtactgactgcaaagcatggctgagtattatctggtactgaatctcaagttactatcaaacacacagtgctaggctttttcactggtgaagtgtgtgaacgaacgaatgaacaaacgagcgagaagaacaggctgctgttgttctgtgagaagtgcgtgcgaactctcaagaatgaagagctctcaacattagggagctgttttaaatacggatgaagccttccccatccagggtaattcttaccattgactttcagcgtgattcgcttgtagtccgcaccaccgtagctgattatgcagcagtaaacgcctgcgtcctgcagcttgacgtctgtgatctgaagggcagcatttcccttcaaaagctggtcctttggcagcgaggctctccccctgaagttgctgtgctgaggcttaaggtcctcctctcctgccacaaactgaatcacttgctcatcttccttttcccagtacaccactaacgcaagcaggtccagctcccgttctacagggaatctgcactccatcgtgacgttgctgccatactccaccacgtacaagtcctttggagccgtgatagtaaacgctgaaaaggaaagaggaccagccctcagaagacagaaaactcctccaaacacatctgaaaacctgggtaaaaggttactatcattttatttagggaatcacatgaacactaaaattcttctttgaaataacttcatggggcgggggtggggggtggtggtggtgatgcaagctagataatatattcccagtcttgtttaaaaggaaccaataaataaaaatatattatcagtgggccacctccctgggaatgttcagtagttattcataggaaacggatcacctgttagttctgtattacctgatatttttatattcatcccctggggggtgggggcggttgttgttcattccttcatttgtttctggtgttgggattgcacctagggctttttttttacatcagccaagtgttctactactaaaccacacccaaagctccagtattttccttcatcctttccaagtaacttattttttttgtcttcacaaataattttatttatttttaagattttatttatttattaaaaatacatacaatatatttgccaagtaacttatttatggcaaaggagaatgagaatgtgtttggataagcaaggtatattccttataattatcttaggggatggagtgattgcccagtaagtaaacgacttgctgtgtagcccatggacccaagttcaaatccccagagaccaggtagaagccaggtgcagtagcatgtgcctacaatctcagtggactgggaggtggagacaggagagcccccaggaggttctgagctagccgaactacaggactcagcaatgtacaacaaataagagaccttgtctcaaacaaggtagaaggtgaggactaagctctaggttgtcctatgaacgctttatgtgtgcctagcaactgcacatacacacagacccccctctacacacacatatacacacacatacacaccccacaaattacttccatttttaattcatagctaaaatattgaaaatatagaacccactgaaaagatttggtgacttaccccgtagcaagtgacagcaggctgtgaatataatgccagcaaatatcctcatgttttgggaactatctagtaacgggaaacacagagaggtctgcttaatttcaatagcagagcaaggagacactagtaaatgtgtccttctcatatatacataagccctaaaagccagtctggaaagagcagacgagccagctgtaactgaagcaattctgagggctggccaacaaccgatttgcaagtgtggaaacacagctgaacagttcaaaattcaatgctttcattttgtaactcaaagccatgtagaaccaagtggaaagaagtcagtatgatgggatcagcagctttacattgagttattagccccccagattgttaatgtacattcaaactcagccaaggaccccccccaggcccccctccatatgtatcatgcgttctttcaacattgaaacgtatttgaaagctaaaacctgctttaggcaaagcttcaaagcaaagagcatccaattttcactttcacttttcaatgcttcctccccattaaaatctcacctctgcctcgcacctattccacatgataaatcttttccccagtaaagacagtacagtggtaacagctatgggaaggaaggagacttccatctggcccggttactctaaggtctggatgtctgaatgctagtgtcccctccgctgaacactttcctaattcactcggcaaacactgagtatctcctctgaatctggcactatttggggcactgctgaagcagcaggtgggaaacaggagccattcttccatgaaaccggtgtctaaaggagtgggctcaaaggtgagcgctacattccagccagtctaatagtttacattttctgcttctgtgttattcgcatgtttacaacgttcatgggagagtaggtcttcccttaccgtctctctgacctgtgtgctcattcacagtcaatctgaaaggtgtataaagctgacgaggacggcttctgcatcctagcctctgaactcagtgagaaaactatacatcggtcaagaggaagacggatgagagtctcacatagctcgaaggataatcaataaaagcggaaagaacgctctcgataagaaagtccatggaggatctgtgataccatttggaccttctgctctaccaaaattacagactcctcataggtagcattagtgaagatacagggatttcttgacctttcctggaaaggatgtgaaattgtatagcttcttaaaggtcaattttgtaatctcttaaaactttaactgtgcatgtcgtatgatctctctattcctgtcttggaaattcatcttagaaaatataagtcatatgtaacagagatgacacagccaacaacagtcccagacttgaaataccccatgtattagctaataaaactgtgtatactcaaaataccgtgacggataactgtgtatactcaaaataccgtgacggatagatttcagtatatgcacaggggatgagtttgcagagaagtaggaaggagcttagagggtagtatataaacaaaaatattcttgtgtcgtagaacaaccccacttctcttgaagacactgcctgacagtgattatctgcaaaggtaattgtggcttttatagggaagacaggtaagttcttacacatttatacttaaaaaaaagttttgttttttttttttttacttattttatgtatgtgagtacactgtcactgtctctagacacaccagaagagggcatcagatcccattacagatggttgtgagccaccatgtggttggtgcagtttgaactcagtacctccggaagagcagccagtgctcttaactgctgagccatctctttagcccacatttatactttttttaaagggaaagagatagaaaaggagagatgaaatagcaaattttttcttcatttttttgtgtgtgtgtccaattttcaaatgagtgaataatcattttacttattaggaaaaataaatcattacacctatcgaatttcttgtgagggaccctgaaacggagctcagacgttgtcactgaggtagagtgaccatttcagtttatttttatggttggatattgttggtgttgttataaaaacgaatgtaggcacattacacacattctcctctagggaccgtttggtaatattggctaacatatttatttggttgccaaagcttgcttgggacgaaggagagctgttactgatgtgatgaaatagaggcccgagatgctgccaagaccctgccctgccgccttccccccctcccgccccccgccccgccccaaggtgacagacactgagatggcctacagcaccaccagtgccaagctggagaaacggtgaccactctcagcatgtctgtcaatagtttctgttcagccattttcctctacacttttaaagattgatttattttatgtgtaagagtgttttgtctgggactggagggatggctcagaggttaagagcactggctgctcttaccaaagtcctgagtttaattcctagcaaccatatggtagcttacaaccaaccacctatgagacctggtgctctcctctgcccttcaggtgtacacgcaggcagaaccccatataaataatatagaaagaaatctgttttggggttttgtttttgttttttaagaatgttttgcctgcttgtacatctgcttgccatatgtgtgcctagtacctctgaggtatctctccagcccccgttgtctcacacatgtaatagccatttttaaaatgtaagattatggcataatttccccaagtcttgtatttaacaggcccctaacacggagcgcctttgctgttatgtgttgtcccttttttcagagtcacaaatatgtgtgtgcttggccaatgtttgggcgagtaccagttgtgtaccaggtccaagtttaggcttgaattatagatttccctaaggagatctgcggatctagggagaaagactatggcaactgataccactacatctttgtgcagcacaaacattactttttagatccccccattcaattcttgaaaaatgcaacttgatttgtttaaataaatatttagctctcaataattacctgattacttattttgactgttaaggtcatagccttcttgctgattattatgaatcattgatgttagaaaagggcagatgcaacagcatctgagagactgggggaagaggctagcctgggctacatagtgagactctgtctcaaacaacaacaagagcatgaaaataaaaacaaacaacaacaacaaaacaaaaaataaacaaaccaaaccaaaccaaggacatttacaaaaagagcaaaatcaaatgactcattattaatcatatctctccagttcatctgcccaagcagatgaggcaggatgacatccaggcctgtgaggacacagtgactgttgcaatgaggccctgggagaaatggccaagccgagtactagacagtcacaatgaggtacatgatatccactgaagactgtacctaatttttcctacgttgatggcagactcagttggaacagttatctattgcttatgagtctgctttaaagcttagtataaagtctgaaaggtgatgggttgggtctgatagtcaccttcttcagtatcatatcctcccctccctggctctcagggtgcaggtgtgagcagtagatcaaaaggggaaattcagggaccatgtaaatcagcatggcctttgacctctaaacctgcacctcttacatgggctaagagtccagggtcaccttctccctccctccggcaagaaactgtaacctttcacaaattcccagacaagagctgagagcctttcacagaacagagtttaaagtaaagaagtgacgctcattcaagatggggaaataggtttgtcccaggggaagtccagatgaagatcttggaacgccacttctttatcttcccatggggggggggggcacggggggggatgggggggggaagagtgcctggggcggggaggggaagcagatgcaaacttcctttctcaaaagagtgaaaatttacccagttttcaaattctatcaaatgatcctgaaccctgtgctcaaatccatcccttctccatccctccttagagcagcatataaccactatcatgtcttcctatctatgatgctcagctgggaaaggtgaatattttccctgtataaagttctccttaaacaccgcttggtcactatcatcatcagctgcggatactttctggaatgtattctcaggttgttgttttttttttttctacacaaaggcctttcagacactcaaacataatgaagtacttatacatataagagtttatctaaatgaaatacctagccatattccagacagtcacatacacagatggtcagtggatgactgagctagtaaggcactattactaacctgtgcattcctcagtgggagagtgatgccctttaataacccagcacaatggaatatagcaattaaaaaaaaactggctaagtaattcataggaaagcacctgtaataatttatttttaaaaaaagatagaatattgtactttcacctcttatgacaaccccaacctaaactttaacatagcctaggtcactgtatctaagaactgtttgggacattttcttccaaaaatcctttaggttctctgggcagatagaatgaaaatcttaagctccagcatcctagacctcgacagaggaagggacctccggagatgcttcaagtggaaagacccagtcattgctagcaaacagtcaagtcgcgctaggaccaattaattcatctcttctgacccagctacctacccacaagatccataaacacacaaaactgcggattctgagttcttaactttcccaggaaaccggttcccttctccgtcctaaaaaggtctagggattctggctctttaaagtgccctgcaagcggattccgcgagaagatgctcccttacctgcaggcgaggagactggcccgcgacgtgcaagtgcagcctggcatgaggcttggggaccacgatttcctggtcttatctcgagttcagagccccgcccactccgcggaagccttgtccaacctccgctgtctgtgaaaccgaagccacccagtccctttgagcatgagtttatctcatagtatttcctgcggatgactttagagtcagctttgggatattcacagtttaagaaaaaacgaaactaggcttcggtgcggtgacacacgccttaattccagtactcaggagccagtggcaggtgagtctctggtctatagagagagctccaagacaaccgggctgctactgagaggctgtcgataaaaacaaaaacaaacaaacactatttaaaaacgaaactaaaagtgaaagtgaaacctgcattagctttcttgtaaatcaggttccctcaaagaaacagtccagagtaaacaactcagctctattttgggtgggagtggaacctgaggtcgggggtgggggtgggggggagcgtgtgcttggagatccacataggttgccttcctctacagctcccaccttgatttttgaaagagggtctctcttacctaacctcgggctcgcagctggccaaactagccggccagcgtggtccagggatccccatccgcgcccctgctgccagggctagggtctcagaaatgggccatcactgcatttattatgggtaatgaggacccgaatttcaaatcttcaggcttgagcagtgagcgctttagaagcaaaatatctgaagtcataagatctctgacttaaattttatcttcagaatccagacacttcaaattaccatccgattccccatctctttcaagccctttctggatacgtggatacgtgacagtcttgacatgactttacatatagagttatacaacctatagagttaatatcaagcaaatgactcagttttaattctagaaagtaggtgtgtctgtataataggaaatatatttttaaatcgtggatttggtgacttcctcaaagttcctcgacataatgaaaccagttgtcttgccgttcaagaacttcccatctcgaaccgtgccctttgtgaacgctgtggatcacggccagtctcgggatccaggtgggggaagtctattctaaatgatgttgagaaagactttctgcgaactggaagtgtggactttttccaagacaaaaccttgggaactccacagagcactgtcatctttaaacatttcactgttggacttcaagggccttcttcattctctgctttcccccacttacttactaaaactactattccaaagtagtgcactgggtgaatactggggtgtccgctggcttagttgtaatgagattttcacattctcaaagcatctccatttttaacttggaagtcattggggttgatgctgcctaaaggatctatagagaatgtggcactctaaacagcaacaataaaattggaataagaccagagcctcagctgagatagtccctcttccaaatgtcttttgaaccccaataatagaataaagcaattaaagttagagataacattagttggctgactgaaaataaaatatagactttatatgtggaaattcagtctaaacatatgtgtgtgtatatacacgtgcacagacaaaacatatttctagttaataggtttgtgtttgtttgtttgtttgtttgtttttggtttttcgagacagggtttctctgtgtcctggaactctgtagaccaggctggcctcgaactcagaaatccgcctgcctctgcctccccagtgctgggattaaaggtgtgcgccaccacgcctggccaagctttatgatatgttagtatggttgtgactattcagatctgtaaaaaattcactttagagacccactccttagctgagttcccttggttccataaggatctgagaggtgaggattaagccacacccccttagtagtctctatgatatgtgaattccttctaaagctagaagaggtgaggtggtttggttttgtttgttttgttaaagcattgcttacagtctacataaattctccacagagaaggcaaggggtgactgaacctggtctctctgaagctctccatgggaactggggcctgctgctttcgctgatttgcatatgagtaatctgaagagtcgccccacccccactcctccacctgtttctactcctccgacatttattctcccatgaagttgtccatgcccccttaatgaagttttggtatcctccagaaatagaaagtgaggatgtgacttttatacacacacacatacatgtatacatgtatatatgtgtgtgtgtgtgtgtgtgtgtgtgtgtgtgtgtgtgtgtgtgtataaaatcaccatctcaaaaatacacataagccaaaatagcctaggcaaggagataagtatccctgaaaatgatatgagtttttgtgatttggacaaaatgaatagagaaacggtcagacaagagaaaaacagcggctagccaagactgaagagtggaacaaatctctaatgtcatttctaatcttgctgtttcctgttcataccccacctggcctactcatttcagggagataaacctccttgctgctcccagtctgcttagctgacgatgaagaccaagcaaccatctcaagggtaaggcactacacaaagtgattccggagatacccaacctgcaggagggacaaactgcaaaggctgaaggggagcaagcgtggacagttcctgcagagaatattactgtgctgcagtctagactgaaaggctggctctcatcacgtctcagagggcctggagggttaaggagaaaggttggttcccagtggtaatgcaaagtcattggagagtgccagaagcaagggtcaggctgcgtgggtctggagttacagttagttgtaagctgctaagaatcaaaccttggtgctttggggtgcccgtaactggataagctctctacagccctagttctcagagctcagggactattttctgaaggggaatgaggaagaggaggaggaggaagaggaaaagatcactcaggggaggagaacaggctgagattcacaggttgagagcagggtcatgtgcgttgcatgggttgcaggagaaggaagttagcaagcaggtgcttagtcaatactgacatcacagctgaaaagcaccctaaagagaaacagctacaagtttcctgctcatcagctgtgcggttatttacatacagcctaggaaggctaaagcccacaccctcatcactattccccagggcttccccagtcaagcttctcttgggatgctatgaaatgcttgggctgcgccacatgaagcttcatctgattcaggttacactctgagatgtaccggcggcccctgctcggaatagtcttccttggctacagcatcatttaaaaaaaaaaaagcctatcaaattaataagatgaaatcacagtaatgattaaaagtgtcagtaatagtaaaacgggtgcatacactaggttacctaacttgtattatgagttgtgcttcctggagtcacctccacttcagggctgtgtaattggagacatctcgctcaagtaacttgtggaagcttacgtgttcaggaaaggatacaagtgggagtgaaacccggaacgatgccccagtgtctgctacacagcggccacacaggtggactgtcaggtgagcgtcctcatccactgccatcaatcacagtgtgtggattttaaggccttgacttactactgtatgccccagccattctacccctactacccaagacaactgacaacatgctcacaaaactagcaatgttcttcatactagactaaatagaatcatgcaaatgtccatcggtctcaatggacacacaaaatgccttatagtcatacactggactactatttagtcccaacaagaaatggagccataatccatgctatagtttacctgtttaatttttctttccatttaacatgtatttactctctgtgtgcgcaagtgcacactcatacgtggaacagttagggatgtcagaagacagctaacaataatgggttcttcccttccactatgtggagcccagaaatagaactgggtctcagggtggtaagcatgtttacccactgagccatctcaccagcccctactatagcttagatacacacacacacacacacacacacacacacacacacacactagtgttaaagtaaaagaagtcagctcggcatggtggtgcacgcctttaatcccagcacttgggagacagaggcaggcaaatttctgagttcgaggccagcctggtctacagagtgagttccaggacagccagggctacacagagaaaccctgtctcaaacaacaacagcatcaacaacaacaacaaaaaaaaaataacaaaaacaaaagaagtccgtttcatttatacgaactatctagaatatgtaagtctttgaaaaggtagaacatagattaagatggggtctctagggtgactgcatgtgacattatccataaagataggttctatagattgactgagaaaaacagctcatgatgagggaaggatctggtgaggtctcgcacacacagtgcaaatgttaaccacttctgctcccagtcttctgggcggaaaacacattctaaatctttctctttgaagctacaaccctgtgtgtttaacattcttggttcccacagtgtttatctgaaggtacaacgacctctgttcctcgtacaggttacagagctgggaacagaacggagacaagtttagtctgcacgtatagacactacttcctaccttagggatgggctacttgtttctctccaaaagcatttactcctagcaacacccatctcctcccacaaatagaactaaataaagattctgttgcaattttcccatccaagtaatgtttggaatgagggatctaaaagtcagaataaggaacactggaactaaaaacatctatacaagcctgcgaggctagatatgcctggaagaggctagattgccttctctaaggtgtggagccaacacatgctaatgcagagcccttcctaaaggttgtgattcacatactatttccccaaccggttacatagtaagtgctaatgggtccagtgtttcctagtgaagttcggagttgtactatagacagacaattctggtaggagtacgaaatatggaaaacgcatagggaaatacggaaattctggtcactgtctgcttttgttccctggttacctttaagcgagatttggtgatgggttttgttgttgtttttgttttgtttttgaggcaccggactccgaggacttgaaacatttccacgctgcttccttgggccttccctcaaaatcacgcaccttacaagaccatgcaggttggaatttgcggttctgtcccgccccgcccacctcccggctccaggcgcctgcaccggaagaacaccccaggcctccgcgggcacccgagcgcttaagggagccaaaggccacgctgattggttgaagctcgtgatccactgtcatagccaaccaatcctggggctctgccgaagcaaggtactgtccctgcgctgatcgctctggagctctggctagaggcctctgctgcggtcaccgtccccgcaccgtgtcgcgtgagtgtttcgggtcacagacacctgggagggaggggtcggctccgtcgcacggtcccgcacagctgcagctctggctgggcagggaaggccagggctctgggttcttgctgatgcctccgaggctgacaggtattgccaacccagttctgtgagtgtgatctctctgtaccattgtcaccaagttgggacaagactgcagagtgcaatggacaggaaaatggaattcctttagggaaatacctatatgacgctaaactggctcaacagagcgagagtggaaacaaaacaaaacacccccagaggttatgtgcttcctgctaggggacttggtttggaagagttattgagaatgatagtgatgttgtgactagccaaaaattctggtactaaatcagggaagaaatctggatgacagaaatcgtgtagaatttctttccttctaaatggaatccaggttccaaggatgaccagggaaagtctgtctgggatctgtacaatcaggacacccttcccaacacgcctttccagagtaatttgaatcatggcctcttggaacaggagacacgcctgcctccccatcctcaacccaaaacaaacaaacaaacaaaaatccaggagcagcctggactcacatctgtatcctccatcctataggacatggtggttgtctgtgttgcctgtaataagtcagtttggggccacgcttacttatcgctgataatatcgtgtctctgggagagagacatttggaggtatttgggacatcctaaggaaagagtgcaacatggctttgttaggtatggtcagaagaggttggaaacactgttcaagggtgaagttacagggtgtggcatgctcattggcaggtgagatctccagagggacactcctgtttgccttctatatttaaccgtgtacctgagatttcccccgacacatccaaagtccaagtccaagagagcaaggcccagaaggaggtaagcctaaatcctagctagcttttcaaagtgtttctcttctcttctctagacgattgactgaaagattgtccgaccacttcaagggatggagagctaacccccttaggccaagggactgaggggagagtgtgtgtgtgtgtgtgtgtgtactagaaaacagtcggtttctttgaagatgtttgaagatgcttgcagcagatgtaaaaattcaaccgtctgctccgacatgcaaaagaaaactaaaggatgttgagcagcctgacaaggttgatcttctgtcaagcattccttattttgtgcaattatttgtgtgaaatagaagccacagagactatcatgatggatgataacacttctcctgcaggctcagctggaaatgactcatgtgagctgccaatacttagataagagagcaaacggctagagacccctccacgatgagtgccctctgccgctgctggtagggtgctaagtgggacagtgagagtcaggaggaatcatgatgtcccagggctgtggaaggctctctcttccttcctgggaagtagttcagcctctgctcagcctcgcagctgattggctcaagggctgcttaattccagggtgcgatcttcgtctttgtcagaatacacggaaatcattgaaaccaggctgtcagttcatactcccctggagcccgactaacagggtaaccatcccaactgattcgaactacccctgttctccatgctcatctgctaggttactctaaacccagggatttccttatgaggaaagctgtggaaataactgttgtccgggatttcctcagattatacataaatcctggctgtgaagcattgagacgggctgctgtggtggaaaggtatttaacagcctaagacagcactgaagagagtggagatgttgtgacacgcccccccgccccccccccccgggccttatggtcttctgaaaaaccaataactaaccaaagtgtttctctgaacatactcagttatatttagaacaaagttaggagttcttacccatagtttatagccctctggggtagctgttatacctaaataacaaggccatgcctgatgtagagggtggctcaagtcagtttttaaggaaatgatggtaaaaaaggcgatatagatcataaggggaaagaaaatcaaaatttgaattcatgtcccaggctagtaaaacaaaacagccattctattttttaattttactgtaaaattcaatgaactatattgagcatattattataaaaaaaaaggtctgtacttcttcaggctaacctaagtgtttctgagaacagtaacatcggctaagataaaccacaatgttcggtgtatattcggtgtaataaatgcagttttctctcaatggtatttccaacttgcaatgagcttattgtgctataacttccattggaaataatggagaaactctaccatgtggtcattttaaaactccatttctgggctgaggagatggcttggtgggtaaagcacttgccatgcaatcatgaagacctgtgctgaaagcttgcacatcaatgacgacctgggcacagaggcacacatctgtaattgcagtggtgagatgagaggcagacacaggaggatccctggacgctcccgaccagctagcctggggtacacagctaagaggaacattccggaaagactgtctcaaacaaggtggaacgtgcagaacaatacccagggttaccctctgacctggaggagcgctgtggcacacacccacctgcactcacgcacatgaatgaatatatacactcacacaaacttcccattcctggggatccatttgcaaaggcgtgtgagcatcctcaccctgcccttttgagagcctcggtaacgtggagagaatgaaggcgaggctggagaaaactggctagggggaaatcagctgcaagaggatgagacctgtgtcagagaaggaggggagcatgagacgtcaggagaaatactgaagaattgaccctaagacacttacatcttaagacacaaggtcaagagggacagacgacagttctgaactcacatcctcagatgcatggtcttcctgtctgtcagaacagctggtatgaaggtgaatcacattagacttatagaagggaaaaccgaggtaacgtggcactgtgtgttcacagagcagggagagatgggaaatcatttcagtcagctgttcttggctgagagaaggatgctcaggctgggtaagaagtatgcctgagggtagacagctacatagaatttacactgttccctaggtcatctctctctctctctctctctctctctcatcccagttgataggagtccagagcctgtataaggatgcacagagtctgttatttaaatatgccttgcattttccactttaggtcaagatggggtttatattctcgaaatctatgaacgaaaacatgaaaaaccaacaggagttcatggttacgcatgctcggcttcaggtatgtgctagttaagatgccatgttcctaatcctgttaagtttctagaatggtgctctagaggcacagtctcttcgactccctttgactcctaattaagacgctcctgggctccatcctcaaagacaaggtgaagtggatgaccaaataactggtgaacagcccatgtctccaatccagatacttgagccaaaatttctataccactaggtaattgcttagagtatattatgaacagaatatggctcttcctcgaggcattctgaactcctaaaacctgtgagtatattaggaatatgatgccttacatggaaagggaatttacaatgtgttcatctaaagaagtgttatcatggattatcaacatggatccattgtaacttccaggacctttataagaacgtgtgtgtgtgtgtgtgtgtgtgtgtgtgtgtgtgtgtgtgtgtgagagagagagagagagagagagagagagagaaagagagagagagagagagagagagagagagagagagagagaattagatgttatactgttacccataaaagtcttaaacatagtcataacctgagaagcactctactggctttgaagatggagagaaccagggccatgggccaaaaaatgcaggcaaccttaataagctggaaaagccaaagaaacagagagacagagcctcgccagcccgttttggccctttaaccattgatcataacttgttaaagctgcactaggaaactgttatagactgtggtacttgaccttggattgtacagtagatgtttagaaaaaaaaaagtcgaacagattgctgaattatctaatataagctgtcaaagtattttaaaatattacacagctgaatgttaaaatgttcgacctaaattgttttgctaaggttttagacaatggtcatgatgaggcccctgtggtctgttatggctctaagagtagaaagccctactcttgggcagtacaagtgagagataacctagacacccggatgaatcaattcatagcatcctgactgtgcacatgaccggtcctcggtctcctggtctgtaccctagaggcaatacacacttccgagatgctccaagaagtaaaaattatgcacattatatagaatgtacattatatagaatgtgtactataatgcctcttgcttatattaggtgttgctatcattgctattaaaaatattttttaagtgttagggtttcatatagcccaggctagcttcaagctggttatgtagtctaagatggccttgagcttgtagtcctcctgtctgtctcttcagtaataggagtattggtatgtaccaccataccccactgatgttaaaaacttaagtttcggtgtgggataatggttcctttggggaaaagggaaagaatgggcaagtcttactgtaatggagcaatggccagaggagacgtataggttaggaatcagcccagtatctcagaaataagaatggcgtgtgggtggaaactacaagagtttcattcttatatcagactacatgacctcaggatctgtgaagatctgaggattctattcctctttattcctcttggaagttacagaaaaccagagactcctacaccagaggagtccgtcactgcacggaagcagtgtgagctaagtaccgatgtcacttcctcctgctactcaaagcccatgcactctgtggatgtgggtcaggtatggggaacactgagtgtcgggaatctactgcttctgtgaggaaccatgaacaggaggagtgtggaggcgtttgcttcgtttcatgccccagggttgttcactggcacgaaagcaagagatcgctcagctccggtagctagggccttgctttttttttttttttgacctacccatcaagaatgtacagaatgttcaaggtccttggtggtcacctgactggccagaggcaagagaacggctccagttgtaccttccaacacactaccttcgttttccagcagacagacgttctatttgtcctatcttggattcccgactctacagtggacatgtcacacctgaggctcacgtagcttccacagaacaaaggttattttaaacaaaaactcaccaaattacttaccatcagttactggctggtgtgaaatcccctcaacaacttgtatgctggaaacccaaccccaatatgacttcatttggagactgggtctttacagaggtgatcaagttaaaataaatccttagggtgggtattaatctgatatgttgttgacttttaagaggaaatttaatcatgtgccccaaatatgtcatttacaagccagtgacagagatctcctcacagcttgtccaggaatcaaatacattgatttttttgatttctagattccagaactgagacaaaaacaaaaacaaacaaacaaaaaccctctctctttttttttcctatcgtttaaactagccagatcgtggtctctgttttttggggggtgagggaggcgcagtggtggccggtatgcagctttagcaaactaaagagggaagcacttggaacctgcgtccagaagggggcgctggtgcatcgagcaaggagctccgtgcagctcaactgcaattttctgcttttctccctatttctctaagccctgccaggagcatcagagaggtcatgagtgggagagattttggtcaccatgaggtttttgtacagaatggcgcgtcaatttcactgcacacttatctgtgtgcacggcagtatctgaattgcatcaggctcctatcctcactgcaaactttgcaaaccgacctcattggttaaattcagcccttcttccatgaaaagaatgcatcctaagtgttgtagggtcgctacctacatagtttca

SEQ ID NO: 962805 - DNA, 56 bp, Homo sapiens
attgttcccattttttttgctgtcataaataatgctgctaagtttttgtatgaacg

SEQ ID NO: 962806 - DNA, 51 bp, Homo sapiens
gtgtaagttatcccagctgcagcatctaagtaagtctcttcctgcgctaag

SEQ ID NO: 962807 - DNA, 45 bp, Homo sapiens
aactccaccagagtaggccataaacattggcaaaattagttgtaa

SEQ ID NO: 962808 - DNA, 45 bp, Homo sapiens
aaatgagtatattcaaataatttcctcccatttaagatgagtcag

SEQ ID NO: 962809 - DNA, 46 bp, Homo sapiens
tatggaaggggattccaatagtcgttgaaaaattccccataacccc

SEQ ID NO: 962810 - DNA, 4056 bp, Homo sapiens
gagtatctggtggtggttgtgtttctccacaattgcagctcttggcaagcagtcccttctccatggctccagctccatgggctctggaaacacttttctcctttgctatgtagcctagagagagcgcagtcttcctgctgttgctagactctggatgactcaactggatggttctcttagtcatactcctttaagtagtgtcttcactaatatctctttaatcaaaccaactgagtaaaattctgattcctgatggatacatgttaaaccgaaaacacacattataaattttcttgtatgtatgatgtttttcataattttaaaacataagtgaaaaaagtgaccatagaaaaatatgcccaggaaattgaaaaaaaaagtcttggtatagatattggacacattttataaaatgtggagtaagagggttaaaggaaatttatttcagaatcaaatggcatataactttaactggtatgtgaattattttcagttgtatgaatttgtgaatatatatgtgtacatttttatgcatatatataaatatgtgttttatatcatcttgcattataacataaggatttttatgttgctacattgcatttatatttaccatttttaacagctaaaggattttcaataagtgtgtatgtaacaacttccattgctggatatttctcagtatatatatgtatatatacatatgtgtgtatacatatatatatacatatgtgtatatatacatatgtatgtatatgtatatgtacgtatgtatgtgtatatatacatacatgtgtgtatacgcatatatacatatgtgtatatatacacgtatatacatgtgtgtatatatacacgtatatacgtgtgtatatacacacgtatatacatgtgtgtatatacatgtgtgtatatacacacgtatatacgtgtgtatatacacacgtatatacatgtgtgtatatacacacgtatatacatgtgtgtatatatacgtgtgtatatatataaacacatatatatatgcacatgcatatgtatacactgagttaagtagtataaatattttagagaaaattgatgtaaaatcctcaactcatttgatgctccctatcccaggacagtaaaaattgcccaatatttccttggacctccataaagaagcagtttttcaaaaaataaagtgtttggaagtttaagatgtgcctagcagtgtctccttttaacagagatgctttcacaaggatttgaatttccccattgagctgggaaccaggtttagccaagaacttcggtctgtgaaggactgcaaatagttgcacagtgtggggctgaggctagaacctccttaatattaaaccattctgggatggtgctccccaaattctggattttaaccttcactccaatcctggggcacctctgtagcttgggcatgacctggacacaagctttgtgtaagccttctttggacttcatccattcctcaacggtgacaccatgtggcagtgtaatataatggcatcagtggactcagatcctgttctctccctacctagagatttttaagattaagatatgtaattcacaaccataaaatgtaccaccttaaattgtacaatttattggtttttcatacattcaaaaagttgtacaaccaccaccattatctaattccataacattttcttcaccctagaaagaaacctcatacctattagcagccactccccaaactccccattctccccattcccccagtttctggggacccctaacctactttttgtttttatagatttgcctattctggacattttatataaatggaagcctacaatctatggccttttgtgtctggctccttttacttagtatgatcaaggttcatccaagttgtagcatgtaccagtacttcatttctttttatgtctgattaatgttccaatgtatggatataccacattttgtttatccattcaaaattgtggggcatttggattgttcccattttttttgctgtcataaataatgctgctaagtttttgtatgaacgtatgttttcaattctcttgggtatatatgtaaaagcagaattgctgggtcatatggtaactctgcatttaactttttggagttgaacaaatacaccatgccagcagtgaataaggatgctgatttcactatacctttgcacaatagttaagagcataaacactggaaccagatgtctgggttcgaatcccagctgtgctatctcctagctgtgtcgtttagacaagttactaaagctctgtgcctcagtgtccacatctctaaaatagaggcaataatagtaccttccttacaggattgttgtaagatttaaatgagctaatatgtgtaaatcacaaaaatagggtctgacattttttaaatggtatatgttttaccattgctgctattttaatctttattataattattgtgttttgttttgttaatttgatagctttaaaaggtaatgatacagtttattgatgtttgttatgaaaaggagtaattggagaagataaaaatgtaaggggtaataaagtcaaggaaggttttttgagctgaaaatgattatatttcagagtgtaacctgaataaaactgaggcttcacatggctcagtccatgcatgtaatagcattctaagaaaacataaactgaatgaaaacgtaaactgtgaagcatgaagaataatgagggtcttcaccttatgctttctgaaggagtccccgcaaatgcttcacacagcatattgaacaagaaactcctaaaatcttctctagatatttctctctttcctattttttcccactgacagtagcaccttatatctatcctcctcaactgcgaggtcactacagcactatactaagcccctgttaacttccttctcttgaaacccatgcaactcacatgatcctattctcagcctgtgaatctcagcctcctgcaatcctgtgaaattcaacttggtctcctactctgaatgtgtataaaaataacagagaacagttcctgaactctgatgagtaaaatgatctaccttattacatgtggtattataataaataaatatacattaatttctttccccattttccagcacacagctcctaaaagacttgtaacttcctgagtgataggtatgctaggtaaattttttgttctatgtgaccttcgactccagttcttgacacagagctcctgatcccttggaatttccatagtgataggagcatctttcattctcctgaagtaacttggtgggcttctggatgggagctggtcacaagaatgaccaagccatgattagaagcttggaactttcacctcctacctcatcctgtgaaaaggggagaggggctgaagattgaggtaacaattgctgatgtgtacatgatgaagtccccataaaaatccctaaatgaggggatttggagaggttctggaggtgctgaacgtggaggtgcttggagggtggcctatccagttcatctccagagttcacacactcacctaagtgctgatgcccacctgatggcatttctcagcctccgaggctttccttctttgtacttagtcaaaagaatgctctaatccagtctatcattgatgggcatttgggttggttccaagtctttgctattgtgaatagtgccgcaacaaacatacgtgtgcatgtgtctttatagtagcatgatttataatcctttgggtatatacccagtaatgagatcgctgggtcaaatggtatttctagttctagatccttgaggaattaccacactgtcttccacaatgcttgaactagtttacagtcccaccaacagtgtaaaagtgttcctatttctccacatcctctccagcacctgttgtttcctgactttttaatgatcgccattctaactggtgtgagatggtatctcattgtggttttgatttgcatttgtctgatggccagtgatgatgagcattttttcatgtgtctgttggctacataaatgtcctcttttgagaaatgtct

SEQ ID NO: 962811 - DNA, 4051 bp, Homo sapiens
agtcatgatgaactagcagatcataaagtttatgccctgggtcttgaccatttttagaaaaataaaacattaaatgaaaatatcagagggcattgcagatagtagatctaagtattttttcatgaaacttgttgtacatgtgtgtgtcatacacagactatatatatgcagtacctgtaaactgtattgccacataatgtctatattttcctagaggtcacagtcaccaaagttgggaagtcacccaacttcgggaactttgggaagtcacccaaacttacagtcaccaaaattgctctattctactatgtgacctcaaaagtgatttgaaagaaggaacatctgagctgggcccaaaccctattgcaattttattggggccaaagagaactccatgctcctgccaaatcaaggcagtgtcagcctcaataatttcccagataaaaataaaaatctgtgatacaatcagaatgtgaaaattcttattttggaagcaaatgtcataaccaatgcaagggctatctcaatattcattcattatgcagtattttgaactgcagttgaaatgaataagaaggaaaggcaaacaacgaagagtccaatttctcaatttagaaaaagagaaaaaaaagaaaagggagcacacaggcacggtggctcaagcctgtaatatcagcactttggcggatcacttgaggtcaaggagttcgagaaaagagagcacctagaagttcagcgcgggataatacttaagtaaattatgacaccatcgtctgtcatcttgggcccattcactaacccaaagctttcaaaagggctttcttaaccctcacctagaataggcttccgcagccttaatccttagggtggcagaatatcagggaccctgagcattcttaaaagatgtagctcgggatgggaagttcttttaatgacaaagcaaatgaagtttcattatgtcgaggaactttgaggaagtcacagaatccacgatttaaaaatatatttcctattatacacccatacacacacacacacacctactttctagaataaaaaccaaagccatatgggtctgctgctgactttttatatgttgtagagttatatcaagttatgtcaagatgttcagtcaccttgaagaggcttttatcagaaagggggacgcctttctgataaaggttaaggggtaaccttaagctcttacccctctgaaggtaaaatcaaggtgcgttcagatgttggcttgttgtaaatttctttttttattaataacatactaaatgtggatttgctttaatcttcgaaactcttcccggtgaaaatctcatttacaagaaaactggactgacatgtttcactttctgtttcatttctatacacagctttattcctaggacaccaacactagatacctaaactgaaagcttccgccgatttcaccgaaggtcaggaaagtccaacgcccggcaaactggatttgctgccttgggcagaggtgggcgggaccccgcctccgggcctggcgcaacgctgagcagctggcgcgtcccgcgcggccccagttctgcgcagcttcccgaggctccgcaccagccgcgcttctgtccgcctgcaggtagggagcgttgttcctccgcgggtgcccacggcccagtatctctggctagctcgctgggcactttaggacggagggtctctacaccctttctttgggatggagagaggagaagggaaagggaacgcgatggtctagggggcagtagagccaattacctgttggggttaataagaacaggcaatgcatctggccttcctccaggcgcgattcagttttgctctaaaaataatttatacctctaaaaataaataagataggtagtataggataggtagtcattcttatgcgactgtgtgttcagaatatagctctgatgctaggctggaggtctggacacgggtccaagtccaccgccagctgcttgctagtaacatgacttgtgtaagttatcccagctgcagcatctaagtaagtctcttcctgcgctaagcaggtccaggatccctgaacggaatttatttgctctgtccattctgagaacccaaaggagtcctaaaagaggaatggaggagcctaagaataaaaatagtataataaaacatttcttagacacattgaccttggcctatgtcaaagttcagtctgggtttgtcttataacacaaggagtaaaagtaccattgttctacctctttttttaatacttgaaaaaaatttactgtggatgcttttctatgaattaaataaccttctaaaaaatgttttcattgctgcattcgattagattgggtaactaaatgaaattaattcctcactgttgggtataaaggttatttacagtggttctgtcttagccattcactgaactcattgcatatatatctctggaatattgctgattgtttccttcaagtaaacttagaagtgtaactacttagtcaaagagcctgaatattttaaaggccttttgaagaaaactgaaaatgctttccagaaaggatgtatcagttgacaatgacagtcgtcaacagtatttaaggagaactatgatactctgaagaaaaacttagcctttctcagtaaaagtaggtaggcagaggccacatgacagcagttagagtgtggtcttcaaggaagtcacagaaatactgtggggaattgaaaccccatgtggaaaatgtacaagagtgtctcagtgtgactgagaaggaggttgggcatggggtttcatggagtttaataaagtttggtcacttagtagaggtttaataaatcaactgtcttaatctttgatcctacttaagaattttttttttgtttttgtagagatggggctcttgttatgttgcccaggctgttctcgaactcctagcctcaggcgatcctccctcctcaggctccagaagtcctgggattactggcgggagccaccatgcaggcctcttgctcctacttttgagaaaggaagtttaaccggttttttttgtctttttttttttttttttgagacagagtctcactctgttgcccatgctggagtgcagtggtgcaatctcagctcactgcctcccgggttcaagtgattctcctgcctcagcctcccgagtagctgggactacaggcacctgccaccacgcccagctaatttttgtatttttagtagaaatggggtttcaccatattggccaggctgatctcgaactcctgacctcaggtgatccgcctgcctcggcctcccaaagtgctgggattacaggcatgagccactgctcctggctgcttaactttttctctatctcatcctcctacccatcctacccttggaagatagagaagtagtattagttccatagtgttatactgggcttcccccagggacaaacccacttccccaacctgaatgagccatcacttcttccccagtttacatttcattgctctttaaatgtctccattcggatatgggaattcacatatggtcataattcttacctgaagaagatgtcagtcttcttctcttagaccaactgccctgatatgaggtttagaggttaaagaacatgtgtgtatttacatgatctttgtattctgccttttcgtccctcactaatgacagctgcaccccaaggaaatggagctgtggaagagagggtttgataagaaattaagtaaatattggatctaatccatcaccctccaggaagcctttattactcctaaaaatttcaaccaaattcattaaaggacaagaactccaccagagtaggccataaacattggcaaaattagttgtaatccatgactagatttaatgtccctttgttttattcccatatggttataatgctttgcttggcattaggggtattttaagttttcttctgcctagtaagtgaatttgtgtttataatacaataatcataaaatatcacattaatattttataactgtacagttataaaatattttataagtaatatttatattttat

SEQ ID NO: 962812 - DNA, 4045 bp, Homo sapiens
gccttcctccaggcgcgattcagttttgctctaaaaataatttatacctctaaaaataaataagataggtagtataggataggtagtcattcttatgcgactgtgtgttcagaatatagctctgatgctaggctggaggtctggacacgggtccaagtccaccgccagctgcttgctagtaacatgacttgtgtaagttatcccagctgcagcatctaagtaagtctcttcctgcgctaagcaggtccaggatccctgaacggaatttatttgctctgtccattctgagaacccaaaggagtcctaaaagaggaatggaggagcctaagaataaaaatagtataataaaacatttcttagacacattgaccttggcctatgtcaaagttcagtctgggtttgtcttataacacaaggagtaaaagtaccattgttctacctctttttttaatacttgaaaaaaatttactgtggatgcttttctatgaattaaataaccttctaaaaaatgttttcattgctgcattcgattagattgggtaactaaatgaaattaattcctcactgttgggtataaaggttatttacagtggttctgtcttagccattcactgaactcattgcatatatatctctggaatattgctgattgtttccttcaagtaaacttagaagtgtaactacttagtcaaagagcctgaatattttaaaggccttttgaagaaaactgaaaatgctttccagaaaggatgtatcagttgacaatgacagtcgtcaacagtatttaaggagaactatgatactctgaagaaaaacttagcctttctcagtaaaagtaggtaggcagaggccacatgacagcagttagagtgtggtcttcaaggaagtcacagaaatactgtggggaattgaaaccccatgtggaaaatgtacaagagtgtctcagtgtgactgagaaggaggttgggcatggggtttcatggagtttaataaagtttggtcacttagtagaggtttaataaatcaactgtcttaatctttgatcctacttaagaattttttttttgtttttgtagagatggggctcttgttatgttgcccaggctgttctcgaactcctagcctcaggcgatcctccctcctcaggctccagaagtcctgggattactggcgggagccaccatgcaggcctcttgctcctacttttgagaaaggaagtttaaccggttttttttgtctttttttttttttttttgagacagagtctcactctgttgcccatgctggagtgcagtggtgcaatctcagctcactgcctcccgggttcaagtgattctcctgcctcagcctcccgagtagctgggactacaggcacctgccaccacgcccagctaatttttgtatttttagtagaaatggggtttcaccatattggccaggctgatctcgaactcctgacctcaggtgatccgcctgcctcggcctcccaaagtgctgggattacaggcatgagccactgctcctggctgcttaactttttctctatctcatcctcctacccatcctacccttggaagatagagaagtagtattagttccatagtgttatactgggcttcccccagggacaaacccacttccccaacctgaatgagccatcacttcttccccagtttacatttcattgctctttaaatgtctccattcggatatgggaattcacatatggtcataattcttacctgaagaagatgtcagtcttcttctcttagaccaactgccctgatatgaggtttagaggttaaagaacatgtgtgtatttacatgatctttgtattctgccttttcgtccctcactaatgacagctgcaccccaaggaaatggagctgtggaagagagggtttgataagaaattaagtaaatattggatctaatccatcaccctccaggaagcctttattactcctaaaaatttcaaccaaattcattaaaggacaagaactccaccagagtaggccataaacattggcaaaattagttgtaatccatgactagatttaatgtccctttgttttattcccatatggttataatgctttgcttggcattaggggtattttaagttttcttctgcctagtaagtgaatttgtgtttataatacaataatcataaaatatcacattaatattttataactgtacagttataaaatattttataagtaatatttatattttataagtaatattttataactgtacagttaactctggcccaaggaaaagatagtctgatagatgctgcagccccattttagcaaatgtgacctcacaggcctgaatgccatcgctattccacatctacaggatagacggaaaggaaagaaataaaaaaataggtacctaacactggcaagaggatgatgactcatgttatttcacttaacctttttatcttttaacatgaaggactcatacaggttgataagaaaccagtgacataaacagaccaaaaaatgatcagatctttcaaattagcaaaaaaataatattttttaaacaatgggtgaaaatacagtgtaacagtaccaattatcaacatgtgttgagaaccagaaaaatgttctttttctttgatcagcaacactatttgggaaaatctatcctcagggcctagcctggggccctggcacacagtaggcactcaacgaatatttgctgaacacacaaatacttatgatattttaaaaaattggcaacaatctgatacctaacaatagagggattaaatattatggaactgttaaataagatgcttatgaataccatgcagtaagatgggcaatatttatgccataagctttaatgaaacaaatgggtattaaatgtatgataaggttataaattactttttaaaagattacagggaaaaaaattgaaagatatacactgaaatgttttttgctcacagtggtgacaaggtttctcagcactggcactgttgacgttttaggctgtatgtctttgctgtgggaggctggcctgtgcactgcagggtgtttggcagcactcttggcctctgcccctagatagcaatagcagtcctccctcaaccagcccaattttgacaaccaaaaatgtttccaggcatcaccagatgctccctgggtgagagtgatgaaatagtaggggattttccccttcttttcttattttctgtaattccattatattactttaataataaagaaaaaaacataaaaaataaacgaatgttattattctacgtcagtttggatgtttggactccattttggggttctttccattatatcacttggtctgctaaacattctacggtttggtaaggtgaagtgattcatgaaattttggttttatttttttcctgatactaaaaataaaacattctttcacttggaaatttggacacagaacaccaaaaaaaatccataatctcatctctctttttctgtcttttccttccttttttccctttaaaaacaataaagagtgaaacctacctgttctccctctaatttaattcctaaatataatcactgtcaatatcttggacatttcctgtgtctaaacacacacacacacttttttttttcagcaaaagtggatttctgctacatgtagtgttctgcaacttactttctatgtgtttacaaaatcagtacatgtacatatgctgaattcagtccttaatggtattatattttgtgaatataccaaaatttgtttaaccacttagacaatctaggatattctcagtttgctgttatgagcaatgctcttcctttacatatacagacatatatatatatatgtgtgtgtgtgtgtttttgttttagtaggatagatttctaggagagggtgaaaggtcttatgacatccgcatttacgattgtaataggaagtatcaaagtgccccctaaagaaaaaaatcctcccattagtgggtaagaaagcctatttgttcatatcttcacaaacactaaatattagaaatatttacaa

SEQ ID NO: 962813 - DNA, 4045 bp, Homo sapiens
caggacggtgttgtgaacagaaagagggggaaaaaactttagaaaatgatggggatgctcttactggggtacgagtcctcaggtattgaactggctttcagtaaaagctagattagtgggttcctgccatttacaagctgttttatgacaacttacttgttgggtggcctacagtaactcacctaactgcactgagtctgtttcctcatctgtaaattggggatttttttttaaatacctggcatgcctaactcataaagttgttctgaaactgaaataaaacatacgtgaacaggcattgtaaactgtaagttacggaaaaagctggctgttgttgtgtctttaaagtttcacctgggtagtcaaagatggatcatgggtctcagtggagagctgagccaggcaggagctgactaagggtgagaggtgggagttagcagcctctgaacatctgtgtaccatgggaccccctttcctcctgcatggtaccccagacaaggagcctagtaagagatactaatggcttgttgtccagagatgttcaaactgcagagaaagataagacaacaagcattggcctccaatcatgatgacagataggaggaggtgggagctccttagcagtgctggttggccttccatgttctactgtgggccatctctgccatgtactgtaggctactagcttctatattaaagaatgcaagaggggccaggagcggaggctcatgcctgtaatctcagcactttgggaggccaaggtgggcagatcacttgaggtcaggagtttgtgaccagcctggccaacatggtgaaactctgcctttactaaaaatataaaaattagctgggtgtggtggtgtgcacctgtaatcccagctactcgggagactgaggcacaagaattgcttgaacctgggaggcggaagttgcagtgagcccagattgcgccactgcactccaccctgggcaacagagaaagactctgcctcaaaaaaaaaaaaaaaaagcaagaggaagtgaaataatcaaggccgccatttaatagtgagcagccactccatgtggtactgtgcaagcacattataaatattagcctcacaagaaatgtattagcatttgtattttgtacactggttaagtatcttgcccaagacctcaaaactggttaagggcagcagaatttagccccagcaccaccttttcaaagcctgggcttctcacacttctccatgctgttcccattttaacacaggtatctcgccattccagccactcaaactttggcatttaagaaaattatcctaaagctaaactaaacttcaaggatgaccattctcctgaccccttcccatcaaaattttatctttagtcagtttgttttcgttttgttttgtttttcagaactacctctggcacatcctccaaatgaaaggactcacttggtaattctgggagccatcttattatgccttggtgtagcactgacattcatcttccgtttaagaaaaggtagtatttccttaattgcagtggtctccactgggggtgaggaaggggtgagaattggatcatggctgcaaggaaacccgacttaacctctgcaaggtggtgcaaaggcattccactgttcaacagcaattatattgaagctgagtgggatcactgggtgaagatgaagcgtaaggggtgaggggcaggagaatgggtatggatggaggtagaagatgcagtgtcatacagtttttttctatcatgaaaataaccacagacttacagaagagaaagagctaaaatgcccgtcattttcagttgcattttagtcttgcattagttgcaaccagctggtttctgggtaccctaagtaataaaaatagttcctctgtagaactgtagtatgtttaccatagagtattttgcaaaatttttggtagaggatgttacataatttgcatgtgttcatttctccatttacctgtgggaacaattaaaatccaggaaaatgagtatattcaaataatttcctcccatttaagatgagtcagagtaaataattcctccaatacttagagaagtataccaagagatccagtgatggtatagagttgtctgatgttaaatagggaagtagaatatggaaggggattccaatagtcgttgaaaaattccccataaccccttacatgggggaaagtagtgttaactgagagagtagagataagctgtttccaaaaattatattcttaacaggactgagatagccagaatataaggatcaagtttcaatgacagtaagatcctgagatggagttgatttgcacaaagaaataattgttgccagcatgcattttgaatatttctctggaaaaaaagattagttggcagtagaaatggatagaaatcaatagatattaaaatacctcagaatttggttcatctctgggaaaagatgaaaaataaaagtgtatactcctcaagaacatctaggatcaaaagcatgtgccctacactattgaattaattaacctcataagttgggacctgtggaataaggatgtccaccagacttcctagggattacaaatgtttcacagaacttgaaatttaaacttgggtcactgtatgggatgtagagctgtgctatatggaaataaaaatgatttctttttctcaagggagaatgatggatgtgaaaaaatgtggcatccaagatacaaactcaaagaagcaaagtggtaagaatatcagaaggaattgggaagtaaaagtcaaaggaaacaaaaagctaaagcaataacaaagagaaatccatcagtcataatctcctctccttttaaagaatgctggttcccctttgcctcacagctaacacaagaactcctccaccgtctgaggaggtttaggagcagggaaggggaaggagtcagcttcatttgctaatcttctgttgccctgcaccctagcagctccttgcagcaggggacaaggatgacttaggtggatggataattaattgattctaaaatattgtgtgtcagtattgtaatactatgttaattgcaccatgcacggtatctcatttaatcccccaccccttgccattaccaaagagagagagagagagagagagagaaatactagaatttatcctcattttacagtagagaaaacagagggtcaagaagataatgtaaagtgcccaagaacacacagctgatcacaaaaatcaagcttgggggccattagcctaaccacagacccttactcttaacccatctgcttcaatccattttgctacaaatgtttacatttataagcagggcagaaaaacctcatccaggttattgaactaagaagaaagttatattaaggtttctaatttttttaatgtagttagaaaccaaacttaacaatgagcccaagtttaaagcagtctaattaacctggacaagctcaggcaagtttcattctgtggcccatagcatcatctgtgttgtaaagctaagtagcaaatgttgtttgggtcatgctgggggacaagccatcccaatttgctcaggactgaggggttttccaggatatcatgtaaggataattgggtacaaatataacctgctgctttctctcatttcaaatttatcatttatcatatcagcaactatgagttatgttttttattagatttcttgttactttttccccagaccacttcccatgaaattaatatactattatcactctccagatacacatttggaggagacgtaatccagcattggaacttctgatcttcaagcagggattctcaacctgtggtttaggggttcatcggggctgagcgtgacaagaggaaggaatgggcccgtgggatgcaggcaatgtgggacttaaaaggcccaagcactgaaaatggaacctggcgaaagcagaggaggagaatgaagaaagatggagtcaaacagggagcctggagggagaccttgatactttcaaatgcctgaggggctcatcgacgcctgtgacagggagaaaggatacttctgaa

SEQ ID NO: 962814 - DNA, 4046 bp, Homo sapiens
caagctgttttatgacaacttacttgttgggtggcctacagtaactcacctaactgcactgagtctgtttcctcatctgtaaattggggatttttttttaaatacctggcatgcctaactcataaagttgttctgaaactgaaataaaacatacgtgaacaggcattgtaaactgtaagttacggaaaaagctggctgttgttgtgtctttaaagtttcacctgggtagtcaaagatggatcatgggtctcagtggagagctgagccaggcaggagctgactaagggtgagaggtgggagttagcagcctctgaacatctgtgtaccatgggaccccctttcctcctgcatggtaccccagacaaggagcctagtaagagatactaatggcttgttgtccagagatgttcaaactgcagagaaagataagacaacaagcattggcctccaatcatgatgacagataggaggaggtgggagctccttagcagtgctggttggccttccatgttctactgtgggccatctctgccatgtactgtaggctactagcttctatattaaagaatgcaagaggggccaggagcggaggctcatgcctgtaatctcagcactttgggaggccaaggtgggcagatcacttgaggtcaggagtttgtgaccagcctggccaacatggtgaaactctgcctttactaaaaatataaaaattagctgggtgtggtggtgtgcacctgtaatcccagctactcgggagactgaggcacaagaattgcttgaacctgggaggcggaagttgcagtgagcccagattgcgccactgcactccaccctgggcaacagagaaagactctgcctcaaaaaaaaaaaaaaaaagcaagaggaagtgaaataatcaaggccgccatttaatagtgagcagccactccatgtggtactgtgcaagcacattataaatattagcctcacaagaaatgtattagcatttgtattttgtacactggttaagtatcttgcccaagacctcaaaactggttaagggcagcagaatttagccccagcaccaccttttcaaagcctgggcttctcacacttctccatgctgttcccattttaacacaggtatctcgccattccagccactcaaactttggcatttaagaaaattatcctaaagctaaactaaacttcaaggatgaccattctcctgaccccttcccatcaaaattttatctttagtcagtttgttttcgttttgttttgtttttcagaactacctctggcacatcctccaaatgaaaggactcacttggtaattctgggagccatcttattatgccttggtgtagcactgacattcatcttccgtttaagaaaaggtagtatttccttaattgcagtggtctccactgggggtgaggaaggggtgagaattggatcatggctgcaaggaaacccgacttaacctctgcaaggtggtgcaaaggcattccactgttcaacagcaattatattgaagctgagtgggatcactgggtgaagatgaagcgtaaggggtgaggggcaggagaatgggtatggatggaggtagaagatgcagtgtcatacagtttttttctatcatgaaaataaccacagacttacagaagagaaagagctaaaatgcccgtcattttcagttgcattttagtcttgcattagttgcaaccagctggtttctgggtaccctaagtaataaaaatagttcctctgtagaactgtagtatgtttaccatagagtattttgcaaaatttttggtagaggatgttacataatttgcatgtgttcatttctccatttacctgtgggaacaattaaaatccaggaaaatgagtatattcaaataatttcctcccatttaagatgagtcagagtaaataattcctccaatacttagagaagtataccaagagatccagtgatggtatagagttgtctgatgttaaatagggaagtagaatatggaaggggattccaatagtcgttgaaaaattccccataaccccttacatgggggaaagtagtgttaactgagagagtagagataagctgtttccaaaaattatattcttaacaggactgagatagccagaatataaggatcaagtttcaatgacagtaagatcctgagatggagttgatttgcacaaagaaataattgttgccagcatgcattttgaatatttctctggaaaaaaagattagttggcagtagaaatggatagaaatcaatagatattaaaatacctcagaatttggttcatctctgggaaaagatgaaaaataaaagtgtatactcctcaagaacatctaggatcaaaagcatgtgccctacactattgaattaattaacctcataagttgggacctgtggaataaggatgtccaccagacttcctagggattacaaatgtttcacagaacttgaaatttaaacttgggtcactgtatgggatgtagagctgtgctatatggaaataaaaatgatttctttttctcaagggagaatgatggatgtgaaaaaatgtggcatccaagatacaaactcaaagaagcaaagtggtaagaatatcagaaggaattgggaagtaaaagtcaaaggaaacaaaaagctaaagcaataacaaagagaaatccatcagtcataatctcctctccttttaaagaatgctggttcccctttgcctcacagctaacacaagaactcctccaccgtctgaggaggtttaggagcagggaaggggaaggagtcagcttcatttgctaatcttctgttgccctgcaccctagcagctccttgcagcaggggacaaggatgacttaggtggatggataattaattgattctaaaatattgtgtgtcagtattgtaatactatgttaattgcaccatgcacggtatctcatttaatcccccaccccttgccattaccaaagagagagagagagagagagagagaaatactagaatttatcctcattttacagtagagaaaacagagggtcaagaagataatgtaaagtgcccaagaacacacagctgatcacaaaaatcaagcttgggggccattagcctaaccacagacccttactcttaacccatctgcttcaatccattttgctacaaatgtttacatttataagcagggcagaaaaacctcatccaggttattgaactaagaagaaagttatattaaggtttctaatttttttaatgtagttagaaaccaaacttaacaatgagcccaagtttaaagcagtctaattaacctggacaagctcaggcaagtttcattctgtggcccatagcatcatctgtgttgtaaagctaagtagcaaatgttgtttgggtcatgctgggggacaagccatcccaatttgctcaggactgaggggttttccaggatatcatgtaaggataattgggtacaaatataacctgctgctttctctcatttcaaatttatcatttatcatatcagcaactatgagttatgttttttattagatttcttgttactttttccccagaccacttcccatgaaattaatatactattatcactctccagatacacatttggaggagacgtaatccagcattggaacttctgatcttcaagcagggattctcaacctgtggtttaggggttcatcggggctgagcgtgacaagaggaaggaatgggcccgtgggatgcaggcaatgtgggacttaaaaggcccaagcactgaaaatggaacctggcgaaagcagaggaggagaatgaagaaagatggagtcaaacagggagcctggagggagaccttgatactttcaaatgcctgaggggctcatcgacgcctgtgacagggagaaaggatacttctgaacaaggagcctccaagcaaatcatccattgctcatcctaggaagacgggttgagaatccctaatttgagggtcagttcctgcagaagtgccctttgcctccactcaatgcctcaatttgttttctgcatgactga

SEQ ID NO: 962815 - DNA, 42 bp, Homo sapiens
cagcggtacacccctgcatcctgcaatttcacatctgtgatc

SEQ ID NO: 962816 - DNA, 4042 bp, Homo sapiens
ccttgttctaagtgcagaaggttcagacttttggtatagctgaactcaatcccaaaaccactgtatgcaaatgacaagatggattgggagtagaatgccaattaagtaatttacaatacaaaatggaattgtcaaacaaatcaggtcctcaaacctggttggtcatttgctttgctccaggaagaactcccccttggaaaaaccatcagtgccggaagatttcctattgtgttgatccatggcaaaggagactgcagatacacaagggatattatggagcccagacgacctgaataaaacccttccctactacaaggacagctgtcccttccctacacactccctacaggctgatgagagaccttttttggaagcagaaacttatactttatgctgccttcttcctgactgccaggattatactcttcctttccatcccagatctagcaatgctgttgatgaggctaagtcatgatgatttctttaatatcttggaacacagtagatgcctgatatttgcggatggactggagaaaaactgaaagtataaaccacaacatctcaagagatgtcatgaatggagaagcatatggtaaaatataatgaaaattaaatctactttacaagtggtatcttcttgacaatagtggcattacctgagccagtatcagggaccagaaatacaacataaaactgatacatttctcttaatccccacatgattttgtttttgagtttatagttatcagtgatcattgattaataattgatcagtgatcagtgacaaatgtatactttttctacttgtattgttagccctcagattgatggtagttagcccaggaatggaaagaccaaggggagatgatttaattctagtcaaatattaaaaggtcatcatgtaaatgaaataatcccaagactacaactagaggggcagatttcagcttactattagggagtaatttcaacaggatatggaagggatatccaaatggcagggaggccattgtgggatatgacagggacgccattgcaggaaatataagaacagaagatcctctgggggatttttgttctttgtgggagtttggattagctgctcctgcctgggatcctttcagctctcaattctgtgaaactcaacaatgaaagcagaggtgttttcctttacttagctagtgccaacacaaaactttgaactcaagtgacctgataacataactgtgggtcaataccgaggaactaacactcctagttccttttcaattccccaagacaacatcagtatagattttcaagatgaatatatgcccagtaagtatggcttatcctgtactggaagaataggttctttcacacttaatgtgattattttttgtcttcatagggtgacttcaagtcttttttaatgtgaaccttacagtggggtttgttctgaatatatttatttgcatttgatatagagaggctcaaaaaaggaaaactgacggacctaataaaataaaaaaatagtagttgaataaaaaaatttctggagggacacacaaataatggttactctctctgcatgccatgggagatagtggtgaagggaggagggacacttttgcaattcatttgatctcttccacagtatctgaattatttgcaagtatacgtattccatttgtaataaaaaagtaaagactagaaattctttttggaaaactgtacatactgtagaacatggctctgtgttgtttgtctctggatttccagtgactatcaaataggtgctcaagaaattggataattatgtgaatgaattcatgaattgaatgaatgaatgaacagactatgctgttctgtttgaaaataagtatggacttacaagaatgaaaagtcttcaacacttggaatatgttttcaataaagatcaggcctctcatctataataattcttaccattgactttcacagtaattcgcttgtagtcggcaccaccatagctgatcatgcagcggtacacccctgcatcctgcaatttcacatctgtgatctgaagtgcagcatttcccagggagagctggtccttcaacagccgggccctctgtctgtagctactatgctgaaccttcaggtcttcctctccatgcacaaattgaataatgttcttatcctccatttcccaatagacaattagtgcagccaggtctaattgtttttctactgggaatttgcattcaattgtcatattgctaccatactctaccacatataggtccttgggaaccgtgacagtaaatgctaaaaagaaagaaggacaatcttcagaaaagggaaaattcctcgaaacatttacaaaattggcacagcgtttataaatcactttatctggtcggttatgttatcattatatttaagaacttgctaaacacatattttatccaatgggcttgaaatatgttttgggacactatatctcatgctgagacacagtgtcccaatagcagaataataaaattagctaaacaagttgcccccacaatttataaacatatattactgtataaatattatatggagatggagtccttacaaccagggagagttggtttcatgtagacatccccagaatgtcctttgacaggacacctatttgcttcctacatagagggaatggtagattctaacagtcatctctttttacttccctaaacttttgatcagttttctggcaagaagtacattggtatggagttcaggaaagagcacagggtgatgccagtactgtgttagcctgacattttccatgtatcttacaattcttccttaaagtatcctcatcaggaaaggcatgtcacagagcaaccaagactgaaagatcaaaggatcttggccttgttgaaagcaaacaaataaatgtatacatacaggccatttccccagatattttcagtagttaaccctgggaaatgggtaatagattattttgtgtctttcaatttgtctatattctctatatttttacaaaatgacacaggtaactttatcattgcgtaaagtagaaagaagactttgccattgtgtaaagtagaagaaagaatagaatgttctctctataagaaaattgcatgcattttaaatgatcattttagttttaaactcatggttaaaatatttaaaatatagaacctaatggaaggatttggtgtcttaccgttcagcaaatgccagtaggtcatgaatataaagacagcaaatatcctcatctttctggaatgccctaattatggaaaacacgaaaagaagactgcttcacttaataattaaacatacaatatgacaatatgggacttggtggttctaactgaaatagtcttctaataaccagtcatgattgacttgtaattgtggaaacccaacagggaattggaagttcaatatcttcattccattgcccacagccacataaacttaagtgaaaaaagttactaaaagatgagaagtttcaaatttattatagttacaggccgtgaaaaaaatctgcccactcaaaagaagccaagaagataatattgcaccaaattcctctcaattatttcatgttttttctgcattgtaacatacctagtagaacctgccctgtacaaaatttcagagcaaggagaatctgacttttacttttccaacctgtcaatgctttttccccctacagctaaatactttcatcttaccctttagctattcaaggcttccacttcactgtctcagccatgctagtcctccttcaggtgccatccttcaaaatctcctcttctgcccctctcacttattctaaattataaatctattctctcaataaacagattcttctactaacagtggggagtgggaaggggagagagttggatttgactaattcatactaagatatgaatgactcacagccactcttccagagtatctgcctagattctattcttcatttagtcatcctgcttgaaatgtgactaattatttcgtttagcaaacactgattgagcacctcttctgtgct

SEQ ID NO: 962817 - DNA, 15 bp, Homo sapiens
agccccaaacagaga

SEQ ID NO: 962818 - DNA, 15 bp, Homo sapiens
cagccccaaacagag

SEQ ID NO: 962819 - DNA, 15 bp, Homo sapiens
tcagccccaaacaga

SEQ ID NO: 962820 - DNA, 15 bp, Homo sapiens
ctcagccccaaacag

SEQ ID NO: 962821 - DNA, 15 bp, Homo sapiens
actcagccccaaaca

SEQ ID NO: 962822 - DNA, 15 bp, Homo sapiens
tactcagccccaaac

SEQ ID NO: 962823 - DNA, 15 bp, Homo sapiens
atactcagccccaaa

SEQ ID NO: 962824 - DNA, 15 bp, Homo sapiens
gatactcagccccaa

SEQ ID NO: 962825 - DNA, 15 bp, Homo sapiens
agatactcagcccca

SEQ ID NO: 962826 - DNA, 15 bp, Homo sapiens
cagatactcagcccc

SEQ ID NO: 962827 - DNA, 15 bp, Homo sapiens
ccagatactcagccc

SEQ ID NO: 962828 - DNA, 15 bp, Homo sapiens
accagatactcagcc

SEQ ID NO: 962829 - DNA, 15 bp, Homo sapiens
caccagatactcagc

SEQ ID NO: 962830 - DNA, 15 bp, Homo sapiens
ccaccagatactcag

SEQ ID NO: 962831 - DNA, 15 bp, Homo sapiens
accaccagatactca

SEQ ID NO: 962832 - DNA, 15 bp, Homo sapiens
caccaccagatactc

SEQ ID NO: 962833 - DNA, 15 bp, Homo sapiens
ccaccaccagatact

SEQ ID NO: 962834 - DNA, 15 bp, Homo sapiens
accaccaccagatac

SEQ ID NO: 962835 - DNA, 15 bp, Homo sapiens
aaccaccaccagata

SEQ ID NO: 962836 - DNA, 15 bp, Homo sapiens
caaccaccaccagat

SEQ ID NO: 962837 - DNA, 15 bp, Homo sapiens
acaaccaccaccaga

SEQ ID NO: 962838 - DNA, 15 bp, Homo sapiens
cacaaccaccaccag

SEQ ID NO: 962839 - DNA, 15 bp, Homo sapiens
acacaaccaccacca

SEQ ID NO: 962840 - DNA, 15 bp, Homo sapiens
aacacaaccaccacc

SEQ ID NO: 962841 - DNA, 15 bp, Homo sapiens
aaacacaaccaccac

SEQ ID NO: 962842 - DNA, 15 bp, Homo sapiens
gaaacacaaccacca

SEQ ID NO: 962843 - DNA, 15 bp, Homo sapiens
agaaacacaaccacc

SEQ ID NO: 962844 - DNA, 15 bp, Homo sapiens
gagaaacacaaccac

SEQ ID NO: 962845 - DNA, 15 bp, Homo sapiens
ggagaaacacaacca

SEQ ID NO: 962846 - DNA, 15 bp, Homo sapiens
tggagaaacacaacc

SEQ ID NO: 962847 - DNA, 15 bp, Homo sapiens
gtggagaaacacaac

SEQ ID NO: 962848 - DNA, 15 bp, Homo sapiens
tgtggagaaacacaa

SEQ ID NO: 962849 - DNA, 15 bp, Homo sapiens
ttgtggagaaacaca

SEQ ID NO: 962850 - DNA, 15 bp, Homo sapiens
attgtggagaaacac

SEQ ID NO: 962851 - DNA, 15 bp, Homo sapiens
aattgtggagaaaca

SEQ ID NO: 962852 - DNA, 15 bp, Homo sapiens
caattgtggagaaac

SEQ ID NO: 962853 - DNA, 15 bp, Homo sapiens
gcaattgtggagaaa

SEQ ID NO: 962854 - DNA, 15 bp, Homo sapiens
tgcaattgtggagaa

SEQ ID NO: 962855 - DNA, 15 bp, Homo sapiens
ctgcaattgtggaga

SEQ ID NO: 962856 - DNA, 15 bp, Homo sapiens
gctgcaattgtggag

SEQ ID NO: 962857 - DNA, 15 bp, Homo sapiens
agctgcaattgtgga

SEQ ID NO: 962858 - DNA, 15 bp, Homo sapiens
gagctgcaattgtgg

SEQ ID NO: 962859 - DNA, 15 bp, Homo sapiens
agagctgcaattgtg

SEQ ID NO: 962860 - DNA, 15 bp, Homo sapiens
aagagctgcaattgt

SEQ ID NO: 962861 - DNA, 15 bp, Homo sapiens
caagagctgcaattg

SEQ ID NO: 962862 - DNA, 15 bp, Homo sapiens
ccaagagctgcaatt

SEQ ID NO: 962863 - DNA, 15 bp, Homo sapiens
gccaagagctgcaat

SEQ ID NO: 962864 - DNA, 15 bp, Homo sapiens
tgccaagagctgcaa

SEQ ID NO: 962865 - DNA, 15 bp, Homo sapiens
ttgccaagagctgca

SEQ ID NO: 962866 - DNA, 15 bp, Homo sapiens
cttgccaagagctgc

SEQ ID NO: 962867 - DNA, 15 bp, Homo sapiens
gcttgccaagagctg

SEQ ID NO: 962868 - DNA, 15 bp, Homo sapiens
tgcttgccaagagct

SEQ ID NO: 962869 - DNA, 15 bp, Homo sapiens
ctgcttgccaagagc

SEQ ID NO: 962870 - DNA, 15 bp, Homo sapiens
actgcttgccaagag

SEQ ID NO: 962871 - DNA, 15 bp, Homo sapiens
gactgcttgccaaga

SEQ ID NO: 962872 - DNA, 15 bp, Homo sapiens
ggactgcttgccaag

SEQ ID NO: 962873 - DNA, 15 bp, Homo sapiens
gggactgcttgccaa

SEQ ID NO: 962874 - DNA, 15 bp, Homo sapiens
agggactgcttgcca

SEQ ID NO: 962875 - DNA, 15 bp, Homo sapiens
aagggactgcttgcc

SEQ ID NO: 962876 - DNA, 15 bp, Homo sapiens
gaagggactgcttgc

SEQ ID NO: 962877 - DNA, 15 bp, Homo sapiens
agaagggactgcttg

SEQ ID NO: 962878 - DNA, 15 bp, Homo sapiens
gagaagggactgctt

SEQ ID NO: 962879 - DNA, 15 bp, Homo sapiens
ggagaagggactgct

SEQ ID NO: 962880 - DNA, 15 bp, Homo sapiens
tggagaagggactgc

SEQ ID NO: 962881 - DNA, 15 bp, Homo sapiens
atggagaagggactg

SEQ ID NO: 962882 - DNA, 15 bp, Homo sapiens
catggagaagggact

SEQ ID NO: 962883 - DNA, 15 bp, Homo sapiens
ccatggagaagggac

SEQ ID NO: 962884 - DNA, 15 bp, Homo sapiens
gccatggagaaggga

SEQ ID NO: 962885 - DNA, 15 bp, Homo sapiens
agccatggagaaggg

SEQ ID NO: 962886 - DNA, 15 bp, Homo sapiens
gagccatggagaagg

SEQ ID NO: 962887 - DNA, 15 bp, Homo sapiens
ggagccatggagaag

SEQ ID NO: 962888 - DNA, 15 bp, Homo sapiens
tggagccatggagaa

SEQ ID NO: 962889 - DNA, 15 bp, Homo sapiens
ctggagccatggaga

SEQ ID NO: 962890 - DNA, 15 bp, Homo sapiens
gctggagccatggag

SEQ ID NO: 962891 - DNA, 15 bp, Homo sapiens
agctggagccatgga

SEQ ID NO: 962892 - DNA, 15 bp, Homo sapiens
gagctggagccatgg

SEQ ID NO: 962893 - DNA, 15 bp, Homo sapiens
ggagctggagccatg

SEQ ID NO: 962894 - DNA, 15 bp, Homo sapiens
tggagctggagccat

SEQ ID NO: 962895 - DNA, 15 bp, Homo sapiens
atggagctggagcca

SEQ ID NO: 962896 - DNA, 15 bp, Homo sapiens
catggagctggagcc

SEQ ID NO: 962897 - DNA, 15 bp, Homo sapiens
ccatggagctggagc

SEQ ID NO: 962898 - DNA, 15 bp, Homo sapiens
cccatggagctggag

SEQ ID NO: 962899 - DNA, 15 bp, Homo sapiens
gcccatggagctgga

SEQ ID NO: 962900 - DNA, 15 bp, Homo sapiens
agcccatggagctgg

SEQ ID NO: 962901 - DNA, 15 bp, Homo sapiens
gagcccatggagctg

SEQ ID NO: 962902 - DNA, 15 bp, Homo sapiens
agagcccatggagct

SEQ ID NO: 962903 - DNA, 15 bp, Homo sapiens
cagagcccatggagc

SEQ ID NO: 962904 - DNA, 15 bp, Homo sapiens
ccagagcccatggag

SEQ ID NO: 962905 - DNA, 15 bp, Homo sapiens
tccagagcccatgga

SEQ ID NO: 962906 - DNA, 15 bp, Homo sapiens
ttccagagcccatgg

SEQ ID NO: 962907 - DNA, 15 bp, Homo sapiens
tttccagagcccatg

SEQ ID NO: 962908 - DNA, 15 bp, Homo sapiens
gtttccagagcccat

SEQ ID NO: 962909 - DNA, 15 bp, Homo sapiens
tgtttccagagccca

SEQ ID NO: 962910 - DNA, 15 bp, Homo sapiens
gtgtttccagagccc

SEQ ID NO: 962911 - DNA, 15 bp, Homo sapiens
agtgtttccagagcc

SEQ ID NO: 962912 - DNA, 15 bp, Homo sapiens
aagtgtttccagagc

SEQ ID NO: 962913 - DNA, 15 bp, Homo sapiens
aaagtgtttccagag

SEQ ID NO: 962914 - DNA, 15 bp, Homo sapiens
aaaagtgtttccaga

SEQ ID NO: 962915 - DNA, 15 bp, Homo sapiens
gaaaagtgtttccag

SEQ ID NO: 962916 - DNA, 15 bp, Homo sapiens
agaaaagtgtttcca

SEQ ID NO: 962917 - DNA, 15 bp, Homo sapiens
gagaaaagtgtttcc

SEQ ID NO: 962918 - DNA, 15 bp, Homo sapiens
ggagaaaagtgtttc

SEQ ID NO: 962919 - DNA, 15 bp, Homo sapiens
aggagaaaagtgttt

SEQ ID NO: 962920 - DNA, 15 bp, Homo sapiens
aaggagaaaagtgtt

SEQ ID NO: 962921 - DNA, 15 bp, Homo sapiens
aaaggagaaaagtgt

SEQ ID NO: 962922 - DNA, 15 bp, Homo sapiens
caaaggagaaaagtg

SEQ ID NO: 962923 - DNA, 15 bp, Homo sapiens
gcaaaggagaaaagt

SEQ ID NO: 962924 - DNA, 15 bp, Homo sapiens
agcaaaggagaaaag

SEQ ID NO: 962925 - DNA, 15 bp, Homo sapiens
tagcaaaggagaaaa

SEQ ID NO: 962926 - DNA, 15 bp, Homo sapiens
atagcaaaggagaaa

SEQ ID NO: 962927 - DNA, 15 bp, Homo sapiens
catagcaaaggagaa

SEQ ID NO: 962928 - DNA, 15 bp, Homo sapiens
acatagcaaaggaga

SEQ ID NO: 962929 - DNA, 15 bp, Homo sapiens
tacatagcaaaggag

SEQ ID NO: 962930 - DNA, 15 bp, Homo sapiens
ctacatagcaaagga

SEQ ID NO: 962931 - DNA, 15 bp, Homo sapiens
gctacatagcaaagg

SEQ ID NO: 962932 - DNA, 15 bp, Homo sapiens
ggctacatagcaaag

SEQ ID NO: 962933 - DNA, 15 bp, Homo sapiens
aggctacatagcaaa

SEQ ID NO: 962934 - DNA, 15 bp, Homo sapiens
taggctacatagcaa

SEQ ID NO: 962935 - DNA, 15 bp, Homo sapiens
ctaggctacatagca

SEQ ID NO: 962936 - DNA, 15 bp, Homo sapiens
tctaggctacatagc

SEQ ID NO: 962937 - DNA, 15 bp, Homo sapiens
ctctaggctacatag

SEQ ID NO: 962938 - DNA, 15 bp, Homo sapiens
tctctaggctacata

SEQ ID NO: 962939 - DNA, 15 bp, Homo sapiens
ctctctaggctacat

SEQ ID NO: 962940 - DNA, 15 bp, Homo sapiens
tctctctaggctaca

SEQ ID NO: 962941 - DNA, 15 bp, Homo sapiens
ctctctctaggctac

SEQ ID NO: 962942 - DNA, 15 bp, Homo sapiens
gctctctctaggcta

SEQ ID NO: 962943 - DNA, 15 bp, Homo sapiens
cgctctctctaggct

SEQ ID NO: 962944 - DNA, 15 bp, Homo sapiens
gcgctctctctaggc

SEQ ID NO: 962945 - DNA, 15 bp, Homo sapiens
tgcgctctctctagg

SEQ ID NO: 962946 - DNA, 15 bp, Homo sapiens
ctgcgctctctctag

SEQ ID NO: 962947 - DNA, 15 bp, Homo sapiens
actgcgctctctcta

SEQ ID NO: 962948 - DNA, 15 bp, Homo sapiens
gactgcgctctctct

SEQ ID NO: 962949 - DNA, 15 bp, Homo sapiens
agactgcgctctctc

SEQ ID NO: 962950 - DNA, 15 bp, Homo sapiens
aagactgcgctctct

SEQ ID NO: 962951 - DNA, 15 bp, Homo sapiens
gaagactgcgctctc

SEQ ID NO: 962952 - DNA, 15 bp, Homo sapiens
ggaagactgcgctct

SEQ ID NO: 962953 - DNA, 15 bp, Homo sapiens
aggaagactgcgctc

SEQ ID NO: 962954 - DNA, 15 bp, Homo sapiens
caggaagactgcgct

SEQ ID NO: 962955 - DNA, 15 bp, Homo sapiens
gcaggaagactgcgc

SEQ ID NO: 962956 - DNA, 15 bp, Homo sapiens
agcaggaagactgcg

SEQ ID NO: 962957 - DNA, 15 bp, Homo sapiens
cagcaggaagactgc

SEQ ID NO: 962958 - DNA, 15 bp, Homo sapiens
acagcaggaagactg

SEQ ID NO: 962959 - DNA, 15 bp, Homo sapiens
aacagcaggaagact

SEQ ID NO: 962960 - DNA, 15 bp, Homo sapiens
caacagcaggaagac

SEQ ID NO: 962961 - DNA, 15 bp, Homo sapiens
gcaacagcaggaaga

SEQ ID NO: 962962 - DNA, 15 bp, Homo sapiens
agcaacagcaggaag

SEQ ID NO: 962963 - DNA, 15 bp, Homo sapiens
tagcaacagcaggaa

SEQ ID NO: 962964 - DNA, 15 bp, Homo sapiens
ctagcaacagcagga

SEQ ID NO: 962965 - DNA, 15 bp, Homo sapiens
tctagcaacagcagg

SEQ ID NO: 962966 - DNA, 15 bp, Homo sapiens
gtctagcaacagcag

SEQ ID NO: 962967 - DNA, 15 bp, Homo sapiens
agtctagcaacagca

SEQ ID NO: 962968 - DNA, 15 bp, Homo sapiens
gagtctagcaacagc

SEQ ID NO: 962969 - DNA, 15 bp, Homo sapiens
agagtctagcaacag

SEQ ID NO: 962970 - DNA, 15 bp, Homo sapiens
cagagtctagcaaca

SEQ ID NO: 962971 - DNA, 15 bp, Homo sapiens
ccagagtctagcaac

SEQ ID NO: 962972 - DNA, 15 bp, Homo sapiens
tccagagtctagcaa

SEQ ID NO: 962973 - DNA, 15 bp, Homo sapiens
atccagagtctagca

SEQ ID NO: 962974 - DNA, 15 bp, Homo sapiens
catccagagtctagc

SEQ ID NO: 962975 - DNA, 15 bp, Homo sapiens
tcatccagagtctag

SEQ ID NO: 962976 - DNA, 15 bp, Homo sapiens
gtcatccagagtcta

SEQ ID NO: 962977 - DNA, 15 bp, Homo sapiens
agtcatccagagtct

SEQ ID NO: 962978 - DNA, 15 bp, Homo sapiens
gagtcatccagagtc

SEQ ID NO: 962979 - DNA, 15 bp, Homo sapiens
tgagtcatccagagt

SEQ ID NO: 962980 - DNA, 15 bp, Homo sapiens
ttgagtcatccagag

SEQ ID NO: 962981 - DNA, 15 bp, Homo sapiens
gttgagtcatccaga

SEQ ID NO: 962982 - DNA, 15 bp, Homo sapiens
agttgagtcatccag

SEQ ID NO: 962983 - DNA, 15 bp, Homo sapiens
cagttgagtcatcca

SEQ ID NO: 962984 - DNA, 15 bp, Homo sapiens
ccagttgagtcatcc

SEQ ID NO: 962985 - DNA, 15 bp, Homo sapiens
tccagttgagtcatc

SEQ ID NO: 962986 - DNA, 15 bp, Homo sapiens
atccagttgagtcat

SEQ ID NO: 962987 - DNA, 15 bp, Homo sapiens
catccagttgagtca

SEQ ID NO: 962988 - DNA, 15 bp, Homo sapiens
ccatccagttgagtc

SEQ ID NO: 962989 - DNA, 15 bp, Homo sapiens
accatccagttgagt

SEQ ID NO: 962990 - DNA, 15 bp, Homo sapiens
aaccatccagttgag

SEQ ID NO: 962991 - DNA, 15 bp, Homo sapiens
gaaccatccagttga

SEQ ID NO: 962992 - DNA, 15 bp, Homo sapiens
agaaccatccagttg

SEQ ID NO: 962993 - DNA, 15 bp, Homo sapiens
gagaaccatccagtt

SEQ ID NO: 962994 - DNA, 15 bp, Homo sapiens
agagaaccatccagt

SEQ ID NO: 962995 - DNA, 15 bp, Homo sapiens
aagagaaccatccag

SEQ ID NO: 962996 - DNA, 15 bp, Homo sapiens
taagagaaccatcca

SEQ ID NO: 962997 - DNA, 15 bp, Homo sapiens
ctaagagaaccatcc

SEQ ID NO: 962998 - DNA, 15 bp, Homo sapiens
actaagagaaccatc

SEQ ID NO: 962999 - DNA, 15 bp, Homo sapiens
gactaagagaaccat

SEQ ID NO: 963000 - DNA, 15 bp, Homo sapiens
tgactaagagaacca

SEQ ID NO: 963001 - DNA, 15 bp, Homo sapiens
atgactaagagaacc

SEQ ID NO: 963002 - DNA, 15 bp, Homo sapiens
tatgactaagagaac

SEQ ID NO: 963003 - DNA, 15 bp, Homo sapiens
gtatgactaagagaa

SEQ ID NO: 963004 - DNA, 15 bp, Homo sapiens
agtatgactaagaga

SEQ ID NO: 963005 - DNA, 15 bp, Homo sapiens
gagtatgactaagag

SEQ ID NO: 963006 - DNA, 15 bp, Homo sapiens
ggagtatgactaaga

SEQ ID NO: 963007 - DNA, 15 bp, Homo sapiens
aggagtatgactaag

SEQ ID NO: 963008 - DNA, 15 bp, Homo sapiens
aaggagtatgactaa

SEQ ID NO: 963009 - DNA, 15 bp, Homo sapiens
aaaggagtatgacta

SEQ ID NO: 963010 - DNA, 15 bp, Homo sapiens
taaaggagtatgact

SEQ ID NO: 963011 - DNA, 15 bp, Homo sapiens
ttaaaggagtatgac

SEQ ID NO: 963012 - DNA, 15 bp, Homo sapiens
cttaaaggagtatga

SEQ ID NO: 963013 - DNA, 15 bp, Homo sapiens
acttaaaggagtatg

SEQ ID NO: 963014 - DNA, 15 bp, Homo sapiens
tacttaaaggagtat

SEQ ID NO: 963015 - DNA, 15 bp, Homo sapiens
ctacttaaaggagta

SEQ ID NO: 963016 - DNA, 15 bp, Homo sapiens
actacttaaaggagt

SEQ ID NO: 963017 - DNA, 15 bp, Homo sapiens
cactacttaaaggag

SEQ ID NO: 963018 - DNA, 15 bp, Homo sapiens
acactacttaaagga

SEQ ID NO: 963019 - DNA, 15 bp, Homo sapiens
gacactacttaaagg

SEQ ID NO: 963020 - DNA, 15 bp, Homo sapiens
agacactacttaaag

SEQ ID NO: 963021 - DNA, 15 bp, Homo sapiens
aagacactacttaaa

SEQ ID NO: 963022 - DNA, 15 bp, Homo sapiens
gaagacactacttaa

SEQ ID NO: 963023 - DNA, 15 bp, Homo sapiens
tgaagacactactta

SEQ ID NO: 963024 - DNA, 15 bp, Homo sapiens
gtgaagacactactt

SEQ ID NO: 963025 - DNA, 15 bp, Homo sapiens
agtgaagacactact

SEQ ID NO: 963026 - DNA, 15 bp, Homo sapiens
tagtgaagacactac

SEQ ID NO: 963027 - DNA, 15 bp, Homo sapiens
ttagtgaagacacta

SEQ ID NO: 963028 - DNA, 15 bp, Homo sapiens
attagtgaagacact

SEQ ID NO: 963029 - DNA, 15 bp, Homo sapiens
tattagtgaagacac

SEQ ID NO: 963030 - DNA, 15 bp, Homo sapiens
atattagtgaagaca

SEQ ID NO: 963031 - DNA, 15 bp, Homo sapiens
gatattagtgaagac

SEQ ID NO: 963032 - DNA, 15 bp, Homo sapiens
agatattagtgaaga

SEQ ID NO: 963033 - DNA, 15 bp, Homo sapiens
gagatattagtgaag

SEQ ID NO: 963034 - DNA, 15 bp, Homo sapiens
agagatattagtgaa

SEQ ID NO: 963035 - DNA, 15 bp, Homo sapiens
aagagatattagtga

SEQ ID NO: 963036 - DNA, 15 bp, Homo sapiens
aaagagatattagtg

SEQ ID NO: 963037 - DNA, 15 bp, Homo sapiens
taaagagatattagt

SEQ ID NO: 963038 - DNA, 15 bp, Homo sapiens
ttaaagagatattag

SEQ ID NO: 963039 - DNA, 15 bp, Homo sapiens
attaaagagatatta

SEQ ID NO: 963040 - DNA, 15 bp, Homo sapiens
gattaaagagatatt

SEQ ID NO: 963041 - DNA, 15 bp, Homo sapiens
tgattaaagagatat

SEQ ID NO: 963042 - DNA, 15 bp, Homo sapiens
ttgattaaagagata

SEQ ID NO: 963043 - DNA, 15 bp, Homo sapiens
tttgattaaagagat

SEQ ID NO: 963044 - DNA, 15 bp, Homo sapiens
gtttgattaaagaga

SEQ ID NO: 963045 - DNA, 15 bp, Homo sapiens
ggtttgattaaagag

SEQ ID NO: 963046 - DNA, 15 bp, Homo sapiens
tggtttgattaaaga

SEQ ID NO: 963047 - DNA, 15 bp, Homo sapiens
ttggtttgattaaag

SEQ ID NO: 963048 - DNA, 15 bp, Homo sapiens
gttggtttgattaaa

SEQ ID NO: 963049 - DNA, 15 bp, Homo sapiens
agttggtttgattaa

SEQ ID NO: 963050 - DNA, 15 bp, Homo sapiens
cagttggtttgatta

SEQ ID NO: 963051 - DNA, 15 bp, Homo sapiens
tcagttggtttgatt

SEQ ID NO: 963052 - DNA, 15 bp, Homo sapiens
ctcagttggtttgat

SEQ ID NO: 963053 - DNA, 15 bp, Homo sapiens
actcagttggtttga

SEQ ID NO: 963054 - DNA, 15 bp, Homo sapiens
tactcagttggtttg

SEQ ID NO: 963055 - DNA, 15 bp, Homo sapiens
ttactcagttggttt

SEQ ID NO: 963056 - DNA, 15 bp, Homo sapiens
tttactcagttggtt

SEQ ID NO: 963057 - DNA, 15 bp, Homo sapiens
ttttactcagttggt

SEQ ID NO: 963058 - DNA, 15 bp, Homo sapiens
attttactcagttgg

SEQ ID NO: 963059 - DNA, 15 bp, Homo sapiens
aattttactcagttg

SEQ ID NO: 963060 - DNA, 15 bp, Homo sapiens
gaattttactcagtt

SEQ ID NO: 963061 - DNA, 15 bp, Homo sapiens
agaattttactcagt

SEQ ID NO: 963062 - DNA, 15 bp, Homo sapiens
cagaattttactcag

SEQ ID NO: 963063 - DNA, 15 bp, Homo sapiens
tcagaattttactca

SEQ ID NO: 963064 - DNA, 15 bp, Homo sapiens
atcagaattttactc

SEQ ID NO: 963065 - DNA, 15 bp, Homo sapiens
aatcagaattttact

SEQ ID NO: 963066 - DNA, 15 bp, Homo sapiens
gaatcagaattttac

SEQ ID NO: 963067 - DNA, 15 bp, Homo sapiens
ggaatcagaatttta

SEQ ID NO: 963068 - DNA, 15 bp, Homo sapiens
aggaatcagaatttt

SEQ ID NO: 963069 - DNA, 15 bp, Homo sapiens
caggaatcagaattt

SEQ ID NO: 963070 - DNA, 15 bp, Homo sapiens
tcaggaatcagaatt

SEQ ID NO: 963071 - DNA, 15 bp, Homo sapiens
atcaggaatcagaat

SEQ ID NO: 963072 - DNA, 15 bp, Homo sapiens
catcaggaatcagaa

SEQ ID NO: 963073 - DNA, 15 bp, Homo sapiens
ccatcaggaatcaga

SEQ ID NO: 963074 - DNA, 15 bp, Homo sapiens
tccatcaggaatcag

SEQ ID NO: 963075 - DNA, 15 bp, Homo sapiens
atccatcaggaatca

SEQ ID NO: 963076 - DNA, 15 bp, Homo sapiens
tatccatcaggaatc

SEQ ID NO: 963077 - DNA, 15 bp, Homo sapiens
gtatccatcaggaat

SEQ ID NO: 963078 - DNA, 15 bp, Homo sapiens
tgtatccatcaggaa

SEQ ID NO: 963079 - DNA, 15 bp, Homo sapiens
atgtatccatcagga

SEQ ID NO: 963080 - DNA, 15 bp, Homo sapiens
catgtatccatcagg

SEQ ID NO: 963081 - DNA, 15 bp, Homo sapiens
acatgtatccatcag

SEQ ID NO: 963082 - DNA, 15 bp, Homo sapiens
aacatgtatccatca

SEQ ID NO: 963083 - DNA, 15 bp, Homo sapiens
taacatgtatccatc

SEQ ID NO: 963084 - DNA, 15 bp, Homo sapiens
ttaacatgtatccat

SEQ ID NO: 963085 - DNA, 15 bp, Homo sapiens
tttaacatgtatcca

SEQ ID NO: 963086 - DNA, 15 bp, Homo sapiens
gtttaacatgtatcc

SEQ ID NO: 963087 - DNA, 15 bp, Homo sapiens
ggtttaacatgtatc

SEQ ID NO: 963088 - DNA, 15 bp, Homo sapiens
cggtttaacatgtat

SEQ ID NO: 963089 - DNA, 15 bp, Homo sapiens
tcggtttaacatgta

SEQ ID NO: 963090 - DNA, 15 bp, Homo sapiens
ttcggtttaacatgt

SEQ ID NO: 963091 - DNA, 15 bp, Homo sapiens
tttcggtttaacatg

SEQ ID NO: 963092 - DNA, 15 bp, Homo sapiens
ttttcggtttaacat

SEQ ID NO: 963093 - DNA, 15 bp, Homo sapiens
gttttcggtttaaca

SEQ ID NO: 963094 - DNA, 15 bp, Homo sapiens
tgttttcggtttaac

SEQ ID NO: 963095 - DNA, 15 bp, Homo sapiens
gtgttttcggtttaa

SEQ ID NO: 963096 - DNA, 15 bp, Homo sapiens
tgtgttttcggttta

SEQ ID NO: 963097 - DNA, 15 bp, Homo sapiens
gtgtgttttcggttt

SEQ ID NO: 963098 - DNA, 15 bp, Homo sapiens
tgtgtgttttcggtt

SEQ ID NO: 963099 - DNA, 15 bp, Homo sapiens
atgtgtgttttcggt

SEQ ID NO: 963100 - DNA, 15 bp, Homo sapiens
aatgtgtgttttcgg

SEQ ID NO: 963101 - DNA, 15 bp, Homo sapiens
taatgtgtgttttcg

SEQ ID NO: 963102 - DNA, 15 bp, Homo sapiens
ataatgtgtgttttc

SEQ ID NO: 963103 - DNA, 15 bp, Homo sapiens
tataatgtgtgtttt

SEQ ID NO: 963104 - DNA, 15 bp, Homo sapiens
ttataatgtgtgttt

SEQ ID NO: 963105 - DNA, 15 bp, Homo sapiens
tttataatgtgtgtt

SEQ ID NO: 963106 - DNA, 15 bp, Homo sapiens
atttataatgtgtgt

SEQ ID NO: 963107 - DNA, 15 bp, Homo sapiens
aatttataatgtgtg

SEQ ID NO: 963108 - DNA, 15 bp, Homo sapiens
aaatttataatgtgt

SEQ ID NO: 963109 - DNA, 15 bp, Homo sapiens
aaaatttataatgtg

SEQ ID NO: 963110 - DNA, 15 bp, Homo sapiens
gaaaatttataatgt

SEQ ID NO: 963111 - DNA, 15 bp, Homo sapiens
agaaaatttataatg

SEQ ID NO: 963112 - DNA, 15 bp, Homo sapiens
aagaaaatttataat

SEQ ID NO: 963113 - DNA, 15 bp, Homo sapiens
caagaaaatttataa

SEQ ID NO: 963114 - DNA, 15 bp, Homo sapiens
acaagaaaatttata

SEQ ID NO: 963115 - DNA, 15 bp, Homo sapiens
tacaagaaaatttat

SEQ ID NO: 963116 - DNA, 15 bp, Homo sapiens
atacaagaaaattta

SEQ ID NO: 963117 - DNA, 15 bp, Homo sapiens
catacaagaaaattt

SEQ ID NO: 963118 - DNA, 15 bp, Homo sapiens
acatacaagaaaatt

SEQ ID NO: 963119 - DNA, 15 bp, Homo sapiens
tacatacaagaaaat

SEQ ID NO: 963120 - DNA, 15 bp, Homo sapiens
atacatacaagaaaa

SEQ ID NO: 963121 - DNA, 15 bp, Homo sapiens
catacatacaagaaa

SEQ ID NO: 963122 - DNA, 15 bp, Homo sapiens
tcatacatacaagaa

SEQ ID NO: 963123 - DNA, 15 bp, Homo sapiens
atcatacatacaaga

SEQ ID NO: 963124 - DNA, 15 bp, Homo sapiens
catcatacatacaag

SEQ ID NO: 963125 - DNA, 15 bp, Homo sapiens
acatcatacatacaa

SEQ ID NO: 963126 - DNA, 15 bp, Homo sapiens
aacatcatacataca

SEQ ID NO: 963127 - DNA, 15 bp, Homo sapiens
aaacatcatacatac

SEQ ID NO: 963128 - DNA, 15 bp, Homo sapiens
aaaacatcatacata

SEQ ID NO: 963129 - DNA, 15 bp, Homo sapiens
aaaaacatcatacat

SEQ ID NO: 963130 - DNA, 15 bp, Homo sapiens
gaaaaacatcataca

SEQ ID NO: 963131 - DNA, 15 bp, Homo sapiens
tgaaaaacatcatac

SEQ ID NO: 963132 - DNA, 15 bp, Homo sapiens
atgaaaaacatcata

SEQ ID NO: 963133 - DNA, 15 bp, Homo sapiens
tatgaaaaacatcat

SEQ ID NO: 963134 - DNA, 15 bp, Homo sapiens
ttatgaaaaacatca

SEQ ID NO: 963135 - DNA, 15 bp, Homo sapiens
attatgaaaaacatc

SEQ ID NO: 963136 - DNA, 15 bp, Homo sapiens
aattatgaaaaacat

SEQ ID NO: 963137 - DNA, 15 bp, Homo sapiens
aaattatgaaaaaca

SEQ ID NO: 963138 - DNA, 15 bp, Homo sapiens
aaaattatgaaaaac

SEQ ID NO: 963139 - DNA, 15 bp, Homo sapiens
taaaattatgaaaaa

SEQ ID NO: 963140 - DNA, 15 bp, Homo sapiens
ttaaaattatgaaaa

SEQ ID NO: 963141 - DNA, 15 bp, Homo sapiens
tttaaaattatgaaa

SEQ ID NO: 963142 - DNA, 15 bp, Homo sapiens
ttttaaaattatgaa

SEQ ID NO: 963143 - DNA, 15 bp, Homo sapiens
gttttaaaattatga

SEQ ID NO: 963144 - DNA, 15 bp, Homo sapiens
tgttttaaaattatg

SEQ ID NO: 963145 - DNA, 15 bp, Homo sapiens
atgttttaaaattat

SEQ ID NO: 963146 - DNA, 15 bp, Homo sapiens
tatgttttaaaatta

SEQ ID NO: 963147 - DNA, 15 bp, Homo sapiens
ttatgttttaaaatt

SEQ ID NO: 963148 - DNA, 15 bp, Homo sapiens
cttatgttttaaaat

SEQ ID NO: 963149 - DNA, 15 bp, Homo sapiens
acttatgttttaaaa

SEQ ID NO: 963150 - DNA, 15 bp, Homo sapiens
cacttatgttttaaa

SEQ ID NO: 963151 - DNA, 15 bp, Homo sapiens
tcacttatgttttaa

SEQ ID NO: 963152 - DNA, 15 bp, Homo sapiens
ttcacttatgtttta

SEQ ID NO: 963153 - DNA, 15 bp, Homo sapiens
tttcacttatgtttt

SEQ ID NO: 963154 - DNA, 15 bp, Homo sapiens
ttttcacttatgttt

SEQ ID NO: 963155 - DNA, 15 bp, Homo sapiens
tttttcacttatgtt

SEQ ID NO: 963156 - DNA, 15 bp, Homo sapiens
ttttttcacttatgt

SEQ ID NO: 963157 - DNA, 15 bp, Homo sapiens
cttttttcacttatg

SEQ ID NO: 963158 - DNA, 15 bp, Homo sapiens
acttttttcacttat

SEQ ID NO: 963159 - DNA, 15 bp, Homo sapiens
cacttttttcactta

SEQ ID NO: 963160 - DNA, 15 bp, Homo sapiens
tcacttttttcactt

SEQ ID NO: 963161 - DNA, 15 bp, Homo sapiens
gtcacttttttcact

SEQ ID NO: 963162 - DNA, 15 bp, Homo sapiens
ggtcacttttttcac

SEQ ID NO: 963163 - DNA, 15 bp, Homo sapiens
tggtcacttttttca

SEQ ID NO: 963164 - DNA, 15 bp, Homo sapiens
atggtcacttttttc

SEQ ID NO: 963165 - DNA, 15 bp, Homo sapiens
tatggtcactttttt

SEQ ID NO: 963166 - DNA, 15 bp, Homo sapiens
ctatggtcacttttt

SEQ ID NO: 963167 - DNA, 15 bp, Homo sapiens
tctatggtcactttt

SEQ ID NO: 963168 - DNA, 15 bp, Homo sapiens
ttctatggtcacttt

SEQ ID NO: 963169 - DNA, 15 bp, Homo sapiens
tttctatggtcactt

SEQ ID NO: 963170 - DNA, 15 bp, Homo sapiens
ttttctatggtcact

SEQ ID NO: 963171 - DNA, 15 bp, Homo sapiens
tttttctatggtcac

SEQ ID NO: 963172 - DNA, 15 bp, Homo sapiens
atttttctatggtca

SEQ ID NO: 963173 - DNA, 15 bp, Homo sapiens
tatttttctatggtc

SEQ ID NO: 963174 - DNA, 15 bp, Homo sapiens
atatttttctatggt

SEQ ID NO: 963175 - DNA, 15 bp, Homo sapiens
catatttttctatgg

SEQ ID NO: 963176 - DNA, 15 bp, Homo sapiens
gcatatttttctatg

SEQ ID NO: 963177 - DNA, 15 bp, Homo sapiens
ggcatatttttctat

SEQ ID NO: 963178 - DNA, 15 bp, Homo sapiens
gggcatatttttcta

SEQ ID NO: 963179 - DNA, 15 bp, Homo sapiens
tgggcatatttttct

SEQ ID NO: 963180 - DNA, 15 bp, Homo sapiens
ctgggcatatttttc

SEQ ID NO: 963181 - DNA, 15 bp, Homo sapiens
cctgggcatattttt

SEQ ID NO: 963182 - DNA, 15 bp, Homo sapiens
tcctgggcatatttt

SEQ ID NO: 963183 - DNA, 15 bp, Homo sapiens
ttcctgggcatattt

SEQ ID NO: 963184 - DNA, 15 bp, Homo sapiens
tttcctgggcatatt

SEQ ID NO: 963185 - DNA, 15 bp, Homo sapiens
atttcctgggcatat

SEQ ID NO: 963186 - DNA, 15 bp, Homo sapiens
aatttcctgggcata

SEQ ID NO: 963187 - DNA, 15 bp, Homo sapiens
caatttcctgggcat

SEQ ID NO: 963188 - DNA, 15 bp, Homo sapiens
tcaatttcctgggca

SEQ ID NO: 963189 - DNA, 15 bp, Homo sapiens
ttcaatttcctgggc

SEQ ID NO: 963190 - DNA, 15 bp, Homo sapiens
tttcaatttcctggg

SEQ ID NO: 963191 - DNA, 15 bp, Homo sapiens
ttttcaatttcctgg

SEQ ID NO: 963192 - DNA, 15 bp, Homo sapiens
tttttcaatttcctg

SEQ ID NO: 963193 - DNA, 15 bp, Homo sapiens
ttttttcaatttcct

SEQ ID NO: 963194 - DNA, 15 bp, Homo sapiens
tttttttcaatttcc

SEQ ID NO: 963195 - DNA, 15 bp, Homo sapiens
ttttttttcaatttc

SEQ ID NO: 963196 - DNA, 15 bp, Homo sapiens
tttttttttcaattt

SEQ ID NO: 963197 - DNA, 15 bp, Homo sapiens
ctttttttttcaatt

SEQ ID NO: 963198 - DNA, 15 bp, Homo sapiens
actttttttttcaat

SEQ ID NO: 963199 - DNA, 15 bp, Homo sapiens
gactttttttttcaa

SEQ ID NO: 963200 - DNA, 15 bp, Homo sapiens
agactttttttttca

SEQ ID NO: 963201 - DNA, 15 bp, Homo sapiens
aagactttttttttc

SEQ ID NO: 963202 - DNA, 15 bp, Homo sapiens
caagacttttttttt

SEQ ID NO: 963203 - DNA, 15 bp, Homo sapiens
ccaagactttttttt

SEQ ID NO: 963204 - DNA, 15 bp, Homo sapiens
accaagacttttttt

SEQ ID NO: 963205 - DNA, 15 bp, Homo sapiens
taccaagactttttt

SEQ ID NO: 963206 - DNA, 15 bp, Homo sapiens
ataccaagacttttt

SEQ ID NO: 963207 - DNA, 15 bp, Homo sapiens
tataccaagactttt

SEQ ID NO: 963208 - DNA, 15 bp, Homo sapiens
ctataccaagacttt

SEQ ID NO: 963209 - DNA, 15 bp, Homo sapiens
tctataccaagactt

SEQ ID NO: 963210 - DNA, 15 bp, Homo sapiens
atctataccaagact

SEQ ID NO: 963211 - DNA, 15 bp, Homo sapiens
tatctataccaagac

SEQ ID NO: 963212 - DNA, 15 bp, Homo sapiens
atatctataccaaga

SEQ ID NO: 963213 - DNA, 15 bp, Homo sapiens
aatatctataccaag

SEQ ID NO: 963214 - DNA, 15 bp, Homo sapiens
caatatctataccaa

SEQ ID NO: 963215 - DNA, 15 bp, Homo sapiens
ccaatatctatacca

SEQ ID NO: 963216 - DNA, 15 bp, Homo sapiens
tccaatatctatacc

SEQ ID NO: 963217 - DNA, 15 bp, Homo sapiens
gtccaatatctatac

SEQ ID NO: 963218 - DNA, 15 bp, Homo sapiens
tgtccaatatctata

SEQ ID NO: 963219 - DNA, 15 bp, Homo sapiens
gtgtccaatatctat

SEQ ID NO: 963220 - DNA, 15 bp, Homo sapiens
tgtgtccaatatcta

SEQ ID NO: 963221 - DNA, 15 bp, Homo sapiens
atgtgtccaatatct

SEQ ID NO: 963222 - DNA, 15 bp, Homo sapiens
aatgtgtccaatatc

SEQ ID NO: 963223 - DNA, 15 bp, Homo sapiens
aaatgtgtccaatat

SEQ ID NO: 963224 - DNA, 15 bp, Homo sapiens
aaaatgtgtccaata

SEQ ID NO: 963225 - DNA, 15 bp, Homo sapiens
taaaatgtgtccaat

SEQ ID NO: 963226 - DNA, 15 bp, Homo sapiens
ataaaatgtgtccaa

SEQ ID NO: 963227 - DNA, 15 bp, Homo sapiens
tataaaatgtgtcca

SEQ ID NO: 963228 - DNA, 15 bp, Homo sapiens
ttataaaatgtgtcc

SEQ ID NO: 963229 - DNA, 15 bp, Homo sapiens
tttataaaatgtgtc

SEQ ID NO: 963230 - DNA, 15 bp, Homo sapiens
ttttataaaatgtgt

SEQ ID NO: 963231 - DNA, 15 bp, Homo sapiens
attttataaaatgtg

SEQ ID NO: 963232 - DNA, 15 bp, Homo sapiens
cattttataaaatgt

SEQ ID NO: 963233 - DNA, 15 bp, Homo sapiens
acattttataaaatg

SEQ ID NO: 963234 - DNA, 15 bp, Homo sapiens
cacattttataaaat

SEQ ID NO: 963235 - DNA, 15 bp, Homo sapiens
ccacattttataaaa

SEQ ID NO: 963236 - DNA, 15 bp, Homo sapiens
tccacattttataaa

SEQ ID NO: 963237 - DNA, 15 bp, Homo sapiens
ctccacattttataa

SEQ ID NO: 963238 - DNA, 15 bp, Homo sapiens
actccacattttata

SEQ ID NO: 963239 - DNA, 15 bp, Homo sapiens
tactccacattttat

SEQ ID NO: 963240 - DNA, 15 bp, Homo sapiens
ttactccacatttta

SEQ ID NO: 963241 - DNA, 15 bp, Homo sapiens
cttactccacatttt

SEQ ID NO: 963242 - DNA, 15 bp, Homo sapiens
tcttactccacattt

SEQ ID NO: 963243 - DNA, 15 bp, Homo sapiens
ctcttactccacatt

SEQ ID NO: 963244 - DNA, 15 bp, Homo sapiens
cctcttactccacat

SEQ ID NO: 963245 - DNA, 15 bp, Homo sapiens
ccctcttactccaca

SEQ ID NO: 963246 - DNA, 15 bp, Homo sapiens
accctcttactccac

SEQ ID NO: 963247 - DNA, 15 bp, Homo sapiens
aaccctcttactcca

SEQ ID NO: 963248 - DNA, 15 bp, Homo sapiens
taaccctcttactcc

SEQ ID NO: 963249 - DNA, 15 bp, Homo sapiens
ttaaccctcttactc

SEQ ID NO: 963250 - DNA, 15 bp, Homo sapiens
tttaaccctcttact

SEQ ID NO: 963251 - DNA, 15 bp, Homo sapiens
ctttaaccctcttac

SEQ ID NO: 963252 - DNA, 15 bp, Homo sapiens
cctttaaccctctta

SEQ ID NO: 963253 - DNA, 15 bp, Homo sapiens
tcctttaaccctctt

SEQ ID NO: 963254 - DNA, 15 bp, Homo sapiens
ttcctttaaccctct

SEQ ID NO: 963255 - DNA, 15 bp, Homo sapiens
tttcctttaaccctc

SEQ ID NO: 963256 - DNA, 15 bp, Homo sapiens
atttcctttaaccct

SEQ ID NO: 963257 - DNA, 15 bp, Homo sapiens
aatttcctttaaccc

SEQ ID NO: 963258 - DNA, 15 bp, Homo sapiens
aaatttcctttaacc

SEQ ID NO: 963259 - DNA, 15 bp, Homo sapiens
taaatttcctttaac

SEQ ID NO: 963260 - DNA, 15 bp, Homo sapiens
ataaatttcctttaa

SEQ ID NO: 963261 - DNA, 15 bp, Homo sapiens
aataaatttccttta

SEQ ID NO: 963262 - DNA, 15 bp, Homo sapiens
aaataaatttccttt

SEQ ID NO: 963263 - DNA, 15 bp, Homo sapiens
gaaataaatttcctt

SEQ ID NO: 963264 - DNA, 15 bp, Homo sapiens
tgaaataaatttcct

SEQ ID NO: 963265 - DNA, 15 bp, Homo sapiens
ctgaaataaatttcc

SEQ ID NO: 963266 - DNA, 15 bp, Homo sapiens
tctgaaataaatttc

SEQ ID NO: 963267 - DNA, 15 bp, Homo sapiens
ttctgaaataaattt

SEQ ID NO: 963268 - DNA, 15 bp, Homo sapiens
attctgaaataaatt

SEQ ID NO: 963269 - DNA, 15 bp, Homo sapiens
gattctgaaataaat

SEQ ID NO: 963270 - DNA, 15 bp, Homo sapiens
tgattctgaaataaa

SEQ ID NO: 963271 - DNA, 15 bp, Homo sapiens
ttgattctgaaataa

SEQ ID NO: 963272 - DNA, 15 bp, Homo sapiens
tttgattctgaaata

SEQ ID NO: 963273 - DNA, 15 bp, Homo sapiens
atttgattctgaaat

SEQ ID NO: 963274 - DNA, 15 bp, Homo sapiens
catttgattctgaaa

SEQ ID NO: 963275 - DNA, 15 bp, Homo sapiens
ccatttgattctgaa

SEQ ID NO: 963276 - DNA, 15 bp, Homo sapiens
gccatttgattctga

SEQ ID NO: 963277 - DNA, 15 bp, Homo sapiens
tgccatttgattctg

SEQ ID NO: 963278 - DNA, 15 bp, Homo sapiens
atgccatttgattct

SEQ ID NO: 963279 - DNA, 15 bp, Homo sapiens
tatgccatttgattc

SEQ ID NO: 963280 - DNA, 15 bp, Homo sapiens
atatgccatttgatt

SEQ ID NO: 963281 - DNA, 15 bp, Homo sapiens
tatatgccatttgat

SEQ ID NO: 963282 - DNA, 15 bp, Homo sapiens
ttatatgccatttga

SEQ ID NO: 963283 - DNA, 15 bp, Homo sapiens
gttatatgccatttg

SEQ ID NO: 963284 - DNA, 15 bp, Homo sapiens
agttatatgccattt

SEQ ID NO: 963285 - DNA, 15 bp, Homo sapiens
aagttatatgccatt

SEQ ID NO: 963286 - DNA, 15 bp, Homo sapiens
aaagttatatgccat

SEQ ID NO: 963287 - DNA, 15 bp, Homo sapiens
taaagttatatgcca

SEQ ID NO: 963288 - DNA, 15 bp, Homo sapiens
ttaaagttatatgcc

SEQ ID NO: 963289 - DNA, 15 bp, Homo sapiens
gttaaagttatatgc

SEQ ID NO: 963290 - DNA, 15 bp, Homo sapiens
agttaaagttatatg

SEQ ID NO: 963291 - DNA, 15 bp, Homo sapiens
cagttaaagttatat

SEQ ID NO: 963292 - DNA, 15 bp, Homo sapiens
ccagttaaagttata

SEQ ID NO: 963293 - DNA, 15 bp, Homo sapiens
accagttaaagttat

SEQ ID NO: 963294 - DNA, 15 bp, Homo sapiens
taccagttaaagtta

SEQ ID NO: 963295 - DNA, 15 bp, Homo sapiens
ataccagttaaagtt

SEQ ID NO: 963296 - DNA, 15 bp, Homo sapiens
cataccagttaaagt

SEQ ID NO: 963297 - DNA, 15 bp, Homo sapiens
acataccagttaaag

SEQ ID NO: 963298 - DNA, 15 bp, Homo sapiens
cacataccagttaaa

SEQ ID NO: 963299 - DNA, 15 bp, Homo sapiens
tcacataccagttaa

SEQ ID NO: 963300 - DNA, 15 bp, Homo sapiens
ttcacataccagtta

SEQ ID NO: 963301 - DNA, 15 bp, Homo sapiens
attcacataccagtt

SEQ ID NO: 963302 - DNA, 15 bp, Homo sapiens
aattcacataccagt

SEQ ID NO: 963303 - DNA, 15 bp, Homo sapiens
taattcacataccag

SEQ ID NO: 963304 - DNA, 15 bp, Homo sapiens
ataattcacatacca

SEQ ID NO: 963305 - DNA, 15 bp, Homo sapiens
aataattcacatacc

SEQ ID NO: 963306 - DNA, 15 bp, Homo sapiens
aaataattcacatac

SEQ ID NO: 963307 - DNA, 15 bp, Homo sapiens
aaaataattcacata

SEQ ID NO: 963308 - DNA, 15 bp, Homo sapiens
gaaaataattcacat

SEQ ID NO: 963309 - DNA, 15 bp, Homo sapiens
tgaaaataattcaca

SEQ ID NO: 963310 - DNA, 15 bp, Homo sapiens
ctgaaaataattcac

SEQ ID NO: 963311 - DNA, 15 bp, Homo sapiens
actgaaaataattca

SEQ ID NO: 963312 - DNA, 15 bp, Homo sapiens
aactgaaaataattc

SEQ ID NO: 963313 - DNA, 15 bp, Homo sapiens
caactgaaaataatt

SEQ ID NO: 963314 - DNA, 15 bp, Homo sapiens
acaactgaaaataat

SEQ ID NO: 963315 - DNA, 15 bp, Homo sapiens
tacaactgaaaataa

SEQ ID NO: 963316 - DNA, 15 bp, Homo sapiens
atacaactgaaaata

SEQ ID NO: 963317 - DNA, 15 bp, Homo sapiens
catacaactgaaaat

SEQ ID NO: 963318 - DNA, 15 bp, Homo sapiens
tcatacaactgaaaa

SEQ ID NO: 963319 - DNA, 15 bp, Homo sapiens
ttcatacaactgaaa

SEQ ID NO: 963320 - DNA, 15 bp, Homo sapiens
attcatacaactgaa

SEQ ID NO: 963321 - DNA, 15 bp, Homo sapiens
aattcatacaactga

SEQ ID NO: 963322 - DNA, 15 bp, Homo sapiens
aaattcatacaactg

SEQ ID NO: 963323 - DNA, 15 bp, Homo sapiens
caaattcatacaact

SEQ ID NO: 963324 - DNA, 15 bp, Homo sapiens
acaaattcatacaac

SEQ ID NO: 963325 - DNA, 15 bp, Homo sapiens
cacaaattcatacaa

SEQ ID NO: 963326 - DNA, 15 bp, Homo sapiens
tcacaaattcataca

SEQ ID NO: 963327 - DNA, 15 bp, Homo sapiens
ttcacaaattcatac

SEQ ID NO: 963328 - DNA, 15 bp, Homo sapiens
attcacaaattcata

SEQ ID NO: 963329 - DNA, 15 bp, Homo sapiens
tattcacaaattcat

SEQ ID NO: 963330 - DNA, 15 bp, Homo sapiens
atattcacaaattca

SEQ ID NO: 963331 - DNA, 15 bp, Homo sapiens
tatattcacaaattc

SEQ ID NO: 963332 - DNA, 15 bp, Homo sapiens
atatattcacaaatt

SEQ ID NO: 963333 - DNA, 15 bp, Homo sapiens
tatatattcacaaat

SEQ ID NO: 963334 - DNA, 15 bp, Homo sapiens
atatatattcacaaa

SEQ ID NO: 963335 - DNA, 15 bp, Homo sapiens
catatatattcacaa

SEQ ID NO: 963336 - DNA, 15 bp, Homo sapiens
acatatatattcaca

SEQ ID NO: 963337 - DNA, 15 bp, Homo sapiens
cacatatatattcac

SEQ ID NO: 963338 - DNA, 15 bp, Homo sapiens
acacatatatattca

SEQ ID NO: 963339 - DNA, 15 bp, Homo sapiens
tacacatatatattc

SEQ ID NO: 963340 - DNA, 15 bp, Homo sapiens
gtacacatatatatt

SEQ ID NO: 963341 - DNA, 15 bp, Homo sapiens
tgtacacatatatat

SEQ ID NO: 963342 - DNA, 15 bp, Homo sapiens
atgtacacatatata

SEQ ID NO: 963343 - DNA, 15 bp, Homo sapiens
aatgtacacatatat

SEQ ID NO: 963344 - DNA, 15 bp, Homo sapiens
aaatgtacacatata

SEQ ID NO: 963345 - DNA, 15 bp, Homo sapiens
aaaatgtacacatat

SEQ ID NO: 963346 - DNA, 15 bp, Homo sapiens
aaaaatgtacacata

SEQ ID NO: 963347 - DNA, 15 bp, Homo sapiens
taaaaatgtacacat

SEQ ID NO: 963348 - DNA, 15 bp, Homo sapiens
ataaaaatgtacaca

SEQ ID NO: 963349 - DNA, 15 bp, Homo sapiens
cataaaaatgtacac

SEQ ID NO: 963350 - DNA, 15 bp, Homo sapiens
gcataaaaatgtaca

SEQ ID NO: 963351 - DNA, 15 bp, Homo sapiens
tgcataaaaatgtac

SEQ ID NO: 963352 - DNA, 15 bp, Homo sapiens
atgcataaaaatgta

SEQ ID NO: 963353 - DNA, 15 bp, Homo sapiens
tatgcataaaaatgt

SEQ ID NO: 963354 - DNA, 15 bp, Homo sapiens
atatgcataaaaatg

SEQ ID NO: 963355 - DNA, 15 bp, Homo sapiens
tatatgcataaaaat

SEQ ID NO: 963356 - DNA, 15 bp, Homo sapiens
atatatgcataaaaa

SEQ ID NO: 963357 - DNA, 15 bp, Homo sapiens
tatatatgcataaaa

SEQ ID NO: 963358 - DNA, 15 bp, Homo sapiens
atatatatgcataaa

SEQ ID NO: 963359 - DNA, 15 bp, Homo sapiens
tatatatatgcataa

SEQ ID NO: 963360 - DNA, 15 bp, Homo sapiens
ttatatatatgcata

SEQ ID NO: 963361 - DNA, 15 bp, Homo sapiens
tttatatatatgcat

SEQ ID NO: 963362 - DNA, 15 bp, Homo sapiens
atttatatatatgca

SEQ ID NO: 963363 - DNA, 15 bp, Homo sapiens
tatttatatatatgc

SEQ ID NO: 963364 - DNA, 15 bp, Homo sapiens
atatttatatatatg

SEQ ID NO: 963365 - DNA, 15 bp, Homo sapiens
catatttatatatat

SEQ ID NO: 963366 - DNA, 15 bp, Homo sapiens
acatatttatatata

SEQ ID NO: 963367 - DNA, 15 bp, Homo sapiens
cacatatttatatat

SEQ ID NO: 963368 - DNA, 15 bp, Homo sapiens
acacatatttatata

SEQ ID NO: 963369 - DNA, 15 bp, Homo sapiens
aacacatatttatat

SEQ ID NO: 963370 - DNA, 15 bp, Homo sapiens
aaacacatatttata

SEQ ID NO: 963371 - DNA, 15 bp, Homo sapiens
aaaacacatatttat

SEQ ID NO: 963372 - DNA, 15 bp, Homo sapiens
taaaacacatattta

SEQ ID NO: 963373 - DNA, 15 bp, Homo sapiens
ataaaacacatattt

SEQ ID NO: 963374 - DNA, 15 bp, Homo sapiens
tataaaacacatatt

SEQ ID NO: 963375 - DNA, 15 bp, Homo sapiens
atataaaacacatat

SEQ ID NO: 963376 - DNA, 15 bp, Homo sapiens
gatataaaacacata

SEQ ID NO: 963377 - DNA, 15 bp, Homo sapiens
tgatataaaacacat

SEQ ID NO: 963378 - DNA, 15 bp, Homo sapiens
atgatataaaacaca

SEQ ID NO: 963379 - DNA, 15 bp, Homo sapiens
gatgatataaaacac

SEQ ID NO: 963380 - DNA, 15 bp, Homo sapiens
agatgatataaaaca

SEQ ID NO: 963381 - DNA, 15 bp, Homo sapiens
aagatgatataaaac

SEQ ID NO: 963382 - DNA, 15 bp, Homo sapiens
caagatgatataaaa

SEQ ID NO: 963383 - DNA, 15 bp, Homo sapiens
gcaagatgatataaa

SEQ ID NO: 963384 - DNA, 15 bp, Homo sapiens
tgcaagatgatataa

SEQ ID NO: 963385 - DNA, 15 bp, Homo sapiens
atgcaagatgatata

SEQ ID NO: 963386 - DNA, 15 bp, Homo sapiens
aatgcaagatgatat

SEQ ID NO: 963387 - DNA, 15 bp, Homo sapiens
taatgcaagatgata

SEQ ID NO: 963388 - DNA, 15 bp, Homo sapiens
ataatgcaagatgat

SEQ ID NO: 963389 - DNA, 15 bp, Homo sapiens
tataatgcaagatga

SEQ ID NO: 963390 - DNA, 15 bp, Homo sapiens
ttataatgcaagatg

SEQ ID NO: 963391 - DNA, 15 bp, Homo sapiens
gttataatgcaagat

SEQ ID NO: 963392 - DNA, 15 bp, Homo sapiens
tgttataatgcaaga

SEQ ID NO: 963393 - DNA, 15 bp, Homo sapiens
atgttataatgcaag

SEQ ID NO: 963394 - DNA, 15 bp, Homo sapiens
tatgttataatgcaa

SEQ ID NO: 963395 - DNA, 15 bp, Homo sapiens
ttatgttataatgca

SEQ ID NO: 963396 - DNA, 15 bp, Homo sapiens
cttatgttataatgc

SEQ ID NO: 963397 - DNA, 15 bp, Homo sapiens
ccttatgttataatg

SEQ ID NO: 963398 - DNA, 15 bp, Homo sapiens
tccttatgttataat

SEQ ID NO: 963399 - DNA, 15 bp, Homo sapiens
atccttatgttataa

SEQ ID NO: 963400 - DNA, 15 bp, Homo sapiens
aatccttatgttata

SEQ ID NO: 963401 - DNA, 15 bp, Homo sapiens
aaatccttatgttat

SEQ ID NO: 963402 - DNA, 15 bp, Homo sapiens
aaaatccttatgtta

SEQ ID NO: 963403 - DNA, 15 bp, Homo sapiens
aaaaatccttatgtt

SEQ ID NO: 963404 - DNA, 15 bp, Homo sapiens
taaaaatccttatgt

SEQ ID NO: 963405 - DNA, 15 bp, Homo sapiens
ataaaaatccttatg

SEQ ID NO: 963406 - DNA, 15 bp, Homo sapiens
cataaaaatccttat

SEQ ID NO: 963407 - DNA, 15 bp, Homo sapiens
acataaaaatcctta

SEQ ID NO: 963408 - DNA, 15 bp, Homo sapiens
aacataaaaatcctt

SEQ ID NO: 963409 - DNA, 15 bp, Homo sapiens
caacataaaaatcct

SEQ ID NO: 963410 - DNA, 15 bp, Homo sapiens
gcaacataaaaatcc

SEQ ID NO: 963411 - DNA, 15 bp, Homo sapiens
agcaacataaaaatc

SEQ ID NO: 963412 - DNA, 15 bp, Homo sapiens
tagcaacataaaaat

SEQ ID NO: 963413 - DNA, 15 bp, Homo sapiens
gtagcaacataaaaa

SEQ ID NO: 963414 - DNA, 15 bp, Homo sapiens
tgtagcaacataaaa

SEQ ID NO: 963415 - DNA, 15 bp, Homo sapiens
atgtagcaacataaa

SEQ ID NO: 963416 - DNA, 15 bp, Homo sapiens
aatgtagcaacataa

SEQ ID NO: 963417 - DNA, 15 bp, Homo sapiens
caatgtagcaacata

SEQ ID NO: 963418 - DNA, 15 bp, Homo sapiens
gcaatgtagcaacat

SEQ ID NO: 963419 - DNA, 15 bp, Homo sapiens
tgcaatgtagcaaca

SEQ ID NO: 963420 - DNA, 15 bp, Homo sapiens
atgcaatgtagcaac

SEQ ID NO: 963421 - DNA, 15 bp, Homo sapiens
aatgcaatgtagcaa

SEQ ID NO: 963422 - DNA, 15 bp, Homo sapiens
aaatgcaatgtagca

SEQ ID NO: 963423 - DNA, 15 bp, Homo sapiens
taaatgcaatgtagc

SEQ ID NO: 963424 - DNA, 15 bp, Homo sapiens
ataaatgcaatgtag

SEQ ID NO: 963425 - DNA, 15 bp, Homo sapiens
tataaatgcaatgta

SEQ ID NO: 963426 - DNA, 15 bp, Homo sapiens
atataaatgcaatgt

SEQ ID NO: 963427 - DNA, 15 bp, Homo sapiens
aatataaatgcaatg

SEQ ID NO: 963428 - DNA, 15 bp, Homo sapiens
aaatataaatgcaat

SEQ ID NO: 963429 - DNA, 15 bp, Homo sapiens
taaatataaatgcaa

SEQ ID NO: 963430 - DNA, 15 bp, Homo sapiens
gtaaatataaatgca

SEQ ID NO: 963431 - DNA, 15 bp, Homo sapiens
ggtaaatataaatgc

SEQ ID NO: 963432 - DNA, 15 bp, Homo sapiens
tggtaaatataaatg

SEQ ID NO: 963433 - DNA, 15 bp, Homo sapiens
atggtaaatataaat

SEQ ID NO: 963434 - DNA, 15 bp, Homo sapiens
aatggtaaatataaa

SEQ ID NO: 963435 - DNA, 15 bp, Homo sapiens
aaatggtaaatataa

SEQ ID NO: 963436 - DNA, 15 bp, Homo sapiens
aaaatggtaaatata

SEQ ID NO: 963437 - DNA, 15 bp, Homo sapiens
aaaaatggtaaatat

SEQ ID NO: 963438 - DNA, 15 bp, Homo sapiens
taaaaatggtaaata

SEQ ID NO: 963439 - DNA, 15 bp, Homo sapiens
ttaaaaatggtaaat

SEQ ID NO: 963440 - DNA, 15 bp, Homo sapiens
gttaaaaatggtaaa

SEQ ID NO: 963441 - DNA, 15 bp, Homo sapiens
tgttaaaaatggtaa

SEQ ID NO: 963442 - DNA, 15 bp, Homo sapiens
ctgttaaaaatggta

SEQ ID NO: 963443 - DNA, 15 bp, Homo sapiens
gctgttaaaaatggt

SEQ ID NO: 963444 - DNA, 15 bp, Homo sapiens
agctgttaaaaatgg

SEQ ID NO: 963445 - DNA, 15 bp, Homo sapiens
tagctgttaaaaatg

SEQ ID NO: 963446 - DNA, 15 bp, Homo sapiens
ttagctgttaaaaat

SEQ ID NO: 963447 - DNA, 15 bp, Homo sapiens
tttagctgttaaaaa

SEQ ID NO: 963448 - DNA, 15 bp, Homo sapiens
ctttagctgttaaaa

SEQ ID NO: 963449 - DNA, 15 bp, Homo sapiens
cctttagctgttaaa

SEQ ID NO: 963450 - DNA, 15 bp, Homo sapiens
tcctttagctgttaa

SEQ ID NO: 963451 - DNA, 15 bp, Homo sapiens
atcctttagctgtta

SEQ ID NO: 963452 - DNA, 15 bp, Homo sapiens
aatcctttagctgtt

SEQ ID NO: 963453 - DNA, 15 bp, Homo sapiens
aaatcctttagctgt

SEQ ID NO: 963454 - DNA, 15 bp, Homo sapiens
aaaatcctttagctg

SEQ ID NO: 963455 - DNA, 15 bp, Homo sapiens
gaaaatcctttagct

SEQ ID NO: 963456 - DNA, 15 bp, Homo sapiens
tgaaaatcctttagc

SEQ ID NO: 963457 - DNA, 15 bp, Homo sapiens
ttgaaaatcctttag

SEQ ID NO: 963458 - DNA, 15 bp, Homo sapiens
attgaaaatccttta

SEQ ID NO: 963459 - DNA, 15 bp, Homo sapiens
tattgaaaatccttt

SEQ ID NO: 963460 - DNA, 15 bp, Homo sapiens
ttattgaaaatcctt

SEQ ID NO: 963461 - DNA, 15 bp, Homo sapiens
cttattgaaaatcct

SEQ ID NO: 963462 - DNA, 15 bp, Homo sapiens
acttattgaaaatcc

SEQ ID NO: 963463 - DNA, 15 bp, Homo sapiens
cacttattgaaaatc

SEQ ID NO: 963464 - DNA, 15 bp, Homo sapiens
acacttattgaaaat

SEQ ID NO: 963465 - DNA, 15 bp, Homo sapiens
cacacttattgaaaa

SEQ ID NO: 963466 - DNA, 15 bp, Homo sapiens
acacacttattgaaa

SEQ ID NO: 963467 - DNA, 15 bp, Homo sapiens
tacacacttattgaa

SEQ ID NO: 963468 - DNA, 15 bp, Homo sapiens
atacacacttattga

SEQ ID NO: 963469 - DNA, 15 bp, Homo sapiens
catacacacttattg

SEQ ID NO: 963470 - DNA, 15 bp, Homo sapiens
acatacacacttatt

SEQ ID NO: 963471 - DNA, 15 bp, Homo sapiens
tacatacacacttat

SEQ ID NO: 963472 - DNA, 15 bp, Homo sapiens
ttacatacacactta

SEQ ID NO: 963473 - DNA, 15 bp, Homo sapiens
gttacatacacactt

SEQ ID NO: 963474 - DNA, 15 bp, Homo sapiens
tgttacatacacact

SEQ ID NO: 963475 - DNA, 15 bp, Homo sapiens
ttgttacatacacac

SEQ ID NO: 963476 - DNA, 15 bp, Homo sapiens
gttgttacatacaca

SEQ ID NO: 963477 - DNA, 15 bp, Homo sapiens
agttgttacatacac

SEQ ID NO: 963478 - DNA, 15 bp, Homo sapiens
aagttgttacataca

SEQ ID NO: 963479 - DNA, 15 bp, Homo sapiens
gaagttgttacatac

SEQ ID NO: 963480 - DNA, 15 bp, Homo sapiens
ggaagttgttacata

SEQ ID NO: 963481 - DNA, 15 bp, Homo sapiens
tggaagttgttacat

SEQ ID NO: 963482 - DNA, 15 bp, Homo sapiens
atggaagttgttaca

SEQ ID NO: 963483 - DNA, 15 bp, Homo sapiens
aatggaagttgttac

SEQ ID NO: 963484 - DNA, 15 bp, Homo sapiens
caatggaagttgtta

SEQ ID NO: 963485 - DNA, 15 bp, Homo sapiens
gcaatggaagttgtt

SEQ ID NO: 963486 - DNA, 15 bp, Homo sapiens
agcaatggaagttgt

SEQ ID NO: 963487 - DNA, 15 bp, Homo sapiens
cagcaatggaagttg

SEQ ID NO: 963488 - DNA, 15 bp, Homo sapiens
ccagcaatggaagtt

SEQ ID NO: 963489 - DNA, 15 bp, Homo sapiens
tccagcaatggaagt

SEQ ID NO: 963490 - DNA, 15 bp, Homo sapiens
atccagcaatggaag

SEQ ID NO: 963491 - DNA, 15 bp, Homo sapiens
tatccagcaatggaa

SEQ ID NO: 963492 - DNA, 15 bp, Homo sapiens
atatccagcaatgga

SEQ ID NO: 963493 - DNA, 15 bp, Homo sapiens
aatatccagcaatgg

SEQ ID NO: 963494 - DNA, 15 bp, Homo sapiens
aaatatccagcaatg

SEQ ID NO: 963495 - DNA, 15 bp, Homo sapiens
gaaatatccagcaat

SEQ ID NO: 963496 - DNA, 15 bp, Homo sapiens
agaaatatccagcaa

SEQ ID NO: 963497 - DNA, 15 bp, Homo sapiens
gagaaatatccagca

SEQ ID NO: 963498 - DNA, 15 bp, Homo sapiens
tgagaaatatccagc

SEQ ID NO: 963499 - DNA, 15 bp, Homo sapiens
ctgagaaatatccag

SEQ ID NO: 963500 - DNA, 15 bp, Homo sapiens
actgagaaatatcca

SEQ ID NO: 963501 - DNA, 15 bp, Homo sapiens
tactgagaaatatcc

SEQ ID NO: 963502 - DNA, 15 bp, Homo sapiens
atactgagaaatatc

SEQ ID NO: 963503 - DNA, 15 bp, Homo sapiens
tatactgagaaatat

SEQ ID NO: 963504 - DNA, 15 bp, Homo sapiens
atatactgagaaata

SEQ ID NO: 963505 - DNA, 15 bp, Homo sapiens
tatatactgagaaat

SEQ ID NO: 963506 - DNA, 15 bp, Homo sapiens
atatatactgagaaa

SEQ ID NO: 963507 - DNA, 15 bp, Homo sapiens
tatatatactgagaa

SEQ ID NO: 963508 - DNA, 15 bp, Homo sapiens
atatatatactgaga

SEQ ID NO: 963509 - DNA, 15 bp, Homo sapiens
catatatatactgag

SEQ ID NO: 963510 - DNA, 15 bp, Homo sapiens
acatatatatactga

SEQ ID NO: 963511 - DNA, 15 bp, Homo sapiens
tacatatatatactg

SEQ ID NO: 963512 - DNA, 15 bp, Homo sapiens
atacatatatatact

SEQ ID NO: 963513 - DNA, 15 bp, Homo sapiens
tatacatatatatac

SEQ ID NO: 963514 - DNA, 15 bp, Homo sapiens
atatacatatatata

SEQ ID NO: 963515 - DNA, 15 bp, Homo sapiens
tatatacatatatat

SEQ ID NO: 963516 - DNA, 15 bp, Homo sapiens
atatatacatatata

SEQ ID NO: 963517 - DNA, 15 bp, Homo sapiens
tatatatacatatat

SEQ ID NO: 963518 - DNA, 15 bp, Homo sapiens
gtatatatacatata

SEQ ID NO: 963519 - DNA, 15 bp, Homo sapiens
tgtatatatacatat

SEQ ID NO: 963520 - DNA, 15 bp, Homo sapiens
atgtatatatacata

SEQ ID NO: 963521 - DNA, 15 bp, Homo sapiens
tatgtatatatacat

SEQ ID NO: 963522 - DNA, 15 bp, Homo sapiens
atatgtatatataca

SEQ ID NO: 963523 - DNA, 15 bp, Homo sapiens
catatgtatatatac

SEQ ID NO: 963524 - DNA, 15 bp, Homo sapiens
acatatgtatatata

SEQ ID NO: 963525 - DNA, 15 bp, Homo sapiens
cacatatgtatatat

SEQ ID NO: 963526 - DNA, 15 bp, Homo sapiens
acacatatgtatata

SEQ ID NO: 963527 - DNA, 15 bp, Homo sapiens
cacacatatgtatat

SEQ ID NO: 963528 - DNA, 15 bp, Homo sapiens
acacacatatgtata

SEQ ID NO: 963529 - DNA, 15 bp, Homo sapiens
tacacacatatgtat

SEQ ID NO: 963530 - DNA, 15 bp, Homo sapiens
atacacacatatgta

SEQ ID NO: 963531 - DNA, 15 bp, Homo sapiens
tatacacacatatgt

SEQ ID NO: 963532 - DNA, 15 bp, Homo sapiens
gtatacacacatatg

SEQ ID NO: 963533 - DNA, 15 bp, Homo sapiens
tgtatacacacatat

SEQ ID NO: 963534 - DNA, 15 bp, Homo sapiens
atgtatacacacata

SEQ ID NO: 963535 - DNA, 15 bp, Homo sapiens
tatgtatacacacat

SEQ ID NO: 963536 - DNA, 15 bp, Homo sapiens
atatgtatacacaca

SEQ ID NO: 963537 - DNA, 15 bp, Homo sapiens
tatatgtatacacac

SEQ ID NO: 963538 - DNA, 15 bp, Homo sapiens
atatatgtatacaca

SEQ ID NO: 963539 - DNA, 15 bp, Homo sapiens
tatatatgtatacac

SEQ ID NO: 963540 - DNA, 15 bp, Homo sapiens
atatatatgtataca

SEQ ID NO: 963541 - DNA, 15 bp, Homo sapiens
tatatatatgtatac

SEQ ID NO: 963542 - DNA, 15 bp, Homo sapiens
atatatatatgtata

SEQ ID NO: 963543 - DNA, 15 bp, Homo sapiens
tatatatatatgtat

SEQ ID NO: 963544 - DNA, 15 bp, Homo sapiens
gtatatatatatgta

SEQ ID NO: 963545 - DNA, 15 bp, Homo sapiens
tgtatatatatatgt

SEQ ID NO: 963546 - DNA, 15 bp, Homo sapiens
atgtatatatatatg

SEQ ID NO: 963547 - DNA, 15 bp, Homo sapiens
tatgtatatatatat

SEQ ID NO: 963548 - DNA, 15 bp, Homo sapiens
atatgtatatatata

SEQ ID NO: 963549 - DNA, 15 bp, Homo sapiens
catatgtatatatat

SEQ ID NO: 963550 - DNA, 15 bp, Homo sapiens
tacacatatgtatat

SEQ ID NO: 963551 - DNA, 15 bp, Homo sapiens
atacacatatgtata

SEQ ID NO: 963552 - DNA, 15 bp, Homo sapiens
tatacacatatgtat

SEQ ID NO: 963553 - DNA, 15 bp, Homo sapiens
atatacacatatgta

SEQ ID NO: 963554 - DNA, 15 bp, Homo sapiens
tatatacacatatgt

SEQ ID NO: 963555 - DNA, 15 bp, Homo sapiens
atatatacacatatg

SEQ ID NO: 963556 - DNA, 15 bp, Homo sapiens
tatatatacacatat

SEQ ID NO: 963557 - DNA, 15 bp, Homo sapiens
gtatatatacacata

SEQ ID NO: 963558 - DNA, 15 bp, Homo sapiens
tgtatatatacacat

SEQ ID NO: 963559 - DNA, 15 bp, Homo sapiens
atgtatatatacaca

SEQ ID NO: 963560 - DNA, 15 bp, Homo sapiens
tatgtatatatacac

SEQ ID NO: 963561 - DNA, 15 bp, Homo sapiens
tacatatgtatatat

SEQ ID NO: 963562 - DNA, 15 bp, Homo sapiens
atacatatgtatata

SEQ ID NO: 963563 - DNA, 15 bp, Homo sapiens
catacatatgtatat

SEQ ID NO: 963564 - DNA, 15 bp, Homo sapiens
acatacatatgtata

SEQ ID NO: 963565 - DNA, 15 bp, Homo sapiens
tacatacatatgtat

SEQ ID NO: 963566 - DNA, 15 bp, Homo sapiens
atacatacatatgta

SEQ ID NO: 963567 - DNA, 15 bp, Homo sapiens
tatacatacatatgt

SEQ ID NO: 963568 - DNA, 15 bp, Homo sapiens
atatacatacatatg

SEQ ID NO: 963569 - DNA, 15 bp, Homo sapiens
catatacatacatat

SEQ ID NO: 963570 - DNA, 15 bp, Homo sapiens
acatatacatacata

SEQ ID NO: 963571 - DNA, 15 bp, Homo sapiens
tacatatacatacat

SEQ ID NO: 963572 - DNA, 15 bp, Homo sapiens
atacatatacataca

SEQ ID NO: 963573 - DNA, 15 bp, Homo sapiens
tatacatatacatac

SEQ ID NO: 963574 - DNA, 15 bp, Homo sapiens
atatacatatacata

SEQ ID NO: 963575 - DNA, 15 bp, Homo sapiens
catatacatatacat

SEQ ID NO: 963576 - DNA, 15 bp, Homo sapiens
acatatacatataca

SEQ ID NO: 963577 - DNA, 15 bp, Homo sapiens
tacatatacatatac

SEQ ID NO: 963578 - DNA, 15 bp, Homo sapiens
gtacatatacatata

SEQ ID NO: 963579 - DNA, 15 bp, Homo sapiens
cgtacatatacatat

SEQ ID NO: 963580 - DNA, 15 bp, Homo sapiens
acgtacatatacata

SEQ ID NO: 963581 - DNA, 15 bp, Homo sapiens
tacgtacatatacat

SEQ ID NO: 963582 - DNA, 15 bp, Homo sapiens
atacgtacatataca

SEQ ID NO: 963583 - DNA, 15 bp, Homo sapiens
catacgtacatatac

SEQ ID NO: 963584 - DNA, 15 bp, Homo sapiens
acatacgtacatata

SEQ ID NO: 963585 - DNA, 15 bp, Homo sapiens
tacatacgtacatat

SEQ ID NO: 963586 - DNA, 15 bp, Homo sapiens
atacatacgtacata

SEQ ID NO: 963587 - DNA, 15 bp, Homo sapiens
catacatacgtacat

SEQ ID NO: 963588 - DNA, 15 bp, Homo sapiens
acatacatacgtaca

SEQ ID NO: 963589 - DNA, 15 bp, Homo sapiens
cacatacatacgtac

SEQ ID NO: 963590 - DNA, 15 bp, Homo sapiens
acacatacatacgta

SEQ ID NO: 963591 - DNA, 15 bp, Homo sapiens
tacacatacatacgt

SEQ ID NO: 963592 - DNA, 15 bp, Homo sapiens
atacacatacatacg

SEQ ID NO: 963593 - DNA, 15 bp, Homo sapiens
tatacacatacatac

SEQ ID NO: 963594 - DNA, 15 bp, Homo sapiens
atatacacatacata

SEQ ID NO: 963595 - DNA, 15 bp, Homo sapiens
tatatacacatacat

SEQ ID NO: 963596 - DNA, 15 bp, Homo sapiens
atatatacacataca

SEQ ID NO: 963597 - DNA, 15 bp, Homo sapiens
tatatatacacatac

SEQ ID NO: 963598 - DNA, 15 bp, Homo sapiens
gtatgtatatataca

SEQ ID NO: 963599 - DNA, 15 bp, Homo sapiens
tgtatgtatatatac

SEQ ID NO: 963600 - DNA, 15 bp, Homo sapiens
atgtatgtatatata

SEQ ID NO: 963601 - DNA, 15 bp, Homo sapiens
catgtatgtatatat

SEQ ID NO: 963602 - DNA, 15 bp, Homo sapiens
acatgtatgtatata

SEQ ID NO: 963603 - DNA, 15 bp, Homo sapiens
cacatgtatgtatat

SEQ ID NO: 963604 - DNA, 15 bp, Homo sapiens
acacatgtatgtata

SEQ ID NO: 963605 - DNA, 15 bp, Homo sapiens
cacacatgtatgtat

SEQ ID NO: 963606 - DNA, 15 bp, Homo sapiens
acacacatgtatgta

SEQ ID NO: 963607 - DNA, 15 bp, Homo sapiens
tacacacatgtatgt

SEQ ID NO: 963608 - DNA, 15 bp, Homo sapiens
atacacacatgtatg

SEQ ID NO: 963609 - DNA, 15 bp, Homo sapiens
tatacacacatgtat

SEQ ID NO: 963610 - DNA, 15 bp, Homo sapiens
gtatacacacatgta

SEQ ID NO: 963611 - DNA, 15 bp, Homo sapiens
cgtatacacacatgt

SEQ ID NO: 963612 - DNA, 15 bp, Homo sapiens
gcgtatacacacatg

SEQ ID NO: 963613 - DNA, 15 bp, Homo sapiens
tgcgtatacacacat

SEQ ID NO: 963614 - DNA, 15 bp, Homo sapiens
atgcgtatacacaca

SEQ ID NO: 963615 - DNA, 15 bp, Homo sapiens
tatgcgtatacacac

SEQ ID NO: 963616 - DNA, 15 bp, Homo sapiens
atatgcgtatacaca

SEQ ID NO: 963617 - DNA, 15 bp, Homo sapiens
tatatgcgtatacac

SEQ ID NO: 963618 - DNA, 15 bp, Homo sapiens
atatatgcgtataca

SEQ ID NO: 963619 - DNA, 15 bp, Homo sapiens
tatatatgcgtatac

SEQ ID NO: 963620 - DNA, 15 bp, Homo sapiens
gtatatatgcgtata

SEQ ID NO: 963621 - DNA, 15 bp, Homo sapiens
tgtatatatgcgtat

SEQ ID NO: 963622 - DNA, 15 bp, Homo sapiens
atgtatatatgcgta

SEQ ID NO: 963623 - DNA, 15 bp, Homo sapiens
tatgtatatatgcgt

SEQ ID NO: 963624 - DNA, 15 bp, Homo sapiens
atatgtatatatgcg

SEQ ID NO: 963625 - DNA, 15 bp, Homo sapiens
catatgtatatatgc

SEQ ID NO: 963626 - DNA, 15 bp, Homo sapiens
acatatgtatatatg

SEQ ID NO: 963627 - DNA, 15 bp, Homo sapiens
gtgtatatatacaca

SEQ ID NO: 963628 - DNA, 15 bp, Homo sapiens
cgtgtatatatacac

SEQ ID NO: 963629 - DNA, 15 bp, Homo sapiens
acgtgtatatataca

SEQ ID NO: 963630 - DNA, 15 bp, Homo sapiens
tacgtgtatatatac

SEQ ID NO: 963631 - DNA, 15 bp, Homo sapiens
atacgtgtatatata

SEQ ID NO: 963632 - DNA, 15 bp, Homo sapiens
tatacgtgtatatat

SEQ ID NO: 963633 - DNA, 15 bp, Homo sapiens
atatacgtgtatata

SEQ ID NO: 963634 - DNA, 15 bp, Homo sapiens
tatatacgtgtatat

SEQ ID NO: 963635 - DNA, 15 bp, Homo sapiens
gtatatacgtgtata

SEQ ID NO: 963636 - DNA, 15 bp, Homo sapiens
tgtatatacgtgtat

SEQ ID NO: 963637 - DNA, 15 bp, Homo sapiens
atgtatatacgtgta

SEQ ID NO: 963638 - DNA, 15 bp, Homo sapiens
catgtatatacgtgt

SEQ ID NO: 963639 - DNA, 15 bp, Homo sapiens
acatgtatatacgtg

SEQ ID NO: 963640 - DNA, 15 bp, Homo sapiens
cacatgtatatacgt

SEQ ID NO: 963641 - DNA, 15 bp, Homo sapiens
acacatgtatatacg

SEQ ID NO: 963642 - DNA, 15 bp, Homo sapiens
cacacatgtatatac

SEQ ID NO: 963643 - DNA, 15 bp, Homo sapiens
acacacatgtatata

SEQ ID NO: 963644 - DNA, 15 bp, Homo sapiens
tacacacatgtatat

SEQ ID NO: 963645 - DNA, 15 bp, Homo sapiens
atacacacatgtata

SEQ ID NO: 963646 - DNA, 15 bp, Homo sapiens
atatacacacatgta

SEQ ID NO: 963647 - DNA, 15 bp, Homo sapiens
tatatacacacatgt

SEQ ID NO: 963648 - DNA, 15 bp, Homo sapiens
atatatacacacatg

SEQ ID NO: 963649 - DNA, 15 bp, Homo sapiens
tatatatacacacat

SEQ ID NO: 963650 - DNA, 15 bp, Homo sapiens
gtatatatacacaca

SEQ ID NO: 963651 - DNA, 15 bp, Homo sapiens
tgtatatatacacac

SEQ ID NO: 963652 - DNA, 15 bp, Homo sapiens
cgtatatacgtgtat

SEQ ID NO: 963653 - DNA, 15 bp, Homo sapiens
acgtatatacgtgta

SEQ ID NO: 963654 - DNA, 15 bp, Homo sapiens
cacgtatatacgtgt

SEQ ID NO: 963655 - DNA, 15 bp, Homo sapiens
acacgtatatacgtg

SEQ ID NO: 963656 - DNA, 15 bp, Homo sapiens
cacacgtatatacgt

SEQ ID NO: 963657 - DNA, 15 bp, Homo sapiens
acacacgtatatacg

SEQ ID NO: 963658 - DNA, 15 bp, Homo sapiens
tacacacgtatatac

SEQ ID NO: 963659 - DNA, 15 bp, Homo sapiens
atacacacgtatata

SEQ ID NO: 963660 - DNA, 15 bp, Homo sapiens
tatacacacgtatat

SEQ ID NO: 963661 - DNA, 15 bp, Homo sapiens
atatacacacgtata

SEQ ID NO: 963662 - DNA, 15 bp, Homo sapiens
tatatacacacgtat

SEQ ID NO: 963663 - DNA, 15 bp, Homo sapiens
gtatatacacacgta

SEQ ID NO: 963664 - DNA, 15 bp, Homo sapiens
tgtatatacacacgt

SEQ ID NO: 963665 - DNA, 15 bp, Homo sapiens
gtgtatatacacacg

SEQ ID NO: 963666 - DNA, 15 bp, Homo sapiens
tgtgtatatacacac

SEQ ID NO: 963667 - DNA, 15 bp, Homo sapiens
gtgtgtatatacaca

SEQ ID NO: 963668 - DNA, 15 bp, Homo sapiens
cgtgtgtatatacac

SEQ ID NO: 963669 - DNA, 15 bp, Homo sapiens
acgtgtgtatataca

SEQ ID NO: 963670 - DNA, 15 bp, Homo sapiens
tacgtgtgtatatac

SEQ ID NO: 963671 - DNA, 15 bp, Homo sapiens
atacgtgtgtatata

SEQ ID NO: 963672 - DNA, 15 bp, Homo sapiens
tatacgtgtgtatat

SEQ ID NO: 963673 - DNA, 15 bp, Homo sapiens
atatacgtgtgtata

SEQ ID NO: 963674 - DNA, 15 bp, Homo sapiens
tatatacgtgtgtat

SEQ ID NO: 963675 - DNA, 15 bp, Homo sapiens
gtatatacgtgtgta

SEQ ID NO: 963676 - DNA, 15 bp, Homo sapiens
tgtatatacgtgtgt

SEQ ID NO: 963677 - DNA, 15 bp, Homo sapiens
atgtatatacgtgtg

SEQ ID NO: 963678 - DNA, 15 bp, Homo sapiens
gtatatacacacatg

SEQ ID NO: 963679 - DNA, 15 bp, Homo sapiens
tgtatatacacacat

SEQ ID NO: 963680 - DNA, 15 bp, Homo sapiens
atgtatatacacaca

SEQ ID NO: 963681 - DNA, 15 bp, Homo sapiens
catgtatatacacac

SEQ ID NO: 963682 - DNA, 15 bp, Homo sapiens
acatgtatatacaca

SEQ ID NO: 963683 - DNA, 15 bp, Homo sapiens
cacatgtatatacac

SEQ ID NO: 963684 - DNA, 15 bp, Homo sapiens
acacatgtatataca

SEQ ID NO: 963685 - DNA, 15 bp, Homo sapiens
gtgtatatacacaca

SEQ ID NO: 963686 - DNA, 15 bp, Homo sapiens
cgtatatacgtgtgt

SEQ ID NO: 963687 - DNA, 15 bp, Homo sapiens
acgtatatacgtgtg

SEQ ID NO: 963688 - DNA, 15 bp, Homo sapiens
cgtatatatacacac

SEQ ID NO: 963689 - DNA, 15 bp, Homo sapiens
acgtatatatacaca

SEQ ID NO: 963690 - DNA, 15 bp, Homo sapiens
cacgtatatatacac

SEQ ID NO: 963691 - DNA, 15 bp, Homo sapiens
acacgtatatataca

SEQ ID NO: 963692 - DNA, 15 bp, Homo sapiens
cacacgtatatatac

SEQ ID NO: 963693 - DNA, 15 bp, Homo sapiens
acacacgtatatata

SEQ ID NO: 963694 - DNA, 15 bp, Homo sapiens
tacacacgtatatat

SEQ ID NO: 963695 - DNA, 15 bp, Homo sapiens
atatatacacacgta

SEQ ID NO: 963696 - DNA, 15 bp, Homo sapiens
tatatatacacacgt

SEQ ID NO: 963697 - DNA, 15 bp, Homo sapiens
atatatatacacacg

SEQ ID NO: 963698 - DNA, 15 bp, Homo sapiens
tatatatatacacac

SEQ ID NO: 963699 - DNA, 15 bp, Homo sapiens
ttatatatatacaca

SEQ ID NO: 963700 - DNA, 15 bp, Homo sapiens
tttatatatatacac

SEQ ID NO: 963701 - DNA, 15 bp, Homo sapiens
gtttatatatataca

SEQ ID NO: 963702 - DNA, 15 bp, Homo sapiens
tgtttatatatatac

SEQ ID NO: 963703 - DNA, 15 bp, Homo sapiens
gtgtttatatatata

SEQ ID NO: 963704 - DNA, 15 bp, Homo sapiens
tgtgtttatatatat

SEQ ID NO: 963705 - DNA, 15 bp, Homo sapiens
atgtgtttatatata

SEQ ID NO: 963706 - DNA, 15 bp, Homo sapiens
tatgtgtttatatat

SEQ ID NO: 963707 - DNA, 15 bp, Homo sapiens
atatgtgtttatata

SEQ ID NO: 963708 - DNA, 15 bp, Homo sapiens
tatatgtgtttatat

SEQ ID NO: 963709 - DNA, 15 bp, Homo sapiens
atatatgtgtttata

SEQ ID NO: 963710 - DNA, 15 bp, Homo sapiens
tatatatgtgtttat

SEQ ID NO: 963711 - DNA, 15 bp, Homo sapiens
atatatatgtgttta

SEQ ID NO: 963712 - DNA, 15 bp, Homo sapiens
tatatatatgtgttt

SEQ ID NO: 963713 - DNA, 15 bp, Homo sapiens
atatatatatgtgtt

SEQ ID NO: 963714 - DNA, 15 bp, Homo sapiens
catatatatatgtgt

SEQ ID NO: 963715 - DNA, 15 bp, Homo sapiens
gcatatatatatgtg

SEQ ID NO: 963716 - DNA, 15 bp, Homo sapiens
tgcatatatatatgt

SEQ ID NO: 963717 - DNA, 15 bp, Homo sapiens
gtgcatatatatatg

SEQ ID NO: 963718 - DNA, 15 bp, Homo sapiens
tgtgcatatatatat

SEQ ID NO: 963719 - DNA, 15 bp, Homo sapiens
atgtgcatatatata

SEQ ID NO: 963720 - DNA, 15 bp, Homo sapiens
catgtgcatatatat

SEQ ID NO: 963721 - DNA, 15 bp, Homo sapiens
gcatgtgcatatata

SEQ ID NO: 963722 - DNA, 15 bp, Homo sapiens
tgcatgtgcatatat

SEQ ID NO: 963723 - DNA, 15 bp, Homo sapiens
atgcatgtgcatata

SEQ ID NO: 963724 - DNA, 15 bp, Homo sapiens
tatgcatgtgcatat

SEQ ID NO: 963725 - DNA, 15 bp, Homo sapiens
atatgcatgtgcata

SEQ ID NO: 963726 - DNA, 15 bp, Homo sapiens
catatgcatgtgcat

SEQ ID NO: 963727 - DNA, 15 bp, Homo sapiens
acatatgcatgtgca

SEQ ID NO: 963728 - DNA, 15 bp, Homo sapiens
tacatatgcatgtgc

SEQ ID NO: 963729 - DNA, 15 bp, Homo sapiens
atacatatgcatgtg

SEQ ID NO: 963730 - DNA, 15 bp, Homo sapiens
tatacatatgcatgt

SEQ ID NO: 963731 - DNA, 15 bp, Homo sapiens
gtatacatatgcatg

SEQ ID NO: 963732 - DNA, 15 bp, Homo sapiens
tgtatacatatgcat

SEQ ID NO: 963733 - DNA, 15 bp, Homo sapiens
gtgtatacatatgca

SEQ ID NO: 963734 - DNA, 15 bp, Homo sapiens
agtgtatacatatgc

SEQ ID NO: 963735 - DNA, 15 bp, Homo sapiens
cagtgtatacatatg

SEQ ID NO: 963736 - DNA, 15 bp, Homo sapiens
tcagtgtatacatat

SEQ ID NO: 963737 - DNA, 15 bp, Homo sapiens
ctcagtgtatacata

SEQ ID NO: 963738 - DNA, 15 bp, Homo sapiens
actcagtgtatacat

SEQ ID NO: 963739 - DNA, 15 bp, Homo sapiens
aactcagtgtataca

SEQ ID NO: 963740 - DNA, 15 bp, Homo sapiens
taactcagtgtatac

SEQ ID NO: 963741 - DNA, 15 bp, Homo sapiens
ttaactcagtgtata

SEQ ID NO: 963742 - DNA, 15 bp, Homo sapiens
cttaactcagtgtat

SEQ ID NO: 963743 - DNA, 15 bp, Homo sapiens
acttaactcagtgta

SEQ ID NO: 963744 - DNA, 15 bp, Homo sapiens
tacttaactcagtgt

SEQ ID NO: 963745 - DNA, 15 bp, Homo sapiens
ctacttaactcagtg

SEQ ID NO: 963746 - DNA, 15 bp, Homo sapiens
actacttaactcagt

SEQ ID NO: 963747 - DNA, 15 bp, Homo sapiens
tactacttaactcag

SEQ ID NO: 963748 - DNA, 15 bp, Homo sapiens
atactacttaactca

SEQ ID NO: 963749 - DNA, 15 bp, Homo sapiens
tatactacttaactc

SEQ ID NO: 963750 - DNA, 15 bp, Homo sapiens
ttatactacttaact

SEQ ID NO: 963751 - DNA, 15 bp, Homo sapiens
tttatactacttaac

SEQ ID NO: 963752 - DNA, 15 bp, Homo sapiens
atttatactacttaa

SEQ ID NO: 963753 - DNA, 15 bp, Homo sapiens
tatttatactactta

SEQ ID NO: 963754 - DNA, 15 bp, Homo sapiens
atatttatactactt

SEQ ID NO: 963755 - DNA, 15 bp, Homo sapiens
aatatttatactact

SEQ ID NO: 963756 - DNA, 15 bp, Homo sapiens
aaatatttatactac

SEQ ID NO: 963757 - DNA, 15 bp, Homo sapiens
aaaatatttatacta

SEQ ID NO: 963758 - DNA, 15 bp, Homo sapiens
taaaatatttatact

SEQ ID NO: 963759 - DNA, 15 bp, Homo sapiens
ctaaaatatttatac

SEQ ID NO: 963760 - DNA, 15 bp, Homo sapiens
tctaaaatatttata

SEQ ID NO: 963761 - DNA, 15 bp, Homo sapiens
ctctaaaatatttat

SEQ ID NO: 963762 - DNA, 15 bp, Homo sapiens
tctctaaaatattta

SEQ ID NO: 963763 - DNA, 15 bp, Homo sapiens
ttctctaaaatattt

SEQ ID NO: 963764 - DNA, 15 bp, Homo sapiens
tttctctaaaatatt

SEQ ID NO: 963765 - DNA, 15 bp, Homo sapiens
ttttctctaaaatat

SEQ ID NO: 963766 - DNA, 15 bp, Homo sapiens
attttctctaaaata

SEQ ID NO: 963767 - DNA, 15 bp, Homo sapiens
aattttctctaaaat

SEQ ID NO: 963768 - DNA, 15 bp, Homo sapiens
caattttctctaaaa

SEQ ID NO: 963769 - DNA, 15 bp, Homo sapiens
tcaattttctctaaa

SEQ ID NO: 963770 - DNA, 15 bp, Homo sapiens
atcaattttctctaa

SEQ ID NO: 963771 - DNA, 15 bp, Homo sapiens
catcaattttctcta

SEQ ID NO: 963772 - DNA, 15 bp, Homo sapiens
acatcaattttctct

SEQ ID NO: 963773 - DNA, 15 bp, Homo sapiens
tacatcaattttctc

SEQ ID NO: 963774 - DNA, 15 bp, Homo sapiens
ttacatcaattttct

SEQ ID NO: 963775 - DNA, 15 bp, Homo sapiens
tttacatcaattttc

SEQ ID NO: 963776 - DNA, 15 bp, Homo sapiens
ttttacatcaatttt

SEQ ID NO: 963777 - DNA, 15 bp, Homo sapiens
attttacatcaattt

SEQ ID NO: 963778 - DNA, 15 bp, Homo sapiens
gattttacatcaatt

SEQ ID NO: 963779 - DNA, 15 bp, Homo sapiens
ggattttacatcaat

SEQ ID NO: 963780 - DNA, 15 bp, Homo sapiens
aggattttacatcaa

SEQ ID NO: 963781 - DNA, 15 bp, Homo sapiens
gaggattttacatca

SEQ ID NO: 963782 - DNA, 15 bp, Homo sapiens
tgaggattttacatc

SEQ ID NO: 963783 - DNA, 15 bp, Homo sapiens
ttgaggattttacat

SEQ ID NO: 963784 - DNA, 15 bp, Homo sapiens
gttgaggattttaca

SEQ ID NO: 963785 - DNA, 15 bp, Homo sapiens
agttgaggattttac

SEQ ID NO: 963786 - DNA, 15 bp, Homo sapiens
gagttgaggatttta

SEQ ID NO: 963787 - DNA, 15 bp, Homo sapiens
tgagttgaggatttt

SEQ ID NO: 963788 - DNA, 15 bp, Homo sapiens
atgagttgaggattt

SEQ ID NO: 963789 - DNA, 15 bp, Homo sapiens
aatgagttgaggatt

SEQ ID NO: 963790 - DNA, 15 bp, Homo sapiens
aaatgagttgaggat

SEQ ID NO: 963791 - DNA, 15 bp, Homo sapiens
caaatgagttgagga

SEQ ID NO: 963792 - DNA, 15 bp, Homo sapiens
tcaaatgagttgagg

SEQ ID NO: 963793 - DNA, 15 bp, Homo sapiens
atcaaatgagttgag

SEQ ID NO: 963794 - DNA, 15 bp, Homo sapiens
catcaaatgagttga

SEQ ID NO: 963795 - DNA, 15 bp, Homo sapiens
gcatcaaatgagttg

SEQ ID NO: 963796 - DNA, 15 bp, Homo sapiens
agcatcaaatgagtt

SEQ ID NO: 963797 - DNA, 15 bp, Homo sapiens
gagcatcaaatgagt

SEQ ID NO: 963798 - DNA, 15 bp, Homo sapiens
ggagcatcaaatgag

SEQ ID NO: 963799 - DNA, 15 bp, Homo sapiens
gggagcatcaaatga

SEQ ID NO: 963800 - DNA, 15 bp, Homo sapiens
agggagcatcaaatg

SEQ ID NO: 963801 - DNA, 15 bp, Homo sapiens
tagggagcatcaaat

SEQ ID NO: 963802 - DNA, 15 bp, Homo sapiens
atagggagcatcaaa

SEQ ID NO: 963803 - DNA, 15 bp, Homo sapiens
gatagggagcatcaa

SEQ ID NO: 963804 - DNA, 15 bp, Homo sapiens
ggatagggagcatca

SEQ ID NO: 963805 - DNA, 15 bp, Homo sapiens
gggatagggagcatc

SEQ ID NO: 963806 - DNA, 15 bp, Homo sapiens
tgggatagggagcat

SEQ ID NO: 963807 - DNA, 15 bp, Homo sapiens
ctgggatagggagca

SEQ ID NO: 963808 - DNA, 15 bp, Homo sapiens
cctgggatagggagc

SEQ ID NO: 963809 - DNA, 15 bp, Homo sapiens
tcctgggatagggag

SEQ ID NO: 963810 - DNA, 15 bp, Homo sapiens
gtcctgggataggga

SEQ ID NO: 963811 - DNA, 15 bp, Homo sapiens
tgtcctgggataggg

SEQ ID NO: 963812 - DNA, 15 bp, Homo sapiens
ctgtcctgggatagg

SEQ ID NO: 963813 - DNA, 15 bp, Homo sapiens
actgtcctgggatag

SEQ ID NO: 963814 - DNA, 15 bp, Homo sapiens
tactgtcctgggata

SEQ ID NO: 963815 - DNA, 15 bp, Homo sapiens
ttactgtcctgggat

SEQ ID NO: 963816 - DNA, 15 bp, Homo sapiens
tttactgtcctggga

SEQ ID NO: 963817 - DNA, 15 bp, Homo sapiens
ttttactgtcctggg

SEQ ID NO: 963818 - DNA, 15 bp, Homo sapiens
tttttactgtcctgg

SEQ ID NO: 963819 - DNA, 15 bp, Homo sapiens
atttttactgtcctg

SEQ ID NO: 963820 - DNA, 15 bp, Homo sapiens
aatttttactgtcct

SEQ ID NO: 963821 - DNA, 15 bp, Homo sapiens
caatttttactgtcc

SEQ ID NO: 963822 - DNA, 15 bp, Homo sapiens
gcaatttttactgtc

SEQ ID NO: 963823 - DNA, 15 bp, Homo sapiens
ggcaatttttactgt

SEQ ID NO: 963824 - DNA, 15 bp, Homo sapiens
gggcaatttttactg

SEQ ID NO: 963825 - DNA, 15 bp, Homo sapiens
tgggcaatttttact

SEQ ID NO: 963826 - DNA, 15 bp, Homo sapiens
ttgggcaatttttac

SEQ ID NO: 963827 - DNA, 15 bp, Homo sapiens
attgggcaattttta

SEQ ID NO: 963828 - DNA, 15 bp, Homo sapiens
tattgggcaattttt

SEQ ID NO: 963829 - DNA, 15 bp, Homo sapiens
atattgggcaatttt

SEQ ID NO: 963830 - DNA, 15 bp, Homo sapiens
aatattgggcaattt

SEQ ID NO: 963831 - DNA, 15 bp, Homo sapiens
aaatattgggcaatt

SEQ ID NO: 963832 - DNA, 15 bp, Homo sapiens
gaaatattgggcaat

SEQ ID NO: 963833 - DNA, 15 bp, Homo sapiens
ggaaatattgggcaa

SEQ ID NO: 963834 - DNA, 15 bp, Homo sapiens
aggaaatattgggca

SEQ ID NO: 963835 - DNA, 15 bp, Homo sapiens
aaggaaatattgggc

SEQ ID NO: 963836 - DNA, 15 bp, Homo sapiens
caaggaaatattggg

SEQ ID NO: 963837 - DNA, 15 bp, Homo sapiens
ccaaggaaatattgg

SEQ ID NO: 963838 - DNA, 15 bp, Homo sapiens
tccaaggaaatattg

SEQ ID NO: 963839 - DNA, 15 bp, Homo sapiens
gtccaaggaaatatt

SEQ ID NO: 963840 - DNA, 15 bp, Homo sapiens
ggtccaaggaaatat

SEQ ID NO: 963841 - DNA, 15 bp, Homo sapiens
aggtccaaggaaata

SEQ ID NO: 963842 - DNA, 15 bp, Homo sapiens
gaggtccaaggaaat

SEQ ID NO: 963843 - DNA, 15 bp, Homo sapiens
ggaggtccaaggaaa

SEQ ID NO: 963844 - DNA, 15 bp, Homo sapiens
tggaggtccaaggaa

SEQ ID NO: 963845 - DNA, 15 bp, Homo sapiens
atggaggtccaagga

SEQ ID NO: 963846 - DNA, 15 bp, Homo sapiens
tatggaggtccaagg

SEQ ID NO: 963847 - DNA, 15 bp, Homo sapiens
ttatggaggtccaag

SEQ ID NO: 963848 - DNA, 15 bp, Homo sapiens
tttatggaggtccaa

SEQ ID NO: 963849 - DNA, 15 bp, Homo sapiens
ctttatggaggtcca

SEQ ID NO: 963850 - DNA, 15 bp, Homo sapiens
tctttatggaggtcc

SEQ ID NO: 963851 - DNA, 15 bp, Homo sapiens
ttctttatggaggtc

SEQ ID NO: 963852 - DNA, 15 bp, Homo sapiens
cttctttatggaggt

SEQ ID NO: 963853 - DNA, 15 bp, Homo sapiens
gcttctttatggagg

SEQ ID NO: 963854 - DNA, 15 bp, Homo sapiens
tgcttctttatggag

SEQ ID NO: 963855 - DNA, 15 bp, Homo sapiens
ctgcttctttatgga

SEQ ID NO: 963856 - DNA, 15 bp, Homo sapiens
actgcttctttatgg

SEQ ID NO: 963857 - DNA, 15 bp, Homo sapiens
aactgcttctttatg

SEQ ID NO: 963858 - DNA, 15 bp, Homo sapiens
aaactgcttctttat

SEQ ID NO: 963859 - DNA, 15 bp, Homo sapiens
aaaactgcttcttta

SEQ ID NO: 963860 - DNA, 15 bp, Homo sapiens
aaaaactgcttcttt

SEQ ID NO: 963861 - DNA, 15 bp, Homo sapiens
gaaaaactgcttctt

SEQ ID NO: 963862 - DNA, 15 bp, Homo sapiens
tgaaaaactgcttct

SEQ ID NO: 963863 - DNA, 15 bp, Homo sapiens
ttgaaaaactgcttc

SEQ ID NO: 963864 - DNA, 15 bp, Homo sapiens
tttgaaaaactgctt

SEQ ID NO: 963865 - DNA, 15 bp, Homo sapiens
ttttgaaaaactgct

SEQ ID NO: 963866 - DNA, 15 bp, Homo sapiens
tttttgaaaaactgc

SEQ ID NO: 963867 - DNA, 15 bp, Homo sapiens
ttttttgaaaaactg

SEQ ID NO: 963868 - DNA, 15 bp, Homo sapiens
attttttgaaaaact

SEQ ID NO: 963869 - DNA, 15 bp, Homo sapiens
tattttttgaaaaac

SEQ ID NO: 963870 - DNA, 15 bp, Homo sapiens
ttattttttgaaaaa

SEQ ID NO: 963871 - DNA, 15 bp, Homo sapiens
tttattttttgaaaa

SEQ ID NO: 963872 - DNA, 15 bp, Homo sapiens
ctttattttttgaaa

SEQ ID NO: 963873 - DNA, 15 bp, Homo sapiens
actttattttttgaa

SEQ ID NO: 963874 - DNA, 15 bp, Homo sapiens
cactttattttttga

SEQ ID NO: 963875 - DNA, 15 bp, Homo sapiens
acactttattttttg

SEQ ID NO: 963876 - DNA, 15 bp, Homo sapiens
aacactttatttttt

SEQ ID NO: 963877 - DNA, 15 bp, Homo sapiens
aaacactttattttt

SEQ ID NO: 963878 - DNA, 15 bp, Homo sapiens
caaacactttatttt

SEQ ID NO: 963879 - DNA, 15 bp, Homo sapiens
ccaaacactttattt

SEQ ID NO: 963880 - DNA, 15 bp, Homo sapiens
tccaaacactttatt

SEQ ID NO: 963881 - DNA, 15 bp, Homo sapiens
ttccaaacactttat

SEQ ID NO: 963882 - DNA, 15 bp, Homo sapiens
cttccaaacacttta

SEQ ID NO: 963883 - DNA, 15 bp, Homo sapiens
acttccaaacacttt

SEQ ID NO: 963884 - DNA, 15 bp, Homo sapiens
aacttccaaacactt

SEQ ID NO: 963885 - DNA, 15 bp, Homo sapiens
aaacttccaaacact

SEQ ID NO: 963886 - DNA, 15 bp, Homo sapiens
taaacttccaaacac

SEQ ID NO: 963887 - DNA, 15 bp, Homo sapiens
ttaaacttccaaaca

SEQ ID NO: 963888 - DNA, 15 bp, Homo sapiens
cttaaacttccaaac

SEQ ID NO: 963889 - DNA, 15 bp, Homo sapiens
tcttaaacttccaaa

SEQ ID NO: 963890 - DNA, 15 bp, Homo sapiens
atcttaaacttccaa

SEQ ID NO: 963891 - DNA, 15 bp, Homo sapiens
catcttaaacttcca

SEQ ID NO: 963892 - DNA, 15 bp, Homo sapiens
acatcttaaacttcc

SEQ ID NO: 963893 - DNA, 15 bp, Homo sapiens
cacatcttaaacttc

SEQ ID NO: 963894 - DNA, 15 bp, Homo sapiens
gcacatcttaaactt

SEQ ID NO: 963895 - DNA, 15 bp, Homo sapiens
ggcacatcttaaact

SEQ ID NO: 963896 - DNA, 15 bp, Homo sapiens
aggcacatcttaaac

SEQ ID NO: 963897 - DNA, 15 bp, Homo sapiens
taggcacatcttaaa

SEQ ID NO: 963898 - DNA, 15 bp, Homo sapiens
ctaggcacatcttaa

SEQ ID NO: 963899 - DNA, 15 bp, Homo sapiens
gctaggcacatctta

SEQ ID NO: 963900 - DNA, 15 bp, Homo sapiens
tgctaggcacatctt

SEQ ID NO: 963901 - DNA, 15 bp, Homo sapiens
ctgctaggcacatct

SEQ ID NO: 963902 - DNA, 15 bp, Homo sapiens
actgctaggcacatc

SEQ ID NO: 963903 - DNA, 15 bp, Homo sapiens
cactgctaggcacat

SEQ ID NO: 963904 - DNA, 15 bp, Homo sapiens
acactgctaggcaca

SEQ ID NO: 963905 - DNA, 15 bp, Homo sapiens
gacactgctaggcac

SEQ ID NO: 963906 - DNA, 15 bp, Homo sapiens
agacactgctaggca

SEQ ID NO: 963907 - DNA, 15 bp, Homo sapiens
gagacactgctaggc

SEQ ID NO: 963908 - DNA, 15 bp, Homo sapiens
ggagacactgctagg

SEQ ID NO: 963909 - DNA, 15 bp, Homo sapiens
aggagacactgctag

SEQ ID NO: 963910 - DNA, 15 bp, Homo sapiens
aaggagacactgcta

SEQ ID NO: 963911 - DNA, 15 bp, Homo sapiens
aaaggagacactgct

SEQ ID NO: 963912 - DNA, 15 bp, Homo sapiens
aaaaggagacactgc

SEQ ID NO: 963913 - DNA, 15 bp, Homo sapiens
taaaaggagacactg

SEQ ID NO: 963914 - DNA, 15 bp, Homo sapiens
ttaaaaggagacact

SEQ ID NO: 963915 - DNA, 15 bp, Homo sapiens
gttaaaaggagacac

SEQ ID NO: 963916 - DNA, 15 bp, Homo sapiens
tgttaaaaggagaca

SEQ ID NO: 963917 - DNA, 15 bp, Homo sapiens
ctgttaaaaggagac

SEQ ID NO: 963918 - DNA, 15 bp, Homo sapiens
tctgttaaaaggaga

SEQ ID NO: 963919 - DNA, 15 bp, Homo sapiens
ctctgttaaaaggag

SEQ ID NO: 963920 - DNA, 15 bp, Homo sapiens
tctctgttaaaagga

SEQ ID NO: 963921 - DNA, 15 bp, Homo sapiens
atctctgttaaaagg

SEQ ID NO: 963922 - DNA, 15 bp, Homo sapiens
catctctgttaaaag

SEQ ID NO: 963923 - DNA, 15 bp, Homo sapiens
gcatctctgttaaaa

SEQ ID NO: 963924 - DNA, 15 bp, Homo sapiens
agcatctctgttaaa

SEQ ID NO: 963925 - DNA, 15 bp, Homo sapiens
aagcatctctgttaa

SEQ ID NO: 963926 - DNA, 15 bp, Homo sapiens
aaagcatctctgtta

SEQ ID NO: 963927 - DNA, 15 bp, Homo sapiens
gaaagcatctctgtt

SEQ ID NO: 963928 - DNA, 15 bp, Homo sapiens
tgaaagcatctctgt

SEQ ID NO: 963929 - DNA, 15 bp, Homo sapiens
gtgaaagcatctctg

SEQ ID NO: 963930 - DNA, 15 bp, Homo sapiens
tgtgaaagcatctct

SEQ ID NO: 963931 - DNA, 15 bp, Homo sapiens
ttgtgaaagcatctc

SEQ ID NO: 963932 - DNA, 15 bp, Homo sapiens
cttgtgaaagcatct

SEQ ID NO: 963933 - DNA, 15 bp, Homo sapiens
ccttgtgaaagcatc

SEQ ID NO: 963934 - DNA, 15 bp, Homo sapiens
tccttgtgaaagcat

SEQ ID NO: 963935 - DNA, 15 bp, Homo sapiens
atccttgtgaaagca

SEQ ID NO: 963936 - DNA, 15 bp, Homo sapiens
aatccttgtgaaagc

SEQ ID NO: 963937 - DNA, 15 bp, Homo sapiens
aaatccttgtgaaag

SEQ ID NO: 963938 - DNA, 15 bp, Homo sapiens
caaatccttgtgaaa

SEQ ID NO: 963939 - DNA, 15 bp, Homo sapiens
tcaaatccttgtgaa

SEQ ID NO: 963940 - DNA, 15 bp, Homo sapiens
ttcaaatccttgtga

SEQ ID NO: 963941 - DNA, 15 bp, Homo sapiens
attcaaatccttgtg

SEQ ID NO: 963942 - DNA, 15 bp, Homo sapiens
aattcaaatccttgt

SEQ ID NO: 963943 - DNA, 15 bp, Homo sapiens
aaattcaaatccttg

SEQ ID NO: 963944 - DNA, 15 bp, Homo sapiens
gaaattcaaatcctt

SEQ ID NO: 963945 - DNA, 15 bp, Homo sapiens
ggaaattcaaatcct

SEQ ID NO: 963946 - DNA, 15 bp, Homo sapiens
gggaaattcaaatcc

SEQ ID NO: 963947 - DNA, 15 bp, Homo sapiens
ggggaaattcaaatc

SEQ ID NO: 963948 - DNA, 15 bp, Homo sapiens
tggggaaattcaaat

SEQ ID NO: 963949 - DNA, 15 bp, Homo sapiens
atggggaaattcaaa

SEQ ID NO: 963950 - DNA, 15 bp, Homo sapiens
aatggggaaattcaa

SEQ ID NO: 963951 - DNA, 15 bp, Homo sapiens
caatggggaaattca

SEQ ID NO: 963952 - DNA, 15 bp, Homo sapiens
tcaatggggaaattc

SEQ ID NO: 963953 - DNA, 15 bp, Homo sapiens
ctcaatggggaaatt

SEQ ID NO: 963954 - DNA, 15 bp, Homo sapiens
gctcaatggggaaat

SEQ ID NO: 963955 - DNA, 15 bp, Homo sapiens
agctcaatggggaaa

SEQ ID NO: 963956 - DNA, 15 bp, Homo sapiens
cagctcaatggggaa

SEQ ID NO: 963957 - DNA, 15 bp, Homo sapiens
ccagctcaatgggga

SEQ ID NO: 963958 - DNA, 15 bp, Homo sapiens
cccagctcaatgggg

SEQ ID NO: 963959 - DNA, 15 bp, Homo sapiens
tcccagctcaatggg

SEQ ID NO: 963960 - DNA, 15 bp, Homo sapiens
ttcccagctcaatgg

SEQ ID NO: 963961 - DNA, 15 bp, Homo sapiens
gttcccagctcaatg

SEQ ID NO: 963962 - DNA, 15 bp, Homo sapiens
ggttcccagctcaat

SEQ ID NO: 963963 - DNA, 15 bp, Homo sapiens
tggttcccagctcaa

SEQ ID NO: 963964 - DNA, 15 bp, Homo sapiens
ctggttcccagctca

SEQ ID NO: 963965 - DNA, 15 bp, Homo sapiens
cctggttcccagctc

SEQ ID NO: 963966 - DNA, 15 bp, Homo sapiens
acctggttcccagct

SEQ ID NO: 963967 - DNA, 15 bp, Homo sapiens
aacctggttcccagc

SEQ ID NO: 963968 - DNA, 15 bp, Homo sapiens
aaacctggttcccag

SEQ ID NO: 963969 - DNA, 15 bp, Homo sapiens
taaacctggttccca

SEQ ID NO: 963970 - DNA, 15 bp, Homo sapiens
ctaaacctggttccc

SEQ ID NO: 963971 - DNA, 15 bp, Homo sapiens
gctaaacctggttcc

SEQ ID NO: 963972 - DNA, 15 bp, Homo sapiens
ggctaaacctggttc

SEQ ID NO: 963973 - DNA, 15 bp, Homo sapiens
tggctaaacctggtt

SEQ ID NO: 963974 - DNA, 15 bp, Homo sapiens
ttggctaaacctggt

SEQ ID NO: 963975 - DNA, 15 bp, Homo sapiens
cttggctaaacctgg

SEQ ID NO: 963976 - DNA, 15 bp, Homo sapiens
tcttggctaaacctg

SEQ ID NO: 963977 - DNA, 15 bp, Homo sapiens
ttcttggctaaacct

SEQ ID NO: 963978 - DNA, 15 bp, Homo sapiens
gttcttggctaaacc

SEQ ID NO: 963979 - DNA, 15 bp, Homo sapiens
agttcttggctaaac

SEQ ID NO: 963980 - DNA, 15 bp, Homo sapiens
aagttcttggctaaa

SEQ ID NO: 963981 - DNA, 15 bp, Homo sapiens
gaagttcttggctaa

SEQ ID NO: 963982 - DNA, 15 bp, Homo sapiens
cgaagttcttggcta

SEQ ID NO: 963983 - DNA, 15 bp, Homo sapiens
ccgaagttcttggct

SEQ ID NO: 963984 - DNA, 15 bp, Homo sapiens
accgaagttcttggc

SEQ ID NO: 963985 - DNA, 15 bp, Homo sapiens
gaccgaagttcttgg

SEQ ID NO: 963986 - DNA, 15 bp, Homo sapiens
agaccgaagttcttg

SEQ ID NO: 963987 - DNA, 15 bp, Homo sapiens
cagaccgaagttctt

SEQ ID NO: 963988 - DNA, 15 bp, Homo sapiens
acagaccgaagttct

SEQ ID NO: 963989 - DNA, 15 bp, Homo sapiens
cacagaccgaagttc

SEQ ID NO: 963990 - DNA, 15 bp, Homo sapiens
tcacagaccgaagtt

SEQ ID NO: 963991 - DNA, 15 bp, Homo sapiens
ttcacagaccgaagt

SEQ ID NO: 963992 - DNA, 15 bp, Homo sapiens
cttcacagaccgaag

SEQ ID NO: 963993 - DNA, 15 bp, Homo sapiens
ccttcacagaccgaa

SEQ ID NO: 963994 - DNA, 15 bp, Homo sapiens
tccttcacagaccga

SEQ ID NO: 963995 - DNA, 15 bp, Homo sapiens
gtccttcacagaccg

SEQ ID NO: 963996 - DNA, 15 bp, Homo sapiens
agtccttcacagacc

SEQ ID NO: 963997 - DNA, 15 bp, Homo sapiens
cagtccttcacagac

SEQ ID NO: 963998 - DNA, 15 bp, Homo sapiens
gcagtccttcacaga

SEQ ID NO: 963999 - DNA, 15 bp, Homo sapiens
tgcagtccttcacag

SEQ ID NO: 964000 - DNA, 15 bp, Homo sapiens
ttgcagtccttcaca

SEQ ID NO: 964001 - DNA, 15 bp, Homo sapiens
tttgcagtccttcac

SEQ ID NO: 964002 - DNA, 15 bp, Homo sapiens
atttgcagtccttca

SEQ ID NO: 964003 - DNA, 15 bp, Homo sapiens
tatttgcagtccttc

SEQ ID NO: 964004 - DNA, 15 bp, Homo sapiens
ctatttgcagtcctt

SEQ ID NO: 964005 - DNA, 15 bp, Homo sapiens
actatttgcagtcct

SEQ ID NO: 964006 - DNA, 15 bp, Homo sapiens
aactatttgcagtcc

SEQ ID NO: 964007 - DNA, 15 bp, Homo sapiens
caactatttgcagtc

SEQ ID NO: 964008 - DNA, 15 bp, Homo sapiens
gcaactatttgcagt

SEQ ID NO: 964009 - DNA, 15 bp, Homo sapiens
tgcaactatttgcag

SEQ ID NO: 964010 - DNA, 15 bp, Homo sapiens
gtgcaactatttgca

SEQ ID NO: 964011 - DNA, 15 bp, Homo sapiens
tgtgcaactatttgc

SEQ ID NO: 964012 - DNA, 15 bp, Homo sapiens
ctgtgcaactatttg

SEQ ID NO: 964013 - DNA, 15 bp, Homo sapiens
actgtgcaactattt

SEQ ID NO: 964014 - DNA, 15 bp, Homo sapiens
cactgtgcaactatt

SEQ ID NO: 964015 - DNA, 15 bp, Homo sapiens
acactgtgcaactat

SEQ ID NO: 964016 - DNA, 15 bp, Homo sapiens
cacactgtgcaacta

SEQ ID NO: 964017 - DNA, 15 bp, Homo sapiens
ccacactgtgcaact

SEQ ID NO: 964018 - DNA, 15 bp, Homo sapiens
cccacactgtgcaac

SEQ ID NO: 964019 - DNA, 15 bp, Homo sapiens
ccccacactgtgcaa

SEQ ID NO: 964020 - DNA, 15 bp, Homo sapiens
gccccacactgtgca

SEQ ID NO: 964021 - DNA, 15 bp, Homo sapiens
agccccacactgtgc

SEQ ID NO: 964022 - DNA, 15 bp, Homo sapiens
cagccccacactgtg

SEQ ID NO: 964023 - DNA, 15 bp, Homo sapiens
tcagccccacactgt

SEQ ID NO: 964024 - DNA, 15 bp, Homo sapiens
ctcagccccacactg

SEQ ID NO: 964025 - DNA, 15 bp, Homo sapiens
cctcagccccacact

SEQ ID NO: 964026 - DNA, 15 bp, Homo sapiens
gcctcagccccacac

SEQ ID NO: 964027 - DNA, 15 bp, Homo sapiens
agcctcagccccaca

SEQ ID NO: 964028 - DNA, 15 bp, Homo sapiens
tagcctcagccccac

SEQ ID NO: 964029 - DNA, 15 bp, Homo sapiens
ctagcctcagcccca

SEQ ID NO: 964030 - DNA, 15 bp, Homo sapiens
tctagcctcagcccc

SEQ ID NO: 964031 - DNA, 15 bp, Homo sapiens
ttctagcctcagccc

SEQ ID NO: 964032 - DNA, 15 bp, Homo sapiens
gttctagcctcagcc

SEQ ID NO: 964033 - DNA, 15 bp, Homo sapiens
ggttctagcctcagc

SEQ ID NO: 964034 - DNA, 15 bp, Homo sapiens
aggttctagcctcag

SEQ ID NO: 964035 - DNA, 15 bp, Homo sapiens
gaggttctagcctca

SEQ ID NO: 964036 - DNA, 15 bp, Homo sapiens
ggaggttctagcctc

SEQ ID NO: 964037 - DNA, 15 bp, Homo sapiens
aggaggttctagcct

SEQ ID NO: 964038 - DNA, 15 bp, Homo sapiens
aaggaggttctagcc

SEQ ID NO: 964039 - DNA, 15 bp, Homo sapiens
taaggaggttctagc

SEQ ID NO: 964040 - DNA, 15 bp, Homo sapiens
ttaaggaggttctag

SEQ ID NO: 964041 - DNA, 15 bp, Homo sapiens
attaaggaggttcta

SEQ ID NO: 964042 - DNA, 15 bp, Homo sapiens
tattaaggaggttct

SEQ ID NO: 964043 - DNA, 15 bp, Homo sapiens
atattaaggaggttc

SEQ ID NO: 964044 - DNA, 15 bp, Homo sapiens
aatattaaggaggtt

SEQ ID NO: 964045 - DNA, 15 bp, Homo sapiens
taatattaaggaggt

SEQ ID NO: 964046 - DNA, 15 bp, Homo sapiens
ttaatattaaggagg

SEQ ID NO: 964047 - DNA, 15 bp, Homo sapiens
tttaatattaaggag

SEQ ID NO: 964048 - DNA, 15 bp, Homo sapiens
gtttaatattaagga

SEQ ID NO: 964049 - DNA, 15 bp, Homo sapiens
ggtttaatattaagg

SEQ ID NO: 964050 - DNA, 15 bp, Homo sapiens
tggtttaatattaag

SEQ ID NO: 964051 - DNA, 15 bp, Homo sapiens
atggtttaatattaa

SEQ ID NO: 964052 - DNA, 15 bp, Homo sapiens
aatggtttaatatta

SEQ ID NO: 964053 - DNA, 15 bp, Homo sapiens
gaatggtttaatatt

SEQ ID NO: 964054 - DNA, 15 bp, Homo sapiens
agaatggtttaatat

SEQ ID NO: 964055 - DNA, 15 bp, Homo sapiens
cagaatggtttaata

SEQ ID NO: 964056 - DNA, 15 bp, Homo sapiens
ccagaatggtttaat

SEQ ID NO: 964057 - DNA, 15 bp, Homo sapiens
cccagaatggtttaa

SEQ ID NO: 964058 - DNA, 15 bp, Homo sapiens
tcccagaatggttta

SEQ ID NO: 964059 - DNA, 15 bp, Homo sapiens
atcccagaatggttt

SEQ ID NO: 964060 - DNA, 15 bp, Homo sapiens
catcccagaatggtt

SEQ ID NO: 964061 - DNA, 15 bp, Homo sapiens
ccatcccagaatggt

SEQ ID NO: 964062 - DNA, 15 bp, Homo sapiens
accatcccagaatgg

SEQ ID NO: 964063 - DNA, 15 bp, Homo sapiens
caccatcccagaatg

SEQ ID NO: 964064 - DNA, 15 bp, Homo sapiens
gcaccatcccagaat

SEQ ID NO: 964065 - DNA, 15 bp, Homo sapiens
agcaccatcccagaa

SEQ ID NO: 964066 - DNA, 15 bp, Homo sapiens
gagcaccatcccaga

SEQ ID NO: 964067 - DNA, 15 bp, Homo sapiens
ggagcaccatcccag

SEQ ID NO: 964068 - DNA, 15 bp, Homo sapiens
gggagcaccatccca

SEQ ID NO: 964069 - DNA, 15 bp, Homo sapiens
ggggagcaccatccc

SEQ ID NO: 964070 - DNA, 15 bp, Homo sapiens
tggggagcaccatcc

SEQ ID NO: 964071 - DNA, 15 bp, Homo sapiens
ttggggagcaccatc

SEQ ID NO: 964072 - DNA, 15 bp, Homo sapiens
tttggggagcaccat

SEQ ID NO: 964073 - DNA, 15 bp, Homo sapiens
atttggggagcacca

SEQ ID NO: 964074 - DNA, 15 bp, Homo sapiens
aatttggggagcacc

SEQ ID NO: 964075 - DNA, 15 bp, Homo sapiens
gaatttggggagcac

SEQ ID NO: 964076 - DNA, 15 bp, Homo sapiens
agaatttggggagca

SEQ ID NO: 964077 - DNA, 15 bp, Homo sapiens
cagaatttggggagc

SEQ ID NO: 964078 - DNA, 15 bp, Homo sapiens
ccagaatttggggag

SEQ ID NO: 964079 - DNA, 15 bp, Homo sapiens
tccagaatttgggga

SEQ ID NO: 964080 - DNA, 15 bp, Homo sapiens
atccagaatttgggg

SEQ ID NO: 964081 - DNA, 15 bp, Homo sapiens
aatccagaatttggg

SEQ ID NO: 964082 - DNA, 15 bp, Homo sapiens
aaatccagaatttgg

SEQ ID NO: 964083 - DNA, 15 bp, Homo sapiens
aaaatccagaatttg

SEQ ID NO: 964084 - DNA, 15 bp, Homo sapiens
taaaatccagaattt

SEQ ID NO: 964085 - DNA, 15 bp, Homo sapiens
ttaaaatccagaatt

SEQ ID NO: 964086 - DNA, 15 bp, Homo sapiens
gttaaaatccagaat

SEQ ID NO: 964087 - DNA, 15 bp, Homo sapiens
ggttaaaatccagaa

SEQ ID NO: 964088 - DNA, 15 bp, Homo sapiens
aggttaaaatccaga

SEQ ID NO: 964089 - DNA, 15 bp, Homo sapiens
aaggttaaaatccag

SEQ ID NO: 964090 - DNA, 15 bp, Homo sapiens
gaaggttaaaatcca

SEQ ID NO: 964091 - DNA, 15 bp, Homo sapiens
tgaaggttaaaatcc

SEQ ID NO: 964092 - DNA, 15 bp, Homo sapiens
gtgaaggttaaaatc

SEQ ID NO: 964093 - DNA, 15 bp, Homo sapiens
agtgaaggttaaaat

SEQ ID NO: 964094 - DNA, 15 bp, Homo sapiens
gagtgaaggttaaaa

SEQ ID NO: 964095 - DNA, 15 bp, Homo sapiens
ggagtgaaggttaaa

SEQ ID NO: 964096 - DNA, 15 bp, Homo sapiens
tggagtgaaggttaa

SEQ ID NO: 964097 - DNA, 15 bp, Homo sapiens
ttggagtgaaggtta

SEQ ID NO: 964098 - DNA, 15 bp, Homo sapiens
attggagtgaaggtt

SEQ ID NO: 964099 - DNA, 15 bp, Homo sapiens
gattggagtgaaggt

SEQ ID NO: 964100 - DNA, 15 bp, Homo sapiens
ggattggagtgaagg

SEQ ID NO: 964101 - DNA, 15 bp, Homo sapiens
aggattggagtgaag

SEQ ID NO: 964102 - DNA, 15 bp, Homo sapiens
caggattggagtgaa

SEQ ID NO: 964103 - DNA, 15 bp, Homo sapiens
ccaggattggagtga

SEQ ID NO: 964104 - DNA, 15 bp, Homo sapiens
cccaggattggagtg

SEQ ID NO: 964105 - DNA, 15 bp, Homo sapiens
ccccaggattggagt

SEQ ID NO: 964106 - DNA, 15 bp, Homo sapiens
gccccaggattggag

SEQ ID NO: 964107 - DNA, 15 bp, Homo sapiens
tgccccaggattgga

SEQ ID NO: 964108 - DNA, 15 bp, Homo sapiens
gtgccccaggattgg

SEQ ID NO: 964109 - DNA, 15 bp, Homo sapiens
ggtgccccaggattg

SEQ ID NO: 964110 - DNA, 15 bp, Homo sapiens
aggtgccccaggatt

SEQ ID NO: 964111 - DNA, 15 bp, Homo sapiens
gaggtgccccaggat

SEQ ID NO: 964112 - DNA, 15 bp, Homo sapiens
agaggtgccccagga

SEQ ID NO: 964113 - DNA, 15 bp, Homo sapiens
cagaggtgccccagg

SEQ ID NO: 964114 - DNA, 15 bp, Homo sapiens
acagaggtgccccag

SEQ ID NO: 964115 - DNA, 15 bp, Homo sapiens
tacagaggtgcccca

SEQ ID NO: 964116 - DNA, 15 bp, Homo sapiens
ctacagaggtgcccc

SEQ ID NO: 964117 - DNA, 15 bp, Homo sapiens
gctacagaggtgccc

SEQ ID NO: 964118 - DNA, 15 bp, Homo sapiens
agctacagaggtgcc

SEQ ID NO: 964119 - DNA, 15 bp, Homo sapiens
aagctacagaggtgc

SEQ ID NO: 964120 - DNA, 15 bp, Homo sapiens
caagctacagaggtg

SEQ ID NO: 964121 - DNA, 15 bp, Homo sapiens
ccaagctacagaggt

SEQ ID NO: 964122 - DNA, 15 bp, Homo sapiens
cccaagctacagagg

SEQ ID NO: 964123 - DNA, 15 bp, Homo sapiens
gcccaagctacagag

SEQ ID NO: 964124 - DNA, 15 bp, Homo sapiens
tgcccaagctacaga

SEQ ID NO: 964125 - DNA, 15 bp, Homo sapiens
atgcccaagctacag

SEQ ID NO: 964126 - DNA, 15 bp, Homo sapiens
catgcccaagctaca

SEQ ID NO: 964127 - DNA, 15 bp, Homo sapiens
tcatgcccaagctac

SEQ ID NO: 964128 - DNA, 15 bp, Homo sapiens
gtcatgcccaagcta

SEQ ID NO: 964129 - DNA, 15 bp, Homo sapiens
ggtcatgcccaagct

SEQ ID NO: 964130 - DNA, 15 bp, Homo sapiens
aggtcatgcccaagc

SEQ ID NO: 964131 - DNA, 15 bp, Homo sapiens
caggtcatgcccaag

SEQ ID NO: 964132 - DNA, 15 bp, Homo sapiens
ccaggtcatgcccaa

SEQ ID NO: 964133 - DNA, 15 bp, Homo sapiens
tccaggtcatgccca

SEQ ID NO: 964134 - DNA, 15 bp, Homo sapiens
gtccaggtcatgccc

SEQ ID NO: 964135 - DNA, 15 bp, Homo sapiens
tgtccaggtcatgcc

SEQ ID NO: 964136 - DNA, 15 bp, Homo sapiens
gtgtccaggtcatgc

SEQ ID NO: 964137 - DNA, 15 bp, Homo sapiens
tgtgtccaggtcatg

SEQ ID NO: 964138 - DNA, 15 bp, Homo sapiens
ttgtgtccaggtcat

SEQ ID NO: 964139 - DNA, 15 bp, Homo sapiens
cttgtgtccaggtca

SEQ ID NO: 964140 - DNA, 15 bp, Homo sapiens
gcttgtgtccaggtc

SEQ ID NO: 964141 - DNA, 15 bp, Homo sapiens
agcttgtgtccaggt

SEQ ID NO: 964142 - DNA, 15 bp, Homo sapiens
aagcttgtgtccagg

SEQ ID NO: 964143 - DNA, 15 bp, Homo sapiens
aaagcttgtgtccag

SEQ ID NO: 964144 - DNA, 15 bp, Homo sapiens
caaagcttgtgtcca

SEQ ID NO: 964145 - DNA, 15 bp, Homo sapiens
acaaagcttgtgtcc

SEQ ID NO: 964146 - DNA, 15 bp, Homo sapiens
cacaaagcttgtgtc

SEQ ID NO: 964147 - DNA, 15 bp, Homo sapiens
acacaaagcttgtgt

SEQ ID NO: 964148 - DNA, 15 bp, Homo sapiens
tacacaaagcttgtg

SEQ ID NO: 964149 - DNA, 15 bp, Homo sapiens
ttacacaaagcttgt

SEQ ID NO: 964150 - DNA, 15 bp, Homo sapiens
cttacacaaagcttg

SEQ ID NO: 964151 - DNA, 15 bp, Homo sapiens
gcttacacaaagctt

SEQ ID NO: 964152 - DNA, 15 bp, Homo sapiens
ggcttacacaaagct

SEQ ID NO: 964153 - DNA, 15 bp, Homo sapiens
aggcttacacaaagc

SEQ ID NO: 964154 - DNA, 15 bp, Homo sapiens
aaggcttacacaaag

SEQ ID NO: 964155 - DNA, 15 bp, Homo sapiens
gaaggcttacacaaa

SEQ ID NO: 964156 - DNA, 15 bp, Homo sapiens
agaaggcttacacaa

SEQ ID NO: 964157 - DNA, 15 bp, Homo sapiens
aagaaggcttacaca

SEQ ID NO: 964158 - DNA, 15 bp, Homo sapiens
aaagaaggcttacac

SEQ ID NO: 964159 - DNA, 15 bp, Homo sapiens
caaagaaggcttaca

SEQ ID NO: 964160 - DNA, 15 bp, Homo sapiens
ccaaagaaggcttac

SEQ ID NO: 964161 - DNA, 15 bp, Homo sapiens
tccaaagaaggctta

SEQ ID NO: 964162 - DNA, 15 bp, Homo sapiens
gtccaaagaaggctt

SEQ ID NO: 964163 - DNA, 15 bp, Homo sapiens
agtccaaagaaggct

SEQ ID NO: 964164 - DNA, 15 bp, Homo sapiens
aagtccaaagaaggc

SEQ ID NO: 964165 - DNA, 15 bp, Homo sapiens
gaagtccaaagaagg

SEQ ID NO: 964166 - DNA, 15 bp, Homo sapiens
tgaagtccaaagaag

SEQ ID NO: 964167 - DNA, 15 bp, Homo sapiens
atgaagtccaaagaa

SEQ ID NO: 964168 - DNA, 15 bp, Homo sapiens
gatgaagtccaaaga

SEQ ID NO: 964169 - DNA, 15 bp, Homo sapiens
ggatgaagtccaaag

SEQ ID NO: 964170 - DNA, 15 bp, Homo sapiens
tggatgaagtccaaa

SEQ ID NO: 964171 - DNA, 15 bp, Homo sapiens
atggatgaagtccaa

SEQ ID NO: 964172 - DNA, 15 bp, Homo sapiens
aatggatgaagtcca

SEQ ID NO: 964173 - DNA, 15 bp, Homo sapiens
gaatggatgaagtcc

SEQ ID NO: 964174 - DNA, 15 bp, Homo sapiens
ggaatggatgaagtc

SEQ ID NO: 964175 - DNA, 15 bp, Homo sapiens
aggaatggatgaagt

SEQ ID NO: 964176 - DNA, 15 bp, Homo sapiens
gaggaatggatgaag

SEQ ID NO: 964177 - DNA, 15 bp, Homo sapiens
tgaggaatggatgaa

SEQ ID NO: 964178 - DNA, 15 bp, Homo sapiens
ttgaggaatggatga

SEQ ID NO: 964179 - DNA, 15 bp, Homo sapiens
gttgaggaatggatg

SEQ ID NO: 964180 - DNA, 15 bp, Homo sapiens
cgttgaggaatggat

SEQ ID NO: 964181 - DNA, 15 bp, Homo sapiens
ccgttgaggaatgga

SEQ ID NO: 964182 - DNA, 15 bp, Homo sapiens
accgttgaggaatgg

SEQ ID NO: 964183 - DNA, 15 bp, Homo sapiens
caccgttgaggaatg

SEQ ID NO: 964184 - DNA, 15 bp, Homo sapiens
tcaccgttgaggaat

SEQ ID NO: 964185 - DNA, 15 bp, Homo sapiens
gtcaccgttgaggaa

SEQ ID NO: 964186 - DNA, 15 bp, Homo sapiens
tgtcaccgttgagga

SEQ ID NO: 964187 - DNA, 15 bp, Homo sapiens
gtgtcaccgttgagg

SEQ ID NO: 964188 - DNA, 15 bp, Homo sapiens
ggtgtcaccgttgag

SEQ ID NO: 964189 - DNA, 15 bp, Homo sapiens
tggtgtcaccgttga

SEQ ID NO: 964190 - DNA, 15 bp, Homo sapiens
atggtgtcaccgttg

SEQ ID NO: 964191 - DNA, 15 bp, Homo sapiens
catggtgtcaccgtt

SEQ ID NO: 964192 - DNA, 15 bp, Homo sapiens
acatggtgtcaccgt

SEQ ID NO: 964193 - DNA, 15 bp, Homo sapiens
cacatggtgtcaccg

SEQ ID NO: 964194 - DNA, 15 bp, Homo sapiens
ccacatggtgtcacc

SEQ ID NO: 964195 - DNA, 15 bp, Homo sapiens
gccacatggtgtcac

SEQ ID NO: 964196 - DNA, 15 bp, Homo sapiens
tgccacatggtgtca

SEQ ID NO: 964197 - DNA, 15 bp, Homo sapiens
ctgccacatggtgtc

SEQ ID NO: 964198 - DNA, 15 bp, Homo sapiens
actgccacatggtgt

SEQ ID NO: 964199 - DNA, 15 bp, Homo sapiens
cactgccacatggtg

SEQ ID NO: 964200 - DNA, 15 bp, Homo sapiens
acactgccacatggt

SEQ ID NO: 964201 - DNA, 15 bp, Homo sapiens
tacactgccacatgg

SEQ ID NO: 964202 - DNA, 15 bp, Homo sapiens
ttacactgccacatg

SEQ ID NO: 964203 - DNA, 15 bp, Homo sapiens
attacactgccacat

SEQ ID NO: 964204 - DNA, 15 bp, Homo sapiens
tattacactgccaca

SEQ ID NO: 964205 - DNA, 15 bp, Homo sapiens
atattacactgccac

SEQ ID NO: 964206 - DNA, 15 bp, Homo sapiens
tatattacactgcca

SEQ ID NO: 964207 - DNA, 15 bp, Homo sapiens
ttatattacactgcc

SEQ ID NO: 964208 - DNA, 15 bp, Homo sapiens
attatattacactgc

SEQ ID NO: 964209 - DNA, 15 bp, Homo sapiens
cattatattacactg

SEQ ID NO: 964210 - DNA, 15 bp, Homo sapiens
ccattatattacact

SEQ ID NO: 964211 - DNA, 15 bp, Homo sapiens
gccattatattacac

SEQ ID NO: 964212 - DNA, 15 bp, Homo sapiens
tgccattatattaca

SEQ ID NO: 964213 - DNA, 15 bp, Homo sapiens
atgccattatattac

SEQ ID NO: 964214 - DNA, 15 bp, Homo sapiens
gatgccattatatta

SEQ ID NO: 964215 - DNA, 15 bp, Homo sapiens
tgatgccattatatt

SEQ ID NO: 964216 - DNA, 15 bp, Homo sapiens
ctgatgccattatat

SEQ ID NO: 964217 - DNA, 15 bp, Homo sapiens
actgatgccattata

SEQ ID NO: 964218 - DNA, 15 bp, Homo sapiens
cactgatgccattat

SEQ ID NO: 964219 - DNA, 15 bp, Homo sapiens
ccactgatgccatta

SEQ ID NO: 964220 - DNA, 15 bp, Homo sapiens
tccactgatgccatt

SEQ ID NO: 964221 - DNA, 15 bp, Homo sapiens
gtccactgatgccat

SEQ ID NO: 964222 - DNA, 15 bp, Homo sapiens
agtccactgatgcca

SEQ ID NO: 964223 - DNA, 15 bp, Homo sapiens
gagtccactgatgcc

SEQ ID NO: 964224 - DNA, 15 bp, Homo sapiens
tgagtccactgatgc

SEQ ID NO: 964225 - DNA, 15 bp, Homo sapiens
ctgagtccactgatg

SEQ ID NO: 964226 - DNA, 15 bp, Homo sapiens
tctgagtccactgat

SEQ ID NO: 964227 - DNA, 15 bp, Homo sapiens
atctgagtccactga

SEQ ID NO: 964228 - DNA, 15 bp, Homo sapiens
gatctgagtccactg

SEQ ID NO: 964229 - DNA, 15 bp, Homo sapiens
ggatctgagtccact

SEQ ID NO: 964230 - DNA, 15 bp, Homo sapiens
aggatctgagtccac

SEQ ID NO: 964231 - DNA, 15 bp, Homo sapiens
caggatctgagtcca

SEQ ID NO: 964232 - DNA, 15 bp, Homo sapiens
acaggatctgagtcc

SEQ ID NO: 964233 - DNA, 15 bp, Homo sapiens
aacaggatctgagtc

SEQ ID NO: 964234 - DNA, 15 bp, Homo sapiens
gaacaggatctgagt

SEQ ID NO: 964235 - DNA, 15 bp, Homo sapiens
agaacaggatctgag

SEQ ID NO: 964236 - DNA, 15 bp, Homo sapiens
gagaacaggatctga

SEQ ID NO: 964237 - DNA, 15 bp, Homo sapiens
agagaacaggatctg

SEQ ID NO: 964238 - DNA, 15 bp, Homo sapiens
gagagaacaggatct

SEQ ID NO: 964239 - DNA, 15 bp, Homo sapiens
ggagagaacaggatc

SEQ ID NO: 964240 - DNA, 15 bp, Homo sapiens
gggagagaacaggat

SEQ ID NO: 964241 - DNA, 15 bp, Homo sapiens
agggagagaacagga

SEQ ID NO: 964242 - DNA, 15 bp, Homo sapiens
tagggagagaacagg

SEQ ID NO: 964243 - DNA, 15 bp, Homo sapiens
gtagggagagaacag

SEQ ID NO: 964244 - DNA, 15 bp, Homo sapiens
ggtagggagagaaca

SEQ ID NO: 964245 - DNA, 15 bp, Homo sapiens
aggtagggagagaac

SEQ ID NO: 964246 - DNA, 15 bp, Homo sapiens
taggtagggagagaa

SEQ ID NO: 964247 - DNA, 15 bp, Homo sapiens
ctaggtagggagaga

SEQ ID NO: 964248 - DNA, 15 bp, Homo sapiens
tctaggtagggagag

SEQ ID NO: 964249 - DNA, 15 bp, Homo sapiens
ctctaggtagggaga

SEQ ID NO: 964250 - DNA, 15 bp, Homo sapiens
tctctaggtagggag

SEQ ID NO: 964251 - DNA, 15 bp, Homo sapiens
atctctaggtaggga

SEQ ID NO: 964252 - DNA, 15 bp, Homo sapiens
aatctctaggtaggg

SEQ ID NO: 964253 - DNA, 15 bp, Homo sapiens
aaatctctaggtagg

SEQ ID NO: 964254 - DNA, 15 bp, Homo sapiens
aaaatctctaggtag

SEQ ID NO: 964255 - DNA, 15 bp, Homo sapiens
aaaaatctctaggta

SEQ ID NO: 964256 - DNA, 15 bp, Homo sapiens
taaaaatctctaggt

SEQ ID NO: 964257 - DNA, 15 bp, Homo sapiens
ttaaaaatctctagg

SEQ ID NO: 964258 - DNA, 15 bp, Homo sapiens
cttaaaaatctctag

SEQ ID NO: 964259 - DNA, 15 bp, Homo sapiens
tcttaaaaatctcta

SEQ ID NO: 964260 - DNA, 15 bp, Homo sapiens
atcttaaaaatctct

SEQ ID NO: 964261 - DNA, 15 bp, Homo sapiens
aatcttaaaaatctc

SEQ ID NO: 964262 - DNA, 15 bp, Homo sapiens
taatcttaaaaatct

SEQ ID NO: 964263 - DNA, 15 bp, Homo sapiens
ttaatcttaaaaatc

SEQ ID NO: 964264 - DNA, 15 bp, Homo sapiens
cttaatcttaaaaat

SEQ ID NO: 964265 - DNA, 15 bp, Homo sapiens
tcttaatcttaaaaa

SEQ ID NO: 964266 - DNA, 15 bp, Homo sapiens
atcttaatcttaaaa

SEQ ID NO: 964267 - DNA, 15 bp, Homo sapiens
tatcttaatcttaaa

SEQ ID NO: 964268 - DNA, 15 bp, Homo sapiens
atatcttaatcttaa

SEQ ID NO: 964269 - DNA, 15 bp, Homo sapiens
catatcttaatctta

SEQ ID NO: 964270 - DNA, 15 bp, Homo sapiens
acatatcttaatctt

SEQ ID NO: 964271 - DNA, 15 bp, Homo sapiens
tacatatcttaatct

SEQ ID NO: 964272 - DNA, 15 bp, Homo sapiens
ttacatatcttaatc

SEQ ID NO: 964273 - DNA, 15 bp, Homo sapiens
attacatatcttaat

SEQ ID NO: 964274 - DNA, 15 bp, Homo sapiens
aattacatatcttaa

SEQ ID NO: 964275 - DNA, 15 bp, Homo sapiens
gaattacatatctta

SEQ ID NO: 964276 - DNA, 15 bp, Homo sapiens
tgaattacatatctt

SEQ ID NO: 964277 - DNA, 15 bp, Homo sapiens
gtgaattacatatct

SEQ ID NO: 964278 - DNA, 15 bp, Homo sapiens
tgtgaattacatatc

SEQ ID NO: 964279 - DNA, 15 bp, Homo sapiens
ttgtgaattacatat

SEQ ID NO: 964280 - DNA, 15 bp, Homo sapiens
gttgtgaattacata

SEQ ID NO: 964281 - DNA, 15 bp, Homo sapiens
ggttgtgaattacat

SEQ ID NO: 964282 - DNA, 15 bp, Homo sapiens
tggttgtgaattaca

SEQ ID NO: 964283 - DNA, 15 bp, Homo sapiens
atggttgtgaattac

SEQ ID NO: 964284 - DNA, 15 bp, Homo sapiens
tatggttgtgaatta

SEQ ID NO: 964285 - DNA, 15 bp, Homo sapiens
ttatggttgtgaatt

SEQ ID NO: 964286 - DNA, 15 bp, Homo sapiens
tttatggttgtgaat

SEQ ID NO: 964287 - DNA, 15 bp, Homo sapiens
ttttatggttgtgaa

SEQ ID NO: 964288 - DNA, 15 bp, Homo sapiens
attttatggttgtga

SEQ ID NO: 964289 - DNA, 15 bp, Homo sapiens
cattttatggttgtg

SEQ ID NO: 964290 - DNA, 15 bp, Homo sapiens
acattttatggttgt

SEQ ID NO: 964291 - DNA, 15 bp, Homo sapiens
tacattttatggttg

SEQ ID NO: 964292 - DNA, 15 bp, Homo sapiens
gtacattttatggtt

SEQ ID NO: 964293 - DNA, 15 bp, Homo sapiens
ggtacattttatggt

SEQ ID NO: 964294 - DNA, 15 bp, Homo sapiens
tggtacattttatgg

SEQ ID NO: 964295 - DNA, 15 bp, Homo sapiens
gtggtacattttatg

SEQ ID NO: 964296 - DNA, 15 bp, Homo sapiens
ggtggtacattttat

SEQ ID NO: 964297 - DNA, 15 bp, Homo sapiens
aggtggtacatttta

SEQ ID NO: 964298 - DNA, 15 bp, Homo sapiens
aaggtggtacatttt

SEQ ID NO: 964299 - DNA, 15 bp, Homo sapiens
taaggtggtacattt

SEQ ID NO: 964300 - DNA, 15 bp, Homo sapiens
ttaaggtggtacatt

SEQ ID NO: 964301 - DNA, 15 bp, Homo sapiens
tttaaggtggtacat

SEQ ID NO: 964302 - DNA, 15 bp, Homo sapiens
atttaaggtggtaca

SEQ ID NO: 964303 - DNA, 15 bp, Homo sapiens
aatttaaggtggtac

SEQ ID NO: 964304 - DNA, 15 bp, Homo sapiens
caatttaaggtggta

SEQ ID NO: 964305 - DNA, 15 bp, Homo sapiens
acaatttaaggtggt

SEQ ID NO: 964306 - DNA, 15 bp, Homo sapiens
tacaatttaaggtgg

SEQ ID NO: 964307 - DNA, 15 bp, Homo sapiens
gtacaatttaaggtg

SEQ ID NO: 964308 - DNA, 15 bp, Homo sapiens
tgtacaatttaaggt

SEQ ID NO: 964309 - DNA, 15 bp, Homo sapiens
ttgtacaatttaagg

SEQ ID NO: 964310 - DNA, 15 bp, Homo sapiens
attgtacaatttaag

SEQ ID NO: 964311 - DNA, 15 bp, Homo sapiens
aattgtacaatttaa

SEQ ID NO: 964312 - DNA, 15 bp, Homo sapiens
aaattgtacaattta

SEQ ID NO: 964313 - DNA, 15 bp, Homo sapiens
taaattgtacaattt

SEQ ID NO: 964314 - DNA, 15 bp, Homo sapiens
ataaattgtacaatt

SEQ ID NO: 964315 - DNA, 15 bp, Homo sapiens
aataaattgtacaat

SEQ ID NO: 964316 - DNA, 15 bp, Homo sapiens
caataaattgtacaa

SEQ ID NO: 964317 - DNA, 15 bp, Homo sapiens
ccaataaattgtaca

SEQ ID NO: 964318 - DNA, 15 bp, Homo sapiens
accaataaattgtac

SEQ ID NO: 964319 - DNA, 15 bp, Homo sapiens
aaccaataaattgta

SEQ ID NO: 964320 - DNA, 15 bp, Homo sapiens
aaaccaataaattgt

SEQ ID NO: 964321 - DNA, 15 bp, Homo sapiens
aaaaccaataaattg

SEQ ID NO: 964322 - DNA, 15 bp, Homo sapiens
aaaaaccaataaatt

SEQ ID NO: 964323 - DNA, 15 bp, Homo sapiens
gaaaaaccaataaat

SEQ ID NO: 964324 - DNA, 15 bp, Homo sapiens
tgaaaaaccaataaa

SEQ ID NO: 964325 - DNA, 15 bp, Homo sapiens
atgaaaaaccaataa

SEQ ID NO: 964326 - DNA, 15 bp, Homo sapiens
tatgaaaaaccaata

SEQ ID NO: 964327 - DNA, 15 bp, Homo sapiens
gtatgaaaaaccaat

SEQ ID NO: 964328 - DNA, 15 bp, Homo sapiens
tgtatgaaaaaccaa

SEQ ID NO: 964329 - DNA, 15 bp, Homo sapiens
atgtatgaaaaacca

SEQ ID NO: 964330 - DNA, 15 bp, Homo sapiens
aatgtatgaaaaacc

SEQ ID NO: 964331 - DNA, 15 bp, Homo sapiens
gaatgtatgaaaaac

SEQ ID NO: 964332 - DNA, 15 bp, Homo sapiens
tgaatgtatgaaaaa

SEQ ID NO: 964333 - DNA, 15 bp, Homo sapiens
ttgaatgtatgaaaa

SEQ ID NO: 964334 - DNA, 15 bp, Homo sapiens
tttgaatgtatgaaa

SEQ ID NO: 964335 - DNA, 15 bp, Homo sapiens
ttttgaatgtatgaa

SEQ ID NO: 964336 - DNA, 15 bp, Homo sapiens
tttttgaatgtatga

SEQ ID NO: 964337 - DNA, 15 bp, Homo sapiens
ctttttgaatgtatg

SEQ ID NO: 964338 - DNA, 15 bp, Homo sapiens
actttttgaatgtat

SEQ ID NO: 964339 - DNA, 15 bp, Homo sapiens
aactttttgaatgta

SEQ ID NO: 964340 - DNA, 15 bp, Homo sapiens
caactttttgaatgt

SEQ ID NO: 964341 - DNA, 15 bp, Homo sapiens
acaactttttgaatg

SEQ ID NO: 964342 - DNA, 15 bp, Homo sapiens
tacaactttttgaat

SEQ ID NO: 964343 - DNA, 15 bp, Homo sapiens
gtacaactttttgaa

SEQ ID NO: 964344 - DNA, 15 bp, Homo sapiens
tgtacaactttttga

SEQ ID NO: 964345 - DNA, 15 bp, Homo sapiens
ttgtacaactttttg

SEQ ID NO: 964346 - DNA, 15 bp, Homo sapiens
gttgtacaacttttt

SEQ ID NO: 964347 - DNA, 15 bp, Homo sapiens
ggttgtacaactttt

SEQ ID NO: 964348 - DNA, 15 bp, Homo sapiens
tggttgtacaacttt

SEQ ID NO: 964349 - DNA, 15 bp, Homo sapiens
gtggttgtacaactt

SEQ ID NO: 964350 - DNA, 15 bp, Homo sapiens
ggtggttgtacaact

SEQ ID NO: 964351 - DNA, 15 bp, Homo sapiens
tggtggttgtacaac

SEQ ID NO: 964352 - DNA, 15 bp, Homo sapiens
gtggtggttgtacaa

SEQ ID NO: 964353 - DNA, 15 bp, Homo sapiens
ggtggtggttgtaca

SEQ ID NO: 964354 - DNA, 15 bp, Homo sapiens
tggtggtggttgtac

SEQ ID NO: 964355 - DNA, 15 bp, Homo sapiens
atggtggtggttgta

SEQ ID NO: 964356 - DNA, 15 bp, Homo sapiens
aatggtggtggttgt

SEQ ID NO: 964357 - DNA, 15 bp, Homo sapiens
taatggtggtggttg

SEQ ID NO: 964358 - DNA, 15 bp, Homo sapiens
ataatggtggtggtt

SEQ ID NO: 964359 - DNA, 15 bp, Homo sapiens
gataatggtggtggt

SEQ ID NO: 964360 - DNA, 15 bp, Homo sapiens
agataatggtggtgg

SEQ ID NO: 964361 - DNA, 15 bp, Homo sapiens
tagataatggtggtg

SEQ ID NO: 964362 - DNA, 15 bp, Homo sapiens
ttagataatggtggt

SEQ ID NO: 964363 - DNA, 15 bp, Homo sapiens
attagataatggtgg

SEQ ID NO: 964364 - DNA, 15 bp, Homo sapiens
aattagataatggtg

SEQ ID NO: 964365 - DNA, 15 bp, Homo sapiens
gaattagataatggt

SEQ ID NO: 964366 - DNA, 15 bp, Homo sapiens
ggaattagataatgg

SEQ ID NO: 964367 - DNA, 15 bp, Homo sapiens
tggaattagataatg

SEQ ID NO: 964368 - DNA, 15 bp, Homo sapiens
atggaattagataat

SEQ ID NO: 964369 - DNA, 15 bp, Homo sapiens
tatggaattagataa

SEQ ID NO: 964370 - DNA, 15 bp, Homo sapiens
ttatggaattagata

SEQ ID NO: 964371 - DNA, 15 bp, Homo sapiens
gttatggaattagat

SEQ ID NO: 964372 - DNA, 15 bp, Homo sapiens
tgttatggaattaga

SEQ ID NO: 964373 - DNA, 15 bp, Homo sapiens
atgttatggaattag

SEQ ID NO: 964374 - DNA, 15 bp, Homo sapiens
aatgttatggaatta

SEQ ID NO: 964375 - DNA, 15 bp, Homo sapiens
aaatgttatggaatt

SEQ ID NO: 964376 - DNA, 15 bp, Homo sapiens
aaaatgttatggaat

SEQ ID NO: 964377 - DNA, 15 bp, Homo sapiens
gaaaatgttatggaa

SEQ ID NO: 964378 - DNA, 15 bp, Homo sapiens
agaaaatgttatgga

SEQ ID NO: 964379 - DNA, 15 bp, Homo sapiens
aagaaaatgttatgg

SEQ ID NO: 964380 - DNA, 15 bp, Homo sapiens
gaagaaaatgttatg

SEQ ID NO: 964381 - DNA, 15 bp, Homo sapiens
tgaagaaaatgttat

SEQ ID NO: 964382 - DNA, 15 bp, Homo sapiens
gtgaagaaaatgtta

SEQ ID NO: 964383 - DNA, 15 bp, Homo sapiens
ggtgaagaaaatgtt

SEQ ID NO: 964384 - DNA, 15 bp, Homo sapiens
gggtgaagaaaatgt

SEQ ID NO: 964385 - DNA, 15 bp, Homo sapiens
agggtgaagaaaatg

SEQ ID NO: 964386 - DNA, 15 bp, Homo sapiens
tagggtgaagaaaat

SEQ ID NO: 964387 - DNA, 15 bp, Homo sapiens
ctagggtgaagaaaa

SEQ ID NO: 964388 - DNA, 15 bp, Homo sapiens
tctagggtgaagaaa

SEQ ID NO: 964389 - DNA, 15 bp, Homo sapiens
ttctagggtgaagaa

SEQ ID NO: 964390 - DNA, 15 bp, Homo sapiens
tttctagggtgaaga

SEQ ID NO: 964391 - DNA, 15 bp, Homo sapiens
ctttctagggtgaag

SEQ ID NO: 964392 - DNA, 15 bp, Homo sapiens
tctttctagggtgaa

SEQ ID NO: 964393 - DNA, 15 bp, Homo sapiens
ttctttctagggtga

SEQ ID NO: 964394 - DNA, 15 bp, Homo sapiens
tttctttctagggtg

SEQ ID NO: 964395 - DNA, 15 bp, Homo sapiens
gtttctttctagggt

SEQ ID NO: 964396 - DNA, 15 bp, Homo sapiens
ggtttctttctaggg

SEQ ID NO: 964397 - DNA, 15 bp, Homo sapiens
aggtttctttctagg

SEQ ID NO: 964398 - DNA, 15 bp, Homo sapiens
gaggtttctttctag

SEQ ID NO: 964399 - DNA, 15 bp, Homo sapiens
tgaggtttctttcta

SEQ ID NO: 964400 - DNA, 15 bp, Homo sapiens
atgaggtttctttct

SEQ ID NO: 964401 - DNA, 15 bp, Homo sapiens
tatgaggtttctttc

SEQ ID NO: 964402 - DNA, 15 bp, Homo sapiens
gtatgaggtttcttt

SEQ ID NO: 964403 - DNA, 15 bp, Homo sapiens
ggtatgaggtttctt

SEQ ID NO: 964404 - DNA, 15 bp, Homo sapiens
aggtatgaggtttct

SEQ ID NO: 964405 - DNA, 15 bp, Homo sapiens
taggtatgaggtttc

SEQ ID NO: 964406 - DNA, 15 bp, Homo sapiens
ataggtatgaggttt

SEQ ID NO: 964407 - DNA, 15 bp, Homo sapiens
aataggtatgaggtt

SEQ ID NO: 964408 - DNA, 15 bp, Homo sapiens
taataggtatgaggt

SEQ ID NO: 964409 - DNA, 15 bp, Homo sapiens
ctaataggtatgagg

SEQ ID NO: 964410 - DNA, 15 bp, Homo sapiens
gctaataggtatgag

SEQ ID NO: 964411 - DNA, 15 bp, Homo sapiens
tgctaataggtatga

SEQ ID NO: 964412 - DNA, 15 bp, Homo sapiens
ctgctaataggtatg

SEQ ID NO: 964413 - DNA, 15 bp, Homo sapiens
gctgctaataggtat

SEQ ID NO: 964414 - DNA, 15 bp, Homo sapiens
ggctgctaataggta

SEQ ID NO: 964415 - DNA, 15 bp, Homo sapiens
tggctgctaataggt

SEQ ID NO: 964416 - DNA, 15 bp, Homo sapiens
gtggctgctaatagg

SEQ ID NO: 964417 - DNA, 15 bp, Homo sapiens
agtggctgctaatag

SEQ ID NO: 964418 - DNA, 15 bp, Homo sapiens
gagtggctgctaata

SEQ ID NO: 964419 - DNA, 15 bp, Homo sapiens
ggagtggctgctaat

SEQ ID NO: 964420 - DNA, 15 bp, Homo sapiens
gggagtggctgctaa

SEQ ID NO: 964421 - DNA, 15 bp, Homo sapiens
ggggagtggctgcta

SEQ ID NO: 964422 - DNA, 15 bp, Homo sapiens
tggggagtggctgct

SEQ ID NO: 964423 - DNA, 15 bp, Homo sapiens
ttggggagtggctgc

SEQ ID NO: 964424 - DNA, 15 bp, Homo sapiens
tttggggagtggctg

SEQ ID NO: 964425 - DNA, 15 bp, Homo sapiens
gtttggggagtggct

SEQ ID NO: 964426 - DNA, 15 bp, Homo sapiens
agtttggggagtggc

SEQ ID NO: 964427 - DNA, 15 bp, Homo sapiens
gagtttggggagtgg

SEQ ID NO: 964428 - DNA, 15 bp, Homo sapiens
ggagtttggggagtg

SEQ ID NO: 964429 - DNA, 15 bp, Homo sapiens
gggagtttggggagt

SEQ ID NO: 964430 - DNA, 15 bp, Homo sapiens
ggggagtttggggag

SEQ ID NO: 964431 - DNA, 15 bp, Homo sapiens
tggggagtttgggga

SEQ ID NO: 964432 - DNA, 15 bp, Homo sapiens
atggggagtttgggg

SEQ ID NO: 964433 - DNA, 15 bp, Homo sapiens
aatggggagtttggg

SEQ ID NO: 964434 - DNA, 15 bp, Homo sapiens
gaatggggagtttgg

SEQ ID NO: 964435 - DNA, 15 bp, Homo sapiens
agaatggggagtttg

SEQ ID NO: 964436 - DNA, 15 bp, Homo sapiens
gagaatggggagttt

SEQ ID NO: 964437 - DNA, 15 bp, Homo sapiens
ggagaatggggagtt

SEQ ID NO: 964438 - DNA, 15 bp, Homo sapiens
gggagaatggggagt

SEQ ID NO: 964439 - DNA, 15 bp, Homo sapiens
ggggagaatggggag

SEQ ID NO: 964440 - DNA, 15 bp, Homo sapiens
tggggagaatgggga

SEQ ID NO: 964441 - DNA, 15 bp, Homo sapiens
atggggagaatgggg

SEQ ID NO: 964442 - DNA, 15 bp, Homo sapiens
aatggggagaatggg

SEQ ID NO: 964443 - DNA, 15 bp, Homo sapiens
gaatggggagaatgg

SEQ ID NO: 964444 - DNA, 15 bp, Homo sapiens
ggaatggggagaatg

SEQ ID NO: 964445 - DNA, 15 bp, Homo sapiens
gggaatggggagaat

SEQ ID NO: 964446 - DNA, 15 bp, Homo sapiens
ggggaatggggagaa

SEQ ID NO: 964447 - DNA, 15 bp, Homo sapiens
gggggaatggggaga

SEQ ID NO: 964448 - DNA, 15 bp, Homo sapiens
tgggggaatggggag

SEQ ID NO: 964449 - DNA, 15 bp, Homo sapiens
ctgggggaatgggga

SEQ ID NO: 964450 - DNA, 15 bp, Homo sapiens
actgggggaatgggg

SEQ ID NO: 964451 - DNA, 15 bp, Homo sapiens
aactgggggaatggg

SEQ ID NO: 964452 - DNA, 15 bp, Homo sapiens
aaactgggggaatgg

SEQ ID NO: 964453 - DNA, 15 bp, Homo sapiens
gaaactgggggaatg

SEQ ID NO: 964454 - DNA, 15 bp, Homo sapiens
agaaactgggggaat

SEQ ID NO: 964455 - DNA, 15 bp, Homo sapiens
cagaaactgggggaa

SEQ ID NO: 964456 - DNA, 15 bp, Homo sapiens
ccagaaactggggga

SEQ ID NO: 964457 - DNA, 15 bp, Homo sapiens
cccagaaactggggg

SEQ ID NO: 964458 - DNA, 15 bp, Homo sapiens
ccccagaaactgggg

SEQ ID NO: 964459 - DNA, 15 bp, Homo sapiens
tccccagaaactggg

SEQ ID NO: 964460 - DNA, 15 bp, Homo sapiens
gtccccagaaactgg

SEQ ID NO: 964461 - DNA, 15 bp, Homo sapiens
ggtccccagaaactg

SEQ ID NO: 964462 - DNA, 15 bp, Homo sapiens
gggtccccagaaact

SEQ ID NO: 964463 - DNA, 15 bp, Homo sapiens
ggggtccccagaaac

SEQ ID NO: 964464 - DNA, 15 bp, Homo sapiens
aggggtccccagaaa

SEQ ID NO: 964465 - DNA, 15 bp, Homo sapiens
taggggtccccagaa

SEQ ID NO: 964466 - DNA, 15 bp, Homo sapiens
ttaggggtccccaga

SEQ ID NO: 964467 - DNA, 15 bp, Homo sapiens
gttaggggtccccag

SEQ ID NO: 964468 - DNA, 15 bp, Homo sapiens
ggttaggggtcccca

SEQ ID NO: 964469 - DNA, 15 bp, Homo sapiens
aggttaggggtcccc

SEQ ID NO: 964470 - DNA, 15 bp, Homo sapiens
taggttaggggtccc

SEQ ID NO: 964471 - DNA, 15 bp, Homo sapiens
gtaggttaggggtcc

SEQ ID NO: 964472 - DNA, 15 bp, Homo sapiens
agtaggttaggggtc

SEQ ID NO: 964473 - DNA, 15 bp, Homo sapiens
aagtaggttaggggt

SEQ ID NO: 964474 - DNA, 15 bp, Homo sapiens
aaagtaggttagggg

SEQ ID NO: 964475 - DNA, 15 bp, Homo sapiens
aaaagtaggttaggg

SEQ ID NO: 964476 - DNA, 15 bp, Homo sapiens
aaaaagtaggttagg

SEQ ID NO: 964477 - DNA, 15 bp, Homo sapiens
caaaaagtaggttag

SEQ ID NO: 964478 - DNA, 15 bp, Homo sapiens
acaaaaagtaggtta

SEQ ID NO: 964479 - DNA, 15 bp, Homo sapiens
aacaaaaagtaggtt

SEQ ID NO: 964480 - DNA, 15 bp, Homo sapiens
aaacaaaaagtaggt

SEQ ID NO: 964481 - DNA, 15 bp, Homo sapiens
aaaacaaaaagtagg

SEQ ID NO: 964482 - DNA, 15 bp, Homo sapiens
aaaaacaaaaagtag

SEQ ID NO: 964483 - DNA, 15 bp, Homo sapiens
taaaaacaaaaagta

SEQ ID NO: 964484 - DNA, 15 bp, Homo sapiens
ataaaaacaaaaagt

SEQ ID NO: 964485 - DNA, 15 bp, Homo sapiens
tataaaaacaaaaag

SEQ ID NO: 964486 - DNA, 15 bp, Homo sapiens
ctataaaaacaaaaa

SEQ ID NO: 964487 - DNA, 15 bp, Homo sapiens
tctataaaaacaaaa

SEQ ID NO: 964488 - DNA, 15 bp, Homo sapiens
atctataaaaacaaa

SEQ ID NO: 964489 - DNA, 15 bp, Homo sapiens
aatctataaaaacaa

SEQ ID NO: 964490 - DNA, 15 bp, Homo sapiens
aaatctataaaaaca

SEQ ID NO: 964491 - DNA, 15 bp, Homo sapiens
caaatctataaaaac

SEQ ID NO: 964492 - DNA, 15 bp, Homo sapiens
gcaaatctataaaaa

SEQ ID NO: 964493 - DNA, 15 bp, Homo sapiens
ggcaaatctataaaa

SEQ ID NO: 964494 - DNA, 15 bp, Homo sapiens
aggcaaatctataaa

SEQ ID NO: 964495 - DNA, 15 bp, Homo sapiens
taggcaaatctataa

SEQ ID NO: 964496 - DNA, 15 bp, Homo sapiens
ataggcaaatctata

SEQ ID NO: 964497 - DNA, 15 bp, Homo sapiens
aataggcaaatctat

SEQ ID NO: 964498 - DNA, 15 bp, Homo sapiens
gaataggcaaatcta

SEQ ID NO: 964499 - DNA, 15 bp, Homo sapiens
agaataggcaaatct

SEQ ID NO: 964500 - DNA, 15 bp, Homo sapiens
cagaataggcaaatc

SEQ ID NO: 964501 - DNA, 15 bp, Homo sapiens
ccagaataggcaaat

SEQ ID NO: 964502 - DNA, 15 bp, Homo sapiens
tccagaataggcaaa

SEQ ID NO: 964503 - DNA, 15 bp, Homo sapiens
gtccagaataggcaa

SEQ ID NO: 964504 - DNA, 15 bp, Homo sapiens
tgtccagaataggca

SEQ ID NO: 964505 - DNA, 15 bp, Homo sapiens
atgtccagaataggc

SEQ ID NO: 964506 - DNA, 15 bp, Homo sapiens
aatgtccagaatagg

SEQ ID NO: 964507 - DNA, 15 bp, Homo sapiens
aaatgtccagaatag

SEQ ID NO: 964508 - DNA, 15 bp, Homo sapiens
aaaatgtccagaata

SEQ ID NO: 964509 - DNA, 15 bp, Homo sapiens
taaaatgtccagaat

SEQ ID NO: 964510 - DNA, 15 bp, Homo sapiens
ataaaatgtccagaa

SEQ ID NO: 964511 - DNA, 15 bp, Homo sapiens
tataaaatgtccaga

SEQ ID NO: 964512 - DNA, 15 bp, Homo sapiens
atataaaatgtccag

SEQ ID NO: 964513 - DNA, 15 bp, Homo sapiens
tatataaaatgtcca

SEQ ID NO: 964514 - DNA, 15 bp, Homo sapiens
ttatataaaatgtcc

SEQ ID NO: 964515 - DNA, 15 bp, Homo sapiens
tttatataaaatgtc

SEQ ID NO: 964516 - DNA, 15 bp, Homo sapiens
atttatataaaatgt

SEQ ID NO: 964517 - DNA, 15 bp, Homo sapiens
catttatataaaatg

SEQ ID NO: 964518 - DNA, 15 bp, Homo sapiens
ccatttatataaaat

SEQ ID NO: 964519 - DNA, 15 bp, Homo sapiens
tccatttatataaaa

SEQ ID NO: 964520 - DNA, 15 bp, Homo sapiens
ttccatttatataaa

SEQ ID NO: 964521 - DNA, 15 bp, Homo sapiens
cttccatttatataa

SEQ ID NO: 964522 - DNA, 15 bp, Homo sapiens
gcttccatttatata

SEQ ID NO: 964523 - DNA, 15 bp, Homo sapiens
ggcttccatttatat

SEQ ID NO: 964524 - DNA, 15 bp, Homo sapiens
aggcttccatttata

SEQ ID NO: 964525 - DNA, 15 bp, Homo sapiens
taggcttccatttat

SEQ ID NO: 964526 - DNA, 15 bp, Homo sapiens
gtaggcttccattta

SEQ ID NO: 964527 - DNA, 15 bp, Homo sapiens
tgtaggcttccattt

SEQ ID NO: 964528 - DNA, 15 bp, Homo sapiens
ttgtaggcttccatt

SEQ ID NO: 964529 - DNA, 15 bp, Homo sapiens
attgtaggcttccat

SEQ ID NO: 964530 - DNA, 15 bp, Homo sapiens
gattgtaggcttcca

SEQ ID NO: 964531 - DNA, 15 bp, Homo sapiens
agattgtaggcttcc

SEQ ID NO: 964532 - DNA, 15 bp, Homo sapiens
tagattgtaggcttc

SEQ ID NO: 964533 - DNA, 15 bp, Homo sapiens
atagattgtaggctt

SEQ ID NO: 964534 - DNA, 15 bp, Homo sapiens
catagattgtaggct

SEQ ID NO: 964535 - DNA, 15 bp, Homo sapiens
ccatagattgtaggc

SEQ ID NO: 964536 - DNA, 15 bp, Homo sapiens
gccatagattgtagg

SEQ ID NO: 964537 - DNA, 15 bp, Homo sapiens
ggccatagattgtag

SEQ ID NO: 964538 - DNA, 15 bp, Homo sapiens
aggccatagattgta

SEQ ID NO: 964539 - DNA, 15 bp, Homo sapiens
aaggccatagattgt

SEQ ID NO: 964540 - DNA, 15 bp, Homo sapiens
aaaggccatagattg

SEQ ID NO: 964541 - DNA, 15 bp, Homo sapiens
aaaaggccatagatt

SEQ ID NO: 964542 - DNA, 15 bp, Homo sapiens
caaaaggccatagat

SEQ ID NO: 964543 - DNA, 15 bp, Homo sapiens
acaaaaggccataga

SEQ ID NO: 964544 - DNA, 15 bp, Homo sapiens
cacaaaaggccatag

SEQ ID NO: 964545 - DNA, 15 bp, Homo sapiens
acacaaaaggccata

SEQ ID NO: 964546 - DNA, 15 bp, Homo sapiens
gacacaaaaggccat

SEQ ID NO: 964547 - DNA, 15 bp, Homo sapiens
agacacaaaaggcca

SEQ ID NO: 964548 - DNA, 15 bp, Homo sapiens
cagacacaaaaggcc

SEQ ID NO: 964549 - DNA, 15 bp, Homo sapiens
ccagacacaaaaggc

SEQ ID NO: 964550 - DNA, 15 bp, Homo sapiens
gccagacacaaaagg

SEQ ID NO: 964551 - DNA, 15 bp, Homo sapiens
agccagacacaaaag

SEQ ID NO: 964552 - DNA, 15 bp, Homo sapiens
gagccagacacaaaa

SEQ ID NO: 964553 - DNA, 15 bp, Homo sapiens
ggagccagacacaaa

SEQ ID NO: 964554 - DNA, 15 bp, Homo sapiens
aggagccagacacaa

SEQ ID NO: 964555 - DNA, 15 bp, Homo sapiens
aaggagccagacaca

SEQ ID NO: 964556 - DNA, 15 bp, Homo sapiens
aaaggagccagacac

SEQ ID NO: 964557 - DNA, 15 bp, Homo sapiens
aaaaggagccagaca

SEQ ID NO: 964558 - DNA, 15 bp, Homo sapiens
taaaaggagccagac

SEQ ID NO: 964559 - DNA, 15 bp, Homo sapiens
gtaaaaggagccaga

SEQ ID NO: 964560 - DNA, 15 bp, Homo sapiens
agtaaaaggagccag

SEQ ID NO: 964561 - DNA, 15 bp, Homo sapiens
aagtaaaaggagcca

SEQ ID NO: 964562 - DNA, 15 bp, Homo sapiens
taagtaaaaggagcc

SEQ ID NO: 964563 - DNA, 15 bp, Homo sapiens
ctaagtaaaaggagc

SEQ ID NO: 964564 - DNA, 15 bp, Homo sapiens
actaagtaaaaggag

SEQ ID NO: 964565 - DNA, 15 bp, Homo sapiens
tactaagtaaaagga

SEQ ID NO: 964566 - DNA, 15 bp, Homo sapiens
atactaagtaaaagg

SEQ ID NO: 964567 - DNA, 15 bp, Homo sapiens
catactaagtaaaag

SEQ ID NO: 964568 - DNA, 15 bp, Homo sapiens
tcatactaagtaaaa

SEQ ID NO: 964569 - DNA, 15 bp, Homo sapiens
atcatactaagtaaa

SEQ ID NO: 964570 - DNA, 15 bp, Homo sapiens
gatcatactaagtaa

SEQ ID NO: 964571 - DNA, 15 bp, Homo sapiens
tgatcatactaagta

SEQ ID NO: 964572 - DNA, 15 bp, Homo sapiens
ttgatcatactaagt

SEQ ID NO: 964573 - DNA, 15 bp, Homo sapiens
cttgatcatactaag

SEQ ID NO: 964574 - DNA, 15 bp, Homo sapiens
ccttgatcatactaa

SEQ ID NO: 964575 - DNA, 15 bp, Homo sapiens
accttgatcatacta

SEQ ID NO: 964576 - DNA, 15 bp, Homo sapiens
aaccttgatcatact

SEQ ID NO: 964577 - DNA, 15 bp, Homo sapiens
gaaccttgatcatac

SEQ ID NO: 964578 - DNA, 15 bp, Homo sapiens
tgaaccttgatcata

SEQ ID NO: 964579 - DNA, 15 bp, Homo sapiens
atgaaccttgatcat

SEQ ID NO: 964580 - DNA, 15 bp, Homo sapiens
gatgaaccttgatca

SEQ ID NO: 964581 - DNA, 15 bp, Homo sapiens
ggatgaaccttgatc

SEQ ID NO: 964582 - DNA, 15 bp, Homo sapiens
tggatgaaccttgat

SEQ ID NO: 964583 - DNA, 15 bp, Homo sapiens
ttggatgaaccttga

SEQ ID NO: 964584 - DNA, 15 bp, Homo sapiens
cttggatgaaccttg

SEQ ID NO: 964585 - DNA, 15 bp, Homo sapiens
acttggatgaacctt

SEQ ID NO: 964586 - DNA, 15 bp, Homo sapiens
aacttggatgaacct

SEQ ID NO: 964587 - DNA, 15 bp, Homo sapiens
caacttggatgaacc

SEQ ID NO: 964588 - DNA, 15 bp, Homo sapiens
acaacttggatgaac

SEQ ID NO: 964589 - DNA, 15 bp, Homo sapiens
tacaacttggatgaa

SEQ ID NO: 964590 - DNA, 15 bp, Homo sapiens
ctacaacttggatga

SEQ ID NO: 964591 - DNA, 15 bp, Homo sapiens
gctacaacttggatg

SEQ ID NO: 964592 - DNA, 15 bp, Homo sapiens
tgctacaacttggat

SEQ ID NO: 964593 - DNA, 15 bp, Homo sapiens
atgctacaacttgga

SEQ ID NO: 964594 - DNA, 15 bp, Homo sapiens
catgctacaacttgg

SEQ ID NO: 964595 - DNA, 15 bp, Homo sapiens
acatgctacaacttg

SEQ ID NO: 964596 - DNA, 15 bp, Homo sapiens
tacatgctacaactt

SEQ ID NO: 964597 - DNA, 15 bp, Homo sapiens
gtacatgctacaact

SEQ ID NO: 964598 - DNA, 15 bp, Homo sapiens
ggtacatgctacaac

SEQ ID NO: 964599 - DNA, 15 bp, Homo sapiens
tggtacatgctacaa

SEQ ID NO: 964600 - DNA, 15 bp, Homo sapiens
ctggtacatgctaca

SEQ ID NO: 964601 - DNA, 15 bp, Homo sapiens
actggtacatgctac

SEQ ID NO: 964602 - DNA, 15 bp, Homo sapiens
tactggtacatgcta

SEQ ID NO: 964603 - DNA, 15 bp, Homo sapiens
gtactggtacatgct

SEQ ID NO: 964604 - DNA, 15 bp, Homo sapiens
agtactggtacatgc

SEQ ID NO: 964605 - DNA, 15 bp, Homo sapiens
aagtactggtacatg

SEQ ID NO: 964606 - DNA, 15 bp, Homo sapiens
gaagtactggtacat

SEQ ID NO: 964607 - DNA, 15 bp, Homo sapiens
tgaagtactggtaca

SEQ ID NO: 964608 - DNA, 15 bp, Homo sapiens
atgaagtactggtac

SEQ ID NO: 964609 - DNA, 15 bp, Homo sapiens
aatgaagtactggta

SEQ ID NO: 964610 - DNA, 15 bp, Homo sapiens
aaatgaagtactggt

SEQ ID NO: 964611 - DNA, 15 bp, Homo sapiens
gaaatgaagtactgg

SEQ ID NO: 964612 - DNA, 15 bp, Homo sapiens
agaaatgaagtactg

SEQ ID NO: 964613 - DNA, 15 bp, Homo sapiens
aagaaatgaagtact

SEQ ID NO: 964614 - DNA, 15 bp, Homo sapiens
aaagaaatgaagtac

SEQ ID NO: 964615 - DNA, 15 bp, Homo sapiens
aaaagaaatgaagta

SEQ ID NO: 964616 - DNA, 15 bp, Homo sapiens
aaaaagaaatgaagt

SEQ ID NO: 964617 - DNA, 15 bp, Homo sapiens
taaaaagaaatgaag

SEQ ID NO: 964618 - DNA, 15 bp, Homo sapiens
ataaaaagaaatgaa

SEQ ID NO: 964619 - DNA, 15 bp, Homo sapiens
cataaaaagaaatga

SEQ ID NO: 964620 - DNA, 15 bp, Homo sapiens
acataaaaagaaatg

SEQ ID NO: 964621 - DNA, 15 bp, Homo sapiens
gacataaaaagaaat

SEQ ID NO: 964622 - DNA, 15 bp, Homo sapiens
agacataaaaagaaa

SEQ ID NO: 964623 - DNA, 15 bp, Homo sapiens
cagacataaaaagaa

SEQ ID NO: 964624 - DNA, 15 bp, Homo sapiens
tcagacataaaaaga

SEQ ID NO: 964625 - DNA, 15 bp, Homo sapiens
atcagacataaaaag

SEQ ID NO: 964626 - DNA, 15 bp, Homo sapiens
aatcagacataaaaa

SEQ ID NO: 964627 - DNA, 15 bp, Homo sapiens
taatcagacataaaa

SEQ ID NO: 964628 - DNA, 15 bp, Homo sapiens
ttaatcagacataaa

SEQ ID NO: 964629 - DNA, 15 bp, Homo sapiens
attaatcagacataa

SEQ ID NO: 964630 - DNA, 15 bp, Homo sapiens
cattaatcagacata

SEQ ID NO: 964631 - DNA, 15 bp, Homo sapiens
acattaatcagacat

SEQ ID NO: 964632 - DNA, 15 bp, Homo sapiens
aacattaatcagaca

SEQ ID NO: 964633 - DNA, 15 bp, Homo sapiens
gaacattaatcagac

SEQ ID NO: 964634 - DNA, 15 bp, Homo sapiens
ggaacattaatcaga

SEQ ID NO: 964635 - DNA, 15 bp, Homo sapiens
tggaacattaatcag

SEQ ID NO: 964636 - DNA, 15 bp, Homo sapiens
ttggaacattaatca

SEQ ID NO: 964637 - DNA, 15 bp, Homo sapiens
attggaacattaatc

SEQ ID NO: 964638 - DNA, 15 bp, Homo sapiens
cattggaacattaat

SEQ ID NO: 964639 - DNA, 15 bp, Homo sapiens
acattggaacattaa

SEQ ID NO: 964640 - DNA, 15 bp, Homo sapiens
tacattggaacatta

SEQ ID NO: 964641 - DNA, 15 bp, Homo sapiens
atacattggaacatt

SEQ ID NO: 964642 - DNA, 15 bp, Homo sapiens
catacattggaacat

SEQ ID NO: 964643 - DNA, 15 bp, Homo sapiens
ccatacattggaaca

SEQ ID NO: 964644 - DNA, 15 bp, Homo sapiens
tccatacattggaac

SEQ ID NO: 964645 - DNA, 15 bp, Homo sapiens
atccatacattggaa

SEQ ID NO: 964646 - DNA, 15 bp, Homo sapiens
tatccatacattgga

SEQ ID NO: 964647 - DNA, 15 bp, Homo sapiens
atatccatacattgg

SEQ ID NO: 964648 - DNA, 15 bp, Homo sapiens
tatatccatacattg

SEQ ID NO: 964649 - DNA, 15 bp, Homo sapiens
gtatatccatacatt

SEQ ID NO: 964650 - DNA, 15 bp, Homo sapiens
ggtatatccatacat

SEQ ID NO: 964651 - DNA, 15 bp, Homo sapiens
tggtatatccataca

SEQ ID NO: 964652 - DNA, 15 bp, Homo sapiens
gtggtatatccatac

SEQ ID NO: 964653 - DNA, 15 bp, Homo sapiens
tgtggtatatccata

SEQ ID NO: 964654 - DNA, 15 bp, Homo sapiens
atgtggtatatccat

SEQ ID NO: 964655 - DNA, 15 bp, Homo sapiens
aatgtggtatatcca

SEQ ID NO: 964656 - DNA, 15 bp, Homo sapiens
aaatgtggtatatcc

SEQ ID NO: 964657 - DNA, 15 bp, Homo sapiens
aaaatgtggtatatc

SEQ ID NO: 964658 - DNA, 15 bp, Homo sapiens
caaaatgtggtatat

SEQ ID NO: 964659 - DNA, 15 bp, Homo sapiens
acaaaatgtggtata

SEQ ID NO: 964660 - DNA, 15 bp, Homo sapiens
aacaaaatgtggtat

SEQ ID NO: 964661 - DNA, 15 bp, Homo sapiens
aaacaaaatgtggta

SEQ ID NO: 964662 - DNA, 15 bp, Homo sapiens
taaacaaaatgtggt

SEQ ID NO: 964663 - DNA, 15 bp, Homo sapiens
ataaacaaaatgtgg

SEQ ID NO: 964664 - DNA, 15 bp, Homo sapiens
gataaacaaaatgtg

SEQ ID NO: 964665 - DNA, 15 bp, Homo sapiens
ggataaacaaaatgt

SEQ ID NO: 964666 - DNA, 15 bp, Homo sapiens
tggataaacaaaatg

SEQ ID NO: 964667 - DNA, 15 bp, Homo sapiens
atggataaacaaaat

SEQ ID NO: 964668 - DNA, 15 bp, Homo sapiens
aatggataaacaaaa

SEQ ID NO: 964669 - DNA, 15 bp, Homo sapiens
gaatggataaacaaa

SEQ ID NO: 964670 - DNA, 15 bp, Homo sapiens
tgaatggataaacaa

SEQ ID NO: 964671 - DNA, 15 bp, Homo sapiens
ttgaatggataaaca

SEQ ID NO: 964672 - DNA, 15 bp, Homo sapiens
tttgaatggataaac

SEQ ID NO: 964673 - DNA, 15 bp, Homo sapiens
ttttgaatggataaa

SEQ ID NO: 964674 - DNA, 15 bp, Homo sapiens
attttgaatggataa

SEQ ID NO: 964675 - DNA, 15 bp, Homo sapiens
aattttgaatggata

SEQ ID NO: 964676 - DNA, 15 bp, Homo sapiens
caattttgaatggat

SEQ ID NO: 964677 - DNA, 15 bp, Homo sapiens
acaattttgaatgga

SEQ ID NO: 964678 - DNA, 15 bp, Homo sapiens
cacaattttgaatgg

SEQ ID NO: 964679 - DNA, 15 bp, Homo sapiens
ccacaattttgaatg

SEQ ID NO: 964680 - DNA, 15 bp, Homo sapiens
cccacaattttgaat

SEQ ID NO: 964681 - DNA, 15 bp, Homo sapiens
ccccacaattttgaa

SEQ ID NO: 964682 - DNA, 15 bp, Homo sapiens
gccccacaattttga

SEQ ID NO: 964683 - DNA, 15 bp, Homo sapiens
tgccccacaattttg

SEQ ID NO: 964684 - DNA, 15 bp, Homo sapiens
atgccccacaatttt

SEQ ID NO: 964685 - DNA, 15 bp, Homo sapiens
aatgccccacaattt

SEQ ID NO: 964686 - DNA, 15 bp, Homo sapiens
aaatgccccacaatt

SEQ ID NO: 964687 - DNA, 15 bp, Homo sapiens
caaatgccccacaat

SEQ ID NO: 964688 - DNA, 15 bp, Homo sapiens
ccaaatgccccacaa

SEQ ID NO: 964689 - DNA, 15 bp, Homo sapiens
tccaaatgccccaca

SEQ ID NO: 964690 - DNA, 15 bp, Homo sapiens
atccaaatgccccac

SEQ ID NO: 964691 - DNA, 15 bp, Homo sapiens
aatccaaatgcccca

SEQ ID NO: 964692 - DNA, 15 bp, Homo sapiens
caatccaaatgcccc

SEQ ID NO: 964693 - DNA, 15 bp, Homo sapiens
acaatccaaatgccc

SEQ ID NO: 964694 - DNA, 15 bp, Homo sapiens
aacaatccaaatgcc

SEQ ID NO: 964695 - DNA, 15 bp, Homo sapiens
gaacaatccaaatgc

SEQ ID NO: 964696 - DNA, 15 bp, Homo sapiens
ggaacaatccaaatg

SEQ ID NO: 964697 - DNA, 15 bp, Homo sapiens
gggaacaatccaaat

SEQ ID NO: 964698 - DNA, 15 bp, Homo sapiens
tgggaacaatccaaa

SEQ ID NO: 964699 - DNA, 15 bp, Homo sapiens
atgggaacaatccaa

SEQ ID NO: 964700 - DNA, 15 bp, Homo sapiens
aatgggaacaatcca

SEQ ID NO: 964701 - DNA, 15 bp, Homo sapiens
aaatgggaacaatcc

SEQ ID NO: 964702 - DNA, 15 bp, Homo sapiens
aaaatgggaacaatc

SEQ ID NO: 964703 - DNA, 15 bp, Homo sapiens
aaaaatgggaacaat

SEQ ID NO: 964704 - DNA, 15 bp, Homo sapiens
aaaaaatgggaacaa

SEQ ID NO: 964705 - DNA, 15 bp, Homo sapiens
aaaaaaatgggaaca

SEQ ID NO: 964706 - DNA, 15 bp, Homo sapiens
aaaaaaaatgggaac

SEQ ID NO: 964707 - DNA, 15 bp, Homo sapiens
caaaaaaaatgggaa

SEQ ID NO: 964708 - DNA, 15 bp, Homo sapiens
gcaaaaaaaatggga

SEQ ID NO: 964709 - DNA, 15 bp, Homo sapiens
agcaaaaaaaatggg

SEQ ID NO: 964710 - DNA, 15 bp, Homo sapiens
cagcaaaaaaaatgg

SEQ ID NO: 964711 - DNA, 15 bp, Homo sapiens
acagcaaaaaaaatg

SEQ ID NO: 964712 - DNA, 15 bp, Homo sapiens
gacagcaaaaaaaat

SEQ ID NO: 964713 - DNA, 15 bp, Homo sapiens
tgacagcaaaaaaaa

SEQ ID NO: 964714 - DNA, 15 bp, Homo sapiens
atgacagcaaaaaaa

SEQ ID NO: 964715 - DNA, 15 bp, Homo sapiens
tatgacagcaaaaaa

SEQ ID NO: 964716 - DNA, 15 bp, Homo sapiens
ttatgacagcaaaaa

SEQ ID NO: 964717 - DNA, 15 bp, Homo sapiens
tttatgacagcaaaa

SEQ ID NO: 964718 - DNA, 15 bp, Homo sapiens
atttatgacagcaaa

SEQ ID NO: 964719 - DNA, 15 bp, Homo sapiens
tatttatgacagcaa

SEQ ID NO: 964720 - DNA, 15 bp, Homo sapiens
ttatttatgacagca

SEQ ID NO: 964721 - DNA, 15 bp, Homo sapiens
attatttatgacagc

SEQ ID NO: 964722 - DNA, 15 bp, Homo sapiens
cattatttatgacag

SEQ ID NO: 964723 - DNA, 15 bp, Homo sapiens
gcattatttatgaca

SEQ ID NO: 964724 - DNA, 15 bp, Homo sapiens
agcattatttatgac

SEQ ID NO: 964725 - DNA, 15 bp, Homo sapiens
cagcattatttatga

SEQ ID NO: 964726 - DNA, 15 bp, Homo sapiens
gcagcattatttatg

SEQ ID NO: 964727 - DNA, 15 bp, Homo sapiens
agcagcattatttat

SEQ ID NO: 964728 - DNA, 15 bp, Homo sapiens
tagcagcattattta

SEQ ID NO: 964729 - DNA, 15 bp, Homo sapiens
ttagcagcattattt

SEQ ID NO: 964730 - DNA, 15 bp, Homo sapiens
cttagcagcattatt

SEQ ID NO: 964731 - DNA, 15 bp, Homo sapiens
acttagcagcattat

SEQ ID NO: 964732 - DNA, 15 bp, Homo sapiens
aacttagcagcatta

SEQ ID NO: 964733 - DNA, 15 bp, Homo sapiens
aaacttagcagcatt

SEQ ID NO: 964734 - DNA, 15 bp, Homo sapiens
aaaacttagcagcat

SEQ ID NO: 964735 - DNA, 15 bp, Homo sapiens
aaaaacttagcagca

SEQ ID NO: 964736 - DNA, 15 bp, Homo sapiens
caaaaacttagcagc

SEQ ID NO: 964737 - DNA, 15 bp, Homo sapiens
acaaaaacttagcag

SEQ ID NO: 964738 - DNA, 15 bp, Homo sapiens
tacaaaaacttagca

SEQ ID NO: 964739 - DNA, 15 bp, Homo sapiens
atacaaaaacttagc

SEQ ID NO: 964740 - DNA, 15 bp, Homo sapiens
catacaaaaacttag

SEQ ID NO: 964741 - DNA, 15 bp, Homo sapiens
tcatacaaaaactta

SEQ ID NO: 964742 - DNA, 15 bp, Homo sapiens
ttcatacaaaaactt

SEQ ID NO: 964743 - DNA, 15 bp, Homo sapiens
gttcatacaaaaact

SEQ ID NO: 964744 - DNA, 15 bp, Homo sapiens
cgttcatacaaaaac

SEQ ID NO: 964745 - DNA, 15 bp, Homo sapiens
acgttcatacaaaaa

SEQ ID NO: 964746 - DNA, 15 bp, Homo sapiens
tacgttcatacaaaa

SEQ ID NO: 964747 - DNA, 15 bp, Homo sapiens
atacgttcatacaaa

SEQ ID NO: 964748 - DNA, 15 bp, Homo sapiens
catacgttcatacaa

SEQ ID NO: 964749 - DNA, 15 bp, Homo sapiens
acatacgttcataca

SEQ ID NO: 964750 - DNA, 15 bp, Homo sapiens
aacatacgttcatac

SEQ ID NO: 964751 - DNA, 15 bp, Homo sapiens
aaacatacgttcata

SEQ ID NO: 964752 - DNA, 15 bp, Homo sapiens
aaaacatacgttcat

SEQ ID NO: 964753 - DNA, 15 bp, Homo sapiens
gaaaacatacgttca

SEQ ID NO: 964754 - DNA, 15 bp, Homo sapiens
tgaaaacatacgttc

SEQ ID NO: 964755 - DNA, 15 bp, Homo sapiens
ttgaaaacatacgtt

SEQ ID NO: 964756 - DNA, 15 bp, Homo sapiens
attgaaaacatacgt

SEQ ID NO: 964757 - DNA, 15 bp, Homo sapiens
aattgaaaacatacg

SEQ ID NO: 964758 - DNA, 15 bp, Homo sapiens
gaattgaaaacatac

SEQ ID NO: 964759 - DNA, 15 bp, Homo sapiens
agaattgaaaacata

SEQ ID NO: 964760 - DNA, 15 bp, Homo sapiens
gagaattgaaaacat

SEQ ID NO: 964761 - DNA, 15 bp, Homo sapiens
agagaattgaaaaca

SEQ ID NO: 964762 - DNA, 15 bp, Homo sapiens
aagagaattgaaaac

SEQ ID NO: 964763 - DNA, 15 bp, Homo sapiens
caagagaattgaaaa

SEQ ID NO: 964764 - DNA, 15 bp, Homo sapiens
ccaagagaattgaaa

SEQ ID NO: 964765 - DNA, 15 bp, Homo sapiens
cccaagagaattgaa

SEQ ID NO: 964766 - DNA, 15 bp, Homo sapiens
acccaagagaattga

SEQ ID NO: 964767 - DNA, 15 bp, Homo sapiens
tacccaagagaattg

SEQ ID NO: 964768 - DNA, 15 bp, Homo sapiens
atacccaagagaatt

SEQ ID NO: 964769 - DNA, 15 bp, Homo sapiens
tatacccaagagaat

SEQ ID NO: 964770 - DNA, 15 bp, Homo sapiens
atatacccaagagaa

SEQ ID NO: 964771 - DNA, 15 bp, Homo sapiens
tatatacccaagaga

SEQ ID NO: 964772 - DNA, 15 bp, Homo sapiens
atatatacccaagag

SEQ ID NO: 964773 - DNA, 15 bp, Homo sapiens
catatatacccaaga

SEQ ID NO: 964774 - DNA, 15 bp, Homo sapiens
acatatatacccaag

SEQ ID NO: 964775 - DNA, 15 bp, Homo sapiens
tacatatatacccaa

SEQ ID NO: 964776 - DNA, 15 bp, Homo sapiens
ttacatatataccca

SEQ ID NO: 964777 - DNA, 15 bp, Homo sapiens
tttacatatataccc

SEQ ID NO: 964778 - DNA, 15 bp, Homo sapiens
ttttacatatatacc

SEQ ID NO: 964779 - DNA, 15 bp, Homo sapiens
cttttacatatatac

SEQ ID NO: 964780 - DNA, 15 bp, Homo sapiens
gcttttacatatata

SEQ ID NO: 964781 - DNA, 15 bp, Homo sapiens
tgcttttacatatat

SEQ ID NO: 964782 - DNA, 15 bp, Homo sapiens
ctgcttttacatata

SEQ ID NO: 964783 - DNA, 15 bp, Homo sapiens
tctgcttttacatat

SEQ ID NO: 964784 - DNA, 15 bp, Homo sapiens
ttctgcttttacata

SEQ ID NO: 964785 - DNA, 15 bp, Homo sapiens
attctgcttttacat

SEQ ID NO: 964786 - DNA, 15 bp, Homo sapiens
aattctgcttttaca

SEQ ID NO: 964787 - DNA, 15 bp, Homo sapiens
caattctgcttttac

SEQ ID NO: 964788 - DNA, 15 bp, Homo sapiens
gcaattctgctttta

SEQ ID NO: 964789 - DNA, 15 bp, Homo sapiens
agcaattctgctttt

SEQ ID NO: 964790 - DNA, 15 bp, Homo sapiens
cagcaattctgcttt

SEQ ID NO: 964791 - DNA, 15 bp, Homo sapiens
ccagcaattctgctt

SEQ ID NO: 964792 - DNA, 15 bp, Homo sapiens
cccagcaattctgct

SEQ ID NO: 964793 - DNA, 15 bp, Homo sapiens
acccagcaattctgc

SEQ ID NO: 964794 - DNA, 15 bp, Homo sapiens
gacccagcaattctg

SEQ ID NO: 964795 - DNA, 15 bp, Homo sapiens
tgacccagcaattct

SEQ ID NO: 964796 - DNA, 15 bp, Homo sapiens
atgacccagcaattc

SEQ ID NO: 964797 - DNA, 15 bp, Homo sapiens
tatgacccagcaatt

SEQ ID NO: 964798 - DNA, 15 bp, Homo sapiens
atatgacccagcaat

SEQ ID NO: 964799 - DNA, 15 bp, Homo sapiens
catatgacccagcaa

SEQ ID NO: 964800 - DNA, 15 bp, Homo sapiens
ccatatgacccagca

SEQ ID NO: 964801 - DNA, 15 bp, Homo sapiens
accatatgacccagc

SEQ ID NO: 964802 - DNA, 15 bp, Homo sapiens
taccatatgacccag

SEQ ID NO: 964803 - DNA, 15 bp, Homo sapiens
ttaccatatgaccca

SEQ ID NO: 964804 - DNA, 15 bp, Homo sapiens
gttaccatatgaccc

SEQ ID NO: 964805 - DNA, 15 bp, Homo sapiens
agttaccatatgacc

SEQ ID NO: 964806 - DNA, 15 bp, Homo sapiens
gagttaccatatgac

SEQ ID NO: 964807 - DNA, 15 bp, Homo sapiens
agagttaccatatga

SEQ ID NO: 964808 - DNA, 15 bp, Homo sapiens
cagagttaccatatg

SEQ ID NO: 964809 - DNA, 15 bp, Homo sapiens
gcagagttaccatat

SEQ ID NO: 964810 - DNA, 15 bp, Homo sapiens
tgcagagttaccata

SEQ ID NO: 964811 - DNA, 15 bp, Homo sapiens
atgcagagttaccat

SEQ ID NO: 964812 - DNA, 15 bp, Homo sapiens
aatgcagagttacca

SEQ ID NO: 964813 - DNA, 15 bp, Homo sapiens
aaatgcagagttacc

SEQ ID NO: 964814 - DNA, 15 bp, Homo sapiens
taaatgcagagttac

SEQ ID NO: 964815 - DNA, 15 bp, Homo sapiens
ttaaatgcagagtta

SEQ ID NO: 964816 - DNA, 15 bp, Homo sapiens
gttaaatgcagagtt

SEQ ID NO: 964817 - DNA, 15 bp, Homo sapiens
agttaaatgcagagt

SEQ ID NO: 964818 - DNA, 15 bp, Homo sapiens
aagttaaatgcagag

SEQ ID NO: 964819 - DNA, 15 bp, Homo sapiens
aaagttaaatgcaga

SEQ ID NO: 964820 - DNA, 15 bp, Homo sapiens
aaaagttaaatgcag

SEQ ID NO: 964821 - DNA, 15 bp, Homo sapiens
aaaaagttaaatgca

SEQ ID NO: 964822 - DNA, 15 bp, Homo sapiens
caaaaagttaaatgc

SEQ ID NO: 964823 - DNA, 15 bp, Homo sapiens
ccaaaaagttaaatg

SEQ ID NO: 964824 - DNA, 15 bp, Homo sapiens
tccaaaaagttaaat

SEQ ID NO: 964825 - DNA, 15 bp, Homo sapiens
ctccaaaaagttaaa

SEQ ID NO: 964826 - DNA, 15 bp, Homo sapiens
actccaaaaagttaa

SEQ ID NO: 964827 - DNA, 15 bp, Homo sapiens
aactccaaaaagtta

SEQ ID NO: 964828 - DNA, 15 bp, Homo sapiens
caactccaaaaagtt

SEQ ID NO: 964829 - DNA, 15 bp, Homo sapiens
tcaactccaaaaagt

SEQ ID NO: 964830 - DNA, 15 bp, Homo sapiens
ttcaactccaaaaag

SEQ ID NO: 964831 - DNA, 15 bp, Homo sapiens
gttcaactccaaaaa

SEQ ID NO: 964832 - DNA, 15 bp, Homo sapiens
tgttcaactccaaaa

SEQ ID NO: 964833 - DNA, 15 bp, Homo sapiens
ttgttcaactccaaa

SEQ ID NO: 964834 - DNA, 15 bp, Homo sapiens
tttgttcaactccaa

SEQ ID NO: 964835 - DNA, 15 bp, Homo sapiens
atttgttcaactcca

SEQ ID NO: 964836 - DNA, 15 bp, Homo sapiens
tatttgttcaactcc

SEQ ID NO: 964837 - DNA, 15 bp, Homo sapiens
gtatttgttcaactc

SEQ ID NO: 964838 - DNA, 15 bp, Homo sapiens
tgtatttgttcaact

SEQ ID NO: 964839 - DNA, 15 bp, Homo sapiens
gtgtatttgttcaac

SEQ ID NO: 964840 - DNA, 15 bp, Homo sapiens
ggtgtatttgttcaa

SEQ ID NO: 964841 - DNA, 15 bp, Homo sapiens
tggtgtatttgttca

SEQ ID NO: 964842 - DNA, 15 bp, Homo sapiens
atggtgtatttgttc

SEQ ID NO: 964843 - DNA, 15 bp, Homo sapiens
catggtgtatttgtt

SEQ ID NO: 964844 - DNA, 15 bp, Homo sapiens
gcatggtgtatttgt

SEQ ID NO: 964845 - DNA, 15 bp, Homo sapiens
ggcatggtgtatttg

SEQ ID NO: 964846 - DNA, 15 bp, Homo sapiens
tggcatggtgtattt

SEQ ID NO: 964847 - DNA, 15 bp, Homo sapiens
ctggcatggtgtatt

SEQ ID NO: 964848 - DNA, 15 bp, Homo sapiens
gctggcatggtgtat

SEQ ID NO: 964849 - DNA, 15 bp, Homo sapiens
tgctggcatggtgta

SEQ ID NO: 964850 - DNA, 15 bp, Homo sapiens
ctgctggcatggtgt

SEQ ID NO: 964851 - DNA, 15 bp, Homo sapiens
actgctggcatggtg

SEQ ID NO: 964852 - DNA, 15 bp, Homo sapiens
cactgctggcatggt

SEQ ID NO: 964853 - DNA, 15 bp, Homo sapiens
tcactgctggcatgg

SEQ ID NO: 964854 - DNA, 15 bp, Homo sapiens
ttcactgctggcatg

SEQ ID NO: 964855 - DNA, 15 bp, Homo sapiens
attcactgctggcat

SEQ ID NO: 964856 - DNA, 15 bp, Homo sapiens
tattcactgctggca

SEQ ID NO: 964857 - DNA, 15 bp, Homo sapiens
ttattcactgctggc

SEQ ID NO: 964858 - DNA, 15 bp, Homo sapiens
cttattcactgctgg

SEQ ID NO: 964859 - DNA, 15 bp, Homo sapiens
ccttattcactgctg

SEQ ID NO: 964860 - DNA, 15 bp, Homo sapiens
tccttattcactgct

SEQ ID NO: 964861 - DNA, 15 bp, Homo sapiens
atccttattcactgc

SEQ ID NO: 964862 - DNA, 15 bp, Homo sapiens
catccttattcactg

SEQ ID NO: 964863 - DNA, 15 bp, Homo sapiens
gcatccttattcact

SEQ ID NO: 964864 - DNA, 15 bp, Homo sapiens
agcatccttattcac

SEQ ID NO: 964865 - DNA, 15 bp, Homo sapiens
cagcatccttattca

SEQ ID NO: 964866 - DNA, 15 bp, Homo sapiens
tcagcatccttattc

SEQ ID NO: 964867 - DNA, 15 bp, Homo sapiens
atcagcatccttatt

SEQ ID NO: 964868 - DNA, 15 bp, Homo sapiens
aatcagcatccttat

SEQ ID NO: 964869 - DNA, 15 bp, Homo sapiens
aaatcagcatcctta

SEQ ID NO: 964870 - DNA, 15 bp, Homo sapiens
gaaatcagcatcctt

SEQ ID NO: 964871 - DNA, 15 bp, Homo sapiens
tgaaatcagcatcct

SEQ ID NO: 964872 - DNA, 15 bp, Homo sapiens
gtgaaatcagcatcc

SEQ ID NO: 964873 - DNA, 15 bp, Homo sapiens
agtgaaatcagcatc

SEQ ID NO: 964874 - DNA, 15 bp, Homo sapiens
tagtgaaatcagcat

SEQ ID NO: 964875 - DNA, 15 bp, Homo sapiens
atagtgaaatcagca

SEQ ID NO: 964876 - DNA, 15 bp, Homo sapiens
tatagtgaaatcagc

SEQ ID NO: 964877 - DNA, 15 bp, Homo sapiens
gtatagtgaaatcag

SEQ ID NO: 964878 - DNA, 15 bp, Homo sapiens
ggtatagtgaaatca

SEQ ID NO: 964879 - DNA, 15 bp, Homo sapiens
aggtatagtgaaatc

SEQ ID NO: 964880 - DNA, 15 bp, Homo sapiens
aaggtatagtgaaat

SEQ ID NO: 964881 - DNA, 15 bp, Homo sapiens
aaaggtatagtgaaa

SEQ ID NO: 964882 - DNA, 15 bp, Homo sapiens
caaaggtatagtgaa

SEQ ID NO: 964883 - DNA, 15 bp, Homo sapiens
gcaaaggtatagtga

SEQ ID NO: 964884 - DNA, 15 bp, Homo sapiens
tgcaaaggtatagtg

SEQ ID NO: 964885 - DNA, 15 bp, Homo sapiens
gtgcaaaggtatagt

SEQ ID NO: 964886 - DNA, 15 bp, Homo sapiens
tgtgcaaaggtatag

SEQ ID NO: 964887 - DNA, 15 bp, Homo sapiens
ttgtgcaaaggtata

SEQ ID NO: 964888 - DNA, 15 bp, Homo sapiens
attgtgcaaaggtat

SEQ ID NO: 964889 - DNA, 15 bp, Homo sapiens
tattgtgcaaaggta

SEQ ID NO: 964890 - DNA, 15 bp, Homo sapiens
ctattgtgcaaaggt

SEQ ID NO: 964891 - DNA, 15 bp, Homo sapiens
actattgtgcaaagg

SEQ ID NO: 964892 - DNA, 15 bp, Homo sapiens
aactattgtgcaaag

SEQ ID NO: 964893 - DNA, 15 bp, Homo sapiens
taactattgtgcaaa

SEQ ID NO: 964894 - DNA, 15 bp, Homo sapiens
ttaactattgtgcaa

SEQ ID NO: 964895 - DNA, 15 bp, Homo sapiens
cttaactattgtgca

SEQ ID NO: 964896 - DNA, 15 bp, Homo sapiens
tcttaactattgtgc

SEQ ID NO: 964897 - DNA, 15 bp, Homo sapiens
ctcttaactattgtg

SEQ ID NO: 964898 - DNA, 15 bp, Homo sapiens
gctcttaactattgt

SEQ ID NO: 964899 - DNA, 15 bp, Homo sapiens
tgctcttaactattg

SEQ ID NO: 964900 - DNA, 15 bp, Homo sapiens
atgctcttaactatt

SEQ ID NO: 964901 - DNA, 15 bp, Homo sapiens
tatgctcttaactat

SEQ ID NO: 964902 - DNA, 15 bp, Homo sapiens
ttatgctcttaacta

SEQ ID NO: 964903 - DNA, 15 bp, Homo sapiens
tttatgctcttaact

SEQ ID NO: 964904 - DNA, 15 bp, Homo sapiens
gtttatgctcttaac

SEQ ID NO: 964905 - DNA, 15 bp, Homo sapiens
tgtttatgctcttaa

SEQ ID NO: 964906 - DNA, 15 bp, Homo sapiens
gtgtttatgctctta

SEQ ID NO: 964907 - DNA, 15 bp, Homo sapiens
agtgtttatgctctt

SEQ ID NO: 964908 - DNA, 15 bp, Homo sapiens
cagtgtttatgctct

SEQ ID NO: 964909 - DNA, 15 bp, Homo sapiens
ccagtgtttatgctc

SEQ ID NO: 964910 - DNA, 15 bp, Homo sapiens
tccagtgtttatgct

SEQ ID NO: 964911 - DNA, 15 bp, Homo sapiens
ttccagtgtttatgc

SEQ ID NO: 964912 - DNA, 15 bp, Homo sapiens
gttccagtgtttatg

SEQ ID NO: 964913 - DNA, 15 bp, Homo sapiens
ggttccagtgtttat

SEQ ID NO: 964914 - DNA, 15 bp, Homo sapiens
tggttccagtgttta

SEQ ID NO: 964915 - DNA, 15 bp, Homo sapiens
ctggttccagtgttt

SEQ ID NO: 964916 - DNA, 15 bp, Homo sapiens
tctggttccagtgtt

SEQ ID NO: 964917 - DNA, 15 bp, Homo sapiens
atctggttccagtgt

SEQ ID NO: 964918 - DNA, 15 bp, Homo sapiens
catctggttccagtg

SEQ ID NO: 964919 - DNA, 15 bp, Homo sapiens
acatctggttccagt

SEQ ID NO: 964920 - DNA, 15 bp, Homo sapiens
gacatctggttccag

SEQ ID NO: 964921 - DNA, 15 bp, Homo sapiens
agacatctggttcca

SEQ ID NO: 964922 - DNA, 15 bp, Homo sapiens
cagacatctggttcc

SEQ ID NO: 964923 - DNA, 15 bp, Homo sapiens
ccagacatctggttc

SEQ ID NO: 964924 - DNA, 15 bp, Homo sapiens
cccagacatctggtt

SEQ ID NO: 964925 - DNA, 15 bp, Homo sapiens
acccagacatctggt

SEQ ID NO: 964926 - DNA, 15 bp, Homo sapiens
aacccagacatctgg

SEQ ID NO: 964927 - DNA, 15 bp, Homo sapiens
gaacccagacatctg

SEQ ID NO: 964928 - DNA, 15 bp, Homo sapiens
cgaacccagacatct

SEQ ID NO: 964929 - DNA, 15 bp, Homo sapiens
tcgaacccagacatc

SEQ ID NO: 964930 - DNA, 15 bp, Homo sapiens
ttcgaacccagacat

SEQ ID NO: 964931 - DNA, 15 bp, Homo sapiens
attcgaacccagaca

SEQ ID NO: 964932 - DNA, 15 bp, Homo sapiens
gattcgaacccagac

SEQ ID NO: 964933 - DNA, 15 bp, Homo sapiens
ggattcgaacccaga

SEQ ID NO: 964934 - DNA, 15 bp, Homo sapiens
gggattcgaacccag

SEQ ID NO: 964935 - DNA, 15 bp, Homo sapiens
tgggattcgaaccca

SEQ ID NO: 964936 - DNA, 15 bp, Homo sapiens
ctgggattcgaaccc

SEQ ID NO: 964937 - DNA, 15 bp, Homo sapiens
gctgggattcgaacc

SEQ ID NO: 964938 - DNA, 15 bp, Homo sapiens
agctgggattcgaac

SEQ ID NO: 964939 - DNA, 15 bp, Homo sapiens
cagctgggattcgaa

SEQ ID NO: 964940 - DNA, 15 bp, Homo sapiens
acagctgggattcga

SEQ ID NO: 964941 - DNA, 15 bp, Homo sapiens
cacagctgggattcg

SEQ ID NO: 964942 - DNA, 15 bp, Homo sapiens
gcacagctgggattc

SEQ ID NO: 964943 - DNA, 15 bp, Homo sapiens
agcacagctgggatt

SEQ ID NO: 964944 - DNA, 15 bp, Homo sapiens
tagcacagctgggat

SEQ ID NO: 964945 - DNA, 15 bp, Homo sapiens
atagcacagctggga

SEQ ID NO: 964946 - DNA, 15 bp, Homo sapiens
gatagcacagctggg

SEQ ID NO: 964947 - DNA, 15 bp, Homo sapiens
agatagcacagctgg

SEQ ID NO: 964948 - DNA, 15 bp, Homo sapiens
gagatagcacagctg

SEQ ID NO: 964949 - DNA, 15 bp, Homo sapiens
ggagatagcacagct

SEQ ID NO: 964950 - DNA, 15 bp, Homo sapiens
aggagatagcacagc

SEQ ID NO: 964951 - DNA, 15 bp, Homo sapiens
taggagatagcacag

SEQ ID NO: 964952 - DNA, 15 bp, Homo sapiens
ctaggagatagcaca

SEQ ID NO: 964953 - DNA, 15 bp, Homo sapiens
gctaggagatagcac

SEQ ID NO: 964954 - DNA, 15 bp, Homo sapiens
agctaggagatagca

SEQ ID NO: 964955 - DNA, 15 bp, Homo sapiens
cagctaggagatagc

SEQ ID NO: 964956 - DNA, 15 bp, Homo sapiens
acagctaggagatag

SEQ ID NO: 964957 - DNA, 15 bp, Homo sapiens
cacagctaggagata

SEQ ID NO: 964958 - DNA, 15 bp, Homo sapiens
acacagctaggagat

SEQ ID NO: 964959 - DNA, 15 bp, Homo sapiens
gacacagctaggaga

SEQ ID NO: 964960 - DNA, 15 bp, Homo sapiens
cgacacagctaggag

SEQ ID NO: 964961 - DNA, 15 bp, Homo sapiens
acgacacagctagga

SEQ ID NO: 964962 - DNA, 15 bp, Homo sapiens
aacgacacagctagg

SEQ ID NO: 964963 - DNA, 15 bp, Homo sapiens
aaacgacacagctag

SEQ ID NO: 964964 - DNA, 15 bp, Homo sapiens
taaacgacacagcta

SEQ ID NO: 964965 - DNA, 15 bp, Homo sapiens
ctaaacgacacagct

SEQ ID NO: 964966 - DNA, 15 bp, Homo sapiens
tctaaacgacacagc

SEQ ID NO: 964967 - DNA, 15 bp, Homo sapiens
gtctaaacgacacag

SEQ ID NO: 964968 - DNA, 15 bp, Homo sapiens
tgtctaaacgacaca

SEQ ID NO: 964969 - DNA, 15 bp, Homo sapiens
ttgtctaaacgacac

SEQ ID NO: 964970 - DNA, 15 bp, Homo sapiens
cttgtctaaacgaca

SEQ ID NO: 964971 - DNA, 15 bp, Homo sapiens
acttgtctaaacgac

SEQ ID NO: 964972 - DNA, 15 bp, Homo sapiens
aacttgtctaaacga

SEQ ID NO: 964973 - DNA, 15 bp, Homo sapiens
taacttgtctaaacg

SEQ ID NO: 964974 - DNA, 15 bp, Homo sapiens
gtaacttgtctaaac

SEQ ID NO: 964975 - DNA, 15 bp, Homo sapiens
agtaacttgtctaaa

SEQ ID NO: 964976 - DNA, 15 bp, Homo sapiens
tagtaacttgtctaa

SEQ ID NO: 964977 - DNA, 15 bp, Homo sapiens
ttagtaacttgtcta

SEQ ID NO: 964978 - DNA, 15 bp, Homo sapiens
tttagtaacttgtct

SEQ ID NO: 964979 - DNA, 15 bp, Homo sapiens
ctttagtaacttgtc

SEQ ID NO: 964980 - DNA, 15 bp, Homo sapiens
gctttagtaacttgt

SEQ ID NO: 964981 - DNA, 15 bp, Homo sapiens
agctttagtaacttg

SEQ ID NO: 964982 - DNA, 15 bp, Homo sapiens
gagctttagtaactt

SEQ ID NO: 964983 - DNA, 15 bp, Homo sapiens
agagctttagtaact

SEQ ID NO: 964984 - DNA, 15 bp, Homo sapiens
cagagctttagtaac

SEQ ID NO: 964985 - DNA, 15 bp, Homo sapiens
acagagctttagtaa

SEQ ID NO: 964986 - DNA, 15 bp, Homo sapiens
cacagagctttagta

SEQ ID NO: 964987 - DNA, 15 bp, Homo sapiens
gcacagagctttagt

SEQ ID NO: 964988 - DNA, 15 bp, Homo sapiens
ggcacagagctttag

SEQ ID NO: 964989 - DNA, 15 bp, Homo sapiens
aggcacagagcttta

SEQ ID NO: 964990 - DNA, 15 bp, Homo sapiens
gaggcacagagcttt

SEQ ID NO: 964991 - DNA, 15 bp, Homo sapiens
tgaggcacagagctt

SEQ ID NO: 964992 - DNA, 15 bp, Homo sapiens
ctgaggcacagagct

SEQ ID NO: 964993 - DNA, 15 bp, Homo sapiens
actgaggcacagagc

SEQ ID NO: 964994 - DNA, 15 bp, Homo sapiens
cactgaggcacagag

SEQ ID NO: 964995 - DNA, 15 bp, Homo sapiens
acactgaggcacaga

SEQ ID NO: 964996 - DNA, 15 bp, Homo sapiens
gacactgaggcacag

SEQ ID NO: 964997 - DNA, 15 bp, Homo sapiens
ggacactgaggcaca

SEQ ID NO: 964998 - DNA, 15 bp, Homo sapiens
tggacactgaggcac

SEQ ID NO: 964999 - DNA, 15 bp, Homo sapiens
gtggacactgaggca

SEQ ID NO: 965000 - DNA, 15 bp, Homo sapiens
tgtggacactgaggc

SEQ ID NO: 965001 - DNA, 15 bp, Homo sapiens
atgtggacactgagg

SEQ ID NO: 965002 - DNA, 15 bp, Homo sapiens
gatgtggacactgag

SEQ ID NO: 965003 - DNA, 15 bp, Homo sapiens
agatgtggacactga

SEQ ID NO: 965004 - DNA, 15 bp, Homo sapiens
gagatgtggacactg

SEQ ID NO: 965005 - DNA, 15 bp, Homo sapiens
agagatgtggacact

SEQ ID NO: 965006 - DNA, 15 bp, Homo sapiens
tagagatgtggacac

SEQ ID NO: 965007 - DNA, 15 bp, Homo sapiens
ttagagatgtggaca

SEQ ID NO: 965008 - DNA, 15 bp, Homo sapiens
tttagagatgtggac

SEQ ID NO: 965009 - DNA, 15 bp, Homo sapiens
ttttagagatgtgga

SEQ ID NO: 965010 - DNA, 15 bp, Homo sapiens
attttagagatgtgg

SEQ ID NO: 965011 - DNA, 15 bp, Homo sapiens
tattttagagatgtg

SEQ ID NO: 965012 - DNA, 15 bp, Homo sapiens
ctattttagagatgt

SEQ ID NO: 965013 - DNA, 15 bp, Homo sapiens
tctattttagagatg

SEQ ID NO: 965014 - DNA, 15 bp, Homo sapiens
ctctattttagagat

SEQ ID NO: 965015 - DNA, 15 bp, Homo sapiens
cctctattttagaga

SEQ ID NO: 965016 - DNA, 15 bp, Homo sapiens
gcctctattttagag

SEQ ID NO: 965017 - DNA, 15 bp, Homo sapiens
tgcctctattttaga

SEQ ID NO: 965018 - DNA, 15 bp, Homo sapiens
ttgcctctattttag

SEQ ID NO: 965019 - DNA, 15 bp, Homo sapiens
attgcctctatttta

SEQ ID NO: 965020 - DNA, 15 bp, Homo sapiens
tattgcctctatttt

SEQ ID NO: 965021 - DNA, 15 bp, Homo sapiens
ttattgcctctattt

SEQ ID NO: 965022 - DNA, 15 bp, Homo sapiens
attattgcctctatt

SEQ ID NO: 965023 - DNA, 15 bp, Homo sapiens
tattattgcctctat

SEQ ID NO: 965024 - DNA, 15 bp, Homo sapiens
ctattattgcctcta

SEQ ID NO: 965025 - DNA, 15 bp, Homo sapiens
actattattgcctct

SEQ ID NO: 965026 - DNA, 15 bp, Homo sapiens
tactattattgcctc

SEQ ID NO: 965027 - DNA, 15 bp, Homo sapiens
gtactattattgcct

SEQ ID NO: 965028 - DNA, 15 bp, Homo sapiens
ggtactattattgcc

SEQ ID NO: 965029 - DNA, 15 bp, Homo sapiens
aggtactattattgc

SEQ ID NO: 965030 - DNA, 15 bp, Homo sapiens
aaggtactattattg

SEQ ID NO: 965031 - DNA, 15 bp, Homo sapiens
gaaggtactattatt

SEQ ID NO: 965032 - DNA, 15 bp, Homo sapiens
ggaaggtactattat

SEQ ID NO: 965033 - DNA, 15 bp, Homo sapiens
aggaaggtactatta

SEQ ID NO: 965034 - DNA, 15 bp, Homo sapiens
aaggaaggtactatt

SEQ ID NO: 965035 - DNA, 15 bp, Homo sapiens
taaggaaggtactat

SEQ ID NO: 965036 - DNA, 15 bp, Homo sapiens
gtaaggaaggtacta

SEQ ID NO: 965037 - DNA, 15 bp, Homo sapiens
tgtaaggaaggtact

SEQ ID NO: 965038 - DNA, 15 bp, Homo sapiens
ctgtaaggaaggtac

SEQ ID NO: 965039 - DNA, 15 bp, Homo sapiens
cctgtaaggaaggta

SEQ ID NO: 965040 - DNA, 15 bp, Homo sapiens
tcctgtaaggaaggt

SEQ ID NO: 965041 - DNA, 15 bp, Homo sapiens
atcctgtaaggaagg

SEQ ID NO: 965042 - DNA, 15 bp, Homo sapiens
aatcctgtaaggaag

SEQ ID NO: 965043 - DNA, 15 bp, Homo sapiens
caatcctgtaaggaa

SEQ ID NO: 965044 - DNA, 15 bp, Homo sapiens
acaatcctgtaagga

SEQ ID NO: 965045 - DNA, 15 bp, Homo sapiens
aacaatcctgtaagg

SEQ ID NO: 965046 - DNA, 15 bp, Homo sapiens
caacaatcctgtaag

SEQ ID NO: 965047 - DNA, 15 bp, Homo sapiens
acaacaatcctgtaa

SEQ ID NO: 965048 - DNA, 15 bp, Homo sapiens
tacaacaatcctgta

SEQ ID NO: 965049 - DNA, 15 bp, Homo sapiens
ttacaacaatcctgt

SEQ ID NO: 965050 - DNA, 15 bp, Homo sapiens
cttacaacaatcctg

SEQ ID NO: 965051 - DNA, 15 bp, Homo sapiens
tcttacaacaatcct

SEQ ID NO: 965052 - DNA, 15 bp, Homo sapiens
atcttacaacaatcc

SEQ ID NO: 965053 - DNA, 15 bp, Homo sapiens
aatcttacaacaatc

SEQ ID NO: 965054 - DNA, 15 bp, Homo sapiens
aaatcttacaacaat

SEQ ID NO: 965055 - DNA, 15 bp, Homo sapiens
taaatcttacaacaa

SEQ ID NO: 965056 - DNA, 15 bp, Homo sapiens
ttaaatcttacaaca

SEQ ID NO: 965057 - DNA, 15 bp, Homo sapiens
tttaaatcttacaac

SEQ ID NO: 965058 - DNA, 15 bp, Homo sapiens
atttaaatcttacaa

SEQ ID NO: 965059 - DNA, 15 bp, Homo sapiens
catttaaatcttaca

SEQ ID NO: 965060 - DNA, 15 bp, Homo sapiens
tcatttaaatcttac

SEQ ID NO: 965061 - DNA, 15 bp, Homo sapiens
ctcatttaaatctta

SEQ ID NO: 965062 - DNA, 15 bp, Homo sapiens
gctcatttaaatctt

SEQ ID NO: 965063 - DNA, 15 bp, Homo sapiens
agctcatttaaatct

SEQ ID NO: 965064 - DNA, 15 bp, Homo sapiens
tagctcatttaaatc

SEQ ID NO: 965065 - DNA, 15 bp, Homo sapiens
ttagctcatttaaat

SEQ ID NO: 965066 - DNA, 15 bp, Homo sapiens
attagctcatttaaa

SEQ ID NO: 965067 - DNA, 15 bp, Homo sapiens
tattagctcatttaa

SEQ ID NO: 965068 - DNA, 15 bp, Homo sapiens
atattagctcattta

SEQ ID NO: 965069 - DNA, 15 bp, Homo sapiens
catattagctcattt

SEQ ID NO: 965070 - DNA, 15 bp, Homo sapiens
acatattagctcatt

SEQ ID NO: 965071 - DNA, 15 bp, Homo sapiens
cacatattagctcat

SEQ ID NO: 965072 - DNA, 15 bp, Homo sapiens
acacatattagctca

SEQ ID NO: 965073 - DNA, 15 bp, Homo sapiens
tacacatattagctc

SEQ ID NO: 965074 - DNA, 15 bp, Homo sapiens
ttacacatattagct

SEQ ID NO: 965075 - DNA, 15 bp, Homo sapiens
tttacacatattagc

SEQ ID NO: 965076 - DNA, 15 bp, Homo sapiens
atttacacatattag

SEQ ID NO: 965077 - DNA, 15 bp, Homo sapiens
gatttacacatatta

SEQ ID NO: 965078 - DNA, 15 bp, Homo sapiens
tgatttacacatatt

SEQ ID NO: 965079 - DNA, 15 bp, Homo sapiens
gtgatttacacatat

SEQ ID NO: 965080 - DNA, 15 bp, Homo sapiens
tgtgatttacacata

SEQ ID NO: 965081 - DNA, 15 bp, Homo sapiens
ttgtgatttacacat

SEQ ID NO: 965082 - DNA, 15 bp, Homo sapiens
tttgtgatttacaca

SEQ ID NO: 965083 - DNA, 15 bp, Homo sapiens
ttttgtgatttacac

SEQ ID NO: 965084 - DNA, 15 bp, Homo sapiens
tttttgtgatttaca

SEQ ID NO: 965085 - DNA, 15 bp, Homo sapiens
atttttgtgatttac

SEQ ID NO: 965086 - DNA, 15 bp, Homo sapiens
tatttttgtgattta

SEQ ID NO: 965087 - DNA, 15 bp, Homo sapiens
ctatttttgtgattt

SEQ ID NO: 965088 - DNA, 15 bp, Homo sapiens
cctatttttgtgatt

SEQ ID NO: 965089 - DNA, 15 bp, Homo sapiens
ccctatttttgtgat

SEQ ID NO: 965090 - DNA, 15 bp, Homo sapiens
accctatttttgtga

SEQ ID NO: 965091 - DNA, 15 bp, Homo sapiens
gaccctatttttgtg

SEQ ID NO: 965092 - DNA, 15 bp, Homo sapiens
agaccctatttttgt

SEQ ID NO: 965093 - DNA, 15 bp, Homo sapiens
cagaccctatttttg

SEQ ID NO: 965094 - DNA, 15 bp, Homo sapiens
tcagaccctattttt

SEQ ID NO: 965095 - DNA, 15 bp, Homo sapiens
gtcagaccctatttt

SEQ ID NO: 965096 - DNA, 15 bp, Homo sapiens
tgtcagaccctattt

SEQ ID NO: 965097 - DNA, 15 bp, Homo sapiens
atgtcagaccctatt

SEQ ID NO: 965098 - DNA, 15 bp, Homo sapiens
aatgtcagaccctat

SEQ ID NO: 965099 - DNA, 15 bp, Homo sapiens
aaatgtcagacccta

SEQ ID NO: 965100 - DNA, 15 bp, Homo sapiens
aaaatgtcagaccct

SEQ ID NO: 965101 - DNA, 15 bp, Homo sapiens
aaaaatgtcagaccc

SEQ ID NO: 965102 - DNA, 15 bp, Homo sapiens
aaaaaatgtcagacc

SEQ ID NO: 965103 - DNA, 15 bp, Homo sapiens
taaaaaatgtcagac

SEQ ID NO: 965104 - DNA, 15 bp, Homo sapiens
ttaaaaaatgtcaga

SEQ ID NO: 965105 - DNA, 15 bp, Homo sapiens
tttaaaaaatgtcag

SEQ ID NO: 965106 - DNA, 15 bp, Homo sapiens
atttaaaaaatgtca

SEQ ID NO: 965107 - DNA, 15 bp, Homo sapiens
catttaaaaaatgtc

SEQ ID NO: 965108 - DNA, 15 bp, Homo sapiens
ccatttaaaaaatgt

SEQ ID NO: 965109 - DNA, 15 bp, Homo sapiens
accatttaaaaaatg

SEQ ID NO: 965110 - DNA, 15 bp, Homo sapiens
taccatttaaaaaat

SEQ ID NO: 965111 - DNA, 15 bp, Homo sapiens
ataccatttaaaaaa

SEQ ID NO: 965112 - DNA, 15 bp, Homo sapiens
tataccatttaaaaa

SEQ ID NO: 965113 - DNA, 15 bp, Homo sapiens
atataccatttaaaa

SEQ ID NO: 965114 - DNA, 15 bp, Homo sapiens
catataccatttaaa

SEQ ID NO: 965115 - DNA, 15 bp, Homo sapiens
acatataccatttaa

SEQ ID NO: 965116 - DNA, 15 bp, Homo sapiens
aacatataccattta

SEQ ID NO: 965117 - DNA, 15 bp, Homo sapiens
aaacatataccattt

SEQ ID NO: 965118 - DNA, 15 bp, Homo sapiens
aaaacatataccatt

SEQ ID NO: 965119 - DNA, 15 bp, Homo sapiens
taaaacatataccat

SEQ ID NO: 965120 - DNA, 15 bp, Homo sapiens
gtaaaacatatacca

SEQ ID NO: 965121 - DNA, 15 bp, Homo sapiens
ggtaaaacatatacc

SEQ ID NO: 965122 - DNA, 15 bp, Homo sapiens
tggtaaaacatatac

SEQ ID NO: 965123 - DNA, 15 bp, Homo sapiens
atggtaaaacatata

SEQ ID NO: 965124 - DNA, 15 bp, Homo sapiens
aatggtaaaacatat

SEQ ID NO: 965125 - DNA, 15 bp, Homo sapiens
caatggtaaaacata

SEQ ID NO: 965126 - DNA, 15 bp, Homo sapiens
gcaatggtaaaacat

SEQ ID NO: 965127 - DNA, 15 bp, Homo sapiens
agcaatggtaaaaca

SEQ ID NO: 965128 - DNA, 15 bp, Homo sapiens
cagcaatggtaaaac

SEQ ID NO: 965129 - DNA, 15 bp, Homo sapiens
gcagcaatggtaaaa

SEQ ID NO: 965130 - DNA, 15 bp, Homo sapiens
agcagcaatggtaaa

SEQ ID NO: 965131 - DNA, 15 bp, Homo sapiens
tagcagcaatggtaa

SEQ ID NO: 965132 - DNA, 15 bp, Homo sapiens
atagcagcaatggta

SEQ ID NO: 965133 - DNA, 15 bp, Homo sapiens
aatagcagcaatggt

SEQ ID NO: 965134 - DNA, 15 bp, Homo sapiens
aaatagcagcaatgg

SEQ ID NO: 965135 - DNA, 15 bp, Homo sapiens
aaaatagcagcaatg

SEQ ID NO: 965136 - DNA, 15 bp, Homo sapiens
taaaatagcagcaat

SEQ ID NO: 965137 - DNA, 15 bp, Homo sapiens
ttaaaatagcagcaa

SEQ ID NO: 965138 - DNA, 15 bp, Homo sapiens
attaaaatagcagca

SEQ ID NO: 965139 - DNA, 15 bp, Homo sapiens
gattaaaatagcagc

SEQ ID NO: 965140 - DNA, 15 bp, Homo sapiens
agattaaaatagcag

SEQ ID NO: 965141 - DNA, 15 bp, Homo sapiens
aagattaaaatagca

SEQ ID NO: 965142 - DNA, 15 bp, Homo sapiens
aaagattaaaatagc

SEQ ID NO: 965143 - DNA, 15 bp, Homo sapiens
taaagattaaaatag

SEQ ID NO: 965144 - DNA, 15 bp, Homo sapiens
ataaagattaaaata

SEQ ID NO: 965145 - DNA, 15 bp, Homo sapiens
aataaagattaaaat

SEQ ID NO: 965146 - DNA, 15 bp, Homo sapiens
taataaagattaaaa

SEQ ID NO: 965147 - DNA, 15 bp, Homo sapiens
ataataaagattaaa

SEQ ID NO: 965148 - DNA, 15 bp, Homo sapiens
tataataaagattaa

SEQ ID NO: 965149 - DNA, 15 bp, Homo sapiens
ttataataaagatta

SEQ ID NO: 965150 - DNA, 15 bp, Homo sapiens
attataataaagatt

SEQ ID NO: 965151 - DNA, 15 bp, Homo sapiens
aattataataaagat

SEQ ID NO: 965152 - DNA, 15 bp, Homo sapiens
taattataataaaga

SEQ ID NO: 965153 - DNA, 15 bp, Homo sapiens
ataattataataaag

SEQ ID NO: 965154 - DNA, 15 bp, Homo sapiens
aataattataataaa

SEQ ID NO: 965155 - DNA, 15 bp, Homo sapiens
caataattataataa

SEQ ID NO: 965156 - DNA, 15 bp, Homo sapiens
acaataattataata

SEQ ID NO: 965157 - DNA, 15 bp, Homo sapiens
cacaataattataat

SEQ ID NO: 965158 - DNA, 15 bp, Homo sapiens
acacaataattataa

SEQ ID NO: 965159 - DNA, 15 bp, Homo sapiens
aacacaataattata

SEQ ID NO: 965160 - DNA, 15 bp, Homo sapiens
aaacacaataattat

SEQ ID NO: 965161 - DNA, 15 bp, Homo sapiens
aaaacacaataatta

SEQ ID NO: 965162 - DNA, 15 bp, Homo sapiens
caaaacacaataatt

SEQ ID NO: 965163 - DNA, 15 bp, Homo sapiens
acaaaacacaataat

SEQ ID NO: 965164 - DNA, 15 bp, Homo sapiens
aacaaaacacaataa

SEQ ID NO: 965165 - DNA, 15 bp, Homo sapiens
aaacaaaacacaata

SEQ ID NO: 965166 - DNA, 15 bp, Homo sapiens
aaaacaaaacacaat

SEQ ID NO: 965167 - DNA, 15 bp, Homo sapiens
caaaacaaaacacaa

SEQ ID NO: 965168 - DNA, 15 bp, Homo sapiens
acaaaacaaaacaca

SEQ ID NO: 965169 - DNA, 15 bp, Homo sapiens
aacaaaacaaaacac

SEQ ID NO: 965170 - DNA, 15 bp, Homo sapiens
taacaaaacaaaaca

SEQ ID NO: 965171 - DNA, 15 bp, Homo sapiens
ttaacaaaacaaaac

SEQ ID NO: 965172 - DNA, 15 bp, Homo sapiens
attaacaaaacaaaa

SEQ ID NO: 965173 - DNA, 15 bp, Homo sapiens
aattaacaaaacaaa

SEQ ID NO: 965174 - DNA, 15 bp, Homo sapiens
aaattaacaaaacaa

SEQ ID NO: 965175 - DNA, 15 bp, Homo sapiens
caaattaacaaaaca

SEQ ID NO: 965176 - DNA, 15 bp, Homo sapiens
tcaaattaacaaaac

SEQ ID NO: 965177 - DNA, 15 bp, Homo sapiens
atcaaattaacaaaa

SEQ ID NO: 965178 - DNA, 15 bp, Homo sapiens
tatcaaattaacaaa

SEQ ID NO: 965179 - DNA, 15 bp, Homo sapiens
ctatcaaattaacaa

SEQ ID NO: 965180 - DNA, 15 bp, Homo sapiens
gctatcaaattaaca

SEQ ID NO: 965181 - DNA, 15 bp, Homo sapiens
agctatcaaattaac

SEQ ID NO: 965182 - DNA, 15 bp, Homo sapiens
aagctatcaaattaa

SEQ ID NO: 965183 - DNA, 15 bp, Homo sapiens
aaagctatcaaatta

SEQ ID NO: 965184 - DNA, 15 bp, Homo sapiens
taaagctatcaaatt

SEQ ID NO: 965185 - DNA, 15 bp, Homo sapiens
ttaaagctatcaaat

SEQ ID NO: 965186 - DNA, 15 bp, Homo sapiens
tttaaagctatcaaa

SEQ ID NO: 965187 - DNA, 15 bp, Homo sapiens
ttttaaagctatcaa

SEQ ID NO: 965188 - DNA, 15 bp, Homo sapiens
cttttaaagctatca

SEQ ID NO: 965189 - DNA, 15 bp, Homo sapiens
ccttttaaagctatc

SEQ ID NO: 965190 - DNA, 15 bp, Homo sapiens
accttttaaagctat

SEQ ID NO: 965191 - DNA, 15 bp, Homo sapiens
taccttttaaagcta

SEQ ID NO: 965192 - DNA, 15 bp, Homo sapiens
ttaccttttaaagct

SEQ ID NO: 965193 - DNA, 15 bp, Homo sapiens
attaccttttaaagc

SEQ ID NO: 965194 - DNA, 15 bp, Homo sapiens
cattaccttttaaag

SEQ ID NO: 965195 - DNA, 15 bp, Homo sapiens
tcattaccttttaaa

SEQ ID NO: 965196 - DNA, 15 bp, Homo sapiens
atcattaccttttaa

SEQ ID NO: 965197 - DNA, 15 bp, Homo sapiens
tatcattacctttta

SEQ ID NO: 965198 - DNA, 15 bp, Homo sapiens
gtatcattacctttt

SEQ ID NO: 965199 - DNA, 15 bp, Homo sapiens
tgtatcattaccttt

SEQ ID NO: 965200 - DNA, 15 bp, Homo sapiens
ctgtatcattacctt

SEQ ID NO: 965201 - DNA, 15 bp, Homo sapiens
actgtatcattacct

SEQ ID NO: 965202 - DNA, 15 bp, Homo sapiens
aactgtatcattacc

SEQ ID NO: 965203 - DNA, 15 bp, Homo sapiens
aaactgtatcattac

SEQ ID NO: 965204 - DNA, 15 bp, Homo sapiens
taaactgtatcatta

SEQ ID NO: 965205 - DNA, 15 bp, Homo sapiens
ataaactgtatcatt

SEQ ID NO: 965206 - DNA, 15 bp, Homo sapiens
aataaactgtatcat

SEQ ID NO: 965207 - DNA, 15 bp, Homo sapiens
caataaactgtatca

SEQ ID NO: 965208 - DNA, 15 bp, Homo sapiens
tcaataaactgtatc

SEQ ID NO: 965209 - DNA, 15 bp, Homo sapiens
atcaataaactgtat

SEQ ID NO: 965210 - DNA, 15 bp, Homo sapiens
catcaataaactgta

SEQ ID NO: 965211 - DNA, 15 bp, Homo sapiens
acatcaataaactgt

SEQ ID NO: 965212 - DNA, 15 bp, Homo sapiens
aacatcaataaactg

SEQ ID NO: 965213 - DNA, 15 bp, Homo sapiens
aaacatcaataaact

SEQ ID NO: 965214 - DNA, 15 bp, Homo sapiens
caaacatcaataaac

SEQ ID NO: 965215 - DNA, 15 bp, Homo sapiens
acaaacatcaataaa

SEQ ID NO: 965216 - DNA, 15 bp, Homo sapiens
aacaaacatcaataa

SEQ ID NO: 965217 - DNA, 15 bp, Homo sapiens
taacaaacatcaata

SEQ ID NO: 965218 - DNA, 15 bp, Homo sapiens
ataacaaacatcaat

SEQ ID NO: 965219 - DNA, 15 bp, Homo sapiens
cataacaaacatcaa

SEQ ID NO: 965220 - DNA, 15 bp, Homo sapiens
tcataacaaacatca

SEQ ID NO: 965221 - DNA, 15 bp, Homo sapiens
ttcataacaaacatc

SEQ ID NO: 965222 - DNA, 15 bp, Homo sapiens
tttcataacaaacat

SEQ ID NO: 965223 - DNA, 15 bp, Homo sapiens
ttttcataacaaaca

SEQ ID NO: 965224 - DNA, 15 bp, Homo sapiens
cttttcataacaaac

SEQ ID NO: 965225 - DNA, 15 bp, Homo sapiens
ccttttcataacaaa

SEQ ID NO: 965226 - DNA, 15 bp, Homo sapiens
tccttttcataacaa

SEQ ID NO: 965227 - DNA, 15 bp, Homo sapiens
ctccttttcataaca

SEQ ID NO: 965228 - DNA, 15 bp, Homo sapiens
actccttttcataac

SEQ ID NO: 965229 - DNA, 15 bp, Homo sapiens
tactccttttcataa

SEQ ID NO: 965230 - DNA, 15 bp, Homo sapiens
ttactccttttcata

SEQ ID NO: 965231 - DNA, 15 bp, Homo sapiens
attactccttttcat

SEQ ID NO: 965232 - DNA, 15 bp, Homo sapiens
aattactccttttca

SEQ ID NO: 965233 - DNA, 15 bp, Homo sapiens
caattactccttttc

SEQ ID NO: 965234 - DNA, 15 bp, Homo sapiens
ccaattactcctttt

SEQ ID NO: 965235 - DNA, 15 bp, Homo sapiens
tccaattactccttt

SEQ ID NO: 965236 - DNA, 15 bp, Homo sapiens
ctccaattactcctt

SEQ ID NO: 965237 - DNA, 15 bp, Homo sapiens
tctccaattactcct

SEQ ID NO: 965238 - DNA, 15 bp, Homo sapiens
ttctccaattactcc

SEQ ID NO: 965239 - DNA, 15 bp, Homo sapiens
cttctccaattactc

SEQ ID NO: 965240 - DNA, 15 bp, Homo sapiens
tcttctccaattact

SEQ ID NO: 965241 - DNA, 15 bp, Homo sapiens
atcttctccaattac

SEQ ID NO: 965242 - DNA, 15 bp, Homo sapiens
tatcttctccaatta

SEQ ID NO: 965243 - DNA, 15 bp, Homo sapiens
ttatcttctccaatt

SEQ ID NO: 965244 - DNA, 15 bp, Homo sapiens
tttatcttctccaat

SEQ ID NO: 965245 - DNA, 15 bp, Homo sapiens
ttttatcttctccaa

SEQ ID NO: 965246 - DNA, 15 bp, Homo sapiens
tttttatcttctcca

SEQ ID NO: 965247 - DNA, 15 bp, Homo sapiens
atttttatcttctcc

SEQ ID NO: 965248 - DNA, 15 bp, Homo sapiens
catttttatcttctc

SEQ ID NO: 965249 - DNA, 15 bp, Homo sapiens
acatttttatcttct

SEQ ID NO: 965250 - DNA, 15 bp, Homo sapiens
tacatttttatcttc

SEQ ID NO: 965251 - DNA, 15 bp, Homo sapiens
ttacatttttatctt

SEQ ID NO: 965252 - DNA, 15 bp, Homo sapiens
cttacatttttatct

SEQ ID NO: 965253 - DNA, 15 bp, Homo sapiens
ccttacatttttatc

SEQ ID NO: 965254 - DNA, 15 bp, Homo sapiens
cccttacatttttat

SEQ ID NO: 965255 - DNA, 15 bp, Homo sapiens
ccccttacattttta

SEQ ID NO: 965256 - DNA, 15 bp, Homo sapiens
accccttacattttt

SEQ ID NO: 965257 - DNA, 15 bp, Homo sapiens
taccccttacatttt

SEQ ID NO: 965258 - DNA, 15 bp, Homo sapiens
ttaccccttacattt

SEQ ID NO: 965259 - DNA, 15 bp, Homo sapiens
attaccccttacatt

SEQ ID NO: 965260 - DNA, 15 bp, Homo sapiens
tattaccccttacat

SEQ ID NO: 965261 - DNA, 15 bp, Homo sapiens
ttattaccccttaca

SEQ ID NO: 965262 - DNA, 15 bp, Homo sapiens
tttattaccccttac

SEQ ID NO: 965263 - DNA, 15 bp, Homo sapiens
ctttattacccctta

SEQ ID NO: 965264 - DNA, 15 bp, Homo sapiens
actttattacccctt

SEQ ID NO: 965265 - DNA, 15 bp, Homo sapiens
gactttattacccct

SEQ ID NO: 965266 - DNA, 15 bp, Homo sapiens
tgactttattacccc

SEQ ID NO: 965267 - DNA, 15 bp, Homo sapiens
ttgactttattaccc

SEQ ID NO: 965268 - DNA, 15 bp, Homo sapiens
cttgactttattacc

SEQ ID NO: 965269 - DNA, 15 bp, Homo sapiens
ccttgactttattac

SEQ ID NO: 965270 - DNA, 15 bp, Homo sapiens
tccttgactttatta

SEQ ID NO: 965271 - DNA, 15 bp, Homo sapiens
ttccttgactttatt

SEQ ID NO: 965272 - DNA, 15 bp, Homo sapiens
cttccttgactttat

SEQ ID NO: 965273 - DNA, 15 bp, Homo sapiens
ccttccttgacttta

SEQ ID NO: 965274 - DNA, 15 bp, Homo sapiens
accttccttgacttt

SEQ ID NO: 965275 - DNA, 15 bp, Homo sapiens
aaccttccttgactt

SEQ ID NO: 965276 - DNA, 15 bp, Homo sapiens
aaaccttccttgact

SEQ ID NO: 965277 - DNA, 15 bp, Homo sapiens
aaaaccttccttgac

SEQ ID NO: 965278 - DNA, 15 bp, Homo sapiens
aaaaaccttccttga

SEQ ID NO: 965279 - DNA, 15 bp, Homo sapiens
aaaaaaccttccttg

SEQ ID NO: 965280 - DNA, 15 bp, Homo sapiens
caaaaaaccttcctt

SEQ ID NO: 965281 - DNA, 15 bp, Homo sapiens
tcaaaaaaccttcct

SEQ ID NO: 965282 - DNA, 15 bp, Homo sapiens
ctcaaaaaaccttcc

SEQ ID NO: 965283 - DNA, 15 bp, Homo sapiens
gctcaaaaaaccttc

SEQ ID NO: 965284 - DNA, 15 bp, Homo sapiens
agctcaaaaaacctt

SEQ ID NO: 965285 - DNA, 15 bp, Homo sapiens
cagctcaaaaaacct

SEQ ID NO: 965286 - DNA, 15 bp, Homo sapiens
tcagctcaaaaaacc

SEQ ID NO: 965287 - DNA, 15 bp, Homo sapiens
ttcagctcaaaaaac

SEQ ID NO: 965288 - DNA, 15 bp, Homo sapiens
tttcagctcaaaaaa

SEQ ID NO: 965289 - DNA, 15 bp, Homo sapiens
ttttcagctcaaaaa

SEQ ID NO: 965290 - DNA, 15 bp, Homo sapiens
attttcagctcaaaa

SEQ ID NO: 965291 - DNA, 15 bp, Homo sapiens
cattttcagctcaaa

SEQ ID NO: 965292 - DNA, 15 bp, Homo sapiens
tcattttcagctcaa

SEQ ID NO: 965293 - DNA, 15 bp, Homo sapiens
atcattttcagctca

SEQ ID NO: 965294 - DNA, 15 bp, Homo sapiens
aatcattttcagctc

SEQ ID NO: 965295 - DNA, 15 bp, Homo sapiens
taatcattttcagct

SEQ ID NO: 965296 - DNA, 15 bp, Homo sapiens
ataatcattttcagc

SEQ ID NO: 965297 - DNA, 15 bp, Homo sapiens
tataatcattttcag

SEQ ID NO: 965298 - DNA, 15 bp, Homo sapiens
atataatcattttca

SEQ ID NO: 965299 - DNA, 15 bp, Homo sapiens
aatataatcattttc

SEQ ID NO: 965300 - DNA, 15 bp, Homo sapiens
aaatataatcatttt

SEQ ID NO: 965301 - DNA, 15 bp, Homo sapiens
gaaatataatcattt

SEQ ID NO: 965302 - DNA, 15 bp, Homo sapiens
tgaaatataatcatt

SEQ ID NO: 965303 - DNA, 15 bp, Homo sapiens
ctgaaatataatcat

SEQ ID NO: 965304 - DNA, 15 bp, Homo sapiens
tctgaaatataatca

SEQ ID NO: 965305 - DNA, 15 bp, Homo sapiens
ctctgaaatataatc

SEQ ID NO: 965306 - DNA, 15 bp, Homo sapiens
actctgaaatataat

SEQ ID NO: 965307 - DNA, 15 bp, Homo sapiens
cactctgaaatataa

SEQ ID NO: 965308 - DNA, 15 bp, Homo sapiens
acactctgaaatata

SEQ ID NO: 965309 - DNA, 15 bp, Homo sapiens
tacactctgaaatat

SEQ ID NO: 965310 - DNA, 15 bp, Homo sapiens
ttacactctgaaata

SEQ ID NO: 965311 - DNA, 15 bp, Homo sapiens
gttacactctgaaat

SEQ ID NO: 965312 - DNA, 15 bp, Homo sapiens
ggttacactctgaaa

SEQ ID NO: 965313 - DNA, 15 bp, Homo sapiens
aggttacactctgaa

SEQ ID NO: 965314 - DNA, 15 bp, Homo sapiens
caggttacactctga

SEQ ID NO: 965315 - DNA, 15 bp, Homo sapiens
tcaggttacactctg

SEQ ID NO: 965316 - DNA, 15 bp, Homo sapiens
ttcaggttacactct

SEQ ID NO: 965317 - DNA, 15 bp, Homo sapiens
attcaggttacactc

SEQ ID NO: 965318 - DNA, 15 bp, Homo sapiens
tattcaggttacact

SEQ ID NO: 965319 - DNA, 15 bp, Homo sapiens
ttattcaggttacac

SEQ ID NO: 965320 - DNA, 15 bp, Homo sapiens
tttattcaggttaca

SEQ ID NO: 965321 - DNA, 15 bp, Homo sapiens
ttttattcaggttac

SEQ ID NO: 965322 - DNA, 15 bp, Homo sapiens
gttttattcaggtta

SEQ ID NO: 965323 - DNA, 15 bp, Homo sapiens
agttttattcaggtt

SEQ ID NO: 965324 - DNA, 15 bp, Homo sapiens
cagttttattcaggt

SEQ ID NO: 965325 - DNA, 15 bp, Homo sapiens
tcagttttattcagg

SEQ ID NO: 965326 - DNA, 15 bp, Homo sapiens
ctcagttttattcag

SEQ ID NO: 965327 - DNA, 15 bp, Homo sapiens
cctcagttttattca

SEQ ID NO: 965328 - DNA, 15 bp, Homo sapiens
gcctcagttttattc

SEQ ID NO: 965329 - DNA, 15 bp, Homo sapiens
agcctcagttttatt

SEQ ID NO: 965330 - DNA, 15 bp, Homo sapiens
aagcctcagttttat

SEQ ID NO: 965331 - DNA, 15 bp, Homo sapiens
gaagcctcagtttta

SEQ ID NO: 965332 - DNA, 15 bp, Homo sapiens
tgaagcctcagtttt

SEQ ID NO: 965333 - DNA, 15 bp, Homo sapiens
gtgaagcctcagttt

SEQ ID NO: 965334 - DNA, 15 bp, Homo sapiens
tgtgaagcctcagtt

SEQ ID NO: 965335 - DNA, 15 bp, Homo sapiens
atgtgaagcctcagt

SEQ ID NO: 965336 - DNA, 15 bp, Homo sapiens
catgtgaagcctcag

SEQ ID NO: 965337 - DNA, 15 bp, Homo sapiens
ccatgtgaagcctca

SEQ ID NO: 965338 - DNA, 15 bp, Homo sapiens
gccatgtgaagcctc

SEQ ID NO: 965339 - DNA, 15 bp, Homo sapiens
agccatgtgaagcct

SEQ ID NO: 965340 - DNA, 15 bp, Homo sapiens
gagccatgtgaagcc

SEQ ID NO: 965341 - DNA, 15 bp, Homo sapiens
tgagccatgtgaagc

SEQ ID NO: 965342 - DNA, 15 bp, Homo sapiens
ctgagccatgtgaag

SEQ ID NO: 965343 - DNA, 15 bp, Homo sapiens
actgagccatgtgaa

SEQ ID NO: 965344 - DNA, 15 bp, Homo sapiens
gactgagccatgtga

SEQ ID NO: 965345 - DNA, 15 bp, Homo sapiens
ggactgagccatgtg

SEQ ID NO: 965346 - DNA, 15 bp, Homo sapiens
tggactgagccatgt

SEQ ID NO: 965347 - DNA, 15 bp, Homo sapiens
atggactgagccatg

SEQ ID NO: 965348 - DNA, 15 bp, Homo sapiens
catggactgagccat

SEQ ID NO: 965349 - DNA, 15 bp, Homo sapiens
gcatggactgagcca

SEQ ID NO: 965350 - DNA, 15 bp, Homo sapiens
tgcatggactgagcc

SEQ ID NO: 965351 - DNA, 15 bp, Homo sapiens
atgcatggactgagc

SEQ ID NO: 965352 - DNA, 15 bp, Homo sapiens
catgcatggactgag

SEQ ID NO: 965353 - DNA, 15 bp, Homo sapiens
acatgcatggactga

SEQ ID NO: 965354 - DNA, 15 bp, Homo sapiens
tacatgcatggactg

SEQ ID NO: 965355 - DNA, 15 bp, Homo sapiens
ttacatgcatggact

SEQ ID NO: 965356 - DNA, 15 bp, Homo sapiens
attacatgcatggac

SEQ ID NO: 965357 - DNA, 15 bp, Homo sapiens
tattacatgcatgga

SEQ ID NO: 965358 - DNA, 15 bp, Homo sapiens
ctattacatgcatgg

SEQ ID NO: 965359 - DNA, 15 bp, Homo sapiens
gctattacatgcatg

SEQ ID NO: 965360 - DNA, 15 bp, Homo sapiens
tgctattacatgcat

SEQ ID NO: 965361 - DNA, 15 bp, Homo sapiens
atgctattacatgca

SEQ ID NO: 965362 - DNA, 15 bp, Homo sapiens
aatgctattacatgc

SEQ ID NO: 965363 - DNA, 15 bp, Homo sapiens
gaatgctattacatg

SEQ ID NO: 965364 - DNA, 15 bp, Homo sapiens
agaatgctattacat

SEQ ID NO: 965365 - DNA, 15 bp, Homo sapiens
tagaatgctattaca

SEQ ID NO: 965366 - DNA, 15 bp, Homo sapiens
ttagaatgctattac

SEQ ID NO: 965367 - DNA, 15 bp, Homo sapiens
cttagaatgctatta

SEQ ID NO: 965368 - DNA, 15 bp, Homo sapiens
tcttagaatgctatt

SEQ ID NO: 965369 - DNA, 15 bp, Homo sapiens
ttcttagaatgctat

SEQ ID NO: 965370 - DNA, 15 bp, Homo sapiens
tttcttagaatgcta

SEQ ID NO: 965371 - DNA, 15 bp, Homo sapiens
ttttcttagaatgct

SEQ ID NO: 965372 - DNA, 15 bp, Homo sapiens
gttttcttagaatgc

SEQ ID NO: 965373 - DNA, 15 bp, Homo sapiens
tgttttcttagaatg

SEQ ID NO: 965374 - DNA, 15 bp, Homo sapiens
atgttttcttagaat

SEQ ID NO: 965375 - DNA, 15 bp, Homo sapiens
tatgttttcttagaa

SEQ ID NO: 965376 - DNA, 15 bp, Homo sapiens
ttatgttttcttaga

SEQ ID NO: 965377 - DNA, 15 bp, Homo sapiens
tttatgttttcttag

SEQ ID NO: 965378 - DNA, 15 bp, Homo sapiens
gtttatgttttctta

SEQ ID NO: 965379 - DNA, 15 bp, Homo sapiens
agtttatgttttctt

SEQ ID NO: 965380 - DNA, 15 bp, Homo sapiens
cagtttatgttttct

SEQ ID NO: 965381 - DNA, 15 bp, Homo sapiens
tcagtttatgttttc

SEQ ID NO: 965382 - DNA, 15 bp, Homo sapiens
ttcagtttatgtttt

SEQ ID NO: 965383 - DNA, 15 bp, Homo sapiens
attcagtttatgttt

SEQ ID NO: 965384 - DNA, 15 bp, Homo sapiens
cattcagtttatgtt

SEQ ID NO: 965385 - DNA, 15 bp, Homo sapiens
tcattcagtttatgt

SEQ ID NO: 965386 - DNA, 15 bp, Homo sapiens
ttcattcagtttatg

SEQ ID NO: 965387 - DNA, 15 bp, Homo sapiens
tttcattcagtttat

SEQ ID NO: 965388 - DNA, 15 bp, Homo sapiens
ttttcattcagttta

SEQ ID NO: 965389 - DNA, 15 bp, Homo sapiens
gttttcattcagttt

SEQ ID NO: 965390 - DNA, 15 bp, Homo sapiens
cgttttcattcagtt

SEQ ID NO: 965391 - DNA, 15 bp, Homo sapiens
acgttttcattcagt

SEQ ID NO: 965392 - DNA, 15 bp, Homo sapiens
tacgttttcattcag

SEQ ID NO: 965393 - DNA, 15 bp, Homo sapiens
ttacgttttcattca

SEQ ID NO: 965394 - DNA, 15 bp, Homo sapiens
tttacgttttcattc

SEQ ID NO: 965395 - DNA, 15 bp, Homo sapiens
gtttacgttttcatt

SEQ ID NO: 965396 - DNA, 15 bp, Homo sapiens
agtttacgttttcat

SEQ ID NO: 965397 - DNA, 15 bp, Homo sapiens
cagtttacgttttca

SEQ ID NO: 965398 - DNA, 15 bp, Homo sapiens
acagtttacgttttc

SEQ ID NO: 965399 - DNA, 15 bp, Homo sapiens
cacagtttacgtttt

SEQ ID NO: 965400 - DNA, 15 bp, Homo sapiens
tcacagtttacgttt

SEQ ID NO: 965401 - DNA, 15 bp, Homo sapiens
ttcacagtttacgtt

SEQ ID NO: 965402 - DNA, 15 bp, Homo sapiens
cttcacagtttacgt

SEQ ID NO: 965403 - DNA, 15 bp, Homo sapiens
gcttcacagtttacg

SEQ ID NO: 965404 - DNA, 15 bp, Homo sapiens
tgcttcacagtttac

SEQ ID NO: 965405 - DNA, 15 bp, Homo sapiens
atgcttcacagttta

SEQ ID NO: 965406 - DNA, 15 bp, Homo sapiens
catgcttcacagttt

SEQ ID NO: 965407 - DNA, 15 bp, Homo sapiens
tcatgcttcacagtt

SEQ ID NO: 965408 - DNA, 15 bp, Homo sapiens
ttcatgcttcacagt

SEQ ID NO: 965409 - DNA, 15 bp, Homo sapiens
cttcatgcttcacag

SEQ ID NO: 965410 - DNA, 15 bp, Homo sapiens
tcttcatgcttcaca

SEQ ID NO: 965411 - DNA, 15 bp, Homo sapiens
ttcttcatgcttcac

SEQ ID NO: 965412 - DNA, 15 bp, Homo sapiens
attcttcatgcttca

SEQ ID NO: 965413 - DNA, 15 bp, Homo sapiens
tattcttcatgcttc

SEQ ID NO: 965414 - DNA, 15 bp, Homo sapiens
ttattcttcatgctt

SEQ ID NO: 965415 - DNA, 15 bp, Homo sapiens
attattcttcatgct

SEQ ID NO: 965416 - DNA, 15 bp, Homo sapiens
cattattcttcatgc

SEQ ID NO: 965417 - DNA, 15 bp, Homo sapiens
tcattattcttcatg

SEQ ID NO: 965418 - DNA, 15 bp, Homo sapiens
ctcattattcttcat

SEQ ID NO: 965419 - DNA, 15 bp, Homo sapiens
cctcattattcttca

SEQ ID NO: 965420 - DNA, 15 bp, Homo sapiens
ccctcattattcttc

SEQ ID NO: 965421 - DNA, 15 bp, Homo sapiens
accctcattattctt

SEQ ID NO: 965422 - DNA, 15 bp, Homo sapiens
gaccctcattattct

SEQ ID NO: 965423 - DNA, 15 bp, Homo sapiens
agaccctcattattc

SEQ ID NO: 965424 - DNA, 15 bp, Homo sapiens
aagaccctcattatt

SEQ ID NO: 965425 - DNA, 15 bp, Homo sapiens
gaagaccctcattat

SEQ ID NO: 965426 - DNA, 15 bp, Homo sapiens
tgaagaccctcatta

SEQ ID NO: 965427 - DNA, 15 bp, Homo sapiens
gtgaagaccctcatt

SEQ ID NO: 965428 - DNA, 15 bp, Homo sapiens
ggtgaagaccctcat

SEQ ID NO: 965429 - DNA, 15 bp, Homo sapiens
aggtgaagaccctca

SEQ ID NO: 965430 - DNA, 15 bp, Homo sapiens
aaggtgaagaccctc

SEQ ID NO: 965431 - DNA, 15 bp, Homo sapiens
taaggtgaagaccct

SEQ ID NO: 965432 - DNA, 15 bp, Homo sapiens
ataaggtgaagaccc

SEQ ID NO: 965433 - DNA, 15 bp, Homo sapiens
cataaggtgaagacc

SEQ ID NO: 965434 - DNA, 15 bp, Homo sapiens
gcataaggtgaagac

SEQ ID NO: 965435 - DNA, 15 bp, Homo sapiens
agcataaggtgaaga

SEQ ID NO: 965436 - DNA, 15 bp, Homo sapiens
aagcataaggtgaag

SEQ ID NO: 965437 - DNA, 15 bp, Homo sapiens
aaagcataaggtgaa

SEQ ID NO: 965438 - DNA, 15 bp, Homo sapiens
gaaagcataaggtga

SEQ ID NO: 965439 - DNA, 15 bp, Homo sapiens
agaaagcataaggtg

SEQ ID NO: 965440 - DNA, 15 bp, Homo sapiens
cagaaagcataaggt

SEQ ID NO: 965441 - DNA, 15 bp, Homo sapiens
tcagaaagcataagg

SEQ ID NO: 965442 - DNA, 15 bp, Homo sapiens
ttcagaaagcataag

SEQ ID NO: 965443 - DNA, 15 bp, Homo sapiens
cttcagaaagcataa

SEQ ID NO: 965444 - DNA, 15 bp, Homo sapiens
ccttcagaaagcata

SEQ ID NO: 965445 - DNA, 15 bp, Homo sapiens
tccttcagaaagcat

SEQ ID NO: 965446 - DNA, 15 bp, Homo sapiens
ctccttcagaaagca

SEQ ID NO: 965447 - DNA, 15 bp, Homo sapiens
actccttcagaaagc

SEQ ID NO: 965448 - DNA, 15 bp, Homo sapiens
gactccttcagaaag

SEQ ID NO: 965449 - DNA, 15 bp, Homo sapiens
ggactccttcagaaa

SEQ ID NO: 965450 - DNA, 15 bp, Homo sapiens
gggactccttcagaa

SEQ ID NO: 965451 - DNA, 15 bp, Homo sapiens
ggggactccttcaga

SEQ ID NO: 965452 - DNA, 15 bp, Homo sapiens
cggggactccttcag

SEQ ID NO: 965453 - DNA, 15 bp, Homo sapiens
gcggggactccttca

SEQ ID NO: 965454 - DNA, 15 bp, Homo sapiens
tgcggggactccttc

SEQ ID NO: 965455 - DNA, 15 bp, Homo sapiens
ttgcggggactcctt

SEQ ID NO: 965456 - DNA, 15 bp, Homo sapiens
tttgcggggactcct

SEQ ID NO: 965457 - DNA, 15 bp, Homo sapiens
atttgcggggactcc

SEQ ID NO: 965458 - DNA, 15 bp, Homo sapiens
catttgcggggactc

SEQ ID NO: 965459 - DNA, 15 bp, Homo sapiens
gcatttgcggggact

SEQ ID NO: 965460 - DNA, 15 bp, Homo sapiens
agcatttgcggggac

SEQ ID NO: 965461 - DNA, 15 bp, Homo sapiens
aagcatttgcgggga

SEQ ID NO: 965462 - DNA, 15 bp, Homo sapiens
gaagcatttgcgggg

SEQ ID NO: 965463 - DNA, 15 bp, Homo sapiens
tgaagcatttgcggg

SEQ ID NO: 965464 - DNA, 15 bp, Homo sapiens
gtgaagcatttgcgg

SEQ ID NO: 965465 - DNA, 15 bp, Homo sapiens
tgtgaagcatttgcg

SEQ ID NO: 965466 - DNA, 15 bp, Homo sapiens
gtgtgaagcatttgc

SEQ ID NO: 965467 - DNA, 15 bp, Homo sapiens
tgtgtgaagcatttg

SEQ ID NO: 965468 - DNA, 15 bp, Homo sapiens
ctgtgtgaagcattt

SEQ ID NO: 965469 - DNA, 15 bp, Homo sapiens
gctgtgtgaagcatt

SEQ ID NO: 965470 - DNA, 15 bp, Homo sapiens
tgctgtgtgaagcat

SEQ ID NO: 965471 - DNA, 15 bp, Homo sapiens
atgctgtgtgaagca

SEQ ID NO: 965472 - DNA, 15 bp, Homo sapiens
tatgctgtgtgaagc

SEQ ID NO: 965473 - DNA, 15 bp, Homo sapiens
atatgctgtgtgaag

SEQ ID NO: 965474 - DNA, 15 bp, Homo sapiens
aatatgctgtgtgaa

SEQ ID NO: 965475 - DNA, 15 bp, Homo sapiens
caatatgctgtgtga

SEQ ID NO: 965476 - DNA, 15 bp, Homo sapiens
tcaatatgctgtgtg

SEQ ID NO: 965477 - DNA, 15 bp, Homo sapiens
ttcaatatgctgtgt

SEQ ID NO: 965478 - DNA, 15 bp, Homo sapiens
gttcaatatgctgtg

SEQ ID NO: 965479 - DNA, 15 bp, Homo sapiens
tgttcaatatgctgt

SEQ ID NO: 965480 - DNA, 15 bp, Homo sapiens
ttgttcaatatgctg

SEQ ID NO: 965481 - DNA, 15 bp, Homo sapiens
cttgttcaatatgct

SEQ ID NO: 965482 - DNA, 15 bp, Homo sapiens
tcttgttcaatatgc

SEQ ID NO: 965483 - DNA, 15 bp, Homo sapiens
ttcttgttcaatatg

SEQ ID NO: 965484 - DNA, 15 bp, Homo sapiens
tttcttgttcaatat

SEQ ID NO: 965485 - DNA, 15 bp, Homo sapiens
gtttcttgttcaata

SEQ ID NO: 965486 - DNA, 15 bp, Homo sapiens
agtttcttgttcaat

SEQ ID NO: 965487 - DNA, 15 bp, Homo sapiens
gagtttcttgttcaa

SEQ ID NO: 965488 - DNA, 15 bp, Homo sapiens
ggagtttcttgttca

SEQ ID NO: 965489 - DNA, 15 bp, Homo sapiens
aggagtttcttgttc

SEQ ID NO: 965490 - DNA, 15 bp, Homo sapiens
taggagtttcttgtt

SEQ ID NO: 965491 - DNA, 15 bp, Homo sapiens
ttaggagtttcttgt

SEQ ID NO: 965492 - DNA, 15 bp, Homo sapiens
tttaggagtttcttg

SEQ ID NO: 965493 - DNA, 15 bp, Homo sapiens
ttttaggagtttctt

SEQ ID NO: 965494 - DNA, 15 bp, Homo sapiens
attttaggagtttct

SEQ ID NO: 965495 - DNA, 15 bp, Homo sapiens
gattttaggagtttc

SEQ ID NO: 965496 - DNA, 15 bp, Homo sapiens
agattttaggagttt

SEQ ID NO: 965497 - DNA, 15 bp, Homo sapiens
aagattttaggagtt

SEQ ID NO: 965498 - DNA, 15 bp, Homo sapiens
gaagattttaggagt

SEQ ID NO: 965499 - DNA, 15 bp, Homo sapiens
agaagattttaggag

SEQ ID NO: 965500 - DNA, 15 bp, Homo sapiens
gagaagattttagga

SEQ ID NO: 965501 - DNA, 15 bp, Homo sapiens
agagaagattttagg

SEQ ID NO: 965502 - DNA, 15 bp, Homo sapiens
tagagaagattttag

SEQ ID NO: 965503 - DNA, 15 bp, Homo sapiens
ctagagaagatttta

SEQ ID NO: 965504 - DNA, 15 bp, Homo sapiens
tctagagaagatttt

SEQ ID NO: 965505 - DNA, 15 bp, Homo sapiens
atctagagaagattt

SEQ ID NO: 965506 - DNA, 15 bp, Homo sapiens
tatctagagaagatt

SEQ ID NO: 965507 - DNA, 15 bp, Homo sapiens
atatctagagaagat

SEQ ID NO: 965508 - DNA, 15 bp, Homo sapiens
aatatctagagaaga

SEQ ID NO: 965509 - DNA, 15 bp, Homo sapiens
aaatatctagagaag

SEQ ID NO: 965510 - DNA, 15 bp, Homo sapiens
gaaatatctagagaa

SEQ ID NO: 965511 - DNA, 15 bp, Homo sapiens
agaaatatctagaga

SEQ ID NO: 965512 - DNA, 15 bp, Homo sapiens
gagaaatatctagag

SEQ ID NO: 965513 - DNA, 15 bp, Homo sapiens
agagaaatatctaga

SEQ ID NO: 965514 - DNA, 15 bp, Homo sapiens
gagagaaatatctag

SEQ ID NO: 965515 - DNA, 15 bp, Homo sapiens
agagagaaatatcta

SEQ ID NO: 965516 - DNA, 15 bp, Homo sapiens
aagagagaaatatct

SEQ ID NO: 965517 - DNA, 15 bp, Homo sapiens
aaagagagaaatatc

SEQ ID NO: 965518 - DNA, 15 bp, Homo sapiens
gaaagagagaaatat

SEQ ID NO: 965519 - DNA, 15 bp, Homo sapiens
ggaaagagagaaata

SEQ ID NO: 965520 - DNA, 15 bp, Homo sapiens
aggaaagagagaaat

SEQ ID NO: 965521 - DNA, 15 bp, Homo sapiens
taggaaagagagaaa

SEQ ID NO: 965522 - DNA, 15 bp, Homo sapiens
ataggaaagagagaa

SEQ ID NO: 965523 - DNA, 15 bp, Homo sapiens
aataggaaagagaga

SEQ ID NO: 965524 - DNA, 15 bp, Homo sapiens
aaataggaaagagag

SEQ ID NO: 965525 - DNA, 15 bp, Homo sapiens
aaaataggaaagaga

SEQ ID NO: 965526 - DNA, 15 bp, Homo sapiens
aaaaataggaaagag

SEQ ID NO: 965527 - DNA, 15 bp, Homo sapiens
aaaaaataggaaaga

SEQ ID NO: 965528 - DNA, 15 bp, Homo sapiens
gaaaaaataggaaag

SEQ ID NO: 965529 - DNA, 15 bp, Homo sapiens
ggaaaaaataggaaa

SEQ ID NO: 965530 - DNA, 15 bp, Homo sapiens
gggaaaaaataggaa

SEQ ID NO: 965531 - DNA, 15 bp, Homo sapiens
tgggaaaaaatagga

SEQ ID NO: 965532 - DNA, 15 bp, Homo sapiens
gtgggaaaaaatagg

SEQ ID NO: 965533 - DNA, 15 bp, Homo sapiens
agtgggaaaaaatag

SEQ ID NO: 965534 - DNA, 15 bp, Homo sapiens
cagtgggaaaaaata

SEQ ID NO: 965535 - DNA, 15 bp, Homo sapiens
tcagtgggaaaaaat

SEQ ID NO: 965536 - DNA, 15 bp, Homo sapiens
gtcagtgggaaaaaa

SEQ ID NO: 965537 - DNA, 15 bp, Homo sapiens
tgtcagtgggaaaaa

SEQ ID NO: 965538 - DNA, 15 bp, Homo sapiens
ctgtcagtgggaaaa

SEQ ID NO: 965539 - DNA, 15 bp, Homo sapiens
actgtcagtgggaaa

SEQ ID NO: 965540 - DNA, 15 bp, Homo sapiens
tactgtcagtgggaa

SEQ ID NO: 965541 - DNA, 15 bp, Homo sapiens
ctactgtcagtggga

SEQ ID NO: 965542 - DNA, 15 bp, Homo sapiens
gctactgtcagtggg

SEQ ID NO: 965543 - DNA, 15 bp, Homo sapiens
tgctactgtcagtgg

SEQ ID NO: 965544 - DNA, 15 bp, Homo sapiens
gtgctactgtcagtg

SEQ ID NO: 965545 - DNA, 15 bp, Homo sapiens
ggtgctactgtcagt

SEQ ID NO: 965546 - DNA, 15 bp, Homo sapiens
aggtgctactgtcag

SEQ ID NO: 965547 - DNA, 15 bp, Homo sapiens
aaggtgctactgtca

SEQ ID NO: 965548 - DNA, 15 bp, Homo sapiens
taaggtgctactgtc

SEQ ID NO: 965549 - DNA, 15 bp, Homo sapiens
ataaggtgctactgt

SEQ ID NO: 965550 - DNA, 15 bp, Homo sapiens
tataaggtgctactg

SEQ ID NO: 965551 - DNA, 15 bp, Homo sapiens
atataaggtgctact

SEQ ID NO: 965552 - DNA, 15 bp, Homo sapiens
gatataaggtgctac

SEQ ID NO: 965553 - DNA, 15 bp, Homo sapiens
agatataaggtgcta

SEQ ID NO: 965554 - DNA, 15 bp, Homo sapiens
tagatataaggtgct

SEQ ID NO: 965555 - DNA, 15 bp, Homo sapiens
atagatataaggtgc

SEQ ID NO: 965556 - DNA, 15 bp, Homo sapiens
gatagatataaggtg

SEQ ID NO: 965557 - DNA, 15 bp, Homo sapiens
ggatagatataaggt

SEQ ID NO: 965558 - DNA, 15 bp, Homo sapiens
aggatagatataagg

SEQ ID NO: 965559 - DNA, 15 bp, Homo sapiens
gaggatagatataag

SEQ ID NO: 965560 - DNA, 15 bp, Homo sapiens
ggaggatagatataa

SEQ ID NO: 965561 - DNA, 15 bp, Homo sapiens
aggaggatagatata

SEQ ID NO: 965562 - DNA, 15 bp, Homo sapiens
gaggaggatagatat

SEQ ID NO: 965563 - DNA, 15 bp, Homo sapiens
tgaggaggatagata

SEQ ID NO: 965564 - DNA, 15 bp, Homo sapiens
ttgaggaggatagat

SEQ ID NO: 965565 - DNA, 15 bp, Homo sapiens
gttgaggaggataga

SEQ ID NO: 965566 - DNA, 15 bp, Homo sapiens
agttgaggaggatag

SEQ ID NO: 965567 - DNA, 15 bp, Homo sapiens
cagttgaggaggata

SEQ ID NO: 965568 - DNA, 15 bp, Homo sapiens
gcagttgaggaggat

SEQ ID NO: 965569 - DNA, 15 bp, Homo sapiens
cgcagttgaggagga

SEQ ID NO: 965570 - DNA, 15 bp, Homo sapiens
tcgcagttgaggagg

SEQ ID NO: 965571 - DNA, 15 bp, Homo sapiens
ctcgcagttgaggag

SEQ ID NO: 965572 - DNA, 15 bp, Homo sapiens
cctcgcagttgagga

SEQ ID NO: 965573 - DNA, 15 bp, Homo sapiens
acctcgcagttgagg

SEQ ID NO: 965574 - DNA, 15 bp, Homo sapiens
gacctcgcagttgag

SEQ ID NO: 965575 - DNA, 15 bp, Homo sapiens
tgacctcgcagttga

SEQ ID NO: 965576 - DNA, 15 bp, Homo sapiens
gtgacctcgcagttg

SEQ ID NO: 965577 - DNA, 15 bp, Homo sapiens
agtgacctcgcagtt

SEQ ID NO: 965578 - DNA, 15 bp, Homo sapiens
tagtgacctcgcagt

SEQ ID NO: 965579 - DNA, 15 bp, Homo sapiens
gtagtgacctcgcag

SEQ ID NO: 965580 - DNA, 15 bp, Homo sapiens
tgtagtgacctcgca

SEQ ID NO: 965581 - DNA, 15 bp, Homo sapiens
ctgtagtgacctcgc

SEQ ID NO: 965582 - DNA, 15 bp, Homo sapiens
gctgtagtgacctcg

SEQ ID NO: 965583 - DNA, 15 bp, Homo sapiens
tgctgtagtgacctc

SEQ ID NO: 965584 - DNA, 15 bp, Homo sapiens
gtgctgtagtgacct

SEQ ID NO: 965585 - DNA, 15 bp, Homo sapiens
agtgctgtagtgacc

SEQ ID NO: 965586 - DNA, 15 bp, Homo sapiens
tagtgctgtagtgac

SEQ ID NO: 965587 - DNA, 15 bp, Homo sapiens
atagtgctgtagtga

SEQ ID NO: 965588 - DNA, 15 bp, Homo sapiens
tatagtgctgtagtg

SEQ ID NO: 965589 - DNA, 15 bp, Homo sapiens
gtatagtgctgtagt

SEQ ID NO: 965590 - DNA, 15 bp, Homo sapiens
agtatagtgctgtag

SEQ ID NO: 965591 - DNA, 15 bp, Homo sapiens
tagtatagtgctgta

SEQ ID NO: 965592 - DNA, 15 bp, Homo sapiens
ttagtatagtgctgt

SEQ ID NO: 965593 - DNA, 15 bp, Homo sapiens
cttagtatagtgctg

SEQ ID NO: 965594 - DNA, 15 bp, Homo sapiens
gcttagtatagtgct

SEQ ID NO: 965595 - DNA, 15 bp, Homo sapiens
ggcttagtatagtgc

SEQ ID NO: 965596 - DNA, 15 bp, Homo sapiens
gggcttagtatagtg

SEQ ID NO: 965597 - DNA, 15 bp, Homo sapiens
ggggcttagtatagt

SEQ ID NO: 965598 - DNA, 15 bp, Homo sapiens
aggggcttagtatag

SEQ ID NO: 965599 - DNA, 15 bp, Homo sapiens
caggggcttagtata

SEQ ID NO: 965600 - DNA, 15 bp, Homo sapiens
acaggggcttagtat

SEQ ID NO: 965601 - DNA, 15 bp, Homo sapiens
aacaggggcttagta

SEQ ID NO: 965602 - DNA, 15 bp, Homo sapiens
taacaggggcttagt

SEQ ID NO: 965603 - DNA, 15 bp, Homo sapiens
ttaacaggggcttag

SEQ ID NO: 965604 - DNA, 15 bp, Homo sapiens
gttaacaggggctta

SEQ ID NO: 965605 - DNA, 15 bp, Homo sapiens
agttaacaggggctt

SEQ ID NO: 965606 - DNA, 15 bp, Homo sapiens
aagttaacaggggct

SEQ ID NO: 965607 - DNA, 15 bp, Homo sapiens
gaagttaacaggggc

SEQ ID NO: 965608 - DNA, 15 bp, Homo sapiens
ggaagttaacagggg

SEQ ID NO: 965609 - DNA, 15 bp, Homo sapiens
aggaagttaacaggg

SEQ ID NO: 965610 - DNA, 15 bp, Homo sapiens
aaggaagttaacagg

SEQ ID NO: 965611 - DNA, 15 bp, Homo sapiens
gaaggaagttaacag

SEQ ID NO: 965612 - DNA, 15 bp, Homo sapiens
agaaggaagttaaca

SEQ ID NO: 965613 - DNA, 15 bp, Homo sapiens
gagaaggaagttaac

SEQ ID NO: 965614 - DNA, 15 bp, Homo sapiens
agagaaggaagttaa

SEQ ID NO: 965615 - DNA, 15 bp, Homo sapiens
aagagaaggaagtta

SEQ ID NO: 965616 - DNA, 15 bp, Homo sapiens
caagagaaggaagtt

SEQ ID NO: 965617 - DNA, 15 bp, Homo sapiens
tcaagagaaggaagt

SEQ ID NO: 965618 - DNA, 15 bp, Homo sapiens
ttcaagagaaggaag

SEQ ID NO: 965619 - DNA, 15 bp, Homo sapiens
tttcaagagaaggaa

SEQ ID NO: 965620 - DNA, 15 bp, Homo sapiens
gtttcaagagaagga

SEQ ID NO: 965621 - DNA, 15 bp, Homo sapiens
ggtttcaagagaagg

SEQ ID NO: 965622 - DNA, 15 bp, Homo sapiens
gggtttcaagagaag

SEQ ID NO: 965623 - DNA, 15 bp, Homo sapiens
tgggtttcaagagaa

SEQ ID NO: 965624 - DNA, 15 bp, Homo sapiens
atgggtttcaagaga

SEQ ID NO: 965625 - DNA, 15 bp, Homo sapiens
catgggtttcaagag

SEQ ID NO: 965626 - DNA, 15 bp, Homo sapiens
gcatgggtttcaaga

SEQ ID NO: 965627 - DNA, 15 bp, Homo sapiens
tgcatgggtttcaag

SEQ ID NO: 965628 - DNA, 15 bp, Homo sapiens
ttgcatgggtttcaa

SEQ ID NO: 965629 - DNA, 15 bp, Homo sapiens
gttgcatgggtttca

SEQ ID NO: 965630 - DNA, 15 bp, Homo sapiens
agttgcatgggtttc

SEQ ID NO: 965631 - DNA, 15 bp, Homo sapiens
gagttgcatgggttt

SEQ ID NO: 965632 - DNA, 15 bp, Homo sapiens
tgagttgcatgggtt

SEQ ID NO: 965633 - DNA, 15 bp, Homo sapiens
gtgagttgcatgggt

SEQ ID NO: 965634 - DNA, 15 bp, Homo sapiens
tgtgagttgcatggg

SEQ ID NO: 965635 - DNA, 15 bp, Homo sapiens
atgtgagttgcatgg

SEQ ID NO: 965636 - DNA, 15 bp, Homo sapiens
catgtgagttgcatg

SEQ ID NO: 965637 - DNA, 15 bp, Homo sapiens
tcatgtgagttgcat

SEQ ID NO: 965638 - DNA, 15 bp, Homo sapiens
atcatgtgagttgca

SEQ ID NO: 965639 - DNA, 15 bp, Homo sapiens
gatcatgtgagttgc

SEQ ID NO: 965640 - DNA, 15 bp, Homo sapiens
ggatcatgtgagttg

SEQ ID NO: 965641 - DNA, 15 bp, Homo sapiens
aggatcatgtgagtt

SEQ ID NO: 965642 - DNA, 15 bp, Homo sapiens
taggatcatgtgagt

SEQ ID NO: 965643 - DNA, 15 bp, Homo sapiens
ataggatcatgtgag

SEQ ID NO: 965644 - DNA, 15 bp, Homo sapiens
aataggatcatgtga

SEQ ID NO: 965645 - DNA, 15 bp, Homo sapiens
gaataggatcatgtg

SEQ ID NO: 965646 - DNA, 15 bp, Homo sapiens
agaataggatcatgt

SEQ ID NO: 965647 - DNA, 15 bp, Homo sapiens
gagaataggatcatg

SEQ ID NO: 965648 - DNA, 15 bp, Homo sapiens
tgagaataggatcat

SEQ ID NO: 965649 - DNA, 15 bp, Homo sapiens
ctgagaataggatca

SEQ ID NO: 965650 - DNA, 15 bp, Homo sapiens
gctgagaataggatc

SEQ ID NO: 965651 - DNA, 15 bp, Homo sapiens
ggctgagaataggat

SEQ ID NO: 965652 - DNA, 15 bp, Homo sapiens
aggctgagaatagga

SEQ ID NO: 965653 - DNA, 15 bp, Homo sapiens
caggctgagaatagg

SEQ ID NO: 965654 - DNA, 15 bp, Homo sapiens
acaggctgagaatag

SEQ ID NO: 965655 - DNA, 15 bp, Homo sapiens
cacaggctgagaata

SEQ ID NO: 965656 - DNA, 15 bp, Homo sapiens
tcacaggctgagaat

SEQ ID NO: 965657 - DNA, 15 bp, Homo sapiens
ttcacaggctgagaa

SEQ ID NO: 965658 - DNA, 15 bp, Homo sapiens
attcacaggctgaga

SEQ ID NO: 965659 - DNA, 15 bp, Homo sapiens
gattcacaggctgag

SEQ ID NO: 965660 - DNA, 15 bp, Homo sapiens
agattcacaggctga

SEQ ID NO: 965661 - DNA, 15 bp, Homo sapiens
gagattcacaggctg

SEQ ID NO: 965662 - DNA, 15 bp, Homo sapiens
tgagattcacaggct

SEQ ID NO: 965663 - DNA, 15 bp, Homo sapiens
ctgagattcacaggc

SEQ ID NO: 965664 - DNA, 15 bp, Homo sapiens
gctgagattcacagg

SEQ ID NO: 965665 - DNA, 15 bp, Homo sapiens
ggctgagattcacag

SEQ ID NO: 965666 - DNA, 15 bp, Homo sapiens
aggctgagattcaca

SEQ ID NO: 965667 - DNA, 15 bp, Homo sapiens
gaggctgagattcac

SEQ ID NO: 965668 - DNA, 15 bp, Homo sapiens
ggaggctgagattca

SEQ ID NO: 965669 - DNA, 15 bp, Homo sapiens
aggaggctgagattc

SEQ ID NO: 965670 - DNA, 15 bp, Homo sapiens
caggaggctgagatt

SEQ ID NO: 965671 - DNA, 15 bp, Homo sapiens
gcaggaggctgagat

SEQ ID NO: 965672 - DNA, 15 bp, Homo sapiens
tgcaggaggctgaga

SEQ ID NO: 965673 - DNA, 15 bp, Homo sapiens
ttgcaggaggctgag

SEQ ID NO: 965674 - DNA, 15 bp, Homo sapiens
attgcaggaggctga

SEQ ID NO: 965675 - DNA, 15 bp, Homo sapiens
gattgcaggaggctg

SEQ ID NO: 965676 - DNA, 15 bp, Homo sapiens
ggattgcaggaggct

SEQ ID NO: 965677 - DNA, 15 bp, Homo sapiens
aggattgcaggaggc

SEQ ID NO: 965678 - DNA, 15 bp, Homo sapiens
caggattgcaggagg

SEQ ID NO: 965679 - DNA, 15 bp, Homo sapiens
acaggattgcaggag

SEQ ID NO: 965680 - DNA, 15 bp, Homo sapiens
cacaggattgcagga

SEQ ID NO: 965681 - DNA, 15 bp, Homo sapiens
tcacaggattgcagg

SEQ ID NO: 965682 - DNA, 15 bp, Homo sapiens
ttcacaggattgcag

SEQ ID NO: 965683 - DNA, 15 bp, Homo sapiens
tttcacaggattgca

SEQ ID NO: 965684 - DNA, 15 bp, Homo sapiens
atttcacaggattgc

SEQ ID NO: 965685 - DNA, 15 bp, Homo sapiens
aatttcacaggattg

SEQ ID NO: 965686 - DNA, 15 bp, Homo sapiens
gaatttcacaggatt

SEQ ID NO: 965687 - DNA, 15 bp, Homo sapiens
tgaatttcacaggat

SEQ ID NO: 965688 - DNA, 15 bp, Homo sapiens
ttgaatttcacagga

SEQ ID NO: 965689 - DNA, 15 bp, Homo sapiens
gttgaatttcacagg

SEQ ID NO: 965690 - DNA, 15 bp, Homo sapiens
agttgaatttcacag

SEQ ID NO: 965691 - DNA, 15 bp, Homo sapiens
aagttgaatttcaca

SEQ ID NO: 965692 - DNA, 15 bp, Homo sapiens
caagttgaatttcac

SEQ ID NO: 965693 - DNA, 15 bp, Homo sapiens
ccaagttgaatttca

SEQ ID NO: 965694 - DNA, 15 bp, Homo sapiens
accaagttgaatttc

SEQ ID NO: 965695 - DNA, 15 bp, Homo sapiens
gaccaagttgaattt

SEQ ID NO: 965696 - DNA, 15 bp, Homo sapiens
agaccaagttgaatt

SEQ ID NO: 965697 - DNA, 15 bp, Homo sapiens
gagaccaagttgaat

SEQ ID NO: 965698 - DNA, 15 bp, Homo sapiens
ggagaccaagttgaa

SEQ ID NO: 965699 - DNA, 15 bp, Homo sapiens
aggagaccaagttga

SEQ ID NO: 965700 - DNA, 15 bp, Homo sapiens
taggagaccaagttg

SEQ ID NO: 965701 - DNA, 15 bp, Homo sapiens
gtaggagaccaagtt

SEQ ID NO: 965702 - DNA, 15 bp, Homo sapiens
agtaggagaccaagt

SEQ ID NO: 965703 - DNA, 15 bp, Homo sapiens
gagtaggagaccaag

SEQ ID NO: 965704 - DNA, 15 bp, Homo sapiens
agagtaggagaccaa

SEQ ID NO: 965705 - DNA, 15 bp, Homo sapiens
cagagtaggagacca

SEQ ID NO: 965706 - DNA, 15 bp, Homo sapiens
tcagagtaggagacc

SEQ ID NO: 965707 - DNA, 15 bp, Homo sapiens
ttcagagtaggagac

SEQ ID NO: 965708 - DNA, 15 bp, Homo sapiens
attcagagtaggaga

SEQ ID NO: 965709 - DNA, 15 bp, Homo sapiens
cattcagagtaggag

SEQ ID NO: 965710 - DNA, 15 bp, Homo sapiens
acattcagagtagga

SEQ ID NO: 965711 - DNA, 15 bp, Homo sapiens
cacattcagagtagg

SEQ ID NO: 965712 - DNA, 15 bp, Homo sapiens
acacattcagagtag

SEQ ID NO: 965713 - DNA, 15 bp, Homo sapiens
tacacattcagagta

SEQ ID NO: 965714 - DNA, 15 bp, Homo sapiens
atacacattcagagt

SEQ ID NO: 965715 - DNA, 15 bp, Homo sapiens
tatacacattcagag

SEQ ID NO: 965716 - DNA, 15 bp, Homo sapiens
ttatacacattcaga

SEQ ID NO: 965717 - DNA, 15 bp, Homo sapiens
tttatacacattcag

SEQ ID NO: 965718 - DNA, 15 bp, Homo sapiens
ttttatacacattca

SEQ ID NO: 965719 - DNA, 15 bp, Homo sapiens
tttttatacacattc

SEQ ID NO: 965720 - DNA, 15 bp, Homo sapiens
atttttatacacatt

SEQ ID NO: 965721 - DNA, 15 bp, Homo sapiens
tatttttatacacat

SEQ ID NO: 965722 - DNA, 15 bp, Homo sapiens
ttatttttatacaca

SEQ ID NO: 965723 - DNA, 15 bp, Homo sapiens
gttatttttatacac

SEQ ID NO: 965724 - DNA, 15 bp, Homo sapiens
tgttatttttataca

SEQ ID NO: 965725 - DNA, 15 bp, Homo sapiens
ctgttatttttatac

SEQ ID NO: 965726 - DNA, 15 bp, Homo sapiens
tctgttatttttata

SEQ ID NO: 965727 - DNA, 15 bp, Homo sapiens
ctctgttatttttat

SEQ ID NO: 965728 - DNA, 15 bp, Homo sapiens
tctctgttattttta

SEQ ID NO: 965729 - DNA, 15 bp, Homo sapiens
ttctctgttattttt

SEQ ID NO: 965730 - DNA, 15 bp, Homo sapiens
gttctctgttatttt

SEQ ID NO: 965731 - DNA, 15 bp, Homo sapiens
tgttctctgttattt

SEQ ID NO: 965732 - DNA, 15 bp, Homo sapiens
ctgttctctgttatt

SEQ ID NO: 965733 - DNA, 15 bp, Homo sapiens
actgttctctgttat

SEQ ID NO: 965734 - DNA, 15 bp, Homo sapiens
aactgttctctgtta

SEQ ID NO: 965735 - DNA, 15 bp, Homo sapiens
gaactgttctctgtt

SEQ ID NO: 965736 - DNA, 15 bp, Homo sapiens
ggaactgttctctgt

SEQ ID NO: 965737 - DNA, 15 bp, Homo sapiens
aggaactgttctctg

SEQ ID NO: 965738 - DNA, 15 bp, Homo sapiens
caggaactgttctct

SEQ ID NO: 965739 - DNA, 15 bp, Homo sapiens
tcaggaactgttctc

SEQ ID NO: 965740 - DNA, 15 bp, Homo sapiens
ttcaggaactgttct

SEQ ID NO: 965741 - DNA, 15 bp, Homo sapiens
gttcaggaactgttc

SEQ ID NO: 965742 - DNA, 15 bp, Homo sapiens
agttcaggaactgtt

SEQ ID NO: 965743 - DNA, 15 bp, Homo sapiens
gagttcaggaactgt

SEQ ID NO: 965744 - DNA, 15 bp, Homo sapiens
agagttcaggaactg

SEQ ID NO: 965745 - DNA, 15 bp, Homo sapiens
cagagttcaggaact

SEQ ID NO: 965746 - DNA, 15 bp, Homo sapiens
tcagagttcaggaac

SEQ ID NO: 965747 - DNA, 15 bp, Homo sapiens
atcagagttcaggaa

SEQ ID NO: 965748 - DNA, 15 bp, Homo sapiens
catcagagttcagga

SEQ ID NO: 965749 - DNA, 15 bp, Homo sapiens
tcatcagagttcagg

SEQ ID NO: 965750 - DNA, 15 bp, Homo sapiens
ctcatcagagttcag

SEQ ID NO: 965751 - DNA, 15 bp, Homo sapiens
actcatcagagttca

SEQ ID NO: 965752 - DNA, 15 bp, Homo sapiens
tactcatcagagttc

SEQ ID NO: 965753 - DNA, 15 bp, Homo sapiens
ttactcatcagagtt

SEQ ID NO: 965754 - DNA, 15 bp, Homo sapiens
tttactcatcagagt

SEQ ID NO: 965755 - DNA, 15 bp, Homo sapiens
ttttactcatcagag

SEQ ID NO: 965756 - DNA, 15 bp, Homo sapiens
attttactcatcaga

SEQ ID NO: 965757 - DNA, 15 bp, Homo sapiens
cattttactcatcag

SEQ ID NO: 965758 - DNA, 15 bp, Homo sapiens
tcattttactcatca

SEQ ID NO: 965759 - DNA, 15 bp, Homo sapiens
atcattttactcatc

SEQ ID NO: 965760 - DNA, 15 bp, Homo sapiens
gatcattttactcat

SEQ ID NO: 965761 - DNA, 15 bp, Homo sapiens
agatcattttactca

SEQ ID NO: 965762 - DNA, 15 bp, Homo sapiens
tagatcattttactc

SEQ ID NO: 965763 - DNA, 15 bp, Homo sapiens
gtagatcattttact

SEQ ID NO: 965764 - DNA, 15 bp, Homo sapiens
ggtagatcattttac

SEQ ID NO: 965765 - DNA, 15 bp, Homo sapiens
aggtagatcatttta

SEQ ID NO: 965766 - DNA, 15 bp, Homo sapiens
aaggtagatcatttt

SEQ ID NO: 965767 - DNA, 15 bp, Homo sapiens
taaggtagatcattt

SEQ ID NO: 965768 - DNA, 15 bp, Homo sapiens
ataaggtagatcatt

SEQ ID NO: 965769 - DNA, 15 bp, Homo sapiens
aataaggtagatcat

SEQ ID NO: 965770 - DNA, 15 bp, Homo sapiens
taataaggtagatca

SEQ ID NO: 965771 - DNA, 15 bp, Homo sapiens
gtaataaggtagatc

SEQ ID NO: 965772 - DNA, 15 bp, Homo sapiens
tgtaataaggtagat

SEQ ID NO: 965773 - DNA, 15 bp, Homo sapiens
atgtaataaggtaga

SEQ ID NO: 965774 - DNA, 15 bp, Homo sapiens
catgtaataaggtag

SEQ ID NO: 965775 - DNA, 15 bp, Homo sapiens
acatgtaataaggta

SEQ ID NO: 965776 - DNA, 15 bp, Homo sapiens
cacatgtaataaggt

SEQ ID NO: 965777 - DNA, 15 bp, Homo sapiens
ccacatgtaataagg

SEQ ID NO: 965778 - DNA, 15 bp, Homo sapiens
accacatgtaataag

SEQ ID NO: 965779 - DNA, 15 bp, Homo sapiens
taccacatgtaataa

SEQ ID NO: 965780 - DNA, 15 bp, Homo sapiens
ataccacatgtaata

SEQ ID NO: 965781 - DNA, 15 bp, Homo sapiens
aataccacatgtaat

SEQ ID NO: 965782 - DNA, 15 bp, Homo sapiens
taataccacatgtaa

SEQ ID NO: 965783 - DNA, 15 bp, Homo sapiens
ataataccacatgta

SEQ ID NO: 965784 - DNA, 15 bp, Homo sapiens
tataataccacatgt

SEQ ID NO: 965785 - DNA, 15 bp, Homo sapiens
ttataataccacatg

SEQ ID NO: 965786 - DNA, 15 bp, Homo sapiens
attataataccacat

SEQ ID NO: 965787 - DNA, 15 bp, Homo sapiens
tattataataccaca

SEQ ID NO: 965788 - DNA, 15 bp, Homo sapiens
ttattataataccac

SEQ ID NO: 965789 - DNA, 15 bp, Homo sapiens
tttattataatacca

SEQ ID NO: 965790 - DNA, 15 bp, Homo sapiens
atttattataatacc

SEQ ID NO: 965791 - DNA, 15 bp, Homo sapiens
tatttattataatac

SEQ ID NO: 965792 - DNA, 15 bp, Homo sapiens
ttatttattataata

SEQ ID NO: 965793 - DNA, 15 bp, Homo sapiens
tttatttattataat

SEQ ID NO: 965794 - DNA, 15 bp, Homo sapiens
atttatttattataa

SEQ ID NO: 965795 - DNA, 15 bp, Homo sapiens
tatttatttattata

SEQ ID NO: 965796 - DNA, 15 bp, Homo sapiens
atatttatttattat

SEQ ID NO: 965797 - DNA, 15 bp, Homo sapiens
tatatttatttatta

SEQ ID NO: 965798 - DNA, 15 bp, Homo sapiens
gtatatttatttatt

SEQ ID NO: 965799 - DNA, 15 bp, Homo sapiens
tgtatatttatttat

SEQ ID NO: 965800 - DNA, 15 bp, Homo sapiens
atgtatatttattta

SEQ ID NO: 965801 - DNA, 15 bp, Homo sapiens
aatgtatatttattt

SEQ ID NO: 965802 - DNA, 15 bp, Homo sapiens
taatgtatatttatt

SEQ ID NO: 965803 - DNA, 15 bp, Homo sapiens
ttaatgtatatttat

SEQ ID NO: 965804 - DNA, 15 bp, Homo sapiens
attaatgtatattta

SEQ ID NO: 965805 - DNA, 15 bp, Homo sapiens
aattaatgtatattt

SEQ ID NO: 965806 - DNA, 15 bp, Homo sapiens
aaattaatgtatatt

SEQ ID NO: 965807 - DNA, 15 bp, Homo sapiens
gaaattaatgtatat

SEQ ID NO: 965808 - DNA, 15 bp, Homo sapiens
agaaattaatgtata

SEQ ID NO: 965809 - DNA, 15 bp, Homo sapiens
aagaaattaatgtat

SEQ ID NO: 965810 - DNA, 15 bp, Homo sapiens
aaagaaattaatgta

SEQ ID NO: 965811 - DNA, 15 bp, Homo sapiens
gaaagaaattaatgt

SEQ ID NO: 965812 - DNA, 15 bp, Homo sapiens
ggaaagaaattaatg

SEQ ID NO: 965813 - DNA, 15 bp, Homo sapiens
gggaaagaaattaat

SEQ ID NO: 965814 - DNA, 15 bp, Homo sapiens
ggggaaagaaattaa

SEQ ID NO: 965815 - DNA, 15 bp, Homo sapiens
tggggaaagaaatta

SEQ ID NO: 965816 - DNA, 15 bp, Homo sapiens
atggggaaagaaatt

SEQ ID NO: 965817 - DNA, 15 bp, Homo sapiens
aatggggaaagaaat

SEQ ID NO: 965818 - DNA, 15 bp, Homo sapiens
aaatggggaaagaaa

SEQ ID NO: 965819 - DNA, 15 bp, Homo sapiens
aaaatggggaaagaa

SEQ ID NO: 965820 - DNA, 15 bp, Homo sapiens
gaaaatggggaaaga

SEQ ID NO: 965821 - DNA, 15 bp, Homo sapiens
ggaaaatggggaaag

SEQ ID NO: 965822 - DNA, 15 bp, Homo sapiens
tggaaaatggggaaa

SEQ ID NO: 965823 - DNA, 15 bp, Homo sapiens
ctggaaaatggggaa

SEQ ID NO: 965824 - DNA, 15 bp, Homo sapiens
gctggaaaatgggga

SEQ ID NO: 965825 - DNA, 15 bp, Homo sapiens
tgctggaaaatgggg

SEQ ID NO: 965826 - DNA, 15 bp, Homo sapiens
gtgctggaaaatggg

SEQ ID NO: 965827 - DNA, 15 bp, Homo sapiens
tgtgctggaaaatgg

SEQ ID NO: 965828 - DNA, 15 bp, Homo sapiens
gtgtgctggaaaatg

SEQ ID NO: 965829 - DNA, 15 bp, Homo sapiens
tgtgtgctggaaaat

SEQ ID NO: 965830 - DNA, 15 bp, Homo sapiens
ctgtgtgctggaaaa

SEQ ID NO: 965831 - DNA, 15 bp, Homo sapiens
gctgtgtgctggaaa

SEQ ID NO: 965832 - DNA, 15 bp, Homo sapiens
agctgtgtgctggaa

SEQ ID NO: 965833 - DNA, 15 bp, Homo sapiens
gagctgtgtgctgga

SEQ ID NO: 965834 - DNA, 15 bp, Homo sapiens
ggagctgtgtgctgg

SEQ ID NO: 965835 - DNA, 15 bp, Homo sapiens
aggagctgtgtgctg

SEQ ID NO: 965836 - DNA, 15 bp, Homo sapiens
taggagctgtgtgct

SEQ ID NO: 965837 - DNA, 15 bp, Homo sapiens
ttaggagctgtgtgc

SEQ ID NO: 965838 - DNA, 15 bp, Homo sapiens
tttaggagctgtgtg

SEQ ID NO: 965839 - DNA, 15 bp, Homo sapiens
ttttaggagctgtgt

SEQ ID NO: 965840 - DNA, 15 bp, Homo sapiens
cttttaggagctgtg

SEQ ID NO: 965841 - DNA, 15 bp, Homo sapiens
tcttttaggagctgt

SEQ ID NO: 965842 - DNA, 15 bp, Homo sapiens
gtcttttaggagctg

SEQ ID NO: 965843 - DNA, 15 bp, Homo sapiens
agtcttttaggagct

SEQ ID NO: 965844 - DNA, 15 bp, Homo sapiens
aagtcttttaggagc

SEQ ID NO: 965845 - DNA, 15 bp, Homo sapiens
caagtcttttaggag

SEQ ID NO: 965846 - DNA, 15 bp, Homo sapiens
acaagtcttttagga

SEQ ID NO: 965847 - DNA, 15 bp, Homo sapiens
tacaagtcttttagg

SEQ ID NO: 965848 - DNA, 15 bp, Homo sapiens
ttacaagtcttttag

SEQ ID NO: 965849 - DNA, 15 bp, Homo sapiens
gttacaagtctttta

SEQ ID NO: 965850 - DNA, 15 bp, Homo sapiens
agttacaagtctttt

SEQ ID NO: 965851 - DNA, 15 bp, Homo sapiens
aagttacaagtcttt

SEQ ID NO: 965852 - DNA, 15 bp, Homo sapiens
gaagttacaagtctt

SEQ ID NO: 965853 - DNA, 15 bp, Homo sapiens
ggaagttacaagtct

SEQ ID NO: 965854 - DNA, 15 bp, Homo sapiens
aggaagttacaagtc

SEQ ID NO: 965855 - DNA, 15 bp, Homo sapiens
caggaagttacaagt

SEQ ID NO: 965856 - DNA, 15 bp, Homo sapiens
tcaggaagttacaag

SEQ ID NO: 965857 - DNA, 15 bp, Homo sapiens
ctcaggaagttacaa

SEQ ID NO: 965858 - DNA, 15 bp, Homo sapiens
actcaggaagttaca

SEQ ID NO: 965859 - DNA, 15 bp, Homo sapiens
cactcaggaagttac

SEQ ID NO: 965860 - DNA, 15 bp, Homo sapiens
tcactcaggaagtta

SEQ ID NO: 965861 - DNA, 15 bp, Homo sapiens
atcactcaggaagtt

SEQ ID NO: 965862 - DNA, 15 bp, Homo sapiens
tatcactcaggaagt

SEQ ID NO: 965863 - DNA, 15 bp, Homo sapiens
ctatcactcaggaag

SEQ ID NO: 965864 - DNA, 15 bp, Homo sapiens
cctatcactcaggaa

SEQ ID NO: 965865 - DNA, 15 bp, Homo sapiens
acctatcactcagga

SEQ ID NO: 965866 - DNA, 15 bp, Homo sapiens
tacctatcactcagg

SEQ ID NO: 965867 - DNA, 15 bp, Homo sapiens
atacctatcactcag

SEQ ID NO: 965868 - DNA, 15 bp, Homo sapiens
catacctatcactca

SEQ ID NO: 965869 - DNA, 15 bp, Homo sapiens
gcatacctatcactc

SEQ ID NO: 965870 - DNA, 15 bp, Homo sapiens
agcatacctatcact

SEQ ID NO: 965871 - DNA, 15 bp, Homo sapiens
tagcatacctatcac

SEQ ID NO: 965872 - DNA, 15 bp, Homo sapiens
ctagcatacctatca

SEQ ID NO: 965873 - DNA, 15 bp, Homo sapiens
cctagcatacctatc

SEQ ID NO: 965874 - DNA, 15 bp, Homo sapiens
acctagcatacctat

SEQ ID NO: 965875 - DNA, 15 bp, Homo sapiens
tacctagcataccta

SEQ ID NO: 965876 - DNA, 15 bp, Homo sapiens
ttacctagcatacct

SEQ ID NO: 965877 - DNA, 15 bp, Homo sapiens
tttacctagcatacc

SEQ ID NO: 965878 - DNA, 15 bp, Homo sapiens
atttacctagcatac

SEQ ID NO: 965879 - DNA, 15 bp, Homo sapiens
aatttacctagcata

SEQ ID NO: 965880 - DNA, 15 bp, Homo sapiens
aaatttacctagcat

SEQ ID NO: 965881 - DNA, 15 bp, Homo sapiens
aaaatttacctagca

SEQ ID NO: 965882 - DNA, 15 bp, Homo sapiens
aaaaatttacctagc

SEQ ID NO: 965883 - DNA, 15 bp, Homo sapiens
aaaaaatttacctag

SEQ ID NO: 965884 - DNA, 15 bp, Homo sapiens
caaaaaatttaccta

SEQ ID NO: 965885 - DNA, 15 bp, Homo sapiens
acaaaaaatttacct

SEQ ID NO: 965886 - DNA, 15 bp, Homo sapiens
aacaaaaaatttacc

SEQ ID NO: 965887 - DNA, 15 bp, Homo sapiens
gaacaaaaaatttac

SEQ ID NO: 965888 - DNA, 15 bp, Homo sapiens
agaacaaaaaattta

SEQ ID NO: 965889 - DNA, 15 bp, Homo sapiens
tagaacaaaaaattt

SEQ ID NO: 965890 - DNA, 15 bp, Homo sapiens
atagaacaaaaaatt

SEQ ID NO: 965891 - DNA, 15 bp, Homo sapiens
catagaacaaaaaat

SEQ ID NO: 965892 - DNA, 15 bp, Homo sapiens
acatagaacaaaaaa

SEQ ID NO: 965893 - DNA, 15 bp, Homo sapiens
cacatagaacaaaaa

SEQ ID NO: 965894 - DNA, 15 bp, Homo sapiens
tcacatagaacaaaa

SEQ ID NO: 965895 - DNA, 15 bp, Homo sapiens
gtcacatagaacaaa

SEQ ID NO: 965896 - DNA, 15 bp, Homo sapiens
ggtcacatagaacaa

SEQ ID NO: 965897 - DNA, 15 bp, Homo sapiens
aggtcacatagaaca

SEQ ID NO: 965898 - DNA, 15 bp, Homo sapiens
aaggtcacatagaac

SEQ ID NO: 965899 - DNA, 15 bp, Homo sapiens
gaaggtcacatagaa

SEQ ID NO: 965900 - DNA, 15 bp, Homo sapiens
cgaaggtcacataga

SEQ ID NO: 965901 - DNA, 15 bp, Homo sapiens
tcgaaggtcacatag

SEQ ID NO: 965902 - DNA, 15 bp, Homo sapiens
gtcgaaggtcacata

SEQ ID NO: 965903 - DNA, 15 bp, Homo sapiens
agtcgaaggtcacat

SEQ ID NO: 965904 - DNA, 15 bp, Homo sapiens
gagtcgaaggtcaca

SEQ ID NO: 965905 - DNA, 15 bp, Homo sapiens
ggagtcgaaggtcac

SEQ ID NO: 965906 - DNA, 15 bp, Homo sapiens
tggagtcgaaggtca

SEQ ID NO: 965907 - DNA, 15 bp, Homo sapiens
ctggagtcgaaggtc

SEQ ID NO: 965908 - DNA, 15 bp, Homo sapiens
actggagtcgaaggt

SEQ ID NO: 965909 - DNA, 15 bp, Homo sapiens
aactggagtcgaagg

SEQ ID NO: 965910 - DNA, 15 bp, Homo sapiens
gaactggagtcgaag

SEQ ID NO: 965911 - DNA, 15 bp, Homo sapiens
agaactggagtcgaa

SEQ ID NO: 965912 - DNA, 15 bp, Homo sapiens
aagaactggagtcga

SEQ ID NO: 965913 - DNA, 15 bp, Homo sapiens
caagaactggagtcg

SEQ ID NO: 965914 - DNA, 15 bp, Homo sapiens
tcaagaactggagtc

SEQ ID NO: 965915 - DNA, 15 bp, Homo sapiens
gtcaagaactggagt

SEQ ID NO: 965916 - DNA, 15 bp, Homo sapiens
tgtcaagaactggag

SEQ ID NO: 965917 - DNA, 15 bp, Homo sapiens
gtgtcaagaactgga

SEQ ID NO: 965918 - DNA, 15 bp, Homo sapiens
tgtgtcaagaactgg

SEQ ID NO: 965919 - DNA, 15 bp, Homo sapiens
ctgtgtcaagaactg

SEQ ID NO: 965920 - DNA, 15 bp, Homo sapiens
tctgtgtcaagaact

SEQ ID NO: 965921 - DNA, 15 bp, Homo sapiens
ctctgtgtcaagaac

SEQ ID NO: 965922 - DNA, 15 bp, Homo sapiens
gctctgtgtcaagaa

SEQ ID NO: 965923 - DNA, 15 bp, Homo sapiens
agctctgtgtcaaga

SEQ ID NO: 965924 - DNA, 15 bp, Homo sapiens
gagctctgtgtcaag

SEQ ID NO: 965925 - DNA, 15 bp, Homo sapiens
ggagctctgtgtcaa

SEQ ID NO: 965926 - DNA, 15 bp, Homo sapiens
aggagctctgtgtca

SEQ ID NO: 965927 - DNA, 15 bp, Homo sapiens
caggagctctgtgtc

SEQ ID NO: 965928 - DNA, 15 bp, Homo sapiens
tcaggagctctgtgt

SEQ ID NO: 965929 - DNA, 15 bp, Homo sapiens
atcaggagctctgtg

SEQ ID NO: 965930 - DNA, 15 bp, Homo sapiens
gatcaggagctctgt

SEQ ID NO: 965931 - DNA, 15 bp, Homo sapiens
ggatcaggagctctg

SEQ ID NO: 965932 - DNA, 15 bp, Homo sapiens
gggatcaggagctct

SEQ ID NO: 965933 - DNA, 15 bp, Homo sapiens
agggatcaggagctc

SEQ ID NO: 965934 - DNA, 15 bp, Homo sapiens
aagggatcaggagct

SEQ ID NO: 965935 - DNA, 15 bp, Homo sapiens
caagggatcaggagc

SEQ ID NO: 965936 - DNA, 15 bp, Homo sapiens
ccaagggatcaggag

SEQ ID NO: 965937 - DNA, 15 bp, Homo sapiens
tccaagggatcagga

SEQ ID NO: 965938 - DNA, 15 bp, Homo sapiens
ttccaagggatcagg

SEQ ID NO: 965939 - DNA, 15 bp, Homo sapiens
attccaagggatcag

SEQ ID NO: 965940 - DNA, 15 bp, Homo sapiens
aattccaagggatca

SEQ ID NO: 965941 - DNA, 15 bp, Homo sapiens
aaattccaagggatc

SEQ ID NO: 965942 - DNA, 15 bp, Homo sapiens
gaaattccaagggat

SEQ ID NO: 965943 - DNA, 15 bp, Homo sapiens
ggaaattccaaggga

SEQ ID NO: 965944 - DNA, 15 bp, Homo sapiens
tggaaattccaaggg

SEQ ID NO: 965945 - DNA, 15 bp, Homo sapiens
atggaaattccaagg

SEQ ID NO: 965946 - DNA, 15 bp, Homo sapiens
tatggaaattccaag

SEQ ID NO: 965947 - DNA, 15 bp, Homo sapiens
ctatggaaattccaa

SEQ ID NO: 965948 - DNA, 15 bp, Homo sapiens
actatggaaattcca

SEQ ID NO: 965949 - DNA, 15 bp, Homo sapiens
cactatggaaattcc

SEQ ID NO: 965950 - DNA, 15 bp, Homo sapiens
tcactatggaaattc

SEQ ID NO: 965951 - DNA, 15 bp, Homo sapiens
atcactatggaaatt

SEQ ID NO: 965952 - DNA, 15 bp, Homo sapiens
tatcactatggaaat

SEQ ID NO: 965953 - DNA, 15 bp, Homo sapiens
ctatcactatggaaa

SEQ ID NO: 965954 - DNA, 15 bp, Homo sapiens
cctatcactatggaa

SEQ ID NO: 965955 - DNA, 15 bp, Homo sapiens
tcctatcactatgga

SEQ ID NO: 965956 - DNA, 15 bp, Homo sapiens
ctcctatcactatgg

SEQ ID NO: 965957 - DNA, 15 bp, Homo sapiens
gctcctatcactatg

SEQ ID NO: 965958 - DNA, 15 bp, Homo sapiens
tgctcctatcactat

SEQ ID NO: 965959 - DNA, 15 bp, Homo sapiens
atgctcctatcacta

SEQ ID NO: 965960 - DNA, 15 bp, Homo sapiens
gatgctcctatcact

SEQ ID NO: 965961 - DNA, 15 bp, Homo sapiens
agatgctcctatcac

SEQ ID NO: 965962 - DNA, 15 bp, Homo sapiens
aagatgctcctatca

SEQ ID NO: 965963 - DNA, 15 bp, Homo sapiens
aaagatgctcctatc

SEQ ID NO: 965964 - DNA, 15 bp, Homo sapiens
gaaagatgctcctat

SEQ ID NO: 965965 - DNA, 15 bp, Homo sapiens
tgaaagatgctccta

SEQ ID NO: 965966 - DNA, 15 bp, Homo sapiens
atgaaagatgctcct

SEQ ID NO: 965967 - DNA, 15 bp, Homo sapiens
aatgaaagatgctcc

SEQ ID NO: 965968 - DNA, 15 bp, Homo sapiens
gaatgaaagatgctc

SEQ ID NO: 965969 - DNA, 15 bp, Homo sapiens
agaatgaaagatgct

SEQ ID NO: 965970 - DNA, 15 bp, Homo sapiens
gagaatgaaagatgc

SEQ ID NO: 965971 - DNA, 15 bp, Homo sapiens
ggagaatgaaagatg

SEQ ID NO: 965972 - DNA, 15 bp, Homo sapiens
aggagaatgaaagat

SEQ ID NO: 965973 - DNA, 15 bp, Homo sapiens
caggagaatgaaaga

SEQ ID NO: 965974 - DNA, 15 bp, Homo sapiens
tcaggagaatgaaag

SEQ ID NO: 965975 - DNA, 15 bp, Homo sapiens
ttcaggagaatgaaa

SEQ ID NO: 965976 - DNA, 15 bp, Homo sapiens
cttcaggagaatgaa

SEQ ID NO: 965977 - DNA, 15 bp, Homo sapiens
acttcaggagaatga

SEQ ID NO: 965978 - DNA, 15 bp, Homo sapiens
tacttcaggagaatg

SEQ ID NO: 965979 - DNA, 15 bp, Homo sapiens
ttacttcaggagaat

SEQ ID NO: 965980 - DNA, 15 bp, Homo sapiens
gttacttcaggagaa

SEQ ID NO: 965981 - DNA, 15 bp, Homo sapiens
agttacttcaggaga

SEQ ID NO: 965982 - DNA, 15 bp, Homo sapiens
aagttacttcaggag

SEQ ID NO: 965983 - DNA, 15 bp, Homo sapiens
caagttacttcagga

SEQ ID NO: 965984 - DNA, 15 bp, Homo sapiens
ccaagttacttcagg

SEQ ID NO: 965985 - DNA, 15 bp, Homo sapiens
accaagttacttcag

SEQ ID NO: 965986 - DNA, 15 bp, Homo sapiens
caccaagttacttca

SEQ ID NO: 965987 - DNA, 15 bp, Homo sapiens
ccaccaagttacttc

SEQ ID NO: 965988 - DNA, 15 bp, Homo sapiens
cccaccaagttactt

SEQ ID NO: 965989 - DNA, 15 bp, Homo sapiens
gcccaccaagttact

SEQ ID NO: 965990 - DNA, 15 bp, Homo sapiens
agcccaccaagttac

SEQ ID NO: 965991 - DNA, 15 bp, Homo sapiens
aagcccaccaagtta

SEQ ID NO: 965992 - DNA, 15 bp, Homo sapiens
gaagcccaccaagtt

SEQ ID NO: 965993 - DNA, 15 bp, Homo sapiens
agaagcccaccaagt

SEQ ID NO: 965994 - DNA, 15 bp, Homo sapiens
cagaagcccaccaag

SEQ ID NO: 965995 - DNA, 15 bp, Homo sapiens
ccagaagcccaccaa

SEQ ID NO: 965996 - DNA, 15 bp, Homo sapiens
tccagaagcccacca

SEQ ID NO: 965997 - DNA, 15 bp, Homo sapiens
atccagaagcccacc

SEQ ID NO: 965998 - DNA, 15 bp, Homo sapiens
catccagaagcccac

SEQ ID NO: 965999 - DNA, 15 bp, Homo sapiens
ccatccagaagccca

SEQ ID NO: 966000 - DNA, 15 bp, Homo sapiens
cccatccagaagccc

SEQ ID NO: 966001 - DNA, 15 bp, Homo sapiens
tcccatccagaagcc

SEQ ID NO: 966002 - DNA, 15 bp, Homo sapiens
ctcccatccagaagc

SEQ ID NO: 966003 - DNA, 15 bp, Homo sapiens
gctcccatccagaag

SEQ ID NO: 966004 - DNA, 15 bp, Homo sapiens
agctcccatccagaa

SEQ ID NO: 966005 - DNA, 15 bp, Homo sapiens
cagctcccatccaga

SEQ ID NO: 966006 - DNA, 15 bp, Homo sapiens
ccagctcccatccag

SEQ ID NO: 966007 - DNA, 15 bp, Homo sapiens
accagctcccatcca

SEQ ID NO: 966008 - DNA, 15 bp, Homo sapiens
gaccagctcccatcc

SEQ ID NO: 966009 - DNA, 15 bp, Homo sapiens
tgaccagctcccatc

SEQ ID NO: 966010 - DNA, 15 bp, Homo sapiens
gtgaccagctcccat

SEQ ID NO: 966011 - DNA, 15 bp, Homo sapiens
tgtgaccagctccca

SEQ ID NO: 966012 - DNA, 15 bp, Homo sapiens
ttgtgaccagctccc

SEQ ID NO: 966013 - DNA, 15 bp, Homo sapiens
cttgtgaccagctcc

SEQ ID NO: 966014 - DNA, 15 bp, Homo sapiens
tcttgtgaccagctc

SEQ ID NO: 966015 - DNA, 15 bp, Homo sapiens
ttcttgtgaccagct

SEQ ID NO: 966016 - DNA, 15 bp, Homo sapiens
attcttgtgaccagc

SEQ ID NO: 966017 - DNA, 15 bp, Homo sapiens
cattcttgtgaccag

SEQ ID NO: 966018 - DNA, 15 bp, Homo sapiens
tcattcttgtgacca

SEQ ID NO: 966019 - DNA, 15 bp, Homo sapiens
gtcattcttgtgacc

SEQ ID NO: 966020 - DNA, 15 bp, Homo sapiens
ggtcattcttgtgac

SEQ ID NO: 966021 - DNA, 15 bp, Homo sapiens
tggtcattcttgtga

SEQ ID NO: 966022 - DNA, 15 bp, Homo sapiens
ttggtcattcttgtg

SEQ ID NO: 966023 - DNA, 15 bp, Homo sapiens
cttggtcattcttgt

SEQ ID NO: 966024 - DNA, 15 bp, Homo sapiens
gcttggtcattcttg

SEQ ID NO: 966025 - DNA, 15 bp, Homo sapiens
ggcttggtcattctt

SEQ ID NO: 966026 - DNA, 15 bp, Homo sapiens
tggcttggtcattct

SEQ ID NO: 966027 - DNA, 15 bp, Homo sapiens
atggcttggtcattc

SEQ ID NO: 966028 - DNA, 15 bp, Homo sapiens
catggcttggtcatt

SEQ ID NO: 966029 - DNA, 15 bp, Homo sapiens
tcatggcttggtcat

SEQ ID NO: 966030 - DNA, 15 bp, Homo sapiens
atcatggcttggtca

SEQ ID NO: 966031 - DNA, 15 bp, Homo sapiens
aatcatggcttggtc

SEQ ID NO: 966032 - DNA, 15 bp, Homo sapiens
taatcatggcttggt

SEQ ID NO: 966033 - DNA, 15 bp, Homo sapiens
ctaatcatggcttgg

SEQ ID NO: 966034 - DNA, 15 bp, Homo sapiens
tctaatcatggcttg

SEQ ID NO: 966035 - DNA, 15 bp, Homo sapiens
ttctaatcatggctt

SEQ ID NO: 966036 - DNA, 15 bp, Homo sapiens
cttctaatcatggct

SEQ ID NO: 966037 - DNA, 15 bp, Homo sapiens
gcttctaatcatggc

SEQ ID NO: 966038 - DNA, 15 bp, Homo sapiens
agcttctaatcatgg

SEQ ID NO: 966039 - DNA, 15 bp, Homo sapiens
aagcttctaatcatg

SEQ ID NO: 966040 - DNA, 15 bp, Homo sapiens
caagcttctaatcat

SEQ ID NO: 966041 - DNA, 15 bp, Homo sapiens
ccaagcttctaatca

SEQ ID NO: 966042 - DNA, 15 bp, Homo sapiens
tccaagcttctaatc

SEQ ID NO: 966043 - DNA, 15 bp, Homo sapiens
ttccaagcttctaat

SEQ ID NO: 966044 - DNA, 15 bp, Homo sapiens
gttccaagcttctaa

SEQ ID NO: 966045 - DNA, 15 bp, Homo sapiens
agttccaagcttcta

SEQ ID NO: 966046 - DNA, 15 bp, Homo sapiens
aagttccaagcttct

SEQ ID NO: 966047 - DNA, 15 bp, Homo sapiens
aaagttccaagcttc

SEQ ID NO: 966048 - DNA, 15 bp, Homo sapiens
gaaagttccaagctt

SEQ ID NO: 966049 - DNA, 15 bp, Homo sapiens
tgaaagttccaagct

SEQ ID NO: 966050 - DNA, 15 bp, Homo sapiens
gtgaaagttccaagc

SEQ ID NO: 966051 - DNA, 15 bp, Homo sapiens
ggtgaaagttccaag

SEQ ID NO: 966052 - DNA, 15 bp, Homo sapiens
aggtgaaagttccaa

SEQ ID NO: 966053 - DNA, 15 bp, Homo sapiens
gaggtgaaagttcca

SEQ ID NO: 966054 - DNA, 15 bp, Homo sapiens
ggaggtgaaagttcc

SEQ ID NO: 966055 - DNA, 15 bp, Homo sapiens
aggaggtgaaagttc

SEQ ID NO: 966056 - DNA, 15 bp, Homo sapiens
taggaggtgaaagtt

SEQ ID NO: 966057 - DNA, 15 bp, Homo sapiens
gtaggaggtgaaagt

SEQ ID NO: 966058 - DNA, 15 bp, Homo sapiens
ggtaggaggtgaaag

SEQ ID NO: 966059 - DNA, 15 bp, Homo sapiens
aggtaggaggtgaaa

SEQ ID NO: 966060 - DNA, 15 bp, Homo sapiens
gaggtaggaggtgaa

SEQ ID NO: 966061 - DNA, 15 bp, Homo sapiens
tgaggtaggaggtga

SEQ ID NO: 966062 - DNA, 15 bp, Homo sapiens
atgaggtaggaggtg

SEQ ID NO: 966063 - DNA, 15 bp, Homo sapiens
gatgaggtaggaggt

SEQ ID NO: 966064 - DNA, 15 bp, Homo sapiens
ggatgaggtaggagg

SEQ ID NO: 966065 - DNA, 15 bp, Homo sapiens
aggatgaggtaggag

SEQ ID NO: 966066 - DNA, 15 bp, Homo sapiens
caggatgaggtagga

SEQ ID NO: 966067 - DNA, 15 bp, Homo sapiens
acaggatgaggtagg

SEQ ID NO: 966068 - DNA, 15 bp, Homo sapiens
cacaggatgaggtag

SEQ ID NO: 966069 - DNA, 15 bp, Homo sapiens
tcacaggatgaggta

SEQ ID NO: 966070 - DNA, 15 bp, Homo sapiens
ttcacaggatgaggt

SEQ ID NO: 966071 - DNA, 15 bp, Homo sapiens
tttcacaggatgagg

SEQ ID NO: 966072 - DNA, 15 bp, Homo sapiens
ttttcacaggatgag

SEQ ID NO: 966073 - DNA, 15 bp, Homo sapiens
cttttcacaggatga

SEQ ID NO: 966074 - DNA, 15 bp, Homo sapiens
ccttttcacaggatg

SEQ ID NO: 966075 - DNA, 15 bp, Homo sapiens
cccttttcacaggat

SEQ ID NO: 966076 - DNA, 15 bp, Homo sapiens
ccccttttcacagga

SEQ ID NO: 966077 - DNA, 15 bp, Homo sapiens
tccccttttcacagg

SEQ ID NO: 966078 - DNA, 15 bp, Homo sapiens
ctccccttttcacag

SEQ ID NO: 966079 - DNA, 15 bp, Homo sapiens
tctccccttttcaca

SEQ ID NO: 966080 - DNA, 15 bp, Homo sapiens
ctctccccttttcac

SEQ ID NO: 966081 - DNA, 15 bp, Homo sapiens
cctctccccttttca

SEQ ID NO: 966082 - DNA, 15 bp, Homo sapiens
ccctctccccttttc

SEQ ID NO: 966083 - DNA, 15 bp, Homo sapiens
cccctctcccctttt

SEQ ID NO: 966084 - DNA, 15 bp, Homo sapiens
gcccctctccccttt

SEQ ID NO: 966085 - DNA, 15 bp, Homo sapiens
agcccctctcccctt

SEQ ID NO: 966086 - DNA, 15 bp, Homo sapiens
cagcccctctcccct

SEQ ID NO: 966087 - DNA, 15 bp, Homo sapiens
tcagcccctctcccc

SEQ ID NO: 966088 - DNA, 15 bp, Homo sapiens
ttcagcccctctccc

SEQ ID NO: 966089 - DNA, 15 bp, Homo sapiens
cttcagcccctctcc

SEQ ID NO: 966090 - DNA, 15 bp, Homo sapiens
tcttcagcccctctc

SEQ ID NO: 966091 - DNA, 15 bp, Homo sapiens
atcttcagcccctct

SEQ ID NO: 966092 - DNA, 15 bp, Homo sapiens
aatcttcagcccctc

SEQ ID NO: 966093 - DNA, 15 bp, Homo sapiens
caatcttcagcccct

SEQ ID NO: 966094 - DNA, 15 bp, Homo sapiens
tcaatcttcagcccc

SEQ ID NO: 966095 - DNA, 15 bp, Homo sapiens
ctcaatcttcagccc

SEQ ID NO: 966096 - DNA, 15 bp, Homo sapiens
cctcaatcttcagcc

SEQ ID NO: 966097 - DNA, 15 bp, Homo sapiens
acctcaatcttcagc

SEQ ID NO: 966098 - DNA, 15 bp, Homo sapiens
tacctcaatcttcag

SEQ ID NO: 966099 - DNA, 15 bp, Homo sapiens
ttacctcaatcttca

SEQ ID NO: 966100 - DNA, 15 bp, Homo sapiens
gttacctcaatcttc

SEQ ID NO: 966101 - DNA, 15 bp, Homo sapiens
tgttacctcaatctt

SEQ ID NO: 966102 - DNA, 15 bp, Homo sapiens
ttgttacctcaatct

SEQ ID NO: 966103 - DNA, 15 bp, Homo sapiens
attgttacctcaatc

SEQ ID NO: 966104 - DNA, 15 bp, Homo sapiens
aattgttacctcaat

SEQ ID NO: 966105 - DNA, 15 bp, Homo sapiens
caattgttacctcaa

SEQ ID NO: 966106 - DNA, 15 bp, Homo sapiens
gcaattgttacctca

SEQ ID NO: 966107 - DNA, 15 bp, Homo sapiens
agcaattgttacctc

SEQ ID NO: 966108 - DNA, 15 bp, Homo sapiens
cagcaattgttacct

SEQ ID NO: 966109 - DNA, 15 bp, Homo sapiens
tcagcaattgttacc

SEQ ID NO: 966110 - DNA, 15 bp, Homo sapiens
atcagcaattgttac

SEQ ID NO: 966111 - DNA, 15 bp, Homo sapiens
catcagcaattgtta

SEQ ID NO: 966112 - DNA, 15 bp, Homo sapiens
acatcagcaattgtt

SEQ ID NO: 966113 - DNA, 15 bp, Homo sapiens
cacatcagcaattgt

SEQ ID NO: 966114 - DNA, 15 bp, Homo sapiens
acacatcagcaattg

SEQ ID NO: 966115 - DNA, 15 bp, Homo sapiens
tacacatcagcaatt

SEQ ID NO: 966116 - DNA, 15 bp, Homo sapiens
gtacacatcagcaat

SEQ ID NO: 966117 - DNA, 15 bp, Homo sapiens
tgtacacatcagcaa

SEQ ID NO: 966118 - DNA, 15 bp, Homo sapiens
atgtacacatcagca

SEQ ID NO: 966119 - DNA, 15 bp, Homo sapiens
catgtacacatcagc

SEQ ID NO: 966120 - DNA, 15 bp, Homo sapiens
tcatgtacacatcag

SEQ ID NO: 966121 - DNA, 15 bp, Homo sapiens
atcatgtacacatca

SEQ ID NO: 966122 - DNA, 15 bp, Homo sapiens
catcatgtacacatc

SEQ ID NO: 966123 - DNA, 15 bp, Homo sapiens
tcatcatgtacacat

SEQ ID NO: 966124 - DNA, 15 bp, Homo sapiens
ttcatcatgtacaca

SEQ ID NO: 966125 - DNA, 15 bp, Homo sapiens
cttcatcatgtacac

SEQ ID NO: 966126 - DNA, 15 bp, Homo sapiens
acttcatcatgtaca

SEQ ID NO: 966127 - DNA, 15 bp, Homo sapiens
gacttcatcatgtac

SEQ ID NO: 966128 - DNA, 15 bp, Homo sapiens
ggacttcatcatgta

SEQ ID NO: 966129 - DNA, 15 bp, Homo sapiens
gggacttcatcatgt

SEQ ID NO: 966130 - DNA, 15 bp, Homo sapiens
ggggacttcatcatg

SEQ ID NO: 966131 - DNA, 15 bp, Homo sapiens
tggggacttcatcat

SEQ ID NO: 966132 - DNA, 15 bp, Homo sapiens
atggggacttcatca

SEQ ID NO: 966133 - DNA, 15 bp, Homo sapiens
tatggggacttcatc

SEQ ID NO: 966134 - DNA, 15 bp, Homo sapiens
ttatggggacttcat

SEQ ID NO: 966135 - DNA, 15 bp, Homo sapiens
tttatggggacttca

SEQ ID NO: 966136 - DNA, 15 bp, Homo sapiens
ttttatggggacttc

SEQ ID NO: 966137 - DNA, 15 bp, Homo sapiens
tttttatggggactt

SEQ ID NO: 966138 - DNA, 15 bp, Homo sapiens
atttttatggggact

SEQ ID NO: 966139 - DNA, 15 bp, Homo sapiens
gatttttatggggac

SEQ ID NO: 966140 - DNA, 15 bp, Homo sapiens
ggatttttatgggga

SEQ ID NO: 966141 - DNA, 15 bp, Homo sapiens
gggatttttatgggg

SEQ ID NO: 966142 - DNA, 15 bp, Homo sapiens
agggatttttatggg

SEQ ID NO: 966143 - DNA, 15 bp, Homo sapiens
tagggatttttatgg

SEQ ID NO: 966144 - DNA, 15 bp, Homo sapiens
ttagggatttttatg

SEQ ID NO: 966145 - DNA, 15 bp, Homo sapiens
tttagggatttttat

SEQ ID NO: 966146 - DNA, 15 bp, Homo sapiens
atttagggattttta

SEQ ID NO: 966147 - DNA, 15 bp, Homo sapiens
catttagggattttt

SEQ ID NO: 966148 - DNA, 15 bp, Homo sapiens
tcatttagggatttt

SEQ ID NO: 966149 - DNA, 15 bp, Homo sapiens
ctcatttagggattt

SEQ ID NO: 966150 - DNA, 15 bp, Homo sapiens
cctcatttagggatt

SEQ ID NO: 966151 - DNA, 15 bp, Homo sapiens
ccctcatttagggat

SEQ ID NO: 966152 - DNA, 15 bp, Homo sapiens
cccctcatttaggga

SEQ ID NO: 966153 - DNA, 15 bp, Homo sapiens
tcccctcatttaggg

SEQ ID NO: 966154 - DNA, 15 bp, Homo sapiens
atcccctcatttagg

SEQ ID NO: 966155 - DNA, 15 bp, Homo sapiens
aatcccctcatttag

SEQ ID NO: 966156 - DNA, 15 bp, Homo sapiens
aaatcccctcattta

SEQ ID NO: 966157 - DNA, 15 bp, Homo sapiens
caaatcccctcattt

SEQ ID NO: 966158 - DNA, 15 bp, Homo sapiens
ccaaatcccctcatt

SEQ ID NO: 966159 - DNA, 15 bp, Homo sapiens
tccaaatcccctcat

SEQ ID NO: 966160 - DNA, 15 bp, Homo sapiens
ctccaaatcccctca

SEQ ID NO: 966161 - DNA, 15 bp, Homo sapiens
tctccaaatcccctc

SEQ ID NO: 966162 - DNA, 15 bp, Homo sapiens
ctctccaaatcccct

SEQ ID NO: 966163 - DNA, 15 bp, Homo sapiens
cctctccaaatcccc

SEQ ID NO: 966164 - DNA, 15 bp, Homo sapiens
acctctccaaatccc

SEQ ID NO: 966165 - DNA, 15 bp, Homo sapiens
aacctctccaaatcc

SEQ ID NO: 966166 - DNA, 15 bp, Homo sapiens
gaacctctccaaatc

SEQ ID NO: 966167 - DNA, 15 bp, Homo sapiens
agaacctctccaaat

SEQ ID NO: 966168 - DNA, 15 bp, Homo sapiens
cagaacctctccaaa

SEQ ID NO: 966169 - DNA, 15 bp, Homo sapiens
ccagaacctctccaa

SEQ ID NO: 966170 - DNA, 15 bp, Homo sapiens
tccagaacctctcca

SEQ ID NO: 966171 - DNA, 15 bp, Homo sapiens
ctccagaacctctcc

SEQ ID NO: 966172 - DNA, 15 bp, Homo sapiens
cctccagaacctctc

SEQ ID NO: 966173 - DNA, 15 bp, Homo sapiens
acctccagaacctct

SEQ ID NO: 966174 - DNA, 15 bp, Homo sapiens
cacctccagaacctc

SEQ ID NO: 966175 - DNA, 15 bp, Homo sapiens
gcacctccagaacct

SEQ ID NO: 966176 - DNA, 15 bp, Homo sapiens
agcacctccagaacc

SEQ ID NO: 966177 - DNA, 15 bp, Homo sapiens
cagcacctccagaac

SEQ ID NO: 966178 - DNA, 15 bp, Homo sapiens
tcagcacctccagaa

SEQ ID NO: 966179 - DNA, 15 bp, Homo sapiens
ttcagcacctccaga

SEQ ID NO: 966180 - DNA, 15 bp, Homo sapiens
gttcagcacctccag

SEQ ID NO: 966181 - DNA, 15 bp, Homo sapiens
cgttcagcacctcca

SEQ ID NO: 966182 - DNA, 15 bp, Homo sapiens
acgttcagcacctcc

SEQ ID NO: 966183 - DNA, 15 bp, Homo sapiens
cacgttcagcacctc

SEQ ID NO: 966184 - DNA, 15 bp, Homo sapiens
ccacgttcagcacct

SEQ ID NO: 966185 - DNA, 15 bp, Homo sapiens
tccacgttcagcacc

SEQ ID NO: 966186 - DNA, 15 bp, Homo sapiens
ctccacgttcagcac

SEQ ID NO: 966187 - DNA, 15 bp, Homo sapiens
cctccacgttcagca

SEQ ID NO: 966188 - DNA, 15 bp, Homo sapiens
acctccacgttcagc

SEQ ID NO: 966189 - DNA, 15 bp, Homo sapiens
cacctccacgttcag

SEQ ID NO: 966190 - DNA, 15 bp, Homo sapiens
gcacctccacgttca

SEQ ID NO: 966191 - DNA, 15 bp, Homo sapiens
agcacctccacgttc

SEQ ID NO: 966192 - DNA, 15 bp, Homo sapiens
aagcacctccacgtt

SEQ ID NO: 966193 - DNA, 15 bp, Homo sapiens
caagcacctccacgt

SEQ ID NO: 966194 - DNA, 15 bp, Homo sapiens
ccaagcacctccacg

SEQ ID NO: 966195 - DNA, 15 bp, Homo sapiens
tccaagcacctccac

SEQ ID NO: 966196 - DNA, 15 bp, Homo sapiens
ctccaagcacctcca

SEQ ID NO: 966197 - DNA, 15 bp, Homo sapiens
cctccaagcacctcc

SEQ ID NO: 966198 - DNA, 15 bp, Homo sapiens
ccctccaagcacctc

SEQ ID NO: 966199 - DNA, 15 bp, Homo sapiens
accctccaagcacct

SEQ ID NO: 966200 - DNA, 15 bp, Homo sapiens
caccctccaagcacc

SEQ ID NO: 966201 - DNA, 15 bp, Homo sapiens
ccaccctccaagcac

SEQ ID NO: 966202 - DNA, 15 bp, Homo sapiens
gccaccctccaagca

SEQ ID NO: 966203 - DNA, 15 bp, Homo sapiens
ggccaccctccaagc

SEQ ID NO: 966204 - DNA, 15 bp, Homo sapiens
aggccaccctccaag

SEQ ID NO: 966205 - DNA, 15 bp, Homo sapiens
taggccaccctccaa

SEQ ID NO: 966206 - DNA, 15 bp, Homo sapiens
ataggccaccctcca

SEQ ID NO: 966207 - DNA, 15 bp, Homo sapiens
gataggccaccctcc

SEQ ID NO: 966208 - DNA, 15 bp, Homo sapiens
ggataggccaccctc

SEQ ID NO: 966209 - DNA, 15 bp, Homo sapiens
tggataggccaccct

SEQ ID NO: 966210 - DNA, 15 bp, Homo sapiens
ctggataggccaccc

SEQ ID NO: 966211 - DNA, 15 bp, Homo sapiens
actggataggccacc

SEQ ID NO: 966212 - DNA, 15 bp, Homo sapiens
aactggataggccac

SEQ ID NO: 966213 - DNA, 15 bp, Homo sapiens
gaactggataggcca

SEQ ID NO: 966214 - DNA, 15 bp, Homo sapiens
tgaactggataggcc

SEQ ID NO: 966215 - DNA, 15 bp, Homo sapiens
atgaactggataggc

SEQ ID NO: 966216 - DNA, 15 bp, Homo sapiens
gatgaactggatagg

SEQ ID NO: 966217 - DNA, 15 bp, Homo sapiens
agatgaactggatag

SEQ ID NO: 966218 - DNA, 15 bp, Homo sapiens
gagatgaactggata

SEQ ID NO: 966219 - DNA, 15 bp, Homo sapiens
ggagatgaactggat

SEQ ID NO: 966220 - DNA, 15 bp, Homo sapiens
tggagatgaactgga

SEQ ID NO: 966221 - DNA, 15 bp, Homo sapiens
ctggagatgaactgg

SEQ ID NO: 966222 - DNA, 15 bp, Homo sapiens
tctggagatgaactg

SEQ ID NO: 966223 - DNA, 15 bp, Homo sapiens
ctctggagatgaact

SEQ ID NO: 966224 - DNA, 15 bp, Homo sapiens
actctggagatgaac

SEQ ID NO: 966225 - DNA, 15 bp, Homo sapiens
aactctggagatgaa

SEQ ID NO: 966226 - DNA, 15 bp, Homo sapiens
gaactctggagatga

SEQ ID NO: 966227 - DNA, 15 bp, Homo sapiens
tgaactctggagatg

SEQ ID NO: 966228 - DNA, 15 bp, Homo sapiens
gtgaactctggagat

SEQ ID NO: 966229 - DNA, 15 bp, Homo sapiens
tgtgaactctggaga

SEQ ID NO: 966230 - DNA, 15 bp, Homo sapiens
gtgtgaactctggag

SEQ ID NO: 966231 - DNA, 15 bp, Homo sapiens
tgtgtgaactctgga

SEQ ID NO: 966232 - DNA, 15 bp, Homo sapiens
gtgtgtgaactctgg

SEQ ID NO: 966233 - DNA, 15 bp, Homo sapiens
agtgtgtgaactctg

SEQ ID NO: 966234 - DNA, 15 bp, Homo sapiens
gagtgtgtgaactct

SEQ ID NO: 966235 - DNA, 15 bp, Homo sapiens
tgagtgtgtgaactc

SEQ ID NO: 966236 - DNA, 15 bp, Homo sapiens
gtgagtgtgtgaact

SEQ ID NO: 966237 - DNA, 15 bp, Homo sapiens
ggtgagtgtgtgaac

SEQ ID NO: 966238 - DNA, 15 bp, Homo sapiens
aggtgagtgtgtgaa

SEQ ID NO: 966239 - DNA, 15 bp, Homo sapiens
taggtgagtgtgtga

SEQ ID NO: 966240 - DNA, 15 bp, Homo sapiens
ttaggtgagtgtgtg

SEQ ID NO: 966241 - DNA, 15 bp, Homo sapiens
cttaggtgagtgtgt

SEQ ID NO: 966242 - DNA, 15 bp, Homo sapiens
acttaggtgagtgtg

SEQ ID NO: 966243 - DNA, 15 bp, Homo sapiens
cacttaggtgagtgt

SEQ ID NO: 966244 - DNA, 15 bp, Homo sapiens
gcacttaggtgagtg

SEQ ID NO: 966245 - DNA, 15 bp, Homo sapiens
agcacttaggtgagt

SEQ ID NO: 966246 - DNA, 15 bp, Homo sapiens
cagcacttaggtgag

SEQ ID NO: 966247 - DNA, 15 bp, Homo sapiens
tcagcacttaggtga

SEQ ID NO: 966248 - DNA, 15 bp, Homo sapiens
atcagcacttaggtg

SEQ ID NO: 966249 - DNA, 15 bp, Homo sapiens
catcagcacttaggt

SEQ ID NO: 966250 - DNA, 15 bp, Homo sapiens
gcatcagcacttagg

SEQ ID NO: 966251 - DNA, 15 bp, Homo sapiens
ggcatcagcacttag

SEQ ID NO: 966252 - DNA, 15 bp, Homo sapiens
gggcatcagcactta

SEQ ID NO: 966253 - DNA, 15 bp, Homo sapiens
tgggcatcagcactt

SEQ ID NO: 966254 - DNA, 15 bp, Homo sapiens
gtgggcatcagcact

SEQ ID NO: 966255 - DNA, 15 bp, Homo sapiens
ggtgggcatcagcac

SEQ ID NO: 966256 - DNA, 15 bp, Homo sapiens
aggtgggcatcagca

SEQ ID NO: 966257 - DNA, 15 bp, Homo sapiens
caggtgggcatcagc

SEQ ID NO: 966258 - DNA, 15 bp, Homo sapiens
tcaggtgggcatcag

SEQ ID NO: 966259 - DNA, 15 bp, Homo sapiens
atcaggtgggcatca

SEQ ID NO: 966260 - DNA, 15 bp, Homo sapiens
catcaggtgggcatc

SEQ ID NO: 966261 - DNA, 15 bp, Homo sapiens
ccatcaggtgggcat

SEQ ID NO: 966262 - DNA, 15 bp, Homo sapiens
gccatcaggtgggca

SEQ ID NO: 966263 - DNA, 15 bp, Homo sapiens
tgccatcaggtgggc

SEQ ID NO: 966264 - DNA, 15 bp, Homo sapiens
atgccatcaggtggg

SEQ ID NO: 966265 - DNA, 15 bp, Homo sapiens
aatgccatcaggtgg

SEQ ID NO: 966266 - DNA, 15 bp, Homo sapiens
aaatgccatcaggtg

SEQ ID NO: 966267 - DNA, 15 bp, Homo sapiens
gaaatgccatcaggt

SEQ ID NO: 966268 - DNA, 15 bp, Homo sapiens
agaaatgccatcagg

SEQ ID NO: 966269 - DNA, 15 bp, Homo sapiens
gagaaatgccatcag

SEQ ID NO: 966270 - DNA, 15 bp, Homo sapiens
tgagaaatgccatca

SEQ ID NO: 966271 - DNA, 15 bp, Homo sapiens
ctgagaaatgccatc

SEQ ID NO: 966272 - DNA, 15 bp, Homo sapiens
gctgagaaatgccat

SEQ ID NO: 966273 - DNA, 15 bp, Homo sapiens
ggctgagaaatgcca

SEQ ID NO: 966274 - DNA, 15 bp, Homo sapiens
aggctgagaaatgcc

SEQ ID NO: 966275 - DNA, 15 bp, Homo sapiens
gaggctgagaaatgc

SEQ ID NO: 966276 - DNA, 15 bp, Homo sapiens
ggaggctgagaaatg

SEQ ID NO: 966277 - DNA, 15 bp, Homo sapiens
cggaggctgagaaat

SEQ ID NO: 966278 - DNA, 15 bp, Homo sapiens
tcggaggctgagaaa

SEQ ID NO: 966279 - DNA, 15 bp, Homo sapiens
ctcggaggctgagaa

SEQ ID NO: 966280 - DNA, 15 bp, Homo sapiens
cctcggaggctgaga

SEQ ID NO: 966281 - DNA, 15 bp, Homo sapiens
gcctcggaggctgag

SEQ ID NO: 966282 - DNA, 15 bp, Homo sapiens
agcctcggaggctga

SEQ ID NO: 966283 - DNA, 15 bp, Homo sapiens
aagcctcggaggctg

SEQ ID NO: 966284 - DNA, 15 bp, Homo sapiens
aaagcctcggaggct

SEQ ID NO: 966285 - DNA, 15 bp, Homo sapiens
gaaagcctcggaggc

SEQ ID NO: 966286 - DNA, 15 bp, Homo sapiens
ggaaagcctcggagg

SEQ ID NO: 966287 - DNA, 15 bp, Homo sapiens
aggaaagcctcggag

SEQ ID NO: 966288 - DNA, 15 bp, Homo sapiens
aaggaaagcctcgga

SEQ ID NO: 966289 - DNA, 15 bp, Homo sapiens
gaaggaaagcctcgg

SEQ ID NO: 966290 - DNA, 15 bp, Homo sapiens
agaaggaaagcctcg

SEQ ID NO: 966291 - DNA, 15 bp, Homo sapiens
aagaaggaaagcctc

SEQ ID NO: 966292 - DNA, 15 bp, Homo sapiens
aaagaaggaaagcct

SEQ ID NO: 966293 - DNA, 15 bp, Homo sapiens
caaagaaggaaagcc

SEQ ID NO: 966294 - DNA, 15 bp, Homo sapiens
acaaagaaggaaagc

SEQ ID NO: 966295 - DNA, 15 bp, Homo sapiens
tacaaagaaggaaag

SEQ ID NO: 966296 - DNA, 15 bp, Homo sapiens
gtacaaagaaggaaa

SEQ ID NO: 966297 - DNA, 15 bp, Homo sapiens
agtacaaagaaggaa

SEQ ID NO: 966298 - DNA, 15 bp, Homo sapiens
aagtacaaagaagga

SEQ ID NO: 966299 - DNA, 15 bp, Homo sapiens
taagtacaaagaagg

SEQ ID NO: 966300 - DNA, 15 bp, Homo sapiens
ctaagtacaaagaag

SEQ ID NO: 966301 - DNA, 15 bp, Homo sapiens
actaagtacaaagaa

SEQ ID NO: 966302 - DNA, 15 bp, Homo sapiens
gactaagtacaaaga

SEQ ID NO: 966303 - DNA, 15 bp, Homo sapiens
tgactaagtacaaag

SEQ ID NO: 966304 - DNA, 15 bp, Homo sapiens
ttgactaagtacaaa

SEQ ID NO: 966305 - DNA, 15 bp, Homo sapiens
tttgactaagtacaa

SEQ ID NO: 966306 - DNA, 15 bp, Homo sapiens
ttttgactaagtaca

SEQ ID NO: 966307 - DNA, 15 bp, Homo sapiens
cttttgactaagtac

SEQ ID NO: 966308 - DNA, 15 bp, Homo sapiens
tcttttgactaagta

SEQ ID NO: 966309 - DNA, 15 bp, Homo sapiens
ttcttttgactaagt

SEQ ID NO: 966310 - DNA, 15 bp, Homo sapiens
attcttttgactaag

SEQ ID NO: 966311 - DNA, 15 bp, Homo sapiens
cattcttttgactaa

SEQ ID NO: 966312 - DNA, 15 bp, Homo sapiens
gcattcttttgacta

SEQ ID NO: 966313 - DNA, 15 bp, Homo sapiens
agcattcttttgact

SEQ ID NO: 966314 - DNA, 15 bp, Homo sapiens
gagcattcttttgac

SEQ ID NO: 966315 - DNA, 15 bp, Homo sapiens
agagcattcttttga

SEQ ID NO: 966316 - DNA, 15 bp, Homo sapiens
tagagcattcttttg

SEQ ID NO: 966317 - DNA, 15 bp, Homo sapiens
ttagagcattctttt

SEQ ID NO: 966318 - DNA, 15 bp, Homo sapiens
attagagcattcttt

SEQ ID NO: 966319 - DNA, 15 bp, Homo sapiens
gattagagcattctt

SEQ ID NO: 966320 - DNA, 15 bp, Homo sapiens
ggattagagcattct

SEQ ID NO: 966321 - DNA, 15 bp, Homo sapiens
tggattagagcattc

SEQ ID NO: 966322 - DNA, 15 bp, Homo sapiens
ctggattagagcatt

SEQ ID NO: 966323 - DNA, 15 bp, Homo sapiens
actggattagagcat

SEQ ID NO: 966324 - DNA, 15 bp, Homo sapiens
gactggattagagca

SEQ ID NO: 966325 - DNA, 15 bp, Homo sapiens
agactggattagagc

SEQ ID NO: 966326 - DNA, 15 bp, Homo sapiens
tagactggattagag

SEQ ID NO: 966327 - DNA, 15 bp, Homo sapiens
atagactggattaga

SEQ ID NO: 966328 - DNA, 15 bp, Homo sapiens
gatagactggattag

SEQ ID NO: 966329 - DNA, 15 bp, Homo sapiens
tgatagactggatta

SEQ ID NO: 966330 - DNA, 15 bp, Homo sapiens
atgatagactggatt

SEQ ID NO: 966331 - DNA, 15 bp, Homo sapiens
aatgatagactggat

SEQ ID NO: 966332 - DNA, 15 bp, Homo sapiens
caatgatagactgga

SEQ ID NO: 966333 - DNA, 15 bp, Homo sapiens
tcaatgatagactgg

SEQ ID NO: 966334 - DNA, 15 bp, Homo sapiens
atcaatgatagactg

SEQ ID NO: 966335 - DNA, 15 bp, Homo sapiens
catcaatgatagact

SEQ ID NO: 966336 - DNA, 15 bp, Homo sapiens
ccatcaatgatagac

SEQ ID NO: 966337 - DNA, 15 bp, Homo sapiens
cccatcaatgataga

SEQ ID NO: 966338 - DNA, 15 bp, Homo sapiens
gcccatcaatgatag

SEQ ID NO: 966339 - DNA, 15 bp, Homo sapiens
tgcccatcaatgata

SEQ ID NO: 966340 - DNA, 15 bp, Homo sapiens
atgcccatcaatgat

SEQ ID NO: 966341 - DNA, 15 bp, Homo sapiens
aatgcccatcaatga

SEQ ID NO: 966342 - DNA, 15 bp, Homo sapiens
aaatgcccatcaatg

SEQ ID NO: 966343 - DNA, 15 bp, Homo sapiens
caaatgcccatcaat

SEQ ID NO: 966344 - DNA, 15 bp, Homo sapiens
ccaaatgcccatcaa

SEQ ID NO: 966345 - DNA, 15 bp, Homo sapiens
cccaaatgcccatca

SEQ ID NO: 966346 - DNA, 15 bp, Homo sapiens
acccaaatgcccatc

SEQ ID NO: 966347 - DNA, 15 bp, Homo sapiens
aacccaaatgcccat

SEQ ID NO: 966348 - DNA, 15 bp, Homo sapiens
caacccaaatgccca

SEQ ID NO: 966349 - DNA, 15 bp, Homo sapiens
ccaacccaaatgccc

SEQ ID NO: 966350 - DNA, 15 bp, Homo sapiens
accaacccaaatgcc

SEQ ID NO: 966351 - DNA, 15 bp, Homo sapiens
aaccaacccaaatgc

SEQ ID NO: 966352 - DNA, 15 bp, Homo sapiens
gaaccaacccaaatg

SEQ ID NO: 966353 - DNA, 15 bp, Homo sapiens
ggaaccaacccaaat

SEQ ID NO: 966354 - DNA, 15 bp, Homo sapiens
tggaaccaacccaaa

SEQ ID NO: 966355 - DNA, 15 bp, Homo sapiens
ttggaaccaacccaa

SEQ ID NO: 966356 - DNA, 15 bp, Homo sapiens
cttggaaccaaccca

SEQ ID NO: 966357 - DNA, 15 bp, Homo sapiens
acttggaaccaaccc

SEQ ID NO: 966358 - DNA, 15 bp, Homo sapiens
gacttggaaccaacc

SEQ ID NO: 966359 - DNA, 15 bp, Homo sapiens
agacttggaaccaac

SEQ ID NO: 966360 - DNA, 15 bp, Homo sapiens
aagacttggaaccaa

SEQ ID NO: 966361 - DNA, 15 bp, Homo sapiens
aaagacttggaacca

SEQ ID NO: 966362 - DNA, 15 bp, Homo sapiens
caaagacttggaacc

SEQ ID NO: 966363 - DNA, 15 bp, Homo sapiens
gcaaagacttggaac

SEQ ID NO: 966364 - DNA, 15 bp, Homo sapiens
agcaaagacttggaa

SEQ ID NO: 966365 - DNA, 15 bp, Homo sapiens
tagcaaagacttgga

SEQ ID NO: 966366 - DNA, 15 bp, Homo sapiens
atagcaaagacttgg

SEQ ID NO: 966367 - DNA, 15 bp, Homo sapiens
aatagcaaagacttg

SEQ ID NO: 966368 - DNA, 15 bp, Homo sapiens
caatagcaaagactt

SEQ ID NO: 966369 - DNA, 15 bp, Homo sapiens
acaatagcaaagact

SEQ ID NO: 966370 - DNA, 15 bp, Homo sapiens
cacaatagcaaagac

SEQ ID NO: 966371 - DNA, 15 bp, Homo sapiens
tcacaatagcaaaga

SEQ ID NO: 966372 - DNA, 15 bp, Homo sapiens
ttcacaatagcaaag

SEQ ID NO: 966373 - DNA, 15 bp, Homo sapiens
attcacaatagcaaa

SEQ ID NO: 966374 - DNA, 15 bp, Homo sapiens
tattcacaatagcaa

SEQ ID NO: 966375 - DNA, 15 bp, Homo sapiens
ctattcacaatagca

SEQ ID NO: 966376 - DNA, 15 bp, Homo sapiens
actattcacaatagc

SEQ ID NO: 966377 - DNA, 15 bp, Homo sapiens
cactattcacaatag

SEQ ID NO: 966378 - DNA, 15 bp, Homo sapiens
gcactattcacaata

SEQ ID NO: 966379 - DNA, 15 bp, Homo sapiens
ggcactattcacaat

SEQ ID NO: 966380 - DNA, 15 bp, Homo sapiens
cggcactattcacaa

SEQ ID NO: 966381 - DNA, 15 bp, Homo sapiens
gcggcactattcaca

SEQ ID NO: 966382 - DNA, 15 bp, Homo sapiens
tgcggcactattcac

SEQ ID NO: 966383 - DNA, 15 bp, Homo sapiens
ttgcggcactattca

SEQ ID NO: 966384 - DNA, 15 bp, Homo sapiens
gttgcggcactattc

SEQ ID NO: 966385 - DNA, 15 bp, Homo sapiens
tgttgcggcactatt

SEQ ID NO: 966386 - DNA, 15 bp, Homo sapiens
ttgttgcggcactat

SEQ ID NO: 966387 - DNA, 15 bp, Homo sapiens
tttgttgcggcacta

SEQ ID NO: 966388 - DNA, 15 bp, Homo sapiens
gtttgttgcggcact

SEQ ID NO: 966389 - DNA, 15 bp, Homo sapiens
tgtttgttgcggcac

SEQ ID NO: 966390 - DNA, 15 bp, Homo sapiens
atgtttgttgcggca

SEQ ID NO: 966391 - DNA, 15 bp, Homo sapiens
tatgtttgttgcggc

SEQ ID NO: 966392 - DNA, 15 bp, Homo sapiens
gtatgtttgttgcgg

SEQ ID NO: 966393 - DNA, 15 bp, Homo sapiens
cgtatgtttgttgcg

SEQ ID NO: 966394 - DNA, 15 bp, Homo sapiens
acgtatgtttgttgc

SEQ ID NO: 966395 - DNA, 15 bp, Homo sapiens
cacgtatgtttgttg

SEQ ID NO: 966396 - DNA, 15 bp, Homo sapiens
acacgtatgtttgtt

SEQ ID NO: 966397 - DNA, 15 bp, Homo sapiens
cacacgtatgtttgt

SEQ ID NO: 966398 - DNA, 15 bp, Homo sapiens
gcacacgtatgtttg

SEQ ID NO: 966399 - DNA, 15 bp, Homo sapiens
tgcacacgtatgttt

SEQ ID NO: 966400 - DNA, 15 bp, Homo sapiens
atgcacacgtatgtt

SEQ ID NO: 966401 - DNA, 15 bp, Homo sapiens
catgcacacgtatgt

SEQ ID NO: 966402 - DNA, 15 bp, Homo sapiens
acatgcacacgtatg

SEQ ID NO: 966403 - DNA, 15 bp, Homo sapiens
cacatgcacacgtat

SEQ ID NO: 966404 - DNA, 15 bp, Homo sapiens
acacatgcacacgta

SEQ ID NO: 966405 - DNA, 15 bp, Homo sapiens
gacacatgcacacgt

SEQ ID NO: 966406 - DNA, 15 bp, Homo sapiens
agacacatgcacacg

SEQ ID NO: 966407 - DNA, 15 bp, Homo sapiens
aagacacatgcacac

SEQ ID NO: 966408 - DNA, 15 bp, Homo sapiens
aaagacacatgcaca

SEQ ID NO: 966409 - DNA, 15 bp, Homo sapiens
taaagacacatgcac

SEQ ID NO: 966410 - DNA, 15 bp, Homo sapiens
ataaagacacatgca

SEQ ID NO: 966411 - DNA, 15 bp, Homo sapiens
tataaagacacatgc

SEQ ID NO: 966412 - DNA, 15 bp, Homo sapiens
ctataaagacacatg

SEQ ID NO: 966413 - DNA, 15 bp, Homo sapiens
actataaagacacat

SEQ ID NO: 966414 - DNA, 15 bp, Homo sapiens
tactataaagacaca

SEQ ID NO: 966415 - DNA, 15 bp, Homo sapiens
ctactataaagacac

SEQ ID NO: 966416 - DNA, 15 bp, Homo sapiens
gctactataaagaca

SEQ ID NO: 966417 - DNA, 15 bp, Homo sapiens
tgctactataaagac

SEQ ID NO: 966418 - DNA, 15 bp, Homo sapiens
atgctactataaaga

SEQ ID NO: 966419 - DNA, 15 bp, Homo sapiens
catgctactataaag

SEQ ID NO: 966420 - DNA, 15 bp, Homo sapiens
tcatgctactataaa

SEQ ID NO: 966421 - DNA, 15 bp, Homo sapiens
atcatgctactataa

SEQ ID NO: 966422 - DNA, 15 bp, Homo sapiens
aatcatgctactata

SEQ ID NO: 966423 - DNA, 15 bp, Homo sapiens
aaatcatgctactat

SEQ ID NO: 966424 - DNA, 15 bp, Homo sapiens
taaatcatgctacta

SEQ ID NO: 966425 - DNA, 15 bp, Homo sapiens
ataaatcatgctact

SEQ ID NO: 966426 - DNA, 15 bp, Homo sapiens
tataaatcatgctac

SEQ ID NO: 966427 - DNA, 15 bp, Homo sapiens
ttataaatcatgcta

SEQ ID NO: 966428 - DNA, 15 bp, Homo sapiens
attataaatcatgct

SEQ ID NO: 966429 - DNA, 15 bp, Homo sapiens
gattataaatcatgc

SEQ ID NO: 966430 - DNA, 15 bp, Homo sapiens
ggattataaatcatg

SEQ ID NO: 966431 - DNA, 15 bp, Homo sapiens
aggattataaatcat

SEQ ID NO: 966432 - DNA, 15 bp, Homo sapiens
aaggattataaatca

SEQ ID NO: 966433 - DNA, 15 bp, Homo sapiens
aaaggattataaatc

SEQ ID NO: 966434 - DNA, 15 bp, Homo sapiens
caaaggattataaat

SEQ ID NO: 966435 - DNA, 15 bp, Homo sapiens
ccaaaggattataaa

SEQ ID NO: 966436 - DNA, 15 bp, Homo sapiens
cccaaaggattataa

SEQ ID NO: 966437 - DNA, 15 bp, Homo sapiens
acccaaaggattata

SEQ ID NO: 966438 - DNA, 15 bp, Homo sapiens
tacccaaaggattat

SEQ ID NO: 966439 - DNA, 15 bp, Homo sapiens
atacccaaaggatta

SEQ ID NO: 966440 - DNA, 15 bp, Homo sapiens
tatacccaaaggatt

SEQ ID NO: 966441 - DNA, 15 bp, Homo sapiens
atatacccaaaggat

SEQ ID NO: 966442 - DNA, 15 bp, Homo sapiens
tatatacccaaagga

SEQ ID NO: 966443 - DNA, 15 bp, Homo sapiens
gtatatacccaaagg

SEQ ID NO: 966444 - DNA, 15 bp, Homo sapiens
ggtatatacccaaag

SEQ ID NO: 966445 - DNA, 15 bp, Homo sapiens
gggtatatacccaaa

SEQ ID NO: 966446 - DNA, 15 bp, Homo sapiens
tgggtatatacccaa

SEQ ID NO: 966447 - DNA, 15 bp, Homo sapiens
ctgggtatataccca

SEQ ID NO: 966448 - DNA, 15 bp, Homo sapiens
actgggtatataccc

SEQ ID NO: 966449 - DNA, 15 bp, Homo sapiens
tactgggtatatacc

SEQ ID NO: 966450 - DNA, 15 bp, Homo sapiens
ttactgggtatatac

SEQ ID NO: 966451 - DNA, 15 bp, Homo sapiens
attactgggtatata

SEQ ID NO: 966452 - DNA, 15 bp, Homo sapiens
cattactgggtatat

SEQ ID NO: 966453 - DNA, 15 bp, Homo sapiens
tcattactgggtata

SEQ ID NO: 966454 - DNA, 15 bp, Homo sapiens
ctcattactgggtat

SEQ ID NO: 966455 - DNA, 15 bp, Homo sapiens
tctcattactgggta

SEQ ID NO: 966456 - DNA, 15 bp, Homo sapiens
atctcattactgggt

SEQ ID NO: 966457 - DNA, 15 bp, Homo sapiens
gatctcattactggg

SEQ ID NO: 966458 - DNA, 15 bp, Homo sapiens
cgatctcattactgg

SEQ ID NO: 966459 - DNA, 15 bp, Homo sapiens
gcgatctcattactg

SEQ ID NO: 966460 - DNA, 15 bp, Homo sapiens
agcgatctcattact

SEQ ID NO: 966461 - DNA, 15 bp, Homo sapiens
cagcgatctcattac

SEQ ID NO: 966462 - DNA, 15 bp, Homo sapiens
ccagcgatctcatta

SEQ ID NO: 966463 - DNA, 15 bp, Homo sapiens
cccagcgatctcatt

SEQ ID NO: 966464 - DNA, 15 bp, Homo sapiens
acccagcgatctcat

SEQ ID NO: 966465 - DNA, 15 bp, Homo sapiens
gacccagcgatctca

SEQ ID NO: 966466 - DNA, 15 bp, Homo sapiens
tgacccagcgatctc

SEQ ID NO: 966467 - DNA, 15 bp, Homo sapiens
ttgacccagcgatct

SEQ ID NO: 966468 - DNA, 15 bp, Homo sapiens
tttgacccagcgatc

SEQ ID NO: 966469 - DNA, 15 bp, Homo sapiens
atttgacccagcgat

SEQ ID NO: 966470 - DNA, 15 bp, Homo sapiens
catttgacccagcga

SEQ ID NO: 966471 - DNA, 15 bp, Homo sapiens
ccatttgacccagcg

SEQ ID NO: 966472 - DNA, 15 bp, Homo sapiens
accatttgacccagc

SEQ ID NO: 966473 - DNA, 15 bp, Homo sapiens
taccatttgacccag

SEQ ID NO: 966474 - DNA, 15 bp, Homo sapiens
ataccatttgaccca

SEQ ID NO: 966475 - DNA, 15 bp, Homo sapiens
aataccatttgaccc

SEQ ID NO: 966476 - DNA, 15 bp, Homo sapiens
aaataccatttgacc

SEQ ID NO: 966477 - DNA, 15 bp, Homo sapiens
gaaataccatttgac

SEQ ID NO: 966478 - DNA, 15 bp, Homo sapiens
agaaataccatttga

SEQ ID NO: 966479 - DNA, 15 bp, Homo sapiens
tagaaataccatttg

SEQ ID NO: 966480 - DNA, 15 bp, Homo sapiens
ctagaaataccattt

SEQ ID NO: 966481 - DNA, 15 bp, Homo sapiens
actagaaataccatt

SEQ ID NO: 966482 - DNA, 15 bp, Homo sapiens
aactagaaataccat

SEQ ID NO: 966483 - DNA, 15 bp, Homo sapiens
gaactagaaatacca

SEQ ID NO: 966484 - DNA, 15 bp, Homo sapiens
agaactagaaatacc

SEQ ID NO: 966485 - DNA, 15 bp, Homo sapiens
tagaactagaaatac

SEQ ID NO: 966486 - DNA, 15 bp, Homo sapiens
ctagaactagaaata

SEQ ID NO: 966487 - DNA, 15 bp, Homo sapiens
tctagaactagaaat

SEQ ID NO: 966488 - DNA, 15 bp, Homo sapiens
atctagaactagaaa

SEQ ID NO: 966489 - DNA, 15 bp, Homo sapiens
gatctagaactagaa

SEQ ID NO: 966490 - DNA, 15 bp, Homo sapiens
ggatctagaactaga

SEQ ID NO: 966491 - DNA, 15 bp, Homo sapiens
aggatctagaactag

SEQ ID NO: 966492 - DNA, 15 bp, Homo sapiens
aaggatctagaacta

SEQ ID NO: 966493 - DNA, 15 bp, Homo sapiens
caaggatctagaact

SEQ ID NO: 966494 - DNA, 15 bp, Homo sapiens
tcaaggatctagaac

SEQ ID NO: 966495 - DNA, 15 bp, Homo sapiens
ctcaaggatctagaa

SEQ ID NO: 966496 - DNA, 15 bp, Homo sapiens
cctcaaggatctaga

SEQ ID NO: 966497 - DNA, 15 bp, Homo sapiens
tcctcaaggatctag

SEQ ID NO: 966498 - DNA, 15 bp, Homo sapiens
ttcctcaaggatcta

SEQ ID NO: 966499 - DNA, 15 bp, Homo sapiens
attcctcaaggatct

SEQ ID NO: 966500 - DNA, 15 bp, Homo sapiens
aattcctcaaggatc

SEQ ID NO: 966501 - DNA, 15 bp, Homo sapiens
taattcctcaaggat

SEQ ID NO: 966502 - DNA, 15 bp, Homo sapiens
gtaattcctcaagga

SEQ ID NO: 966503 - DNA, 15 bp, Homo sapiens
ggtaattcctcaagg

SEQ ID NO: 966504 - DNA, 15 bp, Homo sapiens
tggtaattcctcaag

SEQ ID NO: 966505 - DNA, 15 bp, Homo sapiens
gtggtaattcctcaa

SEQ ID NO: 966506 - DNA, 15 bp, Homo sapiens
tgtggtaattcctca

SEQ ID NO: 966507 - DNA, 15 bp, Homo sapiens
gtgtggtaattcctc

SEQ ID NO: 966508 - DNA, 15 bp, Homo sapiens
agtgtggtaattcct

SEQ ID NO: 966509 - DNA, 15 bp, Homo sapiens
cagtgtggtaattcc

SEQ ID NO: 966510 - DNA, 15 bp, Homo sapiens
acagtgtggtaattc

SEQ ID NO: 966511 - DNA, 15 bp, Homo sapiens
gacagtgtggtaatt

SEQ ID NO: 966512 - DNA, 15 bp, Homo sapiens
agacagtgtggtaat

SEQ ID NO: 966513 - DNA, 15 bp, Homo sapiens
aagacagtgtggtaa

SEQ ID NO: 966514 - DNA, 15 bp, Homo sapiens
gaagacagtgtggta

SEQ ID NO: 966515 - DNA, 15 bp, Homo sapiens
ggaagacagtgtggt

SEQ ID NO: 966516 - DNA, 15 bp, Homo sapiens
tggaagacagtgtgg

SEQ ID NO: 966517 - DNA, 15 bp, Homo sapiens
gtggaagacagtgtg

SEQ ID NO: 966518 - DNA, 15 bp, Homo sapiens
tgtggaagacagtgt

SEQ ID NO: 966519 - DNA, 15 bp, Homo sapiens
ttgtggaagacagtg

SEQ ID NO: 966520 - DNA, 15 bp, Homo sapiens
attgtggaagacagt

SEQ ID NO: 966521 - DNA, 15 bp, Homo sapiens
cattgtggaagacag

SEQ ID NO: 966522 - DNA, 15 bp, Homo sapiens
gcattgtggaagaca

SEQ ID NO: 966523 - DNA, 15 bp, Homo sapiens
agcattgtggaagac

SEQ ID NO: 966524 - DNA, 15 bp, Homo sapiens
aagcattgtggaaga

SEQ ID NO: 966525 - DNA, 15 bp, Homo sapiens
caagcattgtggaag

SEQ ID NO: 966526 - DNA, 15 bp, Homo sapiens
tcaagcattgtggaa

SEQ ID NO: 966527 - DNA, 15 bp, Homo sapiens
ttcaagcattgtgga

SEQ ID NO: 966528 - DNA, 15 bp, Homo sapiens
gttcaagcattgtgg

SEQ ID NO: 966529 - DNA, 15 bp, Homo sapiens
agttcaagcattgtg

SEQ ID NO: 966530 - DNA, 15 bp, Homo sapiens
tagttcaagcattgt

SEQ ID NO: 966531 - DNA, 15 bp, Homo sapiens
ctagttcaagcattg

SEQ ID NO: 966532 - DNA, 15 bp, Homo sapiens
actagttcaagcatt

SEQ ID NO: 966533 - DNA, 15 bp, Homo sapiens
aactagttcaagcat

SEQ ID NO: 966534 - DNA, 15 bp, Homo sapiens
aaactagttcaagca

SEQ ID NO: 966535 - DNA, 15 bp, Homo sapiens
taaactagttcaagc

SEQ ID NO: 966536 - DNA, 15 bp, Homo sapiens
gtaaactagttcaag

SEQ ID NO: 966537 - DNA, 15 bp, Homo sapiens
tgtaaactagttcaa

SEQ ID NO: 966538 - DNA, 15 bp, Homo sapiens
ctgtaaactagttca

SEQ ID NO: 966539 - DNA, 15 bp, Homo sapiens
actgtaaactagttc

SEQ ID NO: 966540 - DNA, 15 bp, Homo sapiens
gactgtaaactagtt

SEQ ID NO: 966541 - DNA, 15 bp, Homo sapiens
ggactgtaaactagt

SEQ ID NO: 966542 - DNA, 15 bp, Homo sapiens
gggactgtaaactag

SEQ ID NO: 966543 - DNA, 15 bp, Homo sapiens
tgggactgtaaacta

SEQ ID NO: 966544 - DNA, 15 bp, Homo sapiens
gtgggactgtaaact

SEQ ID NO: 966545 - DNA, 15 bp, Homo sapiens
ggtgggactgtaaac

SEQ ID NO: 966546 - DNA, 15 bp, Homo sapiens
tggtgggactgtaaa

SEQ ID NO: 966547 - DNA, 15 bp, Homo sapiens
ttggtgggactgtaa

SEQ ID NO: 966548 - DNA, 15 bp, Homo sapiens
gttggtgggactgta

SEQ ID NO: 966549 - DNA, 15 bp, Homo sapiens
tgttggtgggactgt

SEQ ID NO: 966550 - DNA, 15 bp, Homo sapiens
ctgttggtgggactg

SEQ ID NO: 966551 - DNA, 15 bp, Homo sapiens
actgttggtgggact

SEQ ID NO: 966552 - DNA, 15 bp, Homo sapiens
cactgttggtgggac

SEQ ID NO: 966553 - DNA, 15 bp, Homo sapiens
acactgttggtggga

SEQ ID NO: 966554 - DNA, 15 bp, Homo sapiens
tacactgttggtggg

SEQ ID NO: 966555 - DNA, 15 bp, Homo sapiens
ttacactgttggtgg

SEQ ID NO: 966556 - DNA, 15 bp, Homo sapiens
tttacactgttggtg

SEQ ID NO: 966557 - DNA, 15 bp, Homo sapiens
ttttacactgttggt

SEQ ID NO: 966558 - DNA, 15 bp, Homo sapiens
cttttacactgttgg

SEQ ID NO: 966559 - DNA, 15 bp, Homo sapiens
acttttacactgttg

SEQ ID NO: 966560 - DNA, 15 bp, Homo sapiens
cacttttacactgtt

SEQ ID NO: 966561 - DNA, 15 bp, Homo sapiens
acacttttacactgt

SEQ ID NO: 966562 - DNA, 15 bp, Homo sapiens
aacacttttacactg

SEQ ID NO: 966563 - DNA, 15 bp, Homo sapiens
gaacacttttacact

SEQ ID NO: 966564 - DNA, 15 bp, Homo sapiens
ggaacacttttacac

SEQ ID NO: 966565 - DNA, 15 bp, Homo sapiens
aggaacacttttaca

SEQ ID NO: 966566 - DNA, 15 bp, Homo sapiens
taggaacacttttac

SEQ ID NO: 966567 - DNA, 15 bp, Homo sapiens
ataggaacactttta

SEQ ID NO: 966568 - DNA, 15 bp, Homo sapiens
aataggaacactttt

SEQ ID NO: 966569 - DNA, 15 bp, Homo sapiens
aaataggaacacttt

SEQ ID NO: 966570 - DNA, 15 bp, Homo sapiens
gaaataggaacactt

SEQ ID NO: 966571 - DNA, 15 bp, Homo sapiens
agaaataggaacact

SEQ ID NO: 966572 - DNA, 15 bp, Homo sapiens
gagaaataggaacac

SEQ ID NO: 966573 - DNA, 15 bp, Homo sapiens
ggagaaataggaaca

SEQ ID NO: 966574 - DNA, 15 bp, Homo sapiens
tggagaaataggaac

SEQ ID NO: 966575 - DNA, 15 bp, Homo sapiens
gtggagaaataggaa

SEQ ID NO: 966576 - DNA, 15 bp, Homo sapiens
tgtggagaaatagga

SEQ ID NO: 966577 - DNA, 15 bp, Homo sapiens
atgtggagaaatagg

SEQ ID NO: 966578 - DNA, 15 bp, Homo sapiens
gatgtggagaaatag

SEQ ID NO: 966579 - DNA, 15 bp, Homo sapiens
ggatgtggagaaata

SEQ ID NO: 966580 - DNA, 15 bp, Homo sapiens
aggatgtggagaaat

SEQ ID NO: 966581 - DNA, 15 bp, Homo sapiens
gaggatgtggagaaa

SEQ ID NO: 966582 - DNA, 15 bp, Homo sapiens
agaggatgtggagaa

SEQ ID NO: 966583 - DNA, 15 bp, Homo sapiens
gagaggatgtggaga

SEQ ID NO: 966584 - DNA, 15 bp, Homo sapiens
ggagaggatgtggag

SEQ ID NO: 966585 - DNA, 15 bp, Homo sapiens
tggagaggatgtgga

SEQ ID NO: 966586 - DNA, 15 bp, Homo sapiens
ctggagaggatgtgg

SEQ ID NO: 966587 - DNA, 15 bp, Homo sapiens
gctggagaggatgtg

SEQ ID NO: 966588 - DNA, 15 bp, Homo sapiens
tgctggagaggatgt

SEQ ID NO: 966589 - DNA, 15 bp, Homo sapiens
gtgctggagaggatg

SEQ ID NO: 966590 - DNA, 15 bp, Homo sapiens
ggtgctggagaggat

SEQ ID NO: 966591 - DNA, 15 bp, Homo sapiens
aggtgctggagagga

SEQ ID NO: 966592 - DNA, 15 bp, Homo sapiens
caggtgctggagagg

SEQ ID NO: 966593 - DNA, 15 bp, Homo sapiens
acaggtgctggagag

SEQ ID NO: 966594 - DNA, 15 bp, Homo sapiens
aacaggtgctggaga

SEQ ID NO: 966595 - DNA, 15 bp, Homo sapiens
caacaggtgctggag

SEQ ID NO: 966596 - DNA, 15 bp, Homo sapiens
acaacaggtgctgga

SEQ ID NO: 966597 - DNA, 15 bp, Homo sapiens
aacaacaggtgctgg

SEQ ID NO: 966598 - DNA, 15 bp, Homo sapiens
aaacaacaggtgctg

SEQ ID NO: 966599 - DNA, 15 bp, Homo sapiens
gaaacaacaggtgct

SEQ ID NO: 966600 - DNA, 15 bp, Homo sapiens
ggaaacaacaggtgc

SEQ ID NO: 966601 - DNA, 15 bp, Homo sapiens
aggaaacaacaggtg

SEQ ID NO: 966602 - DNA, 15 bp, Homo sapiens
caggaaacaacaggt

SEQ ID NO: 966603 - DNA, 15 bp, Homo sapiens
tcaggaaacaacagg

SEQ ID NO: 966604 - DNA, 15 bp, Homo sapiens
gtcaggaaacaacag

SEQ ID NO: 966605 - DNA, 15 bp, Homo sapiens
agtcaggaaacaaca

SEQ ID NO: 966606 - DNA, 15 bp, Homo sapiens
aagtcaggaaacaac

SEQ ID NO: 966607 - DNA, 15 bp, Homo sapiens
aaagtcaggaaacaa

SEQ ID NO: 966608 - DNA, 15 bp, Homo sapiens
aaaagtcaggaaaca

SEQ ID NO: 966609 - DNA, 15 bp, Homo sapiens
aaaaagtcaggaaac

SEQ ID NO: 966610 - DNA, 15 bp, Homo sapiens
taaaaagtcaggaaa

SEQ ID NO: 966611 - DNA, 15 bp, Homo sapiens
ttaaaaagtcaggaa

SEQ ID NO: 966612 - DNA, 15 bp, Homo sapiens
attaaaaagtcagga

SEQ ID NO: 966613 - DNA, 15 bp, Homo sapiens
cattaaaaagtcagg

SEQ ID NO: 966614 - DNA, 15 bp, Homo sapiens
tcattaaaaagtcag

SEQ ID NO: 966615 - DNA, 15 bp, Homo sapiens
atcattaaaaagtca

SEQ ID NO: 966616 - DNA, 15 bp, Homo sapiens
gatcattaaaaagtc

SEQ ID NO: 966617 - DNA, 15 bp, Homo sapiens
cgatcattaaaaagt

SEQ ID NO: 966618 - DNA, 15 bp, Homo sapiens
gcgatcattaaaaag

SEQ ID NO: 966619 - DNA, 15 bp, Homo sapiens
ggcgatcattaaaaa

SEQ ID NO: 966620 - DNA, 15 bp, Homo sapiens
tggcgatcattaaaa

SEQ ID NO: 966621 - DNA, 15 bp, Homo sapiens
atggcgatcattaaa

SEQ ID NO: 966622 - DNA, 15 bp, Homo sapiens
aatggcgatcattaa

SEQ ID NO: 966623 - DNA, 15 bp, Homo sapiens
gaatggcgatcatta

SEQ ID NO: 966624 - DNA, 15 bp, Homo sapiens
agaatggcgatcatt

SEQ ID NO: 966625 - DNA, 15 bp, Homo sapiens
tagaatggcgatcat

SEQ ID NO: 966626 - DNA, 15 bp, Homo sapiens
ttagaatggcgatca

SEQ ID NO: 966627 - DNA, 15 bp, Homo sapiens
gttagaatggcgatc

SEQ ID NO: 966628 - DNA, 15 bp, Homo sapiens
agttagaatggcgat

SEQ ID NO: 966629 - DNA, 15 bp, Homo sapiens
cagttagaatggcga

SEQ ID NO: 966630 - DNA, 15 bp, Homo sapiens
ccagttagaatggcg

SEQ ID NO: 966631 - DNA, 15 bp, Homo sapiens
accagttagaatggc

SEQ ID NO: 966632 - DNA, 15 bp, Homo sapiens
caccagttagaatgg

SEQ ID NO: 966633 - DNA, 15 bp, Homo sapiens
acaccagttagaatg

SEQ ID NO: 966634 - DNA, 15 bp, Homo sapiens
cacaccagttagaat

SEQ ID NO: 966635 - DNA, 15 bp, Homo sapiens
tcacaccagttagaa

SEQ ID NO: 966636 - DNA, 15 bp, Homo sapiens
ctcacaccagttaga

SEQ ID NO: 966637 - DNA, 15 bp, Homo sapiens
tctcacaccagttag

SEQ ID NO: 966638 - DNA, 15 bp, Homo sapiens
atctcacaccagtta

SEQ ID NO: 966639 - DNA, 15 bp, Homo sapiens
catctcacaccagtt

SEQ ID NO: 966640 - DNA, 15 bp, Homo sapiens
ccatctcacaccagt

SEQ ID NO: 966641 - DNA, 15 bp, Homo sapiens
accatctcacaccag

SEQ ID NO: 966642 - DNA, 15 bp, Homo sapiens
taccatctcacacca

SEQ ID NO: 966643 - DNA, 15 bp, Homo sapiens
ataccatctcacacc

SEQ ID NO: 966644 - DNA, 15 bp, Homo sapiens
gataccatctcacac

SEQ ID NO: 966645 - DNA, 15 bp, Homo sapiens
agataccatctcaca

SEQ ID NO: 966646 - DNA, 15 bp, Homo sapiens
gagataccatctcac

SEQ ID NO: 966647 - DNA, 15 bp, Homo sapiens
tgagataccatctca

SEQ ID NO: 966648 - DNA, 15 bp, Homo sapiens
atgagataccatctc

SEQ ID NO: 966649 - DNA, 15 bp, Homo sapiens
aatgagataccatct

SEQ ID NO: 966650 - DNA, 15 bp, Homo sapiens
caatgagataccatc

SEQ ID NO: 966651 - DNA, 15 bp, Homo sapiens
acaatgagataccat

SEQ ID NO: 966652 - DNA, 15 bp, Homo sapiens
cacaatgagatacca

SEQ ID NO: 966653 - DNA, 15 bp, Homo sapiens
ccacaatgagatacc

SEQ ID NO: 966654 - DNA, 15 bp, Homo sapiens
accacaatgagatac

SEQ ID NO: 966655 - DNA, 15 bp, Homo sapiens
aaccacaatgagata

SEQ ID NO: 966656 - DNA, 15 bp, Homo sapiens
aaaccacaatgagat

SEQ ID NO: 966657 - DNA, 15 bp, Homo sapiens
aaaaccacaatgaga

SEQ ID NO: 966658 - DNA, 15 bp, Homo sapiens
caaaaccacaatgag

SEQ ID NO: 966659 - DNA, 15 bp, Homo sapiens
tcaaaaccacaatga

SEQ ID NO: 966660 - DNA, 15 bp, Homo sapiens
atcaaaaccacaatg

SEQ ID NO: 966661 - DNA, 15 bp, Homo sapiens
aatcaaaaccacaat

SEQ ID NO: 966662 - DNA, 15 bp, Homo sapiens
aaatcaaaaccacaa

SEQ ID NO: 966663 - DNA, 15 bp, Homo sapiens
caaatcaaaaccaca

SEQ ID NO: 966664 - DNA, 15 bp, Homo sapiens
gcaaatcaaaaccac

SEQ ID NO: 966665 - DNA, 15 bp, Homo sapiens
tgcaaatcaaaacca

SEQ ID NO: 966666 - DNA, 15 bp, Homo sapiens
atgcaaatcaaaacc

SEQ ID NO: 966667 - DNA, 15 bp, Homo sapiens
aatgcaaatcaaaac

SEQ ID NO: 966668 - DNA, 15 bp, Homo sapiens
aaatgcaaatcaaaa

SEQ ID NO: 966669 - DNA, 15 bp, Homo sapiens
caaatgcaaatcaaa

SEQ ID NO: 966670 - DNA, 15 bp, Homo sapiens
acaaatgcaaatcaa

SEQ ID NO: 966671 - DNA, 15 bp, Homo sapiens
gacaaatgcaaatca

SEQ ID NO: 966672 - DNA, 15 bp, Homo sapiens
agacaaatgcaaatc

SEQ ID NO: 966673 - DNA, 15 bp, Homo sapiens
cagacaaatgcaaat

SEQ ID NO: 966674 - DNA, 15 bp, Homo sapiens
tcagacaaatgcaaa

SEQ ID NO: 966675 - DNA, 15 bp, Homo sapiens
atcagacaaatgcaa

SEQ ID NO: 966676 - DNA, 15 bp, Homo sapiens
catcagacaaatgca

SEQ ID NO: 966677 - DNA, 15 bp, Homo sapiens
ccatcagacaaatgc

SEQ ID NO: 966678 - DNA, 15 bp, Homo sapiens
gccatcagacaaatg

SEQ ID NO: 966679 - DNA, 15 bp, Homo sapiens
ggccatcagacaaat

SEQ ID NO: 966680 - DNA, 15 bp, Homo sapiens
tggccatcagacaaa

SEQ ID NO: 966681 - DNA, 15 bp, Homo sapiens
ctggccatcagacaa

SEQ ID NO: 966682 - DNA, 15 bp, Homo sapiens
actggccatcagaca

SEQ ID NO: 966683 - DNA, 15 bp, Homo sapiens
cactggccatcagac

SEQ ID NO: 966684 - DNA, 15 bp, Homo sapiens
tcactggccatcaga

SEQ ID NO: 966685 - DNA, 15 bp, Homo sapiens
atcactggccatcag

SEQ ID NO: 966686 - DNA, 15 bp, Homo sapiens
catcactggccatca

SEQ ID NO: 966687 - DNA, 15 bp, Homo sapiens
tcatcactggccatc

SEQ ID NO: 966688 - DNA, 15 bp, Homo sapiens
atcatcactggccat

SEQ ID NO: 966689 - DNA, 15 bp, Homo sapiens
catcatcactggcca

SEQ ID NO: 966690 - DNA, 15 bp, Homo sapiens
tcatcatcactggcc

SEQ ID NO: 966691 - DNA, 15 bp, Homo sapiens
ctcatcatcactggc

SEQ ID NO: 966692 - DNA, 15 bp, Homo sapiens
gctcatcatcactgg

SEQ ID NO: 966693 - DNA, 15 bp, Homo sapiens
tgctcatcatcactg

SEQ ID NO: 966694 - DNA, 15 bp, Homo sapiens
atgctcatcatcact

SEQ ID NO: 966695 - DNA, 15 bp, Homo sapiens
aatgctcatcatcac

SEQ ID NO: 966696 - DNA, 15 bp, Homo sapiens
aaatgctcatcatca

SEQ ID NO: 966697 - DNA, 15 bp, Homo sapiens
aaaatgctcatcatc

SEQ ID NO: 966698 - DNA, 15 bp, Homo sapiens
aaaaatgctcatcat

SEQ ID NO: 966699 - DNA, 15 bp, Homo sapiens
aaaaaatgctcatca

SEQ ID NO: 966700 - DNA, 15 bp, Homo sapiens
gaaaaaatgctcatc

SEQ ID NO: 966701 - DNA, 15 bp, Homo sapiens
tgaaaaaatgctcat

SEQ ID NO: 966702 - DNA, 15 bp, Homo sapiens
atgaaaaaatgctca

SEQ ID NO: 966703 - DNA, 15 bp, Homo sapiens
catgaaaaaatgctc

SEQ ID NO: 966704 - DNA, 15 bp, Homo sapiens
acatgaaaaaatgct

SEQ ID NO: 966705 - DNA, 15 bp, Homo sapiens
cacatgaaaaaatgc

SEQ ID NO: 966706 - DNA, 15 bp, Homo sapiens
acacatgaaaaaatg

SEQ ID NO: 966707 - DNA, 15 bp, Homo sapiens
gacacatgaaaaaat

SEQ ID NO: 966708 - DNA, 15 bp, Homo sapiens
agacacatgaaaaaa

SEQ ID NO: 966709 - DNA, 15 bp, Homo sapiens
cagacacatgaaaaa

SEQ ID NO: 966710 - DNA, 15 bp, Homo sapiens
acagacacatgaaaa

SEQ ID NO: 966711 - DNA, 15 bp, Homo sapiens
aacagacacatgaaa

SEQ ID NO: 966712 - DNA, 15 bp, Homo sapiens
caacagacacatgaa

SEQ ID NO: 966713 - DNA, 15 bp, Homo sapiens
ccaacagacacatga

SEQ ID NO: 966714 - DNA, 15 bp, Homo sapiens
gccaacagacacatg

SEQ ID NO: 966715 - DNA, 15 bp, Homo sapiens
agccaacagacacat

SEQ ID NO: 966716 - DNA, 15 bp, Homo sapiens
tagccaacagacaca

SEQ ID NO: 966717 - DNA, 15 bp, Homo sapiens
gtagccaacagacac

SEQ ID NO: 966718 - DNA, 15 bp, Homo sapiens
tgtagccaacagaca

SEQ ID NO: 966719 - DNA, 15 bp, Homo sapiens
atgtagccaacagac

SEQ ID NO: 966720 - DNA, 15 bp, Homo sapiens
tatgtagccaacaga

SEQ ID NO: 966721 - DNA, 15 bp, Homo sapiens
ttatgtagccaacag

SEQ ID NO: 966722 - DNA, 15 bp, Homo sapiens
tttatgtagccaaca

SEQ ID NO: 966723 - DNA, 15 bp, Homo sapiens
atttatgtagccaac

SEQ ID NO: 966724 - DNA, 15 bp, Homo sapiens
catttatgtagccaa

SEQ ID NO: 966725 - DNA, 15 bp, Homo sapiens
acatttatgtagcca

SEQ ID NO: 966726 - DNA, 15 bp, Homo sapiens
gacatttatgtagcc

SEQ ID NO: 966727 - DNA, 15 bp, Homo sapiens
ggacatttatgtagc

SEQ ID NO: 966728 - DNA, 15 bp, Homo sapiens
aggacatttatgtag

SEQ ID NO: 966729 - DNA, 15 bp, Homo sapiens
gaggacatttatgta

SEQ ID NO: 966730 - DNA, 15 bp, Homo sapiens
agaggacatttatgt

SEQ ID NO: 966731 - DNA, 15 bp, Homo sapiens
aagaggacatttatg

SEQ ID NO: 966732 - DNA, 15 bp, Homo sapiens
aaagaggacatttat

SEQ ID NO: 966733 - DNA, 15 bp, Homo sapiens
aaaagaggacattta

SEQ ID NO: 966734 - DNA, 15 bp, Homo sapiens
caaaagaggacattt

SEQ ID NO: 966735 - DNA, 15 bp, Homo sapiens
tcaaaagaggacatt

SEQ ID NO: 966736 - DNA, 15 bp, Homo sapiens
ctcaaaagaggacat

SEQ ID NO: 966737 - DNA, 15 bp, Homo sapiens
tctcaaaagaggaca

SEQ ID NO: 966738 - DNA, 15 bp, Homo sapiens
ttctcaaaagaggac

SEQ ID NO: 966739 - DNA, 15 bp, Homo sapiens
tttctcaaaagagga

SEQ ID NO: 966740 - DNA, 15 bp, Homo sapiens
atttctcaaaagagg

SEQ ID NO: 966741 - DNA, 15 bp, Homo sapiens
catttctcaaaagag

SEQ ID NO: 966742 - DNA, 15 bp, Homo sapiens
acatttctcaaaaga

SEQ ID NO: 966743 - DNA, 15 bp, Homo sapiens
gacatttctcaaaag

SEQ ID NO: 966744 - DNA, 15 bp, Homo sapiens
agacatttctcaaaa

SEQ ID NO: 966745 - DNA, 15 bp, Homo sapiens
cagacatttctcaaa

SEQ ID NO: 966746 - DNA, 15 bp, Homo sapiens
acagacatttctcaa

SEQ ID NO: 966747 - DNA, 15 bp, Homo sapiens
aacagacatttctca

SEQ ID NO: 966748 - DNA, 15 bp, Homo sapiens
gaacagacatttctc

SEQ ID NO: 966749 - DNA, 15 bp, Homo sapiens
tgaacagacatttct

SEQ ID NO: 966750 - DNA, 15 bp, Homo sapiens
atgaacagacatttc

SEQ ID NO: 966751 - DNA, 15 bp, Homo sapiens
tatgaacagacattt

SEQ ID NO: 966752 - DNA, 15 bp, Homo sapiens
atatgaacagacatt

SEQ ID NO: 966753 - DNA, 15 bp, Homo sapiens
gatatgaacagacat

SEQ ID NO: 966754 - DNA, 15 bp, Homo sapiens
ggatatgaacagaca

SEQ ID NO: 966755 - DNA, 15 bp, Homo sapiens
aggatatgaacagac

SEQ ID NO: 966756 - DNA, 15 bp, Homo sapiens
aaggatatgaacaga

SEQ ID NO: 966757 - DNA, 15 bp, Homo sapiens
gaaggatatgaacag

SEQ ID NO: 966758 - DNA, 15 bp, Homo sapiens
cgaaggatatgaaca

SEQ ID NO: 966759 - DNA, 15 bp, Homo sapiens
cttgaggtctgcaaa

SEQ ID NO: 966760 - DNA, 15 bp, Homo sapiens
tcttgaggtctgcaa

SEQ ID NO: 966761 - DNA, 15 bp, Homo sapiens
ctcttgaggtctgca

SEQ ID NO: 966762 - DNA, 15 bp, Homo sapiens
actcttgaggtctgc

SEQ ID NO: 966763 - DNA, 15 bp, Homo sapiens
gactcttgaggtctg

SEQ ID NO: 966764 - DNA, 15 bp, Homo sapiens
tgactcttgaggtct

SEQ ID NO: 966765 - DNA, 15 bp, Homo sapiens
atgactcttgaggtc

SEQ ID NO: 966766 - DNA, 15 bp, Homo sapiens
catgactcttgaggt

SEQ ID NO: 966767 - DNA, 15 bp, Homo sapiens
tcatgactcttgagg

SEQ ID NO: 966768 - DNA, 15 bp, Homo sapiens
atcatgactcttgag

SEQ ID NO: 966769 - DNA, 15 bp, Homo sapiens
catcatgactcttga

SEQ ID NO: 966770 - DNA, 15 bp, Homo sapiens
tcatcatgactcttg

SEQ ID NO: 966771 - DNA, 15 bp, Homo sapiens
ttcatcatgactctt

SEQ ID NO: 966772 - DNA, 15 bp, Homo sapiens
gttcatcatgactct

SEQ ID NO: 966773 - DNA, 15 bp, Homo sapiens
agttcatcatgactc

SEQ ID NO: 966774 - DNA, 15 bp, Homo sapiens
tagttcatcatgact

SEQ ID NO: 966775 - DNA, 15 bp, Homo sapiens
ctagttcatcatgac

SEQ ID NO: 966776 - DNA, 15 bp, Homo sapiens
gctagttcatcatga

SEQ ID NO: 966777 - DNA, 15 bp, Homo sapiens
tgctagttcatcatg

SEQ ID NO: 966778 - DNA, 15 bp, Homo sapiens
ctgctagttcatcat

SEQ ID NO: 966779 - DNA, 15 bp, Homo sapiens
tctgctagttcatca

SEQ ID NO: 966780 - DNA, 15 bp, Homo sapiens
atctgctagttcatc

SEQ ID NO: 966781 - DNA, 15 bp, Homo sapiens
gatctgctagttcat

SEQ ID NO: 966782 - DNA, 15 bp, Homo sapiens
tgatctgctagttca

SEQ ID NO: 966783 - DNA, 15 bp, Homo sapiens
atgatctgctagttc

SEQ ID NO: 966784 - DNA, 15 bp, Homo sapiens
tatgatctgctagtt

SEQ ID NO: 966785 - DNA, 15 bp, Homo sapiens
ttatgatctgctagt

SEQ ID NO: 966786 - DNA, 15 bp, Homo sapiens
tttatgatctgctag

SEQ ID NO: 966787 - DNA, 15 bp, Homo sapiens
ctttatgatctgcta

SEQ ID NO: 966788 - DNA, 15 bp, Homo sapiens
actttatgatctgct

SEQ ID NO: 966789 - DNA, 15 bp, Homo sapiens
aactttatgatctgc

SEQ ID NO: 966790 - DNA, 15 bp, Homo sapiens
aaactttatgatctg

SEQ ID NO: 966791 - DNA, 15 bp, Homo sapiens
taaactttatgatct

SEQ ID NO: 966792 - DNA, 15 bp, Homo sapiens
ataaactttatgatc

SEQ ID NO: 966793 - DNA, 15 bp, Homo sapiens
cataaactttatgat

SEQ ID NO: 966794 - DNA, 15 bp, Homo sapiens
gcataaactttatga

SEQ ID NO: 966795 - DNA, 15 bp, Homo sapiens
ggcataaactttatg

SEQ ID NO: 966796 - DNA, 15 bp, Homo sapiens
gggcataaactttat

SEQ ID NO: 966797 - DNA, 15 bp, Homo sapiens
agggcataaacttta

SEQ ID NO: 966798 - DNA, 15 bp, Homo sapiens
cagggcataaacttt

SEQ ID NO: 966799 - DNA, 15 bp, Homo sapiens
ccagggcataaactt

SEQ ID NO: 966800 - DNA, 15 bp, Homo sapiens
cccagggcataaact

SEQ ID NO: 966801 - DNA, 15 bp, Homo sapiens
acccagggcataaac

SEQ ID NO: 966802 - DNA, 15 bp, Homo sapiens
gacccagggcataaa

SEQ ID NO: 966803 - DNA, 15 bp, Homo sapiens
agacccagggcataa

SEQ ID NO: 966804 - DNA, 15 bp, Homo sapiens
aagacccagggcata

SEQ ID NO: 966805 - DNA, 15 bp, Homo sapiens
caagacccagggcat

SEQ ID NO: 966806 - DNA, 15 bp, Homo sapiens
tcaagacccagggca

SEQ ID NO: 966807 - DNA, 15 bp, Homo sapiens
gtcaagacccagggc

SEQ ID NO: 966808 - DNA, 15 bp, Homo sapiens
ggtcaagacccaggg

SEQ ID NO: 966809 - DNA, 15 bp, Homo sapiens
tggtcaagacccagg

SEQ ID NO: 966810 - DNA, 15 bp, Homo sapiens
atggtcaagacccag

SEQ ID NO: 966811 - DNA, 15 bp, Homo sapiens
aatggtcaagaccca

SEQ ID NO: 966812 - DNA, 15 bp, Homo sapiens
aaatggtcaagaccc

SEQ ID NO: 966813 - DNA, 15 bp, Homo sapiens
aaaatggtcaagacc

SEQ ID NO: 966814 - DNA, 15 bp, Homo sapiens
aaaaatggtcaagac

SEQ ID NO: 966815 - DNA, 15 bp, Homo sapiens
taaaaatggtcaaga

SEQ ID NO: 966816 - DNA, 15 bp, Homo sapiens
ctaaaaatggtcaag

SEQ ID NO: 966817 - DNA, 15 bp, Homo sapiens
tctaaaaatggtcaa

SEQ ID NO: 966818 - DNA, 15 bp, Homo sapiens
ttctaaaaatggtca

SEQ ID NO: 966819 - DNA, 15 bp, Homo sapiens
tttctaaaaatggtc

SEQ ID NO: 966820 - DNA, 15 bp, Homo sapiens
ttttctaaaaatggt

SEQ ID NO: 966821 - DNA, 15 bp, Homo sapiens
tttttctaaaaatgg

SEQ ID NO: 966822 - DNA, 15 bp, Homo sapiens
atttttctaaaaatg

SEQ ID NO: 966823 - DNA, 15 bp, Homo sapiens
tatttttctaaaaat

SEQ ID NO: 966824 - DNA, 15 bp, Homo sapiens
ttatttttctaaaaa

SEQ ID NO: 966825 - DNA, 15 bp, Homo sapiens
tttatttttctaaaa

SEQ ID NO: 966826 - DNA, 15 bp, Homo sapiens
ttttatttttctaaa

SEQ ID NO: 966827 - DNA, 15 bp, Homo sapiens
gttttatttttctaa

SEQ ID NO: 966828 - DNA, 15 bp, Homo sapiens
tgttttatttttcta

SEQ ID NO: 966829 - DNA, 15 bp, Homo sapiens
atgttttatttttct

SEQ ID NO: 966830 - DNA, 15 bp, Homo sapiens
aatgttttatttttc

SEQ ID NO: 966831 - DNA, 15 bp, Homo sapiens
taatgttttattttt

SEQ ID NO: 966832 - DNA, 15 bp, Homo sapiens
ttaatgttttatttt

SEQ ID NO: 966833 - DNA, 15 bp, Homo sapiens
tttaatgttttattt

SEQ ID NO: 966834 - DNA, 15 bp, Homo sapiens
atttaatgttttatt

SEQ ID NO: 966835 - DNA, 15 bp, Homo sapiens
catttaatgttttat

SEQ ID NO: 966836 - DNA, 15 bp, Homo sapiens
tcatttaatgtttta

SEQ ID NO: 966837 - DNA, 15 bp, Homo sapiens
ttcatttaatgtttt

SEQ ID NO: 966838 - DNA, 15 bp, Homo sapiens
tttcatttaatgttt

SEQ ID NO: 966839 - DNA, 15 bp, Homo sapiens
ttttcatttaatgtt

SEQ ID NO: 966840 - DNA, 15 bp, Homo sapiens
attttcatttaatgt

SEQ ID NO: 966841 - DNA, 15 bp, Homo sapiens
tattttcatttaatg

SEQ ID NO: 966842 - DNA, 15 bp, Homo sapiens
atattttcatttaat

SEQ ID NO: 966843 - DNA, 15 bp, Homo sapiens
gatattttcatttaa

SEQ ID NO: 966844 - DNA, 15 bp, Homo sapiens
tgatattttcattta

SEQ ID NO: 966845 - DNA, 15 bp, Homo sapiens
ctgatattttcattt

SEQ ID NO: 966846 - DNA, 15 bp, Homo sapiens
tctgatattttcatt

SEQ ID NO: 966847 - DNA, 15 bp, Homo sapiens
ctctgatattttcat

SEQ ID NO: 966848 - DNA, 15 bp, Homo sapiens
cctctgatattttca

SEQ ID NO: 966849 - DNA, 15 bp, Homo sapiens
ccctctgatattttc

SEQ ID NO: 966850 - DNA, 15 bp, Homo sapiens
gccctctgatatttt

SEQ ID NO: 966851 - DNA, 15 bp, Homo sapiens
tgccctctgatattt

SEQ ID NO: 966852 - DNA, 15 bp, Homo sapiens
atgccctctgatatt

SEQ ID NO: 966853 - DNA, 15 bp, Homo sapiens
aatgccctctgatat

SEQ ID NO: 966854 - DNA, 15 bp, Homo sapiens
caatgccctctgata

SEQ ID NO: 966855 - DNA, 15 bp, Homo sapiens
gcaatgccctctgat

SEQ ID NO: 966856 - DNA, 15 bp, Homo sapiens
tgcaatgccctctga

SEQ ID NO: 966857 - DNA, 15 bp, Homo sapiens
ctgcaatgccctctg

SEQ ID NO: 966858 - DNA, 15 bp, Homo sapiens
tctgcaatgccctct

SEQ ID NO: 966859 - DNA, 15 bp, Homo sapiens
atctgcaatgccctc

SEQ ID NO: 966860 - DNA, 15 bp, Homo sapiens
tatctgcaatgccct

SEQ ID NO: 966861 - DNA, 15 bp, Homo sapiens
ctatctgcaatgccc

SEQ ID NO: 966862 - DNA, 15 bp, Homo sapiens
actatctgcaatgcc

SEQ ID NO: 966863 - DNA, 15 bp, Homo sapiens
tactatctgcaatgc

SEQ ID NO: 966864 - DNA, 15 bp, Homo sapiens
ctactatctgcaatg

SEQ ID NO: 966865 - DNA, 15 bp, Homo sapiens
tctactatctgcaat

SEQ ID NO: 966866 - DNA, 15 bp, Homo sapiens
atctactatctgcaa

SEQ ID NO: 966867 - DNA, 15 bp, Homo sapiens
gatctactatctgca

SEQ ID NO: 966868 - DNA, 15 bp, Homo sapiens
agatctactatctgc

SEQ ID NO: 966869 - DNA, 15 bp, Homo sapiens
tagatctactatctg

SEQ ID NO: 966870 - DNA, 15 bp, Homo sapiens
ttagatctactatct

SEQ ID NO: 966871 - DNA, 15 bp, Homo sapiens
cttagatctactatc

SEQ ID NO: 966872 - DNA, 15 bp, Homo sapiens
acttagatctactat

SEQ ID NO: 966873 - DNA, 15 bp, Homo sapiens
tacttagatctacta

SEQ ID NO: 966874 - DNA, 15 bp, Homo sapiens
atacttagatctact

SEQ ID NO: 966875 - DNA, 15 bp, Homo sapiens
aatacttagatctac

SEQ ID NO: 966876 - DNA, 15 bp, Homo sapiens
aaatacttagatcta

SEQ ID NO: 966877 - DNA, 15 bp, Homo sapiens
aaaatacttagatct

SEQ ID NO: 966878 - DNA, 15 bp, Homo sapiens
aaaaatacttagatc

SEQ ID NO: 966879 - DNA, 15 bp, Homo sapiens
aaaaaatacttagat

SEQ ID NO: 966880 - DNA, 15 bp, Homo sapiens
gaaaaaatacttaga

SEQ ID NO: 966881 - DNA, 15 bp, Homo sapiens
tgaaaaaatacttag

SEQ ID NO: 966882 - DNA, 15 bp, Homo sapiens
atgaaaaaatactta

SEQ ID NO: 966883 - DNA, 15 bp, Homo sapiens
catgaaaaaatactt

SEQ ID NO: 966884 - DNA, 15 bp, Homo sapiens
tcatgaaaaaatact

SEQ ID NO: 966885 - DNA, 15 bp, Homo sapiens
ttcatgaaaaaatac

SEQ ID NO: 966886 - DNA, 15 bp, Homo sapiens
tttcatgaaaaaata

SEQ ID NO: 966887 - DNA, 15 bp, Homo sapiens
gtttcatgaaaaaat

SEQ ID NO: 966888 - DNA, 15 bp, Homo sapiens
agtttcatgaaaaaa

SEQ ID NO: 966889 - DNA, 15 bp, Homo sapiens
aagtttcatgaaaaa

SEQ ID NO: 966890 - DNA, 15 bp, Homo sapiens
caagtttcatgaaaa

SEQ ID NO: 966891 - DNA, 15 bp, Homo sapiens
acaagtttcatgaaa

SEQ ID NO: 966892 - DNA, 15 bp, Homo sapiens
aacaagtttcatgaa

SEQ ID NO: 966893 - DNA, 15 bp, Homo sapiens
caacaagtttcatga

SEQ ID NO: 966894 - DNA, 15 bp, Homo sapiens
acaacaagtttcatg

SEQ ID NO: 966895 - DNA, 15 bp, Homo sapiens
tacaacaagtttcat

SEQ ID NO: 966896 - DNA, 15 bp, Homo sapiens
gtacaacaagtttca

SEQ ID NO: 966897 - DNA, 15 bp, Homo sapiens
tgtacaacaagtttc

SEQ ID NO: 966898 - DNA, 15 bp, Homo sapiens
atgtacaacaagttt

SEQ ID NO: 966899 - DNA, 15 bp, Homo sapiens
catgtacaacaagtt

SEQ ID NO: 966900 - DNA, 15 bp, Homo sapiens
acatgtacaacaagt

SEQ ID NO: 966901 - DNA, 15 bp, Homo sapiens
cacatgtacaacaag

SEQ ID NO: 966902 - DNA, 15 bp, Homo sapiens
acacatgtacaacaa

SEQ ID NO: 966903 - DNA, 15 bp, Homo sapiens
cacacatgtacaaca

SEQ ID NO: 966904 - DNA, 15 bp, Homo sapiens
acacacatgtacaac

SEQ ID NO: 966905 - DNA, 15 bp, Homo sapiens
cacacacatgtacaa

SEQ ID NO: 966906 - DNA, 15 bp, Homo sapiens
acacacacatgtaca

SEQ ID NO: 966907 - DNA, 15 bp, Homo sapiens
gacacacacatgtac

SEQ ID NO: 966908 - DNA, 15 bp, Homo sapiens
tgacacacacatgta

SEQ ID NO: 966909 - DNA, 15 bp, Homo sapiens
atgacacacacatgt

SEQ ID NO: 966910 - DNA, 15 bp, Homo sapiens
tatgacacacacatg

SEQ ID NO: 966911 - DNA, 15 bp, Homo sapiens
gtatgacacacacat

SEQ ID NO: 966912 - DNA, 15 bp, Homo sapiens
tgtatgacacacaca

SEQ ID NO: 966913 - DNA, 15 bp, Homo sapiens
gtgtatgacacacac

SEQ ID NO: 966914 - DNA, 15 bp, Homo sapiens
tgtgtatgacacaca

SEQ ID NO: 966915 - DNA, 15 bp, Homo sapiens
ctgtgtatgacacac

SEQ ID NO: 966916 - DNA, 15 bp, Homo sapiens
tctgtgtatgacaca

SEQ ID NO: 966917 - DNA, 15 bp, Homo sapiens
gtctgtgtatgacac

SEQ ID NO: 966918 - DNA, 15 bp, Homo sapiens
agtctgtgtatgaca

SEQ ID NO: 966919 - DNA, 15 bp, Homo sapiens
tagtctgtgtatgac

SEQ ID NO: 966920 - DNA, 15 bp, Homo sapiens
atagtctgtgtatga

SEQ ID NO: 966921 - DNA, 15 bp, Homo sapiens
tatagtctgtgtatg

SEQ ID NO: 966922 - DNA, 15 bp, Homo sapiens
atatagtctgtgtat

SEQ ID NO: 966923 - DNA, 15 bp, Homo sapiens
tatatagtctgtgta

SEQ ID NO: 966924 - DNA, 15 bp, Homo sapiens
atatatagtctgtgt

SEQ ID NO: 966925 - DNA, 15 bp, Homo sapiens
tatatatagtctgtg

SEQ ID NO: 966926 - DNA, 15 bp, Homo sapiens
atatatatagtctgt

SEQ ID NO: 966927 - DNA, 15 bp, Homo sapiens
catatatatagtctg

SEQ ID NO: 966928 - DNA, 15 bp, Homo sapiens
gcatatatatagtct

SEQ ID NO: 966929 - DNA, 15 bp, Homo sapiens
tgcatatatatagtc

SEQ ID NO: 966930 - DNA, 15 bp, Homo sapiens
ctgcatatatatagt

SEQ ID NO: 966931 - DNA, 15 bp, Homo sapiens
actgcatatatatag

SEQ ID NO: 966932 - DNA, 15 bp, Homo sapiens
tactgcatatatata

SEQ ID NO: 966933 - DNA, 15 bp, Homo sapiens
gtactgcatatatat

SEQ ID NO: 966934 - DNA, 15 bp, Homo sapiens
ggtactgcatatata

SEQ ID NO: 966935 - DNA, 15 bp, Homo sapiens
aggtactgcatatat

SEQ ID NO: 966936 - DNA, 15 bp, Homo sapiens
caggtactgcatata

SEQ ID NO: 966937 - DNA, 15 bp, Homo sapiens
acaggtactgcatat

SEQ ID NO: 966938 - DNA, 15 bp, Homo sapiens
tacaggtactgcata

SEQ ID NO: 966939 - DNA, 15 bp, Homo sapiens
ttacaggtactgcat

SEQ ID NO: 966940 - DNA, 15 bp, Homo sapiens
tttacaggtactgca

SEQ ID NO: 966941 - DNA, 15 bp, Homo sapiens
gtttacaggtactgc

SEQ ID NO: 966942 - DNA, 15 bp, Homo sapiens
agtttacaggtactg

SEQ ID NO: 966943 - DNA, 15 bp, Homo sapiens
cagtttacaggtact

SEQ ID NO: 966944 - DNA, 15 bp, Homo sapiens
acagtttacaggtac

SEQ ID NO: 966945 - DNA, 15 bp, Homo sapiens
tacagtttacaggta

SEQ ID NO: 966946 - DNA, 15 bp, Homo sapiens
atacagtttacaggt

SEQ ID NO: 966947 - DNA, 15 bp, Homo sapiens
aatacagtttacagg

SEQ ID NO: 966948 - DNA, 15 bp, Homo sapiens
caatacagtttacag

SEQ ID NO: 966949 - DNA, 15 bp, Homo sapiens
gcaatacagtttaca

SEQ ID NO: 966950 - DNA, 15 bp, Homo sapiens
ggcaatacagtttac

SEQ ID NO: 966951 - DNA, 15 bp, Homo sapiens
tggcaatacagttta

SEQ ID NO: 966952 - DNA, 15 bp, Homo sapiens
gtggcaatacagttt

SEQ ID NO: 966953 - DNA, 15 bp, Homo sapiens
tgtggcaatacagtt

SEQ ID NO: 966954 - DNA, 15 bp, Homo sapiens
atgtggcaatacagt

SEQ ID NO: 966955 - DNA, 15 bp, Homo sapiens
tatgtggcaatacag

SEQ ID NO: 966956 - DNA, 15 bp, Homo sapiens
ttatgtggcaataca

SEQ ID NO: 966957 - DNA, 15 bp, Homo sapiens
attatgtggcaatac

SEQ ID NO: 966958 - DNA, 15 bp, Homo sapiens
cattatgtggcaata

SEQ ID NO: 966959 - DNA, 15 bp, Homo sapiens
acattatgtggcaat

SEQ ID NO: 966960 - DNA, 15 bp, Homo sapiens
gacattatgtggcaa

SEQ ID NO: 966961 - DNA, 15 bp, Homo sapiens
agacattatgtggca

SEQ ID NO: 966962 - DNA, 15 bp, Homo sapiens
tagacattatgtggc

SEQ ID NO: 966963 - DNA, 15 bp, Homo sapiens
atagacattatgtgg

SEQ ID NO: 966964 - DNA, 15 bp, Homo sapiens
tatagacattatgtg

SEQ ID NO: 966965 - DNA, 15 bp, Homo sapiens
atatagacattatgt

SEQ ID NO: 966966 - DNA, 15 bp, Homo sapiens
aatatagacattatg

SEQ ID NO: 966967 - DNA, 15 bp, Homo sapiens
aaatatagacattat

SEQ ID NO: 966968 - DNA, 15 bp, Homo sapiens
aaaatatagacatta

SEQ ID NO: 966969 - DNA, 15 bp, Homo sapiens
gaaaatatagacatt

SEQ ID NO: 966970 - DNA, 15 bp, Homo sapiens
ggaaaatatagacat

SEQ ID NO: 966971 - DNA, 15 bp, Homo sapiens
aggaaaatatagaca

SEQ ID NO: 966972 - DNA, 15 bp, Homo sapiens
taggaaaatatagac

SEQ ID NO: 966973 - DNA, 15 bp, Homo sapiens
ctaggaaaatataga

SEQ ID NO: 966974 - DNA, 15 bp, Homo sapiens
tctaggaaaatatag

SEQ ID NO: 966975 - DNA, 15 bp, Homo sapiens
ctctaggaaaatata

SEQ ID NO: 966976 - DNA, 15 bp, Homo sapiens
cctctaggaaaatat

SEQ ID NO: 966977 - DNA, 15 bp, Homo sapiens
acctctaggaaaata

SEQ ID NO: 966978 - DNA, 15 bp, Homo sapiens
gacctctaggaaaat

SEQ ID NO: 966979 - DNA, 15 bp, Homo sapiens
tgacctctaggaaaa

SEQ ID NO: 966980 - DNA, 15 bp, Homo sapiens
gtgacctctaggaaa

SEQ ID NO: 966981 - DNA, 15 bp, Homo sapiens
tgtgacctctaggaa

SEQ ID NO: 966982 - DNA, 15 bp, Homo sapiens
ctgtgacctctagga

SEQ ID NO: 966983 - DNA, 15 bp, Homo sapiens
actgtgacctctagg

SEQ ID NO: 966984 - DNA, 15 bp, Homo sapiens
gactgtgacctctag

SEQ ID NO: 966985 - DNA, 15 bp, Homo sapiens
tgactgtgacctcta

SEQ ID NO: 966986 - DNA, 15 bp, Homo sapiens
gtgactgtgacctct

SEQ ID NO: 966987 - DNA, 15 bp, Homo sapiens
ggtgactgtgacctc

SEQ ID NO: 966988 - DNA, 15 bp, Homo sapiens
tggtgactgtgacct

SEQ ID NO: 966989 - DNA, 15 bp, Homo sapiens
ttggtgactgtgacc

SEQ ID NO: 966990 - DNA, 15 bp, Homo sapiens
tttggtgactgtgac

SEQ ID NO: 966991 - DNA, 15 bp, Homo sapiens
ctttggtgactgtga

SEQ ID NO: 966992 - DNA, 15 bp, Homo sapiens
actttggtgactgtg

SEQ ID NO: 966993 - DNA, 15 bp, Homo sapiens
aactttggtgactgt

SEQ ID NO: 966994 - DNA, 15 bp, Homo sapiens
caactttggtgactg

SEQ ID NO: 966995 - DNA, 15 bp, Homo sapiens
ccaactttggtgact

SEQ ID NO: 966996 - DNA, 15 bp, Homo sapiens
cccaactttggtgac

SEQ ID NO: 966997 - DNA, 15 bp, Homo sapiens
tcccaactttggtga

SEQ ID NO: 966998 - DNA, 15 bp, Homo sapiens
ttcccaactttggtg

SEQ ID NO: 966999 - DNA, 15 bp, Homo sapiens
cttcccaactttggt

SEQ ID NO: 967000 - DNA, 15 bp, Homo sapiens
acttcccaactttgg

SEQ ID NO: 967001 - DNA, 15 bp, Homo sapiens
gacttcccaactttg

SEQ ID NO: 967002 - DNA, 15 bp, Homo sapiens
tgacttcccaacttt

SEQ ID NO: 967003 - DNA, 15 bp, Homo sapiens
gtgacttcccaactt

SEQ ID NO: 967004 - DNA, 15 bp, Homo sapiens
ggtgacttcccaact

SEQ ID NO: 967005 - DNA, 15 bp, Homo sapiens
gggtgacttcccaac

SEQ ID NO: 967006 - DNA, 15 bp, Homo sapiens
tgggtgacttcccaa

SEQ ID NO: 967007 - DNA, 15 bp, Homo sapiens
ttgggtgacttccca

SEQ ID NO: 967008 - DNA, 15 bp, Homo sapiens
gttgggtgacttccc

SEQ ID NO: 967009 - DNA, 15 bp, Homo sapiens
agttgggtgacttcc

SEQ ID NO: 967010 - DNA, 15 bp, Homo sapiens
aagttgggtgacttc

SEQ ID NO: 967011 - DNA, 15 bp, Homo sapiens
gaagttgggtgactt

SEQ ID NO: 967012 - DNA, 15 bp, Homo sapiens
cgaagttgggtgact

SEQ ID NO: 967013 - DNA, 15 bp, Homo sapiens
ccgaagttgggtgac

SEQ ID NO: 967014 - DNA, 15 bp, Homo sapiens
cccgaagttgggtga

SEQ ID NO: 967015 - DNA, 15 bp, Homo sapiens
tcccgaagttgggtg

SEQ ID NO: 967016 - DNA, 15 bp, Homo sapiens
ttcccgaagttgggt

SEQ ID NO: 967017 - DNA, 15 bp, Homo sapiens
gttcccgaagttggg

SEQ ID NO: 967018 - DNA, 15 bp, Homo sapiens
agttcccgaagttgg

SEQ ID NO: 967019 - DNA, 15 bp, Homo sapiens
aagttcccgaagttg

SEQ ID NO: 967020 - DNA, 15 bp, Homo sapiens
aaagttcccgaagtt

SEQ ID NO: 967021 - DNA, 15 bp, Homo sapiens
caaagttcccgaagt

SEQ ID NO: 967022 - DNA, 15 bp, Homo sapiens
ccaaagttcccgaag

SEQ ID NO: 967023 - DNA, 15 bp, Homo sapiens
cccaaagttcccgaa

SEQ ID NO: 967024 - DNA, 15 bp, Homo sapiens
tcccaaagttcccga

SEQ ID NO: 967025 - DNA, 15 bp, Homo sapiens
ttcccaaagttcccg

SEQ ID NO: 967026 - DNA, 15 bp, Homo sapiens
cttcccaaagttccc

SEQ ID NO: 967027 - DNA, 15 bp, Homo sapiens
acttcccaaagttcc

SEQ ID NO: 967028 - DNA, 15 bp, Homo sapiens
gacttcccaaagttc

SEQ ID NO: 967029 - DNA, 15 bp, Homo sapiens
tgacttcccaaagtt

SEQ ID NO: 967030 - DNA, 15 bp, Homo sapiens
gtgacttcccaaagt

SEQ ID NO: 967031 - DNA, 15 bp, Homo sapiens
ggtgacttcccaaag

SEQ ID NO: 967032 - DNA, 15 bp, Homo sapiens
gggtgacttcccaaa

SEQ ID NO: 967033 - DNA, 15 bp, Homo sapiens
tttgggtgacttccc

SEQ ID NO: 967034 - DNA, 15 bp, Homo sapiens
gtttgggtgacttcc

SEQ ID NO: 967035 - DNA, 15 bp, Homo sapiens
agtttgggtgacttc

SEQ ID NO: 967036 - DNA, 15 bp, Homo sapiens
aagtttgggtgactt

SEQ ID NO: 967037 - DNA, 15 bp, Homo sapiens
taagtttgggtgact

SEQ ID NO: 967038 - DNA, 15 bp, Homo sapiens
gtaagtttgggtgac

SEQ ID NO: 967039 - DNA, 15 bp, Homo sapiens
tgtaagtttgggtga

SEQ ID NO: 967040 - DNA, 15 bp, Homo sapiens
ctgtaagtttgggtg

SEQ ID NO: 967041 - DNA, 15 bp, Homo sapiens
actgtaagtttgggt

SEQ ID NO: 967042 - DNA, 15 bp, Homo sapiens
gactgtaagtttggg

SEQ ID NO: 967043 - DNA, 15 bp, Homo sapiens
tgactgtaagtttgg

SEQ ID NO: 967044 - DNA, 15 bp, Homo sapiens
gtgactgtaagtttg

SEQ ID NO: 967045 - DNA, 15 bp, Homo sapiens
ggtgactgtaagttt

SEQ ID NO: 967046 - DNA, 15 bp, Homo sapiens
tggtgactgtaagtt

SEQ ID NO: 967047 - DNA, 15 bp, Homo sapiens
ttggtgactgtaagt

SEQ ID NO: 967048 - DNA, 15 bp, Homo sapiens
tttggtgactgtaag

SEQ ID NO: 967049 - DNA, 15 bp, Homo sapiens
ttttggtgactgtaa

SEQ ID NO: 967050 - DNA, 15 bp, Homo sapiens
attttggtgactgta

SEQ ID NO: 967051 - DNA, 15 bp, Homo sapiens
aattttggtgactgt

SEQ ID NO: 967052 - DNA, 15 bp, Homo sapiens
caattttggtgactg

SEQ ID NO: 967053 - DNA, 15 bp, Homo sapiens
gcaattttggtgact

SEQ ID NO: 967054 - DNA, 15 bp, Homo sapiens
agcaattttggtgac

SEQ ID NO: 967055 - DNA, 15 bp, Homo sapiens
gagcaattttggtga

SEQ ID NO: 967056 - DNA, 15 bp, Homo sapiens
agagcaattttggtg

SEQ ID NO: 967057 - DNA, 15 bp, Homo sapiens
tagagcaattttggt

SEQ ID NO: 967058 - DNA, 15 bp, Homo sapiens
atagagcaattttgg

SEQ ID NO: 967059 - DNA, 15 bp, Homo sapiens
aatagagcaattttg

SEQ ID NO: 967060 - DNA, 15 bp, Homo sapiens
gaatagagcaatttt

SEQ ID NO: 967061 - DNA, 15 bp, Homo sapiens
agaatagagcaattt

SEQ ID NO: 967062 - DNA, 15 bp, Homo sapiens
tagaatagagcaatt

SEQ ID NO: 967063 - DNA, 15 bp, Homo sapiens
gtagaatagagcaat

SEQ ID NO: 967064 - DNA, 15 bp, Homo sapiens
agtagaatagagcaa

SEQ ID NO: 967065 - DNA, 15 bp, Homo sapiens
tagtagaatagagca

SEQ ID NO: 967066 - DNA, 15 bp, Homo sapiens
atagtagaatagagc

SEQ ID NO: 967067 - DNA, 15 bp, Homo sapiens
catagtagaatagag

SEQ ID NO: 967068 - DNA, 15 bp, Homo sapiens
acatagtagaataga

SEQ ID NO: 967069 - DNA, 15 bp, Homo sapiens
cacatagtagaatag

SEQ ID NO: 967070 - DNA, 15 bp, Homo sapiens
tcacatagtagaata

SEQ ID NO: 967071 - DNA, 15 bp, Homo sapiens
gtcacatagtagaat

SEQ ID NO: 967072 - DNA, 15 bp, Homo sapiens
ggtcacatagtagaa

SEQ ID NO: 967073 - DNA, 15 bp, Homo sapiens
aggtcacatagtaga

SEQ ID NO: 967074 - DNA, 15 bp, Homo sapiens
gaggtcacatagtag

SEQ ID NO: 967075 - DNA, 15 bp, Homo sapiens
tgaggtcacatagta

SEQ ID NO: 967076 - DNA, 15 bp, Homo sapiens
ttgaggtcacatagt

SEQ ID NO: 967077 - DNA, 15 bp, Homo sapiens
tttgaggtcacatag

SEQ ID NO: 967078 - DNA, 15 bp, Homo sapiens
ttttgaggtcacata

SEQ ID NO: 967079 - DNA, 15 bp, Homo sapiens
cttttgaggtcacat

SEQ ID NO: 967080 - DNA, 15 bp, Homo sapiens
acttttgaggtcaca

SEQ ID NO: 967081 - DNA, 15 bp, Homo sapiens
cacttttgaggtcac

SEQ ID NO: 967082 - DNA, 15 bp, Homo sapiens
tcacttttgaggtca

SEQ ID NO: 967083 - DNA, 15 bp, Homo sapiens
atcacttttgaggtc

SEQ ID NO: 967084 - DNA, 15 bp, Homo sapiens
aatcacttttgaggt

SEQ ID NO: 967085 - DNA, 15 bp, Homo sapiens
aaatcacttttgagg

SEQ ID NO: 967086 - DNA, 15 bp, Homo sapiens
caaatcacttttgag

SEQ ID NO: 967087 - DNA, 15 bp, Homo sapiens
tcaaatcacttttga

SEQ ID NO: 967088 - DNA, 15 bp, Homo sapiens
ttcaaatcacttttg

SEQ ID NO: 967089 - DNA, 15 bp, Homo sapiens
tttcaaatcactttt

SEQ ID NO: 967090 - DNA, 15 bp, Homo sapiens
ctttcaaatcacttt

SEQ ID NO: 967091 - DNA, 15 bp, Homo sapiens
tctttcaaatcactt

SEQ ID NO: 967092 - DNA, 15 bp, Homo sapiens
ttctttcaaatcact

SEQ ID NO: 967093 - DNA, 15 bp, Homo sapiens
cttctttcaaatcac

SEQ ID NO: 967094 - DNA, 15 bp, Homo sapiens
ccttctttcaaatca

SEQ ID NO: 967095 - DNA, 15 bp, Homo sapiens
tccttctttcaaatc

SEQ ID NO: 967096 - DNA, 15 bp, Homo sapiens
ttccttctttcaaat

SEQ ID NO: 967097 - DNA, 15 bp, Homo sapiens
gttccttctttcaaa

SEQ ID NO: 967098 - DNA, 15 bp, Homo sapiens
tgttccttctttcaa

SEQ ID NO: 967099 - DNA, 15 bp, Homo sapiens
atgttccttctttca

SEQ ID NO: 967100 - DNA, 15 bp, Homo sapiens
gatgttccttctttc

SEQ ID NO: 967101 - DNA, 15 bp, Homo sapiens
agatgttccttcttt

SEQ ID NO: 967102 - DNA, 15 bp, Homo sapiens
cagatgttccttctt

SEQ ID NO: 967103 - DNA, 15 bp, Homo sapiens
tcagatgttccttct

SEQ ID NO: 967104 - DNA, 15 bp, Homo sapiens
ctcagatgttccttc

SEQ ID NO: 967105 - DNA, 15 bp, Homo sapiens
gctcagatgttcctt

SEQ ID NO: 967106 - DNA, 15 bp, Homo sapiens
agctcagatgttcct

SEQ ID NO: 967107 - DNA, 15 bp, Homo sapiens
cagctcagatgttcc

SEQ ID NO: 967108 - DNA, 15 bp, Homo sapiens
ccagctcagatgttc

SEQ ID NO: 967109 - DNA, 15 bp, Homo sapiens
cccagctcagatgtt

SEQ ID NO: 967110 - DNA, 15 bp, Homo sapiens
gcccagctcagatgt

SEQ ID NO: 967111 - DNA, 15 bp, Homo sapiens
ggcccagctcagatg

SEQ ID NO: 967112 - DNA, 15 bp, Homo sapiens
gggcccagctcagat

SEQ ID NO: 967113 - DNA, 15 bp, Homo sapiens
tgggcccagctcaga

SEQ ID NO: 967114 - DNA, 15 bp, Homo sapiens
ttgggcccagctcag

SEQ ID NO: 967115 - DNA, 15 bp, Homo sapiens
tttgggcccagctca

SEQ ID NO: 967116 - DNA, 15 bp, Homo sapiens
gtttgggcccagctc

SEQ ID NO: 967117 - DNA, 15 bp, Homo sapiens
ggtttgggcccagct

SEQ ID NO: 967118 - DNA, 15 bp, Homo sapiens
gggtttgggcccagc

SEQ ID NO: 967119 - DNA, 15 bp, Homo sapiens
agggtttgggcccag

SEQ ID NO: 967120 - DNA, 15 bp, Homo sapiens
tagggtttgggccca

SEQ ID NO: 967121 - DNA, 15 bp, Homo sapiens
atagggtttgggccc

SEQ ID NO: 967122 - DNA, 15 bp, Homo sapiens
aatagggtttgggcc

SEQ ID NO: 967123 - DNA, 15 bp, Homo sapiens
caatagggtttgggc

SEQ ID NO: 967124 - DNA, 15 bp, Homo sapiens
gcaatagggtttggg

SEQ ID NO: 967125 - DNA, 15 bp, Homo sapiens
tgcaatagggtttgg

SEQ ID NO: 967126 - DNA, 15 bp, Homo sapiens
ttgcaatagggtttg

SEQ ID NO: 967127 - DNA, 15 bp, Homo sapiens
attgcaatagggttt

SEQ ID NO: 967128 - DNA, 15 bp, Homo sapiens
aattgcaatagggtt

SEQ ID NO: 967129 - DNA, 15 bp, Homo sapiens
aaattgcaatagggt

SEQ ID NO: 967130 - DNA, 15 bp, Homo sapiens
aaaattgcaataggg

SEQ ID NO: 967131 - DNA, 15 bp, Homo sapiens
taaaattgcaatagg

SEQ ID NO: 967132 - DNA, 15 bp, Homo sapiens
ataaaattgcaatag

SEQ ID NO: 967133 - DNA, 15 bp, Homo sapiens
aataaaattgcaata

SEQ ID NO: 967134 - DNA, 15 bp, Homo sapiens
caataaaattgcaat

SEQ ID NO: 967135 - DNA, 15 bp, Homo sapiens
ccaataaaattgcaa

SEQ ID NO: 967136 - DNA, 15 bp, Homo sapiens
cccaataaaattgca

SEQ ID NO: 967137 - DNA, 15 bp, Homo sapiens
ccccaataaaattgc

SEQ ID NO: 967138 - DNA, 15 bp, Homo sapiens
gccccaataaaattg

SEQ ID NO: 967139 - DNA, 15 bp, Homo sapiens
ggccccaataaaatt

SEQ ID NO: 967140 - DNA, 15 bp, Homo sapiens
tggccccaataaaat

SEQ ID NO: 967141 - DNA, 15 bp, Homo sapiens
ttggccccaataaaa

SEQ ID NO: 967142 - DNA, 15 bp, Homo sapiens
tttggccccaataaa

SEQ ID NO: 967143 - DNA, 15 bp, Homo sapiens
ctttggccccaataa

SEQ ID NO: 967144 - DNA, 15 bp, Homo sapiens
tctttggccccaata

SEQ ID NO: 967145 - DNA, 15 bp, Homo sapiens
ctctttggccccaat

SEQ ID NO: 967146 - DNA, 15 bp, Homo sapiens
tctctttggccccaa

SEQ ID NO: 967147 - DNA, 15 bp, Homo sapiens
ttctctttggcccca

SEQ ID NO: 967148 - DNA, 15 bp, Homo sapiens
gttctctttggcccc

SEQ ID NO: 967149 - DNA, 15 bp, Homo sapiens
agttctctttggccc

SEQ ID NO: 967150 - DNA, 15 bp, Homo sapiens
gagttctctttggcc

SEQ ID NO: 967151 - DNA, 15 bp, Homo sapiens
ggagttctctttggc

SEQ ID NO: 967152 - DNA, 15 bp, Homo sapiens
tggagttctctttgg

SEQ ID NO: 967153 - DNA, 15 bp, Homo sapiens
atggagttctctttg

SEQ ID NO: 967154 - DNA, 15 bp, Homo sapiens
catggagttctcttt

SEQ ID NO: 967155 - DNA, 15 bp, Homo sapiens
gcatggagttctctt

SEQ ID NO: 967156 - DNA, 15 bp, Homo sapiens
agcatggagttctct

SEQ ID NO: 967157 - DNA, 15 bp, Homo sapiens
gagcatggagttctc

SEQ ID NO: 967158 - DNA, 15 bp, Homo sapiens
ggagcatggagttct

SEQ ID NO: 967159 - DNA, 15 bp, Homo sapiens
aggagcatggagttc

SEQ ID NO: 967160 - DNA, 15 bp, Homo sapiens
caggagcatggagtt

SEQ ID NO: 967161 - DNA, 15 bp, Homo sapiens
gcaggagcatggagt

SEQ ID NO: 967162 - DNA, 15 bp, Homo sapiens
ggcaggagcatggag

SEQ ID NO: 967163 - DNA, 15 bp, Homo sapiens
tggcaggagcatgga

SEQ ID NO: 967164 - DNA, 15 bp, Homo sapiens
ttggcaggagcatgg

SEQ ID NO: 967165 - DNA, 15 bp, Homo sapiens
tttggcaggagcatg

SEQ ID NO: 967166 - DNA, 15 bp, Homo sapiens
atttggcaggagcat

SEQ ID NO: 967167 - DNA, 15 bp, Homo sapiens
gatttggcaggagca

SEQ ID NO: 967168 - DNA, 15 bp, Homo sapiens
tgatttggcaggagc

SEQ ID NO: 967169 - DNA, 15 bp, Homo sapiens
ttgatttggcaggag

SEQ ID NO: 967170 - DNA, 15 bp, Homo sapiens
cttgatttggcagga

SEQ ID NO: 967171 - DNA, 15 bp, Homo sapiens
ccttgatttggcagg

SEQ ID NO: 967172 - DNA, 15 bp, Homo sapiens
gccttgatttggcag

SEQ ID NO: 967173 - DNA, 15 bp, Homo sapiens
tgccttgatttggca

SEQ ID NO: 967174 - DNA, 15 bp, Homo sapiens
ctgccttgatttggc

SEQ ID NO: 967175 - DNA, 15 bp, Homo sapiens
actgccttgatttgg

SEQ ID NO: 967176 - DNA, 15 bp, Homo sapiens
cactgccttgatttg

SEQ ID NO: 967177 - DNA, 15 bp, Homo sapiens
acactgccttgattt

SEQ ID NO: 967178 - DNA, 15 bp, Homo sapiens
gacactgccttgatt

SEQ ID NO: 967179 - DNA, 15 bp, Homo sapiens
tgacactgccttgat

SEQ ID NO: 967180 - DNA, 15 bp, Homo sapiens
ctgacactgccttga

SEQ ID NO: 967181 - DNA, 15 bp, Homo sapiens
gctgacactgccttg

SEQ ID NO: 967182 - DNA, 15 bp, Homo sapiens
ggctgacactgcctt

SEQ ID NO: 967183 - DNA, 15 bp, Homo sapiens
aggctgacactgcct

SEQ ID NO: 967184 - DNA, 15 bp, Homo sapiens
gaggctgacactgcc

SEQ ID NO: 967185 - DNA, 15 bp, Homo sapiens
tgaggctgacactgc

SEQ ID NO: 967186 - DNA, 15 bp, Homo sapiens
ttgaggctgacactg

SEQ ID NO: 967187 - DNA, 15 bp, Homo sapiens
attgaggctgacact

SEQ ID NO: 967188 - DNA, 15 bp, Homo sapiens
tattgaggctgacac

SEQ ID NO: 967189 - DNA, 15 bp, Homo sapiens
ttattgaggctgaca

SEQ ID NO: 967190 - DNA, 15 bp, Homo sapiens
attattgaggctgac

SEQ ID NO: 967191 - DNA, 15 bp, Homo sapiens
aattattgaggctga

SEQ ID NO: 967192 - DNA, 15 bp, Homo sapiens
aaattattgaggctg

SEQ ID NO: 967193 - DNA, 15 bp, Homo sapiens
gaaattattgaggct

SEQ ID NO: 967194 - DNA, 15 bp, Homo sapiens
ggaaattattgaggc

SEQ ID NO: 967195 - DNA, 15 bp, Homo sapiens
gggaaattattgagg

SEQ ID NO: 967196 - DNA, 15 bp, Homo sapiens
tgggaaattattgag

SEQ ID NO: 967197 - DNA, 15 bp, Homo sapiens
ctgggaaattattga

SEQ ID NO: 967198 - DNA, 15 bp, Homo sapiens
tctgggaaattattg

SEQ ID NO: 967199 - DNA, 15 bp, Homo sapiens
atctgggaaattatt

SEQ ID NO: 967200 - DNA, 15 bp, Homo sapiens
tatctgggaaattat

SEQ ID NO: 967201 - DNA, 15 bp, Homo sapiens
ttatctgggaaatta

SEQ ID NO: 967202 - DNA, 15 bp, Homo sapiens
tttatctgggaaatt

SEQ ID NO: 967203 - DNA, 15 bp, Homo sapiens
ttttatctgggaaat

SEQ ID NO: 967204 - DNA, 15 bp, Homo sapiens
tttttatctgggaaa

SEQ ID NO: 967205 - DNA, 15 bp, Homo sapiens
atttttatctgggaa

SEQ ID NO: 967206 - DNA, 15 bp, Homo sapiens
tatttttatctggga

SEQ ID NO: 967207 - DNA, 15 bp, Homo sapiens
ttatttttatctggg

SEQ ID NO: 967208 - DNA, 15 bp, Homo sapiens
tttatttttatctgg

SEQ ID NO: 967209 - DNA, 15 bp, Homo sapiens
ttttatttttatctg

SEQ ID NO: 967210 - DNA, 15 bp, Homo sapiens
tttttatttttatct

SEQ ID NO: 967211 - DNA, 15 bp, Homo sapiens
atttttatttttatc

SEQ ID NO: 967212 - DNA, 15 bp, Homo sapiens
gatttttatttttat

SEQ ID NO: 967213 - DNA, 15 bp, Homo sapiens
agatttttattttta

SEQ ID NO: 967214 - DNA, 15 bp, Homo sapiens
cagatttttattttt

SEQ ID NO: 967215 - DNA, 15 bp, Homo sapiens
acagatttttatttt

SEQ ID NO: 967216 - DNA, 15 bp, Homo sapiens
cacagatttttattt

SEQ ID NO: 967217 - DNA, 15 bp, Homo sapiens
tcacagatttttatt

SEQ ID NO: 967218 - DNA, 15 bp, Homo sapiens
atcacagatttttat

SEQ ID NO: 967219 - DNA, 15 bp, Homo sapiens
tatcacagattttta

SEQ ID NO: 967220 - DNA, 15 bp, Homo sapiens
gtatcacagattttt

SEQ ID NO: 967221 - DNA, 15 bp, Homo sapiens
tgtatcacagatttt

SEQ ID NO: 967222 - DNA, 15 bp, Homo sapiens
ttgtatcacagattt

SEQ ID NO: 967223 - DNA, 15 bp, Homo sapiens
attgtatcacagatt

SEQ ID NO: 967224 - DNA, 15 bp, Homo sapiens
gattgtatcacagat

SEQ ID NO: 967225 - DNA, 15 bp, Homo sapiens
tgattgtatcacaga

SEQ ID NO: 967226 - DNA, 15 bp, Homo sapiens
ctgattgtatcacag

SEQ ID NO: 967227 - DNA, 15 bp, Homo sapiens
tctgattgtatcaca

SEQ ID NO: 967228 - DNA, 15 bp, Homo sapiens
ttctgattgtatcac

SEQ ID NO: 967229 - DNA, 15 bp, Homo sapiens
attctgattgtatca

SEQ ID NO: 967230 - DNA, 15 bp, Homo sapiens
cattctgattgtatc

SEQ ID NO: 967231 - DNA, 15 bp, Homo sapiens
acattctgattgtat

SEQ ID NO: 967232 - DNA, 15 bp, Homo sapiens
cacattctgattgta

SEQ ID NO: 967233 - DNA, 15 bp, Homo sapiens
tcacattctgattgt

SEQ ID NO: 967234 - DNA, 15 bp, Homo sapiens
ttcacattctgattg

SEQ ID NO: 967235 - DNA, 15 bp, Homo sapiens
tttcacattctgatt

SEQ ID NO: 967236 - DNA, 15 bp, Homo sapiens
ttttcacattctgat

SEQ ID NO: 967237 - DNA, 15 bp, Homo sapiens
attttcacattctga

SEQ ID NO: 967238 - DNA, 15 bp, Homo sapiens
aattttcacattctg

SEQ ID NO: 967239 - DNA, 15 bp, Homo sapiens
gaattttcacattct

SEQ ID NO: 967240 - DNA, 15 bp, Homo sapiens
agaattttcacattc

SEQ ID NO: 967241 - DNA, 15 bp, Homo sapiens
aagaattttcacatt

SEQ ID NO: 967242 - DNA, 15 bp, Homo sapiens
taagaattttcacat

SEQ ID NO: 967243 - DNA, 15 bp, Homo sapiens
ataagaattttcaca

SEQ ID NO: 967244 - DNA, 15 bp, Homo sapiens
aataagaattttcac

SEQ ID NO: 967245 - DNA, 15 bp, Homo sapiens
aaataagaattttca

SEQ ID NO: 967246 - DNA, 15 bp, Homo sapiens
aaaataagaattttc

SEQ ID NO: 967247 - DNA, 15 bp, Homo sapiens
caaaataagaatttt

SEQ ID NO: 967248 - DNA, 15 bp, Homo sapiens
ccaaaataagaattt

SEQ ID NO: 967249 - DNA, 15 bp, Homo sapiens
tccaaaataagaatt

SEQ ID NO: 967250 - DNA, 15 bp, Homo sapiens
ttccaaaataagaat

SEQ ID NO: 967251 - DNA, 15 bp, Homo sapiens
cttccaaaataagaa

SEQ ID NO: 967252 - DNA, 15 bp, Homo sapiens
gcttccaaaataaga

SEQ ID NO: 967253 - DNA, 15 bp, Homo sapiens
tgcttccaaaataag

SEQ ID NO: 967254 - DNA, 15 bp, Homo sapiens
ttgcttccaaaataa

SEQ ID NO: 967255 - DNA, 15 bp, Homo sapiens
tttgcttccaaaata

SEQ ID NO: 967256 - DNA, 15 bp, Homo sapiens
atttgcttccaaaat

SEQ ID NO: 967257 - DNA, 15 bp, Homo sapiens
catttgcttccaaaa

SEQ ID NO: 967258 - DNA, 15 bp, Homo sapiens
acatttgcttccaaa

SEQ ID NO: 967259 - DNA, 15 bp, Homo sapiens
gacatttgcttccaa

SEQ ID NO: 967260 - DNA, 15 bp, Homo sapiens
tgacatttgcttcca

SEQ ID NO: 967261 - DNA, 15 bp, Homo sapiens
atgacatttgcttcc

SEQ ID NO: 967262 - DNA, 15 bp, Homo sapiens
tatgacatttgcttc

SEQ ID NO: 967263 - DNA, 15 bp, Homo sapiens
ttatgacatttgctt

SEQ ID NO: 967264 - DNA, 15 bp, Homo sapiens
gttatgacatttgct

SEQ ID NO: 967265 - DNA, 15 bp, Homo sapiens
ggttatgacatttgc

SEQ ID NO: 967266 - DNA, 15 bp, Homo sapiens
tggttatgacatttg

SEQ ID NO: 967267 - DNA, 15 bp, Homo sapiens
ttggttatgacattt

SEQ ID NO: 967268 - DNA, 15 bp, Homo sapiens
attggttatgacatt

SEQ ID NO: 967269 - DNA, 15 bp, Homo sapiens
cattggttatgacat

SEQ ID NO: 967270 - DNA, 15 bp, Homo sapiens
gcattggttatgaca

SEQ ID NO: 967271 - DNA, 15 bp, Homo sapiens
tgcattggttatgac

SEQ ID NO: 967272 - DNA, 15 bp, Homo sapiens
ttgcattggttatga

SEQ ID NO: 967273 - DNA, 15 bp, Homo sapiens
cttgcattggttatg

SEQ ID NO: 967274 - DNA, 15 bp, Homo sapiens
ccttgcattggttat

SEQ ID NO: 967275 - DNA, 15 bp, Homo sapiens
cccttgcattggtta

SEQ ID NO: 967276 - DNA, 15 bp, Homo sapiens
gcccttgcattggtt

SEQ ID NO: 967277 - DNA, 15 bp, Homo sapiens
agcccttgcattggt

SEQ ID NO: 967278 - DNA, 15 bp, Homo sapiens
tagcccttgcattgg

SEQ ID NO: 967279 - DNA, 15 bp, Homo sapiens
atagcccttgcattg

SEQ ID NO: 967280 - DNA, 15 bp, Homo sapiens
gatagcccttgcatt

SEQ ID NO: 967281 - DNA, 15 bp, Homo sapiens
agatagcccttgcat

SEQ ID NO: 967282 - DNA, 15 bp, Homo sapiens
gagatagcccttgca

SEQ ID NO: 967283 - DNA, 15 bp, Homo sapiens
tgagatagcccttgc

SEQ ID NO: 967284 - DNA, 15 bp, Homo sapiens
ttgagatagcccttg

SEQ ID NO: 967285 - DNA, 15 bp, Homo sapiens
attgagatagccctt

SEQ ID NO: 967286 - DNA, 15 bp, Homo sapiens
tattgagatagccct

SEQ ID NO: 967287 - DNA, 15 bp, Homo sapiens
atattgagatagccc

SEQ ID NO: 967288 - DNA, 15 bp, Homo sapiens
aatattgagatagcc

SEQ ID NO: 967289 - DNA, 15 bp, Homo sapiens
gaatattgagatagc

SEQ ID NO: 967290 - DNA, 15 bp, Homo sapiens
tgaatattgagatag

SEQ ID NO: 967291 - DNA, 15 bp, Homo sapiens
atgaatattgagata

SEQ ID NO: 967292 - DNA, 15 bp, Homo sapiens
aatgaatattgagat

SEQ ID NO: 967293 - DNA, 15 bp, Homo sapiens
gaatgaatattgaga

SEQ ID NO: 967294 - DNA, 15 bp, Homo sapiens
tgaatgaatattgag

SEQ ID NO: 967295 - DNA, 15 bp, Homo sapiens
atgaatgaatattga

SEQ ID NO: 967296 - DNA, 15 bp, Homo sapiens
aatgaatgaatattg

SEQ ID NO: 967297 - DNA, 15 bp, Homo sapiens
taatgaatgaatatt

SEQ ID NO: 967298 - DNA, 15 bp, Homo sapiens
ataatgaatgaatat

SEQ ID NO: 967299 - DNA, 15 bp, Homo sapiens
cataatgaatgaata

SEQ ID NO: 967300 - DNA, 15 bp, Homo sapiens
gcataatgaatgaat

SEQ ID NO: 967301 - DNA, 15 bp, Homo sapiens
tgcataatgaatgaa

SEQ ID NO: 967302 - DNA, 15 bp, Homo sapiens
ctgcataatgaatga

SEQ ID NO: 967303 - DNA, 15 bp, Homo sapiens
actgcataatgaatg

SEQ ID NO: 967304 - DNA, 15 bp, Homo sapiens
tactgcataatgaat

SEQ ID NO: 967305 - DNA, 15 bp, Homo sapiens
atactgcataatgaa

SEQ ID NO: 967306 - DNA, 15 bp, Homo sapiens
aatactgcataatga

SEQ ID NO: 967307 - DNA, 15 bp, Homo sapiens
aaatactgcataatg

SEQ ID NO: 967308 - DNA, 15 bp, Homo sapiens
aaaatactgcataat

SEQ ID NO: 967309 - DNA, 15 bp, Homo sapiens
caaaatactgcataa

SEQ ID NO: 967310 - DNA, 15 bp, Homo sapiens
tcaaaatactgcata

SEQ ID NO: 967311 - DNA, 15 bp, Homo sapiens
ttcaaaatactgcat

SEQ ID NO: 967312 - DNA, 15 bp, Homo sapiens
gttcaaaatactgca

SEQ ID NO: 967313 - DNA, 15 bp, Homo sapiens
agttcaaaatactgc

SEQ ID NO: 967314 - DNA, 15 bp, Homo sapiens
cagttcaaaatactg

SEQ ID NO: 967315 - DNA, 15 bp, Homo sapiens
gcagttcaaaatact

SEQ ID NO: 967316 - DNA, 15 bp, Homo sapiens
tgcagttcaaaatac

SEQ ID NO: 967317 - DNA, 15 bp, Homo sapiens
ctgcagttcaaaata

SEQ ID NO: 967318 - DNA, 15 bp, Homo sapiens
actgcagttcaaaat

SEQ ID NO: 967319 - DNA, 15 bp, Homo sapiens
aactgcagttcaaaa

SEQ ID NO: 967320 - DNA, 15 bp, Homo sapiens
caactgcagttcaaa

SEQ ID NO: 967321 - DNA, 15 bp, Homo sapiens
tcaactgcagttcaa

SEQ ID NO: 967322 - DNA, 15 bp, Homo sapiens
ttcaactgcagttca

SEQ ID NO: 967323 - DNA, 15 bp, Homo sapiens
tttcaactgcagttc

SEQ ID NO: 967324 - DNA, 15 bp, Homo sapiens
atttcaactgcagtt

SEQ ID NO: 967325 - DNA, 15 bp, Homo sapiens
catttcaactgcagt

SEQ ID NO: 967326 - DNA, 15 bp, Homo sapiens
tcatttcaactgcag

SEQ ID NO: 967327 - DNA, 15 bp, Homo sapiens
ttcatttcaactgca

SEQ ID NO: 967328 - DNA, 15 bp, Homo sapiens
attcatttcaactgc

SEQ ID NO: 967329 - DNA, 15 bp, Homo sapiens
tattcatttcaactg

SEQ ID NO: 967330 - DNA, 15 bp, Homo sapiens
ttattcatttcaact

SEQ ID NO: 967331 - DNA, 15 bp, Homo sapiens
cttattcatttcaac

SEQ ID NO: 967332 - DNA, 15 bp, Homo sapiens
tcttattcatttcaa

SEQ ID NO: 967333 - DNA, 15 bp, Homo sapiens
ttcttattcatttca

SEQ ID NO: 967334 - DNA, 15 bp, Homo sapiens
cttcttattcatttc

SEQ ID NO: 967335 - DNA, 15 bp, Homo sapiens
ccttcttattcattt

SEQ ID NO: 967336 - DNA, 15 bp, Homo sapiens
tccttcttattcatt

SEQ ID NO: 967337 - DNA, 15 bp, Homo sapiens
ttccttcttattcat

SEQ ID NO: 967338 - DNA, 15 bp, Homo sapiens
tttccttcttattca

SEQ ID NO: 967339 - DNA, 15 bp, Homo sapiens
ctttccttcttattc

SEQ ID NO: 967340 - DNA, 15 bp, Homo sapiens
cctttccttcttatt

SEQ ID NO: 967341 - DNA, 15 bp, Homo sapiens
gcctttccttcttat

SEQ ID NO: 967342 - DNA, 15 bp, Homo sapiens
tgcctttccttctta

SEQ ID NO: 967343 - DNA, 15 bp, Homo sapiens
ttgcctttccttctt

SEQ ID NO: 967344 - DNA, 15 bp, Homo sapiens
tttgcctttccttct

SEQ ID NO: 967345 - DNA, 15 bp, Homo sapiens
gtttgcctttccttc

SEQ ID NO: 967346 - DNA, 15 bp, Homo sapiens
tgtttgcctttcctt

SEQ ID NO: 967347 - DNA, 15 bp, Homo sapiens
ttgtttgcctttcct

SEQ ID NO: 967348 - DNA, 15 bp, Homo sapiens
gttgtttgcctttcc

SEQ ID NO: 967349 - DNA, 15 bp, Homo sapiens
cgttgtttgcctttc

SEQ ID NO: 967350 - DNA, 15 bp, Homo sapiens
tcgttgtttgccttt

SEQ ID NO: 967351 - DNA, 15 bp, Homo sapiens
ttcgttgtttgcctt

SEQ ID NO: 967352 - DNA, 15 bp, Homo sapiens
cttcgttgtttgcct

SEQ ID NO: 967353 - DNA, 15 bp, Homo sapiens
tcttcgttgtttgcc

SEQ ID NO: 967354 - DNA, 15 bp, Homo sapiens
ctcttcgttgtttgc

SEQ ID NO: 967355 - DNA, 15 bp, Homo sapiens
actcttcgttgtttg

SEQ ID NO: 967356 - DNA, 15 bp, Homo sapiens
gactcttcgttgttt

SEQ ID NO: 967357 - DNA, 15 bp, Homo sapiens
ggactcttcgttgtt

SEQ ID NO: 967358 - DNA, 15 bp, Homo sapiens
tggactcttcgttgt

SEQ ID NO: 967359 - DNA, 15 bp, Homo sapiens
ttggactcttcgttg

SEQ ID NO: 967360 - DNA, 15 bp, Homo sapiens
attggactcttcgtt

SEQ ID NO: 967361 - DNA, 15 bp, Homo sapiens
aattggactcttcgt

SEQ ID NO: 967362 - DNA, 15 bp, Homo sapiens
aaattggactcttcg

SEQ ID NO: 967363 - DNA, 15 bp, Homo sapiens
gaaattggactcttc

SEQ ID NO: 967364 - DNA, 15 bp, Homo sapiens
agaaattggactctt

SEQ ID NO: 967365 - DNA, 15 bp, Homo sapiens
gagaaattggactct

SEQ ID NO: 967366 - DNA, 15 bp, Homo sapiens
tgagaaattggactc

SEQ ID NO: 967367 - DNA, 15 bp, Homo sapiens
ttgagaaattggact

SEQ ID NO: 967368 - DNA, 15 bp, Homo sapiens
attgagaaattggac

SEQ ID NO: 967369 - DNA, 15 bp, Homo sapiens
aattgagaaattgga

SEQ ID NO: 967370 - DNA, 15 bp, Homo sapiens
aaattgagaaattgg

SEQ ID NO: 967371 - DNA, 15 bp, Homo sapiens
taaattgagaaattg

SEQ ID NO: 967372 - DNA, 15 bp, Homo sapiens
ctaaattgagaaatt

SEQ ID NO: 967373 - DNA, 15 bp, Homo sapiens
tctaaattgagaaat

SEQ ID NO: 967374 - DNA, 15 bp, Homo sapiens
ttctaaattgagaaa

SEQ ID NO: 967375 - DNA, 15 bp, Homo sapiens
tttctaaattgagaa

SEQ ID NO: 967376 - DNA, 15 bp, Homo sapiens
ttttctaaattgaga

SEQ ID NO: 967377 - DNA, 15 bp, Homo sapiens
tttttctaaattgag

SEQ ID NO: 967378 - DNA, 15 bp, Homo sapiens
ctttttctaaattga

SEQ ID NO: 967379 - DNA, 15 bp, Homo sapiens
tctttttctaaattg

SEQ ID NO: 967380 - DNA, 15 bp, Homo sapiens
ctctttttctaaatt

SEQ ID NO: 967381 - DNA, 15 bp, Homo sapiens
tctctttttctaaat

SEQ ID NO: 967382 - DNA, 15 bp, Homo sapiens
ttctctttttctaaa

SEQ ID NO: 967383 - DNA, 15 bp, Homo sapiens
tttctctttttctaa

SEQ ID NO: 967384 - DNA, 15 bp, Homo sapiens
ttttctctttttcta

SEQ ID NO: 967385 - DNA, 15 bp, Homo sapiens
tttttctctttttct

SEQ ID NO: 967386 - DNA, 15 bp, Homo sapiens
ttttttctctttttc

SEQ ID NO: 967387 - DNA, 15 bp, Homo sapiens
tttttttctcttttt

SEQ ID NO: 967388 - DNA, 15 bp, Homo sapiens
ttttttttctctttt

SEQ ID NO: 967389 - DNA, 15 bp, Homo sapiens
cttttttttctcttt

SEQ ID NO: 967390 - DNA, 15 bp, Homo sapiens
tcttttttttctctt

SEQ ID NO: 967391 - DNA, 15 bp, Homo sapiens
ttcttttttttctct

SEQ ID NO: 967392 - DNA, 15 bp, Homo sapiens
tttcttttttttctc

SEQ ID NO: 967393 - DNA, 15 bp, Homo sapiens
ttttcttttttttct

SEQ ID NO: 967394 - DNA, 15 bp, Homo sapiens
cttttcttttttttc

SEQ ID NO: 967395 - DNA, 15 bp, Homo sapiens
ccttttctttttttt

SEQ ID NO: 967396 - DNA, 15 bp, Homo sapiens
cccttttcttttttt

SEQ ID NO: 967397 - DNA, 15 bp, Homo sapiens
tcccttttctttttt

SEQ ID NO: 967398 - DNA, 15 bp, Homo sapiens
ctcccttttcttttt

SEQ ID NO: 967399 - DNA, 15 bp, Homo sapiens
gctcccttttctttt

SEQ ID NO: 967400 - DNA, 15 bp, Homo sapiens
tgctcccttttcttt

SEQ ID NO: 967401 - DNA, 15 bp, Homo sapiens
gtgctcccttttctt

SEQ ID NO: 967402 - DNA, 15 bp, Homo sapiens
tgtgctcccttttct

SEQ ID NO: 967403 - DNA, 15 bp, Homo sapiens
gtgtgctcccttttc

SEQ ID NO: 967404 - DNA, 15 bp, Homo sapiens
tgtgtgctccctttt

SEQ ID NO: 967405 - DNA, 15 bp, Homo sapiens
ctgtgtgctcccttt

SEQ ID NO: 967406 - DNA, 15 bp, Homo sapiens
cctgtgtgctccctt

SEQ ID NO: 967407 - DNA, 15 bp, Homo sapiens
gcctgtgtgctccct

SEQ ID NO: 967408 - DNA, 15 bp, Homo sapiens
tgcctgtgtgctccc

SEQ ID NO: 967409 - DNA, 15 bp, Homo sapiens
gtgcctgtgtgctcc

SEQ ID NO: 967410 - DNA, 15 bp, Homo sapiens
cgtgcctgtgtgctc

SEQ ID NO: 967411 - DNA, 15 bp, Homo sapiens
ccgtgcctgtgtgct

SEQ ID NO: 967412 - DNA, 15 bp, Homo sapiens
accgtgcctgtgtgc

SEQ ID NO: 967413 - DNA, 15 bp, Homo sapiens
caccgtgcctgtgtg

SEQ ID NO: 967414 - DNA, 15 bp, Homo sapiens
ccaccgtgcctgtgt

SEQ ID NO: 967415 - DNA, 15 bp, Homo sapiens
gccaccgtgcctgtg

SEQ ID NO: 967416 - DNA, 15 bp, Homo sapiens
agccaccgtgcctgt

SEQ ID NO: 967417 - DNA, 15 bp, Homo sapiens
gagccaccgtgcctg

SEQ ID NO: 967418 - DNA, 15 bp, Homo sapiens
tgagccaccgtgcct

SEQ ID NO: 967419 - DNA, 15 bp, Homo sapiens
ttgagccaccgtgcc

SEQ ID NO: 967420 - DNA, 15 bp, Homo sapiens
cttgagccaccgtgc

SEQ ID NO: 967421 - DNA, 15 bp, Homo sapiens
gcttgagccaccgtg

SEQ ID NO: 967422 - DNA, 15 bp, Homo sapiens
ggcttgagccaccgt

SEQ ID NO: 967423 - DNA, 15 bp, Homo sapiens
aggcttgagccaccg

SEQ ID NO: 967424 - DNA, 15 bp, Homo sapiens
caggcttgagccacc

SEQ ID NO: 967425 - DNA, 15 bp, Homo sapiens
acaggcttgagccac

SEQ ID NO: 967426 - DNA, 15 bp, Homo sapiens
tacaggcttgagcca

SEQ ID NO: 967427 - DNA, 15 bp, Homo sapiens
ttacaggcttgagcc

SEQ ID NO: 967428 - DNA, 15 bp, Homo sapiens
attacaggcttgagc

SEQ ID NO: 967429 - DNA, 15 bp, Homo sapiens
tattacaggcttgag

SEQ ID NO: 967430 - DNA, 15 bp, Homo sapiens
atattacaggcttga

SEQ ID NO: 967431 - DNA, 15 bp, Homo sapiens
gatattacaggcttg

SEQ ID NO: 967432 - DNA, 15 bp, Homo sapiens
tgatattacaggctt

SEQ ID NO: 967433 - DNA, 15 bp, Homo sapiens
ctgatattacaggct

SEQ ID NO: 967434 - DNA, 15 bp, Homo sapiens
gctgatattacaggc

SEQ ID NO: 967435 - DNA, 15 bp, Homo sapiens
tgctgatattacagg

SEQ ID NO: 967436 - DNA, 15 bp, Homo sapiens
gtgctgatattacag

SEQ ID NO: 967437 - DNA, 15 bp, Homo sapiens
agtgctgatattaca

SEQ ID NO: 967438 - DNA, 15 bp, Homo sapiens
aagtgctgatattac

SEQ ID NO: 967439 - DNA, 15 bp, Homo sapiens
aaagtgctgatatta

SEQ ID NO: 967440 - DNA, 15 bp, Homo sapiens
caaagtgctgatatt

SEQ ID NO: 967441 - DNA, 15 bp, Homo sapiens
ccaaagtgctgatat

SEQ ID NO: 967442 - DNA, 15 bp, Homo sapiens
gccaaagtgctgata

SEQ ID NO: 967443 - DNA, 15 bp, Homo sapiens
cgccaaagtgctgat

SEQ ID NO: 967444 - DNA, 15 bp, Homo sapiens
ccgccaaagtgctga

SEQ ID NO: 967445 - DNA, 15 bp, Homo sapiens
tccgccaaagtgctg

SEQ ID NO: 967446 - DNA, 15 bp, Homo sapiens
atccgccaaagtgct

SEQ ID NO: 967447 - DNA, 15 bp, Homo sapiens
gatccgccaaagtgc

SEQ ID NO: 967448 - DNA, 15 bp, Homo sapiens
tgatccgccaaagtg

SEQ ID NO: 967449 - DNA, 15 bp, Homo sapiens
gtgatccgccaaagt

SEQ ID NO: 967450 - DNA, 15 bp, Homo sapiens
agtgatccgccaaag

SEQ ID NO: 967451 - DNA, 15 bp, Homo sapiens
aagtgatccgccaaa

SEQ ID NO: 967452 - DNA, 15 bp, Homo sapiens
caagtgatccgccaa

SEQ ID NO: 967453 - DNA, 15 bp, Homo sapiens
tcaagtgatccgcca

SEQ ID NO: 967454 - DNA, 15 bp, Homo sapiens
ctcaagtgatccgcc

SEQ ID NO: 967455 - DNA, 15 bp, Homo sapiens
cctcaagtgatccgc

SEQ ID NO: 967456 - DNA, 15 bp, Homo sapiens
acctcaagtgatccg

SEQ ID NO: 967457 - DNA, 15 bp, Homo sapiens
gacctcaagtgatcc

SEQ ID NO: 967458 - DNA, 15 bp, Homo sapiens
tgacctcaagtgatc

SEQ ID NO: 967459 - DNA, 15 bp, Homo sapiens
ttgacctcaagtgat

SEQ ID NO: 967460 - DNA, 15 bp, Homo sapiens
cttgacctcaagtga

SEQ ID NO: 967461 - DNA, 15 bp, Homo sapiens
ccttgacctcaagtg

SEQ ID NO: 967462 - DNA, 15 bp, Homo sapiens
tccttgacctcaagt

SEQ ID NO: 967463 - DNA, 15 bp, Homo sapiens
ctccttgacctcaag

SEQ ID NO: 967464 - DNA, 15 bp, Homo sapiens
actccttgacctcaa

SEQ ID NO: 967465 - DNA, 15 bp, Homo sapiens
aactccttgacctca

SEQ ID NO: 967466 - DNA, 15 bp, Homo sapiens
gaactccttgacctc

SEQ ID NO: 967467 - DNA, 15 bp, Homo sapiens
cgaactccttgacct

SEQ ID NO: 967468 - DNA, 15 bp, Homo sapiens
tcgaactccttgacc

SEQ ID NO: 967469 - DNA, 15 bp, Homo sapiens
ctcgaactccttgac

SEQ ID NO: 967470 - DNA, 15 bp, Homo sapiens
tctcgaactccttga

SEQ ID NO: 967471 - DNA, 15 bp, Homo sapiens
ttctcgaactccttg

SEQ ID NO: 967472 - DNA, 15 bp, Homo sapiens
tttctcgaactcctt

SEQ ID NO: 967473 - DNA, 15 bp, Homo sapiens
ttttctcgaactcct

SEQ ID NO: 967474 - DNA, 15 bp, Homo sapiens
cttttctcgaactcc

SEQ ID NO: 967475 - DNA, 15 bp, Homo sapiens
tcttttctcgaactc

SEQ ID NO: 967476 - DNA, 15 bp, Homo sapiens
ctcttttctcgaact

SEQ ID NO: 967477 - DNA, 15 bp, Homo sapiens
tctcttttctcgaac

SEQ ID NO: 967478 - DNA, 15 bp, Homo sapiens
ctctcttttctcgaa

SEQ ID NO: 967479 - DNA, 15 bp, Homo sapiens
gctctcttttctcga

SEQ ID NO: 967480 - DNA, 15 bp, Homo sapiens
tgctctcttttctcg

SEQ ID NO: 967481 - DNA, 15 bp, Homo sapiens
gtgctctcttttctc

SEQ ID NO: 967482 - DNA, 15 bp, Homo sapiens
ggtgctctcttttct

SEQ ID NO: 967483 - DNA, 15 bp, Homo sapiens
aggtgctctcttttc

SEQ ID NO: 967484 - DNA, 15 bp, Homo sapiens
taggtgctctctttt

SEQ ID NO: 967485 - DNA, 15 bp, Homo sapiens
ctaggtgctctcttt

SEQ ID NO: 967486 - DNA, 15 bp, Homo sapiens
tctaggtgctctctt

SEQ ID NO: 967487 - DNA, 15 bp, Homo sapiens
ttctaggtgctctct

SEQ ID NO: 967488 - DNA, 15 bp, Homo sapiens
cttctaggtgctctc

SEQ ID NO: 967489 - DNA, 15 bp, Homo sapiens
acttctaggtgctct

SEQ ID NO: 967490 - DNA, 15 bp, Homo sapiens
aacttctaggtgctc

SEQ ID NO: 967491 - DNA, 15 bp, Homo sapiens
gaacttctaggtgct

SEQ ID NO: 967492 - DNA, 15 bp, Homo sapiens
tgaacttctaggtgc

SEQ ID NO: 967493 - DNA, 15 bp, Homo sapiens
ctgaacttctaggtg

SEQ ID NO: 967494 - DNA, 15 bp, Homo sapiens
gctgaacttctaggt

SEQ ID NO: 967495 - DNA, 15 bp, Homo sapiens
cgctgaacttctagg

SEQ ID NO: 967496 - DNA, 15 bp, Homo sapiens
gcgctgaacttctag

SEQ ID NO: 967497 - DNA, 15 bp, Homo sapiens
cgcgctgaacttcta

SEQ ID NO: 967498 - DNA, 15 bp, Homo sapiens
ccgcgctgaacttct

SEQ ID NO: 967499 - DNA, 15 bp, Homo sapiens
cccgcgctgaacttc

SEQ ID NO: 967500 - DNA, 15 bp, Homo sapiens
tcccgcgctgaactt

SEQ ID NO: 967501 - DNA, 15 bp, Homo sapiens
atcccgcgctgaact

SEQ ID NO: 967502 - DNA, 15 bp, Homo sapiens
tatcccgcgctgaac

SEQ ID NO: 967503 - DNA, 15 bp, Homo sapiens
ttatcccgcgctgaa

SEQ ID NO: 967504 - DNA, 15 bp, Homo sapiens
attatcccgcgctga

SEQ ID NO: 967505 - DNA, 15 bp, Homo sapiens
tattatcccgcgctg

SEQ ID NO: 967506 - DNA, 15 bp, Homo sapiens
gtattatcccgcgct

SEQ ID NO: 967507 - DNA, 15 bp, Homo sapiens
agtattatcccgcgc

SEQ ID NO: 967508 - DNA, 15 bp, Homo sapiens
aagtattatcccgcg

SEQ ID NO: 967509 - DNA, 15 bp, Homo sapiens
taagtattatcccgc

SEQ ID NO: 967510 - DNA, 15 bp, Homo sapiens
ttaagtattatcccg

SEQ ID NO: 967511 - DNA, 15 bp, Homo sapiens
cttaagtattatccc

SEQ ID NO: 967512 - DNA, 15 bp, Homo sapiens
acttaagtattatcc

SEQ ID NO: 967513 - DNA, 15 bp, Homo sapiens
tacttaagtattatc

SEQ ID NO: 967514 - DNA, 15 bp, Homo sapiens
ttacttaagtattat

SEQ ID NO: 967515 - DNA, 15 bp, Homo sapiens
tttacttaagtatta

SEQ ID NO: 967516 - DNA, 15 bp, Homo sapiens
atttacttaagtatt

SEQ ID NO: 967517 - DNA, 15 bp, Homo sapiens
aatttacttaagtat

SEQ ID NO: 967518 - DNA, 15 bp, Homo sapiens
taatttacttaagta

SEQ ID NO: 967519 - DNA, 15 bp, Homo sapiens
ataatttacttaagt

SEQ ID NO: 967520 - DNA, 15 bp, Homo sapiens
cataatttacttaag

SEQ ID NO: 967521 - DNA, 15 bp, Homo sapiens
tcataatttacttaa

SEQ ID NO: 967522 - DNA, 15 bp, Homo sapiens
gtcataatttactta

SEQ ID NO: 967523 - DNA, 15 bp, Homo sapiens
tgtcataatttactt

SEQ ID NO: 967524 - DNA, 15 bp, Homo sapiens
gtgtcataatttact

SEQ ID NO: 967525 - DNA, 15 bp, Homo sapiens
ggtgtcataatttac

SEQ ID NO: 967526 - DNA, 15 bp, Homo sapiens
tggtgtcataattta

SEQ ID NO: 967527 - DNA, 15 bp, Homo sapiens
atggtgtcataattt

SEQ ID NO: 967528 - DNA, 15 bp, Homo sapiens
gatggtgtcataatt

SEQ ID NO: 967529 - DNA, 15 bp, Homo sapiens
cgatggtgtcataat

SEQ ID NO: 967530 - DNA, 15 bp, Homo sapiens
acgatggtgtcataa

SEQ ID NO: 967531 - DNA, 15 bp, Homo sapiens
gacgatggtgtcata

SEQ ID NO: 967532 - DNA, 15 bp, Homo sapiens
agacgatggtgtcat

SEQ ID NO: 967533 - DNA, 15 bp, Homo sapiens
cagacgatggtgtca

SEQ ID NO: 967534 - DNA, 15 bp, Homo sapiens
acagacgatggtgtc

SEQ ID NO: 967535 - DNA, 15 bp, Homo sapiens
gacagacgatggtgt

SEQ ID NO: 967536 - DNA, 15 bp, Homo sapiens
tgacagacgatggtg

SEQ ID NO: 967537 - DNA, 15 bp, Homo sapiens
atgacagacgatggt

SEQ ID NO: 967538 - DNA, 15 bp, Homo sapiens
gatgacagacgatgg

SEQ ID NO: 967539 - DNA, 15 bp, Homo sapiens
agatgacagacgatg

SEQ ID NO: 967540 - DNA, 15 bp, Homo sapiens
aagatgacagacgat

SEQ ID NO: 967541 - DNA, 15 bp, Homo sapiens
caagatgacagacga

SEQ ID NO: 967542 - DNA, 15 bp, Homo sapiens
ccaagatgacagacg

SEQ ID NO: 967543 - DNA, 15 bp, Homo sapiens
cccaagatgacagac

SEQ ID NO: 967544 - DNA, 15 bp, Homo sapiens
gcccaagatgacaga

SEQ ID NO: 967545 - DNA, 15 bp, Homo sapiens
ggcccaagatgacag

SEQ ID NO: 967546 - DNA, 15 bp, Homo sapiens
gggcccaagatgaca

SEQ ID NO: 967547 - DNA, 15 bp, Homo sapiens
tgggcccaagatgac

SEQ ID NO: 967548 - DNA, 15 bp, Homo sapiens
atgggcccaagatga

SEQ ID NO: 967549 - DNA, 15 bp, Homo sapiens
aatgggcccaagatg

SEQ ID NO: 967550 - DNA, 15 bp, Homo sapiens
gaatgggcccaagat

SEQ ID NO: 967551 - DNA, 15 bp, Homo sapiens
tgaatgggcccaaga

SEQ ID NO: 967552 - DNA, 15 bp, Homo sapiens
gtgaatgggcccaag

SEQ ID NO: 967553 - DNA, 15 bp, Homo sapiens
agtgaatgggcccaa

SEQ ID NO: 967554 - DNA, 15 bp, Homo sapiens
tagtgaatgggccca

SEQ ID NO: 967555 - DNA, 15 bp, Homo sapiens
ttagtgaatgggccc

SEQ ID NO: 967556 - DNA, 15 bp, Homo sapiens
gttagtgaatgggcc

SEQ ID NO: 967557 - DNA, 15 bp, Homo sapiens
ggttagtgaatgggc

SEQ ID NO: 967558 - DNA, 15 bp, Homo sapiens
gggttagtgaatggg

SEQ ID NO: 967559 - DNA, 15 bp, Homo sapiens
tgggttagtgaatgg

SEQ ID NO: 967560 - DNA, 15 bp, Homo sapiens
ttgggttagtgaatg

SEQ ID NO: 967561 - DNA, 15 bp, Homo sapiens
tttgggttagtgaat

SEQ ID NO: 967562 - DNA, 15 bp, Homo sapiens
ctttgggttagtgaa

SEQ ID NO: 967563 - DNA, 15 bp, Homo sapiens
gctttgggttagtga

SEQ ID NO: 967564 - DNA, 15 bp, Homo sapiens
agctttgggttagtg

SEQ ID NO: 967565 - DNA, 15 bp, Homo sapiens
aagctttgggttagt

SEQ ID NO: 967566 - DNA, 15 bp, Homo sapiens
aaagctttgggttag

SEQ ID NO: 967567 - DNA, 15 bp, Homo sapiens
gaaagctttgggtta

SEQ ID NO: 967568 - DNA, 15 bp, Homo sapiens
tgaaagctttgggtt

SEQ ID NO: 967569 - DNA, 15 bp, Homo sapiens
ttgaaagctttgggt

SEQ ID NO: 967570 - DNA, 15 bp, Homo sapiens
tttgaaagctttggg

SEQ ID NO: 967571 - DNA, 15 bp, Homo sapiens
ttttgaaagctttgg

SEQ ID NO: 967572 - DNA, 15 bp, Homo sapiens
cttttgaaagctttg

SEQ ID NO: 967573 - DNA, 15 bp, Homo sapiens
ccttttgaaagcttt

SEQ ID NO: 967574 - DNA, 15 bp, Homo sapiens
cccttttgaaagctt

SEQ ID NO: 967575 - DNA, 15 bp, Homo sapiens
gcccttttgaaagct

SEQ ID NO: 967576 - DNA, 15 bp, Homo sapiens
agcccttttgaaagc

SEQ ID NO: 967577 - DNA, 15 bp, Homo sapiens
aagcccttttgaaag

SEQ ID NO: 967578 - DNA, 15 bp, Homo sapiens
aaagcccttttgaaa

SEQ ID NO: 967579 - DNA, 15 bp, Homo sapiens
gaaagcccttttgaa

SEQ ID NO: 967580 - DNA, 15 bp, Homo sapiens
agaaagcccttttga

SEQ ID NO: 967581 - DNA, 15 bp, Homo sapiens
aagaaagcccttttg

SEQ ID NO: 967582 - DNA, 15 bp, Homo sapiens
taagaaagccctttt

SEQ ID NO: 967583 - DNA, 15 bp, Homo sapiens
ttaagaaagcccttt

SEQ ID NO: 967584 - DNA, 15 bp, Homo sapiens
gttaagaaagccctt

SEQ ID NO: 967585 - DNA, 15 bp, Homo sapiens
ggttaagaaagccct

SEQ ID NO: 967586 - DNA, 15 bp, Homo sapiens
gggttaagaaagccc

SEQ ID NO: 967587 - DNA, 15 bp, Homo sapiens
agggttaagaaagcc

SEQ ID NO: 967588 - DNA, 15 bp, Homo sapiens
gagggttaagaaagc

SEQ ID NO: 967589 - DNA, 15 bp, Homo sapiens
tgagggttaagaaag

SEQ ID NO: 967590 - DNA, 15 bp, Homo sapiens
gtgagggttaagaaa

SEQ ID NO: 967591 - DNA, 15 bp, Homo sapiens
ggtgagggttaagaa

SEQ ID NO: 967592 - DNA, 15 bp, Homo sapiens
aggtgagggttaaga

SEQ ID NO: 967593 - DNA, 15 bp, Homo sapiens
taggtgagggttaag

SEQ ID NO: 967594 - DNA, 15 bp, Homo sapiens
ctaggtgagggttaa

SEQ ID NO: 967595 - DNA, 15 bp, Homo sapiens
tctaggtgagggtta

SEQ ID NO: 967596 - DNA, 15 bp, Homo sapiens
ttctaggtgagggtt

SEQ ID NO: 967597 - DNA, 15 bp, Homo sapiens
attctaggtgagggt

SEQ ID NO: 967598 - DNA, 15 bp, Homo sapiens
tattctaggtgaggg

SEQ ID NO: 967599 - DNA, 15 bp, Homo sapiens
ctattctaggtgagg

SEQ ID NO: 967600 - DNA, 15 bp, Homo sapiens
cctattctaggtgag

SEQ ID NO: 967601 - DNA, 15 bp, Homo sapiens
gcctattctaggtga

SEQ ID NO: 967602 - DNA, 15 bp, Homo sapiens
agcctattctaggtg

SEQ ID NO: 967603 - DNA, 15 bp, Homo sapiens
aagcctattctaggt

SEQ ID NO: 967604 - DNA, 15 bp, Homo sapiens
gaagcctattctagg

SEQ ID NO: 967605 - DNA, 15 bp, Homo sapiens
ggaagcctattctag

SEQ ID NO: 967606 - DNA, 15 bp, Homo sapiens
cggaagcctattcta

SEQ ID NO: 967607 - DNA, 15 bp, Homo sapiens
gcggaagcctattct

SEQ ID NO: 967608 - DNA, 15 bp, Homo sapiens
tgcggaagcctattc

SEQ ID NO: 967609 - DNA, 15 bp, Homo sapiens
ctgcggaagcctatt

SEQ ID NO: 967610 - DNA, 15 bp, Homo sapiens
gctgcggaagcctat

SEQ ID NO: 967611 - DNA, 15 bp, Homo sapiens
ggctgcggaagccta

SEQ ID NO: 967612 - DNA, 15 bp, Homo sapiens
aggctgcggaagcct

SEQ ID NO: 967613 - DNA, 15 bp, Homo sapiens
aaggctgcggaagcc

SEQ ID NO: 967614 - DNA, 15 bp, Homo sapiens
taaggctgcggaagc

SEQ ID NO: 967615 - DNA, 15 bp, Homo sapiens
ttaaggctgcggaag

SEQ ID NO: 967616 - DNA, 15 bp, Homo sapiens
attaaggctgcggaa

SEQ ID NO: 967617 - DNA, 15 bp, Homo sapiens
gattaaggctgcgga

SEQ ID NO: 967618 - DNA, 15 bp, Homo sapiens
ggattaaggctgcgg

SEQ ID NO: 967619 - DNA, 15 bp, Homo sapiens
aggattaaggctgcg

SEQ ID NO: 967620 - DNA, 15 bp, Homo sapiens
aaggattaaggctgc

SEQ ID NO: 967621 - DNA, 15 bp, Homo sapiens
taaggattaaggctg

SEQ ID NO: 967622 - DNA, 15 bp, Homo sapiens
ctaaggattaaggct

SEQ ID NO: 967623 - DNA, 15 bp, Homo sapiens
cctaaggattaaggc

SEQ ID NO: 967624 - DNA, 15 bp, Homo sapiens
ccctaaggattaagg

SEQ ID NO: 967625 - DNA, 15 bp, Homo sapiens
accctaaggattaag

SEQ ID NO: 967626 - DNA, 15 bp, Homo sapiens
caccctaaggattaa

SEQ ID NO: 967627 - DNA, 15 bp, Homo sapiens
ccaccctaaggatta

SEQ ID NO: 967628 - DNA, 15 bp, Homo sapiens
gccaccctaaggatt

SEQ ID NO: 967629 - DNA, 15 bp, Homo sapiens
tgccaccctaaggat

SEQ ID NO: 967630 - DNA, 15 bp, Homo sapiens
ctgccaccctaagga

SEQ ID NO: 967631 - DNA, 15 bp, Homo sapiens
tctgccaccctaagg

SEQ ID NO: 967632 - DNA, 15 bp, Homo sapiens
ttctgccaccctaag

SEQ ID NO: 967633 - DNA, 15 bp, Homo sapiens
attctgccaccctaa

SEQ ID NO: 967634 - DNA, 15 bp, Homo sapiens
tattctgccacccta

SEQ ID NO: 967635 - DNA, 15 bp, Homo sapiens
atattctgccaccct

SEQ ID NO: 967636 - DNA, 15 bp, Homo sapiens
gatattctgccaccc

SEQ ID NO: 967637 - DNA, 15 bp, Homo sapiens
tgatattctgccacc

SEQ ID NO: 967638 - DNA, 15 bp, Homo sapiens
ctgatattctgccac

SEQ ID NO: 967639 - DNA, 15 bp, Homo sapiens
cctgatattctgcca

SEQ ID NO: 967640 - DNA, 15 bp, Homo sapiens
ccctgatattctgcc

SEQ ID NO: 967641 - DNA, 15 bp, Homo sapiens
tccctgatattctgc

SEQ ID NO: 967642 - DNA, 15 bp, Homo sapiens
gtccctgatattctg

SEQ ID NO: 967643 - DNA, 15 bp, Homo sapiens
ggtccctgatattct

SEQ ID NO: 967644 - DNA, 15 bp, Homo sapiens
gggtccctgatattc

SEQ ID NO: 967645 - DNA, 15 bp, Homo sapiens
agggtccctgatatt

SEQ ID NO: 967646 - DNA, 15 bp, Homo sapiens
cagggtccctgatat

SEQ ID NO: 967647 - DNA, 15 bp, Homo sapiens
tcagggtccctgata

SEQ ID NO: 967648 - DNA, 15 bp, Homo sapiens
ctcagggtccctgat

SEQ ID NO: 967649 - DNA, 15 bp, Homo sapiens
gctcagggtccctga

SEQ ID NO: 967650 - DNA, 15 bp, Homo sapiens
tgctcagggtccctg

SEQ ID NO: 967651 - DNA, 15 bp, Homo sapiens
atgctcagggtccct

SEQ ID NO: 967652 - DNA, 15 bp, Homo sapiens
aatgctcagggtccc

SEQ ID NO: 967653 - DNA, 15 bp, Homo sapiens
gaatgctcagggtcc

SEQ ID NO: 967654 - DNA, 15 bp, Homo sapiens
agaatgctcagggtc

SEQ ID NO: 967655 - DNA, 15 bp, Homo sapiens
aagaatgctcagggt

SEQ ID NO: 967656 - DNA, 15 bp, Homo sapiens
taagaatgctcaggg

SEQ ID NO: 967657 - DNA, 15 bp, Homo sapiens
ttaagaatgctcagg

SEQ ID NO: 967658 - DNA, 15 bp, Homo sapiens
tttaagaatgctcag

SEQ ID NO: 967659 - DNA, 15 bp, Homo sapiens
ttttaagaatgctca

SEQ ID NO: 967660 - DNA, 15 bp, Homo sapiens
cttttaagaatgctc

SEQ ID NO: 967661 - DNA, 15 bp, Homo sapiens
tcttttaagaatgct

SEQ ID NO: 967662 - DNA, 15 bp, Homo sapiens
atcttttaagaatgc

SEQ ID NO: 967663 - DNA, 15 bp, Homo sapiens
catcttttaagaatg

SEQ ID NO: 967664 - DNA, 15 bp, Homo sapiens
acatcttttaagaat

SEQ ID NO: 967665 - DNA, 15 bp, Homo sapiens
tacatcttttaagaa

SEQ ID NO: 967666 - DNA, 15 bp, Homo sapiens
ctacatcttttaaga

SEQ ID NO: 967667 - DNA, 15 bp, Homo sapiens
gctacatcttttaag

SEQ ID NO: 967668 - DNA, 15 bp, Homo sapiens
agctacatcttttaa

SEQ ID NO: 967669 - DNA, 15 bp, Homo sapiens
gagctacatctttta

SEQ ID NO: 967670 - DNA, 15 bp, Homo sapiens
cgagctacatctttt

SEQ ID NO: 967671 - DNA, 15 bp, Homo sapiens
ccgagctacatcttt

SEQ ID NO: 967672 - DNA, 15 bp, Homo sapiens
cccgagctacatctt

SEQ ID NO: 967673 - DNA, 15 bp, Homo sapiens
tcccgagctacatct

SEQ ID NO: 967674 - DNA, 15 bp, Homo sapiens
atcccgagctacatc

SEQ ID NO: 967675 - DNA, 15 bp, Homo sapiens
catcccgagctacat

SEQ ID NO: 967676 - DNA, 15 bp, Homo sapiens
ccatcccgagctaca

SEQ ID NO: 967677 - DNA, 15 bp, Homo sapiens
cccatcccgagctac

SEQ ID NO: 967678 - DNA, 15 bp, Homo sapiens
tcccatcccgagcta

SEQ ID NO: 967679 - DNA, 15 bp, Homo sapiens
ttcccatcccgagct

SEQ ID NO: 967680 - DNA, 15 bp, Homo sapiens
cttcccatcccgagc

SEQ ID NO: 967681 - DNA, 15 bp, Homo sapiens
acttcccatcccgag

SEQ ID NO: 967682 - DNA, 15 bp, Homo sapiens
aacttcccatcccga

SEQ ID NO: 967683 - DNA, 15 bp, Homo sapiens
gaacttcccatcccg

SEQ ID NO: 967684 - DNA, 15 bp, Homo sapiens
agaacttcccatccc

SEQ ID NO: 967685 - DNA, 15 bp, Homo sapiens
aagaacttcccatcc

SEQ ID NO: 967686 - DNA, 15 bp, Homo sapiens
aaagaacttcccatc

SEQ ID NO: 967687 - DNA, 15 bp, Homo sapiens
aaaagaacttcccat

SEQ ID NO: 967688 - DNA, 15 bp, Homo sapiens
taaaagaacttccca

SEQ ID NO: 967689 - DNA, 15 bp, Homo sapiens
ttaaaagaacttccc

SEQ ID NO: 967690 - DNA, 15 bp, Homo sapiens
attaaaagaacttcc

SEQ ID NO: 967691 - DNA, 15 bp, Homo sapiens
cattaaaagaacttc

SEQ ID NO: 967692 - DNA, 15 bp, Homo sapiens
tcattaaaagaactt

SEQ ID NO: 967693 - DNA, 15 bp, Homo sapiens
gtcattaaaagaact

SEQ ID NO: 967694 - DNA, 15 bp, Homo sapiens
tgtcattaaaagaac

SEQ ID NO: 967695 - DNA, 15 bp, Homo sapiens
ttgtcattaaaagaa

SEQ ID NO: 967696 - DNA, 15 bp, Homo sapiens
tttgtcattaaaaga

SEQ ID NO: 967697 - DNA, 15 bp, Homo sapiens
ctttgtcattaaaag

SEQ ID NO: 967698 - DNA, 15 bp, Homo sapiens
gctttgtcattaaaa

SEQ ID NO: 967699 - DNA, 15 bp, Homo sapiens
tgctttgtcattaaa

SEQ ID NO: 967700 - DNA, 15 bp, Homo sapiens
ttgctttgtcattaa

SEQ ID NO: 967701 - DNA, 15 bp, Homo sapiens
tttgctttgtcatta

SEQ ID NO: 967702 - DNA, 15 bp, Homo sapiens
atttgctttgtcatt

SEQ ID NO: 967703 - DNA, 15 bp, Homo sapiens
catttgctttgtcat

SEQ ID NO: 967704 - DNA, 15 bp, Homo sapiens
tcatttgctttgtca

SEQ ID NO: 967705 - DNA, 15 bp, Homo sapiens
ttcatttgctttgtc

SEQ ID NO: 967706 - DNA, 15 bp, Homo sapiens
cttcatttgctttgt

SEQ ID NO: 967707 - DNA, 15 bp, Homo sapiens
acttcatttgctttg

SEQ ID NO: 967708 - DNA, 15 bp, Homo sapiens
aacttcatttgcttt

SEQ ID NO: 967709 - DNA, 15 bp, Homo sapiens
aaacttcatttgctt

SEQ ID NO: 967710 - DNA, 15 bp, Homo sapiens
gaaacttcatttgct

SEQ ID NO: 967711 - DNA, 15 bp, Homo sapiens
tgaaacttcatttgc

SEQ ID NO: 967712 - DNA, 15 bp, Homo sapiens
atgaaacttcatttg

SEQ ID NO: 967713 - DNA, 15 bp, Homo sapiens
aatgaaacttcattt

SEQ ID NO: 967714 - DNA, 15 bp, Homo sapiens
taatgaaacttcatt

SEQ ID NO: 967715 - DNA, 15 bp, Homo sapiens
ataatgaaacttcat

SEQ ID NO: 967716 - DNA, 15 bp, Homo sapiens
cataatgaaacttca

SEQ ID NO: 967717 - DNA, 15 bp, Homo sapiens
acataatgaaacttc

SEQ ID NO: 967718 - DNA, 15 bp, Homo sapiens
gacataatgaaactt

SEQ ID NO: 967719 - DNA, 15 bp, Homo sapiens
cgacataatgaaact

SEQ ID NO: 967720 - DNA, 15 bp, Homo sapiens
tcgacataatgaaac

SEQ ID NO: 967721 - DNA, 15 bp, Homo sapiens
ctcgacataatgaaa

SEQ ID NO: 967722 - DNA, 15 bp, Homo sapiens
cctcgacataatgaa

SEQ ID NO: 967723 - DNA, 15 bp, Homo sapiens
tcctcgacataatga

SEQ ID NO: 967724 - DNA, 15 bp, Homo sapiens
ttcctcgacataatg

SEQ ID NO: 967725 - DNA, 15 bp, Homo sapiens
gttcctcgacataat

SEQ ID NO: 967726 - DNA, 15 bp, Homo sapiens
agttcctcgacataa

SEQ ID NO: 967727 - DNA, 15 bp, Homo sapiens
aagttcctcgacata

SEQ ID NO: 967728 - DNA, 15 bp, Homo sapiens
aaagttcctcgacat

SEQ ID NO: 967729 - DNA, 15 bp, Homo sapiens
caaagttcctcgaca

SEQ ID NO: 967730 - DNA, 15 bp, Homo sapiens
tcaaagttcctcgac

SEQ ID NO: 967731 - DNA, 15 bp, Homo sapiens
ctcaaagttcctcga

SEQ ID NO: 967732 - DNA, 15 bp, Homo sapiens
cctcaaagttcctcg

SEQ ID NO: 967733 - DNA, 15 bp, Homo sapiens
tcctcaaagttcctc

SEQ ID NO: 967734 - DNA, 15 bp, Homo sapiens
ttcctcaaagttcct

SEQ ID NO: 967735 - DNA, 15 bp, Homo sapiens
cttcctcaaagttcc

SEQ ID NO: 967736 - DNA, 15 bp, Homo sapiens
acttcctcaaagttc

SEQ ID NO: 967737 - DNA, 15 bp, Homo sapiens
gacttcctcaaagtt

SEQ ID NO: 967738 - DNA, 15 bp, Homo sapiens
tgacttcctcaaagt

SEQ ID NO: 967739 - DNA, 15 bp, Homo sapiens
gtgacttcctcaaag

SEQ ID NO: 967740 - DNA, 15 bp, Homo sapiens
tgtgacttcctcaaa

SEQ ID NO: 967741 - DNA, 15 bp, Homo sapiens
ctgtgacttcctcaa

SEQ ID NO: 967742 - DNA, 15 bp, Homo sapiens
tctgtgacttcctca

SEQ ID NO: 967743 - DNA, 15 bp, Homo sapiens
ttctgtgacttcctc

SEQ ID NO: 967744 - DNA, 15 bp, Homo sapiens
attctgtgacttcct

SEQ ID NO: 967745 - DNA, 15 bp, Homo sapiens
gattctgtgacttcc

SEQ ID NO: 967746 - DNA, 15 bp, Homo sapiens
ggattctgtgacttc

SEQ ID NO: 967747 - DNA, 15 bp, Homo sapiens
tggattctgtgactt

SEQ ID NO: 967748 - DNA, 15 bp, Homo sapiens
gtggattctgtgact

SEQ ID NO: 967749 - DNA, 15 bp, Homo sapiens
cgtggattctgtgac

SEQ ID NO: 967750 - DNA, 15 bp, Homo sapiens
tcgtggattctgtga

SEQ ID NO: 967751 - DNA, 15 bp, Homo sapiens
atcgtggattctgtg

SEQ ID NO: 967752 - DNA, 15 bp, Homo sapiens
aatcgtggattctgt

SEQ ID NO: 967753 - DNA, 15 bp, Homo sapiens
aaatcgtggattctg

SEQ ID NO: 967754 - DNA, 15 bp, Homo sapiens
taaatcgtggattct

SEQ ID NO: 967755 - DNA, 15 bp, Homo sapiens
ttaaatcgtggattc

SEQ ID NO: 967756 - DNA, 15 bp, Homo sapiens
tttaaatcgtggatt

SEQ ID NO: 967757 - DNA, 15 bp, Homo sapiens
ttttaaatcgtggat

SEQ ID NO: 967758 - DNA, 15 bp, Homo sapiens
tttttaaatcgtgga

SEQ ID NO: 967759 - DNA, 15 bp, Homo sapiens
atttttaaatcgtgg

SEQ ID NO: 967760 - DNA, 15 bp, Homo sapiens
tatttttaaatcgtg

SEQ ID NO: 967761 - DNA, 15 bp, Homo sapiens
atatttttaaatcgt

SEQ ID NO: 967762 - DNA, 15 bp, Homo sapiens
tatatttttaaatcg

SEQ ID NO: 967763 - DNA, 15 bp, Homo sapiens
atatatttttaaatc

SEQ ID NO: 967764 - DNA, 15 bp, Homo sapiens
aatatatttttaaat

SEQ ID NO: 967765 - DNA, 15 bp, Homo sapiens
aaatatatttttaaa

SEQ ID NO: 967766 - DNA, 15 bp, Homo sapiens
gaaatatatttttaa

SEQ ID NO: 967767 - DNA, 15 bp, Homo sapiens
ggaaatatattttta

SEQ ID NO: 967768 - DNA, 15 bp, Homo sapiens
aggaaatatattttt

SEQ ID NO: 967769 - DNA, 15 bp, Homo sapiens
taggaaatatatttt

SEQ ID NO: 967770 - DNA, 15 bp, Homo sapiens
ataggaaatatattt

SEQ ID NO: 967771 - DNA, 15 bp, Homo sapiens
aataggaaatatatt

SEQ ID NO: 967772 - DNA, 15 bp, Homo sapiens
taataggaaatatat

SEQ ID NO: 967773 - DNA, 15 bp, Homo sapiens
ataataggaaatata

SEQ ID NO: 967774 - DNA, 15 bp, Homo sapiens
tataataggaaatat

SEQ ID NO: 967775 - DNA, 15 bp, Homo sapiens
gtataataggaaata

SEQ ID NO: 967776 - DNA, 15 bp, Homo sapiens
tgtataataggaaat

SEQ ID NO: 967777 - DNA, 15 bp, Homo sapiens
gtgtataataggaaa

SEQ ID NO: 967778 - DNA, 15 bp, Homo sapiens
ggtgtataataggaa

SEQ ID NO: 967779 - DNA, 15 bp, Homo sapiens
gggtgtataatagga

SEQ ID NO: 967780 - DNA, 15 bp, Homo sapiens
tgggtgtataatagg

SEQ ID NO: 967781 - DNA, 15 bp, Homo sapiens
atgggtgtataatag

SEQ ID NO: 967782 - DNA, 15 bp, Homo sapiens
tatgggtgtataata

SEQ ID NO: 967783 - DNA, 15 bp, Homo sapiens
gtatgggtgtataat

SEQ ID NO: 967784 - DNA, 15 bp, Homo sapiens
tgtatgggtgtataa

SEQ ID NO: 967785 - DNA, 15 bp, Homo sapiens
gtgtatgggtgtata

SEQ ID NO: 967786 - DNA, 15 bp, Homo sapiens
tgtgtatgggtgtat

SEQ ID NO: 967787 - DNA, 15 bp, Homo sapiens
gtgtgtatgggtgta

SEQ ID NO: 967788 - DNA, 15 bp, Homo sapiens
tgtgtgtatgggtgt

SEQ ID NO: 967789 - DNA, 15 bp, Homo sapiens
gtgtgtgtatgggtg

SEQ ID NO: 967790 - DNA, 15 bp, Homo sapiens
tgtgtgtgtatgggt

SEQ ID NO: 967791 - DNA, 15 bp, Homo sapiens
gtgtgtgtgtatggg

SEQ ID NO: 967792 - DNA, 15 bp, Homo sapiens
tgtgtgtgtgtatgg

SEQ ID NO: 967793 - DNA, 15 bp, Homo sapiens
gtgtgtgtgtgtatg

SEQ ID NO: 967794 - DNA, 15 bp, Homo sapiens
tgtgtgtgtgtgtat

SEQ ID NO: 967795 - DNA, 15 bp, Homo sapiens
gtgtgtgtgtgtgta

SEQ ID NO: 967796 - DNA, 15 bp, Homo sapiens
tgtgtgtgtgtgtgt

SEQ ID NO: 967797 - DNA, 15 bp, Homo sapiens
gtgtgtgtgtgtgtg

SEQ ID NO: 967798 - DNA, 15 bp, Homo sapiens
ggtgtgtgtgtgtgt

SEQ ID NO: 967799 - DNA, 15 bp, Homo sapiens
aggtgtgtgtgtgtg

SEQ ID NO: 967800 - DNA, 15 bp, Homo sapiens
taggtgtgtgtgtgt

SEQ ID NO: 967801 - DNA, 15 bp, Homo sapiens
gtaggtgtgtgtgtg

SEQ ID NO: 967802 - DNA, 15 bp, Homo sapiens
agtaggtgtgtgtgt

SEQ ID NO: 967803 - DNA, 15 bp, Homo sapiens
aagtaggtgtgtgtg

SEQ ID NO: 967804 - DNA, 15 bp, Homo sapiens
aaagtaggtgtgtgt

SEQ ID NO: 967805 - DNA, 15 bp, Homo sapiens
gaaagtaggtgtgtg

SEQ ID NO: 967806 - DNA, 15 bp, Homo sapiens
agaaagtaggtgtgt

SEQ ID NO: 967807 - DNA, 15 bp, Homo sapiens
tagaaagtaggtgtg

SEQ ID NO: 967808 - DNA, 15 bp, Homo sapiens
ctagaaagtaggtgt

SEQ ID NO: 967809 - DNA, 15 bp, Homo sapiens
tctagaaagtaggtg

SEQ ID NO: 967810 - DNA, 15 bp, Homo sapiens
ttctagaaagtaggt

SEQ ID NO: 967811 - DNA, 15 bp, Homo sapiens
attctagaaagtagg

SEQ ID NO: 967812 - DNA, 15 bp, Homo sapiens
tattctagaaagtag

SEQ ID NO: 967813 - DNA, 15 bp, Homo sapiens
ttattctagaaagta

SEQ ID NO: 967814 - DNA, 15 bp, Homo sapiens
tttattctagaaagt

SEQ ID NO: 967815 - DNA, 15 bp, Homo sapiens
ttttattctagaaag

SEQ ID NO: 967816 - DNA, 15 bp, Homo sapiens
tttttattctagaaa

SEQ ID NO: 967817 - DNA, 15 bp, Homo sapiens
gtttttattctagaa

SEQ ID NO: 967818 - DNA, 15 bp, Homo sapiens
ggtttttattctaga

SEQ ID NO: 967819 - DNA, 15 bp, Homo sapiens
tggtttttattctag

SEQ ID NO: 967820 - DNA, 15 bp, Homo sapiens
ttggtttttattcta

SEQ ID NO: 967821 - DNA, 15 bp, Homo sapiens
tttggtttttattct

SEQ ID NO: 967822 - DNA, 15 bp, Homo sapiens
ctttggtttttattc

SEQ ID NO: 967823 - DNA, 15 bp, Homo sapiens
gctttggtttttatt

SEQ ID NO: 967824 - DNA, 15 bp, Homo sapiens
ggctttggtttttat

SEQ ID NO: 967825 - DNA, 15 bp, Homo sapiens
tggctttggttttta

SEQ ID NO: 967826 - DNA, 15 bp, Homo sapiens
atggctttggttttt

SEQ ID NO: 967827 - DNA, 15 bp, Homo sapiens
tatggctttggtttt

SEQ ID NO: 967828 - DNA, 15 bp, Homo sapiens
atatggctttggttt

SEQ ID NO: 967829 - DNA, 15 bp, Homo sapiens
catatggctttggtt

SEQ ID NO: 967830 - DNA, 15 bp, Homo sapiens
ccatatggctttggt

SEQ ID NO: 967831 - DNA, 15 bp, Homo sapiens
cccatatggctttgg

SEQ ID NO: 967832 - DNA, 15 bp, Homo sapiens
acccatatggctttg

SEQ ID NO: 967833 - DNA, 15 bp, Homo sapiens
gacccatatggcttt

SEQ ID NO: 967834 - DNA, 15 bp, Homo sapiens
agacccatatggctt

SEQ ID NO: 967835 - DNA, 15 bp, Homo sapiens
cagacccatatggct

SEQ ID NO: 967836 - DNA, 15 bp, Homo sapiens
gcagacccatatggc

SEQ ID NO: 967837 - DNA, 15 bp, Homo sapiens
agcagacccatatgg

SEQ ID NO: 967838 - DNA, 15 bp, Homo sapiens
cagcagacccatatg

SEQ ID NO: 967839 - DNA, 15 bp, Homo sapiens
gcagcagacccatat

SEQ ID NO: 967840 - DNA, 15 bp, Homo sapiens
agcagcagacccata

SEQ ID NO: 967841 - DNA, 15 bp, Homo sapiens
cagcagcagacccat

SEQ ID NO: 967842 - DNA, 15 bp, Homo sapiens
tcagcagcagaccca

SEQ ID NO: 967843 - DNA, 15 bp, Homo sapiens
gtcagcagcagaccc

SEQ ID NO: 967844 - DNA, 15 bp, Homo sapiens
agtcagcagcagacc

SEQ ID NO: 967845 - DNA, 15 bp, Homo sapiens
aagtcagcagcagac

SEQ ID NO: 967846 - DNA, 15 bp, Homo sapiens
aaagtcagcagcaga

SEQ ID NO: 967847 - DNA, 15 bp, Homo sapiens
aaaagtcagcagcag

SEQ ID NO: 967848 - DNA, 15 bp, Homo sapiens
aaaaagtcagcagca

SEQ ID NO: 967849 - DNA, 15 bp, Homo sapiens
taaaaagtcagcagc

SEQ ID NO: 967850 - DNA, 15 bp, Homo sapiens
ataaaaagtcagcag

SEQ ID NO: 967851 - DNA, 15 bp, Homo sapiens
tataaaaagtcagca

SEQ ID NO: 967852 - DNA, 15 bp, Homo sapiens
atataaaaagtcagc

SEQ ID NO: 967853 - DNA, 15 bp, Homo sapiens
catataaaaagtcag

SEQ ID NO: 967854 - DNA, 15 bp, Homo sapiens
acatataaaaagtca

SEQ ID NO: 967855 - DNA, 15 bp, Homo sapiens
aacatataaaaagtc

SEQ ID NO: 967856 - DNA, 15 bp, Homo sapiens
caacatataaaaagt

SEQ ID NO: 967857 - DNA, 15 bp, Homo sapiens
acaacatataaaaag

SEQ ID NO: 967858 - DNA, 15 bp, Homo sapiens
tacaacatataaaaa

SEQ ID NO: 967859 - DNA, 15 bp, Homo sapiens
ctacaacatataaaa

SEQ ID NO: 967860 - DNA, 15 bp, Homo sapiens
tctacaacatataaa

SEQ ID NO: 967861 - DNA, 15 bp, Homo sapiens
ctctacaacatataa

SEQ ID NO: 967862 - DNA, 15 bp, Homo sapiens
actctacaacatata

SEQ ID NO: 967863 - DNA, 15 bp, Homo sapiens
aactctacaacatat

SEQ ID NO: 967864 - DNA, 15 bp, Homo sapiens
taactctacaacata

SEQ ID NO: 967865 - DNA, 15 bp, Homo sapiens
ataactctacaacat

SEQ ID NO: 967866 - DNA, 15 bp, Homo sapiens
tataactctacaaca

SEQ ID NO: 967867 - DNA, 15 bp, Homo sapiens
atataactctacaac

SEQ ID NO: 967868 - DNA, 15 bp, Homo sapiens
gatataactctacaa

SEQ ID NO: 967869 - DNA, 15 bp, Homo sapiens
tgatataactctaca

SEQ ID NO: 967870 - DNA, 15 bp, Homo sapiens
ttgatataactctac

SEQ ID NO: 967871 - DNA, 15 bp, Homo sapiens
cttgatataactcta

SEQ ID NO: 967872 - DNA, 15 bp, Homo sapiens
acttgatataactct

SEQ ID NO: 967873 - DNA, 15 bp, Homo sapiens
aacttgatataactc

SEQ ID NO: 967874 - DNA, 15 bp, Homo sapiens
taacttgatataact

SEQ ID NO: 967875 - DNA, 15 bp, Homo sapiens
ataacttgatataac

SEQ ID NO: 967876 - DNA, 15 bp, Homo sapiens
cataacttgatataa

SEQ ID NO: 967877 - DNA, 15 bp, Homo sapiens
acataacttgatata

SEQ ID NO: 967878 - DNA, 15 bp, Homo sapiens
gacataacttgatat

SEQ ID NO: 967879 - DNA, 15 bp, Homo sapiens
tgacataacttgata

SEQ ID NO: 967880 - DNA, 15 bp, Homo sapiens
ttgacataacttgat

SEQ ID NO: 967881 - DNA, 15 bp, Homo sapiens
cttgacataacttga

SEQ ID NO: 967882 - DNA, 15 bp, Homo sapiens
tcttgacataacttg

SEQ ID NO: 967883 - DNA, 15 bp, Homo sapiens
atcttgacataactt

SEQ ID NO: 967884 - DNA, 15 bp, Homo sapiens
catcttgacataact

SEQ ID NO: 967885 - DNA, 15 bp, Homo sapiens
acatcttgacataac

SEQ ID NO: 967886 - DNA, 15 bp, Homo sapiens
aacatcttgacataa

SEQ ID NO: 967887 - DNA, 15 bp, Homo sapiens
gaacatcttgacata

SEQ ID NO: 967888 - DNA, 15 bp, Homo sapiens
tgaacatcttgacat

SEQ ID NO: 967889 - DNA, 15 bp, Homo sapiens
ctgaacatcttgaca

SEQ ID NO: 967890 - DNA, 15 bp, Homo sapiens
actgaacatcttgac

SEQ ID NO: 967891 - DNA, 15 bp, Homo sapiens
gactgaacatcttga

SEQ ID NO: 967892 - DNA, 15 bp, Homo sapiens
tgactgaacatcttg

SEQ ID NO: 967893 - DNA, 15 bp, Homo sapiens
gtgactgaacatctt

SEQ ID NO: 967894 - DNA, 15 bp, Homo sapiens
ggtgactgaacatct

SEQ ID NO: 967895 - DNA, 15 bp, Homo sapiens
aggtgactgaacatc

SEQ ID NO: 967896 - DNA, 15 bp, Homo sapiens
aaggtgactgaacat

SEQ ID NO: 967897 - DNA, 15 bp, Homo sapiens
caaggtgactgaaca

SEQ ID NO: 967898 - DNA, 15 bp, Homo sapiens
tcaaggtgactgaac

SEQ ID NO: 967899 - DNA, 15 bp, Homo sapiens
ttcaaggtgactgaa

SEQ ID NO: 967900 - DNA, 15 bp, Homo sapiens
cttcaaggtgactga

SEQ ID NO: 967901 - DNA, 15 bp, Homo sapiens
tcttcaaggtgactg

SEQ ID NO: 967902 - DNA, 15 bp, Homo sapiens
ctcttcaaggtgact

SEQ ID NO: 967903 - DNA, 15 bp, Homo sapiens
cctcttcaaggtgac

SEQ ID NO: 967904 - DNA, 15 bp, Homo sapiens
gcctcttcaaggtga

SEQ ID NO: 967905 - DNA, 15 bp, Homo sapiens
agcctcttcaaggtg

SEQ ID NO: 967906 - DNA, 15 bp, Homo sapiens
aagcctcttcaaggt

SEQ ID NO: 967907 - DNA, 15 bp, Homo sapiens
aaagcctcttcaagg

SEQ ID NO: 967908 - DNA, 15 bp, Homo sapiens
aaaagcctcttcaag

SEQ ID NO: 967909 - DNA, 15 bp, Homo sapiens
taaaagcctcttcaa

SEQ ID NO: 967910 - DNA, 15 bp, Homo sapiens
ataaaagcctcttca

SEQ ID NO: 967911 - DNA, 15 bp, Homo sapiens
gataaaagcctcttc

SEQ ID NO: 967912 - DNA, 15 bp, Homo sapiens
tgataaaagcctctt

SEQ ID NO: 967913 - DNA, 15 bp, Homo sapiens
ctgataaaagcctct

SEQ ID NO: 967914 - DNA, 15 bp, Homo sapiens
tctgataaaagcctc

SEQ ID NO: 967915 - DNA, 15 bp, Homo sapiens
ttctgataaaagcct

SEQ ID NO: 967916 - DNA, 15 bp, Homo sapiens
tttctgataaaagcc

SEQ ID NO: 967917 - DNA, 15 bp, Homo sapiens
ctttctgataaaagc

SEQ ID NO: 967918 - DNA, 15 bp, Homo sapiens
cctttctgataaaag

SEQ ID NO: 967919 - DNA, 15 bp, Homo sapiens
ccctttctgataaaa

SEQ ID NO: 967920 - DNA, 15 bp, Homo sapiens
cccctttctgataaa

SEQ ID NO: 967921 - DNA, 15 bp, Homo sapiens
ccccctttctgataa

SEQ ID NO: 967922 - DNA, 15 bp, Homo sapiens
tccccctttctgata

SEQ ID NO: 967923 - DNA, 15 bp, Homo sapiens
gtccccctttctgat

SEQ ID NO: 967924 - DNA, 15 bp, Homo sapiens
cgtccccctttctga

SEQ ID NO: 967925 - DNA, 15 bp, Homo sapiens
gcgtccccctttctg

SEQ ID NO: 967926 - DNA, 15 bp, Homo sapiens
ggcgtccccctttct

SEQ ID NO: 967927 - DNA, 15 bp, Homo sapiens
aggcgtccccctttc

SEQ ID NO: 967928 - DNA, 15 bp, Homo sapiens
aaggcgtcccccttt

SEQ ID NO: 967929 - DNA, 15 bp, Homo sapiens
aaaggcgtccccctt

SEQ ID NO: 967930 - DNA, 15 bp, Homo sapiens
gaaaggcgtccccct

SEQ ID NO: 967931 - DNA, 15 bp, Homo sapiens
agaaaggcgtccccc

SEQ ID NO: 967932 - DNA, 15 bp, Homo sapiens
cagaaaggcgtcccc

SEQ ID NO: 967933 - DNA, 15 bp, Homo sapiens
tcagaaaggcgtccc

SEQ ID NO: 967934 - DNA, 15 bp, Homo sapiens
atcagaaaggcgtcc

SEQ ID NO: 967935 - DNA, 15 bp, Homo sapiens
tatcagaaaggcgtc

SEQ ID NO: 967936 - DNA, 15 bp, Homo sapiens
ttatcagaaaggcgt

SEQ ID NO: 967937 - DNA, 15 bp, Homo sapiens
tttatcagaaaggcg

SEQ ID NO: 967938 - DNA, 15 bp, Homo sapiens
ctttatcagaaaggc

SEQ ID NO: 967939 - DNA, 15 bp, Homo sapiens
cctttatcagaaagg

SEQ ID NO: 967940 - DNA, 15 bp, Homo sapiens
acctttatcagaaag

SEQ ID NO: 967941 - DNA, 15 bp, Homo sapiens
aacctttatcagaaa

SEQ ID NO: 967942 - DNA, 15 bp, Homo sapiens
taacctttatcagaa

SEQ ID NO: 967943 - DNA, 15 bp, Homo sapiens
ttaacctttatcaga

SEQ ID NO: 967944 - DNA, 15 bp, Homo sapiens
cttaacctttatcag

SEQ ID NO: 967945 - DNA, 15 bp, Homo sapiens
ccttaacctttatca

SEQ ID NO: 967946 - DNA, 15 bp, Homo sapiens
cccttaacctttatc

SEQ ID NO: 967947 - DNA, 15 bp, Homo sapiens
ccccttaacctttat

SEQ ID NO: 967948 - DNA, 15 bp, Homo sapiens
accccttaaccttta

SEQ ID NO: 967949 - DNA, 15 bp, Homo sapiens
taccccttaaccttt

SEQ ID NO: 967950 - DNA, 15 bp, Homo sapiens
ttaccccttaacctt

SEQ ID NO: 967951 - DNA, 15 bp, Homo sapiens
gttaccccttaacct

SEQ ID NO: 967952 - DNA, 15 bp, Homo sapiens
ggttaccccttaacc

SEQ ID NO: 967953 - DNA, 15 bp, Homo sapiens
aggttaccccttaac

SEQ ID NO: 967954 - DNA, 15 bp, Homo sapiens
aaggttaccccttaa

SEQ ID NO: 967955 - DNA, 15 bp, Homo sapiens
taaggttacccctta

SEQ ID NO: 967956 - DNA, 15 bp, Homo sapiens
ttaaggttacccctt

SEQ ID NO: 967957 - DNA, 15 bp, Homo sapiens
cttaaggttacccct

SEQ ID NO: 967958 - DNA, 15 bp, Homo sapiens
gcttaaggttacccc

SEQ ID NO: 967959 - DNA, 15 bp, Homo sapiens
agcttaaggttaccc

SEQ ID NO: 967960 - DNA, 15 bp, Homo sapiens
gagcttaaggttacc

SEQ ID NO: 967961 - DNA, 15 bp, Homo sapiens
agagcttaaggttac

SEQ ID NO: 967962 - DNA, 15 bp, Homo sapiens
aagagcttaaggtta

SEQ ID NO: 967963 - DNA, 15 bp, Homo sapiens
taagagcttaaggtt

SEQ ID NO: 967964 - DNA, 15 bp, Homo sapiens
gtaagagcttaaggt

SEQ ID NO: 967965 - DNA, 15 bp, Homo sapiens
ggtaagagcttaagg

SEQ ID NO: 967966 - DNA, 15 bp, Homo sapiens
gggtaagagcttaag

SEQ ID NO: 967967 - DNA, 15 bp, Homo sapiens
ggggtaagagcttaa

SEQ ID NO: 967968 - DNA, 15 bp, Homo sapiens
aggggtaagagctta

SEQ ID NO: 967969 - DNA, 15 bp, Homo sapiens
gaggggtaagagctt

SEQ ID NO: 967970 - DNA, 15 bp, Homo sapiens
agaggggtaagagct

SEQ ID NO: 967971 - DNA, 15 bp, Homo sapiens
cagaggggtaagagc

SEQ ID NO: 967972 - DNA, 15 bp, Homo sapiens
tcagaggggtaagag

SEQ ID NO: 967973 - DNA, 15 bp, Homo sapiens
ttcagaggggtaaga

SEQ ID NO: 967974 - DNA, 15 bp, Homo sapiens
cttcagaggggtaag

SEQ ID NO: 967975 - DNA, 15 bp, Homo sapiens
ccttcagaggggtaa

SEQ ID NO: 967976 - DNA, 15 bp, Homo sapiens
accttcagaggggta

SEQ ID NO: 967977 - DNA, 15 bp, Homo sapiens
taccttcagaggggt

SEQ ID NO: 967978 - DNA, 15 bp, Homo sapiens
ttaccttcagagggg

SEQ ID NO: 967979 - DNA, 15 bp, Homo sapiens
tttaccttcagaggg

SEQ ID NO: 967980 - DNA, 15 bp, Homo sapiens
ttttaccttcagagg

SEQ ID NO: 967981 - DNA, 15 bp, Homo sapiens
attttaccttcagag

SEQ ID NO: 967982 - DNA, 15 bp, Homo sapiens
gattttaccttcaga

SEQ ID NO: 967983 - DNA, 15 bp, Homo sapiens
tgattttaccttcag

SEQ ID NO: 967984 - DNA, 15 bp, Homo sapiens
ttgattttaccttca

SEQ ID NO: 967985 - DNA, 15 bp, Homo sapiens
cttgattttaccttc

SEQ ID NO: 967986 - DNA, 15 bp, Homo sapiens
ccttgattttacctt

SEQ ID NO: 967987 - DNA, 15 bp, Homo sapiens
accttgattttacct

SEQ ID NO: 967988 - DNA, 15 bp, Homo sapiens
caccttgattttacc

SEQ ID NO: 967989 - DNA, 15 bp, Homo sapiens
gcaccttgattttac

SEQ ID NO: 967990 - DNA, 15 bp, Homo sapiens
cgcaccttgatttta

SEQ ID NO: 967991 - DNA, 15 bp, Homo sapiens
acgcaccttgatttt

SEQ ID NO: 967992 - DNA, 15 bp, Homo sapiens
aacgcaccttgattt

SEQ ID NO: 967993 - DNA, 15 bp, Homo sapiens
gaacgcaccttgatt

SEQ ID NO: 967994 - DNA, 15 bp, Homo sapiens
tgaacgcaccttgat

SEQ ID NO: 967995 - DNA, 15 bp, Homo sapiens
ctgaacgcaccttga

SEQ ID NO: 967996 - DNA, 15 bp, Homo sapiens
tctgaacgcaccttg

SEQ ID NO: 967997 - DNA, 15 bp, Homo sapiens
atctgaacgcacctt

SEQ ID NO: 967998 - DNA, 15 bp, Homo sapiens
catctgaacgcacct

SEQ ID NO: 967999 - DNA, 15 bp, Homo sapiens
acatctgaacgcacc

SEQ ID NO: 968000 - DNA, 15 bp, Homo sapiens
aacatctgaacgcac

SEQ ID NO: 968001 - DNA, 15 bp, Homo sapiens
caacatctgaacgca

SEQ ID NO: 968002 - DNA, 15 bp, Homo sapiens
ccaacatctgaacgc

SEQ ID NO: 968003 - DNA, 15 bp, Homo sapiens
gccaacatctgaacg

SEQ ID NO: 968004 - DNA, 15 bp, Homo sapiens
agccaacatctgaac

SEQ ID NO: 968005 - DNA, 15 bp, Homo sapiens
aagccaacatctgaa

SEQ ID NO: 968006 - DNA, 15 bp, Homo sapiens
caagccaacatctga

SEQ ID NO: 968007 - DNA, 15 bp, Homo sapiens
acaagccaacatctg

SEQ ID NO: 968008 - DNA, 15 bp, Homo sapiens
aacaagccaacatct

SEQ ID NO: 968009 - DNA, 15 bp, Homo sapiens
caacaagccaacatc

SEQ ID NO: 968010 - DNA, 15 bp, Homo sapiens
acaacaagccaacat

SEQ ID NO: 968011 - DNA, 15 bp, Homo sapiens
tacaacaagccaaca

SEQ ID NO: 968012 - DNA, 15 bp, Homo sapiens
ttacaacaagccaac

SEQ ID NO: 968013 - DNA, 15 bp, Homo sapiens
tttacaacaagccaa

SEQ ID NO: 968014 - DNA, 15 bp, Homo sapiens
atttacaacaagcca

SEQ ID NO: 968015 - DNA, 15 bp, Homo sapiens
aatttacaacaagcc

SEQ ID NO: 968016 - DNA, 15 bp, Homo sapiens
aaatttacaacaagc

SEQ ID NO: 968017 - DNA, 15 bp, Homo sapiens
gaaatttacaacaag

SEQ ID NO: 968018 - DNA, 15 bp, Homo sapiens
agaaatttacaacaa

SEQ ID NO: 968019 - DNA, 15 bp, Homo sapiens
aagaaatttacaaca

SEQ ID NO: 968020 - DNA, 15 bp, Homo sapiens
aaagaaatttacaac

SEQ ID NO: 968021 - DNA, 15 bp, Homo sapiens
aaaagaaatttacaa

SEQ ID NO: 968022 - DNA, 15 bp, Homo sapiens
aaaaagaaatttaca

SEQ ID NO: 968023 - DNA, 15 bp, Homo sapiens
aaaaaagaaatttac

SEQ ID NO: 968024 - DNA, 15 bp, Homo sapiens
aaaaaaagaaattta

SEQ ID NO: 968025 - DNA, 15 bp, Homo sapiens
taaaaaaagaaattt

SEQ ID NO: 968026 - DNA, 15 bp, Homo sapiens
ataaaaaaagaaatt

SEQ ID NO: 968027 - DNA, 15 bp, Homo sapiens
aataaaaaaagaaat

SEQ ID NO: 968028 - DNA, 15 bp, Homo sapiens
taataaaaaaagaaa

SEQ ID NO: 968029 - DNA, 15 bp, Homo sapiens
ttaataaaaaaagaa

SEQ ID NO: 968030 - DNA, 15 bp, Homo sapiens
attaataaaaaaaga

SEQ ID NO: 968031 - DNA, 15 bp, Homo sapiens
tattaataaaaaaag

SEQ ID NO: 968032 - DNA, 15 bp, Homo sapiens
ttattaataaaaaaa

SEQ ID NO: 968033 - DNA, 15 bp, Homo sapiens
gttattaataaaaaa

SEQ ID NO: 968034 - DNA, 15 bp, Homo sapiens
tgttattaataaaaa

SEQ ID NO: 968035 - DNA, 15 bp, Homo sapiens
atgttattaataaaa

SEQ ID NO: 968036 - DNA, 15 bp, Homo sapiens
tatgttattaataaa

SEQ ID NO: 968037 - DNA, 15 bp, Homo sapiens
gtatgttattaataa

SEQ ID NO: 968038 - DNA, 15 bp, Homo sapiens
agtatgttattaata

SEQ ID NO: 968039 - DNA, 15 bp, Homo sapiens
tagtatgttattaat

SEQ ID NO: 968040 - DNA, 15 bp, Homo sapiens
ttagtatgttattaa

SEQ ID NO: 968041 - DNA, 15 bp, Homo sapiens
tttagtatgttatta

SEQ ID NO: 968042 - DNA, 15 bp, Homo sapiens
atttagtatgttatt

SEQ ID NO: 968043 - DNA, 15 bp, Homo sapiens
catttagtatgttat

SEQ ID NO: 968044 - DNA, 15 bp, Homo sapiens
acatttagtatgtta

SEQ ID NO: 968045 - DNA, 15 bp, Homo sapiens
cacatttagtatgtt

SEQ ID NO: 968046 - DNA, 15 bp, Homo sapiens
ccacatttagtatgt

SEQ ID NO: 968047 - DNA, 15 bp, Homo sapiens
tccacatttagtatg

SEQ ID NO: 968048 - DNA, 15 bp, Homo sapiens
atccacatttagtat

SEQ ID NO: 968049 - DNA, 15 bp, Homo sapiens
aatccacatttagta

SEQ ID NO: 968050 - DNA, 15 bp, Homo sapiens
aaatccacatttagt

SEQ ID NO: 968051 - DNA, 15 bp, Homo sapiens
caaatccacatttag

SEQ ID NO: 968052 - DNA, 15 bp, Homo sapiens
gcaaatccacattta

SEQ ID NO: 968053 - DNA, 15 bp, Homo sapiens
agcaaatccacattt

SEQ ID NO: 968054 - DNA, 15 bp, Homo sapiens
aagcaaatccacatt

SEQ ID NO: 968055 - DNA, 15 bp, Homo sapiens
aaagcaaatccacat

SEQ ID NO: 968056 - DNA, 15 bp, Homo sapiens
taaagcaaatccaca

SEQ ID NO: 968057 - DNA, 15 bp, Homo sapiens
ttaaagcaaatccac

SEQ ID NO: 968058 - DNA, 15 bp, Homo sapiens
attaaagcaaatcca

SEQ ID NO: 968059 - DNA, 15 bp, Homo sapiens
gattaaagcaaatcc

SEQ ID NO: 968060 - DNA, 15 bp, Homo sapiens
agattaaagcaaatc

SEQ ID NO: 968061 - DNA, 15 bp, Homo sapiens
aagattaaagcaaat

SEQ ID NO: 968062 - DNA, 15 bp, Homo sapiens
gaagattaaagcaaa

SEQ ID NO: 968063 - DNA, 15 bp, Homo sapiens
cgaagattaaagcaa

SEQ ID NO: 968064 - DNA, 15 bp, Homo sapiens
tcgaagattaaagca

SEQ ID NO: 968065 - DNA, 15 bp, Homo sapiens
ttcgaagattaaagc

SEQ ID NO: 968066 - DNA, 15 bp, Homo sapiens
tttcgaagattaaag

SEQ ID NO: 968067 - DNA, 15 bp, Homo sapiens
gtttcgaagattaaa

SEQ ID NO: 968068 - DNA, 15 bp, Homo sapiens
agtttcgaagattaa

SEQ ID NO: 968069 - DNA, 15 bp, Homo sapiens
gagtttcgaagatta

SEQ ID NO: 968070 - DNA, 15 bp, Homo sapiens
agagtttcgaagatt

SEQ ID NO: 968071 - DNA, 15 bp, Homo sapiens
aagagtttcgaagat

SEQ ID NO: 968072 - DNA, 15 bp, Homo sapiens
gaagagtttcgaaga

SEQ ID NO: 968073 - DNA, 15 bp, Homo sapiens
ggaagagtttcgaag

SEQ ID NO: 968074 - DNA, 15 bp, Homo sapiens
gggaagagtttcgaa

SEQ ID NO: 968075 - DNA, 15 bp, Homo sapiens
cgggaagagtttcga

SEQ ID NO: 968076 - DNA, 15 bp, Homo sapiens
ccgggaagagtttcg

SEQ ID NO: 968077 - DNA, 15 bp, Homo sapiens
accgggaagagtttc

SEQ ID NO: 968078 - DNA, 15 bp, Homo sapiens
caccgggaagagttt

SEQ ID NO: 968079 - DNA, 15 bp, Homo sapiens
tcaccgggaagagtt

SEQ ID NO: 968080 - DNA, 15 bp, Homo sapiens
ttcaccgggaagagt

SEQ ID NO: 968081 - DNA, 15 bp, Homo sapiens
tttcaccgggaagag

SEQ ID NO: 968082 - DNA, 15 bp, Homo sapiens
ttttcaccgggaaga

SEQ ID NO: 968083 - DNA, 15 bp, Homo sapiens
attttcaccgggaag

SEQ ID NO: 968084 - DNA, 15 bp, Homo sapiens
gattttcaccgggaa

SEQ ID NO: 968085 - DNA, 15 bp, Homo sapiens
agattttcaccggga

SEQ ID NO: 968086 - DNA, 15 bp, Homo sapiens
gagattttcaccggg

SEQ ID NO: 968087 - DNA, 15 bp, Homo sapiens
tgagattttcaccgg

SEQ ID NO: 968088 - DNA, 15 bp, Homo sapiens
atgagattttcaccg

SEQ ID NO: 968089 - DNA, 15 bp, Homo sapiens
aatgagattttcacc

SEQ ID NO: 968090 - DNA, 15 bp, Homo sapiens
aaatgagattttcac

SEQ ID NO: 968091 - DNA, 15 bp, Homo sapiens
taaatgagattttca

SEQ ID NO: 968092 - DNA, 15 bp, Homo sapiens
gtaaatgagattttc

SEQ ID NO: 968093 - DNA, 15 bp, Homo sapiens
tgtaaatgagatttt

SEQ ID NO: 968094 - DNA, 15 bp, Homo sapiens
ttgtaaatgagattt

SEQ ID NO: 968095 - DNA, 15 bp, Homo sapiens
cttgtaaatgagatt

SEQ ID NO: 968096 - DNA, 15 bp, Homo sapiens
tcttgtaaatgagat

SEQ ID NO: 968097 - DNA, 15 bp, Homo sapiens
ttcttgtaaatgaga

SEQ ID NO: 968098 - DNA, 15 bp, Homo sapiens
tttcttgtaaatgag

SEQ ID NO: 968099 - DNA, 15 bp, Homo sapiens
ttttcttgtaaatga

SEQ ID NO: 968100 - DNA, 15 bp, Homo sapiens
gttttcttgtaaatg

SEQ ID NO: 968101 - DNA, 15 bp, Homo sapiens
agttttcttgtaaat

SEQ ID NO: 968102 - DNA, 15 bp, Homo sapiens
cagttttcttgtaaa

SEQ ID NO: 968103 - DNA, 15 bp, Homo sapiens
ccagttttcttgtaa

SEQ ID NO: 968104 - DNA, 15 bp, Homo sapiens
tccagttttcttgta

SEQ ID NO: 968105 - DNA, 15 bp, Homo sapiens
gtccagttttcttgt

SEQ ID NO: 968106 - DNA, 15 bp, Homo sapiens
agtccagttttcttg

SEQ ID NO: 968107 - DNA, 15 bp, Homo sapiens
cagtccagttttctt

SEQ ID NO: 968108 - DNA, 15 bp, Homo sapiens
tcagtccagttttct

SEQ ID NO: 968109 - DNA, 15 bp, Homo sapiens
gtcagtccagttttc

SEQ ID NO: 968110 - DNA, 15 bp, Homo sapiens
tgtcagtccagtttt

SEQ ID NO: 968111 - DNA, 15 bp, Homo sapiens
atgtcagtccagttt

SEQ ID NO: 968112 - DNA, 15 bp, Homo sapiens
catgtcagtccagtt

SEQ ID NO: 968113 - DNA, 15 bp, Homo sapiens
acatgtcagtccagt

SEQ ID NO: 968114 - DNA, 15 bp, Homo sapiens
aacatgtcagtccag

SEQ ID NO: 968115 - DNA, 15 bp, Homo sapiens
aaacatgtcagtcca

SEQ ID NO: 968116 - DNA, 15 bp, Homo sapiens
gaaacatgtcagtcc

SEQ ID NO: 968117 - DNA, 15 bp, Homo sapiens
tgaaacatgtcagtc

SEQ ID NO: 968118 - DNA, 15 bp, Homo sapiens
gtgaaacatgtcagt

SEQ ID NO: 968119 - DNA, 15 bp, Homo sapiens
agtgaaacatgtcag

SEQ ID NO: 968120 - DNA, 15 bp, Homo sapiens
aagtgaaacatgtca

SEQ ID NO: 968121 - DNA, 15 bp, Homo sapiens
aaagtgaaacatgtc

SEQ ID NO: 968122 - DNA, 15 bp, Homo sapiens
gaaagtgaaacatgt

SEQ ID NO: 968123 - DNA, 15 bp, Homo sapiens
agaaagtgaaacatg

SEQ ID NO: 968124 - DNA, 15 bp, Homo sapiens
cagaaagtgaaacat

SEQ ID NO: 968125 - DNA, 15 bp, Homo sapiens
acagaaagtgaaaca

SEQ ID NO: 968126 - DNA, 15 bp, Homo sapiens
aacagaaagtgaaac

SEQ ID NO: 968127 - DNA, 15 bp, Homo sapiens
aaacagaaagtgaaa

SEQ ID NO: 968128 - DNA, 15 bp, Homo sapiens
gaaacagaaagtgaa

SEQ ID NO: 968129 - DNA, 15 bp, Homo sapiens
tgaaacagaaagtga

SEQ ID NO: 968130 - DNA, 15 bp, Homo sapiens
atgaaacagaaagtg

SEQ ID NO: 968131 - DNA, 15 bp, Homo sapiens
aatgaaacagaaagt

SEQ ID NO: 968132 - DNA, 15 bp, Homo sapiens
aaatgaaacagaaag

SEQ ID NO: 968133 - DNA, 15 bp, Homo sapiens
gaaatgaaacagaaa

SEQ ID NO: 968134 - DNA, 15 bp, Homo sapiens
agaaatgaaacagaa

SEQ ID NO: 968135 - DNA, 15 bp, Homo sapiens
tagaaatgaaacaga

SEQ ID NO: 968136 - DNA, 15 bp, Homo sapiens
atagaaatgaaacag

SEQ ID NO: 968137 - DNA, 15 bp, Homo sapiens
tatagaaatgaaaca

SEQ ID NO: 968138 - DNA, 15 bp, Homo sapiens
gtatagaaatgaaac

SEQ ID NO: 968139 - DNA, 15 bp, Homo sapiens
tgtatagaaatgaaa

SEQ ID NO: 968140 - DNA, 15 bp, Homo sapiens
gtgtatagaaatgaa

SEQ ID NO: 968141 - DNA, 15 bp, Homo sapiens
tgtgtatagaaatga

SEQ ID NO: 968142 - DNA, 15 bp, Homo sapiens
ctgtgtatagaaatg

SEQ ID NO: 968143 - DNA, 15 bp, Homo sapiens
gctgtgtatagaaat

SEQ ID NO: 968144 - DNA, 15 bp, Homo sapiens
agctgtgtatagaaa

SEQ ID NO: 968145 - DNA, 15 bp, Homo sapiens
aagctgtgtatagaa

SEQ ID NO: 968146 - DNA, 15 bp, Homo sapiens
aaagctgtgtataga

SEQ ID NO: 968147 - DNA, 15 bp, Homo sapiens
taaagctgtgtatag

SEQ ID NO: 968148 - DNA, 15 bp, Homo sapiens
ataaagctgtgtata

SEQ ID NO: 968149 - DNA, 15 bp, Homo sapiens
aataaagctgtgtat

SEQ ID NO: 968150 - DNA, 15 bp, Homo sapiens
gaataaagctgtgta

SEQ ID NO: 968151 - DNA, 15 bp, Homo sapiens
ggaataaagctgtgt

SEQ ID NO: 968152 - DNA, 15 bp, Homo sapiens
aggaataaagctgtg

SEQ ID NO: 968153 - DNA, 15 bp, Homo sapiens
taggaataaagctgt

SEQ ID NO: 968154 - DNA, 15 bp, Homo sapiens
ctaggaataaagctg

SEQ ID NO: 968155 - DNA, 15 bp, Homo sapiens
cctaggaataaagct

SEQ ID NO: 968156 - DNA, 15 bp, Homo sapiens
tcctaggaataaagc

SEQ ID NO: 968157 - DNA, 15 bp, Homo sapiens
gtcctaggaataaag

SEQ ID NO: 968158 - DNA, 15 bp, Homo sapiens
tgtcctaggaataaa

SEQ ID NO: 968159 - DNA, 15 bp, Homo sapiens
gtgtcctaggaataa

SEQ ID NO: 968160 - DNA, 15 bp, Homo sapiens
ggtgtcctaggaata

SEQ ID NO: 968161 - DNA, 15 bp, Homo sapiens
tggtgtcctaggaat

SEQ ID NO: 968162 - DNA, 15 bp, Homo sapiens
ttggtgtcctaggaa

SEQ ID NO: 968163 - DNA, 15 bp, Homo sapiens
gttggtgtcctagga

SEQ ID NO: 968164 - DNA, 15 bp, Homo sapiens
tgttggtgtcctagg

SEQ ID NO: 968165 - DNA, 15 bp, Homo sapiens
gtgttggtgtcctag

SEQ ID NO: 968166 - DNA, 15 bp, Homo sapiens
agtgttggtgtccta

SEQ ID NO: 968167 - DNA, 15 bp, Homo sapiens
tagtgttggtgtcct

SEQ ID NO: 968168 - DNA, 15 bp, Homo sapiens
ctagtgttggtgtcc

SEQ ID NO: 968169 - DNA, 15 bp, Homo sapiens
tctagtgttggtgtc

SEQ ID NO: 968170 - DNA, 15 bp, Homo sapiens
atctagtgttggtgt

SEQ ID NO: 968171 - DNA, 15 bp, Homo sapiens
tatctagtgttggtg

SEQ ID NO: 968172 - DNA, 15 bp, Homo sapiens
gtatctagtgttggt

SEQ ID NO: 968173 - DNA, 15 bp, Homo sapiens
ggtatctagtgttgg

SEQ ID NO: 968174 - DNA, 15 bp, Homo sapiens
aggtatctagtgttg

SEQ ID NO: 968175 - DNA, 15 bp, Homo sapiens
taggtatctagtgtt

SEQ ID NO: 968176 - DNA, 15 bp, Homo sapiens
ttaggtatctagtgt

SEQ ID NO: 968177 - DNA, 15 bp, Homo sapiens
tttaggtatctagtg

SEQ ID NO: 968178 - DNA, 15 bp, Homo sapiens
gtttaggtatctagt

SEQ ID NO: 968179 - DNA, 15 bp, Homo sapiens
agtttaggtatctag

SEQ ID NO: 968180 - DNA, 15 bp, Homo sapiens
cagtttaggtatcta

SEQ ID NO: 968181 - DNA, 15 bp, Homo sapiens
tcagtttaggtatct

SEQ ID NO: 968182 - DNA, 15 bp, Homo sapiens
ttcagtttaggtatc

SEQ ID NO: 968183 - DNA, 15 bp, Homo sapiens
tttcagtttaggtat

SEQ ID NO: 968184 - DNA, 15 bp, Homo sapiens
ctttcagtttaggta

SEQ ID NO: 968185 - DNA, 15 bp, Homo sapiens
gctttcagtttaggt

SEQ ID NO: 968186 - DNA, 15 bp, Homo sapiens
agctttcagtttagg

SEQ ID NO: 968187 - DNA, 15 bp, Homo sapiens
aagctttcagtttag

SEQ ID NO: 968188 - DNA, 15 bp, Homo sapiens
gaagctttcagttta

SEQ ID NO: 968189 - DNA, 15 bp, Homo sapiens
ggaagctttcagttt

SEQ ID NO: 968190 - DNA, 15 bp, Homo sapiens
cggaagctttcagtt

SEQ ID NO: 968191 - DNA, 15 bp, Homo sapiens
gcggaagctttcagt

SEQ ID NO: 968192 - DNA, 15 bp, Homo sapiens
ggcggaagctttcag

SEQ ID NO: 968193 - DNA, 15 bp, Homo sapiens
cggcggaagctttca

SEQ ID NO: 968194 - DNA, 15 bp, Homo sapiens
tcggcggaagctttc

SEQ ID NO: 968195 - DNA, 15 bp, Homo sapiens
atcggcggaagcttt

SEQ ID NO: 968196 - DNA, 15 bp, Homo sapiens
aatcggcggaagctt

SEQ ID NO: 968197 - DNA, 15 bp, Homo sapiens
aaatcggcggaagct

SEQ ID NO: 968198 - DNA, 15 bp, Homo sapiens
gaaatcggcggaagc

SEQ ID NO: 968199 - DNA, 15 bp, Homo sapiens
tgaaatcggcggaag

SEQ ID NO: 968200 - DNA, 15 bp, Homo sapiens
gtgaaatcggcggaa

SEQ ID NO: 968201 - DNA, 15 bp, Homo sapiens
ggtgaaatcggcgga

SEQ ID NO: 968202 - DNA, 15 bp, Homo sapiens
cggtgaaatcggcgg

SEQ ID NO: 968203 - DNA, 15 bp, Homo sapiens
tcggtgaaatcggcg

SEQ ID NO: 968204 - DNA, 15 bp, Homo sapiens
ttcggtgaaatcggc

SEQ ID NO: 968205 - DNA, 15 bp, Homo sapiens
cttcggtgaaatcgg

SEQ ID NO: 968206 - DNA, 15 bp, Homo sapiens
ccttcggtgaaatcg

SEQ ID NO: 968207 - DNA, 15 bp, Homo sapiens
accttcggtgaaatc

SEQ ID NO: 968208 - DNA, 15 bp, Homo sapiens
gaccttcggtgaaat

SEQ ID NO: 968209 - DNA, 15 bp, Homo sapiens
tgaccttcggtgaaa

SEQ ID NO: 968210 - DNA, 15 bp, Homo sapiens
ctgaccttcggtgaa

SEQ ID NO: 968211 - DNA, 15 bp, Homo sapiens
cctgaccttcggtga

SEQ ID NO: 968212 - DNA, 15 bp, Homo sapiens
tcctgaccttcggtg

SEQ ID NO: 968213 - DNA, 15 bp, Homo sapiens
ttcctgaccttcggt

SEQ ID NO: 968214 - DNA, 15 bp, Homo sapiens
tttcctgaccttcgg

SEQ ID NO: 968215 - DNA, 15 bp, Homo sapiens
ctttcctgaccttcg

SEQ ID NO: 968216 - DNA, 15 bp, Homo sapiens
actttcctgaccttc

SEQ ID NO: 968217 - DNA, 15 bp, Homo sapiens
gactttcctgacctt

SEQ ID NO: 968218 - DNA, 15 bp, Homo sapiens
ggactttcctgacct

SEQ ID NO: 968219 - DNA, 15 bp, Homo sapiens
tggactttcctgacc

SEQ ID NO: 968220 - DNA, 15 bp, Homo sapiens
ttggactttcctgac

SEQ ID NO: 968221 - DNA, 15 bp, Homo sapiens
gttggactttcctga

SEQ ID NO: 968222 - DNA, 15 bp, Homo sapiens
cgttggactttcctg

SEQ ID NO: 968223 - DNA, 15 bp, Homo sapiens
gcgttggactttcct

SEQ ID NO: 968224 - DNA, 15 bp, Homo sapiens
ggcgttggactttcc

SEQ ID NO: 968225 - DNA, 15 bp, Homo sapiens
gggcgttggactttc

SEQ ID NO: 968226 - DNA, 15 bp, Homo sapiens
cgggcgttggacttt

SEQ ID NO: 968227 - DNA, 15 bp, Homo sapiens
ccgggcgttggactt

SEQ ID NO: 968228 - DNA, 15 bp, Homo sapiens
gccgggcgttggact

SEQ ID NO: 968229 - DNA, 15 bp, Homo sapiens
tgccgggcgttggac

SEQ ID NO: 968230 - DNA, 15 bp, Homo sapiens
ttgccgggcgttgga

SEQ ID NO: 968231 - DNA, 15 bp, Homo sapiens
tttgccgggcgttgg

SEQ ID NO: 968232 - DNA, 15 bp, Homo sapiens
gtttgccgggcgttg

SEQ ID NO: 968233 - DNA, 15 bp, Homo sapiens
agtttgccgggcgtt

SEQ ID NO: 968234 - DNA, 15 bp, Homo sapiens
cagtttgccgggcgt

SEQ ID NO: 968235 - DNA, 15 bp, Homo sapiens
ccagtttgccgggcg

SEQ ID NO: 968236 - DNA, 15 bp, Homo sapiens
tccagtttgccgggc

SEQ ID NO: 968237 - DNA, 15 bp, Homo sapiens
atccagtttgccggg

SEQ ID NO: 968238 - DNA, 15 bp, Homo sapiens
aatccagtttgccgg

SEQ ID NO: 968239 - DNA, 15 bp, Homo sapiens
aaatccagtttgccg

SEQ ID NO: 968240 - DNA, 15 bp, Homo sapiens
caaatccagtttgcc

SEQ ID NO: 968241 - DNA, 15 bp, Homo sapiens
gcaaatccagtttgc

SEQ ID NO: 968242 - DNA, 15 bp, Homo sapiens
agcaaatccagtttg

SEQ ID NO: 968243 - DNA, 15 bp, Homo sapiens
cagcaaatccagttt

SEQ ID NO: 968244 - DNA, 15 bp, Homo sapiens
gcagcaaatccagtt

SEQ ID NO: 968245 - DNA, 15 bp, Homo sapiens
ggcagcaaatccagt

SEQ ID NO: 968246 - DNA, 15 bp, Homo sapiens
aggcagcaaatccag

SEQ ID NO: 968247 - DNA, 15 bp, Homo sapiens
aaggcagcaaatcca

SEQ ID NO: 968248 - DNA, 15 bp, Homo sapiens
caaggcagcaaatcc

SEQ ID NO: 968249 - DNA, 15 bp, Homo sapiens
ccaaggcagcaaatc

SEQ ID NO: 968250 - DNA, 15 bp, Homo sapiens
cccaaggcagcaaat

SEQ ID NO: 968251 - DNA, 15 bp, Homo sapiens
gcccaaggcagcaaa

SEQ ID NO: 968252 - DNA, 15 bp, Homo sapiens
tgcccaaggcagcaa

SEQ ID NO: 968253 - DNA, 15 bp, Homo sapiens
ctgcccaaggcagca

SEQ ID NO: 968254 - DNA, 15 bp, Homo sapiens
tctgcccaaggcagc

SEQ ID NO: 968255 - DNA, 15 bp, Homo sapiens
ctctgcccaaggcag

SEQ ID NO: 968256 - DNA, 15 bp, Homo sapiens
cctctgcccaaggca

SEQ ID NO: 968257 - DNA, 15 bp, Homo sapiens
acctctgcccaaggc

SEQ ID NO: 968258 - DNA, 15 bp, Homo sapiens
cacctctgcccaagg

SEQ ID NO: 968259 - DNA, 15 bp, Homo sapiens
ccacctctgcccaag

SEQ ID NO: 968260 - DNA, 15 bp, Homo sapiens
cccacctctgcccaa

SEQ ID NO: 968261 - DNA, 15 bp, Homo sapiens
gcccacctctgccca

SEQ ID NO: 968262 - DNA, 15 bp, Homo sapiens
cgcccacctctgccc

SEQ ID NO: 968263 - DNA, 15 bp, Homo sapiens
ccgcccacctctgcc

SEQ ID NO: 968264 - DNA, 15 bp, Homo sapiens
cccgcccacctctgc

SEQ ID NO: 968265 - DNA, 15 bp, Homo sapiens
tcccgcccacctctg

SEQ ID NO: 968266 - DNA, 15 bp, Homo sapiens
gtcccgcccacctct

SEQ ID NO: 968267 - DNA, 15 bp, Homo sapiens
ggtcccgcccacctc

SEQ ID NO: 968268 - DNA, 15 bp, Homo sapiens
gggtcccgcccacct

SEQ ID NO: 968269 - DNA, 15 bp, Homo sapiens
ggggtcccgcccacc

SEQ ID NO: 968270 - DNA, 15 bp, Homo sapiens
cggggtcccgcccac

SEQ ID NO: 968271 - DNA, 15 bp, Homo sapiens
gcggggtcccgccca

SEQ ID NO: 968272 - DNA, 15 bp, Homo sapiens
ggcggggtcccgccc

SEQ ID NO: 968273 - DNA, 15 bp, Homo sapiens
aggcggggtcccgcc

SEQ ID NO: 968274 - DNA, 15 bp, Homo sapiens
gaggcggggtcccgc

SEQ ID NO: 968275 - DNA, 15 bp, Homo sapiens
ggaggcggggtcccg

SEQ ID NO: 968276 - DNA, 15 bp, Homo sapiens
cggaggcggggtccc

SEQ ID NO: 968277 - DNA, 15 bp, Homo sapiens
ccggaggcggggtcc

SEQ ID NO: 968278 - DNA, 15 bp, Homo sapiens
cccggaggcggggtc

SEQ ID NO: 968279 - DNA, 15 bp, Homo sapiens
gcccggaggcggggt

SEQ ID NO: 968280 - DNA, 15 bp, Homo sapiens
ggcccggaggcgggg

SEQ ID NO: 968281 - DNA, 15 bp, Homo sapiens
aggcccggaggcggg

SEQ ID NO: 968282 - DNA, 15 bp, Homo sapiens
caggcccggaggcgg

SEQ ID NO: 968283 - DNA, 15 bp, Homo sapiens
ccaggcccggaggcg

SEQ ID NO: 968284 - DNA, 15 bp, Homo sapiens
gccaggcccggaggc

SEQ ID NO: 968285 - DNA, 15 bp, Homo sapiens
cgccaggcccggagg

SEQ ID NO: 968286 - DNA, 15 bp, Homo sapiens
gcgccaggcccggag

SEQ ID NO: 968287 - DNA, 15 bp, Homo sapiens
tgcgccaggcccgga

SEQ ID NO: 968288 - DNA, 15 bp, Homo sapiens
ttgcgccaggcccgg

SEQ ID NO: 968289 - DNA, 15 bp, Homo sapiens
gttgcgccaggcccg

SEQ ID NO: 968290 - DNA, 15 bp, Homo sapiens
cgttgcgccaggccc

SEQ ID NO: 968291 - DNA, 15 bp, Homo sapiens
gcgttgcgccaggcc

SEQ ID NO: 968292 - DNA, 15 bp, Homo sapiens
agcgttgcgccaggc

SEQ ID NO: 968293 - DNA, 15 bp, Homo sapiens
cagcgttgcgccagg

SEQ ID NO: 968294 - DNA, 15 bp, Homo sapiens
tcagcgttgcgccag

SEQ ID NO: 968295 - DNA, 15 bp, Homo sapiens
ctcagcgttgcgcca

SEQ ID NO: 968296 - DNA, 15 bp, Homo sapiens
gctcagcgttgcgcc

SEQ ID NO: 968297 - DNA, 15 bp, Homo sapiens
tgctcagcgttgcgc

SEQ ID NO: 968298 - DNA, 15 bp, Homo sapiens
ctgctcagcgttgcg

SEQ ID NO: 968299 - DNA, 15 bp, Homo sapiens
gctgctcagcgttgc

SEQ ID NO: 968300 - DNA, 15 bp, Homo sapiens
agctgctcagcgttg

SEQ ID NO: 968301 - DNA, 15 bp, Homo sapiens
cagctgctcagcgtt

SEQ ID NO: 968302 - DNA, 15 bp, Homo sapiens
ccagctgctcagcgt

SEQ ID NO: 968303 - DNA, 15 bp, Homo sapiens
gccagctgctcagcg

SEQ ID NO: 968304 - DNA, 15 bp, Homo sapiens
cgccagctgctcagc

SEQ ID NO: 968305 - DNA, 15 bp, Homo sapiens
gcgccagctgctcag

SEQ ID NO: 968306 - DNA, 15 bp, Homo sapiens
cgcgccagctgctca

SEQ ID NO: 968307 - DNA, 15 bp, Homo sapiens
acgcgccagctgctc

SEQ ID NO: 968308 - DNA, 15 bp, Homo sapiens
gacgcgccagctgct

SEQ ID NO: 968309 - DNA, 15 bp, Homo sapiens
ggacgcgccagctgc

SEQ ID NO: 968310 - DNA, 15 bp, Homo sapiens
gggacgcgccagctg

SEQ ID NO: 968311 - DNA, 15 bp, Homo sapiens
cgggacgcgccagct

SEQ ID NO: 968312 - DNA, 15 bp, Homo sapiens
gcgggacgcgccagc

SEQ ID NO: 968313 - DNA, 15 bp, Homo sapiens
cgcgggacgcgccag

SEQ ID NO: 968314 - DNA, 15 bp, Homo sapiens
gcgcgggacgcgcca

SEQ ID NO: 968315 - DNA, 15 bp, Homo sapiens
cgcgcgggacgcgcc

SEQ ID NO: 968316 - DNA, 15 bp, Homo sapiens
ccgcgcgggacgcgc

SEQ ID NO: 968317 - DNA, 15 bp, Homo sapiens
gccgcgcgggacgcg

SEQ ID NO: 968318 - DNA, 15 bp, Homo sapiens
ggccgcgcgggacgc

SEQ ID NO: 968319 - DNA, 15 bp, Homo sapiens
gggccgcgcgggacg

SEQ ID NO: 968320 - DNA, 15 bp, Homo sapiens
ggggccgcgcgggac

SEQ ID NO: 968321 - DNA, 15 bp, Homo sapiens
tggggccgcgcggga

SEQ ID NO: 968322 - DNA, 15 bp, Homo sapiens
ctggggccgcgcggg

SEQ ID NO: 968323 - DNA, 15 bp, Homo sapiens
actggggccgcgcgg

SEQ ID NO: 968324 - DNA, 15 bp, Homo sapiens
aactggggccgcgcg

SEQ ID NO: 968325 - DNA, 15 bp, Homo sapiens
gaactggggccgcgc

SEQ ID NO: 968326 - DNA, 15 bp, Homo sapiens
agaactggggccgcg

SEQ ID NO: 968327 - DNA, 15 bp, Homo sapiens
cagaactggggccgc

SEQ ID NO: 968328 - DNA, 15 bp, Homo sapiens
gcagaactggggccg

SEQ ID NO: 968329 - DNA, 15 bp, Homo sapiens
cgcagaactggggcc

SEQ ID NO: 968330 - DNA, 15 bp, Homo sapiens
gcgcagaactggggc

SEQ ID NO: 968331 - DNA, 15 bp, Homo sapiens
tgcgcagaactgggg

SEQ ID NO: 968332 - DNA, 15 bp, Homo sapiens
ctgcgcagaactggg

SEQ ID NO: 968333 - DNA, 15 bp, Homo sapiens
gctgcgcagaactgg

SEQ ID NO: 968334 - DNA, 15 bp, Homo sapiens
agctgcgcagaactg

SEQ ID NO: 968335 - DNA, 15 bp, Homo sapiens
aagctgcgcagaact

SEQ ID NO: 968336 - DNA, 15 bp, Homo sapiens
gaagctgcgcagaac

SEQ ID NO: 968337 - DNA, 15 bp, Homo sapiens
ggaagctgcgcagaa

SEQ ID NO: 968338 - DNA, 15 bp, Homo sapiens
gggaagctgcgcaga

SEQ ID NO: 968339 - DNA, 15 bp, Homo sapiens
cgggaagctgcgcag

SEQ ID NO: 968340 - DNA, 15 bp, Homo sapiens
tcgggaagctgcgca

SEQ ID NO: 968341 - DNA, 15 bp, Homo sapiens
ctcgggaagctgcgc

SEQ ID NO: 968342 - DNA, 15 bp, Homo sapiens
cctcgggaagctgcg

SEQ ID NO: 968343 - DNA, 15 bp, Homo sapiens
gcctcgggaagctgc

SEQ ID NO: 968344 - DNA, 15 bp, Homo sapiens
agcctcgggaagctg

SEQ ID NO: 968345 - DNA, 15 bp, Homo sapiens
gagcctcgggaagct

SEQ ID NO: 968346 - DNA, 15 bp, Homo sapiens
ggagcctcgggaagc

SEQ ID NO: 968347 - DNA, 15 bp, Homo sapiens
cggagcctcgggaag

SEQ ID NO: 968348 - DNA, 15 bp, Homo sapiens
gcggagcctcgggaa

SEQ ID NO: 968349 - DNA, 15 bp, Homo sapiens
tgcggagcctcggga

SEQ ID NO: 968350 - DNA, 15 bp, Homo sapiens
gtgcggagcctcggg

SEQ ID NO: 968351 - DNA, 15 bp, Homo sapiens
ggtgcggagcctcgg

SEQ ID NO: 968352 - DNA, 15 bp, Homo sapiens
tggtgcggagcctcg

SEQ ID NO: 968353 - DNA, 15 bp, Homo sapiens
ctggtgcggagcctc

SEQ ID NO: 968354 - DNA, 15 bp, Homo sapiens
gctggtgcggagcct

SEQ ID NO: 968355 - DNA, 15 bp, Homo sapiens
ggctggtgcggagcc

SEQ ID NO: 968356 - DNA, 15 bp, Homo sapiens
cggctggtgcggagc

SEQ ID NO: 968357 - DNA, 15 bp, Homo sapiens
gcggctggtgcggag

SEQ ID NO: 968358 - DNA, 15 bp, Homo sapiens
cgcggctggtgcgga

SEQ ID NO: 968359 - DNA, 15 bp, Homo sapiens
gcgcggctggtgcgg

SEQ ID NO: 968360 - DNA, 15 bp, Homo sapiens
agcgcggctggtgcg

SEQ ID NO: 968361 - DNA, 15 bp, Homo sapiens
aagcgcggctggtgc

SEQ ID NO: 968362 - DNA, 15 bp, Homo sapiens
gaagcgcggctggtg

SEQ ID NO: 968363 - DNA, 15 bp, Homo sapiens
agaagcgcggctggt

SEQ ID NO: 968364 - DNA, 15 bp, Homo sapiens
cagaagcgcggctgg

SEQ ID NO: 968365 - DNA, 15 bp, Homo sapiens
acagaagcgcggctg

SEQ ID NO: 968366 - DNA, 15 bp, Homo sapiens
gacagaagcgcggct

SEQ ID NO: 968367 - DNA, 15 bp, Homo sapiens
ggacagaagcgcggc

SEQ ID NO: 968368 - DNA, 15 bp, Homo sapiens
cggacagaagcgcgg

SEQ ID NO: 968369 - DNA, 15 bp, Homo sapiens
gcggacagaagcgcg

SEQ ID NO: 968370 - DNA, 15 bp, Homo sapiens
ggcggacagaagcgc

SEQ ID NO: 968371 - DNA, 15 bp, Homo sapiens
aggcggacagaagcg

SEQ ID NO: 968372 - DNA, 15 bp, Homo sapiens
caggcggacagaagc

SEQ ID NO: 968373 - DNA, 15 bp, Homo sapiens
gcaggcggacagaag

SEQ ID NO: 968374 - DNA, 15 bp, Homo sapiens
tgcaggcggacagaa

SEQ ID NO: 968375 - DNA, 15 bp, Homo sapiens
ctgcaggcggacaga

SEQ ID NO: 968376 - DNA, 15 bp, Homo sapiens
cctgcaggcggacag

SEQ ID NO: 968377 - DNA, 15 bp, Homo sapiens
acctgcaggcggaca

SEQ ID NO: 968378 - DNA, 15 bp, Homo sapiens
tacctgcaggcggac

SEQ ID NO: 968379 - DNA, 15 bp, Homo sapiens
ctacctgcaggcgga

SEQ ID NO: 968380 - DNA, 15 bp, Homo sapiens
cctacctgcaggcgg

SEQ ID NO: 968381 - DNA, 15 bp, Homo sapiens
ccctacctgcaggcg

SEQ ID NO: 968382 - DNA, 15 bp, Homo sapiens
tccctacctgcaggc

SEQ ID NO: 968383 - DNA, 15 bp, Homo sapiens
ctccctacctgcagg

SEQ ID NO: 968384 - DNA, 15 bp, Homo sapiens
gctccctacctgcag

SEQ ID NO: 968385 - DNA, 15 bp, Homo sapiens
cgctccctacctgca

SEQ ID NO: 968386 - DNA, 15 bp, Homo sapiens
acgctccctacctgc

SEQ ID NO: 968387 - DNA, 15 bp, Homo sapiens
aacgctccctacctg

SEQ ID NO: 968388 - DNA, 15 bp, Homo sapiens
caacgctccctacct

SEQ ID NO: 968389 - DNA, 15 bp, Homo sapiens
acaacgctccctacc

SEQ ID NO: 968390 - DNA, 15 bp, Homo sapiens
aacaacgctccctac

SEQ ID NO: 968391 - DNA, 15 bp, Homo sapiens
gaacaacgctcccta

SEQ ID NO: 968392 - DNA, 15 bp, Homo sapiens
ggaacaacgctccct

SEQ ID NO: 968393 - DNA, 15 bp, Homo sapiens
aggaacaacgctccc

SEQ ID NO: 968394 - DNA, 15 bp, Homo sapiens
gaggaacaacgctcc

SEQ ID NO: 968395 - DNA, 15 bp, Homo sapiens
ggaggaacaacgctc

SEQ ID NO: 968396 - DNA, 15 bp, Homo sapiens
cggaggaacaacgct

SEQ ID NO: 968397 - DNA, 15 bp, Homo sapiens
gcggaggaacaacgc

SEQ ID NO: 968398 - DNA, 15 bp, Homo sapiens
cgcggaggaacaacg

SEQ ID NO: 968399 - DNA, 15 bp, Homo sapiens
ccgcggaggaacaac

SEQ ID NO: 968400 - DNA, 15 bp, Homo sapiens
cccgcggaggaacaa

SEQ ID NO: 968401 - DNA, 15 bp, Homo sapiens
acccgcggaggaaca

SEQ ID NO: 968402 - DNA, 15 bp, Homo sapiens
cacccgcggaggaac

SEQ ID NO: 968403 - DNA, 15 bp, Homo sapiens
gcacccgcggaggaa

SEQ ID NO: 968404 - DNA, 15 bp, Homo sapiens
ggcacccgcggagga

SEQ ID NO: 968405 - DNA, 15 bp, Homo sapiens
gggcacccgcggagg

SEQ ID NO: 968406 - DNA, 15 bp, Homo sapiens
tgggcacccgcggag

SEQ ID NO: 968407 - DNA, 15 bp, Homo sapiens
gtgggcacccgcgga

SEQ ID NO: 968408 - DNA, 15 bp, Homo sapiens
cgtgggcacccgcgg

SEQ ID NO: 968409 - DNA, 15 bp, Homo sapiens
ccgtgggcacccgcg

SEQ ID NO: 968410 - DNA, 15 bp, Homo sapiens
gccgtgggcacccgc

SEQ ID NO: 968411 - DNA, 15 bp, Homo sapiens
ggccgtgggcacccg

SEQ ID NO: 968412 - DNA, 15 bp, Homo sapiens
gggccgtgggcaccc

SEQ ID NO: 968413 - DNA, 15 bp, Homo sapiens
tgggccgtgggcacc

SEQ ID NO: 968414 - DNA, 15 bp, Homo sapiens
ctgggccgtgggcac

SEQ ID NO: 968415 - DNA, 15 bp, Homo sapiens
actgggccgtgggca

SEQ ID NO: 968416 - DNA, 15 bp, Homo sapiens
tactgggccgtgggc

SEQ ID NO: 968417 - DNA, 15 bp, Homo sapiens
atactgggccgtggg

SEQ ID NO: 968418 - DNA, 15 bp, Homo sapiens
gatactgggccgtgg

SEQ ID NO: 968419 - DNA, 15 bp, Homo sapiens
agatactgggccgtg

SEQ ID NO: 968420 - DNA, 15 bp, Homo sapiens
gagatactgggccgt

SEQ ID NO: 968421 - DNA, 15 bp, Homo sapiens
agagatactgggccg

SEQ ID NO: 968422 - DNA, 15 bp, Homo sapiens
cagagatactgggcc

SEQ ID NO: 968423 - DNA, 15 bp, Homo sapiens
ccagagatactgggc

SEQ ID NO: 968424 - DNA, 15 bp, Homo sapiens
gccagagatactggg

SEQ ID NO: 968425 - DNA, 15 bp, Homo sapiens
agccagagatactgg

SEQ ID NO: 968426 - DNA, 15 bp, Homo sapiens
tagccagagatactg

SEQ ID NO: 968427 - DNA, 15 bp, Homo sapiens
ctagccagagatact

SEQ ID NO: 968428 - DNA, 15 bp, Homo sapiens
gctagccagagatac

SEQ ID NO: 968429 - DNA, 15 bp, Homo sapiens
agctagccagagata

SEQ ID NO: 968430 - DNA, 15 bp, Homo sapiens
gagctagccagagat

SEQ ID NO: 968431 - DNA, 15 bp, Homo sapiens
cgagctagccagaga

SEQ ID NO: 968432 - DNA, 15 bp, Homo sapiens
gcgagctagccagag

SEQ ID NO: 968433 - DNA, 15 bp, Homo sapiens
agcgagctagccaga

SEQ ID NO: 968434 - DNA, 15 bp, Homo sapiens
cagcgagctagccag

SEQ ID NO: 968435 - DNA, 15 bp, Homo sapiens
ccagcgagctagcca

SEQ ID NO: 968436 - DNA, 15 bp, Homo sapiens
cccagcgagctagcc

SEQ ID NO: 968437 - DNA, 15 bp, Homo sapiens
gcccagcgagctagc

SEQ ID NO: 968438 - DNA, 15 bp, Homo sapiens
tgcccagcgagctag

SEQ ID NO: 968439 - DNA, 15 bp, Homo sapiens
gtgcccagcgagcta

SEQ ID NO: 968440 - DNA, 15 bp, Homo sapiens
agtgcccagcgagct

SEQ ID NO: 968441 - DNA, 15 bp, Homo sapiens
aagtgcccagcgagc

SEQ ID NO: 968442 - DNA, 15 bp, Homo sapiens
aaagtgcccagcgag

SEQ ID NO: 968443 - DNA, 15 bp, Homo sapiens
taaagtgcccagcga

SEQ ID NO: 968444 - DNA, 15 bp, Homo sapiens
ctaaagtgcccagcg

SEQ ID NO: 968445 - DNA, 15 bp, Homo sapiens
cctaaagtgcccagc

SEQ ID NO: 968446 - DNA, 15 bp, Homo sapiens
tcctaaagtgcccag

SEQ ID NO: 968447 - DNA, 15 bp, Homo sapiens
gtcctaaagtgccca

SEQ ID NO: 968448 - DNA, 15 bp, Homo sapiens
cgtcctaaagtgccc

SEQ ID NO: 968449 - DNA, 15 bp, Homo sapiens
ccgtcctaaagtgcc

SEQ ID NO: 968450 - DNA, 15 bp, Homo sapiens
tccgtcctaaagtgc

SEQ ID NO: 968451 - DNA, 15 bp, Homo sapiens
ctccgtcctaaagtg

SEQ ID NO: 968452 - DNA, 15 bp, Homo sapiens
cctccgtcctaaagt

SEQ ID NO: 968453 - DNA, 15 bp, Homo sapiens
ccctccgtcctaaag

SEQ ID NO: 968454 - DNA, 15 bp, Homo sapiens
accctccgtcctaaa

SEQ ID NO: 968455 - DNA, 15 bp, Homo sapiens
gaccctccgtcctaa

SEQ ID NO: 968456 - DNA, 15 bp, Homo sapiens
agaccctccgtccta

SEQ ID NO: 968457 - DNA, 15 bp, Homo sapiens
gagaccctccgtcct

SEQ ID NO: 968458 - DNA, 15 bp, Homo sapiens
agagaccctccgtcc

SEQ ID NO: 968459 - DNA, 15 bp, Homo sapiens
tagagaccctccgtc

SEQ ID NO: 968460 - DNA, 15 bp, Homo sapiens
gtagagaccctccgt

SEQ ID NO: 968461 - DNA, 15 bp, Homo sapiens
tgtagagaccctccg

SEQ ID NO: 968462 - DNA, 15 bp, Homo sapiens
gtgtagagaccctcc

SEQ ID NO: 968463 - DNA, 15 bp, Homo sapiens
ggtgtagagaccctc

SEQ ID NO: 968464 - DNA, 15 bp, Homo sapiens
gggtgtagagaccct

SEQ ID NO: 968465 - DNA, 15 bp, Homo sapiens
agggtgtagagaccc

SEQ ID NO: 968466 - DNA, 15 bp, Homo sapiens
aagggtgtagagacc

SEQ ID NO: 968467 - DNA, 15 bp, Homo sapiens
aaagggtgtagagac

SEQ ID NO: 968468 - DNA, 15 bp, Homo sapiens
gaaagggtgtagaga

SEQ ID NO: 968469 - DNA, 15 bp, Homo sapiens
agaaagggtgtagag

SEQ ID NO: 968470 - DNA, 15 bp, Homo sapiens
aagaaagggtgtaga

SEQ ID NO: 968471 - DNA, 15 bp, Homo sapiens
aaagaaagggtgtag

SEQ ID NO: 968472 - DNA, 15 bp, Homo sapiens
caaagaaagggtgta

SEQ ID NO: 968473 - DNA, 15 bp, Homo sapiens
ccaaagaaagggtgt

SEQ ID NO: 968474 - DNA, 15 bp, Homo sapiens
cccaaagaaagggtg

SEQ ID NO: 968475 - DNA, 15 bp, Homo sapiens
tcccaaagaaagggt

SEQ ID NO: 968476 - DNA, 15 bp, Homo sapiens
atcccaaagaaaggg

SEQ ID NO: 968477 - DNA, 15 bp, Homo sapiens
catcccaaagaaagg

SEQ ID NO: 968478 - DNA, 15 bp, Homo sapiens
ccatcccaaagaaag

SEQ ID NO: 968479 - DNA, 15 bp, Homo sapiens
tccatcccaaagaaa

SEQ ID NO: 968480 - DNA, 15 bp, Homo sapiens
ctccatcccaaagaa

SEQ ID NO: 968481 - DNA, 15 bp, Homo sapiens
tctccatcccaaaga

SEQ ID NO: 968482 - DNA, 15 bp, Homo sapiens
ctctccatcccaaag

SEQ ID NO: 968483 - DNA, 15 bp, Homo sapiens
tctctccatcccaaa

SEQ ID NO: 968484 - DNA, 15 bp, Homo sapiens
ctctctccatcccaa

SEQ ID NO: 968485 - DNA, 15 bp, Homo sapiens
cctctctccatccca

SEQ ID NO: 968486 - DNA, 15 bp, Homo sapiens
tcctctctccatccc

SEQ ID NO: 968487 - DNA, 15 bp, Homo sapiens
ctcctctctccatcc

SEQ ID NO: 968488 - DNA, 15 bp, Homo sapiens
tctcctctctccatc

SEQ ID NO: 968489 - DNA, 15 bp, Homo sapiens
ttctcctctctccat

SEQ ID NO: 968490 - DNA, 15 bp, Homo sapiens
cttctcctctctcca

SEQ ID NO: 968491 - DNA, 15 bp, Homo sapiens
ccttctcctctctcc

SEQ ID NO: 968492 - DNA, 15 bp, Homo sapiens
cccttctcctctctc

SEQ ID NO: 968493 - DNA, 15 bp, Homo sapiens
tcccttctcctctct

SEQ ID NO: 968494 - DNA, 15 bp, Homo sapiens
ttcccttctcctctc

SEQ ID NO: 968495 - DNA, 15 bp, Homo sapiens
tttcccttctcctct

SEQ ID NO: 968496 - DNA, 15 bp, Homo sapiens
ctttcccttctcctc

SEQ ID NO: 968497 - DNA, 15 bp, Homo sapiens
cctttcccttctcct

SEQ ID NO: 968498 - DNA, 15 bp, Homo sapiens
ccctttcccttctcc

SEQ ID NO: 968499 - DNA, 15 bp, Homo sapiens
tccctttcccttctc

SEQ ID NO: 968500 - DNA, 15 bp, Homo sapiens
ttccctttcccttct

SEQ ID NO: 968501 - DNA, 15 bp, Homo sapiens
gttccctttcccttc

SEQ ID NO: 968502 - DNA, 15 bp, Homo sapiens
cgttccctttccctt

SEQ ID NO: 968503 - DNA, 15 bp, Homo sapiens
gcgttccctttccct

SEQ ID NO: 968504 - DNA, 15 bp, Homo sapiens
cgcgttccctttccc

SEQ ID NO: 968505 - DNA, 15 bp, Homo sapiens
tcgcgttccctttcc

SEQ ID NO: 968506 - DNA, 15 bp, Homo sapiens
atcgcgttccctttc

SEQ ID NO: 968507 - DNA, 15 bp, Homo sapiens
catcgcgttcccttt

SEQ ID NO: 968508 - DNA, 15 bp, Homo sapiens
ccatcgcgttccctt

SEQ ID NO: 968509 - DNA, 15 bp, Homo sapiens
accatcgcgttccct

SEQ ID NO: 968510 - DNA, 15 bp, Homo sapiens
gaccatcgcgttccc

SEQ ID NO: 968511 - DNA, 15 bp, Homo sapiens
agaccatcgcgttcc

SEQ ID NO: 968512 - DNA, 15 bp, Homo sapiens
tagaccatcgcgttc

SEQ ID NO: 968513 - DNA, 15 bp, Homo sapiens
ctagaccatcgcgtt

SEQ ID NO: 968514 - DNA, 15 bp, Homo sapiens
cctagaccatcgcgt

SEQ ID NO: 968515 - DNA, 15 bp, Homo sapiens
ccctagaccatcgcg

SEQ ID NO: 968516 - DNA, 15 bp, Homo sapiens
cccctagaccatcgc

SEQ ID NO: 968517 - DNA, 15 bp, Homo sapiens
ccccctagaccatcg

SEQ ID NO: 968518 - DNA, 15 bp, Homo sapiens
gccccctagaccatc

SEQ ID NO: 968519 - DNA, 15 bp, Homo sapiens
tgccccctagaccat

SEQ ID NO: 968520 - DNA, 15 bp, Homo sapiens
ctgccccctagacca

SEQ ID NO: 968521 - DNA, 15 bp, Homo sapiens
actgccccctagacc

SEQ ID NO: 968522 - DNA, 15 bp, Homo sapiens
tactgccccctagac

SEQ ID NO: 968523 - DNA, 15 bp, Homo sapiens
ctactgccccctaga

SEQ ID NO: 968524 - DNA, 15 bp, Homo sapiens
tctactgccccctag

SEQ ID NO: 968525 - DNA, 15 bp, Homo sapiens
ctctactgcccccta

SEQ ID NO: 968526 - DNA, 15 bp, Homo sapiens
gctctactgccccct

SEQ ID NO: 968527 - DNA, 15 bp, Homo sapiens
ggctctactgccccc

SEQ ID NO: 968528 - DNA, 15 bp, Homo sapiens
tggctctactgcccc

SEQ ID NO: 968529 - DNA, 15 bp, Homo sapiens
ttggctctactgccc

SEQ ID NO: 968530 - DNA, 15 bp, Homo sapiens
attggctctactgcc

SEQ ID NO: 968531 - DNA, 15 bp, Homo sapiens
aattggctctactgc

SEQ ID NO: 968532 - DNA, 15 bp, Homo sapiens
taattggctctactg

SEQ ID NO: 968533 - DNA, 15 bp, Homo sapiens
gtaattggctctact

SEQ ID NO: 968534 - DNA, 15 bp, Homo sapiens
ggtaattggctctac

SEQ ID NO: 968535 - DNA, 15 bp, Homo sapiens
aggtaattggctcta

SEQ ID NO: 968536 - DNA, 15 bp, Homo sapiens
caggtaattggctct

SEQ ID NO: 968537 - DNA, 15 bp, Homo sapiens
acaggtaattggctc

SEQ ID NO: 968538 - DNA, 15 bp, Homo sapiens
aacaggtaattggct

SEQ ID NO: 968539 - DNA, 15 bp, Homo sapiens
caacaggtaattggc

SEQ ID NO: 968540 - DNA, 15 bp, Homo sapiens
ccaacaggtaattgg

SEQ ID NO: 968541 - DNA, 15 bp, Homo sapiens
cccaacaggtaattg

SEQ ID NO: 968542 - DNA, 15 bp, Homo sapiens
ccccaacaggtaatt

SEQ ID NO: 968543 - DNA, 15 bp, Homo sapiens
accccaacaggtaat

SEQ ID NO: 968544 - DNA, 15 bp, Homo sapiens
aaccccaacaggtaa

SEQ ID NO: 968545 - DNA, 15 bp, Homo sapiens
taaccccaacaggta

SEQ ID NO: 968546 - DNA, 15 bp, Homo sapiens
ttaaccccaacaggt

SEQ ID NO: 968547 - DNA, 15 bp, Homo sapiens
attaaccccaacagg

SEQ ID NO: 968548 - DNA, 15 bp, Homo sapiens
tattaaccccaacag

SEQ ID NO: 968549 - DNA, 15 bp, Homo sapiens
ttattaaccccaaca

SEQ ID NO: 968550 - DNA, 15 bp, Homo sapiens
cttattaaccccaac

SEQ ID NO: 968551 - DNA, 15 bp, Homo sapiens
tcttattaaccccaa

SEQ ID NO: 968552 - DNA, 15 bp, Homo sapiens
ttcttattaacccca

SEQ ID NO: 968553 - DNA, 15 bp, Homo sapiens
gttcttattaacccc

SEQ ID NO: 968554 - DNA, 15 bp, Homo sapiens
tgttcttattaaccc

SEQ ID NO: 968555 - DNA, 15 bp, Homo sapiens
ctgttcttattaacc

SEQ ID NO: 968556 - DNA, 15 bp, Homo sapiens
cctgttcttattaac

SEQ ID NO: 968557 - DNA, 15 bp, Homo sapiens
gcctgttcttattaa

SEQ ID NO: 968558 - DNA, 15 bp, Homo sapiens
tgcctgttcttatta

SEQ ID NO: 968559 - DNA, 15 bp, Homo sapiens
ttgcctgttcttatt

SEQ ID NO: 968560 - DNA, 15 bp, Homo sapiens
attgcctgttcttat

SEQ ID NO: 968561 - DNA, 15 bp, Homo sapiens
cattgcctgttctta

SEQ ID NO: 968562 - DNA, 15 bp, Homo sapiens
gcattgcctgttctt

SEQ ID NO: 968563 - DNA, 15 bp, Homo sapiens
tgcattgcctgttct

SEQ ID NO: 968564 - DNA, 15 bp, Homo sapiens
atgcattgcctgttc

SEQ ID NO: 968565 - DNA, 15 bp, Homo sapiens
gatgcattgcctgtt

SEQ ID NO: 968566 - DNA, 15 bp, Homo sapiens
agatgcattgcctgt

SEQ ID NO: 968567 - DNA, 15 bp, Homo sapiens
cagatgcattgcctg

SEQ ID NO: 968568 - DNA, 15 bp, Homo sapiens
ccagatgcattgcct

SEQ ID NO: 968569 - DNA, 15 bp, Homo sapiens
gccagatgcattgcc

SEQ ID NO: 968570 - DNA, 15 bp, Homo sapiens
ggccagatgcattgc

SEQ ID NO: 968571 - DNA, 15 bp, Homo sapiens
aggccagatgcattg

SEQ ID NO: 968572 - DNA, 15 bp, Homo sapiens
aaggccagatgcatt

SEQ ID NO: 968573 - DNA, 15 bp, Homo sapiens
gaaggccagatgcat

SEQ ID NO: 968574 - DNA, 15 bp, Homo sapiens
ggaaggccagatgca

SEQ ID NO: 968575 - DNA, 15 bp, Homo sapiens
aggaaggccagatgc

SEQ ID NO: 968576 - DNA, 15 bp, Homo sapiens
gaggaaggccagatg

SEQ ID NO: 968577 - DNA, 15 bp, Homo sapiens
ggaggaaggccagat

SEQ ID NO: 968578 - DNA, 15 bp, Homo sapiens
tggaggaaggccaga

SEQ ID NO: 968579 - DNA, 15 bp, Homo sapiens
ctggaggaaggccag

SEQ ID NO: 968580 - DNA, 15 bp, Homo sapiens
cctggaggaaggcca

SEQ ID NO: 968581 - DNA, 15 bp, Homo sapiens
gcctggaggaaggcc

SEQ ID NO: 968582 - DNA, 15 bp, Homo sapiens
cgcctggaggaaggc

SEQ ID NO: 968583 - DNA, 15 bp, Homo sapiens
gcgcctggaggaagg

SEQ ID NO: 968584 - DNA, 15 bp, Homo sapiens
cgcgcctggaggaag

SEQ ID NO: 968585 - DNA, 15 bp, Homo sapiens
tcgcgcctggaggaa

SEQ ID NO: 968586 - DNA, 15 bp, Homo sapiens
atcgcgcctggagga

SEQ ID NO: 968587 - DNA, 15 bp, Homo sapiens
aatcgcgcctggagg

SEQ ID NO: 968588 - DNA, 15 bp, Homo sapiens
gaatcgcgcctggag

SEQ ID NO: 968589 - DNA, 15 bp, Homo sapiens
tgaatcgcgcctgga

SEQ ID NO: 968590 - DNA, 15 bp, Homo sapiens
ctgaatcgcgcctgg

SEQ ID NO: 968591 - DNA, 15 bp, Homo sapiens
actgaatcgcgcctg

SEQ ID NO: 968592 - DNA, 15 bp, Homo sapiens
aactgaatcgcgcct

SEQ ID NO: 968593 - DNA, 15 bp, Homo sapiens
aaactgaatcgcgcc

SEQ ID NO: 968594 - DNA, 15 bp, Homo sapiens
aaaactgaatcgcgc

SEQ ID NO: 968595 - DNA, 15 bp, Homo sapiens
caaaactgaatcgcg

SEQ ID NO: 968596 - DNA, 15 bp, Homo sapiens
gcaaaactgaatcgc

SEQ ID NO: 968597 - DNA, 15 bp, Homo sapiens
agcaaaactgaatcg

SEQ ID NO: 968598 - DNA, 15 bp, Homo sapiens
gagcaaaactgaatc

SEQ ID NO: 968599 - DNA, 15 bp, Homo sapiens
agagcaaaactgaat

SEQ ID NO: 968600 - DNA, 15 bp, Homo sapiens
tagagcaaaactgaa

SEQ ID NO: 968601 - DNA, 15 bp, Homo sapiens
ttagagcaaaactga

SEQ ID NO: 968602 - DNA, 15 bp, Homo sapiens
tttagagcaaaactg

SEQ ID NO: 968603 - DNA, 15 bp, Homo sapiens
ttttagagcaaaact

SEQ ID NO: 968604 - DNA, 15 bp, Homo sapiens
tttttagagcaaaac

SEQ ID NO: 968605 - DNA, 15 bp, Homo sapiens
atttttagagcaaaa

SEQ ID NO: 968606 - DNA, 15 bp, Homo sapiens
tatttttagagcaaa

SEQ ID NO: 968607 - DNA, 15 bp, Homo sapiens
ttatttttagagcaa

SEQ ID NO: 968608 - DNA, 15 bp, Homo sapiens
attatttttagagca

SEQ ID NO: 968609 - DNA, 15 bp, Homo sapiens
aattatttttagagc

SEQ ID NO: 968610 - DNA, 15 bp, Homo sapiens
aaattatttttagag

SEQ ID NO: 968611 - DNA, 15 bp, Homo sapiens
taaattatttttaga

SEQ ID NO: 968612 - DNA, 15 bp, Homo sapiens
ataaattatttttag

SEQ ID NO: 968613 - DNA, 15 bp, Homo sapiens
tataaattattttta

SEQ ID NO: 968614 - DNA, 15 bp, Homo sapiens
gtataaattattttt

SEQ ID NO: 968615 - DNA, 15 bp, Homo sapiens
ggtataaattatttt

SEQ ID NO: 968616 - DNA, 15 bp, Homo sapiens
aggtataaattattt

SEQ ID NO: 968617 - DNA, 15 bp, Homo sapiens
gaggtataaattatt

SEQ ID NO: 968618 - DNA, 15 bp, Homo sapiens
agaggtataaattat

SEQ ID NO: 968619 - DNA, 15 bp, Homo sapiens
tagaggtataaatta

SEQ ID NO: 968620 - DNA, 15 bp, Homo sapiens
ttagaggtataaatt

SEQ ID NO: 968621 - DNA, 15 bp, Homo sapiens
tttagaggtataaat

SEQ ID NO: 968622 - DNA, 15 bp, Homo sapiens
ttttagaggtataaa

SEQ ID NO: 968623 - DNA, 15 bp, Homo sapiens
tttttagaggtataa

SEQ ID NO: 968624 - DNA, 15 bp, Homo sapiens
atttttagaggtata

SEQ ID NO: 968625 - DNA, 15 bp, Homo sapiens
tatttttagaggtat

SEQ ID NO: 968626 - DNA, 15 bp, Homo sapiens
ttatttttagaggta

SEQ ID NO: 968627 - DNA, 15 bp, Homo sapiens
tttatttttagaggt

SEQ ID NO: 968628 - DNA, 15 bp, Homo sapiens
atttatttttagagg

SEQ ID NO: 968629 - DNA, 15 bp, Homo sapiens
tatttatttttagag

SEQ ID NO: 968630 - DNA, 15 bp, Homo sapiens
ttatttatttttaga

SEQ ID NO: 968631 - DNA, 15 bp, Homo sapiens
cttatttatttttag

SEQ ID NO: 968632 - DNA, 15 bp, Homo sapiens
tcttatttattttta

SEQ ID NO: 968633 - DNA, 15 bp, Homo sapiens
atcttatttattttt

SEQ ID NO: 968634 - DNA, 15 bp, Homo sapiens
tatcttatttatttt

SEQ ID NO: 968635 - DNA, 15 bp, Homo sapiens
ctatcttatttattt

SEQ ID NO: 968636 - DNA, 15 bp, Homo sapiens
cctatcttatttatt

SEQ ID NO: 968637 - DNA, 15 bp, Homo sapiens
acctatcttatttat

SEQ ID NO: 968638 - DNA, 15 bp, Homo sapiens
tacctatcttattta

SEQ ID NO: 968639 - DNA, 15 bp, Homo sapiens
ctacctatcttattt

SEQ ID NO: 968640 - DNA, 15 bp, Homo sapiens
actacctatcttatt

SEQ ID NO: 968641 - DNA, 15 bp, Homo sapiens
tactacctatcttat

SEQ ID NO: 968642 - DNA, 15 bp, Homo sapiens
atactacctatctta

SEQ ID NO: 968643 - DNA, 15 bp, Homo sapiens
tatactacctatctt

SEQ ID NO: 968644 - DNA, 15 bp, Homo sapiens
ctatactacctatct

SEQ ID NO: 968645 - DNA, 15 bp, Homo sapiens
cctatactacctatc

SEQ ID NO: 968646 - DNA, 15 bp, Homo sapiens
tcctatactacctat

SEQ ID NO: 968647 - DNA, 15 bp, Homo sapiens
atcctatactaccta

SEQ ID NO: 968648 - DNA, 15 bp, Homo sapiens
tatcctatactacct

SEQ ID NO: 968649 - DNA, 15 bp, Homo sapiens
ctatcctatactacc

SEQ ID NO: 968650 - DNA, 15 bp, Homo sapiens
cctatcctatactac

SEQ ID NO: 968651 - DNA, 15 bp, Homo sapiens
acctatcctatacta

SEQ ID NO: 968652 - DNA, 15 bp, Homo sapiens
tacctatcctatact

SEQ ID NO: 968653 - DNA, 15 bp, Homo sapiens
ctacctatcctatac

SEQ ID NO: 968654 - DNA, 15 bp, Homo sapiens
actacctatcctata

SEQ ID NO: 968655 - DNA, 15 bp, Homo sapiens
gactacctatcctat

SEQ ID NO: 968656 - DNA, 15 bp, Homo sapiens
tgactacctatccta

SEQ ID NO: 968657 - DNA, 15 bp, Homo sapiens
atgactacctatcct

SEQ ID NO: 968658 - DNA, 15 bp, Homo sapiens
aatgactacctatcc

SEQ ID NO: 968659 - DNA, 15 bp, Homo sapiens
gaatgactacctatc

SEQ ID NO: 968660 - DNA, 15 bp, Homo sapiens
agaatgactacctat

SEQ ID NO: 968661 - DNA, 15 bp, Homo sapiens
aagaatgactaccta

SEQ ID NO: 968662 - DNA, 15 bp, Homo sapiens
taagaatgactacct

SEQ ID NO: 968663 - DNA, 15 bp, Homo sapiens
ataagaatgactacc

SEQ ID NO: 968664 - DNA, 15 bp, Homo sapiens
cataagaatgactac

SEQ ID NO: 968665 - DNA, 15 bp, Homo sapiens
gcataagaatgacta

SEQ ID NO: 968666 - DNA, 15 bp, Homo sapiens
cgcataagaatgact

SEQ ID NO: 968667 - DNA, 15 bp, Homo sapiens
tcgcataagaatgac

SEQ ID NO: 968668 - DNA, 15 bp, Homo sapiens
gtcgcataagaatga

SEQ ID NO: 968669 - DNA, 15 bp, Homo sapiens
agtcgcataagaatg

SEQ ID NO: 968670 - DNA, 15 bp, Homo sapiens
cagtcgcataagaat

SEQ ID NO: 968671 - DNA, 15 bp, Homo sapiens
acagtcgcataagaa

SEQ ID NO: 968672 - DNA, 15 bp, Homo sapiens
cacagtcgcataaga

SEQ ID NO: 968673 - DNA, 15 bp, Homo sapiens
acacagtcgcataag

SEQ ID NO: 968674 - DNA, 15 bp, Homo sapiens
cacacagtcgcataa

SEQ ID NO: 968675 - DNA, 15 bp, Homo sapiens
acacacagtcgcata

SEQ ID NO: 968676 - DNA, 15 bp, Homo sapiens
aacacacagtcgcat

SEQ ID NO: 968677 - DNA, 15 bp, Homo sapiens
gaacacacagtcgca

SEQ ID NO: 968678 - DNA, 15 bp, Homo sapiens
tgaacacacagtcgc

SEQ ID NO: 968679 - DNA, 15 bp, Homo sapiens
ctgaacacacagtcg

SEQ ID NO: 968680 - DNA, 15 bp, Homo sapiens
tctgaacacacagtc

SEQ ID NO: 968681 - DNA, 15 bp, Homo sapiens
ttctgaacacacagt

SEQ ID NO: 968682 - DNA, 15 bp, Homo sapiens
attctgaacacacag

SEQ ID NO: 968683 - DNA, 15 bp, Homo sapiens
tattctgaacacaca

SEQ ID NO: 968684 - DNA, 15 bp, Homo sapiens
atattctgaacacac

SEQ ID NO: 968685 - DNA, 15 bp, Homo sapiens
tatattctgaacaca

SEQ ID NO: 968686 - DNA, 15 bp, Homo sapiens
ctatattctgaacac

SEQ ID NO: 968687 - DNA, 15 bp, Homo sapiens
gctatattctgaaca

SEQ ID NO: 968688 - DNA, 15 bp, Homo sapiens
agctatattctgaac

SEQ ID NO: 968689 - DNA, 15 bp, Homo sapiens
gagctatattctgaa

SEQ ID NO: 968690 - DNA, 15 bp, Homo sapiens
agagctatattctga

SEQ ID NO: 968691 - DNA, 15 bp, Homo sapiens
cagagctatattctg

SEQ ID NO: 968692 - DNA, 15 bp, Homo sapiens
tcagagctatattct

SEQ ID NO: 968693 - DNA, 15 bp, Homo sapiens
atcagagctatattc

SEQ ID NO: 968694 - DNA, 15 bp, Homo sapiens
catcagagctatatt

SEQ ID NO: 968695 - DNA, 15 bp, Homo sapiens
gcatcagagctatat

SEQ ID NO: 968696 - DNA, 15 bp, Homo sapiens
agcatcagagctata

SEQ ID NO: 968697 - DNA, 15 bp, Homo sapiens
tagcatcagagctat

SEQ ID NO: 968698 - DNA, 15 bp, Homo sapiens
ctagcatcagagcta

SEQ ID NO: 968699 - DNA, 15 bp, Homo sapiens
cctagcatcagagct

SEQ ID NO: 968700 - DNA, 15 bp, Homo sapiens
gcctagcatcagagc

SEQ ID NO: 968701 - DNA, 15 bp, Homo sapiens
agcctagcatcagag

SEQ ID NO: 968702 - DNA, 15 bp, Homo sapiens
cagcctagcatcaga

SEQ ID NO: 968703 - DNA, 15 bp, Homo sapiens
ccagcctagcatcag

SEQ ID NO: 968704 - DNA, 15 bp, Homo sapiens
tccagcctagcatca

SEQ ID NO: 968705 - DNA, 15 bp, Homo sapiens
ctccagcctagcatc

SEQ ID NO: 968706 - DNA, 15 bp, Homo sapiens
cctccagcctagcat

SEQ ID NO: 968707 - DNA, 15 bp, Homo sapiens
acctccagcctagca

SEQ ID NO: 968708 - DNA, 15 bp, Homo sapiens
gacctccagcctagc

SEQ ID NO: 968709 - DNA, 15 bp, Homo sapiens
agacctccagcctag

SEQ ID NO: 968710 - DNA, 15 bp, Homo sapiens
cagacctccagccta

SEQ ID NO: 968711 - DNA, 15 bp, Homo sapiens
ccagacctccagcct

SEQ ID NO: 968712 - DNA, 15 bp, Homo sapiens
tccagacctccagcc

SEQ ID NO: 968713 - DNA, 15 bp, Homo sapiens
gtccagacctccagc

SEQ ID NO: 968714 - DNA, 15 bp, Homo sapiens
tgtccagacctccag

SEQ ID NO: 968715 - DNA, 15 bp, Homo sapiens
gtgtccagacctcca

SEQ ID NO: 968716 - DNA, 15 bp, Homo sapiens
cgtgtccagacctcc

SEQ ID NO: 968717 - DNA, 15 bp, Homo sapiens
ccgtgtccagacctc

SEQ ID NO: 968718 - DNA, 15 bp, Homo sapiens
cccgtgtccagacct

SEQ ID NO: 968719 - DNA, 15 bp, Homo sapiens
acccgtgtccagacc

SEQ ID NO: 968720 - DNA, 15 bp, Homo sapiens
gacccgtgtccagac

SEQ ID NO: 968721 - DNA, 15 bp, Homo sapiens
ggacccgtgtccaga

SEQ ID NO: 968722 - DNA, 15 bp, Homo sapiens
tggacccgtgtccag

SEQ ID NO: 968723 - DNA, 15 bp, Homo sapiens
ttggacccgtgtcca

SEQ ID NO: 968724 - DNA, 15 bp, Homo sapiens
cttggacccgtgtcc

SEQ ID NO: 968725 - DNA, 15 bp, Homo sapiens
acttggacccgtgtc

SEQ ID NO: 968726 - DNA, 15 bp, Homo sapiens
gacttggacccgtgt

SEQ ID NO: 968727 - DNA, 15 bp, Homo sapiens
ggacttggacccgtg

SEQ ID NO: 968728 - DNA, 15 bp, Homo sapiens
tggacttggacccgt

SEQ ID NO: 968729 - DNA, 15 bp, Homo sapiens
gtggacttggacccg

SEQ ID NO: 968730 - DNA, 15 bp, Homo sapiens
ggtggacttggaccc

SEQ ID NO: 968731 - DNA, 15 bp, Homo sapiens
cggtggacttggacc

SEQ ID NO: 968732 - DNA, 15 bp, Homo sapiens
gcggtggacttggac

SEQ ID NO: 968733 - DNA, 15 bp, Homo sapiens
ggcggtggacttgga

SEQ ID NO: 968734 - DNA, 15 bp, Homo sapiens
tggcggtggacttgg

SEQ ID NO: 968735 - DNA, 15 bp, Homo sapiens
ctggcggtggacttg

SEQ ID NO: 968736 - DNA, 15 bp, Homo sapiens
gctggcggtggactt

SEQ ID NO: 968737 - DNA, 15 bp, Homo sapiens
agctggcggtggact

SEQ ID NO: 968738 - DNA, 15 bp, Homo sapiens
cagctggcggtggac

SEQ ID NO: 968739 - DNA, 15 bp, Homo sapiens
gcagctggcggtgga

SEQ ID NO: 968740 - DNA, 15 bp, Homo sapiens
agcagctggcggtgg

SEQ ID NO: 968741 - DNA, 15 bp, Homo sapiens
aagcagctggcggtg

SEQ ID NO: 968742 - DNA, 15 bp, Homo sapiens
caagcagctggcggt

SEQ ID NO: 968743 - DNA, 15 bp, Homo sapiens
gcaagcagctggcgg

SEQ ID NO: 968744 - DNA, 15 bp, Homo sapiens
agcaagcagctggcg

SEQ ID NO: 968745 - DNA, 15 bp, Homo sapiens
tagcaagcagctggc

SEQ ID NO: 968746 - DNA, 15 bp, Homo sapiens
ctagcaagcagctgg

SEQ ID NO: 968747 - DNA, 15 bp, Homo sapiens
actagcaagcagctg

SEQ ID NO: 968748 - DNA, 15 bp, Homo sapiens
tactagcaagcagct

SEQ ID NO: 968749 - DNA, 15 bp, Homo sapiens
ttactagcaagcagc

SEQ ID NO: 968750 - DNA, 15 bp, Homo sapiens
gttactagcaagcag

SEQ ID NO: 968751 - DNA, 15 bp, Homo sapiens
tgttactagcaagca

SEQ ID NO: 968752 - DNA, 15 bp, Homo sapiens
atgttactagcaagc

SEQ ID NO: 968753 - DNA, 15 bp, Homo sapiens
catgttactagcaag

SEQ ID NO: 968754 - DNA, 15 bp, Homo sapiens
tcatgttactagcaa

SEQ ID NO: 968755 - DNA, 15 bp, Homo sapiens
gtcatgttactagca

SEQ ID NO: 968756 - DNA, 15 bp, Homo sapiens
agtcatgttactagc

SEQ ID NO: 968757 - DNA, 15 bp, Homo sapiens
aagtcatgttactag

SEQ ID NO: 968758 - DNA, 15 bp, Homo sapiens
caagtcatgttacta

SEQ ID NO: 968759 - DNA, 15 bp, Homo sapiens
acaagtcatgttact

SEQ ID NO: 968760 - DNA, 15 bp, Homo sapiens
cacaagtcatgttac

SEQ ID NO: 968761 - DNA, 15 bp, Homo sapiens
acacaagtcatgtta

SEQ ID NO: 968762 - DNA, 15 bp, Homo sapiens
tacacaagtcatgtt

SEQ ID NO: 968763 - DNA, 15 bp, Homo sapiens
ttacacaagtcatgt

SEQ ID NO: 968764 - DNA, 15 bp, Homo sapiens
cttacacaagtcatg

SEQ ID NO: 968765 - DNA, 15 bp, Homo sapiens
acttacacaagtcat

SEQ ID NO: 968766 - DNA, 15 bp, Homo sapiens
aacttacacaagtca

SEQ ID NO: 968767 - DNA, 15 bp, Homo sapiens
taacttacacaagtc

SEQ ID NO: 968768 - DNA, 15 bp, Homo sapiens
ataacttacacaagt

SEQ ID NO: 968769 - DNA, 15 bp, Homo sapiens
gataacttacacaag

SEQ ID NO: 968770 - DNA, 15 bp, Homo sapiens
ggataacttacacaa

SEQ ID NO: 968771 - DNA, 15 bp, Homo sapiens
gggataacttacaca

SEQ ID NO: 968772 - DNA, 15 bp, Homo sapiens
tgggataacttacac

SEQ ID NO: 968773 - DNA, 15 bp, Homo sapiens
ctgggataacttaca

SEQ ID NO: 968774 - DNA, 15 bp, Homo sapiens
gctgggataacttac

SEQ ID NO: 968775 - DNA, 15 bp, Homo sapiens
agctgggataactta

SEQ ID NO: 968776 - DNA, 15 bp, Homo sapiens
cagctgggataactt

SEQ ID NO: 968777 - DNA, 15 bp, Homo sapiens
gcagctgggataact

SEQ ID NO: 968778 - DNA, 15 bp, Homo sapiens
tgcagctgggataac

SEQ ID NO: 968779 - DNA, 15 bp, Homo sapiens
ctgcagctgggataa

SEQ ID NO: 968780 - DNA, 15 bp, Homo sapiens
gctgcagctgggata

SEQ ID NO: 968781 - DNA, 15 bp, Homo sapiens
tgctgcagctgggat

SEQ ID NO: 968782 - DNA, 15 bp, Homo sapiens
atgctgcagctggga

SEQ ID NO: 968783 - DNA, 15 bp, Homo sapiens
gatgctgcagctggg

SEQ ID NO: 968784 - DNA, 15 bp, Homo sapiens
agatgctgcagctgg

SEQ ID NO: 968785 - DNA, 15 bp, Homo sapiens
tagatgctgcagctg

SEQ ID NO: 968786 - DNA, 15 bp, Homo sapiens
ttagatgctgcagct

SEQ ID NO: 968787 - DNA, 15 bp, Homo sapiens
cttagatgctgcagc

SEQ ID NO: 968788 - DNA, 15 bp, Homo sapiens
acttagatgctgcag

SEQ ID NO: 968789 - DNA, 15 bp, Homo sapiens
tacttagatgctgca

SEQ ID NO: 968790 - DNA, 15 bp, Homo sapiens
ttacttagatgctgc

SEQ ID NO: 968791 - DNA, 15 bp, Homo sapiens
cttacttagatgctg

SEQ ID NO: 968792 - DNA, 15 bp, Homo sapiens
acttacttagatgct

SEQ ID NO: 968793 - DNA, 15 bp, Homo sapiens
gacttacttagatgc

SEQ ID NO: 968794 - DNA, 15 bp, Homo sapiens
agacttacttagatg

SEQ ID NO: 968795 - DNA, 15 bp, Homo sapiens
gagacttacttagat

SEQ ID NO: 968796 - DNA, 15 bp, Homo sapiens
agagacttacttaga

SEQ ID NO: 968797 - DNA, 15 bp, Homo sapiens
aagagacttacttag

SEQ ID NO: 968798 - DNA, 15 bp, Homo sapiens
gaagagacttactta

SEQ ID NO: 968799 - DNA, 15 bp, Homo sapiens
ggaagagacttactt

SEQ ID NO: 968800 - DNA, 15 bp, Homo sapiens
aggaagagacttact

SEQ ID NO: 968801 - DNA, 15 bp, Homo sapiens
caggaagagacttac

SEQ ID NO: 968802 - DNA, 15 bp, Homo sapiens
gcaggaagagactta

SEQ ID NO: 968803 - DNA, 15 bp, Homo sapiens
cgcaggaagagactt

SEQ ID NO: 968804 - DNA, 15 bp, Homo sapiens
gcgcaggaagagact

SEQ ID NO: 968805 - DNA, 15 bp, Homo sapiens
agcgcaggaagagac

SEQ ID NO: 968806 - DNA, 15 bp, Homo sapiens
tagcgcaggaagaga

SEQ ID NO: 968807 - DNA, 15 bp, Homo sapiens
ttagcgcaggaagag

SEQ ID NO: 968808 - DNA, 15 bp, Homo sapiens
cttagcgcaggaaga

SEQ ID NO: 968809 - DNA, 15 bp, Homo sapiens
gcttagcgcaggaag

SEQ ID NO: 968810 - DNA, 15 bp, Homo sapiens
tgcttagcgcaggaa

SEQ ID NO: 968811 - DNA, 15 bp, Homo sapiens
ctgcttagcgcagga

SEQ ID NO: 968812 - DNA, 15 bp, Homo sapiens
cctgcttagcgcagg

SEQ ID NO: 968813 - DNA, 15 bp, Homo sapiens
acctgcttagcgcag

SEQ ID NO: 968814 - DNA, 15 bp, Homo sapiens
gacctgcttagcgca

SEQ ID NO: 968815 - DNA, 15 bp, Homo sapiens
ggacctgcttagcgc

SEQ ID NO: 968816 - DNA, 15 bp, Homo sapiens
tggacctgcttagcg

SEQ ID NO: 968817 - DNA, 15 bp, Homo sapiens
ctggacctgcttagc

SEQ ID NO: 968818 - DNA, 15 bp, Homo sapiens
cctggacctgcttag

SEQ ID NO: 968819 - DNA, 15 bp, Homo sapiens
tcctggacctgctta

SEQ ID NO: 968820 - DNA, 15 bp, Homo sapiens
atcctggacctgctt

SEQ ID NO: 968821 - DNA, 15 bp, Homo sapiens
gatcctggacctgct

SEQ ID NO: 968822 - DNA, 15 bp, Homo sapiens
ggatcctggacctgc

SEQ ID NO: 968823 - DNA, 15 bp, Homo sapiens
gggatcctggacctg

SEQ ID NO: 968824 - DNA, 15 bp, Homo sapiens
agggatcctggacct

SEQ ID NO: 968825 - DNA, 15 bp, Homo sapiens
cagggatcctggacc

SEQ ID NO: 968826 - DNA, 15 bp, Homo sapiens
tcagggatcctggac

SEQ ID NO: 968827 - DNA, 15 bp, Homo sapiens
ttcagggatcctgga

SEQ ID NO: 968828 - DNA, 15 bp, Homo sapiens
gttcagggatcctgg

SEQ ID NO: 968829 - DNA, 15 bp, Homo sapiens
cgttcagggatcctg

SEQ ID NO: 968830 - DNA, 15 bp, Homo sapiens
ccgttcagggatcct

SEQ ID NO: 968831 - DNA, 15 bp, Homo sapiens
tccgttcagggatcc

SEQ ID NO: 968832 - DNA, 15 bp, Homo sapiens
ttccgttcagggatc

SEQ ID NO: 968833 - DNA, 15 bp, Homo sapiens
attccgttcagggat

SEQ ID NO: 968834 - DNA, 15 bp, Homo sapiens
aattccgttcaggga

SEQ ID NO: 968835 - DNA, 15 bp, Homo sapiens
aaattccgttcaggg

SEQ ID NO: 968836 - DNA, 15 bp, Homo sapiens
taaattccgttcagg

SEQ ID NO: 968837 - DNA, 15 bp, Homo sapiens
ataaattccgttcag

SEQ ID NO: 968838 - DNA, 15 bp, Homo sapiens
aataaattccgttca

SEQ ID NO: 968839 - DNA, 15 bp, Homo sapiens
aaataaattccgttc

SEQ ID NO: 968840 - DNA, 15 bp, Homo sapiens
caaataaattccgtt

SEQ ID NO: 968841 - DNA, 15 bp, Homo sapiens
gcaaataaattccgt

SEQ ID NO: 968842 - DNA, 15 bp, Homo sapiens
agcaaataaattccg

SEQ ID NO: 968843 - DNA, 15 bp, Homo sapiens
gagcaaataaattcc

SEQ ID NO: 968844 - DNA, 15 bp, Homo sapiens
agagcaaataaattc

SEQ ID NO: 968845 - DNA, 15 bp, Homo sapiens
cagagcaaataaatt

SEQ ID NO: 968846 - DNA, 15 bp, Homo sapiens
acagagcaaataaat

SEQ ID NO: 968847 - DNA, 15 bp, Homo sapiens
gacagagcaaataaa

SEQ ID NO: 968848 - DNA, 15 bp, Homo sapiens
ggacagagcaaataa

SEQ ID NO: 968849 - DNA, 15 bp, Homo sapiens
tggacagagcaaata

SEQ ID NO: 968850 - DNA, 15 bp, Homo sapiens
atggacagagcaaat

SEQ ID NO: 968851 - DNA, 15 bp, Homo sapiens
aatggacagagcaaa

SEQ ID NO: 968852 - DNA, 15 bp, Homo sapiens
gaatggacagagcaa

SEQ ID NO: 968853 - DNA, 15 bp, Homo sapiens
agaatggacagagca

SEQ ID NO: 968854 - DNA, 15 bp, Homo sapiens
cagaatggacagagc

SEQ ID NO: 968855 - DNA, 15 bp, Homo sapiens
tcagaatggacagag

SEQ ID NO: 968856 - DNA, 15 bp, Homo sapiens
ctcagaatggacaga

SEQ ID NO: 968857 - DNA, 15 bp, Homo sapiens
tctcagaatggacag

SEQ ID NO: 968858 - DNA, 15 bp, Homo sapiens
ttctcagaatggaca

SEQ ID NO: 968859 - DNA, 15 bp, Homo sapiens
gttctcagaatggac

SEQ ID NO: 968860 - DNA, 15 bp, Homo sapiens
ggttctcagaatgga

SEQ ID NO: 968861 - DNA, 15 bp, Homo sapiens
gggttctcagaatgg

SEQ ID NO: 968862 - DNA, 15 bp, Homo sapiens
tgggttctcagaatg

SEQ ID NO: 968863 - DNA, 15 bp, Homo sapiens
ttgggttctcagaat

SEQ ID NO: 968864 - DNA, 15 bp, Homo sapiens
tttgggttctcagaa

SEQ ID NO: 968865 - DNA, 15 bp, Homo sapiens
ctttgggttctcaga

SEQ ID NO: 968866 - DNA, 15 bp, Homo sapiens
cctttgggttctcag

SEQ ID NO: 968867 - DNA, 15 bp, Homo sapiens
tcctttgggttctca

SEQ ID NO: 968868 - DNA, 15 bp, Homo sapiens
ctcctttgggttctc

SEQ ID NO: 968869 - DNA, 15 bp, Homo sapiens
actcctttgggttct

SEQ ID NO: 968870 - DNA, 15 bp, Homo sapiens
gactcctttgggttc

SEQ ID NO: 968871 - DNA, 15 bp, Homo sapiens
ggactcctttgggtt

SEQ ID NO: 968872 - DNA, 15 bp, Homo sapiens
aggactcctttgggt

SEQ ID NO: 968873 - DNA, 15 bp, Homo sapiens
taggactcctttggg

SEQ ID NO: 968874 - DNA, 15 bp, Homo sapiens
ttaggactcctttgg

SEQ ID NO: 968875 - DNA, 15 bp, Homo sapiens
tttaggactcctttg

SEQ ID NO: 968876 - DNA, 15 bp, Homo sapiens
ttttaggactccttt

SEQ ID NO: 968877 - DNA, 15 bp, Homo sapiens
cttttaggactcctt

SEQ ID NO: 968878 - DNA, 15 bp, Homo sapiens
tcttttaggactcct

SEQ ID NO: 968879 - DNA, 15 bp, Homo sapiens
ctcttttaggactcc

SEQ ID NO: 968880 - DNA, 15 bp, Homo sapiens
cctcttttaggactc

SEQ ID NO: 968881 - DNA, 15 bp, Homo sapiens
tcctcttttaggact

SEQ ID NO: 968882 - DNA, 15 bp, Homo sapiens
ttcctcttttaggac

SEQ ID NO: 968883 - DNA, 15 bp, Homo sapiens
attcctcttttagga

SEQ ID NO: 968884 - DNA, 15 bp, Homo sapiens
cattcctcttttagg

SEQ ID NO: 968885 - DNA, 15 bp, Homo sapiens
ccattcctcttttag

SEQ ID NO: 968886 - DNA, 15 bp, Homo sapiens
tccattcctctttta

SEQ ID NO: 968887 - DNA, 15 bp, Homo sapiens
ctccattcctctttt

SEQ ID NO: 968888 - DNA, 15 bp, Homo sapiens
cctccattcctcttt

SEQ ID NO: 968889 - DNA, 15 bp, Homo sapiens
tcctccattcctctt

SEQ ID NO: 968890 - DNA, 15 bp, Homo sapiens
ctcctccattcctct

SEQ ID NO: 968891 - DNA, 15 bp, Homo sapiens
gctcctccattcctc

SEQ ID NO: 968892 - DNA, 15 bp, Homo sapiens
ggctcctccattcct

SEQ ID NO: 968893 - DNA, 15 bp, Homo sapiens
aggctcctccattcc

SEQ ID NO: 968894 - DNA, 15 bp, Homo sapiens
taggctcctccattc

SEQ ID NO: 968895 - DNA, 15 bp, Homo sapiens
ttaggctcctccatt

SEQ ID NO: 968896 - DNA, 15 bp, Homo sapiens
cttaggctcctccat

SEQ ID NO: 968897 - DNA, 15 bp, Homo sapiens
tcttaggctcctcca

SEQ ID NO: 968898 - DNA, 15 bp, Homo sapiens
ttcttaggctcctcc

SEQ ID NO: 968899 - DNA, 15 bp, Homo sapiens
attcttaggctcctc

SEQ ID NO: 968900 - DNA, 15 bp, Homo sapiens
tattcttaggctcct

SEQ ID NO: 968901 - DNA, 15 bp, Homo sapiens
ttattcttaggctcc

SEQ ID NO: 968902 - DNA, 15 bp, Homo sapiens
tttattcttaggctc

SEQ ID NO: 968903 - DNA, 15 bp, Homo sapiens
ttttattcttaggct

SEQ ID NO: 968904 - DNA, 15 bp, Homo sapiens
tttttattcttaggc

SEQ ID NO: 968905 - DNA, 15 bp, Homo sapiens
atttttattcttagg

SEQ ID NO: 968906 - DNA, 15 bp, Homo sapiens
tatttttattcttag

SEQ ID NO: 968907 - DNA, 15 bp, Homo sapiens
ctatttttattctta

SEQ ID NO: 968908 - DNA, 15 bp, Homo sapiens
actatttttattctt

SEQ ID NO: 968909 - DNA, 15 bp, Homo sapiens
tactatttttattct

SEQ ID NO: 968910 - DNA, 15 bp, Homo sapiens
atactatttttattc

SEQ ID NO: 968911 - DNA, 15 bp, Homo sapiens
tatactatttttatt

SEQ ID NO: 968912 - DNA, 15 bp, Homo sapiens
ttatactatttttat

SEQ ID NO: 968913 - DNA, 15 bp, Homo sapiens
attatactattttta

SEQ ID NO: 968914 - DNA, 15 bp, Homo sapiens
tattatactattttt

SEQ ID NO: 968915 - DNA, 15 bp, Homo sapiens
ttattatactatttt

SEQ ID NO: 968916 - DNA, 15 bp, Homo sapiens
tttattatactattt

SEQ ID NO: 968917 - DNA, 15 bp, Homo sapiens
ttttattatactatt

SEQ ID NO: 968918 - DNA, 15 bp, Homo sapiens
gttttattatactat

SEQ ID NO: 968919 - DNA, 15 bp, Homo sapiens
tgttttattatacta

SEQ ID NO: 968920 - DNA, 15 bp, Homo sapiens
atgttttattatact

SEQ ID NO: 968921 - DNA, 15 bp, Homo sapiens
aatgttttattatac

SEQ ID NO: 968922 - DNA, 15 bp, Homo sapiens
aaatgttttattata

SEQ ID NO: 968923 - DNA, 15 bp, Homo sapiens
gaaatgttttattat

SEQ ID NO: 968924 - DNA, 15 bp, Homo sapiens
agaaatgttttatta

SEQ ID NO: 968925 - DNA, 15 bp, Homo sapiens
aagaaatgttttatt

SEQ ID NO: 968926 - DNA, 15 bp, Homo sapiens
taagaaatgttttat

SEQ ID NO: 968927 - DNA, 15 bp, Homo sapiens
ctaagaaatgtttta

SEQ ID NO: 968928 - DNA, 15 bp, Homo sapiens
tctaagaaatgtttt

SEQ ID NO: 968929 - DNA, 15 bp, Homo sapiens
gtctaagaaatgttt

SEQ ID NO: 968930 - DNA, 15 bp, Homo sapiens
tgtctaagaaatgtt

SEQ ID NO: 968931 - DNA, 15 bp, Homo sapiens
gtgtctaagaaatgt

SEQ ID NO: 968932 - DNA, 15 bp, Homo sapiens
tgtgtctaagaaatg

SEQ ID NO: 968933 - DNA, 15 bp, Homo sapiens
atgtgtctaagaaat

SEQ ID NO: 968934 - DNA, 15 bp, Homo sapiens
aatgtgtctaagaaa

SEQ ID NO: 968935 - DNA, 15 bp, Homo sapiens
caatgtgtctaagaa

SEQ ID NO: 968936 - DNA, 15 bp, Homo sapiens
tcaatgtgtctaaga

SEQ ID NO: 968937 - DNA, 15 bp, Homo sapiens
gtcaatgtgtctaag

SEQ ID NO: 968938 - DNA, 15 bp, Homo sapiens
ggtcaatgtgtctaa

SEQ ID NO: 968939 - DNA, 15 bp, Homo sapiens
aggtcaatgtgtcta

SEQ ID NO: 968940 - DNA, 15 bp, Homo sapiens
aaggtcaatgtgtct

SEQ ID NO: 968941 - DNA, 15 bp, Homo sapiens
caaggtcaatgtgtc

SEQ ID NO: 968942 - DNA, 15 bp, Homo sapiens
ccaaggtcaatgtgt

SEQ ID NO: 968943 - DNA, 15 bp, Homo sapiens
gccaaggtcaatgtg

SEQ ID NO: 968944 - DNA, 15 bp, Homo sapiens
ggccaaggtcaatgt

SEQ ID NO: 968945 - DNA, 15 bp, Homo sapiens
aggccaaggtcaatg

SEQ ID NO: 968946 - DNA, 15 bp, Homo sapiens
taggccaaggtcaat

SEQ ID NO: 968947 - DNA, 15 bp, Homo sapiens
ataggccaaggtcaa

SEQ ID NO: 968948 - DNA, 15 bp, Homo sapiens
cataggccaaggtca

SEQ ID NO: 968949 - DNA, 15 bp, Homo sapiens
acataggccaaggtc

SEQ ID NO: 968950 - DNA, 15 bp, Homo sapiens
gacataggccaaggt

SEQ ID NO: 968951 - DNA, 15 bp, Homo sapiens
tgacataggccaagg

SEQ ID NO: 968952 - DNA, 15 bp, Homo sapiens
ttgacataggccaag

SEQ ID NO: 968953 - DNA, 15 bp, Homo sapiens
tttgacataggccaa

SEQ ID NO: 968954 - DNA, 15 bp, Homo sapiens
ctttgacataggcca

SEQ ID NO: 968955 - DNA, 15 bp, Homo sapiens
actttgacataggcc

SEQ ID NO: 968956 - DNA, 15 bp, Homo sapiens
aactttgacataggc

SEQ ID NO: 968957 - DNA, 15 bp, Homo sapiens
gaactttgacatagg

SEQ ID NO: 968958 - DNA, 15 bp, Homo sapiens
tgaactttgacatag

SEQ ID NO: 968959 - DNA, 15 bp, Homo sapiens
ctgaactttgacata

SEQ ID NO: 968960 - DNA, 15 bp, Homo sapiens
actgaactttgacat

SEQ ID NO: 968961 - DNA, 15 bp, Homo sapiens
gactgaactttgaca

SEQ ID NO: 968962 - DNA, 15 bp, Homo sapiens
agactgaactttgac

SEQ ID NO: 968963 - DNA, 15 bp, Homo sapiens
cagactgaactttga

SEQ ID NO: 968964 - DNA, 15 bp, Homo sapiens
ccagactgaactttg

SEQ ID NO: 968965 - DNA, 15 bp, Homo sapiens
cccagactgaacttt

SEQ ID NO: 968966 - DNA, 15 bp, Homo sapiens
acccagactgaactt

SEQ ID NO: 968967 - DNA, 15 bp, Homo sapiens
aacccagactgaact

SEQ ID NO: 968968 - DNA, 15 bp, Homo sapiens
aaacccagactgaac

SEQ ID NO: 968969 - DNA, 15 bp, Homo sapiens
caaacccagactgaa

SEQ ID NO: 968970 - DNA, 15 bp, Homo sapiens
acaaacccagactga

SEQ ID NO: 968971 - DNA, 15 bp, Homo sapiens
gacaaacccagactg

SEQ ID NO: 968972 - DNA, 15 bp, Homo sapiens
agacaaacccagact

SEQ ID NO: 968973 - DNA, 15 bp, Homo sapiens
aagacaaacccagac

SEQ ID NO: 968974 - DNA, 15 bp, Homo sapiens
taagacaaacccaga

SEQ ID NO: 968975 - DNA, 15 bp, Homo sapiens
ataagacaaacccag

SEQ ID NO: 968976 - DNA, 15 bp, Homo sapiens
tataagacaaaccca

SEQ ID NO: 968977 - DNA, 15 bp, Homo sapiens
ttataagacaaaccc

SEQ ID NO: 968978 - DNA, 15 bp, Homo sapiens
gttataagacaaacc

SEQ ID NO: 968979 - DNA, 15 bp, Homo sapiens
tgttataagacaaac

SEQ ID NO: 968980 - DNA, 15 bp, Homo sapiens
gtgttataagacaaa

SEQ ID NO: 968981 - DNA, 15 bp, Homo sapiens
tgtgttataagacaa

SEQ ID NO: 968982 - DNA, 15 bp, Homo sapiens
ttgtgttataagaca

SEQ ID NO: 968983 - DNA, 15 bp, Homo sapiens
cttgtgttataagac

SEQ ID NO: 968984 - DNA, 15 bp, Homo sapiens
ccttgtgttataaga

SEQ ID NO: 968985 - DNA, 15 bp, Homo sapiens
tccttgtgttataag

SEQ ID NO: 968986 - DNA, 15 bp, Homo sapiens
ctccttgtgttataa

SEQ ID NO: 968987 - DNA, 15 bp, Homo sapiens
actccttgtgttata

SEQ ID NO: 968988 - DNA, 15 bp, Homo sapiens
tactccttgtgttat

SEQ ID NO: 968989 - DNA, 15 bp, Homo sapiens
ttactccttgtgtta

SEQ ID NO: 968990 - DNA, 15 bp, Homo sapiens
tttactccttgtgtt

SEQ ID NO: 968991 - DNA, 15 bp, Homo sapiens
ttttactccttgtgt

SEQ ID NO: 968992 - DNA, 15 bp, Homo sapiens
cttttactccttgtg

SEQ ID NO: 968993 - DNA, 15 bp, Homo sapiens
acttttactccttgt

SEQ ID NO: 968994 - DNA, 15 bp, Homo sapiens
tacttttactccttg

SEQ ID NO: 968995 - DNA, 15 bp, Homo sapiens
gtacttttactcctt

SEQ ID NO: 968996 - DNA, 15 bp, Homo sapiens
ggtacttttactcct

SEQ ID NO: 968997 - DNA, 15 bp, Homo sapiens
tggtacttttactcc

SEQ ID NO: 968998 - DNA, 15 bp, Homo sapiens
atggtacttttactc

SEQ ID NO: 968999 - DNA, 15 bp, Homo sapiens
aatggtacttttact

SEQ ID NO: 969000 - DNA, 15 bp, Homo sapiens
caatggtacttttac

SEQ ID NO: 969001 - DNA, 15 bp, Homo sapiens
acaatggtactttta

SEQ ID NO: 969002 - DNA, 15 bp, Homo sapiens
aacaatggtactttt

SEQ ID NO: 969003 - DNA, 15 bp, Homo sapiens
gaacaatggtacttt

SEQ ID NO: 969004 - DNA, 15 bp, Homo sapiens
agaacaatggtactt

SEQ ID NO: 969005 - DNA, 15 bp, Homo sapiens
tagaacaatggtact

SEQ ID NO: 969006 - DNA, 15 bp, Homo sapiens
gtagaacaatggtac

SEQ ID NO: 969007 - DNA, 15 bp, Homo sapiens
ggtagaacaatggta

SEQ ID NO: 969008 - DNA, 15 bp, Homo sapiens
aggtagaacaatggt

SEQ ID NO: 969009 - DNA, 15 bp, Homo sapiens
gaggtagaacaatgg

SEQ ID NO: 969010 - DNA, 15 bp, Homo sapiens
agaggtagaacaatg

SEQ ID NO: 969011 - DNA, 15 bp, Homo sapiens
aagaggtagaacaat

SEQ ID NO: 969012 - DNA, 15 bp, Homo sapiens
aaagaggtagaacaa

SEQ ID NO: 969013 - DNA, 15 bp, Homo sapiens
aaaagaggtagaaca

SEQ ID NO: 969014 - DNA, 15 bp, Homo sapiens
aaaaagaggtagaac

SEQ ID NO: 969015 - DNA, 15 bp, Homo sapiens
aaaaaagaggtagaa

SEQ ID NO: 969016 - DNA, 15 bp, Homo sapiens
aaaaaaagaggtaga

SEQ ID NO: 969017 - DNA, 15 bp, Homo sapiens
taaaaaaagaggtag

SEQ ID NO: 969018 - DNA, 15 bp, Homo sapiens
ttaaaaaaagaggta

SEQ ID NO: 969019 - DNA, 15 bp, Homo sapiens
attaaaaaaagaggt

SEQ ID NO: 969020 - DNA, 15 bp, Homo sapiens
tattaaaaaaagagg

SEQ ID NO: 969021 - DNA, 15 bp, Homo sapiens
gtattaaaaaaagag

SEQ ID NO: 969022 - DNA, 15 bp, Homo sapiens
agtattaaaaaaaga

SEQ ID NO: 969023 - DNA, 15 bp, Homo sapiens
aagtattaaaaaaag

SEQ ID NO: 969024 - DNA, 15 bp, Homo sapiens
caagtattaaaaaaa

SEQ ID NO: 969025 - DNA, 15 bp, Homo sapiens
tcaagtattaaaaaa

SEQ ID NO: 969026 - DNA, 15 bp, Homo sapiens
ttcaagtattaaaaa

SEQ ID NO: 969027 - DNA, 15 bp, Homo sapiens
tttcaagtattaaaa

SEQ ID NO: 969028 - DNA, 15 bp, Homo sapiens
ttttcaagtattaaa

SEQ ID NO: 969029 - DNA, 15 bp, Homo sapiens
tttttcaagtattaa

SEQ ID NO: 969030 - DNA, 15 bp, Homo sapiens
ttttttcaagtatta

SEQ ID NO: 969031 - DNA, 15 bp, Homo sapiens
tttttttcaagtatt

SEQ ID NO: 969032 - DNA, 15 bp, Homo sapiens
atttttttcaagtat

SEQ ID NO: 969033 - DNA, 15 bp, Homo sapiens
aatttttttcaagta

SEQ ID NO: 969034 - DNA, 15 bp, Homo sapiens
aaatttttttcaagt

SEQ ID NO: 969035 - DNA, 15 bp, Homo sapiens
taaatttttttcaag

SEQ ID NO: 969036 - DNA, 15 bp, Homo sapiens
gtaaatttttttcaa

SEQ ID NO: 969037 - DNA, 15 bp, Homo sapiens
agtaaatttttttca

SEQ ID NO: 969038 - DNA, 15 bp, Homo sapiens
cagtaaatttttttc

SEQ ID NO: 969039 - DNA, 15 bp, Homo sapiens
acagtaaattttttt

SEQ ID NO: 969040 - DNA, 15 bp, Homo sapiens
cacagtaaatttttt

SEQ ID NO: 969041 - DNA, 15 bp, Homo sapiens
ccacagtaaattttt

SEQ ID NO: 969042 - DNA, 15 bp, Homo sapiens
tccacagtaaatttt

SEQ ID NO: 969043 - DNA, 15 bp, Homo sapiens
atccacagtaaattt

SEQ ID NO: 969044 - DNA, 15 bp, Homo sapiens
catccacagtaaatt

SEQ ID NO: 969045 - DNA, 15 bp, Homo sapiens
gcatccacagtaaat

SEQ ID NO: 969046 - DNA, 15 bp, Homo sapiens
agcatccacagtaaa

SEQ ID NO: 969047 - DNA, 15 bp, Homo sapiens
aagcatccacagtaa

SEQ ID NO: 969048 - DNA, 15 bp, Homo sapiens
aaagcatccacagta

SEQ ID NO: 969049 - DNA, 15 bp, Homo sapiens
aaaagcatccacagt

SEQ ID NO: 969050 - DNA, 15 bp, Homo sapiens
gaaaagcatccacag

SEQ ID NO: 969051 - DNA, 15 bp, Homo sapiens
agaaaagcatccaca

SEQ ID NO: 969052 - DNA, 15 bp, Homo sapiens
tagaaaagcatccac

SEQ ID NO: 969053 - DNA, 15 bp, Homo sapiens
atagaaaagcatcca

SEQ ID NO: 969054 - DNA, 15 bp, Homo sapiens
catagaaaagcatcc

SEQ ID NO: 969055 - DNA, 15 bp, Homo sapiens
tcatagaaaagcatc

SEQ ID NO: 969056 - DNA, 15 bp, Homo sapiens
ttcatagaaaagcat

SEQ ID NO: 969057 - DNA, 15 bp, Homo sapiens
attcatagaaaagca

SEQ ID NO: 969058 - DNA, 15 bp, Homo sapiens
aattcatagaaaagc

SEQ ID NO: 969059 - DNA, 15 bp, Homo sapiens
taattcatagaaaag

SEQ ID NO: 969060 - DNA, 15 bp, Homo sapiens
ttaattcatagaaaa

SEQ ID NO: 969061 - DNA, 15 bp, Homo sapiens
tttaattcatagaaa

SEQ ID NO: 969062 - DNA, 15 bp, Homo sapiens
atttaattcatagaa

SEQ ID NO: 969063 - DNA, 15 bp, Homo sapiens
tatttaattcataga

SEQ ID NO: 969064 - DNA, 15 bp, Homo sapiens
ttatttaattcatag

SEQ ID NO: 969065 - DNA, 15 bp, Homo sapiens
gttatttaattcata

SEQ ID NO: 969066 - DNA, 15 bp, Homo sapiens
ggttatttaattcat

SEQ ID NO: 969067 - DNA, 15 bp, Homo sapiens
aggttatttaattca

SEQ ID NO: 969068 - DNA, 15 bp, Homo sapiens
aaggttatttaattc

SEQ ID NO: 969069 - DNA, 15 bp, Homo sapiens
gaaggttatttaatt

SEQ ID NO: 969070 - DNA, 15 bp, Homo sapiens
agaaggttatttaat

SEQ ID NO: 969071 - DNA, 15 bp, Homo sapiens
tagaaggttatttaa

SEQ ID NO: 969072 - DNA, 15 bp, Homo sapiens
ttagaaggttattta

SEQ ID NO: 969073 - DNA, 15 bp, Homo sapiens
tttagaaggttattt

SEQ ID NO: 969074 - DNA, 15 bp, Homo sapiens
ttttagaaggttatt

SEQ ID NO: 969075 - DNA, 15 bp, Homo sapiens
tttttagaaggttat

SEQ ID NO: 969076 - DNA, 15 bp, Homo sapiens
ttttttagaaggtta

SEQ ID NO: 969077 - DNA, 15 bp, Homo sapiens
attttttagaaggtt

SEQ ID NO: 969078 - DNA, 15 bp, Homo sapiens
cattttttagaaggt

SEQ ID NO: 969079 - DNA, 15 bp, Homo sapiens
acattttttagaagg

SEQ ID NO: 969080 - DNA, 15 bp, Homo sapiens
aacattttttagaag

SEQ ID NO: 969081 - DNA, 15 bp, Homo sapiens
aaacattttttagaa

SEQ ID NO: 969082 - DNA, 15 bp, Homo sapiens
aaaacattttttaga

SEQ ID NO: 969083 - DNA, 15 bp, Homo sapiens
gaaaacattttttag

SEQ ID NO: 969084 - DNA, 15 bp, Homo sapiens
tgaaaacatttttta

SEQ ID NO: 969085 - DNA, 15 bp, Homo sapiens
atgaaaacatttttt

SEQ ID NO: 969086 - DNA, 15 bp, Homo sapiens
aatgaaaacattttt

SEQ ID NO: 969087 - DNA, 15 bp, Homo sapiens
caatgaaaacatttt

SEQ ID NO: 969088 - DNA, 15 bp, Homo sapiens
gcaatgaaaacattt

SEQ ID NO: 969089 - DNA, 15 bp, Homo sapiens
agcaatgaaaacatt

SEQ ID NO: 969090 - DNA, 15 bp, Homo sapiens
cagcaatgaaaacat

SEQ ID NO: 969091 - DNA, 15 bp, Homo sapiens
gcagcaatgaaaaca

SEQ ID NO: 969092 - DNA, 15 bp, Homo sapiens
tgcagcaatgaaaac

SEQ ID NO: 969093 - DNA, 15 bp, Homo sapiens
atgcagcaatgaaaa

SEQ ID NO: 969094 - DNA, 15 bp, Homo sapiens
aatgcagcaatgaaa

SEQ ID NO: 969095 - DNA, 15 bp, Homo sapiens
gaatgcagcaatgaa

SEQ ID NO: 969096 - DNA, 15 bp, Homo sapiens
cgaatgcagcaatga

SEQ ID NO: 969097 - DNA, 15 bp, Homo sapiens
tcgaatgcagcaatg

SEQ ID NO: 969098 - DNA, 15 bp, Homo sapiens
atcgaatgcagcaat

SEQ ID NO: 969099 - DNA, 15 bp, Homo sapiens
aatcgaatgcagcaa

SEQ ID NO: 969100 - DNA, 15 bp, Homo sapiens
taatcgaatgcagca

SEQ ID NO: 969101 - DNA, 15 bp, Homo sapiens
ctaatcgaatgcagc

SEQ ID NO: 969102 - DNA, 15 bp, Homo sapiens
tctaatcgaatgcag

SEQ ID NO: 969103 - DNA, 15 bp, Homo sapiens
atctaatcgaatgca

SEQ ID NO: 969104 - DNA, 15 bp, Homo sapiens
aatctaatcgaatgc

SEQ ID NO: 969105 - DNA, 15 bp, Homo sapiens
caatctaatcgaatg

SEQ ID NO: 969106 - DNA, 15 bp, Homo sapiens
ccaatctaatcgaat

SEQ ID NO: 969107 - DNA, 15 bp, Homo sapiens
cccaatctaatcgaa

SEQ ID NO: 969108 - DNA, 15 bp, Homo sapiens
acccaatctaatcga

SEQ ID NO: 969109 - DNA, 15 bp, Homo sapiens
tacccaatctaatcg

SEQ ID NO: 969110 - DNA, 15 bp, Homo sapiens
ttacccaatctaatc

SEQ ID NO: 969111 - DNA, 15 bp, Homo sapiens
gttacccaatctaat

SEQ ID NO: 969112 - DNA, 15 bp, Homo sapiens
agttacccaatctaa

SEQ ID NO: 969113 - DNA, 15 bp, Homo sapiens
tagttacccaatcta

SEQ ID NO: 969114 - DNA, 15 bp, Homo sapiens
ttagttacccaatct

SEQ ID NO: 969115 - DNA, 15 bp, Homo sapiens
tttagttacccaatc

SEQ ID NO: 969116 - DNA, 15 bp, Homo sapiens
atttagttacccaat

SEQ ID NO: 969117 - DNA, 15 bp, Homo sapiens
catttagttacccaa

SEQ ID NO: 969118 - DNA, 15 bp, Homo sapiens
tcatttagttaccca

SEQ ID NO: 969119 - DNA, 15 bp, Homo sapiens
ttcatttagttaccc

SEQ ID NO: 969120 - DNA, 15 bp, Homo sapiens
tttcatttagttacc

SEQ ID NO: 969121 - DNA, 15 bp, Homo sapiens
atttcatttagttac

SEQ ID NO: 969122 - DNA, 15 bp, Homo sapiens
aatttcatttagtta

SEQ ID NO: 969123 - DNA, 15 bp, Homo sapiens
taatttcatttagtt

SEQ ID NO: 969124 - DNA, 15 bp, Homo sapiens
ttaatttcatttagt

SEQ ID NO: 969125 - DNA, 15 bp, Homo sapiens
attaatttcatttag

SEQ ID NO: 969126 - DNA, 15 bp, Homo sapiens
aattaatttcattta

SEQ ID NO: 969127 - DNA, 15 bp, Homo sapiens
gaattaatttcattt

SEQ ID NO: 969128 - DNA, 15 bp, Homo sapiens
ggaattaatttcatt

SEQ ID NO: 969129 - DNA, 15 bp, Homo sapiens
aggaattaatttcat

SEQ ID NO: 969130 - DNA, 15 bp, Homo sapiens
gaggaattaatttca

SEQ ID NO: 969131 - DNA, 15 bp, Homo sapiens
tgaggaattaatttc

SEQ ID NO: 969132 - DNA, 15 bp, Homo sapiens
gtgaggaattaattt

SEQ ID NO: 969133 - DNA, 15 bp, Homo sapiens
agtgaggaattaatt

SEQ ID NO: 969134 - DNA, 15 bp, Homo sapiens
cagtgaggaattaat

SEQ ID NO: 969135 - DNA, 15 bp, Homo sapiens
acagtgaggaattaa

SEQ ID NO: 969136 - DNA, 15 bp, Homo sapiens
aacagtgaggaatta

SEQ ID NO: 969137 - DNA, 15 bp, Homo sapiens
caacagtgaggaatt

SEQ ID NO: 969138 - DNA, 15 bp, Homo sapiens
ccaacagtgaggaat

SEQ ID NO: 969139 - DNA, 15 bp, Homo sapiens
cccaacagtgaggaa

SEQ ID NO: 969140 - DNA, 15 bp, Homo sapiens
acccaacagtgagga

SEQ ID NO: 969141 - DNA, 15 bp, Homo sapiens
tacccaacagtgagg

SEQ ID NO: 969142 - DNA, 15 bp, Homo sapiens
atacccaacagtgag

SEQ ID NO: 969143 - DNA, 15 bp, Homo sapiens
tatacccaacagtga

SEQ ID NO: 969144 - DNA, 15 bp, Homo sapiens
ttatacccaacagtg

SEQ ID NO: 969145 - DNA, 15 bp, Homo sapiens
tttatacccaacagt

SEQ ID NO: 969146 - DNA, 15 bp, Homo sapiens
ctttatacccaacag

SEQ ID NO: 969147 - DNA, 15 bp, Homo sapiens
cctttatacccaaca

SEQ ID NO: 969148 - DNA, 15 bp, Homo sapiens
acctttatacccaac

SEQ ID NO: 969149 - DNA, 15 bp, Homo sapiens
aacctttatacccaa

SEQ ID NO: 969150 - DNA, 15 bp, Homo sapiens
taacctttataccca

SEQ ID NO: 969151 - DNA, 15 bp, Homo sapiens
ataacctttataccc

SEQ ID NO: 969152 - DNA, 15 bp, Homo sapiens
aataacctttatacc

SEQ ID NO: 969153 - DNA, 15 bp, Homo sapiens
aaataacctttatac

SEQ ID NO: 969154 - DNA, 15 bp, Homo sapiens
taaataacctttata

SEQ ID NO: 969155 - DNA, 15 bp, Homo sapiens
gtaaataacctttat

SEQ ID NO: 969156 - DNA, 15 bp, Homo sapiens
tgtaaataaccttta

SEQ ID NO: 969157 - DNA, 15 bp, Homo sapiens
ctgtaaataaccttt

SEQ ID NO: 969158 - DNA, 15 bp, Homo sapiens
actgtaaataacctt

SEQ ID NO: 969159 - DNA, 15 bp, Homo sapiens
cactgtaaataacct

SEQ ID NO: 969160 - DNA, 15 bp, Homo sapiens
ccactgtaaataacc

SEQ ID NO: 969161 - DNA, 15 bp, Homo sapiens
accactgtaaataac

SEQ ID NO: 969162 - DNA, 15 bp, Homo sapiens
aaccactgtaaataa

SEQ ID NO: 969163 - DNA, 15 bp, Homo sapiens
gaaccactgtaaata

SEQ ID NO: 969164 - DNA, 15 bp, Homo sapiens
agaaccactgtaaat

SEQ ID NO: 969165 - DNA, 15 bp, Homo sapiens
cagaaccactgtaaa

SEQ ID NO: 969166 - DNA, 15 bp, Homo sapiens
acagaaccactgtaa

SEQ ID NO: 969167 - DNA, 15 bp, Homo sapiens
gacagaaccactgta

SEQ ID NO: 969168 - DNA, 15 bp, Homo sapiens
agacagaaccactgt

SEQ ID NO: 969169 - DNA, 15 bp, Homo sapiens
aagacagaaccactg

SEQ ID NO: 969170 - DNA, 15 bp, Homo sapiens
taagacagaaccact

SEQ ID NO: 969171 - DNA, 15 bp, Homo sapiens
ctaagacagaaccac

SEQ ID NO: 969172 - DNA, 15 bp, Homo sapiens
gctaagacagaacca

SEQ ID NO: 969173 - DNA, 15 bp, Homo sapiens
ggctaagacagaacc

SEQ ID NO: 969174 - DNA, 15 bp, Homo sapiens
tggctaagacagaac

SEQ ID NO: 969175 - DNA, 15 bp, Homo sapiens
atggctaagacagaa

SEQ ID NO: 969176 - DNA, 15 bp, Homo sapiens
aatggctaagacaga

SEQ ID NO: 969177 - DNA, 15 bp, Homo sapiens
gaatggctaagacag

SEQ ID NO: 969178 - DNA, 15 bp, Homo sapiens
tgaatggctaagaca

SEQ ID NO: 969179 - DNA, 15 bp, Homo sapiens
gtgaatggctaagac

SEQ ID NO: 969180 - DNA, 15 bp, Homo sapiens
agtgaatggctaaga

SEQ ID NO: 969181 - DNA, 15 bp, Homo sapiens
cagtgaatggctaag

SEQ ID NO: 969182 - DNA, 15 bp, Homo sapiens
tcagtgaatggctaa

SEQ ID NO: 969183 - DNA, 15 bp, Homo sapiens
ttcagtgaatggcta

SEQ ID NO: 969184 - DNA, 15 bp, Homo sapiens
gttcagtgaatggct

SEQ ID NO: 969185 - DNA, 15 bp, Homo sapiens
agttcagtgaatggc

SEQ ID NO: 969186 - DNA, 15 bp, Homo sapiens
gagttcagtgaatgg

SEQ ID NO: 969187 - DNA, 15 bp, Homo sapiens
tgagttcagtgaatg

SEQ ID NO: 969188 - DNA, 15 bp, Homo sapiens
atgagttcagtgaat

SEQ ID NO: 969189 - DNA, 15 bp, Homo sapiens
aatgagttcagtgaa

SEQ ID NO: 969190 - DNA, 15 bp, Homo sapiens
caatgagttcagtga

SEQ ID NO: 969191 - DNA, 15 bp, Homo sapiens
gcaatgagttcagtg

SEQ ID NO: 969192 - DNA, 15 bp, Homo sapiens
tgcaatgagttcagt

SEQ ID NO: 969193 - DNA, 15 bp, Homo sapiens
atgcaatgagttcag

SEQ ID NO: 969194 - DNA, 15 bp, Homo sapiens
tatgcaatgagttca

SEQ ID NO: 969195 - DNA, 15 bp, Homo sapiens
atatgcaatgagttc

SEQ ID NO: 969196 - DNA, 15 bp, Homo sapiens
tatatgcaatgagtt

SEQ ID NO: 969197 - DNA, 15 bp, Homo sapiens
atatatgcaatgagt

SEQ ID NO: 969198 - DNA, 15 bp, Homo sapiens
tatatatgcaatgag

SEQ ID NO: 969199 - DNA, 15 bp, Homo sapiens
atatatatgcaatga

SEQ ID NO: 969200 - DNA, 15 bp, Homo sapiens
gatatatatgcaatg

SEQ ID NO: 969201 - DNA, 15 bp, Homo sapiens
agatatatatgcaat

SEQ ID NO: 969202 - DNA, 15 bp, Homo sapiens
gagatatatatgcaa

SEQ ID NO: 969203 - DNA, 15 bp, Homo sapiens
agagatatatatgca

SEQ ID NO: 969204 - DNA, 15 bp, Homo sapiens
cagagatatatatgc

SEQ ID NO: 969205 - DNA, 15 bp, Homo sapiens
ccagagatatatatg

SEQ ID NO: 969206 - DNA, 15 bp, Homo sapiens
tccagagatatatat

SEQ ID NO: 969207 - DNA, 15 bp, Homo sapiens
ttccagagatatata

SEQ ID NO: 969208 - DNA, 15 bp, Homo sapiens
attccagagatatat

SEQ ID NO: 969209 - DNA, 15 bp, Homo sapiens
tattccagagatata

SEQ ID NO: 969210 - DNA, 15 bp, Homo sapiens
atattccagagatat

SEQ ID NO: 969211 - DNA, 15 bp, Homo sapiens
aatattccagagata

SEQ ID NO: 969212 - DNA, 15 bp, Homo sapiens
caatattccagagat

SEQ ID NO: 969213 - DNA, 15 bp, Homo sapiens
gcaatattccagaga

SEQ ID NO: 969214 - DNA, 15 bp, Homo sapiens
agcaatattccagag

SEQ ID NO: 969215 - DNA, 15 bp, Homo sapiens
cagcaatattccaga

SEQ ID NO: 969216 - DNA, 15 bp, Homo sapiens
tcagcaatattccag

SEQ ID NO: 969217 - DNA, 15 bp, Homo sapiens
atcagcaatattcca

SEQ ID NO: 969218 - DNA, 15 bp, Homo sapiens
aatcagcaatattcc

SEQ ID NO: 969219 - DNA, 15 bp, Homo sapiens
caatcagcaatattc

SEQ ID NO: 969220 - DNA, 15 bp, Homo sapiens
acaatcagcaatatt

SEQ ID NO: 969221 - DNA, 15 bp, Homo sapiens
aacaatcagcaatat

SEQ ID NO: 969222 - DNA, 15 bp, Homo sapiens
aaacaatcagcaata

SEQ ID NO: 969223 - DNA, 15 bp, Homo sapiens
gaaacaatcagcaat

SEQ ID NO: 969224 - DNA, 15 bp, Homo sapiens
ggaaacaatcagcaa

SEQ ID NO: 969225 - DNA, 15 bp, Homo sapiens
aggaaacaatcagca

SEQ ID NO: 969226 - DNA, 15 bp, Homo sapiens
aaggaaacaatcagc

SEQ ID NO: 969227 - DNA, 15 bp, Homo sapiens
gaaggaaacaatcag

SEQ ID NO: 969228 - DNA, 15 bp, Homo sapiens
tgaaggaaacaatca

SEQ ID NO: 969229 - DNA, 15 bp, Homo sapiens
ttgaaggaaacaatc

SEQ ID NO: 969230 - DNA, 15 bp, Homo sapiens
cttgaaggaaacaat

SEQ ID NO: 969231 - DNA, 15 bp, Homo sapiens
acttgaaggaaacaa

SEQ ID NO: 969232 - DNA, 15 bp, Homo sapiens
tacttgaaggaaaca

SEQ ID NO: 969233 - DNA, 15 bp, Homo sapiens
ttacttgaaggaaac

SEQ ID NO: 969234 - DNA, 15 bp, Homo sapiens
tttacttgaaggaaa

SEQ ID NO: 969235 - DNA, 15 bp, Homo sapiens
gtttacttgaaggaa

SEQ ID NO: 969236 - DNA, 15 bp, Homo sapiens
agtttacttgaagga

SEQ ID NO: 969237 - DNA, 15 bp, Homo sapiens
aagtttacttgaagg

SEQ ID NO: 969238 - DNA, 15 bp, Homo sapiens
taagtttacttgaag

SEQ ID NO: 969239 - DNA, 15 bp, Homo sapiens
ctaagtttacttgaa

SEQ ID NO: 969240 - DNA, 15 bp, Homo sapiens
tctaagtttacttga

SEQ ID NO: 969241 - DNA, 15 bp, Homo sapiens
ttctaagtttacttg

SEQ ID NO: 969242 - DNA, 15 bp, Homo sapiens
cttctaagtttactt

SEQ ID NO: 969243 - DNA, 15 bp, Homo sapiens
acttctaagtttact

SEQ ID NO: 969244 - DNA, 15 bp, Homo sapiens
cacttctaagtttac

SEQ ID NO: 969245 - DNA, 15 bp, Homo sapiens
acacttctaagttta

SEQ ID NO: 969246 - DNA, 15 bp, Homo sapiens
tacacttctaagttt

SEQ ID NO: 969247 - DNA, 15 bp, Homo sapiens
ttacacttctaagtt

SEQ ID NO: 969248 - DNA, 15 bp, Homo sapiens
gttacacttctaagt

SEQ ID NO: 969249 - DNA, 15 bp, Homo sapiens
agttacacttctaag

SEQ ID NO: 969250 - DNA, 15 bp, Homo sapiens
tagttacacttctaa

SEQ ID NO: 969251 - DNA, 15 bp, Homo sapiens
gtagttacacttcta

SEQ ID NO: 969252 - DNA, 15 bp, Homo sapiens
agtagttacacttct

SEQ ID NO: 969253 - DNA, 15 bp, Homo sapiens
aagtagttacacttc

SEQ ID NO: 969254 - DNA, 15 bp, Homo sapiens
taagtagttacactt

SEQ ID NO: 969255 - DNA, 15 bp, Homo sapiens
ctaagtagttacact

SEQ ID NO: 969256 - DNA, 15 bp, Homo sapiens
actaagtagttacac

SEQ ID NO: 969257 - DNA, 15 bp, Homo sapiens
gactaagtagttaca

SEQ ID NO: 969258 - DNA, 15 bp, Homo sapiens
tgactaagtagttac

SEQ ID NO: 969259 - DNA, 15 bp, Homo sapiens
ttgactaagtagtta

SEQ ID NO: 969260 - DNA, 15 bp, Homo sapiens
tttgactaagtagtt

SEQ ID NO: 969261 - DNA, 15 bp, Homo sapiens
ctttgactaagtagt

SEQ ID NO: 969262 - DNA, 15 bp, Homo sapiens
tctttgactaagtag

SEQ ID NO: 969263 - DNA, 15 bp, Homo sapiens
ctctttgactaagta

SEQ ID NO: 969264 - DNA, 15 bp, Homo sapiens
gctctttgactaagt

SEQ ID NO: 969265 - DNA, 15 bp, Homo sapiens
ggctctttgactaag

SEQ ID NO: 969266 - DNA, 15 bp, Homo sapiens
aggctctttgactaa

SEQ ID NO: 969267 - DNA, 15 bp, Homo sapiens
caggctctttgacta

SEQ ID NO: 969268 - DNA, 15 bp, Homo sapiens
tcaggctctttgact

SEQ ID NO: 969269 - DNA, 15 bp, Homo sapiens
ttcaggctctttgac

SEQ ID NO: 969270 - DNA, 15 bp, Homo sapiens
attcaggctctttga

SEQ ID NO: 969271 - DNA, 15 bp, Homo sapiens
tattcaggctctttg

SEQ ID NO: 969272 - DNA, 15 bp, Homo sapiens
atattcaggctcttt

SEQ ID NO: 969273 - DNA, 15 bp, Homo sapiens
aatattcaggctctt

SEQ ID NO: 969274 - DNA, 15 bp, Homo sapiens
aaatattcaggctct

SEQ ID NO: 969275 - DNA, 15 bp, Homo sapiens
aaaatattcaggctc

SEQ ID NO: 969276 - DNA, 15 bp, Homo sapiens
taaaatattcaggct

SEQ ID NO: 969277 - DNA, 15 bp, Homo sapiens
ttaaaatattcaggc

SEQ ID NO: 969278 - DNA, 15 bp, Homo sapiens
tttaaaatattcagg

SEQ ID NO: 969279 - DNA, 15 bp, Homo sapiens
ctttaaaatattcag

SEQ ID NO: 969280 - DNA, 15 bp, Homo sapiens
cctttaaaatattca

SEQ ID NO: 969281 - DNA, 15 bp, Homo sapiens
gcctttaaaatattc

SEQ ID NO: 969282 - DNA, 15 bp, Homo sapiens
ggcctttaaaatatt

SEQ ID NO: 969283 - DNA, 15 bp, Homo sapiens
aggcctttaaaatat

SEQ ID NO: 969284 - DNA, 15 bp, Homo sapiens
aaggcctttaaaata

SEQ ID NO: 969285 - DNA, 15 bp, Homo sapiens
aaaggcctttaaaat

SEQ ID NO: 969286 - DNA, 15 bp, Homo sapiens
aaaaggcctttaaaa

SEQ ID NO: 969287 - DNA, 15 bp, Homo sapiens
caaaaggcctttaaa

SEQ ID NO: 969288 - DNA, 15 bp, Homo sapiens
tcaaaaggcctttaa

SEQ ID NO: 969289 - DNA, 15 bp, Homo sapiens
ttcaaaaggccttta

SEQ ID NO: 969290 - DNA, 15 bp, Homo sapiens
cttcaaaaggccttt

SEQ ID NO: 969291 - DNA, 15 bp, Homo sapiens
tcttcaaaaggcctt

SEQ ID NO: 969292 - DNA, 15 bp, Homo sapiens
ttcttcaaaaggcct

SEQ ID NO: 969293 - DNA, 15 bp, Homo sapiens
tttcttcaaaaggcc

SEQ ID NO: 969294 - DNA, 15 bp, Homo sapiens
ttttcttcaaaaggc

SEQ ID NO: 969295 - DNA, 15 bp, Homo sapiens
gttttcttcaaaagg

SEQ ID NO: 969296 - DNA, 15 bp, Homo sapiens
agttttcttcaaaag

SEQ ID NO: 969297 - DNA, 15 bp, Homo sapiens
cagttttcttcaaaa

SEQ ID NO: 969298 - DNA, 15 bp, Homo sapiens
tcagttttcttcaaa

SEQ ID NO: 969299 - DNA, 15 bp, Homo sapiens
ttcagttttcttcaa

SEQ ID NO: 969300 - DNA, 15 bp, Homo sapiens
tttcagttttcttca

SEQ ID NO: 969301 - DNA, 15 bp, Homo sapiens
ttttcagttttcttc

SEQ ID NO: 969302 - DNA, 15 bp, Homo sapiens
attttcagttttctt

SEQ ID NO: 969303 - DNA, 15 bp, Homo sapiens
cattttcagttttct

SEQ ID NO: 969304 - DNA, 15 bp, Homo sapiens
gcattttcagttttc

SEQ ID NO: 969305 - DNA, 15 bp, Homo sapiens
agcattttcagtttt

SEQ ID NO: 969306 - DNA, 15 bp, Homo sapiens
aagcattttcagttt

SEQ ID NO: 969307 - DNA, 15 bp, Homo sapiens
aaagcattttcagtt

SEQ ID NO: 969308 - DNA, 15 bp, Homo sapiens
gaaagcattttcagt

SEQ ID NO: 969309 - DNA, 15 bp, Homo sapiens
ggaaagcattttcag

SEQ ID NO: 969310 - DNA, 15 bp, Homo sapiens
tggaaagcattttca

SEQ ID NO: 969311 - DNA, 15 bp, Homo sapiens
ctggaaagcattttc

SEQ ID NO: 969312 - DNA, 15 bp, Homo sapiens
tctggaaagcatttt

SEQ ID NO: 969313 - DNA, 15 bp, Homo sapiens
ttctggaaagcattt

SEQ ID NO: 969314 - DNA, 15 bp, Homo sapiens
tttctggaaagcatt

SEQ ID NO: 969315 - DNA, 15 bp, Homo sapiens
ctttctggaaagcat

SEQ ID NO: 969316 - DNA, 15 bp, Homo sapiens
cctttctggaaagca

SEQ ID NO: 969317 - DNA, 15 bp, Homo sapiens
tcctttctggaaagc

SEQ ID NO: 969318 - DNA, 15 bp, Homo sapiens
atcctttctggaaag

SEQ ID NO: 969319 - DNA, 15 bp, Homo sapiens
catcctttctggaaa

SEQ ID NO: 969320 - DNA, 15 bp, Homo sapiens
acatcctttctggaa

SEQ ID NO: 969321 - DNA, 15 bp, Homo sapiens
tacatcctttctgga

SEQ ID NO: 969322 - DNA, 15 bp, Homo sapiens
atacatcctttctgg

SEQ ID NO: 969323 - DNA, 15 bp, Homo sapiens
gatacatcctttctg

SEQ ID NO: 969324 - DNA, 15 bp, Homo sapiens
tgatacatcctttct

SEQ ID NO: 969325 - DNA, 15 bp, Homo sapiens
ctgatacatcctttc

SEQ ID NO: 969326 - DNA, 15 bp, Homo sapiens
actgatacatccttt

SEQ ID NO: 969327 - DNA, 15 bp, Homo sapiens
aactgatacatcctt

SEQ ID NO: 969328 - DNA, 15 bp, Homo sapiens
caactgatacatcct

SEQ ID NO: 969329 - DNA, 15 bp, Homo sapiens
tcaactgatacatcc

SEQ ID NO: 969330 - DNA, 15 bp, Homo sapiens
gtcaactgatacatc

SEQ ID NO: 969331 - DNA, 15 bp, Homo sapiens
tgtcaactgatacat

SEQ ID NO: 969332 - DNA, 15 bp, Homo sapiens
ttgtcaactgataca

SEQ ID NO: 969333 - DNA, 15 bp, Homo sapiens
attgtcaactgatac

SEQ ID NO: 969334 - DNA, 15 bp, Homo sapiens
cattgtcaactgata

SEQ ID NO: 969335 - DNA, 15 bp, Homo sapiens
tcattgtcaactgat

SEQ ID NO: 969336 - DNA, 15 bp, Homo sapiens
gtcattgtcaactga

SEQ ID NO: 969337 - DNA, 15 bp, Homo sapiens
tgtcattgtcaactg

SEQ ID NO: 969338 - DNA, 15 bp, Homo sapiens
ctgtcattgtcaact

SEQ ID NO: 969339 - DNA, 15 bp, Homo sapiens
actgtcattgtcaac

SEQ ID NO: 969340 - DNA, 15 bp, Homo sapiens
gactgtcattgtcaa

SEQ ID NO: 969341 - DNA, 15 bp, Homo sapiens
cgactgtcattgtca

SEQ ID NO: 969342 - DNA, 15 bp, Homo sapiens
acgactgtcattgtc

SEQ ID NO: 969343 - DNA, 15 bp, Homo sapiens
gacgactgtcattgt

SEQ ID NO: 969344 - DNA, 15 bp, Homo sapiens
tgacgactgtcattg

SEQ ID NO: 969345 - DNA, 15 bp, Homo sapiens
ttgacgactgtcatt

SEQ ID NO: 969346 - DNA, 15 bp, Homo sapiens
gttgacgactgtcat

SEQ ID NO: 969347 - DNA, 15 bp, Homo sapiens
tgttgacgactgtca

SEQ ID NO: 969348 - DNA, 15 bp, Homo sapiens
ctgttgacgactgtc

SEQ ID NO: 969349 - DNA, 15 bp, Homo sapiens
actgttgacgactgt

SEQ ID NO: 969350 - DNA, 15 bp, Homo sapiens
tactgttgacgactg

SEQ ID NO: 969351 - DNA, 15 bp, Homo sapiens
atactgttgacgact

SEQ ID NO: 969352 - DNA, 15 bp, Homo sapiens
aatactgttgacgac

SEQ ID NO: 969353 - DNA, 15 bp, Homo sapiens
aaatactgttgacga

SEQ ID NO: 969354 - DNA, 15 bp, Homo sapiens
taaatactgttgacg

SEQ ID NO: 969355 - DNA, 15 bp, Homo sapiens
ttaaatactgttgac

SEQ ID NO: 969356 - DNA, 15 bp, Homo sapiens
cttaaatactgttga

SEQ ID NO: 969357 - DNA, 15 bp, Homo sapiens
ccttaaatactgttg

SEQ ID NO: 969358 - DNA, 15 bp, Homo sapiens
tccttaaatactgtt

SEQ ID NO: 969359 - DNA, 15 bp, Homo sapiens
ctccttaaatactgt

SEQ ID NO: 969360 - DNA, 15 bp, Homo sapiens
tctccttaaatactg

SEQ ID NO: 969361 - DNA, 15 bp, Homo sapiens
ttctccttaaatact

SEQ ID NO: 969362 - DNA, 15 bp, Homo sapiens
gttctccttaaatac

SEQ ID NO: 969363 - DNA, 15 bp, Homo sapiens
agttctccttaaata

SEQ ID NO: 969364 - DNA, 15 bp, Homo sapiens
tagttctccttaaat

SEQ ID NO: 969365 - DNA, 15 bp, Homo sapiens
atagttctccttaaa

SEQ ID NO: 969366 - DNA, 15 bp, Homo sapiens
catagttctccttaa

SEQ ID NO: 969367 - DNA, 15 bp, Homo sapiens
tcatagttctcctta

SEQ ID NO: 969368 - DNA, 15 bp, Homo sapiens
atcatagttctcctt

SEQ ID NO: 969369 - DNA, 15 bp, Homo sapiens
tatcatagttctcct

SEQ ID NO: 969370 - DNA, 15 bp, Homo sapiens
gtatcatagttctcc

SEQ ID NO: 969371 - DNA, 15 bp, Homo sapiens
agtatcatagttctc

SEQ ID NO: 969372 - DNA, 15 bp, Homo sapiens
gagtatcatagttct

SEQ ID NO: 969373 - DNA, 15 bp, Homo sapiens
agagtatcatagttc

SEQ ID NO: 969374 - DNA, 15 bp, Homo sapiens
cagagtatcatagtt

SEQ ID NO: 969375 - DNA, 15 bp, Homo sapiens
tcagagtatcatagt

SEQ ID NO: 969376 - DNA, 15 bp, Homo sapiens
ttcagagtatcatag

SEQ ID NO: 969377 - DNA, 15 bp, Homo sapiens
cttcagagtatcata

SEQ ID NO: 969378 - DNA, 15 bp, Homo sapiens
tcttcagagtatcat

SEQ ID NO: 969379 - DNA, 15 bp, Homo sapiens
ttcttcagagtatca

SEQ ID NO: 969380 - DNA, 15 bp, Homo sapiens
tttcttcagagtatc

SEQ ID NO: 969381 - DNA, 15 bp, Homo sapiens
ttttcttcagagtat

SEQ ID NO: 969382 - DNA, 15 bp, Homo sapiens
tttttcttcagagta

SEQ ID NO: 969383 - DNA, 15 bp, Homo sapiens
gtttttcttcagagt

SEQ ID NO: 969384 - DNA, 15 bp, Homo sapiens
agtttttcttcagag

SEQ ID NO: 969385 - DNA, 15 bp, Homo sapiens
aagtttttcttcaga

SEQ ID NO: 969386 - DNA, 15 bp, Homo sapiens
taagtttttcttcag

SEQ ID NO: 969387 - DNA, 15 bp, Homo sapiens
ctaagtttttcttca

SEQ ID NO: 969388 - DNA, 15 bp, Homo sapiens
gctaagtttttcttc

SEQ ID NO: 969389 - DNA, 15 bp, Homo sapiens
ggctaagtttttctt

SEQ ID NO: 969390 - DNA, 15 bp, Homo sapiens
aggctaagtttttct

SEQ ID NO: 969391 - DNA, 15 bp, Homo sapiens
aaggctaagtttttc

SEQ ID NO: 969392 - DNA, 15 bp, Homo sapiens
aaaggctaagttttt

SEQ ID NO: 969393 - DNA, 15 bp, Homo sapiens
gaaaggctaagtttt

SEQ ID NO: 969394 - DNA, 15 bp, Homo sapiens
agaaaggctaagttt

SEQ ID NO: 969395 - DNA, 15 bp, Homo sapiens
gagaaaggctaagtt

SEQ ID NO: 969396 - DNA, 15 bp, Homo sapiens
tgagaaaggctaagt

SEQ ID NO: 969397 - DNA, 15 bp, Homo sapiens
ctgagaaaggctaag

SEQ ID NO: 969398 - DNA, 15 bp, Homo sapiens
actgagaaaggctaa

SEQ ID NO: 969399 - DNA, 15 bp, Homo sapiens
tactgagaaaggcta

SEQ ID NO: 969400 - DNA, 15 bp, Homo sapiens
ttactgagaaaggct

SEQ ID NO: 969401 - DNA, 15 bp, Homo sapiens
tttactgagaaaggc

SEQ ID NO: 969402 - DNA, 15 bp, Homo sapiens
ttttactgagaaagg

SEQ ID NO: 969403 - DNA, 15 bp, Homo sapiens
cttttactgagaaag

SEQ ID NO: 969404 - DNA, 15 bp, Homo sapiens
acttttactgagaaa

SEQ ID NO: 969405 - DNA, 15 bp, Homo sapiens
tacttttactgagaa

SEQ ID NO: 969406 - DNA, 15 bp, Homo sapiens
ctacttttactgaga

SEQ ID NO: 969407 - DNA, 15 bp, Homo sapiens
cctacttttactgag

SEQ ID NO: 969408 - DNA, 15 bp, Homo sapiens
acctacttttactga

SEQ ID NO: 969409 - DNA, 15 bp, Homo sapiens
tacctacttttactg

SEQ ID NO: 969410 - DNA, 15 bp, Homo sapiens
ctacctacttttact

SEQ ID NO: 969411 - DNA, 15 bp, Homo sapiens
cctacctacttttac

SEQ ID NO: 969412 - DNA, 15 bp, Homo sapiens
gcctacctactttta

SEQ ID NO: 969413 - DNA, 15 bp, Homo sapiens
tgcctacctactttt

SEQ ID NO: 969414 - DNA, 15 bp, Homo sapiens
ctgcctacctacttt

SEQ ID NO: 969415 - DNA, 15 bp, Homo sapiens
tctgcctacctactt

SEQ ID NO: 969416 - DNA, 15 bp, Homo sapiens
ctctgcctacctact

SEQ ID NO: 969417 - DNA, 15 bp, Homo sapiens
cctctgcctacctac

SEQ ID NO: 969418 - DNA, 15 bp, Homo sapiens
gcctctgcctaccta

SEQ ID NO: 969419 - DNA, 15 bp, Homo sapiens
ggcctctgcctacct

SEQ ID NO: 969420 - DNA, 15 bp, Homo sapiens
tggcctctgcctacc

SEQ ID NO: 969421 - DNA, 15 bp, Homo sapiens
gtggcctctgcctac

SEQ ID NO: 969422 - DNA, 15 bp, Homo sapiens
tgtggcctctgccta

SEQ ID NO: 969423 - DNA, 15 bp, Homo sapiens
atgtggcctctgcct

SEQ ID NO: 969424 - DNA, 15 bp, Homo sapiens
catgtggcctctgcc

SEQ ID NO: 969425 - DNA, 15 bp, Homo sapiens
tcatgtggcctctgc

SEQ ID NO: 969426 - DNA, 15 bp, Homo sapiens
gtcatgtggcctctg

SEQ ID NO: 969427 - DNA, 15 bp, Homo sapiens
tgtcatgtggcctct

SEQ ID NO: 969428 - DNA, 15 bp, Homo sapiens
ctgtcatgtggcctc

SEQ ID NO: 969429 - DNA, 15 bp, Homo sapiens
gctgtcatgtggcct

SEQ ID NO: 969430 - DNA, 15 bp, Homo sapiens
tgctgtcatgtggcc

SEQ ID NO: 969431 - DNA, 15 bp, Homo sapiens
ctgctgtcatgtggc

SEQ ID NO: 969432 - DNA, 15 bp, Homo sapiens
actgctgtcatgtgg

SEQ ID NO: 969433 - DNA, 15 bp, Homo sapiens
aactgctgtcatgtg

SEQ ID NO: 969434 - DNA, 15 bp, Homo sapiens
taactgctgtcatgt

SEQ ID NO: 969435 - DNA, 15 bp, Homo sapiens
ctaactgctgtcatg

SEQ ID NO: 969436 - DNA, 15 bp, Homo sapiens
tctaactgctgtcat

SEQ ID NO: 969437 - DNA, 15 bp, Homo sapiens
ctctaactgctgtca

SEQ ID NO: 969438 - DNA, 15 bp, Homo sapiens
actctaactgctgtc

SEQ ID NO: 969439 - DNA, 15 bp, Homo sapiens
cactctaactgctgt

SEQ ID NO: 969440 - DNA, 15 bp, Homo sapiens
acactctaactgctg

SEQ ID NO: 969441 - DNA, 15 bp, Homo sapiens
cacactctaactgct

SEQ ID NO: 969442 - DNA, 15 bp, Homo sapiens
ccacactctaactgc

SEQ ID NO: 969443 - DNA, 15 bp, Homo sapiens
accacactctaactg

SEQ ID NO: 969444 - DNA, 15 bp, Homo sapiens
gaccacactctaact

SEQ ID NO: 969445 - DNA, 15 bp, Homo sapiens
agaccacactctaac

SEQ ID NO: 969446 - DNA, 15 bp, Homo sapiens
aagaccacactctaa

SEQ ID NO: 969447 - DNA, 15 bp, Homo sapiens
gaagaccacactcta

SEQ ID NO: 969448 - DNA, 15 bp, Homo sapiens
tgaagaccacactct

SEQ ID NO: 969449 - DNA, 15 bp, Homo sapiens
ttgaagaccacactc

SEQ ID NO: 969450 - DNA, 15 bp, Homo sapiens
cttgaagaccacact

SEQ ID NO: 969451 - DNA, 15 bp, Homo sapiens
ccttgaagaccacac

SEQ ID NO: 969452 - DNA, 15 bp, Homo sapiens
tccttgaagaccaca

SEQ ID NO: 969453 - DNA, 15 bp, Homo sapiens
ttccttgaagaccac

SEQ ID NO: 969454 - DNA, 15 bp, Homo sapiens
cttccttgaagacca

SEQ ID NO: 969455 - DNA, 15 bp, Homo sapiens
acttccttgaagacc

SEQ ID NO: 969456 - DNA, 15 bp, Homo sapiens
gacttccttgaagac

SEQ ID NO: 969457 - DNA, 15 bp, Homo sapiens
tgacttccttgaaga

SEQ ID NO: 969458 - DNA, 15 bp, Homo sapiens
gtgacttccttgaag

SEQ ID NO: 969459 - DNA, 15 bp, Homo sapiens
tgtgacttccttgaa

SEQ ID NO: 969460 - DNA, 15 bp, Homo sapiens
ctgtgacttccttga

SEQ ID NO: 969461 - DNA, 15 bp, Homo sapiens
tctgtgacttccttg

SEQ ID NO: 969462 - DNA, 15 bp, Homo sapiens
ttctgtgacttcctt

SEQ ID NO: 969463 - DNA, 15 bp, Homo sapiens
tttctgtgacttcct

SEQ ID NO: 969464 - DNA, 15 bp, Homo sapiens
atttctgtgacttcc

SEQ ID NO: 969465 - DNA, 15 bp, Homo sapiens
tatttctgtgacttc

SEQ ID NO: 969466 - DNA, 15 bp, Homo sapiens
gtatttctgtgactt

SEQ ID NO: 969467 - DNA, 15 bp, Homo sapiens
agtatttctgtgact

SEQ ID NO: 969468 - DNA, 15 bp, Homo sapiens
cagtatttctgtgac

SEQ ID NO: 969469 - DNA, 15 bp, Homo sapiens
acagtatttctgtga

SEQ ID NO: 969470 - DNA, 15 bp, Homo sapiens
cacagtatttctgtg

SEQ ID NO: 969471 - DNA, 15 bp, Homo sapiens
ccacagtatttctgt

SEQ ID NO: 969472 - DNA, 15 bp, Homo sapiens
cccacagtatttctg

SEQ ID NO: 969473 - DNA, 15 bp, Homo sapiens
ccccacagtatttct

SEQ ID NO: 969474 - DNA, 15 bp, Homo sapiens
tccccacagtatttc

SEQ ID NO: 969475 - DNA, 15 bp, Homo sapiens
ttccccacagtattt

SEQ ID NO: 969476 - DNA, 15 bp, Homo sapiens
attccccacagtatt

SEQ ID NO: 969477 - DNA, 15 bp, Homo sapiens
aattccccacagtat

SEQ ID NO: 969478 - DNA, 15 bp, Homo sapiens
caattccccacagta

SEQ ID NO: 969479 - DNA, 15 bp, Homo sapiens
tcaattccccacagt

SEQ ID NO: 969480 - DNA, 15 bp, Homo sapiens
ttcaattccccacag

SEQ ID NO: 969481 - DNA, 15 bp, Homo sapiens
tttcaattccccaca

SEQ ID NO: 969482 - DNA, 15 bp, Homo sapiens
gtttcaattccccac

SEQ ID NO: 969483 - DNA, 15 bp, Homo sapiens
ggtttcaattcccca

SEQ ID NO: 969484 - DNA, 15 bp, Homo sapiens
gggtttcaattcccc

SEQ ID NO: 969485 - DNA, 15 bp, Homo sapiens
ggggtttcaattccc

SEQ ID NO: 969486 - DNA, 15 bp, Homo sapiens
tggggtttcaattcc

SEQ ID NO: 969487 - DNA, 15 bp, Homo sapiens
atggggtttcaattc

SEQ ID NO: 969488 - DNA, 15 bp, Homo sapiens
catggggtttcaatt

SEQ ID NO: 969489 - DNA, 15 bp, Homo sapiens
acatggggtttcaat

SEQ ID NO: 969490 - DNA, 15 bp, Homo sapiens
cacatggggtttcaa

SEQ ID NO: 969491 - DNA, 15 bp, Homo sapiens
ccacatggggtttca

SEQ ID NO: 969492 - DNA, 15 bp, Homo sapiens
tccacatggggtttc

SEQ ID NO: 969493 - DNA, 15 bp, Homo sapiens
ttccacatggggttt

SEQ ID NO: 969494 - DNA, 15 bp, Homo sapiens
tttccacatggggtt

SEQ ID NO: 969495 - DNA, 15 bp, Homo sapiens
ttttccacatggggt

SEQ ID NO: 969496 - DNA, 15 bp, Homo sapiens
attttccacatgggg

SEQ ID NO: 969497 - DNA, 15 bp, Homo sapiens
cattttccacatggg

SEQ ID NO: 969498 - DNA, 15 bp, Homo sapiens
acattttccacatgg

SEQ ID NO: 969499 - DNA, 15 bp, Homo sapiens
tacattttccacatg

SEQ ID NO: 969500 - DNA, 15 bp, Homo sapiens
gtacattttccacat

SEQ ID NO: 969501 - DNA, 15 bp, Homo sapiens
tgtacattttccaca

SEQ ID NO: 969502 - DNA, 15 bp, Homo sapiens
ttgtacattttccac

SEQ ID NO: 969503 - DNA, 15 bp, Homo sapiens
cttgtacattttcca

SEQ ID NO: 969504 - DNA, 15 bp, Homo sapiens
tcttgtacattttcc

SEQ ID NO: 969505 - DNA, 15 bp, Homo sapiens
ctcttgtacattttc

SEQ ID NO: 969506 - DNA, 15 bp, Homo sapiens
actcttgtacatttt

SEQ ID NO: 969507 - DNA, 15 bp, Homo sapiens
cactcttgtacattt

SEQ ID NO: 969508 - DNA, 15 bp, Homo sapiens
acactcttgtacatt

SEQ ID NO: 969509 - DNA, 15 bp, Homo sapiens
gacactcttgtacat

SEQ ID NO: 969510 - DNA, 15 bp, Homo sapiens
agacactcttgtaca

SEQ ID NO: 969511 - DNA, 15 bp, Homo sapiens
gagacactcttgtac

SEQ ID NO: 969512 - DNA, 15 bp, Homo sapiens
tgagacactcttgta

SEQ ID NO: 969513 - DNA, 15 bp, Homo sapiens
ctgagacactcttgt

SEQ ID NO: 969514 - DNA, 15 bp, Homo sapiens
actgagacactcttg

SEQ ID NO: 969515 - DNA, 15 bp, Homo sapiens
cactgagacactctt

SEQ ID NO: 969516 - DNA, 15 bp, Homo sapiens
acactgagacactct

SEQ ID NO: 969517 - DNA, 15 bp, Homo sapiens
cacactgagacactc

SEQ ID NO: 969518 - DNA, 15 bp, Homo sapiens
tcacactgagacact

SEQ ID NO: 969519 - DNA, 15 bp, Homo sapiens
gtcacactgagacac

SEQ ID NO: 969520 - DNA, 15 bp, Homo sapiens
agtcacactgagaca

SEQ ID NO: 969521 - DNA, 15 bp, Homo sapiens
cagtcacactgagac

SEQ ID NO: 969522 - DNA, 15 bp, Homo sapiens
tcagtcacactgaga

SEQ ID NO: 969523 - DNA, 15 bp, Homo sapiens
ctcagtcacactgag

SEQ ID NO: 969524 - DNA, 15 bp, Homo sapiens
tctcagtcacactga

SEQ ID NO: 969525 - DNA, 15 bp, Homo sapiens
ttctcagtcacactg

SEQ ID NO: 969526 - DNA, 15 bp, Homo sapiens
cttctcagtcacact

SEQ ID NO: 969527 - DNA, 15 bp, Homo sapiens
ccttctcagtcacac

SEQ ID NO: 969528 - DNA, 15 bp, Homo sapiens
tccttctcagtcaca

SEQ ID NO: 969529 - DNA, 15 bp, Homo sapiens
ctccttctcagtcac

SEQ ID NO: 969530 - DNA, 15 bp, Homo sapiens
cctccttctcagtca

SEQ ID NO: 969531 - DNA, 15 bp, Homo sapiens
acctccttctcagtc

SEQ ID NO: 969532 - DNA, 15 bp, Homo sapiens
aacctccttctcagt

SEQ ID NO: 969533 - DNA, 15 bp, Homo sapiens
caacctccttctcag

SEQ ID NO: 969534 - DNA, 15 bp, Homo sapiens
ccaacctccttctca

SEQ ID NO: 969535 - DNA, 15 bp, Homo sapiens
cccaacctccttctc

SEQ ID NO: 969536 - DNA, 15 bp, Homo sapiens
gcccaacctccttct

SEQ ID NO: 969537 - DNA, 15 bp, Homo sapiens
tgcccaacctccttc

SEQ ID NO: 969538 - DNA, 15 bp, Homo sapiens
atgcccaacctcctt

SEQ ID NO: 969539 - DNA, 15 bp, Homo sapiens
catgcccaacctcct

SEQ ID NO: 969540 - DNA, 15 bp, Homo sapiens
ccatgcccaacctcc

SEQ ID NO: 969541 - DNA, 15 bp, Homo sapiens
cccatgcccaacctc

SEQ ID NO: 969542 - DNA, 15 bp, Homo sapiens
ccccatgcccaacct

SEQ ID NO: 969543 - DNA, 15 bp, Homo sapiens
accccatgcccaacc

SEQ ID NO: 969544 - DNA, 15 bp, Homo sapiens
aaccccatgcccaac

SEQ ID NO: 969545 - DNA, 15 bp, Homo sapiens
aaaccccatgcccaa

SEQ ID NO: 969546 - DNA, 15 bp, Homo sapiens
gaaaccccatgccca

SEQ ID NO: 969547 - DNA, 15 bp, Homo sapiens
tgaaaccccatgccc

SEQ ID NO: 969548 - DNA, 15 bp, Homo sapiens
atgaaaccccatgcc

SEQ ID NO: 969549 - DNA, 15 bp, Homo sapiens
catgaaaccccatgc

SEQ ID NO: 969550 - DNA, 15 bp, Homo sapiens
ccatgaaaccccatg

SEQ ID NO: 969551 - DNA, 15 bp, Homo sapiens
tccatgaaaccccat

SEQ ID NO: 969552 - DNA, 15 bp, Homo sapiens
ctccatgaaacccca

SEQ ID NO: 969553 - DNA, 15 bp, Homo sapiens
actccatgaaacccc

SEQ ID NO: 969554 - DNA, 15 bp, Homo sapiens
aactccatgaaaccc

SEQ ID NO: 969555 - DNA, 15 bp, Homo sapiens
aaactccatgaaacc

SEQ ID NO: 969556 - DNA, 15 bp, Homo sapiens
taaactccatgaaac

SEQ ID NO: 969557 - DNA, 15 bp, Homo sapiens
ttaaactccatgaaa

SEQ ID NO: 969558 - DNA, 15 bp, Homo sapiens
attaaactccatgaa

SEQ ID NO: 969559 - DNA, 15 bp, Homo sapiens
tattaaactccatga

SEQ ID NO: 969560 - DNA, 15 bp, Homo sapiens
ttattaaactccatg

SEQ ID NO: 969561 - DNA, 15 bp, Homo sapiens
tttattaaactccat

SEQ ID NO: 969562 - DNA, 15 bp, Homo sapiens
ctttattaaactcca

SEQ ID NO: 969563 - DNA, 15 bp, Homo sapiens
actttattaaactcc

SEQ ID NO: 969564 - DNA, 15 bp, Homo sapiens
aactttattaaactc

SEQ ID NO: 969565 - DNA, 15 bp, Homo sapiens
aaactttattaaact

SEQ ID NO: 969566 - DNA, 15 bp, Homo sapiens
caaactttattaaac

SEQ ID NO: 969567 - DNA, 15 bp, Homo sapiens
ccaaactttattaaa

SEQ ID NO: 969568 - DNA, 15 bp, Homo sapiens
accaaactttattaa

SEQ ID NO: 969569 - DNA, 15 bp, Homo sapiens
gaccaaactttatta

SEQ ID NO: 969570 - DNA, 15 bp, Homo sapiens
tgaccaaactttatt

SEQ ID NO: 969571 - DNA, 15 bp, Homo sapiens
gtgaccaaactttat

SEQ ID NO: 969572 - DNA, 15 bp, Homo sapiens
agtgaccaaacttta

SEQ ID NO: 969573 - DNA, 15 bp, Homo sapiens
aagtgaccaaacttt

SEQ ID NO: 969574 - DNA, 15 bp, Homo sapiens
taagtgaccaaactt

SEQ ID NO: 969575 - DNA, 15 bp, Homo sapiens
ctaagtgaccaaact

SEQ ID NO: 969576 - DNA, 15 bp, Homo sapiens
actaagtgaccaaac

SEQ ID NO: 969577 - DNA, 15 bp, Homo sapiens
tactaagtgaccaaa

SEQ ID NO: 969578 - DNA, 15 bp, Homo sapiens
ctactaagtgaccaa

SEQ ID NO: 969579 - DNA, 15 bp, Homo sapiens
tctactaagtgacca

SEQ ID NO: 969580 - DNA, 15 bp, Homo sapiens
ctctactaagtgacc

SEQ ID NO: 969581 - DNA, 15 bp, Homo sapiens
cctctactaagtgac

SEQ ID NO: 969582 - DNA, 15 bp, Homo sapiens
acctctactaagtga

SEQ ID NO: 969583 - DNA, 15 bp, Homo sapiens
aacctctactaagtg

SEQ ID NO: 969584 - DNA, 15 bp, Homo sapiens
aaacctctactaagt

SEQ ID NO: 969585 - DNA, 15 bp, Homo sapiens
taaacctctactaag

SEQ ID NO: 969586 - DNA, 15 bp, Homo sapiens
ttaaacctctactaa

SEQ ID NO: 969587 - DNA, 15 bp, Homo sapiens
attaaacctctacta

SEQ ID NO: 969588 - DNA, 15 bp, Homo sapiens
tattaaacctctact

SEQ ID NO: 969589 - DNA, 15 bp, Homo sapiens
ttattaaacctctac

SEQ ID NO: 969590 - DNA, 15 bp, Homo sapiens
tttattaaacctcta

SEQ ID NO: 969591 - DNA, 15 bp, Homo sapiens
atttattaaacctct

SEQ ID NO: 969592 - DNA, 15 bp, Homo sapiens
gatttattaaacctc

SEQ ID NO: 969593 - DNA, 15 bp, Homo sapiens
tgatttattaaacct

SEQ ID NO: 969594 - DNA, 15 bp, Homo sapiens
ttgatttattaaacc

SEQ ID NO: 969595 - DNA, 15 bp, Homo sapiens
gttgatttattaaac

SEQ ID NO: 969596 - DNA, 15 bp, Homo sapiens
agttgatttattaaa

SEQ ID NO: 969597 - DNA, 15 bp, Homo sapiens
cagttgatttattaa

SEQ ID NO: 969598 - DNA, 15 bp, Homo sapiens
acagttgatttatta

SEQ ID NO: 969599 - DNA, 15 bp, Homo sapiens
gacagttgatttatt

SEQ ID NO: 969600 - DNA, 15 bp, Homo sapiens
agacagttgatttat

SEQ ID NO: 969601 - DNA, 15 bp, Homo sapiens
aagacagttgattta

SEQ ID NO: 969602 - DNA, 15 bp, Homo sapiens
taagacagttgattt

SEQ ID NO: 969603 - DNA, 15 bp, Homo sapiens
ttaagacagttgatt

SEQ ID NO: 969604 - DNA, 15 bp, Homo sapiens
attaagacagttgat

SEQ ID NO: 969605 - DNA, 15 bp, Homo sapiens
gattaagacagttga

SEQ ID NO: 969606 - DNA, 15 bp, Homo sapiens
agattaagacagttg

SEQ ID NO: 969607 - DNA, 15 bp, Homo sapiens
aagattaagacagtt

SEQ ID NO: 969608 - DNA, 15 bp, Homo sapiens
aaagattaagacagt

SEQ ID NO: 969609 - DNA, 15 bp, Homo sapiens
caaagattaagacag

SEQ ID NO: 969610 - DNA, 15 bp, Homo sapiens
tcaaagattaagaca

SEQ ID NO: 969611 - DNA, 15 bp, Homo sapiens
atcaaagattaagac

SEQ ID NO: 969612 - DNA, 15 bp, Homo sapiens
gatcaaagattaaga

SEQ ID NO: 969613 - DNA, 15 bp, Homo sapiens
ggatcaaagattaag

SEQ ID NO: 969614 - DNA, 15 bp, Homo sapiens
aggatcaaagattaa

SEQ ID NO: 969615 - DNA, 15 bp, Homo sapiens
taggatcaaagatta

SEQ ID NO: 969616 - DNA, 15 bp, Homo sapiens
gtaggatcaaagatt

SEQ ID NO: 969617 - DNA, 15 bp, Homo sapiens
agtaggatcaaagat

SEQ ID NO: 969618 - DNA, 15 bp, Homo sapiens
aagtaggatcaaaga

SEQ ID NO: 969619 - DNA, 15 bp, Homo sapiens
taagtaggatcaaag

SEQ ID NO: 969620 - DNA, 15 bp, Homo sapiens
ttaagtaggatcaaa

SEQ ID NO: 969621 - DNA, 15 bp, Homo sapiens
cttaagtaggatcaa

SEQ ID NO: 969622 - DNA, 15 bp, Homo sapiens
tcttaagtaggatca

SEQ ID NO: 969623 - DNA, 15 bp, Homo sapiens
ttcttaagtaggatc

SEQ ID NO: 969624 - DNA, 15 bp, Homo sapiens
attcttaagtaggat

SEQ ID NO: 969625 - DNA, 15 bp, Homo sapiens
aattcttaagtagga

SEQ ID NO: 969626 - DNA, 15 bp, Homo sapiens
aaattcttaagtagg

SEQ ID NO: 969627 - DNA, 15 bp, Homo sapiens
aaaattcttaagtag

SEQ ID NO: 969628 - DNA, 15 bp, Homo sapiens
aaaaattcttaagta

SEQ ID NO: 969629 - DNA, 15 bp, Homo sapiens
aaaaaattcttaagt

SEQ ID NO: 969630 - DNA, 15 bp, Homo sapiens
aaaaaaattcttaag

SEQ ID NO: 969631 - DNA, 15 bp, Homo sapiens
aaaaaaaattcttaa

SEQ ID NO: 969632 - DNA, 15 bp, Homo sapiens
aaaaaaaaattctta

SEQ ID NO: 969633 - DNA, 15 bp, Homo sapiens
aaaaaaaaaattctt

SEQ ID NO: 969634 - DNA, 15 bp, Homo sapiens
caaaaaaaaaattct

SEQ ID NO: 969635 - DNA, 15 bp, Homo sapiens
acaaaaaaaaaattc

SEQ ID NO: 969636 - DNA, 15 bp, Homo sapiens
aacaaaaaaaaaatt

SEQ ID NO: 969637 - DNA, 15 bp, Homo sapiens
aaacaaaaaaaaaat

SEQ ID NO: 969638 - DNA, 15 bp, Homo sapiens
aaaacaaaaaaaaaa

SEQ ID NO: 969639 - DNA, 15 bp, Homo sapiens
aaaaacaaaaaaaaa

SEQ ID NO: 969640 - DNA, 15 bp, Homo sapiens
caaaaacaaaaaaaa

SEQ ID NO: 969641 - DNA, 15 bp, Homo sapiens
acaaaaacaaaaaaa

SEQ ID NO: 969642 - DNA, 15 bp, Homo sapiens
tacaaaaacaaaaaa

SEQ ID NO: 969643 - DNA, 15 bp, Homo sapiens
ctacaaaaacaaaaa

SEQ ID NO: 969644 - DNA, 15 bp, Homo sapiens
tctacaaaaacaaaa

SEQ ID NO: 969645 - DNA, 15 bp, Homo sapiens
ctctacaaaaacaaa

SEQ ID NO: 969646 - DNA, 15 bp, Homo sapiens
tctctacaaaaacaa

SEQ ID NO: 969647 - DNA, 15 bp, Homo sapiens
atctctacaaaaaca

SEQ ID NO: 969648 - DNA, 15 bp, Homo sapiens
catctctacaaaaac

SEQ ID NO: 969649 - DNA, 15 bp, Homo sapiens
ccatctctacaaaaa

SEQ ID NO: 969650 - DNA, 15 bp, Homo sapiens
cccatctctacaaaa

SEQ ID NO: 969651 - DNA, 15 bp, Homo sapiens
ccccatctctacaaa

SEQ ID NO: 969652 - DNA, 15 bp, Homo sapiens
gccccatctctacaa

SEQ ID NO: 969653 - DNA, 15 bp, Homo sapiens
agccccatctctaca

SEQ ID NO: 969654 - DNA, 15 bp, Homo sapiens
gagccccatctctac

SEQ ID NO: 969655 - DNA, 15 bp, Homo sapiens
agagccccatctcta

SEQ ID NO: 969656 - DNA, 15 bp, Homo sapiens
aagagccccatctct

SEQ ID NO: 969657 - DNA, 15 bp, Homo sapiens
caagagccccatctc

SEQ ID NO: 969658 - DNA, 15 bp, Homo sapiens
acaagagccccatct

SEQ ID NO: 969659 - DNA, 15 bp, Homo sapiens
aacaagagccccatc

SEQ ID NO: 969660 - DNA, 15 bp, Homo sapiens
taacaagagccccat

SEQ ID NO: 969661 - DNA, 15 bp, Homo sapiens
ataacaagagcccca

SEQ ID NO: 969662 - DNA, 15 bp, Homo sapiens
cataacaagagcccc

SEQ ID NO: 969663 - DNA, 15 bp, Homo sapiens
acataacaagagccc

SEQ ID NO: 969664 - DNA, 15 bp, Homo sapiens
aacataacaagagcc

SEQ ID NO: 969665 - DNA, 15 bp, Homo sapiens
caacataacaagagc

SEQ ID NO: 969666 - DNA, 15 bp, Homo sapiens
gcaacataacaagag

SEQ ID NO: 969667 - DNA, 15 bp, Homo sapiens
ggcaacataacaaga

SEQ ID NO: 969668 - DNA, 15 bp, Homo sapiens
gggcaacataacaag

SEQ ID NO: 969669 - DNA, 15 bp, Homo sapiens
tgggcaacataacaa

SEQ ID NO: 969670 - DNA, 15 bp, Homo sapiens
ctgggcaacataaca

SEQ ID NO: 969671 - DNA, 15 bp, Homo sapiens
cctgggcaacataac

SEQ ID NO: 969672 - DNA, 15 bp, Homo sapiens
gcctgggcaacataa

SEQ ID NO: 969673 - DNA, 15 bp, Homo sapiens
agcctgggcaacata

SEQ ID NO: 969674 - DNA, 15 bp, Homo sapiens
cagcctgggcaacat

SEQ ID NO: 969675 - DNA, 15 bp, Homo sapiens
acagcctgggcaaca

SEQ ID NO: 969676 - DNA, 15 bp, Homo sapiens
aacagcctgggcaac

SEQ ID NO: 969677 - DNA, 15 bp, Homo sapiens
gaacagcctgggcaa

SEQ ID NO: 969678 - DNA, 15 bp, Homo sapiens
agaacagcctgggca

SEQ ID NO: 969679 - DNA, 15 bp, Homo sapiens
gagaacagcctgggc

SEQ ID NO: 969680 - DNA, 15 bp, Homo sapiens
cgagaacagcctggg

SEQ ID NO: 969681 - DNA, 15 bp, Homo sapiens
tcgagaacagcctgg

SEQ ID NO: 969682 - DNA, 15 bp, Homo sapiens
ttcgagaacagcctg

SEQ ID NO: 969683 - DNA, 15 bp, Homo sapiens
gttcgagaacagcct

SEQ ID NO: 969684 - DNA, 15 bp, Homo sapiens
agttcgagaacagcc

SEQ ID NO: 969685 - DNA, 15 bp, Homo sapiens
gagttcgagaacagc

SEQ ID NO: 969686 - DNA, 15 bp, Homo sapiens
ggagttcgagaacag

SEQ ID NO: 969687 - DNA, 15 bp, Homo sapiens
aggagttcgagaaca

SEQ ID NO: 969688 - DNA, 15 bp, Homo sapiens
taggagttcgagaac

SEQ ID NO: 969689 - DNA, 15 bp, Homo sapiens
ctaggagttcgagaa

SEQ ID NO: 969690 - DNA, 15 bp, Homo sapiens
gctaggagttcgaga

SEQ ID NO: 969691 - DNA, 15 bp, Homo sapiens
ggctaggagttcgag

SEQ ID NO: 969692 - DNA, 15 bp, Homo sapiens
aggctaggagttcga

SEQ ID NO: 969693 - DNA, 15 bp, Homo sapiens
gaggctaggagttcg

SEQ ID NO: 969694 - DNA, 15 bp, Homo sapiens
tgaggctaggagttc

SEQ ID NO: 969695 - DNA, 15 bp, Homo sapiens
ctgaggctaggagtt

SEQ ID NO: 969696 - DNA, 15 bp, Homo sapiens
cctgaggctaggagt

SEQ ID NO: 969697 - DNA, 15 bp, Homo sapiens
gcctgaggctaggag

SEQ ID NO: 969698 - DNA, 15 bp, Homo sapiens
cgcctgaggctagga

SEQ ID NO: 969699 - DNA, 15 bp, Homo sapiens
tcgcctgaggctagg

SEQ ID NO: 969700 - DNA, 15 bp, Homo sapiens
atcgcctgaggctag

SEQ ID NO: 969701 - DNA, 15 bp, Homo sapiens
gatcgcctgaggcta

SEQ ID NO: 969702 - DNA, 15 bp, Homo sapiens
ggatcgcctgaggct

SEQ ID NO: 969703 - DNA, 15 bp, Homo sapiens
aggatcgcctgaggc

SEQ ID NO: 969704 - DNA, 15 bp, Homo sapiens
gaggatcgcctgagg

SEQ ID NO: 969705 - DNA, 15 bp, Homo sapiens
ggaggatcgcctgag

SEQ ID NO: 969706 - DNA, 15 bp, Homo sapiens
gggaggatcgcctga

SEQ ID NO: 969707 - DNA, 15 bp, Homo sapiens
agggaggatcgcctg

SEQ ID NO: 969708 - DNA, 15 bp, Homo sapiens
gagggaggatcgcct

SEQ ID NO: 969709 - DNA, 15 bp, Homo sapiens
ggagggaggatcgcc

SEQ ID NO: 969710 - DNA, 15 bp, Homo sapiens
aggagggaggatcgc

SEQ ID NO: 969711 - DNA, 15 bp, Homo sapiens
gaggagggaggatcg

SEQ ID NO: 969712 - DNA, 15 bp, Homo sapiens
tgaggagggaggatc

SEQ ID NO: 969713 - DNA, 15 bp, Homo sapiens
ctgaggagggaggat

SEQ ID NO: 969714 - DNA, 15 bp, Homo sapiens
cctgaggagggagga

SEQ ID NO: 969715 - DNA, 15 bp, Homo sapiens
gcctgaggagggagg

SEQ ID NO: 969716 - DNA, 15 bp, Homo sapiens
agcctgaggagggag

SEQ ID NO: 969717 - DNA, 15 bp, Homo sapiens
gagcctgaggaggga

SEQ ID NO: 969718 - DNA, 15 bp, Homo sapiens
ggagcctgaggaggg

SEQ ID NO: 969719 - DNA, 15 bp, Homo sapiens
tggagcctgaggagg

SEQ ID NO: 969720 - DNA, 15 bp, Homo sapiens
ctggagcctgaggag

SEQ ID NO: 969721 - DNA, 15 bp, Homo sapiens
tctggagcctgagga

SEQ ID NO: 969722 - DNA, 15 bp, Homo sapiens
ttctggagcctgagg

SEQ ID NO: 969723 - DNA, 15 bp, Homo sapiens
cttctggagcctgag

SEQ ID NO: 969724 - DNA, 15 bp, Homo sapiens
acttctggagcctga

SEQ ID NO: 969725 - DNA, 15 bp, Homo sapiens
gacttctggagcctg

SEQ ID NO: 969726 - DNA, 15 bp, Homo sapiens
ggacttctggagcct

SEQ ID NO: 969727 - DNA, 15 bp, Homo sapiens
aggacttctggagcc

SEQ ID NO: 969728 - DNA, 15 bp, Homo sapiens
caggacttctggagc

SEQ ID NO: 969729 - DNA, 15 bp, Homo sapiens
ccaggacttctggag

SEQ ID NO: 969730 - DNA, 15 bp, Homo sapiens
cccaggacttctgga

SEQ ID NO: 969731 - DNA, 15 bp, Homo sapiens
tcccaggacttctgg

SEQ ID NO: 969732 - DNA, 15 bp, Homo sapiens
atcccaggacttctg

SEQ ID NO: 969733 - DNA, 15 bp, Homo sapiens
aatcccaggacttct

SEQ ID NO: 969734 - DNA, 15 bp, Homo sapiens
taatcccaggacttc

SEQ ID NO: 969735 - DNA, 15 bp, Homo sapiens
gtaatcccaggactt

SEQ ID NO: 969736 - DNA, 15 bp, Homo sapiens
agtaatcccaggact

SEQ ID NO: 969737 - DNA, 15 bp, Homo sapiens
cagtaatcccaggac

SEQ ID NO: 969738 - DNA, 15 bp, Homo sapiens
ccagtaatcccagga

SEQ ID NO: 969739 - DNA, 15 bp, Homo sapiens
gccagtaatcccagg

SEQ ID NO: 969740 - DNA, 15 bp, Homo sapiens
cgccagtaatcccag

SEQ ID NO: 969741 - DNA, 15 bp, Homo sapiens
ccgccagtaatccca

SEQ ID NO: 969742 - DNA, 15 bp, Homo sapiens
cccgccagtaatccc

SEQ ID NO: 969743 - DNA, 15 bp, Homo sapiens
tcccgccagtaatcc

SEQ ID NO: 969744 - DNA, 15 bp, Homo sapiens
ctcccgccagtaatc

SEQ ID NO: 969745 - DNA, 15 bp, Homo sapiens
gctcccgccagtaat

SEQ ID NO: 969746 - DNA, 15 bp, Homo sapiens
ggctcccgccagtaa

SEQ ID NO: 969747 - DNA, 15 bp, Homo sapiens
tggctcccgccagta

SEQ ID NO: 969748 - DNA, 15 bp, Homo sapiens
gtggctcccgccagt

SEQ ID NO: 969749 - DNA, 15 bp, Homo sapiens
ggtggctcccgccag

SEQ ID NO: 969750 - DNA, 15 bp, Homo sapiens
tggtggctcccgcca

SEQ ID NO: 969751 - DNA, 15 bp, Homo sapiens
atggtggctcccgcc

SEQ ID NO: 969752 - DNA, 15 bp, Homo sapiens
catggtggctcccgc

SEQ ID NO: 969753 - DNA, 15 bp, Homo sapiens
gcatggtggctcccg

SEQ ID NO: 969754 - DNA, 15 bp, Homo sapiens
tgcatggtggctccc

SEQ ID NO: 969755 - DNA, 15 bp, Homo sapiens
ctgcatggtggctcc

SEQ ID NO: 969756 - DNA, 15 bp, Homo sapiens
cctgcatggtggctc

SEQ ID NO: 969757 - DNA, 15 bp, Homo sapiens
gcctgcatggtggct

SEQ ID NO: 969758 - DNA, 15 bp, Homo sapiens
ggcctgcatggtggc

SEQ ID NO: 969759 - DNA, 15 bp, Homo sapiens
aggcctgcatggtgg

SEQ ID NO: 969760 - DNA, 15 bp, Homo sapiens
gaggcctgcatggtg

SEQ ID NO: 969761 - DNA, 15 bp, Homo sapiens
agaggcctgcatggt

SEQ ID NO: 969762 - DNA, 15 bp, Homo sapiens
aagaggcctgcatgg

SEQ ID NO: 969763 - DNA, 15 bp, Homo sapiens
caagaggcctgcatg

SEQ ID NO: 969764 - DNA, 15 bp, Homo sapiens
gcaagaggcctgcat

SEQ ID NO: 969765 - DNA, 15 bp, Homo sapiens
agcaagaggcctgca

SEQ ID NO: 969766 - DNA, 15 bp, Homo sapiens
gagcaagaggcctgc

SEQ ID NO: 969767 - DNA, 15 bp, Homo sapiens
ggagcaagaggcctg

SEQ ID NO: 969768 - DNA, 15 bp, Homo sapiens
aggagcaagaggcct

SEQ ID NO: 969769 - DNA, 15 bp, Homo sapiens
taggagcaagaggcc

SEQ ID NO: 969770 - DNA, 15 bp, Homo sapiens
gtaggagcaagaggc

SEQ ID NO: 969771 - DNA, 15 bp, Homo sapiens
agtaggagcaagagg

SEQ ID NO: 969772 - DNA, 15 bp, Homo sapiens
aagtaggagcaagag

SEQ ID NO: 969773 - DNA, 15 bp, Homo sapiens
aaagtaggagcaaga

SEQ ID NO: 969774 - DNA, 15 bp, Homo sapiens
aaaagtaggagcaag

SEQ ID NO: 969775 - DNA, 15 bp, Homo sapiens
caaaagtaggagcaa

SEQ ID NO: 969776 - DNA, 15 bp, Homo sapiens
tcaaaagtaggagca

SEQ ID NO: 969777 - DNA, 15 bp, Homo sapiens
ctcaaaagtaggagc

SEQ ID NO: 969778 - DNA, 15 bp, Homo sapiens
tctcaaaagtaggag

SEQ ID NO: 969779 - DNA, 15 bp, Homo sapiens
ttctcaaaagtagga

SEQ ID NO: 969780 - DNA, 15 bp, Homo sapiens
tttctcaaaagtagg

SEQ ID NO: 969781 - DNA, 15 bp, Homo sapiens
ctttctcaaaagtag

SEQ ID NO: 969782 - DNA, 15 bp, Homo sapiens
cctttctcaaaagta

SEQ ID NO: 969783 - DNA, 15 bp, Homo sapiens
tcctttctcaaaagt

SEQ ID NO: 969784 - DNA, 15 bp, Homo sapiens
ttcctttctcaaaag

SEQ ID NO: 969785 - DNA, 15 bp, Homo sapiens
cttcctttctcaaaa

SEQ ID NO: 969786 - DNA, 15 bp, Homo sapiens
acttcctttctcaaa

SEQ ID NO: 969787 - DNA, 15 bp, Homo sapiens
aacttcctttctcaa

SEQ ID NO: 969788 - DNA, 15 bp, Homo sapiens
aaacttcctttctca

SEQ ID NO: 969789 - DNA, 15 bp, Homo sapiens
taaacttcctttctc

SEQ ID NO: 969790 - DNA, 15 bp, Homo sapiens
ttaaacttcctttct

SEQ ID NO: 969791 - DNA, 15 bp, Homo sapiens
gttaaacttcctttc

SEQ ID NO: 969792 - DNA, 15 bp, Homo sapiens
ggttaaacttccttt

SEQ ID NO: 969793 - DNA, 15 bp, Homo sapiens
cggttaaacttcctt

SEQ ID NO: 969794 - DNA, 15 bp, Homo sapiens
ccggttaaacttcct

SEQ ID NO: 969795 - DNA, 15 bp, Homo sapiens
accggttaaacttcc

SEQ ID NO: 969796 - DNA, 15 bp, Homo sapiens
aaccggttaaacttc

SEQ ID NO: 969797 - DNA, 15 bp, Homo sapiens
aaaccggttaaactt

SEQ ID NO: 969798 - DNA, 15 bp, Homo sapiens
aaaaccggttaaact

SEQ ID NO: 969799 - DNA, 15 bp, Homo sapiens
aaaaaccggttaaac

SEQ ID NO: 969800 - DNA, 15 bp, Homo sapiens
aaaaaaccggttaaa

SEQ ID NO: 969801 - DNA, 15 bp, Homo sapiens
aaaaaaaccggttaa

SEQ ID NO: 969802 - DNA, 15 bp, Homo sapiens
aaaaaaaaccggtta

SEQ ID NO: 969803 - DNA, 15 bp, Homo sapiens
caaaaaaaaccggtt

SEQ ID NO: 969804 - DNA, 15 bp, Homo sapiens
acaaaaaaaaccggt

SEQ ID NO: 969805 - DNA, 15 bp, Homo sapiens
gacaaaaaaaaccgg

SEQ ID NO: 969806 - DNA, 15 bp, Homo sapiens
agacaaaaaaaaccg

SEQ ID NO: 969807 - DNA, 15 bp, Homo sapiens
aagacaaaaaaaacc

SEQ ID NO: 969808 - DNA, 15 bp, Homo sapiens
aaagacaaaaaaaac

SEQ ID NO: 969809 - DNA, 15 bp, Homo sapiens
aaaagacaaaaaaaa

SEQ ID NO: 969810 - DNA, 15 bp, Homo sapiens
aaaaagacaaaaaaa

SEQ ID NO: 969811 - DNA, 15 bp, Homo sapiens
aaaaaagacaaaaaa

SEQ ID NO: 969812 - DNA, 15 bp, Homo sapiens
aaaaaaagacaaaaa

SEQ ID NO: 969813 - DNA, 15 bp, Homo sapiens
aaaaaaaagacaaaa

SEQ ID NO: 969814 - DNA, 15 bp, Homo sapiens
aaaaaaaaagacaaa

SEQ ID NO: 969815 - DNA, 15 bp, Homo sapiens
aaaaaaaaaagacaa

SEQ ID NO: 969816 - DNA, 15 bp, Homo sapiens
aaaaaaaaaaagaca

SEQ ID NO: 969817 - DNA, 15 bp, Homo sapiens
aaaaaaaaaaaagac

SEQ ID NO: 969818 - DNA, 15 bp, Homo sapiens
aaaaaaaaaaaaaga

SEQ ID NO: 969819 - DNA, 15 bp, Homo sapiens
aaaaaaaaaaaaaag

SEQ ID NO: 969820 - DNA, 15 bp, Homo sapiens
aaaaaaaaaaaaaaa

SEQ ID NO: 969821 - DNA, 15 bp, Homo sapiens
caaaaaaaaaaaaaa

SEQ ID NO: 969822 - DNA, 15 bp, Homo sapiens
tcaaaaaaaaaaaaa

SEQ ID NO: 969823 - DNA, 15 bp, Homo sapiens
ctcaaaaaaaaaaaa

SEQ ID NO: 969824 - DNA, 15 bp, Homo sapiens
tctcaaaaaaaaaaa

SEQ ID NO: 969825 - DNA, 15 bp, Homo sapiens
gtctcaaaaaaaaaa

SEQ ID NO: 969826 - DNA, 15 bp, Homo sapiens
tgtctcaaaaaaaaa

SEQ ID NO: 969827 - DNA, 15 bp, Homo sapiens
ctgtctcaaaaaaaa

SEQ ID NO: 969828 - DNA, 15 bp, Homo sapiens
tctgtctcaaaaaaa

SEQ ID NO: 969829 - DNA, 15 bp, Homo sapiens
ctctgtctcaaaaaa

SEQ ID NO: 969830 - DNA, 15 bp, Homo sapiens
actctgtctcaaaaa

SEQ ID NO: 969831 - DNA, 15 bp, Homo sapiens
gactctgtctcaaaa

SEQ ID NO: 969832 - DNA, 15 bp, Homo sapiens
agactctgtctcaaa

SEQ ID NO: 969833 - DNA, 15 bp, Homo sapiens
gagactctgtctcaa

SEQ ID NO: 969834 - DNA, 15 bp, Homo sapiens
tgagactctgtctca

SEQ ID NO: 969835 - DNA, 15 bp, Homo sapiens
gtgagactctgtctc

SEQ ID NO: 969836 - DNA, 15 bp, Homo sapiens
agtgagactctgtct

SEQ ID NO: 969837 - DNA, 15 bp, Homo sapiens
gagtgagactctgtc

SEQ ID NO: 969838 - DNA, 15 bp, Homo sapiens
agagtgagactctgt

SEQ ID NO: 969839 - DNA, 15 bp, Homo sapiens
cagagtgagactctg

SEQ ID NO: 969840 - DNA, 15 bp, Homo sapiens
acagagtgagactct

SEQ ID NO: 969841 - DNA, 15 bp, Homo sapiens
aacagagtgagactc

SEQ ID NO: 969842 - DNA, 15 bp, Homo sapiens
caacagagtgagact

SEQ ID NO: 969843 - DNA, 15 bp, Homo sapiens
gcaacagagtgagac

SEQ ID NO: 969844 - DNA, 15 bp, Homo sapiens
ggcaacagagtgaga

SEQ ID NO: 969845 - DNA, 15 bp, Homo sapiens
gggcaacagagtgag

SEQ ID NO: 969846 - DNA, 15 bp, Homo sapiens
tgggcaacagagtga

SEQ ID NO: 969847 - DNA, 15 bp, Homo sapiens
atgggcaacagagtg

SEQ ID NO: 969848 - DNA, 15 bp, Homo sapiens
catgggcaacagagt

SEQ ID NO: 969849 - DNA, 15 bp, Homo sapiens
gcatgggcaacagag

SEQ ID NO: 969850 - DNA, 15 bp, Homo sapiens
agcatgggcaacaga

SEQ ID NO: 969851 - DNA, 15 bp, Homo sapiens
cagcatgggcaacag

SEQ ID NO: 969852 - DNA, 15 bp, Homo sapiens
ccagcatgggcaaca

SEQ ID NO: 969853 - DNA, 15 bp, Homo sapiens
tccagcatgggcaac

SEQ ID NO: 969854 - DNA, 15 bp, Homo sapiens
ctccagcatgggcaa

SEQ ID NO: 969855 - DNA, 15 bp, Homo sapiens
actccagcatgggca

SEQ ID NO: 969856 - DNA, 15 bp, Homo sapiens
cactccagcatgggc

SEQ ID NO: 969857 - DNA, 15 bp, Homo sapiens
gcactccagcatggg

SEQ ID NO: 969858 - DNA, 15 bp, Homo sapiens
tgcactccagcatgg

SEQ ID NO: 969859 - DNA, 15 bp, Homo sapiens
ctgcactccagcatg

SEQ ID NO: 969860 - DNA, 15 bp, Homo sapiens
actgcactccagcat

SEQ ID NO: 969861 - DNA, 15 bp, Homo sapiens
cactgcactccagca

SEQ ID NO: 969862 - DNA, 15 bp, Homo sapiens
ccactgcactccagc

SEQ ID NO: 969863 - DNA, 15 bp, Homo sapiens
accactgcactccag

SEQ ID NO: 969864 - DNA, 15 bp, Homo sapiens
caccactgcactcca

SEQ ID NO: 969865 - DNA, 15 bp, Homo sapiens
gcaccactgcactcc

SEQ ID NO: 969866 - DNA, 15 bp, Homo sapiens
tgcaccactgcactc

SEQ ID NO: 969867 - DNA, 15 bp, Homo sapiens
ttgcaccactgcact

SEQ ID NO: 969868 - DNA, 15 bp, Homo sapiens
attgcaccactgcac

SEQ ID NO: 969869 - DNA, 15 bp, Homo sapiens
gattgcaccactgca

SEQ ID NO: 969870 - DNA, 15 bp, Homo sapiens
agattgcaccactgc

SEQ ID NO: 969871 - DNA, 15 bp, Homo sapiens
gagattgcaccactg

SEQ ID NO: 969872 - DNA, 15 bp, Homo sapiens
tgagattgcaccact

SEQ ID NO: 969873 - DNA, 15 bp, Homo sapiens
ctgagattgcaccac

SEQ ID NO: 969874 - DNA, 15 bp, Homo sapiens
gctgagattgcacca

SEQ ID NO: 969875 - DNA, 15 bp, Homo sapiens
agctgagattgcacc

SEQ ID NO: 969876 - DNA, 15 bp, Homo sapiens
gagctgagattgcac

SEQ ID NO: 969877 - DNA, 15 bp, Homo sapiens
tgagctgagattgca

SEQ ID NO: 969878 - DNA, 15 bp, Homo sapiens
gtgagctgagattgc

SEQ ID NO: 969879 - DNA, 15 bp, Homo sapiens
agtgagctgagattg

SEQ ID NO: 969880 - DNA, 15 bp, Homo sapiens
cagtgagctgagatt

SEQ ID NO: 969881 - DNA, 15 bp, Homo sapiens
gcagtgagctgagat

SEQ ID NO: 969882 - DNA, 15 bp, Homo sapiens
ggcagtgagctgaga

SEQ ID NO: 969883 - DNA, 15 bp, Homo sapiens
aggcagtgagctgag

SEQ ID NO: 969884 - DNA, 15 bp, Homo sapiens
gaggcagtgagctga

SEQ ID NO: 969885 - DNA, 15 bp, Homo sapiens
ggaggcagtgagctg

SEQ ID NO: 969886 - DNA, 15 bp, Homo sapiens
gggaggcagtgagct

SEQ ID NO: 969887 - DNA, 15 bp, Homo sapiens
cgggaggcagtgagc

SEQ ID NO: 969888 - DNA, 15 bp, Homo sapiens
ccgggaggcagtgag

SEQ ID NO: 969889 - DNA, 15 bp, Homo sapiens
cccgggaggcagtga

SEQ ID NO: 969890 - DNA, 15 bp, Homo sapiens
acccgggaggcagtg

SEQ ID NO: 969891 - DNA, 15 bp, Homo sapiens
aacccgggaggcagt

SEQ ID NO: 969892 - DNA, 15 bp, Homo sapiens
gaacccgggaggcag

SEQ ID NO: 969893 - DNA, 15 bp, Homo sapiens
tgaacccgggaggca

SEQ ID NO: 969894 - DNA, 15 bp, Homo sapiens
ttgaacccgggaggc

SEQ ID NO: 969895 - DNA, 15 bp, Homo sapiens
cttgaacccgggagg

SEQ ID NO: 969896 - DNA, 15 bp, Homo sapiens
acttgaacccgggag

SEQ ID NO: 969897 - DNA, 15 bp, Homo sapiens
cacttgaacccggga

SEQ ID NO: 969898 - DNA, 15 bp, Homo sapiens
tcacttgaacccggg

SEQ ID NO: 969899 - DNA, 15 bp, Homo sapiens
atcacttgaacccgg

SEQ ID NO: 969900 - DNA, 15 bp, Homo sapiens
aatcacttgaacccg

SEQ ID NO: 969901 - DNA, 15 bp, Homo sapiens
gaatcacttgaaccc

SEQ ID NO: 969902 - DNA, 15 bp, Homo sapiens
agaatcacttgaacc

SEQ ID NO: 969903 - DNA, 15 bp, Homo sapiens
gagaatcacttgaac

SEQ ID NO: 969904 - DNA, 15 bp, Homo sapiens
ggagaatcacttgaa

SEQ ID NO: 969905 - DNA, 15 bp, Homo sapiens
aggagaatcacttga

SEQ ID NO: 969906 - DNA, 15 bp, Homo sapiens
caggagaatcacttg

SEQ ID NO: 969907 - DNA, 15 bp, Homo sapiens
gcaggagaatcactt

SEQ ID NO: 969908 - DNA, 15 bp, Homo sapiens
ggcaggagaatcact

SEQ ID NO: 969909 - DNA, 15 bp, Homo sapiens
aggcaggagaatcac

SEQ ID NO: 969910 - DNA, 15 bp, Homo sapiens
gaggcaggagaatca

SEQ ID NO: 969911 - DNA, 15 bp, Homo sapiens
tgaggcaggagaatc

SEQ ID NO: 969912 - DNA, 15 bp, Homo sapiens
ctgaggcaggagaat

SEQ ID NO: 969913 - DNA, 15 bp, Homo sapiens
gctgaggcaggagaa

SEQ ID NO: 969914 - DNA, 15 bp, Homo sapiens
ggctgaggcaggaga

SEQ ID NO: 969915 - DNA, 15 bp, Homo sapiens
aggctgaggcaggag

SEQ ID NO: 969916 - DNA, 15 bp, Homo sapiens
gaggctgaggcagga

SEQ ID NO: 969917 - DNA, 15 bp, Homo sapiens
ggaggctgaggcagg

SEQ ID NO: 969918 - DNA, 15 bp, Homo sapiens
gggaggctgaggcag

SEQ ID NO: 969919 - DNA, 15 bp, Homo sapiens
cgggaggctgaggca

SEQ ID NO: 969920 - DNA, 15 bp, Homo sapiens
tcgggaggctgaggc

SEQ ID NO: 969921 - DNA, 15 bp, Homo sapiens
ctcgggaggctgagg

SEQ ID NO: 969922 - DNA, 15 bp, Homo sapiens
actcgggaggctgag

SEQ ID NO: 969923 - DNA, 15 bp, Homo sapiens
tactcgggaggctga

SEQ ID NO: 969924 - DNA, 15 bp, Homo sapiens
ctactcgggaggctg

SEQ ID NO: 969925 - DNA, 15 bp, Homo sapiens
gctactcgggaggct

SEQ ID NO: 969926 - DNA, 15 bp, Homo sapiens
agctactcgggaggc

SEQ ID NO: 969927 - DNA, 15 bp, Homo sapiens
cagctactcgggagg

SEQ ID NO: 969928 - DNA, 15 bp, Homo sapiens
ccagctactcgggag

SEQ ID NO: 969929 - DNA, 15 bp, Homo sapiens
cccagctactcggga

SEQ ID NO: 969930 - DNA, 15 bp, Homo sapiens
tcccagctactcggg

SEQ ID NO: 969931 - DNA, 15 bp, Homo sapiens
gtcccagctactcgg

SEQ ID NO: 969932 - DNA, 15 bp, Homo sapiens
agtcccagctactcg

SEQ ID NO: 969933 - DNA, 15 bp, Homo sapiens
tagtcccagctactc

SEQ ID NO: 969934 - DNA, 15 bp, Homo sapiens
gtagtcccagctact

SEQ ID NO: 969935 - DNA, 15 bp, Homo sapiens
tgtagtcccagctac

SEQ ID NO: 969936 - DNA, 15 bp, Homo sapiens
ctgtagtcccagcta

SEQ ID NO: 969937 - DNA, 15 bp, Homo sapiens
cctgtagtcccagct

SEQ ID NO: 969938 - DNA, 15 bp, Homo sapiens
gcctgtagtcccagc

SEQ ID NO: 969939 - DNA, 15 bp, Homo sapiens
tgcctgtagtcccag

SEQ ID NO: 969940 - DNA, 15 bp, Homo sapiens
gtgcctgtagtccca

SEQ ID NO: 969941 - DNA, 15 bp, Homo sapiens
ggtgcctgtagtccc

SEQ ID NO: 969942 - DNA, 15 bp, Homo sapiens
aggtgcctgtagtcc

SEQ ID NO: 969943 - DNA, 15 bp, Homo sapiens
caggtgcctgtagtc

SEQ ID NO: 969944 - DNA, 15 bp, Homo sapiens
gcaggtgcctgtagt

SEQ ID NO: 969945 - DNA, 15 bp, Homo sapiens
ggcaggtgcctgtag

SEQ ID NO: 969946 - DNA, 15 bp, Homo sapiens
tggcaggtgcctgta

SEQ ID NO: 969947 - DNA, 15 bp, Homo sapiens
gtggcaggtgcctgt

SEQ ID NO: 969948 - DNA, 15 bp, Homo sapiens
ggtggcaggtgcctg

SEQ ID NO: 969949 - DNA, 15 bp, Homo sapiens
tggtggcaggtgcct

SEQ ID NO: 969950 - DNA, 15 bp, Homo sapiens
gtggtggcaggtgcc

SEQ ID NO: 969951 - DNA, 15 bp, Homo sapiens
cgtggtggcaggtgc

SEQ ID NO: 969952 - DNA, 15 bp, Homo sapiens
gcgtggtggcaggtg

SEQ ID NO: 969953 - DNA, 15 bp, Homo sapiens
ggcgtggtggcaggt

SEQ ID NO: 969954 - DNA, 15 bp, Homo sapiens
gggcgtggtggcagg

SEQ ID NO: 969955 - DNA, 15 bp, Homo sapiens
tgggcgtggtggcag

SEQ ID NO: 969956 - DNA, 15 bp, Homo sapiens
ctgggcgtggtggca

SEQ ID NO: 969957 - DNA, 15 bp, Homo sapiens
gctgggcgtggtggc

SEQ ID NO: 969958 - DNA, 15 bp, Homo sapiens
agctgggcgtggtgg

SEQ ID NO: 969959 - DNA, 15 bp, Homo sapiens
tagctgggcgtggtg

SEQ ID NO: 969960 - DNA, 15 bp, Homo sapiens
ttagctgggcgtggt

SEQ ID NO: 969961 - DNA, 15 bp, Homo sapiens
attagctgggcgtgg

SEQ ID NO: 969962 - DNA, 15 bp, Homo sapiens
aattagctgggcgtg

SEQ ID NO: 969963 - DNA, 15 bp, Homo sapiens
aaattagctgggcgt

SEQ ID NO: 969964 - DNA, 15 bp, Homo sapiens
aaaattagctgggcg

SEQ ID NO: 969965 - DNA, 15 bp, Homo sapiens
aaaaattagctgggc

SEQ ID NO: 969966 - DNA, 15 bp, Homo sapiens
caaaaattagctggg

SEQ ID NO: 969967 - DNA, 15 bp, Homo sapiens
acaaaaattagctgg

SEQ ID NO: 969968 - DNA, 15 bp, Homo sapiens
tacaaaaattagctg

SEQ ID NO: 969969 - DNA, 15 bp, Homo sapiens
atacaaaaattagct

SEQ ID NO: 969970 - DNA, 15 bp, Homo sapiens
aatacaaaaattagc

SEQ ID NO: 969971 - DNA, 15 bp, Homo sapiens
aaatacaaaaattag

SEQ ID NO: 969972 - DNA, 15 bp, Homo sapiens
aaaatacaaaaatta

SEQ ID NO: 969973 - DNA, 15 bp, Homo sapiens
aaaaatacaaaaatt

SEQ ID NO: 969974 - DNA, 15 bp, Homo sapiens
taaaaatacaaaaat

SEQ ID NO: 969975 - DNA, 15 bp, Homo sapiens
ctaaaaatacaaaaa

SEQ ID NO: 969976 - DNA, 15 bp, Homo sapiens
actaaaaatacaaaa

SEQ ID NO: 969977 - DNA, 15 bp, Homo sapiens
tactaaaaatacaaa

SEQ ID NO: 969978 - DNA, 15 bp, Homo sapiens
ctactaaaaatacaa

SEQ ID NO: 969979 - DNA, 15 bp, Homo sapiens
tctactaaaaataca

SEQ ID NO: 969980 - DNA, 15 bp, Homo sapiens
ttctactaaaaatac

SEQ ID NO: 969981 - DNA, 15 bp, Homo sapiens
tttctactaaaaata

SEQ ID NO: 969982 - DNA, 15 bp, Homo sapiens
atttctactaaaaat

SEQ ID NO: 969983 - DNA, 15 bp, Homo sapiens
catttctactaaaaa

SEQ ID NO: 969984 - DNA, 15 bp, Homo sapiens
ccatttctactaaaa

SEQ ID NO: 969985 - DNA, 15 bp, Homo sapiens
cccatttctactaaa

SEQ ID NO: 969986 - DNA, 15 bp, Homo sapiens
ccccatttctactaa

SEQ ID NO: 969987 - DNA, 15 bp, Homo sapiens
accccatttctacta

SEQ ID NO: 969988 - DNA, 15 bp, Homo sapiens
aaccccatttctact

SEQ ID NO: 969989 - DNA, 15 bp, Homo sapiens
aaaccccatttctac

SEQ ID NO: 969990 - DNA, 15 bp, Homo sapiens
gaaaccccatttcta

SEQ ID NO: 969991 - DNA, 15 bp, Homo sapiens
tgaaaccccatttct

SEQ ID NO: 969992 - DNA, 15 bp, Homo sapiens
gtgaaaccccatttc

SEQ ID NO: 969993 - DNA, 15 bp, Homo sapiens
ggtgaaaccccattt

SEQ ID NO: 969994 - DNA, 15 bp, Homo sapiens
tggtgaaaccccatt

SEQ ID NO: 969995 - DNA, 15 bp, Homo sapiens
atggtgaaaccccat

SEQ ID NO: 969996 - DNA, 15 bp, Homo sapiens
tatggtgaaacccca

SEQ ID NO: 969997 - DNA, 15 bp, Homo sapiens
atatggtgaaacccc

SEQ ID NO: 969998 - DNA, 15 bp, Homo sapiens
aatatggtgaaaccc

SEQ ID NO: 969999 - DNA, 15 bp, Homo sapiens
caatatggtgaaacc

SEQ ID NO: 970000 - DNA, 15 bp, Homo sapiens
ccaatatggtgaaac

SEQ ID NO: 970001 - DNA, 15 bp, Homo sapiens
gccaatatggtgaaa

SEQ ID NO: 970002 - DNA, 15 bp, Homo sapiens
ggccaatatggtgaa

SEQ ID NO: 970003 - DNA, 15 bp, Homo sapiens
tggccaatatggtga

SEQ ID NO: 970004 - DNA, 15 bp, Homo sapiens
ctggccaatatggtg

SEQ ID NO: 970005 - DNA, 15 bp, Homo sapiens
cctggccaatatggt

SEQ ID NO: 970006 - DNA, 15 bp, Homo sapiens
gcctggccaatatgg

SEQ ID NO: 970007 - DNA, 15 bp, Homo sapiens
agcctggccaatatg

SEQ ID NO: 970008 - DNA, 15 bp, Homo sapiens
cagcctggccaatat

SEQ ID NO: 970009 - DNA, 15 bp, Homo sapiens
tcagcctggccaata

SEQ ID NO: 970010 - DNA, 15 bp, Homo sapiens
atcagcctggccaat

SEQ ID NO: 970011 - DNA, 15 bp, Homo sapiens
gatcagcctggccaa

SEQ ID NO: 970012 - DNA, 15 bp, Homo sapiens
agatcagcctggcca

SEQ ID NO: 970013 - DNA, 15 bp, Homo sapiens
gagatcagcctggcc

SEQ ID NO: 970014 - DNA, 15 bp, Homo sapiens
cgagatcagcctggc

SEQ ID NO: 970015 - DNA, 15 bp, Homo sapiens
tcgagatcagcctgg

SEQ ID NO: 970016 - DNA, 15 bp, Homo sapiens
ttcgagatcagcctg

SEQ ID NO: 970017 - DNA, 15 bp, Homo sapiens
gttcgagatcagcct

SEQ ID NO: 970018 - DNA, 15 bp, Homo sapiens
agttcgagatcagcc

SEQ ID NO: 970019 - DNA, 15 bp, Homo sapiens
gagttcgagatcagc

SEQ ID NO: 970020 - DNA, 15 bp, Homo sapiens
ggagttcgagatcag

SEQ ID NO: 970021 - DNA, 15 bp, Homo sapiens
aggagttcgagatca

SEQ ID NO: 970022 - DNA, 15 bp, Homo sapiens
caggagttcgagatc

SEQ ID NO: 970023 - DNA, 15 bp, Homo sapiens
tcaggagttcgagat

SEQ ID NO: 970024 - DNA, 15 bp, Homo sapiens
gtcaggagttcgaga

SEQ ID NO: 970025 - DNA, 15 bp, Homo sapiens
ggtcaggagttcgag

SEQ ID NO: 970026 - DNA, 15 bp, Homo sapiens
aggtcaggagttcga

SEQ ID NO: 970027 - DNA, 15 bp, Homo sapiens
gaggtcaggagttcg

SEQ ID NO: 970028 - DNA, 15 bp, Homo sapiens
tgaggtcaggagttc

SEQ ID NO: 970029 - DNA, 15 bp, Homo sapiens
ctgaggtcaggagtt

SEQ ID NO: 970030 - DNA, 15 bp, Homo sapiens
cctgaggtcaggagt

SEQ ID NO: 970031 - DNA, 15 bp, Homo sapiens
acctgaggtcaggag

SEQ ID NO: 970032 - DNA, 15 bp, Homo sapiens
cacctgaggtcagga

SEQ ID NO: 970033 - DNA, 15 bp, Homo sapiens
tcacctgaggtcagg

SEQ ID NO: 970034 - DNA, 15 bp, Homo sapiens
atcacctgaggtcag

SEQ ID NO: 970035 - DNA, 15 bp, Homo sapiens
gatcacctgaggtca

SEQ ID NO: 970036 - DNA, 15 bp, Homo sapiens
ggatcacctgaggtc

SEQ ID NO: 970037 - DNA, 15 bp, Homo sapiens
cggatcacctgaggt

SEQ ID NO: 970038 - DNA, 15 bp, Homo sapiens
gcggatcacctgagg

SEQ ID NO: 970039 - DNA, 15 bp, Homo sapiens
ggcggatcacctgag

SEQ ID NO: 970040 - DNA, 15 bp, Homo sapiens
aggcggatcacctga

SEQ ID NO: 970041 - DNA, 15 bp, Homo sapiens
caggcggatcacctg

SEQ ID NO: 970042 - DNA, 15 bp, Homo sapiens
gcaggcggatcacct

SEQ ID NO: 970043 - DNA, 15 bp, Homo sapiens
ggcaggcggatcacc

SEQ ID NO: 970044 - DNA, 15 bp, Homo sapiens
aggcaggcggatcac

SEQ ID NO: 970045 - DNA, 15 bp, Homo sapiens
gaggcaggcggatca

SEQ ID NO: 970046 - DNA, 15 bp, Homo sapiens
cgaggcaggcggatc

SEQ ID NO: 970047 - DNA, 15 bp, Homo sapiens
ccgaggcaggcggat

SEQ ID NO: 970048 - DNA, 15 bp, Homo sapiens
gccgaggcaggcgga

SEQ ID NO: 970049 - DNA, 15 bp, Homo sapiens
ggccgaggcaggcgg

SEQ ID NO: 970050 - DNA, 15 bp, Homo sapiens
aggccgaggcaggcg

SEQ ID NO: 970051 - DNA, 15 bp, Homo sapiens
gaggccgaggcaggc

SEQ ID NO: 970052 - DNA, 15 bp, Homo sapiens
ggaggccgaggcagg

SEQ ID NO: 970053 - DNA, 15 bp, Homo sapiens
gggaggccgaggcag

SEQ ID NO: 970054 - DNA, 15 bp, Homo sapiens
tgggaggccgaggca

SEQ ID NO: 970055 - DNA, 15 bp, Homo sapiens
ttgggaggccgaggc

SEQ ID NO: 970056 - DNA, 15 bp, Homo sapiens
tttgggaggccgagg

SEQ ID NO: 970057 - DNA, 15 bp, Homo sapiens
ctttgggaggccgag

SEQ ID NO: 970058 - DNA, 15 bp, Homo sapiens
actttgggaggccga

SEQ ID NO: 970059 - DNA, 15 bp, Homo sapiens
cactttgggaggccg

SEQ ID NO: 970060 - DNA, 15 bp, Homo sapiens
gcactttgggaggcc

SEQ ID NO: 970061 - DNA, 15 bp, Homo sapiens
agcactttgggaggc

SEQ ID NO: 970062 - DNA, 15 bp, Homo sapiens
cagcactttgggagg

SEQ ID NO: 970063 - DNA, 15 bp, Homo sapiens
ccagcactttgggag

SEQ ID NO: 970064 - DNA, 15 bp, Homo sapiens
cccagcactttggga

SEQ ID NO: 970065 - DNA, 15 bp, Homo sapiens
tcccagcactttggg

SEQ ID NO: 970066 - DNA, 15 bp, Homo sapiens
atcccagcactttgg

SEQ ID NO: 970067 - DNA, 15 bp, Homo sapiens
aatcccagcactttg

SEQ ID NO: 970068 - DNA, 15 bp, Homo sapiens
taatcccagcacttt

SEQ ID NO: 970069 - DNA, 15 bp, Homo sapiens
gtaatcccagcactt

SEQ ID NO: 970070 - DNA, 15 bp, Homo sapiens
tgtaatcccagcact

SEQ ID NO: 970071 - DNA, 15 bp, Homo sapiens
ctgtaatcccagcac

SEQ ID NO: 970072 - DNA, 15 bp, Homo sapiens
cctgtaatcccagca

SEQ ID NO: 970073 - DNA, 15 bp, Homo sapiens
gcctgtaatcccagc

SEQ ID NO: 970074 - DNA, 15 bp, Homo sapiens
tgcctgtaatcccag

SEQ ID NO: 970075 - DNA, 15 bp, Homo sapiens
atgcctgtaatccca

SEQ ID NO: 970076 - DNA, 15 bp, Homo sapiens
catgcctgtaatccc

SEQ ID NO: 970077 - DNA, 15 bp, Homo sapiens
tcatgcctgtaatcc

SEQ ID NO: 970078 - DNA, 15 bp, Homo sapiens
ctcatgcctgtaatc

SEQ ID NO: 970079 - DNA, 15 bp, Homo sapiens
gctcatgcctgtaat

SEQ ID NO: 970080 - DNA, 15 bp, Homo sapiens
ggctcatgcctgtaa

SEQ ID NO: 970081 - DNA, 15 bp, Homo sapiens
tggctcatgcctgta

SEQ ID NO: 970082 - DNA, 15 bp, Homo sapiens
gtggctcatgcctgt

SEQ ID NO: 970083 - DNA, 15 bp, Homo sapiens
agtggctcatgcctg

SEQ ID NO: 970084 - DNA, 15 bp, Homo sapiens
cagtggctcatgcct

SEQ ID NO: 970085 - DNA, 15 bp, Homo sapiens
gcagtggctcatgcc

SEQ ID NO: 970086 - DNA, 15 bp, Homo sapiens
agcagtggctcatgc

SEQ ID NO: 970087 - DNA, 15 bp, Homo sapiens
gagcagtggctcatg

SEQ ID NO: 970088 - DNA, 15 bp, Homo sapiens
ggagcagtggctcat

SEQ ID NO: 970089 - DNA, 15 bp, Homo sapiens
aggagcagtggctca

SEQ ID NO: 970090 - DNA, 15 bp, Homo sapiens
caggagcagtggctc

SEQ ID NO: 970091 - DNA, 15 bp, Homo sapiens
ccaggagcagtggct

SEQ ID NO: 970092 - DNA, 15 bp, Homo sapiens
gccaggagcagtggc

SEQ ID NO: 970093 - DNA, 15 bp, Homo sapiens
agccaggagcagtgg

SEQ ID NO: 970094 - DNA, 15 bp, Homo sapiens
cagccaggagcagtg

SEQ ID NO: 970095 - DNA, 15 bp, Homo sapiens
gcagccaggagcagt

SEQ ID NO: 970096 - DNA, 15 bp, Homo sapiens
agcagccaggagcag

SEQ ID NO: 970097 - DNA, 15 bp, Homo sapiens
aagcagccaggagca

SEQ ID NO: 970098 - DNA, 15 bp, Homo sapiens
taagcagccaggagc

SEQ ID NO: 970099 - DNA, 15 bp, Homo sapiens
ttaagcagccaggag

SEQ ID NO: 970100 - DNA, 15 bp, Homo sapiens
gttaagcagccagga

SEQ ID NO: 970101 - DNA, 15 bp, Homo sapiens
agttaagcagccagg

SEQ ID NO: 970102 - DNA, 15 bp, Homo sapiens
aagttaagcagccag

SEQ ID NO: 970103 - DNA, 15 bp, Homo sapiens
aaagttaagcagcca

SEQ ID NO: 970104 - DNA, 15 bp, Homo sapiens
aaaagttaagcagcc

SEQ ID NO: 970105 - DNA, 15 bp, Homo sapiens
aaaaagttaagcagc

SEQ ID NO: 970106 - DNA, 15 bp, Homo sapiens
gaaaaagttaagcag

SEQ ID NO: 970107 - DNA, 15 bp, Homo sapiens
agaaaaagttaagca

SEQ ID NO: 970108 - DNA, 15 bp, Homo sapiens
gagaaaaagttaagc

SEQ ID NO: 970109 - DNA, 15 bp, Homo sapiens
agagaaaaagttaag

SEQ ID NO: 970110 - DNA, 15 bp, Homo sapiens
tagagaaaaagttaa

SEQ ID NO: 970111 - DNA, 15 bp, Homo sapiens
atagagaaaaagtta

SEQ ID NO: 970112 - DNA, 15 bp, Homo sapiens
gatagagaaaaagtt

SEQ ID NO: 970113 - DNA, 15 bp, Homo sapiens
agatagagaaaaagt

SEQ ID NO: 970114 - DNA, 15 bp, Homo sapiens
gagatagagaaaaag

SEQ ID NO: 970115 - DNA, 15 bp, Homo sapiens
tgagatagagaaaaa

SEQ ID NO: 970116 - DNA, 15 bp, Homo sapiens
atgagatagagaaaa

SEQ ID NO: 970117 - DNA, 15 bp, Homo sapiens
gatgagatagagaaa

SEQ ID NO: 970118 - DNA, 15 bp, Homo sapiens
ggatgagatagagaa

SEQ ID NO: 970119 - DNA, 15 bp, Homo sapiens
aggatgagatagaga

SEQ ID NO: 970120 - DNA, 15 bp, Homo sapiens
gaggatgagatagag

SEQ ID NO: 970121 - DNA, 15 bp, Homo sapiens
ggaggatgagataga

SEQ ID NO: 970122 - DNA, 15 bp, Homo sapiens
aggaggatgagatag

SEQ ID NO: 970123 - DNA, 15 bp, Homo sapiens
taggaggatgagata

SEQ ID NO: 970124 - DNA, 15 bp, Homo sapiens
gtaggaggatgagat

SEQ ID NO: 970125 - DNA, 15 bp, Homo sapiens
ggtaggaggatgaga

SEQ ID NO: 970126 - DNA, 15 bp, Homo sapiens
gggtaggaggatgag

SEQ ID NO: 970127 - DNA, 15 bp, Homo sapiens
tgggtaggaggatga

SEQ ID NO: 970128 - DNA, 15 bp, Homo sapiens
atgggtaggaggatg

SEQ ID NO: 970129 - DNA, 15 bp, Homo sapiens
gatgggtaggaggat

SEQ ID NO: 970130 - DNA, 15 bp, Homo sapiens
ggatgggtaggagga

SEQ ID NO: 970131 - DNA, 15 bp, Homo sapiens
aggatgggtaggagg

SEQ ID NO: 970132 - DNA, 15 bp, Homo sapiens
taggatgggtaggag

SEQ ID NO: 970133 - DNA, 15 bp, Homo sapiens
gtaggatgggtagga

SEQ ID NO: 970134 - DNA, 15 bp, Homo sapiens
ggtaggatgggtagg

SEQ ID NO: 970135 - DNA, 15 bp, Homo sapiens
gggtaggatgggtag

SEQ ID NO: 970136 - DNA, 15 bp, Homo sapiens
agggtaggatgggta

SEQ ID NO: 970137 - DNA, 15 bp, Homo sapiens
aagggtaggatgggt

SEQ ID NO: 970138 - DNA, 15 bp, Homo sapiens
caagggtaggatggg

SEQ ID NO: 970139 - DNA, 15 bp, Homo sapiens
ccaagggtaggatgg

SEQ ID NO: 970140 - DNA, 15 bp, Homo sapiens
tccaagggtaggatg

SEQ ID NO: 970141 - DNA, 15 bp, Homo sapiens
ttccaagggtaggat

SEQ ID NO: 970142 - DNA, 15 bp, Homo sapiens
cttccaagggtagga

SEQ ID NO: 970143 - DNA, 15 bp, Homo sapiens
tcttccaagggtagg

SEQ ID NO: 970144 - DNA, 15 bp, Homo sapiens
atcttccaagggtag

SEQ ID NO: 970145 - DNA, 15 bp, Homo sapiens
tatcttccaagggta

SEQ ID NO: 970146 - DNA, 15 bp, Homo sapiens
ctatcttccaagggt

SEQ ID NO: 970147 - DNA, 15 bp, Homo sapiens
tctatcttccaaggg

SEQ ID NO: 970148 - DNA, 15 bp, Homo sapiens
ctctatcttccaagg

SEQ ID NO: 970149 - DNA, 15 bp, Homo sapiens
tctctatcttccaag

SEQ ID NO: 970150 - DNA, 15 bp, Homo sapiens
ttctctatcttccaa

SEQ ID NO: 970151 - DNA, 15 bp, Homo sapiens
cttctctatcttcca

SEQ ID NO: 970152 - DNA, 15 bp, Homo sapiens
acttctctatcttcc

SEQ ID NO: 970153 - DNA, 15 bp, Homo sapiens
tacttctctatcttc

SEQ ID NO: 970154 - DNA, 15 bp, Homo sapiens
ctacttctctatctt

SEQ ID NO: 970155 - DNA, 15 bp, Homo sapiens
actacttctctatct

SEQ ID NO: 970156 - DNA, 15 bp, Homo sapiens
tactacttctctatc

SEQ ID NO: 970157 - DNA, 15 bp, Homo sapiens
atactacttctctat

SEQ ID NO: 970158 - DNA, 15 bp, Homo sapiens
aatactacttctcta

SEQ ID NO: 970159 - DNA, 15 bp, Homo sapiens
taatactacttctct

SEQ ID NO: 970160 - DNA, 15 bp, Homo sapiens
ctaatactacttctc

SEQ ID NO: 970161 - DNA, 15 bp, Homo sapiens
actaatactacttct

SEQ ID NO: 970162 - DNA, 15 bp, Homo sapiens
aactaatactacttc

SEQ ID NO: 970163 - DNA, 15 bp, Homo sapiens
gaactaatactactt

SEQ ID NO: 970164 - DNA, 15 bp, Homo sapiens
ggaactaatactact

SEQ ID NO: 970165 - DNA, 15 bp, Homo sapiens
tggaactaatactac

SEQ ID NO: 970166 - DNA, 15 bp, Homo sapiens
atggaactaatacta

SEQ ID NO: 970167 - DNA, 15 bp, Homo sapiens
tatggaactaatact

SEQ ID NO: 970168 - DNA, 15 bp, Homo sapiens
ctatggaactaatac

SEQ ID NO: 970169 - DNA, 15 bp, Homo sapiens
actatggaactaata

SEQ ID NO: 970170 - DNA, 15 bp, Homo sapiens
cactatggaactaat

SEQ ID NO: 970171 - DNA, 15 bp, Homo sapiens
acactatggaactaa

SEQ ID NO: 970172 - DNA, 15 bp, Homo sapiens
aacactatggaacta

SEQ ID NO: 970173 - DNA, 15 bp, Homo sapiens
taacactatggaact

SEQ ID NO: 970174 - DNA, 15 bp, Homo sapiens
ataacactatggaac

SEQ ID NO: 970175 - DNA, 15 bp, Homo sapiens
tataacactatggaa

SEQ ID NO: 970176 - DNA, 15 bp, Homo sapiens
gtataacactatgga

SEQ ID NO: 970177 - DNA, 15 bp, Homo sapiens
agtataacactatgg

SEQ ID NO: 970178 - DNA, 15 bp, Homo sapiens
cagtataacactatg

SEQ ID NO: 970179 - DNA, 15 bp, Homo sapiens
ccagtataacactat

SEQ ID NO: 970180 - DNA, 15 bp, Homo sapiens
cccagtataacacta

SEQ ID NO: 970181 - DNA, 15 bp, Homo sapiens
gcccagtataacact

SEQ ID NO: 970182 - DNA, 15 bp, Homo sapiens
agcccagtataacac

SEQ ID NO: 970183 - DNA, 15 bp, Homo sapiens
aagcccagtataaca

SEQ ID NO: 970184 - DNA, 15 bp, Homo sapiens
gaagcccagtataac

SEQ ID NO: 970185 - DNA, 15 bp, Homo sapiens
ggaagcccagtataa

SEQ ID NO: 970186 - DNA, 15 bp, Homo sapiens
gggaagcccagtata

SEQ ID NO: 970187 - DNA, 15 bp, Homo sapiens
ggggaagcccagtat

SEQ ID NO: 970188 - DNA, 15 bp, Homo sapiens
gggggaagcccagta

SEQ ID NO: 970189 - DNA, 15 bp, Homo sapiens
tgggggaagcccagt

SEQ ID NO: 970190 - DNA, 15 bp, Homo sapiens
ctgggggaagcccag

SEQ ID NO: 970191 - DNA, 15 bp, Homo sapiens
cctgggggaagccca

SEQ ID NO: 970192 - DNA, 15 bp, Homo sapiens
ccctgggggaagccc

SEQ ID NO: 970193 - DNA, 15 bp, Homo sapiens
tccctgggggaagcc

SEQ ID NO: 970194 - DNA, 15 bp, Homo sapiens
gtccctgggggaagc

SEQ ID NO: 970195 - DNA, 15 bp, Homo sapiens
tgtccctgggggaag

SEQ ID NO: 970196 - DNA, 15 bp, Homo sapiens
ttgtccctgggggaa

SEQ ID NO: 970197 - DNA, 15 bp, Homo sapiens
tttgtccctggggga

SEQ ID NO: 970198 - DNA, 15 bp, Homo sapiens
gtttgtccctggggg

SEQ ID NO: 970199 - DNA, 15 bp, Homo sapiens
ggtttgtccctgggg

SEQ ID NO: 970200 - DNA, 15 bp, Homo sapiens
gggtttgtccctggg

SEQ ID NO: 970201 - DNA, 15 bp, Homo sapiens
tgggtttgtccctgg

SEQ ID NO: 970202 - DNA, 15 bp, Homo sapiens
gtgggtttgtccctg

SEQ ID NO: 970203 - DNA, 15 bp, Homo sapiens
agtgggtttgtccct

SEQ ID NO: 970204 - DNA, 15 bp, Homo sapiens
aagtgggtttgtccc

SEQ ID NO: 970205 - DNA, 15 bp, Homo sapiens
gaagtgggtttgtcc

SEQ ID NO: 970206 - DNA, 15 bp, Homo sapiens
ggaagtgggtttgtc

SEQ ID NO: 970207 - DNA, 15 bp, Homo sapiens
gggaagtgggtttgt

SEQ ID NO: 970208 - DNA, 15 bp, Homo sapiens
ggggaagtgggtttg

SEQ ID NO: 970209 - DNA, 15 bp, Homo sapiens
tggggaagtgggttt

SEQ ID NO: 970210 - DNA, 15 bp, Homo sapiens
ttggggaagtgggtt

SEQ ID NO: 970211 - DNA, 15 bp, Homo sapiens
gttggggaagtgggt

SEQ ID NO: 970212 - DNA, 15 bp, Homo sapiens
ggttggggaagtggg

SEQ ID NO: 970213 - DNA, 15 bp, Homo sapiens
aggttggggaagtgg

SEQ ID NO: 970214 - DNA, 15 bp, Homo sapiens
caggttggggaagtg

SEQ ID NO: 970215 - DNA, 15 bp, Homo sapiens
tcaggttggggaagt

SEQ ID NO: 970216 - DNA, 15 bp, Homo sapiens
ttcaggttggggaag

SEQ ID NO: 970217 - DNA, 15 bp, Homo sapiens
attcaggttggggaa

SEQ ID NO: 970218 - DNA, 15 bp, Homo sapiens
cattcaggttgggga

SEQ ID NO: 970219 - DNA, 15 bp, Homo sapiens
tcattcaggttgggg

SEQ ID NO: 970220 - DNA, 15 bp, Homo sapiens
ctcattcaggttggg

SEQ ID NO: 970221 - DNA, 15 bp, Homo sapiens
gctcattcaggttgg

SEQ ID NO: 970222 - DNA, 15 bp, Homo sapiens
ggctcattcaggttg

SEQ ID NO: 970223 - DNA, 15 bp, Homo sapiens
tggctcattcaggtt

SEQ ID NO: 970224 - DNA, 15 bp, Homo sapiens
atggctcattcaggt

SEQ ID NO: 970225 - DNA, 15 bp, Homo sapiens
gatggctcattcagg

SEQ ID NO: 970226 - DNA, 15 bp, Homo sapiens
tgatggctcattcag

SEQ ID NO: 970227 - DNA, 15 bp, Homo sapiens
gtgatggctcattca

SEQ ID NO: 970228 - DNA, 15 bp, Homo sapiens
agtgatggctcattc

SEQ ID NO: 970229 - DNA, 15 bp, Homo sapiens
aagtgatggctcatt

SEQ ID NO: 970230 - DNA, 15 bp, Homo sapiens
gaagtgatggctcat

SEQ ID NO: 970231 - DNA, 15 bp, Homo sapiens
agaagtgatggctca

SEQ ID NO: 970232 - DNA, 15 bp, Homo sapiens
aagaagtgatggctc

SEQ ID NO: 970233 - DNA, 15 bp, Homo sapiens
gaagaagtgatggct

SEQ ID NO: 970234 - DNA, 15 bp, Homo sapiens
ggaagaagtgatggc

SEQ ID NO: 970235 - DNA, 15 bp, Homo sapiens
gggaagaagtgatgg

SEQ ID NO: 970236 - DNA, 15 bp, Homo sapiens
ggggaagaagtgatg

SEQ ID NO: 970237 - DNA, 15 bp, Homo sapiens
tggggaagaagtgat

SEQ ID NO: 970238 - DNA, 15 bp, Homo sapiens
ctggggaagaagtga

SEQ ID NO: 970239 - DNA, 15 bp, Homo sapiens
actggggaagaagtg

SEQ ID NO: 970240 - DNA, 15 bp, Homo sapiens
aactggggaagaagt

SEQ ID NO: 970241 - DNA, 15 bp, Homo sapiens
aaactggggaagaag

SEQ ID NO: 970242 - DNA, 15 bp, Homo sapiens
taaactggggaagaa

SEQ ID NO: 970243 - DNA, 15 bp, Homo sapiens
gtaaactggggaaga

SEQ ID NO: 970244 - DNA, 15 bp, Homo sapiens
tgtaaactggggaag

SEQ ID NO: 970245 - DNA, 15 bp, Homo sapiens
atgtaaactggggaa

SEQ ID NO: 970246 - DNA, 15 bp, Homo sapiens
aatgtaaactgggga

SEQ ID NO: 970247 - DNA, 15 bp, Homo sapiens
aaatgtaaactgggg

SEQ ID NO: 970248 - DNA, 15 bp, Homo sapiens
gaaatgtaaactggg

SEQ ID NO: 970249 - DNA, 15 bp, Homo sapiens
tgaaatgtaaactgg

SEQ ID NO: 970250 - DNA, 15 bp, Homo sapiens
atgaaatgtaaactg

SEQ ID NO: 970251 - DNA, 15 bp, Homo sapiens
aatgaaatgtaaact

SEQ ID NO: 970252 - DNA, 15 bp, Homo sapiens
caatgaaatgtaaac

SEQ ID NO: 970253 - DNA, 15 bp, Homo sapiens
gcaatgaaatgtaaa

SEQ ID NO: 970254 - DNA, 15 bp, Homo sapiens
agcaatgaaatgtaa

SEQ ID NO: 970255 - DNA, 15 bp, Homo sapiens
gagcaatgaaatgta

SEQ ID NO: 970256 - DNA, 15 bp, Homo sapiens
agagcaatgaaatgt

SEQ ID NO: 970257 - DNA, 15 bp, Homo sapiens
aagagcaatgaaatg

SEQ ID NO: 970258 - DNA, 15 bp, Homo sapiens
aaagagcaatgaaat

SEQ ID NO: 970259 - DNA, 15 bp, Homo sapiens
taaagagcaatgaaa

SEQ ID NO: 970260 - DNA, 15 bp, Homo sapiens
ttaaagagcaatgaa

SEQ ID NO: 970261 - DNA, 15 bp, Homo sapiens
tttaaagagcaatga

SEQ ID NO: 970262 - DNA, 15 bp, Homo sapiens
atttaaagagcaatg

SEQ ID NO: 970263 - DNA, 15 bp, Homo sapiens
catttaaagagcaat

SEQ ID NO: 970264 - DNA, 15 bp, Homo sapiens
acatttaaagagcaa

SEQ ID NO: 970265 - DNA, 15 bp, Homo sapiens
gacatttaaagagca

SEQ ID NO: 970266 - DNA, 15 bp, Homo sapiens
agacatttaaagagc

SEQ ID NO: 970267 - DNA, 15 bp, Homo sapiens
gagacatttaaagag

SEQ ID NO: 970268 - DNA, 15 bp, Homo sapiens
ggagacatttaaaga

SEQ ID NO: 970269 - DNA, 15 bp, Homo sapiens
tggagacatttaaag

SEQ ID NO: 970270 - DNA, 15 bp, Homo sapiens
atggagacatttaaa

SEQ ID NO: 970271 - DNA, 15 bp, Homo sapiens
aatggagacatttaa

SEQ ID NO: 970272 - DNA, 15 bp, Homo sapiens
gaatggagacattta

SEQ ID NO: 970273 - DNA, 15 bp, Homo sapiens
cgaatggagacattt

SEQ ID NO: 970274 - DNA, 15 bp, Homo sapiens
ccgaatggagacatt

SEQ ID NO: 970275 - DNA, 15 bp, Homo sapiens
tccgaatggagacat

SEQ ID NO: 970276 - DNA, 15 bp, Homo sapiens
atccgaatggagaca

SEQ ID NO: 970277 - DNA, 15 bp, Homo sapiens
tatccgaatggagac

SEQ ID NO: 970278 - DNA, 15 bp, Homo sapiens
atatccgaatggaga

SEQ ID NO: 970279 - DNA, 15 bp, Homo sapiens
catatccgaatggag

SEQ ID NO: 970280 - DNA, 15 bp, Homo sapiens
ccatatccgaatgga

SEQ ID NO: 970281 - DNA, 15 bp, Homo sapiens
cccatatccgaatgg

SEQ ID NO: 970282 - DNA, 15 bp, Homo sapiens
tcccatatccgaatg

SEQ ID NO: 970283 - DNA, 15 bp, Homo sapiens
ttcccatatccgaat

SEQ ID NO: 970284 - DNA, 15 bp, Homo sapiens
attcccatatccgaa

SEQ ID NO: 970285 - DNA, 15 bp, Homo sapiens
aattcccatatccga

SEQ ID NO: 970286 - DNA, 15 bp, Homo sapiens
gaattcccatatccg

SEQ ID NO: 970287 - DNA, 15 bp, Homo sapiens
tgaattcccatatcc

SEQ ID NO: 970288 - DNA, 15 bp, Homo sapiens
gtgaattcccatatc

SEQ ID NO: 970289 - DNA, 15 bp, Homo sapiens
tgtgaattcccatat

SEQ ID NO: 970290 - DNA, 15 bp, Homo sapiens
atgtgaattcccata

SEQ ID NO: 970291 - DNA, 15 bp, Homo sapiens
tatgtgaattcccat

SEQ ID NO: 970292 - DNA, 15 bp, Homo sapiens
atatgtgaattccca

SEQ ID NO: 970293 - DNA, 15 bp, Homo sapiens
catatgtgaattccc

SEQ ID NO: 970294 - DNA, 15 bp, Homo sapiens
ccatatgtgaattcc

SEQ ID NO: 970295 - DNA, 15 bp, Homo sapiens
accatatgtgaattc

SEQ ID NO: 970296 - DNA, 15 bp, Homo sapiens
gaccatatgtgaatt

SEQ ID NO: 970297 - DNA, 15 bp, Homo sapiens
tgaccatatgtgaat

SEQ ID NO: 970298 - DNA, 15 bp, Homo sapiens
atgaccatatgtgaa

SEQ ID NO: 970299 - DNA, 15 bp, Homo sapiens
tatgaccatatgtga

SEQ ID NO: 970300 - DNA, 15 bp, Homo sapiens
ttatgaccatatgtg

SEQ ID NO: 970301 - DNA, 15 bp, Homo sapiens
attatgaccatatgt

SEQ ID NO: 970302 - DNA, 15 bp, Homo sapiens
aattatgaccatatg

SEQ ID NO: 970303 - DNA, 15 bp, Homo sapiens
gaattatgaccatat

SEQ ID NO: 970304 - DNA, 15 bp, Homo sapiens
agaattatgaccata

SEQ ID NO: 970305 - DNA, 15 bp, Homo sapiens
aagaattatgaccat

SEQ ID NO: 970306 - DNA, 15 bp, Homo sapiens
taagaattatgacca

SEQ ID NO: 970307 - DNA, 15 bp, Homo sapiens
gtaagaattatgacc

SEQ ID NO: 970308 - DNA, 15 bp, Homo sapiens
ggtaagaattatgac

SEQ ID NO: 970309 - DNA, 15 bp, Homo sapiens
aggtaagaattatga

SEQ ID NO: 970310 - DNA, 15 bp, Homo sapiens
caggtaagaattatg

SEQ ID NO: 970311 - DNA, 15 bp, Homo sapiens
tcaggtaagaattat

SEQ ID NO: 970312 - DNA, 15 bp, Homo sapiens
ttcaggtaagaatta

SEQ ID NO: 970313 - DNA, 15 bp, Homo sapiens
cttcaggtaagaatt

SEQ ID NO: 970314 - DNA, 15 bp, Homo sapiens
tcttcaggtaagaat

SEQ ID NO: 970315 - DNA, 15 bp, Homo sapiens
ttcttcaggtaagaa

SEQ ID NO: 970316 - DNA, 15 bp, Homo sapiens
cttcttcaggtaaga

SEQ ID NO: 970317 - DNA, 15 bp, Homo sapiens
tcttcttcaggtaag

SEQ ID NO: 970318 - DNA, 15 bp, Homo sapiens
atcttcttcaggtaa

SEQ ID NO: 970319 - DNA, 15 bp, Homo sapiens
catcttcttcaggta

SEQ ID NO: 970320 - DNA, 15 bp, Homo sapiens
acatcttcttcaggt

SEQ ID NO: 970321 - DNA, 15 bp, Homo sapiens
gacatcttcttcagg

SEQ ID NO: 970322 - DNA, 15 bp, Homo sapiens
tgacatcttcttcag

SEQ ID NO: 970323 - DNA, 15 bp, Homo sapiens
ctgacatcttcttca

SEQ ID NO: 970324 - DNA, 15 bp, Homo sapiens
actgacatcttcttc

SEQ ID NO: 970325 - DNA, 15 bp, Homo sapiens
gactgacatcttctt

SEQ ID NO: 970326 - DNA, 15 bp, Homo sapiens
agactgacatcttct

SEQ ID NO: 970327 - DNA, 15 bp, Homo sapiens
aagactgacatcttc

SEQ ID NO: 970328 - DNA, 15 bp, Homo sapiens
gaagactgacatctt

SEQ ID NO: 970329 - DNA, 15 bp, Homo sapiens
agaagactgacatct

SEQ ID NO: 970330 - DNA, 15 bp, Homo sapiens
aagaagactgacatc

SEQ ID NO: 970331 - DNA, 15 bp, Homo sapiens
gaagaagactgacat

SEQ ID NO: 970332 - DNA, 15 bp, Homo sapiens
agaagaagactgaca

SEQ ID NO: 970333 - DNA, 15 bp, Homo sapiens
gagaagaagactgac

SEQ ID NO: 970334 - DNA, 15 bp, Homo sapiens
agagaagaagactga

SEQ ID NO: 970335 - DNA, 15 bp, Homo sapiens
aagagaagaagactg

SEQ ID NO: 970336 - DNA, 15 bp, Homo sapiens
taagagaagaagact

SEQ ID NO: 970337 - DNA, 15 bp, Homo sapiens
ctaagagaagaagac

SEQ ID NO: 970338 - DNA, 15 bp, Homo sapiens
tctaagagaagaaga

SEQ ID NO: 970339 - DNA, 15 bp, Homo sapiens
gtctaagagaagaag

SEQ ID NO: 970340 - DNA, 15 bp, Homo sapiens
ggtctaagagaagaa

SEQ ID NO: 970341 - DNA, 15 bp, Homo sapiens
tggtctaagagaaga

SEQ ID NO: 970342 - DNA, 15 bp, Homo sapiens
ttggtctaagagaag

SEQ ID NO: 970343 - DNA, 15 bp, Homo sapiens
gttggtctaagagaa

SEQ ID NO: 970344 - DNA, 15 bp, Homo sapiens
agttggtctaagaga

SEQ ID NO: 970345 - DNA, 15 bp, Homo sapiens
cagttggtctaagag

SEQ ID NO: 970346 - DNA, 15 bp, Homo sapiens
gcagttggtctaaga

SEQ ID NO: 970347 - DNA, 15 bp, Homo sapiens
ggcagttggtctaag

SEQ ID NO: 970348 - DNA, 15 bp, Homo sapiens
gggcagttggtctaa

SEQ ID NO: 970349 - DNA, 15 bp, Homo sapiens
agggcagttggtcta

SEQ ID NO: 970350 - DNA, 15 bp, Homo sapiens
cagggcagttggtct

SEQ ID NO: 970351 - DNA, 15 bp, Homo sapiens
tcagggcagttggtc

SEQ ID NO: 970352 - DNA, 15 bp, Homo sapiens
atcagggcagttggt

SEQ ID NO: 970353 - DNA, 15 bp, Homo sapiens
tatcagggcagttgg

SEQ ID NO: 970354 - DNA, 15 bp, Homo sapiens
atatcagggcagttg

SEQ ID NO: 970355 - DNA, 15 bp, Homo sapiens
catatcagggcagtt

SEQ ID NO: 970356 - DNA, 15 bp, Homo sapiens
tcatatcagggcagt

SEQ ID NO: 970357 - DNA, 15 bp, Homo sapiens
ctcatatcagggcag

SEQ ID NO: 970358 - DNA, 15 bp, Homo sapiens
cctcatatcagggca

SEQ ID NO: 970359 - DNA, 15 bp, Homo sapiens
acctcatatcagggc

SEQ ID NO: 970360 - DNA, 15 bp, Homo sapiens
aacctcatatcaggg

SEQ ID NO: 970361 - DNA, 15 bp, Homo sapiens
aaacctcatatcagg

SEQ ID NO: 970362 - DNA, 15 bp, Homo sapiens
taaacctcatatcag

SEQ ID NO: 970363 - DNA, 15 bp, Homo sapiens
ctaaacctcatatca

SEQ ID NO: 970364 - DNA, 15 bp, Homo sapiens
tctaaacctcatatc

SEQ ID NO: 970365 - DNA, 15 bp, Homo sapiens
ctctaaacctcatat

SEQ ID NO: 970366 - DNA, 15 bp, Homo sapiens
cctctaaacctcata

SEQ ID NO: 970367 - DNA, 15 bp, Homo sapiens
acctctaaacctcat

SEQ ID NO: 970368 - DNA, 15 bp, Homo sapiens
aacctctaaacctca

SEQ ID NO: 970369 - DNA, 15 bp, Homo sapiens
taacctctaaacctc

SEQ ID NO: 970370 - DNA, 15 bp, Homo sapiens
ttaacctctaaacct

SEQ ID NO: 970371 - DNA, 15 bp, Homo sapiens
tttaacctctaaacc

SEQ ID NO: 970372 - DNA, 15 bp, Homo sapiens
ctttaacctctaaac

SEQ ID NO: 970373 - DNA, 15 bp, Homo sapiens
tctttaacctctaaa

SEQ ID NO: 970374 - DNA, 15 bp, Homo sapiens
ttctttaacctctaa

SEQ ID NO: 970375 - DNA, 15 bp, Homo sapiens
gttctttaacctcta

SEQ ID NO: 970376 - DNA, 15 bp, Homo sapiens
tgttctttaacctct

SEQ ID NO: 970377 - DNA, 15 bp, Homo sapiens
atgttctttaacctc

SEQ ID NO: 970378 - DNA, 15 bp, Homo sapiens
catgttctttaacct

SEQ ID NO: 970379 - DNA, 15 bp, Homo sapiens
acatgttctttaacc

SEQ ID NO: 970380 - DNA, 15 bp, Homo sapiens
cacatgttctttaac

SEQ ID NO: 970381 - DNA, 15 bp, Homo sapiens
acacatgttctttaa

SEQ ID NO: 970382 - DNA, 15 bp, Homo sapiens
cacacatgttcttta

SEQ ID NO: 970383 - DNA, 15 bp, Homo sapiens
acacacatgttcttt

SEQ ID NO: 970384 - DNA, 15 bp, Homo sapiens
tacacacatgttctt

SEQ ID NO: 970385 - DNA, 15 bp, Homo sapiens
atacacacatgttct

SEQ ID NO: 970386 - DNA, 15 bp, Homo sapiens
aatacacacatgttc

SEQ ID NO: 970387 - DNA, 15 bp, Homo sapiens
aaatacacacatgtt

SEQ ID NO: 970388 - DNA, 15 bp, Homo sapiens
taaatacacacatgt

SEQ ID NO: 970389 - DNA, 15 bp, Homo sapiens
gtaaatacacacatg

SEQ ID NO: 970390 - DNA, 15 bp, Homo sapiens
tgtaaatacacacat

SEQ ID NO: 970391 - DNA, 15 bp, Homo sapiens
atgtaaatacacaca

SEQ ID NO: 970392 - DNA, 15 bp, Homo sapiens
catgtaaatacacac

SEQ ID NO: 970393 - DNA, 15 bp, Homo sapiens
tcatgtaaatacaca

SEQ ID NO: 970394 - DNA, 15 bp, Homo sapiens
atcatgtaaatacac

SEQ ID NO: 970395 - DNA, 15 bp, Homo sapiens
gatcatgtaaataca

SEQ ID NO: 970396 - DNA, 15 bp, Homo sapiens
agatcatgtaaatac

SEQ ID NO: 970397 - DNA, 15 bp, Homo sapiens
aagatcatgtaaata

SEQ ID NO: 970398 - DNA, 15 bp, Homo sapiens
aaagatcatgtaaat

SEQ ID NO: 970399 - DNA, 15 bp, Homo sapiens
caaagatcatgtaaa

SEQ ID NO: 970400 - DNA, 15 bp, Homo sapiens
acaaagatcatgtaa

SEQ ID NO: 970401 - DNA, 15 bp, Homo sapiens
tacaaagatcatgta

SEQ ID NO: 970402 - DNA, 15 bp, Homo sapiens
atacaaagatcatgt

SEQ ID NO: 970403 - DNA, 15 bp, Homo sapiens
aatacaaagatcatg

SEQ ID NO: 970404 - DNA, 15 bp, Homo sapiens
gaatacaaagatcat

SEQ ID NO: 970405 - DNA, 15 bp, Homo sapiens
agaatacaaagatca

SEQ ID NO: 970406 - DNA, 15 bp, Homo sapiens
cagaatacaaagatc

SEQ ID NO: 970407 - DNA, 15 bp, Homo sapiens
gcagaatacaaagat

SEQ ID NO: 970408 - DNA, 15 bp, Homo sapiens
ggcagaatacaaaga

SEQ ID NO: 970409 - DNA, 15 bp, Homo sapiens
aggcagaatacaaag

SEQ ID NO: 970410 - DNA, 15 bp, Homo sapiens
aaggcagaatacaaa

SEQ ID NO: 970411 - DNA, 15 bp, Homo sapiens
aaaggcagaatacaa

SEQ ID NO: 970412 - DNA, 15 bp, Homo sapiens
aaaaggcagaataca

SEQ ID NO: 970413 - DNA, 15 bp, Homo sapiens
gaaaaggcagaatac

SEQ ID NO: 970414 - DNA, 15 bp, Homo sapiens
cgaaaaggcagaata

SEQ ID NO: 970415 - DNA, 15 bp, Homo sapiens
acgaaaaggcagaat

SEQ ID NO: 970416 - DNA, 15 bp, Homo sapiens
gacgaaaaggcagaa

SEQ ID NO: 970417 - DNA, 15 bp, Homo sapiens
ggacgaaaaggcaga

SEQ ID NO: 970418 - DNA, 15 bp, Homo sapiens
gggacgaaaaggcag

SEQ ID NO: 970419 - DNA, 15 bp, Homo sapiens
agggacgaaaaggca

SEQ ID NO: 970420 - DNA, 15 bp, Homo sapiens
gagggacgaaaaggc

SEQ ID NO: 970421 - DNA, 15 bp, Homo sapiens
tgagggacgaaaagg

SEQ ID NO: 970422 - DNA, 15 bp, Homo sapiens
gtgagggacgaaaag

SEQ ID NO: 970423 - DNA, 15 bp, Homo sapiens
agtgagggacgaaaa

SEQ ID NO: 970424 - DNA, 15 bp, Homo sapiens
tagtgagggacgaaa

SEQ ID NO: 970425 - DNA, 15 bp, Homo sapiens
ttagtgagggacgaa

SEQ ID NO: 970426 - DNA, 15 bp, Homo sapiens
attagtgagggacga

SEQ ID NO: 970427 - DNA, 15 bp, Homo sapiens
cattagtgagggacg

SEQ ID NO: 970428 - DNA, 15 bp, Homo sapiens
tcattagtgagggac

SEQ ID NO: 970429 - DNA, 15 bp, Homo sapiens
gtcattagtgaggga

SEQ ID NO: 970430 - DNA, 15 bp, Homo sapiens
tgtcattagtgaggg

SEQ ID NO: 970431 - DNA, 15 bp, Homo sapiens
ctgtcattagtgagg

SEQ ID NO: 970432 - DNA, 15 bp, Homo sapiens
gctgtcattagtgag

SEQ ID NO: 970433 - DNA, 15 bp, Homo sapiens
agctgtcattagtga

SEQ ID NO: 970434 - DNA, 15 bp, Homo sapiens
cagctgtcattagtg

SEQ ID NO: 970435 - DNA, 15 bp, Homo sapiens
gcagctgtcattagt

SEQ ID NO: 970436 - DNA, 15 bp, Homo sapiens
tgcagctgtcattag

SEQ ID NO: 970437 - DNA, 15 bp, Homo sapiens
gtgcagctgtcatta

SEQ ID NO: 970438 - DNA, 15 bp, Homo sapiens
ggtgcagctgtcatt

SEQ ID NO: 970439 - DNA, 15 bp, Homo sapiens
gggtgcagctgtcat

SEQ ID NO: 970440 - DNA, 15 bp, Homo sapiens
ggggtgcagctgtca

SEQ ID NO: 970441 - DNA, 15 bp, Homo sapiens
tggggtgcagctgtc

SEQ ID NO: 970442 - DNA, 15 bp, Homo sapiens
ttggggtgcagctgt

SEQ ID NO: 970443 - DNA, 15 bp, Homo sapiens
cttggggtgcagctg

SEQ ID NO: 970444 - DNA, 15 bp, Homo sapiens
ccttggggtgcagct

SEQ ID NO: 970445 - DNA, 15 bp, Homo sapiens
tccttggggtgcagc

SEQ ID NO: 970446 - DNA, 15 bp, Homo sapiens
ttccttggggtgcag

SEQ ID NO: 970447 - DNA, 15 bp, Homo sapiens
tttccttggggtgca

SEQ ID NO: 970448 - DNA, 15 bp, Homo sapiens
atttccttggggtgc

SEQ ID NO: 970449 - DNA, 15 bp, Homo sapiens
catttccttggggtg

SEQ ID NO: 970450 - DNA, 15 bp, Homo sapiens
ccatttccttggggt

SEQ ID NO: 970451 - DNA, 15 bp, Homo sapiens
tccatttccttgggg

SEQ ID NO: 970452 - DNA, 15 bp, Homo sapiens
ctccatttccttggg

SEQ ID NO: 970453 - DNA, 15 bp, Homo sapiens
gctccatttccttgg

SEQ ID NO: 970454 - DNA, 15 bp, Homo sapiens
agctccatttccttg

SEQ ID NO: 970455 - DNA, 15 bp, Homo sapiens
cagctccatttcctt

SEQ ID NO: 970456 - DNA, 15 bp, Homo sapiens
acagctccatttcct

SEQ ID NO: 970457 - DNA, 15 bp, Homo sapiens
cacagctccatttcc

SEQ ID NO: 970458 - DNA, 15 bp, Homo sapiens
ccacagctccatttc

SEQ ID NO: 970459 - DNA, 15 bp, Homo sapiens
tccacagctccattt

SEQ ID NO: 970460 - DNA, 15 bp, Homo sapiens
ttccacagctccatt

SEQ ID NO: 970461 - DNA, 15 bp, Homo sapiens
cttccacagctccat

SEQ ID NO: 970462 - DNA, 15 bp, Homo sapiens
tcttccacagctcca

SEQ ID NO: 970463 - DNA, 15 bp, Homo sapiens
ctcttccacagctcc

SEQ ID NO: 970464 - DNA, 15 bp, Homo sapiens
tctcttccacagctc

SEQ ID NO: 970465 - DNA, 15 bp, Homo sapiens
ctctcttccacagct

SEQ ID NO: 970466 - DNA, 15 bp, Homo sapiens
cctctcttccacagc

SEQ ID NO: 970467 - DNA, 15 bp, Homo sapiens
ccctctcttccacag

SEQ ID NO: 970468 - DNA, 15 bp, Homo sapiens
accctctcttccaca

SEQ ID NO: 970469 - DNA, 15 bp, Homo sapiens
aaccctctcttccac

SEQ ID NO: 970470 - DNA, 15 bp, Homo sapiens
aaaccctctcttcca

SEQ ID NO: 970471 - DNA, 15 bp, Homo sapiens
caaaccctctcttcc

SEQ ID NO: 970472 - DNA, 15 bp, Homo sapiens
tcaaaccctctcttc

SEQ ID NO: 970473 - DNA, 15 bp, Homo sapiens
atcaaaccctctctt

SEQ ID NO: 970474 - DNA, 15 bp, Homo sapiens
tatcaaaccctctct

SEQ ID NO: 970475 - DNA, 15 bp, Homo sapiens
ttatcaaaccctctc

SEQ ID NO: 970476 - DNA, 15 bp, Homo sapiens
cttatcaaaccctct

SEQ ID NO: 970477 - DNA, 15 bp, Homo sapiens
tcttatcaaaccctc

SEQ ID NO: 970478 - DNA, 15 bp, Homo sapiens
ttcttatcaaaccct

SEQ ID NO: 970479 - DNA, 15 bp, Homo sapiens
tttcttatcaaaccc

SEQ ID NO: 970480 - DNA, 15 bp, Homo sapiens
atttcttatcaaacc

SEQ ID NO: 970481 - DNA, 15 bp, Homo sapiens
aatttcttatcaaac

SEQ ID NO: 970482 - DNA, 15 bp, Homo sapiens
taatttcttatcaaa

SEQ ID NO: 970483 - DNA, 15 bp, Homo sapiens
ttaatttcttatcaa

SEQ ID NO: 970484 - DNA, 15 bp, Homo sapiens
cttaatttcttatca

SEQ ID NO: 970485 - DNA, 15 bp, Homo sapiens
acttaatttcttatc

SEQ ID NO: 970486 - DNA, 15 bp, Homo sapiens
tacttaatttcttat

SEQ ID NO: 970487 - DNA, 15 bp, Homo sapiens
ttacttaatttctta

SEQ ID NO: 970488 - DNA, 15 bp, Homo sapiens
tttacttaatttctt

SEQ ID NO: 970489 - DNA, 15 bp, Homo sapiens
atttacttaatttct

SEQ ID NO: 970490 - DNA, 15 bp, Homo sapiens
tatttacttaatttc

SEQ ID NO: 970491 - DNA, 15 bp, Homo sapiens
atatttacttaattt

SEQ ID NO: 970492 - DNA, 15 bp, Homo sapiens
aatatttacttaatt

SEQ ID NO: 970493 - DNA, 15 bp, Homo sapiens
caatatttacttaat

SEQ ID NO: 970494 - DNA, 15 bp, Homo sapiens
ccaatatttacttaa

SEQ ID NO: 970495 - DNA, 15 bp, Homo sapiens
tccaatatttactta

SEQ ID NO: 970496 - DNA, 15 bp, Homo sapiens
atccaatatttactt

SEQ ID NO: 970497 - DNA, 15 bp, Homo sapiens
gatccaatatttact

SEQ ID NO: 970498 - DNA, 15 bp, Homo sapiens
agatccaatatttac

SEQ ID NO: 970499 - DNA, 15 bp, Homo sapiens
tagatccaatattta

SEQ ID NO: 970500 - DNA, 15 bp, Homo sapiens
ttagatccaatattt

SEQ ID NO: 970501 - DNA, 15 bp, Homo sapiens
attagatccaatatt

SEQ ID NO: 970502 - DNA, 15 bp, Homo sapiens
gattagatccaatat

SEQ ID NO: 970503 - DNA, 15 bp, Homo sapiens
ggattagatccaata

SEQ ID NO: 970504 - DNA, 15 bp, Homo sapiens
tggattagatccaat

SEQ ID NO: 970505 - DNA, 15 bp, Homo sapiens
atggattagatccaa

SEQ ID NO: 970506 - DNA, 15 bp, Homo sapiens
gatggattagatcca

SEQ ID NO: 970507 - DNA, 15 bp, Homo sapiens
tgatggattagatcc

SEQ ID NO: 970508 - DNA, 15 bp, Homo sapiens
gtgatggattagatc

SEQ ID NO: 970509 - DNA, 15 bp, Homo sapiens
ggtgatggattagat

SEQ ID NO: 970510 - DNA, 15 bp, Homo sapiens
gggtgatggattaga

SEQ ID NO: 970511 - DNA, 15 bp, Homo sapiens
agggtgatggattag

SEQ ID NO: 970512 - DNA, 15 bp, Homo sapiens
gagggtgatggatta

SEQ ID NO: 970513 - DNA, 15 bp, Homo sapiens
ggagggtgatggatt

SEQ ID NO: 970514 - DNA, 15 bp, Homo sapiens
tggagggtgatggat

SEQ ID NO: 970515 - DNA, 15 bp, Homo sapiens
ctggagggtgatgga

SEQ ID NO: 970516 - DNA, 15 bp, Homo sapiens
cctggagggtgatgg

SEQ ID NO: 970517 - DNA, 15 bp, Homo sapiens
tcctggagggtgatg

SEQ ID NO: 970518 - DNA, 15 bp, Homo sapiens
ttcctggagggtgat

SEQ ID NO: 970519 - DNA, 15 bp, Homo sapiens
cttcctggagggtga

SEQ ID NO: 970520 - DNA, 15 bp, Homo sapiens
gcttcctggagggtg

SEQ ID NO: 970521 - DNA, 15 bp, Homo sapiens
ggcttcctggagggt

SEQ ID NO: 970522 - DNA, 15 bp, Homo sapiens
aggcttcctggaggg

SEQ ID NO: 970523 - DNA, 15 bp, Homo sapiens
aaggcttcctggagg

SEQ ID NO: 970524 - DNA, 15 bp, Homo sapiens
aaaggcttcctggag

SEQ ID NO: 970525 - DNA, 15 bp, Homo sapiens
taaaggcttcctgga

SEQ ID NO: 970526 - DNA, 15 bp, Homo sapiens
ataaaggcttcctgg

SEQ ID NO: 970527 - DNA, 15 bp, Homo sapiens
aataaaggcttcctg

SEQ ID NO: 970528 - DNA, 15 bp, Homo sapiens
taataaaggcttcct

SEQ ID NO: 970529 - DNA, 15 bp, Homo sapiens
gtaataaaggcttcc

SEQ ID NO: 970530 - DNA, 15 bp, Homo sapiens
agtaataaaggcttc

SEQ ID NO: 970531 - DNA, 15 bp, Homo sapiens
gagtaataaaggctt

SEQ ID NO: 970532 - DNA, 15 bp, Homo sapiens
ggagtaataaaggct

SEQ ID NO: 970533 - DNA, 15 bp, Homo sapiens
aggagtaataaaggc

SEQ ID NO: 970534 - DNA, 15 bp, Homo sapiens
taggagtaataaagg

SEQ ID NO: 970535 - DNA, 15 bp, Homo sapiens
ttaggagtaataaag

SEQ ID NO: 970536 - DNA, 15 bp, Homo sapiens
tttaggagtaataaa

SEQ ID NO: 970537 - DNA, 15 bp, Homo sapiens
ttttaggagtaataa

SEQ ID NO: 970538 - DNA, 15 bp, Homo sapiens
tttttaggagtaata

SEQ ID NO: 970539 - DNA, 15 bp, Homo sapiens
atttttaggagtaat

SEQ ID NO: 970540 - DNA, 15 bp, Homo sapiens
aatttttaggagtaa

SEQ ID NO: 970541 - DNA, 15 bp, Homo sapiens
aaatttttaggagta

SEQ ID NO: 970542 - DNA, 15 bp, Homo sapiens
gaaatttttaggagt

SEQ ID NO: 970543 - DNA, 15 bp, Homo sapiens
tgaaatttttaggag

SEQ ID NO: 970544 - DNA, 15 bp, Homo sapiens
ttgaaatttttagga

SEQ ID NO: 970545 - DNA, 15 bp, Homo sapiens
gttgaaatttttagg

SEQ ID NO: 970546 - DNA, 15 bp, Homo sapiens
ggttgaaatttttag

SEQ ID NO: 970547 - DNA, 15 bp, Homo sapiens
tggttgaaattttta

SEQ ID NO: 970548 - DNA, 15 bp, Homo sapiens
ttggttgaaattttt

SEQ ID NO: 970549 - DNA, 15 bp, Homo sapiens
tttggttgaaatttt

SEQ ID NO: 970550 - DNA, 15 bp, Homo sapiens
atttggttgaaattt

SEQ ID NO: 970551 - DNA, 15 bp, Homo sapiens
aatttggttgaaatt

SEQ ID NO: 970552 - DNA, 15 bp, Homo sapiens
gaatttggttgaaat

SEQ ID NO: 970553 - DNA, 15 bp, Homo sapiens
tgaatttggttgaaa

SEQ ID NO: 970554 - DNA, 15 bp, Homo sapiens
atgaatttggttgaa

SEQ ID NO: 970555 - DNA, 15 bp, Homo sapiens
aatgaatttggttga

SEQ ID NO: 970556 - DNA, 15 bp, Homo sapiens
taatgaatttggttg

SEQ ID NO: 970557 - DNA, 15 bp, Homo sapiens
ttaatgaatttggtt

SEQ ID NO: 970558 - DNA, 15 bp, Homo sapiens
tttaatgaatttggt

SEQ ID NO: 970559 - DNA, 15 bp, Homo sapiens
ctttaatgaatttgg

SEQ ID NO: 970560 - DNA, 15 bp, Homo sapiens
cctttaatgaatttg

SEQ ID NO: 970561 - DNA, 15 bp, Homo sapiens
tcctttaatgaattt

SEQ ID NO: 970562 - DNA, 15 bp, Homo sapiens
gtcctttaatgaatt

SEQ ID NO: 970563 - DNA, 15 bp, Homo sapiens
tgtcctttaatgaat

SEQ ID NO: 970564 - DNA, 15 bp, Homo sapiens
ttgtcctttaatgaa

SEQ ID NO: 970565 - DNA, 15 bp, Homo sapiens
cttgtcctttaatga

SEQ ID NO: 970566 - DNA, 15 bp, Homo sapiens
tcttgtcctttaatg

SEQ ID NO: 970567 - DNA, 15 bp, Homo sapiens
ttcttgtcctttaat

SEQ ID NO: 970568 - DNA, 15 bp, Homo sapiens
gttcttgtcctttaa

SEQ ID NO: 970569 - DNA, 15 bp, Homo sapiens
agttcttgtccttta

SEQ ID NO: 970570 - DNA, 15 bp, Homo sapiens
gagttcttgtccttt

SEQ ID NO: 970571 - DNA, 15 bp, Homo sapiens
ggagttcttgtcctt

SEQ ID NO: 970572 - DNA, 15 bp, Homo sapiens
tggagttcttgtcct

SEQ ID NO: 970573 - DNA, 15 bp, Homo sapiens
gtggagttcttgtcc

SEQ ID NO: 970574 - DNA, 15 bp, Homo sapiens
ggtggagttcttgtc

SEQ ID NO: 970575 - DNA, 15 bp, Homo sapiens
tggtggagttcttgt

SEQ ID NO: 970576 - DNA, 15 bp, Homo sapiens
ctggtggagttcttg

SEQ ID NO: 970577 - DNA, 15 bp, Homo sapiens
tctggtggagttctt

SEQ ID NO: 970578 - DNA, 15 bp, Homo sapiens
ctctggtggagttct

SEQ ID NO: 970579 - DNA, 15 bp, Homo sapiens
actctggtggagttc

SEQ ID NO: 970580 - DNA, 15 bp, Homo sapiens
tactctggtggagtt

SEQ ID NO: 970581 - DNA, 15 bp, Homo sapiens
ctactctggtggagt

SEQ ID NO: 970582 - DNA, 15 bp, Homo sapiens
cctactctggtggag

SEQ ID NO: 970583 - DNA, 15 bp, Homo sapiens
gcctactctggtgga

SEQ ID NO: 970584 - DNA, 15 bp, Homo sapiens
ggcctactctggtgg

SEQ ID NO: 970585 - DNA, 15 bp, Homo sapiens
tggcctactctggtg

SEQ ID NO: 970586 - DNA, 15 bp, Homo sapiens
atggcctactctggt

SEQ ID NO: 970587 - DNA, 15 bp, Homo sapiens
tatggcctactctgg

SEQ ID NO: 970588 - DNA, 15 bp, Homo sapiens
ttatggcctactctg

SEQ ID NO: 970589 - DNA, 15 bp, Homo sapiens
tttatggcctactct

SEQ ID NO: 970590 - DNA, 15 bp, Homo sapiens
gtttatggcctactc

SEQ ID NO: 970591 - DNA, 15 bp, Homo sapiens
tgtttatggcctact

SEQ ID NO: 970592 - DNA, 15 bp, Homo sapiens
atgtttatggcctac

SEQ ID NO: 970593 - DNA, 15 bp, Homo sapiens
aatgtttatggccta

SEQ ID NO: 970594 - DNA, 15 bp, Homo sapiens
caatgtttatggcct

SEQ ID NO: 970595 - DNA, 15 bp, Homo sapiens
ccaatgtttatggcc

SEQ ID NO: 970596 - DNA, 15 bp, Homo sapiens
gccaatgtttatggc

SEQ ID NO: 970597 - DNA, 15 bp, Homo sapiens
tgccaatgtttatgg

SEQ ID NO: 970598 - DNA, 15 bp, Homo sapiens
ttgccaatgtttatg

SEQ ID NO: 970599 - DNA, 15 bp, Homo sapiens
tttgccaatgtttat

SEQ ID NO: 970600 - DNA, 15 bp, Homo sapiens
ttttgccaatgttta

SEQ ID NO: 970601 - DNA, 15 bp, Homo sapiens
attttgccaatgttt

SEQ ID NO: 970602 - DNA, 15 bp, Homo sapiens
aattttgccaatgtt

SEQ ID NO: 970603 - DNA, 15 bp, Homo sapiens
taattttgccaatgt

SEQ ID NO: 970604 - DNA, 15 bp, Homo sapiens
ctaattttgccaatg

SEQ ID NO: 970605 - DNA, 15 bp, Homo sapiens
actaattttgccaat

SEQ ID NO: 970606 - DNA, 15 bp, Homo sapiens
aactaattttgccaa

SEQ ID NO: 970607 - DNA, 15 bp, Homo sapiens
caactaattttgcca

SEQ ID NO: 970608 - DNA, 15 bp, Homo sapiens
acaactaattttgcc

SEQ ID NO: 970609 - DNA, 15 bp, Homo sapiens
tacaactaattttgc

SEQ ID NO: 970610 - DNA, 15 bp, Homo sapiens
ttacaactaattttg

SEQ ID NO: 970611 - DNA, 15 bp, Homo sapiens
attacaactaatttt

SEQ ID NO: 970612 - DNA, 15 bp, Homo sapiens
gattacaactaattt

SEQ ID NO: 970613 - DNA, 15 bp, Homo sapiens
ggattacaactaatt

SEQ ID NO: 970614 - DNA, 15 bp, Homo sapiens
tggattacaactaat

SEQ ID NO: 970615 - DNA, 15 bp, Homo sapiens
atggattacaactaa

SEQ ID NO: 970616 - DNA, 15 bp, Homo sapiens
catggattacaacta

SEQ ID NO: 970617 - DNA, 15 bp, Homo sapiens
tcatggattacaact

SEQ ID NO: 970618 - DNA, 15 bp, Homo sapiens
gtcatggattacaac

SEQ ID NO: 970619 - DNA, 15 bp, Homo sapiens
agtcatggattacaa

SEQ ID NO: 970620 - DNA, 15 bp, Homo sapiens
tagtcatggattaca

SEQ ID NO: 970621 - DNA, 15 bp, Homo sapiens
ctagtcatggattac

SEQ ID NO: 970622 - DNA, 15 bp, Homo sapiens
tctagtcatggatta

SEQ ID NO: 970623 - DNA, 15 bp, Homo sapiens
atctagtcatggatt

SEQ ID NO: 970624 - DNA, 15 bp, Homo sapiens
aatctagtcatggat

SEQ ID NO: 970625 - DNA, 15 bp, Homo sapiens
aaatctagtcatgga

SEQ ID NO: 970626 - DNA, 15 bp, Homo sapiens
taaatctagtcatgg

SEQ ID NO: 970627 - DNA, 15 bp, Homo sapiens
ttaaatctagtcatg

SEQ ID NO: 970628 - DNA, 15 bp, Homo sapiens
attaaatctagtcat

SEQ ID NO: 970629 - DNA, 15 bp, Homo sapiens
cattaaatctagtca

SEQ ID NO: 970630 - DNA, 15 bp, Homo sapiens
acattaaatctagtc

SEQ ID NO: 970631 - DNA, 15 bp, Homo sapiens
gacattaaatctagt

SEQ ID NO: 970632 - DNA, 15 bp, Homo sapiens
ggacattaaatctag

SEQ ID NO: 970633 - DNA, 15 bp, Homo sapiens
gggacattaaatcta

SEQ ID NO: 970634 - DNA, 15 bp, Homo sapiens
agggacattaaatct

SEQ ID NO: 970635 - DNA, 15 bp, Homo sapiens
aagggacattaaatc

SEQ ID NO: 970636 - DNA, 15 bp, Homo sapiens
aaagggacattaaat

SEQ ID NO: 970637 - DNA, 15 bp, Homo sapiens
caaagggacattaaa

SEQ ID NO: 970638 - DNA, 15 bp, Homo sapiens
acaaagggacattaa

SEQ ID NO: 970639 - DNA, 15 bp, Homo sapiens
aacaaagggacatta

SEQ ID NO: 970640 - DNA, 15 bp, Homo sapiens
aaacaaagggacatt

SEQ ID NO: 970641 - DNA, 15 bp, Homo sapiens
aaaacaaagggacat

SEQ ID NO: 970642 - DNA, 15 bp, Homo sapiens
taaaacaaagggaca

SEQ ID NO: 970643 - DNA, 15 bp, Homo sapiens
ataaaacaaagggac

SEQ ID NO: 970644 - DNA, 15 bp, Homo sapiens
aataaaacaaaggga

SEQ ID NO: 970645 - DNA, 15 bp, Homo sapiens
gaataaaacaaaggg

SEQ ID NO: 970646 - DNA, 15 bp, Homo sapiens
ggaataaaacaaagg

SEQ ID NO: 970647 - DNA, 15 bp, Homo sapiens
gggaataaaacaaag

SEQ ID NO: 970648 - DNA, 15 bp, Homo sapiens
tgggaataaaacaaa

SEQ ID NO: 970649 - DNA, 15 bp, Homo sapiens
atgggaataaaacaa

SEQ ID NO: 970650 - DNA, 15 bp, Homo sapiens
tatgggaataaaaca

SEQ ID NO: 970651 - DNA, 15 bp, Homo sapiens
atatgggaataaaac

SEQ ID NO: 970652 - DNA, 15 bp, Homo sapiens
catatgggaataaaa

SEQ ID NO: 970653 - DNA, 15 bp, Homo sapiens
ccatatgggaataaa

SEQ ID NO: 970654 - DNA, 15 bp, Homo sapiens
accatatgggaataa

SEQ ID NO: 970655 - DNA, 15 bp, Homo sapiens
aaccatatgggaata

SEQ ID NO: 970656 - DNA, 15 bp, Homo sapiens
taaccatatgggaat

SEQ ID NO: 970657 - DNA, 15 bp, Homo sapiens
ataaccatatgggaa

SEQ ID NO: 970658 - DNA, 15 bp, Homo sapiens
tataaccatatggga

SEQ ID NO: 970659 - DNA, 15 bp, Homo sapiens
ttataaccatatggg

SEQ ID NO: 970660 - DNA, 15 bp, Homo sapiens
attataaccatatgg

SEQ ID NO: 970661 - DNA, 15 bp, Homo sapiens
cattataaccatatg

SEQ ID NO: 970662 - DNA, 15 bp, Homo sapiens
gcattataaccatat

SEQ ID NO: 970663 - DNA, 15 bp, Homo sapiens
agcattataaccata

SEQ ID NO: 970664 - DNA, 15 bp, Homo sapiens
aagcattataaccat

SEQ ID NO: 970665 - DNA, 15 bp, Homo sapiens
aaagcattataacca

SEQ ID NO: 970666 - DNA, 15 bp, Homo sapiens
caaagcattataacc

SEQ ID NO: 970667 - DNA, 15 bp, Homo sapiens
gcaaagcattataac

SEQ ID NO: 970668 - DNA, 15 bp, Homo sapiens
agcaaagcattataa

SEQ ID NO: 970669 - DNA, 15 bp, Homo sapiens
aagcaaagcattata

SEQ ID NO: 970670 - DNA, 15 bp, Homo sapiens
caagcaaagcattat

SEQ ID NO: 970671 - DNA, 15 bp, Homo sapiens
ccaagcaaagcatta

SEQ ID NO: 970672 - DNA, 15 bp, Homo sapiens
gccaagcaaagcatt

SEQ ID NO: 970673 - DNA, 15 bp, Homo sapiens
tgccaagcaaagcat

SEQ ID NO: 970674 - DNA, 15 bp, Homo sapiens
atgccaagcaaagca

SEQ ID NO: 970675 - DNA, 15 bp, Homo sapiens
aatgccaagcaaagc

SEQ ID NO: 970676 - DNA, 15 bp, Homo sapiens
taatgccaagcaaag

SEQ ID NO: 970677 - DNA, 15 bp, Homo sapiens
ctaatgccaagcaaa

SEQ ID NO: 970678 - DNA, 15 bp, Homo sapiens
cctaatgccaagcaa

SEQ ID NO: 970679 - DNA, 15 bp, Homo sapiens
ccctaatgccaagca

SEQ ID NO: 970680 - DNA, 15 bp, Homo sapiens
cccctaatgccaagc

SEQ ID NO: 970681 - DNA, 15 bp, Homo sapiens
acccctaatgccaag

SEQ ID NO: 970682 - DNA, 15 bp, Homo sapiens
tacccctaatgccaa

SEQ ID NO: 970683 - DNA, 15 bp, Homo sapiens
atacccctaatgcca

SEQ ID NO: 970684 - DNA, 15 bp, Homo sapiens
aatacccctaatgcc

SEQ ID NO: 970685 - DNA, 15 bp, Homo sapiens
aaatacccctaatgc

SEQ ID NO: 970686 - DNA, 15 bp, Homo sapiens
aaaatacccctaatg

SEQ ID NO: 970687 - DNA, 15 bp, Homo sapiens
taaaatacccctaat

SEQ ID NO: 970688 - DNA, 15 bp, Homo sapiens
ttaaaatacccctaa

SEQ ID NO: 970689 - DNA, 15 bp, Homo sapiens
cttaaaataccccta

SEQ ID NO: 970690 - DNA, 15 bp, Homo sapiens
acttaaaatacccct

SEQ ID NO: 970691 - DNA, 15 bp, Homo sapiens
aacttaaaatacccc

SEQ ID NO: 970692 - DNA, 15 bp, Homo sapiens
aaacttaaaataccc

SEQ ID NO: 970693 - DNA, 15 bp, Homo sapiens
aaaacttaaaatacc

SEQ ID NO: 970694 - DNA, 15 bp, Homo sapiens
gaaaacttaaaatac

SEQ ID NO: 970695 - DNA, 15 bp, Homo sapiens
agaaaacttaaaata

SEQ ID NO: 970696 - DNA, 15 bp, Homo sapiens
aagaaaacttaaaat

SEQ ID NO: 970697 - DNA, 15 bp, Homo sapiens
gaagaaaacttaaaa

SEQ ID NO: 970698 - DNA, 15 bp, Homo sapiens
agaagaaaacttaaa

SEQ ID NO: 970699 - DNA, 15 bp, Homo sapiens
cagaagaaaacttaa

SEQ ID NO: 970700 - DNA, 15 bp, Homo sapiens
gcagaagaaaactta

SEQ ID NO: 970701 - DNA, 15 bp, Homo sapiens
ggcagaagaaaactt

SEQ ID NO: 970702 - DNA, 15 bp, Homo sapiens
aggcagaagaaaact

SEQ ID NO: 970703 - DNA, 15 bp, Homo sapiens
taggcagaagaaaac

SEQ ID NO: 970704 - DNA, 15 bp, Homo sapiens
ctaggcagaagaaaa

SEQ ID NO: 970705 - DNA, 15 bp, Homo sapiens
actaggcagaagaaa

SEQ ID NO: 970706 - DNA, 15 bp, Homo sapiens
tactaggcagaagaa

SEQ ID NO: 970707 - DNA, 15 bp, Homo sapiens
ttactaggcagaaga

SEQ ID NO: 970708 - DNA, 15 bp, Homo sapiens
cttactaggcagaag

SEQ ID NO: 970709 - DNA, 15 bp, Homo sapiens
acttactaggcagaa

SEQ ID NO: 970710 - DNA, 15 bp, Homo sapiens
cacttactaggcaga

SEQ ID NO: 970711 - DNA, 15 bp, Homo sapiens
tcacttactaggcag

SEQ ID NO: 970712 - DNA, 15 bp, Homo sapiens
ttcacttactaggca

SEQ ID NO: 970713 - DNA, 15 bp, Homo sapiens
attcacttactaggc

SEQ ID NO: 970714 - DNA, 15 bp, Homo sapiens
aattcacttactagg

SEQ ID NO: 970715 - DNA, 15 bp, Homo sapiens
aaattcacttactag

SEQ ID NO: 970716 - DNA, 15 bp, Homo sapiens
caaattcacttacta

SEQ ID NO: 970717 - DNA, 15 bp, Homo sapiens
acaaattcacttact

SEQ ID NO: 970718 - DNA, 15 bp, Homo sapiens
cacaaattcacttac

SEQ ID NO: 970719 - DNA, 15 bp, Homo sapiens
acacaaattcactta

SEQ ID NO: 970720 - DNA, 15 bp, Homo sapiens
aacacaaattcactt

SEQ ID NO: 970721 - DNA, 15 bp, Homo sapiens
aaacacaaattcact

SEQ ID NO: 970722 - DNA, 15 bp, Homo sapiens
taaacacaaattcac

SEQ ID NO: 970723 - DNA, 15 bp, Homo sapiens
ataaacacaaattca

SEQ ID NO: 970724 - DNA, 15 bp, Homo sapiens
tataaacacaaattc

SEQ ID NO: 970725 - DNA, 15 bp, Homo sapiens
ttataaacacaaatt

SEQ ID NO: 970726 - DNA, 15 bp, Homo sapiens
attataaacacaaat

SEQ ID NO: 970727 - DNA, 15 bp, Homo sapiens
tattataaacacaaa

SEQ ID NO: 970728 - DNA, 15 bp, Homo sapiens
gtattataaacacaa

SEQ ID NO: 970729 - DNA, 15 bp, Homo sapiens
tgtattataaacaca

SEQ ID NO: 970730 - DNA, 15 bp, Homo sapiens
ttgtattataaacac

SEQ ID NO: 970731 - DNA, 15 bp, Homo sapiens
attgtattataaaca

SEQ ID NO: 970732 - DNA, 15 bp, Homo sapiens
tattgtattataaac

SEQ ID NO: 970733 - DNA, 15 bp, Homo sapiens
ttattgtattataaa

SEQ ID NO: 970734 - DNA, 15 bp, Homo sapiens
attattgtattataa

SEQ ID NO: 970735 - DNA, 15 bp, Homo sapiens
gattattgtattata

SEQ ID NO: 970736 - DNA, 15 bp, Homo sapiens
tgattattgtattat

SEQ ID NO: 970737 - DNA, 15 bp, Homo sapiens
atgattattgtatta

SEQ ID NO: 970738 - DNA, 15 bp, Homo sapiens
tatgattattgtatt

SEQ ID NO: 970739 - DNA, 15 bp, Homo sapiens
ttatgattattgtat

SEQ ID NO: 970740 - DNA, 15 bp, Homo sapiens
tttatgattattgta

SEQ ID NO: 970741 - DNA, 15 bp, Homo sapiens
ttttatgattattgt

SEQ ID NO: 970742 - DNA, 15 bp, Homo sapiens
attttatgattattg

SEQ ID NO: 970743 - DNA, 15 bp, Homo sapiens
tattttatgattatt

SEQ ID NO: 970744 - DNA, 15 bp, Homo sapiens
atattttatgattat

SEQ ID NO: 970745 - DNA, 15 bp, Homo sapiens
gatattttatgatta

SEQ ID NO: 970746 - DNA, 15 bp, Homo sapiens
tgatattttatgatt

SEQ ID NO: 970747 - DNA, 15 bp, Homo sapiens
gtgatattttatgat

SEQ ID NO: 970748 - DNA, 15 bp, Homo sapiens
tgtgatattttatga

SEQ ID NO: 970749 - DNA, 15 bp, Homo sapiens
atgtgatattttatg

SEQ ID NO: 970750 - DNA, 15 bp, Homo sapiens
aatgtgatattttat

SEQ ID NO: 970751 - DNA, 15 bp, Homo sapiens
taatgtgatatttta

SEQ ID NO: 970752 - DNA, 15 bp, Homo sapiens
ttaatgtgatatttt

SEQ ID NO: 970753 - DNA, 15 bp, Homo sapiens
attaatgtgatattt

SEQ ID NO: 970754 - DNA, 15 bp, Homo sapiens
tattaatgtgatatt

SEQ ID NO: 970755 - DNA, 15 bp, Homo sapiens
atattaatgtgatat

SEQ ID NO: 970756 - DNA, 15 bp, Homo sapiens
aatattaatgtgata

SEQ ID NO: 970757 - DNA, 15 bp, Homo sapiens
aaatattaatgtgat

SEQ ID NO: 970758 - DNA, 15 bp, Homo sapiens
aaaatattaatgtga

SEQ ID NO: 970759 - DNA, 15 bp, Homo sapiens
taaaatattaatgtg

SEQ ID NO: 970760 - DNA, 15 bp, Homo sapiens
ataaaatattaatgt

SEQ ID NO: 970761 - DNA, 15 bp, Homo sapiens
tataaaatattaatg

SEQ ID NO: 970762 - DNA, 15 bp, Homo sapiens
ttataaaatattaat

SEQ ID NO: 970763 - DNA, 15 bp, Homo sapiens
gttataaaatattaa

SEQ ID NO: 970764 - DNA, 15 bp, Homo sapiens
agttataaaatatta

SEQ ID NO: 970765 - DNA, 15 bp, Homo sapiens
cagttataaaatatt

SEQ ID NO: 970766 - DNA, 15 bp, Homo sapiens
acagttataaaatat

SEQ ID NO: 970767 - DNA, 15 bp, Homo sapiens
tacagttataaaata

SEQ ID NO: 970768 - DNA, 15 bp, Homo sapiens
gtacagttataaaat

SEQ ID NO: 970769 - DNA, 15 bp, Homo sapiens
tgtacagttataaaa

SEQ ID NO: 970770 - DNA, 15 bp, Homo sapiens
ctgtacagttataaa

SEQ ID NO: 970771 - DNA, 15 bp, Homo sapiens
actgtacagttataa

SEQ ID NO: 970772 - DNA, 15 bp, Homo sapiens
aactgtacagttata

SEQ ID NO: 970773 - DNA, 15 bp, Homo sapiens
taactgtacagttat

SEQ ID NO: 970774 - DNA, 15 bp, Homo sapiens
ataactgtacagtta

SEQ ID NO: 970775 - DNA, 15 bp, Homo sapiens
tataactgtacagtt

SEQ ID NO: 970776 - DNA, 15 bp, Homo sapiens
ttataactgtacagt

SEQ ID NO: 970777 - DNA, 15 bp, Homo sapiens
tttataactgtacag

SEQ ID NO: 970778 - DNA, 15 bp, Homo sapiens
ttttataactgtaca

SEQ ID NO: 970779 - DNA, 15 bp, Homo sapiens
attttataactgtac

SEQ ID NO: 970780 - DNA, 15 bp, Homo sapiens
tattttataactgta

SEQ ID NO: 970781 - DNA, 15 bp, Homo sapiens
atattttataactgt

SEQ ID NO: 970782 - DNA, 15 bp, Homo sapiens
aatattttataactg

SEQ ID NO: 970783 - DNA, 15 bp, Homo sapiens
aaatattttataact

SEQ ID NO: 970784 - DNA, 15 bp, Homo sapiens
aaaatattttataac

SEQ ID NO: 970785 - DNA, 15 bp, Homo sapiens
taaaatattttataa

SEQ ID NO: 970786 - DNA, 15 bp, Homo sapiens
ataaaatattttata

SEQ ID NO: 970787 - DNA, 15 bp, Homo sapiens
tataaaatattttat

SEQ ID NO: 970788 - DNA, 15 bp, Homo sapiens
ttataaaatatttta

SEQ ID NO: 970789 - DNA, 15 bp, Homo sapiens
cttataaaatatttt

SEQ ID NO: 970790 - DNA, 15 bp, Homo sapiens
acttataaaatattt

SEQ ID NO: 970791 - DNA, 15 bp, Homo sapiens
tacttataaaatatt

SEQ ID NO: 970792 - DNA, 15 bp, Homo sapiens
ttacttataaaatat

SEQ ID NO: 970793 - DNA, 15 bp, Homo sapiens
attacttataaaata

SEQ ID NO: 970794 - DNA, 15 bp, Homo sapiens
tattacttataaaat

SEQ ID NO: 970795 - DNA, 15 bp, Homo sapiens
atattacttataaaa

SEQ ID NO: 970796 - DNA, 15 bp, Homo sapiens
aatattacttataaa

SEQ ID NO: 970797 - DNA, 15 bp, Homo sapiens
aaatattacttataa

SEQ ID NO: 970798 - DNA, 15 bp, Homo sapiens
taaatattacttata

SEQ ID NO: 970799 - DNA, 15 bp, Homo sapiens
ataaatattacttat

SEQ ID NO: 970800 - DNA, 15 bp, Homo sapiens
tataaatattactta

SEQ ID NO: 970801 - DNA, 15 bp, Homo sapiens
atataaatattactt

SEQ ID NO: 970802 - DNA, 15 bp, Homo sapiens
aatataaatattact

SEQ ID NO: 970803 - DNA, 15 bp, Homo sapiens
aaatataaatattac

SEQ ID NO: 970804 - DNA, 15 bp, Homo sapiens
aaaatataaatatta

SEQ ID NO: 970805 - DNA, 15 bp, Homo sapiens
taaaatataaatatt

SEQ ID NO: 970806 - DNA, 15 bp, Homo sapiens
ataaaatataaatat

SEQ ID NO: 970807 - DNA, 15 bp, Homo sapiens
tataaaatataaata

SEQ ID NO: 970808 - DNA, 15 bp, Homo sapiens
ttataaaatataaat

SEQ ID NO: 970809 - DNA, 15 bp, Homo sapiens
cttataaaatataaa

SEQ ID NO: 970810 - DNA, 15 bp, Homo sapiens
acttataaaatataa

SEQ ID NO: 970811 - DNA, 15 bp, Homo sapiens
tacttataaaatata

SEQ ID NO: 970812 - DNA, 15 bp, Homo sapiens
aaaatattacttata

SEQ ID NO: 970813 - DNA, 15 bp, Homo sapiens
taaaatattacttat

SEQ ID NO: 970814 - DNA, 15 bp, Homo sapiens
ataaaatattactta

SEQ ID NO: 970815 - DNA, 15 bp, Homo sapiens
tataaaatattactt

SEQ ID NO: 970816 - DNA, 15 bp, Homo sapiens
ttataaaatattact

SEQ ID NO: 970817 - DNA, 15 bp, Homo sapiens
gttataaaatattac

SEQ ID NO: 970818 - DNA, 15 bp, Homo sapiens
ttaactgtacagtta

SEQ ID NO: 970819 - DNA, 15 bp, Homo sapiens
gttaactgtacagtt

SEQ ID NO: 970820 - DNA, 15 bp, Homo sapiens
agttaactgtacagt

SEQ ID NO: 970821 - DNA, 15 bp, Homo sapiens
gagttaactgtacag

SEQ ID NO: 970822 - DNA, 15 bp, Homo sapiens
agagttaactgtaca

SEQ ID NO: 970823 - DNA, 15 bp, Homo sapiens
cagagttaactgtac

SEQ ID NO: 970824 - DNA, 15 bp, Homo sapiens
ccagagttaactgta

SEQ ID NO: 970825 - DNA, 15 bp, Homo sapiens
gccagagttaactgt

SEQ ID NO: 970826 - DNA, 15 bp, Homo sapiens
ggccagagttaactg

SEQ ID NO: 970827 - DNA, 15 bp, Homo sapiens
gggccagagttaact

SEQ ID NO: 970828 - DNA, 15 bp, Homo sapiens
tgggccagagttaac

SEQ ID NO: 970829 - DNA, 15 bp, Homo sapiens
ttgggccagagttaa

SEQ ID NO: 970830 - DNA, 15 bp, Homo sapiens
cttgggccagagtta

SEQ ID NO: 970831 - DNA, 15 bp, Homo sapiens
ccttgggccagagtt

SEQ ID NO: 970832 - DNA, 15 bp, Homo sapiens
tccttgggccagagt

SEQ ID NO: 970833 - DNA, 15 bp, Homo sapiens
ttccttgggccagag

SEQ ID NO: 970834 - DNA, 15 bp, Homo sapiens
tttccttgggccaga

SEQ ID NO: 970835 - DNA, 15 bp, Homo sapiens
ttttccttgggccag

SEQ ID NO: 970836 - DNA, 15 bp, Homo sapiens
cttttccttgggcca

SEQ ID NO: 970837 - DNA, 15 bp, Homo sapiens
tcttttccttgggcc

SEQ ID NO: 970838 - DNA, 15 bp, Homo sapiens
atcttttccttgggc

SEQ ID NO: 970839 - DNA, 15 bp, Homo sapiens
tatcttttccttggg

SEQ ID NO: 970840 - DNA, 15 bp, Homo sapiens
ctatcttttccttgg

SEQ ID NO: 970841 - DNA, 15 bp, Homo sapiens
actatcttttccttg

SEQ ID NO: 970842 - DNA, 15 bp, Homo sapiens
gactatcttttcctt

SEQ ID NO: 970843 - DNA, 15 bp, Homo sapiens
agactatcttttcct

SEQ ID NO: 970844 - DNA, 15 bp, Homo sapiens
cagactatcttttcc

SEQ ID NO: 970845 - DNA, 15 bp, Homo sapiens
tcagactatcttttc

SEQ ID NO: 970846 - DNA, 15 bp, Homo sapiens
atcagactatctttt

SEQ ID NO: 970847 - DNA, 15 bp, Homo sapiens
tatcagactatcttt

SEQ ID NO: 970848 - DNA, 15 bp, Homo sapiens
ctatcagactatctt

SEQ ID NO: 970849 - DNA, 15 bp, Homo sapiens
tctatcagactatct

SEQ ID NO: 970850 - DNA, 15 bp, Homo sapiens
atctatcagactatc

SEQ ID NO: 970851 - DNA, 15 bp, Homo sapiens
catctatcagactat

SEQ ID NO: 970852 - DNA, 15 bp, Homo sapiens
gcatctatcagacta

SEQ ID NO: 970853 - DNA, 15 bp, Homo sapiens
agcatctatcagact

SEQ ID NO: 970854 - DNA, 15 bp, Homo sapiens
cagcatctatcagac

SEQ ID NO: 970855 - DNA, 15 bp, Homo sapiens
gcagcatctatcaga

SEQ ID NO: 970856 - DNA, 15 bp, Homo sapiens
tgcagcatctatcag

SEQ ID NO: 970857 - DNA, 15 bp, Homo sapiens
ctgcagcatctatca

SEQ ID NO: 970858 - DNA, 15 bp, Homo sapiens
gctgcagcatctatc

SEQ ID NO: 970859 - DNA, 15 bp, Homo sapiens
ggctgcagcatctat

SEQ ID NO: 970860 - DNA, 15 bp, Homo sapiens
gggctgcagcatcta

SEQ ID NO: 970861 - DNA, 15 bp, Homo sapiens
ggggctgcagcatct

SEQ ID NO: 970862 - DNA, 15 bp, Homo sapiens
tggggctgcagcatc

SEQ ID NO: 970863 - DNA, 15 bp, Homo sapiens
atggggctgcagcat

SEQ ID NO: 970864 - DNA, 15 bp, Homo sapiens
aatggggctgcagca

SEQ ID NO: 970865 - DNA, 15 bp, Homo sapiens
aaatggggctgcagc

SEQ ID NO: 970866 - DNA, 15 bp, Homo sapiens
aaaatggggctgcag

SEQ ID NO: 970867 - DNA, 15 bp, Homo sapiens
taaaatggggctgca

SEQ ID NO: 970868 - DNA, 15 bp, Homo sapiens
ctaaaatggggctgc

SEQ ID NO: 970869 - DNA, 15 bp, Homo sapiens
gctaaaatggggctg

SEQ ID NO: 970870 - DNA, 15 bp, Homo sapiens
tgctaaaatggggct

SEQ ID NO: 970871 - DNA, 15 bp, Homo sapiens
ttgctaaaatggggc

SEQ ID NO: 970872 - DNA, 15 bp, Homo sapiens
tttgctaaaatgggg

SEQ ID NO: 970873 - DNA, 15 bp, Homo sapiens
atttgctaaaatggg

SEQ ID NO: 970874 - DNA, 15 bp, Homo sapiens
catttgctaaaatgg

SEQ ID NO: 970875 - DNA, 15 bp, Homo sapiens
acatttgctaaaatg

SEQ ID NO: 970876 - DNA, 15 bp, Homo sapiens
cacatttgctaaaat

SEQ ID NO: 970877 - DNA, 15 bp, Homo sapiens
tcacatttgctaaaa

SEQ ID NO: 970878 - DNA, 15 bp, Homo sapiens
gtcacatttgctaaa

SEQ ID NO: 970879 - DNA, 15 bp, Homo sapiens
ggtcacatttgctaa

SEQ ID NO: 970880 - DNA, 15 bp, Homo sapiens
aggtcacatttgcta

SEQ ID NO: 970881 - DNA, 15 bp, Homo sapiens
gaggtcacatttgct

SEQ ID NO: 970882 - DNA, 15 bp, Homo sapiens
tgaggtcacatttgc

SEQ ID NO: 970883 - DNA, 15 bp, Homo sapiens
gtgaggtcacatttg

SEQ ID NO: 970884 - DNA, 15 bp, Homo sapiens
tgtgaggtcacattt

SEQ ID NO: 970885 - DNA, 15 bp, Homo sapiens
ctgtgaggtcacatt

SEQ ID NO: 970886 - DNA, 15 bp, Homo sapiens
cctgtgaggtcacat

SEQ ID NO: 970887 - DNA, 15 bp, Homo sapiens
gcctgtgaggtcaca

SEQ ID NO: 970888 - DNA, 15 bp, Homo sapiens
ggcctgtgaggtcac

SEQ ID NO: 970889 - DNA, 15 bp, Homo sapiens
aggcctgtgaggtca

SEQ ID NO: 970890 - DNA, 15 bp, Homo sapiens
caggcctgtgaggtc

SEQ ID NO: 970891 - DNA, 15 bp, Homo sapiens
tcaggcctgtgaggt

SEQ ID NO: 970892 - DNA, 15 bp, Homo sapiens
ttcaggcctgtgagg

SEQ ID NO: 970893 - DNA, 15 bp, Homo sapiens
attcaggcctgtgag

SEQ ID NO: 970894 - DNA, 15 bp, Homo sapiens
cattcaggcctgtga

SEQ ID NO: 970895 - DNA, 15 bp, Homo sapiens
gcattcaggcctgtg

SEQ ID NO: 970896 - DNA, 15 bp, Homo sapiens
ggcattcaggcctgt

SEQ ID NO: 970897 - DNA, 15 bp, Homo sapiens
tggcattcaggcctg

SEQ ID NO: 970898 - DNA, 15 bp, Homo sapiens
atggcattcaggcct

SEQ ID NO: 970899 - DNA, 15 bp, Homo sapiens
gatggcattcaggcc

SEQ ID NO: 970900 - DNA, 15 bp, Homo sapiens
cgatggcattcaggc

SEQ ID NO: 970901 - DNA, 15 bp, Homo sapiens
gcgatggcattcagg

SEQ ID NO: 970902 - DNA, 15 bp, Homo sapiens
agcgatggcattcag

SEQ ID NO: 970903 - DNA, 15 bp, Homo sapiens
tagcgatggcattca

SEQ ID NO: 970904 - DNA, 15 bp, Homo sapiens
atagcgatggcattc

SEQ ID NO: 970905 - DNA, 15 bp, Homo sapiens
aatagcgatggcatt

SEQ ID NO: 970906 - DNA, 15 bp, Homo sapiens
gaatagcgatggcat

SEQ ID NO: 970907 - DNA, 15 bp, Homo sapiens
ggaatagcgatggca

SEQ ID NO: 970908 - DNA, 15 bp, Homo sapiens
tggaatagcgatggc

SEQ ID NO: 970909 - DNA, 15 bp, Homo sapiens
gtggaatagcgatgg

SEQ ID NO: 970910 - DNA, 15 bp, Homo sapiens
tgtggaatagcgatg

SEQ ID NO: 970911 - DNA, 15 bp, Homo sapiens
atgtggaatagcgat

SEQ ID NO: 970912 - DNA, 15 bp, Homo sapiens
gatgtggaatagcga

SEQ ID NO: 970913 - DNA, 15 bp, Homo sapiens
agatgtggaatagcg

SEQ ID NO: 970914 - DNA, 15 bp, Homo sapiens
tagatgtggaatagc

SEQ ID NO: 970915 - DNA, 15 bp, Homo sapiens
gtagatgtggaatag

SEQ ID NO: 970916 - DNA, 15 bp, Homo sapiens
tgtagatgtggaata

SEQ ID NO: 970917 - DNA, 15 bp, Homo sapiens
ctgtagatgtggaat

SEQ ID NO: 970918 - DNA, 15 bp, Homo sapiens
cctgtagatgtggaa

SEQ ID NO: 970919 - DNA, 15 bp, Homo sapiens
tcctgtagatgtgga

SEQ ID NO: 970920 - DNA, 15 bp, Homo sapiens
atcctgtagatgtgg

SEQ ID NO: 970921 - DNA, 15 bp, Homo sapiens
tatcctgtagatgtg

SEQ ID NO: 970922 - DNA, 15 bp, Homo sapiens
ctatcctgtagatgt

SEQ ID NO: 970923 - DNA, 15 bp, Homo sapiens
tctatcctgtagatg

SEQ ID NO: 970924 - DNA, 15 bp, Homo sapiens
gtctatcctgtagat

SEQ ID NO: 970925 - DNA, 15 bp, Homo sapiens
cgtctatcctgtaga

SEQ ID NO: 970926 - DNA, 15 bp, Homo sapiens
ccgtctatcctgtag

SEQ ID NO: 970927 - DNA, 15 bp, Homo sapiens
tccgtctatcctgta

SEQ ID NO: 970928 - DNA, 15 bp, Homo sapiens
ttccgtctatcctgt

SEQ ID NO: 970929 - DNA, 15 bp, Homo sapiens
tttccgtctatcctg

SEQ ID NO: 970930 - DNA, 15 bp, Homo sapiens
ctttccgtctatcct

SEQ ID NO: 970931 - DNA, 15 bp, Homo sapiens
cctttccgtctatcc

SEQ ID NO: 970932 - DNA, 15 bp, Homo sapiens
tcctttccgtctatc

SEQ ID NO: 970933 - DNA, 15 bp, Homo sapiens
ttcctttccgtctat

SEQ ID NO: 970934 - DNA, 15 bp, Homo sapiens
tttcctttccgtcta

SEQ ID NO: 970935 - DNA, 15 bp, Homo sapiens
ctttcctttccgtct

SEQ ID NO: 970936 - DNA, 15 bp, Homo sapiens
tctttcctttccgtc

SEQ ID NO: 970937 - DNA, 15 bp, Homo sapiens
ttctttcctttccgt

SEQ ID NO: 970938 - DNA, 15 bp, Homo sapiens
tttctttcctttccg

SEQ ID NO: 970939 - DNA, 15 bp, Homo sapiens
atttctttcctttcc

SEQ ID NO: 970940 - DNA, 15 bp, Homo sapiens
tatttctttcctttc

SEQ ID NO: 970941 - DNA, 15 bp, Homo sapiens
ttatttctttccttt

SEQ ID NO: 970942 - DNA, 15 bp, Homo sapiens
tttatttctttcctt

SEQ ID NO: 970943 - DNA, 15 bp, Homo sapiens
ttttatttctttcct

SEQ ID NO: 970944 - DNA, 15 bp, Homo sapiens
tttttatttctttcc

SEQ ID NO: 970945 - DNA, 15 bp, Homo sapiens
ttttttatttctttc

SEQ ID NO: 970946 - DNA, 15 bp, Homo sapiens
tttttttatttcttt

SEQ ID NO: 970947 - DNA, 15 bp, Homo sapiens
atttttttatttctt

SEQ ID NO: 970948 - DNA, 15 bp, Homo sapiens
tatttttttatttct

SEQ ID NO: 970949 - DNA, 15 bp, Homo sapiens
ctatttttttatttc

SEQ ID NO: 970950 - DNA, 15 bp, Homo sapiens
cctatttttttattt

SEQ ID NO: 970951 - DNA, 15 bp, Homo sapiens
acctatttttttatt

SEQ ID NO: 970952 - DNA, 15 bp, Homo sapiens
tacctatttttttat

SEQ ID NO: 970953 - DNA, 15 bp, Homo sapiens
gtacctattttttta

SEQ ID NO: 970954 - DNA, 15 bp, Homo sapiens
ggtacctattttttt

SEQ ID NO: 970955 - DNA, 15 bp, Homo sapiens
aggtacctatttttt

SEQ ID NO: 970956 - DNA, 15 bp, Homo sapiens
taggtacctattttt

SEQ ID NO: 970957 - DNA, 15 bp, Homo sapiens
ttaggtacctatttt

SEQ ID NO: 970958 - DNA, 15 bp, Homo sapiens
gttaggtacctattt

SEQ ID NO: 970959 - DNA, 15 bp, Homo sapiens
tgttaggtacctatt

SEQ ID NO: 970960 - DNA, 15 bp, Homo sapiens
gtgttaggtacctat

SEQ ID NO: 970961 - DNA, 15 bp, Homo sapiens
agtgttaggtaccta

SEQ ID NO: 970962 - DNA, 15 bp, Homo sapiens
cagtgttaggtacct

SEQ ID NO: 970963 - DNA, 15 bp, Homo sapiens
ccagtgttaggtacc

SEQ ID NO: 970964 - DNA, 15 bp, Homo sapiens
gccagtgttaggtac

SEQ ID NO: 970965 - DNA, 15 bp, Homo sapiens
tgccagtgttaggta

SEQ ID NO: 970966 - DNA, 15 bp, Homo sapiens
ttgccagtgttaggt

SEQ ID NO: 970967 - DNA, 15 bp, Homo sapiens
cttgccagtgttagg

SEQ ID NO: 970968 - DNA, 15 bp, Homo sapiens
tcttgccagtgttag

SEQ ID NO: 970969 - DNA, 15 bp, Homo sapiens
ctcttgccagtgtta

SEQ ID NO: 970970 - DNA, 15 bp, Homo sapiens
cctcttgccagtgtt

SEQ ID NO: 970971 - DNA, 15 bp, Homo sapiens
tcctcttgccagtgt

SEQ ID NO: 970972 - DNA, 15 bp, Homo sapiens
atcctcttgccagtg

SEQ ID NO: 970973 - DNA, 15 bp, Homo sapiens
catcctcttgccagt

SEQ ID NO: 970974 - DNA, 15 bp, Homo sapiens
tcatcctcttgccag

SEQ ID NO: 970975 - DNA, 15 bp, Homo sapiens
atcatcctcttgcca

SEQ ID NO: 970976 - DNA, 15 bp, Homo sapiens
catcatcctcttgcc

SEQ ID NO: 970977 - DNA, 15 bp, Homo sapiens
tcatcatcctcttgc

SEQ ID NO: 970978 - DNA, 15 bp, Homo sapiens
gtcatcatcctcttg

SEQ ID NO: 970979 - DNA, 15 bp, Homo sapiens
agtcatcatcctctt

SEQ ID NO: 970980 - DNA, 15 bp, Homo sapiens
gagtcatcatcctct

SEQ ID NO: 970981 - DNA, 15 bp, Homo sapiens
tgagtcatcatcctc

SEQ ID NO: 970982 - DNA, 15 bp, Homo sapiens
atgagtcatcatcct

SEQ ID NO: 970983 - DNA, 15 bp, Homo sapiens
catgagtcatcatcc

SEQ ID NO: 970984 - DNA, 15 bp, Homo sapiens
acatgagtcatcatc

SEQ ID NO: 970985 - DNA, 15 bp, Homo sapiens
aacatgagtcatcat

SEQ ID NO: 970986 - DNA, 15 bp, Homo sapiens
taacatgagtcatca

SEQ ID NO: 970987 - DNA, 15 bp, Homo sapiens
ataacatgagtcatc

SEQ ID NO: 970988 - DNA, 15 bp, Homo sapiens
aataacatgagtcat

SEQ ID NO: 970989 - DNA, 15 bp, Homo sapiens
aaataacatgagtca

SEQ ID NO: 970990 - DNA, 15 bp, Homo sapiens
gaaataacatgagtc

SEQ ID NO: 970991 - DNA, 15 bp, Homo sapiens
tgaaataacatgagt

SEQ ID NO: 970992 - DNA, 15 bp, Homo sapiens
gtgaaataacatgag

SEQ ID NO: 970993 - DNA, 15 bp, Homo sapiens
agtgaaataacatga

SEQ ID NO: 970994 - DNA, 15 bp, Homo sapiens
aagtgaaataacatg

SEQ ID NO: 970995 - DNA, 15 bp, Homo sapiens
taagtgaaataacat

SEQ ID NO: 970996 - DNA, 15 bp, Homo sapiens
ttaagtgaaataaca

SEQ ID NO: 970997 - DNA, 15 bp, Homo sapiens
gttaagtgaaataac

SEQ ID NO: 970998 - DNA, 15 bp, Homo sapiens
ggttaagtgaaataa

SEQ ID NO: 970999 - DNA, 15 bp, Homo sapiens
aggttaagtgaaata

SEQ ID NO: 971000 - DNA, 15 bp, Homo sapiens
aaggttaagtgaaat

SEQ ID NO: 971001 - DNA, 15 bp, Homo sapiens
aaaggttaagtgaaa

SEQ ID NO: 971002 - DNA, 15 bp, Homo sapiens
aaaaggttaagtgaa

SEQ ID NO: 971003 - DNA, 15 bp, Homo sapiens
aaaaaggttaagtga

SEQ ID NO: 971004 - DNA, 15 bp, Homo sapiens
taaaaaggttaagtg

SEQ ID NO: 971005 - DNA, 15 bp, Homo sapiens
ataaaaaggttaagt

SEQ ID NO: 971006 - DNA, 15 bp, Homo sapiens
gataaaaaggttaag

SEQ ID NO: 971007 - DNA, 15 bp, Homo sapiens
agataaaaaggttaa

SEQ ID NO: 971008 - DNA, 15 bp, Homo sapiens
aagataaaaaggtta

SEQ ID NO: 971009 - DNA, 15 bp, Homo sapiens
aaagataaaaaggtt

SEQ ID NO: 971010 - DNA, 15 bp, Homo sapiens
aaaagataaaaaggt

SEQ ID NO: 971011 - DNA, 15 bp, Homo sapiens
taaaagataaaaagg

SEQ ID NO: 971012 - DNA, 15 bp, Homo sapiens
ttaaaagataaaaag

SEQ ID NO: 971013 - DNA, 15 bp, Homo sapiens
gttaaaagataaaaa

SEQ ID NO: 971014 - DNA, 15 bp, Homo sapiens
tgttaaaagataaaa

SEQ ID NO: 971015 - DNA, 15 bp, Homo sapiens
atgttaaaagataaa

SEQ ID NO: 971016 - DNA, 15 bp, Homo sapiens
catgttaaaagataa

SEQ ID NO: 971017 - DNA, 15 bp, Homo sapiens
tcatgttaaaagata

SEQ ID NO: 971018 - DNA, 15 bp, Homo sapiens
ttcatgttaaaagat

SEQ ID NO: 971019 - DNA, 15 bp, Homo sapiens
cttcatgttaaaaga

SEQ ID NO: 971020 - DNA, 15 bp, Homo sapiens
ccttcatgttaaaag

SEQ ID NO: 971021 - DNA, 15 bp, Homo sapiens
tccttcatgttaaaa

SEQ ID NO: 971022 - DNA, 15 bp, Homo sapiens
gtccttcatgttaaa

SEQ ID NO: 971023 - DNA, 15 bp, Homo sapiens
agtccttcatgttaa

SEQ ID NO: 971024 - DNA, 15 bp, Homo sapiens
gagtccttcatgtta

SEQ ID NO: 971025 - DNA, 15 bp, Homo sapiens
tgagtccttcatgtt

SEQ ID NO: 971026 - DNA, 15 bp, Homo sapiens
atgagtccttcatgt

SEQ ID NO: 971027 - DNA, 15 bp, Homo sapiens
tatgagtccttcatg

SEQ ID NO: 971028 - DNA, 15 bp, Homo sapiens
gtatgagtccttcat

SEQ ID NO: 971029 - DNA, 15 bp, Homo sapiens
tgtatgagtccttca

SEQ ID NO: 971030 - DNA, 15 bp, Homo sapiens
ctgtatgagtccttc

SEQ ID NO: 971031 - DNA, 15 bp, Homo sapiens
cctgtatgagtcctt

SEQ ID NO: 971032 - DNA, 15 bp, Homo sapiens
acctgtatgagtcct

SEQ ID NO: 971033 - DNA, 15 bp, Homo sapiens
aacctgtatgagtcc

SEQ ID NO: 971034 - DNA, 15 bp, Homo sapiens
caacctgtatgagtc

SEQ ID NO: 971035 - DNA, 15 bp, Homo sapiens
tcaacctgtatgagt

SEQ ID NO: 971036 - DNA, 15 bp, Homo sapiens
atcaacctgtatgag

SEQ ID NO: 971037 - DNA, 15 bp, Homo sapiens
tatcaacctgtatga

SEQ ID NO: 971038 - DNA, 15 bp, Homo sapiens
ttatcaacctgtatg

SEQ ID NO: 971039 - DNA, 15 bp, Homo sapiens
cttatcaacctgtat

SEQ ID NO: 971040 - DNA, 15 bp, Homo sapiens
tcttatcaacctgta

SEQ ID NO: 971041 - DNA, 15 bp, Homo sapiens
ttcttatcaacctgt

SEQ ID NO: 971042 - DNA, 15 bp, Homo sapiens
tttcttatcaacctg

SEQ ID NO: 971043 - DNA, 15 bp, Homo sapiens
gtttcttatcaacct

SEQ ID NO: 971044 - DNA, 15 bp, Homo sapiens
ggtttcttatcaacc

SEQ ID NO: 971045 - DNA, 15 bp, Homo sapiens
tggtttcttatcaac

SEQ ID NO: 971046 - DNA, 15 bp, Homo sapiens
ctggtttcttatcaa

SEQ ID NO: 971047 - DNA, 15 bp, Homo sapiens
actggtttcttatca

SEQ ID NO: 971048 - DNA, 15 bp, Homo sapiens
cactggtttcttatc

SEQ ID NO: 971049 - DNA, 15 bp, Homo sapiens
tcactggtttcttat

SEQ ID NO: 971050 - DNA, 15 bp, Homo sapiens
gtcactggtttctta

SEQ ID NO: 971051 - DNA, 15 bp, Homo sapiens
tgtcactggtttctt

SEQ ID NO: 971052 - DNA, 15 bp, Homo sapiens
atgtcactggtttct

SEQ ID NO: 971053 - DNA, 15 bp, Homo sapiens
tatgtcactggtttc

SEQ ID NO: 971054 - DNA, 15 bp, Homo sapiens
ttatgtcactggttt

SEQ ID NO: 971055 - DNA, 15 bp, Homo sapiens
tttatgtcactggtt

SEQ ID NO: 971056 - DNA, 15 bp, Homo sapiens
gtttatgtcactggt

SEQ ID NO: 971057 - DNA, 15 bp, Homo sapiens
tgtttatgtcactgg

SEQ ID NO: 971058 - DNA, 15 bp, Homo sapiens
ctgtttatgtcactg

SEQ ID NO: 971059 - DNA, 15 bp, Homo sapiens
tctgtttatgtcact

SEQ ID NO: 971060 - DNA, 15 bp, Homo sapiens
gtctgtttatgtcac

SEQ ID NO: 971061 - DNA, 15 bp, Homo sapiens
ggtctgtttatgtca

SEQ ID NO: 971062 - DNA, 15 bp, Homo sapiens
tggtctgtttatgtc

SEQ ID NO: 971063 - DNA, 15 bp, Homo sapiens
ttggtctgtttatgt

SEQ ID NO: 971064 - DNA, 15 bp, Homo sapiens
tttggtctgtttatg

SEQ ID NO: 971065 - DNA, 15 bp, Homo sapiens
ttttggtctgtttat

SEQ ID NO: 971066 - DNA, 15 bp, Homo sapiens
tttttggtctgttta

SEQ ID NO: 971067 - DNA, 15 bp, Homo sapiens
ttttttggtctgttt

SEQ ID NO: 971068 - DNA, 15 bp, Homo sapiens
attttttggtctgtt

SEQ ID NO: 971069 - DNA, 15 bp, Homo sapiens
cattttttggtctgt

SEQ ID NO: 971070 - DNA, 15 bp, Homo sapiens
tcattttttggtctg

SEQ ID NO: 971071 - DNA, 15 bp, Homo sapiens
atcattttttggtct

SEQ ID NO: 971072 - DNA, 15 bp, Homo sapiens
gatcattttttggtc

SEQ ID NO: 971073 - DNA, 15 bp, Homo sapiens
tgatcattttttggt

SEQ ID NO: 971074 - DNA, 15 bp, Homo sapiens
ctgatcattttttgg

SEQ ID NO: 971075 - DNA, 15 bp, Homo sapiens
tctgatcattttttg

SEQ ID NO: 971076 - DNA, 15 bp, Homo sapiens
atctgatcatttttt

SEQ ID NO: 971077 - DNA, 15 bp, Homo sapiens
gatctgatcattttt

SEQ ID NO: 971078 - DNA, 15 bp, Homo sapiens
agatctgatcatttt

SEQ ID NO: 971079 - DNA, 15 bp, Homo sapiens
aagatctgatcattt

SEQ ID NO: 971080 - DNA, 15 bp, Homo sapiens
aaagatctgatcatt

SEQ ID NO: 971081 - DNA, 15 bp, Homo sapiens
gaaagatctgatcat

SEQ ID NO: 971082 - DNA, 15 bp, Homo sapiens
tgaaagatctgatca

SEQ ID NO: 971083 - DNA, 15 bp, Homo sapiens
ttgaaagatctgatc

SEQ ID NO: 971084 - DNA, 15 bp, Homo sapiens
tttgaaagatctgat

SEQ ID NO: 971085 - DNA, 15 bp, Homo sapiens
atttgaaagatctga

SEQ ID NO: 971086 - DNA, 15 bp, Homo sapiens
aatttgaaagatctg

SEQ ID NO: 971087 - DNA, 15 bp, Homo sapiens
taatttgaaagatct

SEQ ID NO: 971088 - DNA, 15 bp, Homo sapiens
ctaatttgaaagatc

SEQ ID NO: 971089 - DNA, 15 bp, Homo sapiens
gctaatttgaaagat

SEQ ID NO: 971090 - DNA, 15 bp, Homo sapiens
tgctaatttgaaaga

SEQ ID NO: 971091 - DNA, 15 bp, Homo sapiens
ttgctaatttgaaag

SEQ ID NO: 971092 - DNA, 15 bp, Homo sapiens
tttgctaatttgaaa

SEQ ID NO: 971093 - DNA, 15 bp, Homo sapiens
ttttgctaatttgaa

SEQ ID NO: 971094 - DNA, 15 bp, Homo sapiens
tttttgctaatttga

SEQ ID NO: 971095 - DNA, 15 bp, Homo sapiens
ttttttgctaatttg

SEQ ID NO: 971096 - DNA, 15 bp, Homo sapiens
tttttttgctaattt

SEQ ID NO: 971097 - DNA, 15 bp, Homo sapiens
atttttttgctaatt

SEQ ID NO: 971098 - DNA, 15 bp, Homo sapiens
tatttttttgctaat

SEQ ID NO: 971099 - DNA, 15 bp, Homo sapiens
ttatttttttgctaa

SEQ ID NO: 971100 - DNA, 15 bp, Homo sapiens
attatttttttgcta

SEQ ID NO: 971101 - DNA, 15 bp, Homo sapiens
tattatttttttgct

SEQ ID NO: 971102 - DNA, 15 bp, Homo sapiens
atattatttttttgc

SEQ ID NO: 971103 - DNA, 15 bp, Homo sapiens
aatattatttttttg

SEQ ID NO: 971104 - DNA, 15 bp, Homo sapiens
aaatattattttttt

SEQ ID NO: 971105 - DNA, 15 bp, Homo sapiens
aaaatattatttttt

SEQ ID NO: 971106 - DNA, 15 bp, Homo sapiens
aaaaatattattttt

SEQ ID NO: 971107 - DNA, 15 bp, Homo sapiens
aaaaaatattatttt

SEQ ID NO: 971108 - DNA, 15 bp, Homo sapiens
taaaaaatattattt

SEQ ID NO: 971109 - DNA, 15 bp, Homo sapiens
ttaaaaaatattatt

SEQ ID NO: 971110 - DNA, 15 bp, Homo sapiens
tttaaaaaatattat

SEQ ID NO: 971111 - DNA, 15 bp, Homo sapiens
gtttaaaaaatatta

SEQ ID NO: 971112 - DNA, 15 bp, Homo sapiens
tgtttaaaaaatatt

SEQ ID NO: 971113 - DNA, 15 bp, Homo sapiens
ttgtttaaaaaatat

SEQ ID NO: 971114 - DNA, 15 bp, Homo sapiens
attgtttaaaaaata

SEQ ID NO: 971115 - DNA, 15 bp, Homo sapiens
cattgtttaaaaaat

SEQ ID NO: 971116 - DNA, 15 bp, Homo sapiens
ccattgtttaaaaaa

SEQ ID NO: 971117 - DNA, 15 bp, Homo sapiens
cccattgtttaaaaa

SEQ ID NO: 971118 - DNA, 15 bp, Homo sapiens
acccattgtttaaaa

SEQ ID NO: 971119 - DNA, 15 bp, Homo sapiens
cacccattgtttaaa

SEQ ID NO: 971120 - DNA, 15 bp, Homo sapiens
tcacccattgtttaa

SEQ ID NO: 971121 - DNA, 15 bp, Homo sapiens
ttcacccattgttta

SEQ ID NO: 971122 - DNA, 15 bp, Homo sapiens
tttcacccattgttt

SEQ ID NO: 971123 - DNA, 15 bp, Homo sapiens
ttttcacccattgtt

SEQ ID NO: 971124 - DNA, 15 bp, Homo sapiens
attttcacccattgt

SEQ ID NO: 971125 - DNA, 15 bp, Homo sapiens
tattttcacccattg

SEQ ID NO: 971126 - DNA, 15 bp, Homo sapiens
gtattttcacccatt

SEQ ID NO: 971127 - DNA, 15 bp, Homo sapiens
tgtattttcacccat

SEQ ID NO: 971128 - DNA, 15 bp, Homo sapiens
ctgtattttcaccca

SEQ ID NO: 971129 - DNA, 15 bp, Homo sapiens
actgtattttcaccc

SEQ ID NO: 971130 - DNA, 15 bp, Homo sapiens
cactgtattttcacc

SEQ ID NO: 971131 - DNA, 15 bp, Homo sapiens
acactgtattttcac

SEQ ID NO: 971132 - DNA, 15 bp, Homo sapiens
tacactgtattttca

SEQ ID NO: 971133 - DNA, 15 bp, Homo sapiens
ttacactgtattttc

SEQ ID NO: 971134 - DNA, 15 bp, Homo sapiens
gttacactgtatttt

SEQ ID NO: 971135 - DNA, 15 bp, Homo sapiens
tgttacactgtattt

SEQ ID NO: 971136 - DNA, 15 bp, Homo sapiens
ctgttacactgtatt

SEQ ID NO: 971137 - DNA, 15 bp, Homo sapiens
actgttacactgtat

SEQ ID NO: 971138 - DNA, 15 bp, Homo sapiens
tactgttacactgta

SEQ ID NO: 971139 - DNA, 15 bp, Homo sapiens
gtactgttacactgt

SEQ ID NO: 971140 - DNA, 15 bp, Homo sapiens
ggtactgttacactg

SEQ ID NO: 971141 - DNA, 15 bp, Homo sapiens
tggtactgttacact

SEQ ID NO: 971142 - DNA, 15 bp, Homo sapiens
ttggtactgttacac

SEQ ID NO: 971143 - DNA, 15 bp, Homo sapiens
attggtactgttaca

SEQ ID NO: 971144 - DNA, 15 bp, Homo sapiens
aattggtactgttac

SEQ ID NO: 971145 - DNA, 15 bp, Homo sapiens
taattggtactgtta

SEQ ID NO: 971146 - DNA, 15 bp, Homo sapiens
ataattggtactgtt

SEQ ID NO: 971147 - DNA, 15 bp, Homo sapiens
gataattggtactgt

SEQ ID NO: 971148 - DNA, 15 bp, Homo sapiens
tgataattggtactg

SEQ ID NO: 971149 - DNA, 15 bp, Homo sapiens
ttgataattggtact

SEQ ID NO: 971150 - DNA, 15 bp, Homo sapiens
gttgataattggtac

SEQ ID NO: 971151 - DNA, 15 bp, Homo sapiens
tgttgataattggta

SEQ ID NO: 971152 - DNA, 15 bp, Homo sapiens
atgttgataattggt

SEQ ID NO: 971153 - DNA, 15 bp, Homo sapiens
catgttgataattgg

SEQ ID NO: 971154 - DNA, 15 bp, Homo sapiens
acatgttgataattg

SEQ ID NO: 971155 - DNA, 15 bp, Homo sapiens
cacatgttgataatt

SEQ ID NO: 971156 - DNA, 15 bp, Homo sapiens
acacatgttgataat

SEQ ID NO: 971157 - DNA, 15 bp, Homo sapiens
aacacatgttgataa

SEQ ID NO: 971158 - DNA, 15 bp, Homo sapiens
caacacatgttgata

SEQ ID NO: 971159 - DNA, 15 bp, Homo sapiens
tcaacacatgttgat

SEQ ID NO: 971160 - DNA, 15 bp, Homo sapiens
ctcaacacatgttga

SEQ ID NO: 971161 - DNA, 15 bp, Homo sapiens
tctcaacacatgttg

SEQ ID NO: 971162 - DNA, 15 bp, Homo sapiens
ttctcaacacatgtt

SEQ ID NO: 971163 - DNA, 15 bp, Homo sapiens
gttctcaacacatgt

SEQ ID NO: 971164 - DNA, 15 bp, Homo sapiens
ggttctcaacacatg

SEQ ID NO: 971165 - DNA, 15 bp, Homo sapiens
tggttctcaacacat

SEQ ID NO: 971166 - DNA, 15 bp, Homo sapiens
ctggttctcaacaca

SEQ ID NO: 971167 - DNA, 15 bp, Homo sapiens
tctggttctcaacac

SEQ ID NO: 971168 - DNA, 15 bp, Homo sapiens
ttctggttctcaaca

SEQ ID NO: 971169 - DNA, 15 bp, Homo sapiens
tttctggttctcaac

SEQ ID NO: 971170 - DNA, 15 bp, Homo sapiens
ttttctggttctcaa

SEQ ID NO: 971171 - DNA, 15 bp, Homo sapiens
tttttctggttctca

SEQ ID NO: 971172 - DNA, 15 bp, Homo sapiens
atttttctggttctc

SEQ ID NO: 971173 - DNA, 15 bp, Homo sapiens
catttttctggttct

SEQ ID NO: 971174 - DNA, 15 bp, Homo sapiens
acatttttctggttc

SEQ ID NO: 971175 - DNA, 15 bp, Homo sapiens
aacatttttctggtt

SEQ ID NO: 971176 - DNA, 15 bp, Homo sapiens
gaacatttttctggt

SEQ ID NO: 971177 - DNA, 15 bp, Homo sapiens
agaacatttttctgg

SEQ ID NO: 971178 - DNA, 15 bp, Homo sapiens
aagaacatttttctg

SEQ ID NO: 971179 - DNA, 15 bp, Homo sapiens
aaagaacatttttct

SEQ ID NO: 971180 - DNA, 15 bp, Homo sapiens
aaaagaacatttttc

SEQ ID NO: 971181 - DNA, 15 bp, Homo sapiens
aaaaagaacattttt

SEQ ID NO: 971182 - DNA, 15 bp, Homo sapiens
gaaaaagaacatttt

SEQ ID NO: 971183 - DNA, 15 bp, Homo sapiens
agaaaaagaacattt

SEQ ID NO: 971184 - DNA, 15 bp, Homo sapiens
aagaaaaagaacatt

SEQ ID NO: 971185 - DNA, 15 bp, Homo sapiens
aaagaaaaagaacat

SEQ ID NO: 971186 - DNA, 15 bp, Homo sapiens
caaagaaaaagaaca

SEQ ID NO: 971187 - DNA, 15 bp, Homo sapiens
tcaaagaaaaagaac

SEQ ID NO: 971188 - DNA, 15 bp, Homo sapiens
atcaaagaaaaagaa

SEQ ID NO: 971189 - DNA, 15 bp, Homo sapiens
gatcaaagaaaaaga

SEQ ID NO: 971190 - DNA, 15 bp, Homo sapiens
tgatcaaagaaaaag

SEQ ID NO: 971191 - DNA, 15 bp, Homo sapiens
ctgatcaaagaaaaa

SEQ ID NO: 971192 - DNA, 15 bp, Homo sapiens
gctgatcaaagaaaa

SEQ ID NO: 971193 - DNA, 15 bp, Homo sapiens
tgctgatcaaagaaa

SEQ ID NO: 971194 - DNA, 15 bp, Homo sapiens
ttgctgatcaaagaa

SEQ ID NO: 971195 - DNA, 15 bp, Homo sapiens
gttgctgatcaaaga

SEQ ID NO: 971196 - DNA, 15 bp, Homo sapiens
tgttgctgatcaaag

SEQ ID NO: 971197 - DNA, 15 bp, Homo sapiens
gtgttgctgatcaaa

SEQ ID NO: 971198 - DNA, 15 bp, Homo sapiens
agtgttgctgatcaa

SEQ ID NO: 971199 - DNA, 15 bp, Homo sapiens
tagtgttgctgatca

SEQ ID NO: 971200 - DNA, 15 bp, Homo sapiens
atagtgttgctgatc

SEQ ID NO: 971201 - DNA, 15 bp, Homo sapiens
aatagtgttgctgat

SEQ ID NO: 971202 - DNA, 15 bp, Homo sapiens
aaatagtgttgctga

SEQ ID NO: 971203 - DNA, 15 bp, Homo sapiens
caaatagtgttgctg

SEQ ID NO: 971204 - DNA, 15 bp, Homo sapiens
ccaaatagtgttgct

SEQ ID NO: 971205 - DNA, 15 bp, Homo sapiens
cccaaatagtgttgc

SEQ ID NO: 971206 - DNA, 15 bp, Homo sapiens
tcccaaatagtgttg

SEQ ID NO: 971207 - DNA, 15 bp, Homo sapiens
ttcccaaatagtgtt

SEQ ID NO: 971208 - DNA, 15 bp, Homo sapiens
tttcccaaatagtgt

SEQ ID NO: 971209 - DNA, 15 bp, Homo sapiens
ttttcccaaatagtg

SEQ ID NO: 971210 - DNA, 15 bp, Homo sapiens
attttcccaaatagt

SEQ ID NO: 971211 - DNA, 15 bp, Homo sapiens
gattttcccaaatag

SEQ ID NO: 971212 - DNA, 15 bp, Homo sapiens
agattttcccaaata

SEQ ID NO: 971213 - DNA, 15 bp, Homo sapiens
tagattttcccaaat

SEQ ID NO: 971214 - DNA, 15 bp, Homo sapiens
atagattttcccaaa

SEQ ID NO: 971215 - DNA, 15 bp, Homo sapiens
gatagattttcccaa

SEQ ID NO: 971216 - DNA, 15 bp, Homo sapiens
ggatagattttccca

SEQ ID NO: 971217 - DNA, 15 bp, Homo sapiens
aggatagattttccc

SEQ ID NO: 971218 - DNA, 15 bp, Homo sapiens
gaggatagattttcc

SEQ ID NO: 971219 - DNA, 15 bp, Homo sapiens
tgaggatagattttc

SEQ ID NO: 971220 - DNA, 15 bp, Homo sapiens
ctgaggatagatttt

SEQ ID NO: 971221 - DNA, 15 bp, Homo sapiens
cctgaggatagattt

SEQ ID NO: 971222 - DNA, 15 bp, Homo sapiens
ccctgaggatagatt

SEQ ID NO: 971223 - DNA, 15 bp, Homo sapiens
gccctgaggatagat

SEQ ID NO: 971224 - DNA, 15 bp, Homo sapiens
ggccctgaggataga

SEQ ID NO: 971225 - DNA, 15 bp, Homo sapiens
aggccctgaggatag

SEQ ID NO: 971226 - DNA, 15 bp, Homo sapiens
taggccctgaggata

SEQ ID NO: 971227 - DNA, 15 bp, Homo sapiens
ctaggccctgaggat

SEQ ID NO: 971228 - DNA, 15 bp, Homo sapiens
gctaggccctgagga

SEQ ID NO: 971229 - DNA, 15 bp, Homo sapiens
ggctaggccctgagg

SEQ ID NO: 971230 - DNA, 15 bp, Homo sapiens
aggctaggccctgag

SEQ ID NO: 971231 - DNA, 15 bp, Homo sapiens
caggctaggccctga

SEQ ID NO: 971232 - DNA, 15 bp, Homo sapiens
ccaggctaggccctg

SEQ ID NO: 971233 - DNA, 15 bp, Homo sapiens
cccaggctaggccct

SEQ ID NO: 971234 - DNA, 15 bp, Homo sapiens
ccccaggctaggccc

SEQ ID NO: 971235 - DNA, 15 bp, Homo sapiens
gccccaggctaggcc

SEQ ID NO: 971236 - DNA, 15 bp, Homo sapiens
ggccccaggctaggc

SEQ ID NO: 971237 - DNA, 15 bp, Homo sapiens
gggccccaggctagg

SEQ ID NO: 971238 - DNA, 15 bp, Homo sapiens
agggccccaggctag

SEQ ID NO: 971239 - DNA, 15 bp, Homo sapiens
cagggccccaggcta

SEQ ID NO: 971240 - DNA, 15 bp, Homo sapiens
ccagggccccaggct

SEQ ID NO: 971241 - DNA, 15 bp, Homo sapiens
gccagggccccaggc

SEQ ID NO: 971242 - DNA, 15 bp, Homo sapiens
tgccagggccccagg

SEQ ID NO: 971243 - DNA, 15 bp, Homo sapiens
gtgccagggccccag

SEQ ID NO: 971244 - DNA, 15 bp, Homo sapiens
tgtgccagggcccca

SEQ ID NO: 971245 - DNA, 15 bp, Homo sapiens
gtgtgccagggcccc

SEQ ID NO: 971246 - DNA, 15 bp, Homo sapiens
tgtgtgccagggccc

SEQ ID NO: 971247 - DNA, 15 bp, Homo sapiens
ctgtgtgccagggcc

SEQ ID NO: 971248 - DNA, 15 bp, Homo sapiens
actgtgtgccagggc

SEQ ID NO: 971249 - DNA, 15 bp, Homo sapiens
tactgtgtgccaggg

SEQ ID NO: 971250 - DNA, 15 bp, Homo sapiens
ctactgtgtgccagg

SEQ ID NO: 971251 - DNA, 15 bp, Homo sapiens
cctactgtgtgccag

SEQ ID NO: 971252 - DNA, 15 bp, Homo sapiens
gcctactgtgtgcca

SEQ ID NO: 971253 - DNA, 15 bp, Homo sapiens
tgcctactgtgtgcc

SEQ ID NO: 971254 - DNA, 15 bp, Homo sapiens
gtgcctactgtgtgc

SEQ ID NO: 971255 - DNA, 15 bp, Homo sapiens
agtgcctactgtgtg

SEQ ID NO: 971256 - DNA, 15 bp, Homo sapiens
gagtgcctactgtgt

SEQ ID NO: 971257 - DNA, 15 bp, Homo sapiens
tgagtgcctactgtg

SEQ ID NO: 971258 - DNA, 15 bp, Homo sapiens
ttgagtgcctactgt

SEQ ID NO: 971259 - DNA, 15 bp, Homo sapiens
gttgagtgcctactg

SEQ ID NO: 971260 - DNA, 15 bp, Homo sapiens
cgttgagtgcctact

SEQ ID NO: 971261 - DNA, 15 bp, Homo sapiens
tcgttgagtgcctac

SEQ ID NO: 971262 - DNA, 15 bp, Homo sapiens
ttcgttgagtgccta

SEQ ID NO: 971263 - DNA, 15 bp, Homo sapiens
attcgttgagtgcct

SEQ ID NO: 971264 - DNA, 15 bp, Homo sapiens
tattcgttgagtgcc

SEQ ID NO: 971265 - DNA, 15 bp, Homo sapiens
atattcgttgagtgc

SEQ ID NO: 971266 - DNA, 15 bp, Homo sapiens
aatattcgttgagtg

SEQ ID NO: 971267 - DNA, 15 bp, Homo sapiens
aaatattcgttgagt

SEQ ID NO: 971268 - DNA, 15 bp, Homo sapiens
caaatattcgttgag

SEQ ID NO: 971269 - DNA, 15 bp, Homo sapiens
gcaaatattcgttga

SEQ ID NO: 971270 - DNA, 15 bp, Homo sapiens
agcaaatattcgttg

SEQ ID NO: 971271 - DNA, 15 bp, Homo sapiens
cagcaaatattcgtt

SEQ ID NO: 971272 - DNA, 15 bp, Homo sapiens
tcagcaaatattcgt

SEQ ID NO: 971273 - DNA, 15 bp, Homo sapiens
ttcagcaaatattcg

SEQ ID NO: 971274 - DNA, 15 bp, Homo sapiens
gttcagcaaatattc

SEQ ID NO: 971275 - DNA, 15 bp, Homo sapiens
tgttcagcaaatatt

SEQ ID NO: 971276 - DNA, 15 bp, Homo sapiens
gtgttcagcaaatat

SEQ ID NO: 971277 - DNA, 15 bp, Homo sapiens
tgtgttcagcaaata

SEQ ID NO: 971278 - DNA, 15 bp, Homo sapiens
gtgtgttcagcaaat

SEQ ID NO: 971279 - DNA, 15 bp, Homo sapiens
tgtgtgttcagcaaa

SEQ ID NO: 971280 - DNA, 15 bp, Homo sapiens
ttgtgtgttcagcaa

SEQ ID NO: 971281 - DNA, 15 bp, Homo sapiens
tttgtgtgttcagca

SEQ ID NO: 971282 - DNA, 15 bp, Homo sapiens
atttgtgtgttcagc

SEQ ID NO: 971283 - DNA, 15 bp, Homo sapiens
tatttgtgtgttcag

SEQ ID NO: 971284 - DNA, 15 bp, Homo sapiens
gtatttgtgtgttca

SEQ ID NO: 971285 - DNA, 15 bp, Homo sapiens
agtatttgtgtgttc

SEQ ID NO: 971286 - DNA, 15 bp, Homo sapiens
aagtatttgtgtgtt

SEQ ID NO: 971287 - DNA, 15 bp, Homo sapiens
taagtatttgtgtgt

SEQ ID NO: 971288 - DNA, 15 bp, Homo sapiens
ataagtatttgtgtg

SEQ ID NO: 971289 - DNA, 15 bp, Homo sapiens
cataagtatttgtgt

SEQ ID NO: 971290 - DNA, 15 bp, Homo sapiens
tcataagtatttgtg

SEQ ID NO: 971291 - DNA, 15 bp, Homo sapiens
atcataagtatttgt

SEQ ID NO: 971292 - DNA, 15 bp, Homo sapiens
tatcataagtatttg

SEQ ID NO: 971293 - DNA, 15 bp, Homo sapiens
atatcataagtattt

SEQ ID NO: 971294 - DNA, 15 bp, Homo sapiens
aatatcataagtatt

SEQ ID NO: 971295 - DNA, 15 bp, Homo sapiens
aaatatcataagtat

SEQ ID NO: 971296 - DNA, 15 bp, Homo sapiens
aaaatatcataagta

SEQ ID NO: 971297 - DNA, 15 bp, Homo sapiens
taaaatatcataagt

SEQ ID NO: 971298 - DNA, 15 bp, Homo sapiens
ttaaaatatcataag

SEQ ID NO: 971299 - DNA, 15 bp, Homo sapiens
tttaaaatatcataa

SEQ ID NO: 971300 - DNA, 15 bp, Homo sapiens
ttttaaaatatcata

SEQ ID NO: 971301 - DNA, 15 bp, Homo sapiens
tttttaaaatatcat

SEQ ID NO: 971302 - DNA, 15 bp, Homo sapiens
ttttttaaaatatca

SEQ ID NO: 971303 - DNA, 15 bp, Homo sapiens
attttttaaaatatc

SEQ ID NO: 971304 - DNA, 15 bp, Homo sapiens
aattttttaaaatat

SEQ ID NO: 971305 - DNA, 15 bp, Homo sapiens
caattttttaaaata

SEQ ID NO: 971306 - DNA, 15 bp, Homo sapiens
ccaattttttaaaat

SEQ ID NO: 971307 - DNA, 15 bp, Homo sapiens
gccaattttttaaaa

SEQ ID NO: 971308 - DNA, 15 bp, Homo sapiens
tgccaattttttaaa

SEQ ID NO: 971309 - DNA, 15 bp, Homo sapiens
ttgccaattttttaa

SEQ ID NO: 971310 - DNA, 15 bp, Homo sapiens
gttgccaatttttta

SEQ ID NO: 971311 - DNA, 15 bp, Homo sapiens
tgttgccaatttttt

SEQ ID NO: 971312 - DNA, 15 bp, Homo sapiens
ttgttgccaattttt

SEQ ID NO: 971313 - DNA, 15 bp, Homo sapiens
attgttgccaatttt

SEQ ID NO: 971314 - DNA, 15 bp, Homo sapiens
gattgttgccaattt

SEQ ID NO: 971315 - DNA, 15 bp, Homo sapiens
agattgttgccaatt

SEQ ID NO: 971316 - DNA, 15 bp, Homo sapiens
cagattgttgccaat

SEQ ID NO: 971317 - DNA, 15 bp, Homo sapiens
tcagattgttgccaa

SEQ ID NO: 971318 - DNA, 15 bp, Homo sapiens
atcagattgttgcca

SEQ ID NO: 971319 - DNA, 15 bp, Homo sapiens
tatcagattgttgcc

SEQ ID NO: 971320 - DNA, 15 bp, Homo sapiens
gtatcagattgttgc

SEQ ID NO: 971321 - DNA, 15 bp, Homo sapiens
ggtatcagattgttg

SEQ ID NO: 971322 - DNA, 15 bp, Homo sapiens
aggtatcagattgtt

SEQ ID NO: 971323 - DNA, 15 bp, Homo sapiens
taggtatcagattgt

SEQ ID NO: 971324 - DNA, 15 bp, Homo sapiens
ttaggtatcagattg

SEQ ID NO: 971325 - DNA, 15 bp, Homo sapiens
gttaggtatcagatt

SEQ ID NO: 971326 - DNA, 15 bp, Homo sapiens
tgttaggtatcagat

SEQ ID NO: 971327 - DNA, 15 bp, Homo sapiens
ttgttaggtatcaga

SEQ ID NO: 971328 - DNA, 15 bp, Homo sapiens
attgttaggtatcag

SEQ ID NO: 971329 - DNA, 15 bp, Homo sapiens
tattgttaggtatca

SEQ ID NO: 971330 - DNA, 15 bp, Homo sapiens
ctattgttaggtatc

SEQ ID NO: 971331 - DNA, 15 bp, Homo sapiens
tctattgttaggtat

SEQ ID NO: 971332 - DNA, 15 bp, Homo sapiens
ctctattgttaggta

SEQ ID NO: 971333 - DNA, 15 bp, Homo sapiens
cctctattgttaggt

SEQ ID NO: 971334 - DNA, 15 bp, Homo sapiens
ccctctattgttagg

SEQ ID NO: 971335 - DNA, 15 bp, Homo sapiens
tccctctattgttag

SEQ ID NO: 971336 - DNA, 15 bp, Homo sapiens
atccctctattgtta

SEQ ID NO: 971337 - DNA, 15 bp, Homo sapiens
aatccctctattgtt

SEQ ID NO: 971338 - DNA, 15 bp, Homo sapiens
taatccctctattgt

SEQ ID NO: 971339 - DNA, 15 bp, Homo sapiens
ttaatccctctattg

SEQ ID NO: 971340 - DNA, 15 bp, Homo sapiens
tttaatccctctatt

SEQ ID NO: 971341 - DNA, 15 bp, Homo sapiens
atttaatccctctat

SEQ ID NO: 971342 - DNA, 15 bp, Homo sapiens
tatttaatccctcta

SEQ ID NO: 971343 - DNA, 15 bp, Homo sapiens
atatttaatccctct

SEQ ID NO: 971344 - DNA, 15 bp, Homo sapiens
aatatttaatccctc

SEQ ID NO: 971345 - DNA, 15 bp, Homo sapiens
taatatttaatccct

SEQ ID NO: 971346 - DNA, 15 bp, Homo sapiens
ataatatttaatccc

SEQ ID NO: 971347 - DNA, 15 bp, Homo sapiens
cataatatttaatcc

SEQ ID NO: 971348 - DNA, 15 bp, Homo sapiens
ccataatatttaatc

SEQ ID NO: 971349 - DNA, 15 bp, Homo sapiens
tccataatatttaat

SEQ ID NO: 971350 - DNA, 15 bp, Homo sapiens
ttccataatatttaa

SEQ ID NO: 971351 - DNA, 15 bp, Homo sapiens
gttccataatattta

SEQ ID NO: 971352 - DNA, 15 bp, Homo sapiens
agttccataatattt

SEQ ID NO: 971353 - DNA, 15 bp, Homo sapiens
cagttccataatatt

SEQ ID NO: 971354 - DNA, 15 bp, Homo sapiens
acagttccataatat

SEQ ID NO: 971355 - DNA, 15 bp, Homo sapiens
aacagttccataata

SEQ ID NO: 971356 - DNA, 15 bp, Homo sapiens
taacagttccataat

SEQ ID NO: 971357 - DNA, 15 bp, Homo sapiens
ttaacagttccataa

SEQ ID NO: 971358 - DNA, 15 bp, Homo sapiens
tttaacagttccata

SEQ ID NO: 971359 - DNA, 15 bp, Homo sapiens
atttaacagttccat

SEQ ID NO: 971360 - DNA, 15 bp, Homo sapiens
tatttaacagttcca

SEQ ID NO: 971361 - DNA, 15 bp, Homo sapiens
ttatttaacagttcc

SEQ ID NO: 971362 - DNA, 15 bp, Homo sapiens
cttatttaacagttc

SEQ ID NO: 971363 - DNA, 15 bp, Homo sapiens
tcttatttaacagtt

SEQ ID NO: 971364 - DNA, 15 bp, Homo sapiens
atcttatttaacagt

SEQ ID NO: 971365 - DNA, 15 bp, Homo sapiens
catcttatttaacag

SEQ ID NO: 971366 - DNA, 15 bp, Homo sapiens
gcatcttatttaaca

SEQ ID NO: 971367 - DNA, 15 bp, Homo sapiens
agcatcttatttaac

SEQ ID NO: 971368 - DNA, 15 bp, Homo sapiens
aagcatcttatttaa

SEQ ID NO: 971369 - DNA, 15 bp, Homo sapiens
taagcatcttattta

SEQ ID NO: 971370 - DNA, 15 bp, Homo sapiens
ataagcatcttattt

SEQ ID NO: 971371 - DNA, 15 bp, Homo sapiens
cataagcatcttatt

SEQ ID NO: 971372 - DNA, 15 bp, Homo sapiens
tcataagcatcttat

SEQ ID NO: 971373 - DNA, 15 bp, Homo sapiens
ttcataagcatctta

SEQ ID NO: 971374 - DNA, 15 bp, Homo sapiens
attcataagcatctt

SEQ ID NO: 971375 - DNA, 15 bp, Homo sapiens
tattcataagcatct

SEQ ID NO: 971376 - DNA, 15 bp, Homo sapiens
gtattcataagcatc

SEQ ID NO: 971377 - DNA, 15 bp, Homo sapiens
ggtattcataagcat

SEQ ID NO: 971378 - DNA, 15 bp, Homo sapiens
tggtattcataagca

SEQ ID NO: 971379 - DNA, 15 bp, Homo sapiens
atggtattcataagc

SEQ ID NO: 971380 - DNA, 15 bp, Homo sapiens
catggtattcataag

SEQ ID NO: 971381 - DNA, 15 bp, Homo sapiens
gcatggtattcataa

SEQ ID NO: 971382 - DNA, 15 bp, Homo sapiens
tgcatggtattcata

SEQ ID NO: 971383 - DNA, 15 bp, Homo sapiens
ctgcatggtattcat

SEQ ID NO: 971384 - DNA, 15 bp, Homo sapiens
actgcatggtattca

SEQ ID NO: 971385 - DNA, 15 bp, Homo sapiens
tactgcatggtattc

SEQ ID NO: 971386 - DNA, 15 bp, Homo sapiens
ttactgcatggtatt

SEQ ID NO: 971387 - DNA, 15 bp, Homo sapiens
cttactgcatggtat

SEQ ID NO: 971388 - DNA, 15 bp, Homo sapiens
tcttactgcatggta

SEQ ID NO: 971389 - DNA, 15 bp, Homo sapiens
atcttactgcatggt

SEQ ID NO: 971390 - DNA, 15 bp, Homo sapiens
catcttactgcatgg

SEQ ID NO: 971391 - DNA, 15 bp, Homo sapiens
ccatcttactgcatg

SEQ ID NO: 971392 - DNA, 15 bp, Homo sapiens
cccatcttactgcat

SEQ ID NO: 971393 - DNA, 15 bp, Homo sapiens
gcccatcttactgca

SEQ ID NO: 971394 - DNA, 15 bp, Homo sapiens
tgcccatcttactgc

SEQ ID NO: 971395 - DNA, 15 bp, Homo sapiens
ttgcccatcttactg

SEQ ID NO: 971396 - DNA, 15 bp, Homo sapiens
attgcccatcttact

SEQ ID NO: 971397 - DNA, 15 bp, Homo sapiens
tattgcccatcttac

SEQ ID NO: 971398 - DNA, 15 bp, Homo sapiens
atattgcccatctta

SEQ ID NO: 971399 - DNA, 15 bp, Homo sapiens
aatattgcccatctt

SEQ ID NO: 971400 - DNA, 15 bp, Homo sapiens
aaatattgcccatct

SEQ ID NO: 971401 - DNA, 15 bp, Homo sapiens
taaatattgcccatc

SEQ ID NO: 971402 - DNA, 15 bp, Homo sapiens
ataaatattgcccat

SEQ ID NO: 971403 - DNA, 15 bp, Homo sapiens
cataaatattgccca

SEQ ID NO: 971404 - DNA, 15 bp, Homo sapiens
gcataaatattgccc

SEQ ID NO: 971405 - DNA, 15 bp, Homo sapiens
ggcataaatattgcc

SEQ ID NO: 971406 - DNA, 15 bp, Homo sapiens
tggcataaatattgc

SEQ ID NO: 971407 - DNA, 15 bp, Homo sapiens
atggcataaatattg

SEQ ID NO: 971408 - DNA, 15 bp, Homo sapiens
tatggcataaatatt

SEQ ID NO: 971409 - DNA, 15 bp, Homo sapiens
ttatggcataaatat

SEQ ID NO: 971410 - DNA, 15 bp, Homo sapiens
cttatggcataaata

SEQ ID NO: 971411 - DNA, 15 bp, Homo sapiens
gcttatggcataaat

SEQ ID NO: 971412 - DNA, 15 bp, Homo sapiens
agcttatggcataaa

SEQ ID NO: 971413 - DNA, 15 bp, Homo sapiens
aagcttatggcataa

SEQ ID NO: 971414 - DNA, 15 bp, Homo sapiens
aaagcttatggcata

SEQ ID NO: 971415 - DNA, 15 bp, Homo sapiens
taaagcttatggcat

SEQ ID NO: 971416 - DNA, 15 bp, Homo sapiens
ttaaagcttatggca

SEQ ID NO: 971417 - DNA, 15 bp, Homo sapiens
attaaagcttatggc

SEQ ID NO: 971418 - DNA, 15 bp, Homo sapiens
cattaaagcttatgg

SEQ ID NO: 971419 - DNA, 15 bp, Homo sapiens
tcattaaagcttatg

SEQ ID NO: 971420 - DNA, 15 bp, Homo sapiens
ttcattaaagcttat

SEQ ID NO: 971421 - DNA, 15 bp, Homo sapiens
tttcattaaagctta

SEQ ID NO: 971422 - DNA, 15 bp, Homo sapiens
gtttcattaaagctt

SEQ ID NO: 971423 - DNA, 15 bp, Homo sapiens
tgtttcattaaagct

SEQ ID NO: 971424 - DNA, 15 bp, Homo sapiens
ttgtttcattaaagc

SEQ ID NO: 971425 - DNA, 15 bp, Homo sapiens
tttgtttcattaaag

SEQ ID NO: 971426 - DNA, 15 bp, Homo sapiens
atttgtttcattaaa

SEQ ID NO: 971427 - DNA, 15 bp, Homo sapiens
catttgtttcattaa

SEQ ID NO: 971428 - DNA, 15 bp, Homo sapiens
ccatttgtttcatta

SEQ ID NO: 971429 - DNA, 15 bp, Homo sapiens
cccatttgtttcatt

SEQ ID NO: 971430 - DNA, 15 bp, Homo sapiens
acccatttgtttcat

SEQ ID NO: 971431 - DNA, 15 bp, Homo sapiens
tacccatttgtttca

SEQ ID NO: 971432 - DNA, 15 bp, Homo sapiens
atacccatttgtttc

SEQ ID NO: 971433 - DNA, 15 bp, Homo sapiens
aatacccatttgttt

SEQ ID NO: 971434 - DNA, 15 bp, Homo sapiens
taatacccatttgtt

SEQ ID NO: 971435 - DNA, 15 bp, Homo sapiens
ttaatacccatttgt

SEQ ID NO: 971436 - DNA, 15 bp, Homo sapiens
tttaatacccatttg

SEQ ID NO: 971437 - DNA, 15 bp, Homo sapiens
atttaatacccattt

SEQ ID NO: 971438 - DNA, 15 bp, Homo sapiens
catttaatacccatt

SEQ ID NO: 971439 - DNA, 15 bp, Homo sapiens
acatttaatacccat

SEQ ID NO: 971440 - DNA, 15 bp, Homo sapiens
tacatttaataccca

SEQ ID NO: 971441 - DNA, 15 bp, Homo sapiens
atacatttaataccc

SEQ ID NO: 971442 - DNA, 15 bp, Homo sapiens
catacatttaatacc

SEQ ID NO: 971443 - DNA, 15 bp, Homo sapiens
tcatacatttaatac

SEQ ID NO: 971444 - DNA, 15 bp, Homo sapiens
atcatacatttaata

SEQ ID NO: 971445 - DNA, 15 bp, Homo sapiens
tatcatacatttaat

SEQ ID NO: 971446 - DNA, 15 bp, Homo sapiens
ttatcatacatttaa

SEQ ID NO: 971447 - DNA, 15 bp, Homo sapiens
cttatcatacattta

SEQ ID NO: 971448 - DNA, 15 bp, Homo sapiens
ccttatcatacattt

SEQ ID NO: 971449 - DNA, 15 bp, Homo sapiens
accttatcatacatt

SEQ ID NO: 971450 - DNA, 15 bp, Homo sapiens
aaccttatcatacat

SEQ ID NO: 971451 - DNA, 15 bp, Homo sapiens
taaccttatcataca

SEQ ID NO: 971452 - DNA, 15 bp, Homo sapiens
ataaccttatcatac

SEQ ID NO: 971453 - DNA, 15 bp, Homo sapiens
tataaccttatcata

SEQ ID NO: 971454 - DNA, 15 bp, Homo sapiens
ttataaccttatcat

SEQ ID NO: 971455 - DNA, 15 bp, Homo sapiens
tttataaccttatca

SEQ ID NO: 971456 - DNA, 15 bp, Homo sapiens
atttataaccttatc

SEQ ID NO: 971457 - DNA, 15 bp, Homo sapiens
aatttataaccttat

SEQ ID NO: 971458 - DNA, 15 bp, Homo sapiens
taatttataacctta

SEQ ID NO: 971459 - DNA, 15 bp, Homo sapiens
gtaatttataacctt

SEQ ID NO: 971460 - DNA, 15 bp, Homo sapiens
agtaatttataacct

SEQ ID NO: 971461 - DNA, 15 bp, Homo sapiens
aagtaatttataacc

SEQ ID NO: 971462 - DNA, 15 bp, Homo sapiens
aaagtaatttataac

SEQ ID NO: 971463 - DNA, 15 bp, Homo sapiens
aaaagtaatttataa

SEQ ID NO: 971464 - DNA, 15 bp, Homo sapiens
aaaaagtaatttata

SEQ ID NO: 971465 - DNA, 15 bp, Homo sapiens
taaaaagtaatttat

SEQ ID NO: 971466 - DNA, 15 bp, Homo sapiens
ttaaaaagtaattta

SEQ ID NO: 971467 - DNA, 15 bp, Homo sapiens
tttaaaaagtaattt

SEQ ID NO: 971468 - DNA, 15 bp, Homo sapiens
ttttaaaaagtaatt

SEQ ID NO: 971469 - DNA, 15 bp, Homo sapiens
cttttaaaaagtaat

SEQ ID NO: 971470 - DNA, 15 bp, Homo sapiens
tcttttaaaaagtaa

SEQ ID NO: 971471 - DNA, 15 bp, Homo sapiens
atcttttaaaaagta

SEQ ID NO: 971472 - DNA, 15 bp, Homo sapiens
aatcttttaaaaagt

SEQ ID NO: 971473 - DNA, 15 bp, Homo sapiens
taatcttttaaaaag

SEQ ID NO: 971474 - DNA, 15 bp, Homo sapiens
gtaatcttttaaaaa

SEQ ID NO: 971475 - DNA, 15 bp, Homo sapiens
tgtaatcttttaaaa

SEQ ID NO: 971476 - DNA, 15 bp, Homo sapiens
ctgtaatcttttaaa

SEQ ID NO: 971477 - DNA, 15 bp, Homo sapiens
cctgtaatcttttaa

SEQ ID NO: 971478 - DNA, 15 bp, Homo sapiens
ccctgtaatctttta

SEQ ID NO: 971479 - DNA, 15 bp, Homo sapiens
tccctgtaatctttt

SEQ ID NO: 971480 - DNA, 15 bp, Homo sapiens
ttccctgtaatcttt

SEQ ID NO: 971481 - DNA, 15 bp, Homo sapiens
tttccctgtaatctt

SEQ ID NO: 971482 - DNA, 15 bp, Homo sapiens
ttttccctgtaatct

SEQ ID NO: 971483 - DNA, 15 bp, Homo sapiens
tttttccctgtaatc

SEQ ID NO: 971484 - DNA, 15 bp, Homo sapiens
ttttttccctgtaat

SEQ ID NO: 971485 - DNA, 15 bp, Homo sapiens
tttttttccctgtaa

SEQ ID NO: 971486 - DNA, 15 bp, Homo sapiens
atttttttccctgta

SEQ ID NO: 971487 - DNA, 15 bp, Homo sapiens
aatttttttccctgt

SEQ ID NO: 971488 - DNA, 15 bp, Homo sapiens
caatttttttccctg

SEQ ID NO: 971489 - DNA, 15 bp, Homo sapiens
tcaatttttttccct

SEQ ID NO: 971490 - DNA, 15 bp, Homo sapiens
ttcaatttttttccc

SEQ ID NO: 971491 - DNA, 15 bp, Homo sapiens
tttcaatttttttcc

SEQ ID NO: 971492 - DNA, 15 bp, Homo sapiens
ctttcaatttttttc

SEQ ID NO: 971493 - DNA, 15 bp, Homo sapiens
tctttcaattttttt

SEQ ID NO: 971494 - DNA, 15 bp, Homo sapiens
atctttcaatttttt

SEQ ID NO: 971495 - DNA, 15 bp, Homo sapiens
tatctttcaattttt

SEQ ID NO: 971496 - DNA, 15 bp, Homo sapiens
atatctttcaatttt

SEQ ID NO: 971497 - DNA, 15 bp, Homo sapiens
tatatctttcaattt

SEQ ID NO: 971498 - DNA, 15 bp, Homo sapiens
gtatatctttcaatt

SEQ ID NO: 971499 - DNA, 15 bp, Homo sapiens
tgtatatctttcaat

SEQ ID NO: 971500 - DNA, 15 bp, Homo sapiens
gtgtatatctttcaa

SEQ ID NO: 971501 - DNA, 15 bp, Homo sapiens
agtgtatatctttca

SEQ ID NO: 971502 - DNA, 15 bp, Homo sapiens
cagtgtatatctttc

SEQ ID NO: 971503 - DNA, 15 bp, Homo sapiens
tcagtgtatatcttt

SEQ ID NO: 971504 - DNA, 15 bp, Homo sapiens
ttcagtgtatatctt

SEQ ID NO: 971505 - DNA, 15 bp, Homo sapiens
tttcagtgtatatct

SEQ ID NO: 971506 - DNA, 15 bp, Homo sapiens
atttcagtgtatatc

SEQ ID NO: 971507 - DNA, 15 bp, Homo sapiens
catttcagtgtatat

SEQ ID NO: 971508 - DNA, 15 bp, Homo sapiens
acatttcagtgtata

SEQ ID NO: 971509 - DNA, 15 bp, Homo sapiens
aacatttcagtgtat

SEQ ID NO: 971510 - DNA, 15 bp, Homo sapiens
aaacatttcagtgta

SEQ ID NO: 971511 - DNA, 15 bp, Homo sapiens
aaaacatttcagtgt

SEQ ID NO: 971512 - DNA, 15 bp, Homo sapiens
aaaaacatttcagtg

SEQ ID NO: 971513 - DNA, 15 bp, Homo sapiens
aaaaaacatttcagt

SEQ ID NO: 971514 - DNA, 15 bp, Homo sapiens
caaaaaacatttcag

SEQ ID NO: 971515 - DNA, 15 bp, Homo sapiens
gcaaaaaacatttca

SEQ ID NO: 971516 - DNA, 15 bp, Homo sapiens
agcaaaaaacatttc

SEQ ID NO: 971517 - DNA, 15 bp, Homo sapiens
gagcaaaaaacattt

SEQ ID NO: 971518 - DNA, 15 bp, Homo sapiens
tgagcaaaaaacatt

SEQ ID NO: 971519 - DNA, 15 bp, Homo sapiens
gtgagcaaaaaacat

SEQ ID NO: 971520 - DNA, 15 bp, Homo sapiens
tgtgagcaaaaaaca

SEQ ID NO: 971521 - DNA, 15 bp, Homo sapiens
ctgtgagcaaaaaac

SEQ ID NO: 971522 - DNA, 15 bp, Homo sapiens
actgtgagcaaaaaa

SEQ ID NO: 971523 - DNA, 15 bp, Homo sapiens
cactgtgagcaaaaa

SEQ ID NO: 971524 - DNA, 15 bp, Homo sapiens
ccactgtgagcaaaa

SEQ ID NO: 971525 - DNA, 15 bp, Homo sapiens
accactgtgagcaaa

SEQ ID NO: 971526 - DNA, 15 bp, Homo sapiens
caccactgtgagcaa

SEQ ID NO: 971527 - DNA, 15 bp, Homo sapiens
tcaccactgtgagca

SEQ ID NO: 971528 - DNA, 15 bp, Homo sapiens
gtcaccactgtgagc

SEQ ID NO: 971529 - DNA, 15 bp, Homo sapiens
tgtcaccactgtgag

SEQ ID NO: 971530 - DNA, 15 bp, Homo sapiens
ttgtcaccactgtga

SEQ ID NO: 971531 - DNA, 15 bp, Homo sapiens
cttgtcaccactgtg

SEQ ID NO: 971532 - DNA, 15 bp, Homo sapiens
ccttgtcaccactgt

SEQ ID NO: 971533 - DNA, 15 bp, Homo sapiens
accttgtcaccactg

SEQ ID NO: 971534 - DNA, 15 bp, Homo sapiens
aaccttgtcaccact

SEQ ID NO: 971535 - DNA, 15 bp, Homo sapiens
aaaccttgtcaccac

SEQ ID NO: 971536 - DNA, 15 bp, Homo sapiens
gaaaccttgtcacca

SEQ ID NO: 971537 - DNA, 15 bp, Homo sapiens
agaaaccttgtcacc

SEQ ID NO: 971538 - DNA, 15 bp, Homo sapiens
gagaaaccttgtcac

SEQ ID NO: 971539 - DNA, 15 bp, Homo sapiens
tgagaaaccttgtca

SEQ ID NO: 971540 - DNA, 15 bp, Homo sapiens
ctgagaaaccttgtc

SEQ ID NO: 971541 - DNA, 15 bp, Homo sapiens
gctgagaaaccttgt

SEQ ID NO: 971542 - DNA, 15 bp, Homo sapiens
tgctgagaaaccttg

SEQ ID NO: 971543 - DNA, 15 bp, Homo sapiens
gtgctgagaaacctt

SEQ ID NO: 971544 - DNA, 15 bp, Homo sapiens
agtgctgagaaacct

SEQ ID NO: 971545 - DNA, 15 bp, Homo sapiens
cagtgctgagaaacc

SEQ ID NO: 971546 - DNA, 15 bp, Homo sapiens
ccagtgctgagaaac

SEQ ID NO: 971547 - DNA, 15 bp, Homo sapiens
gccagtgctgagaaa

SEQ ID NO: 971548 - DNA, 15 bp, Homo sapiens
tgccagtgctgagaa

SEQ ID NO: 971549 - DNA, 15 bp, Homo sapiens
gtgccagtgctgaga

SEQ ID NO: 971550 - DNA, 15 bp, Homo sapiens
agtgccagtgctgag

SEQ ID NO: 971551 - DNA, 15 bp, Homo sapiens
cagtgccagtgctga

SEQ ID NO: 971552 - DNA, 15 bp, Homo sapiens
acagtgccagtgctg

SEQ ID NO: 971553 - DNA, 15 bp, Homo sapiens
aacagtgccagtgct

SEQ ID NO: 971554 - DNA, 15 bp, Homo sapiens
caacagtgccagtgc

SEQ ID NO: 971555 - DNA, 15 bp, Homo sapiens
tcaacagtgccagtg

SEQ ID NO: 971556 - DNA, 15 bp, Homo sapiens
gtcaacagtgccagt

SEQ ID NO: 971557 - DNA, 15 bp, Homo sapiens
cgtcaacagtgccag

SEQ ID NO: 971558 - DNA, 15 bp, Homo sapiens
acgtcaacagtgcca

SEQ ID NO: 971559 - DNA, 15 bp, Homo sapiens
aacgtcaacagtgcc

SEQ ID NO: 971560 - DNA, 15 bp, Homo sapiens
aaacgtcaacagtgc

SEQ ID NO: 971561 - DNA, 15 bp, Homo sapiens
aaaacgtcaacagtg

SEQ ID NO: 971562 - DNA, 15 bp, Homo sapiens
taaaacgtcaacagt

SEQ ID NO: 971563 - DNA, 15 bp, Homo sapiens
ctaaaacgtcaacag

SEQ ID NO: 971564 - DNA, 15 bp, Homo sapiens
cctaaaacgtcaaca

SEQ ID NO: 971565 - DNA, 15 bp, Homo sapiens
gcctaaaacgtcaac

SEQ ID NO: 971566 - DNA, 15 bp, Homo sapiens
agcctaaaacgtcaa

SEQ ID NO: 971567 - DNA, 15 bp, Homo sapiens
cagcctaaaacgtca

SEQ ID NO: 971568 - DNA, 15 bp, Homo sapiens
acagcctaaaacgtc

SEQ ID NO: 971569 - DNA, 15 bp, Homo sapiens
tacagcctaaaacgt

SEQ ID NO: 971570 - DNA, 15 bp, Homo sapiens
atacagcctaaaacg

SEQ ID NO: 971571 - DNA, 15 bp, Homo sapiens
catacagcctaaaac

SEQ ID NO: 971572 - DNA, 15 bp, Homo sapiens
acatacagcctaaaa

SEQ ID NO: 971573 - DNA, 15 bp, Homo sapiens
gacatacagcctaaa

SEQ ID NO: 971574 - DNA, 15 bp, Homo sapiens
agacatacagcctaa

SEQ ID NO: 971575 - DNA, 15 bp, Homo sapiens
aagacatacagccta

SEQ ID NO: 971576 - DNA, 15 bp, Homo sapiens
aaagacatacagcct

SEQ ID NO: 971577 - DNA, 15 bp, Homo sapiens
caaagacatacagcc

SEQ ID NO: 971578 - DNA, 15 bp, Homo sapiens
gcaaagacatacagc

SEQ ID NO: 971579 - DNA, 15 bp, Homo sapiens
agcaaagacatacag

SEQ ID NO: 971580 - DNA, 15 bp, Homo sapiens
cagcaaagacataca

SEQ ID NO: 971581 - DNA, 15 bp, Homo sapiens
acagcaaagacatac

SEQ ID NO: 971582 - DNA, 15 bp, Homo sapiens
cacagcaaagacata

SEQ ID NO: 971583 - DNA, 15 bp, Homo sapiens
ccacagcaaagacat

SEQ ID NO: 971584 - DNA, 15 bp, Homo sapiens
cccacagcaaagaca

SEQ ID NO: 971585 - DNA, 15 bp, Homo sapiens
tcccacagcaaagac

SEQ ID NO: 971586 - DNA, 15 bp, Homo sapiens
ctcccacagcaaaga

SEQ ID NO: 971587 - DNA, 15 bp, Homo sapiens
cctcccacagcaaag

SEQ ID NO: 971588 - DNA, 15 bp, Homo sapiens
gcctcccacagcaaa

SEQ ID NO: 971589 - DNA, 15 bp, Homo sapiens
agcctcccacagcaa

SEQ ID NO: 971590 - DNA, 15 bp, Homo sapiens
cagcctcccacagca

SEQ ID NO: 971591 - DNA, 15 bp, Homo sapiens
ccagcctcccacagc

SEQ ID NO: 971592 - DNA, 15 bp, Homo sapiens
gccagcctcccacag

SEQ ID NO: 971593 - DNA, 15 bp, Homo sapiens
ggccagcctcccaca

SEQ ID NO: 971594 - DNA, 15 bp, Homo sapiens
aggccagcctcccac

SEQ ID NO: 971595 - DNA, 15 bp, Homo sapiens
caggccagcctccca

SEQ ID NO: 971596 - DNA, 15 bp, Homo sapiens
acaggccagcctccc

SEQ ID NO: 971597 - DNA, 15 bp, Homo sapiens
cacaggccagcctcc

SEQ ID NO: 971598 - DNA, 15 bp, Homo sapiens
gcacaggccagcctc

SEQ ID NO: 971599 - DNA, 15 bp, Homo sapiens
tgcacaggccagcct

SEQ ID NO: 971600 - DNA, 15 bp, Homo sapiens
gtgcacaggccagcc

SEQ ID NO: 971601 - DNA, 15 bp, Homo sapiens
agtgcacaggccagc

SEQ ID NO: 971602 - DNA, 15 bp, Homo sapiens
cagtgcacaggccag

SEQ ID NO: 971603 - DNA, 15 bp, Homo sapiens
gcagtgcacaggcca

SEQ ID NO: 971604 - DNA, 15 bp, Homo sapiens
tgcagtgcacaggcc

SEQ ID NO: 971605 - DNA, 15 bp, Homo sapiens
ctgcagtgcacaggc

SEQ ID NO: 971606 - DNA, 15 bp, Homo sapiens
cctgcagtgcacagg

SEQ ID NO: 971607 - DNA, 15 bp, Homo sapiens
ccctgcagtgcacag

SEQ ID NO: 971608 - DNA, 15 bp, Homo sapiens
accctgcagtgcaca

SEQ ID NO: 971609 - DNA, 15 bp, Homo sapiens
caccctgcagtgcac

SEQ ID NO: 971610 - DNA, 15 bp, Homo sapiens
acaccctgcagtgca

SEQ ID NO: 971611 - DNA, 15 bp, Homo sapiens
aacaccctgcagtgc

SEQ ID NO: 971612 - DNA, 15 bp, Homo sapiens
aaacaccctgcagtg

SEQ ID NO: 971613 - DNA, 15 bp, Homo sapiens
caaacaccctgcagt

SEQ ID NO: 971614 - DNA, 15 bp, Homo sapiens
ccaaacaccctgcag

SEQ ID NO: 971615 - DNA, 15 bp, Homo sapiens
gccaaacaccctgca

SEQ ID NO: 971616 - DNA, 15 bp, Homo sapiens
tgccaaacaccctgc

SEQ ID NO: 971617 - DNA, 15 bp, Homo sapiens
ctgccaaacaccctg

SEQ ID NO: 971618 - DNA, 15 bp, Homo sapiens
gctgccaaacaccct

SEQ ID NO: 971619 - DNA, 15 bp, Homo sapiens
tgctgccaaacaccc

SEQ ID NO: 971620 - DNA, 15 bp, Homo sapiens
gtgctgccaaacacc

SEQ ID NO: 971621 - DNA, 15 bp, Homo sapiens
agtgctgccaaacac

SEQ ID NO: 971622 - DNA, 15 bp, Homo sapiens
gagtgctgccaaaca

SEQ ID NO: 971623 - DNA, 15 bp, Homo sapiens
agagtgctgccaaac

SEQ ID NO: 971624 - DNA, 15 bp, Homo sapiens
aagagtgctgccaaa

SEQ ID NO: 971625 - DNA, 15 bp, Homo sapiens
caagagtgctgccaa

SEQ ID NO: 971626 - DNA, 15 bp, Homo sapiens
ccaagagtgctgcca

SEQ ID NO: 971627 - DNA, 15 bp, Homo sapiens
gccaagagtgctgcc

SEQ ID NO: 971628 - DNA, 15 bp, Homo sapiens
ggccaagagtgctgc

SEQ ID NO: 971629 - DNA, 15 bp, Homo sapiens
aggccaagagtgctg

SEQ ID NO: 971630 - DNA, 15 bp, Homo sapiens
gaggccaagagtgct

SEQ ID NO: 971631 - DNA, 15 bp, Homo sapiens
agaggccaagagtgc

SEQ ID NO: 971632 - DNA, 15 bp, Homo sapiens
cagaggccaagagtg

SEQ ID NO: 971633 - DNA, 15 bp, Homo sapiens
gcagaggccaagagt

SEQ ID NO: 971634 - DNA, 15 bp, Homo sapiens
ggcagaggccaagag

SEQ ID NO: 971635 - DNA, 15 bp, Homo sapiens
gggcagaggccaaga

SEQ ID NO: 971636 - DNA, 15 bp, Homo sapiens
ggggcagaggccaag

SEQ ID NO: 971637 - DNA, 15 bp, Homo sapiens
aggggcagaggccaa

SEQ ID NO: 971638 - DNA, 15 bp, Homo sapiens
taggggcagaggcca

SEQ ID NO: 971639 - DNA, 15 bp, Homo sapiens
ctaggggcagaggcc

SEQ ID NO: 971640 - DNA, 15 bp, Homo sapiens
tctaggggcagaggc

SEQ ID NO: 971641 - DNA, 15 bp, Homo sapiens
atctaggggcagagg

SEQ ID NO: 971642 - DNA, 15 bp, Homo sapiens
tatctaggggcagag

SEQ ID NO: 971643 - DNA, 15 bp, Homo sapiens
ctatctaggggcaga

SEQ ID NO: 971644 - DNA, 15 bp, Homo sapiens
gctatctaggggcag

SEQ ID NO: 971645 - DNA, 15 bp, Homo sapiens
tgctatctaggggca

SEQ ID NO: 971646 - DNA, 15 bp, Homo sapiens
ttgctatctaggggc

SEQ ID NO: 971647 - DNA, 15 bp, Homo sapiens
attgctatctagggg

SEQ ID NO: 971648 - DNA, 15 bp, Homo sapiens
tattgctatctaggg

SEQ ID NO: 971649 - DNA, 15 bp, Homo sapiens
ctattgctatctagg

SEQ ID NO: 971650 - DNA, 15 bp, Homo sapiens
gctattgctatctag

SEQ ID NO: 971651 - DNA, 15 bp, Homo sapiens
tgctattgctatcta

SEQ ID NO: 971652 - DNA, 15 bp, Homo sapiens
ctgctattgctatct

SEQ ID NO: 971653 - DNA, 15 bp, Homo sapiens
actgctattgctatc

SEQ ID NO: 971654 - DNA, 15 bp, Homo sapiens
gactgctattgctat

SEQ ID NO: 971655 - DNA, 15 bp, Homo sapiens
ggactgctattgcta

SEQ ID NO: 971656 - DNA, 15 bp, Homo sapiens
aggactgctattgct

SEQ ID NO: 971657 - DNA, 15 bp, Homo sapiens
gaggactgctattgc

SEQ ID NO: 971658 - DNA, 15 bp, Homo sapiens
ggaggactgctattg

SEQ ID NO: 971659 - DNA, 15 bp, Homo sapiens
gggaggactgctatt

SEQ ID NO: 971660 - DNA, 15 bp, Homo sapiens
agggaggactgctat

SEQ ID NO: 971661 - DNA, 15 bp, Homo sapiens
gagggaggactgcta

SEQ ID NO: 971662 - DNA, 15 bp, Homo sapiens
tgagggaggactgct

SEQ ID NO: 971663 - DNA, 15 bp, Homo sapiens
ttgagggaggactgc

SEQ ID NO: 971664 - DNA, 15 bp, Homo sapiens
gttgagggaggactg

SEQ ID NO: 971665 - DNA, 15 bp, Homo sapiens
ggttgagggaggact

SEQ ID NO: 971666 - DNA, 15 bp, Homo sapiens
tggttgagggaggac

SEQ ID NO: 971667 - DNA, 15 bp, Homo sapiens
ctggttgagggagga

SEQ ID NO: 971668 - DNA, 15 bp, Homo sapiens
gctggttgagggagg

SEQ ID NO: 971669 - DNA, 15 bp, Homo sapiens
ggctggttgagggag

SEQ ID NO: 971670 - DNA, 15 bp, Homo sapiens
gggctggttgaggga

SEQ ID NO: 971671 - DNA, 15 bp, Homo sapiens
tgggctggttgaggg

SEQ ID NO: 971672 - DNA, 15 bp, Homo sapiens
ttgggctggttgagg

SEQ ID NO: 971673 - DNA, 15 bp, Homo sapiens
attgggctggttgag

SEQ ID NO: 971674 - DNA, 15 bp, Homo sapiens
aattgggctggttga

SEQ ID NO: 971675 - DNA, 15 bp, Homo sapiens
aaattgggctggttg

SEQ ID NO: 971676 - DNA, 15 bp, Homo sapiens
aaaattgggctggtt

SEQ ID NO: 971677 - DNA, 15 bp, Homo sapiens
caaaattgggctggt

SEQ ID NO: 971678 - DNA, 15 bp, Homo sapiens
tcaaaattgggctgg

SEQ ID NO: 971679 - DNA, 15 bp, Homo sapiens
gtcaaaattgggctg

SEQ ID NO: 971680 - DNA, 15 bp, Homo sapiens
tgtcaaaattgggct

SEQ ID NO: 971681 - DNA, 15 bp, Homo sapiens
ttgtcaaaattgggc

SEQ ID NO: 971682 - DNA, 15 bp, Homo sapiens
gttgtcaaaattggg

SEQ ID NO: 971683 - DNA, 15 bp, Homo sapiens
ggttgtcaaaattgg

SEQ ID NO: 971684 - DNA, 15 bp, Homo sapiens
tggttgtcaaaattg

SEQ ID NO: 971685 - DNA, 15 bp, Homo sapiens
ttggttgtcaaaatt

SEQ ID NO: 971686 - DNA, 15 bp, Homo sapiens
tttggttgtcaaaat

SEQ ID NO: 971687 - DNA, 15 bp, Homo sapiens
ttttggttgtcaaaa

SEQ ID NO: 971688 - DNA, 15 bp, Homo sapiens
tttttggttgtcaaa

SEQ ID NO: 971689 - DNA, 15 bp, Homo sapiens
atttttggttgtcaa

SEQ ID NO: 971690 - DNA, 15 bp, Homo sapiens
catttttggttgtca

SEQ ID NO: 971691 - DNA, 15 bp, Homo sapiens
acatttttggttgtc

SEQ ID NO: 971692 - DNA, 15 bp, Homo sapiens
aacatttttggttgt

SEQ ID NO: 971693 - DNA, 15 bp, Homo sapiens
aaacatttttggttg

SEQ ID NO: 971694 - DNA, 15 bp, Homo sapiens
gaaacatttttggtt

SEQ ID NO: 971695 - DNA, 15 bp, Homo sapiens
ggaaacatttttggt

SEQ ID NO: 971696 - DNA, 15 bp, Homo sapiens
tggaaacatttttgg

SEQ ID NO: 971697 - DNA, 15 bp, Homo sapiens
ctggaaacatttttg

SEQ ID NO: 971698 - DNA, 15 bp, Homo sapiens
cctggaaacattttt

SEQ ID NO: 971699 - DNA, 15 bp, Homo sapiens
gcctggaaacatttt

SEQ ID NO: 971700 - DNA, 15 bp, Homo sapiens
tgcctggaaacattt

SEQ ID NO: 971701 - DNA, 15 bp, Homo sapiens
atgcctggaaacatt

SEQ ID NO: 971702 - DNA, 15 bp, Homo sapiens
gatgcctggaaacat

SEQ ID NO: 971703 - DNA, 15 bp, Homo sapiens
tgatgcctggaaaca

SEQ ID NO: 971704 - DNA, 15 bp, Homo sapiens
gtgatgcctggaaac

SEQ ID NO: 971705 - DNA, 15 bp, Homo sapiens
ggtgatgcctggaaa

SEQ ID NO: 971706 - DNA, 15 bp, Homo sapiens
tggtgatgcctggaa

SEQ ID NO: 971707 - DNA, 15 bp, Homo sapiens
ctggtgatgcctgga

SEQ ID NO: 971708 - DNA, 15 bp, Homo sapiens
tctggtgatgcctgg

SEQ ID NO: 971709 - DNA, 15 bp, Homo sapiens
atctggtgatgcctg

SEQ ID NO: 971710 - DNA, 15 bp, Homo sapiens
catctggtgatgcct

SEQ ID NO: 971711 - DNA, 15 bp, Homo sapiens
gcatctggtgatgcc

SEQ ID NO: 971712 - DNA, 15 bp, Homo sapiens
agcatctggtgatgc

SEQ ID NO: 971713 - DNA, 15 bp, Homo sapiens
gagcatctggtgatg

SEQ ID NO: 971714 - DNA, 15 bp, Homo sapiens
ggagcatctggtgat

SEQ ID NO: 971715 - DNA, 15 bp, Homo sapiens
gggagcatctggtga

SEQ ID NO: 971716 - DNA, 15 bp, Homo sapiens
agggagcatctggtg

SEQ ID NO: 971717 - DNA, 15 bp, Homo sapiens
cagggagcatctggt

SEQ ID NO: 971718 - DNA, 15 bp, Homo sapiens
ccagggagcatctgg

SEQ ID NO: 971719 - DNA, 15 bp, Homo sapiens
cccagggagcatctg

SEQ ID NO: 971720 - DNA, 15 bp, Homo sapiens
acccagggagcatct

SEQ ID NO: 971721 - DNA, 15 bp, Homo sapiens
cacccagggagcatc

SEQ ID NO: 971722 - DNA, 15 bp, Homo sapiens
tcacccagggagcat

SEQ ID NO: 971723 - DNA, 15 bp, Homo sapiens
ctcacccagggagca

SEQ ID NO: 971724 - DNA, 15 bp, Homo sapiens
tctcacccagggagc

SEQ ID NO: 971725 - DNA, 15 bp, Homo sapiens
ctctcacccagggag

SEQ ID NO: 971726 - DNA, 15 bp, Homo sapiens
actctcacccaggga

SEQ ID NO: 971727 - DNA, 15 bp, Homo sapiens
cactctcacccaggg

SEQ ID NO: 971728 - DNA, 15 bp, Homo sapiens
tcactctcacccagg

SEQ ID NO: 971729 - DNA, 15 bp, Homo sapiens
atcactctcacccag

SEQ ID NO: 971730 - DNA, 15 bp, Homo sapiens
catcactctcaccca

SEQ ID NO: 971731 - DNA, 15 bp, Homo sapiens
tcatcactctcaccc

SEQ ID NO: 971732 - DNA, 15 bp, Homo sapiens
ttcatcactctcacc

SEQ ID NO: 971733 - DNA, 15 bp, Homo sapiens
tttcatcactctcac

SEQ ID NO: 971734 - DNA, 15 bp, Homo sapiens
atttcatcactctca

SEQ ID NO: 971735 - DNA, 15 bp, Homo sapiens
tatttcatcactctc

SEQ ID NO: 971736 - DNA, 15 bp, Homo sapiens
ctatttcatcactct

SEQ ID NO: 971737 - DNA, 15 bp, Homo sapiens
actatttcatcactc

SEQ ID NO: 971738 - DNA, 15 bp, Homo sapiens
tactatttcatcact

SEQ ID NO: 971739 - DNA, 15 bp, Homo sapiens
ctactatttcatcac

SEQ ID NO: 971740 - DNA, 15 bp, Homo sapiens
cctactatttcatca

SEQ ID NO: 971741 - DNA, 15 bp, Homo sapiens
ccctactatttcatc

SEQ ID NO: 971742 - DNA, 15 bp, Homo sapiens
cccctactatttcat

SEQ ID NO: 971743 - DNA, 15 bp, Homo sapiens
tcccctactatttca

SEQ ID NO: 971744 - DNA, 15 bp, Homo sapiens
atcccctactatttc

SEQ ID NO: 971745 - DNA, 15 bp, Homo sapiens
aatcccctactattt

SEQ ID NO: 971746 - DNA, 15 bp, Homo sapiens
aaatcccctactatt

SEQ ID NO: 971747 - DNA, 15 bp, Homo sapiens
aaaatcccctactat

SEQ ID NO: 971748 - DNA, 15 bp, Homo sapiens
gaaaatcccctacta

SEQ ID NO: 971749 - DNA, 15 bp, Homo sapiens
ggaaaatcccctact

SEQ ID NO: 971750 - DNA, 15 bp, Homo sapiens
gggaaaatcccctac

SEQ ID NO: 971751 - DNA, 15 bp, Homo sapiens
ggggaaaatccccta

SEQ ID NO: 971752 - DNA, 15 bp, Homo sapiens
aggggaaaatcccct

SEQ ID NO: 971753 - DNA, 15 bp, Homo sapiens
aaggggaaaatcccc

SEQ ID NO: 971754 - DNA, 15 bp, Homo sapiens
gaaggggaaaatccc

SEQ ID NO: 971755 - DNA, 15 bp, Homo sapiens
agaaggggaaaatcc

SEQ ID NO: 971756 - DNA, 15 bp, Homo sapiens
aagaaggggaaaatc

SEQ ID NO: 971757 - DNA, 15 bp, Homo sapiens
aaagaaggggaaaat

SEQ ID NO: 971758 - DNA, 15 bp, Homo sapiens
aaaagaaggggaaaa

SEQ ID NO: 971759 - DNA, 15 bp, Homo sapiens
gaaaagaaggggaaa

SEQ ID NO: 971760 - DNA, 15 bp, Homo sapiens
agaaaagaaggggaa

SEQ ID NO: 971761 - DNA, 15 bp, Homo sapiens
aagaaaagaagggga

SEQ ID NO: 971762 - DNA, 15 bp, Homo sapiens
taagaaaagaagggg

SEQ ID NO: 971763 - DNA, 15 bp, Homo sapiens
ataagaaaagaaggg

SEQ ID NO: 971764 - DNA, 15 bp, Homo sapiens
aataagaaaagaagg

SEQ ID NO: 971765 - DNA, 15 bp, Homo sapiens
aaataagaaaagaag

SEQ ID NO: 971766 - DNA, 15 bp, Homo sapiens
aaaataagaaaagaa

SEQ ID NO: 971767 - DNA, 15 bp, Homo sapiens
gaaaataagaaaaga

SEQ ID NO: 971768 - DNA, 15 bp, Homo sapiens
agaaaataagaaaag

SEQ ID NO: 971769 - DNA, 15 bp, Homo sapiens
cagaaaataagaaaa

SEQ ID NO: 971770 - DNA, 15 bp, Homo sapiens
acagaaaataagaaa

SEQ ID NO: 971771 - DNA, 15 bp, Homo sapiens
tacagaaaataagaa

SEQ ID NO: 971772 - DNA, 15 bp, Homo sapiens
ttacagaaaataaga

SEQ ID NO: 971773 - DNA, 15 bp, Homo sapiens
attacagaaaataag

SEQ ID NO: 971774 - DNA, 15 bp, Homo sapiens
aattacagaaaataa

SEQ ID NO: 971775 - DNA, 15 bp, Homo sapiens
gaattacagaaaata

SEQ ID NO: 971776 - DNA, 15 bp, Homo sapiens
ggaattacagaaaat

SEQ ID NO: 971777 - DNA, 15 bp, Homo sapiens
tggaattacagaaaa

SEQ ID NO: 971778 - DNA, 15 bp, Homo sapiens
atggaattacagaaa

SEQ ID NO: 971779 - DNA, 15 bp, Homo sapiens
aatggaattacagaa

SEQ ID NO: 971780 - DNA, 15 bp, Homo sapiens
taatggaattacaga

SEQ ID NO: 971781 - DNA, 15 bp, Homo sapiens
ataatggaattacag

SEQ ID NO: 971782 - DNA, 15 bp, Homo sapiens
tataatggaattaca

SEQ ID NO: 971783 - DNA, 15 bp, Homo sapiens
atataatggaattac

SEQ ID NO: 971784 - DNA, 15 bp, Homo sapiens
aatataatggaatta

SEQ ID NO: 971785 - DNA, 15 bp, Homo sapiens
taatataatggaatt

SEQ ID NO: 971786 - DNA, 15 bp, Homo sapiens
gtaatataatggaat

SEQ ID NO: 971787 - DNA, 15 bp, Homo sapiens
agtaatataatggaa

SEQ ID NO: 971788 - DNA, 15 bp, Homo sapiens
aagtaatataatgga

SEQ ID NO: 971789 - DNA, 15 bp, Homo sapiens
aaagtaatataatgg

SEQ ID NO: 971790 - DNA, 15 bp, Homo sapiens
taaagtaatataatg

SEQ ID NO: 971791 - DNA, 15 bp, Homo sapiens
ttaaagtaatataat

SEQ ID NO: 971792 - DNA, 15 bp, Homo sapiens
attaaagtaatataa

SEQ ID NO: 971793 - DNA, 15 bp, Homo sapiens
tattaaagtaatata

SEQ ID NO: 971794 - DNA, 15 bp, Homo sapiens
ttattaaagtaatat

SEQ ID NO: 971795 - DNA, 15 bp, Homo sapiens
attattaaagtaata

SEQ ID NO: 971796 - DNA, 15 bp, Homo sapiens
tattattaaagtaat

SEQ ID NO: 971797 - DNA, 15 bp, Homo sapiens
ttattattaaagtaa

SEQ ID NO: 971798 - DNA, 15 bp, Homo sapiens
tttattattaaagta

SEQ ID NO: 971799 - DNA, 15 bp, Homo sapiens
ctttattattaaagt

SEQ ID NO: 971800 - DNA, 15 bp, Homo sapiens
tctttattattaaag

SEQ ID NO: 971801 - DNA, 15 bp, Homo sapiens
ttctttattattaaa

SEQ ID NO: 971802 - DNA, 15 bp, Homo sapiens
tttctttattattaa

SEQ ID NO: 971803 - DNA, 15 bp, Homo sapiens
ttttctttattatta

SEQ ID NO: 971804 - DNA, 15 bp, Homo sapiens
tttttctttattatt

SEQ ID NO: 971805 - DNA, 15 bp, Homo sapiens
ttttttctttattat

SEQ ID NO: 971806 - DNA, 15 bp, Homo sapiens
tttttttctttatta

SEQ ID NO: 971807 - DNA, 15 bp, Homo sapiens
gtttttttctttatt

SEQ ID NO: 971808 - DNA, 15 bp, Homo sapiens
tgtttttttctttat

SEQ ID NO: 971809 - DNA, 15 bp, Homo sapiens
atgtttttttcttta

SEQ ID NO: 971810 - DNA, 15 bp, Homo sapiens
tatgtttttttcttt

SEQ ID NO: 971811 - DNA, 15 bp, Homo sapiens
ttatgtttttttctt

SEQ ID NO: 971812 - DNA, 15 bp, Homo sapiens
tttatgtttttttct

SEQ ID NO: 971813 - DNA, 15 bp, Homo sapiens
ttttatgtttttttc

SEQ ID NO: 971814 - DNA, 15 bp, Homo sapiens
tttttatgttttttt

SEQ ID NO: 971815 - DNA, 15 bp, Homo sapiens
ttttttatgtttttt

SEQ ID NO: 971816 - DNA, 15 bp, Homo sapiens
attttttatgttttt

SEQ ID NO: 971817 - DNA, 15 bp, Homo sapiens
tattttttatgtttt

SEQ ID NO: 971818 - DNA, 15 bp, Homo sapiens
ttattttttatgttt

SEQ ID NO: 971819 - DNA, 15 bp, Homo sapiens
tttattttttatgtt

SEQ ID NO: 971820 - DNA, 15 bp, Homo sapiens
gtttattttttatgt

SEQ ID NO: 971821 - DNA, 15 bp, Homo sapiens
cgtttattttttatg

SEQ ID NO: 971822 - DNA, 15 bp, Homo sapiens
tcgtttattttttat

SEQ ID NO: 971823 - DNA, 15 bp, Homo sapiens
ttcgtttatttttta

SEQ ID NO: 971824 - DNA, 15 bp, Homo sapiens
attcgtttatttttt

SEQ ID NO: 971825 - DNA, 15 bp, Homo sapiens
cattcgtttattttt

SEQ ID NO: 971826 - DNA, 15 bp, Homo sapiens
acattcgtttatttt

SEQ ID NO: 971827 - DNA, 15 bp, Homo sapiens
aacattcgtttattt

SEQ ID NO: 971828 - DNA, 15 bp, Homo sapiens
taacattcgtttatt

SEQ ID NO: 971829 - DNA, 15 bp, Homo sapiens
ataacattcgtttat

SEQ ID NO: 971830 - DNA, 15 bp, Homo sapiens
aataacattcgttta

SEQ ID NO: 971831 - DNA, 15 bp, Homo sapiens
taataacattcgttt

SEQ ID NO: 971832 - DNA, 15 bp, Homo sapiens
ataataacattcgtt

SEQ ID NO: 971833 - DNA, 15 bp, Homo sapiens
aataataacattcgt

SEQ ID NO: 971834 - DNA, 15 bp, Homo sapiens
gaataataacattcg

SEQ ID NO: 971835 - DNA, 15 bp, Homo sapiens
agaataataacattc

SEQ ID NO: 971836 - DNA, 15 bp, Homo sapiens
tagaataataacatt

SEQ ID NO: 971837 - DNA, 15 bp, Homo sapiens
gtagaataataacat

SEQ ID NO: 971838 - DNA, 15 bp, Homo sapiens
cgtagaataataaca

SEQ ID NO: 971839 - DNA, 15 bp, Homo sapiens
acgtagaataataac

SEQ ID NO: 971840 - DNA, 15 bp, Homo sapiens
gacgtagaataataa

SEQ ID NO: 971841 - DNA, 15 bp, Homo sapiens
tgacgtagaataata

SEQ ID NO: 971842 - DNA, 15 bp, Homo sapiens
ctgacgtagaataat

SEQ ID NO: 971843 - DNA, 15 bp, Homo sapiens
actgacgtagaataa

SEQ ID NO: 971844 - DNA, 15 bp, Homo sapiens
aactgacgtagaata

SEQ ID NO: 971845 - DNA, 15 bp, Homo sapiens
aaactgacgtagaat

SEQ ID NO: 971846 - DNA, 15 bp, Homo sapiens
caaactgacgtagaa

SEQ ID NO: 971847 - DNA, 15 bp, Homo sapiens
ccaaactgacgtaga

SEQ ID NO: 971848 - DNA, 15 bp, Homo sapiens
tccaaactgacgtag

SEQ ID NO: 971849 - DNA, 15 bp, Homo sapiens
atccaaactgacgta

SEQ ID NO: 971850 - DNA, 15 bp, Homo sapiens
catccaaactgacgt

SEQ ID NO: 971851 - DNA, 15 bp, Homo sapiens
acatccaaactgacg

SEQ ID NO: 971852 - DNA, 15 bp, Homo sapiens
aacatccaaactgac

SEQ ID NO: 971853 - DNA, 15 bp, Homo sapiens
aaacatccaaactga

SEQ ID NO: 971854 - DNA, 15 bp, Homo sapiens
caaacatccaaactg

SEQ ID NO: 971855 - DNA, 15 bp, Homo sapiens
ccaaacatccaaact

SEQ ID NO: 971856 - DNA, 15 bp, Homo sapiens
tccaaacatccaaac

SEQ ID NO: 971857 - DNA, 15 bp, Homo sapiens
gtccaaacatccaaa

SEQ ID NO: 971858 - DNA, 15 bp, Homo sapiens
agtccaaacatccaa

SEQ ID NO: 971859 - DNA, 15 bp, Homo sapiens
gagtccaaacatcca

SEQ ID NO: 971860 - DNA, 15 bp, Homo sapiens
ggagtccaaacatcc

SEQ ID NO: 971861 - DNA, 15 bp, Homo sapiens
tggagtccaaacatc

SEQ ID NO: 971862 - DNA, 15 bp, Homo sapiens
atggagtccaaacat

SEQ ID NO: 971863 - DNA, 15 bp, Homo sapiens
aatggagtccaaaca

SEQ ID NO: 971864 - DNA, 15 bp, Homo sapiens
aaatggagtccaaac

SEQ ID NO: 971865 - DNA, 15 bp, Homo sapiens
aaaatggagtccaaa

SEQ ID NO: 971866 - DNA, 15 bp, Homo sapiens
caaaatggagtccaa

SEQ ID NO: 971867 - DNA, 15 bp, Homo sapiens
ccaaaatggagtcca

SEQ ID NO: 971868 - DNA, 15 bp, Homo sapiens
cccaaaatggagtcc

SEQ ID NO: 971869 - DNA, 15 bp, Homo sapiens
ccccaaaatggagtc

SEQ ID NO: 971870 - DNA, 15 bp, Homo sapiens
accccaaaatggagt

SEQ ID NO: 971871 - DNA, 15 bp, Homo sapiens
aaccccaaaatggag

SEQ ID NO: 971872 - DNA, 15 bp, Homo sapiens
gaaccccaaaatgga

SEQ ID NO: 971873 - DNA, 15 bp, Homo sapiens
agaaccccaaaatgg

SEQ ID NO: 971874 - DNA, 15 bp, Homo sapiens
aagaaccccaaaatg

SEQ ID NO: 971875 - DNA, 15 bp, Homo sapiens
aaagaaccccaaaat

SEQ ID NO: 971876 - DNA, 15 bp, Homo sapiens
gaaagaaccccaaaa

SEQ ID NO: 971877 - DNA, 15 bp, Homo sapiens
ggaaagaaccccaaa

SEQ ID NO: 971878 - DNA, 15 bp, Homo sapiens
tggaaagaaccccaa

SEQ ID NO: 971879 - DNA, 15 bp, Homo sapiens
atggaaagaacccca

SEQ ID NO: 971880 - DNA, 15 bp, Homo sapiens
aatggaaagaacccc

SEQ ID NO: 971881 - DNA, 15 bp, Homo sapiens
taatggaaagaaccc

SEQ ID NO: 971882 - DNA, 15 bp, Homo sapiens
ataatggaaagaacc

SEQ ID NO: 971883 - DNA, 15 bp, Homo sapiens
tataatggaaagaac

SEQ ID NO: 971884 - DNA, 15 bp, Homo sapiens
atataatggaaagaa

SEQ ID NO: 971885 - DNA, 15 bp, Homo sapiens
gatataatggaaaga

SEQ ID NO: 971886 - DNA, 15 bp, Homo sapiens
tgatataatggaaag

SEQ ID NO: 971887 - DNA, 15 bp, Homo sapiens
gtgatataatggaaa

SEQ ID NO: 971888 - DNA, 15 bp, Homo sapiens
agtgatataatggaa

SEQ ID NO: 971889 - DNA, 15 bp, Homo sapiens
aagtgatataatgga

SEQ ID NO: 971890 - DNA, 15 bp, Homo sapiens
caagtgatataatgg

SEQ ID NO: 971891 - DNA, 15 bp, Homo sapiens
ccaagtgatataatg

SEQ ID NO: 971892 - DNA, 15 bp, Homo sapiens
accaagtgatataat

SEQ ID NO: 971893 - DNA, 15 bp, Homo sapiens
gaccaagtgatataa

SEQ ID NO: 971894 - DNA, 15 bp, Homo sapiens
agaccaagtgatata

SEQ ID NO: 971895 - DNA, 15 bp, Homo sapiens
cagaccaagtgatat

SEQ ID NO: 971896 - DNA, 15 bp, Homo sapiens
gcagaccaagtgata

SEQ ID NO: 971897 - DNA, 15 bp, Homo sapiens
agcagaccaagtgat

SEQ ID NO: 971898 - DNA, 15 bp, Homo sapiens
tagcagaccaagtga

SEQ ID NO: 971899 - DNA, 15 bp, Homo sapiens
ttagcagaccaagtg

SEQ ID NO: 971900 - DNA, 15 bp, Homo sapiens
tttagcagaccaagt

SEQ ID NO: 971901 - DNA, 15 bp, Homo sapiens
gtttagcagaccaag

SEQ ID NO: 971902 - DNA, 15 bp, Homo sapiens
tgtttagcagaccaa

SEQ ID NO: 971903 - DNA, 15 bp, Homo sapiens
atgtttagcagacca

SEQ ID NO: 971904 - DNA, 15 bp, Homo sapiens
aatgtttagcagacc

SEQ ID NO: 971905 - DNA, 15 bp, Homo sapiens
gaatgtttagcagac

SEQ ID NO: 971906 - DNA, 15 bp, Homo sapiens
agaatgtttagcaga

SEQ ID NO: 971907 - DNA, 15 bp, Homo sapiens
tagaatgtttagcag

SEQ ID NO: 971908 - DNA, 15 bp, Homo sapiens
gtagaatgtttagca

SEQ ID NO: 971909 - DNA, 15 bp, Homo sapiens
cgtagaatgtttagc

SEQ ID NO: 971910 - DNA, 15 bp, Homo sapiens
ccgtagaatgtttag

SEQ ID NO: 971911 - DNA, 15 bp, Homo sapiens
accgtagaatgttta

SEQ ID NO: 971912 - DNA, 15 bp, Homo sapiens
aaccgtagaatgttt

SEQ ID NO: 971913 - DNA, 15 bp, Homo sapiens
aaaccgtagaatgtt

SEQ ID NO: 971914 - DNA, 15 bp, Homo sapiens
caaaccgtagaatgt

SEQ ID NO: 971915 - DNA, 15 bp, Homo sapiens
ccaaaccgtagaatg

SEQ ID NO: 971916 - DNA, 15 bp, Homo sapiens
accaaaccgtagaat

SEQ ID NO: 971917 - DNA, 15 bp, Homo sapiens
taccaaaccgtagaa

SEQ ID NO: 971918 - DNA, 15 bp, Homo sapiens
ttaccaaaccgtaga

SEQ ID NO: 971919 - DNA, 15 bp, Homo sapiens
cttaccaaaccgtag

SEQ ID NO: 971920 - DNA, 15 bp, Homo sapiens
ccttaccaaaccgta

SEQ ID NO: 971921 - DNA, 15 bp, Homo sapiens
accttaccaaaccgt

SEQ ID NO: 971922 - DNA, 15 bp, Homo sapiens
caccttaccaaaccg

SEQ ID NO: 971923 - DNA, 15 bp, Homo sapiens
tcaccttaccaaacc

SEQ ID NO: 971924 - DNA, 15 bp, Homo sapiens
ttcaccttaccaaac

SEQ ID NO: 971925 - DNA, 15 bp, Homo sapiens
cttcaccttaccaaa

SEQ ID NO: 971926 - DNA, 15 bp, Homo sapiens
acttcaccttaccaa

SEQ ID NO: 971927 - DNA, 15 bp, Homo sapiens
cacttcaccttacca

SEQ ID NO: 971928 - DNA, 15 bp, Homo sapiens
tcacttcaccttacc

SEQ ID NO: 971929 - DNA, 15 bp, Homo sapiens
atcacttcaccttac

SEQ ID NO: 971930 - DNA, 15 bp, Homo sapiens
aatcacttcacctta

SEQ ID NO: 971931 - DNA, 15 bp, Homo sapiens
gaatcacttcacctt

SEQ ID NO: 971932 - DNA, 15 bp, Homo sapiens
tgaatcacttcacct

SEQ ID NO: 971933 - DNA, 15 bp, Homo sapiens
atgaatcacttcacc

SEQ ID NO: 971934 - DNA, 15 bp, Homo sapiens
catgaatcacttcac

SEQ ID NO: 971935 - DNA, 15 bp, Homo sapiens
tcatgaatcacttca

SEQ ID NO: 971936 - DNA, 15 bp, Homo sapiens
ttcatgaatcacttc

SEQ ID NO: 971937 - DNA, 15 bp, Homo sapiens
tttcatgaatcactt

SEQ ID NO: 971938 - DNA, 15 bp, Homo sapiens
atttcatgaatcact

SEQ ID NO: 971939 - DNA, 15 bp, Homo sapiens
aatttcatgaatcac

SEQ ID NO: 971940 - DNA, 15 bp, Homo sapiens
aaatttcatgaatca

SEQ ID NO: 971941 - DNA, 15 bp, Homo sapiens
aaaatttcatgaatc

SEQ ID NO: 971942 - DNA, 15 bp, Homo sapiens
caaaatttcatgaat

SEQ ID NO: 971943 - DNA, 15 bp, Homo sapiens
ccaaaatttcatgaa

SEQ ID NO: 971944 - DNA, 15 bp, Homo sapiens
accaaaatttcatga

SEQ ID NO: 971945 - DNA, 15 bp, Homo sapiens
aaccaaaatttcatg

SEQ ID NO: 971946 - DNA, 15 bp, Homo sapiens
aaaccaaaatttcat

SEQ ID NO: 971947 - DNA, 15 bp, Homo sapiens
aaaaccaaaatttca

SEQ ID NO: 971948 - DNA, 15 bp, Homo sapiens
taaaaccaaaatttc

SEQ ID NO: 971949 - DNA, 15 bp, Homo sapiens
ataaaaccaaaattt

SEQ ID NO: 971950 - DNA, 15 bp, Homo sapiens
aataaaaccaaaatt

SEQ ID NO: 971951 - DNA, 15 bp, Homo sapiens
aaataaaaccaaaat

SEQ ID NO: 971952 - DNA, 15 bp, Homo sapiens
aaaataaaaccaaaa

SEQ ID NO: 971953 - DNA, 15 bp, Homo sapiens
aaaaataaaaccaaa

SEQ ID NO: 971954 - DNA, 15 bp, Homo sapiens
aaaaaataaaaccaa

SEQ ID NO: 971955 - DNA, 15 bp, Homo sapiens
aaaaaaataaaacca

SEQ ID NO: 971956 - DNA, 15 bp, Homo sapiens
gaaaaaaataaaacc

SEQ ID NO: 971957 - DNA, 15 bp, Homo sapiens
ggaaaaaaataaaac

SEQ ID NO: 971958 - DNA, 15 bp, Homo sapiens
aggaaaaaaataaaa

SEQ ID NO: 971959 - DNA, 15 bp, Homo sapiens
caggaaaaaaataaa

SEQ ID NO: 971960 - DNA, 15 bp, Homo sapiens
tcaggaaaaaaataa

SEQ ID NO: 971961 - DNA, 15 bp, Homo sapiens
atcaggaaaaaaata

SEQ ID NO: 971962 - DNA, 15 bp, Homo sapiens
tatcaggaaaaaaat

SEQ ID NO: 971963 - DNA, 15 bp, Homo sapiens
gtatcaggaaaaaaa

SEQ ID NO: 971964 - DNA, 15 bp, Homo sapiens
agtatcaggaaaaaa

SEQ ID NO: 971965 - DNA, 15 bp, Homo sapiens
tagtatcaggaaaaa

SEQ ID NO: 971966 - DNA, 15 bp, Homo sapiens
ttagtatcaggaaaa

SEQ ID NO: 971967 - DNA, 15 bp, Homo sapiens
tttagtatcaggaaa

SEQ ID NO: 971968 - DNA, 15 bp, Homo sapiens
ttttagtatcaggaa

SEQ ID NO: 971969 - DNA, 15 bp, Homo sapiens
tttttagtatcagga

SEQ ID NO: 971970 - DNA, 15 bp, Homo sapiens
atttttagtatcagg

SEQ ID NO: 971971 - DNA, 15 bp, Homo sapiens
tatttttagtatcag

SEQ ID NO: 971972 - DNA, 15 bp, Homo sapiens
ttatttttagtatca

SEQ ID NO: 971973 - DNA, 15 bp, Homo sapiens
tttatttttagtatc

SEQ ID NO: 971974 - DNA, 15 bp, Homo sapiens
ttttatttttagtat

SEQ ID NO: 971975 - DNA, 15 bp, Homo sapiens
gttttatttttagta

SEQ ID NO: 971976 - DNA, 15 bp, Homo sapiens
tgttttatttttagt

SEQ ID NO: 971977 - DNA, 15 bp, Homo sapiens
atgttttatttttag

SEQ ID NO: 971978 - DNA, 15 bp, Homo sapiens
aatgttttattttta

SEQ ID NO: 971979 - DNA, 15 bp, Homo sapiens
gaatgttttattttt

SEQ ID NO: 971980 - DNA, 15 bp, Homo sapiens
agaatgttttatttt

SEQ ID NO: 971981 - DNA, 15 bp, Homo sapiens
aagaatgttttattt

SEQ ID NO: 971982 - DNA, 15 bp, Homo sapiens
aaagaatgttttatt

SEQ ID NO: 971983 - DNA, 15 bp, Homo sapiens
gaaagaatgttttat

SEQ ID NO: 971984 - DNA, 15 bp, Homo sapiens
tgaaagaatgtttta

SEQ ID NO: 971985 - DNA, 15 bp, Homo sapiens
gtgaaagaatgtttt

SEQ ID NO: 971986 - DNA, 15 bp, Homo sapiens
agtgaaagaatgttt

SEQ ID NO: 971987 - DNA, 15 bp, Homo sapiens
aagtgaaagaatgtt

SEQ ID NO: 971988 - DNA, 15 bp, Homo sapiens
caagtgaaagaatgt

SEQ ID NO: 971989 - DNA, 15 bp, Homo sapiens
ccaagtgaaagaatg

SEQ ID NO: 971990 - DNA, 15 bp, Homo sapiens
tccaagtgaaagaat

SEQ ID NO: 971991 - DNA, 15 bp, Homo sapiens
ttccaagtgaaagaa

SEQ ID NO: 971992 - DNA, 15 bp, Homo sapiens
tttccaagtgaaaga

SEQ ID NO: 971993 - DNA, 15 bp, Homo sapiens
atttccaagtgaaag

SEQ ID NO: 971994 - DNA, 15 bp, Homo sapiens
aatttccaagtgaaa

SEQ ID NO: 971995 - DNA, 15 bp, Homo sapiens
aaatttccaagtgaa

SEQ ID NO: 971996 - DNA, 15 bp, Homo sapiens
caaatttccaagtga

SEQ ID NO: 971997 - DNA, 15 bp, Homo sapiens
ccaaatttccaagtg

SEQ ID NO: 971998 - DNA, 15 bp, Homo sapiens
tccaaatttccaagt

SEQ ID NO: 971999 - DNA, 15 bp, Homo sapiens
gtccaaatttccaag

SEQ ID NO: 972000 - DNA, 15 bp, Homo sapiens
tgtccaaatttccaa

SEQ ID NO: 972001 - DNA, 15 bp, Homo sapiens
gtgtccaaatttcca

SEQ ID NO: 972002 - DNA, 15 bp, Homo sapiens
tgtgtccaaatttcc

SEQ ID NO: 972003 - DNA, 15 bp, Homo sapiens
ctgtgtccaaatttc

SEQ ID NO: 972004 - DNA, 15 bp, Homo sapiens
tctgtgtccaaattt

SEQ ID NO: 972005 - DNA, 15 bp, Homo sapiens
ttctgtgtccaaatt

SEQ ID NO: 972006 - DNA, 15 bp, Homo sapiens
gttctgtgtccaaat

SEQ ID NO: 972007 - DNA, 15 bp, Homo sapiens
tgttctgtgtccaaa

SEQ ID NO: 972008 - DNA, 15 bp, Homo sapiens
gtgttctgtgtccaa

SEQ ID NO: 972009 - DNA, 15 bp, Homo sapiens
ggtgttctgtgtcca

SEQ ID NO: 972010 - DNA, 15 bp, Homo sapiens
tggtgttctgtgtcc

SEQ ID NO: 972011 - DNA, 15 bp, Homo sapiens
ttggtgttctgtgtc

SEQ ID NO: 972012 - DNA, 15 bp, Homo sapiens
tttggtgttctgtgt

SEQ ID NO: 972013 - DNA, 15 bp, Homo sapiens
ttttggtgttctgtg

SEQ ID NO: 972014 - DNA, 15 bp, Homo sapiens
tttttggtgttctgt

SEQ ID NO: 972015 - DNA, 15 bp, Homo sapiens
ttttttggtgttctg

SEQ ID NO: 972016 - DNA, 15 bp, Homo sapiens
tttttttggtgttct

SEQ ID NO: 972017 - DNA, 15 bp, Homo sapiens
ttttttttggtgttc

SEQ ID NO: 972018 - DNA, 15 bp, Homo sapiens
attttttttggtgtt

SEQ ID NO: 972019 - DNA, 15 bp, Homo sapiens
gattttttttggtgt

SEQ ID NO: 972020 - DNA, 15 bp, Homo sapiens
ggattttttttggtg

SEQ ID NO: 972021 - DNA, 15 bp, Homo sapiens
tggattttttttggt

SEQ ID NO: 972022 - DNA, 15 bp, Homo sapiens
atggattttttttgg

SEQ ID NO: 972023 - DNA, 15 bp, Homo sapiens
tatggattttttttg

SEQ ID NO: 972024 - DNA, 15 bp, Homo sapiens
ttatggatttttttt

SEQ ID NO: 972025 - DNA, 15 bp, Homo sapiens
attatggattttttt

SEQ ID NO: 972026 - DNA, 15 bp, Homo sapiens
gattatggatttttt

SEQ ID NO: 972027 - DNA, 15 bp, Homo sapiens
agattatggattttt

SEQ ID NO: 972028 - DNA, 15 bp, Homo sapiens
gagattatggatttt

SEQ ID NO: 972029 - DNA, 15 bp, Homo sapiens
tgagattatggattt

SEQ ID NO: 972030 - DNA, 15 bp, Homo sapiens
atgagattatggatt

SEQ ID NO: 972031 - DNA, 15 bp, Homo sapiens
gatgagattatggat

SEQ ID NO: 972032 - DNA, 15 bp, Homo sapiens
agatgagattatgga

SEQ ID NO: 972033 - DNA, 15 bp, Homo sapiens
gagatgagattatgg

SEQ ID NO: 972034 - DNA, 15 bp, Homo sapiens
agagatgagattatg

SEQ ID NO: 972035 - DNA, 15 bp, Homo sapiens
gagagatgagattat

SEQ ID NO: 972036 - DNA, 15 bp, Homo sapiens
agagagatgagatta

SEQ ID NO: 972037 - DNA, 15 bp, Homo sapiens
aagagagatgagatt

SEQ ID NO: 972038 - DNA, 15 bp, Homo sapiens
aaagagagatgagat

SEQ ID NO: 972039 - DNA, 15 bp, Homo sapiens
aaaagagagatgaga

SEQ ID NO: 972040 - DNA, 15 bp, Homo sapiens
aaaaagagagatgag

SEQ ID NO: 972041 - DNA, 15 bp, Homo sapiens
gaaaaagagagatga

SEQ ID NO: 972042 - DNA, 15 bp, Homo sapiens
agaaaaagagagatg

SEQ ID NO: 972043 - DNA, 15 bp, Homo sapiens
cagaaaaagagagat

SEQ ID NO: 972044 - DNA, 15 bp, Homo sapiens
acagaaaaagagaga

SEQ ID NO: 972045 - DNA, 15 bp, Homo sapiens
gacagaaaaagagag

SEQ ID NO: 972046 - DNA, 15 bp, Homo sapiens
agacagaaaaagaga

SEQ ID NO: 972047 - DNA, 15 bp, Homo sapiens
aagacagaaaaagag

SEQ ID NO: 972048 - DNA, 15 bp, Homo sapiens
aaagacagaaaaaga

SEQ ID NO: 972049 - DNA, 15 bp, Homo sapiens
aaaagacagaaaaag

SEQ ID NO: 972050 - DNA, 15 bp, Homo sapiens
gaaaagacagaaaaa

SEQ ID NO: 972051 - DNA, 15 bp, Homo sapiens
ggaaaagacagaaaa

SEQ ID NO: 972052 - DNA, 15 bp, Homo sapiens
aggaaaagacagaaa

SEQ ID NO: 972053 - DNA, 15 bp, Homo sapiens
aaggaaaagacagaa

SEQ ID NO: 972054 - DNA, 15 bp, Homo sapiens
gaaggaaaagacaga

SEQ ID NO: 972055 - DNA, 15 bp, Homo sapiens
ggaaggaaaagacag

SEQ ID NO: 972056 - DNA, 15 bp, Homo sapiens
aggaaggaaaagaca

SEQ ID NO: 972057 - DNA, 15 bp, Homo sapiens
aaggaaggaaaagac

SEQ ID NO: 972058 - DNA, 15 bp, Homo sapiens
aaaggaaggaaaaga

SEQ ID NO: 972059 - DNA, 15 bp, Homo sapiens
aaaaggaaggaaaag

SEQ ID NO: 972060 - DNA, 15 bp, Homo sapiens
aaaaaggaaggaaaa

SEQ ID NO: 972061 - DNA, 15 bp, Homo sapiens
aaaaaaggaaggaaa

SEQ ID NO: 972062 - DNA, 15 bp, Homo sapiens
gaaaaaaggaaggaa

SEQ ID NO: 972063 - DNA, 15 bp, Homo sapiens
ggaaaaaaggaagga

SEQ ID NO: 972064 - DNA, 15 bp, Homo sapiens
gggaaaaaaggaagg

SEQ ID NO: 972065 - DNA, 15 bp, Homo sapiens
agggaaaaaaggaag

SEQ ID NO: 972066 - DNA, 15 bp, Homo sapiens
aagggaaaaaaggaa

SEQ ID NO: 972067 - DNA, 15 bp, Homo sapiens
aaagggaaaaaagga

SEQ ID NO: 972068 - DNA, 15 bp, Homo sapiens
taaagggaaaaaagg

SEQ ID NO: 972069 - DNA, 15 bp, Homo sapiens
ttaaagggaaaaaag

SEQ ID NO: 972070 - DNA, 15 bp, Homo sapiens
tttaaagggaaaaaa

SEQ ID NO: 972071 - DNA, 15 bp, Homo sapiens
ttttaaagggaaaaa

SEQ ID NO: 972072 - DNA, 15 bp, Homo sapiens
tttttaaagggaaaa

SEQ ID NO: 972073 - DNA, 15 bp, Homo sapiens
gtttttaaagggaaa

SEQ ID NO: 972074 - DNA, 15 bp, Homo sapiens
tgtttttaaagggaa

SEQ ID NO: 972075 - DNA, 15 bp, Homo sapiens
ttgtttttaaaggga

SEQ ID NO: 972076 - DNA, 15 bp, Homo sapiens
attgtttttaaaggg

SEQ ID NO: 972077 - DNA, 15 bp, Homo sapiens
tattgtttttaaagg

SEQ ID NO: 972078 - DNA, 15 bp, Homo sapiens
ttattgtttttaaag

SEQ ID NO: 972079 - DNA, 15 bp, Homo sapiens
tttattgtttttaaa

SEQ ID NO: 972080 - DNA, 15 bp, Homo sapiens
ctttattgtttttaa

SEQ ID NO: 972081 - DNA, 15 bp, Homo sapiens
tctttattgttttta

SEQ ID NO: 972082 - DNA, 15 bp, Homo sapiens
ctctttattgttttt

SEQ ID NO: 972083 - DNA, 15 bp, Homo sapiens
actctttattgtttt

SEQ ID NO: 972084 - DNA, 15 bp, Homo sapiens
cactctttattgttt

SEQ ID NO: 972085 - DNA, 15 bp, Homo sapiens
tcactctttattgtt

SEQ ID NO: 972086 - DNA, 15 bp, Homo sapiens
ttcactctttattgt

SEQ ID NO: 972087 - DNA, 15 bp, Homo sapiens
tttcactctttattg

SEQ ID NO: 972088 - DNA, 15 bp, Homo sapiens
gtttcactctttatt

SEQ ID NO: 972089 - DNA, 15 bp, Homo sapiens
ggtttcactctttat

SEQ ID NO: 972090 - DNA, 15 bp, Homo sapiens
aggtttcactcttta

SEQ ID NO: 972091 - DNA, 15 bp, Homo sapiens
taggtttcactcttt

SEQ ID NO: 972092 - DNA, 15 bp, Homo sapiens
gtaggtttcactctt

SEQ ID NO: 972093 - DNA, 15 bp, Homo sapiens
ggtaggtttcactct

SEQ ID NO: 972094 - DNA, 15 bp, Homo sapiens
aggtaggtttcactc

SEQ ID NO: 972095 - DNA, 15 bp, Homo sapiens
caggtaggtttcact

SEQ ID NO: 972096 - DNA, 15 bp, Homo sapiens
acaggtaggtttcac

SEQ ID NO: 972097 - DNA, 15 bp, Homo sapiens
aacaggtaggtttca

SEQ ID NO: 972098 - DNA, 15 bp, Homo sapiens
gaacaggtaggtttc

SEQ ID NO: 972099 - DNA, 15 bp, Homo sapiens
agaacaggtaggttt

SEQ ID NO: 972100 - DNA, 15 bp, Homo sapiens
gagaacaggtaggtt

SEQ ID NO: 972101 - DNA, 15 bp, Homo sapiens
ggagaacaggtaggt

SEQ ID NO: 972102 - DNA, 15 bp, Homo sapiens
gggagaacaggtagg

SEQ ID NO: 972103 - DNA, 15 bp, Homo sapiens
agggagaacaggtag

SEQ ID NO: 972104 - DNA, 15 bp, Homo sapiens
gagggagaacaggta

SEQ ID NO: 972105 - DNA, 15 bp, Homo sapiens
agagggagaacaggt

SEQ ID NO: 972106 - DNA, 15 bp, Homo sapiens
tagagggagaacagg

SEQ ID NO: 972107 - DNA, 15 bp, Homo sapiens
ttagagggagaacag

SEQ ID NO: 972108 - DNA, 15 bp, Homo sapiens
attagagggagaaca

SEQ ID NO: 972109 - DNA, 15 bp, Homo sapiens
aattagagggagaac

SEQ ID NO: 972110 - DNA, 15 bp, Homo sapiens
aaattagagggagaa

SEQ ID NO: 972111 - DNA, 15 bp, Homo sapiens
taaattagagggaga

SEQ ID NO: 972112 - DNA, 15 bp, Homo sapiens
ttaaattagagggag

SEQ ID NO: 972113 - DNA, 15 bp, Homo sapiens
attaaattagaggga

SEQ ID NO: 972114 - DNA, 15 bp, Homo sapiens
aattaaattagaggg

SEQ ID NO: 972115 - DNA, 15 bp, Homo sapiens
gaattaaattagagg

SEQ ID NO: 972116 - DNA, 15 bp, Homo sapiens
ggaattaaattagag

SEQ ID NO: 972117 - DNA, 15 bp, Homo sapiens
aggaattaaattaga

SEQ ID NO: 972118 - DNA, 15 bp, Homo sapiens
taggaattaaattag

SEQ ID NO: 972119 - DNA, 15 bp, Homo sapiens
ttaggaattaaatta

SEQ ID NO: 972120 - DNA, 15 bp, Homo sapiens
tttaggaattaaatt

SEQ ID NO: 972121 - DNA, 15 bp, Homo sapiens
atttaggaattaaat

SEQ ID NO: 972122 - DNA, 15 bp, Homo sapiens
tatttaggaattaaa

SEQ ID NO: 972123 - DNA, 15 bp, Homo sapiens
atatttaggaattaa

SEQ ID NO: 972124 - DNA, 15 bp, Homo sapiens
tatatttaggaatta

SEQ ID NO: 972125 - DNA, 15 bp, Homo sapiens
ttatatttaggaatt

SEQ ID NO: 972126 - DNA, 15 bp, Homo sapiens
attatatttaggaat

SEQ ID NO: 972127 - DNA, 15 bp, Homo sapiens
gattatatttaggaa

SEQ ID NO: 972128 - DNA, 15 bp, Homo sapiens
tgattatatttagga

SEQ ID NO: 972129 - DNA, 15 bp, Homo sapiens
gtgattatatttagg

SEQ ID NO: 972130 - DNA, 15 bp, Homo sapiens
agtgattatatttag

SEQ ID NO: 972131 - DNA, 15 bp, Homo sapiens
cagtgattatattta

SEQ ID NO: 972132 - DNA, 15 bp, Homo sapiens
acagtgattatattt

SEQ ID NO: 972133 - DNA, 15 bp, Homo sapiens
gacagtgattatatt

SEQ ID NO: 972134 - DNA, 15 bp, Homo sapiens
tgacagtgattatat

SEQ ID NO: 972135 - DNA, 15 bp, Homo sapiens
ttgacagtgattata

SEQ ID NO: 972136 - DNA, 15 bp, Homo sapiens
attgacagtgattat

SEQ ID NO: 972137 - DNA, 15 bp, Homo sapiens
tattgacagtgatta

SEQ ID NO: 972138 - DNA, 15 bp, Homo sapiens
atattgacagtgatt

SEQ ID NO: 972139 - DNA, 15 bp, Homo sapiens
gatattgacagtgat

SEQ ID NO: 972140 - DNA, 15 bp, Homo sapiens
agatattgacagtga

SEQ ID NO: 972141 - DNA, 15 bp, Homo sapiens
aagatattgacagtg

SEQ ID NO: 972142 - DNA, 15 bp, Homo sapiens
caagatattgacagt

SEQ ID NO: 972143 - DNA, 15 bp, Homo sapiens
ccaagatattgacag

SEQ ID NO: 972144 - DNA, 15 bp, Homo sapiens
tccaagatattgaca

SEQ ID NO: 972145 - DNA, 15 bp, Homo sapiens
gtccaagatattgac

SEQ ID NO: 972146 - DNA, 15 bp, Homo sapiens
tgtccaagatattga

SEQ ID NO: 972147 - DNA, 15 bp, Homo sapiens
atgtccaagatattg

SEQ ID NO: 972148 - DNA, 15 bp, Homo sapiens
aatgtccaagatatt

SEQ ID NO: 972149 - DNA, 15 bp, Homo sapiens
aaatgtccaagatat

SEQ ID NO: 972150 - DNA, 15 bp, Homo sapiens
gaaatgtccaagata

SEQ ID NO: 972151 - DNA, 15 bp, Homo sapiens
ggaaatgtccaagat

SEQ ID NO: 972152 - DNA, 15 bp, Homo sapiens
aggaaatgtccaaga

SEQ ID NO: 972153 - DNA, 15 bp, Homo sapiens
caggaaatgtccaag

SEQ ID NO: 972154 - DNA, 15 bp, Homo sapiens
acaggaaatgtccaa

SEQ ID NO: 972155 - DNA, 15 bp, Homo sapiens
cacaggaaatgtcca

SEQ ID NO: 972156 - DNA, 15 bp, Homo sapiens
acacaggaaatgtcc

SEQ ID NO: 972157 - DNA, 15 bp, Homo sapiens
gacacaggaaatgtc

SEQ ID NO: 972158 - DNA, 15 bp, Homo sapiens
agacacaggaaatgt

SEQ ID NO: 972159 - DNA, 15 bp, Homo sapiens
tagacacaggaaatg

SEQ ID NO: 972160 - DNA, 15 bp, Homo sapiens
ttagacacaggaaat

SEQ ID NO: 972161 - DNA, 15 bp, Homo sapiens
tttagacacaggaaa

SEQ ID NO: 972162 - DNA, 15 bp, Homo sapiens
gtttagacacaggaa

SEQ ID NO: 972163 - DNA, 15 bp, Homo sapiens
tgtttagacacagga

SEQ ID NO: 972164 - DNA, 15 bp, Homo sapiens
gtgtttagacacagg

SEQ ID NO: 972165 - DNA, 15 bp, Homo sapiens
tgtgtttagacacag

SEQ ID NO: 972166 - DNA, 15 bp, Homo sapiens
gtgtgtttagacaca

SEQ ID NO: 972167 - DNA, 15 bp, Homo sapiens
tgtgtgtttagacac

SEQ ID NO: 972168 - DNA, 15 bp, Homo sapiens
gtgtgtgtttagaca

SEQ ID NO: 972169 - DNA, 15 bp, Homo sapiens
tgtgtgtgtttagac

SEQ ID NO: 972170 - DNA, 15 bp, Homo sapiens
gtgtgtgtgtttaga

SEQ ID NO: 972171 - DNA, 15 bp, Homo sapiens
tgtgtgtgtgtttag

SEQ ID NO: 972172 - DNA, 15 bp, Homo sapiens
gtgtgtgtgtgttta

SEQ ID NO: 972173 - DNA, 15 bp, Homo sapiens
tgtgtgtgtgtgttt

SEQ ID NO: 972174 - DNA, 15 bp, Homo sapiens
gtgtgtgtgtgtgtt

SEQ ID NO: 972175 - DNA, 15 bp, Homo sapiens
agtgtgtgtgtgtgt

SEQ ID NO: 972176 - DNA, 15 bp, Homo sapiens
aagtgtgtgtgtgtg

SEQ ID NO: 972177 - DNA, 15 bp, Homo sapiens
aaagtgtgtgtgtgt

SEQ ID NO: 972178 - DNA, 15 bp, Homo sapiens
aaaagtgtgtgtgtg

SEQ ID NO: 972179 - DNA, 15 bp, Homo sapiens
aaaaagtgtgtgtgt

SEQ ID NO: 972180 - DNA, 15 bp, Homo sapiens
aaaaaagtgtgtgtg

SEQ ID NO: 972181 - DNA, 15 bp, Homo sapiens
aaaaaaagtgtgtgt

SEQ ID NO: 972182 - DNA, 15 bp, Homo sapiens
aaaaaaaagtgtgtg

SEQ ID NO: 972183 - DNA, 15 bp, Homo sapiens
aaaaaaaaagtgtgt

SEQ ID NO: 972184 - DNA, 15 bp, Homo sapiens
aaaaaaaaaagtgtg

SEQ ID NO: 972185 - DNA, 15 bp, Homo sapiens
gaaaaaaaaaagtgt

SEQ ID NO: 972186 - DNA, 15 bp, Homo sapiens
tgaaaaaaaaaagtg

SEQ ID NO: 972187 - DNA, 15 bp, Homo sapiens
ctgaaaaaaaaaagt

SEQ ID NO: 972188 - DNA, 15 bp, Homo sapiens
gctgaaaaaaaaaag

SEQ ID NO: 972189 - DNA, 15 bp, Homo sapiens
tgctgaaaaaaaaaa

SEQ ID NO: 972190 - DNA, 15 bp, Homo sapiens
ttgctgaaaaaaaaa

SEQ ID NO: 972191 - DNA, 15 bp, Homo sapiens
tttgctgaaaaaaaa

SEQ ID NO: 972192 - DNA, 15 bp, Homo sapiens
ttttgctgaaaaaaa

SEQ ID NO: 972193 - DNA, 15 bp, Homo sapiens
cttttgctgaaaaaa

SEQ ID NO: 972194 - DNA, 15 bp, Homo sapiens
acttttgctgaaaaa

SEQ ID NO: 972195 - DNA, 15 bp, Homo sapiens
cacttttgctgaaaa

SEQ ID NO: 972196 - DNA, 15 bp, Homo sapiens
ccacttttgctgaaa

SEQ ID NO: 972197 - DNA, 15 bp, Homo sapiens
tccacttttgctgaa

SEQ ID NO: 972198 - DNA, 15 bp, Homo sapiens
atccacttttgctga

SEQ ID NO: 972199 - DNA, 15 bp, Homo sapiens
aatccacttttgctg

SEQ ID NO: 972200 - DNA, 15 bp, Homo sapiens
aaatccacttttgct

SEQ ID NO: 972201 - DNA, 15 bp, Homo sapiens
gaaatccacttttgc

SEQ ID NO: 972202 - DNA, 15 bp, Homo sapiens
agaaatccacttttg

SEQ ID NO: 972203 - DNA, 15 bp, Homo sapiens
cagaaatccactttt

SEQ ID NO: 972204 - DNA, 15 bp, Homo sapiens
gcagaaatccacttt

SEQ ID NO: 972205 - DNA, 15 bp, Homo sapiens
agcagaaatccactt

SEQ ID NO: 972206 - DNA, 15 bp, Homo sapiens
tagcagaaatccact

SEQ ID NO: 972207 - DNA, 15 bp, Homo sapiens
gtagcagaaatccac

SEQ ID NO: 972208 - DNA, 15 bp, Homo sapiens
tgtagcagaaatcca

SEQ ID NO: 972209 - DNA, 15 bp, Homo sapiens
atgtagcagaaatcc

SEQ ID NO: 972210 - DNA, 15 bp, Homo sapiens
catgtagcagaaatc

SEQ ID NO: 972211 - DNA, 15 bp, Homo sapiens
acatgtagcagaaat

SEQ ID NO: 972212 - DNA, 15 bp, Homo sapiens
tacatgtagcagaaa

SEQ ID NO: 972213 - DNA, 15 bp, Homo sapiens
ctacatgtagcagaa

SEQ ID NO: 972214 - DNA, 15 bp, Homo sapiens
actacatgtagcaga

SEQ ID NO: 972215 - DNA, 15 bp, Homo sapiens
cactacatgtagcag

SEQ ID NO: 972216 - DNA, 15 bp, Homo sapiens
acactacatgtagca

SEQ ID NO: 972217 - DNA, 15 bp, Homo sapiens
aacactacatgtagc

SEQ ID NO: 972218 - DNA, 15 bp, Homo sapiens
gaacactacatgtag

SEQ ID NO: 972219 - DNA, 15 bp, Homo sapiens
agaacactacatgta

SEQ ID NO: 972220 - DNA, 15 bp, Homo sapiens
cagaacactacatgt

SEQ ID NO: 972221 - DNA, 15 bp, Homo sapiens
gcagaacactacatg

SEQ ID NO: 972222 - DNA, 15 bp, Homo sapiens
tgcagaacactacat

SEQ ID NO: 972223 - DNA, 15 bp, Homo sapiens
ttgcagaacactaca

SEQ ID NO: 972224 - DNA, 15 bp, Homo sapiens
gttgcagaacactac

SEQ ID NO: 972225 - DNA, 15 bp, Homo sapiens
agttgcagaacacta

SEQ ID NO: 972226 - DNA, 15 bp, Homo sapiens
aagttgcagaacact

SEQ ID NO: 972227 - DNA, 15 bp, Homo sapiens
taagttgcagaacac

SEQ ID NO: 972228 - DNA, 15 bp, Homo sapiens
gtaagttgcagaaca

SEQ ID NO: 972229 - DNA, 15 bp, Homo sapiens
agtaagttgcagaac

SEQ ID NO: 972230 - DNA, 15 bp, Homo sapiens
aagtaagttgcagaa

SEQ ID NO: 972231 - DNA, 15 bp, Homo sapiens
aaagtaagttgcaga

SEQ ID NO: 972232 - DNA, 15 bp, Homo sapiens
gaaagtaagttgcag

SEQ ID NO: 972233 - DNA, 15 bp, Homo sapiens
agaaagtaagttgca

SEQ ID NO: 972234 - DNA, 15 bp, Homo sapiens
tagaaagtaagttgc

SEQ ID NO: 972235 - DNA, 15 bp, Homo sapiens
atagaaagtaagttg

SEQ ID NO: 972236 - DNA, 15 bp, Homo sapiens
catagaaagtaagtt

SEQ ID NO: 972237 - DNA, 15 bp, Homo sapiens
acatagaaagtaagt

SEQ ID NO: 972238 - DNA, 15 bp, Homo sapiens
cacatagaaagtaag

SEQ ID NO: 972239 - DNA, 15 bp, Homo sapiens
acacatagaaagtaa

SEQ ID NO: 972240 - DNA, 15 bp, Homo sapiens
aacacatagaaagta

SEQ ID NO: 972241 - DNA, 15 bp, Homo sapiens
aaacacatagaaagt

SEQ ID NO: 972242 - DNA, 15 bp, Homo sapiens
taaacacatagaaag

SEQ ID NO: 972243 - DNA, 15 bp, Homo sapiens
gtaaacacatagaaa

SEQ ID NO: 972244 - DNA, 15 bp, Homo sapiens
tgtaaacacatagaa

SEQ ID NO: 972245 - DNA, 15 bp, Homo sapiens
ttgtaaacacataga

SEQ ID NO: 972246 - DNA, 15 bp, Homo sapiens
tttgtaaacacatag

SEQ ID NO: 972247 - DNA, 15 bp, Homo sapiens
ttttgtaaacacata

SEQ ID NO: 972248 - DNA, 15 bp, Homo sapiens
attttgtaaacacat

SEQ ID NO: 972249 - DNA, 15 bp, Homo sapiens
gattttgtaaacaca

SEQ ID NO: 972250 - DNA, 15 bp, Homo sapiens
tgattttgtaaacac

SEQ ID NO: 972251 - DNA, 15 bp, Homo sapiens
ctgattttgtaaaca

SEQ ID NO: 972252 - DNA, 15 bp, Homo sapiens
actgattttgtaaac

SEQ ID NO: 972253 - DNA, 15 bp, Homo sapiens
tactgattttgtaaa

SEQ ID NO: 972254 - DNA, 15 bp, Homo sapiens
gtactgattttgtaa

SEQ ID NO: 972255 - DNA, 15 bp, Homo sapiens
tgtactgattttgta

SEQ ID NO: 972256 - DNA, 15 bp, Homo sapiens
atgtactgattttgt

SEQ ID NO: 972257 - DNA, 15 bp, Homo sapiens
catgtactgattttg

SEQ ID NO: 972258 - DNA, 15 bp, Homo sapiens
acatgtactgatttt

SEQ ID NO: 972259 - DNA, 15 bp, Homo sapiens
tacatgtactgattt

SEQ ID NO: 972260 - DNA, 15 bp, Homo sapiens
gtacatgtactgatt

SEQ ID NO: 972261 - DNA, 15 bp, Homo sapiens
tgtacatgtactgat

SEQ ID NO: 972262 - DNA, 15 bp, Homo sapiens
atgtacatgtactga

SEQ ID NO: 972263 - DNA, 15 bp, Homo sapiens
tatgtacatgtactg

SEQ ID NO: 972264 - DNA, 15 bp, Homo sapiens
atatgtacatgtact

SEQ ID NO: 972265 - DNA, 15 bp, Homo sapiens
catatgtacatgtac

SEQ ID NO: 972266 - DNA, 15 bp, Homo sapiens
gcatatgtacatgta

SEQ ID NO: 972267 - DNA, 15 bp, Homo sapiens
agcatatgtacatgt

SEQ ID NO: 972268 - DNA, 15 bp, Homo sapiens
cagcatatgtacatg

SEQ ID NO: 972269 - DNA, 15 bp, Homo sapiens
tcagcatatgtacat

SEQ ID NO: 972270 - DNA, 15 bp, Homo sapiens
ttcagcatatgtaca

SEQ ID NO: 972271 - DNA, 15 bp, Homo sapiens
attcagcatatgtac

SEQ ID NO: 972272 - DNA, 15 bp, Homo sapiens
aattcagcatatgta

SEQ ID NO: 972273 - DNA, 15 bp, Homo sapiens
gaattcagcatatgt

SEQ ID NO: 972274 - DNA, 15 bp, Homo sapiens
tgaattcagcatatg

SEQ ID NO: 972275 - DNA, 15 bp, Homo sapiens
ctgaattcagcatat

SEQ ID NO: 972276 - DNA, 15 bp, Homo sapiens
actgaattcagcata

SEQ ID NO: 972277 - DNA, 15 bp, Homo sapiens
gactgaattcagcat

SEQ ID NO: 972278 - DNA, 15 bp, Homo sapiens
ggactgaattcagca

SEQ ID NO: 972279 - DNA, 15 bp, Homo sapiens
aggactgaattcagc

SEQ ID NO: 972280 - DNA, 15 bp, Homo sapiens
aaggactgaattcag

SEQ ID NO: 972281 - DNA, 15 bp, Homo sapiens
taaggactgaattca

SEQ ID NO: 972282 - DNA, 15 bp, Homo sapiens
ttaaggactgaattc

SEQ ID NO: 972283 - DNA, 15 bp, Homo sapiens
attaaggactgaatt

SEQ ID NO: 972284 - DNA, 15 bp, Homo sapiens
cattaaggactgaat

SEQ ID NO: 972285 - DNA, 15 bp, Homo sapiens
ccattaaggactgaa

SEQ ID NO: 972286 - DNA, 15 bp, Homo sapiens
accattaaggactga

SEQ ID NO: 972287 - DNA, 15 bp, Homo sapiens
taccattaaggactg

SEQ ID NO: 972288 - DNA, 15 bp, Homo sapiens
ataccattaaggact

SEQ ID NO: 972289 - DNA, 15 bp, Homo sapiens
aataccattaaggac

SEQ ID NO: 972290 - DNA, 15 bp, Homo sapiens
taataccattaagga

SEQ ID NO: 972291 - DNA, 15 bp, Homo sapiens
ataataccattaagg

SEQ ID NO: 972292 - DNA, 15 bp, Homo sapiens
tataataccattaag

SEQ ID NO: 972293 - DNA, 15 bp, Homo sapiens
atataataccattaa

SEQ ID NO: 972294 - DNA, 15 bp, Homo sapiens
aatataataccatta

SEQ ID NO: 972295 - DNA, 15 bp, Homo sapiens
aaatataataccatt

SEQ ID NO: 972296 - DNA, 15 bp, Homo sapiens
aaaatataataccat

SEQ ID NO: 972297 - DNA, 15 bp, Homo sapiens
caaaatataatacca

SEQ ID NO: 972298 - DNA, 15 bp, Homo sapiens
acaaaatataatacc

SEQ ID NO: 972299 - DNA, 15 bp, Homo sapiens
cacaaaatataatac

SEQ ID NO: 972300 - DNA, 15 bp, Homo sapiens
tcacaaaatataata

SEQ ID NO: 972301 - DNA, 15 bp, Homo sapiens
ttcacaaaatataat

SEQ ID NO: 972302 - DNA, 15 bp, Homo sapiens
attcacaaaatataa

SEQ ID NO: 972303 - DNA, 15 bp, Homo sapiens
tattcacaaaatata

SEQ ID NO: 972304 - DNA, 15 bp, Homo sapiens
atattcacaaaatat

SEQ ID NO: 972305 - DNA, 15 bp, Homo sapiens
tatattcacaaaata

SEQ ID NO: 972306 - DNA, 15 bp, Homo sapiens
gtatattcacaaaat

SEQ ID NO: 972307 - DNA, 15 bp, Homo sapiens
ggtatattcacaaaa

SEQ ID NO: 972308 - DNA, 15 bp, Homo sapiens
tggtatattcacaaa

SEQ ID NO: 972309 - DNA, 15 bp, Homo sapiens
ttggtatattcacaa

SEQ ID NO: 972310 - DNA, 15 bp, Homo sapiens
tttggtatattcaca

SEQ ID NO: 972311 - DNA, 15 bp, Homo sapiens
ttttggtatattcac

SEQ ID NO: 972312 - DNA, 15 bp, Homo sapiens
attttggtatattca

SEQ ID NO: 972313 - DNA, 15 bp, Homo sapiens
aattttggtatattc

SEQ ID NO: 972314 - DNA, 15 bp, Homo sapiens
aaattttggtatatt

SEQ ID NO: 972315 - DNA, 15 bp, Homo sapiens
caaattttggtatat

SEQ ID NO: 972316 - DNA, 15 bp, Homo sapiens
acaaattttggtata

SEQ ID NO: 972317 - DNA, 15 bp, Homo sapiens
aacaaattttggtat

SEQ ID NO: 972318 - DNA, 15 bp, Homo sapiens
aaacaaattttggta

SEQ ID NO: 972319 - DNA, 15 bp, Homo sapiens
taaacaaattttggt

SEQ ID NO: 972320 - DNA, 15 bp, Homo sapiens
ttaaacaaattttgg

SEQ ID NO: 972321 - DNA, 15 bp, Homo sapiens
gttaaacaaattttg

SEQ ID NO: 972322 - DNA, 15 bp, Homo sapiens
ggttaaacaaatttt

SEQ ID NO: 972323 - DNA, 15 bp, Homo sapiens
tggttaaacaaattt

SEQ ID NO: 972324 - DNA, 15 bp, Homo sapiens
gtggttaaacaaatt

SEQ ID NO: 972325 - DNA, 15 bp, Homo sapiens
agtggttaaacaaat

SEQ ID NO: 972326 - DNA, 15 bp, Homo sapiens
aagtggttaaacaaa

SEQ ID NO: 972327 - DNA, 15 bp, Homo sapiens
taagtggttaaacaa

SEQ ID NO: 972328 - DNA, 15 bp, Homo sapiens
ctaagtggttaaaca

SEQ ID NO: 972329 - DNA, 15 bp, Homo sapiens
tctaagtggttaaac

SEQ ID NO: 972330 - DNA, 15 bp, Homo sapiens
gtctaagtggttaaa

SEQ ID NO: 972331 - DNA, 15 bp, Homo sapiens
tgtctaagtggttaa

SEQ ID NO: 972332 - DNA, 15 bp, Homo sapiens
ttgtctaagtggtta

SEQ ID NO: 972333 - DNA, 15 bp, Homo sapiens
attgtctaagtggtt

SEQ ID NO: 972334 - DNA, 15 bp, Homo sapiens
gattgtctaagtggt

SEQ ID NO: 972335 - DNA, 15 bp, Homo sapiens
agattgtctaagtgg

SEQ ID NO: 972336 - DNA, 15 bp, Homo sapiens
tagattgtctaagtg

SEQ ID NO: 972337 - DNA, 15 bp, Homo sapiens
ctagattgtctaagt

SEQ ID NO: 972338 - DNA, 15 bp, Homo sapiens
cctagattgtctaag

SEQ ID NO: 972339 - DNA, 15 bp, Homo sapiens
tcctagattgtctaa

SEQ ID NO: 972340 - DNA, 15 bp, Homo sapiens
atcctagattgtcta

SEQ ID NO: 972341 - DNA, 15 bp, Homo sapiens
tatcctagattgtct

SEQ ID NO: 972342 - DNA, 15 bp, Homo sapiens
atatcctagattgtc

SEQ ID NO: 972343 - DNA, 15 bp, Homo sapiens
aatatcctagattgt

SEQ ID NO: 972344 - DNA, 15 bp, Homo sapiens
gaatatcctagattg

SEQ ID NO: 972345 - DNA, 15 bp, Homo sapiens
agaatatcctagatt

SEQ ID NO: 972346 - DNA, 15 bp, Homo sapiens
gagaatatcctagat

SEQ ID NO: 972347 - DNA, 15 bp, Homo sapiens
tgagaatatcctaga

SEQ ID NO: 972348 - DNA, 15 bp, Homo sapiens
ctgagaatatcctag

SEQ ID NO: 972349 - DNA, 15 bp, Homo sapiens
actgagaatatccta

SEQ ID NO: 972350 - DNA, 15 bp, Homo sapiens
aactgagaatatcct

SEQ ID NO: 972351 - DNA, 15 bp, Homo sapiens
aaactgagaatatcc

SEQ ID NO: 972352 - DNA, 15 bp, Homo sapiens
caaactgagaatatc

SEQ ID NO: 972353 - DNA, 15 bp, Homo sapiens
gcaaactgagaatat

SEQ ID NO: 972354 - DNA, 15 bp, Homo sapiens
agcaaactgagaata

SEQ ID NO: 972355 - DNA, 15 bp, Homo sapiens
cagcaaactgagaat

SEQ ID NO: 972356 - DNA, 15 bp, Homo sapiens
acagcaaactgagaa

SEQ ID NO: 972357 - DNA, 15 bp, Homo sapiens
aacagcaaactgaga

SEQ ID NO: 972358 - DNA, 15 bp, Homo sapiens
taacagcaaactgag

SEQ ID NO: 972359 - DNA, 15 bp, Homo sapiens
ataacagcaaactga

SEQ ID NO: 972360 - DNA, 15 bp, Homo sapiens
cataacagcaaactg

SEQ ID NO: 972361 - DNA, 15 bp, Homo sapiens
tcataacagcaaact

SEQ ID NO: 972362 - DNA, 15 bp, Homo sapiens
ctcataacagcaaac

SEQ ID NO: 972363 - DNA, 15 bp, Homo sapiens
gctcataacagcaaa

SEQ ID NO: 972364 - DNA, 15 bp, Homo sapiens
tgctcataacagcaa

SEQ ID NO: 972365 - DNA, 15 bp, Homo sapiens
ttgctcataacagca

SEQ ID NO: 972366 - DNA, 15 bp, Homo sapiens
attgctcataacagc

SEQ ID NO: 972367 - DNA, 15 bp, Homo sapiens
cattgctcataacag

SEQ ID NO: 972368 - DNA, 15 bp, Homo sapiens
gcattgctcataaca

SEQ ID NO: 972369 - DNA, 15 bp, Homo sapiens
agcattgctcataac

SEQ ID NO: 972370 - DNA, 15 bp, Homo sapiens
gagcattgctcataa

SEQ ID NO: 972371 - DNA, 15 bp, Homo sapiens
agagcattgctcata

SEQ ID NO: 972372 - DNA, 15 bp, Homo sapiens
aagagcattgctcat

SEQ ID NO: 972373 - DNA, 15 bp, Homo sapiens
gaagagcattgctca

SEQ ID NO: 972374 - DNA, 15 bp, Homo sapiens
ggaagagcattgctc

SEQ ID NO: 972375 - DNA, 15 bp, Homo sapiens
aggaagagcattgct

SEQ ID NO: 972376 - DNA, 15 bp, Homo sapiens
aaggaagagcattgc

SEQ ID NO: 972377 - DNA, 15 bp, Homo sapiens
aaaggaagagcattg

SEQ ID NO: 972378 - DNA, 15 bp, Homo sapiens
taaaggaagagcatt

SEQ ID NO: 972379 - DNA, 15 bp, Homo sapiens
gtaaaggaagagcat

SEQ ID NO: 972380 - DNA, 15 bp, Homo sapiens
tgtaaaggaagagca

SEQ ID NO: 972381 - DNA, 15 bp, Homo sapiens
atgtaaaggaagagc

SEQ ID NO: 972382 - DNA, 15 bp, Homo sapiens
tatgtaaaggaagag

SEQ ID NO: 972383 - DNA, 15 bp, Homo sapiens
atatgtaaaggaaga

SEQ ID NO: 972384 - DNA, 15 bp, Homo sapiens
tatatgtaaaggaag

SEQ ID NO: 972385 - DNA, 15 bp, Homo sapiens
gtatatgtaaaggaa

SEQ ID NO: 972386 - DNA, 15 bp, Homo sapiens
tgtatatgtaaagga

SEQ ID NO: 972387 - DNA, 15 bp, Homo sapiens
ctgtatatgtaaagg

SEQ ID NO: 972388 - DNA, 15 bp, Homo sapiens
tctgtatatgtaaag

SEQ ID NO: 972389 - DNA, 15 bp, Homo sapiens
gtctgtatatgtaaa

SEQ ID NO: 972390 - DNA, 15 bp, Homo sapiens
tgtctgtatatgtaa

SEQ ID NO: 972391 - DNA, 15 bp, Homo sapiens
atgtctgtatatgta

SEQ ID NO: 972392 - DNA, 15 bp, Homo sapiens
tatgtctgtatatgt

SEQ ID NO: 972393 - DNA, 15 bp, Homo sapiens
atatgtctgtatatg

SEQ ID NO: 972394 - DNA, 15 bp, Homo sapiens
tatatgtctgtatat

SEQ ID NO: 972395 - DNA, 15 bp, Homo sapiens
atatatgtctgtata

SEQ ID NO: 972396 - DNA, 15 bp, Homo sapiens
tatatatgtctgtat

SEQ ID NO: 972397 - DNA, 15 bp, Homo sapiens
atatatatgtctgta

SEQ ID NO: 972398 - DNA, 15 bp, Homo sapiens
tatatatatgtctgt

SEQ ID NO: 972399 - DNA, 15 bp, Homo sapiens
atatatatatgtctg

SEQ ID NO: 972400 - DNA, 15 bp, Homo sapiens
tatatatatatgtct

SEQ ID NO: 972401 - DNA, 15 bp, Homo sapiens
atatatatatatgtc

SEQ ID NO: 972402 - DNA, 15 bp, Homo sapiens
tatatatatatatgt

SEQ ID NO: 972403 - DNA, 15 bp, Homo sapiens
atatatatatatatg

SEQ ID NO: 972404 - DNA, 15 bp, Homo sapiens
catatatatatatat

SEQ ID NO: 972405 - DNA, 15 bp, Homo sapiens
acatatatatatata

SEQ ID NO: 972406 - DNA, 15 bp, Homo sapiens
cacatatatatatat

SEQ ID NO: 972407 - DNA, 15 bp, Homo sapiens
acacatatatatata

SEQ ID NO: 972408 - DNA, 15 bp, Homo sapiens
cacacatatatatat

SEQ ID NO: 972409 - DNA, 15 bp, Homo sapiens
acacacatatatata

SEQ ID NO: 972410 - DNA, 15 bp, Homo sapiens
cacacacatatatat

SEQ ID NO: 972411 - DNA, 15 bp, Homo sapiens
acacacacatatata

SEQ ID NO: 972412 - DNA, 15 bp, Homo sapiens
acacacacacatata

SEQ ID NO: 972413 - DNA, 15 bp, Homo sapiens
cacacacacacatat

SEQ ID NO: 972414 - DNA, 15 bp, Homo sapiens
acacacacacacata

SEQ ID NO: 972415 - DNA, 15 bp, Homo sapiens
cacacacacacacat

SEQ ID NO: 972416 - DNA, 15 bp, Homo sapiens
acacacacacacaca

SEQ ID NO: 972417 - DNA, 15 bp, Homo sapiens
aacacacacacacac

SEQ ID NO: 972418 - DNA, 15 bp, Homo sapiens
aaacacacacacaca

SEQ ID NO: 972419 - DNA, 15 bp, Homo sapiens
aaaacacacacacac

SEQ ID NO: 972420 - DNA, 15 bp, Homo sapiens
aaaaacacacacaca

SEQ ID NO: 972421 - DNA, 15 bp, Homo sapiens
caaaaacacacacac

SEQ ID NO: 972422 - DNA, 15 bp, Homo sapiens
acaaaaacacacaca

SEQ ID NO: 972423 - DNA, 15 bp, Homo sapiens
aacaaaaacacacac

SEQ ID NO: 972424 - DNA, 15 bp, Homo sapiens
aaacaaaaacacaca

SEQ ID NO: 972425 - DNA, 15 bp, Homo sapiens
aaaacaaaaacacac

SEQ ID NO: 972426 - DNA, 15 bp, Homo sapiens
taaaacaaaaacaca

SEQ ID NO: 972427 - DNA, 15 bp, Homo sapiens
ctaaaacaaaaacac

SEQ ID NO: 972428 - DNA, 15 bp, Homo sapiens
actaaaacaaaaaca

SEQ ID NO: 972429 - DNA, 15 bp, Homo sapiens
tactaaaacaaaaac

SEQ ID NO: 972430 - DNA, 15 bp, Homo sapiens
ctactaaaacaaaaa

SEQ ID NO: 972431 - DNA, 15 bp, Homo sapiens
cctactaaaacaaaa

SEQ ID NO: 972432 - DNA, 15 bp, Homo sapiens
tcctactaaaacaaa

SEQ ID NO: 972433 - DNA, 15 bp, Homo sapiens
atcctactaaaacaa

SEQ ID NO: 972434 - DNA, 15 bp, Homo sapiens
tatcctactaaaaca

SEQ ID NO: 972435 - DNA, 15 bp, Homo sapiens
ctatcctactaaaac

SEQ ID NO: 972436 - DNA, 15 bp, Homo sapiens
tctatcctactaaaa

SEQ ID NO: 972437 - DNA, 15 bp, Homo sapiens
atctatcctactaaa

SEQ ID NO: 972438 - DNA, 15 bp, Homo sapiens
aatctatcctactaa

SEQ ID NO: 972439 - DNA, 15 bp, Homo sapiens
aaatctatcctacta

SEQ ID NO: 972440 - DNA, 15 bp, Homo sapiens
gaaatctatcctact

SEQ ID NO: 972441 - DNA, 15 bp, Homo sapiens
agaaatctatcctac

SEQ ID NO: 972442 - DNA, 15 bp, Homo sapiens
tagaaatctatccta

SEQ ID NO: 972443 - DNA, 15 bp, Homo sapiens
ctagaaatctatcct

SEQ ID NO: 972444 - DNA, 15 bp, Homo sapiens
cctagaaatctatcc

SEQ ID NO: 972445 - DNA, 15 bp, Homo sapiens
tcctagaaatctatc

SEQ ID NO: 972446 - DNA, 15 bp, Homo sapiens
ctcctagaaatctat

SEQ ID NO: 972447 - DNA, 15 bp, Homo sapiens
tctcctagaaatcta

SEQ ID NO: 972448 - DNA, 15 bp, Homo sapiens
ctctcctagaaatct

SEQ ID NO: 972449 - DNA, 15 bp, Homo sapiens
cctctcctagaaatc

SEQ ID NO: 972450 - DNA, 15 bp, Homo sapiens
ccctctcctagaaat

SEQ ID NO: 972451 - DNA, 15 bp, Homo sapiens
accctctcctagaaa

SEQ ID NO: 972452 - DNA, 15 bp, Homo sapiens
caccctctcctagaa

SEQ ID NO: 972453 - DNA, 15 bp, Homo sapiens
tcaccctctcctaga

SEQ ID NO: 972454 - DNA, 15 bp, Homo sapiens
ttcaccctctcctag

SEQ ID NO: 972455 - DNA, 15 bp, Homo sapiens
tttcaccctctccta

SEQ ID NO: 972456 - DNA, 15 bp, Homo sapiens
ctttcaccctctcct

SEQ ID NO: 972457 - DNA, 15 bp, Homo sapiens
cctttcaccctctcc

SEQ ID NO: 972458 - DNA, 15 bp, Homo sapiens
acctttcaccctctc

SEQ ID NO: 972459 - DNA, 15 bp, Homo sapiens
gacctttcaccctct

SEQ ID NO: 972460 - DNA, 15 bp, Homo sapiens
agacctttcaccctc

SEQ ID NO: 972461 - DNA, 15 bp, Homo sapiens
aagacctttcaccct

SEQ ID NO: 972462 - DNA, 15 bp, Homo sapiens
taagacctttcaccc

SEQ ID NO: 972463 - DNA, 15 bp, Homo sapiens
ataagacctttcacc

SEQ ID NO: 972464 - DNA, 15 bp, Homo sapiens
cataagacctttcac

SEQ ID NO: 972465 - DNA, 15 bp, Homo sapiens
tcataagacctttca

SEQ ID NO: 972466 - DNA, 15 bp, Homo sapiens
gtcataagacctttc

SEQ ID NO: 972467 - DNA, 15 bp, Homo sapiens
tgtcataagaccttt

SEQ ID NO: 972468 - DNA, 15 bp, Homo sapiens
atgtcataagacctt

SEQ ID NO: 972469 - DNA, 15 bp, Homo sapiens
gatgtcataagacct

SEQ ID NO: 972470 - DNA, 15 bp, Homo sapiens
ggatgtcataagacc

SEQ ID NO: 972471 - DNA, 15 bp, Homo sapiens
cggatgtcataagac

SEQ ID NO: 972472 - DNA, 15 bp, Homo sapiens
gcggatgtcataaga

SEQ ID NO: 972473 - DNA, 15 bp, Homo sapiens
tgcggatgtcataag

SEQ ID NO: 972474 - DNA, 15 bp, Homo sapiens
atgcggatgtcataa

SEQ ID NO: 972475 - DNA, 15 bp, Homo sapiens
aatgcggatgtcata

SEQ ID NO: 972476 - DNA, 15 bp, Homo sapiens
aaatgcggatgtcat

SEQ ID NO: 972477 - DNA, 15 bp, Homo sapiens
taaatgcggatgtca

SEQ ID NO: 972478 - DNA, 15 bp, Homo sapiens
gtaaatgcggatgtc

SEQ ID NO: 972479 - DNA, 15 bp, Homo sapiens
cgtaaatgcggatgt

SEQ ID NO: 972480 - DNA, 15 bp, Homo sapiens
tcgtaaatgcggatg

SEQ ID NO: 972481 - DNA, 15 bp, Homo sapiens
atcgtaaatgcggat

SEQ ID NO: 972482 - DNA, 15 bp, Homo sapiens
aatcgtaaatgcgga

SEQ ID NO: 972483 - DNA, 15 bp, Homo sapiens
caatcgtaaatgcgg

SEQ ID NO: 972484 - DNA, 15 bp, Homo sapiens
acaatcgtaaatgcg

SEQ ID NO: 972485 - DNA, 15 bp, Homo sapiens
tacaatcgtaaatgc

SEQ ID NO: 972486 - DNA, 15 bp, Homo sapiens
ttacaatcgtaaatg

SEQ ID NO: 972487 - DNA, 15 bp, Homo sapiens
attacaatcgtaaat

SEQ ID NO: 972488 - DNA, 15 bp, Homo sapiens
tattacaatcgtaaa

SEQ ID NO: 972489 - DNA, 15 bp, Homo sapiens
ctattacaatcgtaa

SEQ ID NO: 972490 - DNA, 15 bp, Homo sapiens
cctattacaatcgta

SEQ ID NO: 972491 - DNA, 15 bp, Homo sapiens
tcctattacaatcgt

SEQ ID NO: 972492 - DNA, 15 bp, Homo sapiens
ttcctattacaatcg

SEQ ID NO: 972493 - DNA, 15 bp, Homo sapiens
cttcctattacaatc

SEQ ID NO: 972494 - DNA, 15 bp, Homo sapiens
acttcctattacaat

SEQ ID NO: 972495 - DNA, 15 bp, Homo sapiens
tacttcctattacaa

SEQ ID NO: 972496 - DNA, 15 bp, Homo sapiens
atacttcctattaca

SEQ ID NO: 972497 - DNA, 15 bp, Homo sapiens
gatacttcctattac

SEQ ID NO: 972498 - DNA, 15 bp, Homo sapiens
tgatacttcctatta

SEQ ID NO: 972499 - DNA, 15 bp, Homo sapiens
ttgatacttcctatt

SEQ ID NO: 972500 - DNA, 15 bp, Homo sapiens
tttgatacttcctat

SEQ ID NO: 972501 - DNA, 15 bp, Homo sapiens
ctttgatacttccta

SEQ ID NO: 972502 - DNA, 15 bp, Homo sapiens
actttgatacttcct

SEQ ID NO: 972503 - DNA, 15 bp, Homo sapiens
cactttgatacttcc

SEQ ID NO: 972504 - DNA, 15 bp, Homo sapiens
gcactttgatacttc

SEQ ID NO: 972505 - DNA, 15 bp, Homo sapiens
ggcactttgatactt

SEQ ID NO: 972506 - DNA, 15 bp, Homo sapiens
gggcactttgatact

SEQ ID NO: 972507 - DNA, 15 bp, Homo sapiens
ggggcactttgatac

SEQ ID NO: 972508 - DNA, 15 bp, Homo sapiens
gggggcactttgata

SEQ ID NO: 972509 - DNA, 15 bp, Homo sapiens
agggggcactttgat

SEQ ID NO: 972510 - DNA, 15 bp, Homo sapiens
tagggggcactttga

SEQ ID NO: 972511 - DNA, 15 bp, Homo sapiens
ttagggggcactttg

SEQ ID NO: 972512 - DNA, 15 bp, Homo sapiens
tttagggggcacttt

SEQ ID NO: 972513 - DNA, 15 bp, Homo sapiens
ctttagggggcactt

SEQ ID NO: 972514 - DNA, 15 bp, Homo sapiens
tctttagggggcact

SEQ ID NO: 972515 - DNA, 15 bp, Homo sapiens
ttctttagggggcac

SEQ ID NO: 972516 - DNA, 15 bp, Homo sapiens
tttctttagggggca

SEQ ID NO: 972517 - DNA, 15 bp, Homo sapiens
ttttctttagggggc

SEQ ID NO: 972518 - DNA, 15 bp, Homo sapiens
tttttctttaggggg

SEQ ID NO: 972519 - DNA, 15 bp, Homo sapiens
ttttttctttagggg

SEQ ID NO: 972520 - DNA, 15 bp, Homo sapiens
tttttttctttaggg

SEQ ID NO: 972521 - DNA, 15 bp, Homo sapiens
atttttttctttagg

SEQ ID NO: 972522 - DNA, 15 bp, Homo sapiens
gatttttttctttag

SEQ ID NO: 972523 - DNA, 15 bp, Homo sapiens
ggatttttttcttta

SEQ ID NO: 972524 - DNA, 15 bp, Homo sapiens
aggatttttttcttt

SEQ ID NO: 972525 - DNA, 15 bp, Homo sapiens
gaggatttttttctt

SEQ ID NO: 972526 - DNA, 15 bp, Homo sapiens
ggaggatttttttct

SEQ ID NO: 972527 - DNA, 15 bp, Homo sapiens
gggaggatttttttc

SEQ ID NO: 972528 - DNA, 15 bp, Homo sapiens
tgggaggattttttt

SEQ ID NO: 972529 - DNA, 15 bp, Homo sapiens
atgggaggatttttt

SEQ ID NO: 972530 - DNA, 15 bp, Homo sapiens
aatgggaggattttt

SEQ ID NO: 972531 - DNA, 15 bp, Homo sapiens
taatgggaggatttt

SEQ ID NO: 972532 - DNA, 15 bp, Homo sapiens
ctaatgggaggattt

SEQ ID NO: 972533 - DNA, 15 bp, Homo sapiens
actaatgggaggatt

SEQ ID NO: 972534 - DNA, 15 bp, Homo sapiens
cactaatgggaggat

SEQ ID NO: 972535 - DNA, 15 bp, Homo sapiens
ccactaatgggagga

SEQ ID NO: 972536 - DNA, 15 bp, Homo sapiens
cccactaatgggagg

SEQ ID NO: 972537 - DNA, 15 bp, Homo sapiens
acccactaatgggag

SEQ ID NO: 972538 - DNA, 15 bp, Homo sapiens
tacccactaatggga

SEQ ID NO: 972539 - DNA, 15 bp, Homo sapiens
ttacccactaatggg

SEQ ID NO: 972540 - DNA, 15 bp, Homo sapiens
cttacccactaatgg

SEQ ID NO: 972541 - DNA, 15 bp, Homo sapiens
tcttacccactaatg

SEQ ID NO: 972542 - DNA, 15 bp, Homo sapiens
ttcttacccactaat

SEQ ID NO: 972543 - DNA, 15 bp, Homo sapiens
tttcttacccactaa

SEQ ID NO: 972544 - DNA, 15 bp, Homo sapiens
ctttcttacccacta

SEQ ID NO: 972545 - DNA, 15 bp, Homo sapiens
gctttcttacccact

SEQ ID NO: 972546 - DNA, 15 bp, Homo sapiens
ggctttcttacccac

SEQ ID NO: 972547 - DNA, 15 bp, Homo sapiens
aggctttcttaccca

SEQ ID NO: 972548 - DNA, 15 bp, Homo sapiens
taggctttcttaccc

SEQ ID NO: 972549 - DNA, 15 bp, Homo sapiens
ataggctttcttacc

SEQ ID NO: 972550 - DNA, 15 bp, Homo sapiens
aataggctttcttac

SEQ ID NO: 972551 - DNA, 15 bp, Homo sapiens
aaataggctttctta

SEQ ID NO: 972552 - DNA, 15 bp, Homo sapiens
caaataggctttctt

SEQ ID NO: 972553 - DNA, 15 bp, Homo sapiens
acaaataggctttct

SEQ ID NO: 972554 - DNA, 15 bp, Homo sapiens
aacaaataggctttc

SEQ ID NO: 972555 - DNA, 15 bp, Homo sapiens
gaacaaataggcttt

SEQ ID NO: 972556 - DNA, 15 bp, Homo sapiens
tgaacaaataggctt

SEQ ID NO: 972557 - DNA, 15 bp, Homo sapiens
atgaacaaataggct

SEQ ID NO: 972558 - DNA, 15 bp, Homo sapiens
tatgaacaaataggc

SEQ ID NO: 972559 - DNA, 15 bp, Homo sapiens
atatgaacaaatagg

SEQ ID NO: 972560 - DNA, 15 bp, Homo sapiens
gatatgaacaaatag

SEQ ID NO: 972561 - DNA, 15 bp, Homo sapiens
agatatgaacaaata

SEQ ID NO: 972562 - DNA, 15 bp, Homo sapiens
aagatatgaacaaat

SEQ ID NO: 972563 - DNA, 15 bp, Homo sapiens
gaagatatgaacaaa

SEQ ID NO: 972564 - DNA, 15 bp, Homo sapiens
tgaagatatgaacaa

SEQ ID NO: 972565 - DNA, 15 bp, Homo sapiens
gtgaagatatgaaca

SEQ ID NO: 972566 - DNA, 15 bp, Homo sapiens
tgtgaagatatgaac

SEQ ID NO: 972567 - DNA, 15 bp, Homo sapiens
ttgtgaagatatgaa

SEQ ID NO: 972568 - DNA, 15 bp, Homo sapiens
tttgtgaagatatga

SEQ ID NO: 972569 - DNA, 15 bp, Homo sapiens
gtttgtgaagatatg

SEQ ID NO: 972570 - DNA, 15 bp, Homo sapiens
tgtttgtgaagatat

SEQ ID NO: 972571 - DNA, 15 bp, Homo sapiens
gtgtttgtgaagata

SEQ ID NO: 972572 - DNA, 15 bp, Homo sapiens
agtgtttgtgaagat

SEQ ID NO: 972573 - DNA, 15 bp, Homo sapiens
tagtgtttgtgaaga

SEQ ID NO: 972574 - DNA, 15 bp, Homo sapiens
ttagtgtttgtgaag

SEQ ID NO: 972575 - DNA, 15 bp, Homo sapiens
tttagtgtttgtgaa

SEQ ID NO: 972576 - DNA, 15 bp, Homo sapiens
atttagtgtttgtga

SEQ ID NO: 972577 - DNA, 15 bp, Homo sapiens
tatttagtgtttgtg

SEQ ID NO: 972578 - DNA, 15 bp, Homo sapiens
atatttagtgtttgt

SEQ ID NO: 972579 - DNA, 15 bp, Homo sapiens
aatatttagtgtttg

SEQ ID NO: 972580 - DNA, 15 bp, Homo sapiens
taatatttagtgttt

SEQ ID NO: 972581 - DNA, 15 bp, Homo sapiens
ctaatatttagtgtt

SEQ ID NO: 972582 - DNA, 15 bp, Homo sapiens
tctaatatttagtgt

SEQ ID NO: 972583 - DNA, 15 bp, Homo sapiens
ttctaatatttagtg

SEQ ID NO: 972584 - DNA, 15 bp, Homo sapiens
tttctaatatttagt

SEQ ID NO: 972585 - DNA, 15 bp, Homo sapiens
atttctaatatttag

SEQ ID NO: 972586 - DNA, 15 bp, Homo sapiens
tatttctaatattta

SEQ ID NO: 972587 - DNA, 15 bp, Homo sapiens
atatttctaatattt

SEQ ID NO: 972588 - DNA, 15 bp, Homo sapiens
aatatttctaatatt

SEQ ID NO: 972589 - DNA, 15 bp, Homo sapiens
aaatatttctaatat

SEQ ID NO: 972590 - DNA, 15 bp, Homo sapiens
taaatatttctaata

SEQ ID NO: 972591 - DNA, 15 bp, Homo sapiens
gtaaatatttctaat

SEQ ID NO: 972592 - DNA, 15 bp, Homo sapiens
tgtaaatatttctaa

SEQ ID NO: 972593 - DNA, 15 bp, Homo sapiens
ttgtaaatatttcta

SEQ ID NO: 972594 - DNA, 15 bp, Homo sapiens
attgtaaatatttct

SEQ ID NO: 972595 - DNA, 15 bp, Homo sapiens
aattgtaaatatttc

SEQ ID NO: 972596 - DNA, 15 bp, Homo sapiens
caattgtaaatattt

SEQ ID NO: 972597 - DNA, 15 bp, Homo sapiens
acaattgtaaatatt

SEQ ID NO: 972598 - DNA, 15 bp, Homo sapiens
cacaattgtaaatat

SEQ ID NO: 972599 - DNA, 15 bp, Homo sapiens
ccacaattgtaaata

SEQ ID NO: 972600 - DNA, 15 bp, Homo sapiens
accacaattgtaaat

SEQ ID NO: 972601 - DNA, 15 bp, Homo sapiens
gaccacaattgtaaa

SEQ ID NO: 972602 - DNA, 15 bp, Homo sapiens
tgaccacaattgtaa

SEQ ID NO: 972603 - DNA, 15 bp, Homo sapiens
ttgaccacaattgta

SEQ ID NO: 972604 - DNA, 15 bp, Homo sapiens
cttgaccacaattgt

SEQ ID NO: 972605 - DNA, 15 bp, Homo sapiens
gcttgaccacaattg

SEQ ID NO: 972606 - DNA, 15 bp, Homo sapiens
agcttgaccacaatt

SEQ ID NO: 972607 - DNA, 15 bp, Homo sapiens
gagcttgaccacaat

SEQ ID NO: 972608 - DNA, 15 bp, Homo sapiens
gattatcttttccta

SEQ ID NO: 972609 - DNA, 15 bp, Homo sapiens
ggattatcttttcct

SEQ ID NO: 972610 - DNA, 15 bp, Homo sapiens
tggattatcttttcc

SEQ ID NO: 972611 - DNA, 15 bp, Homo sapiens
ctggattatcttttc

SEQ ID NO: 972612 - DNA, 15 bp, Homo sapiens
cctggattatctttt

SEQ ID NO: 972613 - DNA, 15 bp, Homo sapiens
tcctggattatcttt

SEQ ID NO: 972614 - DNA, 15 bp, Homo sapiens
gtcctggattatctt

SEQ ID NO: 972615 - DNA, 15 bp, Homo sapiens
cgtcctggattatct

SEQ ID NO: 972616 - DNA, 15 bp, Homo sapiens
ccgtcctggattatc

SEQ ID NO: 972617 - DNA, 15 bp, Homo sapiens
accgtcctggattat

SEQ ID NO: 972618 - DNA, 15 bp, Homo sapiens
caccgtcctggatta

SEQ ID NO: 972619 - DNA, 15 bp, Homo sapiens
acaccgtcctggatt

SEQ ID NO: 972620 - DNA, 15 bp, Homo sapiens
aacaccgtcctggat

SEQ ID NO: 972621 - DNA, 15 bp, Homo sapiens
caacaccgtcctgga

SEQ ID NO: 972622 - DNA, 15 bp, Homo sapiens
acaacaccgtcctgg

SEQ ID NO: 972623 - DNA, 15 bp, Homo sapiens
cacaacaccgtcctg

SEQ ID NO: 972624 - DNA, 15 bp, Homo sapiens
tcacaacaccgtcct

SEQ ID NO: 972625 - DNA, 15 bp, Homo sapiens
ttcacaacaccgtcc

SEQ ID NO: 972626 - DNA, 15 bp, Homo sapiens
gttcacaacaccgtc

SEQ ID NO: 972627 - DNA, 15 bp, Homo sapiens
tgttcacaacaccgt

SEQ ID NO: 972628 - DNA, 15 bp, Homo sapiens
ctgttcacaacaccg

SEQ ID NO: 972629 - DNA, 15 bp, Homo sapiens
tctgttcacaacacc

SEQ ID NO: 972630 - DNA, 15 bp, Homo sapiens
ttctgttcacaacac

SEQ ID NO: 972631 - DNA, 15 bp, Homo sapiens
tttctgttcacaaca

SEQ ID NO: 972632 - DNA, 15 bp, Homo sapiens
ctttctgttcacaac

SEQ ID NO: 972633 - DNA, 15 bp, Homo sapiens
tctttctgttcacaa

SEQ ID NO: 972634 - DNA, 15 bp, Homo sapiens
ctctttctgttcaca

SEQ ID NO: 972635 - DNA, 15 bp, Homo sapiens
cctctttctgttcac

SEQ ID NO: 972636 - DNA, 15 bp, Homo sapiens
ccctctttctgttca

SEQ ID NO: 972637 - DNA, 15 bp, Homo sapiens
cccctctttctgttc

SEQ ID NO: 972638 - DNA, 15 bp, Homo sapiens
ccccctctttctgtt

SEQ ID NO: 972639 - DNA, 15 bp, Homo sapiens
tccccctctttctgt

SEQ ID NO: 972640 - DNA, 15 bp, Homo sapiens
ttccccctctttctg

SEQ ID NO: 972641 - DNA, 15 bp, Homo sapiens
tttccccctctttct

SEQ ID NO: 972642 - DNA, 15 bp, Homo sapiens
ttttccccctctttc

SEQ ID NO: 972643 - DNA, 15 bp, Homo sapiens
tttttccccctcttt

SEQ ID NO: 972644 - DNA, 15 bp, Homo sapiens
ttttttccccctctt

SEQ ID NO: 972645 - DNA, 15 bp, Homo sapiens
gttttttccccctct

SEQ ID NO: 972646 - DNA, 15 bp, Homo sapiens
agttttttccccctc

SEQ ID NO: 972647 - DNA, 15 bp, Homo sapiens
aagttttttccccct

SEQ ID NO: 972648 - DNA, 15 bp, Homo sapiens
aaagttttttccccc

SEQ ID NO: 972649 - DNA, 15 bp, Homo sapiens
taaagttttttcccc

SEQ ID NO: 972650 - DNA, 15 bp, Homo sapiens
ctaaagttttttccc

SEQ ID NO: 972651 - DNA, 15 bp, Homo sapiens
tctaaagttttttcc

SEQ ID NO: 972652 - DNA, 15 bp, Homo sapiens
ttctaaagttttttc

SEQ ID NO: 972653 - DNA, 15 bp, Homo sapiens
tttctaaagtttttt

SEQ ID NO: 972654 - DNA, 15 bp, Homo sapiens
ttttctaaagttttt

SEQ ID NO: 972655 - DNA, 15 bp, Homo sapiens
attttctaaagtttt

SEQ ID NO: 972656 - DNA, 15 bp, Homo sapiens
cattttctaaagttt

SEQ ID NO: 972657 - DNA, 15 bp, Homo sapiens
tcattttctaaagtt

SEQ ID NO: 972658 - DNA, 15 bp, Homo sapiens
atcattttctaaagt

SEQ ID NO: 972659 - DNA, 15 bp, Homo sapiens
catcattttctaaag

SEQ ID NO: 972660 - DNA, 15 bp, Homo sapiens
ccatcattttctaaa

SEQ ID NO: 972661 - DNA, 15 bp, Homo sapiens
cccatcattttctaa

SEQ ID NO: 972662 - DNA, 15 bp, Homo sapiens
ccccatcattttcta

SEQ ID NO: 972663 - DNA, 15 bp, Homo sapiens
tccccatcattttct

SEQ ID NO: 972664 - DNA, 15 bp, Homo sapiens
atccccatcattttc

SEQ ID NO: 972665 - DNA, 15 bp, Homo sapiens
catccccatcatttt

SEQ ID NO: 972666 - DNA, 15 bp, Homo sapiens
gcatccccatcattt

SEQ ID NO: 972667 - DNA, 15 bp, Homo sapiens
agcatccccatcatt

SEQ ID NO: 972668 - DNA, 15 bp, Homo sapiens
gagcatccccatcat

SEQ ID NO: 972669 - DNA, 15 bp, Homo sapiens
agagcatccccatca

SEQ ID NO: 972670 - DNA, 15 bp, Homo sapiens
aagagcatccccatc

SEQ ID NO: 972671 - DNA, 15 bp, Homo sapiens
taagagcatccccat

SEQ ID NO: 972672 - DNA, 15 bp, Homo sapiens
gtaagagcatcccca

SEQ ID NO: 972673 - DNA, 15 bp, Homo sapiens
agtaagagcatcccc

SEQ ID NO: 972674 - DNA, 15 bp, Homo sapiens
cagtaagagcatccc

SEQ ID NO: 972675 - DNA, 15 bp, Homo sapiens
ccagtaagagcatcc

SEQ ID NO: 972676 - DNA, 15 bp, Homo sapiens
cccagtaagagcatc

SEQ ID NO: 972677 - DNA, 15 bp, Homo sapiens
ccccagtaagagcat

SEQ ID NO: 972678 - DNA, 15 bp, Homo sapiens
accccagtaagagca

SEQ ID NO: 972679 - DNA, 15 bp, Homo sapiens
taccccagtaagagc

SEQ ID NO: 972680 - DNA, 15 bp, Homo sapiens
gtaccccagtaagag

SEQ ID NO: 972681 - DNA, 15 bp, Homo sapiens
cgtaccccagtaaga

SEQ ID NO: 972682 - DNA, 15 bp, Homo sapiens
tcgtaccccagtaag

SEQ ID NO: 972683 - DNA, 15 bp, Homo sapiens
ctcgtaccccagtaa

SEQ ID NO: 972684 - DNA, 15 bp, Homo sapiens
actcgtaccccagta

SEQ ID NO: 972685 - DNA, 15 bp, Homo sapiens
gactcgtaccccagt

SEQ ID NO: 972686 - DNA, 15 bp, Homo sapiens
ggactcgtaccccag

SEQ ID NO: 972687 - DNA, 15 bp, Homo sapiens
aggactcgtacccca

SEQ ID NO: 972688 - DNA, 15 bp, Homo sapiens
gaggactcgtacccc

SEQ ID NO: 972689 - DNA, 15 bp, Homo sapiens
tgaggactcgtaccc

SEQ ID NO: 972690 - DNA, 15 bp, Homo sapiens
ctgaggactcgtacc

SEQ ID NO: 972691 - DNA, 15 bp, Homo sapiens
cctgaggactcgtac

SEQ ID NO: 972692 - DNA, 15 bp, Homo sapiens
acctgaggactcgta

SEQ ID NO: 972693 - DNA, 15 bp, Homo sapiens
tacctgaggactcgt

SEQ ID NO: 972694 - DNA, 15 bp, Homo sapiens
atacctgaggactcg

SEQ ID NO: 972695 - DNA, 15 bp, Homo sapiens
aatacctgaggactc

SEQ ID NO: 972696 - DNA, 15 bp, Homo sapiens
caatacctgaggact

SEQ ID NO: 972697 - DNA, 15 bp, Homo sapiens
tcaatacctgaggac

SEQ ID NO: 972698 - DNA, 15 bp, Homo sapiens
ttcaatacctgagga

SEQ ID NO: 972699 - DNA, 15 bp, Homo sapiens
gttcaatacctgagg

SEQ ID NO: 972700 - DNA, 15 bp, Homo sapiens
agttcaatacctgag

SEQ ID NO: 972701 - DNA, 15 bp, Homo sapiens
cagttcaatacctga

SEQ ID NO: 972702 - DNA, 15 bp, Homo sapiens
ccagttcaatacctg

SEQ ID NO: 972703 - DNA, 15 bp, Homo sapiens
gccagttcaatacct

SEQ ID NO: 972704 - DNA, 15 bp, Homo sapiens
agccagttcaatacc

SEQ ID NO: 972705 - DNA, 15 bp, Homo sapiens
aagccagttcaatac

SEQ ID NO: 972706 - DNA, 15 bp, Homo sapiens
aaagccagttcaata

SEQ ID NO: 972707 - DNA, 15 bp, Homo sapiens
gaaagccagttcaat

SEQ ID NO: 972708 - DNA, 15 bp, Homo sapiens
tgaaagccagttcaa

SEQ ID NO: 972709 - DNA, 15 bp, Homo sapiens
ctgaaagccagttca

SEQ ID NO: 972710 - DNA, 15 bp, Homo sapiens
actgaaagccagttc

SEQ ID NO: 972711 - DNA, 15 bp, Homo sapiens
tactgaaagccagtt

SEQ ID NO: 972712 - DNA, 15 bp, Homo sapiens
ttactgaaagccagt

SEQ ID NO: 972713 - DNA, 15 bp, Homo sapiens
tttactgaaagccag

SEQ ID NO: 972714 - DNA, 15 bp, Homo sapiens
ttttactgaaagcca

SEQ ID NO: 972715 - DNA, 15 bp, Homo sapiens
cttttactgaaagcc

SEQ ID NO: 972716 - DNA, 15 bp, Homo sapiens
gcttttactgaaagc

SEQ ID NO: 972717 - DNA, 15 bp, Homo sapiens
agcttttactgaaag

SEQ ID NO: 972718 - DNA, 15 bp, Homo sapiens
tagcttttactgaaa

SEQ ID NO: 972719 - DNA, 15 bp, Homo sapiens
ctagcttttactgaa

SEQ ID NO: 972720 - DNA, 15 bp, Homo sapiens
tctagcttttactga

SEQ ID NO: 972721 - DNA, 15 bp, Homo sapiens
atctagcttttactg

SEQ ID NO: 972722 - DNA, 15 bp, Homo sapiens
aatctagcttttact

SEQ ID NO: 972723 - DNA, 15 bp, Homo sapiens
taatctagcttttac

SEQ ID NO: 972724 - DNA, 15 bp, Homo sapiens
ctaatctagctttta

SEQ ID NO: 972725 - DNA, 15 bp, Homo sapiens
actaatctagctttt

SEQ ID NO: 972726 - DNA, 15 bp, Homo sapiens
cactaatctagcttt

SEQ ID NO: 972727 - DNA, 15 bp, Homo sapiens
ccactaatctagctt

SEQ ID NO: 972728 - DNA, 15 bp, Homo sapiens
cccactaatctagct

SEQ ID NO: 972729 - DNA, 15 bp, Homo sapiens
acccactaatctagc

SEQ ID NO: 972730 - DNA, 15 bp, Homo sapiens
aacccactaatctag

SEQ ID NO: 972731 - DNA, 15 bp, Homo sapiens
gaacccactaatcta

SEQ ID NO: 972732 - DNA, 15 bp, Homo sapiens
ggaacccactaatct

SEQ ID NO: 972733 - DNA, 15 bp, Homo sapiens
aggaacccactaatc

SEQ ID NO: 972734 - DNA, 15 bp, Homo sapiens
caggaacccactaat

SEQ ID NO: 972735 - DNA, 15 bp, Homo sapiens
gcaggaacccactaa

SEQ ID NO: 972736 - DNA, 15 bp, Homo sapiens
ggcaggaacccacta

SEQ ID NO: 972737 - DNA, 15 bp, Homo sapiens
tggcaggaacccact

SEQ ID NO: 972738 - DNA, 15 bp, Homo sapiens
atggcaggaacccac

SEQ ID NO: 972739 - DNA, 15 bp, Homo sapiens
aatggcaggaaccca

SEQ ID NO: 972740 - DNA, 15 bp, Homo sapiens
aaatggcaggaaccc

SEQ ID NO: 972741 - DNA, 15 bp, Homo sapiens
taaatggcaggaacc

SEQ ID NO: 972742 - DNA, 15 bp, Homo sapiens
gtaaatggcaggaac

SEQ ID NO: 972743 - DNA, 15 bp, Homo sapiens
tgtaaatggcaggaa

SEQ ID NO: 972744 - DNA, 15 bp, Homo sapiens
ttgtaaatggcagga

SEQ ID NO: 972745 - DNA, 15 bp, Homo sapiens
cttgtaaatggcagg

SEQ ID NO: 972746 - DNA, 15 bp, Homo sapiens
gcttgtaaatggcag

SEQ ID NO: 972747 - DNA, 15 bp, Homo sapiens
agcttgtaaatggca

SEQ ID NO: 972748 - DNA, 15 bp, Homo sapiens
cagcttgtaaatggc

SEQ ID NO: 972749 - DNA, 15 bp, Homo sapiens
acagcttgtaaatgg

SEQ ID NO: 972750 - DNA, 15 bp, Homo sapiens
aacagcttgtaaatg

SEQ ID NO: 972751 - DNA, 15 bp, Homo sapiens
aaacagcttgtaaat

SEQ ID NO: 972752 - DNA, 15 bp, Homo sapiens
aaaacagcttgtaaa

SEQ ID NO: 972753 - DNA, 15 bp, Homo sapiens
taaaacagcttgtaa

SEQ ID NO: 972754 - DNA, 15 bp, Homo sapiens
ataaaacagcttgta

SEQ ID NO: 972755 - DNA, 15 bp, Homo sapiens
cataaaacagcttgt

SEQ ID NO: 972756 - DNA, 15 bp, Homo sapiens
tcataaaacagcttg

SEQ ID NO: 972757 - DNA, 15 bp, Homo sapiens
gtcataaaacagctt

SEQ ID NO: 972758 - DNA, 15 bp, Homo sapiens
tgtcataaaacagct

SEQ ID NO: 972759 - DNA, 15 bp, Homo sapiens
ttgtcataaaacagc

SEQ ID NO: 972760 - DNA, 15 bp, Homo sapiens
gttgtcataaaacag

SEQ ID NO: 972761 - DNA, 15 bp, Homo sapiens
agttgtcataaaaca

SEQ ID NO: 972762 - DNA, 15 bp, Homo sapiens
aagttgtcataaaac

SEQ ID NO: 972763 - DNA, 15 bp, Homo sapiens
taagttgtcataaaa

SEQ ID NO: 972764 - DNA, 15 bp, Homo sapiens
gtaagttgtcataaa

SEQ ID NO: 972765 - DNA, 15 bp, Homo sapiens
agtaagttgtcataa

SEQ ID NO: 972766 - DNA, 15 bp, Homo sapiens
aagtaagttgtcata

SEQ ID NO: 972767 - DNA, 15 bp, Homo sapiens
caagtaagttgtcat

SEQ ID NO: 972768 - DNA, 15 bp, Homo sapiens
acaagtaagttgtca

SEQ ID NO: 972769 - DNA, 15 bp, Homo sapiens
aacaagtaagttgtc

SEQ ID NO: 972770 - DNA, 15 bp, Homo sapiens
caacaagtaagttgt

SEQ ID NO: 972771 - DNA, 15 bp, Homo sapiens
ccaacaagtaagttg

SEQ ID NO: 972772 - DNA, 15 bp, Homo sapiens
cccaacaagtaagtt

SEQ ID NO: 972773 - DNA, 15 bp, Homo sapiens
acccaacaagtaagt

SEQ ID NO: 972774 - DNA, 15 bp, Homo sapiens
cacccaacaagtaag

SEQ ID NO: 972775 - DNA, 15 bp, Homo sapiens
ccacccaacaagtaa

SEQ ID NO: 972776 - DNA, 15 bp, Homo sapiens
gccacccaacaagta

SEQ ID NO: 972777 - DNA, 15 bp, Homo sapiens
ggccacccaacaagt

SEQ ID NO: 972778 - DNA, 15 bp, Homo sapiens
aggccacccaacaag

SEQ ID NO: 972779 - DNA, 15 bp, Homo sapiens
taggccacccaacaa

SEQ ID NO: 972780 - DNA, 15 bp, Homo sapiens
gtaggccacccaaca

SEQ ID NO: 972781 - DNA, 15 bp, Homo sapiens
tgtaggccacccaac

SEQ ID NO: 972782 - DNA, 15 bp, Homo sapiens
ctgtaggccacccaa

SEQ ID NO: 972783 - DNA, 15 bp, Homo sapiens
actgtaggccaccca

SEQ ID NO: 972784 - DNA, 15 bp, Homo sapiens
tactgtaggccaccc

SEQ ID NO: 972785 - DNA, 15 bp, Homo sapiens
ttactgtaggccacc

SEQ ID NO: 972786 - DNA, 15 bp, Homo sapiens
gttactgtaggccac

SEQ ID NO: 972787 - DNA, 15 bp, Homo sapiens
agttactgtaggcca

SEQ ID NO: 972788 - DNA, 15 bp, Homo sapiens
gagttactgtaggcc

SEQ ID NO: 972789 - DNA, 15 bp, Homo sapiens
tgagttactgtaggc

SEQ ID NO: 972790 - DNA, 15 bp, Homo sapiens
gtgagttactgtagg

SEQ ID NO: 972791 - DNA, 15 bp, Homo sapiens
ggtgagttactgtag

SEQ ID NO: 972792 - DNA, 15 bp, Homo sapiens
aggtgagttactgta

SEQ ID NO: 972793 - DNA, 15 bp, Homo sapiens
taggtgagttactgt

SEQ ID NO: 972794 - DNA, 15 bp, Homo sapiens
ttaggtgagttactg

SEQ ID NO: 972795 - DNA, 15 bp, Homo sapiens
gttaggtgagttact

SEQ ID NO: 972796 - DNA, 15 bp, Homo sapiens
agttaggtgagttac

SEQ ID NO: 972797 - DNA, 15 bp, Homo sapiens
cagttaggtgagtta

SEQ ID NO: 972798 - DNA, 15 bp, Homo sapiens
gcagttaggtgagtt

SEQ ID NO: 972799 - DNA, 15 bp, Homo sapiens
tgcagttaggtgagt

SEQ ID NO: 972800 - DNA, 15 bp, Homo sapiens
gtgcagttaggtgag

SEQ ID NO: 972801 - DNA, 15 bp, Homo sapiens
agtgcagttaggtga

SEQ ID NO: 972802 - DNA, 15 bp, Homo sapiens
cagtgcagttaggtg

SEQ ID NO: 972803 - DNA, 15 bp, Homo sapiens
tcagtgcagttaggt

SEQ ID NO: 972804 - DNA, 15 bp, Homo sapiens
ctcagtgcagttagg

SEQ ID NO: 972805 - DNA, 15 bp, Homo sapiens
actcagtgcagttag

SEQ ID NO: 972806 - DNA, 15 bp, Homo sapiens
gactcagtgcagtta

SEQ ID NO: 972807 - DNA, 15 bp, Homo sapiens
agactcagtgcagtt

SEQ ID NO: 972808 - DNA, 15 bp, Homo sapiens
cagactcagtgcagt

SEQ ID NO: 972809 - DNA, 15 bp, Homo sapiens
acagactcagtgcag

SEQ ID NO: 972810 - DNA, 15 bp, Homo sapiens
aacagactcagtgca

SEQ ID NO: 972811 - DNA, 15 bp, Homo sapiens
aaacagactcagtgc

SEQ ID NO: 972812 - DNA, 15 bp, Homo sapiens
gaaacagactcagtg

SEQ ID NO: 972813 - DNA, 15 bp, Homo sapiens
ggaaacagactcagt

SEQ ID NO: 972814 - DNA, 15 bp, Homo sapiens
aggaaacagactcag

SEQ ID NO: 972815 - DNA, 15 bp, Homo sapiens
gaggaaacagactca

SEQ ID NO: 972816 - DNA, 15 bp, Homo sapiens
tgaggaaacagactc

SEQ ID NO: 972817 - DNA, 15 bp, Homo sapiens
atgaggaaacagact

SEQ ID NO: 972818 - DNA, 15 bp, Homo sapiens
gatgaggaaacagac

SEQ ID NO: 972819 - DNA, 15 bp, Homo sapiens
agatgaggaaacaga

SEQ ID NO: 972820 - DNA, 15 bp, Homo sapiens
cagatgaggaaacag

SEQ ID NO: 972821 - DNA, 15 bp, Homo sapiens
acagatgaggaaaca

SEQ ID NO: 972822 - DNA, 15 bp, Homo sapiens
tacagatgaggaaac

SEQ ID NO: 972823 - DNA, 15 bp, Homo sapiens
ttacagatgaggaaa

SEQ ID NO: 972824 - DNA, 15 bp, Homo sapiens
tttacagatgaggaa

SEQ ID NO: 972825 - DNA, 15 bp, Homo sapiens
atttacagatgagga

SEQ ID NO: 972826 - DNA, 15 bp, Homo sapiens
aatttacagatgagg

SEQ ID NO: 972827 - DNA, 15 bp, Homo sapiens
caatttacagatgag

SEQ ID NO: 972828 - DNA, 15 bp, Homo sapiens
ccaatttacagatga

SEQ ID NO: 972829 - DNA, 15 bp, Homo sapiens
cccaatttacagatg

SEQ ID NO: 972830 - DNA, 15 bp, Homo sapiens
ccccaatttacagat

SEQ ID NO: 972831 - DNA, 15 bp, Homo sapiens
tccccaatttacaga

SEQ ID NO: 972832 - DNA, 15 bp, Homo sapiens
atccccaatttacag

SEQ ID NO: 972833 - DNA, 15 bp, Homo sapiens
aatccccaatttaca

SEQ ID NO: 972834 - DNA, 15 bp, Homo sapiens
aaatccccaatttac

SEQ ID NO: 972835 - DNA, 15 bp, Homo sapiens
aaaatccccaattta

SEQ ID NO: 972836 - DNA, 15 bp, Homo sapiens
aaaaatccccaattt

SEQ ID NO: 972837 - DNA, 15 bp, Homo sapiens
aaaaaatccccaatt

SEQ ID NO: 972838 - DNA, 15 bp, Homo sapiens
aaaaaaatccccaat

SEQ ID NO: 972839 - DNA, 15 bp, Homo sapiens
aaaaaaaatccccaa

SEQ ID NO: 972840 - DNA, 15 bp, Homo sapiens
aaaaaaaaatcccca

SEQ ID NO: 972841 - DNA, 15 bp, Homo sapiens
taaaaaaaaatcccc

SEQ ID NO: 972842 - DNA, 15 bp, Homo sapiens
ttaaaaaaaaatccc

SEQ ID NO: 972843 - DNA, 15 bp, Homo sapiens
tttaaaaaaaaatcc

SEQ ID NO: 972844 - DNA, 15 bp, Homo sapiens
atttaaaaaaaaatc

SEQ ID NO: 972845 - DNA, 15 bp, Homo sapiens
tatttaaaaaaaaat

SEQ ID NO: 972846 - DNA, 15 bp, Homo sapiens
gtatttaaaaaaaaa

SEQ ID NO: 972847 - DNA, 15 bp, Homo sapiens
ggtatttaaaaaaaa

SEQ ID NO: 972848 - DNA, 15 bp, Homo sapiens
aggtatttaaaaaaa

SEQ ID NO: 972849 - DNA, 15 bp, Homo sapiens
caggtatttaaaaaa

SEQ ID NO: 972850 - DNA, 15 bp, Homo sapiens
ccaggtatttaaaaa

SEQ ID NO: 972851 - DNA, 15 bp, Homo sapiens
gccaggtatttaaaa

SEQ ID NO: 972852 - DNA, 15 bp, Homo sapiens
tgccaggtatttaaa

SEQ ID NO: 972853 - DNA, 15 bp, Homo sapiens
atgccaggtatttaa

SEQ ID NO: 972854 - DNA, 15 bp, Homo sapiens
catgccaggtattta

SEQ ID NO: 972855 - DNA, 15 bp, Homo sapiens
gcatgccaggtattt

SEQ ID NO: 972856 - DNA, 15 bp, Homo sapiens
ggcatgccaggtatt

SEQ ID NO: 972857 - DNA, 15 bp, Homo sapiens
aggcatgccaggtat

SEQ ID NO: 972858 - DNA, 15 bp, Homo sapiens
taggcatgccaggta

SEQ ID NO: 972859 - DNA, 15 bp, Homo sapiens
ttaggcatgccaggt

SEQ ID NO: 972860 - DNA, 15 bp, Homo sapiens
gttaggcatgccagg

SEQ ID NO: 972861 - DNA, 15 bp, Homo sapiens
agttaggcatgccag

SEQ ID NO: 972862 - DNA, 15 bp, Homo sapiens
gagttaggcatgcca

SEQ ID NO: 972863 - DNA, 15 bp, Homo sapiens
tgagttaggcatgcc

SEQ ID NO: 972864 - DNA, 15 bp, Homo sapiens
atgagttaggcatgc

SEQ ID NO: 972865 - DNA, 15 bp, Homo sapiens
tatgagttaggcatg

SEQ ID NO: 972866 - DNA, 15 bp, Homo sapiens
ttatgagttaggcat

SEQ ID NO: 972867 - DNA, 15 bp, Homo sapiens
tttatgagttaggca

SEQ ID NO: 972868 - DNA, 15 bp, Homo sapiens
ctttatgagttaggc

SEQ ID NO: 972869 - DNA, 15 bp, Homo sapiens
actttatgagttagg

SEQ ID NO: 972870 - DNA, 15 bp, Homo sapiens
aactttatgagttag

SEQ ID NO: 972871 - DNA, 15 bp, Homo sapiens
caactttatgagtta

SEQ ID NO: 972872 - DNA, 15 bp, Homo sapiens
acaactttatgagtt

SEQ ID NO: 972873 - DNA, 15 bp, Homo sapiens
aacaactttatgagt

SEQ ID NO: 972874 - DNA, 15 bp, Homo sapiens
gaacaactttatgag

SEQ ID NO: 972875 - DNA, 15 bp, Homo sapiens
agaacaactttatga

SEQ ID NO: 972876 - DNA, 15 bp, Homo sapiens
cagaacaactttatg

SEQ ID NO: 972877 - DNA, 15 bp, Homo sapiens
tcagaacaactttat

SEQ ID NO: 972878 - DNA, 15 bp, Homo sapiens
ttcagaacaacttta

SEQ ID NO: 972879 - DNA, 15 bp, Homo sapiens
tttcagaacaacttt

SEQ ID NO: 972880 - DNA, 15 bp, Homo sapiens
gtttcagaacaactt

SEQ ID NO: 972881 - DNA, 15 bp, Homo sapiens
agtttcagaacaact

SEQ ID NO: 972882 - DNA, 15 bp, Homo sapiens
cagtttcagaacaac

SEQ ID NO: 972883 - DNA, 15 bp, Homo sapiens
tcagtttcagaacaa

SEQ ID NO: 972884 - DNA, 15 bp, Homo sapiens
ttcagtttcagaaca

SEQ ID NO: 972885 - DNA, 15 bp, Homo sapiens
tttcagtttcagaac

SEQ ID NO: 972886 - DNA, 15 bp, Homo sapiens
atttcagtttcagaa

SEQ ID NO: 972887 - DNA, 15 bp, Homo sapiens
tatttcagtttcaga

SEQ ID NO: 972888 - DNA, 15 bp, Homo sapiens
ttatttcagtttcag

SEQ ID NO: 972889 - DNA, 15 bp, Homo sapiens
tttatttcagtttca

SEQ ID NO: 972890 - DNA, 15 bp, Homo sapiens
ttttatttcagtttc

SEQ ID NO: 972891 - DNA, 15 bp, Homo sapiens
gttttatttcagttt

SEQ ID NO: 972892 - DNA, 15 bp, Homo sapiens
tgttttatttcagtt

SEQ ID NO: 972893 - DNA, 15 bp, Homo sapiens
atgttttatttcagt

SEQ ID NO: 972894 - DNA, 15 bp, Homo sapiens
tatgttttatttcag

SEQ ID NO: 972895 - DNA, 15 bp, Homo sapiens
gtatgttttatttca

SEQ ID NO: 972896 - DNA, 15 bp, Homo sapiens
cgtatgttttatttc

SEQ ID NO: 972897 - DNA, 15 bp, Homo sapiens
acgtatgttttattt

SEQ ID NO: 972898 - DNA, 15 bp, Homo sapiens
cacgtatgttttatt

SEQ ID NO: 972899 - DNA, 15 bp, Homo sapiens
tcacgtatgttttat

SEQ ID NO: 972900 - DNA, 15 bp, Homo sapiens
ttcacgtatgtttta

SEQ ID NO: 972901 - DNA, 15 bp, Homo sapiens
gttcacgtatgtttt

SEQ ID NO: 972902 - DNA, 15 bp, Homo sapiens
tgttcacgtatgttt

SEQ ID NO: 972903 - DNA, 15 bp, Homo sapiens
ctgttcacgtatgtt

SEQ ID NO: 972904 - DNA, 15 bp, Homo sapiens
cctgttcacgtatgt

SEQ ID NO: 972905 - DNA, 15 bp, Homo sapiens
gcctgttcacgtatg

SEQ ID NO: 972906 - DNA, 15 bp, Homo sapiens
tgcctgttcacgtat

SEQ ID NO: 972907 - DNA, 15 bp, Homo sapiens
atgcctgttcacgta

SEQ ID NO: 972908 - DNA, 15 bp, Homo sapiens
aatgcctgttcacgt

SEQ ID NO: 972909 - DNA, 15 bp, Homo sapiens
caatgcctgttcacg

SEQ ID NO: 972910 - DNA, 15 bp, Homo sapiens
acaatgcctgttcac

SEQ ID NO: 972911 - DNA, 15 bp, Homo sapiens
tacaatgcctgttca

SEQ ID NO: 972912 - DNA, 15 bp, Homo sapiens
ttacaatgcctgttc

SEQ ID NO: 972913 - DNA, 15 bp, Homo sapiens
tttacaatgcctgtt

SEQ ID NO: 972914 - DNA, 15 bp, Homo sapiens
gtttacaatgcctgt

SEQ ID NO: 972915 - DNA, 15 bp, Homo sapiens
agtttacaatgcctg

SEQ ID NO: 972916 - DNA, 15 bp, Homo sapiens
cagtttacaatgcct

SEQ ID NO: 972917 - DNA, 15 bp, Homo sapiens
acagtttacaatgcc

SEQ ID NO: 972918 - DNA, 15 bp, Homo sapiens
tacagtttacaatgc

SEQ ID NO: 972919 - DNA, 15 bp, Homo sapiens
ttacagtttacaatg

SEQ ID NO: 972920 - DNA, 15 bp, Homo sapiens
cttacagtttacaat

SEQ ID NO: 972921 - DNA, 15 bp, Homo sapiens
acttacagtttacaa

SEQ ID NO: 972922 - DNA, 15 bp, Homo sapiens
aacttacagtttaca

SEQ ID NO: 972923 - DNA, 15 bp, Homo sapiens
taacttacagtttac

SEQ ID NO: 972924 - DNA, 15 bp, Homo sapiens
gtaacttacagttta

SEQ ID NO: 972925 - DNA, 15 bp, Homo sapiens
cgtaacttacagttt

SEQ ID NO: 972926 - DNA, 15 bp, Homo sapiens
ccgtaacttacagtt

SEQ ID NO: 972927 - DNA, 15 bp, Homo sapiens
tccgtaacttacagt

SEQ ID NO: 972928 - DNA, 15 bp, Homo sapiens
ttccgtaacttacag

SEQ ID NO: 972929 - DNA, 15 bp, Homo sapiens
tttccgtaacttaca

SEQ ID NO: 972930 - DNA, 15 bp, Homo sapiens
ttttccgtaacttac

SEQ ID NO: 972931 - DNA, 15 bp, Homo sapiens
tttttccgtaactta

SEQ ID NO: 972932 - DNA, 15 bp, Homo sapiens
ctttttccgtaactt

SEQ ID NO: 972933 - DNA, 15 bp, Homo sapiens
gctttttccgtaact

SEQ ID NO: 972934 - DNA, 15 bp, Homo sapiens
agctttttccgtaac

SEQ ID NO: 972935 - DNA, 15 bp, Homo sapiens
cagctttttccgtaa

SEQ ID NO: 972936 - DNA, 15 bp, Homo sapiens
ccagctttttccgta

SEQ ID NO: 972937 - DNA, 15 bp, Homo sapiens
gccagctttttccgt

SEQ ID NO: 972938 - DNA, 15 bp, Homo sapiens
agccagctttttccg

SEQ ID NO: 972939 - DNA, 15 bp, Homo sapiens
cagccagctttttcc

SEQ ID NO: 972940 - DNA, 15 bp, Homo sapiens
acagccagctttttc

SEQ ID NO: 972941 - DNA, 15 bp, Homo sapiens
aacagccagcttttt

SEQ ID NO: 972942 - DNA, 15 bp, Homo sapiens
caacagccagctttt

SEQ ID NO: 972943 - DNA, 15 bp, Homo sapiens
acaacagccagcttt

SEQ ID NO: 972944 - DNA, 15 bp, Homo sapiens
aacaacagccagctt

SEQ ID NO: 972945 - DNA, 15 bp, Homo sapiens
caacaacagccagct

SEQ ID NO: 972946 - DNA, 15 bp, Homo sapiens
acaacaacagccagc

SEQ ID NO: 972947 - DNA, 15 bp, Homo sapiens
cacaacaacagccag

SEQ ID NO: 972948 - DNA, 15 bp, Homo sapiens
acacaacaacagcca

SEQ ID NO: 972949 - DNA, 15 bp, Homo sapiens
gacacaacaacagcc

SEQ ID NO: 972950 - DNA, 15 bp, Homo sapiens
agacacaacaacagc

SEQ ID NO: 972951 - DNA, 15 bp, Homo sapiens
aagacacaacaacag

SEQ ID NO: 972952 - DNA, 15 bp, Homo sapiens
aaagacacaacaaca

SEQ ID NO: 972953 - DNA, 15 bp, Homo sapiens
taaagacacaacaac

SEQ ID NO: 972954 - DNA, 15 bp, Homo sapiens
ttaaagacacaacaa

SEQ ID NO: 972955 - DNA, 15 bp, Homo sapiens
tttaaagacacaaca

SEQ ID NO: 972956 - DNA, 15 bp, Homo sapiens
ctttaaagacacaac

SEQ ID NO: 972957 - DNA, 15 bp, Homo sapiens
actttaaagacacaa

SEQ ID NO: 972958 - DNA, 15 bp, Homo sapiens
aactttaaagacaca

SEQ ID NO: 972959 - DNA, 15 bp, Homo sapiens
aaactttaaagacac

SEQ ID NO: 972960 - DNA, 15 bp, Homo sapiens
gaaactttaaagaca

SEQ ID NO: 972961 - DNA, 15 bp, Homo sapiens
tgaaactttaaagac

SEQ ID NO: 972962 - DNA, 15 bp, Homo sapiens
gtgaaactttaaaga

SEQ ID NO: 972963 - DNA, 15 bp, Homo sapiens
ggtgaaactttaaag

SEQ ID NO: 972964 - DNA, 15 bp, Homo sapiens
aggtgaaactttaaa

SEQ ID NO: 972965 - DNA, 15 bp, Homo sapiens
caggtgaaactttaa

SEQ ID NO: 972966 - DNA, 15 bp, Homo sapiens
ccaggtgaaacttta

SEQ ID NO: 972967 - DNA, 15 bp, Homo sapiens
cccaggtgaaacttt

SEQ ID NO: 972968 - DNA, 15 bp, Homo sapiens
acccaggtgaaactt

SEQ ID NO: 972969 - DNA, 15 bp, Homo sapiens
tacccaggtgaaact

SEQ ID NO: 972970 - DNA, 15 bp, Homo sapiens
ctacccaggtgaaac

SEQ ID NO: 972971 - DNA, 15 bp, Homo sapiens
actacccaggtgaaa

SEQ ID NO: 972972 - DNA, 15 bp, Homo sapiens
gactacccaggtgaa

SEQ ID NO: 972973 - DNA, 15 bp, Homo sapiens
tgactacccaggtga

SEQ ID NO: 972974 - DNA, 15 bp, Homo sapiens
ttgactacccaggtg

SEQ ID NO: 972975 - DNA, 15 bp, Homo sapiens
tttgactacccaggt

SEQ ID NO: 972976 - DNA, 15 bp, Homo sapiens
ctttgactacccagg

SEQ ID NO: 972977 - DNA, 15 bp, Homo sapiens
tctttgactacccag

SEQ ID NO: 972978 - DNA, 15 bp, Homo sapiens
atctttgactaccca

SEQ ID NO: 972979 - DNA, 15 bp, Homo sapiens
catctttgactaccc

SEQ ID NO: 972980 - DNA, 15 bp, Homo sapiens
ccatctttgactacc

SEQ ID NO: 972981 - DNA, 15 bp, Homo sapiens
tccatctttgactac

SEQ ID NO: 972982 - DNA, 15 bp, Homo sapiens
atccatctttgacta

SEQ ID NO: 972983 - DNA, 15 bp, Homo sapiens
gatccatctttgact

SEQ ID NO: 972984 - DNA, 15 bp, Homo sapiens
tgatccatctttgac

SEQ ID NO: 972985 - DNA, 15 bp, Homo sapiens
atgatccatctttga

SEQ ID NO: 972986 - DNA, 15 bp, Homo sapiens
catgatccatctttg

SEQ ID NO: 972987 - DNA, 15 bp, Homo sapiens
ccatgatccatcttt

SEQ ID NO: 972988 - DNA, 15 bp, Homo sapiens
cccatgatccatctt

SEQ ID NO: 972989 - DNA, 15 bp, Homo sapiens
acccatgatccatct

SEQ ID NO: 972990 - DNA, 15 bp, Homo sapiens
gacccatgatccatc

SEQ ID NO: 972991 - DNA, 15 bp, Homo sapiens
agacccatgatccat

SEQ ID NO: 972992 - DNA, 15 bp, Homo sapiens
gagacccatgatcca

SEQ ID NO: 972993 - DNA, 15 bp, Homo sapiens
tgagacccatgatcc

SEQ ID NO: 972994 - DNA, 15 bp, Homo sapiens
ctgagacccatgatc

SEQ ID NO: 972995 - DNA, 15 bp, Homo sapiens
actgagacccatgat

SEQ ID NO: 972996 - DNA, 15 bp, Homo sapiens
cactgagacccatga

SEQ ID NO: 972997 - DNA, 15 bp, Homo sapiens
ccactgagacccatg

SEQ ID NO: 972998 - DNA, 15 bp, Homo sapiens
tccactgagacccat

SEQ ID NO: 972999 - DNA, 15 bp, Homo sapiens
ctccactgagaccca

SEQ ID NO: 973000 - DNA, 15 bp, Homo sapiens
tctccactgagaccc

SEQ ID NO: 973001 - DNA, 15 bp, Homo sapiens
ctctccactgagacc

SEQ ID NO: 973002 - DNA, 15 bp, Homo sapiens
gctctccactgagac

SEQ ID NO: 973003 - DNA, 15 bp, Homo sapiens
agctctccactgaga

SEQ ID NO: 973004 - DNA, 15 bp, Homo sapiens
cagctctccactgag

SEQ ID NO: 973005 - DNA, 15 bp, Homo sapiens
tcagctctccactga

SEQ ID NO: 973006 - DNA, 15 bp, Homo sapiens
ctcagctctccactg

SEQ ID NO: 973007 - DNA, 15 bp, Homo sapiens
gctcagctctccact

SEQ ID NO: 973008 - DNA, 15 bp, Homo sapiens
ggctcagctctccac

SEQ ID NO: 973009 - DNA, 15 bp, Homo sapiens
tggctcagctctcca

SEQ ID NO: 973010 - DNA, 15 bp, Homo sapiens
ctggctcagctctcc

SEQ ID NO: 973011 - DNA, 15 bp, Homo sapiens
cctggctcagctctc

SEQ ID NO: 973012 - DNA, 15 bp, Homo sapiens
gcctggctcagctct

SEQ ID NO: 973013 - DNA, 15 bp, Homo sapiens
tgcctggctcagctc

SEQ ID NO: 973014 - DNA, 15 bp, Homo sapiens
ctgcctggctcagct

SEQ ID NO: 973015 - DNA, 15 bp, Homo sapiens
cctgcctggctcagc

SEQ ID NO: 973016 - DNA, 15 bp, Homo sapiens
tcctgcctggctcag

SEQ ID NO: 973017 - DNA, 15 bp, Homo sapiens
ctcctgcctggctca

SEQ ID NO: 973018 - DNA, 15 bp, Homo sapiens
gctcctgcctggctc

SEQ ID NO: 973019 - DNA, 15 bp, Homo sapiens
agctcctgcctggct

SEQ ID NO: 973020 - DNA, 15 bp, Homo sapiens
cagctcctgcctggc

SEQ ID NO: 973021 - DNA, 15 bp, Homo sapiens
tcagctcctgcctgg

SEQ ID NO: 973022 - DNA, 15 bp, Homo sapiens
gtcagctcctgcctg

SEQ ID NO: 973023 - DNA, 15 bp, Homo sapiens
agtcagctcctgcct

SEQ ID NO: 973024 - DNA, 15 bp, Homo sapiens
tagtcagctcctgcc

SEQ ID NO: 973025 - DNA, 15 bp, Homo sapiens
ttagtcagctcctgc

SEQ ID NO: 973026 - DNA, 15 bp, Homo sapiens
cttagtcagctcctg

SEQ ID NO: 973027 - DNA, 15 bp, Homo sapiens
ccttagtcagctcct

SEQ ID NO: 973028 - DNA, 15 bp, Homo sapiens
cccttagtcagctcc

SEQ ID NO: 973029 - DNA, 15 bp, Homo sapiens
acccttagtcagctc

SEQ ID NO: 973030 - DNA, 15 bp, Homo sapiens
cacccttagtcagct

SEQ ID NO: 973031 - DNA, 15 bp, Homo sapiens
tcacccttagtcagc

SEQ ID NO: 973032 - DNA, 15 bp, Homo sapiens
ctcacccttagtcag

SEQ ID NO: 973033 - DNA, 15 bp, Homo sapiens
tctcacccttagtca

SEQ ID NO: 973034 - DNA, 15 bp, Homo sapiens
ctctcacccttagtc

SEQ ID NO: 973035 - DNA, 15 bp, Homo sapiens
cctctcacccttagt

SEQ ID NO: 973036 - DNA, 15 bp, Homo sapiens
acctctcacccttag

SEQ ID NO: 973037 - DNA, 15 bp, Homo sapiens
cacctctcaccctta

SEQ ID NO: 973038 - DNA, 15 bp, Homo sapiens
ccacctctcaccctt

SEQ ID NO: 973039 - DNA, 15 bp, Homo sapiens
cccacctctcaccct

SEQ ID NO: 973040 - DNA, 15 bp, Homo sapiens
tcccacctctcaccc

SEQ ID NO: 973041 - DNA, 15 bp, Homo sapiens
ctcccacctctcacc

SEQ ID NO: 973042 - DNA, 15 bp, Homo sapiens
actcccacctctcac

SEQ ID NO: 973043 - DNA, 15 bp, Homo sapiens
aactcccacctctca

SEQ ID NO: 973044 - DNA, 15 bp, Homo sapiens
taactcccacctctc

SEQ ID NO: 973045 - DNA, 15 bp, Homo sapiens
ctaactcccacctct

SEQ ID NO: 973046 - DNA, 15 bp, Homo sapiens
gctaactcccacctc

SEQ ID NO: 973047 - DNA, 15 bp, Homo sapiens
tgctaactcccacct

SEQ ID NO: 973048 - DNA, 15 bp, Homo sapiens
ctgctaactcccacc

SEQ ID NO: 973049 - DNA, 15 bp, Homo sapiens
gctgctaactcccac

SEQ ID NO: 973050 - DNA, 15 bp, Homo sapiens
ggctgctaactccca

SEQ ID NO: 973051 - DNA, 15 bp, Homo sapiens
aggctgctaactccc

SEQ ID NO: 973052 - DNA, 15 bp, Homo sapiens
gaggctgctaactcc

SEQ ID NO: 973053 - DNA, 15 bp, Homo sapiens
agaggctgctaactc

SEQ ID NO: 973054 - DNA, 15 bp, Homo sapiens
cagaggctgctaact

SEQ ID NO: 973055 - DNA, 15 bp, Homo sapiens
tcagaggctgctaac

SEQ ID NO: 973056 - DNA, 15 bp, Homo sapiens
ttcagaggctgctaa

SEQ ID NO: 973057 - DNA, 15 bp, Homo sapiens
gttcagaggctgcta

SEQ ID NO: 973058 - DNA, 15 bp, Homo sapiens
tgttcagaggctgct

SEQ ID NO: 973059 - DNA, 15 bp, Homo sapiens
atgttcagaggctgc

SEQ ID NO: 973060 - DNA, 15 bp, Homo sapiens
gatgttcagaggctg

SEQ ID NO: 973061 - DNA, 15 bp, Homo sapiens
agatgttcagaggct

SEQ ID NO: 973062 - DNA, 15 bp, Homo sapiens
cagatgttcagaggc

SEQ ID NO: 973063 - DNA, 15 bp, Homo sapiens
acagatgttcagagg

SEQ ID NO: 973064 - DNA, 15 bp, Homo sapiens
cacagatgttcagag

SEQ ID NO: 973065 - DNA, 15 bp, Homo sapiens
acacagatgttcaga

SEQ ID NO: 973066 - DNA, 15 bp, Homo sapiens
tacacagatgttcag

SEQ ID NO: 973067 - DNA, 15 bp, Homo sapiens
gtacacagatgttca

SEQ ID NO: 973068 - DNA, 15 bp, Homo sapiens
ggtacacagatgttc

SEQ ID NO: 973069 - DNA, 15 bp, Homo sapiens
tggtacacagatgtt

SEQ ID NO: 973070 - DNA, 15 bp, Homo sapiens
atggtacacagatgt

SEQ ID NO: 973071 - DNA, 15 bp, Homo sapiens
catggtacacagatg

SEQ ID NO: 973072 - DNA, 15 bp, Homo sapiens
ccatggtacacagat

SEQ ID NO: 973073 - DNA, 15 bp, Homo sapiens
cccatggtacacaga

SEQ ID NO: 973074 - DNA, 15 bp, Homo sapiens
tcccatggtacacag

SEQ ID NO: 973075 - DNA, 15 bp, Homo sapiens
gtcccatggtacaca

SEQ ID NO: 973076 - DNA, 15 bp, Homo sapiens
ggtcccatggtacac

SEQ ID NO: 973077 - DNA, 15 bp, Homo sapiens
gggtcccatggtaca

SEQ ID NO: 973078 - DNA, 15 bp, Homo sapiens
ggggtcccatggtac

SEQ ID NO: 973079 - DNA, 15 bp, Homo sapiens
gggggtcccatggta

SEQ ID NO: 973080 - DNA, 15 bp, Homo sapiens
agggggtcccatggt

SEQ ID NO: 973081 - DNA, 15 bp, Homo sapiens
aagggggtcccatgg

SEQ ID NO: 973082 - DNA, 15 bp, Homo sapiens
aaagggggtcccatg

SEQ ID NO: 973083 - DNA, 15 bp, Homo sapiens
gaaagggggtcccat

SEQ ID NO: 973084 - DNA, 15 bp, Homo sapiens
ggaaagggggtccca

SEQ ID NO: 973085 - DNA, 15 bp, Homo sapiens
aggaaagggggtccc

SEQ ID NO: 973086 - DNA, 15 bp, Homo sapiens
gaggaaagggggtcc

SEQ ID NO: 973087 - DNA, 15 bp, Homo sapiens
ggaggaaagggggtc

SEQ ID NO: 973088 - DNA, 15 bp, Homo sapiens
aggaggaaagggggt

SEQ ID NO: 973089 - DNA, 15 bp, Homo sapiens
caggaggaaaggggg

SEQ ID NO: 973090 - DNA, 15 bp, Homo sapiens
gcaggaggaaagggg

SEQ ID NO: 973091 - DNA, 15 bp, Homo sapiens
tgcaggaggaaaggg

SEQ ID NO: 973092 - DNA, 15 bp, Homo sapiens
atgcaggaggaaagg

SEQ ID NO: 973093 - DNA, 15 bp, Homo sapiens
catgcaggaggaaag

SEQ ID NO: 973094 - DNA, 15 bp, Homo sapiens
ccatgcaggaggaaa

SEQ ID NO: 973095 - DNA, 15 bp, Homo sapiens
accatgcaggaggaa

SEQ ID NO: 973096 - DNA, 15 bp, Homo sapiens
taccatgcaggagga

SEQ ID NO: 973097 - DNA, 15 bp, Homo sapiens
gtaccatgcaggagg

SEQ ID NO: 973098 - DNA, 15 bp, Homo sapiens
ggtaccatgcaggag

SEQ ID NO: 973099 - DNA, 15 bp, Homo sapiens
gggtaccatgcagga

SEQ ID NO: 973100 - DNA, 15 bp, Homo sapiens
ggggtaccatgcagg

SEQ ID NO: 973101 - DNA, 15 bp, Homo sapiens
tggggtaccatgcag

SEQ ID NO: 973102 - DNA, 15 bp, Homo sapiens
ctggggtaccatgca

SEQ ID NO: 973103 - DNA, 15 bp, Homo sapiens
tctggggtaccatgc

SEQ ID NO: 973104 - DNA, 15 bp, Homo sapiens
gtctggggtaccatg

SEQ ID NO: 973105 - DNA, 15 bp, Homo sapiens
tgtctggggtaccat

SEQ ID NO: 973106 - DNA, 15 bp, Homo sapiens
ttgtctggggtacca

SEQ ID NO: 973107 - DNA, 15 bp, Homo sapiens
cttgtctggggtacc

SEQ ID NO: 973108 - DNA, 15 bp, Homo sapiens
ccttgtctggggtac

SEQ ID NO: 973109 - DNA, 15 bp, Homo sapiens
tccttgtctggggta

SEQ ID NO: 973110 - DNA, 15 bp, Homo sapiens
ctccttgtctggggt

SEQ ID NO: 973111 - DNA, 15 bp, Homo sapiens
gctccttgtctgggg

SEQ ID NO: 973112 - DNA, 15 bp, Homo sapiens
ggctccttgtctggg

SEQ ID NO: 973113 - DNA, 15 bp, Homo sapiens
aggctccttgtctgg

SEQ ID NO: 973114 - DNA, 15 bp, Homo sapiens
taggctccttgtctg

SEQ ID NO: 973115 - DNA, 15 bp, Homo sapiens
ctaggctccttgtct

SEQ ID NO: 973116 - DNA, 15 bp, Homo sapiens
actaggctccttgtc

SEQ ID NO: 973117 - DNA, 15 bp, Homo sapiens
tactaggctccttgt

SEQ ID NO: 973118 - DNA, 15 bp, Homo sapiens
ttactaggctccttg

SEQ ID NO: 973119 - DNA, 15 bp, Homo sapiens
cttactaggctcctt

SEQ ID NO: 973120 - DNA, 15 bp, Homo sapiens
tcttactaggctcct

SEQ ID NO: 973121 - DNA, 15 bp, Homo sapiens
ctcttactaggctcc

SEQ ID NO: 973122 - DNA, 15 bp, Homo sapiens
tctcttactaggctc

SEQ ID NO: 973123 - DNA, 15 bp, Homo sapiens
atctcttactaggct

SEQ ID NO: 973124 - DNA, 15 bp, Homo sapiens
tatctcttactaggc

SEQ ID NO: 973125 - DNA, 15 bp, Homo sapiens
gtatctcttactagg

SEQ ID NO: 973126 - DNA, 15 bp, Homo sapiens
agtatctcttactag

SEQ ID NO: 973127 - DNA, 15 bp, Homo sapiens
tagtatctcttacta

SEQ ID NO: 973128 - DNA, 15 bp, Homo sapiens
ttagtatctcttact

SEQ ID NO: 973129 - DNA, 15 bp, Homo sapiens
attagtatctcttac

SEQ ID NO: 973130 - DNA, 15 bp, Homo sapiens
cattagtatctctta

SEQ ID NO: 973131 - DNA, 15 bp, Homo sapiens
ccattagtatctctt

SEQ ID NO: 973132 - DNA, 15 bp, Homo sapiens
gccattagtatctct

SEQ ID NO: 973133 - DNA, 15 bp, Homo sapiens
agccattagtatctc

SEQ ID NO: 973134 - DNA, 15 bp, Homo sapiens
aagccattagtatct

SEQ ID NO: 973135 - DNA, 15 bp, Homo sapiens
caagccattagtatc

SEQ ID NO: 973136 - DNA, 15 bp, Homo sapiens
acaagccattagtat

SEQ ID NO: 973137 - DNA, 15 bp, Homo sapiens
aacaagccattagta

SEQ ID NO: 973138 - DNA, 15 bp, Homo sapiens
caacaagccattagt

SEQ ID NO: 973139 - DNA, 15 bp, Homo sapiens
acaacaagccattag

SEQ ID NO: 973140 - DNA, 15 bp, Homo sapiens
gacaacaagccatta

SEQ ID NO: 973141 - DNA, 15 bp, Homo sapiens
ggacaacaagccatt

SEQ ID NO: 973142 - DNA, 15 bp, Homo sapiens
tggacaacaagccat

SEQ ID NO: 973143 - DNA, 15 bp, Homo sapiens
ctggacaacaagcca

SEQ ID NO: 973144 - DNA, 15 bp, Homo sapiens
tctggacaacaagcc

SEQ ID NO: 973145 - DNA, 15 bp, Homo sapiens
ctctggacaacaagc

SEQ ID NO: 973146 - DNA, 15 bp, Homo sapiens
tctctggacaacaag

SEQ ID NO: 973147 - DNA, 15 bp, Homo sapiens
atctctggacaacaa

SEQ ID NO: 973148 - DNA, 15 bp, Homo sapiens
catctctggacaaca

SEQ ID NO: 973149 - DNA, 15 bp, Homo sapiens
acatctctggacaac

SEQ ID NO: 973150 - DNA, 15 bp, Homo sapiens
aacatctctggacaa

SEQ ID NO: 973151 - DNA, 15 bp, Homo sapiens
gaacatctctggaca

SEQ ID NO: 973152 - DNA, 15 bp, Homo sapiens
tgaacatctctggac

SEQ ID NO: 973153 - DNA, 15 bp, Homo sapiens
ttgaacatctctgga

SEQ ID NO: 973154 - DNA, 15 bp, Homo sapiens
tttgaacatctctgg

SEQ ID NO: 973155 - DNA, 15 bp, Homo sapiens
gtttgaacatctctg

SEQ ID NO: 973156 - DNA, 15 bp, Homo sapiens
agtttgaacatctct

SEQ ID NO: 973157 - DNA, 15 bp, Homo sapiens
cagtttgaacatctc

SEQ ID NO: 973158 - DNA, 15 bp, Homo sapiens
gcagtttgaacatct

SEQ ID NO: 973159 - DNA, 15 bp, Homo sapiens
tgcagtttgaacatc

SEQ ID NO: 973160 - DNA, 15 bp, Homo sapiens
ctgcagtttgaacat

SEQ ID NO: 973161 - DNA, 15 bp, Homo sapiens
tctgcagtttgaaca

SEQ ID NO: 973162 - DNA, 15 bp, Homo sapiens
ctctgcagtttgaac

SEQ ID NO: 973163 - DNA, 15 bp, Homo sapiens
tctctgcagtttgaa

SEQ ID NO: 973164 - DNA, 15 bp, Homo sapiens
ttctctgcagtttga

SEQ ID NO: 973165 - DNA, 15 bp, Homo sapiens
tttctctgcagtttg

SEQ ID NO: 973166 - DNA, 15 bp, Homo sapiens
ctttctctgcagttt

SEQ ID NO: 973167 - DNA, 15 bp, Homo sapiens
tctttctctgcagtt

SEQ ID NO: 973168 - DNA, 15 bp, Homo sapiens
atctttctctgcagt

SEQ ID NO: 973169 - DNA, 15 bp, Homo sapiens
tatctttctctgcag

SEQ ID NO: 973170 - DNA, 15 bp, Homo sapiens
ttatctttctctgca

SEQ ID NO: 973171 - DNA, 15 bp, Homo sapiens
cttatctttctctgc

SEQ ID NO: 973172 - DNA, 15 bp, Homo sapiens
tcttatctttctctg

SEQ ID NO: 973173 - DNA, 15 bp, Homo sapiens
gtcttatctttctct

SEQ ID NO: 973174 - DNA, 15 bp, Homo sapiens
tgtcttatctttctc

SEQ ID NO: 973175 - DNA, 15 bp, Homo sapiens
ttgtcttatctttct

SEQ ID NO: 973176 - DNA, 15 bp, Homo sapiens
gttgtcttatctttc

SEQ ID NO: 973177 - DNA, 15 bp, Homo sapiens
tgttgtcttatcttt

SEQ ID NO: 973178 - DNA, 15 bp, Homo sapiens
ttgttgtcttatctt

SEQ ID NO: 973179 - DNA, 15 bp, Homo sapiens
cttgttgtcttatct

SEQ ID NO: 973180 - DNA, 15 bp, Homo sapiens
gcttgttgtcttatc

SEQ ID NO: 973181 - DNA, 15 bp, Homo sapiens
tgcttgttgtcttat

SEQ ID NO: 973182 - DNA, 15 bp, Homo sapiens
atgcttgttgtctta

SEQ ID NO: 973183 - DNA, 15 bp, Homo sapiens
aatgcttgttgtctt

SEQ ID NO: 973184 - DNA, 15 bp, Homo sapiens
caatgcttgttgtct

SEQ ID NO: 973185 - DNA, 15 bp, Homo sapiens
ccaatgcttgttgtc

SEQ ID NO: 973186 - DNA, 15 bp, Homo sapiens
gccaatgcttgttgt

SEQ ID NO: 973187 - DNA, 15 bp, Homo sapiens
ggccaatgcttgttg

SEQ ID NO: 973188 - DNA, 15 bp, Homo sapiens
aggccaatgcttgtt

SEQ ID NO: 973189 - DNA, 15 bp, Homo sapiens
gaggccaatgcttgt

SEQ ID NO: 973190 - DNA, 15 bp, Homo sapiens
ggaggccaatgcttg

SEQ ID NO: 973191 - DNA, 15 bp, Homo sapiens
tggaggccaatgctt

SEQ ID NO: 973192 - DNA, 15 bp, Homo sapiens
ttggaggccaatgct

SEQ ID NO: 973193 - DNA, 15 bp, Homo sapiens
attggaggccaatgc

SEQ ID NO: 973194 - DNA, 15 bp, Homo sapiens
gattggaggccaatg

SEQ ID NO: 973195 - DNA, 15 bp, Homo sapiens
tgattggaggccaat

SEQ ID NO: 973196 - DNA, 15 bp, Homo sapiens
atgattggaggccaa

SEQ ID NO: 973197 - DNA, 15 bp, Homo sapiens
catgattggaggcca

SEQ ID NO: 973198 - DNA, 15 bp, Homo sapiens
tcatgattggaggcc

SEQ ID NO: 973199 - DNA, 15 bp, Homo sapiens
atcatgattggaggc

SEQ ID NO: 973200 - DNA, 15 bp, Homo sapiens
catcatgattggagg

SEQ ID NO: 973201 - DNA, 15 bp, Homo sapiens
tcatcatgattggag

SEQ ID NO: 973202 - DNA, 15 bp, Homo sapiens
gtcatcatgattgga

SEQ ID NO: 973203 - DNA, 15 bp, Homo sapiens
tgtcatcatgattgg

SEQ ID NO: 973204 - DNA, 15 bp, Homo sapiens
ctgtcatcatgattg

SEQ ID NO: 973205 - DNA, 15 bp, Homo sapiens
tctgtcatcatgatt

SEQ ID NO: 973206 - DNA, 15 bp, Homo sapiens
atctgtcatcatgat

SEQ ID NO: 973207 - DNA, 15 bp, Homo sapiens
tatctgtcatcatga

SEQ ID NO: 973208 - DNA, 15 bp, Homo sapiens
ctatctgtcatcatg

SEQ ID NO: 973209 - DNA, 15 bp, Homo sapiens
cctatctgtcatcat

SEQ ID NO: 973210 - DNA, 15 bp, Homo sapiens
tcctatctgtcatca

SEQ ID NO: 973211 - DNA, 15 bp, Homo sapiens
ctcctatctgtcatc

SEQ ID NO: 973212 - DNA, 15 bp, Homo sapiens
cctcctatctgtcat

SEQ ID NO: 973213 - DNA, 15 bp, Homo sapiens
tcctcctatctgtca

SEQ ID NO: 973214 - DNA, 15 bp, Homo sapiens
ctcctcctatctgtc

SEQ ID NO: 973215 - DNA, 15 bp, Homo sapiens
cctcctcctatctgt

SEQ ID NO: 973216 - DNA, 15 bp, Homo sapiens
acctcctcctatctg

SEQ ID NO: 973217 - DNA, 15 bp, Homo sapiens
cacctcctcctatct

SEQ ID NO: 973218 - DNA, 15 bp, Homo sapiens
ccacctcctcctatc

SEQ ID NO: 973219 - DNA, 15 bp, Homo sapiens
cccacctcctcctat

SEQ ID NO: 973220 - DNA, 15 bp, Homo sapiens
tcccacctcctccta

SEQ ID NO: 973221 - DNA, 15 bp, Homo sapiens
ctcccacctcctcct

SEQ ID NO: 973222 - DNA, 15 bp, Homo sapiens
gctcccacctcctcc

SEQ ID NO: 973223 - DNA, 15 bp, Homo sapiens
agctcccacctcctc

SEQ ID NO: 973224 - DNA, 15 bp, Homo sapiens
gagctcccacctcct

SEQ ID NO: 973225 - DNA, 15 bp, Homo sapiens
ggagctcccacctcc

SEQ ID NO: 973226 - DNA, 15 bp, Homo sapiens
aggagctcccacctc

SEQ ID NO: 973227 - DNA, 15 bp, Homo sapiens
aaggagctcccacct

SEQ ID NO: 973228 - DNA, 15 bp, Homo sapiens
taaggagctcccacc

SEQ ID NO: 973229 - DNA, 15 bp, Homo sapiens
ctaaggagctcccac

SEQ ID NO: 973230 - DNA, 15 bp, Homo sapiens
gctaaggagctccca

SEQ ID NO: 973231 - DNA, 15 bp, Homo sapiens
tgctaaggagctccc

SEQ ID NO: 973232 - DNA, 15 bp, Homo sapiens
ctgctaaggagctcc

SEQ ID NO: 973233 - DNA, 15 bp, Homo sapiens
actgctaaggagctc

SEQ ID NO: 973234 - DNA, 15 bp, Homo sapiens
cactgctaaggagct

SEQ ID NO: 973235 - DNA, 15 bp, Homo sapiens
gcactgctaaggagc

SEQ ID NO: 973236 - DNA, 15 bp, Homo sapiens
agcactgctaaggag

SEQ ID NO: 973237 - DNA, 15 bp, Homo sapiens
cagcactgctaagga

SEQ ID NO: 973238 - DNA, 15 bp, Homo sapiens
ccagcactgctaagg

SEQ ID NO: 973239 - DNA, 15 bp, Homo sapiens
accagcactgctaag

SEQ ID NO: 973240 - DNA, 15 bp, Homo sapiens
aaccagcactgctaa

SEQ ID NO: 973241 - DNA, 15 bp, Homo sapiens
caaccagcactgcta

SEQ ID NO: 973242 - DNA, 15 bp, Homo sapiens
ccaaccagcactgct

SEQ ID NO: 973243 - DNA, 15 bp, Homo sapiens
gccaaccagcactgc

SEQ ID NO: 973244 - DNA, 15 bp, Homo sapiens
ggccaaccagcactg

SEQ ID NO: 973245 - DNA, 15 bp, Homo sapiens
aggccaaccagcact

SEQ ID NO: 973246 - DNA, 15 bp, Homo sapiens
aaggccaaccagcac

SEQ ID NO: 973247 - DNA, 15 bp, Homo sapiens
gaaggccaaccagca

SEQ ID NO: 973248 - DNA, 15 bp, Homo sapiens
ggaaggccaaccagc

SEQ ID NO: 973249 - DNA, 15 bp, Homo sapiens
tggaaggccaaccag

SEQ ID NO: 973250 - DNA, 15 bp, Homo sapiens
atggaaggccaacca

SEQ ID NO: 973251 - DNA, 15 bp, Homo sapiens
catggaaggccaacc

SEQ ID NO: 973252 - DNA, 15 bp, Homo sapiens
acatggaaggccaac

SEQ ID NO: 973253 - DNA, 15 bp, Homo sapiens
aacatggaaggccaa

SEQ ID NO: 973254 - DNA, 15 bp, Homo sapiens
gaacatggaaggcca

SEQ ID NO: 973255 - DNA, 15 bp, Homo sapiens
agaacatggaaggcc

SEQ ID NO: 973256 - DNA, 15 bp, Homo sapiens
tagaacatggaaggc

SEQ ID NO: 973257 - DNA, 15 bp, Homo sapiens
gtagaacatggaagg

SEQ ID NO: 973258 - DNA, 15 bp, Homo sapiens
agtagaacatggaag

SEQ ID NO: 973259 - DNA, 15 bp, Homo sapiens
cagtagaacatggaa

SEQ ID NO: 973260 - DNA, 15 bp, Homo sapiens
acagtagaacatgga

SEQ ID NO: 973261 - DNA, 15 bp, Homo sapiens
cacagtagaacatgg

SEQ ID NO: 973262 - DNA, 15 bp, Homo sapiens
ccacagtagaacatg

SEQ ID NO: 973263 - DNA, 15 bp, Homo sapiens
cccacagtagaacat

SEQ ID NO: 973264 - DNA, 15 bp, Homo sapiens
gcccacagtagaaca

SEQ ID NO: 973265 - DNA, 15 bp, Homo sapiens
ggcccacagtagaac

SEQ ID NO: 973266 - DNA, 15 bp, Homo sapiens
tggcccacagtagaa

SEQ ID NO: 973267 - DNA, 15 bp, Homo sapiens
atggcccacagtaga

SEQ ID NO: 973268 - DNA, 15 bp, Homo sapiens
gatggcccacagtag

SEQ ID NO: 973269 - DNA, 15 bp, Homo sapiens
agatggcccacagta

SEQ ID NO: 973270 - DNA, 15 bp, Homo sapiens
gagatggcccacagt

SEQ ID NO: 973271 - DNA, 15 bp, Homo sapiens
agagatggcccacag

SEQ ID NO: 973272 - DNA, 15 bp, Homo sapiens
cagagatggcccaca

SEQ ID NO: 973273 - DNA, 15 bp, Homo sapiens
gcagagatggcccac

SEQ ID NO: 973274 - DNA, 15 bp, Homo sapiens
ggcagagatggccca

SEQ ID NO: 973275 - DNA, 15 bp, Homo sapiens
tggcagagatggccc

SEQ ID NO: 973276 - DNA, 15 bp, Homo sapiens
atggcagagatggcc

SEQ ID NO: 973277 - DNA, 15 bp, Homo sapiens
catggcagagatggc

SEQ ID NO: 973278 - DNA, 15 bp, Homo sapiens
acatggcagagatgg

SEQ ID NO: 973279 - DNA, 15 bp, Homo sapiens
tacatggcagagatg

SEQ ID NO: 973280 - DNA, 15 bp, Homo sapiens
gtacatggcagagat

SEQ ID NO: 973281 - DNA, 15 bp, Homo sapiens
agtacatggcagaga

SEQ ID NO: 973282 - DNA, 15 bp, Homo sapiens
cagtacatggcagag

SEQ ID NO: 973283 - DNA, 15 bp, Homo sapiens
acagtacatggcaga

SEQ ID NO: 973284 - DNA, 15 bp, Homo sapiens
tacagtacatggcag

SEQ ID NO: 973285 - DNA, 15 bp, Homo sapiens
ctacagtacatggca

SEQ ID NO: 973286 - DNA, 15 bp, Homo sapiens
cctacagtacatggc

SEQ ID NO: 973287 - DNA, 15 bp, Homo sapiens
gcctacagtacatgg

SEQ ID NO: 973288 - DNA, 15 bp, Homo sapiens
agcctacagtacatg

SEQ ID NO: 973289 - DNA, 15 bp, Homo sapiens
tagcctacagtacat

SEQ ID NO: 973290 - DNA, 15 bp, Homo sapiens
gtagcctacagtaca

SEQ ID NO: 973291 - DNA, 15 bp, Homo sapiens
agtagcctacagtac

SEQ ID NO: 973292 - DNA, 15 bp, Homo sapiens
tagtagcctacagta

SEQ ID NO: 973293 - DNA, 15 bp, Homo sapiens
ctagtagcctacagt

SEQ ID NO: 973294 - DNA, 15 bp, Homo sapiens
gctagtagcctacag

SEQ ID NO: 973295 - DNA, 15 bp, Homo sapiens
agctagtagcctaca

SEQ ID NO: 973296 - DNA, 15 bp, Homo sapiens
aagctagtagcctac

SEQ ID NO: 973297 - DNA, 15 bp, Homo sapiens
gaagctagtagccta

SEQ ID NO: 973298 - DNA, 15 bp, Homo sapiens
agaagctagtagcct

SEQ ID NO: 973299 - DNA, 15 bp, Homo sapiens
tagaagctagtagcc

SEQ ID NO: 973300 - DNA, 15 bp, Homo sapiens
atagaagctagtagc

SEQ ID NO: 973301 - DNA, 15 bp, Homo sapiens
tatagaagctagtag

SEQ ID NO: 973302 - DNA, 15 bp, Homo sapiens
atatagaagctagta

SEQ ID NO: 973303 - DNA, 15 bp, Homo sapiens
aatatagaagctagt

SEQ ID NO: 973304 - DNA, 15 bp, Homo sapiens
taatatagaagctag

SEQ ID NO: 973305 - DNA, 15 bp, Homo sapiens
ttaatatagaagcta

SEQ ID NO: 973306 - DNA, 15 bp, Homo sapiens
tttaatatagaagct

SEQ ID NO: 973307 - DNA, 15 bp, Homo sapiens
ctttaatatagaagc

SEQ ID NO: 973308 - DNA, 15 bp, Homo sapiens
tctttaatatagaag

SEQ ID NO: 973309 - DNA, 15 bp, Homo sapiens
ttctttaatatagaa

SEQ ID NO: 973310 - DNA, 15 bp, Homo sapiens
attctttaatataga

SEQ ID NO: 973311 - DNA, 15 bp, Homo sapiens
cattctttaatatag

SEQ ID NO: 973312 - DNA, 15 bp, Homo sapiens
gcattctttaatata

SEQ ID NO: 973313 - DNA, 15 bp, Homo sapiens
tgcattctttaatat

SEQ ID NO: 973314 - DNA, 15 bp, Homo sapiens
ttgcattctttaata

SEQ ID NO: 973315 - DNA, 15 bp, Homo sapiens
cttgcattctttaat

SEQ ID NO: 973316 - DNA, 15 bp, Homo sapiens
tcttgcattctttaa

SEQ ID NO: 973317 - DNA, 15 bp, Homo sapiens
ctcttgcattcttta

SEQ ID NO: 973318 - DNA, 15 bp, Homo sapiens
cctcttgcattcttt

SEQ ID NO: 973319 - DNA, 15 bp, Homo sapiens
ccctcttgcattctt

SEQ ID NO: 973320 - DNA, 15 bp, Homo sapiens
cccctcttgcattct

SEQ ID NO: 973321 - DNA, 15 bp, Homo sapiens
gcccctcttgcattc

SEQ ID NO: 973322 - DNA, 15 bp, Homo sapiens
ggcccctcttgcatt

SEQ ID NO: 973323 - DNA, 15 bp, Homo sapiens
tggcccctcttgcat

SEQ ID NO: 973324 - DNA, 15 bp, Homo sapiens
ctggcccctcttgca

SEQ ID NO: 973325 - DNA, 15 bp, Homo sapiens
cctggcccctcttgc

SEQ ID NO: 973326 - DNA, 15 bp, Homo sapiens
tcctggcccctcttg

SEQ ID NO: 973327 - DNA, 15 bp, Homo sapiens
ctcctggcccctctt

SEQ ID NO: 973328 - DNA, 15 bp, Homo sapiens
gctcctggcccctct

SEQ ID NO: 973329 - DNA, 15 bp, Homo sapiens
cgctcctggcccctc

SEQ ID NO: 973330 - DNA, 15 bp, Homo sapiens
ccgctcctggcccct

SEQ ID NO: 973331 - DNA, 15 bp, Homo sapiens
tccgctcctggcccc

SEQ ID NO: 973332 - DNA, 15 bp, Homo sapiens
ctccgctcctggccc

SEQ ID NO: 973333 - DNA, 15 bp, Homo sapiens
cctccgctcctggcc

SEQ ID NO: 973334 - DNA, 15 bp, Homo sapiens
gcctccgctcctggc

SEQ ID NO: 973335 - DNA, 15 bp, Homo sapiens
agcctccgctcctgg

SEQ ID NO: 973336 - DNA, 15 bp, Homo sapiens
gagcctccgctcctg

SEQ ID NO: 973337 - DNA, 15 bp, Homo sapiens
tgagcctccgctcct

SEQ ID NO: 973338 - DNA, 15 bp, Homo sapiens
atgagcctccgctcc

SEQ ID NO: 973339 - DNA, 15 bp, Homo sapiens
catgagcctccgctc

SEQ ID NO: 973340 - DNA, 15 bp, Homo sapiens
gcatgagcctccgct

SEQ ID NO: 973341 - DNA, 15 bp, Homo sapiens
ggcatgagcctccgc

SEQ ID NO: 973342 - DNA, 15 bp, Homo sapiens
aggcatgagcctccg

SEQ ID NO: 973343 - DNA, 15 bp, Homo sapiens
caggcatgagcctcc

SEQ ID NO: 973344 - DNA, 15 bp, Homo sapiens
acaggcatgagcctc

SEQ ID NO: 973345 - DNA, 15 bp, Homo sapiens
tacaggcatgagcct

SEQ ID NO: 973346 - DNA, 15 bp, Homo sapiens
ttacaggcatgagcc

SEQ ID NO: 973347 - DNA, 15 bp, Homo sapiens
attacaggcatgagc

SEQ ID NO: 973348 - DNA, 15 bp, Homo sapiens
gattacaggcatgag

SEQ ID NO: 973349 - DNA, 15 bp, Homo sapiens
agattacaggcatga

SEQ ID NO: 973350 - DNA, 15 bp, Homo sapiens
gagattacaggcatg

SEQ ID NO: 973351 - DNA, 15 bp, Homo sapiens
tgagattacaggcat

SEQ ID NO: 973352 - DNA, 15 bp, Homo sapiens
ctgagattacaggca

SEQ ID NO: 973353 - DNA, 15 bp, Homo sapiens
gctgagattacaggc

SEQ ID NO: 973354 - DNA, 15 bp, Homo sapiens
tgctgagattacagg

SEQ ID NO: 973355 - DNA, 15 bp, Homo sapiens
gtgctgagattacag

SEQ ID NO: 973356 - DNA, 15 bp, Homo sapiens
agtgctgagattaca

SEQ ID NO: 973357 - DNA, 15 bp, Homo sapiens
aagtgctgagattac

SEQ ID NO: 973358 - DNA, 15 bp, Homo sapiens
aaagtgctgagatta

SEQ ID NO: 973359 - DNA, 15 bp, Homo sapiens
caaagtgctgagatt

SEQ ID NO: 973360 - DNA, 15 bp, Homo sapiens
ccaaagtgctgagat

SEQ ID NO: 973361 - DNA, 15 bp, Homo sapiens
cccaaagtgctgaga

SEQ ID NO: 973362 - DNA, 15 bp, Homo sapiens
tcccaaagtgctgag

SEQ ID NO: 973363 - DNA, 15 bp, Homo sapiens
ctcccaaagtgctga

SEQ ID NO: 973364 - DNA, 15 bp, Homo sapiens
cctcccaaagtgctg

SEQ ID NO: 973365 - DNA, 15 bp, Homo sapiens
gcctcccaaagtgct

SEQ ID NO: 973366 - DNA, 15 bp, Homo sapiens
ggcctcccaaagtgc

SEQ ID NO: 973367 - DNA, 15 bp, Homo sapiens
tggcctcccaaagtg

SEQ ID NO: 973368 - DNA, 15 bp, Homo sapiens
ttggcctcccaaagt

SEQ ID NO: 973369 - DNA, 15 bp, Homo sapiens
cttggcctcccaaag

SEQ ID NO: 973370 - DNA, 15 bp, Homo sapiens
ccttggcctcccaaa

SEQ ID NO: 973371 - DNA, 15 bp, Homo sapiens
accttggcctcccaa

SEQ ID NO: 973372 - DNA, 15 bp, Homo sapiens
caccttggcctccca

SEQ ID NO: 973373 - DNA, 15 bp, Homo sapiens
ccaccttggcctccc

SEQ ID NO: 973374 - DNA, 15 bp, Homo sapiens
cccaccttggcctcc

SEQ ID NO: 973375 - DNA, 15 bp, Homo sapiens
gcccaccttggcctc

SEQ ID NO: 973376 - DNA, 15 bp, Homo sapiens
tgcccaccttggcct

SEQ ID NO: 973377 - DNA, 15 bp, Homo sapiens
ctgcccaccttggcc

SEQ ID NO: 973378 - DNA, 15 bp, Homo sapiens
tctgcccaccttggc

SEQ ID NO: 973379 - DNA, 15 bp, Homo sapiens
atctgcccaccttgg

SEQ ID NO: 973380 - DNA, 15 bp, Homo sapiens
gatctgcccaccttg

SEQ ID NO: 973381 - DNA, 15 bp, Homo sapiens
tgatctgcccacctt

SEQ ID NO: 973382 - DNA, 15 bp, Homo sapiens
gtgatctgcccacct

SEQ ID NO: 973383 - DNA, 15 bp, Homo sapiens
agtgatctgcccacc

SEQ ID NO: 973384 - DNA, 15 bp, Homo sapiens
aagtgatctgcccac

SEQ ID NO: 973385 - DNA, 15 bp, Homo sapiens
caagtgatctgccca

SEQ ID NO: 973386 - DNA, 15 bp, Homo sapiens
tcaagtgatctgccc

SEQ ID NO: 973387 - DNA, 15 bp, Homo sapiens
ctcaagtgatctgcc

SEQ ID NO: 973388 - DNA, 15 bp, Homo sapiens
cctcaagtgatctgc

SEQ ID NO: 973389 - DNA, 15 bp, Homo sapiens
acctcaagtgatctg

SEQ ID NO: 973390 - DNA, 15 bp, Homo sapiens
gacctcaagtgatct

SEQ ID NO: 973391 - DNA, 15 bp, Homo sapiens
ctgacctcaagtgat

SEQ ID NO: 973392 - DNA, 15 bp, Homo sapiens
cctgacctcaagtga

SEQ ID NO: 973393 - DNA, 15 bp, Homo sapiens
tcctgacctcaagtg

SEQ ID NO: 973394 - DNA, 15 bp, Homo sapiens
ctcctgacctcaagt

SEQ ID NO: 973395 - DNA, 15 bp, Homo sapiens
actcctgacctcaag

SEQ ID NO: 973396 - DNA, 15 bp, Homo sapiens
aactcctgacctcaa

SEQ ID NO: 973397 - DNA, 15 bp, Homo sapiens
aaactcctgacctca

SEQ ID NO: 973398 - DNA, 15 bp, Homo sapiens
caaactcctgacctc

SEQ ID NO: 973399 - DNA, 15 bp, Homo sapiens
acaaactcctgacct

SEQ ID NO: 973400 - DNA, 15 bp, Homo sapiens
cacaaactcctgacc

SEQ ID NO: 973401 - DNA, 15 bp, Homo sapiens
tcacaaactcctgac

SEQ ID NO: 973402 - DNA, 15 bp, Homo sapiens
gtcacaaactcctga

SEQ ID NO: 973403 - DNA, 15 bp, Homo sapiens
ggtcacaaactcctg

SEQ ID NO: 973404 - DNA, 15 bp, Homo sapiens
tggtcacaaactcct

SEQ ID NO: 973405 - DNA, 15 bp, Homo sapiens
ctggtcacaaactcc

SEQ ID NO: 973406 - DNA, 15 bp, Homo sapiens
gctggtcacaaactc

SEQ ID NO: 973407 - DNA, 15 bp, Homo sapiens
ggctggtcacaaact

SEQ ID NO: 973408 - DNA, 15 bp, Homo sapiens
aggctggtcacaaac

SEQ ID NO: 973409 - DNA, 15 bp, Homo sapiens
caggctggtcacaaa

SEQ ID NO: 973410 - DNA, 15 bp, Homo sapiens
ccaggctggtcacaa

SEQ ID NO: 973411 - DNA, 15 bp, Homo sapiens
gccaggctggtcaca

SEQ ID NO: 973412 - DNA, 15 bp, Homo sapiens
ggccaggctggtcac

SEQ ID NO: 973413 - DNA, 15 bp, Homo sapiens
tggccaggctggtca

SEQ ID NO: 973414 - DNA, 15 bp, Homo sapiens
ttggccaggctggtc

SEQ ID NO: 973415 - DNA, 15 bp, Homo sapiens
gttggccaggctggt

SEQ ID NO: 973416 - DNA, 15 bp, Homo sapiens
tgttggccaggctgg

SEQ ID NO: 973417 - DNA, 15 bp, Homo sapiens
atgttggccaggctg

SEQ ID NO: 973418 - DNA, 15 bp, Homo sapiens
catgttggccaggct

SEQ ID NO: 973419 - DNA, 15 bp, Homo sapiens
ccatgttggccaggc

SEQ ID NO: 973420 - DNA, 15 bp, Homo sapiens
accatgttggccagg

SEQ ID NO: 973421 - DNA, 15 bp, Homo sapiens
caccatgttggccag

SEQ ID NO: 973422 - DNA, 15 bp, Homo sapiens
tcaccatgttggcca

SEQ ID NO: 973423 - DNA, 15 bp, Homo sapiens
ttcaccatgttggcc

SEQ ID NO: 973424 - DNA, 15 bp, Homo sapiens
tttcaccatgttggc

SEQ ID NO: 973425 - DNA, 15 bp, Homo sapiens
gtttcaccatgttgg

SEQ ID NO: 973426 - DNA, 15 bp, Homo sapiens
agtttcaccatgttg

SEQ ID NO: 973427 - DNA, 15 bp, Homo sapiens
gagtttcaccatgtt

SEQ ID NO: 973428 - DNA, 15 bp, Homo sapiens
agagtttcaccatgt

SEQ ID NO: 973429 - DNA, 15 bp, Homo sapiens
cagagtttcaccatg

SEQ ID NO: 973430 - DNA, 15 bp, Homo sapiens
gcagagtttcaccat

SEQ ID NO: 973431 - DNA, 15 bp, Homo sapiens
ggcagagtttcacca

SEQ ID NO: 973432 - DNA, 15 bp, Homo sapiens
aggcagagtttcacc

SEQ ID NO: 973433 - DNA, 15 bp, Homo sapiens
aaggcagagtttcac

SEQ ID NO: 973434 - DNA, 15 bp, Homo sapiens
aaaggcagagtttca

SEQ ID NO: 973435 - DNA, 15 bp, Homo sapiens
taaaggcagagtttc

SEQ ID NO: 973436 - DNA, 15 bp, Homo sapiens
gtaaaggcagagttt

SEQ ID NO: 973437 - DNA, 15 bp, Homo sapiens
agtaaaggcagagtt

SEQ ID NO: 973438 - DNA, 15 bp, Homo sapiens
tagtaaaggcagagt

SEQ ID NO: 973439 - DNA, 15 bp, Homo sapiens
ttagtaaaggcagag

SEQ ID NO: 973440 - DNA, 15 bp, Homo sapiens
tttagtaaaggcaga

SEQ ID NO: 973441 - DNA, 15 bp, Homo sapiens
ttttagtaaaggcag

SEQ ID NO: 973442 - DNA, 15 bp, Homo sapiens
tttttagtaaaggca

SEQ ID NO: 973443 - DNA, 15 bp, Homo sapiens
atttttagtaaaggc

SEQ ID NO: 973444 - DNA, 15 bp, Homo sapiens
tatttttagtaaagg

SEQ ID NO: 973445 - DNA, 15 bp, Homo sapiens
atatttttagtaaag

SEQ ID NO: 973446 - DNA, 15 bp, Homo sapiens
tatatttttagtaaa

SEQ ID NO: 973447 - DNA, 15 bp, Homo sapiens
ttatatttttagtaa

SEQ ID NO: 973448 - DNA, 15 bp, Homo sapiens
tttatatttttagta

SEQ ID NO: 973449 - DNA, 15 bp, Homo sapiens
ttttatatttttagt

SEQ ID NO: 973450 - DNA, 15 bp, Homo sapiens
tttttatatttttag

SEQ ID NO: 973451 - DNA, 15 bp, Homo sapiens
atttttatattttta

SEQ ID NO: 973452 - DNA, 15 bp, Homo sapiens
aatttttatattttt

SEQ ID NO: 973453 - DNA, 15 bp, Homo sapiens
taatttttatatttt

SEQ ID NO: 973454 - DNA, 15 bp, Homo sapiens
ctaatttttatattt

SEQ ID NO: 973455 - DNA, 15 bp, Homo sapiens
gctaatttttatatt

SEQ ID NO: 973456 - DNA, 15 bp, Homo sapiens
agctaatttttatat

SEQ ID NO: 973457 - DNA, 15 bp, Homo sapiens
cagctaatttttata

SEQ ID NO: 973458 - DNA, 15 bp, Homo sapiens
ccagctaatttttat

SEQ ID NO: 973459 - DNA, 15 bp, Homo sapiens
cccagctaattttta

SEQ ID NO: 973460 - DNA, 15 bp, Homo sapiens
acccagctaattttt

SEQ ID NO: 973461 - DNA, 15 bp, Homo sapiens
cacccagctaatttt

SEQ ID NO: 973462 - DNA, 15 bp, Homo sapiens
acacccagctaattt

SEQ ID NO: 973463 - DNA, 15 bp, Homo sapiens
cacacccagctaatt

SEQ ID NO: 973464 - DNA, 15 bp, Homo sapiens
ccacacccagctaat

SEQ ID NO: 973465 - DNA, 15 bp, Homo sapiens
accacacccagctaa

SEQ ID NO: 973466 - DNA, 15 bp, Homo sapiens
caccacacccagcta

SEQ ID NO: 973467 - DNA, 15 bp, Homo sapiens
ccaccacacccagct

SEQ ID NO: 973468 - DNA, 15 bp, Homo sapiens
accaccacacccagc

SEQ ID NO: 973469 - DNA, 15 bp, Homo sapiens
caccaccacacccag

SEQ ID NO: 973470 - DNA, 15 bp, Homo sapiens
acaccaccacaccca

SEQ ID NO: 973471 - DNA, 15 bp, Homo sapiens
cacaccaccacaccc

SEQ ID NO: 973472 - DNA, 15 bp, Homo sapiens
gcacaccaccacacc

SEQ ID NO: 973473 - DNA, 15 bp, Homo sapiens
tgcacaccaccacac

SEQ ID NO: 973474 - DNA, 15 bp, Homo sapiens
gtgcacaccaccaca

SEQ ID NO: 973475 - DNA, 15 bp, Homo sapiens
ggtgcacaccaccac

SEQ ID NO: 973476 - DNA, 15 bp, Homo sapiens
aggtgcacaccacca

SEQ ID NO: 973477 - DNA, 15 bp, Homo sapiens
caggtgcacaccacc

SEQ ID NO: 973478 - DNA, 15 bp, Homo sapiens
acaggtgcacaccac

SEQ ID NO: 973479 - DNA, 15 bp, Homo sapiens
tacaggtgcacacca

SEQ ID NO: 973480 - DNA, 15 bp, Homo sapiens
ttacaggtgcacacc

SEQ ID NO: 973481 - DNA, 15 bp, Homo sapiens
attacaggtgcacac

SEQ ID NO: 973482 - DNA, 15 bp, Homo sapiens
gattacaggtgcaca

SEQ ID NO: 973483 - DNA, 15 bp, Homo sapiens
ggattacaggtgcac

SEQ ID NO: 973484 - DNA, 15 bp, Homo sapiens
gggattacaggtgca

SEQ ID NO: 973485 - DNA, 15 bp, Homo sapiens
tgggattacaggtgc

SEQ ID NO: 973486 - DNA, 15 bp, Homo sapiens
ctgggattacaggtg

SEQ ID NO: 973487 - DNA, 15 bp, Homo sapiens
gctgggattacaggt

SEQ ID NO: 973488 - DNA, 15 bp, Homo sapiens
agctgggattacagg

SEQ ID NO: 973489 - DNA, 15 bp, Homo sapiens
tagctgggattacag

SEQ ID NO: 973490 - DNA, 15 bp, Homo sapiens
gtagctgggattaca

SEQ ID NO: 973491 - DNA, 15 bp, Homo sapiens
agtagctgggattac

SEQ ID NO: 973492 - DNA, 15 bp, Homo sapiens
gagtagctgggatta

SEQ ID NO: 973493 - DNA, 15 bp, Homo sapiens
cgagtagctgggatt

SEQ ID NO: 973494 - DNA, 15 bp, Homo sapiens
ccgagtagctgggat

SEQ ID NO: 973495 - DNA, 15 bp, Homo sapiens
cccgagtagctggga

SEQ ID NO: 973496 - DNA, 15 bp, Homo sapiens
tcccgagtagctggg

SEQ ID NO: 973497 - DNA, 15 bp, Homo sapiens
ctcccgagtagctgg

SEQ ID NO: 973498 - DNA, 15 bp, Homo sapiens
tctcccgagtagctg

SEQ ID NO: 973499 - DNA, 15 bp, Homo sapiens
gtctcccgagtagct

SEQ ID NO: 973500 - DNA, 15 bp, Homo sapiens
agtctcccgagtagc

SEQ ID NO: 973501 - DNA, 15 bp, Homo sapiens
cagtctcccgagtag

SEQ ID NO: 973502 - DNA, 15 bp, Homo sapiens
tcagtctcccgagta

SEQ ID NO: 973503 - DNA, 15 bp, Homo sapiens
ctcagtctcccgagt

SEQ ID NO: 973504 - DNA, 15 bp, Homo sapiens
cctcagtctcccgag

SEQ ID NO: 973505 - DNA, 15 bp, Homo sapiens
gcctcagtctcccga

SEQ ID NO: 973506 - DNA, 15 bp, Homo sapiens
tgcctcagtctcccg

SEQ ID NO: 973507 - DNA, 15 bp, Homo sapiens
gtgcctcagtctccc

SEQ ID NO: 973508 - DNA, 15 bp, Homo sapiens
tgtgcctcagtctcc

SEQ ID NO: 973509 - DNA, 15 bp, Homo sapiens
ttgtgcctcagtctc

SEQ ID NO: 973510 - DNA, 15 bp, Homo sapiens
cttgtgcctcagtct

SEQ ID NO: 973511 - DNA, 15 bp, Homo sapiens
tcttgtgcctcagtc

SEQ ID NO: 973512 - DNA, 15 bp, Homo sapiens
ttcttgtgcctcagt

SEQ ID NO: 973513 - DNA, 15 bp, Homo sapiens
attcttgtgcctcag

SEQ ID NO: 973514 - DNA, 15 bp, Homo sapiens
aattcttgtgcctca

SEQ ID NO: 973515 - DNA, 15 bp, Homo sapiens
caattcttgtgcctc

SEQ ID NO: 973516 - DNA, 15 bp, Homo sapiens
gcaattcttgtgcct

SEQ ID NO: 973517 - DNA, 15 bp, Homo sapiens
agcaattcttgtgcc

SEQ ID NO: 973518 - DNA, 15 bp, Homo sapiens
aagcaattcttgtgc

SEQ ID NO: 973519 - DNA, 15 bp, Homo sapiens
caagcaattcttgtg

SEQ ID NO: 973520 - DNA, 15 bp, Homo sapiens
tcaagcaattcttgt

SEQ ID NO: 973521 - DNA, 15 bp, Homo sapiens
ttcaagcaattcttg

SEQ ID NO: 973522 - DNA, 15 bp, Homo sapiens
gttcaagcaattctt

SEQ ID NO: 973523 - DNA, 15 bp, Homo sapiens
ggttcaagcaattct

SEQ ID NO: 973524 - DNA, 15 bp, Homo sapiens
aggttcaagcaattc

SEQ ID NO: 973525 - DNA, 15 bp, Homo sapiens
caggttcaagcaatt

SEQ ID NO: 973526 - DNA, 15 bp, Homo sapiens
ccaggttcaagcaat

SEQ ID NO: 973527 - DNA, 15 bp, Homo sapiens
cccaggttcaagcaa

SEQ ID NO: 973528 - DNA, 15 bp, Homo sapiens
tcccaggttcaagca

SEQ ID NO: 973529 - DNA, 15 bp, Homo sapiens
ctcccaggttcaagc

SEQ ID NO: 973530 - DNA, 15 bp, Homo sapiens
cctcccaggttcaag

SEQ ID NO: 973531 - DNA, 15 bp, Homo sapiens
gcctcccaggttcaa

SEQ ID NO: 973532 - DNA, 15 bp, Homo sapiens
cgcctcccaggttca

SEQ ID NO: 973533 - DNA, 15 bp, Homo sapiens
ccgcctcccaggttc

SEQ ID NO: 973534 - DNA, 15 bp, Homo sapiens
tccgcctcccaggtt

SEQ ID NO: 973535 - DNA, 15 bp, Homo sapiens
ttccgcctcccaggt

SEQ ID NO: 973536 - DNA, 15 bp, Homo sapiens
cttccgcctcccagg

SEQ ID NO: 973537 - DNA, 15 bp, Homo sapiens
acttccgcctcccag

SEQ ID NO: 973538 - DNA, 15 bp, Homo sapiens
aacttccgcctccca

SEQ ID NO: 973539 - DNA, 15 bp, Homo sapiens
caacttccgcctccc

SEQ ID NO: 973540 - DNA, 15 bp, Homo sapiens
gcaacttccgcctcc

SEQ ID NO: 973541 - DNA, 15 bp, Homo sapiens
tgcaacttccgcctc

SEQ ID NO: 973542 - DNA, 15 bp, Homo sapiens
ctgcaacttccgcct

SEQ ID NO: 973543 - DNA, 15 bp, Homo sapiens
actgcaacttccgcc

SEQ ID NO: 973544 - DNA, 15 bp, Homo sapiens
cactgcaacttccgc

SEQ ID NO: 973545 - DNA, 15 bp, Homo sapiens
tcactgcaacttccg

SEQ ID NO: 973546 - DNA, 15 bp, Homo sapiens
ctcactgcaacttcc

SEQ ID NO: 973547 - DNA, 15 bp, Homo sapiens
gctcactgcaacttc

SEQ ID NO: 973548 - DNA, 15 bp, Homo sapiens
ggctcactgcaactt

SEQ ID NO: 973549 - DNA, 15 bp, Homo sapiens
gggctcactgcaact

SEQ ID NO: 973550 - DNA, 15 bp, Homo sapiens
tgggctcactgcaac

SEQ ID NO: 973551 - DNA, 15 bp, Homo sapiens
ctgggctcactgcaa

SEQ ID NO: 973552 - DNA, 15 bp, Homo sapiens
tctgggctcactgca

SEQ ID NO: 973553 - DNA, 15 bp, Homo sapiens
atctgggctcactgc

SEQ ID NO: 973554 - DNA, 15 bp, Homo sapiens
aatctgggctcactg

SEQ ID NO: 973555 - DNA, 15 bp, Homo sapiens
caatctgggctcact

SEQ ID NO: 973556 - DNA, 15 bp, Homo sapiens
gcaatctgggctcac

SEQ ID NO: 973557 - DNA, 15 bp, Homo sapiens
cgcaatctgggctca

SEQ ID NO: 973558 - DNA, 15 bp, Homo sapiens
gcgcaatctgggctc

SEQ ID NO: 973559 - DNA, 15 bp, Homo sapiens
ggcgcaatctgggct

SEQ ID NO: 973560 - DNA, 15 bp, Homo sapiens
tggcgcaatctgggc

SEQ ID NO: 973561 - DNA, 15 bp, Homo sapiens
gtggcgcaatctggg

SEQ ID NO: 973562 - DNA, 15 bp, Homo sapiens
agtggcgcaatctgg

SEQ ID NO: 973563 - DNA, 15 bp, Homo sapiens
cagtggcgcaatctg

SEQ ID NO: 973564 - DNA, 15 bp, Homo sapiens
gcagtggcgcaatct

SEQ ID NO: 973565 - DNA, 15 bp, Homo sapiens
tgcagtggcgcaatc

SEQ ID NO: 973566 - DNA, 15 bp, Homo sapiens
gtgcagtggcgcaat

SEQ ID NO: 973567 - DNA, 15 bp, Homo sapiens
agtgcagtggcgcaa

SEQ ID NO: 973568 - DNA, 15 bp, Homo sapiens
gagtgcagtggcgca

SEQ ID NO: 973569 - DNA, 15 bp, Homo sapiens
ggagtgcagtggcgc

SEQ ID NO: 973570 - DNA, 15 bp, Homo sapiens
tggagtgcagtggcg

SEQ ID NO: 973571 - DNA, 15 bp, Homo sapiens
gtggagtgcagtggc

SEQ ID NO: 973572 - DNA, 15 bp, Homo sapiens
ggtggagtgcagtgg

SEQ ID NO: 973573 - DNA, 15 bp, Homo sapiens
gggtggagtgcagtg

SEQ ID NO: 973574 - DNA, 15 bp, Homo sapiens
agggtggagtgcagt

SEQ ID NO: 973575 - DNA, 15 bp, Homo sapiens
cagggtggagtgcag

SEQ ID NO: 973576 - DNA, 15 bp, Homo sapiens
ccagggtggagtgca

SEQ ID NO: 973577 - DNA, 15 bp, Homo sapiens
cccagggtggagtgc

SEQ ID NO: 973578 - DNA, 15 bp, Homo sapiens
gcccagggtggagtg

SEQ ID NO: 973579 - DNA, 15 bp, Homo sapiens
tgcccagggtggagt

SEQ ID NO: 973580 - DNA, 15 bp, Homo sapiens
ttgcccagggtggag

SEQ ID NO: 973581 - DNA, 15 bp, Homo sapiens
gttgcccagggtgga

SEQ ID NO: 973582 - DNA, 15 bp, Homo sapiens
tgttgcccagggtgg

SEQ ID NO: 973583 - DNA, 15 bp, Homo sapiens
ctgttgcccagggtg

SEQ ID NO: 973584 - DNA, 15 bp, Homo sapiens
tctgttgcccagggt

SEQ ID NO: 973585 - DNA, 15 bp, Homo sapiens
ctctgttgcccaggg

SEQ ID NO: 973586 - DNA, 15 bp, Homo sapiens
tctctgttgcccagg

SEQ ID NO: 973587 - DNA, 15 bp, Homo sapiens
ttctctgttgcccag

SEQ ID NO: 973588 - DNA, 15 bp, Homo sapiens
tttctctgttgccca

SEQ ID NO: 973589 - DNA, 15 bp, Homo sapiens
ctttctctgttgccc

SEQ ID NO: 973590 - DNA, 15 bp, Homo sapiens
tctttctctgttgcc

SEQ ID NO: 973591 - DNA, 15 bp, Homo sapiens
gtctttctctgttgc

SEQ ID NO: 973592 - DNA, 15 bp, Homo sapiens
agtctttctctgttg

SEQ ID NO: 973593 - DNA, 15 bp, Homo sapiens
gagtctttctctgtt

SEQ ID NO: 973594 - DNA, 15 bp, Homo sapiens
agagtctttctctgt

SEQ ID NO: 973595 - DNA, 15 bp, Homo sapiens
cagagtctttctctg

SEQ ID NO: 973596 - DNA, 15 bp, Homo sapiens
gcagagtctttctct

SEQ ID NO: 973597 - DNA, 15 bp, Homo sapiens
ggcagagtctttctc

SEQ ID NO: 973598 - DNA, 15 bp, Homo sapiens
aggcagagtctttct

SEQ ID NO: 973599 - DNA, 15 bp, Homo sapiens
gaggcagagtctttc

SEQ ID NO: 973600 - DNA, 15 bp, Homo sapiens
tgaggcagagtcttt

SEQ ID NO: 973601 - DNA, 15 bp, Homo sapiens
ttgaggcagagtctt

SEQ ID NO: 973602 - DNA, 15 bp, Homo sapiens
tttgaggcagagtct

SEQ ID NO: 973603 - DNA, 15 bp, Homo sapiens
ttttgaggcagagtc

SEQ ID NO: 973604 - DNA, 15 bp, Homo sapiens
tttttgaggcagagt

SEQ ID NO: 973605 - DNA, 15 bp, Homo sapiens
ttttttgaggcagag

SEQ ID NO: 973606 - DNA, 15 bp, Homo sapiens
tttttttgaggcaga

SEQ ID NO: 973607 - DNA, 15 bp, Homo sapiens
ttttttttgaggcag

SEQ ID NO: 973608 - DNA, 15 bp, Homo sapiens
tttttttttgaggca

SEQ ID NO: 973609 - DNA, 15 bp, Homo sapiens
ttttttttttgaggc

SEQ ID NO: 973610 - DNA, 15 bp, Homo sapiens
tttttttttttgagg

SEQ ID NO: 973611 - DNA, 15 bp, Homo sapiens
ttttttttttttgag

SEQ ID NO: 973612 - DNA, 15 bp, Homo sapiens
tttttttttttttga

SEQ ID NO: 973613 - DNA, 15 bp, Homo sapiens
ttttttttttttttg

SEQ ID NO: 973614 - DNA, 15 bp, Homo sapiens
ttttttttttttttt

SEQ ID NO: 973615 - DNA, 15 bp, Homo sapiens
ctttttttttttttt

SEQ ID NO: 973616 - DNA, 15 bp, Homo sapiens
gcttttttttttttt

SEQ ID NO: 973617 - DNA, 15 bp, Homo sapiens
tgctttttttttttt

SEQ ID NO: 973618 - DNA, 15 bp, Homo sapiens
ttgcttttttttttt

SEQ ID NO: 973619 - DNA, 15 bp, Homo sapiens
cttgctttttttttt

SEQ ID NO: 973620 - DNA, 15 bp, Homo sapiens
tcttgcttttttttt

SEQ ID NO: 973621 - DNA, 15 bp, Homo sapiens
ctcttgctttttttt

SEQ ID NO: 973622 - DNA, 15 bp, Homo sapiens
cctcttgcttttttt

SEQ ID NO: 973623 - DNA, 15 bp, Homo sapiens
tcctcttgctttttt

SEQ ID NO: 973624 - DNA, 15 bp, Homo sapiens
ttcctcttgcttttt

SEQ ID NO: 973625 - DNA, 15 bp, Homo sapiens
cttcctcttgctttt

SEQ ID NO: 973626 - DNA, 15 bp, Homo sapiens
acttcctcttgcttt

SEQ ID NO: 973627 - DNA, 15 bp, Homo sapiens
cacttcctcttgctt

SEQ ID NO: 973628 - DNA, 15 bp, Homo sapiens
tcacttcctcttgct

SEQ ID NO: 973629 - DNA, 15 bp, Homo sapiens
ttcacttcctcttgc

SEQ ID NO: 973630 - DNA, 15 bp, Homo sapiens
tttcacttcctcttg

SEQ ID NO: 973631 - DNA, 15 bp, Homo sapiens
atttcacttcctctt

SEQ ID NO: 973632 - DNA, 15 bp, Homo sapiens
tatttcacttcctct

SEQ ID NO: 973633 - DNA, 15 bp, Homo sapiens
ttatttcacttcctc

SEQ ID NO: 973634 - DNA, 15 bp, Homo sapiens
attatttcacttcct

SEQ ID NO: 973635 - DNA, 15 bp, Homo sapiens
gattatttcacttcc

SEQ ID NO: 973636 - DNA, 15 bp, Homo sapiens
tgattatttcacttc

SEQ ID NO: 973637 - DNA, 15 bp, Homo sapiens
ttgattatttcactt

SEQ ID NO: 973638 - DNA, 15 bp, Homo sapiens
cttgattatttcact

SEQ ID NO: 973639 - DNA, 15 bp, Homo sapiens
ccttgattatttcac

SEQ ID NO: 973640 - DNA, 15 bp, Homo sapiens
gccttgattatttca

SEQ ID NO: 973641 - DNA, 15 bp, Homo sapiens
ggccttgattatttc

SEQ ID NO: 973642 - DNA, 15 bp, Homo sapiens
cggccttgattattt

SEQ ID NO: 973643 - DNA, 15 bp, Homo sapiens
gcggccttgattatt

SEQ ID NO: 973644 - DNA, 15 bp, Homo sapiens
ggcggccttgattat

SEQ ID NO: 973645 - DNA, 15 bp, Homo sapiens
tggcggccttgatta

SEQ ID NO: 973646 - DNA, 15 bp, Homo sapiens
atggcggccttgatt

SEQ ID NO: 973647 - DNA, 15 bp, Homo sapiens
aatggcggccttgat

SEQ ID NO: 973648 - DNA, 15 bp, Homo sapiens
aaatggcggccttga

SEQ ID NO: 973649 - DNA, 15 bp, Homo sapiens
taaatggcggccttg

SEQ ID NO: 973650 - DNA, 15 bp, Homo sapiens
ttaaatggcggcctt

SEQ ID NO: 973651 - DNA, 15 bp, Homo sapiens
attaaatggcggcct

SEQ ID NO: 973652 - DNA, 15 bp, Homo sapiens
tattaaatggcggcc

SEQ ID NO: 973653 - DNA, 15 bp, Homo sapiens
ctattaaatggcggc

SEQ ID NO: 973654 - DNA, 15 bp, Homo sapiens
actattaaatggcgg

SEQ ID NO: 973655 - DNA, 15 bp, Homo sapiens
cactattaaatggcg

SEQ ID NO: 973656 - DNA, 15 bp, Homo sapiens
tcactattaaatggc

SEQ ID NO: 973657 - DNA, 15 bp, Homo sapiens
ctcactattaaatgg

SEQ ID NO: 973658 - DNA, 15 bp, Homo sapiens
gctcactattaaatg

SEQ ID NO: 973659 - DNA, 15 bp, Homo sapiens
tgctcactattaaat

SEQ ID NO: 973660 - DNA, 15 bp, Homo sapiens
ctgctcactattaaa

SEQ ID NO: 973661 - DNA, 15 bp, Homo sapiens
gctgctcactattaa

SEQ ID NO: 973662 - DNA, 15 bp, Homo sapiens
ggctgctcactatta

SEQ ID NO: 973663 - DNA, 15 bp, Homo sapiens
tggctgctcactatt

SEQ ID NO: 973664 - DNA, 15 bp, Homo sapiens
gtggctgctcactat

SEQ ID NO: 973665 - DNA, 15 bp, Homo sapiens
agtggctgctcacta

SEQ ID NO: 973666 - DNA, 15 bp, Homo sapiens
gagtggctgctcact

SEQ ID NO: 973667 - DNA, 15 bp, Homo sapiens
ggagtggctgctcac

SEQ ID NO: 973668 - DNA, 15 bp, Homo sapiens
tggagtggctgctca

SEQ ID NO: 973669 - DNA, 15 bp, Homo sapiens
atggagtggctgctc

SEQ ID NO: 973670 - DNA, 15 bp, Homo sapiens
catggagtggctgct

SEQ ID NO: 973671 - DNA, 15 bp, Homo sapiens
acatggagtggctgc

SEQ ID NO: 973672 - DNA, 15 bp, Homo sapiens
cacatggagtggctg

SEQ ID NO: 973673 - DNA, 15 bp, Homo sapiens
ccacatggagtggct

SEQ ID NO: 973674 - DNA, 15 bp, Homo sapiens
accacatggagtggc

SEQ ID NO: 973675 - DNA, 15 bp, Homo sapiens
taccacatggagtgg

SEQ ID NO: 973676 - DNA, 15 bp, Homo sapiens
gtaccacatggagtg

SEQ ID NO: 973677 - DNA, 15 bp, Homo sapiens
agtaccacatggagt

SEQ ID NO: 973678 - DNA, 15 bp, Homo sapiens
cagtaccacatggag

SEQ ID NO: 973679 - DNA, 15 bp, Homo sapiens
acagtaccacatgga

SEQ ID NO: 973680 - DNA, 15 bp, Homo sapiens
cacagtaccacatgg

SEQ ID NO: 973681 - DNA, 15 bp, Homo sapiens
gcacagtaccacatg

SEQ ID NO: 973682 - DNA, 15 bp, Homo sapiens
tgcacagtaccacat

SEQ ID NO: 973683 - DNA, 15 bp, Homo sapiens
ttgcacagtaccaca

SEQ ID NO: 973684 - DNA, 15 bp, Homo sapiens
cttgcacagtaccac

SEQ ID NO: 973685 - DNA, 15 bp, Homo sapiens
gcttgcacagtacca

SEQ ID NO: 973686 - DNA, 15 bp, Homo sapiens
tgcttgcacagtacc

SEQ ID NO: 973687 - DNA, 15 bp, Homo sapiens
gtgcttgcacagtac

SEQ ID NO: 973688 - DNA, 15 bp, Homo sapiens
tgtgcttgcacagta

SEQ ID NO: 973689 - DNA, 15 bp, Homo sapiens
atgtgcttgcacagt

SEQ ID NO: 973690 - DNA, 15 bp, Homo sapiens
aatgtgcttgcacag

SEQ ID NO: 973691 - DNA, 15 bp, Homo sapiens
taatgtgcttgcaca

SEQ ID NO: 973692 - DNA, 15 bp, Homo sapiens
ataatgtgcttgcac

SEQ ID NO: 973693 - DNA, 15 bp, Homo sapiens
tataatgtgcttgca

SEQ ID NO: 973694 - DNA, 15 bp, Homo sapiens
ttataatgtgcttgc

SEQ ID NO: 973695 - DNA, 15 bp, Homo sapiens
tttataatgtgcttg

SEQ ID NO: 973696 - DNA, 15 bp, Homo sapiens
atttataatgtgctt

SEQ ID NO: 973697 - DNA, 15 bp, Homo sapiens
tatttataatgtgct

SEQ ID NO: 973698 - DNA, 15 bp, Homo sapiens
atatttataatgtgc

SEQ ID NO: 973699 - DNA, 15 bp, Homo sapiens
aatatttataatgtg

SEQ ID NO: 973700 - DNA, 15 bp, Homo sapiens
taatatttataatgt

SEQ ID NO: 973701 - DNA, 15 bp, Homo sapiens
ctaatatttataatg

SEQ ID NO: 973702 - DNA, 15 bp, Homo sapiens
gctaatatttataat

SEQ ID NO: 973703 - DNA, 15 bp, Homo sapiens
ggctaatatttataa

SEQ ID NO: 973704 - DNA, 15 bp, Homo sapiens
aggctaatatttata

SEQ ID NO: 973705 - DNA, 15 bp, Homo sapiens
gaggctaatatttat

SEQ ID NO: 973706 - DNA, 15 bp, Homo sapiens
tgaggctaatattta

SEQ ID NO: 973707 - DNA, 15 bp, Homo sapiens
gtgaggctaatattt

SEQ ID NO: 973708 - DNA, 15 bp, Homo sapiens
tgtgaggctaatatt

SEQ ID NO: 973709 - DNA, 15 bp, Homo sapiens
ttgtgaggctaatat

SEQ ID NO: 973710 - DNA, 15 bp, Homo sapiens
cttgtgaggctaata

SEQ ID NO: 973711 - DNA, 15 bp, Homo sapiens
tcttgtgaggctaat

SEQ ID NO: 973712 - DNA, 15 bp, Homo sapiens
ttcttgtgaggctaa

SEQ ID NO: 973713 - DNA, 15 bp, Homo sapiens
tttcttgtgaggcta

SEQ ID NO: 973714 - DNA, 15 bp, Homo sapiens
atttcttgtgaggct

SEQ ID NO: 973715 - DNA, 15 bp, Homo sapiens
catttcttgtgaggc

SEQ ID NO: 973716 - DNA, 15 bp, Homo sapiens
acatttcttgtgagg

SEQ ID NO: 973717 - DNA, 15 bp, Homo sapiens
tacatttcttgtgag

SEQ ID NO: 973718 - DNA, 15 bp, Homo sapiens
atacatttcttgtga

SEQ ID NO: 973719 - DNA, 15 bp, Homo sapiens
aatacatttcttgtg

SEQ ID NO: 973720 - DNA, 15 bp, Homo sapiens
taatacatttcttgt

SEQ ID NO: 973721 - DNA, 15 bp, Homo sapiens
ctaatacatttcttg

SEQ ID NO: 973722 - DNA, 15 bp, Homo sapiens
gctaatacatttctt

SEQ ID NO: 973723 - DNA, 15 bp, Homo sapiens
tgctaatacatttct

SEQ ID NO: 973724 - DNA, 15 bp, Homo sapiens
atgctaatacatttc

SEQ ID NO: 973725 - DNA, 15 bp, Homo sapiens
aatgctaatacattt

SEQ ID NO: 973726 - DNA, 15 bp, Homo sapiens
aaatgctaatacatt

SEQ ID NO: 973727 - DNA, 15 bp, Homo sapiens
caaatgctaatacat

SEQ ID NO: 973728 - DNA, 15 bp, Homo sapiens
acaaatgctaataca

SEQ ID NO: 973729 - DNA, 15 bp, Homo sapiens
tacaaatgctaatac

SEQ ID NO: 973730 - DNA, 15 bp, Homo sapiens
atacaaatgctaata

SEQ ID NO: 973731 - DNA, 15 bp, Homo sapiens
aatacaaatgctaat

SEQ ID NO: 973732 - DNA, 15 bp, Homo sapiens
aaatacaaatgctaa

SEQ ID NO: 973733 - DNA, 15 bp, Homo sapiens
aaaatacaaatgcta

SEQ ID NO: 973734 - DNA, 15 bp, Homo sapiens
caaaatacaaatgct

SEQ ID NO: 973735 - DNA, 15 bp, Homo sapiens
acaaaatacaaatgc

SEQ ID NO: 973736 - DNA, 15 bp, Homo sapiens
tacaaaatacaaatg

SEQ ID NO: 973737 - DNA, 15 bp, Homo sapiens
gtacaaaatacaaat

SEQ ID NO: 973738 - DNA, 15 bp, Homo sapiens
tgtacaaaatacaaa

SEQ ID NO: 973739 - DNA, 15 bp, Homo sapiens
gtgtacaaaatacaa

SEQ ID NO: 973740 - DNA, 15 bp, Homo sapiens
agtgtacaaaataca

SEQ ID NO: 973741 - DNA, 15 bp, Homo sapiens
cagtgtacaaaatac

SEQ ID NO: 973742 - DNA, 15 bp, Homo sapiens
ccagtgtacaaaata

SEQ ID NO: 973743 - DNA, 15 bp, Homo sapiens
accagtgtacaaaat

SEQ ID NO: 973744 - DNA, 15 bp, Homo sapiens
aaccagtgtacaaaa

SEQ ID NO: 973745 - DNA, 15 bp, Homo sapiens
taaccagtgtacaaa

SEQ ID NO: 973746 - DNA, 15 bp, Homo sapiens
ttaaccagtgtacaa

SEQ ID NO: 973747 - DNA, 15 bp, Homo sapiens
cttaaccagtgtaca

SEQ ID NO: 973748 - DNA, 15 bp, Homo sapiens
acttaaccagtgtac

SEQ ID NO: 973749 - DNA, 15 bp, Homo sapiens
tacttaaccagtgta

SEQ ID NO: 973750 - DNA, 15 bp, Homo sapiens
atacttaaccagtgt

SEQ ID NO: 973751 - DNA, 15 bp, Homo sapiens
gatacttaaccagtg

SEQ ID NO: 973752 - DNA, 15 bp, Homo sapiens
agatacttaaccagt

SEQ ID NO: 973753 - DNA, 15 bp, Homo sapiens
aagatacttaaccag

SEQ ID NO: 973754 - DNA, 15 bp, Homo sapiens
caagatacttaacca

SEQ ID NO: 973755 - DNA, 15 bp, Homo sapiens
gcaagatacttaacc

SEQ ID NO: 973756 - DNA, 15 bp, Homo sapiens
ggcaagatacttaac

SEQ ID NO: 973757 - DNA, 15 bp, Homo sapiens
gggcaagatacttaa

SEQ ID NO: 973758 - DNA, 15 bp, Homo sapiens
tgggcaagatactta

SEQ ID NO: 973759 - DNA, 15 bp, Homo sapiens
ttgggcaagatactt

SEQ ID NO: 973760 - DNA, 15 bp, Homo sapiens
cttgggcaagatact

SEQ ID NO: 973761 - DNA, 15 bp, Homo sapiens
tcttgggcaagatac

SEQ ID NO: 973762 - DNA, 15 bp, Homo sapiens
gtcttgggcaagata

SEQ ID NO: 973763 - DNA, 15 bp, Homo sapiens
ggtcttgggcaagat

SEQ ID NO: 973764 - DNA, 15 bp, Homo sapiens
aggtcttgggcaaga

SEQ ID NO: 973765 - DNA, 15 bp, Homo sapiens
gaggtcttgggcaag

SEQ ID NO: 973766 - DNA, 15 bp, Homo sapiens
tgaggtcttgggcaa

SEQ ID NO: 973767 - DNA, 15 bp, Homo sapiens
ttgaggtcttgggca

SEQ ID NO: 973768 - DNA, 15 bp, Homo sapiens
tttgaggtcttgggc

SEQ ID NO: 973769 - DNA, 15 bp, Homo sapiens
ttttgaggtcttggg

SEQ ID NO: 973770 - DNA, 15 bp, Homo sapiens
gttttgaggtcttgg

SEQ ID NO: 973771 - DNA, 15 bp, Homo sapiens
agttttgaggtcttg

SEQ ID NO: 973772 - DNA, 15 bp, Homo sapiens
cagttttgaggtctt

SEQ ID NO: 973773 - DNA, 15 bp, Homo sapiens
ccagttttgaggtct

SEQ ID NO: 973774 - DNA, 15 bp, Homo sapiens
accagttttgaggtc

SEQ ID NO: 973775 - DNA, 15 bp, Homo sapiens
aaccagttttgaggt

SEQ ID NO: 973776 - DNA, 15 bp, Homo sapiens
taaccagttttgagg

SEQ ID NO: 973777 - DNA, 15 bp, Homo sapiens
ttaaccagttttgag

SEQ ID NO: 973778 - DNA, 15 bp, Homo sapiens
cttaaccagttttga

SEQ ID NO: 973779 - DNA, 15 bp, Homo sapiens
ccttaaccagttttg

SEQ ID NO: 973780 - DNA, 15 bp, Homo sapiens
cccttaaccagtttt

SEQ ID NO: 973781 - DNA, 15 bp, Homo sapiens
gcccttaaccagttt

SEQ ID NO: 973782 - DNA, 15 bp, Homo sapiens
tgcccttaaccagtt

SEQ ID NO: 973783 - DNA, 15 bp, Homo sapiens
ctgcccttaaccagt

SEQ ID NO: 973784 - DNA, 15 bp, Homo sapiens
gctgcccttaaccag

SEQ ID NO: 973785 - DNA, 15 bp, Homo sapiens
tgctgcccttaacca

SEQ ID NO: 973786 - DNA, 15 bp, Homo sapiens
ctgctgcccttaacc

SEQ ID NO: 973787 - DNA, 15 bp, Homo sapiens
tctgctgcccttaac

SEQ ID NO: 973788 - DNA, 15 bp, Homo sapiens
ttctgctgcccttaa

SEQ ID NO: 973789 - DNA, 15 bp, Homo sapiens
attctgctgccctta

SEQ ID NO: 973790 - DNA, 15 bp, Homo sapiens
aattctgctgccctt

SEQ ID NO: 973791 - DNA, 15 bp, Homo sapiens
aaattctgctgccct

SEQ ID NO: 973792 - DNA, 15 bp, Homo sapiens
taaattctgctgccc

SEQ ID NO: 973793 - DNA, 15 bp, Homo sapiens
ctaaattctgctgcc

SEQ ID NO: 973794 - DNA, 15 bp, Homo sapiens
gctaaattctgctgc

SEQ ID NO: 973795 - DNA, 15 bp, Homo sapiens
ggctaaattctgctg

SEQ ID NO: 973796 - DNA, 15 bp, Homo sapiens
gggctaaattctgct

SEQ ID NO: 973797 - DNA, 15 bp, Homo sapiens
ggggctaaattctgc

SEQ ID NO: 973798 - DNA, 15 bp, Homo sapiens
tggggctaaattctg

SEQ ID NO: 973799 - DNA, 15 bp, Homo sapiens
ctggggctaaattct

SEQ ID NO: 973800 - DNA, 15 bp, Homo sapiens
gctggggctaaattc

SEQ ID NO: 973801 - DNA, 15 bp, Homo sapiens
tgctggggctaaatt

SEQ ID NO: 973802 - DNA, 15 bp, Homo sapiens
gtgctggggctaaat

SEQ ID NO: 973803 - DNA, 15 bp, Homo sapiens
ggtgctggggctaaa

SEQ ID NO: 973804 - DNA, 15 bp, Homo sapiens
tggtgctggggctaa

SEQ ID NO: 973805 - DNA, 15 bp, Homo sapiens
gtggtgctggggcta

SEQ ID NO: 973806 - DNA, 15 bp, Homo sapiens
ggtggtgctggggct

SEQ ID NO: 973807 - DNA, 15 bp, Homo sapiens
aggtggtgctggggc

SEQ ID NO: 973808 - DNA, 15 bp, Homo sapiens
aaggtggtgctgggg

SEQ ID NO: 973809 - DNA, 15 bp, Homo sapiens
aaaggtggtgctggg

SEQ ID NO: 973810 - DNA, 15 bp, Homo sapiens
aaaaggtggtgctgg

SEQ ID NO: 973811 - DNA, 15 bp, Homo sapiens
gaaaaggtggtgctg

SEQ ID NO: 973812 - DNA, 15 bp, Homo sapiens
tgaaaaggtggtgct

SEQ ID NO: 973813 - DNA, 15 bp, Homo sapiens
ttgaaaaggtggtgc

SEQ ID NO: 973814 - DNA, 15 bp, Homo sapiens
tttgaaaaggtggtg

SEQ ID NO: 973815 - DNA, 15 bp, Homo sapiens
ctttgaaaaggtggt

SEQ ID NO: 973816 - DNA, 15 bp, Homo sapiens
gctttgaaaaggtgg

SEQ ID NO: 973817 - DNA, 15 bp, Homo sapiens
ggctttgaaaaggtg

SEQ ID NO: 973818 - DNA, 15 bp, Homo sapiens
aggctttgaaaaggt

SEQ ID NO: 973819 - DNA, 15 bp, Homo sapiens
caggctttgaaaagg

SEQ ID NO: 973820 - DNA, 15 bp, Homo sapiens
ccaggctttgaaaag

SEQ ID NO: 973821 - DNA, 15 bp, Homo sapiens
cccaggctttgaaaa

SEQ ID NO: 973822 - DNA, 15 bp, Homo sapiens
gcccaggctttgaaa

SEQ ID NO: 973823 - DNA, 15 bp, Homo sapiens
agcccaggctttgaa

SEQ ID NO: 973824 - DNA, 15 bp, Homo sapiens
aagcccaggctttga

SEQ ID NO: 973825 - DNA, 15 bp, Homo sapiens
gaagcccaggctttg

SEQ ID NO: 973826 - DNA, 15 bp, Homo sapiens
agaagcccaggcttt

SEQ ID NO: 973827 - DNA, 15 bp, Homo sapiens
gagaagcccaggctt

SEQ ID NO: 973828 - DNA, 15 bp, Homo sapiens
tgagaagcccaggct

SEQ ID NO: 973829 - DNA, 15 bp, Homo sapiens
gtgagaagcccaggc

SEQ ID NO: 973830 - DNA, 15 bp, Homo sapiens
tgtgagaagcccagg

SEQ ID NO: 973831 - DNA, 15 bp, Homo sapiens
gtgtgagaagcccag

SEQ ID NO: 973832 - DNA, 15 bp, Homo sapiens
agtgtgagaagccca

SEQ ID NO: 973833 - DNA, 15 bp, Homo sapiens
aagtgtgagaagccc

SEQ ID NO: 973834 - DNA, 15 bp, Homo sapiens
gaagtgtgagaagcc

SEQ ID NO: 973835 - DNA, 15 bp, Homo sapiens
agaagtgtgagaagc

SEQ ID NO: 973836 - DNA, 15 bp, Homo sapiens
gagaagtgtgagaag

SEQ ID NO: 973837 - DNA, 15 bp, Homo sapiens
ggagaagtgtgagaa

SEQ ID NO: 973838 - DNA, 15 bp, Homo sapiens
tggagaagtgtgaga

SEQ ID NO: 973839 - DNA, 15 bp, Homo sapiens
atggagaagtgtgag

SEQ ID NO: 973840 - DNA, 15 bp, Homo sapiens
catggagaagtgtga

SEQ ID NO: 973841 - DNA, 15 bp, Homo sapiens
gcatggagaagtgtg

SEQ ID NO: 973842 - DNA, 15 bp, Homo sapiens
agcatggagaagtgt

SEQ ID NO: 973843 - DNA, 15 bp, Homo sapiens
cagcatggagaagtg

SEQ ID NO: 973844 - DNA, 15 bp, Homo sapiens
acagcatggagaagt

SEQ ID NO: 973845 - DNA, 15 bp, Homo sapiens
aacagcatggagaag

SEQ ID NO: 973846 - DNA, 15 bp, Homo sapiens
gaacagcatggagaa

SEQ ID NO: 973847 - DNA, 15 bp, Homo sapiens
ggaacagcatggaga

SEQ ID NO: 973848 - DNA, 15 bp, Homo sapiens
gggaacagcatggag

SEQ ID NO: 973849 - DNA, 15 bp, Homo sapiens
tgggaacagcatgga

SEQ ID NO: 973850 - DNA, 15 bp, Homo sapiens
atgggaacagcatgg

SEQ ID NO: 973851 - DNA, 15 bp, Homo sapiens
aatgggaacagcatg

SEQ ID NO: 973852 - DNA, 15 bp, Homo sapiens
aaatgggaacagcat

SEQ ID NO: 973853 - DNA, 15 bp, Homo sapiens
aaaatgggaacagca

SEQ ID NO: 973854 - DNA, 15 bp, Homo sapiens
taaaatgggaacagc

SEQ ID NO: 973855 - DNA, 15 bp, Homo sapiens
ttaaaatgggaacag

SEQ ID NO: 973856 - DNA, 15 bp, Homo sapiens
gttaaaatgggaaca

SEQ ID NO: 973857 - DNA, 15 bp, Homo sapiens
tgttaaaatgggaac

SEQ ID NO: 973858 - DNA, 15 bp, Homo sapiens
gtgttaaaatgggaa

SEQ ID NO: 973859 - DNA, 15 bp, Homo sapiens
tgtgttaaaatggga

SEQ ID NO: 973860 - DNA, 15 bp, Homo sapiens
ctgtgttaaaatggg

SEQ ID NO: 973861 - DNA, 15 bp, Homo sapiens
cctgtgttaaaatgg

SEQ ID NO: 973862 - DNA, 15 bp, Homo sapiens
acctgtgttaaaatg

SEQ ID NO: 973863 - DNA, 15 bp, Homo sapiens
tacctgtgttaaaat

SEQ ID NO: 973864 - DNA, 15 bp, Homo sapiens
atacctgtgttaaaa

SEQ ID NO: 973865 - DNA, 15 bp, Homo sapiens
gatacctgtgttaaa

SEQ ID NO: 973866 - DNA, 15 bp, Homo sapiens
agatacctgtgttaa

SEQ ID NO: 973867 - DNA, 15 bp, Homo sapiens
gagatacctgtgtta

SEQ ID NO: 973868 - DNA, 15 bp, Homo sapiens
cgagatacctgtgtt

SEQ ID NO: 973869 - DNA, 15 bp, Homo sapiens
gcgagatacctgtgt

SEQ ID NO: 973870 - DNA, 15 bp, Homo sapiens
ggcgagatacctgtg

SEQ ID NO: 973871 - DNA, 15 bp, Homo sapiens
tggcgagatacctgt

SEQ ID NO: 973872 - DNA, 15 bp, Homo sapiens
atggcgagatacctg

SEQ ID NO: 973873 - DNA, 15 bp, Homo sapiens
aatggcgagatacct

SEQ ID NO: 973874 - DNA, 15 bp, Homo sapiens
gaatggcgagatacc

SEQ ID NO: 973875 - DNA, 15 bp, Homo sapiens
ggaatggcgagatac

SEQ ID NO: 973876 - DNA, 15 bp, Homo sapiens
tggaatggcgagata

SEQ ID NO: 973877 - DNA, 15 bp, Homo sapiens
ctggaatggcgagat

SEQ ID NO: 973878 - DNA, 15 bp, Homo sapiens
gctggaatggcgaga

SEQ ID NO: 973879 - DNA, 15 bp, Homo sapiens
ggctggaatggcgag

SEQ ID NO: 973880 - DNA, 15 bp, Homo sapiens
tggctggaatggcga

SEQ ID NO: 973881 - DNA, 15 bp, Homo sapiens
gtggctggaatggcg

SEQ ID NO: 973882 - DNA, 15 bp, Homo sapiens
agtggctggaatggc

SEQ ID NO: 973883 - DNA, 15 bp, Homo sapiens
gagtggctggaatgg

SEQ ID NO: 973884 - DNA, 15 bp, Homo sapiens
tgagtggctggaatg

SEQ ID NO: 973885 - DNA, 15 bp, Homo sapiens
ttgagtggctggaat

SEQ ID NO: 973886 - DNA, 15 bp, Homo sapiens
tttgagtggctggaa

SEQ ID NO: 973887 - DNA, 15 bp, Homo sapiens
gtttgagtggctgga

SEQ ID NO: 973888 - DNA, 15 bp, Homo sapiens
agtttgagtggctgg

SEQ ID NO: 973889 - DNA, 15 bp, Homo sapiens
aagtttgagtggctg

SEQ ID NO: 973890 - DNA, 15 bp, Homo sapiens
aaagtttgagtggct

SEQ ID NO: 973891 - DNA, 15 bp, Homo sapiens
caaagtttgagtggc

SEQ ID NO: 973892 - DNA, 15 bp, Homo sapiens
ccaaagtttgagtgg

SEQ ID NO: 973893 - DNA, 15 bp, Homo sapiens
gccaaagtttgagtg

SEQ ID NO: 973894 - DNA, 15 bp, Homo sapiens
tgccaaagtttgagt

SEQ ID NO: 973895 - DNA, 15 bp, Homo sapiens
atgccaaagtttgag

SEQ ID NO: 973896 - DNA, 15 bp, Homo sapiens
aatgccaaagtttga

SEQ ID NO: 973897 - DNA, 15 bp, Homo sapiens
aaatgccaaagtttg

SEQ ID NO: 973898 - DNA, 15 bp, Homo sapiens
taaatgccaaagttt

SEQ ID NO: 973899 - DNA, 15 bp, Homo sapiens
ttaaatgccaaagtt

SEQ ID NO: 973900 - DNA, 15 bp, Homo sapiens
cttaaatgccaaagt

SEQ ID NO: 973901 - DNA, 15 bp, Homo sapiens
tcttaaatgccaaag

SEQ ID NO: 973902 - DNA, 15 bp, Homo sapiens
ttcttaaatgccaaa

SEQ ID NO: 973903 - DNA, 15 bp, Homo sapiens
tttcttaaatgccaa

SEQ ID NO: 973904 - DNA, 15 bp, Homo sapiens
ttttcttaaatgcca

SEQ ID NO: 973905 - DNA, 15 bp, Homo sapiens
attttcttaaatgcc

SEQ ID NO: 973906 - DNA, 15 bp, Homo sapiens
aattttcttaaatgc

SEQ ID NO: 973907 - DNA, 15 bp, Homo sapiens
taattttcttaaatg

SEQ ID NO: 973908 - DNA, 15 bp, Homo sapiens
ataattttcttaaat

SEQ ID NO: 973909 - DNA, 15 bp, Homo sapiens
gataattttcttaaa

SEQ ID NO: 973910 - DNA, 15 bp, Homo sapiens
ggataattttcttaa

SEQ ID NO: 973911 - DNA, 15 bp, Homo sapiens
aggataattttctta

SEQ ID NO: 973912 - DNA, 15 bp, Homo sapiens
taggataattttctt

SEQ ID NO: 973913 - DNA, 15 bp, Homo sapiens
ttaggataattttct

SEQ ID NO: 973914 - DNA, 15 bp, Homo sapiens
tttaggataattttc

SEQ ID NO: 973915 - DNA, 15 bp, Homo sapiens
ctttaggataatttt

SEQ ID NO: 973916 - DNA, 15 bp, Homo sapiens
gctttaggataattt

SEQ ID NO: 973917 - DNA, 15 bp, Homo sapiens
agctttaggataatt

SEQ ID NO: 973918 - DNA, 15 bp, Homo sapiens
tagctttaggataat

SEQ ID NO: 973919 - DNA, 15 bp, Homo sapiens
ttagctttaggataa

SEQ ID NO: 973920 - DNA, 15 bp, Homo sapiens
tttagctttaggata

SEQ ID NO: 973921 - DNA, 15 bp, Homo sapiens
gtttagctttaggat

SEQ ID NO: 973922 - DNA, 15 bp, Homo sapiens
agtttagctttagga

SEQ ID NO: 973923 - DNA, 15 bp, Homo sapiens
tagtttagctttagg

SEQ ID NO: 973924 - DNA, 15 bp, Homo sapiens
ttagtttagctttag

SEQ ID NO: 973925 - DNA, 15 bp, Homo sapiens
tttagtttagcttta

SEQ ID NO: 973926 - DNA, 15 bp, Homo sapiens
gtttagtttagcttt

SEQ ID NO: 973927 - DNA, 15 bp, Homo sapiens
agtttagtttagctt

SEQ ID NO: 973928 - DNA, 15 bp, Homo sapiens
aagtttagtttagct

SEQ ID NO: 973929 - DNA, 15 bp, Homo sapiens
gaagtttagtttagc

SEQ ID NO: 973930 - DNA, 15 bp, Homo sapiens
tgaagtttagtttag

SEQ ID NO: 973931 - DNA, 15 bp, Homo sapiens
ttgaagtttagttta

SEQ ID NO: 973932 - DNA, 15 bp, Homo sapiens
cttgaagtttagttt

SEQ ID NO: 973933 - DNA, 15 bp, Homo sapiens
ccttgaagtttagtt

SEQ ID NO: 973934 - DNA, 15 bp, Homo sapiens
tccttgaagtttagt

SEQ ID NO: 973935 - DNA, 15 bp, Homo sapiens
atccttgaagtttag

SEQ ID NO: 973936 - DNA, 15 bp, Homo sapiens
catccttgaagttta

SEQ ID NO: 973937 - DNA, 15 bp, Homo sapiens
tcatccttgaagttt

SEQ ID NO: 973938 - DNA, 15 bp, Homo sapiens
gtcatccttgaagtt

SEQ ID NO: 973939 - DNA, 15 bp, Homo sapiens
ggtcatccttgaagt

SEQ ID NO: 973940 - DNA, 15 bp, Homo sapiens
tggtcatccttgaag

SEQ ID NO: 973941 - DNA, 15 bp, Homo sapiens
atggtcatccttgaa

SEQ ID NO: 973942 - DNA, 15 bp, Homo sapiens
aatggtcatccttga

SEQ ID NO: 973943 - DNA, 15 bp, Homo sapiens
gaatggtcatccttg

SEQ ID NO: 973944 - DNA, 15 bp, Homo sapiens
agaatggtcatcctt

SEQ ID NO: 973945 - DNA, 15 bp, Homo sapiens
gagaatggtcatcct

SEQ ID NO: 973946 - DNA, 15 bp, Homo sapiens
ggagaatggtcatcc

SEQ ID NO: 973947 - DNA, 15 bp, Homo sapiens
aggagaatggtcatc

SEQ ID NO: 973948 - DNA, 15 bp, Homo sapiens
caggagaatggtcat

SEQ ID NO: 973949 - DNA, 15 bp, Homo sapiens
tcaggagaatggtca

SEQ ID NO: 973950 - DNA, 15 bp, Homo sapiens
gtcaggagaatggtc

SEQ ID NO: 973951 - DNA, 15 bp, Homo sapiens
ggtcaggagaatggt

SEQ ID NO: 973952 - DNA, 15 bp, Homo sapiens
gggtcaggagaatgg

SEQ ID NO: 973953 - DNA, 15 bp, Homo sapiens
ggggtcaggagaatg

SEQ ID NO: 973954 - DNA, 15 bp, Homo sapiens
aggggtcaggagaat

SEQ ID NO: 973955 - DNA, 15 bp, Homo sapiens
aaggggtcaggagaa

SEQ ID NO: 973956 - DNA, 15 bp, Homo sapiens
gaaggggtcaggaga

SEQ ID NO: 973957 - DNA, 15 bp, Homo sapiens
ggaaggggtcaggag

SEQ ID NO: 973958 - DNA, 15 bp, Homo sapiens
gggaaggggtcagga

SEQ ID NO: 973959 - DNA, 15 bp, Homo sapiens
tgggaaggggtcagg

SEQ ID NO: 973960 - DNA, 15 bp, Homo sapiens
atgggaaggggtcag

SEQ ID NO: 973961 - DNA, 15 bp, Homo sapiens
gatgggaaggggtca

SEQ ID NO: 973962 - DNA, 15 bp, Homo sapiens
tgatgggaaggggtc

SEQ ID NO: 973963 - DNA, 15 bp, Homo sapiens
ttgatgggaaggggt

SEQ ID NO: 973964 - DNA, 15 bp, Homo sapiens
tttgatgggaagggg

SEQ ID NO: 973965 - DNA, 15 bp, Homo sapiens
ttttgatgggaaggg

SEQ ID NO: 973966 - DNA, 15 bp, Homo sapiens
attttgatgggaagg

SEQ ID NO: 973967 - DNA, 15 bp, Homo sapiens
aattttgatgggaag

SEQ ID NO: 973968 - DNA, 15 bp, Homo sapiens
aaattttgatgggaa

SEQ ID NO: 973969 - DNA, 15 bp, Homo sapiens
aaaattttgatggga

SEQ ID NO: 973970 - DNA, 15 bp, Homo sapiens
taaaattttgatggg

SEQ ID NO: 973971 - DNA, 15 bp, Homo sapiens
ataaaattttgatgg

SEQ ID NO: 973972 - DNA, 15 bp, Homo sapiens
gataaaattttgatg

SEQ ID NO: 973973 - DNA, 15 bp, Homo sapiens
agataaaattttgat

SEQ ID NO: 973974 - DNA, 15 bp, Homo sapiens
aagataaaattttga

SEQ ID NO: 973975 - DNA, 15 bp, Homo sapiens
aaagataaaattttg

SEQ ID NO: 973976 - DNA, 15 bp, Homo sapiens
taaagataaaatttt

SEQ ID NO: 973977 - DNA, 15 bp, Homo sapiens
ctaaagataaaattt

SEQ ID NO: 973978 - DNA, 15 bp, Homo sapiens
actaaagataaaatt

SEQ ID NO: 973979 - DNA, 15 bp, Homo sapiens
gactaaagataaaat

SEQ ID NO: 973980 - DNA, 15 bp, Homo sapiens
tgactaaagataaaa

SEQ ID NO: 973981 - DNA, 15 bp, Homo sapiens
ctgactaaagataaa

SEQ ID NO: 973982 - DNA, 15 bp, Homo sapiens
actgactaaagataa

SEQ ID NO: 973983 - DNA, 15 bp, Homo sapiens
aactgactaaagata

SEQ ID NO: 973984 - DNA, 15 bp, Homo sapiens
aaactgactaaagat

SEQ ID NO: 973985 - DNA, 15 bp, Homo sapiens
caaactgactaaaga

SEQ ID NO: 973986 - DNA, 15 bp, Homo sapiens
acaaactgactaaag

SEQ ID NO: 973987 - DNA, 15 bp, Homo sapiens
aacaaactgactaaa

SEQ ID NO: 973988 - DNA, 15 bp, Homo sapiens
aaacaaactgactaa

SEQ ID NO: 973989 - DNA, 15 bp, Homo sapiens
aaaacaaactgacta

SEQ ID NO: 973990 - DNA, 15 bp, Homo sapiens
gaaaacaaactgact

SEQ ID NO: 973991 - DNA, 15 bp, Homo sapiens
cgaaaacaaactgac

SEQ ID NO: 973992 - DNA, 15 bp, Homo sapiens
acgaaaacaaactga

SEQ ID NO: 973993 - DNA, 15 bp, Homo sapiens
aacgaaaacaaactg

SEQ ID NO: 973994 - DNA, 15 bp, Homo sapiens
aaacgaaaacaaact

SEQ ID NO: 973995 - DNA, 15 bp, Homo sapiens
aaaacgaaaacaaac

SEQ ID NO: 973996 - DNA, 15 bp, Homo sapiens
caaaacgaaaacaaa

SEQ ID NO: 973997 - DNA, 15 bp, Homo sapiens
acaaaacgaaaacaa

SEQ ID NO: 973998 - DNA, 15 bp, Homo sapiens
aacaaaacgaaaaca

SEQ ID NO: 973999 - DNA, 15 bp, Homo sapiens
aaacaaaacgaaaac

SEQ ID NO: 974000 - DNA, 15 bp, Homo sapiens
aaaacaaaacgaaaa

SEQ ID NO: 974001 - DNA, 15 bp, Homo sapiens
caaaacaaaacgaaa

SEQ ID NO: 974002 - DNA, 15 bp, Homo sapiens
acaaaacaaaacgaa

SEQ ID NO: 974003 - DNA, 15 bp, Homo sapiens
aacaaaacaaaacga

SEQ ID NO: 974004 - DNA, 15 bp, Homo sapiens
aaacaaaacaaaacg

SEQ ID NO: 974005 - DNA, 15 bp, Homo sapiens
aaaacaaaacaaaac

SEQ ID NO: 974006 - DNA, 15 bp, Homo sapiens
gaaaaacaaaacaaa

SEQ ID NO: 974007 - DNA, 15 bp, Homo sapiens
tgaaaaacaaaacaa

SEQ ID NO: 974008 - DNA, 15 bp, Homo sapiens
ctgaaaaacaaaaca

SEQ ID NO: 974009 - DNA, 15 bp, Homo sapiens
tctgaaaaacaaaac

SEQ ID NO: 974010 - DNA, 15 bp, Homo sapiens
ttctgaaaaacaaaa

SEQ ID NO: 974011 - DNA, 15 bp, Homo sapiens
gttctgaaaaacaaa

SEQ ID NO: 974012 - DNA, 15 bp, Homo sapiens
agttctgaaaaacaa

SEQ ID NO: 974013 - DNA, 15 bp, Homo sapiens
tagttctgaaaaaca

SEQ ID NO: 974014 - DNA, 15 bp, Homo sapiens
gtagttctgaaaaac

SEQ ID NO: 974015 - DNA, 15 bp, Homo sapiens
ggtagttctgaaaaa

SEQ ID NO: 974016 - DNA, 15 bp, Homo sapiens
aggtagttctgaaaa

SEQ ID NO: 974017 - DNA, 15 bp, Homo sapiens
gaggtagttctgaaa

SEQ ID NO: 974018 - DNA, 15 bp, Homo sapiens
agaggtagttctgaa

SEQ ID NO: 974019 - DNA, 15 bp, Homo sapiens
cagaggtagttctga

SEQ ID NO: 974020 - DNA, 15 bp, Homo sapiens
ccagaggtagttctg

SEQ ID NO: 974021 - DNA, 15 bp, Homo sapiens
gccagaggtagttct

SEQ ID NO: 974022 - DNA, 15 bp, Homo sapiens
tgccagaggtagttc

SEQ ID NO: 974023 - DNA, 15 bp, Homo sapiens
gtgccagaggtagtt

SEQ ID NO: 974024 - DNA, 15 bp, Homo sapiens
tgtgccagaggtagt

SEQ ID NO: 974025 - DNA, 15 bp, Homo sapiens
atgtgccagaggtag

SEQ ID NO: 974026 - DNA, 15 bp, Homo sapiens
gatgtgccagaggta

SEQ ID NO: 974027 - DNA, 15 bp, Homo sapiens
ggatgtgccagaggt

SEQ ID NO: 974028 - DNA, 15 bp, Homo sapiens
aggatgtgccagagg

SEQ ID NO: 974029 - DNA, 15 bp, Homo sapiens
gaggatgtgccagag

SEQ ID NO: 974030 - DNA, 15 bp, Homo sapiens
ggaggatgtgccaga

SEQ ID NO: 974031 - DNA, 15 bp, Homo sapiens
tggaggatgtgccag

SEQ ID NO: 974032 - DNA, 15 bp, Homo sapiens
ttggaggatgtgcca

SEQ ID NO: 974033 - DNA, 15 bp, Homo sapiens
tttggaggatgtgcc

SEQ ID NO: 974034 - DNA, 15 bp, Homo sapiens
atttggaggatgtgc

SEQ ID NO: 974035 - DNA, 15 bp, Homo sapiens
catttggaggatgtg

SEQ ID NO: 974036 - DNA, 15 bp, Homo sapiens
tcatttggaggatgt

SEQ ID NO: 974037 - DNA, 15 bp, Homo sapiens
ttcatttggaggatg

SEQ ID NO: 974038 - DNA, 15 bp, Homo sapiens
tttcatttggaggat

SEQ ID NO: 974039 - DNA, 15 bp, Homo sapiens
ctttcatttggagga

SEQ ID NO: 974040 - DNA, 15 bp, Homo sapiens
cctttcatttggagg

SEQ ID NO: 974041 - DNA, 15 bp, Homo sapiens
tcctttcatttggag

SEQ ID NO: 974042 - DNA, 15 bp, Homo sapiens
gtcctttcatttgga

SEQ ID NO: 974043 - DNA, 15 bp, Homo sapiens
agtcctttcatttgg

SEQ ID NO: 974044 - DNA, 15 bp, Homo sapiens
gagtcctttcatttg

SEQ ID NO: 974045 - DNA, 15 bp, Homo sapiens
tgagtcctttcattt

SEQ ID NO: 974046 - DNA, 15 bp, Homo sapiens
gtgagtcctttcatt

SEQ ID NO: 974047 - DNA, 15 bp, Homo sapiens
agtgagtcctttcat

SEQ ID NO: 974048 - DNA, 15 bp, Homo sapiens
aagtgagtcctttca

SEQ ID NO: 974049 - DNA, 15 bp, Homo sapiens
caagtgagtcctttc

SEQ ID NO: 974050 - DNA, 15 bp, Homo sapiens
ccaagtgagtccttt

SEQ ID NO: 974051 - DNA, 15 bp, Homo sapiens
accaagtgagtcctt

SEQ ID NO: 974052 - DNA, 15 bp, Homo sapiens
taccaagtgagtcct

SEQ ID NO: 974053 - DNA, 15 bp, Homo sapiens
ttaccaagtgagtcc

SEQ ID NO: 974054 - DNA, 15 bp, Homo sapiens
attaccaagtgagtc

SEQ ID NO: 974055 - DNA, 15 bp, Homo sapiens
aattaccaagtgagt

SEQ ID NO: 974056 - DNA, 15 bp, Homo sapiens
gaattaccaagtgag

SEQ ID NO: 974057 - DNA, 15 bp, Homo sapiens
agaattaccaagtga

SEQ ID NO: 974058 - DNA, 15 bp, Homo sapiens
cagaattaccaagtg

SEQ ID NO: 974059 - DNA, 15 bp, Homo sapiens
ccagaattaccaagt

SEQ ID NO: 974060 - DNA, 15 bp, Homo sapiens
cccagaattaccaag

SEQ ID NO: 974061 - DNA, 15 bp, Homo sapiens
tcccagaattaccaa

SEQ ID NO: 974062 - DNA, 15 bp, Homo sapiens
ctcccagaattacca

SEQ ID NO: 974063 - DNA, 15 bp, Homo sapiens
gctcccagaattacc

SEQ ID NO: 974064 - DNA, 15 bp, Homo sapiens
ggctcccagaattac

SEQ ID NO: 974065 - DNA, 15 bp, Homo sapiens
tggctcccagaatta

SEQ ID NO: 974066 - DNA, 15 bp, Homo sapiens
atggctcccagaatt

SEQ ID NO: 974067 - DNA, 15 bp, Homo sapiens
gatggctcccagaat

SEQ ID NO: 974068 - DNA, 15 bp, Homo sapiens
agatggctcccagaa

SEQ ID NO: 974069 - DNA, 15 bp, Homo sapiens
aagatggctcccaga

SEQ ID NO: 974070 - DNA, 15 bp, Homo sapiens
taagatggctcccag

SEQ ID NO: 974071 - DNA, 15 bp, Homo sapiens
ataagatggctccca

SEQ ID NO: 974072 - DNA, 15 bp, Homo sapiens
aataagatggctccc

SEQ ID NO: 974073 - DNA, 15 bp, Homo sapiens
taataagatggctcc

SEQ ID NO: 974074 - DNA, 15 bp, Homo sapiens
ataataagatggctc

SEQ ID NO: 974075 - DNA, 15 bp, Homo sapiens
cataataagatggct

SEQ ID NO: 974076 - DNA, 15 bp, Homo sapiens
gcataataagatggc

SEQ ID NO: 974077 - DNA, 15 bp, Homo sapiens
ggcataataagatgg

SEQ ID NO: 974078 - DNA, 15 bp, Homo sapiens
aggcataataagatg

SEQ ID NO: 974079 - DNA, 15 bp, Homo sapiens
aaggcataataagat

SEQ ID NO: 974080 - DNA, 15 bp, Homo sapiens
caaggcataataaga

SEQ ID NO: 974081 - DNA, 15 bp, Homo sapiens
ccaaggcataataag

SEQ ID NO: 974082 - DNA, 15 bp, Homo sapiens
accaaggcataataa

SEQ ID NO: 974083 - DNA, 15 bp, Homo sapiens
caccaaggcataata

SEQ ID NO: 974084 - DNA, 15 bp, Homo sapiens
acaccaaggcataat

SEQ ID NO: 974085 - DNA, 15 bp, Homo sapiens
tacaccaaggcataa

SEQ ID NO: 974086 - DNA, 15 bp, Homo sapiens
ctacaccaaggcata

SEQ ID NO: 974087 - DNA, 15 bp, Homo sapiens
gctacaccaaggcat

SEQ ID NO: 974088 - DNA, 15 bp, Homo sapiens
tgctacaccaaggca

SEQ ID NO: 974089 - DNA, 15 bp, Homo sapiens
gtgctacaccaaggc

SEQ ID NO: 974090 - DNA, 15 bp, Homo sapiens
agtgctacaccaagg

SEQ ID NO: 974091 - DNA, 15 bp, Homo sapiens
cagtgctacaccaag

SEQ ID NO: 974092 - DNA, 15 bp, Homo sapiens
tcagtgctacaccaa

SEQ ID NO: 974093 - DNA, 15 bp, Homo sapiens
gtcagtgctacacca

SEQ ID NO: 974094 - DNA, 15 bp, Homo sapiens
tgtcagtgctacacc

SEQ ID NO: 974095 - DNA, 15 bp, Homo sapiens
atgtcagtgctacac

SEQ ID NO: 974096 - DNA, 15 bp, Homo sapiens
aatgtcagtgctaca

SEQ ID NO: 974097 - DNA, 15 bp, Homo sapiens
gaatgtcagtgctac

SEQ ID NO: 974098 - DNA, 15 bp, Homo sapiens
tgaatgtcagtgcta

SEQ ID NO: 974099 - DNA, 15 bp, Homo sapiens
atgaatgtcagtgct

SEQ ID NO: 974100 - DNA, 15 bp, Homo sapiens
gatgaatgtcagtgc

SEQ ID NO: 974101 - DNA, 15 bp, Homo sapiens
agatgaatgtcagtg

SEQ ID NO: 974102 - DNA, 15 bp, Homo sapiens
aagatgaatgtcagt

SEQ ID NO: 974103 - DNA, 15 bp, Homo sapiens
gaagatgaatgtcag

SEQ ID NO: 974104 - DNA, 15 bp, Homo sapiens
ggaagatgaatgtca

SEQ ID NO: 974105 - DNA, 15 bp, Homo sapiens
cggaagatgaatgtc

SEQ ID NO: 974106 - DNA, 15 bp, Homo sapiens
acggaagatgaatgt

SEQ ID NO: 974107 - DNA, 15 bp, Homo sapiens
aacggaagatgaatg

SEQ ID NO: 974108 - DNA, 15 bp, Homo sapiens
aaacggaagatgaat

SEQ ID NO: 974109 - DNA, 15 bp, Homo sapiens
taaacggaagatgaa

SEQ ID NO: 974110 - DNA, 15 bp, Homo sapiens
ttaaacggaagatga

SEQ ID NO: 974111 - DNA, 15 bp, Homo sapiens
cttaaacggaagatg

SEQ ID NO: 974112 - DNA, 15 bp, Homo sapiens
tcttaaacggaagat

SEQ ID NO: 974113 - DNA, 15 bp, Homo sapiens
ttcttaaacggaaga

SEQ ID NO: 974114 - DNA, 15 bp, Homo sapiens
tttcttaaacggaag

SEQ ID NO: 974115 - DNA, 15 bp, Homo sapiens
ttttcttaaacggaa

SEQ ID NO: 974116 - DNA, 15 bp, Homo sapiens
cttttcttaaacgga

SEQ ID NO: 974117 - DNA, 15 bp, Homo sapiens
ccttttcttaaacgg

SEQ ID NO: 974118 - DNA, 15 bp, Homo sapiens
accttttcttaaacg

SEQ ID NO: 974119 - DNA, 15 bp, Homo sapiens
taccttttcttaaac

SEQ ID NO: 974120 - DNA, 15 bp, Homo sapiens
ctaccttttcttaaa

SEQ ID NO: 974121 - DNA, 15 bp, Homo sapiens
actaccttttcttaa

SEQ ID NO: 974122 - DNA, 15 bp, Homo sapiens
tactaccttttctta

SEQ ID NO: 974123 - DNA, 15 bp, Homo sapiens
atactaccttttctt

SEQ ID NO: 974124 - DNA, 15 bp, Homo sapiens
aatactaccttttct

SEQ ID NO: 974125 - DNA, 15 bp, Homo sapiens
aaatactaccttttc

SEQ ID NO: 974126 - DNA, 15 bp, Homo sapiens
gaaatactacctttt

SEQ ID NO: 974127 - DNA, 15 bp, Homo sapiens
ggaaatactaccttt

SEQ ID NO: 974128 - DNA, 15 bp, Homo sapiens
aggaaatactacctt

SEQ ID NO: 974129 - DNA, 15 bp, Homo sapiens
aaggaaatactacct

SEQ ID NO: 974130 - DNA, 15 bp, Homo sapiens
taaggaaatactacc

SEQ ID NO: 974131 - DNA, 15 bp, Homo sapiens
ttaaggaaatactac

SEQ ID NO: 974132 - DNA, 15 bp, Homo sapiens
attaaggaaatacta

SEQ ID NO: 974133 - DNA, 15 bp, Homo sapiens
aattaaggaaatact

SEQ ID NO: 974134 - DNA, 15 bp, Homo sapiens
caattaaggaaatac

SEQ ID NO: 974135 - DNA, 15 bp, Homo sapiens
gcaattaaggaaata

SEQ ID NO: 974136 - DNA, 15 bp, Homo sapiens
tgcaattaaggaaat

SEQ ID NO: 974137 - DNA, 15 bp, Homo sapiens
ctgcaattaaggaaa

SEQ ID NO: 974138 - DNA, 15 bp, Homo sapiens
actgcaattaaggaa

SEQ ID NO: 974139 - DNA, 15 bp, Homo sapiens
cactgcaattaagga

SEQ ID NO: 974140 - DNA, 15 bp, Homo sapiens
ccactgcaattaagg

SEQ ID NO: 974141 - DNA, 15 bp, Homo sapiens
accactgcaattaag

SEQ ID NO: 974142 - DNA, 15 bp, Homo sapiens
gaccactgcaattaa

SEQ ID NO: 974143 - DNA, 15 bp, Homo sapiens
agaccactgcaatta

SEQ ID NO: 974144 - DNA, 15 bp, Homo sapiens
gagaccactgcaatt

SEQ ID NO: 974145 - DNA, 15 bp, Homo sapiens
ggagaccactgcaat

SEQ ID NO: 974146 - DNA, 15 bp, Homo sapiens
tggagaccactgcaa

SEQ ID NO: 974147 - DNA, 15 bp, Homo sapiens
gtggagaccactgca

SEQ ID NO: 974148 - DNA, 15 bp, Homo sapiens
agtggagaccactgc

SEQ ID NO: 974149 - DNA, 15 bp, Homo sapiens
cagtggagaccactg

SEQ ID NO: 974150 - DNA, 15 bp, Homo sapiens
ccagtggagaccact

SEQ ID NO: 974151 - DNA, 15 bp, Homo sapiens
cccagtggagaccac

SEQ ID NO: 974152 - DNA, 15 bp, Homo sapiens
ccccagtggagacca

SEQ ID NO: 974153 - DNA, 15 bp, Homo sapiens
cccccagtggagacc

SEQ ID NO: 974154 - DNA, 15 bp, Homo sapiens
acccccagtggagac

SEQ ID NO: 974155 - DNA, 15 bp, Homo sapiens
cacccccagtggaga

SEQ ID NO: 974156 - DNA, 15 bp, Homo sapiens
tcacccccagtggag

SEQ ID NO: 974157 - DNA, 15 bp, Homo sapiens
ctcacccccagtgga

SEQ ID NO: 974158 - DNA, 15 bp, Homo sapiens
cctcacccccagtgg

SEQ ID NO: 974159 - DNA, 15 bp, Homo sapiens
tcctcacccccagtg

SEQ ID NO: 974160 - DNA, 15 bp, Homo sapiens
ttcctcacccccagt

SEQ ID NO: 974161 - DNA, 15 bp, Homo sapiens
cttcctcacccccag

SEQ ID NO: 974162 - DNA, 15 bp, Homo sapiens
ccttcctcaccccca

SEQ ID NO: 974163 - DNA, 15 bp, Homo sapiens
cccttcctcaccccc

SEQ ID NO: 974164 - DNA, 15 bp, Homo sapiens
ccccttcctcacccc

SEQ ID NO: 974165 - DNA, 15 bp, Homo sapiens
accccttcctcaccc

SEQ ID NO: 974166 - DNA, 15 bp, Homo sapiens
caccccttcctcacc

SEQ ID NO: 974167 - DNA, 15 bp, Homo sapiens
tcaccccttcctcac

SEQ ID NO: 974168 - DNA, 15 bp, Homo sapiens
ctcaccccttcctca

SEQ ID NO: 974169 - DNA, 15 bp, Homo sapiens
tctcaccccttcctc

SEQ ID NO: 974170 - DNA, 15 bp, Homo sapiens
ttctcaccccttcct

SEQ ID NO: 974171 - DNA, 15 bp, Homo sapiens
attctcaccccttcc

SEQ ID NO: 974172 - DNA, 15 bp, Homo sapiens
aattctcaccccttc

SEQ ID NO: 974173 - DNA, 15 bp, Homo sapiens
caattctcacccctt

SEQ ID NO: 974174 - DNA, 15 bp, Homo sapiens
ccaattctcacccct

SEQ ID NO: 974175 - DNA, 15 bp, Homo sapiens
tccaattctcacccc

SEQ ID NO: 974176 - DNA, 15 bp, Homo sapiens
atccaattctcaccc

SEQ ID NO: 974177 - DNA, 15 bp, Homo sapiens
gatccaattctcacc

SEQ ID NO: 974178 - DNA, 15 bp, Homo sapiens
tgatccaattctcac

SEQ ID NO: 974179 - DNA, 15 bp, Homo sapiens
atgatccaattctca

SEQ ID NO: 974180 - DNA, 15 bp, Homo sapiens
catgatccaattctc

SEQ ID NO: 974181 - DNA, 15 bp, Homo sapiens
ccatgatccaattct

SEQ ID NO: 974182 - DNA, 15 bp, Homo sapiens
gccatgatccaattc

SEQ ID NO: 974183 - DNA, 15 bp, Homo sapiens
agccatgatccaatt

SEQ ID NO: 974184 - DNA, 15 bp, Homo sapiens
cagccatgatccaat

SEQ ID NO: 974185 - DNA, 15 bp, Homo sapiens
gcagccatgatccaa

SEQ ID NO: 974186 - DNA, 15 bp, Homo sapiens
tgcagccatgatcca

SEQ ID NO: 974187 - DNA, 15 bp, Homo sapiens
ttgcagccatgatcc

SEQ ID NO: 974188 - DNA, 15 bp, Homo sapiens
cttgcagccatgatc

SEQ ID NO: 974189 - DNA, 15 bp, Homo sapiens
ccttgcagccatgat

SEQ ID NO: 974190 - DNA, 15 bp, Homo sapiens
tccttgcagccatga

SEQ ID NO: 974191 - DNA, 15 bp, Homo sapiens
ttccttgcagccatg

SEQ ID NO: 974192 - DNA, 15 bp, Homo sapiens
tttccttgcagccat

SEQ ID NO: 974193 - DNA, 15 bp, Homo sapiens
gtttccttgcagcca

SEQ ID NO: 974194 - DNA, 15 bp, Homo sapiens
ggtttccttgcagcc

SEQ ID NO: 974195 - DNA, 15 bp, Homo sapiens
gggtttccttgcagc

SEQ ID NO: 974196 - DNA, 15 bp, Homo sapiens
cgggtttccttgcag

SEQ ID NO: 974197 - DNA, 15 bp, Homo sapiens
tcgggtttccttgca

SEQ ID NO: 974198 - DNA, 15 bp, Homo sapiens
gtcgggtttccttgc

SEQ ID NO: 974199 - DNA, 15 bp, Homo sapiens
agtcgggtttccttg

SEQ ID NO: 974200 - DNA, 15 bp, Homo sapiens
aagtcgggtttcctt

SEQ ID NO: 974201 - DNA, 15 bp, Homo sapiens
taagtcgggtttcct

SEQ ID NO: 974202 - DNA, 15 bp, Homo sapiens
ttaagtcgggtttcc

SEQ ID NO: 974203 - DNA, 15 bp, Homo sapiens
gttaagtcgggtttc

SEQ ID NO: 974204 - DNA, 15 bp, Homo sapiens
ggttaagtcgggttt

SEQ ID NO: 974205 - DNA, 15 bp, Homo sapiens
aggttaagtcgggtt

SEQ ID NO: 974206 - DNA, 15 bp, Homo sapiens
gaggttaagtcgggt

SEQ ID NO: 974207 - DNA, 15 bp, Homo sapiens
agaggttaagtcggg

SEQ ID NO: 974208 - DNA, 15 bp, Homo sapiens
cagaggttaagtcgg

SEQ ID NO: 974209 - DNA, 15 bp, Homo sapiens
gcagaggttaagtcg

SEQ ID NO: 974210 - DNA, 15 bp, Homo sapiens
tgcagaggttaagtc

SEQ ID NO: 974211 - DNA, 15 bp, Homo sapiens
ttgcagaggttaagt

SEQ ID NO: 974212 - DNA, 15 bp, Homo sapiens
cttgcagaggttaag

SEQ ID NO: 974213 - DNA, 15 bp, Homo sapiens
ccttgcagaggttaa

SEQ ID NO: 974214 - DNA, 15 bp, Homo sapiens
accttgcagaggtta

SEQ ID NO: 974215 - DNA, 15 bp, Homo sapiens
caccttgcagaggtt

SEQ ID NO: 974216 - DNA, 15 bp, Homo sapiens
ccaccttgcagaggt

SEQ ID NO: 974217 - DNA, 15 bp, Homo sapiens
accaccttgcagagg

SEQ ID NO: 974218 - DNA, 15 bp, Homo sapiens
caccaccttgcagag

SEQ ID NO: 974219 - DNA, 15 bp, Homo sapiens
gcaccaccttgcaga

SEQ ID NO: 974220 - DNA, 15 bp, Homo sapiens
tgcaccaccttgcag

SEQ ID NO: 974221 - DNA, 15 bp, Homo sapiens
ttgcaccaccttgca

SEQ ID NO: 974222 - DNA, 15 bp, Homo sapiens
tttgcaccaccttgc

SEQ ID NO: 974223 - DNA, 15 bp, Homo sapiens
ctttgcaccaccttg

SEQ ID NO: 974224 - DNA, 15 bp, Homo sapiens
cctttgcaccacctt

SEQ ID NO: 974225 - DNA, 15 bp, Homo sapiens
gcctttgcaccacct

SEQ ID NO: 974226 - DNA, 15 bp, Homo sapiens
tgcctttgcaccacc

SEQ ID NO: 974227 - DNA, 15 bp, Homo sapiens
atgcctttgcaccac

SEQ ID NO: 974228 - DNA, 15 bp, Homo sapiens
aatgcctttgcacca

SEQ ID NO: 974229 - DNA, 15 bp, Homo sapiens
gaatgcctttgcacc

SEQ ID NO: 974230 - DNA, 15 bp, Homo sapiens
ggaatgcctttgcac

SEQ ID NO: 974231 - DNA, 15 bp, Homo sapiens
tggaatgcctttgca

SEQ ID NO: 974232 - DNA, 15 bp, Homo sapiens
gtggaatgcctttgc

SEQ ID NO: 974233 - DNA, 15 bp, Homo sapiens
agtggaatgcctttg

SEQ ID NO: 974234 - DNA, 15 bp, Homo sapiens
cagtggaatgccttt

SEQ ID NO: 974235 - DNA, 15 bp, Homo sapiens
acagtggaatgcctt

SEQ ID NO: 974236 - DNA, 15 bp, Homo sapiens
aacagtggaatgcct

SEQ ID NO: 974237 - DNA, 15 bp, Homo sapiens
gaacagtggaatgcc

SEQ ID NO: 974238 - DNA, 15 bp, Homo sapiens
tgaacagtggaatgc

SEQ ID NO: 974239 - DNA, 15 bp, Homo sapiens
ttgaacagtggaatg

SEQ ID NO: 974240 - DNA, 15 bp, Homo sapiens
gttgaacagtggaat

SEQ ID NO: 974241 - DNA, 15 bp, Homo sapiens
tgttgaacagtggaa

SEQ ID NO: 974242 - DNA, 15 bp, Homo sapiens
ctgttgaacagtgga

SEQ ID NO: 974243 - DNA, 15 bp, Homo sapiens
gctgttgaacagtgg

SEQ ID NO: 974244 - DNA, 15 bp, Homo sapiens
tgctgttgaacagtg

SEQ ID NO: 974245 - DNA, 15 bp, Homo sapiens
ttgctgttgaacagt

SEQ ID NO: 974246 - DNA, 15 bp, Homo sapiens
attgctgttgaacag

SEQ ID NO: 974247 - DNA, 15 bp, Homo sapiens
aattgctgttgaaca

SEQ ID NO: 974248 - DNA, 15 bp, Homo sapiens
taattgctgttgaac

SEQ ID NO: 974249 - DNA, 15 bp, Homo sapiens
ataattgctgttgaa

SEQ ID NO: 974250 - DNA, 15 bp, Homo sapiens
tataattgctgttga

SEQ ID NO: 974251 - DNA, 15 bp, Homo sapiens
atataattgctgttg

SEQ ID NO: 974252 - DNA, 15 bp, Homo sapiens
aatataattgctgtt

SEQ ID NO: 974253 - DNA, 15 bp, Homo sapiens
caatataattgctgt

SEQ ID NO: 974254 - DNA, 15 bp, Homo sapiens
tcaatataattgctg

SEQ ID NO: 974255 - DNA, 15 bp, Homo sapiens
ttcaatataattgct

SEQ ID NO: 974256 - DNA, 15 bp, Homo sapiens
cttcaatataattgc

SEQ ID NO: 974257 - DNA, 15 bp, Homo sapiens
gcttcaatataattg

SEQ ID NO: 974258 - DNA, 15 bp, Homo sapiens
agcttcaatataatt

SEQ ID NO: 974259 - DNA, 15 bp, Homo sapiens
cagcttcaatataat

SEQ ID NO: 974260 - DNA, 15 bp, Homo sapiens
tcagcttcaatataa

SEQ ID NO: 974261 - DNA, 15 bp, Homo sapiens
ctcagcttcaatata

SEQ ID NO: 974262 - DNA, 15 bp, Homo sapiens
actcagcttcaatat

SEQ ID NO: 974263 - DNA, 15 bp, Homo sapiens
cactcagcttcaata

SEQ ID NO: 974264 - DNA, 15 bp, Homo sapiens
ccactcagcttcaat

SEQ ID NO: 974265 - DNA, 15 bp, Homo sapiens
cccactcagcttcaa

SEQ ID NO: 974266 - DNA, 15 bp, Homo sapiens
tcccactcagcttca

SEQ ID NO: 974267 - DNA, 15 bp, Homo sapiens
atcccactcagcttc

SEQ ID NO: 974268 - DNA, 15 bp, Homo sapiens
gatcccactcagctt

SEQ ID NO: 974269 - DNA, 15 bp, Homo sapiens
tgatcccactcagct

SEQ ID NO: 974270 - DNA, 15 bp, Homo sapiens
gtgatcccactcagc

SEQ ID NO: 974271 - DNA, 15 bp, Homo sapiens
agtgatcccactcag

SEQ ID NO: 974272 - DNA, 15 bp, Homo sapiens
cagtgatcccactca

SEQ ID NO: 974273 - DNA, 15 bp, Homo sapiens
ccagtgatcccactc

SEQ ID NO: 974274 - DNA, 15 bp, Homo sapiens
cccagtgatcccact

SEQ ID NO: 974275 - DNA, 15 bp, Homo sapiens
acccagtgatcccac

SEQ ID NO: 974276 - DNA, 15 bp, Homo sapiens
cacccagtgatccca

SEQ ID NO: 974277 - DNA, 15 bp, Homo sapiens
tcacccagtgatccc

SEQ ID NO: 974278 - DNA, 15 bp, Homo sapiens
ttcacccagtgatcc

SEQ ID NO: 974279 - DNA, 15 bp, Homo sapiens
cttcacccagtgatc

SEQ ID NO: 974280 - DNA, 15 bp, Homo sapiens
tcttcacccagtgat

SEQ ID NO: 974281 - DNA, 15 bp, Homo sapiens
atcttcacccagtga

SEQ ID NO: 974282 - DNA, 15 bp, Homo sapiens
catcttcacccagtg

SEQ ID NO: 974283 - DNA, 15 bp, Homo sapiens
tcatcttcacccagt

SEQ ID NO: 974284 - DNA, 15 bp, Homo sapiens
ttcatcttcacccag

SEQ ID NO: 974285 - DNA, 15 bp, Homo sapiens
cttcatcttcaccca

SEQ ID NO: 974286 - DNA, 15 bp, Homo sapiens
gcttcatcttcaccc

SEQ ID NO: 974287 - DNA, 15 bp, Homo sapiens
cgcttcatcttcacc

SEQ ID NO: 974288 - DNA, 15 bp, Homo sapiens
acgcttcatcttcac

SEQ ID NO: 974289 - DNA, 15 bp, Homo sapiens
tacgcttcatcttca

SEQ ID NO: 974290 - DNA, 15 bp, Homo sapiens
ttacgcttcatcttc

SEQ ID NO: 974291 - DNA, 15 bp, Homo sapiens
cttacgcttcatctt

SEQ ID NO: 974292 - DNA, 15 bp, Homo sapiens
ccttacgcttcatct

SEQ ID NO: 974293 - DNA, 15 bp, Homo sapiens
cccttacgcttcatc

SEQ ID NO: 974294 - DNA, 15 bp, Homo sapiens
ccccttacgcttcat

SEQ ID NO: 974295 - DNA, 15 bp, Homo sapiens
accccttacgcttca

SEQ ID NO: 974296 - DNA, 15 bp, Homo sapiens
caccccttacgcttc

SEQ ID NO: 974297 - DNA, 15 bp, Homo sapiens
tcaccccttacgctt

SEQ ID NO: 974298 - DNA, 15 bp, Homo sapiens
ctcaccccttacgct

SEQ ID NO: 974299 - DNA, 15 bp, Homo sapiens
cctcaccccttacgc

SEQ ID NO: 974300 - DNA, 15 bp, Homo sapiens
ccctcaccccttacg

SEQ ID NO: 974301 - DNA, 15 bp, Homo sapiens
cccctcaccccttac

SEQ ID NO: 974302 - DNA, 15 bp, Homo sapiens
gcccctcacccctta

SEQ ID NO: 974303 - DNA, 15 bp, Homo sapiens
tgcccctcacccctt

SEQ ID NO: 974304 - DNA, 15 bp, Homo sapiens
ctgcccctcacccct

SEQ ID NO: 974305 - DNA, 15 bp, Homo sapiens
cctgcccctcacccc

SEQ ID NO: 974306 - DNA, 15 bp, Homo sapiens
tcctgcccctcaccc

SEQ ID NO: 974307 - DNA, 15 bp, Homo sapiens
ctcctgcccctcacc

SEQ ID NO: 974308 - DNA, 15 bp, Homo sapiens
tctcctgcccctcac

SEQ ID NO: 974309 - DNA, 15 bp, Homo sapiens
ttctcctgcccctca

SEQ ID NO: 974310 - DNA, 15 bp, Homo sapiens
attctcctgcccctc

SEQ ID NO: 974311 - DNA, 15 bp, Homo sapiens
cattctcctgcccct

SEQ ID NO: 974312 - DNA, 15 bp, Homo sapiens
ccattctcctgcccc

SEQ ID NO: 974313 - DNA, 15 bp, Homo sapiens
cccattctcctgccc

SEQ ID NO: 974314 - DNA, 15 bp, Homo sapiens
acccattctcctgcc

SEQ ID NO: 974315 - DNA, 15 bp, Homo sapiens
tacccattctcctgc

SEQ ID NO: 974316 - DNA, 15 bp, Homo sapiens
atacccattctcctg

SEQ ID NO: 974317 - DNA, 15 bp, Homo sapiens
catacccattctcct

SEQ ID NO: 974318 - DNA, 15 bp, Homo sapiens
ccatacccattctcc

SEQ ID NO: 974319 - DNA, 15 bp, Homo sapiens
tccatacccattctc

SEQ ID NO: 974320 - DNA, 15 bp, Homo sapiens
atccatacccattct

SEQ ID NO: 974321 - DNA, 15 bp, Homo sapiens
catccatacccattc

SEQ ID NO: 974322 - DNA, 15 bp, Homo sapiens
ccatccatacccatt

SEQ ID NO: 974323 - DNA, 15 bp, Homo sapiens
tccatccatacccat

SEQ ID NO: 974324 - DNA, 15 bp, Homo sapiens
ctccatccataccca

SEQ ID NO: 974325 - DNA, 15 bp, Homo sapiens
cctccatccataccc

SEQ ID NO: 974326 - DNA, 15 bp, Homo sapiens
acctccatccatacc

SEQ ID NO: 974327 - DNA, 15 bp, Homo sapiens
tacctccatccatac

SEQ ID NO: 974328 - DNA, 15 bp, Homo sapiens
ctacctccatccata

SEQ ID NO: 974329 - DNA, 15 bp, Homo sapiens
tctacctccatccat

SEQ ID NO: 974330 - DNA, 15 bp, Homo sapiens
ttctacctccatcca

SEQ ID NO: 974331 - DNA, 15 bp, Homo sapiens
cttctacctccatcc

SEQ ID NO: 974332 - DNA, 15 bp, Homo sapiens
tcttctacctccatc

SEQ ID NO: 974333 - DNA, 15 bp, Homo sapiens
atcttctacctccat

SEQ ID NO: 974334 - DNA, 15 bp, Homo sapiens
catcttctacctcca

SEQ ID NO: 974335 - DNA, 15 bp, Homo sapiens
gcatcttctacctcc

SEQ ID NO: 974336 - DNA, 15 bp, Homo sapiens
tgcatcttctacctc

SEQ ID NO: 974337 - DNA, 15 bp, Homo sapiens
ctgcatcttctacct

SEQ ID NO: 974338 - DNA, 15 bp, Homo sapiens
actgcatcttctacc

SEQ ID NO: 974339 - DNA, 15 bp, Homo sapiens
cactgcatcttctac

SEQ ID NO: 974340 - DNA, 15 bp, Homo sapiens
acactgcatcttcta

SEQ ID NO: 974341 - DNA, 15 bp, Homo sapiens
gacactgcatcttct

SEQ ID NO: 974342 - DNA, 15 bp, Homo sapiens
tgacactgcatcttc

SEQ ID NO: 974343 - DNA, 15 bp, Homo sapiens
atgacactgcatctt

SEQ ID NO: 974344 - DNA, 15 bp, Homo sapiens
tatgacactgcatct

SEQ ID NO: 974345 - DNA, 15 bp, Homo sapiens
gtatgacactgcatc

SEQ ID NO: 974346 - DNA, 15 bp, Homo sapiens
tgtatgacactgcat

SEQ ID NO: 974347 - DNA, 15 bp, Homo sapiens
ctgtatgacactgca

SEQ ID NO: 974348 - DNA, 15 bp, Homo sapiens
actgtatgacactgc

SEQ ID NO: 974349 - DNA, 15 bp, Homo sapiens
aactgtatgacactg

SEQ ID NO: 974350 - DNA, 15 bp, Homo sapiens
aaactgtatgacact

SEQ ID NO: 974351 - DNA, 15 bp, Homo sapiens
aaaactgtatgacac

SEQ ID NO: 974352 - DNA, 15 bp, Homo sapiens
aaaaactgtatgaca

SEQ ID NO: 974353 - DNA, 15 bp, Homo sapiens
aaaaaactgtatgac

SEQ ID NO: 974354 - DNA, 15 bp, Homo sapiens
aaaaaaactgtatga

SEQ ID NO: 974355 - DNA, 15 bp, Homo sapiens
gaaaaaaactgtatg

SEQ ID NO: 974356 - DNA, 15 bp, Homo sapiens
agaaaaaaactgtat

SEQ ID NO: 974357 - DNA, 15 bp, Homo sapiens
tagaaaaaaactgta

SEQ ID NO: 974358 - DNA, 15 bp, Homo sapiens
atagaaaaaaactgt

SEQ ID NO: 974359 - DNA, 15 bp, Homo sapiens
gatagaaaaaaactg

SEQ ID NO: 974360 - DNA, 15 bp, Homo sapiens
tgatagaaaaaaact

SEQ ID NO: 974361 - DNA, 15 bp, Homo sapiens
atgatagaaaaaaac

SEQ ID NO: 974362 - DNA, 15 bp, Homo sapiens
catgatagaaaaaaa

SEQ ID NO: 974363 - DNA, 15 bp, Homo sapiens
tcatgatagaaaaaa

SEQ ID NO: 974364 - DNA, 15 bp, Homo sapiens
ttcatgatagaaaaa

SEQ ID NO: 974365 - DNA, 15 bp, Homo sapiens
tttcatgatagaaaa

SEQ ID NO: 974366 - DNA, 15 bp, Homo sapiens
ttttcatgatagaaa

SEQ ID NO: 974367 - DNA, 15 bp, Homo sapiens
attttcatgatagaa

SEQ ID NO: 974368 - DNA, 15 bp, Homo sapiens
tattttcatgataga

SEQ ID NO: 974369 - DNA, 15 bp, Homo sapiens
ttattttcatgatag

SEQ ID NO: 974370 - DNA, 15 bp, Homo sapiens
gttattttcatgata

SEQ ID NO: 974371 - DNA, 15 bp, Homo sapiens
ggttattttcatgat

SEQ ID NO: 974372 - DNA, 15 bp, Homo sapiens
tggttattttcatga

SEQ ID NO: 974373 - DNA, 15 bp, Homo sapiens
gtggttattttcatg

SEQ ID NO: 974374 - DNA, 15 bp, Homo sapiens
tgtggttattttcat

SEQ ID NO: 974375 - DNA, 15 bp, Homo sapiens
ctgtggttattttca

SEQ ID NO: 974376 - DNA, 15 bp, Homo sapiens
tctgtggttattttc

SEQ ID NO: 974377 - DNA, 15 bp, Homo sapiens
gtctgtggttatttt

SEQ ID NO: 974378 - DNA, 15 bp, Homo sapiens
agtctgtggttattt

SEQ ID NO: 974379 - DNA, 15 bp, Homo sapiens
aagtctgtggttatt

SEQ ID NO: 974380 - DNA, 15 bp, Homo sapiens
taagtctgtggttat

SEQ ID NO: 974381 - DNA, 15 bp, Homo sapiens
gtaagtctgtggtta

SEQ ID NO: 974382 - DNA, 15 bp, Homo sapiens
tgtaagtctgtggtt

SEQ ID NO: 974383 - DNA, 15 bp, Homo sapiens
ctgtaagtctgtggt

SEQ ID NO: 974384 - DNA, 15 bp, Homo sapiens
tctgtaagtctgtgg

SEQ ID NO: 974385 - DNA, 15 bp, Homo sapiens
ttctgtaagtctgtg

SEQ ID NO: 974386 - DNA, 15 bp, Homo sapiens
cttctgtaagtctgt

SEQ ID NO: 974387 - DNA, 15 bp, Homo sapiens
tcttctgtaagtctg

SEQ ID NO: 974388 - DNA, 15 bp, Homo sapiens
ctcttctgtaagtct

SEQ ID NO: 974389 - DNA, 15 bp, Homo sapiens
tctcttctgtaagtc

SEQ ID NO: 974390 - DNA, 15 bp, Homo sapiens
ttctcttctgtaagt

SEQ ID NO: 974391 - DNA, 15 bp, Homo sapiens
tttctcttctgtaag

SEQ ID NO: 974392 - DNA, 15 bp, Homo sapiens
ctttctcttctgtaa

SEQ ID NO: 974393 - DNA, 15 bp, Homo sapiens
tctttctcttctgta

SEQ ID NO: 974394 - DNA, 15 bp, Homo sapiens
ctctttctcttctgt

SEQ ID NO: 974395 - DNA, 15 bp, Homo sapiens
gctctttctcttctg

SEQ ID NO: 974396 - DNA, 15 bp, Homo sapiens
agctctttctcttct

SEQ ID NO: 974397 - DNA, 15 bp, Homo sapiens
tagctctttctcttc

SEQ ID NO: 974398 - DNA, 15 bp, Homo sapiens
ttagctctttctctt

SEQ ID NO: 974399 - DNA, 15 bp, Homo sapiens
tttagctctttctct

SEQ ID NO: 974400 - DNA, 15 bp, Homo sapiens
ttttagctctttctc

SEQ ID NO: 974401 - DNA, 15 bp, Homo sapiens
attttagctctttct

SEQ ID NO: 974402 - DNA, 15 bp, Homo sapiens
cattttagctctttc

SEQ ID NO: 974403 - DNA, 15 bp, Homo sapiens
gcattttagctcttt

SEQ ID NO: 974404 - DNA, 15 bp, Homo sapiens
ggcattttagctctt

SEQ ID NO: 974405 - DNA, 15 bp, Homo sapiens
gggcattttagctct

SEQ ID NO: 974406 - DNA, 15 bp, Homo sapiens
cgggcattttagctc

SEQ ID NO: 974407 - DNA, 15 bp, Homo sapiens
acgggcattttagct

SEQ ID NO: 974408 - DNA, 15 bp, Homo sapiens
gacgggcattttagc

SEQ ID NO: 974409 - DNA, 15 bp, Homo sapiens
tgacgggcattttag

SEQ ID NO: 974410 - DNA, 15 bp, Homo sapiens
atgacgggcatttta

SEQ ID NO: 974411 - DNA, 15 bp, Homo sapiens
aatgacgggcatttt

SEQ ID NO: 974412 - DNA, 15 bp, Homo sapiens
aaatgacgggcattt

SEQ ID NO: 974413 - DNA, 15 bp, Homo sapiens
aaaatgacgggcatt

SEQ ID NO: 974414 - DNA, 15 bp, Homo sapiens
gaaaatgacgggcat

SEQ ID NO: 974415 - DNA, 15 bp, Homo sapiens
tgaaaatgacgggca

SEQ ID NO: 974416 - DNA, 15 bp, Homo sapiens
ctgaaaatgacgggc

SEQ ID NO: 974417 - DNA, 15 bp, Homo sapiens
actgaaaatgacggg

SEQ ID NO: 974418 - DNA, 15 bp, Homo sapiens
aactgaaaatgacgg

SEQ ID NO: 974419 - DNA, 15 bp, Homo sapiens
caactgaaaatgacg

SEQ ID NO: 974420 - DNA, 15 bp, Homo sapiens
gcaactgaaaatgac

SEQ ID NO: 974421 - DNA, 15 bp, Homo sapiens
tgcaactgaaaatga

SEQ ID NO: 974422 - DNA, 15 bp, Homo sapiens
atgcaactgaaaatg

SEQ ID NO: 974423 - DNA, 15 bp, Homo sapiens
aatgcaactgaaaat

SEQ ID NO: 974424 - DNA, 15 bp, Homo sapiens
aaatgcaactgaaaa

SEQ ID NO: 974425 - DNA, 15 bp, Homo sapiens
aaaatgcaactgaaa

SEQ ID NO: 974426 - DNA, 15 bp, Homo sapiens
taaaatgcaactgaa

SEQ ID NO: 974427 - DNA, 15 bp, Homo sapiens
ctaaaatgcaactga

SEQ ID NO: 974428 - DNA, 15 bp, Homo sapiens
actaaaatgcaactg

SEQ ID NO: 974429 - DNA, 15 bp, Homo sapiens
gactaaaatgcaact

SEQ ID NO: 974430 - DNA, 15 bp, Homo sapiens
agactaaaatgcaac

SEQ ID NO: 974431 - DNA, 15 bp, Homo sapiens
aagactaaaatgcaa

SEQ ID NO: 974432 - DNA, 15 bp, Homo sapiens
caagactaaaatgca

SEQ ID NO: 974433 - DNA, 15 bp, Homo sapiens
gcaagactaaaatgc

SEQ ID NO: 974434 - DNA, 15 bp, Homo sapiens
tgcaagactaaaatg

SEQ ID NO: 974435 - DNA, 15 bp, Homo sapiens
atgcaagactaaaat

SEQ ID NO: 974436 - DNA, 15 bp, Homo sapiens
aatgcaagactaaaa

SEQ ID NO: 974437 - DNA, 15 bp, Homo sapiens
taatgcaagactaaa

SEQ ID NO: 974438 - DNA, 15 bp, Homo sapiens
ctaatgcaagactaa

SEQ ID NO: 974439 - DNA, 15 bp, Homo sapiens
actaatgcaagacta

SEQ ID NO: 974440 - DNA, 15 bp, Homo sapiens
aactaatgcaagact

SEQ ID NO: 974441 - DNA, 15 bp, Homo sapiens
caactaatgcaagac

SEQ ID NO: 974442 - DNA, 15 bp, Homo sapiens
gcaactaatgcaaga

SEQ ID NO: 974443 - DNA, 15 bp, Homo sapiens
tgcaactaatgcaag

SEQ ID NO: 974444 - DNA, 15 bp, Homo sapiens
ttgcaactaatgcaa

SEQ ID NO: 974445 - DNA, 15 bp, Homo sapiens
gttgcaactaatgca

SEQ ID NO: 974446 - DNA, 15 bp, Homo sapiens
ggttgcaactaatgc

SEQ ID NO: 974447 - DNA, 15 bp, Homo sapiens
tggttgcaactaatg

SEQ ID NO: 974448 - DNA, 15 bp, Homo sapiens
ctggttgcaactaat

SEQ ID NO: 974449 - DNA, 15 bp, Homo sapiens
gctggttgcaactaa

SEQ ID NO: 974450 - DNA, 15 bp, Homo sapiens
agctggttgcaacta

SEQ ID NO: 974451 - DNA, 15 bp, Homo sapiens
cagctggttgcaact

SEQ ID NO: 974452 - DNA, 15 bp, Homo sapiens
ccagctggttgcaac

SEQ ID NO: 974453 - DNA, 15 bp, Homo sapiens
accagctggttgcaa

SEQ ID NO: 974454 - DNA, 15 bp, Homo sapiens
aaccagctggttgca

SEQ ID NO: 974455 - DNA, 15 bp, Homo sapiens
aaaccagctggttgc

SEQ ID NO: 974456 - DNA, 15 bp, Homo sapiens
gaaaccagctggttg

SEQ ID NO: 974457 - DNA, 15 bp, Homo sapiens
agaaaccagctggtt

SEQ ID NO: 974458 - DNA, 15 bp, Homo sapiens
cagaaaccagctggt

SEQ ID NO: 974459 - DNA, 15 bp, Homo sapiens
ccagaaaccagctgg

SEQ ID NO: 974460 - DNA, 15 bp, Homo sapiens
cccagaaaccagctg

SEQ ID NO: 974461 - DNA, 15 bp, Homo sapiens
acccagaaaccagct

SEQ ID NO: 974462 - DNA, 15 bp, Homo sapiens
tacccagaaaccagc

SEQ ID NO: 974463 - DNA, 15 bp, Homo sapiens
gtacccagaaaccag

SEQ ID NO: 974464 - DNA, 15 bp, Homo sapiens
ggtacccagaaacca

SEQ ID NO: 974465 - DNA, 15 bp, Homo sapiens
gggtacccagaaacc

SEQ ID NO: 974466 - DNA, 15 bp, Homo sapiens
agggtacccagaaac

SEQ ID NO: 974467 - DNA, 15 bp, Homo sapiens
tagggtacccagaaa

SEQ ID NO: 974468 - DNA, 15 bp, Homo sapiens
ttagggtacccagaa

SEQ ID NO: 974469 - DNA, 15 bp, Homo sapiens
cttagggtacccaga

SEQ ID NO: 974470 - DNA, 15 bp, Homo sapiens
acttagggtacccag

SEQ ID NO: 974471 - DNA, 15 bp, Homo sapiens
tacttagggtaccca

SEQ ID NO: 974472 - DNA, 15 bp, Homo sapiens
ttacttagggtaccc

SEQ ID NO: 974473 - DNA, 15 bp, Homo sapiens
attacttagggtacc

SEQ ID NO: 974474 - DNA, 15 bp, Homo sapiens
tattacttagggtac

SEQ ID NO: 974475 - DNA, 15 bp, Homo sapiens
ttattacttagggta

SEQ ID NO: 974476 - DNA, 15 bp, Homo sapiens
tttattacttagggt

SEQ ID NO: 974477 - DNA, 15 bp, Homo sapiens
ttttattacttaggg

SEQ ID NO: 974478 - DNA, 15 bp, Homo sapiens
tttttattacttagg

SEQ ID NO: 974479 - DNA, 15 bp, Homo sapiens
atttttattacttag

SEQ ID NO: 974480 - DNA, 15 bp, Homo sapiens
tatttttattactta

SEQ ID NO: 974481 - DNA, 15 bp, Homo sapiens
ctatttttattactt

SEQ ID NO: 974482 - DNA, 15 bp, Homo sapiens
actatttttattact

SEQ ID NO: 974483 - DNA, 15 bp, Homo sapiens
aactatttttattac

SEQ ID NO: 974484 - DNA, 15 bp, Homo sapiens
gaactatttttatta

SEQ ID NO: 974485 - DNA, 15 bp, Homo sapiens
ggaactatttttatt

SEQ ID NO: 974486 - DNA, 15 bp, Homo sapiens
aggaactatttttat

SEQ ID NO: 974487 - DNA, 15 bp, Homo sapiens
gaggaactattttta

SEQ ID NO: 974488 - DNA, 15 bp, Homo sapiens
agaggaactattttt

SEQ ID NO: 974489 - DNA, 15 bp, Homo sapiens
cagaggaactatttt

SEQ ID NO: 974490 - DNA, 15 bp, Homo sapiens
acagaggaactattt

SEQ ID NO: 974491 - DNA, 15 bp, Homo sapiens
tacagaggaactatt

SEQ ID NO: 974492 - DNA, 15 bp, Homo sapiens
ctacagaggaactat

SEQ ID NO: 974493 - DNA, 15 bp, Homo sapiens
tctacagaggaacta

SEQ ID NO: 974494 - DNA, 15 bp, Homo sapiens
ttctacagaggaact

SEQ ID NO: 974495 - DNA, 15 bp, Homo sapiens
gttctacagaggaac

SEQ ID NO: 974496 - DNA, 15 bp, Homo sapiens
agttctacagaggaa

SEQ ID NO: 974497 - DNA, 15 bp, Homo sapiens
cagttctacagagga

SEQ ID NO: 974498 - DNA, 15 bp, Homo sapiens
acagttctacagagg

SEQ ID NO: 974499 - DNA, 15 bp, Homo sapiens
tacagttctacagag

SEQ ID NO: 974500 - DNA, 15 bp, Homo sapiens
ctacagttctacaga

SEQ ID NO: 974501 - DNA, 15 bp, Homo sapiens
actacagttctacag

SEQ ID NO: 974502 - DNA, 15 bp, Homo sapiens
tactacagttctaca

SEQ ID NO: 974503 - DNA, 15 bp, Homo sapiens
atactacagttctac

SEQ ID NO: 974504 - DNA, 15 bp, Homo sapiens
catactacagttcta

SEQ ID NO: 974505 - DNA, 15 bp, Homo sapiens
acatactacagttct

SEQ ID NO: 974506 - DNA, 15 bp, Homo sapiens
aacatactacagttc

SEQ ID NO: 974507 - DNA, 15 bp, Homo sapiens
aaacatactacagtt

SEQ ID NO: 974508 - DNA, 15 bp, Homo sapiens
taaacatactacagt

SEQ ID NO: 974509 - DNA, 15 bp, Homo sapiens
gtaaacatactacag

SEQ ID NO: 974510 - DNA, 15 bp, Homo sapiens
ggtaaacatactaca

SEQ ID NO: 974511 - DNA, 15 bp, Homo sapiens
tggtaaacatactac

SEQ ID NO: 974512 - DNA, 15 bp, Homo sapiens
atggtaaacatacta

SEQ ID NO: 974513 - DNA, 15 bp, Homo sapiens
tatggtaaacatact

SEQ ID NO: 974514 - DNA, 15 bp, Homo sapiens
ctatggtaaacatac

SEQ ID NO: 974515 - DNA, 15 bp, Homo sapiens
tctatggtaaacata

SEQ ID NO: 974516 - DNA, 15 bp, Homo sapiens
ctctatggtaaacat

SEQ ID NO: 974517 - DNA, 15 bp, Homo sapiens
actctatggtaaaca

SEQ ID NO: 974518 - DNA, 15 bp, Homo sapiens
tactctatggtaaac

SEQ ID NO: 974519 - DNA, 15 bp, Homo sapiens
atactctatggtaaa

SEQ ID NO: 974520 - DNA, 15 bp, Homo sapiens
aatactctatggtaa

SEQ ID NO: 974521 - DNA, 15 bp, Homo sapiens
aaatactctatggta

SEQ ID NO: 974522 - DNA, 15 bp, Homo sapiens
aaaatactctatggt

SEQ ID NO: 974523 - DNA, 15 bp, Homo sapiens
caaaatactctatgg

SEQ ID NO: 974524 - DNA, 15 bp, Homo sapiens
gcaaaatactctatg

SEQ ID NO: 974525 - DNA, 15 bp, Homo sapiens
tgcaaaatactctat

SEQ ID NO: 974526 - DNA, 15 bp, Homo sapiens
ttgcaaaatactcta

SEQ ID NO: 974527 - DNA, 15 bp, Homo sapiens
tttgcaaaatactct

SEQ ID NO: 974528 - DNA, 15 bp, Homo sapiens
ttttgcaaaatactc

SEQ ID NO: 974529 - DNA, 15 bp, Homo sapiens
attttgcaaaatact

SEQ ID NO: 974530 - DNA, 15 bp, Homo sapiens
aattttgcaaaatac

SEQ ID NO: 974531 - DNA, 15 bp, Homo sapiens
aaattttgcaaaata

SEQ ID NO: 974532 - DNA, 15 bp, Homo sapiens
aaaattttgcaaaat

SEQ ID NO: 974533 - DNA, 15 bp, Homo sapiens
aaaaattttgcaaaa

SEQ ID NO: 974534 - DNA, 15 bp, Homo sapiens
caaaaattttgcaaa

SEQ ID NO: 974535 - DNA, 15 bp, Homo sapiens
ccaaaaattttgcaa

SEQ ID NO: 974536 - DNA, 15 bp, Homo sapiens
accaaaaattttgca

SEQ ID NO: 974537 - DNA, 15 bp, Homo sapiens
taccaaaaattttgc

SEQ ID NO: 974538 - DNA, 15 bp, Homo sapiens
ctaccaaaaattttg

SEQ ID NO: 974539 - DNA, 15 bp, Homo sapiens
tctaccaaaaatttt

SEQ ID NO: 974540 - DNA, 15 bp, Homo sapiens
ctctaccaaaaattt

SEQ ID NO: 974541 - DNA, 15 bp, Homo sapiens
cctctaccaaaaatt

SEQ ID NO: 974542 - DNA, 15 bp, Homo sapiens
tcctctaccaaaaat

SEQ ID NO: 974543 - DNA, 15 bp, Homo sapiens
atcctctaccaaaaa

SEQ ID NO: 974544 - DNA, 15 bp, Homo sapiens
catcctctaccaaaa

SEQ ID NO: 974545 - DNA, 15 bp, Homo sapiens
acatcctctaccaaa

SEQ ID NO: 974546 - DNA, 15 bp, Homo sapiens
aacatcctctaccaa

SEQ ID NO: 974547 - DNA, 15 bp, Homo sapiens
taacatcctctacca

SEQ ID NO: 974548 - DNA, 15 bp, Homo sapiens
gtaacatcctctacc

SEQ ID NO: 974549 - DNA, 15 bp, Homo sapiens
tgtaacatcctctac

SEQ ID NO: 974550 - DNA, 15 bp, Homo sapiens
atgtaacatcctcta

SEQ ID NO: 974551 - DNA, 15 bp, Homo sapiens
tatgtaacatcctct

SEQ ID NO: 974552 - DNA, 15 bp, Homo sapiens
ttatgtaacatcctc

SEQ ID NO: 974553 - DNA, 15 bp, Homo sapiens
attatgtaacatcct

SEQ ID NO: 974554 - DNA, 15 bp, Homo sapiens
aattatgtaacatcc

SEQ ID NO: 974555 - DNA, 15 bp, Homo sapiens
aaattatgtaacatc

SEQ ID NO: 974556 - DNA, 15 bp, Homo sapiens
caaattatgtaacat

SEQ ID NO: 974557 - DNA, 15 bp, Homo sapiens
gcaaattatgtaaca

SEQ ID NO: 974558 - DNA, 15 bp, Homo sapiens
tgcaaattatgtaac

SEQ ID NO: 974559 - DNA, 15 bp, Homo sapiens
atgcaaattatgtaa

SEQ ID NO: 974560 - DNA, 15 bp, Homo sapiens
catgcaaattatgta

SEQ ID NO: 974561 - DNA, 15 bp, Homo sapiens
acatgcaaattatgt

SEQ ID NO: 974562 - DNA, 15 bp, Homo sapiens
cacatgcaaattatg

SEQ ID NO: 974563 - DNA, 15 bp, Homo sapiens
acacatgcaaattat

SEQ ID NO: 974564 - DNA, 15 bp, Homo sapiens
aacacatgcaaatta

SEQ ID NO: 974565 - DNA, 15 bp, Homo sapiens
gaacacatgcaaatt

SEQ ID NO: 974566 - DNA, 15 bp, Homo sapiens
tgaacacatgcaaat

SEQ ID NO: 974567 - DNA, 15 bp, Homo sapiens
atgaacacatgcaaa

SEQ ID NO: 974568 - DNA, 15 bp, Homo sapiens
aatgaacacatgcaa

SEQ ID NO: 974569 - DNA, 15 bp, Homo sapiens
aaatgaacacatgca

SEQ ID NO: 974570 - DNA, 15 bp, Homo sapiens
gaaatgaacacatgc

SEQ ID NO: 974571 - DNA, 15 bp, Homo sapiens
agaaatgaacacatg

SEQ ID NO: 974572 - DNA, 15 bp, Homo sapiens
gagaaatgaacacat

SEQ ID NO: 974573 - DNA, 15 bp, Homo sapiens
ggagaaatgaacaca

SEQ ID NO: 974574 - DNA, 15 bp, Homo sapiens
tggagaaatgaacac

SEQ ID NO: 974575 - DNA, 15 bp, Homo sapiens
atggagaaatgaaca

SEQ ID NO: 974576 - DNA, 15 bp, Homo sapiens
aatggagaaatgaac

SEQ ID NO: 974577 - DNA, 15 bp, Homo sapiens
aaatggagaaatgaa

SEQ ID NO: 974578 - DNA, 15 bp, Homo sapiens
taaatggagaaatga

SEQ ID NO: 974579 - DNA, 15 bp, Homo sapiens
gtaaatggagaaatg

SEQ ID NO: 974580 - DNA, 15 bp, Homo sapiens
ggtaaatggagaaat

SEQ ID NO: 974581 - DNA, 15 bp, Homo sapiens
aggtaaatggagaaa

SEQ ID NO: 974582 - DNA, 15 bp, Homo sapiens
caggtaaatggagaa

SEQ ID NO: 974583 - DNA, 15 bp, Homo sapiens
acaggtaaatggaga

SEQ ID NO: 974584 - DNA, 15 bp, Homo sapiens
cacaggtaaatggag

SEQ ID NO: 974585 - DNA, 15 bp, Homo sapiens
ccacaggtaaatgga

SEQ ID NO: 974586 - DNA, 15 bp, Homo sapiens
cccacaggtaaatgg

SEQ ID NO: 974587 - DNA, 15 bp, Homo sapiens
tcccacaggtaaatg

SEQ ID NO: 974588 - DNA, 15 bp, Homo sapiens
ttcccacaggtaaat

SEQ ID NO: 974589 - DNA, 15 bp, Homo sapiens
gttcccacaggtaaa

SEQ ID NO: 974590 - DNA, 15 bp, Homo sapiens
tgttcccacaggtaa

SEQ ID NO: 974591 - DNA, 15 bp, Homo sapiens
ttgttcccacaggta

SEQ ID NO: 974592 - DNA, 15 bp, Homo sapiens
attgttcccacaggt

SEQ ID NO: 974593 - DNA, 15 bp, Homo sapiens
aattgttcccacagg

SEQ ID NO: 974594 - DNA, 15 bp, Homo sapiens
taattgttcccacag

SEQ ID NO: 974595 - DNA, 15 bp, Homo sapiens
ttaattgttcccaca

SEQ ID NO: 974596 - DNA, 15 bp, Homo sapiens
tttaattgttcccac

SEQ ID NO: 974597 - DNA, 15 bp, Homo sapiens
ttttaattgttccca

SEQ ID NO: 974598 - DNA, 15 bp, Homo sapiens
attttaattgttccc

SEQ ID NO: 974599 - DNA, 15 bp, Homo sapiens
gattttaattgttcc

SEQ ID NO: 974600 - DNA, 15 bp, Homo sapiens
ggattttaattgttc

SEQ ID NO: 974601 - DNA, 15 bp, Homo sapiens
tggattttaattgtt

SEQ ID NO: 974602 - DNA, 15 bp, Homo sapiens
ctggattttaattgt

SEQ ID NO: 974603 - DNA, 15 bp, Homo sapiens
cctggattttaattg

SEQ ID NO: 974604 - DNA, 15 bp, Homo sapiens
tcctggattttaatt

SEQ ID NO: 974605 - DNA, 15 bp, Homo sapiens
ttcctggattttaat

SEQ ID NO: 974606 - DNA, 15 bp, Homo sapiens
tttcctggattttaa

SEQ ID NO: 974607 - DNA, 15 bp, Homo sapiens
ttttcctggatttta

SEQ ID NO: 974608 - DNA, 15 bp, Homo sapiens
attttcctggatttt

SEQ ID NO: 974609 - DNA, 15 bp, Homo sapiens
cattttcctggattt

SEQ ID NO: 974610 - DNA, 15 bp, Homo sapiens
tcattttcctggatt

SEQ ID NO: 974611 - DNA, 15 bp, Homo sapiens
ctcattttcctggat

SEQ ID NO: 974612 - DNA, 15 bp, Homo sapiens
actcattttcctgga

SEQ ID NO: 974613 - DNA, 15 bp, Homo sapiens
tactcattttcctgg

SEQ ID NO: 974614 - DNA, 15 bp, Homo sapiens
atactcattttcctg

SEQ ID NO: 974615 - DNA, 15 bp, Homo sapiens
tatactcattttcct

SEQ ID NO: 974616 - DNA, 15 bp, Homo sapiens
atatactcattttcc

SEQ ID NO: 974617 - DNA, 15 bp, Homo sapiens
aatatactcattttc

SEQ ID NO: 974618 - DNA, 15 bp, Homo sapiens
gaatatactcatttt

SEQ ID NO: 974619 - DNA, 15 bp, Homo sapiens
tgaatatactcattt

SEQ ID NO: 974620 - DNA, 15 bp, Homo sapiens
ttgaatatactcatt

SEQ ID NO: 974621 - DNA, 15 bp, Homo sapiens
tttgaatatactcat

SEQ ID NO: 974622 - DNA, 15 bp, Homo sapiens
atttgaatatactca

SEQ ID NO: 974623 - DNA, 15 bp, Homo sapiens
tatttgaatatactc

SEQ ID NO: 974624 - DNA, 15 bp, Homo sapiens
ttatttgaatatact

SEQ ID NO: 974625 - DNA, 15 bp, Homo sapiens
attatttgaatatac

SEQ ID NO: 974626 - DNA, 15 bp, Homo sapiens
aattatttgaatata

SEQ ID NO: 974627 - DNA, 15 bp, Homo sapiens
aaattatttgaatat

SEQ ID NO: 974628 - DNA, 15 bp, Homo sapiens
gaaattatttgaata

SEQ ID NO: 974629 - DNA, 15 bp, Homo sapiens
ggaaattatttgaat

SEQ ID NO: 974630 - DNA, 15 bp, Homo sapiens
aggaaattatttgaa

SEQ ID NO: 974631 - DNA, 15 bp, Homo sapiens
gaggaaattatttga

SEQ ID NO: 974632 - DNA, 15 bp, Homo sapiens
ggaggaaattatttg

SEQ ID NO: 974633 - DNA, 15 bp, Homo sapiens
gggaggaaattattt

SEQ ID NO: 974634 - DNA, 15 bp, Homo sapiens
tgggaggaaattatt

SEQ ID NO: 974635 - DNA, 15 bp, Homo sapiens
atgggaggaaattat

SEQ ID NO: 974636 - DNA, 15 bp, Homo sapiens
aatgggaggaaatta

SEQ ID NO: 974637 - DNA, 15 bp, Homo sapiens
aaatgggaggaaatt

SEQ ID NO: 974638 - DNA, 15 bp, Homo sapiens
taaatgggaggaaat

SEQ ID NO: 974639 - DNA, 15 bp, Homo sapiens
ttaaatgggaggaaa

SEQ ID NO: 974640 - DNA, 15 bp, Homo sapiens
cttaaatgggaggaa

SEQ ID NO: 974641 - DNA, 15 bp, Homo sapiens
tcttaaatgggagga

SEQ ID NO: 974642 - DNA, 15 bp, Homo sapiens
atcttaaatgggagg

SEQ ID NO: 974643 - DNA, 15 bp, Homo sapiens
catcttaaatgggag

SEQ ID NO: 974644 - DNA, 15 bp, Homo sapiens
tcatcttaaatggga

SEQ ID NO: 974645 - DNA, 15 bp, Homo sapiens
ctcatcttaaatggg

SEQ ID NO: 974646 - DNA, 15 bp, Homo sapiens
actcatcttaaatgg

SEQ ID NO: 974647 - DNA, 15 bp, Homo sapiens
gactcatcttaaatg

SEQ ID NO: 974648 - DNA, 15 bp, Homo sapiens
tgactcatcttaaat

SEQ ID NO: 974649 - DNA, 15 bp, Homo sapiens
ctgactcatcttaaa

SEQ ID NO: 974650 - DNA, 15 bp, Homo sapiens
tctgactcatcttaa

SEQ ID NO: 974651 - DNA, 15 bp, Homo sapiens
ctctgactcatctta

SEQ ID NO: 974652 - DNA, 15 bp, Homo sapiens
actctgactcatctt

SEQ ID NO: 974653 - DNA, 15 bp, Homo sapiens
tactctgactcatct

SEQ ID NO: 974654 - DNA, 15 bp, Homo sapiens
ttactctgactcatc

SEQ ID NO: 974655 - DNA, 15 bp, Homo sapiens
tttactctgactcat

SEQ ID NO: 974656 - DNA, 15 bp, Homo sapiens
atttactctgactca

SEQ ID NO: 974657 - DNA, 15 bp, Homo sapiens
tatttactctgactc

SEQ ID NO: 974658 - DNA, 15 bp, Homo sapiens
ttatttactctgact

SEQ ID NO: 974659 - DNA, 15 bp, Homo sapiens
attatttactctgac

SEQ ID NO: 974660 - DNA, 15 bp, Homo sapiens
aattatttactctga

SEQ ID NO: 974661 - DNA, 15 bp, Homo sapiens
gaattatttactctg

SEQ ID NO: 974662 - DNA, 15 bp, Homo sapiens
ggaattatttactct

SEQ ID NO: 974663 - DNA, 15 bp, Homo sapiens
aggaattatttactc

SEQ ID NO: 974664 - DNA, 15 bp, Homo sapiens
gaggaattatttact

SEQ ID NO: 974665 - DNA, 15 bp, Homo sapiens
ggaggaattatttac

SEQ ID NO: 974666 - DNA, 15 bp, Homo sapiens
tggaggaattattta

SEQ ID NO: 974667 - DNA, 15 bp, Homo sapiens
ttggaggaattattt

SEQ ID NO: 974668 - DNA, 15 bp, Homo sapiens
attggaggaattatt

SEQ ID NO: 974669 - DNA, 15 bp, Homo sapiens
tattggaggaattat

SEQ ID NO: 974670 - DNA, 15 bp, Homo sapiens
gtattggaggaatta

SEQ ID NO: 974671 - DNA, 15 bp, Homo sapiens
agtattggaggaatt

SEQ ID NO: 974672 - DNA, 15 bp, Homo sapiens
aagtattggaggaat

SEQ ID NO: 974673 - DNA, 15 bp, Homo sapiens
taagtattggaggaa

SEQ ID NO: 974674 - DNA, 15 bp, Homo sapiens
ctaagtattggagga

SEQ ID NO: 974675 - DNA, 15 bp, Homo sapiens
tctaagtattggagg

SEQ ID NO: 974676 - DNA, 15 bp, Homo sapiens
ctctaagtattggag

SEQ ID NO: 974677 - DNA, 15 bp, Homo sapiens
tctctaagtattgga

SEQ ID NO: 974678 - DNA, 15 bp, Homo sapiens
ttctctaagtattgg

SEQ ID NO: 974679 - DNA, 15 bp, Homo sapiens
cttctctaagtattg

SEQ ID NO: 974680 - DNA, 15 bp, Homo sapiens
acttctctaagtatt

SEQ ID NO: 974681 - DNA, 15 bp, Homo sapiens
tacttctctaagtat

SEQ ID NO: 974682 - DNA, 15 bp, Homo sapiens
atacttctctaagta

SEQ ID NO: 974683 - DNA, 15 bp, Homo sapiens
tatacttctctaagt

SEQ ID NO: 974684 - DNA, 15 bp, Homo sapiens
gtatacttctctaag

SEQ ID NO: 974685 - DNA, 15 bp, Homo sapiens
ggtatacttctctaa

SEQ ID NO: 974686 - DNA, 15 bp, Homo sapiens
tggtatacttctcta

SEQ ID NO: 974687 - DNA, 15 bp, Homo sapiens
ttggtatacttctct

SEQ ID NO: 974688 - DNA, 15 bp, Homo sapiens
cttggtatacttctc

SEQ ID NO: 974689 - DNA, 15 bp, Homo sapiens
tcttggtatacttct

SEQ ID NO: 974690 - DNA, 15 bp, Homo sapiens
ctcttggtatacttc

SEQ ID NO: 974691 - DNA, 15 bp, Homo sapiens
tctcttggtatactt

SEQ ID NO: 974692 - DNA, 15 bp, Homo sapiens
atctcttggtatact

SEQ ID NO: 974693 - DNA, 15 bp, Homo sapiens
gatctcttggtatac

SEQ ID NO: 974694 - DNA, 15 bp, Homo sapiens
ggatctcttggtata

SEQ ID NO: 974695 - DNA, 15 bp, Homo sapiens
tggatctcttggtat

SEQ ID NO: 974696 - DNA, 15 bp, Homo sapiens
ctggatctcttggta

SEQ ID NO: 974697 - DNA, 15 bp, Homo sapiens
actggatctcttggt

SEQ ID NO: 974698 - DNA, 15 bp, Homo sapiens
cactggatctcttgg

SEQ ID NO: 974699 - DNA, 15 bp, Homo sapiens
tcactggatctcttg

SEQ ID NO: 974700 - DNA, 15 bp, Homo sapiens
atcactggatctctt

SEQ ID NO: 974701 - DNA, 15 bp, Homo sapiens
catcactggatctct

SEQ ID NO: 974702 - DNA, 15 bp, Homo sapiens
ccatcactggatctc

SEQ ID NO: 974703 - DNA, 15 bp, Homo sapiens
accatcactggatct

SEQ ID NO: 974704 - DNA, 15 bp, Homo sapiens
taccatcactggatc

SEQ ID NO: 974705 - DNA, 15 bp, Homo sapiens
ataccatcactggat

SEQ ID NO: 974706 - DNA, 15 bp, Homo sapiens
tataccatcactgga

SEQ ID NO: 974707 - DNA, 15 bp, Homo sapiens
ctataccatcactgg

SEQ ID NO: 974708 - DNA, 15 bp, Homo sapiens
tctataccatcactg

SEQ ID NO: 974709 - DNA, 15 bp, Homo sapiens
ctctataccatcact

SEQ ID NO: 974710 - DNA, 15 bp, Homo sapiens
actctataccatcac

SEQ ID NO: 974711 - DNA, 15 bp, Homo sapiens
aactctataccatca

SEQ ID NO: 974712 - DNA, 15 bp, Homo sapiens
caactctataccatc

SEQ ID NO: 974713 - DNA, 15 bp, Homo sapiens
acaactctataccat

SEQ ID NO: 974714 - DNA, 15 bp, Homo sapiens
gacaactctatacca

SEQ ID NO: 974715 - DNA, 15 bp, Homo sapiens
agacaactctatacc

SEQ ID NO: 974716 - DNA, 15 bp, Homo sapiens
cagacaactctatac

SEQ ID NO: 974717 - DNA, 15 bp, Homo sapiens
tcagacaactctata

SEQ ID NO: 974718 - DNA, 15 bp, Homo sapiens
atcagacaactctat

SEQ ID NO: 974719 - DNA, 15 bp, Homo sapiens
catcagacaactcta

SEQ ID NO: 974720 - DNA, 15 bp, Homo sapiens
acatcagacaactct

SEQ ID NO: 974721 - DNA, 15 bp, Homo sapiens
aacatcagacaactc

SEQ ID NO: 974722 - DNA, 15 bp, Homo sapiens
taacatcagacaact

SEQ ID NO: 974723 - DNA, 15 bp, Homo sapiens
ttaacatcagacaac

SEQ ID NO: 974724 - DNA, 15 bp, Homo sapiens
tttaacatcagacaa

SEQ ID NO: 974725 - DNA, 15 bp, Homo sapiens
atttaacatcagaca

SEQ ID NO: 974726 - DNA, 15 bp, Homo sapiens
tatttaacatcagac

SEQ ID NO: 974727 - DNA, 15 bp, Homo sapiens
ctatttaacatcaga

SEQ ID NO: 974728 - DNA, 15 bp, Homo sapiens
cctatttaacatcag

SEQ ID NO: 974729 - DNA, 15 bp, Homo sapiens
ccctatttaacatca

SEQ ID NO: 974730 - DNA, 15 bp, Homo sapiens
tccctatttaacatc

SEQ ID NO: 974731 - DNA, 15 bp, Homo sapiens
ttccctatttaacat

SEQ ID NO: 974732 - DNA, 15 bp, Homo sapiens
cttccctatttaaca

SEQ ID NO: 974733 - DNA, 15 bp, Homo sapiens
acttccctatttaac

SEQ ID NO: 974734 - DNA, 15 bp, Homo sapiens
tacttccctatttaa

SEQ ID NO: 974735 - DNA, 15 bp, Homo sapiens
ctacttccctattta

SEQ ID NO: 974736 - DNA, 15 bp, Homo sapiens
tctacttccctattt

SEQ ID NO: 974737 - DNA, 15 bp, Homo sapiens
ttctacttccctatt

SEQ ID NO: 974738 - DNA, 15 bp, Homo sapiens
attctacttccctat

SEQ ID NO: 974739 - DNA, 15 bp, Homo sapiens
tattctacttcccta

SEQ ID NO: 974740 - DNA, 15 bp, Homo sapiens
atattctacttccct

SEQ ID NO: 974741 - DNA, 15 bp, Homo sapiens
catattctacttccc

SEQ ID NO: 974742 - DNA, 15 bp, Homo sapiens
ccatattctacttcc

SEQ ID NO: 974743 - DNA, 15 bp, Homo sapiens
tccatattctacttc

SEQ ID NO: 974744 - DNA, 15 bp, Homo sapiens
ttccatattctactt

SEQ ID NO: 974745 - DNA, 15 bp, Homo sapiens
cttccatattctact

SEQ ID NO: 974746 - DNA, 15 bp, Homo sapiens
ccttccatattctac

SEQ ID NO: 974747 - DNA, 15 bp, Homo sapiens
cccttccatattcta

SEQ ID NO: 974748 - DNA, 15 bp, Homo sapiens
ccccttccatattct

SEQ ID NO: 974749 - DNA, 15 bp, Homo sapiens
tccccttccatattc

SEQ ID NO: 974750 - DNA, 15 bp, Homo sapiens
atccccttccatatt

SEQ ID NO: 974751 - DNA, 15 bp, Homo sapiens
aatccccttccatat

SEQ ID NO: 974752 - DNA, 15 bp, Homo sapiens
gaatccccttccata

SEQ ID NO: 974753 - DNA, 15 bp, Homo sapiens
ggaatccccttccat

SEQ ID NO: 974754 - DNA, 15 bp, Homo sapiens
tggaatccccttcca

SEQ ID NO: 974755 - DNA, 15 bp, Homo sapiens
ttggaatccccttcc

SEQ ID NO: 974756 - DNA, 15 bp, Homo sapiens
attggaatccccttc

SEQ ID NO: 974757 - DNA, 15 bp, Homo sapiens
tattggaatcccctt

SEQ ID NO: 974758 - DNA, 15 bp, Homo sapiens
ctattggaatcccct

SEQ ID NO: 974759 - DNA, 15 bp, Homo sapiens
actattggaatcccc

SEQ ID NO: 974760 - DNA, 15 bp, Homo sapiens
gactattggaatccc

SEQ ID NO: 974761 - DNA, 15 bp, Homo sapiens
cgactattggaatcc

SEQ ID NO: 974762 - DNA, 15 bp, Homo sapiens
acgactattggaatc

SEQ ID NO: 974763 - DNA, 15 bp, Homo sapiens
aacgactattggaat

SEQ ID NO: 974764 - DNA, 15 bp, Homo sapiens
caacgactattggaa

SEQ ID NO: 974765 - DNA, 15 bp, Homo sapiens
tcaacgactattgga

SEQ ID NO: 974766 - DNA, 15 bp, Homo sapiens
ttcaacgactattgg

SEQ ID NO: 974767 - DNA, 15 bp, Homo sapiens
tttcaacgactattg

SEQ ID NO: 974768 - DNA, 15 bp, Homo sapiens
ttttcaacgactatt

SEQ ID NO: 974769 - DNA, 15 bp, Homo sapiens
tttttcaacgactat

SEQ ID NO: 974770 - DNA, 15 bp, Homo sapiens
atttttcaacgacta

SEQ ID NO: 974771 - DNA, 15 bp, Homo sapiens
aatttttcaacgact

SEQ ID NO: 974772 - DNA, 15 bp, Homo sapiens
gaatttttcaacgac

SEQ ID NO: 974773 - DNA, 15 bp, Homo sapiens
ggaatttttcaacga

SEQ ID NO: 974774 - DNA, 15 bp, Homo sapiens
gggaatttttcaacg

SEQ ID NO: 974775 - DNA, 15 bp, Homo sapiens
ggggaatttttcaac

SEQ ID NO: 974776 - DNA, 15 bp, Homo sapiens
tggggaatttttcaa

SEQ ID NO: 974777 - DNA, 15 bp, Homo sapiens
atggggaatttttca

SEQ ID NO: 974778 - DNA, 15 bp, Homo sapiens
tatggggaatttttc

SEQ ID NO: 974779 - DNA, 15 bp, Homo sapiens
ttatggggaattttt

SEQ ID NO: 974780 - DNA, 15 bp, Homo sapiens
gttatggggaatttt

SEQ ID NO: 974781 - DNA, 15 bp, Homo sapiens
ggttatggggaattt

SEQ ID NO: 974782 - DNA, 15 bp, Homo sapiens
gggttatggggaatt

SEQ ID NO: 974783 - DNA, 15 bp, Homo sapiens
ggggttatggggaat

SEQ ID NO: 974784 - DNA, 15 bp, Homo sapiens
aggggttatggggaa

SEQ ID NO: 974785 - DNA, 15 bp, Homo sapiens
aaggggttatgggga

SEQ ID NO: 974786 - DNA, 15 bp, Homo sapiens
taaggggttatgggg

SEQ ID NO: 974787 - DNA, 15 bp, Homo sapiens
gtaaggggttatggg

SEQ ID NO: 974788 - DNA, 15 bp, Homo sapiens
tgtaaggggttatgg

SEQ ID NO: 974789 - DNA, 15 bp, Homo sapiens
atgtaaggggttatg

SEQ ID NO: 974790 - DNA, 15 bp, Homo sapiens
catgtaaggggttat

SEQ ID NO: 974791 - DNA, 15 bp, Homo sapiens
ccatgtaaggggtta

SEQ ID NO: 974792 - DNA, 15 bp, Homo sapiens
cccatgtaaggggtt

SEQ ID NO: 974793 - DNA, 15 bp, Homo sapiens
ccccatgtaaggggt

SEQ ID NO: 974794 - DNA, 15 bp, Homo sapiens
cccccatgtaagggg

SEQ ID NO: 974795 - DNA, 15 bp, Homo sapiens
tcccccatgtaaggg

SEQ ID NO: 974796 - DNA, 15 bp, Homo sapiens
ttcccccatgtaagg

SEQ ID NO: 974797 - DNA, 15 bp, Homo sapiens
tttcccccatgtaag

SEQ ID NO: 974798 - DNA, 15 bp, Homo sapiens
ctttcccccatgtaa

SEQ ID NO: 974799 - DNA, 15 bp, Homo sapiens
actttcccccatgta

SEQ ID NO: 974800 - DNA, 15 bp, Homo sapiens
tactttcccccatgt

SEQ ID NO: 974801 - DNA, 15 bp, Homo sapiens
ctactttcccccatg

SEQ ID NO: 974802 - DNA, 15 bp, Homo sapiens
actactttcccccat

SEQ ID NO: 974803 - DNA, 15 bp, Homo sapiens
cactactttccccca

SEQ ID NO: 974804 - DNA, 15 bp, Homo sapiens
acactactttccccc

SEQ ID NO: 974805 - DNA, 15 bp, Homo sapiens
aacactactttcccc

SEQ ID NO: 974806 - DNA, 15 bp, Homo sapiens
taacactactttccc

SEQ ID NO: 974807 - DNA, 15 bp, Homo sapiens
ttaacactactttcc

SEQ ID NO: 974808 - DNA, 15 bp, Homo sapiens
gttaacactactttc

SEQ ID NO: 974809 - DNA, 15 bp, Homo sapiens
agttaacactacttt

SEQ ID NO: 974810 - DNA, 15 bp, Homo sapiens
cagttaacactactt

SEQ ID NO: 974811 - DNA, 15 bp, Homo sapiens
tcagttaacactact

SEQ ID NO: 974812 - DNA, 15 bp, Homo sapiens
ctcagttaacactac

SEQ ID NO: 974813 - DNA, 15 bp, Homo sapiens
tctcagttaacacta

SEQ ID NO: 974814 - DNA, 15 bp, Homo sapiens
ctctcagttaacact

SEQ ID NO: 974815 - DNA, 15 bp, Homo sapiens
tctctcagttaacac

SEQ ID NO: 974816 - DNA, 15 bp, Homo sapiens
ctctctcagttaaca

SEQ ID NO: 974817 - DNA, 15 bp, Homo sapiens
actctctcagttaac

SEQ ID NO: 974818 - DNA, 15 bp, Homo sapiens
tactctctcagttaa

SEQ ID NO: 974819 - DNA, 15 bp, Homo sapiens
ctactctctcagtta

SEQ ID NO: 974820 - DNA, 15 bp, Homo sapiens
tctactctctcagtt

SEQ ID NO: 974821 - DNA, 15 bp, Homo sapiens
ctctactctctcagt

SEQ ID NO: 974822 - DNA, 15 bp, Homo sapiens
tctctactctctcag

SEQ ID NO: 974823 - DNA, 15 bp, Homo sapiens
atctctactctctca

SEQ ID NO: 974824 - DNA, 15 bp, Homo sapiens
tatctctactctctc

SEQ ID NO: 974825 - DNA, 15 bp, Homo sapiens
ttatctctactctct

SEQ ID NO: 974826 - DNA, 15 bp, Homo sapiens
cttatctctactctc

SEQ ID NO: 974827 - DNA, 15 bp, Homo sapiens
gcttatctctactct

SEQ ID NO: 974828 - DNA, 15 bp, Homo sapiens
agcttatctctactc

SEQ ID NO: 974829 - DNA, 15 bp, Homo sapiens
cagcttatctctact

SEQ ID NO: 974830 - DNA, 15 bp, Homo sapiens
acagcttatctctac

SEQ ID NO: 974831 - DNA, 15 bp, Homo sapiens
aacagcttatctcta

SEQ ID NO: 974832 - DNA, 15 bp, Homo sapiens
aaacagcttatctct

SEQ ID NO: 974833 - DNA, 15 bp, Homo sapiens
gaaacagcttatctc

SEQ ID NO: 974834 - DNA, 15 bp, Homo sapiens
ggaaacagcttatct

SEQ ID NO: 974835 - DNA, 15 bp, Homo sapiens
tggaaacagcttatc

SEQ ID NO: 974836 - DNA, 15 bp, Homo sapiens
ttggaaacagcttat

SEQ ID NO: 974837 - DNA, 15 bp, Homo sapiens
tttggaaacagctta

SEQ ID NO: 974838 - DNA, 15 bp, Homo sapiens
ttttggaaacagctt

SEQ ID NO: 974839 - DNA, 15 bp, Homo sapiens
tttttggaaacagct

SEQ ID NO: 974840 - DNA, 15 bp, Homo sapiens
atttttggaaacagc

SEQ ID NO: 974841 - DNA, 15 bp, Homo sapiens
aatttttggaaacag

SEQ ID NO: 974842 - DNA, 15 bp, Homo sapiens
taatttttggaaaca

SEQ ID NO: 974843 - DNA, 15 bp, Homo sapiens
ataatttttggaaac

SEQ ID NO: 974844 - DNA, 15 bp, Homo sapiens
tataatttttggaaa

SEQ ID NO: 974845 - DNA, 15 bp, Homo sapiens
atataatttttggaa

SEQ ID NO: 974846 - DNA, 15 bp, Homo sapiens
aatataatttttgga

SEQ ID NO: 974847 - DNA, 15 bp, Homo sapiens
gaatataatttttgg

SEQ ID NO: 974848 - DNA, 15 bp, Homo sapiens
agaatataatttttg

SEQ ID NO: 974849 - DNA, 15 bp, Homo sapiens
aagaatataattttt

SEQ ID NO: 974850 - DNA, 15 bp, Homo sapiens
taagaatataatttt

SEQ ID NO: 974851 - DNA, 15 bp, Homo sapiens
ttaagaatataattt

SEQ ID NO: 974852 - DNA, 15 bp, Homo sapiens
gttaagaatataatt

SEQ ID NO: 974853 - DNA, 15 bp, Homo sapiens
tgttaagaatataat

SEQ ID NO: 974854 - DNA, 15 bp, Homo sapiens
ctgttaagaatataa

SEQ ID NO: 974855 - DNA, 15 bp, Homo sapiens
cctgttaagaatata

SEQ ID NO: 974856 - DNA, 15 bp, Homo sapiens
tcctgttaagaatat

SEQ ID NO: 974857 - DNA, 15 bp, Homo sapiens
gtcctgttaagaata

SEQ ID NO: 974858 - DNA, 15 bp, Homo sapiens
agtcctgttaagaat

SEQ ID NO: 974859 - DNA, 15 bp, Homo sapiens
cagtcctgttaagaa

SEQ ID NO: 974860 - DNA, 15 bp, Homo sapiens
tcagtcctgttaaga

SEQ ID NO: 974861 - DNA, 15 bp, Homo sapiens
ctcagtcctgttaag

SEQ ID NO: 974862 - DNA, 15 bp, Homo sapiens
tctcagtcctgttaa

SEQ ID NO: 974863 - DNA, 15 bp, Homo sapiens
atctcagtcctgtta

SEQ ID NO: 974864 - DNA, 15 bp, Homo sapiens
tatctcagtcctgtt

SEQ ID NO: 974865 - DNA, 15 bp, Homo sapiens
ctatctcagtcctgt

SEQ ID NO: 974866 - DNA, 15 bp, Homo sapiens
gctatctcagtcctg

SEQ ID NO: 974867 - DNA, 15 bp, Homo sapiens
ggctatctcagtcct

SEQ ID NO: 974868 - DNA, 15 bp, Homo sapiens
tggctatctcagtcc

SEQ ID NO: 974869 - DNA, 15 bp, Homo sapiens
ctggctatctcagtc

SEQ ID NO: 974870 - DNA, 15 bp, Homo sapiens
tctggctatctcagt

SEQ ID NO: 974871 - DNA, 15 bp, Homo sapiens
ttctggctatctcag

SEQ ID NO: 974872 - DNA, 15 bp, Homo sapiens
attctggctatctca

SEQ ID NO: 974873 - DNA, 15 bp, Homo sapiens
tattctggctatctc

SEQ ID NO: 974874 - DNA, 15 bp, Homo sapiens
atattctggctatct

SEQ ID NO: 974875 - DNA, 15 bp, Homo sapiens
tatattctggctatc

SEQ ID NO: 974876 - DNA, 15 bp, Homo sapiens
ttatattctggctat

SEQ ID NO: 974877 - DNA, 15 bp, Homo sapiens
cttatattctggcta

SEQ ID NO: 974878 - DNA, 15 bp, Homo sapiens
ccttatattctggct

SEQ ID NO: 974879 - DNA, 15 bp, Homo sapiens
tccttatattctggc

SEQ ID NO: 974880 - DNA, 15 bp, Homo sapiens
atccttatattctgg

SEQ ID NO: 974881 - DNA, 15 bp, Homo sapiens
gatccttatattctg

SEQ ID NO: 974882 - DNA, 15 bp, Homo sapiens
tgatccttatattct

SEQ ID NO: 974883 - DNA, 15 bp, Homo sapiens
ttgatccttatattc

SEQ ID NO: 974884 - DNA, 15 bp, Homo sapiens
cttgatccttatatt

SEQ ID NO: 974885 - DNA, 15 bp, Homo sapiens
acttgatccttatat

SEQ ID NO: 974886 - DNA, 15 bp, Homo sapiens
aacttgatccttata

SEQ ID NO: 974887 - DNA, 15 bp, Homo sapiens
aaacttgatccttat

SEQ ID NO: 974888 - DNA, 15 bp, Homo sapiens
gaaacttgatcctta

SEQ ID NO: 974889 - DNA, 15 bp, Homo sapiens
tgaaacttgatcctt

SEQ ID NO: 974890 - DNA, 15 bp, Homo sapiens
ttgaaacttgatcct

SEQ ID NO: 974891 - DNA, 15 bp, Homo sapiens
attgaaacttgatcc

SEQ ID NO: 974892 - DNA, 15 bp, Homo sapiens
cattgaaacttgatc

SEQ ID NO: 974893 - DNA, 15 bp, Homo sapiens
tcattgaaacttgat

SEQ ID NO: 974894 - DNA, 15 bp, Homo sapiens
gtcattgaaacttga

SEQ ID NO: 974895 - DNA, 15 bp, Homo sapiens
tgtcattgaaacttg

SEQ ID NO: 974896 - DNA, 15 bp, Homo sapiens
ctgtcattgaaactt

SEQ ID NO: 974897 - DNA, 15 bp, Homo sapiens
actgtcattgaaact

SEQ ID NO: 974898 - DNA, 15 bp, Homo sapiens
tactgtcattgaaac

SEQ ID NO: 974899 - DNA, 15 bp, Homo sapiens
ttactgtcattgaaa

SEQ ID NO: 974900 - DNA, 15 bp, Homo sapiens
cttactgtcattgaa

SEQ ID NO: 974901 - DNA, 15 bp, Homo sapiens
tcttactgtcattga

SEQ ID NO: 974902 - DNA, 15 bp, Homo sapiens
atcttactgtcattg

SEQ ID NO: 974903 - DNA, 15 bp, Homo sapiens
gatcttactgtcatt

SEQ ID NO: 974904 - DNA, 15 bp, Homo sapiens
ggatcttactgtcat

SEQ ID NO: 974905 - DNA, 15 bp, Homo sapiens
aggatcttactgtca

SEQ ID NO: 974906 - DNA, 15 bp, Homo sapiens
caggatcttactgtc

SEQ ID NO: 974907 - DNA, 15 bp, Homo sapiens
tcaggatcttactgt

SEQ ID NO: 974908 - DNA, 15 bp, Homo sapiens
ctcaggatcttactg

SEQ ID NO: 974909 - DNA, 15 bp, Homo sapiens
tctcaggatcttact

SEQ ID NO: 974910 - DNA, 15 bp, Homo sapiens
atctcaggatcttac

SEQ ID NO: 974911 - DNA, 15 bp, Homo sapiens
catctcaggatctta

SEQ ID NO: 974912 - DNA, 15 bp, Homo sapiens
ccatctcaggatctt

SEQ ID NO: 974913 - DNA, 15 bp, Homo sapiens
tccatctcaggatct

SEQ ID NO: 974914 - DNA, 15 bp, Homo sapiens
ctccatctcaggatc

SEQ ID NO: 974915 - DNA, 15 bp, Homo sapiens
actccatctcaggat

SEQ ID NO: 974916 - DNA, 15 bp, Homo sapiens
aactccatctcagga

SEQ ID NO: 974917 - DNA, 15 bp, Homo sapiens
caactccatctcagg

SEQ ID NO: 974918 - DNA, 15 bp, Homo sapiens
tcaactccatctcag

SEQ ID NO: 974919 - DNA, 15 bp, Homo sapiens
atcaactccatctca

SEQ ID NO: 974920 - DNA, 15 bp, Homo sapiens
aatcaactccatctc

SEQ ID NO: 974921 - DNA, 15 bp, Homo sapiens
aaatcaactccatct

SEQ ID NO: 974922 - DNA, 15 bp, Homo sapiens
caaatcaactccatc

SEQ ID NO: 974923 - DNA, 15 bp, Homo sapiens
gcaaatcaactccat

SEQ ID NO: 974924 - DNA, 15 bp, Homo sapiens
tgcaaatcaactcca

SEQ ID NO: 974925 - DNA, 15 bp, Homo sapiens
gtgcaaatcaactcc

SEQ ID NO: 974926 - DNA, 15 bp, Homo sapiens
tgtgcaaatcaactc

SEQ ID NO: 974927 - DNA, 15 bp, Homo sapiens
ttgtgcaaatcaact

SEQ ID NO: 974928 - DNA, 15 bp, Homo sapiens
tttgtgcaaatcaac

SEQ ID NO: 974929 - DNA, 15 bp, Homo sapiens
ctttgtgcaaatcaa

SEQ ID NO: 974930 - DNA, 15 bp, Homo sapiens
tctttgtgcaaatca

SEQ ID NO: 974931 - DNA, 15 bp, Homo sapiens
ttctttgtgcaaatc

SEQ ID NO: 974932 - DNA, 15 bp, Homo sapiens
tttctttgtgcaaat

SEQ ID NO: 974933 - DNA, 15 bp, Homo sapiens
atttctttgtgcaaa

SEQ ID NO: 974934 - DNA, 15 bp, Homo sapiens
tatttctttgtgcaa

SEQ ID NO: 974935 - DNA, 15 bp, Homo sapiens
ttatttctttgtgca

SEQ ID NO: 974936 - DNA, 15 bp, Homo sapiens
attatttctttgtgc

SEQ ID NO: 974937 - DNA, 15 bp, Homo sapiens
aattatttctttgtg

SEQ ID NO: 974938 - DNA, 15 bp, Homo sapiens
caattatttctttgt

SEQ ID NO: 974939 - DNA, 15 bp, Homo sapiens
acaattatttctttg

SEQ ID NO: 974940 - DNA, 15 bp, Homo sapiens
aacaattatttcttt

SEQ ID NO: 974941 - DNA, 15 bp, Homo sapiens
caacaattatttctt

SEQ ID NO: 974942 - DNA, 15 bp, Homo sapiens
gcaacaattatttct

SEQ ID NO: 974943 - DNA, 15 bp, Homo sapiens
ggcaacaattatttc

SEQ ID NO: 974944 - DNA, 15 bp, Homo sapiens
tggcaacaattattt

SEQ ID NO: 974945 - DNA, 15 bp, Homo sapiens
ctggcaacaattatt

SEQ ID NO: 974946 - DNA, 15 bp, Homo sapiens
gctggcaacaattat

SEQ ID NO: 974947 - DNA, 15 bp, Homo sapiens
tgctggcaacaatta

SEQ ID NO: 974948 - DNA, 15 bp, Homo sapiens
atgctggcaacaatt

SEQ ID NO: 974949 - DNA, 15 bp, Homo sapiens
catgctggcaacaat

SEQ ID NO: 974950 - DNA, 15 bp, Homo sapiens
gcatgctggcaacaa

SEQ ID NO: 974951 - DNA, 15 bp, Homo sapiens
tgcatgctggcaaca

SEQ ID NO: 974952 - DNA, 15 bp, Homo sapiens
atgcatgctggcaac

SEQ ID NO: 974953 - DNA, 15 bp, Homo sapiens
aatgcatgctggcaa

SEQ ID NO: 974954 - DNA, 15 bp, Homo sapiens
aaatgcatgctggca

SEQ ID NO: 974955 - DNA, 15 bp, Homo sapiens
aaaatgcatgctggc

SEQ ID NO: 974956 - DNA, 15 bp, Homo sapiens
caaaatgcatgctgg

SEQ ID NO: 974957 - DNA, 15 bp, Homo sapiens
tcaaaatgcatgctg

SEQ ID NO: 974958 - DNA, 15 bp, Homo sapiens
ttcaaaatgcatgct

SEQ ID NO: 974959 - DNA, 15 bp, Homo sapiens
attcaaaatgcatgc

SEQ ID NO: 974960 - DNA, 15 bp, Homo sapiens
tattcaaaatgcatg

SEQ ID NO: 974961 - DNA, 15 bp, Homo sapiens
atattcaaaatgcat

SEQ ID NO: 974962 - DNA, 15 bp, Homo sapiens
aatattcaaaatgca

SEQ ID NO: 974963 - DNA, 15 bp, Homo sapiens
aaatattcaaaatgc

SEQ ID NO: 974964 - DNA, 15 bp, Homo sapiens
gaaatattcaaaatg

SEQ ID NO: 974965 - DNA, 15 bp, Homo sapiens
agaaatattcaaaat

SEQ ID NO: 974966 - DNA, 15 bp, Homo sapiens
gagaaatattcaaaa

SEQ ID NO: 974967 - DNA, 15 bp, Homo sapiens
agagaaatattcaaa

SEQ ID NO: 974968 - DNA, 15 bp, Homo sapiens
cagagaaatattcaa

SEQ ID NO: 974969 - DNA, 15 bp, Homo sapiens
ccagagaaatattca

SEQ ID NO: 974970 - DNA, 15 bp, Homo sapiens
tccagagaaatattc

SEQ ID NO: 974971 - DNA, 15 bp, Homo sapiens
ttccagagaaatatt

SEQ ID NO: 974972 - DNA, 15 bp, Homo sapiens
tttccagagaaatat

SEQ ID NO: 974973 - DNA, 15 bp, Homo sapiens
ttttccagagaaata

SEQ ID NO: 974974 - DNA, 15 bp, Homo sapiens
tttttccagagaaat

SEQ ID NO: 974975 - DNA, 15 bp, Homo sapiens
ttttttccagagaaa

SEQ ID NO: 974976 - DNA, 15 bp, Homo sapiens
tttttttccagagaa

SEQ ID NO: 974977 - DNA, 15 bp, Homo sapiens
ctttttttccagaga

SEQ ID NO: 974978 - DNA, 15 bp, Homo sapiens
tctttttttccagag

SEQ ID NO: 974979 - DNA, 15 bp, Homo sapiens
atctttttttccaga

SEQ ID NO: 974980 - DNA, 15 bp, Homo sapiens
aatctttttttccag

SEQ ID NO: 974981 - DNA, 15 bp, Homo sapiens
taatctttttttcca

SEQ ID NO: 974982 - DNA, 15 bp, Homo sapiens
ctaatctttttttcc

SEQ ID NO: 974983 - DNA, 15 bp, Homo sapiens
actaatctttttttc

SEQ ID NO: 974984 - DNA, 15 bp, Homo sapiens
aactaatcttttttt

SEQ ID NO: 974985 - DNA, 15 bp, Homo sapiens
caactaatctttttt

SEQ ID NO: 974986 - DNA, 15 bp, Homo sapiens
ccaactaatcttttt

SEQ ID NO: 974987 - DNA, 15 bp, Homo sapiens
gccaactaatctttt

SEQ ID NO: 974988 - DNA, 15 bp, Homo sapiens
tgccaactaatcttt

SEQ ID NO: 974989 - DNA, 15 bp, Homo sapiens
ctgccaactaatctt

SEQ ID NO: 974990 - DNA, 15 bp, Homo sapiens
actgccaactaatct

SEQ ID NO: 974991 - DNA, 15 bp, Homo sapiens
tactgccaactaatc

SEQ ID NO: 974992 - DNA, 15 bp, Homo sapiens
ctactgccaactaat

SEQ ID NO: 974993 - DNA, 15 bp, Homo sapiens
tctactgccaactaa

SEQ ID NO: 974994 - DNA, 15 bp, Homo sapiens
ttctactgccaacta

SEQ ID NO: 974995 - DNA, 15 bp, Homo sapiens
tttctactgccaact

SEQ ID NO: 974996 - DNA, 15 bp, Homo sapiens
atttctactgccaac

SEQ ID NO: 974997 - DNA, 15 bp, Homo sapiens
catttctactgccaa

SEQ ID NO: 974998 - DNA, 15 bp, Homo sapiens
ccatttctactgcca

SEQ ID NO: 974999 - DNA, 15 bp, Homo sapiens
tccatttctactgcc

SEQ ID NO: 975000 - DNA, 15 bp, Homo sapiens
atccatttctactgc

SEQ ID NO: 975001 - DNA, 15 bp, Homo sapiens
tatccatttctactg

SEQ ID NO: 975002 - DNA, 15 bp, Homo sapiens
ctatccatttctact

SEQ ID NO: 975003 - DNA, 15 bp, Homo sapiens
tctatccatttctac

SEQ ID NO: 975004 - DNA, 15 bp, Homo sapiens
ttctatccatttcta

SEQ ID NO: 975005 - DNA, 15 bp, Homo sapiens
tttctatccatttct

SEQ ID NO: 975006 - DNA, 15 bp, Homo sapiens
atttctatccatttc

SEQ ID NO: 975007 - DNA, 15 bp, Homo sapiens
gatttctatccattt

SEQ ID NO: 975008 - DNA, 15 bp, Homo sapiens
tgatttctatccatt

SEQ ID NO: 975009 - DNA, 15 bp, Homo sapiens
ttgatttctatccat

SEQ ID NO: 975010 - DNA, 15 bp, Homo sapiens
attgatttctatcca

SEQ ID NO: 975011 - DNA, 15 bp, Homo sapiens
tattgatttctatcc

SEQ ID NO: 975012 - DNA, 15 bp, Homo sapiens
ctattgatttctatc

SEQ ID NO: 975013 - DNA, 15 bp, Homo sapiens
tctattgatttctat

SEQ ID NO: 975014 - DNA, 15 bp, Homo sapiens
atctattgatttcta

SEQ ID NO: 975015 - DNA, 15 bp, Homo sapiens
tatctattgatttct

SEQ ID NO: 975016 - DNA, 15 bp, Homo sapiens
atatctattgatttc

SEQ ID NO: 975017 - DNA, 15 bp, Homo sapiens
aatatctattgattt

SEQ ID NO: 975018 - DNA, 15 bp, Homo sapiens
taatatctattgatt

SEQ ID NO: 975019 - DNA, 15 bp, Homo sapiens
ttaatatctattgat

SEQ ID NO: 975020 - DNA, 15 bp, Homo sapiens
tttaatatctattga

SEQ ID NO: 975021 - DNA, 15 bp, Homo sapiens
ttttaatatctattg

SEQ ID NO: 975022 - DNA, 15 bp, Homo sapiens
attttaatatctatt

SEQ ID NO: 975023 - DNA, 15 bp, Homo sapiens
tattttaatatctat

SEQ ID NO: 975024 - DNA, 15 bp, Homo sapiens
gtattttaatatcta

SEQ ID NO: 975025 - DNA, 15 bp, Homo sapiens
ggtattttaatatct

SEQ ID NO: 975026 - DNA, 15 bp, Homo sapiens
aggtattttaatatc

SEQ ID NO: 975027 - DNA, 15 bp, Homo sapiens
gaggtattttaatat

SEQ ID NO: 975028 - DNA, 15 bp, Homo sapiens
tgaggtattttaata

SEQ ID NO: 975029 - DNA, 15 bp, Homo sapiens
ctgaggtattttaat

SEQ ID NO: 975030 - DNA, 15 bp, Homo sapiens
tctgaggtattttaa

SEQ ID NO: 975031 - DNA, 15 bp, Homo sapiens
ttctgaggtatttta

SEQ ID NO: 975032 - DNA, 15 bp, Homo sapiens
attctgaggtatttt

SEQ ID NO: 975033 - DNA, 15 bp, Homo sapiens
aattctgaggtattt

SEQ ID NO: 975034 - DNA, 15 bp, Homo sapiens
aaattctgaggtatt

SEQ ID NO: 975035 - DNA, 15 bp, Homo sapiens
caaattctgaggtat

SEQ ID NO: 975036 - DNA, 15 bp, Homo sapiens
ccaaattctgaggta

SEQ ID NO: 975037 - DNA, 15 bp, Homo sapiens
accaaattctgaggt

SEQ ID NO: 975038 - DNA, 15 bp, Homo sapiens
aaccaaattctgagg

SEQ ID NO: 975039 - DNA, 15 bp, Homo sapiens
gaaccaaattctgag

SEQ ID NO: 975040 - DNA, 15 bp, Homo sapiens
tgaaccaaattctga

SEQ ID NO: 975041 - DNA, 15 bp, Homo sapiens
atgaaccaaattctg

SEQ ID NO: 975042 - DNA, 15 bp, Homo sapiens
gatgaaccaaattct

SEQ ID NO: 975043 - DNA, 15 bp, Homo sapiens
agatgaaccaaattc

SEQ ID NO: 975044 - DNA, 15 bp, Homo sapiens
gagatgaaccaaatt

SEQ ID NO: 975045 - DNA, 15 bp, Homo sapiens
agagatgaaccaaat

SEQ ID NO: 975046 - DNA, 15 bp, Homo sapiens
cagagatgaaccaaa

SEQ ID NO: 975047 - DNA, 15 bp, Homo sapiens
ccagagatgaaccaa

SEQ ID NO: 975048 - DNA, 15 bp, Homo sapiens
cccagagatgaacca

SEQ ID NO: 975049 - DNA, 15 bp, Homo sapiens
tcccagagatgaacc

SEQ ID NO: 975050 - DNA, 15 bp, Homo sapiens
ttcccagagatgaac

SEQ ID NO: 975051 - DNA, 15 bp, Homo sapiens
tttcccagagatgaa

SEQ ID NO: 975052 - DNA, 15 bp, Homo sapiens
ttttcccagagatga

SEQ ID NO: 975053 - DNA, 15 bp, Homo sapiens
cttttcccagagatg

SEQ ID NO: 975054 - DNA, 15 bp, Homo sapiens
tcttttcccagagat

SEQ ID NO: 975055 - DNA, 15 bp, Homo sapiens
atcttttcccagaga

SEQ ID NO: 975056 - DNA, 15 bp, Homo sapiens
catcttttcccagag

SEQ ID NO: 975057 - DNA, 15 bp, Homo sapiens
tcatcttttcccaga

SEQ ID NO: 975058 - DNA, 15 bp, Homo sapiens
ttcatcttttcccag

SEQ ID NO: 975059 - DNA, 15 bp, Homo sapiens
tttcatcttttccca

SEQ ID NO: 975060 - DNA, 15 bp, Homo sapiens
ttttcatcttttccc

SEQ ID NO: 975061 - DNA, 15 bp, Homo sapiens
tttttcatcttttcc

SEQ ID NO: 975062 - DNA, 15 bp, Homo sapiens
atttttcatcttttc

SEQ ID NO: 975063 - DNA, 15 bp, Homo sapiens
tatttttcatctttt

SEQ ID NO: 975064 - DNA, 15 bp, Homo sapiens
ttatttttcatcttt

SEQ ID NO: 975065 - DNA, 15 bp, Homo sapiens
tttatttttcatctt

SEQ ID NO: 975066 - DNA, 15 bp, Homo sapiens
ttttatttttcatct

SEQ ID NO: 975067 - DNA, 15 bp, Homo sapiens
cttttatttttcatc

SEQ ID NO: 975068 - DNA, 15 bp, Homo sapiens
acttttatttttcat

SEQ ID NO: 975069 - DNA, 15 bp, Homo sapiens
cacttttatttttca

SEQ ID NO: 975070 - DNA, 15 bp, Homo sapiens
acacttttatttttc

SEQ ID NO: 975071 - DNA, 15 bp, Homo sapiens
tacacttttattttt

SEQ ID NO: 975072 - DNA, 15 bp, Homo sapiens
atacacttttatttt

SEQ ID NO: 975073 - DNA, 15 bp, Homo sapiens
tatacacttttattt

SEQ ID NO: 975074 - DNA, 15 bp, Homo sapiens
gtatacacttttatt

SEQ ID NO: 975075 - DNA, 15 bp, Homo sapiens
agtatacacttttat

SEQ ID NO: 975076 - DNA, 15 bp, Homo sapiens
gagtatacactttta

SEQ ID NO: 975077 - DNA, 15 bp, Homo sapiens
ggagtatacactttt

SEQ ID NO: 975078 - DNA, 15 bp, Homo sapiens
aggagtatacacttt

SEQ ID NO: 975079 - DNA, 15 bp, Homo sapiens
gaggagtatacactt

SEQ ID NO: 975080 - DNA, 15 bp, Homo sapiens
tgaggagtatacact

SEQ ID NO: 975081 - DNA, 15 bp, Homo sapiens
ttgaggagtatacac

SEQ ID NO: 975082 - DNA, 15 bp, Homo sapiens
cttgaggagtataca

SEQ ID NO: 975083 - DNA, 15 bp, Homo sapiens
tcttgaggagtatac

SEQ ID NO: 975084 - DNA, 15 bp, Homo sapiens
ttcttgaggagtata

SEQ ID NO: 975085 - DNA, 15 bp, Homo sapiens
gttcttgaggagtat

SEQ ID NO: 975086 - DNA, 15 bp, Homo sapiens
tgttcttgaggagta

SEQ ID NO: 975087 - DNA, 15 bp, Homo sapiens
atgttcttgaggagt

SEQ ID NO: 975088 - DNA, 15 bp, Homo sapiens
gatgttcttgaggag

SEQ ID NO: 975089 - DNA, 15 bp, Homo sapiens
agatgttcttgagga

SEQ ID NO: 975090 - DNA, 15 bp, Homo sapiens
tagatgttcttgagg

SEQ ID NO: 975091 - DNA, 15 bp, Homo sapiens
ctagatgttcttgag

SEQ ID NO: 975092 - DNA, 15 bp, Homo sapiens
cctagatgttcttga

SEQ ID NO: 975093 - DNA, 15 bp, Homo sapiens
tcctagatgttcttg

SEQ ID NO: 975094 - DNA, 15 bp, Homo sapiens
atcctagatgttctt

SEQ ID NO: 975095 - DNA, 15 bp, Homo sapiens
gatcctagatgttct

SEQ ID NO: 975096 - DNA, 15 bp, Homo sapiens
tgatcctagatgttc

SEQ ID NO: 975097 - DNA, 15 bp, Homo sapiens
ttgatcctagatgtt

SEQ ID NO: 975098 - DNA, 15 bp, Homo sapiens
tttgatcctagatgt

SEQ ID NO: 975099 - DNA, 15 bp, Homo sapiens
ttttgatcctagatg

SEQ ID NO: 975100 - DNA, 15 bp, Homo sapiens
cttttgatcctagat

SEQ ID NO: 975101 - DNA, 15 bp, Homo sapiens
gcttttgatcctaga

SEQ ID NO: 975102 - DNA, 15 bp, Homo sapiens
tgcttttgatcctag

SEQ ID NO: 975103 - DNA, 15 bp, Homo sapiens
atgcttttgatccta

SEQ ID NO: 975104 - DNA, 15 bp, Homo sapiens
catgcttttgatcct

SEQ ID NO: 975105 - DNA, 15 bp, Homo sapiens
acatgcttttgatcc

SEQ ID NO: 975106 - DNA, 15 bp, Homo sapiens
cacatgcttttgatc

SEQ ID NO: 975107 - DNA, 15 bp, Homo sapiens
gcacatgcttttgat

SEQ ID NO: 975108 - DNA, 15 bp, Homo sapiens
ggcacatgcttttga

SEQ ID NO: 975109 - DNA, 15 bp, Homo sapiens
gggcacatgcttttg

SEQ ID NO: 975110 - DNA, 15 bp, Homo sapiens
agggcacatgctttt

SEQ ID NO: 975111 - DNA, 15 bp, Homo sapiens
tagggcacatgcttt

SEQ ID NO: 975112 - DNA, 15 bp, Homo sapiens
gtagggcacatgctt

SEQ ID NO: 975113 - DNA, 15 bp, Homo sapiens
tgtagggcacatgct

SEQ ID NO: 975114 - DNA, 15 bp, Homo sapiens
gtgtagggcacatgc

SEQ ID NO: 975115 - DNA, 15 bp, Homo sapiens
agtgtagggcacatg

SEQ ID NO: 975116 - DNA, 15 bp, Homo sapiens
tagtgtagggcacat

SEQ ID NO: 975117 - DNA, 15 bp, Homo sapiens
atagtgtagggcaca

SEQ ID NO: 975118 - DNA, 15 bp, Homo sapiens
aatagtgtagggcac

SEQ ID NO: 975119 - DNA, 15 bp, Homo sapiens
caatagtgtagggca

SEQ ID NO: 975120 - DNA, 15 bp, Homo sapiens
tcaatagtgtagggc

SEQ ID NO: 975121 - DNA, 15 bp, Homo sapiens
ttcaatagtgtaggg

SEQ ID NO: 975122 - DNA, 15 bp, Homo sapiens
attcaatagtgtagg

SEQ ID NO: 975123 - DNA, 15 bp, Homo sapiens
aattcaatagtgtag

SEQ ID NO: 975124 - DNA, 15 bp, Homo sapiens
taattcaatagtgta

SEQ ID NO: 975125 - DNA, 15 bp, Homo sapiens
ttaattcaatagtgt

SEQ ID NO: 975126 - DNA, 15 bp, Homo sapiens
attaattcaatagtg

SEQ ID NO: 975127 - DNA, 15 bp, Homo sapiens
aattaattcaatagt

SEQ ID NO: 975128 - DNA, 15 bp, Homo sapiens
taattaattcaatag

SEQ ID NO: 975129 - DNA, 15 bp, Homo sapiens
ttaattaattcaata

SEQ ID NO: 975130 - DNA, 15 bp, Homo sapiens
gttaattaattcaat

SEQ ID NO: 975131 - DNA, 15 bp, Homo sapiens
ggttaattaattcaa

SEQ ID NO: 975132 - DNA, 15 bp, Homo sapiens
aggttaattaattca

SEQ ID NO: 975133 - DNA, 15 bp, Homo sapiens
gaggttaattaattc

SEQ ID NO: 975134 - DNA, 15 bp, Homo sapiens
tgaggttaattaatt

SEQ ID NO: 975135 - DNA, 15 bp, Homo sapiens
atgaggttaattaat

SEQ ID NO: 975136 - DNA, 15 bp, Homo sapiens
tatgaggttaattaa

SEQ ID NO: 975137 - DNA, 15 bp, Homo sapiens
ttatgaggttaatta

SEQ ID NO: 975138 - DNA, 15 bp, Homo sapiens
cttatgaggttaatt

SEQ ID NO: 975139 - DNA, 15 bp, Homo sapiens
acttatgaggttaat

SEQ ID NO: 975140 - DNA, 15 bp, Homo sapiens
aacttatgaggttaa

SEQ ID NO: 975141 - DNA, 15 bp, Homo sapiens
caacttatgaggtta

SEQ ID NO: 975142 - DNA, 15 bp, Homo sapiens
ccaacttatgaggtt

SEQ ID NO: 975143 - DNA, 15 bp, Homo sapiens
cccaacttatgaggt

SEQ ID NO: 975144 - DNA, 15 bp, Homo sapiens
tcccaacttatgagg

SEQ ID NO: 975145 - DNA, 15 bp, Homo sapiens
gtcccaacttatgag

SEQ ID NO: 975146 - DNA, 15 bp, Homo sapiens
ggtcccaacttatga

SEQ ID NO: 975147 - DNA, 15 bp, Homo sapiens
aggtcccaacttatg

SEQ ID NO: 975148 - DNA, 15 bp, Homo sapiens
caggtcccaacttat

SEQ ID NO: 975149 - DNA, 15 bp, Homo sapiens
acaggtcccaactta

SEQ ID NO: 975150 - DNA, 15 bp, Homo sapiens
cacaggtcccaactt

SEQ ID NO: 975151 - DNA, 15 bp, Homo sapiens
ccacaggtcccaact

SEQ ID NO: 975152 - DNA, 15 bp, Homo sapiens
tccacaggtcccaac

SEQ ID NO: 975153 - DNA, 15 bp, Homo sapiens
ttccacaggtcccaa

SEQ ID NO: 975154 - DNA, 15 bp, Homo sapiens
attccacaggtccca

SEQ ID NO: 975155 - DNA, 15 bp, Homo sapiens
tattccacaggtccc

SEQ ID NO: 975156 - DNA, 15 bp, Homo sapiens
ttattccacaggtcc

SEQ ID NO: 975157 - DNA, 15 bp, Homo sapiens
cttattccacaggtc

SEQ ID NO: 975158 - DNA, 15 bp, Homo sapiens
ccttattccacaggt

SEQ ID NO: 975159 - DNA, 15 bp, Homo sapiens
tccttattccacagg

SEQ ID NO: 975160 - DNA, 15 bp, Homo sapiens
atccttattccacag

SEQ ID NO: 975161 - DNA, 15 bp, Homo sapiens
catccttattccaca

SEQ ID NO: 975162 - DNA, 15 bp, Homo sapiens
acatccttattccac

SEQ ID NO: 975163 - DNA, 15 bp, Homo sapiens
gacatccttattcca

SEQ ID NO: 975164 - DNA, 15 bp, Homo sapiens
ggacatccttattcc

SEQ ID NO: 975165 - DNA, 15 bp, Homo sapiens
tggacatccttattc

SEQ ID NO: 975166 - DNA, 15 bp, Homo sapiens
gtggacatccttatt

SEQ ID NO: 975167 - DNA, 15 bp, Homo sapiens
ggtggacatccttat

SEQ ID NO: 975168 - DNA, 15 bp, Homo sapiens
tggtggacatcctta

SEQ ID NO: 975169 - DNA, 15 bp, Homo sapiens
ctggtggacatcctt

SEQ ID NO: 975170 - DNA, 15 bp, Homo sapiens
tctggtggacatcct

SEQ ID NO: 975171 - DNA, 15 bp, Homo sapiens
gtctggtggacatcc

SEQ ID NO: 975172 - DNA, 15 bp, Homo sapiens
agtctggtggacatc

SEQ ID NO: 975173 - DNA, 15 bp, Homo sapiens
aagtctggtggacat

SEQ ID NO: 975174 - DNA, 15 bp, Homo sapiens
gaagtctggtggaca

SEQ ID NO: 975175 - DNA, 15 bp, Homo sapiens
ggaagtctggtggac

SEQ ID NO: 975176 - DNA, 15 bp, Homo sapiens
aggaagtctggtgga

SEQ ID NO: 975177 - DNA, 15 bp, Homo sapiens
taggaagtctggtgg

SEQ ID NO: 975178 - DNA, 15 bp, Homo sapiens
ctaggaagtctggtg

SEQ ID NO: 975179 - DNA, 15 bp, Homo sapiens
cctaggaagtctggt

SEQ ID NO: 975180 - DNA, 15 bp, Homo sapiens
ccctaggaagtctgg

SEQ ID NO: 975181 - DNA, 15 bp, Homo sapiens
tccctaggaagtctg

SEQ ID NO: 975182 - DNA, 15 bp, Homo sapiens
atccctaggaagtct

SEQ ID NO: 975183 - DNA, 15 bp, Homo sapiens
aatccctaggaagtc

SEQ ID NO: 975184 - DNA, 15 bp, Homo sapiens
taatccctaggaagt

SEQ ID NO: 975185 - DNA, 15 bp, Homo sapiens
gtaatccctaggaag

SEQ ID NO: 975186 - DNA, 15 bp, Homo sapiens
tgtaatccctaggaa

SEQ ID NO: 975187 - DNA, 15 bp, Homo sapiens
ttgtaatccctagga

SEQ ID NO: 975188 - DNA, 15 bp, Homo sapiens
tttgtaatccctagg

SEQ ID NO: 975189 - DNA, 15 bp, Homo sapiens
atttgtaatccctag

SEQ ID NO: 975190 - DNA, 15 bp, Homo sapiens
catttgtaatcccta

SEQ ID NO: 975191 - DNA, 15 bp, Homo sapiens
acatttgtaatccct

SEQ ID NO: 975192 - DNA, 15 bp, Homo sapiens
aacatttgtaatccc

SEQ ID NO: 975193 - DNA, 15 bp, Homo sapiens
aaacatttgtaatcc

SEQ ID NO: 975194 - DNA, 15 bp, Homo sapiens
gaaacatttgtaatc

SEQ ID NO: 975195 - DNA, 15 bp, Homo sapiens
tgaaacatttgtaat

SEQ ID NO: 975196 - DNA, 15 bp, Homo sapiens
gtgaaacatttgtaa

SEQ ID NO: 975197 - DNA, 15 bp, Homo sapiens
tgtgaaacatttgta

SEQ ID NO: 975198 - DNA, 15 bp, Homo sapiens
ctgtgaaacatttgt

SEQ ID NO: 975199 - DNA, 15 bp, Homo sapiens
tctgtgaaacatttg

SEQ ID NO: 975200 - DNA, 15 bp, Homo sapiens
ttctgtgaaacattt

SEQ ID NO: 975201 - DNA, 15 bp, Homo sapiens
gttctgtgaaacatt

SEQ ID NO: 975202 - DNA, 15 bp, Homo sapiens
agttctgtgaaacat

SEQ ID NO: 975203 - DNA, 15 bp, Homo sapiens
aagttctgtgaaaca

SEQ ID NO: 975204 - DNA, 15 bp, Homo sapiens
caagttctgtgaaac

SEQ ID NO: 975205 - DNA, 15 bp, Homo sapiens
tcaagttctgtgaaa

SEQ ID NO: 975206 - DNA, 15 bp, Homo sapiens
ttcaagttctgtgaa

SEQ ID NO: 975207 - DNA, 15 bp, Homo sapiens
tttcaagttctgtga

SEQ ID NO: 975208 - DNA, 15 bp, Homo sapiens
atttcaagttctgtg

SEQ ID NO: 975209 - DNA, 15 bp, Homo sapiens
aatttcaagttctgt

SEQ ID NO: 975210 - DNA, 15 bp, Homo sapiens
aaatttcaagttctg

SEQ ID NO: 975211 - DNA, 15 bp, Homo sapiens
taaatttcaagttct

SEQ ID NO: 975212 - DNA, 15 bp, Homo sapiens
ttaaatttcaagttc

SEQ ID NO: 975213 - DNA, 15 bp, Homo sapiens
tttaaatttcaagtt

SEQ ID NO: 975214 - DNA, 15 bp, Homo sapiens
gtttaaatttcaagt

SEQ ID NO: 975215 - DNA, 15 bp, Homo sapiens
agtttaaatttcaag

SEQ ID NO: 975216 - DNA, 15 bp, Homo sapiens
aagtttaaatttcaa

SEQ ID NO: 975217 - DNA, 15 bp, Homo sapiens
caagtttaaatttca

SEQ ID NO: 975218 - DNA, 15 bp, Homo sapiens
ccaagtttaaatttc

SEQ ID NO: 975219 - DNA, 15 bp, Homo sapiens
cccaagtttaaattt

SEQ ID NO: 975220 - DNA, 15 bp, Homo sapiens
acccaagtttaaatt

SEQ ID NO: 975221 - DNA, 15 bp, Homo sapiens
gacccaagtttaaat

SEQ ID NO: 975222 - DNA, 15 bp, Homo sapiens
tgacccaagtttaaa

SEQ ID NO: 975223 - DNA, 15 bp, Homo sapiens
gtgacccaagtttaa

SEQ ID NO: 975224 - DNA, 15 bp, Homo sapiens
agtgacccaagttta

SEQ ID NO: 975225 - DNA, 15 bp, Homo sapiens
cagtgacccaagttt

SEQ ID NO: 975226 - DNA, 15 bp, Homo sapiens
acagtgacccaagtt

SEQ ID NO: 975227 - DNA, 15 bp, Homo sapiens
tacagtgacccaagt

SEQ ID NO: 975228 - DNA, 15 bp, Homo sapiens
atacagtgacccaag

SEQ ID NO: 975229 - DNA, 15 bp, Homo sapiens
catacagtgacccaa

SEQ ID NO: 975230 - DNA, 15 bp, Homo sapiens
ccatacagtgaccca

SEQ ID NO: 975231 - DNA, 15 bp, Homo sapiens
cccatacagtgaccc

SEQ ID NO: 975232 - DNA, 15 bp, Homo sapiens
tcccatacagtgacc

SEQ ID NO: 975233 - DNA, 15 bp, Homo sapiens
atcccatacagtgac

SEQ ID NO: 975234 - DNA, 15 bp, Homo sapiens
catcccatacagtga

SEQ ID NO: 975235 - DNA, 15 bp, Homo sapiens
acatcccatacagtg

SEQ ID NO: 975236 - DNA, 15 bp, Homo sapiens
tacatcccatacagt

SEQ ID NO: 975237 - DNA, 15 bp, Homo sapiens
ctacatcccatacag

SEQ ID NO: 975238 - DNA, 15 bp, Homo sapiens
tctacatcccataca

SEQ ID NO: 975239 - DNA, 15 bp, Homo sapiens
ctctacatcccatac

SEQ ID NO: 975240 - DNA, 15 bp, Homo sapiens
gctctacatcccata

SEQ ID NO: 975241 - DNA, 15 bp, Homo sapiens
agctctacatcccat

SEQ ID NO: 975242 - DNA, 15 bp, Homo sapiens
cagctctacatccca

SEQ ID NO: 975243 - DNA, 15 bp, Homo sapiens
acagctctacatccc

SEQ ID NO: 975244 - DNA, 15 bp, Homo sapiens
cacagctctacatcc

SEQ ID NO: 975245 - DNA, 15 bp, Homo sapiens
gcacagctctacatc

SEQ ID NO: 975246 - DNA, 15 bp, Homo sapiens
agcacagctctacat

SEQ ID NO: 975247 - DNA, 15 bp, Homo sapiens
tagcacagctctaca

SEQ ID NO: 975248 - DNA, 15 bp, Homo sapiens
atagcacagctctac

SEQ ID NO: 975249 - DNA, 15 bp, Homo sapiens
tatagcacagctcta

SEQ ID NO: 975250 - DNA, 15 bp, Homo sapiens
atatagcacagctct

SEQ ID NO: 975251 - DNA, 15 bp, Homo sapiens
catatagcacagctc

SEQ ID NO: 975252 - DNA, 15 bp, Homo sapiens
ccatatagcacagct

SEQ ID NO: 975253 - DNA, 15 bp, Homo sapiens
tccatatagcacagc

SEQ ID NO: 975254 - DNA, 15 bp, Homo sapiens
ttccatatagcacag

SEQ ID NO: 975255 - DNA, 15 bp, Homo sapiens
tttccatatagcaca

SEQ ID NO: 975256 - DNA, 15 bp, Homo sapiens
atttccatatagcac

SEQ ID NO: 975257 - DNA, 15 bp, Homo sapiens
tatttccatatagca

SEQ ID NO: 975258 - DNA, 15 bp, Homo sapiens
ttatttccatatagc

SEQ ID NO: 975259 - DNA, 15 bp, Homo sapiens
tttatttccatatag

SEQ ID NO: 975260 - DNA, 15 bp, Homo sapiens
ttttatttccatata

SEQ ID NO: 975261 - DNA, 15 bp, Homo sapiens
tttttatttccatat

SEQ ID NO: 975262 - DNA, 15 bp, Homo sapiens
atttttatttccata

SEQ ID NO: 975263 - DNA, 15 bp, Homo sapiens
catttttatttccat

SEQ ID NO: 975264 - DNA, 15 bp, Homo sapiens
tcatttttatttcca

SEQ ID NO: 975265 - DNA, 15 bp, Homo sapiens
atcatttttatttcc

SEQ ID NO: 975266 - DNA, 15 bp, Homo sapiens
aatcatttttatttc

SEQ ID NO: 975267 - DNA, 15 bp, Homo sapiens
aaatcatttttattt

SEQ ID NO: 975268 - DNA, 15 bp, Homo sapiens
gaaatcatttttatt

SEQ ID NO: 975269 - DNA, 15 bp, Homo sapiens
agaaatcatttttat

SEQ ID NO: 975270 - DNA, 15 bp, Homo sapiens
aagaaatcattttta

SEQ ID NO: 975271 - DNA, 15 bp, Homo sapiens
aaagaaatcattttt

SEQ ID NO: 975272 - DNA, 15 bp, Homo sapiens
aaaagaaatcatttt

SEQ ID NO: 975273 - DNA, 15 bp, Homo sapiens
aaaaagaaatcattt

SEQ ID NO: 975274 - DNA, 15 bp, Homo sapiens
gaaaaagaaatcatt

SEQ ID NO: 975275 - DNA, 15 bp, Homo sapiens
agaaaaagaaatcat

SEQ ID NO: 975276 - DNA, 15 bp, Homo sapiens
gagaaaaagaaatca

SEQ ID NO: 975277 - DNA, 15 bp, Homo sapiens
tgagaaaaagaaatc

SEQ ID NO: 975278 - DNA, 15 bp, Homo sapiens
ttgagaaaaagaaat

SEQ ID NO: 975279 - DNA, 15 bp, Homo sapiens
cttgagaaaaagaaa

SEQ ID NO: 975280 - DNA, 15 bp, Homo sapiens
ccttgagaaaaagaa

SEQ ID NO: 975281 - DNA, 15 bp, Homo sapiens
cccttgagaaaaaga

SEQ ID NO: 975282 - DNA, 15 bp, Homo sapiens
tcccttgagaaaaag

SEQ ID NO: 975283 - DNA, 15 bp, Homo sapiens
ctcccttgagaaaaa

SEQ ID NO: 975284 - DNA, 15 bp, Homo sapiens
tctcccttgagaaaa

SEQ ID NO: 975285 - DNA, 15 bp, Homo sapiens
ttctcccttgagaaa

SEQ ID NO: 975286 - DNA, 15 bp, Homo sapiens
attctcccttgagaa

SEQ ID NO: 975287 - DNA, 15 bp, Homo sapiens
cattctcccttgaga

SEQ ID NO: 975288 - DNA, 15 bp, Homo sapiens
tcattctcccttgag

SEQ ID NO: 975289 - DNA, 15 bp, Homo sapiens
atcattctcccttga

SEQ ID NO: 975290 - DNA, 15 bp, Homo sapiens
catcattctcccttg

SEQ ID NO: 975291 - DNA, 15 bp, Homo sapiens
ccatcattctccctt

SEQ ID NO: 975292 - DNA, 15 bp, Homo sapiens
tccatcattctccct

SEQ ID NO: 975293 - DNA, 15 bp, Homo sapiens
atccatcattctccc

SEQ ID NO: 975294 - DNA, 15 bp, Homo sapiens
catccatcattctcc

SEQ ID NO: 975295 - DNA, 15 bp, Homo sapiens
acatccatcattctc

SEQ ID NO: 975296 - DNA, 15 bp, Homo sapiens
cacatccatcattct

SEQ ID NO: 975297 - DNA, 15 bp, Homo sapiens
tcacatccatcattc

SEQ ID NO: 975298 - DNA, 15 bp, Homo sapiens
ttcacatccatcatt

SEQ ID NO: 975299 - DNA, 15 bp, Homo sapiens
tttcacatccatcat

SEQ ID NO: 975300 - DNA, 15 bp, Homo sapiens
ttttcacatccatca

SEQ ID NO: 975301 - DNA, 15 bp, Homo sapiens
tttttcacatccatc

SEQ ID NO: 975302 - DNA, 15 bp, Homo sapiens
ttttttcacatccat

SEQ ID NO: 975303 - DNA, 15 bp, Homo sapiens
attttttcacatcca

SEQ ID NO: 975304 - DNA, 15 bp, Homo sapiens
cattttttcacatcc

SEQ ID NO: 975305 - DNA, 15 bp, Homo sapiens
acattttttcacatc

SEQ ID NO: 975306 - DNA, 15 bp, Homo sapiens
cacattttttcacat

SEQ ID NO: 975307 - DNA, 15 bp, Homo sapiens
ccacattttttcaca

SEQ ID NO: 975308 - DNA, 15 bp, Homo sapiens
gccacattttttcac

SEQ ID NO: 975309 - DNA, 15 bp, Homo sapiens
tgccacattttttca

SEQ ID NO: 975310 - DNA, 15 bp, Homo sapiens
atgccacattttttc

SEQ ID NO: 975311 - DNA, 15 bp, Homo sapiens
gatgccacatttttt

SEQ ID NO: 975312 - DNA, 15 bp, Homo sapiens
ggatgccacattttt

SEQ ID NO: 975313 - DNA, 15 bp, Homo sapiens
tggatgccacatttt

SEQ ID NO: 975314 - DNA, 15 bp, Homo sapiens
ttggatgccacattt

SEQ ID NO: 975315 - DNA, 15 bp, Homo sapiens
cttggatgccacatt

SEQ ID NO: 975316 - DNA, 15 bp, Homo sapiens
tcttggatgccacat

SEQ ID NO: 975317 - DNA, 15 bp, Homo sapiens
atcttggatgccaca

SEQ ID NO: 975318 - DNA, 15 bp, Homo sapiens
tatcttggatgccac

SEQ ID NO: 975319 - DNA, 15 bp, Homo sapiens
gtatcttggatgcca

SEQ ID NO: 975320 - DNA, 15 bp, Homo sapiens
tgtatcttggatgcc

SEQ ID NO: 975321 - DNA, 15 bp, Homo sapiens
ttgtatcttggatgc

SEQ ID NO: 975322 - DNA, 15 bp, Homo sapiens
tttgtatcttggatg

SEQ ID NO: 975323 - DNA, 15 bp, Homo sapiens
gtttgtatcttggat

SEQ ID NO: 975324 - DNA, 15 bp, Homo sapiens
agtttgtatcttgga

SEQ ID NO: 975325 - DNA, 15 bp, Homo sapiens
gagtttgtatcttgg

SEQ ID NO: 975326 - DNA, 15 bp, Homo sapiens
tgagtttgtatcttg

SEQ ID NO: 975327 - DNA, 15 bp, Homo sapiens
ttgagtttgtatctt

SEQ ID NO: 975328 - DNA, 15 bp, Homo sapiens
tttgagtttgtatct

SEQ ID NO: 975329 - DNA, 15 bp, Homo sapiens
ctttgagtttgtatc

SEQ ID NO: 975330 - DNA, 15 bp, Homo sapiens
tctttgagtttgtat

SEQ ID NO: 975331 - DNA, 15 bp, Homo sapiens
ttctttgagtttgta

SEQ ID NO: 975332 - DNA, 15 bp, Homo sapiens
cttctttgagtttgt

SEQ ID NO: 975333 - DNA, 15 bp, Homo sapiens
gcttctttgagtttg

SEQ ID NO: 975334 - DNA, 15 bp, Homo sapiens
tgcttctttgagttt

SEQ ID NO: 975335 - DNA, 15 bp, Homo sapiens
ttgcttctttgagtt

SEQ ID NO: 975336 - DNA, 15 bp, Homo sapiens
tttgcttctttgagt

SEQ ID NO: 975337 - DNA, 15 bp, Homo sapiens
ctttgcttctttgag

SEQ ID NO: 975338 - DNA, 15 bp, Homo sapiens
actttgcttctttga

SEQ ID NO: 975339 - DNA, 15 bp, Homo sapiens
cactttgcttctttg

SEQ ID NO: 975340 - DNA, 15 bp, Homo sapiens
ccactttgcttcttt

SEQ ID NO: 975341 - DNA, 15 bp, Homo sapiens
accactttgcttctt

SEQ ID NO: 975342 - DNA, 15 bp, Homo sapiens
taccactttgcttct

SEQ ID NO: 975343 - DNA, 15 bp, Homo sapiens
ttaccactttgcttc

SEQ ID NO: 975344 - DNA, 15 bp, Homo sapiens
cttaccactttgctt

SEQ ID NO: 975345 - DNA, 15 bp, Homo sapiens
tcttaccactttgct

SEQ ID NO: 975346 - DNA, 15 bp, Homo sapiens
ttcttaccactttgc

SEQ ID NO: 975347 - DNA, 15 bp, Homo sapiens
attcttaccactttg

SEQ ID NO: 975348 - DNA, 15 bp, Homo sapiens
tattcttaccacttt

SEQ ID NO: 975349 - DNA, 15 bp, Homo sapiens
atattcttaccactt

SEQ ID NO: 975350 - DNA, 15 bp, Homo sapiens
gatattcttaccact

SEQ ID NO: 975351 - DNA, 15 bp, Homo sapiens
tgatattcttaccac

SEQ ID NO: 975352 - DNA, 15 bp, Homo sapiens
ctgatattcttacca

SEQ ID NO: 975353 - DNA, 15 bp, Homo sapiens
tctgatattcttacc

SEQ ID NO: 975354 - DNA, 15 bp, Homo sapiens
ttctgatattcttac

SEQ ID NO: 975355 - DNA, 15 bp, Homo sapiens
cttctgatattctta

SEQ ID NO: 975356 - DNA, 15 bp, Homo sapiens
ccttctgatattctt

SEQ ID NO: 975357 - DNA, 15 bp, Homo sapiens
tccttctgatattct

SEQ ID NO: 975358 - DNA, 15 bp, Homo sapiens
ttccttctgatattc

SEQ ID NO: 975359 - DNA, 15 bp, Homo sapiens
attccttctgatatt

SEQ ID NO: 975360 - DNA, 15 bp, Homo sapiens
aattccttctgatat

SEQ ID NO: 975361 - DNA, 15 bp, Homo sapiens
caattccttctgata

SEQ ID NO: 975362 - DNA, 15 bp, Homo sapiens
ccaattccttctgat

SEQ ID NO: 975363 - DNA, 15 bp, Homo sapiens
cccaattccttctga

SEQ ID NO: 975364 - DNA, 15 bp, Homo sapiens
tcccaattccttctg

SEQ ID NO: 975365 - DNA, 15 bp, Homo sapiens
ttcccaattccttct

SEQ ID NO: 975366 - DNA, 15 bp, Homo sapiens
cttcccaattccttc

SEQ ID NO: 975367 - DNA, 15 bp, Homo sapiens
acttcccaattcctt

SEQ ID NO: 975368 - DNA, 15 bp, Homo sapiens
tacttcccaattcct

SEQ ID NO: 975369 - DNA, 15 bp, Homo sapiens
ttacttcccaattcc

SEQ ID NO: 975370 - DNA, 15 bp, Homo sapiens
tttacttcccaattc

SEQ ID NO: 975371 - DNA, 15 bp, Homo sapiens
ttttacttcccaatt

SEQ ID NO: 975372 - DNA, 15 bp, Homo sapiens
cttttacttcccaat

SEQ ID NO: 975373 - DNA, 15 bp, Homo sapiens
acttttacttcccaa

SEQ ID NO: 975374 - DNA, 15 bp, Homo sapiens
gacttttacttccca

SEQ ID NO: 975375 - DNA, 15 bp, Homo sapiens
tgacttttacttccc

SEQ ID NO: 975376 - DNA, 15 bp, Homo sapiens
ttgacttttacttcc

SEQ ID NO: 975377 - DNA, 15 bp, Homo sapiens
tttgacttttacttc

SEQ ID NO: 975378 - DNA, 15 bp, Homo sapiens
ctttgacttttactt

SEQ ID NO: 975379 - DNA, 15 bp, Homo sapiens
cctttgacttttact

SEQ ID NO: 975380 - DNA, 15 bp, Homo sapiens
tcctttgacttttac

SEQ ID NO: 975381 - DNA, 15 bp, Homo sapiens
ttcctttgactttta

SEQ ID NO: 975382 - DNA, 15 bp, Homo sapiens
tttcctttgactttt

SEQ ID NO: 975383 - DNA, 15 bp, Homo sapiens
gtttcctttgacttt

SEQ ID NO: 975384 - DNA, 15 bp, Homo sapiens
tgtttcctttgactt

SEQ ID NO: 975385 - DNA, 15 bp, Homo sapiens
ttgtttcctttgact

SEQ ID NO: 975386 - DNA, 15 bp, Homo sapiens
tttgtttcctttgac

SEQ ID NO: 975387 - DNA, 15 bp, Homo sapiens
ttttgtttcctttga

SEQ ID NO: 975388 - DNA, 15 bp, Homo sapiens
tttttgtttcctttg

SEQ ID NO: 975389 - DNA, 15 bp, Homo sapiens
ctttttgtttccttt

SEQ ID NO: 975390 - DNA, 15 bp, Homo sapiens
gctttttgtttcctt

SEQ ID NO: 975391 - DNA, 15 bp, Homo sapiens
agctttttgtttcct

SEQ ID NO: 975392 - DNA, 15 bp, Homo sapiens
tagctttttgtttcc

SEQ ID NO: 975393 - DNA, 15 bp, Homo sapiens
ttagctttttgtttc

SEQ ID NO: 975394 - DNA, 15 bp, Homo sapiens
tttagctttttgttt

SEQ ID NO: 975395 - DNA, 15 bp, Homo sapiens
ctttagctttttgtt

SEQ ID NO: 975396 - DNA, 15 bp, Homo sapiens
gctttagctttttgt

SEQ ID NO: 975397 - DNA, 15 bp, Homo sapiens
tgctttagctttttg

SEQ ID NO: 975398 - DNA, 15 bp, Homo sapiens
ttgctttagcttttt

SEQ ID NO: 975399 - DNA, 15 bp, Homo sapiens
attgctttagctttt

SEQ ID NO: 975400 - DNA, 15 bp, Homo sapiens
tattgctttagcttt

SEQ ID NO: 975401 - DNA, 15 bp, Homo sapiens
ttattgctttagctt

SEQ ID NO: 975402 - DNA, 15 bp, Homo sapiens
gttattgctttagct

SEQ ID NO: 975403 - DNA, 15 bp, Homo sapiens
tgttattgctttagc

SEQ ID NO: 975404 - DNA, 15 bp, Homo sapiens
ttgttattgctttag

SEQ ID NO: 975405 - DNA, 15 bp, Homo sapiens
tttgttattgcttta

SEQ ID NO: 975406 - DNA, 15 bp, Homo sapiens
ctttgttattgcttt

SEQ ID NO: 975407 - DNA, 15 bp, Homo sapiens
tctttgttattgctt

SEQ ID NO: 975408 - DNA, 15 bp, Homo sapiens
ctctttgttattgct

SEQ ID NO: 975409 - DNA, 15 bp, Homo sapiens
tctctttgttattgc

SEQ ID NO: 975410 - DNA, 15 bp, Homo sapiens
ttctctttgttattg

SEQ ID NO: 975411 - DNA, 15 bp, Homo sapiens
tttctctttgttatt

SEQ ID NO: 975412 - DNA, 15 bp, Homo sapiens
atttctctttgttat

SEQ ID NO: 975413 - DNA, 15 bp, Homo sapiens
gatttctctttgtta

SEQ ID NO: 975414 - DNA, 15 bp, Homo sapiens
ggatttctctttgtt

SEQ ID NO: 975415 - DNA, 15 bp, Homo sapiens
tggatttctctttgt

SEQ ID NO: 975416 - DNA, 15 bp, Homo sapiens
atggatttctctttg

SEQ ID NO: 975417 - DNA, 15 bp, Homo sapiens
gatggatttctcttt

SEQ ID NO: 975418 - DNA, 15 bp, Homo sapiens
tgatggatttctctt

SEQ ID NO: 975419 - DNA, 15 bp, Homo sapiens
ctgatggatttctct

SEQ ID NO: 975420 - DNA, 15 bp, Homo sapiens
actgatggatttctc

SEQ ID NO: 975421 - DNA, 15 bp, Homo sapiens
gactgatggatttct

SEQ ID NO: 975422 - DNA, 15 bp, Homo sapiens
tgactgatggatttc

SEQ ID NO: 975423 - DNA, 15 bp, Homo sapiens
atgactgatggattt

SEQ ID NO: 975424 - DNA, 15 bp, Homo sapiens
tatgactgatggatt

SEQ ID NO: 975425 - DNA, 15 bp, Homo sapiens
ttatgactgatggat

SEQ ID NO: 975426 - DNA, 15 bp, Homo sapiens
attatgactgatgga

SEQ ID NO: 975427 - DNA, 15 bp, Homo sapiens
gattatgactgatgg

SEQ ID NO: 975428 - DNA, 15 bp, Homo sapiens
agattatgactgatg

SEQ ID NO: 975429 - DNA, 15 bp, Homo sapiens
gagattatgactgat

SEQ ID NO: 975430 - DNA, 15 bp, Homo sapiens
ggagattatgactga

SEQ ID NO: 975431 - DNA, 15 bp, Homo sapiens
aggagattatgactg

SEQ ID NO: 975432 - DNA, 15 bp, Homo sapiens
gaggagattatgact

SEQ ID NO: 975433 - DNA, 15 bp, Homo sapiens
agaggagattatgac

SEQ ID NO: 975434 - DNA, 15 bp, Homo sapiens
gagaggagattatga

SEQ ID NO: 975435 - DNA, 15 bp, Homo sapiens
ggagaggagattatg

SEQ ID NO: 975436 - DNA, 15 bp, Homo sapiens
aggagaggagattat

SEQ ID NO: 975437 - DNA, 15 bp, Homo sapiens
aaggagaggagatta

SEQ ID NO: 975438 - DNA, 15 bp, Homo sapiens
aaaggagaggagatt

SEQ ID NO: 975439 - DNA, 15 bp, Homo sapiens
aaaaggagaggagat

SEQ ID NO: 975440 - DNA, 15 bp, Homo sapiens
taaaaggagaggaga

SEQ ID NO: 975441 - DNA, 15 bp, Homo sapiens
ttaaaaggagaggag

SEQ ID NO: 975442 - DNA, 15 bp, Homo sapiens
tttaaaaggagagga

SEQ ID NO: 975443 - DNA, 15 bp, Homo sapiens
ctttaaaaggagagg

SEQ ID NO: 975444 - DNA, 15 bp, Homo sapiens
tctttaaaaggagag

SEQ ID NO: 975445 - DNA, 15 bp, Homo sapiens
ttctttaaaaggaga

SEQ ID NO: 975446 - DNA, 15 bp, Homo sapiens
attctttaaaaggag

SEQ ID NO: 975447 - DNA, 15 bp, Homo sapiens
cattctttaaaagga

SEQ ID NO: 975448 - DNA, 15 bp, Homo sapiens
gcattctttaaaagg

SEQ ID NO: 975449 - DNA, 15 bp, Homo sapiens
agcattctttaaaag

SEQ ID NO: 975450 - DNA, 15 bp, Homo sapiens
cagcattctttaaaa

SEQ ID NO: 975451 - DNA, 15 bp, Homo sapiens
ccagcattctttaaa

SEQ ID NO: 975452 - DNA, 15 bp, Homo sapiens
accagcattctttaa

SEQ ID NO: 975453 - DNA, 15 bp, Homo sapiens
aaccagcattcttta

SEQ ID NO: 975454 - DNA, 15 bp, Homo sapiens
gaaccagcattcttt

SEQ ID NO: 975455 - DNA, 15 bp, Homo sapiens
ggaaccagcattctt

SEQ ID NO: 975456 - DNA, 15 bp, Homo sapiens
gggaaccagcattct

SEQ ID NO: 975457 - DNA, 15 bp, Homo sapiens
ggggaaccagcattc

SEQ ID NO: 975458 - DNA, 15 bp, Homo sapiens
aggggaaccagcatt

SEQ ID NO: 975459 - DNA, 15 bp, Homo sapiens
aaggggaaccagcat

SEQ ID NO: 975460 - DNA, 15 bp, Homo sapiens
aaaggggaaccagca

SEQ ID NO: 975461 - DNA, 15 bp, Homo sapiens
caaaggggaaccagc

SEQ ID NO: 975462 - DNA, 15 bp, Homo sapiens
gcaaaggggaaccag

SEQ ID NO: 975463 - DNA, 15 bp, Homo sapiens
ggcaaaggggaacca

SEQ ID NO: 975464 - DNA, 15 bp, Homo sapiens
aggcaaaggggaacc

SEQ ID NO: 975465 - DNA, 15 bp, Homo sapiens
gaggcaaaggggaac

SEQ ID NO: 975466 - DNA, 15 bp, Homo sapiens
tgaggcaaaggggaa

SEQ ID NO: 975467 - DNA, 15 bp, Homo sapiens
gtgaggcaaagggga

SEQ ID NO: 975468 - DNA, 15 bp, Homo sapiens
tgtgaggcaaagggg

SEQ ID NO: 975469 - DNA, 15 bp, Homo sapiens
ctgtgaggcaaaggg

SEQ ID NO: 975470 - DNA, 15 bp, Homo sapiens
gctgtgaggcaaagg

SEQ ID NO: 975471 - DNA, 15 bp, Homo sapiens
agctgtgaggcaaag

SEQ ID NO: 975472 - DNA, 15 bp, Homo sapiens
tagctgtgaggcaaa

SEQ ID NO: 975473 - DNA, 15 bp, Homo sapiens
ttagctgtgaggcaa

SEQ ID NO: 975474 - DNA, 15 bp, Homo sapiens
gttagctgtgaggca

SEQ ID NO: 975475 - DNA, 15 bp, Homo sapiens
tgttagctgtgaggc

SEQ ID NO: 975476 - DNA, 15 bp, Homo sapiens
gtgttagctgtgagg

SEQ ID NO: 975477 - DNA, 15 bp, Homo sapiens
tgtgttagctgtgag

SEQ ID NO: 975478 - DNA, 15 bp, Homo sapiens
ttgtgttagctgtga

SEQ ID NO: 975479 - DNA, 15 bp, Homo sapiens
cttgtgttagctgtg

SEQ ID NO: 975480 - DNA, 15 bp, Homo sapiens
tcttgtgttagctgt

SEQ ID NO: 975481 - DNA, 15 bp, Homo sapiens
ttcttgtgttagctg

SEQ ID NO: 975482 - DNA, 15 bp, Homo sapiens
gttcttgtgttagct

SEQ ID NO: 975483 - DNA, 15 bp, Homo sapiens
agttcttgtgttagc

SEQ ID NO: 975484 - DNA, 15 bp, Homo sapiens
gagttcttgtgttag

SEQ ID NO: 975485 - DNA, 15 bp, Homo sapiens
ggagttcttgtgtta

SEQ ID NO: 975486 - DNA, 15 bp, Homo sapiens
aggagttcttgtgtt

SEQ ID NO: 975487 - DNA, 15 bp, Homo sapiens
gaggagttcttgtgt

SEQ ID NO: 975488 - DNA, 15 bp, Homo sapiens
ggaggagttcttgtg

SEQ ID NO: 975489 - DNA, 15 bp, Homo sapiens
tggaggagttcttgt

SEQ ID NO: 975490 - DNA, 15 bp, Homo sapiens
gtggaggagttcttg

SEQ ID NO: 975491 - DNA, 15 bp, Homo sapiens
ggtggaggagttctt

SEQ ID NO: 975492 - DNA, 15 bp, Homo sapiens
cggtggaggagttct

SEQ ID NO: 975493 - DNA, 15 bp, Homo sapiens
acggtggaggagttc

SEQ ID NO: 975494 - DNA, 15 bp, Homo sapiens
gacggtggaggagtt

SEQ ID NO: 975495 - DNA, 15 bp, Homo sapiens
agacggtggaggagt

SEQ ID NO: 975496 - DNA, 15 bp, Homo sapiens
cagacggtggaggag

SEQ ID NO: 975497 - DNA, 15 bp, Homo sapiens
tcagacggtggagga

SEQ ID NO: 975498 - DNA, 15 bp, Homo sapiens
ctcagacggtggagg

SEQ ID NO: 975499 - DNA, 15 bp, Homo sapiens
cctcagacggtggag

SEQ ID NO: 975500 - DNA, 15 bp, Homo sapiens
tcctcagacggtgga

SEQ ID NO: 975501 - DNA, 15 bp, Homo sapiens
ctcctcagacggtgg

SEQ ID NO: 975502 - DNA, 15 bp, Homo sapiens
cctcctcagacggtg

SEQ ID NO: 975503 - DNA, 15 bp, Homo sapiens
acctcctcagacggt

SEQ ID NO: 975504 - DNA, 15 bp, Homo sapiens
aacctcctcagacgg

SEQ ID NO: 975505 - DNA, 15 bp, Homo sapiens
aaacctcctcagacg

SEQ ID NO: 975506 - DNA, 15 bp, Homo sapiens
taaacctcctcagac

SEQ ID NO: 975507 - DNA, 15 bp, Homo sapiens
ctaaacctcctcaga

SEQ ID NO: 975508 - DNA, 15 bp, Homo sapiens
cctaaacctcctcag

SEQ ID NO: 975509 - DNA, 15 bp, Homo sapiens
tcctaaacctcctca

SEQ ID NO: 975510 - DNA, 15 bp, Homo sapiens
ctcctaaacctcctc

SEQ ID NO: 975511 - DNA, 15 bp, Homo sapiens
gctcctaaacctcct

SEQ ID NO: 975512 - DNA, 15 bp, Homo sapiens
tgctcctaaacctcc

SEQ ID NO: 975513 - DNA, 15 bp, Homo sapiens
ctgctcctaaacctc

SEQ ID NO: 975514 - DNA, 15 bp, Homo sapiens
cctgctcctaaacct

SEQ ID NO: 975515 - DNA, 15 bp, Homo sapiens
ccctgctcctaaacc

SEQ ID NO: 975516 - DNA, 15 bp, Homo sapiens
tccctgctcctaaac

SEQ ID NO: 975517 - DNA, 15 bp, Homo sapiens
ttccctgctcctaaa

SEQ ID NO: 975518 - DNA, 15 bp, Homo sapiens
cttccctgctcctaa

SEQ ID NO: 975519 - DNA, 15 bp, Homo sapiens
ccttccctgctccta

SEQ ID NO: 975520 - DNA, 15 bp, Homo sapiens
cccttccctgctcct

SEQ ID NO: 975521 - DNA, 15 bp, Homo sapiens
ccccttccctgctcc

SEQ ID NO: 975522 - DNA, 15 bp, Homo sapiens
tccccttccctgctc

SEQ ID NO: 975523 - DNA, 15 bp, Homo sapiens
ttccccttccctgct

SEQ ID NO: 975524 - DNA, 15 bp, Homo sapiens
cttccccttccctgc

SEQ ID NO: 975525 - DNA, 15 bp, Homo sapiens
ccttccccttccctg

SEQ ID NO: 975526 - DNA, 15 bp, Homo sapiens
tccttccccttccct

SEQ ID NO: 975527 - DNA, 15 bp, Homo sapiens
ctccttccccttccc

SEQ ID NO: 975528 - DNA, 15 bp, Homo sapiens
actccttccccttcc

SEQ ID NO: 975529 - DNA, 15 bp, Homo sapiens
gactccttccccttc

SEQ ID NO: 975530 - DNA, 15 bp, Homo sapiens
tgactccttcccctt

SEQ ID NO: 975531 - DNA, 15 bp, Homo sapiens
ctgactccttcccct

SEQ ID NO: 975532 - DNA, 15 bp, Homo sapiens
gctgactccttcccc

SEQ ID NO: 975533 - DNA, 15 bp, Homo sapiens
agctgactccttccc

SEQ ID NO: 975534 - DNA, 15 bp, Homo sapiens
aagctgactccttcc

SEQ ID NO: 975535 - DNA, 15 bp, Homo sapiens
gaagctgactccttc

SEQ ID NO: 975536 - DNA, 15 bp, Homo sapiens
tgaagctgactcctt

SEQ ID NO: 975537 - DNA, 15 bp, Homo sapiens
atgaagctgactcct

SEQ ID NO: 975538 - DNA, 15 bp, Homo sapiens
aatgaagctgactcc

SEQ ID NO: 975539 - DNA, 15 bp, Homo sapiens
aaatgaagctgactc

SEQ ID NO: 975540 - DNA, 15 bp, Homo sapiens
caaatgaagctgact

SEQ ID NO: 975541 - DNA, 15 bp, Homo sapiens
gcaaatgaagctgac

SEQ ID NO: 975542 - DNA, 15 bp, Homo sapiens
agcaaatgaagctga

SEQ ID NO: 975543 - DNA, 15 bp, Homo sapiens
tagcaaatgaagctg

SEQ ID NO: 975544 - DNA, 15 bp, Homo sapiens
ttagcaaatgaagct

SEQ ID NO: 975545 - DNA, 15 bp, Homo sapiens
attagcaaatgaagc

SEQ ID NO: 975546 - DNA, 15 bp, Homo sapiens
gattagcaaatgaag

SEQ ID NO: 975547 - DNA, 15 bp, Homo sapiens
agattagcaaatgaa

SEQ ID NO: 975548 - DNA, 15 bp, Homo sapiens
aagattagcaaatga

SEQ ID NO: 975549 - DNA, 15 bp, Homo sapiens
gaagattagcaaatg

SEQ ID NO: 975550 - DNA, 15 bp, Homo sapiens
agaagattagcaaat

SEQ ID NO: 975551 - DNA, 15 bp, Homo sapiens
cagaagattagcaaa

SEQ ID NO: 975552 - DNA, 15 bp, Homo sapiens
acagaagattagcaa

SEQ ID NO: 975553 - DNA, 15 bp, Homo sapiens
aacagaagattagca

SEQ ID NO: 975554 - DNA, 15 bp, Homo sapiens
caacagaagattagc

SEQ ID NO: 975555 - DNA, 15 bp, Homo sapiens
gcaacagaagattag

SEQ ID NO: 975556 - DNA, 15 bp, Homo sapiens
ggcaacagaagatta

SEQ ID NO: 975557 - DNA, 15 bp, Homo sapiens
gggcaacagaagatt

SEQ ID NO: 975558 - DNA, 15 bp, Homo sapiens
agggcaacagaagat

SEQ ID NO: 975559 - DNA, 15 bp, Homo sapiens
cagggcaacagaaga

SEQ ID NO: 975560 - DNA, 15 bp, Homo sapiens
gcagggcaacagaag

SEQ ID NO: 975561 - DNA, 15 bp, Homo sapiens
tgcagggcaacagaa

SEQ ID NO: 975562 - DNA, 15 bp, Homo sapiens
gtgcagggcaacaga

SEQ ID NO: 975563 - DNA, 15 bp, Homo sapiens
ggtgcagggcaacag

SEQ ID NO: 975564 - DNA, 15 bp, Homo sapiens
gggtgcagggcaaca

SEQ ID NO: 975565 - DNA, 15 bp, Homo sapiens
agggtgcagggcaac

SEQ ID NO: 975566 - DNA, 15 bp, Homo sapiens
tagggtgcagggcaa

SEQ ID NO: 975567 - DNA, 15 bp, Homo sapiens
ctagggtgcagggca

SEQ ID NO: 975568 - DNA, 15 bp, Homo sapiens
gctagggtgcagggc

SEQ ID NO: 975569 - DNA, 15 bp, Homo sapiens
tgctagggtgcaggg

SEQ ID NO: 975570 - DNA, 15 bp, Homo sapiens
ctgctagggtgcagg

SEQ ID NO: 975571 - DNA, 15 bp, Homo sapiens
gctgctagggtgcag

SEQ ID NO: 975572 - DNA, 15 bp, Homo sapiens
agctgctagggtgca

SEQ ID NO: 975573 - DNA, 15 bp, Homo sapiens
gagctgctagggtgc

SEQ ID NO: 975574 - DNA, 15 bp, Homo sapiens
ggagctgctagggtg

SEQ ID NO: 975575 - DNA, 15 bp, Homo sapiens
aggagctgctagggt

SEQ ID NO: 975576 - DNA, 15 bp, Homo sapiens
aaggagctgctaggg

SEQ ID NO: 975577 - DNA, 15 bp, Homo sapiens
caaggagctgctagg

SEQ ID NO: 975578 - DNA, 15 bp, Homo sapiens
gcaaggagctgctag

SEQ ID NO: 975579 - DNA, 15 bp, Homo sapiens
tgcaaggagctgcta

SEQ ID NO: 975580 - DNA, 15 bp, Homo sapiens
ctgcaaggagctgct

SEQ ID NO: 975581 - DNA, 15 bp, Homo sapiens
gctgcaaggagctgc

SEQ ID NO: 975582 - DNA, 15 bp, Homo sapiens
tgctgcaaggagctg

SEQ ID NO: 975583 - DNA, 15 bp, Homo sapiens
ctgctgcaaggagct

SEQ ID NO: 975584 - DNA, 15 bp, Homo sapiens
cctgctgcaaggagc

SEQ ID NO: 975585 - DNA, 15 bp, Homo sapiens
ccctgctgcaaggag

SEQ ID NO: 975586 - DNA, 15 bp, Homo sapiens
cccctgctgcaagga

SEQ ID NO: 975587 - DNA, 15 bp, Homo sapiens
tcccctgctgcaagg

SEQ ID NO: 975588 - DNA, 15 bp, Homo sapiens
gtcccctgctgcaag

SEQ ID NO: 975589 - DNA, 15 bp, Homo sapiens
tgtcccctgctgcaa

SEQ ID NO: 975590 - DNA, 15 bp, Homo sapiens
ttgtcccctgctgca

SEQ ID NO: 975591 - DNA, 15 bp, Homo sapiens
cttgtcccctgctgc

SEQ ID NO: 975592 - DNA, 15 bp, Homo sapiens
ccttgtcccctgctg

SEQ ID NO: 975593 - DNA, 15 bp, Homo sapiens
tccttgtcccctgct

SEQ ID NO: 975594 - DNA, 15 bp, Homo sapiens
atccttgtcccctgc

SEQ ID NO: 975595 - DNA, 15 bp, Homo sapiens
catccttgtcccctg

SEQ ID NO: 975596 - DNA, 15 bp, Homo sapiens
tcatccttgtcccct

SEQ ID NO: 975597 - DNA, 15 bp, Homo sapiens
gtcatccttgtcccc

SEQ ID NO: 975598 - DNA, 15 bp, Homo sapiens
agtcatccttgtccc

SEQ ID NO: 975599 - DNA, 15 bp, Homo sapiens
aagtcatccttgtcc

SEQ ID NO: 975600 - DNA, 15 bp, Homo sapiens
taagtcatccttgtc

SEQ ID NO: 975601 - DNA, 15 bp, Homo sapiens
ctaagtcatccttgt

SEQ ID NO: 975602 - DNA, 15 bp, Homo sapiens
cctaagtcatccttg

SEQ ID NO: 975603 - DNA, 15 bp, Homo sapiens
acctaagtcatcctt

SEQ ID NO: 975604 - DNA, 15 bp, Homo sapiens
cacctaagtcatcct

SEQ ID NO: 975605 - DNA, 15 bp, Homo sapiens
ccacctaagtcatcc

SEQ ID NO: 975606 - DNA, 15 bp, Homo sapiens
tccacctaagtcatc

SEQ ID NO: 975607 - DNA, 15 bp, Homo sapiens
atccacctaagtcat

SEQ ID NO: 975608 - DNA, 15 bp, Homo sapiens
catccacctaagtca

SEQ ID NO: 975609 - DNA, 15 bp, Homo sapiens
ccatccacctaagtc

SEQ ID NO: 975610 - DNA, 15 bp, Homo sapiens
tccatccacctaagt

SEQ ID NO: 975611 - DNA, 15 bp, Homo sapiens
atccatccacctaag

SEQ ID NO: 975612 - DNA, 15 bp, Homo sapiens
tatccatccacctaa

SEQ ID NO: 975613 - DNA, 15 bp, Homo sapiens
ttatccatccaccta

SEQ ID NO: 975614 - DNA, 15 bp, Homo sapiens
attatccatccacct

SEQ ID NO: 975615 - DNA, 15 bp, Homo sapiens
aattatccatccacc

SEQ ID NO: 975616 - DNA, 15 bp, Homo sapiens
taattatccatccac

SEQ ID NO: 975617 - DNA, 15 bp, Homo sapiens
ttaattatccatcca

SEQ ID NO: 975618 - DNA, 15 bp, Homo sapiens
attaattatccatcc

SEQ ID NO: 975619 - DNA, 15 bp, Homo sapiens
aattaattatccatc

SEQ ID NO: 975620 - DNA, 15 bp, Homo sapiens
caattaattatccat

SEQ ID NO: 975621 - DNA, 15 bp, Homo sapiens
tcaattaattatcca

SEQ ID NO: 975622 - DNA, 15 bp, Homo sapiens
atcaattaattatcc

SEQ ID NO: 975623 - DNA, 15 bp, Homo sapiens
aatcaattaattatc

SEQ ID NO: 975624 - DNA, 15 bp, Homo sapiens
gaatcaattaattat

SEQ ID NO: 975625 - DNA, 15 bp, Homo sapiens
agaatcaattaatta

SEQ ID NO: 975626 - DNA, 15 bp, Homo sapiens
tagaatcaattaatt

SEQ ID NO: 975627 - DNA, 15 bp, Homo sapiens
ttagaatcaattaat

SEQ ID NO: 975628 - DNA, 15 bp, Homo sapiens
tttagaatcaattaa

SEQ ID NO: 975629 - DNA, 15 bp, Homo sapiens
ttttagaatcaatta

SEQ ID NO: 975630 - DNA, 15 bp, Homo sapiens
attttagaatcaatt

SEQ ID NO: 975631 - DNA, 15 bp, Homo sapiens
tattttagaatcaat

SEQ ID NO: 975632 - DNA, 15 bp, Homo sapiens
atattttagaatcaa

SEQ ID NO: 975633 - DNA, 15 bp, Homo sapiens
aatattttagaatca

SEQ ID NO: 975634 - DNA, 15 bp, Homo sapiens
caatattttagaatc

SEQ ID NO: 975635 - DNA, 15 bp, Homo sapiens
acaatattttagaat

SEQ ID NO: 975636 - DNA, 15 bp, Homo sapiens
cacaatattttagaa

SEQ ID NO: 975637 - DNA, 15 bp, Homo sapiens
acacaatattttaga

SEQ ID NO: 975638 - DNA, 15 bp, Homo sapiens
cacacaatattttag

SEQ ID NO: 975639 - DNA, 15 bp, Homo sapiens
acacacaatatttta

SEQ ID NO: 975640 - DNA, 15 bp, Homo sapiens
gacacacaatatttt

SEQ ID NO: 975641 - DNA, 15 bp, Homo sapiens
tgacacacaatattt

SEQ ID NO: 975642 - DNA, 15 bp, Homo sapiens
ctgacacacaatatt

SEQ ID NO: 975643 - DNA, 15 bp, Homo sapiens
actgacacacaatat

SEQ ID NO: 975644 - DNA, 15 bp, Homo sapiens
tactgacacacaata

SEQ ID NO: 975645 - DNA, 15 bp, Homo sapiens
atactgacacacaat

SEQ ID NO: 975646 - DNA, 15 bp, Homo sapiens
aatactgacacacaa

SEQ ID NO: 975647 - DNA, 15 bp, Homo sapiens
caatactgacacaca

SEQ ID NO: 975648 - DNA, 15 bp, Homo sapiens
acaatactgacacac

SEQ ID NO: 975649 - DNA, 15 bp, Homo sapiens
tacaatactgacaca

SEQ ID NO: 975650 - DNA, 15 bp, Homo sapiens
ttacaatactgacac

SEQ ID NO: 975651 - DNA, 15 bp, Homo sapiens
attacaatactgaca

SEQ ID NO: 975652 - DNA, 15 bp, Homo sapiens
tattacaatactgac

SEQ ID NO: 975653 - DNA, 15 bp, Homo sapiens
gtattacaatactga

SEQ ID NO: 975654 - DNA, 15 bp, Homo sapiens
agtattacaatactg

SEQ ID NO: 975655 - DNA, 15 bp, Homo sapiens
tagtattacaatact

SEQ ID NO: 975656 - DNA, 15 bp, Homo sapiens
atagtattacaatac

SEQ ID NO: 975657 - DNA, 15 bp, Homo sapiens
catagtattacaata

SEQ ID NO: 975658 - DNA, 15 bp, Homo sapiens
acatagtattacaat

SEQ ID NO: 975659 - DNA, 15 bp, Homo sapiens
aacatagtattacaa

SEQ ID NO: 975660 - DNA, 15 bp, Homo sapiens
taacatagtattaca

SEQ ID NO: 975661 - DNA, 15 bp, Homo sapiens
ttaacatagtattac

SEQ ID NO: 975662 - DNA, 15 bp, Homo sapiens
attaacatagtatta

SEQ ID NO: 975663 - DNA, 15 bp, Homo sapiens
aattaacatagtatt

SEQ ID NO: 975664 - DNA, 15 bp, Homo sapiens
caattaacatagtat

SEQ ID NO: 975665 - DNA, 15 bp, Homo sapiens
gcaattaacatagta

SEQ ID NO: 975666 - DNA, 15 bp, Homo sapiens
tgcaattaacatagt

SEQ ID NO: 975667 - DNA, 15 bp, Homo sapiens
gtgcaattaacatag

SEQ ID NO: 975668 - DNA, 15 bp, Homo sapiens
ggtgcaattaacata

SEQ ID NO: 975669 - DNA, 15 bp, Homo sapiens
tggtgcaattaacat

SEQ ID NO: 975670 - DNA, 15 bp, Homo sapiens
atggtgcaattaaca

SEQ ID NO: 975671 - DNA, 15 bp, Homo sapiens
catggtgcaattaac

SEQ ID NO: 975672 - DNA, 15 bp, Homo sapiens
gcatggtgcaattaa

SEQ ID NO: 975673 - DNA, 15 bp, Homo sapiens
tgcatggtgcaatta

SEQ ID NO: 975674 - DNA, 15 bp, Homo sapiens
gtgcatggtgcaatt

SEQ ID NO: 975675 - DNA, 15 bp, Homo sapiens
cgtgcatggtgcaat

SEQ ID NO: 975676 - DNA, 15 bp, Homo sapiens
ccgtgcatggtgcaa

SEQ ID NO: 975677 - DNA, 15 bp, Homo sapiens
accgtgcatggtgca

SEQ ID NO: 975678 - DNA, 15 bp, Homo sapiens
taccgtgcatggtgc

SEQ ID NO: 975679 - DNA, 15 bp, Homo sapiens
ataccgtgcatggtg

SEQ ID NO: 975680 - DNA, 15 bp, Homo sapiens
gataccgtgcatggt

SEQ ID NO: 975681 - DNA, 15 bp, Homo sapiens
agataccgtgcatgg

SEQ ID NO: 975682 - DNA, 15 bp, Homo sapiens
gagataccgtgcatg

SEQ ID NO: 975683 - DNA, 15 bp, Homo sapiens
tgagataccgtgcat

SEQ ID NO: 975684 - DNA, 15 bp, Homo sapiens
atgagataccgtgca

SEQ ID NO: 975685 - DNA, 15 bp, Homo sapiens
aatgagataccgtgc

SEQ ID NO: 975686 - DNA, 15 bp, Homo sapiens
aaatgagataccgtg

SEQ ID NO: 975687 - DNA, 15 bp, Homo sapiens
taaatgagataccgt

SEQ ID NO: 975688 - DNA, 15 bp, Homo sapiens
ttaaatgagataccg

SEQ ID NO: 975689 - DNA, 15 bp, Homo sapiens
attaaatgagatacc

SEQ ID NO: 975690 - DNA, 15 bp, Homo sapiens
gattaaatgagatac

SEQ ID NO: 975691 - DNA, 15 bp, Homo sapiens
ggattaaatgagata

SEQ ID NO: 975692 - DNA, 15 bp, Homo sapiens
gggattaaatgagat

SEQ ID NO: 975693 - DNA, 15 bp, Homo sapiens
ggggattaaatgaga

SEQ ID NO: 975694 - DNA, 15 bp, Homo sapiens
gggggattaaatgag

SEQ ID NO: 975695 - DNA, 15 bp, Homo sapiens
tgggggattaaatga

SEQ ID NO: 975696 - DNA, 15 bp, Homo sapiens
gtgggggattaaatg

SEQ ID NO: 975697 - DNA, 15 bp, Homo sapiens
ggtgggggattaaat

SEQ ID NO: 975698 - DNA, 15 bp, Homo sapiens
gggtgggggattaaa

SEQ ID NO: 975699 - DNA, 15 bp, Homo sapiens
ggggtgggggattaa

SEQ ID NO: 975700 - DNA, 15 bp, Homo sapiens
aggggtgggggatta

SEQ ID NO: 975701 - DNA, 15 bp, Homo sapiens
aaggggtgggggatt

SEQ ID NO: 975702 - DNA, 15 bp, Homo sapiens
caaggggtgggggat

SEQ ID NO: 975703 - DNA, 15 bp, Homo sapiens
gcaaggggtggggga

SEQ ID NO: 975704 - DNA, 15 bp, Homo sapiens
ggcaaggggtggggg

SEQ ID NO: 975705 - DNA, 15 bp, Homo sapiens
tggcaaggggtgggg

SEQ ID NO: 975706 - DNA, 15 bp, Homo sapiens
atggcaaggggtggg

SEQ ID NO: 975707 - DNA, 15 bp, Homo sapiens
aatggcaaggggtgg

SEQ ID NO: 975708 - DNA, 15 bp, Homo sapiens
taatggcaaggggtg

SEQ ID NO: 975709 - DNA, 15 bp, Homo sapiens
gtaatggcaaggggt

SEQ ID NO: 975710 - DNA, 15 bp, Homo sapiens
ggtaatggcaagggg

SEQ ID NO: 975711 - DNA, 15 bp, Homo sapiens
tggtaatggcaaggg

SEQ ID NO: 975712 - DNA, 15 bp, Homo sapiens
ttggtaatggcaagg

SEQ ID NO: 975713 - DNA, 15 bp, Homo sapiens
tttggtaatggcaag

SEQ ID NO: 975714 - DNA, 15 bp, Homo sapiens
ctttggtaatggcaa

SEQ ID NO: 975715 - DNA, 15 bp, Homo sapiens
tctttggtaatggca

SEQ ID NO: 975716 - DNA, 15 bp, Homo sapiens
ctctttggtaatggc

SEQ ID NO: 975717 - DNA, 15 bp, Homo sapiens
tctctttggtaatgg

SEQ ID NO: 975718 - DNA, 15 bp, Homo sapiens
ctctctttggtaatg

SEQ ID NO: 975719 - DNA, 15 bp, Homo sapiens
tctctctttggtaat

SEQ ID NO: 975720 - DNA, 15 bp, Homo sapiens
ctctctctttggtaa

SEQ ID NO: 975721 - DNA, 15 bp, Homo sapiens
tctctctctttggta

SEQ ID NO: 975722 - DNA, 15 bp, Homo sapiens
ctctctctctttggt

SEQ ID NO: 975723 - DNA, 15 bp, Homo sapiens
tctctctctctttgg

SEQ ID NO: 975724 - DNA, 15 bp, Homo sapiens
ctctctctctctttg

SEQ ID NO: 975725 - DNA, 15 bp, Homo sapiens
tctctctctctcttt

SEQ ID NO: 975726 - DNA, 15 bp, Homo sapiens
ctctctctctctctt

SEQ ID NO: 975727 - DNA, 15 bp, Homo sapiens
tctctctctctctct

SEQ ID NO: 975728 - DNA, 15 bp, Homo sapiens
ctctctctctctctc

SEQ ID NO: 975729 - DNA, 15 bp, Homo sapiens
ttctctctctctctc

SEQ ID NO: 975730 - DNA, 15 bp, Homo sapiens
tttctctctctctct

SEQ ID NO: 975731 - DNA, 15 bp, Homo sapiens
atttctctctctctc

SEQ ID NO: 975732 - DNA, 15 bp, Homo sapiens
tatttctctctctct

SEQ ID NO: 975733 - DNA, 15 bp, Homo sapiens
gtatttctctctctc

SEQ ID NO: 975734 - DNA, 15 bp, Homo sapiens
agtatttctctctct

SEQ ID NO: 975735 - DNA, 15 bp, Homo sapiens
tagtatttctctctc

SEQ ID NO: 975736 - DNA, 15 bp, Homo sapiens
ctagtatttctctct

SEQ ID NO: 975737 - DNA, 15 bp, Homo sapiens
tctagtatttctctc

SEQ ID NO: 975738 - DNA, 15 bp, Homo sapiens
ttctagtatttctct

SEQ ID NO: 975739 - DNA, 15 bp, Homo sapiens
attctagtatttctc

SEQ ID NO: 975740 - DNA, 15 bp, Homo sapiens
aattctagtatttct

SEQ ID NO: 975741 - DNA, 15 bp, Homo sapiens
aaattctagtatttc

SEQ ID NO: 975742 - DNA, 15 bp, Homo sapiens
taaattctagtattt

SEQ ID NO: 975743 - DNA, 15 bp, Homo sapiens
ataaattctagtatt

SEQ ID NO: 975744 - DNA, 15 bp, Homo sapiens
gataaattctagtat

SEQ ID NO: 975745 - DNA, 15 bp, Homo sapiens
ggataaattctagta

SEQ ID NO: 975746 - DNA, 15 bp, Homo sapiens
aggataaattctagt

SEQ ID NO: 975747 - DNA, 15 bp, Homo sapiens
gaggataaattctag

SEQ ID NO: 975748 - DNA, 15 bp, Homo sapiens
tgaggataaattcta

SEQ ID NO: 975749 - DNA, 15 bp, Homo sapiens
atgaggataaattct

SEQ ID NO: 975750 - DNA, 15 bp, Homo sapiens
aatgaggataaattc

SEQ ID NO: 975751 - DNA, 15 bp, Homo sapiens
aaatgaggataaatt

SEQ ID NO: 975752 - DNA, 15 bp, Homo sapiens
aaaatgaggataaat

SEQ ID NO: 975753 - DNA, 15 bp, Homo sapiens
taaaatgaggataaa

SEQ ID NO: 975754 - DNA, 15 bp, Homo sapiens
gtaaaatgaggataa

SEQ ID NO: 975755 - DNA, 15 bp, Homo sapiens
tgtaaaatgaggata

SEQ ID NO: 975756 - DNA, 15 bp, Homo sapiens
ctgtaaaatgaggat

SEQ ID NO: 975757 - DNA, 15 bp, Homo sapiens
actgtaaaatgagga

SEQ ID NO: 975758 - DNA, 15 bp, Homo sapiens
tactgtaaaatgagg

SEQ ID NO: 975759 - DNA, 15 bp, Homo sapiens
ctactgtaaaatgag

SEQ ID NO: 975760 - DNA, 15 bp, Homo sapiens
tctactgtaaaatga

SEQ ID NO: 975761 - DNA, 15 bp, Homo sapiens
ctctactgtaaaatg

SEQ ID NO: 975762 - DNA, 15 bp, Homo sapiens
tctctactgtaaaat

SEQ ID NO: 975763 - DNA, 15 bp, Homo sapiens
ttctctactgtaaaa

SEQ ID NO: 975764 - DNA, 15 bp, Homo sapiens
tttctctactgtaaa

SEQ ID NO: 975765 - DNA, 15 bp, Homo sapiens
ttttctctactgtaa

SEQ ID NO: 975766 - DNA, 15 bp, Homo sapiens
gttttctctactgta

SEQ ID NO: 975767 - DNA, 15 bp, Homo sapiens
tgttttctctactgt

SEQ ID NO: 975768 - DNA, 15 bp, Homo sapiens
ctgttttctctactg

SEQ ID NO: 975769 - DNA, 15 bp, Homo sapiens
tctgttttctctact

SEQ ID NO: 975770 - DNA, 15 bp, Homo sapiens
ctctgttttctctac

SEQ ID NO: 975771 - DNA, 15 bp, Homo sapiens
cctctgttttctcta

SEQ ID NO: 975772 - DNA, 15 bp, Homo sapiens
ccctctgttttctct

SEQ ID NO: 975773 - DNA, 15 bp, Homo sapiens
accctctgttttctc

SEQ ID NO: 975774 - DNA, 15 bp, Homo sapiens
gaccctctgttttct

SEQ ID NO: 975775 - DNA, 15 bp, Homo sapiens
tgaccctctgttttc

SEQ ID NO: 975776 - DNA, 15 bp, Homo sapiens
ttgaccctctgtttt

SEQ ID NO: 975777 - DNA, 15 bp, Homo sapiens
cttgaccctctgttt

SEQ ID NO: 975778 - DNA, 15 bp, Homo sapiens
tcttgaccctctgtt

SEQ ID NO: 975779 - DNA, 15 bp, Homo sapiens
ttcttgaccctctgt

SEQ ID NO: 975780 - DNA, 15 bp, Homo sapiens
cttcttgaccctctg

SEQ ID NO: 975781 - DNA, 15 bp, Homo sapiens
tcttcttgaccctct

SEQ ID NO: 975782 - DNA, 15 bp, Homo sapiens
atcttcttgaccctc

SEQ ID NO: 975783 - DNA, 15 bp, Homo sapiens
tatcttcttgaccct

SEQ ID NO: 975784 - DNA, 15 bp, Homo sapiens
ttatcttcttgaccc

SEQ ID NO: 975785 - DNA, 15 bp, Homo sapiens
attatcttcttgacc

SEQ ID NO: 975786 - DNA, 15 bp, Homo sapiens
cattatcttcttgac

SEQ ID NO: 975787 - DNA, 15 bp, Homo sapiens
acattatcttcttga

SEQ ID NO: 975788 - DNA, 15 bp, Homo sapiens
tacattatcttcttg

SEQ ID NO: 975789 - DNA, 15 bp, Homo sapiens
ttacattatcttctt

SEQ ID NO: 975790 - DNA, 15 bp, Homo sapiens
tttacattatcttct

SEQ ID NO: 975791 - DNA, 15 bp, Homo sapiens
ctttacattatcttc

SEQ ID NO: 975792 - DNA, 15 bp, Homo sapiens
actttacattatctt

SEQ ID NO: 975793 - DNA, 15 bp, Homo sapiens
cactttacattatct

SEQ ID NO: 975794 - DNA, 15 bp, Homo sapiens
gcactttacattatc

SEQ ID NO: 975795 - DNA, 15 bp, Homo sapiens
ggcactttacattat

SEQ ID NO: 975796 - DNA, 15 bp, Homo sapiens
gggcactttacatta

SEQ ID NO: 975797 - DNA, 15 bp, Homo sapiens
tgggcactttacatt

SEQ ID NO: 975798 - DNA, 15 bp, Homo sapiens
ttgggcactttacat

SEQ ID NO: 975799 - DNA, 15 bp, Homo sapiens
cttgggcactttaca

SEQ ID NO: 975800 - DNA, 15 bp, Homo sapiens
tcttgggcactttac

SEQ ID NO: 975801 - DNA, 15 bp, Homo sapiens
ttcttgggcacttta

SEQ ID NO: 975802 - DNA, 15 bp, Homo sapiens
gttcttgggcacttt

SEQ ID NO: 975803 - DNA, 15 bp, Homo sapiens
tgttcttgggcactt

SEQ ID NO: 975804 - DNA, 15 bp, Homo sapiens
gtgttcttgggcact

SEQ ID NO: 975805 - DNA, 15 bp, Homo sapiens
tgtgttcttgggcac

SEQ ID NO: 975806 - DNA, 15 bp, Homo sapiens
gtgtgttcttgggca

SEQ ID NO: 975807 - DNA, 15 bp, Homo sapiens
tgtgtgttcttgggc

SEQ ID NO: 975808 - DNA, 15 bp, Homo sapiens
ctgtgtgttcttggg

SEQ ID NO: 975809 - DNA, 15 bp, Homo sapiens
gctgtgtgttcttgg

SEQ ID NO: 975810 - DNA, 15 bp, Homo sapiens
agctgtgtgttcttg

SEQ ID NO: 975811 - DNA, 15 bp, Homo sapiens
cagctgtgtgttctt

SEQ ID NO: 975812 - DNA, 15 bp, Homo sapiens
tcagctgtgtgttct

SEQ ID NO: 975813 - DNA, 15 bp, Homo sapiens
atcagctgtgtgttc

SEQ ID NO: 975814 - DNA, 15 bp, Homo sapiens
gatcagctgtgtgtt

SEQ ID NO: 975815 - DNA, 15 bp, Homo sapiens
tgatcagctgtgtgt

SEQ ID NO: 975816 - DNA, 15 bp, Homo sapiens
gtgatcagctgtgtg

SEQ ID NO: 975817 - DNA, 15 bp, Homo sapiens
tgtgatcagctgtgt

SEQ ID NO: 975818 - DNA, 15 bp, Homo sapiens
ttgtgatcagctgtg

SEQ ID NO: 975819 - DNA, 15 bp, Homo sapiens
tttgtgatcagctgt

SEQ ID NO: 975820 - DNA, 15 bp, Homo sapiens
ttttgtgatcagctg

SEQ ID NO: 975821 - DNA, 15 bp, Homo sapiens
tttttgtgatcagct

SEQ ID NO: 975822 - DNA, 15 bp, Homo sapiens
atttttgtgatcagc

SEQ ID NO: 975823 - DNA, 15 bp, Homo sapiens
gatttttgtgatcag

SEQ ID NO: 975824 - DNA, 15 bp, Homo sapiens
tgatttttgtgatca

SEQ ID NO: 975825 - DNA, 15 bp, Homo sapiens
ttgatttttgtgatc

SEQ ID NO: 975826 - DNA, 15 bp, Homo sapiens
cttgatttttgtgat

SEQ ID NO: 975827 - DNA, 15 bp, Homo sapiens
gcttgatttttgtga

SEQ ID NO: 975828 - DNA, 15 bp, Homo sapiens
agcttgatttttgtg

SEQ ID NO: 975829 - DNA, 15 bp, Homo sapiens
aagcttgatttttgt

SEQ ID NO: 975830 - DNA, 15 bp, Homo sapiens
caagcttgatttttg

SEQ ID NO: 975831 - DNA, 15 bp, Homo sapiens
ccaagcttgattttt

SEQ ID NO: 975832 - DNA, 15 bp, Homo sapiens
cccaagcttgatttt

SEQ ID NO: 975833 - DNA, 15 bp, Homo sapiens
ccccaagcttgattt

SEQ ID NO: 975834 - DNA, 15 bp, Homo sapiens
cccccaagcttgatt

SEQ ID NO: 975835 - DNA, 15 bp, Homo sapiens
gcccccaagcttgat

SEQ ID NO: 975836 - DNA, 15 bp, Homo sapiens
ggcccccaagcttga

SEQ ID NO: 975837 - DNA, 15 bp, Homo sapiens
tggcccccaagcttg

SEQ ID NO: 975838 - DNA, 15 bp, Homo sapiens
atggcccccaagctt

SEQ ID NO: 975839 - DNA, 15 bp, Homo sapiens
aatggcccccaagct

SEQ ID NO: 975840 - DNA, 15 bp, Homo sapiens
taatggcccccaagc

SEQ ID NO: 975841 - DNA, 15 bp, Homo sapiens
ctaatggcccccaag

SEQ ID NO: 975842 - DNA, 15 bp, Homo sapiens
gctaatggcccccaa

SEQ ID NO: 975843 - DNA, 15 bp, Homo sapiens
ggctaatggccccca

SEQ ID NO: 975844 - DNA, 15 bp, Homo sapiens
aggctaatggccccc

SEQ ID NO: 975845 - DNA, 15 bp, Homo sapiens
taggctaatggcccc

SEQ ID NO: 975846 - DNA, 15 bp, Homo sapiens
ttaggctaatggccc

SEQ ID NO: 975847 - DNA, 15 bp, Homo sapiens
gttaggctaatggcc

SEQ ID NO: 975848 - DNA, 15 bp, Homo sapiens
ggttaggctaatggc

SEQ ID NO: 975849 - DNA, 15 bp, Homo sapiens
tggttaggctaatgg

SEQ ID NO: 975850 - DNA, 15 bp, Homo sapiens
gtggttaggctaatg

SEQ ID NO: 975851 - DNA, 15 bp, Homo sapiens
tgtggttaggctaat

SEQ ID NO: 975852 - DNA, 15 bp, Homo sapiens
ctgtggttaggctaa

SEQ ID NO: 975853 - DNA, 15 bp, Homo sapiens
tctgtggttaggcta

SEQ ID NO: 975854 - DNA, 15 bp, Homo sapiens
gtctgtggttaggct

SEQ ID NO: 975855 - DNA, 15 bp, Homo sapiens
ggtctgtggttaggc

SEQ ID NO: 975856 - DNA, 15 bp, Homo sapiens
gggtctgtggttagg

SEQ ID NO: 975857 - DNA, 15 bp, Homo sapiens
agggtctgtggttag

SEQ ID NO: 975858 - DNA, 15 bp, Homo sapiens
aagggtctgtggtta

SEQ ID NO: 975859 - DNA, 15 bp, Homo sapiens
taagggtctgtggtt

SEQ ID NO: 975860 - DNA, 15 bp, Homo sapiens
gtaagggtctgtggt

SEQ ID NO: 975861 - DNA, 15 bp, Homo sapiens
agtaagggtctgtgg

SEQ ID NO: 975862 - DNA, 15 bp, Homo sapiens
gagtaagggtctgtg

SEQ ID NO: 975863 - DNA, 15 bp, Homo sapiens
agagtaagggtctgt

SEQ ID NO: 975864 - DNA, 15 bp, Homo sapiens
aagagtaagggtctg

SEQ ID NO: 975865 - DNA, 15 bp, Homo sapiens
taagagtaagggtct

SEQ ID NO: 975866 - DNA, 15 bp, Homo sapiens
ttaagagtaagggtc

SEQ ID NO: 975867 - DNA, 15 bp, Homo sapiens
gttaagagtaagggt

SEQ ID NO: 975868 - DNA, 15 bp, Homo sapiens
ggttaagagtaaggg

SEQ ID NO: 975869 - DNA, 15 bp, Homo sapiens
gggttaagagtaagg

SEQ ID NO: 975870 - DNA, 15 bp, Homo sapiens
tgggttaagagtaag

SEQ ID NO: 975871 - DNA, 15 bp, Homo sapiens
atgggttaagagtaa

SEQ ID NO: 975872 - DNA, 15 bp, Homo sapiens
gatgggttaagagta

SEQ ID NO: 975873 - DNA, 15 bp, Homo sapiens
agatgggttaagagt

SEQ ID NO: 975874 - DNA, 15 bp, Homo sapiens
cagatgggttaagag

SEQ ID NO: 975875 - DNA, 15 bp, Homo sapiens
gcagatgggttaaga

SEQ ID NO: 975876 - DNA, 15 bp, Homo sapiens
agcagatgggttaag

SEQ ID NO: 975877 - DNA, 15 bp, Homo sapiens
aagcagatgggttaa

SEQ ID NO: 975878 - DNA, 15 bp, Homo sapiens
gaagcagatgggtta

SEQ ID NO: 975879 - DNA, 15 bp, Homo sapiens
tgaagcagatgggtt

SEQ ID NO: 975880 - DNA, 15 bp, Homo sapiens
ttgaagcagatgggt

SEQ ID NO: 975881 - DNA, 15 bp, Homo sapiens
attgaagcagatggg

SEQ ID NO: 975882 - DNA, 15 bp, Homo sapiens
gattgaagcagatgg

SEQ ID NO: 975883 - DNA, 15 bp, Homo sapiens
ggattgaagcagatg

SEQ ID NO: 975884 - DNA, 15 bp, Homo sapiens
tggattgaagcagat

SEQ ID NO: 975885 - DNA, 15 bp, Homo sapiens
atggattgaagcaga

SEQ ID NO: 975886 - DNA, 15 bp, Homo sapiens
aatggattgaagcag

SEQ ID NO: 975887 - DNA, 15 bp, Homo sapiens
aaatggattgaagca

SEQ ID NO: 975888 - DNA, 15 bp, Homo sapiens
aaaatggattgaagc

SEQ ID NO: 975889 - DNA, 15 bp, Homo sapiens
caaaatggattgaag

SEQ ID NO: 975890 - DNA, 15 bp, Homo sapiens
gcaaaatggattgaa

SEQ ID NO: 975891 - DNA, 15 bp, Homo sapiens
agcaaaatggattga

SEQ ID NO: 975892 - DNA, 15 bp, Homo sapiens
tagcaaaatggattg

SEQ ID NO: 975893 - DNA, 15 bp, Homo sapiens
gtagcaaaatggatt

SEQ ID NO: 975894 - DNA, 15 bp, Homo sapiens
tgtagcaaaatggat

SEQ ID NO: 975895 - DNA, 15 bp, Homo sapiens
ttgtagcaaaatgga

SEQ ID NO: 975896 - DNA, 15 bp, Homo sapiens
tttgtagcaaaatgg

SEQ ID NO: 975897 - DNA, 15 bp, Homo sapiens
atttgtagcaaaatg

SEQ ID NO: 975898 - DNA, 15 bp, Homo sapiens
catttgtagcaaaat

SEQ ID NO: 975899 - DNA, 15 bp, Homo sapiens
acatttgtagcaaaa

SEQ ID NO: 975900 - DNA, 15 bp, Homo sapiens
aacatttgtagcaaa

SEQ ID NO: 975901 - DNA, 15 bp, Homo sapiens
aaacatttgtagcaa

SEQ ID NO: 975902 - DNA, 15 bp, Homo sapiens
taaacatttgtagca

SEQ ID NO: 975903 - DNA, 15 bp, Homo sapiens
gtaaacatttgtagc

SEQ ID NO: 975904 - DNA, 15 bp, Homo sapiens
tgtaaacatttgtag

SEQ ID NO: 975905 - DNA, 15 bp, Homo sapiens
atgtaaacatttgta

SEQ ID NO: 975906 - DNA, 15 bp, Homo sapiens
aatgtaaacatttgt

SEQ ID NO: 975907 - DNA, 15 bp, Homo sapiens
aaatgtaaacatttg

SEQ ID NO: 975908 - DNA, 15 bp, Homo sapiens
taaatgtaaacattt

SEQ ID NO: 975909 - DNA, 15 bp, Homo sapiens
ataaatgtaaacatt

SEQ ID NO: 975910 - DNA, 15 bp, Homo sapiens
tataaatgtaaacat

SEQ ID NO: 975911 - DNA, 15 bp, Homo sapiens
ttataaatgtaaaca

SEQ ID NO: 975912 - DNA, 15 bp, Homo sapiens
cttataaatgtaaac

SEQ ID NO: 975913 - DNA, 15 bp, Homo sapiens
gcttataaatgtaaa

SEQ ID NO: 975914 - DNA, 15 bp, Homo sapiens
tgcttataaatgtaa

SEQ ID NO: 975915 - DNA, 15 bp, Homo sapiens
ctgcttataaatgta

SEQ ID NO: 975916 - DNA, 15 bp, Homo sapiens
cctgcttataaatgt

SEQ ID NO: 975917 - DNA, 15 bp, Homo sapiens
ccctgcttataaatg

SEQ ID NO: 975918 - DNA, 15 bp, Homo sapiens
gccctgcttataaat

SEQ ID NO: 975919 - DNA, 15 bp, Homo sapiens
tgccctgcttataaa

SEQ ID NO: 975920 - DNA, 15 bp, Homo sapiens
ctgccctgcttataa

SEQ ID NO: 975921 - DNA, 15 bp, Homo sapiens
tctgccctgcttata

SEQ ID NO: 975922 - DNA, 15 bp, Homo sapiens
ttctgccctgcttat

SEQ ID NO: 975923 - DNA, 15 bp, Homo sapiens
tttctgccctgctta

SEQ ID NO: 975924 - DNA, 15 bp, Homo sapiens
ttttctgccctgctt

SEQ ID NO: 975925 - DNA, 15 bp, Homo sapiens
tttttctgccctgct

SEQ ID NO: 975926 - DNA, 15 bp, Homo sapiens
gtttttctgccctgc

SEQ ID NO: 975927 - DNA, 15 bp, Homo sapiens
ggtttttctgccctg

SEQ ID NO: 975928 - DNA, 15 bp, Homo sapiens
aggtttttctgccct

SEQ ID NO: 975929 - DNA, 15 bp, Homo sapiens
gaggtttttctgccc

SEQ ID NO: 975930 - DNA, 15 bp, Homo sapiens
tgaggtttttctgcc

SEQ ID NO: 975931 - DNA, 15 bp, Homo sapiens
atgaggtttttctgc

SEQ ID NO: 975932 - DNA, 15 bp, Homo sapiens
gatgaggtttttctg

SEQ ID NO: 975933 - DNA, 15 bp, Homo sapiens
ggatgaggtttttct

SEQ ID NO: 975934 - DNA, 15 bp, Homo sapiens
tggatgaggtttttc

SEQ ID NO: 975935 - DNA, 15 bp, Homo sapiens
ctggatgaggttttt

SEQ ID NO: 975936 - DNA, 15 bp, Homo sapiens
cctggatgaggtttt

SEQ ID NO: 975937 - DNA, 15 bp, Homo sapiens
acctggatgaggttt

SEQ ID NO: 975938 - DNA, 15 bp, Homo sapiens
aacctggatgaggtt

SEQ ID NO: 975939 - DNA, 15 bp, Homo sapiens
taacctggatgaggt

SEQ ID NO: 975940 - DNA, 15 bp, Homo sapiens
ataacctggatgagg

SEQ ID NO: 975941 - DNA, 15 bp, Homo sapiens
aataacctggatgag

SEQ ID NO: 975942 - DNA, 15 bp, Homo sapiens
caataacctggatga

SEQ ID NO: 975943 - DNA, 15 bp, Homo sapiens
tcaataacctggatg

SEQ ID NO: 975944 - DNA, 15 bp, Homo sapiens
ttcaataacctggat

SEQ ID NO: 975945 - DNA, 15 bp, Homo sapiens
gttcaataacctgga

SEQ ID NO: 975946 - DNA, 15 bp, Homo sapiens
agttcaataacctgg

SEQ ID NO: 975947 - DNA, 15 bp, Homo sapiens
tagttcaataacctg

SEQ ID NO: 975948 - DNA, 15 bp, Homo sapiens
ttagttcaataacct

SEQ ID NO: 975949 - DNA, 15 bp, Homo sapiens
cttagttcaataacc

SEQ ID NO: 975950 - DNA, 15 bp, Homo sapiens
tcttagttcaataac

SEQ ID NO: 975951 - DNA, 15 bp, Homo sapiens
ttcttagttcaataa

SEQ ID NO: 975952 - DNA, 15 bp, Homo sapiens
cttcttagttcaata

SEQ ID NO: 975953 - DNA, 15 bp, Homo sapiens
tcttcttagttcaat

SEQ ID NO: 975954 - DNA, 15 bp, Homo sapiens
ttcttcttagttcaa

SEQ ID NO: 975955 - DNA, 15 bp, Homo sapiens
tttcttcttagttca

SEQ ID NO: 975956 - DNA, 15 bp, Homo sapiens
ctttcttcttagttc

SEQ ID NO: 975957 - DNA, 15 bp, Homo sapiens
actttcttcttagtt

SEQ ID NO: 975958 - DNA, 15 bp, Homo sapiens
aactttcttcttagt

SEQ ID NO: 975959 - DNA, 15 bp, Homo sapiens
taactttcttcttag

SEQ ID NO: 975960 - DNA, 15 bp, Homo sapiens
ataactttcttctta

SEQ ID NO: 975961 - DNA, 15 bp, Homo sapiens
tataactttcttctt

SEQ ID NO: 975962 - DNA, 15 bp, Homo sapiens
atataactttcttct

SEQ ID NO: 975963 - DNA, 15 bp, Homo sapiens
aatataactttcttc

SEQ ID NO: 975964 - DNA, 15 bp, Homo sapiens
taatataactttctt

SEQ ID NO: 975965 - DNA, 15 bp, Homo sapiens
ttaatataactttct

SEQ ID NO: 975966 - DNA, 15 bp, Homo sapiens
cttaatataactttc

SEQ ID NO: 975967 - DNA, 15 bp, Homo sapiens
ccttaatataacttt

SEQ ID NO: 975968 - DNA, 15 bp, Homo sapiens
accttaatataactt

SEQ ID NO: 975969 - DNA, 15 bp, Homo sapiens
aaccttaatataact

SEQ ID NO: 975970 - DNA, 15 bp, Homo sapiens
aaaccttaatataac

SEQ ID NO: 975971 - DNA, 15 bp, Homo sapiens
gaaaccttaatataa

SEQ ID NO: 975972 - DNA, 15 bp, Homo sapiens
agaaaccttaatata

SEQ ID NO: 975973 - DNA, 15 bp, Homo sapiens
tagaaaccttaatat

SEQ ID NO: 975974 - DNA, 15 bp, Homo sapiens
ttagaaaccttaata

SEQ ID NO: 975975 - DNA, 15 bp, Homo sapiens
attagaaaccttaat

SEQ ID NO: 975976 - DNA, 15 bp, Homo sapiens
aattagaaaccttaa

SEQ ID NO: 975977 - DNA, 15 bp, Homo sapiens
aaattagaaacctta

SEQ ID NO: 975978 - DNA, 15 bp, Homo sapiens
aaaattagaaacctt

SEQ ID NO: 975979 - DNA, 15 bp, Homo sapiens
aaaaattagaaacct

SEQ ID NO: 975980 - DNA, 15 bp, Homo sapiens
aaaaaattagaaacc

SEQ ID NO: 975981 - DNA, 15 bp, Homo sapiens
aaaaaaattagaaac

SEQ ID NO: 975982 - DNA, 15 bp, Homo sapiens
taaaaaaattagaaa

SEQ ID NO: 975983 - DNA, 15 bp, Homo sapiens
ttaaaaaaattagaa

SEQ ID NO: 975984 - DNA, 15 bp, Homo sapiens
attaaaaaaattaga

SEQ ID NO: 975985 - DNA, 15 bp, Homo sapiens
cattaaaaaaattag

SEQ ID NO: 975986 - DNA, 15 bp, Homo sapiens
acattaaaaaaatta

SEQ ID NO: 975987 - DNA, 15 bp, Homo sapiens
tacattaaaaaaatt

SEQ ID NO: 975988 - DNA, 15 bp, Homo sapiens
ctacattaaaaaaat

SEQ ID NO: 975989 - DNA, 15 bp, Homo sapiens
actacattaaaaaaa

SEQ ID NO: 975990 - DNA, 15 bp, Homo sapiens
aactacattaaaaaa

SEQ ID NO: 975991 - DNA, 15 bp, Homo sapiens
taactacattaaaaa

SEQ ID NO: 975992 - DNA, 15 bp, Homo sapiens
ctaactacattaaaa

SEQ ID NO: 975993 - DNA, 15 bp, Homo sapiens
tctaactacattaaa

SEQ ID NO: 975994 - DNA, 15 bp, Homo sapiens
ttctaactacattaa

SEQ ID NO: 975995 - DNA, 15 bp, Homo sapiens
tttctaactacatta

SEQ ID NO: 975996 - DNA, 15 bp, Homo sapiens
gtttctaactacatt

SEQ ID NO: 975997 - DNA, 15 bp, Homo sapiens
ggtttctaactacat

SEQ ID NO: 975998 - DNA, 15 bp, Homo sapiens
tggtttctaactaca

SEQ ID NO: 975999 - DNA, 15 bp, Homo sapiens
ttggtttctaactac

SEQ ID NO: 976000 - DNA, 15 bp, Homo sapiens
tttggtttctaacta

SEQ ID NO: 976001 - DNA, 15 bp, Homo sapiens
gtttggtttctaact

SEQ ID NO: 976002 - DNA, 15 bp, Homo sapiens
agtttggtttctaac

SEQ ID NO: 976003 - DNA, 15 bp, Homo sapiens
aagtttggtttctaa

SEQ ID NO: 976004 - DNA, 15 bp, Homo sapiens
taagtttggtttcta

SEQ ID NO: 976005 - DNA, 15 bp, Homo sapiens
ttaagtttggtttct

SEQ ID NO: 976006 - DNA, 15 bp, Homo sapiens
gttaagtttggtttc

SEQ ID NO: 976007 - DNA, 15 bp, Homo sapiens
tgttaagtttggttt

SEQ ID NO: 976008 - DNA, 15 bp, Homo sapiens
ttgttaagtttggtt

SEQ ID NO: 976009 - DNA, 15 bp, Homo sapiens
attgttaagtttggt

SEQ ID NO: 976010 - DNA, 15 bp, Homo sapiens
cattgttaagtttgg

SEQ ID NO: 976011 - DNA, 15 bp, Homo sapiens
tcattgttaagtttg

SEQ ID NO: 976012 - DNA, 15 bp, Homo sapiens
ctcattgttaagttt

SEQ ID NO: 976013 - DNA, 15 bp, Homo sapiens
gctcattgttaagtt

SEQ ID NO: 976014 - DNA, 15 bp, Homo sapiens
ggctcattgttaagt

SEQ ID NO: 976015 - DNA, 15 bp, Homo sapiens
gggctcattgttaag

SEQ ID NO: 976016 - DNA, 15 bp, Homo sapiens
tgggctcattgttaa

SEQ ID NO: 976017 - DNA, 15 bp, Homo sapiens
ttgggctcattgtta

SEQ ID NO: 976018 - DNA, 15 bp, Homo sapiens
cttgggctcattgtt

SEQ ID NO: 976019 - DNA, 15 bp, Homo sapiens
acttgggctcattgt

SEQ ID NO: 976020 - DNA, 15 bp, Homo sapiens
aacttgggctcattg

SEQ ID NO: 976021 - DNA, 15 bp, Homo sapiens
aaacttgggctcatt

SEQ ID NO: 976022 - DNA, 15 bp, Homo sapiens
taaacttgggctcat

SEQ ID NO: 976023 - DNA, 15 bp, Homo sapiens
ttaaacttgggctca

SEQ ID NO: 976024 - DNA, 15 bp, Homo sapiens
tttaaacttgggctc

SEQ ID NO: 976025 - DNA, 15 bp, Homo sapiens
ctttaaacttgggct

SEQ ID NO: 976026 - DNA, 15 bp, Homo sapiens
gctttaaacttgggc

SEQ ID NO: 976027 - DNA, 15 bp, Homo sapiens
tgctttaaacttggg

SEQ ID NO: 976028 - DNA, 15 bp, Homo sapiens
ctgctttaaacttgg

SEQ ID NO: 976029 - DNA, 15 bp, Homo sapiens
actgctttaaacttg

SEQ ID NO: 976030 - DNA, 15 bp, Homo sapiens
gactgctttaaactt

SEQ ID NO: 976031 - DNA, 15 bp, Homo sapiens
agactgctttaaact

SEQ ID NO: 976032 - DNA, 15 bp, Homo sapiens
tagactgctttaaac

SEQ ID NO: 976033 - DNA, 15 bp, Homo sapiens
ttagactgctttaaa

SEQ ID NO: 976034 - DNA, 15 bp, Homo sapiens
attagactgctttaa

SEQ ID NO: 976035 - DNA, 15 bp, Homo sapiens
aattagactgcttta

SEQ ID NO: 976036 - DNA, 15 bp, Homo sapiens
taattagactgcttt

SEQ ID NO: 976037 - DNA, 15 bp, Homo sapiens
ttaattagactgctt

SEQ ID NO: 976038 - DNA, 15 bp, Homo sapiens
gttaattagactgct

SEQ ID NO: 976039 - DNA, 15 bp, Homo sapiens
ggttaattagactgc

SEQ ID NO: 976040 - DNA, 15 bp, Homo sapiens
aggttaattagactg

SEQ ID NO: 976041 - DNA, 15 bp, Homo sapiens
caggttaattagact

SEQ ID NO: 976042 - DNA, 15 bp, Homo sapiens
ccaggttaattagac

SEQ ID NO: 976043 - DNA, 15 bp, Homo sapiens
tccaggttaattaga

SEQ ID NO: 976044 - DNA, 15 bp, Homo sapiens
gtccaggttaattag

SEQ ID NO: 976045 - DNA, 15 bp, Homo sapiens
tgtccaggttaatta

SEQ ID NO: 976046 - DNA, 15 bp, Homo sapiens
ttgtccaggttaatt

SEQ ID NO: 976047 - DNA, 15 bp, Homo sapiens
cttgtccaggttaat

SEQ ID NO: 976048 - DNA, 15 bp, Homo sapiens
gcttgtccaggttaa

SEQ ID NO: 976049 - DNA, 15 bp, Homo sapiens
agcttgtccaggtta

SEQ ID NO: 976050 - DNA, 15 bp, Homo sapiens
gagcttgtccaggtt

SEQ ID NO: 976051 - DNA, 15 bp, Homo sapiens
tgagcttgtccaggt

SEQ ID NO: 976052 - DNA, 15 bp, Homo sapiens
ctgagcttgtccagg

SEQ ID NO: 976053 - DNA, 15 bp, Homo sapiens
cctgagcttgtccag

SEQ ID NO: 976054 - DNA, 15 bp, Homo sapiens
gcctgagcttgtcca

SEQ ID NO: 976055 - DNA, 15 bp, Homo sapiens
tgcctgagcttgtcc

SEQ ID NO: 976056 - DNA, 15 bp, Homo sapiens
ttgcctgagcttgtc

SEQ ID NO: 976057 - DNA, 15 bp, Homo sapiens
cttgcctgagcttgt

SEQ ID NO: 976058 - DNA, 15 bp, Homo sapiens
acttgcctgagcttg

SEQ ID NO: 976059 - DNA, 15 bp, Homo sapiens
aacttgcctgagctt

SEQ ID NO: 976060 - DNA, 15 bp, Homo sapiens
aaacttgcctgagct

SEQ ID NO: 976061 - DNA, 15 bp, Homo sapiens
gaaacttgcctgagc

SEQ ID NO: 976062 - DNA, 15 bp, Homo sapiens
tgaaacttgcctgag

SEQ ID NO: 976063 - DNA, 15 bp, Homo sapiens
atgaaacttgcctga

SEQ ID NO: 976064 - DNA, 15 bp, Homo sapiens
aatgaaacttgcctg

SEQ ID NO: 976065 - DNA, 15 bp, Homo sapiens
gaatgaaacttgcct

SEQ ID NO: 976066 - DNA, 15 bp, Homo sapiens
agaatgaaacttgcc

SEQ ID NO: 976067 - DNA, 15 bp, Homo sapiens
cagaatgaaacttgc

SEQ ID NO: 976068 - DNA, 15 bp, Homo sapiens
acagaatgaaacttg

SEQ ID NO: 976069 - DNA, 15 bp, Homo sapiens
cacagaatgaaactt

SEQ ID NO: 976070 - DNA, 15 bp, Homo sapiens
ccacagaatgaaact

SEQ ID NO: 976071 - DNA, 15 bp, Homo sapiens
gccacagaatgaaac

SEQ ID NO: 976072 - DNA, 15 bp, Homo sapiens
ggccacagaatgaaa

SEQ ID NO: 976073 - DNA, 15 bp, Homo sapiens
gggccacagaatgaa

SEQ ID NO: 976074 - DNA, 15 bp, Homo sapiens
tgggccacagaatga

SEQ ID NO: 976075 - DNA, 15 bp, Homo sapiens
atgggccacagaatg

SEQ ID NO: 976076 - DNA, 15 bp, Homo sapiens
tatgggccacagaat

SEQ ID NO: 976077 - DNA, 15 bp, Homo sapiens
ctatgggccacagaa

SEQ ID NO: 976078 - DNA, 15 bp, Homo sapiens
gctatgggccacaga

SEQ ID NO: 976079 - DNA, 15 bp, Homo sapiens
tgctatgggccacag

SEQ ID NO: 976080 - DNA, 15 bp, Homo sapiens
atgctatgggccaca

SEQ ID NO: 976081 - DNA, 15 bp, Homo sapiens
gatgctatgggccac

SEQ ID NO: 976082 - DNA, 15 bp, Homo sapiens
tgatgctatgggcca

SEQ ID NO: 976083 - DNA, 15 bp, Homo sapiens
atgatgctatgggcc

SEQ ID NO: 976084 - DNA, 15 bp, Homo sapiens
gatgatgctatgggc

SEQ ID NO: 976085 - DNA, 15 bp, Homo sapiens
agatgatgctatggg

SEQ ID NO: 976086 - DNA, 15 bp, Homo sapiens
cagatgatgctatgg

SEQ ID NO: 976087 - DNA, 15 bp, Homo sapiens
acagatgatgctatg

SEQ ID NO: 976088 - DNA, 15 bp, Homo sapiens
cacagatgatgctat

SEQ ID NO: 976089 - DNA, 15 bp, Homo sapiens
acacagatgatgcta

SEQ ID NO: 976090 - DNA, 15 bp, Homo sapiens
aacacagatgatgct

SEQ ID NO: 976091 - DNA, 15 bp, Homo sapiens
caacacagatgatgc

SEQ ID NO: 976092 - DNA, 15 bp, Homo sapiens
acaacacagatgatg

SEQ ID NO: 976093 - DNA, 15 bp, Homo sapiens
tacaacacagatgat

SEQ ID NO: 976094 - DNA, 15 bp, Homo sapiens
ttacaacacagatga

SEQ ID NO: 976095 - DNA, 15 bp, Homo sapiens
tttacaacacagatg

SEQ ID NO: 976096 - DNA, 15 bp, Homo sapiens
ctttacaacacagat

SEQ ID NO: 976097 - DNA, 15 bp, Homo sapiens
gctttacaacacaga

SEQ ID NO: 976098 - DNA, 15 bp, Homo sapiens
agctttacaacacag

SEQ ID NO: 976099 - DNA, 15 bp, Homo sapiens
tagctttacaacaca

SEQ ID NO: 976100 - DNA, 15 bp, Homo sapiens
ttagctttacaacac

SEQ ID NO: 976101 - DNA, 15 bp, Homo sapiens
cttagctttacaaca

SEQ ID NO: 976102 - DNA, 15 bp, Homo sapiens
acttagctttacaac

SEQ ID NO: 976103 - DNA, 15 bp, Homo sapiens
tacttagctttacaa

SEQ ID NO: 976104 - DNA, 15 bp, Homo sapiens
ctacttagctttaca

SEQ ID NO: 976105 - DNA, 15 bp, Homo sapiens
gctacttagctttac

SEQ ID NO: 976106 - DNA, 15 bp, Homo sapiens
tgctacttagcttta

SEQ ID NO: 976107 - DNA, 15 bp, Homo sapiens
ttgctacttagcttt

SEQ ID NO: 976108 - DNA, 15 bp, Homo sapiens
tttgctacttagctt

SEQ ID NO: 976109 - DNA, 15 bp, Homo sapiens
atttgctacttagct

SEQ ID NO: 976110 - DNA, 15 bp, Homo sapiens
catttgctacttagc

SEQ ID NO: 976111 - DNA, 15 bp, Homo sapiens
acatttgctacttag

SEQ ID NO: 976112 - DNA, 15 bp, Homo sapiens
aacatttgctactta

SEQ ID NO: 976113 - DNA, 15 bp, Homo sapiens
caacatttgctactt

SEQ ID NO: 976114 - DNA, 15 bp, Homo sapiens
acaacatttgctact

SEQ ID NO: 976115 - DNA, 15 bp, Homo sapiens
aacaacatttgctac

SEQ ID NO: 976116 - DNA, 15 bp, Homo sapiens
aaacaacatttgcta

SEQ ID NO: 976117 - DNA, 15 bp, Homo sapiens
caaacaacatttgct

SEQ ID NO: 976118 - DNA, 15 bp, Homo sapiens
ccaaacaacatttgc

SEQ ID NO: 976119 - DNA, 15 bp, Homo sapiens
cccaaacaacatttg

SEQ ID NO: 976120 - DNA, 15 bp, Homo sapiens
acccaaacaacattt

SEQ ID NO: 976121 - DNA, 15 bp, Homo sapiens
gacccaaacaacatt

SEQ ID NO: 976122 - DNA, 15 bp, Homo sapiens
tgacccaaacaacat

SEQ ID NO: 976123 - DNA, 15 bp, Homo sapiens
atgacccaaacaaca

SEQ ID NO: 976124 - DNA, 15 bp, Homo sapiens
catgacccaaacaac

SEQ ID NO: 976125 - DNA, 15 bp, Homo sapiens
gcatgacccaaacaa

SEQ ID NO: 976126 - DNA, 15 bp, Homo sapiens
agcatgacccaaaca

SEQ ID NO: 976127 - DNA, 15 bp, Homo sapiens
cagcatgacccaaac

SEQ ID NO: 976128 - DNA, 15 bp, Homo sapiens
ccagcatgacccaaa

SEQ ID NO: 976129 - DNA, 15 bp, Homo sapiens
cccagcatgacccaa

SEQ ID NO: 976130 - DNA, 15 bp, Homo sapiens
ccccagcatgaccca

SEQ ID NO: 976131 - DNA, 15 bp, Homo sapiens
cccccagcatgaccc

SEQ ID NO: 976132 - DNA, 15 bp, Homo sapiens
tcccccagcatgacc

SEQ ID NO: 976133 - DNA, 15 bp, Homo sapiens
gtcccccagcatgac

SEQ ID NO: 976134 - DNA, 15 bp, Homo sapiens
tgtcccccagcatga

SEQ ID NO: 976135 - DNA, 15 bp, Homo sapiens
ttgtcccccagcatg

SEQ ID NO: 976136 - DNA, 15 bp, Homo sapiens
cttgtcccccagcat

SEQ ID NO: 976137 - DNA, 15 bp, Homo sapiens
gcttgtcccccagca

SEQ ID NO: 976138 - DNA, 15 bp, Homo sapiens
ggcttgtcccccagc

SEQ ID NO: 976139 - DNA, 15 bp, Homo sapiens
tggcttgtcccccag

SEQ ID NO: 976140 - DNA, 15 bp, Homo sapiens
atggcttgtccccca

SEQ ID NO: 976141 - DNA, 15 bp, Homo sapiens
gatggcttgtccccc

SEQ ID NO: 976142 - DNA, 15 bp, Homo sapiens
ggatggcttgtcccc

SEQ ID NO: 976143 - DNA, 15 bp, Homo sapiens
gggatggcttgtccc

SEQ ID NO: 976144 - DNA, 15 bp, Homo sapiens
tgggatggcttgtcc

SEQ ID NO: 976145 - DNA, 15 bp, Homo sapiens
ttgggatggcttgtc

SEQ ID NO: 976146 - DNA, 15 bp, Homo sapiens
attgggatggcttgt

SEQ ID NO: 976147 - DNA, 15 bp, Homo sapiens
aattgggatggcttg

SEQ ID NO: 976148 - DNA, 15 bp, Homo sapiens
aaattgggatggctt

SEQ ID NO: 976149 - DNA, 15 bp, Homo sapiens
caaattgggatggct

SEQ ID NO: 976150 - DNA, 15 bp, Homo sapiens
gcaaattgggatggc

SEQ ID NO: 976151 - DNA, 15 bp, Homo sapiens
agcaaattgggatgg

SEQ ID NO: 976152 - DNA, 15 bp, Homo sapiens
gagcaaattgggatg

SEQ ID NO: 976153 - DNA, 15 bp, Homo sapiens
tgagcaaattgggat

SEQ ID NO: 976154 - DNA, 15 bp, Homo sapiens
ctgagcaaattggga

SEQ ID NO: 976155 - DNA, 15 bp, Homo sapiens
cctgagcaaattggg

SEQ ID NO: 976156 - DNA, 15 bp, Homo sapiens
tcctgagcaaattgg

SEQ ID NO: 976157 - DNA, 15 bp, Homo sapiens
gtcctgagcaaattg

SEQ ID NO: 976158 - DNA, 15 bp, Homo sapiens
agtcctgagcaaatt

SEQ ID NO: 976159 - DNA, 15 bp, Homo sapiens
cagtcctgagcaaat

SEQ ID NO: 976160 - DNA, 15 bp, Homo sapiens
tcagtcctgagcaaa

SEQ ID NO: 976161 - DNA, 15 bp, Homo sapiens
ctcagtcctgagcaa

SEQ ID NO: 976162 - DNA, 15 bp, Homo sapiens
cctcagtcctgagca

SEQ ID NO: 976163 - DNA, 15 bp, Homo sapiens
ccctcagtcctgagc

SEQ ID NO: 976164 - DNA, 15 bp, Homo sapiens
cccctcagtcctgag

SEQ ID NO: 976165 - DNA, 15 bp, Homo sapiens
acccctcagtcctga

SEQ ID NO: 976166 - DNA, 15 bp, Homo sapiens
aacccctcagtcctg

SEQ ID NO: 976167 - DNA, 15 bp, Homo sapiens
aaacccctcagtcct

SEQ ID NO: 976168 - DNA, 15 bp, Homo sapiens
aaaacccctcagtcc

SEQ ID NO: 976169 - DNA, 15 bp, Homo sapiens
gaaaacccctcagtc

SEQ ID NO: 976170 - DNA, 15 bp, Homo sapiens
ggaaaacccctcagt

SEQ ID NO: 976171 - DNA, 15 bp, Homo sapiens
tggaaaacccctcag

SEQ ID NO: 976172 - DNA, 15 bp, Homo sapiens
ctggaaaacccctca

SEQ ID NO: 976173 - DNA, 15 bp, Homo sapiens
cctggaaaacccctc

SEQ ID NO: 976174 - DNA, 15 bp, Homo sapiens
tcctggaaaacccct

SEQ ID NO: 976175 - DNA, 15 bp, Homo sapiens
atcctggaaaacccc

SEQ ID NO: 976176 - DNA, 15 bp, Homo sapiens
tatcctggaaaaccc

SEQ ID NO: 976177 - DNA, 15 bp, Homo sapiens
atatcctggaaaacc

SEQ ID NO: 976178 - DNA, 15 bp, Homo sapiens
gatatcctggaaaac

SEQ ID NO: 976179 - DNA, 15 bp, Homo sapiens
tgatatcctggaaaa

SEQ ID NO: 976180 - DNA, 15 bp, Homo sapiens
atgatatcctggaaa

SEQ ID NO: 976181 - DNA, 15 bp, Homo sapiens
catgatatcctggaa

SEQ ID NO: 976182 - DNA, 15 bp, Homo sapiens
acatgatatcctgga

SEQ ID NO: 976183 - DNA, 15 bp, Homo sapiens
tacatgatatcctgg

SEQ ID NO: 976184 - DNA, 15 bp, Homo sapiens
ttacatgatatcctg

SEQ ID NO: 976185 - DNA, 15 bp, Homo sapiens
cttacatgatatcct

SEQ ID NO: 976186 - DNA, 15 bp, Homo sapiens
ccttacatgatatcc

SEQ ID NO: 976187 - DNA, 15 bp, Homo sapiens
tccttacatgatatc

SEQ ID NO: 976188 - DNA, 15 bp, Homo sapiens
atccttacatgatat

SEQ ID NO: 976189 - DNA, 15 bp, Homo sapiens
tatccttacatgata

SEQ ID NO: 976190 - DNA, 15 bp, Homo sapiens
ttatccttacatgat

SEQ ID NO: 976191 - DNA, 15 bp, Homo sapiens
attatccttacatga

SEQ ID NO: 976192 - DNA, 15 bp, Homo sapiens
aattatccttacatg

SEQ ID NO: 976193 - DNA, 15 bp, Homo sapiens
caattatccttacat

SEQ ID NO: 976194 - DNA, 15 bp, Homo sapiens
ccaattatccttaca

SEQ ID NO: 976195 - DNA, 15 bp, Homo sapiens
cccaattatccttac

SEQ ID NO: 976196 - DNA, 15 bp, Homo sapiens
acccaattatcctta

SEQ ID NO: 976197 - DNA, 15 bp, Homo sapiens
tacccaattatcctt

SEQ ID NO: 976198 - DNA, 15 bp, Homo sapiens
gtacccaattatcct

SEQ ID NO: 976199 - DNA, 15 bp, Homo sapiens
tgtacccaattatcc

SEQ ID NO: 976200 - DNA, 15 bp, Homo sapiens
ttgtacccaattatc

SEQ ID NO: 976201 - DNA, 15 bp, Homo sapiens
tttgtacccaattat

SEQ ID NO: 976202 - DNA, 15 bp, Homo sapiens
atttgtacccaatta

SEQ ID NO: 976203 - DNA, 15 bp, Homo sapiens
tatttgtacccaatt

SEQ ID NO: 976204 - DNA, 15 bp, Homo sapiens
atatttgtacccaat

SEQ ID NO: 976205 - DNA, 15 bp, Homo sapiens
tatatttgtacccaa

SEQ ID NO: 976206 - DNA, 15 bp, Homo sapiens
ttatatttgtaccca

SEQ ID NO: 976207 - DNA, 15 bp, Homo sapiens
gttatatttgtaccc

SEQ ID NO: 976208 - DNA, 15 bp, Homo sapiens
ggttatatttgtacc

SEQ ID NO: 976209 - DNA, 15 bp, Homo sapiens
aggttatatttgtac

SEQ ID NO: 976210 - DNA, 15 bp, Homo sapiens
caggttatatttgta

SEQ ID NO: 976211 - DNA, 15 bp, Homo sapiens
gcaggttatatttgt

SEQ ID NO: 976212 - DNA, 15 bp, Homo sapiens
agcaggttatatttg

SEQ ID NO: 976213 - DNA, 15 bp, Homo sapiens
cagcaggttatattt

SEQ ID NO: 976214 - DNA, 15 bp, Homo sapiens
gcagcaggttatatt

SEQ ID NO: 976215 - DNA, 15 bp, Homo sapiens
agcagcaggttatat

SEQ ID NO: 976216 - DNA, 15 bp, Homo sapiens
aagcagcaggttata

SEQ ID NO: 976217 - DNA, 15 bp, Homo sapiens
aaagcagcaggttat

SEQ ID NO: 976218 - DNA, 15 bp, Homo sapiens
gaaagcagcaggtta

SEQ ID NO: 976219 - DNA, 15 bp, Homo sapiens
agaaagcagcaggtt

SEQ ID NO: 976220 - DNA, 15 bp, Homo sapiens
gagaaagcagcaggt

SEQ ID NO: 976221 - DNA, 15 bp, Homo sapiens
agagaaagcagcagg

SEQ ID NO: 976222 - DNA, 15 bp, Homo sapiens
gagagaaagcagcag

SEQ ID NO: 976223 - DNA, 15 bp, Homo sapiens
tgagagaaagcagca

SEQ ID NO: 976224 - DNA, 15 bp, Homo sapiens
atgagagaaagcagc

SEQ ID NO: 976225 - DNA, 15 bp, Homo sapiens
aatgagagaaagcag

SEQ ID NO: 976226 - DNA, 15 bp, Homo sapiens
aaatgagagaaagca

SEQ ID NO: 976227 - DNA, 15 bp, Homo sapiens
gaaatgagagaaagc

SEQ ID NO: 976228 - DNA, 15 bp, Homo sapiens
tgaaatgagagaaag

SEQ ID NO: 976229 - DNA, 15 bp, Homo sapiens
ttgaaatgagagaaa

SEQ ID NO: 976230 - DNA, 15 bp, Homo sapiens
tttgaaatgagagaa

SEQ ID NO: 976231 - DNA, 15 bp, Homo sapiens
atttgaaatgagaga

SEQ ID NO: 976232 - DNA, 15 bp, Homo sapiens
aatttgaaatgagag

SEQ ID NO: 976233 - DNA, 15 bp, Homo sapiens
aaatttgaaatgaga

SEQ ID NO: 976234 - DNA, 15 bp, Homo sapiens
taaatttgaaatgag

SEQ ID NO: 976235 - DNA, 15 bp, Homo sapiens
ataaatttgaaatga

SEQ ID NO: 976236 - DNA, 15 bp, Homo sapiens
gataaatttgaaatg

SEQ ID NO: 976237 - DNA, 15 bp, Homo sapiens
tgataaatttgaaat

SEQ ID NO: 976238 - DNA, 15 bp, Homo sapiens
atgataaatttgaaa

SEQ ID NO: 976239 - DNA, 15 bp, Homo sapiens
aatgataaatttgaa

SEQ ID NO: 976240 - DNA, 15 bp, Homo sapiens
aaatgataaatttga

SEQ ID NO: 976241 - DNA, 15 bp, Homo sapiens
taaatgataaatttg

SEQ ID NO: 976242 - DNA, 15 bp, Homo sapiens
ataaatgataaattt

SEQ ID NO: 976243 - DNA, 15 bp, Homo sapiens
gataaatgataaatt

SEQ ID NO: 976244 - DNA, 15 bp, Homo sapiens
tgataaatgataaat

SEQ ID NO: 976245 - DNA, 15 bp, Homo sapiens
atgataaatgataaa

SEQ ID NO: 976246 - DNA, 15 bp, Homo sapiens
tatgataaatgataa

SEQ ID NO: 976247 - DNA, 15 bp, Homo sapiens
atatgataaatgata

SEQ ID NO: 976248 - DNA, 15 bp, Homo sapiens
gatatgataaatgat

SEQ ID NO: 976249 - DNA, 15 bp, Homo sapiens
tgatatgataaatga

SEQ ID NO: 976250 - DNA, 15 bp, Homo sapiens
ctgatatgataaatg

SEQ ID NO: 976251 - DNA, 15 bp, Homo sapiens
gctgatatgataaat

SEQ ID NO: 976252 - DNA, 15 bp, Homo sapiens
tgctgatatgataaa

SEQ ID NO: 976253 - DNA, 15 bp, Homo sapiens
ttgctgatatgataa

SEQ ID NO: 976254 - DNA, 15 bp, Homo sapiens
gttgctgatatgata

SEQ ID NO: 976255 - DNA, 15 bp, Homo sapiens
agttgctgatatgat

SEQ ID NO: 976256 - DNA, 15 bp, Homo sapiens
tagttgctgatatga

SEQ ID NO: 976257 - DNA, 15 bp, Homo sapiens
atagttgctgatatg

SEQ ID NO: 976258 - DNA, 15 bp, Homo sapiens
catagttgctgatat

SEQ ID NO: 976259 - DNA, 15 bp, Homo sapiens
tcatagttgctgata

SEQ ID NO: 976260 - DNA, 15 bp, Homo sapiens
ctcatagttgctgat

SEQ ID NO: 976261 - DNA, 15 bp, Homo sapiens
actcatagttgctga

SEQ ID NO: 976262 - DNA, 15 bp, Homo sapiens
aactcatagttgctg

SEQ ID NO: 976263 - DNA, 15 bp, Homo sapiens
taactcatagttgct

SEQ ID NO: 976264 - DNA, 15 bp, Homo sapiens
ataactcatagttgc

SEQ ID NO: 976265 - DNA, 15 bp, Homo sapiens
cataactcatagttg

SEQ ID NO: 976266 - DNA, 15 bp, Homo sapiens
acataactcatagtt

SEQ ID NO: 976267 - DNA, 15 bp, Homo sapiens
aacataactcatagt

SEQ ID NO: 976268 - DNA, 15 bp, Homo sapiens
aaacataactcatag

SEQ ID NO: 976269 - DNA, 15 bp, Homo sapiens
aaaacataactcata

SEQ ID NO: 976270 - DNA, 15 bp, Homo sapiens
aaaaacataactcat

SEQ ID NO: 976271 - DNA, 15 bp, Homo sapiens
aaaaaacataactca

SEQ ID NO: 976272 - DNA, 15 bp, Homo sapiens
taaaaaacataactc

SEQ ID NO: 976273 - DNA, 15 bp, Homo sapiens
ataaaaaacataact

SEQ ID NO: 976274 - DNA, 15 bp, Homo sapiens
aataaaaaacataac

SEQ ID NO: 976275 - DNA, 15 bp, Homo sapiens
taataaaaaacataa

SEQ ID NO: 976276 - DNA, 15 bp, Homo sapiens
ctaataaaaaacata

SEQ ID NO: 976277 - DNA, 15 bp, Homo sapiens
tctaataaaaaacat

SEQ ID NO: 976278 - DNA, 15 bp, Homo sapiens
atctaataaaaaaca

SEQ ID NO: 976279 - DNA, 15 bp, Homo sapiens
aatctaataaaaaac

SEQ ID NO: 976280 - DNA, 15 bp, Homo sapiens
aaatctaataaaaaa

SEQ ID NO: 976281 - DNA, 15 bp, Homo sapiens
gaaatctaataaaaa

SEQ ID NO: 976282 - DNA, 15 bp, Homo sapiens
agaaatctaataaaa

SEQ ID NO: 976283 - DNA, 15 bp, Homo sapiens
aagaaatctaataaa

SEQ ID NO: 976284 - DNA, 15 bp, Homo sapiens
caagaaatctaataa

SEQ ID NO: 976285 - DNA, 15 bp, Homo sapiens
acaagaaatctaata

SEQ ID NO: 976286 - DNA, 15 bp, Homo sapiens
aacaagaaatctaat

SEQ ID NO: 976287 - DNA, 15 bp, Homo sapiens
taacaagaaatctaa

SEQ ID NO: 976288 - DNA, 15 bp, Homo sapiens
gtaacaagaaatcta

SEQ ID NO: 976289 - DNA, 15 bp, Homo sapiens
agtaacaagaaatct

SEQ ID NO: 976290 - DNA, 15 bp, Homo sapiens
aagtaacaagaaatc

SEQ ID NO: 976291 - DNA, 15 bp, Homo sapiens
aaagtaacaagaaat

SEQ ID NO: 976292 - DNA, 15 bp, Homo sapiens
aaaagtaacaagaaa

SEQ ID NO: 976293 - DNA, 15 bp, Homo sapiens
aaaaagtaacaagaa

SEQ ID NO: 976294 - DNA, 15 bp, Homo sapiens
gaaaaagtaacaaga

SEQ ID NO: 976295 - DNA, 15 bp, Homo sapiens
ggaaaaagtaacaag

SEQ ID NO: 976296 - DNA, 15 bp, Homo sapiens
gggaaaaagtaacaa

SEQ ID NO: 976297 - DNA, 15 bp, Homo sapiens
ggggaaaaagtaaca

SEQ ID NO: 976298 - DNA, 15 bp, Homo sapiens
tggggaaaaagtaac

SEQ ID NO: 976299 - DNA, 15 bp, Homo sapiens
ctggggaaaaagtaa

SEQ ID NO: 976300 - DNA, 15 bp, Homo sapiens
tctggggaaaaagta

SEQ ID NO: 976301 - DNA, 15 bp, Homo sapiens
gtctggggaaaaagt

SEQ ID NO: 976302 - DNA, 15 bp, Homo sapiens
ggtctggggaaaaag

SEQ ID NO: 976303 - DNA, 15 bp, Homo sapiens
tggtctggggaaaaa

SEQ ID NO: 976304 - DNA, 15 bp, Homo sapiens
gtggtctggggaaaa

SEQ ID NO: 976305 - DNA, 15 bp, Homo sapiens
agtggtctggggaaa

SEQ ID NO: 976306 - DNA, 15 bp, Homo sapiens
aagtggtctggggaa

SEQ ID NO: 976307 - DNA, 15 bp, Homo sapiens
gaagtggtctgggga

SEQ ID NO: 976308 - DNA, 15 bp, Homo sapiens
ggaagtggtctgggg

SEQ ID NO: 976309 - DNA, 15 bp, Homo sapiens
gggaagtggtctggg

SEQ ID NO: 976310 - DNA, 15 bp, Homo sapiens
tgggaagtggtctgg

SEQ ID NO: 976311 - DNA, 15 bp, Homo sapiens
atgggaagtggtctg

SEQ ID NO: 976312 - DNA, 15 bp, Homo sapiens
catgggaagtggtct

SEQ ID NO: 976313 - DNA, 15 bp, Homo sapiens
tcatgggaagtggtc

SEQ ID NO: 976314 - DNA, 15 bp, Homo sapiens
ttcatgggaagtggt

SEQ ID NO: 976315 - DNA, 15 bp, Homo sapiens
tttcatgggaagtgg

SEQ ID NO: 976316 - DNA, 15 bp, Homo sapiens
atttcatgggaagtg

SEQ ID NO: 976317 - DNA, 15 bp, Homo sapiens
aatttcatgggaagt

SEQ ID NO: 976318 - DNA, 15 bp, Homo sapiens
taatttcatgggaag

SEQ ID NO: 976319 - DNA, 15 bp, Homo sapiens
ttaatttcatgggaa

SEQ ID NO: 976320 - DNA, 15 bp, Homo sapiens
attaatttcatggga

SEQ ID NO: 976321 - DNA, 15 bp, Homo sapiens
tattaatttcatggg

SEQ ID NO: 976322 - DNA, 15 bp, Homo sapiens
atattaatttcatgg

SEQ ID NO: 976323 - DNA, 15 bp, Homo sapiens
tatattaatttcatg

SEQ ID NO: 976324 - DNA, 15 bp, Homo sapiens
gtatattaatttcat

SEQ ID NO: 976325 - DNA, 15 bp, Homo sapiens
agtatattaatttca

SEQ ID NO: 976326 - DNA, 15 bp, Homo sapiens
tagtatattaatttc

SEQ ID NO: 976327 - DNA, 15 bp, Homo sapiens
atagtatattaattt

SEQ ID NO: 976328 - DNA, 15 bp, Homo sapiens
aatagtatattaatt

SEQ ID NO: 976329 - DNA, 15 bp, Homo sapiens
taatagtatattaat

SEQ ID NO: 976330 - DNA, 15 bp, Homo sapiens
ataatagtatattaa

SEQ ID NO: 976331 - DNA, 15 bp, Homo sapiens
gataatagtatatta

SEQ ID NO: 976332 - DNA, 15 bp, Homo sapiens
tgataatagtatatt

SEQ ID NO: 976333 - DNA, 15 bp, Homo sapiens
gtgataatagtatat

SEQ ID NO: 976334 - DNA, 15 bp, Homo sapiens
agtgataatagtata

SEQ ID NO: 976335 - DNA, 15 bp, Homo sapiens
gagtgataatagtat

SEQ ID NO: 976336 - DNA, 15 bp, Homo sapiens
agagtgataatagta

SEQ ID NO: 976337 - DNA, 15 bp, Homo sapiens
gagagtgataatagt

SEQ ID NO: 976338 - DNA, 15 bp, Homo sapiens
ggagagtgataatag

SEQ ID NO: 976339 - DNA, 15 bp, Homo sapiens
tggagagtgataata

SEQ ID NO: 976340 - DNA, 15 bp, Homo sapiens
ctggagagtgataat

SEQ ID NO: 976341 - DNA, 15 bp, Homo sapiens
tctggagagtgataa

SEQ ID NO: 976342 - DNA, 15 bp, Homo sapiens
atctggagagtgata

SEQ ID NO: 976343 - DNA, 15 bp, Homo sapiens
tatctggagagtgat

SEQ ID NO: 976344 - DNA, 15 bp, Homo sapiens
gtatctggagagtga

SEQ ID NO: 976345 - DNA, 15 bp, Homo sapiens
tgtatctggagagtg

SEQ ID NO: 976346 - DNA, 15 bp, Homo sapiens
gtgtatctggagagt

SEQ ID NO: 976347 - DNA, 15 bp, Homo sapiens
tgtgtatctggagag

SEQ ID NO: 976348 - DNA, 15 bp, Homo sapiens
atgtgtatctggaga

SEQ ID NO: 976349 - DNA, 15 bp, Homo sapiens
aatgtgtatctggag

SEQ ID NO: 976350 - DNA, 15 bp, Homo sapiens
aaatgtgtatctgga

SEQ ID NO: 976351 - DNA, 15 bp, Homo sapiens
caaatgtgtatctgg

SEQ ID NO: 976352 - DNA, 15 bp, Homo sapiens
ccaaatgtgtatctg

SEQ ID NO: 976353 - DNA, 15 bp, Homo sapiens
tccaaatgtgtatct

SEQ ID NO: 976354 - DNA, 15 bp, Homo sapiens
ctccaaatgtgtatc

SEQ ID NO: 976355 - DNA, 15 bp, Homo sapiens
cctccaaatgtgtat

SEQ ID NO: 976356 - DNA, 15 bp, Homo sapiens
tcctccaaatgtgta

SEQ ID NO: 976357 - DNA, 15 bp, Homo sapiens
ctcctccaaatgtgt

SEQ ID NO: 976358 - DNA, 15 bp, Homo sapiens
tctcctccaaatgtg

SEQ ID NO: 976359 - DNA, 15 bp, Homo sapiens
gtctcctccaaatgt

SEQ ID NO: 976360 - DNA, 15 bp, Homo sapiens
cgtctcctccaaatg

SEQ ID NO: 976361 - DNA, 15 bp, Homo sapiens
acgtctcctccaaat

SEQ ID NO: 976362 - DNA, 15 bp, Homo sapiens
tacgtctcctccaaa

SEQ ID NO: 976363 - DNA, 15 bp, Homo sapiens
ttacgtctcctccaa

SEQ ID NO: 976364 - DNA, 15 bp, Homo sapiens
attacgtctcctcca

SEQ ID NO: 976365 - DNA, 15 bp, Homo sapiens
gattacgtctcctcc

SEQ ID NO: 976366 - DNA, 15 bp, Homo sapiens
ggattacgtctcctc

SEQ ID NO: 976367 - DNA, 15 bp, Homo sapiens
tggattacgtctcct

SEQ ID NO: 976368 - DNA, 15 bp, Homo sapiens
ctggattacgtctcc

SEQ ID NO: 976369 - DNA, 15 bp, Homo sapiens
gctggattacgtctc

SEQ ID NO: 976370 - DNA, 15 bp, Homo sapiens
tgctggattacgtct

SEQ ID NO: 976371 - DNA, 15 bp, Homo sapiens
atgctggattacgtc

SEQ ID NO: 976372 - DNA, 15 bp, Homo sapiens
aatgctggattacgt

SEQ ID NO: 976373 - DNA, 15 bp, Homo sapiens
caatgctggattacg

SEQ ID NO: 976374 - DNA, 15 bp, Homo sapiens
ccaatgctggattac

SEQ ID NO: 976375 - DNA, 15 bp, Homo sapiens
tccaatgctggatta

SEQ ID NO: 976376 - DNA, 15 bp, Homo sapiens
ttccaatgctggatt

SEQ ID NO: 976377 - DNA, 15 bp, Homo sapiens
gttccaatgctggat

SEQ ID NO: 976378 - DNA, 15 bp, Homo sapiens
agttccaatgctgga

SEQ ID NO: 976379 - DNA, 15 bp, Homo sapiens
aagttccaatgctgg

SEQ ID NO: 976380 - DNA, 15 bp, Homo sapiens
gaagttccaatgctg

SEQ ID NO: 976381 - DNA, 15 bp, Homo sapiens
agaagttccaatgct

SEQ ID NO: 976382 - DNA, 15 bp, Homo sapiens
cagaagttccaatgc

SEQ ID NO: 976383 - DNA, 15 bp, Homo sapiens
tcagaagttccaatg

SEQ ID NO: 976384 - DNA, 15 bp, Homo sapiens
atcagaagttccaat

SEQ ID NO: 976385 - DNA, 15 bp, Homo sapiens
gatcagaagttccaa

SEQ ID NO: 976386 - DNA, 15 bp, Homo sapiens
agatcagaagttcca

SEQ ID NO: 976387 - DNA, 15 bp, Homo sapiens
aagatcagaagttcc

SEQ ID NO: 976388 - DNA, 15 bp, Homo sapiens
gaagatcagaagttc

SEQ ID NO: 976389 - DNA, 15 bp, Homo sapiens
tgaagatcagaagtt

SEQ ID NO: 976390 - DNA, 15 bp, Homo sapiens
ttgaagatcagaagt

SEQ ID NO: 976391 - DNA, 15 bp, Homo sapiens
cttgaagatcagaag

SEQ ID NO: 976392 - DNA, 15 bp, Homo sapiens
gcttgaagatcagaa

SEQ ID NO: 976393 - DNA, 15 bp, Homo sapiens
tgcttgaagatcaga

SEQ ID NO: 976394 - DNA, 15 bp, Homo sapiens
ctgcttgaagatcag

SEQ ID NO: 976395 - DNA, 15 bp, Homo sapiens
cctgcttgaagatca

SEQ ID NO: 976396 - DNA, 15 bp, Homo sapiens
ccctgcttgaagatc

SEQ ID NO: 976397 - DNA, 15 bp, Homo sapiens
tccctgcttgaagat

SEQ ID NO: 976398 - DNA, 15 bp, Homo sapiens
atccctgcttgaaga

SEQ ID NO: 976399 - DNA, 15 bp, Homo sapiens
aatccctgcttgaag

SEQ ID NO: 976400 - DNA, 15 bp, Homo sapiens
gaatccctgcttgaa

SEQ ID NO: 976401 - DNA, 15 bp, Homo sapiens
agaatccctgcttga

SEQ ID NO: 976402 - DNA, 15 bp, Homo sapiens
gagaatccctgcttg

SEQ ID NO: 976403 - DNA, 15 bp, Homo sapiens
tgagaatccctgctt

SEQ ID NO: 976404 - DNA, 15 bp, Homo sapiens
ttgagaatccctgct

SEQ ID NO: 976405 - DNA, 15 bp, Homo sapiens
gttgagaatccctgc

SEQ ID NO: 976406 - DNA, 15 bp, Homo sapiens
ggttgagaatccctg

SEQ ID NO: 976407 - DNA, 15 bp, Homo sapiens
aggttgagaatccct

SEQ ID NO: 976408 - DNA, 15 bp, Homo sapiens
caggttgagaatccc

SEQ ID NO: 976409 - DNA, 15 bp, Homo sapiens
acaggttgagaatcc

SEQ ID NO: 976410 - DNA, 15 bp, Homo sapiens
cacaggttgagaatc

SEQ ID NO: 976411 - DNA, 15 bp, Homo sapiens
ccacaggttgagaat

SEQ ID NO: 976412 - DNA, 15 bp, Homo sapiens
accacaggttgagaa

SEQ ID NO: 976413 - DNA, 15 bp, Homo sapiens
aaccacaggttgaga

SEQ ID NO: 976414 - DNA, 15 bp, Homo sapiens
aaaccacaggttgag

SEQ ID NO: 976415 - DNA, 15 bp, Homo sapiens
taaaccacaggttga

SEQ ID NO: 976416 - DNA, 15 bp, Homo sapiens
ctaaaccacaggttg

SEQ ID NO: 976417 - DNA, 15 bp, Homo sapiens
cctaaaccacaggtt

SEQ ID NO: 976418 - DNA, 15 bp, Homo sapiens
ccctaaaccacaggt

SEQ ID NO: 976419 - DNA, 15 bp, Homo sapiens
cccctaaaccacagg

SEQ ID NO: 976420 - DNA, 15 bp, Homo sapiens
acccctaaaccacag

SEQ ID NO: 976421 - DNA, 15 bp, Homo sapiens
aacccctaaaccaca

SEQ ID NO: 976422 - DNA, 15 bp, Homo sapiens
gaacccctaaaccac

SEQ ID NO: 976423 - DNA, 15 bp, Homo sapiens
tgaacccctaaacca

SEQ ID NO: 976424 - DNA, 15 bp, Homo sapiens
atgaacccctaaacc

SEQ ID NO: 976425 - DNA, 15 bp, Homo sapiens
gatgaacccctaaac

SEQ ID NO: 976426 - DNA, 15 bp, Homo sapiens
cgatgaacccctaaa

SEQ ID NO: 976427 - DNA, 15 bp, Homo sapiens
ccgatgaacccctaa

SEQ ID NO: 976428 - DNA, 15 bp, Homo sapiens
cccgatgaaccccta

SEQ ID NO: 976429 - DNA, 15 bp, Homo sapiens
ccccgatgaacccct

SEQ ID NO: 976430 - DNA, 15 bp, Homo sapiens
gccccgatgaacccc

SEQ ID NO: 976431 - DNA, 15 bp, Homo sapiens
agccccgatgaaccc

SEQ ID NO: 976432 - DNA, 15 bp, Homo sapiens
cagccccgatgaacc

SEQ ID NO: 976433 - DNA, 15 bp, Homo sapiens
tcagccccgatgaac

SEQ ID NO: 976434 - DNA, 15 bp, Homo sapiens
ctcagccccgatgaa

SEQ ID NO: 976435 - DNA, 15 bp, Homo sapiens
gctcagccccgatga

SEQ ID NO: 976436 - DNA, 15 bp, Homo sapiens
cgctcagccccgatg

SEQ ID NO: 976437 - DNA, 15 bp, Homo sapiens
acgctcagccccgat

SEQ ID NO: 976438 - DNA, 15 bp, Homo sapiens
cacgctcagccccga

SEQ ID NO: 976439 - DNA, 15 bp, Homo sapiens
tcacgctcagccccg

SEQ ID NO: 976440 - DNA, 15 bp, Homo sapiens
gtcacgctcagcccc

SEQ ID NO: 976441 - DNA, 15 bp, Homo sapiens
tgtcacgctcagccc

SEQ ID NO: 976442 - DNA, 15 bp, Homo sapiens
ttgtcacgctcagcc

SEQ ID NO: 976443 - DNA, 15 bp, Homo sapiens
cttgtcacgctcagc

SEQ ID NO: 976444 - DNA, 15 bp, Homo sapiens
tcttgtcacgctcag

SEQ ID NO: 976445 - DNA, 15 bp, Homo sapiens
ctcttgtcacgctca

SEQ ID NO: 976446 - DNA, 15 bp, Homo sapiens
cctcttgtcacgctc

SEQ ID NO: 976447 - DNA, 15 bp, Homo sapiens
tcctcttgtcacgct

SEQ ID NO: 976448 - DNA, 15 bp, Homo sapiens
ttcctcttgtcacgc

SEQ ID NO: 976449 - DNA, 15 bp, Homo sapiens
cttcctcttgtcacg

SEQ ID NO: 976450 - DNA, 15 bp, Homo sapiens
ccttcctcttgtcac

SEQ ID NO: 976451 - DNA, 15 bp, Homo sapiens
tccttcctcttgtca

SEQ ID NO: 976452 - DNA, 15 bp, Homo sapiens
ttccttcctcttgtc

SEQ ID NO: 976453 - DNA, 15 bp, Homo sapiens
attccttcctcttgt

SEQ ID NO: 976454 - DNA, 15 bp, Homo sapiens
cattccttcctcttg

SEQ ID NO: 976455 - DNA, 15 bp, Homo sapiens
ccattccttcctctt

SEQ ID NO: 976456 - DNA, 15 bp, Homo sapiens
cccattccttcctct

SEQ ID NO: 976457 - DNA, 15 bp, Homo sapiens
gcccattccttcctc

SEQ ID NO: 976458 - DNA, 15 bp, Homo sapiens
ggcccattccttcct

SEQ ID NO: 976459 - DNA, 15 bp, Homo sapiens
gggcccattccttcc

SEQ ID NO: 976460 - DNA, 15 bp, Homo sapiens
cgggcccattccttc

SEQ ID NO: 976461 - DNA, 15 bp, Homo sapiens
acgggcccattcctt

SEQ ID NO: 976462 - DNA, 15 bp, Homo sapiens
cacgggcccattcct

SEQ ID NO: 976463 - DNA, 15 bp, Homo sapiens
ccacgggcccattcc

SEQ ID NO: 976464 - DNA, 15 bp, Homo sapiens
cccacgggcccattc

SEQ ID NO: 976465 - DNA, 15 bp, Homo sapiens
tcccacgggcccatt

SEQ ID NO: 976466 - DNA, 15 bp, Homo sapiens
atcccacgggcccat

SEQ ID NO: 976467 - DNA, 15 bp, Homo sapiens
catcccacgggccca

SEQ ID NO: 976468 - DNA, 15 bp, Homo sapiens
gcatcccacgggccc

SEQ ID NO: 976469 - DNA, 15 bp, Homo sapiens
tgcatcccacgggcc

SEQ ID NO: 976470 - DNA, 15 bp, Homo sapiens
ctgcatcccacgggc

SEQ ID NO: 976471 - DNA, 15 bp, Homo sapiens
cctgcatcccacggg

SEQ ID NO: 976472 - DNA, 15 bp, Homo sapiens
gcctgcatcccacgg

SEQ ID NO: 976473 - DNA, 15 bp, Homo sapiens
tgcctgcatcccacg

SEQ ID NO: 976474 - DNA, 15 bp, Homo sapiens
ttgcctgcatcccac

SEQ ID NO: 976475 - DNA, 15 bp, Homo sapiens
attgcctgcatccca

SEQ ID NO: 976476 - DNA, 15 bp, Homo sapiens
cattgcctgcatccc

SEQ ID NO: 976477 - DNA, 15 bp, Homo sapiens
acattgcctgcatcc

SEQ ID NO: 976478 - DNA, 15 bp, Homo sapiens
cacattgcctgcatc

SEQ ID NO: 976479 - DNA, 15 bp, Homo sapiens
ccacattgcctgcat

SEQ ID NO: 976480 - DNA, 15 bp, Homo sapiens
cccacattgcctgca

SEQ ID NO: 976481 - DNA, 15 bp, Homo sapiens
tcccacattgcctgc

SEQ ID NO: 976482 - DNA, 15 bp, Homo sapiens
gtcccacattgcctg

SEQ ID NO: 976483 - DNA, 15 bp, Homo sapiens
agtcccacattgcct

SEQ ID NO: 976484 - DNA, 15 bp, Homo sapiens
aagtcccacattgcc

SEQ ID NO: 976485 - DNA, 15 bp, Homo sapiens
taagtcccacattgc

SEQ ID NO: 976486 - DNA, 15 bp, Homo sapiens
ttaagtcccacattg

SEQ ID NO: 976487 - DNA, 15 bp, Homo sapiens
tttaagtcccacatt

SEQ ID NO: 976488 - DNA, 15 bp, Homo sapiens
ttttaagtcccacat

SEQ ID NO: 976489 - DNA, 15 bp, Homo sapiens
cttttaagtcccaca

SEQ ID NO: 976490 - DNA, 15 bp, Homo sapiens
ccttttaagtcccac

SEQ ID NO: 976491 - DNA, 15 bp, Homo sapiens
gccttttaagtccca

SEQ ID NO: 976492 - DNA, 15 bp, Homo sapiens
ggccttttaagtccc

SEQ ID NO: 976493 - DNA, 15 bp, Homo sapiens
gggccttttaagtcc

SEQ ID NO: 976494 - DNA, 15 bp, Homo sapiens
tgggccttttaagtc

SEQ ID NO: 976495 - DNA, 15 bp, Homo sapiens
ttgggccttttaagt

SEQ ID NO: 976496 - DNA, 15 bp, Homo sapiens
cttgggccttttaag

SEQ ID NO: 976497 - DNA, 15 bp, Homo sapiens
gcttgggccttttaa

SEQ ID NO: 976498 - DNA, 15 bp, Homo sapiens
tgcttgggcctttta

SEQ ID NO: 976499 - DNA, 15 bp, Homo sapiens
gtgcttgggcctttt

SEQ ID NO: 976500 - DNA, 15 bp, Homo sapiens
agtgcttgggccttt

SEQ ID NO: 976501 - DNA, 15 bp, Homo sapiens
cagtgcttgggcctt

SEQ ID NO: 976502 - DNA, 15 bp, Homo sapiens
tcagtgcttgggcct

SEQ ID NO: 976503 - DNA, 15 bp, Homo sapiens
ttcagtgcttgggcc

SEQ ID NO: 976504 - DNA, 15 bp, Homo sapiens
tttcagtgcttgggc

SEQ ID NO: 976505 - DNA, 15 bp, Homo sapiens
ttttcagtgcttggg

SEQ ID NO: 976506 - DNA, 15 bp, Homo sapiens
attttcagtgcttgg

SEQ ID NO: 976507 - DNA, 15 bp, Homo sapiens
cattttcagtgcttg

SEQ ID NO: 976508 - DNA, 15 bp, Homo sapiens
ccattttcagtgctt

SEQ ID NO: 976509 - DNA, 15 bp, Homo sapiens
tccattttcagtgct

SEQ ID NO: 976510 - DNA, 15 bp, Homo sapiens
ttccattttcagtgc

SEQ ID NO: 976511 - DNA, 15 bp, Homo sapiens
gttccattttcagtg

SEQ ID NO: 976512 - DNA, 15 bp, Homo sapiens
ggttccattttcagt

SEQ ID NO: 976513 - DNA, 15 bp, Homo sapiens
aggttccattttcag

SEQ ID NO: 976514 - DNA, 15 bp, Homo sapiens
caggttccattttca

SEQ ID NO: 976515 - DNA, 15 bp, Homo sapiens
ccaggttccattttc

SEQ ID NO: 976516 - DNA, 15 bp, Homo sapiens
gccaggttccatttt

SEQ ID NO: 976517 - DNA, 15 bp, Homo sapiens
cgccaggttccattt

SEQ ID NO: 976518 - DNA, 15 bp, Homo sapiens
tcgccaggttccatt

SEQ ID NO: 976519 - DNA, 15 bp, Homo sapiens
ttcgccaggttccat

SEQ ID NO: 976520 - DNA, 15 bp, Homo sapiens
tttcgccaggttcca

SEQ ID NO: 976521 - DNA, 15 bp, Homo sapiens
ctttcgccaggttcc

SEQ ID NO: 976522 - DNA, 15 bp, Homo sapiens
gctttcgccaggttc

SEQ ID NO: 976523 - DNA, 15 bp, Homo sapiens
tgctttcgccaggtt

SEQ ID NO: 976524 - DNA, 15 bp, Homo sapiens
ctgctttcgccaggt

SEQ ID NO: 976525 - DNA, 15 bp, Homo sapiens
tctgctttcgccagg

SEQ ID NO: 976526 - DNA, 15 bp, Homo sapiens
ctctgctttcgccag

SEQ ID NO: 976527 - DNA, 15 bp, Homo sapiens
cctctgctttcgcca

SEQ ID NO: 976528 - DNA, 15 bp, Homo sapiens
tcctctgctttcgcc

SEQ ID NO: 976529 - DNA, 15 bp, Homo sapiens
ctcctctgctttcgc

SEQ ID NO: 976530 - DNA, 15 bp, Homo sapiens
cctcctctgctttcg

SEQ ID NO: 976531 - DNA, 15 bp, Homo sapiens
tcctcctctgctttc

SEQ ID NO: 976532 - DNA, 15 bp, Homo sapiens
ctcctcctctgcttt

SEQ ID NO: 976533 - DNA, 15 bp, Homo sapiens
tctcctcctctgctt

SEQ ID NO: 976534 - DNA, 15 bp, Homo sapiens
ttctcctcctctgct

SEQ ID NO: 976535 - DNA, 15 bp, Homo sapiens
attctcctcctctgc

SEQ ID NO: 976536 - DNA, 15 bp, Homo sapiens
cattctcctcctctg

SEQ ID NO: 976537 - DNA, 15 bp, Homo sapiens
tcattctcctcctct

SEQ ID NO: 976538 - DNA, 15 bp, Homo sapiens
ttcattctcctcctc

SEQ ID NO: 976539 - DNA, 15 bp, Homo sapiens
cttcattctcctcct

SEQ ID NO: 976540 - DNA, 15 bp, Homo sapiens
tcttcattctcctcc

SEQ ID NO: 976541 - DNA, 15 bp, Homo sapiens
ttcttcattctcctc

SEQ ID NO: 976542 - DNA, 15 bp, Homo sapiens
tttcttcattctcct

SEQ ID NO: 976543 - DNA, 15 bp, Homo sapiens
ctttcttcattctcc

SEQ ID NO: 976544 - DNA, 15 bp, Homo sapiens
tctttcttcattctc

SEQ ID NO: 976545 - DNA, 15 bp, Homo sapiens
atctttcttcattct

SEQ ID NO: 976546 - DNA, 15 bp, Homo sapiens
catctttcttcattc

SEQ ID NO: 976547 - DNA, 15 bp, Homo sapiens
ccatctttcttcatt

SEQ ID NO: 976548 - DNA, 15 bp, Homo sapiens
tccatctttcttcat

SEQ ID NO: 976549 - DNA, 15 bp, Homo sapiens
ctccatctttcttca

SEQ ID NO: 976550 - DNA, 15 bp, Homo sapiens
actccatctttcttc

SEQ ID NO: 976551 - DNA, 15 bp, Homo sapiens
gactccatctttctt

SEQ ID NO: 976552 - DNA, 15 bp, Homo sapiens
tgactccatctttct

SEQ ID NO: 976553 - DNA, 15 bp, Homo sapiens
ttgactccatctttc

SEQ ID NO: 976554 - DNA, 15 bp, Homo sapiens
tttgactccatcttt

SEQ ID NO: 976555 - DNA, 15 bp, Homo sapiens
gtttgactccatctt

SEQ ID NO: 976556 - DNA, 15 bp, Homo sapiens
tgtttgactccatct

SEQ ID NO: 976557 - DNA, 15 bp, Homo sapiens
ctgtttgactccatc

SEQ ID NO: 976558 - DNA, 15 bp, Homo sapiens
cctgtttgactccat

SEQ ID NO: 976559 - DNA, 15 bp, Homo sapiens
ccctgtttgactcca

SEQ ID NO: 976560 - DNA, 15 bp, Homo sapiens
tccctgtttgactcc

SEQ ID NO: 976561 - DNA, 15 bp, Homo sapiens
ctccctgtttgactc

SEQ ID NO: 976562 - DNA, 15 bp, Homo sapiens
gctccctgtttgact

SEQ ID NO: 976563 - DNA, 15 bp, Homo sapiens
ggctccctgtttgac

SEQ ID NO: 976564 - DNA, 15 bp, Homo sapiens
aggctccctgtttga

SEQ ID NO: 976565 - DNA, 15 bp, Homo sapiens
caggctccctgtttg

SEQ ID NO: 976566 - DNA, 15 bp, Homo sapiens
ccaggctccctgttt

SEQ ID NO: 976567 - DNA, 15 bp, Homo sapiens
tccaggctccctgtt

SEQ ID NO: 976568 - DNA, 15 bp, Homo sapiens
ctccaggctccctgt

SEQ ID NO: 976569 - DNA, 15 bp, Homo sapiens
cctccaggctccctg

SEQ ID NO: 976570 - DNA, 15 bp, Homo sapiens
ccctccaggctccct

SEQ ID NO: 976571 - DNA, 15 bp, Homo sapiens
tccctccaggctccc

SEQ ID NO: 976572 - DNA, 15 bp, Homo sapiens
ctccctccaggctcc

SEQ ID NO: 976573 - DNA, 15 bp, Homo sapiens
tctccctccaggctc

SEQ ID NO: 976574 - DNA, 15 bp, Homo sapiens
gtctccctccaggct

SEQ ID NO: 976575 - DNA, 15 bp, Homo sapiens
ggtctccctccaggc

SEQ ID NO: 976576 - DNA, 15 bp, Homo sapiens
aggtctccctccagg

SEQ ID NO: 976577 - DNA, 15 bp, Homo sapiens
aaggtctccctccag

SEQ ID NO: 976578 - DNA, 15 bp, Homo sapiens
caaggtctccctcca

SEQ ID NO: 976579 - DNA, 15 bp, Homo sapiens
tcaaggtctccctcc

SEQ ID NO: 976580 - DNA, 15 bp, Homo sapiens
atcaaggtctccctc

SEQ ID NO: 976581 - DNA, 15 bp, Homo sapiens
tatcaaggtctccct

SEQ ID NO: 976582 - DNA, 15 bp, Homo sapiens
gtatcaaggtctccc

SEQ ID NO: 976583 - DNA, 15 bp, Homo sapiens
agtatcaaggtctcc

SEQ ID NO: 976584 - DNA, 15 bp, Homo sapiens
aagtatcaaggtctc

SEQ ID NO: 976585 - DNA, 15 bp, Homo sapiens
aaagtatcaaggtct

SEQ ID NO: 976586 - DNA, 15 bp, Homo sapiens
gaaagtatcaaggtc

SEQ ID NO: 976587 - DNA, 15 bp, Homo sapiens
tgaaagtatcaaggt

SEQ ID NO: 976588 - DNA, 15 bp, Homo sapiens
ttgaaagtatcaagg

SEQ ID NO: 976589 - DNA, 15 bp, Homo sapiens
tttgaaagtatcaag

SEQ ID NO: 976590 - DNA, 15 bp, Homo sapiens
atttgaaagtatcaa

SEQ ID NO: 976591 - DNA, 15 bp, Homo sapiens
catttgaaagtatca

SEQ ID NO: 976592 - DNA, 15 bp, Homo sapiens
gcatttgaaagtatc

SEQ ID NO: 976593 - DNA, 15 bp, Homo sapiens
ggcatttgaaagtat

SEQ ID NO: 976594 - DNA, 15 bp, Homo sapiens
aggcatttgaaagta

SEQ ID NO: 976595 - DNA, 15 bp, Homo sapiens
caggcatttgaaagt

SEQ ID NO: 976596 - DNA, 15 bp, Homo sapiens
tcaggcatttgaaag

SEQ ID NO: 976597 - DNA, 15 bp, Homo sapiens
ctcaggcatttgaaa

SEQ ID NO: 976598 - DNA, 15 bp, Homo sapiens
cctcaggcatttgaa

SEQ ID NO: 976599 - DNA, 15 bp, Homo sapiens
ccctcaggcatttga

SEQ ID NO: 976600 - DNA, 15 bp, Homo sapiens
cccctcaggcatttg

SEQ ID NO: 976601 - DNA, 15 bp, Homo sapiens
gcccctcaggcattt

SEQ ID NO: 976602 - DNA, 15 bp, Homo sapiens
agcccctcaggcatt

SEQ ID NO: 976603 - DNA, 15 bp, Homo sapiens
gagcccctcaggcat

SEQ ID NO: 976604 - DNA, 15 bp, Homo sapiens
tgagcccctcaggca

SEQ ID NO: 976605 - DNA, 15 bp, Homo sapiens
atgagcccctcaggc

SEQ ID NO: 976606 - DNA, 15 bp, Homo sapiens
gatgagcccctcagg

SEQ ID NO: 976607 - DNA, 15 bp, Homo sapiens
cgatgagcccctcag

SEQ ID NO: 976608 - DNA, 15 bp, Homo sapiens
tcgatgagcccctca

SEQ ID NO: 976609 - DNA, 15 bp, Homo sapiens
gtcgatgagcccctc

SEQ ID NO: 976610 - DNA, 15 bp, Homo sapiens
cgtcgatgagcccct

SEQ ID NO: 976611 - DNA, 15 bp, Homo sapiens
gcgtcgatgagcccc

SEQ ID NO: 976612 - DNA, 15 bp, Homo sapiens
ggcgtcgatgagccc

SEQ ID NO: 976613 - DNA, 15 bp, Homo sapiens
aggcgtcgatgagcc

SEQ ID NO: 976614 - DNA, 15 bp, Homo sapiens
caggcgtcgatgagc

SEQ ID NO: 976615 - DNA, 15 bp, Homo sapiens
acaggcgtcgatgag

SEQ ID NO: 976616 - DNA, 15 bp, Homo sapiens
cacaggcgtcgatga

SEQ ID NO: 976617 - DNA, 15 bp, Homo sapiens
tcacaggcgtcgatg

SEQ ID NO: 976618 - DNA, 15 bp, Homo sapiens
gtcacaggcgtcgat

SEQ ID NO: 976619 - DNA, 15 bp, Homo sapiens
tgtcacaggcgtcga

SEQ ID NO: 976620 - DNA, 15 bp, Homo sapiens
ctgtcacaggcgtcg

SEQ ID NO: 976621 - DNA, 15 bp, Homo sapiens
cctgtcacaggcgtc

SEQ ID NO: 976622 - DNA, 15 bp, Homo sapiens
ccctgtcacaggcgt

SEQ ID NO: 976623 - DNA, 15 bp, Homo sapiens
tccctgtcacaggcg

SEQ ID NO: 976624 - DNA, 15 bp, Homo sapiens
ctccctgtcacaggc

SEQ ID NO: 976625 - DNA, 15 bp, Homo sapiens
tctccctgtcacagg

SEQ ID NO: 976626 - DNA, 15 bp, Homo sapiens
ttctccctgtcacag

SEQ ID NO: 976627 - DNA, 15 bp, Homo sapiens
tttctccctgtcaca

SEQ ID NO: 976628 - DNA, 15 bp, Homo sapiens
ctttctccctgtcac

SEQ ID NO: 976629 - DNA, 15 bp, Homo sapiens
cctttctccctgtca

SEQ ID NO: 976630 - DNA, 15 bp, Homo sapiens
tcctttctccctgtc

SEQ ID NO: 976631 - DNA, 15 bp, Homo sapiens
atcctttctccctgt

SEQ ID NO: 976632 - DNA, 15 bp, Homo sapiens
tatcctttctccctg

SEQ ID NO: 976633 - DNA, 15 bp, Homo sapiens
gtatcctttctccct

SEQ ID NO: 976634 - DNA, 15 bp, Homo sapiens
agtatcctttctccc

SEQ ID NO: 976635 - DNA, 15 bp, Homo sapiens
aagtatcctttctcc

SEQ ID NO: 976636 - DNA, 15 bp, Homo sapiens
gaagtatcctttctc

SEQ ID NO: 976637 - DNA, 15 bp, Homo sapiens
agaagtatcctttct

SEQ ID NO: 976638 - DNA, 15 bp, Homo sapiens
cagaagtatcctttc

SEQ ID NO: 976639 - DNA, 15 bp, Homo sapiens
tcagaagtatccttt

SEQ ID NO: 976640 - DNA, 15 bp, Homo sapiens
ttcagaagtatcctt

SEQ ID NO: 976641 - DNA, 15 bp, Homo sapiens
gttcagaagtatcct

SEQ ID NO: 976642 - DNA, 15 bp, Homo sapiens
tgttcagaagtatcc

SEQ ID NO: 976643 - DNA, 15 bp, Homo sapiens
ttgttcagaagtatc

SEQ ID NO: 976644 - DNA, 15 bp, Homo sapiens
cttgttcagaagtat

SEQ ID NO: 976645 - DNA, 15 bp, Homo sapiens
ccttgttcagaagta

SEQ ID NO: 976646 - DNA, 15 bp, Homo sapiens
tccttgttcagaagt

SEQ ID NO: 976647 - DNA, 15 bp, Homo sapiens
ctccttgttcagaag

SEQ ID NO: 976648 - DNA, 15 bp, Homo sapiens
gctccttgttcagaa

SEQ ID NO: 976649 - DNA, 15 bp, Homo sapiens
ggctccttgttcaga

SEQ ID NO: 976650 - DNA, 15 bp, Homo sapiens
aggctccttgttcag

SEQ ID NO: 976651 - DNA, 15 bp, Homo sapiens
gaggctccttgttca

SEQ ID NO: 976652 - DNA, 15 bp, Homo sapiens
ggaggctccttgttc

SEQ ID NO: 976653 - DNA, 15 bp, Homo sapiens
tggaggctccttgtt

SEQ ID NO: 976654 - DNA, 15 bp, Homo sapiens
ttggaggctccttgt

SEQ ID NO: 976655 - DNA, 15 bp, Homo sapiens
cttggaggctccttg

SEQ ID NO: 976656 - DNA, 15 bp, Homo sapiens
gcttggaggctcctt

SEQ ID NO: 976657 - DNA, 15 bp, Homo sapiens
tgcttggaggctcct

SEQ ID NO: 976658 - DNA, 15 bp, Homo sapiens
ttgcttggaggctcc

SEQ ID NO: 976659 - DNA, 15 bp, Homo sapiens
tttgcttggaggctc

SEQ ID NO: 976660 - DNA, 15 bp, Homo sapiens
atttgcttggaggct

SEQ ID NO: 976661 - DNA, 15 bp, Homo sapiens
gatttgcttggaggc

SEQ ID NO: 976662 - DNA, 15 bp, Homo sapiens
tgatttgcttggagg

SEQ ID NO: 976663 - DNA, 15 bp, Homo sapiens
atgatttgcttggag

SEQ ID NO: 976664 - DNA, 15 bp, Homo sapiens
gatgatttgcttgga

SEQ ID NO: 976665 - DNA, 15 bp, Homo sapiens
ggatgatttgcttgg

SEQ ID NO: 976666 - DNA, 15 bp, Homo sapiens
tggatgatttgcttg

SEQ ID NO: 976667 - DNA, 15 bp, Homo sapiens
atggatgatttgctt

SEQ ID NO: 976668 - DNA, 15 bp, Homo sapiens
aatggatgatttgct

SEQ ID NO: 976669 - DNA, 15 bp, Homo sapiens
caatggatgatttgc

SEQ ID NO: 976670 - DNA, 15 bp, Homo sapiens
gcaatggatgatttg

SEQ ID NO: 976671 - DNA, 15 bp, Homo sapiens
agcaatggatgattt

SEQ ID NO: 976672 - DNA, 15 bp, Homo sapiens
gagcaatggatgatt

SEQ ID NO: 976673 - DNA, 15 bp, Homo sapiens
tgagcaatggatgat

SEQ ID NO: 976674 - DNA, 15 bp, Homo sapiens
atgagcaatggatga

SEQ ID NO: 976675 - DNA, 15 bp, Homo sapiens
gatgagcaatggatg

SEQ ID NO: 976676 - DNA, 15 bp, Homo sapiens
ggatgagcaatggat

SEQ ID NO: 976677 - DNA, 15 bp, Homo sapiens
aggatgagcaatgga

SEQ ID NO: 976678 - DNA, 15 bp, Homo sapiens
taggatgagcaatgg

SEQ ID NO: 976679 - DNA, 15 bp, Homo sapiens
ctaggatgagcaatg

SEQ ID NO: 976680 - DNA, 15 bp, Homo sapiens
cctaggatgagcaat

SEQ ID NO: 976681 - DNA, 15 bp, Homo sapiens
tcctaggatgagcaa

SEQ ID NO: 976682 - DNA, 15 bp, Homo sapiens
ttcctaggatgagca

SEQ ID NO: 976683 - DNA, 15 bp, Homo sapiens
cttcctaggatgagc

SEQ ID NO: 976684 - DNA, 15 bp, Homo sapiens
tcttcctaggatgag

SEQ ID NO: 976685 - DNA, 15 bp, Homo sapiens
gtcttcctaggatga

SEQ ID NO: 976686 - DNA, 15 bp, Homo sapiens
cgtcttcctaggatg

SEQ ID NO: 976687 - DNA, 15 bp, Homo sapiens
ccgtcttcctaggat

SEQ ID NO: 976688 - DNA, 15 bp, Homo sapiens
cccgtcttcctagga

SEQ ID NO: 976689 - DNA, 15 bp, Homo sapiens
acccgtcttcctagg

SEQ ID NO: 976690 - DNA, 15 bp, Homo sapiens
aacccgtcttcctag

SEQ ID NO: 976691 - DNA, 15 bp, Homo sapiens
caacccgtcttccta

SEQ ID NO: 976692 - DNA, 15 bp, Homo sapiens
tcaacccgtcttcct

SEQ ID NO: 976693 - DNA, 15 bp, Homo sapiens
ctcaacccgtcttcc

SEQ ID NO: 976694 - DNA, 15 bp, Homo sapiens
tctcaacccgtcttc

SEQ ID NO: 976695 - DNA, 15 bp, Homo sapiens
ttctcaacccgtctt

SEQ ID NO: 976696 - DNA, 15 bp, Homo sapiens
attctcaacccgtct

SEQ ID NO: 976697 - DNA, 15 bp, Homo sapiens
gattctcaacccgtc

SEQ ID NO: 976698 - DNA, 15 bp, Homo sapiens
ggattctcaacccgt

SEQ ID NO: 976699 - DNA, 15 bp, Homo sapiens
gggattctcaacccg

SEQ ID NO: 976700 - DNA, 15 bp, Homo sapiens
agggattctcaaccc

SEQ ID NO: 976701 - DNA, 15 bp, Homo sapiens
tagggattctcaacc

SEQ ID NO: 976702 - DNA, 15 bp, Homo sapiens
ttagggattctcaac

SEQ ID NO: 976703 - DNA, 15 bp, Homo sapiens
attagggattctcaa

SEQ ID NO: 976704 - DNA, 15 bp, Homo sapiens
aattagggattctca

SEQ ID NO: 976705 - DNA, 15 bp, Homo sapiens
aaattagggattctc

SEQ ID NO: 976706 - DNA, 15 bp, Homo sapiens
caaattagggattct

SEQ ID NO: 976707 - DNA, 15 bp, Homo sapiens
tcaaattagggattc

SEQ ID NO: 976708 - DNA, 15 bp, Homo sapiens
ctcaaattagggatt

SEQ ID NO: 976709 - DNA, 15 bp, Homo sapiens
cctcaaattagggat

SEQ ID NO: 976710 - DNA, 15 bp, Homo sapiens
ccctcaaattaggga

SEQ ID NO: 976711 - DNA, 15 bp, Homo sapiens
accctcaaattaggg

SEQ ID NO: 976712 - DNA, 15 bp, Homo sapiens
gaccctcaaattagg

SEQ ID NO: 976713 - DNA, 15 bp, Homo sapiens
tgaccctcaaattag

SEQ ID NO: 976714 - DNA, 15 bp, Homo sapiens
ctgaccctcaaatta

SEQ ID NO: 976715 - DNA, 15 bp, Homo sapiens
actgaccctcaaatt

SEQ ID NO: 976716 - DNA, 15 bp, Homo sapiens
aactgaccctcaaat

SEQ ID NO: 976717 - DNA, 15 bp, Homo sapiens
gaactgaccctcaaa

SEQ ID NO: 976718 - DNA, 15 bp, Homo sapiens
ggaactgaccctcaa

SEQ ID NO: 976719 - DNA, 15 bp, Homo sapiens
aggaactgaccctca

SEQ ID NO: 976720 - DNA, 15 bp, Homo sapiens
caggaactgaccctc

SEQ ID NO: 976721 - DNA, 15 bp, Homo sapiens
gcaggaactgaccct

SEQ ID NO: 976722 - DNA, 15 bp, Homo sapiens
tgcaggaactgaccc

SEQ ID NO: 976723 - DNA, 15 bp, Homo sapiens
ctgcaggaactgacc

SEQ ID NO: 976724 - DNA, 15 bp, Homo sapiens
tctgcaggaactgac

SEQ ID NO: 976725 - DNA, 15 bp, Homo sapiens
ttctgcaggaactga

SEQ ID NO: 976726 - DNA, 15 bp, Homo sapiens
cttctgcaggaactg

SEQ ID NO: 976727 - DNA, 15 bp, Homo sapiens
acttctgcaggaact

SEQ ID NO: 976728 - DNA, 15 bp, Homo sapiens
cacttctgcaggaac

SEQ ID NO: 976729 - DNA, 15 bp, Homo sapiens
gcacttctgcaggaa

SEQ ID NO: 976730 - DNA, 15 bp, Homo sapiens
ggcacttctgcagga

SEQ ID NO: 976731 - DNA, 15 bp, Homo sapiens
gggcacttctgcagg

SEQ ID NO: 976732 - DNA, 15 bp, Homo sapiens
agggcacttctgcag

SEQ ID NO: 976733 - DNA, 15 bp, Homo sapiens
aagggcacttctgca

SEQ ID NO: 976734 - DNA, 15 bp, Homo sapiens
aaagggcacttctgc

SEQ ID NO: 976735 - DNA, 15 bp, Homo sapiens
caaagggcacttctg

SEQ ID NO: 976736 - DNA, 15 bp, Homo sapiens
gcaaagggcacttct

SEQ ID NO: 976737 - DNA, 15 bp, Homo sapiens
ggcaaagggcacttc

SEQ ID NO: 976738 - DNA, 15 bp, Homo sapiens
aggcaaagggcactt

SEQ ID NO: 976739 - DNA, 15 bp, Homo sapiens
gaggcaaagggcact

SEQ ID NO: 976740 - DNA, 15 bp, Homo sapiens
ggaggcaaagggcac

SEQ ID NO: 976741 - DNA, 15 bp, Homo sapiens
tggaggcaaagggca

SEQ ID NO: 976742 - DNA, 15 bp, Homo sapiens
gtggaggcaaagggc

SEQ ID NO: 976743 - DNA, 15 bp, Homo sapiens
agtggaggcaaaggg

SEQ ID NO: 976744 - DNA, 15 bp, Homo sapiens
gagtggaggcaaagg

SEQ ID NO: 976745 - DNA, 15 bp, Homo sapiens
tgagtggaggcaaag

SEQ ID NO: 976746 - DNA, 15 bp, Homo sapiens
ttgagtggaggcaaa

SEQ ID NO: 976747 - DNA, 15 bp, Homo sapiens
attgagtggaggcaa

SEQ ID NO: 976748 - DNA, 15 bp, Homo sapiens
cattgagtggaggca

SEQ ID NO: 976749 - DNA, 15 bp, Homo sapiens
gcattgagtggaggc

SEQ ID NO: 976750 - DNA, 15 bp, Homo sapiens
ggcattgagtggagg

SEQ ID NO: 976751 - DNA, 15 bp, Homo sapiens
aggcattgagtggag

SEQ ID NO: 976752 - DNA, 15 bp, Homo sapiens
gaggcattgagtgga

SEQ ID NO: 976753 - DNA, 15 bp, Homo sapiens
tgaggcattgagtgg

SEQ ID NO: 976754 - DNA, 15 bp, Homo sapiens
ttgaggcattgagtg

SEQ ID NO: 976755 - DNA, 15 bp, Homo sapiens
attgaggcattgagt

SEQ ID NO: 976756 - DNA, 15 bp, Homo sapiens
aattgaggcattgag

SEQ ID NO: 976757 - DNA, 15 bp, Homo sapiens
aaattgaggcattga

SEQ ID NO: 976758 - DNA, 15 bp, Homo sapiens
caaattgaggcattg

SEQ ID NO: 976759 - DNA, 15 bp, Homo sapiens
acaaattgaggcatt

SEQ ID NO: 976760 - DNA, 15 bp, Homo sapiens
aacaaattgaggcat

SEQ ID NO: 976761 - DNA, 15 bp, Homo sapiens
aaacaaattgaggca

SEQ ID NO: 976762 - DNA, 15 bp, Homo sapiens
aaaacaaattgaggc

SEQ ID NO: 976763 - DNA, 15 bp, Homo sapiens
gaaaacaaattgagg

SEQ ID NO: 976764 - DNA, 15 bp, Homo sapiens
agaaaacaaattgag

SEQ ID NO: 976765 - DNA, 15 bp, Homo sapiens
cagaaaacaaattga

SEQ ID NO: 976766 - DNA, 15 bp, Homo sapiens
gcagaaaacaaattg

SEQ ID NO: 976767 - DNA, 15 bp, Homo sapiens
tgcagaaaacaaatt

SEQ ID NO: 976768 - DNA, 15 bp, Homo sapiens
atgcagaaaacaaat

SEQ ID NO: 976769 - DNA, 15 bp, Homo sapiens
catgcagaaaacaaa

SEQ ID NO: 976770 - DNA, 15 bp, Homo sapiens
tcatgcagaaaacaa

SEQ ID NO: 976771 - DNA, 15 bp, Homo sapiens
gtcatgcagaaaaca

SEQ ID NO: 976772 - DNA, 15 bp, Homo sapiens
agtcatgcagaaaac

SEQ ID NO: 976773 - DNA, 15 bp, Homo sapiens
cagtcatgcagaaaa

SEQ ID NO: 976774 - DNA, 15 bp, Homo sapiens
tcagtcatgcagaaa

SEQ ID NO: 976775 - DNA, 15 bp, Homo sapiens
ctcagtcatgcagaa

SEQ ID NO: 976776 - DNA, 15 bp, Homo sapiens
tctcagtcatgcaga

SEQ ID NO: 976777 - DNA, 15 bp, Homo sapiens
ctctcagtcatgcag

SEQ ID NO: 976778 - DNA, 15 bp, Homo sapiens
actctcagtcatgca

SEQ ID NO: 976779 - DNA, 15 bp, Homo sapiens
gactctcagtcatgc

SEQ ID NO: 976780 - DNA, 15 bp, Homo sapiens
agactctcagtcatg

SEQ ID NO: 976781 - DNA, 15 bp, Homo sapiens
gagactctcagtcat

SEQ ID NO: 976782 - DNA, 15 bp, Homo sapiens
tgagactctcagtca

SEQ ID NO: 976783 - DNA, 15 bp, Homo sapiens
ctgagactctcagtc

SEQ ID NO: 976784 - DNA, 15 bp, Homo sapiens
actgagactctcagt

SEQ ID NO: 976785 - DNA, 15 bp, Homo sapiens
cactgagactctcag

SEQ ID NO: 976786 - DNA, 15 bp, Homo sapiens
acactgagactctca

SEQ ID NO: 976787 - DNA, 15 bp, Homo sapiens
aacactgagactctc

SEQ ID NO: 976788 - DNA, 15 bp, Homo sapiens
caacactgagactct

SEQ ID NO: 976789 - DNA, 15 bp, Homo sapiens
cttaaaatagtgcct

SEQ ID NO: 976790 - DNA, 15 bp, Homo sapiens
ttaaaatagtgccta

SEQ ID NO: 976791 - DNA, 15 bp, Homo sapiens
taaaatagtgcctag

SEQ ID NO: 976792 - DNA, 15 bp, Homo sapiens
aaaatagtgcctagc

SEQ ID NO: 976793 - DNA, 15 bp, Homo sapiens
aaatagtgcctagca

SEQ ID NO: 976794 - DNA, 15 bp, Homo sapiens
aatagtgcctagcac

SEQ ID NO: 976795 - DNA, 15 bp, Homo sapiens
atagtgcctagcaca

SEQ ID NO: 976796 - DNA, 15 bp, Homo sapiens
tagtgcctagcacag

SEQ ID NO: 976797 - DNA, 15 bp, Homo sapiens
agtgcctagcacaga

SEQ ID NO: 976798 - DNA, 15 bp, Homo sapiens
gtgcctagcacagaa

SEQ ID NO: 976799 - DNA, 15 bp, Homo sapiens
tgcctagcacagaag

SEQ ID NO: 976800 - DNA, 15 bp, Homo sapiens
gcctagcacagaaga

SEQ ID NO: 976801 - DNA, 15 bp, Homo sapiens
cctagcacagaagag

SEQ ID NO: 976802 - DNA, 15 bp, Homo sapiens
ctagcacagaagagg

SEQ ID NO: 976803 - DNA, 15 bp, Homo sapiens
tagcacagaagaggt

SEQ ID NO: 976804 - DNA, 15 bp, Homo sapiens
agcacagaagaggtg

SEQ ID NO: 976805 - DNA, 15 bp, Homo sapiens
gcacagaagaggtgc

SEQ ID NO: 976806 - DNA, 15 bp, Homo sapiens
cacagaagaggtgct

SEQ ID NO: 976807 - DNA, 15 bp, Homo sapiens
acagaagaggtgctc

SEQ ID NO: 976808 - DNA, 15 bp, Homo sapiens
cagaagaggtgctca

SEQ ID NO: 976809 - DNA, 15 bp, Homo sapiens
agaagaggtgctcaa

SEQ ID NO: 976810 - DNA, 15 bp, Homo sapiens
gaagaggtgctcaat

SEQ ID NO: 976811 - DNA, 15 bp, Homo sapiens
aagaggtgctcaatc

SEQ ID NO: 976812 - DNA, 15 bp, Homo sapiens
agaggtgctcaatca

SEQ ID NO: 976813 - DNA, 15 bp, Homo sapiens
gaggtgctcaatcag

SEQ ID NO: 976814 - DNA, 15 bp, Homo sapiens
aggtgctcaatcagt

SEQ ID NO: 976815 - DNA, 15 bp, Homo sapiens
ggtgctcaatcagtg

SEQ ID NO: 976816 - DNA, 15 bp, Homo sapiens
gtgctcaatcagtgt

SEQ ID NO: 976817 - DNA, 15 bp, Homo sapiens
tgctcaatcagtgtt

SEQ ID NO: 976818 - DNA, 15 bp, Homo sapiens
gctcaatcagtgttt

SEQ ID NO: 976819 - DNA, 15 bp, Homo sapiens
ctcaatcagtgtttg

SEQ ID NO: 976820 - DNA, 15 bp, Homo sapiens
tcaatcagtgtttgc

SEQ ID NO: 976821 - DNA, 15 bp, Homo sapiens
caatcagtgtttgct

SEQ ID NO: 976822 - DNA, 15 bp, Homo sapiens
aatcagtgtttgcta

SEQ ID NO: 976823 - DNA, 15 bp, Homo sapiens
atcagtgtttgctaa

SEQ ID NO: 976824 - DNA, 15 bp, Homo sapiens
tcagtgtttgctaaa

SEQ ID NO: 976825 - DNA, 15 bp, Homo sapiens
cagtgtttgctaaac

SEQ ID NO: 976826 - DNA, 15 bp, Homo sapiens
agtgtttgctaaacg

SEQ ID NO: 976827 - DNA, 15 bp, Homo sapiens
gtgtttgctaaacga

SEQ ID NO: 976828 - DNA, 15 bp, Homo sapiens
tgtttgctaaacgaa

SEQ ID NO: 976829 - DNA, 15 bp, Homo sapiens
gtttgctaaacgaaa

SEQ ID NO: 976830 - DNA, 15 bp, Homo sapiens
tttgctaaacgaaat

SEQ ID NO: 976831 - DNA, 15 bp, Homo sapiens
ttgctaaacgaaata

SEQ ID NO: 976832 - DNA, 15 bp, Homo sapiens
tgctaaacgaaataa

SEQ ID NO: 976833 - DNA, 15 bp, Homo sapiens
gctaaacgaaataat

SEQ ID NO: 976834 - DNA, 15 bp, Homo sapiens
ctaaacgaaataatt

SEQ ID NO: 976835 - DNA, 15 bp, Homo sapiens
taaacgaaataatta

SEQ ID NO: 976836 - DNA, 15 bp, Homo sapiens
aaacgaaataattag

SEQ ID NO: 976837 - DNA, 15 bp, Homo sapiens
aacgaaataattagt

SEQ ID NO: 976838 - DNA, 15 bp, Homo sapiens
acgaaataattagtc

SEQ ID NO: 976839 - DNA, 15 bp, Homo sapiens
cgaaataattagtca

SEQ ID NO: 976840 - DNA, 15 bp, Homo sapiens
gaaataattagtcac

SEQ ID NO: 976841 - DNA, 15 bp, Homo sapiens
aaataattagtcaca

SEQ ID NO: 976842 - DNA, 15 bp, Homo sapiens
aataattagtcacat

SEQ ID NO: 976843 - DNA, 15 bp, Homo sapiens
ataattagtcacatt

SEQ ID NO: 976844 - DNA, 15 bp, Homo sapiens
taattagtcacattt

SEQ ID NO: 976845 - DNA, 15 bp, Homo sapiens
aattagtcacatttc

SEQ ID NO: 976846 - DNA, 15 bp, Homo sapiens
attagtcacatttca

SEQ ID NO: 976847 - DNA, 15 bp, Homo sapiens
ttagtcacatttcaa

SEQ ID NO: 976848 - DNA, 15 bp, Homo sapiens
tagtcacatttcaag

SEQ ID NO: 976849 - DNA, 15 bp, Homo sapiens
agtcacatttcaagc

SEQ ID NO: 976850 - DNA, 15 bp, Homo sapiens
gtcacatttcaagca

SEQ ID NO: 976851 - DNA, 15 bp, Homo sapiens
tcacatttcaagcag

SEQ ID NO: 976852 - DNA, 15 bp, Homo sapiens
cacatttcaagcagg

SEQ ID NO: 976853 - DNA, 15 bp, Homo sapiens
acatttcaagcagga

SEQ ID NO: 976854 - DNA, 15 bp, Homo sapiens
catttcaagcaggat

SEQ ID NO: 976855 - DNA, 15 bp, Homo sapiens
atttcaagcaggatg

SEQ ID NO: 976856 - DNA, 15 bp, Homo sapiens
tttcaagcaggatga

SEQ ID NO: 976857 - DNA, 15 bp, Homo sapiens
ttcaagcaggatgac

SEQ ID NO: 976858 - DNA, 15 bp, Homo sapiens
tcaagcaggatgact

SEQ ID NO: 976859 - DNA, 15 bp, Homo sapiens
caagcaggatgacta

SEQ ID NO: 976860 - DNA, 15 bp, Homo sapiens
aagcaggatgactaa

SEQ ID NO: 976861 - DNA, 15 bp, Homo sapiens
agcaggatgactaaa

SEQ ID NO: 976862 - DNA, 15 bp, Homo sapiens
gcaggatgactaaat

SEQ ID NO: 976863 - DNA, 15 bp, Homo sapiens
caggatgactaaatg

SEQ ID NO: 976864 - DNA, 15 bp, Homo sapiens
aggatgactaaatga

SEQ ID NO: 976865 - DNA, 15 bp, Homo sapiens
ggatgactaaatgaa

SEQ ID NO: 976866 - DNA, 15 bp, Homo sapiens
gatgactaaatgaag

SEQ ID NO: 976867 - DNA, 15 bp, Homo sapiens
atgactaaatgaaga

SEQ ID NO: 976868 - DNA, 15 bp, Homo sapiens
tgactaaatgaagaa

SEQ ID NO: 976869 - DNA, 15 bp, Homo sapiens
gactaaatgaagaat

SEQ ID NO: 976870 - DNA, 15 bp, Homo sapiens
actaaatgaagaata

SEQ ID NO: 976871 - DNA, 15 bp, Homo sapiens
ctaaatgaagaatag

SEQ ID NO: 976872 - DNA, 15 bp, Homo sapiens
taaatgaagaataga

SEQ ID NO: 976873 - DNA, 15 bp, Homo sapiens
aaatgaagaatagaa

SEQ ID NO: 976874 - DNA, 15 bp, Homo sapiens
aatgaagaatagaat

SEQ ID NO: 976875 - DNA, 15 bp, Homo sapiens
atgaagaatagaatc

SEQ ID NO: 976876 - DNA, 15 bp, Homo sapiens
tgaagaatagaatct

SEQ ID NO: 976877 - DNA, 15 bp, Homo sapiens
gaagaatagaatcta

SEQ ID NO: 976878 - DNA, 15 bp, Homo sapiens
aagaatagaatctag

SEQ ID NO: 976879 - DNA, 15 bp, Homo sapiens
agaatagaatctagg

SEQ ID NO: 976880 - DNA, 15 bp, Homo sapiens
gaatagaatctaggc

SEQ ID NO: 976881 - DNA, 15 bp, Homo sapiens
aatagaatctaggca

SEQ ID NO: 976882 - DNA, 15 bp, Homo sapiens
atagaatctaggcag

SEQ ID NO: 976883 - DNA, 15 bp, Homo sapiens
tagaatctaggcaga

SEQ ID NO: 976884 - DNA, 15 bp, Homo sapiens
agaatctaggcagat

SEQ ID NO: 976885 - DNA, 15 bp, Homo sapiens
gaatctaggcagata

SEQ ID NO: 976886 - DNA, 15 bp, Homo sapiens
aatctaggcagatac

SEQ ID NO: 976887 - DNA, 15 bp, Homo sapiens
atctaggcagatact

SEQ ID NO: 976888 - DNA, 15 bp, Homo sapiens
tctaggcagatactc

SEQ ID NO: 976889 - DNA, 15 bp, Homo sapiens
ctaggcagatactct

SEQ ID NO: 976890 - DNA, 15 bp, Homo sapiens
taggcagatactctg

SEQ ID NO: 976891 - DNA, 15 bp, Homo sapiens
aggcagatactctgg

SEQ ID NO: 976892 - DNA, 15 bp, Homo sapiens
ggcagatactctgga

SEQ ID NO: 976893 - DNA, 15 bp, Homo sapiens
gcagatactctggaa

SEQ ID NO: 976894 - DNA, 15 bp, Homo sapiens
cagatactctggaag

SEQ ID NO: 976895 - DNA, 15 bp, Homo sapiens
agatactctggaaga

SEQ ID NO: 976896 - DNA, 15 bp, Homo sapiens
gatactctggaagag

SEQ ID NO: 976897 - DNA, 15 bp, Homo sapiens
atactctggaagagt

SEQ ID NO: 976898 - DNA, 15 bp, Homo sapiens
tactctggaagagtg

SEQ ID NO: 976899 - DNA, 15 bp, Homo sapiens
actctggaagagtgg

SEQ ID NO: 976900 - DNA, 15 bp, Homo sapiens
ctctggaagagtggc

SEQ ID NO: 976901 - DNA, 15 bp, Homo sapiens
tctggaagagtggct

SEQ ID NO: 976902 - DNA, 15 bp, Homo sapiens
ctggaagagtggctg

SEQ ID NO: 976903 - DNA, 15 bp, Homo sapiens
tggaagagtggctgt

SEQ ID NO: 976904 - DNA, 15 bp, Homo sapiens
ggaagagtggctgtg

SEQ ID NO: 976905 - DNA, 15 bp, Homo sapiens
gaagagtggctgtga

SEQ ID NO: 976906 - DNA, 15 bp, Homo sapiens
aagagtggctgtgag

SEQ ID NO: 976907 - DNA, 15 bp, Homo sapiens
agagtggctgtgagt

SEQ ID NO: 976908 - DNA, 15 bp, Homo sapiens
gagtggctgtgagtc

SEQ ID NO: 976909 - DNA, 15 bp, Homo sapiens
agtggctgtgagtca

SEQ ID NO: 976910 - DNA, 15 bp, Homo sapiens
gtggctgtgagtcat

SEQ ID NO: 976911 - DNA, 15 bp, Homo sapiens
tggctgtgagtcatt

SEQ ID NO: 976912 - DNA, 15 bp, Homo sapiens
ggctgtgagtcattc

SEQ ID NO: 976913 - DNA, 15 bp, Homo sapiens
gctgtgagtcattca

SEQ ID NO: 976914 - DNA, 15 bp, Homo sapiens
ctgtgagtcattcat

SEQ ID NO: 976915 - DNA, 15 bp, Homo sapiens
tgtgagtcattcata

SEQ ID NO: 976916 - DNA, 15 bp, Homo sapiens
gtgagtcattcatat

SEQ ID NO: 976917 - DNA, 15 bp, Homo sapiens
tgagtcattcatatc

SEQ ID NO: 976918 - DNA, 15 bp, Homo sapiens
gagtcattcatatct

SEQ ID NO: 976919 - DNA, 15 bp, Homo sapiens
agtcattcatatctt

SEQ ID NO: 976920 - DNA, 15 bp, Homo sapiens
gtcattcatatctta

SEQ ID NO: 976921 - DNA, 15 bp, Homo sapiens
tcattcatatcttag

SEQ ID NO: 976922 - DNA, 15 bp, Homo sapiens
cattcatatcttagt

SEQ ID NO: 976923 - DNA, 15 bp, Homo sapiens
attcatatcttagta

SEQ ID NO: 976924 - DNA, 15 bp, Homo sapiens
ttcatatcttagtat

SEQ ID NO: 976925 - DNA, 15 bp, Homo sapiens
tcatatcttagtatg

SEQ ID NO: 976926 - DNA, 15 bp, Homo sapiens
catatcttagtatga

SEQ ID NO: 976927 - DNA, 15 bp, Homo sapiens
atatcttagtatgaa

SEQ ID NO: 976928 - DNA, 15 bp, Homo sapiens
tatcttagtatgaat

SEQ ID NO: 976929 - DNA, 15 bp, Homo sapiens
atcttagtatgaatt

SEQ ID NO: 976930 - DNA, 15 bp, Homo sapiens
tcttagtatgaatta

SEQ ID NO: 976931 - DNA, 15 bp, Homo sapiens
cttagtatgaattag

SEQ ID NO: 976932 - DNA, 15 bp, Homo sapiens
ttagtatgaattagt

SEQ ID NO: 976933 - DNA, 15 bp, Homo sapiens
tagtatgaattagtc

SEQ ID NO: 976934 - DNA, 15 bp, Homo sapiens
agtatgaattagtca

SEQ ID NO: 976935 - DNA, 15 bp, Homo sapiens
gtatgaattagtcaa

SEQ ID NO: 976936 - DNA, 15 bp, Homo sapiens
tatgaattagtcaaa

SEQ ID NO: 976937 - DNA, 15 bp, Homo sapiens
atgaattagtcaaat

SEQ ID NO: 976938 - DNA, 15 bp, Homo sapiens
tgaattagtcaaatc

SEQ ID NO: 976939 - DNA, 15 bp, Homo sapiens
gaattagtcaaatcc

SEQ ID NO: 976940 - DNA, 15 bp, Homo sapiens
aattagtcaaatcca

SEQ ID NO: 976941 - DNA, 15 bp, Homo sapiens
attagtcaaatccaa

SEQ ID NO: 976942 - DNA, 15 bp, Homo sapiens
ttagtcaaatccaac

SEQ ID NO: 976943 - DNA, 15 bp, Homo sapiens
tagtcaaatccaact

SEQ ID NO: 976944 - DNA, 15 bp, Homo sapiens
agtcaaatccaactc

SEQ ID NO: 976945 - DNA, 15 bp, Homo sapiens
gtcaaatccaactct

SEQ ID NO: 976946 - DNA, 15 bp, Homo sapiens
tcaaatccaactctc

SEQ ID NO: 976947 - DNA, 15 bp, Homo sapiens
caaatccaactctct

SEQ ID NO: 976948 - DNA, 15 bp, Homo sapiens
aaatccaactctctc

SEQ ID NO: 976949 - DNA, 15 bp, Homo sapiens
aatccaactctctcc

SEQ ID NO: 976950 - DNA, 15 bp, Homo sapiens
atccaactctctccc

SEQ ID NO: 976951 - DNA, 15 bp, Homo sapiens
tccaactctctcccc

SEQ ID NO: 976952 - DNA, 15 bp, Homo sapiens
ccaactctctcccct

SEQ ID NO: 976953 - DNA, 15 bp, Homo sapiens
caactctctcccctt

SEQ ID NO: 976954 - DNA, 15 bp, Homo sapiens
aactctctccccttc

SEQ ID NO: 976955 - DNA, 15 bp, Homo sapiens
actctctccccttcc

SEQ ID NO: 976956 - DNA, 15 bp, Homo sapiens
ctctctccccttccc

SEQ ID NO: 976957 - DNA, 15 bp, Homo sapiens
tctctccccttccca

SEQ ID NO: 976958 - DNA, 15 bp, Homo sapiens
ctctccccttcccac

SEQ ID NO: 976959 - DNA, 15 bp, Homo sapiens
tctccccttcccact

SEQ ID NO: 976960 - DNA, 15 bp, Homo sapiens
ctccccttcccactc

SEQ ID NO: 976961 - DNA, 15 bp, Homo sapiens
tccccttcccactcc

SEQ ID NO: 976962 - DNA, 15 bp, Homo sapiens
ccccttcccactccc

SEQ ID NO: 976963 - DNA, 15 bp, Homo sapiens
cccttcccactcccc

SEQ ID NO: 976964 - DNA, 15 bp, Homo sapiens
ccttcccactcccca

SEQ ID NO: 976965 - DNA, 15 bp, Homo sapiens
cttcccactccccac

SEQ ID NO: 976966 - DNA, 15 bp, Homo sapiens
ttcccactccccact

SEQ ID NO: 976967 - DNA, 15 bp, Homo sapiens
tcccactccccactg

SEQ ID NO: 976968 - DNA, 15 bp, Homo sapiens
cccactccccactgt

SEQ ID NO: 976969 - DNA, 15 bp, Homo sapiens
ccactccccactgtt

SEQ ID NO: 976970 - DNA, 15 bp, Homo sapiens
cactccccactgtta

SEQ ID NO: 976971 - DNA, 15 bp, Homo sapiens
actccccactgttag

SEQ ID NO: 976972 - DNA, 15 bp, Homo sapiens
ctccccactgttagt

SEQ ID NO: 976973 - DNA, 15 bp, Homo sapiens
tccccactgttagta

SEQ ID NO: 976974 - DNA, 15 bp, Homo sapiens
ccccactgttagtag

SEQ ID NO: 976975 - DNA, 15 bp, Homo sapiens
cccactgttagtaga

SEQ ID NO: 976976 - DNA, 15 bp, Homo sapiens
ccactgttagtagaa

SEQ ID NO: 976977 - DNA, 15 bp, Homo sapiens
cactgttagtagaag

SEQ ID NO: 976978 - DNA, 15 bp, Homo sapiens
actgttagtagaaga

SEQ ID NO: 976979 - DNA, 15 bp, Homo sapiens
ctgttagtagaagaa

SEQ ID NO: 976980 - DNA, 15 bp, Homo sapiens
tgttagtagaagaat

SEQ ID NO: 976981 - DNA, 15 bp, Homo sapiens
gttagtagaagaatc

SEQ ID NO: 976982 - DNA, 15 bp, Homo sapiens
ttagtagaagaatct

SEQ ID NO: 976983 - DNA, 15 bp, Homo sapiens
tagtagaagaatctg

SEQ ID NO: 976984 - DNA, 15 bp, Homo sapiens
agtagaagaatctgt

SEQ ID NO: 976985 - DNA, 15 bp, Homo sapiens
gtagaagaatctgtt

SEQ ID NO: 976986 - DNA, 15 bp, Homo sapiens
tagaagaatctgttt

SEQ ID NO: 976987 - DNA, 15 bp, Homo sapiens
agaagaatctgttta

SEQ ID NO: 976988 - DNA, 15 bp, Homo sapiens
gaagaatctgtttat

SEQ ID NO: 976989 - DNA, 15 bp, Homo sapiens
aagaatctgtttatt

SEQ ID NO: 976990 - DNA, 15 bp, Homo sapiens
agaatctgtttattg

SEQ ID NO: 976991 - DNA, 15 bp, Homo sapiens
gaatctgtttattga

SEQ ID NO: 976992 - DNA, 15 bp, Homo sapiens
aatctgtttattgag

SEQ ID NO: 976993 - DNA, 15 bp, Homo sapiens
atctgtttattgaga

SEQ ID NO: 976994 - DNA, 15 bp, Homo sapiens
tctgtttattgagag

SEQ ID NO: 976995 - DNA, 15 bp, Homo sapiens
ctgtttattgagaga

SEQ ID NO: 976996 - DNA, 15 bp, Homo sapiens
tgtttattgagagaa

SEQ ID NO: 976997 - DNA, 15 bp, Homo sapiens
gtttattgagagaat

SEQ ID NO: 976998 - DNA, 15 bp, Homo sapiens
tttattgagagaata

SEQ ID NO: 976999 - DNA, 15 bp, Homo sapiens
ttattgagagaatag

SEQ ID NO: 977000 - DNA, 15 bp, Homo sapiens
tattgagagaataga

SEQ ID NO: 977001 - DNA, 15 bp, Homo sapiens
attgagagaatagat

SEQ ID NO: 977002 - DNA, 15 bp, Homo sapiens
ttgagagaatagatt

SEQ ID NO: 977003 - DNA, 15 bp, Homo sapiens
tgagagaatagattt

SEQ ID NO: 977004 - DNA, 15 bp, Homo sapiens
gagagaatagattta

SEQ ID NO: 977005 - DNA, 15 bp, Homo sapiens
agagaatagatttat

SEQ ID NO: 977006 - DNA, 15 bp, Homo sapiens
gagaatagatttata

SEQ ID NO: 977007 - DNA, 15 bp, Homo sapiens
agaatagatttataa

SEQ ID NO: 977008 - DNA, 15 bp, Homo sapiens
gaatagatttataat

SEQ ID NO: 977009 - DNA, 15 bp, Homo sapiens
aatagatttataatt

SEQ ID NO: 977010 - DNA, 15 bp, Homo sapiens
atagatttataattt

SEQ ID NO: 977011 - DNA, 15 bp, Homo sapiens
tagatttataattta

SEQ ID NO: 977012 - DNA, 15 bp, Homo sapiens
agatttataatttag

SEQ ID NO: 977013 - DNA, 15 bp, Homo sapiens
gatttataatttaga

SEQ ID NO: 977014 - DNA, 15 bp, Homo sapiens
atttataatttagaa

SEQ ID NO: 977015 - DNA, 15 bp, Homo sapiens
tttataatttagaat

SEQ ID NO: 977016 - DNA, 15 bp, Homo sapiens
ttataatttagaata

SEQ ID NO: 977017 - DNA, 15 bp, Homo sapiens
tataatttagaataa

SEQ ID NO: 977018 - DNA, 15 bp, Homo sapiens
ataatttagaataag

SEQ ID NO: 977019 - DNA, 15 bp, Homo sapiens
taatttagaataagt

SEQ ID NO: 977020 - DNA, 15 bp, Homo sapiens
aatttagaataagtg

SEQ ID NO: 977021 - DNA, 15 bp, Homo sapiens
atttagaataagtga

SEQ ID NO: 977022 - DNA, 15 bp, Homo sapiens
tttagaataagtgag

SEQ ID NO: 977023 - DNA, 15 bp, Homo sapiens
ttagaataagtgaga

SEQ ID NO: 977024 - DNA, 15 bp, Homo sapiens
tagaataagtgagag

SEQ ID NO: 977025 - DNA, 15 bp, Homo sapiens
agaataagtgagagg

SEQ ID NO: 977026 - DNA, 15 bp, Homo sapiens
gaataagtgagaggg

SEQ ID NO: 977027 - DNA, 15 bp, Homo sapiens
aataagtgagagggg

SEQ ID NO: 977028 - DNA, 15 bp, Homo sapiens
ataagtgagaggggc

SEQ ID NO: 977029 - DNA, 15 bp, Homo sapiens
taagtgagaggggca

SEQ ID NO: 977030 - DNA, 15 bp, Homo sapiens
aagtgagaggggcag

SEQ ID NO: 977031 - DNA, 15 bp, Homo sapiens
agtgagaggggcaga

SEQ ID NO: 977032 - DNA, 15 bp, Homo sapiens
gtgagaggggcagaa

SEQ ID NO: 977033 - DNA, 15 bp, Homo sapiens
tgagaggggcagaag

SEQ ID NO: 977034 - DNA, 15 bp, Homo sapiens
gagaggggcagaaga

SEQ ID NO: 977035 - DNA, 15 bp, Homo sapiens
agaggggcagaagag

SEQ ID NO: 977036 - DNA, 15 bp, Homo sapiens
gaggggcagaagagg

SEQ ID NO: 977037 - DNA, 15 bp, Homo sapiens
aggggcagaagagga

SEQ ID NO: 977038 - DNA, 15 bp, Homo sapiens
ggggcagaagaggag

SEQ ID NO: 977039 - DNA, 15 bp, Homo sapiens
gggcagaagaggaga

SEQ ID NO: 977040 - DNA, 15 bp, Homo sapiens
ggcagaagaggagat

SEQ ID NO: 977041 - DNA, 15 bp, Homo sapiens
gcagaagaggagatt

SEQ ID NO: 977042 - DNA, 15 bp, Homo sapiens
cagaagaggagattt

SEQ ID NO: 977043 - DNA, 15 bp, Homo sapiens
agaagaggagatttt

SEQ ID NO: 977044 - DNA, 15 bp, Homo sapiens
gaagaggagattttg

SEQ ID NO: 977045 - DNA, 15 bp, Homo sapiens
aagaggagattttga

SEQ ID NO: 977046 - DNA, 15 bp, Homo sapiens
agaggagattttgaa

SEQ ID NO: 977047 - DNA, 15 bp, Homo sapiens
gaggagattttgaag

SEQ ID NO: 977048 - DNA, 15 bp, Homo sapiens
aggagattttgaagg

SEQ ID NO: 977049 - DNA, 15 bp, Homo sapiens
ggagattttgaagga

SEQ ID NO: 977050 - DNA, 15 bp, Homo sapiens
gagattttgaaggat

SEQ ID NO: 977051 - DNA, 15 bp, Homo sapiens
agattttgaaggatg

SEQ ID NO: 977052 - DNA, 15 bp, Homo sapiens
gattttgaaggatgg

SEQ ID NO: 977053 - DNA, 15 bp, Homo sapiens
attttgaaggatggc

SEQ ID NO: 977054 - DNA, 15 bp, Homo sapiens
ttttgaaggatggca

SEQ ID NO: 977055 - DNA, 15 bp, Homo sapiens
tttgaaggatggcac

SEQ ID NO: 977056 - DNA, 15 bp, Homo sapiens
ttgaaggatggcacc

SEQ ID NO: 977057 - DNA, 15 bp, Homo sapiens
tgaaggatggcacct

SEQ ID NO: 977058 - DNA, 15 bp, Homo sapiens
gaaggatggcacctg

SEQ ID NO: 977059 - DNA, 15 bp, Homo sapiens
aaggatggcacctga

SEQ ID NO: 977060 - DNA, 15 bp, Homo sapiens
aggatggcacctgaa

SEQ ID NO: 977061 - DNA, 15 bp, Homo sapiens
ggatggcacctgaag

SEQ ID NO: 977062 - DNA, 15 bp, Homo sapiens
gatggcacctgaagg

SEQ ID NO: 977063 - DNA, 15 bp, Homo sapiens
atggcacctgaagga

SEQ ID NO: 977064 - DNA, 15 bp, Homo sapiens
tggcacctgaaggag

SEQ ID NO: 977065 - DNA, 15 bp, Homo sapiens
ggcacctgaaggagg

SEQ ID NO: 977066 - DNA, 15 bp, Homo sapiens
gcacctgaaggagga

SEQ ID NO: 977067 - DNA, 15 bp, Homo sapiens
cacctgaaggaggac

SEQ ID NO: 977068 - DNA, 15 bp, Homo sapiens
acctgaaggaggact

SEQ ID NO: 977069 - DNA, 15 bp, Homo sapiens
cctgaaggaggacta

SEQ ID NO: 977070 - DNA, 15 bp, Homo sapiens
ctgaaggaggactag

SEQ ID NO: 977071 - DNA, 15 bp, Homo sapiens
tgaaggaggactagc

SEQ ID NO: 977072 - DNA, 15 bp, Homo sapiens
gaaggaggactagca

SEQ ID NO: 977073 - DNA, 15 bp, Homo sapiens
aaggaggactagcat

SEQ ID NO: 977074 - DNA, 15 bp, Homo sapiens
aggaggactagcatg

SEQ ID NO: 977075 - DNA, 15 bp, Homo sapiens
ggaggactagcatgg

SEQ ID NO: 977076 - DNA, 15 bp, Homo sapiens
gaggactagcatggc

SEQ ID NO: 977077 - DNA, 15 bp, Homo sapiens
aggactagcatggct

SEQ ID NO: 977078 - DNA, 15 bp, Homo sapiens
ggactagcatggctg

SEQ ID NO: 977079 - DNA, 15 bp, Homo sapiens
gactagcatggctga

SEQ ID NO: 977080 - DNA, 15 bp, Homo sapiens
actagcatggctgag

SEQ ID NO: 977081 - DNA, 15 bp, Homo sapiens
ctagcatggctgaga

SEQ ID NO: 977082 - DNA, 15 bp, Homo sapiens
tagcatggctgagac

SEQ ID NO: 977083 - DNA, 15 bp, Homo sapiens
agcatggctgagaca

SEQ ID NO: 977084 - DNA, 15 bp, Homo sapiens
gcatggctgagacag

SEQ ID NO: 977085 - DNA, 15 bp, Homo sapiens
catggctgagacagt

SEQ ID NO: 977086 - DNA, 15 bp, Homo sapiens
atggctgagacagtg

SEQ ID NO: 977087 - DNA, 15 bp, Homo sapiens
tggctgagacagtga

SEQ ID NO: 977088 - DNA, 15 bp, Homo sapiens
ggctgagacagtgaa

SEQ ID NO: 977089 - DNA, 15 bp, Homo sapiens
gctgagacagtgaag

SEQ ID NO: 977090 - DNA, 15 bp, Homo sapiens
ctgagacagtgaagt

SEQ ID NO: 977091 - DNA, 15 bp, Homo sapiens
tgagacagtgaagtg

SEQ ID NO: 977092 - DNA, 15 bp, Homo sapiens
gagacagtgaagtgg

SEQ ID NO: 977093 - DNA, 15 bp, Homo sapiens
agacagtgaagtgga

SEQ ID NO: 977094 - DNA, 15 bp, Homo sapiens
gacagtgaagtggaa

SEQ ID NO: 977095 - DNA, 15 bp, Homo sapiens
acagtgaagtggaag

SEQ ID NO: 977096 - DNA, 15 bp, Homo sapiens
cagtgaagtggaagc

SEQ ID NO: 977097 - DNA, 15 bp, Homo sapiens
agtgaagtggaagcc

SEQ ID NO: 977098 - DNA, 15 bp, Homo sapiens
gtgaagtggaagcct

SEQ ID NO: 977099 - DNA, 15 bp, Homo sapiens
tgaagtggaagcctt

SEQ ID NO: 977100 - DNA, 15 bp, Homo sapiens
gaagtggaagccttg

SEQ ID NO: 977101 - DNA, 15 bp, Homo sapiens
aagtggaagccttga

SEQ ID NO: 977102 - DNA, 15 bp, Homo sapiens
agtggaagccttgaa

SEQ ID NO: 977103 - DNA, 15 bp, Homo sapiens
gtggaagccttgaat

SEQ ID NO: 977104 - DNA, 15 bp, Homo sapiens
tggaagccttgaata

SEQ ID NO: 977105 - DNA, 15 bp, Homo sapiens
ggaagccttgaatag

SEQ ID NO: 977106 - DNA, 15 bp, Homo sapiens
gaagccttgaatagc

SEQ ID NO: 977107 - DNA, 15 bp, Homo sapiens
aagccttgaatagct

SEQ ID NO: 977108 - DNA, 15 bp, Homo sapiens
agccttgaatagcta

SEQ ID NO: 977109 - DNA, 15 bp, Homo sapiens
gccttgaatagctaa

SEQ ID NO: 977110 - DNA, 15 bp, Homo sapiens
ccttgaatagctaaa

SEQ ID NO: 977111 - DNA, 15 bp, Homo sapiens
cttgaatagctaaag

SEQ ID NO: 977112 - DNA, 15 bp, Homo sapiens
ttgaatagctaaagg

SEQ ID NO: 977113 - DNA, 15 bp, Homo sapiens
tgaatagctaaaggg

SEQ ID NO: 977114 - DNA, 15 bp, Homo sapiens
gaatagctaaagggt

SEQ ID NO: 977115 - DNA, 15 bp, Homo sapiens
aatagctaaagggta

SEQ ID NO: 977116 - DNA, 15 bp, Homo sapiens
atagctaaagggtaa

SEQ ID NO: 977117 - DNA, 15 bp, Homo sapiens
tagctaaagggtaag

SEQ ID NO: 977118 - DNA, 15 bp, Homo sapiens
agctaaagggtaaga

SEQ ID NO: 977119 - DNA, 15 bp, Homo sapiens
gctaaagggtaagat

SEQ ID NO: 977120 - DNA, 15 bp, Homo sapiens
ctaaagggtaagatg

SEQ ID NO: 977121 - DNA, 15 bp, Homo sapiens
taaagggtaagatga

SEQ ID NO: 977122 - DNA, 15 bp, Homo sapiens
aaagggtaagatgaa

SEQ ID NO: 977123 - DNA, 15 bp, Homo sapiens
aagggtaagatgaaa

SEQ ID NO: 977124 - DNA, 15 bp, Homo sapiens
agggtaagatgaaag

SEQ ID NO: 977125 - DNA, 15 bp, Homo sapiens
gggtaagatgaaagt

SEQ ID NO: 977126 - DNA, 15 bp, Homo sapiens
ggtaagatgaaagta

SEQ ID NO: 977127 - DNA, 15 bp, Homo sapiens
gtaagatgaaagtat

SEQ ID NO: 977128 - DNA, 15 bp, Homo sapiens
taagatgaaagtatt

SEQ ID NO: 977129 - DNA, 15 bp, Homo sapiens
aagatgaaagtattt

SEQ ID NO: 977130 - DNA, 15 bp, Homo sapiens
agatgaaagtattta

SEQ ID NO: 977131 - DNA, 15 bp, Homo sapiens
gatgaaagtatttag

SEQ ID NO: 977132 - DNA, 15 bp, Homo sapiens
atgaaagtatttagc

SEQ ID NO: 977133 - DNA, 15 bp, Homo sapiens
tgaaagtatttagct

SEQ ID NO: 977134 - DNA, 15 bp, Homo sapiens
gaaagtatttagctg

SEQ ID NO: 977135 - DNA, 15 bp, Homo sapiens
aaagtatttagctgt

SEQ ID NO: 977136 - DNA, 15 bp, Homo sapiens
aagtatttagctgta

SEQ ID NO: 977137 - DNA, 15 bp, Homo sapiens
agtatttagctgtag

SEQ ID NO: 977138 - DNA, 15 bp, Homo sapiens
gtatttagctgtagg

SEQ ID NO: 977139 - DNA, 15 bp, Homo sapiens
tatttagctgtaggg

SEQ ID NO: 977140 - DNA, 15 bp, Homo sapiens
atttagctgtagggg

SEQ ID NO: 977141 - DNA, 15 bp, Homo sapiens
tttagctgtaggggg

SEQ ID NO: 977142 - DNA, 15 bp, Homo sapiens
ttagctgtaggggga

SEQ ID NO: 977143 - DNA, 15 bp, Homo sapiens
tagctgtagggggaa

SEQ ID NO: 977144 - DNA, 15 bp, Homo sapiens
agctgtagggggaaa

SEQ ID NO: 977145 - DNA, 15 bp, Homo sapiens
gctgtagggggaaaa

SEQ ID NO: 977146 - DNA, 15 bp, Homo sapiens
ctgtagggggaaaaa

SEQ ID NO: 977147 - DNA, 15 bp, Homo sapiens
tgtagggggaaaaag

SEQ ID NO: 977148 - DNA, 15 bp, Homo sapiens
gtagggggaaaaagc

SEQ ID NO: 977149 - DNA, 15 bp, Homo sapiens
tagggggaaaaagca

SEQ ID NO: 977150 - DNA, 15 bp, Homo sapiens
agggggaaaaagcat

SEQ ID NO: 977151 - DNA, 15 bp, Homo sapiens
gggggaaaaagcatt

SEQ ID NO: 977152 - DNA, 15 bp, Homo sapiens
ggggaaaaagcattg

SEQ ID NO: 977153 - DNA, 15 bp, Homo sapiens
gggaaaaagcattga

SEQ ID NO: 977154 - DNA, 15 bp, Homo sapiens
ggaaaaagcattgac

SEQ ID NO: 977155 - DNA, 15 bp, Homo sapiens
gaaaaagcattgaca

SEQ ID NO: 977156 - DNA, 15 bp, Homo sapiens
aaaaagcattgacag

SEQ ID NO: 977157 - DNA, 15 bp, Homo sapiens
aaaagcattgacagg

SEQ ID NO: 977158 - DNA, 15 bp, Homo sapiens
aaagcattgacaggt

SEQ ID NO: 977159 - DNA, 15 bp, Homo sapiens
aagcattgacaggtt

SEQ ID NO: 977160 - DNA, 15 bp, Homo sapiens
agcattgacaggttg

SEQ ID NO: 977161 - DNA, 15 bp, Homo sapiens
gcattgacaggttgg

SEQ ID NO: 977162 - DNA, 15 bp, Homo sapiens
cattgacaggttgga

SEQ ID NO: 977163 - DNA, 15 bp, Homo sapiens
attgacaggttggaa

SEQ ID NO: 977164 - DNA, 15 bp, Homo sapiens
ttgacaggttggaaa

SEQ ID NO: 977165 - DNA, 15 bp, Homo sapiens
tgacaggttggaaaa

SEQ ID NO: 977166 - DNA, 15 bp, Homo sapiens
gacaggttggaaaag

SEQ ID NO: 977167 - DNA, 15 bp, Homo sapiens
acaggttggaaaagt

SEQ ID NO: 977168 - DNA, 15 bp, Homo sapiens
caggttggaaaagta

SEQ ID NO: 977169 - DNA, 15 bp, Homo sapiens
aggttggaaaagtaa

SEQ ID NO: 977170 - DNA, 15 bp, Homo sapiens
ggttggaaaagtaaa

SEQ ID NO: 977171 - DNA, 15 bp, Homo sapiens
gttggaaaagtaaaa

SEQ ID NO: 977172 - DNA, 15 bp, Homo sapiens
ttggaaaagtaaaag

SEQ ID NO: 977173 - DNA, 15 bp, Homo sapiens
tggaaaagtaaaagt

SEQ ID NO: 977174 - DNA, 15 bp, Homo sapiens
ggaaaagtaaaagtc

SEQ ID NO: 977175 - DNA, 15 bp, Homo sapiens
gaaaagtaaaagtca

SEQ ID NO: 977176 - DNA, 15 bp, Homo sapiens
aaaagtaaaagtcag

SEQ ID NO: 977177 - DNA, 15 bp, Homo sapiens
aaagtaaaagtcaga

SEQ ID NO: 977178 - DNA, 15 bp, Homo sapiens
aagtaaaagtcagat

SEQ ID NO: 977179 - DNA, 15 bp, Homo sapiens
agtaaaagtcagatt

SEQ ID NO: 977180 - DNA, 15 bp, Homo sapiens
gtaaaagtcagattc

SEQ ID NO: 977181 - DNA, 15 bp, Homo sapiens
taaaagtcagattct

SEQ ID NO: 977182 - DNA, 15 bp, Homo sapiens
aaaagtcagattctc

SEQ ID NO: 977183 - DNA, 15 bp, Homo sapiens
aaagtcagattctcc

SEQ ID NO: 977184 - DNA, 15 bp, Homo sapiens
aagtcagattctcct

SEQ ID NO: 977185 - DNA, 15 bp, Homo sapiens
agtcagattctcctt

SEQ ID NO: 977186 - DNA, 15 bp, Homo sapiens
gtcagattctccttg

SEQ ID NO: 977187 - DNA, 15 bp, Homo sapiens
tcagattctccttgc

SEQ ID NO: 977188 - DNA, 15 bp, Homo sapiens
cagattctccttgct

SEQ ID NO: 977189 - DNA, 15 bp, Homo sapiens
agattctccttgctc

SEQ ID NO: 977190 - DNA, 15 bp, Homo sapiens
gattctccttgctct

SEQ ID NO: 977191 - DNA, 15 bp, Homo sapiens
attctccttgctctg

SEQ ID NO: 977192 - DNA, 15 bp, Homo sapiens
ttctccttgctctga

SEQ ID NO: 977193 - DNA, 15 bp, Homo sapiens
tctccttgctctgaa

SEQ ID NO: 977194 - DNA, 15 bp, Homo sapiens
ctccttgctctgaaa

SEQ ID NO: 977195 - DNA, 15 bp, Homo sapiens
tccttgctctgaaat

SEQ ID NO: 977196 - DNA, 15 bp, Homo sapiens
ccttgctctgaaatt

SEQ ID NO: 977197 - DNA, 15 bp, Homo sapiens
cttgctctgaaattt

SEQ ID NO: 977198 - DNA, 15 bp, Homo sapiens
ttgctctgaaatttt

SEQ ID NO: 977199 - DNA, 15 bp, Homo sapiens
tgctctgaaattttg

SEQ ID NO: 977200 - DNA, 15 bp, Homo sapiens
gctctgaaattttgt

SEQ ID NO: 977201 - DNA, 15 bp, Homo sapiens
ctctgaaattttgta

SEQ ID NO: 977202 - DNA, 15 bp, Homo sapiens
tctgaaattttgtac

SEQ ID NO: 977203 - DNA, 15 bp, Homo sapiens
ctgaaattttgtaca

SEQ ID NO: 977204 - DNA, 15 bp, Homo sapiens
tgaaattttgtacag

SEQ ID NO: 977205 - DNA, 15 bp, Homo sapiens
gaaattttgtacagg

SEQ ID NO: 977206 - DNA, 15 bp, Homo sapiens
aaattttgtacaggg

SEQ ID NO: 977207 - DNA, 15 bp, Homo sapiens
aattttgtacagggc

SEQ ID NO: 977208 - DNA, 15 bp, Homo sapiens
attttgtacagggca

SEQ ID NO: 977209 - DNA, 15 bp, Homo sapiens
ttttgtacagggcag

SEQ ID NO: 977210 - DNA, 15 bp, Homo sapiens
tttgtacagggcagg

SEQ ID NO: 977211 - DNA, 15 bp, Homo sapiens
ttgtacagggcaggt

SEQ ID NO: 977212 - DNA, 15 bp, Homo sapiens
tgtacagggcaggtt

SEQ ID NO: 977213 - DNA, 15 bp, Homo sapiens
gtacagggcaggttc

SEQ ID NO: 977214 - DNA, 15 bp, Homo sapiens
tacagggcaggttct

SEQ ID NO: 977215 - DNA, 15 bp, Homo sapiens
acagggcaggttcta

SEQ ID NO: 977216 - DNA, 15 bp, Homo sapiens
cagggcaggttctac

SEQ ID NO: 977217 - DNA, 15 bp, Homo sapiens
agggcaggttctact

SEQ ID NO: 977218 - DNA, 15 bp, Homo sapiens
gggcaggttctacta

SEQ ID NO: 977219 - DNA, 15 bp, Homo sapiens
ggcaggttctactag

SEQ ID NO: 977220 - DNA, 15 bp, Homo sapiens
gcaggttctactagg

SEQ ID NO: 977221 - DNA, 15 bp, Homo sapiens
caggttctactaggt

SEQ ID NO: 977222 - DNA, 15 bp, Homo sapiens
aggttctactaggta

SEQ ID NO: 977223 - DNA, 15 bp, Homo sapiens
ggttctactaggtat

SEQ ID NO: 977224 - DNA, 15 bp, Homo sapiens
gttctactaggtatg

SEQ ID NO: 977225 - DNA, 15 bp, Homo sapiens
ttctactaggtatgt

SEQ ID NO: 977226 - DNA, 15 bp, Homo sapiens
tctactaggtatgtt

SEQ ID NO: 977227 - DNA, 15 bp, Homo sapiens
ctactaggtatgtta

SEQ ID NO: 977228 - DNA, 15 bp, Homo sapiens
tactaggtatgttac

SEQ ID NO: 977229 - DNA, 15 bp, Homo sapiens
actaggtatgttaca

SEQ ID NO: 977230 - DNA, 15 bp, Homo sapiens
ctaggtatgttacaa

SEQ ID NO: 977231 - DNA, 15 bp, Homo sapiens
taggtatgttacaat

SEQ ID NO: 977232 - DNA, 15 bp, Homo sapiens
aggtatgttacaatg

SEQ ID NO: 977233 - DNA, 15 bp, Homo sapiens
ggtatgttacaatgc

SEQ ID NO: 977234 - DNA, 15 bp, Homo sapiens
gtatgttacaatgca

SEQ ID NO: 977235 - DNA, 15 bp, Homo sapiens
tatgttacaatgcag

SEQ ID NO: 977236 - DNA, 15 bp, Homo sapiens
atgttacaatgcaga

SEQ ID NO: 977237 - DNA, 15 bp, Homo sapiens
tgttacaatgcagaa

SEQ ID NO: 977238 - DNA, 15 bp, Homo sapiens
gttacaatgcagaaa

SEQ ID NO: 977239 - DNA, 15 bp, Homo sapiens
ttacaatgcagaaaa

SEQ ID NO: 977240 - DNA, 15 bp, Homo sapiens
tacaatgcagaaaaa

SEQ ID NO: 977241 - DNA, 15 bp, Homo sapiens
acaatgcagaaaaaa

SEQ ID NO: 977242 - DNA, 15 bp, Homo sapiens
caatgcagaaaaaac

SEQ ID NO: 977243 - DNA, 15 bp, Homo sapiens
aatgcagaaaaaaca

SEQ ID NO: 977244 - DNA, 15 bp, Homo sapiens
atgcagaaaaaacat

SEQ ID NO: 977245 - DNA, 15 bp, Homo sapiens
tgcagaaaaaacatg

SEQ ID NO: 977246 - DNA, 15 bp, Homo sapiens
gcagaaaaaacatga

SEQ ID NO: 977247 - DNA, 15 bp, Homo sapiens
cagaaaaaacatgaa

SEQ ID NO: 977248 - DNA, 15 bp, Homo sapiens
agaaaaaacatgaaa

SEQ ID NO: 977249 - DNA, 15 bp, Homo sapiens
gaaaaaacatgaaat

SEQ ID NO: 977250 - DNA, 15 bp, Homo sapiens
aaaaaacatgaaata

SEQ ID NO: 977251 - DNA, 15 bp, Homo sapiens
aaaaacatgaaataa

SEQ ID NO: 977252 - DNA, 15 bp, Homo sapiens
aaaacatgaaataat

SEQ ID NO: 977253 - DNA, 15 bp, Homo sapiens
aaacatgaaataatt

SEQ ID NO: 977254 - DNA, 15 bp, Homo sapiens
aacatgaaataattg

SEQ ID NO: 977255 - DNA, 15 bp, Homo sapiens
acatgaaataattga

SEQ ID NO: 977256 - DNA, 15 bp, Homo sapiens
catgaaataattgag

SEQ ID NO: 977257 - DNA, 15 bp, Homo sapiens
atgaaataattgaga

SEQ ID NO: 977258 - DNA, 15 bp, Homo sapiens
tgaaataattgagag

SEQ ID NO: 977259 - DNA, 15 bp, Homo sapiens
gaaataattgagagg

SEQ ID NO: 977260 - DNA, 15 bp, Homo sapiens
aaataattgagagga

SEQ ID NO: 977261 - DNA, 15 bp, Homo sapiens
aataattgagaggaa

SEQ ID NO: 977262 - DNA, 15 bp, Homo sapiens
ataattgagaggaat

SEQ ID NO: 977263 - DNA, 15 bp, Homo sapiens
taattgagaggaatt

SEQ ID NO: 977264 - DNA, 15 bp, Homo sapiens
aattgagaggaattt

SEQ ID NO: 977265 - DNA, 15 bp, Homo sapiens
attgagaggaatttg

SEQ ID NO: 977266 - DNA, 15 bp, Homo sapiens
ttgagaggaatttgg

SEQ ID NO: 977267 - DNA, 15 bp, Homo sapiens
tgagaggaatttggt

SEQ ID NO: 977268 - DNA, 15 bp, Homo sapiens
gagaggaatttggtg

SEQ ID NO: 977269 - DNA, 15 bp, Homo sapiens
agaggaatttggtgc

SEQ ID NO: 977270 - DNA, 15 bp, Homo sapiens
gaggaatttggtgca

SEQ ID NO: 977271 - DNA, 15 bp, Homo sapiens
aggaatttggtgcaa

SEQ ID NO: 977272 - DNA, 15 bp, Homo sapiens
ggaatttggtgcaat

SEQ ID NO: 977273 - DNA, 15 bp, Homo sapiens
gaatttggtgcaata

SEQ ID NO: 977274 - DNA, 15 bp, Homo sapiens
aatttggtgcaatat

SEQ ID NO: 977275 - DNA, 15 bp, Homo sapiens
atttggtgcaatatt

SEQ ID NO: 977276 - DNA, 15 bp, Homo sapiens
tttggtgcaatatta

SEQ ID NO: 977277 - DNA, 15 bp, Homo sapiens
ttggtgcaatattat

SEQ ID NO: 977278 - DNA, 15 bp, Homo sapiens
tggtgcaatattatc

SEQ ID NO: 977279 - DNA, 15 bp, Homo sapiens
ggtgcaatattatct

SEQ ID NO: 977280 - DNA, 15 bp, Homo sapiens
gtgcaatattatctt

SEQ ID NO: 977281 - DNA, 15 bp, Homo sapiens
tgcaatattatcttc

SEQ ID NO: 977282 - DNA, 15 bp, Homo sapiens
gcaatattatcttct

SEQ ID NO: 977283 - DNA, 15 bp, Homo sapiens
caatattatcttctt

SEQ ID NO: 977284 - DNA, 15 bp, Homo sapiens
aatattatcttcttg

SEQ ID NO: 977285 - DNA, 15 bp, Homo sapiens
atattatcttcttgg

SEQ ID NO: 977286 - DNA, 15 bp, Homo sapiens
tattatcttcttggc

SEQ ID NO: 977287 - DNA, 15 bp, Homo sapiens
attatcttcttggct

SEQ ID NO: 977288 - DNA, 15 bp, Homo sapiens
ttatcttcttggctt

SEQ ID NO: 977289 - DNA, 15 bp, Homo sapiens
tatcttcttggcttc

SEQ ID NO: 977290 - DNA, 15 bp, Homo sapiens
atcttcttggcttct

SEQ ID NO: 977291 - DNA, 15 bp, Homo sapiens
tcttcttggcttctt

SEQ ID NO: 977292 - DNA, 15 bp, Homo sapiens
cttcttggcttcttt

SEQ ID NO: 977293 - DNA, 15 bp, Homo sapiens
ttcttggcttctttt

SEQ ID NO: 977294 - DNA, 15 bp, Homo sapiens
tcttggcttcttttg

SEQ ID NO: 977295 - DNA, 15 bp, Homo sapiens
cttggcttcttttga

SEQ ID NO: 977296 - DNA, 15 bp, Homo sapiens
ttggcttcttttgag

SEQ ID NO: 977297 - DNA, 15 bp, Homo sapiens
tggcttcttttgagt

SEQ ID NO: 977298 - DNA, 15 bp, Homo sapiens
ggcttcttttgagtg

SEQ ID NO: 977299 - DNA, 15 bp, Homo sapiens
gcttcttttgagtgg

SEQ ID NO: 977300 - DNA, 15 bp, Homo sapiens
cttcttttgagtggg

SEQ ID NO: 977301 - DNA, 15 bp, Homo sapiens
ttcttttgagtgggc

SEQ ID NO: 977302 - DNA, 15 bp, Homo sapiens
tcttttgagtgggca

SEQ ID NO: 977303 - DNA, 15 bp, Homo sapiens
cttttgagtgggcag

SEQ ID NO: 977304 - DNA, 15 bp, Homo sapiens
ttttgagtgggcaga

SEQ ID NO: 977305 - DNA, 15 bp, Homo sapiens
tttgagtgggcagat

SEQ ID NO: 977306 - DNA, 15 bp, Homo sapiens
ttgagtgggcagatt

SEQ ID NO: 977307 - DNA, 15 bp, Homo sapiens
tgagtgggcagattt

SEQ ID NO: 977308 - DNA, 15 bp, Homo sapiens
gagtgggcagatttt

SEQ ID NO: 977309 - DNA, 15 bp, Homo sapiens
agtgggcagattttt

SEQ ID NO: 977310 - DNA, 15 bp, Homo sapiens
gtgggcagatttttt

SEQ ID NO: 977311 - DNA, 15 bp, Homo sapiens
tgggcagattttttt

SEQ ID NO: 977312 - DNA, 15 bp, Homo sapiens
gggcagatttttttc

SEQ ID NO: 977313 - DNA, 15 bp, Homo sapiens
ggcagatttttttca

SEQ ID NO: 977314 - DNA, 15 bp, Homo sapiens
gcagatttttttcac

SEQ ID NO: 977315 - DNA, 15 bp, Homo sapiens
cagatttttttcacg

SEQ ID NO: 977316 - DNA, 15 bp, Homo sapiens
agatttttttcacgg

SEQ ID NO: 977317 - DNA, 15 bp, Homo sapiens
gatttttttcacggc

SEQ ID NO: 977318 - DNA, 15 bp, Homo sapiens
atttttttcacggcc

SEQ ID NO: 977319 - DNA, 15 bp, Homo sapiens
tttttttcacggcct

SEQ ID NO: 977320 - DNA, 15 bp, Homo sapiens
ttttttcacggcctg

SEQ ID NO: 977321 - DNA, 15 bp, Homo sapiens
tttttcacggcctgt

SEQ ID NO: 977322 - DNA, 15 bp, Homo sapiens
ttttcacggcctgta

SEQ ID NO: 977323 - DNA, 15 bp, Homo sapiens
tttcacggcctgtaa

SEQ ID NO: 977324 - DNA, 15 bp, Homo sapiens
ttcacggcctgtaac

SEQ ID NO: 977325 - DNA, 15 bp, Homo sapiens
tcacggcctgtaact

SEQ ID NO: 977326 - DNA, 15 bp, Homo sapiens
cacggcctgtaacta

SEQ ID NO: 977327 - DNA, 15 bp, Homo sapiens
acggcctgtaactat

SEQ ID NO: 977328 - DNA, 15 bp, Homo sapiens
cggcctgtaactata

SEQ ID NO: 977329 - DNA, 15 bp, Homo sapiens
ggcctgtaactataa

SEQ ID NO: 977330 - DNA, 15 bp, Homo sapiens
gcctgtaactataat

SEQ ID NO: 977331 - DNA, 15 bp, Homo sapiens
cctgtaactataata

SEQ ID NO: 977332 - DNA, 15 bp, Homo sapiens
ctgtaactataataa

SEQ ID NO: 977333 - DNA, 15 bp, Homo sapiens
tgtaactataataaa

SEQ ID NO: 977334 - DNA, 15 bp, Homo sapiens
gtaactataataaat

SEQ ID NO: 977335 - DNA, 15 bp, Homo sapiens
taactataataaatt

SEQ ID NO: 977336 - DNA, 15 bp, Homo sapiens
aactataataaattt

SEQ ID NO: 977337 - DNA, 15 bp, Homo sapiens
actataataaatttg

SEQ ID NO: 977338 - DNA, 15 bp, Homo sapiens
ctataataaatttga

SEQ ID NO: 977339 - DNA, 15 bp, Homo sapiens
tataataaatttgaa

SEQ ID NO: 977340 - DNA, 15 bp, Homo sapiens
ataataaatttgaaa

SEQ ID NO: 977341 - DNA, 15 bp, Homo sapiens
taataaatttgaaac

SEQ ID NO: 977342 - DNA, 15 bp, Homo sapiens
aataaatttgaaact

SEQ ID NO: 977343 - DNA, 15 bp, Homo sapiens
ataaatttgaaactt

SEQ ID NO: 977344 - DNA, 15 bp, Homo sapiens
taaatttgaaacttc

SEQ ID NO: 977345 - DNA, 15 bp, Homo sapiens
aaatttgaaacttct

SEQ ID NO: 977346 - DNA, 15 bp, Homo sapiens
aatttgaaacttctc

SEQ ID NO: 977347 - DNA, 15 bp, Homo sapiens
atttgaaacttctca

SEQ ID NO: 977348 - DNA, 15 bp, Homo sapiens
tttgaaacttctcat

SEQ ID NO: 977349 - DNA, 15 bp, Homo sapiens
ttgaaacttctcatc

SEQ ID NO: 977350 - DNA, 15 bp, Homo sapiens
tgaaacttctcatct

SEQ ID NO: 977351 - DNA, 15 bp, Homo sapiens
gaaacttctcatctt

SEQ ID NO: 977352 - DNA, 15 bp, Homo sapiens
aaacttctcatcttt

SEQ ID NO: 977353 - DNA, 15 bp, Homo sapiens
aacttctcatctttt

SEQ ID NO: 977354 - DNA, 15 bp, Homo sapiens
acttctcatctttta

SEQ ID NO: 977355 - DNA, 15 bp, Homo sapiens
cttctcatcttttag

SEQ ID NO: 977356 - DNA, 15 bp, Homo sapiens
ttctcatcttttagt

SEQ ID NO: 977357 - DNA, 15 bp, Homo sapiens
tctcatcttttagta

SEQ ID NO: 977358 - DNA, 15 bp, Homo sapiens
ctcatcttttagtaa

SEQ ID NO: 977359 - DNA, 15 bp, Homo sapiens
tcatcttttagtaac

SEQ ID NO: 977360 - DNA, 15 bp, Homo sapiens
catcttttagtaact

SEQ ID NO: 977361 - DNA, 15 bp, Homo sapiens
atcttttagtaactt

SEQ ID NO: 977362 - DNA, 15 bp, Homo sapiens
tcttttagtaacttt

SEQ ID NO: 977363 - DNA, 15 bp, Homo sapiens
cttttagtaactttt

SEQ ID NO: 977364 - DNA, 15 bp, Homo sapiens
ttttagtaacttttt

SEQ ID NO: 977365 - DNA, 15 bp, Homo sapiens
tttagtaactttttt

SEQ ID NO: 977366 - DNA, 15 bp, Homo sapiens
ttagtaacttttttc

SEQ ID NO: 977367 - DNA, 15 bp, Homo sapiens
tagtaacttttttca

SEQ ID NO: 977368 - DNA, 15 bp, Homo sapiens
agtaacttttttcac

SEQ ID NO: 977369 - DNA, 15 bp, Homo sapiens
gtaacttttttcact

SEQ ID NO: 977370 - DNA, 15 bp, Homo sapiens
taacttttttcactt

SEQ ID NO: 977371 - DNA, 15 bp, Homo sapiens
aacttttttcactta

SEQ ID NO: 977372 - DNA, 15 bp, Homo sapiens
acttttttcacttaa

SEQ ID NO: 977373 - DNA, 15 bp, Homo sapiens
cttttttcacttaag

SEQ ID NO: 977374 - DNA, 15 bp, Homo sapiens
ttttttcacttaagt

SEQ ID NO: 977375 - DNA, 15 bp, Homo sapiens
tttttcacttaagtt

SEQ ID NO: 977376 - DNA, 15 bp, Homo sapiens
ttttcacttaagttt

SEQ ID NO: 977377 - DNA, 15 bp, Homo sapiens
tttcacttaagttta

SEQ ID NO: 977378 - DNA, 15 bp, Homo sapiens
ttcacttaagtttat

SEQ ID NO: 977379 - DNA, 15 bp, Homo sapiens
tcacttaagtttatg

SEQ ID NO: 977380 - DNA, 15 bp, Homo sapiens
cacttaagtttatgt

SEQ ID NO: 977381 - DNA, 15 bp, Homo sapiens
acttaagtttatgtg

SEQ ID NO: 977382 - DNA, 15 bp, Homo sapiens
cttaagtttatgtgg

SEQ ID NO: 977383 - DNA, 15 bp, Homo sapiens
ttaagtttatgtggc

SEQ ID NO: 977384 - DNA, 15 bp, Homo sapiens
taagtttatgtggct

SEQ ID NO: 977385 - DNA, 15 bp, Homo sapiens
aagtttatgtggctg

SEQ ID NO: 977386 - DNA, 15 bp, Homo sapiens
agtttatgtggctgt

SEQ ID NO: 977387 - DNA, 15 bp, Homo sapiens
gtttatgtggctgtg

SEQ ID NO: 977388 - DNA, 15 bp, Homo sapiens
tttatgtggctgtgg

SEQ ID NO: 977389 - DNA, 15 bp, Homo sapiens
ttatgtggctgtggg

SEQ ID NO: 977390 - DNA, 15 bp, Homo sapiens
tatgtggctgtgggc

SEQ ID NO: 977391 - DNA, 15 bp, Homo sapiens
atgtggctgtgggca

SEQ ID NO: 977392 - DNA, 15 bp, Homo sapiens
tgtggctgtgggcaa

SEQ ID NO: 977393 - DNA, 15 bp, Homo sapiens
gtggctgtgggcaat

SEQ ID NO: 977394 - DNA, 15 bp, Homo sapiens
tggctgtgggcaatg

SEQ ID NO: 977395 - DNA, 15 bp, Homo sapiens
ggctgtgggcaatgg

SEQ ID NO: 977396 - DNA, 15 bp, Homo sapiens
gctgtgggcaatgga

SEQ ID NO: 977397 - DNA, 15 bp, Homo sapiens
ctgtgggcaatggaa

SEQ ID NO: 977398 - DNA, 15 bp, Homo sapiens
tgtgggcaatggaat

SEQ ID NO: 977399 - DNA, 15 bp, Homo sapiens
gtgggcaatggaatg

SEQ ID NO: 977400 - DNA, 15 bp, Homo sapiens
tgggcaatggaatga

SEQ ID NO: 977401 - DNA, 15 bp, Homo sapiens
gggcaatggaatgaa

SEQ ID NO: 977402 - DNA, 15 bp, Homo sapiens
ggcaatggaatgaag

SEQ ID NO: 977403 - DNA, 15 bp, Homo sapiens
gcaatggaatgaaga

SEQ ID NO: 977404 - DNA, 15 bp, Homo sapiens
caatggaatgaagat

SEQ ID NO: 977405 - DNA, 15 bp, Homo sapiens
aatggaatgaagata

SEQ ID NO: 977406 - DNA, 15 bp, Homo sapiens
atggaatgaagatat

SEQ ID NO: 977407 - DNA, 15 bp, Homo sapiens
tggaatgaagatatt

SEQ ID NO: 977408 - DNA, 15 bp, Homo sapiens
ggaatgaagatattg

SEQ ID NO: 977409 - DNA, 15 bp, Homo sapiens
gaatgaagatattga

SEQ ID NO: 977410 - DNA, 15 bp, Homo sapiens
aatgaagatattgaa

SEQ ID NO: 977411 - DNA, 15 bp, Homo sapiens
atgaagatattgaac

SEQ ID NO: 977412 - DNA, 15 bp, Homo sapiens
tgaagatattgaact

SEQ ID NO: 977413 - DNA, 15 bp, Homo sapiens
gaagatattgaactt

SEQ ID NO: 977414 - DNA, 15 bp, Homo sapiens
aagatattgaacttc

SEQ ID NO: 977415 - DNA, 15 bp, Homo sapiens
agatattgaacttcc

SEQ ID NO: 977416 - DNA, 15 bp, Homo sapiens
gatattgaacttcca

SEQ ID NO: 977417 - DNA, 15 bp, Homo sapiens
atattgaacttccaa

SEQ ID NO: 977418 - DNA, 15 bp, Homo sapiens
tattgaacttccaat

SEQ ID NO: 977419 - DNA, 15 bp, Homo sapiens
attgaacttccaatt

SEQ ID NO: 977420 - DNA, 15 bp, Homo sapiens
ttgaacttccaattc

SEQ ID NO: 977421 - DNA, 15 bp, Homo sapiens
tgaacttccaattcc

SEQ ID NO: 977422 - DNA, 15 bp, Homo sapiens
gaacttccaattccc

SEQ ID NO: 977423 - DNA, 15 bp, Homo sapiens
aacttccaattccct

SEQ ID NO: 977424 - DNA, 15 bp, Homo sapiens
acttccaattccctg

SEQ ID NO: 977425 - DNA, 15 bp, Homo sapiens
cttccaattccctgt

SEQ ID NO: 977426 - DNA, 15 bp, Homo sapiens
ttccaattccctgtt

SEQ ID NO: 977427 - DNA, 15 bp, Homo sapiens
tccaattccctgttg

SEQ ID NO: 977428 - DNA, 15 bp, Homo sapiens
ccaattccctgttgg

SEQ ID NO: 977429 - DNA, 15 bp, Homo sapiens
caattccctgttggg

SEQ ID NO: 977430 - DNA, 15 bp, Homo sapiens
aattccctgttgggt

SEQ ID NO: 977431 - DNA, 15 bp, Homo sapiens
attccctgttgggtt

SEQ ID NO: 977432 - DNA, 15 bp, Homo sapiens
ttccctgttgggttt

SEQ ID NO: 977433 - DNA, 15 bp, Homo sapiens
tccctgttgggtttc

SEQ ID NO: 977434 - DNA, 15 bp, Homo sapiens
ccctgttgggtttcc

SEQ ID NO: 977435 - DNA, 15 bp, Homo sapiens
cctgttgggtttcca

SEQ ID NO: 977436 - DNA, 15 bp, Homo sapiens
ctgttgggtttccac

SEQ ID NO: 977437 - DNA, 15 bp, Homo sapiens
tgttgggtttccaca

SEQ ID NO: 977438 - DNA, 15 bp, Homo sapiens
gttgggtttccacaa

SEQ ID NO: 977439 - DNA, 15 bp, Homo sapiens
ttgggtttccacaat

SEQ ID NO: 977440 - DNA, 15 bp, Homo sapiens
tgggtttccacaatt

SEQ ID NO: 977441 - DNA, 15 bp, Homo sapiens
gggtttccacaatta

SEQ ID NO: 977442 - DNA, 15 bp, Homo sapiens
ggtttccacaattac

SEQ ID NO: 977443 - DNA, 15 bp, Homo sapiens
gtttccacaattaca

SEQ ID NO: 977444 - DNA, 15 bp, Homo sapiens
tttccacaattacaa

SEQ ID NO: 977445 - DNA, 15 bp, Homo sapiens
ttccacaattacaag

SEQ ID NO: 977446 - DNA, 15 bp, Homo sapiens
tccacaattacaagt

SEQ ID NO: 977447 - DNA, 15 bp, Homo sapiens
ccacaattacaagtc

SEQ ID NO: 977448 - DNA, 15 bp, Homo sapiens
cacaattacaagtca

SEQ ID NO: 977449 - DNA, 15 bp, Homo sapiens
acaattacaagtcaa

SEQ ID NO: 977450 - DNA, 15 bp, Homo sapiens
caattacaagtcaat

SEQ ID NO: 977451 - DNA, 15 bp, Homo sapiens
aattacaagtcaatc

SEQ ID NO: 977452 - DNA, 15 bp, Homo sapiens
attacaagtcaatca

SEQ ID NO: 977453 - DNA, 15 bp, Homo sapiens
ttacaagtcaatcat

SEQ ID NO: 977454 - DNA, 15 bp, Homo sapiens
tacaagtcaatcatg

SEQ ID NO: 977455 - DNA, 15 bp, Homo sapiens
acaagtcaatcatga

SEQ ID NO: 977456 - DNA, 15 bp, Homo sapiens
caagtcaatcatgac

SEQ ID NO: 977457 - DNA, 15 bp, Homo sapiens
aagtcaatcatgact

SEQ ID NO: 977458 - DNA, 15 bp, Homo sapiens
agtcaatcatgactg

SEQ ID NO: 977459 - DNA, 15 bp, Homo sapiens
gtcaatcatgactgg

SEQ ID NO: 977460 - DNA, 15 bp, Homo sapiens
tcaatcatgactggt

SEQ ID NO: 977461 - DNA, 15 bp, Homo sapiens
caatcatgactggtt

SEQ ID NO: 977462 - DNA, 15 bp, Homo sapiens
aatcatgactggtta

SEQ ID NO: 977463 - DNA, 15 bp, Homo sapiens
atcatgactggttat

SEQ ID NO: 977464 - DNA, 15 bp, Homo sapiens
tcatgactggttatt

SEQ ID NO: 977465 - DNA, 15 bp, Homo sapiens
catgactggttatta

SEQ ID NO: 977466 - DNA, 15 bp, Homo sapiens
atgactggttattag

SEQ ID NO: 977467 - DNA, 15 bp, Homo sapiens
tgactggttattaga

SEQ ID NO: 977468 - DNA, 15 bp, Homo sapiens
gactggttattagaa

SEQ ID NO: 977469 - DNA, 15 bp, Homo sapiens
actggttattagaag

SEQ ID NO: 977470 - DNA, 15 bp, Homo sapiens
ctggttattagaaga

SEQ ID NO: 977471 - DNA, 15 bp, Homo sapiens
tggttattagaagac

SEQ ID NO: 977472 - DNA, 15 bp, Homo sapiens
ggttattagaagact

SEQ ID NO: 977473 - DNA, 15 bp, Homo sapiens
gttattagaagacta

SEQ ID NO: 977474 - DNA, 15 bp, Homo sapiens
ttattagaagactat

SEQ ID NO: 977475 - DNA, 15 bp, Homo sapiens
tattagaagactatt

SEQ ID NO: 977476 - DNA, 15 bp, Homo sapiens
attagaagactattt

SEQ ID NO: 977477 - DNA, 15 bp, Homo sapiens
ttagaagactatttc

SEQ ID NO: 977478 - DNA, 15 bp, Homo sapiens
tagaagactatttca

SEQ ID NO: 977479 - DNA, 15 bp, Homo sapiens
agaagactatttcag

SEQ ID NO: 977480 - DNA, 15 bp, Homo sapiens
gaagactatttcagt

SEQ ID NO: 977481 - DNA, 15 bp, Homo sapiens
aagactatttcagtt

SEQ ID NO: 977482 - DNA, 15 bp, Homo sapiens
agactatttcagtta

SEQ ID NO: 977483 - DNA, 15 bp, Homo sapiens
gactatttcagttag

SEQ ID NO: 977484 - DNA, 15 bp, Homo sapiens
actatttcagttaga

SEQ ID NO: 977485 - DNA, 15 bp, Homo sapiens
ctatttcagttagaa

SEQ ID NO: 977486 - DNA, 15 bp, Homo sapiens
tatttcagttagaac

SEQ ID NO: 977487 - DNA, 15 bp, Homo sapiens
atttcagttagaacc

SEQ ID NO: 977488 - DNA, 15 bp, Homo sapiens
tttcagttagaacca

SEQ ID NO: 977489 - DNA, 15 bp, Homo sapiens
ttcagttagaaccac

SEQ ID NO: 977490 - DNA, 15 bp, Homo sapiens
tcagttagaaccacc

SEQ ID NO: 977491 - DNA, 15 bp, Homo sapiens
cagttagaaccacca

SEQ ID NO: 977492 - DNA, 15 bp, Homo sapiens
agttagaaccaccaa

SEQ ID NO: 977493 - DNA, 15 bp, Homo sapiens
gttagaaccaccaag

SEQ ID NO: 977494 - DNA, 15 bp, Homo sapiens
ttagaaccaccaagt

SEQ ID NO: 977495 - DNA, 15 bp, Homo sapiens
tagaaccaccaagtc

SEQ ID NO: 977496 - DNA, 15 bp, Homo sapiens
agaaccaccaagtcc

SEQ ID NO: 977497 - DNA, 15 bp, Homo sapiens
gaaccaccaagtccc

SEQ ID NO: 977498 - DNA, 15 bp, Homo sapiens
aaccaccaagtccca

SEQ ID NO: 977499 - DNA, 15 bp, Homo sapiens
accaccaagtcccat

SEQ ID NO: 977500 - DNA, 15 bp, Homo sapiens
ccaccaagtcccata

SEQ ID NO: 977501 - DNA, 15 bp, Homo sapiens
caccaagtcccatat

SEQ ID NO: 977502 - DNA, 15 bp, Homo sapiens
accaagtcccatatt

SEQ ID NO: 977503 - DNA, 15 bp, Homo sapiens
ccaagtcccatattg

SEQ ID NO: 977504 - DNA, 15 bp, Homo sapiens
caagtcccatattgt

SEQ ID NO: 977505 - DNA, 15 bp, Homo sapiens
aagtcccatattgtc

SEQ ID NO: 977506 - DNA, 15 bp, Homo sapiens
agtcccatattgtca

SEQ ID NO: 977507 - DNA, 15 bp, Homo sapiens
gtcccatattgtcat

SEQ ID NO: 977508 - DNA, 15 bp, Homo sapiens
tcccatattgtcata

SEQ ID NO: 977509 - DNA, 15 bp, Homo sapiens
cccatattgtcatat

SEQ ID NO: 977510 - DNA, 15 bp, Homo sapiens
ccatattgtcatatt

SEQ ID NO: 977511 - DNA, 15 bp, Homo sapiens
catattgtcatattg

SEQ ID NO: 977512 - DNA, 15 bp, Homo sapiens
atattgtcatattgt

SEQ ID NO: 977513 - DNA, 15 bp, Homo sapiens
tattgtcatattgta

SEQ ID NO: 977514 - DNA, 15 bp, Homo sapiens
attgtcatattgtat

SEQ ID NO: 977515 - DNA, 15 bp, Homo sapiens
ttgtcatattgtatg

SEQ ID NO: 977516 - DNA, 15 bp, Homo sapiens
tgtcatattgtatgt

SEQ ID NO: 977517 - DNA, 15 bp, Homo sapiens
gtcatattgtatgtt

SEQ ID NO: 977518 - DNA, 15 bp, Homo sapiens
tcatattgtatgttt

SEQ ID NO: 977519 - DNA, 15 bp, Homo sapiens
catattgtatgttta

SEQ ID NO: 977520 - DNA, 15 bp, Homo sapiens
atattgtatgtttaa

SEQ ID NO: 977521 - DNA, 15 bp, Homo sapiens
tattgtatgtttaat

SEQ ID NO: 977522 - DNA, 15 bp, Homo sapiens
attgtatgtttaatt

SEQ ID NO: 977523 - DNA, 15 bp, Homo sapiens
ttgtatgtttaatta

SEQ ID NO: 977524 - DNA, 15 bp, Homo sapiens
tgtatgtttaattat

SEQ ID NO: 977525 - DNA, 15 bp, Homo sapiens
gtatgtttaattatt

SEQ ID NO: 977526 - DNA, 15 bp, Homo sapiens
tatgtttaattatta

SEQ ID NO: 977527 - DNA, 15 bp, Homo sapiens
atgtttaattattaa

SEQ ID NO: 977528 - DNA, 15 bp, Homo sapiens
tgtttaattattaag

SEQ ID NO: 977529 - DNA, 15 bp, Homo sapiens
gtttaattattaagt

SEQ ID NO: 977530 - DNA, 15 bp, Homo sapiens
tttaattattaagtg

SEQ ID NO: 977531 - DNA, 15 bp, Homo sapiens
ttaattattaagtga

SEQ ID NO: 977532 - DNA, 15 bp, Homo sapiens
taattattaagtgaa

SEQ ID NO: 977533 - DNA, 15 bp, Homo sapiens
aattattaagtgaag

SEQ ID NO: 977534 - DNA, 15 bp, Homo sapiens
attattaagtgaagc

SEQ ID NO: 977535 - DNA, 15 bp, Homo sapiens
ttattaagtgaagca

SEQ ID NO: 977536 - DNA, 15 bp, Homo sapiens
tattaagtgaagcag

SEQ ID NO: 977537 - DNA, 15 bp, Homo sapiens
attaagtgaagcagt

SEQ ID NO: 977538 - DNA, 15 bp, Homo sapiens
ttaagtgaagcagtc

SEQ ID NO: 977539 - DNA, 15 bp, Homo sapiens
taagtgaagcagtct

SEQ ID NO: 977540 - DNA, 15 bp, Homo sapiens
aagtgaagcagtctt

SEQ ID NO: 977541 - DNA, 15 bp, Homo sapiens
agtgaagcagtcttc

SEQ ID NO: 977542 - DNA, 15 bp, Homo sapiens
gtgaagcagtcttct

SEQ ID NO: 977543 - DNA, 15 bp, Homo sapiens
tgaagcagtcttctt

SEQ ID NO: 977544 - DNA, 15 bp, Homo sapiens
gaagcagtcttcttt

SEQ ID NO: 977545 - DNA, 15 bp, Homo sapiens
aagcagtcttctttt

SEQ ID NO: 977546 - DNA, 15 bp, Homo sapiens
agcagtcttcttttc

SEQ ID NO: 977547 - DNA, 15 bp, Homo sapiens
gcagtcttcttttcg

SEQ ID NO: 977548 - DNA, 15 bp, Homo sapiens
cagtcttcttttcgt

SEQ ID NO: 977549 - DNA, 15 bp, Homo sapiens
agtcttcttttcgtg

SEQ ID NO: 977550 - DNA, 15 bp, Homo sapiens
gtcttcttttcgtgt

SEQ ID NO: 977551 - DNA, 15 bp, Homo sapiens
tcttcttttcgtgtt

SEQ ID NO: 977552 - DNA, 15 bp, Homo sapiens
cttcttttcgtgttt

SEQ ID NO: 977553 - DNA, 15 bp, Homo sapiens
ttcttttcgtgtttt

SEQ ID NO: 977554 - DNA, 15 bp, Homo sapiens
tcttttcgtgttttc

SEQ ID NO: 977555 - DNA, 15 bp, Homo sapiens
cttttcgtgttttcc

SEQ ID NO: 977556 - DNA, 15 bp, Homo sapiens
ttttcgtgttttcca

SEQ ID NO: 977557 - DNA, 15 bp, Homo sapiens
tttcgtgttttccat

SEQ ID NO: 977558 - DNA, 15 bp, Homo sapiens
ttcgtgttttccata

SEQ ID NO: 977559 - DNA, 15 bp, Homo sapiens
tcgtgttttccataa

SEQ ID NO: 977560 - DNA, 15 bp, Homo sapiens
cgtgttttccataat

SEQ ID NO: 977561 - DNA, 15 bp, Homo sapiens
gtgttttccataatt

SEQ ID NO: 977562 - DNA, 15 bp, Homo sapiens
tgttttccataatta

SEQ ID NO: 977563 - DNA, 15 bp, Homo sapiens
gttttccataattag

SEQ ID NO: 977564 - DNA, 15 bp, Homo sapiens
ttttccataattagg

SEQ ID NO: 977565 - DNA, 15 bp, Homo sapiens
tttccataattaggg

SEQ ID NO: 977566 - DNA, 15 bp, Homo sapiens
ttccataattagggc

SEQ ID NO: 977567 - DNA, 15 bp, Homo sapiens
tccataattagggca

SEQ ID NO: 977568 - DNA, 15 bp, Homo sapiens
ccataattagggcat

SEQ ID NO: 977569 - DNA, 15 bp, Homo sapiens
cataattagggcatt

SEQ ID NO: 977570 - DNA, 15 bp, Homo sapiens
ataattagggcattc

SEQ ID NO: 977571 - DNA, 15 bp, Homo sapiens
taattagggcattcc

SEQ ID NO: 977572 - DNA, 15 bp, Homo sapiens
aattagggcattcca

SEQ ID NO: 977573 - DNA, 15 bp, Homo sapiens
attagggcattccag

SEQ ID NO: 977574 - DNA, 15 bp, Homo sapiens
ttagggcattccaga

SEQ ID NO: 977575 - DNA, 15 bp, Homo sapiens
tagggcattccagaa

SEQ ID NO: 977576 - DNA, 15 bp, Homo sapiens
agggcattccagaaa

SEQ ID NO: 977577 - DNA, 15 bp, Homo sapiens
gggcattccagaaag

SEQ ID NO: 977578 - DNA, 15 bp, Homo sapiens
ggcattccagaaaga

SEQ ID NO: 977579 - DNA, 15 bp, Homo sapiens
gcattccagaaagat

SEQ ID NO: 977580 - DNA, 15 bp, Homo sapiens
cattccagaaagatg

SEQ ID NO: 977581 - DNA, 15 bp, Homo sapiens
attccagaaagatga

SEQ ID NO: 977582 - DNA, 15 bp, Homo sapiens
ttccagaaagatgag

SEQ ID NO: 977583 - DNA, 15 bp, Homo sapiens
tccagaaagatgagg

SEQ ID NO: 977584 - DNA, 15 bp, Homo sapiens
ccagaaagatgagga

SEQ ID NO: 977585 - DNA, 15 bp, Homo sapiens
cagaaagatgaggat

SEQ ID NO: 977586 - DNA, 15 bp, Homo sapiens
agaaagatgaggata

SEQ ID NO: 977587 - DNA, 15 bp, Homo sapiens
gaaagatgaggatat

SEQ ID NO: 977588 - DNA, 15 bp, Homo sapiens
aaagatgaggatatt

SEQ ID NO: 977589 - DNA, 15 bp, Homo sapiens
aagatgaggatattt

SEQ ID NO: 977590 - DNA, 15 bp, Homo sapiens
agatgaggatatttg

SEQ ID NO: 977591 - DNA, 15 bp, Homo sapiens
gatgaggatatttgc

SEQ ID NO: 977592 - DNA, 15 bp, Homo sapiens
atgaggatatttgct

SEQ ID NO: 977593 - DNA, 15 bp, Homo sapiens
tgaggatatttgctg

SEQ ID NO: 977594 - DNA, 15 bp, Homo sapiens
gaggatatttgctgt

SEQ ID NO: 977595 - DNA, 15 bp, Homo sapiens
aggatatttgctgtc

SEQ ID NO: 977596 - DNA, 15 bp, Homo sapiens
ggatatttgctgtct

SEQ ID NO: 977597 - DNA, 15 bp, Homo sapiens
gatatttgctgtctt

SEQ ID NO: 977598 - DNA, 15 bp, Homo sapiens
atatttgctgtcttt

SEQ ID NO: 977599 - DNA, 15 bp, Homo sapiens
tatttgctgtcttta

SEQ ID NO: 977600 - DNA, 15 bp, Homo sapiens
atttgctgtctttat

SEQ ID NO: 977601 - DNA, 15 bp, Homo sapiens
tttgctgtctttata

SEQ ID NO: 977602 - DNA, 15 bp, Homo sapiens
ttgctgtctttatat

SEQ ID NO: 977603 - DNA, 15 bp, Homo sapiens
tgctgtctttatatt

SEQ ID NO: 977604 - DNA, 15 bp, Homo sapiens
gctgtctttatattc

SEQ ID NO: 977605 - DNA, 15 bp, Homo sapiens
ctgtctttatattca

SEQ ID NO: 977606 - DNA, 15 bp, Homo sapiens
tgtctttatattcat

SEQ ID NO: 977607 - DNA, 15 bp, Homo sapiens
gtctttatattcatg

SEQ ID NO: 977608 - DNA, 15 bp, Homo sapiens
tctttatattcatga

SEQ ID NO: 977609 - DNA, 15 bp, Homo sapiens
ctttatattcatgac

SEQ ID NO: 977610 - DNA, 15 bp, Homo sapiens
tttatattcatgacc

SEQ ID NO: 977611 - DNA, 15 bp, Homo sapiens
ttatattcatgacct

SEQ ID NO: 977612 - DNA, 15 bp, Homo sapiens
tatattcatgaccta

SEQ ID NO: 977613 - DNA, 15 bp, Homo sapiens
atattcatgacctac

SEQ ID NO: 977614 - DNA, 15 bp, Homo sapiens
tattcatgacctact

SEQ ID NO: 977615 - DNA, 15 bp, Homo sapiens
attcatgacctactg

SEQ ID NO: 977616 - DNA, 15 bp, Homo sapiens
ttcatgacctactgg

SEQ ID NO: 977617 - DNA, 15 bp, Homo sapiens
tcatgacctactggc

SEQ ID NO: 977618 - DNA, 15 bp, Homo sapiens
catgacctactggca

SEQ ID NO: 977619 - DNA, 15 bp, Homo sapiens
atgacctactggcat

SEQ ID NO: 977620 - DNA, 15 bp, Homo sapiens
tgacctactggcatt

SEQ ID NO: 977621 - DNA, 15 bp, Homo sapiens
gacctactggcattt

SEQ ID NO: 977622 - DNA, 15 bp, Homo sapiens
acctactggcatttg

SEQ ID NO: 977623 - DNA, 15 bp, Homo sapiens
cctactggcatttgc

SEQ ID NO: 977624 - DNA, 15 bp, Homo sapiens
ctactggcatttgct

SEQ ID NO: 977625 - DNA, 15 bp, Homo sapiens
tactggcatttgctg

SEQ ID NO: 977626 - DNA, 15 bp, Homo sapiens
actggcatttgctga

SEQ ID NO: 977627 - DNA, 15 bp, Homo sapiens
ctggcatttgctgaa

SEQ ID NO: 977628 - DNA, 15 bp, Homo sapiens
tggcatttgctgaac

SEQ ID NO: 977629 - DNA, 15 bp, Homo sapiens
ggcatttgctgaacg

SEQ ID NO: 977630 - DNA, 15 bp, Homo sapiens
gcatttgctgaacgg

SEQ ID NO: 977631 - DNA, 15 bp, Homo sapiens
catttgctgaacggt

SEQ ID NO: 977632 - DNA, 15 bp, Homo sapiens
atttgctgaacggta

SEQ ID NO: 977633 - DNA, 15 bp, Homo sapiens
tttgctgaacggtaa

SEQ ID NO: 977634 - DNA, 15 bp, Homo sapiens
ttgctgaacggtaag

SEQ ID NO: 977635 - DNA, 15 bp, Homo sapiens
tgctgaacggtaaga

SEQ ID NO: 977636 - DNA, 15 bp, Homo sapiens
gctgaacggtaagac

SEQ ID NO: 977637 - DNA, 15 bp, Homo sapiens
ctgaacggtaagaca

SEQ ID NO: 977638 - DNA, 15 bp, Homo sapiens
tgaacggtaagacac

SEQ ID NO: 977639 - DNA, 15 bp, Homo sapiens
gaacggtaagacacc

SEQ ID NO: 977640 - DNA, 15 bp, Homo sapiens
aacggtaagacacca

SEQ ID NO: 977641 - DNA, 15 bp, Homo sapiens
acggtaagacaccaa

SEQ ID NO: 977642 - DNA, 15 bp, Homo sapiens
cggtaagacaccaaa

SEQ ID NO: 977643 - DNA, 15 bp, Homo sapiens
ggtaagacaccaaat

SEQ ID NO: 977644 - DNA, 15 bp, Homo sapiens
gtaagacaccaaatc

SEQ ID NO: 977645 - DNA, 15 bp, Homo sapiens
taagacaccaaatcc

SEQ ID NO: 977646 - DNA, 15 bp, Homo sapiens
aagacaccaaatcct

SEQ ID NO: 977647 - DNA, 15 bp, Homo sapiens
agacaccaaatcctt

SEQ ID NO: 977648 - DNA, 15 bp, Homo sapiens
gacaccaaatccttc

SEQ ID NO: 977649 - DNA, 15 bp, Homo sapiens
acaccaaatccttcc

SEQ ID NO: 977650 - DNA, 15 bp, Homo sapiens
caccaaatccttcca

SEQ ID NO: 977651 - DNA, 15 bp, Homo sapiens
accaaatccttccat

SEQ ID NO: 977652 - DNA, 15 bp, Homo sapiens
ccaaatccttccatt

SEQ ID NO: 977653 - DNA, 15 bp, Homo sapiens
caaatccttccatta

SEQ ID NO: 977654 - DNA, 15 bp, Homo sapiens
aaatccttccattag

SEQ ID NO: 977655 - DNA, 15 bp, Homo sapiens
aatccttccattagg

SEQ ID NO: 977656 - DNA, 15 bp, Homo sapiens
atccttccattaggt

SEQ ID NO: 977657 - DNA, 15 bp, Homo sapiens
tccttccattaggtt

SEQ ID NO: 977658 - DNA, 15 bp, Homo sapiens
ccttccattaggttc

SEQ ID NO: 977659 - DNA, 15 bp, Homo sapiens
cttccattaggttct

SEQ ID NO: 977660 - DNA, 15 bp, Homo sapiens
ttccattaggttcta

SEQ ID NO: 977661 - DNA, 15 bp, Homo sapiens
tccattaggttctat

SEQ ID NO: 977662 - DNA, 15 bp, Homo sapiens
ccattaggttctata

SEQ ID NO: 977663 - DNA, 15 bp, Homo sapiens
cattaggttctatat

SEQ ID NO: 977664 - DNA, 15 bp, Homo sapiens
attaggttctatatt

SEQ ID NO: 977665 - DNA, 15 bp, Homo sapiens
ttaggttctatattt

SEQ ID NO: 977666 - DNA, 15 bp, Homo sapiens
taggttctatatttt

SEQ ID NO: 977667 - DNA, 15 bp, Homo sapiens
aggttctatatttta

SEQ ID NO: 977668 - DNA, 15 bp, Homo sapiens
ggttctatattttaa

SEQ ID NO: 977669 - DNA, 15 bp, Homo sapiens
gttctatattttaaa

SEQ ID NO: 977670 - DNA, 15 bp, Homo sapiens
ttctatattttaaat

SEQ ID NO: 977671 - DNA, 15 bp, Homo sapiens
tctatattttaaata

SEQ ID NO: 977672 - DNA, 15 bp, Homo sapiens
ctatattttaaatat

SEQ ID NO: 977673 - DNA, 15 bp, Homo sapiens
tatattttaaatatt

SEQ ID NO: 977674 - DNA, 15 bp, Homo sapiens
atattttaaatattt

SEQ ID NO: 977675 - DNA, 15 bp, Homo sapiens
tattttaaatatttt

SEQ ID NO: 977676 - DNA, 15 bp, Homo sapiens
attttaaatatttta

SEQ ID NO: 977677 - DNA, 15 bp, Homo sapiens
ttttaaatattttaa

SEQ ID NO: 977678 - DNA, 15 bp, Homo sapiens
tttaaatattttaac

SEQ ID NO: 977679 - DNA, 15 bp, Homo sapiens
ttaaatattttaacc

SEQ ID NO: 977680 - DNA, 15 bp, Homo sapiens
taaatattttaacca

SEQ ID NO: 977681 - DNA, 15 bp, Homo sapiens
aaatattttaaccat

SEQ ID NO: 977682 - DNA, 15 bp, Homo sapiens
aatattttaaccatg

SEQ ID NO: 977683 - DNA, 15 bp, Homo sapiens
atattttaaccatga

SEQ ID NO: 977684 - DNA, 15 bp, Homo sapiens
tattttaaccatgag

SEQ ID NO: 977685 - DNA, 15 bp, Homo sapiens
attttaaccatgagt

SEQ ID NO: 977686 - DNA, 15 bp, Homo sapiens
ttttaaccatgagtt

SEQ ID NO: 977687 - DNA, 15 bp, Homo sapiens
tttaaccatgagttt

SEQ ID NO: 977688 - DNA, 15 bp, Homo sapiens
ttaaccatgagttta

SEQ ID NO: 977689 - DNA, 15 bp, Homo sapiens
taaccatgagtttaa

SEQ ID NO: 977690 - DNA, 15 bp, Homo sapiens
aaccatgagtttaaa

SEQ ID NO: 977691 - DNA, 15 bp, Homo sapiens
accatgagtttaaaa

SEQ ID NO: 977692 - DNA, 15 bp, Homo sapiens
ccatgagtttaaaac

SEQ ID NO: 977693 - DNA, 15 bp, Homo sapiens
catgagtttaaaact

SEQ ID NO: 977694 - DNA, 15 bp, Homo sapiens
atgagtttaaaacta

SEQ ID NO: 977695 - DNA, 15 bp, Homo sapiens
tgagtttaaaactaa

SEQ ID NO: 977696 - DNA, 15 bp, Homo sapiens
gagtttaaaactaaa

SEQ ID NO: 977697 - DNA, 15 bp, Homo sapiens
agtttaaaactaaaa

SEQ ID NO: 977698 - DNA, 15 bp, Homo sapiens
gtttaaaactaaaat

SEQ ID NO: 977699 - DNA, 15 bp, Homo sapiens
tttaaaactaaaatg

SEQ ID NO: 977700 - DNA, 15 bp, Homo sapiens
ttaaaactaaaatga

SEQ ID NO: 977701 - DNA, 15 bp, Homo sapiens
taaaactaaaatgat

SEQ ID NO: 977702 - DNA, 15 bp, Homo sapiens
aaaactaaaatgatc

SEQ ID NO: 977703 - DNA, 15 bp, Homo sapiens
aaactaaaatgatca

SEQ ID NO: 977704 - DNA, 15 bp, Homo sapiens
aactaaaatgatcat

SEQ ID NO: 977705 - DNA, 15 bp, Homo sapiens
actaaaatgatcatt

SEQ ID NO: 977706 - DNA, 15 bp, Homo sapiens
ctaaaatgatcattt

SEQ ID NO: 977707 - DNA, 15 bp, Homo sapiens
taaaatgatcattta

SEQ ID NO: 977708 - DNA, 15 bp, Homo sapiens
aaaatgatcatttaa

SEQ ID NO: 977709 - DNA, 15 bp, Homo sapiens
aaatgatcatttaaa

SEQ ID NO: 977710 - DNA, 15 bp, Homo sapiens
aatgatcatttaaaa

SEQ ID NO: 977711 - DNA, 15 bp, Homo sapiens
atgatcatttaaaat

SEQ ID NO: 977712 - DNA, 15 bp, Homo sapiens
tgatcatttaaaatg

SEQ ID NO: 977713 - DNA, 15 bp, Homo sapiens
gatcatttaaaatgc

SEQ ID NO: 977714 - DNA, 15 bp, Homo sapiens
atcatttaaaatgca

SEQ ID NO: 977715 - DNA, 15 bp, Homo sapiens
tcatttaaaatgcat

SEQ ID NO: 977716 - DNA, 15 bp, Homo sapiens
catttaaaatgcatg

SEQ ID NO: 977717 - DNA, 15 bp, Homo sapiens
atttaaaatgcatgc

SEQ ID NO: 977718 - DNA, 15 bp, Homo sapiens
tttaaaatgcatgca

SEQ ID NO: 977719 - DNA, 15 bp, Homo sapiens
ttaaaatgcatgcaa

SEQ ID NO: 977720 - DNA, 15 bp, Homo sapiens
taaaatgcatgcaat

SEQ ID NO: 977721 - DNA, 15 bp, Homo sapiens
aaaatgcatgcaatt

SEQ ID NO: 977722 - DNA, 15 bp, Homo sapiens
aaatgcatgcaattt

SEQ ID NO: 977723 - DNA, 15 bp, Homo sapiens
aatgcatgcaatttt

SEQ ID NO: 977724 - DNA, 15 bp, Homo sapiens
atgcatgcaattttc

SEQ ID NO: 977725 - DNA, 15 bp, Homo sapiens
tgcatgcaattttct

SEQ ID NO: 977726 - DNA, 15 bp, Homo sapiens
gcatgcaattttctt

SEQ ID NO: 977727 - DNA, 15 bp, Homo sapiens
catgcaattttctta

SEQ ID NO: 977728 - DNA, 15 bp, Homo sapiens
atgcaattttcttat

SEQ ID NO: 977729 - DNA, 15 bp, Homo sapiens
tgcaattttcttata

SEQ ID NO: 977730 - DNA, 15 bp, Homo sapiens
gcaattttcttatag

SEQ ID NO: 977731 - DNA, 15 bp, Homo sapiens
caattttcttataga

SEQ ID NO: 977732 - DNA, 15 bp, Homo sapiens
aattttcttatagag

SEQ ID NO: 977733 - DNA, 15 bp, Homo sapiens
attttcttatagaga

SEQ ID NO: 977734 - DNA, 15 bp, Homo sapiens
ttttcttatagagag

SEQ ID NO: 977735 - DNA, 15 bp, Homo sapiens
tttcttatagagaga

SEQ ID NO: 977736 - DNA, 15 bp, Homo sapiens
ttcttatagagagaa

SEQ ID NO: 977737 - DNA, 15 bp, Homo sapiens
tcttatagagagaac

SEQ ID NO: 977738 - DNA, 15 bp, Homo sapiens
cttatagagagaaca

SEQ ID NO: 977739 - DNA, 15 bp, Homo sapiens
ttatagagagaacat

SEQ ID NO: 977740 - DNA, 15 bp, Homo sapiens
tatagagagaacatt

SEQ ID NO: 977741 - DNA, 15 bp, Homo sapiens
atagagagaacattc

SEQ ID NO: 977742 - DNA, 15 bp, Homo sapiens
tagagagaacattct

SEQ ID NO: 977743 - DNA, 15 bp, Homo sapiens
agagagaacattcta

SEQ ID NO: 977744 - DNA, 15 bp, Homo sapiens
gagagaacattctat

SEQ ID NO: 977745 - DNA, 15 bp, Homo sapiens
agagaacattctatt

SEQ ID NO: 977746 - DNA, 15 bp, Homo sapiens
gagaacattctattc

SEQ ID NO: 977747 - DNA, 15 bp, Homo sapiens
agaacattctattct

SEQ ID NO: 977748 - DNA, 15 bp, Homo sapiens
gaacattctattctt

SEQ ID NO: 977749 - DNA, 15 bp, Homo sapiens
aacattctattcttt

SEQ ID NO: 977750 - DNA, 15 bp, Homo sapiens
acattctattctttc

SEQ ID NO: 977751 - DNA, 15 bp, Homo sapiens
cattctattctttct

SEQ ID NO: 977752 - DNA, 15 bp, Homo sapiens
attctattctttctt

SEQ ID NO: 977753 - DNA, 15 bp, Homo sapiens
ttctattctttcttc

SEQ ID NO: 977754 - DNA, 15 bp, Homo sapiens
tctattctttcttct

SEQ ID NO: 977755 - DNA, 15 bp, Homo sapiens
ctattctttcttcta

SEQ ID NO: 977756 - DNA, 15 bp, Homo sapiens
tattctttcttctac

SEQ ID NO: 977757 - DNA, 15 bp, Homo sapiens
attctttcttctact

SEQ ID NO: 977758 - DNA, 15 bp, Homo sapiens
ttctttcttctactt

SEQ ID NO: 977759 - DNA, 15 bp, Homo sapiens
tctttcttctacttt

SEQ ID NO: 977760 - DNA, 15 bp, Homo sapiens
ctttcttctacttta

SEQ ID NO: 977761 - DNA, 15 bp, Homo sapiens
tttcttctactttac

SEQ ID NO: 977762 - DNA, 15 bp, Homo sapiens
ttcttctactttaca

SEQ ID NO: 977763 - DNA, 15 bp, Homo sapiens
tcttctactttacac

SEQ ID NO: 977764 - DNA, 15 bp, Homo sapiens
cttctactttacaca

SEQ ID NO: 977765 - DNA, 15 bp, Homo sapiens
ttctactttacacaa

SEQ ID NO: 977766 - DNA, 15 bp, Homo sapiens
tctactttacacaat

SEQ ID NO: 977767 - DNA, 15 bp, Homo sapiens
ctactttacacaatg

SEQ ID NO: 977768 - DNA, 15 bp, Homo sapiens
tactttacacaatgg

SEQ ID NO: 977769 - DNA, 15 bp, Homo sapiens
actttacacaatggc

SEQ ID NO: 977770 - DNA, 15 bp, Homo sapiens
ctttacacaatggca

SEQ ID NO: 977771 - DNA, 15 bp, Homo sapiens
tttacacaatggcaa

SEQ ID NO: 977772 - DNA, 15 bp, Homo sapiens
ttacacaatggcaaa

SEQ ID NO: 977773 - DNA, 15 bp, Homo sapiens
tacacaatggcaaag

SEQ ID NO: 977774 - DNA, 15 bp, Homo sapiens
acacaatggcaaagt

SEQ ID NO: 977775 - DNA, 15 bp, Homo sapiens
cacaatggcaaagtc

SEQ ID NO: 977776 - DNA, 15 bp, Homo sapiens
acaatggcaaagtct

SEQ ID NO: 977777 - DNA, 15 bp, Homo sapiens
caatggcaaagtctt

SEQ ID NO: 977778 - DNA, 15 bp, Homo sapiens
aatggcaaagtcttc

SEQ ID NO: 977779 - DNA, 15 bp, Homo sapiens
atggcaaagtcttct

SEQ ID NO: 977780 - DNA, 15 bp, Homo sapiens
tggcaaagtcttctt

SEQ ID NO: 977781 - DNA, 15 bp, Homo sapiens
ggcaaagtcttcttt

SEQ ID NO: 977782 - DNA, 15 bp, Homo sapiens
gcaaagtcttctttc

SEQ ID NO: 977783 - DNA, 15 bp, Homo sapiens
caaagtcttctttct

SEQ ID NO: 977784 - DNA, 15 bp, Homo sapiens
aaagtcttctttcta

SEQ ID NO: 977785 - DNA, 15 bp, Homo sapiens
aagtcttctttctac

SEQ ID NO: 977786 - DNA, 15 bp, Homo sapiens
agtcttctttctact

SEQ ID NO: 977787 - DNA, 15 bp, Homo sapiens
gtcttctttctactt

SEQ ID NO: 977788 - DNA, 15 bp, Homo sapiens
tcttctttctacttt

SEQ ID NO: 977789 - DNA, 15 bp, Homo sapiens
cttctttctacttta

SEQ ID NO: 977790 - DNA, 15 bp, Homo sapiens
ttctttctactttac

SEQ ID NO: 977791 - DNA, 15 bp, Homo sapiens
tctttctactttacg

SEQ ID NO: 977792 - DNA, 15 bp, Homo sapiens
ctttctactttacgc

SEQ ID NO: 977793 - DNA, 15 bp, Homo sapiens
tttctactttacgca

SEQ ID NO: 977794 - DNA, 15 bp, Homo sapiens
ttctactttacgcaa

SEQ ID NO: 977795 - DNA, 15 bp, Homo sapiens
tctactttacgcaat

SEQ ID NO: 977796 - DNA, 15 bp, Homo sapiens
ctactttacgcaatg

SEQ ID NO: 977797 - DNA, 15 bp, Homo sapiens
tactttacgcaatga

SEQ ID NO: 977798 - DNA, 15 bp, Homo sapiens
actttacgcaatgat

SEQ ID NO: 977799 - DNA, 15 bp, Homo sapiens
ctttacgcaatgata

SEQ ID NO: 977800 - DNA, 15 bp, Homo sapiens
tttacgcaatgataa

SEQ ID NO: 977801 - DNA, 15 bp, Homo sapiens
ttacgcaatgataaa

SEQ ID NO: 977802 - DNA, 15 bp, Homo sapiens
tacgcaatgataaag

SEQ ID NO: 977803 - DNA, 15 bp, Homo sapiens
acgcaatgataaagt

SEQ ID NO: 977804 - DNA, 15 bp, Homo sapiens
cgcaatgataaagtt

SEQ ID NO: 977805 - DNA, 15 bp, Homo sapiens
gcaatgataaagtta

SEQ ID NO: 977806 - DNA, 15 bp, Homo sapiens
caatgataaagttac

SEQ ID NO: 977807 - DNA, 15 bp, Homo sapiens
aatgataaagttacc

SEQ ID NO: 977808 - DNA, 15 bp, Homo sapiens
atgataaagttacct

SEQ ID NO: 977809 - DNA, 15 bp, Homo sapiens
tgataaagttacctg

SEQ ID NO: 977810 - DNA, 15 bp, Homo sapiens
gataaagttacctgt

SEQ ID NO: 977811 - DNA, 15 bp, Homo sapiens
ataaagttacctgtg

SEQ ID NO: 977812 - DNA, 15 bp, Homo sapiens
taaagttacctgtgt

SEQ ID NO: 977813 - DNA, 15 bp, Homo sapiens
aaagttacctgtgtc

SEQ ID NO: 977814 - DNA, 15 bp, Homo sapiens
aagttacctgtgtca

SEQ ID NO: 977815 - DNA, 15 bp, Homo sapiens
agttacctgtgtcat

SEQ ID NO: 977816 - DNA, 15 bp, Homo sapiens
gttacctgtgtcatt

SEQ ID NO: 977817 - DNA, 15 bp, Homo sapiens
ttacctgtgtcattt

SEQ ID NO: 977818 - DNA, 15 bp, Homo sapiens
tacctgtgtcatttt

SEQ ID NO: 977819 - DNA, 15 bp, Homo sapiens
acctgtgtcattttg

SEQ ID NO: 977820 - DNA, 15 bp, Homo sapiens
cctgtgtcattttgt

SEQ ID NO: 977821 - DNA, 15 bp, Homo sapiens
ctgtgtcattttgta

SEQ ID NO: 977822 - DNA, 15 bp, Homo sapiens
tgtgtcattttgtaa

SEQ ID NO: 977823 - DNA, 15 bp, Homo sapiens
gtgtcattttgtaaa

SEQ ID NO: 977824 - DNA, 15 bp, Homo sapiens
tgtcattttgtaaaa

SEQ ID NO: 977825 - DNA, 15 bp, Homo sapiens
gtcattttgtaaaaa

SEQ ID NO: 977826 - DNA, 15 bp, Homo sapiens
tcattttgtaaaaat

SEQ ID NO: 977827 - DNA, 15 bp, Homo sapiens
cattttgtaaaaata

SEQ ID NO: 977828 - DNA, 15 bp, Homo sapiens
attttgtaaaaatat

SEQ ID NO: 977829 - DNA, 15 bp, Homo sapiens
ttttgtaaaaatata

SEQ ID NO: 977830 - DNA, 15 bp, Homo sapiens
tttgtaaaaatatag

SEQ ID NO: 977831 - DNA, 15 bp, Homo sapiens
ttgtaaaaatataga

SEQ ID NO: 977832 - DNA, 15 bp, Homo sapiens
tgtaaaaatatagag

SEQ ID NO: 977833 - DNA, 15 bp, Homo sapiens
gtaaaaatatagaga

SEQ ID NO: 977834 - DNA, 15 bp, Homo sapiens
taaaaatatagagaa

SEQ ID NO: 977835 - DNA, 15 bp, Homo sapiens
aaaaatatagagaat

SEQ ID NO: 977836 - DNA, 15 bp, Homo sapiens
aaaatatagagaata

SEQ ID NO: 977837 - DNA, 15 bp, Homo sapiens
aaatatagagaatat

SEQ ID NO: 977838 - DNA, 15 bp, Homo sapiens
aatatagagaatata

SEQ ID NO: 977839 - DNA, 15 bp, Homo sapiens
atatagagaatatag

SEQ ID NO: 977840 - DNA, 15 bp, Homo sapiens
tatagagaatataga

SEQ ID NO: 977841 - DNA, 15 bp, Homo sapiens
atagagaatatagac

SEQ ID NO: 977842 - DNA, 15 bp, Homo sapiens
tagagaatatagaca

SEQ ID NO: 977843 - DNA, 15 bp, Homo sapiens
agagaatatagacaa

SEQ ID NO: 977844 - DNA, 15 bp, Homo sapiens
gagaatatagacaaa

SEQ ID NO: 977845 - DNA, 15 bp, Homo sapiens
agaatatagacaaat

SEQ ID NO: 977846 - DNA, 15 bp, Homo sapiens
gaatatagacaaatt

SEQ ID NO: 977847 - DNA, 15 bp, Homo sapiens
aatatagacaaattg

SEQ ID NO: 977848 - DNA, 15 bp, Homo sapiens
atatagacaaattga

SEQ ID NO: 977849 - DNA, 15 bp, Homo sapiens
tatagacaaattgaa

SEQ ID NO: 977850 - DNA, 15 bp, Homo sapiens
atagacaaattgaaa

SEQ ID NO: 977851 - DNA, 15 bp, Homo sapiens
tagacaaattgaaag

SEQ ID NO: 977852 - DNA, 15 bp, Homo sapiens
agacaaattgaaaga

SEQ ID NO: 977853 - DNA, 15 bp, Homo sapiens
gacaaattgaaagac

SEQ ID NO: 977854 - DNA, 15 bp, Homo sapiens
acaaattgaaagaca

SEQ ID NO: 977855 - DNA, 15 bp, Homo sapiens
caaattgaaagacac

SEQ ID NO: 977856 - DNA, 15 bp, Homo sapiens
aaattgaaagacaca

SEQ ID NO: 977857 - DNA, 15 bp, Homo sapiens
aattgaaagacacaa

SEQ ID NO: 977858 - DNA, 15 bp, Homo sapiens
attgaaagacacaaa

SEQ ID NO: 977859 - DNA, 15 bp, Homo sapiens
ttgaaagacacaaaa

SEQ ID NO: 977860 - DNA, 15 bp, Homo sapiens
tgaaagacacaaaat

SEQ ID NO: 977861 - DNA, 15 bp, Homo sapiens
gaaagacacaaaata

SEQ ID NO: 977862 - DNA, 15 bp, Homo sapiens
aaagacacaaaataa

SEQ ID NO: 977863 - DNA, 15 bp, Homo sapiens
aagacacaaaataat

SEQ ID NO: 977864 - DNA, 15 bp, Homo sapiens
agacacaaaataatc

SEQ ID NO: 977865 - DNA, 15 bp, Homo sapiens
gacacaaaataatct

SEQ ID NO: 977866 - DNA, 15 bp, Homo sapiens
acacaaaataatcta

SEQ ID NO: 977867 - DNA, 15 bp, Homo sapiens
cacaaaataatctat

SEQ ID NO: 977868 - DNA, 15 bp, Homo sapiens
acaaaataatctatt

SEQ ID NO: 977869 - DNA, 15 bp, Homo sapiens
caaaataatctatta

SEQ ID NO: 977870 - DNA, 15 bp, Homo sapiens
aaaataatctattac

SEQ ID NO: 977871 - DNA, 15 bp, Homo sapiens
aaataatctattacc

SEQ ID NO: 977872 - DNA, 15 bp, Homo sapiens
aataatctattaccc

SEQ ID NO: 977873 - DNA, 15 bp, Homo sapiens
ataatctattaccca

SEQ ID NO: 977874 - DNA, 15 bp, Homo sapiens
taatctattacccat

SEQ ID NO: 977875 - DNA, 15 bp, Homo sapiens
aatctattacccatt

SEQ ID NO: 977876 - DNA, 15 bp, Homo sapiens
atctattacccattt

SEQ ID NO: 977877 - DNA, 15 bp, Homo sapiens
tctattacccatttc

SEQ ID NO: 977878 - DNA, 15 bp, Homo sapiens
ctattacccatttcc

SEQ ID NO: 977879 - DNA, 15 bp, Homo sapiens
tattacccatttccc

SEQ ID NO: 977880 - DNA, 15 bp, Homo sapiens
attacccatttccca

SEQ ID NO: 977881 - DNA, 15 bp, Homo sapiens
ttacccatttcccag

SEQ ID NO: 977882 - DNA, 15 bp, Homo sapiens
tacccatttcccagg

SEQ ID NO: 977883 - DNA, 15 bp, Homo sapiens
acccatttcccaggg

SEQ ID NO: 977884 - DNA, 15 bp, Homo sapiens
cccatttcccagggt

SEQ ID NO: 977885 - DNA, 15 bp, Homo sapiens
ccatttcccagggtt

SEQ ID NO: 977886 - DNA, 15 bp, Homo sapiens
catttcccagggtta

SEQ ID NO: 977887 - DNA, 15 bp, Homo sapiens
atttcccagggttaa

SEQ ID NO: 977888 - DNA, 15 bp, Homo sapiens
tttcccagggttaac

SEQ ID NO: 977889 - DNA, 15 bp, Homo sapiens
ttcccagggttaact

SEQ ID NO: 977890 - DNA, 15 bp, Homo sapiens
tcccagggttaacta

SEQ ID NO: 977891 - DNA, 15 bp, Homo sapiens
cccagggttaactac

SEQ ID NO: 977892 - DNA, 15 bp, Homo sapiens
ccagggttaactact

SEQ ID NO: 977893 - DNA, 15 bp, Homo sapiens
cagggttaactactg

SEQ ID NO: 977894 - DNA, 15 bp, Homo sapiens
agggttaactactga

SEQ ID NO: 977895 - DNA, 15 bp, Homo sapiens
gggttaactactgaa

SEQ ID NO: 977896 - DNA, 15 bp, Homo sapiens
ggttaactactgaaa

SEQ ID NO: 977897 - DNA, 15 bp, Homo sapiens
gttaactactgaaaa

SEQ ID NO: 977898 - DNA, 15 bp, Homo sapiens
ttaactactgaaaat

SEQ ID NO: 977899 - DNA, 15 bp, Homo sapiens
taactactgaaaata

SEQ ID NO: 977900 - DNA, 15 bp, Homo sapiens
aactactgaaaatat

SEQ ID NO: 977901 - DNA, 15 bp, Homo sapiens
actactgaaaatatc

SEQ ID NO: 977902 - DNA, 15 bp, Homo sapiens
ctactgaaaatatct

SEQ ID NO: 977903 - DNA, 15 bp, Homo sapiens
tactgaaaatatctg

SEQ ID NO: 977904 - DNA, 15 bp, Homo sapiens
actgaaaatatctgg

SEQ ID NO: 977905 - DNA, 15 bp, Homo sapiens
ctgaaaatatctggg

SEQ ID NO: 977906 - DNA, 15 bp, Homo sapiens
tgaaaatatctgggg

SEQ ID NO: 977907 - DNA, 15 bp, Homo sapiens
gaaaatatctgggga

SEQ ID NO: 977908 - DNA, 15 bp, Homo sapiens
aaaatatctggggaa

SEQ ID NO: 977909 - DNA, 15 bp, Homo sapiens
aaatatctggggaaa

SEQ ID NO: 977910 - DNA, 15 bp, Homo sapiens
aatatctggggaaat

SEQ ID NO: 977911 - DNA, 15 bp, Homo sapiens
atatctggggaaatg

SEQ ID NO: 977912 - DNA, 15 bp, Homo sapiens
tatctggggaaatgg

SEQ ID NO: 977913 - DNA, 15 bp, Homo sapiens
atctggggaaatggc

SEQ ID NO: 977914 - DNA, 15 bp, Homo sapiens
tctggggaaatggcc

SEQ ID NO: 977915 - DNA, 15 bp, Homo sapiens
ctggggaaatggcct

SEQ ID NO: 977916 - DNA, 15 bp, Homo sapiens
tggggaaatggcctg

SEQ ID NO: 977917 - DNA, 15 bp, Homo sapiens
ggggaaatggcctgt

SEQ ID NO: 977918 - DNA, 15 bp, Homo sapiens
gggaaatggcctgta

SEQ ID NO: 977919 - DNA, 15 bp, Homo sapiens
ggaaatggcctgtat

SEQ ID NO: 977920 - DNA, 15 bp, Homo sapiens
gaaatggcctgtatg

SEQ ID NO: 977921 - DNA, 15 bp, Homo sapiens
aaatggcctgtatgt

SEQ ID NO: 977922 - DNA, 15 bp, Homo sapiens
aatggcctgtatgta

SEQ ID NO: 977923 - DNA, 15 bp, Homo sapiens
atggcctgtatgtat

SEQ ID NO: 977924 - DNA, 15 bp, Homo sapiens
tggcctgtatgtata

SEQ ID NO: 977925 - DNA, 15 bp, Homo sapiens
ggcctgtatgtatac

SEQ ID NO: 977926 - DNA, 15 bp, Homo sapiens
gcctgtatgtataca

SEQ ID NO: 977927 - DNA, 15 bp, Homo sapiens
cctgtatgtatacat

SEQ ID NO: 977928 - DNA, 15 bp, Homo sapiens
ctgtatgtatacatt

SEQ ID NO: 977929 - DNA, 15 bp, Homo sapiens
tgtatgtatacattt

SEQ ID NO: 977930 - DNA, 15 bp, Homo sapiens
gtatgtatacattta

SEQ ID NO: 977931 - DNA, 15 bp, Homo sapiens
tatgtatacatttat

SEQ ID NO: 977932 - DNA, 15 bp, Homo sapiens
atgtatacatttatt

SEQ ID NO: 977933 - DNA, 15 bp, Homo sapiens
tgtatacatttattt

SEQ ID NO: 977934 - DNA, 15 bp, Homo sapiens
gtatacatttatttg

SEQ ID NO: 977935 - DNA, 15 bp, Homo sapiens
tatacatttatttgt

SEQ ID NO: 977936 - DNA, 15 bp, Homo sapiens
atacatttatttgtt

SEQ ID NO: 977937 - DNA, 15 bp, Homo sapiens
tacatttatttgttt

SEQ ID NO: 977938 - DNA, 15 bp, Homo sapiens
acatttatttgtttg

SEQ ID NO: 977939 - DNA, 15 bp, Homo sapiens
catttatttgtttgc

SEQ ID NO: 977940 - DNA, 15 bp, Homo sapiens
atttatttgtttgct

SEQ ID NO: 977941 - DNA, 15 bp, Homo sapiens
tttatttgtttgctt

SEQ ID NO: 977942 - DNA, 15 bp, Homo sapiens
ttatttgtttgcttt

SEQ ID NO: 977943 - DNA, 15 bp, Homo sapiens
tatttgtttgctttc

SEQ ID NO: 977944 - DNA, 15 bp, Homo sapiens
atttgtttgctttca

SEQ ID NO: 977945 - DNA, 15 bp, Homo sapiens
tttgtttgctttcaa

SEQ ID NO: 977946 - DNA, 15 bp, Homo sapiens
ttgtttgctttcaac

SEQ ID NO: 977947 - DNA, 15 bp, Homo sapiens
tgtttgctttcaaca

SEQ ID NO: 977948 - DNA, 15 bp, Homo sapiens
gtttgctttcaacaa

SEQ ID NO: 977949 - DNA, 15 bp, Homo sapiens
tttgctttcaacaag

SEQ ID NO: 977950 - DNA, 15 bp, Homo sapiens
ttgctttcaacaagg

SEQ ID NO: 977951 - DNA, 15 bp, Homo sapiens
tgctttcaacaaggc

SEQ ID NO: 977952 - DNA, 15 bp, Homo sapiens
gctttcaacaaggcc

SEQ ID NO: 977953 - DNA, 15 bp, Homo sapiens
ctttcaacaaggcca

SEQ ID NO: 977954 - DNA, 15 bp, Homo sapiens
tttcaacaaggccaa

SEQ ID NO: 977955 - DNA, 15 bp, Homo sapiens
ttcaacaaggccaag

SEQ ID NO: 977956 - DNA, 15 bp, Homo sapiens
tcaacaaggccaaga

SEQ ID NO: 977957 - DNA, 15 bp, Homo sapiens
caacaaggccaagat

SEQ ID NO: 977958 - DNA, 15 bp, Homo sapiens
aacaaggccaagatc

SEQ ID NO: 977959 - DNA, 15 bp, Homo sapiens
acaaggccaagatcc

SEQ ID NO: 977960 - DNA, 15 bp, Homo sapiens
caaggccaagatcct

SEQ ID NO: 977961 - DNA, 15 bp, Homo sapiens
aaggccaagatcctt

SEQ ID NO: 977962 - DNA, 15 bp, Homo sapiens
aggccaagatccttt

SEQ ID NO: 977963 - DNA, 15 bp, Homo sapiens
ggccaagatcctttg

SEQ ID NO: 977964 - DNA, 15 bp, Homo sapiens
gccaagatcctttga

SEQ ID NO: 977965 - DNA, 15 bp, Homo sapiens
ccaagatcctttgat

SEQ ID NO: 977966 - DNA, 15 bp, Homo sapiens
caagatcctttgatc

SEQ ID NO: 977967 - DNA, 15 bp, Homo sapiens
aagatcctttgatct

SEQ ID NO: 977968 - DNA, 15 bp, Homo sapiens
agatcctttgatctt

SEQ ID NO: 977969 - DNA, 15 bp, Homo sapiens
gatcctttgatcttt

SEQ ID NO: 977970 - DNA, 15 bp, Homo sapiens
atcctttgatctttc

SEQ ID NO: 977971 - DNA, 15 bp, Homo sapiens
tcctttgatctttca

SEQ ID NO: 977972 - DNA, 15 bp, Homo sapiens
cctttgatctttcag

SEQ ID NO: 977973 - DNA, 15 bp, Homo sapiens
ctttgatctttcagt

SEQ ID NO: 977974 - DNA, 15 bp, Homo sapiens
tttgatctttcagtc

SEQ ID NO: 977975 - DNA, 15 bp, Homo sapiens
ttgatctttcagtct

SEQ ID NO: 977976 - DNA, 15 bp, Homo sapiens
tgatctttcagtctt

SEQ ID NO: 977977 - DNA, 15 bp, Homo sapiens
gatctttcagtcttg

SEQ ID NO: 977978 - DNA, 15 bp, Homo sapiens
atctttcagtcttgg

SEQ ID NO: 977979 - DNA, 15 bp, Homo sapiens
tctttcagtcttggt

SEQ ID NO: 977980 - DNA, 15 bp, Homo sapiens
ctttcagtcttggtt

SEQ ID NO: 977981 - DNA, 15 bp, Homo sapiens
tttcagtcttggttg

SEQ ID NO: 977982 - DNA, 15 bp, Homo sapiens
ttcagtcttggttgc

SEQ ID NO: 977983 - DNA, 15 bp, Homo sapiens
tcagtcttggttgct

SEQ ID NO: 977984 - DNA, 15 bp, Homo sapiens
cagtcttggttgctc

SEQ ID NO: 977985 - DNA, 15 bp, Homo sapiens
agtcttggttgctct

SEQ ID NO: 977986 - DNA, 15 bp, Homo sapiens
gtcttggttgctctg

SEQ ID NO: 977987 - DNA, 15 bp, Homo sapiens
tcttggttgctctgt

SEQ ID NO: 977988 - DNA, 15 bp, Homo sapiens
cttggttgctctgtg

SEQ ID NO: 977989 - DNA, 15 bp, Homo sapiens
ttggttgctctgtga

SEQ ID NO: 977990 - DNA, 15 bp, Homo sapiens
tggttgctctgtgac

SEQ ID NO: 977991 - DNA, 15 bp, Homo sapiens
ggttgctctgtgaca

SEQ ID NO: 977992 - DNA, 15 bp, Homo sapiens
gttgctctgtgacat

SEQ ID NO: 977993 - DNA, 15 bp, Homo sapiens
ttgctctgtgacatg

SEQ ID NO: 977994 - DNA, 15 bp, Homo sapiens
tgctctgtgacatgc

SEQ ID NO: 977995 - DNA, 15 bp, Homo sapiens
gctctgtgacatgcc

SEQ ID NO: 977996 - DNA, 15 bp, Homo sapiens
ctctgtgacatgcct

SEQ ID NO: 977997 - DNA, 15 bp, Homo sapiens
tctgtgacatgcctt

SEQ ID NO: 977998 - DNA, 15 bp, Homo sapiens
ctgtgacatgccttt

SEQ ID NO: 977999 - DNA, 15 bp, Homo sapiens
tgtgacatgcctttc

SEQ ID NO: 978000 - DNA, 15 bp, Homo sapiens
gtgacatgcctttcc

SEQ ID NO: 978001 - DNA, 15 bp, Homo sapiens
tgacatgcctttcct

SEQ ID NO: 978002 - DNA, 15 bp, Homo sapiens
gacatgcctttcctg

SEQ ID NO: 978003 - DNA, 15 bp, Homo sapiens
acatgcctttcctga

SEQ ID NO: 978004 - DNA, 15 bp, Homo sapiens
catgcctttcctgat

SEQ ID NO: 978005 - DNA, 15 bp, Homo sapiens
atgcctttcctgatg

SEQ ID NO: 978006 - DNA, 15 bp, Homo sapiens
tgcctttcctgatga

SEQ ID NO: 978007 - DNA, 15 bp, Homo sapiens
gcctttcctgatgag

SEQ ID NO: 978008 - DNA, 15 bp, Homo sapiens
cctttcctgatgagg

SEQ ID NO: 978009 - DNA, 15 bp, Homo sapiens
ctttcctgatgagga

SEQ ID NO: 978010 - DNA, 15 bp, Homo sapiens
tttcctgatgaggat

SEQ ID NO: 978011 - DNA, 15 bp, Homo sapiens
ttcctgatgaggata

SEQ ID NO: 978012 - DNA, 15 bp, Homo sapiens
tcctgatgaggatac

SEQ ID NO: 978013 - DNA, 15 bp, Homo sapiens
cctgatgaggatact

SEQ ID NO: 978014 - DNA, 15 bp, Homo sapiens
ctgatgaggatactt

SEQ ID NO: 978015 - DNA, 15 bp, Homo sapiens
tgatgaggatacttt

SEQ ID NO: 978016 - DNA, 15 bp, Homo sapiens
gatgaggatacttta

SEQ ID NO: 978017 - DNA, 15 bp, Homo sapiens
atgaggatactttaa

SEQ ID NO: 978018 - DNA, 15 bp, Homo sapiens
tgaggatactttaag

SEQ ID NO: 978019 - DNA, 15 bp, Homo sapiens
gaggatactttaagg

SEQ ID NO: 978020 - DNA, 15 bp, Homo sapiens
aggatactttaagga

SEQ ID NO: 978021 - DNA, 15 bp, Homo sapiens
ggatactttaaggaa

SEQ ID NO: 978022 - DNA, 15 bp, Homo sapiens
gatactttaaggaag

SEQ ID NO: 978023 - DNA, 15 bp, Homo sapiens
atactttaaggaaga

SEQ ID NO: 978024 - DNA, 15 bp, Homo sapiens
tactttaaggaagaa

SEQ ID NO: 978025 - DNA, 15 bp, Homo sapiens
actttaaggaagaat

SEQ ID NO: 978026 - DNA, 15 bp, Homo sapiens
ctttaaggaagaatt

SEQ ID NO: 978027 - DNA, 15 bp, Homo sapiens
tttaaggaagaattg

SEQ ID NO: 978028 - DNA, 15 bp, Homo sapiens
ttaaggaagaattgt

SEQ ID NO: 978029 - DNA, 15 bp, Homo sapiens
taaggaagaattgta

SEQ ID NO: 978030 - DNA, 15 bp, Homo sapiens
aaggaagaattgtaa

SEQ ID NO: 978031 - DNA, 15 bp, Homo sapiens
aggaagaattgtaag

SEQ ID NO: 978032 - DNA, 15 bp, Homo sapiens
ggaagaattgtaaga

SEQ ID NO: 978033 - DNA, 15 bp, Homo sapiens
gaagaattgtaagat

SEQ ID NO: 978034 - DNA, 15 bp, Homo sapiens
aagaattgtaagata

SEQ ID NO: 978035 - DNA, 15 bp, Homo sapiens
agaattgtaagatac

SEQ ID NO: 978036 - DNA, 15 bp, Homo sapiens
gaattgtaagataca

SEQ ID NO: 978037 - DNA, 15 bp, Homo sapiens
aattgtaagatacat

SEQ ID NO: 978038 - DNA, 15 bp, Homo sapiens
attgtaagatacatg

SEQ ID NO: 978039 - DNA, 15 bp, Homo sapiens
ttgtaagatacatgg

SEQ ID NO: 978040 - DNA, 15 bp, Homo sapiens
tgtaagatacatgga

SEQ ID NO: 978041 - DNA, 15 bp, Homo sapiens
gtaagatacatggaa

SEQ ID NO: 978042 - DNA, 15 bp, Homo sapiens
taagatacatggaaa

SEQ ID NO: 978043 - DNA, 15 bp, Homo sapiens
aagatacatggaaaa

SEQ ID NO: 978044 - DNA, 15 bp, Homo sapiens
agatacatggaaaat

SEQ ID NO: 978045 - DNA, 15 bp, Homo sapiens
gatacatggaaaatg

SEQ ID NO: 978046 - DNA, 15 bp, Homo sapiens
atacatggaaaatgt

SEQ ID NO: 978047 - DNA, 15 bp, Homo sapiens
tacatggaaaatgtc

SEQ ID NO: 978048 - DNA, 15 bp, Homo sapiens
acatggaaaatgtca

SEQ ID NO: 978049 - DNA, 15 bp, Homo sapiens
catggaaaatgtcag

SEQ ID NO: 978050 - DNA, 15 bp, Homo sapiens
atggaaaatgtcagg

SEQ ID NO: 978051 - DNA, 15 bp, Homo sapiens
tggaaaatgtcaggc

SEQ ID NO: 978052 - DNA, 15 bp, Homo sapiens
ggaaaatgtcaggct

SEQ ID NO: 978053 - DNA, 15 bp, Homo sapiens
gaaaatgtcaggcta

SEQ ID NO: 978054 - DNA, 15 bp, Homo sapiens
aaaatgtcaggctaa

SEQ ID NO: 978055 - DNA, 15 bp, Homo sapiens
aaatgtcaggctaac

SEQ ID NO: 978056 - DNA, 15 bp, Homo sapiens
aatgtcaggctaaca

SEQ ID NO: 978057 - DNA, 15 bp, Homo sapiens
atgtcaggctaacac

SEQ ID NO: 978058 - DNA, 15 bp, Homo sapiens
tgtcaggctaacaca

SEQ ID NO: 978059 - DNA, 15 bp, Homo sapiens
gtcaggctaacacag

SEQ ID NO: 978060 - DNA, 15 bp, Homo sapiens
tcaggctaacacagt

SEQ ID NO: 978061 - DNA, 15 bp, Homo sapiens
caggctaacacagta

SEQ ID NO: 978062 - DNA, 15 bp, Homo sapiens
aggctaacacagtac

SEQ ID NO: 978063 - DNA, 15 bp, Homo sapiens
ggctaacacagtact

SEQ ID NO: 978064 - DNA, 15 bp, Homo sapiens
gctaacacagtactg

SEQ ID NO: 978065 - DNA, 15 bp, Homo sapiens
ctaacacagtactgg

SEQ ID NO: 978066 - DNA, 15 bp, Homo sapiens
taacacagtactggc

SEQ ID NO: 978067 - DNA, 15 bp, Homo sapiens
aacacagtactggca

SEQ ID NO: 978068 - DNA, 15 bp, Homo sapiens
acacagtactggcat

SEQ ID NO: 978069 - DNA, 15 bp, Homo sapiens
cacagtactggcatc

SEQ ID NO: 978070 - DNA, 15 bp, Homo sapiens
acagtactggcatca

SEQ ID NO: 978071 - DNA, 15 bp, Homo sapiens
cagtactggcatcac

SEQ ID NO: 978072 - DNA, 15 bp, Homo sapiens
agtactggcatcacc

SEQ ID NO: 978073 - DNA, 15 bp, Homo sapiens
gtactggcatcaccc

SEQ ID NO: 978074 - DNA, 15 bp, Homo sapiens
tactggcatcaccct

SEQ ID NO: 978075 - DNA, 15 bp, Homo sapiens
actggcatcaccctg

SEQ ID NO: 978076 - DNA, 15 bp, Homo sapiens
ctggcatcaccctgt

SEQ ID NO: 978077 - DNA, 15 bp, Homo sapiens
tggcatcaccctgtg

SEQ ID NO: 978078 - DNA, 15 bp, Homo sapiens
ggcatcaccctgtgc

SEQ ID NO: 978079 - DNA, 15 bp, Homo sapiens
gcatcaccctgtgct

SEQ ID NO: 978080 - DNA, 15 bp, Homo sapiens
catcaccctgtgctc

SEQ ID NO: 978081 - DNA, 15 bp, Homo sapiens
atcaccctgtgctct

SEQ ID NO: 978082 - DNA, 15 bp, Homo sapiens
tcaccctgtgctctt

SEQ ID NO: 978083 - DNA, 15 bp, Homo sapiens
caccctgtgctcttt

SEQ ID NO: 978084 - DNA, 15 bp, Homo sapiens
accctgtgctctttc

SEQ ID NO: 978085 - DNA, 15 bp, Homo sapiens
ccctgtgctctttcc

SEQ ID NO: 978086 - DNA, 15 bp, Homo sapiens
cctgtgctctttcct

SEQ ID NO: 978087 - DNA, 15 bp, Homo sapiens
ctgtgctctttcctg

SEQ ID NO: 978088 - DNA, 15 bp, Homo sapiens
tgtgctctttcctga

SEQ ID NO: 978089 - DNA, 15 bp, Homo sapiens
gtgctctttcctgaa

SEQ ID NO: 978090 - DNA, 15 bp, Homo sapiens
tgctctttcctgaac

SEQ ID NO: 978091 - DNA, 15 bp, Homo sapiens
gctctttcctgaact

SEQ ID NO: 978092 - DNA, 15 bp, Homo sapiens
ctctttcctgaactc

SEQ ID NO: 978093 - DNA, 15 bp, Homo sapiens
tctttcctgaactcc

SEQ ID NO: 978094 - DNA, 15 bp, Homo sapiens
ctttcctgaactcca

SEQ ID NO: 978095 - DNA, 15 bp, Homo sapiens
tttcctgaactccat

SEQ ID NO: 978096 - DNA, 15 bp, Homo sapiens
ttcctgaactccata

SEQ ID NO: 978097 - DNA, 15 bp, Homo sapiens
tcctgaactccatac

SEQ ID NO: 978098 - DNA, 15 bp, Homo sapiens
cctgaactccatacc

SEQ ID NO: 978099 - DNA, 15 bp, Homo sapiens
ctgaactccatacca

SEQ ID NO: 978100 - DNA, 15 bp, Homo sapiens
tgaactccataccaa

SEQ ID NO: 978101 - DNA, 15 bp, Homo sapiens
gaactccataccaat

SEQ ID NO: 978102 - DNA, 15 bp, Homo sapiens
aactccataccaatg

SEQ ID NO: 978103 - DNA, 15 bp, Homo sapiens
actccataccaatgt

SEQ ID NO: 978104 - DNA, 15 bp, Homo sapiens
ctccataccaatgta

SEQ ID NO: 978105 - DNA, 15 bp, Homo sapiens
tccataccaatgtac

SEQ ID NO: 978106 - DNA, 15 bp, Homo sapiens
ccataccaatgtact

SEQ ID NO: 978107 - DNA, 15 bp, Homo sapiens
cataccaatgtactt

SEQ ID NO: 978108 - DNA, 15 bp, Homo sapiens
ataccaatgtacttc

SEQ ID NO: 978109 - DNA, 15 bp, Homo sapiens
taccaatgtacttct

SEQ ID NO: 978110 - DNA, 15 bp, Homo sapiens
accaatgtacttctt

SEQ ID NO: 978111 - DNA, 15 bp, Homo sapiens
ccaatgtacttcttg

SEQ ID NO: 978112 - DNA, 15 bp, Homo sapiens
caatgtacttcttgc

SEQ ID NO: 978113 - DNA, 15 bp, Homo sapiens
aatgtacttcttgcc

SEQ ID NO: 978114 - DNA, 15 bp, Homo sapiens
atgtacttcttgcca

SEQ ID NO: 978115 - DNA, 15 bp, Homo sapiens
tgtacttcttgccag

SEQ ID NO: 978116 - DNA, 15 bp, Homo sapiens
gtacttcttgccaga

SEQ ID NO: 978117 - DNA, 15 bp, Homo sapiens
tacttcttgccagaa

SEQ ID NO: 978118 - DNA, 15 bp, Homo sapiens
acttcttgccagaaa

SEQ ID NO: 978119 - DNA, 15 bp, Homo sapiens
cttcttgccagaaaa

SEQ ID NO: 978120 - DNA, 15 bp, Homo sapiens
ttcttgccagaaaac

SEQ ID NO: 978121 - DNA, 15 bp, Homo sapiens
tcttgccagaaaact

SEQ ID NO: 978122 - DNA, 15 bp, Homo sapiens
cttgccagaaaactg

SEQ ID NO: 978123 - DNA, 15 bp, Homo sapiens
ttgccagaaaactga

SEQ ID NO: 978124 - DNA, 15 bp, Homo sapiens
tgccagaaaactgat

SEQ ID NO: 978125 - DNA, 15 bp, Homo sapiens
gccagaaaactgatc

SEQ ID NO: 978126 - DNA, 15 bp, Homo sapiens
ccagaaaactgatca

SEQ ID NO: 978127 - DNA, 15 bp, Homo sapiens
cagaaaactgatcaa

SEQ ID NO: 978128 - DNA, 15 bp, Homo sapiens
agaaaactgatcaaa

SEQ ID NO: 978129 - DNA, 15 bp, Homo sapiens
gaaaactgatcaaaa

SEQ ID NO: 978130 - DNA, 15 bp, Homo sapiens
aaaactgatcaaaag

SEQ ID NO: 978131 - DNA, 15 bp, Homo sapiens
aaactgatcaaaagt

SEQ ID NO: 978132 - DNA, 15 bp, Homo sapiens
aactgatcaaaagtt

SEQ ID NO: 978133 - DNA, 15 bp, Homo sapiens
actgatcaaaagttt

SEQ ID NO: 978134 - DNA, 15 bp, Homo sapiens
ctgatcaaaagttta

SEQ ID NO: 978135 - DNA, 15 bp, Homo sapiens
tgatcaaaagtttag

SEQ ID NO: 978136 - DNA, 15 bp, Homo sapiens
gatcaaaagtttagg

SEQ ID NO: 978137 - DNA, 15 bp, Homo sapiens
atcaaaagtttaggg

SEQ ID NO: 978138 - DNA, 15 bp, Homo sapiens
tcaaaagtttaggga

SEQ ID NO: 978139 - DNA, 15 bp, Homo sapiens
caaaagtttagggaa

SEQ ID NO: 978140 - DNA, 15 bp, Homo sapiens
aaaagtttagggaag

SEQ ID NO: 978141 - DNA, 15 bp, Homo sapiens
aaagtttagggaagt

SEQ ID NO: 978142 - DNA, 15 bp, Homo sapiens
aagtttagggaagta

SEQ ID NO: 978143 - DNA, 15 bp, Homo sapiens
agtttagggaagtaa

SEQ ID NO: 978144 - DNA, 15 bp, Homo sapiens
gtttagggaagtaaa

SEQ ID NO: 978145 - DNA, 15 bp, Homo sapiens
tttagggaagtaaaa

SEQ ID NO: 978146 - DNA, 15 bp, Homo sapiens
ttagggaagtaaaaa

SEQ ID NO: 978147 - DNA, 15 bp, Homo sapiens
tagggaagtaaaaag

SEQ ID NO: 978148 - DNA, 15 bp, Homo sapiens
agggaagtaaaaaga

SEQ ID NO: 978149 - DNA, 15 bp, Homo sapiens
gggaagtaaaaagag

SEQ ID NO: 978150 - DNA, 15 bp, Homo sapiens
ggaagtaaaaagaga

SEQ ID NO: 978151 - DNA, 15 bp, Homo sapiens
gaagtaaaaagagat

SEQ ID NO: 978152 - DNA, 15 bp, Homo sapiens
aagtaaaaagagatg

SEQ ID NO: 978153 - DNA, 15 bp, Homo sapiens
agtaaaaagagatga

SEQ ID NO: 978154 - DNA, 15 bp, Homo sapiens
gtaaaaagagatgac

SEQ ID NO: 978155 - DNA, 15 bp, Homo sapiens
taaaaagagatgact

SEQ ID NO: 978156 - DNA, 15 bp, Homo sapiens
aaaaagagatgactg

SEQ ID NO: 978157 - DNA, 15 bp, Homo sapiens
aaaagagatgactgt

SEQ ID NO: 978158 - DNA, 15 bp, Homo sapiens
aaagagatgactgtt

SEQ ID NO: 978159 - DNA, 15 bp, Homo sapiens
aagagatgactgtta

SEQ ID NO: 978160 - DNA, 15 bp, Homo sapiens
agagatgactgttag

SEQ ID NO: 978161 - DNA, 15 bp, Homo sapiens
gagatgactgttaga

SEQ ID NO: 978162 - DNA, 15 bp, Homo sapiens
agatgactgttagaa

SEQ ID NO: 978163 - DNA, 15 bp, Homo sapiens
gatgactgttagaat

SEQ ID NO: 978164 - DNA, 15 bp, Homo sapiens
atgactgttagaatc

SEQ ID NO: 978165 - DNA, 15 bp, Homo sapiens
tgactgttagaatct

SEQ ID NO: 978166 - DNA, 15 bp, Homo sapiens
gactgttagaatcta

SEQ ID NO: 978167 - DNA, 15 bp, Homo sapiens
actgttagaatctac

SEQ ID NO: 978168 - DNA, 15 bp, Homo sapiens
ctgttagaatctacc

SEQ ID NO: 978169 - DNA, 15 bp, Homo sapiens
tgttagaatctacca

SEQ ID NO: 978170 - DNA, 15 bp, Homo sapiens
gttagaatctaccat

SEQ ID NO: 978171 - DNA, 15 bp, Homo sapiens
ttagaatctaccatt

SEQ ID NO: 978172 - DNA, 15 bp, Homo sapiens
tagaatctaccattc

SEQ ID NO: 978173 - DNA, 15 bp, Homo sapiens
agaatctaccattcc

SEQ ID NO: 978174 - DNA, 15 bp, Homo sapiens
gaatctaccattccc

SEQ ID NO: 978175 - DNA, 15 bp, Homo sapiens
aatctaccattccct

SEQ ID NO: 978176 - DNA, 15 bp, Homo sapiens
atctaccattccctc

SEQ ID NO: 978177 - DNA, 15 bp, Homo sapiens
tctaccattccctct

SEQ ID NO: 978178 - DNA, 15 bp, Homo sapiens
ctaccattccctcta

SEQ ID NO: 978179 - DNA, 15 bp, Homo sapiens
taccattccctctat

SEQ ID NO: 978180 - DNA, 15 bp, Homo sapiens
accattccctctatg

SEQ ID NO: 978181 - DNA, 15 bp, Homo sapiens
ccattccctctatgt

SEQ ID NO: 978182 - DNA, 15 bp, Homo sapiens
cattccctctatgta

SEQ ID NO: 978183 - DNA, 15 bp, Homo sapiens
attccctctatgtag

SEQ ID NO: 978184 - DNA, 15 bp, Homo sapiens
ttccctctatgtagg

SEQ ID NO: 978185 - DNA, 15 bp, Homo sapiens
tccctctatgtagga

SEQ ID NO: 978186 - DNA, 15 bp, Homo sapiens
ccctctatgtaggaa

SEQ ID NO: 978187 - DNA, 15 bp, Homo sapiens
cctctatgtaggaag

SEQ ID NO: 978188 - DNA, 15 bp, Homo sapiens
ctctatgtaggaagc

SEQ ID NO: 978189 - DNA, 15 bp, Homo sapiens
tctatgtaggaagca

SEQ ID NO: 978190 - DNA, 15 bp, Homo sapiens
ctatgtaggaagcaa

SEQ ID NO: 978191 - DNA, 15 bp, Homo sapiens
tatgtaggaagcaaa

SEQ ID NO: 978192 - DNA, 15 bp, Homo sapiens
atgtaggaagcaaat

SEQ ID NO: 978193 - DNA, 15 bp, Homo sapiens
tgtaggaagcaaata

SEQ ID NO: 978194 - DNA, 15 bp, Homo sapiens
gtaggaagcaaatag

SEQ ID NO: 978195 - DNA, 15 bp, Homo sapiens
taggaagcaaatagg

SEQ ID NO: 978196 - DNA, 15 bp, Homo sapiens
aggaagcaaataggt

SEQ ID NO: 978197 - DNA, 15 bp, Homo sapiens
ggaagcaaataggtg

SEQ ID NO: 978198 - DNA, 15 bp, Homo sapiens
gaagcaaataggtgt

SEQ ID NO: 978199 - DNA, 15 bp, Homo sapiens
aagcaaataggtgtc

SEQ ID NO: 978200 - DNA, 15 bp, Homo sapiens
agcaaataggtgtcc

SEQ ID NO: 978201 - DNA, 15 bp, Homo sapiens
gcaaataggtgtcct

SEQ ID NO: 978202 - DNA, 15 bp, Homo sapiens
caaataggtgtcctg

SEQ ID NO: 978203 - DNA, 15 bp, Homo sapiens
aaataggtgtcctgt

SEQ ID NO: 978204 - DNA, 15 bp, Homo sapiens
aataggtgtcctgtc

SEQ ID NO: 978205 - DNA, 15 bp, Homo sapiens
ataggtgtcctgtca

SEQ ID NO: 978206 - DNA, 15 bp, Homo sapiens
taggtgtcctgtcaa

SEQ ID NO: 978207 - DNA, 15 bp, Homo sapiens
aggtgtcctgtcaaa

SEQ ID NO: 978208 - DNA, 15 bp, Homo sapiens
ggtgtcctgtcaaag

SEQ ID NO: 978209 - DNA, 15 bp, Homo sapiens
gtgtcctgtcaaagg

SEQ ID NO: 978210 - DNA, 15 bp, Homo sapiens
tgtcctgtcaaagga

SEQ ID NO: 978211 - DNA, 15 bp, Homo sapiens
gtcctgtcaaaggac

SEQ ID NO: 978212 - DNA, 15 bp, Homo sapiens
tcctgtcaaaggaca

SEQ ID NO: 978213 - DNA, 15 bp, Homo sapiens
cctgtcaaaggacat

SEQ ID NO: 978214 - DNA, 15 bp, Homo sapiens
ctgtcaaaggacatt

SEQ ID NO: 978215 - DNA, 15 bp, Homo sapiens
tgtcaaaggacattc

SEQ ID NO: 978216 - DNA, 15 bp, Homo sapiens
gtcaaaggacattct

SEQ ID NO: 978217 - DNA, 15 bp, Homo sapiens
tcaaaggacattctg

SEQ ID NO: 978218 - DNA, 15 bp, Homo sapiens
caaaggacattctgg

SEQ ID NO: 978219 - DNA, 15 bp, Homo sapiens
aaaggacattctggg

SEQ ID NO: 978220 - DNA, 15 bp, Homo sapiens
aaggacattctgggg

SEQ ID NO: 978221 - DNA, 15 bp, Homo sapiens
aggacattctgggga

SEQ ID NO: 978222 - DNA, 15 bp, Homo sapiens
ggacattctggggat

SEQ ID NO: 978223 - DNA, 15 bp, Homo sapiens
gacattctggggatg

SEQ ID NO: 978224 - DNA, 15 bp, Homo sapiens
acattctggggatgt

SEQ ID NO: 978225 - DNA, 15 bp, Homo sapiens
cattctggggatgtc

SEQ ID NO: 978226 - DNA, 15 bp, Homo sapiens
attctggggatgtct

SEQ ID NO: 978227 - DNA, 15 bp, Homo sapiens
ttctggggatgtcta

SEQ ID NO: 978228 - DNA, 15 bp, Homo sapiens
tctggggatgtctac

SEQ ID NO: 978229 - DNA, 15 bp, Homo sapiens
ctggggatgtctaca

SEQ ID NO: 978230 - DNA, 15 bp, Homo sapiens
tggggatgtctacat

SEQ ID NO: 978231 - DNA, 15 bp, Homo sapiens
ggggatgtctacatg

SEQ ID NO: 978232 - DNA, 15 bp, Homo sapiens
gggatgtctacatga

SEQ ID NO: 978233 - DNA, 15 bp, Homo sapiens
ggatgtctacatgaa

SEQ ID NO: 978234 - DNA, 15 bp, Homo sapiens
gatgtctacatgaaa

SEQ ID NO: 978235 - DNA, 15 bp, Homo sapiens
atgtctacatgaaac

SEQ ID NO: 978236 - DNA, 15 bp, Homo sapiens
tgtctacatgaaacc

SEQ ID NO: 978237 - DNA, 15 bp, Homo sapiens
gtctacatgaaacca

SEQ ID NO: 978238 - DNA, 15 bp, Homo sapiens
tctacatgaaaccaa

SEQ ID NO: 978239 - DNA, 15 bp, Homo sapiens
ctacatgaaaccaac

SEQ ID NO: 978240 - DNA, 15 bp, Homo sapiens
tacatgaaaccaact

SEQ ID NO: 978241 - DNA, 15 bp, Homo sapiens
acatgaaaccaactc

SEQ ID NO: 978242 - DNA, 15 bp, Homo sapiens
catgaaaccaactct

SEQ ID NO: 978243 - DNA, 15 bp, Homo sapiens
atgaaaccaactctc

SEQ ID NO: 978244 - DNA, 15 bp, Homo sapiens
tgaaaccaactctcc

SEQ ID NO: 978245 - DNA, 15 bp, Homo sapiens
gaaaccaactctccc

SEQ ID NO: 978246 - DNA, 15 bp, Homo sapiens
aaaccaactctccct

SEQ ID NO: 978247 - DNA, 15 bp, Homo sapiens
aaccaactctccctg

SEQ ID NO: 978248 - DNA, 15 bp, Homo sapiens
accaactctccctgg

SEQ ID NO: 978249 - DNA, 15 bp, Homo sapiens
ccaactctccctggt

SEQ ID NO: 978250 - DNA, 15 bp, Homo sapiens
caactctccctggtt

SEQ ID NO: 978251 - DNA, 15 bp, Homo sapiens
aactctccctggttg

SEQ ID NO: 978252 - DNA, 15 bp, Homo sapiens
actctccctggttgt

SEQ ID NO: 978253 - DNA, 15 bp, Homo sapiens
ctctccctggttgta

SEQ ID NO: 978254 - DNA, 15 bp, Homo sapiens
tctccctggttgtaa

SEQ ID NO: 978255 - DNA, 15 bp, Homo sapiens
ctccctggttgtaag

SEQ ID NO: 978256 - DNA, 15 bp, Homo sapiens
tccctggttgtaagg

SEQ ID NO: 978257 - DNA, 15 bp, Homo sapiens
ccctggttgtaagga

SEQ ID NO: 978258 - DNA, 15 bp, Homo sapiens
cctggttgtaaggac

SEQ ID NO: 978259 - DNA, 15 bp, Homo sapiens
ctggttgtaaggact

SEQ ID NO: 978260 - DNA, 15 bp, Homo sapiens
tggttgtaaggactc

SEQ ID NO: 978261 - DNA, 15 bp, Homo sapiens
ggttgtaaggactcc

SEQ ID NO: 978262 - DNA, 15 bp, Homo sapiens
gttgtaaggactcca

SEQ ID NO: 978263 - DNA, 15 bp, Homo sapiens
ttgtaaggactccat

SEQ ID NO: 978264 - DNA, 15 bp, Homo sapiens
tgtaaggactccatc

SEQ ID NO: 978265 - DNA, 15 bp, Homo sapiens
gtaaggactccatct

SEQ ID NO: 978266 - DNA, 15 bp, Homo sapiens
taaggactccatctc

SEQ ID NO: 978267 - DNA, 15 bp, Homo sapiens
aaggactccatctcc

SEQ ID NO: 978268 - DNA, 15 bp, Homo sapiens
aggactccatctcca

SEQ ID NO: 978269 - DNA, 15 bp, Homo sapiens
ggactccatctccat

SEQ ID NO: 978270 - DNA, 15 bp, Homo sapiens
gactccatctccata

SEQ ID NO: 978271 - DNA, 15 bp, Homo sapiens
actccatctccatat

SEQ ID NO: 978272 - DNA, 15 bp, Homo sapiens
ctccatctccatata

SEQ ID NO: 978273 - DNA, 15 bp, Homo sapiens
tccatctccatataa

SEQ ID NO: 978274 - DNA, 15 bp, Homo sapiens
ccatctccatataat

SEQ ID NO: 978275 - DNA, 15 bp, Homo sapiens
catctccatataata

SEQ ID NO: 978276 - DNA, 15 bp, Homo sapiens
atctccatataatat

SEQ ID NO: 978277 - DNA, 15 bp, Homo sapiens
tctccatataatatt

SEQ ID NO: 978278 - DNA, 15 bp, Homo sapiens
ctccatataatattt

SEQ ID NO: 978279 - DNA, 15 bp, Homo sapiens
tccatataatattta

SEQ ID NO: 978280 - DNA, 15 bp, Homo sapiens
ccatataatatttat

SEQ ID NO: 978281 - DNA, 15 bp, Homo sapiens
catataatatttata

SEQ ID NO: 978282 - DNA, 15 bp, Homo sapiens
atataatatttatac

SEQ ID NO: 978283 - DNA, 15 bp, Homo sapiens
tataatatttataca

SEQ ID NO: 978284 - DNA, 15 bp, Homo sapiens
ataatatttatacag

SEQ ID NO: 978285 - DNA, 15 bp, Homo sapiens
taatatttatacagt

SEQ ID NO: 978286 - DNA, 15 bp, Homo sapiens
aatatttatacagta

SEQ ID NO: 978287 - DNA, 15 bp, Homo sapiens
atatttatacagtaa

SEQ ID NO: 978288 - DNA, 15 bp, Homo sapiens
tatttatacagtaat

SEQ ID NO: 978289 - DNA, 15 bp, Homo sapiens
atttatacagtaata

SEQ ID NO: 978290 - DNA, 15 bp, Homo sapiens
tttatacagtaatat

SEQ ID NO: 978291 - DNA, 15 bp, Homo sapiens
ttatacagtaatata

SEQ ID NO: 978292 - DNA, 15 bp, Homo sapiens
tatacagtaatatat

SEQ ID NO: 978293 - DNA, 15 bp, Homo sapiens
atacagtaatatatg

SEQ ID NO: 978294 - DNA, 15 bp, Homo sapiens
tacagtaatatatgt

SEQ ID NO: 978295 - DNA, 15 bp, Homo sapiens
acagtaatatatgtt

SEQ ID NO: 978296 - DNA, 15 bp, Homo sapiens
cagtaatatatgttt

SEQ ID NO: 978297 - DNA, 15 bp, Homo sapiens
agtaatatatgttta

SEQ ID NO: 978298 - DNA, 15 bp, Homo sapiens
gtaatatatgtttat

SEQ ID NO: 978299 - DNA, 15 bp, Homo sapiens
taatatatgtttata

SEQ ID NO: 978300 - DNA, 15 bp, Homo sapiens
aatatatgtttataa

SEQ ID NO: 978301 - DNA, 15 bp, Homo sapiens
atatatgtttataaa

SEQ ID NO: 978302 - DNA, 15 bp, Homo sapiens
tatatgtttataaat

SEQ ID NO: 978303 - DNA, 15 bp, Homo sapiens
atatgtttataaatt

SEQ ID NO: 978304 - DNA, 15 bp, Homo sapiens
tatgtttataaattg

SEQ ID NO: 978305 - DNA, 15 bp, Homo sapiens
atgtttataaattgt

SEQ ID NO: 978306 - DNA, 15 bp, Homo sapiens
tgtttataaattgtg

SEQ ID NO: 978307 - DNA, 15 bp, Homo sapiens
gtttataaattgtgg

SEQ ID NO: 978308 - DNA, 15 bp, Homo sapiens
tttataaattgtggg

SEQ ID NO: 978309 - DNA, 15 bp, Homo sapiens
ttataaattgtgggg

SEQ ID NO: 978310 - DNA, 15 bp, Homo sapiens
tataaattgtggggg

SEQ ID NO: 978311 - DNA, 15 bp, Homo sapiens
ataaattgtgggggc

SEQ ID NO: 978312 - DNA, 15 bp, Homo sapiens
taaattgtgggggca

SEQ ID NO: 978313 - DNA, 15 bp, Homo sapiens
aaattgtgggggcaa

SEQ ID NO: 978314 - DNA, 15 bp, Homo sapiens
aattgtgggggcaac

SEQ ID NO: 978315 - DNA, 15 bp, Homo sapiens
attgtgggggcaact

SEQ ID NO: 978316 - DNA, 15 bp, Homo sapiens
ttgtgggggcaactt

SEQ ID NO: 978317 - DNA, 15 bp, Homo sapiens
tgtgggggcaacttg

SEQ ID NO: 978318 - DNA, 15 bp, Homo sapiens
gtgggggcaacttgt

SEQ ID NO: 978319 - DNA, 15 bp, Homo sapiens
tgggggcaacttgtt

SEQ ID NO: 978320 - DNA, 15 bp, Homo sapiens
gggggcaacttgttt

SEQ ID NO: 978321 - DNA, 15 bp, Homo sapiens
ggggcaacttgttta

SEQ ID NO: 978322 - DNA, 15 bp, Homo sapiens
gggcaacttgtttag

SEQ ID NO: 978323 - DNA, 15 bp, Homo sapiens
ggcaacttgtttagc

SEQ ID NO: 978324 - DNA, 15 bp, Homo sapiens
gcaacttgtttagct

SEQ ID NO: 978325 - DNA, 15 bp, Homo sapiens
caacttgtttagcta

SEQ ID NO: 978326 - DNA, 15 bp, Homo sapiens
aacttgtttagctaa

SEQ ID NO: 978327 - DNA, 15 bp, Homo sapiens
acttgtttagctaat

SEQ ID NO: 978328 - DNA, 15 bp, Homo sapiens
cttgtttagctaatt

SEQ ID NO: 978329 - DNA, 15 bp, Homo sapiens
ttgtttagctaattt

SEQ ID NO: 978330 - DNA, 15 bp, Homo sapiens
tgtttagctaatttt

SEQ ID NO: 978331 - DNA, 15 bp, Homo sapiens
gtttagctaatttta

SEQ ID NO: 978332 - DNA, 15 bp, Homo sapiens
tttagctaattttat

SEQ ID NO: 978333 - DNA, 15 bp, Homo sapiens
ttagctaattttatt

SEQ ID NO: 978334 - DNA, 15 bp, Homo sapiens
tagctaattttatta

SEQ ID NO: 978335 - DNA, 15 bp, Homo sapiens
agctaattttattat

SEQ ID NO: 978336 - DNA, 15 bp, Homo sapiens
gctaattttattatt

SEQ ID NO: 978337 - DNA, 15 bp, Homo sapiens
ctaattttattattc

SEQ ID NO: 978338 - DNA, 15 bp, Homo sapiens
taattttattattct

SEQ ID NO: 978339 - DNA, 15 bp, Homo sapiens
aattttattattctg

SEQ ID NO: 978340 - DNA, 15 bp, Homo sapiens
attttattattctgc

SEQ ID NO: 978341 - DNA, 15 bp, Homo sapiens
ttttattattctgct

SEQ ID NO: 978342 - DNA, 15 bp, Homo sapiens
tttattattctgcta

SEQ ID NO: 978343 - DNA, 15 bp, Homo sapiens
ttattattctgctat

SEQ ID NO: 978344 - DNA, 15 bp, Homo sapiens
tattattctgctatt

SEQ ID NO: 978345 - DNA, 15 bp, Homo sapiens
attattctgctattg

SEQ ID NO: 978346 - DNA, 15 bp, Homo sapiens
ttattctgctattgg

SEQ ID NO: 978347 - DNA, 15 bp, Homo sapiens
tattctgctattggg

SEQ ID NO: 978348 - DNA, 15 bp, Homo sapiens
attctgctattggga

SEQ ID NO: 978349 - DNA, 15 bp, Homo sapiens
ttctgctattgggac

SEQ ID NO: 978350 - DNA, 15 bp, Homo sapiens
tctgctattgggaca

SEQ ID NO: 978351 - DNA, 15 bp, Homo sapiens
ctgctattgggacac

SEQ ID NO: 978352 - DNA, 15 bp, Homo sapiens
tgctattgggacact

SEQ ID NO: 978353 - DNA, 15 bp, Homo sapiens
gctattgggacactg

SEQ ID NO: 978354 - DNA, 15 bp, Homo sapiens
ctattgggacactgt

SEQ ID NO: 978355 - DNA, 15 bp, Homo sapiens
tattgggacactgtg

SEQ ID NO: 978356 - DNA, 15 bp, Homo sapiens
attgggacactgtgt

SEQ ID NO: 978357 - DNA, 15 bp, Homo sapiens
ttgggacactgtgtc

SEQ ID NO: 978358 - DNA, 15 bp, Homo sapiens
tgggacactgtgtct

SEQ ID NO: 978359 - DNA, 15 bp, Homo sapiens
gggacactgtgtctc

SEQ ID NO: 978360 - DNA, 15 bp, Homo sapiens
ggacactgtgtctca

SEQ ID NO: 978361 - DNA, 15 bp, Homo sapiens
gacactgtgtctcag

SEQ ID NO: 978362 - DNA, 15 bp, Homo sapiens
acactgtgtctcagc

SEQ ID NO: 978363 - DNA, 15 bp, Homo sapiens
cactgtgtctcagca

SEQ ID NO: 978364 - DNA, 15 bp, Homo sapiens
actgtgtctcagcat

SEQ ID NO: 978365 - DNA, 15 bp, Homo sapiens
ctgtgtctcagcatg

SEQ ID NO: 978366 - DNA, 15 bp, Homo sapiens
tgtgtctcagcatga

SEQ ID NO: 978367 - DNA, 15 bp, Homo sapiens
gtgtctcagcatgag

SEQ ID NO: 978368 - DNA, 15 bp, Homo sapiens
tgtctcagcatgaga

SEQ ID NO: 978369 - DNA, 15 bp, Homo sapiens
gtctcagcatgagat

SEQ ID NO: 978370 - DNA, 15 bp, Homo sapiens
tctcagcatgagata

SEQ ID NO: 978371 - DNA, 15 bp, Homo sapiens
ctcagcatgagatat

SEQ ID NO: 978372 - DNA, 15 bp, Homo sapiens
tcagcatgagatata

SEQ ID NO: 978373 - DNA, 15 bp, Homo sapiens
cagcatgagatatag

SEQ ID NO: 978374 - DNA, 15 bp, Homo sapiens
agcatgagatatagt

SEQ ID NO: 978375 - DNA, 15 bp, Homo sapiens
gcatgagatatagtg

SEQ ID NO: 978376 - DNA, 15 bp, Homo sapiens
catgagatatagtgt

SEQ ID NO: 978377 - DNA, 15 bp, Homo sapiens
atgagatatagtgtc

SEQ ID NO: 978378 - DNA, 15 bp, Homo sapiens
tgagatatagtgtcc

SEQ ID NO: 978379 - DNA, 15 bp, Homo sapiens
gagatatagtgtccc

SEQ ID NO: 978380 - DNA, 15 bp, Homo sapiens
agatatagtgtccca

SEQ ID NO: 978381 - DNA, 15 bp, Homo sapiens
gatatagtgtcccaa

SEQ ID NO: 978382 - DNA, 15 bp, Homo sapiens
atatagtgtcccaaa

SEQ ID NO: 978383 - DNA, 15 bp, Homo sapiens
tatagtgtcccaaaa

SEQ ID NO: 978384 - DNA, 15 bp, Homo sapiens
atagtgtcccaaaac

SEQ ID NO: 978385 - DNA, 15 bp, Homo sapiens
tagtgtcccaaaaca

SEQ ID NO: 978386 - DNA, 15 bp, Homo sapiens
agtgtcccaaaacat

SEQ ID NO: 978387 - DNA, 15 bp, Homo sapiens
gtgtcccaaaacata

SEQ ID NO: 978388 - DNA, 15 bp, Homo sapiens
tgtcccaaaacatat

SEQ ID NO: 978389 - DNA, 15 bp, Homo sapiens
gtcccaaaacatatt

SEQ ID NO: 978390 - DNA, 15 bp, Homo sapiens
tcccaaaacatattt

SEQ ID NO: 978391 - DNA, 15 bp, Homo sapiens
cccaaaacatatttc

SEQ ID NO: 978392 - DNA, 15 bp, Homo sapiens
ccaaaacatatttca

SEQ ID NO: 978393 - DNA, 15 bp, Homo sapiens
caaaacatatttcaa

SEQ ID NO: 978394 - DNA, 15 bp, Homo sapiens
aaaacatatttcaag

SEQ ID NO: 978395 - DNA, 15 bp, Homo sapiens
aaacatatttcaagc

SEQ ID NO: 978396 - DNA, 15 bp, Homo sapiens
aacatatttcaagcc

SEQ ID NO: 978397 - DNA, 15 bp, Homo sapiens
acatatttcaagccc

SEQ ID NO: 978398 - DNA, 15 bp, Homo sapiens
catatttcaagccca

SEQ ID NO: 978399 - DNA, 15 bp, Homo sapiens
atatttcaagcccat

SEQ ID NO: 978400 - DNA, 15 bp, Homo sapiens
tatttcaagcccatt

SEQ ID NO: 978401 - DNA, 15 bp, Homo sapiens
atttcaagcccattg

SEQ ID NO: 978402 - DNA, 15 bp, Homo sapiens
tttcaagcccattgg

SEQ ID NO: 978403 - DNA, 15 bp, Homo sapiens
ttcaagcccattgga

SEQ ID NO: 978404 - DNA, 15 bp, Homo sapiens
tcaagcccattggat

SEQ ID NO: 978405 - DNA, 15 bp, Homo sapiens
caagcccattggata

SEQ ID NO: 978406 - DNA, 15 bp, Homo sapiens
aagcccattggataa

SEQ ID NO: 978407 - DNA, 15 bp, Homo sapiens
agcccattggataaa

SEQ ID NO: 978408 - DNA, 15 bp, Homo sapiens
gcccattggataaaa

SEQ ID NO: 978409 - DNA, 15 bp, Homo sapiens
cccattggataaaat

SEQ ID NO: 978410 - DNA, 15 bp, Homo sapiens
ccattggataaaata

SEQ ID NO: 978411 - DNA, 15 bp, Homo sapiens
cattggataaaatat

SEQ ID NO: 978412 - DNA, 15 bp, Homo sapiens
attggataaaatatg

SEQ ID NO: 978413 - DNA, 15 bp, Homo sapiens
ttggataaaatatgt

SEQ ID NO: 978414 - DNA, 15 bp, Homo sapiens
tggataaaatatgtg

SEQ ID NO: 978415 - DNA, 15 bp, Homo sapiens
ggataaaatatgtgt

SEQ ID NO: 978416 - DNA, 15 bp, Homo sapiens
gataaaatatgtgtt

SEQ ID NO: 978417 - DNA, 15 bp, Homo sapiens
ataaaatatgtgttt

SEQ ID NO: 978418 - DNA, 15 bp, Homo sapiens
taaaatatgtgttta

SEQ ID NO: 978419 - DNA, 15 bp, Homo sapiens
aaaatatgtgtttag

SEQ ID NO: 978420 - DNA, 15 bp, Homo sapiens
aaatatgtgtttagc

SEQ ID NO: 978421 - DNA, 15 bp, Homo sapiens
aatatgtgtttagca

SEQ ID NO: 978422 - DNA, 15 bp, Homo sapiens
atatgtgtttagcaa

SEQ ID NO: 978423 - DNA, 15 bp, Homo sapiens
tatgtgtttagcaag

SEQ ID NO: 978424 - DNA, 15 bp, Homo sapiens
atgtgtttagcaagt

SEQ ID NO: 978425 - DNA, 15 bp, Homo sapiens
tgtgtttagcaagtt

SEQ ID NO: 978426 - DNA, 15 bp, Homo sapiens
gtgtttagcaagttc

SEQ ID NO: 978427 - DNA, 15 bp, Homo sapiens
tgtttagcaagttct

SEQ ID NO: 978428 - DNA, 15 bp, Homo sapiens
gtttagcaagttctt

SEQ ID NO: 978429 - DNA, 15 bp, Homo sapiens
tttagcaagttctta

SEQ ID NO: 978430 - DNA, 15 bp, Homo sapiens
ttagcaagttcttaa

SEQ ID NO: 978431 - DNA, 15 bp, Homo sapiens
tagcaagttcttaaa

SEQ ID NO: 978432 - DNA, 15 bp, Homo sapiens
agcaagttcttaaat

SEQ ID NO: 978433 - DNA, 15 bp, Homo sapiens
gcaagttcttaaata

SEQ ID NO: 978434 - DNA, 15 bp, Homo sapiens
caagttcttaaatat

SEQ ID NO: 978435 - DNA, 15 bp, Homo sapiens
aagttcttaaatata

SEQ ID NO: 978436 - DNA, 15 bp, Homo sapiens
agttcttaaatataa

SEQ ID NO: 978437 - DNA, 15 bp, Homo sapiens
gttcttaaatataat

SEQ ID NO: 978438 - DNA, 15 bp, Homo sapiens
ttcttaaatataatg

SEQ ID NO: 978439 - DNA, 15 bp, Homo sapiens
tcttaaatataatga

SEQ ID NO: 978440 - DNA, 15 bp, Homo sapiens
cttaaatataatgat

SEQ ID NO: 978441 - DNA, 15 bp, Homo sapiens
ttaaatataatgata

SEQ ID NO: 978442 - DNA, 15 bp, Homo sapiens
taaatataatgataa

SEQ ID NO: 978443 - DNA, 15 bp, Homo sapiens
aaatataatgataac

SEQ ID NO: 978444 - DNA, 15 bp, Homo sapiens
aatataatgataaca

SEQ ID NO: 978445 - DNA, 15 bp, Homo sapiens
atataatgataacat

SEQ ID NO: 978446 - DNA, 15 bp, Homo sapiens
tataatgataacata

SEQ ID NO: 978447 - DNA, 15 bp, Homo sapiens
ataatgataacataa

SEQ ID NO: 978448 - DNA, 15 bp, Homo sapiens
taatgataacataac

SEQ ID NO: 978449 - DNA, 15 bp, Homo sapiens
aatgataacataacc

SEQ ID NO: 978450 - DNA, 15 bp, Homo sapiens
atgataacataaccg

SEQ ID NO: 978451 - DNA, 15 bp, Homo sapiens
tgataacataaccga

SEQ ID NO: 978452 - DNA, 15 bp, Homo sapiens
gataacataaccgac

SEQ ID NO: 978453 - DNA, 15 bp, Homo sapiens
ataacataaccgacc

SEQ ID NO: 978454 - DNA, 15 bp, Homo sapiens
taacataaccgacca

SEQ ID NO: 978455 - DNA, 15 bp, Homo sapiens
aacataaccgaccag

SEQ ID NO: 978456 - DNA, 15 bp, Homo sapiens
acataaccgaccaga

SEQ ID NO: 978457 - DNA, 15 bp, Homo sapiens
cataaccgaccagat

SEQ ID NO: 978458 - DNA, 15 bp, Homo sapiens
ataaccgaccagata

SEQ ID NO: 978459 - DNA, 15 bp, Homo sapiens
taaccgaccagataa

SEQ ID NO: 978460 - DNA, 15 bp, Homo sapiens
aaccgaccagataaa

SEQ ID NO: 978461 - DNA, 15 bp, Homo sapiens
accgaccagataaag

SEQ ID NO: 978462 - DNA, 15 bp, Homo sapiens
ccgaccagataaagt

SEQ ID NO: 978463 - DNA, 15 bp, Homo sapiens
cgaccagataaagtg

SEQ ID NO: 978464 - DNA, 15 bp, Homo sapiens
gaccagataaagtga

SEQ ID NO: 978465 - DNA, 15 bp, Homo sapiens
accagataaagtgat

SEQ ID NO: 978466 - DNA, 15 bp, Homo sapiens
ccagataaagtgatt

SEQ ID NO: 978467 - DNA, 15 bp, Homo sapiens
cagataaagtgattt

SEQ ID NO: 978468 - DNA, 15 bp, Homo sapiens
agataaagtgattta

SEQ ID NO: 978469 - DNA, 15 bp, Homo sapiens
gataaagtgatttat

SEQ ID NO: 978470 - DNA, 15 bp, Homo sapiens
ataaagtgatttata

SEQ ID NO: 978471 - DNA, 15 bp, Homo sapiens
taaagtgatttataa

SEQ ID NO: 978472 - DNA, 15 bp, Homo sapiens
aaagtgatttataaa

SEQ ID NO: 978473 - DNA, 15 bp, Homo sapiens
aagtgatttataaac

SEQ ID NO: 978474 - DNA, 15 bp, Homo sapiens
agtgatttataaacg

SEQ ID NO: 978475 - DNA, 15 bp, Homo sapiens
gtgatttataaacgc

SEQ ID NO: 978476 - DNA, 15 bp, Homo sapiens
tgatttataaacgct

SEQ ID NO: 978477 - DNA, 15 bp, Homo sapiens
gatttataaacgctg

SEQ ID NO: 978478 - DNA, 15 bp, Homo sapiens
atttataaacgctgt

SEQ ID NO: 978479 - DNA, 15 bp, Homo sapiens
tttataaacgctgtg

SEQ ID NO: 978480 - DNA, 15 bp, Homo sapiens
ttataaacgctgtgc

SEQ ID NO: 978481 - DNA, 15 bp, Homo sapiens
tataaacgctgtgcc

SEQ ID NO: 978482 - DNA, 15 bp, Homo sapiens
ataaacgctgtgcca

SEQ ID NO: 978483 - DNA, 15 bp, Homo sapiens
taaacgctgtgccaa

SEQ ID NO: 978484 - DNA, 15 bp, Homo sapiens
aaacgctgtgccaat

SEQ ID NO: 978485 - DNA, 15 bp, Homo sapiens
aacgctgtgccaatt

SEQ ID NO: 978486 - DNA, 15 bp, Homo sapiens
acgctgtgccaattt

SEQ ID NO: 978487 - DNA, 15 bp, Homo sapiens
cgctgtgccaatttt

SEQ ID NO: 978488 - DNA, 15 bp, Homo sapiens
gctgtgccaattttg

SEQ ID NO: 978489 - DNA, 15 bp, Homo sapiens
ctgtgccaattttgt

SEQ ID NO: 978490 - DNA, 15 bp, Homo sapiens
tgtgccaattttgta

SEQ ID NO: 978491 - DNA, 15 bp, Homo sapiens
gtgccaattttgtaa

SEQ ID NO: 978492 - DNA, 15 bp, Homo sapiens
tgccaattttgtaaa

SEQ ID NO: 978493 - DNA, 15 bp, Homo sapiens
gccaattttgtaaat

SEQ ID NO: 978494 - DNA, 15 bp, Homo sapiens
ccaattttgtaaatg

SEQ ID NO: 978495 - DNA, 15 bp, Homo sapiens
caattttgtaaatgt

SEQ ID NO: 978496 - DNA, 15 bp, Homo sapiens
aattttgtaaatgtt

SEQ ID NO: 978497 - DNA, 15 bp, Homo sapiens
attttgtaaatgttt

SEQ ID NO: 978498 - DNA, 15 bp, Homo sapiens
ttttgtaaatgtttc

SEQ ID NO: 978499 - DNA, 15 bp, Homo sapiens
tttgtaaatgtttcg

SEQ ID NO: 978500 - DNA, 15 bp, Homo sapiens
ttgtaaatgtttcga

SEQ ID NO: 978501 - DNA, 15 bp, Homo sapiens
tgtaaatgtttcgag

SEQ ID NO: 978502 - DNA, 15 bp, Homo sapiens
gtaaatgtttcgagg

SEQ ID NO: 978503 - DNA, 15 bp, Homo sapiens
taaatgtttcgagga

SEQ ID NO: 978504 - DNA, 15 bp, Homo sapiens
aaatgtttcgaggaa

SEQ ID NO: 978505 - DNA, 15 bp, Homo sapiens
aatgtttcgaggaat

SEQ ID NO: 978506 - DNA, 15 bp, Homo sapiens
atgtttcgaggaatt

SEQ ID NO: 978507 - DNA, 15 bp, Homo sapiens
tgtttcgaggaattt

SEQ ID NO: 978508 - DNA, 15 bp, Homo sapiens
gtttcgaggaatttt

SEQ ID NO: 978509 - DNA, 15 bp, Homo sapiens
tttcgaggaattttc

SEQ ID NO: 978510 - DNA, 15 bp, Homo sapiens
ttcgaggaattttcc

SEQ ID NO: 978511 - DNA, 15 bp, Homo sapiens
tcgaggaattttccc

SEQ ID NO: 978512 - DNA, 15 bp, Homo sapiens
cgaggaattttccct

SEQ ID NO: 978513 - DNA, 15 bp, Homo sapiens
gaggaattttccctt

SEQ ID NO: 978514 - DNA, 15 bp, Homo sapiens
aggaattttcccttt

SEQ ID NO: 978515 - DNA, 15 bp, Homo sapiens
ggaattttccctttt

SEQ ID NO: 978516 - DNA, 15 bp, Homo sapiens
gaattttcccttttc

SEQ ID NO: 978517 - DNA, 15 bp, Homo sapiens
aattttcccttttct

SEQ ID NO: 978518 - DNA, 15 bp, Homo sapiens
attttcccttttctg

SEQ ID NO: 978519 - DNA, 15 bp, Homo sapiens
ttttcccttttctga

SEQ ID NO: 978520 - DNA, 15 bp, Homo sapiens
tttcccttttctgaa

SEQ ID NO: 978521 - DNA, 15 bp, Homo sapiens
ttcccttttctgaag

SEQ ID NO: 978522 - DNA, 15 bp, Homo sapiens
tcccttttctgaaga

SEQ ID NO: 978523 - DNA, 15 bp, Homo sapiens
cccttttctgaagat

SEQ ID NO: 978524 - DNA, 15 bp, Homo sapiens
ccttttctgaagatt

SEQ ID NO: 978525 - DNA, 15 bp, Homo sapiens
cttttctgaagattg

SEQ ID NO: 978526 - DNA, 15 bp, Homo sapiens
ttttctgaagattgt

SEQ ID NO: 978527 - DNA, 15 bp, Homo sapiens
tttctgaagattgtc

SEQ ID NO: 978528 - DNA, 15 bp, Homo sapiens
ttctgaagattgtcc

SEQ ID NO: 978529 - DNA, 15 bp, Homo sapiens
tctgaagattgtcct

SEQ ID NO: 978530 - DNA, 15 bp, Homo sapiens
ctgaagattgtcctt

SEQ ID NO: 978531 - DNA, 15 bp, Homo sapiens
tgaagattgtccttc

SEQ ID NO: 978532 - DNA, 15 bp, Homo sapiens
gaagattgtccttct

SEQ ID NO: 978533 - DNA, 15 bp, Homo sapiens
aagattgtccttctt

SEQ ID NO: 978534 - DNA, 15 bp, Homo sapiens
agattgtccttcttt

SEQ ID NO: 978535 - DNA, 15 bp, Homo sapiens
gattgtccttctttc

SEQ ID NO: 978536 - DNA, 15 bp, Homo sapiens
attgtccttctttct

SEQ ID NO: 978537 - DNA, 15 bp, Homo sapiens
ttgtccttctttctt

SEQ ID NO: 978538 - DNA, 15 bp, Homo sapiens
tgtccttctttcttt

SEQ ID NO: 978539 - DNA, 15 bp, Homo sapiens
gtccttctttctttt

SEQ ID NO: 978540 - DNA, 15 bp, Homo sapiens
tccttctttcttttt

SEQ ID NO: 978541 - DNA, 15 bp, Homo sapiens
ccttctttcttttta

SEQ ID NO: 978542 - DNA, 15 bp, Homo sapiens
cttctttctttttag

SEQ ID NO: 978543 - DNA, 15 bp, Homo sapiens
ttctttctttttagc

SEQ ID NO: 978544 - DNA, 15 bp, Homo sapiens
tctttctttttagca

SEQ ID NO: 978545 - DNA, 15 bp, Homo sapiens
ctttctttttagcat

SEQ ID NO: 978546 - DNA, 15 bp, Homo sapiens
tttctttttagcatt

SEQ ID NO: 978547 - DNA, 15 bp, Homo sapiens
ttctttttagcattt

SEQ ID NO: 978548 - DNA, 15 bp, Homo sapiens
tctttttagcattta

SEQ ID NO: 978549 - DNA, 15 bp, Homo sapiens
ctttttagcatttac

SEQ ID NO: 978550 - DNA, 15 bp, Homo sapiens
tttttagcatttact

SEQ ID NO: 978551 - DNA, 15 bp, Homo sapiens
ttttagcatttactg

SEQ ID NO: 978552 - DNA, 15 bp, Homo sapiens
tttagcatttactgt

SEQ ID NO: 978553 - DNA, 15 bp, Homo sapiens
ttagcatttactgtc

SEQ ID NO: 978554 - DNA, 15 bp, Homo sapiens
tagcatttactgtca

SEQ ID NO: 978555 - DNA, 15 bp, Homo sapiens
agcatttactgtcac

SEQ ID NO: 978556 - DNA, 15 bp, Homo sapiens
gcatttactgtcacg

SEQ ID NO: 978557 - DNA, 15 bp, Homo sapiens
catttactgtcacgg

SEQ ID NO: 978558 - DNA, 15 bp, Homo sapiens
atttactgtcacggt

SEQ ID NO: 978559 - DNA, 15 bp, Homo sapiens
tttactgtcacggtt

SEQ ID NO: 978560 - DNA, 15 bp, Homo sapiens
ttactgtcacggttc

SEQ ID NO: 978561 - DNA, 15 bp, Homo sapiens
tactgtcacggttcc

SEQ ID NO: 978562 - DNA, 15 bp, Homo sapiens
actgtcacggttccc

SEQ ID NO: 978563 - DNA, 15 bp, Homo sapiens
ctgtcacggttccca

SEQ ID NO: 978564 - DNA, 15 bp, Homo sapiens
tgtcacggttcccaa

SEQ ID NO: 978565 - DNA, 15 bp, Homo sapiens
gtcacggttcccaag

SEQ ID NO: 978566 - DNA, 15 bp, Homo sapiens
tcacggttcccaagg

SEQ ID NO: 978567 - DNA, 15 bp, Homo sapiens
cacggttcccaagga

SEQ ID NO: 978568 - DNA, 15 bp, Homo sapiens
acggttcccaaggac

SEQ ID NO: 978569 - DNA, 15 bp, Homo sapiens
cggttcccaaggacc

SEQ ID NO: 978570 - DNA, 15 bp, Homo sapiens
ggttcccaaggacct

SEQ ID NO: 978571 - DNA, 15 bp, Homo sapiens
gttcccaaggaccta

SEQ ID NO: 978572 - DNA, 15 bp, Homo sapiens
ttcccaaggacctat

SEQ ID NO: 978573 - DNA, 15 bp, Homo sapiens
tcccaaggacctata

SEQ ID NO: 978574 - DNA, 15 bp, Homo sapiens
cccaaggacctatat

SEQ ID NO: 978575 - DNA, 15 bp, Homo sapiens
ccaaggacctatatg

SEQ ID NO: 978576 - DNA, 15 bp, Homo sapiens
caaggacctatatgt

SEQ ID NO: 978577 - DNA, 15 bp, Homo sapiens
aaggacctatatgtg

SEQ ID NO: 978578 - DNA, 15 bp, Homo sapiens
aggacctatatgtgg

SEQ ID NO: 978579 - DNA, 15 bp, Homo sapiens
ggacctatatgtggt

SEQ ID NO: 978580 - DNA, 15 bp, Homo sapiens
gacctatatgtggta

SEQ ID NO: 978581 - DNA, 15 bp, Homo sapiens
acctatatgtggtag

SEQ ID NO: 978582 - DNA, 15 bp, Homo sapiens
cctatatgtggtaga

SEQ ID NO: 978583 - DNA, 15 bp, Homo sapiens
ctatatgtggtagag

SEQ ID NO: 978584 - DNA, 15 bp, Homo sapiens
tatatgtggtagagt

SEQ ID NO: 978585 - DNA, 15 bp, Homo sapiens
atatgtggtagagta

SEQ ID NO: 978586 - DNA, 15 bp, Homo sapiens
tatgtggtagagtat

SEQ ID NO: 978587 - DNA, 15 bp, Homo sapiens
atgtggtagagtatg

SEQ ID NO: 978588 - DNA, 15 bp, Homo sapiens
tgtggtagagtatgg

SEQ ID NO: 978589 - DNA, 15 bp, Homo sapiens
gtggtagagtatggt

SEQ ID NO: 978590 - DNA, 15 bp, Homo sapiens
tggtagagtatggta

SEQ ID NO: 978591 - DNA, 15 bp, Homo sapiens
ggtagagtatggtag

SEQ ID NO: 978592 - DNA, 15 bp, Homo sapiens
gtagagtatggtagc

SEQ ID NO: 978593 - DNA, 15 bp, Homo sapiens
tagagtatggtagca

SEQ ID NO: 978594 - DNA, 15 bp, Homo sapiens
agagtatggtagcaa

SEQ ID NO: 978595 - DNA, 15 bp, Homo sapiens
gagtatggtagcaat

SEQ ID NO: 978596 - DNA, 15 bp, Homo sapiens
agtatggtagcaata

SEQ ID NO: 978597 - DNA, 15 bp, Homo sapiens
gtatggtagcaatat

SEQ ID NO: 978598 - DNA, 15 bp, Homo sapiens
tatggtagcaatatg

SEQ ID NO: 978599 - DNA, 15 bp, Homo sapiens
atggtagcaatatga

SEQ ID NO: 978600 - DNA, 15 bp, Homo sapiens
tggtagcaatatgac

SEQ ID NO: 978601 - DNA, 15 bp, Homo sapiens
ggtagcaatatgaca

SEQ ID NO: 978602 - DNA, 15 bp, Homo sapiens
gtagcaatatgacaa

SEQ ID NO: 978603 - DNA, 15 bp, Homo sapiens
tagcaatatgacaat

SEQ ID NO: 978604 - DNA, 15 bp, Homo sapiens
agcaatatgacaatt

SEQ ID NO: 978605 - DNA, 15 bp, Homo sapiens
gcaatatgacaattg

SEQ ID NO: 978606 - DNA, 15 bp, Homo sapiens
caatatgacaattga

SEQ ID NO: 978607 - DNA, 15 bp, Homo sapiens
aatatgacaattgaa

SEQ ID NO: 978608 - DNA, 15 bp, Homo sapiens
atatgacaattgaat

SEQ ID NO: 978609 - DNA, 15 bp, Homo sapiens
tatgacaattgaatg

SEQ ID NO: 978610 - DNA, 15 bp, Homo sapiens
atgacaattgaatgc

SEQ ID NO: 978611 - DNA, 15 bp, Homo sapiens
tgacaattgaatgca

SEQ ID NO: 978612 - DNA, 15 bp, Homo sapiens
gacaattgaatgcaa

SEQ ID NO: 978613 - DNA, 15 bp, Homo sapiens
acaattgaatgcaaa

SEQ ID NO: 978614 - DNA, 15 bp, Homo sapiens
caattgaatgcaaat

SEQ ID NO: 978615 - DNA, 15 bp, Homo sapiens
aattgaatgcaaatt

SEQ ID NO: 978616 - DNA, 15 bp, Homo sapiens
attgaatgcaaattc

SEQ ID NO: 978617 - DNA, 15 bp, Homo sapiens
ttgaatgcaaattcc

SEQ ID NO: 978618 - DNA, 15 bp, Homo sapiens
tgaatgcaaattccc

SEQ ID NO: 978619 - DNA, 15 bp, Homo sapiens
gaatgcaaattccca

SEQ ID NO: 978620 - DNA, 15 bp, Homo sapiens
aatgcaaattcccag

SEQ ID NO: 978621 - DNA, 15 bp, Homo sapiens
atgcaaattcccagt

SEQ ID NO: 978622 - DNA, 15 bp, Homo sapiens
tgcaaattcccagta

SEQ ID NO: 978623 - DNA, 15 bp, Homo sapiens
gcaaattcccagtag

SEQ ID NO: 978624 - DNA, 15 bp, Homo sapiens
caaattcccagtaga

SEQ ID NO: 978625 - DNA, 15 bp, Homo sapiens
aaattcccagtagaa

SEQ ID NO: 978626 - DNA, 15 bp, Homo sapiens
aattcccagtagaaa

SEQ ID NO: 978627 - DNA, 15 bp, Homo sapiens
attcccagtagaaaa

SEQ ID NO: 978628 - DNA, 15 bp, Homo sapiens
ttcccagtagaaaaa

SEQ ID NO: 978629 - DNA, 15 bp, Homo sapiens
tcccagtagaaaaac

SEQ ID NO: 978630 - DNA, 15 bp, Homo sapiens
cccagtagaaaaaca

SEQ ID NO: 978631 - DNA, 15 bp, Homo sapiens
ccagtagaaaaacaa

SEQ ID NO: 978632 - DNA, 15 bp, Homo sapiens
cagtagaaaaacaat

SEQ ID NO: 978633 - DNA, 15 bp, Homo sapiens
agtagaaaaacaatt

SEQ ID NO: 978634 - DNA, 15 bp, Homo sapiens
gtagaaaaacaatta

SEQ ID NO: 978635 - DNA, 15 bp, Homo sapiens
tagaaaaacaattag

SEQ ID NO: 978636 - DNA, 15 bp, Homo sapiens
agaaaaacaattaga

SEQ ID NO: 978637 - DNA, 15 bp, Homo sapiens
gaaaaacaattagac

SEQ ID NO: 978638 - DNA, 15 bp, Homo sapiens
aaaaacaattagacc

SEQ ID NO: 978639 - DNA, 15 bp, Homo sapiens
aaaacaattagacct

SEQ ID NO: 978640 - DNA, 15 bp, Homo sapiens
aaacaattagacctg

SEQ ID NO: 978641 - DNA, 15 bp, Homo sapiens
aacaattagacctgg

SEQ ID NO: 978642 - DNA, 15 bp, Homo sapiens
acaattagacctggc

SEQ ID NO: 978643 - DNA, 15 bp, Homo sapiens
caattagacctggct

SEQ ID NO: 978644 - DNA, 15 bp, Homo sapiens
aattagacctggctg

SEQ ID NO: 978645 - DNA, 15 bp, Homo sapiens
attagacctggctgc

SEQ ID NO: 978646 - DNA, 15 bp, Homo sapiens
ttagacctggctgca

SEQ ID NO: 978647 - DNA, 15 bp, Homo sapiens
tagacctggctgcac

SEQ ID NO: 978648 - DNA, 15 bp, Homo sapiens
agacctggctgcact

SEQ ID NO: 978649 - DNA, 15 bp, Homo sapiens
gacctggctgcacta

SEQ ID NO: 978650 - DNA, 15 bp, Homo sapiens
acctggctgcactaa

SEQ ID NO: 978651 - DNA, 15 bp, Homo sapiens
cctggctgcactaat

SEQ ID NO: 978652 - DNA, 15 bp, Homo sapiens
ctggctgcactaatt

SEQ ID NO: 978653 - DNA, 15 bp, Homo sapiens
tggctgcactaattg

SEQ ID NO: 978654 - DNA, 15 bp, Homo sapiens
ggctgcactaattgt

SEQ ID NO: 978655 - DNA, 15 bp, Homo sapiens
gctgcactaattgtc

SEQ ID NO: 978656 - DNA, 15 bp, Homo sapiens
ctgcactaattgtct

SEQ ID NO: 978657 - DNA, 15 bp, Homo sapiens
tgcactaattgtcta

SEQ ID NO: 978658 - DNA, 15 bp, Homo sapiens
gcactaattgtctat

SEQ ID NO: 978659 - DNA, 15 bp, Homo sapiens
cactaattgtctatt

SEQ ID NO: 978660 - DNA, 15 bp, Homo sapiens
actaattgtctattg

SEQ ID NO: 978661 - DNA, 15 bp, Homo sapiens
ctaattgtctattgg

SEQ ID NO: 978662 - DNA, 15 bp, Homo sapiens
taattgtctattggg

SEQ ID NO: 978663 - DNA, 15 bp, Homo sapiens
aattgtctattggga

SEQ ID NO: 978664 - DNA, 15 bp, Homo sapiens
attgtctattgggaa

SEQ ID NO: 978665 - DNA, 15 bp, Homo sapiens
ttgtctattgggaaa

SEQ ID NO: 978666 - DNA, 15 bp, Homo sapiens
tgtctattgggaaat

SEQ ID NO: 978667 - DNA, 15 bp, Homo sapiens
gtctattgggaaatg

SEQ ID NO: 978668 - DNA, 15 bp, Homo sapiens
tctattgggaaatgg

SEQ ID NO: 978669 - DNA, 15 bp, Homo sapiens
ctattgggaaatgga

SEQ ID NO: 978670 - DNA, 15 bp, Homo sapiens
tattgggaaatggag

SEQ ID NO: 978671 - DNA, 15 bp, Homo sapiens
attgggaaatggagg

SEQ ID NO: 978672 - DNA, 15 bp, Homo sapiens
ttgggaaatggagga

SEQ ID NO: 978673 - DNA, 15 bp, Homo sapiens
tgggaaatggaggat

SEQ ID NO: 978674 - DNA, 15 bp, Homo sapiens
gggaaatggaggata

SEQ ID NO: 978675 - DNA, 15 bp, Homo sapiens
ggaaatggaggataa

SEQ ID NO: 978676 - DNA, 15 bp, Homo sapiens
gaaatggaggataag

SEQ ID NO: 978677 - DNA, 15 bp, Homo sapiens
aaatggaggataaga

SEQ ID NO: 978678 - DNA, 15 bp, Homo sapiens
aatggaggataagaa

SEQ ID NO: 978679 - DNA, 15 bp, Homo sapiens
atggaggataagaac

SEQ ID NO: 978680 - DNA, 15 bp, Homo sapiens
tggaggataagaaca

SEQ ID NO: 978681 - DNA, 15 bp, Homo sapiens
ggaggataagaacat

SEQ ID NO: 978682 - DNA, 15 bp, Homo sapiens
gaggataagaacatt

SEQ ID NO: 978683 - DNA, 15 bp, Homo sapiens
aggataagaacatta

SEQ ID NO: 978684 - DNA, 15 bp, Homo sapiens
ggataagaacattat

SEQ ID NO: 978685 - DNA, 15 bp, Homo sapiens
gataagaacattatt

SEQ ID NO: 978686 - DNA, 15 bp, Homo sapiens
ataagaacattattc

SEQ ID NO: 978687 - DNA, 15 bp, Homo sapiens
taagaacattattca

SEQ ID NO: 978688 - DNA, 15 bp, Homo sapiens
aagaacattattcaa

SEQ ID NO: 978689 - DNA, 15 bp, Homo sapiens
agaacattattcaat

SEQ ID NO: 978690 - DNA, 15 bp, Homo sapiens
gaacattattcaatt

SEQ ID NO: 978691 - DNA, 15 bp, Homo sapiens
aacattattcaattt

SEQ ID NO: 978692 - DNA, 15 bp, Homo sapiens
acattattcaatttg

SEQ ID NO: 978693 - DNA, 15 bp, Homo sapiens
cattattcaatttgt

SEQ ID NO: 978694 - DNA, 15 bp, Homo sapiens
attattcaatttgtg

SEQ ID NO: 978695 - DNA, 15 bp, Homo sapiens
ttattcaatttgtgc

SEQ ID NO: 978696 - DNA, 15 bp, Homo sapiens
tattcaatttgtgca

SEQ ID NO: 978697 - DNA, 15 bp, Homo sapiens
attcaatttgtgcat

SEQ ID NO: 978698 - DNA, 15 bp, Homo sapiens
ttcaatttgtgcatg

SEQ ID NO: 978699 - DNA, 15 bp, Homo sapiens
tcaatttgtgcatgg

SEQ ID NO: 978700 - DNA, 15 bp, Homo sapiens
caatttgtgcatgga

SEQ ID NO: 978701 - DNA, 15 bp, Homo sapiens
aatttgtgcatggag

SEQ ID NO: 978702 - DNA, 15 bp, Homo sapiens
atttgtgcatggaga

SEQ ID NO: 978703 - DNA, 15 bp, Homo sapiens
tttgtgcatggagag

SEQ ID NO: 978704 - DNA, 15 bp, Homo sapiens
ttgtgcatggagagg

SEQ ID NO: 978705 - DNA, 15 bp, Homo sapiens
tgtgcatggagagga

SEQ ID NO: 978706 - DNA, 15 bp, Homo sapiens
gtgcatggagaggaa

SEQ ID NO: 978707 - DNA, 15 bp, Homo sapiens
tgcatggagaggaag

SEQ ID NO: 978708 - DNA, 15 bp, Homo sapiens
gcatggagaggaaga

SEQ ID NO: 978709 - DNA, 15 bp, Homo sapiens
catggagaggaagac

SEQ ID NO: 978710 - DNA, 15 bp, Homo sapiens
atggagaggaagacc

SEQ ID NO: 978711 - DNA, 15 bp, Homo sapiens
tggagaggaagacct

SEQ ID NO: 978712 - DNA, 15 bp, Homo sapiens
ggagaggaagacctg

SEQ ID NO: 978713 - DNA, 15 bp, Homo sapiens
gagaggaagacctga

SEQ ID NO: 978714 - DNA, 15 bp, Homo sapiens
agaggaagacctgaa

SEQ ID NO: 978715 - DNA, 15 bp, Homo sapiens
gaggaagacctgaag

SEQ ID NO: 978716 - DNA, 15 bp, Homo sapiens
aggaagacctgaagg

SEQ ID NO: 978717 - DNA, 15 bp, Homo sapiens
ggaagacctgaaggt

SEQ ID NO: 978718 - DNA, 15 bp, Homo sapiens
gaagacctgaaggtt

SEQ ID NO: 978719 - DNA, 15 bp, Homo sapiens
aagacctgaaggttc

SEQ ID NO: 978720 - DNA, 15 bp, Homo sapiens
agacctgaaggttca

SEQ ID NO: 978721 - DNA, 15 bp, Homo sapiens
gacctgaaggttcag

SEQ ID NO: 978722 - DNA, 15 bp, Homo sapiens
acctgaaggttcagc

SEQ ID NO: 978723 - DNA, 15 bp, Homo sapiens
cctgaaggttcagca

SEQ ID NO: 978724 - DNA, 15 bp, Homo sapiens
ctgaaggttcagcat

SEQ ID NO: 978725 - DNA, 15 bp, Homo sapiens
tgaaggttcagcata

SEQ ID NO: 978726 - DNA, 15 bp, Homo sapiens
gaaggttcagcatag

SEQ ID NO: 978727 - DNA, 15 bp, Homo sapiens
aaggttcagcatagt

SEQ ID NO: 978728 - DNA, 15 bp, Homo sapiens
aggttcagcatagta

SEQ ID NO: 978729 - DNA, 15 bp, Homo sapiens
ggttcagcatagtag

SEQ ID NO: 978730 - DNA, 15 bp, Homo sapiens
gttcagcatagtagc

SEQ ID NO: 978731 - DNA, 15 bp, Homo sapiens
ttcagcatagtagct

SEQ ID NO: 978732 - DNA, 15 bp, Homo sapiens
tcagcatagtagcta

SEQ ID NO: 978733 - DNA, 15 bp, Homo sapiens
cagcatagtagctac

SEQ ID NO: 978734 - DNA, 15 bp, Homo sapiens
agcatagtagctaca

SEQ ID NO: 978735 - DNA, 15 bp, Homo sapiens
gcatagtagctacag

SEQ ID NO: 978736 - DNA, 15 bp, Homo sapiens
catagtagctacaga

SEQ ID NO: 978737 - DNA, 15 bp, Homo sapiens
atagtagctacagac

SEQ ID NO: 978738 - DNA, 15 bp, Homo sapiens
tagtagctacagaca

SEQ ID NO: 978739 - DNA, 15 bp, Homo sapiens
agtagctacagacag

SEQ ID NO: 978740 - DNA, 15 bp, Homo sapiens
gtagctacagacaga

SEQ ID NO: 978741 - DNA, 15 bp, Homo sapiens
tagctacagacagag

SEQ ID NO: 978742 - DNA, 15 bp, Homo sapiens
agctacagacagagg

SEQ ID NO: 978743 - DNA, 15 bp, Homo sapiens
gctacagacagaggg

SEQ ID NO: 978744 - DNA, 15 bp, Homo sapiens
ctacagacagagggc

SEQ ID NO: 978745 - DNA, 15 bp, Homo sapiens
tacagacagagggcc

SEQ ID NO: 978746 - DNA, 15 bp, Homo sapiens
acagacagagggccc

SEQ ID NO: 978747 - DNA, 15 bp, Homo sapiens
cagacagagggcccg

SEQ ID NO: 978748 - DNA, 15 bp, Homo sapiens
agacagagggcccgg

SEQ ID NO: 978749 - DNA, 15 bp, Homo sapiens
gacagagggcccggc

SEQ ID NO: 978750 - DNA, 15 bp, Homo sapiens
acagagggcccggct

SEQ ID NO: 978751 - DNA, 15 bp, Homo sapiens
cagagggcccggctg

SEQ ID NO: 978752 - DNA, 15 bp, Homo sapiens
agagggcccggctgt

SEQ ID NO: 978753 - DNA, 15 bp, Homo sapiens
gagggcccggctgtt

SEQ ID NO: 978754 - DNA, 15 bp, Homo sapiens
agggcccggctgttg

SEQ ID NO: 978755 - DNA, 15 bp, Homo sapiens
gggcccggctgttga

SEQ ID NO: 978756 - DNA, 15 bp, Homo sapiens
ggcccggctgttgaa

SEQ ID NO: 978757 - DNA, 15 bp, Homo sapiens
gcccggctgttgaag

SEQ ID NO: 978758 - DNA, 15 bp, Homo sapiens
cccggctgttgaagg

SEQ ID NO: 978759 - DNA, 15 bp, Homo sapiens
ccggctgttgaagga

SEQ ID NO: 978760 - DNA, 15 bp, Homo sapiens
cggctgttgaaggac

SEQ ID NO: 978761 - DNA, 15 bp, Homo sapiens
ggctgttgaaggacc

SEQ ID NO: 978762 - DNA, 15 bp, Homo sapiens
gctgttgaaggacca

SEQ ID NO: 978763 - DNA, 15 bp, Homo sapiens
ctgttgaaggaccag

SEQ ID NO: 978764 - DNA, 15 bp, Homo sapiens
tgttgaaggaccagc

SEQ ID NO: 978765 - DNA, 15 bp, Homo sapiens
gttgaaggaccagct

SEQ ID NO: 978766 - DNA, 15 bp, Homo sapiens
ttgaaggaccagctc

SEQ ID NO: 978767 - DNA, 15 bp, Homo sapiens
tgaaggaccagctct

SEQ ID NO: 978768 - DNA, 15 bp, Homo sapiens
gaaggaccagctctc

SEQ ID NO: 978769 - DNA, 15 bp, Homo sapiens
aaggaccagctctcc

SEQ ID NO: 978770 - DNA, 15 bp, Homo sapiens
aggaccagctctccc

SEQ ID NO: 978771 - DNA, 15 bp, Homo sapiens
ggaccagctctccct

SEQ ID NO: 978772 - DNA, 15 bp, Homo sapiens
gaccagctctccctg

SEQ ID NO: 978773 - DNA, 15 bp, Homo sapiens
accagctctccctgg

SEQ ID NO: 978774 - DNA, 15 bp, Homo sapiens
ccagctctccctggg

SEQ ID NO: 978775 - DNA, 15 bp, Homo sapiens
cagctctccctggga

SEQ ID NO: 978776 - DNA, 15 bp, Homo sapiens
agctctccctgggaa

SEQ ID NO: 978777 - DNA, 15 bp, Homo sapiens
gctctccctgggaaa

SEQ ID NO: 978778 - DNA, 15 bp, Homo sapiens
ctctccctgggaaat

SEQ ID NO: 978779 - DNA, 15 bp, Homo sapiens
tctccctgggaaatg

SEQ ID NO: 978780 - DNA, 15 bp, Homo sapiens
ctccctgggaaatgc

SEQ ID NO: 978781 - DNA, 15 bp, Homo sapiens
tccctgggaaatgct

SEQ ID NO: 978782 - DNA, 15 bp, Homo sapiens
ccctgggaaatgctg

SEQ ID NO: 978783 - DNA, 15 bp, Homo sapiens
cctgggaaatgctgc

SEQ ID NO: 978784 - DNA, 15 bp, Homo sapiens
ctgggaaatgctgca

SEQ ID NO: 978785 - DNA, 15 bp, Homo sapiens
tgggaaatgctgcac

SEQ ID NO: 978786 - DNA, 15 bp, Homo sapiens
gggaaatgctgcact

SEQ ID NO: 978787 - DNA, 15 bp, Homo sapiens
ggaaatgctgcactt

SEQ ID NO: 978788 - DNA, 15 bp, Homo sapiens
gaaatgctgcacttc

SEQ ID NO: 978789 - DNA, 15 bp, Homo sapiens
aaatgctgcacttca

SEQ ID NO: 978790 - DNA, 15 bp, Homo sapiens
aatgctgcacttcag

SEQ ID NO: 978791 - DNA, 15 bp, Homo sapiens
atgctgcacttcaga

SEQ ID NO: 978792 - DNA, 15 bp, Homo sapiens
tgctgcacttcagat

SEQ ID NO: 978793 - DNA, 15 bp, Homo sapiens
gctgcacttcagatc

SEQ ID NO: 978794 - DNA, 15 bp, Homo sapiens
ctgcacttcagatca

SEQ ID NO: 978795 - DNA, 15 bp, Homo sapiens
tgcacttcagatcac

SEQ ID NO: 978796 - DNA, 15 bp, Homo sapiens
gcacttcagatcaca

SEQ ID NO: 978797 - DNA, 15 bp, Homo sapiens
cacttcagatcacag

SEQ ID NO: 978798 - DNA, 15 bp, Homo sapiens
acttcagatcacaga

SEQ ID NO: 978799 - DNA, 15 bp, Homo sapiens
cttcagatcacagat

SEQ ID NO: 978800 - DNA, 15 bp, Homo sapiens
ttcagatcacagatg

SEQ ID NO: 978801 - DNA, 15 bp, Homo sapiens
tcagatcacagatgt

SEQ ID NO: 978802 - DNA, 15 bp, Homo sapiens
cagatcacagatgtg

SEQ ID NO: 978803 - DNA, 15 bp, Homo sapiens
agatcacagatgtga

SEQ ID NO: 978804 - DNA, 15 bp, Homo sapiens
gatcacagatgtgaa

SEQ ID NO: 978805 - DNA, 15 bp, Homo sapiens
atcacagatgtgaaa

SEQ ID NO: 978806 - DNA, 15 bp, Homo sapiens
tcacagatgtgaaat

SEQ ID NO: 978807 - DNA, 15 bp, Homo sapiens
cacagatgtgaaatt

SEQ ID NO: 978808 - DNA, 15 bp, Homo sapiens
acagatgtgaaattg

SEQ ID NO: 978809 - DNA, 15 bp, Homo sapiens
cagatgtgaaattgc

SEQ ID NO: 978810 - DNA, 15 bp, Homo sapiens
agatgtgaaattgca

SEQ ID NO: 978811 - DNA, 15 bp, Homo sapiens
gatgtgaaattgcag

SEQ ID NO: 978812 - DNA, 15 bp, Homo sapiens
atgtgaaattgcagg

SEQ ID NO: 978813 - DNA, 15 bp, Homo sapiens
tgtgaaattgcagga

SEQ ID NO: 978814 - DNA, 15 bp, Homo sapiens
gtgaaattgcaggat

SEQ ID NO: 978815 - DNA, 15 bp, Homo sapiens
tgaaattgcaggatg

SEQ ID NO: 978816 - DNA, 15 bp, Homo sapiens
gaaattgcaggatgc

SEQ ID NO: 978817 - DNA, 15 bp, Homo sapiens
aaattgcaggatgca

SEQ ID NO: 978818 - DNA, 15 bp, Homo sapiens
aattgcaggatgcag

SEQ ID NO: 978819 - DNA, 15 bp, Homo sapiens
attgcaggatgcagg

SEQ ID NO: 978820 - DNA, 15 bp, Homo sapiens
ttgcaggatgcaggg

SEQ ID NO: 978821 - DNA, 15 bp, Homo sapiens
tgcaggatgcagggg

SEQ ID NO: 978822 - DNA, 15 bp, Homo sapiens
gcaggatgcaggggt

SEQ ID NO: 978823 - DNA, 15 bp, Homo sapiens
caggatgcaggggtg

SEQ ID NO: 978824 - DNA, 15 bp, Homo sapiens
aggatgcaggggtgt

SEQ ID NO: 978825 - DNA, 15 bp, Homo sapiens
ggatgcaggggtgta

SEQ ID NO: 978826 - DNA, 15 bp, Homo sapiens
gatgcaggggtgtac

SEQ ID NO: 978827 - DNA, 15 bp, Homo sapiens
atgcaggggtgtacc

SEQ ID NO: 978828 - DNA, 15 bp, Homo sapiens
tgcaggggtgtaccg

SEQ ID NO: 978829 - DNA, 15 bp, Homo sapiens
gcaggggtgtaccgc

SEQ ID NO: 978830 - DNA, 15 bp, Homo sapiens
caggggtgtaccgct

SEQ ID NO: 978831 - DNA, 15 bp, Homo sapiens
aggggtgtaccgctg

SEQ ID NO: 978832 - DNA, 15 bp, Homo sapiens
ggggtgtaccgctgc

SEQ ID NO: 978833 - DNA, 15 bp, Homo sapiens
gggtgtaccgctgca

SEQ ID NO: 978834 - DNA, 15 bp, Homo sapiens
ggtgtaccgctgcat

SEQ ID NO: 978835 - DNA, 15 bp, Homo sapiens
gtgtaccgctgcatg

SEQ ID NO: 978836 - DNA, 15 bp, Homo sapiens
tgtaccgctgcatga

SEQ ID NO: 978837 - DNA, 15 bp, Homo sapiens
gtaccgctgcatgat

SEQ ID NO: 978838 - DNA, 15 bp, Homo sapiens
taccgctgcatgatc

SEQ ID NO: 978839 - DNA, 15 bp, Homo sapiens
accgctgcatgatca

SEQ ID NO: 978840 - DNA, 15 bp, Homo sapiens
ccgctgcatgatcag

SEQ ID NO: 978841 - DNA, 15 bp, Homo sapiens
cgctgcatgatcagc

SEQ ID NO: 978842 - DNA, 15 bp, Homo sapiens
gctgcatgatcagct

SEQ ID NO: 978843 - DNA, 15 bp, Homo sapiens
ctgcatgatcagcta

SEQ ID NO: 978844 - DNA, 15 bp, Homo sapiens
tgcatgatcagctat

SEQ ID NO: 978845 - DNA, 15 bp, Homo sapiens
gcatgatcagctatg

SEQ ID NO: 978846 - DNA, 15 bp, Homo sapiens
catgatcagctatgg

SEQ ID NO: 978847 - DNA, 15 bp, Homo sapiens
atgatcagctatggt

SEQ ID NO: 978848 - DNA, 15 bp, Homo sapiens
tgatcagctatggtg

SEQ ID NO: 978849 - DNA, 15 bp, Homo sapiens
gatcagctatggtgg

SEQ ID NO: 978850 - DNA, 15 bp, Homo sapiens
atcagctatggtggt

SEQ ID NO: 978851 - DNA, 15 bp, Homo sapiens
tcagctatggtggtg

SEQ ID NO: 978852 - DNA, 15 bp, Homo sapiens
cagctatggtggtgc

SEQ ID NO: 978853 - DNA, 15 bp, Homo sapiens
agctatggtggtgcc

SEQ ID NO: 978854 - DNA, 15 bp, Homo sapiens
gctatggtggtgccg

SEQ ID NO: 978855 - DNA, 15 bp, Homo sapiens
ctatggtggtgccga

SEQ ID NO: 978856 - DNA, 15 bp, Homo sapiens
tatggtggtgccgac

SEQ ID NO: 978857 - DNA, 15 bp, Homo sapiens
atggtggtgccgact

SEQ ID NO: 978858 - DNA, 15 bp, Homo sapiens
tggtggtgccgacta

SEQ ID NO: 978859 - DNA, 15 bp, Homo sapiens
ggtggtgccgactac

SEQ ID NO: 978860 - DNA, 15 bp, Homo sapiens
gtggtgccgactaca

SEQ ID NO: 978861 - DNA, 15 bp, Homo sapiens
tggtgccgactacaa

SEQ ID NO: 978862 - DNA, 15 bp, Homo sapiens
ggtgccgactacaag

SEQ ID NO: 978863 - DNA, 15 bp, Homo sapiens
gtgccgactacaagc

SEQ ID NO: 978864 - DNA, 15 bp, Homo sapiens
tgccgactacaagcg

SEQ ID NO: 978865 - DNA, 15 bp, Homo sapiens
gccgactacaagcga

SEQ ID NO: 978866 - DNA, 15 bp, Homo sapiens
ccgactacaagcgaa

SEQ ID NO: 978867 - DNA, 15 bp, Homo sapiens
cgactacaagcgaat

SEQ ID NO: 978868 - DNA, 15 bp, Homo sapiens
gactacaagcgaatt

SEQ ID NO: 978869 - DNA, 15 bp, Homo sapiens
actacaagcgaatta

SEQ ID NO: 978870 - DNA, 15 bp, Homo sapiens
ctacaagcgaattac

SEQ ID NO: 978871 - DNA, 15 bp, Homo sapiens
tacaagcgaattact

SEQ ID NO: 978872 - DNA, 15 bp, Homo sapiens
acaagcgaattactg

SEQ ID NO: 978873 - DNA, 15 bp, Homo sapiens
caagcgaattactgt

SEQ ID NO: 978874 - DNA, 15 bp, Homo sapiens
aagcgaattactgtg

SEQ ID NO: 978875 - DNA, 15 bp, Homo sapiens
agcgaattactgtga

SEQ ID NO: 978876 - DNA, 15 bp, Homo sapiens
gcgaattactgtgaa

SEQ ID NO: 978877 - DNA, 15 bp, Homo sapiens
cgaattactgtgaaa

SEQ ID NO: 978878 - DNA, 15 bp, Homo sapiens
gaattactgtgaaag

SEQ ID NO: 978879 - DNA, 15 bp, Homo sapiens
aattactgtgaaagt

SEQ ID NO: 978880 - DNA, 15 bp, Homo sapiens
attactgtgaaagtc

SEQ ID NO: 978881 - DNA, 15 bp, Homo sapiens
ttactgtgaaagtca

SEQ ID NO: 978882 - DNA, 15 bp, Homo sapiens
tactgtgaaagtcaa

SEQ ID NO: 978883 - DNA, 15 bp, Homo sapiens
actgtgaaagtcaat

SEQ ID NO: 978884 - DNA, 15 bp, Homo sapiens
ctgtgaaagtcaatg

SEQ ID NO: 978885 - DNA, 15 bp, Homo sapiens
tgtgaaagtcaatgg

SEQ ID NO: 978886 - DNA, 15 bp, Homo sapiens
gtgaaagtcaatggt

SEQ ID NO: 978887 - DNA, 15 bp, Homo sapiens
tgaaagtcaatggta

SEQ ID NO: 978888 - DNA, 15 bp, Homo sapiens
gaaagtcaatggtaa

SEQ ID NO: 978889 - DNA, 15 bp, Homo sapiens
aaagtcaatggtaag

SEQ ID NO: 978890 - DNA, 15 bp, Homo sapiens
aagtcaatggtaaga

SEQ ID NO: 978891 - DNA, 15 bp, Homo sapiens
agtcaatggtaagaa

SEQ ID NO: 978892 - DNA, 15 bp, Homo sapiens
gtcaatggtaagaat

SEQ ID NO: 978893 - DNA, 15 bp, Homo sapiens
tcaatggtaagaatt

SEQ ID NO: 978894 - DNA, 15 bp, Homo sapiens
caatggtaagaatta

SEQ ID NO: 978895 - DNA, 15 bp, Homo sapiens
aatggtaagaattat

SEQ ID NO: 978896 - DNA, 15 bp, Homo sapiens
atggtaagaattatt

SEQ ID NO: 978897 - DNA, 15 bp, Homo sapiens
tggtaagaattatta

SEQ ID NO: 978898 - DNA, 15 bp, Homo sapiens
ggtaagaattattat

SEQ ID NO: 978899 - DNA, 15 bp, Homo sapiens
gtaagaattattata

SEQ ID NO: 978900 - DNA, 15 bp, Homo sapiens
taagaattattatag

SEQ ID NO: 978901 - DNA, 15 bp, Homo sapiens
aagaattattataga

SEQ ID NO: 978902 - DNA, 15 bp, Homo sapiens
agaattattatagat

SEQ ID NO: 978903 - DNA, 15 bp, Homo sapiens
gaattattatagatg

SEQ ID NO: 978904 - DNA, 15 bp, Homo sapiens
aattattatagatga

SEQ ID NO: 978905 - DNA, 15 bp, Homo sapiens
attattatagatgag

SEQ ID NO: 978906 - DNA, 15 bp, Homo sapiens
ttattatagatgaga

SEQ ID NO: 978907 - DNA, 15 bp, Homo sapiens
tattatagatgagag

SEQ ID NO: 978908 - DNA, 15 bp, Homo sapiens
attatagatgagagg

SEQ ID NO: 978909 - DNA, 15 bp, Homo sapiens
ttatagatgagaggc

SEQ ID NO: 978910 - DNA, 15 bp, Homo sapiens
tatagatgagaggcc

SEQ ID NO: 978911 - DNA, 15 bp, Homo sapiens
atagatgagaggcct

SEQ ID NO: 978912 - DNA, 15 bp, Homo sapiens
tagatgagaggcctg

SEQ ID NO: 978913 - DNA, 15 bp, Homo sapiens
agatgagaggcctga

SEQ ID NO: 978914 - DNA, 15 bp, Homo sapiens
gatgagaggcctgat

SEQ ID NO: 978915 - DNA, 15 bp, Homo sapiens
atgagaggcctgatc

SEQ ID NO: 978916 - DNA, 15 bp, Homo sapiens
tgagaggcctgatct

SEQ ID NO: 978917 - DNA, 15 bp, Homo sapiens
gagaggcctgatctt

SEQ ID NO: 978918 - DNA, 15 bp, Homo sapiens
agaggcctgatcttt

SEQ ID NO: 978919 - DNA, 15 bp, Homo sapiens
gaggcctgatcttta

SEQ ID NO: 978920 - DNA, 15 bp, Homo sapiens
aggcctgatctttat

SEQ ID NO: 978921 - DNA, 15 bp, Homo sapiens
ggcctgatctttatt

SEQ ID NO: 978922 - DNA, 15 bp, Homo sapiens
gcctgatctttattg

SEQ ID NO: 978923 - DNA, 15 bp, Homo sapiens
cctgatctttattga

SEQ ID NO: 978924 - DNA, 15 bp, Homo sapiens
ctgatctttattgaa

SEQ ID NO: 978925 - DNA, 15 bp, Homo sapiens
tgatctttattgaaa

SEQ ID NO: 978926 - DNA, 15 bp, Homo sapiens
gatctttattgaaaa

SEQ ID NO: 978927 - DNA, 15 bp, Homo sapiens
atctttattgaaaac

SEQ ID NO: 978928 - DNA, 15 bp, Homo sapiens
tctttattgaaaaca

SEQ ID NO: 978929 - DNA, 15 bp, Homo sapiens
ctttattgaaaacat

SEQ ID NO: 978930 - DNA, 15 bp, Homo sapiens
tttattgaaaacata

SEQ ID NO: 978931 - DNA, 15 bp, Homo sapiens
ttattgaaaacatat

SEQ ID NO: 978932 - DNA, 15 bp, Homo sapiens
tattgaaaacatatt

SEQ ID NO: 978933 - DNA, 15 bp, Homo sapiens
attgaaaacatattc

SEQ ID NO: 978934 - DNA, 15 bp, Homo sapiens
ttgaaaacatattcc

SEQ ID NO: 978935 - DNA, 15 bp, Homo sapiens
tgaaaacatattcca

SEQ ID NO: 978936 - DNA, 15 bp, Homo sapiens
gaaaacatattccaa

SEQ ID NO: 978937 - DNA, 15 bp, Homo sapiens
aaaacatattccaag

SEQ ID NO: 978938 - DNA, 15 bp, Homo sapiens
aaacatattccaagt

SEQ ID NO: 978939 - DNA, 15 bp, Homo sapiens
aacatattccaagtg

SEQ ID NO: 978940 - DNA, 15 bp, Homo sapiens
acatattccaagtgt

SEQ ID NO: 978941 - DNA, 15 bp, Homo sapiens
catattccaagtgtt

SEQ ID NO: 978942 - DNA, 15 bp, Homo sapiens
atattccaagtgttg

SEQ ID NO: 978943 - DNA, 15 bp, Homo sapiens
tattccaagtgttga

SEQ ID NO: 978944 - DNA, 15 bp, Homo sapiens
attccaagtgttgaa

SEQ ID NO: 978945 - DNA, 15 bp, Homo sapiens
ttccaagtgttgaag

SEQ ID NO: 978946 - DNA, 15 bp, Homo sapiens
tccaagtgttgaaga

SEQ ID NO: 978947 - DNA, 15 bp, Homo sapiens
ccaagtgttgaagac

SEQ ID NO: 978948 - DNA, 15 bp, Homo sapiens
caagtgttgaagact

SEQ ID NO: 978949 - DNA, 15 bp, Homo sapiens
aagtgttgaagactt

SEQ ID NO: 978950 - DNA, 15 bp, Homo sapiens
agtgttgaagacttt

SEQ ID NO: 978951 - DNA, 15 bp, Homo sapiens
gtgttgaagactttt

SEQ ID NO: 978952 - DNA, 15 bp, Homo sapiens
tgttgaagacttttc

SEQ ID NO: 978953 - DNA, 15 bp, Homo sapiens
gttgaagacttttca

SEQ ID NO: 978954 - DNA, 15 bp, Homo sapiens
ttgaagacttttcat

SEQ ID NO: 978955 - DNA, 15 bp, Homo sapiens
tgaagacttttcatt

SEQ ID NO: 978956 - DNA, 15 bp, Homo sapiens
gaagacttttcattc

SEQ ID NO: 978957 - DNA, 15 bp, Homo sapiens
aagacttttcattct

SEQ ID NO: 978958 - DNA, 15 bp, Homo sapiens
agacttttcattctt

SEQ ID NO: 978959 - DNA, 15 bp, Homo sapiens
gacttttcattcttg

SEQ ID NO: 978960 - DNA, 15 bp, Homo sapiens
acttttcattcttgt

SEQ ID NO: 978961 - DNA, 15 bp, Homo sapiens
cttttcattcttgta

SEQ ID NO: 978962 - DNA, 15 bp, Homo sapiens
ttttcattcttgtaa

SEQ ID NO: 978963 - DNA, 15 bp, Homo sapiens
tttcattcttgtaag

SEQ ID NO: 978964 - DNA, 15 bp, Homo sapiens
ttcattcttgtaagt

SEQ ID NO: 978965 - DNA, 15 bp, Homo sapiens
tcattcttgtaagtc

SEQ ID NO: 978966 - DNA, 15 bp, Homo sapiens
cattcttgtaagtcc

SEQ ID NO: 978967 - DNA, 15 bp, Homo sapiens
attcttgtaagtcca

SEQ ID NO: 978968 - DNA, 15 bp, Homo sapiens
ttcttgtaagtccat

SEQ ID NO: 978969 - DNA, 15 bp, Homo sapiens
tcttgtaagtccata

SEQ ID NO: 978970 - DNA, 15 bp, Homo sapiens
cttgtaagtccatac

SEQ ID NO: 978971 - DNA, 15 bp, Homo sapiens
ttgtaagtccatact

SEQ ID NO: 978972 - DNA, 15 bp, Homo sapiens
tgtaagtccatactt

SEQ ID NO: 978973 - DNA, 15 bp, Homo sapiens
gtaagtccatactta

SEQ ID NO: 978974 - DNA, 15 bp, Homo sapiens
taagtccatacttat

SEQ ID NO: 978975 - DNA, 15 bp, Homo sapiens
aagtccatacttatt

SEQ ID NO: 978976 - DNA, 15 bp, Homo sapiens
agtccatacttattt

SEQ ID NO: 978977 - DNA, 15 bp, Homo sapiens
gtccatacttatttt

SEQ ID NO: 978978 - DNA, 15 bp, Homo sapiens
tccatacttattttc

SEQ ID NO: 978979 - DNA, 15 bp, Homo sapiens
ccatacttattttca

SEQ ID NO: 978980 - DNA, 15 bp, Homo sapiens
catacttattttcaa

SEQ ID NO: 978981 - DNA, 15 bp, Homo sapiens
atacttattttcaaa

SEQ ID NO: 978982 - DNA, 15 bp, Homo sapiens
tacttattttcaaac

SEQ ID NO: 978983 - DNA, 15 bp, Homo sapiens
acttattttcaaaca

SEQ ID NO: 978984 - DNA, 15 bp, Homo sapiens
cttattttcaaacag

SEQ ID NO: 978985 - DNA, 15 bp, Homo sapiens
ttattttcaaacaga

SEQ ID NO: 978986 - DNA, 15 bp, Homo sapiens
tattttcaaacagaa

SEQ ID NO: 978987 - DNA, 15 bp, Homo sapiens
attttcaaacagaac

SEQ ID NO: 978988 - DNA, 15 bp, Homo sapiens
ttttcaaacagaaca

SEQ ID NO: 978989 - DNA, 15 bp, Homo sapiens
tttcaaacagaacag

SEQ ID NO: 978990 - DNA, 15 bp, Homo sapiens
ttcaaacagaacagc

SEQ ID NO: 978991 - DNA, 15 bp, Homo sapiens
tcaaacagaacagca

SEQ ID NO: 978992 - DNA, 15 bp, Homo sapiens
caaacagaacagcat

SEQ ID NO: 978993 - DNA, 15 bp, Homo sapiens
aaacagaacagcata

SEQ ID NO: 978994 - DNA, 15 bp, Homo sapiens
aacagaacagcatag

SEQ ID NO: 978995 - DNA, 15 bp, Homo sapiens
acagaacagcatagt

SEQ ID NO: 978996 - DNA, 15 bp, Homo sapiens
cagaacagcatagtc

SEQ ID NO: 978997 - DNA, 15 bp, Homo sapiens
agaacagcatagtct

SEQ ID NO: 978998 - DNA, 15 bp, Homo sapiens
gaacagcatagtctg

SEQ ID NO: 978999 - DNA, 15 bp, Homo sapiens
aacagcatagtctgt

SEQ ID NO: 979000 - DNA, 15 bp, Homo sapiens
acagcatagtctgtt

SEQ ID NO: 979001 - DNA, 15 bp, Homo sapiens
cagcatagtctgttc

SEQ ID NO: 979002 - DNA, 15 bp, Homo sapiens
agcatagtctgttca

SEQ ID NO: 979003 - DNA, 15 bp, Homo sapiens
gcatagtctgttcat

SEQ ID NO: 979004 - DNA, 15 bp, Homo sapiens
catagtctgttcatt

SEQ ID NO: 979005 - DNA, 15 bp, Homo sapiens
atagtctgttcattc

SEQ ID NO: 979006 - DNA, 15 bp, Homo sapiens
tagtctgttcattca

SEQ ID NO: 979007 - DNA, 15 bp, Homo sapiens
agtctgttcattcat

SEQ ID NO: 979008 - DNA, 15 bp, Homo sapiens
gtctgttcattcatt

SEQ ID NO: 979009 - DNA, 15 bp, Homo sapiens
tctgttcattcattc

SEQ ID NO: 979010 - DNA, 15 bp, Homo sapiens
ctgttcattcattca

SEQ ID NO: 979011 - DNA, 15 bp, Homo sapiens
tgttcattcattcat

SEQ ID NO: 979012 - DNA, 15 bp, Homo sapiens
gttcattcattcatt

SEQ ID NO: 979013 - DNA, 15 bp, Homo sapiens
ttcattcattcattc

SEQ ID NO: 979014 - DNA, 15 bp, Homo sapiens
tcattcattcattca

SEQ ID NO: 979015 - DNA, 15 bp, Homo sapiens
cattcattcattcaa

SEQ ID NO: 979016 - DNA, 15 bp, Homo sapiens
attcattcattcaat

SEQ ID NO: 979017 - DNA, 15 bp, Homo sapiens
ttcattcattcaatt

SEQ ID NO: 979018 - DNA, 15 bp, Homo sapiens
tcattcattcaattc

SEQ ID NO: 979019 - DNA, 15 bp, Homo sapiens
cattcattcaattca

SEQ ID NO: 979020 - DNA, 15 bp, Homo sapiens
attcattcaattcat

SEQ ID NO: 979021 - DNA, 15 bp, Homo sapiens
ttcattcaattcatg

SEQ ID NO: 979022 - DNA, 15 bp, Homo sapiens
tcattcaattcatga

SEQ ID NO: 979023 - DNA, 15 bp, Homo sapiens
cattcaattcatgaa

SEQ ID NO: 979024 - DNA, 15 bp, Homo sapiens
attcaattcatgaat

SEQ ID NO: 979025 - DNA, 15 bp, Homo sapiens
ttcaattcatgaatt

SEQ ID NO: 979026 - DNA, 15 bp, Homo sapiens
tcaattcatgaattc

SEQ ID NO: 979027 - DNA, 15 bp, Homo sapiens
caattcatgaattca

SEQ ID NO: 979028 - DNA, 15 bp, Homo sapiens
aattcatgaattcat

SEQ ID NO: 979029 - DNA, 15 bp, Homo sapiens
attcatgaattcatt

SEQ ID NO: 979030 - DNA, 15 bp, Homo sapiens
ttcatgaattcattc

SEQ ID NO: 979031 - DNA, 15 bp, Homo sapiens
tcatgaattcattca

SEQ ID NO: 979032 - DNA, 15 bp, Homo sapiens
catgaattcattcac

SEQ ID NO: 979033 - DNA, 15 bp, Homo sapiens
atgaattcattcaca

SEQ ID NO: 979034 - DNA, 15 bp, Homo sapiens
tgaattcattcacat

SEQ ID NO: 979035 - DNA, 15 bp, Homo sapiens
gaattcattcacata

SEQ ID NO: 979036 - DNA, 15 bp, Homo sapiens
aattcattcacataa

SEQ ID NO: 979037 - DNA, 15 bp, Homo sapiens
attcattcacataat

SEQ ID NO: 979038 - DNA, 15 bp, Homo sapiens
ttcattcacataatt

SEQ ID NO: 979039 - DNA, 15 bp, Homo sapiens
tcattcacataatta

SEQ ID NO: 979040 - DNA, 15 bp, Homo sapiens
cattcacataattat

SEQ ID NO: 979041 - DNA, 15 bp, Homo sapiens
attcacataattatc

SEQ ID NO: 979042 - DNA, 15 bp, Homo sapiens
ttcacataattatcc

SEQ ID NO: 979043 - DNA, 15 bp, Homo sapiens
tcacataattatcca

SEQ ID NO: 979044 - DNA, 15 bp, Homo sapiens
cacataattatccaa

SEQ ID NO: 979045 - DNA, 15 bp, Homo sapiens
acataattatccaat

SEQ ID NO: 979046 - DNA, 15 bp, Homo sapiens
cataattatccaatt

SEQ ID NO: 979047 - DNA, 15 bp, Homo sapiens
ataattatccaattt

SEQ ID NO: 979048 - DNA, 15 bp, Homo sapiens
taattatccaatttc

SEQ ID NO: 979049 - DNA, 15 bp, Homo sapiens
aattatccaatttct

SEQ ID NO: 979050 - DNA, 15 bp, Homo sapiens
attatccaatttctt

SEQ ID NO: 979051 - DNA, 15 bp, Homo sapiens
ttatccaatttcttg

SEQ ID NO: 979052 - DNA, 15 bp, Homo sapiens
tatccaatttcttga

SEQ ID NO: 979053 - DNA, 15 bp, Homo sapiens
atccaatttcttgag

SEQ ID NO: 979054 - DNA, 15 bp, Homo sapiens
tccaatttcttgagc

SEQ ID NO: 979055 - DNA, 15 bp, Homo sapiens
ccaatttcttgagca

SEQ ID NO: 979056 - DNA, 15 bp, Homo sapiens
caatttcttgagcac

SEQ ID NO: 979057 - DNA, 15 bp, Homo sapiens
aatttcttgagcacc

SEQ ID NO: 979058 - DNA, 15 bp, Homo sapiens
atttcttgagcacct

SEQ ID NO: 979059 - DNA, 15 bp, Homo sapiens
tttcttgagcaccta

SEQ ID NO: 979060 - DNA, 15 bp, Homo sapiens
ttcttgagcacctat

SEQ ID NO: 979061 - DNA, 15 bp, Homo sapiens
tcttgagcacctatt

SEQ ID NO: 979062 - DNA, 15 bp, Homo sapiens
cttgagcacctattt

SEQ ID NO: 979063 - DNA, 15 bp, Homo sapiens
ttgagcacctatttg

SEQ ID NO: 979064 - DNA, 15 bp, Homo sapiens
tgagcacctatttga

SEQ ID NO: 979065 - DNA, 15 bp, Homo sapiens
gagcacctatttgat

SEQ ID NO: 979066 - DNA, 15 bp, Homo sapiens
agcacctatttgata

SEQ ID NO: 979067 - DNA, 15 bp, Homo sapiens
gcacctatttgatag

SEQ ID NO: 979068 - DNA, 15 bp, Homo sapiens
cacctatttgatagt

SEQ ID NO: 979069 - DNA, 15 bp, Homo sapiens
acctatttgatagtc

SEQ ID NO: 979070 - DNA, 15 bp, Homo sapiens
cctatttgatagtca

SEQ ID NO: 979071 - DNA, 15 bp, Homo sapiens
ctatttgatagtcac

SEQ ID NO: 979072 - DNA, 15 bp, Homo sapiens
tatttgatagtcact

SEQ ID NO: 979073 - DNA, 15 bp, Homo sapiens
atttgatagtcactg

SEQ ID NO: 979074 - DNA, 15 bp, Homo sapiens
tttgatagtcactgg

SEQ ID NO: 979075 - DNA, 15 bp, Homo sapiens
ttgatagtcactgga

SEQ ID NO: 979076 - DNA, 15 bp, Homo sapiens
tgatagtcactggaa

SEQ ID NO: 979077 - DNA, 15 bp, Homo sapiens
gatagtcactggaaa

SEQ ID NO: 979078 - DNA, 15 bp, Homo sapiens
atagtcactggaaat

SEQ ID NO: 979079 - DNA, 15 bp, Homo sapiens
tagtcactggaaatc

SEQ ID NO: 979080 - DNA, 15 bp, Homo sapiens
agtcactggaaatcc

SEQ ID NO: 979081 - DNA, 15 bp, Homo sapiens
gtcactggaaatcca

SEQ ID NO: 979082 - DNA, 15 bp, Homo sapiens
tcactggaaatccag

SEQ ID NO: 979083 - DNA, 15 bp, Homo sapiens
cactggaaatccaga

SEQ ID NO: 979084 - DNA, 15 bp, Homo sapiens
actggaaatccagag

SEQ ID NO: 979085 - DNA, 15 bp, Homo sapiens
ctggaaatccagaga

SEQ ID NO: 979086 - DNA, 15 bp, Homo sapiens
tggaaatccagagac

SEQ ID NO: 979087 - DNA, 15 bp, Homo sapiens
ggaaatccagagaca

SEQ ID NO: 979088 - DNA, 15 bp, Homo sapiens
gaaatccagagacaa

SEQ ID NO: 979089 - DNA, 15 bp, Homo sapiens
aaatccagagacaaa

SEQ ID NO: 979090 - DNA, 15 bp, Homo sapiens
aatccagagacaaac

SEQ ID NO: 979091 - DNA, 15 bp, Homo sapiens
atccagagacaaaca

SEQ ID NO: 979092 - DNA, 15 bp, Homo sapiens
tccagagacaaacaa

SEQ ID NO: 979093 - DNA, 15 bp, Homo sapiens
ccagagacaaacaac

SEQ ID NO: 979094 - DNA, 15 bp, Homo sapiens
cagagacaaacaaca

SEQ ID NO: 979095 - DNA, 15 bp, Homo sapiens
agagacaaacaacac

SEQ ID NO: 979096 - DNA, 15 bp, Homo sapiens
gagacaaacaacaca

SEQ ID NO: 979097 - DNA, 15 bp, Homo sapiens
agacaaacaacacag

SEQ ID NO: 979098 - DNA, 15 bp, Homo sapiens
gacaaacaacacaga

SEQ ID NO: 979099 - DNA, 15 bp, Homo sapiens
acaaacaacacagag

SEQ ID NO: 979100 - DNA, 15 bp, Homo sapiens
caaacaacacagagc

SEQ ID NO: 979101 - DNA, 15 bp, Homo sapiens
aaacaacacagagcc

SEQ ID NO: 979102 - DNA, 15 bp, Homo sapiens
aacaacacagagcca

SEQ ID NO: 979103 - DNA, 15 bp, Homo sapiens
acaacacagagccat

SEQ ID NO: 979104 - DNA, 15 bp, Homo sapiens
caacacagagccatg

SEQ ID NO: 979105 - DNA, 15 bp, Homo sapiens
aacacagagccatgt

SEQ ID NO: 979106 - DNA, 15 bp, Homo sapiens
acacagagccatgtt

SEQ ID NO: 979107 - DNA, 15 bp, Homo sapiens
cacagagccatgttc

SEQ ID NO: 979108 - DNA, 15 bp, Homo sapiens
acagagccatgttct

SEQ ID NO: 979109 - DNA, 15 bp, Homo sapiens
cagagccatgttcta

SEQ ID NO: 979110 - DNA, 15 bp, Homo sapiens
agagccatgttctac

SEQ ID NO: 979111 - DNA, 15 bp, Homo sapiens
gagccatgttctaca

SEQ ID NO: 979112 - DNA, 15 bp, Homo sapiens
agccatgttctacag

SEQ ID NO: 979113 - DNA, 15 bp, Homo sapiens
gccatgttctacagt

SEQ ID NO: 979114 - DNA, 15 bp, Homo sapiens
ccatgttctacagta

SEQ ID NO: 979115 - DNA, 15 bp, Homo sapiens
catgttctacagtat

SEQ ID NO: 979116 - DNA, 15 bp, Homo sapiens
atgttctacagtatg

SEQ ID NO: 979117 - DNA, 15 bp, Homo sapiens
tgttctacagtatgt

SEQ ID NO: 979118 - DNA, 15 bp, Homo sapiens
gttctacagtatgta

SEQ ID NO: 979119 - DNA, 15 bp, Homo sapiens
ttctacagtatgtac

SEQ ID NO: 979120 - DNA, 15 bp, Homo sapiens
tctacagtatgtaca

SEQ ID NO: 979121 - DNA, 15 bp, Homo sapiens
ctacagtatgtacag

SEQ ID NO: 979122 - DNA, 15 bp, Homo sapiens
tacagtatgtacagt

SEQ ID NO: 979123 - DNA, 15 bp, Homo sapiens
acagtatgtacagtt

SEQ ID NO: 979124 - DNA, 15 bp, Homo sapiens
cagtatgtacagttt

SEQ ID NO: 979125 - DNA, 15 bp, Homo sapiens
agtatgtacagtttt

SEQ ID NO: 979126 - DNA, 15 bp, Homo sapiens
gtatgtacagttttc

SEQ ID NO: 979127 - DNA, 15 bp, Homo sapiens
tatgtacagttttcc

SEQ ID NO: 979128 - DNA, 15 bp, Homo sapiens
atgtacagttttcca

SEQ ID NO: 979129 - DNA, 15 bp, Homo sapiens
tgtacagttttccaa

SEQ ID NO: 979130 - DNA, 15 bp, Homo sapiens
gtacagttttccaaa

SEQ ID NO: 979131 - DNA, 15 bp, Homo sapiens
tacagttttccaaaa

SEQ ID NO: 979132 - DNA, 15 bp, Homo sapiens
acagttttccaaaaa

SEQ ID NO: 979133 - DNA, 15 bp, Homo sapiens
cagttttccaaaaag

SEQ ID NO: 979134 - DNA, 15 bp, Homo sapiens
agttttccaaaaaga

SEQ ID NO: 979135 - DNA, 15 bp, Homo sapiens
gttttccaaaaagaa

SEQ ID NO: 979136 - DNA, 15 bp, Homo sapiens
ttttccaaaaagaat

SEQ ID NO: 979137 - DNA, 15 bp, Homo sapiens
tttccaaaaagaatt

SEQ ID NO: 979138 - DNA, 15 bp, Homo sapiens
ttccaaaaagaattt

SEQ ID NO: 979139 - DNA, 15 bp, Homo sapiens
tccaaaaagaatttc

SEQ ID NO: 979140 - DNA, 15 bp, Homo sapiens
ccaaaaagaatttct

SEQ ID NO: 979141 - DNA, 15 bp, Homo sapiens
caaaaagaatttcta

SEQ ID NO: 979142 - DNA, 15 bp, Homo sapiens
aaaaagaatttctag

SEQ ID NO: 979143 - DNA, 15 bp, Homo sapiens
aaaagaatttctagt

SEQ ID NO: 979144 - DNA, 15 bp, Homo sapiens
aaagaatttctagtc

SEQ ID NO: 979145 - DNA, 15 bp, Homo sapiens
aagaatttctagtct

SEQ ID NO: 979146 - DNA, 15 bp, Homo sapiens
agaatttctagtctt

SEQ ID NO: 979147 - DNA, 15 bp, Homo sapiens
gaatttctagtcttt

SEQ ID NO: 979148 - DNA, 15 bp, Homo sapiens
aatttctagtcttta

SEQ ID NO: 979149 - DNA, 15 bp, Homo sapiens
atttctagtctttac

SEQ ID NO: 979150 - DNA, 15 bp, Homo sapiens
tttctagtctttact

SEQ ID NO: 979151 - DNA, 15 bp, Homo sapiens
ttctagtctttactt

SEQ ID NO: 979152 - DNA, 15 bp, Homo sapiens
tctagtctttacttt

SEQ ID NO: 979153 - DNA, 15 bp, Homo sapiens
ctagtctttactttt

SEQ ID NO: 979154 - DNA, 15 bp, Homo sapiens
tagtctttacttttt

SEQ ID NO: 979155 - DNA, 15 bp, Homo sapiens
agtctttactttttt

SEQ ID NO: 979156 - DNA, 15 bp, Homo sapiens
gtctttactttttta

SEQ ID NO: 979157 - DNA, 15 bp, Homo sapiens
tctttacttttttat

SEQ ID NO: 979158 - DNA, 15 bp, Homo sapiens
ctttacttttttatt

SEQ ID NO: 979159 - DNA, 15 bp, Homo sapiens
tttacttttttatta

SEQ ID NO: 979160 - DNA, 15 bp, Homo sapiens
ttacttttttattac

SEQ ID NO: 979161 - DNA, 15 bp, Homo sapiens
tacttttttattaca

SEQ ID NO: 979162 - DNA, 15 bp, Homo sapiens
acttttttattacaa

SEQ ID NO: 979163 - DNA, 15 bp, Homo sapiens
cttttttattacaaa

SEQ ID NO: 979164 - DNA, 15 bp, Homo sapiens
ttttttattacaaat

SEQ ID NO: 979165 - DNA, 15 bp, Homo sapiens
tttttattacaaatg

SEQ ID NO: 979166 - DNA, 15 bp, Homo sapiens
ttttattacaaatgg

SEQ ID NO: 979167 - DNA, 15 bp, Homo sapiens
tttattacaaatgga

SEQ ID NO: 979168 - DNA, 15 bp, Homo sapiens
ttattacaaatggaa

SEQ ID NO: 979169 - DNA, 15 bp, Homo sapiens
tattacaaatggaat

SEQ ID NO: 979170 - DNA, 15 bp, Homo sapiens
attacaaatggaata

SEQ ID NO: 979171 - DNA, 15 bp, Homo sapiens
ttacaaatggaatac

SEQ ID NO: 979172 - DNA, 15 bp, Homo sapiens
tacaaatggaatacg

SEQ ID NO: 979173 - DNA, 15 bp, Homo sapiens
acaaatggaatacgt

SEQ ID NO: 979174 - DNA, 15 bp, Homo sapiens
caaatggaatacgta

SEQ ID NO: 979175 - DNA, 15 bp, Homo sapiens
aaatggaatacgtat

SEQ ID NO: 979176 - DNA, 15 bp, Homo sapiens
aatggaatacgtata

SEQ ID NO: 979177 - DNA, 15 bp, Homo sapiens
atggaatacgtatac

SEQ ID NO: 979178 - DNA, 15 bp, Homo sapiens
tggaatacgtatact

SEQ ID NO: 979179 - DNA, 15 bp, Homo sapiens
ggaatacgtatactt

SEQ ID NO: 979180 - DNA, 15 bp, Homo sapiens
gaatacgtatacttg

SEQ ID NO: 979181 - DNA, 15 bp, Homo sapiens
aatacgtatacttgc

SEQ ID NO: 979182 - DNA, 15 bp, Homo sapiens
atacgtatacttgca

SEQ ID NO: 979183 - DNA, 15 bp, Homo sapiens
tacgtatacttgcaa

SEQ ID NO: 979184 - DNA, 15 bp, Homo sapiens
acgtatacttgcaaa

SEQ ID NO: 979185 - DNA, 15 bp, Homo sapiens
cgtatacttgcaaat

SEQ ID NO: 979186 - DNA, 15 bp, Homo sapiens
gtatacttgcaaata

SEQ ID NO: 979187 - DNA, 15 bp, Homo sapiens
tatacttgcaaataa

SEQ ID NO: 979188 - DNA, 15 bp, Homo sapiens
atacttgcaaataat

SEQ ID NO: 979189 - DNA, 15 bp, Homo sapiens
tacttgcaaataatt

SEQ ID NO: 979190 - DNA, 15 bp, Homo sapiens
acttgcaaataattc

SEQ ID NO: 979191 - DNA, 15 bp, Homo sapiens
cttgcaaataattca

SEQ ID NO: 979192 - DNA, 15 bp, Homo sapiens
ttgcaaataattcag

SEQ ID NO: 979193 - DNA, 15 bp, Homo sapiens
tgcaaataattcaga

SEQ ID NO: 979194 - DNA, 15 bp, Homo sapiens
gcaaataattcagat

SEQ ID NO: 979195 - DNA, 15 bp, Homo sapiens
caaataattcagata

SEQ ID NO: 979196 - DNA, 15 bp, Homo sapiens
aaataattcagatac

SEQ ID NO: 979197 - DNA, 15 bp, Homo sapiens
aataattcagatact

SEQ ID NO: 979198 - DNA, 15 bp, Homo sapiens
ataattcagatactg

SEQ ID NO: 979199 - DNA, 15 bp, Homo sapiens
taattcagatactgt

SEQ ID NO: 979200 - DNA, 15 bp, Homo sapiens
aattcagatactgtg

SEQ ID NO: 979201 - DNA, 15 bp, Homo sapiens
attcagatactgtgg

SEQ ID NO: 979202 - DNA, 15 bp, Homo sapiens
ttcagatactgtgga

SEQ ID NO: 979203 - DNA, 15 bp, Homo sapiens
tcagatactgtggaa

SEQ ID NO: 979204 - DNA, 15 bp, Homo sapiens
cagatactgtggaag

SEQ ID NO: 979205 - DNA, 15 bp, Homo sapiens
agatactgtggaaga

SEQ ID NO: 979206 - DNA, 15 bp, Homo sapiens
gatactgtggaagag

SEQ ID NO: 979207 - DNA, 15 bp, Homo sapiens
atactgtggaagaga

SEQ ID NO: 979208 - DNA, 15 bp, Homo sapiens
tactgtggaagagat

SEQ ID NO: 979209 - DNA, 15 bp, Homo sapiens
actgtggaagagatc

SEQ ID NO: 979210 - DNA, 15 bp, Homo sapiens
ctgtggaagagatca

SEQ ID NO: 979211 - DNA, 15 bp, Homo sapiens
tgtggaagagatcaa

SEQ ID NO: 979212 - DNA, 15 bp, Homo sapiens
gtggaagagatcaaa

SEQ ID NO: 979213 - DNA, 15 bp, Homo sapiens
tggaagagatcaaat

SEQ ID NO: 979214 - DNA, 15 bp, Homo sapiens
ggaagagatcaaatg

SEQ ID NO: 979215 - DNA, 15 bp, Homo sapiens
gaagagatcaaatga

SEQ ID NO: 979216 - DNA, 15 bp, Homo sapiens
aagagatcaaatgaa

SEQ ID NO: 979217 - DNA, 15 bp, Homo sapiens
agagatcaaatgaat

SEQ ID NO: 979218 - DNA, 15 bp, Homo sapiens
gagatcaaatgaatt

SEQ ID NO: 979219 - DNA, 15 bp, Homo sapiens
agatcaaatgaattg

SEQ ID NO: 979220 - DNA, 15 bp, Homo sapiens
gatcaaatgaattgc

SEQ ID NO: 979221 - DNA, 15 bp, Homo sapiens
atcaaatgaattgca

SEQ ID NO: 979222 - DNA, 15 bp, Homo sapiens
tcaaatgaattgcaa

SEQ ID NO: 979223 - DNA, 15 bp, Homo sapiens
caaatgaattgcaaa

SEQ ID NO: 979224 - DNA, 15 bp, Homo sapiens
aaatgaattgcaaaa

SEQ ID NO: 979225 - DNA, 15 bp, Homo sapiens
aatgaattgcaaaag

SEQ ID NO: 979226 - DNA, 15 bp, Homo sapiens
atgaattgcaaaagt

SEQ ID NO: 979227 - DNA, 15 bp, Homo sapiens
tgaattgcaaaagtg

SEQ ID NO: 979228 - DNA, 15 bp, Homo sapiens
gaattgcaaaagtgt

SEQ ID NO: 979229 - DNA, 15 bp, Homo sapiens
aattgcaaaagtgtc

SEQ ID NO: 979230 - DNA, 15 bp, Homo sapiens
attgcaaaagtgtcc

SEQ ID NO: 979231 - DNA, 15 bp, Homo sapiens
ttgcaaaagtgtccc

SEQ ID NO: 979232 - DNA, 15 bp, Homo sapiens
tgcaaaagtgtccct

SEQ ID NO: 979233 - DNA, 15 bp, Homo sapiens
gcaaaagtgtccctc

SEQ ID NO: 979234 - DNA, 15 bp, Homo sapiens
caaaagtgtccctcc

SEQ ID NO: 979235 - DNA, 15 bp, Homo sapiens
aaaagtgtccctcct

SEQ ID NO: 979236 - DNA, 15 bp, Homo sapiens
aaagtgtccctcctc

SEQ ID NO: 979237 - DNA, 15 bp, Homo sapiens
aagtgtccctcctcc

SEQ ID NO: 979238 - DNA, 15 bp, Homo sapiens
agtgtccctcctccc

SEQ ID NO: 979239 - DNA, 15 bp, Homo sapiens
gtgtccctcctccct

SEQ ID NO: 979240 - DNA, 15 bp, Homo sapiens
tgtccctcctccctt

SEQ ID NO: 979241 - DNA, 15 bp, Homo sapiens
gtccctcctcccttc

SEQ ID NO: 979242 - DNA, 15 bp, Homo sapiens
tccctcctcccttca

SEQ ID NO: 979243 - DNA, 15 bp, Homo sapiens
ccctcctcccttcac

SEQ ID NO: 979244 - DNA, 15 bp, Homo sapiens
cctcctcccttcacc

SEQ ID NO: 979245 - DNA, 15 bp, Homo sapiens
ctcctcccttcacca

SEQ ID NO: 979246 - DNA, 15 bp, Homo sapiens
tcctcccttcaccac

SEQ ID NO: 979247 - DNA, 15 bp, Homo sapiens
cctcccttcaccact

SEQ ID NO: 979248 - DNA, 15 bp, Homo sapiens
ctcccttcaccacta

SEQ ID NO: 979249 - DNA, 15 bp, Homo sapiens
tcccttcaccactat

SEQ ID NO: 979250 - DNA, 15 bp, Homo sapiens
cccttcaccactatc

SEQ ID NO: 979251 - DNA, 15 bp, Homo sapiens
ccttcaccactatct

SEQ ID NO: 979252 - DNA, 15 bp, Homo sapiens
cttcaccactatctc

SEQ ID NO: 979253 - DNA, 15 bp, Homo sapiens
ttcaccactatctcc

SEQ ID NO: 979254 - DNA, 15 bp, Homo sapiens
tcaccactatctccc

SEQ ID NO: 979255 - DNA, 15 bp, Homo sapiens
caccactatctccca

SEQ ID NO: 979256 - DNA, 15 bp, Homo sapiens
accactatctcccat

SEQ ID NO: 979257 - DNA, 15 bp, Homo sapiens
ccactatctcccatg

SEQ ID NO: 979258 - DNA, 15 bp, Homo sapiens
cactatctcccatgg

SEQ ID NO: 979259 - DNA, 15 bp, Homo sapiens
actatctcccatggc

SEQ ID NO: 979260 - DNA, 15 bp, Homo sapiens
ctatctcccatggca

SEQ ID NO: 979261 - DNA, 15 bp, Homo sapiens
tatctcccatggcat

SEQ ID NO: 979262 - DNA, 15 bp, Homo sapiens
atctcccatggcatg

SEQ ID NO: 979263 - DNA, 15 bp, Homo sapiens
tctcccatggcatgc

SEQ ID NO: 979264 - DNA, 15 bp, Homo sapiens
ctcccatggcatgca

SEQ ID NO: 979265 - DNA, 15 bp, Homo sapiens
tcccatggcatgcag

SEQ ID NO: 979266 - DNA, 15 bp, Homo sapiens
cccatggcatgcaga

SEQ ID NO: 979267 - DNA, 15 bp, Homo sapiens
ccatggcatgcagag

SEQ ID NO: 979268 - DNA, 15 bp, Homo sapiens
catggcatgcagaga

SEQ ID NO: 979269 - DNA, 15 bp, Homo sapiens
atggcatgcagagag

SEQ ID NO: 979270 - DNA, 15 bp, Homo sapiens
tggcatgcagagaga

SEQ ID NO: 979271 - DNA, 15 bp, Homo sapiens
ggcatgcagagagag

SEQ ID NO: 979272 - DNA, 15 bp, Homo sapiens
gcatgcagagagagt

SEQ ID NO: 979273 - DNA, 15 bp, Homo sapiens
catgcagagagagta

SEQ ID NO: 979274 - DNA, 15 bp, Homo sapiens
atgcagagagagtaa

SEQ ID NO: 979275 - DNA, 15 bp, Homo sapiens
tgcagagagagtaac

SEQ ID NO: 979276 - DNA, 15 bp, Homo sapiens
gcagagagagtaacc

SEQ ID NO: 979277 - DNA, 15 bp, Homo sapiens
cagagagagtaacca

SEQ ID NO: 979278 - DNA, 15 bp, Homo sapiens
agagagagtaaccat

SEQ ID NO: 979279 - DNA, 15 bp, Homo sapiens
gagagagtaaccatt

SEQ ID NO: 979280 - DNA, 15 bp, Homo sapiens
agagagtaaccatta

SEQ ID NO: 979281 - DNA, 15 bp, Homo sapiens
gagagtaaccattat

SEQ ID NO: 979282 - DNA, 15 bp, Homo sapiens
agagtaaccattatt

SEQ ID NO: 979283 - DNA, 15 bp, Homo sapiens
gagtaaccattattt

SEQ ID NO: 979284 - DNA, 15 bp, Homo sapiens
agtaaccattatttg

SEQ ID NO: 979285 - DNA, 15 bp, Homo sapiens
gtaaccattatttgt

SEQ ID NO: 979286 - DNA, 15 bp, Homo sapiens
taaccattatttgtg

SEQ ID NO: 979287 - DNA, 15 bp, Homo sapiens
aaccattatttgtgt

SEQ ID NO: 979288 - DNA, 15 bp, Homo sapiens
accattatttgtgtg

SEQ ID NO: 979289 - DNA, 15 bp, Homo sapiens
ccattatttgtgtgt

SEQ ID NO: 979290 - DNA, 15 bp, Homo sapiens
cattatttgtgtgtc

SEQ ID NO: 979291 - DNA, 15 bp, Homo sapiens
attatttgtgtgtcc

SEQ ID NO: 979292 - DNA, 15 bp, Homo sapiens
ttatttgtgtgtccc

SEQ ID NO: 979293 - DNA, 15 bp, Homo sapiens
tatttgtgtgtccct

SEQ ID NO: 979294 - DNA, 15 bp, Homo sapiens
atttgtgtgtccctc

SEQ ID NO: 979295 - DNA, 15 bp, Homo sapiens
tttgtgtgtccctcc

SEQ ID NO: 979296 - DNA, 15 bp, Homo sapiens
ttgtgtgtccctcca

SEQ ID NO: 979297 - DNA, 15 bp, Homo sapiens
tgtgtgtccctccag

SEQ ID NO: 979298 - DNA, 15 bp, Homo sapiens
gtgtgtccctccaga

SEQ ID NO: 979299 - DNA, 15 bp, Homo sapiens
tgtgtccctccagaa

SEQ ID NO: 979300 - DNA, 15 bp, Homo sapiens
gtgtccctccagaaa

SEQ ID NO: 979301 - DNA, 15 bp, Homo sapiens
tgtccctccagaaat

SEQ ID NO: 979302 - DNA, 15 bp, Homo sapiens
gtccctccagaaatt

SEQ ID NO: 979303 - DNA, 15 bp, Homo sapiens
tccctccagaaattt

SEQ ID NO: 979304 - DNA, 15 bp, Homo sapiens
ccctccagaaatttt

SEQ ID NO: 979305 - DNA, 15 bp, Homo sapiens
cctccagaaattttt

SEQ ID NO: 979306 - DNA, 15 bp, Homo sapiens
ctccagaaatttttt

SEQ ID NO: 979307 - DNA, 15 bp, Homo sapiens
tccagaaattttttt

SEQ ID NO: 979308 - DNA, 15 bp, Homo sapiens
ccagaaattttttta

SEQ ID NO: 979309 - DNA, 15 bp, Homo sapiens
cagaaatttttttat

SEQ ID NO: 979310 - DNA, 15 bp, Homo sapiens
agaaatttttttatt

SEQ ID NO: 979311 - DNA, 15 bp, Homo sapiens
gaaatttttttattc

SEQ ID NO: 979312 - DNA, 15 bp, Homo sapiens
aaatttttttattca

SEQ ID NO: 979313 - DNA, 15 bp, Homo sapiens
aatttttttattcaa

SEQ ID NO: 979314 - DNA, 15 bp, Homo sapiens
atttttttattcaac

SEQ ID NO: 979315 - DNA, 15 bp, Homo sapiens
tttttttattcaact

SEQ ID NO: 979316 - DNA, 15 bp, Homo sapiens
ttttttattcaacta

SEQ ID NO: 979317 - DNA, 15 bp, Homo sapiens
tttttattcaactac

SEQ ID NO: 979318 - DNA, 15 bp, Homo sapiens
ttttattcaactact

SEQ ID NO: 979319 - DNA, 15 bp, Homo sapiens
tttattcaactacta

SEQ ID NO: 979320 - DNA, 15 bp, Homo sapiens
ttattcaactactat

SEQ ID NO: 979321 - DNA, 15 bp, Homo sapiens
tattcaactactatt

SEQ ID NO: 979322 - DNA, 15 bp, Homo sapiens
attcaactactattt

SEQ ID NO: 979323 - DNA, 15 bp, Homo sapiens
ttcaactactatttt

SEQ ID NO: 979324 - DNA, 15 bp, Homo sapiens
tcaactactattttt

SEQ ID NO: 979325 - DNA, 15 bp, Homo sapiens
caactactatttttt

SEQ ID NO: 979326 - DNA, 15 bp, Homo sapiens
aactactattttttt

SEQ ID NO: 979327 - DNA, 15 bp, Homo sapiens
actactattttttta

SEQ ID NO: 979328 - DNA, 15 bp, Homo sapiens
ctactatttttttat

SEQ ID NO: 979329 - DNA, 15 bp, Homo sapiens
tactatttttttatt

SEQ ID NO: 979330 - DNA, 15 bp, Homo sapiens
actatttttttattt

SEQ ID NO: 979331 - DNA, 15 bp, Homo sapiens
ctatttttttatttt

SEQ ID NO: 979332 - DNA, 15 bp, Homo sapiens
tatttttttatttta

SEQ ID NO: 979333 - DNA, 15 bp, Homo sapiens
atttttttattttat

SEQ ID NO: 979334 - DNA, 15 bp, Homo sapiens
tttttttattttatt

SEQ ID NO: 979335 - DNA, 15 bp, Homo sapiens
ttttttattttatta

SEQ ID NO: 979336 - DNA, 15 bp, Homo sapiens
tttttattttattag

SEQ ID NO: 979337 - DNA, 15 bp, Homo sapiens
ttttattttattagg

SEQ ID NO: 979338 - DNA, 15 bp, Homo sapiens
tttattttattaggt

SEQ ID NO: 979339 - DNA, 15 bp, Homo sapiens
ttattttattaggtc

SEQ ID NO: 979340 - DNA, 15 bp, Homo sapiens
tattttattaggtcc

SEQ ID NO: 979341 - DNA, 15 bp, Homo sapiens
attttattaggtccg

SEQ ID NO: 979342 - DNA, 15 bp, Homo sapiens
ttttattaggtccgt

SEQ ID NO: 979343 - DNA, 15 bp, Homo sapiens
tttattaggtccgtc

SEQ ID NO: 979344 - DNA, 15 bp, Homo sapiens
ttattaggtccgtca

SEQ ID NO: 979345 - DNA, 15 bp, Homo sapiens
tattaggtccgtcag

SEQ ID NO: 979346 - DNA, 15 bp, Homo sapiens
attaggtccgtcagt

SEQ ID NO: 979347 - DNA, 15 bp, Homo sapiens
ttaggtccgtcagtt

SEQ ID NO: 979348 - DNA, 15 bp, Homo sapiens
taggtccgtcagttt

SEQ ID NO: 979349 - DNA, 15 bp, Homo sapiens
aggtccgtcagtttt

SEQ ID NO: 979350 - DNA, 15 bp, Homo sapiens
ggtccgtcagttttc

SEQ ID NO: 979351 - DNA, 15 bp, Homo sapiens
gtccgtcagttttcc

SEQ ID NO: 979352 - DNA, 15 bp, Homo sapiens
tccgtcagttttcct

SEQ ID NO: 979353 - DNA, 15 bp, Homo sapiens
ccgtcagttttcctt

SEQ ID NO: 979354 - DNA, 15 bp, Homo sapiens
cgtcagttttccttt

SEQ ID NO: 979355 - DNA, 15 bp, Homo sapiens
gtcagttttcctttt

SEQ ID NO: 979356 - DNA, 15 bp, Homo sapiens
tcagttttccttttt

SEQ ID NO: 979357 - DNA, 15 bp, Homo sapiens
cagttttcctttttt

SEQ ID NO: 979358 - DNA, 15 bp, Homo sapiens
agttttccttttttg

SEQ ID NO: 979359 - DNA, 15 bp, Homo sapiens
gttttccttttttga

SEQ ID NO: 979360 - DNA, 15 bp, Homo sapiens
ttttccttttttgag

SEQ ID NO: 979361 - DNA, 15 bp, Homo sapiens
tttccttttttgagc

SEQ ID NO: 979362 - DNA, 15 bp, Homo sapiens
ttccttttttgagcc

SEQ ID NO: 979363 - DNA, 15 bp, Homo sapiens
tccttttttgagcct

SEQ ID NO: 979364 - DNA, 15 bp, Homo sapiens
ccttttttgagcctc

SEQ ID NO: 979365 - DNA, 15 bp, Homo sapiens
cttttttgagcctct

SEQ ID NO: 979366 - DNA, 15 bp, Homo sapiens
ttttttgagcctctc

SEQ ID NO: 979367 - DNA, 15 bp, Homo sapiens
tttttgagcctctct

SEQ ID NO: 979368 - DNA, 15 bp, Homo sapiens
ttttgagcctctcta

SEQ ID NO: 979369 - DNA, 15 bp, Homo sapiens
tttgagcctctctat

SEQ ID NO: 979370 - DNA, 15 bp, Homo sapiens
ttgagcctctctata

SEQ ID NO: 979371 - DNA, 15 bp, Homo sapiens
tgagcctctctatat

SEQ ID NO: 979372 - DNA, 15 bp, Homo sapiens
gagcctctctatatc

SEQ ID NO: 979373 - DNA, 15 bp, Homo sapiens
agcctctctatatca

SEQ ID NO: 979374 - DNA, 15 bp, Homo sapiens
gcctctctatatcaa

SEQ ID NO: 979375 - DNA, 15 bp, Homo sapiens
cctctctatatcaaa

SEQ ID NO: 979376 - DNA, 15 bp, Homo sapiens
ctctctatatcaaat

SEQ ID NO: 979377 - DNA, 15 bp, Homo sapiens
tctctatatcaaatg

SEQ ID NO: 979378 - DNA, 15 bp, Homo sapiens
ctctatatcaaatgc

SEQ ID NO: 979379 - DNA, 15 bp, Homo sapiens
tctatatcaaatgca

SEQ ID NO: 979380 - DNA, 15 bp, Homo sapiens
ctatatcaaatgcaa

SEQ ID NO: 979381 - DNA, 15 bp, Homo sapiens
tatatcaaatgcaaa

SEQ ID NO: 979382 - DNA, 15 bp, Homo sapiens
atatcaaatgcaaat

SEQ ID NO: 979383 - DNA, 15 bp, Homo sapiens
tatcaaatgcaaata

SEQ ID NO: 979384 - DNA, 15 bp, Homo sapiens
atcaaatgcaaataa

SEQ ID NO: 979385 - DNA, 15 bp, Homo sapiens
tcaaatgcaaataaa

SEQ ID NO: 979386 - DNA, 15 bp, Homo sapiens
caaatgcaaataaat

SEQ ID NO: 979387 - DNA, 15 bp, Homo sapiens
aaatgcaaataaata

SEQ ID NO: 979388 - DNA, 15 bp, Homo sapiens
aatgcaaataaatat

SEQ ID NO: 979389 - DNA, 15 bp, Homo sapiens
atgcaaataaatata

SEQ ID NO: 979390 - DNA, 15 bp, Homo sapiens
tgcaaataaatatat

SEQ ID NO: 979391 - DNA, 15 bp, Homo sapiens
gcaaataaatatatt

SEQ ID NO: 979392 - DNA, 15 bp, Homo sapiens
caaataaatatattc

SEQ ID NO: 979393 - DNA, 15 bp, Homo sapiens
aaataaatatattca

SEQ ID NO: 979394 - DNA, 15 bp, Homo sapiens
aataaatatattcag

SEQ ID NO: 979395 - DNA, 15 bp, Homo sapiens
ataaatatattcaga

SEQ ID NO: 979396 - DNA, 15 bp, Homo sapiens
taaatatattcagaa

SEQ ID NO: 979397 - DNA, 15 bp, Homo sapiens
aaatatattcagaac

SEQ ID NO: 979398 - DNA, 15 bp, Homo sapiens
aatatattcagaaca

SEQ ID NO: 979399 - DNA, 15 bp, Homo sapiens
atatattcagaacaa

SEQ ID NO: 979400 - DNA, 15 bp, Homo sapiens
tatattcagaacaaa

SEQ ID NO: 979401 - DNA, 15 bp, Homo sapiens
atattcagaacaaac

SEQ ID NO: 979402 - DNA, 15 bp, Homo sapiens
tattcagaacaaacc

SEQ ID NO: 979403 - DNA, 15 bp, Homo sapiens
attcagaacaaaccc

SEQ ID NO: 979404 - DNA, 15 bp, Homo sapiens
ttcagaacaaacccc

SEQ ID NO: 979405 - DNA, 15 bp, Homo sapiens
tcagaacaaacccca

SEQ ID NO: 979406 - DNA, 15 bp, Homo sapiens
cagaacaaaccccac

SEQ ID NO: 979407 - DNA, 15 bp, Homo sapiens
agaacaaaccccact

SEQ ID NO: 979408 - DNA, 15 bp, Homo sapiens
gaacaaaccccactg

SEQ ID NO: 979409 - DNA, 15 bp, Homo sapiens
aacaaaccccactgt

SEQ ID NO: 979410 - DNA, 15 bp, Homo sapiens
acaaaccccactgta

SEQ ID NO: 979411 - DNA, 15 bp, Homo sapiens
caaaccccactgtaa

SEQ ID NO: 979412 - DNA, 15 bp, Homo sapiens
aaaccccactgtaag

SEQ ID NO: 979413 - DNA, 15 bp, Homo sapiens
aaccccactgtaagg

SEQ ID NO: 979414 - DNA, 15 bp, Homo sapiens
accccactgtaaggt

SEQ ID NO: 979415 - DNA, 15 bp, Homo sapiens
ccccactgtaaggtt

SEQ ID NO: 979416 - DNA, 15 bp, Homo sapiens
cccactgtaaggttc

SEQ ID NO: 979417 - DNA, 15 bp, Homo sapiens
ccactgtaaggttca

SEQ ID NO: 979418 - DNA, 15 bp, Homo sapiens
cactgtaaggttcac

SEQ ID NO: 979419 - DNA, 15 bp, Homo sapiens
actgtaaggttcaca

SEQ ID NO: 979420 - DNA, 15 bp, Homo sapiens
ctgtaaggttcacat

SEQ ID NO: 979421 - DNA, 15 bp, Homo sapiens
tgtaaggttcacatt

SEQ ID NO: 979422 - DNA, 15 bp, Homo sapiens
gtaaggttcacatta

SEQ ID NO: 979423 - DNA, 15 bp, Homo sapiens
taaggttcacattaa

SEQ ID NO: 979424 - DNA, 15 bp, Homo sapiens
aaggttcacattaaa

SEQ ID NO: 979425 - DNA, 15 bp, Homo sapiens
aggttcacattaaaa

SEQ ID NO: 979426 - DNA, 15 bp, Homo sapiens
ggttcacattaaaaa

SEQ ID NO: 979427 - DNA, 15 bp, Homo sapiens
gttcacattaaaaaa

SEQ ID NO: 979428 - DNA, 15 bp, Homo sapiens
ttcacattaaaaaag

SEQ ID NO: 979429 - DNA, 15 bp, Homo sapiens
tcacattaaaaaaga

SEQ ID NO: 979430 - DNA, 15 bp, Homo sapiens
cacattaaaaaagac

SEQ ID NO: 979431 - DNA, 15 bp, Homo sapiens
acattaaaaaagact

SEQ ID NO: 979432 - DNA, 15 bp, Homo sapiens
cattaaaaaagactt

SEQ ID NO: 979433 - DNA, 15 bp, Homo sapiens
attaaaaaagacttg

SEQ ID NO: 979434 - DNA, 15 bp, Homo sapiens
ttaaaaaagacttga

SEQ ID NO: 979435 - DNA, 15 bp, Homo sapiens
taaaaaagacttgaa

SEQ ID NO: 979436 - DNA, 15 bp, Homo sapiens
aaaaaagacttgaag

SEQ ID NO: 979437 - DNA, 15 bp, Homo sapiens
aaaaagacttgaagt

SEQ ID NO: 979438 - DNA, 15 bp, Homo sapiens
aaaagacttgaagtc

SEQ ID NO: 979439 - DNA, 15 bp, Homo sapiens
aaagacttgaagtca

SEQ ID NO: 979440 - DNA, 15 bp, Homo sapiens
aagacttgaagtcac

SEQ ID NO: 979441 - DNA, 15 bp, Homo sapiens
agacttgaagtcacc

SEQ ID NO: 979442 - DNA, 15 bp, Homo sapiens
gacttgaagtcaccc

SEQ ID NO: 979443 - DNA, 15 bp, Homo sapiens
acttgaagtcaccct

SEQ ID NO: 979444 - DNA, 15 bp, Homo sapiens
cttgaagtcacccta

SEQ ID NO: 979445 - DNA, 15 bp, Homo sapiens
ttgaagtcaccctat

SEQ ID NO: 979446 - DNA, 15 bp, Homo sapiens
tgaagtcaccctatg

SEQ ID NO: 979447 - DNA, 15 bp, Homo sapiens
gaagtcaccctatga

SEQ ID NO: 979448 - DNA, 15 bp, Homo sapiens
aagtcaccctatgaa

SEQ ID NO: 979449 - DNA, 15 bp, Homo sapiens
agtcaccctatgaag

SEQ ID NO: 979450 - DNA, 15 bp, Homo sapiens
gtcaccctatgaaga

SEQ ID NO: 979451 - DNA, 15 bp, Homo sapiens
tcaccctatgaagac

SEQ ID NO: 979452 - DNA, 15 bp, Homo sapiens
caccctatgaagaca

SEQ ID NO: 979453 - DNA, 15 bp, Homo sapiens
accctatgaagacaa

SEQ ID NO: 979454 - DNA, 15 bp, Homo sapiens
ccctatgaagacaaa

SEQ ID NO: 979455 - DNA, 15 bp, Homo sapiens
cctatgaagacaaaa

SEQ ID NO: 979456 - DNA, 15 bp, Homo sapiens
ctatgaagacaaaaa

SEQ ID NO: 979457 - DNA, 15 bp, Homo sapiens
tatgaagacaaaaaa

SEQ ID NO: 979458 - DNA, 15 bp, Homo sapiens
atgaagacaaaaaat

SEQ ID NO: 979459 - DNA, 15 bp, Homo sapiens
tgaagacaaaaaata

SEQ ID NO: 979460 - DNA, 15 bp, Homo sapiens
gaagacaaaaaataa

SEQ ID NO: 979461 - DNA, 15 bp, Homo sapiens
aagacaaaaaataat

SEQ ID NO: 979462 - DNA, 15 bp, Homo sapiens
agacaaaaaataatc

SEQ ID NO: 979463 - DNA, 15 bp, Homo sapiens
gacaaaaaataatca

SEQ ID NO: 979464 - DNA, 15 bp, Homo sapiens
acaaaaaataatcac

SEQ ID NO: 979465 - DNA, 15 bp, Homo sapiens
caaaaaataatcaca

SEQ ID NO: 979466 - DNA, 15 bp, Homo sapiens
aaaaaataatcacat

SEQ ID NO: 979467 - DNA, 15 bp, Homo sapiens
aaaaataatcacatt

SEQ ID NO: 979468 - DNA, 15 bp, Homo sapiens
aaaataatcacatta

SEQ ID NO: 979469 - DNA, 15 bp, Homo sapiens
aaataatcacattaa

SEQ ID NO: 979470 - DNA, 15 bp, Homo sapiens
aataatcacattaag

SEQ ID NO: 979471 - DNA, 15 bp, Homo sapiens
ataatcacattaagt

SEQ ID NO: 979472 - DNA, 15 bp, Homo sapiens
taatcacattaagtg

SEQ ID NO: 979473 - DNA, 15 bp, Homo sapiens
aatcacattaagtgt

SEQ ID NO: 979474 - DNA, 15 bp, Homo sapiens
atcacattaagtgtg

SEQ ID NO: 979475 - DNA, 15 bp, Homo sapiens
tcacattaagtgtga

SEQ ID NO: 979476 - DNA, 15 bp, Homo sapiens
cacattaagtgtgaa

SEQ ID NO: 979477 - DNA, 15 bp, Homo sapiens
acattaagtgtgaaa

SEQ ID NO: 979478 - DNA, 15 bp, Homo sapiens
cattaagtgtgaaag

SEQ ID NO: 979479 - DNA, 15 bp, Homo sapiens
attaagtgtgaaaga

SEQ ID NO: 979480 - DNA, 15 bp, Homo sapiens
ttaagtgtgaaagaa

SEQ ID NO: 979481 - DNA, 15 bp, Homo sapiens
taagtgtgaaagaac

SEQ ID NO: 979482 - DNA, 15 bp, Homo sapiens
aagtgtgaaagaacc

SEQ ID NO: 979483 - DNA, 15 bp, Homo sapiens
agtgtgaaagaacct

SEQ ID NO: 979484 - DNA, 15 bp, Homo sapiens
gtgtgaaagaaccta

SEQ ID NO: 979485 - DNA, 15 bp, Homo sapiens
tgtgaaagaacctat

SEQ ID NO: 979486 - DNA, 15 bp, Homo sapiens
gtgaaagaacctatt

SEQ ID NO: 979487 - DNA, 15 bp, Homo sapiens
tgaaagaacctattc

SEQ ID NO: 979488 - DNA, 15 bp, Homo sapiens
gaaagaacctattct

SEQ ID NO: 979489 - DNA, 15 bp, Homo sapiens
aaagaacctattctt

SEQ ID NO: 979490 - DNA, 15 bp, Homo sapiens
aagaacctattcttc

SEQ ID NO: 979491 - DNA, 15 bp, Homo sapiens
agaacctattcttcc

SEQ ID NO: 979492 - DNA, 15 bp, Homo sapiens
gaacctattcttcca

SEQ ID NO: 979493 - DNA, 15 bp, Homo sapiens
aacctattcttccag

SEQ ID NO: 979494 - DNA, 15 bp, Homo sapiens
acctattcttccagt

SEQ ID NO: 979495 - DNA, 15 bp, Homo sapiens
cctattcttccagta

SEQ ID NO: 979496 - DNA, 15 bp, Homo sapiens
ctattcttccagtac

SEQ ID NO: 979497 - DNA, 15 bp, Homo sapiens
tattcttccagtaca

SEQ ID NO: 979498 - DNA, 15 bp, Homo sapiens
attcttccagtacag

SEQ ID NO: 979499 - DNA, 15 bp, Homo sapiens
ttcttccagtacagg

SEQ ID NO: 979500 - DNA, 15 bp, Homo sapiens
tcttccagtacagga

SEQ ID NO: 979501 - DNA, 15 bp, Homo sapiens
cttccagtacaggat

SEQ ID NO: 979502 - DNA, 15 bp, Homo sapiens
ttccagtacaggata

SEQ ID NO: 979503 - DNA, 15 bp, Homo sapiens
tccagtacaggataa

SEQ ID NO: 979504 - DNA, 15 bp, Homo sapiens
ccagtacaggataag

SEQ ID NO: 979505 - DNA, 15 bp, Homo sapiens
cagtacaggataagc

SEQ ID NO: 979506 - DNA, 15 bp, Homo sapiens
agtacaggataagcc

SEQ ID NO: 979507 - DNA, 15 bp, Homo sapiens
gtacaggataagcca

SEQ ID NO: 979508 - DNA, 15 bp, Homo sapiens
tacaggataagccat

SEQ ID NO: 979509 - DNA, 15 bp, Homo sapiens
acaggataagccata

SEQ ID NO: 979510 - DNA, 15 bp, Homo sapiens
caggataagccatac

SEQ ID NO: 979511 - DNA, 15 bp, Homo sapiens
aggataagccatact

SEQ ID NO: 979512 - DNA, 15 bp, Homo sapiens
ggataagccatactt

SEQ ID NO: 979513 - DNA, 15 bp, Homo sapiens
gataagccatactta

SEQ ID NO: 979514 - DNA, 15 bp, Homo sapiens
ataagccatacttac

SEQ ID NO: 979515 - DNA, 15 bp, Homo sapiens
taagccatacttact

SEQ ID NO: 979516 - DNA, 15 bp, Homo sapiens
aagccatacttactg

SEQ ID NO: 979517 - DNA, 15 bp, Homo sapiens
agccatacttactgg

SEQ ID NO: 979518 - DNA, 15 bp, Homo sapiens
gccatacttactggg

SEQ ID NO: 979519 - DNA, 15 bp, Homo sapiens
ccatacttactgggc

SEQ ID NO: 979520 - DNA, 15 bp, Homo sapiens
catacttactgggca

SEQ ID NO: 979521 - DNA, 15 bp, Homo sapiens
atacttactgggcat

SEQ ID NO: 979522 - DNA, 15 bp, Homo sapiens
tacttactgggcata

SEQ ID NO: 979523 - DNA, 15 bp, Homo sapiens
acttactgggcatat

SEQ ID NO: 979524 - DNA, 15 bp, Homo sapiens
cttactgggcatata

SEQ ID NO: 979525 - DNA, 15 bp, Homo sapiens
ttactgggcatatat

SEQ ID NO: 979526 - DNA, 15 bp, Homo sapiens
tactgggcatatatt

SEQ ID NO: 979527 - DNA, 15 bp, Homo sapiens
actgggcatatattc

SEQ ID NO: 979528 - DNA, 15 bp, Homo sapiens
ctgggcatatattca

SEQ ID NO: 979529 - DNA, 15 bp, Homo sapiens
tgggcatatattcat

SEQ ID NO: 979530 - DNA, 15 bp, Homo sapiens
gggcatatattcatc

SEQ ID NO: 979531 - DNA, 15 bp, Homo sapiens
ggcatatattcatct

SEQ ID NO: 979532 - DNA, 15 bp, Homo sapiens
gcatatattcatctt

SEQ ID NO: 979533 - DNA, 15 bp, Homo sapiens
catatattcatcttg

SEQ ID NO: 979534 - DNA, 15 bp, Homo sapiens
atatattcatcttga

SEQ ID NO: 979535 - DNA, 15 bp, Homo sapiens
tatattcatcttgaa

SEQ ID NO: 979536 - DNA, 15 bp, Homo sapiens
atattcatcttgaaa

SEQ ID NO: 979537 - DNA, 15 bp, Homo sapiens
tattcatcttgaaaa

SEQ ID NO: 979538 - DNA, 15 bp, Homo sapiens
attcatcttgaaaat

SEQ ID NO: 979539 - DNA, 15 bp, Homo sapiens
ttcatcttgaaaatc

SEQ ID NO: 979540 - DNA, 15 bp, Homo sapiens
tcatcttgaaaatct

SEQ ID NO: 979541 - DNA, 15 bp, Homo sapiens
catcttgaaaatcta

SEQ ID NO: 979542 - DNA, 15 bp, Homo sapiens
atcttgaaaatctat

SEQ ID NO: 979543 - DNA, 15 bp, Homo sapiens
tcttgaaaatctata

SEQ ID NO: 979544 - DNA, 15 bp, Homo sapiens
cttgaaaatctatac

SEQ ID NO: 979545 - DNA, 15 bp, Homo sapiens
ttgaaaatctatact

SEQ ID NO: 979546 - DNA, 15 bp, Homo sapiens
tgaaaatctatactg

SEQ ID NO: 979547 - DNA, 15 bp, Homo sapiens
gaaaatctatactga

SEQ ID NO: 979548 - DNA, 15 bp, Homo sapiens
aaaatctatactgat

SEQ ID NO: 979549 - DNA, 15 bp, Homo sapiens
aaatctatactgatg

SEQ ID NO: 979550 - DNA, 15 bp, Homo sapiens
aatctatactgatgt

SEQ ID NO: 979551 - DNA, 15 bp, Homo sapiens
atctatactgatgtt

SEQ ID NO: 979552 - DNA, 15 bp, Homo sapiens
tctatactgatgttg

SEQ ID NO: 979553 - DNA, 15 bp, Homo sapiens
ctatactgatgttgt

SEQ ID NO: 979554 - DNA, 15 bp, Homo sapiens
tatactgatgttgtc

SEQ ID NO: 979555 - DNA, 15 bp, Homo sapiens
atactgatgttgtct

SEQ ID NO: 979556 - DNA, 15 bp, Homo sapiens
tactgatgttgtctt

SEQ ID NO: 979557 - DNA, 15 bp, Homo sapiens
actgatgttgtcttg

SEQ ID NO: 979558 - DNA, 15 bp, Homo sapiens
ctgatgttgtcttgg

SEQ ID NO: 979559 - DNA, 15 bp, Homo sapiens
tgatgttgtcttggg

SEQ ID NO: 979560 - DNA, 15 bp, Homo sapiens
gatgttgtcttgggg

SEQ ID NO: 979561 - DNA, 15 bp, Homo sapiens
atgttgtcttgggga

SEQ ID NO: 979562 - DNA, 15 bp, Homo sapiens
tgttgtcttggggaa

SEQ ID NO: 979563 - DNA, 15 bp, Homo sapiens
gttgtcttggggaat

SEQ ID NO: 979564 - DNA, 15 bp, Homo sapiens
ttgtcttggggaatt

SEQ ID NO: 979565 - DNA, 15 bp, Homo sapiens
tgtcttggggaattg

SEQ ID NO: 979566 - DNA, 15 bp, Homo sapiens
gtcttggggaattga

SEQ ID NO: 979567 - DNA, 15 bp, Homo sapiens
tcttggggaattgaa

SEQ ID NO: 979568 - DNA, 15 bp, Homo sapiens
cttggggaattgaaa

SEQ ID NO: 979569 - DNA, 15 bp, Homo sapiens
ttggggaattgaaaa

SEQ ID NO: 979570 - DNA, 15 bp, Homo sapiens
tggggaattgaaaag

SEQ ID NO: 979571 - DNA, 15 bp, Homo sapiens
ggggaattgaaaagg

SEQ ID NO: 979572 - DNA, 15 bp, Homo sapiens
gggaattgaaaagga

SEQ ID NO: 979573 - DNA, 15 bp, Homo sapiens
ggaattgaaaaggaa

SEQ ID NO: 979574 - DNA, 15 bp, Homo sapiens
gaattgaaaaggaac

SEQ ID NO: 979575 - DNA, 15 bp, Homo sapiens
aattgaaaaggaact

SEQ ID NO: 979576 - DNA, 15 bp, Homo sapiens
attgaaaaggaacta

SEQ ID NO: 979577 - DNA, 15 bp, Homo sapiens
ttgaaaaggaactag

SEQ ID NO: 979578 - DNA, 15 bp, Homo sapiens
tgaaaaggaactagg

SEQ ID NO: 979579 - DNA, 15 bp, Homo sapiens
gaaaaggaactagga

SEQ ID NO: 979580 - DNA, 15 bp, Homo sapiens
aaaaggaactaggag

SEQ ID NO: 979581 - DNA, 15 bp, Homo sapiens
aaaggaactaggagt

SEQ ID NO: 979582 - DNA, 15 bp, Homo sapiens
aaggaactaggagtg

SEQ ID NO: 979583 - DNA, 15 bp, Homo sapiens
aggaactaggagtgt

SEQ ID NO: 979584 - DNA, 15 bp, Homo sapiens
ggaactaggagtgtt

SEQ ID NO: 979585 - DNA, 15 bp, Homo sapiens
gaactaggagtgtta

SEQ ID NO: 979586 - DNA, 15 bp, Homo sapiens
aactaggagtgttag

SEQ ID NO: 979587 - DNA, 15 bp, Homo sapiens
actaggagtgttagt

SEQ ID NO: 979588 - DNA, 15 bp, Homo sapiens
ctaggagtgttagtt

SEQ ID NO: 979589 - DNA, 15 bp, Homo sapiens
taggagtgttagttc

SEQ ID NO: 979590 - DNA, 15 bp, Homo sapiens
aggagtgttagttcc

SEQ ID NO: 979591 - DNA, 15 bp, Homo sapiens
ggagtgttagttcct

SEQ ID NO: 979592 - DNA, 15 bp, Homo sapiens
gagtgttagttcctc

SEQ ID NO: 979593 - DNA, 15 bp, Homo sapiens
agtgttagttcctcg

SEQ ID NO: 979594 - DNA, 15 bp, Homo sapiens
gtgttagttcctcgg

SEQ ID NO: 979595 - DNA, 15 bp, Homo sapiens
tgttagttcctcggt

SEQ ID NO: 979596 - DNA, 15 bp, Homo sapiens
gttagttcctcggta

SEQ ID NO: 979597 - DNA, 15 bp, Homo sapiens
ttagttcctcggtat

SEQ ID NO: 979598 - DNA, 15 bp, Homo sapiens
tagttcctcggtatt

SEQ ID NO: 979599 - DNA, 15 bp, Homo sapiens
agttcctcggtattg

SEQ ID NO: 979600 - DNA, 15 bp, Homo sapiens
gttcctcggtattga

SEQ ID NO: 979601 - DNA, 15 bp, Homo sapiens
ttcctcggtattgac

SEQ ID NO: 979602 - DNA, 15 bp, Homo sapiens
tcctcggtattgacc

SEQ ID NO: 979603 - DNA, 15 bp, Homo sapiens
cctcggtattgaccc

SEQ ID NO: 979604 - DNA, 15 bp, Homo sapiens
ctcggtattgaccca

SEQ ID NO: 979605 - DNA, 15 bp, Homo sapiens
tcggtattgacccac

SEQ ID NO: 979606 - DNA, 15 bp, Homo sapiens
cggtattgacccaca

SEQ ID NO: 979607 - DNA, 15 bp, Homo sapiens
ggtattgacccacag

SEQ ID NO: 979608 - DNA, 15 bp, Homo sapiens
gtattgacccacagt

SEQ ID NO: 979609 - DNA, 15 bp, Homo sapiens
tattgacccacagtt

SEQ ID NO: 979610 - DNA, 15 bp, Homo sapiens
attgacccacagtta

SEQ ID NO: 979611 - DNA, 15 bp, Homo sapiens
ttgacccacagttat

SEQ ID NO: 979612 - DNA, 15 bp, Homo sapiens
tgacccacagttatg

SEQ ID NO: 979613 - DNA, 15 bp, Homo sapiens
gacccacagttatgt

SEQ ID NO: 979614 - DNA, 15 bp, Homo sapiens
acccacagttatgtt

SEQ ID NO: 979615 - DNA, 15 bp, Homo sapiens
cccacagttatgtta

SEQ ID NO: 979616 - DNA, 15 bp, Homo sapiens
ccacagttatgttat

SEQ ID NO: 979617 - DNA, 15 bp, Homo sapiens
cacagttatgttatc

SEQ ID NO: 979618 - DNA, 15 bp, Homo sapiens
acagttatgttatca

SEQ ID NO: 979619 - DNA, 15 bp, Homo sapiens
cagttatgttatcag

SEQ ID NO: 979620 - DNA, 15 bp, Homo sapiens
agttatgttatcagg

SEQ ID NO: 979621 - DNA, 15 bp, Homo sapiens
gttatgttatcaggt

SEQ ID NO: 979622 - DNA, 15 bp, Homo sapiens
ttatgttatcaggtc

SEQ ID NO: 979623 - DNA, 15 bp, Homo sapiens
tatgttatcaggtca

SEQ ID NO: 979624 - DNA, 15 bp, Homo sapiens
atgttatcaggtcac

SEQ ID NO: 979625 - DNA, 15 bp, Homo sapiens
tgttatcaggtcact

SEQ ID NO: 979626 - DNA, 15 bp, Homo sapiens
gttatcaggtcactt

SEQ ID NO: 979627 - DNA, 15 bp, Homo sapiens
ttatcaggtcacttg

SEQ ID NO: 979628 - DNA, 15 bp, Homo sapiens
tatcaggtcacttga

SEQ ID NO: 979629 - DNA, 15 bp, Homo sapiens
atcaggtcacttgag

SEQ ID NO: 979630 - DNA, 15 bp, Homo sapiens
tcaggtcacttgagt

SEQ ID NO: 979631 - DNA, 15 bp, Homo sapiens
caggtcacttgagtt

SEQ ID NO: 979632 - DNA, 15 bp, Homo sapiens
aggtcacttgagttc

SEQ ID NO: 979633 - DNA, 15 bp, Homo sapiens
ggtcacttgagttca

SEQ ID NO: 979634 - DNA, 15 bp, Homo sapiens
gtcacttgagttcaa

SEQ ID NO: 979635 - DNA, 15 bp, Homo sapiens
tcacttgagttcaaa

SEQ ID NO: 979636 - DNA, 15 bp, Homo sapiens
cacttgagttcaaag

SEQ ID NO: 979637 - DNA, 15 bp, Homo sapiens
acttgagttcaaagt

SEQ ID NO: 979638 - DNA, 15 bp, Homo sapiens
cttgagttcaaagtt

SEQ ID NO: 979639 - DNA, 15 bp, Homo sapiens
ttgagttcaaagttt

SEQ ID NO: 979640 - DNA, 15 bp, Homo sapiens
tgagttcaaagtttt

SEQ ID NO: 979641 - DNA, 15 bp, Homo sapiens
gagttcaaagttttg

SEQ ID NO: 979642 - DNA, 15 bp, Homo sapiens
agttcaaagttttgt

SEQ ID NO: 979643 - DNA, 15 bp, Homo sapiens
gttcaaagttttgtg

SEQ ID NO: 979644 - DNA, 15 bp, Homo sapiens
ttcaaagttttgtgt

SEQ ID NO: 979645 - DNA, 15 bp, Homo sapiens
tcaaagttttgtgtt

SEQ ID NO: 979646 - DNA, 15 bp, Homo sapiens
caaagttttgtgttg

SEQ ID NO: 979647 - DNA, 15 bp, Homo sapiens
aaagttttgtgttgg

SEQ ID NO: 979648 - DNA, 15 bp, Homo sapiens
aagttttgtgttggc

SEQ ID NO: 979649 - DNA, 15 bp, Homo sapiens
agttttgtgttggca

SEQ ID NO: 979650 - DNA, 15 bp, Homo sapiens
gttttgtgttggcac

SEQ ID NO: 979651 - DNA, 15 bp, Homo sapiens
ttttgtgttggcact

SEQ ID NO: 979652 - DNA, 15 bp, Homo sapiens
tttgtgttggcacta

SEQ ID NO: 979653 - DNA, 15 bp, Homo sapiens
ttgtgttggcactag

SEQ ID NO: 979654 - DNA, 15 bp, Homo sapiens
tgtgttggcactagc

SEQ ID NO: 979655 - DNA, 15 bp, Homo sapiens
gtgttggcactagct

SEQ ID NO: 979656 - DNA, 15 bp, Homo sapiens
tgttggcactagcta

SEQ ID NO: 979657 - DNA, 15 bp, Homo sapiens
gttggcactagctaa

SEQ ID NO: 979658 - DNA, 15 bp, Homo sapiens
ttggcactagctaag

SEQ ID NO: 979659 - DNA, 15 bp, Homo sapiens
tggcactagctaagt

SEQ ID NO: 979660 - DNA, 15 bp, Homo sapiens
ggcactagctaagta

SEQ ID NO: 979661 - DNA, 15 bp, Homo sapiens
gcactagctaagtaa

SEQ ID NO: 979662 - DNA, 15 bp, Homo sapiens
cactagctaagtaaa

SEQ ID NO: 979663 - DNA, 15 bp, Homo sapiens
actagctaagtaaag

SEQ ID NO: 979664 - DNA, 15 bp, Homo sapiens
ctagctaagtaaagg

SEQ ID NO: 979665 - DNA, 15 bp, Homo sapiens
tagctaagtaaagga

SEQ ID NO: 979666 - DNA, 15 bp, Homo sapiens
agctaagtaaaggaa

SEQ ID NO: 979667 - DNA, 15 bp, Homo sapiens
gctaagtaaaggaaa

SEQ ID NO: 979668 - DNA, 15 bp, Homo sapiens
ctaagtaaaggaaaa

SEQ ID NO: 979669 - DNA, 15 bp, Homo sapiens
taagtaaaggaaaac

SEQ ID NO: 979670 - DNA, 15 bp, Homo sapiens
aagtaaaggaaaaca

SEQ ID NO: 979671 - DNA, 15 bp, Homo sapiens
agtaaaggaaaacac

SEQ ID NO: 979672 - DNA, 15 bp, Homo sapiens
gtaaaggaaaacacc

SEQ ID NO: 979673 - DNA, 15 bp, Homo sapiens
taaaggaaaacacct

SEQ ID NO: 979674 - DNA, 15 bp, Homo sapiens
aaaggaaaacacctc

SEQ ID NO: 979675 - DNA, 15 bp, Homo sapiens
aaggaaaacacctct

SEQ ID NO: 979676 - DNA, 15 bp, Homo sapiens
aggaaaacacctctg

SEQ ID NO: 979677 - DNA, 15 bp, Homo sapiens
ggaaaacacctctgc

SEQ ID NO: 979678 - DNA, 15 bp, Homo sapiens
gaaaacacctctgct

SEQ ID NO: 979679 - DNA, 15 bp, Homo sapiens
aaaacacctctgctt

SEQ ID NO: 979680 - DNA, 15 bp, Homo sapiens
aaacacctctgcttt

SEQ ID NO: 979681 - DNA, 15 bp, Homo sapiens
aacacctctgctttc

SEQ ID NO: 979682 - DNA, 15 bp, Homo sapiens
acacctctgctttca

SEQ ID NO: 979683 - DNA, 15 bp, Homo sapiens
cacctctgctttcat

SEQ ID NO: 979684 - DNA, 15 bp, Homo sapiens
acctctgctttcatt

SEQ ID NO: 979685 - DNA, 15 bp, Homo sapiens
cctctgctttcattg

SEQ ID NO: 979686 - DNA, 15 bp, Homo sapiens
ctctgctttcattgt

SEQ ID NO: 979687 - DNA, 15 bp, Homo sapiens
tctgctttcattgtt

SEQ ID NO: 979688 - DNA, 15 bp, Homo sapiens
ctgctttcattgttg

SEQ ID NO: 979689 - DNA, 15 bp, Homo sapiens
tgctttcattgttga

SEQ ID NO: 979690 - DNA, 15 bp, Homo sapiens
gctttcattgttgag

SEQ ID NO: 979691 - DNA, 15 bp, Homo sapiens
ctttcattgttgagt

SEQ ID NO: 979692 - DNA, 15 bp, Homo sapiens
tttcattgttgagtt

SEQ ID NO: 979693 - DNA, 15 bp, Homo sapiens
ttcattgttgagttt

SEQ ID NO: 979694 - DNA, 15 bp, Homo sapiens
tcattgttgagtttc

SEQ ID NO: 979695 - DNA, 15 bp, Homo sapiens
cattgttgagtttca

SEQ ID NO: 979696 - DNA, 15 bp, Homo sapiens
attgttgagtttcac

SEQ ID NO: 979697 - DNA, 15 bp, Homo sapiens
ttgttgagtttcaca

SEQ ID NO: 979698 - DNA, 15 bp, Homo sapiens
tgttgagtttcacag

SEQ ID NO: 979699 - DNA, 15 bp, Homo sapiens
gttgagtttcacaga

SEQ ID NO: 979700 - DNA, 15 bp, Homo sapiens
ttgagtttcacagaa

SEQ ID NO: 979701 - DNA, 15 bp, Homo sapiens
tgagtttcacagaat

SEQ ID NO: 979702 - DNA, 15 bp, Homo sapiens
gagtttcacagaatt

SEQ ID NO: 979703 - DNA, 15 bp, Homo sapiens
agtttcacagaattg

SEQ ID NO: 979704 - DNA, 15 bp, Homo sapiens
gtttcacagaattga

SEQ ID NO: 979705 - DNA, 15 bp, Homo sapiens
tttcacagaattgag

SEQ ID NO: 979706 - DNA, 15 bp, Homo sapiens
ttcacagaattgaga

SEQ ID NO: 979707 - DNA, 15 bp, Homo sapiens
tcacagaattgagag

SEQ ID NO: 979708 - DNA, 15 bp, Homo sapiens
cacagaattgagagc

SEQ ID NO: 979709 - DNA, 15 bp, Homo sapiens
acagaattgagagct

SEQ ID NO: 979710 - DNA, 15 bp, Homo sapiens
cagaattgagagctg

SEQ ID NO: 979711 - DNA, 15 bp, Homo sapiens
agaattgagagctga

SEQ ID NO: 979712 - DNA, 15 bp, Homo sapiens
gaattgagagctgaa

SEQ ID NO: 979713 - DNA, 15 bp, Homo sapiens
aattgagagctgaaa

SEQ ID NO: 979714 - DNA, 15 bp, Homo sapiens
attgagagctgaaag

SEQ ID NO: 979715 - DNA, 15 bp, Homo sapiens
ttgagagctgaaagg

SEQ ID NO: 979716 - DNA, 15 bp, Homo sapiens
tgagagctgaaagga

SEQ ID NO: 979717 - DNA, 15 bp, Homo sapiens
gagagctgaaaggat

SEQ ID NO: 979718 - DNA, 15 bp, Homo sapiens
agagctgaaaggatc

SEQ ID NO: 979719 - DNA, 15 bp, Homo sapiens
gagctgaaaggatcc

SEQ ID NO: 979720 - DNA, 15 bp, Homo sapiens
agctgaaaggatccc

SEQ ID NO: 979721 - DNA, 15 bp, Homo sapiens
gctgaaaggatccca

SEQ ID NO: 979722 - DNA, 15 bp, Homo sapiens
ctgaaaggatcccag

SEQ ID NO: 979723 - DNA, 15 bp, Homo sapiens
tgaaaggatcccagg

SEQ ID NO: 979724 - DNA, 15 bp, Homo sapiens
gaaaggatcccaggc

SEQ ID NO: 979725 - DNA, 15 bp, Homo sapiens
aaaggatcccaggca

SEQ ID NO: 979726 - DNA, 15 bp, Homo sapiens
aaggatcccaggcag

SEQ ID NO: 979727 - DNA, 15 bp, Homo sapiens
aggatcccaggcagg

SEQ ID NO: 979728 - DNA, 15 bp, Homo sapiens
ggatcccaggcagga

SEQ ID NO: 979729 - DNA, 15 bp, Homo sapiens
gatcccaggcaggag

SEQ ID NO: 979730 - DNA, 15 bp, Homo sapiens
atcccaggcaggagc

SEQ ID NO: 979731 - DNA, 15 bp, Homo sapiens
tcccaggcaggagca

SEQ ID NO: 979732 - DNA, 15 bp, Homo sapiens
cccaggcaggagcag

SEQ ID NO: 979733 - DNA, 15 bp, Homo sapiens
ccaggcaggagcagc

SEQ ID NO: 979734 - DNA, 15 bp, Homo sapiens
caggcaggagcagct

SEQ ID NO: 979735 - DNA, 15 bp, Homo sapiens
aggcaggagcagcta

SEQ ID NO: 979736 - DNA, 15 bp, Homo sapiens
ggcaggagcagctaa

SEQ ID NO: 979737 - DNA, 15 bp, Homo sapiens
gcaggagcagctaat

SEQ ID NO: 979738 - DNA, 15 bp, Homo sapiens
caggagcagctaatc

SEQ ID NO: 979739 - DNA, 15 bp, Homo sapiens
aggagcagctaatcc

SEQ ID NO: 979740 - DNA, 15 bp, Homo sapiens
ggagcagctaatcca

SEQ ID NO: 979741 - DNA, 15 bp, Homo sapiens
gagcagctaatccaa

SEQ ID NO: 979742 - DNA, 15 bp, Homo sapiens
agcagctaatccaaa

SEQ ID NO: 979743 - DNA, 15 bp, Homo sapiens
gcagctaatccaaac

SEQ ID NO: 979744 - DNA, 15 bp, Homo sapiens
cagctaatccaaact

SEQ ID NO: 979745 - DNA, 15 bp, Homo sapiens
agctaatccaaactc

SEQ ID NO: 979746 - DNA, 15 bp, Homo sapiens
gctaatccaaactcc

SEQ ID NO: 979747 - DNA, 15 bp, Homo sapiens
ctaatccaaactccc

SEQ ID NO: 979748 - DNA, 15 bp, Homo sapiens
taatccaaactccca

SEQ ID NO: 979749 - DNA, 15 bp, Homo sapiens
aatccaaactcccac

SEQ ID NO: 979750 - DNA, 15 bp, Homo sapiens
atccaaactcccaca

SEQ ID NO: 979751 - DNA, 15 bp, Homo sapiens
tccaaactcccacaa

SEQ ID NO: 979752 - DNA, 15 bp, Homo sapiens
ccaaactcccacaaa

SEQ ID NO: 979753 - DNA, 15 bp, Homo sapiens
caaactcccacaaag

SEQ ID NO: 979754 - DNA, 15 bp, Homo sapiens
aaactcccacaaaga

SEQ ID NO: 979755 - DNA, 15 bp, Homo sapiens
aactcccacaaagaa

SEQ ID NO: 979756 - DNA, 15 bp, Homo sapiens
actcccacaaagaac

SEQ ID NO: 979757 - DNA, 15 bp, Homo sapiens
ctcccacaaagaaca

SEQ ID NO: 979758 - DNA, 15 bp, Homo sapiens
tcccacaaagaacaa

SEQ ID NO: 979759 - DNA, 15 bp, Homo sapiens
cccacaaagaacaaa

SEQ ID NO: 979760 - DNA, 15 bp, Homo sapiens
ccacaaagaacaaaa

SEQ ID NO: 979761 - DNA, 15 bp, Homo sapiens
cacaaagaacaaaaa

SEQ ID NO: 979762 - DNA, 15 bp, Homo sapiens
acaaagaacaaaaat

SEQ ID NO: 979763 - DNA, 15 bp, Homo sapiens
caaagaacaaaaatc

SEQ ID NO: 979764 - DNA, 15 bp, Homo sapiens
aaagaacaaaaatcc

SEQ ID NO: 979765 - DNA, 15 bp, Homo sapiens
aagaacaaaaatccc

SEQ ID NO: 979766 - DNA, 15 bp, Homo sapiens
agaacaaaaatcccc

SEQ ID NO: 979767 - DNA, 15 bp, Homo sapiens
gaacaaaaatccccc

SEQ ID NO: 979768 - DNA, 15 bp, Homo sapiens
aacaaaaatccccca

SEQ ID NO: 979769 - DNA, 15 bp, Homo sapiens
acaaaaatcccccag

SEQ ID NO: 979770 - DNA, 15 bp, Homo sapiens
caaaaatcccccaga

SEQ ID NO: 979771 - DNA, 15 bp, Homo sapiens
aaaaatcccccagag

SEQ ID NO: 979772 - DNA, 15 bp, Homo sapiens
aaaatcccccagagg

SEQ ID NO: 979773 - DNA, 15 bp, Homo sapiens
aaatcccccagagga

SEQ ID NO: 979774 - DNA, 15 bp, Homo sapiens
aatcccccagaggat

SEQ ID NO: 979775 - DNA, 15 bp, Homo sapiens
atcccccagaggatc

SEQ ID NO: 979776 - DNA, 15 bp, Homo sapiens
tcccccagaggatct

SEQ ID NO: 979777 - DNA, 15 bp, Homo sapiens
cccccagaggatctt

SEQ ID NO: 979778 - DNA, 15 bp, Homo sapiens
ccccagaggatcttc

SEQ ID NO: 979779 - DNA, 15 bp, Homo sapiens
cccagaggatcttct

SEQ ID NO: 979780 - DNA, 15 bp, Homo sapiens
ccagaggatcttctg

SEQ ID NO: 979781 - DNA, 15 bp, Homo sapiens
cagaggatcttctgt

SEQ ID NO: 979782 - DNA, 15 bp, Homo sapiens
agaggatcttctgtt

SEQ ID NO: 979783 - DNA, 15 bp, Homo sapiens
gaggatcttctgttc

SEQ ID NO: 979784 - DNA, 15 bp, Homo sapiens
aggatcttctgttct

SEQ ID NO: 979785 - DNA, 15 bp, Homo sapiens
ggatcttctgttctt

SEQ ID NO: 979786 - DNA, 15 bp, Homo sapiens
gatcttctgttctta

SEQ ID NO: 979787 - DNA, 15 bp, Homo sapiens
atcttctgttcttat

SEQ ID NO: 979788 - DNA, 15 bp, Homo sapiens
tcttctgttcttata

SEQ ID NO: 979789 - DNA, 15 bp, Homo sapiens
cttctgttcttatat

SEQ ID NO: 979790 - DNA, 15 bp, Homo sapiens
ttctgttcttatatt

SEQ ID NO: 979791 - DNA, 15 bp, Homo sapiens
tctgttcttatattt

SEQ ID NO: 979792 - DNA, 15 bp, Homo sapiens
ctgttcttatatttc

SEQ ID NO: 979793 - DNA, 15 bp, Homo sapiens
tgttcttatatttcc

SEQ ID NO: 979794 - DNA, 15 bp, Homo sapiens
gttcttatatttcct

SEQ ID NO: 979795 - DNA, 15 bp, Homo sapiens
ttcttatatttcctg

SEQ ID NO: 979796 - DNA, 15 bp, Homo sapiens
tcttatatttcctgc

SEQ ID NO: 979797 - DNA, 15 bp, Homo sapiens
cttatatttcctgca

SEQ ID NO: 979798 - DNA, 15 bp, Homo sapiens
ttatatttcctgcaa

SEQ ID NO: 979799 - DNA, 15 bp, Homo sapiens
tatatttcctgcaat

SEQ ID NO: 979800 - DNA, 15 bp, Homo sapiens
atatttcctgcaatg

SEQ ID NO: 979801 - DNA, 15 bp, Homo sapiens
tatttcctgcaatgg

SEQ ID NO: 979802 - DNA, 15 bp, Homo sapiens
atttcctgcaatggc

SEQ ID NO: 979803 - DNA, 15 bp, Homo sapiens
tttcctgcaatggcg

SEQ ID NO: 979804 - DNA, 15 bp, Homo sapiens
ttcctgcaatggcgt

SEQ ID NO: 979805 - DNA, 15 bp, Homo sapiens
tcctgcaatggcgtc

SEQ ID NO: 979806 - DNA, 15 bp, Homo sapiens
cctgcaatggcgtcc

SEQ ID NO: 979807 - DNA, 15 bp, Homo sapiens
ctgcaatggcgtccc

SEQ ID NO: 979808 - DNA, 15 bp, Homo sapiens
tgcaatggcgtccct

SEQ ID NO: 979809 - DNA, 15 bp, Homo sapiens
gcaatggcgtccctg

SEQ ID NO: 979810 - DNA, 15 bp, Homo sapiens
caatggcgtccctgt

SEQ ID NO: 979811 - DNA, 15 bp, Homo sapiens
aatggcgtccctgtc

SEQ ID NO: 979812 - DNA, 15 bp, Homo sapiens
atggcgtccctgtca

SEQ ID NO: 979813 - DNA, 15 bp, Homo sapiens
tggcgtccctgtcat

SEQ ID NO: 979814 - DNA, 15 bp, Homo sapiens
ggcgtccctgtcata

SEQ ID NO: 979815 - DNA, 15 bp, Homo sapiens
gcgtccctgtcatat

SEQ ID NO: 979816 - DNA, 15 bp, Homo sapiens
cgtccctgtcatatc

SEQ ID NO: 979817 - DNA, 15 bp, Homo sapiens
gtccctgtcatatcc

SEQ ID NO: 979818 - DNA, 15 bp, Homo sapiens
tccctgtcatatccc

SEQ ID NO: 979819 - DNA, 15 bp, Homo sapiens
ccctgtcatatccca

SEQ ID NO: 979820 - DNA, 15 bp, Homo sapiens
cctgtcatatcccac

SEQ ID NO: 979821 - DNA, 15 bp, Homo sapiens
ctgtcatatcccaca

SEQ ID NO: 979822 - DNA, 15 bp, Homo sapiens
tgtcatatcccacaa

SEQ ID NO: 979823 - DNA, 15 bp, Homo sapiens
gtcatatcccacaat

SEQ ID NO: 979824 - DNA, 15 bp, Homo sapiens
tcatatcccacaatg

SEQ ID NO: 979825 - DNA, 15 bp, Homo sapiens
catatcccacaatgg

SEQ ID NO: 979826 - DNA, 15 bp, Homo sapiens
atatcccacaatggc

SEQ ID NO: 979827 - DNA, 15 bp, Homo sapiens
tatcccacaatggcc

SEQ ID NO: 979828 - DNA, 15 bp, Homo sapiens
atcccacaatggcct

SEQ ID NO: 979829 - DNA, 15 bp, Homo sapiens
tcccacaatggcctc

SEQ ID NO: 979830 - DNA, 15 bp, Homo sapiens
cccacaatggcctcc

SEQ ID NO: 979831 - DNA, 15 bp, Homo sapiens
ccacaatggcctccc

SEQ ID NO: 979832 - DNA, 15 bp, Homo sapiens
cacaatggcctccct

SEQ ID NO: 979833 - DNA, 15 bp, Homo sapiens
acaatggcctccctg

SEQ ID NO: 979834 - DNA, 15 bp, Homo sapiens
caatggcctccctgc

SEQ ID NO: 979835 - DNA, 15 bp, Homo sapiens
aatggcctccctgcc

SEQ ID NO: 979836 - DNA, 15 bp, Homo sapiens
atggcctccctgcca

SEQ ID NO: 979837 - DNA, 15 bp, Homo sapiens
tggcctccctgccat

SEQ ID NO: 979838 - DNA, 15 bp, Homo sapiens
ggcctccctgccatt

SEQ ID NO: 979839 - DNA, 15 bp, Homo sapiens
gcctccctgccattt

SEQ ID NO: 979840 - DNA, 15 bp, Homo sapiens
cctccctgccatttg

SEQ ID NO: 979841 - DNA, 15 bp, Homo sapiens
ctccctgccatttgg

SEQ ID NO: 979842 - DNA, 15 bp, Homo sapiens
tccctgccatttgga

SEQ ID NO: 979843 - DNA, 15 bp, Homo sapiens
ccctgccatttggat

SEQ ID NO: 979844 - DNA, 15 bp, Homo sapiens
cctgccatttggata

SEQ ID NO: 979845 - DNA, 15 bp, Homo sapiens
ctgccatttggatat

SEQ ID NO: 979846 - DNA, 15 bp, Homo sapiens
tgccatttggatatc

SEQ ID NO: 979847 - DNA, 15 bp, Homo sapiens
gccatttggatatcc

SEQ ID NO: 979848 - DNA, 15 bp, Homo sapiens
ccatttggatatccc

SEQ ID NO: 979849 - DNA, 15 bp, Homo sapiens
catttggatatccct

SEQ ID NO: 979850 - DNA, 15 bp, Homo sapiens
atttggatatccctt

SEQ ID NO: 979851 - DNA, 15 bp, Homo sapiens
tttggatatcccttc

SEQ ID NO: 979852 - DNA, 15 bp, Homo sapiens
ttggatatcccttcc

SEQ ID NO: 979853 - DNA, 15 bp, Homo sapiens
tggatatcccttcca

SEQ ID NO: 979854 - DNA, 15 bp, Homo sapiens
ggatatcccttccat

SEQ ID NO: 979855 - DNA, 15 bp, Homo sapiens
gatatcccttccata

SEQ ID NO: 979856 - DNA, 15 bp, Homo sapiens
atatcccttccatat

SEQ ID NO: 979857 - DNA, 15 bp, Homo sapiens
tatcccttccatatc

SEQ ID NO: 979858 - DNA, 15 bp, Homo sapiens
atcccttccatatcc

SEQ ID NO: 979859 - DNA, 15 bp, Homo sapiens
tcccttccatatcct

SEQ ID NO: 979860 - DNA, 15 bp, Homo sapiens
cccttccatatcctg

SEQ ID NO: 979861 - DNA, 15 bp, Homo sapiens
ccttccatatcctgt

SEQ ID NO: 979862 - DNA, 15 bp, Homo sapiens
cttccatatcctgtt

SEQ ID NO: 979863 - DNA, 15 bp, Homo sapiens
ttccatatcctgttg

SEQ ID NO: 979864 - DNA, 15 bp, Homo sapiens
tccatatcctgttga

SEQ ID NO: 979865 - DNA, 15 bp, Homo sapiens
ccatatcctgttgaa

SEQ ID NO: 979866 - DNA, 15 bp, Homo sapiens
catatcctgttgaaa

SEQ ID NO: 979867 - DNA, 15 bp, Homo sapiens
atatcctgttgaaat

SEQ ID NO: 979868 - DNA, 15 bp, Homo sapiens
tatcctgttgaaatt

SEQ ID NO: 979869 - DNA, 15 bp, Homo sapiens
atcctgttgaaatta

SEQ ID NO: 979870 - DNA, 15 bp, Homo sapiens
tcctgttgaaattac

SEQ ID NO: 979871 - DNA, 15 bp, Homo sapiens
cctgttgaaattact

SEQ ID NO: 979872 - DNA, 15 bp, Homo sapiens
ctgttgaaattactc

SEQ ID NO: 979873 - DNA, 15 bp, Homo sapiens
tgttgaaattactcc

SEQ ID NO: 979874 - DNA, 15 bp, Homo sapiens
gttgaaattactccc

SEQ ID NO: 979875 - DNA, 15 bp, Homo sapiens
ttgaaattactccct

SEQ ID NO: 979876 - DNA, 15 bp, Homo sapiens
tgaaattactcccta

SEQ ID NO: 979877 - DNA, 15 bp, Homo sapiens
gaaattactccctaa

SEQ ID NO: 979878 - DNA, 15 bp, Homo sapiens
aaattactccctaat

SEQ ID NO: 979879 - DNA, 15 bp, Homo sapiens
aattactccctaata

SEQ ID NO: 979880 - DNA, 15 bp, Homo sapiens
attactccctaatag

SEQ ID NO: 979881 - DNA, 15 bp, Homo sapiens
ttactccctaatagt

SEQ ID NO: 979882 - DNA, 15 bp, Homo sapiens
tactccctaatagta

SEQ ID NO: 979883 - DNA, 15 bp, Homo sapiens
actccctaatagtaa

SEQ ID NO: 979884 - DNA, 15 bp, Homo sapiens
ctccctaatagtaag

SEQ ID NO: 979885 - DNA, 15 bp, Homo sapiens
tccctaatagtaagc

SEQ ID NO: 979886 - DNA, 15 bp, Homo sapiens
ccctaatagtaagct

SEQ ID NO: 979887 - DNA, 15 bp, Homo sapiens
cctaatagtaagctg

SEQ ID NO: 979888 - DNA, 15 bp, Homo sapiens
ctaatagtaagctga

SEQ ID NO: 979889 - DNA, 15 bp, Homo sapiens
taatagtaagctgaa

SEQ ID NO: 979890 - DNA, 15 bp, Homo sapiens
aatagtaagctgaaa

SEQ ID NO: 979891 - DNA, 15 bp, Homo sapiens
atagtaagctgaaat

SEQ ID NO: 979892 - DNA, 15 bp, Homo sapiens
tagtaagctgaaatc

SEQ ID NO: 979893 - DNA, 15 bp, Homo sapiens
agtaagctgaaatct

SEQ ID NO: 979894 - DNA, 15 bp, Homo sapiens
gtaagctgaaatctg

SEQ ID NO: 979895 - DNA, 15 bp, Homo sapiens
taagctgaaatctgc

SEQ ID NO: 979896 - DNA, 15 bp, Homo sapiens
aagctgaaatctgcc

SEQ ID NO: 979897 - DNA, 15 bp, Homo sapiens
agctgaaatctgccc

SEQ ID NO: 979898 - DNA, 15 bp, Homo sapiens
gctgaaatctgcccc

SEQ ID NO: 979899 - DNA, 15 bp, Homo sapiens
ctgaaatctgcccct

SEQ ID NO: 979900 - DNA, 15 bp, Homo sapiens
tgaaatctgcccctc

SEQ ID NO: 979901 - DNA, 15 bp, Homo sapiens
gaaatctgcccctct

SEQ ID NO: 979902 - DNA, 15 bp, Homo sapiens
aaatctgcccctcta

SEQ ID NO: 979903 - DNA, 15 bp, Homo sapiens
aatctgcccctctag

SEQ ID NO: 979904 - DNA, 15 bp, Homo sapiens
atctgcccctctagt

SEQ ID NO: 979905 - DNA, 15 bp, Homo sapiens
tctgcccctctagtt

SEQ ID NO: 979906 - DNA, 15 bp, Homo sapiens
ctgcccctctagttg

SEQ ID NO: 979907 - DNA, 15 bp, Homo sapiens
tgcccctctagttgt

SEQ ID NO: 979908 - DNA, 15 bp, Homo sapiens
gcccctctagttgta

SEQ ID NO: 979909 - DNA, 15 bp, Homo sapiens
cccctctagttgtag

SEQ ID NO: 979910 - DNA, 15 bp, Homo sapiens
ccctctagttgtagt

SEQ ID NO: 979911 - DNA, 15 bp, Homo sapiens
cctctagttgtagtc

SEQ ID NO: 979912 - DNA, 15 bp, Homo sapiens
ctctagttgtagtct

SEQ ID NO: 979913 - DNA, 15 bp, Homo sapiens
tctagttgtagtctt

SEQ ID NO: 979914 - DNA, 15 bp, Homo sapiens
ctagttgtagtcttg

SEQ ID NO: 979915 - DNA, 15 bp, Homo sapiens
tagttgtagtcttgg

SEQ ID NO: 979916 - DNA, 15 bp, Homo sapiens
agttgtagtcttggg

SEQ ID NO: 979917 - DNA, 15 bp, Homo sapiens
gttgtagtcttggga

SEQ ID NO: 979918 - DNA, 15 bp, Homo sapiens
ttgtagtcttgggat

SEQ ID NO: 979919 - DNA, 15 bp, Homo sapiens
tgtagtcttgggatt

SEQ ID NO: 979920 - DNA, 15 bp, Homo sapiens
gtagtcttgggatta

SEQ ID NO: 979921 - DNA, 15 bp, Homo sapiens
tagtcttgggattat

SEQ ID NO: 979922 - DNA, 15 bp, Homo sapiens
agtcttgggattatt

SEQ ID NO: 979923 - DNA, 15 bp, Homo sapiens
gtcttgggattattt

SEQ ID NO: 979924 - DNA, 15 bp, Homo sapiens
tcttgggattatttc

SEQ ID NO: 979925 - DNA, 15 bp, Homo sapiens
cttgggattatttca

SEQ ID NO: 979926 - DNA, 15 bp, Homo sapiens
ttgggattatttcat

SEQ ID NO: 979927 - DNA, 15 bp, Homo sapiens
tgggattatttcatt

SEQ ID NO: 979928 - DNA, 15 bp, Homo sapiens
gggattatttcattt

SEQ ID NO: 979929 - DNA, 15 bp, Homo sapiens
ggattatttcattta

SEQ ID NO: 979930 - DNA, 15 bp, Homo sapiens
gattatttcatttac

SEQ ID NO: 979931 - DNA, 15 bp, Homo sapiens
attatttcatttaca

SEQ ID NO: 979932 - DNA, 15 bp, Homo sapiens
ttatttcatttacat

SEQ ID NO: 979933 - DNA, 15 bp, Homo sapiens
tatttcatttacatg

SEQ ID NO: 979934 - DNA, 15 bp, Homo sapiens
atttcatttacatga

SEQ ID NO: 979935 - DNA, 15 bp, Homo sapiens
tttcatttacatgat

SEQ ID NO: 979936 - DNA, 15 bp, Homo sapiens
ttcatttacatgatg

SEQ ID NO: 979937 - DNA, 15 bp, Homo sapiens
tcatttacatgatga

SEQ ID NO: 979938 - DNA, 15 bp, Homo sapiens
catttacatgatgac

SEQ ID NO: 979939 - DNA, 15 bp, Homo sapiens
atttacatgatgacc

SEQ ID NO: 979940 - DNA, 15 bp, Homo sapiens
tttacatgatgacct

SEQ ID NO: 979941 - DNA, 15 bp, Homo sapiens
ttacatgatgacctt

SEQ ID NO: 979942 - DNA, 15 bp, Homo sapiens
tacatgatgaccttt

SEQ ID NO: 979943 - DNA, 15 bp, Homo sapiens
acatgatgacctttt

SEQ ID NO: 979944 - DNA, 15 bp, Homo sapiens
catgatgacctttta

SEQ ID NO: 979945 - DNA, 15 bp, Homo sapiens
atgatgaccttttaa

SEQ ID NO: 979946 - DNA, 15 bp, Homo sapiens
tgatgaccttttaat

SEQ ID NO: 979947 - DNA, 15 bp, Homo sapiens
gatgaccttttaata

SEQ ID NO: 979948 - DNA, 15 bp, Homo sapiens
atgaccttttaatat

SEQ ID NO: 979949 - DNA, 15 bp, Homo sapiens
tgaccttttaatatt

SEQ ID NO: 979950 - DNA, 15 bp, Homo sapiens
gaccttttaatattt

SEQ ID NO: 979951 - DNA, 15 bp, Homo sapiens
accttttaatatttg

SEQ ID NO: 979952 - DNA, 15 bp, Homo sapiens
ccttttaatatttga

SEQ ID NO: 979953 - DNA, 15 bp, Homo sapiens
cttttaatatttgac

SEQ ID NO: 979954 - DNA, 15 bp, Homo sapiens
ttttaatatttgact

SEQ ID NO: 979955 - DNA, 15 bp, Homo sapiens
tttaatatttgacta

SEQ ID NO: 979956 - DNA, 15 bp, Homo sapiens
ttaatatttgactag

SEQ ID NO: 979957 - DNA, 15 bp, Homo sapiens
taatatttgactaga

SEQ ID NO: 979958 - DNA, 15 bp, Homo sapiens
aatatttgactagaa

SEQ ID NO: 979959 - DNA, 15 bp, Homo sapiens
atatttgactagaat

SEQ ID NO: 979960 - DNA, 15 bp, Homo sapiens
tatttgactagaatt

SEQ ID NO: 979961 - DNA, 15 bp, Homo sapiens
atttgactagaatta

SEQ ID NO: 979962 - DNA, 15 bp, Homo sapiens
tttgactagaattaa

SEQ ID NO: 979963 - DNA, 15 bp, Homo sapiens
ttgactagaattaaa

SEQ ID NO: 979964 - DNA, 15 bp, Homo sapiens
tgactagaattaaat

SEQ ID NO: 979965 - DNA, 15 bp, Homo sapiens
gactagaattaaatc

SEQ ID NO: 979966 - DNA, 15 bp, Homo sapiens
actagaattaaatca

SEQ ID NO: 979967 - DNA, 15 bp, Homo sapiens
ctagaattaaatcat

SEQ ID NO: 979968 - DNA, 15 bp, Homo sapiens
tagaattaaatcatc

SEQ ID NO: 979969 - DNA, 15 bp, Homo sapiens
agaattaaatcatct

SEQ ID NO: 979970 - DNA, 15 bp, Homo sapiens
gaattaaatcatctc

SEQ ID NO: 979971 - DNA, 15 bp, Homo sapiens
aattaaatcatctcc

SEQ ID NO: 979972 - DNA, 15 bp, Homo sapiens
attaaatcatctccc

SEQ ID NO: 979973 - DNA, 15 bp, Homo sapiens
ttaaatcatctcccc

SEQ ID NO: 979974 - DNA, 15 bp, Homo sapiens
taaatcatctcccct

SEQ ID NO: 979975 - DNA, 15 bp, Homo sapiens
aaatcatctcccctt

SEQ ID NO: 979976 - DNA, 15 bp, Homo sapiens
aatcatctccccttg

SEQ ID NO: 979977 - DNA, 15 bp, Homo sapiens
atcatctccccttgg

SEQ ID NO: 979978 - DNA, 15 bp, Homo sapiens
tcatctccccttggt

SEQ ID NO: 979979 - DNA, 15 bp, Homo sapiens
catctccccttggtc

SEQ ID NO: 979980 - DNA, 15 bp, Homo sapiens
atctccccttggtct

SEQ ID NO: 979981 - DNA, 15 bp, Homo sapiens
tctccccttggtctt

SEQ ID NO: 979982 - DNA, 15 bp, Homo sapiens
ctccccttggtcttt

SEQ ID NO: 979983 - DNA, 15 bp, Homo sapiens
tccccttggtctttc

SEQ ID NO: 979984 - DNA, 15 bp, Homo sapiens
ccccttggtctttcc

SEQ ID NO: 979985 - DNA, 15 bp, Homo sapiens
cccttggtctttcca

SEQ ID NO: 979986 - DNA, 15 bp, Homo sapiens
ccttggtctttccat

SEQ ID NO: 979987 - DNA, 15 bp, Homo sapiens
cttggtctttccatt

SEQ ID NO: 979988 - DNA, 15 bp, Homo sapiens
ttggtctttccattc

SEQ ID NO: 979989 - DNA, 15 bp, Homo sapiens
tggtctttccattcc

SEQ ID NO: 979990 - DNA, 15 bp, Homo sapiens
ggtctttccattcct

SEQ ID NO: 979991 - DNA, 15 bp, Homo sapiens
gtctttccattcctg

SEQ ID NO: 979992 - DNA, 15 bp, Homo sapiens
tctttccattcctgg

SEQ ID NO: 979993 - DNA, 15 bp, Homo sapiens
ctttccattcctggg

SEQ ID NO: 979994 - DNA, 15 bp, Homo sapiens
tttccattcctgggc

SEQ ID NO: 979995 - DNA, 15 bp, Homo sapiens
ttccattcctgggct

SEQ ID NO: 979996 - DNA, 15 bp, Homo sapiens
tccattcctgggcta

SEQ ID NO: 979997 - DNA, 15 bp, Homo sapiens
ccattcctgggctaa

SEQ ID NO: 979998 - DNA, 15 bp, Homo sapiens
cattcctgggctaac

SEQ ID NO: 979999 - DNA, 15 bp, Homo sapiens
attcctgggctaact

SEQ ID NO: 980000 - DNA, 15 bp, Homo sapiens
ttcctgggctaacta

SEQ ID NO: 980001 - DNA, 15 bp, Homo sapiens
tcctgggctaactac

SEQ ID NO: 980002 - DNA, 15 bp, Homo sapiens
cctgggctaactacc

SEQ ID NO: 980003 - DNA, 15 bp, Homo sapiens
ctgggctaactacca

SEQ ID NO: 980004 - DNA, 15 bp, Homo sapiens
tgggctaactaccat

SEQ ID NO: 980005 - DNA, 15 bp, Homo sapiens
gggctaactaccatc

SEQ ID NO: 980006 - DNA, 15 bp, Homo sapiens
ggctaactaccatca

SEQ ID NO: 980007 - DNA, 15 bp, Homo sapiens
gctaactaccatcaa

SEQ ID NO: 980008 - DNA, 15 bp, Homo sapiens
ctaactaccatcaat

SEQ ID NO: 980009 - DNA, 15 bp, Homo sapiens
taactaccatcaatc

SEQ ID NO: 980010 - DNA, 15 bp, Homo sapiens
aactaccatcaatct

SEQ ID NO: 980011 - DNA, 15 bp, Homo sapiens
actaccatcaatctg

SEQ ID NO: 980012 - DNA, 15 bp, Homo sapiens
ctaccatcaatctga

SEQ ID NO: 980013 - DNA, 15 bp, Homo sapiens
taccatcaatctgag

SEQ ID NO: 980014 - DNA, 15 bp, Homo sapiens
accatcaatctgagg

SEQ ID NO: 980015 - DNA, 15 bp, Homo sapiens
ccatcaatctgaggg

SEQ ID NO: 980016 - DNA, 15 bp, Homo sapiens
catcaatctgagggc

SEQ ID NO: 980017 - DNA, 15 bp, Homo sapiens
atcaatctgagggct

SEQ ID NO: 980018 - DNA, 15 bp, Homo sapiens
tcaatctgagggcta

SEQ ID NO: 980019 - DNA, 15 bp, Homo sapiens
caatctgagggctaa

SEQ ID NO: 980020 - DNA, 15 bp, Homo sapiens
aatctgagggctaac

SEQ ID NO: 980021 - DNA, 15 bp, Homo sapiens
atctgagggctaaca

SEQ ID NO: 980022 - DNA, 15 bp, Homo sapiens
tctgagggctaacaa

SEQ ID NO: 980023 - DNA, 15 bp, Homo sapiens
ctgagggctaacaat

SEQ ID NO: 980024 - DNA, 15 bp, Homo sapiens
tgagggctaacaata

SEQ ID NO: 980025 - DNA, 15 bp, Homo sapiens
gagggctaacaatac

SEQ ID NO: 980026 - DNA, 15 bp, Homo sapiens
agggctaacaataca

SEQ ID NO: 980027 - DNA, 15 bp, Homo sapiens
gggctaacaatacaa

SEQ ID NO: 980028 - DNA, 15 bp, Homo sapiens
ggctaacaatacaag

SEQ ID NO: 980029 - DNA, 15 bp, Homo sapiens
gctaacaatacaagt

SEQ ID NO: 980030 - DNA, 15 bp, Homo sapiens
ctaacaatacaagta

SEQ ID NO: 980031 - DNA, 15 bp, Homo sapiens
taacaatacaagtag

SEQ ID NO: 980032 - DNA, 15 bp, Homo sapiens
aacaatacaagtaga

SEQ ID NO: 980033 - DNA, 15 bp, Homo sapiens
acaatacaagtagaa

SEQ ID NO: 980034 - DNA, 15 bp, Homo sapiens
caatacaagtagaaa

SEQ ID NO: 980035 - DNA, 15 bp, Homo sapiens
aatacaagtagaaaa

SEQ ID NO: 980036 - DNA, 15 bp, Homo sapiens
atacaagtagaaaaa

SEQ ID NO: 980037 - DNA, 15 bp, Homo sapiens
tacaagtagaaaaag

SEQ ID NO: 980038 - DNA, 15 bp, Homo sapiens
acaagtagaaaaagt

SEQ ID NO: 980039 - DNA, 15 bp, Homo sapiens
caagtagaaaaagta

SEQ ID NO: 980040 - DNA, 15 bp, Homo sapiens
aagtagaaaaagtat

SEQ ID NO: 980041 - DNA, 15 bp, Homo sapiens
agtagaaaaagtata

SEQ ID NO: 980042 - DNA, 15 bp, Homo sapiens
gtagaaaaagtatac

SEQ ID NO: 980043 - DNA, 15 bp, Homo sapiens
tagaaaaagtataca

SEQ ID NO: 980044 - DNA, 15 bp, Homo sapiens
agaaaaagtatacat

SEQ ID NO: 980045 - DNA, 15 bp, Homo sapiens
gaaaaagtatacatt

SEQ ID NO: 980046 - DNA, 15 bp, Homo sapiens
aaaaagtatacattt

SEQ ID NO: 980047 - DNA, 15 bp, Homo sapiens
aaaagtatacatttg

SEQ ID NO: 980048 - DNA, 15 bp, Homo sapiens
aaagtatacatttgt

SEQ ID NO: 980049 - DNA, 15 bp, Homo sapiens
aagtatacatttgtc

SEQ ID NO: 980050 - DNA, 15 bp, Homo sapiens
agtatacatttgtca

SEQ ID NO: 980051 - DNA, 15 bp, Homo sapiens
gtatacatttgtcac

SEQ ID NO: 980052 - DNA, 15 bp, Homo sapiens
tatacatttgtcact

SEQ ID NO: 980053 - DNA, 15 bp, Homo sapiens
atacatttgtcactg

SEQ ID NO: 980054 - DNA, 15 bp, Homo sapiens
tacatttgtcactga

SEQ ID NO: 980055 - DNA, 15 bp, Homo sapiens
acatttgtcactgat

SEQ ID NO: 980056 - DNA, 15 bp, Homo sapiens
catttgtcactgatc

SEQ ID NO: 980057 - DNA, 15 bp, Homo sapiens
atttgtcactgatca

SEQ ID NO: 980058 - DNA, 15 bp, Homo sapiens
tttgtcactgatcac

SEQ ID NO: 980059 - DNA, 15 bp, Homo sapiens
ttgtcactgatcact

SEQ ID NO: 980060 - DNA, 15 bp, Homo sapiens
tgtcactgatcactg

SEQ ID NO: 980061 - DNA, 15 bp, Homo sapiens
gtcactgatcactga

SEQ ID NO: 980062 - DNA, 15 bp, Homo sapiens
tcactgatcactgat

SEQ ID NO: 980063 - DNA, 15 bp, Homo sapiens
cactgatcactgatc

SEQ ID NO: 980064 - DNA, 15 bp, Homo sapiens
actgatcactgatca

SEQ ID NO: 980065 - DNA, 15 bp, Homo sapiens
ctgatcactgatcaa

SEQ ID NO: 980066 - DNA, 15 bp, Homo sapiens
tgatcactgatcaat

SEQ ID NO: 980067 - DNA, 15 bp, Homo sapiens
gatcactgatcaatt

SEQ ID NO: 980068 - DNA, 15 bp, Homo sapiens
atcactgatcaatta

SEQ ID NO: 980069 - DNA, 15 bp, Homo sapiens
tcactgatcaattat

SEQ ID NO: 980070 - DNA, 15 bp, Homo sapiens
cactgatcaattatt

SEQ ID NO: 980071 - DNA, 15 bp, Homo sapiens
actgatcaattatta

SEQ ID NO: 980072 - DNA, 15 bp, Homo sapiens
ctgatcaattattaa

SEQ ID NO: 980073 - DNA, 15 bp, Homo sapiens
tgatcaattattaat

SEQ ID NO: 980074 - DNA, 15 bp, Homo sapiens
gatcaattattaatc

SEQ ID NO: 980075 - DNA, 15 bp, Homo sapiens
atcaattattaatca

SEQ ID NO: 980076 - DNA, 15 bp, Homo sapiens
tcaattattaatcaa

SEQ ID NO: 980077 - DNA, 15 bp, Homo sapiens
caattattaatcaat

SEQ ID NO: 980078 - DNA, 15 bp, Homo sapiens
aattattaatcaatg

SEQ ID NO: 980079 - DNA, 15 bp, Homo sapiens
attattaatcaatga

SEQ ID NO: 980080 - DNA, 15 bp, Homo sapiens
ttattaatcaatgat

SEQ ID NO: 980081 - DNA, 15 bp, Homo sapiens
tattaatcaatgatc

SEQ ID NO: 980082 - DNA, 15 bp, Homo sapiens
attaatcaatgatca

SEQ ID NO: 980083 - DNA, 15 bp, Homo sapiens
ttaatcaatgatcac

SEQ ID NO: 980084 - DNA, 15 bp, Homo sapiens
taatcaatgatcact

SEQ ID NO: 980085 - DNA, 15 bp, Homo sapiens
aatcaatgatcactg

SEQ ID NO: 980086 - DNA, 15 bp, Homo sapiens
atcaatgatcactga

SEQ ID NO: 980087 - DNA, 15 bp, Homo sapiens
tcaatgatcactgat

SEQ ID NO: 980088 - DNA, 15 bp, Homo sapiens
caatgatcactgata

SEQ ID NO: 980089 - DNA, 15 bp, Homo sapiens
aatgatcactgataa

SEQ ID NO: 980090 - DNA, 15 bp, Homo sapiens
atgatcactgataac

SEQ ID NO: 980091 - DNA, 15 bp, Homo sapiens
tgatcactgataact

SEQ ID NO: 980092 - DNA, 15 bp, Homo sapiens
gatcactgataacta

SEQ ID NO: 980093 - DNA, 15 bp, Homo sapiens
atcactgataactat

SEQ ID NO: 980094 - DNA, 15 bp, Homo sapiens
tcactgataactata

SEQ ID NO: 980095 - DNA, 15 bp, Homo sapiens
cactgataactataa

SEQ ID NO: 980096 - DNA, 15 bp, Homo sapiens
actgataactataaa

SEQ ID NO: 980097 - DNA, 15 bp, Homo sapiens
ctgataactataaac

SEQ ID NO: 980098 - DNA, 15 bp, Homo sapiens
tgataactataaact

SEQ ID NO: 980099 - DNA, 15 bp, Homo sapiens
gataactataaactc

SEQ ID NO: 980100 - DNA, 15 bp, Homo sapiens
ataactataaactca

SEQ ID NO: 980101 - DNA, 15 bp, Homo sapiens
taactataaactcaa

SEQ ID NO: 980102 - DNA, 15 bp, Homo sapiens
aactataaactcaaa

SEQ ID NO: 980103 - DNA, 15 bp, Homo sapiens
actataaactcaaaa

SEQ ID NO: 980104 - DNA, 15 bp, Homo sapiens
ctataaactcaaaaa

SEQ ID NO: 980105 - DNA, 15 bp, Homo sapiens
tataaactcaaaaac

SEQ ID NO: 980106 - DNA, 15 bp, Homo sapiens
ataaactcaaaaaca

SEQ ID NO: 980107 - DNA, 15 bp, Homo sapiens
taaactcaaaaacaa

SEQ ID NO: 980108 - DNA, 15 bp, Homo sapiens
aaactcaaaaacaaa

SEQ ID NO: 980109 - DNA, 15 bp, Homo sapiens
aactcaaaaacaaaa

SEQ ID NO: 980110 - DNA, 15 bp, Homo sapiens
actcaaaaacaaaat

SEQ ID NO: 980111 - DNA, 15 bp, Homo sapiens
ctcaaaaacaaaatc

SEQ ID NO: 980112 - DNA, 15 bp, Homo sapiens
tcaaaaacaaaatca

SEQ ID NO: 980113 - DNA, 15 bp, Homo sapiens
caaaaacaaaatcat

SEQ ID NO: 980114 - DNA, 15 bp, Homo sapiens
aaaaacaaaatcatg

SEQ ID NO: 980115 - DNA, 15 bp, Homo sapiens
aaaacaaaatcatgt

SEQ ID NO: 980116 - DNA, 15 bp, Homo sapiens
aaacaaaatcatgtg

SEQ ID NO: 980117 - DNA, 15 bp, Homo sapiens
aacaaaatcatgtgg

SEQ ID NO: 980118 - DNA, 15 bp, Homo sapiens
acaaaatcatgtggg

SEQ ID NO: 980119 - DNA, 15 bp, Homo sapiens
caaaatcatgtgggg

SEQ ID NO: 980120 - DNA, 15 bp, Homo sapiens
aaaatcatgtgggga

SEQ ID NO: 980121 - DNA, 15 bp, Homo sapiens
aaatcatgtggggat

SEQ ID NO: 980122 - DNA, 15 bp, Homo sapiens
aatcatgtggggatt

SEQ ID NO: 980123 - DNA, 15 bp, Homo sapiens
atcatgtggggatta

SEQ ID NO: 980124 - DNA, 15 bp, Homo sapiens
tcatgtggggattaa

SEQ ID NO: 980125 - DNA, 15 bp, Homo sapiens
catgtggggattaag

SEQ ID NO: 980126 - DNA, 15 bp, Homo sapiens
atgtggggattaaga

SEQ ID NO: 980127 - DNA, 15 bp, Homo sapiens
tgtggggattaagag

SEQ ID NO: 980128 - DNA, 15 bp, Homo sapiens
gtggggattaagaga

SEQ ID NO: 980129 - DNA, 15 bp, Homo sapiens
tggggattaagagaa

SEQ ID NO: 980130 - DNA, 15 bp, Homo sapiens
ggggattaagagaaa

SEQ ID NO: 980131 - DNA, 15 bp, Homo sapiens
gggattaagagaaat

SEQ ID NO: 980132 - DNA, 15 bp, Homo sapiens
ggattaagagaaatg

SEQ ID NO: 980133 - DNA, 15 bp, Homo sapiens
gattaagagaaatgt

SEQ ID NO: 980134 - DNA, 15 bp, Homo sapiens
attaagagaaatgta

SEQ ID NO: 980135 - DNA, 15 bp, Homo sapiens
ttaagagaaatgtat

SEQ ID NO: 980136 - DNA, 15 bp, Homo sapiens
taagagaaatgtatc

SEQ ID NO: 980137 - DNA, 15 bp, Homo sapiens
aagagaaatgtatca

SEQ ID NO: 980138 - DNA, 15 bp, Homo sapiens
agagaaatgtatcag

SEQ ID NO: 980139 - DNA, 15 bp, Homo sapiens
gagaaatgtatcagt

SEQ ID NO: 980140 - DNA, 15 bp, Homo sapiens
agaaatgtatcagtt

SEQ ID NO: 980141 - DNA, 15 bp, Homo sapiens
gaaatgtatcagttt

SEQ ID NO: 980142 - DNA, 15 bp, Homo sapiens
aaatgtatcagtttt

SEQ ID NO: 980143 - DNA, 15 bp, Homo sapiens
aatgtatcagtttta

SEQ ID NO: 980144 - DNA, 15 bp, Homo sapiens
atgtatcagttttat

SEQ ID NO: 980145 - DNA, 15 bp, Homo sapiens
tgtatcagttttatg

SEQ ID NO: 980146 - DNA, 15 bp, Homo sapiens
gtatcagttttatgt

SEQ ID NO: 980147 - DNA, 15 bp, Homo sapiens
tatcagttttatgtt

SEQ ID NO: 980148 - DNA, 15 bp, Homo sapiens
atcagttttatgttg

SEQ ID NO: 980149 - DNA, 15 bp, Homo sapiens
tcagttttatgttgt

SEQ ID NO: 980150 - DNA, 15 bp, Homo sapiens
cagttttatgttgta

SEQ ID NO: 980151 - DNA, 15 bp, Homo sapiens
agttttatgttgtat

SEQ ID NO: 980152 - DNA, 15 bp, Homo sapiens
gttttatgttgtatt

SEQ ID NO: 980153 - DNA, 15 bp, Homo sapiens
ttttatgttgtattt

SEQ ID NO: 980154 - DNA, 15 bp, Homo sapiens
tttatgttgtatttc

SEQ ID NO: 980155 - DNA, 15 bp, Homo sapiens
ttatgttgtatttct

SEQ ID NO: 980156 - DNA, 15 bp, Homo sapiens
tatgttgtatttctg

SEQ ID NO: 980157 - DNA, 15 bp, Homo sapiens
atgttgtatttctgg

SEQ ID NO: 980158 - DNA, 15 bp, Homo sapiens
tgttgtatttctggt

SEQ ID NO: 980159 - DNA, 15 bp, Homo sapiens
gttgtatttctggtc

SEQ ID NO: 980160 - DNA, 15 bp, Homo sapiens
ttgtatttctggtcc

SEQ ID NO: 980161 - DNA, 15 bp, Homo sapiens
tgtatttctggtccc

SEQ ID NO: 980162 - DNA, 15 bp, Homo sapiens
gtatttctggtccct

SEQ ID NO: 980163 - DNA, 15 bp, Homo sapiens
tatttctggtccctg

SEQ ID NO: 980164 - DNA, 15 bp, Homo sapiens
atttctggtccctga

SEQ ID NO: 980165 - DNA, 15 bp, Homo sapiens
tttctggtccctgat

SEQ ID NO: 980166 - DNA, 15 bp, Homo sapiens
ttctggtccctgata

SEQ ID NO: 980167 - DNA, 15 bp, Homo sapiens
tctggtccctgatac

SEQ ID NO: 980168 - DNA, 15 bp, Homo sapiens
ctggtccctgatact

SEQ ID NO: 980169 - DNA, 15 bp, Homo sapiens
tggtccctgatactg

SEQ ID NO: 980170 - DNA, 15 bp, Homo sapiens
ggtccctgatactgg

SEQ ID NO: 980171 - DNA, 15 bp, Homo sapiens
gtccctgatactggc

SEQ ID NO: 980172 - DNA, 15 bp, Homo sapiens
tccctgatactggct

SEQ ID NO: 980173 - DNA, 15 bp, Homo sapiens
ccctgatactggctc

SEQ ID NO: 980174 - DNA, 15 bp, Homo sapiens
cctgatactggctca

SEQ ID NO: 980175 - DNA, 15 bp, Homo sapiens
ctgatactggctcag

SEQ ID NO: 980176 - DNA, 15 bp, Homo sapiens
tgatactggctcagg

SEQ ID NO: 980177 - DNA, 15 bp, Homo sapiens
gatactggctcaggt

SEQ ID NO: 980178 - DNA, 15 bp, Homo sapiens
atactggctcaggta

SEQ ID NO: 980179 - DNA, 15 bp, Homo sapiens
tactggctcaggtaa

SEQ ID NO: 980180 - DNA, 15 bp, Homo sapiens
actggctcaggtaat

SEQ ID NO: 980181 - DNA, 15 bp, Homo sapiens
ctggctcaggtaatg

SEQ ID NO: 980182 - DNA, 15 bp, Homo sapiens
tggctcaggtaatgc

SEQ ID NO: 980183 - DNA, 15 bp, Homo sapiens
ggctcaggtaatgcc

SEQ ID NO: 980184 - DNA, 15 bp, Homo sapiens
gctcaggtaatgcca

SEQ ID NO: 980185 - DNA, 15 bp, Homo sapiens
ctcaggtaatgccac

SEQ ID NO: 980186 - DNA, 15 bp, Homo sapiens
tcaggtaatgccact

SEQ ID NO: 980187 - DNA, 15 bp, Homo sapiens
caggtaatgccacta

SEQ ID NO: 980188 - DNA, 15 bp, Homo sapiens
aggtaatgccactat

SEQ ID NO: 980189 - DNA, 15 bp, Homo sapiens
ggtaatgccactatt

SEQ ID NO: 980190 - DNA, 15 bp, Homo sapiens
gtaatgccactattg

SEQ ID NO: 980191 - DNA, 15 bp, Homo sapiens
taatgccactattgt

SEQ ID NO: 980192 - DNA, 15 bp, Homo sapiens
aatgccactattgtc

SEQ ID NO: 980193 - DNA, 15 bp, Homo sapiens
atgccactattgtca

SEQ ID NO: 980194 - DNA, 15 bp, Homo sapiens
tgccactattgtcaa

SEQ ID NO: 980195 - DNA, 15 bp, Homo sapiens
gccactattgtcaag

SEQ ID NO: 980196 - DNA, 15 bp, Homo sapiens
ccactattgtcaaga

SEQ ID NO: 980197 - DNA, 15 bp, Homo sapiens
cactattgtcaagaa

SEQ ID NO: 980198 - DNA, 15 bp, Homo sapiens
actattgtcaagaag

SEQ ID NO: 980199 - DNA, 15 bp, Homo sapiens
ctattgtcaagaaga

SEQ ID NO: 980200 - DNA, 15 bp, Homo sapiens
tattgtcaagaagat

SEQ ID NO: 980201 - DNA, 15 bp, Homo sapiens
attgtcaagaagata

SEQ ID NO: 980202 - DNA, 15 bp, Homo sapiens
ttgtcaagaagatac

SEQ ID NO: 980203 - DNA, 15 bp, Homo sapiens
tgtcaagaagatacc

SEQ ID NO: 980204 - DNA, 15 bp, Homo sapiens
gtcaagaagatacca

SEQ ID NO: 980205 - DNA, 15 bp, Homo sapiens
tcaagaagataccac

SEQ ID NO: 980206 - DNA, 15 bp, Homo sapiens
caagaagataccact

SEQ ID NO: 980207 - DNA, 15 bp, Homo sapiens
aagaagataccactt

SEQ ID NO: 980208 - DNA, 15 bp, Homo sapiens
agaagataccacttg

SEQ ID NO: 980209 - DNA, 15 bp, Homo sapiens
gaagataccacttgt

SEQ ID NO: 980210 - DNA, 15 bp, Homo sapiens
aagataccacttgta

SEQ ID NO: 980211 - DNA, 15 bp, Homo sapiens
agataccacttgtaa

SEQ ID NO: 980212 - DNA, 15 bp, Homo sapiens
gataccacttgtaaa

SEQ ID NO: 980213 - DNA, 15 bp, Homo sapiens
ataccacttgtaaag

SEQ ID NO: 980214 - DNA, 15 bp, Homo sapiens
taccacttgtaaagt

SEQ ID NO: 980215 - DNA, 15 bp, Homo sapiens
accacttgtaaagta

SEQ ID NO: 980216 - DNA, 15 bp, Homo sapiens
ccacttgtaaagtag

SEQ ID NO: 980217 - DNA, 15 bp, Homo sapiens
cacttgtaaagtaga

SEQ ID NO: 980218 - DNA, 15 bp, Homo sapiens
acttgtaaagtagat

SEQ ID NO: 980219 - DNA, 15 bp, Homo sapiens
cttgtaaagtagatt

SEQ ID NO: 980220 - DNA, 15 bp, Homo sapiens
ttgtaaagtagattt

SEQ ID NO: 980221 - DNA, 15 bp, Homo sapiens
tgtaaagtagattta

SEQ ID NO: 980222 - DNA, 15 bp, Homo sapiens
gtaaagtagatttaa

SEQ ID NO: 980223 - DNA, 15 bp, Homo sapiens
taaagtagatttaat

SEQ ID NO: 980224 - DNA, 15 bp, Homo sapiens
aaagtagatttaatt

SEQ ID NO: 980225 - DNA, 15 bp, Homo sapiens
aagtagatttaattt

SEQ ID NO: 980226 - DNA, 15 bp, Homo sapiens
agtagatttaatttt

SEQ ID NO: 980227 - DNA, 15 bp, Homo sapiens
gtagatttaattttc

SEQ ID NO: 980228 - DNA, 15 bp, Homo sapiens
tagatttaattttca

SEQ ID NO: 980229 - DNA, 15 bp, Homo sapiens
agatttaattttcat

SEQ ID NO: 980230 - DNA, 15 bp, Homo sapiens
gatttaattttcatt

SEQ ID NO: 980231 - DNA, 15 bp, Homo sapiens
atttaattttcatta

SEQ ID NO: 980232 - DNA, 15 bp, Homo sapiens
tttaattttcattat

SEQ ID NO: 980233 - DNA, 15 bp, Homo sapiens
ttaattttcattata

SEQ ID NO: 980234 - DNA, 15 bp, Homo sapiens
taattttcattatat

SEQ ID NO: 980235 - DNA, 15 bp, Homo sapiens
aattttcattatatt

SEQ ID NO: 980236 - DNA, 15 bp, Homo sapiens
attttcattatattt

SEQ ID NO: 980237 - DNA, 15 bp, Homo sapiens
ttttcattatatttt

SEQ ID NO: 980238 - DNA, 15 bp, Homo sapiens
tttcattatatttta

SEQ ID NO: 980239 - DNA, 15 bp, Homo sapiens
ttcattatattttac

SEQ ID NO: 980240 - DNA, 15 bp, Homo sapiens
tcattatattttacc

SEQ ID NO: 980241 - DNA, 15 bp, Homo sapiens
cattatattttacca

SEQ ID NO: 980242 - DNA, 15 bp, Homo sapiens
attatattttaccat

SEQ ID NO: 980243 - DNA, 15 bp, Homo sapiens
ttatattttaccata

SEQ ID NO: 980244 - DNA, 15 bp, Homo sapiens
tatattttaccatat

SEQ ID NO: 980245 - DNA, 15 bp, Homo sapiens
atattttaccatatg

SEQ ID NO: 980246 - DNA, 15 bp, Homo sapiens
tattttaccatatgc

SEQ ID NO: 980247 - DNA, 15 bp, Homo sapiens
attttaccatatgct

SEQ ID NO: 980248 - DNA, 15 bp, Homo sapiens
ttttaccatatgctt

SEQ ID NO: 980249 - DNA, 15 bp, Homo sapiens
tttaccatatgcttc

SEQ ID NO: 980250 - DNA, 15 bp, Homo sapiens
ttaccatatgcttct

SEQ ID NO: 980251 - DNA, 15 bp, Homo sapiens
taccatatgcttctc

SEQ ID NO: 980252 - DNA, 15 bp, Homo sapiens
accatatgcttctcc

SEQ ID NO: 980253 - DNA, 15 bp, Homo sapiens
ccatatgcttctcca

SEQ ID NO: 980254 - DNA, 15 bp, Homo sapiens
catatgcttctccat

SEQ ID NO: 980255 - DNA, 15 bp, Homo sapiens
atatgcttctccatt

SEQ ID NO: 980256 - DNA, 15 bp, Homo sapiens
tatgcttctccattc

SEQ ID NO: 980257 - DNA, 15 bp, Homo sapiens
atgcttctccattca

SEQ ID NO: 980258 - DNA, 15 bp, Homo sapiens
tgcttctccattcat

SEQ ID NO: 980259 - DNA, 15 bp, Homo sapiens
gcttctccattcatg

SEQ ID NO: 980260 - DNA, 15 bp, Homo sapiens
cttctccattcatga

SEQ ID NO: 980261 - DNA, 15 bp, Homo sapiens
ttctccattcatgac

SEQ ID NO: 980262 - DNA, 15 bp, Homo sapiens
tctccattcatgaca

SEQ ID NO: 980263 - DNA, 15 bp, Homo sapiens
ctccattcatgacat

SEQ ID NO: 980264 - DNA, 15 bp, Homo sapiens
tccattcatgacatc

SEQ ID NO: 980265 - DNA, 15 bp, Homo sapiens
ccattcatgacatct

SEQ ID NO: 980266 - DNA, 15 bp, Homo sapiens
cattcatgacatctc

SEQ ID NO: 980267 - DNA, 15 bp, Homo sapiens
attcatgacatctct

SEQ ID NO: 980268 - DNA, 15 bp, Homo sapiens
ttcatgacatctctt

SEQ ID NO: 980269 - DNA, 15 bp, Homo sapiens
tcatgacatctcttg

SEQ ID NO: 980270 - DNA, 15 bp, Homo sapiens
catgacatctcttga

SEQ ID NO: 980271 - DNA, 15 bp, Homo sapiens
atgacatctcttgag

SEQ ID NO: 980272 - DNA, 15 bp, Homo sapiens
tgacatctcttgaga

SEQ ID NO: 980273 - DNA, 15 bp, Homo sapiens
gacatctcttgagat

SEQ ID NO: 980274 - DNA, 15 bp, Homo sapiens
acatctcttgagatg

SEQ ID NO: 980275 - DNA, 15 bp, Homo sapiens
catctcttgagatgt

SEQ ID NO: 980276 - DNA, 15 bp, Homo sapiens
atctcttgagatgtt

SEQ ID NO: 980277 - DNA, 15 bp, Homo sapiens
tctcttgagatgttg

SEQ ID NO: 980278 - DNA, 15 bp, Homo sapiens
ctcttgagatgttgt

SEQ ID NO: 980279 - DNA, 15 bp, Homo sapiens
tcttgagatgttgtg

SEQ ID NO: 980280 - DNA, 15 bp, Homo sapiens
cttgagatgttgtgg

SEQ ID NO: 980281 - DNA, 15 bp, Homo sapiens
ttgagatgttgtggt

SEQ ID NO: 980282 - DNA, 15 bp, Homo sapiens
tgagatgttgtggtt

SEQ ID NO: 980283 - DNA, 15 bp, Homo sapiens
gagatgttgtggttt

SEQ ID NO: 980284 - DNA, 15 bp, Homo sapiens
agatgttgtggttta

SEQ ID NO: 980285 - DNA, 15 bp, Homo sapiens
gatgttgtggtttat

SEQ ID NO: 980286 - DNA, 15 bp, Homo sapiens
atgttgtggtttata

SEQ ID NO: 980287 - DNA, 15 bp, Homo sapiens
tgttgtggtttatac

SEQ ID NO: 980288 - DNA, 15 bp, Homo sapiens
gttgtggtttatact

SEQ ID NO: 980289 - DNA, 15 bp, Homo sapiens
ttgtggtttatactt

SEQ ID NO: 980290 - DNA, 15 bp, Homo sapiens
tgtggtttatacttt

SEQ ID NO: 980291 - DNA, 15 bp, Homo sapiens
gtggtttatactttc

SEQ ID NO: 980292 - DNA, 15 bp, Homo sapiens
tggtttatactttca

SEQ ID NO: 980293 - DNA, 15 bp, Homo sapiens
ggtttatactttcag

SEQ ID NO: 980294 - DNA, 15 bp, Homo sapiens
gtttatactttcagt

SEQ ID NO: 980295 - DNA, 15 bp, Homo sapiens
tttatactttcagtt

SEQ ID NO: 980296 - DNA, 15 bp, Homo sapiens
ttatactttcagttt

SEQ ID NO: 980297 - DNA, 15 bp, Homo sapiens
tatactttcagtttt

SEQ ID NO: 980298 - DNA, 15 bp, Homo sapiens
atactttcagttttt

SEQ ID NO: 980299 - DNA, 15 bp, Homo sapiens
tactttcagtttttc

SEQ ID NO: 980300 - DNA, 15 bp, Homo sapiens
actttcagtttttct

SEQ ID NO: 980301 - DNA, 15 bp, Homo sapiens
ctttcagtttttctc

SEQ ID NO: 980302 - DNA, 15 bp, Homo sapiens
tttcagtttttctcc

SEQ ID NO: 980303 - DNA, 15 bp, Homo sapiens
ttcagtttttctcca

SEQ ID NO: 980304 - DNA, 15 bp, Homo sapiens
tcagtttttctccag

SEQ ID NO: 980305 - DNA, 15 bp, Homo sapiens
cagtttttctccagt

SEQ ID NO: 980306 - DNA, 15 bp, Homo sapiens
agtttttctccagtc

SEQ ID NO: 980307 - DNA, 15 bp, Homo sapiens
gtttttctccagtcc

SEQ ID NO: 980308 - DNA, 15 bp, Homo sapiens
tttttctccagtcca

SEQ ID NO: 980309 - DNA, 15 bp, Homo sapiens
ttttctccagtccat

SEQ ID NO: 980310 - DNA, 15 bp, Homo sapiens
tttctccagtccatc

SEQ ID NO: 980311 - DNA, 15 bp, Homo sapiens
ttctccagtccatcc

SEQ ID NO: 980312 - DNA, 15 bp, Homo sapiens
tctccagtccatccg

SEQ ID NO: 980313 - DNA, 15 bp, Homo sapiens
ctccagtccatccgc

SEQ ID NO: 980314 - DNA, 15 bp, Homo sapiens
tccagtccatccgca

SEQ ID NO: 980315 - DNA, 15 bp, Homo sapiens
ccagtccatccgcaa

SEQ ID NO: 980316 - DNA, 15 bp, Homo sapiens
cagtccatccgcaaa

SEQ ID NO: 980317 - DNA, 15 bp, Homo sapiens
agtccatccgcaaat

SEQ ID NO: 980318 - DNA, 15 bp, Homo sapiens
gtccatccgcaaata

SEQ ID NO: 980319 - DNA, 15 bp, Homo sapiens
tccatccgcaaatat

SEQ ID NO: 980320 - DNA, 15 bp, Homo sapiens
ccatccgcaaatatc

SEQ ID NO: 980321 - DNA, 15 bp, Homo sapiens
catccgcaaatatca

SEQ ID NO: 980322 - DNA, 15 bp, Homo sapiens
atccgcaaatatcag

SEQ ID NO: 980323 - DNA, 15 bp, Homo sapiens
tccgcaaatatcagg

SEQ ID NO: 980324 - DNA, 15 bp, Homo sapiens
ccgcaaatatcaggc

SEQ ID NO: 980325 - DNA, 15 bp, Homo sapiens
cgcaaatatcaggca

SEQ ID NO: 980326 - DNA, 15 bp, Homo sapiens
gcaaatatcaggcat

SEQ ID NO: 980327 - DNA, 15 bp, Homo sapiens
caaatatcaggcatc

SEQ ID NO: 980328 - DNA, 15 bp, Homo sapiens
aaatatcaggcatct

SEQ ID NO: 980329 - DNA, 15 bp, Homo sapiens
aatatcaggcatcta

SEQ ID NO: 980330 - DNA, 15 bp, Homo sapiens
atatcaggcatctac

SEQ ID NO: 980331 - DNA, 15 bp, Homo sapiens
tatcaggcatctact

SEQ ID NO: 980332 - DNA, 15 bp, Homo sapiens
atcaggcatctactg

SEQ ID NO: 980333 - DNA, 15 bp, Homo sapiens
tcaggcatctactgt

SEQ ID NO: 980334 - DNA, 15 bp, Homo sapiens
caggcatctactgtg

SEQ ID NO: 980335 - DNA, 15 bp, Homo sapiens
aggcatctactgtgt

SEQ ID NO: 980336 - DNA, 15 bp, Homo sapiens
ggcatctactgtgtt

SEQ ID NO: 980337 - DNA, 15 bp, Homo sapiens
gcatctactgtgttc

SEQ ID NO: 980338 - DNA, 15 bp, Homo sapiens
catctactgtgttcc

SEQ ID NO: 980339 - DNA, 15 bp, Homo sapiens
atctactgtgttcca

SEQ ID NO: 980340 - DNA, 15 bp, Homo sapiens
tctactgtgttccaa

SEQ ID NO: 980341 - DNA, 15 bp, Homo sapiens
ctactgtgttccaag

SEQ ID NO: 980342 - DNA, 15 bp, Homo sapiens
tactgtgttccaaga

SEQ ID NO: 980343 - DNA, 15 bp, Homo sapiens
actgtgttccaagat

SEQ ID NO: 980344 - DNA, 15 bp, Homo sapiens
ctgtgttccaagata

SEQ ID NO: 980345 - DNA, 15 bp, Homo sapiens
tgtgttccaagatat

SEQ ID NO: 980346 - DNA, 15 bp, Homo sapiens
gtgttccaagatatt

SEQ ID NO: 980347 - DNA, 15 bp, Homo sapiens
tgttccaagatatta

SEQ ID NO: 980348 - DNA, 15 bp, Homo sapiens
gttccaagatattaa

SEQ ID NO: 980349 - DNA, 15 bp, Homo sapiens
ttccaagatattaaa

SEQ ID NO: 980350 - DNA, 15 bp, Homo sapiens
tccaagatattaaag

SEQ ID NO: 980351 - DNA, 15 bp, Homo sapiens
ccaagatattaaaga

SEQ ID NO: 980352 - DNA, 15 bp, Homo sapiens
caagatattaaagaa

SEQ ID NO: 980353 - DNA, 15 bp, Homo sapiens
aagatattaaagaaa

SEQ ID NO: 980354 - DNA, 15 bp, Homo sapiens
agatattaaagaaat

SEQ ID NO: 980355 - DNA, 15 bp, Homo sapiens
gatattaaagaaatc

SEQ ID NO: 980356 - DNA, 15 bp, Homo sapiens
atattaaagaaatca

SEQ ID NO: 980357 - DNA, 15 bp, Homo sapiens
tattaaagaaatcat

SEQ ID NO: 980358 - DNA, 15 bp, Homo sapiens
attaaagaaatcatc

SEQ ID NO: 980359 - DNA, 15 bp, Homo sapiens
ttaaagaaatcatca

SEQ ID NO: 980360 - DNA, 15 bp, Homo sapiens
taaagaaatcatcat

SEQ ID NO: 980361 - DNA, 15 bp, Homo sapiens
aaagaaatcatcatg

SEQ ID NO: 980362 - DNA, 15 bp, Homo sapiens
aagaaatcatcatga

SEQ ID NO: 980363 - DNA, 15 bp, Homo sapiens
agaaatcatcatgac

SEQ ID NO: 980364 - DNA, 15 bp, Homo sapiens
gaaatcatcatgact

SEQ ID NO: 980365 - DNA, 15 bp, Homo sapiens
aaatcatcatgactt

SEQ ID NO: 980366 - DNA, 15 bp, Homo sapiens
aatcatcatgactta

SEQ ID NO: 980367 - DNA, 15 bp, Homo sapiens
atcatcatgacttag

SEQ ID NO: 980368 - DNA, 15 bp, Homo sapiens
tcatcatgacttagc

SEQ ID NO: 980369 - DNA, 15 bp, Homo sapiens
catcatgacttagcc

SEQ ID NO: 980370 - DNA, 15 bp, Homo sapiens
atcatgacttagcct

SEQ ID NO: 980371 - DNA, 15 bp, Homo sapiens
tcatgacttagcctc

SEQ ID NO: 980372 - DNA, 15 bp, Homo sapiens
catgacttagcctca

SEQ ID NO: 980373 - DNA, 15 bp, Homo sapiens
atgacttagcctcat

SEQ ID NO: 980374 - DNA, 15 bp, Homo sapiens
tgacttagcctcatc

SEQ ID NO: 980375 - DNA, 15 bp, Homo sapiens
gacttagcctcatca

SEQ ID NO: 980376 - DNA, 15 bp, Homo sapiens
acttagcctcatcaa

SEQ ID NO: 980377 - DNA, 15 bp, Homo sapiens
cttagcctcatcaac

SEQ ID NO: 980378 - DNA, 15 bp, Homo sapiens
ttagcctcatcaaca

SEQ ID NO: 980379 - DNA, 15 bp, Homo sapiens
tagcctcatcaacag

SEQ ID NO: 980380 - DNA, 15 bp, Homo sapiens
agcctcatcaacagc

SEQ ID NO: 980381 - DNA, 15 bp, Homo sapiens
gcctcatcaacagca

SEQ ID NO: 980382 - DNA, 15 bp, Homo sapiens
cctcatcaacagcat

SEQ ID NO: 980383 - DNA, 15 bp, Homo sapiens
ctcatcaacagcatt

SEQ ID NO: 980384 - DNA, 15 bp, Homo sapiens
tcatcaacagcattg

SEQ ID NO: 980385 - DNA, 15 bp, Homo sapiens
catcaacagcattgc

SEQ ID NO: 980386 - DNA, 15 bp, Homo sapiens
atcaacagcattgct

SEQ ID NO: 980387 - DNA, 15 bp, Homo sapiens
tcaacagcattgcta

SEQ ID NO: 980388 - DNA, 15 bp, Homo sapiens
caacagcattgctag

SEQ ID NO: 980389 - DNA, 15 bp, Homo sapiens
aacagcattgctaga

SEQ ID NO: 980390 - DNA, 15 bp, Homo sapiens
acagcattgctagat

SEQ ID NO: 980391 - DNA, 15 bp, Homo sapiens
cagcattgctagatc

SEQ ID NO: 980392 - DNA, 15 bp, Homo sapiens
agcattgctagatct

SEQ ID NO: 980393 - DNA, 15 bp, Homo sapiens
gcattgctagatctg

SEQ ID NO: 980394 - DNA, 15 bp, Homo sapiens
cattgctagatctgg

SEQ ID NO: 980395 - DNA, 15 bp, Homo sapiens
attgctagatctggg

SEQ ID NO: 980396 - DNA, 15 bp, Homo sapiens
ttgctagatctggga

SEQ ID NO: 980397 - DNA, 15 bp, Homo sapiens
tgctagatctgggat

SEQ ID NO: 980398 - DNA, 15 bp, Homo sapiens
gctagatctgggatg

SEQ ID NO: 980399 - DNA, 15 bp, Homo sapiens
ctagatctgggatgg

SEQ ID NO: 980400 - DNA, 15 bp, Homo sapiens
tagatctgggatgga

SEQ ID NO: 980401 - DNA, 15 bp, Homo sapiens
agatctgggatggaa

SEQ ID NO: 980402 - DNA, 15 bp, Homo sapiens
gatctgggatggaaa

SEQ ID NO: 980403 - DNA, 15 bp, Homo sapiens
atctgggatggaaag

SEQ ID NO: 980404 - DNA, 15 bp, Homo sapiens
tctgggatggaaagg

SEQ ID NO: 980405 - DNA, 15 bp, Homo sapiens
ctgggatggaaagga

SEQ ID NO: 980406 - DNA, 15 bp, Homo sapiens
tgggatggaaaggaa

SEQ ID NO: 980407 - DNA, 15 bp, Homo sapiens
gggatggaaaggaag

SEQ ID NO: 980408 - DNA, 15 bp, Homo sapiens
ggatggaaaggaaga

SEQ ID NO: 980409 - DNA, 15 bp, Homo sapiens
gatggaaaggaagag

SEQ ID NO: 980410 - DNA, 15 bp, Homo sapiens
atggaaaggaagagt

SEQ ID NO: 980411 - DNA, 15 bp, Homo sapiens
tggaaaggaagagta

SEQ ID NO: 980412 - DNA, 15 bp, Homo sapiens
ggaaaggaagagtat

SEQ ID NO: 980413 - DNA, 15 bp, Homo sapiens
gaaaggaagagtata

SEQ ID NO: 980414 - DNA, 15 bp, Homo sapiens
aaaggaagagtataa

SEQ ID NO: 980415 - DNA, 15 bp, Homo sapiens
aaggaagagtataat

SEQ ID NO: 980416 - DNA, 15 bp, Homo sapiens
aggaagagtataatc

SEQ ID NO: 980417 - DNA, 15 bp, Homo sapiens
ggaagagtataatcc

SEQ ID NO: 980418 - DNA, 15 bp, Homo sapiens
gaagagtataatcct

SEQ ID NO: 980419 - DNA, 15 bp, Homo sapiens
aagagtataatcctg

SEQ ID NO: 980420 - DNA, 15 bp, Homo sapiens
agagtataatcctgg

SEQ ID NO: 980421 - DNA, 15 bp, Homo sapiens
gagtataatcctggc

SEQ ID NO: 980422 - DNA, 15 bp, Homo sapiens
agtataatcctggca

SEQ ID NO: 980423 - DNA, 15 bp, Homo sapiens
gtataatcctggcag

SEQ ID NO: 980424 - DNA, 15 bp, Homo sapiens
tataatcctggcagt

SEQ ID NO: 980425 - DNA, 15 bp, Homo sapiens
ataatcctggcagtc

SEQ ID NO: 980426 - DNA, 15 bp, Homo sapiens
taatcctggcagtca

SEQ ID NO: 980427 - DNA, 15 bp, Homo sapiens
aatcctggcagtcag

SEQ ID NO: 980428 - DNA, 15 bp, Homo sapiens
atcctggcagtcagg

SEQ ID NO: 980429 - DNA, 15 bp, Homo sapiens
tcctggcagtcagga

SEQ ID NO: 980430 - DNA, 15 bp, Homo sapiens
cctggcagtcaggaa

SEQ ID NO: 980431 - DNA, 15 bp, Homo sapiens
ctggcagtcaggaag

SEQ ID NO: 980432 - DNA, 15 bp, Homo sapiens
tggcagtcaggaaga

SEQ ID NO: 980433 - DNA, 15 bp, Homo sapiens
ggcagtcaggaagaa

SEQ ID NO: 980434 - DNA, 15 bp, Homo sapiens
gcagtcaggaagaag

SEQ ID NO: 980435 - DNA, 15 bp, Homo sapiens
cagtcaggaagaagg

SEQ ID NO: 980436 - DNA, 15 bp, Homo sapiens
agtcaggaagaaggc

SEQ ID NO: 980437 - DNA, 15 bp, Homo sapiens
gtcaggaagaaggca

SEQ ID NO: 980438 - DNA, 15 bp, Homo sapiens
tcaggaagaaggcag

SEQ ID NO: 980439 - DNA, 15 bp, Homo sapiens
caggaagaaggcagc

SEQ ID NO: 980440 - DNA, 15 bp, Homo sapiens
aggaagaaggcagca

SEQ ID NO: 980441 - DNA, 15 bp, Homo sapiens
ggaagaaggcagcat

SEQ ID NO: 980442 - DNA, 15 bp, Homo sapiens
gaagaaggcagcata

SEQ ID NO: 980443 - DNA, 15 bp, Homo sapiens
aagaaggcagcataa

SEQ ID NO: 980444 - DNA, 15 bp, Homo sapiens
agaaggcagcataaa

SEQ ID NO: 980445 - DNA, 15 bp, Homo sapiens
gaaggcagcataaag

SEQ ID NO: 980446 - DNA, 15 bp, Homo sapiens
aaggcagcataaagt

SEQ ID NO: 980447 - DNA, 15 bp, Homo sapiens
aggcagcataaagta

SEQ ID NO: 980448 - DNA, 15 bp, Homo sapiens
ggcagcataaagtat

SEQ ID NO: 980449 - DNA, 15 bp, Homo sapiens
gcagcataaagtata

SEQ ID NO: 980450 - DNA, 15 bp, Homo sapiens
cagcataaagtataa

SEQ ID NO: 980451 - DNA, 15 bp, Homo sapiens
agcataaagtataag

SEQ ID NO: 980452 - DNA, 15 bp, Homo sapiens
gcataaagtataagt

SEQ ID NO: 980453 - DNA, 15 bp, Homo sapiens
cataaagtataagtt

SEQ ID NO: 980454 - DNA, 15 bp, Homo sapiens
ataaagtataagttt

SEQ ID NO: 980455 - DNA, 15 bp, Homo sapiens
taaagtataagtttc

SEQ ID NO: 980456 - DNA, 15 bp, Homo sapiens
aaagtataagtttct

SEQ ID NO: 980457 - DNA, 15 bp, Homo sapiens
aagtataagtttctg

SEQ ID NO: 980458 - DNA, 15 bp, Homo sapiens
agtataagtttctgc

SEQ ID NO: 980459 - DNA, 15 bp, Homo sapiens
gtataagtttctgct

SEQ ID NO: 980460 - DNA, 15 bp, Homo sapiens
tataagtttctgctt

SEQ ID NO: 980461 - DNA, 15 bp, Homo sapiens
ataagtttctgcttc

SEQ ID NO: 980462 - DNA, 15 bp, Homo sapiens
taagtttctgcttcc

SEQ ID NO: 980463 - DNA, 15 bp, Homo sapiens
aagtttctgcttcca

SEQ ID NO: 980464 - DNA, 15 bp, Homo sapiens
agtttctgcttccaa

SEQ ID NO: 980465 - DNA, 15 bp, Homo sapiens
gtttctgcttccaaa

SEQ ID NO: 980466 - DNA, 15 bp, Homo sapiens
tttctgcttccaaaa

SEQ ID NO: 980467 - DNA, 15 bp, Homo sapiens
ttctgcttccaaaaa

SEQ ID NO: 980468 - DNA, 15 bp, Homo sapiens
tctgcttccaaaaaa

SEQ ID NO: 980469 - DNA, 15 bp, Homo sapiens
ctgcttccaaaaaag

SEQ ID NO: 980470 - DNA, 15 bp, Homo sapiens
tgcttccaaaaaagg

SEQ ID NO: 980471 - DNA, 15 bp, Homo sapiens
gcttccaaaaaaggt

SEQ ID NO: 980472 - DNA, 15 bp, Homo sapiens
cttccaaaaaaggtc

SEQ ID NO: 980473 - DNA, 15 bp, Homo sapiens
ttccaaaaaaggtct

SEQ ID NO: 980474 - DNA, 15 bp, Homo sapiens
tccaaaaaaggtctc

SEQ ID NO: 980475 - DNA, 15 bp, Homo sapiens
ccaaaaaaggtctct

SEQ ID NO: 980476 - DNA, 15 bp, Homo sapiens
caaaaaaggtctctc

SEQ ID NO: 980477 - DNA, 15 bp, Homo sapiens
aaaaaaggtctctca

SEQ ID NO: 980478 - DNA, 15 bp, Homo sapiens
aaaaaggtctctcat

SEQ ID NO: 980479 - DNA, 15 bp, Homo sapiens
aaaaggtctctcatc

SEQ ID NO: 980480 - DNA, 15 bp, Homo sapiens
aaaggtctctcatca

SEQ ID NO: 980481 - DNA, 15 bp, Homo sapiens
aaggtctctcatcag

SEQ ID NO: 980482 - DNA, 15 bp, Homo sapiens
aggtctctcatcagc

SEQ ID NO: 980483 - DNA, 15 bp, Homo sapiens
ggtctctcatcagcc

SEQ ID NO: 980484 - DNA, 15 bp, Homo sapiens
gtctctcatcagcct

SEQ ID NO: 980485 - DNA, 15 bp, Homo sapiens
tctctcatcagcctg

SEQ ID NO: 980486 - DNA, 15 bp, Homo sapiens
ctctcatcagcctgt

SEQ ID NO: 980487 - DNA, 15 bp, Homo sapiens
tctcatcagcctgta

SEQ ID NO: 980488 - DNA, 15 bp, Homo sapiens
ctcatcagcctgtag

SEQ ID NO: 980489 - DNA, 15 bp, Homo sapiens
tcatcagcctgtagg

SEQ ID NO: 980490 - DNA, 15 bp, Homo sapiens
catcagcctgtaggg

SEQ ID NO: 980491 - DNA, 15 bp, Homo sapiens
atcagcctgtaggga

SEQ ID NO: 980492 - DNA, 15 bp, Homo sapiens
tcagcctgtagggag

SEQ ID NO: 980493 - DNA, 15 bp, Homo sapiens
cagcctgtagggagt

SEQ ID NO: 980494 - DNA, 15 bp, Homo sapiens
agcctgtagggagtg

SEQ ID NO: 980495 - DNA, 15 bp, Homo sapiens
gcctgtagggagtgt

SEQ ID NO: 980496 - DNA, 15 bp, Homo sapiens
cctgtagggagtgtg

SEQ ID NO: 980497 - DNA, 15 bp, Homo sapiens
ctgtagggagtgtgt

SEQ ID NO: 980498 - DNA, 15 bp, Homo sapiens
tgtagggagtgtgta

SEQ ID NO: 980499 - DNA, 15 bp, Homo sapiens
gtagggagtgtgtag

SEQ ID NO: 980500 - DNA, 15 bp, Homo sapiens
tagggagtgtgtagg

SEQ ID NO: 980501 - DNA, 15 bp, Homo sapiens
agggagtgtgtaggg

SEQ ID NO: 980502 - DNA, 15 bp, Homo sapiens
gggagtgtgtaggga

SEQ ID NO: 980503 - DNA, 15 bp, Homo sapiens
ggagtgtgtagggaa

SEQ ID NO: 980504 - DNA, 15 bp, Homo sapiens
gagtgtgtagggaag

SEQ ID NO: 980505 - DNA, 15 bp, Homo sapiens
agtgtgtagggaagg

SEQ ID NO: 980506 - DNA, 15 bp, Homo sapiens
gtgtgtagggaaggg

SEQ ID NO: 980507 - DNA, 15 bp, Homo sapiens
tgtgtagggaaggga

SEQ ID NO: 980508 - DNA, 15 bp, Homo sapiens
gtgtagggaagggac

SEQ ID NO: 980509 - DNA, 15 bp, Homo sapiens
tgtagggaagggaca

SEQ ID NO: 980510 - DNA, 15 bp, Homo sapiens
gtagggaagggacag

SEQ ID NO: 980511 - DNA, 15 bp, Homo sapiens
tagggaagggacagc

SEQ ID NO: 980512 - DNA, 15 bp, Homo sapiens
agggaagggacagct

SEQ ID NO: 980513 - DNA, 15 bp, Homo sapiens
gggaagggacagctg

SEQ ID NO: 980514 - DNA, 15 bp, Homo sapiens
ggaagggacagctgt

SEQ ID NO: 980515 - DNA, 15 bp, Homo sapiens
gaagggacagctgtc

SEQ ID NO: 980516 - DNA, 15 bp, Homo sapiens
aagggacagctgtcc

SEQ ID NO: 980517 - DNA, 15 bp, Homo sapiens
agggacagctgtcct

SEQ ID NO: 980518 - DNA, 15 bp, Homo sapiens
gggacagctgtcctt

SEQ ID NO: 980519 - DNA, 15 bp, Homo sapiens
ggacagctgtccttg

SEQ ID NO: 980520 - DNA, 15 bp, Homo sapiens
gacagctgtccttgt

SEQ ID NO: 980521 - DNA, 15 bp, Homo sapiens
acagctgtccttgta

SEQ ID NO: 980522 - DNA, 15 bp, Homo sapiens
cagctgtccttgtag

SEQ ID NO: 980523 - DNA, 15 bp, Homo sapiens
agctgtccttgtagt

SEQ ID NO: 980524 - DNA, 15 bp, Homo sapiens
gctgtccttgtagta

SEQ ID NO: 980525 - DNA, 15 bp, Homo sapiens
ctgtccttgtagtag

SEQ ID NO: 980526 - DNA, 15 bp, Homo sapiens
tgtccttgtagtagg

SEQ ID NO: 980527 - DNA, 15 bp, Homo sapiens
gtccttgtagtaggg

SEQ ID NO: 980528 - DNA, 15 bp, Homo sapiens
tccttgtagtaggga

SEQ ID NO: 980529 - DNA, 15 bp, Homo sapiens
ccttgtagtagggaa

SEQ ID NO: 980530 - DNA, 15 bp, Homo sapiens
cttgtagtagggaag

SEQ ID NO: 980531 - DNA, 15 bp, Homo sapiens
ttgtagtagggaagg

SEQ ID NO: 980532 - DNA, 15 bp, Homo sapiens
tgtagtagggaaggg

SEQ ID NO: 980533 - DNA, 15 bp, Homo sapiens
gtagtagggaagggt

SEQ ID NO: 980534 - DNA, 15 bp, Homo sapiens
tagtagggaagggtt

SEQ ID NO: 980535 - DNA, 15 bp, Homo sapiens
agtagggaagggttt

SEQ ID NO: 980536 - DNA, 15 bp, Homo sapiens
gtagggaagggtttt

SEQ ID NO: 980537 - DNA, 15 bp, Homo sapiens
tagggaagggtttta

SEQ ID NO: 980538 - DNA, 15 bp, Homo sapiens
agggaagggttttat

SEQ ID NO: 980539 - DNA, 15 bp, Homo sapiens
gggaagggttttatt

SEQ ID NO: 980540 - DNA, 15 bp, Homo sapiens
ggaagggttttattc

SEQ ID NO: 980541 - DNA, 15 bp, Homo sapiens
gaagggttttattca

SEQ ID NO: 980542 - DNA, 15 bp, Homo sapiens
aagggttttattcag

SEQ ID NO: 980543 - DNA, 15 bp, Homo sapiens
agggttttattcagg

SEQ ID NO: 980544 - DNA, 15 bp, Homo sapiens
gggttttattcaggt

SEQ ID NO: 980545 - DNA, 15 bp, Homo sapiens
ggttttattcaggtc

SEQ ID NO: 980546 - DNA, 15 bp, Homo sapiens
gttttattcaggtcg

SEQ ID NO: 980547 - DNA, 15 bp, Homo sapiens
ttttattcaggtcgt

SEQ ID NO: 980548 - DNA, 15 bp, Homo sapiens
tttattcaggtcgtc

SEQ ID NO: 980549 - DNA, 15 bp, Homo sapiens
ttattcaggtcgtct

SEQ ID NO: 980550 - DNA, 15 bp, Homo sapiens
tattcaggtcgtctg

SEQ ID NO: 980551 - DNA, 15 bp, Homo sapiens
attcaggtcgtctgg

SEQ ID NO: 980552 - DNA, 15 bp, Homo sapiens
ttcaggtcgtctggg

SEQ ID NO: 980553 - DNA, 15 bp, Homo sapiens
tcaggtcgtctgggc

SEQ ID NO: 980554 - DNA, 15 bp, Homo sapiens
caggtcgtctgggct

SEQ ID NO: 980555 - DNA, 15 bp, Homo sapiens
aggtcgtctgggctc

SEQ ID NO: 980556 - DNA, 15 bp, Homo sapiens
ggtcgtctgggctcc

SEQ ID NO: 980557 - DNA, 15 bp, Homo sapiens
gtcgtctgggctcca

SEQ ID NO: 980558 - DNA, 15 bp, Homo sapiens
tcgtctgggctccat

SEQ ID NO: 980559 - DNA, 15 bp, Homo sapiens
cgtctgggctccata

SEQ ID NO: 980560 - DNA, 15 bp, Homo sapiens
gtctgggctccataa

SEQ ID NO: 980561 - DNA, 15 bp, Homo sapiens
tctgggctccataat

SEQ ID NO: 980562 - DNA, 15 bp, Homo sapiens
ctgggctccataata

SEQ ID NO: 980563 - DNA, 15 bp, Homo sapiens
tgggctccataatat

SEQ ID NO: 980564 - DNA, 15 bp, Homo sapiens
gggctccataatatc

SEQ ID NO: 980565 - DNA, 15 bp, Homo sapiens
ggctccataatatcc

SEQ ID NO: 980566 - DNA, 15 bp, Homo sapiens
gctccataatatccc

SEQ ID NO: 980567 - DNA, 15 bp, Homo sapiens
ctccataatatccct

SEQ ID NO: 980568 - DNA, 15 bp, Homo sapiens
tccataatatccctt

SEQ ID NO: 980569 - DNA, 15 bp, Homo sapiens
ccataatatcccttg

SEQ ID NO: 980570 - DNA, 15 bp, Homo sapiens
cataatatcccttgt

SEQ ID NO: 980571 - DNA, 15 bp, Homo sapiens
ataatatcccttgtg

SEQ ID NO: 980572 - DNA, 15 bp, Homo sapiens
taatatcccttgtgt

SEQ ID NO: 980573 - DNA, 15 bp, Homo sapiens
aatatcccttgtgta

SEQ ID NO: 980574 - DNA, 15 bp, Homo sapiens
atatcccttgtgtat

SEQ ID NO: 980575 - DNA, 15 bp, Homo sapiens
tatcccttgtgtatc

SEQ ID NO: 980576 - DNA, 15 bp, Homo sapiens
atcccttgtgtatct

SEQ ID NO: 980577 - DNA, 15 bp, Homo sapiens
tcccttgtgtatctg

SEQ ID NO: 980578 - DNA, 15 bp, Homo sapiens
cccttgtgtatctgc

SEQ ID NO: 980579 - DNA, 15 bp, Homo sapiens
ccttgtgtatctgca

SEQ ID NO: 980580 - DNA, 15 bp, Homo sapiens
cttgtgtatctgcag

SEQ ID NO: 980581 - DNA, 15 bp, Homo sapiens
ttgtgtatctgcagt

SEQ ID NO: 980582 - DNA, 15 bp, Homo sapiens
tgtgtatctgcagtc

SEQ ID NO: 980583 - DNA, 15 bp, Homo sapiens
gtgtatctgcagtct

SEQ ID NO: 980584 - DNA, 15 bp, Homo sapiens
tgtatctgcagtctc

SEQ ID NO: 980585 - DNA, 15 bp, Homo sapiens
gtatctgcagtctcc

SEQ ID NO: 980586 - DNA, 15 bp, Homo sapiens
tatctgcagtctcct

SEQ ID NO: 980587 - DNA, 15 bp, Homo sapiens
atctgcagtctcctt

SEQ ID NO: 980588 - DNA, 15 bp, Homo sapiens
tctgcagtctccttt

SEQ ID NO: 980589 - DNA, 15 bp, Homo sapiens
ctgcagtctcctttg

SEQ ID NO: 980590 - DNA, 15 bp, Homo sapiens
tgcagtctcctttgc

SEQ ID NO: 980591 - DNA, 15 bp, Homo sapiens
gcagtctcctttgcc

SEQ ID NO: 980592 - DNA, 15 bp, Homo sapiens
cagtctcctttgcca

SEQ ID NO: 980593 - DNA, 15 bp, Homo sapiens
agtctcctttgccat

SEQ ID NO: 980594 - DNA, 15 bp, Homo sapiens
gtctcctttgccatg

SEQ ID NO: 980595 - DNA, 15 bp, Homo sapiens
tctcctttgccatgg

SEQ ID NO: 980596 - DNA, 15 bp, Homo sapiens
ctcctttgccatgga

SEQ ID NO: 980597 - DNA, 15 bp, Homo sapiens
tcctttgccatggat

SEQ ID NO: 980598 - DNA, 15 bp, Homo sapiens
cctttgccatggatc

SEQ ID NO: 980599 - DNA, 15 bp, Homo sapiens
ctttgccatggatca

SEQ ID NO: 980600 - DNA, 15 bp, Homo sapiens
tttgccatggatcaa

SEQ ID NO: 980601 - DNA, 15 bp, Homo sapiens
ttgccatggatcaac

SEQ ID NO: 980602 - DNA, 15 bp, Homo sapiens
tgccatggatcaaca

SEQ ID NO: 980603 - DNA, 15 bp, Homo sapiens
gccatggatcaacac

SEQ ID NO: 980604 - DNA, 15 bp, Homo sapiens
ccatggatcaacaca

SEQ ID NO: 980605 - DNA, 15 bp, Homo sapiens
catggatcaacacaa

SEQ ID NO: 980606 - DNA, 15 bp, Homo sapiens
atggatcaacacaat

SEQ ID NO: 980607 - DNA, 15 bp, Homo sapiens
tggatcaacacaata

SEQ ID NO: 980608 - DNA, 15 bp, Homo sapiens
ggatcaacacaatag

SEQ ID NO: 980609 - DNA, 15 bp, Homo sapiens
gatcaacacaatagg

SEQ ID NO: 980610 - DNA, 15 bp, Homo sapiens
atcaacacaatagga

SEQ ID NO: 980611 - DNA, 15 bp, Homo sapiens
tcaacacaataggaa

SEQ ID NO: 980612 - DNA, 15 bp, Homo sapiens
caacacaataggaaa

SEQ ID NO: 980613 - DNA, 15 bp, Homo sapiens
aacacaataggaaat

SEQ ID NO: 980614 - DNA, 15 bp, Homo sapiens
acacaataggaaatc

SEQ ID NO: 980615 - DNA, 15 bp, Homo sapiens
cacaataggaaatct

SEQ ID NO: 980616 - DNA, 15 bp, Homo sapiens
acaataggaaatctt

SEQ ID NO: 980617 - DNA, 15 bp, Homo sapiens
caataggaaatcttc

SEQ ID NO: 980618 - DNA, 15 bp, Homo sapiens
aataggaaatcttcc

SEQ ID NO: 980619 - DNA, 15 bp, Homo sapiens
ataggaaatcttccg

SEQ ID NO: 980620 - DNA, 15 bp, Homo sapiens
taggaaatcttccgg

SEQ ID NO: 980621 - DNA, 15 bp, Homo sapiens
aggaaatcttccggc

SEQ ID NO: 980622 - DNA, 15 bp, Homo sapiens
ggaaatcttccggca

SEQ ID NO: 980623 - DNA, 15 bp, Homo sapiens
gaaatcttccggcac

SEQ ID NO: 980624 - DNA, 15 bp, Homo sapiens
aaatcttccggcact

SEQ ID NO: 980625 - DNA, 15 bp, Homo sapiens
aatcttccggcactg

SEQ ID NO: 980626 - DNA, 15 bp, Homo sapiens
atcttccggcactga

SEQ ID NO: 980627 - DNA, 15 bp, Homo sapiens
tcttccggcactgat

SEQ ID NO: 980628 - DNA, 15 bp, Homo sapiens
cttccggcactgatg

SEQ ID NO: 980629 - DNA, 15 bp, Homo sapiens
ttccggcactgatgg

SEQ ID NO: 980630 - DNA, 15 bp, Homo sapiens
tccggcactgatggt

SEQ ID NO: 980631 - DNA, 15 bp, Homo sapiens
ccggcactgatggtt

SEQ ID NO: 980632 - DNA, 15 bp, Homo sapiens
cggcactgatggttt

SEQ ID NO: 980633 - DNA, 15 bp, Homo sapiens
ggcactgatggtttt

SEQ ID NO: 980634 - DNA, 15 bp, Homo sapiens
gcactgatggttttt

SEQ ID NO: 980635 - DNA, 15 bp, Homo sapiens
cactgatggtttttc

SEQ ID NO: 980636 - DNA, 15 bp, Homo sapiens
actgatggtttttcc

SEQ ID NO: 980637 - DNA, 15 bp, Homo sapiens
ctgatggtttttcca

SEQ ID NO: 980638 - DNA, 15 bp, Homo sapiens
tgatggtttttccaa

SEQ ID NO: 980639 - DNA, 15 bp, Homo sapiens
gatggtttttccaag

SEQ ID NO: 980640 - DNA, 15 bp, Homo sapiens
atggtttttccaagg

SEQ ID NO: 980641 - DNA, 15 bp, Homo sapiens
tggtttttccaaggg

SEQ ID NO: 980642 - DNA, 15 bp, Homo sapiens
ggtttttccaagggg

SEQ ID NO: 980643 - DNA, 15 bp, Homo sapiens
gtttttccaaggggg

SEQ ID NO: 980644 - DNA, 15 bp, Homo sapiens
tttttccaaggggga

SEQ ID NO: 980645 - DNA, 15 bp, Homo sapiens
ttttccaagggggag

SEQ ID NO: 980646 - DNA, 15 bp, Homo sapiens
tttccaagggggagt

SEQ ID NO: 980647 - DNA, 15 bp, Homo sapiens
ttccaagggggagtt

SEQ ID NO: 980648 - DNA, 15 bp, Homo sapiens
tccaagggggagttc

SEQ ID NO: 980649 - DNA, 15 bp, Homo sapiens
ccaagggggagttct

SEQ ID NO: 980650 - DNA, 15 bp, Homo sapiens
caagggggagttctt

SEQ ID NO: 980651 - DNA, 15 bp, Homo sapiens
aagggggagttcttc

SEQ ID NO: 980652 - DNA, 15 bp, Homo sapiens
agggggagttcttcc

SEQ ID NO: 980653 - DNA, 15 bp, Homo sapiens
gggggagttcttcct

SEQ ID NO: 980654 - DNA, 15 bp, Homo sapiens
ggggagttcttcctg

SEQ ID NO: 980655 - DNA, 15 bp, Homo sapiens
gggagttcttcctgg

SEQ ID NO: 980656 - DNA, 15 bp, Homo sapiens
ggagttcttcctgga

SEQ ID NO: 980657 - DNA, 15 bp, Homo sapiens
gagttcttcctggag

SEQ ID NO: 980658 - DNA, 15 bp, Homo sapiens
agttcttcctggagc

SEQ ID NO: 980659 - DNA, 15 bp, Homo sapiens
gttcttcctggagca

SEQ ID NO: 980660 - DNA, 15 bp, Homo sapiens
ttcttcctggagcaa

SEQ ID NO: 980661 - DNA, 15 bp, Homo sapiens
tcttcctggagcaaa

SEQ ID NO: 980662 - DNA, 15 bp, Homo sapiens
cttcctggagcaaag

SEQ ID NO: 980663 - DNA, 15 bp, Homo sapiens
ttcctggagcaaagc

SEQ ID NO: 980664 - DNA, 15 bp, Homo sapiens
tcctggagcaaagca

SEQ ID NO: 980665 - DNA, 15 bp, Homo sapiens
cctggagcaaagcaa

SEQ ID NO: 980666 - DNA, 15 bp, Homo sapiens
ctggagcaaagcaaa

SEQ ID NO: 980667 - DNA, 15 bp, Homo sapiens
tggagcaaagcaaat

SEQ ID NO: 980668 - DNA, 15 bp, Homo sapiens
ggagcaaagcaaatg

SEQ ID NO: 980669 - DNA, 15 bp, Homo sapiens
gagcaaagcaaatga

SEQ ID NO: 980670 - DNA, 15 bp, Homo sapiens
agcaaagcaaatgac

SEQ ID NO: 980671 - DNA, 15 bp, Homo sapiens
gcaaagcaaatgacc

SEQ ID NO: 980672 - DNA, 15 bp, Homo sapiens
caaagcaaatgacca

SEQ ID NO: 980673 - DNA, 15 bp, Homo sapiens
aaagcaaatgaccaa

SEQ ID NO: 980674 - DNA, 15 bp, Homo sapiens
aagcaaatgaccaac

SEQ ID NO: 980675 - DNA, 15 bp, Homo sapiens
agcaaatgaccaacc

SEQ ID NO: 980676 - DNA, 15 bp, Homo sapiens
gcaaatgaccaacca

SEQ ID NO: 980677 - DNA, 15 bp, Homo sapiens
caaatgaccaaccag

SEQ ID NO: 980678 - DNA, 15 bp, Homo sapiens
aaatgaccaaccagg

SEQ ID NO: 980679 - DNA, 15 bp, Homo sapiens
aatgaccaaccaggt

SEQ ID NO: 980680 - DNA, 15 bp, Homo sapiens
atgaccaaccaggtt

SEQ ID NO: 980681 - DNA, 15 bp, Homo sapiens
tgaccaaccaggttt

SEQ ID NO: 980682 - DNA, 15 bp, Homo sapiens
gaccaaccaggtttg

SEQ ID NO: 980683 - DNA, 15 bp, Homo sapiens
accaaccaggtttga

SEQ ID NO: 980684 - DNA, 15 bp, Homo sapiens
ccaaccaggtttgag

SEQ ID NO: 980685 - DNA, 15 bp, Homo sapiens
caaccaggtttgagg

SEQ ID NO: 980686 - DNA, 15 bp, Homo sapiens
aaccaggtttgagga

SEQ ID NO: 980687 - DNA, 15 bp, Homo sapiens
accaggtttgaggac

SEQ ID NO: 980688 - DNA, 15 bp, Homo sapiens
ccaggtttgaggacc

SEQ ID NO: 980689 - DNA, 15 bp, Homo sapiens
caggtttgaggacct

SEQ ID NO: 980690 - DNA, 15 bp, Homo sapiens
aggtttgaggacctg

SEQ ID NO: 980691 - DNA, 15 bp, Homo sapiens
ggtttgaggacctga

SEQ ID NO: 980692 - DNA, 15 bp, Homo sapiens
gtttgaggacctgat

SEQ ID NO: 980693 - DNA, 15 bp, Homo sapiens
tttgaggacctgatt

SEQ ID NO: 980694 - DNA, 15 bp, Homo sapiens
ttgaggacctgattt

SEQ ID NO: 980695 - DNA, 15 bp, Homo sapiens
tgaggacctgatttg

SEQ ID NO: 980696 - DNA, 15 bp, Homo sapiens
gaggacctgatttgt

SEQ ID NO: 980697 - DNA, 15 bp, Homo sapiens
aggacctgatttgtt

SEQ ID NO: 980698 - DNA, 15 bp, Homo sapiens
ggacctgatttgttt

SEQ ID NO: 980699 - DNA, 15 bp, Homo sapiens
gacctgatttgtttg

SEQ ID NO: 980700 - DNA, 15 bp, Homo sapiens
acctgatttgtttga

SEQ ID NO: 980701 - DNA, 15 bp, Homo sapiens
cctgatttgtttgac

SEQ ID NO: 980702 - DNA, 15 bp, Homo sapiens
ctgatttgtttgaca

SEQ ID NO: 980703 - DNA, 15 bp, Homo sapiens
tgatttgtttgacaa

SEQ ID NO: 980704 - DNA, 15 bp, Homo sapiens
gatttgtttgacaat

SEQ ID NO: 980705 - DNA, 15 bp, Homo sapiens
atttgtttgacaatt

SEQ ID NO: 980706 - DNA, 15 bp, Homo sapiens
tttgtttgacaattc

SEQ ID NO: 980707 - DNA, 15 bp, Homo sapiens
ttgtttgacaattcc

SEQ ID NO: 980708 - DNA, 15 bp, Homo sapiens
tgtttgacaattcca

SEQ ID NO: 980709 - DNA, 15 bp, Homo sapiens
gtttgacaattccat

SEQ ID NO: 980710 - DNA, 15 bp, Homo sapiens
tttgacaattccatt

SEQ ID NO: 980711 - DNA, 15 bp, Homo sapiens
ttgacaattccattt

SEQ ID NO: 980712 - DNA, 15 bp, Homo sapiens
tgacaattccatttt

SEQ ID NO: 980713 - DNA, 15 bp, Homo sapiens
gacaattccattttg

SEQ ID NO: 980714 - DNA, 15 bp, Homo sapiens
acaattccattttgt

SEQ ID NO: 980715 - DNA, 15 bp, Homo sapiens
caattccattttgta

SEQ ID NO: 980716 - DNA, 15 bp, Homo sapiens
aattccattttgtat

SEQ ID NO: 980717 - DNA, 15 bp, Homo sapiens
attccattttgtatt

SEQ ID NO: 980718 - DNA, 15 bp, Homo sapiens
ttccattttgtattg

SEQ ID NO: 980719 - DNA, 15 bp, Homo sapiens
tccattttgtattgt

SEQ ID NO: 980720 - DNA, 15 bp, Homo sapiens
ccattttgtattgta

SEQ ID NO: 980721 - DNA, 15 bp, Homo sapiens
cattttgtattgtaa

SEQ ID NO: 980722 - DNA, 15 bp, Homo sapiens
attttgtattgtaaa

SEQ ID NO: 980723 - DNA, 15 bp, Homo sapiens
ttttgtattgtaaat

SEQ ID NO: 980724 - DNA, 15 bp, Homo sapiens
tttgtattgtaaatt

SEQ ID NO: 980725 - DNA, 15 bp, Homo sapiens
ttgtattgtaaatta

SEQ ID NO: 980726 - DNA, 15 bp, Homo sapiens
tgtattgtaaattac

SEQ ID NO: 980727 - DNA, 15 bp, Homo sapiens
gtattgtaaattact

SEQ ID NO: 980728 - DNA, 15 bp, Homo sapiens
tattgtaaattactt

SEQ ID NO: 980729 - DNA, 15 bp, Homo sapiens
attgtaaattactta

SEQ ID NO: 980730 - DNA, 15 bp, Homo sapiens
ttgtaaattacttaa

SEQ ID NO: 980731 - DNA, 15 bp, Homo sapiens
tgtaaattacttaat

SEQ ID NO: 980732 - DNA, 15 bp, Homo sapiens
gtaaattacttaatt

SEQ ID NO: 980733 - DNA, 15 bp, Homo sapiens
taaattacttaattg

SEQ ID NO: 980734 - DNA, 15 bp, Homo sapiens
aaattacttaattgg

SEQ ID NO: 980735 - DNA, 15 bp, Homo sapiens
aattacttaattggc

SEQ ID NO: 980736 - DNA, 15 bp, Homo sapiens
attacttaattggca

SEQ ID NO: 980737 - DNA, 15 bp, Homo sapiens
ttacttaattggcat

SEQ ID NO: 980738 - DNA, 15 bp, Homo sapiens
tacttaattggcatt

SEQ ID NO: 980739 - DNA, 15 bp, Homo sapiens
acttaattggcattc

SEQ ID NO: 980740 - DNA, 15 bp, Homo sapiens
cttaattggcattct

SEQ ID NO: 980741 - DNA, 15 bp, Homo sapiens
ttaattggcattcta

SEQ ID NO: 980742 - DNA, 15 bp, Homo sapiens
taattggcattctac

SEQ ID NO: 980743 - DNA, 15 bp, Homo sapiens
aattggcattctact

SEQ ID NO: 980744 - DNA, 15 bp, Homo sapiens
attggcattctactc

SEQ ID NO: 980745 - DNA, 15 bp, Homo sapiens
ttggcattctactcc

SEQ ID NO: 980746 - DNA, 15 bp, Homo sapiens
tggcattctactccc

SEQ ID NO: 980747 - DNA, 15 bp, Homo sapiens
ggcattctactccca

SEQ ID NO: 980748 - DNA, 15 bp, Homo sapiens
gcattctactcccaa

SEQ ID NO: 980749 - DNA, 15 bp, Homo sapiens
cattctactcccaat

SEQ ID NO: 980750 - DNA, 15 bp, Homo sapiens
attctactcccaatc

SEQ ID NO: 980751 - DNA, 15 bp, Homo sapiens
ttctactcccaatcc

SEQ ID NO: 980752 - DNA, 15 bp, Homo sapiens
tctactcccaatcca

SEQ ID NO: 980753 - DNA, 15 bp, Homo sapiens
ctactcccaatccat

SEQ ID NO: 980754 - DNA, 15 bp, Homo sapiens
tactcccaatccatc

SEQ ID NO: 980755 - DNA, 15 bp, Homo sapiens
actcccaatccatct

SEQ ID NO: 980756 - DNA, 15 bp, Homo sapiens
ctcccaatccatctt

SEQ ID NO: 980757 - DNA, 15 bp, Homo sapiens
tcccaatccatcttg

SEQ ID NO: 980758 - DNA, 15 bp, Homo sapiens
cccaatccatcttgt

SEQ ID NO: 980759 - DNA, 15 bp, Homo sapiens
ccaatccatcttgtc

SEQ ID NO: 980760 - DNA, 15 bp, Homo sapiens
caatccatcttgtca

SEQ ID NO: 980761 - DNA, 15 bp, Homo sapiens
aatccatcttgtcat

SEQ ID NO: 980762 - DNA, 15 bp, Homo sapiens
atccatcttgtcatt

SEQ ID NO: 980763 - DNA, 15 bp, Homo sapiens
tccatcttgtcattt

SEQ ID NO: 980764 - DNA, 15 bp, Homo sapiens
ccatcttgtcatttg

SEQ ID NO: 980765 - DNA, 15 bp, Homo sapiens
catcttgtcatttgc

SEQ ID NO: 980766 - DNA, 15 bp, Homo sapiens
atcttgtcatttgca

SEQ ID NO: 980767 - DNA, 15 bp, Homo sapiens
tcttgtcatttgcat

SEQ ID NO: 980768 - DNA, 15 bp, Homo sapiens
cttgtcatttgcata

SEQ ID NO: 980769 - DNA, 15 bp, Homo sapiens
ttgtcatttgcatac

SEQ ID NO: 980770 - DNA, 15 bp, Homo sapiens
tgtcatttgcataca

SEQ ID NO: 980771 - DNA, 15 bp, Homo sapiens
gtcatttgcatacag

SEQ ID NO: 980772 - DNA, 15 bp, Homo sapiens
tcatttgcatacagt

SEQ ID NO: 980773 - DNA, 15 bp, Homo sapiens
catttgcatacagtg

SEQ ID NO: 980774 - DNA, 15 bp, Homo sapiens
atttgcatacagtgg

SEQ ID NO: 980775 - DNA, 15 bp, Homo sapiens
tttgcatacagtggt

SEQ ID NO: 980776 - DNA, 15 bp, Homo sapiens
ttgcatacagtggtt

SEQ ID NO: 980777 - DNA, 15 bp, Homo sapiens
tgcatacagtggttt

SEQ ID NO: 980778 - DNA, 15 bp, Homo sapiens
gcatacagtggtttt

SEQ ID NO: 980779 - DNA, 15 bp, Homo sapiens
catacagtggttttg

SEQ ID NO: 980780 - DNA, 15 bp, Homo sapiens
atacagtggttttgg

SEQ ID NO: 980781 - DNA, 15 bp, Homo sapiens
tacagtggttttggg

SEQ ID NO: 980782 - DNA, 15 bp, Homo sapiens
acagtggttttggga

SEQ ID NO: 980783 - DNA, 15 bp, Homo sapiens
cagtggttttgggat

SEQ ID NO: 980784 - DNA, 15 bp, Homo sapiens
agtggttttgggatt

SEQ ID NO: 980785 - DNA, 15 bp, Homo sapiens
gtggttttgggattg

SEQ ID NO: 980786 - DNA, 15 bp, Homo sapiens
tggttttgggattga

SEQ ID NO: 980787 - DNA, 15 bp, Homo sapiens
ggttttgggattgag

SEQ ID NO: 980788 - DNA, 15 bp, Homo sapiens
gttttgggattgagt

SEQ ID NO: 980789 - DNA, 15 bp, Homo sapiens
ttttgggattgagtt

SEQ ID NO: 980790 - DNA, 15 bp, Homo sapiens
tttgggattgagttc

SEQ ID NO: 980791 - DNA, 15 bp, Homo sapiens
ttgggattgagttca

SEQ ID NO: 980792 - DNA, 15 bp, Homo sapiens
tgggattgagttcag

SEQ ID NO: 980793 - DNA, 15 bp, Homo sapiens
gggattgagttcagc

SEQ ID NO: 980794 - DNA, 15 bp, Homo sapiens
ggattgagttcagct

SEQ ID NO: 980795 - DNA, 15 bp, Homo sapiens
gattgagttcagcta

SEQ ID NO: 980796 - DNA, 15 bp, Homo sapiens
attgagttcagctat

SEQ ID NO: 980797 - DNA, 15 bp, Homo sapiens
ttgagttcagctata

SEQ ID NO: 980798 - DNA, 15 bp, Homo sapiens
tgagttcagctatac

SEQ ID NO: 980799 - DNA, 15 bp, Homo sapiens
gagttcagctatacc

SEQ ID NO: 980800 - DNA, 15 bp, Homo sapiens
agttcagctatacca

SEQ ID NO: 980801 - DNA, 15 bp, Homo sapiens
gttcagctataccaa

SEQ ID NO: 980802 - DNA, 15 bp, Homo sapiens
ttcagctataccaaa

SEQ ID NO: 980803 - DNA, 15 bp, Homo sapiens
tcagctataccaaaa

SEQ ID NO: 980804 - DNA, 15 bp, Homo sapiens
cagctataccaaaag

SEQ ID NO: 980805 - DNA, 15 bp, Homo sapiens
agctataccaaaagt

SEQ ID NO: 980806 - DNA, 15 bp, Homo sapiens
gctataccaaaagtc

SEQ ID NO: 980807 - DNA, 15 bp, Homo sapiens
ctataccaaaagtct

SEQ ID NO: 980808 - DNA, 15 bp, Homo sapiens
tataccaaaagtctg

SEQ ID NO: 980809 - DNA, 15 bp, Homo sapiens
ataccaaaagtctga

SEQ ID NO: 980810 - DNA, 15 bp, Homo sapiens
taccaaaagtctgaa

SEQ ID NO: 980811 - DNA, 15 bp, Homo sapiens
accaaaagtctgaac

SEQ ID NO: 980812 - DNA, 15 bp, Homo sapiens
ccaaaagtctgaacc

SEQ ID NO: 980813 - DNA, 15 bp, Homo sapiens
caaaagtctgaacct

SEQ ID NO: 980814 - DNA, 15 bp, Homo sapiens
aaaagtctgaacctt

SEQ ID NO: 980815 - DNA, 15 bp, Homo sapiens
aaagtctgaaccttc

SEQ ID NO: 980816 - DNA, 15 bp, Homo sapiens
aagtctgaaccttct

SEQ ID NO: 980817 - DNA, 15 bp, Homo sapiens
agtctgaaccttctg

SEQ ID NO: 980818 - DNA, 15 bp, Homo sapiens
gtctgaaccttctgc

SEQ ID NO: 980819 - DNA, 15 bp, Homo sapiens
tctgaaccttctgca

SEQ ID NO: 980820 - DNA, 15 bp, Homo sapiens
ctgaaccttctgcac

SEQ ID NO: 980821 - DNA, 15 bp, Homo sapiens
tgaaccttctgcact

SEQ ID NO: 980822 - DNA, 15 bp, Homo sapiens
gaaccttctgcactt

SEQ ID NO: 980823 - DNA, 15 bp, Homo sapiens
aaccttctgcactta

SEQ ID NO: 980824 - DNA, 15 bp, Homo sapiens
accttctgcacttag

SEQ ID NO: 980825 - DNA, 15 bp, Homo sapiens
ccttctgcacttaga

SEQ ID NO: 980826 - DNA, 15 bp, Homo sapiens
cttctgcacttagaa

SEQ ID NO: 980827 - DNA, 15 bp, Homo sapiens
ttctgcacttagaac

SEQ ID NO: 980828 - DNA, 15 bp, Homo sapiens
tctgcacttagaaca

SEQ ID NO: 980829 - DNA, 15 bp, Homo sapiens
ctgcacttagaacaa

SEQ ID NO: 980830 - DNA, 15 bp, Homo sapiens
tgcacttagaacaag

SEQ ID NO: 980831 - DNA, 15 bp, Homo sapiens
gcacttagaacaagg

SEQ ID NO: 980832 - DNA, 15 bp, Homo sapiens
cacttagaacaaggc

SEQ ID NO: 980833 - DNA, 15 bp, Homo sapiens
acttagaacaaggca

SEQ ID NO: 980834 - DNA, 15 bp, Homo sapiens
cttagaacaaggcaa

SEQ ID NO: 980835 - DNA, 15 bp, Homo sapiens
ttagaacaaggcaac

SEQ ID NO: 980836 - DNA, 15 bp, Homo sapiens
tagaacaaggcaacc

SEQ ID NO: 980837 - DNA, 15 bp, Homo sapiens
agaacaaggcaacca

SEQ ID NO: 980838 - DNA, 15 bp, Homo sapiens
gaacaaggcaaccac

SEQ ID NO: 980839 - DNA, 15 bp, Homo sapiens
aacaaggcaaccacc

SEQ ID NO: 980840 - DNA, 15 bp, Homo sapiens
acaaggcaaccacca

SEQ ID NO: 980841 - DNA, 15 bp, Homo sapiens
caaggcaaccaccaa

SEQ ID NO: 980842 - DNA, 15 bp, Homo sapiens
aaggcaaccaccaag

SEQ ID NO: 980843 - DNA, 15 bp, Homo sapiens
aggcaaccaccaagc

SEQ ID NO: 980844 - DNA, 15 bp, Homo sapiens
ggcaaccaccaagct

SEQ ID NO: 980845 - DNA, 15 bp, Homo sapiens
gcaaccaccaagctt

SEQ ID NO: 980846 - DNA, 15 bp, Homo sapiens
actactgactgcagc

SEQ ID NO: 980847 - DNA, 15 bp, Homo sapiens
acagagccacaggac

SEQ ID NO: 980848 - DNA, 15 bp, Homo sapiens
tggtggtgtctggcc

SEQ ID NO: 980849 - DNA, 15 bp, Homo sapiens
atgatgaagaaagag

SEQ ID NO: 980850 - DNA, 15 bp, Homo sapiens
tttggctcagggtta

SEQ ID NO: 980851 - DNA, 15 bp, Homo sapiens
aattgaatgctatgc

SEQ ID NO: 980852 - DNA, 15 bp, Homo sapiens
tgacttttggtcttt

SEQ ID NO: 980853 - DNA, 15 bp, Homo sapiens
agtcgggaaacaagc

SEQ ID NO: 980854 - DNA, 15 bp, Homo sapiens
agtcagtgtgcagca

SEQ ID NO: 980855 - DNA, 15 bp, Homo sapiens
gaatttgtcaatcct

SEQ ID NO: 980856 - DNA, 15 bp, Homo sapiens
aatcctagccttcca

SEQ ID NO: 980857 - DNA, 15 bp, Homo sapiens
aatatccacaattca

SEQ ID NO: 980858 - DNA, 15 bp, Homo sapiens
ctgaaaatctaatta

SEQ ID NO: 980859 - DNA, 15 bp, Homo sapiens
tttgttactgagcca

SEQ ID NO: 980860 - DNA, 15 bp, Homo sapiens
gtccaactctctaac

SEQ ID NO: 980861 - DNA, 15 bp, Homo sapiens
aacttggaactgtga

SEQ ID NO: 980862 - DNA, 15 bp, Homo sapiens
acaggtctgattgga

SEQ ID NO: 980863 - DNA, 15 bp, Homo sapiens
atcagtctattggca

SEQ ID NO: 980864 - DNA, 15 bp, Homo sapiens
ctcaatattcctcga

SEQ ID NO: 980865 - DNA, 15 bp, Homo sapiens
caatattcctcgaag

SEQ ID NO: 980866 - DNA, 15 bp, Homo sapiens
aatattcctcgaagg

SEQ ID NO: 980867 - DNA, 15 bp, Homo sapiens
atattcctcgaaggt

SEQ ID NO: 980868 - DNA, 15 bp, Homo sapiens
tattcctcgaaggtc

SEQ ID NO: 980869 - DNA, 15 bp, Homo sapiens
tcctcgaaggtcaca

SEQ ID NO: 980870 - DNA, 15 bp, Homo sapiens
cctcgaaggtcacac

SEQ ID NO: 980871 - DNA, 15 bp, Homo sapiens
ctcgaaggtcacaca

SEQ ID NO: 980872 - DNA, 15 bp, Homo sapiens
tcgccaataactttc

SEQ ID NO: 980873 - DNA, 15 bp, Homo sapiens
cgccaataactttcc

SEQ ID NO: 980874 - DNA, 15 bp, Homo sapiens
ctccgaaactcatat

SEQ ID NO: 980875 - DNA, 15 bp, Homo sapiens
cgtccctattccttc

SEQ ID NO: 980876 - DNA, 15 bp, Homo sapiens
actttgtcaagccta

SEQ ID NO: 980877 - DNA, 15 bp, Homo sapiens
tttgtcaagcctaat

SEQ ID NO: 980878 - DNA, 15 bp, Homo sapiens
aagcctaatgaaacc

SEQ ID NO: 980879 - DNA, 15 bp, Homo sapiens
catatggcacccact

SEQ ID NO: 980880 - DNA, 15 bp, Homo sapiens
cagatggaagatccc

SEQ ID NO: 980881 - DNA, 15 bp, Homo sapiens
aaagagaattatcgc

SEQ ID NO: 980882 - DNA, 15 bp, Homo sapiens
agagaattatcgctt

SEQ ID NO: 980883 - DNA, 15 bp, Homo sapiens
gagaattatcgcttc

SEQ ID NO: 980884 - DNA, 15 bp, Homo sapiens
agaattatcgcttcc

SEQ ID NO: 980885 - DNA, 15 bp, Homo sapiens
aattatcgcttccat

SEQ ID NO: 980886 - DNA, 15 bp, Homo sapiens
ttatcgcttccatgg

SEQ ID NO: 980887 - DNA, 15 bp, Homo sapiens
tatcgcttccatggt

SEQ ID NO: 980888 - DNA, 15 bp, Homo sapiens
tcgcttccatggtaa

SEQ ID NO: 980889 - DNA, 15 bp, Homo sapiens
ctccagcaatcaatg

SEQ ID NO: 980890 - DNA, 15 bp, Homo sapiens
ggatcaaaggattcg

SEQ ID NO: 980891 - DNA, 15 bp, Homo sapiens
gatcaaaggattcga

SEQ ID NO: 980892 - DNA, 15 bp, Homo sapiens
atcaaaggattcgat

SEQ ID NO: 980893 - DNA, 15 bp, Homo sapiens
tcaaaggattcgatg

SEQ ID NO: 980894 - DNA, 15 bp, Homo sapiens
caaaggattcgatgg

SEQ ID NO: 980895 - DNA, 15 bp, Homo sapiens
ggattcgatggtatc

SEQ ID NO: 980896 - DNA, 15 bp, Homo sapiens
gattcgatggtatct

SEQ ID NO: 980897 - DNA, 15 bp, Homo sapiens
attcgatggtatctg

SEQ ID NO: 980898 - DNA, 15 bp, Homo sapiens
ctgtacgaaaaaaag

SEQ ID NO: 980899 - DNA, 15 bp, Homo sapiens
tgtacgaaaaaaaga

SEQ ID NO: 980900 - DNA, 15 bp, Homo sapiens
gtacgaaaaaaagag

SEQ ID NO: 980901 - DNA, 15 bp, Homo sapiens
ggaatgccttattgg

SEQ ID NO: 980902 - DNA, 15 bp, Homo sapiens
atgccttattggcga

SEQ ID NO: 980903 - DNA, 15 bp, Homo sapiens
tgccttattggcgag

SEQ ID NO: 980904 - DNA, 15 bp, Homo sapiens
gccttattggcgagc

SEQ ID NO: 980905 - DNA, 15 bp, Homo sapiens
ccttattggcgagca

SEQ ID NO: 980906 - DNA, 15 bp, Homo sapiens
cttattggcgagcat

SEQ ID NO: 980907 - DNA, 15 bp, Homo sapiens
gacactgtgtgtgac

SEQ ID NO: 980908 - DNA, 15 bp, Homo sapiens
acctgatccagagta

SEQ ID NO: 980909 - DNA, 15 bp, Homo sapiens
tttacgtgtgacacg

SEQ ID NO: 980910 - DNA, 15 bp, Homo sapiens
ggatggagaaggccc

SEQ ID NO: 980911 - DNA, 15 bp, Homo sapiens
agctcacctcagcct

SEQ ID NO: 980912 - DNA, 15 bp, Homo sapiens
cgtgtgtagctgagg

SEQ ID NO: 980913 - DNA, 15 bp, Homo sapiens
acccagccttgagac

SEQ ID NO: 980914 - DNA, 15 bp, Homo sapiens
ctaaccaaattctcc

SEQ ID NO: 980915 - DNA, 15 bp, Homo sapiens
aattctccctggacc

SEQ ID NO: 980916 - DNA, 15 bp, Homo sapiens
atctggtaggtaagg

SEQ ID NO: 980917 - DNA, 15 bp, Homo sapiens
aaacatcacacgaca

SEQ ID NO: 980918 - DNA, 15 bp, Homo sapiens
aagattttaactggc

SEQ ID NO: 980919 - DNA, 15 bp, Homo sapiens
tccttaacccatcct

SEQ ID NO: 980920 - DNA, 15 bp, Homo sapiens
gagtttgctagtgat

SEQ ID NO: 980921 - DNA, 15 bp, Homo sapiens
aaggagtttcagtaa

SEQ ID NO: 980922 - DNA, 15 bp, Homo sapiens
aacctcaagctcaca

SEQ ID NO: 980923 - DNA, 15 bp, Homo sapiens
ataacacagcacgtg

SEQ ID NO: 980924 - DNA, 15 bp, Homo sapiens
attcgaactgactat

SEQ ID NO: 980925 - DNA, 20 bp, Homo sapiens
aaccctcctcctgcgcctcc

SEQ ID NO: 980926 - DNA, 20 bp, Homo sapiens
ccctcctcctgcgcctccac

SEQ ID NO: 980927 - DNA, 20 bp, Homo sapiens
cctgcgcctccacctccatc

SEQ ID NO: 980928 - DNA, 20 bp, Homo sapiens
tgcgcctccacctccatccc

SEQ ID NO: 980929 - DNA, 20 bp, Homo sapiens
gcgcctccacctccatcccc

SEQ ID NO: 980930 - DNA, 20 bp, Homo sapiens
gcctccacctccatccccaa

SEQ ID NO: 980931 - DNA, 20 bp, Homo sapiens
caacacctattcccccaaac

SEQ ID NO: 980932 - DNA, 20 bp, Homo sapiens
ccaacacctattcccccaaa

SEQ ID NO: 980933 - DNA, 20 bp, Homo sapiens
cccaacacctattcccccaa

SEQ ID NO: 980934 - DNA, 20 bp, Homo sapiens
ccccaacacctattccccca

SEQ ID NO: 980935 - DNA, 20 bp, Homo sapiens
tccccaacacctattccccc

SEQ ID NO: 980936 - DNA, 20 bp, Homo sapiens
atccccaacacctattcccc

SEQ ID NO: 980937 - DNA, 20 bp, Homo sapiens
catccccaacacctattccc

SEQ ID NO: 980938 - DNA, 20 bp, Homo sapiens
ccatccccaacacctattcc

SEQ ID NO: 980939 - DNA, 20 bp, Homo sapiens
tccatccccaacacctattc

SEQ ID NO: 980940 - DNA, 20 bp, Homo sapiens
ctccatccccaacacctatt

SEQ ID NO: 980941 - DNA, 20 bp, Homo sapiens
cctccatccccaacacctat

SEQ ID NO: 980942 - DNA, 20 bp, Homo sapiens
acctccatccccaacaccta

SEQ ID NO: 980943 - DNA, 20 bp, Homo sapiens
cacctccatccccaacacct

SEQ ID NO: 980944 - DNA, 20 bp, Homo sapiens
acctattcccccaaacttaa

SEQ ID NO: 980945 - DNA, 20 bp, Homo sapiens
cctattcccccaaacttaaa

SEQ ID NO: 980946 - DNA, 20 bp, Homo sapiens
ctattcccccaaacttaaat

SEQ ID NO: 980947 - DNA, 20 bp, Homo sapiens
tattcccccaaacttaaatt

SEQ ID NO: 980948 - DNA, 20 bp, Homo sapiens
tcccccaaacttaaattctt

SEQ ID NO: 980949 - DNA, 20 bp, Homo sapiens
ccccaaacttaaattcttaa

SEQ ID NO: 980950 - DNA, 20 bp, Homo sapiens
cccaaacttaaattcttaag

SEQ ID NO: 980951 - DNA, 20 bp, Homo sapiens
ccaaacttaaattcttaaga

SEQ ID NO: 980952 - DNA, 20 bp, Homo sapiens
acttaaattcttaagagaat

SEQ ID NO: 980953 - DNA, 15 bp, Homo sapiens
ttctcatgtctttca

SEQ ID NO: 980954 - DNA, 15 bp, Homo sapiens
tataatggaaaaagg

SEQ ID NO: 980955 - DNA, 15 bp, Homo sapiens
aggtgccaccaagtt

SEQ ID NO: 980956 - DNA, 15 bp, Homo sapiens
acactcctgagacct

SEQ ID NO: 980957 - DNA, 15 bp, Homo sapiens
taattagcaataaat

SEQ ID NO: 980958 - DNA, 15 bp, Homo sapiens
ttaggtcttctggct

SEQ ID NO: 980959 - DNA, 15 bp, Homo sapiens
aaatcatgctcatcc

SEQ ID NO: 980960 - DNA, 15 bp, Homo sapiens
tttgccatgccattt

SEQ ID NO: 980961 - DNA, 15 bp, Homo sapiens
ttgaaaactactgaa

SEQ ID NO: 980962 - DNA, 15 bp, Homo sapiens
attcttggtaaagtt

SEQ ID NO: 980963 - DNA, 15 bp, Homo sapiens
ttttaagctatttta

SEQ ID NO: 980964 - DNA, 15 bp, Homo sapiens
acttgatctcagggt

SEQ ID NO: 980965 - DNA, 15 bp, Homo sapiens
agtagttgggaggct

SEQ ID NO: 980966 - DNA, 15 bp, Homo sapiens
gggcatagtgacaca

SEQ ID NO: 980967 - DNA, 15 bp, Homo sapiens
taattttttaattag

SEQ ID NO: 980968 - DNA, 20 bp, Homo sapiens
gaagccggaaaagtcgcaat

SEQ ID NO: 980969 - DNA, 20 bp, Homo sapiens
agaagccggaaaagtcgcaa

SEQ ID NO: 980970 - DNA, 20 bp, Homo sapiens
gagaagccggaaaagtcgca

SEQ ID NO: 980971 - DNA, 20 bp, Homo sapiens
ggagaagccggaaaagtcgc

SEQ ID NO: 980972 - DNA, 20 bp, Homo sapiens
aggagaagccggaaaagtcg

SEQ ID NO: 980973 - DNA, 20 bp, Homo sapiens
gaggagaagccggaaaagtc

SEQ ID NO: 980974 - DNA, 20 bp, Homo sapiens
agaggagaagccggaaaagt

SEQ ID NO: 980975 - DNA, 20 bp, Homo sapiens
gagaggagaagccggaaaag

SEQ ID NO: 980976 - DNA, 20 bp, Homo sapiens
ggagaggagaagccggaaaa

SEQ ID NO: 980977 - DNA, 20 bp, Homo sapiens
ggaaatggctgatgggaagg

SEQ ID NO: 980978 - DNA, 20 bp, Homo sapiens
ttaaaaaaacaatgcggcgg

SEQ ID NO: 980979 - DNA, 20 bp, Homo sapiens
cttaaaaaaacaatgcggcg

SEQ ID NO: 980980 - DNA, 20 bp, Homo sapiens
tcttaaaaaaacaatgcggc

SEQ ID NO: 980981 - DNA, 20 bp, Homo sapiens
atcttaaaaaaacaatgcgg

SEQ ID NO: 980982 - DNA, 20 bp, Homo sapiens
aatcttaaaaaaacaatgcg

SEQ ID NO: 980983 - DNA, 20 bp, Homo sapiens
aaatcttaaaaaaacaatgc

SEQ ID NO: 980984 - DNA, 20 bp, Homo sapiens
gaaatcttaaaaaaacaatg

SEQ ID NO: 980985 - DNA, 15 bp, Homo sapiens
acatccatggtacct

SEQ ID NO: 980986 - DNA, 15 bp, Homo sapiens
tacctataaggagct

SEQ ID NO: 980987 - DNA, 15 bp, Homo sapiens
agctccttgacacgg

SEQ ID NO: 980988 - DNA, 15 bp, Homo sapiens
tttccagaggagcca

SEQ ID NO: 980989 - DNA, 15 bp, Homo sapiens
aggcccagagtcctg

SEQ ID NO: 980990 - DNA, 15 bp, Homo sapiens
aaagtgacccagaat

SEQ ID NO: 980991 - DNA, 15 bp, Homo sapiens
aatttgaccttgata

SEQ ID NO: 980992 - DNA, 15 bp, Homo sapiens
gatcccttggttggg

SEQ ID NO: 980993 - DNA, 15 bp, Homo sapiens
ccagggctgcagcct

SEQ ID NO: 980994 - DNA, 15 bp, Homo sapiens
tcactctcccgttag

SEQ ID NO: 980995 - DNA, 15 bp, Homo sapiens
tgaatgaagtgagtg

SEQ ID NO: 980996 - DNA, 15 bp, Homo sapiens
agaatccaaatttga

SEQ ID NO: 980997 - DNA, 15 bp, Homo sapiens
tcgctttaagaaagg

SEQ ID NO: 980998 - DNA, 15 bp, Homo sapiens
tgtcagaaggaagcc

SEQ ID NO: 980999 - DNA, 15 bp, Homo sapiens
tctttgcatgcaggt

SEQ ID NO: 981000 - DNA, 15 bp, Homo sapiens
atgcaggtgtttgcg

SEQ ID NO: 981001 - DNA, 15 bp, Homo sapiens
ggcggccgcctacgt

SEQ ID NO: 981002 - DNA, 15 bp, Homo sapiens
atgctcgggaccctc

SEQ ID NO: 981003 - DNA, 15 bp, Homo sapiens
accctcagacgcgct

SEQ ID NO: 981004 - DNA, 15 bp, Homo sapiens
tcacctccgggaggc

SEQ ID NO: 981005 - DNA, 15 bp, Homo sapiens
acttgcccttgtccg

SEQ ID NO: 981006 - DNA, 16 bp, Homo sapiens
ccgcgtacggcggaca

SEQ ID NO: 981007 - DNA, 15 bp, Homo sapiens
actccccagcctggc

SEQ ID NO: 981008 - DNA, 15 bp, Homo sapiens
tcctggcccggctct

SEQ ID NO: 981009 - DNA, 15 bp, Homo sapiens
aacctcccaggccta

SEQ ID NO: 981010 - DNA, 15 bp, Homo sapiens
ctccaggtgtgttta

SEQ ID NO: 981011 - DNA, 15 bp, Homo sapiens
agacccaaaagggaa

SEQ ID NO: 981012 - DNA, 15 bp, Homo sapiens
tgacttccccaaagt

SEQ ID NO: 981013 - DNA, 15 bp, Homo sapiens
agccgatccctccac

SEQ ID NO: 981014 - DNA, 15 bp, Homo sapiens
aaaatggattggaaa

SEQ ID NO: 981015 - DNA, 15 bp, Homo sapiens
ttgtcctcatgcccc

SEQ ID NO: 981016 - DNA, 15 bp, Homo sapiens
ctcctcttcctacaa

SEQ ID NO: 981017 - DNA, 15 bp, Homo sapiens
acctgccttgtcaaa

SEQ ID NO: 981018 - DNA, 15 bp, Homo sapiens
aagccctgccctcca

SEQ ID NO: 981019 - DNA, 15 bp, Homo sapiens
aagcccttgatcttg

SEQ ID NO: 981020 - DNA, 15 bp, Homo sapiens
aggtggacacagatc

SEQ ID NO: 981021 - DNA, 15 bp, Homo sapiens
acagatcctctggcc

SEQ ID NO: 981022 - DNA, 15 bp, Homo sapiens
tcagctccaaaactc

SEQ ID NO: 981023 - DNA, 15 bp, Homo sapiens
ccctgcttttccaat

SEQ ID NO: 981024 - DNA, 15 bp, Homo sapiens
gaaagaccagagact

SEQ ID NO: 981025 - DNA, 15 bp, Homo sapiens
acccgatccattttc

SEQ ID NO: 981026 - DNA, 15 bp, Homo sapiens
aaagcttcttgtgtt

SEQ ID NO: 981027 - DNA, 15 bp, Homo sapiens
tcagaacaccctcct

SEQ ID NO: 981028 - DNA, 15 bp, Homo sapiens
tcctccacaccaaaa

SEQ ID NO: 981029 - DNA, 20 bp, Homo sapiens
gaaatgagcatgaaaccaaa

SEQ ID NO: 981030 - DNA, 20 bp, Homo sapiens
gtatcctaagtcatacagac

SEQ ID NO: 981031 - DNA, 20 bp, Homo sapiens
ctaaaatagttgcataacac

SEQ ID NO: 981032 - DNA, 20 bp, Homo sapiens
cctccaataccatagtaatg

SEQ ID NO: 981033 - DNA, 20 bp, Homo sapiens
gttatgtcacatcccaattt

SEQ ID NO: 981034 - DNA, 20 bp, Homo sapiens
aagtcaaaatgccttaaggt

SEQ ID NO: 981035 - DNA, 20 bp, Homo sapiens
aatcatacctcaatttaaaa

SEQ ID NO: 981036 - DNA, 20 bp, Homo sapiens
ccattattgcacaaatcacc

SEQ ID NO: 981037 - DNA, 20 bp, Homo sapiens
tcatatccccccaacctgtc

SEQ ID NO: 981038 - DNA, 20 bp, Homo sapiens
aacctctatattcaatttgc

SEQ ID NO: 981039 - DNA, 20 bp, Homo sapiens
tgtgaactccggttaaatca

SEQ ID NO: 981040 - DNA, 20 bp, Homo sapiens
caaagcttatccttctttcc

SEQ ID NO: 981041 - DNA, 20 bp, Homo sapiens
tccttctttccaagcccaga

SEQ ID NO: 981042 - DNA, 20 bp, Homo sapiens
caaccttccaaatatccttc

SEQ ID NO: 981043 - DNA, 20 bp, Homo sapiens
aaatgaccaatgagaagtgc

SEQ ID NO: 981044 - DNA, 20 bp, Homo sapiens
cctttacttctaatcattgt

SEQ ID NO: 981045 - DNA, 20 bp, Homo sapiens
gtataatatgcaaacagcct

SEQ ID NO: 981046 - DNA, 20 bp, Homo sapiens
cgagtcacaagtaaagaatg

SEQ ID NO: 981047 - DNA, 20 bp, Homo sapiens
cattctttacttgtgactcg

SEQ ID NO: 981048 - DNA, 20 bp, Homo sapiens
taccaaagtaagtcaagaac

SEQ ID NO: 981049 - DNA, 20 bp, Homo sapiens
caaagtaagtcaagaacctg

SEQ ID NO: 981050 - DNA, 20 bp, Homo sapiens
tcagctcgatggaagatata

SEQ ID NO: 981051 - DNA, 20 bp, Homo sapiens
ctgagagcgtcggtaacagc

SEQ ID NO: 981052 - DNA, 20 bp, Homo sapiens
catcattttcactgcttccc

SEQ ID NO: 981053 - DNA, 20 bp, Homo sapiens
ccctgccccaaattactaag

SEQ ID NO: 981054 - DNA, 20 bp, Homo sapiens
tttggacaatagagtcatac

SEQ ID NO: 981055 - DNA, 20 bp, Homo sapiens
cagatgaaagagcatagatg

SEQ ID NO: 981056 - DNA, 20 bp, Homo sapiens
cttttatgcccttggctttc

SEQ ID NO: 981057 - DNA, 20 bp, Homo sapiens
gctttgattccattgacgat

SEQ ID NO: 981058 - DNA, 20 bp, Homo sapiens
cccttaatgctttgattcca

SEQ ID NO: 981059 - DNA, 15 bp, Homo sapiens
tacctgcattctgcc

SEQ ID NO: 981060 - DNA, 15 bp, Homo sapiens
gttgacctcggagtg

SEQ ID NO: 981061 - DNA, 15 bp, Homo sapiens
atgtgaggagctgag

SEQ ID NO: 981062 - DNA, 15 bp, Homo sapiens
tatccctgggaatgg

SEQ ID NO: 981063 - DNA, 15 bp, Homo sapiens
tcctttcctgcccag

SEQ ID NO: 981064 - DNA, 15 bp, Homo sapiens
gtcagcgtttcctca

SEQ ID NO: 981065 - DNA, 15 bp, Homo sapiens
ccaggcactcatcag

SEQ ID NO: 981066 - DNA, 15 bp, Homo sapiens
tgggagtatggttta

SEQ ID NO: 981067 - DNA, 15 bp, Homo sapiens
tacactagagtagaa

SEQ ID NO: 981068 - DNA, 15 bp, Homo sapiens
aggcattcggaaagt

SEQ ID NO: 981069 - DNA, 15 bp, Homo sapiens
ttgggtggagaagga

SEQ ID NO: 981070 - DNA, 15 bp, Homo sapiens
agaggtaagttctgc

SEQ ID NO: 981071 - DNA, 15 bp, Homo sapiens
tgcagcagaatcgga

SEQ ID NO: 981072 - DNA, 15 bp, Homo sapiens
tctgcagaattcaaa

SEQ ID NO: 981073 - DNA, 15 bp, Homo sapiens
acacttggtatgtgg

SEQ ID NO: 981074 - DNA, 15 bp, Homo sapiens
cattgacaagtccgt

SEQ ID NO: 981075 - DNA, 15 bp, Homo sapiens
tgtacagcaccggcc

SEQ ID NO: 981076 - DNA, 15 bp, Homo sapiens
agaggcggcaacaga

SEQ ID NO: 981077 - DNA, 15 bp, Homo sapiens
aggatgactttgatt

SEQ ID NO: 981078 - DNA, 15 bp, Homo sapiens
ctataaaaccctcaa

SEQ ID NO: 981079 - DNA, 15 bp, Homo sapiens
gcagcagatgctgga

SEQ ID NO: 981080 - DNA, 15 bp, Homo sapiens
tggagctgcggcagt

SEQ ID NO: 981081 - DNA, 15 bp, Homo sapiens
tgacagcttcccaat

SEQ ID NO: 981082 - DNA, 15 bp, Homo sapiens
ttccttctctgttgt

SEQ ID NO: 981083 - DNA, 15 bp, Homo sapiens
tgtagaataactatt

SEQ ID NO: 981084 - DNA, 15 bp, Homo sapiens
taaagtattacctat

SEQ ID NO: 981085 - DNA, 15 bp, Homo sapiens
atgtgtgagggccag

SEQ ID NO: 981086 - DNA, 15 bp, Homo sapiens
aggagcctggtgttt

SEQ ID NO: 981087 - DNA, 15 bp, Homo sapiens
ttgtgtctcaggaag

SEQ ID NO: 981088 - DNA, 15 bp, Homo sapiens
aagccaacaggagga

SEQ ID NO: 981089 - DNA, 15 bp, Homo sapiens
ttaatatggtggtta

SEQ ID NO: 981090 - DNA, 15 bp, Homo sapiens
atatactctttgtta

SEQ ID NO: 981091 - DNA, 15 bp, Homo sapiens
aagacgtaagcgtaa

SEQ ID NO: 981092 - DNA, 15 bp, Homo sapiens
aacttctggtgttct

SEQ ID NO: 981093 - DNA, 15 bp, Homo sapiens
tcttagcttatggtt

SEQ ID NO: 981094 - DNA, 15 bp, Homo sapiens
ttatgacttggttca

SEQ ID NO: 981095 - DNA, 15 bp, Homo sapiens
gttgtgatggacgct

SEQ ID NO: 981096 - DNA, 20 bp, Homo sapiens
aatggatgtctgcacaaaaa

SEQ ID NO: 981097 - DNA, 20 bp, Homo sapiens
aaaggaaaatggatgtctgc

SEQ ID NO: 981098 - DNA, 20 bp, Homo sapiens
gaaaggaaaatggatgtctg

SEQ ID NO: 981099 - DNA, 20 bp, Homo sapiens
ttcagtaggcacctgccctg

SEQ ID NO: 981100 - DNA, 20 bp, Homo sapiens
tatacttccttggtctggaa

SEQ ID NO: 981101 - DNA, 20 bp, Homo sapiens
tttatacttccttggtctgg

SEQ ID NO: 981102 - DNA, 20 bp, Homo sapiens
ggtccttctttatacttcct

SEQ ID NO: 981103 - DNA, 20 bp, Homo sapiens
actcagatttttttgtaaca

SEQ ID NO: 981104 - DNA, 20 bp, Homo sapiens
aaacactcagatttttttgt

SEQ ID NO: 981105 - DNA, 20 bp, Homo sapiens
ctgtgtccgctagaaacact

SEQ ID NO: 981106 - DNA, 20 bp, Homo sapiens
tatctgtgtccgctagaaac

SEQ ID NO: 981107 - DNA, 20 bp, Homo sapiens
caaatatctgtgtccgctag

SEQ ID NO: 981108 - DNA, 20 bp, Homo sapiens
agacaaatatctgtgtccgc

SEQ ID NO: 981109 - DNA, 20 bp, Homo sapiens
ctagacaaatatctgtgtcc

SEQ ID NO: 981110 - DNA, 20 bp, Homo sapiens
ctcctagacaaatatctgtg

SEQ ID NO: 981111 - DNA, 20 bp, Homo sapiens
ccctcctagacaaatatctg

SEQ ID NO: 981112 - DNA, 20 bp, Homo sapiens
atgtgaaatatgttgtgcat

SEQ ID NO: 981113 - DNA, 20 bp, Homo sapiens
ctatgtgaaatatgttgtgc

SEQ ID NO: 981114 - DNA, 20 bp, Homo sapiens
aaaactatgtgaaatatgtt

SEQ ID NO: 981115 - DNA, 20 bp, Homo sapiens
aatcagaaaactatgtgaaa

SEQ ID NO: 981116 - DNA, 20 bp, Homo sapiens
caaactgaaatcagaaaact

SEQ ID NO: 981117 - DNA, 20 bp, Homo sapiens
tctccacatcctcatgcccc

SEQ ID NO: 981118 - DNA, 20 bp, Homo sapiens
tggaataccctctccacatc

SEQ ID NO: 981119 - DNA, 20 bp, Homo sapiens
ctggcatcctggaataccct

SEQ ID NO: 981120 - DNA, 20 bp, Homo sapiens
tccctgtctggcatcctgga

SEQ ID NO: 981121 - DNA, 20 bp, Homo sapiens
cataatctccctgtctggca

SEQ ID NO: 981122 - DNA, 20 bp, Homo sapiens
atccataatctccctgtctg

SEQ ID NO: 981123 - DNA, 20 bp, Homo sapiens
agaattcttccaactacttt

SEQ ID NO: 981124 - DNA, 20 bp, Homo sapiens
tagaattcttccaactactt

SEQ ID NO: 981125 - DNA, 20 bp, Homo sapiens
ccctagaattcttccaacta

SEQ ID NO: 981126 - DNA, 20 bp, Homo sapiens
gagatatgtgtacttgcaat

SEQ ID NO: 981127 - DNA, 20 bp, Homo sapiens
agatatgtgtacttgcaatt

SEQ ID NO: 981128 - DNA, 20 bp, Homo sapiens
tatgtgtacttgcaattcca

SEQ ID NO: 981129 - DNA, 20 bp, Homo sapiens
tgtacttgcaattccatttc

SEQ ID NO: 981130 - DNA, 20 bp, Homo sapiens
tccatttctatctgtaaaac

SEQ ID NO: 981131 - DNA, 20 bp, Homo sapiens
aataactgacagttcaatat

SEQ ID NO: 981132 - DNA, 20 bp, Homo sapiens
tgacagttcaatatgtccta

SEQ ID NO: 981133 - DNA, 20 bp, Homo sapiens
atgtcctagagagttggcct

SEQ ID NO: 981134 - DNA, 20 bp, Homo sapiens
tcctagagagttggcctgaa

SEQ ID NO: 981135 - DNA, 20 bp, Homo sapiens
tttagagtgaaccaaattca

SEQ ID NO: 981136 - DNA, 20 bp, Homo sapiens
tagagtgaaccaaattcaaa

SEQ ID NO: 981137 - DNA, 20 bp, Homo sapiens
gtgaaccaaattcaaattct

SEQ ID NO: 981138 - DNA, 20 bp, Homo sapiens
aaccaaattcaaattcttag

SEQ ID NO: 981139 - DNA, 20 bp, Homo sapiens
accaaattcaaattcttagc

SEQ ID NO: 981140 - DNA, 20 bp, Homo sapiens
caaattcttagcctggatct

SEQ ID NO: 981141 - DNA, 20 bp, Homo sapiens
ccccctgcagttggcagagt

SEQ ID NO: 981142 - DNA, 20 bp, Homo sapiens
tgcagttggcagagttgtta

SEQ ID NO: 981143 - DNA, 20 bp, Homo sapiens
cagagttgttagtacaggtt

SEQ ID NO: 981144 - DNA, 20 bp, Homo sapiens
tgtttaccaagcacttgact

SEQ ID NO: 981145 - DNA, 20 bp, Homo sapiens
ccaagcacttgacttaaacc

SEQ ID NO: 981146 - DNA, 20 bp, Homo sapiens
cttgacttaaacctccatag

SEQ ID NO: 981147 - DNA, 20 bp, Homo sapiens
gcaaagccagttagaaagcc

SEQ ID NO: 981148 - DNA, 20 bp, Homo sapiens
cgttgttgaagcagagtgaa

SEQ ID NO: 981149 - DNA, 20 bp, Homo sapiens
aagcagagtgaacagagtca

SEQ ID NO: 981150 - DNA, 20 bp, Homo sapiens
agtgaacagagtcagatagt

SEQ ID NO: 981151 - DNA, 20 bp, Homo sapiens
agcacctaaaggatttcaga

SEQ ID NO: 981152 - DNA, 20 bp, Homo sapiens
aaggcaagtcacagcctctg

SEQ ID NO: 981153 - DNA, 20 bp, Homo sapiens
ccagggctaactcttggtca

SEQ ID NO: 981154 - DNA, 20 bp, Homo sapiens
tcattttcctctctgcttag

SEQ ID NO: 981155 - DNA, 20 bp, Homo sapiens
attttcctctctgcttagtt

SEQ ID NO: 981156 - DNA, 15 bp, Homo sapiens
agcaaatatcctcat

SEQ ID NO: 981157 - DNA, 15 bp, Homo sapiens
taattcgcttgtagt

SEQ ID NO: 981158 - DNA, 15 bp, Homo sapiens
cttaccattgacttt

SEQ ID NO: 981159 - DNA, 15 bp, Homo sapiens
caggagttctacttc

SEQ ID NO: 981160 - DNA, 15 bp, Homo sapiens
ggaagtagaactcct

SEQ ID NO: 981161 - DNA, 15 bp, Homo sapiens
tcaatgtgaccagca

SEQ ID NO: 981162 - DNA, 15 bp, Homo sapiens
atcactctccagata

SEQ ID NO: 981163 - DNA, 15 bp, Homo sapiens
agcaaatatcctcat

SEQ ID NO: 981164 - DNA, 15 bp, Homo sapiens
agcaaatatcctcat

SEQ ID NO: 981165 - DNA, 15 bp, Homo sapiens
taattcgcttgtagt

SEQ ID NO: 981166 - DNA, 15 bp, Homo sapiens
taattcgcttgtagt

SEQ ID NO: 981167 - DNA, 15 bp, Homo sapiens
cttaccattgacttt

SEQ ID NO: 981168 - DNA, 15 bp, Homo sapiens
cttaccattgacttt

SEQ ID NO: 981169 - DNA, 15 bp, Homo sapiens
caggagttctacttc

SEQ ID NO: 981170 - DNA, 15 bp, Homo sapiens
caggagttctacttc

SEQ ID NO: 981171 - DNA, 15 bp, Homo sapiens
ggaagtagaactcct

SEQ ID NO: 981172 - DNA, 15 bp, Homo sapiens
ggaagtagaactcct

SEQ ID NO: 981173 - DNA, 15 bp, Homo sapiens
tcaatgtgaccagca

SEQ ID NO: 981174 - DNA, 15 bp, Homo sapiens
tcaatgtgaccagca

SEQ ID NO: 981175 - DNA, 15 bp, Homo sapiens
atcactctccagata

SEQ ID NO: 981176 - DNA, 15 bp, Homo sapiens
atcactctccagata

SEQ ID NO: 981177 - DNA, 15 bp, Homo sapiens
cggcacgaaaattaa

SEQ ID NO: 981178 - DNA, 15 bp, Homo sapiens
actaaacaacgggta

SEQ ID NO: 981179 - DNA, 15 bp, Homo sapiens
caaactgacgaatag

SEQ ID NO: 981180 - DNA, 15 bp, Homo sapiens
attggtcgctaaccg

SEQ ID NO: 981181 - DNA, 15 bp, Homo sapiens
aattggtcgctaacc

SEQ ID NO: 981182 - DNA, 15 bp, Homo sapiens
caattggtcgctaac

SEQ ID NO: 981183 - DNA, 15 bp, Homo sapiens
acaattggtcgctaa

SEQ ID NO: 981184 - DNA, 15 bp, Homo sapiens
gacaattggtcgcta

SEQ ID NO: 981185 - DNA, 15 bp, Homo sapiens
ctacgcgtcgacggt

SEQ ID NO: 981186 - DNA, 15 bp, Homo sapiens
ccgattcgcgcgtaa

SEQ ID NO: 981187 - DNA, 39790 bp, Homo sapiens
tgtaacagactggaatttttaaaagcacacagagccctttgctgcactaacagcaatggacatgtctaccaggtccaaaaaaaaaaatggtcctacacaatctgcggtggtgtattttcacacttttaataatacacacctatgcattccgtcttggggtgtgtgtgtctgtgtgtgtgtgtgtatgtgactaacttaacacactgaacgcattacaatgcattaaaaagttcttcagcagacttctctgctttagcctctgctatggtctaaatgtttatgtccccgccaaattcacttgttgaaatcctaacccccagggtgatgatggtgttagaaggtggggacatagggaggcgatcgggtcatgagggcagagccttcatgaatgggattattatccttataaaggaggagagacttccttgccccttccactgtgtaagggcacagtgaggaagcaccacctatggaccggaaagaaggccttcgctactggtgtcttgatcttggacttcccagcctccagaactgtaagcaataagtttctgttgttgttgttgtttttctgagactgagtctcgctctattgcccaggctggagtgcagtggtgtgatctcggctcactacaacctctgactcctgggttcaagtgattctcatgcctcagtttcccaattagctgggattacaggtgcgcgccgccacgccaggctaatttttgtatttttagtagagagggggtttcaccatgttggccaggctggtcttgaactcctgacctcaagtagtccacccgtctcggcctcccaaagtgctggaattacaggcatgagccagtgcgtccggccagtttctgttgtttataagccacccagttcatggtattttcttatagcagctcaaatgggctacaacagcatctctgattatcctataacaatatatccgtttctctatgggaatccatttctgtgcgagaatatgtaagaacctcagatgtttcatgccattgctgaacagaggagtctcctgggttctggacacttgccttgggaagcacatcacttggttcctctcaaacgcatttgaccactgaatagccagccactcactatggaaacacagcccgaagcactctcaatcttttggacctcagcccttttctggatctatgaaaatgtccatactggatggtgctggcaggttgcgaagtgcccaaacctcccacgcttcacaggaggaaccctctgcaaatcttacatggcaggtgggtgaccagaggagccattccaataccagtcattgctggatgtttctggggtgctgtcccaggtgctgtggagcatatctactctgtctagtctgtctttccattccagtccagtggatattgtgtcttcttcttcaggtccttgttcactgtagctgctcaggaaatagttgtgaaatggattgttgttgtggtacattcttaaagtcccttgaaagtaagaaaataaacgaatgactcttctgtgggtaaaactttggtcatcttttcacttgtttagatgagaaagaatacagaacaatgagattatagtctcctaaaacttttggaaaaattcttcatgtcctctatagtgttataattttgctattgtcccccaaagggactcaggtaacatgctttggatggaatggtgggattaaaggcacctttgattctgcacatttggtggtgttgtgaatacaaactaaacactagctgtgcagtatgcaatatttaaaggaagtagaaatcatccaaatcagcatttccagagtttttcagaacaagcaagagaatacaagagatcagcagttttctccctcaagttgttctataggaaaaaaaaaatttatccaggctcaaagaaattctataggaaggaaatctgcatacttttgctaaccccatcatttcccagactctttgaattcagtaggaagaccgcttgctccacacagttattcaaggtccccaagattcttctatctgggttttccatcatgccctagaacaatgtctttatctgcatggtcaaaactgacttacagtcgtatctgtggtcacagataggggaaggggactgaggattacatgtgcaatattttaagactcaacctgcaagtggcacacatcactttctctcacattccattagtgaaaacttaatcatgtggtcactcctcccttcaaggaggggtaggaattgtggtccctaatggggaggccatttctacattatttctgacagctacaagtctgttaatgtgtatcatagttgtcccaccagcctgcaacagagcaggggctagaagccaggtcttccaactcctagtccagagttcccattaccacactagtatttctgtacagtaagtcctcacttaatgttatcagcaggttcttggaaactgcaattttaagtgaaatcatgtataatgaaatcaattttgaaatttctcatcaatgttgtaactgagtaacgttatttgaggacctgcttacataattttgcttgaagtccaagtttccaagaacctattgatgacattaagtgaggactgactgactgtgttcagccaacatatatggagtcctcctgtgtgccaggctctatgtcaatatgagagtggaaagtcctacaaaacagaatcccctaattatatatttactctagtatcaagctttattaatggataaacgttcagatagctttgtaaagctatcccaaattatctgatagctttgcatgatgttcctttcatttgccaagaacatacatattcttggtgagggattaacacatataatgaacagagtagagaatcctgaaagagatcccaatgcatttgaaaaatgggtatatgaaaaagtcatttaaaaaatagaaccaaaaagataaatatacattaaaaaggagggtgttgagtccactaactaagaatatatatatatatatatatatatatatatatatatatatatatatagctagatttccctttaattccctcttgaagaaggaattgcttatgcaagactccaaagctgagaaccagattgtctttcagttgtcatgcagcctggaaagcccccaccttatgtaccaatagattgtgaagcaatcaaagactactacatacactttaaagccaaccagaaagactccttcccttccaagtatcttttacccgattggaactagaatatgtcaccatgaaagaacactcaccaaagattggcttaagtcttcctccttttagtctgtaaaacttactcttctaggctggcgcagtggctcacgcctataatcccagcactttgggaagctaaggcgggtggatcacctgaggtcaggagttcgagaccagcctggcaaacatggtaaaaccccgtctttactaaaaatacaaaaattagctgggagtagtggcaggtgcctgtagtcccagctgctcaggaggctgaggcaggagaatcgcttcaacctgggaagcggagcttgcagtgagctgagatcgtgctactgcactccagcctgggcaagagtgagactccatctcaaaacaaacaaacaaacaataagacaaaaaaacttactctcctttcaaaccccttccaacctctactataatgaaaatgatggcagctgactcccttataacagtaagttttgaataaacagcctttgattaattctattttgtttgccaaagaaaataattaaagtttggtaaaataaaataattaaaagaaaaagaaatcatggacactctagaagaaaacatttatttgagctttactgctgaaaaagaaaacatattttaaaaagtaaccttgactgcacagcaaaagaaactatcaacaaagtaagcagacaacctacagaatggaagaaaatatgcacaaactatgtatctgacaaaggtctaatattcagaatctataaggaacttaaatcaacaagcaaaaaacaaataaccccatttatggcctttgcttactttttgggcagtcctcaaaagaagacatccaagtggcaaacaatcatatgaaaaaatgcttatcatcactaatcatcagagaaaagcaagtcaaaaccacagtgaagtatcatcacacaccagtcaaaatggctattattaaaaataacagatgttggcagtgctgcagagaaaagggattgcttatgcactgttggtgagaatgtaaattcatttagctactgtggaaagcaggagatttctcaaagaactaaaaatatatatatcattcaaaccaacaattccattactagatatatatccaaaggaaaataaattgttctatcaaaaagacacatgcacctgtatgttcatcgcaatattattcgcaatagcaaatacatggaatcaaccaaggtgttaatcaacagaggagtggataaagaaaatgtggtacatatacaccatggaatactatacagtcagaagaaagaatgaaatcatggcctttgcagcaacatggatgcagctagggaccattatcctaagtaaactaatgcagaaacagaaaagcaaatgccacatgttctcatttataagtgggagccaagtgagtacacatggacatgaaatggaaacaatagacactggagactacaagagaagggagggggacagggattgaaaaactacctattgggtactatgctcagtacttgagtgatgggttcaatcgtatgcaaatttcagcatcatgcaatatacccttgtaacaaacctgcacatgtaccacccctgaatctaaaataaaagttgaaaaaaacaaaaacaaaaaaaccccttggaatgggaggagtcttttcagaccaaacatgagacccagaagacaaaaagtaaactgttaataagttaggctgcatagcaagccaaaatttttatatgaaacattttttaaagtgaaaagatagataaattttcaaaacatataacaaagaattaatttctttggtatacaatgagcttttaaaaattaataagaataattcaatgagaggttgaaatgggtacaaatatagagttaggtagaagcataagacctaagtgtttgatagatcagtagggtgactatagttcaagataatctattgtacctgtcaaaatagctagaagagaacaattcaaatgttcctagcattaaaaaagataaatattgccggtgatgaataccctaattactttttttttttccagacagagtctcattctgtcacccaggctgaagtgcaatggcgcaatcttggctcactgcaacctccgcctcctgggttccagtgattctcctgtctcagcctcccaagtagctgggattacaggggcccacagccatgcctggccaatttttgtatttttagcagagatggggtttcaccatgttggtcagactggtcttgaactcctgatctcaggtgatacacccacctcggcctcccaaagtgctgggatgacaagcgttagtcactgtacccgacctccttagatctttacacattatatgaatgtgtcaaattattacatgtatcccaaaaatatgtacattatgtgttaataaaaagattttcaaaattaataagaataattcaataaggaaaatggacaagggaagaaacacacaattccaggaaaaaatacaaataatcaataaatatatgatacatttaatcacatataatagaagaaatacaaataaaaataaggcacttttaacacaatctattagaataccagatatttaaatttgacagaattgagtattgttgaggatatagagaaatgggcactctcatcctacattgggagaaatataaatcaatactggattcttgagattcagtttacaataagtacaatttaagatgtgcatatctctttaccctgcaattccacttctagaaatttatcctaaatatttacttacaaatgagcaaagacatatatgtacagggatgttcagatttttatgtcgggtttttgtacggacatagttttttttttttttttttttttttttgagatggagtttcactctgtcgcccaggctggagtgcagtggcgtgatctcggctcactgcaacctccgcctcccaggttcaagcaattctcctgcctcagcctcccaagtagctgggattacaggcatgcaccaccacacctgggtagtttttctatttttagtagagacagagtttcaccatgttggccaggctggtctcgaactcccggcctcaggtgatttgcccgccatggcctcccaaagtgatgggattacaggcatgtgccaccgagcctggctatatggacatagtttttagttctttgggataaatgcccagaagtgttactgctatttaatctttaaagaaactgccaaactacttttcagagtggctgcattattttccattcccaccagcaaagtatgagtaatctatttttacgcattctttcccaaatttagtattttcacttttttttttttttttttttttttttttttttttttttttttgaggcagggtcttgctcagttgcctaggctggagtgtagtggcactatctcggctcactgcaacccctgcctcccaggcttaagcgatcctcacatctcagcaacctgagtagctggggctacaggtgagtgctaccactcatgggtaattttttttgtattcttagtagaggtggagttccgccatgttgcccaggctggtctcaaactcctgacctcaagcgatccacctgcctctgcctcccaaagtgctggggttacaggcgtgcaccactgtgcctggccattctcactatttttaattcaaaatagtttgtgttctctattctccacatctttttgttctttttaatcatctaaagtccatagtttgtattaggattaacttactgttgtacattctctctctctctctcttttttttttaatgagatggagtttctctcttttttgcccaggccaagcgcaatggcacaatctcggctcactacaacctttgcctcctgggttcaagtgattctcctgcctcagcctcccaagtagctgggattacaagtgcgtgccaccacacctggccaattttgtatttttagtagagatggggtttcaccatgttggccgggctggtctccaactcctgacctcagctgatctgcctgcctcagcctcccaaagtgctgtaattataggcataagccactgtgcctggcctagtgttgtacattctgtgggttttgacaattgtatgcatctacatgtatgtaccattatagtattcctgtttttaattttagccattctagtaggcatgtagtgatatctcatggtgattttaatttgcgtttccgtaatggttaataatgctgaacatctttgcatgtgcttgtttgtcatttgtgtttcctacttggtgaaataattgttcatgtcctttgtccattttctaattgaatttttttttaccatttagttttgagatttctttatacaatctagatccaaatctcttgtctcaaatatggtttgcaaatacattcctctaattcatatattgccttttcctcctcttaacaggatgtttcacagagcaaaagttttagttttgttgaaatctcacttttcatttttttctttagtggattgtgcttttgttgtcatatgtaagaactcttcactggccctagatccttgtattggtttcctaagattgccatagcaaatcaccatgaacttagtgacaaaaagacagaaatttattttcacttcctactgtgggcagactagacgttaattattttcatgtatgctcattcctatgacatctttctgatataataattatagttattcttaagcttcacccttttttctattagctttgttaccttgggtgtcactttttcttttttgacattgtgacctatgccagatcatgtctgttagtacttagccctccattcacctctccataatcccttttgtattcctggagcttgatgcctgaaatgacacatcctacattcctttgccagatgggtaccagttagcttgtgcacatgggagacaaccgtgaaaagactgaagtggggaagaagggaggagctgttgtgtttcagtgagcgcccttggcagtggcggtgacagtggctcctgttcagtggcaatggtggagcagctagcaagacatgcagtaagcgcaggctcataggctatggtccaggagcagtcaccgattcctggtctttaggcaatatcatctccctttgcttctccagcctttctaaaattattgtaccttgactagtacaattttttagtattgggggtagtccaaggacacaggctttaaaaagtatgaattcagggttgcctacctgcattgactgcgcttgaatcatgatggccttctggtcggtggcaggaggtgacagtccaaatcatgcagtagcaaaccagatacttaaattatcatctgagatacttcagaagtacagccgtagccataccttcagaagagataaagaaatgttctcctggccaggcgcggtggctcacgcctgtcattccagcactttgggaggccgagggggtggatcacctgaggtcgggagttcgagaccagcctgaccaacatggggaaaccctgtctctactaaaaatacaaaattagcggggcgtggtggcacatgcccataatcccagctactcgggaggctaaggcaggataatcgcttgaacctgagaggcagaggttgcggtgaactgagatcatgccatagtactccagcctgggcaacaagagtgaaactccatctcaaaaaaaaaaaaaaagaaaaaaagataaagaaatgttctcctttcttgccatttctaggggtttggggatggcgtacattgctgcagggcgtgctcactctaccatcttgctccaatctttatttttcaaaatacagtgcttatgcttggttacttcagttaagattatttttaaaaatcataattaagcaaaaatatatggccatgcttaaacatatttaagataaattaagtgatttggcctgtttcagtatcccaactcacatgctaacaggggcttgacctgtagctacggtaccctggaggaaatgatcgcatttatttggttatttcggtctaagtagtaatagttctgtcctgggaaaaagactagcctcaaggcatttctgattgaatgtttttcaattacagtctttaaaccagtatgccacagaactggctctttccacatgacggcctttgtggtgggtggcagattgccctgaggcctcgcaaaatgctaggctttcacaatgtcactgactgacagccaggcccagcacagtcttggtgtgattgtggggctaaagttattccaccttgtgcaatagctacagctttctctaaccagctgcattcttataaagttagaagaaaatacttttttttttttgagatggattctcgctctgttgcccaggctggagtgcaatggtgcgatctcggctcgctgcaacctccgcctcctgggttcaaacgattctcctccctcagacccccgagtagctgggattgcaggtgcctgccaccacgcccggctaacttttttgtatttttagtggagacggggtttcaccatcttcgtcaggctggtctcagactcctgacctcaagtgatctgcccgcctcagcctcccaaaatgctgggattacaggcatgagctactgtgcccggccaaagaaaatactttttatgccagccctgaaactaccctgaagcacatacatcaaccttgaggcctcacactccatcaagaggggtgaagggcatgaggaattagaaagcatagggatttttagttagacagatctggttcaaatcctagacttgtgccttgaacaaattatttaccctcattgaactctagattcattatttgtaaaatgaaagacaataatagttatctccaaaggaaagttgaatatgatcattcatttattcattaattcaacatttattattgcctactttgtgccaggttctattctaggaactaagggatacaactttgaataggcaaaatctctgctctcctgaagtttacttttttttttttttttgagacagagtttcactcttgtcacccaggctagagcgcaatggtgctcttggctcactgcaacctccacctcctgggttcaagtgattctcttgtctcagcctcccaagtagctgggactacaggtatgtgccaccacgcccggctatttctgcatttttagtagagatggggtttcaccatgttggccagactggtctcaaactcctgatctcaggtgatatgcctgtcttggccttccaaagtactgggattacaggcctgagccactgcacctgacctgaagtttatgttctattaaatagcaacagacagtaacataaaccaaaaataaataggaaaacaccataacaaaaatcaaacagtgatataattgagagttgcttctatttctttttgttgtcttcttggttcaatcagcctgctaaactatatggaacctcattttcatgggccacttatttaagccgggggaccttggaaagtctctcatgtctctcatctcaacggcctaatgtgacttctcttgaaatatttggacattagcaggaagctgaggctttacatcagatctttactttaatggtggacttgactttactggtagatttttaggctctgtgtggactgtggagatgatatctggggggcaggcagacacttgccctgcctctgtctgagaaaattctgttttggatgtcttgttgaagttggtgctggcatcctaagcccttgctggggtcgtaatttaattcatcagaatgtgtggcttgcaagaaccggctcagatcctgcccttcaaaaacaaaacatgagcgtgccaagaaagtccaaggtgttgaatgttgccacttcaagcctaaactttctaggaacacctaagtgggtggcagcttccagttctccaggctgcttctaggccagagctgggttccacaagagacagaataggcatatatatgcttaaggaactggaaaaacaggctctctctctctcacaaacacacacacacacataccaaggtagctgtcaaaatgttatccgaaattttggaaccaaaaaatcttgaaagatggtattccaatatcacattttatgtaagttttctattatattagattcaaattacgattcgaggccacaagctttaagaattcagggcctttttaacttgccaagccccacaccactccaggaacttccccacaccccagttctcagaattcatgtgcaaggtctttcctaaatccagggtccaggtcagagagtggaggatgtgctctatttcttacctgattgcagacccctctgacagtgctcccttctgaagcactcactgtctgaacgtacacagtctcagacttaatcatgcacagtgagcaagactgtggtgtgataattggcgtccctgacttattagggcaaatctatgggagggggagacctcctggaccactgagcaattaattcatttacattaggaagtttctccgtcagatgcaggaaaaaaatcttgttttcctgctgtggttttgacttttgccccatcttctgttgctgttgtaggaggcaaaataagggtcaaggcctggaaacacaagtgctttgactgaagctccacttggcttccgaagcccaagctgggttgtaccaggttccctagggtgcaggctgtgggcaactgccagggacatgtgcctgcccaccggcctctggccctcactgagttggccaatgggaaatgacaattgtgaggtggggactgcctgcccccgtgagtaccaggctgttgaggctgggccatctcctcctcacttccattctgactgcagtctgtggttctgattccataccagagggtaagagcaattctgtgaagttccaggctgggtgggggatgcatgcatagcctctggctgggatcacccaggctctcccgtccgtagtagtgtgggagtggatacaggtggatactctggtcagagcagcactggtggaggcagatatgcactgggcttcttcctccgttctcccacagccccaagagagaaagggttatttcagacattccttctaagatgcatggaaccattctgaattttgcccagttcgctctgtagcaggatacctattgagaaaaagttagggtcagtaaggtggaagggtctgtccacagatgaagtccaattcgattaagggggataagggaatacattgcctcttagcttgaccaggtagggcaaaggaagaagcatatatgaaggcagcttcagaaaagtcaagctgagcactgacttcagactggaattaggaatccagctctgccactttattctactcagcaaatatttactgagcaaattctatgggctagacagtggattgggttcacaagatacaatgagtgtgacatggttgttgtctatggatttggggatatatgtaggtatagggatatcttacaaggtaatcaagaggttctaatgaggccagccatggtggctcacacctgtaatcccagcaatttgggagaccgaggcgggtggatcacctgaggtcaggagttccagactagcctgaccaacatggtgaaaccccgcctctaccaaaaatacaaaaattagttgggcgtgatggcaggtgcctgtaatcccagcttctcgggaggctgaggcaggagaattgtctgaacctgggaggcagaggttgcagtgagccgagattgttgccactgcattccagcctgggtgacagagcgagactttgtgtcaaaaaaaaaaaaaaaagaaagaaaagaaaaagaggctctaatgagataaaatgagaaaagcctggcatatagtggcaacttatgaaaaattgtaattaaaaaaaaacattttctgacagaagaaactggatctacctggtttttctgaagcctaatcctgctcgccccagtgagtgctgtttctgaggcatcctggttgttttgagctgtggatgctgaaggttagagtgggagggattttagaggttaggtctgcccctcttgtgttagaggacatggatccctggtctggagaggttctggtttttggatcaagcctcacaaggggtggcaccaactcactcctaggaactccgctagaaggaaggccagctctgcctaattcggttggggagatgggggtccctttatgctagcagaatatgtccgaaggagcatgatggtgtcagctttgttcatgaaggccagtggtacacagggagcccggcagcttcctcagcagtccctgctgccactcttccttaagtcttgaggagtctttttttggcacaatctcagctcactgcaacctccgcctcccaggttcaagcgattctcctgcctcagtctcccaagtagctgagactacaggcatgcgccaccacgcccagctaatttttatatttttagtagagatggggttcaccatattggccaggatggtctcgatctcttgacctcatattccacctgcctcggcctcccaaagtgctggtattacaggtgtgagccactgcgcctggccgaggagtcttaagctgagatcacagcattgcactccagcctgggcaaaaaaagcaaaactccatctcaaaaaaaaaaaaaaaaaaatagacacaagactggctccttgtcttttttggggacagggtctcactctatcacccaggctggagtgcagtggtgcaatcacagctcactgcagcctcgatttcccaggctcaagtgaccctcccatcttagcctcctgagtagctgggactacaggtgtgtgcaaccatgcctggctaatttttaaaaattttttgtagagatgaggtctcactatattggctggggggcctcaaactcctgggctcagcagtcctcccacctcagcctcccaaaaggctgggattatatgcttgctctttttaaggtggctgtagggacaaactttccacctactccttgtcaagccagtggaccggtggtcccagacatacggctaaagtcaagaggtgatgtcttttggagagatactttcaatcaggaatttcaatcagaaattcaatcatgtggagagagacttatcctaaaaatgtggtggtgcgtgggatgctctgttttattagttccttgacagtatgtatgtgtgtgagtgtgtgtgtgcgcgcgcgcacactcatttggatgggtgtgtatgtgtgggggggggtggtgcgtacgtatgtggatgtgtggatgtggtgtgtgggtgtgcgcgtgcataggtggaggtgtgtgtatgggtgcgggtatgtgtgtgtgttgggcatggagatattgacagctctcccagggctgagtgaaggctttcgggcaaagctcctgggagctaggcaaagctgagttgattcctggttatgccatttattattgggttgcaccgtgtgaaactgccaatattctacactttgacttttatttatttttatttttattttttttgagacagagtttcacacttgtcacctaggctggagtgcagtggcgcgatctcagctcactgcaacctctgcctcatggattcaagtgattctcctgcctcagcctcccaagtagctggaattacaggtgcccgctaccacgcctgactaatttttgtatttttggtagagacgggatttcaccatgttgtccaggctggtctgaaactcctgacatcaggtaatccacccacctcagcctcccaaagtgctgggattacaggcatgagccactgcgcccggcccattttgacttttaaaaatgggagtttgatataattcaatccagtggttgaattagctagcatcgttccctctccaagtctcaggttctcctacacgttagagtcaaaagcagggctatgggaagattaagtaaaataaattttgaaaatgccttatgaaaattacactccaaagaactcgcgccagtgtcagtgttctcatgttcctcatctcacatgatcacatttcgcggattaggaagctgagtctgagaagctccgtgtagtgctttttcggaggcaccgtgatgtgatggaaggctcactcgttaggaagtcagaacagagtctctgagggatcatctccttaatctgtcagtttcctcatctctgaagttgggctcatttccttccttcatggagttattgtaaagatgaagataaataacgtgtaaaatctagcatgggaactggcttctataaggttctaataagtgcattcctactccttcccctcagccttcccatttgtaaaagcaaggcaggggtgaggtgatttctggggctccttttggctctgacatttgaggattttgtatacttttttttttttgagacagagtcttgctctgtcacccaggttggagtgcagctcaatgcaaattccgcctcccaggctcaagcaattcttatgtctcagcctcctgagtacctgggattacaggcaggcaccaccacccccagctaatttttttgtattttcagtagagacggggttttgccatattggccaggctggtcttgaactcctgacttcatgtgacccacccatctcagcctcccaaagtgctgagatgacaggtgtgagctaccgtgcctggccaattttgtgtgctttaatgcccttttctgctggaagagttggcaccaggtttggtgatctctttcccccacacggctctgcctcctgccagtcccagaggggaccctgtccttgcatttcacaggattctgctgttgcaactgaaattccagtaggtcaaagtgaaatttctcatacactttaacatgaagataaatgatcacagtatggccctttaggatcctgagaacatcacggtcatcccctggtataattttaaaagcagatgaatccatgcctgtgcgaggtttgccaggaaagccagtgctgggattacagtggaagtctttttatgctacttttttcttgtatccctcaccccatggggtggcatattgaaaggcaggatgtgtgaccacgatacttttctcctcctggactatgtctaagagtctgttattgggttctgaagatcagagtttaatttccgactcctctctgtgtagctctgggatcttggaaagccacttaacctttctgaagtcccctttcctcatctctaaaatgcatacactcatcactaacatttactgagcactgacatgtgccagacaccattctaagcattttacacagactacaccatttgatcttccaacaaacagaacactgaaacgcattacaggtcagaacaaatgatttgtgcctaagcaccaagaccgtagagcccgtgctccctattctaccctatcctgtctctcaaaatgattgtgagaatcgaatgagacactaggtgagaaaagggttttataaatagcattttaaaaattttttaaagtccacaaaatttttaattttaatacagataaaatagatccctttgttttataaaaagtaacaaaatttgttatacaacaactatgttatttattaattttgcctttttgtatgctgccaggaaagaaacattaagaaatcttaaattgattatggtgaatcagaaggtctgcctggactttttattgctctaactgtacagctgatcatactacctcatttttttttatgacacttcaagggtgcgcttagcttcatcactccttcgttgccaaaagctttgtgaccaaaaacaattaagcagattcctgagtcactaaatgacacataaccagagttgagacttaggaacttttagtgccatgctaagcccacagggacacaacaaatagcattttacaaaggcaaagaattgtgacacttgagatttagcttgttgatccttgtaaaagttttctttttaggcataattgagttttagatcatagtactcactattacttagtaataatttttttctgatagaaatacagtgtaacaggccgggcgcagtggctcatgcctgtaatcccagcactttgggaggccgaggcgggcggatcacttgaggtcaggagtttgagaccagcccggccaacatggtgaaatcccatctctactaaaaatacaaaaaattagccaggtgtggtcgtggattcctgtgatcccagctacttgggagggtgaggcaggagcatcagttgaacccaggaggcggaggttgcagtgagccaagatggtgccattgcactccagcctgggccacaaagcgagactccacttcagaaacaaaaaaaaaagagagagagaaaagaaggaaggaaggaaggaaggaaggaaagaaggaaggaaggaaggaaagaaggaaggaaggaaggaaggaaagaaggaaggaaggaaagaaggaaggaaggaaagaaggaaggaaggaaggaagggtaacaagcaaagtgtaacaatggcaatatctaaaaaaataggtatttttatatgtttgtcgttttatatatatgacccccactttagagatgaggaaactgagagattaaggaaacgatccctgagagactctgttctgacttccaaatcggtgagctttccatcgcatcacggtgcctccgaaagcatgacacggagcttctcagactcagcttcctaatccgctaaacgggattatgtgagatgaggaacatgagaacgctgacatgggtgagggttccttggagtatcattttcatgtggcattttcaaaacttattttacctaatcttcccaaagccctgcttttgactctaatgtgtctcctgagacttggagagcgcaagatgctagcgacagagcaagactccatctccagataaataaataagtaaaataaaaaagaacacaaataattttgaaaatttttttgaaaattaggcacgtttgcactgaccttcaattgttattaattgctggtttcccacccagaattaagttggaatgcaactttcttttacaatcagagtccgttcttggtcttggaaacttctgaggctcctgtgctaatcacactcttgtatttttggcacctctaccccgtgccactgtcatggaacccaggctgatcgcacctattagtggagaaatctgtccataatactgaagtttggggacaaacagtgttcccttagggtaggagaaagagatctttatttttgacaaagggggaggagccagaaaactccagagacccctgagtttgccctctctccaaggtttggggtaagccccccgtcaccctttatctctggggctttcacatattctggattctctcctcctgtttcccagcagaaaaggatggagcctcacagattcttcccatttctggagaaaaacatgcatggagctcaaagttcttctcaggagttttattgccaaagccataataagaaagggtggaggtgacaagcagtgaggaagtttaaagatgcatgaaatctgtaaagtctcagaacaagaattctcctaaaatgcaaaaggggctttgctggtctccccttggcttctcatgtagctcacctcttttttcttatcttgagactagtcaaacctaagctgtttctcattttatttccagaagctattgagaacactctcctgaattcttcaaattcagtagagggcgacaaatgtacatataaatgatggtagtgggtcttaaataaagactcatgacacctaaaggggcagcacctgagtctgattgcacctgtttctgttgctgtttctgtctctcttctctctgtctgccatttcattatcaatggttactttacttataagatcatattagaacctgatatttgataaatgatgcatcagatctatagtgagagaaaaaattaatgcaattaaaggtgttgtaacagctagtcttcaagtggggagaaatcatttgagtaccttaggtcacagcttacatcaaaacaaaaaatcagagctacattaaaaagtgaaattttaactatatcaaacaatagaaaaaaacagaagaaaattgaatacttactaaatcttagcatgaataagaactgtttaacacttagaggcaaggactgggcgtggtggctcatgcttttaatcccaggactttgggagcccaaggcgggcggatcacctgaggtcaggagtttgagactagcctggccaacatggtgaaaccccgtctctactaaaaaatgcaaaaattagctgcgtgtggtggtgcatgcctgtaatctcagctacttgggaggctaaggcatgagaatcgcttgaacctgggaggtggaggctgtagtgagccgagattgtgccactgcactacagcctgggtgacagtgtgaaatcctctctctcaaaaaaaaaaaaaaaaaaaagcaaactagagcagtgaggtaccattatttcctttgctcactaaactgacaacacacaaatgttttttataatacccaaagctgatgagggtagttaaggtatgcccttttatacacacactaatgatgtactactggttggcagtataacatatgctgccatgtggggatatgtatcaggagacttaaaaatgtgcataccttttggtccagtaatttacttctgggaatctgtcataacagaataataatcttggggaaagctacatgcctaaggatatttaaaatattatttaaaaatcaaagtataatttcttacagaatataaaataatattttaaaatgaaaatatgctaaaagtttgatgaaatataaatggtcaaatatatattgattatatccacttactagactagcactcactctgagacgttaaaaatagtcattataaaaactagaaaatgccaaagacaaaataaaggaataaagttttacataaagtatgattccactatgtttaaaaataaacagagacattcttggagttgagtattgttttcttttctgtcatgtccaaagaactatataactattatttttaatgaactatatatgtaatatatacatatagtttatatgtatatacaaaatttatctcatatatatgataaagatgaaagatgagttggatgtgccacgtgaagagggtagtatagaaccccaggtaatggggcataggagtgggattccagataccaggcccatgtttttggggtgagattgccaatcacggtctttcttccatccctcacagaggagtaggtttgtcttcaacaaaccttcagttgtcctgaagacaaacctaattctggagacttcatataatctagaagagacaagcaaactgatgaaaaatagtgaatttttaaggtaaaataaagtacatggactacactttgtttagaatcagattcttgggattaaccacattaacccacagagggtcttagtgatgcctctaatccaggatcctaggacctatttctctctgtgagatgctttctcccaactccttggtgagagtgggaagactaagacctcagcaatctgaggtggaggcctaagatccccctaagatcggaggcagaatctgagaggggataaaagtccctatacctgtattgggcccttttctgggagggggatatcaaagaatgattttgagacagggaggcttttgactacctgtgccacttgagctctttgctagggctccagaatacatatttcaaatacattccccctccctccttccttccctcttccactcttcctttttatcttcctttcttcttttccttcctccttcccttcctttctctggctctctcatgatttcttttcctcattataaaagtgcttatttagtccctactctgctattagtgtgttagtctttgtcccctggtacttgctgtttaatggagaaatgggtgagcaaaacagaaattacagcagagtgcaatgatagagctaagccaggtgtataaatccattctcacactgctgtaaaaaactacttgagactgggtaatttataaagaaaagaggtttaattgactcacagttccacaggctgtacaggaagcatggctggggaggcctcagaaaacttacaatcatggtggaagaaagagcgaaggggaagcaagcacatcacacagcagcaggagagagagagagaaagagagagagagagaatataggggaagtgctacacactttcaaccagatcttgtgagaattcacctactatcatgagaacagcaagggataagtctgcctccatgattcagtcacctcctaccaggccccttctccaacacatgtcgacgtgctatttgggtggggacacagacccaaaccatattaccagggcactggagaaacacagaggggaaagaaccagccaaggagtgagatggagaacaaggaggacttcttgaaacagatgacatccaaactgggtcctgaaagctgaatagagattagacaggggaggaggggcagctaaagatggctcaggcaaacaaagggccaggggatatgttcatgggatgatgtgtctctcgttgtctgcttaacacaaggtgagtctctccctccctctctctctctttttctctgtgtgtgtttgtgtgtgtgcatgtgtgcaaatgtaatatacccaatagtcaaacatgtgccccaggagaggggtagaggaagaaagagaatgagagagtaagaaggaggaatagacacagaaaatgagagagaaggggggaaagaaaaagaagaaaggagccagaggagagaagctggttagcattgaatggagcaatctgtgtcatcgtacttgggaaacccaaggatggattcttggcaagtcgactcttggagctttccctgtgcttggtcctgtgctcagacatgggaaaattagaggagtgtcatctgtgcaatcactgaattcataatcttggtgaggaaaggagactacacacagggaataatgctaagtattacagatttcagggcagaaagagatcaaggtgggctgcaatattcagaaaagtcttcctggaaaagttgaatacttagaaagcagctcctagaagtagactctgctgagatggacggagtcctttgtaggtcccaactgggtgtgtgtgtggggtctgtctctccatggctgacagtgcacatgtggattccagggctcaggatgctgttgctgggagctgttctactgctattagctctgcccggtcatgaccaggaaaccacgactcaagggcccggagtcctgcttcccctgcccaagggggcctgcacaggttggatggcgggcatcccagggcatccgggccataatggggccccaggccgtgatggcagagatggcacccctggtgagaagggtgagaaaggagatccaggtaagaatgtttctggcctctttcatcacagacctcctacactgatataaactatatgaaggcattcattattaactaaggcctagacacagggagaaagcaaagcttttttatgttaaccataagcaacctgaagtgatttggggttggtcttccaaggatgagtgtagatggtgcctctataaccaagactttggctttgctgcatctgcagctccttttccatcccctttcccatcttcaccctcatccctattcccagtacattcatattctgattcctctttctgtctgcttaacttccatttcacccagtggcattcaaccacatttactgcacaccccctgaaaggctcagtcctgcctttggggaactcttgatctaggtaagatgtctaatgtgcaaggctctgttggtggttactacaagaaagtctactctaaaaatgtcaaactgaatgtgaacaagtattcaaagtatggagcatagagaaaatatactcaccgtggacctgatgaagaatgaaggcttcaaggaggaggcagagcttcagctaggccttgaatgatgggtaggcagaatagaggaggagagacatcctagatggagggggtagaattgcaaaaccagggttgatggtgccagcacataaagggctggcagggtggagggtctatgatagagacctataggagataaagatagagttgaaattatgggagcctccatgtctgtgggagatatagaaggaggaggtaacacctctctccttttgggagctcttattggtttcttgatctataagtcaagaaggttgtgagtgggagccacagggatggtaatttaggctgtaaccaacctaggcaggagttctgttctttgtagtcactgaggtcttctcattccttaggtcttattggtcctaagggagacatcggtgaaaccggagtacccggggctgaaggtccccgaggctttccgggaatccaaggcaggaaaggagaacctggagaaggtgcctatgtataccgctcagcattcagtgtgggattggagacttacgttactatccccaacatgcccattcgctttaccaagatcttctacaatcagcaaaaccactatgatggctccactggtaaattccactgcaacattcctgggctgtactactttgcctaccacatcacagtctatatgaaggatgtgaaggtcagcctcttcaagaaggacaaggctatgctcttcacctatgatcagtaccaggaaaataatgtggaccaggcctccggctctgtgctcctgcatctggaggtgggcgaccaagtctggctccaggtgtatggggaaggagagcgtaatggactctatgctgataatgacaatgactccaccttcacaggctttcttctctaccatgacaccaactgatcaccactaactcagagcctcctccaggccaaacagccccaaagtcaattaaaggctttcagtacggttaggaagttgattattatttagttggaggcctttagatattattcattcatttactcattcatttattcattcattcatcgagtaactttaaaaaaatcatatgctatgttcccagtcctggggagcttcacaaacatgaccagataactgactagaaagaagtagttgacagtgctattttgtgcccactgtctctcctgatgctcatatcaatcctataaggcacagggaacaagcattctcctgtttttacagattgtatcctgaggctgagagagttaagtgaatgtctaaggtcacacagtattaagtgacagtgctagaaatcaaacccagagctgtggactttgttcactagactgtgcccttttatagaggtacatgttctctttggagtgttggtaggtgtctgtttcccacctcacctgagagccattgaatttgccttcctcatgaattaaaacctcccccaagcagagcttcctcagagaaagtggttctatgatgacgtcctgtcttggaaggactactactcaatggcccctgcactactctacttcctcttacctatgtcccttctcatgcctttccctccaacggggaaagccaactccatctctaagtgccgaactcatccctgttcctcaaggccacctggccaggagcttctctgatgtgatatccactttttttttttttgagatggagtctcactctgtcacccaggctggagtacagtgacacgacctcggctcactgcagcctccttctcctgggtccaagcaattattgtgcctcagcctcccgagtagctgagacttcaggtgcattccaccacacatggctaatttttgtatttttagtagaaatggggtttcgtcatgttggccaggctggtctcgaactcctggcctaggtgatccacccgcctcgacctcccaaagtgctgggattacaggcatgagccaccatgcccagtcgatatctcactttttattttgccatggatgagagtcctgggtgtgaggaacacctcccaccaggctagaggcaactgcccaggaaggactgtgcttccgtcacctctaaatcccttgcagatccttgataaatgcctcatgaagaccaatctcttgaatcccatatctacccagaattaactccattccagtctctgcatgtaatcagttttatccacagaaacattttcattttaggaaatccctggttttaagtatcaatccttgttcagctggacaatatgaatcttttccactgaagttagggatgactgtgattttcagaacacgtccagaatttttcatcaagaaggtagcttgagcctgaaatgcaaaacccatggaggaattctgaagccattgtctccttgagtaccaacagggtcagggaagactgggcctcctgaatttattattgttctttaagaattacaggttgaggtagttgatggtggtaaacattctctcaggagacaataactccagtgatgttcttcaaagattttagcaaaaacagagtaaatagcattctctatcaatatataaatttaaaaaactatctttttgcttacagttttaaattctgaacaattctctcttatatgtgtattgctaatcattaaggtattattttttccacatataaagctttgtctttttgttgttgttgttgtttttaagatggagtttccctctgttgccaggctagagtgcagtggcatgatctcggcttactgcaacctttgcctcccaggttcaagcgattcttctgcctcagcctcccgagtagctgggaccacaggtgcctaccaccatgccaggctaatttttgtatttttagtaaagacagggtttcaccatattggccaggctggtctcgaactcctgaccttgtgatctgcccgcctccatttttgttgttattttttgagaaagatagatatgaggtttagagagggatgaagaggtgagagtaagccttgtgttagtcagaactctgtgttgtgaatgtcattcacaacagaaaacccaaaatattatgcaaactactgtaagcaagaaaaataaaggaaaaatggaaacatttattcctttgcataatagaaattaccagagttgttctgtctttagataaggtttgaaccaaagctcaaaacaatcaagacccttttctgtatgtccttctgttctgccttccgcagtgtaggctttaccctcaggtgctacacagtatagttctagggtttccctcccgatatcaaaaagactgtggcctgcccagctctcgtatccccaagccacaccatctggctaaatggacatcatgttttctggtgatgcccaaagaggagagaggaagctctctttcccagatgccccagcaagtgtaaccttgcatctcattgctctggctgagttgtgtgcctgtttctgaccaatcactgagtcaggaggatgaaatattcatattgacttaattgcagcttaagttaggggtatgtagaggtattttccctaaagcaaaattgggacactgttatcagaaataggagagtggatgatagatgcaaaataatacctgtccacaacaaactcttaatgctgtgtttgagctttcatgagtttcccagagagacatagctggaaaattcctattgattttctctaaaatttcaacaagtagctaaagtctggctatgctcacagtctcacatctggttggggtgggctccttacagaacacgctttcacagttaccctaaactctctggggcagggttattcctttgtggaaccagaggcacagagagagtcaactgaggccaaaagaggcctgagagaaactgaggtcaagatttcaggattaatggtcctgtgatgctttgaagtacaattgtggatttgtccaattctctttagttctgtcagcttttgcttcatatattttagcgctctattattagatatatacatgtttagtattatgtcttattggtgcatttactctcttatcattatgtaatgtccttctttatctgtgataattttctgtgttctgaagtctactttgtctaaaaataacatacgcactcaacttccttttctttcttccttcctttctttcttccttcctttctttctctctctctctctttccttccttccttcctccttttctttctctctctctctctctctctttttttgacagactctcgttctgtggccctggctggagttcagtggtgtgatcttggctcactgctacctctaccatgagcaattctcctgcctcagcctcccaagtagctggaactacaggctcatgccactgcgcccagctaatttttgtatttttcgtagagacggggtttcaccacattcgtcaggttggtttcaaactcctgactttgtgatccacccgcctcggcctcccaaagtgctgggattacaggcatgagccatcacacctggtcaactttcttttgattagtgtttttgtggtatatctttttccatcatgttactttaaatatatctatattattgtatttaaaatgtgtttcttacagactgcatgtagttgggtataatttttatccagtctaaaaatatctgtcttttaattggtgtttagacaatttatatttaataaaattgttgaatttaagatggatgactgttttatttgtttgctgttcaccacttctgttttattctctttccagaattcttttggattgtttaaatatttcataatattttatcttaatttatttattgggtatttgcctatatctctttgtggtattttttagtggttgcttgagggattacaatgtacttaacttttcacagtgtgcataaagttaatattttgccacttgcagtaaaccgtagaaggcttataatcatattagtacctctatccactttcttttatgttgtagttgtcatatatattacatctatatacactgaaacattataggcaatgttatgatttttgcattcgtcagtcatatatatattttaaagaatttaagaggagaaaaatacatattcagatattcatcatttcctttgttctttattaatttctaatgttctgtgtttctctctggtgtaatttctcctcaacctgaaaaactttattgagcatttattttaaagcaagtctgttgatgatgaattctcttagtttttcttcatctgagaatgccttcatcttttctacattcctgaaatatatttttactggatatagaattctcagttgacagttctttcttctagcattttattttatttagtttatttttttcagtgcattaaagatgtttctgtcttctgggacccatggtgtgtgtgtatatatatatatatttttttttctctttatctcaaaggctctatggtttcagatgagaaacctgcagtcatagttttcccttatgtgtaatttataattttttcttccagctgctttcaagatgctttctttacctctgattttcaatagtttgattatgatgtgtctgggtgttttcaactttcacccattttagggttcattaaacttcttgaatctataaatataggtctttcagcaaatttaggacattttctgcagacattttttatttttatttttgagatttgagtgttgctatgttgcccaggctggtctcaaacttctgggctcaagtaatcctcctgccttggcttcccaaagtgctgagattataggtctgagccactggattttctcaccctcagaactgtgagccaacaaatttctgttctttataaattgcccagtctgtggtattctgctatagcagcacaaaatgggctaagatactgggccgaccagattcctccaggaatacgaattaggatggatgtaaaacatgcagattcaggactcatgggtccttctgccctgcagtgtagaacaagaagaggcccagctgtgagaaaggtagaggctttgagagaaacagaattgaaagtcagagagagagagagagagagagagatcttggatgctttctactttttggttcagtccttcctgagatttaactatatcccaacccacgggggccgtaagacaccagttcctgtatttttatgccatctctccttttaatgtgagttagcttgtatttattttatgtacatctagaaagtacacagggggctgagcgcagtggctcatgcctgtaatcccagcactttgggagaccaaggtgggcagatcacttgaggtcaggagttcgagacctgcctgaccaacatggtgaaactaaaaatacaaaaatcagctggttgtggtggcgtgcacctgtaatcccagctacttgagaggctgaggcaggagaatcacttgacctgggagacagaagttgcagtgagccaagatagtgccactgcacttcggcctgggcaacagagaaagactctgcctcaaaaaaacaagtaaataaaaataaaaagtacacagggttggaaattaaactgtgactgtgcccaggcaccaagctcaggctcagttaggaagaaaacttggcaacaggataatagagtcaagtcattaggcacccataagattacacctaaaaccctagcttcacttacatgtattttattagcaattaacctcctagcttagaaatcccttgtggacagagactttgtatttcatctttgaattctttacaaagatcattgatttattcagtaaatatttattgtctattttatactgggtacatcataatcttaaaaatagaaataataatataattatcattttgaagtagctgcttgaaatacattattttatttactctttacaacatcttgtacattaaatatcattgaccccattgttagataagaaaactgaagcttagagaagataattaactggctcaaagctgcagctagtaaattgtagagcaaagattcatagccagagctgcctgataccaaaagctatgctgttatgaaaaataaaccccaatttcattggactttttttctttatagtttcaagacattgggggatagagttatacaacctgtagccttaatgttagcaatcctgtaaataccggtaatggaagaacttgcctttgtaaaatgagtcattcaatttgttatgtggcagaaagtccggttgtttaaagaaaatatgatgaaatgtctcactcatctttcacgtgggcaagttctgaggactgcactgaggttctttgtagtgtggtgctagaaaataagggccttccaaaatagtttgttcatgccagctgaaatagcttaagtcaatgctcaacctttctttatctaaaaaattctataacttaaggccaggcacggtggctcatgcctgtaatcccagcactttgggaggccgaggccaatggattacctgagatcaggagtttgagaccagcctgggcaacatggtgaaatcccgtctctactaaaaacacaaaaactagccgggcatggtggctggcgcctgtaatcccagctactcaggaggctgaggcaggagaatcactggaacctgggaggcggaggttgccgtgagacaagatagtgccattgtactccagcctgggcaacagagtgagactccatctcaaaacaaaacaaaacaaaacaaacaaaaaaaactataacttaaagatagaatgttatttccctggtatgataaagaataacaaattgtaaataatatccaacattataattaatagcaaaacactaaataaatccccattaaaattggtacaaaacaagggtgcttgctttcaccattctaactttaacaatgttctgggaaattccgttgatttgtcctcttatctttgaacttcctcttgttttattttattcatgttcttatcacagtcttccaaaaacaggaattcatggagagttttgtgggtttttctaaattttggtatatatatacatatatatagcaaatatagataatgtatgtatagcaaatatatttatatatatatatatatattacatatatatatatttcccagactgggttcttggcatgttgttcatttcttttttttgttgcttttctgtagtatacctggctgatccagcttgcttgtgttgaacgtgggtctttctagactttgtttgctctgatacagtgagcatgactgccatctctgatacttgcatgtctcacctcccagccacagagcaagagctgaaatctcattttctttccacttttctgagacggagggaagagagaatagaagcagactctggggattgtgcagcctttgttgggtaacctggcttttactctctcttctaaaatgctgttaaatgtttggtaccacaaattaacccatctcgttggccatgcatcctattcccatggtggaatacctctaggtccacaggttcctagtaacccctaggaaccatcagctcttccacagagatcttgagatatgctagtttgtactctgacaggagtctgtactctgacaggttttttctagacttttccttgggatacttacttacctgttgagtcttctttgccccaggttgaggagaactcacaggaatttgtccaatcctcttctttttagtatagtcttggtgggtgggaggctacagtgatattagaagccttgccatgctctggcagaatcttttgtttccttcctcaatagccatgttttgaagtctgtgacttgtcattacacccttttcttaattttgcttctggtgaattttcaggggtgttaatgtttttcttttttgatggtcatttgaaagagcacacaggtgagactgtataagatttttaaaaacagtaatttaggtgggataggcagctaaccttgctaggtactgaaaacatattacaaaatcatagcagttaaaacagagtatcctggctcaggcgcggtggctcaagcctgtaatttcagcacttagggaggccgaggtgggtggatcacttgaagtcaggagttcgagaccagcctggccaacatggtgaaaccctgtctctactaaaaacacaaaaattagccgggcttggtggacatgcctgtagtcccagctactcaggaggccgaggcaggacaattgcttgaacctgggaagtggaggctgcagtgagctgagaatgtgctgccgcactccagcctgagcaacagagtgagactctatttcaaacccccaccgcgcccccccaaaacagagtatccctagcataagaatagacagacaggttaatgaaagataagagtgaccagaattagaccctaagatatgtggaactttaatatgtgataaaagatttatgcactttagttatttagaaaaaaaggaacactcttggcctcttcctcatatatacttgaaaaatattgcaaatagtccctctccctctccctctccctctccctctccctctccctctccctctccctctccctctccctctccctctccctctccctctccctctccctctccctctccctctccctctccctctccctctccctctccctctccctctccctctccctctccctctccctctccctctccctctccctctccctctccctctccctctccctctccctctccctctccctctccctctccctctccctctccctctccctctccctctccctctccctctccctctccctctccctctccctctccctctccctctccctctccctctccgtctccctctgatgccgagccaaagctggacggtactgctgccatctcggctcactgcaacctccctgcctgattctcctgcctcagcctgccgagtgcctgcgattgcaggcgcgcgctgccacgcctgactggttttcggtttttttttggtggagacggggtttcgctgtgttggccgggctgctctccagctcctaaccgcgagtgatccgccagcctcggcctcccgaggtgccgggattgcagatgaagtctcgttcactcagtgctcagtggtgtccaggctggagtgcagcggcgtgatctcggctcgctacaaccacctcccagccgcctgccttggcctcccaaagagccgagagtgcagcctctgcccggccgccaccccgtctgggaagtgaggagcgtctctgcttggccacccatcgtctgggatatgaggagcccctctgcctggctgcccagtctggaaagtgaggagcgtctctgcccggccgccatcccatctaggaagcgaggagcgcctcttcccggctgccatcccatctaggaagtgaggagcgtctctgcccggccgcccatcgtctgagatgtggggagcacctctgccccaccgccctgtctgggatgtgaggagcgcctctgctgggccgcaaccctgtctgggaggtgaggagcgtctctgccccgccgctccgtctgagaagtgaggaaaccctctgcctggcaaccgccccgtctgagaagtgaggagcccctccgtccggcaaccaccccgtctgggaagtgaggagcgtctccgcccggcagccaccccgtccgggaggtgaggggctcctctgcccggccgcccctactgggaagtgaggagcccctctgcccggccagccgccccgtccgggagggaggtgggggggtcagccccccgcccggccagccgccccgtccgggaggggggagggggggtcagccccccgcctggccagccgccccgtccgggaggtgaggggcgcctctgcccggccacccctactgggaagtgaggagcccctctgcccggccagccgccccgtccgggagagaggcggggggggggggtcggccagccgccccgtccgggagggaggtgggggggtcagccccccttccggccggccgccctgtccgggaggtgaggggcgcctctgcctggccgcccctactgggaagtgaggacccctctgcccggccagccgccccgtccgggagggaggtgggggggacagccccccgcccggccagccgccctatccaggaggtgaggggcgcctctgcccggccgcccctactgggaagtgaggagcccctctgcctggccagccgccccgtccgggagggtagtgggggggtcagccccccgcccggccagccgccccatccgggaggtgaggggcgcttctgcccggccgcccctactgggaagtgaggagcccctctgcccggccacgaccccgtctgggaggtgtgcccagcggctcattggggatgggccatgatgacaatggcggttttgtggaatagaaaggcgggaagggtggggaaaaaattgagaaatcggatggttgccgggtctgtgtggatggaagtggacatgggagacttttcattttgttctgtactaagagaaattcttctgccttgggatcctgttgatctgtgaccttatccccaaccctgtgctctctgaagcatgtgctgtgtccactcagggttaagtggattgggggcggtgcaggatgtgctttgttaaacagatgctttgttaaacagatgcagcgtgctggttgagagtcatcaccactccctaatcttaagtacccagggacacagacactgcggagggccgcggggtcctctgcctaggaaaaccagagacctttgttcacttgtttatctgctgaccttccctccactattgtcctatgaccctgccaaatccccctctgcgagaaacacccaagaatgatcaataaaaaaaaaaaaaaaaaaaaaaaaaaaaaaaggggcccaggggacaggcattcagcatatggaggatccacgccagccccggctgctgcgttcccttagtatttattgctcattatcgggcgtgacaggataataggataatggtggggaggtcggaaggtaaacacgtgaacaaatgtctctgcaccataaacaaggtaaagaaaaaagtgctgtgcttttgatgtgcatatacataaacatctcattgccttaaggaacagtattgctgccagcatgtcccacctccagccctaaggcggttttctcctatctcagtagatggaatatacaatcagctttacacccagacattccattgcccagggatgagcaggagacagaagccttcctcttatctcaactgcaaaaaggcgttccttcctcttttactaatcctcctcagcacagaccttttacgggtgtcgggtgtcgggctgggggacggtcaggtctttcccttcccacaaggccatatttcagactctcacatggggagaaaccttggacggtgcctggctttcctgggcagaggtccctgcggccttctgcagtgttttgtgtctctgggtacttgagattggggagtggtttgagattggggagtggtgatgactcttaacaagcatgctgccttcaagcatttgtttaacaaagcacaccctgcacagcccttgatccatttggccctgagttgacacagcgcatgtttcggggagcacagggttgggggaagggttacagattggcagcatctcggggcagaagaatttttcttagtggggagcagagtggagtctcctatgtctacttctttctacacagacacagtaacagtctgatctctctttcttttccccacaatgtggttttgggcgcctgtagtcccggctacttgggagactgaggcaggagaattgcttgaacctgggaggcagaggttgctgtgagccgagattgtgccactgcactacagcctgggcgaaaaaagcaaaactccgtctcaaaaaaaaaaacaaaacacttgtgatttgggggttttgtggaaatttaattacgatgaaaaatctgtatcttttttgtaatgttggcatacttgggtaattttgtggcaaatatatttcccagtggaccttttgttggtggcactaactgcaaggttgctgggaaagtggagtctgtttggtggatgagctctgactgccgttttggaacctcacctctactcatgctgtctcaagtccttgtctcattctccagctctcagttcaaataaagttatttctcctgggaaaaaaagttccgtgaaacgcacactggatgacagtgctgaagttgggtgccctgggaagtcctcaggacacccctgcatgaaggctgccccaggagagcagcgcaaggttgtggaggtctcaaagctctgaagaacctgcctaccgaagacaggagtgcccacaaaacagttggcccatgggctccccaagacctacgtgtacctcggaggcatttggcagaagattctttgtgaacaaaaatctctgcccactaggaggcaggagtgtgtgtgtgtgtgtgtgtgtgtgtgtgtgtgtgttgaaaccagaactccaccttatgtgttcattgtggaatttgaaaatggaagcctaaagttgaaaattaaaatcacccgtgatagctgtaaaaaaaaaaaaaaaaaaaaatcgtaaatgagttcttactttggaagcatatatactaaagttggaatgaaacagagaagattagttactgatttcatttttcaataagtttagatttattatgttggtttcccaatttaaaaaattgacttcttaaaaaatcaaaaaaaaaaaaaaaaaaaaaaaaaaagaaaaatattgcaaatagatcaagtagttaaattaagggtgaaaaatgaacccataaaaaaccactctaaaagtatataaaaatggctactgagtctctagatcagaggggagaccttctaagtttaaaataagagaagaagcaaaagaagaaacataaatagatgtgacgacataaaactttaaatttcaaggctttataaaaaatggccaaaattacaaggcaatcagcaaacctgaatgcgggaggtactaaaaattccttgaccaggggagtcctttgacacagggttttgtttgtttgtttgtttttgtgacggtgttaaggataagaaaggaacaagacaagcaagcaaggtgaggcttgccctaggtcaacctctagtgttcatggagaggaagctgtaaattgtgaggactaggttcaggagtggttgctagggaggaggtagcctgtggctgagctgggaaaagttgcagcagaaccactgcccttacaagaggtaagtgcaagtcacttggggtgacctaagacagaacttcttttttttttttttttttttttgaggtggagtcttgctctgttgcccaggctcgagtgcagtggcacaatttcggcctcctgggttcacgccattctcctgcctcagcctcccgagtagctgggactacaggcgcccgccaccacgcccggctaactttttgtgtttttagtagagacagggtttcaccgtgttagccaggatggtctcgatcacctgacctcgtgatccacccgcctcagcctcccaaagtgctgtgattacaggtgtgagccaccacgcctggcctaagacagaacttttgcttttccattattctttttttttttttttttgagatggagtttcactcctgtcgcccaggctggagtgcaatggtgtgatctcggttcactgcaacctctgcctcccaggatcaagtgagtctcctgcctcagcctcctgagtagctgggattacaggtgcccaccaccacacctggccaattttatatttttagtagagacagggtttctccaggttagccaggctggtcttgaactcctgacctcaggtgatccgcccacctcggcctaccaaaatgctgggattacaggtgtgagccaccgcgggggcctgtcctttttttttttttttttgagatgcagtctggctctgttgcccaggctacagtgcagtggcatgatctcggctcactgcaacatccacctcctgggttcaagcgattttcctgcctcagcctcccaagttgctgggactacaggcatgtgccaccacgctcggctaatttttgtatttttagtagagacagggtttcaccgtgctggccaggctggtctcgaactcctgacctcagttgatccccctactttggcctcccaaagtgttgggattacaggcatgagccaccacgcccggtcccattattcttcttagacaaaacagatcctttcaaaggaatggtaaacttggattacacaatatatttgttaaaaaattggaatctcatgcctgtaatcccagcgatttgggaggtgggagggtctcttgagttcaggagtttgacaccagtctgggcgaaacagggagacctcgtctctacaaatttttttttttttaaattggaatcatcctgaacatctattgtttggcccgccttttcaaatgatttgaatgcttttctacaccacaaaatataattttcaaatgtgttgtctttcaaatgtgatttgtatgtggatgcataatgtttccttatatggatgtcactgtcatttatttgagcaatgtttatgcctagaaatgagacttgttggcaatgtgtatatagttggagcaaaatgtctgagtactttgaaaaatggtgtcagagcccaaatgacttggacatctccactctgagccaactggctcagtgttagtcacaactggaaaagggagatggagagaatgcctcacagactcatgaatgtgtttgtatgatgttattaacagagtaaattataaaatccagacctacaaaaggtcaactatttcgtataatttgagcttgtagaaaacttcctgaatattccactgctgcacacacacatctgttaactggctgaggtttggcaaaggcaaatcagtgttaagagttgaagtagcagctctttctcagattcacacattccttttcacttattggaaacaagatattatctgactcctagtgttgcttacttggcaggcacctttcagtaaatatgaatacattaaatctcagccttaaagacaaagaccttactgtcttcctaattcatgacaaaaatcacagccataaaatagaaagaatgaattctggtattcagctgaagaaaaagtttgactgagttgctttcccaccctggaaaactttctctcagaataatttcatgatggatgattctgtgaggaatgaaacaatgctgtatcattgctataaatgctgtaatgtctgcatgccaaactgctttcaattagtgttttctctggaaactggaaagtatgacacagtcgaggcattagcatgcccattttcttcagtaataaaaagaaaggatactgagcggaactcaggtgtgatagagatttgaggtatttccaagtgacgcttgcctgacactctgttaaataaaattaaaaagaaaaaaataaaagcaaaaaagatctctctaagtggtatggcatgatttctcagctacagcaaaagaagctaccattataccctgccttttcctccatcttgtctagagaacctagacgtataaactcataatttccttttaacttaataaaaatttataaaataggatacaggagttaagaggggggatggtttagggtgatggaaatgtcaggaggtctttgtgttggggatgacatttgaactaggtcttgctaaactga

SEQ ID NO: 981188 - DNA, 39790 bp, Homo sapiens
tcagtttagcaagacctagttcaaatgtcatccccaacacaaagacctcctgacatttccatcaccctaaaccatcccccctcttaactcctgtatcctattttataaatttttattaagttaaaaggaaattatgagtttatacgtctaggttctctagacaagatggaggaaaaggcagggtataatggtagcttcttttgctgtagctgagaaatcatgccataccacttagagagatcttttttgcttttatttttttctttttaattttatttaacagagtgtcaggcaagcgtcacttggaaatacctcaaatctctatcacacctgagttccgctcagtatcctttctttttattactgaagaaaatgggcatgctaatgcctcgactgtgtcatactttccagtttccagagaaaacactaattgaaagcagtttggcatgcagacattacagcatttatagcaatgatacagcattgtttcattcctcacagaatcatccatcatgaaattattctgagagaaagttttccagggtgggaaagcaactcagtcaaactttttcttcagctgaataccagaattcattctttctattttatggctgtgatttttgtcatgaattaggaagacagtaaggtctttgtctttaaggctgagatttaatgtattcatatttactgaaaggtgcctgccaagtaagcaacactaggagtcagataatatcttgtttccaataagtgaaaaggaatgtgtgaatctgagaaagagctgctacttcaactcttaacactgatttgcctttgccaaacctcagccagttaacagatgtgtgtgtgcagcagtggaatattcaggaagttttctacaagctcaaattatacgaaatagttgaccttttgtaggtctggattttataatttactctgttaataacatcatacaaacacattcatgagtctgtgaggcattctctccatctcccttttccagttgtgactaacactgagccagttggctcagagtggagatgtccaagtcatttgggctctgacaccatttttcaaagtactcagacattttgctccaactatatacacattgccaacaagtctcatttctaggcataaacattgctcaaataaatgacagtgacatccatataaggaaacattatgcatccacatacaaatcacatttgaaagacaacacatttgaaaattatattttgtggtgtagaaaagcattcaaatcatttgaaaaggcgggccaaacaatagatgttcaggatgattccaatttaaaaaaaaaaaaatttgtagagacgaggtctccctgtttcgcccagactggtgtcaaactcctgaactcaagagaccctcccacctcccaaatcgctgggattacaggcatgagattccaattttttaacaaatatattgtgtaatccaagtttaccattcctttgaaaggatctgttttgtctaagaagaataatgggaccgggcgtggtggctcatgcctgtaatcccaacactttgggaggccaaagtagggggatcaactgaggtcaggagttcgagaccagcctggccagcacggtgaaaccctgtctctactaaaaatacaaaaattagccgagcgtggtggcacatgcctgtagtcccagcaacttgggaggctgaggcaggaaaatcgcttgaacccaggaggtggatgttgcagtgagccgagatcatgccactgcactgtagcctgggcaacagagccagactgcatctcaaaaaaaaaaaaaaaaaggacaggcccccgcggtggctcacacctgtaatcccagcattttggtaggccgaggtgggcggatcacctgaggtcaggagttcaagaccagcctggctaacctggagaaaccctgtctctactaaaaatataaaattggccaggtgtggtggtgggcacctgtaatcccagctactcaggaggctgaggcaggagactcacttgatcctgggaggcagaggttgcagtgaaccgagatcacaccattgcactccagcctgggcgacaggagtgaaactccatctcaaaaaaaaaaaaaaaaagaataatggaaaagcaaaagttctgtcttaggccaggcgtggtggctcacacctgtaatcacagcactttgggaggctgaggcgggtggatcacgaggtcaggtgatcgagaccatcctggctaacacggtgaaaccctgtctctactaaaaacacaaaaagttagccgggcgtggtggcgggcgcctgtagtcccagctactcgggaggctgaggcaggagaatggcgtgaacccaggaggccgaaattgtgccactgcactcgagcctgggcaacagagcaagactccacctcaaaaaaaaaaaaaaaaaaaaaagaagttctgtcttaggtcaccccaagtgacttgcacttacctcttgtaagggcagtggttctgctgcaacttttcccagctcagccacaggctacctcctccctagcaaccactcctgaacctagtcctcacaatttacagcttcctctccatgaacactagaggttgacctagggcaagcctcaccttgcttgcttgtcttgttcctttcttatccttaacaccgtcacaaaaacaaacaaacaaacaaaaccctgtgtcaaaggactcccctggtcaaggaatttttagtacctcccgcattcaggtttgctgattgccttgtaattttggccattttttataaagccttgaaatttaaagttttatgtcgtcacatctatttatgtttcttcttttgcttcttctcttattttaaacttagaaggtctcccctctgatctagagactcagtagccatttttatatacttttagagtggttttttatgggttcatttttcacccttaatttaactacttgatctatttgcaatatttttctttttttttttttttttttttttttttgattttttaagaagtcaattttttaaattgggaaaccaacataataaatctaaacttattgaaaaatgaaatcagtaactaatcttctctgtttcattccaactttagtatatatgcttccaaagtaagaactcatttacgatttttttttttttttttttttacagctatcacgggtgattttaattttcaactttaggcttccattttcaaattccacaatgaacacataaggtggagttctggtttcaacacacacacacacacacacacacacacacacacactcctgcctcctagtgggcagagatttttgttcacaaagaatcttctgccaaatgcctccgaggtacacgtaggtcttggggagcccatgggccaactgttttgtgggcactcctgtcttcggtaggcaggttcttcagagctttgagacctccacaaccttgcgctgctctcctggggcagccttcatgcaggggtgtcctgaggacttcccagggcacccaacttcagcactgtcatccagtgtgcgtttcacggaactttttttcccaggagaaataactttatttgaactgagagctggagaatgagacaaggacttgagacagcatgagtagaggtgaggttccaaaacggcagtcagagctcatccaccaaacagactccactttcccagcaaccttgcagttagtgccaccaacaaaaggtccactgggaaatatatttgccacaaaattacccaagtatgccaacattacaaaaaagatacagatttttcatcgtaattaaatttccacaaaacccccaaatcacaagtgttttgtttttttttttgagacggagttttgcttttttcgcccaggctgtagtgcagtggcacaatctcggctcacagcaacctctgcctcccaggttcaagcaattctcctgcctcagtctcccaagtagccgggactacaggcgcccaaaaccacattgtggggaaaagaaagagagatcagactgttactgtgtctgtgtagaaagaagtagacataggagactccactctgctccccactaagaaaaattcttctgccccgagatgctgccaatctgtaacccttcccccaaccctgtgctccccgaaacatgcgctgtgtcaactcagggccaaatggatcaagggctgtgcagggtgtgctttgttaaacaaatgcttgaaggcagcatgcttgttaagagtcatcaccactccccaatctcaaaccactccccaatctcaagtacccagagacacaaaacactgcagaaggccgcagggacctctgcccaggaaagccaggcaccgtccaaggtttctccccatgtgagagtctgaaatatggccttgtgggaagggaaagacctgaccgtcccccagcccgacacccgacacccgtaaaaggtctgtgctgaggaggattagtaaaagaggaaggaacgcctttttgcagttgagataagaggaaggcttctgtctcctgctcatccctgggcaatggaatgtctgggtgtaaagctgattgtatattccatctactgagataggagaaaaccgccttagggctggaggtgggacatgctggcagcaatactgttccttaaggcaatgagatgtttatgtatatgcacatcaaaagcacagcacttttttctttaccttgtttatggtgcagagacatttgttcacgtgtttaccttccgacctccccaccattatcctattatcctgtcacgcccgataatgagcaataaatactaagggaacgcagcagccggggctggcgtggatcctccatatgctgaatgcctgtcccctgggcccctttttttttttttttttttttttttttttttattgatcattcttgggtgtttctcgcagagggggatttggcagggtcataggacaatagtggagggaaggtcagcagataaacaagtgaacaaaggtctctggttttcctaggcagaggaccccgcggccctccgcagtgtctgtgtccctgggtacttaagattagggagtggtgatgactctcaaccagcacgctgcatctgtttaacaaagcatctgtttaacaaagcacatcctgcaccgcccccaatccacttaaccctgagtggacacagcacatgcttcagagagcacagggttggggataaggtcacagatcaacaggatcccaaggcagaagaatttctcttagtacagaacaaaatgaaaagtctcccatgtccacttccatccacacagacccggcaaccatccgatttctcaattttttccccacccttcccgcctttctattccacaaaaccgccattgtcatcatggcccatccccaatgagccgctgggcacacctcccagacggggtcgtggccgggcagaggggctcctcacttcccagtaggggcggccgggcagaagcgcccctcacctcccggatggggcggctggccgggcggggggctgacccccccactaccctcccggacggggcggctggccaggcagaggggctcctcacttcccagtaggggcggccgggcagaggcgcccctcacctcctggatagggcggctggccgggcggggggctgtcccccccacctccctcccggacggggcggctggccgggcagaggggtcctcacttcccagtaggggcggccaggcagaggcgcccctcacctcccggacagggcggccggccggaaggggggctgacccccccacctccctcccggacggggcggctggccgaccccccccccccgcctctctcccggacggggcggctggccgggcagaggggctcctcacttcccagtaggggtggccgggcagaggcgcccctcacctcccggacggggcggctggccaggcggggggctgaccccccctcccccctcccggacggggcggctggccgggcggggggctgacccccccacctccctcccggacggggcggctggccgggcagaggggctcctcacttcccagtaggggcggccgggcagaggagcccctcacctcccggacggggtggctgccgggcggagacgctcctcacttcccagacggggtggttgccggacggaggggctcctcacttctcagacggggcggttgccaggcagagggtttcctcacttctcagacggagcggcggggcagagacgctcctcacctcccagacagggttgcggcccagcagaggcgctcctcacatcccagacagggcggtggggcagaggtgctccccacatctcagacgatgggcggccgggcagagacgctcctcacttcctagatgggatggcagccgggaagaggcgctcctcgcttcctagatgggatggcggccgggcagagacgctcctcactttccagactgggcagccaggcagaggggctcctcatatcccagacgatgggtggccaagcagagacgctcctcacttcccagacggggtggcggccgggcagaggctgcactctcggctctttgggaggccaaggcaggcggctgggaggtggttgtagcgagccgagatcacgccgctgcactccagcctggacaccactgagcactgagtgaacgagacttcatctgcaatcccggcacctcgggaggccgaggctggcggatcactcgcggttaggagctggagagcagcccggccaacacagcgaaaccccgtctccaccaaaaaaaaaccgaaaaccagtcaggcgtggcagcgcgcgcctgcaatcgcaggcactcggcaggctgaggcaggagaatcaggcagggaggttgcagtgagccgagatggcagcagtaccgtccagctttggctcggcatcagagggagacggagagggagagggagagggagagggagagggagagggagagggagagggagagggagagggagagggagagggagagggagagggagagggagagggagagggagagggagagggagagggagagggagagggagagggagagggagagggagagggagagggagagggagagggagagggagagggagagggagagggagagggagagggagagggagagggagagggagagggagagggagagggagagggagagggagagggagagggagagggagagggagagggagagggagagggagagggagagggagagggagagggactatttgcaatatttttcaagtatatatgaggaagaggccaagagtgttcctttttttctaaataactaaagtgcataaatcttttatcacatattaaagttccacatatcttagggtctaattctggtcactcttatctttcattaacctgtctgtctattcttatgctagggatactctgttttgggggggcgcggtgggggtttgaaatagagtctcactctgttgctcaggctggagtgcggcagcacattctcagctcactgcagcctccacttcccaggttcaagcaattgtcctgcctcggcctcctgagtagctgggactacaggcatgtccaccaagcccggctaatttttgtgtttttagtagagacagggtttcaccatgttggccaggctggtctcgaactcctgacttcaagtgatccacccacctcggcctccctaagtgctgaaattacaggcttgagccaccgcgcctgagccaggatactctgttttaactgctatgattttgtaatatgttttcagtacctagcaaggttagctgcctatcccacctaaattactgtttttaaaaatcttatacagtctcacctgtgtgctctttcaaatgaccatcaaaaaagaaaaacattaacacccctgaaaattcaccagaagcaaaattaagaaaagggtgtaatgacaagtcacagacttcaaaacatggctattgaggaaggaaacaaaagattctgccagagcatggcaaggcttctaatatcactgtagcctcccacccaccaagactatactaaaaagaagaggattggacaaattcctgtgagttctcctcaacctggggcaaagaagactcaacaggtaagtaagtatcccaaggaaaagtctagaaaaaacctgtcagagtacagactcctgtcagagtacaaactagcatatctcaagatctctgtggaagagctgatggttcctaggggttactaggaacctgtggacctagaggtattccaccatgggaataggatgcatggccaacgagatgggttaatttgtggtaccaaacatttaacagcattttagaagagagagtaaaagccaggttacccaacaaaggctgcacaatccccagagtctgcttctattctctcttccctccgtctcagaaaagtggaaagaaaatgagatttcagctcttgctctgtggctgggaggtgagacatgcaagtatcagagatggcagtcatgctcactgtatcagagcaaacaaagtctagaaagacccacgttcaacacaagcaagctggatcagccaggtatactacagaaaagcaacaaaaaaaagaaatgaacaacatgccaagaacccagtctgggaaatatatatatatgtaatatatatatatatatataaatatatttgctatacatacattatctatatttgctatatatatgtatatatataccaaaatttagaaaaacccacaaaactctccatgaattcctgtttttggaagactgtgataagaacatgaataaaataaaacaagaggaagttcaaagataagaggacaaatcaacggaatttcccagaacattgttaaagttagaatggtgaaagcaagcacccttgttttgtaccaattttaatggggatttatttagtgttttgctattaattataatgttggatattatttacaatttgttattctttatcataccagggaaataacattctatctttaagttatagttttttttgtttgttttgttttgttttgttttgagatggagtctcactctgttgcccaggctggagtacaatggcactatcttgtctcacggcaacctccgcctcccaggttccagtgattctcctgcctcagcctcctgagtagctgggattacaggcgccagccaccatgcccggctagtttttgtgtttttagtagagacgggatttcaccatgttgcccaggctggtctcaaactcctgatctcaggtaatccattggcctcggcctcccaaagtgctgggattacaggcatgagccaccgtgcctggccttaagttatagaattttttagataaagaaaggttgagcattgacttaagctatttcagctggcatgaacaaactattttggaaggcccttattttctagcaccacactacaaagaacctcagtgcagtcctcagaacttgcccacgtgaaagatgagtgagacatttcatcatattttctttaaacaaccggactttctgccacataacaaattgaatgactcattttacaaaggcaagttcttccattaccggtatttacaggattgctaacattaaggctacaggttgtataactctatcccccaatgtcttgaaactataaagaaaaaaagtccaatgaaattggggtttatttttcataacagcatagcttttggtatcaggcagctctggctatgaatctttgctctacaatttactagctgcagctttgagccagttaattatcttctctaagcttcagttttcttatctaacaatggggtcaatgatatttaatgtacaagatgttgtaaagagtaaataaaataatgtatttcaagcagctacttcaaaatgataattatattattatttctatttttaagattatgatgtacccagtataaaatagacaataaatatttactgaataaatcaatgatctttgtaaagaattcaaagatgaaatacaaagtctctgtccacaagggatttctaagctaggaggttaattgctaataaaatacatgtaagtgaagctagggttttaggtgtaatcttatgggtgcctaatgacttgactctattatcctgttgccaagttttcttcctaactgagcctgagcttggtgcctgggcacagtcacagtttaatttccaaccctgtgtactttttatttttatttacttgtttttttgaggcagagtctttctctgttgcccaggccgaagtgcagtggcactatcttggctcactgcaacttctgtctcccaggtcaagtgattctcctgcctcagcctctcaagtagctgggattacaggtgcacgccaccacaaccagctgatttttgtatttttagtttcaccatgttggtcaggcaggtctcgaactcctgacctcaagtgatctgcccaccttggtctcccaaagtgctgggattacaggcatgagccactgcgctcagccccctgtgtactttctagatgtacataaaataaatacaagctaactcacattaaaaggagagatggcataaaaatacaggaactggtgtcttacggcccccgtgggttgggatatagttaaatctcaggaaggactgaaccaaaaagtagaaagcatccaagatctctctctctctctctctctctctgactttcaattctgtttctctcaaagcctctacctttctcacagctgggcctcttcttgttctacactgcagggcagaaggacccatgagtcctgaatctgcatgttttacatccatcctaattcgtattcctggaggaatctggtcggcccagtatcttagcccattttgtgctgctatagcagaataccacagactgggcaatttataaagaacagaaatttgttggctcacagttctgagggtgagaaaatccagtggctcagacctataatctcagcactttgggaagccaaggcaggaggattacttgagcccagaagtttgagaccagcctgggcaacatagcaacactcaaatctcaaaaataaaaataaaaaatgtctgcagaaaatgtcctaaatttgctgaaagacctatatttatagattcaagaagtttaatgaaccctaaaatgggtgaaagttgaaaacacccagacacatcataatcaaactattgaaaatcagaggtaaagaaagcatcttgaaagcagctggaagaaaaaattataaattacacataagggaaaactatgactgcaggtttctcatctgaaaccatagagcctttgagataaagagaaaaaaaaatatatatatatatacacacacaccatgggtcccagaagacagaaacatctttaatgcactgaaaaaaataaactaaataaaataaaatgctagaagaaagaactgtcaactgagaattctatatccagtaaaaatatatttcaggaatgtagaaaagatgaaggcattctcagatgaagaaaaactaagagaattcatcatcaacagacttgctttaaaataaatgctcaataaagtttttcaggttgaggagaaattacaccagagagaaacacagaacattagaaattaataaagaacaaaggaaatgatgaatatctgaatatgtatttttctcctcttaaattctttaaaatatatatatgactgacgaatgcaaaaatcataacattgcctataatgtttcagtgtatatagatgtaatatatatgacaactacaacataaaagaaagtggatagaggtactaatatgattataagccttctacggtttactgcaagtggcaaaatattaactttatgcacactgtgaaaagttaagtacattgtaatccctcaagcaaccactaaaaaataccacaaagagatataggcaaatacccaataaataaattaagataaaatattatgaaatatttaaacaatccaaaagaattctggaaagagaataaaacagaagtggtgaacagcaaacaaataaaacagtcatccatcttaaattcaacaattttattaaatataaattgtctaaacaccaattaaaagacagatatttttagactggataaaaattatacccaactacatgcagtctgtaagaaacacattttaaatacaataatatagatatatttaaagtaacatgatggaaaaagatataccacaaaaacactaatcaaaagaaagttgaccaggtgtgatggctcatgcctgtaatcccagcactttgggaggccgaggcgggtggatcacaaagtcaggagtttgaaaccaacctgacgaatgtggtgaaaccccgtctctacgaaaaatacaaaaattagctgggcgcagtggcatgagcctgtagttccagctacttgggaggctgaggcaggagaattgctcatggtagaggtagcagtgagccaagatcacaccactgaactccagccagggccacagaacgagagtctgtcaaaaaaagagagagagagagagagagaaagaaaaggaggaaggaaggaaggaaagagagagagagagaaagaaaggaaggaagaaagaaaggaaggaagaaagaaaaggaagttgagtgcgtatgttatttttagacaaagtagacttcagaacacagaaaattatcacagataaagaaggacattacataatgataagagagtaaatgcaccaataagacataatactaaacatgtatatatctaataatagagcgctaaaatatatgaagcaaaagctgacagaactaaagagaattggacaaatccacaattgtacttcaaagcatcacaggaccattaatcctgaaatcttgacctcagtttctctcaggcctcttttggcctcagttgactctctctgtgcctctggttccacaaaggaataaccctgccccagagagtttagggtaactgtgaaagcgtgttctgtaaggagcccaccccaaccagatgtgagactgtgagcatagccagactttagctacttgttgaaattttagagaaaatcaataggaattttccagctatgtctctctgggaaactcatgaaagctcaaacacagcattaagagtttgttgtggacaggtattattttgcatctatcatccactctcctatttctgataacagtgtcccaattttgctttagggaaaatacctctacatacccctaacttaagctgcaattaagtcaatatgaatatttcatcctcctgactcagtgattggtcagaaacaggcacacaactcagccagagcaatgagatgcaaggttacacttgctggggcatctgggaaagagagcttcctctctcctctttgggcatcaccagaaaacatgatgtccatttagccagatggtgtggcttggggatacgagagctgggcaggccacagtctttttgatatcgggagggaaaccctagaactatactgtgtagcacctgagggtaaagcctacactgcggaaggcagaacagaaggacatacagaaaagggtcttgattgttttgagctttggttcaaaccttatctaaagacagaacaactctggtaatttctattatgcaaaggaataaatgtttccatttttcctttatttttcttgcttacagtagtttgcataatattttgggttttctgttgtgaatgacattcacaacacagagttctgactaacacaaggcttactctcacctcttcatccctctctaaacctcatatctatctttctcaaaaaataacaacaaaaatggaggcgggcagatcacaaggtcaggagttcgagaccagcctggccaatatggtgaaaccctgtctttactaaaaatacaaaaattagcctggcatggtggtaggcacctgtggtcccagctactcgggaggctgaggcagaagaatcgcttgaacctgggaggcaaaggttgcagtaagccgagatcatgccactgcactctagcctggcaacagagggaaactccatcttaaaaacaacaacaacaacaaaaagacaaagctttatatgtggaaaaaataataccttaatgattagcaatacacatataagagagaattgttcagaatttaaaactgtaagcaaaaagatagttttttaaatttatatattgatagagaatgctatttactctgtttttgctaaaatctttgaagaacatcactggagttattgtctcctgagagaatgtttaccaccatcaactacctcaacctgtaattcttaaagaacaataataaattcaggaggcccagtcttccctgaccctgttggtactcaaggagacaatggcttcagaattcctccatgggttttgcatttcaggctcaagctaccttcttgatgaaaaattctggacgtgttctgaaaatcacagtcatccctaacttcagtggaaaagattcatattgtccagctgaacaaggattgatacttaaaaccagggatttcctaaaatgaaaatgtttctgtggataaaactgattacatgcagagactggaatggagttaattctgggtagatatgggattcaagagattggtcttcatgaggcatttatcaaggatctgcaagggatttagaggtgacggaagcacagtccttcctgggcagttgcctctagcctggtgggaggtgttcctcacacccaggactctcatccatggcaaaataaaaagtgagatatcgactgggcatggtggctcatgcctgtaatcccagcactttgggaggtcgaggcgggtggatcacctaggccaggagttcgagaccagcctggccaacatgacgaaaccccatttctactaaaaatacaaaaattagccatgtgtggtggaatgcacctgaagtctcagctactcgggaggctgaggcacaataattgcttggacccaggagaaggaggctgcagtgagccgaggtcgtgtcactgtactccagcctgggtgacagagtgagactccatctcaaaaaaaaaaaaagtggatatcacatcagagaagctcctggccaggtggccttgaggaacagggatgagttcggcacttagagatggagttggctttccccgttggagggaaaggcatgagaagggacataggtaagaggaagtagagtagtgcaggggccattgagtagtagtccttccaagacaggacgtcatcatagaaccactttctctgaggaagctctgcttgggggaggttttaattcatgaggaaggcaaattcaatggctctcaggtgaggtgggaaacagacacctaccaacactccaaagagaacatgtacctctataaaagggcacagtctagtgaacaaagtccacagctctgggtttgatttctagcactgtcacttaatactgtgtgaccttagacattcacttaactctctcagcctcaggatacaatctgtaaaaacaggagaatgcttgttccctgtgccttataggattgatatgagcatcaggagagacagtgggcacaaaatagcactgtcaactacttctttctagtcagttatctggtcatgtttgtgaagctccccaggactgggaacatagcatatgatttttttaaagttactcgatgaatgaatgaataaatgaatgagtaaatgaatgaataatatctaaaggcctccaactaaataataatcaacttcctaaccgtactgaaagcctttaattgactttggggctgtttggcctggaggaggctctgagttagtggtgatcagttggtgtcatggtagagaagaaagcctgtgaaggtggagtcattgtcattatcagcatagagtccattacgctctccttccccatacacctggagccagacttggtcgcccacctccagatgcaggagcacagagccggaggcctggtccacattattttcctggtactgatcataggtgaagagcatagccttgtccttcttgaagaggctgaccttcacatccttcatatagactgtgatgtggtaggcaaagtagtacagcccaggaatgttgcagtggaatttaccagtggagccatcatagtggttttgctgattgtagaagatcttggtaaagcgaatgggcatgttggggatagtaacgtaagtctccaatcccacactgaatgctgagcggtatacataggcaccttctccaggttctcctttcctgccttggattcccggaaagcctcggggaccttcagccccgggtactccggtttcaccgatgtctcccttaggaccaataagacctaaggaatgagaagacctcagtgactacaaagaacagaactcctgcctaggttggttacagcctaaattaccatccctgtggctcccactcacaaccttcttgacttatagatcaagaaaccaataagagctcccaaaaggagagaggtgttacctcctccttctatatctcccacagacatggaggctcccataatttcaactctatctttatctcctataggtctctatcatagaccctccaccctgccagccctttatgtgctggcaccatcaaccctggttttgcaattctaccccctccatctaggatgtctctcctcctctattctgcctacccatcattcaaggcctagctgaagctctgcctcctccttgaagccttcattcttcatcaggtccacggtgagtatattttctctatgctccatactttgaatacttgttcacattcagtttgacatttttagagtagactttcttgtagtaaccaccaacagagccttgcacattagacatcttacctagatcaagagttccccaaaggcaggactgagcctttcagggggtgtgcagtaaatgtggttgaatgccactgggtgaaatggaagttaagcagacagaaagaggaatcagaatatgaatgtactgggaatagggatgagggtgaagatgggaaaggggatggaaaaggagctgcagatgcagcaaagccaaagtcttggttatagaggcaccatctacactcatccttggaagaccaaccccaaatcacttcaggttgcttatggttaacataaaaaagctttgctttctccctgtgtctaggccttagttaataatgaatgccttcatatagtttatatcagtgtaggaggtctgtgatgaaagaggccagaaacattcttacctggatctcctttctcacccttctcaccaggggtgccatctctgccatcacggcctggggccccattatggcccggatgccctgggatgcccgccatccaacctgtgcaggcccccttgggcaggggaagcaggactccgggcccttgagtcgtggtttcctggtcatgaccgggcagagctaatagcagtagaacagctcccagcaacagcatcctgagccctggaatccacatgtgcactgtcagccatggagagacagaccccacacacacacccagttgggacctacaaaggactccgtccatctcagcagagtctacttctaggagctgctttctaagtattcaacttttccaggaagacttttctgaatattgcagcccaccttgatctctttctgccctgaaatctgtaatacttagcattattccctgtgtgtagtctcctttcctcaccaagattatgaattcagtgattgcacagatgacactcctctaattttcccatgtctgagcacaggaccaagcacagggaaagctccaagagtcgacttgccaagaatccatccttgggtttcccaagtacgatgacacagattgctccattcaatgctaaccagcttctctcctctggctcctttcttctttttctttccccccttctctctcattttctgtgtctattcctccttcttactctctcattctctttcttcctctacccctctcctggggcacatgtttgactattgggtatattacatttgcacacatgcacacacacaaacacacacagagaaaaagagagagagagggagggagagactcaccttgtgttaagcagacaacgagagacacatcatcccatgaacatatcccctggccctttgtttgcctgagccatctttagctgcccctcctcccctgtctaatctctattcagctttcaggacccagtttggatgtcatctgtttcaagaagtcctccttgttctccatctcactccttggctggttctttcccctctgtgtttctccagtgccctggtaatatggtttgggtctgtgtccccacccaaatagcacgtcgacatgtgttggagaaggggcctggtaggaggtgactgaatcatggaggcagacttatcccttgctgttctcatgatagtaggtgaattctcacaagatctggttgaaagtgtgtagcacttcccctatattctctctctctctctttctctctctctctcctgctgctgtgtgatgtgcttgcttccccttcgctctttcttccaccatgattgtaagttttctgaggcctccccagccatgcttcctgtacagcctgtggaactgtgagtcaattaaacctcttttctttataaattacccagtctcaagtagttttttacagcagtgtgagaatggatttatacacctggcttagctctatcattgcactctgctgtaatttctgttttgctcacccatttctccattaaacagcaagtaccaggggacaaagactaacacactaatagcagagtagggactaaataagcacttttataatgaggaaaagaaatcatgagagagccagagaaaggaagggaaggaggaaggaaaagaagaaaggaagataaaaaggaagagtggaagagggaaggaaggagggagggggaatgtatttgaaatatgtattctggagccctagcaaagagctcaagtggcacaggtagtcaaaagcctccctgtctcaaaatcattctttgatatccccctcccagaaaagggcccaatacaggtatagggacttttatcccctctcagattctgcctccgatcttagggggatcttaggcctccacctcagattgctgaggtcttagtcttcccactctcaccaaggagttgggagaaagcatctcacagagagaaataggtcctaggatcctggattagaggcatcactaagaccctctgtgggttaatgtggttaatcccaagaatctgattctaaacaaagtgtagtccatgtactttattttaccttaaaaattcactatttttcatcagtttgcttgtctcttctagattatatgaagtctccagaattaggtttgtcttcaggacaactgaaggtttgttgaagacaaacctactcctctgtgagggatggaagaaagaccgtgattggcaatctcaccccaaaaacatgggcctggtatctggaatcccactcctatgccccattacctggggttctatactaccctcttcacgtggcacatccaactcatctttcatctttatcatatatatgagataaattttgtatatacatataaactatatgtatatattacatatatagttcattaaaaataatagttatatagttctttggacatgacagaaaagaaaacaatactcaactccaagaatgtctctgtttatttttaaacatagtggaatcatactttatgtaaaactttattcctttattttgtctttggcattttctagtttttataatgactatttttaacgtctcagagtgagtgctagtctagtaagtggatataatcaatatatatttgaccatttatatttcatcaaacttttagcatattttcattttaaaatattattttatattctgtaagaaattatactttgatttttaaataatattttaaatatccttaggcatgtagctttccccaagattattattctgttatgacagattcccagaagtaaattactggaccaaaaggtatgcacatttttaagtctcctgatacatatccccacatggcagcatatgttatactgccaaccagtagtacatcattagtgtgtgtataaaagggcataccttaactaccctcatcagctttgggtattataaaaaacatttgtgtgttgtcagtttagtgagcaaaggaaataatggtacctcactgctctagtttgcttttttttttttttttttttgagagagaggatttcacactgtcacccaggctgtagtgcagtggcacaatctcggctcactacagcctccacctcccaggttcaagcgattctcatgccttagcctcccaagtagctgagattacaggcatgcaccaccacacgcagctaatttttgcattttttagtagagacggggtttcaccatgttggccaggctagtctcaaactcctgacctcaggtgatccgcccgccttgggctcccaaagtcctgggattaaaagcatgagccaccacgcccagtccttgcctctaagtgttaaacagttcttattcatgctaagatttagtaagtattcaattttcttctgtttttttctattgtttgatatagttaaaatttcactttttaatgtagctctgattttttgttttgatgtaagctgtgacctaaggtactcaaatgatttctccccacttgaagactagctgttacaacacctttaattgcattaattttttctctcactatagatctgatgcatcatttatcaaatatcaggttctaatatgatcttataagtaaagtaaccattgataatgaaatggcagacagagagaagagagacagaaacagcaacagaaacaggtgcaatcagactcaggtgctgcccctttaggtgtcatgagtctttatttaagacccactaccatcatttatatgtacatttgtcgccctctactgaatttgaagaattcaggagagtgttctcaatagcttctggaaataaaatgagaaacagcttaggtttgactagtctcaagataagaaaaaagaggtgagctacatgagaagccaaggggagaccagcaaagccccttttgcattttaggagaattcttgttctgagactttacagatttcatgcatctttaaacttcctcactgcttgtcacctccaccctttcttattatggctttggcaataaaactcctgagaagaactttgagctccatgcatgtttttctccagaaatgggaagaatctgtgaggctccatccttttctgctgggaaacaggaggagagaatccagaatatgtgaaagccccagagataaagggtgacggggggcttaccccaaaccttggagagagggcaaactcaggggtctctggagttttctggctcctccccctttgtcaaaaataaagatctctttctcctaccctaagggaacactgtttgtccccaaacttcagtattatggacagatttctccactaataggtgcgatcagcctgggttccatgacagtggcacggggtagaggtgccaaaaatacaagagtgtgattagcacaggagcctcagaagtttccaagaccaagaacggactctgattgtaaaagaaagttgcattccaacttaattctgggtgggaaaccagcaattaataacaattgaaggtcagtgcaaacgtgcctaattttcaaaaaaattttcaaaattatttgtgttcttttttattttacttatttatttatctggagatggagtcttgctctgtcgctagcatcttgcgctctccaagtctcaggagacacattagagtcaaaagcagggctttgggaagattaggtaaaataagttttgaaaatgccacatgaaaatgatactccaaggaaccctcacccatgtcagcgttctcatgttcctcatctcacataatcccgtttagcggattaggaagctgagtctgagaagctccgtgtcatgctttcggaggcaccgtgatgcgatggaaagctcaccgatttggaagtcagaacagagtctctcagggatcgtttccttaatctctcagtttcctcatctctaaagtgggggtcatatatataaaacgacaaacatataaaaatacctatttttttagatattgccattgttacactttgcttgttacccttccttccttccttccttctttccttccttccttctttccttccttccttctttccttccttccttccttccttctttccttccttccttccttctttccttccttccttccttccttccttcttttctctctctcttttttttttgtttctgaagtggagtctcgctttgtggcccaggctggagtgcaatggcaccatcttggctcactgcaacctccgcctcctgggttcaactgatgctcctgcctcaccctcccaagtagctgggatcacaggaatccacgaccacacctggctaattttttgtatttttagtagagatgggatttcaccatgttggccgggctggtctcaaactcctgacctcaagtgatccgcccgcctcggcctcccaaagtgctgggattacaggcatgagccactgcgcccggcctgttacactgtatttctatcagaaaaaaattattactaagtaatagtgagtactatgatctaaaactcaattatgcctaaaaagaaaacttttacaaggatcaacaagctaaatctcaagtgtcacaattctttgcctttgtaaaatgctatttgttgtgtccctgtgggcttagcatggcactaaaagttcctaagtctcaactctggttatgtgtcatttagtgactcaggaatctgcttaattgtttttggtcacaaagcttttggcaacgaaggagtgatgaagctaagcgcacccttgaagtgtcataaaaaaaaatgaggtagtatgatcagctgtacagttagagcaataaaaagtccaggcagaccttctgattcaccataatcaatttaagatttcttaatgtttctttcctggcagcatacaaaaaggcaaaattaataaataacatagttgttgtataacaaattttgttactttttataaaacaaagggatctattttatctgtattaaaattaaaaattttgtggactttaaaaaatttttaaaatgctatttataaaacccttttctcacctagtgtctcattcgattctcacaatcattttgagagacaggatagggtagaatagggagcacgggctctacggtcttggtgcttaggcacaaatcatttgttctgacctgtaatgcgtttcagtgttctgtttgttggaagatcaaatggtgtagtctgtgtaaaatgcttagaatggtgtctggcacatgtcagtgctcagtaaatgttagtgatgagtgtatgcattttagagatgaggaaaggggacttcagaaaggttaagtggctttccaagatcccagagctacacagagaggagtcggaaattaaactctgatcttcagaacccaataacagactcttagacatagtccaggaggagaaaagtatcgtggtcacacatcctgcctttcaatatgccaccccatggggtgagggatacaagaaaaaagtagcataaaaagacttccactgtaatcccagcactggctttcctggcaaacctcgcacaggcatggattcatctgcttttaaaattataccaggggatgaccgtgatgttctcaggatcctaaagggccatactgtgatcatttatcttcatgttaaagtgtatgagaaatttcactttgacctactggaatttcagttgcaacagcagaatcctgtgaaatgcaaggacagggtcccctctgggactggcaggaggcagagccgtgtgggggaaagagatcaccaaacctggtgccaactcttccagcagaaaagggcattaaagcacacaaaattggccaggcacggtagctcacacctgtcatctcagcactttgggaggctgagatgggtgggtcacatgaagtcaggagttcaagaccagcctggccaatatggcaaaaccccgtctctactgaaaatacaaaaaaattagctgggggtggtggtgcctgcctgtaatcccaggtactcaggaggctgagacataagaattgcttgagcctgggaggcggaatttgcattgagctgcactccaacctgggtgacagagcaagactctgtctcaaaaaaaaaaaagtatacaaaatcctcaaatgtcagagccaaaaggagccccagaaatcacctcacccctgccttgcttttacaaatgggaaggctgaggggaaggagtaggaatgcacttattagaaccttatagaagccagttcccatgctagattttacacgttatttatcttcatctttacaataactccatgaaggaaggaaatgagcccaacttcagagatgaggaaactgacagattaaggagatgatccctcagagactctgttctgacttcctaacgagtgagccttccatcacatcacggtgcctccgaaaaagcactacacggagcttctcagactcagcttcctaatccgcgaaatgtgatcatgtgagatgaggaacatgagaacactgacactggcgcgagttctttggagtgtaattttcataaggcattttcaaaatttattttacttaatcttcccatagccctgcttttgactctaacgtgtaggagaacctgagacttggagagggaacgatgctagctaattcaaccactggattgaattatatcaaactcccatttttaaaagtcaaaatgggccgggcgcagtggctcatgcctgtaatcccagcactttgggaggctgaggtgggtggattacctgatgtcaggagtttcagaccagcctggacaacatggtgaaatcccgtctctaccaaaaatacaaaaattagtcaggcgtggtagcgggcacctgtaattccagctacttgggaggctgaggcaggagaatcacttgaatccatgaggcagaggttgcagtgagctgagatcgcgccactgcactccagcctaggtgacaagtgtgaaactctgtctcaaaaaaaataaaaataaaaataaataaaagtcaaagtgtagaatattggcagtttcacacggtgcaacccaataataaatggcataaccaggaatcaactcagctttgcctagctcccaggagctttgcccgaaagccttcactcagccctgggagagctgtcaatatctccatgcccaacacacacacatacccgcacccatacacacacctccacctatgcacgcgcacacccacacaccacatccacacatccacatacgtacgcaccacccccccccacacatacacacccatccaaatgagtgtgcgcgcgcgcacacacacactcacacacatacatactgtcaaggaactaataaaacagagcatcccacgcaccaccacatttttaggataagtctctctccacatgattgaatttctgattgaaattcctgattgaaagtatctctccaaaagacatcacctcttgactttagccgtatgtctgggaccaccggtccactggcttgacaaggagtaggtggaaagtttgtccctacagccaccttaaaaagagcaagcatataatcccagccttttgggaggctgaggtgggaggactgctgagcccaggagtttgaggccccccagccaatatagtgagacctcatctctacaaaaaatttttaaaaattagccaggcatggttgcacacacctgtagtcccagctactcaggaggctaagatgggagggtcacttgagcctgggaaatcgaggctgcagtgagctgtgattgcaccactgcactccagcctgggtgatagagtgagaccctgtccccaaaaaagacaaggagccagtcttgtgtctatttttttttttttttttttgagatggagttttgctttttttgcccaggctggagtgcaatgctgtgatctcagcttaagactcctcggccaggcgcagtggctcacacctgtaataccagcactttgggaggccgaggcaggtggaatatgaggtcaagagatcgagaccatcctggccaatatggtgaaccccatctctactaaaaatataaaaattagctgggcgtggtggcgcatgcctgtagtctcagctacttgggagactgaggcaggagaatcgcttgaacctgggaggcggaggttgcagtgagctgagattgtgccaaaaaaagactcctcaagacttaaggaagagtggcagcagggactgctgaggaagctgccgggctccctgtgtaccactggccttcatgaacaaagctgacaccatcatgctccttcggacatattctgctagcataaagggacccccatctccccaaccgaattaggcagagctggccttccttctagcggagttcctaggagtgagttggtgccaccccttgtgaggcttgatccaaaaaccagaacctctccagaccagggatccatgtcctctaacacaagaggggcagacctaacctctaaaatccctcccactctaaccttcagcatccacagctcaaaacaaccaggatgcctcagaaacagcactcactggggcgagcaggattaggcttcagaaaaaccaggtagatccagtttcttctgtcagaaaatgtttttttttaattacaatttttcataagttgccactatatgccaggcttttctcattttatctcattagagcctctttttcttttctttcttttttttttttttttgacacaaagtctcgctctgtcacccaggctggaatgcagtggcaacaatctcggctcactgcaacctctgcctcccaggttcagacaattctcctgcctcagcctcccgagaagctgggattacaggcacctgccatcacgcccaactaatttttgtatttttggtagaggcggggtttcaccatgttggtcaggctagtctggaactcctgacctcaggtgatccacccgcctcggtctcccaaattgctgggattacaggtgtgagccaccatggctggcctcattagaacctcttgattaccttgtaagatatccctatacctacatatatccccaaatccatagacaacaaccatgtcacactcattgtatcttgtgaacccaatccactgtctagcccatagaatttgctcagtaaatatttgctgagtagaataaagtggcagagctggattcctaattccagtctgaagtcagtgctcagcttgacttttctgaagctgccttcatatatgcttcttcctttgccctacctggtcaagctaagaggcaatgtattcccttatcccccttaatcgaattggacttcatctgtggacagacccttccaccttactgaccctaactttttctcaataggtatcctgctacagagcgaactgggcaaaattcagaatggttccatgcatcttagaaggaatgtctgaaataaccctttctctcttggggctgtgggagaacggaggaagaagcccagtgcatatctgcctccaccagtgctgctctgaccagagtatccacctgtatccactcccacactactacggacgggagagcctgggtgatcccagccagaggctatgcatgcatcccccacccagcctggaacttcacagaattgctcttaccctctggtatggaatcagaaccacagactgcagtcagaatggaagtgaggaggagatggcccagcctcaacagcctggtactcacgggggcaggcagtccccacctcacaattgtcatttcccattggccaactcagtgagggccagaggccggtgggcaggcacatgtccctggcagttgcccacagcctgcaccctagggaacctggtacaacccagcttgggcttcggaagccaagtggagcttcagtcaaagcacttgtgtttccaggccttgacccttattttgcctcctacaacagcaacagaagatggggcaaaagtcaaaaccacagcaggaaaacaagatttttttcctgcatctgacggagaaacttcctaatgtaaatgaattaattgctcagtggtccaggaggtctccccctcccatagatttgccctaataagtcagggacgccaattatcacaccacagtcttgctcactgtgcatgattaagtctgagactgtgtacgttcagacagtgagtgcttcagaagggagcactgtcagaggggtctgcaatcaggtaagaaatagagcacatcctccactctctgacctggaccctggatttaggaaagaccttgcacatgaattctgagaactggggtgtggggaagttcctggagtggtgtggggcttggcaagttaaaaaggccctgaattcttaaagcttgtggcctcgaatcgtaatttgaatctaatataatagaaaacttacataaaatgtgatattggaataccatctttcaagattttttggttccaaaatttcggataacattttgacagctaccttggtatgtgtgtgtgtgtgtttgtgagagagagagagcctgtttttccagttccttaagcatatatatgcctattctgtctcttgtggaacccagctctggcctagaagcagcctggagaactggaagctgccacccacttaggtgttcctagaaagtttaggcttgaagtggcaacattcaacaccttggactttcttggcacgctcatgttttgtttttgaagggcaggatctgagccggttcttgcaagccacacattctgatgaattaaattacgaccccagcaagggcttaggatgccagcaccaacttcaacaagacatccaaaacagaattttctcagacagaggcagggcaagtgtctgcctgccccccagatatcatctccacagtccacacagagcctaaaaatctaccagtaaagtcaagtccaccattaaagtaaagatctgatgtaaagcctcagcttcctgctaatgtccaaatatttcaagagaagtcacattaggccgttgagatgagagacatgagagactttccaaggtcccccggcttaaataagtggcccatgaaaatgaggttccatatagtttagcaggctgattgaaccaagaagacaacaaaaagaaatagaagcaactctcaattatatcactgtttgatttttgttatggtgttttcctatttatttttggtttatgttactgtctgttgctatttaatagaacataaacttcaggtcaggtgcagtggctcaggcctgtaatcccagtactttggaaggccaagacaggcatatcacctgagatcaggagtttgagaccagtctggccaacatggtgaaaccccatctctactaaaaatgcagaaatagccgggcgtggtggcacatacctgtagtcccagctacttgggaggctgagacaagagaatcacttgaacccaggaggtggaggttgcagtgagccaagagcaccattgcgctctagcctgggtgacaagagtgaaactctgtctcaaaaaaaaaaaaaaaagtaaacttcaggagagcagagattttgcctattcaaagttgtatcccttagttcctagaatagaacctggcacaaagtaggcaataataaatgttgaattaatgaataaatgaatgatcatattcaactttcctttggagataactattattgtctttcattttacaaataatgaatctagagttcaatgagggtaaataatttgttcaaggcacaagtctaggatttgaaccagatctgtctaactaaaaatccctatgctttctaattcctcatgcccttcacccctcttgatggagtgtgaggcctcaaggttgatgtatgtgcttcagggtagtttcagggctggcataaaaagtattttctttggccgggcacagtagctcatgcctgtaatcccagcattttgggaggctgaggcgggcagatcacttgaggtcaggagtctgagaccagcctgacgaagatggtgaaaccccgtctccactaaaaatacaaaaaagttagccgggcgtggtggcaggcacctgcaatcccagctactcgggggtctgagggaggagaatcgtttgaacccaggaggcggaggttgcagcgagccgagatcgcaccattgcactccagcctgggcaacagagcgagaatccatctcaaaaaaaaaaaagtattttcttctaactttataagaatgcagctggttagagaaagctgtagctattgcacaaggtggaataactttagccccacaatcacaccaagactgtgctgggcctggctgtcagtcagtgacattgtgaaagcctagcattttgcgaggcctcagggcaatctgccacccaccacaaaggccgtcatgtggaaagagccagttctgtggcatactggtttaaagactgtaattgaaaaacattcaatcagaaatgccttgaggctagtctttttcccaggacagaactattactacttagaccgaaataaccaaataaatgcgatcatttcctccagggtaccgtagctacaggtcaagcccctgttagcatgtgagttgggatactgaaacaggccaaatcacttaatttatcttaaatatgtttaagcatggccatatatttttgcttaattatgatttttaaaaataatcttaactgaagtaaccaagcataagcactgtattttgaaaaataaagattggagcaagatggtagagtgagcacgccctgcagcaatgtacgccatccccaaacccctagaaatggcaagaaaggagaacatttctttatctttttttctttttttttttttttgagatggagtttcactcttgttgcccaggctggagtactatggcatgatctcagttcaccgcaacctctgcctctcaggttcaagcgattatcctgccttagcctcccgagtagctgggattatgggcatgtgccaccacgccccgctaattttgtatttttagtagagacagggtttccccatgttggtcaggctggtctcgaactcccgacctcaggtgatccaccccctcggcctcccaaagtgctggaatgacaggcgtgagccaccgcgcctggccaggagaacatttctttatctcttctgaaggtatggctacggctgtacttctgaagtatctcagatgataatttaagtatctggtttgctactgcatgatttggactgtcacctcctgccaccgaccagaaggccatcatgattcaagcgcagtcaatgcaggtaggcaaccctgaattcatactttttaaagcctgtgtccttggactacccccaatactaaaaaattgtactagtcaaggtacaataattttagaaaggctggagaagcaaagggagatgatattgcctaaagaccaggaatcggtgactgctcctggaccatagcctatgagcctgcgcttactgcatgtcttgctagctgctccaccattgccactgaacaggagccactgtcaccgccactgccaagggcgctcactgaaacacaacagctcctcccttcttccccacttcagtcttttcacggttgtctcccatgtgcacaagctaactggtacccatctggcaaaggaatgtaggatgtgtcatttcaggcatcaagctccaggaatacaaaagggattatggagaggtgaatggagggctaagtactaacagacatgatctggcataggtcacaatgtcaaaaaagaaaaagtgacacccaaggtaacaaagctaatagaaaaaagggtgaagcttaagaataactataattattatatcagaaagatgtcataggaatgagcatacatgaaaataattaacgtctagtctgcccacagtaggaagtgaaaataaatttctgtctttttgtcactaagttcatggtgatttgctatggcaatcttaggaaaccaatacaaggatctagggccagtgaagagttcttacatatgacaacaaaagcacaatccactaaagaaaaaaatgaaaagtgagatttcaacaaaactaaaacttttgctctgtgaaacatcctgttaagaggaggaaaaggcaatatatgaattagaggaatgtatttgcaaaccatatttgagacaagagatttggatctagattgtataaagaaatctcaaaactaaatggtaaaaaaaaattcaattagaaaatggacaaaggacatgaacaattatttcaccaagtaggaaacacaaatgacaaacaagcacatgcaaagatgttcagcattattaaccattacggaaacgcaaattaaaatcaccatgagatatcactacatgcctactagaatggctaaaattaaaaacaggaatactataatggtacatacatgtagatgcatacaattgtcaaaacccacagaatgtacaacactaggccaggcacagtggcttatgcctataattacagcactttgggaggctgaggcaggcagatcagctgaggtcaggagttggagaccagcccggccaacatggtgaaaccccatctctactaaaaatacaaaattggccaggtgtggtggcacgcacttgtaatcccagctacttgggaggctgaggcaggagaatcacttgaacccaggaggcaaaggttgtagtgagccgagattgtgccattgcgcttggcctgggcaaaaaagagagaaactccatctcattaaaaaaaaaagagagagagagagagaatgtacaacagtaagttaatcctaatacaaactatggactttagatgattaaaaagaacaaaaagatgtggagaatagagaacacaaactattttgaattaaaaatagtgagaatggccaggcacagtggtgcacgcctgtaaccccagcactttgggaggcagaggcaggtggatcgcttgaggtcaggagtttgagaccagcctgggcaacatggcggaactccacctctactaagaatacaaaaaaaattacccatgagtggtagcactcacctgtagccccagctactcaggttgctgagatgtgaggatcgcttaagcctgggaggcaggggttgcagtgagccgagatagtgccactacactccagcctaggcaactgagcaagaccctgcctcaaaaaaaaaaaaaaaaaaaaaaaaaaaaaaaaaaaaaaaaaagtgaaaatactaaatttgggaaagaatgcgtaaaaatagattactcatactttgctggtgggaatggaaaataatgcagccactctgaaaagtagtttggcagtttctttaaagattaaatagcagtaacacttctgggcatttatcccaaagaactaaaaactatgtccatatagccaggctcggtggcacatgcctgtaatcccatcactttgggaggccatggcgggcaaatcacctgaggccgggagttcgagaccagcctggccaacatggtgaaactctgtctctactaaaaatagaaaaactacccaggtgtggtggtgcatgcctgtaatcccagctacttgggaggctgaggcaggagaattgcttgaacctgggaggcggaggttgcagtgagccgagatcacgccactgcactccagcctgggcgacagagtgaaactccatctcaaaaaaaaaaaaaaaaaaaaaaaaaactatgtccgtacaaaaacccgacataaaaatctgaacatccctgtacatatatgtctttgctcatttgtaagtaaatatttaggataaatttctagaagtggaattgcagggtaaagagatatgcacatcttaaattgtacttattgtaaactgaatctcaagaatccagtattgatttatatttctcccaatgtaggatgagagtgcccatttctctatatcctcaacaatactcaattctgtcaaatttaaatatctggtattctaatagattgtgttaaaagtgccttatttttatttgtatttcttctattatatgtgattaaatgtatcatatatttattgattatttgtattttttcctggaattgtgtgtttcttcccttgtccattttccttattgaattattcttattaattttgaaaatctttttattaacacataatgtacatatttttgggatacatgtaataatttgacacattcatataatgtgtaaagatctaaggaggtcgggtacagtgactaacgcttgtcatcccagcactttgggaggccgaggtgggtgtatcacctgagatcaggagttcaagaccagtctgaccaacatggtgaaaccccatctctgctaaaaatacaaaaattggccaggcatggctgtgggcccctgtaatcccagctacttgggaggctgagacaggagaatcactggaacccaggaggcggaggttgcagtgagccaagattgcgccattgcacttcagcctgggtgacagaatgagactctgtctggaaaaaaaaaaagtaattagggtattcatcaccggcaatatttatcttttttaatgctaggaacatttgaattgttctcttctagctattttgacaggtacaatagattatcttgaactatagtcaccctactgatctatcaaacacttaggtcttatgcttctacctaactctatatttgtacccatttcaacctctcattgaattattcttattaatttttaaaagctcattgtataccaaagaaattaattctttgttatatgttttgaaaatttatctatcttttcactttaaaaaatgtttcatataaaaattttggcttgctatgcagcctaacttattaacagtttactttttgtcttctgggtctcatgtttggtctgaaaagactcctcccattccaaggggtttttttgtttttgtttttttcaacttttattttagattcaggggtggtacatgtgcaggtttgttacaagggtatattgcatgatgctgaaatttgcatacgattgaacccatcactcaagtactgagcatagtacccaataggtagtttttcaatccctgtccccctcccttctcttgtagtctccagtgtctattgtttccatttcatgtccatgtgtactcacttggctcccacttataaatgagaacatgtggcatttgcttttctgtttctgcattagtttacttaggataatggtccctagctgcatccatgttgctgcaaaggccatgatttcattctttcttctgactgtatagtattccatggtgtatatgtaccacattttctttatccactcctctgttgattaacaccttggttgattccatgtatttgctattgcgaataatattgcgatgaacatacaggtgcatgtgtctttttgatagaacaatttattttcctttggatatatatctagtaatggaattgttggtttgaatgatatatatatttttagttctttgagaaatctcctgctttccacagtagctaaatgaatttacattctcaccaacagtgcataagcaatcccttttctctgcagcactgccaacatctgttatttttaataatagccattttgactggtgtgtgatgatacttcactgtggttttgacttgcttttctctgatgattagtgatgataagcattttttcatatgattgtttgccacttggatgtcttcttttgaggactgcccaaaaagtaagcaaaggccataaatggggttatttgttttttgcttgttgatttaagttccttatagattctgaatattagacctttgtcagatacatagtttgtgcatattttcttccattctgtaggttgtctgcttactttgttgatagtttcttttgctgtgcagtcaaggttactttttaaaatatgttttctttttcagcagtaaagctcaaataaatgttttcttctagagtgtccatgatttctttttcttttaattattttattttaccaaactttaattattttctttggcaaacaaaatagaattaatcaaaggctgtttattcaaaacttactgttataagggagtcagctgccatcattttcattatagtagaggttggaaggggtttgaaaggagagtaagtttttttgtcttattgtttgtttgtttgttttgagatggagtctcactcttgcccaggctggagtgcagtagcacgatctcagctcactgcaagctccgcttcccaggttgaagcgattctcctgcctcagcctcctgagcagctgggactacaggcacctgccactactcccagctaatttttgtatttttagtaaagacggggttttaccatgtttgccaggctggtctcgaactcctgacctcaggtgatccacccgccttagcttcccaaagtgctgggattataggcgtgagccactgcgccagcctagaagagtaagttttacagactaaaaggaggaagacttaagccaatctttggtgagtgttctttcatggtgacatattctagttccaatcgggtaaaagatacttggaagggaaggagtctttctggttggctttaaagtgtatgtagtagtctttgattgcttcacaatctattggtacataaggtgggggctttccaggctgcatgacaactgaaagacaatctggttctcagctttggagtcttgcataagcaattccttcttcaagagggaattaaagggaaatctagctatatatatatatatatatatatatatatatatatatatatatatattcttagttagtggactcaacaccctcctttttaatgtatatttatctttttggttctattttttaaatgactttttcatatacccatttttcaaatgcattgggatctctttcaggattctctactctgttcattatatgtgttaatccctcaccaagaatatgtatgttcttggcaaatgaaaggaacatcatgcaaagctatcagataatttgggatagctttacaaagctatctgaacgtttatccattaataaagcttgatactagagtaaatatataattaggggattctgttttgtaggactttccactctcatattgacatagagcctggcacacaggaggactccatatatgttggctgaacacagtcagtcagtcctcacttaatgtcatcaataggttcttggaaacttggacttcaagcaaaattatgtaagcaggtcctcaaataacgttactcagttacaacattgatgagaaatttcaaaattgatttcattatacatgatttcacttaaaattgcagtttccaagaacctgctgataacattaagtgaggacttactgtacagaaatactagtgtggtaatgggaactctggactaggagttggaagacctggcttctagcccctgctctgttgcaggctggtgggacaactatgatacacattaacagacttgtagctgtcagaaataatgtagaaatggcctccccattagggaccacaattcctacccctccttgaagggaggagtgaccacatgattaagttttcactaatggaatgtgagagaaagtgatgtgtgccacttgcaggttgagtcttaaaatattgcacatgtaatcctcagtccccttcccctatctgtgaccacagatacgactgtaagtcagttttgaccatgcagataaagacattgttctagggcatgatggaaaacccagatagaagaatcttggggaccttgaataactgtgtggagcaagcggtcttcctactgaattcaaagagtctgggaaatgatggggttagcaaaagtatgcagatttccttcctatagaatttctttgagcctggataaattttttttttcctatagaacaacttgagggagaaaactgctgatctcttgtattctcttgcttgttctgaaaaactctggaaatgctgatttggatgatttctacttcctttaaatattgcatactgcacagctagtgtttagtttgtattcacaacaccaccaaatgtgcagaatcaaaggtgcctttaatcccaccattccatccaaagcatgttacctgagtccctttgggggacaatagcaaaattataacactatagaggacatgaagaatttttccaaaagttttaggagactataatctcattgttctgtattctttctcatctaaacaagtgaaaagatgaccaaagttttacccacagaagagtcattcgtttattttcttactttcaagggactttaagaatgtaccacaacaacaatccatttcacaactatttcctgagcagctacagtgaacaaggacctgaagaagaagacacaatatccactggactggaatggaaagacagactagacagagtagatatgctccacagcacctgggacagcaccccagaaacatccagcaatgactggtattggaatggctcctctggtcacccacctgccatgtaagatttgcagagggttcctcctgtgaagcgtgggaggtttgggcacttcgcaacctgccagcaccatccagtatggacattttcatagatccagaaaagggctgaggtccaaaagattgagagtgcttcgggctgtgtttccatagtgagtggctggctattcagtggtcaaatgcgtttgagaggaaccaagtgatgtgcttcccaaggcaagtgtccagaacccaggagactcctctgttcagcaatggcatgaaacatctgaggttcttacatattctcgcacagaaatggattcccatagagaaacggatatattgttataggataatcagagatgctgttgtagcccatttgagctgctataagaaaataccatgaactgggtggcttataaacaacagaaactggccggacgcactggctcatgcctgtaattccagcactttgggaggccgagacgggtggactacttgaggtcaggagttcaagaccagcctggccaacatggtgaaaccccctctctactaaaaatacaaaaattagcctggcgtggcggcgcgcacctgtaatcccagctaattgggaaactgaggcatgagaatcacttgaacccaggagtcagaggttgtagtgagccgagatcacaccactgcactccagcctgggcaatagagcgagactcagtctcagaaaaacaacaacaacaacagaaacttattgcttacagttctggaggctgggaagtccaagatcaagacaccagtagcgaaggccttctttccggtccataggtggtgcttcctcactgtgcccttacacagtggaaggggcaaggaagtctctcctcctttataaggataataatcccattcatgaaggctctgccctcatgacccgatcgcctccctatgtccccaccttctaacaccatcatcaccctgggggttaggatttcaacaagtgaatttggcggggacataaacatttagaccatagcagaggctaaagcagagaagtctgctgaagaactttttaatgcattgtaatgcgttcagtgtgttaagttagtcacatacacacacacacacagacacacacaccccaagacggaatgcataggtgtgtattattaaaagtgtgaaaatacaccaccgcagattgtgtaggaccatttttttttttggacctggtagacatgtccattgctgttagtgcagcaaagggctctgtgtgcttttaaaaattccagtctgttaca

SEQ ID NO: 981189 - DNA, 35433 bp, Mus musculus
tctcgcgtgctgggattaaagacgtgcactacaatgcttgggtagacgtatttttaatttttatggtaagtattccaattccctccaagtgattatttaactcggatttatacacttcaaaatatgtacaggtttaggtttggttcacaaaataaaacttggtaaaagatgtggatccagtttaggaacgtaggtcaatcccaaggtttccccgctcagttcatttaacactcagaagtgagagatgaggaaagcagtgggaacggcggtggcattggtggcaccaataaacagtgagtgaaatcctacacacctccagcttcaagctcaactctgtctttttgggtaagcgattttaaaacattgtattttaaatgacctttcctcctcctctacctcaccatgctcttttctccctcctctcttcctcctccctctctccctctttcccccatccctactttttctccccctcctttgcatgtgggatatttaataaagacttcatacaaaccaggtatgtacctgctcattcgcctgacaacaggaaggtgaaagtatgttgtctccctagaaagatcaagtaagtatggtgctgtgttcaaaggaagtttcacctgggttagtgtgccggctcaggcgtcaatgtcctccaatgataaagccttggcctgtgaagctgtagacagacaaggactgagaaggtgtggggcttctttttagacatggtctgtctatgcatttgaagatggacttaaatttgctgttttgcccaggttagtgttgtaaccaccatcctcctgcctctgactctatgccacaacgagaaagatctttaaggcagctccagctagctcagtatgcctcatttatatacccgaaaagggccctgtgtttatatgcgcgaccttttctttctcacaagataaaagaaggaaccaacccccaaccaaaaacgaacaaacaaacaaacaacaacaacaacaacaaaacaaaaaaccaacctcctcccctgcaaaaacaagcaagcaagcaaacataatttaaccagtttaaacttgggaagacttgcaaatcttctctattgtggcttcagtctgccacctagtggtcaagaagagaaaaatcagaccagagcaaaattaatttgtcattgtcatttaccaagtgcttttccattagtgtggttaaacctttaccaaggctacatatgagttgactacctgatgtatctgaggaaaatatcaattcaacattctaaaccctagactcccaaatcaagttttccaaaatacttgtaccttggtgctacaaagcataaagtttgtagagtgagaggctctcaagatttcatgcccggaactctcctgctgcgtcctctcctcgctcctccggctccccctccccctacaagggaagggtttgtttcacttctgagtttgaaggcgtcgtccatcaccgtgggaaggtcatggtggcccgagtgtgaggcagctggtcagattgcatccacagtcaggaaaagggaacagagaggggacaatctagtgttgctcttcccttgaactcctcacatttatatcagcacctagaccagaaatagcctgaaggccttgagggtcatgtcttcccccaatatgctgagcaaaatcataaataaaaactgttccacttaaaatcacaaatcccaaaacagaaaaatcacaaatccttgctgggtgacagtggtccactcctttaatcccagcactccaaaggcagcctggtttacacagtgagcgccaggacagccaggactgcacagagaaaccttgtttccaaaaccccaaaaccccaaaccaaaccaaaccaactccccacaaaaactgctaaaatattggtgtacaagatgaatatcttaagggttatatgtttgtgaccatgttttgacttctaaggccatttccttcatgtctgtgcttcccaggatggagacattggcagttaaatctgccccagatggtagaagcagcgcactccctgcatatctagtgatgctcagaggatggctgctgctctcactctgttaacagattggcaggtgctgctcacctcccccaccttttgtgaggtgactgtcacaaatactgttgtccccaccatagggataaggaccgtcttctgaccttctggaaatgtctcaactgtgctcgttcctgcatggtgaatttcactgattggctgctgtactgcagctgtactctggtgagtcagcttcctttcttgcaaaataaaatcgttttcatggaggagtgttgtatgtgtggtggctctgtggtccctggcagcatctgggatcctgagctactgaccctgggggtatggtccattcagttcatacagggagtaatccaggatttctcatccacccctccacatctccctcacagtggaaagactgtcacctccaccccatccacaatgcccactgctgtcagggaactccagggcctgagtggcctaaagagaaacttcctggtgtctccagtagccacagctggaggacagaggtgaggcctgagccagatgctctcacccttactacattccaggataggactccaaccaggctgctcagtgctacagactctgtccagctgccctcacagcctcccacatctgggggcacttcccagaggcattgagtgctgtgccctatgttgctccacccttcactgcacccccacctgttctgagcaagccctcacctcagaatggtgtgtgggtcctctaagcagcagtgagaatcttccacagcctcttgcctgctgggtgaggtgactgtgcctctggtcccaagcccaggccctttttgctcagtgcccaccctccagtcgttcacttgttcagctgtacccactcatcggggctccccgagccctggaacatccctgaacagaggcctcccttgggtctccactttagaggtccttactcggctgacttcagtcctgcgatgccctttctggagtacttttcattaaatagcctattttatttctgagtatgtgtttatgcaagagcatttgggcagagagctggaagagggcattggatcccgggaagctggacttagagacagttggatgcctctcttgtgggctctgggaactgaacttgagtcctctgcatgcacagagccctctcttaaccactgagccatctctgcagccatccagttgttgggatcttttgtgcacatgcttgccctgctaatctgcctccctagcagtgggggtgggagtcgaaagcagggatcttgtagaatccagctacaggatgtagccaaggatctttccatctcagcttctccacctaaaaacagggctagaagtttggggcactgggaagatgacatttgggtgagcacctgatatctcaccaggaacaaggctagcagttgttcagtattagctggtgtgtaaccacaggcttttccacccacgccccagtttccaaataaccaaccagaggctttttatttgataacaaatgcctatgccataagctttggtctgttctctgactagcatctaacttacataaccctttaaactattctatgtcttccacatggttaggcacctctcctcagcttcatgttcctagagtcgaggcaaatctcctgcctctgacatcctgaacagagccctggctttggctttccactttagagaaacacagtctccaagagttccagtgtctttgccacatcttccaccctctaacgctgcctcagtttactggacatcagcttttaactgacagctgatgctcccacacagcacagaagagtgtctctccagatgggtgctaatcctgacacagtcccagggctatcatagatactaggtacctgtgcactagaaagtaaccaagagattaattaatcaaatcattggcatgagaggctggatgttcttaattgctcctatgacttcccaagtggaagagctgcaacacgtgatagaagacaaggaagaggtgagccaggaactttagtgagaagggacagggaagagggtggggaggacggacagaggccaagcccaagggcagtggtggatttcttggaggaatggggaggtgggactatgaaaactgtgttaaaaagcctccccacccacagcactttagagctggaaaggttgcctggactccacagaattctcccacccctaagcccaggtgacagtagatggcctgggggaacaggagtcctgaggcagcactgacagccatacctgctcctggcagggaccaatgcacaggggcccacatcctccatctggctcctcaaggctgcttcagcagggagctgttcccatgaagattcctggaggtgtggcagaagcagaaactctggaaaggagaagagcacccagtgtaacttcctcttccctcccccataccctccctcattgccattcaccagctgcccccctctcctcagccccttcccctgtctccaggattctctcccattaacacctggcctggccaggaagctgagttttgcatgggaccctgcactttcttgtcagtgctgggttttgatcacaaccaggggctcctgcttgggactccagtgacaaaagggcagcatcacccagtggccttctctgctctgagagaagacccttgctgctctgagatgagacccttgtccccgcttgccccacccccacccagctggacaacagttgtgaaacttgtggcagagactcaagtcccttgtataaagtagtatttgtgtatcctgtatatgttttccatgtgctccacctgacattgcatgtaaacctaacacaatgtaaatgggagtagttgtcagatgatgctgttagagaattataacaagacaagcgtatacatgttcagatgcaatttaaacatttatttgttttgtgcatgtgagtgcacgtgtgtgtgagagagtatgaacatgccatggcatgtatgtagaggtcagaggccaagcagtgtcagttctctaccaattccaatctcacaggatccaatctagcttggacattcaacaggtcaggaaaatattcagagtcctttgctatgttaacatggacatgccaagtcaaaaatgtagcccacatgatcaatgatggtgtgtcgtcacagatttcatactctattctcctgctgtctgtctcaatgtgtgggtgtgtctgtgagtctatgtgtgagatggggtgggaacaaccccctggtacactgtctttcttcatcatgtgctttggcttttcttaggctctgaatgttatcatagctccaaagttcatagctggaactctaacatgtaaggtggggttttaggatggggacagtgcccatgtagatggccaagtctcctttgggtcttccattatgtgagacacagcaataagttgccaattgcagtggagaaagcagtccctcaccagatacaaagacctttgactttccagtcctcaggatgctaatgtaattttgtgttttgtaagctactcagtttgtagtattttgttacagtggcctgatttgtgtaagatggcctacctacgtatcttgttggtcataatctatacattttatgtgaaactttcagagcttttgctaagagaaaaatctccagaattctaagtacttgcttcaggaaatactgcacggatcttttcgtttgaccaccaagtagtctgttgttcactacagagacacaatacagaatattctagacacgagcctttccttgagtccgtgagagtgtccatgattgataatgctttcagaggacacagtgcttgacctgacaagtggacagagtctctgatgaccacatgtcacaggtgtgtgacagaggagcctccccagcactggccatggctagatgtccccaggtgcttcaccaagtgctctggtccattagacactgtgcctgcctcttcagggtcttgagcatgatagctattcagacaacagttgtctgctgaactgctgttgtggtacattgctaaagcagtttgcgaggcctggagagatggctcagtggttaagagcactgactgctcttccaaaggttctgagttcaaatcccagcaaccacatgaaggctcacaaccatctgtaatgagatctgatgccctcttctggagtgtgtctgaagacagctacagtgtatttacatataataaataaatacatttttttttaaagcagtttgtaagtaagatgacaagatgattgtgagtaaaactattgccatttctccatttgttaaggcaaaaaataggatgaaagtctcttaaaacgtttgggagaattgttctgtcgggtgatatccactggagaagactgctcagacatgggttcaaggcaataggaagctgtccggtgaccagctttgctgggtgtttctgacctagttcaatgctgagcctttttcagggtgagttttcaagcagaaaaccatatcctgggctaacacccctctgttactaagaacagttagccagaagcagaactaaaggagccaaaaagcaaggttagcgcatctaggggctttcccagaactatgaactttgatagaaggcaagagctcaagcgttgagtctaccagaacccttctaccttaaaaaggtccctatttttttaaaaaaatttttattaggtattttcctcatttacatttccaatgctatcccaaaagtccccccatacccacccccccactcccctacccacccactccccctttttggccctggcattcccctgtactggggcatataaagtttgcaagtccaaagggcctctctttccagtgatagccgactaggccatcttttgatacatatgcagctagagtcaagagctccgggttactggttagttcatattgttgttccacctatagggttgcagatccctttagctccttgggtactttctctagctcctccattgggggccctgtgatccatccaatagctaactgtgagcatccacttctgtgtttgccaggcaccggcatagtctcacaagagagagctatatctgggtcctttcagcaaaatcttgctagtgtatgcaatggtgtcagcgtttggaagctgattatgggatggatccctggatatggcaatcactagatggtctatccttttgtcacagctccaaattttgtctctgtaactccttccatgggtgttttgttcccatttctaagaaggggcaaagtgtccacactttggtctttgttcttcttgagtttcatgcgtttagcaaattgtatcttatatcttgggtattctaaatgtctgggctaatatccacttatcagtgagtacatattgtgtgagttcctttgtgattgggttacctcactcaggatgatgccctccaggtctatccatttgcctaggaatttcataaattcattctttttaatagctgagtagtactccattgtgtaaatgtaccacatttctgtatccattcctctgttgaggggcatctgggttctttccagcttctggctattataaataaggctgctatgaacatagtggagcatgtgtccttcttactggttgggacatcttctggatatatgcccaggagaggtattgtgggatcctccggtagtactatgtccaattttctgaggaaccgccagactgatttccagagtggttgtacaagcttgcaatcccaccaacaatggaggagtattcctctttctccacatcctcgccagcatctgctgtcacctgaatttttgatcttagccattctgactggtgtgaggtggaatctcagggttgttttgatttgcatttccctgaaggtccctactatttatctaacattttgaatgcaacattctttcctttgtacatagtcatatgccatgtgcattagtaatctgctataatacagacccaacgatgagacgactcagacaaaagagtgtatttgtatctcttgtgacatctaggatataggggaagaaacactccacacagttatgcagggctctctgttttgttttgtttttaaagatttattttatttcatttattttatgtatataaaatacatgaaatgagtacactgtagctatactgatggttgtgagccatcatgtggtttctgggaattagaattcagggcctctgcttgctctagttggctccagttgctccagtctaaagatttatttattattagatctaagtacattgtagctgtcttcaaacacaccagaagagggcataggatcccattacagatggttgtgagccaccatgtggttgctgggatttgaactcaggacctctggaagagcagtcagtgctcttaactgctgagccatctctccagcccttagcctgctctcttatatcatctatgagcacctgtctatggtaacagcaccacaatgggctggaccttacctcctcaatcatcaagcaagaaaacgtcccataggcttgcccacagggcagtctggtgggagcatttccccaactgatgttctctccccaaatgacttatctgatacactggccttcggagaaaagcaagtcaacacctcattgtgatcccattttacccagtcagaatgtcataagaaaacaaataacattttcataagaaaataaacaacaatacattctgtcaaggatgtagacagatgggatgcacttgattcactgctggtgggaatgataactagtccaatctcagtggaagtcagtctggagtgttctcagaaaatgaaaaaatagctgggcagtggtggcagatgcctttaatcccagcacttgggaggcagaggcaggtggatttctgagtttgaggccagccttgtctacagagtgagttccaggacagccaaggctacacagagaaaccctgtctcaaaaaaccaaaaaaaagccggacgtggtggcgcacgcctttaatcccagcactcgggaggcagaggcaggcggatttctgagttcgaggccagcctggtctacagagtgagtttcaggacagccagggctacacagagaaaccctgtctcgaaaaaccaaaaaaaaaaaaaaaaaaaaaaaaaggaagtgaagaatagctgtggataacacagcttttcttttctttatatttcaggcatcagggatagaggtcaggtgtcaatgtaaatcactctaccactgagttacacttctaaattaaagacatttttcctttcttgaatgcccaaaaatttggagtactgcaggacaggctcactcttctgcagttagtgttatgtctcaaaatttgatttgaggtttagttgtttcagtaaattgtctttttaaagtcatgactaaacaataatatacagtgaaatttaaccacattcaggaaacactgaggaaactcaggcctgtggggaaatctggccttttgtttaagtatctcacttcgcatgtaggcgagaattgagatgtgaacatgagctcctgaaggaaaggaccacgtttctgtggctgcttcactctgggcagtaacacatctgtccaggtaaacccagccttgctgaacgtcaatctcagcacttgggaggcagaggtgagagtttgaggccagtctgatctatagagcaagttccaggatagcttgggctacactgaaaaaacactgtcttgaaaaacaaaacaaaacaaaacaaaacaaaacaaaacaaaacaaaacaccaaaaaccaaaaaagaaaaaaaaaaacaggaaaagaaaagaaaaaaatcaaaataaaacaaagccaaaaacaaagcaaaaaaaaaaaccacccagcaaaaaaccaaaccgcctagcctcaagacatgtgtggttgaatgtttttcacttctagtcgctaagcaagtgtgtgtttttacacaatgccctctgtggtgagtggcggattcccctgagagttcaccaaatgataggctttcacaatgctcccgggtgtctaccagacccagcaaagtattgatgtggttttggggtgaaagtcactctgtcttgtgcaatagttagaatctgctgaaaccagcagtgttcctatatgggacaggggtccagagctaacccggaggctataactgagcagaggtgaagaccacgaggcattggggagcgtatgccctttgtggtcagagagatctagcttcgtgccttgggtctgtgtctctccctcttactggcttctggcttcttcattaagtgggagacaaccacaggtatctgtatgggaagactcgactaccccttgactcaacattgcttgttacttactttgtacaagatactacttagtctaggggttatggagcataacctcaagtaggtaaagcccctgctccagcgtgtttgcattccagtaagaagcgaaagacagtaacacacatacaaaataagtaagaaaatgcaacaacagcaacaacaacaacacacacacacaaagtaagcaaaacgctaagggaaagatagagagtgatacagctttgagttgctgtagttcttctctctcctttgcttcatacagtttgcttgggaagtgtccagggccatggggtcacaactaacagcccttggaaatgagcttgtgtccttaatcttcatgacctaacgtgatttctctagaaacatcagtgcattaacaggaagacaagatggaagatcatattttggctctccttccttggtgggttgacactgctggtcctatccactagtaaaagcatgactcttaggctctgtgtggccagtggaaggtggcagttggaggaagcagatgcttggccagcctttgcctgggagcagtctagctctgagtgtcttattggagcagctgctggcatccagagttctttttggattcacgatttaattcaaaagctttgtgctcccgagaatcagctctggtctttcaaaaataagatgtgagtccgccgagaggctcccaaggtattgccttgccaactgcaagccttttaggagcagtttagtgagtggtgactgctagttgcagttggctgttagcccagagctaataatagatagaaaaggtatatacttaaggagtctggaaactgaggtttatctactcacagaaaatgagtttctaaaaaactagcttgaaacttacccagaaaaatcttagaacatggttctccaatgtcaaggtaagtgttctgtgacactgggcttgaattatgtagggaccacagattttagaatttggacccctgaacttgcttcacaccccaccaggaaccttcctgtacaacagccctcagaattcatctacatggtcttttctcagtatgggatccggtctagcaagtggagcacaccttctattgcttaaagatttgtttatgtatatgggtattttggctgcatgcatatttgcacaccaaaagaaggcagcggatcccatggaattactgtgggtgctgggaattgaactcaggacctctggaagaatagccagtgctcttaaccactgagccatgcctgcagtccatctattttttattctagtacagcccctcttcattcttactgaaatagtaatgcctgaaccacacagcttcacatttagttacaaagaaagagtgggagtatcatgtgacaattagtgttgttgactctccaggacaaacttatgggaaagggaggtctcctgacccctgaacaatcattttacttgaggataattttcattgcactcagaaacatgctgaattattgtccttacccttgccccatctcttgctctggtagagaatggccaaagcctggaaacaggatggcttgacagaagctctacttggcttcccagacccaagctggattaaaccaggttccctaaggagtcttaaggcagctgccaggagcaaggggcccactcattggctattggccttgactgggttggccaatggtaagctggggtctgcctgtccccatgagtaccagactaatgagacctggccactttctcctcatttctgtctgtacgattgtcagtggatctgacgacaccaaaaggtaagaacaattctatattctcggctggctgggtatgaatgcagaatcccacttgggctgtgttcagattttgctctctgcagcagtgtgaaggtagatgttgagaaaactcaggccttggaaacatggttggggcagataagctttggggcttttctttaactcttcaaagctctaagaaagaaacaataacctttcggtccacaagcttgagcctaaccggaagtttgccctgttcatttgatggcaggatgcccactgcaaaaagaacctggagatagtgaggtaggagggtcgatccacagatgagactctgttggaaagtgggatctgttgcttctcggctttaagagttacagtgacaggagaagcaggcagagagggcagcccgaggaagtccagttgaggtcagactgtaggatctgtctctatcacttagttctactgagcagatatgcacggagcatgcgctgtagaacactttgtcagggctgtgagtgaaaacatgggtgtgctcggaggagttggggacatctgtctgcatagagacattttaggggattgggtgacacaaagtggtgagaacctggaaaatagtggcaatctggacagaaagcctcattttgaaagatattttctgacagaggcactgcacctgctttgtcgttgttaaacctaattcttgctccatgaacacagcatcggaaccatggaggtagaggagatgaaggagggaggggtttggaagtcaaggcagcctcttgtgtgtcatgatacgtaagtccctcgtctgaagaaattttgtttttgagactgggtgtcactatatattcctgactggcttggaatttataaagaccaggccatcactgaactcacagggatccacctgcctccctggctcccaagtgcagggagcaagtgcatgctgagaatgggttctgaatcaagcctcacaagaggagccacctcactccccctgtgatgtcattcaaaaggatggcagagaatttgatcagagtcattctgtggacaagagggcaggtggagcaggccagaggggcgtgagagtgcatcttggttcttggagcagtttggttcccaaggcttagtgagaaatccttgatgcctctctccctgtgtttcgaggaatcttacaaggcacagggcttgcttctagccttgtgtgtgtgatcctgtgtgcatgtgtatgtggaagccagaggggtctctccatatgaggtgtctttcttaatctctgccttatttttttgagacaaggtctctcagaacctggagcgtgacgaagaaggccagactgaggtcattgatctctagggatattcttgtctctgtcatcccctaccccagtgtcagggttaaaggtgacagcttttgacatgaattctagggatctaaattcaggtcctcatgcatctgcagaaagcactaatcaacacagccatctcccaagcacttaaaattttatttgtgcaagtgcgtgcgtgcttgcgtgcatgcgtgtgtgtgtgtgtgtgtgtgtgtgtgtgtgtgtgtgtgtgtattagtgctttcttgagagagaatgtgcaagcacacacaagagtctaatgtgtgcagacacgctcattctatggcaggcacatggaggtgagagggtaacttttgggagtcgtccctttcctcctctcttgtttcttctgctcgtccacccaccgtcagcctcaggagactgtgatcgccaccgcatcttgctttttatgggagatccaggggttgaattcaggctgtcatccttgcccaggaagtgcgttctccttagccctcatttttgtcattttccaaggaggttacagagataaacattccagctgcttgtcaactcagaggaccggtagtccccatgtgctctgctaaagtcaggaggtgctatcttttggaaagcaaaggcttcaatcaggagctcgccctacaagcttcatggagggatgctctgctttgctggtttcttgagagtgtacaagtgtgtgcacacatatataccggacatgagaatgctaccgactttccaaaggctgagtgacaccttccagataatcttaggagctagacagaggtgcctgagctcctggcacagccatttatgattgggttgtgccattgtgaaattacaaatattaacttaatttttatctggttttgcttgtttattgtgtgcttctgaggtttgagcttagggcttcatacacattgggcaaatgcccctccactgagctctaccctcgggtaccacttcatgagtgaaggtgaaaacaaccaacaggccaggtgtccagcacacagagcgcttccatgaggatgtaggaaatgcactcagtctttctgtttctacaagcaaggatgggaggtcctggagttgcttttggctctggcatttctctgtgttttgttgtctttactggctgggggcgttgacctcttctctctctccttgtagcctaatctctgccagtcccagaggaaactccagtcttgaatttcacaagattctggatgttggtgctaaaatgccagcaggtcaaagaggaatttcacatccccttcactatacagtggtcctgaaacatgcagccatccctctgcataactcatgtgtggtttgctaggaaggccagtgggtcattggatgacatgttcattttttaaacattttgagacagggtttctctgtataacaaatagcagagctctctctatcgaccaggctggcctcaaagtcacatcgatcagcctgcctctgccttccaagtgctgggattaaaggtgtgcaccaccacgcctggtcctacctggttgcttcttattttggcagaaatgaccaaacctttccctctcccagatgtctcagctgtcggtcttccccttaaggctgtgtgagtgaagtgaaactcagcagctgtccacagtgggttgatacgttaatatttgtttactttccttctctcacaaacgtgtacggtattttgtaagtttgtaaactactccgcactttctgccaactgggtcttatgatattattgtgaaatcacatttctaggcaaagagcataaagccagggaggcaaataggggcagaatgaggagggggctggcaagctaggccattggattgacagtctctggtctctcaccctttccccatggggaagggtactaaaaggcagggtatgtgacggtagtatgtttctcttccccgtctgtgccagaggttatctagccaggactctacttccacgggttctgttggatctagattatcactcaagcacccagcagccccagttcctcacccctaagtcagagcagtcctaagtgacagccattgctcactggcttactccagacacccccctaggcatggttcatggagtctgtcgcttagtcttccaacaaacacataaagggcaaaactgattgtttgtacccgagcatgcatctttttgagtaacccccccccccagtattgtctccaaaacggctgtggttattcaatgagatggtggaacaaaggctttccaaatgcaaagcattatactggatccttgctgtctacctccaacacctatctacaatgtttcttttgtaacatgctctagctgtagattcatctcttgcacttggttccattcagtagtgtttccttatagaaacagaagtctttcaaagtcagagtgcaacatttgctttgtctacataaagaacagaaacaatgtggaatatttttttttttaaaaaagaggcattctgtgttgtccttcatgggtatccagacctgactttacatccagaactcggtgaaagagaagccttcagtgagatctgtccttatcagccaaaggcttaggggctggagagagagctcagcagctaacagtatctgcagaggaaatttcacaaagaacctggttcacaactgtctttaacttagttccaggggatccaatgccttctgccctccgtgggtacctgtacataggtgtatacccccatgaatattcaaataattaaaaaataaaaataaatctttaaaaagaacagctaagggtgtgcagcgcttagtacttcagtcccatggcactcggggaatcccagaacaaccatacctgtaagtagagaaaagcattaaggacatggaggcgtgggggaagaatgtgtttttagatgagaaagattattggtttttcagtagagagagagaactgaaaactctagagttctgtctcttccttcctccccagcattagggatctgttttgagctaccctttgtctttggggccctccttacctgcctccatttcaagcattttggtgtctttcttatttccccatggaaaagattggtgcttcttagattcttgagttgaagttttcaggaatatgattgctggagctgtaagaagggcagagttgacataagacacacaatattaaaagtctcagagcaatggcgggcaagatgactcagtgagtaaagatgctgaacctaatggcctgagttcattccccaggacacagttggtagaaggagagaactgacttccacaggtgttctctaacttctgtgggtacacacacacacacacacacacacacacacacaccacaccactacacaccacacaccacaccactacacaccacacacacacacacacacaccacaccatacacacacacacacacacacacacacacacacacacacacacacacacacacacacattaaccaaccaaccaaccaaccaaccaaccaatagactgactgactgactgactgactgactgactgtgataagaaagttccagggcaagctctgcttcattttctttgtagcagtttctgagactgggtttttgatcactccagattcagtagatggcgacagaggcactcagagacattatgagccaatctagggcagactcctgctctccaagagcaatgctagggcagttgtttctggctcactcctccccacacctgccagttccaatttgtgtacggtcaaactagaattgggtatttaaagaatgatgctccaaggcaacagggagtgcaaggctgaatttaatcaaaggcatttaaaatgatcttatgccacagtttatagcaccattaaaagaaagtcacaggtacagcaaagagtgatattatatagagagagtgaaaatacaaaccagggtaataccaaatccttccaagaataagagctgtttattgcttggaatcaaggaaaatgtcaacagaactaagcaaataaaggacagactccctgtacacctgggaatgaggacagacagacagaaggatgatctgcacctagagggcaagtcacagcagtgtgacgtaagaagacaaaatggtgacacacgctcacacaatcgcctgcagagatgttaataagggacgggatgtagctcggtggcagagcagttgcctcgaagagatgagtagagaggccctgggtttgagtctcagcactgtgggtgcagagaacaataacctccacataaaaccagccaaacgttacaggaactgggcccgctggtacacccacgtaatcccacatcagggaggccaacgcacgaggagtaccctgagggtgaggccaatttgggccatagacaaaggctctatattaaaaaagggtaaagcttaaaaagaaaagtctatgtagtggtgcttgttttgtaatcccaacacttgagaggtggcaatgaggccatcatgacttcaaggtcatcttaaatccagtgatggagtctttgaggcttgactgggttccatgaaactcattctcaaaatagtgctcccccaaaagaccccaaatcaaaacatatccaaggcacaacagtgcagaagaaacactttgtgaccccagtaaattaactgacaggaacttaacgaggatcttagaaatgactgaagaatgaagatcatttattttgctcactaaatttaacagttaaaacagatgttttcttttgcttttgttttggtttttggtttttgagacagaaaatccatatcactctgactgtcctggaagtcactatgcagaccaggctggtttcaaactcacaaagatacacttgcctctgcctcccaagtgctgggattaaaggcttgtgtcatcctgcttggctagtagtacactttttaaaactgagactacccaaagctggcaagagtaattcagctaggcctgcttatttttttctttgctgtgctgaggaaggaatccaggtccttgattatgcgagggcagtgccctgctacagagtgacaccctcagcccgagataggtctttgtgtgcatacactcatgttctcttgggtggcagcatcgtttcttgtaatgttggtatgtatgttaaatgactttaaagagaggctgagagagagacagctcagcagtttagagagcatgttactcttccagaggatctgagttcggttcccagcactgaaagtgggcagctcacaactgactggtgcttcactcctgtacacagatcacacacacacacacacacacacacacacacacacacacactcgaatgaaaataaaattaaatctttttaaaagacttaaaaacgtttaggtgggctggagaaacagctcacaattaagaccttgcacttgcttttccagaggactcaggtttgggtcctagtacccacatggtgcctcacaacgatccataactccagttccaggaaatcctcttcggggcctccttgggctcacacacacacacacacacacacacacacacacacacacacacacacacacacactttctctctctctctcttctcacaatcgcacacacagaatcattcacacacacataaattaaaaacaaaatgtcttttttttacaaaaaggttaatcagggcatagtggcatatgcctttaattcctccacttgggagacagaggcaagtggatctctgagttctaggtcagcctggactgcagagcaagttccagagcagtcaaggttacaacagagaaaccttgcctcaaaaacccaagaggacaaaaagtttagatttctgggcccaatcatttatatctgggaatatatcataatagaaagataagttttttagaaaagctgcctgcctgaaaacagctttgattgattgattctttttaaatcaatacatatcatttgttgcagattataaaatattttgaagtagacataagctaaaaaatagaaaccaagtttaaaagaactacagatattttggccgtatccactctatggactggcaatgcatatatttaaaatgatcataaaagctagaaaatgacaaggctgaaacacaggagaagatctttaggtgaaaagtgatttttgccattttaaagaataaacagattctttggaattagagttgcttttcccctgtagtctccaaagagtttctgtgtaggtgtgtgtgtgtgtgtgtgtgtgtgtgtatgtgtgtgtgtgtgttaatgcatgcacacaagtgctcacaagtgcgcacatgtgtatatgaaaacgagggagaaaaggcgagcttgggagtggggaggtggttagatttgagtggaacaagcagaggaacccaggaccggatcctgggatattctgcgtgtgtggtcctgcactcaggagggggagactggaatcaggccatccctgccacctgtggatttacaattctcaggctgaaaggagactgattgcaggagattttgctactcattgcagatttcagaggaggatgtctgagtgtgatggtttgtatatgcgtggtggcccaggaaatggcactattaggaggtgtggccttgttggagtagggttgtcgctgtgggtgtgggctttaagacccaagtcctacctgcttggaagccagtcttccactagcagcctttagaagaagatgtagaactctcagctcctcctgcaccataccttcctggatgctgccatgttcccatcttgatgataatggactgaacctctgaacctgtaagccagccccaattaaaaagtgtccttataagagttgccttggggattggagagatggcttagctcagagatggttaagaacactgactactcttacaaaggtcctgaattaaaatcccagcaaccacatggtggctcacaaccattcataatgagatctgacgtcctcttctggtgcatctgaagacactacagtgtacttacatataataaataaataaggacataaagtttaaaagaaaaaaaaaagagttgccttggtcgtggtgtctgttcacagcagtaaaaccccaactaagacactgatgaagacctcctgggagagtgagggctgggtagccactgaaggctctctgggagaggcgagtatgtagatgcagatctttggagtggattccacttagctatataggacatgatgcaggtcctgattggatgtgccatgtgagtctgcctttcccatgactattcacctgtcaatttcagggctcaggatgctactgttgcaagctctcctgttcctcttaatcctgcccagtcatgccgaagatgacgttactacaactgaagagctagctcctgctttggtccctccacccaagggaacttgtgcaggttggatggcaggcatcccaggacatcctggccacaatggcacaccaggccgtgatggcagagatggcactcctggagagaagggagagaaaggagatgcaggtatgtagaagagtcctgaatttggggggggggtctttgcagggtgagtccagtgattaattaaggcctagacacagacacaagaaagaggctaaaccttttttatttatttattgttttatggttcatactcatcttggagcttgcactgtcctccttgagtgggactagatggtacctgctgaggtatccatgacttcactccatctgcatctctttctctctgtctaccccttccatactaccaacataatcctatttttgttttctccgtaattcttgttctatctattggcaatcataagcgcttttcacgcatttctaaagcactcagtaccatgatttagtcaagaagaagagtgtaatgaattgccctaatgttgcttatattctaatgctaatttgggacccctcaagactgtgccccagaagtgagagagtctgcatgtaagactccgagtgaccctgctcccaagttatttctgattggtaaataaagatgccaatggtcaatagctgggcagaaacgacacaggtagagtttaggtttctcgtgcttgggttcagaggaggtgaagaagaagaatgtgaaggagcagcaaggaagtggccatggggtaagagttgagagcatggccctgaaggctgcccaactgaagccaagagcagctcagatgcaacatagtaataacttggggttatcaataggaaagttgataatagcacagagggtaggtatctgcccagctcttgtgctgtttaaagcttgttgtaaatatgaaggcagtaagtgtgtctctcatctgagaacttagtaatcaaaggtggggtagaaaccctgggctggaatttaaataatttttacaacagacaagactctgggtaatggttactaagagaagatgtcttccaacatgcaacatgctcatctgaatgtgtgcagatgctgaaggcatgggatacagatagggtgtactcagtgaggatgcagattaacaaataggctaatctgaggaggtagggcttgagccacgcctcaaaaggatggtttccagagggtagaggggggaggacatctggacacaggggatagaaggcaacacagtggttggtcagtgcacaaacagctggcagggtagggtgactatatggctacttacaggagattactttctggaaatctgctgtgctttggggcatatggaaaggcatgggatgaaggaatgaatagatgaatgaataagtggataaatcatattcagaacatctactgacccaactgacctctaacaaatctgagcttctaccagagcaaatcgttcacatgtcaaccagagaacaacgaacaaggatgtagtatctagctcgagagttctaaatatccatcatcagtctgctcattcatcttttaattcacccataaaggctttgaaaactaaggctggagatgaacttataggagcctgccaggccgtggagagtgaggaagcagagatgacggagatgatgtctttccttgtcctgtgaaatggattgtgggtagaggttccggagataatgcctcttgctggaaacagtctgggcagttctgttcccgccattcacagaattcttctcactttctaggtcttcttggtcctaagggtgagacaggagatgttggaatgacaggagctgaagggccacggggcttccccggaacccctggcaggaaaggagagcctggagaagccgcttatgtgtatcgctcagcgttcagtgtggggctggagacccgcgtcactgttcccaatgtacccattcgctttactaagatcttctacaaccaacagaatcattatgacggcagcactggcaagttctactgcaacattccgggactctactacttctcttaccacatcacggtgtacatgaaagatgtgaaggtgagcctcttcaagaaggacaaggccgttctcttcacctacgaccagtatcaggaaaagaatgtggaccaggcctctggctctgtgctcctccatctggaggtgggagaccaagtctggctccaggtgtatggggatggggaccacaatggactctatgcagataacgtcaacgactctacatttactggctttcttctctaccatgataccaactgactgcaactacccatagcccatacaccaggagaatcatggaacagtcgacacactttcagcttagtttgagagattgattttattgcttagtttgagagtcctgagtattatccacacgtgtactcacttgttcattaaacgactttataaaaaataatttgtgttcctagtccagaaaaaaaggcactccctggtctccacgactcttacatggtagcaataacagaatgaaaatcacatttggtatgggggcttcacaatattcgcatgactgtctggaagtagaccatgctatttttctgctcactgtacacaaatattgttcacataaaccctataatgtaaatatgaaatacagtgattactcttctcacaggctgagtgtatgaatgtctaaagacccataagtattaaagtggtagggataaattggagggcagggtacagtctgttctcattggatggcaccatttttcgaaagcacgtgttcatttagagtgttggcagagatctcattcccacctcatttgtgggtctcagtttacatccattaagacttctcccctgtagagctctctcagagatggtggtcctatgtctaggtcctattctgatattcattggctccctcttcacttcgcacattttcctttccttgcctttgctcacaatcttccttccagctcaggaaatcctacctaccttcacatggaggtggttccctgtccttcaaggccacttgggtaggtgatgttctgatgtgaccttgcagggttgtgggtgtaggggaagaggggagagggagagagcccgcgtccagccagagttcctgtgctctgggcaggcggatgtgggaggactgccggacactttccacacagccctgggtgggcatctggctgtgtgaagccactgaccccacacggttggggggtggacaaggggcagcccccggtaccaggttcttaatctctggcatcccactctgtatacaggagaggagctgagaacagaataggagctctagggcaacactctcagccccgaagatatgggaagagagcagagggagagatgttcccacacaggagagagttctaagtctggtccatggctggagcacaggaaggccttctattggaaggttagaagcagctcgttaggaaaaagcctatcccattgtccaagcacagcgggactagatgaacagagacagtctatggttttagagctttattgtagaaagccagggggaaagagagaaggtagaaagagagagagagaccagccatggccaagaggagagaatggggaaaaggagagagaggagaaaggctagagtaagaaagcttaaagagggagaggtaaaagcttagagagagagagagagagagagagagagagagagagtgtgagagagagagagagagggagagagagctaagcagcccctcctatagtaggcttgttatcttgctgttgctaggtaactgggaggagtctagcctgaaggtcagaagcttgggacattttgtatgtctagctagccaccagcctctccggtgggggactgtgggggcagtaacttcaacaggagccaggggtccaggagtcatgagaggacagcttccgtcccatgtactggggttccacctcttaactcaactagagaccaagctgtctgtgcatagcccattgccccacatgacctcacttcaactccctctttttaaaagctttattgtagaaagacagggggaaagagagaaggtagaaagagggagagagaccagccatggccaagaggagagaatggggaaaaggagagagaggagaaaggctagagtaagaaagcttaaagagggagagataaaagcttagagagtgagagagagagagagagagagagagagagagagagaagagagagagttttaaaatatccaaatgtggggctcagtggtgtggaggctctaggtttaatttaacttgctgtcttcatcagtgttttttccactgatgaaactctgtgtctgcgacgtgttccccttacattaggggctaaattgcctgttcaggctgagcttccttcccctctgaatcctccctgaagatctttgacaagtacttcaaaaacaggagtctcctgaaatccatttgtattcattgtttgcttcagtttctcttcaacactcattcttatctaacgaactattaggacatttagaaaccctgtggtttaagcacccaacccccatcctaatggtcagcttcacccttcccagagaggtgaaggatgactgtgctttctacagtgccagctctgtattatccctcaaaaaagtaatttcagtctaaaccacaaagcagggctgaactgacctcattctttcttcgagaactgacaagcagaaggagggtggatgatccagaattgattcttatttcccaagaattacagtagacaggctggggagaggaatttgtgtttaagagcatttgctggggctggagagatggctcagtagttaagagcactgactgctcttccagaggtcctgagttcaaattccagcaaccacatggtaactcagaaccatctgtaatcatctgtaacgagatctgatgccctcttctggtgtgtctgaagatagctacagtgtacttacatataataataaataaatctttaaaaaaaaaaaagagcacttgctgtctttagagaggacctgggttctgttgccagcacccacactggacagctcacagctacctgtaactttagttccagggaatctgatgctcctttctggtttctgtatgcacatggtgctcataaatatacccaaggcacacacacatacacataaaataaacaaatcttaaaataccataccatagaagctggttaaatacatttggcccaagaccttgatcagttgggagcctttgttttttgtttttgtttttgtttttggttttttgagacagggtttctctatatagccctggctgtcctggaactcactttgtagaccaggctggcctcaaactcagaaatccacctgcctctgcctcctgagttgctgggattaaaggcatgtgccaccacacccggctttgtttgtttgttgttgctggtttttttttttttttttttttttttttttttttttttttgcagtgggatcctttgaaggatcaccttgacacacactacctgactctcagtgtgtactaaggtgatgaggaggcctccctggcttccccatagtcctatggtttgttgttccttctgtgagcagtgggcatatgactgatgcaatgatggtacttggaattaaacctagagcctccacaccactgagccctacatttggatatttttaaactgaccttcaggggctggagagatggctcagtgttaagagtaccctttgctcttccagaagtcctgagttcaattcccagcaaccacatggtggctcacaaacatctgtaatgagatctgacaccctcttctggtgtgtctgaagacaacggcagtgtactcacatacataaaacaaaacaaaacaaaaccctgatcttgaaagccaagaggtgattggaaattgaaaggcaaaatgattcttgaaagtgaggggacttgagggaggggctgtttaagggggactgggggggggacggttgagatgcaaagtgaataaataaataatggataaaagcccaaaatgatgctttcaaatgatttagtttacatcctttaataaacgtcttttgtataaattatgaaatagagctacaagtgccccacagtgataaacgttccttcaggagagaactgcttaggggactctttaaaggcttagaaaccccgacatctatgcaaaggttgctgttttcaaatttcggttctggatgattcccagtggtaaagatagcggaggctttgtcttttaaagctcttgctggtcattactttctgcaaatgaagatccattccaacgttacagtaaaactacatgctgtgcgcgacttctgtttttgtttccagagaagcgtttgggagtgagagaggatttagctgtattgtaactatgttgcaagtagcagaatgcccaacctcagataaggtcgcaaaaaacccccaaaaccccacagaaatacctgggttctgacccaggcaggcatcttgtgtgctccttctcctcctccatccttgtcttgcctgagcctgtctgccttagtccctcctcctagctcgcggtcatcccgttcagctgccatgcttgcccagagccaggtattcctagttctgcctccaccatcgatcatggagcagaccccaggtcctccttaggacaactgcacagtttccttcctccacctgctggccactgcccaacccactgcactcatctggggttgcttggtgctgaacccagagctccaaacagagttccaggcctgggactagtgacagtttgaagcctaaaatccagagtggccagagactgtaaccaagcatcattctggcccacaacctgtcagtttggggcaagagcagctgaagagccaccagcccccccccccccccccaaagtaaggccagatagcggcagtaaaaaataccacaaatgtcgtaattccagatgctcacttaacagtgcaaaaccaaaaaaaaaaaaaaaaaaaagaacaatcaagacatcatgcttccccctgaggccagcagctctactgtgataaaccctgagaaaaccaatttagctgaaccacaagacaatggtttcaaaacagcaattaggagtatgttcaaggacttaaaaaggatatgaagggctggtgagatggctcagtgggtaagagcacccgactgctcttccaaaggtccagagttcaaatcccagcaaccacatggtggctcacaaccatccgtaacaagatctgactccctcttctggtgtgtctgaagacagctacagtgtacttacatataataataaataaataaatctaaaaaaaaaaggatatgaataaatccccgaatgaagaccgtgagcgcacaaccattgagtgaaatgagaaaaataattcaaaacaggaaagtagaatttagcagagaaatggtatccctaaagaaaaaccgtactgaaataaaagtcaaaatgaaaaactcagaggtaagcttcatcaacagattaaaagatgtggaagagaaaacttcaggttttagagataaagtaggagaaatagatcagtcagaaaaaaattaaatcatcatcatcaccatcaccaccatcaccatcatcaccaccatcaccatcatcaccaccatcaccatcaccaccatcaccatcaccaccatcatcatcatcatccaggcacaaaacacccaggaaatctggtacactatgaaaattaaaatacaacatatataaagctatgtgacacaatgaaaacaactctaagagacacgtttatagcacttagtgtcgacatcaaaaacatttggagacatacattattaataactaaatgacacacctgagagctctagaaaaacaagaagaaataattctccaaaaagagtagacaggaagaaagaagtaagcggagggtggaagtcaacaaacacagacaaaagctactaagaaccaaggaagaagctttggtttggctttgtttgagaaagcaacaagtttggcaaacttttagtctaactaacaaaaaataaaaataaaaaataaaaatagagaaaatccaaactgacaaagttagagctgaaaaggaagacattacaacaggtaacaaaaaacgacacagagtcctgaattctaccagacctctaaagaacgaataccaatactaaaattatcccacaaaatataaactgaagatcagctctaaattcttttgatgaagccattaccatggtaccaaaaccgcacagacttgacaagaaattatagtccaatatcccttatgaacagatgtaaaaattctcaataaaatatttgcaaactgaattctagaacacattaaaaaaaaatcaaccatgataaactggtttcgtgccagagatgcagggatggttcaatatatgtaaataaataaataaataaataaatacaatccattacataaaaggattgaaagagaaaaattcccatgatcatctcattagttgagagaaagaaagaaaggaaggaaggaaggaaggaaggaaggaaggaaggaaggaaggaaggcaggcaggcaggcaagccttagacaaaatctaatacttcttcattgtaaaaatcctggaaagattaggcataaaagggcaaagctcaacacaataaagagaatttacagcatgtccacagccaatatcatcctaaatggagagaaactgaagcatttgggggcaggtgacctggtaaacagcatgcctccacgatctctgcttcagttccttcccagactgccctcccctagcaactctgatcaagacgggctggcgagctgaaataagccctttcctcccctacttgcttttggatcatggtctttatcacagcaacaagaaaccaaactctgtccctccatcccttcgtcctaccccccccaccccccatcccccctctctctcctgaatattgggacgatttctcaggttcttagtggattagatgatgttttgtttctttacagggaggtctccttgtgtctcccaggttggccttcatctgccatggtggcttgggattttgtgttggaactagcacatttgggtattgtgaagcaagaccctggcttctcttaaaatcctcaagtaaatgtgcatatttgtgtgagcagagttaactggcttaggctcagattacacacagtgtctcatcctccatgggtgtggatcctttgtgaattcctgctttgagaccgggtagttactaccttctgtgttctgtgtttcctgcgtggcatttactctgggacttggtagctgagtctgcgaccttggatctattctgcatttgtgcagcctggaactaagtctaggaattatgtagggacctctacagagtgaaaagaacccgtttccagcaagcttcctggtcacttcctggcattcttcagctcccaggaccctccctttcctgattcttctgaggtctggtgctgttttgtgtaactatggttggtttggagtaaagttcttagagagacgacaaagaagccttaggttgtcttgaacggtttgaaagccatcaccctccctctgactctctctggtcccagggcaagctttctttgggagcggtggaagagtgcctgcagcatcaggagcttgcaggcaggaaagagtggcaagaaaggcagccgtttctattggcattcctggtgcagaggctacttttccgggcctgttggttcgcaaaggtgatttctggagcttgcttgatggtctggaatacgctgcttccgagtctgatctgcctttggcctaagtcgagaagctggaaaagacaaacacacccagaacgctcagctgggctatttcttcagcttccggcttcagtcctggctgcctacctgttcacttttcaggcgctttcggtgtttgctgtgaaaggtttatttctctacaatggttgggcagacacgcatgaagctctaccggtagctgagacattgctggcatcggatagctgatgggccattgggatccgttttcttcgaaggcgttgcccctgagagactaaccatgcttcagcagacgatccaacacgcaagcacatgttgcgtgacgcactaaggacgcactaagaggtcgcaatgggttttatttagtacagcataggaagttgggagacaaaaatgatggcgggtataggggaggagttagacggaatggactagggggttgatttgattgaaacaaagtatatgcacttatgaaatccttaaaggaaaacagatgactgtggttcagttcgtggtcagggtcatggctgtgatgtgtgagcacctgcaggaactgctagatgctgtcatatttccttcaacctcctgggggcagcctcctagaactgcttttccggtacccttaagatgccccatgatttccttctcctaaaagcctttgaacggcctcaagtggggacttgaagtacgccccgcgctggtttcaacgtgcacttccagctcctgttgagatttagttgccattgtgaaaagtagttaagaggcaaagccattaactggtgcctgttctaatgaaaggattaacacgtccaccctgggaggccagtctgcctttttctcttttgcctcgctgccatgtgatcgcttcagcaaggagggcttggccacacactgctgtcattttttttttttttaactttatttatttaatgtatgagtgctctgttgcatatacatccgcctgcctgaagagggcatcatattcccctatagatggttgtgagccaccatgtggttgctgggaattgaactcatgacctctggaagagcagccagtgctcttaactgctgagccatctctccagctctgttgtcttaatcttagatttccccactctccagaaatttgagctaataaaaaatgttttgaagcagtttgctcgagaacctacattggcctccacctggaggtctcctaagtctcccaagaatgggagttacagttgtgtgccattatgaattacgattttctatgccttttaaattacccagggtagaattctgctatagcctctccagacagactgggtcagccagattcttccatgagtgtggatcagaacacactatgcagacttaaagctcataggtggccatcttctactatgcagtataggaaaaagaagcttagctacagagaaataaatgaggggaggagagatgggggagagggaggataggggaggaggagggagggggagggaagagagggagggaagggagaggaaggataggggagttccccttgatttctgaaagctccccacgtttctcctcaagagtcctttgacacacagttcctagatttttacagttactcttttgagcttagactaagtttcttatttgcatccaatgacatagggccaggaactgttctgtgcctgtgcccagggatcagtctgaggtcttctgaggtctagtcatgcaaaaatatttgttaatggatcaacaaaggcactattattaggctgtcacaggataaaataaaaaactgccatttcccatttatttattagccttcaattaccatcttagaaacctctgtgaaactttccatttcatcactggcttacagaagccatgtattcatttagcaaatatttattcggcatctcatatgtacaagacatatgacaatgaaaaaatatcaataatattattgaagtacctaaaaggtattattttatttaatcctcatggcactttataaaacatcactgaccaagttgatctatctgaaagctgggtgtaagagaagctaacgtgttcaaagccacagctcttagacagcttaacaaggagcagacccagagcccatgtagacaagaggaagaatcccaatgaccgttttcctgctggctctgagacatttggggcacaggttgttcacaggaccttttgcttgaatgttcacggtcttgtggaaaaattcttgccttgggaagtgagtcactgagtttgtcttatgacagagagtctggctgttaacaggaaacatgaggaaatgtcttagccatcgttcaactggacaagttctgaggtcttaggttccttgtagtagaatacaaggacaatccagggagtgtcttgcagggggagcttgtttaaaccagctgaacgaggctgagtcaatgttaaggttactttactttaaaataaccaacaaaacgttttaaattatacagtgcataaaatgtaaaaataagaattaaaaataaaatacagcttccttaccacagagaaagtgaatctgaagtggagaggagtcagggtaaatgtggccccattaaagctgctgcatgggaagggtgacgctgatttacactggatttccaggttagccagggctgcggagccagcgagagatttgctgaaaagaaagaaagcaaagtacctgatgggtgggatagtgcgataaacagctagccttacctgggtacaaaaccacagccgacgaggggggttcactccagacctaagatcaagcagccaagttagaatagactgctctgaattagagtctacagtacgggaagcttacgaactccacttattacagttcttttcttagaagggcctgaccgaatgtgcaaacagttcagaaaagtcatttgcaatagggctggggatgtagctcagttagcaaagtgcttgcctaacacacaggaagtgctgggttcaagtcccagcactcataaactaaacaccagtgaactcggcacttgggaaatggagacaggagggaggaagttgaaggtcctcaaacacagaaagttcaaaatctgagccaacctgggctatatgagattctgtctccccccccccaaaaaaagtttgctatgtgtggtagtccacacctttactcccagcgttcaggaggcagaggatctctgtgagttctagaccagcatggtctacttagagagttccagtccagccaagggacaaagtgagagtgatcagagaagaaagtgtgtaagagactgtagaccagtgattcttgaccttcctaatgttttactgtatttcctcctcttgtgatgacccctaagcacagtgtcgtttttgttgctacttcataactgtaattttgatgaggttatgactcataccgtaaatatctgatgtgcacgatatctgattatcgacccccaaaggaaaagataggtatgactacaaaataaaaaatgtagctttattgcctttaaaagctggccaaacaagatttgcttaatgatgacactaactgacataccatgaggataagggaatgtcacagggccccagccctaggtgaggagctcctggcatcagtggctgctgagagaaggcaaacaagtcgtctccaggggcacgcttctgcctaggctagccagtcccagtggtcagccctaaacatgtgtgcacaagcaaaactctgtgaagtgttttcccccagtcctgctcctggaatgatgactctgagactaattatttattattaaatgcctaggccataaaccttggctcattccctggctaactcataatttatttatcccatccaaactattctatgtcttccatttggttaattgcctctccttcagtccctgacagcttctttctttgagtcactcagcgtctagctctgagtctctttattctatcctgcattcaggtaccctctagtttatgtcctttcttggtgctcttgaatctcttttttatatactcactatttcccagaatcttctgtcttcctgccaatgtcctgcctcctgcctcagttcatcagccataggcttttttattgacaggtgatacttagaagagattctcttacataacactaaatggtccagagtcatctctctgtccgtctgtctgtctatgtgcatgcatctctctttctatgtctctctctgtatgtgagagtgagacagagattaattatagaagacaaggttatgaacttgagaggggagcacatctgagcagttggaggtgggatagagggagtgcagagaatgtaaatatcctgagcacggatgaagctgtcaaaaataaaaagtacttagacactgtctcaaatgataagacatcccataaacctgaagttatttgcaataagtgtgacaagttcaagtccctgatgtatgaagaggccaaacacatgataataagccaaaacacatgtcaataagcccaaacacatgataataaaccccctttgtgggcaagggtagaaggaggcaagtcacacagaggagagagccactggagtgtgcgccgagatcatgcatttcttaataagtaaagattgaaacaacaaagacacacattttacctttaccgttttccactatgtaattaattagagtctaaagtagcaatatttaatgcaggcatggagcttgagtttggattctcaccaaggctatttttattagtttacaactttttgaaagtaaattagtctaagttttatcagagacatgaaaaatggccatacattttgtctaataattagattcttgcgactgcacaggaagagaataatcctaactgtaagaagattatcttggtatttagtagtataatttaggaggcagaagctggaaatgagctattctg

SEQ ID NO: 981190 - DNA, 35433 bp, Mus musculus
cagaatagctcatttccagcttctgcctcctaaattatactactaaataccaagataatcttcttacagttaggattattctcttcctgtgcagtcgcaagaatctaattattagacaaaatgtatggccatttttcatgtctctgataaaacttagactaatttactttcaaaaagttgtaaactaataaaaatagccttggtgagaatccaaactcaagctccatgcctgcattaaatattgctactttagactctaattaattacatagtggaaaacggtaaaggtaaaatgtgtgtctttgttgtttcaatctttacttattaagaaatgcatgatctcggcgcacactccagtggctctctcctctgtgtgacttgcctccttctacccttgcccacaaagggggtttattatcatgtgtttgggcttattgacatgtgttttggcttattatcatgtgtttggcctcttcatacatcagggacttgaacttgtcacacttattgcaaataacttcaggtttatgggatgtcttatcatttgagacagtgtctaagtactttttatttttgacagcttcatccgtgctcaggatatttacattctctgcactccctctatcccacctccaactgctcagatgtgctcccctctcaagttcataaccttgtcttctataattaatctctgtctcactctcacatacagagagagacatagaaagagagatgcatgcacatagacagacagacggacagagagatgactctggaccatttagtgttatgtaagagaatctcttctaagtatcacctgtcaataaaaaagcctatggctgatgaactgaggcaggaggcaggacattggcaggaagacagaagattctgggaaatagtgagtatataaaaaagagattcaagagcaccaagaaaggacataaactagagggtacctgaatgcaggatagaataaagagactcagagctagacgctgagtgactcaaagaaagaagctgtcagggactgaaggagaggcaattaaccaaatggaagacatagaatagtttggatgggataaataaattatgagttagccagggaatgagccaaggtttatggcctaggcatttaataataaataattagtctcagagtcatcattccaggagcaggactgggggaaaacacttcacagagttttgcttgtgcacacatgtttagggctgaccactgggactggctagcctaggcagaagcgtgcccctggagacgacttgtttgccttctctcagcagccactgatgccaggagctcctcacctagggctggggccctgtgacattcccttatcctcatggtatgtcagttagtgtcatcattaagcaaatcttgtttggccagcttttaaaggcaataaagctacattttttattttgtagtcatacctatcttttcctttgggggtcgataatcagatatcgtgcacatcagatatttacggtatgagtcataacctcatcaaaattacagttatgaagtagcaacaaaaacgacactgtgcttaggggtcatcacaagaggaggaaatacagtaaaacattaggaaggtcaagaatcactggtctacagtctcttacacactttcttctctgatcactctcactttgtcccttggctggactggaactctctaagtagaccatgctggtctagaactcacagagatcctctgcctcctgaacgctgggagtaaaggtgtggactaccacacatagcaaactttttttggggggggggagacagaatctcatatagcccaggttggctcagattttgaactttctgtgtttgaggaccttcaacttcctccctcctgtctccatttcccaagtgccgagttcactggtgtttagtttatgagtgctgggacttgaacccagcacttcctgtgtgttaggcaagcactttgctaactgagctacatccccagccctattgcaaatgacttttctgaactgtttgcacattcggtcaggcccttctaagaaaagaactgtaataagtggagttcgtaagcttcccgtactgtagactctaattcagagcagtctattctaacttggctgcttgatcttaggtctggagtgaacccccctcgtcggctgtggttttgtacccaggtaaggctagctgtttatcgcactatcccacccatcaggtactttgctttctttcttttcagcaaatctctcgctggctccgcagccctggctaacctggaaatccagtgtaaatcagcgtcacccttcccatgcagcagctttaatggggccacatttaccctgactcctctccacttcagattcactttctctgtggtaaggaagctgtattttatttttaattcttatttttacattttatgcactgtataatttaaaacgttttgttggttattttaaagtaaagtaaccttaacattgactcagcctcgttcagctggtttaaacaagctccccctgcaagacactccctggattgtccttgtattctactacaaggaacctaagacctcagaacttgtccagttgaacgatggctaagacatttcctcatgtttcctgttaacagccagactctctgtcataagacaaactcagtgactcacttcccaaggcaagaatttttccacaagaccgtgaacattcaagcaaaaggtcctgtgaacaacctgtgccccaaatgtctcagagccagcaggaaaacggtcattgggattcttcctcttgtctacatgggctctgggtctgctccttgttaagctgtctaagagctgtggctttgaacacgttagcttctcttacacccagctttcagatagatcaacttggtcagtgatgttttataaagtgccatgaggattaaataaaataataccttttaggtacttcaataatattattgatattttttcattgtcatatgtcttgtacatatgagatgccgaataaatatttgctaaatgaatacatggcttctgtaagccagtgatgaaatggaaagtttcacagaggtttctaagatggtaattgaaggctaataaataaatgggaaatggcagttttttattttatcctgtgacagcctaataatagtgcctttgttgatccattaacaaatatttttgcatgactagacctcagaagacctcagactgatccctgggcacaggcacagaacagttcctggccctatgtcattggatgcaaataagaaacttagtctaagctcaaaagagtaactgtaaaaatctaggaactgtgtgtcaaaggactcttgaggagaaacgtggggagctttcagaaatcaaggggaactcccctatccttcctctcccttccctccctctcttccctccccctccctcctcctcccctatcctccctctcccccatctctcctcccctcatttatttctctgtagctaagcttctttttcctatactgcatagtagaagatggccacctatgagctttaagtctgcatagtgtgttctgatccacactcatggaagaatctggctgacccagtctgtctggagaggctatagcagaattctaccctgggtaatttaaaaggcatagaaaatcgtaattcataatggcacacaactgtaactcccattcttgggagacttaggagacctccaggtggaggccaatgtaggttctcgagcaaactgcttcaaaacattttttattagctcaaatttctggagagtggggaaatctaagattaagacaacagagctggagagatggctcagcagttaagagcactggctgctcttccagaggtcatgagttcaattcccagcaaccacatggtggctcacaaccatctataggggaatatgatgccctcttcaggcaggcggatgtatatgcaacagagcactcatacattaaataaataaagttaaaaaaaaaaaaaatgacagcagtgtgtggccaagccctccttgctgaagcgatcacatggcagcgaggcaaaagagaaaaaggcagactggcctcccagggtggacgtgttaatcctttcattagaacaggcaccagttaatggctttgcctcttaactacttttcacaatggcaactaaatctcaacaggagctggaagtgcacgttgaaaccagcgcggggcgtacttcaagtccccacttgaggccgttcaaaggcttttaggagaaggaaatcatggggcatcttaagggtaccggaaaagcagttctaggaggctgcccccaggaggttgaaggaaatatgacagcatctagcagttcctgcaggtgctcacacatcacagccatgaccctgaccacgaactgaaccacagtcatctgttttcctttaaggatttcataagtgcatatactttgtttcaatcaaatcaaccccctagtccattccgtctaactcctcccctatacccgccatcatttttgtctcccaacttcctatgctgtactaaataaaacccattgcgacctcttagtgcgtccttagtgcgtcacgcaacatgtgcttgcgtgttggatcgtctgctgaagcatggttagtctctcaggggcaacgccttcgaagaaaacggatcccaatggcccatcagctatccgatgccagcaatgtctcagctaccggtagagcttcatgcgtgtctgcccaaccattgtagagaaataaacctttcacagcaaacaccgaaagcgcctgaaaagtgaacaggtaggcagccaggactgaagccggaagctgaagaaatagcccagctgagcgttctgggtgtgtttgtcttttccagcttctcgacttaggccaaaggcagatcagactcggaagcagcgtattccagaccatcaagcaagctccagaaatcacctttgcgaaccaacaggcccggaaaagtagcctctgcaccaggaatgccaatagaaacggctgcctttcttgccactctttcctgcctgcaagctcctgatgctgcaggcactcttccaccgctcccaaagaaagcttgccctgggaccagagagagtcagagggagggtgatggctttcaaaccgttcaagacaacctaaggcttctttgtcgtctctctaagaactttactccaaaccaaccatagttacacaaaacagcaccagacctcagaagaatcaggaaagggagggtcctgggagctgaagaatgccaggaagtgaccaggaagcttgctggaaacgggttcttttcactctgtagaggtccctacataattcctagacttagttccaggctgcacaaatgcagaatagatccaaggtcgcagactcagctaccaagtcccagagtaaatgccacgcaggaaacacagaacacagaaggtagtaactacccggtctcaaagcaggaattcacaaaggatccacacccatggaggatgagacactgtgtgtaatctgagcctaagccagttaactctgctcacacaaatatgcacatttacttgaggattttaagagaagccagggtcttgcttcacaatacccaaatgtgctagttccaacacaaaatcccaagccaccatggcagatgaaggccaacctgggagacacaaggagacctccctgtaaagaaacaaaacatcatctaatccactaagaacctgagaaatcgtcccaatattcaggagagagaggggggatggggggtggggggggtaggacgaagggatggagggacagagtttggtttcttgttgctgtgataaagaccatgatccaaaagcaagtaggggaggaaagggcttatttcagctcgccagcccgtcttgatcagagttgctaggggagggcagtctgggaaggaactgaagcagagatcgtggaggcatgctgtttaccaggtcacctgcccccaaatgcttcagtttctctccatttaggatgatattggctgtggacatgctgtaaattctctttattgtgttgagctttgcccttttatgcctaatctttccaggatttttacaatgaagaagtattagattttgtctaaggcttgcctgcctgcctgccttccttccttccttccttccttccttccttccttccttccttcctttctttctttctctcaactaatgagatgatcatgggaatttttctctttcaatccttttatgtaatggattgtatttatttatttatttatttatttacatatattgaaccatccctgcatctctggcacgaaaccagtttatcatggttgatttttttttaatgtgttctagaattcagtttgcaaatattttattgagaatttttacatctgttcataagggatattggactataatttcttgtcaagtctgtgcggttttggtaccatggtaatggcttcatcaaaagaatttagagctgatcttcagtttatattttgtgggataattttagtattggtattcgttctttagaggtctggtagaattcaggactctgtgtcgttttttgttacctgttgtaatgtcttccttttcagctctaactttgtcagtttggattttctctatttttattttttatttttattttttgttagttagactaaaagtttgccaaacttgttgctttctcaaacaaagccaaaccaaagcttcttccttggttcttagtagcttttgtctgtgtttgttgacttccaccctccgcttacttctttcttcctgtctactctttttggagaattatttcttcttgtttttctagagctctcaggtgtgtcatttagttattaataatgtatgtctccaaatgtttttgatgtcgacactaagtgctataaacgtgtctcttagagttgttttcattgtgtcacatagctttatatatgttgtattttaattttcatagtgtaccagatttcctgggtgttttgtgcctggatgatgatgatgatggtggtgatggtgatggtggtgatggtgatggtggtgatgatggtgatggtggtgatgatggtgatggtggtgatggtgatgatgatgatttaatttttttctgactgatctatttctcctactttatctctaaaacctgaagttttctcttccacatcttttaatctgttgatgaagcttacctctgagtttttcattttgacttttatttcagtacggtttttctttagggataccatttctctgctaaattctactttcctgttttgaattatttttctcatttcactcaatggttgtgcgctcacggtcttcattcggggatttattcatatccttttttttttagatttatttatttattattatatgtaagtacactgtagctgtcttcagacacaccagaagagggagtcagatcttgttacggatggttgtgagccaccatgtggttgctgggatttgaactctggacctttggaagagcagtcgggtgctcttacccactgagccatctcaccagcccttcatatcctttttaagtccttgaacatactcctaattgctgttttgaaaccattgtcttgtggttcagctaaattggttttctcagggtttatcacagtagagctgctggcctcagggggaagcatgatgtcttgattgttcttttttttttttttttttttggttttgcactgttaagtgagcatctggaattacgacatttgtggtattttttactgccgctatctggccttactttgggggggggggggggggctggtggctcttcagctgctcttgccccaaactgacaggttgtgggccagaatgatgcttggttacagtctctggccactctggattttaggcttcaaactgtcactagtcccaggcctggaactctgtttggagctctgggttcagcaccaagcaaccccagatgagtgcagtgggttgggcagtggccagcaggtggaggaaggaaactgtgcagttgtcctaaggaggacctggggtctgctccatgatcgatggtggaggcagaactaggaatacctggctctgggcaagcatggcagctgaacgggatgaccgcgagctaggaggagggactaaggcagacaggctcaggcaagacaaggatggaggaggagaaggagcacacaagatgcctgcctgggtcagaacccaggtatttctgtggggttttgggggttttttgcgaccttatctgaggttgggcattctgctacttgcaacatagttacaatacagctaaatcctctctcactcccaaacgcttctctggaaacaaaaacagaagtcgcgcacagcatgtagttttactgtaacgttggaatggatcttcatttgcagaaagtaatgaccagcaagagctttaaaagacaaagcctccgctatctttaccactgggaatcatccagaaccgaaatttgaaaacagcaacctttgcatagatgtcggggtttctaagcctttaaagagtcccctaagcagttctctcctgaaggaacgtttatcactgtggggcacttgtagctctatttcataatttatacaaaagacgtttattaaaggatgtaaactaaatcatttgaaagcatcattttgggcttttatccattatttatttattcactttgcatctcaaccgtcccccccccagtcccccttaaacagcccctccctcaagtcccctcactttcaagaatcattttgcctttcaatttccaatcacctcttggctttcaagatcagggttttgttttgttttgttttatgtatgtgagtacactgccgttgtcttcagacacaccagaagagggtgtcagatctcattacagatgtttgtgagccaccatgtggttgctgggaattgaactcaggacttctggaagagcaaagggtactcttaacactgagccatctctccagcccctgaaggtcagtttaaaaatatccaaatgtagggctcagtggtgtggaggctctaggtttaattccaagtaccatcattgcatcagtcatatgcccactgctcacagaaggaacaacaaaccataggactatggggaagccagggaggcctcctcatcaccttagtacacactgagagtcaggtagtgtgtgtcaaggtgatccttcaaaggatcccactgcaaaaaaaaaaaaaaaaaaaaaaaaaaaaaaaaaaaaaaaccagcaacaacaaacaaacaaagccgggtgtggtggcacatgcctttaatcccagcaactcaggaggcagaggcaggtggatttctgagtttgaggccagcctggtctacaaagtgagttccaggacagccagggctatatagagaaaccctgtctcaaaaaaccaaaaacaaaaacaaaaacaaaaaacaaaggctcccaactgatcaaggtcttgggccaaatgtatttaaccagcttctatggtatggtattttaagatttgtttattttatgtgtatgtgtgtgtgccttgggtatatttatgagcaccatgtgcatacagaaaccagaaaggagcatcagattccctggaactaaagttacaggtagctgtgagctgtccagtgtgggtgctggcaacagaacccaggtcctctctaaagacagcaagtgctcttttttttttttaaagatttatttattattatatgtaagtacactgtagctatcttcagacacaccagaagagggcatcagatctcgttacagatgattacagatggttctgagttaccatgtggttgctggaatttgaactcaggacctctggaagagcagtcagtgctcttaactactgagccatctctccagccccagcaaatgctcttaaacacaaattcctctccccagcctgtctactgtaattcttgggaaataagaatcaattctggatcatccaccctccttctgcttgtcagttctcgaagaaagaatgaggtcagttcagccctgctttgtggtttagactgaaattacttttttgagggataatacagagctggcactgtagaaagcacagtcatccttcacctctctgggaagggtgaagctgaccattaggatgggggttgggtgcttaaaccacagggtttctaaatgtcctaatagttcgttagataagaatgagtgttgaagagaaactgaagcaaacaatgaatacaaatggatttcaggagactcctgtttttgaagtacttgtcaaagatcttcagggaggattcagaggggaaggaagctcagcctgaacaggcaatttagcccctaatgtaaggggaacacgtcgcagacacagagtttcatcagtggaaaaaacactgatgaagacagcaagttaaattaaacctagagcctccacaccactgagccccacatttggatattttaaaactctctctcttctctctctctctctctctctctctctctctctctcactctctaagcttttatctctccctctttaagctttcttactctagcctttctcctctctctccttttccccattctctcctcttggccatggctggtctctctccctctttctaccttctctctttccccctgtctttctacaataaagcttttaaaaagagggagttgaagtgaggtcatgtggggcaatgggctatgcacagacagcttggtctctagttgagttaagaggtggaaccccagtacatgggacggaagctgtcctctcatgactcctggacccctggctcctgttgaagttactgcccccacagtcccccaccggagaggctggtggctagctagacatacaaaatgtcccaagcttctgaccttcaggctagactcctcccagttacctagcaacagcaagataacaagcctactataggaggggctgcttagctctctctccctctctctctctctctcacactctctctctctctctctctctctctctctctctctaagcttttacctctccctctttaagctttcttactctagcctttctcctctctctccttttccccattctctcctcttggccatggctggtctctctctctctttctaccttctctctttccccctggctttctacaataaagctctaaaaccatagactgtctctgttcatctagtcccgctgtgcttggacaatgggataggctttttcctaacgagctgcttctaaccttccaatagaaggccttcctgtgctccagccatggaccagacttagaactctctcctgtgtgggaacatctctccctctgctctcttcccatatcttcggggctgagagtgttgccctagagctcctattctgttctcagctcctctcctgtatacagagtgggatgccagagattaagaacctggtaccgggggctgccccttgtccaccccccaaccgtgtggggtcagtggcttcacacagccagatgcccacccagggctgtgtggaaagtgtccggcagtcctcccacatccgcctgcccagagcacaggaactctggctggacgcgggctctctccctctcccctcttcccctacacccacaaccctgcaaggtcacatcagaacatcacctacccaagtggccttgaaggacagggaaccacctccatgtgaaggtaggtaggatttcctgagctggaaggaagattgtgagcaaaggcaaggaaaggaaaatgtgcgaagtgaagagggagccaatgaatatcagaataggacctagacataggaccaccatctctgagagagctctacaggggagaagtcttaatggatgtaaactgagacccacaaatgaggtgggaatgagatctctgccaacactctaaatgaacacgtgctttcgaaaaatggtgccatccaatgagaacagactgtaccctgccctccaatttatccctaccactttaatacttatgggtctttagacattcatacactcagcctgtgagaagagtaatcactgtatttcatatttacattatagggtttatgtgaacaatatttgtgtacagtgagcagaaaaatagcatggtctacttccagacagtcatgcgaatattgtgaagcccccataccaaatgtgattttcattctgttattgctaccatgtaagagtcgtggagaccagggagtgcctttttttctggactaggaacacaaattattttttataaagtcgtttaatgaacaagtgagtacacgtgtggataatactcaggactctcaaactaagcaataaaatcaatctctcaaactaagctgaaagtgtgtcgactgttccatgattctcctggtgtatgggctatgggtagttgcagtcagttggtatcatggtagagaagaaagccagtaaatgtagagtcgttgacgttatctgcatagagtccattgtggtccccatccccatacacctggagccagacttggtctcccacctccagatggaggagcacagagccagaggcctggtccacattcttttcctgatactggtcgtaggtgaagagaacggccttgtccttcttgaagaggctcaccttcacatctttcatgtacaccgtgatgtggtaagagaagtagtagagtcccggaatgttgcagtagaacttgccagtgctgccgtcataatgattctgttggttgtagaagatcttagtaaagcgaatgggtacattgggaacagtgacgcgggtctccagccccacactgaacgctgagcgatacacataagcggcttctccaggctctcctttcctgccaggggttccggggaagccccgtggcccttcagctcctgtcattccaacatctcctgtctcacccttaggaccaagaagacctagaaagtgagaagaattctgtgaatggcgggaacagaactgcccagactgtttccagcaagaggcattatctccggaacctctacccacaatccatttcacaggacaaggaaagacatcatctccgtcatctctgcttcctcactctccacggcctggcaggctcctataagttcatctccagccttagttttcaaagcctttatgggtgaattaaaagatgaatgagcagactgatgatggatatttagaactctcgagctagatactacatccttgttcgttgttctctggttgacatgtgaacgatttgctctggtagaagctcagatttgttagaggtcagttgggtcagtagatgttctgaatatgatttatccacttattcattcatctattcattccttcatcccatgcctttccatatgccccaaagcacagcagatttccagaaagtaatctcctgtaagtagccatatagtcaccctaccctgccagctgtttgtgcactgaccaaccactgtgttgccttctatcccctgtgtccagatgtcctcccccctctaccctctggaaaccatccttttgaggcgtggctcaagccctacctcctcagattagcctatttgttaatctgcatcctcactgagtacaccctatctgtatcccatgccttcagcatctgcacacattcagatgagcatgttgcatgttggaagacatcttctcttagtaaccattacccagagtcttgtctgttgtaaaaattatttaaattccagcccagggtttctaccccacctttgattactaagttctcagatgagagacacacttactgccttcatatttacaacaagctttaaacagcacaagagctgggcagatacctaccctctgtgctattatcaactttcctattgataaccccaagttattactatgttgcatctgagctgctcttggcttcagttgggcagccttcagggccatgctctcaactcttaccccatggccacttccttgctgctccttcacattcttcttcttcacctcctctgaacccaagcacgagaaacctaaactctacctgtgtcgtttctgcccagctattgaccattggcatctttatttaccaatcagaaataacttgggagcagggtcactcggagtcttacatgcagactctctcacttctggggcacagtcttgaggggtcccaaattagcattagaatataagcaacattagggcaattcattacactcttcttcttgactaaatcatggtactgagtgctttagaaatgcgtgaaaagcgcttatgattgccaatagatagaacaagaattacggagaaaacaaaaataggattatgttggtagtatggaaggggtagacagagagaaagagatgcagatggagtgaagtcatggatacctcagcaggtaccatctagtcccactcaaggaggacagtgcaagctccaagatgagtatgaaccataaaacaataaataaataaaaaaggtttagcctctttcttgtgtctgtgtctaggccttaattaatcactggactcaccctgcaaagaccccccccccaaattcaggactcttctacatacctgcatctcctttctctcccttctctccaggagtgccatctctgccatcacggcctggtgtgccattgtggccaggatgtcctgggatgcctgccatccaacctgcacaagttcccttgggtggagggaccaaagcaggagctagctcttcagttgtagtaacgtcatcttcggcatgactgggcaggattaagaggaacaggagagcttgcaacagtagcatcctgagccctgaaattgacaggtgaatagtcatgggaaaggcagactcacatggcacatccaatcaggacctgcatcatgtcctatatagctaagtggaatccactccaaagatctgcatctacatactcgcctctcccagagagccttcagtggctacccagccctcactctcccaggaggtcttcatcagtgtcttagttggggttttactgctgtgaacagacaccacgaccaaggcaactcttttttttttcttttaaactttatgtccttatttatttattatatgtaagtacactgtagtgtcttcagatgcaccagaagaggacgtcagatctcattatgaatggttgtgagccaccatgtggttgctgggattttaattcaggacctttgtaagagtagtcagtgttcttaaccatctctgagctaagccatctctccaatccccaaggcaactcttataaggacactttttaattggggctggcttacaggttcagaggttcagtccattatcatcaagatgggaacatggcagcatccaggaaggtatggtgcaggaggagctgagagttctacatcttcttctaaaggctgctagtggaagactggcttccaagcaggtaggacttgggtcttaaagcccacacccacagcgacaaccctactccaacaaggccacacctcctaatagtgccatttcctgggccaccacgcatatacaaaccatcacactcagacatcctcctctgaaatctgcaatgagtagcaaaatctcctgcaatcagtctcctttcagcctgagaattgtaaatccacaggtggcagggatggcctgattccagtctccccctcctgagtgcaggaccacacacgcagaatatcccaggatccggtcctgggttcctctgcttgttccactcaaatctaaccacctccccactcccaagctcgccttttctccctcgttttcatatacacatgtgcgcacttgtgagcacttgtgtgcatgcattaacacacacacacacatacacacacacacacacacacacacacacctacacagaaactctttggagactacaggggaaaagcaactctaattccaaagaatctgtttattctttaaaatggcaaaaatcacttttcacctaaagatcttctcctgtgtttcagccttgtcattttctagcttttatgatcattttaaatatatgcattgccagtccatagagtggatacggccaaaatatctgtagttcttttaaacttggtttctattttttagcttatgtctacttcaaaatattttataatctgcaacaaatgatatgtattgatttaaaaagaatcaatcaatcaaagctgttttcaggcaggcagcttttctaaaaaacttatctttctattatgatatattcccagatataaatgattgggcccagaaatctaaactttttgtcctcttgggtttttgaggcaaggtttctctgttgtaaccttgactgctctggaacttgctctgcagtccaggctgacctagaactcagagatccacttgcctctgtctcccaagtggaggaattaaaggcatatgccactatgccctgattaacctttttgtaaaaaaaagacattttgtttttaatttatgtgtgtgtgaatgattctgtgtgtgcgattgtgagaagagagagagagagaaagtgtgtgtgtgtgtgtgtgtgtgtgtgtgtgtgtgtgtgtgtgtgtgtgtgtgtgagcccaaggaggccccgaagaggatttcctggaactggagttatggatcgttgtgaggcaccatgtgggtactaggacccaaacctgagtcctctggaaaagcaagtgcaaggtcttaattgtgagctgtttctccagcccacctaaacgtttttaagtcttttaaaaagatttaattttattttcattcgagtgtgtgtgtgtgtgtgtgtgtgtgtgtgtgtgtgtgtgtgatctgtgtacaggagtgaagcaccagtcagttgtgagctgcccactttcagtgctgggaaccgaactcagatcctctggaagagtaacatgctctctaaactgctgagctgtctctctctcagcctctctttaaagtcatttaacatacataccaacattacaagaaacgatgctgccacccaagagaacatgagtgtatgcacacaaagacctatctcgggctgagggtgtcactctgtagcagggcactgccctcgcataatcaaggacctggattccttcctcagcacagcaaagaaaaaaataagcaggcctagctgaattactcttgccagctttgggtagtctcagttttaaaaagtgtactactagccaagcaggatgacacaagcctttaatcccagcacttgggaggcagaggcaagtgtatctttgtgagtttgaaaccagcctggtctgcatagtgacttccaggacagtcagagtgatatggattttctgtctcaaaaaccaaaaaccaaaacaaaagcaaaagaaaacatctgttttaactgttaaatttagtgagcaaaataaatgatcttcattcttcagtcatttctaagatcctcgttaagttcctgtcagttaatttactggggtcacaaagtgtttcttctgcactgttgtgccttggatatgttttgatttggggtcttttgggggagcactattttgagaatgagtttcatggaacccagtcaagcctcaaagactccatcactggatttaagatgaccttgaagtcatgatggcctcattgccacctctcaagtgttgggattacaaaacaagcaccactacatagacttttctttttaagctttacccttttttaatatagagcctttgtctatggcccaaattggcctcaccctcagggtactcctcgtgcgttggcctccctgatgtgggattacgtgggtgtaccagcgggcccagttcctgtaacgtttggctggttttatgtggaggttattgttctctgcacccacagtgctgagactcaaacccagggcctctctactcatctcttcgaggcaactgctctgccaccgagctacatcccgtcccttattaacatctctgcaggcgattgtgtgagcgtgtgtcaccattttgtcttcttacgtcacactgctgtgacttgccctctaggtgcagatcatccttctgtctgtctgtcctcattcccaggtgtacagggagtctgtcctttatttgcttagttctgttgacattttccttgattccaagcaataaacagctcttattcttggaaggatttggtattaccctggtttgtattttcactctctctatataatatcactctttgctgtacctgtgactttcttttaatggtgctataaactgtggcataagatcattttaaatgcctttgattaaattcagccttgcactccctgttgccttggagcatcattctttaaatacccaattctagtttgaccgtacacaaattggaactggcaggtgtggggaggagtgagccagaaacaactgccctagcattgctcttggagagcaggagtctgccctagattggctcataatgtctctgagtgcctctgtcgccatctactgaatctggagtgatcaaaaacccagtctcagaaactgctacaaagaaaatgaagcagagcttgccctggaactttcttatcacagtcagtcagtcagtcagtcagtcagtcagtctattggttggttggttggttggttggttggttaatgtgtgtgtgtgtgtgtgtgtgtgtgtgtgtgtgtgtgtgtgtgtgtgtgtgtgtgtatggtgtggtgtgtgtgtgtgtgtgtgtggtgtgtagtggtgtggtgtgtggtgtgtagtggtgtggtgtgtgtgtgtgtgtgtgtgtgtgtgtgtgtgtacccacagaagttagagaacacctgtggaagtcagttctctccttctaccaactgtgtcctggggaatgaactcaggccattaggttcagcatctttactcactgagtcatcttgcccgccattgctctgagacttttaatattgtgtgtcttatgtcaactctgcccttcttacagctccagcaatcatattcctgaaaacttcaactcaagaatctaagaagcaccaatcttttccatggggaaataagaaagacaccaaaatgcttgaaatggaggcaggtaaggagggccccaaagacaaagggtagctcaaaacagatccctaatgctggggaggaaggaagagacagaactctagagttttcagttctctctctctactgaaaaaccaataatctttctcatctaaaaacacattcttcccccacgcctccatgtccttaatgcttttctctacttacaggtatggttgttctgggattccccgagtgccatgggactgaagtactaagcgctgcacacccttagctgttctttttaaagatttatttttattttttaattatttgaatattcatgggggtatacacctatgtacaggtacccacggagggcagaaggcattggatcccctggaactaagttaaagacagttgtgaaccaggttctttgtgaaatttcctctgcagatactgttagctgctgagctctctctccagcccctaagcctttggctgataaggacagatctcactgaaggcttctctttcaccgagttctggatgtaaagtcaggtctggatacccatgaaggacaacacagaatgcctcttttttaaaaaaaaaaatattccacattgtttctgttctttatgtagacaaagcaaatgttgcactctgactttgaaagacttctgtttctataaggaaacactactgaatggaaccaagtgcaagagatgaatctacagctagagcatgttacaaaagaaacattgtagataggtgttggaggtagacagcaaggatccagtataatgctttgcatttggaaagcctttgttccaccatctcattgaataaccacagccgttttggagacaatactgggggggggggttactcaaaaagatgcatgctcgggtacaaacaatcagttttgccctttatgtgtttgttggaagactaagcgacagactccatgaaccatgcctaggggggtgtctggagtaagccagtgagcaatggctgtcacttaggactgctctgacttaggggtgaggaactggggctgctgggtgcttgagtgataatctagatccaacagaacccgtggaagtagagtcctggctagataacctctggcacagacggggaagagaaacatactaccgtcacataccctgccttttagtacccttccccatggggaaagggtgagagaccagagactgtcaatccaatggcctagcttgccagccccctcctcattctgcccctatttgcctccctggctttatgctctttgcctagaaatgtgatttcacaataatatcataagacccagttggcagaaagtgcggagtagtttacaaacttacaaaataccgtacacgtttgtgagagaaggaaagtaaacaaatattaacgtatcaacccactgtggacagctgctgagtttcacttcactcacacagccttaaggggaagaccgacagctgagacatctgggagagggaaaggtttggtcatttctgccaaaataagaagcaaccaggtaggaccaggcgtggtggtgcacacctttaatcccagcacttggaaggcagaggcaggctgatcgatgtgactttgaggccagcctggtcgatagagagagctctgctatttgttatacagagaaaccctgtctcaaaatgtttaaaaaatgaacatgtcatccaatgacccactggccttcctagcaaaccacacatgagttatgcagagggatggctgcatgtttcaggaccactgtatagtgaaggggatgtgaaattcctctttgacctgctggcattttagcaccaacatccagaatcttgtgaaattcaagactggagtttcctctgggactggcagagattaggctacaaggagagagagaagaggtcaacgcccccagccagtaaagacaacaaaacacagagaaatgccagagccaaaagcaactccaggacctcccatccttgcttgtagaaacagaaagactgagtgcatttcctacatcctcatggaagcgctctgtgtgctggacacctggcctgttggttgttttcaccttcactcatgaagtggtacccgagggtagagctcagtggaggggcatttgcccaatgtgtatgaagccctaagctcaaacctcagaagcacacaataaacaagcaaaaccagataaaaattaagttaatatttgtaatttcacaatggcacaacccaatcataaatggctgtgccaggagctcaggcacctctgtctagctcctaagattatctggaaggtgtcactcagcctttggaaagtcggtagcattctcatgtccggtatatatgtgtgcacacacttgtacactctcaagaaaccagcaaagcagagcatccctccatgaagcttgtagggcgagctcctgattgaagcctttgctttccaaaagatagcacctcctgactttagcagagcacatggggactaccggtcctctgagttgacaagcagctggaatgtttatctctgtaacctccttggaaaatgacaaaaatgagggctaaggagaacgcacttcctgggcaaggatgacagcctgaattcaacccctggatctcccataaaaagcaagatgcggtggcgatcacagtctcctgaggctgacggtgggtggacgagcagaagaaacaagagaggaggaaagggacgactcccaaaagttaccctctcacctccatgtgcctgccatagaatgagcgtgtctgcacacattagactcttgtgtgtgcttgcacattctctctcaagaaagcactaatacacacacacacacacacacacacacacacacacacacacacgcatgcacgcaagcacgcacgcacttgcacaaataaaattttaagtgcttgggagatggctgtgttgattagtgctttctgcagatgcatgaggacctgaatttagatccctagaattcatgtcaaaagctgtcacctttaaccctgacactggggtaggggatgacagagacaagaatatccctagagatcaatgacctcagtctggccttcttcgtcacgctccaggttctgagagaccttgtctcaaaaaaataaggcagagattaagaaagacacctcatatggagagacccctctggcttccacatacacatgcacacaggatcacacacacaaggctagaagcaagccctgtgccttgtaagattcctcgaaacacagggagagaggcatcaaggatttctcactaagccttgggaaccaaactgctccaagaaccaagatgcactctcacgcccctctggcctgctccacctgccctcttgtccacagaatgactctgatcaaattctctgccatccttttgaatgacatcacagggggagtgaggtggctcctcttgtgaggcttgattcagaacccattctcagcatgcacttgctccctgcacttgggagccagggaggcaggtggatccctgtgagttcagtgatggcctggtctttataaattccaagccagtcaggaatatatagtgacacccagtctcaaaaacaaaatttcttcagacgagggacttacgtatcatgacacacaagaggctgccttgacttccaaacccctccctccttcatctcctctacctccatggttccgatgctgtgttcatggagcaagaattaggtttaacaacgacaaagcaggtgcagtgcctctgtcagaaaatatctttcaaaatgaggctttctgtccagattgccactattttccaggttctcaccactttgtgtcacccaatcccctaaaatgtctctatgcagacagatgtccccaactcctccgagcacacccatgttttcactcacagccctgacaaagtgttctacagcgcatgctccgtgcatatctgctcagtagaactaagtgatagagacagatcctacagtctgacctcaactggacttcctcgggctgccctctctgcctgcttctcctgtcactgtaactcttaaagccgagaagcaacagatcccactttccaacagagtctcatctgtggatcgaccctcctacctcactatctccaggttctttttgcagtgggcatcctgccatcaaatgaacagggcaaacttccggttaggctcaagcttgtggaccgaaaggttattgtttctttcttagagctttgaagagttaaagaaaagccccaaagcttatctgccccaaccatgtttccaaggcctgagttttctcaacatctaccttcacactgctgcagagagcaaaatctgaacacagcccaagtgggattctgcattcatacccagccagccgagaatatagaattgttcttaccttttggtgtcgtcagatccactgacaatcgtacagacagaaatgaggagaaagtggccaggtctcattagtctggtactcatggggacaggcagaccccagcttaccattggccaacccagtcaaggccaatagccaatgagtgggccccttgctcctggcagctgccttaagactccttagggaacctggtttaatccagcttgggtctgggaagccaagtagagcttctgtcaagccatcctgtttccaggctttggccattctctaccagagcaagagatggggcaagggtaaggacaataattcagcatgtttctgagtgcaatgaaaattatcctcaagtaaaatgattgttcaggggtcaggagacctccctttcccataagtttgtcctggagagtcaacaacactaattgtcacatgatactcccactctttctttgtaactaaatgtgaagctgtgtggttcaggcattactatttcagtaagaatgaagaggggctgtactagaataaaaaatagatggactgcaggcatggctcagtggttaagagcactggctattcttccagaggtcctgagttcaattcccagcacccacagtaattccatgggatccgctgccttcttttggtgtgcaaatatgcatgcagccaaaatacccatatacataaacaaatctttaagcaatagaaggtgtgctccacttgctagaccggatcccatactgagaaaagaccatgtagatgaattctgagggctgttgtacaggaaggttcctggtggggtgtgaagcaagttcaggggtccaaattctaaaatctgtggtccctacataattcaagcccagtgtcacagaacacttaccttgacattggagaaccatgttctaagatttttctgggtaagtttcaagctagttttttagaaactcattttctgtgagtagataaacctcagtttccagactccttaagtatataccttttctatctattattagctctgggctaacagccaactgcaactagcagtcaccactcactaaactgctcctaaaaggcttgcagttggcaaggcaataccttgggagcctctcggcggactcacatcttatttttgaaagaccagagctgattctcgggagcacaaagcttttgaattaaatcgtgaatccaaaaagaactctggatgccagcagctgctccaataagacactcagagctagactgctcccaggcaaaggctggccaagcatctgcttcctccaactgccaccttccactggccacacagagcctaagagtcatgcttttactagtggataggaccagcagtgtcaacccaccaaggaaggagagccaaaatatgatcttccatcttgtcttcctgttaatgcactgatgtttctagagaaatcacgttaggtcatgaagattaaggacacaagctcatttccaagggctgttagttgtgaccccatggccctggacacttcccaagcaaactgtatgaagcaaaggagagagaagaactacagcaactcaaagctgtatcactctctatctttcccttagcgttttgcttactttgtgtgtgtgtgttgttgttgttgctgttgttgcattttcttacttattttgtatgtgtgttactgtctttcgcttcttactggaatgcaaacacgctggagcaggggctttacctacttgaggttatgctccataacccctagactaagtagtatcttgtacaaagtaagtaacaagcaatgttgagtcaaggggtagtcgagtcttcccatacagatacctgtggttgtctcccacttaatgaagaagccagaagccagtaagagggagagacacagacccaaggcacgaagctagatctctctgaccacaaagggcatacgctccccaatgcctcgtggtcttcacctctgctcagttatagcctccgggttagctctggacccctgtcccatataggaacactgctggtttcagcagattctaactattgcacaagacagagtgactttcaccccaaaaccacatcaatactttgctgggtctggtagacacccgggagcattgtgaaagcctatcatttggtgaactctcaggggaatccgccactcaccacagagggcattgtgtaaaaacacacacttgcttagcgactagaagtgaaaaacattcaaccacacatgtcttgaggctaggcggtttggttttttgctgggtggtttttttttttgctttgtttttggctttgttttattttgatttttttcttttcttttcctgtttttttttttcttttttggtttttggtgttttgttttgttttgttttgttttgttttgttttgttttgtttttcaagacagtgttttttcagtgtagcccaagctatcctggaacttgctctatagatcagactggcctcaaactctcacctctgcctcccaagtgctgagattgacgttcagcaaggctgggtttacctggacagatgtgttactgcccagagtgaagcagccacagaaacgtggtcctttccttcaggagctcatgttcacatctcaattctcgcctacatgcgaagtgagatacttaaacaaaaggccagatttccccacaggcctgagtttcctcagtgtttcctgaatgtggttaaatttcactgtatattattgtttagtcatgactttaaaaagacaatttactgaaacaactaaacctcaaatcaaattttgagacataacactaactgcagaagagtgagcctgtcctgcagtactccaaatttttgggcattcaagaaaggaaaaatgtctttaatttagaagtgtaactcagtggtagagtgatttacattgacacctgacctctatccctgatgcctgaaatataaagaaaagaaaagctgtgttatccacagctattcttcacttcctttttttttttttttttttttttttggtttttcgagacagggtttctctgtgtagccctggctgtcctgaaactcactctgtagaccaggctggcctcgaactcagaaatccgcctgcctctgcctcccgagtgctgggattaaaggcgtgcgccaccacgtccggcttttttttggttttttgagacagggtttctctgtgtagccttggctgtcctggaactcactctgtagacaaggctggcctcaaactcagaaatccacctgcctctgcctcccaagtgctgggattaaaggcatctgccaccactgcccagctattttttcattttctgagaacactccagactgacttccactgagattggactagttatcattcccaccagcagtgaatcaagtgcatcccatctgtctacatccttgacagaatgtattgttgtttattttcttatgaaaatgttatttgttttcttatgacattctgactgggtaaaatgggatcacaatgaggtgttgacttgcttttctccgaaggccagtgtatcagataagtcatttggggagagaacatcagttggggaaatgctcccaccagactgccctgtgggcaagcctatgggacgttttcttgcttgatgattgaggaggtaaggtccagcccattgtggtgctgttaccatagacaggtgctcatagatgatataagagagcaggctaagggctggagagatggctcagcagttaagagcactgactgctcttccagaggtcctgagttcaaatcccagcaaccacatggtggctcacaaccatctgtaatgggatcctatgccctcttctggtgtgtttgaagacagctacaatgtacttagatctaataataaataaatctttagactggagcaactggagccaactagagcaagcagaggccctgaattctaattcccagaaaccacatgatggctcacaaccatcagtatagctacagtgtactcatttcatgtattttatatacataaaataaatgaaataaaataaatctttaaaaacaaaacaaaacagagagccctgcataactgtgtggagtgtttcttcccctatatcctagatgtcacaagagatacaaatacactcttttgtctgagtcgtctcatcgttgggtctgtattatagcagattactaatgcacatggcatatgactatgtacaaaggaaagaatgttgcattcaaaatgttagataaatagtagggaccttcagggaaatgcaaatcaaaacaaccctgagattccacctcacaccagtcagaatggctaagatcaaaaattcaggtgacagcagatgctggcgaggatgtggagaaagaggaatactcctccattgttggtgggattgcaagcttgtacaaccactctggaaatcagtctggcggttcctcagaaaattggacatagtactaccggaggatcccacaatacctctcctgggcatatatccagaagatgtcccaaccagtaagaaggacacatgctccactatgttcatagcagccttatttataatagccagaagctggaaagaacccagatgcccctcaacagaggaatggatacagaaatgtggtacatttacacaatggagtactactcagctattaaaaagaatgaatttatgaaattcctaggcaaatggatagacctggagggcatcatcctgagtgaggtaacccaatcacaaaggaactcacacaatatgtactcactgataagtggatattagcccagacatttagaatacccaagatataagatacaatttgctaaacgcatgaaactcaagaagaacaaagaccaaagtgtggacactttgccccttcttagaaatgggaacaaaacacccatggaaggagttacagagacaaaatttggagctgtgacaaaaggatagaccatctagtgattgccatatccagggatccatcccataatcagcttccaaacgctgacaccattgcatacactagcaagattttgctgaaaggacccagatatagctctctcttgtgagactatgccggtgcctggcaaacacagaagtggatgctcacagttagctattggatggatcacagggcccccaatggaggagctagagaaagtacccaaggagctaaagggatctgcaaccctataggtggaacaacaatatgaactaaccagtaacccggagctcttgactctagctgcatatgtatcaaaagatggcctagtcggctatcactggaaagagaggccctttggacttgcaaactttatatgccccagtacaggggaatgccagggccaaaaagggggagtgggtgggtaggggagtgggggggtgggtatggggggacttttgggatagcattggaaatgtaaatgaggaaaatacctaataaaaatttttttaaaaaaatagggacctttttaaggtagaagggttctggtagactcaacgcttgagctcttgccttctatcaaagttcatagttctgggaaagcccctagatgcgctaaccttgctttttggctcctttagttctgcttctggctaactgttcttagtaacagaggggtgttagcccaggatatggttttctgcttgaaaactcaccctgaaaaaggctcagcattgaactaggtcagaaacacccagcaaagctggtcaccggacagcttcctattgccttgaacccatgtctgagcagtcttctccagtggatatcacccgacagaacaattctcccaaacgttttaagagactttcatcctattttttgccttaacaaatggagaaatggcaatagttttactcacaatcatcttgtcatcttacttacaaactgctttaaaaaaaaatgtatttatttattatatgtaaatacactgtagctgtcttcagacacactccagaagagggcatcagatctcattacagatggttgtgagccttcatgtggttgctgggatttgaactcagaacctttggaagagcagtcagtgctcttaaccactgagccatctctccaggcctcgcaaactgctttagcaatgtaccacaacagcagttcagcagacaactgttgtctgaatagctatcatgctcaagaccctgaagaggcaggcacagtgtctaatggaccagagcacttggtgaagcacctggggacatctagccatggccagtgctggggaggctcctctgtcacacacctgtgacatgtggtcatcagagactctgtccacttgtcaggtcaagcactgtgtcctctgaaagcattatcaatcatggacactctcacggactcaaggaaaggctcgtgtctagaatattctgtattgtgtctctgtagtgaacaacagactacttggtggtcaaacgaaaagatccgtgcagtatttcctgaagcaagtacttagaattctggagatttttctcttagcaaaagctctgaaagtttcacataaaatgtatagattatgaccaacaagatacgtaggtaggccatcttacacaaatcaggccactgtaacaaaatactacaaactgagtagcttacaaaacacaaaattacattagcatcctgaggactggaaagtcaaaggtctttgtatctggtgagggactgctttctccactgcaattggcaacttattgctgtgtctcacataatggaagacccaaaggagacttggccatctacatgggcactgtccccatcctaaaaccccaccttacatgttagagttccagctatgaactttggagctatgataacattcagagcctaagaaaagccaaagcacatgatgaagaaagacagtgtaccagggggttgttcccaccccatctcacacatagactcacagacacacccacacattgagacagacagcaggagaatagagtatgaaatctgtgacgacacaccatcattgatcatgtgggctacatttttgacttggcatgtccatgttaacatagcaaaggactctgaatattttcctgacctgttgaatgtccaagctagattggatcctgtgagattggaattggtagagaactgacactgcttggcctctgacctctacatacatgccatggcatgttcatactctctcacacacacgtgcactcacatgcacaaaacaaataaatgtttaaattgcatctgaacatgtatacgcttgtcttgttataattctctaacagcatcatctgacaactactcccatttacattgtgttaggtttacatgcaatgtcaggtggagcacatggaaaacatatacaggatacacaaatactactttatacaagggacttgagtctctgccacaagtttcacaactgttgtccagctgggtgggggtggggcaagcggggacaagggtctcatctcagagcagcaagggtcttctctcagagcagagaaggccactgggtgatgctgcccttttgtcactggagtcccaagcaggagcccctggttgtgatcaaaacccagcactgacaagaaagtgcagggtcccatgcaaaactcagcttcctggccaggccaggtgttaatgggagagaatcctggagacaggggaaggggctgaggagaggggggcagctggtgaatggcaatgagggagggtatgggggagggaagaggaagttacactgggtgctcttctcctttccagagtttctgcttctgccacacctccaggaatcttcatgggaacagctccctgctgaagcagccttgaggagccagatggaggatgtgggcccctgtgcattggtccctgccaggagcaggtatggctgtcagtgctgcctcaggactcctgttcccccaggccatctactgtcacctgggcttaggggtgggagaattctgtggagtccaggcaacctttccagctctaaagtgctgtgggtggggaggctttttaacacagttttcatagtcccacctccccattcctccaagaaatccaccactgcccttgggcttggcctctgtccgtcctccccaccctcttccctgtcccttctcactaaagttcctggctcacctcttccttgtcttctatcacgtgttgcagctcttccacttgggaagtcataggagcaattaagaacatccagcctctcatgccaatgatttgattaattaatctcttggttactttctagtgcacaggtacctagtatctatgatagccctgggactgtgtcaggattagcacccatctggagagacactcttctgtgctgtgtgggagcatcagctgtcagttaaaagctgatgtccagtaaactgaggcagcgttagagggtggaagatgtggcaaagacactggaactcttggagactgtgtttctctaaagtggaaagccaaagccagggctctgttcaggatgtcagaggcaggagatttgcctcgactctaggaacatgaagctgaggagaggtgcctaaccatgtggaagacatagaatagtttaaagggttatgtaagttagatgctagtcagagaacagaccaaagcttatggcataggcatttgttatcaaataaaaagcctctggttggttatttggaaactggggcgtgggtggaaaagcctgtggttacacaccagctaatactgaacaactgctagccttgttcctggtgagatatcaggtgctcacccaaatgtcatcttcccagtgccccaaacttctagccctgtttttaggtggagaagctgagatggaaagatccttggctacatcctgtagctggattctacaagatccctgctttcgactcccacccccactgctagggaggcagattagcagggcaagcatgtgcacaaaagatcccaacaactggatggctgcagagatggctcagtggttaagagagggctctgtgcatgcagaggactcaagttcagttcccagagcccacaagagaggcatccaactgtctctaagtccagcttcccgggatccaatgccctcttccagctctctgcccaaatgctcttgcataaacacatactcagaaataaaataggctatttaatgaaaagtactccagaaagggcatcgcaggactgaagtcagccgagtaaggacctctaaagtggagacccaagggaggcctctgttcagggatgttccagggctcggggagccccgatgagtgggtacagctgaacaagtgaacgactggagggtgggcactgagcaaaaagggcctgggcttgggaccagaggcacagtcacctcacccagcaggcaagaggctgtggaagattctcactgctgcttagaggacccacacaccattctgaggtgagggcttgctcagaacaggtgggggtgcagtgaagggtggagcaacatagggcacagcactcaatgcctctgggaagtgcccccagatgtgggaggctgtgagggcagctggacagagtctgtagcactgagcagcctggttggagtcctatcctggaatgtagtaagggtgagagcatctggctcaggcctcacctctgtcctccagctgtggctactggagacaccaggaagtttctctttaggccactcaggccctggagttccctgacagcagtgggcattgtggatggggtggaggtgacagtctttccactgtgagggagatgtggaggggtggatgagaaatcctggattactccctgtatgaactgaatggaccatacccccagggtcagtagctcaggatcccagatgctgccagggaccacagagccaccacacatacaacactcctccatgaaaacgattttattttgcaagaaaggaagctgactcaccagagtacagctgcagtacagcagccaatcagtgaaattcaccatgcaggaacgagcacagttgagacatttccagaaggtcagaagacggtccttatccctatggtggggacaacagtatttgtgacagtcacctcacaaaaggtgggggaggtgagcagcacctgccaatctgttaacagagtgagagcagcagccatcctctgagcatcactagatatgcagggagtgcgctgcttctaccatctggggcagatttaactgccaatgtctccatcctgggaagcacagacatgaaggaaatggccttagaagtcaaaacatggtcacaaacatataacccttaagatattcatcttgtacaccaatattttagcagtttttgtggggagttggtttggtttggtttggggttttggggttttggaaacaaggtttctctgtgcagtcctggctgtcctggcgctcactgtgtaaaccaggctgcctttggagtgctgggattaaaggagtggaccactgtcacccagcaaggatttgtgatttttctgttttgggatttgtgattttaagtggaacagtttttatttatgattttgctcagcatattgggggaagacatgaccctcaaggccttcaggctatttctggtctaggtgctgatataaatgtgaggagttcaagggaagagcaacactagattgtcccctctctgttcccttttcctgactgtggatgcaatctgaccagctgcctcacactcgggccaccatgaccttcccacggtgatggacgacgccttcaaactcagaagtgaaacaaacccttcccttgtagggggagggggagccggaggagcgaggagaggacgcagcaggagagttccgggcatgaaatcttgagagcctctcactctacaaactttatgctttgtagcaccaaggtacaagtattttggaaaacttgatttgggagtctagggtttagaatgttgaattgatattttcctcagatacatcaggtagtcaactcatatgtagccttggtaaaggtttaaccacactaatggaaaagcacttggtaaatgacaatgacaaattaattttgctctggtctgatttttctcttcttgaccactaggtggcagactgaagccacaatagagaagatttgcaagtcttcccaagtttaaactggttaaattatgtttgcttgcttgcttgtttttgcaggggaggaggttggttttttgttttgttgttgttgttgttgtttgtttgtttgttcgtttttggttgggggttggttccttcttttatcttgtgagaaagaaaaggtcgcgcatataaacacagggcccttttcgggtatataaatgaggcatactgagctagctggagctgccttaaagatctttctcgttgtggcatagagtcagaggcaggaggatggtggttacaacactaacctgggcaaaacagcaaatttaagtccatcttcaaatgcatagacagaccatgtctaaaaagaagccccacaccttctcagtccttgtctgtctacagcttcacaggccaaggctttatcattggaggacattgacgcctgagccggcacactaacccaggtgaaacttcctttgaacacagcaccatacttacttgatctttctagggagacaacatactttcaccttcctgttgtcaggcgaatgagcaggtacatacctggtttgtatgaagtctttattaaatatcccacatgcaaaggagggggagaaaaagtagggatgggggaaagagggagagagggaggaggaagagaggagggagaaaagagcatggtgaggtagaggaggaggaaaggtcatttaaaatacaatgttttaaaatcgcttacccaaaaagacagagttgagcttgaagctggaggtgtgtaggatttcactcactgtttattggtgccaccaatgccaccgccgttcccactgctttcctcatctctcacttctgagtgttaaatgaactgagcggggaaaccttgggattgacctacgttcctaaactggatccacatcttttaccaagttttattttgtgaaccaaacctaaacctgtacatattttgaagtgtataaatccgagttaaataatcacttggagggaattggaatacttaccataaaaattaaaaatacgtctacccaagcattgtagtgcacgtctttaatcccagcacgcgaga

SEQ ID NO: 981191 - DNA, 46 bp, Homo sapiens
tgatcgcacctattagtggagaaatctgtccataatactgaagttt

SEQ ID NO: 981192 - DNA, 44 bp, Homo sapiens
tgggtaggcagaatagaggaggagagacatcctagatggagggg

SEQ ID NO: 981193 - DNA, 4046 bp, Homo sapiens
ttaatttccgactcctctctgtgtagctctgggatcttggaaagccacttaacctttctgaagtcccctttcctcatctctaaaatgcatacactcatcactaacatttactgagcactgacatgtgccagacaccattctaagcattttacacagactacaccatttgatcttccaacaaacagaacactgaaacgcattacaggtcagaacaaatgatttgtgcctaagcaccaagaccgtagagcccgtgctccctattctaccctatcctgtctctcaaaatgattgtgagaatcgaatgagacactaggtgagaaaagggttttataaatagcattttaaaaattttttaaagtccacaaaatttttaattttaatacagataaaatagatccctttgttttataaaaagtaacaaaatttgttatacaacaactatgttatttattaattttgcctttttgtatgctgccaggaaagaaacattaagaaatcttaaattgattatggtgaatcagaaggtctgcctggactttttattgctctaactgtacagctgatcatactacctcatttttttttatgacacttcaagggtgcgcttagcttcatcactccttcgttgccaaaagctttgtgaccaaaaacaattaagcagattcctgagtcactaaatgacacataaccagagttgagacttaggaacttttagtgccatgctaagcccacagggacacaacaaatagcattttacaaaggcaaagaattgtgacacttgagatttagcttgttgatccttgtaaaagttttctttttaggcataattgagttttagatcatagtactcactattacttagtaataatttttttctgatagaaatacagtgtaacaggccgggcgcagtggctcatgcctgtaatcccagcactttgggaggccgaggcgggcggatcacttgaggtcaggagtttgagaccagcccggccaacatggtgaaatcccatctctactaaaaatacaaaaaattagccaggtgtggtcgtggattcctgtgatcccagctacttgggagggtgaggcaggagcatcagttgaacccaggaggcggaggttgcagtgagccaagatggtgccattgcactccagcctgggccacaaagcgagactccacttcagaaacaaaaaaaaaagagagagagaaaagaaggaaggaaggaaggaaggaaggaaagaaggaaggaaggaaggaaagaaggaaggaaggaaggaaggaaagaaggaaggaaggaaagaaggaaggaaggaaagaaggaaggaaggaaggaagggtaacaagcaaagtgtaacaatggcaatatctaaaaaaataggtatttttatatgtttgtcgttttatatatatgacccccactttagagatgaggaaactgagagattaaggaaacgatccctgagagactctgttctgacttccaaatcggtgagctttccatcgcatcacggtgcctccgaaagcatgacacggagcttctcagactcagcttcctaatccgctaaacgggattatgtgagatgaggaacatgagaacgctgacatgggtgagggttccttggagtatcattttcatgtggcattttcaaaacttattttacctaatcttcccaaagccctgcttttgactctaatgtgtctcctgagacttggagagcgcaagatgctagcgacagagcaagactccatctccagataaataaataagtaaaataaaaaagaacacaaataattttgaaaatttttttgaaaattaggcacgtttgcactgaccttcaattgttattaattgctggtttcccacccagaattaagttggaatgcaactttcttttacaatcagagtccgttcttggtcttggaaacttctgaggctcctgtgctaatcacactcttgtatttttggcacctctaccccgtgccactgtcatggaacccaggctgatcgcacctattagtggagaaatctgtccataatactgaagtttggggacaaacagtgttcccttagggtaggagaaagagatctttatttttgacaaagggggaggagccagaaaactccagagacccctgagtttgccctctctccaaggtttggggtaagccccccgtcaccctttatctctggggctttcacatattctggattctctcctcctgtttcccagcagaaaaggatggagcctcacagattcttcccatttctggagaaaaacatgcatggagctcaaagttcttctcaggagttttattgccaaagccataataagaaagggtggaggtgacaagcagtgaggaagtttaaagatgcatgaaatctgtaaagtctcagaacaagaattctcctaaaatgcaaaaggggctttgctggtctccccttggcttctcatgtagctcacctcttttttcttatcttgagactagtcaaacctaagctgtttctcattttatttccagaagctattgagaacactctcctgaattcttcaaattcagtagagggcgacaaatgtacatataaatgatggtagtgggtcttaaataaagactcatgacacctaaaggggcagcacctgagtctgattgcacctgtttctgttgctgtttctgtctctcttctctctgtctgccatttcattatcaatggttactttacttataagatcatattagaacctgatatttgataaatgatgcatcagatctatagtgagagaaaaaattaatgcaattaaaggtgttgtaacagctagtcttcaagtggggagaaatcatttgagtaccttaggtcacagcttacatcaaaacaaaaaatcagagctacattaaaaagtgaaattttaactatatcaaacaatagaaaaaaacagaagaaaattgaatacttactaaatcttagcatgaataagaactgtttaacacttagaggcaaggactgggcgtggtggctcatgcttttaatcccaggactttgggagcccaaggcgggcggatcacctgaggtcaggagtttgagactagcctggccaacatggtgaaaccccgtctctactaaaaaatgcaaaaattagctgcgtgtggtggtgcatgcctgtaatctcagctacttgggaggctaaggcatgagaatcgcttgaacctgggaggtggaggctgtagtgagccgagattgtgccactgcactacagcctgggtgacagtgtgaaatcctctctctcaaaaaaaaaaaaaaaaaaaagcaaactagagcagtgaggtaccattatttcctttgctcactaaactgacaacacacaaatgttttttataatacccaaagctgatgagggtagttaaggtatgcccttttatacacacactaatgatgtactactggttggcagtataacatatgctgccatgtggggatatgtatcaggagacttaaaaatgtgcataccttttggtccagtaatttacttctgggaatctgtcataacagaataataatcttggggaaagctacatgcctaaggatatttaaaatattatttaaaaatcaaagtataatttcttacagaatataaaataatattttaaaatgaaaatatgctaaaagtttgatgaaatataaatggtcaaatatatattgattatatccacttactagactagcactcactctgagacgttaaaaatagtcattataaaaactagaaaatgccaaagacaaaataaaggaataaagttttacataaagtatgattccactatgtttaaaaataaacagagacattcttggagttgagtattgttttcttttctgtcatgtccaaagaactatataactattatttttaatgaactatatatgtaatatatacatatagtttatatgtatatacaaaatttatctcatatatatgataaagatgaaagatgagttggatgtgccacgtgaagagggtagtatagaaccccaggtaatggggcataggagtgggat

SEQ ID NO: 981194 - DNA, 4044 bp, Homo sapiens
atccattctcacactgctgtaaaaaactacttgagactgggtaatttataaagaaaagaggtttaattgactcacagttccacaggctgtacaggaagcatggctggggaggcctcagaaaacttacaatcatggtggaagaaagagcgaaggggaagcaagcacatcacacagcagcaggagagagagagagaaagagagagagagagaatataggggaagtgctacacactttcaaccagatcttgtgagaattcacctactatcatgagaacagcaagggataagtctgcctccatgattcagtcacctcctaccaggccccttctccaacacatgtcgacgtgctatttgggtggggacacagacccaaaccatattaccagggcactggagaaacacagaggggaaagaaccagccaaggagtgagatggagaacaaggaggacttcttgaaacagatgacatccaaactgggtcctgaaagctgaatagagattagacaggggaggaggggcagctaaagatggctcaggcaaacaaagggccaggggatatgttcatgggatgatgtgtctctcgttgtctgcttaacacaaggtgagtctctccctccctctctctctctttttctctgtgtgtgtttgtgtgtgtgcatgtgtgcaaatgtaatatacccaatagtcaaacatgtgccccaggagaggggtagaggaagaaagagaatgagagagtaagaaggaggaatagacacagaaaatgagagagaaggggggaaagaaaaagaagaaaggagccagaggagagaagctggttagcattgaatggagcaatctgtgtcatcgtacttgggaaacccaaggatggattcttggcaagtcgactcttggagctttccctgtgcttggtcctgtgctcagacatgggaaaattagaggagtgtcatctgtgcaatcactgaattcataatcttggtgaggaaaggagactacacacagggaataatgctaagtattacagatttcagggcagaaagagatcaaggtgggctgcaatattcagaaaagtcttcctggaaaagttgaatacttagaaagcagctcctagaagtagactctgctgagatggacggagtcctttgtaggtcccaactgggtgtgtgtgtggggtctgtctctccatggctgacagtgcacatgtggattccagggctcaggatgctgttgctgggagctgttctactgctattagctctgcccggtcatgaccaggaaaccacgactcaagggcccggagtcctgcttcccctgcccaagggggcctgcacaggttggatggcgggcatcccagggcatccgggccataatggggccccaggccgtgatggcagagatggcacccctggtgagaagggtgagaaaggagatccaggtaagaatgtttctggcctctttcatcacagacctcctacactgatataaactatatgaaggcattcattattaactaaggcctagacacagggagaaagcaaagcttttttatgttaaccataagcaacctgaagtgatttggggttggtcttccaaggatgagtgtagatggtgcctctataaccaagactttggctttgctgcatctgcagctccttttccatcccctttcccatcttcaccctcatccctattcccagtacattcatattctgattcctctttctgtctgcttaacttccatttcacccagtggcattcaaccacatttactgcacaccccctgaaaggctcagtcctgcctttggggaactcttgatctaggtaagatgtctaatgtgcaaggctctgttggtggttactacaagaaagtctactctaaaaatgtcaaactgaatgtgaacaagtattcaaagtatggagcatagagaaaatatactcaccgtggacctgatgaagaatgaaggcttcaaggaggaggcagagcttcagctaggccttgaatgatgggtaggcagaatagaggaggagagacatcctagatggagggggtagaattgcaaaaccagggttgatggtgccagcacataaagggctggcagggtggagggtctatgatagagacctataggagataaagatagagttgaaattatgggagcctccatgtctgtgggagatatagaaggaggaggtaacacctctctccttttgggagctcttattggtttcttgatctataagtcaagaaggttgtgagtgggagccacagggatggtaatttaggctgtaaccaacctaggcaggagttctgttctttgtagtcactgaggtcttctcattccttaggtcttattggtcctaagggagacatcggtgaaaccggagtacccggggctgaaggtccccgaggctttccgggaatccaaggcaggaaaggagaacctggagaaggtgcctatgtataccgctcagcattcagtgtgggattggagacttacgttactatccccaacatgcccattcgctttaccaagatcttctacaatcagcaaaaccactatgatggctccactggtaaattccactgcaacattcctgggctgtactactttgcctaccacatcacagtctatatgaaggatgtgaaggtcagcctcttcaagaaggacaaggctatgctcttcacctatgatcagtaccaggaaaataatgtggaccaggcctccggctctgtgctcctgcatctggaggtgggcgaccaagtctggctccaggtgtatggggaaggagagcgtaatggactctatgctgataatgacaatgactccaccttcacaggctttcttctctaccatgacaccaactgatcaccactaactcagagcctcctccaggccaaacagccccaaagtcaattaaaggctttcagtacggttaggaagttgattattatttagttggaggcctttagatattattcattcatttactcattcatttattcattcattcatcgagtaactttaaaaaaatcatatgctatgttcccagtcctggggagcttcacaaacatgaccagataactgactagaaagaagtagttgacagtgctattttgtgcccactgtctctcctgatgctcatatcaatcctataaggcacagggaacaagcattctcctgtttttacagattgtatcctgaggctgagagagttaagtgaatgtctaaggtcacacagtattaagtgacagtgctagaaatcaaacccagagctgtggactttgttcactagactgtgcccttttatagaggtacatgttctctttggagtgttggtaggtgtctgtttcccacctcacctgagagccattgaatttgccttcctcatgaattaaaacctcccccaagcagagcttcctcagagaaagtggttctatgatgacgtcctgtcttggaaggactactactcaatggcccctgcactactctacttcctcttacctatgtcccttctcatgcctttccctccaacggggaaagccaactccatctctaagtgccgaactcatccctgttcctcaaggccacctggccaggagcttctctgatgtgatatccactttttttttttttgagatggagtctcactctgtcacccaggctggagtacagtgacacgacctcggctcactgcagcctccttctcctgggtccaagcaattattgtgcctcagcctcccgagtagctgagacttcaggtgcattccaccacacatggctaatttttgtatttttagtagaaatggggtttcgtcatgttggccaggctggtctcgaactcctggcctaggtgatccacccgcctcgacctcccaaagtgctgggattacaggcatgagccaccatgcccagtcgatatctcactttttattttgccatggatgagagtcctgggtgtgaggaacacctcccaccaggctagaggcaactgcccaggaaggactgtgcttccgtcacctctaaatcccttgcagatccttgataaa

SEQ ID NO: 981195 - DNA, 29 bp, Homo sapiens
tcatagtggttttgctgattgtagaagat

SEQ ID NO: 981196 - DNA, 4029 bp, Homo sapiens
acacatataagagagaattgttcagaatttaaaactgtaagcaaaaagatagttttttaaatttatatattgatagagaatgctatttactctgtttttgctaaaatctttgaagaacatcactggagttattgtctcctgagagaatgtttaccaccatcaactacctcaacctgtaattcttaaagaacaataataaattcaggaggcccagtcttccctgaccctgttggtactcaaggagacaatggcttcagaattcctccatgggttttgcatttcaggctcaagctaccttcttgatgaaaaattctggacgtgttctgaaaatcacagtcatccctaacttcagtggaaaagattcatattgtccagctgaacaaggattgatacttaaaaccagggatttcctaaaatgaaaatgtttctgtggataaaactgattacatgcagagactggaatggagttaattctgggtagatatgggattcaagagattggtcttcatgaggcatttatcaaggatctgcaagggatttagaggtgacggaagcacagtccttcctgggcagttgcctctagcctggtgggaggtgttcctcacacccaggactctcatccatggcaaaataaaaagtgagatatcgactgggcatggtggctcatgcctgtaatcccagcactttgggaggtcgaggcgggtggatcacctaggccaggagttcgagaccagcctggccaacatgacgaaaccccatttctactaaaaatacaaaaattagccatgtgtggtggaatgcacctgaagtctcagctactcgggaggctgaggcacaataattgcttggacccaggagaaggaggctgcagtgagccgaggtcgtgtcactgtactccagcctgggtgacagagtgagactccatctcaaaaaaaaaaaaagtggatatcacatcagagaagctcctggccaggtggccttgaggaacagggatgagttcggcacttagagatggagttggctttccccgttggagggaaaggcatgagaagggacataggtaagaggaagtagagtagtgcaggggccattgagtagtagtccttccaagacaggacgtcatcatagaaccactttctctgaggaagctctgcttgggggaggttttaattcatgaggaaggcaaattcaatggctctcaggtgaggtgggaaacagacacctaccaacactccaaagagaacatgtacctctataaaagggcacagtctagtgaacaaagtccacagctctgggtttgatttctagcactgtcacttaatactgtgtgaccttagacattcacttaactctctcagcctcaggatacaatctgtaaaaacaggagaatgcttgttccctgtgccttataggattgatatgagcatcaggagagacagtgggcacaaaatagcactgtcaactacttctttctagtcagttatctggtcatgtttgtgaagctccccaggactgggaacatagcatatgatttttttaaagttactcgatgaatgaatgaataaatgaatgagtaaatgaatgaataatatctaaaggcctccaactaaataataatcaacttcctaaccgtactgaaagcctttaattgactttggggctgtttggcctggaggaggctctgagttagtggtgatcagttggtgtcatggtagagaagaaagcctgtgaaggtggagtcattgtcattatcagcatagagtccattacgctctccttccccatacacctggagccagacttggtcgcccacctccagatgcaggagcacagagccggaggcctggtccacattattttcctggtactgatcataggtgaagagcatagccttgtccttcttgaagaggctgaccttcacatccttcatatagactgtgatgtggtaggcaaagtagtacagcccaggaatgttgcagtggaatttaccagtggagccatcatagtggttttgctgattgtagaagatcttggtaaagcgaatgggcatgttggggatagtaacgtaagtctccaatcccacactgaatgctgagcggtatacataggcaccttctccaggttctcctttcctgccttggattcccggaaagcctcggggaccttcagccccgggtactccggtttcaccgatgtctcccttaggaccaataagacctaaggaatgagaagacctcagtgactacaaagaacagaactcctgcctaggttggttacagcctaaattaccatccctgtggctcccactcacaaccttcttgacttatagatcaagaaaccaataagagctcccaaaaggagagaggtgttacctcctccttctatatctcccacagacatggaggctcccataatttcaactctatctttatctcctataggtctctatcatagaccctccaccctgccagccctttatgtgctggcaccatcaaccctggttttgcaattctaccccctccatctaggatgtctctcctcctctattctgcctacccatcattcaaggcctagctgaagctctgcctcctccttgaagccttcattcttcatcaggtccacggtgagtatattttctctatgctccatactttgaatacttgttcacattcagtttgacatttttagagtagactttcttgtagtaaccaccaacagagccttgcacattagacatcttacctagatcaagagttccccaaaggcaggactgagcctttcagggggtgtgcagtaaatgtggttgaatgccactgggtgaaatggaagttaagcagacagaaagaggaatcagaatatgaatgtactgggaatagggatgagggtgaagatgggaaaggggatggaaaaggagctgcagatgcagcaaagccaaagtcttggttatagaggcaccatctacactcatccttggaagaccaaccccaaatcacttcaggttgcttatggttaacataaaaaagctttgctttctccctgtgtctaggccttagttaataatgaatgccttcatatagtttatatcagtgtaggaggtctgtgatgaaagaggccagaaacattcttacctggatctcctttctcacccttctcaccaggggtgccatctctgccatcacggcctggggccccattatggcccggatgccctgggatgcccgccatccaacctgtgcaggcccccttgggcaggggaagcaggactccgggcccttgagtcgtggtttcctggtcatgaccgggcagagctaatagcagtagaacagctcccagcaacagcatcctgagccctggaatccacatgtgcactgtcagccatggagagacagaccccacacacacacccagttgggacctacaaaggactccgtccatctcagcagagtctacttctaggagctgctttctaagtattcaacttttccaggaagacttttctgaatattgcagcccaccttgatctctttctgccctgaaatctgtaatacttagcattattccctgtgtgtagtctcctttcctcaccaagattatgaattcagtgattgcacagatgacactcctctaattttcccatgtctgagcacaggaccaagcacagggaaagctccaagagtcgacttgccaagaatccatccttgggtttcccaagtacgatgacacagattgctccattcaatgctaaccagcttctctcctctggctcctttcttctttttctttccccccttctctctcattttctgtgtctattcctccttcttactctctcattctctttcttcctctacccctctcctggggcacatgtttgactattgggtatattacatttgcacacatgcacacacacaaacacacacagagaaaaagagagagagagggagggagagactcaccttgtgttaagcagacaacgagagacacatcatcccatgaacatatcccctggccctttgtttgcctgag

SEQ ID NO: 981197 - DNA, 15 bp, Homo sapiens
actctgatcttcaga

SEQ ID NO: 981198 - DNA, 15 bp, Homo sapiens
aactctgatcttcag

SEQ ID NO: 981199 - DNA, 15 bp, Homo sapiens
aaactctgatcttca

SEQ ID NO: 981200 - DNA, 15 bp, Homo sapiens
taaactctgatcttc

SEQ ID NO: 981201 - DNA, 15 bp, Homo sapiens
ttaaactctgatctt

SEQ ID NO: 981202 - DNA, 15 bp, Homo sapiens
attaaactctgatct

SEQ ID NO: 981203 - DNA, 15 bp, Homo sapiens
aattaaactctgatc

SEQ ID NO: 981204 - DNA, 15 bp, Homo sapiens
aaattaaactctgat

SEQ ID NO: 981205 - DNA, 15 bp, Homo sapiens
gaaattaaactctga

SEQ ID NO: 981206 - DNA, 15 bp, Homo sapiens
ggaaattaaactctg

SEQ ID NO: 981207 - DNA, 15 bp, Homo sapiens
cggaaattaaactct

SEQ ID NO: 981208 - DNA, 15 bp, Homo sapiens
tcggaaattaaactc

SEQ ID NO: 981209 - DNA, 15 bp, Homo sapiens
gtcggaaattaaact

SEQ ID NO: 981210 - DNA, 15 bp, Homo sapiens
agtcggaaattaaac

SEQ ID NO: 981211 - DNA, 15 bp, Homo sapiens
gagtcggaaattaaa

SEQ ID NO: 981212 - DNA, 15 bp, Homo sapiens
ggagtcggaaattaa

SEQ ID NO: 981213 - DNA, 15 bp, Homo sapiens
aggagtcggaaatta

SEQ ID NO: 981214 - DNA, 15 bp, Homo sapiens
gaggagtcggaaatt

SEQ ID NO: 981215 - DNA, 15 bp, Homo sapiens
agaggagtcggaaat

SEQ ID NO: 981216 - DNA, 15 bp, Homo sapiens
gagaggagtcggaaa

SEQ ID NO: 981217 - DNA, 15 bp, Homo sapiens
agagaggagtcggaa

SEQ ID NO: 981218 - DNA, 15 bp, Homo sapiens
cagagaggagtcgga

SEQ ID NO: 981219 - DNA, 15 bp, Homo sapiens
acagagaggagtcgg

SEQ ID NO: 981220 - DNA, 15 bp, Homo sapiens
cacagagaggagtcg

SEQ ID NO: 981221 - DNA, 15 bp, Homo sapiens
acacagagaggagtc

SEQ ID NO: 981222 - DNA, 15 bp, Homo sapiens
tacacagagaggagt

SEQ ID NO: 981223 - DNA, 15 bp, Homo sapiens
ctacacagagaggag

SEQ ID NO: 981224 - DNA, 15 bp, Homo sapiens
gctacacagagagga

SEQ ID NO: 981225 - DNA, 15 bp, Homo sapiens
agctacacagagagg

SEQ ID NO: 981226 - DNA, 15 bp, Homo sapiens
gagctacacagagag

SEQ ID NO: 981227 - DNA, 15 bp, Homo sapiens
agagctacacagaga

SEQ ID NO: 981228 - DNA, 15 bp, Homo sapiens
cagagctacacagag

SEQ ID NO: 981229 - DNA, 15 bp, Homo sapiens
ccagagctacacaga

SEQ ID NO: 981230 - DNA, 15 bp, Homo sapiens
cccagagctacacag

SEQ ID NO: 981231 - DNA, 15 bp, Homo sapiens
tcccagagctacaca

SEQ ID NO: 981232 - DNA, 15 bp, Homo sapiens
atcccagagctacac

SEQ ID NO: 981233 - DNA, 15 bp, Homo sapiens
gatcccagagctaca

SEQ ID NO: 981234 - DNA, 15 bp, Homo sapiens
agatcccagagctac

SEQ ID NO: 981235 - DNA, 15 bp, Homo sapiens
aagatcccagagcta

SEQ ID NO: 981236 - DNA, 15 bp, Homo sapiens
caagatcccagagct

SEQ ID NO: 981237 - DNA, 15 bp, Homo sapiens
ccaagatcccagagc

SEQ ID NO: 981238 - DNA, 15 bp, Homo sapiens
tccaagatcccagag

SEQ ID NO: 981239 - DNA, 15 bp, Homo sapiens
ttccaagatcccaga

SEQ ID NO: 981240 - DNA, 15 bp, Homo sapiens
tttccaagatcccag

SEQ ID NO: 981241 - DNA, 15 bp, Homo sapiens
ctttccaagatccca

SEQ ID NO: 981242 - DNA, 15 bp, Homo sapiens
gctttccaagatccc

SEQ ID NO: 981243 - DNA, 15 bp, Homo sapiens
ggctttccaagatcc

SEQ ID NO: 981244 - DNA, 15 bp, Homo sapiens
tggctttccaagatc

SEQ ID NO: 981245 - DNA, 15 bp, Homo sapiens
gtggctttccaagat

SEQ ID NO: 981246 - DNA, 15 bp, Homo sapiens
agtggctttccaaga

SEQ ID NO: 981247 - DNA, 15 bp, Homo sapiens
aagtggctttccaag

SEQ ID NO: 981248 - DNA, 15 bp, Homo sapiens
taagtggctttccaa

SEQ ID NO: 981249 - DNA, 15 bp, Homo sapiens
ttaagtggctttcca

SEQ ID NO: 981250 - DNA, 15 bp, Homo sapiens
gttaagtggctttcc

SEQ ID NO: 981251 - DNA, 15 bp, Homo sapiens
ggttaagtggctttc

SEQ ID NO: 981252 - DNA, 15 bp, Homo sapiens
aggttaagtggcttt

SEQ ID NO: 981253 - DNA, 15 bp, Homo sapiens
aaggttaagtggctt

SEQ ID NO: 981254 - DNA, 15 bp, Homo sapiens
aaaggttaagtggct

SEQ ID NO: 981255 - DNA, 15 bp, Homo sapiens
gaaaggttaagtggc

SEQ ID NO: 981256 - DNA, 15 bp, Homo sapiens
agaaaggttaagtgg

SEQ ID NO: 981257 - DNA, 15 bp, Homo sapiens
cagaaaggttaagtg

SEQ ID NO: 981258 - DNA, 15 bp, Homo sapiens
tcagaaaggttaagt

SEQ ID NO: 981259 - DNA, 15 bp, Homo sapiens
ttcagaaaggttaag

SEQ ID NO: 981260 - DNA, 15 bp, Homo sapiens
cttcagaaaggttaa

SEQ ID NO: 981261 - DNA, 15 bp, Homo sapiens
acttcagaaaggtta

SEQ ID NO: 981262 - DNA, 15 bp, Homo sapiens
gacttcagaaaggtt

SEQ ID NO: 981263 - DNA, 15 bp, Homo sapiens
ggacttcagaaaggt

SEQ ID NO: 981264 - DNA, 15 bp, Homo sapiens
gggacttcagaaagg

SEQ ID NO: 981265 - DNA, 15 bp, Homo sapiens
ggggacttcagaaag

SEQ ID NO: 981266 - DNA, 15 bp, Homo sapiens
aggggacttcagaaa

SEQ ID NO: 981267 - DNA, 15 bp, Homo sapiens
aaggggacttcagaa

SEQ ID NO: 981268 - DNA, 15 bp, Homo sapiens
aaaggggacttcaga

SEQ ID NO: 981269 - DNA, 15 bp, Homo sapiens
gaaaggggacttcag

SEQ ID NO: 981270 - DNA, 15 bp, Homo sapiens
ggaaaggggacttca

SEQ ID NO: 981271 - DNA, 15 bp, Homo sapiens
aggaaaggggacttc

SEQ ID NO: 981272 - DNA, 15 bp, Homo sapiens
gaggaaaggggactt

SEQ ID NO: 981273 - DNA, 15 bp, Homo sapiens
tgaggaaaggggact

SEQ ID NO: 981274 - DNA, 15 bp, Homo sapiens
atgaggaaaggggac

SEQ ID NO: 981275 - DNA, 15 bp, Homo sapiens
gatgaggaaagggga

SEQ ID NO: 981276 - DNA, 15 bp, Homo sapiens
agatgaggaaagggg

SEQ ID NO: 981277 - DNA, 15 bp, Homo sapiens
gagatgaggaaaggg

SEQ ID NO: 981278 - DNA, 15 bp, Homo sapiens
agagatgaggaaagg

SEQ ID NO: 981279 - DNA, 15 bp, Homo sapiens
tagagatgaggaaag

SEQ ID NO: 981280 - DNA, 15 bp, Homo sapiens
ttagagatgaggaaa

SEQ ID NO: 981281 - DNA, 15 bp, Homo sapiens
tttagagatgaggaa

SEQ ID NO: 981282 - DNA, 15 bp, Homo sapiens
ttttagagatgagga

SEQ ID NO: 981283 - DNA, 15 bp, Homo sapiens
attttagagatgagg

SEQ ID NO: 981284 - DNA, 15 bp, Homo sapiens
cattttagagatgag

SEQ ID NO: 981285 - DNA, 15 bp, Homo sapiens
gcattttagagatga

SEQ ID NO: 981286 - DNA, 15 bp, Homo sapiens
tgcattttagagatg

SEQ ID NO: 981287 - DNA, 15 bp, Homo sapiens
atgcattttagagat

SEQ ID NO: 981288 - DNA, 15 bp, Homo sapiens
tatgcattttagaga

SEQ ID NO: 981289 - DNA, 15 bp, Homo sapiens
gtatgcattttagag

SEQ ID NO: 981290 - DNA, 15 bp, Homo sapiens
tgtatgcattttaga

SEQ ID NO: 981291 - DNA, 15 bp, Homo sapiens
gtgtatgcattttag

SEQ ID NO: 981292 - DNA, 15 bp, Homo sapiens
agtgtatgcatttta

SEQ ID NO: 981293 - DNA, 15 bp, Homo sapiens
gagtgtatgcatttt

SEQ ID NO: 981294 - DNA, 15 bp, Homo sapiens
tgagtgtatgcattt

SEQ ID NO: 981295 - DNA, 15 bp, Homo sapiens
atgagtgtatgcatt

SEQ ID NO: 981296 - DNA, 15 bp, Homo sapiens
gatgagtgtatgcat

SEQ ID NO: 981297 - DNA, 15 bp, Homo sapiens
tgatgagtgtatgca

SEQ ID NO: 981298 - DNA, 15 bp, Homo sapiens
gtgatgagtgtatgc

SEQ ID NO: 981299 - DNA, 15 bp, Homo sapiens
agtgatgagtgtatg

SEQ ID NO: 981300 - DNA, 15 bp, Homo sapiens
tagtgatgagtgtat

SEQ ID NO: 981301 - DNA, 15 bp, Homo sapiens
ttagtgatgagtgta

SEQ ID NO: 981302 - DNA, 15 bp, Homo sapiens
gttagtgatgagtgt

SEQ ID NO: 981303 - DNA, 15 bp, Homo sapiens
tgttagtgatgagtg

SEQ ID NO: 981304 - DNA, 15 bp, Homo sapiens
atgttagtgatgagt

SEQ ID NO: 981305 - DNA, 15 bp, Homo sapiens
aatgttagtgatgag

SEQ ID NO: 981306 - DNA, 15 bp, Homo sapiens
aaatgttagtgatga

SEQ ID NO: 981307 - DNA, 15 bp, Homo sapiens
taaatgttagtgatg

SEQ ID NO: 981308 - DNA, 15 bp, Homo sapiens
gtaaatgttagtgat

SEQ ID NO: 981309 - DNA, 15 bp, Homo sapiens
agtaaatgttagtga

SEQ ID NO: 981310 - DNA, 15 bp, Homo sapiens
cagtaaatgttagtg

SEQ ID NO: 981311 - DNA, 15 bp, Homo sapiens
tcagtaaatgttagt

SEQ ID NO: 981312 - DNA, 15 bp, Homo sapiens
ctcagtaaatgttag

SEQ ID NO: 981313 - DNA, 15 bp, Homo sapiens
gctcagtaaatgtta

SEQ ID NO: 981314 - DNA, 15 bp, Homo sapiens
tgctcagtaaatgtt

SEQ ID NO: 981315 - DNA, 15 bp, Homo sapiens
gtgctcagtaaatgt

SEQ ID NO: 981316 - DNA, 15 bp, Homo sapiens
agtgctcagtaaatg

SEQ ID NO: 981317 - DNA, 15 bp, Homo sapiens
cagtgctcagtaaat

SEQ ID NO: 981318 - DNA, 15 bp, Homo sapiens
tcagtgctcagtaaa

SEQ ID NO: 981319 - DNA, 15 bp, Homo sapiens
gtcagtgctcagtaa

SEQ ID NO: 981320 - DNA, 15 bp, Homo sapiens
tgtcagtgctcagta

SEQ ID NO: 981321 - DNA, 15 bp, Homo sapiens
atgtcagtgctcagt

SEQ ID NO: 981322 - DNA, 15 bp, Homo sapiens
catgtcagtgctcag

SEQ ID NO: 981323 - DNA, 15 bp, Homo sapiens
acatgtcagtgctca

SEQ ID NO: 981324 - DNA, 15 bp, Homo sapiens
cacatgtcagtgctc

SEQ ID NO: 981325 - DNA, 15 bp, Homo sapiens
gcacatgtcagtgct

SEQ ID NO: 981326 - DNA, 15 bp, Homo sapiens
ggcacatgtcagtgc

SEQ ID NO: 981327 - DNA, 15 bp, Homo sapiens
tggcacatgtcagtg

SEQ ID NO: 981328 - DNA, 15 bp, Homo sapiens
ctggcacatgtcagt

SEQ ID NO: 981329 - DNA, 15 bp, Homo sapiens
tctggcacatgtcag

SEQ ID NO: 981330 - DNA, 15 bp, Homo sapiens
gtctggcacatgtca

SEQ ID NO: 981331 - DNA, 15 bp, Homo sapiens
tgtctggcacatgtc

SEQ ID NO: 981332 - DNA, 15 bp, Homo sapiens
gtgtctggcacatgt

SEQ ID NO: 981333 - DNA, 15 bp, Homo sapiens
ggtgtctggcacatg

SEQ ID NO: 981334 - DNA, 15 bp, Homo sapiens
tggtgtctggcacat

SEQ ID NO: 981335 - DNA, 15 bp, Homo sapiens
atggtgtctggcaca

SEQ ID NO: 981336 - DNA, 15 bp, Homo sapiens
aatggtgtctggcac

SEQ ID NO: 981337 - DNA, 15 bp, Homo sapiens
gaatggtgtctggca

SEQ ID NO: 981338 - DNA, 15 bp, Homo sapiens
agaatggtgtctggc

SEQ ID NO: 981339 - DNA, 15 bp, Homo sapiens
tagaatggtgtctgg

SEQ ID NO: 981340 - DNA, 15 bp, Homo sapiens
ttagaatggtgtctg

SEQ ID NO: 981341 - DNA, 15 bp, Homo sapiens
cttagaatggtgtct

SEQ ID NO: 981342 - DNA, 15 bp, Homo sapiens
gcttagaatggtgtc

SEQ ID NO: 981343 - DNA, 15 bp, Homo sapiens
tgcttagaatggtgt

SEQ ID NO: 981344 - DNA, 15 bp, Homo sapiens
atgcttagaatggtg

SEQ ID NO: 981345 - DNA, 15 bp, Homo sapiens
aatgcttagaatggt

SEQ ID NO: 981346 - DNA, 15 bp, Homo sapiens
aaatgcttagaatgg

SEQ ID NO: 981347 - DNA, 15 bp, Homo sapiens
aaaatgcttagaatg

SEQ ID NO: 981348 - DNA, 15 bp, Homo sapiens
taaaatgcttagaat

SEQ ID NO: 981349 - DNA, 15 bp, Homo sapiens
gtaaaatgcttagaa

SEQ ID NO: 981350 - DNA, 15 bp, Homo sapiens
tgtaaaatgcttaga

SEQ ID NO: 981351 - DNA, 15 bp, Homo sapiens
gtgtaaaatgcttag

SEQ ID NO: 981352 - DNA, 15 bp, Homo sapiens
tgtgtaaaatgctta

SEQ ID NO: 981353 - DNA, 15 bp, Homo sapiens
ctgtgtaaaatgctt

SEQ ID NO: 981354 - DNA, 15 bp, Homo sapiens
tctgtgtaaaatgct

SEQ ID NO: 981355 - DNA, 15 bp, Homo sapiens
gtctgtgtaaaatgc

SEQ ID NO: 981356 - DNA, 15 bp, Homo sapiens
agtctgtgtaaaatg

SEQ ID NO: 981357 - DNA, 15 bp, Homo sapiens
tagtctgtgtaaaat

SEQ ID NO: 981358 - DNA, 15 bp, Homo sapiens
gtagtctgtgtaaaa

SEQ ID NO: 981359 - DNA, 15 bp, Homo sapiens
tgtagtctgtgtaaa

SEQ ID NO: 981360 - DNA, 15 bp, Homo sapiens
gtgtagtctgtgtaa

SEQ ID NO: 981361 - DNA, 15 bp, Homo sapiens
ggtgtagtctgtgta

SEQ ID NO: 981362 - DNA, 15 bp, Homo sapiens
tggtgtagtctgtgt

SEQ ID NO: 981363 - DNA, 15 bp, Homo sapiens
atggtgtagtctgtg

SEQ ID NO: 981364 - DNA, 15 bp, Homo sapiens
aatggtgtagtctgt

SEQ ID NO: 981365 - DNA, 15 bp, Homo sapiens
aaatggtgtagtctg

SEQ ID NO: 981366 - DNA, 15 bp, Homo sapiens
caaatggtgtagtct

SEQ ID NO: 981367 - DNA, 15 bp, Homo sapiens
tcaaatggtgtagtc

SEQ ID NO: 981368 - DNA, 15 bp, Homo sapiens
atcaaatggtgtagt

SEQ ID NO: 981369 - DNA, 15 bp, Homo sapiens
gatcaaatggtgtag

SEQ ID NO: 981370 - DNA, 15 bp, Homo sapiens
agatcaaatggtgta

SEQ ID NO: 981371 - DNA, 15 bp, Homo sapiens
aagatcaaatggtgt

SEQ ID NO: 981372 - DNA, 15 bp, Homo sapiens
gaagatcaaatggtg

SEQ ID NO: 981373 - DNA, 15 bp, Homo sapiens
ggaagatcaaatggt

SEQ ID NO: 981374 - DNA, 15 bp, Homo sapiens
tggaagatcaaatgg

SEQ ID NO: 981375 - DNA, 15 bp, Homo sapiens
ttggaagatcaaatg

SEQ ID NO: 981376 - DNA, 15 bp, Homo sapiens
gttggaagatcaaat

SEQ ID NO: 981377 - DNA, 15 bp, Homo sapiens
tgttggaagatcaaa

SEQ ID NO: 981378 - DNA, 15 bp, Homo sapiens
ttgttggaagatcaa

SEQ ID NO: 981379 - DNA, 15 bp, Homo sapiens
tttgttggaagatca

SEQ ID NO: 981380 - DNA, 15 bp, Homo sapiens
gtttgttggaagatc

SEQ ID NO: 981381 - DNA, 15 bp, Homo sapiens
tgtttgttggaagat

SEQ ID NO: 981382 - DNA, 15 bp, Homo sapiens
ctgtttgttggaaga

SEQ ID NO: 981383 - DNA, 15 bp, Homo sapiens
tctgtttgttggaag

SEQ ID NO: 981384 - DNA, 15 bp, Homo sapiens
ttctgtttgttggaa

SEQ ID NO: 981385 - DNA, 15 bp, Homo sapiens
gttctgtttgttgga

SEQ ID NO: 981386 - DNA, 15 bp, Homo sapiens
tgttctgtttgttgg

SEQ ID NO: 981387 - DNA, 15 bp, Homo sapiens
gtgttctgtttgttg

SEQ ID NO: 981388 - DNA, 15 bp, Homo sapiens
agtgttctgtttgtt

SEQ ID NO: 981389 - DNA, 15 bp, Homo sapiens
cagtgttctgtttgt

SEQ ID NO: 981390 - DNA, 15 bp, Homo sapiens
tcagtgttctgtttg

SEQ ID NO: 981391 - DNA, 15 bp, Homo sapiens
ttcagtgttctgttt

SEQ ID NO: 981392 - DNA, 15 bp, Homo sapiens
tttcagtgttctgtt

SEQ ID NO: 981393 - DNA, 15 bp, Homo sapiens
gtttcagtgttctgt

SEQ ID NO: 981394 - DNA, 15 bp, Homo sapiens
cgtttcagtgttctg

SEQ ID NO: 981395 - DNA, 15 bp, Homo sapiens
gcgtttcagtgttct

SEQ ID NO: 981396 - DNA, 15 bp, Homo sapiens
tgcgtttcagtgttc

SEQ ID NO: 981397 - DNA, 15 bp, Homo sapiens
atgcgtttcagtgtt

SEQ ID NO: 981398 - DNA, 15 bp, Homo sapiens
aatgcgtttcagtgt

SEQ ID NO: 981399 - DNA, 15 bp, Homo sapiens
taatgcgtttcagtg

SEQ ID NO: 981400 - DNA, 15 bp, Homo sapiens
gtaatgcgtttcagt

SEQ ID NO: 981401 - DNA, 15 bp, Homo sapiens
tgtaatgcgtttcag

SEQ ID NO: 981402 - DNA, 15 bp, Homo sapiens
ctgtaatgcgtttca

SEQ ID NO: 981403 - DNA, 15 bp, Homo sapiens
cctgtaatgcgtttc

SEQ ID NO: 981404 - DNA, 15 bp, Homo sapiens
acctgtaatgcgttt

SEQ ID NO: 981405 - DNA, 15 bp, Homo sapiens
gacctgtaatgcgtt

SEQ ID NO: 981406 - DNA, 15 bp, Homo sapiens
tgacctgtaatgcgt

SEQ ID NO: 981407 - DNA, 15 bp, Homo sapiens
ctgacctgtaatgcg

SEQ ID NO: 981408 - DNA, 15 bp, Homo sapiens
tctgacctgtaatgc

SEQ ID NO: 981409 - DNA, 15 bp, Homo sapiens
ttctgacctgtaatg

SEQ ID NO: 981410 - DNA, 15 bp, Homo sapiens
gttctgacctgtaat

SEQ ID NO: 981411 - DNA, 15 bp, Homo sapiens
tgttctgacctgtaa

SEQ ID NO: 981412 - DNA, 15 bp, Homo sapiens
ttgttctgacctgta

SEQ ID NO: 981413 - DNA, 15 bp, Homo sapiens
tttgttctgacctgt

SEQ ID NO: 981414 - DNA, 15 bp, Homo sapiens
atttgttctgacctg

SEQ ID NO: 981415 - DNA, 15 bp, Homo sapiens
catttgttctgacct

SEQ ID NO: 981416 - DNA, 15 bp, Homo sapiens
tcatttgttctgacc

SEQ ID NO: 981417 - DNA, 15 bp, Homo sapiens
atcatttgttctgac

SEQ ID NO: 981418 - DNA, 15 bp, Homo sapiens
aatcatttgttctga

SEQ ID NO: 981419 - DNA, 15 bp, Homo sapiens
aaatcatttgttctg

SEQ ID NO: 981420 - DNA, 15 bp, Homo sapiens
caaatcatttgttct

SEQ ID NO: 981421 - DNA, 15 bp, Homo sapiens
acaaatcatttgttc

SEQ ID NO: 981422 - DNA, 15 bp, Homo sapiens
cacaaatcatttgtt

SEQ ID NO: 981423 - DNA, 15 bp, Homo sapiens
gcacaaatcatttgt

SEQ ID NO: 981424 - DNA, 15 bp, Homo sapiens
ggcacaaatcatttg

SEQ ID NO: 981425 - DNA, 15 bp, Homo sapiens
aggcacaaatcattt

SEQ ID NO: 981426 - DNA, 15 bp, Homo sapiens
taggcacaaatcatt

SEQ ID NO: 981427 - DNA, 15 bp, Homo sapiens
ttaggcacaaatcat

SEQ ID NO: 981428 - DNA, 15 bp, Homo sapiens
cttaggcacaaatca

SEQ ID NO: 981429 - DNA, 15 bp, Homo sapiens
gcttaggcacaaatc

SEQ ID NO: 981430 - DNA, 15 bp, Homo sapiens
tgcttaggcacaaat

SEQ ID NO: 981431 - DNA, 15 bp, Homo sapiens
gtgcttaggcacaaa

SEQ ID NO: 981432 - DNA, 15 bp, Homo sapiens
ggtgcttaggcacaa

SEQ ID NO: 981433 - DNA, 15 bp, Homo sapiens
tggtgcttaggcaca

SEQ ID NO: 981434 - DNA, 15 bp, Homo sapiens
ttggtgcttaggcac

SEQ ID NO: 981435 - DNA, 15 bp, Homo sapiens
cttggtgcttaggca

SEQ ID NO: 981436 - DNA, 15 bp, Homo sapiens
tcttggtgcttaggc

SEQ ID NO: 981437 - DNA, 15 bp, Homo sapiens
gtcttggtgcttagg

SEQ ID NO: 981438 - DNA, 15 bp, Homo sapiens
ggtcttggtgcttag

SEQ ID NO: 981439 - DNA, 15 bp, Homo sapiens
cggtcttggtgctta

SEQ ID NO: 981440 - DNA, 15 bp, Homo sapiens
acggtcttggtgctt

SEQ ID NO: 981441 - DNA, 15 bp, Homo sapiens
tacggtcttggtgct

SEQ ID NO: 981442 - DNA, 15 bp, Homo sapiens
ctacggtcttggtgc

SEQ ID NO: 981443 - DNA, 15 bp, Homo sapiens
tctacggtcttggtg

SEQ ID NO: 981444 - DNA, 15 bp, Homo sapiens
ctctacggtcttggt

SEQ ID NO: 981445 - DNA, 15 bp, Homo sapiens
gctctacggtcttgg

SEQ ID NO: 981446 - DNA, 15 bp, Homo sapiens
ggctctacggtcttg

SEQ ID NO: 981447 - DNA, 15 bp, Homo sapiens
gggctctacggtctt

SEQ ID NO: 981448 - DNA, 15 bp, Homo sapiens
cgggctctacggtct

SEQ ID NO: 981449 - DNA, 15 bp, Homo sapiens
acgggctctacggtc

SEQ ID NO: 981450 - DNA, 15 bp, Homo sapiens
cacgggctctacggt

SEQ ID NO: 981451 - DNA, 15 bp, Homo sapiens
gcacgggctctacgg

SEQ ID NO: 981452 - DNA, 15 bp, Homo sapiens
agcacgggctctacg

SEQ ID NO: 981453 - DNA, 15 bp, Homo sapiens
gagcacgggctctac

SEQ ID NO: 981454 - DNA, 15 bp, Homo sapiens
ggagcacgggctcta

SEQ ID NO: 981455 - DNA, 15 bp, Homo sapiens
gggagcacgggctct

SEQ ID NO: 981456 - DNA, 15 bp, Homo sapiens
agggagcacgggctc

SEQ ID NO: 981457 - DNA, 15 bp, Homo sapiens
tagggagcacgggct

SEQ ID NO: 981458 - DNA, 15 bp, Homo sapiens
atagggagcacgggc

SEQ ID NO: 981459 - DNA, 15 bp, Homo sapiens
aatagggagcacggg

SEQ ID NO: 981460 - DNA, 15 bp, Homo sapiens
gaatagggagcacgg

SEQ ID NO: 981461 - DNA, 15 bp, Homo sapiens
agaatagggagcacg

SEQ ID NO: 981462 - DNA, 15 bp, Homo sapiens
tagaatagggagcac

SEQ ID NO: 981463 - DNA, 15 bp, Homo sapiens
gtagaatagggagca

SEQ ID NO: 981464 - DNA, 15 bp, Homo sapiens
ggtagaatagggagc

SEQ ID NO: 981465 - DNA, 15 bp, Homo sapiens
gggtagaatagggag

SEQ ID NO: 981466 - DNA, 15 bp, Homo sapiens
agggtagaataggga

SEQ ID NO: 981467 - DNA, 15 bp, Homo sapiens
tagggtagaataggg

SEQ ID NO: 981468 - DNA, 15 bp, Homo sapiens
atagggtagaatagg

SEQ ID NO: 981469 - DNA, 15 bp, Homo sapiens
gatagggtagaatag

SEQ ID NO: 981470 - DNA, 15 bp, Homo sapiens
ggatagggtagaata

SEQ ID NO: 981471 - DNA, 15 bp, Homo sapiens
aggatagggtagaat

SEQ ID NO: 981472 - DNA, 15 bp, Homo sapiens
caggatagggtagaa

SEQ ID NO: 981473 - DNA, 15 bp, Homo sapiens
acaggatagggtaga

SEQ ID NO: 981474 - DNA, 15 bp, Homo sapiens
gacaggatagggtag

SEQ ID NO: 981475 - DNA, 15 bp, Homo sapiens
agacaggatagggta

SEQ ID NO: 981476 - DNA, 15 bp, Homo sapiens
gagacaggatagggt

SEQ ID NO: 981477 - DNA, 15 bp, Homo sapiens
agagacaggataggg

SEQ ID NO: 981478 - DNA, 15 bp, Homo sapiens
gagagacaggatagg

SEQ ID NO: 981479 - DNA, 15 bp, Homo sapiens
tgagagacaggatag

SEQ ID NO: 981480 - DNA, 15 bp, Homo sapiens
ttgagagacaggata

SEQ ID NO: 981481 - DNA, 15 bp, Homo sapiens
tttgagagacaggat

SEQ ID NO: 981482 - DNA, 15 bp, Homo sapiens
ttttgagagacagga

SEQ ID NO: 981483 - DNA, 15 bp, Homo sapiens
attttgagagacagg

SEQ ID NO: 981484 - DNA, 15 bp, Homo sapiens
cattttgagagacag

SEQ ID NO: 981485 - DNA, 15 bp, Homo sapiens
tcattttgagagaca

SEQ ID NO: 981486 - DNA, 15 bp, Homo sapiens
atcattttgagagac

SEQ ID NO: 981487 - DNA, 15 bp, Homo sapiens
aatcattttgagaga

SEQ ID NO: 981488 - DNA, 15 bp, Homo sapiens
caatcattttgagag

SEQ ID NO: 981489 - DNA, 15 bp, Homo sapiens
acaatcattttgaga

SEQ ID NO: 981490 - DNA, 15 bp, Homo sapiens
cacaatcattttgag

SEQ ID NO: 981491 - DNA, 15 bp, Homo sapiens
tcacaatcattttga

SEQ ID NO: 981492 - DNA, 15 bp, Homo sapiens
ctcacaatcattttg

SEQ ID NO: 981493 - DNA, 15 bp, Homo sapiens
tctcacaatcatttt

SEQ ID NO: 981494 - DNA, 15 bp, Homo sapiens
ttctcacaatcattt

SEQ ID NO: 981495 - DNA, 15 bp, Homo sapiens
attctcacaatcatt

SEQ ID NO: 981496 - DNA, 15 bp, Homo sapiens
gattctcacaatcat

SEQ ID NO: 981497 - DNA, 15 bp, Homo sapiens
cgattctcacaatca

SEQ ID NO: 981498 - DNA, 15 bp, Homo sapiens
tcgattctcacaatc

SEQ ID NO: 981499 - DNA, 15 bp, Homo sapiens
ttcgattctcacaat

SEQ ID NO: 981500 - DNA, 15 bp, Homo sapiens
attcgattctcacaa

SEQ ID NO: 981501 - DNA, 15 bp, Homo sapiens
cattcgattctcaca

SEQ ID NO: 981502 - DNA, 15 bp, Homo sapiens
tcattcgattctcac

SEQ ID NO: 981503 - DNA, 15 bp, Homo sapiens
ctcattcgattctca

SEQ ID NO: 981504 - DNA, 15 bp, Homo sapiens
tctcattcgattctc

SEQ ID NO: 981505 - DNA, 15 bp, Homo sapiens
gtctcattcgattct

SEQ ID NO: 981506 - DNA, 15 bp, Homo sapiens
tgtctcattcgattc

SEQ ID NO: 981507 - DNA, 15 bp, Homo sapiens
gtgtctcattcgatt

SEQ ID NO: 981508 - DNA, 15 bp, Homo sapiens
agtgtctcattcgat

SEQ ID NO: 981509 - DNA, 15 bp, Homo sapiens
tagtgtctcattcga

SEQ ID NO: 981510 - DNA, 15 bp, Homo sapiens
ctagtgtctcattcg

SEQ ID NO: 981511 - DNA, 15 bp, Homo sapiens
cctagtgtctcattc

SEQ ID NO: 981512 - DNA, 15 bp, Homo sapiens
acctagtgtctcatt

SEQ ID NO: 981513 - DNA, 15 bp, Homo sapiens
cacctagtgtctcat

SEQ ID NO: 981514 - DNA, 15 bp, Homo sapiens
tcacctagtgtctca

SEQ ID NO: 981515 - DNA, 15 bp, Homo sapiens
ctcacctagtgtctc

SEQ ID NO: 981516 - DNA, 15 bp, Homo sapiens
tctcacctagtgtct

SEQ ID NO: 981517 - DNA, 15 bp, Homo sapiens
ttctcacctagtgtc

SEQ ID NO: 981518 - DNA, 15 bp, Homo sapiens
tttctcacctagtgt

SEQ ID NO: 981519 - DNA, 15 bp, Homo sapiens
ttttctcacctagtg

SEQ ID NO: 981520 - DNA, 15 bp, Homo sapiens
cttttctcacctagt

SEQ ID NO: 981521 - DNA, 15 bp, Homo sapiens
ccttttctcacctag

SEQ ID NO: 981522 - DNA, 15 bp, Homo sapiens
cccttttctcaccta

SEQ ID NO: 981523 - DNA, 15 bp, Homo sapiens
acccttttctcacct

SEQ ID NO: 981524 - DNA, 15 bp, Homo sapiens
aacccttttctcacc

SEQ ID NO: 981525 - DNA, 15 bp, Homo sapiens
aaacccttttctcac

SEQ ID NO: 981526 - DNA, 15 bp, Homo sapiens
aaaacccttttctca

SEQ ID NO: 981527 - DNA, 15 bp, Homo sapiens
taaaacccttttctc

SEQ ID NO: 981528 - DNA, 15 bp, Homo sapiens
ataaaacccttttct

SEQ ID NO: 981529 - DNA, 15 bp, Homo sapiens
tataaaacccttttc

SEQ ID NO: 981530 - DNA, 15 bp, Homo sapiens
ttataaaaccctttt

SEQ ID NO: 981531 - DNA, 15 bp, Homo sapiens
tttataaaacccttt

SEQ ID NO: 981532 - DNA, 15 bp, Homo sapiens
atttataaaaccctt

SEQ ID NO: 981533 - DNA, 15 bp, Homo sapiens
tatttataaaaccct

SEQ ID NO: 981534 - DNA, 15 bp, Homo sapiens
ctatttataaaaccc

SEQ ID NO: 981535 - DNA, 15 bp, Homo sapiens
gctatttataaaacc

SEQ ID NO: 981536 - DNA, 15 bp, Homo sapiens
tgctatttataaaac

SEQ ID NO: 981537 - DNA, 15 bp, Homo sapiens
atgctatttataaaa

SEQ ID NO: 981538 - DNA, 15 bp, Homo sapiens
aatgctatttataaa

SEQ ID NO: 981539 - DNA, 15 bp, Homo sapiens
aaatgctatttataa

SEQ ID NO: 981540 - DNA, 15 bp, Homo sapiens
aaaatgctatttata

SEQ ID NO: 981541 - DNA, 15 bp, Homo sapiens
taaaatgctatttat

SEQ ID NO: 981542 - DNA, 15 bp, Homo sapiens
ttaaaatgctattta

SEQ ID NO: 981543 - DNA, 15 bp, Homo sapiens
tttaaaatgctattt

SEQ ID NO: 981544 - DNA, 15 bp, Homo sapiens
ttttaaaatgctatt

SEQ ID NO: 981545 - DNA, 15 bp, Homo sapiens
tttttaaaatgctat

SEQ ID NO: 981546 - DNA, 15 bp, Homo sapiens
atttttaaaatgcta

SEQ ID NO: 981547 - DNA, 15 bp, Homo sapiens
aatttttaaaatgct

SEQ ID NO: 981548 - DNA, 15 bp, Homo sapiens
aaatttttaaaatgc

SEQ ID NO: 981549 - DNA, 15 bp, Homo sapiens
aaaatttttaaaatg

SEQ ID NO: 981550 - DNA, 15 bp, Homo sapiens
aaaaatttttaaaat

SEQ ID NO: 981551 - DNA, 15 bp, Homo sapiens
taaaaaatttttaaa

SEQ ID NO: 981552 - DNA, 15 bp, Homo sapiens
ttaaaaaatttttaa

SEQ ID NO: 981553 - DNA, 15 bp, Homo sapiens
tttaaaaaattttta

SEQ ID NO: 981554 - DNA, 15 bp, Homo sapiens
ctttaaaaaattttt

SEQ ID NO: 981555 - DNA, 15 bp, Homo sapiens
actttaaaaaatttt

SEQ ID NO: 981556 - DNA, 15 bp, Homo sapiens
gactttaaaaaattt

SEQ ID NO: 981557 - DNA, 15 bp, Homo sapiens
ggactttaaaaaatt

SEQ ID NO: 981558 - DNA, 15 bp, Homo sapiens
tggactttaaaaaat

SEQ ID NO: 981559 - DNA, 15 bp, Homo sapiens
gtggactttaaaaaa

SEQ ID NO: 981560 - DNA, 15 bp, Homo sapiens
tgtggactttaaaaa

SEQ ID NO: 981561 - DNA, 15 bp, Homo sapiens
ttgtggactttaaaa

SEQ ID NO: 981562 - DNA, 15 bp, Homo sapiens
tttgtggactttaaa

SEQ ID NO: 981563 - DNA, 15 bp, Homo sapiens
ttttgtggactttaa

SEQ ID NO: 981564 - DNA, 15 bp, Homo sapiens
attttgtggacttta

SEQ ID NO: 981565 - DNA, 15 bp, Homo sapiens
aattttgtggacttt

SEQ ID NO: 981566 - DNA, 15 bp, Homo sapiens
aaattttgtggactt

SEQ ID NO: 981567 - DNA, 15 bp, Homo sapiens
aaaattttgtggact

SEQ ID NO: 981568 - DNA, 15 bp, Homo sapiens
aaaaattttgtggac

SEQ ID NO: 981569 - DNA, 15 bp, Homo sapiens
taaaaattttgtgga

SEQ ID NO: 981570 - DNA, 15 bp, Homo sapiens
ttaaaaattttgtgg

SEQ ID NO: 981571 - DNA, 15 bp, Homo sapiens
attaaaaattttgtg

SEQ ID NO: 981572 - DNA, 15 bp, Homo sapiens
aattaaaaattttgt

SEQ ID NO: 981573 - DNA, 15 bp, Homo sapiens
aaattaaaaattttg

SEQ ID NO: 981574 - DNA, 15 bp, Homo sapiens
aaaattaaaaatttt

SEQ ID NO: 981575 - DNA, 15 bp, Homo sapiens
taaaattaaaaattt

SEQ ID NO: 981576 - DNA, 15 bp, Homo sapiens
ttaaaattaaaaatt

SEQ ID NO: 981577 - DNA, 15 bp, Homo sapiens
attaaaattaaaaat

SEQ ID NO: 981578 - DNA, 15 bp, Homo sapiens
tattaaaattaaaaa

SEQ ID NO: 981579 - DNA, 15 bp, Homo sapiens
gtattaaaattaaaa

SEQ ID NO: 981580 - DNA, 15 bp, Homo sapiens
tgtattaaaattaaa

SEQ ID NO: 981581 - DNA, 15 bp, Homo sapiens
ctgtattaaaattaa

SEQ ID NO: 981582 - DNA, 15 bp, Homo sapiens
tctgtattaaaatta

SEQ ID NO: 981583 - DNA, 15 bp, Homo sapiens
atctgtattaaaatt

SEQ ID NO: 981584 - DNA, 15 bp, Homo sapiens
tatctgtattaaaat

SEQ ID NO: 981585 - DNA, 15 bp, Homo sapiens
ttatctgtattaaaa

SEQ ID NO: 981586 - DNA, 15 bp, Homo sapiens
tttatctgtattaaa

SEQ ID NO: 981587 - DNA, 15 bp, Homo sapiens
ttttatctgtattaa

SEQ ID NO: 981588 - DNA, 15 bp, Homo sapiens
attttatctgtatta

SEQ ID NO: 981589 - DNA, 15 bp, Homo sapiens
tattttatctgtatt

SEQ ID NO: 981590 - DNA, 15 bp, Homo sapiens
ctattttatctgtat

SEQ ID NO: 981591 - DNA, 15 bp, Homo sapiens
tctattttatctgta

SEQ ID NO: 981592 - DNA, 15 bp, Homo sapiens
atctattttatctgt

SEQ ID NO: 981593 - DNA, 15 bp, Homo sapiens
gatctattttatctg

SEQ ID NO: 981594 - DNA, 15 bp, Homo sapiens
ggatctattttatct

SEQ ID NO: 981595 - DNA, 15 bp, Homo sapiens
gggatctattttatc

SEQ ID NO: 981596 - DNA, 15 bp, Homo sapiens
agggatctattttat

SEQ ID NO: 981597 - DNA, 15 bp, Homo sapiens
aagggatctatttta

SEQ ID NO: 981598 - DNA, 15 bp, Homo sapiens
aaagggatctatttt

SEQ ID NO: 981599 - DNA, 15 bp, Homo sapiens
caaagggatctattt

SEQ ID NO: 981600 - DNA, 15 bp, Homo sapiens
acaaagggatctatt

SEQ ID NO: 981601 - DNA, 15 bp, Homo sapiens
aacaaagggatctat

SEQ ID NO: 981602 - DNA, 15 bp, Homo sapiens
aaacaaagggatcta

SEQ ID NO: 981603 - DNA, 15 bp, Homo sapiens
aaaacaaagggatct

SEQ ID NO: 981604 - DNA, 15 bp, Homo sapiens
taaaacaaagggatc

SEQ ID NO: 981605 - DNA, 15 bp, Homo sapiens
ataaaacaaagggat

SEQ ID NO: 981606 - DNA, 15 bp, Homo sapiens
tataaaacaaaggga

SEQ ID NO: 981607 - DNA, 15 bp, Homo sapiens
ttataaaacaaaggg

SEQ ID NO: 981608 - DNA, 15 bp, Homo sapiens
tttataaaacaaagg

SEQ ID NO: 981609 - DNA, 15 bp, Homo sapiens
ttttataaaacaaag

SEQ ID NO: 981610 - DNA, 15 bp, Homo sapiens
tttttataaaacaaa

SEQ ID NO: 981611 - DNA, 15 bp, Homo sapiens
ctttttataaaacaa

SEQ ID NO: 981612 - DNA, 15 bp, Homo sapiens
actttttataaaaca

SEQ ID NO: 981613 - DNA, 15 bp, Homo sapiens
tactttttataaaac

SEQ ID NO: 981614 - DNA, 15 bp, Homo sapiens
ttactttttataaaa

SEQ ID NO: 981615 - DNA, 15 bp, Homo sapiens
gttactttttataaa

SEQ ID NO: 981616 - DNA, 15 bp, Homo sapiens
tgttactttttataa

SEQ ID NO: 981617 - DNA, 15 bp, Homo sapiens
ttgttactttttata

SEQ ID NO: 981618 - DNA, 15 bp, Homo sapiens
tttgttactttttat

SEQ ID NO: 981619 - DNA, 15 bp, Homo sapiens
ttttgttacttttta

SEQ ID NO: 981620 - DNA, 15 bp, Homo sapiens
attttgttacttttt

SEQ ID NO: 981621 - DNA, 15 bp, Homo sapiens
aattttgttactttt

SEQ ID NO: 981622 - DNA, 15 bp, Homo sapiens
aaattttgttacttt

SEQ ID NO: 981623 - DNA, 15 bp, Homo sapiens
caaattttgttactt

SEQ ID NO: 981624 - DNA, 15 bp, Homo sapiens
acaaattttgttact

SEQ ID NO: 981625 - DNA, 15 bp, Homo sapiens
aacaaattttgttac

SEQ ID NO: 981626 - DNA, 15 bp, Homo sapiens
taacaaattttgtta

SEQ ID NO: 981627 - DNA, 15 bp, Homo sapiens
ataacaaattttgtt

SEQ ID NO: 981628 - DNA, 15 bp, Homo sapiens
tataacaaattttgt

SEQ ID NO: 981629 - DNA, 15 bp, Homo sapiens
gtataacaaattttg

SEQ ID NO: 981630 - DNA, 15 bp, Homo sapiens
tgtataacaaatttt

SEQ ID NO: 981631 - DNA, 15 bp, Homo sapiens
ttgtataacaaattt

SEQ ID NO: 981632 - DNA, 15 bp, Homo sapiens
gttgtataacaaatt

SEQ ID NO: 981633 - DNA, 15 bp, Homo sapiens
tgttgtataacaaat

SEQ ID NO: 981634 - DNA, 15 bp, Homo sapiens
ttgttgtataacaaa

SEQ ID NO: 981635 - DNA, 15 bp, Homo sapiens
gttgttgtataacaa

SEQ ID NO: 981636 - DNA, 15 bp, Homo sapiens
agttgttgtataaca

SEQ ID NO: 981637 - DNA, 15 bp, Homo sapiens
tagttgttgtataac

SEQ ID NO: 981638 - DNA, 15 bp, Homo sapiens
atagttgttgtataa

SEQ ID NO: 981639 - DNA, 15 bp, Homo sapiens
catagttgttgtata

SEQ ID NO: 981640 - DNA, 15 bp, Homo sapiens
acatagttgttgtat

SEQ ID NO: 981641 - DNA, 15 bp, Homo sapiens
aacatagttgttgta

SEQ ID NO: 981642 - DNA, 15 bp, Homo sapiens
taacatagttgttgt

SEQ ID NO: 981643 - DNA, 15 bp, Homo sapiens
ataacatagttgttg

SEQ ID NO: 981644 - DNA, 15 bp, Homo sapiens
aataacatagttgtt

SEQ ID NO: 981645 - DNA, 15 bp, Homo sapiens
aaataacatagttgt

SEQ ID NO: 981646 - DNA, 15 bp, Homo sapiens
taaataacatagttg

SEQ ID NO: 981647 - DNA, 15 bp, Homo sapiens
ataaataacatagtt

SEQ ID NO: 981648 - DNA, 15 bp, Homo sapiens
aataaataacatagt

SEQ ID NO: 981649 - DNA, 15 bp, Homo sapiens
taataaataacatag

SEQ ID NO: 981650 - DNA, 15 bp, Homo sapiens
ttaataaataacata

SEQ ID NO: 981651 - DNA, 15 bp, Homo sapiens
attaataaataacat

SEQ ID NO: 981652 - DNA, 15 bp, Homo sapiens
aattaataaataaca

SEQ ID NO: 981653 - DNA, 15 bp, Homo sapiens
aaattaataaataac

SEQ ID NO: 981654 - DNA, 15 bp, Homo sapiens
aaaattaataaataa

SEQ ID NO: 981655 - DNA, 15 bp, Homo sapiens
caaaattaataaata

SEQ ID NO: 981656 - DNA, 15 bp, Homo sapiens
gcaaaattaataaat

SEQ ID NO: 981657 - DNA, 15 bp, Homo sapiens
ggcaaaattaataaa

SEQ ID NO: 981658 - DNA, 15 bp, Homo sapiens
aggcaaaattaataa

SEQ ID NO: 981659 - DNA, 15 bp, Homo sapiens
aaggcaaaattaata

SEQ ID NO: 981660 - DNA, 15 bp, Homo sapiens
aaaggcaaaattaat

SEQ ID NO: 981661 - DNA, 15 bp, Homo sapiens
aaaaggcaaaattaa

SEQ ID NO: 981662 - DNA, 15 bp, Homo sapiens
aaaaaggcaaaatta

SEQ ID NO: 981663 - DNA, 15 bp, Homo sapiens
caaaaaggcaaaatt

SEQ ID NO: 981664 - DNA, 15 bp, Homo sapiens
acaaaaaggcaaaat

SEQ ID NO: 981665 - DNA, 15 bp, Homo sapiens
tacaaaaaggcaaaa

SEQ ID NO: 981666 - DNA, 15 bp, Homo sapiens
atacaaaaaggcaaa

SEQ ID NO: 981667 - DNA, 15 bp, Homo sapiens
catacaaaaaggcaa

SEQ ID NO: 981668 - DNA, 15 bp, Homo sapiens
gcatacaaaaaggca

SEQ ID NO: 981669 - DNA, 15 bp, Homo sapiens
agcatacaaaaaggc

SEQ ID NO: 981670 - DNA, 15 bp, Homo sapiens
cagcatacaaaaagg

SEQ ID NO: 981671 - DNA, 15 bp, Homo sapiens
gcagcatacaaaaag

SEQ ID NO: 981672 - DNA, 15 bp, Homo sapiens
ggcagcatacaaaaa

SEQ ID NO: 981673 - DNA, 15 bp, Homo sapiens
tggcagcatacaaaa

SEQ ID NO: 981674 - DNA, 15 bp, Homo sapiens
ctggcagcatacaaa

SEQ ID NO: 981675 - DNA, 15 bp, Homo sapiens
cctggcagcatacaa

SEQ ID NO: 981676 - DNA, 15 bp, Homo sapiens
tcctggcagcataca

SEQ ID NO: 981677 - DNA, 15 bp, Homo sapiens
ttcctggcagcatac

SEQ ID NO: 981678 - DNA, 15 bp, Homo sapiens
tttcctggcagcata

SEQ ID NO: 981679 - DNA, 15 bp, Homo sapiens
ctttcctggcagcat

SEQ ID NO: 981680 - DNA, 15 bp, Homo sapiens
tctttcctggcagca

SEQ ID NO: 981681 - DNA, 15 bp, Homo sapiens
ttctttcctggcagc

SEQ ID NO: 981682 - DNA, 15 bp, Homo sapiens
tttctttcctggcag

SEQ ID NO: 981683 - DNA, 15 bp, Homo sapiens
gtttctttcctggca

SEQ ID NO: 981684 - DNA, 15 bp, Homo sapiens
tgtttctttcctggc

SEQ ID NO: 981685 - DNA, 15 bp, Homo sapiens
atgtttctttcctgg

SEQ ID NO: 981686 - DNA, 15 bp, Homo sapiens
aatgtttctttcctg

SEQ ID NO: 981687 - DNA, 15 bp, Homo sapiens
taatgtttctttcct

SEQ ID NO: 981688 - DNA, 15 bp, Homo sapiens
ttaatgtttctttcc

SEQ ID NO: 981689 - DNA, 15 bp, Homo sapiens
cttaatgtttctttc

SEQ ID NO: 981690 - DNA, 15 bp, Homo sapiens
tcttaatgtttcttt

SEQ ID NO: 981691 - DNA, 15 bp, Homo sapiens
ttcttaatgtttctt

SEQ ID NO: 981692 - DNA, 15 bp, Homo sapiens
tttcttaatgtttct

SEQ ID NO: 981693 - DNA, 15 bp, Homo sapiens
atttcttaatgtttc

SEQ ID NO: 981694 - DNA, 15 bp, Homo sapiens
gatttcttaatgttt

SEQ ID NO: 981695 - DNA, 15 bp, Homo sapiens
agatttcttaatgtt

SEQ ID NO: 981696 - DNA, 15 bp, Homo sapiens
aagatttcttaatgt

SEQ ID NO: 981697 - DNA, 15 bp, Homo sapiens
taagatttcttaatg

SEQ ID NO: 981698 - DNA, 15 bp, Homo sapiens
ttaagatttcttaat

SEQ ID NO: 981699 - DNA, 15 bp, Homo sapiens
tttaagatttcttaa

SEQ ID NO: 981700 - DNA, 15 bp, Homo sapiens
atttaagatttctta

SEQ ID NO: 981701 - DNA, 15 bp, Homo sapiens
aatttaagatttctt

SEQ ID NO: 981702 - DNA, 15 bp, Homo sapiens
caatttaagatttct

SEQ ID NO: 981703 - DNA, 15 bp, Homo sapiens
tcaatttaagatttc

SEQ ID NO: 981704 - DNA, 15 bp, Homo sapiens
atcaatttaagattt

SEQ ID NO: 981705 - DNA, 15 bp, Homo sapiens
aatcaatttaagatt

SEQ ID NO: 981706 - DNA, 15 bp, Homo sapiens
taatcaatttaagat

SEQ ID NO: 981707 - DNA, 15 bp, Homo sapiens
ataatcaatttaaga

SEQ ID NO: 981708 - DNA, 15 bp, Homo sapiens
cataatcaatttaag

SEQ ID NO: 981709 - DNA, 15 bp, Homo sapiens
ccataatcaatttaa

SEQ ID NO: 981710 - DNA, 15 bp, Homo sapiens
accataatcaattta

SEQ ID NO: 981711 - DNA, 15 bp, Homo sapiens
caccataatcaattt

SEQ ID NO: 981712 - DNA, 15 bp, Homo sapiens
tcaccataatcaatt

SEQ ID NO: 981713 - DNA, 15 bp, Homo sapiens
ttcaccataatcaat

SEQ ID NO: 981714 - DNA, 15 bp, Homo sapiens
attcaccataatcaa

SEQ ID NO: 981715 - DNA, 15 bp, Homo sapiens
gattcaccataatca

SEQ ID NO: 981716 - DNA, 15 bp, Homo sapiens
tgattcaccataatc

SEQ ID NO: 981717 - DNA, 15 bp, Homo sapiens
ctgattcaccataat

SEQ ID NO: 981718 - DNA, 15 bp, Homo sapiens
tctgattcaccataa

SEQ ID NO: 981719 - DNA, 15 bp, Homo sapiens
ttctgattcaccata

SEQ ID NO: 981720 - DNA, 15 bp, Homo sapiens
cttctgattcaccat

SEQ ID NO: 981721 - DNA, 15 bp, Homo sapiens
ccttctgattcacca

SEQ ID NO: 981722 - DNA, 15 bp, Homo sapiens
accttctgattcacc

SEQ ID NO: 981723 - DNA, 15 bp, Homo sapiens
gaccttctgattcac

SEQ ID NO: 981724 - DNA, 15 bp, Homo sapiens
agaccttctgattca

SEQ ID NO: 981725 - DNA, 15 bp, Homo sapiens
cagaccttctgattc

SEQ ID NO: 981726 - DNA, 15 bp, Homo sapiens
gcagaccttctgatt

SEQ ID NO: 981727 - DNA, 15 bp, Homo sapiens
ggcagaccttctgat

SEQ ID NO: 981728 - DNA, 15 bp, Homo sapiens
aggcagaccttctga

SEQ ID NO: 981729 - DNA, 15 bp, Homo sapiens
caggcagaccttctg

SEQ ID NO: 981730 - DNA, 15 bp, Homo sapiens
ccaggcagaccttct

SEQ ID NO: 981731 - DNA, 15 bp, Homo sapiens
tccaggcagaccttc

SEQ ID NO: 981732 - DNA, 15 bp, Homo sapiens
gtccaggcagacctt

SEQ ID NO: 981733 - DNA, 15 bp, Homo sapiens
agtccaggcagacct

SEQ ID NO: 981734 - DNA, 15 bp, Homo sapiens
aagtccaggcagacc

SEQ ID NO: 981735 - DNA, 15 bp, Homo sapiens
aaagtccaggcagac

SEQ ID NO: 981736 - DNA, 15 bp, Homo sapiens
aaaagtccaggcaga

SEQ ID NO: 981737 - DNA, 15 bp, Homo sapiens
aaaaagtccaggcag

SEQ ID NO: 981738 - DNA, 15 bp, Homo sapiens
taaaaagtccaggca

SEQ ID NO: 981739 - DNA, 15 bp, Homo sapiens
ataaaaagtccaggc

SEQ ID NO: 981740 - DNA, 15 bp, Homo sapiens
aataaaaagtccagg

SEQ ID NO: 981741 - DNA, 15 bp, Homo sapiens
caataaaaagtccag

SEQ ID NO: 981742 - DNA, 15 bp, Homo sapiens
gcaataaaaagtcca

SEQ ID NO: 981743 - DNA, 15 bp, Homo sapiens
agcaataaaaagtcc

SEQ ID NO: 981744 - DNA, 15 bp, Homo sapiens
gagcaataaaaagtc

SEQ ID NO: 981745 - DNA, 15 bp, Homo sapiens
agagcaataaaaagt

SEQ ID NO: 981746 - DNA, 15 bp, Homo sapiens
tagagcaataaaaag

SEQ ID NO: 981747 - DNA, 15 bp, Homo sapiens
ttagagcaataaaaa

SEQ ID NO: 981748 - DNA, 15 bp, Homo sapiens
gttagagcaataaaa

SEQ ID NO: 981749 - DNA, 15 bp, Homo sapiens
agttagagcaataaa

SEQ ID NO: 981750 - DNA, 15 bp, Homo sapiens
cagttagagcaataa

SEQ ID NO: 981751 - DNA, 15 bp, Homo sapiens
acagttagagcaata

SEQ ID NO: 981752 - DNA, 15 bp, Homo sapiens
tacagttagagcaat

SEQ ID NO: 981753 - DNA, 15 bp, Homo sapiens
gtacagttagagcaa

SEQ ID NO: 981754 - DNA, 15 bp, Homo sapiens
tgtacagttagagca

SEQ ID NO: 981755 - DNA, 15 bp, Homo sapiens
ctgtacagttagagc

SEQ ID NO: 981756 - DNA, 15 bp, Homo sapiens
gctgtacagttagag

SEQ ID NO: 981757 - DNA, 15 bp, Homo sapiens
agctgtacagttaga

SEQ ID NO: 981758 - DNA, 15 bp, Homo sapiens
cagctgtacagttag

SEQ ID NO: 981759 - DNA, 15 bp, Homo sapiens
tcagctgtacagtta

SEQ ID NO: 981760 - DNA, 15 bp, Homo sapiens
atcagctgtacagtt

SEQ ID NO: 981761 - DNA, 15 bp, Homo sapiens
gatcagctgtacagt

SEQ ID NO: 981762 - DNA, 15 bp, Homo sapiens
tgatcagctgtacag

SEQ ID NO: 981763 - DNA, 15 bp, Homo sapiens
atgatcagctgtaca

SEQ ID NO: 981764 - DNA, 15 bp, Homo sapiens
tatgatcagctgtac

SEQ ID NO: 981765 - DNA, 15 bp, Homo sapiens
gtatgatcagctgta

SEQ ID NO: 981766 - DNA, 15 bp, Homo sapiens
agtatgatcagctgt

SEQ ID NO: 981767 - DNA, 15 bp, Homo sapiens
tagtatgatcagctg

SEQ ID NO: 981768 - DNA, 15 bp, Homo sapiens
gtagtatgatcagct

SEQ ID NO: 981769 - DNA, 15 bp, Homo sapiens
ggtagtatgatcagc

SEQ ID NO: 981770 - DNA, 15 bp, Homo sapiens
aggtagtatgatcag

SEQ ID NO: 981771 - DNA, 15 bp, Homo sapiens
gaggtagtatgatca

SEQ ID NO: 981772 - DNA, 15 bp, Homo sapiens
tgaggtagtatgatc

SEQ ID NO: 981773 - DNA, 15 bp, Homo sapiens
atgaggtagtatgat

SEQ ID NO: 981774 - DNA, 15 bp, Homo sapiens
aatgaggtagtatga

SEQ ID NO: 981775 - DNA, 15 bp, Homo sapiens
aaatgaggtagtatg

SEQ ID NO: 981776 - DNA, 15 bp, Homo sapiens
aaaatgaggtagtat

SEQ ID NO: 981777 - DNA, 15 bp, Homo sapiens
aaaaatgaggtagta

SEQ ID NO: 981778 - DNA, 15 bp, Homo sapiens
aaaaaatgaggtagt

SEQ ID NO: 981779 - DNA, 15 bp, Homo sapiens
aaaaaaatgaggtag

SEQ ID NO: 981780 - DNA, 15 bp, Homo sapiens
aaaaaaaatgaggta

SEQ ID NO: 981781 - DNA, 15 bp, Homo sapiens
aaaaaaaaatgaggt

SEQ ID NO: 981782 - DNA, 15 bp, Homo sapiens
taaaaaaaaatgagg

SEQ ID NO: 981783 - DNA, 15 bp, Homo sapiens
ataaaaaaaaatgag

SEQ ID NO: 981784 - DNA, 15 bp, Homo sapiens
cataaaaaaaaatga

SEQ ID NO: 981785 - DNA, 15 bp, Homo sapiens
tcataaaaaaaaatg

SEQ ID NO: 981786 - DNA, 15 bp, Homo sapiens
gtcataaaaaaaaat

SEQ ID NO: 981787 - DNA, 15 bp, Homo sapiens
tgtcataaaaaaaaa

SEQ ID NO: 981788 - DNA, 15 bp, Homo sapiens
gtgtcataaaaaaaa

SEQ ID NO: 981789 - DNA, 15 bp, Homo sapiens
agtgtcataaaaaaa

SEQ ID NO: 981790 - DNA, 15 bp, Homo sapiens
aagtgtcataaaaaa

SEQ ID NO: 981791 - DNA, 15 bp, Homo sapiens
gaagtgtcataaaaa

SEQ ID NO: 981792 - DNA, 15 bp, Homo sapiens
tgaagtgtcataaaa

SEQ ID NO: 981793 - DNA, 15 bp, Homo sapiens
ttgaagtgtcataaa

SEQ ID NO: 981794 - DNA, 15 bp, Homo sapiens
cttgaagtgtcataa

SEQ ID NO: 981795 - DNA, 15 bp, Homo sapiens
ccttgaagtgtcata

SEQ ID NO: 981796 - DNA, 15 bp, Homo sapiens
cccttgaagtgtcat

SEQ ID NO: 981797 - DNA, 15 bp, Homo sapiens
acccttgaagtgtca

SEQ ID NO: 981798 - DNA, 15 bp, Homo sapiens
cacccttgaagtgtc

SEQ ID NO: 981799 - DNA, 15 bp, Homo sapiens
gcacccttgaagtgt

SEQ ID NO: 981800 - DNA, 15 bp, Homo sapiens
cgcacccttgaagtg

SEQ ID NO: 981801 - DNA, 15 bp, Homo sapiens
gcgcacccttgaagt

SEQ ID NO: 981802 - DNA, 15 bp, Homo sapiens
agcgcacccttgaag

SEQ ID NO: 981803 - DNA, 15 bp, Homo sapiens
aagcgcacccttgaa

SEQ ID NO: 981804 - DNA, 15 bp, Homo sapiens
taagcgcacccttga

SEQ ID NO: 981805 - DNA, 15 bp, Homo sapiens
ctaagcgcacccttg

SEQ ID NO: 981806 - DNA, 15 bp, Homo sapiens
gctaagcgcaccctt

SEQ ID NO: 981807 - DNA, 15 bp, Homo sapiens
agctaagcgcaccct

SEQ ID NO: 981808 - DNA, 15 bp, Homo sapiens
aagctaagcgcaccc

SEQ ID NO: 981809 - DNA, 15 bp, Homo sapiens
gaagctaagcgcacc

SEQ ID NO: 981810 - DNA, 15 bp, Homo sapiens
tgaagctaagcgcac

SEQ ID NO: 981811 - DNA, 15 bp, Homo sapiens
atgaagctaagcgca

SEQ ID NO: 981812 - DNA, 15 bp, Homo sapiens
gatgaagctaagcgc

SEQ ID NO: 981813 - DNA, 15 bp, Homo sapiens
tgatgaagctaagcg

SEQ ID NO: 981814 - DNA, 15 bp, Homo sapiens
gtgatgaagctaagc

SEQ ID NO: 981815 - DNA, 15 bp, Homo sapiens
agtgatgaagctaag

SEQ ID NO: 981816 - DNA, 15 bp, Homo sapiens
gagtgatgaagctaa

SEQ ID NO: 981817 - DNA, 15 bp, Homo sapiens
ggagtgatgaagcta

SEQ ID NO: 981818 - DNA, 15 bp, Homo sapiens
aggagtgatgaagct

SEQ ID NO: 981819 - DNA, 15 bp, Homo sapiens
aaggagtgatgaagc

SEQ ID NO: 981820 - DNA, 15 bp, Homo sapiens
gaaggagtgatgaag

SEQ ID NO: 981821 - DNA, 15 bp, Homo sapiens
cgaaggagtgatgaa

SEQ ID NO: 981822 - DNA, 15 bp, Homo sapiens
acgaaggagtgatga

SEQ ID NO: 981823 - DNA, 15 bp, Homo sapiens
aacgaaggagtgatg

SEQ ID NO: 981824 - DNA, 15 bp, Homo sapiens
caacgaaggagtgat

SEQ ID NO: 981825 - DNA, 15 bp, Homo sapiens
gcaacgaaggagtga

SEQ ID NO: 981826 - DNA, 15 bp, Homo sapiens
ggcaacgaaggagtg

SEQ ID NO: 981827 - DNA, 15 bp, Homo sapiens
tggcaacgaaggagt

SEQ ID NO: 981828 - DNA, 15 bp, Homo sapiens
ttggcaacgaaggag

SEQ ID NO: 981829 - DNA, 15 bp, Homo sapiens
tttggcaacgaagga

SEQ ID NO: 981830 - DNA, 15 bp, Homo sapiens
ttttggcaacgaagg

SEQ ID NO: 981831 - DNA, 15 bp, Homo sapiens
cttttggcaacgaag

SEQ ID NO: 981832 - DNA, 15 bp, Homo sapiens
gcttttggcaacgaa

SEQ ID NO: 981833 - DNA, 15 bp, Homo sapiens
agcttttggcaacga

SEQ ID NO: 981834 - DNA, 15 bp, Homo sapiens
aagcttttggcaacg

SEQ ID NO: 981835 - DNA, 15 bp, Homo sapiens
aaagcttttggcaac

SEQ ID NO: 981836 - DNA, 15 bp, Homo sapiens
caaagcttttggcaa

SEQ ID NO: 981837 - DNA, 15 bp, Homo sapiens
acaaagcttttggca

SEQ ID NO: 981838 - DNA, 15 bp, Homo sapiens
cacaaagcttttggc

SEQ ID NO: 981839 - DNA, 15 bp, Homo sapiens
tcacaaagcttttgg

SEQ ID NO: 981840 - DNA, 15 bp, Homo sapiens
gtcacaaagcttttg

SEQ ID NO: 981841 - DNA, 15 bp, Homo sapiens
ggtcacaaagctttt

SEQ ID NO: 981842 - DNA, 15 bp, Homo sapiens
tggtcacaaagcttt

SEQ ID NO: 981843 - DNA, 15 bp, Homo sapiens
ttggtcacaaagctt

SEQ ID NO: 981844 - DNA, 15 bp, Homo sapiens
tttggtcacaaagct

SEQ ID NO: 981845 - DNA, 15 bp, Homo sapiens
ttttggtcacaaagc

SEQ ID NO: 981846 - DNA, 15 bp, Homo sapiens
tttttggtcacaaag

SEQ ID NO: 981847 - DNA, 15 bp, Homo sapiens
gtttttggtcacaaa

SEQ ID NO: 981848 - DNA, 15 bp, Homo sapiens
tgtttttggtcacaa

SEQ ID NO: 981849 - DNA, 15 bp, Homo sapiens
ttgtttttggtcaca

SEQ ID NO: 981850 - DNA, 15 bp, Homo sapiens
attgtttttggtcac

SEQ ID NO: 981851 - DNA, 15 bp, Homo sapiens
aattgtttttggtca

SEQ ID NO: 981852 - DNA, 15 bp, Homo sapiens
taattgtttttggtc

SEQ ID NO: 981853 - DNA, 15 bp, Homo sapiens
ttaattgtttttggt

SEQ ID NO: 981854 - DNA, 15 bp, Homo sapiens
cttaattgtttttgg

SEQ ID NO: 981855 - DNA, 15 bp, Homo sapiens
gcttaattgtttttg

SEQ ID NO: 981856 - DNA, 15 bp, Homo sapiens
tgcttaattgttttt

SEQ ID NO: 981857 - DNA, 15 bp, Homo sapiens
ctgcttaattgtttt

SEQ ID NO: 981858 - DNA, 15 bp, Homo sapiens
tctgcttaattgttt

SEQ ID NO: 981859 - DNA, 15 bp, Homo sapiens
atctgcttaattgtt

SEQ ID NO: 981860 - DNA, 15 bp, Homo sapiens
aatctgcttaattgt

SEQ ID NO: 981861 - DNA, 15 bp, Homo sapiens
gaatctgcttaattg

SEQ ID NO: 981862 - DNA, 15 bp, Homo sapiens
ggaatctgcttaatt

SEQ ID NO: 981863 - DNA, 15 bp, Homo sapiens
aggaatctgcttaat

SEQ ID NO: 981864 - DNA, 15 bp, Homo sapiens
caggaatctgcttaa

SEQ ID NO: 981865 - DNA, 15 bp, Homo sapiens
tcaggaatctgctta

SEQ ID NO: 981866 - DNA, 15 bp, Homo sapiens
ctcaggaatctgctt

SEQ ID NO: 981867 - DNA, 15 bp, Homo sapiens
actcaggaatctgct

SEQ ID NO: 981868 - DNA, 15 bp, Homo sapiens
gactcaggaatctgc

SEQ ID NO: 981869 - DNA, 15 bp, Homo sapiens
tgactcaggaatctg

SEQ ID NO: 981870 - DNA, 15 bp, Homo sapiens
gtgactcaggaatct

SEQ ID NO: 981871 - DNA, 15 bp, Homo sapiens
agtgactcaggaatc

SEQ ID NO: 981872 - DNA, 15 bp, Homo sapiens
tagtgactcaggaat

SEQ ID NO: 981873 - DNA, 15 bp, Homo sapiens
ttagtgactcaggaa

SEQ ID NO: 981874 - DNA, 15 bp, Homo sapiens
tttagtgactcagga

SEQ ID NO: 981875 - DNA, 15 bp, Homo sapiens
atttagtgactcagg

SEQ ID NO: 981876 - DNA, 15 bp, Homo sapiens
catttagtgactcag

SEQ ID NO: 981877 - DNA, 15 bp, Homo sapiens
tcatttagtgactca

SEQ ID NO: 981878 - DNA, 15 bp, Homo sapiens
gtcatttagtgactc

SEQ ID NO: 981879 - DNA, 15 bp, Homo sapiens
tgtcatttagtgact

SEQ ID NO: 981880 - DNA, 15 bp, Homo sapiens
gtgtcatttagtgac

SEQ ID NO: 981881 - DNA, 15 bp, Homo sapiens
tgtgtcatttagtga

SEQ ID NO: 981882 - DNA, 15 bp, Homo sapiens
atgtgtcatttagtg

SEQ ID NO: 981883 - DNA, 15 bp, Homo sapiens
tatgtgtcatttagt

SEQ ID NO: 981884 - DNA, 15 bp, Homo sapiens
ttatgtgtcatttag

SEQ ID NO: 981885 - DNA, 15 bp, Homo sapiens
gttatgtgtcattta

SEQ ID NO: 981886 - DNA, 15 bp, Homo sapiens
ggttatgtgtcattt

SEQ ID NO: 981887 - DNA, 15 bp, Homo sapiens
tggttatgtgtcatt

SEQ ID NO: 981888 - DNA, 15 bp, Homo sapiens
ctggttatgtgtcat

SEQ ID NO: 981889 - DNA, 15 bp, Homo sapiens
tctggttatgtgtca

SEQ ID NO: 981890 - DNA, 15 bp, Homo sapiens
ctctggttatgtgtc

SEQ ID NO: 981891 - DNA, 15 bp, Homo sapiens
actctggttatgtgt

SEQ ID NO: 981892 - DNA, 15 bp, Homo sapiens
aactctggttatgtg

SEQ ID NO: 981893 - DNA, 15 bp, Homo sapiens
caactctggttatgt

SEQ ID NO: 981894 - DNA, 15 bp, Homo sapiens
tcaactctggttatg

SEQ ID NO: 981895 - DNA, 15 bp, Homo sapiens
ctcaactctggttat

SEQ ID NO: 981896 - DNA, 15 bp, Homo sapiens
tctcaactctggtta

SEQ ID NO: 981897 - DNA, 15 bp, Homo sapiens
gtctcaactctggtt

SEQ ID NO: 981898 - DNA, 15 bp, Homo sapiens
agtctcaactctggt

SEQ ID NO: 981899 - DNA, 15 bp, Homo sapiens
aagtctcaactctgg

SEQ ID NO: 981900 - DNA, 15 bp, Homo sapiens
taagtctcaactctg

SEQ ID NO: 981901 - DNA, 15 bp, Homo sapiens
ctaagtctcaactct

SEQ ID NO: 981902 - DNA, 15 bp, Homo sapiens
cctaagtctcaactc

SEQ ID NO: 981903 - DNA, 15 bp, Homo sapiens
tcctaagtctcaact

SEQ ID NO: 981904 - DNA, 15 bp, Homo sapiens
ttcctaagtctcaac

SEQ ID NO: 981905 - DNA, 15 bp, Homo sapiens
gttcctaagtctcaa

SEQ ID NO: 981906 - DNA, 15 bp, Homo sapiens
agttcctaagtctca

SEQ ID NO: 981907 - DNA, 15 bp, Homo sapiens
aagttcctaagtctc

SEQ ID NO: 981908 - DNA, 15 bp, Homo sapiens
aaagttcctaagtct

SEQ ID NO: 981909 - DNA, 15 bp, Homo sapiens
aaaagttcctaagtc

SEQ ID NO: 981910 - DNA, 15 bp, Homo sapiens
taaaagttcctaagt

SEQ ID NO: 981911 - DNA, 15 bp, Homo sapiens
ctaaaagttcctaag

SEQ ID NO: 981912 - DNA, 15 bp, Homo sapiens
actaaaagttcctaa

SEQ ID NO: 981913 - DNA, 15 bp, Homo sapiens
cactaaaagttccta

SEQ ID NO: 981914 - DNA, 15 bp, Homo sapiens
gcactaaaagttcct

SEQ ID NO: 981915 - DNA, 15 bp, Homo sapiens
ggcactaaaagttcc

SEQ ID NO: 981916 - DNA, 15 bp, Homo sapiens
tggcactaaaagttc

SEQ ID NO: 981917 - DNA, 15 bp, Homo sapiens
atggcactaaaagtt

SEQ ID NO: 981918 - DNA, 15 bp, Homo sapiens
catggcactaaaagt

SEQ ID NO: 981919 - DNA, 15 bp, Homo sapiens
gcatggcactaaaag

SEQ ID NO: 981920 - DNA, 15 bp, Homo sapiens
agcatggcactaaaa

SEQ ID NO: 981921 - DNA, 15 bp, Homo sapiens
tagcatggcactaaa

SEQ ID NO: 981922 - DNA, 15 bp, Homo sapiens
ttagcatggcactaa

SEQ ID NO: 981923 - DNA, 15 bp, Homo sapiens
cttagcatggcacta

SEQ ID NO: 981924 - DNA, 15 bp, Homo sapiens
gcttagcatggcact

SEQ ID NO: 981925 - DNA, 15 bp, Homo sapiens
ggcttagcatggcac

SEQ ID NO: 981926 - DNA, 15 bp, Homo sapiens
gggcttagcatggca

SEQ ID NO: 981927 - DNA, 15 bp, Homo sapiens
tgggcttagcatggc

SEQ ID NO: 981928 - DNA, 15 bp, Homo sapiens
gtgggcttagcatgg

SEQ ID NO: 981929 - DNA, 15 bp, Homo sapiens
tgtgggcttagcatg

SEQ ID NO: 981930 - DNA, 15 bp, Homo sapiens
ctgtgggcttagcat

SEQ ID NO: 981931 - DNA, 15 bp, Homo sapiens
cctgtgggcttagca

SEQ ID NO: 981932 - DNA, 15 bp, Homo sapiens
ccctgtgggcttagc

SEQ ID NO: 981933 - DNA, 15 bp, Homo sapiens
tccctgtgggcttag

SEQ ID NO: 981934 - DNA, 15 bp, Homo sapiens
gtccctgtgggctta

SEQ ID NO: 981935 - DNA, 15 bp, Homo sapiens
tgtccctgtgggctt

SEQ ID NO: 981936 - DNA, 15 bp, Homo sapiens
gtgtccctgtgggct

SEQ ID NO: 981937 - DNA, 15 bp, Homo sapiens
tgtgtccctgtgggc

SEQ ID NO: 981938 - DNA, 15 bp, Homo sapiens
ttgtgtccctgtggg

SEQ ID NO: 981939 - DNA, 15 bp, Homo sapiens
gttgtgtccctgtgg

SEQ ID NO: 981940 - DNA, 15 bp, Homo sapiens
tgttgtgtccctgtg

SEQ ID NO: 981941 - DNA, 15 bp, Homo sapiens
ttgttgtgtccctgt

SEQ ID NO: 981942 - DNA, 15 bp, Homo sapiens
tttgttgtgtccctg

SEQ ID NO: 981943 - DNA, 15 bp, Homo sapiens
atttgttgtgtccct

SEQ ID NO: 981944 - DNA, 15 bp, Homo sapiens
tatttgttgtgtccc

SEQ ID NO: 981945 - DNA, 15 bp, Homo sapiens
ctatttgttgtgtcc

SEQ ID NO: 981946 - DNA, 15 bp, Homo sapiens
gctatttgttgtgtc

SEQ ID NO: 981947 - DNA, 15 bp, Homo sapiens
tgctatttgttgtgt

SEQ ID NO: 981948 - DNA, 15 bp, Homo sapiens
atgctatttgttgtg

SEQ ID NO: 981949 - DNA, 15 bp, Homo sapiens
aatgctatttgttgt

SEQ ID NO: 981950 - DNA, 15 bp, Homo sapiens
aaatgctatttgttg

SEQ ID NO: 981951 - DNA, 15 bp, Homo sapiens
aaaatgctatttgtt

SEQ ID NO: 981952 - DNA, 15 bp, Homo sapiens
taaaatgctatttgt

SEQ ID NO: 981953 - DNA, 15 bp, Homo sapiens
gtaaaatgctatttg

SEQ ID NO: 981954 - DNA, 15 bp, Homo sapiens
tgtaaaatgctattt

SEQ ID NO: 981955 - DNA, 15 bp, Homo sapiens
ttgtaaaatgctatt

SEQ ID NO: 981956 - DNA, 15 bp, Homo sapiens
tttgtaaaatgctat

SEQ ID NO: 981957 - DNA, 15 bp, Homo sapiens
ctttgtaaaatgcta

SEQ ID NO: 981958 - DNA, 15 bp, Homo sapiens
cctttgtaaaatgct

SEQ ID NO: 981959 - DNA, 15 bp, Homo sapiens
gcctttgtaaaatgc

SEQ ID NO: 981960 - DNA, 15 bp, Homo sapiens
tgcctttgtaaaatg

SEQ ID NO: 981961 - DNA, 15 bp, Homo sapiens
ttgcctttgtaaaat

SEQ ID NO: 981962 - DNA, 15 bp, Homo sapiens
tttgcctttgtaaaa

SEQ ID NO: 981963 - DNA, 15 bp, Homo sapiens
ctttgcctttgtaaa

SEQ ID NO: 981964 - DNA, 15 bp, Homo sapiens
tctttgcctttgtaa

SEQ ID NO: 981965 - DNA, 15 bp, Homo sapiens
ttctttgcctttgta

SEQ ID NO: 981966 - DNA, 15 bp, Homo sapiens
attctttgcctttgt

SEQ ID NO: 981967 - DNA, 15 bp, Homo sapiens
aattctttgcctttg

SEQ ID NO: 981968 - DNA, 15 bp, Homo sapiens
caattctttgccttt

SEQ ID NO: 981969 - DNA, 15 bp, Homo sapiens
acaattctttgcctt

SEQ ID NO: 981970 - DNA, 15 bp, Homo sapiens
cacaattctttgcct

SEQ ID NO: 981971 - DNA, 15 bp, Homo sapiens
tcacaattctttgcc

SEQ ID NO: 981972 - DNA, 15 bp, Homo sapiens
gtcacaattctttgc

SEQ ID NO: 981973 - DNA, 15 bp, Homo sapiens
tgtcacaattctttg

SEQ ID NO: 981974 - DNA, 15 bp, Homo sapiens
gtgtcacaattcttt

SEQ ID NO: 981975 - DNA, 15 bp, Homo sapiens
agtgtcacaattctt

SEQ ID NO: 981976 - DNA, 15 bp, Homo sapiens
aagtgtcacaattct

SEQ ID NO: 981977 - DNA, 15 bp, Homo sapiens
caagtgtcacaattc

SEQ ID NO: 981978 - DNA, 15 bp, Homo sapiens
tcaagtgtcacaatt

SEQ ID NO: 981979 - DNA, 15 bp, Homo sapiens
ctcaagtgtcacaat

SEQ ID NO: 981980 - DNA, 15 bp, Homo sapiens
tctcaagtgtcacaa

SEQ ID NO: 981981 - DNA, 15 bp, Homo sapiens
atctcaagtgtcaca

SEQ ID NO: 981982 - DNA, 15 bp, Homo sapiens
aatctcaagtgtcac

SEQ ID NO: 981983 - DNA, 15 bp, Homo sapiens
aaatctcaagtgtca

SEQ ID NO: 981984 - DNA, 15 bp, Homo sapiens
taaatctcaagtgtc

SEQ ID NO: 981985 - DNA, 15 bp, Homo sapiens
ctaaatctcaagtgt

SEQ ID NO: 981986 - DNA, 15 bp, Homo sapiens
gctaaatctcaagtg

SEQ ID NO: 981987 - DNA, 15 bp, Homo sapiens
agctaaatctcaagt

SEQ ID NO: 981988 - DNA, 15 bp, Homo sapiens
aagctaaatctcaag

SEQ ID NO: 981989 - DNA, 15 bp, Homo sapiens
caagctaaatctcaa

SEQ ID NO: 981990 - DNA, 15 bp, Homo sapiens
acaagctaaatctca

SEQ ID NO: 981991 - DNA, 15 bp, Homo sapiens
aacaagctaaatctc

SEQ ID NO: 981992 - DNA, 15 bp, Homo sapiens
caacaagctaaatct

SEQ ID NO: 981993 - DNA, 15 bp, Homo sapiens
tcaacaagctaaatc

SEQ ID NO: 981994 - DNA, 15 bp, Homo sapiens
atcaacaagctaaat

SEQ ID NO: 981995 - DNA, 15 bp, Homo sapiens
gatcaacaagctaaa

SEQ ID NO: 981996 - DNA, 15 bp, Homo sapiens
ggatcaacaagctaa

SEQ ID NO: 981997 - DNA, 15 bp, Homo sapiens
aggatcaacaagcta

SEQ ID NO: 981998 - DNA, 15 bp, Homo sapiens
aaggatcaacaagct

SEQ ID NO: 981999 - DNA, 15 bp, Homo sapiens
caaggatcaacaagc

SEQ ID NO: 982000 - DNA, 15 bp, Homo sapiens
acaaggatcaacaag

SEQ ID NO: 982001 - DNA, 15 bp, Homo sapiens
tacaaggatcaacaa

SEQ ID NO: 982002 - DNA, 15 bp, Homo sapiens
ttacaaggatcaaca

SEQ ID NO: 982003 - DNA, 15 bp, Homo sapiens
tttacaaggatcaac

SEQ ID NO: 982004 - DNA, 15 bp, Homo sapiens
ttttacaaggatcaa

SEQ ID NO: 982005 - DNA, 15 bp, Homo sapiens
cttttacaaggatca

SEQ ID NO: 982006 - DNA, 15 bp, Homo sapiens
acttttacaaggatc

SEQ ID NO: 982007 - DNA, 15 bp, Homo sapiens
aacttttacaaggat

SEQ ID NO: 982008 - DNA, 15 bp, Homo sapiens
aaacttttacaagga

SEQ ID NO: 982009 - DNA, 15 bp, Homo sapiens
aaaacttttacaagg

SEQ ID NO: 982010 - DNA, 15 bp, Homo sapiens
gaaaacttttacaag

SEQ ID NO: 982011 - DNA, 15 bp, Homo sapiens
agaaaacttttacaa

SEQ ID NO: 982012 - DNA, 15 bp, Homo sapiens
aagaaaacttttaca

SEQ ID NO: 982013 - DNA, 15 bp, Homo sapiens
aaagaaaacttttac

SEQ ID NO: 982014 - DNA, 15 bp, Homo sapiens
aaaagaaaactttta

SEQ ID NO: 982015 - DNA, 15 bp, Homo sapiens
aaaaagaaaactttt

SEQ ID NO: 982016 - DNA, 15 bp, Homo sapiens
taaaaagaaaacttt

SEQ ID NO: 982017 - DNA, 15 bp, Homo sapiens
ctaaaaagaaaactt

SEQ ID NO: 982018 - DNA, 15 bp, Homo sapiens
cctaaaaagaaaact

SEQ ID NO: 982019 - DNA, 15 bp, Homo sapiens
gcctaaaaagaaaac

SEQ ID NO: 982020 - DNA, 15 bp, Homo sapiens
tgcctaaaaagaaaa

SEQ ID NO: 982021 - DNA, 15 bp, Homo sapiens
atgcctaaaaagaaa

SEQ ID NO: 982022 - DNA, 15 bp, Homo sapiens
tatgcctaaaaagaa

SEQ ID NO: 982023 - DNA, 15 bp, Homo sapiens
ttatgcctaaaaaga

SEQ ID NO: 982024 - DNA, 15 bp, Homo sapiens
attatgcctaaaaag

SEQ ID NO: 982025 - DNA, 15 bp, Homo sapiens
aattatgcctaaaaa

SEQ ID NO: 982026 - DNA, 15 bp, Homo sapiens
caattatgcctaaaa

SEQ ID NO: 982027 - DNA, 15 bp, Homo sapiens
tcaattatgcctaaa

SEQ ID NO: 982028 - DNA, 15 bp, Homo sapiens
ctcaattatgcctaa

SEQ ID NO: 982029 - DNA, 15 bp, Homo sapiens
actcaattatgccta

SEQ ID NO: 982030 - DNA, 15 bp, Homo sapiens
aactcaattatgcct

SEQ ID NO: 982031 - DNA, 15 bp, Homo sapiens
aaactcaattatgcc

SEQ ID NO: 982032 - DNA, 15 bp, Homo sapiens
aaaactcaattatgc

SEQ ID NO: 982033 - DNA, 15 bp, Homo sapiens
taaaactcaattatg

SEQ ID NO: 982034 - DNA, 15 bp, Homo sapiens
ctaaaactcaattat

SEQ ID NO: 982035 - DNA, 15 bp, Homo sapiens
tctaaaactcaatta

SEQ ID NO: 982036 - DNA, 15 bp, Homo sapiens
atctaaaactcaatt

SEQ ID NO: 982037 - DNA, 15 bp, Homo sapiens
gatctaaaactcaat

SEQ ID NO: 982038 - DNA, 15 bp, Homo sapiens
tgatctaaaactcaa

SEQ ID NO: 982039 - DNA, 15 bp, Homo sapiens
atgatctaaaactca

SEQ ID NO: 982040 - DNA, 15 bp, Homo sapiens
tatgatctaaaactc

SEQ ID NO: 982041 - DNA, 15 bp, Homo sapiens
ctatgatctaaaact

SEQ ID NO: 982042 - DNA, 15 bp, Homo sapiens
actatgatctaaaac

SEQ ID NO: 982043 - DNA, 15 bp, Homo sapiens
tactatgatctaaaa

SEQ ID NO: 982044 - DNA, 15 bp, Homo sapiens
gtactatgatctaaa

SEQ ID NO: 982045 - DNA, 15 bp, Homo sapiens
agtactatgatctaa

SEQ ID NO: 982046 - DNA, 15 bp, Homo sapiens
gagtactatgatcta

SEQ ID NO: 982047 - DNA, 15 bp, Homo sapiens
tgagtactatgatct

SEQ ID NO: 982048 - DNA, 15 bp, Homo sapiens
gtgagtactatgatc

SEQ ID NO: 982049 - DNA, 15 bp, Homo sapiens
agtgagtactatgat

SEQ ID NO: 982050 - DNA, 15 bp, Homo sapiens
tagtgagtactatga

SEQ ID NO: 982051 - DNA, 15 bp, Homo sapiens
atagtgagtactatg

SEQ ID NO: 982052 - DNA, 15 bp, Homo sapiens
aatagtgagtactat

SEQ ID NO: 982053 - DNA, 15 bp, Homo sapiens
taatagtgagtacta

SEQ ID NO: 982054 - DNA, 15 bp, Homo sapiens
gtaatagtgagtact

SEQ ID NO: 982055 - DNA, 15 bp, Homo sapiens
agtaatagtgagtac

SEQ ID NO: 982056 - DNA, 15 bp, Homo sapiens
aagtaatagtgagta

SEQ ID NO: 982057 - DNA, 15 bp, Homo sapiens
taagtaatagtgagt

SEQ ID NO: 982058 - DNA, 15 bp, Homo sapiens
ctaagtaatagtgag

SEQ ID NO: 982059 - DNA, 15 bp, Homo sapiens
actaagtaatagtga

SEQ ID NO: 982060 - DNA, 15 bp, Homo sapiens
tactaagtaatagtg

SEQ ID NO: 982061 - DNA, 15 bp, Homo sapiens
ttactaagtaatagt

SEQ ID NO: 982062 - DNA, 15 bp, Homo sapiens
attactaagtaatag

SEQ ID NO: 982063 - DNA, 15 bp, Homo sapiens
tattactaagtaata

SEQ ID NO: 982064 - DNA, 15 bp, Homo sapiens
ttattactaagtaat

SEQ ID NO: 982065 - DNA, 15 bp, Homo sapiens
attattactaagtaa

SEQ ID NO: 982066 - DNA, 15 bp, Homo sapiens
aattattactaagta

SEQ ID NO: 982067 - DNA, 15 bp, Homo sapiens
aaattattactaagt

SEQ ID NO: 982068 - DNA, 15 bp, Homo sapiens
aaaattattactaag

SEQ ID NO: 982069 - DNA, 15 bp, Homo sapiens
aaaaattattactaa

SEQ ID NO: 982070 - DNA, 15 bp, Homo sapiens
aaaaaattattacta

SEQ ID NO: 982071 - DNA, 15 bp, Homo sapiens
aaaaaaattattact

SEQ ID NO: 982072 - DNA, 15 bp, Homo sapiens
gaaaaaaattattac

SEQ ID NO: 982073 - DNA, 15 bp, Homo sapiens
agaaaaaaattatta

SEQ ID NO: 982074 - DNA, 15 bp, Homo sapiens
cagaaaaaaattatt

SEQ ID NO: 982075 - DNA, 15 bp, Homo sapiens
tcagaaaaaaattat

SEQ ID NO: 982076 - DNA, 15 bp, Homo sapiens
atcagaaaaaaatta

SEQ ID NO: 982077 - DNA, 15 bp, Homo sapiens
tatcagaaaaaaatt

SEQ ID NO: 982078 - DNA, 15 bp, Homo sapiens
ctatcagaaaaaaat

SEQ ID NO: 982079 - DNA, 15 bp, Homo sapiens
tctatcagaaaaaaa

SEQ ID NO: 982080 - DNA, 15 bp, Homo sapiens
ttctatcagaaaaaa

SEQ ID NO: 982081 - DNA, 15 bp, Homo sapiens
tttctatcagaaaaa

SEQ ID NO: 982082 - DNA, 15 bp, Homo sapiens
atttctatcagaaaa

SEQ ID NO: 982083 - DNA, 15 bp, Homo sapiens
tatttctatcagaaa

SEQ ID NO: 982084 - DNA, 15 bp, Homo sapiens
gtatttctatcagaa

SEQ ID NO: 982085 - DNA, 15 bp, Homo sapiens
tgtatttctatcaga

SEQ ID NO: 982086 - DNA, 15 bp, Homo sapiens
ctgtatttctatcag

SEQ ID NO: 982087 - DNA, 15 bp, Homo sapiens
actgtatttctatca

SEQ ID NO: 982088 - DNA, 15 bp, Homo sapiens
cactgtatttctatc

SEQ ID NO: 982089 - DNA, 15 bp, Homo sapiens
acactgtatttctat

SEQ ID NO: 982090 - DNA, 15 bp, Homo sapiens
tacactgtatttcta

SEQ ID NO: 982091 - DNA, 15 bp, Homo sapiens
ttacactgtatttct

SEQ ID NO: 982092 - DNA, 15 bp, Homo sapiens
gttacactgtatttc

SEQ ID NO: 982093 - DNA, 15 bp, Homo sapiens
tgttacactgtattt

SEQ ID NO: 982094 - DNA, 15 bp, Homo sapiens
ctgttacactgtatt

SEQ ID NO: 982095 - DNA, 15 bp, Homo sapiens
cctgttacactgtat

SEQ ID NO: 982096 - DNA, 15 bp, Homo sapiens
gcctgttacactgta

SEQ ID NO: 982097 - DNA, 15 bp, Homo sapiens
ggcctgttacactgt

SEQ ID NO: 982098 - DNA, 15 bp, Homo sapiens
cggcctgttacactg

SEQ ID NO: 982099 - DNA, 15 bp, Homo sapiens
ccggcctgttacact

SEQ ID NO: 982100 - DNA, 15 bp, Homo sapiens
cccggcctgttacac

SEQ ID NO: 982101 - DNA, 15 bp, Homo sapiens
gcccggcctgttaca

SEQ ID NO: 982102 - DNA, 15 bp, Homo sapiens
cgcccggcctgttac

SEQ ID NO: 982103 - DNA, 15 bp, Homo sapiens
gcgcccggcctgtta

SEQ ID NO: 982104 - DNA, 15 bp, Homo sapiens
tgcgcccggcctgtt

SEQ ID NO: 982105 - DNA, 15 bp, Homo sapiens
ctgcgcccggcctgt

SEQ ID NO: 982106 - DNA, 15 bp, Homo sapiens
actgcgcccggcctg

SEQ ID NO: 982107 - DNA, 15 bp, Homo sapiens
cactgcgcccggcct

SEQ ID NO: 982108 - DNA, 15 bp, Homo sapiens
ccactgcgcccggcc

SEQ ID NO: 982109 - DNA, 15 bp, Homo sapiens
gccactgcgcccggc

SEQ ID NO: 982110 - DNA, 15 bp, Homo sapiens
agccactgcgcccgg

SEQ ID NO: 982111 - DNA, 15 bp, Homo sapiens
gagccactgcgcccg

SEQ ID NO: 982112 - DNA, 15 bp, Homo sapiens
tgagccactgcgccc

SEQ ID NO: 982113 - DNA, 15 bp, Homo sapiens
atgagccactgcgcc

SEQ ID NO: 982114 - DNA, 15 bp, Homo sapiens
catgagccactgcgc

SEQ ID NO: 982115 - DNA, 15 bp, Homo sapiens
gcatgagccactgcg

SEQ ID NO: 982116 - DNA, 15 bp, Homo sapiens
ggcatgagccactgc

SEQ ID NO: 982117 - DNA, 15 bp, Homo sapiens
aggcatgagccactg

SEQ ID NO: 982118 - DNA, 15 bp, Homo sapiens
caggcatgagccact

SEQ ID NO: 982119 - DNA, 15 bp, Homo sapiens
acaggcatgagccac

SEQ ID NO: 982120 - DNA, 15 bp, Homo sapiens
tacaggcatgagcca

SEQ ID NO: 982121 - DNA, 15 bp, Homo sapiens
ttacaggcatgagcc

SEQ ID NO: 982122 - DNA, 15 bp, Homo sapiens
attacaggcatgagc

SEQ ID NO: 982123 - DNA, 15 bp, Homo sapiens
gattacaggcatgag

SEQ ID NO: 982124 - DNA, 15 bp, Homo sapiens
ggattacaggcatga

SEQ ID NO: 982125 - DNA, 15 bp, Homo sapiens
gggattacaggcatg

SEQ ID NO: 982126 - DNA, 15 bp, Homo sapiens
tgggattacaggcat

SEQ ID NO: 982127 - DNA, 15 bp, Homo sapiens
gtgctgggattacag

SEQ ID NO: 982128 - DNA, 15 bp, Homo sapiens
agtgctgggattaca

SEQ ID NO: 982129 - DNA, 15 bp, Homo sapiens
aagtgctgggattac

SEQ ID NO: 982130 - DNA, 15 bp, Homo sapiens
gcctcggcctcccaa

SEQ ID NO: 982131 - DNA, 15 bp, Homo sapiens
cgcctcggcctccca

SEQ ID NO: 982132 - DNA, 15 bp, Homo sapiens
ccgcctcggcctccc

SEQ ID NO: 982133 - DNA, 15 bp, Homo sapiens
cccgcctcggcctcc

SEQ ID NO: 982134 - DNA, 15 bp, Homo sapiens
gcccgcctcggcctc

SEQ ID NO: 982135 - DNA, 15 bp, Homo sapiens
cgcccgcctcggcct

SEQ ID NO: 982136 - DNA, 15 bp, Homo sapiens
ccgcccgcctcggcc

SEQ ID NO: 982137 - DNA, 15 bp, Homo sapiens
tccgcccgcctcggc

SEQ ID NO: 982138 - DNA, 15 bp, Homo sapiens
atccgcccgcctcgg

SEQ ID NO: 982139 - DNA, 15 bp, Homo sapiens
gatccgcccgcctcg

SEQ ID NO: 982140 - DNA, 15 bp, Homo sapiens
tgatccgcccgcctc

SEQ ID NO: 982141 - DNA, 15 bp, Homo sapiens
gtgatccgcccgcct

SEQ ID NO: 982142 - DNA, 15 bp, Homo sapiens
agtgatccgcccgcc

SEQ ID NO: 982143 - DNA, 15 bp, Homo sapiens
aagtgatccgcccgc

SEQ ID NO: 982144 - DNA, 15 bp, Homo sapiens
caagtgatccgcccg

SEQ ID NO: 982145 - DNA, 15 bp, Homo sapiens
tcaagtgatccgccc

SEQ ID NO: 982146 - DNA, 15 bp, Homo sapiens
ctcaagtgatccgcc

SEQ ID NO: 982147 - DNA, 15 bp, Homo sapiens
cctcaagtgatccgc

SEQ ID NO: 982148 - DNA, 15 bp, Homo sapiens
acctcaagtgatccg

SEQ ID NO: 982149 - DNA, 15 bp, Homo sapiens
gacctcaagtgatcc

SEQ ID NO: 982150 - DNA, 15 bp, Homo sapiens
tgacctcaagtgatc

SEQ ID NO: 982151 - DNA, 15 bp, Homo sapiens
ctgacctcaagtgat

SEQ ID NO: 982152 - DNA, 15 bp, Homo sapiens
cctgacctcaagtga

SEQ ID NO: 982153 - DNA, 15 bp, Homo sapiens
tcctgacctcaagtg

SEQ ID NO: 982154 - DNA, 15 bp, Homo sapiens
ctcctgacctcaagt

SEQ ID NO: 982155 - DNA, 15 bp, Homo sapiens
actcctgacctcaag

SEQ ID NO: 982156 - DNA, 15 bp, Homo sapiens
aactcctgacctcaa

SEQ ID NO: 982157 - DNA, 15 bp, Homo sapiens
aaactcctgacctca

SEQ ID NO: 982158 - DNA, 15 bp, Homo sapiens
caaactcctgacctc

SEQ ID NO: 982159 - DNA, 15 bp, Homo sapiens
tcaaactcctgacct

SEQ ID NO: 982160 - DNA, 15 bp, Homo sapiens
ctcaaactcctgacc

SEQ ID NO: 982161 - DNA, 15 bp, Homo sapiens
tctcaaactcctgac

SEQ ID NO: 982162 - DNA, 15 bp, Homo sapiens
gtctcaaactcctga

SEQ ID NO: 982163 - DNA, 15 bp, Homo sapiens
ggtctcaaactcctg

SEQ ID NO: 982164 - DNA, 15 bp, Homo sapiens
tggtctcaaactcct

SEQ ID NO: 982165 - DNA, 15 bp, Homo sapiens
ctggtctcaaactcc

SEQ ID NO: 982166 - DNA, 15 bp, Homo sapiens
gctggtctcaaactc

SEQ ID NO: 982167 - DNA, 15 bp, Homo sapiens
ggctggtctcaaact

SEQ ID NO: 982168 - DNA, 15 bp, Homo sapiens
gggctggtctcaaac

SEQ ID NO: 982169 - DNA, 15 bp, Homo sapiens
cgggctggtctcaaa

SEQ ID NO: 982170 - DNA, 15 bp, Homo sapiens
ccgggctggtctcaa

SEQ ID NO: 982171 - DNA, 15 bp, Homo sapiens
gccgggctggtctca

SEQ ID NO: 982172 - DNA, 15 bp, Homo sapiens
ggccgggctggtctc

SEQ ID NO: 982173 - DNA, 15 bp, Homo sapiens
tggccgggctggtct

SEQ ID NO: 982174 - DNA, 15 bp, Homo sapiens
ttggccgggctggtc

SEQ ID NO: 982175 - DNA, 15 bp, Homo sapiens
gttggccgggctggt

SEQ ID NO: 982176 - DNA, 15 bp, Homo sapiens
tgttggccgggctgg

SEQ ID NO: 982177 - DNA, 15 bp, Homo sapiens
atgttggccgggctg

SEQ ID NO: 982178 - DNA, 15 bp, Homo sapiens
catgttggccgggct

SEQ ID NO: 982179 - DNA, 15 bp, Homo sapiens
ccatgttggccgggc

SEQ ID NO: 982180 - DNA, 15 bp, Homo sapiens
accatgttggccggg

SEQ ID NO: 982181 - DNA, 15 bp, Homo sapiens
caccatgttggccgg

SEQ ID NO: 982182 - DNA, 15 bp, Homo sapiens
tcaccatgttggccg

SEQ ID NO: 982183 - DNA, 15 bp, Homo sapiens
ttcaccatgttggcc

SEQ ID NO: 982184 - DNA, 15 bp, Homo sapiens
tttcaccatgttggc

SEQ ID NO: 982185 - DNA, 15 bp, Homo sapiens
atttcaccatgttgg

SEQ ID NO: 982186 - DNA, 15 bp, Homo sapiens
gatttcaccatgttg

SEQ ID NO: 982187 - DNA, 15 bp, Homo sapiens
ggatttcaccatgtt

SEQ ID NO: 982188 - DNA, 15 bp, Homo sapiens
gggatttcaccatgt

SEQ ID NO: 982189 - DNA, 15 bp, Homo sapiens
tgggatttcaccatg

SEQ ID NO: 982190 - DNA, 15 bp, Homo sapiens
atgggatttcaccat

SEQ ID NO: 982191 - DNA, 15 bp, Homo sapiens
gatgggatttcacca

SEQ ID NO: 982192 - DNA, 15 bp, Homo sapiens
agatgggatttcacc

SEQ ID NO: 982193 - DNA, 15 bp, Homo sapiens
gagatgggatttcac

SEQ ID NO: 982194 - DNA, 15 bp, Homo sapiens
agagatgggatttca

SEQ ID NO: 982195 - DNA, 15 bp, Homo sapiens
tagagatgggatttc

SEQ ID NO: 982196 - DNA, 15 bp, Homo sapiens
gtagagatgggattt

SEQ ID NO: 982197 - DNA, 15 bp, Homo sapiens
agtagagatgggatt

SEQ ID NO: 982198 - DNA, 15 bp, Homo sapiens
tagtagagatgggat

SEQ ID NO: 982199 - DNA, 15 bp, Homo sapiens
ttagtagagatggga

SEQ ID NO: 982200 - DNA, 15 bp, Homo sapiens
tttagtagagatggg

SEQ ID NO: 982201 - DNA, 15 bp, Homo sapiens
ttttagtagagatgg

SEQ ID NO: 982202 - DNA, 15 bp, Homo sapiens
tttttagtagagatg

SEQ ID NO: 982203 - DNA, 15 bp, Homo sapiens
atttttagtagagat

SEQ ID NO: 982204 - DNA, 15 bp, Homo sapiens
ttttttgtattttta

SEQ ID NO: 982205 - DNA, 15 bp, Homo sapiens
attttttgtattttt

SEQ ID NO: 982206 - DNA, 15 bp, Homo sapiens
aattttttgtatttt

SEQ ID NO: 982207 - DNA, 15 bp, Homo sapiens
taattttttgtattt

SEQ ID NO: 982208 - DNA, 15 bp, Homo sapiens
ctaattttttgtatt

SEQ ID NO: 982209 - DNA, 15 bp, Homo sapiens
gctaattttttgtat

SEQ ID NO: 982210 - DNA, 15 bp, Homo sapiens
ggctaattttttgta

SEQ ID NO: 982211 - DNA, 15 bp, Homo sapiens
tggctaattttttgt

SEQ ID NO: 982212 - DNA, 15 bp, Homo sapiens
ctggctaattttttg

SEQ ID NO: 982213 - DNA, 15 bp, Homo sapiens
cctggctaatttttt

SEQ ID NO: 982214 - DNA, 15 bp, Homo sapiens
acctggctaattttt

SEQ ID NO: 982215 - DNA, 15 bp, Homo sapiens
cacctggctaatttt

SEQ ID NO: 982216 - DNA, 15 bp, Homo sapiens
acacctggctaattt

SEQ ID NO: 982217 - DNA, 15 bp, Homo sapiens
cacacctggctaatt

SEQ ID NO: 982218 - DNA, 15 bp, Homo sapiens
ccacacctggctaat

SEQ ID NO: 982219 - DNA, 15 bp, Homo sapiens
accacacctggctaa

SEQ ID NO: 982220 - DNA, 15 bp, Homo sapiens
gaccacacctggcta

SEQ ID NO: 982221 - DNA, 15 bp, Homo sapiens
cgaccacacctggct

SEQ ID NO: 982222 - DNA, 15 bp, Homo sapiens
acgaccacacctggc

SEQ ID NO: 982223 - DNA, 15 bp, Homo sapiens
cacgaccacacctgg

SEQ ID NO: 982224 - DNA, 15 bp, Homo sapiens
ccacgaccacacctg

SEQ ID NO: 982225 - DNA, 15 bp, Homo sapiens
tccacgaccacacct

SEQ ID NO: 982226 - DNA, 15 bp, Homo sapiens
atccacgaccacacc

SEQ ID NO: 982227 - DNA, 15 bp, Homo sapiens
aatccacgaccacac

SEQ ID NO: 982228 - DNA, 15 bp, Homo sapiens
gaatccacgaccaca

SEQ ID NO: 982229 - DNA, 15 bp, Homo sapiens
ggaatccacgaccac

SEQ ID NO: 982230 - DNA, 15 bp, Homo sapiens
aggaatccacgacca

SEQ ID NO: 982231 - DNA, 15 bp, Homo sapiens
caggaatccacgacc

SEQ ID NO: 982232 - DNA, 15 bp, Homo sapiens
acaggaatccacgac

SEQ ID NO: 982233 - DNA, 15 bp, Homo sapiens
cacaggaatccacga

SEQ ID NO: 982234 - DNA, 15 bp, Homo sapiens
tcacaggaatccacg

SEQ ID NO: 982235 - DNA, 15 bp, Homo sapiens
atcacaggaatccac

SEQ ID NO: 982236 - DNA, 15 bp, Homo sapiens
gatcacaggaatcca

SEQ ID NO: 982237 - DNA, 15 bp, Homo sapiens
ggatcacaggaatcc

SEQ ID NO: 982238 - DNA, 15 bp, Homo sapiens
gggatcacaggaatc

SEQ ID NO: 982239 - DNA, 15 bp, Homo sapiens
tgggatcacaggaat

SEQ ID NO: 982240 - DNA, 15 bp, Homo sapiens
ctgggatcacaggaa

SEQ ID NO: 982241 - DNA, 15 bp, Homo sapiens
gctgggatcacagga

SEQ ID NO: 982242 - DNA, 15 bp, Homo sapiens
agctgggatcacagg

SEQ ID NO: 982243 - DNA, 15 bp, Homo sapiens
tagctgggatcacag

SEQ ID NO: 982244 - DNA, 15 bp, Homo sapiens
gtagctgggatcaca

SEQ ID NO: 982245 - DNA, 15 bp, Homo sapiens
agtagctgggatcac

SEQ ID NO: 982246 - DNA, 15 bp, Homo sapiens
aagtagctgggatca

SEQ ID NO: 982247 - DNA, 15 bp, Homo sapiens
caagtagctgggatc

SEQ ID NO: 982248 - DNA, 15 bp, Homo sapiens
ccaagtagctgggat

SEQ ID NO: 982249 - DNA, 15 bp, Homo sapiens
cccaagtagctggga

SEQ ID NO: 982250 - DNA, 15 bp, Homo sapiens
tcccaagtagctggg

SEQ ID NO: 982251 - DNA, 15 bp, Homo sapiens
ctcccaagtagctgg

SEQ ID NO: 982252 - DNA, 15 bp, Homo sapiens
cctcccaagtagctg

SEQ ID NO: 982253 - DNA, 15 bp, Homo sapiens
ccctcccaagtagct

SEQ ID NO: 982254 - DNA, 15 bp, Homo sapiens
accctcccaagtagc

SEQ ID NO: 982255 - DNA, 15 bp, Homo sapiens
caccctcccaagtag

SEQ ID NO: 982256 - DNA, 15 bp, Homo sapiens
tcaccctcccaagta

SEQ ID NO: 982257 - DNA, 15 bp, Homo sapiens
ctcaccctcccaagt

SEQ ID NO: 982258 - DNA, 15 bp, Homo sapiens
cctcaccctcccaag

SEQ ID NO: 982259 - DNA, 15 bp, Homo sapiens
gcctcaccctcccaa

SEQ ID NO: 982260 - DNA, 15 bp, Homo sapiens
tgcctcaccctccca

SEQ ID NO: 982261 - DNA, 15 bp, Homo sapiens
ctgcctcaccctccc

SEQ ID NO: 982262 - DNA, 15 bp, Homo sapiens
cctgcctcaccctcc

SEQ ID NO: 982263 - DNA, 15 bp, Homo sapiens
tcctgcctcaccctc

SEQ ID NO: 982264 - DNA, 15 bp, Homo sapiens
ctcctgcctcaccct

SEQ ID NO: 982265 - DNA, 15 bp, Homo sapiens
gctcctgcctcaccc

SEQ ID NO: 982266 - DNA, 15 bp, Homo sapiens
tgctcctgcctcacc

SEQ ID NO: 982267 - DNA, 15 bp, Homo sapiens
atgctcctgcctcac

SEQ ID NO: 982268 - DNA, 15 bp, Homo sapiens
gatgctcctgcctca

SEQ ID NO: 982269 - DNA, 15 bp, Homo sapiens
tgatgctcctgcctc

SEQ ID NO: 982270 - DNA, 15 bp, Homo sapiens
ctgatgctcctgcct

SEQ ID NO: 982271 - DNA, 15 bp, Homo sapiens
actgatgctcctgcc

SEQ ID NO: 982272 - DNA, 15 bp, Homo sapiens
aactgatgctcctgc

SEQ ID NO: 982273 - DNA, 15 bp, Homo sapiens
caactgatgctcctg

SEQ ID NO: 982274 - DNA, 15 bp, Homo sapiens
tcaactgatgctcct

SEQ ID NO: 982275 - DNA, 15 bp, Homo sapiens
ttcaactgatgctcc

SEQ ID NO: 982276 - DNA, 15 bp, Homo sapiens
gttcaactgatgctc

SEQ ID NO: 982277 - DNA, 15 bp, Homo sapiens
ggttcaactgatgct

SEQ ID NO: 982278 - DNA, 15 bp, Homo sapiens
gggttcaactgatgc

SEQ ID NO: 982279 - DNA, 15 bp, Homo sapiens
tgggttcaactgatg

SEQ ID NO: 982280 - DNA, 15 bp, Homo sapiens
ctgggttcaactgat

SEQ ID NO: 982281 - DNA, 15 bp, Homo sapiens
cctgggttcaactga

SEQ ID NO: 982282 - DNA, 15 bp, Homo sapiens
tcctgggttcaactg

SEQ ID NO: 982283 - DNA, 15 bp, Homo sapiens
ctcctgggttcaact

SEQ ID NO: 982284 - DNA, 15 bp, Homo sapiens
cctcctgggttcaac

SEQ ID NO: 982285 - DNA, 15 bp, Homo sapiens
gcctcctgggttcaa

SEQ ID NO: 982286 - DNA, 15 bp, Homo sapiens
cgcctcctgggttca

SEQ ID NO: 982287 - DNA, 15 bp, Homo sapiens
ccgcctcctgggttc

SEQ ID NO: 982288 - DNA, 15 bp, Homo sapiens
tccgcctcctgggtt

SEQ ID NO: 982289 - DNA, 15 bp, Homo sapiens
ctccgcctcctgggt

SEQ ID NO: 982290 - DNA, 15 bp, Homo sapiens
cctccgcctcctggg

SEQ ID NO: 982291 - DNA, 15 bp, Homo sapiens
acctccgcctcctgg

SEQ ID NO: 982292 - DNA, 15 bp, Homo sapiens
aacctccgcctcctg

SEQ ID NO: 982293 - DNA, 15 bp, Homo sapiens
caacctccgcctcct

SEQ ID NO: 982294 - DNA, 15 bp, Homo sapiens
gcaacctccgcctcc

SEQ ID NO: 982295 - DNA, 15 bp, Homo sapiens
tgcaacctccgcctc

SEQ ID NO: 982296 - DNA, 15 bp, Homo sapiens
ctgcaacctccgcct

SEQ ID NO: 982297 - DNA, 15 bp, Homo sapiens
actgcaacctccgcc

SEQ ID NO: 982298 - DNA, 15 bp, Homo sapiens
cactgcaacctccgc

SEQ ID NO: 982299 - DNA, 15 bp, Homo sapiens
tcactgcaacctccg

SEQ ID NO: 982300 - DNA, 15 bp, Homo sapiens
ctcactgcaacctcc

SEQ ID NO: 982301 - DNA, 15 bp, Homo sapiens
tggctcactgcaacc

SEQ ID NO: 982302 - DNA, 15 bp, Homo sapiens
ttggctcactgcaac

SEQ ID NO: 982303 - DNA, 15 bp, Homo sapiens
cttggctcactgcaa

SEQ ID NO: 982304 - DNA, 15 bp, Homo sapiens
tcttggctcactgca

SEQ ID NO: 982305 - DNA, 15 bp, Homo sapiens
atcttggctcactgc

SEQ ID NO: 982306 - DNA, 15 bp, Homo sapiens
catcttggctcactg

SEQ ID NO: 982307 - DNA, 15 bp, Homo sapiens
ccatcttggctcact

SEQ ID NO: 982308 - DNA, 15 bp, Homo sapiens
accatcttggctcac

SEQ ID NO: 982309 - DNA, 15 bp, Homo sapiens
caccatcttggctca

SEQ ID NO: 982310 - DNA, 15 bp, Homo sapiens
gcaccatcttggctc

SEQ ID NO: 982311 - DNA, 15 bp, Homo sapiens
ggcaccatcttggct

SEQ ID NO: 982312 - DNA, 15 bp, Homo sapiens
tggcaccatcttggc

SEQ ID NO: 982313 - DNA, 15 bp, Homo sapiens
atggcaccatcttgg

SEQ ID NO: 982314 - DNA, 15 bp, Homo sapiens
aatggcaccatcttg

SEQ ID NO: 982315 - DNA, 15 bp, Homo sapiens
caatggcaccatctt

SEQ ID NO: 982316 - DNA, 15 bp, Homo sapiens
gcaatggcaccatct

SEQ ID NO: 982317 - DNA, 15 bp, Homo sapiens
tgcaatggcaccatc

SEQ ID NO: 982318 - DNA, 15 bp, Homo sapiens
gtgcaatggcaccat

SEQ ID NO: 982319 - DNA, 15 bp, Homo sapiens
agtgcaatggcacca

SEQ ID NO: 982320 - DNA, 15 bp, Homo sapiens
gagtgcaatggcacc

SEQ ID NO: 982321 - DNA, 15 bp, Homo sapiens
ggagtgcaatggcac

SEQ ID NO: 982322 - DNA, 15 bp, Homo sapiens
tggagtgcaatggca

SEQ ID NO: 982323 - DNA, 15 bp, Homo sapiens
ctggagtgcaatggc

SEQ ID NO: 982324 - DNA, 15 bp, Homo sapiens
gctggagtgcaatgg

SEQ ID NO: 982325 - DNA, 15 bp, Homo sapiens
ggcccaggctggagt

SEQ ID NO: 982326 - DNA, 15 bp, Homo sapiens
tggcccaggctggag

SEQ ID NO: 982327 - DNA, 15 bp, Homo sapiens
gtggcccaggctgga

SEQ ID NO: 982328 - DNA, 15 bp, Homo sapiens
tgtggcccaggctgg

SEQ ID NO: 982329 - DNA, 15 bp, Homo sapiens
ttgtggcccaggctg

SEQ ID NO: 982330 - DNA, 15 bp, Homo sapiens
tttgtggcccaggct

SEQ ID NO: 982331 - DNA, 15 bp, Homo sapiens
ctttgtggcccaggc

SEQ ID NO: 982332 - DNA, 15 bp, Homo sapiens
gctttgtggcccagg

SEQ ID NO: 982333 - DNA, 15 bp, Homo sapiens
cgctttgtggcccag

SEQ ID NO: 982334 - DNA, 15 bp, Homo sapiens
tcgctttgtggccca

SEQ ID NO: 982335 - DNA, 15 bp, Homo sapiens
ctcgctttgtggccc

SEQ ID NO: 982336 - DNA, 15 bp, Homo sapiens
tctcgctttgtggcc

SEQ ID NO: 982337 - DNA, 15 bp, Homo sapiens
gtctcgctttgtggc

SEQ ID NO: 982338 - DNA, 15 bp, Homo sapiens
agtctcgctttgtgg

SEQ ID NO: 982339 - DNA, 15 bp, Homo sapiens
gagtctcgctttgtg

SEQ ID NO: 982340 - DNA, 15 bp, Homo sapiens
ggagtctcgctttgt

SEQ ID NO: 982341 - DNA, 15 bp, Homo sapiens
tggagtctcgctttg

SEQ ID NO: 982342 - DNA, 15 bp, Homo sapiens
gtggagtctcgcttt

SEQ ID NO: 982343 - DNA, 15 bp, Homo sapiens
agtggagtctcgctt

SEQ ID NO: 982344 - DNA, 15 bp, Homo sapiens
aagtggagtctcgct

SEQ ID NO: 982345 - DNA, 15 bp, Homo sapiens
gaagtggagtctcgc

SEQ ID NO: 982346 - DNA, 15 bp, Homo sapiens
tgaagtggagtctcg

SEQ ID NO: 982347 - DNA, 15 bp, Homo sapiens
ctgaagtggagtctc

SEQ ID NO: 982348 - DNA, 15 bp, Homo sapiens
tctgaagtggagtct

SEQ ID NO: 982349 - DNA, 15 bp, Homo sapiens
ttctgaagtggagtc

SEQ ID NO: 982350 - DNA, 15 bp, Homo sapiens
tttctgaagtggagt

SEQ ID NO: 982351 - DNA, 15 bp, Homo sapiens
gtttctgaagtggag

SEQ ID NO: 982352 - DNA, 15 bp, Homo sapiens
tgtttctgaagtgga

SEQ ID NO: 982353 - DNA, 15 bp, Homo sapiens
ttgtttctgaagtgg

SEQ ID NO: 982354 - DNA, 15 bp, Homo sapiens
tttgtttctgaagtg

SEQ ID NO: 982355 - DNA, 15 bp, Homo sapiens
ttttgtttctgaagt

SEQ ID NO: 982356 - DNA, 15 bp, Homo sapiens
tttttgtttctgaag

SEQ ID NO: 982357 - DNA, 15 bp, Homo sapiens
ttttttgtttctgaa

SEQ ID NO: 982358 - DNA, 15 bp, Homo sapiens
tttttttgtttctga

SEQ ID NO: 982359 - DNA, 15 bp, Homo sapiens
ttttttttgtttctg

SEQ ID NO: 982360 - DNA, 15 bp, Homo sapiens
tttttttttgtttct

SEQ ID NO: 982361 - DNA, 15 bp, Homo sapiens
ttttttttttgtttc

SEQ ID NO: 982362 - DNA, 15 bp, Homo sapiens
cttttttttttgttt

SEQ ID NO: 982363 - DNA, 15 bp, Homo sapiens
tcttttttttttgtt

SEQ ID NO: 982364 - DNA, 15 bp, Homo sapiens
ctcttttttttttgt

SEQ ID NO: 982365 - DNA, 15 bp, Homo sapiens
tctcttttttttttg

SEQ ID NO: 982366 - DNA, 15 bp, Homo sapiens
ctctctttttttttt

SEQ ID NO: 982367 - DNA, 15 bp, Homo sapiens
tctctcttttttttt

SEQ ID NO: 982368 - DNA, 15 bp, Homo sapiens
ctctctctttttttt

SEQ ID NO: 982369 - DNA, 15 bp, Homo sapiens
tctctctcttttttt

SEQ ID NO: 982370 - DNA, 15 bp, Homo sapiens
ctctctctctttttt

SEQ ID NO: 982371 - DNA, 15 bp, Homo sapiens
tctctctctcttttt

SEQ ID NO: 982372 - DNA, 15 bp, Homo sapiens
ttctctctctctttt

SEQ ID NO: 982373 - DNA, 15 bp, Homo sapiens
tttctctctctcttt

SEQ ID NO: 982374 - DNA, 15 bp, Homo sapiens
ttttctctctctctt

SEQ ID NO: 982375 - DNA, 15 bp, Homo sapiens
cttttctctctctct

SEQ ID NO: 982376 - DNA, 15 bp, Homo sapiens
tcttttctctctctc

SEQ ID NO: 982377 - DNA, 15 bp, Homo sapiens
ttcttttctctctct

SEQ ID NO: 982378 - DNA, 15 bp, Homo sapiens
cttcttttctctctc

SEQ ID NO: 982379 - DNA, 15 bp, Homo sapiens
ccttcttttctctct

SEQ ID NO: 982380 - DNA, 15 bp, Homo sapiens
tccttcttttctctc

SEQ ID NO: 982381 - DNA, 15 bp, Homo sapiens
ttccttcttttctct

SEQ ID NO: 982382 - DNA, 15 bp, Homo sapiens
cttccttcttttctc

SEQ ID NO: 982383 - DNA, 15 bp, Homo sapiens
ccttccttcttttct

SEQ ID NO: 982384 - DNA, 15 bp, Homo sapiens
tccttccttcttttc

SEQ ID NO: 982385 - DNA, 15 bp, Homo sapiens
ttccttccttctttt

SEQ ID NO: 982386 - DNA, 15 bp, Homo sapiens
cttccttccttcttt

SEQ ID NO: 982387 - DNA, 15 bp, Homo sapiens
ccttccttccttctt

SEQ ID NO: 982388 - DNA, 15 bp, Homo sapiens
tccttccttccttct

SEQ ID NO: 982389 - DNA, 15 bp, Homo sapiens
ttccttccttccttc

SEQ ID NO: 982390 - DNA, 15 bp, Homo sapiens
cttccttccttcctt

SEQ ID NO: 982391 - DNA, 15 bp, Homo sapiens
ccttccttccttcct

SEQ ID NO: 982392 - DNA, 15 bp, Homo sapiens
tccttccttccttcc

SEQ ID NO: 982393 - DNA, 15 bp, Homo sapiens
tttccttccttcctt

SEQ ID NO: 982394 - DNA, 15 bp, Homo sapiens
ctttccttccttcct

SEQ ID NO: 982395 - DNA, 15 bp, Homo sapiens
tctttccttccttcc

SEQ ID NO: 982396 - DNA, 15 bp, Homo sapiens
ttctttccttccttc

SEQ ID NO: 982397 - DNA, 15 bp, Homo sapiens
cttctttccttcctt

SEQ ID NO: 982398 - DNA, 15 bp, Homo sapiens
ccttctttccttcct

SEQ ID NO: 982399 - DNA, 15 bp, Homo sapiens
tccttctttccttcc

SEQ ID NO: 982400 - DNA, 15 bp, Homo sapiens
ttccttctttccttc

SEQ ID NO: 982401 - DNA, 15 bp, Homo sapiens
cttccttctttcctt

SEQ ID NO: 982402 - DNA, 15 bp, Homo sapiens
ccttccttctttcct

SEQ ID NO: 982403 - DNA, 15 bp, Homo sapiens
tccttccttctttcc

SEQ ID NO: 982404 - DNA, 15 bp, Homo sapiens
ttccttccttctttc

SEQ ID NO: 982405 - DNA, 15 bp, Homo sapiens
cccttccttccttcc

SEQ ID NO: 982406 - DNA, 15 bp, Homo sapiens
acccttccttccttc

SEQ ID NO: 982407 - DNA, 15 bp, Homo sapiens
tacccttccttcctt

SEQ ID NO: 982408 - DNA, 15 bp, Homo sapiens
ttacccttccttcct

SEQ ID NO: 982409 - DNA, 15 bp, Homo sapiens
gttacccttccttcc

SEQ ID NO: 982410 - DNA, 15 bp, Homo sapiens
tgttacccttccttc

SEQ ID NO: 982411 - DNA, 15 bp, Homo sapiens
ttgttacccttcctt

SEQ ID NO: 982412 - DNA, 15 bp, Homo sapiens
cttgttacccttcct

SEQ ID NO: 982413 - DNA, 15 bp, Homo sapiens
gcttgttacccttcc

SEQ ID NO: 982414 - DNA, 15 bp, Homo sapiens
tgcttgttacccttc

SEQ ID NO: 982415 - DNA, 15 bp, Homo sapiens
ttgcttgttaccctt

SEQ ID NO: 982416 - DNA, 15 bp, Homo sapiens
tttgcttgttaccct

SEQ ID NO: 982417 - DNA, 15 bp, Homo sapiens
ctttgcttgttaccc

SEQ ID NO: 982418 - DNA, 15 bp, Homo sapiens
actttgcttgttacc

SEQ ID NO: 982419 - DNA, 15 bp, Homo sapiens
cactttgcttgttac

SEQ ID NO: 982420 - DNA, 15 bp, Homo sapiens
acactttgcttgtta

SEQ ID NO: 982421 - DNA, 15 bp, Homo sapiens
tacactttgcttgtt

SEQ ID NO: 982422 - DNA, 15 bp, Homo sapiens
ttacactttgcttgt

SEQ ID NO: 982423 - DNA, 15 bp, Homo sapiens
gttacactttgcttg

SEQ ID NO: 982424 - DNA, 15 bp, Homo sapiens
tgttacactttgctt

SEQ ID NO: 982425 - DNA, 15 bp, Homo sapiens
ttgttacactttgct

SEQ ID NO: 982426 - DNA, 15 bp, Homo sapiens
attgttacactttgc

SEQ ID NO: 982427 - DNA, 15 bp, Homo sapiens
cattgttacactttg

SEQ ID NO: 982428 - DNA, 15 bp, Homo sapiens
ccattgttacacttt

SEQ ID NO: 982429 - DNA, 15 bp, Homo sapiens
gccattgttacactt

SEQ ID NO: 982430 - DNA, 15 bp, Homo sapiens
tgccattgttacact

SEQ ID NO: 982431 - DNA, 15 bp, Homo sapiens
ttgccattgttacac

SEQ ID NO: 982432 - DNA, 15 bp, Homo sapiens
attgccattgttaca

SEQ ID NO: 982433 - DNA, 15 bp, Homo sapiens
tattgccattgttac

SEQ ID NO: 982434 - DNA, 15 bp, Homo sapiens
atattgccattgtta

SEQ ID NO: 982435 - DNA, 15 bp, Homo sapiens
gatattgccattgtt

SEQ ID NO: 982436 - DNA, 15 bp, Homo sapiens
agatattgccattgt

SEQ ID NO: 982437 - DNA, 15 bp, Homo sapiens
tagatattgccattg

SEQ ID NO: 982438 - DNA, 15 bp, Homo sapiens
ttagatattgccatt

SEQ ID NO: 982439 - DNA, 15 bp, Homo sapiens
tttagatattgccat

SEQ ID NO: 982440 - DNA, 15 bp, Homo sapiens
ttttagatattgcca

SEQ ID NO: 982441 - DNA, 15 bp, Homo sapiens
tttttagatattgcc

SEQ ID NO: 982442 - DNA, 15 bp, Homo sapiens
ttttttagatattgc

SEQ ID NO: 982443 - DNA, 15 bp, Homo sapiens
tttttttagatattg

SEQ ID NO: 982444 - DNA, 15 bp, Homo sapiens
atttttttagatatt

SEQ ID NO: 982445 - DNA, 15 bp, Homo sapiens
tatttttttagatat

SEQ ID NO: 982446 - DNA, 15 bp, Homo sapiens
ctatttttttagata

SEQ ID NO: 982447 - DNA, 15 bp, Homo sapiens
cctatttttttagat

SEQ ID NO: 982448 - DNA, 15 bp, Homo sapiens
acctatttttttaga

SEQ ID NO: 982449 - DNA, 15 bp, Homo sapiens
tacctatttttttag

SEQ ID NO: 982450 - DNA, 15 bp, Homo sapiens
atacctattttttta

SEQ ID NO: 982451 - DNA, 15 bp, Homo sapiens
aatacctattttttt

SEQ ID NO: 982452 - DNA, 15 bp, Homo sapiens
aaatacctatttttt

SEQ ID NO: 982453 - DNA, 15 bp, Homo sapiens
aaaatacctattttt

SEQ ID NO: 982454 - DNA, 15 bp, Homo sapiens
aaaaatacctatttt

SEQ ID NO: 982455 - DNA, 15 bp, Homo sapiens
taaaaatacctattt

SEQ ID NO: 982456 - DNA, 15 bp, Homo sapiens
ataaaaatacctatt

SEQ ID NO: 982457 - DNA, 15 bp, Homo sapiens
tataaaaatacctat

SEQ ID NO: 982458 - DNA, 15 bp, Homo sapiens
atataaaaataccta

SEQ ID NO: 982459 - DNA, 15 bp, Homo sapiens
catataaaaatacct

SEQ ID NO: 982460 - DNA, 15 bp, Homo sapiens
acatataaaaatacc

SEQ ID NO: 982461 - DNA, 15 bp, Homo sapiens
aacatataaaaatac

SEQ ID NO: 982462 - DNA, 15 bp, Homo sapiens
aaacatataaaaata

SEQ ID NO: 982463 - DNA, 15 bp, Homo sapiens
caaacatataaaaat

SEQ ID NO: 982464 - DNA, 15 bp, Homo sapiens
acaaacatataaaaa

SEQ ID NO: 982465 - DNA, 15 bp, Homo sapiens
gacaaacatataaaa

SEQ ID NO: 982466 - DNA, 15 bp, Homo sapiens
cgacaaacatataaa

SEQ ID NO: 982467 - DNA, 15 bp, Homo sapiens
acgacaaacatataa

SEQ ID NO: 982468 - DNA, 15 bp, Homo sapiens
aacgacaaacatata

SEQ ID NO: 982469 - DNA, 15 bp, Homo sapiens
aaacgacaaacatat

SEQ ID NO: 982470 - DNA, 15 bp, Homo sapiens
aaaacgacaaacata

SEQ ID NO: 982471 - DNA, 15 bp, Homo sapiens
taaaacgacaaacat

SEQ ID NO: 982472 - DNA, 15 bp, Homo sapiens
ataaaacgacaaaca

SEQ ID NO: 982473 - DNA, 15 bp, Homo sapiens
tataaaacgacaaac

SEQ ID NO: 982474 - DNA, 15 bp, Homo sapiens
atataaaacgacaaa

SEQ ID NO: 982475 - DNA, 15 bp, Homo sapiens
tatataaaacgacaa

SEQ ID NO: 982476 - DNA, 15 bp, Homo sapiens
atatataaaacgaca

SEQ ID NO: 982477 - DNA, 15 bp, Homo sapiens
tatatataaaacgac

SEQ ID NO: 982478 - DNA, 15 bp, Homo sapiens
atatatataaaacga

SEQ ID NO: 982479 - DNA, 15 bp, Homo sapiens
catatatataaaacg

SEQ ID NO: 982480 - DNA, 15 bp, Homo sapiens
tcatatatataaaac

SEQ ID NO: 982481 - DNA, 15 bp, Homo sapiens
gtcatatatataaaa

SEQ ID NO: 982482 - DNA, 15 bp, Homo sapiens
ggtcatatatataaa

SEQ ID NO: 982483 - DNA, 15 bp, Homo sapiens
gggtcatatatataa

SEQ ID NO: 982484 - DNA, 15 bp, Homo sapiens
ggggtcatatatata

SEQ ID NO: 982485 - DNA, 15 bp, Homo sapiens
gggggtcatatatat

SEQ ID NO: 982486 - DNA, 15 bp, Homo sapiens
tgggggtcatatata

SEQ ID NO: 982487 - DNA, 15 bp, Homo sapiens
gtgggggtcatatat

SEQ ID NO: 982488 - DNA, 15 bp, Homo sapiens
agtgggggtcatata

SEQ ID NO: 982489 - DNA, 15 bp, Homo sapiens
aagtgggggtcatat

SEQ ID NO: 982490 - DNA, 15 bp, Homo sapiens
aaagtgggggtcata

SEQ ID NO: 982491 - DNA, 15 bp, Homo sapiens
taaagtgggggtcat

SEQ ID NO: 982492 - DNA, 15 bp, Homo sapiens
ctaaagtgggggtca

SEQ ID NO: 982493 - DNA, 15 bp, Homo sapiens
tctaaagtgggggtc

SEQ ID NO: 982494 - DNA, 15 bp, Homo sapiens
ctctaaagtgggggt

SEQ ID NO: 982495 - DNA, 15 bp, Homo sapiens
tctctaaagtggggg

SEQ ID NO: 982496 - DNA, 15 bp, Homo sapiens
atctctaaagtgggg

SEQ ID NO: 982497 - DNA, 15 bp, Homo sapiens
catctctaaagtggg

SEQ ID NO: 982498 - DNA, 15 bp, Homo sapiens
tcatctctaaagtgg

SEQ ID NO: 982499 - DNA, 15 bp, Homo sapiens
ctcatctctaaagtg

SEQ ID NO: 982500 - DNA, 15 bp, Homo sapiens
cctcatctctaaagt

SEQ ID NO: 982501 - DNA, 15 bp, Homo sapiens
tcctcatctctaaag

SEQ ID NO: 982502 - DNA, 15 bp, Homo sapiens
ttcctcatctctaaa

SEQ ID NO: 982503 - DNA, 15 bp, Homo sapiens
tttcctcatctctaa

SEQ ID NO: 982504 - DNA, 15 bp, Homo sapiens
gtttcctcatctcta

SEQ ID NO: 982505 - DNA, 15 bp, Homo sapiens
agtttcctcatctct

SEQ ID NO: 982506 - DNA, 15 bp, Homo sapiens
cagtttcctcatctc

SEQ ID NO: 982507 - DNA, 15 bp, Homo sapiens
tcagtttcctcatct

SEQ ID NO: 982508 - DNA, 15 bp, Homo sapiens
ctcagtttcctcatc

SEQ ID NO: 982509 - DNA, 15 bp, Homo sapiens
tctcagtttcctcat

SEQ ID NO: 982510 - DNA, 15 bp, Homo sapiens
ctctcagtttcctca

SEQ ID NO: 982511 - DNA, 15 bp, Homo sapiens
tctctcagtttcctc

SEQ ID NO: 982512 - DNA, 15 bp, Homo sapiens
atctctcagtttcct

SEQ ID NO: 982513 - DNA, 15 bp, Homo sapiens
aatctctcagtttcc

SEQ ID NO: 982514 - DNA, 15 bp, Homo sapiens
taatctctcagtttc

SEQ ID NO: 982515 - DNA, 15 bp, Homo sapiens
ttaatctctcagttt

SEQ ID NO: 982516 - DNA, 15 bp, Homo sapiens
cttaatctctcagtt

SEQ ID NO: 982517 - DNA, 15 bp, Homo sapiens
ccttaatctctcagt

SEQ ID NO: 982518 - DNA, 15 bp, Homo sapiens
tccttaatctctcag

SEQ ID NO: 982519 - DNA, 15 bp, Homo sapiens
ttccttaatctctca

SEQ ID NO: 982520 - DNA, 15 bp, Homo sapiens
tttccttaatctctc

SEQ ID NO: 982521 - DNA, 15 bp, Homo sapiens
gtttccttaatctct

SEQ ID NO: 982522 - DNA, 15 bp, Homo sapiens
cgtttccttaatctc

SEQ ID NO: 982523 - DNA, 15 bp, Homo sapiens
tcgtttccttaatct

SEQ ID NO: 982524 - DNA, 15 bp, Homo sapiens
atcgtttccttaatc

SEQ ID NO: 982525 - DNA, 15 bp, Homo sapiens
gatcgtttccttaat

SEQ ID NO: 982526 - DNA, 15 bp, Homo sapiens
ggatcgtttccttaa

SEQ ID NO: 982527 - DNA, 15 bp, Homo sapiens
gggatcgtttcctta

SEQ ID NO: 982528 - DNA, 15 bp, Homo sapiens
agggatcgtttcctt

SEQ ID NO: 982529 - DNA, 15 bp, Homo sapiens
cagggatcgtttcct

SEQ ID NO: 982530 - DNA, 15 bp, Homo sapiens
tcagggatcgtttcc

SEQ ID NO: 982531 - DNA, 15 bp, Homo sapiens
ctcagggatcgtttc

SEQ ID NO: 982532 - DNA, 15 bp, Homo sapiens
tctcagggatcgttt

SEQ ID NO: 982533 - DNA, 15 bp, Homo sapiens
ctctcagggatcgtt

SEQ ID NO: 982534 - DNA, 15 bp, Homo sapiens
tctctcagggatcgt

SEQ ID NO: 982535 - DNA, 15 bp, Homo sapiens
gtctctcagggatcg

SEQ ID NO: 982536 - DNA, 15 bp, Homo sapiens
agtctctcagggatc

SEQ ID NO: 982537 - DNA, 15 bp, Homo sapiens
gagtctctcagggat

SEQ ID NO: 982538 - DNA, 15 bp, Homo sapiens
agagtctctcaggga

SEQ ID NO: 982539 - DNA, 15 bp, Homo sapiens
cagagtctctcaggg

SEQ ID NO: 982540 - DNA, 15 bp, Homo sapiens
acagagtctctcagg

SEQ ID NO: 982541 - DNA, 15 bp, Homo sapiens
aacagagtctctcag

SEQ ID NO: 982542 - DNA, 15 bp, Homo sapiens
gaacagagtctctca

SEQ ID NO: 982543 - DNA, 15 bp, Homo sapiens
agaacagagtctctc

SEQ ID NO: 982544 - DNA, 15 bp, Homo sapiens
cagaacagagtctct

SEQ ID NO: 982545 - DNA, 15 bp, Homo sapiens
tcagaacagagtctc

SEQ ID NO: 982546 - DNA, 15 bp, Homo sapiens
gtcagaacagagtct

SEQ ID NO: 982547 - DNA, 15 bp, Homo sapiens
agtcagaacagagtc

SEQ ID NO: 982548 - DNA, 15 bp, Homo sapiens
aagtcagaacagagt

SEQ ID NO: 982549 - DNA, 15 bp, Homo sapiens
gaagtcagaacagag

SEQ ID NO: 982550 - DNA, 15 bp, Homo sapiens
ggaagtcagaacaga

SEQ ID NO: 982551 - DNA, 15 bp, Homo sapiens
tggaagtcagaacag

SEQ ID NO: 982552 - DNA, 15 bp, Homo sapiens
ttggaagtcagaaca

SEQ ID NO: 982553 - DNA, 15 bp, Homo sapiens
tttggaagtcagaac

SEQ ID NO: 982554 - DNA, 15 bp, Homo sapiens
atttggaagtcagaa

SEQ ID NO: 982555 - DNA, 15 bp, Homo sapiens
gatttggaagtcaga

SEQ ID NO: 982556 - DNA, 15 bp, Homo sapiens
cgatttggaagtcag

SEQ ID NO: 982557 - DNA, 15 bp, Homo sapiens
ccgatttggaagtca

SEQ ID NO: 982558 - DNA, 15 bp, Homo sapiens
accgatttggaagtc

SEQ ID NO: 982559 - DNA, 15 bp, Homo sapiens
caccgatttggaagt

SEQ ID NO: 982560 - DNA, 15 bp, Homo sapiens
tcaccgatttggaag

SEQ ID NO: 982561 - DNA, 15 bp, Homo sapiens
ctcaccgatttggaa

SEQ ID NO: 982562 - DNA, 15 bp, Homo sapiens
gctcaccgatttgga

SEQ ID NO: 982563 - DNA, 15 bp, Homo sapiens
agctcaccgatttgg

SEQ ID NO: 982564 - DNA, 15 bp, Homo sapiens
aagctcaccgatttg

SEQ ID NO: 982565 - DNA, 15 bp, Homo sapiens
aaagctcaccgattt

SEQ ID NO: 982566 - DNA, 15 bp, Homo sapiens
gaaagctcaccgatt

SEQ ID NO: 982567 - DNA, 15 bp, Homo sapiens
ggaaagctcaccgat

SEQ ID NO: 982568 - DNA, 15 bp, Homo sapiens
tggaaagctcaccga

SEQ ID NO: 982569 - DNA, 15 bp, Homo sapiens
atggaaagctcaccg

SEQ ID NO: 982570 - DNA, 15 bp, Homo sapiens
gatggaaagctcacc

SEQ ID NO: 982571 - DNA, 15 bp, Homo sapiens
cgatggaaagctcac

SEQ ID NO: 982572 - DNA, 15 bp, Homo sapiens
gcgatggaaagctca

SEQ ID NO: 982573 - DNA, 15 bp, Homo sapiens
tgcgatggaaagctc

SEQ ID NO: 982574 - DNA, 15 bp, Homo sapiens
atgcgatggaaagct

SEQ ID NO: 982575 - DNA, 15 bp, Homo sapiens
gatgcgatggaaagc

SEQ ID NO: 982576 - DNA, 15 bp, Homo sapiens
tgatgcgatggaaag

SEQ ID NO: 982577 - DNA, 15 bp, Homo sapiens
gtgatgcgatggaaa

SEQ ID NO: 982578 - DNA, 15 bp, Homo sapiens
cgtgatgcgatggaa

SEQ ID NO: 982579 - DNA, 15 bp, Homo sapiens
ccgtgatgcgatgga

SEQ ID NO: 982580 - DNA, 15 bp, Homo sapiens
accgtgatgcgatgg

SEQ ID NO: 982581 - DNA, 15 bp, Homo sapiens
caccgtgatgcgatg

SEQ ID NO: 982582 - DNA, 15 bp, Homo sapiens
gcaccgtgatgcgat

SEQ ID NO: 982583 - DNA, 15 bp, Homo sapiens
ggcaccgtgatgcga

SEQ ID NO: 982584 - DNA, 15 bp, Homo sapiens
aggcaccgtgatgcg

SEQ ID NO: 982585 - DNA, 15 bp, Homo sapiens
gaggcaccgtgatgc

SEQ ID NO: 982586 - DNA, 15 bp, Homo sapiens
ggaggcaccgtgatg

SEQ ID NO: 982587 - DNA, 15 bp, Homo sapiens
cggaggcaccgtgat

SEQ ID NO: 982588 - DNA, 15 bp, Homo sapiens
tcggaggcaccgtga

SEQ ID NO: 982589 - DNA, 15 bp, Homo sapiens
ttcggaggcaccgtg

SEQ ID NO: 982590 - DNA, 15 bp, Homo sapiens
tttcggaggcaccgt

SEQ ID NO: 982591 - DNA, 15 bp, Homo sapiens
ctttcggaggcaccg

SEQ ID NO: 982592 - DNA, 15 bp, Homo sapiens
gctttcggaggcacc

SEQ ID NO: 982593 - DNA, 15 bp, Homo sapiens
tgctttcggaggcac

SEQ ID NO: 982594 - DNA, 15 bp, Homo sapiens
atgctttcggaggca

SEQ ID NO: 982595 - DNA, 15 bp, Homo sapiens
catgctttcggaggc

SEQ ID NO: 982596 - DNA, 15 bp, Homo sapiens
tcatgctttcggagg

SEQ ID NO: 982597 - DNA, 15 bp, Homo sapiens
gtcatgctttcggag

SEQ ID NO: 982598 - DNA, 15 bp, Homo sapiens
tgtcatgctttcgga

SEQ ID NO: 982599 - DNA, 15 bp, Homo sapiens
gtgtcatgctttcgg

SEQ ID NO: 982600 - DNA, 15 bp, Homo sapiens
cgtgtcatgctttcg

SEQ ID NO: 982601 - DNA, 15 bp, Homo sapiens
ccgtgtcatgctttc

SEQ ID NO: 982602 - DNA, 15 bp, Homo sapiens
tccgtgtcatgcttt

SEQ ID NO: 982603 - DNA, 15 bp, Homo sapiens
ctccgtgtcatgctt

SEQ ID NO: 982604 - DNA, 15 bp, Homo sapiens
gctccgtgtcatgct

SEQ ID NO: 982605 - DNA, 15 bp, Homo sapiens
agctccgtgtcatgc

SEQ ID NO: 982606 - DNA, 15 bp, Homo sapiens
aagctccgtgtcatg

SEQ ID NO: 982607 - DNA, 15 bp, Homo sapiens
gaagctccgtgtcat

SEQ ID NO: 982608 - DNA, 15 bp, Homo sapiens
agaagctccgtgtca

SEQ ID NO: 982609 - DNA, 15 bp, Homo sapiens
gagaagctccgtgtc

SEQ ID NO: 982610 - DNA, 15 bp, Homo sapiens
tgagaagctccgtgt

SEQ ID NO: 982611 - DNA, 15 bp, Homo sapiens
ctgagaagctccgtg

SEQ ID NO: 982612 - DNA, 15 bp, Homo sapiens
tctgagaagctccgt

SEQ ID NO: 982613 - DNA, 15 bp, Homo sapiens
gtctgagaagctccg

SEQ ID NO: 982614 - DNA, 15 bp, Homo sapiens
agtctgagaagctcc

SEQ ID NO: 982615 - DNA, 15 bp, Homo sapiens
gagtctgagaagctc

SEQ ID NO: 982616 - DNA, 15 bp, Homo sapiens
tgagtctgagaagct

SEQ ID NO: 982617 - DNA, 15 bp, Homo sapiens
ctgagtctgagaagc

SEQ ID NO: 982618 - DNA, 15 bp, Homo sapiens
gctgagtctgagaag

SEQ ID NO: 982619 - DNA, 15 bp, Homo sapiens
agctgagtctgagaa

SEQ ID NO: 982620 - DNA, 15 bp, Homo sapiens
aagctgagtctgaga

SEQ ID NO: 982621 - DNA, 15 bp, Homo sapiens
gaagctgagtctgag

SEQ ID NO: 982622 - DNA, 15 bp, Homo sapiens
ggaagctgagtctga

SEQ ID NO: 982623 - DNA, 15 bp, Homo sapiens
aggaagctgagtctg

SEQ ID NO: 982624 - DNA, 15 bp, Homo sapiens
taggaagctgagtct

SEQ ID NO: 982625 - DNA, 15 bp, Homo sapiens
ttaggaagctgagtc

SEQ ID NO: 982626 - DNA, 15 bp, Homo sapiens
attaggaagctgagt

SEQ ID NO: 982627 - DNA, 15 bp, Homo sapiens
gattaggaagctgag

SEQ ID NO: 982628 - DNA, 15 bp, Homo sapiens
ggattaggaagctga

SEQ ID NO: 982629 - DNA, 15 bp, Homo sapiens
cggattaggaagctg

SEQ ID NO: 982630 - DNA, 15 bp, Homo sapiens
gcggattaggaagct

SEQ ID NO: 982631 - DNA, 15 bp, Homo sapiens
agcggattaggaagc

SEQ ID NO: 982632 - DNA, 15 bp, Homo sapiens
tagcggattaggaag

SEQ ID NO: 982633 - DNA, 15 bp, Homo sapiens
ttagcggattaggaa

SEQ ID NO: 982634 - DNA, 15 bp, Homo sapiens
tttagcggattagga

SEQ ID NO: 982635 - DNA, 15 bp, Homo sapiens
gtttagcggattagg

SEQ ID NO: 982636 - DNA, 15 bp, Homo sapiens
cgtttagcggattag

SEQ ID NO: 982637 - DNA, 15 bp, Homo sapiens
ccgtttagcggatta

SEQ ID NO: 982638 - DNA, 15 bp, Homo sapiens
cccgtttagcggatt

SEQ ID NO: 982639 - DNA, 15 bp, Homo sapiens
tcccgtttagcggat

SEQ ID NO: 982640 - DNA, 15 bp, Homo sapiens
atcccgtttagcgga

SEQ ID NO: 982641 - DNA, 15 bp, Homo sapiens
aatcccgtttagcgg

SEQ ID NO: 982642 - DNA, 15 bp, Homo sapiens
taatcccgtttagcg

SEQ ID NO: 982643 - DNA, 15 bp, Homo sapiens
ataatcccgtttagc

SEQ ID NO: 982644 - DNA, 15 bp, Homo sapiens
cataatcccgtttag

SEQ ID NO: 982645 - DNA, 15 bp, Homo sapiens
acataatcccgttta

SEQ ID NO: 982646 - DNA, 15 bp, Homo sapiens
cacataatcccgttt

SEQ ID NO: 982647 - DNA, 15 bp, Homo sapiens
tcacataatcccgtt

SEQ ID NO: 982648 - DNA, 15 bp, Homo sapiens
ctcacataatcccgt

SEQ ID NO: 982649 - DNA, 15 bp, Homo sapiens
tctcacataatcccg

SEQ ID NO: 982650 - DNA, 15 bp, Homo sapiens
atctcacataatccc

SEQ ID NO: 982651 - DNA, 15 bp, Homo sapiens
catctcacataatcc

SEQ ID NO: 982652 - DNA, 15 bp, Homo sapiens
tcatctcacataatc

SEQ ID NO: 982653 - DNA, 15 bp, Homo sapiens
ctcatctcacataat

SEQ ID NO: 982654 - DNA, 15 bp, Homo sapiens
cctcatctcacataa

SEQ ID NO: 982655 - DNA, 15 bp, Homo sapiens
tcctcatctcacata

SEQ ID NO: 982656 - DNA, 15 bp, Homo sapiens
ttcctcatctcacat

SEQ ID NO: 982657 - DNA, 15 bp, Homo sapiens
gttcctcatctcaca

SEQ ID NO: 982658 - DNA, 15 bp, Homo sapiens
tgttcctcatctcac

SEQ ID NO: 982659 - DNA, 15 bp, Homo sapiens
atgttcctcatctca

SEQ ID NO: 982660 - DNA, 15 bp, Homo sapiens
catgttcctcatctc

SEQ ID NO: 982661 - DNA, 15 bp, Homo sapiens
tcatgttcctcatct

SEQ ID NO: 982662 - DNA, 15 bp, Homo sapiens
ctcatgttcctcatc

SEQ ID NO: 982663 - DNA, 15 bp, Homo sapiens
tctcatgttcctcat

SEQ ID NO: 982664 - DNA, 15 bp, Homo sapiens
ttctcatgttcctca

SEQ ID NO: 982665 - DNA, 15 bp, Homo sapiens
gttctcatgttcctc

SEQ ID NO: 982666 - DNA, 15 bp, Homo sapiens
cgttctcatgttcct

SEQ ID NO: 982667 - DNA, 15 bp, Homo sapiens
gcgttctcatgttcc

SEQ ID NO: 982668 - DNA, 15 bp, Homo sapiens
agcgttctcatgttc

SEQ ID NO: 982669 - DNA, 15 bp, Homo sapiens
cagcgttctcatgtt

SEQ ID NO: 982670 - DNA, 15 bp, Homo sapiens
tcagcgttctcatgt

SEQ ID NO: 982671 - DNA, 15 bp, Homo sapiens
gtcagcgttctcatg

SEQ ID NO: 982672 - DNA, 15 bp, Homo sapiens
tgtcagcgttctcat

SEQ ID NO: 982673 - DNA, 15 bp, Homo sapiens
atgtcagcgttctca

SEQ ID NO: 982674 - DNA, 15 bp, Homo sapiens
catgtcagcgttctc

SEQ ID NO: 982675 - DNA, 15 bp, Homo sapiens
ccatgtcagcgttct

SEQ ID NO: 982676 - DNA, 15 bp, Homo sapiens
cccatgtcagcgttc

SEQ ID NO: 982677 - DNA, 15 bp, Homo sapiens
acccatgtcagcgtt

SEQ ID NO: 982678 - DNA, 15 bp, Homo sapiens
cacccatgtcagcgt

SEQ ID NO: 982679 - DNA, 15 bp, Homo sapiens
tcacccatgtcagcg

SEQ ID NO: 982680 - DNA, 15 bp, Homo sapiens
ctcacccatgtcagc

SEQ ID NO: 982681 - DNA, 15 bp, Homo sapiens
cctcacccatgtcag

SEQ ID NO: 982682 - DNA, 15 bp, Homo sapiens
ccctcacccatgtca

SEQ ID NO: 982683 - DNA, 15 bp, Homo sapiens
accctcacccatgtc

SEQ ID NO: 982684 - DNA, 15 bp, Homo sapiens
aaccctcacccatgt

SEQ ID NO: 982685 - DNA, 15 bp, Homo sapiens
gaaccctcacccatg

SEQ ID NO: 982686 - DNA, 15 bp, Homo sapiens
ggaaccctcacccat

SEQ ID NO: 982687 - DNA, 15 bp, Homo sapiens
aggaaccctcaccca

SEQ ID NO: 982688 - DNA, 15 bp, Homo sapiens
aaggaaccctcaccc

SEQ ID NO: 982689 - DNA, 15 bp, Homo sapiens
caaggaaccctcacc

SEQ ID NO: 982690 - DNA, 15 bp, Homo sapiens
ccaaggaaccctcac

SEQ ID NO: 982691 - DNA, 15 bp, Homo sapiens
tccaaggaaccctca

SEQ ID NO: 982692 - DNA, 15 bp, Homo sapiens
ctccaaggaaccctc

SEQ ID NO: 982693 - DNA, 15 bp, Homo sapiens
actccaaggaaccct

SEQ ID NO: 982694 - DNA, 15 bp, Homo sapiens
tactccaaggaaccc

SEQ ID NO: 982695 - DNA, 15 bp, Homo sapiens
atactccaaggaacc

SEQ ID NO: 982696 - DNA, 15 bp, Homo sapiens
gatactccaaggaac

SEQ ID NO: 982697 - DNA, 15 bp, Homo sapiens
tgatactccaaggaa

SEQ ID NO: 982698 - DNA, 15 bp, Homo sapiens
atgatactccaagga

SEQ ID NO: 982699 - DNA, 15 bp, Homo sapiens
aatgatactccaagg

SEQ ID NO: 982700 - DNA, 15 bp, Homo sapiens
aaatgatactccaag

SEQ ID NO: 982701 - DNA, 15 bp, Homo sapiens
aaaatgatactccaa

SEQ ID NO: 982702 - DNA, 15 bp, Homo sapiens
gaaaatgatactcca

SEQ ID NO: 982703 - DNA, 15 bp, Homo sapiens
tgaaaatgatactcc

SEQ ID NO: 982704 - DNA, 15 bp, Homo sapiens
atgaaaatgatactc

SEQ ID NO: 982705 - DNA, 15 bp, Homo sapiens
catgaaaatgatact

SEQ ID NO: 982706 - DNA, 15 bp, Homo sapiens
acatgaaaatgatac

SEQ ID NO: 982707 - DNA, 15 bp, Homo sapiens
cacatgaaaatgata

SEQ ID NO: 982708 - DNA, 15 bp, Homo sapiens
ccacatgaaaatgat

SEQ ID NO: 982709 - DNA, 15 bp, Homo sapiens
gccacatgaaaatga

SEQ ID NO: 982710 - DNA, 15 bp, Homo sapiens
tgccacatgaaaatg

SEQ ID NO: 982711 - DNA, 15 bp, Homo sapiens
atgccacatgaaaat

SEQ ID NO: 982712 - DNA, 15 bp, Homo sapiens
aatgccacatgaaaa

SEQ ID NO: 982713 - DNA, 15 bp, Homo sapiens
aaatgccacatgaaa

SEQ ID NO: 982714 - DNA, 15 bp, Homo sapiens
aaaatgccacatgaa

SEQ ID NO: 982715 - DNA, 15 bp, Homo sapiens
gaaaatgccacatga

SEQ ID NO: 982716 - DNA, 15 bp, Homo sapiens
tgaaaatgccacatg

SEQ ID NO: 982717 - DNA, 15 bp, Homo sapiens
ttgaaaatgccacat

SEQ ID NO: 982718 - DNA, 15 bp, Homo sapiens
tttgaaaatgccaca

SEQ ID NO: 982719 - DNA, 15 bp, Homo sapiens
ttttgaaaatgccac

SEQ ID NO: 982720 - DNA, 15 bp, Homo sapiens
gttttgaaaatgcca

SEQ ID NO: 982721 - DNA, 15 bp, Homo sapiens
agttttgaaaatgcc

SEQ ID NO: 982722 - DNA, 15 bp, Homo sapiens
aagttttgaaaatgc

SEQ ID NO: 982723 - DNA, 15 bp, Homo sapiens
taagttttgaaaatg

SEQ ID NO: 982724 - DNA, 15 bp, Homo sapiens
ataagttttgaaaat

SEQ ID NO: 982725 - DNA, 15 bp, Homo sapiens
aataagttttgaaaa

SEQ ID NO: 982726 - DNA, 15 bp, Homo sapiens
aaataagttttgaaa

SEQ ID NO: 982727 - DNA, 15 bp, Homo sapiens
aaaataagttttgaa

SEQ ID NO: 982728 - DNA, 15 bp, Homo sapiens
taaaataagttttga

SEQ ID NO: 982729 - DNA, 15 bp, Homo sapiens
gtaaaataagttttg

SEQ ID NO: 982730 - DNA, 15 bp, Homo sapiens
ggtaaaataagtttt

SEQ ID NO: 982731 - DNA, 15 bp, Homo sapiens
aggtaaaataagttt

SEQ ID NO: 982732 - DNA, 15 bp, Homo sapiens
taggtaaaataagtt

SEQ ID NO: 982733 - DNA, 15 bp, Homo sapiens
ttaggtaaaataagt

SEQ ID NO: 982734 - DNA, 15 bp, Homo sapiens
attaggtaaaataag

SEQ ID NO: 982735 - DNA, 15 bp, Homo sapiens
gattaggtaaaataa

SEQ ID NO: 982736 - DNA, 15 bp, Homo sapiens
agattaggtaaaata

SEQ ID NO: 982737 - DNA, 15 bp, Homo sapiens
aagattaggtaaaat

SEQ ID NO: 982738 - DNA, 15 bp, Homo sapiens
gaagattaggtaaaa

SEQ ID NO: 982739 - DNA, 15 bp, Homo sapiens
ggaagattaggtaaa

SEQ ID NO: 982740 - DNA, 15 bp, Homo sapiens
gggaagattaggtaa

SEQ ID NO: 982741 - DNA, 15 bp, Homo sapiens
tgggaagattaggta

SEQ ID NO: 982742 - DNA, 15 bp, Homo sapiens
ttgggaagattaggt

SEQ ID NO: 982743 - DNA, 15 bp, Homo sapiens
tttgggaagattagg

SEQ ID NO: 982744 - DNA, 15 bp, Homo sapiens
ctttgggaagattag

SEQ ID NO: 982745 - DNA, 15 bp, Homo sapiens
gctttgggaagatta

SEQ ID NO: 982746 - DNA, 15 bp, Homo sapiens
ggctttgggaagatt

SEQ ID NO: 982747 - DNA, 15 bp, Homo sapiens
gggctttgggaagat

SEQ ID NO: 982748 - DNA, 15 bp, Homo sapiens
agggctttgggaaga

SEQ ID NO: 982749 - DNA, 15 bp, Homo sapiens
cagggctttgggaag

SEQ ID NO: 982750 - DNA, 15 bp, Homo sapiens
gcagggctttgggaa

SEQ ID NO: 982751 - DNA, 15 bp, Homo sapiens
agcagggctttggga

SEQ ID NO: 982752 - DNA, 15 bp, Homo sapiens
aagcagggctttggg

SEQ ID NO: 982753 - DNA, 15 bp, Homo sapiens
aaagcagggctttgg

SEQ ID NO: 982754 - DNA, 15 bp, Homo sapiens
aaaagcagggctttg

SEQ ID NO: 982755 - DNA, 15 bp, Homo sapiens
caaaagcagggcttt

SEQ ID NO: 982756 - DNA, 15 bp, Homo sapiens
tcaaaagcagggctt

SEQ ID NO: 982757 - DNA, 15 bp, Homo sapiens
gtcaaaagcagggct

SEQ ID NO: 982758 - DNA, 15 bp, Homo sapiens
agtcaaaagcagggc

SEQ ID NO: 982759 - DNA, 15 bp, Homo sapiens
gagtcaaaagcaggg

SEQ ID NO: 982760 - DNA, 15 bp, Homo sapiens
agagtcaaaagcagg

SEQ ID NO: 982761 - DNA, 15 bp, Homo sapiens
tagagtcaaaagcag

SEQ ID NO: 982762 - DNA, 15 bp, Homo sapiens
ttagagtcaaaagca

SEQ ID NO: 982763 - DNA, 15 bp, Homo sapiens
attagagtcaaaagc

SEQ ID NO: 982764 - DNA, 15 bp, Homo sapiens
cattagagtcaaaag

SEQ ID NO: 982765 - DNA, 15 bp, Homo sapiens
acattagagtcaaaa

SEQ ID NO: 982766 - DNA, 15 bp, Homo sapiens
cacattagagtcaaa

SEQ ID NO: 982767 - DNA, 15 bp, Homo sapiens
acacattagagtcaa

SEQ ID NO: 982768 - DNA, 15 bp, Homo sapiens
gacacattagagtca

SEQ ID NO: 982769 - DNA, 15 bp, Homo sapiens
agacacattagagtc

SEQ ID NO: 982770 - DNA, 15 bp, Homo sapiens
gagacacattagagt

SEQ ID NO: 982771 - DNA, 15 bp, Homo sapiens
ggagacacattagag

SEQ ID NO: 982772 - DNA, 15 bp, Homo sapiens
aggagacacattaga

SEQ ID NO: 982773 - DNA, 15 bp, Homo sapiens
caggagacacattag

SEQ ID NO: 982774 - DNA, 15 bp, Homo sapiens
tcaggagacacatta

SEQ ID NO: 982775 - DNA, 15 bp, Homo sapiens
ctcaggagacacatt

SEQ ID NO: 982776 - DNA, 15 bp, Homo sapiens
tctcaggagacacat

SEQ ID NO: 982777 - DNA, 15 bp, Homo sapiens
gtctcaggagacaca

SEQ ID NO: 982778 - DNA, 15 bp, Homo sapiens
agtctcaggagacac

SEQ ID NO: 982779 - DNA, 15 bp, Homo sapiens
aagtctcaggagaca

SEQ ID NO: 982780 - DNA, 15 bp, Homo sapiens
caagtctcaggagac

SEQ ID NO: 982781 - DNA, 15 bp, Homo sapiens
ccaagtctcaggaga

SEQ ID NO: 982782 - DNA, 15 bp, Homo sapiens
tccaagtctcaggag

SEQ ID NO: 982783 - DNA, 15 bp, Homo sapiens
ctccaagtctcagga

SEQ ID NO: 982784 - DNA, 15 bp, Homo sapiens
tctccaagtctcagg

SEQ ID NO: 982785 - DNA, 15 bp, Homo sapiens
ctctccaagtctcag

SEQ ID NO: 982786 - DNA, 15 bp, Homo sapiens
gctctccaagtctca

SEQ ID NO: 982787 - DNA, 15 bp, Homo sapiens
cgctctccaagtctc

SEQ ID NO: 982788 - DNA, 15 bp, Homo sapiens
gcgctctccaagtct

SEQ ID NO: 982789 - DNA, 15 bp, Homo sapiens
tgcgctctccaagtc

SEQ ID NO: 982790 - DNA, 15 bp, Homo sapiens
ttgcgctctccaagt

SEQ ID NO: 982791 - DNA, 15 bp, Homo sapiens
cttgcgctctccaag

SEQ ID NO: 982792 - DNA, 15 bp, Homo sapiens
tcttgcgctctccaa

SEQ ID NO: 982793 - DNA, 15 bp, Homo sapiens
atcttgcgctctcca

SEQ ID NO: 982794 - DNA, 15 bp, Homo sapiens
catcttgcgctctcc

SEQ ID NO: 982795 - DNA, 15 bp, Homo sapiens
gcatcttgcgctctc

SEQ ID NO: 982796 - DNA, 15 bp, Homo sapiens
agcatcttgcgctct

SEQ ID NO: 982797 - DNA, 15 bp, Homo sapiens
tagcatcttgcgctc

SEQ ID NO: 982798 - DNA, 15 bp, Homo sapiens
ctagcatcttgcgct

SEQ ID NO: 982799 - DNA, 15 bp, Homo sapiens
gctagcatcttgcgc

SEQ ID NO: 982800 - DNA, 15 bp, Homo sapiens
cgctagcatcttgcg

SEQ ID NO: 982801 - DNA, 15 bp, Homo sapiens
tcgctagcatcttgc

SEQ ID NO: 982802 - DNA, 15 bp, Homo sapiens
gtcgctagcatcttg

SEQ ID NO: 982803 - DNA, 15 bp, Homo sapiens
tgtcgctagcatctt

SEQ ID NO: 982804 - DNA, 15 bp, Homo sapiens
ctgtcgctagcatct

SEQ ID NO: 982805 - DNA, 15 bp, Homo sapiens
tctgtcgctagcatc

SEQ ID NO: 982806 - DNA, 15 bp, Homo sapiens
ctctgtcgctagcat

SEQ ID NO: 982807 - DNA, 15 bp, Homo sapiens
gctctgtcgctagca

SEQ ID NO: 982808 - DNA, 15 bp, Homo sapiens
tgctctgtcgctagc

SEQ ID NO: 982809 - DNA, 15 bp, Homo sapiens
ttgctctgtcgctag

SEQ ID NO: 982810 - DNA, 15 bp, Homo sapiens
cttgctctgtcgcta

SEQ ID NO: 982811 - DNA, 15 bp, Homo sapiens
tcttgctctgtcgct

SEQ ID NO: 982812 - DNA, 15 bp, Homo sapiens
gtcttgctctgtcgc

SEQ ID NO: 982813 - DNA, 15 bp, Homo sapiens
agtcttgctctgtcg

SEQ ID NO: 982814 - DNA, 15 bp, Homo sapiens
gagtcttgctctgtc

SEQ ID NO: 982815 - DNA, 15 bp, Homo sapiens
ggagtcttgctctgt

SEQ ID NO: 982816 - DNA, 15 bp, Homo sapiens
tggagtcttgctctg

SEQ ID NO: 982817 - DNA, 15 bp, Homo sapiens
atggagtcttgctct

SEQ ID NO: 982818 - DNA, 15 bp, Homo sapiens
gatggagtcttgctc

SEQ ID NO: 982819 - DNA, 15 bp, Homo sapiens
agatggagtcttgct

SEQ ID NO: 982820 - DNA, 15 bp, Homo sapiens
gagatggagtcttgc

SEQ ID NO: 982821 - DNA, 15 bp, Homo sapiens
ggagatggagtcttg

SEQ ID NO: 982822 - DNA, 15 bp, Homo sapiens
tggagatggagtctt

SEQ ID NO: 982823 - DNA, 15 bp, Homo sapiens
ctggagatggagtct

SEQ ID NO: 982824 - DNA, 15 bp, Homo sapiens
tctggagatggagtc

SEQ ID NO: 982825 - DNA, 15 bp, Homo sapiens
atctggagatggagt

SEQ ID NO: 982826 - DNA, 15 bp, Homo sapiens
tatctggagatggag

SEQ ID NO: 982827 - DNA, 15 bp, Homo sapiens
ttatctggagatgga

SEQ ID NO: 982828 - DNA, 15 bp, Homo sapiens
tttatctggagatgg

SEQ ID NO: 982829 - DNA, 15 bp, Homo sapiens
atttatctggagatg

SEQ ID NO: 982830 - DNA, 15 bp, Homo sapiens
tatttatctggagat

SEQ ID NO: 982831 - DNA, 15 bp, Homo sapiens
ttatttatctggaga

SEQ ID NO: 982832 - DNA, 15 bp, Homo sapiens
tttatttatctggag

SEQ ID NO: 982833 - DNA, 15 bp, Homo sapiens
atttatttatctgga

SEQ ID NO: 982834 - DNA, 15 bp, Homo sapiens
tatttatttatctgg

SEQ ID NO: 982835 - DNA, 15 bp, Homo sapiens
ttatttatttatctg

SEQ ID NO: 982836 - DNA, 15 bp, Homo sapiens
cttatttatttatct

SEQ ID NO: 982837 - DNA, 15 bp, Homo sapiens
acttatttatttatc

SEQ ID NO: 982838 - DNA, 15 bp, Homo sapiens
tacttatttatttat

SEQ ID NO: 982839 - DNA, 15 bp, Homo sapiens
ttacttatttattta

SEQ ID NO: 982840 - DNA, 15 bp, Homo sapiens
tttacttatttattt

SEQ ID NO: 982841 - DNA, 15 bp, Homo sapiens
ttttacttatttatt

SEQ ID NO: 982842 - DNA, 15 bp, Homo sapiens
attttacttatttat

SEQ ID NO: 982843 - DNA, 15 bp, Homo sapiens
tattttacttattta

SEQ ID NO: 982844 - DNA, 15 bp, Homo sapiens
ttattttacttattt

SEQ ID NO: 982845 - DNA, 15 bp, Homo sapiens
tttattttacttatt

SEQ ID NO: 982846 - DNA, 15 bp, Homo sapiens
ttttattttacttat

SEQ ID NO: 982847 - DNA, 15 bp, Homo sapiens
tttttattttactta

SEQ ID NO: 982848 - DNA, 15 bp, Homo sapiens
ttttttattttactt

SEQ ID NO: 982849 - DNA, 15 bp, Homo sapiens
cttttttattttact

SEQ ID NO: 982850 - DNA, 15 bp, Homo sapiens
tcttttttattttac

SEQ ID NO: 982851 - DNA, 15 bp, Homo sapiens
ttcttttttatttta

SEQ ID NO: 982852 - DNA, 15 bp, Homo sapiens
gttcttttttatttt

SEQ ID NO: 982853 - DNA, 15 bp, Homo sapiens
tgttcttttttattt

SEQ ID NO: 982854 - DNA, 15 bp, Homo sapiens
gtgttcttttttatt

SEQ ID NO: 982855 - DNA, 15 bp, Homo sapiens
tgtgttcttttttat

SEQ ID NO: 982856 - DNA, 15 bp, Homo sapiens
ttgtgttctttttta

SEQ ID NO: 982857 - DNA, 15 bp, Homo sapiens
tttgtgttctttttt

SEQ ID NO: 982858 - DNA, 15 bp, Homo sapiens
atttgtgttcttttt

SEQ ID NO: 982859 - DNA, 15 bp, Homo sapiens
tatttgtgttctttt

SEQ ID NO: 982860 - DNA, 15 bp, Homo sapiens
ttatttgtgttcttt

SEQ ID NO: 982861 - DNA, 15 bp, Homo sapiens
attatttgtgttctt

SEQ ID NO: 982862 - DNA, 15 bp, Homo sapiens
aattatttgtgttct

SEQ ID NO: 982863 - DNA, 15 bp, Homo sapiens
aaattatttgtgttc

SEQ ID NO: 982864 - DNA, 15 bp, Homo sapiens
aaaattatttgtgtt

SEQ ID NO: 982865 - DNA, 15 bp, Homo sapiens
caaaattatttgtgt

SEQ ID NO: 982866 - DNA, 15 bp, Homo sapiens
tcaaaattatttgtg

SEQ ID NO: 982867 - DNA, 15 bp, Homo sapiens
ttcaaaattatttgt

SEQ ID NO: 982868 - DNA, 15 bp, Homo sapiens
tttcaaaattatttg

SEQ ID NO: 982869 - DNA, 15 bp, Homo sapiens
ttttcaaaattattt

SEQ ID NO: 982870 - DNA, 15 bp, Homo sapiens
attttcaaaattatt

SEQ ID NO: 982871 - DNA, 15 bp, Homo sapiens
aattttcaaaattat

SEQ ID NO: 982872 - DNA, 15 bp, Homo sapiens
aaattttcaaaatta

SEQ ID NO: 982873 - DNA, 15 bp, Homo sapiens
aaaattttcaaaatt

SEQ ID NO: 982874 - DNA, 15 bp, Homo sapiens
aaaaattttcaaaat

SEQ ID NO: 982875 - DNA, 15 bp, Homo sapiens
aaaaaattttcaaaa

SEQ ID NO: 982876 - DNA, 15 bp, Homo sapiens
aaaaaaattttcaaa

SEQ ID NO: 982877 - DNA, 15 bp, Homo sapiens
caaaaaaattttcaa

SEQ ID NO: 982878 - DNA, 15 bp, Homo sapiens
tcaaaaaaattttca

SEQ ID NO: 982879 - DNA, 15 bp, Homo sapiens
ttcaaaaaaattttc

SEQ ID NO: 982880 - DNA, 15 bp, Homo sapiens
tttcaaaaaaatttt

SEQ ID NO: 982881 - DNA, 15 bp, Homo sapiens
ttttcaaaaaaattt

SEQ ID NO: 982882 - DNA, 15 bp, Homo sapiens
attttcaaaaaaatt

SEQ ID NO: 982883 - DNA, 15 bp, Homo sapiens
aattttcaaaaaaat

SEQ ID NO: 982884 - DNA, 15 bp, Homo sapiens
taattttcaaaaaaa

SEQ ID NO: 982885 - DNA, 15 bp, Homo sapiens
ctaattttcaaaaaa

SEQ ID NO: 982886 - DNA, 15 bp, Homo sapiens
cctaattttcaaaaa

SEQ ID NO: 982887 - DNA, 15 bp, Homo sapiens
gcctaattttcaaaa

SEQ ID NO: 982888 - DNA, 15 bp, Homo sapiens
tgcctaattttcaaa

SEQ ID NO: 982889 - DNA, 15 bp, Homo sapiens
gtgcctaattttcaa

SEQ ID NO: 982890 - DNA, 15 bp, Homo sapiens
cgtgcctaattttca

SEQ ID NO: 982891 - DNA, 15 bp, Homo sapiens
acgtgcctaattttc

SEQ ID NO: 982892 - DNA, 15 bp, Homo sapiens
aacgtgcctaatttt

SEQ ID NO: 982893 - DNA, 15 bp, Homo sapiens
aaacgtgcctaattt

SEQ ID NO: 982894 - DNA, 15 bp, Homo sapiens
caaacgtgcctaatt

SEQ ID NO: 982895 - DNA, 15 bp, Homo sapiens
gcaaacgtgcctaat

SEQ ID NO: 982896 - DNA, 15 bp, Homo sapiens
tgcaaacgtgcctaa

SEQ ID NO: 982897 - DNA, 15 bp, Homo sapiens
gtgcaaacgtgccta

SEQ ID NO: 982898 - DNA, 15 bp, Homo sapiens
agtgcaaacgtgcct

SEQ ID NO: 982899 - DNA, 15 bp, Homo sapiens
cagtgcaaacgtgcc

SEQ ID NO: 982900 - DNA, 15 bp, Homo sapiens
tcagtgcaaacgtgc

SEQ ID NO: 982901 - DNA, 15 bp, Homo sapiens
gtcagtgcaaacgtg

SEQ ID NO: 982902 - DNA, 15 bp, Homo sapiens
ggtcagtgcaaacgt

SEQ ID NO: 982903 - DNA, 15 bp, Homo sapiens
aggtcagtgcaaacg

SEQ ID NO: 982904 - DNA, 15 bp, Homo sapiens
aaggtcagtgcaaac

SEQ ID NO: 982905 - DNA, 15 bp, Homo sapiens
gaaggtcagtgcaaa

SEQ ID NO: 982906 - DNA, 15 bp, Homo sapiens
tgaaggtcagtgcaa

SEQ ID NO: 982907 - DNA, 15 bp, Homo sapiens
ttgaaggtcagtgca

SEQ ID NO: 982908 - DNA, 15 bp, Homo sapiens
attgaaggtcagtgc

SEQ ID NO: 982909 - DNA, 15 bp, Homo sapiens
aattgaaggtcagtg

SEQ ID NO: 982910 - DNA, 15 bp, Homo sapiens
caattgaaggtcagt

SEQ ID NO: 982911 - DNA, 15 bp, Homo sapiens
acaattgaaggtcag

SEQ ID NO: 982912 - DNA, 15 bp, Homo sapiens
aacaattgaaggtca

SEQ ID NO: 982913 - DNA, 15 bp, Homo sapiens
taacaattgaaggtc

SEQ ID NO: 982914 - DNA, 15 bp, Homo sapiens
ataacaattgaaggt

SEQ ID NO: 982915 - DNA, 15 bp, Homo sapiens
aataacaattgaagg

SEQ ID NO: 982916 - DNA, 15 bp, Homo sapiens
taataacaattgaag

SEQ ID NO: 982917 - DNA, 15 bp, Homo sapiens
ttaataacaattgaa

SEQ ID NO: 982918 - DNA, 15 bp, Homo sapiens
attaataacaattga

SEQ ID NO: 982919 - DNA, 15 bp, Homo sapiens
aattaataacaattg

SEQ ID NO: 982920 - DNA, 15 bp, Homo sapiens
caattaataacaatt

SEQ ID NO: 982921 - DNA, 15 bp, Homo sapiens
gcaattaataacaat

SEQ ID NO: 982922 - DNA, 15 bp, Homo sapiens
agcaattaataacaa

SEQ ID NO: 982923 - DNA, 15 bp, Homo sapiens
cagcaattaataaca

SEQ ID NO: 982924 - DNA, 15 bp, Homo sapiens
ccagcaattaataac

SEQ ID NO: 982925 - DNA, 15 bp, Homo sapiens
accagcaattaataa

SEQ ID NO: 982926 - DNA, 15 bp, Homo sapiens
aaccagcaattaata

SEQ ID NO: 982927 - DNA, 15 bp, Homo sapiens
aaaccagcaattaat

SEQ ID NO: 982928 - DNA, 15 bp, Homo sapiens
gaaaccagcaattaa

SEQ ID NO: 982929 - DNA, 15 bp, Homo sapiens
ggaaaccagcaatta

SEQ ID NO: 982930 - DNA, 15 bp, Homo sapiens
gggaaaccagcaatt

SEQ ID NO: 982931 - DNA, 15 bp, Homo sapiens
tgggaaaccagcaat

SEQ ID NO: 982932 - DNA, 15 bp, Homo sapiens
gtgggaaaccagcaa

SEQ ID NO: 982933 - DNA, 15 bp, Homo sapiens
ggtgggaaaccagca

SEQ ID NO: 982934 - DNA, 15 bp, Homo sapiens
gggtgggaaaccagc

SEQ ID NO: 982935 - DNA, 15 bp, Homo sapiens
tgggtgggaaaccag

SEQ ID NO: 982936 - DNA, 15 bp, Homo sapiens
ctgggtgggaaacca

SEQ ID NO: 982937 - DNA, 15 bp, Homo sapiens
tctgggtgggaaacc

SEQ ID NO: 982938 - DNA, 15 bp, Homo sapiens
ttctgggtgggaaac

SEQ ID NO: 982939 - DNA, 15 bp, Homo sapiens
attctgggtgggaaa

SEQ ID NO: 982940 - DNA, 15 bp, Homo sapiens
aattctgggtgggaa

SEQ ID NO: 982941 - DNA, 15 bp, Homo sapiens
taattctgggtggga

SEQ ID NO: 982942 - DNA, 15 bp, Homo sapiens
ttaattctgggtggg

SEQ ID NO: 982943 - DNA, 15 bp, Homo sapiens
cttaattctgggtgg

SEQ ID NO: 982944 - DNA, 15 bp, Homo sapiens
acttaattctgggtg

SEQ ID NO: 982945 - DNA, 15 bp, Homo sapiens
aacttaattctgggt

SEQ ID NO: 982946 - DNA, 15 bp, Homo sapiens
caacttaattctggg

SEQ ID NO: 982947 - DNA, 15 bp, Homo sapiens
ccaacttaattctgg

SEQ ID NO: 982948 - DNA, 15 bp, Homo sapiens
tccaacttaattctg

SEQ ID NO: 982949 - DNA, 15 bp, Homo sapiens
ttccaacttaattct

SEQ ID NO: 982950 - DNA, 15 bp, Homo sapiens
attccaacttaattc

SEQ ID NO: 982951 - DNA, 15 bp, Homo sapiens
cattccaacttaatt

SEQ ID NO: 982952 - DNA, 15 bp, Homo sapiens
gcattccaacttaat

SEQ ID NO: 982953 - DNA, 15 bp, Homo sapiens
tgcattccaacttaa

SEQ ID NO: 982954 - DNA, 15 bp, Homo sapiens
ttgcattccaactta

SEQ ID NO: 982955 - DNA, 15 bp, Homo sapiens
gttgcattccaactt

SEQ ID NO: 982956 - DNA, 15 bp, Homo sapiens
agttgcattccaact

SEQ ID NO: 982957 - DNA, 15 bp, Homo sapiens
aagttgcattccaac

SEQ ID NO: 982958 - DNA, 15 bp, Homo sapiens
aaagttgcattccaa

SEQ ID NO: 982959 - DNA, 15 bp, Homo sapiens
gaaagttgcattcca

SEQ ID NO: 982960 - DNA, 15 bp, Homo sapiens
agaaagttgcattcc

SEQ ID NO: 982961 - DNA, 15 bp, Homo sapiens
aagaaagttgcattc

SEQ ID NO: 982962 - DNA, 15 bp, Homo sapiens
aaagaaagttgcatt

SEQ ID NO: 982963 - DNA, 15 bp, Homo sapiens
aaaagaaagttgcat

SEQ ID NO: 982964 - DNA, 15 bp, Homo sapiens
taaaagaaagttgca

SEQ ID NO: 982965 - DNA, 15 bp, Homo sapiens
gtaaaagaaagttgc

SEQ ID NO: 982966 - DNA, 15 bp, Homo sapiens
tgtaaaagaaagttg

SEQ ID NO: 982967 - DNA, 15 bp, Homo sapiens
ttgtaaaagaaagtt

SEQ ID NO: 982968 - DNA, 15 bp, Homo sapiens
attgtaaaagaaagt

SEQ ID NO: 982969 - DNA, 15 bp, Homo sapiens
gattgtaaaagaaag

SEQ ID NO: 982970 - DNA, 15 bp, Homo sapiens
tgattgtaaaagaaa

SEQ ID NO: 982971 - DNA, 15 bp, Homo sapiens
ctgattgtaaaagaa

SEQ ID NO: 982972 - DNA, 15 bp, Homo sapiens
tctgattgtaaaaga

SEQ ID NO: 982973 - DNA, 15 bp, Homo sapiens
ctctgattgtaaaag

SEQ ID NO: 982974 - DNA, 15 bp, Homo sapiens
actctgattgtaaaa

SEQ ID NO: 982975 - DNA, 15 bp, Homo sapiens
gactctgattgtaaa

SEQ ID NO: 982976 - DNA, 15 bp, Homo sapiens
ggactctgattgtaa

SEQ ID NO: 982977 - DNA, 15 bp, Homo sapiens
cggactctgattgta

SEQ ID NO: 982978 - DNA, 15 bp, Homo sapiens
acggactctgattgt

SEQ ID NO: 982979 - DNA, 15 bp, Homo sapiens
aacggactctgattg

SEQ ID NO: 982980 - DNA, 15 bp, Homo sapiens
gaacggactctgatt

SEQ ID NO: 982981 - DNA, 15 bp, Homo sapiens
agaacggactctgat

SEQ ID NO: 982982 - DNA, 15 bp, Homo sapiens
aagaacggactctga

SEQ ID NO: 982983 - DNA, 15 bp, Homo sapiens
caagaacggactctg

SEQ ID NO: 982984 - DNA, 15 bp, Homo sapiens
ccaagaacggactct

SEQ ID NO: 982985 - DNA, 15 bp, Homo sapiens
accaagaacggactc

SEQ ID NO: 982986 - DNA, 15 bp, Homo sapiens
gaccaagaacggact

SEQ ID NO: 982987 - DNA, 15 bp, Homo sapiens
agaccaagaacggac

SEQ ID NO: 982988 - DNA, 15 bp, Homo sapiens
aagaccaagaacgga

SEQ ID NO: 982989 - DNA, 15 bp, Homo sapiens
caagaccaagaacgg

SEQ ID NO: 982990 - DNA, 15 bp, Homo sapiens
ccaagaccaagaacg

SEQ ID NO: 982991 - DNA, 15 bp, Homo sapiens
tccaagaccaagaac

SEQ ID NO: 982992 - DNA, 15 bp, Homo sapiens
ttccaagaccaagaa

SEQ ID NO: 982993 - DNA, 15 bp, Homo sapiens
tttccaagaccaaga

SEQ ID NO: 982994 - DNA, 15 bp, Homo sapiens
gtttccaagaccaag

SEQ ID NO: 982995 - DNA, 15 bp, Homo sapiens
agtttccaagaccaa

SEQ ID NO: 982996 - DNA, 15 bp, Homo sapiens
aagtttccaagacca

SEQ ID NO: 982997 - DNA, 15 bp, Homo sapiens
gaagtttccaagacc

SEQ ID NO: 982998 - DNA, 15 bp, Homo sapiens
agaagtttccaagac

SEQ ID NO: 982999 - DNA, 15 bp, Homo sapiens
cagaagtttccaaga

SEQ ID NO: 983000 - DNA, 15 bp, Homo sapiens
tcagaagtttccaag

SEQ ID NO: 983001 - DNA, 15 bp, Homo sapiens
ctcagaagtttccaa

SEQ ID NO: 983002 - DNA, 15 bp, Homo sapiens
cctcagaagtttcca

SEQ ID NO: 983003 - DNA, 15 bp, Homo sapiens
gcctcagaagtttcc

SEQ ID NO: 983004 - DNA, 15 bp, Homo sapiens
agcctcagaagtttc

SEQ ID NO: 983005 - DNA, 15 bp, Homo sapiens
gagcctcagaagttt

SEQ ID NO: 983006 - DNA, 15 bp, Homo sapiens
ggagcctcagaagtt

SEQ ID NO: 983007 - DNA, 15 bp, Homo sapiens
aggagcctcagaagt

SEQ ID NO: 983008 - DNA, 15 bp, Homo sapiens
caggagcctcagaag

SEQ ID NO: 983009 - DNA, 15 bp, Homo sapiens
acaggagcctcagaa

SEQ ID NO: 983010 - DNA, 15 bp, Homo sapiens
cacaggagcctcaga

SEQ ID NO: 983011 - DNA, 15 bp, Homo sapiens
gcacaggagcctcag

SEQ ID NO: 983012 - DNA, 15 bp, Homo sapiens
agcacaggagcctca

SEQ ID NO: 983013 - DNA, 15 bp, Homo sapiens
tagcacaggagcctc

SEQ ID NO: 983014 - DNA, 15 bp, Homo sapiens
ttagcacaggagcct

SEQ ID NO: 983015 - DNA, 15 bp, Homo sapiens
attagcacaggagcc

SEQ ID NO: 983016 - DNA, 15 bp, Homo sapiens
gattagcacaggagc

SEQ ID NO: 983017 - DNA, 15 bp, Homo sapiens
tgattagcacaggag

SEQ ID NO: 983018 - DNA, 15 bp, Homo sapiens
gtgattagcacagga

SEQ ID NO: 983019 - DNA, 15 bp, Homo sapiens
tgtgattagcacagg

SEQ ID NO: 983020 - DNA, 15 bp, Homo sapiens
gtgtgattagcacag

SEQ ID NO: 983021 - DNA, 15 bp, Homo sapiens
agtgtgattagcaca

SEQ ID NO: 983022 - DNA, 15 bp, Homo sapiens
gagtgtgattagcac

SEQ ID NO: 983023 - DNA, 15 bp, Homo sapiens
agagtgtgattagca

SEQ ID NO: 983024 - DNA, 15 bp, Homo sapiens
aagagtgtgattagc

SEQ ID NO: 983025 - DNA, 15 bp, Homo sapiens
caagagtgtgattag

SEQ ID NO: 983026 - DNA, 15 bp, Homo sapiens
acaagagtgtgatta

SEQ ID NO: 983027 - DNA, 15 bp, Homo sapiens
tacaagagtgtgatt

SEQ ID NO: 983028 - DNA, 15 bp, Homo sapiens
atacaagagtgtgat

SEQ ID NO: 983029 - DNA, 15 bp, Homo sapiens
aatacaagagtgtga

SEQ ID NO: 983030 - DNA, 15 bp, Homo sapiens
aaatacaagagtgtg

SEQ ID NO: 983031 - DNA, 15 bp, Homo sapiens
aaaatacaagagtgt

SEQ ID NO: 983032 - DNA, 15 bp, Homo sapiens
aaaaatacaagagtg

SEQ ID NO: 983033 - DNA, 15 bp, Homo sapiens
caaaaatacaagagt

SEQ ID NO: 983034 - DNA, 15 bp, Homo sapiens
ccaaaaatacaagag

SEQ ID NO: 983035 - DNA, 15 bp, Homo sapiens
gccaaaaatacaaga

SEQ ID NO: 983036 - DNA, 15 bp, Homo sapiens
tgccaaaaatacaag

SEQ ID NO: 983037 - DNA, 15 bp, Homo sapiens
gtgccaaaaatacaa

SEQ ID NO: 983038 - DNA, 15 bp, Homo sapiens
ggtgccaaaaataca

SEQ ID NO: 983039 - DNA, 15 bp, Homo sapiens
aggtgccaaaaatac

SEQ ID NO: 983040 - DNA, 15 bp, Homo sapiens
gaggtgccaaaaata

SEQ ID NO: 983041 - DNA, 15 bp, Homo sapiens
agaggtgccaaaaat

SEQ ID NO: 983042 - DNA, 15 bp, Homo sapiens
tagaggtgccaaaaa

SEQ ID NO: 983043 - DNA, 15 bp, Homo sapiens
gtagaggtgccaaaa

SEQ ID NO: 983044 - DNA, 15 bp, Homo sapiens
ggtagaggtgccaaa

SEQ ID NO: 983045 - DNA, 15 bp, Homo sapiens
gggtagaggtgccaa

SEQ ID NO: 983046 - DNA, 15 bp, Homo sapiens
ggggtagaggtgcca

SEQ ID NO: 983047 - DNA, 15 bp, Homo sapiens
cggggtagaggtgcc

SEQ ID NO: 983048 - DNA, 15 bp, Homo sapiens
acggggtagaggtgc

SEQ ID NO: 983049 - DNA, 15 bp, Homo sapiens
cacggggtagaggtg

SEQ ID NO: 983050 - DNA, 15 bp, Homo sapiens
gcacggggtagaggt

SEQ ID NO: 983051 - DNA, 15 bp, Homo sapiens
ggcacggggtagagg

SEQ ID NO: 983052 - DNA, 15 bp, Homo sapiens
tggcacggggtagag

SEQ ID NO: 983053 - DNA, 15 bp, Homo sapiens
gtggcacggggtaga

SEQ ID NO: 983054 - DNA, 15 bp, Homo sapiens
agtggcacggggtag

SEQ ID NO: 983055 - DNA, 15 bp, Homo sapiens
cagtggcacggggta

SEQ ID NO: 983056 - DNA, 15 bp, Homo sapiens
acagtggcacggggt

SEQ ID NO: 983057 - DNA, 15 bp, Homo sapiens
gacagtggcacgggg

SEQ ID NO: 983058 - DNA, 15 bp, Homo sapiens
tgacagtggcacggg

SEQ ID NO: 983059 - DNA, 15 bp, Homo sapiens
atgacagtggcacgg

SEQ ID NO: 983060 - DNA, 15 bp, Homo sapiens
catgacagtggcacg

SEQ ID NO: 983061 - DNA, 15 bp, Homo sapiens
ccatgacagtggcac

SEQ ID NO: 983062 - DNA, 15 bp, Homo sapiens
tccatgacagtggca

SEQ ID NO: 983063 - DNA, 15 bp, Homo sapiens
ttccatgacagtggc

SEQ ID NO: 983064 - DNA, 15 bp, Homo sapiens
gttccatgacagtgg

SEQ ID NO: 983065 - DNA, 15 bp, Homo sapiens
ggttccatgacagtg

SEQ ID NO: 983066 - DNA, 15 bp, Homo sapiens
gggttccatgacagt

SEQ ID NO: 983067 - DNA, 15 bp, Homo sapiens
tgggttccatgacag

SEQ ID NO: 983068 - DNA, 15 bp, Homo sapiens
ctgggttccatgaca

SEQ ID NO: 983069 - DNA, 15 bp, Homo sapiens
cctgggttccatgac

SEQ ID NO: 983070 - DNA, 15 bp, Homo sapiens
gcctgggttccatga

SEQ ID NO: 983071 - DNA, 15 bp, Homo sapiens
agcctgggttccatg

SEQ ID NO: 983072 - DNA, 15 bp, Homo sapiens
cagcctgggttccat

SEQ ID NO: 983073 - DNA, 15 bp, Homo sapiens
tcagcctgggttcca

SEQ ID NO: 983074 - DNA, 15 bp, Homo sapiens
atcagcctgggttcc

SEQ ID NO: 983075 - DNA, 15 bp, Homo sapiens
gatcagcctgggttc

SEQ ID NO: 983076 - DNA, 15 bp, Homo sapiens
cgatcagcctgggtt

SEQ ID NO: 983077 - DNA, 15 bp, Homo sapiens
gcgatcagcctgggt

SEQ ID NO: 983078 - DNA, 15 bp, Homo sapiens
tgcgatcagcctggg

SEQ ID NO: 983079 - DNA, 15 bp, Homo sapiens
gtgcgatcagcctgg

SEQ ID NO: 983080 - DNA, 15 bp, Homo sapiens
ggtgcgatcagcctg

SEQ ID NO: 983081 - DNA, 15 bp, Homo sapiens
aggtgcgatcagcct

SEQ ID NO: 983082 - DNA, 15 bp, Homo sapiens
taggtgcgatcagcc

SEQ ID NO: 983083 - DNA, 15 bp, Homo sapiens
ataggtgcgatcagc

SEQ ID NO: 983084 - DNA, 15 bp, Homo sapiens
aataggtgcgatcag

SEQ ID NO: 983085 - DNA, 15 bp, Homo sapiens
taataggtgcgatca

SEQ ID NO: 983086 - DNA, 15 bp, Homo sapiens
ctaataggtgcgatc

SEQ ID NO: 983087 - DNA, 15 bp, Homo sapiens
actaataggtgcgat

SEQ ID NO: 983088 - DNA, 15 bp, Homo sapiens
cactaataggtgcga

SEQ ID NO: 983089 - DNA, 15 bp, Homo sapiens
ccactaataggtgcg

SEQ ID NO: 983090 - DNA, 15 bp, Homo sapiens
tccactaataggtgc

SEQ ID NO: 983091 - DNA, 15 bp, Homo sapiens
ctccactaataggtg

SEQ ID NO: 983092 - DNA, 15 bp, Homo sapiens
tctccactaataggt

SEQ ID NO: 983093 - DNA, 15 bp, Homo sapiens
ttctccactaatagg

SEQ ID NO: 983094 - DNA, 15 bp, Homo sapiens
tttctccactaatag

SEQ ID NO: 983095 - DNA, 15 bp, Homo sapiens
atttctccactaata

SEQ ID NO: 983096 - DNA, 15 bp, Homo sapiens
gatttctccactaat

SEQ ID NO: 983097 - DNA, 15 bp, Homo sapiens
agatttctccactaa

SEQ ID NO: 983098 - DNA, 15 bp, Homo sapiens
cagatttctccacta

SEQ ID NO: 983099 - DNA, 15 bp, Homo sapiens
acagatttctccact

SEQ ID NO: 983100 - DNA, 15 bp, Homo sapiens
gacagatttctccac

SEQ ID NO: 983101 - DNA, 15 bp, Homo sapiens
ggacagatttctcca

SEQ ID NO: 983102 - DNA, 15 bp, Homo sapiens
tggacagatttctcc

SEQ ID NO: 983103 - DNA, 15 bp, Homo sapiens
atggacagatttctc

SEQ ID NO: 983104 - DNA, 15 bp, Homo sapiens
tatggacagatttct

SEQ ID NO: 983105 - DNA, 15 bp, Homo sapiens
ttatggacagatttc

SEQ ID NO: 983106 - DNA, 15 bp, Homo sapiens
attatggacagattt

SEQ ID NO: 983107 - DNA, 15 bp, Homo sapiens
tattatggacagatt

SEQ ID NO: 983108 - DNA, 15 bp, Homo sapiens
gtattatggacagat

SEQ ID NO: 983109 - DNA, 15 bp, Homo sapiens
agtattatggacaga

SEQ ID NO: 983110 - DNA, 15 bp, Homo sapiens
cagtattatggacag

SEQ ID NO: 983111 - DNA, 15 bp, Homo sapiens
tcagtattatggaca

SEQ ID NO: 983112 - DNA, 15 bp, Homo sapiens
ttcagtattatggac

SEQ ID NO: 983113 - DNA, 15 bp, Homo sapiens
cttcagtattatgga

SEQ ID NO: 983114 - DNA, 15 bp, Homo sapiens
acttcagtattatgg

SEQ ID NO: 983115 - DNA, 15 bp, Homo sapiens
aacttcagtattatg

SEQ ID NO: 983116 - DNA, 15 bp, Homo sapiens
aaacttcagtattat

SEQ ID NO: 983117 - DNA, 15 bp, Homo sapiens
caaacttcagtatta

SEQ ID NO: 983118 - DNA, 15 bp, Homo sapiens
ccaaacttcagtatt

SEQ ID NO: 983119 - DNA, 15 bp, Homo sapiens
cccaaacttcagtat

SEQ ID NO: 983120 - DNA, 15 bp, Homo sapiens
ccccaaacttcagta

SEQ ID NO: 983121 - DNA, 15 bp, Homo sapiens
tccccaaacttcagt

SEQ ID NO: 983122 - DNA, 15 bp, Homo sapiens
gtccccaaacttcag

SEQ ID NO: 983123 - DNA, 15 bp, Homo sapiens
tgtccccaaacttca

SEQ ID NO: 983124 - DNA, 15 bp, Homo sapiens
ttgtccccaaacttc

SEQ ID NO: 983125 - DNA, 15 bp, Homo sapiens
tttgtccccaaactt

SEQ ID NO: 983126 - DNA, 15 bp, Homo sapiens
gtttgtccccaaact

SEQ ID NO: 983127 - DNA, 15 bp, Homo sapiens
tgtttgtccccaaac

SEQ ID NO: 983128 - DNA, 15 bp, Homo sapiens
ctgtttgtccccaaa

SEQ ID NO: 983129 - DNA, 15 bp, Homo sapiens
actgtttgtccccaa

SEQ ID NO: 983130 - DNA, 15 bp, Homo sapiens
cactgtttgtcccca

SEQ ID NO: 983131 - DNA, 15 bp, Homo sapiens
acactgtttgtcccc

SEQ ID NO: 983132 - DNA, 15 bp, Homo sapiens
aacactgtttgtccc

SEQ ID NO: 983133 - DNA, 15 bp, Homo sapiens
gaacactgtttgtcc

SEQ ID NO: 983134 - DNA, 15 bp, Homo sapiens
ggaacactgtttgtc

SEQ ID NO: 983135 - DNA, 15 bp, Homo sapiens
gggaacactgtttgt

SEQ ID NO: 983136 - DNA, 15 bp, Homo sapiens
agggaacactgtttg

SEQ ID NO: 983137 - DNA, 15 bp, Homo sapiens
aagggaacactgttt

SEQ ID NO: 983138 - DNA, 15 bp, Homo sapiens
taagggaacactgtt

SEQ ID NO: 983139 - DNA, 15 bp, Homo sapiens
ctaagggaacactgt

SEQ ID NO: 983140 - DNA, 15 bp, Homo sapiens
cctaagggaacactg

SEQ ID NO: 983141 - DNA, 15 bp, Homo sapiens
ccctaagggaacact

SEQ ID NO: 983142 - DNA, 15 bp, Homo sapiens
accctaagggaacac

SEQ ID NO: 983143 - DNA, 15 bp, Homo sapiens
taccctaagggaaca

SEQ ID NO: 983144 - DNA, 15 bp, Homo sapiens
ctaccctaagggaac

SEQ ID NO: 983145 - DNA, 15 bp, Homo sapiens
cctaccctaagggaa

SEQ ID NO: 983146 - DNA, 15 bp, Homo sapiens
tcctaccctaaggga

SEQ ID NO: 983147 - DNA, 15 bp, Homo sapiens
ctcctaccctaaggg

SEQ ID NO: 983148 - DNA, 15 bp, Homo sapiens
tctcctaccctaagg

SEQ ID NO: 983149 - DNA, 15 bp, Homo sapiens
ttctcctaccctaag

SEQ ID NO: 983150 - DNA, 15 bp, Homo sapiens
tttctcctaccctaa

SEQ ID NO: 983151 - DNA, 15 bp, Homo sapiens
ctttctcctacccta

SEQ ID NO: 983152 - DNA, 15 bp, Homo sapiens
tctttctcctaccct

SEQ ID NO: 983153 - DNA, 15 bp, Homo sapiens
ctctttctcctaccc

SEQ ID NO: 983154 - DNA, 15 bp, Homo sapiens
tctctttctcctacc

SEQ ID NO: 983155 - DNA, 15 bp, Homo sapiens
atctctttctcctac

SEQ ID NO: 983156 - DNA, 15 bp, Homo sapiens
gatctctttctccta

SEQ ID NO: 983157 - DNA, 15 bp, Homo sapiens
agatctctttctcct

SEQ ID NO: 983158 - DNA, 15 bp, Homo sapiens
aagatctctttctcc

SEQ ID NO: 983159 - DNA, 15 bp, Homo sapiens
aaagatctctttctc

SEQ ID NO: 983160 - DNA, 15 bp, Homo sapiens
taaagatctctttct

SEQ ID NO: 983161 - DNA, 15 bp, Homo sapiens
ataaagatctctttc

SEQ ID NO: 983162 - DNA, 15 bp, Homo sapiens
aataaagatctcttt

SEQ ID NO: 983163 - DNA, 15 bp, Homo sapiens
aaataaagatctctt

SEQ ID NO: 983164 - DNA, 15 bp, Homo sapiens
aaaataaagatctct

SEQ ID NO: 983165 - DNA, 15 bp, Homo sapiens
aaaaataaagatctc

SEQ ID NO: 983166 - DNA, 15 bp, Homo sapiens
caaaaataaagatct

SEQ ID NO: 983167 - DNA, 15 bp, Homo sapiens
tcaaaaataaagatc

SEQ ID NO: 983168 - DNA, 15 bp, Homo sapiens
gtcaaaaataaagat

SEQ ID NO: 983169 - DNA, 15 bp, Homo sapiens
tgtcaaaaataaaga

SEQ ID NO: 983170 - DNA, 15 bp, Homo sapiens
ttgtcaaaaataaag

SEQ ID NO: 983171 - DNA, 15 bp, Homo sapiens
tttgtcaaaaataaa

SEQ ID NO: 983172 - DNA, 15 bp, Homo sapiens
ctttgtcaaaaataa

SEQ ID NO: 983173 - DNA, 15 bp, Homo sapiens
cctttgtcaaaaata

SEQ ID NO: 983174 - DNA, 15 bp, Homo sapiens
ccctttgtcaaaaat

SEQ ID NO: 983175 - DNA, 15 bp, Homo sapiens
cccctttgtcaaaaa

SEQ ID NO: 983176 - DNA, 15 bp, Homo sapiens
ccccctttgtcaaaa

SEQ ID NO: 983177 - DNA, 15 bp, Homo sapiens
tccccctttgtcaaa

SEQ ID NO: 983178 - DNA, 15 bp, Homo sapiens
ctccccctttgtcaa

SEQ ID NO: 983179 - DNA, 15 bp, Homo sapiens
cctccccctttgtca

SEQ ID NO: 983180 - DNA, 15 bp, Homo sapiens
tcctccccctttgtc

SEQ ID NO: 983181 - DNA, 15 bp, Homo sapiens
ctcctccccctttgt

SEQ ID NO: 983182 - DNA, 15 bp, Homo sapiens
gctcctccccctttg

SEQ ID NO: 983183 - DNA, 15 bp, Homo sapiens
ggctcctcccccttt

SEQ ID NO: 983184 - DNA, 15 bp, Homo sapiens
tggctcctccccctt

SEQ ID NO: 983185 - DNA, 15 bp, Homo sapiens
ctggctcctccccct

SEQ ID NO: 983186 - DNA, 15 bp, Homo sapiens
tctggctcctccccc

SEQ ID NO: 983187 - DNA, 15 bp, Homo sapiens
ttctggctcctcccc

SEQ ID NO: 983188 - DNA, 15 bp, Homo sapiens
tttctggctcctccc

SEQ ID NO: 983189 - DNA, 15 bp, Homo sapiens
ttttctggctcctcc

SEQ ID NO: 983190 - DNA, 15 bp, Homo sapiens
gttttctggctcctc

SEQ ID NO: 983191 - DNA, 15 bp, Homo sapiens
agttttctggctcct

SEQ ID NO: 983192 - DNA, 15 bp, Homo sapiens
gagttttctggctcc

SEQ ID NO: 983193 - DNA, 15 bp, Homo sapiens
ggagttttctggctc

SEQ ID NO: 983194 - DNA, 15 bp, Homo sapiens
tggagttttctggct

SEQ ID NO: 983195 - DNA, 15 bp, Homo sapiens
ctggagttttctggc

SEQ ID NO: 983196 - DNA, 15 bp, Homo sapiens
tctggagttttctgg

SEQ ID NO: 983197 - DNA, 15 bp, Homo sapiens
ctctggagttttctg

SEQ ID NO: 983198 - DNA, 15 bp, Homo sapiens
tctctggagttttct

SEQ ID NO: 983199 - DNA, 15 bp, Homo sapiens
gtctctggagttttc

SEQ ID NO: 983200 - DNA, 15 bp, Homo sapiens
ggtctctggagtttt

SEQ ID NO: 983201 - DNA, 15 bp, Homo sapiens
gggtctctggagttt

SEQ ID NO: 983202 - DNA, 15 bp, Homo sapiens
ggggtctctggagtt

SEQ ID NO: 983203 - DNA, 15 bp, Homo sapiens
aggggtctctggagt

SEQ ID NO: 983204 - DNA, 15 bp, Homo sapiens
caggggtctctggag

SEQ ID NO: 983205 - DNA, 15 bp, Homo sapiens
tcaggggtctctgga

SEQ ID NO: 983206 - DNA, 15 bp, Homo sapiens
ctcaggggtctctgg

SEQ ID NO: 983207 - DNA, 15 bp, Homo sapiens
actcaggggtctctg

SEQ ID NO: 983208 - DNA, 15 bp, Homo sapiens
aactcaggggtctct

SEQ ID NO: 983209 - DNA, 15 bp, Homo sapiens
aaactcaggggtctc

SEQ ID NO: 983210 - DNA, 15 bp, Homo sapiens
caaactcaggggtct

SEQ ID NO: 983211 - DNA, 15 bp, Homo sapiens
gcaaactcaggggtc

SEQ ID NO: 983212 - DNA, 15 bp, Homo sapiens
ggcaaactcaggggt

SEQ ID NO: 983213 - DNA, 15 bp, Homo sapiens
gggcaaactcagggg

SEQ ID NO: 983214 - DNA, 15 bp, Homo sapiens
agggcaaactcaggg

SEQ ID NO: 983215 - DNA, 15 bp, Homo sapiens
gagggcaaactcagg

SEQ ID NO: 983216 - DNA, 15 bp, Homo sapiens
agagggcaaactcag

SEQ ID NO: 983217 - DNA, 15 bp, Homo sapiens
gagagggcaaactca

SEQ ID NO: 983218 - DNA, 15 bp, Homo sapiens
agagagggcaaactc

SEQ ID NO: 983219 - DNA, 15 bp, Homo sapiens
gagagagggcaaact

SEQ ID NO: 983220 - DNA, 15 bp, Homo sapiens
ggagagagggcaaac

SEQ ID NO: 983221 - DNA, 15 bp, Homo sapiens
tggagagagggcaaa

SEQ ID NO: 983222 - DNA, 15 bp, Homo sapiens
ttggagagagggcaa

SEQ ID NO: 983223 - DNA, 15 bp, Homo sapiens
cttggagagagggca

SEQ ID NO: 983224 - DNA, 15 bp, Homo sapiens
ccttggagagagggc

SEQ ID NO: 983225 - DNA, 15 bp, Homo sapiens
accttggagagaggg

SEQ ID NO: 983226 - DNA, 15 bp, Homo sapiens
aaccttggagagagg

SEQ ID NO: 983227 - DNA, 15 bp, Homo sapiens
aaaccttggagagag

SEQ ID NO: 983228 - DNA, 15 bp, Homo sapiens
caaaccttggagaga

SEQ ID NO: 983229 - DNA, 15 bp, Homo sapiens
ccaaaccttggagag

SEQ ID NO: 983230 - DNA, 15 bp, Homo sapiens
cccaaaccttggaga

SEQ ID NO: 983231 - DNA, 15 bp, Homo sapiens
ccccaaaccttggag

SEQ ID NO: 983232 - DNA, 15 bp, Homo sapiens
accccaaaccttgga

SEQ ID NO: 983233 - DNA, 15 bp, Homo sapiens
taccccaaaccttgg

SEQ ID NO: 983234 - DNA, 15 bp, Homo sapiens
ttaccccaaaccttg

SEQ ID NO: 983235 - DNA, 15 bp, Homo sapiens
cttaccccaaacctt

SEQ ID NO: 983236 - DNA, 15 bp, Homo sapiens
gcttaccccaaacct

SEQ ID NO: 983237 - DNA, 15 bp, Homo sapiens
ggcttaccccaaacc

SEQ ID NO: 983238 - DNA, 15 bp, Homo sapiens
gggcttaccccaaac

SEQ ID NO: 983239 - DNA, 15 bp, Homo sapiens
ggggcttaccccaaa

SEQ ID NO: 983240 - DNA, 15 bp, Homo sapiens
gggggcttaccccaa

SEQ ID NO: 983241 - DNA, 15 bp, Homo sapiens
ggggggcttacccca

SEQ ID NO: 983242 - DNA, 15 bp, Homo sapiens
cggggggcttacccc

SEQ ID NO: 983243 - DNA, 15 bp, Homo sapiens
acggggggcttaccc

SEQ ID NO: 983244 - DNA, 15 bp, Homo sapiens
gacggggggcttacc

SEQ ID NO: 983245 - DNA, 15 bp, Homo sapiens
tgacggggggcttac

SEQ ID NO: 983246 - DNA, 15 bp, Homo sapiens
gtgacggggggctta

SEQ ID NO: 983247 - DNA, 15 bp, Homo sapiens
ggtgacggggggctt

SEQ ID NO: 983248 - DNA, 15 bp, Homo sapiens
gggtgacggggggct

SEQ ID NO: 983249 - DNA, 15 bp, Homo sapiens
agggtgacggggggc

SEQ ID NO: 983250 - DNA, 15 bp, Homo sapiens
aagggtgacgggggg

SEQ ID NO: 983251 - DNA, 15 bp, Homo sapiens
aaagggtgacggggg

SEQ ID NO: 983252 - DNA, 15 bp, Homo sapiens
taaagggtgacgggg

SEQ ID NO: 983253 - DNA, 15 bp, Homo sapiens
ataaagggtgacggg

SEQ ID NO: 983254 - DNA, 15 bp, Homo sapiens
gataaagggtgacgg

SEQ ID NO: 983255 - DNA, 15 bp, Homo sapiens
agataaagggtgacg

SEQ ID NO: 983256 - DNA, 15 bp, Homo sapiens
gagataaagggtgac

SEQ ID NO: 983257 - DNA, 15 bp, Homo sapiens
agagataaagggtga

SEQ ID NO: 983258 - DNA, 15 bp, Homo sapiens
cagagataaagggtg

SEQ ID NO: 983259 - DNA, 15 bp, Homo sapiens
ccagagataaagggt

SEQ ID NO: 983260 - DNA, 15 bp, Homo sapiens
cccagagataaaggg

SEQ ID NO: 983261 - DNA, 15 bp, Homo sapiens
ccccagagataaagg

SEQ ID NO: 983262 - DNA, 15 bp, Homo sapiens
gccccagagataaag

SEQ ID NO: 983263 - DNA, 15 bp, Homo sapiens
agccccagagataaa

SEQ ID NO: 983264 - DNA, 15 bp, Homo sapiens
aagccccagagataa

SEQ ID NO: 983265 - DNA, 15 bp, Homo sapiens
aaagccccagagata

SEQ ID NO: 983266 - DNA, 15 bp, Homo sapiens
gaaagccccagagat

SEQ ID NO: 983267 - DNA, 15 bp, Homo sapiens
tgaaagccccagaga

SEQ ID NO: 983268 - DNA, 15 bp, Homo sapiens
gtgaaagccccagag

SEQ ID NO: 983269 - DNA, 15 bp, Homo sapiens
tgtgaaagccccaga

SEQ ID NO: 983270 - DNA, 15 bp, Homo sapiens
atgtgaaagccccag

SEQ ID NO: 983271 - DNA, 15 bp, Homo sapiens
tatgtgaaagcccca

SEQ ID NO: 983272 - DNA, 15 bp, Homo sapiens
atatgtgaaagcccc

SEQ ID NO: 983273 - DNA, 15 bp, Homo sapiens
aatatgtgaaagccc

SEQ ID NO: 983274 - DNA, 15 bp, Homo sapiens
gaatatgtgaaagcc

SEQ ID NO: 983275 - DNA, 15 bp, Homo sapiens
agaatatgtgaaagc

SEQ ID NO: 983276 - DNA, 15 bp, Homo sapiens
cagaatatgtgaaag

SEQ ID NO: 983277 - DNA, 15 bp, Homo sapiens
ccagaatatgtgaaa

SEQ ID NO: 983278 - DNA, 15 bp, Homo sapiens
tccagaatatgtgaa

SEQ ID NO: 983279 - DNA, 15 bp, Homo sapiens
atccagaatatgtga

SEQ ID NO: 983280 - DNA, 15 bp, Homo sapiens
aatccagaatatgtg

SEQ ID NO: 983281 - DNA, 15 bp, Homo sapiens
gaatccagaatatgt

SEQ ID NO: 983282 - DNA, 15 bp, Homo sapiens
agaatccagaatatg

SEQ ID NO: 983283 - DNA, 15 bp, Homo sapiens
gagaatccagaatat

SEQ ID NO: 983284 - DNA, 15 bp, Homo sapiens
agagaatccagaata

SEQ ID NO: 983285 - DNA, 15 bp, Homo sapiens
gagagaatccagaat

SEQ ID NO: 983286 - DNA, 15 bp, Homo sapiens
ggagagaatccagaa

SEQ ID NO: 983287 - DNA, 15 bp, Homo sapiens
aggagagaatccaga

SEQ ID NO: 983288 - DNA, 15 bp, Homo sapiens
gaggagagaatccag

SEQ ID NO: 983289 - DNA, 15 bp, Homo sapiens
ggaggagagaatcca

SEQ ID NO: 983290 - DNA, 15 bp, Homo sapiens
aggaggagagaatcc

SEQ ID NO: 983291 - DNA, 15 bp, Homo sapiens
caggaggagagaatc

SEQ ID NO: 983292 - DNA, 15 bp, Homo sapiens
acaggaggagagaat

SEQ ID NO: 983293 - DNA, 15 bp, Homo sapiens
aacaggaggagagaa

SEQ ID NO: 983294 - DNA, 15 bp, Homo sapiens
aaacaggaggagaga

SEQ ID NO: 983295 - DNA, 15 bp, Homo sapiens
gaaacaggaggagag

SEQ ID NO: 983296 - DNA, 15 bp, Homo sapiens
ggaaacaggaggaga

SEQ ID NO: 983297 - DNA, 15 bp, Homo sapiens
gggaaacaggaggag

SEQ ID NO: 983298 - DNA, 15 bp, Homo sapiens
tgggaaacaggagga

SEQ ID NO: 983299 - DNA, 15 bp, Homo sapiens
ctgggaaacaggagg

SEQ ID NO: 983300 - DNA, 15 bp, Homo sapiens
gctgggaaacaggag

SEQ ID NO: 983301 - DNA, 15 bp, Homo sapiens
tgctgggaaacagga

SEQ ID NO: 983302 - DNA, 15 bp, Homo sapiens
ctgctgggaaacagg

SEQ ID NO: 983303 - DNA, 15 bp, Homo sapiens
tctgctgggaaacag

SEQ ID NO: 983304 - DNA, 15 bp, Homo sapiens
ttctgctgggaaaca

SEQ ID NO: 983305 - DNA, 15 bp, Homo sapiens
tttctgctgggaaac

SEQ ID NO: 983306 - DNA, 15 bp, Homo sapiens
ttttctgctgggaaa

SEQ ID NO: 983307 - DNA, 15 bp, Homo sapiens
cttttctgctgggaa

SEQ ID NO: 983308 - DNA, 15 bp, Homo sapiens
ccttttctgctggga

SEQ ID NO: 983309 - DNA, 15 bp, Homo sapiens
tccttttctgctggg

SEQ ID NO: 983310 - DNA, 15 bp, Homo sapiens
atccttttctgctgg

SEQ ID NO: 983311 - DNA, 15 bp, Homo sapiens
catccttttctgctg

SEQ ID NO: 983312 - DNA, 15 bp, Homo sapiens
ccatccttttctgct

SEQ ID NO: 983313 - DNA, 15 bp, Homo sapiens
tccatccttttctgc

SEQ ID NO: 983314 - DNA, 15 bp, Homo sapiens
ctccatccttttctg

SEQ ID NO: 983315 - DNA, 15 bp, Homo sapiens
gctccatccttttct

SEQ ID NO: 983316 - DNA, 15 bp, Homo sapiens
ggctccatccttttc

SEQ ID NO: 983317 - DNA, 15 bp, Homo sapiens
aggctccatcctttt

SEQ ID NO: 983318 - DNA, 15 bp, Homo sapiens
gaggctccatccttt

SEQ ID NO: 983319 - DNA, 15 bp, Homo sapiens
tgaggctccatcctt

SEQ ID NO: 983320 - DNA, 15 bp, Homo sapiens
gtgaggctccatcct

SEQ ID NO: 983321 - DNA, 15 bp, Homo sapiens
tgtgaggctccatcc

SEQ ID NO: 983322 - DNA, 15 bp, Homo sapiens
ctgtgaggctccatc

SEQ ID NO: 983323 - DNA, 15 bp, Homo sapiens
tctgtgaggctccat

SEQ ID NO: 983324 - DNA, 15 bp, Homo sapiens
atctgtgaggctcca

SEQ ID NO: 983325 - DNA, 15 bp, Homo sapiens
aatctgtgaggctcc

SEQ ID NO: 983326 - DNA, 15 bp, Homo sapiens
gaatctgtgaggctc

SEQ ID NO: 983327 - DNA, 15 bp, Homo sapiens
agaatctgtgaggct

SEQ ID NO: 983328 - DNA, 15 bp, Homo sapiens
aagaatctgtgaggc

SEQ ID NO: 983329 - DNA, 15 bp, Homo sapiens
gaagaatctgtgagg

SEQ ID NO: 983330 - DNA, 15 bp, Homo sapiens
ggaagaatctgtgag

SEQ ID NO: 983331 - DNA, 15 bp, Homo sapiens
gggaagaatctgtga

SEQ ID NO: 983332 - DNA, 15 bp, Homo sapiens
tgggaagaatctgtg

SEQ ID NO: 983333 - DNA, 15 bp, Homo sapiens
atgggaagaatctgt

SEQ ID NO: 983334 - DNA, 15 bp, Homo sapiens
aatgggaagaatctg

SEQ ID NO: 983335 - DNA, 15 bp, Homo sapiens
aaatgggaagaatct

SEQ ID NO: 983336 - DNA, 15 bp, Homo sapiens
gaaatgggaagaatc

SEQ ID NO: 983337 - DNA, 15 bp, Homo sapiens
agaaatgggaagaat

SEQ ID NO: 983338 - DNA, 15 bp, Homo sapiens
cagaaatgggaagaa

SEQ ID NO: 983339 - DNA, 15 bp, Homo sapiens
ccagaaatgggaaga

SEQ ID NO: 983340 - DNA, 15 bp, Homo sapiens
tccagaaatgggaag

SEQ ID NO: 983341 - DNA, 15 bp, Homo sapiens
ctccagaaatgggaa

SEQ ID NO: 983342 - DNA, 15 bp, Homo sapiens
tctccagaaatggga

SEQ ID NO: 983343 - DNA, 15 bp, Homo sapiens
ttctccagaaatggg

SEQ ID NO: 983344 - DNA, 15 bp, Homo sapiens
tttctccagaaatgg

SEQ ID NO: 983345 - DNA, 15 bp, Homo sapiens
ttttctccagaaatg

SEQ ID NO: 983346 - DNA, 15 bp, Homo sapiens
tttttctccagaaat

SEQ ID NO: 983347 - DNA, 15 bp, Homo sapiens
gtttttctccagaaa

SEQ ID NO: 983348 - DNA, 15 bp, Homo sapiens
tgtttttctccagaa

SEQ ID NO: 983349 - DNA, 15 bp, Homo sapiens
atgtttttctccaga

SEQ ID NO: 983350 - DNA, 15 bp, Homo sapiens
catgtttttctccag

SEQ ID NO: 983351 - DNA, 15 bp, Homo sapiens
gcatgtttttctcca

SEQ ID NO: 983352 - DNA, 15 bp, Homo sapiens
tgcatgtttttctcc

SEQ ID NO: 983353 - DNA, 15 bp, Homo sapiens
atgcatgtttttctc

SEQ ID NO: 983354 - DNA, 15 bp, Homo sapiens
catgcatgtttttct

SEQ ID NO: 983355 - DNA, 15 bp, Homo sapiens
ccatgcatgtttttc

SEQ ID NO: 983356 - DNA, 15 bp, Homo sapiens
tccatgcatgttttt

SEQ ID NO: 983357 - DNA, 15 bp, Homo sapiens
ctccatgcatgtttt

SEQ ID NO: 983358 - DNA, 15 bp, Homo sapiens
gctccatgcatgttt

SEQ ID NO: 983359 - DNA, 15 bp, Homo sapiens
agctccatgcatgtt

SEQ ID NO: 983360 - DNA, 15 bp, Homo sapiens
gagctccatgcatgt

SEQ ID NO: 983361 - DNA, 15 bp, Homo sapiens
tgagctccatgcatg

SEQ ID NO: 983362 - DNA, 15 bp, Homo sapiens
ttgagctccatgcat

SEQ ID NO: 983363 - DNA, 15 bp, Homo sapiens
tttgagctccatgca

SEQ ID NO: 983364 - DNA, 15 bp, Homo sapiens
ctttgagctccatgc

SEQ ID NO: 983365 - DNA, 15 bp, Homo sapiens
actttgagctccatg

SEQ ID NO: 983366 - DNA, 15 bp, Homo sapiens
aactttgagctccat

SEQ ID NO: 983367 - DNA, 15 bp, Homo sapiens
gaactttgagctcca

SEQ ID NO: 983368 - DNA, 15 bp, Homo sapiens
agaactttgagctcc

SEQ ID NO: 983369 - DNA, 15 bp, Homo sapiens
aagaactttgagctc

SEQ ID NO: 983370 - DNA, 15 bp, Homo sapiens
gaagaactttgagct

SEQ ID NO: 983371 - DNA, 15 bp, Homo sapiens
agaagaactttgagc

SEQ ID NO: 983372 - DNA, 15 bp, Homo sapiens
gagaagaactttgag

SEQ ID NO: 983373 - DNA, 15 bp, Homo sapiens
tgagaagaactttga

SEQ ID NO: 983374 - DNA, 15 bp, Homo sapiens
ctgagaagaactttg

SEQ ID NO: 983375 - DNA, 15 bp, Homo sapiens
cctgagaagaacttt

SEQ ID NO: 983376 - DNA, 15 bp, Homo sapiens
tcctgagaagaactt

SEQ ID NO: 983377 - DNA, 15 bp, Homo sapiens
ctcctgagaagaact

SEQ ID NO: 983378 - DNA, 15 bp, Homo sapiens
actcctgagaagaac

SEQ ID NO: 983379 - DNA, 15 bp, Homo sapiens
aactcctgagaagaa

SEQ ID NO: 983380 - DNA, 15 bp, Homo sapiens
aaactcctgagaaga

SEQ ID NO: 983381 - DNA, 15 bp, Homo sapiens
aaaactcctgagaag

SEQ ID NO: 983382 - DNA, 15 bp, Homo sapiens
taaaactcctgagaa

SEQ ID NO: 983383 - DNA, 15 bp, Homo sapiens
ataaaactcctgaga

SEQ ID NO: 983384 - DNA, 15 bp, Homo sapiens
aataaaactcctgag

SEQ ID NO: 983385 - DNA, 15 bp, Homo sapiens
caataaaactcctga

SEQ ID NO: 983386 - DNA, 15 bp, Homo sapiens
gcaataaaactcctg

SEQ ID NO: 983387 - DNA, 15 bp, Homo sapiens
ggcaataaaactcct

SEQ ID NO: 983388 - DNA, 15 bp, Homo sapiens
tggcaataaaactcc

SEQ ID NO: 983389 - DNA, 15 bp, Homo sapiens
ttggcaataaaactc

SEQ ID NO: 983390 - DNA, 15 bp, Homo sapiens
tttggcaataaaact

SEQ ID NO: 983391 - DNA, 15 bp, Homo sapiens
ctttggcaataaaac

SEQ ID NO: 983392 - DNA, 15 bp, Homo sapiens
gctttggcaataaaa

SEQ ID NO: 983393 - DNA, 15 bp, Homo sapiens
ggctttggcaataaa

SEQ ID NO: 983394 - DNA, 15 bp, Homo sapiens
tggctttggcaataa

SEQ ID NO: 983395 - DNA, 15 bp, Homo sapiens
atggctttggcaata

SEQ ID NO: 983396 - DNA, 15 bp, Homo sapiens
tatggctttggcaat

SEQ ID NO: 983397 - DNA, 15 bp, Homo sapiens
ttatggctttggcaa

SEQ ID NO: 983398 - DNA, 15 bp, Homo sapiens
attatggctttggca

SEQ ID NO: 983399 - DNA, 15 bp, Homo sapiens
tattatggctttggc

SEQ ID NO: 983400 - DNA, 15 bp, Homo sapiens
ttattatggctttgg

SEQ ID NO: 983401 - DNA, 15 bp, Homo sapiens
cttattatggctttg

SEQ ID NO: 983402 - DNA, 15 bp, Homo sapiens
tcttattatggcttt

SEQ ID NO: 983403 - DNA, 15 bp, Homo sapiens
ttcttattatggctt

SEQ ID NO: 983404 - DNA, 15 bp, Homo sapiens
tttcttattatggct

SEQ ID NO: 983405 - DNA, 15 bp, Homo sapiens
ctttcttattatggc

SEQ ID NO: 983406 - DNA, 15 bp, Homo sapiens
cctttcttattatgg

SEQ ID NO: 983407 - DNA, 15 bp, Homo sapiens
ccctttcttattatg

SEQ ID NO: 983408 - DNA, 15 bp, Homo sapiens
accctttcttattat

SEQ ID NO: 983409 - DNA, 15 bp, Homo sapiens
caccctttcttatta

SEQ ID NO: 983410 - DNA, 15 bp, Homo sapiens
ccaccctttcttatt

SEQ ID NO: 983411 - DNA, 15 bp, Homo sapiens
tccaccctttcttat

SEQ ID NO: 983412 - DNA, 15 bp, Homo sapiens
ctccaccctttctta

SEQ ID NO: 983413 - DNA, 15 bp, Homo sapiens
cctccaccctttctt

SEQ ID NO: 983414 - DNA, 15 bp, Homo sapiens
acctccaccctttct

SEQ ID NO: 983415 - DNA, 15 bp, Homo sapiens
cacctccaccctttc

SEQ ID NO: 983416 - DNA, 15 bp, Homo sapiens
tcacctccacccttt

SEQ ID NO: 983417 - DNA, 15 bp, Homo sapiens
gtcacctccaccctt

SEQ ID NO: 983418 - DNA, 15 bp, Homo sapiens
tgtcacctccaccct

SEQ ID NO: 983419 - DNA, 15 bp, Homo sapiens
ttgtcacctccaccc

SEQ ID NO: 983420 - DNA, 15 bp, Homo sapiens
cttgtcacctccacc

SEQ ID NO: 983421 - DNA, 15 bp, Homo sapiens
gcttgtcacctccac

SEQ ID NO: 983422 - DNA, 15 bp, Homo sapiens
tgcttgtcacctcca

SEQ ID NO: 983423 - DNA, 15 bp, Homo sapiens
ctgcttgtcacctcc

SEQ ID NO: 983424 - DNA, 15 bp, Homo sapiens
actgcttgtcacctc

SEQ ID NO: 983425 - DNA, 15 bp, Homo sapiens
cactgcttgtcacct

SEQ ID NO: 983426 - DNA, 15 bp, Homo sapiens
tcactgcttgtcacc

SEQ ID NO: 983427 - DNA, 15 bp, Homo sapiens
ctcactgcttgtcac

SEQ ID NO: 983428 - DNA, 15 bp, Homo sapiens
cctcactgcttgtca

SEQ ID NO: 983429 - DNA, 15 bp, Homo sapiens
tcctcactgcttgtc

SEQ ID NO: 983430 - DNA, 15 bp, Homo sapiens
ttcctcactgcttgt

SEQ ID NO: 983431 - DNA, 15 bp, Homo sapiens
cttcctcactgcttg

SEQ ID NO: 983432 - DNA, 15 bp, Homo sapiens
acttcctcactgctt

SEQ ID NO: 983433 - DNA, 15 bp, Homo sapiens
aacttcctcactgct

SEQ ID NO: 983434 - DNA, 15 bp, Homo sapiens
aaacttcctcactgc

SEQ ID NO: 983435 - DNA, 15 bp, Homo sapiens
taaacttcctcactg

SEQ ID NO: 983436 - DNA, 15 bp, Homo sapiens
ttaaacttcctcact

SEQ ID NO: 983437 - DNA, 15 bp, Homo sapiens
tttaaacttcctcac

SEQ ID NO: 983438 - DNA, 15 bp, Homo sapiens
ctttaaacttcctca

SEQ ID NO: 983439 - DNA, 15 bp, Homo sapiens
tctttaaacttcctc

SEQ ID NO: 983440 - DNA, 15 bp, Homo sapiens
atctttaaacttcct

SEQ ID NO: 983441 - DNA, 15 bp, Homo sapiens
catctttaaacttcc

SEQ ID NO: 983442 - DNA, 15 bp, Homo sapiens
gcatctttaaacttc

SEQ ID NO: 983443 - DNA, 15 bp, Homo sapiens
tgcatctttaaactt

SEQ ID NO: 983444 - DNA, 15 bp, Homo sapiens
atgcatctttaaact

SEQ ID NO: 983445 - DNA, 15 bp, Homo sapiens
catgcatctttaaac

SEQ ID NO: 983446 - DNA, 15 bp, Homo sapiens
tcatgcatctttaaa

SEQ ID NO: 983447 - DNA, 15 bp, Homo sapiens
ttcatgcatctttaa

SEQ ID NO: 983448 - DNA, 15 bp, Homo sapiens
tttcatgcatcttta

SEQ ID NO: 983449 - DNA, 15 bp, Homo sapiens
atttcatgcatcttt

SEQ ID NO: 983450 - DNA, 15 bp, Homo sapiens
gatttcatgcatctt

SEQ ID NO: 983451 - DNA, 15 bp, Homo sapiens
agatttcatgcatct

SEQ ID NO: 983452 - DNA, 15 bp, Homo sapiens
cagatttcatgcatc

SEQ ID NO: 983453 - DNA, 15 bp, Homo sapiens
acagatttcatgcat

SEQ ID NO: 983454 - DNA, 15 bp, Homo sapiens
tacagatttcatgca

SEQ ID NO: 983455 - DNA, 15 bp, Homo sapiens
ttacagatttcatgc

SEQ ID NO: 983456 - DNA, 15 bp, Homo sapiens
tttacagatttcatg

SEQ ID NO: 983457 - DNA, 15 bp, Homo sapiens
ctttacagatttcat

SEQ ID NO: 983458 - DNA, 15 bp, Homo sapiens
actttacagatttca

SEQ ID NO: 983459 - DNA, 15 bp, Homo sapiens
gactttacagatttc

SEQ ID NO: 983460 - DNA, 15 bp, Homo sapiens
agactttacagattt

SEQ ID NO: 983461 - DNA, 15 bp, Homo sapiens
gagactttacagatt

SEQ ID NO: 983462 - DNA, 15 bp, Homo sapiens
tgagactttacagat

SEQ ID NO: 983463 - DNA, 15 bp, Homo sapiens
ctgagactttacaga

SEQ ID NO: 983464 - DNA, 15 bp, Homo sapiens
tctgagactttacag

SEQ ID NO: 983465 - DNA, 15 bp, Homo sapiens
ttctgagactttaca

SEQ ID NO: 983466 - DNA, 15 bp, Homo sapiens
gttctgagactttac

SEQ ID NO: 983467 - DNA, 15 bp, Homo sapiens
tgttctgagacttta

SEQ ID NO: 983468 - DNA, 15 bp, Homo sapiens
ttgttctgagacttt

SEQ ID NO: 983469 - DNA, 15 bp, Homo sapiens
cttgttctgagactt

SEQ ID NO: 983470 - DNA, 15 bp, Homo sapiens
tcttgttctgagact

SEQ ID NO: 983471 - DNA, 15 bp, Homo sapiens
ttcttgttctgagac

SEQ ID NO: 983472 - DNA, 15 bp, Homo sapiens
attcttgttctgaga

SEQ ID NO: 983473 - DNA, 15 bp, Homo sapiens
aattcttgttctgag

SEQ ID NO: 983474 - DNA, 15 bp, Homo sapiens
gaattcttgttctga

SEQ ID NO: 983475 - DNA, 15 bp, Homo sapiens
agaattcttgttctg

SEQ ID NO: 983476 - DNA, 15 bp, Homo sapiens
gagaattcttgttct

SEQ ID NO: 983477 - DNA, 15 bp, Homo sapiens
ggagaattcttgttc

SEQ ID NO: 983478 - DNA, 15 bp, Homo sapiens
aggagaattcttgtt

SEQ ID NO: 983479 - DNA, 15 bp, Homo sapiens
taggagaattcttgt

SEQ ID NO: 983480 - DNA, 15 bp, Homo sapiens
ttaggagaattcttg

SEQ ID NO: 983481 - DNA, 15 bp, Homo sapiens
tttaggagaattctt

SEQ ID NO: 983482 - DNA, 15 bp, Homo sapiens
ttttaggagaattct

SEQ ID NO: 983483 - DNA, 15 bp, Homo sapiens
attttaggagaattc

SEQ ID NO: 983484 - DNA, 15 bp, Homo sapiens
cattttaggagaatt

SEQ ID NO: 983485 - DNA, 15 bp, Homo sapiens
gcattttaggagaat

SEQ ID NO: 983486 - DNA, 15 bp, Homo sapiens
tgcattttaggagaa

SEQ ID NO: 983487 - DNA, 15 bp, Homo sapiens
ttgcattttaggaga

SEQ ID NO: 983488 - DNA, 15 bp, Homo sapiens
tttgcattttaggag

SEQ ID NO: 983489 - DNA, 15 bp, Homo sapiens
ttttgcattttagga

SEQ ID NO: 983490 - DNA, 15 bp, Homo sapiens
cttttgcattttagg

SEQ ID NO: 983491 - DNA, 15 bp, Homo sapiens
ccttttgcattttag

SEQ ID NO: 983492 - DNA, 15 bp, Homo sapiens
cccttttgcatttta

SEQ ID NO: 983493 - DNA, 15 bp, Homo sapiens
ccccttttgcatttt

SEQ ID NO: 983494 - DNA, 15 bp, Homo sapiens
gccccttttgcattt

SEQ ID NO: 983495 - DNA, 15 bp, Homo sapiens
agccccttttgcatt

SEQ ID NO: 983496 - DNA, 15 bp, Homo sapiens
aagccccttttgcat

SEQ ID NO: 983497 - DNA, 15 bp, Homo sapiens
aaagccccttttgca

SEQ ID NO: 983498 - DNA, 15 bp, Homo sapiens
caaagccccttttgc

SEQ ID NO: 983499 - DNA, 15 bp, Homo sapiens
gcaaagccccttttg

SEQ ID NO: 983500 - DNA, 15 bp, Homo sapiens
agcaaagcccctttt

SEQ ID NO: 983501 - DNA, 15 bp, Homo sapiens
cagcaaagccccttt

SEQ ID NO: 983502 - DNA, 15 bp, Homo sapiens
ccagcaaagcccctt

SEQ ID NO: 983503 - DNA, 15 bp, Homo sapiens
accagcaaagcccct

SEQ ID NO: 983504 - DNA, 15 bp, Homo sapiens
gaccagcaaagcccc

SEQ ID NO: 983505 - DNA, 15 bp, Homo sapiens
agaccagcaaagccc

SEQ ID NO: 983506 - DNA, 15 bp, Homo sapiens
gagaccagcaaagcc

SEQ ID NO: 983507 - DNA, 15 bp, Homo sapiens
ggagaccagcaaagc

SEQ ID NO: 983508 - DNA, 15 bp, Homo sapiens
gggagaccagcaaag

SEQ ID NO: 983509 - DNA, 15 bp, Homo sapiens
ggggagaccagcaaa

SEQ ID NO: 983510 - DNA, 15 bp, Homo sapiens
aggggagaccagcaa

SEQ ID NO: 983511 - DNA, 15 bp, Homo sapiens
aaggggagaccagca

SEQ ID NO: 983512 - DNA, 15 bp, Homo sapiens
caaggggagaccagc

SEQ ID NO: 983513 - DNA, 15 bp, Homo sapiens
ccaaggggagaccag

SEQ ID NO: 983514 - DNA, 15 bp, Homo sapiens
gccaaggggagacca

SEQ ID NO: 983515 - DNA, 15 bp, Homo sapiens
agccaaggggagacc

SEQ ID NO: 983516 - DNA, 15 bp, Homo sapiens
aagccaaggggagac

SEQ ID NO: 983517 - DNA, 15 bp, Homo sapiens
gaagccaaggggaga

SEQ ID NO: 983518 - DNA, 15 bp, Homo sapiens
agaagccaaggggag

SEQ ID NO: 983519 - DNA, 15 bp, Homo sapiens
gagaagccaagggga

SEQ ID NO: 983520 - DNA, 15 bp, Homo sapiens
tgagaagccaagggg

SEQ ID NO: 983521 - DNA, 15 bp, Homo sapiens
atgagaagccaaggg

SEQ ID NO: 983522 - DNA, 15 bp, Homo sapiens
catgagaagccaagg

SEQ ID NO: 983523 - DNA, 15 bp, Homo sapiens
acatgagaagccaag

SEQ ID NO: 983524 - DNA, 15 bp, Homo sapiens
tacatgagaagccaa

SEQ ID NO: 983525 - DNA, 15 bp, Homo sapiens
ctacatgagaagcca

SEQ ID NO: 983526 - DNA, 15 bp, Homo sapiens
gctacatgagaagcc

SEQ ID NO: 983527 - DNA, 15 bp, Homo sapiens
agctacatgagaagc

SEQ ID NO: 983528 - DNA, 15 bp, Homo sapiens
gagctacatgagaag

SEQ ID NO: 983529 - DNA, 15 bp, Homo sapiens
tgagctacatgagaa

SEQ ID NO: 983530 - DNA, 15 bp, Homo sapiens
gtgagctacatgaga

SEQ ID NO: 983531 - DNA, 15 bp, Homo sapiens
ggtgagctacatgag

SEQ ID NO: 983532 - DNA, 15 bp, Homo sapiens
aggtgagctacatga

SEQ ID NO: 983533 - DNA, 15 bp, Homo sapiens
gaggtgagctacatg

SEQ ID NO: 983534 - DNA, 15 bp, Homo sapiens
agaggtgagctacat

SEQ ID NO: 983535 - DNA, 15 bp, Homo sapiens
aagaggtgagctaca

SEQ ID NO: 983536 - DNA, 15 bp, Homo sapiens
aaagaggtgagctac

SEQ ID NO: 983537 - DNA, 15 bp, Homo sapiens
aaaagaggtgagcta

SEQ ID NO: 983538 - DNA, 15 bp, Homo sapiens
aaaaagaggtgagct

SEQ ID NO: 983539 - DNA, 15 bp, Homo sapiens
aaaaaagaggtgagc

SEQ ID NO: 983540 - DNA, 15 bp, Homo sapiens
gaaaaaagaggtgag

SEQ ID NO: 983541 - DNA, 15 bp, Homo sapiens
agaaaaaagaggtga

SEQ ID NO: 983542 - DNA, 15 bp, Homo sapiens
aagaaaaaagaggtg

SEQ ID NO: 983543 - DNA, 15 bp, Homo sapiens
taagaaaaaagaggt

SEQ ID NO: 983544 - DNA, 15 bp, Homo sapiens
ataagaaaaaagagg

SEQ ID NO: 983545 - DNA, 15 bp, Homo sapiens
gataagaaaaaagag

SEQ ID NO: 983546 - DNA, 15 bp, Homo sapiens
agataagaaaaaaga

SEQ ID NO: 983547 - DNA, 15 bp, Homo sapiens
aagataagaaaaaag

SEQ ID NO: 983548 - DNA, 15 bp, Homo sapiens
caagataagaaaaaa

SEQ ID NO: 983549 - DNA, 15 bp, Homo sapiens
tcaagataagaaaaa

SEQ ID NO: 983550 - DNA, 15 bp, Homo sapiens
ctcaagataagaaaa

SEQ ID NO: 983551 - DNA, 15 bp, Homo sapiens
tctcaagataagaaa

SEQ ID NO: 983552 - DNA, 15 bp, Homo sapiens
gtctcaagataagaa

SEQ ID NO: 983553 - DNA, 15 bp, Homo sapiens
agtctcaagataaga

SEQ ID NO: 983554 - DNA, 15 bp, Homo sapiens
tagtctcaagataag

SEQ ID NO: 983555 - DNA, 15 bp, Homo sapiens
ctagtctcaagataa

SEQ ID NO: 983556 - DNA, 15 bp, Homo sapiens
actagtctcaagata

SEQ ID NO: 983557 - DNA, 15 bp, Homo sapiens
gactagtctcaagat

SEQ ID NO: 983558 - DNA, 15 bp, Homo sapiens
tgactagtctcaaga

SEQ ID NO: 983559 - DNA, 15 bp, Homo sapiens
ttgactagtctcaag

SEQ ID NO: 983560 - DNA, 15 bp, Homo sapiens
tttgactagtctcaa

SEQ ID NO: 983561 - DNA, 15 bp, Homo sapiens
gtttgactagtctca

SEQ ID NO: 983562 - DNA, 15 bp, Homo sapiens
ggtttgactagtctc

SEQ ID NO: 983563 - DNA, 15 bp, Homo sapiens
aggtttgactagtct

SEQ ID NO: 983564 - DNA, 15 bp, Homo sapiens
taggtttgactagtc

SEQ ID NO: 983565 - DNA, 15 bp, Homo sapiens
ttaggtttgactagt

SEQ ID NO: 983566 - DNA, 15 bp, Homo sapiens
cttaggtttgactag

SEQ ID NO: 983567 - DNA, 15 bp, Homo sapiens
gcttaggtttgacta

SEQ ID NO: 983568 - DNA, 15 bp, Homo sapiens
agcttaggtttgact

SEQ ID NO: 983569 - DNA, 15 bp, Homo sapiens
cagcttaggtttgac

SEQ ID NO: 983570 - DNA, 15 bp, Homo sapiens
acagcttaggtttga

SEQ ID NO: 983571 - DNA, 15 bp, Homo sapiens
aacagcttaggtttg

SEQ ID NO: 983572 - DNA, 15 bp, Homo sapiens
aaacagcttaggttt

SEQ ID NO: 983573 - DNA, 15 bp, Homo sapiens
gaaacagcttaggtt

SEQ ID NO: 983574 - DNA, 15 bp, Homo sapiens
agaaacagcttaggt

SEQ ID NO: 983575 - DNA, 15 bp, Homo sapiens
gagaaacagcttagg

SEQ ID NO: 983576 - DNA, 15 bp, Homo sapiens
tgagaaacagcttag

SEQ ID NO: 983577 - DNA, 15 bp, Homo sapiens
atgagaaacagctta

SEQ ID NO: 983578 - DNA, 15 bp, Homo sapiens
aatgagaaacagctt

SEQ ID NO: 983579 - DNA, 15 bp, Homo sapiens
aaatgagaaacagct

SEQ ID NO: 983580 - DNA, 15 bp, Homo sapiens
aaaatgagaaacagc

SEQ ID NO: 983581 - DNA, 15 bp, Homo sapiens
taaaatgagaaacag

SEQ ID NO: 983582 - DNA, 15 bp, Homo sapiens
ataaaatgagaaaca

SEQ ID NO: 983583 - DNA, 15 bp, Homo sapiens
aataaaatgagaaac

SEQ ID NO: 983584 - DNA, 15 bp, Homo sapiens
aaataaaatgagaaa

SEQ ID NO: 983585 - DNA, 15 bp, Homo sapiens
gaaataaaatgagaa

SEQ ID NO: 983586 - DNA, 15 bp, Homo sapiens
ggaaataaaatgaga

SEQ ID NO: 983587 - DNA, 15 bp, Homo sapiens
tggaaataaaatgag

SEQ ID NO: 983588 - DNA, 15 bp, Homo sapiens
ctggaaataaaatga

SEQ ID NO: 983589 - DNA, 15 bp, Homo sapiens
tctggaaataaaatg

SEQ ID NO: 983590 - DNA, 15 bp, Homo sapiens
ttctggaaataaaat

SEQ ID NO: 983591 - DNA, 15 bp, Homo sapiens
cttctggaaataaaa

SEQ ID NO: 983592 - DNA, 15 bp, Homo sapiens
gcttctggaaataaa

SEQ ID NO: 983593 - DNA, 15 bp, Homo sapiens
agcttctggaaataa

SEQ ID NO: 983594 - DNA, 15 bp, Homo sapiens
tagcttctggaaata

SEQ ID NO: 983595 - DNA, 15 bp, Homo sapiens
atagcttctggaaat

SEQ ID NO: 983596 - DNA, 15 bp, Homo sapiens
aatagcttctggaaa

SEQ ID NO: 983597 - DNA, 15 bp, Homo sapiens
caatagcttctggaa

SEQ ID NO: 983598 - DNA, 15 bp, Homo sapiens
tcaatagcttctgga

SEQ ID NO: 983599 - DNA, 15 bp, Homo sapiens
ctcaatagcttctgg

SEQ ID NO: 983600 - DNA, 15 bp, Homo sapiens
tctcaatagcttctg

SEQ ID NO: 983601 - DNA, 15 bp, Homo sapiens
ttctcaatagcttct

SEQ ID NO: 983602 - DNA, 15 bp, Homo sapiens
gttctcaatagcttc

SEQ ID NO: 983603 - DNA, 15 bp, Homo sapiens
tgttctcaatagctt

SEQ ID NO: 983604 - DNA, 15 bp, Homo sapiens
gtgttctcaatagct

SEQ ID NO: 983605 - DNA, 15 bp, Homo sapiens
agtgttctcaatagc

SEQ ID NO: 983606 - DNA, 15 bp, Homo sapiens
gagtgttctcaatag

SEQ ID NO: 983607 - DNA, 15 bp, Homo sapiens
agagtgttctcaata

SEQ ID NO: 983608 - DNA, 15 bp, Homo sapiens
gagagtgttctcaat

SEQ ID NO: 983609 - DNA, 15 bp, Homo sapiens
ggagagtgttctcaa

SEQ ID NO: 983610 - DNA, 15 bp, Homo sapiens
aggagagtgttctca

SEQ ID NO: 983611 - DNA, 15 bp, Homo sapiens
caggagagtgttctc

SEQ ID NO: 983612 - DNA, 15 bp, Homo sapiens
tcaggagagtgttct

SEQ ID NO: 983613 - DNA, 15 bp, Homo sapiens
ttcaggagagtgttc

SEQ ID NO: 983614 - DNA, 15 bp, Homo sapiens
attcaggagagtgtt

SEQ ID NO: 983615 - DNA, 15 bp, Homo sapiens
aattcaggagagtgt

SEQ ID NO: 983616 - DNA, 15 bp, Homo sapiens
gaattcaggagagtg

SEQ ID NO: 983617 - DNA, 15 bp, Homo sapiens
agaattcaggagagt

SEQ ID NO: 983618 - DNA, 15 bp, Homo sapiens
aagaattcaggagag

SEQ ID NO: 983619 - DNA, 15 bp, Homo sapiens
gaagaattcaggaga

SEQ ID NO: 983620 - DNA, 15 bp, Homo sapiens
tgaagaattcaggag

SEQ ID NO: 983621 - DNA, 15 bp, Homo sapiens
ttgaagaattcagga

SEQ ID NO: 983622 - DNA, 15 bp, Homo sapiens
tttgaagaattcagg

SEQ ID NO: 983623 - DNA, 15 bp, Homo sapiens
atttgaagaattcag

SEQ ID NO: 983624 - DNA, 15 bp, Homo sapiens
aatttgaagaattca

SEQ ID NO: 983625 - DNA, 15 bp, Homo sapiens
gaatttgaagaattc

SEQ ID NO: 983626 - DNA, 15 bp, Homo sapiens
tgaatttgaagaatt

SEQ ID NO: 983627 - DNA, 15 bp, Homo sapiens
ctgaatttgaagaat

SEQ ID NO: 983628 - DNA, 15 bp, Homo sapiens
actgaatttgaagaa

SEQ ID NO: 983629 - DNA, 15 bp, Homo sapiens
tactgaatttgaaga

SEQ ID NO: 983630 - DNA, 15 bp, Homo sapiens
ctactgaatttgaag

SEQ ID NO: 983631 - DNA, 15 bp, Homo sapiens
tctactgaatttgaa

SEQ ID NO: 983632 - DNA, 15 bp, Homo sapiens
ctctactgaatttga

SEQ ID NO: 983633 - DNA, 15 bp, Homo sapiens
cctctactgaatttg

SEQ ID NO: 983634 - DNA, 15 bp, Homo sapiens
ccctctactgaattt

SEQ ID NO: 983635 - DNA, 15 bp, Homo sapiens
gccctctactgaatt

SEQ ID NO: 983636 - DNA, 15 bp, Homo sapiens
cgccctctactgaat

SEQ ID NO: 983637 - DNA, 15 bp, Homo sapiens
tcgccctctactgaa

SEQ ID NO: 983638 - DNA, 15 bp, Homo sapiens
gtcgccctctactga

SEQ ID NO: 983639 - DNA, 15 bp, Homo sapiens
tgtcgccctctactg

SEQ ID NO: 983640 - DNA, 15 bp, Homo sapiens
ttgtcgccctctact

SEQ ID NO: 983641 - DNA, 15 bp, Homo sapiens
tttgtcgccctctac

SEQ ID NO: 983642 - DNA, 15 bp, Homo sapiens
atttgtcgccctcta

SEQ ID NO: 983643 - DNA, 15 bp, Homo sapiens
catttgtcgccctct

SEQ ID NO: 983644 - DNA, 15 bp, Homo sapiens
acatttgtcgccctc

SEQ ID NO: 983645 - DNA, 15 bp, Homo sapiens
tacatttgtcgccct

SEQ ID NO: 983646 - DNA, 15 bp, Homo sapiens
gtacatttgtcgccc

SEQ ID NO: 983647 - DNA, 15 bp, Homo sapiens
tgtacatttgtcgcc

SEQ ID NO: 983648 - DNA, 15 bp, Homo sapiens
atgtacatttgtcgc

SEQ ID NO: 983649 - DNA, 15 bp, Homo sapiens
tatgtacatttgtcg

SEQ ID NO: 983650 - DNA, 15 bp, Homo sapiens
atatgtacatttgtc

SEQ ID NO: 983651 - DNA, 15 bp, Homo sapiens
tatatgtacatttgt

SEQ ID NO: 983652 - DNA, 15 bp, Homo sapiens
ttatatgtacatttg

SEQ ID NO: 983653 - DNA, 15 bp, Homo sapiens
tttatatgtacattt

SEQ ID NO: 983654 - DNA, 15 bp, Homo sapiens
atttatatgtacatt

SEQ ID NO: 983655 - DNA, 15 bp, Homo sapiens
catttatatgtacat

SEQ ID NO: 983656 - DNA, 15 bp, Homo sapiens
tcatttatatgtaca

SEQ ID NO: 983657 - DNA, 15 bp, Homo sapiens
atcatttatatgtac

SEQ ID NO: 983658 - DNA, 15 bp, Homo sapiens
catcatttatatgta

SEQ ID NO: 983659 - DNA, 15 bp, Homo sapiens
ccatcatttatatgt

SEQ ID NO: 983660 - DNA, 15 bp, Homo sapiens
accatcatttatatg

SEQ ID NO: 983661 - DNA, 15 bp, Homo sapiens
taccatcatttatat

SEQ ID NO: 983662 - DNA, 15 bp, Homo sapiens
ctaccatcatttata

SEQ ID NO: 983663 - DNA, 15 bp, Homo sapiens
actaccatcatttat

SEQ ID NO: 983664 - DNA, 15 bp, Homo sapiens
cactaccatcattta

SEQ ID NO: 983665 - DNA, 15 bp, Homo sapiens
ccactaccatcattt

SEQ ID NO: 983666 - DNA, 15 bp, Homo sapiens
cccactaccatcatt

SEQ ID NO: 983667 - DNA, 15 bp, Homo sapiens
acccactaccatcat

SEQ ID NO: 983668 - DNA, 15 bp, Homo sapiens
gacccactaccatca

SEQ ID NO: 983669 - DNA, 15 bp, Homo sapiens
agacccactaccatc

SEQ ID NO: 983670 - DNA, 15 bp, Homo sapiens
aagacccactaccat

SEQ ID NO: 983671 - DNA, 15 bp, Homo sapiens
taagacccactacca

SEQ ID NO: 983672 - DNA, 15 bp, Homo sapiens
ttaagacccactacc

SEQ ID NO: 983673 - DNA, 15 bp, Homo sapiens
tttaagacccactac

SEQ ID NO: 983674 - DNA, 15 bp, Homo sapiens
atttaagacccacta

SEQ ID NO: 983675 - DNA, 15 bp, Homo sapiens
tatttaagacccact

SEQ ID NO: 983676 - DNA, 15 bp, Homo sapiens
ttatttaagacccac

SEQ ID NO: 983677 - DNA, 15 bp, Homo sapiens
tttatttaagaccca

SEQ ID NO: 983678 - DNA, 15 bp, Homo sapiens
ctttatttaagaccc

SEQ ID NO: 983679 - DNA, 15 bp, Homo sapiens
tctttatttaagacc

SEQ ID NO: 983680 - DNA, 15 bp, Homo sapiens
gtctttatttaagac

SEQ ID NO: 983681 - DNA, 15 bp, Homo sapiens
agtctttatttaaga

SEQ ID NO: 983682 - DNA, 15 bp, Homo sapiens
gagtctttatttaag

SEQ ID NO: 983683 - DNA, 15 bp, Homo sapiens
tgagtctttatttaa

SEQ ID NO: 983684 - DNA, 15 bp, Homo sapiens
atgagtctttattta

SEQ ID NO: 983685 - DNA, 15 bp, Homo sapiens
catgagtctttattt

SEQ ID NO: 983686 - DNA, 15 bp, Homo sapiens
tcatgagtctttatt

SEQ ID NO: 983687 - DNA, 15 bp, Homo sapiens
gtcatgagtctttat

SEQ ID NO: 983688 - DNA, 15 bp, Homo sapiens
tgtcatgagtcttta

SEQ ID NO: 983689 - DNA, 15 bp, Homo sapiens
gtgtcatgagtcttt

SEQ ID NO: 983690 - DNA, 15 bp, Homo sapiens
ggtgtcatgagtctt

SEQ ID NO: 983691 - DNA, 15 bp, Homo sapiens
aggtgtcatgagtct

SEQ ID NO: 983692 - DNA, 15 bp, Homo sapiens
taggtgtcatgagtc

SEQ ID NO: 983693 - DNA, 15 bp, Homo sapiens
ttaggtgtcatgagt

SEQ ID NO: 983694 - DNA, 15 bp, Homo sapiens
tttaggtgtcatgag

SEQ ID NO: 983695 - DNA, 15 bp, Homo sapiens
ctttaggtgtcatga

SEQ ID NO: 983696 - DNA, 15 bp, Homo sapiens
cctttaggtgtcatg

SEQ ID NO: 983697 - DNA, 15 bp, Homo sapiens
ccctttaggtgtcat

SEQ ID NO: 983698 - DNA, 15 bp, Homo sapiens
cccctttaggtgtca

SEQ ID NO: 983699 - DNA, 15 bp, Homo sapiens
gcccctttaggtgtc

SEQ ID NO: 983700 - DNA, 15 bp, Homo sapiens
tgcccctttaggtgt

SEQ ID NO: 983701 - DNA, 15 bp, Homo sapiens
ctgcccctttaggtg

SEQ ID NO: 983702 - DNA, 15 bp, Homo sapiens
gctgcccctttaggt

SEQ ID NO: 983703 - DNA, 15 bp, Homo sapiens
tgctgcccctttagg

SEQ ID NO: 983704 - DNA, 15 bp, Homo sapiens
gtgctgcccctttag

SEQ ID NO: 983705 - DNA, 15 bp, Homo sapiens
ggtgctgccccttta

SEQ ID NO: 983706 - DNA, 15 bp, Homo sapiens
aggtgctgccccttt

SEQ ID NO: 983707 - DNA, 15 bp, Homo sapiens
caggtgctgcccctt

SEQ ID NO: 983708 - DNA, 15 bp, Homo sapiens
tcaggtgctgcccct

SEQ ID NO: 983709 - DNA, 15 bp, Homo sapiens
ctcaggtgctgcccc

SEQ ID NO: 983710 - DNA, 15 bp, Homo sapiens
actcaggtgctgccc

SEQ ID NO: 983711 - DNA, 15 bp, Homo sapiens
gactcaggtgctgcc

SEQ ID NO: 983712 - DNA, 15 bp, Homo sapiens
agactcaggtgctgc

SEQ ID NO: 983713 - DNA, 15 bp, Homo sapiens
cagactcaggtgctg

SEQ ID NO: 983714 - DNA, 15 bp, Homo sapiens
tcagactcaggtgct

SEQ ID NO: 983715 - DNA, 15 bp, Homo sapiens
atcagactcaggtgc

SEQ ID NO: 983716 - DNA, 15 bp, Homo sapiens
aatcagactcaggtg

SEQ ID NO: 983717 - DNA, 15 bp, Homo sapiens
caatcagactcaggt

SEQ ID NO: 983718 - DNA, 15 bp, Homo sapiens
gcaatcagactcagg

SEQ ID NO: 983719 - DNA, 15 bp, Homo sapiens
tgcaatcagactcag

SEQ ID NO: 983720 - DNA, 15 bp, Homo sapiens
gtgcaatcagactca

SEQ ID NO: 983721 - DNA, 15 bp, Homo sapiens
ggtgcaatcagactc

SEQ ID NO: 983722 - DNA, 15 bp, Homo sapiens
aggtgcaatcagact

SEQ ID NO: 983723 - DNA, 15 bp, Homo sapiens
caggtgcaatcagac

SEQ ID NO: 983724 - DNA, 15 bp, Homo sapiens
acaggtgcaatcaga

SEQ ID NO: 983725 - DNA, 15 bp, Homo sapiens
aacaggtgcaatcag

SEQ ID NO: 983726 - DNA, 15 bp, Homo sapiens
aaacaggtgcaatca

SEQ ID NO: 983727 - DNA, 15 bp, Homo sapiens
gaaacaggtgcaatc

SEQ ID NO: 983728 - DNA, 15 bp, Homo sapiens
agaaacaggtgcaat

SEQ ID NO: 983729 - DNA, 15 bp, Homo sapiens
cagaaacaggtgcaa

SEQ ID NO: 983730 - DNA, 15 bp, Homo sapiens
acagaaacaggtgca

SEQ ID NO: 983731 - DNA, 15 bp, Homo sapiens
aacagaaacaggtgc

SEQ ID NO: 983732 - DNA, 15 bp, Homo sapiens
caacagaaacaggtg

SEQ ID NO: 983733 - DNA, 15 bp, Homo sapiens
gcaacagaaacaggt

SEQ ID NO: 983734 - DNA, 15 bp, Homo sapiens
agcaacagaaacagg

SEQ ID NO: 983735 - DNA, 15 bp, Homo sapiens
cagcaacagaaacag

SEQ ID NO: 983736 - DNA, 15 bp, Homo sapiens
acagcaacagaaaca

SEQ ID NO: 983737 - DNA, 15 bp, Homo sapiens
aacagcaacagaaac

SEQ ID NO: 983738 - DNA, 15 bp, Homo sapiens
aaacagcaacagaaa

SEQ ID NO: 983739 - DNA, 15 bp, Homo sapiens
gaaacagcaacagaa

SEQ ID NO: 983740 - DNA, 15 bp, Homo sapiens
agaaacagcaacaga

SEQ ID NO: 983741 - DNA, 15 bp, Homo sapiens
cagaaacagcaacag

SEQ ID NO: 983742 - DNA, 15 bp, Homo sapiens
acagaaacagcaaca

SEQ ID NO: 983743 - DNA, 15 bp, Homo sapiens
gacagaaacagcaac

SEQ ID NO: 983744 - DNA, 15 bp, Homo sapiens
agacagaaacagcaa

SEQ ID NO: 983745 - DNA, 15 bp, Homo sapiens
gagacagaaacagca

SEQ ID NO: 983746 - DNA, 15 bp, Homo sapiens
agagacagaaacagc

SEQ ID NO: 983747 - DNA, 15 bp, Homo sapiens
gagagacagaaacag

SEQ ID NO: 983748 - DNA, 15 bp, Homo sapiens
agagagacagaaaca

SEQ ID NO: 983749 - DNA, 15 bp, Homo sapiens
aagagagacagaaac

SEQ ID NO: 983750 - DNA, 15 bp, Homo sapiens
gaagagagacagaaa

SEQ ID NO: 983751 - DNA, 15 bp, Homo sapiens
agaagagagacagaa

SEQ ID NO: 983752 - DNA, 15 bp, Homo sapiens
gagaagagagacaga

SEQ ID NO: 983753 - DNA, 15 bp, Homo sapiens
agagaagagagacag

SEQ ID NO: 983754 - DNA, 15 bp, Homo sapiens
gagagaagagagaca

SEQ ID NO: 983755 - DNA, 15 bp, Homo sapiens
agagagaagagagac

SEQ ID NO: 983756 - DNA, 15 bp, Homo sapiens
cagagagaagagaga

SEQ ID NO: 983757 - DNA, 15 bp, Homo sapiens
acagagagaagagag

SEQ ID NO: 983758 - DNA, 15 bp, Homo sapiens
gacagagagaagaga

SEQ ID NO: 983759 - DNA, 15 bp, Homo sapiens
agacagagagaagag

SEQ ID NO: 983760 - DNA, 15 bp, Homo sapiens
cagacagagagaaga

SEQ ID NO: 983761 - DNA, 15 bp, Homo sapiens
gcagacagagagaag

SEQ ID NO: 983762 - DNA, 15 bp, Homo sapiens
ggcagacagagagaa

SEQ ID NO: 983763 - DNA, 15 bp, Homo sapiens
tggcagacagagaga

SEQ ID NO: 983764 - DNA, 15 bp, Homo sapiens
atggcagacagagag

SEQ ID NO: 983765 - DNA, 15 bp, Homo sapiens
aatggcagacagaga

SEQ ID NO: 983766 - DNA, 15 bp, Homo sapiens
aaatggcagacagag

SEQ ID NO: 983767 - DNA, 15 bp, Homo sapiens
gaaatggcagacaga

SEQ ID NO: 983768 - DNA, 15 bp, Homo sapiens
tgaaatggcagacag

SEQ ID NO: 983769 - DNA, 15 bp, Homo sapiens
atgaaatggcagaca

SEQ ID NO: 983770 - DNA, 15 bp, Homo sapiens
aatgaaatggcagac

SEQ ID NO: 983771 - DNA, 15 bp, Homo sapiens
taatgaaatggcaga

SEQ ID NO: 983772 - DNA, 15 bp, Homo sapiens
ataatgaaatggcag

SEQ ID NO: 983773 - DNA, 15 bp, Homo sapiens
gataatgaaatggca

SEQ ID NO: 983774 - DNA, 15 bp, Homo sapiens
tgataatgaaatggc

SEQ ID NO: 983775 - DNA, 15 bp, Homo sapiens
ttgataatgaaatgg

SEQ ID NO: 983776 - DNA, 15 bp, Homo sapiens
attgataatgaaatg

SEQ ID NO: 983777 - DNA, 15 bp, Homo sapiens
cattgataatgaaat

SEQ ID NO: 983778 - DNA, 15 bp, Homo sapiens
ccattgataatgaaa

SEQ ID NO: 983779 - DNA, 15 bp, Homo sapiens
accattgataatgaa

SEQ ID NO: 983780 - DNA, 15 bp, Homo sapiens
aaccattgataatga

SEQ ID NO: 983781 - DNA, 15 bp, Homo sapiens
taaccattgataatg

SEQ ID NO: 983782 - DNA, 15 bp, Homo sapiens
gtaaccattgataat

SEQ ID NO: 983783 - DNA, 15 bp, Homo sapiens
agtaaccattgataa

SEQ ID NO: 983784 - DNA, 15 bp, Homo sapiens
aagtaaccattgata

SEQ ID NO: 983785 - DNA, 15 bp, Homo sapiens
aaagtaaccattgat

SEQ ID NO: 983786 - DNA, 15 bp, Homo sapiens
taaagtaaccattga

SEQ ID NO: 983787 - DNA, 15 bp, Homo sapiens
gtaaagtaaccattg

SEQ ID NO: 983788 - DNA, 15 bp, Homo sapiens
agtaaagtaaccatt

SEQ ID NO: 983789 - DNA, 15 bp, Homo sapiens
aagtaaagtaaccat

SEQ ID NO: 983790 - DNA, 15 bp, Homo sapiens
taagtaaagtaacca

SEQ ID NO: 983791 - DNA, 15 bp, Homo sapiens
ataagtaaagtaacc

SEQ ID NO: 983792 - DNA, 15 bp, Homo sapiens
tataagtaaagtaac

SEQ ID NO: 983793 - DNA, 15 bp, Homo sapiens
ttataagtaaagtaa

SEQ ID NO: 983794 - DNA, 15 bp, Homo sapiens
cttataagtaaagta

SEQ ID NO: 983795 - DNA, 15 bp, Homo sapiens
tcttataagtaaagt

SEQ ID NO: 983796 - DNA, 15 bp, Homo sapiens
atcttataagtaaag

SEQ ID NO: 983797 - DNA, 15 bp, Homo sapiens
gatcttataagtaaa

SEQ ID NO: 983798 - DNA, 15 bp, Homo sapiens
tgatcttataagtaa

SEQ ID NO: 983799 - DNA, 15 bp, Homo sapiens
atgatcttataagta

SEQ ID NO: 983800 - DNA, 15 bp, Homo sapiens
tatgatcttataagt

SEQ ID NO: 983801 - DNA, 15 bp, Homo sapiens
atatgatcttataag

SEQ ID NO: 983802 - DNA, 15 bp, Homo sapiens
aatatgatcttataa

SEQ ID NO: 983803 - DNA, 15 bp, Homo sapiens
taatatgatcttata

SEQ ID NO: 983804 - DNA, 15 bp, Homo sapiens
ctaatatgatcttat

SEQ ID NO: 983805 - DNA, 15 bp, Homo sapiens
tctaatatgatctta

SEQ ID NO: 983806 - DNA, 15 bp, Homo sapiens
ttctaatatgatctt

SEQ ID NO: 983807 - DNA, 15 bp, Homo sapiens
gttctaatatgatct

SEQ ID NO: 983808 - DNA, 15 bp, Homo sapiens
ggttctaatatgatc

SEQ ID NO: 983809 - DNA, 15 bp, Homo sapiens
aggttctaatatgat

SEQ ID NO: 983810 - DNA, 15 bp, Homo sapiens
caggttctaatatga

SEQ ID NO: 983811 - DNA, 15 bp, Homo sapiens
tcaggttctaatatg

SEQ ID NO: 983812 - DNA, 15 bp, Homo sapiens
atcaggttctaatat

SEQ ID NO: 983813 - DNA, 15 bp, Homo sapiens
tatcaggttctaata

SEQ ID NO: 983814 - DNA, 15 bp, Homo sapiens
atatcaggttctaat

SEQ ID NO: 983815 - DNA, 15 bp, Homo sapiens
aatatcaggttctaa

SEQ ID NO: 983816 - DNA, 15 bp, Homo sapiens
aaatatcaggttcta

SEQ ID NO: 983817 - DNA, 15 bp, Homo sapiens
caaatatcaggttct

SEQ ID NO: 983818 - DNA, 15 bp, Homo sapiens
tcaaatatcaggttc

SEQ ID NO: 983819 - DNA, 15 bp, Homo sapiens
atcaaatatcaggtt

SEQ ID NO: 983820 - DNA, 15 bp, Homo sapiens
tatcaaatatcaggt

SEQ ID NO: 983821 - DNA, 15 bp, Homo sapiens
ttatcaaatatcagg

SEQ ID NO: 983822 - DNA, 15 bp, Homo sapiens
tttatcaaatatcag

SEQ ID NO: 983823 - DNA, 15 bp, Homo sapiens
atttatcaaatatca

SEQ ID NO: 983824 - DNA, 15 bp, Homo sapiens
catttatcaaatatc

SEQ ID NO: 983825 - DNA, 15 bp, Homo sapiens
tcatttatcaaatat

SEQ ID NO: 983826 - DNA, 15 bp, Homo sapiens
atcatttatcaaata

SEQ ID NO: 983827 - DNA, 15 bp, Homo sapiens
catcatttatcaaat

SEQ ID NO: 983828 - DNA, 15 bp, Homo sapiens
gcatcatttatcaaa

SEQ ID NO: 983829 - DNA, 15 bp, Homo sapiens
tgcatcatttatcaa

SEQ ID NO: 983830 - DNA, 15 bp, Homo sapiens
atgcatcatttatca

SEQ ID NO: 983831 - DNA, 15 bp, Homo sapiens
gatgcatcatttatc

SEQ ID NO: 983832 - DNA, 15 bp, Homo sapiens
tgatgcatcatttat

SEQ ID NO: 983833 - DNA, 15 bp, Homo sapiens
ctgatgcatcattta

SEQ ID NO: 983834 - DNA, 15 bp, Homo sapiens
tctgatgcatcattt

SEQ ID NO: 983835 - DNA, 15 bp, Homo sapiens
atctgatgcatcatt

SEQ ID NO: 983836 - DNA, 15 bp, Homo sapiens
gatctgatgcatcat

SEQ ID NO: 983837 - DNA, 15 bp, Homo sapiens
agatctgatgcatca

SEQ ID NO: 983838 - DNA, 15 bp, Homo sapiens
tagatctgatgcatc

SEQ ID NO: 983839 - DNA, 15 bp, Homo sapiens
atagatctgatgcat

SEQ ID NO: 983840 - DNA, 15 bp, Homo sapiens
tatagatctgatgca

SEQ ID NO: 983841 - DNA, 15 bp, Homo sapiens
ctatagatctgatgc

SEQ ID NO: 983842 - DNA, 15 bp, Homo sapiens
actatagatctgatg

SEQ ID NO: 983843 - DNA, 15 bp, Homo sapiens
cactatagatctgat

SEQ ID NO: 983844 - DNA, 15 bp, Homo sapiens
tcactatagatctga

SEQ ID NO: 983845 - DNA, 15 bp, Homo sapiens
ctcactatagatctg

SEQ ID NO: 983846 - DNA, 15 bp, Homo sapiens
tctcactatagatct

SEQ ID NO: 983847 - DNA, 15 bp, Homo sapiens
ctctcactatagatc

SEQ ID NO: 983848 - DNA, 15 bp, Homo sapiens
tctctcactatagat

SEQ ID NO: 983849 - DNA, 15 bp, Homo sapiens
ttctctcactataga

SEQ ID NO: 983850 - DNA, 15 bp, Homo sapiens
tttctctcactatag

SEQ ID NO: 983851 - DNA, 15 bp, Homo sapiens
ttttctctcactata

SEQ ID NO: 983852 - DNA, 15 bp, Homo sapiens
tttttctctcactat

SEQ ID NO: 983853 - DNA, 15 bp, Homo sapiens
ttttttctctcacta

SEQ ID NO: 983854 - DNA, 15 bp, Homo sapiens
attttttctctcact

SEQ ID NO: 983855 - DNA, 15 bp, Homo sapiens
aattttttctctcac

SEQ ID NO: 983856 - DNA, 15 bp, Homo sapiens
taattttttctctca

SEQ ID NO: 983857 - DNA, 15 bp, Homo sapiens
ttaattttttctctc

SEQ ID NO: 983858 - DNA, 15 bp, Homo sapiens
attaattttttctct

SEQ ID NO: 983859 - DNA, 15 bp, Homo sapiens
cattaattttttctc

SEQ ID NO: 983860 - DNA, 15 bp, Homo sapiens
gcattaattttttct

SEQ ID NO: 983861 - DNA, 15 bp, Homo sapiens
tgcattaattttttc

SEQ ID NO: 983862 - DNA, 15 bp, Homo sapiens
ttgcattaatttttt

SEQ ID NO: 983863 - DNA, 15 bp, Homo sapiens
attgcattaattttt

SEQ ID NO: 983864 - DNA, 15 bp, Homo sapiens
aattgcattaatttt

SEQ ID NO: 983865 - DNA, 15 bp, Homo sapiens
taattgcattaattt

SEQ ID NO: 983866 - DNA, 15 bp, Homo sapiens
ttaattgcattaatt

SEQ ID NO: 983867 - DNA, 15 bp, Homo sapiens
tttaattgcattaat

SEQ ID NO: 983868 - DNA, 15 bp, Homo sapiens
ctttaattgcattaa

SEQ ID NO: 983869 - DNA, 15 bp, Homo sapiens
cctttaattgcatta

SEQ ID NO: 983870 - DNA, 15 bp, Homo sapiens
acctttaattgcatt

SEQ ID NO: 983871 - DNA, 15 bp, Homo sapiens
cacctttaattgcat

SEQ ID NO: 983872 - DNA, 15 bp, Homo sapiens
acacctttaattgca

SEQ ID NO: 983873 - DNA, 15 bp, Homo sapiens
aacacctttaattgc

SEQ ID NO: 983874 - DNA, 15 bp, Homo sapiens
caacacctttaattg

SEQ ID NO: 983875 - DNA, 15 bp, Homo sapiens
acaacacctttaatt

SEQ ID NO: 983876 - DNA, 15 bp, Homo sapiens
tacaacacctttaat

SEQ ID NO: 983877 - DNA, 15 bp, Homo sapiens
ttacaacacctttaa

SEQ ID NO: 983878 - DNA, 15 bp, Homo sapiens
gttacaacaccttta

SEQ ID NO: 983879 - DNA, 15 bp, Homo sapiens
tgttacaacaccttt

SEQ ID NO: 983880 - DNA, 15 bp, Homo sapiens
ctgttacaacacctt

SEQ ID NO: 983881 - DNA, 15 bp, Homo sapiens
gctgttacaacacct

SEQ ID NO: 983882 - DNA, 15 bp, Homo sapiens
agctgttacaacacc

SEQ ID NO: 983883 - DNA, 15 bp, Homo sapiens
tagctgttacaacac

SEQ ID NO: 983884 - DNA, 15 bp, Homo sapiens
ctagctgttacaaca

SEQ ID NO: 983885 - DNA, 15 bp, Homo sapiens
actagctgttacaac

SEQ ID NO: 983886 - DNA, 15 bp, Homo sapiens
gactagctgttacaa

SEQ ID NO: 983887 - DNA, 15 bp, Homo sapiens
agactagctgttaca

SEQ ID NO: 983888 - DNA, 15 bp, Homo sapiens
aagactagctgttac

SEQ ID NO: 983889 - DNA, 15 bp, Homo sapiens
gaagactagctgtta

SEQ ID NO: 983890 - DNA, 15 bp, Homo sapiens
tgaagactagctgtt

SEQ ID NO: 983891 - DNA, 15 bp, Homo sapiens
ttgaagactagctgt

SEQ ID NO: 983892 - DNA, 15 bp, Homo sapiens
cttgaagactagctg

SEQ ID NO: 983893 - DNA, 15 bp, Homo sapiens
acttgaagactagct

SEQ ID NO: 983894 - DNA, 15 bp, Homo sapiens
cacttgaagactagc

SEQ ID NO: 983895 - DNA, 15 bp, Homo sapiens
ccacttgaagactag

SEQ ID NO: 983896 - DNA, 15 bp, Homo sapiens
cccacttgaagacta

SEQ ID NO: 983897 - DNA, 15 bp, Homo sapiens
ccccacttgaagact

SEQ ID NO: 983898 - DNA, 15 bp, Homo sapiens
tccccacttgaagac

SEQ ID NO: 983899 - DNA, 15 bp, Homo sapiens
ctccccacttgaaga

SEQ ID NO: 983900 - DNA, 15 bp, Homo sapiens
tctccccacttgaag

SEQ ID NO: 983901 - DNA, 15 bp, Homo sapiens
ttctccccacttgaa

SEQ ID NO: 983902 - DNA, 15 bp, Homo sapiens
tttctccccacttga

SEQ ID NO: 983903 - DNA, 15 bp, Homo sapiens
atttctccccacttg

SEQ ID NO: 983904 - DNA, 15 bp, Homo sapiens
gatttctccccactt

SEQ ID NO: 983905 - DNA, 15 bp, Homo sapiens
tgatttctccccact

SEQ ID NO: 983906 - DNA, 15 bp, Homo sapiens
atgatttctccccac

SEQ ID NO: 983907 - DNA, 15 bp, Homo sapiens
aatgatttctcccca

SEQ ID NO: 983908 - DNA, 15 bp, Homo sapiens
aaatgatttctcccc

SEQ ID NO: 983909 - DNA, 15 bp, Homo sapiens
caaatgatttctccc

SEQ ID NO: 983910 - DNA, 15 bp, Homo sapiens
tcaaatgatttctcc

SEQ ID NO: 983911 - DNA, 15 bp, Homo sapiens
ctcaaatgatttctc

SEQ ID NO: 983912 - DNA, 15 bp, Homo sapiens
actcaaatgatttct

SEQ ID NO: 983913 - DNA, 15 bp, Homo sapiens
tactcaaatgatttc

SEQ ID NO: 983914 - DNA, 15 bp, Homo sapiens
gtactcaaatgattt

SEQ ID NO: 983915 - DNA, 15 bp, Homo sapiens
ggtactcaaatgatt

SEQ ID NO: 983916 - DNA, 15 bp, Homo sapiens
aggtactcaaatgat

SEQ ID NO: 983917 - DNA, 15 bp, Homo sapiens
aaggtactcaaatga

SEQ ID NO: 983918 - DNA, 15 bp, Homo sapiens
taaggtactcaaatg

SEQ ID NO: 983919 - DNA, 15 bp, Homo sapiens
ctaaggtactcaaat

SEQ ID NO: 983920 - DNA, 15 bp, Homo sapiens
cctaaggtactcaaa

SEQ ID NO: 983921 - DNA, 15 bp, Homo sapiens
acctaaggtactcaa

SEQ ID NO: 983922 - DNA, 15 bp, Homo sapiens
gacctaaggtactca

SEQ ID NO: 983923 - DNA, 15 bp, Homo sapiens
tgacctaaggtactc

SEQ ID NO: 983924 - DNA, 15 bp, Homo sapiens
gtgacctaaggtact

SEQ ID NO: 983925 - DNA, 15 bp, Homo sapiens
tgtgacctaaggtac

SEQ ID NO: 983926 - DNA, 15 bp, Homo sapiens
ctgtgacctaaggta

SEQ ID NO: 983927 - DNA, 15 bp, Homo sapiens
gctgtgacctaaggt

SEQ ID NO: 983928 - DNA, 15 bp, Homo sapiens
agctgtgacctaagg

SEQ ID NO: 983929 - DNA, 15 bp, Homo sapiens
aagctgtgacctaag

SEQ ID NO: 983930 - DNA, 15 bp, Homo sapiens
taagctgtgacctaa

SEQ ID NO: 983931 - DNA, 15 bp, Homo sapiens
gtaagctgtgaccta

SEQ ID NO: 983932 - DNA, 15 bp, Homo sapiens
tgtaagctgtgacct

SEQ ID NO: 983933 - DNA, 15 bp, Homo sapiens
atgtaagctgtgacc

SEQ ID NO: 983934 - DNA, 15 bp, Homo sapiens
gatgtaagctgtgac

SEQ ID NO: 983935 - DNA, 15 bp, Homo sapiens
tgatgtaagctgtga

SEQ ID NO: 983936 - DNA, 15 bp, Homo sapiens
ttgatgtaagctgtg

SEQ ID NO: 983937 - DNA, 15 bp, Homo sapiens
tttgatgtaagctgt

SEQ ID NO: 983938 - DNA, 15 bp, Homo sapiens
ttttgatgtaagctg

SEQ ID NO: 983939 - DNA, 15 bp, Homo sapiens
gttttgatgtaagct

SEQ ID NO: 983940 - DNA, 15 bp, Homo sapiens
tgttttgatgtaagc

SEQ ID NO: 983941 - DNA, 15 bp, Homo sapiens
ttgttttgatgtaag

SEQ ID NO: 983942 - DNA, 15 bp, Homo sapiens
tttgttttgatgtaa

SEQ ID NO: 983943 - DNA, 15 bp, Homo sapiens
ttttgttttgatgta

SEQ ID NO: 983944 - DNA, 15 bp, Homo sapiens
tttttgttttgatgt

SEQ ID NO: 983945 - DNA, 15 bp, Homo sapiens
ttttttgttttgatg

SEQ ID NO: 983946 - DNA, 15 bp, Homo sapiens
attttttgttttgat

SEQ ID NO: 983947 - DNA, 15 bp, Homo sapiens
gattttttgttttga

SEQ ID NO: 983948 - DNA, 15 bp, Homo sapiens
tgattttttgttttg

SEQ ID NO: 983949 - DNA, 15 bp, Homo sapiens
ctgattttttgtttt

SEQ ID NO: 983950 - DNA, 15 bp, Homo sapiens
tctgattttttgttt

SEQ ID NO: 983951 - DNA, 15 bp, Homo sapiens
ctctgattttttgtt

SEQ ID NO: 983952 - DNA, 15 bp, Homo sapiens
gctctgattttttgt

SEQ ID NO: 983953 - DNA, 15 bp, Homo sapiens
agctctgattttttg

SEQ ID NO: 983954 - DNA, 15 bp, Homo sapiens
tagctctgatttttt

SEQ ID NO: 983955 - DNA, 15 bp, Homo sapiens
gtagctctgattttt

SEQ ID NO: 983956 - DNA, 15 bp, Homo sapiens
tgtagctctgatttt

SEQ ID NO: 983957 - DNA, 15 bp, Homo sapiens
atgtagctctgattt

SEQ ID NO: 983958 - DNA, 15 bp, Homo sapiens
aatgtagctctgatt

SEQ ID NO: 983959 - DNA, 15 bp, Homo sapiens
taatgtagctctgat

SEQ ID NO: 983960 - DNA, 15 bp, Homo sapiens
ttaatgtagctctga

SEQ ID NO: 983961 - DNA, 15 bp, Homo sapiens
tttaatgtagctctg

SEQ ID NO: 983962 - DNA, 15 bp, Homo sapiens
ttttaatgtagctct

SEQ ID NO: 983963 - DNA, 15 bp, Homo sapiens
tttttaatgtagctc

SEQ ID NO: 983964 - DNA, 15 bp, Homo sapiens
ctttttaatgtagct

SEQ ID NO: 983965 - DNA, 15 bp, Homo sapiens
actttttaatgtagc

SEQ ID NO: 983966 - DNA, 15 bp, Homo sapiens
cactttttaatgtag

SEQ ID NO: 983967 - DNA, 15 bp, Homo sapiens
tcactttttaatgta

SEQ ID NO: 983968 - DNA, 15 bp, Homo sapiens
ttcactttttaatgt

SEQ ID NO: 983969 - DNA, 15 bp, Homo sapiens
tttcactttttaatg

SEQ ID NO: 983970 - DNA, 15 bp, Homo sapiens
atttcactttttaat

SEQ ID NO: 983971 - DNA, 15 bp, Homo sapiens
aatttcactttttaa

SEQ ID NO: 983972 - DNA, 15 bp, Homo sapiens
aaatttcacttttta

SEQ ID NO: 983973 - DNA, 15 bp, Homo sapiens
aaaatttcacttttt

SEQ ID NO: 983974 - DNA, 15 bp, Homo sapiens
taaaatttcactttt

SEQ ID NO: 983975 - DNA, 15 bp, Homo sapiens
ttaaaatttcacttt

SEQ ID NO: 983976 - DNA, 15 bp, Homo sapiens
gttaaaatttcactt

SEQ ID NO: 983977 - DNA, 15 bp, Homo sapiens
agttaaaatttcact

SEQ ID NO: 983978 - DNA, 15 bp, Homo sapiens
tagttaaaatttcac

SEQ ID NO: 983979 - DNA, 15 bp, Homo sapiens
atagttaaaatttca

SEQ ID NO: 983980 - DNA, 15 bp, Homo sapiens
tatagttaaaatttc

SEQ ID NO: 983981 - DNA, 15 bp, Homo sapiens
atatagttaaaattt

SEQ ID NO: 983982 - DNA, 15 bp, Homo sapiens
gatatagttaaaatt

SEQ ID NO: 983983 - DNA, 15 bp, Homo sapiens
tgatatagttaaaat

SEQ ID NO: 983984 - DNA, 15 bp, Homo sapiens
ttgatatagttaaaa

SEQ ID NO: 983985 - DNA, 15 bp, Homo sapiens
tttgatatagttaaa

SEQ ID NO: 983986 - DNA, 15 bp, Homo sapiens
gtttgatatagttaa

SEQ ID NO: 983987 - DNA, 15 bp, Homo sapiens
tgtttgatatagtta

SEQ ID NO: 983988 - DNA, 15 bp, Homo sapiens
ttgtttgatatagtt

SEQ ID NO: 983989 - DNA, 15 bp, Homo sapiens
attgtttgatatagt

SEQ ID NO: 983990 - DNA, 15 bp, Homo sapiens
tattgtttgatatag

SEQ ID NO: 983991 - DNA, 15 bp, Homo sapiens
ctattgtttgatata

SEQ ID NO: 983992 - DNA, 15 bp, Homo sapiens
tctattgtttgatat

SEQ ID NO: 983993 - DNA, 15 bp, Homo sapiens
ttctattgtttgata

SEQ ID NO: 983994 - DNA, 15 bp, Homo sapiens
tttctattgtttgat

SEQ ID NO: 983995 - DNA, 15 bp, Homo sapiens
ttttctattgtttga

SEQ ID NO: 983996 - DNA, 15 bp, Homo sapiens
tttttctattgtttg

SEQ ID NO: 983997 - DNA, 15 bp, Homo sapiens
ttttttctattgttt

SEQ ID NO: 983998 - DNA, 15 bp, Homo sapiens
tttttttctattgtt

SEQ ID NO: 983999 - DNA, 15 bp, Homo sapiens
gtttttttctattgt

SEQ ID NO: 984000 - DNA, 15 bp, Homo sapiens
tgtttttttctattg

SEQ ID NO: 984001 - DNA, 15 bp, Homo sapiens
ctgtttttttctatt

SEQ ID NO: 984002 - DNA, 15 bp, Homo sapiens
tctgtttttttctat

SEQ ID NO: 984003 - DNA, 15 bp, Homo sapiens
ttctgtttttttcta

SEQ ID NO: 984004 - DNA, 15 bp, Homo sapiens
cttctgtttttttct

SEQ ID NO: 984005 - DNA, 15 bp, Homo sapiens
tcttctgtttttttc

SEQ ID NO: 984006 - DNA, 15 bp, Homo sapiens
ttcttctgttttttt

SEQ ID NO: 984007 - DNA, 15 bp, Homo sapiens
tttcttctgtttttt

SEQ ID NO: 984008 - DNA, 15 bp, Homo sapiens
ttttcttctgttttt

SEQ ID NO: 984009 - DNA, 15 bp, Homo sapiens
attttcttctgtttt

SEQ ID NO: 984010 - DNA, 15 bp, Homo sapiens
aattttcttctgttt

SEQ ID NO: 984011 - DNA, 15 bp, Homo sapiens
caattttcttctgtt

SEQ ID NO: 984012 - DNA, 15 bp, Homo sapiens
tcaattttcttctgt

SEQ ID NO: 984013 - DNA, 15 bp, Homo sapiens
ttcaattttcttctg

SEQ ID NO: 984014 - DNA, 15 bp, Homo sapiens
attcaattttcttct

SEQ ID NO: 984015 - DNA, 15 bp, Homo sapiens
tattcaattttcttc

SEQ ID NO: 984016 - DNA, 15 bp, Homo sapiens
gtattcaattttctt

SEQ ID NO: 984017 - DNA, 15 bp, Homo sapiens
agtattcaattttct

SEQ ID NO: 984018 - DNA, 15 bp, Homo sapiens
aagtattcaattttc

SEQ ID NO: 984019 - DNA, 15 bp, Homo sapiens
taagtattcaatttt

SEQ ID NO: 984020 - DNA, 15 bp, Homo sapiens
gtaagtattcaattt

SEQ ID NO: 984021 - DNA, 15 bp, Homo sapiens
agtaagtattcaatt

SEQ ID NO: 984022 - DNA, 15 bp, Homo sapiens
tagtaagtattcaat

SEQ ID NO: 984023 - DNA, 15 bp, Homo sapiens
ttagtaagtattcaa

SEQ ID NO: 984024 - DNA, 15 bp, Homo sapiens
tttagtaagtattca

SEQ ID NO: 984025 - DNA, 15 bp, Homo sapiens
atttagtaagtattc

SEQ ID NO: 984026 - DNA, 15 bp, Homo sapiens
gatttagtaagtatt

SEQ ID NO: 984027 - DNA, 15 bp, Homo sapiens
agatttagtaagtat

SEQ ID NO: 984028 - DNA, 15 bp, Homo sapiens
aagatttagtaagta

SEQ ID NO: 984029 - DNA, 15 bp, Homo sapiens
taagatttagtaagt

SEQ ID NO: 984030 - DNA, 15 bp, Homo sapiens
ctaagatttagtaag

SEQ ID NO: 984031 - DNA, 15 bp, Homo sapiens
gctaagatttagtaa

SEQ ID NO: 984032 - DNA, 15 bp, Homo sapiens
tgctaagatttagta

SEQ ID NO: 984033 - DNA, 15 bp, Homo sapiens
atgctaagatttagt

SEQ ID NO: 984034 - DNA, 15 bp, Homo sapiens
catgctaagatttag

SEQ ID NO: 984035 - DNA, 15 bp, Homo sapiens
tcatgctaagattta

SEQ ID NO: 984036 - DNA, 15 bp, Homo sapiens
ttcatgctaagattt

SEQ ID NO: 984037 - DNA, 15 bp, Homo sapiens
attcatgctaagatt

SEQ ID NO: 984038 - DNA, 15 bp, Homo sapiens
tattcatgctaagat

SEQ ID NO: 984039 - DNA, 15 bp, Homo sapiens
ttattcatgctaaga

SEQ ID NO: 984040 - DNA, 15 bp, Homo sapiens
cttattcatgctaag

SEQ ID NO: 984041 - DNA, 15 bp, Homo sapiens
tcttattcatgctaa

SEQ ID NO: 984042 - DNA, 15 bp, Homo sapiens
ttcttattcatgcta

SEQ ID NO: 984043 - DNA, 15 bp, Homo sapiens
gttcttattcatgct

SEQ ID NO: 984044 - DNA, 15 bp, Homo sapiens
agttcttattcatgc

SEQ ID NO: 984045 - DNA, 15 bp, Homo sapiens
cagttcttattcatg

SEQ ID NO: 984046 - DNA, 15 bp, Homo sapiens
acagttcttattcat

SEQ ID NO: 984047 - DNA, 15 bp, Homo sapiens
aacagttcttattca

SEQ ID NO: 984048 - DNA, 15 bp, Homo sapiens
aaacagttcttattc

SEQ ID NO: 984049 - DNA, 15 bp, Homo sapiens
taaacagttcttatt

SEQ ID NO: 984050 - DNA, 15 bp, Homo sapiens
ttaaacagttcttat

SEQ ID NO: 984051 - DNA, 15 bp, Homo sapiens
gttaaacagttctta

SEQ ID NO: 984052 - DNA, 15 bp, Homo sapiens
tgttaaacagttctt

SEQ ID NO: 984053 - DNA, 15 bp, Homo sapiens
gtgttaaacagttct

SEQ ID NO: 984054 - DNA, 15 bp, Homo sapiens
agtgttaaacagttc

SEQ ID NO: 984055 - DNA, 15 bp, Homo sapiens
aagtgttaaacagtt

SEQ ID NO: 984056 - DNA, 15 bp, Homo sapiens
taagtgttaaacagt

SEQ ID NO: 984057 - DNA, 15 bp, Homo sapiens
ctaagtgttaaacag

SEQ ID NO: 984058 - DNA, 15 bp, Homo sapiens
tctaagtgttaaaca

SEQ ID NO: 984059 - DNA, 15 bp, Homo sapiens
ctctaagtgttaaac

SEQ ID NO: 984060 - DNA, 15 bp, Homo sapiens
cctctaagtgttaaa

SEQ ID NO: 984061 - DNA, 15 bp, Homo sapiens
gcctctaagtgttaa

SEQ ID NO: 984062 - DNA, 15 bp, Homo sapiens
tgcctctaagtgtta

SEQ ID NO: 984063 - DNA, 15 bp, Homo sapiens
ttgcctctaagtgtt

SEQ ID NO: 984064 - DNA, 15 bp, Homo sapiens
cttgcctctaagtgt

SEQ ID NO: 984065 - DNA, 15 bp, Homo sapiens
ccttgcctctaagtg

SEQ ID NO: 984066 - DNA, 15 bp, Homo sapiens
tccttgcctctaagt

SEQ ID NO: 984067 - DNA, 15 bp, Homo sapiens
gtccttgcctctaag

SEQ ID NO: 984068 - DNA, 15 bp, Homo sapiens
agtccttgcctctaa

SEQ ID NO: 984069 - DNA, 15 bp, Homo sapiens
cagtccttgcctcta

SEQ ID NO: 984070 - DNA, 15 bp, Homo sapiens
ccagtccttgcctct

SEQ ID NO: 984071 - DNA, 15 bp, Homo sapiens
cccagtccttgcctc

SEQ ID NO: 984072 - DNA, 15 bp, Homo sapiens
gcccagtccttgcct

SEQ ID NO: 984073 - DNA, 15 bp, Homo sapiens
cgcccagtccttgcc

SEQ ID NO: 984074 - DNA, 15 bp, Homo sapiens
acgcccagtccttgc

SEQ ID NO: 984075 - DNA, 15 bp, Homo sapiens
cacgcccagtccttg

SEQ ID NO: 984076 - DNA, 15 bp, Homo sapiens
ccacgcccagtcctt

SEQ ID NO: 984077 - DNA, 15 bp, Homo sapiens
accacgcccagtcct

SEQ ID NO: 984078 - DNA, 15 bp, Homo sapiens
caccacgcccagtcc

SEQ ID NO: 984079 - DNA, 15 bp, Homo sapiens
ccaccacgcccagtc

SEQ ID NO: 984080 - DNA, 15 bp, Homo sapiens
gccaccacgcccagt

SEQ ID NO: 984081 - DNA, 15 bp, Homo sapiens
agccaccacgcccag

SEQ ID NO: 984082 - DNA, 15 bp, Homo sapiens
gagccaccacgccca

SEQ ID NO: 984083 - DNA, 15 bp, Homo sapiens
tgagccaccacgccc

SEQ ID NO: 984084 - DNA, 15 bp, Homo sapiens
atgagccaccacgcc

SEQ ID NO: 984085 - DNA, 15 bp, Homo sapiens
catgagccaccacgc

SEQ ID NO: 984086 - DNA, 15 bp, Homo sapiens
gcatgagccaccacg

SEQ ID NO: 984087 - DNA, 15 bp, Homo sapiens
agcatgagccaccac

SEQ ID NO: 984088 - DNA, 15 bp, Homo sapiens
aagcatgagccacca

SEQ ID NO: 984089 - DNA, 15 bp, Homo sapiens
aaagcatgagccacc

SEQ ID NO: 984090 - DNA, 15 bp, Homo sapiens
aaaagcatgagccac

SEQ ID NO: 984091 - DNA, 15 bp, Homo sapiens
taaaagcatgagcca

SEQ ID NO: 984092 - DNA, 15 bp, Homo sapiens
ttaaaagcatgagcc

SEQ ID NO: 984093 - DNA, 15 bp, Homo sapiens
attaaaagcatgagc

SEQ ID NO: 984094 - DNA, 15 bp, Homo sapiens
gattaaaagcatgag

SEQ ID NO: 984095 - DNA, 15 bp, Homo sapiens
ggattaaaagcatga

SEQ ID NO: 984096 - DNA, 15 bp, Homo sapiens
gggattaaaagcatg

SEQ ID NO: 984097 - DNA, 15 bp, Homo sapiens
tgggattaaaagcat

SEQ ID NO: 984098 - DNA, 15 bp, Homo sapiens
ctgggattaaaagca

SEQ ID NO: 984099 - DNA, 15 bp, Homo sapiens
cctgggattaaaagc

SEQ ID NO: 984100 - DNA, 15 bp, Homo sapiens
tcctgggattaaaag

SEQ ID NO: 984101 - DNA, 15 bp, Homo sapiens
gtcctgggattaaaa

SEQ ID NO: 984102 - DNA, 15 bp, Homo sapiens
agtcctgggattaaa

SEQ ID NO: 984103 - DNA, 15 bp, Homo sapiens
aagtcctgggattaa

SEQ ID NO: 984104 - DNA, 15 bp, Homo sapiens
aaagtcctgggatta

SEQ ID NO: 984105 - DNA, 15 bp, Homo sapiens
caaagtcctgggatt

SEQ ID NO: 984106 - DNA, 15 bp, Homo sapiens
ccaaagtcctgggat

SEQ ID NO: 984107 - DNA, 15 bp, Homo sapiens
cccaaagtcctggga

SEQ ID NO: 984108 - DNA, 15 bp, Homo sapiens
tcccaaagtcctggg

SEQ ID NO: 984109 - DNA, 15 bp, Homo sapiens
ctcccaaagtcctgg

SEQ ID NO: 984110 - DNA, 15 bp, Homo sapiens
gctcccaaagtcctg

SEQ ID NO: 984111 - DNA, 15 bp, Homo sapiens
ggctcccaaagtcct

SEQ ID NO: 984112 - DNA, 15 bp, Homo sapiens
gggctcccaaagtcc

SEQ ID NO: 984113 - DNA, 15 bp, Homo sapiens
tgggctcccaaagtc

SEQ ID NO: 984114 - DNA, 15 bp, Homo sapiens
ttgggctcccaaagt

SEQ ID NO: 984115 - DNA, 15 bp, Homo sapiens
cttgggctcccaaag

SEQ ID NO: 984116 - DNA, 15 bp, Homo sapiens
ccttgggctcccaaa

SEQ ID NO: 984117 - DNA, 15 bp, Homo sapiens
gccttgggctcccaa

SEQ ID NO: 984118 - DNA, 15 bp, Homo sapiens
cgccttgggctccca

SEQ ID NO: 984119 - DNA, 15 bp, Homo sapiens
ccgccttgggctccc

SEQ ID NO: 984120 - DNA, 15 bp, Homo sapiens
cccgccttgggctcc

SEQ ID NO: 984121 - DNA, 15 bp, Homo sapiens
gcccgccttgggctc

SEQ ID NO: 984122 - DNA, 15 bp, Homo sapiens
cgcccgccttgggct

SEQ ID NO: 984123 - DNA, 15 bp, Homo sapiens
ccgcccgccttgggc

SEQ ID NO: 984124 - DNA, 15 bp, Homo sapiens
tccgcccgccttggg

SEQ ID NO: 984125 - DNA, 15 bp, Homo sapiens
atccgcccgccttgg

SEQ ID NO: 984126 - DNA, 15 bp, Homo sapiens
gatccgcccgccttg

SEQ ID NO: 984127 - DNA, 15 bp, Homo sapiens
tgatccgcccgcctt

SEQ ID NO: 984128 - DNA, 15 bp, Homo sapiens
ggtgatccgcccgcc

SEQ ID NO: 984129 - DNA, 15 bp, Homo sapiens
aggtgatccgcccgc

SEQ ID NO: 984130 - DNA, 15 bp, Homo sapiens
caggtgatccgcccg

SEQ ID NO: 984131 - DNA, 15 bp, Homo sapiens
tcaggtgatccgccc

SEQ ID NO: 984132 - DNA, 15 bp, Homo sapiens
ctcaggtgatccgcc

SEQ ID NO: 984133 - DNA, 15 bp, Homo sapiens
cctcaggtgatccgc

SEQ ID NO: 984134 - DNA, 15 bp, Homo sapiens
acctcaggtgatccg

SEQ ID NO: 984135 - DNA, 15 bp, Homo sapiens
agtctcaaactcctg

SEQ ID NO: 984136 - DNA, 15 bp, Homo sapiens
tagtctcaaactcct

SEQ ID NO: 984137 - DNA, 15 bp, Homo sapiens
ctagtctcaaactcc

SEQ ID NO: 984138 - DNA, 15 bp, Homo sapiens
gctagtctcaaactc

SEQ ID NO: 984139 - DNA, 15 bp, Homo sapiens
ggctagtctcaaact

SEQ ID NO: 984140 - DNA, 15 bp, Homo sapiens
aggctagtctcaaac

SEQ ID NO: 984141 - DNA, 15 bp, Homo sapiens
caggctagtctcaaa

SEQ ID NO: 984142 - DNA, 15 bp, Homo sapiens
ccaggctagtctcaa

SEQ ID NO: 984143 - DNA, 15 bp, Homo sapiens
gccaggctagtctca

SEQ ID NO: 984144 - DNA, 15 bp, Homo sapiens
ggccaggctagtctc

SEQ ID NO: 984145 - DNA, 15 bp, Homo sapiens
tggccaggctagtct

SEQ ID NO: 984146 - DNA, 15 bp, Homo sapiens
ttggccaggctagtc

SEQ ID NO: 984147 - DNA, 15 bp, Homo sapiens
gttggccaggctagt

SEQ ID NO: 984148 - DNA, 15 bp, Homo sapiens
tgttggccaggctag

SEQ ID NO: 984149 - DNA, 15 bp, Homo sapiens
atgttggccaggcta

SEQ ID NO: 984150 - DNA, 15 bp, Homo sapiens
catgttggccaggct

SEQ ID NO: 984151 - DNA, 15 bp, Homo sapiens
ccatgttggccaggc

SEQ ID NO: 984152 - DNA, 15 bp, Homo sapiens
accatgttggccagg

SEQ ID NO: 984153 - DNA, 15 bp, Homo sapiens
caccatgttggccag

SEQ ID NO: 984154 - DNA, 15 bp, Homo sapiens
tcaccatgttggcca

SEQ ID NO: 984155 - DNA, 15 bp, Homo sapiens
acggggtttcaccat

SEQ ID NO: 984156 - DNA, 15 bp, Homo sapiens
gacggggtttcacca

SEQ ID NO: 984157 - DNA, 15 bp, Homo sapiens
agacggggtttcacc

SEQ ID NO: 984158 - DNA, 15 bp, Homo sapiens
gagacggggtttcac

SEQ ID NO: 984159 - DNA, 15 bp, Homo sapiens
agagacggggtttca

SEQ ID NO: 984160 - DNA, 15 bp, Homo sapiens
tagagacggggtttc

SEQ ID NO: 984161 - DNA, 15 bp, Homo sapiens
gtagagacggggttt

SEQ ID NO: 984162 - DNA, 15 bp, Homo sapiens
agtagagacggggtt

SEQ ID NO: 984163 - DNA, 15 bp, Homo sapiens
tagtagagacggggt

SEQ ID NO: 984164 - DNA, 15 bp, Homo sapiens
ttagtagagacgggg

SEQ ID NO: 984165 - DNA, 15 bp, Homo sapiens
tttagtagagacggg

SEQ ID NO: 984166 - DNA, 15 bp, Homo sapiens
ttttagtagagacgg

SEQ ID NO: 984167 - DNA, 15 bp, Homo sapiens
tttttagtagagacg

SEQ ID NO: 984168 - DNA, 15 bp, Homo sapiens
ttttttagtagagac

SEQ ID NO: 984169 - DNA, 15 bp, Homo sapiens
attttttagtagaga

SEQ ID NO: 984170 - DNA, 15 bp, Homo sapiens
cattttttagtagag

SEQ ID NO: 984171 - DNA, 15 bp, Homo sapiens
gcattttttagtaga

SEQ ID NO: 984172 - DNA, 15 bp, Homo sapiens
tgcattttttagtag

SEQ ID NO: 984173 - DNA, 15 bp, Homo sapiens
ttgcattttttagta

SEQ ID NO: 984174 - DNA, 15 bp, Homo sapiens
tttgcattttttagt

SEQ ID NO: 984175 - DNA, 15 bp, Homo sapiens
ttttgcattttttag

SEQ ID NO: 984176 - DNA, 15 bp, Homo sapiens
tttttgcatttttta

SEQ ID NO: 984177 - DNA, 15 bp, Homo sapiens
atttttgcatttttt

SEQ ID NO: 984178 - DNA, 15 bp, Homo sapiens
aatttttgcattttt

SEQ ID NO: 984179 - DNA, 15 bp, Homo sapiens
taatttttgcatttt

SEQ ID NO: 984180 - DNA, 15 bp, Homo sapiens
ctaatttttgcattt

SEQ ID NO: 984181 - DNA, 15 bp, Homo sapiens
gctaatttttgcatt

SEQ ID NO: 984182 - DNA, 15 bp, Homo sapiens
agctaatttttgcat

SEQ ID NO: 984183 - DNA, 15 bp, Homo sapiens
cagctaatttttgca

SEQ ID NO: 984184 - DNA, 15 bp, Homo sapiens
gcagctaatttttgc

SEQ ID NO: 984185 - DNA, 15 bp, Homo sapiens
cgcagctaatttttg

SEQ ID NO: 984186 - DNA, 15 bp, Homo sapiens
acgcagctaattttt

SEQ ID NO: 984187 - DNA, 15 bp, Homo sapiens
cacgcagctaatttt

SEQ ID NO: 984188 - DNA, 15 bp, Homo sapiens
acacgcagctaattt

SEQ ID NO: 984189 - DNA, 15 bp, Homo sapiens
cacacgcagctaatt

SEQ ID NO: 984190 - DNA, 15 bp, Homo sapiens
ccacacgcagctaat

SEQ ID NO: 984191 - DNA, 15 bp, Homo sapiens
accacacgcagctaa

SEQ ID NO: 984192 - DNA, 15 bp, Homo sapiens
caccacacgcagcta

SEQ ID NO: 984193 - DNA, 15 bp, Homo sapiens
ccaccacacgcagct

SEQ ID NO: 984194 - DNA, 15 bp, Homo sapiens
accaccacacgcagc

SEQ ID NO: 984195 - DNA, 15 bp, Homo sapiens
caccaccacacgcag

SEQ ID NO: 984196 - DNA, 15 bp, Homo sapiens
gcaccaccacacgca

SEQ ID NO: 984197 - DNA, 15 bp, Homo sapiens
tgcaccaccacacgc

SEQ ID NO: 984198 - DNA, 15 bp, Homo sapiens
atgcaccaccacacg

SEQ ID NO: 984199 - DNA, 15 bp, Homo sapiens
catgcaccaccacac

SEQ ID NO: 984200 - DNA, 15 bp, Homo sapiens
gcatgcaccaccaca

SEQ ID NO: 984201 - DNA, 15 bp, Homo sapiens
ggcatgcaccaccac

SEQ ID NO: 984202 - DNA, 15 bp, Homo sapiens
aggcatgcaccacca

SEQ ID NO: 984203 - DNA, 15 bp, Homo sapiens
caggcatgcaccacc

SEQ ID NO: 984204 - DNA, 15 bp, Homo sapiens
acaggcatgcaccac

SEQ ID NO: 984205 - DNA, 15 bp, Homo sapiens
tacaggcatgcacca

SEQ ID NO: 984206 - DNA, 15 bp, Homo sapiens
ttacaggcatgcacc

SEQ ID NO: 984207 - DNA, 15 bp, Homo sapiens
attacaggcatgcac

SEQ ID NO: 984208 - DNA, 15 bp, Homo sapiens
gattacaggcatgca

SEQ ID NO: 984209 - DNA, 15 bp, Homo sapiens
agattacaggcatgc

SEQ ID NO: 984210 - DNA, 15 bp, Homo sapiens
gagattacaggcatg

SEQ ID NO: 984211 - DNA, 15 bp, Homo sapiens
tgagattacaggcat

SEQ ID NO: 984212 - DNA, 15 bp, Homo sapiens
ctgagattacaggca

SEQ ID NO: 984213 - DNA, 15 bp, Homo sapiens
gctgagattacaggc

SEQ ID NO: 984214 - DNA, 15 bp, Homo sapiens
agctgagattacagg

SEQ ID NO: 984215 - DNA, 15 bp, Homo sapiens
tagctgagattacag

SEQ ID NO: 984216 - DNA, 15 bp, Homo sapiens
gtagctgagattaca

SEQ ID NO: 984217 - DNA, 15 bp, Homo sapiens
agtagctgagattac

SEQ ID NO: 984218 - DNA, 15 bp, Homo sapiens
aagtagctgagatta

SEQ ID NO: 984219 - DNA, 15 bp, Homo sapiens
caagtagctgagatt

SEQ ID NO: 984220 - DNA, 15 bp, Homo sapiens
ccaagtagctgagat

SEQ ID NO: 984221 - DNA, 15 bp, Homo sapiens
cccaagtagctgaga

SEQ ID NO: 984222 - DNA, 15 bp, Homo sapiens
tcccaagtagctgag

SEQ ID NO: 984223 - DNA, 15 bp, Homo sapiens
ctcccaagtagctga

SEQ ID NO: 984224 - DNA, 15 bp, Homo sapiens
gcctcccaagtagct

SEQ ID NO: 984225 - DNA, 15 bp, Homo sapiens
agcctcccaagtagc

SEQ ID NO: 984226 - DNA, 15 bp, Homo sapiens
tagcctcccaagtag

SEQ ID NO: 984227 - DNA, 15 bp, Homo sapiens
ttagcctcccaagta

SEQ ID NO: 984228 - DNA, 15 bp, Homo sapiens
cttagcctcccaagt

SEQ ID NO: 984229 - DNA, 15 bp, Homo sapiens
ccttagcctcccaag

SEQ ID NO: 984230 - DNA, 15 bp, Homo sapiens
gccttagcctcccaa

SEQ ID NO: 984231 - DNA, 15 bp, Homo sapiens
tgccttagcctccca

SEQ ID NO: 984232 - DNA, 15 bp, Homo sapiens
atgccttagcctccc

SEQ ID NO: 984233 - DNA, 15 bp, Homo sapiens
catgccttagcctcc

SEQ ID NO: 984234 - DNA, 15 bp, Homo sapiens
tcatgccttagcctc

SEQ ID NO: 984235 - DNA, 15 bp, Homo sapiens
ctcatgccttagcct

SEQ ID NO: 984236 - DNA, 15 bp, Homo sapiens
tctcatgccttagcc

SEQ ID NO: 984237 - DNA, 15 bp, Homo sapiens
ttctcatgccttagc

SEQ ID NO: 984238 - DNA, 15 bp, Homo sapiens
attctcatgccttag

SEQ ID NO: 984239 - DNA, 15 bp, Homo sapiens
gattctcatgcctta

SEQ ID NO: 984240 - DNA, 15 bp, Homo sapiens
cgattctcatgcctt

SEQ ID NO: 984241 - DNA, 15 bp, Homo sapiens
gcgattctcatgcct

SEQ ID NO: 984242 - DNA, 15 bp, Homo sapiens
agcgattctcatgcc

SEQ ID NO: 984243 - DNA, 15 bp, Homo sapiens
aagcgattctcatgc

SEQ ID NO: 984244 - DNA, 15 bp, Homo sapiens
caagcgattctcatg

SEQ ID NO: 984245 - DNA, 15 bp, Homo sapiens
tcaagcgattctcat

SEQ ID NO: 984246 - DNA, 15 bp, Homo sapiens
ttcaagcgattctca

SEQ ID NO: 984247 - DNA, 15 bp, Homo sapiens
gttcaagcgattctc

SEQ ID NO: 984248 - DNA, 15 bp, Homo sapiens
ggttcaagcgattct

SEQ ID NO: 984249 - DNA, 15 bp, Homo sapiens
aggttcaagcgattc

SEQ ID NO: 984250 - DNA, 15 bp, Homo sapiens
ccaggttcaagcgat

SEQ ID NO: 984251 - DNA, 15 bp, Homo sapiens
cccaggttcaagcga

SEQ ID NO: 984252 - DNA, 15 bp, Homo sapiens
tcccaggttcaagcg

SEQ ID NO: 984253 - DNA, 15 bp, Homo sapiens
ctcccaggttcaagc

SEQ ID NO: 984254 - DNA, 15 bp, Homo sapiens
cctcccaggttcaag

SEQ ID NO: 984255 - DNA, 15 bp, Homo sapiens
acctcccaggttcaa

SEQ ID NO: 984256 - DNA, 15 bp, Homo sapiens
cacctcccaggttca

SEQ ID NO: 984257 - DNA, 15 bp, Homo sapiens
ccacctcccaggttc

SEQ ID NO: 984258 - DNA, 15 bp, Homo sapiens
tccacctcccaggtt

SEQ ID NO: 984259 - DNA, 15 bp, Homo sapiens
ctccacctcccaggt

SEQ ID NO: 984260 - DNA, 15 bp, Homo sapiens
cctccacctcccagg

SEQ ID NO: 984261 - DNA, 15 bp, Homo sapiens
gcctccacctcccag

SEQ ID NO: 984262 - DNA, 15 bp, Homo sapiens
agcctccacctccca

SEQ ID NO: 984263 - DNA, 15 bp, Homo sapiens
cagcctccacctccc

SEQ ID NO: 984264 - DNA, 15 bp, Homo sapiens
acagcctccacctcc

SEQ ID NO: 984265 - DNA, 15 bp, Homo sapiens
tacagcctccacctc

SEQ ID NO: 984266 - DNA, 15 bp, Homo sapiens
ctacagcctccacct

SEQ ID NO: 984267 - DNA, 15 bp, Homo sapiens
actacagcctccacc

SEQ ID NO: 984268 - DNA, 15 bp, Homo sapiens
cactacagcctccac

SEQ ID NO: 984269 - DNA, 15 bp, Homo sapiens
tcactacagcctcca

SEQ ID NO: 984270 - DNA, 15 bp, Homo sapiens
ctcactacagcctcc

SEQ ID NO: 984271 - DNA, 15 bp, Homo sapiens
gctcactacagcctc

SEQ ID NO: 984272 - DNA, 15 bp, Homo sapiens
ggctcactacagcct

SEQ ID NO: 984273 - DNA, 15 bp, Homo sapiens
cggctcactacagcc

SEQ ID NO: 984274 - DNA, 15 bp, Homo sapiens
tcggctcactacagc

SEQ ID NO: 984275 - DNA, 15 bp, Homo sapiens
ctcggctcactacag

SEQ ID NO: 984276 - DNA, 15 bp, Homo sapiens
tctcggctcactaca

SEQ ID NO: 984277 - DNA, 15 bp, Homo sapiens
atctcggctcactac

SEQ ID NO: 984278 - DNA, 15 bp, Homo sapiens
aatctcggctcacta

SEQ ID NO: 984279 - DNA, 15 bp, Homo sapiens
cacaatctcggctca

SEQ ID NO: 984280 - DNA, 15 bp, Homo sapiens
gcacaatctcggctc

SEQ ID NO: 984281 - DNA, 15 bp, Homo sapiens
ggcacaatctcggct

SEQ ID NO: 984282 - DNA, 15 bp, Homo sapiens
tggcacaatctcggc

SEQ ID NO: 984283 - DNA, 15 bp, Homo sapiens
gtggcacaatctcgg

SEQ ID NO: 984284 - DNA, 15 bp, Homo sapiens
agtggcacaatctcg

SEQ ID NO: 984285 - DNA, 15 bp, Homo sapiens
cagtggcacaatctc

SEQ ID NO: 984286 - DNA, 15 bp, Homo sapiens
gcagtggcacaatct

SEQ ID NO: 984287 - DNA, 15 bp, Homo sapiens
tgcagtggcacaatc

SEQ ID NO: 984288 - DNA, 15 bp, Homo sapiens
gtgcagtggcacaat

SEQ ID NO: 984289 - DNA, 15 bp, Homo sapiens
agtgcagtggcacaa

SEQ ID NO: 984290 - DNA, 15 bp, Homo sapiens
tagtgcagtggcaca

SEQ ID NO: 984291 - DNA, 15 bp, Homo sapiens
gtagtgcagtggcac

SEQ ID NO: 984292 - DNA, 15 bp, Homo sapiens
tgtagtgcagtggca

SEQ ID NO: 984293 - DNA, 15 bp, Homo sapiens
ctgtagtgcagtggc

SEQ ID NO: 984294 - DNA, 15 bp, Homo sapiens
gctgtagtgcagtgg

SEQ ID NO: 984295 - DNA, 15 bp, Homo sapiens
ggctgtagtgcagtg

SEQ ID NO: 984296 - DNA, 15 bp, Homo sapiens
aggctgtagtgcagt

SEQ ID NO: 984297 - DNA, 15 bp, Homo sapiens
caggctgtagtgcag

SEQ ID NO: 984298 - DNA, 15 bp, Homo sapiens
ccaggctgtagtgca

SEQ ID NO: 984299 - DNA, 15 bp, Homo sapiens
cccaggctgtagtgc

SEQ ID NO: 984300 - DNA, 15 bp, Homo sapiens
acccaggctgtagtg

SEQ ID NO: 984301 - DNA, 15 bp, Homo sapiens
cacccaggctgtagt

SEQ ID NO: 984302 - DNA, 15 bp, Homo sapiens
tcacccaggctgtag

SEQ ID NO: 984303 - DNA, 15 bp, Homo sapiens
gtcacccaggctgta

SEQ ID NO: 984304 - DNA, 15 bp, Homo sapiens
tgtcacccaggctgt

SEQ ID NO: 984305 - DNA, 15 bp, Homo sapiens
actgtcacccaggct

SEQ ID NO: 984306 - DNA, 15 bp, Homo sapiens
cactgtcacccaggc

SEQ ID NO: 984307 - DNA, 15 bp, Homo sapiens
acactgtcacccagg

SEQ ID NO: 984308 - DNA, 15 bp, Homo sapiens
cacactgtcacccag

SEQ ID NO: 984309 - DNA, 15 bp, Homo sapiens
tcacactgtcaccca

SEQ ID NO: 984310 - DNA, 15 bp, Homo sapiens
ttcacactgtcaccc

SEQ ID NO: 984311 - DNA, 15 bp, Homo sapiens
tttcacactgtcacc

SEQ ID NO: 984312 - DNA, 15 bp, Homo sapiens
atttcacactgtcac

SEQ ID NO: 984313 - DNA, 15 bp, Homo sapiens
gatttcacactgtca

SEQ ID NO: 984314 - DNA, 15 bp, Homo sapiens
ggatttcacactgtc

SEQ ID NO: 984315 - DNA, 15 bp, Homo sapiens
aggatttcacactgt

SEQ ID NO: 984316 - DNA, 15 bp, Homo sapiens
gaggatttcacactg

SEQ ID NO: 984317 - DNA, 15 bp, Homo sapiens
agaggatttcacact

SEQ ID NO: 984318 - DNA, 15 bp, Homo sapiens
gagaggatttcacac

SEQ ID NO: 984319 - DNA, 15 bp, Homo sapiens
agagaggatttcaca

SEQ ID NO: 984320 - DNA, 15 bp, Homo sapiens
gagagaggatttcac

SEQ ID NO: 984321 - DNA, 15 bp, Homo sapiens
agagagaggatttca

SEQ ID NO: 984322 - DNA, 15 bp, Homo sapiens
gagagagaggatttc

SEQ ID NO: 984323 - DNA, 15 bp, Homo sapiens
tgagagagaggattt

SEQ ID NO: 984324 - DNA, 15 bp, Homo sapiens
ttgagagagaggatt

SEQ ID NO: 984325 - DNA, 15 bp, Homo sapiens
tttgagagagaggat

SEQ ID NO: 984326 - DNA, 15 bp, Homo sapiens
ttttgagagagagga

SEQ ID NO: 984327 - DNA, 15 bp, Homo sapiens
tttttgagagagagg

SEQ ID NO: 984328 - DNA, 15 bp, Homo sapiens
ttttttgagagagag

SEQ ID NO: 984329 - DNA, 15 bp, Homo sapiens
tttttttgagagaga

SEQ ID NO: 984330 - DNA, 15 bp, Homo sapiens
ttttttttgagagag

SEQ ID NO: 984331 - DNA, 15 bp, Homo sapiens
tttttttttgagaga

SEQ ID NO: 984332 - DNA, 15 bp, Homo sapiens
ttttttttttgagag

SEQ ID NO: 984333 - DNA, 15 bp, Homo sapiens
gcttttttttttttt

SEQ ID NO: 984334 - DNA, 15 bp, Homo sapiens
tgctttttttttttt

SEQ ID NO: 984335 - DNA, 15 bp, Homo sapiens
ttgcttttttttttt

SEQ ID NO: 984336 - DNA, 15 bp, Homo sapiens
tttgctttttttttt

SEQ ID NO: 984337 - DNA, 15 bp, Homo sapiens
gtttgcttttttttt

SEQ ID NO: 984338 - DNA, 15 bp, Homo sapiens
agtttgctttttttt

SEQ ID NO: 984339 - DNA, 15 bp, Homo sapiens
tagtttgcttttttt

SEQ ID NO: 984340 - DNA, 15 bp, Homo sapiens
ctagtttgctttttt

SEQ ID NO: 984341 - DNA, 15 bp, Homo sapiens
tctagtttgcttttt

SEQ ID NO: 984342 - DNA, 15 bp, Homo sapiens
ctctagtttgctttt

SEQ ID NO: 984343 - DNA, 15 bp, Homo sapiens
gctctagtttgcttt

SEQ ID NO: 984344 - DNA, 15 bp, Homo sapiens
tgctctagtttgctt

SEQ ID NO: 984345 - DNA, 15 bp, Homo sapiens
ctgctctagtttgct

SEQ ID NO: 984346 - DNA, 15 bp, Homo sapiens
actgctctagtttgc

SEQ ID NO: 984347 - DNA, 15 bp, Homo sapiens
cactgctctagtttg

SEQ ID NO: 984348 - DNA, 15 bp, Homo sapiens
tcactgctctagttt

SEQ ID NO: 984349 - DNA, 15 bp, Homo sapiens
ctcactgctctagtt

SEQ ID NO: 984350 - DNA, 15 bp, Homo sapiens
cctcactgctctagt

SEQ ID NO: 984351 - DNA, 15 bp, Homo sapiens
acctcactgctctag

SEQ ID NO: 984352 - DNA, 15 bp, Homo sapiens
tacctcactgctcta

SEQ ID NO: 984353 - DNA, 15 bp, Homo sapiens
gtacctcactgctct

SEQ ID NO: 984354 - DNA, 15 bp, Homo sapiens
ggtacctcactgctc

SEQ ID NO: 984355 - DNA, 15 bp, Homo sapiens
tggtacctcactgct

SEQ ID NO: 984356 - DNA, 15 bp, Homo sapiens
atggtacctcactgc

SEQ ID NO: 984357 - DNA, 15 bp, Homo sapiens
aatggtacctcactg

SEQ ID NO: 984358 - DNA, 15 bp, Homo sapiens
taatggtacctcact

SEQ ID NO: 984359 - DNA, 15 bp, Homo sapiens
ataatggtacctcac

SEQ ID NO: 984360 - DNA, 15 bp, Homo sapiens
aataatggtacctca

SEQ ID NO: 984361 - DNA, 15 bp, Homo sapiens
aaataatggtacctc

SEQ ID NO: 984362 - DNA, 15 bp, Homo sapiens
gaaataatggtacct

SEQ ID NO: 984363 - DNA, 15 bp, Homo sapiens
ggaaataatggtacc

SEQ ID NO: 984364 - DNA, 15 bp, Homo sapiens
aggaaataatggtac

SEQ ID NO: 984365 - DNA, 15 bp, Homo sapiens
aaggaaataatggta

SEQ ID NO: 984366 - DNA, 15 bp, Homo sapiens
aaaggaaataatggt

SEQ ID NO: 984367 - DNA, 15 bp, Homo sapiens
caaaggaaataatgg

SEQ ID NO: 984368 - DNA, 15 bp, Homo sapiens
gcaaaggaaataatg

SEQ ID NO: 984369 - DNA, 15 bp, Homo sapiens
agcaaaggaaataat

SEQ ID NO: 984370 - DNA, 15 bp, Homo sapiens
gagcaaaggaaataa

SEQ ID NO: 984371 - DNA, 15 bp, Homo sapiens
tgagcaaaggaaata

SEQ ID NO: 984372 - DNA, 15 bp, Homo sapiens
gtgagcaaaggaaat

SEQ ID NO: 984373 - DNA, 15 bp, Homo sapiens
agtgagcaaaggaaa

SEQ ID NO: 984374 - DNA, 15 bp, Homo sapiens
tagtgagcaaaggaa

SEQ ID NO: 984375 - DNA, 15 bp, Homo sapiens
ttagtgagcaaagga

SEQ ID NO: 984376 - DNA, 15 bp, Homo sapiens
tttagtgagcaaagg

SEQ ID NO: 984377 - DNA, 15 bp, Homo sapiens
gtttagtgagcaaag

SEQ ID NO: 984378 - DNA, 15 bp, Homo sapiens
agtttagtgagcaaa

SEQ ID NO: 984379 - DNA, 15 bp, Homo sapiens
cagtttagtgagcaa

SEQ ID NO: 984380 - DNA, 15 bp, Homo sapiens
tcagtttagtgagca

SEQ ID NO: 984381 - DNA, 15 bp, Homo sapiens
gtcagtttagtgagc

SEQ ID NO: 984382 - DNA, 15 bp, Homo sapiens
tgtcagtttagtgag

SEQ ID NO: 984383 - DNA, 15 bp, Homo sapiens
ttgtcagtttagtga

SEQ ID NO: 984384 - DNA, 15 bp, Homo sapiens
gttgtcagtttagtg

SEQ ID NO: 984385 - DNA, 15 bp, Homo sapiens
tgttgtcagtttagt

SEQ ID NO: 984386 - DNA, 15 bp, Homo sapiens
gtgttgtcagtttag

SEQ ID NO: 984387 - DNA, 15 bp, Homo sapiens
tgtgttgtcagttta

SEQ ID NO: 984388 - DNA, 15 bp, Homo sapiens
gtgtgttgtcagttt

SEQ ID NO: 984389 - DNA, 15 bp, Homo sapiens
tgtgtgttgtcagtt

SEQ ID NO: 984390 - DNA, 15 bp, Homo sapiens
ttgtgtgttgtcagt

SEQ ID NO: 984391 - DNA, 15 bp, Homo sapiens
tttgtgtgttgtcag

SEQ ID NO: 984392 - DNA, 15 bp, Homo sapiens
atttgtgtgttgtca

SEQ ID NO: 984393 - DNA, 15 bp, Homo sapiens
catttgtgtgttgtc

SEQ ID NO: 984394 - DNA, 15 bp, Homo sapiens
acatttgtgtgttgt

SEQ ID NO: 984395 - DNA, 15 bp, Homo sapiens
aacatttgtgtgttg

SEQ ID NO: 984396 - DNA, 15 bp, Homo sapiens
aaacatttgtgtgtt

SEQ ID NO: 984397 - DNA, 15 bp, Homo sapiens
aaaacatttgtgtgt

SEQ ID NO: 984398 - DNA, 15 bp, Homo sapiens
aaaaacatttgtgtg

SEQ ID NO: 984399 - DNA, 15 bp, Homo sapiens
aaaaaacatttgtgt

SEQ ID NO: 984400 - DNA, 15 bp, Homo sapiens
taaaaaacatttgtg

SEQ ID NO: 984401 - DNA, 15 bp, Homo sapiens
ataaaaaacatttgt

SEQ ID NO: 984402 - DNA, 15 bp, Homo sapiens
tataaaaaacatttg

SEQ ID NO: 984403 - DNA, 15 bp, Homo sapiens
ttataaaaaacattt

SEQ ID NO: 984404 - DNA, 15 bp, Homo sapiens
attataaaaaacatt

SEQ ID NO: 984405 - DNA, 15 bp, Homo sapiens
tattataaaaaacat

SEQ ID NO: 984406 - DNA, 15 bp, Homo sapiens
gtattataaaaaaca

SEQ ID NO: 984407 - DNA, 15 bp, Homo sapiens
ggtattataaaaaac

SEQ ID NO: 984408 - DNA, 15 bp, Homo sapiens
gggtattataaaaaa

SEQ ID NO: 984409 - DNA, 15 bp, Homo sapiens
tgggtattataaaaa

SEQ ID NO: 984410 - DNA, 15 bp, Homo sapiens
ttgggtattataaaa

SEQ ID NO: 984411 - DNA, 15 bp, Homo sapiens
tttgggtattataaa

SEQ ID NO: 984412 - DNA, 15 bp, Homo sapiens
ctttgggtattataa

SEQ ID NO: 984413 - DNA, 15 bp, Homo sapiens
gctttgggtattata

SEQ ID NO: 984414 - DNA, 15 bp, Homo sapiens
agctttgggtattat

SEQ ID NO: 984415 - DNA, 15 bp, Homo sapiens
cagctttgggtatta

SEQ ID NO: 984416 - DNA, 15 bp, Homo sapiens
tcagctttgggtatt

SEQ ID NO: 984417 - DNA, 15 bp, Homo sapiens
atcagctttgggtat

SEQ ID NO: 984418 - DNA, 15 bp, Homo sapiens
catcagctttgggta

SEQ ID NO: 984419 - DNA, 15 bp, Homo sapiens
tcatcagctttgggt

SEQ ID NO: 984420 - DNA, 15 bp, Homo sapiens
ctcatcagctttggg

SEQ ID NO: 984421 - DNA, 15 bp, Homo sapiens
cctcatcagctttgg

SEQ ID NO: 984422 - DNA, 15 bp, Homo sapiens
ccctcatcagctttg

SEQ ID NO: 984423 - DNA, 15 bp, Homo sapiens
accctcatcagcttt

SEQ ID NO: 984424 - DNA, 15 bp, Homo sapiens
taccctcatcagctt

SEQ ID NO: 984425 - DNA, 15 bp, Homo sapiens
ctaccctcatcagct

SEQ ID NO: 984426 - DNA, 15 bp, Homo sapiens
actaccctcatcagc

SEQ ID NO: 984427 - DNA, 15 bp, Homo sapiens
aactaccctcatcag

SEQ ID NO: 984428 - DNA, 15 bp, Homo sapiens
taactaccctcatca

SEQ ID NO: 984429 - DNA, 15 bp, Homo sapiens
ttaactaccctcatc

SEQ ID NO: 984430 - DNA, 15 bp, Homo sapiens
cttaactaccctcat

SEQ ID NO: 984431 - DNA, 15 bp, Homo sapiens
ccttaactaccctca

SEQ ID NO: 984432 - DNA, 15 bp, Homo sapiens
accttaactaccctc

SEQ ID NO: 984433 - DNA, 15 bp, Homo sapiens
taccttaactaccct

SEQ ID NO: 984434 - DNA, 15 bp, Homo sapiens
ataccttaactaccc

SEQ ID NO: 984435 - DNA, 15 bp, Homo sapiens
cataccttaactacc

SEQ ID NO: 984436 - DNA, 15 bp, Homo sapiens
gcataccttaactac

SEQ ID NO: 984437 - DNA, 15 bp, Homo sapiens
ggcataccttaacta

SEQ ID NO: 984438 - DNA, 15 bp, Homo sapiens
gggcataccttaact

SEQ ID NO: 984439 - DNA, 15 bp, Homo sapiens
agggcataccttaac

SEQ ID NO: 984440 - DNA, 15 bp, Homo sapiens
aagggcataccttaa

SEQ ID NO: 984441 - DNA, 15 bp, Homo sapiens
aaagggcatacctta

SEQ ID NO: 984442 - DNA, 15 bp, Homo sapiens
aaaagggcatacctt

SEQ ID NO: 984443 - DNA, 15 bp, Homo sapiens
taaaagggcatacct

SEQ ID NO: 984444 - DNA, 15 bp, Homo sapiens
ataaaagggcatacc

SEQ ID NO: 984445 - DNA, 15 bp, Homo sapiens
tataaaagggcatac

SEQ ID NO: 984446 - DNA, 15 bp, Homo sapiens
gtataaaagggcata

SEQ ID NO: 984447 - DNA, 15 bp, Homo sapiens
tgtataaaagggcat

SEQ ID NO: 984448 - DNA, 15 bp, Homo sapiens
gtgtataaaagggca

SEQ ID NO: 984449 - DNA, 15 bp, Homo sapiens
tgtgtataaaagggc

SEQ ID NO: 984450 - DNA, 15 bp, Homo sapiens
gtgtgtataaaaggg

SEQ ID NO: 984451 - DNA, 15 bp, Homo sapiens
tgtgtgtataaaagg

SEQ ID NO: 984452 - DNA, 15 bp, Homo sapiens
gtgtgtgtataaaag

SEQ ID NO: 984453 - DNA, 15 bp, Homo sapiens
agtgtgtgtataaaa

SEQ ID NO: 984454 - DNA, 15 bp, Homo sapiens
tagtgtgtgtataaa

SEQ ID NO: 984455 - DNA, 15 bp, Homo sapiens
ttagtgtgtgtataa

SEQ ID NO: 984456 - DNA, 15 bp, Homo sapiens
attagtgtgtgtata

SEQ ID NO: 984457 - DNA, 15 bp, Homo sapiens
cattagtgtgtgtat

SEQ ID NO: 984458 - DNA, 15 bp, Homo sapiens
tcattagtgtgtgta

SEQ ID NO: 984459 - DNA, 15 bp, Homo sapiens
atcattagtgtgtgt

SEQ ID NO: 984460 - DNA, 15 bp, Homo sapiens
catcattagtgtgtg

SEQ ID NO: 984461 - DNA, 15 bp, Homo sapiens
acatcattagtgtgt

SEQ ID NO: 984462 - DNA, 15 bp, Homo sapiens
tacatcattagtgtg

SEQ ID NO: 984463 - DNA, 15 bp, Homo sapiens
gtacatcattagtgt

SEQ ID NO: 984464 - DNA, 15 bp, Homo sapiens
agtacatcattagtg

SEQ ID NO: 984465 - DNA, 15 bp, Homo sapiens
tagtacatcattagt

SEQ ID NO: 984466 - DNA, 15 bp, Homo sapiens
gtagtacatcattag

SEQ ID NO: 984467 - DNA, 15 bp, Homo sapiens
agtagtacatcatta

SEQ ID NO: 984468 - DNA, 15 bp, Homo sapiens
cagtagtacatcatt

SEQ ID NO: 984469 - DNA, 15 bp, Homo sapiens
ccagtagtacatcat

SEQ ID NO: 984470 - DNA, 15 bp, Homo sapiens
accagtagtacatca

SEQ ID NO: 984471 - DNA, 15 bp, Homo sapiens
aaccagtagtacatc

SEQ ID NO: 984472 - DNA, 15 bp, Homo sapiens
caaccagtagtacat

SEQ ID NO: 984473 - DNA, 15 bp, Homo sapiens
ccaaccagtagtaca

SEQ ID NO: 984474 - DNA, 15 bp, Homo sapiens
gccaaccagtagtac

SEQ ID NO: 984475 - DNA, 15 bp, Homo sapiens
tgccaaccagtagta

SEQ ID NO: 984476 - DNA, 15 bp, Homo sapiens
ctgccaaccagtagt

SEQ ID NO: 984477 - DNA, 15 bp, Homo sapiens
actgccaaccagtag

SEQ ID NO: 984478 - DNA, 15 bp, Homo sapiens
tactgccaaccagta

SEQ ID NO: 984479 - DNA, 15 bp, Homo sapiens
atactgccaaccagt

SEQ ID NO: 984480 - DNA, 15 bp, Homo sapiens
tatactgccaaccag

SEQ ID NO: 984481 - DNA, 15 bp, Homo sapiens
ttatactgccaacca

SEQ ID NO: 984482 - DNA, 15 bp, Homo sapiens
gttatactgccaacc

SEQ ID NO: 984483 - DNA, 15 bp, Homo sapiens
tgttatactgccaac

SEQ ID NO: 984484 - DNA, 15 bp, Homo sapiens
atgttatactgccaa

SEQ ID NO: 984485 - DNA, 15 bp, Homo sapiens
tatgttatactgcca

SEQ ID NO: 984486 - DNA, 15 bp, Homo sapiens
atatgttatactgcc

SEQ ID NO: 984487 - DNA, 15 bp, Homo sapiens
catatgttatactgc

SEQ ID NO: 984488 - DNA, 15 bp, Homo sapiens
gcatatgttatactg

SEQ ID NO: 984489 - DNA, 15 bp, Homo sapiens
agcatatgttatact

SEQ ID NO: 984490 - DNA, 15 bp, Homo sapiens
cagcatatgttatac

SEQ ID NO: 984491 - DNA, 15 bp, Homo sapiens
gcagcatatgttata

SEQ ID NO: 984492 - DNA, 15 bp, Homo sapiens
ggcagcatatgttat

SEQ ID NO: 984493 - DNA, 15 bp, Homo sapiens
tggcagcatatgtta

SEQ ID NO: 984494 - DNA, 15 bp, Homo sapiens
atggcagcatatgtt

SEQ ID NO: 984495 - DNA, 15 bp, Homo sapiens
catggcagcatatgt

SEQ ID NO: 984496 - DNA, 15 bp, Homo sapiens
acatggcagcatatg

SEQ ID NO: 984497 - DNA, 15 bp, Homo sapiens
cacatggcagcatat

SEQ ID NO: 984498 - DNA, 15 bp, Homo sapiens
ccacatggcagcata

SEQ ID NO: 984499 - DNA, 15 bp, Homo sapiens
cccacatggcagcat

SEQ ID NO: 984500 - DNA, 15 bp, Homo sapiens
ccccacatggcagca

SEQ ID NO: 984501 - DNA, 15 bp, Homo sapiens
tccccacatggcagc

SEQ ID NO: 984502 - DNA, 15 bp, Homo sapiens
atccccacatggcag

SEQ ID NO: 984503 - DNA, 15 bp, Homo sapiens
tatccccacatggca

SEQ ID NO: 984504 - DNA, 15 bp, Homo sapiens
atatccccacatggc

SEQ ID NO: 984505 - DNA, 15 bp, Homo sapiens
catatccccacatgg

SEQ ID NO: 984506 - DNA, 15 bp, Homo sapiens
acatatccccacatg

SEQ ID NO: 984507 - DNA, 15 bp, Homo sapiens
tacatatccccacat

SEQ ID NO: 984508 - DNA, 15 bp, Homo sapiens
atacatatccccaca

SEQ ID NO: 984509 - DNA, 15 bp, Homo sapiens
gatacatatccccac

SEQ ID NO: 984510 - DNA, 15 bp, Homo sapiens
tgatacatatcccca

SEQ ID NO: 984511 - DNA, 15 bp, Homo sapiens
ctgatacatatcccc

SEQ ID NO: 984512 - DNA, 15 bp, Homo sapiens
cctgatacatatccc

SEQ ID NO: 984513 - DNA, 15 bp, Homo sapiens
tcctgatacatatcc

SEQ ID NO: 984514 - DNA, 15 bp, Homo sapiens
ctcctgatacatatc

SEQ ID NO: 984515 - DNA, 15 bp, Homo sapiens
tctcctgatacatat

SEQ ID NO: 984516 - DNA, 15 bp, Homo sapiens
gtctcctgatacata

SEQ ID NO: 984517 - DNA, 15 bp, Homo sapiens
agtctcctgatacat

SEQ ID NO: 984518 - DNA, 15 bp, Homo sapiens
aagtctcctgataca

SEQ ID NO: 984519 - DNA, 15 bp, Homo sapiens
taagtctcctgatac

SEQ ID NO: 984520 - DNA, 15 bp, Homo sapiens
ttaagtctcctgata

SEQ ID NO: 984521 - DNA, 15 bp, Homo sapiens
tttaagtctcctgat

SEQ ID NO: 984522 - DNA, 15 bp, Homo sapiens
ttttaagtctcctga

SEQ ID NO: 984523 - DNA, 15 bp, Homo sapiens
tttttaagtctcctg

SEQ ID NO: 984524 - DNA, 15 bp, Homo sapiens
atttttaagtctcct

SEQ ID NO: 984525 - DNA, 15 bp, Homo sapiens
catttttaagtctcc

SEQ ID NO: 984526 - DNA, 15 bp, Homo sapiens
acatttttaagtctc

SEQ ID NO: 984527 - DNA, 15 bp, Homo sapiens
cacatttttaagtct

SEQ ID NO: 984528 - DNA, 15 bp, Homo sapiens
gcacatttttaagtc

SEQ ID NO: 984529 - DNA, 15 bp, Homo sapiens
tgcacatttttaagt

SEQ ID NO: 984530 - DNA, 15 bp, Homo sapiens
atgcacatttttaag

SEQ ID NO: 984531 - DNA, 15 bp, Homo sapiens
tatgcacatttttaa

SEQ ID NO: 984532 - DNA, 15 bp, Homo sapiens
gtatgcacattttta

SEQ ID NO: 984533 - DNA, 15 bp, Homo sapiens
ggtatgcacattttt

SEQ ID NO: 984534 - DNA, 15 bp, Homo sapiens
aggtatgcacatttt

SEQ ID NO: 984535 - DNA, 15 bp, Homo sapiens
aaggtatgcacattt

SEQ ID NO: 984536 - DNA, 15 bp, Homo sapiens
aaaggtatgcacatt

SEQ ID NO: 984537 - DNA, 15 bp, Homo sapiens
aaaaggtatgcacat

SEQ ID NO: 984538 - DNA, 15 bp, Homo sapiens
caaaaggtatgcaca

SEQ ID NO: 984539 - DNA, 15 bp, Homo sapiens
ccaaaaggtatgcac

SEQ ID NO: 984540 - DNA, 15 bp, Homo sapiens
accaaaaggtatgca

SEQ ID NO: 984541 - DNA, 15 bp, Homo sapiens
gaccaaaaggtatgc

SEQ ID NO: 984542 - DNA, 15 bp, Homo sapiens
ggaccaaaaggtatg

SEQ ID NO: 984543 - DNA, 15 bp, Homo sapiens
tggaccaaaaggtat

SEQ ID NO: 984544 - DNA, 15 bp, Homo sapiens
ctggaccaaaaggta

SEQ ID NO: 984545 - DNA, 15 bp, Homo sapiens
actggaccaaaaggt

SEQ ID NO: 984546 - DNA, 15 bp, Homo sapiens
tactggaccaaaagg

SEQ ID NO: 984547 - DNA, 15 bp, Homo sapiens
ttactggaccaaaag

SEQ ID NO: 984548 - DNA, 15 bp, Homo sapiens
attactggaccaaaa

SEQ ID NO: 984549 - DNA, 15 bp, Homo sapiens
aattactggaccaaa

SEQ ID NO: 984550 - DNA, 15 bp, Homo sapiens
aaattactggaccaa

SEQ ID NO: 984551 - DNA, 15 bp, Homo sapiens
taaattactggacca

SEQ ID NO: 984552 - DNA, 15 bp, Homo sapiens
gtaaattactggacc

SEQ ID NO: 984553 - DNA, 15 bp, Homo sapiens
agtaaattactggac

SEQ ID NO: 984554 - DNA, 15 bp, Homo sapiens
aagtaaattactgga

SEQ ID NO: 984555 - DNA, 15 bp, Homo sapiens
gaagtaaattactgg

SEQ ID NO: 984556 - DNA, 15 bp, Homo sapiens
agaagtaaattactg

SEQ ID NO: 984557 - DNA, 15 bp, Homo sapiens
cagaagtaaattact

SEQ ID NO: 984558 - DNA, 15 bp, Homo sapiens
ccagaagtaaattac

SEQ ID NO: 984559 - DNA, 15 bp, Homo sapiens
cccagaagtaaatta

SEQ ID NO: 984560 - DNA, 15 bp, Homo sapiens
tcccagaagtaaatt

SEQ ID NO: 984561 - DNA, 15 bp, Homo sapiens
ttcccagaagtaaat

SEQ ID NO: 984562 - DNA, 15 bp, Homo sapiens
attcccagaagtaaa

SEQ ID NO: 984563 - DNA, 15 bp, Homo sapiens
gattcccagaagtaa

SEQ ID NO: 984564 - DNA, 15 bp, Homo sapiens
agattcccagaagta

SEQ ID NO: 984565 - DNA, 15 bp, Homo sapiens
cagattcccagaagt

SEQ ID NO: 984566 - DNA, 15 bp, Homo sapiens
acagattcccagaag

SEQ ID NO: 984567 - DNA, 15 bp, Homo sapiens
gacagattcccagaa

SEQ ID NO: 984568 - DNA, 15 bp, Homo sapiens
tgacagattcccaga

SEQ ID NO: 984569 - DNA, 15 bp, Homo sapiens
atgacagattcccag

SEQ ID NO: 984570 - DNA, 15 bp, Homo sapiens
tatgacagattccca

SEQ ID NO: 984571 - DNA, 15 bp, Homo sapiens
ttatgacagattccc

SEQ ID NO: 984572 - DNA, 15 bp, Homo sapiens
gttatgacagattcc

SEQ ID NO: 984573 - DNA, 15 bp, Homo sapiens
tgttatgacagattc

SEQ ID NO: 984574 - DNA, 15 bp, Homo sapiens
ctgttatgacagatt

SEQ ID NO: 984575 - DNA, 15 bp, Homo sapiens
tctgttatgacagat

SEQ ID NO: 984576 - DNA, 15 bp, Homo sapiens
ttctgttatgacaga

SEQ ID NO: 984577 - DNA, 15 bp, Homo sapiens
attctgttatgacag

SEQ ID NO: 984578 - DNA, 15 bp, Homo sapiens
tattctgttatgaca

SEQ ID NO: 984579 - DNA, 15 bp, Homo sapiens
ttattctgttatgac

SEQ ID NO: 984580 - DNA, 15 bp, Homo sapiens
attattctgttatga

SEQ ID NO: 984581 - DNA, 15 bp, Homo sapiens
tattattctgttatg

SEQ ID NO: 984582 - DNA, 15 bp, Homo sapiens
ttattattctgttat

SEQ ID NO: 984583 - DNA, 15 bp, Homo sapiens
attattattctgtta

SEQ ID NO: 984584 - DNA, 15 bp, Homo sapiens
gattattattctgtt

SEQ ID NO: 984585 - DNA, 15 bp, Homo sapiens
agattattattctgt

SEQ ID NO: 984586 - DNA, 15 bp, Homo sapiens
aagattattattctg

SEQ ID NO: 984587 - DNA, 15 bp, Homo sapiens
caagattattattct

SEQ ID NO: 984588 - DNA, 15 bp, Homo sapiens
ccaagattattattc

SEQ ID NO: 984589 - DNA, 15 bp, Homo sapiens
cccaagattattatt

SEQ ID NO: 984590 - DNA, 15 bp, Homo sapiens
ccccaagattattat

SEQ ID NO: 984591 - DNA, 15 bp, Homo sapiens
tccccaagattatta

SEQ ID NO: 984592 - DNA, 15 bp, Homo sapiens
ttccccaagattatt

SEQ ID NO: 984593 - DNA, 15 bp, Homo sapiens
tttccccaagattat

SEQ ID NO: 984594 - DNA, 15 bp, Homo sapiens
ctttccccaagatta

SEQ ID NO: 984595 - DNA, 15 bp, Homo sapiens
gctttccccaagatt

SEQ ID NO: 984596 - DNA, 15 bp, Homo sapiens
agctttccccaagat

SEQ ID NO: 984597 - DNA, 15 bp, Homo sapiens
tagctttccccaaga

SEQ ID NO: 984598 - DNA, 15 bp, Homo sapiens
gtagctttccccaag

SEQ ID NO: 984599 - DNA, 15 bp, Homo sapiens
tgtagctttccccaa

SEQ ID NO: 984600 - DNA, 15 bp, Homo sapiens
atgtagctttcccca

SEQ ID NO: 984601 - DNA, 15 bp, Homo sapiens
catgtagctttcccc

SEQ ID NO: 984602 - DNA, 15 bp, Homo sapiens
gcatgtagctttccc

SEQ ID NO: 984603 - DNA, 15 bp, Homo sapiens
ggcatgtagctttcc

SEQ ID NO: 984604 - DNA, 15 bp, Homo sapiens
aggcatgtagctttc

SEQ ID NO: 984605 - DNA, 15 bp, Homo sapiens
taggcatgtagcttt

SEQ ID NO: 984606 - DNA, 15 bp, Homo sapiens
ttaggcatgtagctt

SEQ ID NO: 984607 - DNA, 15 bp, Homo sapiens
cttaggcatgtagct

SEQ ID NO: 984608 - DNA, 15 bp, Homo sapiens
ccttaggcatgtagc

SEQ ID NO: 984609 - DNA, 15 bp, Homo sapiens
tccttaggcatgtag

SEQ ID NO: 984610 - DNA, 15 bp, Homo sapiens
atccttaggcatgta

SEQ ID NO: 984611 - DNA, 15 bp, Homo sapiens
tatccttaggcatgt

SEQ ID NO: 984612 - DNA, 15 bp, Homo sapiens
atatccttaggcatg

SEQ ID NO: 984613 - DNA, 15 bp, Homo sapiens
aatatccttaggcat

SEQ ID NO: 984614 - DNA, 15 bp, Homo sapiens
aaatatccttaggca

SEQ ID NO: 984615 - DNA, 15 bp, Homo sapiens
taaatatccttaggc

SEQ ID NO: 984616 - DNA, 15 bp, Homo sapiens
ttaaatatccttagg

SEQ ID NO: 984617 - DNA, 15 bp, Homo sapiens
tttaaatatccttag

SEQ ID NO: 984618 - DNA, 15 bp, Homo sapiens
ttttaaatatcctta

SEQ ID NO: 984619 - DNA, 15 bp, Homo sapiens
attttaaatatcctt

SEQ ID NO: 984620 - DNA, 15 bp, Homo sapiens
tattttaaatatcct

SEQ ID NO: 984621 - DNA, 15 bp, Homo sapiens
atattttaaatatcc

SEQ ID NO: 984622 - DNA, 15 bp, Homo sapiens
aatattttaaatatc

SEQ ID NO: 984623 - DNA, 15 bp, Homo sapiens
taatattttaaatat

SEQ ID NO: 984624 - DNA, 15 bp, Homo sapiens
ataatattttaaata

SEQ ID NO: 984625 - DNA, 15 bp, Homo sapiens
aataatattttaaat

SEQ ID NO: 984626 - DNA, 15 bp, Homo sapiens
aaataatattttaaa

SEQ ID NO: 984627 - DNA, 15 bp, Homo sapiens
taaataatattttaa

SEQ ID NO: 984628 - DNA, 15 bp, Homo sapiens
ttaaataatatttta

SEQ ID NO: 984629 - DNA, 15 bp, Homo sapiens
tttaaataatatttt

SEQ ID NO: 984630 - DNA, 15 bp, Homo sapiens
ttttaaataatattt

SEQ ID NO: 984631 - DNA, 15 bp, Homo sapiens
tttttaaataatatt

SEQ ID NO: 984632 - DNA, 15 bp, Homo sapiens
atttttaaataatat

SEQ ID NO: 984633 - DNA, 15 bp, Homo sapiens
gatttttaaataata

SEQ ID NO: 984634 - DNA, 15 bp, Homo sapiens
tgatttttaaataat

SEQ ID NO: 984635 - DNA, 15 bp, Homo sapiens
ttgatttttaaataa

SEQ ID NO: 984636 - DNA, 15 bp, Homo sapiens
tttgatttttaaata

SEQ ID NO: 984637 - DNA, 15 bp, Homo sapiens
ctttgatttttaaat

SEQ ID NO: 984638 - DNA, 15 bp, Homo sapiens
actttgatttttaaa

SEQ ID NO: 984639 - DNA, 15 bp, Homo sapiens
tactttgatttttaa

SEQ ID NO: 984640 - DNA, 15 bp, Homo sapiens
atactttgattttta

SEQ ID NO: 984641 - DNA, 15 bp, Homo sapiens
tatactttgattttt

SEQ ID NO: 984642 - DNA, 15 bp, Homo sapiens
ttatactttgatttt

SEQ ID NO: 984643 - DNA, 15 bp, Homo sapiens
attatactttgattt

SEQ ID NO: 984644 - DNA, 15 bp, Homo sapiens
aattatactttgatt

SEQ ID NO: 984645 - DNA, 15 bp, Homo sapiens
aaattatactttgat

SEQ ID NO: 984646 - DNA, 15 bp, Homo sapiens
gaaattatactttga

SEQ ID NO: 984647 - DNA, 15 bp, Homo sapiens
agaaattatactttg

SEQ ID NO: 984648 - DNA, 15 bp, Homo sapiens
aagaaattatacttt

SEQ ID NO: 984649 - DNA, 15 bp, Homo sapiens
taagaaattatactt

SEQ ID NO: 984650 - DNA, 15 bp, Homo sapiens
gtaagaaattatact

SEQ ID NO: 984651 - DNA, 15 bp, Homo sapiens
tgtaagaaattatac

SEQ ID NO: 984652 - DNA, 15 bp, Homo sapiens
ctgtaagaaattata

SEQ ID NO: 984653 - DNA, 15 bp, Homo sapiens
tctgtaagaaattat

SEQ ID NO: 984654 - DNA, 15 bp, Homo sapiens
ttctgtaagaaatta

SEQ ID NO: 984655 - DNA, 15 bp, Homo sapiens
attctgtaagaaatt

SEQ ID NO: 984656 - DNA, 15 bp, Homo sapiens
tattctgtaagaaat

SEQ ID NO: 984657 - DNA, 15 bp, Homo sapiens
atattctgtaagaaa

SEQ ID NO: 984658 - DNA, 15 bp, Homo sapiens
tatattctgtaagaa

SEQ ID NO: 984659 - DNA, 15 bp, Homo sapiens
ttatattctgtaaga

SEQ ID NO: 984660 - DNA, 15 bp, Homo sapiens
tttatattctgtaag

SEQ ID NO: 984661 - DNA, 15 bp, Homo sapiens
ttttatattctgtaa

SEQ ID NO: 984662 - DNA, 15 bp, Homo sapiens
attttatattctgta

SEQ ID NO: 984663 - DNA, 15 bp, Homo sapiens
tattttatattctgt

SEQ ID NO: 984664 - DNA, 15 bp, Homo sapiens
ttattttatattctg

SEQ ID NO: 984665 - DNA, 15 bp, Homo sapiens
attattttatattct

SEQ ID NO: 984666 - DNA, 15 bp, Homo sapiens
tattattttatattc

SEQ ID NO: 984667 - DNA, 15 bp, Homo sapiens
atattattttatatt

SEQ ID NO: 984668 - DNA, 15 bp, Homo sapiens
aatattattttatat

SEQ ID NO: 984669 - DNA, 15 bp, Homo sapiens
aaatattattttata

SEQ ID NO: 984670 - DNA, 15 bp, Homo sapiens
aaaatattattttat

SEQ ID NO: 984671 - DNA, 15 bp, Homo sapiens
taaaatattatttta

SEQ ID NO: 984672 - DNA, 15 bp, Homo sapiens
ttaaaatattatttt

SEQ ID NO: 984673 - DNA, 15 bp, Homo sapiens
tttaaaatattattt

SEQ ID NO: 984674 - DNA, 15 bp, Homo sapiens
ttttaaaatattatt

SEQ ID NO: 984675 - DNA, 15 bp, Homo sapiens
attttaaaatattat

SEQ ID NO: 984676 - DNA, 15 bp, Homo sapiens
cattttaaaatatta

SEQ ID NO: 984677 - DNA, 15 bp, Homo sapiens
tcattttaaaatatt

SEQ ID NO: 984678 - DNA, 15 bp, Homo sapiens
ttcattttaaaatat

SEQ ID NO: 984679 - DNA, 15 bp, Homo sapiens
tttcattttaaaata

SEQ ID NO: 984680 - DNA, 15 bp, Homo sapiens
ttttcattttaaaat

SEQ ID NO: 984681 - DNA, 15 bp, Homo sapiens
attttcattttaaaa

SEQ ID NO: 984682 - DNA, 15 bp, Homo sapiens
tattttcattttaaa

SEQ ID NO: 984683 - DNA, 15 bp, Homo sapiens
atattttcattttaa

SEQ ID NO: 984684 - DNA, 15 bp, Homo sapiens
catattttcatttta

SEQ ID NO: 984685 - DNA, 15 bp, Homo sapiens
gcatattttcatttt

SEQ ID NO: 984686 - DNA, 15 bp, Homo sapiens
agcatattttcattt

SEQ ID NO: 984687 - DNA, 15 bp, Homo sapiens
tagcatattttcatt

SEQ ID NO: 984688 - DNA, 15 bp, Homo sapiens
ttagcatattttcat

SEQ ID NO: 984689 - DNA, 15 bp, Homo sapiens
tttagcatattttca

SEQ ID NO: 984690 - DNA, 15 bp, Homo sapiens
ttttagcatattttc

SEQ ID NO: 984691 - DNA, 15 bp, Homo sapiens
cttttagcatatttt

SEQ ID NO: 984692 - DNA, 15 bp, Homo sapiens
acttttagcatattt

SEQ ID NO: 984693 - DNA, 15 bp, Homo sapiens
aacttttagcatatt

SEQ ID NO: 984694 - DNA, 15 bp, Homo sapiens
aaacttttagcatat

SEQ ID NO: 984695 - DNA, 15 bp, Homo sapiens
caaacttttagcata

SEQ ID NO: 984696 - DNA, 15 bp, Homo sapiens
tcaaacttttagcat

SEQ ID NO: 984697 - DNA, 15 bp, Homo sapiens
atcaaacttttagca

SEQ ID NO: 984698 - DNA, 15 bp, Homo sapiens
catcaaacttttagc

SEQ ID NO: 984699 - DNA, 15 bp, Homo sapiens
tcatcaaacttttag

SEQ ID NO: 984700 - DNA, 15 bp, Homo sapiens
ttcatcaaactttta

SEQ ID NO: 984701 - DNA, 15 bp, Homo sapiens
tttcatcaaactttt

SEQ ID NO: 984702 - DNA, 15 bp, Homo sapiens
atttcatcaaacttt

SEQ ID NO: 984703 - DNA, 15 bp, Homo sapiens
tatttcatcaaactt

SEQ ID NO: 984704 - DNA, 15 bp, Homo sapiens
atatttcatcaaact

SEQ ID NO: 984705 - DNA, 15 bp, Homo sapiens
tatatttcatcaaac

SEQ ID NO: 984706 - DNA, 15 bp, Homo sapiens
ttatatttcatcaaa

SEQ ID NO: 984707 - DNA, 15 bp, Homo sapiens
tttatatttcatcaa

SEQ ID NO: 984708 - DNA, 15 bp, Homo sapiens
atttatatttcatca

SEQ ID NO: 984709 - DNA, 15 bp, Homo sapiens
catttatatttcatc

SEQ ID NO: 984710 - DNA, 15 bp, Homo sapiens
ccatttatatttcat

SEQ ID NO: 984711 - DNA, 15 bp, Homo sapiens
accatttatatttca

SEQ ID NO: 984712 - DNA, 15 bp, Homo sapiens
gaccatttatatttc

SEQ ID NO: 984713 - DNA, 15 bp, Homo sapiens
tgaccatttatattt

SEQ ID NO: 984714 - DNA, 15 bp, Homo sapiens
ttgaccatttatatt

SEQ ID NO: 984715 - DNA, 15 bp, Homo sapiens
tttgaccatttatat

SEQ ID NO: 984716 - DNA, 15 bp, Homo sapiens
atttgaccatttata

SEQ ID NO: 984717 - DNA, 15 bp, Homo sapiens
tatttgaccatttat

SEQ ID NO: 984718 - DNA, 15 bp, Homo sapiens
atatttgaccattta

SEQ ID NO: 984719 - DNA, 15 bp, Homo sapiens
tatatttgaccattt

SEQ ID NO: 984720 - DNA, 15 bp, Homo sapiens
atatatttgaccatt

SEQ ID NO: 984721 - DNA, 15 bp, Homo sapiens
tatatatttgaccat

SEQ ID NO: 984722 - DNA, 15 bp, Homo sapiens
atatatatttgacca

SEQ ID NO: 984723 - DNA, 15 bp, Homo sapiens
aatatatatttgacc

SEQ ID NO: 984724 - DNA, 15 bp, Homo sapiens
caatatatatttgac

SEQ ID NO: 984725 - DNA, 15 bp, Homo sapiens
tcaatatatatttga

SEQ ID NO: 984726 - DNA, 15 bp, Homo sapiens
atcaatatatatttg

SEQ ID NO: 984727 - DNA, 15 bp, Homo sapiens
aatcaatatatattt

SEQ ID NO: 984728 - DNA, 15 bp, Homo sapiens
taatcaatatatatt

SEQ ID NO: 984729 - DNA, 15 bp, Homo sapiens
ataatcaatatatat

SEQ ID NO: 984730 - DNA, 15 bp, Homo sapiens
tataatcaatatata

SEQ ID NO: 984731 - DNA, 15 bp, Homo sapiens
atataatcaatatat

SEQ ID NO: 984732 - DNA, 15 bp, Homo sapiens
gatataatcaatata

SEQ ID NO: 984733 - DNA, 15 bp, Homo sapiens
ggatataatcaatat

SEQ ID NO: 984734 - DNA, 15 bp, Homo sapiens
tggatataatcaata

SEQ ID NO: 984735 - DNA, 15 bp, Homo sapiens
gtggatataatcaat

SEQ ID NO: 984736 - DNA, 15 bp, Homo sapiens
agtggatataatcaa

SEQ ID NO: 984737 - DNA, 15 bp, Homo sapiens
aagtggatataatca

SEQ ID NO: 984738 - DNA, 15 bp, Homo sapiens
taagtggatataatc

SEQ ID NO: 984739 - DNA, 15 bp, Homo sapiens
gtaagtggatataat

SEQ ID NO: 984740 - DNA, 15 bp, Homo sapiens
agtaagtggatataa

SEQ ID NO: 984741 - DNA, 15 bp, Homo sapiens
tagtaagtggatata

SEQ ID NO: 984742 - DNA, 15 bp, Homo sapiens
ctagtaagtggatat

SEQ ID NO: 984743 - DNA, 15 bp, Homo sapiens
tctagtaagtggata

SEQ ID NO: 984744 - DNA, 15 bp, Homo sapiens
gtctagtaagtggat

SEQ ID NO: 984745 - DNA, 15 bp, Homo sapiens
agtctagtaagtgga

SEQ ID NO: 984746 - DNA, 15 bp, Homo sapiens
tagtctagtaagtgg

SEQ ID NO: 984747 - DNA, 15 bp, Homo sapiens
ctagtctagtaagtg

SEQ ID NO: 984748 - DNA, 15 bp, Homo sapiens
gctagtctagtaagt

SEQ ID NO: 984749 - DNA, 15 bp, Homo sapiens
tgctagtctagtaag

SEQ ID NO: 984750 - DNA, 15 bp, Homo sapiens
gtgctagtctagtaa

SEQ ID NO: 984751 - DNA, 15 bp, Homo sapiens
agtgctagtctagta

SEQ ID NO: 984752 - DNA, 15 bp, Homo sapiens
gagtgctagtctagt

SEQ ID NO: 984753 - DNA, 15 bp, Homo sapiens
tgagtgctagtctag

SEQ ID NO: 984754 - DNA, 15 bp, Homo sapiens
gtgagtgctagtcta

SEQ ID NO: 984755 - DNA, 15 bp, Homo sapiens
agtgagtgctagtct

SEQ ID NO: 984756 - DNA, 15 bp, Homo sapiens
gagtgagtgctagtc

SEQ ID NO: 984757 - DNA, 15 bp, Homo sapiens
agagtgagtgctagt

SEQ ID NO: 984758 - DNA, 15 bp, Homo sapiens
cagagtgagtgctag

SEQ ID NO: 984759 - DNA, 15 bp, Homo sapiens
tcagagtgagtgcta

SEQ ID NO: 984760 - DNA, 15 bp, Homo sapiens
ctcagagtgagtgct

SEQ ID NO: 984761 - DNA, 15 bp, Homo sapiens
tctcagagtgagtgc

SEQ ID NO: 984762 - DNA, 15 bp, Homo sapiens
gtctcagagtgagtg

SEQ ID NO: 984763 - DNA, 15 bp, Homo sapiens
cgtctcagagtgagt

SEQ ID NO: 984764 - DNA, 15 bp, Homo sapiens
acgtctcagagtgag

SEQ ID NO: 984765 - DNA, 15 bp, Homo sapiens
aacgtctcagagtga

SEQ ID NO: 984766 - DNA, 15 bp, Homo sapiens
taacgtctcagagtg

SEQ ID NO: 984767 - DNA, 15 bp, Homo sapiens
ttaacgtctcagagt

SEQ ID NO: 984768 - DNA, 15 bp, Homo sapiens
tttaacgtctcagag

SEQ ID NO: 984769 - DNA, 15 bp, Homo sapiens
ttttaacgtctcaga

SEQ ID NO: 984770 - DNA, 15 bp, Homo sapiens
tttttaacgtctcag

SEQ ID NO: 984771 - DNA, 15 bp, Homo sapiens
atttttaacgtctca

SEQ ID NO: 984772 - DNA, 15 bp, Homo sapiens
tatttttaacgtctc

SEQ ID NO: 984773 - DNA, 15 bp, Homo sapiens
ctatttttaacgtct

SEQ ID NO: 984774 - DNA, 15 bp, Homo sapiens
actatttttaacgtc

SEQ ID NO: 984775 - DNA, 15 bp, Homo sapiens
gactatttttaacgt

SEQ ID NO: 984776 - DNA, 15 bp, Homo sapiens
tgactatttttaacg

SEQ ID NO: 984777 - DNA, 15 bp, Homo sapiens
atgactatttttaac

SEQ ID NO: 984778 - DNA, 15 bp, Homo sapiens
aatgactatttttaa

SEQ ID NO: 984779 - DNA, 15 bp, Homo sapiens
taatgactattttta

SEQ ID NO: 984780 - DNA, 15 bp, Homo sapiens
ataatgactattttt

SEQ ID NO: 984781 - DNA, 15 bp, Homo sapiens
tataatgactatttt

SEQ ID NO: 984782 - DNA, 15 bp, Homo sapiens
ttataatgactattt

SEQ ID NO: 984783 - DNA, 15 bp, Homo sapiens
tttataatgactatt

SEQ ID NO: 984784 - DNA, 15 bp, Homo sapiens
ttttataatgactat

SEQ ID NO: 984785 - DNA, 15 bp, Homo sapiens
tttttataatgacta

SEQ ID NO: 984786 - DNA, 15 bp, Homo sapiens
gtttttataatgact

SEQ ID NO: 984787 - DNA, 15 bp, Homo sapiens
agtttttataatgac

SEQ ID NO: 984788 - DNA, 15 bp, Homo sapiens
tagtttttataatga

SEQ ID NO: 984789 - DNA, 15 bp, Homo sapiens
ctagtttttataatg

SEQ ID NO: 984790 - DNA, 15 bp, Homo sapiens
tctagtttttataat

SEQ ID NO: 984791 - DNA, 15 bp, Homo sapiens
ttctagtttttataa

SEQ ID NO: 984792 - DNA, 15 bp, Homo sapiens
tttctagtttttata

SEQ ID NO: 984793 - DNA, 15 bp, Homo sapiens
ttttctagtttttat

SEQ ID NO: 984794 - DNA, 15 bp, Homo sapiens
attttctagttttta

SEQ ID NO: 984795 - DNA, 15 bp, Homo sapiens
cattttctagttttt

SEQ ID NO: 984796 - DNA, 15 bp, Homo sapiens
gcattttctagtttt

SEQ ID NO: 984797 - DNA, 15 bp, Homo sapiens
ggcattttctagttt

SEQ ID NO: 984798 - DNA, 15 bp, Homo sapiens
tggcattttctagtt

SEQ ID NO: 984799 - DNA, 15 bp, Homo sapiens
ttggcattttctagt

SEQ ID NO: 984800 - DNA, 15 bp, Homo sapiens
tttggcattttctag

SEQ ID NO: 984801 - DNA, 15 bp, Homo sapiens
ctttggcattttcta

SEQ ID NO: 984802 - DNA, 15 bp, Homo sapiens
tctttggcattttct

SEQ ID NO: 984803 - DNA, 15 bp, Homo sapiens
gtctttggcattttc

SEQ ID NO: 984804 - DNA, 15 bp, Homo sapiens
tgtctttggcatttt

SEQ ID NO: 984805 - DNA, 15 bp, Homo sapiens
ttgtctttggcattt

SEQ ID NO: 984806 - DNA, 15 bp, Homo sapiens
tttgtctttggcatt

SEQ ID NO: 984807 - DNA, 15 bp, Homo sapiens
ttttgtctttggcat

SEQ ID NO: 984808 - DNA, 15 bp, Homo sapiens
attttgtctttggca

SEQ ID NO: 984809 - DNA, 15 bp, Homo sapiens
tattttgtctttggc

SEQ ID NO: 984810 - DNA, 15 bp, Homo sapiens
ttattttgtctttgg

SEQ ID NO: 984811 - DNA, 15 bp, Homo sapiens
tttattttgtctttg

SEQ ID NO: 984812 - DNA, 15 bp, Homo sapiens
ctttattttgtcttt

SEQ ID NO: 984813 - DNA, 15 bp, Homo sapiens
cctttattttgtctt

SEQ ID NO: 984814 - DNA, 15 bp, Homo sapiens
tcctttattttgtct

SEQ ID NO: 984815 - DNA, 15 bp, Homo sapiens
ttcctttattttgtc

SEQ ID NO: 984816 - DNA, 15 bp, Homo sapiens
attcctttattttgt

SEQ ID NO: 984817 - DNA, 15 bp, Homo sapiens
tattcctttattttg

SEQ ID NO: 984818 - DNA, 15 bp, Homo sapiens
ttattcctttatttt

SEQ ID NO: 984819 - DNA, 15 bp, Homo sapiens
tttattcctttattt

SEQ ID NO: 984820 - DNA, 15 bp, Homo sapiens
ctttattcctttatt

SEQ ID NO: 984821 - DNA, 15 bp, Homo sapiens
actttattcctttat

SEQ ID NO: 984822 - DNA, 15 bp, Homo sapiens
aactttattccttta

SEQ ID NO: 984823 - DNA, 15 bp, Homo sapiens
aaactttattccttt

SEQ ID NO: 984824 - DNA, 15 bp, Homo sapiens
aaaactttattcctt

SEQ ID NO: 984825 - DNA, 15 bp, Homo sapiens
taaaactttattcct

SEQ ID NO: 984826 - DNA, 15 bp, Homo sapiens
gtaaaactttattcc

SEQ ID NO: 984827 - DNA, 15 bp, Homo sapiens
tgtaaaactttattc

SEQ ID NO: 984828 - DNA, 15 bp, Homo sapiens
atgtaaaactttatt

SEQ ID NO: 984829 - DNA, 15 bp, Homo sapiens
tatgtaaaactttat

SEQ ID NO: 984830 - DNA, 15 bp, Homo sapiens
ttatgtaaaacttta

SEQ ID NO: 984831 - DNA, 15 bp, Homo sapiens
tttatgtaaaacttt

SEQ ID NO: 984832 - DNA, 15 bp, Homo sapiens
ctttatgtaaaactt

SEQ ID NO: 984833 - DNA, 15 bp, Homo sapiens
actttatgtaaaact

SEQ ID NO: 984834 - DNA, 15 bp, Homo sapiens
tactttatgtaaaac

SEQ ID NO: 984835 - DNA, 15 bp, Homo sapiens
atactttatgtaaaa

SEQ ID NO: 984836 - DNA, 15 bp, Homo sapiens
catactttatgtaaa

SEQ ID NO: 984837 - DNA, 15 bp, Homo sapiens
tcatactttatgtaa

SEQ ID NO: 984838 - DNA, 15 bp, Homo sapiens
atcatactttatgta

SEQ ID NO: 984839 - DNA, 15 bp, Homo sapiens
aatcatactttatgt

SEQ ID NO: 984840 - DNA, 15 bp, Homo sapiens
gaatcatactttatg

SEQ ID NO: 984841 - DNA, 15 bp, Homo sapiens
ggaatcatactttat

SEQ ID NO: 984842 - DNA, 15 bp, Homo sapiens
tggaatcatacttta

SEQ ID NO: 984843 - DNA, 15 bp, Homo sapiens
gtggaatcatacttt

SEQ ID NO: 984844 - DNA, 15 bp, Homo sapiens
agtggaatcatactt

SEQ ID NO: 984845 - DNA, 15 bp, Homo sapiens
tagtggaatcatact

SEQ ID NO: 984846 - DNA, 15 bp, Homo sapiens
atagtggaatcatac

SEQ ID NO: 984847 - DNA, 15 bp, Homo sapiens
catagtggaatcata

SEQ ID NO: 984848 - DNA, 15 bp, Homo sapiens
acatagtggaatcat

SEQ ID NO: 984849 - DNA, 15 bp, Homo sapiens
aacatagtggaatca

SEQ ID NO: 984850 - DNA, 15 bp, Homo sapiens
aaacatagtggaatc

SEQ ID NO: 984851 - DNA, 15 bp, Homo sapiens
taaacatagtggaat

SEQ ID NO: 984852 - DNA, 15 bp, Homo sapiens
ttaaacatagtggaa

SEQ ID NO: 984853 - DNA, 15 bp, Homo sapiens
tttaaacatagtgga

SEQ ID NO: 984854 - DNA, 15 bp, Homo sapiens
ttttaaacatagtgg

SEQ ID NO: 984855 - DNA, 15 bp, Homo sapiens
tttttaaacatagtg

SEQ ID NO: 984856 - DNA, 15 bp, Homo sapiens
atttttaaacatagt

SEQ ID NO: 984857 - DNA, 15 bp, Homo sapiens
tatttttaaacatag

SEQ ID NO: 984858 - DNA, 15 bp, Homo sapiens
ttatttttaaacata

SEQ ID NO: 984859 - DNA, 15 bp, Homo sapiens
tttatttttaaacat

SEQ ID NO: 984860 - DNA, 15 bp, Homo sapiens
gtttatttttaaaca

SEQ ID NO: 984861 - DNA, 15 bp, Homo sapiens
tgtttatttttaaac

SEQ ID NO: 984862 - DNA, 15 bp, Homo sapiens
ctgtttatttttaaa

SEQ ID NO: 984863 - DNA, 15 bp, Homo sapiens
tctgtttatttttaa

SEQ ID NO: 984864 - DNA, 15 bp, Homo sapiens
ctctgtttattttta

SEQ ID NO: 984865 - DNA, 15 bp, Homo sapiens
tctctgtttattttt

SEQ ID NO: 984866 - DNA, 15 bp, Homo sapiens
gtctctgtttatttt

SEQ ID NO: 984867 - DNA, 15 bp, Homo sapiens
tgtctctgtttattt

SEQ ID NO: 984868 - DNA, 15 bp, Homo sapiens
atgtctctgtttatt

SEQ ID NO: 984869 - DNA, 15 bp, Homo sapiens
aatgtctctgtttat

SEQ ID NO: 984870 - DNA, 15 bp, Homo sapiens
gaatgtctctgttta

SEQ ID NO: 984871 - DNA, 15 bp, Homo sapiens
agaatgtctctgttt

SEQ ID NO: 984872 - DNA, 15 bp, Homo sapiens
aagaatgtctctgtt

SEQ ID NO: 984873 - DNA, 15 bp, Homo sapiens
caagaatgtctctgt

SEQ ID NO: 984874 - DNA, 15 bp, Homo sapiens
ccaagaatgtctctg

SEQ ID NO: 984875 - DNA, 15 bp, Homo sapiens
tccaagaatgtctct

SEQ ID NO: 984876 - DNA, 15 bp, Homo sapiens
ctccaagaatgtctc

SEQ ID NO: 984877 - DNA, 15 bp, Homo sapiens
actccaagaatgtct

SEQ ID NO: 984878 - DNA, 15 bp, Homo sapiens
aactccaagaatgtc

SEQ ID NO: 984879 - DNA, 15 bp, Homo sapiens
caactccaagaatgt

SEQ ID NO: 984880 - DNA, 15 bp, Homo sapiens
tcaactccaagaatg

SEQ ID NO: 984881 - DNA, 15 bp, Homo sapiens
ctcaactccaagaat

SEQ ID NO: 984882 - DNA, 15 bp, Homo sapiens
actcaactccaagaa

SEQ ID NO: 984883 - DNA, 15 bp, Homo sapiens
tactcaactccaaga

SEQ ID NO: 984884 - DNA, 15 bp, Homo sapiens
atactcaactccaag

SEQ ID NO: 984885 - DNA, 15 bp, Homo sapiens
aatactcaactccaa

SEQ ID NO: 984886 - DNA, 15 bp, Homo sapiens
caatactcaactcca

SEQ ID NO: 984887 - DNA, 15 bp, Homo sapiens
acaatactcaactcc

SEQ ID NO: 984888 - DNA, 15 bp, Homo sapiens
aacaatactcaactc

SEQ ID NO: 984889 - DNA, 15 bp, Homo sapiens
aaacaatactcaact

SEQ ID NO: 984890 - DNA, 15 bp, Homo sapiens
aaaacaatactcaac

SEQ ID NO: 984891 - DNA, 15 bp, Homo sapiens
gaaaacaatactcaa

SEQ ID NO: 984892 - DNA, 15 bp, Homo sapiens
agaaaacaatactca

SEQ ID NO: 984893 - DNA, 15 bp, Homo sapiens
aagaaaacaatactc

SEQ ID NO: 984894 - DNA, 15 bp, Homo sapiens
aaagaaaacaatact

SEQ ID NO: 984895 - DNA, 15 bp, Homo sapiens
aaaagaaaacaatac

SEQ ID NO: 984896 - DNA, 15 bp, Homo sapiens
gaaaagaaaacaata

SEQ ID NO: 984897 - DNA, 15 bp, Homo sapiens
agaaaagaaaacaat

SEQ ID NO: 984898 - DNA, 15 bp, Homo sapiens
cagaaaagaaaacaa

SEQ ID NO: 984899 - DNA, 15 bp, Homo sapiens
acagaaaagaaaaca

SEQ ID NO: 984900 - DNA, 15 bp, Homo sapiens
gacagaaaagaaaac

SEQ ID NO: 984901 - DNA, 15 bp, Homo sapiens
tgacagaaaagaaaa

SEQ ID NO: 984902 - DNA, 15 bp, Homo sapiens
atgacagaaaagaaa

SEQ ID NO: 984903 - DNA, 15 bp, Homo sapiens
catgacagaaaagaa

SEQ ID NO: 984904 - DNA, 15 bp, Homo sapiens
acatgacagaaaaga

SEQ ID NO: 984905 - DNA, 15 bp, Homo sapiens
gacatgacagaaaag

SEQ ID NO: 984906 - DNA, 15 bp, Homo sapiens
ggacatgacagaaaa

SEQ ID NO: 984907 - DNA, 15 bp, Homo sapiens
tggacatgacagaaa

SEQ ID NO: 984908 - DNA, 15 bp, Homo sapiens
ttggacatgacagaa

SEQ ID NO: 984909 - DNA, 15 bp, Homo sapiens
tttggacatgacaga

SEQ ID NO: 984910 - DNA, 15 bp, Homo sapiens
ctttggacatgacag

SEQ ID NO: 984911 - DNA, 15 bp, Homo sapiens
tctttggacatgaca

SEQ ID NO: 984912 - DNA, 15 bp, Homo sapiens
ttctttggacatgac

SEQ ID NO: 984913 - DNA, 15 bp, Homo sapiens
gttctttggacatga

SEQ ID NO: 984914 - DNA, 15 bp, Homo sapiens
agttctttggacatg

SEQ ID NO: 984915 - DNA, 15 bp, Homo sapiens
tagttctttggacat

SEQ ID NO: 984916 - DNA, 15 bp, Homo sapiens
atagttctttggaca

SEQ ID NO: 984917 - DNA, 15 bp, Homo sapiens
tatagttctttggac

SEQ ID NO: 984918 - DNA, 15 bp, Homo sapiens
atatagttctttgga

SEQ ID NO: 984919 - DNA, 15 bp, Homo sapiens
tatatagttctttgg

SEQ ID NO: 984920 - DNA, 15 bp, Homo sapiens
ttatatagttctttg

SEQ ID NO: 984921 - DNA, 15 bp, Homo sapiens
gttatatagttcttt

SEQ ID NO: 984922 - DNA, 15 bp, Homo sapiens
agttatatagttctt

SEQ ID NO: 984923 - DNA, 15 bp, Homo sapiens
tagttatatagttct

SEQ ID NO: 984924 - DNA, 15 bp, Homo sapiens
atagttatatagttc

SEQ ID NO: 984925 - DNA, 15 bp, Homo sapiens
aatagttatatagtt

SEQ ID NO: 984926 - DNA, 15 bp, Homo sapiens
taatagttatatagt

SEQ ID NO: 984927 - DNA, 15 bp, Homo sapiens
ataatagttatatag

SEQ ID NO: 984928 - DNA, 15 bp, Homo sapiens
aataatagttatata

SEQ ID NO: 984929 - DNA, 15 bp, Homo sapiens
aaataatagttatat

SEQ ID NO: 984930 - DNA, 15 bp, Homo sapiens
aaaataatagttata

SEQ ID NO: 984931 - DNA, 15 bp, Homo sapiens
aaaaataatagttat

SEQ ID NO: 984932 - DNA, 15 bp, Homo sapiens
taaaaataatagtta

SEQ ID NO: 984933 - DNA, 15 bp, Homo sapiens
ttaaaaataatagtt

SEQ ID NO: 984934 - DNA, 15 bp, Homo sapiens
attaaaaataatagt

SEQ ID NO: 984935 - DNA, 15 bp, Homo sapiens
cattaaaaataatag

SEQ ID NO: 984936 - DNA, 15 bp, Homo sapiens
tcattaaaaataata

SEQ ID NO: 984937 - DNA, 15 bp, Homo sapiens
ttcattaaaaataat

SEQ ID NO: 984938 - DNA, 15 bp, Homo sapiens
gttcattaaaaataa

SEQ ID NO: 984939 - DNA, 15 bp, Homo sapiens
agttcattaaaaata

SEQ ID NO: 984940 - DNA, 15 bp, Homo sapiens
tagttcattaaaaat

SEQ ID NO: 984941 - DNA, 15 bp, Homo sapiens
atagttcattaaaaa

SEQ ID NO: 984942 - DNA, 15 bp, Homo sapiens
tatagttcattaaaa

SEQ ID NO: 984943 - DNA, 15 bp, Homo sapiens
atatagttcattaaa

SEQ ID NO: 984944 - DNA, 15 bp, Homo sapiens
tatatagttcattaa

SEQ ID NO: 984945 - DNA, 15 bp, Homo sapiens
atatatagttcatta

SEQ ID NO: 984946 - DNA, 15 bp, Homo sapiens
catatatagttcatt

SEQ ID NO: 984947 - DNA, 15 bp, Homo sapiens
acatatatagttcat

SEQ ID NO: 984948 - DNA, 15 bp, Homo sapiens
tacatatatagttca

SEQ ID NO: 984949 - DNA, 15 bp, Homo sapiens
ttacatatatagttc

SEQ ID NO: 984950 - DNA, 15 bp, Homo sapiens
attacatatatagtt

SEQ ID NO: 984951 - DNA, 15 bp, Homo sapiens
tattacatatatagt

SEQ ID NO: 984952 - DNA, 15 bp, Homo sapiens
atattacatatatag

SEQ ID NO: 984953 - DNA, 15 bp, Homo sapiens
tatattacatatata

SEQ ID NO: 984954 - DNA, 15 bp, Homo sapiens
atatattacatatat

SEQ ID NO: 984955 - DNA, 15 bp, Homo sapiens
tatatattacatata

SEQ ID NO: 984956 - DNA, 15 bp, Homo sapiens
gtatatattacatat

SEQ ID NO: 984957 - DNA, 15 bp, Homo sapiens
tgtatatattacata

SEQ ID NO: 984958 - DNA, 15 bp, Homo sapiens
atgtatatattacat

SEQ ID NO: 984959 - DNA, 15 bp, Homo sapiens
tatgtatatattaca

SEQ ID NO: 984960 - DNA, 15 bp, Homo sapiens
atatgtatatattac

SEQ ID NO: 984961 - DNA, 15 bp, Homo sapiens
tatatgtatatatta

SEQ ID NO: 984962 - DNA, 15 bp, Homo sapiens
ctatatgtatatatt

SEQ ID NO: 984963 - DNA, 15 bp, Homo sapiens
actatatgtatatat

SEQ ID NO: 984964 - DNA, 15 bp, Homo sapiens
aactatatgtatata

SEQ ID NO: 984965 - DNA, 15 bp, Homo sapiens
aaactatatgtatat

SEQ ID NO: 984966 - DNA, 15 bp, Homo sapiens
taaactatatgtata

SEQ ID NO: 984967 - DNA, 15 bp, Homo sapiens
ataaactatatgtat

SEQ ID NO: 984968 - DNA, 15 bp, Homo sapiens
tataaactatatgta

SEQ ID NO: 984969 - DNA, 15 bp, Homo sapiens
atataaactatatgt

SEQ ID NO: 984970 - DNA, 15 bp, Homo sapiens
catataaactatatg

SEQ ID NO: 984971 - DNA, 15 bp, Homo sapiens
acatataaactatat

SEQ ID NO: 984972 - DNA, 15 bp, Homo sapiens
tacatataaactata

SEQ ID NO: 984973 - DNA, 15 bp, Homo sapiens
atacatataaactat

SEQ ID NO: 984974 - DNA, 15 bp, Homo sapiens
tatacatataaacta

SEQ ID NO: 984975 - DNA, 15 bp, Homo sapiens
atatacatataaact

SEQ ID NO: 984976 - DNA, 15 bp, Homo sapiens
tatatacatataaac

SEQ ID NO: 984977 - DNA, 15 bp, Homo sapiens
gtatatacatataaa

SEQ ID NO: 984978 - DNA, 15 bp, Homo sapiens
tgtatatacatataa

SEQ ID NO: 984979 - DNA, 15 bp, Homo sapiens
ttgtatatacatata

SEQ ID NO: 984980 - DNA, 15 bp, Homo sapiens
tttgtatatacatat

SEQ ID NO: 984981 - DNA, 15 bp, Homo sapiens
ttttgtatatacata

SEQ ID NO: 984982 - DNA, 15 bp, Homo sapiens
attttgtatatacat

SEQ ID NO: 984983 - DNA, 15 bp, Homo sapiens
aattttgtatataca

SEQ ID NO: 984984 - DNA, 15 bp, Homo sapiens
aaattttgtatatac

SEQ ID NO: 984985 - DNA, 15 bp, Homo sapiens
taaattttgtatata

SEQ ID NO: 984986 - DNA, 15 bp, Homo sapiens
ataaattttgtatat

SEQ ID NO: 984987 - DNA, 15 bp, Homo sapiens
gataaattttgtata

SEQ ID NO: 984988 - DNA, 15 bp, Homo sapiens
agataaattttgtat

SEQ ID NO: 984989 - DNA, 15 bp, Homo sapiens
gagataaattttgta

SEQ ID NO: 984990 - DNA, 15 bp, Homo sapiens
tgagataaattttgt

SEQ ID NO: 984991 - DNA, 15 bp, Homo sapiens
atgagataaattttg

SEQ ID NO: 984992 - DNA, 15 bp, Homo sapiens
tatgagataaatttt

SEQ ID NO: 984993 - DNA, 15 bp, Homo sapiens
atatgagataaattt

SEQ ID NO: 984994 - DNA, 15 bp, Homo sapiens
tatatgagataaatt

SEQ ID NO: 984995 - DNA, 15 bp, Homo sapiens
atatatgagataaat

SEQ ID NO: 984996 - DNA, 15 bp, Homo sapiens
tatatatgagataaa

SEQ ID NO: 984997 - DNA, 15 bp, Homo sapiens
atatatatgagataa

SEQ ID NO: 984998 - DNA, 15 bp, Homo sapiens
catatatatgagata

SEQ ID NO: 984999 - DNA, 15 bp, Homo sapiens
tcatatatatgagat

SEQ ID NO: 985000 - DNA, 15 bp, Homo sapiens
atcatatatatgaga

SEQ ID NO: 985001 - DNA, 15 bp, Homo sapiens
tatcatatatatgag

SEQ ID NO: 985002 - DNA, 15 bp, Homo sapiens
ttatcatatatatga

SEQ ID NO: 985003 - DNA, 15 bp, Homo sapiens
tttatcatatatatg

SEQ ID NO: 985004 - DNA, 15 bp, Homo sapiens
ctttatcatatatat

SEQ ID NO: 985005 - DNA, 15 bp, Homo sapiens
tctttatcatatata

SEQ ID NO: 985006 - DNA, 15 bp, Homo sapiens
atctttatcatatat

SEQ ID NO: 985007 - DNA, 15 bp, Homo sapiens
catctttatcatata

SEQ ID NO: 985008 - DNA, 15 bp, Homo sapiens
tcatctttatcatat

SEQ ID NO: 985009 - DNA, 15 bp, Homo sapiens
ttcatctttatcata

SEQ ID NO: 985010 - DNA, 15 bp, Homo sapiens
tttcatctttatcat

SEQ ID NO: 985011 - DNA, 15 bp, Homo sapiens
ctttcatctttatca

SEQ ID NO: 985012 - DNA, 15 bp, Homo sapiens
tctttcatctttatc

SEQ ID NO: 985013 - DNA, 15 bp, Homo sapiens
atctttcatctttat

SEQ ID NO: 985014 - DNA, 15 bp, Homo sapiens
catctttcatcttta

SEQ ID NO: 985015 - DNA, 15 bp, Homo sapiens
tcatctttcatcttt

SEQ ID NO: 985016 - DNA, 15 bp, Homo sapiens
ctcatctttcatctt

SEQ ID NO: 985017 - DNA, 15 bp, Homo sapiens
actcatctttcatct

SEQ ID NO: 985018 - DNA, 15 bp, Homo sapiens
aactcatctttcatc

SEQ ID NO: 985019 - DNA, 15 bp, Homo sapiens
caactcatctttcat

SEQ ID NO: 985020 - DNA, 15 bp, Homo sapiens
ccaactcatctttca

SEQ ID NO: 985021 - DNA, 15 bp, Homo sapiens
tccaactcatctttc

SEQ ID NO: 985022 - DNA, 15 bp, Homo sapiens
atccaactcatcttt

SEQ ID NO: 985023 - DNA, 15 bp, Homo sapiens
catccaactcatctt

SEQ ID NO: 985024 - DNA, 15 bp, Homo sapiens
acatccaactcatct

SEQ ID NO: 985025 - DNA, 15 bp, Homo sapiens
cacatccaactcatc

SEQ ID NO: 985026 - DNA, 15 bp, Homo sapiens
gcacatccaactcat

SEQ ID NO: 985027 - DNA, 15 bp, Homo sapiens
ggcacatccaactca

SEQ ID NO: 985028 - DNA, 15 bp, Homo sapiens
tggcacatccaactc

SEQ ID NO: 985029 - DNA, 15 bp, Homo sapiens
gtggcacatccaact

SEQ ID NO: 985030 - DNA, 15 bp, Homo sapiens
cgtggcacatccaac

SEQ ID NO: 985031 - DNA, 15 bp, Homo sapiens
acgtggcacatccaa

SEQ ID NO: 985032 - DNA, 15 bp, Homo sapiens
cacgtggcacatcca

SEQ ID NO: 985033 - DNA, 15 bp, Homo sapiens
tcacgtggcacatcc

SEQ ID NO: 985034 - DNA, 15 bp, Homo sapiens
ttcacgtggcacatc

SEQ ID NO: 985035 - DNA, 15 bp, Homo sapiens
cttcacgtggcacat

SEQ ID NO: 985036 - DNA, 15 bp, Homo sapiens
tcttcacgtggcaca

SEQ ID NO: 985037 - DNA, 15 bp, Homo sapiens
ctcttcacgtggcac

SEQ ID NO: 985038 - DNA, 15 bp, Homo sapiens
cctcttcacgtggca

SEQ ID NO: 985039 - DNA, 15 bp, Homo sapiens
ccctcttcacgtggc

SEQ ID NO: 985040 - DNA, 15 bp, Homo sapiens
accctcttcacgtgg

SEQ ID NO: 985041 - DNA, 15 bp, Homo sapiens
taccctcttcacgtg

SEQ ID NO: 985042 - DNA, 15 bp, Homo sapiens
ctaccctcttcacgt

SEQ ID NO: 985043 - DNA, 15 bp, Homo sapiens
actaccctcttcacg

SEQ ID NO: 985044 - DNA, 15 bp, Homo sapiens
tactaccctcttcac

SEQ ID NO: 985045 - DNA, 15 bp, Homo sapiens
atactaccctcttca

SEQ ID NO: 985046 - DNA, 15 bp, Homo sapiens
tatactaccctcttc

SEQ ID NO: 985047 - DNA, 15 bp, Homo sapiens
ctatactaccctctt

SEQ ID NO: 985048 - DNA, 15 bp, Homo sapiens
tctatactaccctct

SEQ ID NO: 985049 - DNA, 15 bp, Homo sapiens
ttctatactaccctc

SEQ ID NO: 985050 - DNA, 15 bp, Homo sapiens
gttctatactaccct

SEQ ID NO: 985051 - DNA, 15 bp, Homo sapiens
ggttctatactaccc

SEQ ID NO: 985052 - DNA, 15 bp, Homo sapiens
gggttctatactacc

SEQ ID NO: 985053 - DNA, 15 bp, Homo sapiens
ggggttctatactac

SEQ ID NO: 985054 - DNA, 15 bp, Homo sapiens
tggggttctatacta

SEQ ID NO: 985055 - DNA, 15 bp, Homo sapiens
ctggggttctatact

SEQ ID NO: 985056 - DNA, 15 bp, Homo sapiens
cctggggttctatac

SEQ ID NO: 985057 - DNA, 15 bp, Homo sapiens
acctggggttctata

SEQ ID NO: 985058 - DNA, 15 bp, Homo sapiens
tacctggggttctat

SEQ ID NO: 985059 - DNA, 15 bp, Homo sapiens
ttacctggggttcta

SEQ ID NO: 985060 - DNA, 15 bp, Homo sapiens
attacctggggttct

SEQ ID NO: 985061 - DNA, 15 bp, Homo sapiens
cattacctggggttc

SEQ ID NO: 985062 - DNA, 15 bp, Homo sapiens
ccattacctggggtt

SEQ ID NO: 985063 - DNA, 15 bp, Homo sapiens
cccattacctggggt

SEQ ID NO: 985064 - DNA, 15 bp, Homo sapiens
ccccattacctgggg

SEQ ID NO: 985065 - DNA, 15 bp, Homo sapiens
gccccattacctggg

SEQ ID NO: 985066 - DNA, 15 bp, Homo sapiens
tgccccattacctgg

SEQ ID NO: 985067 - DNA, 15 bp, Homo sapiens
atgccccattacctg

SEQ ID NO: 985068 - DNA, 15 bp, Homo sapiens
tatgccccattacct

SEQ ID NO: 985069 - DNA, 15 bp, Homo sapiens
ctatgccccattacc

SEQ ID NO: 985070 - DNA, 15 bp, Homo sapiens
cctatgccccattac

SEQ ID NO: 985071 - DNA, 15 bp, Homo sapiens
tcctatgccccatta

SEQ ID NO: 985072 - DNA, 15 bp, Homo sapiens
ctcctatgccccatt

SEQ ID NO: 985073 - DNA, 15 bp, Homo sapiens
actcctatgccccat

SEQ ID NO: 985074 - DNA, 15 bp, Homo sapiens
cactcctatgcccca

SEQ ID NO: 985075 - DNA, 15 bp, Homo sapiens
ccactcctatgcccc

SEQ ID NO: 985076 - DNA, 15 bp, Homo sapiens
cccactcctatgccc

SEQ ID NO: 985077 - DNA, 15 bp, Homo sapiens
tcccactcctatgcc

SEQ ID NO: 985078 - DNA, 15 bp, Homo sapiens
atcccactcctatgc

SEQ ID NO: 985079 - DNA, 15 bp, Homo sapiens
aatcccactcctatg

SEQ ID NO: 985080 - DNA, 15 bp, Homo sapiens
gaatcccactcctat

SEQ ID NO: 985081 - DNA, 15 bp, Homo sapiens
ggaatcccactccta

SEQ ID NO: 985082 - DNA, 15 bp, Homo sapiens
tggaatcccactcct

SEQ ID NO: 985083 - DNA, 15 bp, Homo sapiens
ctggaatcccactcc

SEQ ID NO: 985084 - DNA, 15 bp, Homo sapiens
tctggaatcccactc

SEQ ID NO: 985085 - DNA, 15 bp, Homo sapiens
atctggaatcccact

SEQ ID NO: 985086 - DNA, 15 bp, Homo sapiens
tatctggaatcccac

SEQ ID NO: 985087 - DNA, 15 bp, Homo sapiens
gtatctggaatccca

SEQ ID NO: 985088 - DNA, 15 bp, Homo sapiens
ggtatctggaatccc

SEQ ID NO: 985089 - DNA, 15 bp, Homo sapiens
tggtatctggaatcc

SEQ ID NO: 985090 - DNA, 15 bp, Homo sapiens
ctggtatctggaatc

SEQ ID NO: 985091 - DNA, 15 bp, Homo sapiens
cctggtatctggaat

SEQ ID NO: 985092 - DNA, 15 bp, Homo sapiens
gcctggtatctggaa

SEQ ID NO: 985093 - DNA, 15 bp, Homo sapiens
ttatacacctggctt

SEQ ID NO: 985094 - DNA, 15 bp, Homo sapiens
tttatacacctggct

SEQ ID NO: 985095 - DNA, 15 bp, Homo sapiens
atttatacacctggc

SEQ ID NO: 985096 - DNA, 15 bp, Homo sapiens
gatttatacacctgg

SEQ ID NO: 985097 - DNA, 15 bp, Homo sapiens
ggatttatacacctg

SEQ ID NO: 985098 - DNA, 15 bp, Homo sapiens
tggatttatacacct

SEQ ID NO: 985099 - DNA, 15 bp, Homo sapiens
atggatttatacacc

SEQ ID NO: 985100 - DNA, 15 bp, Homo sapiens
aatggatttatacac

SEQ ID NO: 985101 - DNA, 15 bp, Homo sapiens
gaatggatttataca

SEQ ID NO: 985102 - DNA, 15 bp, Homo sapiens
agaatggatttatac

SEQ ID NO: 985103 - DNA, 15 bp, Homo sapiens
gagaatggatttata

SEQ ID NO: 985104 - DNA, 15 bp, Homo sapiens
tgagaatggatttat

SEQ ID NO: 985105 - DNA, 15 bp, Homo sapiens
gtgagaatggattta

SEQ ID NO: 985106 - DNA, 15 bp, Homo sapiens
tgtgagaatggattt

SEQ ID NO: 985107 - DNA, 15 bp, Homo sapiens
gtgtgagaatggatt

SEQ ID NO: 985108 - DNA, 15 bp, Homo sapiens
agtgtgagaatggat

SEQ ID NO: 985109 - DNA, 15 bp, Homo sapiens
cagtgtgagaatgga

SEQ ID NO: 985110 - DNA, 15 bp, Homo sapiens
gcagtgtgagaatgg

SEQ ID NO: 985111 - DNA, 15 bp, Homo sapiens
agcagtgtgagaatg

SEQ ID NO: 985112 - DNA, 15 bp, Homo sapiens
cagcagtgtgagaat

SEQ ID NO: 985113 - DNA, 15 bp, Homo sapiens
acagcagtgtgagaa

SEQ ID NO: 985114 - DNA, 15 bp, Homo sapiens
tacagcagtgtgaga

SEQ ID NO: 985115 - DNA, 15 bp, Homo sapiens
ttacagcagtgtgag

SEQ ID NO: 985116 - DNA, 15 bp, Homo sapiens
tttacagcagtgtga

SEQ ID NO: 985117 - DNA, 15 bp, Homo sapiens
ttttacagcagtgtg

SEQ ID NO: 985118 - DNA, 15 bp, Homo sapiens
tttttacagcagtgt

SEQ ID NO: 985119 - DNA, 15 bp, Homo sapiens
ttttttacagcagtg

SEQ ID NO: 985120 - DNA, 15 bp, Homo sapiens
gttttttacagcagt

SEQ ID NO: 985121 - DNA, 15 bp, Homo sapiens
agttttttacagcag

SEQ ID NO: 985122 - DNA, 15 bp, Homo sapiens
tagttttttacagca

SEQ ID NO: 985123 - DNA, 15 bp, Homo sapiens
gtagttttttacagc

SEQ ID NO: 985124 - DNA, 15 bp, Homo sapiens
agtagttttttacag

SEQ ID NO: 985125 - DNA, 15 bp, Homo sapiens
aagtagttttttaca

SEQ ID NO: 985126 - DNA, 15 bp, Homo sapiens
caagtagttttttac

SEQ ID NO: 985127 - DNA, 15 bp, Homo sapiens
tcaagtagtttttta

SEQ ID NO: 985128 - DNA, 15 bp, Homo sapiens
ctcaagtagtttttt

SEQ ID NO: 985129 - DNA, 15 bp, Homo sapiens
tctcaagtagttttt

SEQ ID NO: 985130 - DNA, 15 bp, Homo sapiens
gtctcaagtagtttt

SEQ ID NO: 985131 - DNA, 15 bp, Homo sapiens
agtctcaagtagttt

SEQ ID NO: 985132 - DNA, 15 bp, Homo sapiens
cagtctcaagtagtt

SEQ ID NO: 985133 - DNA, 15 bp, Homo sapiens
ccagtctcaagtagt

SEQ ID NO: 985134 - DNA, 15 bp, Homo sapiens
cccagtctcaagtag

SEQ ID NO: 985135 - DNA, 15 bp, Homo sapiens
acccagtctcaagta

SEQ ID NO: 985136 - DNA, 15 bp, Homo sapiens
tacccagtctcaagt

SEQ ID NO: 985137 - DNA, 15 bp, Homo sapiens
ttacccagtctcaag

SEQ ID NO: 985138 - DNA, 15 bp, Homo sapiens
attacccagtctcaa

SEQ ID NO: 985139 - DNA, 15 bp, Homo sapiens
aattacccagtctca

SEQ ID NO: 985140 - DNA, 15 bp, Homo sapiens
aaattacccagtctc

SEQ ID NO: 985141 - DNA, 15 bp, Homo sapiens
taaattacccagtct

SEQ ID NO: 985142 - DNA, 15 bp, Homo sapiens
ataaattacccagtc

SEQ ID NO: 985143 - DNA, 15 bp, Homo sapiens
tataaattacccagt

SEQ ID NO: 985144 - DNA, 15 bp, Homo sapiens
ttataaattacccag

SEQ ID NO: 985145 - DNA, 15 bp, Homo sapiens
tttataaattaccca

SEQ ID NO: 985146 - DNA, 15 bp, Homo sapiens
ctttataaattaccc

SEQ ID NO: 985147 - DNA, 15 bp, Homo sapiens
tctttataaattacc

SEQ ID NO: 985148 - DNA, 15 bp, Homo sapiens
ttctttataaattac

SEQ ID NO: 985149 - DNA, 15 bp, Homo sapiens
tttctttataaatta

SEQ ID NO: 985150 - DNA, 15 bp, Homo sapiens
ttttctttataaatt

SEQ ID NO: 985151 - DNA, 15 bp, Homo sapiens
cttttctttataaat

SEQ ID NO: 985152 - DNA, 15 bp, Homo sapiens
tcttttctttataaa

SEQ ID NO: 985153 - DNA, 15 bp, Homo sapiens
ctcttttctttataa

SEQ ID NO: 985154 - DNA, 15 bp, Homo sapiens
cctcttttctttata

SEQ ID NO: 985155 - DNA, 15 bp, Homo sapiens
acctcttttctttat

SEQ ID NO: 985156 - DNA, 15 bp, Homo sapiens
aacctcttttcttta

SEQ ID NO: 985157 - DNA, 15 bp, Homo sapiens
aaacctcttttcttt

SEQ ID NO: 985158 - DNA, 15 bp, Homo sapiens
taaacctcttttctt

SEQ ID NO: 985159 - DNA, 15 bp, Homo sapiens
ttaaacctcttttct

SEQ ID NO: 985160 - DNA, 15 bp, Homo sapiens
attaaacctcttttc

SEQ ID NO: 985161 - DNA, 15 bp, Homo sapiens
aattaaacctctttt

SEQ ID NO: 985162 - DNA, 15 bp, Homo sapiens
caattaaacctcttt

SEQ ID NO: 985163 - DNA, 15 bp, Homo sapiens
tcaattaaacctctt

SEQ ID NO: 985164 - DNA, 15 bp, Homo sapiens
gtcaattaaacctct

SEQ ID NO: 985165 - DNA, 15 bp, Homo sapiens
agtcaattaaacctc

SEQ ID NO: 985166 - DNA, 15 bp, Homo sapiens
gagtcaattaaacct

SEQ ID NO: 985167 - DNA, 15 bp, Homo sapiens
tgagtcaattaaacc

SEQ ID NO: 985168 - DNA, 15 bp, Homo sapiens
gtgagtcaattaaac

SEQ ID NO: 985169 - DNA, 15 bp, Homo sapiens
tgtgagtcaattaaa

SEQ ID NO: 985170 - DNA, 15 bp, Homo sapiens
ctgtgagtcaattaa

SEQ ID NO: 985171 - DNA, 15 bp, Homo sapiens
actgtgagtcaatta

SEQ ID NO: 985172 - DNA, 15 bp, Homo sapiens
aactgtgagtcaatt

SEQ ID NO: 985173 - DNA, 15 bp, Homo sapiens
gaactgtgagtcaat

SEQ ID NO: 985174 - DNA, 15 bp, Homo sapiens
ggaactgtgagtcaa

SEQ ID NO: 985175 - DNA, 15 bp, Homo sapiens
tggaactgtgagtca

SEQ ID NO: 985176 - DNA, 15 bp, Homo sapiens
gtggaactgtgagtc

SEQ ID NO: 985177 - DNA, 15 bp, Homo sapiens
tgtggaactgtgagt

SEQ ID NO: 985178 - DNA, 15 bp, Homo sapiens
ctgtggaactgtgag

SEQ ID NO: 985179 - DNA, 15 bp, Homo sapiens
cctgtggaactgtga

SEQ ID NO: 985180 - DNA, 15 bp, Homo sapiens
gcctgtggaactgtg

SEQ ID NO: 985181 - DNA, 15 bp, Homo sapiens
agcctgtggaactgt

SEQ ID NO: 985182 - DNA, 15 bp, Homo sapiens
cagcctgtggaactg

SEQ ID NO: 985183 - DNA, 15 bp, Homo sapiens
acagcctgtggaact

SEQ ID NO: 985184 - DNA, 15 bp, Homo sapiens
tacagcctgtggaac

SEQ ID NO: 985185 - DNA, 15 bp, Homo sapiens
gtacagcctgtggaa

SEQ ID NO: 985186 - DNA, 15 bp, Homo sapiens
tgtacagcctgtgga

SEQ ID NO: 985187 - DNA, 15 bp, Homo sapiens
ctgtacagcctgtgg

SEQ ID NO: 985188 - DNA, 15 bp, Homo sapiens
cctgtacagcctgtg

SEQ ID NO: 985189 - DNA, 15 bp, Homo sapiens
tcctgtacagcctgt

SEQ ID NO: 985190 - DNA, 15 bp, Homo sapiens
ttcctgtacagcctg

SEQ ID NO: 985191 - DNA, 15 bp, Homo sapiens
cttcctgtacagcct

SEQ ID NO: 985192 - DNA, 15 bp, Homo sapiens
gcttcctgtacagcc

SEQ ID NO: 985193 - DNA, 15 bp, Homo sapiens
tgcttcctgtacagc

SEQ ID NO: 985194 - DNA, 15 bp, Homo sapiens
atgcttcctgtacag

SEQ ID NO: 985195 - DNA, 15 bp, Homo sapiens
catgcttcctgtaca

SEQ ID NO: 985196 - DNA, 15 bp, Homo sapiens
ccatgcttcctgtac

SEQ ID NO: 985197 - DNA, 15 bp, Homo sapiens
gccatgcttcctgta

SEQ ID NO: 985198 - DNA, 15 bp, Homo sapiens
agccatgcttcctgt

SEQ ID NO: 985199 - DNA, 15 bp, Homo sapiens
cagccatgcttcctg

SEQ ID NO: 985200 - DNA, 15 bp, Homo sapiens
ccagccatgcttcct

SEQ ID NO: 985201 - DNA, 15 bp, Homo sapiens
cccagccatgcttcc

SEQ ID NO: 985202 - DNA, 15 bp, Homo sapiens
ccccagccatgcttc

SEQ ID NO: 985203 - DNA, 15 bp, Homo sapiens
tccccagccatgctt

SEQ ID NO: 985204 - DNA, 15 bp, Homo sapiens
ctccccagccatgct

SEQ ID NO: 985205 - DNA, 15 bp, Homo sapiens
cctccccagccatgc

SEQ ID NO: 985206 - DNA, 15 bp, Homo sapiens
gcctccccagccatg

SEQ ID NO: 985207 - DNA, 15 bp, Homo sapiens
ggcctccccagccat

SEQ ID NO: 985208 - DNA, 15 bp, Homo sapiens
aggcctccccagcca

SEQ ID NO: 985209 - DNA, 15 bp, Homo sapiens
gaggcctccccagcc

SEQ ID NO: 985210 - DNA, 15 bp, Homo sapiens
tgaggcctccccagc

SEQ ID NO: 985211 - DNA, 15 bp, Homo sapiens
ctgaggcctccccag

SEQ ID NO: 985212 - DNA, 15 bp, Homo sapiens
tctgaggcctcccca

SEQ ID NO: 985213 - DNA, 15 bp, Homo sapiens
ttctgaggcctcccc

SEQ ID NO: 985214 - DNA, 15 bp, Homo sapiens
tttctgaggcctccc

SEQ ID NO: 985215 - DNA, 15 bp, Homo sapiens
ttttctgaggcctcc

SEQ ID NO: 985216 - DNA, 15 bp, Homo sapiens
gttttctgaggcctc

SEQ ID NO: 985217 - DNA, 15 bp, Homo sapiens
agttttctgaggcct

SEQ ID NO: 985218 - DNA, 15 bp, Homo sapiens
aagttttctgaggcc

SEQ ID NO: 985219 - DNA, 15 bp, Homo sapiens
taagttttctgaggc

SEQ ID NO: 985220 - DNA, 15 bp, Homo sapiens
gtaagttttctgagg

SEQ ID NO: 985221 - DNA, 15 bp, Homo sapiens
tgtaagttttctgag

SEQ ID NO: 985222 - DNA, 15 bp, Homo sapiens
ttgtaagttttctga

SEQ ID NO: 985223 - DNA, 15 bp, Homo sapiens
attgtaagttttctg

SEQ ID NO: 985224 - DNA, 15 bp, Homo sapiens
gattgtaagttttct

SEQ ID NO: 985225 - DNA, 15 bp, Homo sapiens
tgattgtaagttttc

SEQ ID NO: 985226 - DNA, 15 bp, Homo sapiens
atgattgtaagtttt

SEQ ID NO: 985227 - DNA, 15 bp, Homo sapiens
catgattgtaagttt

SEQ ID NO: 985228 - DNA, 15 bp, Homo sapiens
ccatgattgtaagtt

SEQ ID NO: 985229 - DNA, 15 bp, Homo sapiens
accatgattgtaagt

SEQ ID NO: 985230 - DNA, 15 bp, Homo sapiens
caccatgattgtaag

SEQ ID NO: 985231 - DNA, 15 bp, Homo sapiens
ccaccatgattgtaa

SEQ ID NO: 985232 - DNA, 15 bp, Homo sapiens
tccaccatgattgta

SEQ ID NO: 985233 - DNA, 15 bp, Homo sapiens
ttccaccatgattgt

SEQ ID NO: 985234 - DNA, 15 bp, Homo sapiens
cttccaccatgattg

SEQ ID NO: 985235 - DNA, 15 bp, Homo sapiens
tcttccaccatgatt

SEQ ID NO: 985236 - DNA, 15 bp, Homo sapiens
ttcttccaccatgat

SEQ ID NO: 985237 - DNA, 15 bp, Homo sapiens
tttcttccaccatga

SEQ ID NO: 985238 - DNA, 15 bp, Homo sapiens
ctttcttccaccatg

SEQ ID NO: 985239 - DNA, 15 bp, Homo sapiens
tctttcttccaccat

SEQ ID NO: 985240 - DNA, 15 bp, Homo sapiens
ctctttcttccacca

SEQ ID NO: 985241 - DNA, 15 bp, Homo sapiens
gctctttcttccacc

SEQ ID NO: 985242 - DNA, 15 bp, Homo sapiens
cgctctttcttccac

SEQ ID NO: 985243 - DNA, 15 bp, Homo sapiens
tcgctctttcttcca

SEQ ID NO: 985244 - DNA, 15 bp, Homo sapiens
ttcgctctttcttcc

SEQ ID NO: 985245 - DNA, 15 bp, Homo sapiens
cttcgctctttcttc

SEQ ID NO: 985246 - DNA, 15 bp, Homo sapiens
ccttcgctctttctt

SEQ ID NO: 985247 - DNA, 15 bp, Homo sapiens
cccttcgctctttct

SEQ ID NO: 985248 - DNA, 15 bp, Homo sapiens
ccccttcgctctttc

SEQ ID NO: 985249 - DNA, 15 bp, Homo sapiens
tccccttcgctcttt

SEQ ID NO: 985250 - DNA, 15 bp, Homo sapiens
ttccccttcgctctt

SEQ ID NO: 985251 - DNA, 15 bp, Homo sapiens
cttccccttcgctct

SEQ ID NO: 985252 - DNA, 15 bp, Homo sapiens
gcttccccttcgctc

SEQ ID NO: 985253 - DNA, 15 bp, Homo sapiens
tgcttccccttcgct

SEQ ID NO: 985254 - DNA, 15 bp, Homo sapiens
ttgcttccccttcgc

SEQ ID NO: 985255 - DNA, 15 bp, Homo sapiens
cttgcttccccttcg

SEQ ID NO: 985256 - DNA, 15 bp, Homo sapiens
gcttgcttccccttc

SEQ ID NO: 985257 - DNA, 15 bp, Homo sapiens
tgcttgcttcccctt

SEQ ID NO: 985258 - DNA, 15 bp, Homo sapiens
gtgcttgcttcccct

SEQ ID NO: 985259 - DNA, 15 bp, Homo sapiens
tgtgcttgcttcccc

SEQ ID NO: 985260 - DNA, 15 bp, Homo sapiens
atgtgcttgcttccc

SEQ ID NO: 985261 - DNA, 15 bp, Homo sapiens
gatgtgcttgcttcc

SEQ ID NO: 985262 - DNA, 15 bp, Homo sapiens
tgatgtgcttgcttc

SEQ ID NO: 985263 - DNA, 15 bp, Homo sapiens
gtgatgtgcttgctt

SEQ ID NO: 985264 - DNA, 15 bp, Homo sapiens
tgtgatgtgcttgct

SEQ ID NO: 985265 - DNA, 15 bp, Homo sapiens
gtgtgatgtgcttgc

SEQ ID NO: 985266 - DNA, 15 bp, Homo sapiens
tgtgtgatgtgcttg

SEQ ID NO: 985267 - DNA, 15 bp, Homo sapiens
ctgtgtgatgtgctt

SEQ ID NO: 985268 - DNA, 15 bp, Homo sapiens
gctgtgtgatgtgct

SEQ ID NO: 985269 - DNA, 15 bp, Homo sapiens
tgctgtgtgatgtgc

SEQ ID NO: 985270 - DNA, 15 bp, Homo sapiens
ctgctgtgtgatgtg

SEQ ID NO: 985271 - DNA, 15 bp, Homo sapiens
gctgctgtgtgatgt

SEQ ID NO: 985272 - DNA, 15 bp, Homo sapiens
tgctgctgtgtgatg

SEQ ID NO: 985273 - DNA, 15 bp, Homo sapiens
ctgctgctgtgtgat

SEQ ID NO: 985274 - DNA, 15 bp, Homo sapiens
cctgctgctgtgtga

SEQ ID NO: 985275 - DNA, 15 bp, Homo sapiens
tcctgctgctgtgtg

SEQ ID NO: 985276 - DNA, 15 bp, Homo sapiens
ctcctgctgctgtgt

SEQ ID NO: 985277 - DNA, 15 bp, Homo sapiens
tctcctgctgctgtg

SEQ ID NO: 985278 - DNA, 15 bp, Homo sapiens
ctctcctgctgctgt

SEQ ID NO: 985279 - DNA, 15 bp, Homo sapiens
tctctcctgctgctg

SEQ ID NO: 985280 - DNA, 15 bp, Homo sapiens
ctctctcctgctgct

SEQ ID NO: 985281 - DNA, 15 bp, Homo sapiens
tctctctcctgctgc

SEQ ID NO: 985282 - DNA, 15 bp, Homo sapiens
ctctctctcctgctg

SEQ ID NO: 985283 - DNA, 15 bp, Homo sapiens
tctctctctcctgct

SEQ ID NO: 985284 - DNA, 15 bp, Homo sapiens
ctctctctctcctgc

SEQ ID NO: 985285 - DNA, 15 bp, Homo sapiens
tctctctctctcctg

SEQ ID NO: 985286 - DNA, 15 bp, Homo sapiens
ctctctctctctcct

SEQ ID NO: 985287 - DNA, 15 bp, Homo sapiens
tctctctctctctcc

SEQ ID NO: 985288 - DNA, 15 bp, Homo sapiens
ttctctctctctctc

SEQ ID NO: 985289 - DNA, 15 bp, Homo sapiens
tttctctctctctct

SEQ ID NO: 985290 - DNA, 15 bp, Homo sapiens
ctttctctctctctc

SEQ ID NO: 985291 - DNA, 15 bp, Homo sapiens
tctttctctctctct

SEQ ID NO: 985292 - DNA, 15 bp, Homo sapiens
ctctttctctctctc

SEQ ID NO: 985293 - DNA, 15 bp, Homo sapiens
tctctttctctctct

SEQ ID NO: 985294 - DNA, 15 bp, Homo sapiens
ctctctttctctctc

SEQ ID NO: 985295 - DNA, 15 bp, Homo sapiens
tctctctttctctct

SEQ ID NO: 985296 - DNA, 15 bp, Homo sapiens
ctctctctttctctc

SEQ ID NO: 985297 - DNA, 15 bp, Homo sapiens
tctctctctttctct

SEQ ID NO: 985298 - DNA, 15 bp, Homo sapiens
ctctctctctttctc

SEQ ID NO: 985299 - DNA, 15 bp, Homo sapiens
tctctctctctttct

SEQ ID NO: 985300 - DNA, 15 bp, Homo sapiens
ctctctctctctttc

SEQ ID NO: 985301 - DNA, 15 bp, Homo sapiens
tctctctctctcttt

SEQ ID NO: 985302 - DNA, 15 bp, Homo sapiens
ctctctctctctctt

SEQ ID NO: 985303 - DNA, 15 bp, Homo sapiens
tctctctctctctct

SEQ ID NO: 985304 - DNA, 15 bp, Homo sapiens
attctctctctctct

SEQ ID NO: 985305 - DNA, 15 bp, Homo sapiens
tattctctctctctc

SEQ ID NO: 985306 - DNA, 15 bp, Homo sapiens
atattctctctctct

SEQ ID NO: 985307 - DNA, 15 bp, Homo sapiens
tatattctctctctc

SEQ ID NO: 985308 - DNA, 15 bp, Homo sapiens
ctatattctctctct

SEQ ID NO: 985309 - DNA, 15 bp, Homo sapiens
cctatattctctctc

SEQ ID NO: 985310 - DNA, 15 bp, Homo sapiens
ccctatattctctct

SEQ ID NO: 985311 - DNA, 15 bp, Homo sapiens
cccctatattctctc

SEQ ID NO: 985312 - DNA, 15 bp, Homo sapiens
tcccctatattctct

SEQ ID NO: 985313 - DNA, 15 bp, Homo sapiens
ttcccctatattctc

SEQ ID NO: 985314 - DNA, 15 bp, Homo sapiens
cttcccctatattct

SEQ ID NO: 985315 - DNA, 15 bp, Homo sapiens
acttcccctatattc

SEQ ID NO: 985316 - DNA, 15 bp, Homo sapiens
cacttcccctatatt

SEQ ID NO: 985317 - DNA, 15 bp, Homo sapiens
gcacttcccctatat

SEQ ID NO: 985318 - DNA, 15 bp, Homo sapiens
agcacttcccctata

SEQ ID NO: 985319 - DNA, 15 bp, Homo sapiens
tagcacttcccctat

SEQ ID NO: 985320 - DNA, 15 bp, Homo sapiens
gtagcacttccccta

SEQ ID NO: 985321 - DNA, 15 bp, Homo sapiens
tgtagcacttcccct

SEQ ID NO: 985322 - DNA, 15 bp, Homo sapiens
gtgtagcacttcccc

SEQ ID NO: 985323 - DNA, 15 bp, Homo sapiens
tgtgtagcacttccc

SEQ ID NO: 985324 - DNA, 15 bp, Homo sapiens
gtgtgtagcacttcc

SEQ ID NO: 985325 - DNA, 15 bp, Homo sapiens
agtgtgtagcacttc

SEQ ID NO: 985326 - DNA, 15 bp, Homo sapiens
aagtgtgtagcactt

SEQ ID NO: 985327 - DNA, 15 bp, Homo sapiens
aaagtgtgtagcact

SEQ ID NO: 985328 - DNA, 15 bp, Homo sapiens
gaaagtgtgtagcac

SEQ ID NO: 985329 - DNA, 15 bp, Homo sapiens
tgaaagtgtgtagca

SEQ ID NO: 985330 - DNA, 15 bp, Homo sapiens
ttgaaagtgtgtagc

SEQ ID NO: 985331 - DNA, 15 bp, Homo sapiens
gttgaaagtgtgtag

SEQ ID NO: 985332 - DNA, 15 bp, Homo sapiens
ggttgaaagtgtgta

SEQ ID NO: 985333 - DNA, 15 bp, Homo sapiens
tggttgaaagtgtgt

SEQ ID NO: 985334 - DNA, 15 bp, Homo sapiens
ctggttgaaagtgtg

SEQ ID NO: 985335 - DNA, 15 bp, Homo sapiens
tctggttgaaagtgt

SEQ ID NO: 985336 - DNA, 15 bp, Homo sapiens
atctggttgaaagtg

SEQ ID NO: 985337 - DNA, 15 bp, Homo sapiens
gatctggttgaaagt

SEQ ID NO: 985338 - DNA, 15 bp, Homo sapiens
agatctggttgaaag

SEQ ID NO: 985339 - DNA, 15 bp, Homo sapiens
aagatctggttgaaa

SEQ ID NO: 985340 - DNA, 15 bp, Homo sapiens
caagatctggttgaa

SEQ ID NO: 985341 - DNA, 15 bp, Homo sapiens
acaagatctggttga

SEQ ID NO: 985342 - DNA, 15 bp, Homo sapiens
cacaagatctggttg

SEQ ID NO: 985343 - DNA, 15 bp, Homo sapiens
tcacaagatctggtt

SEQ ID NO: 985344 - DNA, 15 bp, Homo sapiens
ctcacaagatctggt

SEQ ID NO: 985345 - DNA, 15 bp, Homo sapiens
tctcacaagatctgg

SEQ ID NO: 985346 - DNA, 15 bp, Homo sapiens
ttctcacaagatctg

SEQ ID NO: 985347 - DNA, 15 bp, Homo sapiens
attctcacaagatct

SEQ ID NO: 985348 - DNA, 15 bp, Homo sapiens
aattctcacaagatc

SEQ ID NO: 985349 - DNA, 15 bp, Homo sapiens
gaattctcacaagat

SEQ ID NO: 985350 - DNA, 15 bp, Homo sapiens
tgaattctcacaaga

SEQ ID NO: 985351 - DNA, 15 bp, Homo sapiens
gtgaattctcacaag

SEQ ID NO: 985352 - DNA, 15 bp, Homo sapiens
ggtgaattctcacaa

SEQ ID NO: 985353 - DNA, 15 bp, Homo sapiens
aggtgaattctcaca

SEQ ID NO: 985354 - DNA, 15 bp, Homo sapiens
taggtgaattctcac

SEQ ID NO: 985355 - DNA, 15 bp, Homo sapiens
gtaggtgaattctca

SEQ ID NO: 985356 - DNA, 15 bp, Homo sapiens
agtaggtgaattctc

SEQ ID NO: 985357 - DNA, 15 bp, Homo sapiens
tagtaggtgaattct

SEQ ID NO: 985358 - DNA, 15 bp, Homo sapiens
atagtaggtgaattc

SEQ ID NO: 985359 - DNA, 15 bp, Homo sapiens
gatagtaggtgaatt

SEQ ID NO: 985360 - DNA, 15 bp, Homo sapiens
tgatagtaggtgaat

SEQ ID NO: 985361 - DNA, 15 bp, Homo sapiens
atgatagtaggtgaa

SEQ ID NO: 985362 - DNA, 15 bp, Homo sapiens
catgatagtaggtga

SEQ ID NO: 985363 - DNA, 15 bp, Homo sapiens
tcatgatagtaggtg

SEQ ID NO: 985364 - DNA, 15 bp, Homo sapiens
ctcatgatagtaggt

SEQ ID NO: 985365 - DNA, 15 bp, Homo sapiens
tctcatgatagtagg

SEQ ID NO: 985366 - DNA, 15 bp, Homo sapiens
ttctcatgatagtag

SEQ ID NO: 985367 - DNA, 15 bp, Homo sapiens
gttctcatgatagta

SEQ ID NO: 985368 - DNA, 15 bp, Homo sapiens
tgttctcatgatagt

SEQ ID NO: 985369 - DNA, 15 bp, Homo sapiens
ctgttctcatgatag

SEQ ID NO: 985370 - DNA, 15 bp, Homo sapiens
gctgttctcatgata

SEQ ID NO: 985371 - DNA, 15 bp, Homo sapiens
tgctgttctcatgat

SEQ ID NO: 985372 - DNA, 15 bp, Homo sapiens
ttgctgttctcatga

SEQ ID NO: 985373 - DNA, 15 bp, Homo sapiens
cttgctgttctcatg

SEQ ID NO: 985374 - DNA, 15 bp, Homo sapiens
ccttgctgttctcat

SEQ ID NO: 985375 - DNA, 15 bp, Homo sapiens
cccttgctgttctca

SEQ ID NO: 985376 - DNA, 15 bp, Homo sapiens
tcccttgctgttctc

SEQ ID NO: 985377 - DNA, 15 bp, Homo sapiens
atcccttgctgttct

SEQ ID NO: 985378 - DNA, 15 bp, Homo sapiens
tatcccttgctgttc

SEQ ID NO: 985379 - DNA, 15 bp, Homo sapiens
ttatcccttgctgtt

SEQ ID NO: 985380 - DNA, 15 bp, Homo sapiens
cttatcccttgctgt

SEQ ID NO: 985381 - DNA, 15 bp, Homo sapiens
acttatcccttgctg

SEQ ID NO: 985382 - DNA, 15 bp, Homo sapiens
gacttatcccttgct

SEQ ID NO: 985383 - DNA, 15 bp, Homo sapiens
agacttatcccttgc

SEQ ID NO: 985384 - DNA, 15 bp, Homo sapiens
cagacttatcccttg

SEQ ID NO: 985385 - DNA, 15 bp, Homo sapiens
gcagacttatccctt

SEQ ID NO: 985386 - DNA, 15 bp, Homo sapiens
ggcagacttatccct

SEQ ID NO: 985387 - DNA, 15 bp, Homo sapiens
aggcagacttatccc

SEQ ID NO: 985388 - DNA, 15 bp, Homo sapiens
gaggcagacttatcc

SEQ ID NO: 985389 - DNA, 15 bp, Homo sapiens
ggaggcagacttatc

SEQ ID NO: 985390 - DNA, 15 bp, Homo sapiens
tggaggcagacttat

SEQ ID NO: 985391 - DNA, 15 bp, Homo sapiens
atggaggcagactta

SEQ ID NO: 985392 - DNA, 15 bp, Homo sapiens
catggaggcagactt

SEQ ID NO: 985393 - DNA, 15 bp, Homo sapiens
tcatggaggcagact

SEQ ID NO: 985394 - DNA, 15 bp, Homo sapiens
atcatggaggcagac

SEQ ID NO: 985395 - DNA, 15 bp, Homo sapiens
aatcatggaggcaga

SEQ ID NO: 985396 - DNA, 15 bp, Homo sapiens
gaatcatggaggcag

SEQ ID NO: 985397 - DNA, 15 bp, Homo sapiens
tgaatcatggaggca

SEQ ID NO: 985398 - DNA, 15 bp, Homo sapiens
ctgaatcatggaggc

SEQ ID NO: 985399 - DNA, 15 bp, Homo sapiens
actgaatcatggagg

SEQ ID NO: 985400 - DNA, 15 bp, Homo sapiens
gactgaatcatggag

SEQ ID NO: 985401 - DNA, 15 bp, Homo sapiens
tgactgaatcatgga

SEQ ID NO: 985402 - DNA, 15 bp, Homo sapiens
gtgactgaatcatgg

SEQ ID NO: 985403 - DNA, 15 bp, Homo sapiens
ggtgactgaatcatg

SEQ ID NO: 985404 - DNA, 15 bp, Homo sapiens
aggtgactgaatcat

SEQ ID NO: 985405 - DNA, 15 bp, Homo sapiens
gaggtgactgaatca

SEQ ID NO: 985406 - DNA, 15 bp, Homo sapiens
ggaggtgactgaatc

SEQ ID NO: 985407 - DNA, 15 bp, Homo sapiens
aggaggtgactgaat

SEQ ID NO: 985408 - DNA, 15 bp, Homo sapiens
taggaggtgactgaa

SEQ ID NO: 985409 - DNA, 15 bp, Homo sapiens
gtaggaggtgactga

SEQ ID NO: 985410 - DNA, 15 bp, Homo sapiens
ggtaggaggtgactg

SEQ ID NO: 985411 - DNA, 15 bp, Homo sapiens
tggtaggaggtgact

SEQ ID NO: 985412 - DNA, 15 bp, Homo sapiens
ctggtaggaggtgac

SEQ ID NO: 985413 - DNA, 15 bp, Homo sapiens
cctggtaggaggtga

SEQ ID NO: 985414 - DNA, 15 bp, Homo sapiens
gcctggtaggaggtg

SEQ ID NO: 985415 - DNA, 15 bp, Homo sapiens
ggcctggtaggaggt

SEQ ID NO: 985416 - DNA, 15 bp, Homo sapiens
gggcctggtaggagg

SEQ ID NO: 985417 - DNA, 15 bp, Homo sapiens
ggggcctggtaggag

SEQ ID NO: 985418 - DNA, 15 bp, Homo sapiens
aggggcctggtagga

SEQ ID NO: 985419 - DNA, 15 bp, Homo sapiens
aaggggcctggtagg

SEQ ID NO: 985420 - DNA, 15 bp, Homo sapiens
gaaggggcctggtag

SEQ ID NO: 985421 - DNA, 15 bp, Homo sapiens
agaaggggcctggta

SEQ ID NO: 985422 - DNA, 15 bp, Homo sapiens
gagaaggggcctggt

SEQ ID NO: 985423 - DNA, 15 bp, Homo sapiens
ggagaaggggcctgg

SEQ ID NO: 985424 - DNA, 15 bp, Homo sapiens
tggagaaggggcctg

SEQ ID NO: 985425 - DNA, 15 bp, Homo sapiens
ttggagaaggggcct

SEQ ID NO: 985426 - DNA, 15 bp, Homo sapiens
gttggagaaggggcc

SEQ ID NO: 985427 - DNA, 15 bp, Homo sapiens
tgttggagaaggggc

SEQ ID NO: 985428 - DNA, 15 bp, Homo sapiens
gtgttggagaagggg

SEQ ID NO: 985429 - DNA, 15 bp, Homo sapiens
tgtgttggagaaggg

SEQ ID NO: 985430 - DNA, 15 bp, Homo sapiens
atgtgttggagaagg

SEQ ID NO: 985431 - DNA, 15 bp, Homo sapiens
catgtgttggagaag

SEQ ID NO: 985432 - DNA, 15 bp, Homo sapiens
acatgtgttggagaa

SEQ ID NO: 985433 - DNA, 15 bp, Homo sapiens
gacatgtgttggaga

SEQ ID NO: 985434 - DNA, 15 bp, Homo sapiens
cgacatgtgttggag

SEQ ID NO: 985435 - DNA, 15 bp, Homo sapiens
tcgacatgtgttgga

SEQ ID NO: 985436 - DNA, 15 bp, Homo sapiens
gtcgacatgtgttgg

SEQ ID NO: 985437 - DNA, 15 bp, Homo sapiens
cgtcgacatgtgttg

SEQ ID NO: 985438 - DNA, 15 bp, Homo sapiens
acgtcgacatgtgtt

SEQ ID NO: 985439 - DNA, 15 bp, Homo sapiens
cacgtcgacatgtgt

SEQ ID NO: 985440 - DNA, 15 bp, Homo sapiens
gcacgtcgacatgtg

SEQ ID NO: 985441 - DNA, 15 bp, Homo sapiens
agcacgtcgacatgt

SEQ ID NO: 985442 - DNA, 15 bp, Homo sapiens
tagcacgtcgacatg

SEQ ID NO: 985443 - DNA, 15 bp, Homo sapiens
atagcacgtcgacat

SEQ ID NO: 985444 - DNA, 15 bp, Homo sapiens
aatagcacgtcgaca

SEQ ID NO: 985445 - DNA, 15 bp, Homo sapiens
aaatagcacgtcgac

SEQ ID NO: 985446 - DNA, 15 bp, Homo sapiens
caaatagcacgtcga

SEQ ID NO: 985447 - DNA, 15 bp, Homo sapiens
ccaaatagcacgtcg

SEQ ID NO: 985448 - DNA, 15 bp, Homo sapiens
cccaaatagcacgtc

SEQ ID NO: 985449 - DNA, 15 bp, Homo sapiens
acccaaatagcacgt

SEQ ID NO: 985450 - DNA, 15 bp, Homo sapiens
cacccaaatagcacg

SEQ ID NO: 985451 - DNA, 15 bp, Homo sapiens
ccacccaaatagcac

SEQ ID NO: 985452 - DNA, 15 bp, Homo sapiens
cccacccaaatagca

SEQ ID NO: 985453 - DNA, 15 bp, Homo sapiens
ccccacccaaatagc

SEQ ID NO: 985454 - DNA, 15 bp, Homo sapiens
tccccacccaaatag

SEQ ID NO: 985455 - DNA, 15 bp, Homo sapiens
gtccccacccaaata

SEQ ID NO: 985456 - DNA, 15 bp, Homo sapiens
tgtccccacccaaat

SEQ ID NO: 985457 - DNA, 15 bp, Homo sapiens
gtgtccccacccaaa

SEQ ID NO: 985458 - DNA, 15 bp, Homo sapiens
tgtgtccccacccaa

SEQ ID NO: 985459 - DNA, 15 bp, Homo sapiens
ctgtgtccccaccca

SEQ ID NO: 985460 - DNA, 15 bp, Homo sapiens
tctgtgtccccaccc

SEQ ID NO: 985461 - DNA, 15 bp, Homo sapiens
gtctgtgtccccacc

SEQ ID NO: 985462 - DNA, 15 bp, Homo sapiens
ggtctgtgtccccac

SEQ ID NO: 985463 - DNA, 15 bp, Homo sapiens
gggtctgtgtcccca

SEQ ID NO: 985464 - DNA, 15 bp, Homo sapiens
tgggtctgtgtcccc

SEQ ID NO: 985465 - DNA, 15 bp, Homo sapiens
ttgggtctgtgtccc

SEQ ID NO: 985466 - DNA, 15 bp, Homo sapiens
tttgggtctgtgtcc

SEQ ID NO: 985467 - DNA, 15 bp, Homo sapiens
gtttgggtctgtgtc

SEQ ID NO: 985468 - DNA, 15 bp, Homo sapiens
ggtttgggtctgtgt

SEQ ID NO: 985469 - DNA, 15 bp, Homo sapiens
tggtttgggtctgtg

SEQ ID NO: 985470 - DNA, 15 bp, Homo sapiens
atggtttgggtctgt

SEQ ID NO: 985471 - DNA, 15 bp, Homo sapiens
tatggtttgggtctg

SEQ ID NO: 985472 - DNA, 15 bp, Homo sapiens
atatggtttgggtct

SEQ ID NO: 985473 - DNA, 15 bp, Homo sapiens
aatatggtttgggtc

SEQ ID NO: 985474 - DNA, 15 bp, Homo sapiens
taatatggtttgggt

SEQ ID NO: 985475 - DNA, 15 bp, Homo sapiens
gtaatatggtttggg

SEQ ID NO: 985476 - DNA, 15 bp, Homo sapiens
ggtaatatggtttgg

SEQ ID NO: 985477 - DNA, 15 bp, Homo sapiens
tggtaatatggtttg

SEQ ID NO: 985478 - DNA, 15 bp, Homo sapiens
ctggtaatatggttt

SEQ ID NO: 985479 - DNA, 15 bp, Homo sapiens
cctggtaatatggtt

SEQ ID NO: 985480 - DNA, 15 bp, Homo sapiens
ccctggtaatatggt

SEQ ID NO: 985481 - DNA, 15 bp, Homo sapiens
gccctggtaatatgg

SEQ ID NO: 985482 - DNA, 15 bp, Homo sapiens
tgccctggtaatatg

SEQ ID NO: 985483 - DNA, 15 bp, Homo sapiens
gtgccctggtaatat

SEQ ID NO: 985484 - DNA, 15 bp, Homo sapiens
agtgccctggtaata

SEQ ID NO: 985485 - DNA, 15 bp, Homo sapiens
cagtgccctggtaat

SEQ ID NO: 985486 - DNA, 15 bp, Homo sapiens
ccagtgccctggtaa

SEQ ID NO: 985487 - DNA, 15 bp, Homo sapiens
tccagtgccctggta

SEQ ID NO: 985488 - DNA, 15 bp, Homo sapiens
ctccagtgccctggt

SEQ ID NO: 985489 - DNA, 15 bp, Homo sapiens
tctccagtgccctgg

SEQ ID NO: 985490 - DNA, 15 bp, Homo sapiens
ttctccagtgccctg

SEQ ID NO: 985491 - DNA, 15 bp, Homo sapiens
tttctccagtgccct

SEQ ID NO: 985492 - DNA, 15 bp, Homo sapiens
gtttctccagtgccc

SEQ ID NO: 985493 - DNA, 15 bp, Homo sapiens
tgtttctccagtgcc

SEQ ID NO: 985494 - DNA, 15 bp, Homo sapiens
gtgtttctccagtgc

SEQ ID NO: 985495 - DNA, 15 bp, Homo sapiens
tgtgtttctccagtg

SEQ ID NO: 985496 - DNA, 15 bp, Homo sapiens
ctgtgtttctccagt

SEQ ID NO: 985497 - DNA, 15 bp, Homo sapiens
tctgtgtttctccag

SEQ ID NO: 985498 - DNA, 15 bp, Homo sapiens
ctctgtgtttctcca

SEQ ID NO: 985499 - DNA, 15 bp, Homo sapiens
cctctgtgtttctcc

SEQ ID NO: 985500 - DNA, 15 bp, Homo sapiens
ccctctgtgtttctc

SEQ ID NO: 985501 - DNA, 15 bp, Homo sapiens
cccctctgtgtttct

SEQ ID NO: 985502 - DNA, 15 bp, Homo sapiens
tcccctctgtgtttc

SEQ ID NO: 985503 - DNA, 15 bp, Homo sapiens
ttcccctctgtgttt

SEQ ID NO: 985504 - DNA, 15 bp, Homo sapiens
tttcccctctgtgtt

SEQ ID NO: 985505 - DNA, 15 bp, Homo sapiens
ctttcccctctgtgt

SEQ ID NO: 985506 - DNA, 15 bp, Homo sapiens
tctttcccctctgtg

SEQ ID NO: 985507 - DNA, 15 bp, Homo sapiens
ttctttcccctctgt

SEQ ID NO: 985508 - DNA, 15 bp, Homo sapiens
gttctttcccctctg

SEQ ID NO: 985509 - DNA, 15 bp, Homo sapiens
ggttctttcccctct

SEQ ID NO: 985510 - DNA, 15 bp, Homo sapiens
tggttctttcccctc

SEQ ID NO: 985511 - DNA, 15 bp, Homo sapiens
ctggttctttcccct

SEQ ID NO: 985512 - DNA, 15 bp, Homo sapiens
gctggttctttcccc

SEQ ID NO: 985513 - DNA, 15 bp, Homo sapiens
ggctggttctttccc

SEQ ID NO: 985514 - DNA, 15 bp, Homo sapiens
tggctggttctttcc

SEQ ID NO: 985515 - DNA, 15 bp, Homo sapiens
ttggctggttctttc

SEQ ID NO: 985516 - DNA, 15 bp, Homo sapiens
cttggctggttcttt

SEQ ID NO: 985517 - DNA, 15 bp, Homo sapiens
ccttggctggttctt

SEQ ID NO: 985518 - DNA, 15 bp, Homo sapiens
tccttggctggttct

SEQ ID NO: 985519 - DNA, 15 bp, Homo sapiens
ctccttggctggttc

SEQ ID NO: 985520 - DNA, 15 bp, Homo sapiens
actccttggctggtt

SEQ ID NO: 985521 - DNA, 15 bp, Homo sapiens
cactccttggctggt

SEQ ID NO: 985522 - DNA, 15 bp, Homo sapiens
tcactccttggctgg

SEQ ID NO: 985523 - DNA, 15 bp, Homo sapiens
ctcactccttggctg

SEQ ID NO: 985524 - DNA, 15 bp, Homo sapiens
tctcactccttggct

SEQ ID NO: 985525 - DNA, 15 bp, Homo sapiens
atctcactccttggc

SEQ ID NO: 985526 - DNA, 15 bp, Homo sapiens
catctcactccttgg

SEQ ID NO: 985527 - DNA, 15 bp, Homo sapiens
ccatctcactccttg

SEQ ID NO: 985528 - DNA, 15 bp, Homo sapiens
tccatctcactcctt

SEQ ID NO: 985529 - DNA, 15 bp, Homo sapiens
ctccatctcactcct

SEQ ID NO: 985530 - DNA, 15 bp, Homo sapiens
tctccatctcactcc

SEQ ID NO: 985531 - DNA, 15 bp, Homo sapiens
ttctccatctcactc

SEQ ID NO: 985532 - DNA, 15 bp, Homo sapiens
gttctccatctcact

SEQ ID NO: 985533 - DNA, 15 bp, Homo sapiens
tgttctccatctcac

SEQ ID NO: 985534 - DNA, 15 bp, Homo sapiens
ttgttctccatctca

SEQ ID NO: 985535 - DNA, 15 bp, Homo sapiens
cttgttctccatctc

SEQ ID NO: 985536 - DNA, 15 bp, Homo sapiens
ccttgttctccatct

SEQ ID NO: 985537 - DNA, 15 bp, Homo sapiens
tccttgttctccatc

SEQ ID NO: 985538 - DNA, 15 bp, Homo sapiens
ctccttgttctccat

SEQ ID NO: 985539 - DNA, 15 bp, Homo sapiens
cctccttgttctcca

SEQ ID NO: 985540 - DNA, 15 bp, Homo sapiens
tcctccttgttctcc

SEQ ID NO: 985541 - DNA, 15 bp, Homo sapiens
gtcctccttgttctc

SEQ ID NO: 985542 - DNA, 15 bp, Homo sapiens
agtcctccttgttct

SEQ ID NO: 985543 - DNA, 15 bp, Homo sapiens
aagtcctccttgttc

SEQ ID NO: 985544 - DNA, 15 bp, Homo sapiens
gaagtcctccttgtt

SEQ ID NO: 985545 - DNA, 15 bp, Homo sapiens
agaagtcctccttgt

SEQ ID NO: 985546 - DNA, 15 bp, Homo sapiens
aagaagtcctccttg

SEQ ID NO: 985547 - DNA, 15 bp, Homo sapiens
caagaagtcctcctt

SEQ ID NO: 985548 - DNA, 15 bp, Homo sapiens
tcaagaagtcctcct

SEQ ID NO: 985549 - DNA, 15 bp, Homo sapiens
ttcaagaagtcctcc

SEQ ID NO: 985550 - DNA, 15 bp, Homo sapiens
tttcaagaagtcctc

SEQ ID NO: 985551 - DNA, 15 bp, Homo sapiens
gtttcaagaagtcct

SEQ ID NO: 985552 - DNA, 15 bp, Homo sapiens
tgtttcaagaagtcc

SEQ ID NO: 985553 - DNA, 15 bp, Homo sapiens
ctgtttcaagaagtc

SEQ ID NO: 985554 - DNA, 15 bp, Homo sapiens
tctgtttcaagaagt

SEQ ID NO: 985555 - DNA, 15 bp, Homo sapiens
atctgtttcaagaag

SEQ ID NO: 985556 - DNA, 15 bp, Homo sapiens
catctgtttcaagaa

SEQ ID NO: 985557 - DNA, 15 bp, Homo sapiens
tcatctgtttcaaga

SEQ ID NO: 985558 - DNA, 15 bp, Homo sapiens
gtcatctgtttcaag

SEQ ID NO: 985559 - DNA, 15 bp, Homo sapiens
tgtcatctgtttcaa

SEQ ID NO: 985560 - DNA, 15 bp, Homo sapiens
atgtcatctgtttca

SEQ ID NO: 985561 - DNA, 15 bp, Homo sapiens
gatgtcatctgtttc

SEQ ID NO: 985562 - DNA, 15 bp, Homo sapiens
ggatgtcatctgttt

SEQ ID NO: 985563 - DNA, 15 bp, Homo sapiens
tggatgtcatctgtt

SEQ ID NO: 985564 - DNA, 15 bp, Homo sapiens
ttggatgtcatctgt

SEQ ID NO: 985565 - DNA, 15 bp, Homo sapiens
tttggatgtcatctg

SEQ ID NO: 985566 - DNA, 15 bp, Homo sapiens
gtttggatgtcatct

SEQ ID NO: 985567 - DNA, 15 bp, Homo sapiens
agtttggatgtcatc

SEQ ID NO: 985568 - DNA, 15 bp, Homo sapiens
cagtttggatgtcat

SEQ ID NO: 985569 - DNA, 15 bp, Homo sapiens
ccagtttggatgtca

SEQ ID NO: 985570 - DNA, 15 bp, Homo sapiens
cccagtttggatgtc

SEQ ID NO: 985571 - DNA, 15 bp, Homo sapiens
acccagtttggatgt

SEQ ID NO: 985572 - DNA, 15 bp, Homo sapiens
gacccagtttggatg

SEQ ID NO: 985573 - DNA, 15 bp, Homo sapiens
ggacccagtttggat

SEQ ID NO: 985574 - DNA, 15 bp, Homo sapiens
aggacccagtttgga

SEQ ID NO: 985575 - DNA, 15 bp, Homo sapiens
caggacccagtttgg

SEQ ID NO: 985576 - DNA, 15 bp, Homo sapiens
tcaggacccagtttg

SEQ ID NO: 985577 - DNA, 15 bp, Homo sapiens
ttcaggacccagttt

SEQ ID NO: 985578 - DNA, 15 bp, Homo sapiens
tttcaggacccagtt

SEQ ID NO: 985579 - DNA, 15 bp, Homo sapiens
ctttcaggacccagt

SEQ ID NO: 985580 - DNA, 15 bp, Homo sapiens
gctttcaggacccag

SEQ ID NO: 985581 - DNA, 15 bp, Homo sapiens
agctttcaggaccca

SEQ ID NO: 985582 - DNA, 15 bp, Homo sapiens
cagctttcaggaccc

SEQ ID NO: 985583 - DNA, 15 bp, Homo sapiens
tcagctttcaggacc

SEQ ID NO: 985584 - DNA, 15 bp, Homo sapiens
ttcagctttcaggac

SEQ ID NO: 985585 - DNA, 15 bp, Homo sapiens
attcagctttcagga

SEQ ID NO: 985586 - DNA, 15 bp, Homo sapiens
tattcagctttcagg

SEQ ID NO: 985587 - DNA, 15 bp, Homo sapiens
ctattcagctttcag

SEQ ID NO: 985588 - DNA, 15 bp, Homo sapiens
tctattcagctttca

SEQ ID NO: 985589 - DNA, 15 bp, Homo sapiens
ctctattcagctttc

SEQ ID NO: 985590 - DNA, 15 bp, Homo sapiens
tctctattcagcttt

SEQ ID NO: 985591 - DNA, 15 bp, Homo sapiens
atctctattcagctt

SEQ ID NO: 985592 - DNA, 15 bp, Homo sapiens
aatctctattcagct

SEQ ID NO: 985593 - DNA, 15 bp, Homo sapiens
taatctctattcagc

SEQ ID NO: 985594 - DNA, 15 bp, Homo sapiens
ctaatctctattcag

SEQ ID NO: 985595 - DNA, 15 bp, Homo sapiens
tctaatctctattca

SEQ ID NO: 985596 - DNA, 15 bp, Homo sapiens
gtctaatctctattc

SEQ ID NO: 985597 - DNA, 15 bp, Homo sapiens
tgtctaatctctatt

SEQ ID NO: 985598 - DNA, 15 bp, Homo sapiens
ctgtctaatctctat

SEQ ID NO: 985599 - DNA, 15 bp, Homo sapiens
cctgtctaatctcta

SEQ ID NO: 985600 - DNA, 15 bp, Homo sapiens
ccctgtctaatctct

SEQ ID NO: 985601 - DNA, 15 bp, Homo sapiens
cccctgtctaatctc

SEQ ID NO: 985602 - DNA, 15 bp, Homo sapiens
tcccctgtctaatct

SEQ ID NO: 985603 - DNA, 15 bp, Homo sapiens
ctcccctgtctaatc

SEQ ID NO: 985604 - DNA, 15 bp, Homo sapiens
cctcccctgtctaat

SEQ ID NO: 985605 - DNA, 15 bp, Homo sapiens
tcctcccctgtctaa

SEQ ID NO: 985606 - DNA, 15 bp, Homo sapiens
ctcctcccctgtcta

SEQ ID NO: 985607 - DNA, 15 bp, Homo sapiens
cctcctcccctgtct

SEQ ID NO: 985608 - DNA, 15 bp, Homo sapiens
ccctcctcccctgtc

SEQ ID NO: 985609 - DNA, 15 bp, Homo sapiens
cccctcctcccctgt

SEQ ID NO: 985610 - DNA, 15 bp, Homo sapiens
gcccctcctcccctg

SEQ ID NO: 985611 - DNA, 15 bp, Homo sapiens
tgcccctcctcccct

SEQ ID NO: 985612 - DNA, 15 bp, Homo sapiens
ctgcccctcctcccc

SEQ ID NO: 985613 - DNA, 15 bp, Homo sapiens
gctgcccctcctccc

SEQ ID NO: 985614 - DNA, 15 bp, Homo sapiens
agctgcccctcctcc

SEQ ID NO: 985615 - DNA, 15 bp, Homo sapiens
tagctgcccctcctc

SEQ ID NO: 985616 - DNA, 15 bp, Homo sapiens
ttagctgcccctcct

SEQ ID NO: 985617 - DNA, 15 bp, Homo sapiens
tttagctgcccctcc

SEQ ID NO: 985618 - DNA, 15 bp, Homo sapiens
ctttagctgcccctc

SEQ ID NO: 985619 - DNA, 15 bp, Homo sapiens
tctttagctgcccct

SEQ ID NO: 985620 - DNA, 15 bp, Homo sapiens
atctttagctgcccc

SEQ ID NO: 985621 - DNA, 15 bp, Homo sapiens
catctttagctgccc

SEQ ID NO: 985622 - DNA, 15 bp, Homo sapiens
ccatctttagctgcc

SEQ ID NO: 985623 - DNA, 15 bp, Homo sapiens
gccatctttagctgc

SEQ ID NO: 985624 - DNA, 15 bp, Homo sapiens
agccatctttagctg

SEQ ID NO: 985625 - DNA, 15 bp, Homo sapiens
gagccatctttagct

SEQ ID NO: 985626 - DNA, 15 bp, Homo sapiens
tgagccatctttagc

SEQ ID NO: 985627 - DNA, 15 bp, Homo sapiens
ctgagccatctttag

SEQ ID NO: 985628 - DNA, 15 bp, Homo sapiens
cctgagccatcttta

SEQ ID NO: 985629 - DNA, 15 bp, Homo sapiens
gcctgagccatcttt

SEQ ID NO: 985630 - DNA, 15 bp, Homo sapiens
tgcctgagccatctt

SEQ ID NO: 985631 - DNA, 15 bp, Homo sapiens
ttgcctgagccatct

SEQ ID NO: 985632 - DNA, 15 bp, Homo sapiens
tttgcctgagccatc

SEQ ID NO: 985633 - DNA, 15 bp, Homo sapiens
gtttgcctgagccat

SEQ ID NO: 985634 - DNA, 15 bp, Homo sapiens
tgtttgcctgagcca

SEQ ID NO: 985635 - DNA, 15 bp, Homo sapiens
ttgtttgcctgagcc

SEQ ID NO: 985636 - DNA, 15 bp, Homo sapiens
tttgtttgcctgagc

SEQ ID NO: 985637 - DNA, 15 bp, Homo sapiens
ctttgtttgcctgag

SEQ ID NO: 985638 - DNA, 15 bp, Homo sapiens
cctttgtttgcctga

SEQ ID NO: 985639 - DNA, 15 bp, Homo sapiens
ccctttgtttgcctg

SEQ ID NO: 985640 - DNA, 15 bp, Homo sapiens
gccctttgtttgcct

SEQ ID NO: 985641 - DNA, 15 bp, Homo sapiens
ggccctttgtttgcc

SEQ ID NO: 985642 - DNA, 15 bp, Homo sapiens
tggccctttgtttgc

SEQ ID NO: 985643 - DNA, 15 bp, Homo sapiens
ctggccctttgtttg

SEQ ID NO: 985644 - DNA, 15 bp, Homo sapiens
cctggccctttgttt

SEQ ID NO: 985645 - DNA, 15 bp, Homo sapiens
ccctggccctttgtt

SEQ ID NO: 985646 - DNA, 15 bp, Homo sapiens
cccctggccctttgt

SEQ ID NO: 985647 - DNA, 15 bp, Homo sapiens
tcccctggccctttg

SEQ ID NO: 985648 - DNA, 15 bp, Homo sapiens
atcccctggcccttt

SEQ ID NO: 985649 - DNA, 15 bp, Homo sapiens
tatcccctggccctt

SEQ ID NO: 985650 - DNA, 15 bp, Homo sapiens
atatcccctggccct

SEQ ID NO: 985651 - DNA, 15 bp, Homo sapiens
catatcccctggccc

SEQ ID NO: 985652 - DNA, 15 bp, Homo sapiens
acatatcccctggcc

SEQ ID NO: 985653 - DNA, 15 bp, Homo sapiens
aacatatcccctggc

SEQ ID NO: 985654 - DNA, 15 bp, Homo sapiens
gaacatatcccctgg

SEQ ID NO: 985655 - DNA, 15 bp, Homo sapiens
tgaacatatcccctg

SEQ ID NO: 985656 - DNA, 15 bp, Homo sapiens
atgaacatatcccct

SEQ ID NO: 985657 - DNA, 15 bp, Homo sapiens
catgaacatatcccc

SEQ ID NO: 985658 - DNA, 15 bp, Homo sapiens
ccatgaacatatccc

SEQ ID NO: 985659 - DNA, 15 bp, Homo sapiens
cccatgaacatatcc

SEQ ID NO: 985660 - DNA, 15 bp, Homo sapiens
tcccatgaacatatc

SEQ ID NO: 985661 - DNA, 15 bp, Homo sapiens
atcccatgaacatat

SEQ ID NO: 985662 - DNA, 15 bp, Homo sapiens
catcccatgaacata

SEQ ID NO: 985663 - DNA, 15 bp, Homo sapiens
tcatcccatgaacat

SEQ ID NO: 985664 - DNA, 15 bp, Homo sapiens
atcatcccatgaaca

SEQ ID NO: 985665 - DNA, 15 bp, Homo sapiens
catcatcccatgaac

SEQ ID NO: 985666 - DNA, 15 bp, Homo sapiens
acatcatcccatgaa

SEQ ID NO: 985667 - DNA, 15 bp, Homo sapiens
cacatcatcccatga

SEQ ID NO: 985668 - DNA, 15 bp, Homo sapiens
acacatcatcccatg

SEQ ID NO: 985669 - DNA, 15 bp, Homo sapiens
gacacatcatcccat

SEQ ID NO: 985670 - DNA, 15 bp, Homo sapiens
agacacatcatccca

SEQ ID NO: 985671 - DNA, 15 bp, Homo sapiens
gagacacatcatccc

SEQ ID NO: 985672 - DNA, 15 bp, Homo sapiens
agagacacatcatcc

SEQ ID NO: 985673 - DNA, 15 bp, Homo sapiens
gagagacacatcatc

SEQ ID NO: 985674 - DNA, 15 bp, Homo sapiens
cgagagacacatcat

SEQ ID NO: 985675 - DNA, 15 bp, Homo sapiens
acgagagacacatca

SEQ ID NO: 985676 - DNA, 15 bp, Homo sapiens
aacgagagacacatc

SEQ ID NO: 985677 - DNA, 15 bp, Homo sapiens
caacgagagacacat

SEQ ID NO: 985678 - DNA, 15 bp, Homo sapiens
acaacgagagacaca

SEQ ID NO: 985679 - DNA, 15 bp, Homo sapiens
gacaacgagagacac

SEQ ID NO: 985680 - DNA, 15 bp, Homo sapiens
agacaacgagagaca

SEQ ID NO: 985681 - DNA, 15 bp, Homo sapiens
cagacaacgagagac

SEQ ID NO: 985682 - DNA, 15 bp, Homo sapiens
gcagacaacgagaga

SEQ ID NO: 985683 - DNA, 15 bp, Homo sapiens
agcagacaacgagag

SEQ ID NO: 985684 - DNA, 15 bp, Homo sapiens
aagcagacaacgaga

SEQ ID NO: 985685 - DNA, 15 bp, Homo sapiens
taagcagacaacgag

SEQ ID NO: 985686 - DNA, 15 bp, Homo sapiens
ttaagcagacaacga

SEQ ID NO: 985687 - DNA, 15 bp, Homo sapiens
gttaagcagacaacg

SEQ ID NO: 985688 - DNA, 15 bp, Homo sapiens
tgttaagcagacaac

SEQ ID NO: 985689 - DNA, 15 bp, Homo sapiens
gtgttaagcagacaa

SEQ ID NO: 985690 - DNA, 15 bp, Homo sapiens
tgtgttaagcagaca

SEQ ID NO: 985691 - DNA, 15 bp, Homo sapiens
ttgtgttaagcagac

SEQ ID NO: 985692 - DNA, 15 bp, Homo sapiens
cttgtgttaagcaga

SEQ ID NO: 985693 - DNA, 15 bp, Homo sapiens
ccttgtgttaagcag

SEQ ID NO: 985694 - DNA, 15 bp, Homo sapiens
accttgtgttaagca

SEQ ID NO: 985695 - DNA, 15 bp, Homo sapiens
caccttgtgttaagc

SEQ ID NO: 985696 - DNA, 15 bp, Homo sapiens
tcaccttgtgttaag

SEQ ID NO: 985697 - DNA, 15 bp, Homo sapiens
ctcaccttgtgttaa

SEQ ID NO: 985698 - DNA, 15 bp, Homo sapiens
actcaccttgtgtta

SEQ ID NO: 985699 - DNA, 15 bp, Homo sapiens
gactcaccttgtgtt

SEQ ID NO: 985700 - DNA, 15 bp, Homo sapiens
agactcaccttgtgt

SEQ ID NO: 985701 - DNA, 15 bp, Homo sapiens
gagactcaccttgtg

SEQ ID NO: 985702 - DNA, 15 bp, Homo sapiens
agagactcaccttgt

SEQ ID NO: 985703 - DNA, 15 bp, Homo sapiens
gagagactcaccttg

SEQ ID NO: 985704 - DNA, 15 bp, Homo sapiens
ggagagactcacctt

SEQ ID NO: 985705 - DNA, 15 bp, Homo sapiens
gggagagactcacct

SEQ ID NO: 985706 - DNA, 15 bp, Homo sapiens
agggagagactcacc

SEQ ID NO: 985707 - DNA, 15 bp, Homo sapiens
gagggagagactcac

SEQ ID NO: 985708 - DNA, 15 bp, Homo sapiens
ggagggagagactca

SEQ ID NO: 985709 - DNA, 15 bp, Homo sapiens
gggagggagagactc

SEQ ID NO: 985710 - DNA, 15 bp, Homo sapiens
agggagggagagact

SEQ ID NO: 985711 - DNA, 15 bp, Homo sapiens
gagggagggagagac

SEQ ID NO: 985712 - DNA, 15 bp, Homo sapiens
agagggagggagaga

SEQ ID NO: 985713 - DNA, 15 bp, Homo sapiens
gagagggagggagag

SEQ ID NO: 985714 - DNA, 15 bp, Homo sapiens
agagagggagggaga

SEQ ID NO: 985715 - DNA, 15 bp, Homo sapiens
gagagagggagggag

SEQ ID NO: 985716 - DNA, 15 bp, Homo sapiens
agagagagggaggga

SEQ ID NO: 985717 - DNA, 15 bp, Homo sapiens
gagagagagggaggg

SEQ ID NO: 985718 - DNA, 15 bp, Homo sapiens
agagagagagggagg

SEQ ID NO: 985719 - DNA, 15 bp, Homo sapiens
gagagagagagggag

SEQ ID NO: 985720 - DNA, 15 bp, Homo sapiens
agagagagagaggga

SEQ ID NO: 985721 - DNA, 15 bp, Homo sapiens
aagagagagagaggg

SEQ ID NO: 985722 - DNA, 15 bp, Homo sapiens
aaagagagagagagg

SEQ ID NO: 985723 - DNA, 15 bp, Homo sapiens
gaaaaagagagagag

SEQ ID NO: 985724 - DNA, 15 bp, Homo sapiens
agaaaaagagagaga

SEQ ID NO: 985725 - DNA, 15 bp, Homo sapiens
gagaaaaagagagag

SEQ ID NO: 985726 - DNA, 15 bp, Homo sapiens
agagaaaaagagaga

SEQ ID NO: 985727 - DNA, 15 bp, Homo sapiens
cagagaaaaagagag

SEQ ID NO: 985728 - DNA, 15 bp, Homo sapiens
acagagaaaaagaga

SEQ ID NO: 985729 - DNA, 15 bp, Homo sapiens
cacagagaaaaagag

SEQ ID NO: 985730 - DNA, 15 bp, Homo sapiens
acacagagaaaaaga

SEQ ID NO: 985731 - DNA, 15 bp, Homo sapiens
cacacagagaaaaag

SEQ ID NO: 985732 - DNA, 15 bp, Homo sapiens
acacacagagaaaaa

SEQ ID NO: 985733 - DNA, 15 bp, Homo sapiens
cacacacagagaaaa

SEQ ID NO: 985734 - DNA, 15 bp, Homo sapiens
acacacacagagaaa

SEQ ID NO: 985735 - DNA, 15 bp, Homo sapiens
aacacacacagagaa

SEQ ID NO: 985736 - DNA, 15 bp, Homo sapiens
aaacacacacagaga

SEQ ID NO: 985737 - DNA, 15 bp, Homo sapiens
caaacacacacagag

SEQ ID NO: 985738 - DNA, 15 bp, Homo sapiens
acaaacacacacaga

SEQ ID NO: 985739 - DNA, 15 bp, Homo sapiens
cacaaacacacacag

SEQ ID NO: 985740 - DNA, 15 bp, Homo sapiens
acacaaacacacaca

SEQ ID NO: 985741 - DNA, 15 bp, Homo sapiens
cacacaaacacacac

SEQ ID NO: 985742 - DNA, 15 bp, Homo sapiens
acacacaaacacaca

SEQ ID NO: 985743 - DNA, 15 bp, Homo sapiens
cacacacaaacacac

SEQ ID NO: 985744 - DNA, 15 bp, Homo sapiens
acacacacaaacaca

SEQ ID NO: 985745 - DNA, 15 bp, Homo sapiens
cacacacacaaacac

SEQ ID NO: 985746 - DNA, 15 bp, Homo sapiens
gcacacacacaaaca

SEQ ID NO: 985747 - DNA, 15 bp, Homo sapiens
tgcacacacacaaac

SEQ ID NO: 985748 - DNA, 15 bp, Homo sapiens
atgcacacacacaaa

SEQ ID NO: 985749 - DNA, 15 bp, Homo sapiens
catgcacacacacaa

SEQ ID NO: 985750 - DNA, 15 bp, Homo sapiens
acatgcacacacaca

SEQ ID NO: 985751 - DNA, 15 bp, Homo sapiens
cacatgcacacacac

SEQ ID NO: 985752 - DNA, 15 bp, Homo sapiens
acacatgcacacaca

SEQ ID NO: 985753 - DNA, 15 bp, Homo sapiens
cacacatgcacacac

SEQ ID NO: 985754 - DNA, 15 bp, Homo sapiens
gcacacatgcacaca

SEQ ID NO: 985755 - DNA, 15 bp, Homo sapiens
tgcacacatgcacac

SEQ ID NO: 985756 - DNA, 15 bp, Homo sapiens
ttgcacacatgcaca

SEQ ID NO: 985757 - DNA, 15 bp, Homo sapiens
tttgcacacatgcac

SEQ ID NO: 985758 - DNA, 15 bp, Homo sapiens
atttgcacacatgca

SEQ ID NO: 985759 - DNA, 15 bp, Homo sapiens
catttgcacacatgc

SEQ ID NO: 985760 - DNA, 15 bp, Homo sapiens
acatttgcacacatg

SEQ ID NO: 985761 - DNA, 15 bp, Homo sapiens
tacatttgcacacat

SEQ ID NO: 985762 - DNA, 15 bp, Homo sapiens
ttacatttgcacaca

SEQ ID NO: 985763 - DNA, 15 bp, Homo sapiens
attacatttgcacac

SEQ ID NO: 985764 - DNA, 15 bp, Homo sapiens
tattacatttgcaca

SEQ ID NO: 985765 - DNA, 15 bp, Homo sapiens
atattacatttgcac

SEQ ID NO: 985766 - DNA, 15 bp, Homo sapiens
tatattacatttgca

SEQ ID NO: 985767 - DNA, 15 bp, Homo sapiens
gtatattacatttgc

SEQ ID NO: 985768 - DNA, 15 bp, Homo sapiens
ggtatattacatttg

SEQ ID NO: 985769 - DNA, 15 bp, Homo sapiens
gggtatattacattt

SEQ ID NO: 985770 - DNA, 15 bp, Homo sapiens
tgggtatattacatt

SEQ ID NO: 985771 - DNA, 15 bp, Homo sapiens
ttgggtatattacat

SEQ ID NO: 985772 - DNA, 15 bp, Homo sapiens
attgggtatattaca

SEQ ID NO: 985773 - DNA, 15 bp, Homo sapiens
tattgggtatattac

SEQ ID NO: 985774 - DNA, 15 bp, Homo sapiens
ctattgggtatatta

SEQ ID NO: 985775 - DNA, 15 bp, Homo sapiens
actattgggtatatt

SEQ ID NO: 985776 - DNA, 15 bp, Homo sapiens
gactattgggtatat

SEQ ID NO: 985777 - DNA, 15 bp, Homo sapiens
tgactattgggtata

SEQ ID NO: 985778 - DNA, 15 bp, Homo sapiens
ttgactattgggtat

SEQ ID NO: 985779 - DNA, 15 bp, Homo sapiens
tttgactattgggta

SEQ ID NO: 985780 - DNA, 15 bp, Homo sapiens
gtttgactattgggt

SEQ ID NO: 985781 - DNA, 15 bp, Homo sapiens
tgtttgactattggg

SEQ ID NO: 985782 - DNA, 15 bp, Homo sapiens
atgtttgactattgg

SEQ ID NO: 985783 - DNA, 15 bp, Homo sapiens
catgtttgactattg

SEQ ID NO: 985784 - DNA, 15 bp, Homo sapiens
acatgtttgactatt

SEQ ID NO: 985785 - DNA, 15 bp, Homo sapiens
cacatgtttgactat

SEQ ID NO: 985786 - DNA, 15 bp, Homo sapiens
gcacatgtttgacta

SEQ ID NO: 985787 - DNA, 15 bp, Homo sapiens
ggcacatgtttgact

SEQ ID NO: 985788 - DNA, 15 bp, Homo sapiens
gggcacatgtttgac

SEQ ID NO: 985789 - DNA, 15 bp, Homo sapiens
ggggcacatgtttga

SEQ ID NO: 985790 - DNA, 15 bp, Homo sapiens
tggggcacatgtttg

SEQ ID NO: 985791 - DNA, 15 bp, Homo sapiens
ctggggcacatgttt

SEQ ID NO: 985792 - DNA, 15 bp, Homo sapiens
cctggggcacatgtt

SEQ ID NO: 985793 - DNA, 15 bp, Homo sapiens
tcctggggcacatgt

SEQ ID NO: 985794 - DNA, 15 bp, Homo sapiens
ctcctggggcacatg

SEQ ID NO: 985795 - DNA, 15 bp, Homo sapiens
tctcctggggcacat

SEQ ID NO: 985796 - DNA, 15 bp, Homo sapiens
ctctcctggggcaca

SEQ ID NO: 985797 - DNA, 15 bp, Homo sapiens
cctctcctggggcac

SEQ ID NO: 985798 - DNA, 15 bp, Homo sapiens
ccctctcctggggca

SEQ ID NO: 985799 - DNA, 15 bp, Homo sapiens
cccctctcctggggc

SEQ ID NO: 985800 - DNA, 15 bp, Homo sapiens
acccctctcctgggg

SEQ ID NO: 985801 - DNA, 15 bp, Homo sapiens
tacccctctcctggg

SEQ ID NO: 985802 - DNA, 15 bp, Homo sapiens
ctacccctctcctgg

SEQ ID NO: 985803 - DNA, 15 bp, Homo sapiens
tctacccctctcctg

SEQ ID NO: 985804 - DNA, 15 bp, Homo sapiens
ctctacccctctcct

SEQ ID NO: 985805 - DNA, 15 bp, Homo sapiens
cctctacccctctcc

SEQ ID NO: 985806 - DNA, 15 bp, Homo sapiens
tcctctacccctctc

SEQ ID NO: 985807 - DNA, 15 bp, Homo sapiens
ttcctctacccctct

SEQ ID NO: 985808 - DNA, 15 bp, Homo sapiens
cttcctctacccctc

SEQ ID NO: 985809 - DNA, 15 bp, Homo sapiens
tcttcctctacccct

SEQ ID NO: 985810 - DNA, 15 bp, Homo sapiens
ttcttcctctacccc

SEQ ID NO: 985811 - DNA, 15 bp, Homo sapiens
tttcttcctctaccc

SEQ ID NO: 985812 - DNA, 15 bp, Homo sapiens
ctttcttcctctacc

SEQ ID NO: 985813 - DNA, 15 bp, Homo sapiens
tctttcttcctctac

SEQ ID NO: 985814 - DNA, 15 bp, Homo sapiens
ctctttcttcctcta

SEQ ID NO: 985815 - DNA, 15 bp, Homo sapiens
tctctttcttcctct

SEQ ID NO: 985816 - DNA, 15 bp, Homo sapiens
ttctctttcttcctc

SEQ ID NO: 985817 - DNA, 15 bp, Homo sapiens
attctctttcttcct

SEQ ID NO: 985818 - DNA, 15 bp, Homo sapiens
cattctctttcttcc

SEQ ID NO: 985819 - DNA, 15 bp, Homo sapiens
tcattctctttcttc

SEQ ID NO: 985820 - DNA, 15 bp, Homo sapiens
ctcattctctttctt

SEQ ID NO: 985821 - DNA, 15 bp, Homo sapiens
tctcattctctttct

SEQ ID NO: 985822 - DNA, 15 bp, Homo sapiens
ctctcattctctttc

SEQ ID NO: 985823 - DNA, 15 bp, Homo sapiens
tctctcattctcttt

SEQ ID NO: 985824 - DNA, 15 bp, Homo sapiens
ctctctcattctctt

SEQ ID NO: 985825 - DNA, 15 bp, Homo sapiens
actctctcattctct

SEQ ID NO: 985826 - DNA, 15 bp, Homo sapiens
tactctctcattctc

SEQ ID NO: 985827 - DNA, 15 bp, Homo sapiens
ttactctctcattct

SEQ ID NO: 985828 - DNA, 15 bp, Homo sapiens
cttactctctcattc

SEQ ID NO: 985829 - DNA, 15 bp, Homo sapiens
tcttactctctcatt

SEQ ID NO: 985830 - DNA, 15 bp, Homo sapiens
ttcttactctctcat

SEQ ID NO: 985831 - DNA, 15 bp, Homo sapiens
cttcttactctctca

SEQ ID NO: 985832 - DNA, 15 bp, Homo sapiens
ccttcttactctctc

SEQ ID NO: 985833 - DNA, 15 bp, Homo sapiens
tccttcttactctct

SEQ ID NO: 985834 - DNA, 15 bp, Homo sapiens
ctccttcttactctc

SEQ ID NO: 985835 - DNA, 15 bp, Homo sapiens
cctccttcttactct

SEQ ID NO: 985836 - DNA, 15 bp, Homo sapiens
tcctccttcttactc

SEQ ID NO: 985837 - DNA, 15 bp, Homo sapiens
ttcctccttcttact

SEQ ID NO: 985838 - DNA, 15 bp, Homo sapiens
attcctccttcttac

SEQ ID NO: 985839 - DNA, 15 bp, Homo sapiens
tattcctccttctta

SEQ ID NO: 985840 - DNA, 15 bp, Homo sapiens
ctattcctccttctt

SEQ ID NO: 985841 - DNA, 15 bp, Homo sapiens
tctattcctccttct

SEQ ID NO: 985842 - DNA, 15 bp, Homo sapiens
gtctattcctccttc

SEQ ID NO: 985843 - DNA, 15 bp, Homo sapiens
tgtctattcctcctt

SEQ ID NO: 985844 - DNA, 15 bp, Homo sapiens
gtgtctattcctcct

SEQ ID NO: 985845 - DNA, 15 bp, Homo sapiens
tgtgtctattcctcc

SEQ ID NO: 985846 - DNA, 15 bp, Homo sapiens
ctgtgtctattcctc

SEQ ID NO: 985847 - DNA, 15 bp, Homo sapiens
tctgtgtctattcct

SEQ ID NO: 985848 - DNA, 15 bp, Homo sapiens
ttctgtgtctattcc

SEQ ID NO: 985849 - DNA, 15 bp, Homo sapiens
tttctgtgtctattc

SEQ ID NO: 985850 - DNA, 15 bp, Homo sapiens
ttttctgtgtctatt

SEQ ID NO: 985851 - DNA, 15 bp, Homo sapiens
attttctgtgtctat

SEQ ID NO: 985852 - DNA, 15 bp, Homo sapiens
cattttctgtgtcta

SEQ ID NO: 985853 - DNA, 15 bp, Homo sapiens
tcattttctgtgtct

SEQ ID NO: 985854 - DNA, 15 bp, Homo sapiens
ctcattttctgtgtc

SEQ ID NO: 985855 - DNA, 15 bp, Homo sapiens
tctcattttctgtgt

SEQ ID NO: 985856 - DNA, 15 bp, Homo sapiens
ctctcattttctgtg

SEQ ID NO: 985857 - DNA, 15 bp, Homo sapiens
tctctcattttctgt

SEQ ID NO: 985858 - DNA, 15 bp, Homo sapiens
ctctctcattttctg

SEQ ID NO: 985859 - DNA, 15 bp, Homo sapiens
tctctctcattttct

SEQ ID NO: 985860 - DNA, 15 bp, Homo sapiens
ttctctctcattttc

SEQ ID NO: 985861 - DNA, 15 bp, Homo sapiens
cttctctctcatttt

SEQ ID NO: 985862 - DNA, 15 bp, Homo sapiens
ccttctctctcattt

SEQ ID NO: 985863 - DNA, 15 bp, Homo sapiens
cccttctctctcatt

SEQ ID NO: 985864 - DNA, 15 bp, Homo sapiens
ccccttctctctcat

SEQ ID NO: 985865 - DNA, 15 bp, Homo sapiens
cccccttctctctca

SEQ ID NO: 985866 - DNA, 15 bp, Homo sapiens
ccccccttctctctc

SEQ ID NO: 985867 - DNA, 15 bp, Homo sapiens
tccccccttctctct

SEQ ID NO: 985868 - DNA, 15 bp, Homo sapiens
ttccccccttctctc

SEQ ID NO: 985869 - DNA, 15 bp, Homo sapiens
tttccccccttctct

SEQ ID NO: 985870 - DNA, 15 bp, Homo sapiens
ctttccccccttctc

SEQ ID NO: 985871 - DNA, 15 bp, Homo sapiens
tctttccccccttct

SEQ ID NO: 985872 - DNA, 15 bp, Homo sapiens
ttctttccccccttc

SEQ ID NO: 985873 - DNA, 15 bp, Homo sapiens
tttctttcccccctt

SEQ ID NO: 985874 - DNA, 15 bp, Homo sapiens
ttttctttcccccct

SEQ ID NO: 985875 - DNA, 15 bp, Homo sapiens
tttttctttcccccc

SEQ ID NO: 985876 - DNA, 15 bp, Homo sapiens
ctttttctttccccc

SEQ ID NO: 985877 - DNA, 15 bp, Homo sapiens
tctttttctttcccc

SEQ ID NO: 985878 - DNA, 15 bp, Homo sapiens
ttctttttctttccc

SEQ ID NO: 985879 - DNA, 15 bp, Homo sapiens
cttctttttctttcc

SEQ ID NO: 985880 - DNA, 15 bp, Homo sapiens
tcttctttttctttc

SEQ ID NO: 985881 - DNA, 15 bp, Homo sapiens
ttcttctttttcttt

SEQ ID NO: 985882 - DNA, 15 bp, Homo sapiens
tttcttctttttctt

SEQ ID NO: 985883 - DNA, 15 bp, Homo sapiens
ctttcttctttttct

SEQ ID NO: 985884 - DNA, 15 bp, Homo sapiens
cctttcttctttttc

SEQ ID NO: 985885 - DNA, 15 bp, Homo sapiens
tcctttcttcttttt

SEQ ID NO: 985886 - DNA, 15 bp, Homo sapiens
ctcctttcttctttt

SEQ ID NO: 985887 - DNA, 15 bp, Homo sapiens
gctcctttcttcttt

SEQ ID NO: 985888 - DNA, 15 bp, Homo sapiens
ggctcctttcttctt

SEQ ID NO: 985889 - DNA, 15 bp, Homo sapiens
tggctcctttcttct

SEQ ID NO: 985890 - DNA, 15 bp, Homo sapiens
ctggctcctttcttc

SEQ ID NO: 985891 - DNA, 15 bp, Homo sapiens
tctggctcctttctt

SEQ ID NO: 985892 - DNA, 15 bp, Homo sapiens
ctctggctcctttct

SEQ ID NO: 985893 - DNA, 15 bp, Homo sapiens
cctctggctcctttc

SEQ ID NO: 985894 - DNA, 15 bp, Homo sapiens
tcctctggctccttt

SEQ ID NO: 985895 - DNA, 15 bp, Homo sapiens
ctcctctggctcctt

SEQ ID NO: 985896 - DNA, 15 bp, Homo sapiens
tctcctctggctcct

SEQ ID NO: 985897 - DNA, 15 bp, Homo sapiens
ctctcctctggctcc

SEQ ID NO: 985898 - DNA, 15 bp, Homo sapiens
tctctcctctggctc

SEQ ID NO: 985899 - DNA, 15 bp, Homo sapiens
ttctctcctctggct

SEQ ID NO: 985900 - DNA, 15 bp, Homo sapiens
cttctctcctctggc

SEQ ID NO: 985901 - DNA, 15 bp, Homo sapiens
gcttctctcctctgg

SEQ ID NO: 985902 - DNA, 15 bp, Homo sapiens
agcttctctcctctg

SEQ ID NO: 985903 - DNA, 15 bp, Homo sapiens
cagcttctctcctct

SEQ ID NO: 985904 - DNA, 15 bp, Homo sapiens
ccagcttctctcctc

SEQ ID NO: 985905 - DNA, 15 bp, Homo sapiens
accagcttctctcct

SEQ ID NO: 985906 - DNA, 15 bp, Homo sapiens
aaccagcttctctcc

SEQ ID NO: 985907 - DNA, 15 bp, Homo sapiens
taaccagcttctctc

SEQ ID NO: 985908 - DNA, 15 bp, Homo sapiens
ctaaccagcttctct

SEQ ID NO: 985909 - DNA, 15 bp, Homo sapiens
gctaaccagcttctc

SEQ ID NO: 985910 - DNA, 15 bp, Homo sapiens
tgctaaccagcttct

SEQ ID NO: 985911 - DNA, 15 bp, Homo sapiens
atgctaaccagcttc

SEQ ID NO: 985912 - DNA, 15 bp, Homo sapiens
aatgctaaccagctt

SEQ ID NO: 985913 - DNA, 15 bp, Homo sapiens
caatgctaaccagct

SEQ ID NO: 985914 - DNA, 15 bp, Homo sapiens
tcaatgctaaccagc

SEQ ID NO: 985915 - DNA, 15 bp, Homo sapiens
ttcaatgctaaccag

SEQ ID NO: 985916 - DNA, 15 bp, Homo sapiens
attcaatgctaacca

SEQ ID NO: 985917 - DNA, 15 bp, Homo sapiens
cattcaatgctaacc

SEQ ID NO: 985918 - DNA, 15 bp, Homo sapiens
ccattcaatgctaac

SEQ ID NO: 985919 - DNA, 15 bp, Homo sapiens
tccattcaatgctaa

SEQ ID NO: 985920 - DNA, 15 bp, Homo sapiens
ctccattcaatgcta

SEQ ID NO: 985921 - DNA, 15 bp, Homo sapiens
gctccattcaatgct

SEQ ID NO: 985922 - DNA, 15 bp, Homo sapiens
tgctccattcaatgc

SEQ ID NO: 985923 - DNA, 15 bp, Homo sapiens
ttgctccattcaatg

SEQ ID NO: 985924 - DNA, 15 bp, Homo sapiens
attgctccattcaat

SEQ ID NO: 985925 - DNA, 15 bp, Homo sapiens
gattgctccattcaa

SEQ ID NO: 985926 - DNA, 15 bp, Homo sapiens
agattgctccattca

SEQ ID NO: 985927 - DNA, 15 bp, Homo sapiens
cagattgctccattc

SEQ ID NO: 985928 - DNA, 15 bp, Homo sapiens
acagattgctccatt

SEQ ID NO: 985929 - DNA, 15 bp, Homo sapiens
cacagattgctccat

SEQ ID NO: 985930 - DNA, 15 bp, Homo sapiens
acacagattgctcca

SEQ ID NO: 985931 - DNA, 15 bp, Homo sapiens
gacacagattgctcc

SEQ ID NO: 985932 - DNA, 15 bp, Homo sapiens
tgacacagattgctc

SEQ ID NO: 985933 - DNA, 15 bp, Homo sapiens
atgacacagattgct

SEQ ID NO: 985934 - DNA, 15 bp, Homo sapiens
gatgacacagattgc

SEQ ID NO: 985935 - DNA, 15 bp, Homo sapiens
cgatgacacagattg

SEQ ID NO: 985936 - DNA, 15 bp, Homo sapiens
acgatgacacagatt

SEQ ID NO: 985937 - DNA, 15 bp, Homo sapiens
tacgatgacacagat

SEQ ID NO: 985938 - DNA, 15 bp, Homo sapiens
gtacgatgacacaga

SEQ ID NO: 985939 - DNA, 15 bp, Homo sapiens
agtacgatgacacag

SEQ ID NO: 985940 - DNA, 15 bp, Homo sapiens
aagtacgatgacaca

SEQ ID NO: 985941 - DNA, 15 bp, Homo sapiens
caagtacgatgacac

SEQ ID NO: 985942 - DNA, 15 bp, Homo sapiens
ccaagtacgatgaca

SEQ ID NO: 985943 - DNA, 15 bp, Homo sapiens
cccaagtacgatgac

SEQ ID NO: 985944 - DNA, 15 bp, Homo sapiens
tcccaagtacgatga

SEQ ID NO: 985945 - DNA, 15 bp, Homo sapiens
ttcccaagtacgatg

SEQ ID NO: 985946 - DNA, 15 bp, Homo sapiens
tttcccaagtacgat

SEQ ID NO: 985947 - DNA, 15 bp, Homo sapiens
gtttcccaagtacga

SEQ ID NO: 985948 - DNA, 15 bp, Homo sapiens
ggtttcccaagtacg

SEQ ID NO: 985949 - DNA, 15 bp, Homo sapiens
gggtttcccaagtac

SEQ ID NO: 985950 - DNA, 15 bp, Homo sapiens
tgggtttcccaagta

SEQ ID NO: 985951 - DNA, 15 bp, Homo sapiens
ttgggtttcccaagt

SEQ ID NO: 985952 - DNA, 15 bp, Homo sapiens
cttgggtttcccaag

SEQ ID NO: 985953 - DNA, 15 bp, Homo sapiens
ccttgggtttcccaa

SEQ ID NO: 985954 - DNA, 15 bp, Homo sapiens
tccttgggtttccca

SEQ ID NO: 985955 - DNA, 15 bp, Homo sapiens
atccttgggtttccc

SEQ ID NO: 985956 - DNA, 15 bp, Homo sapiens
catccttgggtttcc

SEQ ID NO: 985957 - DNA, 15 bp, Homo sapiens
ccatccttgggtttc

SEQ ID NO: 985958 - DNA, 15 bp, Homo sapiens
tccatccttgggttt

SEQ ID NO: 985959 - DNA, 15 bp, Homo sapiens
atccatccttgggtt

SEQ ID NO: 985960 - DNA, 15 bp, Homo sapiens
aatccatccttgggt

SEQ ID NO: 985961 - DNA, 15 bp, Homo sapiens
gaatccatccttggg

SEQ ID NO: 985962 - DNA, 15 bp, Homo sapiens
agaatccatccttgg

SEQ ID NO: 985963 - DNA, 15 bp, Homo sapiens
aagaatccatccttg

SEQ ID NO: 985964 - DNA, 15 bp, Homo sapiens
caagaatccatcctt

SEQ ID NO: 985965 - DNA, 15 bp, Homo sapiens
ccaagaatccatcct

SEQ ID NO: 985966 - DNA, 15 bp, Homo sapiens
gccaagaatccatcc

SEQ ID NO: 985967 - DNA, 15 bp, Homo sapiens
tgccaagaatccatc

SEQ ID NO: 985968 - DNA, 15 bp, Homo sapiens
ttgccaagaatccat

SEQ ID NO: 985969 - DNA, 15 bp, Homo sapiens
cttgccaagaatcca

SEQ ID NO: 985970 - DNA, 15 bp, Homo sapiens
acttgccaagaatcc

SEQ ID NO: 985971 - DNA, 15 bp, Homo sapiens
gacttgccaagaatc

SEQ ID NO: 985972 - DNA, 15 bp, Homo sapiens
cgacttgccaagaat

SEQ ID NO: 985973 - DNA, 15 bp, Homo sapiens
tcgacttgccaagaa

SEQ ID NO: 985974 - DNA, 15 bp, Homo sapiens
gtcgacttgccaaga

SEQ ID NO: 985975 - DNA, 15 bp, Homo sapiens
agtcgacttgccaag

SEQ ID NO: 985976 - DNA, 15 bp, Homo sapiens
gagtcgacttgccaa

SEQ ID NO: 985977 - DNA, 15 bp, Homo sapiens
agagtcgacttgcca

SEQ ID NO: 985978 - DNA, 15 bp, Homo sapiens
aagagtcgacttgcc

SEQ ID NO: 985979 - DNA, 15 bp, Homo sapiens
caagagtcgacttgc

SEQ ID NO: 985980 - DNA, 15 bp, Homo sapiens
ccaagagtcgacttg

SEQ ID NO: 985981 - DNA, 15 bp, Homo sapiens
tccaagagtcgactt

SEQ ID NO: 985982 - DNA, 15 bp, Homo sapiens
ctccaagagtcgact

SEQ ID NO: 985983 - DNA, 15 bp, Homo sapiens
gctccaagagtcgac

SEQ ID NO: 985984 - DNA, 15 bp, Homo sapiens
agctccaagagtcga

SEQ ID NO: 985985 - DNA, 15 bp, Homo sapiens
aagctccaagagtcg

SEQ ID NO: 985986 - DNA, 15 bp, Homo sapiens
aaagctccaagagtc

SEQ ID NO: 985987 - DNA, 15 bp, Homo sapiens
gaaagctccaagagt

SEQ ID NO: 985988 - DNA, 15 bp, Homo sapiens
ggaaagctccaagag

SEQ ID NO: 985989 - DNA, 15 bp, Homo sapiens
gggaaagctccaaga

SEQ ID NO: 985990 - DNA, 15 bp, Homo sapiens
agggaaagctccaag

SEQ ID NO: 985991 - DNA, 15 bp, Homo sapiens
cagggaaagctccaa

SEQ ID NO: 985992 - DNA, 15 bp, Homo sapiens
acagggaaagctcca

SEQ ID NO: 985993 - DNA, 15 bp, Homo sapiens
cacagggaaagctcc

SEQ ID NO: 985994 - DNA, 15 bp, Homo sapiens
gcacagggaaagctc

SEQ ID NO: 985995 - DNA, 15 bp, Homo sapiens
agcacagggaaagct

SEQ ID NO: 985996 - DNA, 15 bp, Homo sapiens
aagcacagggaaagc

SEQ ID NO: 985997 - DNA, 15 bp, Homo sapiens
caagcacagggaaag

SEQ ID NO: 985998 - DNA, 15 bp, Homo sapiens
ccaagcacagggaaa

SEQ ID NO: 985999 - DNA, 15 bp, Homo sapiens
accaagcacagggaa

SEQ ID NO: 986000 - DNA, 15 bp, Homo sapiens
gaccaagcacaggga

SEQ ID NO: 986001 - DNA, 15 bp, Homo sapiens
ggaccaagcacaggg

SEQ ID NO: 986002 - DNA, 15 bp, Homo sapiens
aggaccaagcacagg

SEQ ID NO: 986003 - DNA, 15 bp, Homo sapiens
caggaccaagcacag

SEQ ID NO: 986004 - DNA, 15 bp, Homo sapiens
acaggaccaagcaca

SEQ ID NO: 986005 - DNA, 15 bp, Homo sapiens
cacaggaccaagcac

SEQ ID NO: 986006 - DNA, 15 bp, Homo sapiens
gcacaggaccaagca

SEQ ID NO: 986007 - DNA, 15 bp, Homo sapiens
agcacaggaccaagc

SEQ ID NO: 986008 - DNA, 15 bp, Homo sapiens
gagcacaggaccaag

SEQ ID NO: 986009 - DNA, 15 bp, Homo sapiens
tgagcacaggaccaa

SEQ ID NO: 986010 - DNA, 15 bp, Homo sapiens
ctgagcacaggacca

SEQ ID NO: 986011 - DNA, 15 bp, Homo sapiens
tctgagcacaggacc

SEQ ID NO: 986012 - DNA, 15 bp, Homo sapiens
gtctgagcacaggac

SEQ ID NO: 986013 - DNA, 15 bp, Homo sapiens
tgtctgagcacagga

SEQ ID NO: 986014 - DNA, 15 bp, Homo sapiens
atgtctgagcacagg

SEQ ID NO: 986015 - DNA, 15 bp, Homo sapiens
catgtctgagcacag

SEQ ID NO: 986016 - DNA, 15 bp, Homo sapiens
ccatgtctgagcaca

SEQ ID NO: 986017 - DNA, 15 bp, Homo sapiens
cccatgtctgagcac

SEQ ID NO: 986018 - DNA, 15 bp, Homo sapiens
tcccatgtctgagca

SEQ ID NO: 986019 - DNA, 15 bp, Homo sapiens
ttcccatgtctgagc

SEQ ID NO: 986020 - DNA, 15 bp, Homo sapiens
tttcccatgtctgag

SEQ ID NO: 986021 - DNA, 15 bp, Homo sapiens
ttttcccatgtctga

SEQ ID NO: 986022 - DNA, 15 bp, Homo sapiens
attttcccatgtctg

SEQ ID NO: 986023 - DNA, 15 bp, Homo sapiens
aattttcccatgtct

SEQ ID NO: 986024 - DNA, 15 bp, Homo sapiens
taattttcccatgtc

SEQ ID NO: 986025 - DNA, 15 bp, Homo sapiens
ctaattttcccatgt

SEQ ID NO: 986026 - DNA, 15 bp, Homo sapiens
tctaattttcccatg

SEQ ID NO: 986027 - DNA, 15 bp, Homo sapiens
ctctaattttcccat

SEQ ID NO: 986028 - DNA, 15 bp, Homo sapiens
cctctaattttccca

SEQ ID NO: 986029 - DNA, 15 bp, Homo sapiens
tcctctaattttccc

SEQ ID NO: 986030 - DNA, 15 bp, Homo sapiens
ctcctctaattttcc

SEQ ID NO: 986031 - DNA, 15 bp, Homo sapiens
actcctctaattttc

SEQ ID NO: 986032 - DNA, 15 bp, Homo sapiens
cactcctctaatttt

SEQ ID NO: 986033 - DNA, 15 bp, Homo sapiens
acactcctctaattt

SEQ ID NO: 986034 - DNA, 15 bp, Homo sapiens
gacactcctctaatt

SEQ ID NO: 986035 - DNA, 15 bp, Homo sapiens
tgacactcctctaat

SEQ ID NO: 986036 - DNA, 15 bp, Homo sapiens
atgacactcctctaa

SEQ ID NO: 986037 - DNA, 15 bp, Homo sapiens
gatgacactcctcta

SEQ ID NO: 986038 - DNA, 15 bp, Homo sapiens
agatgacactcctct

SEQ ID NO: 986039 - DNA, 15 bp, Homo sapiens
cagatgacactcctc

SEQ ID NO: 986040 - DNA, 15 bp, Homo sapiens
acagatgacactcct

SEQ ID NO: 986041 - DNA, 15 bp, Homo sapiens
cacagatgacactcc

SEQ ID NO: 986042 - DNA, 15 bp, Homo sapiens
gcacagatgacactc

SEQ ID NO: 986043 - DNA, 15 bp, Homo sapiens
tgcacagatgacact

SEQ ID NO: 986044 - DNA, 15 bp, Homo sapiens
ttgcacagatgacac

SEQ ID NO: 986045 - DNA, 15 bp, Homo sapiens
attgcacagatgaca

SEQ ID NO: 986046 - DNA, 15 bp, Homo sapiens
gattgcacagatgac

SEQ ID NO: 986047 - DNA, 15 bp, Homo sapiens
tgattgcacagatga

SEQ ID NO: 986048 - DNA, 15 bp, Homo sapiens
gtgattgcacagatg

SEQ ID NO: 986049 - DNA, 15 bp, Homo sapiens
agtgattgcacagat

SEQ ID NO: 986050 - DNA, 15 bp, Homo sapiens
cagtgattgcacaga

SEQ ID NO: 986051 - DNA, 15 bp, Homo sapiens
tcagtgattgcacag

SEQ ID NO: 986052 - DNA, 15 bp, Homo sapiens
ttcagtgattgcaca

SEQ ID NO: 986053 - DNA, 15 bp, Homo sapiens
attcagtgattgcac

SEQ ID NO: 986054 - DNA, 15 bp, Homo sapiens
aattcagtgattgca

SEQ ID NO: 986055 - DNA, 15 bp, Homo sapiens
gaattcagtgattgc

SEQ ID NO: 986056 - DNA, 15 bp, Homo sapiens
tgaattcagtgattg

SEQ ID NO: 986057 - DNA, 15 bp, Homo sapiens
atgaattcagtgatt

SEQ ID NO: 986058 - DNA, 15 bp, Homo sapiens
tatgaattcagtgat

SEQ ID NO: 986059 - DNA, 15 bp, Homo sapiens
ttatgaattcagtga

SEQ ID NO: 986060 - DNA, 15 bp, Homo sapiens
attatgaattcagtg

SEQ ID NO: 986061 - DNA, 15 bp, Homo sapiens
gattatgaattcagt

SEQ ID NO: 986062 - DNA, 15 bp, Homo sapiens
agattatgaattcag

SEQ ID NO: 986063 - DNA, 15 bp, Homo sapiens
aagattatgaattca

SEQ ID NO: 986064 - DNA, 15 bp, Homo sapiens
caagattatgaattc

SEQ ID NO: 986065 - DNA, 15 bp, Homo sapiens
ccaagattatgaatt

SEQ ID NO: 986066 - DNA, 15 bp, Homo sapiens
accaagattatgaat

SEQ ID NO: 986067 - DNA, 15 bp, Homo sapiens
caccaagattatgaa

SEQ ID NO: 986068 - DNA, 15 bp, Homo sapiens
tcaccaagattatga

SEQ ID NO: 986069 - DNA, 15 bp, Homo sapiens
ctcaccaagattatg

SEQ ID NO: 986070 - DNA, 15 bp, Homo sapiens
cctcaccaagattat

SEQ ID NO: 986071 - DNA, 15 bp, Homo sapiens
tcctcaccaagatta

SEQ ID NO: 986072 - DNA, 15 bp, Homo sapiens
ttcctcaccaagatt

SEQ ID NO: 986073 - DNA, 15 bp, Homo sapiens
tttcctcaccaagat

SEQ ID NO: 986074 - DNA, 15 bp, Homo sapiens
ctttcctcaccaaga

SEQ ID NO: 986075 - DNA, 15 bp, Homo sapiens
cctttcctcaccaag

SEQ ID NO: 986076 - DNA, 15 bp, Homo sapiens
tcctttcctcaccaa

SEQ ID NO: 986077 - DNA, 15 bp, Homo sapiens
ctcctttcctcacca

SEQ ID NO: 986078 - DNA, 15 bp, Homo sapiens
tctcctttcctcacc

SEQ ID NO: 986079 - DNA, 15 bp, Homo sapiens
gtctcctttcctcac

SEQ ID NO: 986080 - DNA, 15 bp, Homo sapiens
agtctcctttcctca

SEQ ID NO: 986081 - DNA, 15 bp, Homo sapiens
tagtctcctttcctc

SEQ ID NO: 986082 - DNA, 15 bp, Homo sapiens
gtagtctcctttcct

SEQ ID NO: 986083 - DNA, 15 bp, Homo sapiens
tgtagtctcctttcc

SEQ ID NO: 986084 - DNA, 15 bp, Homo sapiens
gtgtagtctcctttc

SEQ ID NO: 986085 - DNA, 15 bp, Homo sapiens
tgtgtagtctccttt

SEQ ID NO: 986086 - DNA, 15 bp, Homo sapiens
gtgtgtagtctcctt

SEQ ID NO: 986087 - DNA, 15 bp, Homo sapiens
tgtgtgtagtctcct

SEQ ID NO: 986088 - DNA, 15 bp, Homo sapiens
ctgtgtgtagtctcc

SEQ ID NO: 986089 - DNA, 15 bp, Homo sapiens
cctgtgtgtagtctc

SEQ ID NO: 986090 - DNA, 15 bp, Homo sapiens
ccctgtgtgtagtct

SEQ ID NO: 986091 - DNA, 15 bp, Homo sapiens
tccctgtgtgtagtc

SEQ ID NO: 986092 - DNA, 15 bp, Homo sapiens
ttccctgtgtgtagt

SEQ ID NO: 986093 - DNA, 15 bp, Homo sapiens
attccctgtgtgtag

SEQ ID NO: 986094 - DNA, 15 bp, Homo sapiens
tattccctgtgtgta

SEQ ID NO: 986095 - DNA, 15 bp, Homo sapiens
ttattccctgtgtgt

SEQ ID NO: 986096 - DNA, 15 bp, Homo sapiens
attattccctgtgtg

SEQ ID NO: 986097 - DNA, 15 bp, Homo sapiens
cattattccctgtgt

SEQ ID NO: 986098 - DNA, 15 bp, Homo sapiens
gcattattccctgtg

SEQ ID NO: 986099 - DNA, 15 bp, Homo sapiens
agcattattccctgt

SEQ ID NO: 986100 - DNA, 15 bp, Homo sapiens
tagcattattccctg

SEQ ID NO: 986101 - DNA, 15 bp, Homo sapiens
ttagcattattccct

SEQ ID NO: 986102 - DNA, 15 bp, Homo sapiens
cttagcattattccc

SEQ ID NO: 986103 - DNA, 15 bp, Homo sapiens
acttagcattattcc

SEQ ID NO: 986104 - DNA, 15 bp, Homo sapiens
tacttagcattattc

SEQ ID NO: 986105 - DNA, 15 bp, Homo sapiens
atacttagcattatt

SEQ ID NO: 986106 - DNA, 15 bp, Homo sapiens
aatacttagcattat

SEQ ID NO: 986107 - DNA, 15 bp, Homo sapiens
taatacttagcatta

SEQ ID NO: 986108 - DNA, 15 bp, Homo sapiens
gtaatacttagcatt

SEQ ID NO: 986109 - DNA, 15 bp, Homo sapiens
tgtaatacttagcat

SEQ ID NO: 986110 - DNA, 15 bp, Homo sapiens
ctgtaatacttagca

SEQ ID NO: 986111 - DNA, 15 bp, Homo sapiens
tctgtaatacttagc

SEQ ID NO: 986112 - DNA, 15 bp, Homo sapiens
atctgtaatacttag

SEQ ID NO: 986113 - DNA, 15 bp, Homo sapiens
aatctgtaatactta

SEQ ID NO: 986114 - DNA, 15 bp, Homo sapiens
aaatctgtaatactt

SEQ ID NO: 986115 - DNA, 15 bp, Homo sapiens
gaaatctgtaatact

SEQ ID NO: 986116 - DNA, 15 bp, Homo sapiens
tgaaatctgtaatac

SEQ ID NO: 986117 - DNA, 15 bp, Homo sapiens
ctgaaatctgtaata

SEQ ID NO: 986118 - DNA, 15 bp, Homo sapiens
cctgaaatctgtaat

SEQ ID NO: 986119 - DNA, 15 bp, Homo sapiens
ccctgaaatctgtaa

SEQ ID NO: 986120 - DNA, 15 bp, Homo sapiens
gccctgaaatctgta

SEQ ID NO: 986121 - DNA, 15 bp, Homo sapiens
tgccctgaaatctgt

SEQ ID NO: 986122 - DNA, 15 bp, Homo sapiens
ctgccctgaaatctg

SEQ ID NO: 986123 - DNA, 15 bp, Homo sapiens
tctgccctgaaatct

SEQ ID NO: 986124 - DNA, 15 bp, Homo sapiens
ttctgccctgaaatc

SEQ ID NO: 986125 - DNA, 15 bp, Homo sapiens
tttctgccctgaaat

SEQ ID NO: 986126 - DNA, 15 bp, Homo sapiens
ctttctgccctgaaa

SEQ ID NO: 986127 - DNA, 15 bp, Homo sapiens
tctttctgccctgaa

SEQ ID NO: 986128 - DNA, 15 bp, Homo sapiens
ctctttctgccctga

SEQ ID NO: 986129 - DNA, 15 bp, Homo sapiens
tctctttctgccctg

SEQ ID NO: 986130 - DNA, 15 bp, Homo sapiens
atctctttctgccct

SEQ ID NO: 986131 - DNA, 15 bp, Homo sapiens
gatctctttctgccc

SEQ ID NO: 986132 - DNA, 15 bp, Homo sapiens
tgatctctttctgcc

SEQ ID NO: 986133 - DNA, 15 bp, Homo sapiens
ttgatctctttctgc

SEQ ID NO: 986134 - DNA, 15 bp, Homo sapiens
cttgatctctttctg

SEQ ID NO: 986135 - DNA, 15 bp, Homo sapiens
ccttgatctctttct

SEQ ID NO: 986136 - DNA, 15 bp, Homo sapiens
accttgatctctttc

SEQ ID NO: 986137 - DNA, 15 bp, Homo sapiens
caccttgatctcttt

SEQ ID NO: 986138 - DNA, 15 bp, Homo sapiens
ccaccttgatctctt

SEQ ID NO: 986139 - DNA, 15 bp, Homo sapiens
cccaccttgatctct

SEQ ID NO: 986140 - DNA, 15 bp, Homo sapiens
gcccaccttgatctc

SEQ ID NO: 986141 - DNA, 15 bp, Homo sapiens
agcccaccttgatct

SEQ ID NO: 986142 - DNA, 15 bp, Homo sapiens
cagcccaccttgatc

SEQ ID NO: 986143 - DNA, 15 bp, Homo sapiens
gcagcccaccttgat

SEQ ID NO: 986144 - DNA, 15 bp, Homo sapiens
tgcagcccaccttga

SEQ ID NO: 986145 - DNA, 15 bp, Homo sapiens
ttgcagcccaccttg

SEQ ID NO: 986146 - DNA, 15 bp, Homo sapiens
attgcagcccacctt

SEQ ID NO: 986147 - DNA, 15 bp, Homo sapiens
tattgcagcccacct

SEQ ID NO: 986148 - DNA, 15 bp, Homo sapiens
atattgcagcccacc

SEQ ID NO: 986149 - DNA, 15 bp, Homo sapiens
aatattgcagcccac

SEQ ID NO: 986150 - DNA, 15 bp, Homo sapiens
gaatattgcagccca

SEQ ID NO: 986151 - DNA, 15 bp, Homo sapiens
tgaatattgcagccc

SEQ ID NO: 986152 - DNA, 15 bp, Homo sapiens
ctgaatattgcagcc

SEQ ID NO: 986153 - DNA, 15 bp, Homo sapiens
tctgaatattgcagc

SEQ ID NO: 986154 - DNA, 15 bp, Homo sapiens
ttctgaatattgcag

SEQ ID NO: 986155 - DNA, 15 bp, Homo sapiens
tttctgaatattgca

SEQ ID NO: 986156 - DNA, 15 bp, Homo sapiens
ttttctgaatattgc

SEQ ID NO: 986157 - DNA, 15 bp, Homo sapiens
cttttctgaatattg

SEQ ID NO: 986158 - DNA, 15 bp, Homo sapiens
acttttctgaatatt

SEQ ID NO: 986159 - DNA, 15 bp, Homo sapiens
gacttttctgaatat

SEQ ID NO: 986160 - DNA, 15 bp, Homo sapiens
agacttttctgaata

SEQ ID NO: 986161 - DNA, 15 bp, Homo sapiens
aagacttttctgaat

SEQ ID NO: 986162 - DNA, 15 bp, Homo sapiens
gaagacttttctgaa

SEQ ID NO: 986163 - DNA, 15 bp, Homo sapiens
ggaagacttttctga

SEQ ID NO: 986164 - DNA, 15 bp, Homo sapiens
aggaagacttttctg

SEQ ID NO: 986165 - DNA, 15 bp, Homo sapiens
caggaagacttttct

SEQ ID NO: 986166 - DNA, 15 bp, Homo sapiens
ccaggaagacttttc

SEQ ID NO: 986167 - DNA, 15 bp, Homo sapiens
tccaggaagactttt

SEQ ID NO: 986168 - DNA, 15 bp, Homo sapiens
ttccaggaagacttt

SEQ ID NO: 986169 - DNA, 15 bp, Homo sapiens
tttccaggaagactt

SEQ ID NO: 986170 - DNA, 15 bp, Homo sapiens
ttttccaggaagact

SEQ ID NO: 986171 - DNA, 15 bp, Homo sapiens
cttttccaggaagac

SEQ ID NO: 986172 - DNA, 15 bp, Homo sapiens
acttttccaggaaga

SEQ ID NO: 986173 - DNA, 15 bp, Homo sapiens
aacttttccaggaag

SEQ ID NO: 986174 - DNA, 15 bp, Homo sapiens
caacttttccaggaa

SEQ ID NO: 986175 - DNA, 15 bp, Homo sapiens
tcaacttttccagga

SEQ ID NO: 986176 - DNA, 15 bp, Homo sapiens
ttcaacttttccagg

SEQ ID NO: 986177 - DNA, 15 bp, Homo sapiens
attcaacttttccag

SEQ ID NO: 986178 - DNA, 15 bp, Homo sapiens
tattcaacttttcca

SEQ ID NO: 986179 - DNA, 15 bp, Homo sapiens
gtattcaacttttcc

SEQ ID NO: 986180 - DNA, 15 bp, Homo sapiens
agtattcaacttttc

SEQ ID NO: 986181 - DNA, 15 bp, Homo sapiens
aagtattcaactttt

SEQ ID NO: 986182 - DNA, 15 bp, Homo sapiens
taagtattcaacttt

SEQ ID NO: 986183 - DNA, 15 bp, Homo sapiens
ctaagtattcaactt

SEQ ID NO: 986184 - DNA, 15 bp, Homo sapiens
tctaagtattcaact

SEQ ID NO: 986185 - DNA, 15 bp, Homo sapiens
ttctaagtattcaac

SEQ ID NO: 986186 - DNA, 15 bp, Homo sapiens
tttctaagtattcaa

SEQ ID NO: 986187 - DNA, 15 bp, Homo sapiens
ctttctaagtattca

SEQ ID NO: 986188 - DNA, 15 bp, Homo sapiens
gctttctaagtattc

SEQ ID NO: 986189 - DNA, 15 bp, Homo sapiens
tgctttctaagtatt

SEQ ID NO: 986190 - DNA, 15 bp, Homo sapiens
ctgctttctaagtat

SEQ ID NO: 986191 - DNA, 15 bp, Homo sapiens
gctgctttctaagta

SEQ ID NO: 986192 - DNA, 15 bp, Homo sapiens
agctgctttctaagt

SEQ ID NO: 986193 - DNA, 15 bp, Homo sapiens
gagctgctttctaag

SEQ ID NO: 986194 - DNA, 15 bp, Homo sapiens
ggagctgctttctaa

SEQ ID NO: 986195 - DNA, 15 bp, Homo sapiens
aggagctgctttcta

SEQ ID NO: 986196 - DNA, 15 bp, Homo sapiens
taggagctgctttct

SEQ ID NO: 986197 - DNA, 15 bp, Homo sapiens
ctaggagctgctttc

SEQ ID NO: 986198 - DNA, 15 bp, Homo sapiens
tctaggagctgcttt

SEQ ID NO: 986199 - DNA, 15 bp, Homo sapiens
ttctaggagctgctt

SEQ ID NO: 986200 - DNA, 15 bp, Homo sapiens
cttctaggagctgct

SEQ ID NO: 986201 - DNA, 15 bp, Homo sapiens
acttctaggagctgc

SEQ ID NO: 986202 - DNA, 15 bp, Homo sapiens
tacttctaggagctg

SEQ ID NO: 986203 - DNA, 15 bp, Homo sapiens
ctacttctaggagct

SEQ ID NO: 986204 - DNA, 15 bp, Homo sapiens
tctacttctaggagc

SEQ ID NO: 986205 - DNA, 15 bp, Homo sapiens
gtctacttctaggag

SEQ ID NO: 986206 - DNA, 15 bp, Homo sapiens
agtctacttctagga

SEQ ID NO: 986207 - DNA, 15 bp, Homo sapiens
gagtctacttctagg

SEQ ID NO: 986208 - DNA, 15 bp, Homo sapiens
agagtctacttctag

SEQ ID NO: 986209 - DNA, 15 bp, Homo sapiens
cagagtctacttcta

SEQ ID NO: 986210 - DNA, 15 bp, Homo sapiens
gcagagtctacttct

SEQ ID NO: 986211 - DNA, 15 bp, Homo sapiens
agcagagtctacttc

SEQ ID NO: 986212 - DNA, 15 bp, Homo sapiens
cagcagagtctactt

SEQ ID NO: 986213 - DNA, 15 bp, Homo sapiens
tcagcagagtctact

SEQ ID NO: 986214 - DNA, 15 bp, Homo sapiens
ctcagcagagtctac

SEQ ID NO: 986215 - DNA, 15 bp, Homo sapiens
tctcagcagagtcta

SEQ ID NO: 986216 - DNA, 15 bp, Homo sapiens
atctcagcagagtct

SEQ ID NO: 986217 - DNA, 15 bp, Homo sapiens
catctcagcagagtc

SEQ ID NO: 986218 - DNA, 15 bp, Homo sapiens
ccatctcagcagagt

SEQ ID NO: 986219 - DNA, 15 bp, Homo sapiens
tccatctcagcagag

SEQ ID NO: 986220 - DNA, 15 bp, Homo sapiens
gtccatctcagcaga

SEQ ID NO: 986221 - DNA, 15 bp, Homo sapiens
cgtccatctcagcag

SEQ ID NO: 986222 - DNA, 15 bp, Homo sapiens
ccgtccatctcagca

SEQ ID NO: 986223 - DNA, 15 bp, Homo sapiens
tccgtccatctcagc

SEQ ID NO: 986224 - DNA, 15 bp, Homo sapiens
ctccgtccatctcag

SEQ ID NO: 986225 - DNA, 15 bp, Homo sapiens
actccgtccatctca

SEQ ID NO: 986226 - DNA, 15 bp, Homo sapiens
gactccgtccatctc

SEQ ID NO: 986227 - DNA, 15 bp, Homo sapiens
ggactccgtccatct

SEQ ID NO: 986228 - DNA, 15 bp, Homo sapiens
aggactccgtccatc

SEQ ID NO: 986229 - DNA, 15 bp, Homo sapiens
aaggactccgtccat

SEQ ID NO: 986230 - DNA, 15 bp, Homo sapiens
aaaggactccgtcca

SEQ ID NO: 986231 - DNA, 15 bp, Homo sapiens
caaaggactccgtcc

SEQ ID NO: 986232 - DNA, 15 bp, Homo sapiens
acaaaggactccgtc

SEQ ID NO: 986233 - DNA, 15 bp, Homo sapiens
tacaaaggactccgt

SEQ ID NO: 986234 - DNA, 15 bp, Homo sapiens
ctacaaaggactccg

SEQ ID NO: 986235 - DNA, 15 bp, Homo sapiens
cctacaaaggactcc

SEQ ID NO: 986236 - DNA, 15 bp, Homo sapiens
acctacaaaggactc

SEQ ID NO: 986237 - DNA, 15 bp, Homo sapiens
gacctacaaaggact

SEQ ID NO: 986238 - DNA, 15 bp, Homo sapiens
ggacctacaaaggac

SEQ ID NO: 986239 - DNA, 15 bp, Homo sapiens
gggacctacaaagga

SEQ ID NO: 986240 - DNA, 15 bp, Homo sapiens
tgggacctacaaagg

SEQ ID NO: 986241 - DNA, 15 bp, Homo sapiens
ttgggacctacaaag

SEQ ID NO: 986242 - DNA, 15 bp, Homo sapiens
gttgggacctacaaa

SEQ ID NO: 986243 - DNA, 15 bp, Homo sapiens
agttgggacctacaa

SEQ ID NO: 986244 - DNA, 15 bp, Homo sapiens
cagttgggacctaca

SEQ ID NO: 986245 - DNA, 15 bp, Homo sapiens
ccagttgggacctac

SEQ ID NO: 986246 - DNA, 15 bp, Homo sapiens
cccagttgggaccta

SEQ ID NO: 986247 - DNA, 15 bp, Homo sapiens
acccagttgggacct

SEQ ID NO: 986248 - DNA, 15 bp, Homo sapiens
cacccagttgggacc

SEQ ID NO: 986249 - DNA, 15 bp, Homo sapiens
acacccagttgggac

SEQ ID NO: 986250 - DNA, 15 bp, Homo sapiens
cacacccagttggga

SEQ ID NO: 986251 - DNA, 15 bp, Homo sapiens
acacacccagttggg

SEQ ID NO: 986252 - DNA, 15 bp, Homo sapiens
cacacacccagttgg

SEQ ID NO: 986253 - DNA, 15 bp, Homo sapiens
acacacacccagttg

SEQ ID NO: 986254 - DNA, 15 bp, Homo sapiens
cacacacacccagtt

SEQ ID NO: 986255 - DNA, 15 bp, Homo sapiens
acacacacacccagt

SEQ ID NO: 986256 - DNA, 15 bp, Homo sapiens
cacacacacacccag

SEQ ID NO: 986257 - DNA, 15 bp, Homo sapiens
ccacacacacaccca

SEQ ID NO: 986258 - DNA, 15 bp, Homo sapiens
cccacacacacaccc

SEQ ID NO: 986259 - DNA, 15 bp, Homo sapiens
ccccacacacacacc

SEQ ID NO: 986260 - DNA, 15 bp, Homo sapiens
accccacacacacac

SEQ ID NO: 986261 - DNA, 15 bp, Homo sapiens
gaccccacacacaca

SEQ ID NO: 986262 - DNA, 15 bp, Homo sapiens
agaccccacacacac

SEQ ID NO: 986263 - DNA, 15 bp, Homo sapiens
cagaccccacacaca

SEQ ID NO: 986264 - DNA, 15 bp, Homo sapiens
acagaccccacacac

SEQ ID NO: 986265 - DNA, 15 bp, Homo sapiens
gacagaccccacaca

SEQ ID NO: 986266 - DNA, 15 bp, Homo sapiens
agacagaccccacac

SEQ ID NO: 986267 - DNA, 15 bp, Homo sapiens
gagacagaccccaca

SEQ ID NO: 986268 - DNA, 15 bp, Homo sapiens
agagacagaccccac

SEQ ID NO: 986269 - DNA, 15 bp, Homo sapiens
gagagacagacccca

SEQ ID NO: 986270 - DNA, 15 bp, Homo sapiens
ggagagacagacccc

SEQ ID NO: 986271 - DNA, 15 bp, Homo sapiens
tggagagacagaccc

SEQ ID NO: 986272 - DNA, 15 bp, Homo sapiens
atggagagacagacc

SEQ ID NO: 986273 - DNA, 15 bp, Homo sapiens
catggagagacagac

SEQ ID NO: 986274 - DNA, 15 bp, Homo sapiens
ccatggagagacaga

SEQ ID NO: 986275 - DNA, 15 bp, Homo sapiens
gccatggagagacag

SEQ ID NO: 986276 - DNA, 15 bp, Homo sapiens
agccatggagagaca

SEQ ID NO: 986277 - DNA, 15 bp, Homo sapiens
cagccatggagagac

SEQ ID NO: 986278 - DNA, 15 bp, Homo sapiens
tcagccatggagaga

SEQ ID NO: 986279 - DNA, 15 bp, Homo sapiens
gtcagccatggagag

SEQ ID NO: 986280 - DNA, 15 bp, Homo sapiens
tgtcagccatggaga

SEQ ID NO: 986281 - DNA, 15 bp, Homo sapiens
ctgtcagccatggag

SEQ ID NO: 986282 - DNA, 15 bp, Homo sapiens
actgtcagccatgga

SEQ ID NO: 986283 - DNA, 15 bp, Homo sapiens
cactgtcagccatgg

SEQ ID NO: 986284 - DNA, 15 bp, Homo sapiens
gcactgtcagccatg

SEQ ID NO: 986285 - DNA, 15 bp, Homo sapiens
tgcactgtcagccat

SEQ ID NO: 986286 - DNA, 15 bp, Homo sapiens
gtgcactgtcagcca

SEQ ID NO: 986287 - DNA, 15 bp, Homo sapiens
tgtgcactgtcagcc

SEQ ID NO: 986288 - DNA, 15 bp, Homo sapiens
atgtgcactgtcagc

SEQ ID NO: 986289 - DNA, 15 bp, Homo sapiens
catgtgcactgtcag

SEQ ID NO: 986290 - DNA, 15 bp, Homo sapiens
acatgtgcactgtca

SEQ ID NO: 986291 - DNA, 15 bp, Homo sapiens
cacatgtgcactgtc

SEQ ID NO: 986292 - DNA, 15 bp, Homo sapiens
ccacatgtgcactgt

SEQ ID NO: 986293 - DNA, 15 bp, Homo sapiens
tccacatgtgcactg

SEQ ID NO: 986294 - DNA, 15 bp, Homo sapiens
atccacatgtgcact

SEQ ID NO: 986295 - DNA, 15 bp, Homo sapiens
aatccacatgtgcac

SEQ ID NO: 986296 - DNA, 15 bp, Homo sapiens
gaatccacatgtgca

SEQ ID NO: 986297 - DNA, 15 bp, Homo sapiens
ggaatccacatgtgc

SEQ ID NO: 986298 - DNA, 15 bp, Homo sapiens
tggaatccacatgtg

SEQ ID NO: 986299 - DNA, 15 bp, Homo sapiens
ctggaatccacatgt

SEQ ID NO: 986300 - DNA, 15 bp, Homo sapiens
cctggaatccacatg

SEQ ID NO: 986301 - DNA, 15 bp, Homo sapiens
ccctggaatccacat

SEQ ID NO: 986302 - DNA, 15 bp, Homo sapiens
gccctggaatccaca

SEQ ID NO: 986303 - DNA, 15 bp, Homo sapiens
agccctggaatccac

SEQ ID NO: 986304 - DNA, 15 bp, Homo sapiens
gagccctggaatcca

SEQ ID NO: 986305 - DNA, 15 bp, Homo sapiens
tgagccctggaatcc

SEQ ID NO: 986306 - DNA, 15 bp, Homo sapiens
ctgagccctggaatc

SEQ ID NO: 986307 - DNA, 15 bp, Homo sapiens
cctgagccctggaat

SEQ ID NO: 986308 - DNA, 15 bp, Homo sapiens
tcctgagccctggaa

SEQ ID NO: 986309 - DNA, 15 bp, Homo sapiens
atcctgagccctgga

SEQ ID NO: 986310 - DNA, 15 bp, Homo sapiens
catcctgagccctgg

SEQ ID NO: 986311 - DNA, 15 bp, Homo sapiens
gcatcctgagccctg

SEQ ID NO: 986312 - DNA, 15 bp, Homo sapiens
agcatcctgagccct

SEQ ID NO: 986313 - DNA, 15 bp, Homo sapiens
cagcatcctgagccc

SEQ ID NO: 986314 - DNA, 15 bp, Homo sapiens
acagcatcctgagcc

SEQ ID NO: 986315 - DNA, 15 bp, Homo sapiens
aacagcatcctgagc

SEQ ID NO: 986316 - DNA, 15 bp, Homo sapiens
caacagcatcctgag

SEQ ID NO: 986317 - DNA, 15 bp, Homo sapiens
gcaacagcatcctga

SEQ ID NO: 986318 - DNA, 15 bp, Homo sapiens
agcaacagcatcctg

SEQ ID NO: 986319 - DNA, 15 bp, Homo sapiens
cagcaacagcatcct

SEQ ID NO: 986320 - DNA, 15 bp, Homo sapiens
ccagcaacagcatcc

SEQ ID NO: 986321 - DNA, 15 bp, Homo sapiens
cccagcaacagcatc

SEQ ID NO: 986322 - DNA, 15 bp, Homo sapiens
tcccagcaacagcat

SEQ ID NO: 986323 - DNA, 15 bp, Homo sapiens
ctcccagcaacagca

SEQ ID NO: 986324 - DNA, 15 bp, Homo sapiens
gctcccagcaacagc

SEQ ID NO: 986325 - DNA, 15 bp, Homo sapiens
agctcccagcaacag

SEQ ID NO: 986326 - DNA, 15 bp, Homo sapiens
cagctcccagcaaca

SEQ ID NO: 986327 - DNA, 15 bp, Homo sapiens
acagctcccagcaac

SEQ ID NO: 986328 - DNA, 15 bp, Homo sapiens
aacagctcccagcaa

SEQ ID NO: 986329 - DNA, 15 bp, Homo sapiens
gaacagctcccagca

SEQ ID NO: 986330 - DNA, 15 bp, Homo sapiens
agaacagctcccagc

SEQ ID NO: 986331 - DNA, 15 bp, Homo sapiens
tagaacagctcccag

SEQ ID NO: 986332 - DNA, 15 bp, Homo sapiens
gtagaacagctccca

SEQ ID NO: 986333 - DNA, 15 bp, Homo sapiens
agtagaacagctccc

SEQ ID NO: 986334 - DNA, 15 bp, Homo sapiens
cagtagaacagctcc

SEQ ID NO: 986335 - DNA, 15 bp, Homo sapiens
gcagtagaacagctc

SEQ ID NO: 986336 - DNA, 15 bp, Homo sapiens
agcagtagaacagct

SEQ ID NO: 986337 - DNA, 15 bp, Homo sapiens
tagcagtagaacagc

SEQ ID NO: 986338 - DNA, 15 bp, Homo sapiens
atagcagtagaacag

SEQ ID NO: 986339 - DNA, 15 bp, Homo sapiens
aatagcagtagaaca

SEQ ID NO: 986340 - DNA, 15 bp, Homo sapiens
taatagcagtagaac

SEQ ID NO: 986341 - DNA, 15 bp, Homo sapiens
ctaatagcagtagaa

SEQ ID NO: 986342 - DNA, 15 bp, Homo sapiens
gctaatagcagtaga

SEQ ID NO: 986343 - DNA, 15 bp, Homo sapiens
agctaatagcagtag

SEQ ID NO: 986344 - DNA, 15 bp, Homo sapiens
gagctaatagcagta

SEQ ID NO: 986345 - DNA, 15 bp, Homo sapiens
agagctaatagcagt

SEQ ID NO: 986346 - DNA, 15 bp, Homo sapiens
cagagctaatagcag

SEQ ID NO: 986347 - DNA, 15 bp, Homo sapiens
gcagagctaatagca

SEQ ID NO: 986348 - DNA, 15 bp, Homo sapiens
ggcagagctaatagc

SEQ ID NO: 986349 - DNA, 15 bp, Homo sapiens
gggcagagctaatag

SEQ ID NO: 986350 - DNA, 15 bp, Homo sapiens
cgggcagagctaata

SEQ ID NO: 986351 - DNA, 15 bp, Homo sapiens
ccgggcagagctaat

SEQ ID NO: 986352 - DNA, 15 bp, Homo sapiens
accgggcagagctaa

SEQ ID NO: 986353 - DNA, 15 bp, Homo sapiens
gaccgggcagagcta

SEQ ID NO: 986354 - DNA, 15 bp, Homo sapiens
tgaccgggcagagct

SEQ ID NO: 986355 - DNA, 15 bp, Homo sapiens
atgaccgggcagagc

SEQ ID NO: 986356 - DNA, 15 bp, Homo sapiens
catgaccgggcagag

SEQ ID NO: 986357 - DNA, 15 bp, Homo sapiens
tcatgaccgggcaga

SEQ ID NO: 986358 - DNA, 15 bp, Homo sapiens
gtcatgaccgggcag

SEQ ID NO: 986359 - DNA, 15 bp, Homo sapiens
ggtcatgaccgggca

SEQ ID NO: 986360 - DNA, 15 bp, Homo sapiens
tggtcatgaccgggc

SEQ ID NO: 986361 - DNA, 15 bp, Homo sapiens
ctggtcatgaccggg

SEQ ID NO: 986362 - DNA, 15 bp, Homo sapiens
cctggtcatgaccgg

SEQ ID NO: 986363 - DNA, 15 bp, Homo sapiens
tcctggtcatgaccg

SEQ ID NO: 986364 - DNA, 15 bp, Homo sapiens
ttcctggtcatgacc

SEQ ID NO: 986365 - DNA, 15 bp, Homo sapiens
tttcctggtcatgac

SEQ ID NO: 986366 - DNA, 15 bp, Homo sapiens
gtttcctggtcatga

SEQ ID NO: 986367 - DNA, 15 bp, Homo sapiens
ggtttcctggtcatg

SEQ ID NO: 986368 - DNA, 15 bp, Homo sapiens
tggtttcctggtcat

SEQ ID NO: 986369 - DNA, 15 bp, Homo sapiens
gtggtttcctggtca

SEQ ID NO: 986370 - DNA, 15 bp, Homo sapiens
cgtggtttcctggtc

SEQ ID NO: 986371 - DNA, 15 bp, Homo sapiens
tcgtggtttcctggt

SEQ ID NO: 986372 - DNA, 15 bp, Homo sapiens
gtcgtggtttcctgg

SEQ ID NO: 986373 - DNA, 15 bp, Homo sapiens
agtcgtggtttcctg

SEQ ID NO: 986374 - DNA, 15 bp, Homo sapiens
gagtcgtggtttcct

SEQ ID NO: 986375 - DNA, 15 bp, Homo sapiens
tgagtcgtggtttcc

SEQ ID NO: 986376 - DNA, 15 bp, Homo sapiens
ttgagtcgtggtttc

SEQ ID NO: 986377 - DNA, 15 bp, Homo sapiens
cttgagtcgtggttt

SEQ ID NO: 986378 - DNA, 15 bp, Homo sapiens
ccttgagtcgtggtt

SEQ ID NO: 986379 - DNA, 15 bp, Homo sapiens
cccttgagtcgtggt

SEQ ID NO: 986380 - DNA, 15 bp, Homo sapiens
gcccttgagtcgtgg

SEQ ID NO: 986381 - DNA, 15 bp, Homo sapiens
ggcccttgagtcgtg

SEQ ID NO: 986382 - DNA, 15 bp, Homo sapiens
gggcccttgagtcgt

SEQ ID NO: 986383 - DNA, 15 bp, Homo sapiens
cgggcccttgagtcg

SEQ ID NO: 986384 - DNA, 15 bp, Homo sapiens
ccgggcccttgagtc

SEQ ID NO: 986385 - DNA, 15 bp, Homo sapiens
tccgggcccttgagt

SEQ ID NO: 986386 - DNA, 15 bp, Homo sapiens
ctccgggcccttgag

SEQ ID NO: 986387 - DNA, 15 bp, Homo sapiens
actccgggcccttga

SEQ ID NO: 986388 - DNA, 15 bp, Homo sapiens
gactccgggcccttg

SEQ ID NO: 986389 - DNA, 15 bp, Homo sapiens
ggactccgggccctt

SEQ ID NO: 986390 - DNA, 15 bp, Homo sapiens
aggactccgggccct

SEQ ID NO: 986391 - DNA, 15 bp, Homo sapiens
caggactccgggccc

SEQ ID NO: 986392 - DNA, 15 bp, Homo sapiens
gcaggactccgggcc

SEQ ID NO: 986393 - DNA, 15 bp, Homo sapiens
agcaggactccgggc

SEQ ID NO: 986394 - DNA, 15 bp, Homo sapiens
aagcaggactccggg

SEQ ID NO: 986395 - DNA, 15 bp, Homo sapiens
gaagcaggactccgg

SEQ ID NO: 986396 - DNA, 15 bp, Homo sapiens
ggaagcaggactccg

SEQ ID NO: 986397 - DNA, 15 bp, Homo sapiens
gggaagcaggactcc

SEQ ID NO: 986398 - DNA, 15 bp, Homo sapiens
ggggaagcaggactc

SEQ ID NO: 986399 - DNA, 15 bp, Homo sapiens
aggggaagcaggact

SEQ ID NO: 986400 - DNA, 15 bp, Homo sapiens
caggggaagcaggac

SEQ ID NO: 986401 - DNA, 15 bp, Homo sapiens
gcaggggaagcagga

SEQ ID NO: 986402 - DNA, 15 bp, Homo sapiens
ggcaggggaagcagg

SEQ ID NO: 986403 - DNA, 15 bp, Homo sapiens
gggcaggggaagcag

SEQ ID NO: 986404 - DNA, 15 bp, Homo sapiens
tgggcaggggaagca

SEQ ID NO: 986405 - DNA, 15 bp, Homo sapiens
ttgggcaggggaagc

SEQ ID NO: 986406 - DNA, 15 bp, Homo sapiens
cttgggcaggggaag

SEQ ID NO: 986407 - DNA, 15 bp, Homo sapiens
ccttgggcaggggaa

SEQ ID NO: 986408 - DNA, 15 bp, Homo sapiens
cccttgggcagggga

SEQ ID NO: 986409 - DNA, 15 bp, Homo sapiens
ccccttgggcagggg

SEQ ID NO: 986410 - DNA, 15 bp, Homo sapiens
cccccttgggcaggg

SEQ ID NO: 986411 - DNA, 15 bp, Homo sapiens
gcccccttgggcagg

SEQ ID NO: 986412 - DNA, 15 bp, Homo sapiens
ggcccccttgggcag

SEQ ID NO: 986413 - DNA, 15 bp, Homo sapiens
aggcccccttgggca

SEQ ID NO: 986414 - DNA, 15 bp, Homo sapiens
caggcccccttgggc

SEQ ID NO: 986415 - DNA, 15 bp, Homo sapiens
gcaggcccccttggg

SEQ ID NO: 986416 - DNA, 15 bp, Homo sapiens
tgcaggcccccttgg

SEQ ID NO: 986417 - DNA, 15 bp, Homo sapiens
gtgcaggcccccttg

SEQ ID NO: 986418 - DNA, 15 bp, Homo sapiens
tgtgcaggccccctt

SEQ ID NO: 986419 - DNA, 15 bp, Homo sapiens
ctgtgcaggccccct

SEQ ID NO: 986420 - DNA, 15 bp, Homo sapiens
cctgtgcaggccccc

SEQ ID NO: 986421 - DNA, 15 bp, Homo sapiens
acctgtgcaggcccc

SEQ ID NO: 986422 - DNA, 15 bp, Homo sapiens
aacctgtgcaggccc

SEQ ID NO: 986423 - DNA, 15 bp, Homo sapiens
caacctgtgcaggcc

SEQ ID NO: 986424 - DNA, 15 bp, Homo sapiens
ccaacctgtgcaggc

SEQ ID NO: 986425 - DNA, 15 bp, Homo sapiens
tccaacctgtgcagg

SEQ ID NO: 986426 - DNA, 15 bp, Homo sapiens
atccaacctgtgcag

SEQ ID NO: 986427 - DNA, 15 bp, Homo sapiens
catccaacctgtgca

SEQ ID NO: 986428 - DNA, 15 bp, Homo sapiens
ccatccaacctgtgc

SEQ ID NO: 986429 - DNA, 15 bp, Homo sapiens
gccatccaacctgtg

SEQ ID NO: 986430 - DNA, 15 bp, Homo sapiens
cgccatccaacctgt

SEQ ID NO: 986431 - DNA, 15 bp, Homo sapiens
ccgccatccaacctg

SEQ ID NO: 986432 - DNA, 15 bp, Homo sapiens
cccgccatccaacct

SEQ ID NO: 986433 - DNA, 15 bp, Homo sapiens
gcccgccatccaacc

SEQ ID NO: 986434 - DNA, 15 bp, Homo sapiens
tgcccgccatccaac

SEQ ID NO: 986435 - DNA, 15 bp, Homo sapiens
atgcccgccatccaa

SEQ ID NO: 986436 - DNA, 15 bp, Homo sapiens
gatgcccgccatcca

SEQ ID NO: 986437 - DNA, 15 bp, Homo sapiens
ggatgcccgccatcc

SEQ ID NO: 986438 - DNA, 15 bp, Homo sapiens
gggatgcccgccatc

SEQ ID NO: 986439 - DNA, 15 bp, Homo sapiens
tgggatgcccgccat

SEQ ID NO: 986440 - DNA, 15 bp, Homo sapiens
ctgggatgcccgcca

SEQ ID NO: 986441 - DNA, 15 bp, Homo sapiens
cctgggatgcccgcc

SEQ ID NO: 986442 - DNA, 15 bp, Homo sapiens
ccctgggatgcccgc

SEQ ID NO: 986443 - DNA, 15 bp, Homo sapiens
gccctgggatgcccg

SEQ ID NO: 986444 - DNA, 15 bp, Homo sapiens
tgccctgggatgccc

SEQ ID NO: 986445 - DNA, 15 bp, Homo sapiens
atgccctgggatgcc

SEQ ID NO: 986446 - DNA, 15 bp, Homo sapiens
gatgccctgggatgc

SEQ ID NO: 986447 - DNA, 15 bp, Homo sapiens
ggatgccctgggatg

SEQ ID NO: 986448 - DNA, 15 bp, Homo sapiens
cggatgccctgggat

SEQ ID NO: 986449 - DNA, 15 bp, Homo sapiens
ccggatgccctggga

SEQ ID NO: 986450 - DNA, 15 bp, Homo sapiens
cccggatgccctggg

SEQ ID NO: 986451 - DNA, 15 bp, Homo sapiens
gcccggatgccctgg

SEQ ID NO: 986452 - DNA, 15 bp, Homo sapiens
ggcccggatgccctg

SEQ ID NO: 986453 - DNA, 15 bp, Homo sapiens
tggcccggatgccct

SEQ ID NO: 986454 - DNA, 15 bp, Homo sapiens
atggcccggatgccc

SEQ ID NO: 986455 - DNA, 15 bp, Homo sapiens
tatggcccggatgcc

SEQ ID NO: 986456 - DNA, 15 bp, Homo sapiens
ttatggcccggatgc

SEQ ID NO: 986457 - DNA, 15 bp, Homo sapiens
attatggcccggatg

SEQ ID NO: 986458 - DNA, 15 bp, Homo sapiens
cattatggcccggat

SEQ ID NO: 986459 - DNA, 15 bp, Homo sapiens
ccattatggcccgga

SEQ ID NO: 986460 - DNA, 15 bp, Homo sapiens
cccattatggcccgg

SEQ ID NO: 986461 - DNA, 15 bp, Homo sapiens
ccccattatggcccg

SEQ ID NO: 986462 - DNA, 15 bp, Homo sapiens
gccccattatggccc

SEQ ID NO: 986463 - DNA, 15 bp, Homo sapiens
ggccccattatggcc

SEQ ID NO: 986464 - DNA, 15 bp, Homo sapiens
gggccccattatggc

SEQ ID NO: 986465 - DNA, 15 bp, Homo sapiens
ggggccccattatgg

SEQ ID NO: 986466 - DNA, 15 bp, Homo sapiens
tggggccccattatg

SEQ ID NO: 986467 - DNA, 15 bp, Homo sapiens
ctggggccccattat

SEQ ID NO: 986468 - DNA, 15 bp, Homo sapiens
cctggggccccatta

SEQ ID NO: 986469 - DNA, 15 bp, Homo sapiens
gcctggggccccatt

SEQ ID NO: 986470 - DNA, 15 bp, Homo sapiens
ggcctggggccccat

SEQ ID NO: 986471 - DNA, 15 bp, Homo sapiens
cggcctggggcccca

SEQ ID NO: 986472 - DNA, 15 bp, Homo sapiens
acggcctggggcccc

SEQ ID NO: 986473 - DNA, 15 bp, Homo sapiens
cacggcctggggccc

SEQ ID NO: 986474 - DNA, 15 bp, Homo sapiens
tcacggcctggggcc

SEQ ID NO: 986475 - DNA, 15 bp, Homo sapiens
atcacggcctggggc

SEQ ID NO: 986476 - DNA, 15 bp, Homo sapiens
catcacggcctgggg

SEQ ID NO: 986477 - DNA, 15 bp, Homo sapiens
ccatcacggcctggg

SEQ ID NO: 986478 - DNA, 15 bp, Homo sapiens
gccatcacggcctgg

SEQ ID NO: 986479 - DNA, 15 bp, Homo sapiens
tgccatcacggcctg

SEQ ID NO: 986480 - DNA, 15 bp, Homo sapiens
ctgccatcacggcct

SEQ ID NO: 986481 - DNA, 15 bp, Homo sapiens
tctgccatcacggcc

SEQ ID NO: 986482 - DNA, 15 bp, Homo sapiens
ctctgccatcacggc

SEQ ID NO: 986483 - DNA, 15 bp, Homo sapiens
tctctgccatcacgg

SEQ ID NO: 986484 - DNA, 15 bp, Homo sapiens
atctctgccatcacg

SEQ ID NO: 986485 - DNA, 15 bp, Homo sapiens
catctctgccatcac

SEQ ID NO: 986486 - DNA, 15 bp, Homo sapiens
ccatctctgccatca

SEQ ID NO: 986487 - DNA, 15 bp, Homo sapiens
gccatctctgccatc

SEQ ID NO: 986488 - DNA, 15 bp, Homo sapiens
tgccatctctgccat

SEQ ID NO: 986489 - DNA, 15 bp, Homo sapiens
gtgccatctctgcca

SEQ ID NO: 986490 - DNA, 15 bp, Homo sapiens
ggtgccatctctgcc

SEQ ID NO: 986491 - DNA, 15 bp, Homo sapiens
gggtgccatctctgc

SEQ ID NO: 986492 - DNA, 15 bp, Homo sapiens
ggggtgccatctctg

SEQ ID NO: 986493 - DNA, 15 bp, Homo sapiens
aggggtgccatctct

SEQ ID NO: 986494 - DNA, 15 bp, Homo sapiens
caggggtgccatctc

SEQ ID NO: 986495 - DNA, 15 bp, Homo sapiens
ccaggggtgccatct

SEQ ID NO: 986496 - DNA, 15 bp, Homo sapiens
accaggggtgccatc

SEQ ID NO: 986497 - DNA, 15 bp, Homo sapiens
caccaggggtgccat

SEQ ID NO: 986498 - DNA, 15 bp, Homo sapiens
tcaccaggggtgcca

SEQ ID NO: 986499 - DNA, 15 bp, Homo sapiens
ctcaccaggggtgcc

SEQ ID NO: 986500 - DNA, 15 bp, Homo sapiens
tctcaccaggggtgc

SEQ ID NO: 986501 - DNA, 15 bp, Homo sapiens
ttctcaccaggggtg

SEQ ID NO: 986502 - DNA, 15 bp, Homo sapiens
cttctcaccaggggt

SEQ ID NO: 986503 - DNA, 15 bp, Homo sapiens
ccttctcaccagggg

SEQ ID NO: 986504 - DNA, 15 bp, Homo sapiens
cccttctcaccaggg

SEQ ID NO: 986505 - DNA, 15 bp, Homo sapiens
acccttctcaccagg

SEQ ID NO: 986506 - DNA, 15 bp, Homo sapiens
cacccttctcaccag

SEQ ID NO: 986507 - DNA, 15 bp, Homo sapiens
tcacccttctcacca

SEQ ID NO: 986508 - DNA, 15 bp, Homo sapiens
ctcacccttctcacc

SEQ ID NO: 986509 - DNA, 15 bp, Homo sapiens
tctcacccttctcac

SEQ ID NO: 986510 - DNA, 15 bp, Homo sapiens
ttctcacccttctca

SEQ ID NO: 986511 - DNA, 15 bp, Homo sapiens
tttctcacccttctc

SEQ ID NO: 986512 - DNA, 15 bp, Homo sapiens
ctttctcacccttct

SEQ ID NO: 986513 - DNA, 15 bp, Homo sapiens
cctttctcacccttc

SEQ ID NO: 986514 - DNA, 15 bp, Homo sapiens
tcctttctcaccctt

SEQ ID NO: 986515 - DNA, 15 bp, Homo sapiens
ctcctttctcaccct

SEQ ID NO: 986516 - DNA, 15 bp, Homo sapiens
tctcctttctcaccc

SEQ ID NO: 986517 - DNA, 15 bp, Homo sapiens
atctcctttctcacc

SEQ ID NO: 986518 - DNA, 15 bp, Homo sapiens
gatctcctttctcac

SEQ ID NO: 986519 - DNA, 15 bp, Homo sapiens
ggatctcctttctca

SEQ ID NO: 986520 - DNA, 15 bp, Homo sapiens
tggatctcctttctc

SEQ ID NO: 986521 - DNA, 15 bp, Homo sapiens
ctggatctcctttct

SEQ ID NO: 986522 - DNA, 15 bp, Homo sapiens
cctggatctcctttc

SEQ ID NO: 986523 - DNA, 15 bp, Homo sapiens
acctggatctccttt

SEQ ID NO: 986524 - DNA, 15 bp, Homo sapiens
tacctggatctcctt

SEQ ID NO: 986525 - DNA, 15 bp, Homo sapiens
ttacctggatctcct

SEQ ID NO: 986526 - DNA, 15 bp, Homo sapiens
cttacctggatctcc

SEQ ID NO: 986527 - DNA, 15 bp, Homo sapiens
tcttacctggatctc

SEQ ID NO: 986528 - DNA, 15 bp, Homo sapiens
ttcttacctggatct

SEQ ID NO: 986529 - DNA, 15 bp, Homo sapiens
attcttacctggatc

SEQ ID NO: 986530 - DNA, 15 bp, Homo sapiens
cattcttacctggat

SEQ ID NO: 986531 - DNA, 15 bp, Homo sapiens
acattcttacctgga

SEQ ID NO: 986532 - DNA, 15 bp, Homo sapiens
aacattcttacctgg

SEQ ID NO: 986533 - DNA, 15 bp, Homo sapiens
aaacattcttacctg

SEQ ID NO: 986534 - DNA, 15 bp, Homo sapiens
gaaacattcttacct

SEQ ID NO: 986535 - DNA, 15 bp, Homo sapiens
agaaacattcttacc

SEQ ID NO: 986536 - DNA, 15 bp, Homo sapiens
cagaaacattcttac

SEQ ID NO: 986537 - DNA, 15 bp, Homo sapiens
ccagaaacattctta

SEQ ID NO: 986538 - DNA, 15 bp, Homo sapiens
gccagaaacattctt

SEQ ID NO: 986539 - DNA, 15 bp, Homo sapiens
ggccagaaacattct

SEQ ID NO: 986540 - DNA, 15 bp, Homo sapiens
aggccagaaacattc

SEQ ID NO: 986541 - DNA, 15 bp, Homo sapiens
gaggccagaaacatt

SEQ ID NO: 986542 - DNA, 15 bp, Homo sapiens
agaggccagaaacat

SEQ ID NO: 986543 - DNA, 15 bp, Homo sapiens
aagaggccagaaaca

SEQ ID NO: 986544 - DNA, 15 bp, Homo sapiens
aaagaggccagaaac

SEQ ID NO: 986545 - DNA, 15 bp, Homo sapiens
gaaagaggccagaaa

SEQ ID NO: 986546 - DNA, 15 bp, Homo sapiens
tgaaagaggccagaa

SEQ ID NO: 986547 - DNA, 15 bp, Homo sapiens
atgaaagaggccaga

SEQ ID NO: 986548 - DNA, 15 bp, Homo sapiens
gatgaaagaggccag

SEQ ID NO: 986549 - DNA, 15 bp, Homo sapiens
tgatgaaagaggcca

SEQ ID NO: 986550 - DNA, 15 bp, Homo sapiens
gtgatgaaagaggcc

SEQ ID NO: 986551 - DNA, 15 bp, Homo sapiens
tgtgatgaaagaggc

SEQ ID NO: 986552 - DNA, 15 bp, Homo sapiens
ctgtgatgaaagagg

SEQ ID NO: 986553 - DNA, 15 bp, Homo sapiens
tctgtgatgaaagag

SEQ ID NO: 986554 - DNA, 15 bp, Homo sapiens
gtctgtgatgaaaga

SEQ ID NO: 986555 - DNA, 15 bp, Homo sapiens
ggtctgtgatgaaag

SEQ ID NO: 986556 - DNA, 15 bp, Homo sapiens
aggtctgtgatgaaa

SEQ ID NO: 986557 - DNA, 15 bp, Homo sapiens
gaggtctgtgatgaa

SEQ ID NO: 986558 - DNA, 15 bp, Homo sapiens
ggaggtctgtgatga

SEQ ID NO: 986559 - DNA, 15 bp, Homo sapiens
aggaggtctgtgatg

SEQ ID NO: 986560 - DNA, 15 bp, Homo sapiens
taggaggtctgtgat

SEQ ID NO: 986561 - DNA, 15 bp, Homo sapiens
gtaggaggtctgtga

SEQ ID NO: 986562 - DNA, 15 bp, Homo sapiens
tgtaggaggtctgtg

SEQ ID NO: 986563 - DNA, 15 bp, Homo sapiens
gtgtaggaggtctgt

SEQ ID NO: 986564 - DNA, 15 bp, Homo sapiens
agtgtaggaggtctg

SEQ ID NO: 986565 - DNA, 15 bp, Homo sapiens
cagtgtaggaggtct

SEQ ID NO: 986566 - DNA, 15 bp, Homo sapiens
tcagtgtaggaggtc

SEQ ID NO: 986567 - DNA, 15 bp, Homo sapiens
atcagtgtaggaggt

SEQ ID NO: 986568 - DNA, 15 bp, Homo sapiens
tatcagtgtaggagg

SEQ ID NO: 986569 - DNA, 15 bp, Homo sapiens
atatcagtgtaggag

SEQ ID NO: 986570 - DNA, 15 bp, Homo sapiens
tatatcagtgtagga

SEQ ID NO: 986571 - DNA, 15 bp, Homo sapiens
ttatatcagtgtagg

SEQ ID NO: 986572 - DNA, 15 bp, Homo sapiens
tttatatcagtgtag

SEQ ID NO: 986573 - DNA, 15 bp, Homo sapiens
gtttatatcagtgta

SEQ ID NO: 986574 - DNA, 15 bp, Homo sapiens
agtttatatcagtgt

SEQ ID NO: 986575 - DNA, 15 bp, Homo sapiens
tagtttatatcagtg

SEQ ID NO: 986576 - DNA, 15 bp, Homo sapiens
atagtttatatcagt

SEQ ID NO: 986577 - DNA, 15 bp, Homo sapiens
tatagtttatatcag

SEQ ID NO: 986578 - DNA, 15 bp, Homo sapiens
atatagtttatatca

SEQ ID NO: 986579 - DNA, 15 bp, Homo sapiens
catatagtttatatc

SEQ ID NO: 986580 - DNA, 15 bp, Homo sapiens
tcatatagtttatat

SEQ ID NO: 986581 - DNA, 15 bp, Homo sapiens
ttcatatagtttata

SEQ ID NO: 986582 - DNA, 15 bp, Homo sapiens
cttcatatagtttat

SEQ ID NO: 986583 - DNA, 15 bp, Homo sapiens
ccttcatatagttta

SEQ ID NO: 986584 - DNA, 15 bp, Homo sapiens
gccttcatatagttt

SEQ ID NO: 986585 - DNA, 15 bp, Homo sapiens
tgccttcatatagtt

SEQ ID NO: 986586 - DNA, 15 bp, Homo sapiens
atgccttcatatagt

SEQ ID NO: 986587 - DNA, 15 bp, Homo sapiens
aatgccttcatatag

SEQ ID NO: 986588 - DNA, 15 bp, Homo sapiens
gaatgccttcatata

SEQ ID NO: 986589 - DNA, 15 bp, Homo sapiens
tgaatgccttcatat

SEQ ID NO: 986590 - DNA, 15 bp, Homo sapiens
atgaatgccttcata

SEQ ID NO: 986591 - DNA, 15 bp, Homo sapiens
aatgaatgccttcat

SEQ ID NO: 986592 - DNA, 15 bp, Homo sapiens
taatgaatgccttca

SEQ ID NO: 986593 - DNA, 15 bp, Homo sapiens
ataatgaatgccttc

SEQ ID NO: 986594 - DNA, 15 bp, Homo sapiens
aataatgaatgcctt

SEQ ID NO: 986595 - DNA, 15 bp, Homo sapiens
taataatgaatgcct

SEQ ID NO: 986596 - DNA, 15 bp, Homo sapiens
ttaataatgaatgcc

SEQ ID NO: 986597 - DNA, 15 bp, Homo sapiens
gttaataatgaatgc

SEQ ID NO: 986598 - DNA, 15 bp, Homo sapiens
agttaataatgaatg

SEQ ID NO: 986599 - DNA, 15 bp, Homo sapiens
tagttaataatgaat

SEQ ID NO: 986600 - DNA, 15 bp, Homo sapiens
ttagttaataatgaa

SEQ ID NO: 986601 - DNA, 15 bp, Homo sapiens
cttagttaataatga

SEQ ID NO: 986602 - DNA, 15 bp, Homo sapiens
ccttagttaataatg

SEQ ID NO: 986603 - DNA, 15 bp, Homo sapiens
gccttagttaataat

SEQ ID NO: 986604 - DNA, 15 bp, Homo sapiens
ggccttagttaataa

SEQ ID NO: 986605 - DNA, 15 bp, Homo sapiens
aggccttagttaata

SEQ ID NO: 986606 - DNA, 15 bp, Homo sapiens
taggccttagttaat

SEQ ID NO: 986607 - DNA, 15 bp, Homo sapiens
ctaggccttagttaa

SEQ ID NO: 986608 - DNA, 15 bp, Homo sapiens
tctaggccttagtta

SEQ ID NO: 986609 - DNA, 15 bp, Homo sapiens
gtctaggccttagtt

SEQ ID NO: 986610 - DNA, 15 bp, Homo sapiens
tgtctaggccttagt

SEQ ID NO: 986611 - DNA, 15 bp, Homo sapiens
gtgtctaggccttag

SEQ ID NO: 986612 - DNA, 15 bp, Homo sapiens
tgtgtctaggcctta

SEQ ID NO: 986613 - DNA, 15 bp, Homo sapiens
ctgtgtctaggcctt

SEQ ID NO: 986614 - DNA, 15 bp, Homo sapiens
cctgtgtctaggcct

SEQ ID NO: 986615 - DNA, 15 bp, Homo sapiens
ccctgtgtctaggcc

SEQ ID NO: 986616 - DNA, 15 bp, Homo sapiens
tccctgtgtctaggc

SEQ ID NO: 986617 - DNA, 15 bp, Homo sapiens
ctccctgtgtctagg

SEQ ID NO: 986618 - DNA, 15 bp, Homo sapiens
tctccctgtgtctag

SEQ ID NO: 986619 - DNA, 15 bp, Homo sapiens
ttctccctgtgtcta

SEQ ID NO: 986620 - DNA, 15 bp, Homo sapiens
tttctccctgtgtct

SEQ ID NO: 986621 - DNA, 15 bp, Homo sapiens
ctttctccctgtgtc

SEQ ID NO: 986622 - DNA, 15 bp, Homo sapiens
gctttctccctgtgt

SEQ ID NO: 986623 - DNA, 15 bp, Homo sapiens
tgctttctccctgtg

SEQ ID NO: 986624 - DNA, 15 bp, Homo sapiens
ttgctttctccctgt

SEQ ID NO: 986625 - DNA, 15 bp, Homo sapiens
tttgctttctccctg

SEQ ID NO: 986626 - DNA, 15 bp, Homo sapiens
ctttgctttctccct

SEQ ID NO: 986627 - DNA, 15 bp, Homo sapiens
gctttgctttctccc

SEQ ID NO: 986628 - DNA, 15 bp, Homo sapiens
agctttgctttctcc

SEQ ID NO: 986629 - DNA, 15 bp, Homo sapiens
aagctttgctttctc

SEQ ID NO: 986630 - DNA, 15 bp, Homo sapiens
aaagctttgctttct

SEQ ID NO: 986631 - DNA, 15 bp, Homo sapiens
aaaagctttgctttc

SEQ ID NO: 986632 - DNA, 15 bp, Homo sapiens
aaaaagctttgcttt

SEQ ID NO: 986633 - DNA, 15 bp, Homo sapiens
aaaaaagctttgctt

SEQ ID NO: 986634 - DNA, 15 bp, Homo sapiens
taaaaaagctttgct

SEQ ID NO: 986635 - DNA, 15 bp, Homo sapiens
ataaaaaagctttgc

SEQ ID NO: 986636 - DNA, 15 bp, Homo sapiens
cataaaaaagctttg

SEQ ID NO: 986637 - DNA, 15 bp, Homo sapiens
acataaaaaagcttt

SEQ ID NO: 986638 - DNA, 15 bp, Homo sapiens
aacataaaaaagctt

SEQ ID NO: 986639 - DNA, 15 bp, Homo sapiens
taacataaaaaagct

SEQ ID NO: 986640 - DNA, 15 bp, Homo sapiens
ttaacataaaaaagc

SEQ ID NO: 986641 - DNA, 15 bp, Homo sapiens
gttaacataaaaaag

SEQ ID NO: 986642 - DNA, 15 bp, Homo sapiens
ggttaacataaaaaa

SEQ ID NO: 986643 - DNA, 15 bp, Homo sapiens
tggttaacataaaaa

SEQ ID NO: 986644 - DNA, 15 bp, Homo sapiens
atggttaacataaaa

SEQ ID NO: 986645 - DNA, 15 bp, Homo sapiens
tatggttaacataaa

SEQ ID NO: 986646 - DNA, 15 bp, Homo sapiens
ttatggttaacataa

SEQ ID NO: 986647 - DNA, 15 bp, Homo sapiens
cttatggttaacata

SEQ ID NO: 986648 - DNA, 15 bp, Homo sapiens
gcttatggttaacat

SEQ ID NO: 986649 - DNA, 15 bp, Homo sapiens
tgcttatggttaaca

SEQ ID NO: 986650 - DNA, 15 bp, Homo sapiens
ttgcttatggttaac

SEQ ID NO: 986651 - DNA, 15 bp, Homo sapiens
gttgcttatggttaa

SEQ ID NO: 986652 - DNA, 15 bp, Homo sapiens
ggttgcttatggtta

SEQ ID NO: 986653 - DNA, 15 bp, Homo sapiens
aggttgcttatggtt

SEQ ID NO: 986654 - DNA, 15 bp, Homo sapiens
caggttgcttatggt

SEQ ID NO: 986655 - DNA, 15 bp, Homo sapiens
tcaggttgcttatgg

SEQ ID NO: 986656 - DNA, 15 bp, Homo sapiens
ttcaggttgcttatg

SEQ ID NO: 986657 - DNA, 15 bp, Homo sapiens
cttcaggttgcttat

SEQ ID NO: 986658 - DNA, 15 bp, Homo sapiens
acttcaggttgctta

SEQ ID NO: 986659 - DNA, 15 bp, Homo sapiens
cacttcaggttgctt

SEQ ID NO: 986660 - DNA, 15 bp, Homo sapiens
tcacttcaggttgct

SEQ ID NO: 986661 - DNA, 15 bp, Homo sapiens
atcacttcaggttgc

SEQ ID NO: 986662 - DNA, 15 bp, Homo sapiens
aatcacttcaggttg

SEQ ID NO: 986663 - DNA, 15 bp, Homo sapiens
aaatcacttcaggtt

SEQ ID NO: 986664 - DNA, 15 bp, Homo sapiens
caaatcacttcaggt

SEQ ID NO: 986665 - DNA, 15 bp, Homo sapiens
ccaaatcacttcagg

SEQ ID NO: 986666 - DNA, 15 bp, Homo sapiens
cccaaatcacttcag

SEQ ID NO: 986667 - DNA, 15 bp, Homo sapiens
ccccaaatcacttca

SEQ ID NO: 986668 - DNA, 15 bp, Homo sapiens
accccaaatcacttc

SEQ ID NO: 986669 - DNA, 15 bp, Homo sapiens
aaccccaaatcactt

SEQ ID NO: 986670 - DNA, 15 bp, Homo sapiens
caaccccaaatcact

SEQ ID NO: 986671 - DNA, 15 bp, Homo sapiens
ccaaccccaaatcac

SEQ ID NO: 986672 - DNA, 15 bp, Homo sapiens
accaaccccaaatca

SEQ ID NO: 986673 - DNA, 15 bp, Homo sapiens
gaccaaccccaaatc

SEQ ID NO: 986674 - DNA, 15 bp, Homo sapiens
agaccaaccccaaat

SEQ ID NO: 986675 - DNA, 15 bp, Homo sapiens
aagaccaaccccaaa

SEQ ID NO: 986676 - DNA, 15 bp, Homo sapiens
gaagaccaaccccaa

SEQ ID NO: 986677 - DNA, 15 bp, Homo sapiens
ggaagaccaacccca

SEQ ID NO: 986678 - DNA, 15 bp, Homo sapiens
tggaagaccaacccc

SEQ ID NO: 986679 - DNA, 15 bp, Homo sapiens
ttggaagaccaaccc

SEQ ID NO: 986680 - DNA, 15 bp, Homo sapiens
cttggaagaccaacc

SEQ ID NO: 986681 - DNA, 15 bp, Homo sapiens
ccttggaagaccaac

SEQ ID NO: 986682 - DNA, 15 bp, Homo sapiens
tccttggaagaccaa

SEQ ID NO: 986683 - DNA, 15 bp, Homo sapiens
atccttggaagacca

SEQ ID NO: 986684 - DNA, 15 bp, Homo sapiens
catccttggaagacc

SEQ ID NO: 986685 - DNA, 15 bp, Homo sapiens
tcatccttggaagac

SEQ ID NO: 986686 - DNA, 15 bp, Homo sapiens
ctcatccttggaaga

SEQ ID NO: 986687 - DNA, 15 bp, Homo sapiens
actcatccttggaag

SEQ ID NO: 986688 - DNA, 15 bp, Homo sapiens
cactcatccttggaa

SEQ ID NO: 986689 - DNA, 15 bp, Homo sapiens
acactcatccttgga

SEQ ID NO: 986690 - DNA, 15 bp, Homo sapiens
tacactcatccttgg

SEQ ID NO: 986691 - DNA, 15 bp, Homo sapiens
ctacactcatccttg

SEQ ID NO: 986692 - DNA, 15 bp, Homo sapiens
tctacactcatcctt

SEQ ID NO: 986693 - DNA, 15 bp, Homo sapiens
atctacactcatcct

SEQ ID NO: 986694 - DNA, 15 bp, Homo sapiens
catctacactcatcc

SEQ ID NO: 986695 - DNA, 15 bp, Homo sapiens
ccatctacactcatc

SEQ ID NO: 986696 - DNA, 15 bp, Homo sapiens
accatctacactcat

SEQ ID NO: 986697 - DNA, 15 bp, Homo sapiens
caccatctacactca

SEQ ID NO: 986698 - DNA, 15 bp, Homo sapiens
gcaccatctacactc

SEQ ID NO: 986699 - DNA, 15 bp, Homo sapiens
ggcaccatctacact

SEQ ID NO: 986700 - DNA, 15 bp, Homo sapiens
aggcaccatctacac

SEQ ID NO: 986701 - DNA, 15 bp, Homo sapiens
gaggcaccatctaca

SEQ ID NO: 986702 - DNA, 15 bp, Homo sapiens
agaggcaccatctac

SEQ ID NO: 986703 - DNA, 15 bp, Homo sapiens
tagaggcaccatcta

SEQ ID NO: 986704 - DNA, 15 bp, Homo sapiens
atagaggcaccatct

SEQ ID NO: 986705 - DNA, 15 bp, Homo sapiens
tatagaggcaccatc

SEQ ID NO: 986706 - DNA, 15 bp, Homo sapiens
ttatagaggcaccat

SEQ ID NO: 986707 - DNA, 15 bp, Homo sapiens
gttatagaggcacca

SEQ ID NO: 986708 - DNA, 15 bp, Homo sapiens
ggttatagaggcacc

SEQ ID NO: 986709 - DNA, 15 bp, Homo sapiens
tggttatagaggcac

SEQ ID NO: 986710 - DNA, 15 bp, Homo sapiens
ttggttatagaggca

SEQ ID NO: 986711 - DNA, 15 bp, Homo sapiens
cttggttatagaggc

SEQ ID NO: 986712 - DNA, 15 bp, Homo sapiens
tcttggttatagagg

SEQ ID NO: 986713 - DNA, 15 bp, Homo sapiens
gtcttggttatagag

SEQ ID NO: 986714 - DNA, 15 bp, Homo sapiens
agtcttggttataga

SEQ ID NO: 986715 - DNA, 15 bp, Homo sapiens
aagtcttggttatag

SEQ ID NO: 986716 - DNA, 15 bp, Homo sapiens
aaagtcttggttata

SEQ ID NO: 986717 - DNA, 15 bp, Homo sapiens
caaagtcttggttat

SEQ ID NO: 986718 - DNA, 15 bp, Homo sapiens
ccaaagtcttggtta

SEQ ID NO: 986719 - DNA, 15 bp, Homo sapiens
gccaaagtcttggtt

SEQ ID NO: 986720 - DNA, 15 bp, Homo sapiens
agccaaagtcttggt

SEQ ID NO: 986721 - DNA, 15 bp, Homo sapiens
aagccaaagtcttgg

SEQ ID NO: 986722 - DNA, 15 bp, Homo sapiens
aaagccaaagtcttg

SEQ ID NO: 986723 - DNA, 15 bp, Homo sapiens
caaagccaaagtctt

SEQ ID NO: 986724 - DNA, 15 bp, Homo sapiens
gcaaagccaaagtct

SEQ ID NO: 986725 - DNA, 15 bp, Homo sapiens
agcaaagccaaagtc

SEQ ID NO: 986726 - DNA, 15 bp, Homo sapiens
cagcaaagccaaagt

SEQ ID NO: 986727 - DNA, 15 bp, Homo sapiens
gcagcaaagccaaag

SEQ ID NO: 986728 - DNA, 15 bp, Homo sapiens
tgcagcaaagccaaa

SEQ ID NO: 986729 - DNA, 15 bp, Homo sapiens
atgcagcaaagccaa

SEQ ID NO: 986730 - DNA, 15 bp, Homo sapiens
gatgcagcaaagcca

SEQ ID NO: 986731 - DNA, 15 bp, Homo sapiens
agatgcagcaaagcc

SEQ ID NO: 986732 - DNA, 15 bp, Homo sapiens
cagatgcagcaaagc

SEQ ID NO: 986733 - DNA, 15 bp, Homo sapiens
gcagatgcagcaaag

SEQ ID NO: 986734 - DNA, 15 bp, Homo sapiens
tgcagatgcagcaaa

SEQ ID NO: 986735 - DNA, 15 bp, Homo sapiens
ctgcagatgcagcaa

SEQ ID NO: 986736 - DNA, 15 bp, Homo sapiens
gctgcagatgcagca

SEQ ID NO: 986737 - DNA, 15 bp, Homo sapiens
agctgcagatgcagc

SEQ ID NO: 986738 - DNA, 15 bp, Homo sapiens
gagctgcagatgcag

SEQ ID NO: 986739 - DNA, 15 bp, Homo sapiens
ggagctgcagatgca

SEQ ID NO: 986740 - DNA, 15 bp, Homo sapiens
aggagctgcagatgc

SEQ ID NO: 986741 - DNA, 15 bp, Homo sapiens
aaggagctgcagatg

SEQ ID NO: 986742 - DNA, 15 bp, Homo sapiens
aaaggagctgcagat

SEQ ID NO: 986743 - DNA, 15 bp, Homo sapiens
aaaaggagctgcaga

SEQ ID NO: 986744 - DNA, 15 bp, Homo sapiens
gaaaaggagctgcag

SEQ ID NO: 986745 - DNA, 15 bp, Homo sapiens
ggaaaaggagctgca

SEQ ID NO: 986746 - DNA, 15 bp, Homo sapiens
tggaaaaggagctgc

SEQ ID NO: 986747 - DNA, 15 bp, Homo sapiens
atggaaaaggagctg

SEQ ID NO: 986748 - DNA, 15 bp, Homo sapiens
gatggaaaaggagct

SEQ ID NO: 986749 - DNA, 15 bp, Homo sapiens
ggatggaaaaggagc

SEQ ID NO: 986750 - DNA, 15 bp, Homo sapiens
gggatggaaaaggag

SEQ ID NO: 986751 - DNA, 15 bp, Homo sapiens
ggggatggaaaagga

SEQ ID NO: 986752 - DNA, 15 bp, Homo sapiens
aggggatggaaaagg

SEQ ID NO: 986753 - DNA, 15 bp, Homo sapiens
aaggggatggaaaag

SEQ ID NO: 986754 - DNA, 15 bp, Homo sapiens
aaaggggatggaaaa

SEQ ID NO: 986755 - DNA, 15 bp, Homo sapiens
gaaaggggatggaaa

SEQ ID NO: 986756 - DNA, 15 bp, Homo sapiens
ggaaaggggatggaa

SEQ ID NO: 986757 - DNA, 15 bp, Homo sapiens
gggaaaggggatgga

SEQ ID NO: 986758 - DNA, 15 bp, Homo sapiens
tgggaaaggggatgg

SEQ ID NO: 986759 - DNA, 15 bp, Homo sapiens
atgggaaaggggatg

SEQ ID NO: 986760 - DNA, 15 bp, Homo sapiens
gatgggaaaggggat

SEQ ID NO: 986761 - DNA, 15 bp, Homo sapiens
agatgggaaagggga

SEQ ID NO: 986762 - DNA, 15 bp, Homo sapiens
aagatgggaaagggg

SEQ ID NO: 986763 - DNA, 15 bp, Homo sapiens
gaagatgggaaaggg

SEQ ID NO: 986764 - DNA, 15 bp, Homo sapiens
tgaagatgggaaagg

SEQ ID NO: 986765 - DNA, 15 bp, Homo sapiens
gtgaagatgggaaag

SEQ ID NO: 986766 - DNA, 15 bp, Homo sapiens
ggtgaagatgggaaa

SEQ ID NO: 986767 - DNA, 15 bp, Homo sapiens
gggtgaagatgggaa

SEQ ID NO: 986768 - DNA, 15 bp, Homo sapiens
agggtgaagatggga

SEQ ID NO: 986769 - DNA, 15 bp, Homo sapiens
gagggtgaagatggg

SEQ ID NO: 986770 - DNA, 15 bp, Homo sapiens
tgagggtgaagatgg

SEQ ID NO: 986771 - DNA, 15 bp, Homo sapiens
atgagggtgaagatg

SEQ ID NO: 986772 - DNA, 15 bp, Homo sapiens
gatgagggtgaagat

SEQ ID NO: 986773 - DNA, 15 bp, Homo sapiens
ggatgagggtgaaga

SEQ ID NO: 986774 - DNA, 15 bp, Homo sapiens
gggatgagggtgaag

SEQ ID NO: 986775 - DNA, 15 bp, Homo sapiens
agggatgagggtgaa

SEQ ID NO: 986776 - DNA, 15 bp, Homo sapiens
tagggatgagggtga

SEQ ID NO: 986777 - DNA, 15 bp, Homo sapiens
atagggatgagggtg

SEQ ID NO: 986778 - DNA, 15 bp, Homo sapiens
aatagggatgagggt

SEQ ID NO: 986779 - DNA, 15 bp, Homo sapiens
gaatagggatgaggg

SEQ ID NO: 986780 - DNA, 15 bp, Homo sapiens
ggaatagggatgagg

SEQ ID NO: 986781 - DNA, 15 bp, Homo sapiens
gggaatagggatgag

SEQ ID NO: 986782 - DNA, 15 bp, Homo sapiens
tgggaatagggatga

SEQ ID NO: 986783 - DNA, 15 bp, Homo sapiens
ctgggaatagggatg

SEQ ID NO: 986784 - DNA, 15 bp, Homo sapiens
actgggaatagggat

SEQ ID NO: 986785 - DNA, 15 bp, Homo sapiens
tactgggaataggga

SEQ ID NO: 986786 - DNA, 15 bp, Homo sapiens
gtactgggaataggg

SEQ ID NO: 986787 - DNA, 15 bp, Homo sapiens
tgtactgggaatagg

SEQ ID NO: 986788 - DNA, 15 bp, Homo sapiens
atgtactgggaatag

SEQ ID NO: 986789 - DNA, 15 bp, Homo sapiens
aatgtactgggaata

SEQ ID NO: 986790 - DNA, 15 bp, Homo sapiens
gaatgtactgggaat

SEQ ID NO: 986791 - DNA, 15 bp, Homo sapiens
tgaatgtactgggaa

SEQ ID NO: 986792 - DNA, 15 bp, Homo sapiens
atgaatgtactggga

SEQ ID NO: 986793 - DNA, 15 bp, Homo sapiens
tatgaatgtactggg

SEQ ID NO: 986794 - DNA, 15 bp, Homo sapiens
atatgaatgtactgg

SEQ ID NO: 986795 - DNA, 15 bp, Homo sapiens
aatatgaatgtactg

SEQ ID NO: 986796 - DNA, 15 bp, Homo sapiens
gaatatgaatgtact

SEQ ID NO: 986797 - DNA, 15 bp, Homo sapiens
agaatatgaatgtac

SEQ ID NO: 986798 - DNA, 15 bp, Homo sapiens
cagaatatgaatgta

SEQ ID NO: 986799 - DNA, 15 bp, Homo sapiens
tcagaatatgaatgt

SEQ ID NO: 986800 - DNA, 15 bp, Homo sapiens
atcagaatatgaatg

SEQ ID NO: 986801 - DNA, 15 bp, Homo sapiens
aatcagaatatgaat

SEQ ID NO: 986802 - DNA, 15 bp, Homo sapiens
gaatcagaatatgaa

SEQ ID NO: 986803 - DNA, 15 bp, Homo sapiens
ggaatcagaatatga

SEQ ID NO: 986804 - DNA, 15 bp, Homo sapiens
aggaatcagaatatg

SEQ ID NO: 986805 - DNA, 15 bp, Homo sapiens
gaggaatcagaatat

SEQ ID NO: 986806 - DNA, 15 bp, Homo sapiens
agaggaatcagaata

SEQ ID NO: 986807 - DNA, 15 bp, Homo sapiens
aagaggaatcagaat

SEQ ID NO: 986808 - DNA, 15 bp, Homo sapiens
aaagaggaatcagaa

SEQ ID NO: 986809 - DNA, 15 bp, Homo sapiens
gaaagaggaatcaga

SEQ ID NO: 986810 - DNA, 15 bp, Homo sapiens
agaaagaggaatcag

SEQ ID NO: 986811 - DNA, 15 bp, Homo sapiens
cagaaagaggaatca

SEQ ID NO: 986812 - DNA, 15 bp, Homo sapiens
acagaaagaggaatc

SEQ ID NO: 986813 - DNA, 15 bp, Homo sapiens
gacagaaagaggaat

SEQ ID NO: 986814 - DNA, 15 bp, Homo sapiens
agacagaaagaggaa

SEQ ID NO: 986815 - DNA, 15 bp, Homo sapiens
cagacagaaagagga

SEQ ID NO: 986816 - DNA, 15 bp, Homo sapiens
gcagacagaaagagg

SEQ ID NO: 986817 - DNA, 15 bp, Homo sapiens
agcagacagaaagag

SEQ ID NO: 986818 - DNA, 15 bp, Homo sapiens
aagcagacagaaaga

SEQ ID NO: 986819 - DNA, 15 bp, Homo sapiens
taagcagacagaaag

SEQ ID NO: 986820 - DNA, 15 bp, Homo sapiens
ttaagcagacagaaa

SEQ ID NO: 986821 - DNA, 15 bp, Homo sapiens
gttaagcagacagaa

SEQ ID NO: 986822 - DNA, 15 bp, Homo sapiens
agttaagcagacaga

SEQ ID NO: 986823 - DNA, 15 bp, Homo sapiens
aagttaagcagacag

SEQ ID NO: 986824 - DNA, 15 bp, Homo sapiens
gaagttaagcagaca

SEQ ID NO: 986825 - DNA, 15 bp, Homo sapiens
ggaagttaagcagac

SEQ ID NO: 986826 - DNA, 15 bp, Homo sapiens
tggaagttaagcaga

SEQ ID NO: 986827 - DNA, 15 bp, Homo sapiens
atggaagttaagcag

SEQ ID NO: 986828 - DNA, 15 bp, Homo sapiens
aatggaagttaagca

SEQ ID NO: 986829 - DNA, 15 bp, Homo sapiens
aaatggaagttaagc

SEQ ID NO: 986830 - DNA, 15 bp, Homo sapiens
gaaatggaagttaag

SEQ ID NO: 986831 - DNA, 15 bp, Homo sapiens
tgaaatggaagttaa

SEQ ID NO: 986832 - DNA, 15 bp, Homo sapiens
gtgaaatggaagtta

SEQ ID NO: 986833 - DNA, 15 bp, Homo sapiens
ggtgaaatggaagtt

SEQ ID NO: 986834 - DNA, 15 bp, Homo sapiens
gggtgaaatggaagt

SEQ ID NO: 986835 - DNA, 15 bp, Homo sapiens
tgggtgaaatggaag

SEQ ID NO: 986836 - DNA, 15 bp, Homo sapiens
ctgggtgaaatggaa

SEQ ID NO: 986837 - DNA, 15 bp, Homo sapiens
actgggtgaaatgga

SEQ ID NO: 986838 - DNA, 15 bp, Homo sapiens
cactgggtgaaatgg

SEQ ID NO: 986839 - DNA, 15 bp, Homo sapiens
ccactgggtgaaatg

SEQ ID NO: 986840 - DNA, 15 bp, Homo sapiens
gccactgggtgaaat

SEQ ID NO: 986841 - DNA, 15 bp, Homo sapiens
tgccactgggtgaaa

SEQ ID NO: 986842 - DNA, 15 bp, Homo sapiens
atgccactgggtgaa

SEQ ID NO: 986843 - DNA, 15 bp, Homo sapiens
aatgccactgggtga

SEQ ID NO: 986844 - DNA, 15 bp, Homo sapiens
gaatgccactgggtg

SEQ ID NO: 986845 - DNA, 15 bp, Homo sapiens
tgaatgccactgggt

SEQ ID NO: 986846 - DNA, 15 bp, Homo sapiens
ttgaatgccactggg

SEQ ID NO: 986847 - DNA, 15 bp, Homo sapiens
gttgaatgccactgg

SEQ ID NO: 986848 - DNA, 15 bp, Homo sapiens
ggttgaatgccactg

SEQ ID NO: 986849 - DNA, 15 bp, Homo sapiens
tggttgaatgccact

SEQ ID NO: 986850 - DNA, 15 bp, Homo sapiens
gtggttgaatgccac

SEQ ID NO: 986851 - DNA, 15 bp, Homo sapiens
tgtggttgaatgcca

SEQ ID NO: 986852 - DNA, 15 bp, Homo sapiens
atgtggttgaatgcc

SEQ ID NO: 986853 - DNA, 15 bp, Homo sapiens
aatgtggttgaatgc

SEQ ID NO: 986854 - DNA, 15 bp, Homo sapiens
aaatgtggttgaatg

SEQ ID NO: 986855 - DNA, 15 bp, Homo sapiens
taaatgtggttgaat

SEQ ID NO: 986856 - DNA, 15 bp, Homo sapiens
gtaaatgtggttgaa

SEQ ID NO: 986857 - DNA, 15 bp, Homo sapiens
agtaaatgtggttga

SEQ ID NO: 986858 - DNA, 15 bp, Homo sapiens
cagtaaatgtggttg

SEQ ID NO: 986859 - DNA, 15 bp, Homo sapiens
gcagtaaatgtggtt

SEQ ID NO: 986860 - DNA, 15 bp, Homo sapiens
tgcagtaaatgtggt

SEQ ID NO: 986861 - DNA, 15 bp, Homo sapiens
gtgcagtaaatgtgg

SEQ ID NO: 986862 - DNA, 15 bp, Homo sapiens
tgtgcagtaaatgtg

SEQ ID NO: 986863 - DNA, 15 bp, Homo sapiens
gtgtgcagtaaatgt

SEQ ID NO: 986864 - DNA, 15 bp, Homo sapiens
ggtgtgcagtaaatg

SEQ ID NO: 986865 - DNA, 15 bp, Homo sapiens
gggtgtgcagtaaat

SEQ ID NO: 986866 - DNA, 15 bp, Homo sapiens
ggggtgtgcagtaaa

SEQ ID NO: 986867 - DNA, 15 bp, Homo sapiens
gggggtgtgcagtaa

SEQ ID NO: 986868 - DNA, 15 bp, Homo sapiens
agggggtgtgcagta

SEQ ID NO: 986869 - DNA, 15 bp, Homo sapiens
cagggggtgtgcagt

SEQ ID NO: 986870 - DNA, 15 bp, Homo sapiens
tcagggggtgtgcag

SEQ ID NO: 986871 - DNA, 15 bp, Homo sapiens
ttcagggggtgtgca

SEQ ID NO: 986872 - DNA, 15 bp, Homo sapiens
tttcagggggtgtgc

SEQ ID NO: 986873 - DNA, 15 bp, Homo sapiens
ctttcagggggtgtg

SEQ ID NO: 986874 - DNA, 15 bp, Homo sapiens
cctttcagggggtgt

SEQ ID NO: 986875 - DNA, 15 bp, Homo sapiens
gcctttcagggggtg

SEQ ID NO: 986876 - DNA, 15 bp, Homo sapiens
agcctttcagggggt

SEQ ID NO: 986877 - DNA, 15 bp, Homo sapiens
gagcctttcaggggg

SEQ ID NO: 986878 - DNA, 15 bp, Homo sapiens
tgagcctttcagggg

SEQ ID NO: 986879 - DNA, 15 bp, Homo sapiens
ctgagcctttcaggg

SEQ ID NO: 986880 - DNA, 15 bp, Homo sapiens
actgagcctttcagg

SEQ ID NO: 986881 - DNA, 15 bp, Homo sapiens
gactgagcctttcag

SEQ ID NO: 986882 - DNA, 15 bp, Homo sapiens
ggactgagcctttca

SEQ ID NO: 986883 - DNA, 15 bp, Homo sapiens
aggactgagcctttc

SEQ ID NO: 986884 - DNA, 15 bp, Homo sapiens
caggactgagccttt

SEQ ID NO: 986885 - DNA, 15 bp, Homo sapiens
gcaggactgagcctt

SEQ ID NO: 986886 - DNA, 15 bp, Homo sapiens
ggcaggactgagcct

SEQ ID NO: 986887 - DNA, 15 bp, Homo sapiens
aggcaggactgagcc

SEQ ID NO: 986888 - DNA, 15 bp, Homo sapiens
aaggcaggactgagc

SEQ ID NO: 986889 - DNA, 15 bp, Homo sapiens
aaaggcaggactgag

SEQ ID NO: 986890 - DNA, 15 bp, Homo sapiens
caaaggcaggactga

SEQ ID NO: 986891 - DNA, 15 bp, Homo sapiens
ccaaaggcaggactg

SEQ ID NO: 986892 - DNA, 15 bp, Homo sapiens
cccaaaggcaggact

SEQ ID NO: 986893 - DNA, 15 bp, Homo sapiens
ccccaaaggcaggac

SEQ ID NO: 986894 - DNA, 15 bp, Homo sapiens
tccccaaaggcagga

SEQ ID NO: 986895 - DNA, 15 bp, Homo sapiens
ttccccaaaggcagg

SEQ ID NO: 986896 - DNA, 15 bp, Homo sapiens
gttccccaaaggcag

SEQ ID NO: 986897 - DNA, 15 bp, Homo sapiens
agttccccaaaggca

SEQ ID NO: 986898 - DNA, 15 bp, Homo sapiens
gagttccccaaaggc

SEQ ID NO: 986899 - DNA, 15 bp, Homo sapiens
agagttccccaaagg

SEQ ID NO: 986900 - DNA, 15 bp, Homo sapiens
aagagttccccaaag

SEQ ID NO: 986901 - DNA, 15 bp, Homo sapiens
caagagttccccaaa

SEQ ID NO: 986902 - DNA, 15 bp, Homo sapiens
tcaagagttccccaa

SEQ ID NO: 986903 - DNA, 15 bp, Homo sapiens
atcaagagttcccca

SEQ ID NO: 986904 - DNA, 15 bp, Homo sapiens
gatcaagagttcccc

SEQ ID NO: 986905 - DNA, 15 bp, Homo sapiens
agatcaagagttccc

SEQ ID NO: 986906 - DNA, 15 bp, Homo sapiens
tagatcaagagttcc

SEQ ID NO: 986907 - DNA, 15 bp, Homo sapiens
ctagatcaagagttc

SEQ ID NO: 986908 - DNA, 15 bp, Homo sapiens
cctagatcaagagtt

SEQ ID NO: 986909 - DNA, 15 bp, Homo sapiens
acctagatcaagagt

SEQ ID NO: 986910 - DNA, 15 bp, Homo sapiens
tacctagatcaagag

SEQ ID NO: 986911 - DNA, 15 bp, Homo sapiens
ttacctagatcaaga

SEQ ID NO: 986912 - DNA, 15 bp, Homo sapiens
cttacctagatcaag

SEQ ID NO: 986913 - DNA, 15 bp, Homo sapiens
tcttacctagatcaa

SEQ ID NO: 986914 - DNA, 15 bp, Homo sapiens
atcttacctagatca

SEQ ID NO: 986915 - DNA, 15 bp, Homo sapiens
catcttacctagatc

SEQ ID NO: 986916 - DNA, 15 bp, Homo sapiens
acatcttacctagat

SEQ ID NO: 986917 - DNA, 15 bp, Homo sapiens
gacatcttacctaga

SEQ ID NO: 986918 - DNA, 15 bp, Homo sapiens
agacatcttacctag

SEQ ID NO: 986919 - DNA, 15 bp, Homo sapiens
tagacatcttaccta

SEQ ID NO: 986920 - DNA, 15 bp, Homo sapiens
ttagacatcttacct

SEQ ID NO: 986921 - DNA, 15 bp, Homo sapiens
attagacatcttacc

SEQ ID NO: 986922 - DNA, 15 bp, Homo sapiens
cattagacatcttac

SEQ ID NO: 986923 - DNA, 15 bp, Homo sapiens
acattagacatctta

SEQ ID NO: 986924 - DNA, 15 bp, Homo sapiens
cacattagacatctt

SEQ ID NO: 986925 - DNA, 15 bp, Homo sapiens
gcacattagacatct

SEQ ID NO: 986926 - DNA, 15 bp, Homo sapiens
tgcacattagacatc

SEQ ID NO: 986927 - DNA, 15 bp, Homo sapiens
ttgcacattagacat

SEQ ID NO: 986928 - DNA, 15 bp, Homo sapiens
cttgcacattagaca

SEQ ID NO: 986929 - DNA, 15 bp, Homo sapiens
ccttgcacattagac

SEQ ID NO: 986930 - DNA, 15 bp, Homo sapiens
gccttgcacattaga

SEQ ID NO: 986931 - DNA, 15 bp, Homo sapiens
agccttgcacattag

SEQ ID NO: 986932 - DNA, 15 bp, Homo sapiens
gagccttgcacatta

SEQ ID NO: 986933 - DNA, 15 bp, Homo sapiens
agagccttgcacatt

SEQ ID NO: 986934 - DNA, 15 bp, Homo sapiens
cagagccttgcacat

SEQ ID NO: 986935 - DNA, 15 bp, Homo sapiens
acagagccttgcaca

SEQ ID NO: 986936 - DNA, 15 bp, Homo sapiens
aacagagccttgcac

SEQ ID NO: 986937 - DNA, 15 bp, Homo sapiens
caacagagccttgca

SEQ ID NO: 986938 - DNA, 15 bp, Homo sapiens
ccaacagagccttgc

SEQ ID NO: 986939 - DNA, 15 bp, Homo sapiens
accaacagagccttg

SEQ ID NO: 986940 - DNA, 15 bp, Homo sapiens
caccaacagagcctt

SEQ ID NO: 986941 - DNA, 15 bp, Homo sapiens
ccaccaacagagcct

SEQ ID NO: 986942 - DNA, 15 bp, Homo sapiens
accaccaacagagcc

SEQ ID NO: 986943 - DNA, 15 bp, Homo sapiens
aaccaccaacagagc

SEQ ID NO: 986944 - DNA, 15 bp, Homo sapiens
taaccaccaacagag

SEQ ID NO: 986945 - DNA, 15 bp, Homo sapiens
gtaaccaccaacaga

SEQ ID NO: 986946 - DNA, 15 bp, Homo sapiens
agtaaccaccaacag

SEQ ID NO: 986947 - DNA, 15 bp, Homo sapiens
tagtaaccaccaaca

SEQ ID NO: 986948 - DNA, 15 bp, Homo sapiens
gtagtaaccaccaac

SEQ ID NO: 986949 - DNA, 15 bp, Homo sapiens
tgtagtaaccaccaa

SEQ ID NO: 986950 - DNA, 15 bp, Homo sapiens
ttgtagtaaccacca

SEQ ID NO: 986951 - DNA, 15 bp, Homo sapiens
cttgtagtaaccacc

SEQ ID NO: 986952 - DNA, 15 bp, Homo sapiens
tcttgtagtaaccac

SEQ ID NO: 986953 - DNA, 15 bp, Homo sapiens
ttcttgtagtaacca

SEQ ID NO: 986954 - DNA, 15 bp, Homo sapiens
tttcttgtagtaacc

SEQ ID NO: 986955 - DNA, 15 bp, Homo sapiens
ctttcttgtagtaac

SEQ ID NO: 986956 - DNA, 15 bp, Homo sapiens
actttcttgtagtaa

SEQ ID NO: 986957 - DNA, 15 bp, Homo sapiens
gactttcttgtagta

SEQ ID NO: 986958 - DNA, 15 bp, Homo sapiens
agactttcttgtagt

SEQ ID NO: 986959 - DNA, 15 bp, Homo sapiens
tagactttcttgtag

SEQ ID NO: 986960 - DNA, 15 bp, Homo sapiens
gtagactttcttgta

SEQ ID NO: 986961 - DNA, 15 bp, Homo sapiens
agtagactttcttgt

SEQ ID NO: 986962 - DNA, 15 bp, Homo sapiens
gagtagactttcttg

SEQ ID NO: 986963 - DNA, 15 bp, Homo sapiens
agagtagactttctt

SEQ ID NO: 986964 - DNA, 15 bp, Homo sapiens
tagagtagactttct

SEQ ID NO: 986965 - DNA, 15 bp, Homo sapiens
ttagagtagactttc

SEQ ID NO: 986966 - DNA, 15 bp, Homo sapiens
tttagagtagacttt

SEQ ID NO: 986967 - DNA, 15 bp, Homo sapiens
ttttagagtagactt

SEQ ID NO: 986968 - DNA, 15 bp, Homo sapiens
tttttagagtagact

SEQ ID NO: 986969 - DNA, 15 bp, Homo sapiens
atttttagagtagac

SEQ ID NO: 986970 - DNA, 15 bp, Homo sapiens
catttttagagtaga

SEQ ID NO: 986971 - DNA, 15 bp, Homo sapiens
acatttttagagtag

SEQ ID NO: 986972 - DNA, 15 bp, Homo sapiens
gacatttttagagta

SEQ ID NO: 986973 - DNA, 15 bp, Homo sapiens
tgacatttttagagt

SEQ ID NO: 986974 - DNA, 15 bp, Homo sapiens
ttgacatttttagag

SEQ ID NO: 986975 - DNA, 15 bp, Homo sapiens
tttgacatttttaga

SEQ ID NO: 986976 - DNA, 15 bp, Homo sapiens
gtttgacatttttag

SEQ ID NO: 986977 - DNA, 15 bp, Homo sapiens
agtttgacattttta

SEQ ID NO: 986978 - DNA, 15 bp, Homo sapiens
cagtttgacattttt

SEQ ID NO: 986979 - DNA, 15 bp, Homo sapiens
tcagtttgacatttt

SEQ ID NO: 986980 - DNA, 15 bp, Homo sapiens
ttcagtttgacattt

SEQ ID NO: 986981 - DNA, 15 bp, Homo sapiens
attcagtttgacatt

SEQ ID NO: 986982 - DNA, 15 bp, Homo sapiens
cattcagtttgacat

SEQ ID NO: 986983 - DNA, 15 bp, Homo sapiens
acattcagtttgaca

SEQ ID NO: 986984 - DNA, 15 bp, Homo sapiens
cacattcagtttgac

SEQ ID NO: 986985 - DNA, 15 bp, Homo sapiens
tcacattcagtttga

SEQ ID NO: 986986 - DNA, 15 bp, Homo sapiens
ttcacattcagtttg

SEQ ID NO: 986987 - DNA, 15 bp, Homo sapiens
gttcacattcagttt

SEQ ID NO: 986988 - DNA, 15 bp, Homo sapiens
tgttcacattcagtt

SEQ ID NO: 986989 - DNA, 15 bp, Homo sapiens
ttgttcacattcagt

SEQ ID NO: 986990 - DNA, 15 bp, Homo sapiens
cttgttcacattcag

SEQ ID NO: 986991 - DNA, 15 bp, Homo sapiens
acttgttcacattca

SEQ ID NO: 986992 - DNA, 15 bp, Homo sapiens
tacttgttcacattc

SEQ ID NO: 986993 - DNA, 15 bp, Homo sapiens
atacttgttcacatt

SEQ ID NO: 986994 - DNA, 15 bp, Homo sapiens
aatacttgttcacat

SEQ ID NO: 986995 - DNA, 15 bp, Homo sapiens
gaatacttgttcaca

SEQ ID NO: 986996 - DNA, 15 bp, Homo sapiens
tgaatacttgttcac

SEQ ID NO: 986997 - DNA, 15 bp, Homo sapiens
ttgaatacttgttca

SEQ ID NO: 986998 - DNA, 15 bp, Homo sapiens
tttgaatacttgttc

SEQ ID NO: 986999 - DNA, 15 bp, Homo sapiens
ctttgaatacttgtt

SEQ ID NO: 987000 - DNA, 15 bp, Homo sapiens
actttgaatacttgt

SEQ ID NO: 987001 - DNA, 15 bp, Homo sapiens
tactttgaatacttg

SEQ ID NO: 987002 - DNA, 15 bp, Homo sapiens
atactttgaatactt

SEQ ID NO: 987003 - DNA, 15 bp, Homo sapiens
catactttgaatact

SEQ ID NO: 987004 - DNA, 15 bp, Homo sapiens
ccatactttgaatac

SEQ ID NO: 987005 - DNA, 15 bp, Homo sapiens
tccatactttgaata

SEQ ID NO: 987006 - DNA, 15 bp, Homo sapiens
ctccatactttgaat

SEQ ID NO: 987007 - DNA, 15 bp, Homo sapiens
gctccatactttgaa

SEQ ID NO: 987008 - DNA, 15 bp, Homo sapiens
tgctccatactttga

SEQ ID NO: 987009 - DNA, 15 bp, Homo sapiens
atgctccatactttg

SEQ ID NO: 987010 - DNA, 15 bp, Homo sapiens
tatgctccatacttt

SEQ ID NO: 987011 - DNA, 15 bp, Homo sapiens
ctatgctccatactt

SEQ ID NO: 987012 - DNA, 15 bp, Homo sapiens
tctatgctccatact

SEQ ID NO: 987013 - DNA, 15 bp, Homo sapiens
ctctatgctccatac

SEQ ID NO: 987014 - DNA, 15 bp, Homo sapiens
tctctatgctccata

SEQ ID NO: 987015 - DNA, 15 bp, Homo sapiens
ttctctatgctccat

SEQ ID NO: 987016 - DNA, 15 bp, Homo sapiens
tttctctatgctcca

SEQ ID NO: 987017 - DNA, 15 bp, Homo sapiens
ttttctctatgctcc

SEQ ID NO: 987018 - DNA, 15 bp, Homo sapiens
attttctctatgctc

SEQ ID NO: 987019 - DNA, 15 bp, Homo sapiens
tattttctctatgct

SEQ ID NO: 987020 - DNA, 15 bp, Homo sapiens
atattttctctatgc

SEQ ID NO: 987021 - DNA, 15 bp, Homo sapiens
tatattttctctatg

SEQ ID NO: 987022 - DNA, 15 bp, Homo sapiens
gtatattttctctat

SEQ ID NO: 987023 - DNA, 15 bp, Homo sapiens
agtatattttctcta

SEQ ID NO: 987024 - DNA, 15 bp, Homo sapiens
gagtatattttctct

SEQ ID NO: 987025 - DNA, 15 bp, Homo sapiens
tgagtatattttctc

SEQ ID NO: 987026 - DNA, 15 bp, Homo sapiens
gtgagtatattttct

SEQ ID NO: 987027 - DNA, 15 bp, Homo sapiens
ggtgagtatattttc

SEQ ID NO: 987028 - DNA, 15 bp, Homo sapiens
cggtgagtatatttt

SEQ ID NO: 987029 - DNA, 15 bp, Homo sapiens
acggtgagtatattt

SEQ ID NO: 987030 - DNA, 15 bp, Homo sapiens
cacggtgagtatatt

SEQ ID NO: 987031 - DNA, 15 bp, Homo sapiens
ccacggtgagtatat

SEQ ID NO: 987032 - DNA, 15 bp, Homo sapiens
tccacggtgagtata

SEQ ID NO: 987033 - DNA, 15 bp, Homo sapiens
gtccacggtgagtat

SEQ ID NO: 987034 - DNA, 15 bp, Homo sapiens
ggtccacggtgagta

SEQ ID NO: 987035 - DNA, 15 bp, Homo sapiens
aggtccacggtgagt

SEQ ID NO: 987036 - DNA, 15 bp, Homo sapiens
caggtccacggtgag

SEQ ID NO: 987037 - DNA, 15 bp, Homo sapiens
tcaggtccacggtga

SEQ ID NO: 987038 - DNA, 15 bp, Homo sapiens
atcaggtccacggtg

SEQ ID NO: 987039 - DNA, 15 bp, Homo sapiens
catcaggtccacggt

SEQ ID NO: 987040 - DNA, 15 bp, Homo sapiens
tcatcaggtccacgg

SEQ ID NO: 987041 - DNA, 15 bp, Homo sapiens
ttcatcaggtccacg

SEQ ID NO: 987042 - DNA, 15 bp, Homo sapiens
cttcatcaggtccac

SEQ ID NO: 987043 - DNA, 15 bp, Homo sapiens
tcttcatcaggtcca

SEQ ID NO: 987044 - DNA, 15 bp, Homo sapiens
ttcttcatcaggtcc

SEQ ID NO: 987045 - DNA, 15 bp, Homo sapiens
attcttcatcaggtc

SEQ ID NO: 987046 - DNA, 15 bp, Homo sapiens
cattcttcatcaggt

SEQ ID NO: 987047 - DNA, 15 bp, Homo sapiens
tcattcttcatcagg

SEQ ID NO: 987048 - DNA, 15 bp, Homo sapiens
ttcattcttcatcag

SEQ ID NO: 987049 - DNA, 15 bp, Homo sapiens
cttcattcttcatca

SEQ ID NO: 987050 - DNA, 15 bp, Homo sapiens
ccttcattcttcatc

SEQ ID NO: 987051 - DNA, 15 bp, Homo sapiens
gccttcattcttcat

SEQ ID NO: 987052 - DNA, 15 bp, Homo sapiens
agccttcattcttca

SEQ ID NO: 987053 - DNA, 15 bp, Homo sapiens
aagccttcattcttc

SEQ ID NO: 987054 - DNA, 15 bp, Homo sapiens
gaagccttcattctt

SEQ ID NO: 987055 - DNA, 15 bp, Homo sapiens
tgaagccttcattct

SEQ ID NO: 987056 - DNA, 15 bp, Homo sapiens
ttgaagccttcattc

SEQ ID NO: 987057 - DNA, 15 bp, Homo sapiens
cttgaagccttcatt

SEQ ID NO: 987058 - DNA, 15 bp, Homo sapiens
ccttgaagccttcat

SEQ ID NO: 987059 - DNA, 15 bp, Homo sapiens
tccttgaagccttca

SEQ ID NO: 987060 - DNA, 15 bp, Homo sapiens
ctccttgaagccttc

SEQ ID NO: 987061 - DNA, 15 bp, Homo sapiens
cctccttgaagcctt

SEQ ID NO: 987062 - DNA, 15 bp, Homo sapiens
tcctccttgaagcct

SEQ ID NO: 987063 - DNA, 15 bp, Homo sapiens
ctcctccttgaagcc

SEQ ID NO: 987064 - DNA, 15 bp, Homo sapiens
cctcctccttgaagc

SEQ ID NO: 987065 - DNA, 15 bp, Homo sapiens
gcctcctccttgaag

SEQ ID NO: 987066 - DNA, 15 bp, Homo sapiens
tgcctcctccttgaa

SEQ ID NO: 987067 - DNA, 15 bp, Homo sapiens
ctgcctcctccttga

SEQ ID NO: 987068 - DNA, 15 bp, Homo sapiens
tctgcctcctccttg

SEQ ID NO: 987069 - DNA, 15 bp, Homo sapiens
ctctgcctcctcctt

SEQ ID NO: 987070 - DNA, 15 bp, Homo sapiens
gctctgcctcctcct

SEQ ID NO: 987071 - DNA, 15 bp, Homo sapiens
agctctgcctcctcc

SEQ ID NO: 987072 - DNA, 15 bp, Homo sapiens
aagctctgcctcctc

SEQ ID NO: 987073 - DNA, 15 bp, Homo sapiens
gaagctctgcctcct

SEQ ID NO: 987074 - DNA, 15 bp, Homo sapiens
tgaagctctgcctcc

SEQ ID NO: 987075 - DNA, 15 bp, Homo sapiens
ctgaagctctgcctc

SEQ ID NO: 987076 - DNA, 15 bp, Homo sapiens
gctgaagctctgcct

SEQ ID NO: 987077 - DNA, 15 bp, Homo sapiens
agctgaagctctgcc

SEQ ID NO: 987078 - DNA, 15 bp, Homo sapiens
tagctgaagctctgc

SEQ ID NO: 987079 - DNA, 15 bp, Homo sapiens
ctagctgaagctctg

SEQ ID NO: 987080 - DNA, 15 bp, Homo sapiens
cctagctgaagctct

SEQ ID NO: 987081 - DNA, 15 bp, Homo sapiens
gcctagctgaagctc

SEQ ID NO: 987082 - DNA, 15 bp, Homo sapiens
ggcctagctgaagct

SEQ ID NO: 987083 - DNA, 15 bp, Homo sapiens
aggcctagctgaagc

SEQ ID NO: 987084 - DNA, 15 bp, Homo sapiens
aaggcctagctgaag

SEQ ID NO: 987085 - DNA, 15 bp, Homo sapiens
caaggcctagctgaa

SEQ ID NO: 987086 - DNA, 15 bp, Homo sapiens
tcaaggcctagctga

SEQ ID NO: 987087 - DNA, 15 bp, Homo sapiens
ttcaaggcctagctg

SEQ ID NO: 987088 - DNA, 15 bp, Homo sapiens
attcaaggcctagct

SEQ ID NO: 987089 - DNA, 15 bp, Homo sapiens
cattcaaggcctagc

SEQ ID NO: 987090 - DNA, 15 bp, Homo sapiens
tcattcaaggcctag

SEQ ID NO: 987091 - DNA, 15 bp, Homo sapiens
atcattcaaggccta

SEQ ID NO: 987092 - DNA, 15 bp, Homo sapiens
catcattcaaggcct

SEQ ID NO: 987093 - DNA, 15 bp, Homo sapiens
ccatcattcaaggcc

SEQ ID NO: 987094 - DNA, 15 bp, Homo sapiens
cccatcattcaaggc

SEQ ID NO: 987095 - DNA, 15 bp, Homo sapiens
acccatcattcaagg

SEQ ID NO: 987096 - DNA, 15 bp, Homo sapiens
tacccatcattcaag

SEQ ID NO: 987097 - DNA, 15 bp, Homo sapiens
ctacccatcattcaa

SEQ ID NO: 987098 - DNA, 15 bp, Homo sapiens
cctacccatcattca

SEQ ID NO: 987099 - DNA, 15 bp, Homo sapiens
gcctacccatcattc

SEQ ID NO: 987100 - DNA, 15 bp, Homo sapiens
tgcctacccatcatt

SEQ ID NO: 987101 - DNA, 15 bp, Homo sapiens
ctgcctacccatcat

SEQ ID NO: 987102 - DNA, 15 bp, Homo sapiens
tctgcctacccatca

SEQ ID NO: 987103 - DNA, 15 bp, Homo sapiens
ttctgcctacccatc

SEQ ID NO: 987104 - DNA, 15 bp, Homo sapiens
attctgcctacccat

SEQ ID NO: 987105 - DNA, 15 bp, Homo sapiens
tattctgcctaccca

SEQ ID NO: 987106 - DNA, 15 bp, Homo sapiens
ctattctgcctaccc

SEQ ID NO: 987107 - DNA, 15 bp, Homo sapiens
tctattctgcctacc

SEQ ID NO: 987108 - DNA, 15 bp, Homo sapiens
ctctattctgcctac

SEQ ID NO: 987109 - DNA, 15 bp, Homo sapiens
cctctattctgccta

SEQ ID NO: 987110 - DNA, 15 bp, Homo sapiens
tcctctattctgcct

SEQ ID NO: 987111 - DNA, 15 bp, Homo sapiens
ctcctctattctgcc

SEQ ID NO: 987112 - DNA, 15 bp, Homo sapiens
cctcctctattctgc

SEQ ID NO: 987113 - DNA, 15 bp, Homo sapiens
tcctcctctattctg

SEQ ID NO: 987114 - DNA, 15 bp, Homo sapiens
ctcctcctctattct

SEQ ID NO: 987115 - DNA, 15 bp, Homo sapiens
tctcctcctctattc

SEQ ID NO: 987116 - DNA, 15 bp, Homo sapiens
ctctcctcctctatt

SEQ ID NO: 987117 - DNA, 15 bp, Homo sapiens
tctctcctcctctat

SEQ ID NO: 987118 - DNA, 15 bp, Homo sapiens
gtctctcctcctcta

SEQ ID NO: 987119 - DNA, 15 bp, Homo sapiens
tgtctctcctcctct

SEQ ID NO: 987120 - DNA, 15 bp, Homo sapiens
atgtctctcctcctc

SEQ ID NO: 987121 - DNA, 15 bp, Homo sapiens
gatgtctctcctcct

SEQ ID NO: 987122 - DNA, 15 bp, Homo sapiens
ggatgtctctcctcc

SEQ ID NO: 987123 - DNA, 15 bp, Homo sapiens
aggatgtctctcctc

SEQ ID NO: 987124 - DNA, 15 bp, Homo sapiens
taggatgtctctcct

SEQ ID NO: 987125 - DNA, 15 bp, Homo sapiens
ctaggatgtctctcc

SEQ ID NO: 987126 - DNA, 15 bp, Homo sapiens
tctaggatgtctctc

SEQ ID NO: 987127 - DNA, 15 bp, Homo sapiens
atctaggatgtctct

SEQ ID NO: 987128 - DNA, 15 bp, Homo sapiens
catctaggatgtctc

SEQ ID NO: 987129 - DNA, 15 bp, Homo sapiens
ccatctaggatgtct

SEQ ID NO: 987130 - DNA, 15 bp, Homo sapiens
tccatctaggatgtc

SEQ ID NO: 987131 - DNA, 15 bp, Homo sapiens
ctccatctaggatgt

SEQ ID NO: 987132 - DNA, 15 bp, Homo sapiens
cctccatctaggatg

SEQ ID NO: 987133 - DNA, 15 bp, Homo sapiens
ccctccatctaggat

SEQ ID NO: 987134 - DNA, 15 bp, Homo sapiens
cccctccatctagga

SEQ ID NO: 987135 - DNA, 15 bp, Homo sapiens
ccccctccatctagg

SEQ ID NO: 987136 - DNA, 15 bp, Homo sapiens
accccctccatctag

SEQ ID NO: 987137 - DNA, 15 bp, Homo sapiens
taccccctccatcta

SEQ ID NO: 987138 - DNA, 15 bp, Homo sapiens
ctaccccctccatct

SEQ ID NO: 987139 - DNA, 15 bp, Homo sapiens
tctaccccctccatc

SEQ ID NO: 987140 - DNA, 15 bp, Homo sapiens
ttctaccccctccat

SEQ ID NO: 987141 - DNA, 15 bp, Homo sapiens
attctaccccctcca

SEQ ID NO: 987142 - DNA, 15 bp, Homo sapiens
aattctaccccctcc

SEQ ID NO: 987143 - DNA, 15 bp, Homo sapiens
caattctaccccctc

SEQ ID NO: 987144 - DNA, 15 bp, Homo sapiens
gcaattctaccccct

SEQ ID NO: 987145 - DNA, 15 bp, Homo sapiens
tgcaattctaccccc

SEQ ID NO: 987146 - DNA, 15 bp, Homo sapiens
ttgcaattctacccc

SEQ ID NO: 987147 - DNA, 15 bp, Homo sapiens
tttgcaattctaccc

SEQ ID NO: 987148 - DNA, 15 bp, Homo sapiens
ttttgcaattctacc

SEQ ID NO: 987149 - DNA, 15 bp, Homo sapiens
gttttgcaattctac

SEQ ID NO: 987150 - DNA, 15 bp, Homo sapiens
ggttttgcaattcta

SEQ ID NO: 987151 - DNA, 15 bp, Homo sapiens
tggttttgcaattct

SEQ ID NO: 987152 - DNA, 15 bp, Homo sapiens
ctggttttgcaattc

SEQ ID NO: 987153 - DNA, 15 bp, Homo sapiens
cctggttttgcaatt

SEQ ID NO: 987154 - DNA, 15 bp, Homo sapiens
ccctggttttgcaat

SEQ ID NO: 987155 - DNA, 15 bp, Homo sapiens
accctggttttgcaa

SEQ ID NO: 987156 - DNA, 15 bp, Homo sapiens
aaccctggttttgca

SEQ ID NO: 987157 - DNA, 15 bp, Homo sapiens
caaccctggttttgc

SEQ ID NO: 987158 - DNA, 15 bp, Homo sapiens
tcaaccctggttttg

SEQ ID NO: 987159 - DNA, 15 bp, Homo sapiens
atcaaccctggtttt

SEQ ID NO: 987160 - DNA, 15 bp, Homo sapiens
catcaaccctggttt

SEQ ID NO: 987161 - DNA, 15 bp, Homo sapiens
ccatcaaccctggtt

SEQ ID NO: 987162 - DNA, 15 bp, Homo sapiens
accatcaaccctggt

SEQ ID NO: 987163 - DNA, 15 bp, Homo sapiens
caccatcaaccctgg

SEQ ID NO: 987164 - DNA, 15 bp, Homo sapiens
gcaccatcaaccctg

SEQ ID NO: 987165 - DNA, 15 bp, Homo sapiens
ggcaccatcaaccct

SEQ ID NO: 987166 - DNA, 15 bp, Homo sapiens
tggcaccatcaaccc

SEQ ID NO: 987167 - DNA, 15 bp, Homo sapiens
ctggcaccatcaacc

SEQ ID NO: 987168 - DNA, 15 bp, Homo sapiens
gctggcaccatcaac

SEQ ID NO: 987169 - DNA, 15 bp, Homo sapiens
tgctggcaccatcaa

SEQ ID NO: 987170 - DNA, 15 bp, Homo sapiens
gtgctggcaccatca

SEQ ID NO: 987171 - DNA, 15 bp, Homo sapiens
tgtgctggcaccatc

SEQ ID NO: 987172 - DNA, 15 bp, Homo sapiens
atgtgctggcaccat

SEQ ID NO: 987173 - DNA, 15 bp, Homo sapiens
tatgtgctggcacca

SEQ ID NO: 987174 - DNA, 15 bp, Homo sapiens
ttatgtgctggcacc

SEQ ID NO: 987175 - DNA, 15 bp, Homo sapiens
tttatgtgctggcac

SEQ ID NO: 987176 - DNA, 15 bp, Homo sapiens
ctttatgtgctggca

SEQ ID NO: 987177 - DNA, 15 bp, Homo sapiens
cctttatgtgctggc

SEQ ID NO: 987178 - DNA, 15 bp, Homo sapiens
ccctttatgtgctgg

SEQ ID NO: 987179 - DNA, 15 bp, Homo sapiens
gccctttatgtgctg

SEQ ID NO: 987180 - DNA, 15 bp, Homo sapiens
agccctttatgtgct

SEQ ID NO: 987181 - DNA, 15 bp, Homo sapiens
cagccctttatgtgc

SEQ ID NO: 987182 - DNA, 15 bp, Homo sapiens
ccagccctttatgtg

SEQ ID NO: 987183 - DNA, 15 bp, Homo sapiens
gccagccctttatgt

SEQ ID NO: 987184 - DNA, 15 bp, Homo sapiens
tgccagccctttatg

SEQ ID NO: 987185 - DNA, 15 bp, Homo sapiens
ctgccagccctttat

SEQ ID NO: 987186 - DNA, 15 bp, Homo sapiens
cctgccagcccttta

SEQ ID NO: 987187 - DNA, 15 bp, Homo sapiens
ccctgccagcccttt

SEQ ID NO: 987188 - DNA, 15 bp, Homo sapiens
accctgccagccctt

SEQ ID NO: 987189 - DNA, 15 bp, Homo sapiens
caccctgccagccct

SEQ ID NO: 987190 - DNA, 15 bp, Homo sapiens
ccaccctgccagccc

SEQ ID NO: 987191 - DNA, 15 bp, Homo sapiens
tccaccctgccagcc

SEQ ID NO: 987192 - DNA, 15 bp, Homo sapiens
ctccaccctgccagc

SEQ ID NO: 987193 - DNA, 15 bp, Homo sapiens
cctccaccctgccag

SEQ ID NO: 987194 - DNA, 15 bp, Homo sapiens
ccctccaccctgcca

SEQ ID NO: 987195 - DNA, 15 bp, Homo sapiens
accctccaccctgcc

SEQ ID NO: 987196 - DNA, 15 bp, Homo sapiens
gaccctccaccctgc

SEQ ID NO: 987197 - DNA, 15 bp, Homo sapiens
agaccctccaccctg

SEQ ID NO: 987198 - DNA, 15 bp, Homo sapiens
tagaccctccaccct

SEQ ID NO: 987199 - DNA, 15 bp, Homo sapiens
atagaccctccaccc

SEQ ID NO: 987200 - DNA, 15 bp, Homo sapiens
catagaccctccacc

SEQ ID NO: 987201 - DNA, 15 bp, Homo sapiens
tcatagaccctccac

SEQ ID NO: 987202 - DNA, 15 bp, Homo sapiens
atcatagaccctcca

SEQ ID NO: 987203 - DNA, 15 bp, Homo sapiens
tatcatagaccctcc

SEQ ID NO: 987204 - DNA, 15 bp, Homo sapiens
ctatcatagaccctc

SEQ ID NO: 987205 - DNA, 15 bp, Homo sapiens
tctatcatagaccct

SEQ ID NO: 987206 - DNA, 15 bp, Homo sapiens
ctctatcatagaccc

SEQ ID NO: 987207 - DNA, 15 bp, Homo sapiens
tctctatcatagacc

SEQ ID NO: 987208 - DNA, 15 bp, Homo sapiens
gtctctatcatagac

SEQ ID NO: 987209 - DNA, 15 bp, Homo sapiens
ggtctctatcataga

SEQ ID NO: 987210 - DNA, 15 bp, Homo sapiens
aggtctctatcatag

SEQ ID NO: 987211 - DNA, 15 bp, Homo sapiens
taggtctctatcata

SEQ ID NO: 987212 - DNA, 15 bp, Homo sapiens
ataggtctctatcat

SEQ ID NO: 987213 - DNA, 15 bp, Homo sapiens
tataggtctctatca

SEQ ID NO: 987214 - DNA, 15 bp, Homo sapiens
ctataggtctctatc

SEQ ID NO: 987215 - DNA, 15 bp, Homo sapiens
cctataggtctctat

SEQ ID NO: 987216 - DNA, 15 bp, Homo sapiens
tcctataggtctcta

SEQ ID NO: 987217 - DNA, 15 bp, Homo sapiens
ctcctataggtctct

SEQ ID NO: 987218 - DNA, 15 bp, Homo sapiens
tctcctataggtctc

SEQ ID NO: 987219 - DNA, 15 bp, Homo sapiens
atctcctataggtct

SEQ ID NO: 987220 - DNA, 15 bp, Homo sapiens
tatctcctataggtc

SEQ ID NO: 987221 - DNA, 15 bp, Homo sapiens
ttatctcctataggt

SEQ ID NO: 987222 - DNA, 15 bp, Homo sapiens
tttatctcctatagg

SEQ ID NO: 987223 - DNA, 15 bp, Homo sapiens
ctttatctcctatag

SEQ ID NO: 987224 - DNA, 15 bp, Homo sapiens
tctttatctcctata

SEQ ID NO: 987225 - DNA, 15 bp, Homo sapiens
atctttatctcctat

SEQ ID NO: 987226 - DNA, 15 bp, Homo sapiens
tatctttatctccta

SEQ ID NO: 987227 - DNA, 15 bp, Homo sapiens
ctatctttatctcct

SEQ ID NO: 987228 - DNA, 15 bp, Homo sapiens
tctatctttatctcc

SEQ ID NO: 987229 - DNA, 15 bp, Homo sapiens
ctctatctttatctc

SEQ ID NO: 987230 - DNA, 15 bp, Homo sapiens
actctatctttatct

SEQ ID NO: 987231 - DNA, 15 bp, Homo sapiens
aactctatctttatc

SEQ ID NO: 987232 - DNA, 15 bp, Homo sapiens
caactctatctttat

SEQ ID NO: 987233 - DNA, 15 bp, Homo sapiens
tcaactctatcttta

SEQ ID NO: 987234 - DNA, 15 bp, Homo sapiens
ttcaactctatcttt

SEQ ID NO: 987235 - DNA, 15 bp, Homo sapiens
tttcaactctatctt

SEQ ID NO: 987236 - DNA, 15 bp, Homo sapiens
atttcaactctatct

SEQ ID NO: 987237 - DNA, 15 bp, Homo sapiens
aatttcaactctatc

SEQ ID NO: 987238 - DNA, 15 bp, Homo sapiens
taatttcaactctat

SEQ ID NO: 987239 - DNA, 15 bp, Homo sapiens
ataatttcaactcta

SEQ ID NO: 987240 - DNA, 15 bp, Homo sapiens
cataatttcaactct

SEQ ID NO: 987241 - DNA, 15 bp, Homo sapiens
ccataatttcaactc

SEQ ID NO: 987242 - DNA, 15 bp, Homo sapiens
cccataatttcaact

SEQ ID NO: 987243 - DNA, 15 bp, Homo sapiens
tcccataatttcaac

SEQ ID NO: 987244 - DNA, 15 bp, Homo sapiens
ctcccataatttcaa

SEQ ID NO: 987245 - DNA, 15 bp, Homo sapiens
gctcccataatttca

SEQ ID NO: 987246 - DNA, 15 bp, Homo sapiens
ggctcccataatttc

SEQ ID NO: 987247 - DNA, 15 bp, Homo sapiens
aggctcccataattt

SEQ ID NO: 987248 - DNA, 15 bp, Homo sapiens
gaggctcccataatt

SEQ ID NO: 987249 - DNA, 15 bp, Homo sapiens
ggaggctcccataat

SEQ ID NO: 987250 - DNA, 15 bp, Homo sapiens
tggaggctcccataa

SEQ ID NO: 987251 - DNA, 15 bp, Homo sapiens
atggaggctcccata

SEQ ID NO: 987252 - DNA, 15 bp, Homo sapiens
catggaggctcccat

SEQ ID NO: 987253 - DNA, 15 bp, Homo sapiens
acatggaggctccca

SEQ ID NO: 987254 - DNA, 15 bp, Homo sapiens
gacatggaggctccc

SEQ ID NO: 987255 - DNA, 15 bp, Homo sapiens
agacatggaggctcc

SEQ ID NO: 987256 - DNA, 15 bp, Homo sapiens
cagacatggaggctc

SEQ ID NO: 987257 - DNA, 15 bp, Homo sapiens
acagacatggaggct

SEQ ID NO: 987258 - DNA, 15 bp, Homo sapiens
cacagacatggaggc

SEQ ID NO: 987259 - DNA, 15 bp, Homo sapiens
ccacagacatggagg

SEQ ID NO: 987260 - DNA, 15 bp, Homo sapiens
cccacagacatggag

SEQ ID NO: 987261 - DNA, 15 bp, Homo sapiens
tcccacagacatgga

SEQ ID NO: 987262 - DNA, 15 bp, Homo sapiens
ctcccacagacatgg

SEQ ID NO: 987263 - DNA, 15 bp, Homo sapiens
tctcccacagacatg

SEQ ID NO: 987264 - DNA, 15 bp, Homo sapiens
atctcccacagacat

SEQ ID NO: 987265 - DNA, 15 bp, Homo sapiens
tatctcccacagaca

SEQ ID NO: 987266 - DNA, 15 bp, Homo sapiens
atatctcccacagac

SEQ ID NO: 987267 - DNA, 15 bp, Homo sapiens
tatatctcccacaga

SEQ ID NO: 987268 - DNA, 15 bp, Homo sapiens
ctatatctcccacag

SEQ ID NO: 987269 - DNA, 15 bp, Homo sapiens
tctatatctcccaca

SEQ ID NO: 987270 - DNA, 15 bp, Homo sapiens
ttctatatctcccac

SEQ ID NO: 987271 - DNA, 15 bp, Homo sapiens
cttctatatctccca

SEQ ID NO: 987272 - DNA, 15 bp, Homo sapiens
ccttctatatctccc

SEQ ID NO: 987273 - DNA, 15 bp, Homo sapiens
tccttctatatctcc

SEQ ID NO: 987274 - DNA, 15 bp, Homo sapiens
ctccttctatatctc

SEQ ID NO: 987275 - DNA, 15 bp, Homo sapiens
cctccttctatatct

SEQ ID NO: 987276 - DNA, 15 bp, Homo sapiens
tcctccttctatatc

SEQ ID NO: 987277 - DNA, 15 bp, Homo sapiens
ctcctccttctatat

SEQ ID NO: 987278 - DNA, 15 bp, Homo sapiens
cctcctccttctata

SEQ ID NO: 987279 - DNA, 15 bp, Homo sapiens
acctcctccttctat

SEQ ID NO: 987280 - DNA, 15 bp, Homo sapiens
tacctcctccttcta

SEQ ID NO: 987281 - DNA, 15 bp, Homo sapiens
ttacctcctccttct

SEQ ID NO: 987282 - DNA, 15 bp, Homo sapiens
gttacctcctccttc

SEQ ID NO: 987283 - DNA, 15 bp, Homo sapiens
tgttacctcctcctt

SEQ ID NO: 987284 - DNA, 15 bp, Homo sapiens
gtgttacctcctcct

SEQ ID NO: 987285 - DNA, 15 bp, Homo sapiens
ggtgttacctcctcc

SEQ ID NO: 987286 - DNA, 15 bp, Homo sapiens
aggtgttacctcctc

SEQ ID NO: 987287 - DNA, 15 bp, Homo sapiens
gaggtgttacctcct

SEQ ID NO: 987288 - DNA, 15 bp, Homo sapiens
agaggtgttacctcc

SEQ ID NO: 987289 - DNA, 15 bp, Homo sapiens
gagaggtgttacctc

SEQ ID NO: 987290 - DNA, 15 bp, Homo sapiens
agagaggtgttacct

SEQ ID NO: 987291 - DNA, 15 bp, Homo sapiens
gagagaggtgttacc

SEQ ID NO: 987292 - DNA, 15 bp, Homo sapiens
ggagagaggtgttac

SEQ ID NO: 987293 - DNA, 15 bp, Homo sapiens
aggagagaggtgtta

SEQ ID NO: 987294 - DNA, 15 bp, Homo sapiens
aaggagagaggtgtt

SEQ ID NO: 987295 - DNA, 15 bp, Homo sapiens
aaaggagagaggtgt

SEQ ID NO: 987296 - DNA, 15 bp, Homo sapiens
aaaaggagagaggtg

SEQ ID NO: 987297 - DNA, 15 bp, Homo sapiens
caaaaggagagaggt

SEQ ID NO: 987298 - DNA, 15 bp, Homo sapiens
ccaaaaggagagagg

SEQ ID NO: 987299 - DNA, 15 bp, Homo sapiens
cccaaaaggagagag

SEQ ID NO: 987300 - DNA, 15 bp, Homo sapiens
tcccaaaaggagaga

SEQ ID NO: 987301 - DNA, 15 bp, Homo sapiens
ctcccaaaaggagag

SEQ ID NO: 987302 - DNA, 15 bp, Homo sapiens
gctcccaaaaggaga

SEQ ID NO: 987303 - DNA, 15 bp, Homo sapiens
agctcccaaaaggag

SEQ ID NO: 987304 - DNA, 15 bp, Homo sapiens
gagctcccaaaagga

SEQ ID NO: 987305 - DNA, 15 bp, Homo sapiens
agagctcccaaaagg

SEQ ID NO: 987306 - DNA, 15 bp, Homo sapiens
aagagctcccaaaag

SEQ ID NO: 987307 - DNA, 15 bp, Homo sapiens
taagagctcccaaaa

SEQ ID NO: 987308 - DNA, 15 bp, Homo sapiens
ataagagctcccaaa

SEQ ID NO: 987309 - DNA, 15 bp, Homo sapiens
aataagagctcccaa

SEQ ID NO: 987310 - DNA, 15 bp, Homo sapiens
caataagagctccca

SEQ ID NO: 987311 - DNA, 15 bp, Homo sapiens
ccaataagagctccc

SEQ ID NO: 987312 - DNA, 15 bp, Homo sapiens
accaataagagctcc

SEQ ID NO: 987313 - DNA, 15 bp, Homo sapiens
aaccaataagagctc

SEQ ID NO: 987314 - DNA, 15 bp, Homo sapiens
aaaccaataagagct

SEQ ID NO: 987315 - DNA, 15 bp, Homo sapiens
gaaaccaataagagc

SEQ ID NO: 987316 - DNA, 15 bp, Homo sapiens
agaaaccaataagag

SEQ ID NO: 987317 - DNA, 15 bp, Homo sapiens
aagaaaccaataaga

SEQ ID NO: 987318 - DNA, 15 bp, Homo sapiens
caagaaaccaataag

SEQ ID NO: 987319 - DNA, 15 bp, Homo sapiens
tcaagaaaccaataa

SEQ ID NO: 987320 - DNA, 15 bp, Homo sapiens
atcaagaaaccaata

SEQ ID NO: 987321 - DNA, 15 bp, Homo sapiens
gatcaagaaaccaat

SEQ ID NO: 987322 - DNA, 15 bp, Homo sapiens
agatcaagaaaccaa

SEQ ID NO: 987323 - DNA, 15 bp, Homo sapiens
tagatcaagaaacca

SEQ ID NO: 987324 - DNA, 15 bp, Homo sapiens
atagatcaagaaacc

SEQ ID NO: 987325 - DNA, 15 bp, Homo sapiens
tatagatcaagaaac

SEQ ID NO: 987326 - DNA, 15 bp, Homo sapiens
ttatagatcaagaaa

SEQ ID NO: 987327 - DNA, 15 bp, Homo sapiens
cttatagatcaagaa

SEQ ID NO: 987328 - DNA, 15 bp, Homo sapiens
acttatagatcaaga

SEQ ID NO: 987329 - DNA, 15 bp, Homo sapiens
gacttatagatcaag

SEQ ID NO: 987330 - DNA, 15 bp, Homo sapiens
tgacttatagatcaa

SEQ ID NO: 987331 - DNA, 15 bp, Homo sapiens
ttgacttatagatca

SEQ ID NO: 987332 - DNA, 15 bp, Homo sapiens
cttgacttatagatc

SEQ ID NO: 987333 - DNA, 15 bp, Homo sapiens
tcttgacttatagat

SEQ ID NO: 987334 - DNA, 15 bp, Homo sapiens
ttcttgacttataga

SEQ ID NO: 987335 - DNA, 15 bp, Homo sapiens
cttcttgacttatag

SEQ ID NO: 987336 - DNA, 15 bp, Homo sapiens
ccttcttgacttata

SEQ ID NO: 987337 - DNA, 15 bp, Homo sapiens
accttcttgacttat

SEQ ID NO: 987338 - DNA, 15 bp, Homo sapiens
aaccttcttgactta

SEQ ID NO: 987339 - DNA, 15 bp, Homo sapiens
caaccttcttgactt

SEQ ID NO: 987340 - DNA, 15 bp, Homo sapiens
acaaccttcttgact

SEQ ID NO: 987341 - DNA, 15 bp, Homo sapiens
cacaaccttcttgac

SEQ ID NO: 987342 - DNA, 15 bp, Homo sapiens
tcacaaccttcttga

SEQ ID NO: 987343 - DNA, 15 bp, Homo sapiens
ctcacaaccttcttg

SEQ ID NO: 987344 - DNA, 15 bp, Homo sapiens
actcacaaccttctt

SEQ ID NO: 987345 - DNA, 15 bp, Homo sapiens
cactcacaaccttct

SEQ ID NO: 987346 - DNA, 15 bp, Homo sapiens
ccactcacaaccttc

SEQ ID NO: 987347 - DNA, 15 bp, Homo sapiens
cccactcacaacctt

SEQ ID NO: 987348 - DNA, 15 bp, Homo sapiens
tcccactcacaacct

SEQ ID NO: 987349 - DNA, 15 bp, Homo sapiens
ctcccactcacaacc

SEQ ID NO: 987350 - DNA, 15 bp, Homo sapiens
gctcccactcacaac

SEQ ID NO: 987351 - DNA, 15 bp, Homo sapiens
ggctcccactcacaa

SEQ ID NO: 987352 - DNA, 15 bp, Homo sapiens
tggctcccactcaca

SEQ ID NO: 987353 - DNA, 15 bp, Homo sapiens
gtggctcccactcac

SEQ ID NO: 987354 - DNA, 15 bp, Homo sapiens
tgtggctcccactca

SEQ ID NO: 987355 - DNA, 15 bp, Homo sapiens
ctgtggctcccactc

SEQ ID NO: 987356 - DNA, 15 bp, Homo sapiens
cctgtggctcccact

SEQ ID NO: 987357 - DNA, 15 bp, Homo sapiens
ccctgtggctcccac

SEQ ID NO: 987358 - DNA, 15 bp, Homo sapiens
tccctgtggctccca

SEQ ID NO: 987359 - DNA, 15 bp, Homo sapiens
atccctgtggctccc

SEQ ID NO: 987360 - DNA, 15 bp, Homo sapiens
catccctgtggctcc

SEQ ID NO: 987361 - DNA, 15 bp, Homo sapiens
ccatccctgtggctc

SEQ ID NO: 987362 - DNA, 15 bp, Homo sapiens
accatccctgtggct

SEQ ID NO: 987363 - DNA, 15 bp, Homo sapiens
taccatccctgtggc

SEQ ID NO: 987364 - DNA, 15 bp, Homo sapiens
ttaccatccctgtgg

SEQ ID NO: 987365 - DNA, 15 bp, Homo sapiens
attaccatccctgtg

SEQ ID NO: 987366 - DNA, 15 bp, Homo sapiens
aattaccatccctgt

SEQ ID NO: 987367 - DNA, 15 bp, Homo sapiens
aaattaccatccctg

SEQ ID NO: 987368 - DNA, 15 bp, Homo sapiens
taaattaccatccct

SEQ ID NO: 987369 - DNA, 15 bp, Homo sapiens
ctaaattaccatccc

SEQ ID NO: 987370 - DNA, 15 bp, Homo sapiens
cctaaattaccatcc

SEQ ID NO: 987371 - DNA, 15 bp, Homo sapiens
gcctaaattaccatc

SEQ ID NO: 987372 - DNA, 15 bp, Homo sapiens
agcctaaattaccat

SEQ ID NO: 987373 - DNA, 15 bp, Homo sapiens
cagcctaaattacca

SEQ ID NO: 987374 - DNA, 15 bp, Homo sapiens
acagcctaaattacc

SEQ ID NO: 987375 - DNA, 15 bp, Homo sapiens
tacagcctaaattac

SEQ ID NO: 987376 - DNA, 15 bp, Homo sapiens
ttacagcctaaatta

SEQ ID NO: 987377 - DNA, 15 bp, Homo sapiens
gttacagcctaaatt

SEQ ID NO: 987378 - DNA, 15 bp, Homo sapiens
ggttacagcctaaat

SEQ ID NO: 987379 - DNA, 15 bp, Homo sapiens
tggttacagcctaaa

SEQ ID NO: 987380 - DNA, 15 bp, Homo sapiens
ttggttacagcctaa

SEQ ID NO: 987381 - DNA, 15 bp, Homo sapiens
gttggttacagccta

SEQ ID NO: 987382 - DNA, 15 bp, Homo sapiens
ggttggttacagcct

SEQ ID NO: 987383 - DNA, 15 bp, Homo sapiens
aggttggttacagcc

SEQ ID NO: 987384 - DNA, 15 bp, Homo sapiens
taggttggttacagc

SEQ ID NO: 987385 - DNA, 15 bp, Homo sapiens
ctgtaaccaacctag

SEQ ID NO: 987386 - DNA, 15 bp, Homo sapiens
tgtaaccaacctagg

SEQ ID NO: 987387 - DNA, 15 bp, Homo sapiens
gtaaccaacctaggc

SEQ ID NO: 987388 - DNA, 15 bp, Homo sapiens
taaccaacctaggca

SEQ ID NO: 987389 - DNA, 15 bp, Homo sapiens
aaccaacctaggcag

SEQ ID NO: 987390 - DNA, 15 bp, Homo sapiens
accaacctaggcagg

SEQ ID NO: 987391 - DNA, 15 bp, Homo sapiens
ccaacctaggcagga

SEQ ID NO: 987392 - DNA, 15 bp, Homo sapiens
caacctaggcaggag

SEQ ID NO: 987393 - DNA, 15 bp, Homo sapiens
aacctaggcaggagt

SEQ ID NO: 987394 - DNA, 15 bp, Homo sapiens
acctaggcaggagtt

SEQ ID NO: 987395 - DNA, 15 bp, Homo sapiens
cctaggcaggagttc

SEQ ID NO: 987396 - DNA, 15 bp, Homo sapiens
ctaggcaggagttct

SEQ ID NO: 987397 - DNA, 15 bp, Homo sapiens
taggcaggagttctg

SEQ ID NO: 987398 - DNA, 15 bp, Homo sapiens
aggcaggagttctgt

SEQ ID NO: 987399 - DNA, 15 bp, Homo sapiens
ggcaggagttctgtt

SEQ ID NO: 987400 - DNA, 15 bp, Homo sapiens
gcaggagttctgttc

SEQ ID NO: 987401 - DNA, 15 bp, Homo sapiens
caggagttctgttct

SEQ ID NO: 987402 - DNA, 15 bp, Homo sapiens
aggagttctgttctt

SEQ ID NO: 987403 - DNA, 15 bp, Homo sapiens
ggagttctgttcttt

SEQ ID NO: 987404 - DNA, 15 bp, Homo sapiens
gagttctgttctttg

SEQ ID NO: 987405 - DNA, 15 bp, Homo sapiens
agttctgttctttgt

SEQ ID NO: 987406 - DNA, 15 bp, Homo sapiens
gttctgttctttgta

SEQ ID NO: 987407 - DNA, 15 bp, Homo sapiens
ttctgttctttgtag

SEQ ID NO: 987408 - DNA, 15 bp, Homo sapiens
tctgttctttgtagt

SEQ ID NO: 987409 - DNA, 15 bp, Homo sapiens
ctgttctttgtagtc

SEQ ID NO: 987410 - DNA, 15 bp, Homo sapiens
tgttctttgtagtca

SEQ ID NO: 987411 - DNA, 15 bp, Homo sapiens
gttctttgtagtcac

SEQ ID NO: 987412 - DNA, 15 bp, Homo sapiens
ttctttgtagtcact

SEQ ID NO: 987413 - DNA, 15 bp, Homo sapiens
tctttgtagtcactg

SEQ ID NO: 987414 - DNA, 15 bp, Homo sapiens
ctttgtagtcactga

SEQ ID NO: 987415 - DNA, 15 bp, Homo sapiens
tttgtagtcactgag

SEQ ID NO: 987416 - DNA, 15 bp, Homo sapiens
ttgtagtcactgagg

SEQ ID NO: 987417 - DNA, 15 bp, Homo sapiens
tgtagtcactgaggt

SEQ ID NO: 987418 - DNA, 15 bp, Homo sapiens
gtagtcactgaggtc

SEQ ID NO: 987419 - DNA, 15 bp, Homo sapiens
tagtcactgaggtct

SEQ ID NO: 987420 - DNA, 15 bp, Homo sapiens
agtcactgaggtctt

SEQ ID NO: 987421 - DNA, 15 bp, Homo sapiens
gtcactgaggtcttc

SEQ ID NO: 987422 - DNA, 15 bp, Homo sapiens
tcactgaggtcttct

SEQ ID NO: 987423 - DNA, 15 bp, Homo sapiens
cactgaggtcttctc

SEQ ID NO: 987424 - DNA, 15 bp, Homo sapiens
actgaggtcttctca

SEQ ID NO: 987425 - DNA, 15 bp, Homo sapiens
ctgaggtcttctcat

SEQ ID NO: 987426 - DNA, 15 bp, Homo sapiens
tgaggtcttctcatt

SEQ ID NO: 987427 - DNA, 15 bp, Homo sapiens
gaggtcttctcattc

SEQ ID NO: 987428 - DNA, 15 bp, Homo sapiens
aggtcttctcattcc

SEQ ID NO: 987429 - DNA, 15 bp, Homo sapiens
ggtcttctcattcct

SEQ ID NO: 987430 - DNA, 15 bp, Homo sapiens
gtcttctcattcctt

SEQ ID NO: 987431 - DNA, 15 bp, Homo sapiens
tcttctcattcctta

SEQ ID NO: 987432 - DNA, 15 bp, Homo sapiens
cttctcattccttag

SEQ ID NO: 987433 - DNA, 15 bp, Homo sapiens
ttctcattccttagg

SEQ ID NO: 987434 - DNA, 15 bp, Homo sapiens
tctcattccttaggt

SEQ ID NO: 987435 - DNA, 15 bp, Homo sapiens
ctcattccttaggtc

SEQ ID NO: 987436 - DNA, 15 bp, Homo sapiens
tcattccttaggtct

SEQ ID NO: 987437 - DNA, 15 bp, Homo sapiens
cattccttaggtctt

SEQ ID NO: 987438 - DNA, 15 bp, Homo sapiens
attccttaggtctta

SEQ ID NO: 987439 - DNA, 15 bp, Homo sapiens
ttccttaggtcttat

SEQ ID NO: 987440 - DNA, 15 bp, Homo sapiens
tccttaggtcttatt

SEQ ID NO: 987441 - DNA, 15 bp, Homo sapiens
ccttaggtcttattg

SEQ ID NO: 987442 - DNA, 15 bp, Homo sapiens
cttaggtcttattgg

SEQ ID NO: 987443 - DNA, 15 bp, Homo sapiens
ttaggtcttattggt

SEQ ID NO: 987444 - DNA, 15 bp, Homo sapiens
taggtcttattggtc

SEQ ID NO: 987445 - DNA, 15 bp, Homo sapiens
aggtcttattggtcc

SEQ ID NO: 987446 - DNA, 15 bp, Homo sapiens
ggtcttattggtcct

SEQ ID NO: 987447 - DNA, 15 bp, Homo sapiens
gtcttattggtccta

SEQ ID NO: 987448 - DNA, 15 bp, Homo sapiens
tcttattggtcctaa

SEQ ID NO: 987449 - DNA, 15 bp, Homo sapiens
cttattggtcctaag

SEQ ID NO: 987450 - DNA, 15 bp, Homo sapiens
ttattggtcctaagg

SEQ ID NO: 987451 - DNA, 15 bp, Homo sapiens
tattggtcctaaggg

SEQ ID NO: 987452 - DNA, 15 bp, Homo sapiens
attggtcctaaggga

SEQ ID NO: 987453 - DNA, 15 bp, Homo sapiens
ttggtcctaagggag

SEQ ID NO: 987454 - DNA, 15 bp, Homo sapiens
tggtcctaagggaga

SEQ ID NO: 987455 - DNA, 15 bp, Homo sapiens
ggtcctaagggagac

SEQ ID NO: 987456 - DNA, 15 bp, Homo sapiens
gtcctaagggagaca

SEQ ID NO: 987457 - DNA, 15 bp, Homo sapiens
tcctaagggagacat

SEQ ID NO: 987458 - DNA, 15 bp, Homo sapiens
cctaagggagacatc

SEQ ID NO: 987459 - DNA, 15 bp, Homo sapiens
ctaagggagacatcg

SEQ ID NO: 987460 - DNA, 15 bp, Homo sapiens
taagggagacatcgg

SEQ ID NO: 987461 - DNA, 15 bp, Homo sapiens
aagggagacatcggt

SEQ ID NO: 987462 - DNA, 15 bp, Homo sapiens
agggagacatcggtg

SEQ ID NO: 987463 - DNA, 15 bp, Homo sapiens
gggagacatcggtga

SEQ ID NO: 987464 - DNA, 15 bp, Homo sapiens
ggagacatcggtgaa

SEQ ID NO: 987465 - DNA, 15 bp, Homo sapiens
gagacatcggtgaaa

SEQ ID NO: 987466 - DNA, 15 bp, Homo sapiens
agacatcggtgaaac

SEQ ID NO: 987467 - DNA, 15 bp, Homo sapiens
gacatcggtgaaacc

SEQ ID NO: 987468 - DNA, 15 bp, Homo sapiens
acatcggtgaaaccg

SEQ ID NO: 987469 - DNA, 15 bp, Homo sapiens
catcggtgaaaccgg

SEQ ID NO: 987470 - DNA, 15 bp, Homo sapiens
atcggtgaaaccgga

SEQ ID NO: 987471 - DNA, 15 bp, Homo sapiens
tcggtgaaaccggag

SEQ ID NO: 987472 - DNA, 15 bp, Homo sapiens
cggtgaaaccggagt

SEQ ID NO: 987473 - DNA, 15 bp, Homo sapiens
ggtgaaaccggagta

SEQ ID NO: 987474 - DNA, 15 bp, Homo sapiens
gtgaaaccggagtac

SEQ ID NO: 987475 - DNA, 15 bp, Homo sapiens
tgaaaccggagtacc

SEQ ID NO: 987476 - DNA, 15 bp, Homo sapiens
gaaaccggagtaccc

SEQ ID NO: 987477 - DNA, 15 bp, Homo sapiens
aaaccggagtacccg

SEQ ID NO: 987478 - DNA, 15 bp, Homo sapiens
aaccggagtacccgg

SEQ ID NO: 987479 - DNA, 15 bp, Homo sapiens
accggagtacccggg

SEQ ID NO: 987480 - DNA, 15 bp, Homo sapiens
ccggagtacccgggg

SEQ ID NO: 987481 - DNA, 15 bp, Homo sapiens
cggagtacccggggc

SEQ ID NO: 987482 - DNA, 15 bp, Homo sapiens
ggagtacccggggct

SEQ ID NO: 987483 - DNA, 15 bp, Homo sapiens
gagtacccggggctg

SEQ ID NO: 987484 - DNA, 15 bp, Homo sapiens
agtacccggggctga

SEQ ID NO: 987485 - DNA, 15 bp, Homo sapiens
gtacccggggctgaa

SEQ ID NO: 987486 - DNA, 15 bp, Homo sapiens
tacccggggctgaag

SEQ ID NO: 987487 - DNA, 15 bp, Homo sapiens
acccggggctgaagg

SEQ ID NO: 987488 - DNA, 15 bp, Homo sapiens
cccggggctgaaggt

SEQ ID NO: 987489 - DNA, 15 bp, Homo sapiens
ccggggctgaaggtc

SEQ ID NO: 987490 - DNA, 15 bp, Homo sapiens
cggggctgaaggtcc

SEQ ID NO: 987491 - DNA, 15 bp, Homo sapiens
ggggctgaaggtccc

SEQ ID NO: 987492 - DNA, 15 bp, Homo sapiens
gggctgaaggtcccc

SEQ ID NO: 987493 - DNA, 15 bp, Homo sapiens
ggctgaaggtccccg

SEQ ID NO: 987494 - DNA, 15 bp, Homo sapiens
gctgaaggtccccga

SEQ ID NO: 987495 - DNA, 15 bp, Homo sapiens
ctgaaggtccccgag

SEQ ID NO: 987496 - DNA, 15 bp, Homo sapiens
tgaaggtccccgagg

SEQ ID NO: 987497 - DNA, 15 bp, Homo sapiens
gaaggtccccgaggc

SEQ ID NO: 987498 - DNA, 15 bp, Homo sapiens
aaggtccccgaggct

SEQ ID NO: 987499 - DNA, 15 bp, Homo sapiens
aggtccccgaggctt

SEQ ID NO: 987500 - DNA, 15 bp, Homo sapiens
ggtccccgaggcttt

SEQ ID NO: 987501 - DNA, 15 bp, Homo sapiens
gtccccgaggctttc

SEQ ID NO: 987502 - DNA, 15 bp, Homo sapiens
tccccgaggctttcc

SEQ ID NO: 987503 - DNA, 15 bp, Homo sapiens
ccccgaggctttccg

SEQ ID NO: 987504 - DNA, 15 bp, Homo sapiens
cccgaggctttccgg

SEQ ID NO: 987505 - DNA, 15 bp, Homo sapiens
ccgaggctttccggg

SEQ ID NO: 987506 - DNA, 15 bp, Homo sapiens
cgaggctttccggga

SEQ ID NO: 987507 - DNA, 15 bp, Homo sapiens
gaggctttccgggaa

SEQ ID NO: 987508 - DNA, 15 bp, Homo sapiens
aggctttccgggaat

SEQ ID NO: 987509 - DNA, 15 bp, Homo sapiens
ggctttccgggaatc

SEQ ID NO: 987510 - DNA, 15 bp, Homo sapiens
gctttccgggaatcc

SEQ ID NO: 987511 - DNA, 15 bp, Homo sapiens
ctttccgggaatcca

SEQ ID NO: 987512 - DNA, 15 bp, Homo sapiens
tttccgggaatccaa

SEQ ID NO: 987513 - DNA, 15 bp, Homo sapiens
ttccgggaatccaag

SEQ ID NO: 987514 - DNA, 15 bp, Homo sapiens
tccgggaatccaagg

SEQ ID NO: 987515 - DNA, 15 bp, Homo sapiens
ccgggaatccaaggc

SEQ ID NO: 987516 - DNA, 15 bp, Homo sapiens
cgggaatccaaggca

SEQ ID NO: 987517 - DNA, 15 bp, Homo sapiens
gggaatccaaggcag

SEQ ID NO: 987518 - DNA, 15 bp, Homo sapiens
ggaatccaaggcagg

SEQ ID NO: 987519 - DNA, 15 bp, Homo sapiens
gaatccaaggcagga

SEQ ID NO: 987520 - DNA, 15 bp, Homo sapiens
aatccaaggcaggaa

SEQ ID NO: 987521 - DNA, 15 bp, Homo sapiens
atccaaggcaggaaa

SEQ ID NO: 987522 - DNA, 15 bp, Homo sapiens
tccaaggcaggaaag

SEQ ID NO: 987523 - DNA, 15 bp, Homo sapiens
ccaaggcaggaaagg

SEQ ID NO: 987524 - DNA, 15 bp, Homo sapiens
caaggcaggaaagga

SEQ ID NO: 987525 - DNA, 15 bp, Homo sapiens
aaggcaggaaaggag

SEQ ID NO: 987526 - DNA, 15 bp, Homo sapiens
aggcaggaaaggaga

SEQ ID NO: 987527 - DNA, 15 bp, Homo sapiens
ggcaggaaaggagaa

SEQ ID NO: 987528 - DNA, 15 bp, Homo sapiens
gcaggaaaggagaac

SEQ ID NO: 987529 - DNA, 15 bp, Homo sapiens
caggaaaggagaacc

SEQ ID NO: 987530 - DNA, 15 bp, Homo sapiens
aggaaaggagaacct

SEQ ID NO: 987531 - DNA, 15 bp, Homo sapiens
ggaaaggagaacctg

SEQ ID NO: 987532 - DNA, 15 bp, Homo sapiens
gaaaggagaacctgg

SEQ ID NO: 987533 - DNA, 15 bp, Homo sapiens
aaaggagaacctgga

SEQ ID NO: 987534 - DNA, 15 bp, Homo sapiens
aaggagaacctggag

SEQ ID NO: 987535 - DNA, 15 bp, Homo sapiens
aggagaacctggaga

SEQ ID NO: 987536 - DNA, 15 bp, Homo sapiens
ggagaacctggagaa

SEQ ID NO: 987537 - DNA, 15 bp, Homo sapiens
gagaacctggagaag

SEQ ID NO: 987538 - DNA, 15 bp, Homo sapiens
agaacctggagaagg

SEQ ID NO: 987539 - DNA, 15 bp, Homo sapiens
gaacctggagaaggt

SEQ ID NO: 987540 - DNA, 15 bp, Homo sapiens
aacctggagaaggtg

SEQ ID NO: 987541 - DNA, 15 bp, Homo sapiens
acctggagaaggtgc

SEQ ID NO: 987542 - DNA, 15 bp, Homo sapiens
cctggagaaggtgcc

SEQ ID NO: 987543 - DNA, 15 bp, Homo sapiens
ctggagaaggtgcct

SEQ ID NO: 987544 - DNA, 15 bp, Homo sapiens
tggagaaggtgccta

SEQ ID NO: 987545 - DNA, 15 bp, Homo sapiens
ggagaaggtgcctat

SEQ ID NO: 987546 - DNA, 15 bp, Homo sapiens
gagaaggtgcctatg

SEQ ID NO: 987547 - DNA, 15 bp, Homo sapiens
agaaggtgcctatgt

SEQ ID NO: 987548 - DNA, 15 bp, Homo sapiens
gaaggtgcctatgta

SEQ ID NO: 987549 - DNA, 15 bp, Homo sapiens
aaggtgcctatgtat

SEQ ID NO: 987550 - DNA, 15 bp, Homo sapiens
aggtgcctatgtata

SEQ ID NO: 987551 - DNA, 15 bp, Homo sapiens
ggtgcctatgtatac

SEQ ID NO: 987552 - DNA, 15 bp, Homo sapiens
gtgcctatgtatacc

SEQ ID NO: 987553 - DNA, 15 bp, Homo sapiens
tgcctatgtataccg

SEQ ID NO: 987554 - DNA, 15 bp, Homo sapiens
gcctatgtataccgc

SEQ ID NO: 987555 - DNA, 15 bp, Homo sapiens
cctatgtataccgct

SEQ ID NO: 987556 - DNA, 15 bp, Homo sapiens
ctatgtataccgctc

SEQ ID NO: 987557 - DNA, 15 bp, Homo sapiens
tatgtataccgctca

SEQ ID NO: 987558 - DNA, 15 bp, Homo sapiens
atgtataccgctcag

SEQ ID NO: 987559 - DNA, 15 bp, Homo sapiens
tgtataccgctcagc

SEQ ID NO: 987560 - DNA, 15 bp, Homo sapiens
gtataccgctcagca

SEQ ID NO: 987561 - DNA, 15 bp, Homo sapiens
tataccgctcagcat

SEQ ID NO: 987562 - DNA, 15 bp, Homo sapiens
ataccgctcagcatt

SEQ ID NO: 987563 - DNA, 15 bp, Homo sapiens
taccgctcagcattc

SEQ ID NO: 987564 - DNA, 15 bp, Homo sapiens
accgctcagcattca

SEQ ID NO: 987565 - DNA, 15 bp, Homo sapiens
ccgctcagcattcag

SEQ ID NO: 987566 - DNA, 15 bp, Homo sapiens
cgctcagcattcagt

SEQ ID NO: 987567 - DNA, 15 bp, Homo sapiens
gctcagcattcagtg

SEQ ID NO: 987568 - DNA, 15 bp, Homo sapiens
ctcagcattcagtgt

SEQ ID NO: 987569 - DNA, 15 bp, Homo sapiens
tcagcattcagtgtg

SEQ ID NO: 987570 - DNA, 15 bp, Homo sapiens
cagcattcagtgtgg

SEQ ID NO: 987571 - DNA, 15 bp, Homo sapiens
agcattcagtgtggg

SEQ ID NO: 987572 - DNA, 15 bp, Homo sapiens
gcattcagtgtggga

SEQ ID NO: 987573 - DNA, 15 bp, Homo sapiens
cattcagtgtgggat

SEQ ID NO: 987574 - DNA, 15 bp, Homo sapiens
attcagtgtgggatt

SEQ ID NO: 987575 - DNA, 15 bp, Homo sapiens
ttcagtgtgggattg

SEQ ID NO: 987576 - DNA, 15 bp, Homo sapiens
tcagtgtgggattgg

SEQ ID NO: 987577 - DNA, 15 bp, Homo sapiens
cagtgtgggattgga

SEQ ID NO: 987578 - DNA, 15 bp, Homo sapiens
agtgtgggattggag

SEQ ID NO: 987579 - DNA, 15 bp, Homo sapiens
gtgtgggattggaga

SEQ ID NO: 987580 - DNA, 15 bp, Homo sapiens
tgtgggattggagac

SEQ ID NO: 987581 - DNA, 15 bp, Homo sapiens
gtgggattggagact

SEQ ID NO: 987582 - DNA, 15 bp, Homo sapiens
tgggattggagactt

SEQ ID NO: 987583 - DNA, 15 bp, Homo sapiens
gggattggagactta

SEQ ID NO: 987584 - DNA, 15 bp, Homo sapiens
ggattggagacttac

SEQ ID NO: 987585 - DNA, 15 bp, Homo sapiens
gattggagacttacg

SEQ ID NO: 987586 - DNA, 15 bp, Homo sapiens
attggagacttacgt

SEQ ID NO: 987587 - DNA, 15 bp, Homo sapiens
ttggagacttacgtt

SEQ ID NO: 987588 - DNA, 15 bp, Homo sapiens
tggagacttacgtta

SEQ ID NO: 987589 - DNA, 15 bp, Homo sapiens
ggagacttacgttac

SEQ ID NO: 987590 - DNA, 15 bp, Homo sapiens
gagacttacgttact

SEQ ID NO: 987591 - DNA, 15 bp, Homo sapiens
agacttacgttacta

SEQ ID NO: 987592 - DNA, 15 bp, Homo sapiens
gacttacgttactat

SEQ ID NO: 987593 - DNA, 15 bp, Homo sapiens
acttacgttactatc

SEQ ID NO: 987594 - DNA, 15 bp, Homo sapiens
cttacgttactatcc

SEQ ID NO: 987595 - DNA, 15 bp, Homo sapiens
ttacgttactatccc

SEQ ID NO: 987596 - DNA, 15 bp, Homo sapiens
tacgttactatcccc

SEQ ID NO: 987597 - DNA, 15 bp, Homo sapiens
acgttactatcccca

SEQ ID NO: 987598 - DNA, 15 bp, Homo sapiens
cgttactatccccaa

SEQ ID NO: 987599 - DNA, 15 bp, Homo sapiens
gttactatccccaac

SEQ ID NO: 987600 - DNA, 15 bp, Homo sapiens
ttactatccccaaca

SEQ ID NO: 987601 - DNA, 15 bp, Homo sapiens
tactatccccaacat

SEQ ID NO: 987602 - DNA, 15 bp, Homo sapiens
actatccccaacatg

SEQ ID NO: 987603 - DNA, 15 bp, Homo sapiens
ctatccccaacatgc

SEQ ID NO: 987604 - DNA, 15 bp, Homo sapiens
tatccccaacatgcc

SEQ ID NO: 987605 - DNA, 15 bp, Homo sapiens
atccccaacatgccc

SEQ ID NO: 987606 - DNA, 15 bp, Homo sapiens
tccccaacatgccca

SEQ ID NO: 987607 - DNA, 15 bp, Homo sapiens
ccccaacatgcccat

SEQ ID NO: 987608 - DNA, 15 bp, Homo sapiens
cccaacatgcccatt

SEQ ID NO: 987609 - DNA, 15 bp, Homo sapiens
ccaacatgcccattc

SEQ ID NO: 987610 - DNA, 15 bp, Homo sapiens
caacatgcccattcg

SEQ ID NO: 987611 - DNA, 15 bp, Homo sapiens
aacatgcccattcgc

SEQ ID NO: 987612 - DNA, 15 bp, Homo sapiens
acatgcccattcgct

SEQ ID NO: 987613 - DNA, 15 bp, Homo sapiens
catgcccattcgctt

SEQ ID NO: 987614 - DNA, 15 bp, Homo sapiens
atgcccattcgcttt

SEQ ID NO: 987615 - DNA, 15 bp, Homo sapiens
tgcccattcgcttta

SEQ ID NO: 987616 - DNA, 15 bp, Homo sapiens
gcccattcgctttac

SEQ ID NO: 987617 - DNA, 15 bp, Homo sapiens
cccattcgctttacc

SEQ ID NO: 987618 - DNA, 15 bp, Homo sapiens
ccattcgctttacca

SEQ ID NO: 987619 - DNA, 15 bp, Homo sapiens
cattcgctttaccaa

SEQ ID NO: 987620 - DNA, 15 bp, Homo sapiens
attcgctttaccaag

SEQ ID NO: 987621 - DNA, 15 bp, Homo sapiens
ttcgctttaccaaga

SEQ ID NO: 987622 - DNA, 15 bp, Homo sapiens
tcgctttaccaagat

SEQ ID NO: 987623 - DNA, 15 bp, Homo sapiens
cgctttaccaagatc

SEQ ID NO: 987624 - DNA, 15 bp, Homo sapiens
gctttaccaagatct

SEQ ID NO: 987625 - DNA, 15 bp, Homo sapiens
ctttaccaagatctt

SEQ ID NO: 987626 - DNA, 15 bp, Homo sapiens
tttaccaagatcttc

SEQ ID NO: 987627 - DNA, 15 bp, Homo sapiens
ttaccaagatcttct

SEQ ID NO: 987628 - DNA, 15 bp, Homo sapiens
taccaagatcttcta

SEQ ID NO: 987629 - DNA, 15 bp, Homo sapiens
accaagatcttctac

SEQ ID NO: 987630 - DNA, 15 bp, Homo sapiens
ccaagatcttctaca

SEQ ID NO: 987631 - DNA, 15 bp, Homo sapiens
caagatcttctacaa

SEQ ID NO: 987632 - DNA, 15 bp, Homo sapiens
aagatcttctacaat

SEQ ID NO: 987633 - DNA, 15 bp, Homo sapiens
agatcttctacaatc

SEQ ID NO: 987634 - DNA, 15 bp, Homo sapiens
gatcttctacaatca

SEQ ID NO: 987635 - DNA, 15 bp, Homo sapiens
atcttctacaatcag

SEQ ID NO: 987636 - DNA, 15 bp, Homo sapiens
tcttctacaatcagc

SEQ ID NO: 987637 - DNA, 15 bp, Homo sapiens
cttctacaatcagca

SEQ ID NO: 987638 - DNA, 15 bp, Homo sapiens
ttctacaatcagcaa

SEQ ID NO: 987639 - DNA, 15 bp, Homo sapiens
tctacaatcagcaaa

SEQ ID NO: 987640 - DNA, 15 bp, Homo sapiens
ctacaatcagcaaaa

SEQ ID NO: 987641 - DNA, 15 bp, Homo sapiens
tacaatcagcaaaac

SEQ ID NO: 987642 - DNA, 15 bp, Homo sapiens
acaatcagcaaaacc

SEQ ID NO: 987643 - DNA, 15 bp, Homo sapiens
caatcagcaaaacca

SEQ ID NO: 987644 - DNA, 15 bp, Homo sapiens
aatcagcaaaaccac

SEQ ID NO: 987645 - DNA, 15 bp, Homo sapiens
atcagcaaaaccact

SEQ ID NO: 987646 - DNA, 15 bp, Homo sapiens
tcagcaaaaccacta

SEQ ID NO: 987647 - DNA, 15 bp, Homo sapiens
cagcaaaaccactat

SEQ ID NO: 987648 - DNA, 15 bp, Homo sapiens
agcaaaaccactatg

SEQ ID NO: 987649 - DNA, 15 bp, Homo sapiens
gcaaaaccactatga

SEQ ID NO: 987650 - DNA, 15 bp, Homo sapiens
caaaaccactatgat

SEQ ID NO: 987651 - DNA, 15 bp, Homo sapiens
aaaaccactatgatg

SEQ ID NO: 987652 - DNA, 15 bp, Homo sapiens
aaaccactatgatgg

SEQ ID NO: 987653 - DNA, 15 bp, Homo sapiens
aaccactatgatggc

SEQ ID NO: 987654 - DNA, 15 bp, Homo sapiens
accactatgatggct

SEQ ID NO: 987655 - DNA, 15 bp, Homo sapiens
ccactatgatggctc

SEQ ID NO: 987656 - DNA, 15 bp, Homo sapiens
cactatgatggctcc

SEQ ID NO: 987657 - DNA, 15 bp, Homo sapiens
actatgatggctcca

SEQ ID NO: 987658 - DNA, 15 bp, Homo sapiens
ctatgatggctccac

SEQ ID NO: 987659 - DNA, 15 bp, Homo sapiens
tatgatggctccact

SEQ ID NO: 987660 - DNA, 15 bp, Homo sapiens
atgatggctccactg

SEQ ID NO: 987661 - DNA, 15 bp, Homo sapiens
tgatggctccactgg

SEQ ID NO: 987662 - DNA, 15 bp, Homo sapiens
gatggctccactggt

SEQ ID NO: 987663 - DNA, 15 bp, Homo sapiens
atggctccactggta

SEQ ID NO: 987664 - DNA, 15 bp, Homo sapiens
tggctccactggtaa

SEQ ID NO: 987665 - DNA, 15 bp, Homo sapiens
ggctccactggtaaa

SEQ ID NO: 987666 - DNA, 15 bp, Homo sapiens
gctccactggtaaat

SEQ ID NO: 987667 - DNA, 15 bp, Homo sapiens
ctccactggtaaatt

SEQ ID NO: 987668 - DNA, 15 bp, Homo sapiens
tccactggtaaattc

SEQ ID NO: 987669 - DNA, 15 bp, Homo sapiens
ccactggtaaattcc

SEQ ID NO: 987670 - DNA, 15 bp, Homo sapiens
cactggtaaattcca

SEQ ID NO: 987671 - DNA, 15 bp, Homo sapiens
actggtaaattccac

SEQ ID NO: 987672 - DNA, 15 bp, Homo sapiens
ctggtaaattccact

SEQ ID NO: 987673 - DNA, 15 bp, Homo sapiens
tggtaaattccactg

SEQ ID NO: 987674 - DNA, 15 bp, Homo sapiens
ggtaaattccactgc

SEQ ID NO: 987675 - DNA, 15 bp, Homo sapiens
gtaaattccactgca

SEQ ID NO: 987676 - DNA, 15 bp, Homo sapiens
taaattccactgcaa

SEQ ID NO: 987677 - DNA, 15 bp, Homo sapiens
aaattccactgcaac

SEQ ID NO: 987678 - DNA, 15 bp, Homo sapiens
aattccactgcaaca

SEQ ID NO: 987679 - DNA, 15 bp, Homo sapiens
attccactgcaacat

SEQ ID NO: 987680 - DNA, 15 bp, Homo sapiens
ttccactgcaacatt

SEQ ID NO: 987681 - DNA, 15 bp, Homo sapiens
tccactgcaacattc

SEQ ID NO: 987682 - DNA, 15 bp, Homo sapiens
ccactgcaacattcc

SEQ ID NO: 987683 - DNA, 15 bp, Homo sapiens
cactgcaacattcct

SEQ ID NO: 987684 - DNA, 15 bp, Homo sapiens
actgcaacattcctg

SEQ ID NO: 987685 - DNA, 15 bp, Homo sapiens
ctgcaacattcctgg

SEQ ID NO: 987686 - DNA, 15 bp, Homo sapiens
tgcaacattcctggg

SEQ ID NO: 987687 - DNA, 15 bp, Homo sapiens
gcaacattcctgggc

SEQ ID NO: 987688 - DNA, 15 bp, Homo sapiens
caacattcctgggct

SEQ ID NO: 987689 - DNA, 15 bp, Homo sapiens
aacattcctgggctg

SEQ ID NO: 987690 - DNA, 15 bp, Homo sapiens
acattcctgggctgt

SEQ ID NO: 987691 - DNA, 15 bp, Homo sapiens
cattcctgggctgta

SEQ ID NO: 987692 - DNA, 15 bp, Homo sapiens
attcctgggctgtac

SEQ ID NO: 987693 - DNA, 15 bp, Homo sapiens
ttcctgggctgtact

SEQ ID NO: 987694 - DNA, 15 bp, Homo sapiens
tcctgggctgtacta

SEQ ID NO: 987695 - DNA, 15 bp, Homo sapiens
cctgggctgtactac

SEQ ID NO: 987696 - DNA, 15 bp, Homo sapiens
ctgggctgtactact

SEQ ID NO: 987697 - DNA, 15 bp, Homo sapiens
tgggctgtactactt

SEQ ID NO: 987698 - DNA, 15 bp, Homo sapiens
gggctgtactacttt

SEQ ID NO: 987699 - DNA, 15 bp, Homo sapiens
ggctgtactactttg

SEQ ID NO: 987700 - DNA, 15 bp, Homo sapiens
gctgtactactttgc

SEQ ID NO: 987701 - DNA, 15 bp, Homo sapiens
ctgtactactttgcc

SEQ ID NO: 987702 - DNA, 15 bp, Homo sapiens
tgtactactttgcct

SEQ ID NO: 987703 - DNA, 15 bp, Homo sapiens
gtactactttgccta

SEQ ID NO: 987704 - DNA, 15 bp, Homo sapiens
tactactttgcctac

SEQ ID NO: 987705 - DNA, 15 bp, Homo sapiens
actactttgcctacc

SEQ ID NO: 987706 - DNA, 15 bp, Homo sapiens
ctactttgcctacca

SEQ ID NO: 987707 - DNA, 15 bp, Homo sapiens
tactttgcctaccac

SEQ ID NO: 987708 - DNA, 15 bp, Homo sapiens
actttgcctaccaca

SEQ ID NO: 987709 - DNA, 15 bp, Homo sapiens
ctttgcctaccacat

SEQ ID NO: 987710 - DNA, 15 bp, Homo sapiens
tttgcctaccacatc

SEQ ID NO: 987711 - DNA, 15 bp, Homo sapiens
ttgcctaccacatca

SEQ ID NO: 987712 - DNA, 15 bp, Homo sapiens
tgcctaccacatcac

SEQ ID NO: 987713 - DNA, 15 bp, Homo sapiens
gcctaccacatcaca

SEQ ID NO: 987714 - DNA, 15 bp, Homo sapiens
cctaccacatcacag

SEQ ID NO: 987715 - DNA, 15 bp, Homo sapiens
ctaccacatcacagt

SEQ ID NO: 987716 - DNA, 15 bp, Homo sapiens
taccacatcacagtc

SEQ ID NO: 987717 - DNA, 15 bp, Homo sapiens
accacatcacagtct

SEQ ID NO: 987718 - DNA, 15 bp, Homo sapiens
ccacatcacagtcta

SEQ ID NO: 987719 - DNA, 15 bp, Homo sapiens
cacatcacagtctat

SEQ ID NO: 987720 - DNA, 15 bp, Homo sapiens
acatcacagtctata

SEQ ID NO: 987721 - DNA, 15 bp, Homo sapiens
catcacagtctatat

SEQ ID NO: 987722 - DNA, 15 bp, Homo sapiens
atcacagtctatatg

SEQ ID NO: 987723 - DNA, 15 bp, Homo sapiens
tcacagtctatatga

SEQ ID NO: 987724 - DNA, 15 bp, Homo sapiens
cacagtctatatgaa

SEQ ID NO: 987725 - DNA, 15 bp, Homo sapiens
acagtctatatgaag

SEQ ID NO: 987726 - DNA, 15 bp, Homo sapiens
cagtctatatgaagg

SEQ ID NO: 987727 - DNA, 15 bp, Homo sapiens
agtctatatgaagga

SEQ ID NO: 987728 - DNA, 15 bp, Homo sapiens
gtctatatgaaggat

SEQ ID NO: 987729 - DNA, 15 bp, Homo sapiens
tctatatgaaggatg

SEQ ID NO: 987730 - DNA, 15 bp, Homo sapiens
ctatatgaaggatgt

SEQ ID NO: 987731 - DNA, 15 bp, Homo sapiens
tatatgaaggatgtg

SEQ ID NO: 987732 - DNA, 15 bp, Homo sapiens
atatgaaggatgtga

SEQ ID NO: 987733 - DNA, 15 bp, Homo sapiens
tatgaaggatgtgaa

SEQ ID NO: 987734 - DNA, 15 bp, Homo sapiens
atgaaggatgtgaag

SEQ ID NO: 987735 - DNA, 15 bp, Homo sapiens
tgaaggatgtgaagg

SEQ ID NO: 987736 - DNA, 15 bp, Homo sapiens
gaaggatgtgaaggt

SEQ ID NO: 987737 - DNA, 15 bp, Homo sapiens
aaggatgtgaaggtc

SEQ ID NO: 987738 - DNA, 15 bp, Homo sapiens
aggatgtgaaggtca

SEQ ID NO: 987739 - DNA, 15 bp, Homo sapiens
ggatgtgaaggtcag

SEQ ID NO: 987740 - DNA, 15 bp, Homo sapiens
gatgtgaaggtcagc

SEQ ID NO: 987741 - DNA, 15 bp, Homo sapiens
atgtgaaggtcagcc

SEQ ID NO: 987742 - DNA, 15 bp, Homo sapiens
tgtgaaggtcagcct

SEQ ID NO: 987743 - DNA, 15 bp, Homo sapiens
gtgaaggtcagcctc

SEQ ID NO: 987744 - DNA, 15 bp, Homo sapiens
tgaaggtcagcctct

SEQ ID NO: 987745 - DNA, 15 bp, Homo sapiens
gaaggtcagcctctt

SEQ ID NO: 987746 - DNA, 15 bp, Homo sapiens
aaggtcagcctcttc

SEQ ID NO: 987747 - DNA, 15 bp, Homo sapiens
aggtcagcctcttca

SEQ ID NO: 987748 - DNA, 15 bp, Homo sapiens
ggtcagcctcttcaa

SEQ ID NO: 987749 - DNA, 15 bp, Homo sapiens
gtcagcctcttcaag

SEQ ID NO: 987750 - DNA, 15 bp, Homo sapiens
tcagcctcttcaaga

SEQ ID NO: 987751 - DNA, 15 bp, Homo sapiens
cagcctcttcaagaa

SEQ ID NO: 987752 - DNA, 15 bp, Homo sapiens
agcctcttcaagaag

SEQ ID NO: 987753 - DNA, 15 bp, Homo sapiens
gcctcttcaagaagg

SEQ ID NO: 987754 - DNA, 15 bp, Homo sapiens
cctcttcaagaagga

SEQ ID NO: 987755 - DNA, 15 bp, Homo sapiens
ctcttcaagaaggac

SEQ ID NO: 987756 - DNA, 15 bp, Homo sapiens
tcttcaagaaggaca

SEQ ID NO: 987757 - DNA, 15 bp, Homo sapiens
cttcaagaaggacaa

SEQ ID NO: 987758 - DNA, 15 bp, Homo sapiens
ttcaagaaggacaag

SEQ ID NO: 987759 - DNA, 15 bp, Homo sapiens
tcaagaaggacaagg

SEQ ID NO: 987760 - DNA, 15 bp, Homo sapiens
caagaaggacaaggc

SEQ ID NO: 987761 - DNA, 15 bp, Homo sapiens
aagaaggacaaggct

SEQ ID NO: 987762 - DNA, 15 bp, Homo sapiens
agaaggacaaggcta

SEQ ID NO: 987763 - DNA, 15 bp, Homo sapiens
gaaggacaaggctat

SEQ ID NO: 987764 - DNA, 15 bp, Homo sapiens
aaggacaaggctatg

SEQ ID NO: 987765 - DNA, 15 bp, Homo sapiens
aggacaaggctatgc

SEQ ID NO: 987766 - DNA, 15 bp, Homo sapiens
ggacaaggctatgct

SEQ ID NO: 987767 - DNA, 15 bp, Homo sapiens
gacaaggctatgctc

SEQ ID NO: 987768 - DNA, 15 bp, Homo sapiens
acaaggctatgctct

SEQ ID NO: 987769 - DNA, 15 bp, Homo sapiens
caaggctatgctctt

SEQ ID NO: 987770 - DNA, 15 bp, Homo sapiens
aaggctatgctcttc

SEQ ID NO: 987771 - DNA, 15 bp, Homo sapiens
aggctatgctcttca

SEQ ID NO: 987772 - DNA, 15 bp, Homo sapiens
ggctatgctcttcac

SEQ ID NO: 987773 - DNA, 15 bp, Homo sapiens
gctatgctcttcacc

SEQ ID NO: 987774 - DNA, 15 bp, Homo sapiens
ctatgctcttcacct

SEQ ID NO: 987775 - DNA, 15 bp, Homo sapiens
tatgctcttcaccta

SEQ ID NO: 987776 - DNA, 15 bp, Homo sapiens
atgctcttcacctat

SEQ ID NO: 987777 - DNA, 15 bp, Homo sapiens
tgctcttcacctatg

SEQ ID NO: 987778 - DNA, 15 bp, Homo sapiens
gctcttcacctatga

SEQ ID NO: 987779 - DNA, 15 bp, Homo sapiens
ctcttcacctatgat

SEQ ID NO: 987780 - DNA, 15 bp, Homo sapiens
tcttcacctatgatc

SEQ ID NO: 987781 - DNA, 15 bp, Homo sapiens
cttcacctatgatca

SEQ ID NO: 987782 - DNA, 15 bp, Homo sapiens
ttcacctatgatcag

SEQ ID NO: 987783 - DNA, 15 bp, Homo sapiens
tcacctatgatcagt

SEQ ID NO: 987784 - DNA, 15 bp, Homo sapiens
cacctatgatcagta

SEQ ID NO: 987785 - DNA, 15 bp, Homo sapiens
acctatgatcagtac

SEQ ID NO: 987786 - DNA, 15 bp, Homo sapiens
cctatgatcagtacc

SEQ ID NO: 987787 - DNA, 15 bp, Homo sapiens
ctatgatcagtacca

SEQ ID NO: 987788 - DNA, 15 bp, Homo sapiens
tatgatcagtaccag

SEQ ID NO: 987789 - DNA, 15 bp, Homo sapiens
atgatcagtaccagg

SEQ ID NO: 987790 - DNA, 15 bp, Homo sapiens
tgatcagtaccagga

SEQ ID NO: 987791 - DNA, 15 bp, Homo sapiens
gatcagtaccaggaa

SEQ ID NO: 987792 - DNA, 15 bp, Homo sapiens
atcagtaccaggaaa

SEQ ID NO: 987793 - DNA, 15 bp, Homo sapiens
tcagtaccaggaaaa

SEQ ID NO: 987794 - DNA, 15 bp, Homo sapiens
cagtaccaggaaaat

SEQ ID NO: 987795 - DNA, 15 bp, Homo sapiens
agtaccaggaaaata

SEQ ID NO: 987796 - DNA, 15 bp, Homo sapiens
gtaccaggaaaataa

SEQ ID NO: 987797 - DNA, 15 bp, Homo sapiens
taccaggaaaataat

SEQ ID NO: 987798 - DNA, 15 bp, Homo sapiens
accaggaaaataatg

SEQ ID NO: 987799 - DNA, 15 bp, Homo sapiens
ccaggaaaataatgt

SEQ ID NO: 987800 - DNA, 15 bp, Homo sapiens
caggaaaataatgtg

SEQ ID NO: 987801 - DNA, 15 bp, Homo sapiens
aggaaaataatgtgg

SEQ ID NO: 987802 - DNA, 15 bp, Homo sapiens
ggaaaataatgtgga

SEQ ID NO: 987803 - DNA, 15 bp, Homo sapiens
gaaaataatgtggac

SEQ ID NO: 987804 - DNA, 15 bp, Homo sapiens
aaaataatgtggacc

SEQ ID NO: 987805 - DNA, 15 bp, Homo sapiens
aaataatgtggacca

SEQ ID NO: 987806 - DNA, 15 bp, Homo sapiens
aataatgtggaccag

SEQ ID NO: 987807 - DNA, 15 bp, Homo sapiens
ataatgtggaccagg

SEQ ID NO: 987808 - DNA, 15 bp, Homo sapiens
taatgtggaccaggc

SEQ ID NO: 987809 - DNA, 15 bp, Homo sapiens
aatgtggaccaggcc

SEQ ID NO: 987810 - DNA, 15 bp, Homo sapiens
atgtggaccaggcct

SEQ ID NO: 987811 - DNA, 15 bp, Homo sapiens
tgtggaccaggcctc

SEQ ID NO: 987812 - DNA, 15 bp, Homo sapiens
gtggaccaggcctcc

SEQ ID NO: 987813 - DNA, 15 bp, Homo sapiens
tggaccaggcctccg

SEQ ID NO: 987814 - DNA, 15 bp, Homo sapiens
ggaccaggcctccgg

SEQ ID NO: 987815 - DNA, 15 bp, Homo sapiens
gaccaggcctccggc

SEQ ID NO: 987816 - DNA, 15 bp, Homo sapiens
accaggcctccggct

SEQ ID NO: 987817 - DNA, 15 bp, Homo sapiens
ccaggcctccggctc

SEQ ID NO: 987818 - DNA, 15 bp, Homo sapiens
caggcctccggctct

SEQ ID NO: 987819 - DNA, 15 bp, Homo sapiens
aggcctccggctctg

SEQ ID NO: 987820 - DNA, 15 bp, Homo sapiens
ggcctccggctctgt

SEQ ID NO: 987821 - DNA, 15 bp, Homo sapiens
gcctccggctctgtg

SEQ ID NO: 987822 - DNA, 15 bp, Homo sapiens
cctccggctctgtgc

SEQ ID NO: 987823 - DNA, 15 bp, Homo sapiens
ctccggctctgtgct

SEQ ID NO: 987824 - DNA, 15 bp, Homo sapiens
tccggctctgtgctc

SEQ ID NO: 987825 - DNA, 15 bp, Homo sapiens
ccggctctgtgctcc

SEQ ID NO: 987826 - DNA, 15 bp, Homo sapiens
cggctctgtgctcct

SEQ ID NO: 987827 - DNA, 15 bp, Homo sapiens
ggctctgtgctcctg

SEQ ID NO: 987828 - DNA, 15 bp, Homo sapiens
gctctgtgctcctgc

SEQ ID NO: 987829 - DNA, 15 bp, Homo sapiens
ctctgtgctcctgca

SEQ ID NO: 987830 - DNA, 15 bp, Homo sapiens
tctgtgctcctgcat

SEQ ID NO: 987831 - DNA, 15 bp, Homo sapiens
ctgtgctcctgcatc

SEQ ID NO: 987832 - DNA, 15 bp, Homo sapiens
tgtgctcctgcatct

SEQ ID NO: 987833 - DNA, 15 bp, Homo sapiens
gtgctcctgcatctg

SEQ ID NO: 987834 - DNA, 15 bp, Homo sapiens
tgctcctgcatctgg

SEQ ID NO: 987835 - DNA, 15 bp, Homo sapiens
gctcctgcatctgga

SEQ ID NO: 987836 - DNA, 15 bp, Homo sapiens
ctcctgcatctggag

SEQ ID NO: 987837 - DNA, 15 bp, Homo sapiens
tcctgcatctggagg

SEQ ID NO: 987838 - DNA, 15 bp, Homo sapiens
cctgcatctggaggt

SEQ ID NO: 987839 - DNA, 15 bp, Homo sapiens
ctgcatctggaggtg

SEQ ID NO: 987840 - DNA, 15 bp, Homo sapiens
tgcatctggaggtgg

SEQ ID NO: 987841 - DNA, 15 bp, Homo sapiens
gcatctggaggtggg

SEQ ID NO: 987842 - DNA, 15 bp, Homo sapiens
catctggaggtgggc

SEQ ID NO: 987843 - DNA, 15 bp, Homo sapiens
atctggaggtgggcg

SEQ ID NO: 987844 - DNA, 15 bp, Homo sapiens
tctggaggtgggcga

SEQ ID NO: 987845 - DNA, 15 bp, Homo sapiens
ctggaggtgggcgac

SEQ ID NO: 987846 - DNA, 15 bp, Homo sapiens
tggaggtgggcgacc

SEQ ID NO: 987847 - DNA, 15 bp, Homo sapiens
ggaggtgggcgacca

SEQ ID NO: 987848 - DNA, 15 bp, Homo sapiens
gaggtgggcgaccaa

SEQ ID NO: 987849 - DNA, 15 bp, Homo sapiens
aggtgggcgaccaag

SEQ ID NO: 987850 - DNA, 15 bp, Homo sapiens
ggtgggcgaccaagt

SEQ ID NO: 987851 - DNA, 15 bp, Homo sapiens
gtgggcgaccaagtc

SEQ ID NO: 987852 - DNA, 15 bp, Homo sapiens
tgggcgaccaagtct

SEQ ID NO: 987853 - DNA, 15 bp, Homo sapiens
gggcgaccaagtctg

SEQ ID NO: 987854 - DNA, 15 bp, Homo sapiens
ggcgaccaagtctgg

SEQ ID NO: 987855 - DNA, 15 bp, Homo sapiens
gcgaccaagtctggc

SEQ ID NO: 987856 - DNA, 15 bp, Homo sapiens
cgaccaagtctggct

SEQ ID NO: 987857 - DNA, 15 bp, Homo sapiens
gaccaagtctggctc

SEQ ID NO: 987858 - DNA, 15 bp, Homo sapiens
accaagtctggctcc

SEQ ID NO: 987859 - DNA, 15 bp, Homo sapiens
ccaagtctggctcca

SEQ ID NO: 987860 - DNA, 15 bp, Homo sapiens
caagtctggctccag

SEQ ID NO: 987861 - DNA, 15 bp, Homo sapiens
aagtctggctccagg

SEQ ID NO: 987862 - DNA, 15 bp, Homo sapiens
agtctggctccaggt

SEQ ID NO: 987863 - DNA, 15 bp, Homo sapiens
gtctggctccaggtg

SEQ ID NO: 987864 - DNA, 15 bp, Homo sapiens
tctggctccaggtgt

SEQ ID NO: 987865 - DNA, 15 bp, Homo sapiens
ctggctccaggtgta

SEQ ID NO: 987866 - DNA, 15 bp, Homo sapiens
tggctccaggtgtat

SEQ ID NO: 987867 - DNA, 15 bp, Homo sapiens
ggctccaggtgtatg

SEQ ID NO: 987868 - DNA, 15 bp, Homo sapiens
gctccaggtgtatgg

SEQ ID NO: 987869 - DNA, 15 bp, Homo sapiens
ctccaggtgtatggg

SEQ ID NO: 987870 - DNA, 15 bp, Homo sapiens
tccaggtgtatgggg

SEQ ID NO: 987871 - DNA, 15 bp, Homo sapiens
ccaggtgtatgggga

SEQ ID NO: 987872 - DNA, 15 bp, Homo sapiens
caggtgtatggggaa

SEQ ID NO: 987873 - DNA, 15 bp, Homo sapiens
aggtgtatggggaag

SEQ ID NO: 987874 - DNA, 15 bp, Homo sapiens
ggtgtatggggaagg

SEQ ID NO: 987875 - DNA, 15 bp, Homo sapiens
gtgtatggggaagga

SEQ ID NO: 987876 - DNA, 15 bp, Homo sapiens
tgtatggggaaggag

SEQ ID NO: 987877 - DNA, 15 bp, Homo sapiens
gtatggggaaggaga

SEQ ID NO: 987878 - DNA, 15 bp, Homo sapiens
tatggggaaggagag

SEQ ID NO: 987879 - DNA, 15 bp, Homo sapiens
atggggaaggagagc

SEQ ID NO: 987880 - DNA, 15 bp, Homo sapiens
tggggaaggagagcg

SEQ ID NO: 987881 - DNA, 15 bp, Homo sapiens
ggggaaggagagcgt

SEQ ID NO: 987882 - DNA, 15 bp, Homo sapiens
gggaaggagagcgta

SEQ ID NO: 987883 - DNA, 15 bp, Homo sapiens
ggaaggagagcgtaa

SEQ ID NO: 987884 - DNA, 15 bp, Homo sapiens
gaaggagagcgtaat

SEQ ID NO: 987885 - DNA, 15 bp, Homo sapiens
aaggagagcgtaatg

SEQ ID NO: 987886 - DNA, 15 bp, Homo sapiens
aggagagcgtaatgg

SEQ ID NO: 987887 - DNA, 15 bp, Homo sapiens
ggagagcgtaatgga

SEQ ID NO: 987888 - DNA, 15 bp, Homo sapiens
gagagcgtaatggac

SEQ ID NO: 987889 - DNA, 15 bp, Homo sapiens
agagcgtaatggact

SEQ ID NO: 987890 - DNA, 15 bp, Homo sapiens
gagcgtaatggactc

SEQ ID NO: 987891 - DNA, 15 bp, Homo sapiens
agcgtaatggactct

SEQ ID NO: 987892 - DNA, 15 bp, Homo sapiens
gcgtaatggactcta

SEQ ID NO: 987893 - DNA, 15 bp, Homo sapiens
cgtaatggactctat

SEQ ID NO: 987894 - DNA, 15 bp, Homo sapiens
gtaatggactctatg

SEQ ID NO: 987895 - DNA, 15 bp, Homo sapiens
taatggactctatgc

SEQ ID NO: 987896 - DNA, 15 bp, Homo sapiens
aatggactctatgct

SEQ ID NO: 987897 - DNA, 15 bp, Homo sapiens
atggactctatgctg

SEQ ID NO: 987898 - DNA, 15 bp, Homo sapiens
tggactctatgctga

SEQ ID NO: 987899 - DNA, 15 bp, Homo sapiens
ggactctatgctgat

SEQ ID NO: 987900 - DNA, 15 bp, Homo sapiens
gactctatgctgata

SEQ ID NO: 987901 - DNA, 15 bp, Homo sapiens
actctatgctgataa

SEQ ID NO: 987902 - DNA, 15 bp, Homo sapiens
ctctatgctgataat

SEQ ID NO: 987903 - DNA, 15 bp, Homo sapiens
tctatgctgataatg

SEQ ID NO: 987904 - DNA, 15 bp, Homo sapiens
ctatgctgataatga

SEQ ID NO: 987905 - DNA, 15 bp, Homo sapiens
tatgctgataatgac

SEQ ID NO: 987906 - DNA, 15 bp, Homo sapiens
atgctgataatgaca

SEQ ID NO: 987907 - DNA, 15 bp, Homo sapiens
tgctgataatgacaa

SEQ ID NO: 987908 - DNA, 15 bp, Homo sapiens
gctgataatgacaat

SEQ ID NO: 987909 - DNA, 15 bp, Homo sapiens
ctgataatgacaatg

SEQ ID NO: 987910 - DNA, 15 bp, Homo sapiens
tgataatgacaatga

SEQ ID NO: 987911 - DNA, 15 bp, Homo sapiens
gataatgacaatgac

SEQ ID NO: 987912 - DNA, 15 bp, Homo sapiens
ataatgacaatgact

SEQ ID NO: 987913 - DNA, 15 bp, Homo sapiens
taatgacaatgactc

SEQ ID NO: 987914 - DNA, 15 bp, Homo sapiens
aatgacaatgactcc

SEQ ID NO: 987915 - DNA, 15 bp, Homo sapiens
atgacaatgactcca

SEQ ID NO: 987916 - DNA, 15 bp, Homo sapiens
tgacaatgactccac

SEQ ID NO: 987917 - DNA, 15 bp, Homo sapiens
gacaatgactccacc

SEQ ID NO: 987918 - DNA, 15 bp, Homo sapiens
acaatgactccacct

SEQ ID NO: 987919 - DNA, 15 bp, Homo sapiens
caatgactccacctt

SEQ ID NO: 987920 - DNA, 15 bp, Homo sapiens
aatgactccaccttc

SEQ ID NO: 987921 - DNA, 15 bp, Homo sapiens
atgactccaccttca

SEQ ID NO: 987922 - DNA, 15 bp, Homo sapiens
tgactccaccttcac

SEQ ID NO: 987923 - DNA, 15 bp, Homo sapiens
gactccaccttcaca

SEQ ID NO: 987924 - DNA, 15 bp, Homo sapiens
actccaccttcacag

SEQ ID NO: 987925 - DNA, 15 bp, Homo sapiens
ctccaccttcacagg

SEQ ID NO: 987926 - DNA, 15 bp, Homo sapiens
tccaccttcacaggc

SEQ ID NO: 987927 - DNA, 15 bp, Homo sapiens
ccaccttcacaggct

SEQ ID NO: 987928 - DNA, 15 bp, Homo sapiens
caccttcacaggctt

SEQ ID NO: 987929 - DNA, 15 bp, Homo sapiens
accttcacaggcttt

SEQ ID NO: 987930 - DNA, 15 bp, Homo sapiens
ccttcacaggctttc

SEQ ID NO: 987931 - DNA, 15 bp, Homo sapiens
cttcacaggctttct

SEQ ID NO: 987932 - DNA, 15 bp, Homo sapiens
ttcacaggctttctt

SEQ ID NO: 987933 - DNA, 15 bp, Homo sapiens
tcacaggctttcttc

SEQ ID NO: 987934 - DNA, 15 bp, Homo sapiens
cacaggctttcttct

SEQ ID NO: 987935 - DNA, 15 bp, Homo sapiens
acaggctttcttctc

SEQ ID NO: 987936 - DNA, 15 bp, Homo sapiens
caggctttcttctct

SEQ ID NO: 987937 - DNA, 15 bp, Homo sapiens
aggctttcttctcta

SEQ ID NO: 987938 - DNA, 15 bp, Homo sapiens
ggctttcttctctac

SEQ ID NO: 987939 - DNA, 15 bp, Homo sapiens
gctttcttctctacc

SEQ ID NO: 987940 - DNA, 15 bp, Homo sapiens
ctttcttctctacca

SEQ ID NO: 987941 - DNA, 15 bp, Homo sapiens
tttcttctctaccat

SEQ ID NO: 987942 - DNA, 15 bp, Homo sapiens
ttcttctctaccatg

SEQ ID NO: 987943 - DNA, 15 bp, Homo sapiens
tcttctctaccatga

SEQ ID NO: 987944 - DNA, 15 bp, Homo sapiens
cttctctaccatgac

SEQ ID NO: 987945 - DNA, 15 bp, Homo sapiens
ttctctaccatgaca

SEQ ID NO: 987946 - DNA, 15 bp, Homo sapiens
tctctaccatgacac

SEQ ID NO: 987947 - DNA, 15 bp, Homo sapiens
ctctaccatgacacc

SEQ ID NO: 987948 - DNA, 15 bp, Homo sapiens
tctaccatgacacca

SEQ ID NO: 987949 - DNA, 15 bp, Homo sapiens
ctaccatgacaccaa

SEQ ID NO: 987950 - DNA, 15 bp, Homo sapiens
taccatgacaccaac

SEQ ID NO: 987951 - DNA, 15 bp, Homo sapiens
accatgacaccaact

SEQ ID NO: 987952 - DNA, 15 bp, Homo sapiens
ccatgacaccaactg

SEQ ID NO: 987953 - DNA, 15 bp, Homo sapiens
catgacaccaactga

SEQ ID NO: 987954 - DNA, 15 bp, Homo sapiens
atgacaccaactgat

SEQ ID NO: 987955 - DNA, 15 bp, Homo sapiens
tgacaccaactgatc

SEQ ID NO: 987956 - DNA, 15 bp, Homo sapiens
gacaccaactgatca

SEQ ID NO: 987957 - DNA, 15 bp, Homo sapiens
acaccaactgatcac

SEQ ID NO: 987958 - DNA, 15 bp, Homo sapiens
caccaactgatcacc

SEQ ID NO: 987959 - DNA, 15 bp, Homo sapiens
accaactgatcacca

SEQ ID NO: 987960 - DNA, 15 bp, Homo sapiens
ccaactgatcaccac

SEQ ID NO: 987961 - DNA, 15 bp, Homo sapiens
caactgatcaccact

SEQ ID NO: 987962 - DNA, 15 bp, Homo sapiens
aactgatcaccacta

SEQ ID NO: 987963 - DNA, 15 bp, Homo sapiens
actgatcaccactaa

SEQ ID NO: 987964 - DNA, 15 bp, Homo sapiens
ctgatcaccactaac

SEQ ID NO: 987965 - DNA, 15 bp, Homo sapiens
tgatcaccactaact

SEQ ID NO: 987966 - DNA, 15 bp, Homo sapiens
gatcaccactaactc

SEQ ID NO: 987967 - DNA, 15 bp, Homo sapiens
atcaccactaactca

SEQ ID NO: 987968 - DNA, 15 bp, Homo sapiens
tcaccactaactcag

SEQ ID NO: 987969 - DNA, 15 bp, Homo sapiens
caccactaactcaga

SEQ ID NO: 987970 - DNA, 15 bp, Homo sapiens
accactaactcagag

SEQ ID NO: 987971 - DNA, 15 bp, Homo sapiens
ccactaactcagagc

SEQ ID NO: 987972 - DNA, 15 bp, Homo sapiens
cactaactcagagcc

SEQ ID NO: 987973 - DNA, 15 bp, Homo sapiens
actaactcagagcct

SEQ ID NO: 987974 - DNA, 15 bp, Homo sapiens
ctaactcagagcctc

SEQ ID NO: 987975 - DNA, 15 bp, Homo sapiens
taactcagagcctcc

SEQ ID NO: 987976 - DNA, 15 bp, Homo sapiens
aactcagagcctcct

SEQ ID NO: 987977 - DNA, 15 bp, Homo sapiens
actcagagcctcctc

SEQ ID NO: 987978 - DNA, 15 bp, Homo sapiens
ctcagagcctcctcc

SEQ ID NO: 987979 - DNA, 15 bp, Homo sapiens
tcagagcctcctcca

SEQ ID NO: 987980 - DNA, 15 bp, Homo sapiens
cagagcctcctccag

SEQ ID NO: 987981 - DNA, 15 bp, Homo sapiens
agagcctcctccagg

SEQ ID NO: 987982 - DNA, 15 bp, Homo sapiens
gagcctcctccaggc

SEQ ID NO: 987983 - DNA, 15 bp, Homo sapiens
agcctcctccaggcc

SEQ ID NO: 987984 - DNA, 15 bp, Homo sapiens
gcctcctccaggcca

SEQ ID NO: 987985 - DNA, 15 bp, Homo sapiens
cctcctccaggccaa

SEQ ID NO: 987986 - DNA, 15 bp, Homo sapiens
ctcctccaggccaaa

SEQ ID NO: 987987 - DNA, 15 bp, Homo sapiens
tcctccaggccaaac

SEQ ID NO: 987988 - DNA, 15 bp, Homo sapiens
cctccaggccaaaca

SEQ ID NO: 987989 - DNA, 15 bp, Homo sapiens
ctccaggccaaacag

SEQ ID NO: 987990 - DNA, 15 bp, Homo sapiens
tccaggccaaacagc

SEQ ID NO: 987991 - DNA, 15 bp, Homo sapiens
ccaggccaaacagcc

SEQ ID NO: 987992 - DNA, 15 bp, Homo sapiens
caggccaaacagccc

SEQ ID NO: 987993 - DNA, 15 bp, Homo sapiens
aggccaaacagcccc

SEQ ID NO: 987994 - DNA, 15 bp, Homo sapiens
ggccaaacagcccca

SEQ ID NO: 987995 - DNA, 15 bp, Homo sapiens
gccaaacagccccaa

SEQ ID NO: 987996 - DNA, 15 bp, Homo sapiens
ccaaacagccccaaa

SEQ ID NO: 987997 - DNA, 15 bp, Homo sapiens
caaacagccccaaag

SEQ ID NO: 987998 - DNA, 15 bp, Homo sapiens
aaacagccccaaagt

SEQ ID NO: 987999 - DNA, 15 bp, Homo sapiens
aacagccccaaagtc

SEQ ID NO: 988000 - DNA, 15 bp, Homo sapiens
acagccccaaagtca

SEQ ID NO: 988001 - DNA, 15 bp, Homo sapiens
cagccccaaagtcaa

SEQ ID NO: 988002 - DNA, 15 bp, Homo sapiens
agccccaaagtcaat

SEQ ID NO: 988003 - DNA, 15 bp, Homo sapiens
gccccaaagtcaatt

SEQ ID NO: 988004 - DNA, 15 bp, Homo sapiens
ccccaaagtcaatta

SEQ ID NO: 988005 - DNA, 15 bp, Homo sapiens
cccaaagtcaattaa

SEQ ID NO: 988006 - DNA, 15 bp, Homo sapiens
ccaaagtcaattaaa

SEQ ID NO: 988007 - DNA, 15 bp, Homo sapiens
caaagtcaattaaag

SEQ ID NO: 988008 - DNA, 15 bp, Homo sapiens
aaagtcaattaaagg

SEQ ID NO: 988009 - DNA, 15 bp, Homo sapiens
aagtcaattaaaggc

SEQ ID NO: 988010 - DNA, 15 bp, Homo sapiens
agtcaattaaaggct

SEQ ID NO: 988011 - DNA, 15 bp, Homo sapiens
gtcaattaaaggctt

SEQ ID NO: 988012 - DNA, 15 bp, Homo sapiens
tcaattaaaggcttt

SEQ ID NO: 988013 - DNA, 15 bp, Homo sapiens
caattaaaggctttc

SEQ ID NO: 988014 - DNA, 15 bp, Homo sapiens
aattaaaggctttca

SEQ ID NO: 988015 - DNA, 15 bp, Homo sapiens
attaaaggctttcag

SEQ ID NO: 988016 - DNA, 15 bp, Homo sapiens
ttaaaggctttcagt

SEQ ID NO: 988017 - DNA, 15 bp, Homo sapiens
taaaggctttcagta

SEQ ID NO: 988018 - DNA, 15 bp, Homo sapiens
aaaggctttcagtac

SEQ ID NO: 988019 - DNA, 15 bp, Homo sapiens
aaggctttcagtacg

SEQ ID NO: 988020 - DNA, 15 bp, Homo sapiens
aggctttcagtacgg

SEQ ID NO: 988021 - DNA, 15 bp, Homo sapiens
ggctttcagtacggt

SEQ ID NO: 988022 - DNA, 15 bp, Homo sapiens
gctttcagtacggtt

SEQ ID NO: 988023 - DNA, 15 bp, Homo sapiens
ctttcagtacggtta

SEQ ID NO: 988024 - DNA, 15 bp, Homo sapiens
tttcagtacggttag

SEQ ID NO: 988025 - DNA, 15 bp, Homo sapiens
ttcagtacggttagg

SEQ ID NO: 988026 - DNA, 15 bp, Homo sapiens
tcagtacggttagga

SEQ ID NO: 988027 - DNA, 15 bp, Homo sapiens
cagtacggttaggaa

SEQ ID NO: 988028 - DNA, 15 bp, Homo sapiens
agtacggttaggaag

SEQ ID NO: 988029 - DNA, 15 bp, Homo sapiens
gtacggttaggaagt

SEQ ID NO: 988030 - DNA, 15 bp, Homo sapiens
tacggttaggaagtt

SEQ ID NO: 988031 - DNA, 15 bp, Homo sapiens
acggttaggaagttg

SEQ ID NO: 988032 - DNA, 15 bp, Homo sapiens
cggttaggaagttga

SEQ ID NO: 988033 - DNA, 15 bp, Homo sapiens
ggttaggaagttgat

SEQ ID NO: 988034 - DNA, 15 bp, Homo sapiens
gttaggaagttgatt

SEQ ID NO: 988035 - DNA, 15 bp, Homo sapiens
ttaggaagttgatta

SEQ ID NO: 988036 - DNA, 15 bp, Homo sapiens
taggaagttgattat

SEQ ID NO: 988037 - DNA, 15 bp, Homo sapiens
aggaagttgattatt

SEQ ID NO: 988038 - DNA, 15 bp, Homo sapiens
ggaagttgattatta

SEQ ID NO: 988039 - DNA, 15 bp, Homo sapiens
gaagttgattattat

SEQ ID NO: 988040 - DNA, 15 bp, Homo sapiens
aagttgattattatt

SEQ ID NO: 988041 - DNA, 15 bp, Homo sapiens
agttgattattattt

SEQ ID NO: 988042 - DNA, 15 bp, Homo sapiens
gttgattattattta

SEQ ID NO: 988043 - DNA, 15 bp, Homo sapiens
ttgattattatttag

SEQ ID NO: 988044 - DNA, 15 bp, Homo sapiens
tgattattatttagt

SEQ ID NO: 988045 - DNA, 15 bp, Homo sapiens
gattattatttagtt

SEQ ID NO: 988046 - DNA, 15 bp, Homo sapiens
attattatttagttg

SEQ ID NO: 988047 - DNA, 15 bp, Homo sapiens
ttattatttagttgg

SEQ ID NO: 988048 - DNA, 15 bp, Homo sapiens
tattatttagttgga

SEQ ID NO: 988049 - DNA, 15 bp, Homo sapiens
attatttagttggag

SEQ ID NO: 988050 - DNA, 15 bp, Homo sapiens
ttatttagttggagg

SEQ ID NO: 988051 - DNA, 15 bp, Homo sapiens
tatttagttggaggc

SEQ ID NO: 988052 - DNA, 15 bp, Homo sapiens
atttagttggaggcc

SEQ ID NO: 988053 - DNA, 15 bp, Homo sapiens
tttagttggaggcct

SEQ ID NO: 988054 - DNA, 15 bp, Homo sapiens
ttagttggaggcctt

SEQ ID NO: 988055 - DNA, 15 bp, Homo sapiens
tagttggaggccttt

SEQ ID NO: 988056 - DNA, 15 bp, Homo sapiens
agttggaggccttta

SEQ ID NO: 988057 - DNA, 15 bp, Homo sapiens
gttggaggcctttag

SEQ ID NO: 988058 - DNA, 15 bp, Homo sapiens
ttggaggcctttaga

SEQ ID NO: 988059 - DNA, 15 bp, Homo sapiens
tggaggcctttagat

SEQ ID NO: 988060 - DNA, 15 bp, Homo sapiens
ggaggcctttagata

SEQ ID NO: 988061 - DNA, 15 bp, Homo sapiens
gaggcctttagatat

SEQ ID NO: 988062 - DNA, 15 bp, Homo sapiens
aggcctttagatatt

SEQ ID NO: 988063 - DNA, 15 bp, Homo sapiens
ggcctttagatatta

SEQ ID NO: 988064 - DNA, 15 bp, Homo sapiens
gcctttagatattat

SEQ ID NO: 988065 - DNA, 15 bp, Homo sapiens
cctttagatattatt

SEQ ID NO: 988066 - DNA, 15 bp, Homo sapiens
ctttagatattattc

SEQ ID NO: 988067 - DNA, 15 bp, Homo sapiens
tttagatattattca

SEQ ID NO: 988068 - DNA, 15 bp, Homo sapiens
ttagatattattcat

SEQ ID NO: 988069 - DNA, 15 bp, Homo sapiens
tagatattattcatt

SEQ ID NO: 988070 - DNA, 15 bp, Homo sapiens
agatattattcattc

SEQ ID NO: 988071 - DNA, 15 bp, Homo sapiens
gatattattcattca

SEQ ID NO: 988072 - DNA, 15 bp, Homo sapiens
atattattcattcat

SEQ ID NO: 988073 - DNA, 15 bp, Homo sapiens
tattattcattcatt

SEQ ID NO: 988074 - DNA, 15 bp, Homo sapiens
attattcattcattt

SEQ ID NO: 988075 - DNA, 15 bp, Homo sapiens
ttattcattcattta

SEQ ID NO: 988076 - DNA, 15 bp, Homo sapiens
tattcattcatttac

SEQ ID NO: 988077 - DNA, 15 bp, Homo sapiens
attcattcatttact

SEQ ID NO: 988078 - DNA, 15 bp, Homo sapiens
ttcattcatttactc

SEQ ID NO: 988079 - DNA, 15 bp, Homo sapiens
tcattcatttactca

SEQ ID NO: 988080 - DNA, 15 bp, Homo sapiens
cattcatttactcat

SEQ ID NO: 988081 - DNA, 15 bp, Homo sapiens
attcatttactcatt

SEQ ID NO: 988082 - DNA, 15 bp, Homo sapiens
ttcatttactcattc

SEQ ID NO: 988083 - DNA, 15 bp, Homo sapiens
tcatttactcattca

SEQ ID NO: 988084 - DNA, 15 bp, Homo sapiens
catttactcattcat

SEQ ID NO: 988085 - DNA, 15 bp, Homo sapiens
atttactcattcatt

SEQ ID NO: 988086 - DNA, 15 bp, Homo sapiens
tttactcattcattt

SEQ ID NO: 988087 - DNA, 15 bp, Homo sapiens
ttactcattcattta

SEQ ID NO: 988088 - DNA, 15 bp, Homo sapiens
tactcattcatttat

SEQ ID NO: 988089 - DNA, 15 bp, Homo sapiens
actcattcatttatt

SEQ ID NO: 988090 - DNA, 15 bp, Homo sapiens
ctcattcatttattc

SEQ ID NO: 988091 - DNA, 15 bp, Homo sapiens
ttcatttattcattc

SEQ ID NO: 988092 - DNA, 15 bp, Homo sapiens
tcatttattcattca

SEQ ID NO: 988093 - DNA, 15 bp, Homo sapiens
catttattcattcat

SEQ ID NO: 988094 - DNA, 15 bp, Homo sapiens
atttattcattcatt

SEQ ID NO: 988095 - DNA, 15 bp, Homo sapiens
tttattcattcattc

SEQ ID NO: 988096 - DNA, 15 bp, Homo sapiens
ttattcattcattca

SEQ ID NO: 988097 - DNA, 15 bp, Homo sapiens
tattcattcattcat

SEQ ID NO: 988098 - DNA, 15 bp, Homo sapiens
attcattcattcatc

SEQ ID NO: 988099 - DNA, 15 bp, Homo sapiens
ttcattcattcatcg

SEQ ID NO: 988100 - DNA, 15 bp, Homo sapiens
tcattcattcatcga

SEQ ID NO: 988101 - DNA, 15 bp, Homo sapiens
cattcattcatcgag

SEQ ID NO: 988102 - DNA, 15 bp, Homo sapiens
attcattcatcgagt

SEQ ID NO: 988103 - DNA, 15 bp, Homo sapiens
ttcattcatcgagta

SEQ ID NO: 988104 - DNA, 15 bp, Homo sapiens
tcattcatcgagtaa

SEQ ID NO: 988105 - DNA, 15 bp, Homo sapiens
cattcatcgagtaac

SEQ ID NO: 988106 - DNA, 15 bp, Homo sapiens
attcatcgagtaact

SEQ ID NO: 988107 - DNA, 15 bp, Homo sapiens
ttcatcgagtaactt

SEQ ID NO: 988108 - DNA, 15 bp, Homo sapiens
tcatcgagtaacttt

SEQ ID NO: 988109 - DNA, 15 bp, Homo sapiens
catcgagtaacttta

SEQ ID NO: 988110 - DNA, 15 bp, Homo sapiens
atcgagtaactttaa

SEQ ID NO: 988111 - DNA, 15 bp, Homo sapiens
tcgagtaactttaaa

SEQ ID NO: 988112 - DNA, 15 bp, Homo sapiens
cgagtaactttaaaa

SEQ ID NO: 988113 - DNA, 15 bp, Homo sapiens
gagtaactttaaaaa

SEQ ID NO: 988114 - DNA, 15 bp, Homo sapiens
agtaactttaaaaaa

SEQ ID NO: 988115 - DNA, 15 bp, Homo sapiens
gtaactttaaaaaaa

SEQ ID NO: 988116 - DNA, 15 bp, Homo sapiens
taactttaaaaaaat

SEQ ID NO: 988117 - DNA, 15 bp, Homo sapiens
aactttaaaaaaatc

SEQ ID NO: 988118 - DNA, 15 bp, Homo sapiens
actttaaaaaaatca

SEQ ID NO: 988119 - DNA, 15 bp, Homo sapiens
ctttaaaaaaatcat

SEQ ID NO: 988120 - DNA, 15 bp, Homo sapiens
tttaaaaaaatcata

SEQ ID NO: 988121 - DNA, 15 bp, Homo sapiens
ttaaaaaaatcatat

SEQ ID NO: 988122 - DNA, 15 bp, Homo sapiens
taaaaaaatcatatg

SEQ ID NO: 988123 - DNA, 15 bp, Homo sapiens
aaaaaaatcatatgc

SEQ ID NO: 988124 - DNA, 15 bp, Homo sapiens
aaaaaatcatatgct

SEQ ID NO: 988125 - DNA, 15 bp, Homo sapiens
aaaaatcatatgcta

SEQ ID NO: 988126 - DNA, 15 bp, Homo sapiens
aaaatcatatgctat

SEQ ID NO: 988127 - DNA, 15 bp, Homo sapiens
aaatcatatgctatg

SEQ ID NO: 988128 - DNA, 15 bp, Homo sapiens
aatcatatgctatgt

SEQ ID NO: 988129 - DNA, 15 bp, Homo sapiens
atcatatgctatgtt

SEQ ID NO: 988130 - DNA, 15 bp, Homo sapiens
tcatatgctatgttc

SEQ ID NO: 988131 - DNA, 15 bp, Homo sapiens
catatgctatgttcc

SEQ ID NO: 988132 - DNA, 15 bp, Homo sapiens
atatgctatgttccc

SEQ ID NO: 988133 - DNA, 15 bp, Homo sapiens
tatgctatgttccca

SEQ ID NO: 988134 - DNA, 15 bp, Homo sapiens
atgctatgttcccag

SEQ ID NO: 988135 - DNA, 15 bp, Homo sapiens
tgctatgttcccagt

SEQ ID NO: 988136 - DNA, 15 bp, Homo sapiens
gctatgttcccagtc

SEQ ID NO: 988137 - DNA, 15 bp, Homo sapiens
ctatgttcccagtcc

SEQ ID NO: 988138 - DNA, 15 bp, Homo sapiens
tatgttcccagtcct

SEQ ID NO: 988139 - DNA, 15 bp, Homo sapiens
atgttcccagtcctg

SEQ ID NO: 988140 - DNA, 15 bp, Homo sapiens
tgttcccagtcctgg

SEQ ID NO: 988141 - DNA, 15 bp, Homo sapiens
gttcccagtcctggg

SEQ ID NO: 988142 - DNA, 15 bp, Homo sapiens
ttcccagtcctgggg

SEQ ID NO: 988143 - DNA, 15 bp, Homo sapiens
tcccagtcctgggga

SEQ ID NO: 988144 - DNA, 15 bp, Homo sapiens
cccagtcctggggag

SEQ ID NO: 988145 - DNA, 15 bp, Homo sapiens
ccagtcctggggagc

SEQ ID NO: 988146 - DNA, 15 bp, Homo sapiens
cagtcctggggagct

SEQ ID NO: 988147 - DNA, 15 bp, Homo sapiens
agtcctggggagctt

SEQ ID NO: 988148 - DNA, 15 bp, Homo sapiens
gtcctggggagcttc

SEQ ID NO: 988149 - DNA, 15 bp, Homo sapiens
tcctggggagcttca

SEQ ID NO: 988150 - DNA, 15 bp, Homo sapiens
cctggggagcttcac

SEQ ID NO: 988151 - DNA, 15 bp, Homo sapiens
ctggggagcttcaca

SEQ ID NO: 988152 - DNA, 15 bp, Homo sapiens
tggggagcttcacaa

SEQ ID NO: 988153 - DNA, 15 bp, Homo sapiens
ggggagcttcacaaa

SEQ ID NO: 988154 - DNA, 15 bp, Homo sapiens
gggagcttcacaaac

SEQ ID NO: 988155 - DNA, 15 bp, Homo sapiens
ggagcttcacaaaca

SEQ ID NO: 988156 - DNA, 15 bp, Homo sapiens
gagcttcacaaacat

SEQ ID NO: 988157 - DNA, 15 bp, Homo sapiens
agcttcacaaacatg

SEQ ID NO: 988158 - DNA, 15 bp, Homo sapiens
gcttcacaaacatga

SEQ ID NO: 988159 - DNA, 15 bp, Homo sapiens
cttcacaaacatgac

SEQ ID NO: 988160 - DNA, 15 bp, Homo sapiens
ttcacaaacatgacc

SEQ ID NO: 988161 - DNA, 15 bp, Homo sapiens
tcacaaacatgacca

SEQ ID NO: 988162 - DNA, 15 bp, Homo sapiens
cacaaacatgaccag

SEQ ID NO: 988163 - DNA, 15 bp, Homo sapiens
acaaacatgaccaga

SEQ ID NO: 988164 - DNA, 15 bp, Homo sapiens
caaacatgaccagat

SEQ ID NO: 988165 - DNA, 15 bp, Homo sapiens
aaacatgaccagata

SEQ ID NO: 988166 - DNA, 15 bp, Homo sapiens
aacatgaccagataa

SEQ ID NO: 988167 - DNA, 15 bp, Homo sapiens
acatgaccagataac

SEQ ID NO: 988168 - DNA, 15 bp, Homo sapiens
catgaccagataact

SEQ ID NO: 988169 - DNA, 15 bp, Homo sapiens
atgaccagataactg

SEQ ID NO: 988170 - DNA, 15 bp, Homo sapiens
tgaccagataactga

SEQ ID NO: 988171 - DNA, 15 bp, Homo sapiens
gaccagataactgac

SEQ ID NO: 988172 - DNA, 15 bp, Homo sapiens
accagataactgact

SEQ ID NO: 988173 - DNA, 15 bp, Homo sapiens
ccagataactgacta

SEQ ID NO: 988174 - DNA, 15 bp, Homo sapiens
cagataactgactag

SEQ ID NO: 988175 - DNA, 15 bp, Homo sapiens
agataactgactaga

SEQ ID NO: 988176 - DNA, 15 bp, Homo sapiens
gataactgactagaa

SEQ ID NO: 988177 - DNA, 15 bp, Homo sapiens
ataactgactagaaa

SEQ ID NO: 988178 - DNA, 15 bp, Homo sapiens
taactgactagaaag

SEQ ID NO: 988179 - DNA, 15 bp, Homo sapiens
aactgactagaaaga

SEQ ID NO: 988180 - DNA, 15 bp, Homo sapiens
actgactagaaagaa

SEQ ID NO: 988181 - DNA, 15 bp, Homo sapiens
ctgactagaaagaag

SEQ ID NO: 988182 - DNA, 15 bp, Homo sapiens
tgactagaaagaagt

SEQ ID NO: 988183 - DNA, 15 bp, Homo sapiens
gactagaaagaagta

SEQ ID NO: 988184 - DNA, 15 bp, Homo sapiens
actagaaagaagtag

SEQ ID NO: 988185 - DNA, 15 bp, Homo sapiens
ctagaaagaagtagt

SEQ ID NO: 988186 - DNA, 15 bp, Homo sapiens
tagaaagaagtagtt

SEQ ID NO: 988187 - DNA, 15 bp, Homo sapiens
agaaagaagtagttg

SEQ ID NO: 988188 - DNA, 15 bp, Homo sapiens
gaaagaagtagttga

SEQ ID NO: 988189 - DNA, 15 bp, Homo sapiens
aaagaagtagttgac

SEQ ID NO: 988190 - DNA, 15 bp, Homo sapiens
aagaagtagttgaca

SEQ ID NO: 988191 - DNA, 15 bp, Homo sapiens
agaagtagttgacag

SEQ ID NO: 988192 - DNA, 15 bp, Homo sapiens
gaagtagttgacagt

SEQ ID NO: 988193 - DNA, 15 bp, Homo sapiens
aagtagttgacagtg

SEQ ID NO: 988194 - DNA, 15 bp, Homo sapiens
agtagttgacagtgc

SEQ ID NO: 988195 - DNA, 15 bp, Homo sapiens
gtagttgacagtgct

SEQ ID NO: 988196 - DNA, 15 bp, Homo sapiens
tagttgacagtgcta

SEQ ID NO: 988197 - DNA, 15 bp, Homo sapiens
agttgacagtgctat

SEQ ID NO: 988198 - DNA, 15 bp, Homo sapiens
gttgacagtgctatt

SEQ ID NO: 988199 - DNA, 15 bp, Homo sapiens
ttgacagtgctattt

SEQ ID NO: 988200 - DNA, 15 bp, Homo sapiens
tgacagtgctatttt

SEQ ID NO: 988201 - DNA, 15 bp, Homo sapiens
gacagtgctattttg

SEQ ID NO: 988202 - DNA, 15 bp, Homo sapiens
acagtgctattttgt

SEQ ID NO: 988203 - DNA, 15 bp, Homo sapiens
cagtgctattttgtg

SEQ ID NO: 988204 - DNA, 15 bp, Homo sapiens
agtgctattttgtgc

SEQ ID NO: 988205 - DNA, 15 bp, Homo sapiens
gtgctattttgtgcc

SEQ ID NO: 988206 - DNA, 15 bp, Homo sapiens
tgctattttgtgccc

SEQ ID NO: 988207 - DNA, 15 bp, Homo sapiens
gctattttgtgccca

SEQ ID NO: 988208 - DNA, 15 bp, Homo sapiens
ctattttgtgcccac

SEQ ID NO: 988209 - DNA, 15 bp, Homo sapiens
tattttgtgcccact

SEQ ID NO: 988210 - DNA, 15 bp, Homo sapiens
attttgtgcccactg

SEQ ID NO: 988211 - DNA, 15 bp, Homo sapiens
ttttgtgcccactgt

SEQ ID NO: 988212 - DNA, 15 bp, Homo sapiens
tttgtgcccactgtc

SEQ ID NO: 988213 - DNA, 15 bp, Homo sapiens
ttgtgcccactgtct

SEQ ID NO: 988214 - DNA, 15 bp, Homo sapiens
tgtgcccactgtctc

SEQ ID NO: 988215 - DNA, 15 bp, Homo sapiens
gtgcccactgtctct

SEQ ID NO: 988216 - DNA, 15 bp, Homo sapiens
tgcccactgtctctc

SEQ ID NO: 988217 - DNA, 15 bp, Homo sapiens
gcccactgtctctcc

SEQ ID NO: 988218 - DNA, 15 bp, Homo sapiens
cccactgtctctcct

SEQ ID NO: 988219 - DNA, 15 bp, Homo sapiens
ccactgtctctcctg

SEQ ID NO: 988220 - DNA, 15 bp, Homo sapiens
cactgtctctcctga

SEQ ID NO: 988221 - DNA, 15 bp, Homo sapiens
actgtctctcctgat

SEQ ID NO: 988222 - DNA, 15 bp, Homo sapiens
ctgtctctcctgatg

SEQ ID NO: 988223 - DNA, 15 bp, Homo sapiens
tgtctctcctgatgc

SEQ ID NO: 988224 - DNA, 15 bp, Homo sapiens
gtctctcctgatgct

SEQ ID NO: 988225 - DNA, 15 bp, Homo sapiens
tctctcctgatgctc

SEQ ID NO: 988226 - DNA, 15 bp, Homo sapiens
ctctcctgatgctca

SEQ ID NO: 988227 - DNA, 15 bp, Homo sapiens
tctcctgatgctcat

SEQ ID NO: 988228 - DNA, 15 bp, Homo sapiens
ctcctgatgctcata

SEQ ID NO: 988229 - DNA, 15 bp, Homo sapiens
tcctgatgctcatat

SEQ ID NO: 988230 - DNA, 15 bp, Homo sapiens
cctgatgctcatatc

SEQ ID NO: 988231 - DNA, 15 bp, Homo sapiens
ctgatgctcatatca

SEQ ID NO: 988232 - DNA, 15 bp, Homo sapiens
tgatgctcatatcaa

SEQ ID NO: 988233 - DNA, 15 bp, Homo sapiens
gatgctcatatcaat

SEQ ID NO: 988234 - DNA, 15 bp, Homo sapiens
atgctcatatcaatc

SEQ ID NO: 988235 - DNA, 15 bp, Homo sapiens
tgctcatatcaatcc

SEQ ID NO: 988236 - DNA, 15 bp, Homo sapiens
gctcatatcaatcct

SEQ ID NO: 988237 - DNA, 15 bp, Homo sapiens
ctcatatcaatccta

SEQ ID NO: 988238 - DNA, 15 bp, Homo sapiens
tcatatcaatcctat

SEQ ID NO: 988239 - DNA, 15 bp, Homo sapiens
catatcaatcctata

SEQ ID NO: 988240 - DNA, 15 bp, Homo sapiens
atatcaatcctataa

SEQ ID NO: 988241 - DNA, 15 bp, Homo sapiens
tatcaatcctataag

SEQ ID NO: 988242 - DNA, 15 bp, Homo sapiens
atcaatcctataagg

SEQ ID NO: 988243 - DNA, 15 bp, Homo sapiens
tcaatcctataaggc

SEQ ID NO: 988244 - DNA, 15 bp, Homo sapiens
caatcctataaggca

SEQ ID NO: 988245 - DNA, 15 bp, Homo sapiens
aatcctataaggcac

SEQ ID NO: 988246 - DNA, 15 bp, Homo sapiens
atcctataaggcaca

SEQ ID NO: 988247 - DNA, 15 bp, Homo sapiens
tcctataaggcacag

SEQ ID NO: 988248 - DNA, 15 bp, Homo sapiens
cctataaggcacagg

SEQ ID NO: 988249 - DNA, 15 bp, Homo sapiens
ctataaggcacaggg

SEQ ID NO: 988250 - DNA, 15 bp, Homo sapiens
tataaggcacaggga

SEQ ID NO: 988251 - DNA, 15 bp, Homo sapiens
ataaggcacagggaa

SEQ ID NO: 988252 - DNA, 15 bp, Homo sapiens
taaggcacagggaac

SEQ ID NO: 988253 - DNA, 15 bp, Homo sapiens
aaggcacagggaaca

SEQ ID NO: 988254 - DNA, 15 bp, Homo sapiens
aggcacagggaacaa

SEQ ID NO: 988255 - DNA, 15 bp, Homo sapiens
ggcacagggaacaag

SEQ ID NO: 988256 - DNA, 15 bp, Homo sapiens
gcacagggaacaagc

SEQ ID NO: 988257 - DNA, 15 bp, Homo sapiens
cacagggaacaagca

SEQ ID NO: 988258 - DNA, 15 bp, Homo sapiens
acagggaacaagcat

SEQ ID NO: 988259 - DNA, 15 bp, Homo sapiens
cagggaacaagcatt

SEQ ID NO: 988260 - DNA, 15 bp, Homo sapiens
agggaacaagcattc

SEQ ID NO: 988261 - DNA, 15 bp, Homo sapiens
gggaacaagcattct

SEQ ID NO: 988262 - DNA, 15 bp, Homo sapiens
ggaacaagcattctc

SEQ ID NO: 988263 - DNA, 15 bp, Homo sapiens
gaacaagcattctcc

SEQ ID NO: 988264 - DNA, 15 bp, Homo sapiens
aacaagcattctcct

SEQ ID NO: 988265 - DNA, 15 bp, Homo sapiens
acaagcattctcctg

SEQ ID NO: 988266 - DNA, 15 bp, Homo sapiens
caagcattctcctgt

SEQ ID NO: 988267 - DNA, 15 bp, Homo sapiens
aagcattctcctgtt

SEQ ID NO: 988268 - DNA, 15 bp, Homo sapiens
agcattctcctgttt

SEQ ID NO: 988269 - DNA, 15 bp, Homo sapiens
gcattctcctgtttt

SEQ ID NO: 988270 - DNA, 15 bp, Homo sapiens
cattctcctgttttt

SEQ ID NO: 988271 - DNA, 15 bp, Homo sapiens
attctcctgttttta

SEQ ID NO: 988272 - DNA, 15 bp, Homo sapiens
ttctcctgtttttac

SEQ ID NO: 988273 - DNA, 15 bp, Homo sapiens
tctcctgtttttaca

SEQ ID NO: 988274 - DNA, 15 bp, Homo sapiens
ctcctgtttttacag

SEQ ID NO: 988275 - DNA, 15 bp, Homo sapiens
tcctgtttttacaga

SEQ ID NO: 988276 - DNA, 15 bp, Homo sapiens
cctgtttttacagat

SEQ ID NO: 988277 - DNA, 15 bp, Homo sapiens
ctgtttttacagatt

SEQ ID NO: 988278 - DNA, 15 bp, Homo sapiens
tgtttttacagattg

SEQ ID NO: 988279 - DNA, 15 bp, Homo sapiens
gtttttacagattgt

SEQ ID NO: 988280 - DNA, 15 bp, Homo sapiens
tttttacagattgta

SEQ ID NO: 988281 - DNA, 15 bp, Homo sapiens
ttttacagattgtat

SEQ ID NO: 988282 - DNA, 15 bp, Homo sapiens
tttacagattgtatc

SEQ ID NO: 988283 - DNA, 15 bp, Homo sapiens
ttacagattgtatcc

SEQ ID NO: 988284 - DNA, 15 bp, Homo sapiens
tacagattgtatcct

SEQ ID NO: 988285 - DNA, 15 bp, Homo sapiens
acagattgtatcctg

SEQ ID NO: 988286 - DNA, 15 bp, Homo sapiens
cagattgtatcctga

SEQ ID NO: 988287 - DNA, 15 bp, Homo sapiens
agattgtatcctgag

SEQ ID NO: 988288 - DNA, 15 bp, Homo sapiens
gattgtatcctgagg

SEQ ID NO: 988289 - DNA, 15 bp, Homo sapiens
attgtatcctgaggc

SEQ ID NO: 988290 - DNA, 15 bp, Homo sapiens
ttgtatcctgaggct

SEQ ID NO: 988291 - DNA, 15 bp, Homo sapiens
tgtatcctgaggctg

SEQ ID NO: 988292 - DNA, 15 bp, Homo sapiens
gtatcctgaggctga

SEQ ID NO: 988293 - DNA, 15 bp, Homo sapiens
tatcctgaggctgag

SEQ ID NO: 988294 - DNA, 15 bp, Homo sapiens
atcctgaggctgaga

SEQ ID NO: 988295 - DNA, 15 bp, Homo sapiens
tcctgaggctgagag

SEQ ID NO: 988296 - DNA, 15 bp, Homo sapiens
cctgaggctgagaga

SEQ ID NO: 988297 - DNA, 15 bp, Homo sapiens
ctgaggctgagagag

SEQ ID NO: 988298 - DNA, 15 bp, Homo sapiens
tgaggctgagagagt

SEQ ID NO: 988299 - DNA, 15 bp, Homo sapiens
gaggctgagagagtt

SEQ ID NO: 988300 - DNA, 15 bp, Homo sapiens
aggctgagagagtta

SEQ ID NO: 988301 - DNA, 15 bp, Homo sapiens
ggctgagagagttaa

SEQ ID NO: 988302 - DNA, 15 bp, Homo sapiens
gctgagagagttaag

SEQ ID NO: 988303 - DNA, 15 bp, Homo sapiens
ctgagagagttaagt

SEQ ID NO: 988304 - DNA, 15 bp, Homo sapiens
tgagagagttaagtg

SEQ ID NO: 988305 - DNA, 15 bp, Homo sapiens
gagagagttaagtga

SEQ ID NO: 988306 - DNA, 15 bp, Homo sapiens
agagagttaagtgaa

SEQ ID NO: 988307 - DNA, 15 bp, Homo sapiens
gagagttaagtgaat

SEQ ID NO: 988308 - DNA, 15 bp, Homo sapiens
agagttaagtgaatg

SEQ ID NO: 988309 - DNA, 15 bp, Homo sapiens
gagttaagtgaatgt

SEQ ID NO: 988310 - DNA, 15 bp, Homo sapiens
agttaagtgaatgtc

SEQ ID NO: 988311 - DNA, 15 bp, Homo sapiens
gttaagtgaatgtct

SEQ ID NO: 988312 - DNA, 15 bp, Homo sapiens
ttaagtgaatgtcta

SEQ ID NO: 988313 - DNA, 15 bp, Homo sapiens
taagtgaatgtctaa

SEQ ID NO: 988314 - DNA, 15 bp, Homo sapiens
aagtgaatgtctaag

SEQ ID NO: 988315 - DNA, 15 bp, Homo sapiens
agtgaatgtctaagg

SEQ ID NO: 988316 - DNA, 15 bp, Homo sapiens
gtgaatgtctaaggt

SEQ ID NO: 988317 - DNA, 15 bp, Homo sapiens
tgaatgtctaaggtc

SEQ ID NO: 988318 - DNA, 15 bp, Homo sapiens
gaatgtctaaggtca

SEQ ID NO: 988319 - DNA, 15 bp, Homo sapiens
aatgtctaaggtcac

SEQ ID NO: 988320 - DNA, 15 bp, Homo sapiens
atgtctaaggtcaca

SEQ ID NO: 988321 - DNA, 15 bp, Homo sapiens
tgtctaaggtcacac

SEQ ID NO: 988322 - DNA, 15 bp, Homo sapiens
gtctaaggtcacaca

SEQ ID NO: 988323 - DNA, 15 bp, Homo sapiens
tctaaggtcacacag

SEQ ID NO: 988324 - DNA, 15 bp, Homo sapiens
ctaaggtcacacagt

SEQ ID NO: 988325 - DNA, 15 bp, Homo sapiens
taaggtcacacagta

SEQ ID NO: 988326 - DNA, 15 bp, Homo sapiens
aaggtcacacagtat

SEQ ID NO: 988327 - DNA, 15 bp, Homo sapiens
aggtcacacagtatt

SEQ ID NO: 988328 - DNA, 15 bp, Homo sapiens
ggtcacacagtatta

SEQ ID NO: 988329 - DNA, 15 bp, Homo sapiens
gtcacacagtattaa

SEQ ID NO: 988330 - DNA, 15 bp, Homo sapiens
tcacacagtattaag

SEQ ID NO: 988331 - DNA, 15 bp, Homo sapiens
cacacagtattaagt

SEQ ID NO: 988332 - DNA, 15 bp, Homo sapiens
acacagtattaagtg

SEQ ID NO: 988333 - DNA, 15 bp, Homo sapiens
cacagtattaagtga

SEQ ID NO: 988334 - DNA, 15 bp, Homo sapiens
acagtattaagtgac

SEQ ID NO: 988335 - DNA, 15 bp, Homo sapiens
cagtattaagtgaca

SEQ ID NO: 988336 - DNA, 15 bp, Homo sapiens
agtattaagtgacag

SEQ ID NO: 988337 - DNA, 15 bp, Homo sapiens
gtattaagtgacagt

SEQ ID NO: 988338 - DNA, 15 bp, Homo sapiens
tattaagtgacagtg

SEQ ID NO: 988339 - DNA, 15 bp, Homo sapiens
attaagtgacagtgc

SEQ ID NO: 988340 - DNA, 15 bp, Homo sapiens
ttaagtgacagtgct

SEQ ID NO: 988341 - DNA, 15 bp, Homo sapiens
taagtgacagtgcta

SEQ ID NO: 988342 - DNA, 15 bp, Homo sapiens
aagtgacagtgctag

SEQ ID NO: 988343 - DNA, 15 bp, Homo sapiens
agtgacagtgctaga

SEQ ID NO: 988344 - DNA, 15 bp, Homo sapiens
gtgacagtgctagaa

SEQ ID NO: 988345 - DNA, 15 bp, Homo sapiens
tgacagtgctagaaa

SEQ ID NO: 988346 - DNA, 15 bp, Homo sapiens
gacagtgctagaaat

SEQ ID NO: 988347 - DNA, 15 bp, Homo sapiens
acagtgctagaaatc

SEQ ID NO: 988348 - DNA, 15 bp, Homo sapiens
cagtgctagaaatca

SEQ ID NO: 988349 - DNA, 15 bp, Homo sapiens
agtgctagaaatcaa

SEQ ID NO: 988350 - DNA, 15 bp, Homo sapiens
gtgctagaaatcaaa

SEQ ID NO: 988351 - DNA, 15 bp, Homo sapiens
tgctagaaatcaaac

SEQ ID NO: 988352 - DNA, 15 bp, Homo sapiens
gctagaaatcaaacc

SEQ ID NO: 988353 - DNA, 15 bp, Homo sapiens
ctagaaatcaaaccc

SEQ ID NO: 988354 - DNA, 15 bp, Homo sapiens
tagaaatcaaaccca

SEQ ID NO: 988355 - DNA, 15 bp, Homo sapiens
agaaatcaaacccag

SEQ ID NO: 988356 - DNA, 15 bp, Homo sapiens
gaaatcaaacccaga

SEQ ID NO: 988357 - DNA, 15 bp, Homo sapiens
aaatcaaacccagag

SEQ ID NO: 988358 - DNA, 15 bp, Homo sapiens
aatcaaacccagagc

SEQ ID NO: 988359 - DNA, 15 bp, Homo sapiens
atcaaacccagagct

SEQ ID NO: 988360 - DNA, 15 bp, Homo sapiens
tcaaacccagagctg

SEQ ID NO: 988361 - DNA, 15 bp, Homo sapiens
caaacccagagctgt

SEQ ID NO: 988362 - DNA, 15 bp, Homo sapiens
aaacccagagctgtg

SEQ ID NO: 988363 - DNA, 15 bp, Homo sapiens
aacccagagctgtgg

SEQ ID NO: 988364 - DNA, 15 bp, Homo sapiens
acccagagctgtgga

SEQ ID NO: 988365 - DNA, 15 bp, Homo sapiens
cccagagctgtggac

SEQ ID NO: 988366 - DNA, 15 bp, Homo sapiens
ccagagctgtggact

SEQ ID NO: 988367 - DNA, 15 bp, Homo sapiens
cagagctgtggactt

SEQ ID NO: 988368 - DNA, 15 bp, Homo sapiens
agagctgtggacttt

SEQ ID NO: 988369 - DNA, 15 bp, Homo sapiens
gagctgtggactttg

SEQ ID NO: 988370 - DNA, 15 bp, Homo sapiens
agctgtggactttgt

SEQ ID NO: 988371 - DNA, 15 bp, Homo sapiens
gctgtggactttgtt

SEQ ID NO: 988372 - DNA, 15 bp, Homo sapiens
ctgtggactttgttc

SEQ ID NO: 988373 - DNA, 15 bp, Homo sapiens
tgtggactttgttca

SEQ ID NO: 988374 - DNA, 15 bp, Homo sapiens
gtggactttgttcac

SEQ ID NO: 988375 - DNA, 15 bp, Homo sapiens
tggactttgttcact

SEQ ID NO: 988376 - DNA, 15 bp, Homo sapiens
ggactttgttcacta

SEQ ID NO: 988377 - DNA, 15 bp, Homo sapiens
gactttgttcactag

SEQ ID NO: 988378 - DNA, 15 bp, Homo sapiens
actttgttcactaga

SEQ ID NO: 988379 - DNA, 15 bp, Homo sapiens
ctttgttcactagac

SEQ ID NO: 988380 - DNA, 15 bp, Homo sapiens
tttgttcactagact

SEQ ID NO: 988381 - DNA, 15 bp, Homo sapiens
ttgttcactagactg

SEQ ID NO: 988382 - DNA, 15 bp, Homo sapiens
tgttcactagactgt

SEQ ID NO: 988383 - DNA, 15 bp, Homo sapiens
gttcactagactgtg

SEQ ID NO: 988384 - DNA, 15 bp, Homo sapiens
ttcactagactgtgc

SEQ ID NO: 988385 - DNA, 15 bp, Homo sapiens
tcactagactgtgcc

SEQ ID NO: 988386 - DNA, 15 bp, Homo sapiens
cactagactgtgccc

SEQ ID NO: 988387 - DNA, 15 bp, Homo sapiens
actagactgtgccct

SEQ ID NO: 988388 - DNA, 15 bp, Homo sapiens
ctagactgtgccctt

SEQ ID NO: 988389 - DNA, 15 bp, Homo sapiens
tagactgtgcccttt

SEQ ID NO: 988390 - DNA, 15 bp, Homo sapiens
agactgtgccctttt

SEQ ID NO: 988391 - DNA, 15 bp, Homo sapiens
gactgtgccctttta

SEQ ID NO: 988392 - DNA, 15 bp, Homo sapiens
actgtgcccttttat

SEQ ID NO: 988393 - DNA, 15 bp, Homo sapiens
ctgtgcccttttata

SEQ ID NO: 988394 - DNA, 15 bp, Homo sapiens
tgtgcccttttatag

SEQ ID NO: 988395 - DNA, 15 bp, Homo sapiens
gtgcccttttataga

SEQ ID NO: 988396 - DNA, 15 bp, Homo sapiens
tgcccttttatagag

SEQ ID NO: 988397 - DNA, 15 bp, Homo sapiens
gcccttttatagagg

SEQ ID NO: 988398 - DNA, 15 bp, Homo sapiens
cccttttatagaggt

SEQ ID NO: 988399 - DNA, 15 bp, Homo sapiens
ccttttatagaggta

SEQ ID NO: 988400 - DNA, 15 bp, Homo sapiens
cttttatagaggtac

SEQ ID NO: 988401 - DNA, 15 bp, Homo sapiens
ttttatagaggtaca

SEQ ID NO: 988402 - DNA, 15 bp, Homo sapiens
tttatagaggtacat

SEQ ID NO: 988403 - DNA, 15 bp, Homo sapiens
ttatagaggtacatg

SEQ ID NO: 988404 - DNA, 15 bp, Homo sapiens
tatagaggtacatgt

SEQ ID NO: 988405 - DNA, 15 bp, Homo sapiens
atagaggtacatgtt

SEQ ID NO: 988406 - DNA, 15 bp, Homo sapiens
tagaggtacatgttc

SEQ ID NO: 988407 - DNA, 15 bp, Homo sapiens
agaggtacatgttct

SEQ ID NO: 988408 - DNA, 15 bp, Homo sapiens
gaggtacatgttctc

SEQ ID NO: 988409 - DNA, 15 bp, Homo sapiens
aggtacatgttctct

SEQ ID NO: 988410 - DNA, 15 bp, Homo sapiens
ggtacatgttctctt

SEQ ID NO: 988411 - DNA, 15 bp, Homo sapiens
gtacatgttctcttt

SEQ ID NO: 988412 - DNA, 15 bp, Homo sapiens
tacatgttctctttg

SEQ ID NO: 988413 - DNA, 15 bp, Homo sapiens
acatgttctctttgg

SEQ ID NO: 988414 - DNA, 15 bp, Homo sapiens
catgttctctttgga

SEQ ID NO: 988415 - DNA, 15 bp, Homo sapiens
atgttctctttggag

SEQ ID NO: 988416 - DNA, 15 bp, Homo sapiens
tgttctctttggagt

SEQ ID NO: 988417 - DNA, 15 bp, Homo sapiens
gttctctttggagtg

SEQ ID NO: 988418 - DNA, 15 bp, Homo sapiens
ttctctttggagtgt

SEQ ID NO: 988419 - DNA, 15 bp, Homo sapiens
tctctttggagtgtt

SEQ ID NO: 988420 - DNA, 15 bp, Homo sapiens
ctctttggagtgttg

SEQ ID NO: 988421 - DNA, 15 bp, Homo sapiens
tctttggagtgttgg

SEQ ID NO: 988422 - DNA, 15 bp, Homo sapiens
ctttggagtgttggt

SEQ ID NO: 988423 - DNA, 15 bp, Homo sapiens
tttggagtgttggta

SEQ ID NO: 988424 - DNA, 15 bp, Homo sapiens
ttggagtgttggtag

SEQ ID NO: 988425 - DNA, 15 bp, Homo sapiens
tggagtgttggtagg

SEQ ID NO: 988426 - DNA, 15 bp, Homo sapiens
ggagtgttggtaggt

SEQ ID NO: 988427 - DNA, 15 bp, Homo sapiens
gagtgttggtaggtg

SEQ ID NO: 988428 - DNA, 15 bp, Homo sapiens
agtgttggtaggtgt

SEQ ID NO: 988429 - DNA, 15 bp, Homo sapiens
gtgttggtaggtgtc

SEQ ID NO: 988430 - DNA, 15 bp, Homo sapiens
tgttggtaggtgtct

SEQ ID NO: 988431 - DNA, 15 bp, Homo sapiens
gttggtaggtgtctg

SEQ ID NO: 988432 - DNA, 15 bp, Homo sapiens
ttggtaggtgtctgt

SEQ ID NO: 988433 - DNA, 15 bp, Homo sapiens
tggtaggtgtctgtt

SEQ ID NO: 988434 - DNA, 15 bp, Homo sapiens
ggtaggtgtctgttt

SEQ ID NO: 988435 - DNA, 15 bp, Homo sapiens
gtaggtgtctgtttc

SEQ ID NO: 988436 - DNA, 15 bp, Homo sapiens
taggtgtctgtttcc

SEQ ID NO: 988437 - DNA, 15 bp, Homo sapiens
aggtgtctgtttccc

SEQ ID NO: 988438 - DNA, 15 bp, Homo sapiens
ggtgtctgtttccca

SEQ ID NO: 988439 - DNA, 15 bp, Homo sapiens
gtgtctgtttcccac

SEQ ID NO: 988440 - DNA, 15 bp, Homo sapiens
tgtctgtttcccacc

SEQ ID NO: 988441 - DNA, 15 bp, Homo sapiens
gtctgtttcccacct

SEQ ID NO: 988442 - DNA, 15 bp, Homo sapiens
tctgtttcccacctc

SEQ ID NO: 988443 - DNA, 15 bp, Homo sapiens
ctgtttcccacctca

SEQ ID NO: 988444 - DNA, 15 bp, Homo sapiens
tgtttcccacctcac

SEQ ID NO: 988445 - DNA, 15 bp, Homo sapiens
gtttcccacctcacc

SEQ ID NO: 988446 - DNA, 15 bp, Homo sapiens
tttcccacctcacct

SEQ ID NO: 988447 - DNA, 15 bp, Homo sapiens
ttcccacctcacctg

SEQ ID NO: 988448 - DNA, 15 bp, Homo sapiens
tcccacctcacctga

SEQ ID NO: 988449 - DNA, 15 bp, Homo sapiens
cccacctcacctgag

SEQ ID NO: 988450 - DNA, 15 bp, Homo sapiens
ccacctcacctgaga

SEQ ID NO: 988451 - DNA, 15 bp, Homo sapiens
cacctcacctgagag

SEQ ID NO: 988452 - DNA, 15 bp, Homo sapiens
acctcacctgagagc

SEQ ID NO: 988453 - DNA, 15 bp, Homo sapiens
cctcacctgagagcc

SEQ ID NO: 988454 - DNA, 15 bp, Homo sapiens
ctcacctgagagcca

SEQ ID NO: 988455 - DNA, 15 bp, Homo sapiens
tcacctgagagccat

SEQ ID NO: 988456 - DNA, 15 bp, Homo sapiens
cacctgagagccatt

SEQ ID NO: 988457 - DNA, 15 bp, Homo sapiens
acctgagagccattg

SEQ ID NO: 988458 - DNA, 15 bp, Homo sapiens
cctgagagccattga

SEQ ID NO: 988459 - DNA, 15 bp, Homo sapiens
ctgagagccattgaa

SEQ ID NO: 988460 - DNA, 15 bp, Homo sapiens
tgagagccattgaat

SEQ ID NO: 988461 - DNA, 15 bp, Homo sapiens
gagagccattgaatt

SEQ ID NO: 988462 - DNA, 15 bp, Homo sapiens
agagccattgaattt

SEQ ID NO: 988463 - DNA, 15 bp, Homo sapiens
gagccattgaatttg

SEQ ID NO: 988464 - DNA, 15 bp, Homo sapiens
agccattgaatttgc

SEQ ID NO: 988465 - DNA, 15 bp, Homo sapiens
gccattgaatttgcc

SEQ ID NO: 988466 - DNA, 15 bp, Homo sapiens
ccattgaatttgcct

SEQ ID NO: 988467 - DNA, 15 bp, Homo sapiens
cattgaatttgcctt

SEQ ID NO: 988468 - DNA, 15 bp, Homo sapiens
attgaatttgccttc

SEQ ID NO: 988469 - DNA, 15 bp, Homo sapiens
ttgaatttgccttcc

SEQ ID NO: 988470 - DNA, 15 bp, Homo sapiens
tgaatttgccttcct

SEQ ID NO: 988471 - DNA, 15 bp, Homo sapiens
gaatttgccttcctc

SEQ ID NO: 988472 - DNA, 15 bp, Homo sapiens
aatttgccttcctca

SEQ ID NO: 988473 - DNA, 15 bp, Homo sapiens
atttgccttcctcat

SEQ ID NO: 988474 - DNA, 15 bp, Homo sapiens
tttgccttcctcatg

SEQ ID NO: 988475 - DNA, 15 bp, Homo sapiens
ttgccttcctcatga

SEQ ID NO: 988476 - DNA, 15 bp, Homo sapiens
tgccttcctcatgaa

SEQ ID NO: 988477 - DNA, 15 bp, Homo sapiens
gccttcctcatgaat

SEQ ID NO: 988478 - DNA, 15 bp, Homo sapiens
ccttcctcatgaatt

SEQ ID NO: 988479 - DNA, 15 bp, Homo sapiens
cttcctcatgaatta

SEQ ID NO: 988480 - DNA, 15 bp, Homo sapiens
ttcctcatgaattaa

SEQ ID NO: 988481 - DNA, 15 bp, Homo sapiens
tcctcatgaattaaa

SEQ ID NO: 988482 - DNA, 15 bp, Homo sapiens
cctcatgaattaaaa

SEQ ID NO: 988483 - DNA, 15 bp, Homo sapiens
ctcatgaattaaaac

SEQ ID NO: 988484 - DNA, 15 bp, Homo sapiens
tcatgaattaaaacc

SEQ ID NO: 988485 - DNA, 15 bp, Homo sapiens
catgaattaaaacct

SEQ ID NO: 988486 - DNA, 15 bp, Homo sapiens
atgaattaaaacctc

SEQ ID NO: 988487 - DNA, 15 bp, Homo sapiens
tgaattaaaacctcc

SEQ ID NO: 988488 - DNA, 15 bp, Homo sapiens
gaattaaaacctccc

SEQ ID NO: 988489 - DNA, 15 bp, Homo sapiens
aattaaaacctcccc

SEQ ID NO: 988490 - DNA, 15 bp, Homo sapiens
attaaaacctccccc

SEQ ID NO: 988491 - DNA, 15 bp, Homo sapiens
ttaaaacctccccca

SEQ ID NO: 988492 - DNA, 15 bp, Homo sapiens
taaaacctcccccaa

SEQ ID NO: 988493 - DNA, 15 bp, Homo sapiens
aaaacctcccccaag

SEQ ID NO: 988494 - DNA, 15 bp, Homo sapiens
aaacctcccccaagc

SEQ ID NO: 988495 - DNA, 15 bp, Homo sapiens
aacctcccccaagca

SEQ ID NO: 988496 - DNA, 15 bp, Homo sapiens
acctcccccaagcag

SEQ ID NO: 988497 - DNA, 15 bp, Homo sapiens
cctcccccaagcaga

SEQ ID NO: 988498 - DNA, 15 bp, Homo sapiens
ctcccccaagcagag

SEQ ID NO: 988499 - DNA, 15 bp, Homo sapiens
tcccccaagcagagc

SEQ ID NO: 988500 - DNA, 15 bp, Homo sapiens
cccccaagcagagct

SEQ ID NO: 988501 - DNA, 15 bp, Homo sapiens
ccccaagcagagctt

SEQ ID NO: 988502 - DNA, 15 bp, Homo sapiens
cccaagcagagcttc

SEQ ID NO: 988503 - DNA, 15 bp, Homo sapiens
ccaagcagagcttcc

SEQ ID NO: 988504 - DNA, 15 bp, Homo sapiens
caagcagagcttcct

SEQ ID NO: 988505 - DNA, 15 bp, Homo sapiens
aagcagagcttcctc

SEQ ID NO: 988506 - DNA, 15 bp, Homo sapiens
agcagagcttcctca

SEQ ID NO: 988507 - DNA, 15 bp, Homo sapiens
gcagagcttcctcag

SEQ ID NO: 988508 - DNA, 15 bp, Homo sapiens
cagagcttcctcaga

SEQ ID NO: 988509 - DNA, 15 bp, Homo sapiens
agagcttcctcagag

SEQ ID NO: 988510 - DNA, 15 bp, Homo sapiens
gagcttcctcagaga

SEQ ID NO: 988511 - DNA, 15 bp, Homo sapiens
agcttcctcagagaa

SEQ ID NO: 988512 - DNA, 15 bp, Homo sapiens
gcttcctcagagaaa

SEQ ID NO: 988513 - DNA, 15 bp, Homo sapiens
cttcctcagagaaag

SEQ ID NO: 988514 - DNA, 15 bp, Homo sapiens
ttcctcagagaaagt

SEQ ID NO: 988515 - DNA, 15 bp, Homo sapiens
tcctcagagaaagtg

SEQ ID NO: 988516 - DNA, 15 bp, Homo sapiens
cctcagagaaagtgg

SEQ ID NO: 988517 - DNA, 15 bp, Homo sapiens
ctcagagaaagtggt

SEQ ID NO: 988518 - DNA, 15 bp, Homo sapiens
tcagagaaagtggtt

SEQ ID NO: 988519 - DNA, 15 bp, Homo sapiens
cagagaaagtggttc

SEQ ID NO: 988520 - DNA, 15 bp, Homo sapiens
agagaaagtggttct

SEQ ID NO: 988521 - DNA, 15 bp, Homo sapiens
gagaaagtggttcta

SEQ ID NO: 988522 - DNA, 15 bp, Homo sapiens
agaaagtggttctat

SEQ ID NO: 988523 - DNA, 15 bp, Homo sapiens
gaaagtggttctatg

SEQ ID NO: 988524 - DNA, 15 bp, Homo sapiens
aaagtggttctatga

SEQ ID NO: 988525 - DNA, 15 bp, Homo sapiens
aagtggttctatgat

SEQ ID NO: 988526 - DNA, 15 bp, Homo sapiens
agtggttctatgatg

SEQ ID NO: 988527 - DNA, 15 bp, Homo sapiens
gtggttctatgatga

SEQ ID NO: 988528 - DNA, 15 bp, Homo sapiens
tggttctatgatgac

SEQ ID NO: 988529 - DNA, 15 bp, Homo sapiens
ggttctatgatgacg

SEQ ID NO: 988530 - DNA, 15 bp, Homo sapiens
gttctatgatgacgt

SEQ ID NO: 988531 - DNA, 15 bp, Homo sapiens
ttctatgatgacgtc

SEQ ID NO: 988532 - DNA, 15 bp, Homo sapiens
tctatgatgacgtcc

SEQ ID NO: 988533 - DNA, 15 bp, Homo sapiens
ctatgatgacgtcct

SEQ ID NO: 988534 - DNA, 15 bp, Homo sapiens
tatgatgacgtcctg

SEQ ID NO: 988535 - DNA, 15 bp, Homo sapiens
atgatgacgtcctgt

SEQ ID NO: 988536 - DNA, 15 bp, Homo sapiens
tgatgacgtcctgtc

SEQ ID NO: 988537 - DNA, 15 bp, Homo sapiens
gatgacgtcctgtct

SEQ ID NO: 988538 - DNA, 15 bp, Homo sapiens
atgacgtcctgtctt

SEQ ID NO: 988539 - DNA, 15 bp, Homo sapiens
tgacgtcctgtcttg

SEQ ID NO: 988540 - DNA, 15 bp, Homo sapiens
gacgtcctgtcttgg

SEQ ID NO: 988541 - DNA, 15 bp, Homo sapiens
acgtcctgtcttgga

SEQ ID NO: 988542 - DNA, 15 bp, Homo sapiens
cgtcctgtcttggaa

SEQ ID NO: 988543 - DNA, 15 bp, Homo sapiens
gtcctgtcttggaag

SEQ ID NO: 988544 - DNA, 15 bp, Homo sapiens
tcctgtcttggaagg

SEQ ID NO: 988545 - DNA, 15 bp, Homo sapiens
cctgtcttggaagga

SEQ ID NO: 988546 - DNA, 15 bp, Homo sapiens
ctgtcttggaaggac

SEQ ID NO: 988547 - DNA, 15 bp, Homo sapiens
tgtcttggaaggact

SEQ ID NO: 988548 - DNA, 15 bp, Homo sapiens
gtcttggaaggacta

SEQ ID NO: 988549 - DNA, 15 bp, Homo sapiens
tcttggaaggactac

SEQ ID NO: 988550 - DNA, 15 bp, Homo sapiens
cttggaaggactact

SEQ ID NO: 988551 - DNA, 15 bp, Homo sapiens
ttggaaggactacta

SEQ ID NO: 988552 - DNA, 15 bp, Homo sapiens
tggaaggactactac

SEQ ID NO: 988553 - DNA, 15 bp, Homo sapiens
ggaaggactactact

SEQ ID NO: 988554 - DNA, 15 bp, Homo sapiens
gaaggactactactc

SEQ ID NO: 988555 - DNA, 15 bp, Homo sapiens
aaggactactactca

SEQ ID NO: 988556 - DNA, 15 bp, Homo sapiens
aggactactactcaa

SEQ ID NO: 988557 - DNA, 15 bp, Homo sapiens
ggactactactcaat

SEQ ID NO: 988558 - DNA, 15 bp, Homo sapiens
gactactactcaatg

SEQ ID NO: 988559 - DNA, 15 bp, Homo sapiens
actactactcaatgg

SEQ ID NO: 988560 - DNA, 15 bp, Homo sapiens
ctactactcaatggc

SEQ ID NO: 988561 - DNA, 15 bp, Homo sapiens
tactactcaatggcc

SEQ ID NO: 988562 - DNA, 15 bp, Homo sapiens
actactcaatggccc

SEQ ID NO: 988563 - DNA, 15 bp, Homo sapiens
ctactcaatggcccc

SEQ ID NO: 988564 - DNA, 15 bp, Homo sapiens
tactcaatggcccct

SEQ ID NO: 988565 - DNA, 15 bp, Homo sapiens
actcaatggcccctg

SEQ ID NO: 988566 - DNA, 15 bp, Homo sapiens
ctcaatggcccctgc

SEQ ID NO: 988567 - DNA, 15 bp, Homo sapiens
tcaatggcccctgca

SEQ ID NO: 988568 - DNA, 15 bp, Homo sapiens
caatggcccctgcac

SEQ ID NO: 988569 - DNA, 15 bp, Homo sapiens
aatggcccctgcact

SEQ ID NO: 988570 - DNA, 15 bp, Homo sapiens
atggcccctgcacta

SEQ ID NO: 988571 - DNA, 15 bp, Homo sapiens
tggcccctgcactac

SEQ ID NO: 988572 - DNA, 15 bp, Homo sapiens
ggcccctgcactact

SEQ ID NO: 988573 - DNA, 15 bp, Homo sapiens
gcccctgcactactc

SEQ ID NO: 988574 - DNA, 15 bp, Homo sapiens
cccctgcactactct

SEQ ID NO: 988575 - DNA, 15 bp, Homo sapiens
ccctgcactactcta

SEQ ID NO: 988576 - DNA, 15 bp, Homo sapiens
cctgcactactctac

SEQ ID NO: 988577 - DNA, 15 bp, Homo sapiens
ctgcactactctact

SEQ ID NO: 988578 - DNA, 15 bp, Homo sapiens
tgcactactctactt

SEQ ID NO: 988579 - DNA, 15 bp, Homo sapiens
gcactactctacttc

SEQ ID NO: 988580 - DNA, 15 bp, Homo sapiens
cactactctacttcc

SEQ ID NO: 988581 - DNA, 15 bp, Homo sapiens
actactctacttcct

SEQ ID NO: 988582 - DNA, 15 bp, Homo sapiens
ctactctacttcctc

SEQ ID NO: 988583 - DNA, 15 bp, Homo sapiens
tactctacttcctct

SEQ ID NO: 988584 - DNA, 15 bp, Homo sapiens
actctacttcctctt

SEQ ID NO: 988585 - DNA, 15 bp, Homo sapiens
ctctacttcctctta

SEQ ID NO: 988586 - DNA, 15 bp, Homo sapiens
tctacttcctcttac

SEQ ID NO: 988587 - DNA, 15 bp, Homo sapiens
ctacttcctcttacc

SEQ ID NO: 988588 - DNA, 15 bp, Homo sapiens
tacttcctcttacct

SEQ ID NO: 988589 - DNA, 15 bp, Homo sapiens
acttcctcttaccta

SEQ ID NO: 988590 - DNA, 15 bp, Homo sapiens
cttcctcttacctat

SEQ ID NO: 988591 - DNA, 15 bp, Homo sapiens
ttcctcttacctatg

SEQ ID NO: 988592 - DNA, 15 bp, Homo sapiens
tcctcttacctatgt

SEQ ID NO: 988593 - DNA, 15 bp, Homo sapiens
cctcttacctatgtc

SEQ ID NO: 988594 - DNA, 15 bp, Homo sapiens
ctcttacctatgtcc

SEQ ID NO: 988595 - DNA, 15 bp, Homo sapiens
tcttacctatgtccc

SEQ ID NO: 988596 - DNA, 15 bp, Homo sapiens
cttacctatgtccct

SEQ ID NO: 988597 - DNA, 15 bp, Homo sapiens
ttacctatgtccctt

SEQ ID NO: 988598 - DNA, 15 bp, Homo sapiens
tacctatgtcccttc

SEQ ID NO: 988599 - DNA, 15 bp, Homo sapiens
acctatgtcccttct

SEQ ID NO: 988600 - DNA, 15 bp, Homo sapiens
cctatgtcccttctc

SEQ ID NO: 988601 - DNA, 15 bp, Homo sapiens
ctatgtcccttctca

SEQ ID NO: 988602 - DNA, 15 bp, Homo sapiens
tatgtcccttctcat

SEQ ID NO: 988603 - DNA, 15 bp, Homo sapiens
atgtcccttctcatg

SEQ ID NO: 988604 - DNA, 15 bp, Homo sapiens
tgtcccttctcatgc

SEQ ID NO: 988605 - DNA, 15 bp, Homo sapiens
gtcccttctcatgcc

SEQ ID NO: 988606 - DNA, 15 bp, Homo sapiens
tcccttctcatgcct

SEQ ID NO: 988607 - DNA, 15 bp, Homo sapiens
cccttctcatgcctt

SEQ ID NO: 988608 - DNA, 15 bp, Homo sapiens
ccttctcatgccttt

SEQ ID NO: 988609 - DNA, 15 bp, Homo sapiens
cttctcatgcctttc

SEQ ID NO: 988610 - DNA, 15 bp, Homo sapiens
ttctcatgcctttcc

SEQ ID NO: 988611 - DNA, 15 bp, Homo sapiens
tctcatgcctttccc

SEQ ID NO: 988612 - DNA, 15 bp, Homo sapiens
ctcatgcctttccct

SEQ ID NO: 988613 - DNA, 15 bp, Homo sapiens
tcatgcctttccctc

SEQ ID NO: 988614 - DNA, 15 bp, Homo sapiens
catgcctttccctcc

SEQ ID NO: 988615 - DNA, 15 bp, Homo sapiens
atgcctttccctcca

SEQ ID NO: 988616 - DNA, 15 bp, Homo sapiens
tgcctttccctccaa

SEQ ID NO: 988617 - DNA, 15 bp, Homo sapiens
gcctttccctccaac

SEQ ID NO: 988618 - DNA, 15 bp, Homo sapiens
cctttccctccaacg

SEQ ID NO: 988619 - DNA, 15 bp, Homo sapiens
ctttccctccaacgg

SEQ ID NO: 988620 - DNA, 15 bp, Homo sapiens
tttccctccaacggg

SEQ ID NO: 988621 - DNA, 15 bp, Homo sapiens
ttccctccaacgggg

SEQ ID NO: 988622 - DNA, 15 bp, Homo sapiens
tccctccaacgggga

SEQ ID NO: 988623 - DNA, 15 bp, Homo sapiens
ccctccaacggggaa

SEQ ID NO: 988624 - DNA, 15 bp, Homo sapiens
cctccaacggggaaa

SEQ ID NO: 988625 - DNA, 15 bp, Homo sapiens
ctccaacggggaaag

SEQ ID NO: 988626 - DNA, 15 bp, Homo sapiens
tccaacggggaaagc

SEQ ID NO: 988627 - DNA, 15 bp, Homo sapiens
ccaacggggaaagcc

SEQ ID NO: 988628 - DNA, 15 bp, Homo sapiens
caacggggaaagcca

SEQ ID NO: 988629 - DNA, 15 bp, Homo sapiens
aacggggaaagccaa

SEQ ID NO: 988630 - DNA, 15 bp, Homo sapiens
acggggaaagccaac

SEQ ID NO: 988631 - DNA, 15 bp, Homo sapiens
cggggaaagccaact

SEQ ID NO: 988632 - DNA, 15 bp, Homo sapiens
ggggaaagccaactc

SEQ ID NO: 988633 - DNA, 15 bp, Homo sapiens
gggaaagccaactcc

SEQ ID NO: 988634 - DNA, 15 bp, Homo sapiens
ggaaagccaactcca

SEQ ID NO: 988635 - DNA, 15 bp, Homo sapiens
gaaagccaactccat

SEQ ID NO: 988636 - DNA, 15 bp, Homo sapiens
aaagccaactccatc

SEQ ID NO: 988637 - DNA, 15 bp, Homo sapiens
aagccaactccatct

SEQ ID NO: 988638 - DNA, 15 bp, Homo sapiens
agccaactccatctc

SEQ ID NO: 988639 - DNA, 15 bp, Homo sapiens
gccaactccatctct

SEQ ID NO: 988640 - DNA, 15 bp, Homo sapiens
ccaactccatctcta

SEQ ID NO: 988641 - DNA, 15 bp, Homo sapiens
caactccatctctaa

SEQ ID NO: 988642 - DNA, 15 bp, Homo sapiens
aactccatctctaag

SEQ ID NO: 988643 - DNA, 15 bp, Homo sapiens
actccatctctaagt

SEQ ID NO: 988644 - DNA, 15 bp, Homo sapiens
ctccatctctaagtg

SEQ ID NO: 988645 - DNA, 15 bp, Homo sapiens
tccatctctaagtgc

SEQ ID NO: 988646 - DNA, 15 bp, Homo sapiens
ccatctctaagtgcc

SEQ ID NO: 988647 - DNA, 15 bp, Homo sapiens
catctctaagtgccg

SEQ ID NO: 988648 - DNA, 15 bp, Homo sapiens
atctctaagtgccga

SEQ ID NO: 988649 - DNA, 15 bp, Homo sapiens
tctctaagtgccgaa

SEQ ID NO: 988650 - DNA, 15 bp, Homo sapiens
ctctaagtgccgaac

SEQ ID NO: 988651 - DNA, 15 bp, Homo sapiens
tctaagtgccgaact

SEQ ID NO: 988652 - DNA, 15 bp, Homo sapiens
ctaagtgccgaactc

SEQ ID NO: 988653 - DNA, 15 bp, Homo sapiens
taagtgccgaactca

SEQ ID NO: 988654 - DNA, 15 bp, Homo sapiens
aagtgccgaactcat

SEQ ID NO: 988655 - DNA, 15 bp, Homo sapiens
agtgccgaactcatc

SEQ ID NO: 988656 - DNA, 15 bp, Homo sapiens
gtgccgaactcatcc

SEQ ID NO: 988657 - DNA, 15 bp, Homo sapiens
tgccgaactcatccc

SEQ ID NO: 988658 - DNA, 15 bp, Homo sapiens
gccgaactcatccct

SEQ ID NO: 988659 - DNA, 15 bp, Homo sapiens
ccgaactcatccctg

SEQ ID NO: 988660 - DNA, 15 bp, Homo sapiens
cgaactcatccctgt

SEQ ID NO: 988661 - DNA, 15 bp, Homo sapiens
gaactcatccctgtt

SEQ ID NO: 988662 - DNA, 15 bp, Homo sapiens
aactcatccctgttc

SEQ ID NO: 988663 - DNA, 15 bp, Homo sapiens
actcatccctgttcc

SEQ ID NO: 988664 - DNA, 15 bp, Homo sapiens
ctcatccctgttcct

SEQ ID NO: 988665 - DNA, 15 bp, Homo sapiens
tcatccctgttcctc

SEQ ID NO: 988666 - DNA, 15 bp, Homo sapiens
catccctgttcctca

SEQ ID NO: 988667 - DNA, 15 bp, Homo sapiens
atccctgttcctcaa

SEQ ID NO: 988668 - DNA, 15 bp, Homo sapiens
tccctgttcctcaag

SEQ ID NO: 988669 - DNA, 15 bp, Homo sapiens
ccctgttcctcaagg

SEQ ID NO: 988670 - DNA, 15 bp, Homo sapiens
cctgttcctcaaggc

SEQ ID NO: 988671 - DNA, 15 bp, Homo sapiens
ctgttcctcaaggcc

SEQ ID NO: 988672 - DNA, 15 bp, Homo sapiens
tgttcctcaaggcca

SEQ ID NO: 988673 - DNA, 15 bp, Homo sapiens
gttcctcaaggccac

SEQ ID NO: 988674 - DNA, 15 bp, Homo sapiens
ttcctcaaggccacc

SEQ ID NO: 988675 - DNA, 15 bp, Homo sapiens
tcctcaaggccacct

SEQ ID NO: 988676 - DNA, 15 bp, Homo sapiens
cctcaaggccacctg

SEQ ID NO: 988677 - DNA, 15 bp, Homo sapiens
ctcaaggccacctgg

SEQ ID NO: 988678 - DNA, 15 bp, Homo sapiens
tcaaggccacctggc

SEQ ID NO: 988679 - DNA, 15 bp, Homo sapiens
caaggccacctggcc

SEQ ID NO: 988680 - DNA, 15 bp, Homo sapiens
aaggccacctggcca

SEQ ID NO: 988681 - DNA, 15 bp, Homo sapiens
aggccacctggccag

SEQ ID NO: 988682 - DNA, 15 bp, Homo sapiens
ggccacctggccagg

SEQ ID NO: 988683 - DNA, 15 bp, Homo sapiens
gccacctggccagga

SEQ ID NO: 988684 - DNA, 15 bp, Homo sapiens
ccacctggccaggag

SEQ ID NO: 988685 - DNA, 15 bp, Homo sapiens
cacctggccaggagc

SEQ ID NO: 988686 - DNA, 15 bp, Homo sapiens
acctggccaggagct

SEQ ID NO: 988687 - DNA, 15 bp, Homo sapiens
cctggccaggagctt

SEQ ID NO: 988688 - DNA, 15 bp, Homo sapiens
ctggccaggagcttc

SEQ ID NO: 988689 - DNA, 15 bp, Homo sapiens
tggccaggagcttct

SEQ ID NO: 988690 - DNA, 15 bp, Homo sapiens
ggccaggagcttctc

SEQ ID NO: 988691 - DNA, 15 bp, Homo sapiens
gccaggagcttctct

SEQ ID NO: 988692 - DNA, 15 bp, Homo sapiens
ccaggagcttctctg

SEQ ID NO: 988693 - DNA, 15 bp, Homo sapiens
caggagcttctctga

SEQ ID NO: 988694 - DNA, 15 bp, Homo sapiens
aggagcttctctgat

SEQ ID NO: 988695 - DNA, 15 bp, Homo sapiens
ggagcttctctgatg

SEQ ID NO: 988696 - DNA, 15 bp, Homo sapiens
gagcttctctgatgt

SEQ ID NO: 988697 - DNA, 15 bp, Homo sapiens
agcttctctgatgtg

SEQ ID NO: 988698 - DNA, 15 bp, Homo sapiens
gcttctctgatgtga

SEQ ID NO: 988699 - DNA, 15 bp, Homo sapiens
cttctctgatgtgat

SEQ ID NO: 988700 - DNA, 15 bp, Homo sapiens
ttctctgatgtgata

SEQ ID NO: 988701 - DNA, 15 bp, Homo sapiens
tctctgatgtgatat

SEQ ID NO: 988702 - DNA, 15 bp, Homo sapiens
ctctgatgtgatatc

SEQ ID NO: 988703 - DNA, 15 bp, Homo sapiens
tctgatgtgatatcc

SEQ ID NO: 988704 - DNA, 15 bp, Homo sapiens
ctgatgtgatatcca

SEQ ID NO: 988705 - DNA, 15 bp, Homo sapiens
tgatgtgatatccac

SEQ ID NO: 988706 - DNA, 15 bp, Homo sapiens
gatgtgatatccact

SEQ ID NO: 988707 - DNA, 15 bp, Homo sapiens
atgtgatatccactt

SEQ ID NO: 988708 - DNA, 15 bp, Homo sapiens
tgtgatatccacttt

SEQ ID NO: 988709 - DNA, 15 bp, Homo sapiens
gtgatatccactttt

SEQ ID NO: 988710 - DNA, 15 bp, Homo sapiens
tgatatccacttttt

SEQ ID NO: 988711 - DNA, 15 bp, Homo sapiens
gatatccactttttt

SEQ ID NO: 988712 - DNA, 15 bp, Homo sapiens
atatccacttttttt

SEQ ID NO: 988713 - DNA, 15 bp, Homo sapiens
tatccactttttttt

SEQ ID NO: 988714 - DNA, 15 bp, Homo sapiens
atccacttttttttt

SEQ ID NO: 988715 - DNA, 15 bp, Homo sapiens
tccactttttttttt

SEQ ID NO: 988716 - DNA, 15 bp, Homo sapiens
ccacttttttttttt

SEQ ID NO: 988717 - DNA, 15 bp, Homo sapiens
ctttttttttttttg

SEQ ID NO: 988718 - DNA, 15 bp, Homo sapiens
ttttgagatggagtc

SEQ ID NO: 988719 - DNA, 15 bp, Homo sapiens
tttgagatggagtct

SEQ ID NO: 988720 - DNA, 15 bp, Homo sapiens
ttgagatggagtctc

SEQ ID NO: 988721 - DNA, 15 bp, Homo sapiens
tgagatggagtctca

SEQ ID NO: 988722 - DNA, 15 bp, Homo sapiens
gagatggagtctcac

SEQ ID NO: 988723 - DNA, 15 bp, Homo sapiens
agatggagtctcact

SEQ ID NO: 988724 - DNA, 15 bp, Homo sapiens
gatggagtctcactc

SEQ ID NO: 988725 - DNA, 15 bp, Homo sapiens
atggagtctcactct

SEQ ID NO: 988726 - DNA, 15 bp, Homo sapiens
tggagtctcactctg

SEQ ID NO: 988727 - DNA, 15 bp, Homo sapiens
ggagtctcactctgt

SEQ ID NO: 988728 - DNA, 15 bp, Homo sapiens
gagtctcactctgtc

SEQ ID NO: 988729 - DNA, 15 bp, Homo sapiens
agtctcactctgtca

SEQ ID NO: 988730 - DNA, 15 bp, Homo sapiens
gtctcactctgtcac

SEQ ID NO: 988731 - DNA, 15 bp, Homo sapiens
tctcactctgtcacc

SEQ ID NO: 988732 - DNA, 15 bp, Homo sapiens
ctcactctgtcaccc

SEQ ID NO: 988733 - DNA, 15 bp, Homo sapiens
tcactctgtcaccca

SEQ ID NO: 988734 - DNA, 15 bp, Homo sapiens
cactctgtcacccag

SEQ ID NO: 988735 - DNA, 15 bp, Homo sapiens
actctgtcacccagg

SEQ ID NO: 988736 - DNA, 15 bp, Homo sapiens
ctctgtcacccaggc

SEQ ID NO: 988737 - DNA, 15 bp, Homo sapiens
tgtcacccaggctgg

SEQ ID NO: 988738 - DNA, 15 bp, Homo sapiens
gtcacccaggctgga

SEQ ID NO: 988739 - DNA, 15 bp, Homo sapiens
acccaggctggagta

SEQ ID NO: 988740 - DNA, 15 bp, Homo sapiens
cccaggctggagtac

SEQ ID NO: 988741 - DNA, 15 bp, Homo sapiens
ccaggctggagtaca

SEQ ID NO: 988742 - DNA, 15 bp, Homo sapiens
caggctggagtacag

SEQ ID NO: 988743 - DNA, 15 bp, Homo sapiens
aggctggagtacagt

SEQ ID NO: 988744 - DNA, 15 bp, Homo sapiens
ggctggagtacagtg

SEQ ID NO: 988745 - DNA, 15 bp, Homo sapiens
gctggagtacagtga

SEQ ID NO: 988746 - DNA, 15 bp, Homo sapiens
ctggagtacagtgac

SEQ ID NO: 988747 - DNA, 15 bp, Homo sapiens
tggagtacagtgaca

SEQ ID NO: 988748 - DNA, 15 bp, Homo sapiens
ggagtacagtgacac

SEQ ID NO: 988749 - DNA, 15 bp, Homo sapiens
gagtacagtgacacg

SEQ ID NO: 988750 - DNA, 15 bp, Homo sapiens
agtacagtgacacga

SEQ ID NO: 988751 - DNA, 15 bp, Homo sapiens
gtacagtgacacgac

SEQ ID NO: 988752 - DNA, 15 bp, Homo sapiens
tacagtgacacgacc

SEQ ID NO: 988753 - DNA, 15 bp, Homo sapiens
acagtgacacgacct

SEQ ID NO: 988754 - DNA, 15 bp, Homo sapiens
cagtgacacgacctc

SEQ ID NO: 988755 - DNA, 15 bp, Homo sapiens
agtgacacgacctcg

SEQ ID NO: 988756 - DNA, 15 bp, Homo sapiens
gtgacacgacctcgg

SEQ ID NO: 988757 - DNA, 15 bp, Homo sapiens
tgacacgacctcggc

SEQ ID NO: 988758 - DNA, 15 bp, Homo sapiens
gacacgacctcggct

SEQ ID NO: 988759 - DNA, 15 bp, Homo sapiens
acacgacctcggctc

SEQ ID NO: 988760 - DNA, 15 bp, Homo sapiens
cacgacctcggctca

SEQ ID NO: 988761 - DNA, 15 bp, Homo sapiens
acgacctcggctcac

SEQ ID NO: 988762 - DNA, 15 bp, Homo sapiens
cgacctcggctcact

SEQ ID NO: 988763 - DNA, 15 bp, Homo sapiens
gacctcggctcactg

SEQ ID NO: 988764 - DNA, 15 bp, Homo sapiens
acctcggctcactgc

SEQ ID NO: 988765 - DNA, 15 bp, Homo sapiens
cctcggctcactgca

SEQ ID NO: 988766 - DNA, 15 bp, Homo sapiens
ctcggctcactgcag

SEQ ID NO: 988767 - DNA, 15 bp, Homo sapiens
tcggctcactgcagc

SEQ ID NO: 988768 - DNA, 15 bp, Homo sapiens
cggctcactgcagcc

SEQ ID NO: 988769 - DNA, 15 bp, Homo sapiens
ggctcactgcagcct

SEQ ID NO: 988770 - DNA, 15 bp, Homo sapiens
ctcactgcagcctcc

SEQ ID NO: 988771 - DNA, 15 bp, Homo sapiens
tcactgcagcctcct

SEQ ID NO: 988772 - DNA, 15 bp, Homo sapiens
cactgcagcctcctt

SEQ ID NO: 988773 - DNA, 15 bp, Homo sapiens
actgcagcctccttc

SEQ ID NO: 988774 - DNA, 15 bp, Homo sapiens
ctgcagcctccttct

SEQ ID NO: 988775 - DNA, 15 bp, Homo sapiens
tgcagcctccttctc

SEQ ID NO: 988776 - DNA, 15 bp, Homo sapiens
gcagcctccttctcc

SEQ ID NO: 988777 - DNA, 15 bp, Homo sapiens
cagcctccttctcct

SEQ ID NO: 988778 - DNA, 15 bp, Homo sapiens
agcctccttctcctg

SEQ ID NO: 988779 - DNA, 15 bp, Homo sapiens
gcctccttctcctgg

SEQ ID NO: 988780 - DNA, 15 bp, Homo sapiens
cctccttctcctggg

SEQ ID NO: 988781 - DNA, 15 bp, Homo sapiens
ctccttctcctgggt

SEQ ID NO: 988782 - DNA, 15 bp, Homo sapiens
tccttctcctgggtc

SEQ ID NO: 988783 - DNA, 15 bp, Homo sapiens
ccttctcctgggtcc

SEQ ID NO: 988784 - DNA, 15 bp, Homo sapiens
cttctcctgggtcca

SEQ ID NO: 988785 - DNA, 15 bp, Homo sapiens
ttctcctgggtccaa

SEQ ID NO: 988786 - DNA, 15 bp, Homo sapiens
tctcctgggtccaag

SEQ ID NO: 988787 - DNA, 15 bp, Homo sapiens
ctcctgggtccaagc

SEQ ID NO: 988788 - DNA, 15 bp, Homo sapiens
tcctgggtccaagca

SEQ ID NO: 988789 - DNA, 15 bp, Homo sapiens
cctgggtccaagcaa

SEQ ID NO: 988790 - DNA, 15 bp, Homo sapiens
ctgggtccaagcaat

SEQ ID NO: 988791 - DNA, 15 bp, Homo sapiens
tgggtccaagcaatt

SEQ ID NO: 988792 - DNA, 15 bp, Homo sapiens
gggtccaagcaatta

SEQ ID NO: 988793 - DNA, 15 bp, Homo sapiens
ggtccaagcaattat

SEQ ID NO: 988794 - DNA, 15 bp, Homo sapiens
gtccaagcaattatt

SEQ ID NO: 988795 - DNA, 15 bp, Homo sapiens
tccaagcaattattg

SEQ ID NO: 988796 - DNA, 15 bp, Homo sapiens
ccaagcaattattgt

SEQ ID NO: 988797 - DNA, 15 bp, Homo sapiens
caagcaattattgtg

SEQ ID NO: 988798 - DNA, 15 bp, Homo sapiens
aagcaattattgtgc

SEQ ID NO: 988799 - DNA, 15 bp, Homo sapiens
agcaattattgtgcc

SEQ ID NO: 988800 - DNA, 15 bp, Homo sapiens
gcaattattgtgcct

SEQ ID NO: 988801 - DNA, 15 bp, Homo sapiens
caattattgtgcctc

SEQ ID NO: 988802 - DNA, 15 bp, Homo sapiens
aattattgtgcctca

SEQ ID NO: 988803 - DNA, 15 bp, Homo sapiens
attattgtgcctcag

SEQ ID NO: 988804 - DNA, 15 bp, Homo sapiens
ttattgtgcctcagc

SEQ ID NO: 988805 - DNA, 15 bp, Homo sapiens
tattgtgcctcagcc

SEQ ID NO: 988806 - DNA, 15 bp, Homo sapiens
attgtgcctcagcct

SEQ ID NO: 988807 - DNA, 15 bp, Homo sapiens
ttgtgcctcagcctc

SEQ ID NO: 988808 - DNA, 15 bp, Homo sapiens
tgtgcctcagcctcc

SEQ ID NO: 988809 - DNA, 15 bp, Homo sapiens
gtgcctcagcctccc

SEQ ID NO: 988810 - DNA, 15 bp, Homo sapiens
tgcctcagcctcccg

SEQ ID NO: 988811 - DNA, 15 bp, Homo sapiens
gcctcagcctcccga

SEQ ID NO: 988812 - DNA, 15 bp, Homo sapiens
cctcagcctcccgag

SEQ ID NO: 988813 - DNA, 15 bp, Homo sapiens
ctcagcctcccgagt

SEQ ID NO: 988814 - DNA, 15 bp, Homo sapiens
tcagcctcccgagta

SEQ ID NO: 988815 - DNA, 15 bp, Homo sapiens
cagcctcccgagtag

SEQ ID NO: 988816 - DNA, 15 bp, Homo sapiens
agcctcccgagtagc

SEQ ID NO: 988817 - DNA, 15 bp, Homo sapiens
gcctcccgagtagct

SEQ ID NO: 988818 - DNA, 15 bp, Homo sapiens
cctcccgagtagctg

SEQ ID NO: 988819 - DNA, 15 bp, Homo sapiens
ctcccgagtagctga

SEQ ID NO: 988820 - DNA, 15 bp, Homo sapiens
tcccgagtagctgag

SEQ ID NO: 988821 - DNA, 15 bp, Homo sapiens
cccgagtagctgaga

SEQ ID NO: 988822 - DNA, 15 bp, Homo sapiens
ccgagtagctgagac

SEQ ID NO: 988823 - DNA, 15 bp, Homo sapiens
cgagtagctgagact

SEQ ID NO: 988824 - DNA, 15 bp, Homo sapiens
gagtagctgagactt

SEQ ID NO: 988825 - DNA, 15 bp, Homo sapiens
agtagctgagacttc

SEQ ID NO: 988826 - DNA, 15 bp, Homo sapiens
gtagctgagacttca

SEQ ID NO: 988827 - DNA, 15 bp, Homo sapiens
tagctgagacttcag

SEQ ID NO: 988828 - DNA, 15 bp, Homo sapiens
agctgagacttcagg

SEQ ID NO: 988829 - DNA, 15 bp, Homo sapiens
gctgagacttcaggt

SEQ ID NO: 988830 - DNA, 15 bp, Homo sapiens
ctgagacttcaggtg

SEQ ID NO: 988831 - DNA, 15 bp, Homo sapiens
tgagacttcaggtgc

SEQ ID NO: 988832 - DNA, 15 bp, Homo sapiens
gagacttcaggtgca

SEQ ID NO: 988833 - DNA, 15 bp, Homo sapiens
agacttcaggtgcat

SEQ ID NO: 988834 - DNA, 15 bp, Homo sapiens
gacttcaggtgcatt

SEQ ID NO: 988835 - DNA, 15 bp, Homo sapiens
acttcaggtgcattc

SEQ ID NO: 988836 - DNA, 15 bp, Homo sapiens
cttcaggtgcattcc

SEQ ID NO: 988837 - DNA, 15 bp, Homo sapiens
ttcaggtgcattcca

SEQ ID NO: 988838 - DNA, 15 bp, Homo sapiens
tcaggtgcattccac

SEQ ID NO: 988839 - DNA, 15 bp, Homo sapiens
caggtgcattccacc

SEQ ID NO: 988840 - DNA, 15 bp, Homo sapiens
aggtgcattccacca

SEQ ID NO: 988841 - DNA, 15 bp, Homo sapiens
ggtgcattccaccac

SEQ ID NO: 988842 - DNA, 15 bp, Homo sapiens
gtgcattccaccaca

SEQ ID NO: 988843 - DNA, 15 bp, Homo sapiens
tgcattccaccacac

SEQ ID NO: 988844 - DNA, 15 bp, Homo sapiens
gcattccaccacaca

SEQ ID NO: 988845 - DNA, 15 bp, Homo sapiens
cattccaccacacat

SEQ ID NO: 988846 - DNA, 15 bp, Homo sapiens
attccaccacacatg

SEQ ID NO: 988847 - DNA, 15 bp, Homo sapiens
ttccaccacacatgg

SEQ ID NO: 988848 - DNA, 15 bp, Homo sapiens
tccaccacacatggc

SEQ ID NO: 988849 - DNA, 15 bp, Homo sapiens
ccaccacacatggct

SEQ ID NO: 988850 - DNA, 15 bp, Homo sapiens
caccacacatggcta

SEQ ID NO: 988851 - DNA, 15 bp, Homo sapiens
accacacatggctaa

SEQ ID NO: 988852 - DNA, 15 bp, Homo sapiens
ccacacatggctaat

SEQ ID NO: 988853 - DNA, 15 bp, Homo sapiens
cacacatggctaatt

SEQ ID NO: 988854 - DNA, 15 bp, Homo sapiens
acacatggctaattt

SEQ ID NO: 988855 - DNA, 15 bp, Homo sapiens
cacatggctaatttt

SEQ ID NO: 988856 - DNA, 15 bp, Homo sapiens
acatggctaattttt

SEQ ID NO: 988857 - DNA, 15 bp, Homo sapiens
catggctaatttttg

SEQ ID NO: 988858 - DNA, 15 bp, Homo sapiens
atggctaatttttgt

SEQ ID NO: 988859 - DNA, 15 bp, Homo sapiens
tggctaatttttgta

SEQ ID NO: 988860 - DNA, 15 bp, Homo sapiens
gtatttttagtagaa

SEQ ID NO: 988861 - DNA, 15 bp, Homo sapiens
tatttttagtagaaa

SEQ ID NO: 988862 - DNA, 15 bp, Homo sapiens
atttttagtagaaat

SEQ ID NO: 988863 - DNA, 15 bp, Homo sapiens
tttttagtagaaatg

SEQ ID NO: 988864 - DNA, 15 bp, Homo sapiens
ttttagtagaaatgg

SEQ ID NO: 988865 - DNA, 15 bp, Homo sapiens
tttagtagaaatggg

SEQ ID NO: 988866 - DNA, 15 bp, Homo sapiens
ttagtagaaatgggg

SEQ ID NO: 988867 - DNA, 15 bp, Homo sapiens
tagtagaaatggggt

SEQ ID NO: 988868 - DNA, 15 bp, Homo sapiens
agtagaaatggggtt

SEQ ID NO: 988869 - DNA, 15 bp, Homo sapiens
gtagaaatggggttt

SEQ ID NO: 988870 - DNA, 15 bp, Homo sapiens
tagaaatggggtttc

SEQ ID NO: 988871 - DNA, 15 bp, Homo sapiens
agaaatggggtttcg

SEQ ID NO: 988872 - DNA, 15 bp, Homo sapiens
gaaatggggtttcgt

SEQ ID NO: 988873 - DNA, 15 bp, Homo sapiens
aaatggggtttcgtc

SEQ ID NO: 988874 - DNA, 15 bp, Homo sapiens
aatggggtttcgtca

SEQ ID NO: 988875 - DNA, 15 bp, Homo sapiens
atggggtttcgtcat

SEQ ID NO: 988876 - DNA, 15 bp, Homo sapiens
tggggtttcgtcatg

SEQ ID NO: 988877 - DNA, 15 bp, Homo sapiens
ggggtttcgtcatgt

SEQ ID NO: 988878 - DNA, 15 bp, Homo sapiens
gggtttcgtcatgtt

SEQ ID NO: 988879 - DNA, 15 bp, Homo sapiens
ggtttcgtcatgttg

SEQ ID NO: 988880 - DNA, 15 bp, Homo sapiens
gtttcgtcatgttgg

SEQ ID NO: 988881 - DNA, 15 bp, Homo sapiens
tttcgtcatgttggc

SEQ ID NO: 988882 - DNA, 15 bp, Homo sapiens
ttcgtcatgttggcc

SEQ ID NO: 988883 - DNA, 15 bp, Homo sapiens
tcgtcatgttggcca

SEQ ID NO: 988884 - DNA, 15 bp, Homo sapiens
cgtcatgttggccag

SEQ ID NO: 988885 - DNA, 15 bp, Homo sapiens
gtcatgttggccagg

SEQ ID NO: 988886 - DNA, 15 bp, Homo sapiens
tcatgttggccaggc

SEQ ID NO: 988887 - DNA, 15 bp, Homo sapiens
tggtctcgaactcct

SEQ ID NO: 988888 - DNA, 15 bp, Homo sapiens
ggtctcgaactcctg

SEQ ID NO: 988889 - DNA, 15 bp, Homo sapiens
gtctcgaactcctgg

SEQ ID NO: 988890 - DNA, 15 bp, Homo sapiens
tctcgaactcctggc

SEQ ID NO: 988891 - DNA, 15 bp, Homo sapiens
ctcgaactcctggcc

SEQ ID NO: 988892 - DNA, 15 bp, Homo sapiens
tcgaactcctggcct

SEQ ID NO: 988893 - DNA, 15 bp, Homo sapiens
cgaactcctggccta

SEQ ID NO: 988894 - DNA, 15 bp, Homo sapiens
gaactcctggcctag

SEQ ID NO: 988895 - DNA, 15 bp, Homo sapiens
aactcctggcctagg

SEQ ID NO: 988896 - DNA, 15 bp, Homo sapiens
actcctggcctaggt

SEQ ID NO: 988897 - DNA, 15 bp, Homo sapiens
ctcctggcctaggtg

SEQ ID NO: 988898 - DNA, 15 bp, Homo sapiens
tcctggcctaggtga

SEQ ID NO: 988899 - DNA, 15 bp, Homo sapiens
cctggcctaggtgat

SEQ ID NO: 988900 - DNA, 15 bp, Homo sapiens
ctggcctaggtgatc

SEQ ID NO: 988901 - DNA, 15 bp, Homo sapiens
tggcctaggtgatcc

SEQ ID NO: 988902 - DNA, 15 bp, Homo sapiens
ggcctaggtgatcca

SEQ ID NO: 988903 - DNA, 15 bp, Homo sapiens
gcctaggtgatccac

SEQ ID NO: 988904 - DNA, 15 bp, Homo sapiens
cctaggtgatccacc

SEQ ID NO: 988905 - DNA, 15 bp, Homo sapiens
ctaggtgatccaccc

SEQ ID NO: 988906 - DNA, 15 bp, Homo sapiens
taggtgatccacccg

SEQ ID NO: 988907 - DNA, 15 bp, Homo sapiens
aggtgatccacccgc

SEQ ID NO: 988908 - DNA, 15 bp, Homo sapiens
ggtgatccacccgcc

SEQ ID NO: 988909 - DNA, 15 bp, Homo sapiens
gtgatccacccgcct

SEQ ID NO: 988910 - DNA, 15 bp, Homo sapiens
tgatccacccgcctc

SEQ ID NO: 988911 - DNA, 15 bp, Homo sapiens
gatccacccgcctcg

SEQ ID NO: 988912 - DNA, 15 bp, Homo sapiens
atccacccgcctcga

SEQ ID NO: 988913 - DNA, 15 bp, Homo sapiens
tccacccgcctcgac

SEQ ID NO: 988914 - DNA, 15 bp, Homo sapiens
ccacccgcctcgacc

SEQ ID NO: 988915 - DNA, 15 bp, Homo sapiens
cacccgcctcgacct

SEQ ID NO: 988916 - DNA, 15 bp, Homo sapiens
acccgcctcgacctc

SEQ ID NO: 988917 - DNA, 15 bp, Homo sapiens
cccgcctcgacctcc

SEQ ID NO: 988918 - DNA, 15 bp, Homo sapiens
ccgcctcgacctccc

SEQ ID NO: 988919 - DNA, 15 bp, Homo sapiens
cgcctcgacctccca

SEQ ID NO: 988920 - DNA, 15 bp, Homo sapiens
gcctcgacctcccaa

SEQ ID NO: 988921 - DNA, 15 bp, Homo sapiens
cctcgacctcccaaa

SEQ ID NO: 988922 - DNA, 15 bp, Homo sapiens
ctcgacctcccaaag

SEQ ID NO: 988923 - DNA, 15 bp, Homo sapiens
tcgacctcccaaagt

SEQ ID NO: 988924 - DNA, 15 bp, Homo sapiens
cgacctcccaaagtg

SEQ ID NO: 988925 - DNA, 15 bp, Homo sapiens
gacctcccaaagtgc

SEQ ID NO: 988926 - DNA, 15 bp, Homo sapiens
acctcccaaagtgct

SEQ ID NO: 988927 - DNA, 15 bp, Homo sapiens
caggcatgagccacc

SEQ ID NO: 988928 - DNA, 15 bp, Homo sapiens
aggcatgagccacca

SEQ ID NO: 988929 - DNA, 15 bp, Homo sapiens
ggcatgagccaccat

SEQ ID NO: 988930 - DNA, 15 bp, Homo sapiens
gcatgagccaccatg

SEQ ID NO: 988931 - DNA, 15 bp, Homo sapiens
catgagccaccatgc

SEQ ID NO: 988932 - DNA, 15 bp, Homo sapiens
atgagccaccatgcc

SEQ ID NO: 988933 - DNA, 15 bp, Homo sapiens
tgagccaccatgccc

SEQ ID NO: 988934 - DNA, 15 bp, Homo sapiens
gagccaccatgccca

SEQ ID NO: 988935 - DNA, 15 bp, Homo sapiens
agccaccatgcccag

SEQ ID NO: 988936 - DNA, 15 bp, Homo sapiens
gccaccatgcccagt

SEQ ID NO: 988937 - DNA, 15 bp, Homo sapiens
ccaccatgcccagtc

SEQ ID NO: 988938 - DNA, 15 bp, Homo sapiens
caccatgcccagtcg

SEQ ID NO: 988939 - DNA, 15 bp, Homo sapiens
accatgcccagtcga

SEQ ID NO: 988940 - DNA, 15 bp, Homo sapiens
ccatgcccagtcgat

SEQ ID NO: 988941 - DNA, 15 bp, Homo sapiens
catgcccagtcgata

SEQ ID NO: 988942 - DNA, 15 bp, Homo sapiens
atgcccagtcgatat

SEQ ID NO: 988943 - DNA, 15 bp, Homo sapiens
tgcccagtcgatatc

SEQ ID NO: 988944 - DNA, 15 bp, Homo sapiens
gcccagtcgatatct

SEQ ID NO: 988945 - DNA, 15 bp, Homo sapiens
cccagtcgatatctc

SEQ ID NO: 988946 - DNA, 15 bp, Homo sapiens
ccagtcgatatctca

SEQ ID NO: 988947 - DNA, 15 bp, Homo sapiens
cagtcgatatctcac

SEQ ID NO: 988948 - DNA, 15 bp, Homo sapiens
agtcgatatctcact

SEQ ID NO: 988949 - DNA, 15 bp, Homo sapiens
gtcgatatctcactt

SEQ ID NO: 988950 - DNA, 15 bp, Homo sapiens
tcgatatctcacttt

SEQ ID NO: 988951 - DNA, 15 bp, Homo sapiens
cgatatctcactttt

SEQ ID NO: 988952 - DNA, 15 bp, Homo sapiens
gatatctcacttttt

SEQ ID NO: 988953 - DNA, 15 bp, Homo sapiens
atatctcacttttta

SEQ ID NO: 988954 - DNA, 15 bp, Homo sapiens
tatctcactttttat

SEQ ID NO: 988955 - DNA, 15 bp, Homo sapiens
atctcactttttatt

SEQ ID NO: 988956 - DNA, 15 bp, Homo sapiens
tctcactttttattt

SEQ ID NO: 988957 - DNA, 15 bp, Homo sapiens
ctcactttttatttt

SEQ ID NO: 988958 - DNA, 15 bp, Homo sapiens
tcactttttattttg

SEQ ID NO: 988959 - DNA, 15 bp, Homo sapiens
cactttttattttgc

SEQ ID NO: 988960 - DNA, 15 bp, Homo sapiens
actttttattttgcc

SEQ ID NO: 988961 - DNA, 15 bp, Homo sapiens
ctttttattttgcca

SEQ ID NO: 988962 - DNA, 15 bp, Homo sapiens
tttttattttgccat

SEQ ID NO: 988963 - DNA, 15 bp, Homo sapiens
ttttattttgccatg

SEQ ID NO: 988964 - DNA, 15 bp, Homo sapiens
tttattttgccatgg

SEQ ID NO: 988965 - DNA, 15 bp, Homo sapiens
ttattttgccatgga

SEQ ID NO: 988966 - DNA, 15 bp, Homo sapiens
tattttgccatggat

SEQ ID NO: 988967 - DNA, 15 bp, Homo sapiens
attttgccatggatg

SEQ ID NO: 988968 - DNA, 15 bp, Homo sapiens
ttttgccatggatga

SEQ ID NO: 988969 - DNA, 15 bp, Homo sapiens
tttgccatggatgag

SEQ ID NO: 988970 - DNA, 15 bp, Homo sapiens
ttgccatggatgaga

SEQ ID NO: 988971 - DNA, 15 bp, Homo sapiens
tgccatggatgagag

SEQ ID NO: 988972 - DNA, 15 bp, Homo sapiens
gccatggatgagagt

SEQ ID NO: 988973 - DNA, 15 bp, Homo sapiens
ccatggatgagagtc

SEQ ID NO: 988974 - DNA, 15 bp, Homo sapiens
catggatgagagtcc

SEQ ID NO: 988975 - DNA, 15 bp, Homo sapiens
atggatgagagtcct

SEQ ID NO: 988976 - DNA, 15 bp, Homo sapiens
tggatgagagtcctg

SEQ ID NO: 988977 - DNA, 15 bp, Homo sapiens
ggatgagagtcctgg

SEQ ID NO: 988978 - DNA, 15 bp, Homo sapiens
gatgagagtcctggg

SEQ ID NO: 988979 - DNA, 15 bp, Homo sapiens
atgagagtcctgggt

SEQ ID NO: 988980 - DNA, 15 bp, Homo sapiens
tgagagtcctgggtg

SEQ ID NO: 988981 - DNA, 15 bp, Homo sapiens
gagagtcctgggtgt

SEQ ID NO: 988982 - DNA, 15 bp, Homo sapiens
agagtcctgggtgtg

SEQ ID NO: 988983 - DNA, 15 bp, Homo sapiens
gagtcctgggtgtga

SEQ ID NO: 988984 - DNA, 15 bp, Homo sapiens
agtcctgggtgtgag

SEQ ID NO: 988985 - DNA, 15 bp, Homo sapiens
gtcctgggtgtgagg

SEQ ID NO: 988986 - DNA, 15 bp, Homo sapiens
tcctgggtgtgagga

SEQ ID NO: 988987 - DNA, 15 bp, Homo sapiens
cctgggtgtgaggaa

SEQ ID NO: 988988 - DNA, 15 bp, Homo sapiens
ctgggtgtgaggaac

SEQ ID NO: 988989 - DNA, 15 bp, Homo sapiens
tgggtgtgaggaaca

SEQ ID NO: 988990 - DNA, 15 bp, Homo sapiens
gggtgtgaggaacac

SEQ ID NO: 988991 - DNA, 15 bp, Homo sapiens
ggtgtgaggaacacc

SEQ ID NO: 988992 - DNA, 15 bp, Homo sapiens
gtgtgaggaacacct

SEQ ID NO: 988993 - DNA, 15 bp, Homo sapiens
tgtgaggaacacctc

SEQ ID NO: 988994 - DNA, 15 bp, Homo sapiens
gtgaggaacacctcc

SEQ ID NO: 988995 - DNA, 15 bp, Homo sapiens
tgaggaacacctccc

SEQ ID NO: 988996 - DNA, 15 bp, Homo sapiens
gaggaacacctccca

SEQ ID NO: 988997 - DNA, 15 bp, Homo sapiens
aggaacacctcccac

SEQ ID NO: 988998 - DNA, 15 bp, Homo sapiens
ggaacacctcccacc

SEQ ID NO: 988999 - DNA, 15 bp, Homo sapiens
gaacacctcccacca

SEQ ID NO: 989000 - DNA, 15 bp, Homo sapiens
aacacctcccaccag

SEQ ID NO: 989001 - DNA, 15 bp, Homo sapiens
acacctcccaccagg

SEQ ID NO: 989002 - DNA, 15 bp, Homo sapiens
cacctcccaccaggc

SEQ ID NO: 989003 - DNA, 15 bp, Homo sapiens
acctcccaccaggct

SEQ ID NO: 989004 - DNA, 15 bp, Homo sapiens
cctcccaccaggcta

SEQ ID NO: 989005 - DNA, 15 bp, Homo sapiens
ctcccaccaggctag

SEQ ID NO: 989006 - DNA, 15 bp, Homo sapiens
tcccaccaggctaga

SEQ ID NO: 989007 - DNA, 15 bp, Homo sapiens
cccaccaggctagag

SEQ ID NO: 989008 - DNA, 15 bp, Homo sapiens
ccaccaggctagagg

SEQ ID NO: 989009 - DNA, 15 bp, Homo sapiens
caccaggctagaggc

SEQ ID NO: 989010 - DNA, 15 bp, Homo sapiens
accaggctagaggca

SEQ ID NO: 989011 - DNA, 15 bp, Homo sapiens
ccaggctagaggcaa

SEQ ID NO: 989012 - DNA, 15 bp, Homo sapiens
caggctagaggcaac

SEQ ID NO: 989013 - DNA, 15 bp, Homo sapiens
aggctagaggcaact

SEQ ID NO: 989014 - DNA, 15 bp, Homo sapiens
ggctagaggcaactg

SEQ ID NO: 989015 - DNA, 15 bp, Homo sapiens
gctagaggcaactgc

SEQ ID NO: 989016 - DNA, 15 bp, Homo sapiens
ctagaggcaactgcc

SEQ ID NO: 989017 - DNA, 15 bp, Homo sapiens
tagaggcaactgccc

SEQ ID NO: 989018 - DNA, 15 bp, Homo sapiens
agaggcaactgccca

SEQ ID NO: 989019 - DNA, 15 bp, Homo sapiens
gaggcaactgcccag

SEQ ID NO: 989020 - DNA, 15 bp, Homo sapiens
aggcaactgcccagg

SEQ ID NO: 989021 - DNA, 15 bp, Homo sapiens
ggcaactgcccagga

SEQ ID NO: 989022 - DNA, 15 bp, Homo sapiens
gcaactgcccaggaa

SEQ ID NO: 989023 - DNA, 15 bp, Homo sapiens
caactgcccaggaag

SEQ ID NO: 989024 - DNA, 15 bp, Homo sapiens
aactgcccaggaagg

SEQ ID NO: 989025 - DNA, 15 bp, Homo sapiens
actgcccaggaagga

SEQ ID NO: 989026 - DNA, 15 bp, Homo sapiens
ctgcccaggaaggac

SEQ ID NO: 989027 - DNA, 15 bp, Homo sapiens
tgcccaggaaggact

SEQ ID NO: 989028 - DNA, 15 bp, Homo sapiens
gcccaggaaggactg

SEQ ID NO: 989029 - DNA, 15 bp, Homo sapiens
cccaggaaggactgt

SEQ ID NO: 989030 - DNA, 15 bp, Homo sapiens
ccaggaaggactgtg

SEQ ID NO: 989031 - DNA, 15 bp, Homo sapiens
caggaaggactgtgc

SEQ ID NO: 989032 - DNA, 15 bp, Homo sapiens
aggaaggactgtgct

SEQ ID NO: 989033 - DNA, 15 bp, Homo sapiens
ggaaggactgtgctt

SEQ ID NO: 989034 - DNA, 15 bp, Homo sapiens
gaaggactgtgcttc

SEQ ID NO: 989035 - DNA, 15 bp, Homo sapiens
aaggactgtgcttcc

SEQ ID NO: 989036 - DNA, 15 bp, Homo sapiens
aggactgtgcttccg

SEQ ID NO: 989037 - DNA, 15 bp, Homo sapiens
ggactgtgcttccgt

SEQ ID NO: 989038 - DNA, 15 bp, Homo sapiens
gactgtgcttccgtc

SEQ ID NO: 989039 - DNA, 15 bp, Homo sapiens
actgtgcttccgtca

SEQ ID NO: 989040 - DNA, 15 bp, Homo sapiens
ctgtgcttccgtcac

SEQ ID NO: 989041 - DNA, 15 bp, Homo sapiens
tgtgcttccgtcacc

SEQ ID NO: 989042 - DNA, 15 bp, Homo sapiens
gtgcttccgtcacct

SEQ ID NO: 989043 - DNA, 15 bp, Homo sapiens
tgcttccgtcacctc

SEQ ID NO: 989044 - DNA, 15 bp, Homo sapiens
gcttccgtcacctct

SEQ ID NO: 989045 - DNA, 15 bp, Homo sapiens
cttccgtcacctcta

SEQ ID NO: 989046 - DNA, 15 bp, Homo sapiens
ttccgtcacctctaa

SEQ ID NO: 989047 - DNA, 15 bp, Homo sapiens
tccgtcacctctaaa

SEQ ID NO: 989048 - DNA, 15 bp, Homo sapiens
ccgtcacctctaaat

SEQ ID NO: 989049 - DNA, 15 bp, Homo sapiens
cgtcacctctaaatc

SEQ ID NO: 989050 - DNA, 15 bp, Homo sapiens
gtcacctctaaatcc

SEQ ID NO: 989051 - DNA, 15 bp, Homo sapiens
tcacctctaaatccc

SEQ ID NO: 989052 - DNA, 15 bp, Homo sapiens
cacctctaaatccct

SEQ ID NO: 989053 - DNA, 15 bp, Homo sapiens
acctctaaatccctt

SEQ ID NO: 989054 - DNA, 15 bp, Homo sapiens
cctctaaatcccttg

SEQ ID NO: 989055 - DNA, 15 bp, Homo sapiens
ctctaaatcccttgc

SEQ ID NO: 989056 - DNA, 15 bp, Homo sapiens
tctaaatcccttgca

SEQ ID NO: 989057 - DNA, 15 bp, Homo sapiens
ctaaatcccttgcag

SEQ ID NO: 989058 - DNA, 15 bp, Homo sapiens
taaatcccttgcaga

SEQ ID NO: 989059 - DNA, 15 bp, Homo sapiens
aaatcccttgcagat

SEQ ID NO: 989060 - DNA, 15 bp, Homo sapiens
aatcccttgcagatc

SEQ ID NO: 989061 - DNA, 15 bp, Homo sapiens
atcccttgcagatcc

SEQ ID NO: 989062 - DNA, 15 bp, Homo sapiens
tcccttgcagatcct

SEQ ID NO: 989063 - DNA, 15 bp, Homo sapiens
cccttgcagatcctt

SEQ ID NO: 989064 - DNA, 15 bp, Homo sapiens
ccttgcagatccttg

SEQ ID NO: 989065 - DNA, 15 bp, Homo sapiens
cttgcagatccttga

SEQ ID NO: 989066 - DNA, 15 bp, Homo sapiens
ttgcagatccttgat

SEQ ID NO: 989067 - DNA, 15 bp, Homo sapiens
tgcagatccttgata

SEQ ID NO: 989068 - DNA, 15 bp, Homo sapiens
gcagatccttgataa

SEQ ID NO: 989069 - DNA, 15 bp, Homo sapiens
cagatccttgataaa

SEQ ID NO: 989070 - DNA, 15 bp, Homo sapiens
agatccttgataaat

SEQ ID NO: 989071 - DNA, 15 bp, Homo sapiens
gatccttgataaatg

SEQ ID NO: 989072 - DNA, 15 bp, Homo sapiens
atccttgataaatgc

SEQ ID NO: 989073 - DNA, 15 bp, Homo sapiens
tccttgataaatgcc

SEQ ID NO: 989074 - DNA, 15 bp, Homo sapiens
ccttgataaatgcct

SEQ ID NO: 989075 - DNA, 15 bp, Homo sapiens
cttgataaatgcctc

SEQ ID NO: 989076 - DNA, 15 bp, Homo sapiens
ttgataaatgcctca

SEQ ID NO: 989077 - DNA, 15 bp, Homo sapiens
tgataaatgcctcat

SEQ ID NO: 989078 - DNA, 15 bp, Homo sapiens
gataaatgcctcatg

SEQ ID NO: 989079 - DNA, 15 bp, Homo sapiens
ataaatgcctcatga

SEQ ID NO: 989080 - DNA, 15 bp, Homo sapiens
taaatgcctcatgaa

SEQ ID NO: 989081 - DNA, 15 bp, Homo sapiens
aaatgcctcatgaag

SEQ ID NO: 989082 - DNA, 15 bp, Homo sapiens
aatgcctcatgaaga

SEQ ID NO: 989083 - DNA, 15 bp, Homo sapiens
atgcctcatgaagac

SEQ ID NO: 989084 - DNA, 15 bp, Homo sapiens
tgcctcatgaagacc

SEQ ID NO: 989085 - DNA, 15 bp, Homo sapiens
gcctcatgaagacca

SEQ ID NO: 989086 - DNA, 15 bp, Homo sapiens
cctcatgaagaccaa

SEQ ID NO: 989087 - DNA, 15 bp, Homo sapiens
ctcatgaagaccaat

SEQ ID NO: 989088 - DNA, 15 bp, Homo sapiens
tcatgaagaccaatc

SEQ ID NO: 989089 - DNA, 15 bp, Homo sapiens
catgaagaccaatct

SEQ ID NO: 989090 - DNA, 15 bp, Homo sapiens
atgaagaccaatctc

SEQ ID NO: 989091 - DNA, 15 bp, Homo sapiens
tgaagaccaatctct

SEQ ID NO: 989092 - DNA, 15 bp, Homo sapiens
gaagaccaatctctt

SEQ ID NO: 989093 - DNA, 15 bp, Homo sapiens
aagaccaatctcttg

SEQ ID NO: 989094 - DNA, 15 bp, Homo sapiens
agaccaatctcttga

SEQ ID NO: 989095 - DNA, 15 bp, Homo sapiens
gaccaatctcttgaa

SEQ ID NO: 989096 - DNA, 15 bp, Homo sapiens
accaatctcttgaat

SEQ ID NO: 989097 - DNA, 15 bp, Homo sapiens
ccaatctcttgaatc

SEQ ID NO: 989098 - DNA, 15 bp, Homo sapiens
caatctcttgaatcc

SEQ ID NO: 989099 - DNA, 15 bp, Homo sapiens
aatctcttgaatccc

SEQ ID NO: 989100 - DNA, 15 bp, Homo sapiens
atctcttgaatccca

SEQ ID NO: 989101 - DNA, 15 bp, Homo sapiens
tctcttgaatcccat

SEQ ID NO: 989102 - DNA, 15 bp, Homo sapiens
ctcttgaatcccata

SEQ ID NO: 989103 - DNA, 15 bp, Homo sapiens
tcttgaatcccatat

SEQ ID NO: 989104 - DNA, 15 bp, Homo sapiens
cttgaatcccatatc

SEQ ID NO: 989105 - DNA, 15 bp, Homo sapiens
ttgaatcccatatct

SEQ ID NO: 989106 - DNA, 15 bp, Homo sapiens
tgaatcccatatcta

SEQ ID NO: 989107 - DNA, 15 bp, Homo sapiens
gaatcccatatctac

SEQ ID NO: 989108 - DNA, 15 bp, Homo sapiens
aatcccatatctacc

SEQ ID NO: 989109 - DNA, 15 bp, Homo sapiens
atcccatatctaccc

SEQ ID NO: 989110 - DNA, 15 bp, Homo sapiens
tcccatatctaccca

SEQ ID NO: 989111 - DNA, 15 bp, Homo sapiens
cccatatctacccag

SEQ ID NO: 989112 - DNA, 15 bp, Homo sapiens
ccatatctacccaga

SEQ ID NO: 989113 - DNA, 15 bp, Homo sapiens
catatctacccagaa

SEQ ID NO: 989114 - DNA, 15 bp, Homo sapiens
atatctacccagaat

SEQ ID NO: 989115 - DNA, 15 bp, Homo sapiens
tatctacccagaatt

SEQ ID NO: 989116 - DNA, 15 bp, Homo sapiens
atctacccagaatta

SEQ ID NO: 989117 - DNA, 15 bp, Homo sapiens
tctacccagaattaa

SEQ ID NO: 989118 - DNA, 15 bp, Homo sapiens
ctacccagaattaac

SEQ ID NO: 989119 - DNA, 15 bp, Homo sapiens
tacccagaattaact

SEQ ID NO: 989120 - DNA, 15 bp, Homo sapiens
acccagaattaactc

SEQ ID NO: 989121 - DNA, 15 bp, Homo sapiens
cccagaattaactcc

SEQ ID NO: 989122 - DNA, 15 bp, Homo sapiens
ccagaattaactcca

SEQ ID NO: 989123 - DNA, 15 bp, Homo sapiens
cagaattaactccat

SEQ ID NO: 989124 - DNA, 15 bp, Homo sapiens
agaattaactccatt

SEQ ID NO: 989125 - DNA, 15 bp, Homo sapiens
gaattaactccattc

SEQ ID NO: 989126 - DNA, 15 bp, Homo sapiens
aattaactccattcc

SEQ ID NO: 989127 - DNA, 15 bp, Homo sapiens
attaactccattcca

SEQ ID NO: 989128 - DNA, 15 bp, Homo sapiens
ttaactccattccag

SEQ ID NO: 989129 - DNA, 15 bp, Homo sapiens
taactccattccagt

SEQ ID NO: 989130 - DNA, 15 bp, Homo sapiens
aactccattccagtc

SEQ ID NO: 989131 - DNA, 15 bp, Homo sapiens
actccattccagtct

SEQ ID NO: 989132 - DNA, 15 bp, Homo sapiens
ctccattccagtctc

SEQ ID NO: 989133 - DNA, 15 bp, Homo sapiens
tccattccagtctct

SEQ ID NO: 989134 - DNA, 15 bp, Homo sapiens
ccattccagtctctg

SEQ ID NO: 989135 - DNA, 15 bp, Homo sapiens
cattccagtctctgc

SEQ ID NO: 989136 - DNA, 15 bp, Homo sapiens
attccagtctctgca

SEQ ID NO: 989137 - DNA, 15 bp, Homo sapiens
ttccagtctctgcat

SEQ ID NO: 989138 - DNA, 15 bp, Homo sapiens
tccagtctctgcatg

SEQ ID NO: 989139 - DNA, 15 bp, Homo sapiens
ccagtctctgcatgt

SEQ ID NO: 989140 - DNA, 15 bp, Homo sapiens
cagtctctgcatgta

SEQ ID NO: 989141 - DNA, 15 bp, Homo sapiens
agtctctgcatgtaa

SEQ ID NO: 989142 - DNA, 15 bp, Homo sapiens
gtctctgcatgtaat

SEQ ID NO: 989143 - DNA, 15 bp, Homo sapiens
tctctgcatgtaatc

SEQ ID NO: 989144 - DNA, 15 bp, Homo sapiens
ctctgcatgtaatca

SEQ ID NO: 989145 - DNA, 15 bp, Homo sapiens
tctgcatgtaatcag

SEQ ID NO: 989146 - DNA, 15 bp, Homo sapiens
ctgcatgtaatcagt

SEQ ID NO: 989147 - DNA, 15 bp, Homo sapiens
tgcatgtaatcagtt

SEQ ID NO: 989148 - DNA, 15 bp, Homo sapiens
gcatgtaatcagttt

SEQ ID NO: 989149 - DNA, 15 bp, Homo sapiens
catgtaatcagtttt

SEQ ID NO: 989150 - DNA, 15 bp, Homo sapiens
atgtaatcagtttta

SEQ ID NO: 989151 - DNA, 15 bp, Homo sapiens
tgtaatcagttttat

SEQ ID NO: 989152 - DNA, 15 bp, Homo sapiens
gtaatcagttttatc

SEQ ID NO: 989153 - DNA, 15 bp, Homo sapiens
taatcagttttatcc

SEQ ID NO: 989154 - DNA, 15 bp, Homo sapiens
aatcagttttatcca

SEQ ID NO: 989155 - DNA, 15 bp, Homo sapiens
atcagttttatccac

SEQ ID NO: 989156 - DNA, 15 bp, Homo sapiens
tcagttttatccaca

SEQ ID NO: 989157 - DNA, 15 bp, Homo sapiens
cagttttatccacag

SEQ ID NO: 989158 - DNA, 15 bp, Homo sapiens
agttttatccacaga

SEQ ID NO: 989159 - DNA, 15 bp, Homo sapiens
gttttatccacagaa

SEQ ID NO: 989160 - DNA, 15 bp, Homo sapiens
ttttatccacagaaa

SEQ ID NO: 989161 - DNA, 15 bp, Homo sapiens
tttatccacagaaac

SEQ ID NO: 989162 - DNA, 15 bp, Homo sapiens
ttatccacagaaaca

SEQ ID NO: 989163 - DNA, 15 bp, Homo sapiens
tatccacagaaacat

SEQ ID NO: 989164 - DNA, 15 bp, Homo sapiens
atccacagaaacatt

SEQ ID NO: 989165 - DNA, 15 bp, Homo sapiens
tccacagaaacattt

SEQ ID NO: 989166 - DNA, 15 bp, Homo sapiens
ccacagaaacatttt

SEQ ID NO: 989167 - DNA, 15 bp, Homo sapiens
cacagaaacattttc

SEQ ID NO: 989168 - DNA, 15 bp, Homo sapiens
acagaaacattttca

SEQ ID NO: 989169 - DNA, 15 bp, Homo sapiens
cagaaacattttcat

SEQ ID NO: 989170 - DNA, 15 bp, Homo sapiens
agaaacattttcatt

SEQ ID NO: 989171 - DNA, 15 bp, Homo sapiens
gaaacattttcattt

SEQ ID NO: 989172 - DNA, 15 bp, Homo sapiens
aaacattttcatttt

SEQ ID NO: 989173 - DNA, 15 bp, Homo sapiens
aacattttcatttta

SEQ ID NO: 989174 - DNA, 15 bp, Homo sapiens
acattttcattttag

SEQ ID NO: 989175 - DNA, 15 bp, Homo sapiens
cattttcattttagg

SEQ ID NO: 989176 - DNA, 15 bp, Homo sapiens
attttcattttagga

SEQ ID NO: 989177 - DNA, 15 bp, Homo sapiens
ttttcattttaggaa

SEQ ID NO: 989178 - DNA, 15 bp, Homo sapiens
tttcattttaggaaa

SEQ ID NO: 989179 - DNA, 15 bp, Homo sapiens
ttcattttaggaaat

SEQ ID NO: 989180 - DNA, 15 bp, Homo sapiens
tcattttaggaaatc

SEQ ID NO: 989181 - DNA, 15 bp, Homo sapiens
cattttaggaaatcc

SEQ ID NO: 989182 - DNA, 15 bp, Homo sapiens
attttaggaaatccc

SEQ ID NO: 989183 - DNA, 15 bp, Homo sapiens
ttttaggaaatccct

SEQ ID NO: 989184 - DNA, 15 bp, Homo sapiens
tttaggaaatccctg

SEQ ID NO: 989185 - DNA, 15 bp, Homo sapiens
ttaggaaatccctgg

SEQ ID NO: 989186 - DNA, 15 bp, Homo sapiens
taggaaatccctggt

SEQ ID NO: 989187 - DNA, 15 bp, Homo sapiens
aggaaatccctggtt

SEQ ID NO: 989188 - DNA, 15 bp, Homo sapiens
ggaaatccctggttt

SEQ ID NO: 989189 - DNA, 15 bp, Homo sapiens
gaaatccctggtttt

SEQ ID NO: 989190 - DNA, 15 bp, Homo sapiens
aaatccctggtttta

SEQ ID NO: 989191 - DNA, 15 bp, Homo sapiens
aatccctggttttaa

SEQ ID NO: 989192 - DNA, 15 bp, Homo sapiens
atccctggttttaag

SEQ ID NO: 989193 - DNA, 15 bp, Homo sapiens
tccctggttttaagt

SEQ ID NO: 989194 - DNA, 15 bp, Homo sapiens
ccctggttttaagta

SEQ ID NO: 989195 - DNA, 15 bp, Homo sapiens
cctggttttaagtat

SEQ ID NO: 989196 - DNA, 15 bp, Homo sapiens
ctggttttaagtatc

SEQ ID NO: 989197 - DNA, 15 bp, Homo sapiens
tggttttaagtatca

SEQ ID NO: 989198 - DNA, 15 bp, Homo sapiens
ggttttaagtatcaa

SEQ ID NO: 989199 - DNA, 15 bp, Homo sapiens
gttttaagtatcaat

SEQ ID NO: 989200 - DNA, 15 bp, Homo sapiens
ttttaagtatcaatc

SEQ ID NO: 989201 - DNA, 15 bp, Homo sapiens
tttaagtatcaatcc

SEQ ID NO: 989202 - DNA, 15 bp, Homo sapiens
ttaagtatcaatcct

SEQ ID NO: 989203 - DNA, 15 bp, Homo sapiens
taagtatcaatcctt

SEQ ID NO: 989204 - DNA, 15 bp, Homo sapiens
aagtatcaatccttg

SEQ ID NO: 989205 - DNA, 15 bp, Homo sapiens
agtatcaatccttgt

SEQ ID NO: 989206 - DNA, 15 bp, Homo sapiens
gtatcaatccttgtt

SEQ ID NO: 989207 - DNA, 15 bp, Homo sapiens
tatcaatccttgttc

SEQ ID NO: 989208 - DNA, 15 bp, Homo sapiens
atcaatccttgttca

SEQ ID NO: 989209 - DNA, 15 bp, Homo sapiens
tcaatccttgttcag

SEQ ID NO: 989210 - DNA, 15 bp, Homo sapiens
caatccttgttcagc

SEQ ID NO: 989211 - DNA, 15 bp, Homo sapiens
aatccttgttcagct

SEQ ID NO: 989212 - DNA, 15 bp, Homo sapiens
atccttgttcagctg

SEQ ID NO: 989213 - DNA, 15 bp, Homo sapiens
tccttgttcagctgg

SEQ ID NO: 989214 - DNA, 15 bp, Homo sapiens
ccttgttcagctgga

SEQ ID NO: 989215 - DNA, 15 bp, Homo sapiens
cttgttcagctggac

SEQ ID NO: 989216 - DNA, 15 bp, Homo sapiens
ttgttcagctggaca

SEQ ID NO: 989217 - DNA, 15 bp, Homo sapiens
tgttcagctggacaa

SEQ ID NO: 989218 - DNA, 15 bp, Homo sapiens
gttcagctggacaat

SEQ ID NO: 989219 - DNA, 15 bp, Homo sapiens
ttcagctggacaata

SEQ ID NO: 989220 - DNA, 15 bp, Homo sapiens
tcagctggacaatat

SEQ ID NO: 989221 - DNA, 15 bp, Homo sapiens
cagctggacaatatg

SEQ ID NO: 989222 - DNA, 15 bp, Homo sapiens
agctggacaatatga

SEQ ID NO: 989223 - DNA, 15 bp, Homo sapiens
gctggacaatatgaa

SEQ ID NO: 989224 - DNA, 15 bp, Homo sapiens
ctggacaatatgaat

SEQ ID NO: 989225 - DNA, 15 bp, Homo sapiens
tggacaatatgaatc

SEQ ID NO: 989226 - DNA, 15 bp, Homo sapiens
ggacaatatgaatct

SEQ ID NO: 989227 - DNA, 15 bp, Homo sapiens
gacaatatgaatctt

SEQ ID NO: 989228 - DNA, 15 bp, Homo sapiens
acaatatgaatcttt

SEQ ID NO: 989229 - DNA, 15 bp, Homo sapiens
caatatgaatctttt

SEQ ID NO: 989230 - DNA, 15 bp, Homo sapiens
aatatgaatcttttc

SEQ ID NO: 989231 - DNA, 15 bp, Homo sapiens
atatgaatcttttcc

SEQ ID NO: 989232 - DNA, 15 bp, Homo sapiens
tatgaatcttttcca

SEQ ID NO: 989233 - DNA, 15 bp, Homo sapiens
atgaatcttttccac

SEQ ID NO: 989234 - DNA, 15 bp, Homo sapiens
tgaatcttttccact

SEQ ID NO: 989235 - DNA, 15 bp, Homo sapiens
gaatcttttccactg

SEQ ID NO: 989236 - DNA, 15 bp, Homo sapiens
aatcttttccactga

SEQ ID NO: 989237 - DNA, 15 bp, Homo sapiens
atcttttccactgaa

SEQ ID NO: 989238 - DNA, 15 bp, Homo sapiens
tcttttccactgaag

SEQ ID NO: 989239 - DNA, 15 bp, Homo sapiens
cttttccactgaagt

SEQ ID NO: 989240 - DNA, 15 bp, Homo sapiens
ttttccactgaagtt

SEQ ID NO: 989241 - DNA, 15 bp, Homo sapiens
tttccactgaagtta

SEQ ID NO: 989242 - DNA, 15 bp, Homo sapiens
ttccactgaagttag

SEQ ID NO: 989243 - DNA, 15 bp, Homo sapiens
tccactgaagttagg

SEQ ID NO: 989244 - DNA, 15 bp, Homo sapiens
ccactgaagttaggg

SEQ ID NO: 989245 - DNA, 15 bp, Homo sapiens
cactgaagttaggga

SEQ ID NO: 989246 - DNA, 15 bp, Homo sapiens
actgaagttagggat

SEQ ID NO: 989247 - DNA, 15 bp, Homo sapiens
ctgaagttagggatg

SEQ ID NO: 989248 - DNA, 15 bp, Homo sapiens
tgaagttagggatga

SEQ ID NO: 989249 - DNA, 15 bp, Homo sapiens
gaagttagggatgac

SEQ ID NO: 989250 - DNA, 15 bp, Homo sapiens
aagttagggatgact

SEQ ID NO: 989251 - DNA, 15 bp, Homo sapiens
agttagggatgactg

SEQ ID NO: 989252 - DNA, 15 bp, Homo sapiens
gttagggatgactgt

SEQ ID NO: 989253 - DNA, 15 bp, Homo sapiens
ttagggatgactgtg

SEQ ID NO: 989254 - DNA, 15 bp, Homo sapiens
tagggatgactgtga

SEQ ID NO: 989255 - DNA, 15 bp, Homo sapiens
agggatgactgtgat

SEQ ID NO: 989256 - DNA, 15 bp, Homo sapiens
gggatgactgtgatt

SEQ ID NO: 989257 - DNA, 15 bp, Homo sapiens
ggatgactgtgattt

SEQ ID NO: 989258 - DNA, 15 bp, Homo sapiens
gatgactgtgatttt

SEQ ID NO: 989259 - DNA, 15 bp, Homo sapiens
atgactgtgattttc

SEQ ID NO: 989260 - DNA, 15 bp, Homo sapiens
tgactgtgattttca

SEQ ID NO: 989261 - DNA, 15 bp, Homo sapiens
gactgtgattttcag

SEQ ID NO: 989262 - DNA, 15 bp, Homo sapiens
actgtgattttcaga

SEQ ID NO: 989263 - DNA, 15 bp, Homo sapiens
ctgtgattttcagaa

SEQ ID NO: 989264 - DNA, 15 bp, Homo sapiens
tgtgattttcagaac

SEQ ID NO: 989265 - DNA, 15 bp, Homo sapiens
gtgattttcagaaca

SEQ ID NO: 989266 - DNA, 15 bp, Homo sapiens
tgattttcagaacac

SEQ ID NO: 989267 - DNA, 15 bp, Homo sapiens
gattttcagaacacg

SEQ ID NO: 989268 - DNA, 15 bp, Homo sapiens
attttcagaacacgt

SEQ ID NO: 989269 - DNA, 15 bp, Homo sapiens
ttttcagaacacgtc

SEQ ID NO: 989270 - DNA, 15 bp, Homo sapiens
tttcagaacacgtcc

SEQ ID NO: 989271 - DNA, 15 bp, Homo sapiens
ttcagaacacgtcca

SEQ ID NO: 989272 - DNA, 15 bp, Homo sapiens
tcagaacacgtccag

SEQ ID NO: 989273 - DNA, 15 bp, Homo sapiens
cagaacacgtccaga

SEQ ID NO: 989274 - DNA, 15 bp, Homo sapiens
agaacacgtccagaa

SEQ ID NO: 989275 - DNA, 15 bp, Homo sapiens
gaacacgtccagaat

SEQ ID NO: 989276 - DNA, 15 bp, Homo sapiens
aacacgtccagaatt

SEQ ID NO: 989277 - DNA, 15 bp, Homo sapiens
acacgtccagaattt

SEQ ID NO: 989278 - DNA, 15 bp, Homo sapiens
cacgtccagaatttt

SEQ ID NO: 989279 - DNA, 15 bp, Homo sapiens
acgtccagaattttt

SEQ ID NO: 989280 - DNA, 15 bp, Homo sapiens
cgtccagaatttttc

SEQ ID NO: 989281 - DNA, 15 bp, Homo sapiens
gtccagaatttttca

SEQ ID NO: 989282 - DNA, 15 bp, Homo sapiens
tccagaatttttcat

SEQ ID NO: 989283 - DNA, 15 bp, Homo sapiens
ccagaatttttcatc

SEQ ID NO: 989284 - DNA, 15 bp, Homo sapiens
cagaatttttcatca

SEQ ID NO: 989285 - DNA, 15 bp, Homo sapiens
agaatttttcatcaa

SEQ ID NO: 989286 - DNA, 15 bp, Homo sapiens
gaatttttcatcaag

SEQ ID NO: 989287 - DNA, 15 bp, Homo sapiens
aatttttcatcaaga

SEQ ID NO: 989288 - DNA, 15 bp, Homo sapiens
atttttcatcaagaa

SEQ ID NO: 989289 - DNA, 15 bp, Homo sapiens
tttttcatcaagaag

SEQ ID NO: 989290 - DNA, 15 bp, Homo sapiens
ttttcatcaagaagg

SEQ ID NO: 989291 - DNA, 15 bp, Homo sapiens
tttcatcaagaaggt

SEQ ID NO: 989292 - DNA, 15 bp, Homo sapiens
ttcatcaagaaggta

SEQ ID NO: 989293 - DNA, 15 bp, Homo sapiens
tcatcaagaaggtag

SEQ ID NO: 989294 - DNA, 15 bp, Homo sapiens
catcaagaaggtagc

SEQ ID NO: 989295 - DNA, 15 bp, Homo sapiens
atcaagaaggtagct

SEQ ID NO: 989296 - DNA, 15 bp, Homo sapiens
tcaagaaggtagctt

SEQ ID NO: 989297 - DNA, 15 bp, Homo sapiens
caagaaggtagcttg

SEQ ID NO: 989298 - DNA, 15 bp, Homo sapiens
aagaaggtagcttga

SEQ ID NO: 989299 - DNA, 15 bp, Homo sapiens
agaaggtagcttgag

SEQ ID NO: 989300 - DNA, 15 bp, Homo sapiens
gaaggtagcttgagc

SEQ ID NO: 989301 - DNA, 15 bp, Homo sapiens
aaggtagcttgagcc

SEQ ID NO: 989302 - DNA, 15 bp, Homo sapiens
aggtagcttgagcct

SEQ ID NO: 989303 - DNA, 15 bp, Homo sapiens
ggtagcttgagcctg

SEQ ID NO: 989304 - DNA, 15 bp, Homo sapiens
gtagcttgagcctga

SEQ ID NO: 989305 - DNA, 15 bp, Homo sapiens
tagcttgagcctgaa

SEQ ID NO: 989306 - DNA, 15 bp, Homo sapiens
agcttgagcctgaaa

SEQ ID NO: 989307 - DNA, 15 bp, Homo sapiens
gcttgagcctgaaat

SEQ ID NO: 989308 - DNA, 15 bp, Homo sapiens
cttgagcctgaaatg

SEQ ID NO: 989309 - DNA, 15 bp, Homo sapiens
ttgagcctgaaatgc

SEQ ID NO: 989310 - DNA, 15 bp, Homo sapiens
tgagcctgaaatgca

SEQ ID NO: 989311 - DNA, 15 bp, Homo sapiens
gagcctgaaatgcaa

SEQ ID NO: 989312 - DNA, 15 bp, Homo sapiens
agcctgaaatgcaaa

SEQ ID NO: 989313 - DNA, 15 bp, Homo sapiens
gcctgaaatgcaaaa

SEQ ID NO: 989314 - DNA, 15 bp, Homo sapiens
cctgaaatgcaaaac

SEQ ID NO: 989315 - DNA, 15 bp, Homo sapiens
ctgaaatgcaaaacc

SEQ ID NO: 989316 - DNA, 15 bp, Homo sapiens
tgaaatgcaaaaccc

SEQ ID NO: 989317 - DNA, 15 bp, Homo sapiens
gaaatgcaaaaccca

SEQ ID NO: 989318 - DNA, 15 bp, Homo sapiens
aaatgcaaaacccat

SEQ ID NO: 989319 - DNA, 15 bp, Homo sapiens
aatgcaaaacccatg

SEQ ID NO: 989320 - DNA, 15 bp, Homo sapiens
atgcaaaacccatgg

SEQ ID NO: 989321 - DNA, 15 bp, Homo sapiens
tgcaaaacccatgga

SEQ ID NO: 989322 - DNA, 15 bp, Homo sapiens
gcaaaacccatggag

SEQ ID NO: 989323 - DNA, 15 bp, Homo sapiens
caaaacccatggagg

SEQ ID NO: 989324 - DNA, 15 bp, Homo sapiens
aaaacccatggagga

SEQ ID NO: 989325 - DNA, 15 bp, Homo sapiens
aaacccatggaggaa

SEQ ID NO: 989326 - DNA, 15 bp, Homo sapiens
aacccatggaggaat

SEQ ID NO: 989327 - DNA, 15 bp, Homo sapiens
acccatggaggaatt

SEQ ID NO: 989328 - DNA, 15 bp, Homo sapiens
cccatggaggaattc

SEQ ID NO: 989329 - DNA, 15 bp, Homo sapiens
ccatggaggaattct

SEQ ID NO: 989330 - DNA, 15 bp, Homo sapiens
catggaggaattctg

SEQ ID NO: 989331 - DNA, 15 bp, Homo sapiens
atggaggaattctga

SEQ ID NO: 989332 - DNA, 15 bp, Homo sapiens
tggaggaattctgaa

SEQ ID NO: 989333 - DNA, 15 bp, Homo sapiens
ggaggaattctgaag

SEQ ID NO: 989334 - DNA, 15 bp, Homo sapiens
gaggaattctgaagc

SEQ ID NO: 989335 - DNA, 15 bp, Homo sapiens
aggaattctgaagcc

SEQ ID NO: 989336 - DNA, 15 bp, Homo sapiens
ggaattctgaagcca

SEQ ID NO: 989337 - DNA, 15 bp, Homo sapiens
gaattctgaagccat

SEQ ID NO: 989338 - DNA, 15 bp, Homo sapiens
aattctgaagccatt

SEQ ID NO: 989339 - DNA, 15 bp, Homo sapiens
attctgaagccattg

SEQ ID NO: 989340 - DNA, 15 bp, Homo sapiens
ttctgaagccattgt

SEQ ID NO: 989341 - DNA, 15 bp, Homo sapiens
tctgaagccattgtc

SEQ ID NO: 989342 - DNA, 15 bp, Homo sapiens
ctgaagccattgtct

SEQ ID NO: 989343 - DNA, 15 bp, Homo sapiens
tgaagccattgtctc

SEQ ID NO: 989344 - DNA, 15 bp, Homo sapiens
gaagccattgtctcc

SEQ ID NO: 989345 - DNA, 15 bp, Homo sapiens
aagccattgtctcct

SEQ ID NO: 989346 - DNA, 15 bp, Homo sapiens
agccattgtctcctt

SEQ ID NO: 989347 - DNA, 15 bp, Homo sapiens
gccattgtctccttg

SEQ ID NO: 989348 - DNA, 15 bp, Homo sapiens
ccattgtctccttga

SEQ ID NO: 989349 - DNA, 15 bp, Homo sapiens
cattgtctccttgag

SEQ ID NO: 989350 - DNA, 15 bp, Homo sapiens
attgtctccttgagt

SEQ ID NO: 989351 - DNA, 15 bp, Homo sapiens
ttgtctccttgagta

SEQ ID NO: 989352 - DNA, 15 bp, Homo sapiens
tgtctccttgagtac

SEQ ID NO: 989353 - DNA, 15 bp, Homo sapiens
gtctccttgagtacc

SEQ ID NO: 989354 - DNA, 15 bp, Homo sapiens
tctccttgagtacca

SEQ ID NO: 989355 - DNA, 15 bp, Homo sapiens
ctccttgagtaccaa

SEQ ID NO: 989356 - DNA, 15 bp, Homo sapiens
tccttgagtaccaac

SEQ ID NO: 989357 - DNA, 15 bp, Homo sapiens
ccttgagtaccaaca

SEQ ID NO: 989358 - DNA, 15 bp, Homo sapiens
cttgagtaccaacag

SEQ ID NO: 989359 - DNA, 15 bp, Homo sapiens
ttgagtaccaacagg

SEQ ID NO: 989360 - DNA, 15 bp, Homo sapiens
tgagtaccaacaggg

SEQ ID NO: 989361 - DNA, 15 bp, Homo sapiens
gagtaccaacagggt

SEQ ID NO: 989362 - DNA, 15 bp, Homo sapiens
agtaccaacagggtc

SEQ ID NO: 989363 - DNA, 15 bp, Homo sapiens
gtaccaacagggtca

SEQ ID NO: 989364 - DNA, 15 bp, Homo sapiens
taccaacagggtcag

SEQ ID NO: 989365 - DNA, 15 bp, Homo sapiens
accaacagggtcagg

SEQ ID NO: 989366 - DNA, 15 bp, Homo sapiens
ccaacagggtcaggg

SEQ ID NO: 989367 - DNA, 15 bp, Homo sapiens
caacagggtcaggga

SEQ ID NO: 989368 - DNA, 15 bp, Homo sapiens
aacagggtcagggaa

SEQ ID NO: 989369 - DNA, 15 bp, Homo sapiens
acagggtcagggaag

SEQ ID NO: 989370 - DNA, 15 bp, Homo sapiens
cagggtcagggaaga

SEQ ID NO: 989371 - DNA, 15 bp, Homo sapiens
agggtcagggaagac

SEQ ID NO: 989372 - DNA, 15 bp, Homo sapiens
gggtcagggaagact

SEQ ID NO: 989373 - DNA, 15 bp, Homo sapiens
ggtcagggaagactg

SEQ ID NO: 989374 - DNA, 15 bp, Homo sapiens
gtcagggaagactgg

SEQ ID NO: 989375 - DNA, 15 bp, Homo sapiens
tcagggaagactggg

SEQ ID NO: 989376 - DNA, 15 bp, Homo sapiens
cagggaagactgggc

SEQ ID NO: 989377 - DNA, 15 bp, Homo sapiens
agggaagactgggcc

SEQ ID NO: 989378 - DNA, 15 bp, Homo sapiens
gggaagactgggcct

SEQ ID NO: 989379 - DNA, 15 bp, Homo sapiens
ggaagactgggcctc

SEQ ID NO: 989380 - DNA, 15 bp, Homo sapiens
gaagactgggcctcc

SEQ ID NO: 989381 - DNA, 15 bp, Homo sapiens
aagactgggcctcct

SEQ ID NO: 989382 - DNA, 15 bp, Homo sapiens
agactgggcctcctg

SEQ ID NO: 989383 - DNA, 15 bp, Homo sapiens
gactgggcctcctga

SEQ ID NO: 989384 - DNA, 15 bp, Homo sapiens
actgggcctcctgaa

SEQ ID NO: 989385 - DNA, 15 bp, Homo sapiens
ctgggcctcctgaat

SEQ ID NO: 989386 - DNA, 15 bp, Homo sapiens
tgggcctcctgaatt

SEQ ID NO: 989387 - DNA, 15 bp, Homo sapiens
gggcctcctgaattt

SEQ ID NO: 989388 - DNA, 15 bp, Homo sapiens
ggcctcctgaattta

SEQ ID NO: 989389 - DNA, 15 bp, Homo sapiens
gcctcctgaatttat

SEQ ID NO: 989390 - DNA, 15 bp, Homo sapiens
cctcctgaatttatt

SEQ ID NO: 989391 - DNA, 15 bp, Homo sapiens
ctcctgaatttatta

SEQ ID NO: 989392 - DNA, 15 bp, Homo sapiens
tcctgaatttattat

SEQ ID NO: 989393 - DNA, 15 bp, Homo sapiens
cctgaatttattatt

SEQ ID NO: 989394 - DNA, 15 bp, Homo sapiens
ctgaatttattattg

SEQ ID NO: 989395 - DNA, 15 bp, Homo sapiens
tgaatttattattgt

SEQ ID NO: 989396 - DNA, 15 bp, Homo sapiens
gaatttattattgtt

SEQ ID NO: 989397 - DNA, 15 bp, Homo sapiens
aatttattattgttc

SEQ ID NO: 989398 - DNA, 15 bp, Homo sapiens
atttattattgttct

SEQ ID NO: 989399 - DNA, 15 bp, Homo sapiens
tttattattgttctt

SEQ ID NO: 989400 - DNA, 15 bp, Homo sapiens
ttattattgttcttt

SEQ ID NO: 989401 - DNA, 15 bp, Homo sapiens
tattattgttcttta

SEQ ID NO: 989402 - DNA, 15 bp, Homo sapiens
attattgttctttaa

SEQ ID NO: 989403 - DNA, 15 bp, Homo sapiens
ttattgttctttaag

SEQ ID NO: 989404 - DNA, 15 bp, Homo sapiens
tattgttctttaaga

SEQ ID NO: 989405 - DNA, 15 bp, Homo sapiens
attgttctttaagaa

SEQ ID NO: 989406 - DNA, 15 bp, Homo sapiens
ttgttctttaagaat

SEQ ID NO: 989407 - DNA, 15 bp, Homo sapiens
tgttctttaagaatt

SEQ ID NO: 989408 - DNA, 15 bp, Homo sapiens
gttctttaagaatta

SEQ ID NO: 989409 - DNA, 15 bp, Homo sapiens
ttctttaagaattac

SEQ ID NO: 989410 - DNA, 15 bp, Homo sapiens
tctttaagaattaca

SEQ ID NO: 989411 - DNA, 15 bp, Homo sapiens
ctttaagaattacag

SEQ ID NO: 989412 - DNA, 15 bp, Homo sapiens
tttaagaattacagg

SEQ ID NO: 989413 - DNA, 15 bp, Homo sapiens
ttaagaattacaggt

SEQ ID NO: 989414 - DNA, 15 bp, Homo sapiens
taagaattacaggtt

SEQ ID NO: 989415 - DNA, 15 bp, Homo sapiens
aagaattacaggttg

SEQ ID NO: 989416 - DNA, 15 bp, Homo sapiens
agaattacaggttga

SEQ ID NO: 989417 - DNA, 15 bp, Homo sapiens
gaattacaggttgag

SEQ ID NO: 989418 - DNA, 15 bp, Homo sapiens
aattacaggttgagg

SEQ ID NO: 989419 - DNA, 15 bp, Homo sapiens
attacaggttgaggt

SEQ ID NO: 989420 - DNA, 15 bp, Homo sapiens
ttacaggttgaggta

SEQ ID NO: 989421 - DNA, 15 bp, Homo sapiens
tacaggttgaggtag

SEQ ID NO: 989422 - DNA, 15 bp, Homo sapiens
acaggttgaggtagt

SEQ ID NO: 989423 - DNA, 15 bp, Homo sapiens
caggttgaggtagtt

SEQ ID NO: 989424 - DNA, 15 bp, Homo sapiens
aggttgaggtagttg

SEQ ID NO: 989425 - DNA, 15 bp, Homo sapiens
ggttgaggtagttga

SEQ ID NO: 989426 - DNA, 15 bp, Homo sapiens
gttgaggtagttgat

SEQ ID NO: 989427 - DNA, 15 bp, Homo sapiens
ttgaggtagttgatg

SEQ ID NO: 989428 - DNA, 15 bp, Homo sapiens
tgaggtagttgatgg

SEQ ID NO: 989429 - DNA, 15 bp, Homo sapiens
gaggtagttgatggt

SEQ ID NO: 989430 - DNA, 15 bp, Homo sapiens
aggtagttgatggtg

SEQ ID NO: 989431 - DNA, 15 bp, Homo sapiens
ggtagttgatggtgg

SEQ ID NO: 989432 - DNA, 15 bp, Homo sapiens
gtagttgatggtggt

SEQ ID NO: 989433 - DNA, 15 bp, Homo sapiens
tagttgatggtggta

SEQ ID NO: 989434 - DNA, 15 bp, Homo sapiens
agttgatggtggtaa

SEQ ID NO: 989435 - DNA, 15 bp, Homo sapiens
gttgatggtggtaaa

SEQ ID NO: 989436 - DNA, 15 bp, Homo sapiens
ttgatggtggtaaac

SEQ ID NO: 989437 - DNA, 15 bp, Homo sapiens
tgatggtggtaaaca

SEQ ID NO: 989438 - DNA, 15 bp, Homo sapiens
gatggtggtaaacat

SEQ ID NO: 989439 - DNA, 15 bp, Homo sapiens
atggtggtaaacatt

SEQ ID NO: 989440 - DNA, 15 bp, Homo sapiens
tggtggtaaacattc

SEQ ID NO: 989441 - DNA, 15 bp, Homo sapiens
ggtggtaaacattct

SEQ ID NO: 989442 - DNA, 15 bp, Homo sapiens
gtggtaaacattctc

SEQ ID NO: 989443 - DNA, 15 bp, Homo sapiens
tggtaaacattctct

SEQ ID NO: 989444 - DNA, 15 bp, Homo sapiens
ggtaaacattctctc

SEQ ID NO: 989445 - DNA, 15 bp, Homo sapiens
gtaaacattctctca

SEQ ID NO: 989446 - DNA, 15 bp, Homo sapiens
taaacattctctcag

SEQ ID NO: 989447 - DNA, 15 bp, Homo sapiens
aaacattctctcagg

SEQ ID NO: 989448 - DNA, 15 bp, Homo sapiens
aacattctctcagga

SEQ ID NO: 989449 - DNA, 15 bp, Homo sapiens
acattctctcaggag

SEQ ID NO: 989450 - DNA, 15 bp, Homo sapiens
cattctctcaggaga

SEQ ID NO: 989451 - DNA, 15 bp, Homo sapiens
attctctcaggagac

SEQ ID NO: 989452 - DNA, 15 bp, Homo sapiens
ttctctcaggagaca

SEQ ID NO: 989453 - DNA, 15 bp, Homo sapiens
tctctcaggagacaa

SEQ ID NO: 989454 - DNA, 15 bp, Homo sapiens
ctctcaggagacaat

SEQ ID NO: 989455 - DNA, 15 bp, Homo sapiens
tctcaggagacaata

SEQ ID NO: 989456 - DNA, 15 bp, Homo sapiens
ctcaggagacaataa

SEQ ID NO: 989457 - DNA, 15 bp, Homo sapiens
tcaggagacaataac

SEQ ID NO: 989458 - DNA, 15 bp, Homo sapiens
caggagacaataact

SEQ ID NO: 989459 - DNA, 15 bp, Homo sapiens
aggagacaataactc

SEQ ID NO: 989460 - DNA, 15 bp, Homo sapiens
ggagacaataactcc

SEQ ID NO: 989461 - DNA, 15 bp, Homo sapiens
gagacaataactcca

SEQ ID NO: 989462 - DNA, 15 bp, Homo sapiens
agacaataactccag

SEQ ID NO: 989463 - DNA, 15 bp, Homo sapiens
gacaataactccagt

SEQ ID NO: 989464 - DNA, 15 bp, Homo sapiens
acaataactccagtg

SEQ ID NO: 989465 - DNA, 15 bp, Homo sapiens
caataactccagtga

SEQ ID NO: 989466 - DNA, 15 bp, Homo sapiens
aataactccagtgat

SEQ ID NO: 989467 - DNA, 15 bp, Homo sapiens
ataactccagtgatg

SEQ ID NO: 989468 - DNA, 15 bp, Homo sapiens
taactccagtgatgt

SEQ ID NO: 989469 - DNA, 15 bp, Homo sapiens
aactccagtgatgtt

SEQ ID NO: 989470 - DNA, 15 bp, Homo sapiens
actccagtgatgttc

SEQ ID NO: 989471 - DNA, 15 bp, Homo sapiens
ctccagtgatgttct

SEQ ID NO: 989472 - DNA, 15 bp, Homo sapiens
tccagtgatgttctt

SEQ ID NO: 989473 - DNA, 15 bp, Homo sapiens
ccagtgatgttcttc

SEQ ID NO: 989474 - DNA, 15 bp, Homo sapiens
cagtgatgttcttca

SEQ ID NO: 989475 - DNA, 15 bp, Homo sapiens
agtgatgttcttcaa

SEQ ID NO: 989476 - DNA, 15 bp, Homo sapiens
gtgatgttcttcaaa

SEQ ID NO: 989477 - DNA, 15 bp, Homo sapiens
tgatgttcttcaaag

SEQ ID NO: 989478 - DNA, 15 bp, Homo sapiens
gatgttcttcaaaga

SEQ ID NO: 989479 - DNA, 15 bp, Homo sapiens
atgttcttcaaagat

SEQ ID NO: 989480 - DNA, 15 bp, Homo sapiens
tgttcttcaaagatt

SEQ ID NO: 989481 - DNA, 15 bp, Homo sapiens
gttcttcaaagattt

SEQ ID NO: 989482 - DNA, 15 bp, Homo sapiens
ttcttcaaagatttt

SEQ ID NO: 989483 - DNA, 15 bp, Homo sapiens
tcttcaaagatttta

SEQ ID NO: 989484 - DNA, 15 bp, Homo sapiens
cttcaaagattttag

SEQ ID NO: 989485 - DNA, 15 bp, Homo sapiens
ttcaaagattttagc

SEQ ID NO: 989486 - DNA, 15 bp, Homo sapiens
tcaaagattttagca

SEQ ID NO: 989487 - DNA, 15 bp, Homo sapiens
caaagattttagcaa

SEQ ID NO: 989488 - DNA, 15 bp, Homo sapiens
aaagattttagcaaa

SEQ ID NO: 989489 - DNA, 15 bp, Homo sapiens
aagattttagcaaaa

SEQ ID NO: 989490 - DNA, 15 bp, Homo sapiens
agattttagcaaaaa

SEQ ID NO: 989491 - DNA, 15 bp, Homo sapiens
gattttagcaaaaac

SEQ ID NO: 989492 - DNA, 15 bp, Homo sapiens
attttagcaaaaaca

SEQ ID NO: 989493 - DNA, 15 bp, Homo sapiens
ttttagcaaaaacag

SEQ ID NO: 989494 - DNA, 15 bp, Homo sapiens
tttagcaaaaacaga

SEQ ID NO: 989495 - DNA, 15 bp, Homo sapiens
ttagcaaaaacagag

SEQ ID NO: 989496 - DNA, 15 bp, Homo sapiens
tagcaaaaacagagt

SEQ ID NO: 989497 - DNA, 15 bp, Homo sapiens
agcaaaaacagagta

SEQ ID NO: 989498 - DNA, 15 bp, Homo sapiens
gcaaaaacagagtaa

SEQ ID NO: 989499 - DNA, 15 bp, Homo sapiens
caaaaacagagtaaa

SEQ ID NO: 989500 - DNA, 15 bp, Homo sapiens
aaaaacagagtaaat

SEQ ID NO: 989501 - DNA, 15 bp, Homo sapiens
aaaacagagtaaata

SEQ ID NO: 989502 - DNA, 15 bp, Homo sapiens
aaacagagtaaatag

SEQ ID NO: 989503 - DNA, 15 bp, Homo sapiens
aacagagtaaatagc

SEQ ID NO: 989504 - DNA, 15 bp, Homo sapiens
acagagtaaatagca

SEQ ID NO: 989505 - DNA, 15 bp, Homo sapiens
cagagtaaatagcat

SEQ ID NO: 989506 - DNA, 15 bp, Homo sapiens
agagtaaatagcatt

SEQ ID NO: 989507 - DNA, 15 bp, Homo sapiens
gagtaaatagcattc

SEQ ID NO: 989508 - DNA, 15 bp, Homo sapiens
agtaaatagcattct

SEQ ID NO: 989509 - DNA, 15 bp, Homo sapiens
gtaaatagcattctc

SEQ ID NO: 989510 - DNA, 15 bp, Homo sapiens
taaatagcattctct

SEQ ID NO: 989511 - DNA, 15 bp, Homo sapiens
aaatagcattctcta

SEQ ID NO: 989512 - DNA, 15 bp, Homo sapiens
aatagcattctctat

SEQ ID NO: 989513 - DNA, 15 bp, Homo sapiens
atagcattctctatc

SEQ ID NO: 989514 - DNA, 15 bp, Homo sapiens
tagcattctctatca

SEQ ID NO: 989515 - DNA, 15 bp, Homo sapiens
agcattctctatcaa

SEQ ID NO: 989516 - DNA, 15 bp, Homo sapiens
gcattctctatcaat

SEQ ID NO: 989517 - DNA, 15 bp, Homo sapiens
cattctctatcaata

SEQ ID NO: 989518 - DNA, 15 bp, Homo sapiens
attctctatcaatat

SEQ ID NO: 989519 - DNA, 15 bp, Homo sapiens
ttctctatcaatata

SEQ ID NO: 989520 - DNA, 15 bp, Homo sapiens
tctctatcaatatat

SEQ ID NO: 989521 - DNA, 15 bp, Homo sapiens
ctctatcaatatata

SEQ ID NO: 989522 - DNA, 15 bp, Homo sapiens
tctatcaatatataa

SEQ ID NO: 989523 - DNA, 15 bp, Homo sapiens
ctatcaatatataaa

SEQ ID NO: 989524 - DNA, 15 bp, Homo sapiens
tatcaatatataaat

SEQ ID NO: 989525 - DNA, 15 bp, Homo sapiens
atcaatatataaatt

SEQ ID NO: 989526 - DNA, 15 bp, Homo sapiens
tcaatatataaattt

SEQ ID NO: 989527 - DNA, 15 bp, Homo sapiens
caatatataaattta

SEQ ID NO: 989528 - DNA, 15 bp, Homo sapiens
aatatataaatttaa

SEQ ID NO: 989529 - DNA, 15 bp, Homo sapiens
atatataaatttaaa

SEQ ID NO: 989530 - DNA, 15 bp, Homo sapiens
tatataaatttaaaa

SEQ ID NO: 989531 - DNA, 15 bp, Homo sapiens
atataaatttaaaaa

SEQ ID NO: 989532 - DNA, 15 bp, Homo sapiens
tataaatttaaaaaa

SEQ ID NO: 989533 - DNA, 15 bp, Homo sapiens
ataaatttaaaaaac

SEQ ID NO: 989534 - DNA, 15 bp, Homo sapiens
taaatttaaaaaact

SEQ ID NO: 989535 - DNA, 15 bp, Homo sapiens
aaatttaaaaaacta

SEQ ID NO: 989536 - DNA, 15 bp, Homo sapiens
aatttaaaaaactat

SEQ ID NO: 989537 - DNA, 15 bp, Homo sapiens
atttaaaaaactatc

SEQ ID NO: 989538 - DNA, 15 bp, Homo sapiens
tttaaaaaactatct

SEQ ID NO: 989539 - DNA, 15 bp, Homo sapiens
ttaaaaaactatctt

SEQ ID NO: 989540 - DNA, 15 bp, Homo sapiens
taaaaaactatcttt

SEQ ID NO: 989541 - DNA, 15 bp, Homo sapiens
aaaaaactatctttt

SEQ ID NO: 989542 - DNA, 15 bp, Homo sapiens
aaaaactatcttttt

SEQ ID NO: 989543 - DNA, 15 bp, Homo sapiens
aaaactatctttttg

SEQ ID NO: 989544 - DNA, 15 bp, Homo sapiens
aaactatctttttgc

SEQ ID NO: 989545 - DNA, 15 bp, Homo sapiens
aactatctttttgct

SEQ ID NO: 989546 - DNA, 15 bp, Homo sapiens
actatctttttgctt

SEQ ID NO: 989547 - DNA, 15 bp, Homo sapiens
ctatctttttgctta

SEQ ID NO: 989548 - DNA, 15 bp, Homo sapiens
tatctttttgcttac

SEQ ID NO: 989549 - DNA, 15 bp, Homo sapiens
atctttttgcttaca

SEQ ID NO: 989550 - DNA, 15 bp, Homo sapiens
tctttttgcttacag

SEQ ID NO: 989551 - DNA, 15 bp, Homo sapiens
ctttttgcttacagt

SEQ ID NO: 989552 - DNA, 15 bp, Homo sapiens
tttttgcttacagtt

SEQ ID NO: 989553 - DNA, 15 bp, Homo sapiens
ttttgcttacagttt

SEQ ID NO: 989554 - DNA, 15 bp, Homo sapiens
tttgcttacagtttt

SEQ ID NO: 989555 - DNA, 15 bp, Homo sapiens
ttgcttacagtttta

SEQ ID NO: 989556 - DNA, 15 bp, Homo sapiens
tgcttacagttttaa

SEQ ID NO: 989557 - DNA, 15 bp, Homo sapiens
gcttacagttttaaa

SEQ ID NO: 989558 - DNA, 15 bp, Homo sapiens
cttacagttttaaat

SEQ ID NO: 989559 - DNA, 15 bp, Homo sapiens
ttacagttttaaatt

SEQ ID NO: 989560 - DNA, 15 bp, Homo sapiens
tacagttttaaattc

SEQ ID NO: 989561 - DNA, 15 bp, Homo sapiens
acagttttaaattct

SEQ ID NO: 989562 - DNA, 15 bp, Homo sapiens
cagttttaaattctg

SEQ ID NO: 989563 - DNA, 15 bp, Homo sapiens
agttttaaattctga

SEQ ID NO: 989564 - DNA, 15 bp, Homo sapiens
gttttaaattctgaa

SEQ ID NO: 989565 - DNA, 15 bp, Homo sapiens
ttttaaattctgaac

SEQ ID NO: 989566 - DNA, 15 bp, Homo sapiens
tttaaattctgaaca

SEQ ID NO: 989567 - DNA, 15 bp, Homo sapiens
ttaaattctgaacaa

SEQ ID NO: 989568 - DNA, 15 bp, Homo sapiens
taaattctgaacaat

SEQ ID NO: 989569 - DNA, 15 bp, Homo sapiens
aaattctgaacaatt

SEQ ID NO: 989570 - DNA, 15 bp, Homo sapiens
aattctgaacaattc

SEQ ID NO: 989571 - DNA, 15 bp, Homo sapiens
attctgaacaattct

SEQ ID NO: 989572 - DNA, 15 bp, Homo sapiens
ttctgaacaattctc

SEQ ID NO: 989573 - DNA, 15 bp, Homo sapiens
tctgaacaattctct

SEQ ID NO: 989574 - DNA, 15 bp, Homo sapiens
ctgaacaattctctc

SEQ ID NO: 989575 - DNA, 15 bp, Homo sapiens
tgaacaattctctct

SEQ ID NO: 989576 - DNA, 15 bp, Homo sapiens
gaacaattctctctt

SEQ ID NO: 989577 - DNA, 15 bp, Homo sapiens
aacaattctctctta

SEQ ID NO: 989578 - DNA, 15 bp, Homo sapiens
acaattctctcttat

SEQ ID NO: 989579 - DNA, 15 bp, Homo sapiens
caattctctcttata

SEQ ID NO: 989580 - DNA, 15 bp, Homo sapiens
aattctctcttatat

SEQ ID NO: 989581 - DNA, 15 bp, Homo sapiens
attctctcttatatg

SEQ ID NO: 989582 - DNA, 15 bp, Homo sapiens
ttctctcttatatgt

SEQ ID NO: 989583 - DNA, 15 bp, Homo sapiens
tctctcttatatgtg

SEQ ID NO: 989584 - DNA, 15 bp, Homo sapiens
ctctcttatatgtgt

SEQ ID NO: 989585 - DNA, 15 bp, Homo sapiens
tctcttatatgtgta

SEQ ID NO: 989586 - DNA, 15 bp, Homo sapiens
ctcttatatgtgtat

SEQ ID NO: 989587 - DNA, 15 bp, Homo sapiens
tcttatatgtgtatt

SEQ ID NO: 989588 - DNA, 15 bp, Homo sapiens
cttatatgtgtattg

SEQ ID NO: 989589 - DNA, 15 bp, Homo sapiens
ttatatgtgtattgc

SEQ ID NO: 989590 - DNA, 15 bp, Homo sapiens
tatatgtgtattgct

SEQ ID NO: 989591 - DNA, 15 bp, Homo sapiens
atatgtgtattgcta

SEQ ID NO: 989592 - DNA, 15 bp, Homo sapiens
tatgtgtattgctaa

SEQ ID NO: 989593 - DNA, 15 bp, Homo sapiens
atgtgtattgctaat

SEQ ID NO: 989594 - DNA, 15 bp, Homo sapiens
tgtgtattgctaatc

SEQ ID NO: 989595 - DNA, 15 bp, Homo sapiens
gtgtattgctaatca

SEQ ID NO: 989596 - DNA, 15 bp, Homo sapiens
tgtattgctaatcat

SEQ ID NO: 989597 - DNA, 15 bp, Homo sapiens
gtattgctaatcatt

SEQ ID NO: 989598 - DNA, 15 bp, Homo sapiens
tattgctaatcatta

SEQ ID NO: 989599 - DNA, 416 bp, Homo sapiens
gacctcagcagtccctgctgaggaagctgccgggctccctgtgtaccactggccttcatgaacaaagctgacaccatcatgctccttcggacatattctgctagcataaagggacccccatctccccaaccgaattaggcagagctggccttccttctagcggagttcctaggagtgagttggtgccaccccttgtgaggcttgatccaaaaaccagaacctctccagaccagggatccatgtcctctaacacaagaggggcagacctaacctctaaaatccctcccactctaaccttcagcatccacagctcaaaacaaccaggatgcctcagaaacagcactcactggggcgagcaggattaggcttcagaaaaaccaggtagatccagtttcttctgtcagaaaatgtttttt

SEQ ID NO: 989600 - DNA, 3591 bp, Homo sapiens
agcggagtgattctcctgcctcagcctcctgagtagctgggattacaggcgccagccaccatgcccggctagtttttgtgtttttagtagagacgggatttcaccatgttgcccaggctggtctcaaactcctgatctcaggctcaagctaccttcttgatgaaaaattctggacgtgttctgaaaatcacagtcatccctaacttcagtggaaaagattcatattgtccagctgaacaaggattgatacttaaaaccagggatttcctaaaatgaaaatgtttctgtggataaaactgattacatgcagagactggaatggagttaattctgggtagatatgggattcaagagattggtcttcatgaggcatttatcaaggatctgcaagggatttagaggtgacggaagcacagtccttcctgggcagttgcctctagcctggtgggaggtgttcctcacacccaggactctcatccatggcaaaataaaaagtgagatatcgactgggcatggtggctcacgcctgtaatcccagcactttgggaggtcgaggcgggtggatcacctaggccaggagttcgagaccagcctggccaacatgacgaaaccccatttctactaaaaatacaaaaattagccatgtgtggtggaatgcacctgaagtctcagctactcgggaggctgaggcacaataattgcttggacccaggagaaggaggctgcagtgagccgaggtcgtgtcactgtactccagcctgggtgacagagtgagactccatctcaaaaaaaaaaaaaaagtggatatcacatcagagaagctcctggccaggtggccttgaggaacagggatgagttcagcacttagagatggagttggctttccccgttggagggaaaggcatgagaagggacataggtaagaggaagtagagtagtgcaggggccattgagtagtagtccttccaagacaggacttcatcatagaaccactttctctgaggaagctctgcttgggggaggttttaattcatgaggaaggcaaattcaatggctctcaggtgaggtgggaaacagacacctaccaacactccaaagagaacatgtacctctataaaagggcacagtctagtgaacaaagtccacagctctgggtttgatttctagcactgtcacttaatactgtgtgaccttagacattcacttaactctctcagcctcaggatacaatctgtaaaaacaggagaatgcttgttccctgtgccttataggattgatatgagcatcaggagagacagtgggcacaaaatagcactgtcaactacttctttctagtcagttatctggtcatgtttgtgaagctccccaggactgggaacatagcatatgatttttttaaagttacttgatgaatgaatgaataaatgaatgagtaaatgaatgaataatatctaaaggcctccaactaaataataatcaacttcctaaccgtactgaaagcctttaattgactttggggctgtttggcctggaggaggctctgagttagtggtgatcagttggtgtcatggtagagaagaaagcctgtgaaggtggagtcattgtcattatcagcatagagtccattacgctctccttccccatacacctggagccagacttggtcgcccacctccagatgcaggagcacagagccggaggcctggtccacattattttcctggtactgatcataggtgaagagcatagccttgtccttcttgaagaggctgaccttcacatccttcatatagactgtgatgtggtaggcaaagtagtacagcccaggaatgttgcagtggaatttaccagtggagccatcatagtggttttgctgattgtagaagatcttggtaaagcgaatgggcatgttggggatagtaacgtaagtctccaatcccacactgaatgctgagcggtatacataggcaccttctccaggttctcctttcctgccttggattcccggaaagcctcggggaccttcagccccgggtactccggtttcaccgatgtctcccttaggaccaataagacctaaggaatgagaagacctcagtgactacaaagaacagaactcctgcctaggatgtctctcctcctctattctgcctacccatcattcaaggcctagctgaagctctgcctcctccttgaagccttcattcttcatcaggtccacggggtgccatctctgccatcacggcctggggccccattatggcccggatgccctgggatgcccgccatccaacctgtgcaggcccccttgggcaggggaagcaggactccgggcccttgagtcgtggtttcctggtcatgaccgggcagagctaatagcagtagaacagctcccagcaacagcatcctgagccctggaatccacatgtgcactgtcagccatggagagacagaccccacacacacacccagttgggacctacaaaggactccgtccatctcagcagagtctacttctaggagctgctttctaagtattcaacttttccaggaagacttttctgaatattgcagcccaccttgatctctttctgccctgaaatctgtaatacttagcattattccctgtgtgtagtctcctttcctcaccaagattatgaattcagtgattgcacagatgacactcctctaattttcccatgtctgagcacaggaccaagcacagggaaagctccaagagtcgacttgccaagaatccatccttgggtttcccaagtacgatgacacagattgctccattcaatgctaaccagcttctctcctctggctcctttcttctttttctttccccccttctctctcattttctgtgtctattcctccttcttactctctcattctctttcttcctctacccctctcctggggcacatgtttgactattgggtatattacatttgcacacatgcacacacacaaacacacacagagaaaaagagagagagagggagggagagactcaccttgtgttaagcagacaacgagagacacatcatcccatgaacatatcccctggccctttgtttgcctgagccatctttagctgcccctcctcccctgtctaatctctattcagccttcaggacccagtttggatgtcatctgtttcaagaagtcctccttgttctccatctcactccttggctggttctttcccctctgtgtttctccagtgccctggtaatatggtttgggtctgtgtccccacccaaatagcacgtcgacatgtgttggagaaggggcctggtaggaggtgactgaatcatggaggcagacttatcccttgctgttctcatgatagtaggtgaattctcacaagatctggttgaaagtgtgtagcacttcccctatattctctctctctctctttctctctctctctcctgctgctgtgtgatgtgcttgcttccccttcgctctttcttccaccatgattgtaagttttctgaggcctccccagccatgcttcctgtacagcctgtggaactgtgagtcaattaaacctcttttctttataaaaaaaaaaaaaaa

SEQ ID NO: 989601 - DNA, 3026 bp, Homo sapiens
ctagtcctgttgaactcagatgactgcagccacaggagtgatcccagagtcttttgcactgggaggagaaggtggaacaggagacacccacattctagttggtccctgctgtctccaagaggtggtgtaccaggagtcctacagatgtgaagctaggttaaaaccagttctggggatgctttcaaatcaaagaggatttaaaaatgtgactcccagttgcatttccggagccaagcagcatcctggcttgggggcctggtgtctaccacacttctgcgcattcttcctccaagccacatctcctgagaataaagcaagatgccattggcaatgtctactcagaactacttgaatgactcatcaatcaacaggcttgaatgctcttcttcctctatgattcaacggtttgattgactgaactgaaactaaaacccaaccctagtggtcattttagacttgagcagatacagtcagaatctcaatcacatgtcatcagcaggccctccttggcctccttattgcagctgggctcctgagcagctctccctcactcagggaggaaacgaacggctcctttcagtagggcagacgaaggctgctggctgatgcaactgctcctgtgtccacttcccagcaagggtgcaaaacaggatttgtgcttgtgctggtgaatctgggcttcacctagcaaatcagggggacaccaaaatgaaaacagccctagaggcatggagaaagcctcaggtgcactaaggtgccaacagaaacgatgcatctcagagttgacagtcatgactcaaataggacgtgaaggcaacatgtgggtgagagtagcagctatgggtgtaaatatgatcaaatatgggggaggtgtccagatttcttggacatggttacaatcagtatttattttctctcttagtgaacgagtttttggtttttcaatactgctaattttacaggcaattcactacgttccctgggaggtggagtggccttcctccctgctgtgcgtgggttacacagcctgcctcacttccctgtgggtccttcatcacctgcatgctcacatgattccattatttgagctcatggcaggaaatagaacctgattcaacattttgctaagtattattttcaccacactgaatagggtccttttttgatctgcaacccacagctgggctgtggttctctcaacacaggtagactgaaaagcttcctcctgcattgatttctcagcatgggctgaccacatgttcacaagtacttgttcttttccatacgtcccaatgcaggcaggcactggcagagcaggacagctgtgtccaggagttcagggaacaaaataaggctactgtaacttcagtcaacttcaaggcacggtgtaaaataaagtaagagattatcagtcaaatagccatttgcattaaaattctccactttaagaagctgagatctttgctttattttttaaaaagcaaaatgaagtcagttttaatggagatatacaattgttaactgttgggtcattttgaaaggctttcttccttaaaatgagtctcagctgatagctactcactaatgctgataattatctgaagcaaaataaatacaaatgtctgggttaatgaagactgaaacaggataatgcctggacactaaattttccaagaacaaggaacacaattgttctctacatacccctgcaaaaatgcttaatggccaggacacaggaatcttgtgtacttagagaccttgttaggatggagccccgggggcaccaccactggccttcgagccaaggtctcacagagagggcagcaagggggagcagctcatcctcctccccagctagggagacactaggacagcagtggagtggagtccgaaatctgccatagaagccccagcttactatttgctcactgagcagcaagtcaacctcagtttctctgtgcctacaggggagtaacagctgttcacactaaagggtgcttgtgaggatgatataagaatgaatatggacctgctctgacaacactgaagttccagacaaaagaataggcattagttatctgatttgaaggactgtgggggattggaattttaaaaataaacctcaacccaactccttctcttgtggggcctcggttgaacaactgggcacttgcactgccttctgaatatgtggatggattttgcctgctttggagaagcatatgaactcctcagggcatctagtgccctagagtgtgccaaaggaacaaggaggactacaaatgggtgatgcctggagcttaacccacctccatttgggattcggagctctggtttctgtgttcagctagaatcttcgacagtcatttaatgtctctctttcttagttttactcatttgttgaatggggattatattagccttactttccttgaaggtcttaatgagaatgaaatgagataatttttaagtatatatatgcatttctaatttccatcagactggagcgtcggtataagtcctgggtgttctggaaagttttatttatttagaaacagtttaggctgattgctatctccctatgctaactttttgtttttttagtaaactttttattttggaatactttcaaatttacagaaaagtttcaaagataacaagagttctcatttgcccttcacccagtttccccataactatggctcattgtaaaaactaggaaaccaatattaatgcattactaataactatagactttattcagattttaccagtttttctactcatgttcttctgtcccaggattcaatacatgatactgcattgtatttagttaccatatctcctgagtctcttctgctctgtgatggcttcagtcttttttcgtcttccatgcatcgtcagttttaatgggtactaggcaggtattatggacaagcttggcaaatccacagcccatgggccacatgaggcccaggataactttgaatgtggcccagtacaaattcataaactttttaaaaaac

SEQ ID NO: 989602 - DNA, 1512 bp, Homo sapiens
gtcacatcatgacattctctctccaaaacccagttgttctctgtgacgatgccataaagtgacatctaatgactcaggtgtgtgtactgggtggcaggggcatgtcacacacaagcattctcaactgcagcctcagtctgggaacgaggtggtgcgaccctcatttccgaggggcagctgctgttttagttcccatcttatcattactggaatttcaagtgtagtaccagaaaccaaattaaaattcacaggaacgctgcactctgtactgttttcagatgttcagatatctacaaacactcgagtagaatcaagattagattttcaagtcatcagcgtgaattaagctttgaatcgatattcaactcagaactgagagaggattttacacacataatagaacatacttagccaaaaagtgcacattctgtctggcacttgcgggaaacagccaggcacagccagggactgcaggggtgtgaggagaaagaaggcctgtccttcagacattgcagggctgtctacctttactctccagagagattctgctttaaccaccaaaagcaataaaggatcctgtaaagggccatttctttgtggactctgaaaccagctttaaaccaattccaagagatactccgaaaatgtttaggggagtcactgcctctgtctgcaggtgggctctctgaagctgacattcatttagagaaagaaaaattccaggatgtttattcaactctgtaagtctccttctttaaatatcttcagaaatatctttctaaattcagagttatccaaagcttacaagaggagggaagcaacagaccagcccccttatgtttccttataaaactcacctgggtgatggagctgtttctagtcccagttagctataaggcaaaggagagcaactgccatcagcgtttgcggtaaatgctatcagaatcatgtttgaaatcctcaactctgacggttctcagaaataaaataagcaagtaaccaacaacacacacacacacctccctccaggtctatttctcacttgtatcattttattttttggcaatcccaatcaattccgctgagccactggatgaaaacaaaagctatgagaaatacgatgacagcattagtactcaaagattcctcaatctgtctccctggaacacatttgtgtcaaaagcctgggcagtcacatgaattcaagacagtgcttcaaaaacagctgctaggataaaatactatcaataataaagtttatgagatgaggccagtgttttcatacttactctttcaacgtgcactgcccattgcctttatggagccatggtcaaaagaaacagctttcatcaatttccagcctgaccatttggaaactgccagtaaaccaaggctgtgaagttggacagaagtctggaaactagtgttcatgagattttttccctcattcactattatctgtcccttataataaaaatacaagtctaaagacattaaaaaaaaaaaaaaaaa

SEQ ID NO: 989603 - DNA, 548 bp, Homo sapiens
attaaggaaacgttggaaagattttcacaatattggtctgtgcaagaaagtggttaaattatgacataattattcacataatagaatatttaaggaaagaaagaggtgaaggaagttacaaaagcatttcatcttcataaattacttgcaagaggcgatgtacggacacatagtacacacatctacatgcatccacagagatcttagccatgcaaattagtccaatttttgttcaccttattgcaaggacaaaacaagcctacctgtttgtagctgaggttcaggatgttggagagttcttgcatctgctggaggctgaggtatttctgtctctgaaatctatcattgagtacacacagctgggtggaagagaacacagttctggtcttctgtttcttgactgggaccttgtcttccttttttgcgacactattctctgcagaagtgggttgtttgcctttgggactggtggaagaatcagggctgtcctgaataagcagatccatggaggagggaagaggagagactgttgggaacaaataaaagga

SEQ ID NO: 989604 - DNA, 1713 bp, Mus musculus
gggctcccctcagcggcctctggcgcctcccgcccgcccgacccgttcgctcgctcgctcgctcgctcgcttgctcgtccgggatcgccgcggtggttcaagtttgcgatggcgccgccacttcccacctgggcctcacgcgtgcaccttgcctgcctgcgcctcttcgcctcaagtcggcttttacctcaggggctctggagagcccaacctggccgacgccggccttcctgaggagaactcctccacctgccttgcccttgctctgtgacagctcttcctcaggttacccctgtggtctctcctcaggaagtttgcgctctctcccaatctcccttctcaagtgcaatggaatgcccaagccagccctcggggcctgttgccctcctggaaagatctggcgattgaggacccgccctatctgctctctggacccaccaggtcctctgtacctcgctttagtctttggtaaaattcatctcttggggcagcaagagagaggacagaagggagagtggttggttctccacaaacttctgtgttaagagtcagattgggcctgggctcttgtgacttgggcgattgactgaaccttttctaagcccagtttttaatcatctctaaaatgacagggccaggaccgaaagagactgtagctcagttgtaaagtcacgcttgccagacaaccccgaagccctagagagagggaggaaggagggtaagttgaaggtaatctccaactacttaggaagttcaaaaaaggcctggaatacataagacctcgtctcaaaaacgaaatttaaaacgatagaccatgagaaatcagctagtcaggtttaaagtaaatgacattagttttaaaatcctaggcagttgatggtggcacaggcctttaatcccagcaagctggaggagacaggaggaggttcactaggacagccaaggctacacaaagaaaccctgtctcgaaaaaataatcttacttctagaattgtagaaatggctctgtagttaacagcacttgttgctcctgcagaggccctaggtttgactcccatcatccacatgacagctcataccttcagatctgacacctgcttttggtaaacacagacatgtatggagccaaaagacccaaacacataaaaatcctctttgttgttgttttatgagttagggtttctctgtgtagccctggctgtccaggaactctgtagatcaggctgtccttgaactcagaggccacctgcctctgcttcttgaactgctgggattaaagatgtacaccagcaagcccagcataaaaatacatatttaaataattttttaaataatccttagttccttcacaactctaagccccttcactttctagttaccatgaaattctgagcacctgtatccatttggatcattagggctcaattgcacatggttcaattacagtggggtttccccagattttagagttagaggcagcaggatcagaaaattaaatccatttgcactaggtaataaatttgatcccaccctatctcaaaaacaaaacactagccacacgtggcagcacacaccttttacaacaggactcaggagcctggcatgatgggacagacctttactccctgcacttgaggcagatgcaggcaaatctaggcatcctggtgtacatatgaagttcaggcaagccagggccacgtaggctcaaagacg

SEQ ID NO: 989605 - DNA, 1028 bp, Homo sapiens
cttttcacttgtgaataccaattaggtttccagtttctcataaagatctaacaaatacccaatttctccatcagactgacatcccttaacaaaagcagagtttcaattccctgcatctcctttaggagctatgatataatgtaggtagaaatcttgccttaactccatttacccactgtgctataaataagcagaagcaaatatttttttaaggctggagaggttttaaaaatctgaactaatttagcaactgctgctgcactcagtttttggcagttcccaaacatccattatcatgtaaggataaatccttctaaaccagaaaaatgtttcctacttggaaaaggcataagaaaatacatatacgacctccccatgtactagtcttacataccccagctccagttagaactataatttttttgcactcttgcagtaatttcacagcatcttcaattgtattaatatcttttctttttttcctttttggtggttctgaaaggatattaataacaatctgccacagtgtcatatcatccaactcaggtggaggtattgtttccggcaataaatctttaagaattgttcgaggatctgtgccaatcataagatgttgctgaacaaaagtatatggacctacaataagggggaaaaggcttaaagtcaacttatcaagtaattcaaaatctcatttattttctgaagtaatgagttagcattctgtgagggttttttgcaaagtaagaaaatgcaatttaatggtatttcattctcggtacactcagaattaatgctatatcccaatgagattaggaagatctaatgaagagttgggaagacccccttcagctgtaagtatatatttcaagagtctaattaattaacaaccagaattaagttcttatggttaatatctagaaacacacaccataataccaaaagtatttacaaaagggttctacgacatagaaaaatcgtaccagtcctaaaagcctgtactacttatcattaaaaccacacaggaaaaa

SEQ ID NO: 989606 - DNA, 429 bp, Homo sapiens
  misc_feature (7)..(7): n is a, c, g, or t
  misc_feature (373)..(373): n is a, c, g, or t
  misc_feature (400)..(400): n is a, c, g, or t
cgacganaacataagcacttttaatttcctctctattatgctacagacaaggccgaagactgggttttttaggttgtttaaggctgtaaagaaaacaaagaacatatgacagagaccctatgcagtctgcaaagcatactacatatttactaccaggccctaccttactacagaaagtttgctgatccagctgtgaacatataccccgatgcagatgaaaacaaatacaaaacaaacctaacttgccattttggtcacaagagcaagtaagtagcagagccctgttttgatatgaaaatccagcactggactgggcaacatggcgagaccccatctctaccaaaaatactaaaaaaatagccgggcatggtgnggcacatctgtagtactagctacttgngaggctgagacaggagaatcatttgagcc

SEQ ID NO: 989607 - DNA, 156 bp, Homo sapiens
cctgtatatacacacactatgcaatagtcttaggtaactaattagctgcaaccctaaggtagatcaaatagaaaatgtcaagtcgccacaatcacatcatcttaattaatatggagggaaggtaggaatctgttactcttcccaacactaagcttt

SEQ ID NO: 989608 - DNA, 593 bp, Homo sapiens
  misc_feature (460)..(460): n is a, c, g, or t
  misc_feature (571)..(571): n is a, c, g, or t
tctcactgtctcccaggctggagcgcaatggtgcaatcttggctcgctgcaacctccaactcccaggttcaagtgattctcgtgcctcagcctcctgagtagctgggattacaggcgcctgccaccatgcccggctaattttagtatttctagtagagttgggatttcaccatgttggccaagctgttctcgaactcttggcttcatgggatctgcccgcctcggcttcccaaagtgctaggattacaggcgtgagccactgcactcagccagaaaagattatttaaaataattgaatgcatgcaactgcagcatcttttgaaatcaaaagcaaattaatatctgaggttttctataattaactgtcaaggccaatacttctggttttattatttttggtttctacttttctgaggttatcgataaatggagaaacatgattaaataaatgctttatctncacttctcgatggcagtcagctttaatggaaaatattttcctataaacctaaattaatttccggaaaccccttttgaggttaactaccattgcactggaataatctttggnatcccggaaccctgttcaaggg

SEQ ID NO: 989609 - DNA, 1028 bp, Homo sapiens; identical to SEQ ID NO: 989605

SEQ ID NO: 989610 - DNA, 429 bp, Homo sapiens; identical to SEQ ID NO: 989606
  misc_feature (7)..(7): n is a, c, g, or t
  misc_feature (373)..(373): n is a, c, g, or t
  misc_feature (400)..(400): n is a, c, g, or t

SEQ ID NO: 989611 - DNA, 508 bp, Homo sapiens
gaagaagaagcagccatgatgataggtgatagatccgaaataatggccacatttgttaacatttttccatttctaaaccatccttaaagaaaatcatagtatggggtcacaccatcctcacggtagtccaatagagcaaccatgccatctggattcatgttttcaccaataaagaactggtagtttttgaaattagcaaggatgtgcttgatttgttctgcagcccctgtcataaaaggttatactctttctggtctctgttcttcaagtttccctttgattgatttcatgtaatctttgatgtacttcttgtaggcttcttttcatatttccgaaagcttagtgttgggaagagtaacagattcctaccttccctccatattaattaagatgatgtgattgtggcgacttgacattttctatttgatctaccttagggttgcagctaattagttacctaagactattgcatagtgtgtgtatatacaggcttcttttcatatttccg

SEQ ID NO: 989612 - DNA, 593 bp, Homo sapiens; identical to SEQ ID NO: 989608
  misc_feature (460)..(460): n is a, c, g, or t
  misc_feature (571)..(571): n is a, c, g, or t

SEQ ID NO: 989613 - DNA, 373 bp, Homo sapiens
ggcacttcatggggtatggaacctaaaatagggtgaaaaataagagttagaaaaagggaggaggaagtaagctaataaaaccacaacagatacattatgcaaaaatccaacaagggcttgagctccaaattcccaaaaaagacccatgcactaaatacttaaccaagccattacatttcatcaagcaagcagatgggcagttaagtgtcttttataaaacgctcaagttctgctcctatcacctggttacccctgagcaatcttcccagactttcccactctgaacctcaaatttccttgtctgcagaatggggatgataatagtacttctccacaagactgtggtgaggattaaatgagttagtcaagtgca

SEQ ID NO: 989614 - DNA, 1713 bp, Mus musculus; identical to SEQ ID NO: 989604

SEQ ID NO: 989615 - DNA, 428 bp, Homo sapiens
agggtgagttgcaagacaggaagagggggatagaacaagacacagacagagagataaagagttaaagacaaagcaagtcagagacagaattggagagagacagagagagggagaggcagagagagagagatgaattcacacgaaggcaaaaatgacttattctattcaaccaacactgctgctgcaatgagcccgacgatgctcacatgggcccaagccctgccctccagaagcccttgatcttgggggagacaggtggacacagatcctctggccccaagagtcaagcctggatcagaggaggtacctgggcctggggaagccccgtggaggtgggggccctggggcacgtggaagggcttcctggaggaggctaagcagtttcttgaagggtgagagggaagatcagacagaagggatcctctaga

SEQ ID NO: 989616 - DNA, 4041 bp, Homo sapiens
gtggcctggaggactcatttaagaatcatgtgttgagtacctactttgtactgggcacactggagagcaaaggtggtaccatctatgccctggtggctgcgggtggacacaaacatgtgaccaggggccaggactggtcaggaaggaggaagcggtccttttgaggagggcgaggcaacggaccctgccgcccaccaggactggtgtccctcaccttacccccacccttgccctcctcaggtggcctgtggagaggagaaacacagggcaccaactatgaagactctcagggcgcgatttaagaagacagagctgcggctcagccccactgaccttggctcctgcccgccctgcggcccctgccccatcccgaagccggcagccagaggcaggcgccagagtcaagactggggcaagagtgacgagaggctgctacaagccgtggaaaacaacgatgcacctcgggtggccgccctcatcgcccgcaaggggctggtgcccacgaagctagaccccgagggcaagtccgcgttccacctggcggccatgcggggtgcggccagctgtctggaggtgatgatagctcatggcagcaatgtcatgagcgcggacggggcaggttacaatgccctccacctggccgccaaatacgggcacccacagtgcttgaagcaactactgcaggcttcctgcgtggtggacgtcgtggacagcagcgggtggactgccctacaccatgcagcggctggtggctgtctctcctgctcagaggtgctctgctcctttaaggcacatctaaacccccaagatcggtcaggcgcaacacccctcattatagcagctcagatgtgtcacacagacctgtgccgtctcctactgcagcaaggggctgccgcgaacgatcaggacctgcaaggcaggacggccctgatgctggcctgtgagggggccagccccgaaacagtggaggtcctgctgcagggcggagcccagccgggcatcaccgatgcgctggggcaggacgcggctcactatggcgccctggcgggggacaaactcatcctgcaccttctgcaagaggcggcccagcgcccctccccacccagcgccctcacagaggatgattcaggcgaggcgtcatctcagaactctatgtccagccatggaaagcagggggcccccaagaagcggaaggcgcctccacctcccgccagcattcccatgccggatgatcgagatgcctatgaggagatcgtgaggctgcggcaggagaggggccgcctcctgcagaagatccggggcctggaacagcacaaggaacggaggcagcaggagtccccggaggccagctccctgcacatcctggagagacaggtgcaagagctacagcagttgctggtggagagacaagaggagaaggagagcctgggacgggaggtggagagtttgcagagccggctgtccctgctggagaacgagcgggagaatactagctatgacgtaaccaccctgcaggatgaggagggtgagctgcctgaccttccaggggccgaggtgctgctgtccagacaactcagtccgtcggcccaggaacacctggcctcgctgcaggaacaggtggctgtgctcaccagacagaaccaggaactgatggagaaggtccagatcctggagaactttgagaaggacgagacacagatggaagtggaagctttggcagaggtcatccctcttgccctctatgactctctccgggccgagtttgaccagctacgcaggcagcacgctgaggccctgcaggccctgaggcagcaggagacacgagaggtccccagagaagagggggcagcctgtggggagagtgaggttgctggagccacggccaccaaaaacgggccaacccacatggagctaaatggctcagtggctccagaaaccaaagttaacggagccgagaccatagatgaggaggctgcaggagatgaaaccatggaagccaggactatggaagctgaggccacgggagccgaggccacgggagctgaggccacaggagccaaggtcacagaaacaaaacccacaggggctgaggtcagagaaatggagaccacagaagaagaagcaaacatggaaactaagcccacaggagctcaggccacagacacagagaccacgggagtggaggccatgggggtggaggccacaaaaacaaaagcagaggaagcagaaatgcaggcctacggagtgggtgctgggcaagcagagcccccagtcacagggaccacaaacatggaggccacgggctctagggccacagggatggaatccacaggagtcagtgccacaggtgtggagaacccaggggtagaggccacggtcccggggatctctgctggccccatcctacatcctggtgccgcagaggcctcggaaaagcttcaagtagagctggagaccaggatccgtggcttggaggaggctctccggcagcgggagcgggaggcagctgcggagctggaggcggccctggggaagtgcgaggccgcggaggccgaggcaggccggctgcgagagcgtgtccgcgaggccgagggcagcggggccagcgggggcggtggcggtgacaccacacagctgcgggcggccctggagcaggcccgggaggacctccgagaccgggactcccgcctgcgggagctggaggcggcctcggcctgcctggatgaggctcgggccagccggctgctggcggaggaggaggcgcggggcctgcgggccgagctggcccagcgggaggaggcgcggctggagcagagccgggagctggaggttctgcgggagcagctggccacggccagggccacgggggagcagcagcgcacggcggccgcggaactgggccgggcacgggacgccgctgaggcccgagtggctgagctgcctgcggcctgcgaggaggcgcggcagggcctggccgagctgcgggaggcctccgaggccctccgccagtccgtggtgccggcctctgagcaccgccggctgcaggaggaggccctggagctgcggggccgggcagccagtctggagcaggaggtggtggccacgggcaaggaggccgcccggctgcgcgcggagctggagcgggagcgtgtgtgcagcgtggcgctctcggagcacgaacgcatcgtgggcaccctgcaggccaacgtggcccagctggaggggcagctggaggagctgggacggcggcatgagaagaccagcgcagaggtcttccaggtgcagcgtgaggccctgttcatgaagagtgagcgacacgcagccgaggcacagctggccacagcagagcagcagctacgggggctacggaccgaggcggaaagggctcgccaggcccagagccgggcccaggaggctctggacaaggccaaggagaaggacaagaagatcacagaactctccaaagaagtcttcaatcttaaggaagccttgaaggagcagccggccgccctcgccacccctgaggtggaggctctccgtgaccaggtgaaggatttacagcagcagctgcaggaagctgccagggaccactccagcgtggtggctttgtacagaagccacctcctatatgccattcagggccagatggatgaagatgtgcagcggattctcagccagattctgcagatgcagagactccaggctcagggccgctgagaaaggccaggcccagtggctacactgaccacacccacgcagggacctcacccccctgcaggccccttgcagaccggcttcacttggcttcacttggccctatccaggcccatgcacttggagaccagcctggttccctgcccgaccacccccagctggctccatcaccccacctggtctctgcacgcacacactggtcagtctggacccgggccgtgactgcccctcccccaccaccggagactgtgattccctgtgtcctccacatccagacgccagcccaggaataaaggcattctgtgcacagggaaaaaaaaaaaaaaa

SEQ ID NO: 989617 - DNA, 20 bp, Homo sapiens
ctccactaataggtgcgatc

SEQ ID NO: 989618 - DNA, 20 bp, Homo sapiens
tttctccactaataggtgcg

SEQ ID NO: 989619 - DNA, 20 bp, Homo sapiens
atttctccactaataggtgc

SEQ ID NO: 989620 - DNA, 20 bp, Homo sapiens
cagatttctccactaatagg

SEQ ID NO: 989621 - DNA, 20 bp, Homo sapiens
acagatttctccactaatag

SEQ ID NO: 989622 - DNA, 20 bp, Homo sapiens
gacagatttctccactaata

SEQ ID NO: 989623 - DNA, 20 bp, Homo sapiens
tatggacagatttctccact

SEQ ID NO: 989624 - DNA, 20 bp, Homo sapiens
tattatggacagatttctcc

SEQ ID NO: 989625 - DNA, 20 bp, Homo sapiens
tcagtattatggacagattt

SEQ ID NO: 989626 - DNA, 20 bp, Homo sapiens
ttcagtattatggacagatt

SEQ ID NO: 989627 - DNA, 20 bp, Homo sapiens
acttcagtattatggacaga

SEQ ID NO: 989628 - DNA, 20 bp, Homo sapiens
aacttcagtattatggacag

SEQ ID NO: 989629 - DNA, 20 bp, Homo sapiens
tcctcctctattctgcctac

SEQ ID NO: 989630 - DNA, 20 bp, Homo sapiens
ctcctcctctattctgccta

SEQ ID NO: 989631 - DNA, 20 bp, Homo sapiens
tctcctcctctattctgcct

SEQ ID NO: 989632 - DNA, 20 bp, Homo sapiens
ctctcctcctctattctgcc

SEQ ID NO: 989633 - DNA, 20 bp, Homo sapiens
gtctctcctcctctattctg

SEQ ID NO: 989634 - DNA, 20 bp, Homo sapiens
ggatgtctctcctcctctat

SEQ ID NO: 989635 - DNA, 20 bp, Homo sapiens
atctaggatgtctctcctcc

SEQ ID NO: 989636 - DNA, 20 bp, Homo sapiens
catctaggatgtctctcctc

SEQ ID NO: 989637 - DNA, 20 bp, Homo sapiens
ctccatctaggatgtctctc

SEQ ID NO: 989638 - DNA, 20 bp, Homo sapiens
cctccatctaggatgtctct

SEQ ID NO: 989639 - DNA, 20 bp, Homo sapiens
ccctccatctaggatgtctc

SEQ ID NO: 989640 - DNA, 20 bp, Homo sapiens
cccctccatctaggatgtct

SEQ ID NO: 989641 - DNA, 20 bp, Homo sapiens
atcttctacaatcagcaaaa

SEQ ID NO: 989642 - DNA, 20 bp, Homo sapiens
cttctacaatcagcaaaacc

SEQ ID NO: 989643 - DNA, 20 bp, Homo sapiens
tctacaatcagcaaaaccac

SEQ ID NO: 989644 - DNA, 20 bp, Homo sapiens
ctacaatcagcaaaaccact

SEQ ID NO: 989645 - DNA, 20 bp, Homo sapiens
acaatcagcaaaaccactat

SEQ ID NO: 989646 - DNA, 20 bp, Homo sapiens
caatcagcaaaaccactatg

SEQ ID NO: 989647 - DNA, 15 bp, Homo sapiens
caggttggatggcgg

SEQ ID NO: 989648 - DNA, 15 bp, Homo sapiens
caggccgtgatggca

SEQ ID NO: 989649 - DNA, 15 bp, Homo sapiens
ggccgtgatggcaga

SEQ ID NO: 989650 - DNA, 15 bp, Homo sapiens
gaccaataagaccta

SEQ ID NO: 989651 - DNA, 15 bp, Homo sapiens
ggaccaataagacct

SEQ ID NO: 989652 - DNA, 15 bp, Homo sapiens
cccttaggaccaata

SEQ ID NO: 989653 - DNA, 15 bp, Homo sapiens
actgaatgctgagcg

SEQ ID NO: 989654 - DNA, 15 bp, Homo sapiens
tggtaaagcgaatgg

SEQ ID NO: 989655 - DNA, 15 bp, Homo sapiens
ttggtaaagcgaatg

SEQ ID NO: 989656 - DNA, 15 bp, Homo sapiens
cttggtaaagcgaat

SEQ ID NO: 989657 - DNA, 15 bp, Homo sapiens
tcttggtaaagcgaa

SEQ ID NO: 989658 - DNA, 15 bp, Homo sapiens
atcttggtaaagcga

SEQ ID NO: 989659 - DNA, 15 bp, Homo sapiens
gatcttggtaaagcg

SEQ ID NO: 989660 - DNA, 15 bp, Homo sapiens
gaagatcttggtaaa

SEQ ID NO: 989661 - DNA, 15 bp, Homo sapiens
gcctggtccacatta

SEQ ID NO: 989662 - DNA, 15 bp, Homo sapiens
ggcctggtccacatt

SEQ ID NO: 989663 - DNA, 15 bp, Homo sapiens
gagcacagagccgga

SEQ ID NO: 989664 - DNA, 15 bp, Homo sapiens
ttggtcgcccacctc

SEQ ID NO: 989665 - DNA, 15 bp, Homo sapiens
cttggtcgcccacct

SEQ ID NO: 989666 - DNA, 15 bp, Homo sapiens
acttggtcgcccacc

SEQ ID NO: 989667 - DNA, 15 bp, Homo sapiens
gacttggtcgcccac

SEQ ID NO: 989668 - DNA, 15 bp, Homo sapiens
agacttggtcgccca

SEQ ID NO: 989669 - DNA, 15 bp, Homo sapiens
cagacttggtcgccc

SEQ ID NO: 989670 - DNA, 15 bp, Homo sapiens
ccagacttggtcgcc

SEQ ID NO: 989671 - DNA, 15 bp, Homo sapiens
gccagacttggtcgc

SEQ ID NO: 989672 - DNA, 15 bp, Homo sapiens
agccagacttggtcg

SEQ ID NO: 989673 - DNA, 15 bp, Homo sapiens
catacacctggagcc

SEQ ID NO: 989674 - DNA, 15 bp, Homo sapiens
ccatacacctggagc

SEQ ID NO: 989675 - DNA, 15 bp, Homo sapiens
tatcagcatagagtc

SEQ ID NO: 989676 - DNA, 15 bp, Homo sapiens
ctaggttggttacag

SEQ ID NO: 989677 - DNA, 15 bp, Homo sapiens
cctaggttggttaca

SEQ ID NO: 989678 - DNA, 15 bp, Homo sapiens
gcctaggttggttac

SEQ ID NO: 989679 - DNA, 15 bp, Homo sapiens
tgcctaggttggtta

SEQ ID NO: 989680 - DNA, 15 bp, Homo sapiens
ctgcctaggttggtt

SEQ ID NO: 989681 - DNA, 15 bp, Homo sapiens
cctgcctaggttggt

SEQ ID NO: 989682 - DNA, 15 bp, Homo sapiens
tcctgcctaggttgg

SEQ ID NO: 989683 - DNA, 15 bp, Homo sapiens
ctcctgcctaggttg

SEQ ID NO: 989684 - DNA, 15 bp, Homo sapiens
actcctgcctaggtt

SEQ ID NO: 989685 - DNA, 15 bp, Homo sapiens
aactcctgcctaggt

SEQ ID NO: 989686 - DNA, 15 bp, Homo sapiens
gaactcctgcctagg

SEQ ID NO: 989687 - DNA, 15 bp, Homo sapiens
agaactcctgcctag

SEQ ID NO: 989688 - DNA, 15 bp, Homo sapiens
cagaactcctgccta

SEQ ID NO: 989689 - DNA, 15 bp, Homo sapiens
acagaactcctgcct

SEQ ID NO: 989690 - DNA, 15 bp, Homo sapiens
aacagaactcctgcc

SEQ ID NO: 989691 - DNA, 15 bp, Homo sapiens
gaacagaactcctgc

SEQ ID NO: 989692 - DNA, 15 bp, Homo sapiens
agaacagaactcctg

SEQ ID NO: 989693 - DNA, 15 bp, Homo sapiens
aagaacagaactcct

SEQ ID NO: 989694 - DNA, 15 bp, Homo sapiens
aaagaacagaactcc

SEQ ID NO: 989695 - DNA, 15 bp, Homo sapiens
caaagaacagaactc

SEQ ID NO: 989696 - DNA, 15 bp, Homo sapiens
acaaagaacagaact

SEQ ID NO: 989697 - DNA, 15 bp, Homo sapiens
tacaaagaacagaac

SEQ ID NO: 989698 - DNA, 15 bp, Homo sapiens
ctacaaagaacagaa

SEQ ID NO: 989699 - DNA, 15 bp, Homo sapiens
actacaaagaacaga

SEQ ID NO: 989700 - DNA, 15 bp, Homo sapiens
gactacaaagaacag

SEQ ID NO: 989701 - DNA, 15 bp, Homo sapiens
tgactacaaagaaca

SEQ ID NO: 989702 - DNA, 15 bp, Homo sapiens
gtgactacaaagaac

SEQ ID NO: 989703 - DNA, 15 bp, Homo sapiens
agtgactacaaagaa

SEQ ID NO: 989704 - DNA, 15 bp, Homo sapiens
cagtgactacaaaga

SEQ ID NO: 989705 - DNA, 15 bp, Homo sapiens
tcagtgactacaaag

SEQ ID NO: 989706 - DNA, 15 bp, Homo sapiens
ctcagtgactacaaa

SEQ ID NO: 989707 - DNA, 15 bp, Homo sapiens
cctcagtgactacaa

SEQ ID NO: 989708 - DNA, 15 bp, Homo sapiens
acctcagtgactaca

SEQ ID NO: 989709 - DNA, 15 bp, Homo sapiens
gacctcagtgactac

SEQ ID NO: 989710 - DNA, 15 bp, Homo sapiens
agacctcagtgacta

SEQ ID NO: 989711 - DNA, 15 bp, Homo sapiens
aagacctcagtgact

SEQ ID NO: 989712 - DNA, 15 bp, Homo sapiens
gaagacctcagtgac

SEQ ID NO: 989713 - DNA, 15 bp, Homo sapiens
agaagacctcagtga

SEQ ID NO: 989714 - DNA, 15 bp, Homo sapiens
gagaagacctcagtg

SEQ ID NO: 989715 - DNA, 15 bp, Homo sapiens
tgagaagacctcagt

SEQ ID NO: 989716 - DNA, 15 bp, Homo sapiens
atgagaagacctcag

SEQ ID NO: 989717 - DNA, 15 bp, Homo sapiens
aatgagaagacctca

SEQ ID NO: 989718 - DNA, 15 bp, Homo sapiens
gaatgagaagacctc

SEQ ID NO: 989719 - DNA, 15 bp, Homo sapiens
ggaatgagaagacct

SEQ ID NO: 989720 - DNA, 15 bp, Homo sapiens
aggaatgagaagacc

SEQ ID NO: 989721 - DNA, 15 bp, Homo sapiens
aaggaatgagaagac

SEQ ID NO: 989722 - DNA, 15 bp, Homo sapiens
taaggaatgagaaga

SEQ ID NO: 989723 - DNA, 15 bp, Homo sapiens
ctaaggaatgagaag

SEQ ID NO: 989724 - DNA, 15 bp, Homo sapiens
cctaaggaatgagaa

SEQ ID NO: 989725 - DNA, 15 bp, Homo sapiens
acctaaggaatgaga

SEQ ID NO: 989726 - DNA, 15 bp, Homo sapiens
gacctaaggaatgag

SEQ ID NO: 989727 - DNA, 15 bp, Homo sapiens
agacctaaggaatga

SEQ ID NO: 989728 - DNA, 15 bp, Homo sapiens
aagacctaaggaatg

SEQ ID NO: 989729 - DNA, 15 bp, Homo sapiens
taagacctaaggaat

SEQ ID NO: 989730 - DNA, 15 bp, Homo sapiens
ataagacctaaggaa

SEQ ID NO: 989731 - DNA, 15 bp, Homo sapiens
aataagacctaagga

SEQ ID NO: 989732 - DNA, 15 bp, Homo sapiens
caataagacctaagg

SEQ ID NO: 989733 - DNA, 15 bp, Homo sapiens
ccaataagacctaag

SEQ ID NO: 989734 - DNA, 15 bp, Homo sapiens
accaataagacctaa

SEQ ID NO: 989735 - DNA, 15 bp, Homo sapiens
aggaccaataagacc

SEQ ID NO: 989736 - DNA, 15 bp, Homo sapiens
taggaccaataagac

SEQ ID NO: 989737 - DNA, 15 bp, Homo sapiens
ttaggaccaataaga

SEQ ID NO: 989738 - DNA, 15 bp, Homo sapiens
cttaggaccaataag

SEQ ID NO: 989739 - DNA, 15 bp, Homo sapiens
ccttaggaccaataa

SEQ ID NO: 989740 - DNA, 15 bp, Homo sapiens
tcccttaggaccaat

SEQ ID NO: 989741 - DNA, 15 bp, Homo sapiens
ctcccttaggaccaa

SEQ ID NO: 989742 - DNA, 15 bp, Homo sapiens
tctcccttaggacca

SEQ ID NO: 989743 - DNA, 15 bp, Homo sapiens
gtctcccttaggacc

SEQ ID NO: 989744 - DNA, 15 bp, Homo sapiens
tgtctcccttaggac

SEQ ID NO: 989745 - DNA, 15 bp, Homo sapiens
atgtctcccttagga

SEQ ID NO: 989746 - DNA, 15 bp, Homo sapiens
gatgtctcccttagg

SEQ ID NO: 989747 - DNA, 15 bp, Homo sapiens
cgatgtctcccttag

SEQ ID NO: 989748 - DNA, 15 bp, Homo sapiens
ccgatgtctccctta

SEQ ID NO: 989749 - DNA, 15 bp, Homo sapiens
accgatgtctccctt

SEQ ID NO: 989750 - DNA, 15 bp, Homo sapiens
caccgatgtctccct

SEQ ID NO: 989751 - DNA, 15 bp, Homo sapiens
tcaccgatgtctccc

SEQ ID NO: 989752 - DNA, 15 bp, Homo sapiens
ttcaccgatgtctcc

SEQ ID NO: 989753 - DNA, 15 bp, Homo sapiens
tttcaccgatgtctc

SEQ ID NO: 989754 - DNA, 15 bp, Homo sapiens
gtttcaccgatgtct

SEQ ID NO: 989755 - DNA, 15 bp, Homo sapiens
ggtttcaccgatgtc

SEQ ID NO: 989756 - DNA, 15 bp, Homo sapiens
cggtttcaccgatgt

SEQ ID NO: 989757 - DNA, 15 bp, Homo sapiens
ccggtttcaccgatg

SEQ ID NO: 989758 - DNA, 15 bp, Homo sapiens
tccggtttcaccgat

SEQ ID NO: 989759 - DNA, 15 bp, Homo sapiens
ctccggtttcaccga

SEQ ID NO: 989760 - DNA, 15 bp, Homo sapiens
actccggtttcaccg

SEQ ID NO: 989761 - DNA, 15 bp, Homo sapiens
tactccggtttcacc

SEQ ID NO: 989762 - DNA, 15 bp, Homo sapiens
gtactccggtttcac

SEQ ID NO: 989763 - DNA, 15 bp, Homo sapiens
ggtactccggtttca

SEQ ID NO: 989764 - DNA, 15 bp, Homo sapiens
gggtactccggtttc

SEQ ID NO: 989765 - DNA, 15 bp, Homo sapiens
cgggtactccggttt

SEQ ID NO: 989766 - DNA, 15 bp, Homo sapiens
ccgggtactccggtt

SEQ ID NO: 989767 - DNA, 15 bp, Homo sapiens
cccgggtactccggt

SEQ ID NO: 989768 - DNA, 15 bp, Homo sapiens
ccccgggtactccgg

SEQ ID NO: 989769 - DNA, 15 bp, Homo sapiens
gccccgggtactccg

SEQ ID NO: 989770 - DNA, 15 bp, Homo sapiens
agccccgggtactcc

SEQ ID NO: 989771 - DNA, 15 bp, Homo sapiens
cagccccgggtactc

SEQ ID NO: 989772 - DNA, 15 bp, Homo sapiens
tcagccccgggtact

SEQ ID NO: 989773 - DNA, 15 bp, Homo sapiens
ttcagccccgggtac

SEQ ID NO: 989774 - DNA, 15 bp, Homo sapiens
cttcagccccgggta

SEQ ID NO: 989775 - DNA, 15 bp, Homo sapiens
ccttcagccccgggt

SEQ ID NO: 989776 - DNA, 15 bp, Homo sapiens
accttcagccccggg

SEQ ID NO: 989777 - DNA, 15 bp, Homo sapiens
gaccttcagccccgg

SEQ ID NO: 989778 - DNA, 15 bp, Homo sapiens
ggaccttcagccccg

SEQ ID NO: 989779 - DNA, 15 bp, Homo sapiens
gggaccttcagcccc

SEQ ID NO: 989780 - DNA, 15 bp, Homo sapiens
ggggaccttcagccc

SEQ ID NO: 989781 - DNA, 15 bp, Homo sapiens
cggggaccttcagcc

SEQ ID NO: 989782 - DNA, 15 bp, Homo sapiens
tcggggaccttcagc

SEQ ID NO: 989783 - DNA, 15 bp, Homo sapiens
ctcggggaccttcag

SEQ ID NO: 989784 - DNA, 15 bp, Homo sapiens
cctcggggaccttca

SEQ ID NO: 989785 - DNA, 15 bp, Homo sapiens
gcctcggggaccttc

SEQ ID NO: 989786 - DNA, 15 bp, Homo sapiens
agcctcggggacctt

SEQ ID NO: 989787 - DNA, 15 bp, Homo sapiens
aagcctcggggacct

SEQ ID NO: 989788 - DNA, 15 bp, Homo sapiens
aaagcctcggggacc

SEQ ID NO: 989789 - DNA, 15 bp, Homo sapiens
gaaagcctcggggac

SEQ ID NO: 989790 - DNA, 15 bp, Homo sapiens
ggaaagcctcgggga

SEQ ID NO: 989791 - DNA, 15 bp, Homo sapiens
cggaaagcctcgggg

SEQ ID NO: 989792 - DNA, 15 bp, Homo sapiens
ccggaaagcctcggg

SEQ ID NO: 989793 - DNA, 15 bp, Homo sapiens
cccggaaagcctcgg

SEQ ID NO: 989794 - DNA, 15 bp, Homo sapiens
tcccggaaagcctcg

SEQ ID NO: 989795 - DNA, 15 bp, Homo sapiens
ttcccggaaagcctc

SEQ ID NO: 989796 - DNA, 15 bp, Homo sapiens
attcccggaaagcct

SEQ ID NO: 989797 - DNA, 15 bp, Homo sapiens
gattcccggaaagcc

SEQ ID NO: 989798 - DNA, 15 bp, Homo sapiens
ggattcccggaaagc

SEQ ID NO: 989799 - DNA, 15 bp, Homo sapiens
tggattcccggaaag

SEQ ID NO: 989800 - DNA, 15 bp, Homo sapiens
ttggattcccggaaa

SEQ ID NO: 989801 - DNA, 15 bp, Homo sapiens
cttggattcccggaa

SEQ ID NO: 989802 - DNA, 15 bp, Homo sapiens
ccttggattcccgga

SEQ ID NO: 989803 - DNA, 15 bp, Homo sapiens
gccttggattcccgg

SEQ ID NO: 989804 - DNA, 15 bp, Homo sapiens
tgccttggattcccg

SEQ ID NO: 989805 - DNA, 15 bp, Homo sapiens
ctgccttggattccc

SEQ ID NO: 989806 - DNA, 15 bp, Homo sapiens
cctgccttggattcc

SEQ ID NO: 989807 - DNA, 15 bp, Homo sapiens
tcctgccttggattc

SEQ ID NO: 989808 - DNA, 15 bp, Homo sapiens
ttcctgccttggatt

SEQ ID NO: 989809 - DNA, 15 bp, Homo sapiens
tttcctgccttggat

SEQ ID NO: 989810 - DNA, 15 bp, Homo sapiens
ctttcctgccttgga

SEQ ID NO: 989811 - DNA, 15 bp, Homo sapiens
cctttcctgccttgg

SEQ ID NO: 989812 - DNA, 15 bp, Homo sapiens
tcctttcctgccttg

SEQ ID NO: 989813 - DNA, 15 bp, Homo sapiens
ctcctttcctgcctt

SEQ ID NO: 989814 - DNA, 15 bp, Homo sapiens
tctcctttcctgcct

SEQ ID NO: 989815 - DNA, 15 bp, Homo sapiens
ttctcctttcctgcc

SEQ ID NO: 989816 - DNA, 15 bp, Homo sapiens
gttctcctttcctgc

SEQ ID NO: 989817 - DNA, 15 bp, Homo sapiens
ggttctcctttcctg

SEQ ID NO: 989818 - DNA, 15 bp, Homo sapiens
aggttctcctttcct

SEQ ID NO: 989819 - DNA, 15 bp, Homo sapiens
caggttctcctttcc

SEQ ID NO: 989820 - DNA, 15 bp, Homo sapiens
ccaggttctcctttc

SEQ ID NO: 989821 - DNA, 15 bp, Homo sapiens
tccaggttctccttt

SEQ ID NO: 989822 - DNA, 15 bp, Homo sapiens
ctccaggttctcctt

SEQ ID NO: 989823 - DNA, 15 bp, Homo sapiens
tctccaggttctcct

SEQ ID NO: 989824 - DNA, 15 bp, Homo sapiens
ttctccaggttctcc

SEQ ID NO: 989825 - DNA, 15 bp, Homo sapiens
cttctccaggttctc

SEQ ID NO: 989826 - DNA, 15 bp, Homo sapiens
ccttctccaggttct

SEQ ID NO: 989827 - DNA, 15 bp, Homo sapiens
accttctccaggttc

SEQ ID NO: 989828 - DNA, 15 bp, Homo sapiens
caccttctccaggtt

SEQ ID NO: 989829 - DNA, 15 bp, Homo sapiens
gcaccttctccaggt

SEQ ID NO: 989830 - DNA, 15 bp, Homo sapiens
ggcaccttctccagg

SEQ ID NO: 989831 - DNA, 15 bp, Homo sapiens
aggcaccttctccag

SEQ ID NO: 989832 - DNA, 15 bp, Homo sapiens
taggcaccttctcca

SEQ ID NO: 989833 - DNA, 15 bp, Homo sapiens
ataggcaccttctcc

SEQ ID NO: 989834 - DNA, 15 bp, Homo sapiens
cataggcaccttctc

SEQ ID NO: 989835 - DNA, 15 bp, Homo sapiens
acataggcaccttct

SEQ ID NO: 989836 - DNA, 15 bp, Homo sapiens
tacataggcaccttc

SEQ ID NO: 989837 - DNA, 15 bp, Homo sapiens
atacataggcacctt

SEQ ID NO: 989838 - DNA, 15 bp, Homo sapiens
tatacataggcacct

SEQ ID NO: 989839 - DNA, 15 bp, Homo sapiens
gtatacataggcacc

SEQ ID NO: 989840 - DNA, 15 bp, Homo sapiens
ggtatacataggcac

SEQ ID NO: 989841 - DNA, 15 bp, Homo sapiens
cggtatacataggca

SEQ ID NO: 989842 - DNA, 15 bp, Homo sapiens
gcggtatacataggc

SEQ ID NO: 989843 - DNA, 15 bp, Homo sapiens
agcggtatacatagg

SEQ ID NO: 989844 - DNA, 15 bp, Homo sapiens
gagcggtatacatag

SEQ ID NO: 989845 - DNA, 15 bp, Homo sapiens
tgagcggtatacata

SEQ ID NO: 989846 - DNA, 15 bp, Homo sapiens
ctgagcggtatacat

SEQ ID NO: 989847 - DNA, 15 bp, Homo sapiens
gctgagcggtataca

SEQ ID NO: 989848 - DNA, 15 bp, Homo sapiens
tgctgagcggtatac

SEQ ID NO: 989849 - DNA, 15 bp, Homo sapiens
atgctgagcggtata

SEQ ID NO: 989850 - DNA, 15 bp, Homo sapiens
aatgctgagcggtat

SEQ ID NO: 989851 - DNA, 15 bp, Homo sapiens
gaatgctgagcggta

SEQ ID NO: 989852 - DNA, 15 bp, Homo sapiens
tgaatgctgagcggt

SEQ ID NO: 989853 - DNA, 15 bp, Homo sapiens
ctgaatgctgagcgg

SEQ ID NO: 989854 - DNA, 15 bp, Homo sapiens
cactgaatgctgagc

SEQ ID NO: 989855 - DNA, 15 bp, Homo sapiens
acactgaatgctgag

SEQ ID NO: 989856 - DNA, 15 bp, Homo sapiens
cacactgaatgctga

SEQ ID NO: 989857 - DNA, 15 bp, Homo sapiens
ccacactgaatgctg

SEQ ID NO: 989858 - DNA, 15 bp, Homo sapiens
cccacactgaatgct

SEQ ID NO: 989859 - DNA, 15 bp, Homo sapiens
tcccacactgaatgc

SEQ ID NO: 989860 - DNA, 15 bp, Homo sapiens
atcccacactgaatg

SEQ ID NO: 989861 - DNA, 15 bp, Homo sapiens
aatcccacactgaat

SEQ ID NO: 989862 - DNA, 15 bp, Homo sapiens
caatcccacactgaa

SEQ ID NO: 989863 - DNA, 15 bp, Homo sapiens
ccaatcccacactga

SEQ ID NO: 989864 - DNA, 15 bp, Homo sapiens
tccaatcccacactg

SEQ ID NO: 989865 - DNA, 15 bp, Homo sapiens
ctccaatcccacact

SEQ ID NO: 989866 - DNA, 15 bp, Homo sapiens
tctccaatcccacac

SEQ ID NO: 989867 - DNA, 15 bp, Homo sapiens
gtctccaatcccaca

SEQ ID NO: 989868 - DNA, 15 bp, Homo sapiens
agtctccaatcccac

SEQ ID NO: 989869 - DNA, 15 bp, Homo sapiens
aagtctccaatccca

SEQ ID NO: 989870 - DNA, 15 bp, Homo sapiens
taagtctccaatccc

SEQ ID NO: 989871 - DNA, 15 bp, Homo sapiens
gtaagtctccaatcc

SEQ ID NO: 989872 - DNA, 15 bp, Homo sapiens
cgtaagtctccaatc

SEQ ID NO: 989873 - DNA, 15 bp, Homo sapiens
acgtaagtctccaat

SEQ ID NO: 989874 - DNA, 15 bp, Homo sapiens
aacgtaagtctccaa

SEQ ID NO: 989875 - DNA, 15 bp, Homo sapiens
taacgtaagtctcca

SEQ ID NO: 989876 - DNA, 15 bp, Homo sapiens
gtaacgtaagtctcc

SEQ ID NO: 989877 - DNA, 15 bp, Homo sapiens
agtaacgtaagtctc

SEQ ID NO: 989878 - DNA, 15 bp, Homo sapiens
tagtaacgtaagtct

SEQ ID NO: 989879 - DNA, 15 bp, Homo sapiens
atagtaacgtaagtc

SEQ ID NO: 989880 - DNA, 15 bp, Homo sapiens
gatagtaacgtaagt

SEQ ID NO: 989881 - DNA, 15 bp, Homo sapiens
ggatagtaacgtaag

SEQ ID NO: 989882 - DNA, 15 bp, Homo sapiens
gggatagtaacgtaa

SEQ ID NO: 989883 - DNA, 15 bp, Homo sapiens
ggggatagtaacgta

SEQ ID NO: 989884 - DNA, 15 bp, Homo sapiens
tggggatagtaacgt

SEQ ID NO: 989885 - DNA, 15 bp, Homo sapiens
ttggggatagtaacg

SEQ ID NO: 989886 - DNA, 15 bp, Homo sapiens
gttggggatagtaac

SEQ ID NO: 989887 - DNA, 15 bp, Homo sapiens
tgttggggatagtaa

SEQ ID NO: 989888 - DNA, 15 bp, Homo sapiens
atgttggggatagta

SEQ ID NO: 989889 - DNA, 15 bp, Homo sapiens
catgttggggatagt

SEQ ID NO: 989890 - DNA, 15 bp, Homo sapiens
gcatgttggggatag

SEQ ID NO: 989891 - DNA, 15 bp, Homo sapiens
ggcatgttggggata

SEQ ID NO: 989892 - DNA, 15 bp, Homo sapiens
gggcatgttggggat

SEQ ID NO: 989893 - DNA, 15 bp, Homo sapiens
tgggcatgttgggga

SEQ ID NO: 989894 - DNA, 15 bp, Homo sapiens
atgggcatgttgggg

SEQ ID NO: 989895 - DNA, 15 bp, Homo sapiens
aatgggcatgttggg

SEQ ID NO: 989896 - DNA, 15 bp, Homo sapiens
gaatgggcatgttgg

SEQ ID NO: 989897 - DNA, 15 bp, Homo sapiens
cgaatgggcatgttg

SEQ ID NO: 989898 - DNA, 15 bp, Homo sapiens
gcgaatgggcatgtt

SEQ ID NO: 989899 - DNA, 15 bp, Homo sapiens
agcgaatgggcatgt

SEQ ID NO: 989900 - DNA, 15 bp, Homo sapiens
aagcgaatgggcatg

SEQ ID NO: 989901 - DNA, 15 bp, Homo sapiens
aaagcgaatgggcat

SEQ ID NO: 989902 - DNA, 15 bp, Homo sapiens
taaagcgaatgggca

SEQ ID NO: 989903 - DNA, 15 bp, Homo sapiens
gtaaagcgaatgggc

SEQ ID NO: 989904 - DNA, 15 bp, Homo sapiens
ggtaaagcgaatggg

SEQ ID NO: 989905 - DNA, 15 bp, Homo sapiens
agatcttggtaaagc

SEQ ID NO: 989906 - DNA, 15 bp, Homo sapiens
aagatcttggtaaag

SEQ ID NO: 989907 - DNA, 15 bp, Homo sapiens
agaagatcttggtaa

SEQ ID NO: 989908 - DNA, 15 bp, Homo sapiens
tagaagatcttggta

SEQ ID NO: 989909 - DNA, 15 bp, Homo sapiens
gtagaagatcttggt

SEQ ID NO: 989910 - DNA, 15 bp, Homo sapiens
tgtagaagatcttgg

SEQ ID NO: 989911 - DNA, 15 bp, Homo sapiens
ttgtagaagatcttg

SEQ ID NO: 989912 - DNA, 15 bp, Homo sapiens
attgtagaagatctt

SEQ ID NO: 989913 - DNA, 15 bp, Homo sapiens
gattgtagaagatct

SEQ ID NO: 989914 - DNA, 15 bp, Homo sapiens
tgattgtagaagatc

SEQ ID NO: 989915 - DNA, 15 bp, Homo sapiens
ctgattgtagaagat

SEQ ID NO: 989916 - DNA, 15 bp, Homo sapiens
gctgattgtagaaga

SEQ ID NO: 989917 - DNA, 15 bp, Homo sapiens
tgctgattgtagaag

SEQ ID NO: 989918 - DNA, 15 bp, Homo sapiens
ttgctgattgtagaa

SEQ ID NO: 989919 - DNA, 15 bp, Homo sapiens
tttgctgattgtaga

SEQ ID NO: 989920 - DNA, 15 bp, Homo sapiens
ttttgctgattgtag

SEQ ID NO: 989921 - DNA, 15 bp, Homo sapiens
gttttgctgattgta

SEQ ID NO: 989922 - DNA, 15 bp, Homo sapiens
ggttttgctgattgt

SEQ ID NO: 989923 - DNA, 15 bp, Homo sapiens
tggttttgctgattg

SEQ ID NO: 989924 - DNA, 15 bp, Homo sapiens
gtggttttgctgatt

SEQ ID NO: 989925 - DNA, 15 bp, Homo sapiens
agtggttttgctgat

SEQ ID NO: 989926 - DNA, 15 bp, Homo sapiens
tagtggttttgctga

SEQ ID NO: 989927 - DNA, 15 bp, Homo sapiens
atagtggttttgctg

SEQ ID NO: 989928 - DNA, 15 bp, Homo sapiens
catagtggttttgct

SEQ ID NO: 989929 - DNA, 15 bp, Homo sapiens
tcatagtggttttgc

SEQ ID NO: 989930 - DNA, 15 bp, Homo sapiens
atcatagtggttttg

SEQ ID NO: 989931 - DNA, 15 bp, Homo sapiens
catcatagtggtttt

SEQ ID NO: 989932 - DNA, 15 bp, Homo sapiens
ccatcatagtggttt

SEQ ID NO: 989933 - DNA, 15 bp, Homo sapiens
gccatcatagtggtt

SEQ ID NO: 989934 - DNA, 15 bp, Homo sapiens
agccatcatagtggt

SEQ ID NO: 989935 - DNA, 15 bp, Homo sapiens
gagccatcatagtgg

SEQ ID NO: 989936 - DNA, 15 bp, Homo sapiens
ggagccatcatagtg

SEQ ID NO: 989937 - DNA, 15 bp, Homo sapiens
tggagccatcatagt

SEQ ID NO: 989938 - DNA, 15 bp, Homo sapiens
gtggagccatcatag

SEQ ID NO: 989939 - DNA, 15 bp, Homo sapiens
agtggagccatcata

SEQ ID NO: 989940 - DNA, 15 bp, Homo sapiens
cagtggagccatcat

SEQ ID NO: 989941 - DNA, 15 bp, Homo sapiens
ccagtggagccatca

SEQ ID NO: 989942 - DNA, 15 bp, Homo sapiens
accagtggagccatc

SEQ ID NO: 989943 - DNA, 15 bp, Homo sapiens
taccagtggagccat

SEQ ID NO: 989944 - DNA, 15 bp, Homo sapiens
ttaccagtggagcca

SEQ ID NO: 989945 - DNA, 15 bp, Homo sapiens
tttaccagtggagcc

SEQ ID NO: 989946 - DNA, 15 bp, Homo sapiens
atttaccagtggagc

SEQ ID NO: 989947 - DNA, 15 bp, Homo sapiens
aatttaccagtggag

SEQ ID NO: 989948 - DNA, 15 bp, Homo sapiens
gaatttaccagtgga

SEQ ID NO: 989949 - DNA, 15 bp, Homo sapiens
ggaatttaccagtgg

SEQ ID NO: 989950 - DNA, 15 bp, Homo sapiens
tggaatttaccagtg

SEQ ID NO: 989951 - DNA, 15 bp, Homo sapiens
gtggaatttaccagt

SEQ ID NO: 989952 - DNA, 15 bp, Homo sapiens
agtggaatttaccag

SEQ ID NO: 989953 - DNA, 15 bp, Homo sapiens
cagtggaatttacca

SEQ ID NO: 989954 - DNA, 15 bp, Homo sapiens
gcagtggaatttacc

SEQ ID NO: 989955 - DNA, 15 bp, Homo sapiens
tgcagtggaatttac

SEQ ID NO: 989956 - DNA, 15 bp, Homo sapiens
ttgcagtggaattta

SEQ ID NO: 989957 - DNA, 15 bp, Homo sapiens
gttgcagtggaattt

SEQ ID NO: 989958 - DNA, 15 bp, Homo sapiens
tgttgcagtggaatt

SEQ ID NO: 989959 - DNA, 15 bp, Homo sapiens
atgttgcagtggaat

SEQ ID NO: 989960 - DNA, 15 bp, Homo sapiens
aatgttgcagtggaa

SEQ ID NO: 989961 - DNA, 15 bp, Homo sapiens
gaatgttgcagtgga

SEQ ID NO: 989962 - DNA, 15 bp, Homo sapiens
ggaatgttgcagtgg

SEQ ID NO: 989963 - DNA, 15 bp, Homo sapiens
aggaatgttgcagtg

SEQ ID NO: 989964 - DNA, 15 bp, Homo sapiens
caggaatgttgcagt

SEQ ID NO: 989965 - DNA, 15 bp, Homo sapiens
ccaggaatgttgcag

SEQ ID NO: 989966 - DNA, 15 bp, Homo sapiens
cccaggaatgttgca

SEQ ID NO: 989967 - DNA, 15 bp, Homo sapiens
gcccaggaatgttgc

SEQ ID NO: 989968 - DNA, 15 bp, Homo sapiens
agcccaggaatgttg

SEQ ID NO: 989969 - DNA, 15 bp, Homo sapiens
cagcccaggaatgtt

SEQ ID NO: 989970 - DNA, 15 bp, Homo sapiens
acagcccaggaatgt

SEQ ID NO: 989971 - DNA, 15 bp, Homo sapiens
tacagcccaggaatg

SEQ ID NO: 989972 - DNA, 15 bp, Homo sapiens
gtacagcccaggaat

SEQ ID NO: 989973 - DNA, 15 bp, Homo sapiens
agtacagcccaggaa

SEQ ID NO: 989974 - DNA, 15 bp, Homo sapiens
tagtacagcccagga

SEQ ID NO: 989975 - DNA, 15 bp, Homo sapiens
gtagtacagcccagg

SEQ ID NO: 989976 - DNA, 15 bp, Homo sapiens
agtagtacagcccag

SEQ ID NO: 989977 - DNA, 15 bp, Homo sapiens
aagtagtacagccca

SEQ ID NO: 989978 - DNA, 15 bp, Homo sapiens
aaagtagtacagccc

SEQ ID NO: 989979 - DNA, 15 bp, Homo sapiens
caaagtagtacagcc

SEQ ID NO: 989980 - DNA, 15 bp, Homo sapiens
gcaaagtagtacagc

SEQ ID NO: 989981 - DNA, 15 bp, Homo sapiens
ggcaaagtagtacag

SEQ ID NO: 989982 - DNA, 15 bp, Homo sapiens
aggcaaagtagtaca

SEQ ID NO: 989983 - DNA, 15 bp, Homo sapiens
taggcaaagtagtac

SEQ ID NO: 989984 - DNA, 15 bp, Homo sapiens
gtaggcaaagtagta

SEQ ID NO: 989985 - DNA, 15 bp, Homo sapiens
ggtaggcaaagtagt

SEQ ID NO: 989986 - DNA, 15 bp, Homo sapiens
tggtaggcaaagtag

SEQ ID NO: 989987 - DNA, 15 bp, Homo sapiens
gtggtaggcaaagta

SEQ ID NO: 989988 - DNA, 15 bp, Homo sapiens
tgtggtaggcaaagt

SEQ ID NO: 989989 - DNA, 15 bp, Homo sapiens
atgtggtaggcaaag

SEQ ID NO: 989990 - DNA, 15 bp, Homo sapiens
gatgtggtaggcaaa

SEQ ID NO: 989991 - DNA, 15 bp, Homo sapiens
tgatgtggtaggcaa

SEQ ID NO: 989992 - DNA, 15 bp, Homo sapiens
gtgatgtggtaggca

SEQ ID NO: 989993 - DNA, 15 bp, Homo sapiens
tgtgatgtggtaggc

SEQ ID NO: 989994 - DNA, 15 bp, Homo sapiens
ctgtgatgtggtagg

SEQ ID NO: 989995 - DNA, 15 bp, Homo sapiens
actgtgatgtggtag

SEQ ID NO: 989996 - DNA, 15 bp, Homo sapiens
gactgtgatgtggta

SEQ ID NO: 989997 - DNA, 15 bp, Homo sapiens
agactgtgatgtggt

SEQ ID NO: 989998 - DNA, 15 bp, Homo sapiens
tagactgtgatgtgg

SEQ ID NO: 989999 - DNA, 15 bp, Homo sapiens
atagactgtgatgtg

SEQ ID NO: 990000 - DNA, 15 bp, Homo sapiens
tatagactgtgatgt

SEQ ID NO: 990001 - DNA, 15 bp, Homo sapiens
atatagactgtgatg

SEQ ID NO: 990002 - DNA, 15 bp, Homo sapiens
catatagactgtgat

SEQ ID NO: 990003 - DNA, 15 bp, Homo sapiens
tcatatagactgtga

SEQ ID NO: 990004 - DNA, 15 bp, Homo sapiens
ttcatatagactgtg

SEQ ID NO: 990005 - DNA, 15 bp, Homo sapiens
cttcatatagactgt

SEQ ID NO: 990006 - DNA, 15 bp, Homo sapiens
ccttcatatagactg

SEQ ID NO: 990007 - DNA, 15 bp, Homo sapiens
tccttcatatagact

SEQ ID NO: 990008 - DNA, 15 bp, Homo sapiens
atccttcatatagac

SEQ ID NO: 990009 - DNA, 15 bp, Homo sapiens
catccttcatataga

SEQ ID NO: 990010 - DNA, 15 bp, Homo sapiens
acatccttcatatag

SEQ ID NO: 990011 - DNA, 15 bp, Homo sapiens
cacatccttcatata

SEQ ID NO: 990012 - DNA, 15 bp, Homo sapiens
tcacatccttcatat

SEQ ID NO: 990013 - DNA, 15 bp, Homo sapiens
ttcacatccttcata

SEQ ID NO: 990014 - DNA, 15 bp, Homo sapiens
cttcacatccttcat

SEQ ID NO: 990015 - DNA, 15 bp, Homo sapiens
ccttcacatccttca

SEQ ID NO: 990016 - DNA, 15 bp, Homo sapiens
accttcacatccttc

SEQ ID NO: 990017 - DNA, 15 bp, Homo sapiens
gaccttcacatcctt

SEQ ID NO: 990018 - DNA, 15 bp, Homo sapiens
tgaccttcacatcct

SEQ ID NO: 990019 - DNA, 15 bp, Homo sapiens
ctgaccttcacatcc

SEQ ID NO: 990020 - DNA, 15 bp, Homo sapiens
gctgaccttcacatc

SEQ ID NO: 990021 - DNA, 15 bp, Homo sapiens
ggctgaccttcacat

SEQ ID NO: 990022 - DNA, 15 bp, Homo sapiens
aggctgaccttcaca

SEQ ID NO: 990023 - DNA, 15 bp, Homo sapiens
gaggctgaccttcac

SEQ ID NO: 990024 - DNA, 15 bp, Homo sapiens
agaggctgaccttca

SEQ ID NO: 990025 - DNA, 15 bp, Homo sapiens
aagaggctgaccttc

SEQ ID NO: 990026 - DNA, 15 bp, Homo sapiens
gaagaggctgacctt

SEQ ID NO: 990027 - DNA, 15 bp, Homo sapiens
tgaagaggctgacct

SEQ ID NO: 990028 - DNA, 15 bp, Homo sapiens
ttgaagaggctgacc

SEQ ID NO: 990029 - DNA, 15 bp, Homo sapiens
cttgaagaggctgac

SEQ ID NO: 990030 - DNA, 15 bp, Homo sapiens
tcttgaagaggctga

SEQ ID NO: 990031 - DNA, 15 bp, Homo sapiens
ttcttgaagaggctg

SEQ ID NO: 990032 - DNA, 15 bp, Homo sapiens
cttcttgaagaggct

SEQ ID NO: 990033 - DNA, 15 bp, Homo sapiens
ccttcttgaagaggc

SEQ ID NO: 990034 - DNA, 15 bp, Homo sapiens
tccttcttgaagagg

SEQ ID NO: 990035 - DNA, 15 bp, Homo sapiens
gtccttcttgaagag

SEQ ID NO: 990036 - DNA, 15 bp, Homo sapiens
tgtccttcttgaaga

SEQ ID NO: 990037 - DNA, 15 bp, Homo sapiens
ttgtccttcttgaag

SEQ ID NO: 990038 - DNA, 15 bp, Homo sapiens
cttgtccttcttgaa

SEQ ID NO: 990039 - DNA, 15 bp, Homo sapiens
ccttgtccttcttga

SEQ ID NO: 990040 - DNA, 15 bp, Homo sapiens
gccttgtccttcttg

SEQ ID NO: 990041 - DNA, 15 bp, Homo sapiens
agccttgtccttctt

SEQ ID NO: 990042 - DNA, 15 bp, Homo sapiens
tagccttgtccttct

SEQ ID NO: 990043 - DNA, 15 bp, Homo sapiens
atagccttgtccttc

SEQ ID NO: 990044 - DNA, 15 bp, Homo sapiens
catagccttgtcctt

SEQ ID NO: 990045 - DNA, 15 bp, Homo sapiens
gcatagccttgtcct

SEQ ID NO: 990046 - DNA, 15 bp, Homo sapiens
agcatagccttgtcc

SEQ ID NO: 990047 - DNA, 15 bp, Homo sapiens
gagcatagccttgtc

SEQ ID NO: 990048 - DNA, 15 bp, Homo sapiens
agagcatagccttgt

SEQ ID NO: 990049 - DNA, 15 bp, Homo sapiens
aagagcatagccttg

SEQ ID NO: 990050 - DNA, 15 bp, Homo sapiens
gaagagcatagcctt

SEQ ID NO: 990051 - DNA, 15 bp, Homo sapiens
tgaagagcatagcct

SEQ ID NO: 990052 - DNA, 15 bp, Homo sapiens
gtgaagagcatagcc

SEQ ID NO: 990053 - DNA, 15 bp, Homo sapiens
ggtgaagagcatagc

SEQ ID NO: 990054 - DNA, 15 bp, Homo sapiens
aggtgaagagcatag

SEQ ID NO: 990055 - DNA, 15 bp, Homo sapiens
taggtgaagagcata

SEQ ID NO: 990056 - DNA, 15 bp, Homo sapiens
ataggtgaagagcat

SEQ ID NO: 990057 - DNA, 15 bp, Homo sapiens
cataggtgaagagca

SEQ ID NO: 990058 - DNA, 15 bp, Homo sapiens
tcataggtgaagagc

SEQ ID NO: 990059 - DNA, 15 bp, Homo sapiens
atcataggtgaagag

SEQ ID NO: 990060 - DNA, 15 bp, Homo sapiens
gatcataggtgaaga

SEQ ID NO: 990061 - DNA, 15 bp, Homo sapiens
tgatcataggtgaag

SEQ ID NO: 990062 - DNA, 15 bp, Homo sapiens
ctgatcataggtgaa

SEQ ID NO: 990063 - DNA, 15 bp, Homo sapiens
actgatcataggtga

SEQ ID NO: 990064 - DNA, 15 bp, Homo sapiens
tactgatcataggtg

SEQ ID NO: 990065 - DNA, 15 bp, Homo sapiens
gtactgatcataggt

SEQ ID NO: 990066 - DNA, 15 bp, Homo sapiens
ggtactgatcatagg

SEQ ID NO: 990067 - DNA, 15 bp, Homo sapiens
tggtactgatcatag

SEQ ID NO: 990068 - DNA, 15 bp, Homo sapiens
ctggtactgatcata

SEQ ID NO: 990069 - DNA, 15 bp, Homo sapiens
cctggtactgatcat

SEQ ID NO: 990070 - DNA, 15 bp, Homo sapiens
tcctggtactgatca

SEQ ID NO: 990071 - DNA, 15 bp, Homo sapiens
ttcctggtactgatc

SEQ ID NO: 990072 - DNA, 15 bp, Homo sapiens
tttcctggtactgat

SEQ ID NO: 990073 - DNA, 15 bp, Homo sapiens
ttttcctggtactga

SEQ ID NO: 990074 - DNA, 15 bp, Homo sapiens
attttcctggtactg

SEQ ID NO: 990075 - DNA, 15 bp, Homo sapiens
tattttcctggtact

SEQ ID NO: 990076 - DNA, 15 bp, Homo sapiens
ttattttcctggtac

SEQ ID NO: 990077 - DNA, 15 bp, Homo sapiens
attattttcctggta

SEQ ID NO: 990078 - DNA, 15 bp, Homo sapiens
cattattttcctggt

SEQ ID NO: 990079 - DNA, 15 bp, Homo sapiens
acattattttcctgg

SEQ ID NO: 990080 - DNA, 15 bp, Homo sapiens
cacattattttcctg

SEQ ID NO: 990081 - DNA, 15 bp, Homo sapiens
ccacattattttcct

SEQ ID NO: 990082 - DNA, 15 bp, Homo sapiens
tccacattattttcc

SEQ ID NO: 990083 - DNA, 15 bp, Homo sapiens
gtccacattattttc

SEQ ID NO: 990084 - DNA, 15 bp, Homo sapiens
ggtccacattatttt

SEQ ID NO: 990085 - DNA, 15 bp, Homo sapiens
tggtccacattattt

SEQ ID NO: 990086 - DNA, 15 bp, Homo sapiens
ctggtccacattatt

SEQ ID NO: 990087 - DNA, 15 bp, Homo sapiens
cctggtccacattat

SEQ ID NO: 990088 - DNA, 15 bp, Homo sapiens
aggcctggtccacat

SEQ ID NO: 990089 - DNA, 15 bp, Homo sapiens
gaggcctggtccaca

SEQ ID NO: 990090 - DNA, 15 bp, Homo sapiens
ggaggcctggtccac

SEQ ID NO: 990091 - DNA, 15 bp, Homo sapiens
cggaggcctggtcca

SEQ ID NO: 990092 - DNA, 15 bp, Homo sapiens
ccggaggcctggtcc

SEQ ID NO: 990093 - DNA, 15 bp, Homo sapiens
gccggaggcctggtc

SEQ ID NO: 990094 - DNA, 15 bp, Homo sapiens
agccggaggcctggt

SEQ ID NO: 990095 - DNA, 15 bp, Homo sapiens
gagccggaggcctgg

SEQ ID NO: 990096 - DNA, 15 bp, Homo sapiens
agagccggaggcctg

SEQ ID NO: 990097 - DNA, 15 bp, Homo sapiens
cagagccggaggcct

SEQ ID NO: 990098 - DNA, 15 bp, Homo sapiens
acagagccggaggcc

SEQ ID NO: 990099 - DNA, 15 bp, Homo sapiens
cacagagccggaggc

SEQ ID NO: 990100 - DNA, 15 bp, Homo sapiens
gcacagagccggagg

SEQ ID NO: 990101 - DNA, 15 bp, Homo sapiens
agcacagagccggag

SEQ ID NO: 990102 - DNA, 15 bp, Homo sapiens
ggagcacagagccgg

SEQ ID NO: 990103 - DNA, 15 bp, Homo sapiens
aggagcacagagccg

SEQ ID NO: 990104 - DNA, 15 bp, Homo sapiens
caggagcacagagcc

SEQ ID NO: 990105 - DNA, 15 bp, Homo sapiens
gcaggagcacagagc

SEQ ID NO: 990106 - DNA, 15 bp, Homo sapiens
tgcaggagcacagag

SEQ ID NO: 990107 - DNA, 15 bp, Homo sapiens
atgcaggagcacaga

SEQ ID NO: 990108 - DNA, 15 bp, Homo sapiens
gatgcaggagcacag

SEQ ID NO: 990109 - DNA, 15 bp, Homo sapiens
agatgcaggagcaca

SEQ ID NO: 990110 - DNA, 15 bp, Homo sapiens
cagatgcaggagcac

SEQ ID NO: 990111 - DNA, 15 bp, Homo sapiens
ccagatgcaggagca

SEQ ID NO: 990112 - DNA, 15 bp, Homo sapiens
tccagatgcaggagc

SEQ ID NO: 990113 - DNA, 15 bp, Homo sapiens
ctccagatgcaggag

SEQ ID NO: 990114 - DNA, 15 bp, Homo sapiens
cctccagatgcagga

SEQ ID NO: 990115 - DNA, 15 bp, Homo sapiens
acctccagatgcagg

SEQ ID NO: 990116 - DNA, 15 bp, Homo sapiens
cacctccagatgcag

SEQ ID NO: 990117 - DNA, 15 bp, Homo sapiens
ccacctccagatgca

SEQ ID NO: 990118 - DNA, 15 bp, Homo sapiens
cccacctccagatgc

SEQ ID NO: 990119 - DNA, 15 bp, Homo sapiens
gcccacctccagatg

SEQ ID NO: 990120 - DNA, 15 bp, Homo sapiens
cgcccacctccagat

SEQ ID NO: 990121 - DNA, 15 bp, Homo sapiens
tcgcccacctccaga

SEQ ID NO: 990122 - DNA, 15 bp, Homo sapiens
gtcgcccacctccag

SEQ ID NO: 990123 - DNA, 15 bp, Homo sapiens
ggtcgcccacctcca

SEQ ID NO: 990124 - DNA, 15 bp, Homo sapiens
tggtcgcccacctcc

SEQ ID NO: 990125 - DNA, 15 bp, Homo sapiens
gagccagacttggtc

SEQ ID NO: 990126 - DNA, 15 bp, Homo sapiens
ggagccagacttggt

SEQ ID NO: 990127 - DNA, 15 bp, Homo sapiens
tggagccagacttgg

SEQ ID NO: 990128 - DNA, 15 bp, Homo sapiens
ctggagccagacttg

SEQ ID NO: 990129 - DNA, 15 bp, Homo sapiens
cctggagccagactt

SEQ ID NO: 990130 - DNA, 15 bp, Homo sapiens
acctggagccagact

SEQ ID NO: 990131 - DNA, 15 bp, Homo sapiens
cacctggagccagac

SEQ ID NO: 990132 - DNA, 15 bp, Homo sapiens
acacctggagccaga

SEQ ID NO: 990133 - DNA, 15 bp, Homo sapiens
tacacctggagccag

SEQ ID NO: 990134 - DNA, 15 bp, Homo sapiens
atacacctggagcca

SEQ ID NO: 990135 - DNA, 15 bp, Homo sapiens
cccatacacctggag

SEQ ID NO: 990136 - DNA, 15 bp, Homo sapiens
ccccatacacctgga

SEQ ID NO: 990137 - DNA, 15 bp, Homo sapiens
tccccatacacctgg

SEQ ID NO: 990138 - DNA, 15 bp, Homo sapiens
ttccccatacacctg

SEQ ID NO: 990139 - DNA, 15 bp, Homo sapiens
cttccccatacacct

SEQ ID NO: 990140 - DNA, 15 bp, Homo sapiens
ccttccccatacacc

SEQ ID NO: 990141 - DNA, 15 bp, Homo sapiens
tccttccccatacac

SEQ ID NO: 990142 - DNA, 15 bp, Homo sapiens
ctccttccccataca

SEQ ID NO: 990143 - DNA, 15 bp, Homo sapiens
tctccttccccatac

SEQ ID NO: 990144 - DNA, 15 bp, Homo sapiens
ctctccttccccata

SEQ ID NO: 990145 - DNA, 15 bp, Homo sapiens
gctctccttccccat

SEQ ID NO: 990146 - DNA, 15 bp, Homo sapiens
cgctctccttcccca

SEQ ID NO: 990147 - DNA, 15 bp, Homo sapiens
acgctctccttcccc

SEQ ID NO: 990148 - DNA, 15 bp, Homo sapiens
tacgctctccttccc

SEQ ID NO: 990149 - DNA, 15 bp, Homo sapiens
ttacgctctccttcc

SEQ ID NO: 990150 - DNA, 15 bp, Homo sapiens
attacgctctccttc

SEQ ID NO: 990151 - DNA, 15 bp, Homo sapiens
cattacgctctcctt

SEQ ID NO: 990152 - DNA, 15 bp, Homo sapiens
ccattacgctctcct

SEQ ID NO: 990153 - DNA, 15 bp, Homo sapiens
tccattacgctctcc

SEQ ID NO: 990154 - DNA, 15 bp, Homo sapiens
gtccattacgctctc

SEQ ID NO: 990155 - DNA, 15 bp, Homo sapiens
agtccattacgctct

SEQ ID NO: 990156 - DNA, 15 bp, Homo sapiens
gagtccattacgctc

SEQ ID NO: 990157 - DNA, 15 bp, Homo sapiens
agagtccattacgct

SEQ ID NO: 990158 - DNA, 15 bp, Homo sapiens
tagagtccattacgc

SEQ ID NO: 990159 - DNA, 15 bp, Homo sapiens
atagagtccattacg

SEQ ID NO: 990160 - DNA, 15 bp, Homo sapiens
catagagtccattac

SEQ ID NO: 990161 - DNA, 15 bp, Homo sapiens
gcatagagtccatta

SEQ ID NO: 990162 - DNA, 15 bp, Homo sapiens
agcatagagtccatt

SEQ ID NO: 990163 - DNA, 15 bp, Homo sapiens
cagcatagagtccat

SEQ ID NO: 990164 - DNA, 15 bp, Homo sapiens
tcagcatagagtcca

SEQ ID NO: 990165 - DNA, 15 bp, Homo sapiens
atcagcatagagtcc

SEQ ID NO: 990166 - DNA, 15 bp, Homo sapiens
ttatcagcatagagt

SEQ ID NO: 990167 - DNA, 15 bp, Homo sapiens
attatcagcatagag

SEQ ID NO: 990168 - DNA, 15 bp, Homo sapiens
cattatcagcataga

SEQ ID NO: 990169 - DNA, 15 bp, Homo sapiens
tcattatcagcatag

SEQ ID NO: 990170 - DNA, 15 bp, Homo sapiens
gtcattatcagcata

SEQ ID NO: 990171 - DNA, 15 bp, Homo sapiens
tgtcattatcagcat

SEQ ID NO: 990172 - DNA, 15 bp, Homo sapiens
ttgtcattatcagca

SEQ ID NO: 990173 - DNA, 15 bp, Homo sapiens
attgtcattatcagc

SEQ ID NO: 990174 - DNA, 15 bp, Homo sapiens
cattgtcattatcag

SEQ ID NO: 990175 - DNA, 15 bp, Homo sapiens
tcattgtcattatca

SEQ ID NO: 990176 - DNA, 15 bp, Homo sapiens
gtcattgtcattatc

SEQ ID NO: 990177 - DNA, 15 bp, Homo sapiens
agtcattgtcattat

SEQ ID NO: 990178 - DNA, 15 bp, Homo sapiens
gagtcattgtcatta

SEQ ID NO: 990179 - DNA, 15 bp, Homo sapiens
ggagtcattgtcatt

SEQ ID NO: 990180 - DNA, 15 bp, Homo sapiens
tggagtcattgtcat

SEQ ID NO: 990181 - DNA, 15 bp, Homo sapiens
gtggagtcattgtca

SEQ ID NO: 990182 - DNA, 15 bp, Homo sapiens
ggtggagtcattgtc

SEQ ID NO: 990183 - DNA, 15 bp, Homo sapiens
aggtggagtcattgt

SEQ ID NO: 990184 - DNA, 15 bp, Homo sapiens
aaggtggagtcattg

SEQ ID NO: 990185 - DNA, 15 bp, Homo sapiens
gaaggtggagtcatt

SEQ ID NO: 990186 - DNA, 15 bp, Homo sapiens
tgaaggtggagtcat

SEQ ID NO: 990187 - DNA, 15 bp, Homo sapiens
gtgaaggtggagtca

SEQ ID NO: 990188 - DNA, 15 bp, Homo sapiens
tgtgaaggtggagtc

SEQ ID NO: 990189 - DNA, 15 bp, Homo sapiens
ctgtgaaggtggagt

SEQ ID NO: 990190 - DNA, 15 bp, Homo sapiens
cctgtgaaggtggag

SEQ ID NO: 990191 - DNA, 15 bp, Homo sapiens
gcctgtgaaggtgga

SEQ ID NO: 990192 - DNA, 15 bp, Homo sapiens
agcctgtgaaggtgg

SEQ ID NO: 990193 - DNA, 15 bp, Homo sapiens
aagcctgtgaaggtg

SEQ ID NO: 990194 - DNA, 15 bp, Homo sapiens
aaagcctgtgaaggt

SEQ ID NO: 990195 - DNA, 15 bp, Homo sapiens
gaaagcctgtgaagg

SEQ ID NO: 990196 - DNA, 15 bp, Homo sapiens
agaaagcctgtgaag

SEQ ID NO: 990197 - DNA, 15 bp, Homo sapiens
aagaaagcctgtgaa

SEQ ID NO: 990198 - DNA, 15 bp, Homo sapiens
gaagaaagcctgtga

SEQ ID NO: 990199 - DNA, 15 bp, Homo sapiens
agaagaaagcctgtg

SEQ ID NO: 990200 - DNA, 15 bp, Homo sapiens
gagaagaaagcctgt

SEQ ID NO: 990201 - DNA, 15 bp, Homo sapiens
agagaagaaagcctg

SEQ ID NO: 990202 - DNA, 15 bp, Homo sapiens
tagagaagaaagcct

SEQ ID NO: 990203 - DNA, 15 bp, Homo sapiens
gtagagaagaaagcc

SEQ ID NO: 990204 - DNA, 15 bp, Homo sapiens
ggtagagaagaaagc

SEQ ID NO: 990205 - DNA, 15 bp, Homo sapiens
tggtagagaagaaag

SEQ ID NO: 990206 - DNA, 15 bp, Homo sapiens
atggtagagaagaaa

SEQ ID NO: 990207 - DNA, 15 bp, Homo sapiens
catggtagagaagaa

SEQ ID NO: 990208 - DNA, 15 bp, Homo sapiens
tcatggtagagaaga

SEQ ID NO: 990209 - DNA, 15 bp, Homo sapiens
gtcatggtagagaag

SEQ ID NO: 990210 - DNA, 15 bp, Homo sapiens
tgtcatggtagagaa

SEQ ID NO: 990211 - DNA, 15 bp, Homo sapiens
gtgtcatggtagaga

SEQ ID NO: 990212 - DNA, 15 bp, Homo sapiens
ggtgtcatggtagag

SEQ ID NO: 990213 - DNA, 15 bp, Homo sapiens
tggtgtcatggtaga

SEQ ID NO: 990214 - DNA, 15 bp, Homo sapiens
ttggtgtcatggtag

SEQ ID NO: 990215 - DNA, 15 bp, Homo sapiens
gttggtgtcatggta

SEQ ID NO: 990216 - DNA, 15 bp, Homo sapiens
agttggtgtcatggt

SEQ ID NO: 990217 - DNA, 15 bp, Homo sapiens
cagttggtgtcatgg

SEQ ID NO: 990218 - DNA, 15 bp, Homo sapiens
tcagttggtgtcatg

SEQ ID NO: 990219 - DNA, 15 bp, Homo sapiens
atcagttggtgtcat

SEQ ID NO: 990220 - DNA, 15 bp, Homo sapiens
gatcagttggtgtca

SEQ ID NO: 990221 - DNA, 15 bp, Homo sapiens
tgatcagttggtgtc

SEQ ID NO: 990222 - DNA, 15 bp, Homo sapiens
gtgatcagttggtgt

SEQ ID NO: 990223 - DNA, 15 bp, Homo sapiens
ggtgatcagttggtg

SEQ ID NO: 990224 - DNA, 15 bp, Homo sapiens
tggtgatcagttggt

SEQ ID NO: 990225 - DNA, 15 bp, Homo sapiens
gtggtgatcagttgg

SEQ ID NO: 990226 - DNA, 15 bp, Homo sapiens
agtggtgatcagttg

SEQ ID NO: 990227 - DNA, 15 bp, Homo sapiens
tagtggtgatcagtt

SEQ ID NO: 990228 - DNA, 15 bp, Homo sapiens
ttagtggtgatcagt

SEQ ID NO: 990229 - DNA, 15 bp, Homo sapiens
gttagtggtgatcag

SEQ ID NO: 990230 - DNA, 15 bp, Homo sapiens
agttagtggtgatca

SEQ ID NO: 990231 - DNA, 15 bp, Homo sapiens
gagttagtggtgatc

SEQ ID NO: 990232 - DNA, 15 bp, Homo sapiens
tgagttagtggtgat

SEQ ID NO: 990233 - DNA, 15 bp, Homo sapiens
ctgagttagtggtga

SEQ ID NO: 990234 - DNA, 15 bp, Homo sapiens
tctgagttagtggtg

SEQ ID NO: 990235 - DNA, 15 bp, Homo sapiens
ctctgagttagtggt

SEQ ID NO: 990236 - DNA, 15 bp, Homo sapiens
gctctgagttagtgg

SEQ ID NO: 990237 - DNA, 15 bp, Homo sapiens
ggctctgagttagtg

SEQ ID NO: 990238 - DNA, 15 bp, Homo sapiens
aggctctgagttagt

SEQ ID NO: 990239 - DNA, 15 bp, Homo sapiens
gaggctctgagttag

SEQ ID NO: 990240 - DNA, 15 bp, Homo sapiens
ggaggctctgagtta

SEQ ID NO: 990241 - DNA, 15 bp, Homo sapiens
aggaggctctgagtt

SEQ ID NO: 990242 - DNA, 15 bp, Homo sapiens
gaggaggctctgagt

SEQ ID NO: 990243 - DNA, 15 bp, Homo sapiens
ggaggaggctctgag

SEQ ID NO: 990244 - DNA, 15 bp, Homo sapiens
tggaggaggctctga

SEQ ID NO: 990245 - DNA, 15 bp, Homo sapiens
ctggaggaggctctg

SEQ ID NO: 990246 - DNA, 15 bp, Homo sapiens
cctggaggaggctct

SEQ ID NO: 990247 - DNA, 15 bp, Homo sapiens
gcctggaggaggctc

SEQ ID NO: 990248 - DNA, 15 bp, Homo sapiens
ggcctggaggaggct

SEQ ID NO: 990249 - DNA, 15 bp, Homo sapiens
tggcctggaggaggc

SEQ ID NO: 990250 - DNA, 15 bp, Homo sapiens
ttggcctggaggagg

SEQ ID NO: 990251 - DNA, 15 bp, Homo sapiens
tttggcctggaggag

SEQ ID NO: 990252 - DNA, 15 bp, Homo sapiens
gtttggcctggagga

SEQ ID NO: 990253 - DNA, 15 bp, Homo sapiens
tgtttggcctggagg

SEQ ID NO: 990254 - DNA, 15 bp, Homo sapiens
ctgtttggcctggag

SEQ ID NO: 990255 - DNA, 15 bp, Homo sapiens
gctgtttggcctgga

SEQ ID NO: 990256 - DNA, 15 bp, Homo sapiens
ggctgtttggcctgg

SEQ ID NO: 990257 - DNA, 15 bp, Homo sapiens
gggctgtttggcctg

SEQ ID NO: 990258 - DNA, 15 bp, Homo sapiens
ggggctgtttggcct

SEQ ID NO: 990259 - DNA, 15 bp, Homo sapiens
tggggctgtttggcc

SEQ ID NO: 990260 - DNA, 15 bp, Homo sapiens
ttggggctgtttggc

SEQ ID NO: 990261 - DNA, 15 bp, Homo sapiens
tttggggctgtttgg

SEQ ID NO: 990262 - DNA, 15 bp, Homo sapiens
ctttggggctgtttg

SEQ ID NO: 990263 - DNA, 15 bp, Homo sapiens
actttggggctgttt

SEQ ID NO: 990264 - DNA, 15 bp, Homo sapiens
gactttggggctgtt

SEQ ID NO: 990265 - DNA, 15 bp, Homo sapiens
tgactttggggctgt

SEQ ID NO: 990266 - DNA, 15 bp, Homo sapiens
ttgactttggggctg

SEQ ID NO: 990267 - DNA, 15 bp, Homo sapiens
attgactttggggct

SEQ ID NO: 990268 - DNA, 15 bp, Homo sapiens
aattgactttggggc

SEQ ID NO: 990269 - DNA, 15 bp, Homo sapiens
taattgactttgggg

SEQ ID NO: 990270 - DNA, 15 bp, Homo sapiens
ttaattgactttggg

SEQ ID NO: 990271 - DNA, 15 bp, Homo sapiens
tttaattgactttgg

SEQ ID NO: 990272 - DNA, 15 bp, Homo sapiens
ctttaattgactttg

SEQ ID NO: 990273 - DNA, 15 bp, Homo sapiens
cctttaattgacttt

SEQ ID NO: 990274 - DNA, 15 bp, Homo sapiens
gcctttaattgactt

SEQ ID NO: 990275 - DNA, 15 bp, Homo sapiens
agcctttaattgact

SEQ ID NO: 990276 - DNA, 15 bp, Homo sapiens
aagcctttaattgac

SEQ ID NO: 990277 - DNA, 15 bp, Homo sapiens
aaagcctttaattga

SEQ ID NO: 990278 - DNA, 15 bp, Homo sapiens
gaaagcctttaattg

SEQ ID NO: 990279 - DNA, 15 bp, Homo sapiens
tgaaagcctttaatt

SEQ ID NO: 990280 - DNA, 15 bp, Homo sapiens
ctgaaagcctttaat

SEQ ID NO: 990281 - DNA, 15 bp, Homo sapiens
actgaaagcctttaa

SEQ ID NO: 990282 - DNA, 15 bp, Homo sapiens
tactgaaagccttta

SEQ ID NO: 990283 - DNA, 15 bp, Homo sapiens
gtactgaaagccttt

SEQ ID NO: 990284 - DNA, 15 bp, Homo sapiens
cgtactgaaagcctt

SEQ ID NO: 990285 - DNA, 15 bp, Homo sapiens
ccgtactgaaagcct

SEQ ID NO: 990286 - DNA, 15 bp, Homo sapiens
accgtactgaaagcc

SEQ ID NO: 990287 - DNA, 15 bp, Homo sapiens
aaccgtactgaaagc

SEQ ID NO: 990288 - DNA, 15 bp, Homo sapiens
taaccgtactgaaag

SEQ ID NO: 990289 - DNA, 15 bp, Homo sapiens
ctaaccgtactgaaa

SEQ ID NO: 990290 - DNA, 15 bp, Homo sapiens
cctaaccgtactgaa

SEQ ID NO: 990291 - DNA, 15 bp, Homo sapiens
tcctaaccgtactga

SEQ ID NO: 990292 - DNA, 15 bp, Homo sapiens
ttcctaaccgtactg

SEQ ID NO: 990293 - DNA, 15 bp, Homo sapiens
cttcctaaccgtact

SEQ ID NO: 990294 - DNA, 15 bp, Homo sapiens
acttcctaaccgtac

SEQ ID NO: 990295 - DNA, 15 bp, Homo sapiens
aacttcctaaccgta

SEQ ID NO: 990296 - DNA, 15 bp, Homo sapiens
caacttcctaaccgt

SEQ ID NO: 990297 - DNA, 15 bp, Homo sapiens
tcaacttcctaaccg

SEQ ID NO: 990298 - DNA, 15 bp, Homo sapiens
atcaacttcctaacc

SEQ ID NO: 990299 - DNA, 15 bp, Homo sapiens
aatcaacttcctaac

SEQ ID NO: 990300 - DNA, 15 bp, Homo sapiens
taatcaacttcctaa

SEQ ID NO: 990301 - DNA, 15 bp, Homo sapiens
ataatcaacttccta

SEQ ID NO: 990302 - DNA, 15 bp, Homo sapiens
aataatcaacttcct

SEQ ID NO: 990303 - DNA, 15 bp, Homo sapiens
taataatcaacttcc

SEQ ID NO: 990304 - DNA, 15 bp, Homo sapiens
ataataatcaacttc

SEQ ID NO: 990305 - DNA, 15 bp, Homo sapiens
aataataatcaactt

SEQ ID NO: 990306 - DNA, 15 bp, Homo sapiens
aaataataatcaact

SEQ ID NO: 990307 - DNA, 15 bp, Homo sapiens
taaataataatcaac

SEQ ID NO: 990308 - DNA, 15 bp, Homo sapiens
ctaaataataatcaa

SEQ ID NO: 990309 - DNA, 15 bp, Homo sapiens
actaaataataatca

SEQ ID NO: 990310 - DNA, 15 bp, Homo sapiens
aactaaataataatc

SEQ ID NO: 990311 - DNA, 15 bp, Homo sapiens
caactaaataataat

SEQ ID NO: 990312 - DNA, 15 bp, Homo sapiens
ccaactaaataataa

SEQ ID NO: 990313 - DNA, 15 bp, Homo sapiens
tccaactaaataata

SEQ ID NO: 990314 - DNA, 15 bp, Homo sapiens
ctccaactaaataat

SEQ ID NO: 990315 - DNA, 15 bp, Homo sapiens
cctccaactaaataa

SEQ ID NO: 990316 - DNA, 15 bp, Homo sapiens
gcctccaactaaata

SEQ ID NO: 990317 - DNA, 15 bp, Homo sapiens
ggcctccaactaaat

SEQ ID NO: 990318 - DNA, 15 bp, Homo sapiens
aggcctccaactaaa

SEQ ID NO: 990319 - DNA, 15 bp, Homo sapiens
aaggcctccaactaa

SEQ ID NO: 990320 - DNA, 15 bp, Homo sapiens
aaaggcctccaacta

SEQ ID NO: 990321 - DNA, 15 bp, Homo sapiens
taaaggcctccaact

SEQ ID NO: 990322 - DNA, 15 bp, Homo sapiens
ctaaaggcctccaac

SEQ ID NO: 990323 - DNA, 15 bp, Homo sapiens
tctaaaggcctccaa

SEQ ID NO: 990324 - DNA, 15 bp, Homo sapiens
atctaaaggcctcca

SEQ ID NO: 990325 - DNA, 15 bp, Homo sapiens
tatctaaaggcctcc

SEQ ID NO: 990326 - DNA, 15 bp, Homo sapiens
atatctaaaggcctc

SEQ ID NO: 990327 - DNA, 15 bp, Homo sapiens
aatatctaaaggcct

SEQ ID NO: 990328 - DNA, 15 bp, Homo sapiens
taatatctaaaggcc

SEQ ID NO: 990329 - DNA, 15 bp, Homo sapiens
ataatatctaaaggc

SEQ ID NO: 990330 - DNA, 15 bp, Homo sapiens
aataatatctaaagg

SEQ ID NO: 990331 - DNA, 15 bp, Homo sapiens
gaataatatctaaag

SEQ ID NO: 990332 - DNA, 15 bp, Homo sapiens
tgaataatatctaaa

SEQ ID NO: 990333 - DNA, 15 bp, Homo sapiens
atgaataatatctaa

SEQ ID NO: 990334 - DNA, 15 bp, Homo sapiens
aatgaataatatcta

SEQ ID NO: 990335 - DNA, 15 bp, Homo sapiens
gaatgaataatatct

SEQ ID NO: 990336 - DNA, 15 bp, Homo sapiens
tgaatgaataatatc

SEQ ID NO: 990337 - DNA, 15 bp, Homo sapiens
atgaatgaataatat

SEQ ID NO: 990338 - DNA, 15 bp, Homo sapiens
aatgaatgaataata

SEQ ID NO: 990339 - DNA, 15 bp, Homo sapiens
aaatgaatgaataat

SEQ ID NO: 990340 - DNA, 15 bp, Homo sapiens
taaatgaatgaataa

SEQ ID NO: 990341 - DNA, 15 bp, Homo sapiens
gtaaatgaatgaata

SEQ ID NO: 990342 - DNA, 15 bp, Homo sapiens
agtaaatgaatgaat

SEQ ID NO: 990343 - DNA, 15 bp, Homo sapiens
gagtaaatgaatgaa

SEQ ID NO: 990344 - DNA, 15 bp, Homo sapiens
tgagtaaatgaatga

SEQ ID NO: 990345 - DNA, 15 bp, Homo sapiens
atgagtaaatgaatg

SEQ ID NO: 990346 - DNA, 15 bp, Homo sapiens
aatgagtaaatgaat

SEQ ID NO: 990347 - DNA, 15 bp, Homo sapiens
gaatgagtaaatgaa

SEQ ID NO: 990348 - DNA, 15 bp, Homo sapiens
tgaatgagtaaatga

SEQ ID NO: 990349 - DNA, 15 bp, Homo sapiens
atgaatgagtaaatg

SEQ ID NO: 990350 - DNA, 15 bp, Homo sapiens
aatgaatgagtaaat

SEQ ID NO: 990351 - DNA, 15 bp, Homo sapiens
aaatgaatgagtaaa

SEQ ID NO: 990352 - DNA, 15 bp, Homo sapiens
taaatgaatgagtaa

SEQ ID NO: 990353 - DNA, 15 bp, Homo sapiens
ataaatgaatgagta

SEQ ID NO: 990354 - DNA, 15 bp, Homo sapiens
aataaatgaatgagt

SEQ ID NO: 990355 - DNA, 15 bp, Homo sapiens
gaataaatgaatgag

SEQ ID NO: 990356 - DNA, 15 bp, Homo sapiens
gaatgaatgaataaa

SEQ ID NO: 990357 - DNA, 15 bp, Homo sapiens
tgaatgaatgaataa

SEQ ID NO: 990358 - DNA, 15 bp, Homo sapiens
atgaatgaatgaata

SEQ ID NO: 990359 - DNA, 15 bp, Homo sapiens
gatgaatgaatgaat

SEQ ID NO: 990360 - DNA, 15 bp, Homo sapiens
cgatgaatgaatgaa

SEQ ID NO: 990361 - DNA, 15 bp, Homo sapiens
tcgatgaatgaatga

SEQ ID NO: 990362 - DNA, 15 bp, Homo sapiens
ctcgatgaatgaatg

SEQ ID NO: 990363 - DNA, 15 bp, Homo sapiens
actcgatgaatgaat

SEQ ID NO: 990364 - DNA, 15 bp, Homo sapiens
tactcgatgaatgaa

SEQ ID NO: 990365 - DNA, 15 bp, Homo sapiens
ttactcgatgaatga

SEQ ID NO: 990366 - DNA, 15 bp, Homo sapiens
gttactcgatgaatg

SEQ ID NO: 990367 - DNA, 15 bp, Homo sapiens
agttactcgatgaat

SEQ ID NO: 990368 - DNA, 15 bp, Homo sapiens
aagttactcgatgaa

SEQ ID NO: 990369 - DNA, 15 bp, Homo sapiens
aaagttactcgatga

SEQ ID NO: 990370 - DNA, 15 bp, Homo sapiens
taaagttactcgatg

SEQ ID NO: 990371 - DNA, 15 bp, Homo sapiens
ttaaagttactcgat

SEQ ID NO: 990372 - DNA, 15 bp, Homo sapiens
tttaaagttactcga

SEQ ID NO: 990373 - DNA, 15 bp, Homo sapiens
ttttaaagttactcg

SEQ ID NO: 990374 - DNA, 15 bp, Homo sapiens
tttttaaagttactc

SEQ ID NO: 990375 - DNA, 15 bp, Homo sapiens
ttttttaaagttact

SEQ ID NO: 990376 - DNA, 15 bp, Homo sapiens
tttttttaaagttac

SEQ ID NO: 990377 - DNA, 15 bp, Homo sapiens
atttttttaaagtta

SEQ ID NO: 990378 - DNA, 15 bp, Homo sapiens
gatttttttaaagtt

SEQ ID NO: 990379 - DNA, 15 bp, Homo sapiens
tgatttttttaaagt

SEQ ID NO: 990380 - DNA, 15 bp, Homo sapiens
atgatttttttaaag

SEQ ID NO: 990381 - DNA, 15 bp, Homo sapiens
tatgatttttttaaa

SEQ ID NO: 990382 - DNA, 15 bp, Homo sapiens
atatgatttttttaa

SEQ ID NO: 990383 - DNA, 15 bp, Homo sapiens
catatgattttttta

SEQ ID NO: 990384 - DNA, 15 bp, Homo sapiens
gcatatgattttttt

SEQ ID NO: 990385 - DNA, 15 bp, Homo sapiens
agcatatgatttttt

SEQ ID NO: 990386 - DNA, 15 bp, Homo sapiens
tagcatatgattttt

SEQ ID NO: 990387 - DNA, 15 bp, Homo sapiens
atagcatatgatttt

SEQ ID NO: 990388 - DNA, 15 bp, Homo sapiens
catagcatatgattt

SEQ ID NO: 990389 - DNA, 15 bp, Homo sapiens
acatagcatatgatt

SEQ ID NO: 990390 - DNA, 15 bp, Homo sapiens
aacatagcatatgat

SEQ ID NO: 990391 - DNA, 15 bp, Homo sapiens
gaacatagcatatga

SEQ ID NO: 990392 - DNA, 15 bp, Homo sapiens
ggaacatagcatatg

SEQ ID NO: 990393 - DNA, 15 bp, Homo sapiens
gggaacatagcatat

SEQ ID NO: 990394 - DNA, 15 bp, Homo sapiens
tgggaacatagcata

SEQ ID NO: 990395 - DNA, 15 bp, Homo sapiens
ctgggaacatagcat

SEQ ID NO: 990396 - DNA, 15 bp, Homo sapiens
actgggaacatagca

SEQ ID NO: 990397 - DNA, 15 bp, Homo sapiens
gactgggaacatagc

SEQ ID NO: 990398 - DNA, 15 bp, Homo sapiens
ggactgggaacatag

SEQ ID NO: 990399 - DNA, 15 bp, Homo sapiens
aggactgggaacata

SEQ ID NO: 990400 - DNA, 15 bp, Homo sapiens
caggactgggaacat

SEQ ID NO: 990401 - DNA, 15 bp, Homo sapiens
ccaggactgggaaca

SEQ ID NO: 990402 - DNA, 15 bp, Homo sapiens
cccaggactgggaac

SEQ ID NO: 990403 - DNA, 15 bp, Homo sapiens
ccccaggactgggaa

SEQ ID NO: 990404 - DNA, 15 bp, Homo sapiens
tccccaggactggga

SEQ ID NO: 990405 - DNA, 15 bp, Homo sapiens
ctccccaggactggg

SEQ ID NO: 990406 - DNA, 15 bp, Homo sapiens
gctccccaggactgg

SEQ ID NO: 990407 - DNA, 15 bp, Homo sapiens
agctccccaggactg

SEQ ID NO: 990408 - DNA, 15 bp, Homo sapiens
aagctccccaggact

SEQ ID NO: 990409 - DNA, 15 bp, Homo sapiens
gaagctccccaggac

SEQ ID NO: 990410 - DNA, 15 bp, Homo sapiens
tgaagctccccagga

SEQ ID NO: 990411 - DNA, 15 bp, Homo sapiens
gtgaagctccccagg

SEQ ID NO: 990412 - DNA, 15 bp, Homo sapiens
tgtgaagctccccag

SEQ ID NO: 990413 - DNA, 15 bp, Homo sapiens
ttgtgaagctcccca

SEQ ID NO: 990414 - DNA, 15 bp, Homo sapiens
tttgtgaagctcccc

SEQ ID NO: 990415 - DNA, 15 bp, Homo sapiens
gtttgtgaagctccc

SEQ ID NO: 990416 - DNA, 15 bp, Homo sapiens
tgtttgtgaagctcc

SEQ ID NO: 990417 - DNA, 15 bp, Homo sapiens
atgtttgtgaagctc

SEQ ID NO: 990418 - DNA, 15 bp, Homo sapiens
catgtttgtgaagct

SEQ ID NO: 990419 - DNA, 15 bp, Homo sapiens
tcatgtttgtgaagc

SEQ ID NO: 990420 - DNA, 15 bp, Homo sapiens
gtcatgtttgtgaag

SEQ ID NO: 990421 - DNA, 15 bp, Homo sapiens
ggtcatgtttgtgaa

SEQ ID NO: 990422 - DNA, 15 bp, Homo sapiens
tggtcatgtttgtga

SEQ ID NO: 990423 - DNA, 15 bp, Homo sapiens
ctggtcatgtttgtg

SEQ ID NO: 990424 - DNA, 15 bp, Homo sapiens
tctggtcatgtttgt

SEQ ID NO: 990425 - DNA, 15 bp, Homo sapiens
atctggtcatgtttg

SEQ ID NO: 990426 - DNA, 15 bp, Homo sapiens
tatctggtcatgttt

SEQ ID NO: 990427 - DNA, 15 bp, Homo sapiens
ttatctggtcatgtt

SEQ ID NO: 990428 - DNA, 15 bp, Homo sapiens
gttatctggtcatgt

SEQ ID NO: 990429 - DNA, 15 bp, Homo sapiens
agttatctggtcatg

SEQ ID NO: 990430 - DNA, 15 bp, Homo sapiens
cagttatctggtcat

SEQ ID NO: 990431 - DNA, 15 bp, Homo sapiens
tcagttatctggtca

SEQ ID NO: 990432 - DNA, 15 bp, Homo sapiens
gtcagttatctggtc

SEQ ID NO: 990433 - DNA, 15 bp, Homo sapiens
agtcagttatctggt

SEQ ID NO: 990434 - DNA, 15 bp, Homo sapiens
tagtcagttatctgg

SEQ ID NO: 990435 - DNA, 15 bp, Homo sapiens
ctagtcagttatctg

SEQ ID NO: 990436 - DNA, 15 bp, Homo sapiens
tctagtcagttatct

SEQ ID NO: 990437 - DNA, 15 bp, Homo sapiens
ttctagtcagttatc

SEQ ID NO: 990438 - DNA, 15 bp, Homo sapiens
tttctagtcagttat

SEQ ID NO: 990439 - DNA, 15 bp, Homo sapiens
ctttctagtcagtta

SEQ ID NO: 990440 - DNA, 15 bp, Homo sapiens
tctttctagtcagtt

SEQ ID NO: 990441 - DNA, 15 bp, Homo sapiens
ttctttctagtcagt

SEQ ID NO: 990442 - DNA, 15 bp, Homo sapiens
cttctttctagtcag

SEQ ID NO: 990443 - DNA, 15 bp, Homo sapiens
acttctttctagtca

SEQ ID NO: 990444 - DNA, 15 bp, Homo sapiens
tacttctttctagtc

SEQ ID NO: 990445 - DNA, 15 bp, Homo sapiens
ctacttctttctagt

SEQ ID NO: 990446 - DNA, 15 bp, Homo sapiens
actacttctttctag

SEQ ID NO: 990447 - DNA, 15 bp, Homo sapiens
aactacttctttcta

SEQ ID NO: 990448 - DNA, 15 bp, Homo sapiens
caactacttctttct

SEQ ID NO: 990449 - DNA, 15 bp, Homo sapiens
tcaactacttctttc

SEQ ID NO: 990450 - DNA, 15 bp, Homo sapiens
gtcaactacttcttt

SEQ ID NO: 990451 - DNA, 15 bp, Homo sapiens
tgtcaactacttctt

SEQ ID NO: 990452 - DNA, 15 bp, Homo sapiens
ctgtcaactacttct

SEQ ID NO: 990453 - DNA, 15 bp, Homo sapiens
actgtcaactacttc

SEQ ID NO: 990454 - DNA, 15 bp, Homo sapiens
cactgtcaactactt

SEQ ID NO: 990455 - DNA, 15 bp, Homo sapiens
gcactgtcaactact

SEQ ID NO: 990456 - DNA, 15 bp, Homo sapiens
agcactgtcaactac

SEQ ID NO: 990457 - DNA, 15 bp, Homo sapiens
tagcactgtcaacta

SEQ ID NO: 990458 - DNA, 15 bp, Homo sapiens
atagcactgtcaact

SEQ ID NO: 990459 - DNA, 15 bp, Homo sapiens
aatagcactgtcaac

SEQ ID NO: 990460 - DNA, 15 bp, Homo sapiens
aaatagcactgtcaa

SEQ ID NO: 990461 - DNA, 15 bp, Homo sapiens
aaaatagcactgtca

SEQ ID NO: 990462 - DNA, 15 bp, Homo sapiens
caaaatagcactgtc

SEQ ID NO: 990463 - DNA, 15 bp, Homo sapiens
acaaaatagcactgt

SEQ ID NO: 990464 - DNA, 15 bp, Homo sapiens
cacaaaatagcactg

SEQ ID NO: 990465 - DNA, 15 bp, Homo sapiens
gcacaaaatagcact

SEQ ID NO: 990466 - DNA, 15 bp, Homo sapiens
ggcacaaaatagcac

SEQ ID NO: 990467 - DNA, 15 bp, Homo sapiens
gggcacaaaatagca

SEQ ID NO: 990468 - DNA, 15 bp, Homo sapiens
tgggcacaaaatagc

SEQ ID NO: 990469 - DNA, 15 bp, Homo sapiens
gtgggcacaaaatag

SEQ ID NO: 990470 - DNA, 15 bp, Homo sapiens
agtgggcacaaaata

SEQ ID NO: 990471 - DNA, 15 bp, Homo sapiens
cagtgggcacaaaat

SEQ ID NO: 990472 - DNA, 15 bp, Homo sapiens
acagtgggcacaaaa

SEQ ID NO: 990473 - DNA, 15 bp, Homo sapiens
gacagtgggcacaaa

SEQ ID NO: 990474 - DNA, 15 bp, Homo sapiens
agacagtgggcacaa

SEQ ID NO: 990475 - DNA, 15 bp, Homo sapiens
gagacagtgggcaca

SEQ ID NO: 990476 - DNA, 15 bp, Homo sapiens
agagacagtgggcac

SEQ ID NO: 990477 - DNA, 15 bp, Homo sapiens
gagagacagtgggca

SEQ ID NO: 990478 - DNA, 15 bp, Homo sapiens
ggagagacagtgggc

SEQ ID NO: 990479 - DNA, 15 bp, Homo sapiens
aggagagacagtggg

SEQ ID NO: 990480 - DNA, 15 bp, Homo sapiens
caggagagacagtgg

SEQ ID NO: 990481 - DNA, 15 bp, Homo sapiens
tcaggagagacagtg

SEQ ID NO: 990482 - DNA, 15 bp, Homo sapiens
atcaggagagacagt

SEQ ID NO: 990483 - DNA, 15 bp, Homo sapiens
catcaggagagacag

SEQ ID NO: 990484 - DNA, 15 bp, Homo sapiens
gcatcaggagagaca

SEQ ID NO: 990485 - DNA, 15 bp, Homo sapiens
agcatcaggagagac

SEQ ID NO: 990486 - DNA, 15 bp, Homo sapiens
gagcatcaggagaga

SEQ ID NO: 990487 - DNA, 15 bp, Homo sapiens
tgagcatcaggagag

SEQ ID NO: 990488 - DNA, 15 bp, Homo sapiens
atgagcatcaggaga

SEQ ID NO: 990489 - DNA, 15 bp, Homo sapiens
tatgagcatcaggag

SEQ ID NO: 990490 - DNA, 15 bp, Homo sapiens
atatgagcatcagga

SEQ ID NO: 990491 - DNA, 15 bp, Homo sapiens
gatatgagcatcagg

SEQ ID NO: 990492 - DNA, 15 bp, Homo sapiens
tgatatgagcatcag

SEQ ID NO: 990493 - DNA, 15 bp, Homo sapiens
ttgatatgagcatca

SEQ ID NO: 990494 - DNA, 15 bp, Homo sapiens
attgatatgagcatc

SEQ ID NO: 990495 - DNA, 15 bp, Homo sapiens
gattgatatgagcat

SEQ ID NO: 990496 - DNA, 15 bp, Homo sapiens
ggattgatatgagca

SEQ ID NO: 990497 - DNA, 15 bp, Homo sapiens
aggattgatatgagc

SEQ ID NO: 990498 - DNA, 15 bp, Homo sapiens
taggattgatatgag

SEQ ID NO: 990499 - DNA, 15 bp, Homo sapiens
ataggattgatatga

SEQ ID NO: 990500 - DNA, 15 bp, Homo sapiens
tataggattgatatg

SEQ ID NO: 990501 - DNA, 15 bp, Homo sapiens
ttataggattgatat

SEQ ID NO: 990502 - DNA, 15 bp, Homo sapiens
cttataggattgata

SEQ ID NO: 990503 - DNA, 15 bp, Homo sapiens
ccttataggattgat

SEQ ID NO: 990504 - DNA, 15 bp, Homo sapiens
gccttataggattga

SEQ ID NO: 990505 - DNA, 15 bp, Homo sapiens
tgccttataggattg

SEQ ID NO: 990506 - DNA, 15 bp, Homo sapiens
gtgccttataggatt

SEQ ID NO: 990507 - DNA, 15 bp, Homo sapiens
tgtgccttataggat

SEQ ID NO: 990508 - DNA, 15 bp, Homo sapiens
ctgtgccttatagga

SEQ ID NO: 990509 - DNA, 15 bp, Homo sapiens
cctgtgccttatagg

SEQ ID NO: 990510 - DNA, 15 bp, Homo sapiens
ccctgtgccttatag

SEQ ID NO: 990511 - DNA, 15 bp, Homo sapiens
tccctgtgccttata

SEQ ID NO: 990512 - DNA, 15 bp, Homo sapiens
ttccctgtgccttat

SEQ ID NO: 990513 - DNA, 15 bp, Homo sapiens
gttccctgtgcctta

SEQ ID NO: 990514 - DNA, 15 bp, Homo sapiens
tgttccctgtgcctt

SEQ ID NO: 990515 - DNA, 15 bp, Homo sapiens
ttgttccctgtgcct

SEQ ID NO: 990516 - DNA, 15 bp, Homo sapiens
cttgttccctgtgcc

SEQ ID NO: 990517 - DNA, 15 bp, Homo sapiens
gcttgttccctgtgc

SEQ ID NO: 990518 - DNA, 15 bp, Homo sapiens
tgcttgttccctgtg

SEQ ID NO: 990519 - DNA, 15 bp, Homo sapiens
atgcttgttccctgt

SEQ ID NO: 990520 - DNA, 15 bp, Homo sapiens
aatgcttgttccctg

SEQ ID NO: 990521 - DNA, 15 bp, Homo sapiens
gaatgcttgttccct

SEQ ID NO: 990522 - DNA, 15 bp, Homo sapiens
agaatgcttgttccc

SEQ ID NO: 990523 - DNA, 15 bp, Homo sapiens
gagaatgcttgttcc

SEQ ID NO: 990524 - DNA, 15 bp, Homo sapiens
ggagaatgcttgttc

SEQ ID NO: 990525 - DNA, 15 bp, Homo sapiens
aggagaatgcttgtt

SEQ ID NO: 990526 - DNA, 15 bp, Homo sapiens
caggagaatgcttgt

SEQ ID NO: 990527 - DNA, 15 bp, Homo sapiens
acaggagaatgcttg

SEQ ID NO: 990528 - DNA, 15 bp, Homo sapiens
aacaggagaatgctt

SEQ ID NO: 990529 - DNA, 15 bp, Homo sapiens
aaacaggagaatgct

SEQ ID NO: 990530 - DNA, 15 bp, Homo sapiens
aaaacaggagaatgc

SEQ ID NO: 990531 - DNA, 15 bp, Homo sapiens
aaaaacaggagaatg

SEQ ID NO: 990532 - DNA, 15 bp, Homo sapiens
taaaaacaggagaat

SEQ ID NO: 990533 - DNA, 15 bp, Homo sapiens
gtaaaaacaggagaa

SEQ ID NO: 990534 - DNA, 15 bp, Homo sapiens
tgtaaaaacaggaga

SEQ ID NO: 990535 - DNA, 15 bp, Homo sapiens
ctgtaaaaacaggag

SEQ ID NO: 990536 - DNA, 15 bp, Homo sapiens
tctgtaaaaacagga

SEQ ID NO: 990537 - DNA, 15 bp, Homo sapiens
atctgtaaaaacagg

SEQ ID NO: 990538 - DNA, 15 bp, Homo sapiens
aatctgtaaaaacag

SEQ ID NO: 990539 - DNA, 15 bp, Homo sapiens
caatctgtaaaaaca

SEQ ID NO: 990540 - DNA, 15 bp, Homo sapiens
acaatctgtaaaaac

SEQ ID NO: 990541 - DNA, 15 bp, Homo sapiens
tacaatctgtaaaaa

SEQ ID NO: 990542 - DNA, 15 bp, Homo sapiens
atacaatctgtaaaa

SEQ ID NO: 990543 - DNA, 15 bp, Homo sapiens
gatacaatctgtaaa

SEQ ID NO: 990544 - DNA, 15 bp, Homo sapiens
ggatacaatctgtaa

SEQ ID NO: 990545 - DNA, 15 bp, Homo sapiens
aggatacaatctgta

SEQ ID NO: 990546 - DNA, 15 bp, Homo sapiens
caggatacaatctgt

SEQ ID NO: 990547 - DNA, 15 bp, Homo sapiens
tcaggatacaatctg

SEQ ID NO: 990548 - DNA, 15 bp, Homo sapiens
ctcaggatacaatct

SEQ ID NO: 990549 - DNA, 15 bp, Homo sapiens
cctcaggatacaatc

SEQ ID NO: 990550 - DNA, 15 bp, Homo sapiens
gcctcaggatacaat

SEQ ID NO: 990551 - DNA, 15 bp, Homo sapiens
agcctcaggatacaa

SEQ ID NO: 990552 - DNA, 15 bp, Homo sapiens
cagcctcaggataca

SEQ ID NO: 990553 - DNA, 15 bp, Homo sapiens
tcagcctcaggatac

SEQ ID NO: 990554 - DNA, 15 bp, Homo sapiens
ctcagcctcaggata

SEQ ID NO: 990555 - DNA, 15 bp, Homo sapiens
tctcagcctcaggat

SEQ ID NO: 990556 - DNA, 15 bp, Homo sapiens
ctctcagcctcagga

SEQ ID NO: 990557 - DNA, 15 bp, Homo sapiens
tctctcagcctcagg

SEQ ID NO: 990558 - DNA, 15 bp, Homo sapiens
ctctctcagcctcag

SEQ ID NO: 990559 - DNA, 15 bp, Homo sapiens
actctctcagcctca

SEQ ID NO: 990560 - DNA, 15 bp, Homo sapiens
aactctctcagcctc

SEQ ID NO: 990561 - DNA, 15 bp, Homo sapiens
taactctctcagcct

SEQ ID NO: 990562 - DNA, 15 bp, Homo sapiens
ttaactctctcagcc

SEQ ID NO: 990563 - DNA, 15 bp, Homo sapiens
cttaactctctcagc

SEQ ID NO: 990564 - DNA, 15 bp, Homo sapiens
acttaactctctcag

SEQ ID NO: 990565 - DNA, 15 bp, Homo sapiens
cacttaactctctca

SEQ ID NO: 990566 - DNA, 15 bp, Homo sapiens
tcacttaactctctc

SEQ ID NO: 990567 - DNA, 15 bp, Homo sapiens
ttcacttaactctct

SEQ ID NO: 990568 - DNA, 15 bp, Homo sapiens
attcacttaactctc

SEQ ID NO: 990569 - DNA, 15 bp, Homo sapiens
cattcacttaactct

SEQ ID NO: 990570 - DNA, 15 bp, Homo sapiens
acattcacttaactc

SEQ ID NO: 990571 - DNA, 15 bp, Homo sapiens
gacattcacttaact

SEQ ID NO: 990572 - DNA, 15 bp, Homo sapiens
agacattcacttaac

SEQ ID NO: 990573 - DNA, 15 bp, Homo sapiens
tagacattcacttaa

SEQ ID NO: 990574 - DNA, 15 bp, Homo sapiens
ttagacattcactta

SEQ ID NO: 990575 - DNA, 15 bp, Homo sapiens
cttagacattcactt

SEQ ID NO: 990576 - DNA, 15 bp, Homo sapiens
ccttagacattcact

SEQ ID NO: 990577 - DNA, 15 bp, Homo sapiens
accttagacattcac

SEQ ID NO: 990578 - DNA, 15 bp, Homo sapiens
gaccttagacattca

SEQ ID NO: 990579 - DNA, 15 bp, Homo sapiens
tgaccttagacattc

SEQ ID NO: 990580 - DNA, 15 bp, Homo sapiens
gtgaccttagacatt

SEQ ID NO: 990581 - DNA, 15 bp, Homo sapiens
tgtgaccttagacat

SEQ ID NO: 990582 - DNA, 15 bp, Homo sapiens
gtgtgaccttagaca

SEQ ID NO: 990583 - DNA, 15 bp, Homo sapiens
tgtgtgaccttagac

SEQ ID NO: 990584 - DNA, 15 bp, Homo sapiens
ctgtgtgaccttaga

SEQ ID NO: 990585 - DNA, 15 bp, Homo sapiens
actgtgtgaccttag

SEQ ID NO: 990586 - DNA, 15 bp, Homo sapiens
tactgtgtgacctta

SEQ ID NO: 990587 - DNA, 15 bp, Homo sapiens
atactgtgtgacctt

SEQ ID NO: 990588 - DNA, 15 bp, Homo sapiens
aatactgtgtgacct

SEQ ID NO: 990589 - DNA, 15 bp, Homo sapiens
taatactgtgtgacc

SEQ ID NO: 990590 - DNA, 15 bp, Homo sapiens
ttaatactgtgtgac

SEQ ID NO: 990591 - DNA, 15 bp, Homo sapiens
cttaatactgtgtga

SEQ ID NO: 990592 - DNA, 15 bp, Homo sapiens
acttaatactgtgtg

SEQ ID NO: 990593 - DNA, 15 bp, Homo sapiens
cacttaatactgtgt

SEQ ID NO: 990594 - DNA, 15 bp, Homo sapiens
tcacttaatactgtg

SEQ ID NO: 990595 - DNA, 15 bp, Homo sapiens
gtcacttaatactgt

SEQ ID NO: 990596 - DNA, 15 bp, Homo sapiens
tgtcacttaatactg

SEQ ID NO: 990597 - DNA, 15 bp, Homo sapiens
ctgtcacttaatact

SEQ ID NO: 990598 - DNA, 15 bp, Homo sapiens
actgtcacttaatac

SEQ ID NO: 990599 - DNA, 15 bp, Homo sapiens
cactgtcacttaata

SEQ ID NO: 990600 - DNA, 15 bp, Homo sapiens
gcactgtcacttaat

SEQ ID NO: 990601 - DNA, 15 bp, Homo sapiens
agcactgtcacttaa

SEQ ID NO: 990602 - DNA, 15 bp, Homo sapiens
tagcactgtcactta

SEQ ID NO: 990603 - DNA, 15 bp, Homo sapiens
ctagcactgtcactt

SEQ ID NO: 990604 - DNA, 15 bp, Homo sapiens
tctagcactgtcact

SEQ ID NO: 990605 - DNA, 15 bp, Homo sapiens
ttctagcactgtcac

SEQ ID NO: 990606 - DNA, 15 bp, Homo sapiens
tttctagcactgtca

SEQ ID NO: 990607 - DNA, 15 bp, Homo sapiens
atttctagcactgtc

SEQ ID NO: 990608 - DNA, 15 bp, Homo sapiens
gatttctagcactgt

SEQ ID NO: 990609 - DNA, 15 bp, Homo sapiens
tgatttctagcactg

SEQ ID NO: 990610 - DNA, 15 bp, Homo sapiens
ttgatttctagcact

SEQ ID NO: 990611 - DNA, 15 bp, Homo sapiens
tttgatttctagcac

SEQ ID NO: 990612 - DNA, 15 bp, Homo sapiens
gtttgatttctagca

SEQ ID NO: 990613 - DNA, 15 bp, Homo sapiens
ggtttgatttctagc

SEQ ID NO: 990614 - DNA, 15 bp, Homo sapiens
gggtttgatttctag

SEQ ID NO: 990615 - DNA, 15 bp, Homo sapiens
tgggtttgatttcta

SEQ ID NO: 990616 - DNA, 15 bp, Homo sapiens
ctgggtttgatttct

SEQ ID NO: 990617 - DNA, 15 bp, Homo sapiens
tctgggtttgatttc

SEQ ID NO: 990618 - DNA, 15 bp, Homo sapiens
ctctgggtttgattt

SEQ ID NO: 990619 - DNA, 15 bp, Homo sapiens
gctctgggtttgatt

SEQ ID NO: 990620 - DNA, 15 bp, Homo sapiens
agctctgggtttgat

SEQ ID NO: 990621 - DNA, 15 bp, Homo sapiens
cagctctgggtttga

SEQ ID NO: 990622 - DNA, 15 bp, Homo sapiens
acagctctgggtttg

SEQ ID NO: 990623 - DNA, 15 bp, Homo sapiens
cacagctctgggttt

SEQ ID NO: 990624 - DNA, 15 bp, Homo sapiens
ccacagctctgggtt

SEQ ID NO: 990625 - DNA, 15 bp, Homo sapiens
tccacagctctgggt

SEQ ID NO: 990626 - DNA, 15 bp, Homo sapiens
gtccacagctctggg

SEQ ID NO: 990627 - DNA, 15 bp, Homo sapiens
agtccacagctctgg

SEQ ID NO: 990628 - DNA, 15 bp, Homo sapiens
aagtccacagctctg

SEQ ID NO: 990629 - DNA, 15 bp, Homo sapiens
aaagtccacagctct

SEQ ID NO: 990630 - DNA, 15 bp, Homo sapiens
caaagtccacagctc

SEQ ID NO: 990631 - DNA, 15 bp, Homo sapiens
acaaagtccacagct

SEQ ID NO: 990632 - DNA, 15 bp, Homo sapiens
aacaaagtccacagc

SEQ ID NO: 990633 - DNA, 15 bp, Homo sapiens
gaacaaagtccacag

SEQ ID NO: 990634 - DNA, 15 bp, Homo sapiens
tgaacaaagtccaca

SEQ ID NO: 990635 - DNA, 15 bp, Homo sapiens
gtgaacaaagtccac

SEQ ID NO: 990636 - DNA, 15 bp, Homo sapiens
agtgaacaaagtcca

SEQ ID NO: 990637 - DNA, 15 bp, Homo sapiens
tagtgaacaaagtcc

SEQ ID NO: 990638 - DNA, 15 bp, Homo sapiens
ctagtgaacaaagtc

SEQ ID NO: 990639 - DNA, 15 bp, Homo sapiens
tctagtgaacaaagt

SEQ ID NO: 990640 - DNA, 15 bp, Homo sapiens
gtctagtgaacaaag

SEQ ID NO: 990641 - DNA, 15 bp, Homo sapiens
agtctagtgaacaaa

SEQ ID NO: 990642 - DNA, 15 bp, Homo sapiens
cagtctagtgaacaa

SEQ ID NO: 990643 - DNA, 15 bp, Homo sapiens
acagtctagtgaaca

SEQ ID NO: 990644 - DNA, 15 bp, Homo sapiens
cacagtctagtgaac

SEQ ID NO: 990645 - DNA, 15 bp, Homo sapiens
gcacagtctagtgaa

SEQ ID NO: 990646 - DNA, 15 bp, Homo sapiens
ggcacagtctagtga

SEQ ID NO: 990647 - DNA, 15 bp, Homo sapiens
gggcacagtctagtg

SEQ ID NO: 990648 - DNA, 15 bp, Homo sapiens
agggcacagtctagt

SEQ ID NO: 990649 - DNA, 15 bp, Homo sapiens
aagggcacagtctag

SEQ ID NO: 990650 - DNA, 15 bp, Homo sapiens
aaagggcacagtcta

SEQ ID NO: 990651 - DNA, 15 bp, Homo sapiens
aaaagggcacagtct

SEQ ID NO: 990652 - DNA, 15 bp, Homo sapiens
taaaagggcacagtc

SEQ ID NO: 990653 - DNA, 15 bp, Homo sapiens
ataaaagggcacagt

SEQ ID NO: 990654 - DNA, 15 bp, Homo sapiens
tataaaagggcacag

SEQ ID NO: 990655 - DNA, 15 bp, Homo sapiens
ctataaaagggcaca

SEQ ID NO: 990656 - DNA, 15 bp, Homo sapiens
tctataaaagggcac

SEQ ID NO: 990657 - DNA, 15 bp, Homo sapiens
ctctataaaagggca

SEQ ID NO: 990658 - DNA, 15 bp, Homo sapiens
cctctataaaagggc

SEQ ID NO: 990659 - DNA, 15 bp, Homo sapiens
acctctataaaaggg

SEQ ID NO: 990660 - DNA, 15 bp, Homo sapiens
tacctctataaaagg

SEQ ID NO: 990661 - DNA, 15 bp, Homo sapiens
gtacctctataaaag

SEQ ID NO: 990662 - DNA, 15 bp, Homo sapiens
tgtacctctataaaa

SEQ ID NO: 990663 - DNA, 15 bp, Homo sapiens
atgtacctctataaa

SEQ ID NO: 990664 - DNA, 15 bp, Homo sapiens
catgtacctctataa

SEQ ID NO: 990665 - DNA, 15 bp, Homo sapiens
acatgtacctctata

SEQ ID NO: 990666 - DNA, 15 bp, Homo sapiens
aacatgtacctctat

SEQ ID NO: 990667 - DNA, 15 bp, Homo sapiens
gaacatgtacctcta

SEQ ID NO: 990668 - DNA, 15 bp, Homo sapiens
agaacatgtacctct

SEQ ID NO: 990669 - DNA, 15 bp, Homo sapiens
gagaacatgtacctc

SEQ ID NO: 990670 - DNA, 15 bp, Homo sapiens
agagaacatgtacct

SEQ ID NO: 990671 - DNA, 15 bp, Homo sapiens
aagagaacatgtacc

SEQ ID NO: 990672 - DNA, 15 bp, Homo sapiens
aaagagaacatgtac

SEQ ID NO: 990673 - DNA, 15 bp, Homo sapiens
caaagagaacatgta

SEQ ID NO: 990674 - DNA, 15 bp, Homo sapiens
ccaaagagaacatgt

SEQ ID NO: 990675 - DNA, 15 bp, Homo sapiens
tccaaagagaacatg

SEQ ID NO: 990676 - DNA, 15 bp, Homo sapiens
ctccaaagagaacat

SEQ ID NO: 990677 - DNA, 15 bp, Homo sapiens
actccaaagagaaca

SEQ ID NO: 990678 - DNA, 15 bp, Homo sapiens
cactccaaagagaac

SEQ ID NO: 990679 - DNA, 15 bp, Homo sapiens
acactccaaagagaa

SEQ ID NO: 990680 - DNA, 15 bp, Homo sapiens
aacactccaaagaga

SEQ ID NO: 990681 - DNA, 15 bp, Homo sapiens
caacactccaaagag

SEQ ID NO: 990682 - DNA, 15 bp, Homo sapiens
ccaacactccaaaga

SEQ ID NO: 990683 - DNA, 15 bp, Homo sapiens
accaacactccaaag

SEQ ID NO: 990684 - DNA, 15 bp, Homo sapiens
taccaacactccaaa

SEQ ID NO: 990685 - DNA, 15 bp, Homo sapiens
ctaccaacactccaa

SEQ ID NO: 990686 - DNA, 15 bp, Homo sapiens
cctaccaacactcca

SEQ ID NO: 990687 - DNA, 15 bp, Homo sapiens
acctaccaacactcc

SEQ ID NO: 990688 - DNA, 15 bp, Homo sapiens
cacctaccaacactc

SEQ ID NO: 990689 - DNA, 15 bp, Homo sapiens
acacctaccaacact

SEQ ID NO: 990690 - DNA, 15 bp, Homo sapiens
gacacctaccaacac

SEQ ID NO: 990691 - DNA, 15 bp, Homo sapiens
agacacctaccaaca

SEQ ID NO: 990692 - DNA, 15 bp, Homo sapiens
cagacacctaccaac

SEQ ID NO: 990693 - DNA, 15 bp, Homo sapiens
acagacacctaccaa

SEQ ID NO: 990694 - DNA, 15 bp, Homo sapiens
aacagacacctacca

SEQ ID NO: 990695 - DNA, 15 bp, Homo sapiens
aaacagacacctacc

SEQ ID NO: 990696 - DNA, 15 bp, Homo sapiens
gaaacagacacctac

SEQ ID NO: 990697 - DNA, 15 bp, Homo sapiens
ggaaacagacaccta

SEQ ID NO: 990698 - DNA, 15 bp, Homo sapiens
gggaaacagacacct

SEQ ID NO: 990699 - DNA, 15 bp, Homo sapiens
tgggaaacagacacc

SEQ ID NO: 990700 - DNA, 15 bp, Homo sapiens
gtgggaaacagacac

SEQ ID NO: 990701 - DNA, 15 bp, Homo sapiens
ggtgggaaacagaca

SEQ ID NO: 990702 - DNA, 15 bp, Homo sapiens
aggtgggaaacagac

SEQ ID NO: 990703 - DNA, 15 bp, Homo sapiens
gaggtgggaaacaga

SEQ ID NO: 990704 - DNA, 15 bp, Homo sapiens
tgaggtgggaaacag

SEQ ID NO: 990705 - DNA, 15 bp, Homo sapiens
gtgaggtgggaaaca

SEQ ID NO: 990706 - DNA, 15 bp, Homo sapiens
ggtgaggtgggaaac

SEQ ID NO: 990707 - DNA, 15 bp, Homo sapiens
caggtgaggtgggaa

SEQ ID NO: 990708 - DNA, 15 bp, Homo sapiens
tcaggtgaggtggga

SEQ ID NO: 990709 - DNA, 15 bp, Homo sapiens
ctcaggtgaggtggg

SEQ ID NO: 990710 - DNA, 15 bp, Homo sapiens
tctcaggtgaggtgg

SEQ ID NO: 990711 - DNA, 15 bp, Homo sapiens
ctctcaggtgaggtg

SEQ ID NO: 990712 - DNA, 15 bp, Homo sapiens
gctctcaggtgaggt

SEQ ID NO: 990713 - DNA, 15 bp, Homo sapiens
ggctctcaggtgagg

SEQ ID NO: 990714 - DNA, 15 bp, Homo sapiens
tggctctcaggtgag

SEQ ID NO: 990715 - DNA, 15 bp, Homo sapiens
atggctctcaggtga

SEQ ID NO: 990716 - DNA, 15 bp, Homo sapiens
aatggctctcaggtg

SEQ ID NO: 990717 - DNA, 15 bp, Homo sapiens
caatggctctcaggt

SEQ ID NO: 990718 - DNA, 15 bp, Homo sapiens
tcaatggctctcagg

SEQ ID NO: 990719 - DNA, 15 bp, Homo sapiens
ttcaatggctctcag

SEQ ID NO: 990720 - DNA, 15 bp, Homo sapiens
attcaatggctctca

SEQ ID NO: 990721 - DNA, 15 bp, Homo sapiens
aattcaatggctctc

SEQ ID NO: 990722 - DNA, 15 bp, Homo sapiens
aaattcaatggctct

SEQ ID NO: 990723 - DNA, 15 bp, Homo sapiens
caaattcaatggctc

SEQ ID NO: 990724 - DNA, 15 bp, Homo sapiens
gcaaattcaatggct

SEQ ID NO: 990725 - DNA, 15 bp, Homo sapiens
ggcaaattcaatggc

SEQ ID NO: 990726 - DNA, 15 bp, Homo sapiens
aggcaaattcaatgg

SEQ ID NO: 990727 - DNA, 15 bp, Homo sapiens
aaggcaaattcaatg

SEQ ID NO: 990728 - DNA, 15 bp, Homo sapiens
gaaggcaaattcaat

SEQ ID NO: 990729 - DNA, 15 bp, Homo sapiens
ggaaggcaaattcaa

SEQ ID NO: 990730 - DNA, 15 bp, Homo sapiens
aggaaggcaaattca

SEQ ID NO: 990731 - DNA, 15 bp, Homo sapiens
gaggaaggcaaattc

SEQ ID NO: 990732 - DNA, 15 bp, Homo sapiens
tgaggaaggcaaatt

SEQ ID NO: 990733 - DNA, 15 bp, Homo sapiens
atgaggaaggcaaat

SEQ ID NO: 990734 - DNA, 15 bp, Homo sapiens
catgaggaaggcaaa

SEQ ID NO: 990735 - DNA, 15 bp, Homo sapiens
tcatgaggaaggcaa

SEQ ID NO: 990736 - DNA, 15 bp, Homo sapiens
ttcatgaggaaggca

SEQ ID NO: 990737 - DNA, 15 bp, Homo sapiens
attcatgaggaaggc

SEQ ID NO: 990738 - DNA, 15 bp, Homo sapiens
aattcatgaggaagg

SEQ ID NO: 990739 - DNA, 15 bp, Homo sapiens
taattcatgaggaag

SEQ ID NO: 990740 - DNA, 15 bp, Homo sapiens
ttaattcatgaggaa

SEQ ID NO: 990741 - DNA, 15 bp, Homo sapiens
tttaattcatgagga

SEQ ID NO: 990742 - DNA, 15 bp, Homo sapiens
ttttaattcatgagg

SEQ ID NO: 990743 - DNA, 15 bp, Homo sapiens
gttttaattcatgag

SEQ ID NO: 990744 - DNA, 15 bp, Homo sapiens
ggttttaattcatga

SEQ ID NO: 990745 - DNA, 15 bp, Homo sapiens
aggttttaattcatg

SEQ ID NO: 990746 - DNA, 15 bp, Homo sapiens
gaggttttaattcat

SEQ ID NO: 990747 - DNA, 15 bp, Homo sapiens
ggaggttttaattca

SEQ ID NO: 990748 - DNA, 15 bp, Homo sapiens
gggaggttttaattc

SEQ ID NO: 990749 - DNA, 15 bp, Homo sapiens
ggggaggttttaatt

SEQ ID NO: 990750 - DNA, 15 bp, Homo sapiens
gggggaggttttaat

SEQ ID NO: 990751 - DNA, 15 bp, Homo sapiens
tgggggaggttttaa

SEQ ID NO: 990752 - DNA, 15 bp, Homo sapiens
ttgggggaggtttta

SEQ ID NO: 990753 - DNA, 15 bp, Homo sapiens
cttgggggaggtttt

SEQ ID NO: 990754 - DNA, 15 bp, Homo sapiens
gcttgggggaggttt

SEQ ID NO: 990755 - DNA, 15 bp, Homo sapiens
tgcttgggggaggtt

SEQ ID NO: 990756 - DNA, 15 bp, Homo sapiens
ctgcttgggggaggt

SEQ ID NO: 990757 - DNA, 15 bp, Homo sapiens
tctgcttgggggagg

SEQ ID NO: 990758 - DNA, 15 bp, Homo sapiens
ctctgcttgggggag

SEQ ID NO: 990759 - DNA, 15 bp, Homo sapiens
gctctgcttggggga

SEQ ID NO: 990760 - DNA, 15 bp, Homo sapiens
agctctgcttggggg

SEQ ID NO: 990761 - DNA, 15 bp, Homo sapiens
aagctctgcttgggg

SEQ ID NO: 990762 - DNA, 15 bp, Homo sapiens
gaagctctgcttggg

SEQ ID NO: 990763 - DNA, 15 bp, Homo sapiens
ggaagctctgcttgg

SEQ ID NO: 990764 - DNA, 15 bp, Homo sapiens
aggaagctctgcttg

SEQ ID NO: 990765 - DNA, 15 bp, Homo sapiens
gaggaagctctgctt

SEQ ID NO: 990766 - DNA, 15 bp, Homo sapiens
tgaggaagctctgct

SEQ ID NO: 990767 - DNA, 15 bp, Homo sapiens
ctgaggaagctctgc

SEQ ID NO: 990768 - DNA, 15 bp, Homo sapiens
tctgaggaagctctg

SEQ ID NO: 990769 - DNA, 15 bp, Homo sapiens
ctctgaggaagctct

SEQ ID NO: 990770 - DNA, 15 bp, Homo sapiens
tctctgaggaagctc

SEQ ID NO: 990771 - DNA, 15 bp, Homo sapiens
ttctctgaggaagct

SEQ ID NO: 990772 - DNA, 15 bp, Homo sapiens
tttctctgaggaagc

SEQ ID NO: 990773 - DNA, 15 bp, Homo sapiens
ctttctctgaggaag

SEQ ID NO: 990774 - DNA, 15 bp, Homo sapiens
actttctctgaggaa

SEQ ID NO: 990775 - DNA, 15 bp, Homo sapiens
cactttctctgagga

SEQ ID NO: 990776 - DNA, 15 bp, Homo sapiens
ccactttctctgagg

SEQ ID NO: 990777 - DNA, 15 bp, Homo sapiens
accactttctctgag

SEQ ID NO: 990778 - DNA, 15 bp, Homo sapiens
aaccactttctctga

SEQ ID NO: 990779 - DNA, 15 bp, Homo sapiens
gaaccactttctctg

SEQ ID NO: 990780 - DNA, 15 bp, Homo sapiens
agaaccactttctct

SEQ ID NO: 990781 - DNA, 15 bp, Homo sapiens
tagaaccactttctc

SEQ ID NO: 990782 - DNA, 15 bp, Homo sapiens
atagaaccactttct

SEQ ID NO: 990783 - DNA, 15 bp, Homo sapiens
catagaaccactttc

SEQ ID NO: 990784 - DNA, 15 bp, Homo sapiens
tcatagaaccacttt

SEQ ID NO: 990785 - DNA, 15 bp, Homo sapiens
atcatagaaccactt

SEQ ID NO: 990786 - DNA, 15 bp, Homo sapiens
catcatagaaccact

SEQ ID NO: 990787 - DNA, 15 bp, Homo sapiens
tcatcatagaaccac

SEQ ID NO: 990788 - DNA, 15 bp, Homo sapiens
gtcatcatagaacca

SEQ ID NO: 990789 - DNA, 15 bp, Homo sapiens
cgtcatcatagaacc

SEQ ID NO: 990790 - DNA, 15 bp, Homo sapiens
acgtcatcatagaac

SEQ ID NO: 990791 - DNA, 15 bp, Homo sapiens
gacgtcatcatagaa

SEQ ID NO: 990792 - DNA, 15 bp, Homo sapiens
ggacgtcatcataga

SEQ ID NO: 990793 - DNA, 15 bp, Homo sapiens
aggacgtcatcatag

SEQ ID NO: 990794 - DNA, 15 bp, Homo sapiens
caggacgtcatcata

SEQ ID NO: 990795 - DNA, 15 bp, Homo sapiens
acaggacgtcatcat

SEQ ID NO: 990796 - DNA, 15 bp, Homo sapiens
gacaggacgtcatca

SEQ ID NO: 990797 - DNA, 15 bp, Homo sapiens
agacaggacgtcatc

SEQ ID NO: 990798 - DNA, 15 bp, Homo sapiens
aagacaggacgtcat

SEQ ID NO: 990799 - DNA, 15 bp, Homo sapiens
caagacaggacgtca

SEQ ID NO: 990800 - DNA, 15 bp, Homo sapiens
ccaagacaggacgtc

SEQ ID NO: 990801 - DNA, 15 bp, Homo sapiens
tccaagacaggacgt

SEQ ID NO: 990802 - DNA, 15 bp, Homo sapiens
ttccaagacaggacg

SEQ ID NO: 990803 - DNA, 15 bp, Homo sapiens
cttccaagacaggac

SEQ ID NO: 990804 - DNA, 15 bp, Homo sapiens
ccttccaagacagga

SEQ ID NO: 990805 - DNA, 15 bp, Homo sapiens
tccttccaagacagg

SEQ ID NO: 990806 - DNA, 15 bp, Homo sapiens
gtccttccaagacag

SEQ ID NO: 990807 - DNA, 15 bp, Homo sapiens
agtccttccaagaca

SEQ ID NO: 990808 - DNA, 15 bp, Homo sapiens
tagtccttccaagac

SEQ ID NO: 990809 - DNA, 15 bp, Homo sapiens
gtagtccttccaaga

SEQ ID NO: 990810 - DNA, 15 bp, Homo sapiens
agtagtccttccaag

SEQ ID NO: 990811 - DNA, 15 bp, Homo sapiens
tagtagtccttccaa

SEQ ID NO: 990812 - DNA, 15 bp, Homo sapiens
gtagtagtccttcca

SEQ ID NO: 990813 - DNA, 15 bp, Homo sapiens
agtagtagtccttcc

SEQ ID NO: 990814 - DNA, 15 bp, Homo sapiens
gagtagtagtccttc

SEQ ID NO: 990815 - DNA, 15 bp, Homo sapiens
tgagtagtagtcctt

SEQ ID NO: 990816 - DNA, 15 bp, Homo sapiens
ttgagtagtagtcct

SEQ ID NO: 990817 - DNA, 15 bp, Homo sapiens
attgagtagtagtcc

SEQ ID NO: 990818 - DNA, 15 bp, Homo sapiens
cattgagtagtagtc

SEQ ID NO: 990819 - DNA, 15 bp, Homo sapiens
ccattgagtagtagt

SEQ ID NO: 990820 - DNA, 15 bp, Homo sapiens
gccattgagtagtag

SEQ ID NO: 990821 - DNA, 15 bp, Homo sapiens
ggccattgagtagta

SEQ ID NO: 990822 - DNA, 15 bp, Homo sapiens
gggccattgagtagt

SEQ ID NO: 990823 - DNA, 15 bp, Homo sapiens
ggggccattgagtag

SEQ ID NO: 990824 - DNA, 15 bp, Homo sapiens
aggggccattgagta

SEQ ID NO: 990825 - DNA, 15 bp, Homo sapiens
caggggccattgagt

SEQ ID NO: 990826 - DNA, 15 bp, Homo sapiens
gcaggggccattgag

SEQ ID NO: 990827 - DNA, 15 bp, Homo sapiens
tgcaggggccattga

SEQ ID NO: 990828 - DNA, 15 bp, Homo sapiens
gtgcaggggccattg

SEQ ID NO: 990829 - DNA, 15 bp, Homo sapiens
agtgcaggggccatt

SEQ ID NO: 990830 - DNA, 15 bp, Homo sapiens
tagtgcaggggccat

SEQ ID NO: 990831 - DNA, 15 bp, Homo sapiens
gtagtgcaggggcca

SEQ ID NO: 990832 - DNA, 15 bp, Homo sapiens
agtagtgcaggggcc

SEQ ID NO: 990833 - DNA, 15 bp, Homo sapiens
gagtagtgcaggggc

SEQ ID NO: 990834 - DNA, 15 bp, Homo sapiens
agagtagtgcagggg

SEQ ID NO: 990835 - DNA, 15 bp, Homo sapiens
tagagtagtgcaggg

SEQ ID NO: 990836 - DNA, 15 bp, Homo sapiens
gtagagtagtgcagg

SEQ ID NO: 990837 - DNA, 15 bp, Homo sapiens
agtagagtagtgcag

SEQ ID NO: 990838 - DNA, 15 bp, Homo sapiens
aagtagagtagtgca

SEQ ID NO: 990839 - DNA, 15 bp, Homo sapiens
gaagtagagtagtgc

SEQ ID NO: 990840 - DNA, 15 bp, Homo sapiens
ggaagtagagtagtg

SEQ ID NO: 990841 - DNA, 15 bp, Homo sapiens
aggaagtagagtagt

SEQ ID NO: 990842 - DNA, 15 bp, Homo sapiens
gaggaagtagagtag

SEQ ID NO: 990843 - DNA, 15 bp, Homo sapiens
agaggaagtagagta

SEQ ID NO: 990844 - DNA, 15 bp, Homo sapiens
aagaggaagtagagt

SEQ ID NO: 990845 - DNA, 15 bp, Homo sapiens
taagaggaagtagag

SEQ ID NO: 990846 - DNA, 15 bp, Homo sapiens
gtaagaggaagtaga

SEQ ID NO: 990847 - DNA, 15 bp, Homo sapiens
ggtaagaggaagtag

SEQ ID NO: 990848 - DNA, 15 bp, Homo sapiens
aggtaagaggaagta

SEQ ID NO: 990849 - DNA, 15 bp, Homo sapiens
taggtaagaggaagt

SEQ ID NO: 990850 - DNA, 15 bp, Homo sapiens
ataggtaagaggaag

SEQ ID NO: 990851 - DNA, 15 bp, Homo sapiens
cataggtaagaggaa

SEQ ID NO: 990852 - DNA, 15 bp, Homo sapiens
acataggtaagagga

SEQ ID NO: 990853 - DNA, 15 bp, Homo sapiens
gacataggtaagagg

SEQ ID NO: 990854 - DNA, 15 bp, Homo sapiens
ggacataggtaagag

SEQ ID NO: 990855 - DNA, 15 bp, Homo sapiens
gggacataggtaaga

SEQ ID NO: 990856 - DNA, 15 bp, Homo sapiens
agggacataggtaag

SEQ ID NO: 990857 - DNA, 15 bp, Homo sapiens
aagggacataggtaa

SEQ ID NO: 990858 - DNA, 15 bp, Homo sapiens
gaagggacataggta

SEQ ID NO: 990859 - DNA, 15 bp, Homo sapiens
agaagggacataggt

SEQ ID NO: 990860 - DNA, 15 bp, Homo sapiens
gagaagggacatagg

SEQ ID NO: 990861 - DNA, 15 bp, Homo sapiens
tgagaagggacatag

SEQ ID NO: 990862 - DNA, 15 bp, Homo sapiens
atgagaagggacata

SEQ ID NO: 990863 - DNA, 15 bp, Homo sapiens
catgagaagggacat

SEQ ID NO: 990864 - DNA, 15 bp, Homo sapiens
gcatgagaagggaca

SEQ ID NO: 990865 - DNA, 15 bp, Homo sapiens
ggcatgagaagggac

SEQ ID NO: 990866 - DNA, 15 bp, Homo sapiens
aggcatgagaaggga

SEQ ID NO: 990867 - DNA, 15 bp, Homo sapiens
aaggcatgagaaggg

SEQ ID NO: 990868 - DNA, 15 bp, Homo sapiens
aaaggcatgagaagg

SEQ ID NO: 990869 - DNA, 15 bp, Homo sapiens
gaaaggcatgagaag

SEQ ID NO: 990870 - DNA, 15 bp, Homo sapiens
ggaaaggcatgagaa

SEQ ID NO: 990871 - DNA, 15 bp, Homo sapiens
gggaaaggcatgaga

SEQ ID NO: 990872 - DNA, 15 bp, Homo sapiens
agggaaaggcatgag

SEQ ID NO: 990873 - DNA, 15 bp, Homo sapiens
gagggaaaggcatga

SEQ ID NO: 990874 - DNA, 15 bp, Homo sapiens
ggagggaaaggcatg

SEQ ID NO: 990875 - DNA, 15 bp, Homo sapiens
tggagggaaaggcat

SEQ ID NO: 990876 - DNA, 15 bp, Homo sapiens
ttggagggaaaggca

SEQ ID NO: 990877 - DNA, 15 bp, Homo sapiens
gttggagggaaaggc

SEQ ID NO: 990878 - DNA, 15 bp, Homo sapiens
cgttggagggaaagg

SEQ ID NO: 990879 - DNA, 15 bp, Homo sapiens
ccgttggagggaaag

SEQ ID NO: 990880 - DNA, 15 bp, Homo sapiens
cccgttggagggaaa

SEQ ID NO: 990881 - DNA, 15 bp, Homo sapiens
ccccgttggagggaa

SEQ ID NO: 990882 - DNA, 15 bp, Homo sapiens
tccccgttggaggga

SEQ ID NO: 990883 - DNA, 15 bp, Homo sapiens
ttccccgttggaggg

SEQ ID NO: 990884 - DNA, 15 bp, Homo sapiens
tttccccgttggagg

SEQ ID NO: 990885 - DNA, 15 bp, Homo sapiens
ctttccccgttggag

SEQ ID NO: 990886 - DNA, 15 bp, Homo sapiens
gctttccccgttgga

SEQ ID NO: 990887 - DNA, 15 bp, Homo sapiens
ggctttccccgttgg

SEQ ID NO: 990888 - DNA, 15 bp, Homo sapiens
tggctttccccgttg

SEQ ID NO: 990889 - DNA, 15 bp, Homo sapiens
ttggctttccccgtt

SEQ ID NO: 990890 - DNA, 15 bp, Homo sapiens
gttggctttccccgt

SEQ ID NO: 990891 - DNA, 15 bp, Homo sapiens
agttggctttccccg

SEQ ID NO: 990892 - DNA, 15 bp, Homo sapiens
gagttggctttcccc

SEQ ID NO: 990893 - DNA, 15 bp, Homo sapiens
ggagttggctttccc

SEQ ID NO: 990894 - DNA, 15 bp, Homo sapiens
tggagttggctttcc

SEQ ID NO: 990895 - DNA, 15 bp, Homo sapiens
atggagttggctttc

SEQ ID NO: 990896 - DNA, 15 bp, Homo sapiens
gatggagttggcttt

SEQ ID NO: 990897 - DNA, 15 bp, Homo sapiens
agatggagttggctt

SEQ ID NO: 990898 - DNA, 15 bp, Homo sapiens
gagatggagttggct

SEQ ID NO: 990899 - DNA, 15 bp, Homo sapiens
agagatggagttggc

SEQ ID NO: 990900 - DNA, 15 bp, Homo sapiens
tagagatggagttgg

SEQ ID NO: 990901 - DNA, 15 bp, Homo sapiens
ttagagatggagttg

SEQ ID NO: 990902 - DNA, 15 bp, Homo sapiens
cttagagatggagtt

SEQ ID NO: 990903 - DNA, 15 bp, Homo sapiens
acttagagatggagt

SEQ ID NO: 990904 - DNA, 15 bp, Homo sapiens
cacttagagatggag

SEQ ID NO: 990905 - DNA, 15 bp, Homo sapiens
gcacttagagatgga

SEQ ID NO: 990906 - DNA, 15 bp, Homo sapiens
ggcacttagagatgg

SEQ ID NO: 990907 - DNA, 15 bp, Homo sapiens
cggcacttagagatg

SEQ ID NO: 990908 - DNA, 15 bp, Homo sapiens
tcggcacttagagat

SEQ ID NO: 990909 - DNA, 15 bp, Homo sapiens
ttcggcacttagaga

SEQ ID NO: 990910 - DNA, 15 bp, Homo sapiens
gttcggcacttagag

SEQ ID NO: 990911 - DNA, 15 bp, Homo sapiens
agttcggcacttaga

SEQ ID NO: 990912 - DNA, 15 bp, Homo sapiens
gagttcggcacttag

SEQ ID NO: 990913 - DNA, 15 bp, Homo sapiens
tgagttcggcactta

SEQ ID NO: 990914 - DNA, 15 bp, Homo sapiens
atgagttcggcactt

SEQ ID NO: 990915 - DNA, 15 bp, Homo sapiens
gatgagttcggcact

SEQ ID NO: 990916 - DNA, 15 bp, Homo sapiens
ggatgagttcggcac

SEQ ID NO: 990917 - DNA, 15 bp, Homo sapiens
gggatgagttcggca

SEQ ID NO: 990918 - DNA, 15 bp, Homo sapiens
agggatgagttcggc

SEQ ID NO: 990919 - DNA, 15 bp, Homo sapiens
cagggatgagttcgg

SEQ ID NO: 990920 - DNA, 15 bp, Homo sapiens
acagggatgagttcg

SEQ ID NO: 990921 - DNA, 15 bp, Homo sapiens
aacagggatgagttc

SEQ ID NO: 990922 - DNA, 15 bp, Homo sapiens
gaacagggatgagtt

SEQ ID NO: 990923 - DNA, 15 bp, Homo sapiens
ggaacagggatgagt

SEQ ID NO: 990924 - DNA, 15 bp, Homo sapiens
aggaacagggatgag

SEQ ID NO: 990925 - DNA, 15 bp, Homo sapiens
gaggaacagggatga

SEQ ID NO: 990926 - DNA, 15 bp, Homo sapiens
tgaggaacagggatg

SEQ ID NO: 990927 - DNA, 15 bp, Homo sapiens
ttgaggaacagggat

SEQ ID NO: 990928 - DNA, 15 bp, Homo sapiens
cttgaggaacaggga

SEQ ID NO: 990929 - DNA, 15 bp, Homo sapiens
ccttgaggaacaggg

SEQ ID NO: 990930 - DNA, 15 bp, Homo sapiens
gccttgaggaacagg

SEQ ID NO: 990931 - DNA, 15 bp, Homo sapiens
ggccttgaggaacag

SEQ ID NO: 990932 - DNA, 15 bp, Homo sapiens
tggccttgaggaaca

SEQ ID NO: 990933 - DNA, 15 bp, Homo sapiens
gtggccttgaggaac

SEQ ID NO: 990934 - DNA, 15 bp, Homo sapiens
ggtggccttgaggaa

SEQ ID NO: 990935 - DNA, 15 bp, Homo sapiens
aggtggccttgagga

SEQ ID NO: 990936 - DNA, 15 bp, Homo sapiens
caggtggccttgagg

SEQ ID NO: 990937 - DNA, 15 bp, Homo sapiens
ccaggtggccttgag

SEQ ID NO: 990938 - DNA, 15 bp, Homo sapiens
gccaggtggccttga

SEQ ID NO: 990939 - DNA, 15 bp, Homo sapiens
ggccaggtggccttg

SEQ ID NO: 990940 - DNA, 15 bp, Homo sapiens
tggccaggtggcctt

SEQ ID NO: 990941 - DNA, 15 bp, Homo sapiens
ctggccaggtggcct

SEQ ID NO: 990942 - DNA, 15 bp, Homo sapiens
cctggccaggtggcc

SEQ ID NO: 990943 - DNA, 15 bp, Homo sapiens
tcctggccaggtggc

SEQ ID NO: 990944 - DNA, 15 bp, Homo sapiens
ctcctggccaggtgg

SEQ ID NO: 990945 - DNA, 15 bp, Homo sapiens
gctcctggccaggtg

SEQ ID NO: 990946 - DNA, 15 bp, Homo sapiens
agctcctggccaggt

SEQ ID NO: 990947 - DNA, 15 bp, Homo sapiens
aagctcctggccagg

SEQ ID NO: 990948 - DNA, 15 bp, Homo sapiens
gaagctcctggccag

SEQ ID NO: 990949 - DNA, 15 bp, Homo sapiens
agaagctcctggcca

SEQ ID NO: 990950 - DNA, 15 bp, Homo sapiens
gagaagctcctggcc

SEQ ID NO: 990951 - DNA, 15 bp, Homo sapiens
agagaagctcctggc

SEQ ID NO: 990952 - DNA, 15 bp, Homo sapiens
cagagaagctcctgg

SEQ ID NO: 990953 - DNA, 15 bp, Homo sapiens
tcagagaagctcctg

SEQ ID NO: 990954 - DNA, 15 bp, Homo sapiens
atcagagaagctcct

SEQ ID NO: 990955 - DNA, 15 bp, Homo sapiens
catcagagaagctcc

SEQ ID NO: 990956 - DNA, 15 bp, Homo sapiens
acatcagagaagctc

SEQ ID NO: 990957 - DNA, 15 bp, Homo sapiens
cacatcagagaagct

SEQ ID NO: 990958 - DNA, 15 bp, Homo sapiens
tcacatcagagaagc

SEQ ID NO: 990959 - DNA, 15 bp, Homo sapiens
atcacatcagagaag

SEQ ID NO: 990960 - DNA, 15 bp, Homo sapiens
tatcacatcagagaa

SEQ ID NO: 990961 - DNA, 15 bp, Homo sapiens
atatcacatcagaga

SEQ ID NO: 990962 - DNA, 15 bp, Homo sapiens
gatatcacatcagag

SEQ ID NO: 990963 - DNA, 15 bp, Homo sapiens
ggatatcacatcaga

SEQ ID NO: 990964 - DNA, 15 bp, Homo sapiens
tggatatcacatcag

SEQ ID NO: 990965 - DNA, 15 bp, Homo sapiens
gtggatatcacatca

SEQ ID NO: 990966 - DNA, 15 bp, Homo sapiens
agtggatatcacatc

SEQ ID NO: 990967 - DNA, 15 bp, Homo sapiens
aagtggatatcacat

SEQ ID NO: 990968 - DNA, 15 bp, Homo sapiens
aaagtggatatcaca

SEQ ID NO: 990969 - DNA, 15 bp, Homo sapiens
aaaagtggatatcac

SEQ ID NO: 990970 - DNA, 15 bp, Homo sapiens
aaaaagtggatatca

SEQ ID NO: 990971 - DNA, 15 bp, Homo sapiens
aaaaaagtggatatc

SEQ ID NO: 990972 - DNA, 15 bp, Homo sapiens
aaaaaaagtggatat

SEQ ID NO: 990973 - DNA, 15 bp, Homo sapiens
aaaaaaaagtggata

SEQ ID NO: 990974 - DNA, 15 bp, Homo sapiens
aaaaaaaaagtggat

SEQ ID NO: 990975 - DNA, 15 bp, Homo sapiens
aaaaaaaaaagtgga

SEQ ID NO: 990976 - DNA, 15 bp, Homo sapiens
caaaaaaaaaaaaag

SEQ ID NO: 990977 - DNA, 15 bp, Homo sapiens
tcactgtactccagc

SEQ ID NO: 990978 - DNA, 15 bp, Homo sapiens
gtgtcactgtactcc

SEQ ID NO: 990979 - DNA, 15 bp, Homo sapiens
cgtgtcactgtactc

SEQ ID NO: 990980 - DNA, 15 bp, Homo sapiens
tcgtgtcactgtact

SEQ ID NO: 990981 - DNA, 15 bp, Homo sapiens
gtcgtgtcactgtac

SEQ ID NO: 990982 - DNA, 15 bp, Homo sapiens
ggtcgtgtcactgta

SEQ ID NO: 990983 - DNA, 15 bp, Homo sapiens
aggtcgtgtcactgt

SEQ ID NO: 990984 - DNA, 15 bp, Homo sapiens
gaggtcgtgtcactg

SEQ ID NO: 990985 - DNA, 15 bp, Homo sapiens
cgaggtcgtgtcact

SEQ ID NO: 990986 - DNA, 15 bp, Homo sapiens
ccgaggtcgtgtcac

SEQ ID NO: 990987 - DNA, 15 bp, Homo sapiens
gccgaggtcgtgtca

SEQ ID NO: 990988 - DNA, 15 bp, Homo sapiens
agccgaggtcgtgtc

SEQ ID NO: 990989 - DNA, 15 bp, Homo sapiens
gagccgaggtcgtgt

SEQ ID NO: 990990 - DNA, 15 bp, Homo sapiens
tgagccgaggtcgtg

SEQ ID NO: 990991 - DNA, 15 bp, Homo sapiens
gtgagccgaggtcgt

SEQ ID NO: 990992 - DNA, 15 bp, Homo sapiens
aggaggctgcagtga

SEQ ID NO: 990993 - DNA, 15 bp, Homo sapiens
aaggaggctgcagtg

SEQ ID NO: 990994 - DNA, 15 bp, Homo sapiens
gaaggaggctgcagt

SEQ ID NO: 990995 - DNA, 15 bp, Homo sapiens
agaaggaggctgcag

SEQ ID NO: 990996 - DNA, 15 bp, Homo sapiens
gagaaggaggctgca

SEQ ID NO: 990997 - DNA, 15 bp, Homo sapiens
ggagaaggaggctgc

SEQ ID NO: 990998 - DNA, 15 bp, Homo sapiens
aggagaaggaggctg

SEQ ID NO: 990999 - DNA, 15 bp, Homo sapiens
caggagaaggaggct

SEQ ID NO: 991000 - DNA, 15 bp, Homo sapiens
ccaggagaaggaggc

SEQ ID NO: 991001 - DNA, 15 bp, Homo sapiens
cccaggagaaggagg

SEQ ID NO: 991002 - DNA, 15 bp, Homo sapiens
acccaggagaaggag

SEQ ID NO: 991003 - DNA, 15 bp, Homo sapiens
gacccaggagaagga

SEQ ID NO: 991004 - DNA, 15 bp, Homo sapiens
ggacccaggagaagg

SEQ ID NO: 991005 - DNA, 15 bp, Homo sapiens
tggacccaggagaag

SEQ ID NO: 991006 - DNA, 15 bp, Homo sapiens
ttggacccaggagaa

SEQ ID NO: 991007 - DNA, 15 bp, Homo sapiens
cttggacccaggaga

SEQ ID NO: 991008 - DNA, 15 bp, Homo sapiens
gcttggacccaggag

SEQ ID NO: 991009 - DNA, 15 bp, Homo sapiens
tgcttggacccagga

SEQ ID NO: 991010 - DNA, 15 bp, Homo sapiens
ttgcttggacccagg

SEQ ID NO: 991011 - DNA, 15 bp, Homo sapiens
attgcttggacccag

SEQ ID NO: 991012 - DNA, 15 bp, Homo sapiens
aattgcttggaccca

SEQ ID NO: 991013 - DNA, 15 bp, Homo sapiens
taattgcttggaccc

SEQ ID NO: 991014 - DNA, 15 bp, Homo sapiens
ataattgcttggacc

SEQ ID NO: 991015 - DNA, 15 bp, Homo sapiens
aataattgcttggac

SEQ ID NO: 991016 - DNA, 15 bp, Homo sapiens
caataattgcttgga

SEQ ID NO: 991017 - DNA, 15 bp, Homo sapiens
acaataattgcttgg

SEQ ID NO: 991018 - DNA, 15 bp, Homo sapiens
cacaataattgcttg

SEQ ID NO: 991019 - DNA, 15 bp, Homo sapiens
gcacaataattgctt

SEQ ID NO: 991020 - DNA, 15 bp, Homo sapiens
ggcacaataattgct

SEQ ID NO: 991021 - DNA, 15 bp, Homo sapiens
aggcacaataattgc

SEQ ID NO: 991022 - DNA, 15 bp, Homo sapiens
gaggcacaataattg

SEQ ID NO: 991023 - DNA, 15 bp, Homo sapiens
tgaggcacaataatt

SEQ ID NO: 991024 - DNA, 15 bp, Homo sapiens
ctgaggcacaataat

SEQ ID NO: 991025 - DNA, 15 bp, Homo sapiens
gctgaggcacaataa

SEQ ID NO: 991026 - DNA, 15 bp, Homo sapiens
ggctgaggcacaata

SEQ ID NO: 991027 - DNA, 15 bp, Homo sapiens
aggctgaggcacaat

SEQ ID NO: 991028 - DNA, 15 bp, Homo sapiens
aagtctcagctactc

SEQ ID NO: 991029 - DNA, 15 bp, Homo sapiens
gaagtctcagctact

SEQ ID NO: 991030 - DNA, 15 bp, Homo sapiens
tgaagtctcagctac

SEQ ID NO: 991031 - DNA, 15 bp, Homo sapiens
ctgaagtctcagcta

SEQ ID NO: 991032 - DNA, 15 bp, Homo sapiens
cctgaagtctcagct

SEQ ID NO: 991033 - DNA, 15 bp, Homo sapiens
acctgaagtctcagc

SEQ ID NO: 991034 - DNA, 15 bp, Homo sapiens
cacctgaagtctcag

SEQ ID NO: 991035 - DNA, 15 bp, Homo sapiens
gcacctgaagtctca

SEQ ID NO: 991036 - DNA, 15 bp, Homo sapiens
tgcacctgaagtctc

SEQ ID NO: 991037 - DNA, 15 bp, Homo sapiens
atgcacctgaagtct

SEQ ID NO: 991038 - DNA, 15 bp, Homo sapiens
aatgcacctgaagtc

SEQ ID NO: 991039 - DNA, 15 bp, Homo sapiens
gaatgcacctgaagt

SEQ ID NO: 991040 - DNA, 15 bp, Homo sapiens
ggaatgcacctgaag

SEQ ID NO: 991041 - DNA, 15 bp, Homo sapiens
tggaatgcacctgaa

SEQ ID NO: 991042 - DNA, 15 bp, Homo sapiens
gtggaatgcacctga

SEQ ID NO: 991043 - DNA, 15 bp, Homo sapiens
ggtggaatgcacctg

SEQ ID NO: 991044 - DNA, 15 bp, Homo sapiens
tggtggaatgcacct

SEQ ID NO: 991045 - DNA, 15 bp, Homo sapiens
gtggtggaatgcacc

SEQ ID NO: 991046 - DNA, 15 bp, Homo sapiens
tgtggtggaatgcac

SEQ ID NO: 991047 - DNA, 15 bp, Homo sapiens
gtgtggtggaatgca

SEQ ID NO: 991048 - DNA, 15 bp, Homo sapiens
tgtgtggtggaatgc

SEQ ID NO: 991049 - DNA, 15 bp, Homo sapiens
atgtgtggtggaatg

SEQ ID NO: 991050 - DNA, 15 bp, Homo sapiens
catgtgtggtggaat

SEQ ID NO: 991051 - DNA, 15 bp, Homo sapiens
ccatgtgtggtggaa

SEQ ID NO: 991052 - DNA, 15 bp, Homo sapiens
gccatgtgtggtgga

SEQ ID NO: 991053 - DNA, 15 bp, Homo sapiens
agccatgtgtggtgg

SEQ ID NO: 991054 - DNA, 15 bp, Homo sapiens
tagccatgtgtggtg

SEQ ID NO: 991055 - DNA, 15 bp, Homo sapiens
ttagccatgtgtggt

SEQ ID NO: 991056 - DNA, 15 bp, Homo sapiens
attagccatgtgtgg

SEQ ID NO: 991057 - DNA, 15 bp, Homo sapiens
aattagccatgtgtg

SEQ ID NO: 991058 - DNA, 15 bp, Homo sapiens
aaattagccatgtgt

SEQ ID NO: 991059 - DNA, 15 bp, Homo sapiens
aaaattagccatgtg

SEQ ID NO: 991060 - DNA, 15 bp, Homo sapiens
aaaaattagccatgt

SEQ ID NO: 991061 - DNA, 15 bp, Homo sapiens
caaaaattagccatg

SEQ ID NO: 991062 - DNA, 15 bp, Homo sapiens
acaaaaattagccat

SEQ ID NO: 991063 - DNA, 15 bp, Homo sapiens
cgaaaccccatttct

SEQ ID NO: 991064 - DNA, 15 bp, Homo sapiens
acgaaaccccatttc

SEQ ID NO: 991065 - DNA, 15 bp, Homo sapiens
gacgaaaccccattt

SEQ ID NO: 991066 - DNA, 15 bp, Homo sapiens
tgacgaaaccccatt

SEQ ID NO: 991067 - DNA, 15 bp, Homo sapiens
atgacgaaaccccat

SEQ ID NO: 991068 - DNA, 15 bp, Homo sapiens
catgacgaaacccca

SEQ ID NO: 991069 - DNA, 15 bp, Homo sapiens
acatgacgaaacccc

SEQ ID NO: 991070 - DNA, 15 bp, Homo sapiens
aacatgacgaaaccc

SEQ ID NO: 991071 - DNA, 15 bp, Homo sapiens
caacatgacgaaacc

SEQ ID NO: 991072 - DNA, 15 bp, Homo sapiens
ccaacatgacgaaac

SEQ ID NO: 991073 - DNA, 15 bp, Homo sapiens
gccaacatgacgaaa

SEQ ID NO: 991074 - DNA, 15 bp, Homo sapiens
ggccaacatgacgaa

SEQ ID NO: 991075 - DNA, 15 bp, Homo sapiens
tggccaacatgacga

SEQ ID NO: 991076 - DNA, 15 bp, Homo sapiens
ctggccaacatgacg

SEQ ID NO: 991077 - DNA, 15 bp, Homo sapiens
cctggccaacatgac

SEQ ID NO: 991078 - DNA, 15 bp, Homo sapiens
taggccaggagttcg

SEQ ID NO: 991079 - DNA, 15 bp, Homo sapiens
ctaggccaggagttc

SEQ ID NO: 991080 - DNA, 15 bp, Homo sapiens
cctaggccaggagtt

SEQ ID NO: 991081 - DNA, 15 bp, Homo sapiens
acctaggccaggagt

SEQ ID NO: 991082 - DNA, 15 bp, Homo sapiens
cacctaggccaggag

SEQ ID NO: 991083 - DNA, 15 bp, Homo sapiens
tcacctaggccagga

SEQ ID NO: 991084 - DNA, 15 bp, Homo sapiens
atcacctaggccagg

SEQ ID NO: 991085 - DNA, 15 bp, Homo sapiens
gatcacctaggccag

SEQ ID NO: 991086 - DNA, 15 bp, Homo sapiens
ggatcacctaggcca

SEQ ID NO: 991087 - DNA, 15 bp, Homo sapiens
tggatcacctaggcc

SEQ ID NO: 991088 - DNA, 15 bp, Homo sapiens
gtggatcacctaggc

SEQ ID NO: 991089 - DNA, 15 bp, Homo sapiens
ggtggatcacctagg

SEQ ID NO: 991090 - DNA, 15 bp, Homo sapiens
gggtggatcacctag

SEQ ID NO: 991091 - DNA, 15 bp, Homo sapiens
tcgaggcgggtggat

SEQ ID NO: 991092 - DNA, 15 bp, Homo sapiens
gtcgaggcgggtgga

SEQ ID NO: 991093 - DNA, 15 bp, Homo sapiens
ggtcgaggcgggtgg

SEQ ID NO: 991094 - DNA, 15 bp, Homo sapiens
aggtcgaggcgggtg

SEQ ID NO: 991095 - DNA, 15 bp, Homo sapiens
gaggtcgaggcgggt

SEQ ID NO: 991096 - DNA, 15 bp, Homo sapiens
ggaggtcgaggcggg

SEQ ID NO: 991097 - DNA, 15 bp, Homo sapiens
gggaggtcgaggcgg

SEQ ID NO: 991098 - DNA, 15 bp, Homo sapiens
tgggaggtcgaggcg

SEQ ID NO: 991099 - DNA, 15 bp, Homo sapiens
ttgggaggtcgaggc

SEQ ID NO: 991100 - DNA, 15 bp, Homo sapiens
tttgggaggtcgagg

SEQ ID NO: 991101 - DNA, 15 bp, Homo sapiens
ctttgggaggtcgag

SEQ ID NO: 991102 - DNA, 15 bp, Homo sapiens
actttgggaggtcga

SEQ ID NO: 991103 - DNA, 15 bp, Homo sapiens
actgggcatggtggc

SEQ ID NO: 991104 - DNA, 15 bp, Homo sapiens
gactgggcatggtgg

SEQ ID NO: 991105 - DNA, 15 bp, Homo sapiens
cgactgggcatggtg

SEQ ID NO: 991106 - DNA, 15 bp, Homo sapiens
tcgactgggcatggt

SEQ ID NO: 991107 - DNA, 15 bp, Homo sapiens
atcgactgggcatgg

SEQ ID NO: 991108 - DNA, 15 bp, Homo sapiens
tatcgactgggcatg

SEQ ID NO: 991109 - DNA, 15 bp, Homo sapiens
atatcgactgggcat

SEQ ID NO: 991110 - DNA, 15 bp, Homo sapiens
gatatcgactgggca

SEQ ID NO: 991111 - DNA, 15 bp, Homo sapiens
agatatcgactgggc

SEQ ID NO: 991112 - DNA, 15 bp, Homo sapiens
gagatatcgactggg

SEQ ID NO: 991113 - DNA, 15 bp, Homo sapiens
tgagatatcgactgg

SEQ ID NO: 991114 - DNA, 15 bp, Homo sapiens
gtgagatatcgactg

SEQ ID NO: 991115 - DNA, 15 bp, Homo sapiens
agtgagatatcgact

SEQ ID NO: 991116 - DNA, 15 bp, Homo sapiens
aagtgagatatcgac

SEQ ID NO: 991117 - DNA, 15 bp, Homo sapiens
aaagtgagatatcga

SEQ ID NO: 991118 - DNA, 15 bp, Homo sapiens
aaaagtgagatatcg

SEQ ID NO: 991119 - DNA, 15 bp, Homo sapiens
aaaaagtgagatatc

SEQ ID NO: 991120 - DNA, 15 bp, Homo sapiens
taaaaagtgagatat

SEQ ID NO: 991121 - DNA, 15 bp, Homo sapiens
ataaaaagtgagata

SEQ ID NO: 991122 - DNA, 15 bp, Homo sapiens
aataaaaagtgagat

SEQ ID NO: 991123 - DNA, 15 bp, Homo sapiens
aaataaaaagtgaga

SEQ ID NO: 991124 - DNA, 15 bp, Homo sapiens
aaaataaaaagtgag

SEQ ID NO: 991125 - DNA, 15 bp, Homo sapiens
caaaataaaaagtga

SEQ ID NO: 991126 - DNA, 15 bp, Homo sapiens
gcaaaataaaaagtg

SEQ ID NO: 991127 - DNA, 15 bp, Homo sapiens
ggcaaaataaaaagt

SEQ ID NO: 991128 - DNA, 15 bp, Homo sapiens
tggcaaaataaaaag

SEQ ID NO: 991129 - DNA, 15 bp, Homo sapiens
atggcaaaataaaaa

SEQ ID NO: 991130 - DNA, 15 bp, Homo sapiens
catggcaaaataaaa

SEQ ID NO: 991131 - DNA, 15 bp, Homo sapiens
ccatggcaaaataaa

SEQ ID NO: 991132 - DNA, 15 bp, Homo sapiens
tccatggcaaaataa

SEQ ID NO: 991133 - DNA, 15 bp, Homo sapiens
atccatggcaaaata

SEQ ID NO: 991134 - DNA, 15 bp, Homo sapiens
catccatggcaaaat

SEQ ID NO: 991135 - DNA, 15 bp, Homo sapiens
tcatccatggcaaaa

SEQ ID NO: 991136 - DNA, 15 bp, Homo sapiens
ctcatccatggcaaa

SEQ ID NO: 991137 - DNA, 15 bp, Homo sapiens
tctcatccatggcaa

SEQ ID NO: 991138 - DNA, 15 bp, Homo sapiens
ctctcatccatggca

SEQ ID NO: 991139 - DNA, 15 bp, Homo sapiens
actctcatccatggc

SEQ ID NO: 991140 - DNA, 15 bp, Homo sapiens
gactctcatccatgg

SEQ ID NO: 991141 - DNA, 15 bp, Homo sapiens
ggactctcatccatg

SEQ ID NO: 991142 - DNA, 15 bp, Homo sapiens
aggactctcatccat

SEQ ID NO: 991143 - DNA, 15 bp, Homo sapiens
caggactctcatcca

SEQ ID NO: 991144 - DNA, 15 bp, Homo sapiens
ccaggactctcatcc

SEQ ID NO: 991145 - DNA, 15 bp, Homo sapiens
cccaggactctcatc

SEQ ID NO: 991146 - DNA, 15 bp, Homo sapiens
acccaggactctcat

SEQ ID NO: 991147 - DNA, 15 bp, Homo sapiens
cacccaggactctca

SEQ ID NO: 991148 - DNA, 15 bp, Homo sapiens
acacccaggactctc

SEQ ID NO: 991149 - DNA, 15 bp, Homo sapiens
cacacccaggactct

SEQ ID NO: 991150 - DNA, 15 bp, Homo sapiens
tcacacccaggactc

SEQ ID NO: 991151 - DNA, 15 bp, Homo sapiens
ctcacacccaggact

SEQ ID NO: 991152 - DNA, 15 bp, Homo sapiens
cctcacacccaggac

SEQ ID NO: 991153 - DNA, 15 bp, Homo sapiens
tcctcacacccagga

SEQ ID NO: 991154 - DNA, 15 bp, Homo sapiens
ttcctcacacccagg

SEQ ID NO: 991155 - DNA, 15 bp, Homo sapiens
gttcctcacacccag

SEQ ID NO: 991156 - DNA, 15 bp, Homo sapiens
tgttcctcacaccca

SEQ ID NO: 991157 - DNA, 15 bp, Homo sapiens
gtgttcctcacaccc

SEQ ID NO: 991158 - DNA, 15 bp, Homo sapiens
ggtgttcctcacacc

SEQ ID NO: 991159 - DNA, 15 bp, Homo sapiens
aggtgttcctcacac

SEQ ID NO: 991160 - DNA, 15 bp, Homo sapiens
gaggtgttcctcaca

SEQ ID NO: 991161 - DNA, 15 bp, Homo sapiens
ggaggtgttcctcac

SEQ ID NO: 991162 - DNA, 15 bp, Homo sapiens
gggaggtgttcctca

SEQ ID NO: 991163 - DNA, 15 bp, Homo sapiens
tgggaggtgttcctc

SEQ ID NO: 991164 - DNA, 15 bp, Homo sapiens
gtgggaggtgttcct

SEQ ID NO: 991165 - DNA, 15 bp, Homo sapiens
ggtgggaggtgttcc

SEQ ID NO: 991166 - DNA, 15 bp, Homo sapiens
tggtgggaggtgttc

SEQ ID NO: 991167 - DNA, 15 bp, Homo sapiens
ctggtgggaggtgtt

SEQ ID NO: 991168 - DNA, 15 bp, Homo sapiens
cctggtgggaggtgt

SEQ ID NO: 991169 - DNA, 15 bp, Homo sapiens
gcctggtgggaggtg

SEQ ID NO: 991170 - DNA, 15 bp, Homo sapiens
agcctggtgggaggt

SEQ ID NO: 991171 - DNA, 15 bp, Homo sapiens
tagcctggtgggagg

SEQ ID NO: 991172 - DNA, 15 bp, Homo sapiens
ctagcctggtgggag

SEQ ID NO: 991173 - DNA, 15 bp, Homo sapiens
tctagcctggtggga

SEQ ID NO: 991174 - DNA, 15 bp, Homo sapiens
ctctagcctggtggg

SEQ ID NO: 991175 - DNA, 15 bp, Homo sapiens
cctctagcctggtgg

SEQ ID NO: 991176 - DNA, 15 bp, Homo sapiens
gcctctagcctggtg

SEQ ID NO: 991177 - DNA, 15 bp, Homo sapiens
tgcctctagcctggt

SEQ ID NO: 991178 - DNA, 15 bp, Homo sapiens
ttgcctctagcctgg

SEQ ID NO: 991179 - DNA, 15 bp, Homo sapiens
gttgcctctagcctg

SEQ ID NO: 991180 - DNA, 15 bp, Homo sapiens
agttgcctctagcct

SEQ ID NO: 991181 - DNA, 15 bp, Homo sapiens
cagttgcctctagcc

SEQ ID NO: 991182 - DNA, 15 bp, Homo sapiens
gcagttgcctctagc

SEQ ID NO: 991183 - DNA, 15 bp, Homo sapiens
ggcagttgcctctag

SEQ ID NO: 991184 - DNA, 15 bp, Homo sapiens
gggcagttgcctcta

SEQ ID NO: 991185 - DNA, 15 bp, Homo sapiens
tgggcagttgcctct

SEQ ID NO: 991186 - DNA, 15 bp, Homo sapiens
ctgggcagttgcctc

SEQ ID NO: 991187 - DNA, 15 bp, Homo sapiens
cctgggcagttgcct

SEQ ID NO: 991188 - DNA, 15 bp, Homo sapiens
tcctgggcagttgcc

SEQ ID NO: 991189 - DNA, 15 bp, Homo sapiens
ttcctgggcagttgc

SEQ ID NO: 991190 - DNA, 15 bp, Homo sapiens
cttcctgggcagttg

SEQ ID NO: 991191 - DNA, 15 bp, Homo sapiens
ccttcctgggcagtt

SEQ ID NO: 991192 - DNA, 15 bp, Homo sapiens
tccttcctgggcagt

SEQ ID NO: 991193 - DNA, 15 bp, Homo sapiens
gtccttcctgggcag

SEQ ID NO: 991194 - DNA, 15 bp, Homo sapiens
agtccttcctgggca

SEQ ID NO: 991195 - DNA, 15 bp, Homo sapiens
cagtccttcctgggc

SEQ ID NO: 991196 - DNA, 15 bp, Homo sapiens
acagtccttcctggg

SEQ ID NO: 991197 - DNA, 15 bp, Homo sapiens
cacagtccttcctgg

SEQ ID NO: 991198 - DNA, 15 bp, Homo sapiens
gcacagtccttcctg

SEQ ID NO: 991199 - DNA, 15 bp, Homo sapiens
agcacagtccttcct

SEQ ID NO: 991200 - DNA, 15 bp, Homo sapiens
aagcacagtccttcc

SEQ ID NO: 991201 - DNA, 15 bp, Homo sapiens
gaagcacagtccttc

SEQ ID NO: 991202 - DNA, 15 bp, Homo sapiens
ggaagcacagtcctt

SEQ ID NO: 991203 - DNA, 15 bp, Homo sapiens
cggaagcacagtcct

SEQ ID NO: 991204 - DNA, 15 bp, Homo sapiens
acggaagcacagtcc

SEQ ID NO: 991205 - DNA, 15 bp, Homo sapiens
gacggaagcacagtc

SEQ ID NO: 991206 - DNA, 15 bp, Homo sapiens
tgacggaagcacagt

SEQ ID NO: 991207 - DNA, 15 bp, Homo sapiens
gtgacggaagcacag

SEQ ID NO: 991208 - DNA, 15 bp, Homo sapiens
ggtgacggaagcaca

SEQ ID NO: 991209 - DNA, 15 bp, Homo sapiens
aggtgacggaagcac

SEQ ID NO: 991210 - DNA, 15 bp, Homo sapiens
gaggtgacggaagca

SEQ ID NO: 991211 - DNA, 15 bp, Homo sapiens
agaggtgacggaagc

SEQ ID NO: 991212 - DNA, 15 bp, Homo sapiens
tagaggtgacggaag

SEQ ID NO: 991213 - DNA, 15 bp, Homo sapiens
ttagaggtgacggaa

SEQ ID NO: 991214 - DNA, 15 bp, Homo sapiens
tttagaggtgacgga

SEQ ID NO: 991215 - DNA, 15 bp, Homo sapiens
atttagaggtgacgg

SEQ ID NO: 991216 - DNA, 15 bp, Homo sapiens
gatttagaggtgacg

SEQ ID NO: 991217 - DNA, 15 bp, Homo sapiens
ggatttagaggtgac

SEQ ID NO: 991218 - DNA, 15 bp, Homo sapiens
gggatttagaggtga

SEQ ID NO: 991219 - DNA, 15 bp, Homo sapiens
agggatttagaggtg

SEQ ID NO: 991220 - DNA, 15 bp, Homo sapiens
aagggatttagaggt

SEQ ID NO: 991221 - DNA, 15 bp, Homo sapiens
caagggatttagagg

SEQ ID NO: 991222 - DNA, 15 bp, Homo sapiens
gcaagggatttagag

SEQ ID NO: 991223 - DNA, 15 bp, Homo sapiens
tgcaagggatttaga

SEQ ID NO: 991224 - DNA, 15 bp, Homo sapiens
ctgcaagggatttag

SEQ ID NO: 991225 - DNA, 15 bp, Homo sapiens
tctgcaagggattta

SEQ ID NO: 991226 - DNA, 15 bp, Homo sapiens
atctgcaagggattt

SEQ ID NO: 991227 - DNA, 15 bp, Homo sapiens
gatctgcaagggatt

SEQ ID NO: 991228 - DNA, 15 bp, Homo sapiens
ggatctgcaagggat

SEQ ID NO: 991229 - DNA, 15 bp, Homo sapiens
aggatctgcaaggga

SEQ ID NO: 991230 - DNA, 15 bp, Homo sapiens
aaggatctgcaaggg

SEQ ID NO: 991231 - DNA, 15 bp, Homo sapiens
caaggatctgcaagg

SEQ ID NO: 991232 - DNA, 15 bp, Homo sapiens
tcaaggatctgcaag

SEQ ID NO: 991233 - DNA, 15 bp, Homo sapiens
atcaaggatctgcaa

SEQ ID NO: 991234 - DNA, 15 bp, Homo sapiens
tatcaaggatctgca

SEQ ID NO: 991235 - DNA, 15 bp, Homo sapiens
ttatcaaggatctgc

SEQ ID NO: 991236 - DNA, 15 bp, Homo sapiens
tttatcaaggatctg

SEQ ID NO: 991237 - DNA, 15 bp, Homo sapiens
atttatcaaggatct

SEQ ID NO: 991238 - DNA, 15 bp, Homo sapiens
catttatcaaggatc

SEQ ID NO: 991239 - DNA, 15 bp, Homo sapiens
gcatttatcaaggat

SEQ ID NO: 991240 - DNA, 15 bp, Homo sapiens
ggcatttatcaagga

SEQ ID NO: 991241 - DNA, 15 bp, Homo sapiens
aggcatttatcaagg

SEQ ID NO: 991242 - DNA, 15 bp, Homo sapiens
gaggcatttatcaag

SEQ ID NO: 991243 - DNA, 15 bp, Homo sapiens
tgaggcatttatcaa

SEQ ID NO: 991244 - DNA, 15 bp, Homo sapiens
atgaggcatttatca

SEQ ID NO: 991245 - DNA, 15 bp, Homo sapiens
catgaggcatttatc

SEQ ID NO: 991246 - DNA, 15 bp, Homo sapiens
tcatgaggcatttat

SEQ ID NO: 991247 - DNA, 15 bp, Homo sapiens
ttcatgaggcattta

SEQ ID NO: 991248 - DNA, 15 bp, Homo sapiens
cttcatgaggcattt

SEQ ID NO: 991249 - DNA, 15 bp, Homo sapiens
tcttcatgaggcatt

SEQ ID NO: 991250 - DNA, 15 bp, Homo sapiens
gtcttcatgaggcat

SEQ ID NO: 991251 - DNA, 15 bp, Homo sapiens
tcagaaacattatac

SEQ ID NO: 991252 - DNA, 15 bp, Homo sapiens
ctcagaaacattata

SEQ ID NO: 991253 - DNA, 15 bp, Homo sapiens
tctcagaaacattat

SEQ ID NO: 991254 - DNA, 15 bp, Homo sapiens
atctcagaaacatta

SEQ ID NO: 991255 - DNA, 15 bp, Homo sapiens
tatctcagaaacatt

SEQ ID NO: 991256 - DNA, 15 bp, Homo sapiens
atatctcagaaacat

SEQ ID NO: 991257 - DNA, 15 bp, Homo sapiens
aatatctcagaaaca

SEQ ID NO: 991258 - DNA, 15 bp, Homo sapiens
aaatatctcagaaac

SEQ ID NO: 991259 - DNA, 15 bp, Homo sapiens
caaatatctcagaaa

SEQ ID NO: 991260 - DNA, 15 bp, Homo sapiens
tcaaatatctcagaa

SEQ ID NO: 991261 - DNA, 15 bp, Homo sapiens
atcaaatatctcaga

SEQ ID NO: 991262 - DNA, 15 bp, Homo sapiens
catcaaatatctcag

SEQ ID NO: 991263 - DNA, 15 bp, Homo sapiens
tcatcaaatatctca

SEQ ID NO: 991264 - DNA, 15 bp, Homo sapiens
atcatcaaatatctc

SEQ ID NO: 991265 - DNA, 15 bp, Homo sapiens
aatcatcaaatatct

SEQ ID NO: 991266 - DNA, 15 bp, Homo sapiens
gaatcatcaaatatc

SEQ ID NO: 991267 - DNA, 15 bp, Homo sapiens
tgaatcatcaaatat

SEQ ID NO: 991268 - DNA, 15 bp, Homo sapiens
atgaatcatcaaata

SEQ ID NO: 991269 - DNA, 15 bp, Homo sapiens
aatgaatcatcaaat

SEQ ID NO: 991270 - DNA, 15 bp, Homo sapiens
gaatgaatcatcaaa

SEQ ID NO: 991271 - DNA, 15 bp, Homo sapiens
ggaatgaatcatcaa

SEQ ID NO: 991272 - DNA, 15 bp, Homo sapiens
aggaatgaatcatca

SEQ ID NO: 991273 - DNA, 15 bp, Homo sapiens
aaggaatgaatcatc

SEQ ID NO: 991274 - DNA, 15 bp, Homo sapiens
aaaggaatgaatcat

SEQ ID NO: 991275 - DNA, 15 bp, Homo sapiens
aaaaggaatgaatca

SEQ ID NO: 991276 - DNA, 15 bp, Homo sapiens
aaaaaggaatgaatc

SEQ ID NO: 991277 - DNA, 15 bp, Homo sapiens
aaaaaaggaatgaat

SEQ ID NO: 991278 - DNA, 15 bp, Homo sapiens
taaaaaaggaatgaa

SEQ ID NO: 991279 - DNA, 15 bp, Homo sapiens
ttaaaaaaggaatga

SEQ ID NO: 991280 - DNA, 15 bp, Homo sapiens
tttaaaaaaggaatg

SEQ ID NO: 991281 - DNA, 15 bp, Homo sapiens
atttaaaaaaggaat

SEQ ID NO: 991282 - DNA, 15 bp, Homo sapiens
aatttaaaaaaggaa

SEQ ID NO: 991283 - DNA, 15 bp, Homo sapiens
taatttaaaaaagga

SEQ ID NO: 991284 - DNA, 15 bp, Homo sapiens
ttaatttaaaaaagg

SEQ ID NO: 991285 - DNA, 15 bp, Homo sapiens
attaatttaaaaaag

SEQ ID NO: 991286 - DNA, 15 bp, Homo sapiens
aattaatttaaaaaa

SEQ ID NO: 991287 - DNA, 15 bp, Homo sapiens
aaattaatttaaaaa

SEQ ID NO: 991288 - DNA, 15 bp, Homo sapiens
caaattaatttaaaa

SEQ ID NO: 991289 - DNA, 15 bp, Homo sapiens
acaaattaatttaaa

SEQ ID NO: 991290 - DNA, 15 bp, Homo sapiens
aacaaattaatttaa

SEQ ID NO: 991291 - DNA, 15 bp, Homo sapiens
aaacaaattaattta

SEQ ID NO: 991292 - DNA, 15 bp, Homo sapiens
taaacaaattaattt

SEQ ID NO: 991293 - DNA, 15 bp, Homo sapiens
ataaacaaattaatt

SEQ ID NO: 991294 - DNA, 15 bp, Homo sapiens
aataaacaaattaat

SEQ ID NO: 991295 - DNA, 15 bp, Homo sapiens
aaataaacaaattaa

SEQ ID NO: 991296 - DNA, 15 bp, Homo sapiens
aaaataaacaaatta

SEQ ID NO: 991297 - DNA, 15 bp, Homo sapiens
aaaaataaacaaatt

SEQ ID NO: 991298 - DNA, 15 bp, Homo sapiens
caaaaataaacaaat

SEQ ID NO: 991299 - DNA, 15 bp, Homo sapiens
gcaaaaataaacaaa

SEQ ID NO: 991300 - DNA, 15 bp, Homo sapiens
agcaaaaataaacaa

SEQ ID NO: 991301 - DNA, 15 bp, Homo sapiens
cagcaaaaataaaca

SEQ ID NO: 991302 - DNA, 15 bp, Homo sapiens
tcagcaaaaataaac

SEQ ID NO: 991303 - DNA, 15 bp, Homo sapiens
ctcagcaaaaataaa

SEQ ID NO: 991304 - DNA, 15 bp, Homo sapiens
actcagcaaaaataa

SEQ ID NO: 991305 - DNA, 15 bp, Homo sapiens
tactcagcaaaaata

SEQ ID NO: 991306 - DNA, 15 bp, Homo sapiens
ctactcagcaaaaat

SEQ ID NO: 991307 - DNA, 15 bp, Homo sapiens
actactcagcaaaaa

SEQ ID NO: 991308 - DNA, 15 bp, Homo sapiens
tactactcagcaaaa

SEQ ID NO: 991309 - DNA, 15 bp, Homo sapiens
atactactcagcaaa

SEQ ID NO: 991310 - DNA, 15 bp, Homo sapiens
aatactactcagcaa

SEQ ID NO: 991311 - DNA, 15 bp, Homo sapiens
aaatactactcagca

SEQ ID NO: 991312 - DNA, 15 bp, Homo sapiens
gaaatactactcagc

SEQ ID NO: 991313 - DNA, 15 bp, Homo sapiens
tgaaatactactcag

SEQ ID NO: 991314 - DNA, 15 bp, Homo sapiens
atgaaatactactca

SEQ ID NO: 991315 - DNA, 15 bp, Homo sapiens
aatgaaatactactc

SEQ ID NO: 991316 - DNA, 15 bp, Homo sapiens
caatgaaatactact

SEQ ID NO: 991317 - DNA, 15 bp, Homo sapiens
acaatgaaatactac

SEQ ID NO: 991318 - DNA, 15 bp, Homo sapiens
tacaatgaaatacta

SEQ ID NO: 991319 - DNA, 15 bp, Homo sapiens
atacaatgaaatact

SEQ ID NO: 991320 - DNA, 15 bp, Homo sapiens
gatacaatgaaatac

SEQ ID NO: 991321 - DNA, 15 bp, Homo sapiens
cgatacaatgaaata

SEQ ID NO: 991322 - DNA, 15 bp, Homo sapiens
tcgccagcctcggcg

SEQ ID NO: 991323 - DNA, 15 bp, Homo sapiens
cctcgccagcctcgg

SEQ ID NO: 991324 - DNA, 15 bp, Homo sapiens
acctcgccagcctcg

SEQ ID NO: 991325 - DNA, 15 bp, Homo sapiens
cacctcgccagcctc

SEQ ID NO: 991326 - DNA, 15 bp, Homo sapiens
gcacctcgccagcct

SEQ ID NO: 991327 - DNA, 15 bp, Homo sapiens
cgcacctcgccagcc

SEQ ID NO: 991328 - DNA, 15 bp, Homo sapiens
gcgcacctcgccagc

SEQ ID NO: 991329 - DNA, 15 bp, Homo sapiens
cgcgcacctcgccag

SEQ ID NO: 991330 - DNA, 15 bp, Homo sapiens
ccgcgcacctcgcca

SEQ ID NO: 991331 - DNA, 15 bp, Homo sapiens
gccgcgcacctcgcc

SEQ ID NO: 991332 - DNA, 15 bp, Homo sapiens
agccgcgcacctcgc

SEQ ID NO: 991333 - DNA, 15 bp, Homo sapiens
cagccgcgcacctcg

SEQ ID NO: 991334 - DNA, 15 bp, Homo sapiens
ccagccgcgcacctc

SEQ ID NO: 991335 - DNA, 15 bp, Homo sapiens
gccagccgcgcacct

SEQ ID NO: 991336 - DNA, 15 bp, Homo sapiens
agccagccgcgcacc

SEQ ID NO: 991337 - DNA, 15 bp, Homo sapiens
cagccagccgcgcac

SEQ ID NO: 991338 - DNA, 15 bp, Homo sapiens
gcagccagccgcgca

SEQ ID NO: 991339 - DNA, 15 bp, Homo sapiens
agcagccagccgcgc

SEQ ID NO: 991340 - DNA, 15 bp, Homo sapiens
tagcagccagccgcg

SEQ ID NO: 991341 - DNA, 15 bp, Homo sapiens
ctagcagccagccgc

SEQ ID NO: 991342 - DNA, 15 bp, Homo sapiens
cctagcagccagccg

SEQ ID NO: 991343 - DNA, 15 bp, Homo sapiens
tcctagcagccagcc

SEQ ID NO: 991344 - DNA, 15 bp, Homo sapiens
ttcctagcagccagc

SEQ ID NO: 991345 - DNA, 15 bp, Homo sapiens
tttcctagcagccag

SEQ ID NO: 991346 - DNA, 15 bp, Homo sapiens
ctttcctagcagcca

SEQ ID NO: 991347 - DNA, 15 bp, Homo sapiens
tctttcctagcagcc

SEQ ID NO: 991348 - DNA, 15 bp, Homo sapiens
ctctttcctagcagc

SEQ ID NO: 991349 - DNA, 15 bp, Homo sapiens
tctctttcctagcag

SEQ ID NO: 991350 - DNA, 15 bp, Homo sapiens
atctctttcctagca

SEQ ID NO: 991351 - DNA, 15 bp, Homo sapiens
gatctctttcctagc

SEQ ID NO: 991352 - DNA, 15 bp, Homo sapiens
ggatctctttcctag

SEQ ID NO: 991353 - DNA, 15 bp, Homo sapiens
tggatctctttccta

SEQ ID NO: 991354 - DNA, 15 bp, Homo sapiens
ctggatctctttcct

SEQ ID NO: 991355 - DNA, 15 bp, Homo sapiens
tctggatctctttcc

SEQ ID NO: 991356 - DNA, 15 bp, Homo sapiens
gtctggatctctttc

SEQ ID NO: 991357 - DNA, 15 bp, Homo sapiens
cgtctggatctcttt

SEQ ID NO: 991358 - DNA, 15 bp, Homo sapiens
ccgtctggatctctt

SEQ ID NO: 991359 - DNA, 15 bp, Homo sapiens
accgtctggatctct

SEQ ID NO: 991360 - DNA, 15 bp, Homo sapiens
gaccgtctggatctc

SEQ ID NO: 991361 - DNA, 15 bp, Homo sapiens
cgaccgtctggatct

SEQ ID NO: 991362 - DNA, 15 bp, Homo sapiens
gcgaccgtctggatc

SEQ ID NO: 991363 - DNA, 15 bp, Homo sapiens
ggcgaccgtctggat

SEQ ID NO: 991364 - DNA, 15 bp, Homo sapiens
aggcgaccgtctgga

SEQ ID NO: 991365 - DNA, 15 bp, Homo sapiens
caggcgaccgtctgg

SEQ ID NO: 991366 - DNA, 15 bp, Homo sapiens
ccaggcgaccgtctg

SEQ ID NO: 991367 - DNA, 15 bp, Homo sapiens
accaggcgaccgtct

SEQ ID NO: 991368 - DNA, 15 bp, Homo sapiens
caccaggcgaccgtc

SEQ ID NO: 991369 - DNA, 15 bp, Homo sapiens
gcaccaggcgaccgt

SEQ ID NO: 991370 - DNA, 15 bp, Homo sapiens
cgcaccaggcgaccg

SEQ ID NO: 991371 - DNA, 15 bp, Homo sapiens
gcgcaccaggcgacc

SEQ ID NO: 991372 - DNA, 15 bp, Homo sapiens
agcgcaccaggcgac

SEQ ID NO: 991373 - DNA, 15 bp, Homo sapiens
cagcgcaccaggcga

SEQ ID NO: 991374 - DNA, 15 bp, Homo sapiens
ccagcgcaccaggcg

SEQ ID NO: 991375 - DNA, 15 bp, Homo sapiens
tccagcgcaccaggc

SEQ ID NO: 991376 - DNA, 15 bp, Homo sapiens
atccagcgcaccagg

SEQ ID NO: 991377 - DNA, 15 bp, Homo sapiens
gatccagcgcaccag

SEQ ID NO: 991378 - DNA, 15 bp, Homo sapiens
ggatccagcgcacca

SEQ ID NO: 991379 - DNA, 15 bp, Homo sapiens
gggatccagcgcacc

SEQ ID NO: 991380 - DNA, 15 bp, Homo sapiens
agggatccagcgcac

SEQ ID NO: 991381 - DNA, 15 bp, Homo sapiens
cagggatccagcgca

SEQ ID NO: 991382 - DNA, 15 bp, Homo sapiens
acagggatccagcgc

SEQ ID NO: 991383 - DNA, 15 bp, Homo sapiens
cacagggatccagcg

SEQ ID NO: 991384 - DNA, 15 bp, Homo sapiens
gcacagggatccagc

SEQ ID NO: 991385 - DNA, 15 bp, Homo sapiens
ggcacagggatccag

SEQ ID NO: 991386 - DNA, 15 bp, Homo sapiens
gggcacagggatcca

SEQ ID NO: 991387 - DNA, 15 bp, Homo sapiens
agggcacagggatcc

SEQ ID NO: 991388 - DNA, 15 bp, Homo sapiens
aagggcacagggatc

SEQ ID NO: 991389 - DNA, 15 bp, Homo sapiens
aaagggcacagggat

SEQ ID NO: 991390 - DNA, 15 bp, Homo sapiens
gaaagggcacaggga

SEQ ID NO: 991391 - DNA, 15 bp, Homo sapiens
ggaaagggcacaggg

SEQ ID NO: 991392 - DNA, 15 bp, Homo sapiens
gggaaagggcacagg

SEQ ID NO: 991393 - DNA, 15 bp, Homo sapiens
agggaaagggcacag

SEQ ID NO: 991394 - DNA, 15 bp, Homo sapiens
cagggaaagggcaca

SEQ ID NO: 991395 - DNA, 15 bp, Homo sapiens
tcagggaaagggcac

SEQ ID NO: 991396 - DNA, 15 bp, Homo sapiens
ttcagggaaagggca

SEQ ID NO: 991397 - DNA, 15 bp, Homo sapiens
tttcagggaaagggc

SEQ ID NO: 991398 - DNA, 15 bp, Homo sapiens
gtttcagggaaaggg

SEQ ID NO: 991399 - DNA, 15 bp, Homo sapiens
ggtttcagggaaagg

SEQ ID NO: 991400 - DNA, 15 bp, Homo sapiens
gggtttcagggaaag

SEQ ID NO: 991401 - DNA, 15 bp, Homo sapiens
tgggtttcagggaaa

SEQ ID NO: 991402 - DNA, 15 bp, Homo sapiens
ctgggtttcagggaa

SEQ ID NO: 991403 - DNA, 15 bp, Homo sapiens
gctgggtttcaggga

SEQ ID NO: 991404 - DNA, 15 bp, Homo sapiens
ggctgggtttcaggg

SEQ ID NO: 991405 - DNA, 15 bp, Homo sapiens
aggctgggtttcagg

SEQ ID NO: 991406 - DNA, 15 bp, Homo sapiens
caggctgggtttcag

SEQ ID NO: 991407 - DNA, 15 bp, Homo sapiens
ccaggctgggtttca

SEQ ID NO: 991408 - DNA, 15 bp, Homo sapiens
gccaggctgggtttc

SEQ ID NO: 991409 - DNA, 15 bp, Homo sapiens
ggccaggctgggttt

SEQ ID NO: 991410 - DNA, 15 bp, Homo sapiens
aggccaggctgggtt

SEQ ID NO: 991411 - DNA, 15 bp, Homo sapiens
caggccaggctgggt

SEQ ID NO: 991412 - DNA, 15 bp, Homo sapiens
tcaggccaggctggg

SEQ ID NO: 991413 - DNA, 15 bp, Homo sapiens
gtcaggccaggctgg

SEQ ID NO: 991414 - DNA, 15 bp, Homo sapiens
agtcaggccaggctg

SEQ ID NO: 991415 - DNA, 15 bp, Homo sapiens
cagtcaggccaggct

SEQ ID NO: 991416 - DNA, 15 bp, Homo sapiens
gcagtcaggccaggc

SEQ ID NO: 991417 - DNA, 15 bp, Homo sapiens
tgcagtcaggccagg

SEQ ID NO: 991418 - DNA, 15 bp, Homo sapiens
ttgcagtcaggccag

SEQ ID NO: 991419 - DNA, 15 bp, Homo sapiens
gttgcagtcaggcca

SEQ ID NO: 991420 - DNA, 15 bp, Homo sapiens
ggttgcagtcaggcc

SEQ ID NO: 991421 - DNA, 15 bp, Homo sapiens
aggttgcagtcaggc

SEQ ID NO: 991422 - DNA, 15 bp, Homo sapiens
gaggttgcagtcagg

SEQ ID NO: 991423 - DNA, 15 bp, Homo sapiens
agaggttgcagtcag

SEQ ID NO: 991424 - DNA, 15 bp, Homo sapiens
gagaggttgcagtca

SEQ ID NO: 991425 - DNA, 15 bp, Homo sapiens
ggagaggttgcagtc

SEQ ID NO: 991426 - DNA, 15 bp, Homo sapiens
gggagaggttgcagt

SEQ ID NO: 991427 - DNA, 15 bp, Homo sapiens
tgggagaggttgcag

SEQ ID NO: 991428 - DNA, 15 bp, Homo sapiens
ttgggagaggttgca

SEQ ID NO: 991429 - DNA, 15 bp, Homo sapiens
gttgggagaggttgc

SEQ ID NO: 991430 - DNA, 15 bp, Homo sapiens
agttgggagaggttg

SEQ ID NO: 991431 - DNA, 15 bp, Homo sapiens
aagttgggagaggtt

SEQ ID NO: 991432 - DNA, 15 bp, Homo sapiens
gaagttgggagaggt

SEQ ID NO: 991433 - DNA, 15 bp, Homo sapiens
tgaagttgggagagg

SEQ ID NO: 991434 - DNA, 15 bp, Homo sapiens
ctgaagttgggagag

SEQ ID NO: 991435 - DNA, 15 bp, Homo sapiens
actgaagttgggaga

SEQ ID NO: 991436 - DNA, 15 bp, Homo sapiens
cactgaagttgggag

SEQ ID NO: 991437 - DNA, 15 bp, Homo sapiens
gcactgaagttggga

SEQ ID NO: 991438 - DNA, 15 bp, Homo sapiens
ggcactgaagttggg

SEQ ID NO: 991439 - DNA, 15 bp, Homo sapiens
cggcactgaagttgg

SEQ ID NO: 991440 - DNA, 15 bp, Homo sapiens
ccggcactgaagttg

SEQ ID NO: 991441 - DNA, 15 bp, Homo sapiens
tccggcactgaagtt

SEQ ID NO: 991442 - DNA, 15 bp, Homo sapiens
atccggcactgaagt

SEQ ID NO: 991443 - DNA, 15 bp, Homo sapiens
gatccggcactgaag

SEQ ID NO: 991444 - DNA, 15 bp, Homo sapiens
ggatccggcactgaa

SEQ ID NO: 991445 - DNA, 15 bp, Homo sapiens
gggatccggcactga

SEQ ID NO: 991446 - DNA, 15 bp, Homo sapiens
ggggatccggcactg

SEQ ID NO: 991447 - DNA, 15 bp, Homo sapiens
aggggatccggcact

SEQ ID NO: 991448 - DNA, 15 bp, Homo sapiens
taggggatccggcac

SEQ ID NO: 991449 - DNA, 15 bp, Homo sapiens
ctaggggatccggca

SEQ ID NO: 991450 - DNA, 15 bp, Homo sapiens
tctaggggatccggc

SEQ ID NO: 991451 - DNA, 15 bp, Homo sapiens
gtctaggggatccgg

SEQ ID NO: 991452 - DNA, 15 bp, Homo sapiens
tgtctaggggatccg

SEQ ID NO: 991453 - DNA, 15 bp, Homo sapiens
ttgtctaggggatcc

SEQ ID NO: 991454 - DNA, 15 bp, Homo sapiens
attgtctaggggatc

SEQ ID NO: 991455 - DNA, 15 bp, Homo sapiens
gattgtctaggggat

SEQ ID NO: 991456 - DNA, 15 bp, Homo sapiens
tgattgtctagggga

SEQ ID NO: 991457 - DNA, 15 bp, Homo sapiens
ctgattgtctagggg

SEQ ID NO: 991458 - DNA, 15 bp, Homo sapiens
cctgattgtctaggg

SEQ ID NO: 991459 - DNA, 15 bp, Homo sapiens
ccctgattgtctagg

SEQ ID NO: 991460 - DNA, 15 bp, Homo sapiens
accctgattgtctag

SEQ ID NO: 991461 - DNA, 15 bp, Homo sapiens
caccctgattgtcta

SEQ ID NO: 991462 - DNA, 15 bp, Homo sapiens
ccaccctgattgtct

SEQ ID NO: 991463 - DNA, 15 bp, Homo sapiens
cccaccctgattgtc

SEQ ID NO: 991464 - DNA, 15 bp, Homo sapiens
gcccaccctgattgt

SEQ ID NO: 991465 - DNA, 15 bp, Homo sapiens
agcccaccctgattg

SEQ ID NO: 991466 - DNA, 15 bp, Homo sapiens
gagcccaccctgatt

SEQ ID NO: 991467 - DNA, 15 bp, Homo sapiens
ggagcccaccctgat

SEQ ID NO: 991468 - DNA, 15 bp, Homo sapiens
gggagcccaccctga

SEQ ID NO: 991469 - DNA, 15 bp, Homo sapiens
ggggagcccaccctg

SEQ ID NO: 991470 - DNA, 15 bp, Homo sapiens
cggggagcccaccct

SEQ ID NO: 991471 - DNA, 15 bp, Homo sapiens
gcggggagcccaccc

SEQ ID NO: 991472 - DNA, 15 bp, Homo sapiens
agcggggagcccacc

SEQ ID NO: 991473 - DNA, 15 bp, Homo sapiens
cagcggggagcccac

SEQ ID NO: 991474 - DNA, 15 bp, Homo sapiens
gcagcggggagccca

SEQ ID NO: 991475 - DNA, 15 bp, Homo sapiens
cgcagcggggagccc

SEQ ID NO: 991476 - DNA, 15 bp, Homo sapiens
tcgcagcggggagcc

SEQ ID NO: 991477 - DNA, 15 bp, Homo sapiens
ctcgcagcggggagc

SEQ ID NO: 991478 - DNA, 15 bp, Homo sapiens
gctcgcagcggggag

SEQ ID NO: 991479 - DNA, 15 bp, Homo sapiens
cgctcgcagcgggga

SEQ ID NO: 991480 - DNA, 15 bp, Homo sapiens
gcgctcgcagcgggg

SEQ ID NO: 991481 - DNA, 15 bp, Homo sapiens
cgcgctcgcagcggg

SEQ ID NO: 991482 - DNA, 15 bp, Homo sapiens
gcgcgctcgcagcgg

SEQ ID NO: 991483 - DNA, 15 bp, Homo sapiens
ggcgcgctcgcagcg

SEQ ID NO: 991484 - DNA, 15 bp, Homo sapiens
gggcgcgctcgcagc

SEQ ID NO: 991485 - DNA, 15 bp, Homo sapiens
ggggcgcgctcgcag

SEQ ID NO: 991486 - DNA, 15 bp, Homo sapiens
tggggcgcgctcgca

SEQ ID NO: 991487 - DNA, 15 bp, Homo sapiens
gtggggcgcgctcgc

SEQ ID NO: 991488 - DNA, 15 bp, Homo sapiens
tgtggggcgcgctcg

SEQ ID NO: 991489 - DNA, 15 bp, Homo sapiens
ctgtggggcgcgctc

SEQ ID NO: 991490 - DNA, 15 bp, Homo sapiens
gctgtggggcgcgct

SEQ ID NO: 991491 - DNA, 15 bp, Homo sapiens
ggctgtggggcgcgc

SEQ ID NO: 991492 - DNA, 15 bp, Homo sapiens
cggctgtggggcgcg

SEQ ID NO: 991493 - DNA, 15 bp, Homo sapiens
ccggctgtggggcgc

SEQ ID NO: 991494 - DNA, 15 bp, Homo sapiens
cccggctgtggggcg

SEQ ID NO: 991495 - DNA, 15 bp, Homo sapiens
acccggctgtggggc

SEQ ID NO: 991496 - DNA, 15 bp, Homo sapiens
cacccggctgtgggg

SEQ ID NO: 991497 - DNA, 15 bp, Homo sapiens
gcacccggctgtggg

SEQ ID NO: 991498 - DNA, 15 bp, Homo sapiens
ggcacccggctgtgg

SEQ ID NO: 991499 - DNA, 15 bp, Homo sapiens
cggcacccggctgtg

SEQ ID NO: 991500 - DNA, 15 bp, Homo sapiens
gcggcacccggctgt

SEQ ID NO: 991501 - DNA, 15 bp, Homo sapiens
ggcggcacccggctg

SEQ ID NO: 991502 - DNA, 15 bp, Homo sapiens
tggcggcacccggct

SEQ ID NO: 991503 - DNA, 15 bp, Homo sapiens
ttggcggcacccggc

SEQ ID NO: 991504 - DNA, 15 bp, Homo sapiens
tttggcggcacccgg

SEQ ID NO: 991505 - DNA, 15 bp, Homo sapiens
ctttggcggcacccg

SEQ ID NO: 991506 - DNA, 15 bp, Homo sapiens
cctttggcggcaccc

SEQ ID NO: 991507 - DNA, 15 bp, Homo sapiens
acctttggcggcacc

SEQ ID NO: 991508 - DNA, 15 bp, Homo sapiens
gacctttggcggcac

SEQ ID NO: 991509 - DNA, 15 bp, Homo sapiens
agacctttggcggca

SEQ ID NO: 991510 - DNA, 15 bp, Homo sapiens
gagacctttggcggc

SEQ ID NO: 991511 - DNA, 15 bp, Homo sapiens
ggagacctttggcgg

SEQ ID NO: 991512 - DNA, 15 bp, Homo sapiens
aggagacctttggcg

SEQ ID NO: 991513 - DNA, 15 bp, Homo sapiens
caggagacctttggc

SEQ ID NO: 991514 - DNA, 15 bp, Homo sapiens
gcaggagacctttgg

SEQ ID NO: 991515 - DNA, 15 bp, Homo sapiens
agcaggagacctttg

SEQ ID NO: 991516 - DNA, 15 bp, Homo sapiens
cagcaggagaccttt

SEQ ID NO: 991517 - DNA, 15 bp, Homo sapiens
acagcaggagacctt

SEQ ID NO: 991518 - DNA, 15 bp, Homo sapiens
aacagcaggagacct

SEQ ID NO: 991519 - DNA, 15 bp, Homo sapiens
taacagcaggagacc

SEQ ID NO: 991520 - DNA, 15 bp, Homo sapiens
ctaacagcaggagac

SEQ ID NO: 991521 - DNA, 15 bp, Homo sapiens
gctaacagcaggaga

SEQ ID NO: 991522 - DNA, 15 bp, Homo sapiens
cgctaacagcaggag

SEQ ID NO: 991523 - DNA, 15 bp, Homo sapiens
ccgctaacagcagga

SEQ ID NO: 991524 - DNA, 15 bp, Homo sapiens
accgctaacagcagg

SEQ ID NO: 991525 - DNA, 15 bp, Homo sapiens
caccgctaacagcag

SEQ ID NO: 991526 - DNA, 15 bp, Homo sapiens
tcaccgctaacagca

SEQ ID NO: 991527 - DNA, 15 bp, Homo sapiens
gtcaccgctaacagc

SEQ ID NO: 991528 - DNA, 15 bp, Homo sapiens
agtcaccgctaacag

SEQ ID NO: 991529 - DNA, 15 bp, Homo sapiens
gagtcaccgctaaca

SEQ ID NO: 991530 - DNA, 15 bp, Homo sapiens
tgagtcaccgctaac

SEQ ID NO: 991531 - DNA, 15 bp, Homo sapiens
gtgagtcaccgctaa

SEQ ID NO: 991532 - DNA, 15 bp, Homo sapiens
tgtgagtcaccgcta

SEQ ID NO: 991533 - DNA, 15 bp, Homo sapiens
atgtgagtcaccgct

SEQ ID NO: 991534 - DNA, 15 bp, Homo sapiens
aatgtgagtcaccgc

SEQ ID NO: 991535 - DNA, 15 bp, Homo sapiens
gaatgtgagtcaccg

SEQ ID NO: 991536 - DNA, 15 bp, Homo sapiens
ggaatgtgagtcacc

SEQ ID NO: 991537 - DNA, 15 bp, Homo sapiens
gggaatgtgagtcac

SEQ ID NO: 991538 - DNA, 15 bp, Homo sapiens
tgggaatgtgagtca

SEQ ID NO: 991539 - DNA, 15 bp, Homo sapiens
ctgggaatgtgagtc

SEQ ID NO: 991540 - DNA, 15 bp, Homo sapiens
actgggaatgtgagt

SEQ ID NO: 991541 - DNA, 15 bp, Homo sapiens
cactgggaatgtgag

SEQ ID NO: 991542 - DNA, 15 bp, Homo sapiens
tcactgggaatgtga

SEQ ID NO: 991543 - DNA, 15 bp, Homo sapiens
atcactgggaatgtg

SEQ ID NO: 991544 - DNA, 15 bp, Homo sapiens
aatcactgggaatgt

SEQ ID NO: 991545 - DNA, 15 bp, Homo sapiens
aaatcactgggaatg

SEQ ID NO: 991546 - DNA, 15 bp, Homo sapiens
taaatcactgggaat

SEQ ID NO: 991547 - DNA, 15 bp, Homo sapiens
ctaaatcactgggaa

SEQ ID NO: 991548 - DNA, 15 bp, Homo sapiens
tctaaatcactggga

SEQ ID NO: 991549 - DNA, 15 bp, Homo sapiens
ttctaaatcactggg

SEQ ID NO: 991550 - DNA, 15 bp, Homo sapiens
tttctaaatcactgg

SEQ ID NO: 991551 - DNA, 15 bp, Homo sapiens
ttttctaaatcactg

SEQ ID NO: 991552 - DNA, 15 bp, Homo sapiens
tttttctaaatcact

SEQ ID NO: 991553 - DNA, 15 bp, Homo sapiens
gtttttctaaatcac

SEQ ID NO: 991554 - DNA, 15 bp, Homo sapiens
agtttttctaaatca

SEQ ID NO: 991555 - DNA, 15 bp, Homo sapiens
cagtttttctaaatc

SEQ ID NO: 991556 - DNA, 15 bp, Homo sapiens
acagtttttctaaat

SEQ ID NO: 991557 - DNA, 15 bp, Homo sapiens
cacagtttttctaaa

SEQ ID NO: 991558 - DNA, 15 bp, Homo sapiens
ccacagtttttctaa

SEQ ID NO: 991559 - DNA, 15 bp, Homo sapiens
accacagtttttcta

SEQ ID NO: 991560 - DNA, 15 bp, Homo sapiens
caccacagtttttct

SEQ ID NO: 991561 - DNA, 15 bp, Homo sapiens
gcaccacagtttttc

SEQ ID NO: 991562 - DNA, 15 bp, Homo sapiens
ggcaccacagttttt

SEQ ID NO: 991563 - DNA, 15 bp, Homo sapiens
cggcaccacagtttt

SEQ ID NO: 991564 - DNA, 15 bp, Homo sapiens
tcggcaccacagttt

SEQ ID NO: 991565 - DNA, 15 bp, Homo sapiens
ctcggcaccacagtt

SEQ ID NO: 991566 - DNA, 15 bp, Homo sapiens
actcggcaccacagt

SEQ ID NO: 991567 - DNA, 15 bp, Homo sapiens
cactcggcaccacag

SEQ ID NO: 991568 - DNA, 15 bp, Homo sapiens
tcactcggcaccaca

SEQ ID NO: 991569 - DNA, 15 bp, Homo sapiens
ttcactcggcaccac

SEQ ID NO: 991570 - DNA, 15 bp, Homo sapiens
tttcactcggcacca

SEQ ID NO: 991571 - DNA, 15 bp, Homo sapiens
ctttcactcggcacc

SEQ ID NO: 991572 - DNA, 15 bp, Homo sapiens
tctttcactcggcac

SEQ ID NO: 991573 - DNA, 15 bp, Homo sapiens
ttctttcactcggca

SEQ ID NO: 991574 - DNA, 15 bp, Homo sapiens
tttctttcactcggc

SEQ ID NO: 991575 - DNA, 15 bp, Homo sapiens
ttttctttcactcgg

SEQ ID NO: 991576 - DNA, 15 bp, Homo sapiens
tttttctttcactcg

SEQ ID NO: 991577 - DNA, 15 bp, Homo sapiens
ttttttctttcactc

SEQ ID NO: 991578 - DNA, 15 bp, Homo sapiens
tttttttctttcact

SEQ ID NO: 991579 - DNA, 15 bp, Homo sapiens
ttttttttctttcac

SEQ ID NO: 991580 - DNA, 15 bp, Homo sapiens
tttttttttctttca

SEQ ID NO: 991581 - DNA, 15 bp, Homo sapiens
tgtttgctttttttt

SEQ ID NO: 991582 - DNA, 15 bp, Homo sapiens
gtgtttgcttttttt

SEQ ID NO: 991583 - DNA, 15 bp, Homo sapiens
ggtgtttgctttttt

SEQ ID NO: 991584 - DNA, 15 bp, Homo sapiens
gggtgtttgcttttt

SEQ ID NO: 991585 - DNA, 15 bp, Homo sapiens
agggtgtttgctttt

SEQ ID NO: 991586 - DNA, 15 bp, Homo sapiens
aagggtgtttgcttt

SEQ ID NO: 991587 - DNA, 15 bp, Homo sapiens
taagggtgtttgctt

SEQ ID NO: 991588 - DNA, 15 bp, Homo sapiens
ctaagggtgtttgct

SEQ ID NO: 991589 - DNA, 15 bp, Homo sapiens
tctaagggtgtttgc

SEQ ID NO: 991590 - DNA, 15 bp, Homo sapiens
gtctaagggtgtttg

SEQ ID NO: 991591 - DNA, 15 bp, Homo sapiens
tgtctaagggtgttt

SEQ ID NO: 991592 - DNA, 15 bp, Homo sapiens
ttgtctaagggtgtt

SEQ ID NO: 991593 - DNA, 15 bp, Homo sapiens
tttgtctaagggtgt

SEQ ID NO: 991594 - DNA, 15 bp, Homo sapiens
ttttgtctaagggtg

SEQ ID NO: 991595 - DNA, 15 bp, Homo sapiens
cttttgtctaagggt

SEQ ID NO: 991596 - DNA, 15 bp, Homo sapiens
tcttttgtctaaggg

SEQ ID NO: 991597 - DNA, 15 bp, Homo sapiens
ttcttttgtctaagg

SEQ ID NO: 991598 - DNA, 15 bp, Homo sapiens
tttcttttgtctaag

SEQ ID NO: 991599 - DNA, 15 bp, Homo sapiens
ttttcttttgtctaa

SEQ ID NO: 991600 - DNA, 15 bp, Homo sapiens
tttttcttttgtcta

SEQ ID NO: 991601 - DNA, 15 bp, Homo sapiens
ttttttcttttgtct

SEQ ID NO: 991602 - DNA, 15 bp, Homo sapiens
cttttttcttttgtc

SEQ ID NO: 991603 - DNA, 15 bp, Homo sapiens
gcttttttcttttgt

SEQ ID NO: 991604 - DNA, 15 bp, Homo sapiens
agcttttttcttttg

SEQ ID NO: 991605 - DNA, 15 bp, Homo sapiens
gagcttttttctttt

SEQ ID NO: 991606 - DNA, 15 bp, Homo sapiens
ggagcttttttcttt

SEQ ID NO: 991607 - DNA, 15 bp, Homo sapiens
tggagcttttttctt

SEQ ID NO: 991608 - DNA, 15 bp, Homo sapiens
gtggagcttttttct

SEQ ID NO: 991609 - DNA, 15 bp, Homo sapiens
agtggagcttttttc

SEQ ID NO: 991610 - DNA, 15 bp, Homo sapiens
gagtggagctttttt

SEQ ID NO: 991611 - DNA, 15 bp, Homo sapiens
agagtggagcttttt

SEQ ID NO: 991612 - DNA, 15 bp, Homo sapiens
aagagtggagctttt

SEQ ID NO: 991613 - DNA, 15 bp, Homo sapiens
aaagagtggagcttt

SEQ ID NO: 991614 - DNA, 15 bp, Homo sapiens
gaaagagtggagctt

SEQ ID NO: 991615 - DNA, 15 bp, Homo sapiens
ggaaagagtggagct

SEQ ID NO: 991616 - DNA, 15 bp, Homo sapiens
cggaaagagtggagc

SEQ ID NO: 991617 - DNA, 15 bp, Homo sapiens
gcggaaagagtggag

SEQ ID NO: 991618 - DNA, 15 bp, Homo sapiens
cgcggaaagagtgga

SEQ ID NO: 991619 - DNA, 15 bp, Homo sapiens
tcgcggaaagagtgg

SEQ ID NO: 991620 - DNA, 15 bp, Homo sapiens
ctcgcggaaagagtg

SEQ ID NO: 991621 - DNA, 15 bp, Homo sapiens
gctcgcggaaagagt

SEQ ID NO: 991622 - DNA, 15 bp, Homo sapiens
cgctcgcggaaagag

SEQ ID NO: 991623 - DNA, 15 bp, Homo sapiens
ccgctcgcggaaaga

SEQ ID NO: 991624 - DNA, 15 bp, Homo sapiens
cccgctcgcggaaag

SEQ ID NO: 991625 - DNA, 15 bp, Homo sapiens
tcccgctcgcggaaa

SEQ ID NO: 991626 - DNA, 15 bp, Homo sapiens
ttcccgctcgcggaa

SEQ ID NO: 991627 - DNA, 15 bp, Homo sapiens
tttcccgctcgcgga

SEQ ID NO: 991628 - DNA, 15 bp, Homo sapiens
ttttcccgctcgcgg

SEQ ID NO: 991629 - DNA, 15 bp, Homo sapiens
tttttcccgctcgcg

SEQ ID NO: 991630 - DNA, 15 bp, Homo sapiens
ttttttcccgctcgc

SEQ ID NO: 991631 - DNA, 15 bp, Homo sapiens
cttttttcccgctcg

SEQ ID NO: 991632 - DNA, 15 bp, Homo sapiens
ccttttttcccgctc

SEQ ID NO: 991633 - DNA, 15 bp, Homo sapiens
accttttttcccgct

SEQ ID NO: 991634 - DNA, 15 bp, Homo sapiens
aaccttttttcccgc

SEQ ID NO: 991635 - DNA, 15 bp, Homo sapiens
aaaccttttttcccg

SEQ ID NO: 991636 - DNA, 15 bp, Homo sapiens
caaaccttttttccc

SEQ ID NO: 991637 - DNA, 15 bp, Homo sapiens
ccaaaccttttttcc

SEQ ID NO: 991638 - DNA, 15 bp, Homo sapiens
accaaaccttttttc

SEQ ID NO: 991639 - DNA, 15 bp, Homo sapiens
aaccaaacctttttt

SEQ ID NO: 991640 - DNA, 15 bp, Homo sapiens
gaaccaaaccttttt

SEQ ID NO: 991641 - DNA, 15 bp, Homo sapiens
tgaaccaaacctttt

SEQ ID NO: 991642 - DNA, 15 bp, Homo sapiens
ctgaaccaaaccttt

SEQ ID NO: 991643 - DNA, 15 bp, Homo sapiens
gctgaaccaaacctt

SEQ ID NO: 991644 - DNA, 15 bp, Homo sapiens
tgctgaaccaaacct

SEQ ID NO: 991645 - DNA, 15 bp, Homo sapiens
ttgctgaaccaaacc

SEQ ID NO: 991646 - DNA, 15 bp, Homo sapiens
cttgctgaaccaaac

SEQ ID NO: 991647 - DNA, 15 bp, Homo sapiens
acttgctgaaccaaa

SEQ ID NO: 991648 - DNA, 15 bp, Homo sapiens
cacttgctgaaccaa

SEQ ID NO: 991649 - DNA, 15 bp, Homo sapiens
tcacttgctgaacca

SEQ ID NO: 991650 - DNA, 15 bp, Homo sapiens
atcacttgctgaacc

SEQ ID NO: 991651 - DNA, 15 bp, Homo sapiens
catcacttgctgaac

SEQ ID NO: 991652 - DNA, 15 bp, Homo sapiens
gcatcacttgctgaa

SEQ ID NO: 991653 - DNA, 15 bp, Homo sapiens
agcatcacttgctga

SEQ ID NO: 991654 - DNA, 15 bp, Homo sapiens
tagcatcacttgctg

SEQ ID NO: 991655 - DNA, 15 bp, Homo sapiens
atagcatcacttgct

SEQ ID NO: 991656 - DNA, 15 bp, Homo sapiens
aatagcatcacttgc

SEQ ID NO: 991657 - DNA, 15 bp, Homo sapiens
aaatagcatcacttg

SEQ ID NO: 991658 - DNA, 15 bp, Homo sapiens
gaaatagcatcactt

SEQ ID NO: 991659 - DNA, 15 bp, Homo sapiens
tgaaatagcatcact

SEQ ID NO: 991660 - DNA, 15 bp, Homo sapiens
ctgaaatagcatcac

SEQ ID NO: 991661 - DNA, 15 bp, Homo sapiens
actgaaatagcatca

SEQ ID NO: 991662 - DNA, 15 bp, Homo sapiens
cactgaaatagcatc

SEQ ID NO: 991663 - DNA, 15 bp, Homo sapiens
tcactgaaatagcat

SEQ ID NO: 991664 - DNA, 15 bp, Homo sapiens
ttcactgaaatagca

SEQ ID NO: 991665 - DNA, 15 bp, Homo sapiens
attcactgaaatagc

SEQ ID NO: 991666 - DNA, 15 bp, Homo sapiens
gattcactgaaatag

SEQ ID NO: 991667 - DNA, 15 bp, Homo sapiens
tgattcactgaaata

SEQ ID NO: 991668 - DNA, 15 bp, Homo sapiens
ctgattcactgaaat

SEQ ID NO: 991669 - DNA, 15 bp, Homo sapiens
tctgattcactgaaa

SEQ ID NO: 991670 - DNA, 15 bp, Homo sapiens
gtctgattcactgaa

SEQ ID NO: 991671 - DNA, 15 bp, Homo sapiens
cgtctgattcactga

SEQ ID NO: 991672 - DNA, 15 bp, Homo sapiens
gcgtctgattcactg

SEQ ID NO: 991673 - DNA, 15 bp, Homo sapiens
agcgtctgattcact

SEQ ID NO: 991674 - DNA, 15 bp, Homo sapiens
gagcgtctgattcac

SEQ ID NO: 991675 - DNA, 15 bp, Homo sapiens
agagcgtctgattca

SEQ ID NO: 991676 - DNA, 15 bp, Homo sapiens
cagagcgtctgattc

SEQ ID NO: 991677 - DNA, 15 bp, Homo sapiens
ccagagcgtctgatt

SEQ ID NO: 991678 - DNA, 15 bp, Homo sapiens
cccagagcgtctgat

SEQ ID NO: 991679 - DNA, 15 bp, Homo sapiens
ccccagagcgtctga

SEQ ID NO: 991680 - DNA, 15 bp, Homo sapiens
gccccagagcgtctg

SEQ ID NO: 991681 - DNA, 15 bp, Homo sapiens
agccccagagcgtct

SEQ ID NO: 991682 - DNA, 15 bp, Homo sapiens
gagccccagagcgtc

SEQ ID NO: 991683 - DNA, 15 bp, Homo sapiens
agagccccagagcgt

SEQ ID NO: 991684 - DNA, 15 bp, Homo sapiens
cagagccccagagcg

SEQ ID NO: 991685 - DNA, 15 bp, Homo sapiens
gcagagccccagagc

SEQ ID NO: 991686 - DNA, 15 bp, Homo sapiens
tgcagagccccagag

SEQ ID NO: 991687 - DNA, 15 bp, Homo sapiens
ttgcagagccccaga

SEQ ID NO: 991688 - DNA, 15 bp, Homo sapiens
cttgcagagccccag

SEQ ID NO: 991689 - DNA, 15 bp, Homo sapiens
ccttgcagagcccca

SEQ ID NO: 991690 - DNA, 15 bp, Homo sapiens
tccttgcagagcccc

SEQ ID NO: 991691 - DNA, 15 bp, Homo sapiens
ttccttgcagagccc

SEQ ID NO: 991692 - DNA, 15 bp, Homo sapiens
tttccttgcagagcc

SEQ ID NO: 991693 - DNA, 15 bp, Homo sapiens
gtttccttgcagagc

SEQ ID NO: 991694 - DNA, 15 bp, Homo sapiens
cgtttccttgcagag

SEQ ID NO: 991695 - DNA, 15 bp, Homo sapiens
gcgtttccttgcaga

SEQ ID NO: 991696 - DNA, 15 bp, Homo sapiens
tgcgtttccttgcag

SEQ ID NO: 991697 - DNA, 15 bp, Homo sapiens
gtgcgtttccttgca

SEQ ID NO: 991698 - DNA, 15 bp, Homo sapiens
cgtgcgtttccttgc

SEQ ID NO: 991699 - DNA, 15 bp, Homo sapiens
ccgtgcgtttccttg

SEQ ID NO: 991700 - DNA, 15 bp, Homo sapiens
tccgtgcgtttcctt

SEQ ID NO: 991701 - DNA, 15 bp, Homo sapiens
gtccgtgcgtttcct

SEQ ID NO: 991702 - DNA, 15 bp, Homo sapiens
agtccgtgcgtttcc

SEQ ID NO: 991703 - DNA, 15 bp, Homo sapiens
cagtccgtgcgtttc

SEQ ID NO: 991704 - DNA, 15 bp, Homo sapiens
ccagtccgtgcgttt

SEQ ID NO: 991705 - DNA, 15 bp, Homo sapiens
cccagtccgtgcgtt

SEQ ID NO: 991706 - DNA, 15 bp, Homo sapiens
tcccagtccgtgcgt

SEQ ID NO: 991707 - DNA, 15 bp, Homo sapiens
ctcccagtccgtgcg

SEQ ID NO: 991708 - DNA, 15 bp, Homo sapiens
tctcccagtccgtgc

SEQ ID NO: 991709 - DNA, 15 bp, Homo sapiens
ttctcccagtccgtg

SEQ ID NO: 991710 - DNA, 15 bp, Homo sapiens
cttctcccagtccgt

SEQ ID NO: 991711 - DNA, 15 bp, Homo sapiens
ccttctcccagtccg

SEQ ID NO: 991712 - DNA, 15 bp, Homo sapiens
tccttctcccagtcc

SEQ ID NO: 991713 - DNA, 15 bp, Homo sapiens
ttccttctcccagtc

SEQ ID NO: 991714 - DNA, 15 bp, Homo sapiens
cttccttctcccagt

SEQ ID NO: 991715 - DNA, 15 bp, Homo sapiens
acttccttctcccag

SEQ ID NO: 991716 - DNA, 15 bp, Homo sapiens
cacttccttctccca

SEQ ID NO: 991717 - DNA, 15 bp, Homo sapiens
ccacttccttctccc

SEQ ID NO: 991718 - DNA, 15 bp, Homo sapiens
cccacttccttctcc

SEQ ID NO: 991719 - DNA, 15 bp, Homo sapiens
tcccacttccttctc

SEQ ID NO: 991720 - DNA, 15 bp, Homo sapiens
ctcccacttccttct

SEQ ID NO: 991721 - DNA, 15 bp, Homo sapiens
gctcccacttccttc

SEQ ID NO: 991722 - DNA, 15 bp, Homo sapiens
ggctcccacttcctt

SEQ ID NO: 991723 - DNA, 15 bp, Homo sapiens
aggctcccacttcct

SEQ ID NO: 991724 - DNA, 15 bp, Homo sapiens
taggctcccacttcc

SEQ ID NO: 991725 - DNA, 15 bp, Homo sapiens
ctaggctcccacttc

SEQ ID NO: 991726 - DNA, 15 bp, Homo sapiens
tctaggctcccactt

SEQ ID NO: 991727 - DNA, 15 bp, Homo sapiens
ctctaggctcccact

SEQ ID NO: 991728 - DNA, 15 bp, Homo sapiens
actctaggctcccac

SEQ ID NO: 991729 - DNA, 15 bp, Homo sapiens
aactctaggctccca

SEQ ID NO: 991730 - DNA, 15 bp, Homo sapiens
aaactctaggctccc

SEQ ID NO: 991731 - DNA, 15 bp, Homo sapiens
aaaactctaggctcc

SEQ ID NO: 991732 - DNA, 15 bp, Homo sapiens
caaaactctaggctc

SEQ ID NO: 991733 - DNA, 15 bp, Homo sapiens
gcaaaactctaggct

SEQ ID NO: 991734 - DNA, 15 bp, Homo sapiens
agcaaaactctaggc

SEQ ID NO: 991735 - DNA, 15 bp, Homo sapiens
gagcaaaactctagg

SEQ ID NO: 991736 - DNA, 15 bp, Homo sapiens
agagcaaaactctag

SEQ ID NO: 991737 - DNA, 15 bp, Homo sapiens
gagagcaaaactcta

SEQ ID NO: 991738 - DNA, 15 bp, Homo sapiens
cgagagcaaaactct

SEQ ID NO: 991739 - DNA, 15 bp, Homo sapiens
ccgagagcaaaactc

SEQ ID NO: 991740 - DNA, 15 bp, Homo sapiens
gccgagagcaaaact

SEQ ID NO: 991741 - DNA, 15 bp, Homo sapiens
tgccgagagcaaaac

SEQ ID NO: 991742 - DNA, 15 bp, Homo sapiens
ttgccgagagcaaaa

SEQ ID NO: 991743 - DNA, 15 bp, Homo sapiens
tttgccgagagcaaa

SEQ ID NO: 991744 - DNA, 15 bp, Homo sapiens
ttttgccgagagcaa

SEQ ID NO: 991745 - DNA, 15 bp, Homo sapiens
gttttgccgagagca

SEQ ID NO: 991746 - DNA, 15 bp, Homo sapiens
tgttttgccgagagc

SEQ ID NO: 991747 - DNA, 15 bp, Homo sapiens
ttgttttgccgagag

SEQ ID NO: 991748 - DNA, 15 bp, Homo sapiens
cttgttttgccgaga

SEQ ID NO: 991749 - DNA, 15 bp, Homo sapiens
tcttgttttgccgag

SEQ ID NO: 991750 - DNA, 15 bp, Homo sapiens
ttcttgttttgccga

SEQ ID NO: 991751 - DNA, 15 bp, Homo sapiens
gttcttgttttgccg

SEQ ID NO: 991752 - DNA, 15 bp, Homo sapiens
agttcttgttttgcc

SEQ ID NO: 991753 - DNA, 15 bp, Homo sapiens
gagttcttgttttgc

SEQ ID NO: 991754 - DNA, 15 bp, Homo sapiens
cgagttcttgttttg

SEQ ID NO: 991755 - DNA, 15 bp, Homo sapiens
ccgagttcttgtttt

SEQ ID NO: 991756 - DNA, 15 bp, Homo sapiens
gccgagttcttgttt

SEQ ID NO: 991757 - DNA, 15 bp, Homo sapiens
agccgagttcttgtt

SEQ ID NO: 991758 - DNA, 15 bp, Homo sapiens
aagccgagttcttgt

SEQ ID NO: 991759 - DNA, 15 bp, Homo sapiens
caagccgagttcttg

SEQ ID NO: 991760 - DNA, 15 bp, Homo sapiens
acaagccgagttctt

SEQ ID NO: 991761 - DNA, 15 bp, Homo sapiens
gacaagccgagttct

SEQ ID NO: 991762 - DNA, 15 bp, Homo sapiens
ggacaagccgagttc

SEQ ID NO: 991763 - DNA, 15 bp, Homo sapiens
aggacaagccgagtt

SEQ ID NO: 991764 - DNA, 15 bp, Homo sapiens
gaggacaagccgagt

SEQ ID NO: 991765 - DNA, 15 bp, Homo sapiens
ggaggacaagccgag

SEQ ID NO: 991766 - DNA, 15 bp, Homo sapiens
gggaggacaagccga

SEQ ID NO: 991767 - DNA, 15 bp, Homo sapiens
tgggaggacaagccg

SEQ ID NO: 991768 - DNA, 15 bp, Homo sapiens
ctgggaggacaagcc

SEQ ID NO: 991769 - DNA, 15 bp, Homo sapiens
cctgggaggacaagc

SEQ ID NO: 991770 - DNA, 15 bp, Homo sapiens
gcctgggaggacaag

SEQ ID NO: 991771 - DNA, 15 bp, Homo sapiens
ggcctgggaggacaa

SEQ ID NO: 991772 - DNA, 15 bp, Homo sapiens
cggcctgggaggaca

SEQ ID NO: 991773 - DNA, 15 bp, Homo sapiens
ccggcctgggaggac

SEQ ID NO: 991774 - DNA, 15 bp, Homo sapiens
gccggcctgggagga

SEQ ID NO: 991775 - DNA, 15 bp, Homo sapiens
cgccggcctgggagg

SEQ ID NO: 991776 - DNA, 15 bp, Homo sapiens
ccgccggcctgggag

SEQ ID NO: 991777 - DNA, 15 bp, Homo sapiens
accgccggcctggga

SEQ ID NO: 991778 - DNA, 15 bp, Homo sapiens
aaccgccggcctggg

SEQ ID NO: 991779 - DNA, 15 bp, Homo sapiens
aaaccgccggcctgg

SEQ ID NO: 991780 - DNA, 15 bp, Homo sapiens
gaaaccgccggcctg

SEQ ID NO: 991781 - DNA, 15 bp, Homo sapiens
ggaaaccgccggcct

SEQ ID NO: 991782 - DNA, 15 bp, Homo sapiens
cggaaaccgccggcc

SEQ ID NO: 991783 - DNA, 15 bp, Homo sapiens
acggaaaccgccggc

SEQ ID NO: 991784 - DNA, 15 bp, Homo sapiens
tacggaaaccgccgg

SEQ ID NO: 991785 - DNA, 15 bp, Homo sapiens
gtacggaaaccgccg

SEQ ID NO: 991786 - DNA, 15 bp, Homo sapiens
cgtacggaaaccgcc

SEQ ID NO: 991787 - DNA, 15 bp, Homo sapiens
ccgtacggaaaccgc

SEQ ID NO: 991788 - DNA, 15 bp, Homo sapiens
gccgtacggaaaccg

SEQ ID NO: 991789 - DNA, 15 bp, Homo sapiens
tgccgtacggaaacc

SEQ ID NO: 991790 - DNA, 15 bp, Homo sapiens
ttgccgtacggaaac

SEQ ID NO: 991791 - DNA, 15 bp, Homo sapiens
cttgccgtacggaaa

SEQ ID NO: 991792 - DNA, 15 bp, Homo sapiens
tcttgccgtacggaa

SEQ ID NO: 991793 - DNA, 15 bp, Homo sapiens
gtcttgccgtacgga

SEQ ID NO: 991794 - DNA, 15 bp, Homo sapiens
tgtcttgccgtacgg

SEQ ID NO: 991795 - DNA, 15 bp, Homo sapiens
ttgtcttgccgtacg

SEQ ID NO: 991796 - DNA, 15 bp, Homo sapiens
cttgtcttgccgtac

SEQ ID NO: 991797 - DNA, 15 bp, Homo sapiens
ccttgtcttgccgta

SEQ ID NO: 991798 - DNA, 15 bp, Homo sapiens
gccttgtcttgccgt

SEQ ID NO: 991799 - DNA, 15 bp, Homo sapiens
cgccttgtcttgccg

SEQ ID NO: 991800 - DNA, 15 bp, Homo sapiens
gcgccttgtcttgcc

SEQ ID NO: 991801 - DNA, 15 bp, Homo sapiens
cgcgccttgtcttgc

SEQ ID NO: 991802 - DNA, 15 bp, Homo sapiens
ccgcgccttgtcttg

SEQ ID NO: 991803 - DNA, 15 bp, Homo sapiens
tccgcgccttgtctt

SEQ ID NO: 991804 - DNA, 15 bp, Homo sapiens
ttccgcgccttgtct

SEQ ID NO: 991805 - DNA, 15 bp, Homo sapiens
tttccgcgccttgtc

SEQ ID NO: 991806 - DNA, 15 bp, Homo sapiens
ttttccgcgccttgt

SEQ ID NO: 991807 - DNA, 15 bp, Homo sapiens
gttttccgcgccttg

SEQ ID NO: 991808 - DNA, 15 bp, Homo sapiens
tgttttccgcgcctt

SEQ ID NO: 991809 - DNA, 15 bp, Homo sapiens
atgttttccgcgcct

SEQ ID NO: 991810 - DNA, 15 bp, Homo sapiens
aatgttttccgcgcc

SEQ ID NO: 991811 - DNA, 15 bp, Homo sapiens
aaatgttttccgcgc

SEQ ID NO: 991812 - DNA, 15 bp, Homo sapiens
aaaatgttttccgcg

SEQ ID NO: 991813 - DNA, 15 bp, Homo sapiens
aaaaatgttttccgc

SEQ ID NO: 991814 - DNA, 15 bp, Homo sapiens
taaaaatgttttccg

SEQ ID NO: 991815 - DNA, 15 bp, Homo sapiens
gtaaaaatgttttcc

SEQ ID NO: 991816 - DNA, 15 bp, Homo sapiens
ggtaaaaatgttttc

SEQ ID NO: 991817 - DNA, 15 bp, Homo sapiens
tggtaaaaatgtttt

SEQ ID NO: 991818 - DNA, 15 bp, Homo sapiens
atggtaaaaatgttt

SEQ ID NO: 991819 - DNA, 15 bp, Homo sapiens
gatggtaaaaatgtt

SEQ ID NO: 991820 - DNA, 15 bp, Homo sapiens
agatggtaaaaatgt

SEQ ID NO: 991821 - DNA, 15 bp, Homo sapiens
cagatggtaaaaatg

SEQ ID NO: 991822 - DNA, 15 bp, Homo sapiens
tcagatggtaaaaat

SEQ ID NO: 991823 - DNA, 15 bp, Homo sapiens
gtcagatggtaaaaa

SEQ ID NO: 991824 - DNA, 15 bp, Homo sapiens
cgtcagatggtaaaa

SEQ ID NO: 991825 - DNA, 15 bp, Homo sapiens
gcgtcagatggtaaa

SEQ ID NO: 991826 - DNA, 15 bp, Homo sapiens
agcgtcagatggtaa

SEQ ID NO: 991827 - DNA, 15 bp, Homo sapiens
cagcgtcagatggta

SEQ ID NO: 991828 - DNA, 15 bp, Homo sapiens
acagcgtcagatggt

SEQ ID NO: 991829 - DNA, 15 bp, Homo sapiens
tacagcgtcagatgg

SEQ ID NO: 991830 - DNA, 15 bp, Homo sapiens
ctacagcgtcagatg

SEQ ID NO: 991831 - DNA, 15 bp, Homo sapiens
actacagcgtcagat

SEQ ID NO: 991832 - DNA, 15 bp, Homo sapiens
gactacagcgtcaga

SEQ ID NO: 991833 - DNA, 15 bp, Homo sapiens
agactacagcgtcag

SEQ ID NO: 991834 - DNA, 15 bp, Homo sapiens
cagactacagcgtca

SEQ ID NO: 991835 - DNA, 15 bp, Homo sapiens
acagactacagcgtc

SEQ ID NO: 991836 - DNA, 15 bp, Homo sapiens
gacagactacagcgt

SEQ ID NO: 991837 - DNA, 15 bp, Homo sapiens
ggacagactacagcg

SEQ ID NO: 991838 - DNA, 15 bp, Homo sapiens
aggacagactacagc

SEQ ID NO: 991839 - DNA, 15 bp, Homo sapiens
aaggacagactacag

SEQ ID NO: 991840 - DNA, 15 bp, Homo sapiens
aaaggacagactaca

SEQ ID NO: 991841 - DNA, 15 bp, Homo sapiens
taaaggacagactac

SEQ ID NO: 991842 - DNA, 15 bp, Homo sapiens
ctaaaggacagacta

SEQ ID NO: 991843 - DNA, 15 bp, Homo sapiens
tctaaaggacagact

SEQ ID NO: 991844 - DNA, 15 bp, Homo sapiens
ttctaaaggacagac

SEQ ID NO: 991845 - DNA, 15 bp, Homo sapiens
gaatggcggcctcca

SEQ ID NO: 991846 - DNA, 15 bp, Homo sapiens
tgaatggcggcctcc

SEQ ID NO: 991847 - DNA, 15 bp, Homo sapiens
gtgaatggcggcctc

SEQ ID NO: 991848 - DNA, 15 bp, Homo sapiens
ggtgaatggcggcct

SEQ ID NO: 991849 - DNA, 15 bp, Homo sapiens
aggtgaatggcggcc

SEQ ID NO: 991850 - DNA, 15 bp, Homo sapiens
gaggtgaatggcggc

SEQ ID NO: 991851 - DNA, 15 bp, Homo sapiens
cgaggtgaatggcgg

SEQ ID NO: 991852 - DNA, 15 bp, Homo sapiens
acgaggtgaatggcg

SEQ ID NO: 991853 - DNA, 15 bp, Homo sapiens
aacgaggtgaatggc

SEQ ID NO: 991854 - DNA, 15 bp, Homo sapiens
aaacgaggtgaatgg

SEQ ID NO: 991855 - DNA, 15 bp, Homo sapiens
aaaacgaggtgaatg

SEQ ID NO: 991856 - DNA, 15 bp, Homo sapiens
aaaaacgaggtgaat

SEQ ID NO: 991857 - DNA, 15 bp, Homo sapiens
aaaaaacgaggtgaa

SEQ ID NO: 991858 - DNA, 15 bp, Homo sapiens
aaaaaaacgaggtga

SEQ ID NO: 991859 - DNA, 15 bp, Homo sapiens
aaaaaaaacgaggtg

SEQ ID NO: 991860 - DNA, 15 bp, Homo sapiens
aaaaaaaaacgaggt

SEQ ID NO: 991861 - DNA, 15 bp, Homo sapiens
aaaaaaaaaacgagg

SEQ ID NO: 991862 - DNA, 15 bp, Homo sapiens
aaaaaaaaaaacgag

SEQ ID NO: 991863 - DNA, 15 bp, Homo sapiens
gaaaaaaaaaaacga

SEQ ID NO: 991864 - DNA, 15 bp, Homo sapiens
ggaaaaaaaaaaacg

SEQ ID NO: 991865 - DNA, 15 bp, Homo sapiens
aggaaaaaaaaaaac

SEQ ID NO: 991866 - DNA, 15 bp, Homo sapiens
ttaggaaaaaaaaaa

SEQ ID NO: 991867 - DNA, 15 bp, Homo sapiens
tttaggaaaaaaaaa

SEQ ID NO: 991868 - DNA, 15 bp, Homo sapiens
ttttaggaaaaaaaa

SEQ ID NO: 991869 - DNA, 15 bp, Homo sapiens
cttttaggaaaaaaa

SEQ ID NO: 991870 - DNA, 15 bp, Homo sapiens
ccttttaggaaaaaa

SEQ ID NO: 991871 - DNA, 15 bp, Homo sapiens
tccttttaggaaaaa

SEQ ID NO: 991872 - DNA, 15 bp, Homo sapiens
atccttttaggaaaa

SEQ ID NO: 991873 - DNA, 15 bp, Homo sapiens
aatccttttaggaaa

SEQ ID NO: 991874 - DNA, 15 bp, Homo sapiens
aaatccttttaggaa

SEQ ID NO: 991875 - DNA, 15 bp, Homo sapiens
aaaatccttttagga

SEQ ID NO: 991876 - DNA, 15 bp, Homo sapiens
aaaaatccttttagg

SEQ ID NO: 991877 - DNA, 15 bp, Homo sapiens
aaaaaatccttttag

SEQ ID NO: 991878 - DNA, 15 bp, Homo sapiens
aaaaaaatcctttta

SEQ ID NO: 991879 - DNA, 15 bp, Homo sapiens
aaaaaaaatcctttt

SEQ ID NO: 991880 - DNA, 15 bp, Homo sapiens
gaaaaaaaaatcctt

SEQ ID NO: 991881 - DNA, 15 bp, Homo sapiens
agaaaaaaaaatcct

SEQ ID NO: 991882 - DNA, 15 bp, Homo sapiens
cagaaaaaaaaatcc

SEQ ID NO: 991883 - DNA, 15 bp, Homo sapiens
tcagaaaaaaaaatc

SEQ ID NO: 991884 - DNA, 15 bp, Homo sapiens
ctcagaaaaaaaaat

SEQ ID NO: 991885 - DNA, 15 bp, Homo sapiens
actcagaaaaaaaaa

SEQ ID NO: 991886 - DNA, 15 bp, Homo sapiens
cactcagaaaaaaaa

SEQ ID NO: 991887 - DNA, 15 bp, Homo sapiens
gcactcagaaaaaaa

SEQ ID NO: 991888 - DNA, 15 bp, Homo sapiens
agcactcagaaaaaa

SEQ ID NO: 991889 - DNA, 15 bp, Homo sapiens
aagcactcagaaaaa

SEQ ID NO: 991890 - DNA, 15 bp, Homo sapiens
aaagcactcagaaaa

SEQ ID NO: 991891 - DNA, 15 bp, Homo sapiens
aaaagcactcagaaa

SEQ ID NO: 991892 - DNA, 15 bp, Homo sapiens
aaaaagcactcagaa

SEQ ID NO: 991893 - DNA, 15 bp, Homo sapiens
aaaaaagcactcaga

SEQ ID NO: 991894 - DNA, 15 bp, Homo sapiens
gaaaaaagcactcag

SEQ ID NO: 991895 - DNA, 15 bp, Homo sapiens
tgaaaaaagcactca

SEQ ID NO: 991896 - DNA, 15 bp, Homo sapiens
atgaaaaaagcactc

SEQ ID NO: 991897 - DNA, 15 bp, Homo sapiens
aatgaaaaaagcact

SEQ ID NO: 991898 - DNA, 15 bp, Homo sapiens
aaatgaaaaaagcac

SEQ ID NO: 991899 - DNA, 15 bp, Homo sapiens
gaaatgaaaaaagca

SEQ ID NO: 991900 - DNA, 15 bp, Homo sapiens
ggaaatgaaaaaagc

SEQ ID NO: 991901 - DNA, 15 bp, Homo sapiens
gggaaatgaaaaaag

SEQ ID NO: 991902 - DNA, 15 bp, Homo sapiens
agggaaatgaaaaaa

SEQ ID NO: 991903 - DNA, 15 bp, Homo sapiens
tagggaaatgaaaaa

SEQ ID NO: 991904 - DNA, 15 bp, Homo sapiens
atagggaaatgaaaa

SEQ ID NO: 991905 - DNA, 15 bp, Homo sapiens
aatagggaaatgaaa

SEQ ID NO: 991906 - DNA, 15 bp, Homo sapiens
aaatagggaaatgaa

SEQ ID NO: 991907 - DNA, 15 bp, Homo sapiens
aaaatagggaaatga

SEQ ID NO: 991908 - DNA, 15 bp, Homo sapiens
taaaatagggaaatg

SEQ ID NO: 991909 - DNA, 15 bp, Homo sapiens
gtaaaatagggaaat

SEQ ID NO: 991910 - DNA, 15 bp, Homo sapiens
ggtaaaatagggaaa

SEQ ID NO: 991911 - DNA, 15 bp, Homo sapiens
aggtaaaatagggaa

SEQ ID NO: 991912 - DNA, 15 bp, Homo sapiens
caggtaaaataggga

SEQ ID NO: 991913 - DNA, 15 bp, Homo sapiens
gcaggtaaaataggg

SEQ ID NO: 991914 - DNA, 15 bp, Homo sapiens
agcaggtaaaatagg

SEQ ID NO: 991915 - DNA, 15 bp, Homo sapiens
aagcaggtaaaatag

SEQ ID NO: 991916 - DNA, 15 bp, Homo sapiens
aaagcaggtaaaata

SEQ ID NO: 991917 - DNA, 15 bp, Homo sapiens
caaagcaggtaaaat

SEQ ID NO: 991918 - DNA, 15 bp, Homo sapiens
gcaaagcaggtaaaa

SEQ ID NO: 991919 - DNA, 15 bp, Homo sapiens
tgcaaagcaggtaaa

SEQ ID NO: 991920 - DNA, 15 bp, Homo sapiens
gtgcaaagcaggtaa

SEQ ID NO: 991921 - DNA, 15 bp, Homo sapiens
tgtgcaaagcaggta

SEQ ID NO: 991922 - DNA, 15 bp, Homo sapiens
atgtgcaaagcaggt

SEQ ID NO: 991923 - DNA, 15 bp, Homo sapiens
catgtgcaaagcagg

SEQ ID NO: 991924 - DNA, 15 bp, Homo sapiens
gcatgtgcaaagcag

SEQ ID NO: 991925 - DNA, 15 bp, Homo sapiens
ggcatgtgcaaagca

SEQ ID NO: 991926 - DNA, 15 bp, Homo sapiens
aggcatgtgcaaagc

SEQ ID NO: 991927 - DNA, 15 bp, Homo sapiens
gaggcatgtgcaaag

SEQ ID NO: 991928 - DNA, 15 bp, Homo sapiens
ggaggcatgtgcaaa

SEQ ID NO: 991929 - DNA, 15 bp, Homo sapiens
gggaggcatgtgcaa

SEQ ID NO: 991930 - DNA, 15 bp, Homo sapiens
cgggaggcatgtgca

SEQ ID NO: 991931 - DNA, 15 bp, Homo sapiens
gcgggaggcatgtgc

SEQ ID NO: 991932 - DNA, 15 bp, Homo sapiens
ggcgggaggcatgtg

SEQ ID NO: 991933 - DNA, 15 bp, Homo sapiens
gggcgggaggcatgt

SEQ ID NO: 991934 - DNA, 15 bp, Homo sapiens
agggcgggaggcatg

SEQ ID NO: 991935 - DNA, 15 bp, Homo sapiens
gagggcgggaggcat

SEQ ID NO: 991936 - DNA, 15 bp, Homo sapiens
tgagggcgggaggca

SEQ ID NO: 991937 - DNA, 15 bp, Homo sapiens
gtgagggcgggaggc

SEQ ID NO: 991938 - DNA, 15 bp, Homo sapiens
ggtgagggcgggagg

SEQ ID NO: 991939 - DNA, 15 bp, Homo sapiens
gggtgagggcgggag

SEQ ID NO: 991940 - DNA, 15 bp, Homo sapiens
cgggtgagggcggga

SEQ ID NO: 991941 - DNA, 15 bp, Homo sapiens
ccgggtgagggcggg

SEQ ID NO: 991942 - DNA, 15 bp, Homo sapiens
cccgggtgagggcgg

SEQ ID NO: 991943 - DNA, 15 bp, Homo sapiens
tcccgggtgagggcg

SEQ ID NO: 991944 - DNA, 15 bp, Homo sapiens
ctcccgggtgagggc

SEQ ID NO: 991945 - DNA, 15 bp, Homo sapiens
cctcccgggtgaggg

SEQ ID NO: 991946 - DNA, 15 bp, Homo sapiens
gcctcccgggtgagg

SEQ ID NO: 991947 - DNA, 15 bp, Homo sapiens
cgcctcccgggtgag

SEQ ID NO: 991948 - DNA, 15 bp, Homo sapiens
ccgcctcccgggtga

SEQ ID NO: 991949 - DNA, 15 bp, Homo sapiens
gccgcctcccgggtg

SEQ ID NO: 991950 - DNA, 15 bp, Homo sapiens
cgccgcctcccgggt

SEQ ID NO: 991951 - DNA, 15 bp, Homo sapiens
tcgccgcctcccggg

SEQ ID NO: 991952 - DNA, 15 bp, Homo sapiens
ttcgccgcctcccgg

SEQ ID NO: 991953 - DNA, 15 bp, Homo sapiens
cttcgccgcctcccg

SEQ ID NO: 991954 - DNA, 15 bp, Homo sapiens
tcttcgccgcctccc

SEQ ID NO: 991955 - DNA, 15 bp, Homo sapiens
gtcttcgccgcctcc

SEQ ID NO: 991956 - DNA, 15 bp, Homo sapiens
cgtcttcgccgcctc

SEQ ID NO: 991957 - DNA, 15 bp, Homo sapiens
gcgtcttcgccgcct

SEQ ID NO: 991958 - DNA, 15 bp, Homo sapiens
ggcgtcttcgccgcc

SEQ ID NO: 991959 - DNA, 15 bp, Homo sapiens
gggcgtcttcgccgc

SEQ ID NO: 991960 - DNA, 15 bp, Homo sapiens
tgggcgtcttcgccg

SEQ ID NO: 991961 - DNA, 15 bp, Homo sapiens
gtgggcgtcttcgcc

SEQ ID NO: 991962 - DNA, 15 bp, Homo sapiens
agtgggcgtcttcgc

SEQ ID NO: 991963 - DNA, 15 bp, Homo sapiens
cagtgggcgtcttcg

SEQ ID NO: 991964 - DNA, 15 bp, Homo sapiens
ccagtgggcgtcttc

SEQ ID NO: 991965 - DNA, 15 bp, Homo sapiens
cccagtgggcgtctt

SEQ ID NO: 991966 - DNA, 15 bp, Homo sapiens
tcccagtgggcgtct

SEQ ID NO: 991967 - DNA, 15 bp, Homo sapiens
gtcccagtgggcgtc

SEQ ID NO: 991968 - DNA, 15 bp, Homo sapiens
ggtcccagtgggcgt

SEQ ID NO: 991969 - DNA, 15 bp, Homo sapiens
cggtcccagtgggcg

SEQ ID NO: 991970 - DNA, 15 bp, Homo sapiens
gcggtcccagtgggc

SEQ ID NO: 991971 - DNA, 15 bp, Homo sapiens
cgcggtcccagtggg

SEQ ID NO: 991972 - DNA, 15 bp, Homo sapiens
gcgcggtcccagtgg

SEQ ID NO: 991973 - DNA, 15 bp, Homo sapiens
ggcgcggtcccagtg

SEQ ID NO: 991974 - DNA, 15 bp, Homo sapiens
aggcgcggtcccagt

SEQ ID NO: 991975 - DNA, 15 bp, Homo sapiens
caggcgcggtcccag

SEQ ID NO: 991976 - DNA, 15 bp, Homo sapiens
ccaggcgcggtccca

SEQ ID NO: 991977 - DNA, 15 bp, Homo sapiens
gccaggcgcggtccc

SEQ ID NO: 991978 - DNA, 15 bp, Homo sapiens
ggccaggcgcggtcc

SEQ ID NO: 991979 - DNA, 15 bp, Homo sapiens
cggccaggcgcggtc

SEQ ID NO: 991980 - DNA, 15 bp, Homo sapiens
acggccaggcgcggt

SEQ ID NO: 991981 - DNA, 15 bp, Homo sapiens
aacggccaggcgcgg

SEQ ID NO: 991982 - DNA, 15 bp, Homo sapiens
aaacggccaggcgcg

SEQ ID NO: 991983 - DNA, 15 bp, Homo sapiens
aaaacggccaggcgc

SEQ ID NO: 991984 - DNA, 15 bp, Homo sapiens
gaaaacggccaggcg

SEQ ID NO: 991985 - DNA, 15 bp, Homo sapiens
agaaaacggccaggc

SEQ ID NO: 991986 - DNA, 15 bp, Homo sapiens
cagaaaacggccagg

SEQ ID NO: 991987 - DNA, 15 bp, Homo sapiens
ccagaaaacggccag

SEQ ID NO: 991988 - DNA, 15 bp, Homo sapiens
cccagaaaacggcca

SEQ ID NO: 991989 - DNA, 15 bp, Homo sapiens
gcccagaaaacggcc

SEQ ID NO: 991990 - DNA, 15 bp, Homo sapiens
cgcccagaaaacggc

SEQ ID NO: 991991 - DNA, 15 bp, Homo sapiens
gcgcccagaaaacgg

SEQ ID NO: 991992 - DNA, 15 bp, Homo sapiens
cgcgcccagaaaacg

SEQ ID NO: 991993 - DNA, 15 bp, Homo sapiens
acgcgcccagaaaac

SEQ ID NO: 991994 - DNA, 15 bp, Homo sapiens
gacgcgcccagaaaa

SEQ ID NO: 991995 - DNA, 15 bp, Homo sapiens
ggacgcgcccagaaa

SEQ ID NO: 991996 - DNA, 15 bp, Homo sapiens
aggacgcgcccagaa

SEQ ID NO: 991997 - DNA, 15 bp, Homo sapiens
caggacgcgcccaga

SEQ ID NO: 991998 - DNA, 15 bp, Homo sapiens
gcaggacgcgcccag

SEQ ID NO: 991999 - DNA, 15 bp, Homo sapiens
ggcaggacgcgccca

SEQ ID NO: 992000 - DNA, 15 bp, Homo sapiens
gggcaggacgcgccc

SEQ ID NO: 992001 - DNA, 15 bp, Homo sapiens
ggggcaggacgcgcc

SEQ ID NO: 992002 - DNA, 15 bp, Homo sapiens
gggggcaggacgcgc

SEQ ID NO: 992003 - DNA, 15 bp, Homo sapiens
tgggggcaggacgcg

SEQ ID NO: 992004 - DNA, 15 bp, Homo sapiens
gtgggggcaggacgc

SEQ ID NO: 992005 - DNA, 15 bp, Homo sapiens
cgtgggggcaggacg

SEQ ID NO: 992006 - DNA, 15 bp, Homo sapiens
ccgtgggggcaggac

SEQ ID NO: 992007 - DNA, 15 bp, Homo sapiens
gccgtgggggcagga

SEQ ID NO: 992008 - DNA, 15 bp, Homo sapiens
ggccgtgggggcagg

SEQ ID NO: 992009 - DNA, 15 bp, Homo sapiens
aggccgtgggggcag

SEQ ID NO: 992010 - DNA, 15 bp, Homo sapiens
gaggccgtgggggca

SEQ ID NO: 992011 - DNA, 15 bp, Homo sapiens
agaggccgtgggggc

SEQ ID NO: 992012 - DNA, 15 bp, Homo sapiens
cagaggccgtggggg

SEQ ID NO: 992013 - DNA, 15 bp, Homo sapiens
acagaggccgtgggg

SEQ ID NO: 992014 - DNA, 15 bp, Homo sapiens
gacagaggccgtggg

SEQ ID NO: 992015 - DNA, 15 bp, Homo sapiens
agacagaggccgtgg

SEQ ID NO: 992016 - DNA, 15 bp, Homo sapiens
gagacagaggccgtg

SEQ ID NO: 992017 - DNA, 15 bp, Homo sapiens
agagacagaggccgt

SEQ ID NO: 992018 - DNA, 15 bp, Homo sapiens
aagagacagaggccg

SEQ ID NO: 992019 - DNA, 15 bp, Homo sapiens
taagagacagaggcc

SEQ ID NO: 992020 - DNA, 15 bp, Homo sapiens
ctaagagacagaggc

SEQ ID NO: 992021 - DNA, 15 bp, Homo sapiens
cctaagagacagagg

SEQ ID NO: 992022 - DNA, 15 bp, Homo sapiens
ccctaagagacagag

SEQ ID NO: 992023 - DNA, 15 bp, Homo sapiens
gccctaagagacaga

SEQ ID NO: 992024 - DNA, 15 bp, Homo sapiens
cgccctaagagacag

SEQ ID NO: 992025 - DNA, 15 bp, Homo sapiens
tcgccctaagagaca

SEQ ID NO: 992026 - DNA, 15 bp, Homo sapiens
gtcgccctaagagac

SEQ ID NO: 992027 - DNA, 15 bp, Homo sapiens
agtcgccctaagaga

SEQ ID NO: 992028 - DNA, 15 bp, Homo sapiens
cagtcgccctaagag

SEQ ID NO: 992029 - DNA, 15 bp, Homo sapiens
ccagtcgccctaaga

SEQ ID NO: 992030 - DNA, 15 bp, Homo sapiens
cccagtcgccctaag

SEQ ID NO: 992031 - DNA, 15 bp, Homo sapiens
gcccagtcgccctaa

SEQ ID NO: 992032 - DNA, 15 bp, Homo sapiens
cgcccagtcgcccta

SEQ ID NO: 992033 - DNA, 15 bp, Homo sapiens
gcgcccagtcgccct

SEQ ID NO: 992034 - DNA, 15 bp, Homo sapiens
cgcgcccagtcgccc

SEQ ID NO: 992035 - DNA, 15 bp, Homo sapiens
ccgcgcccagtcgcc

SEQ ID NO: 992036 - DNA, 15 bp, Homo sapiens
tccgcgcccagtcgc

SEQ ID NO: 992037 - DNA, 15 bp, Homo sapiens
ttccgcgcccagtcg

SEQ ID NO: 992038 - DNA, 15 bp, Homo sapiens
cttccgcgcccagtc

SEQ ID NO: 992039 - DNA, 15 bp, Homo sapiens
tcttccgcgcccagt

SEQ ID NO: 992040 - DNA, 15 bp, Homo sapiens
ttcttccgcgcccag

SEQ ID NO: 992041 - DNA, 15 bp, Homo sapiens
tttcttccgcgccca

SEQ ID NO: 992042 - DNA, 15 bp, Homo sapiens
ttttcttccgcgccc

SEQ ID NO: 992043 - DNA, 15 bp, Homo sapiens
cttttcttccgcgcc

SEQ ID NO: 992044 - DNA, 15 bp, Homo sapiens
gcttttcttccgcgc

SEQ ID NO: 992045 - DNA, 15 bp, Homo sapiens
agcttttcttccgcg

SEQ ID NO: 992046 - DNA, 15 bp, Homo sapiens
cagcttttcttccgc

SEQ ID NO: 992047 - DNA, 15 bp, Homo sapiens
ccagcttttcttccg

SEQ ID NO: 992048 - DNA, 15 bp, Homo sapiens
tccagcttttcttcc

SEQ ID NO: 992049 - DNA, 15 bp, Homo sapiens
ctccagcttttcttc

SEQ ID NO: 992050 - DNA, 15 bp, Homo sapiens
tctccagcttttctt

SEQ ID NO: 992051 - DNA, 15 bp, Homo sapiens
ctctccagcttttct

SEQ ID NO: 992052 - DNA, 15 bp, Homo sapiens
gctctccagcttttc

SEQ ID NO: 992053 - DNA, 15 bp, Homo sapiens
ggctctccagctttt

SEQ ID NO: 992054 - DNA, 15 bp, Homo sapiens
gggctctccagcttt

SEQ ID NO: 992055 - DNA, 15 bp, Homo sapiens
ggggctctccagctt

SEQ ID NO: 992056 - DNA, 15 bp, Homo sapiens
aggggctctccagct

SEQ ID NO: 992057 - DNA, 15 bp, Homo sapiens
caggggctctccagc

SEQ ID NO: 992058 - DNA, 15 bp, Homo sapiens
gcaggggctctccag

SEQ ID NO: 992059 - DNA, 15 bp, Homo sapiens
cgcaggggctctcca

SEQ ID NO: 992060 - DNA, 15 bp, Homo sapiens
ccgcaggggctctcc

SEQ ID NO: 992061 - DNA, 15 bp, Homo sapiens
cccgcaggggctctc

SEQ ID NO: 992062 - DNA, 15 bp, Homo sapiens
ccccgcaggggctct

SEQ ID NO: 992063 - DNA, 15 bp, Homo sapiens
accccgcaggggctc

SEQ ID NO: 992064 - DNA, 15 bp, Homo sapiens
caccccgcaggggct

SEQ ID NO: 992065 - DNA, 15 bp, Homo sapiens
ccaccccgcaggggc

SEQ ID NO: 992066 - DNA, 15 bp, Homo sapiens
gccaccccgcagggg

SEQ ID NO: 992067 - DNA, 15 bp, Homo sapiens
tgccaccccgcaggg

SEQ ID NO: 992068 - DNA, 15 bp, Homo sapiens
ctgccaccccgcagg

SEQ ID NO: 992069 - DNA, 15 bp, Homo sapiens
cctgccaccccgcag

SEQ ID NO: 992070 - DNA, 15 bp, Homo sapiens
tcctgccaccccgca

SEQ ID NO: 992071 - DNA, 15 bp, Homo sapiens
ctcctgccaccccgc

SEQ ID NO: 992072 - DNA, 15 bp, Homo sapiens
cctcctgccaccccg

SEQ ID NO: 992073 - DNA, 15 bp, Homo sapiens
tcctcctgccacccc

SEQ ID NO: 992074 - DNA, 15 bp, Homo sapiens
ctcctcctgccaccc

SEQ ID NO: 992075 - DNA, 15 bp, Homo sapiens
cctcctcctgccacc

SEQ ID NO: 992076 - DNA, 15 bp, Homo sapiens
ccctcctcctgccac

SEQ ID NO: 992077 - DNA, 15 bp, Homo sapiens
accctcctcctgcca

SEQ ID NO: 992078 - DNA, 15 bp, Homo sapiens
caccctcctcctgcc

SEQ ID NO: 992079 - DNA, 15 bp, Homo sapiens
gcaccctcctcctgc

SEQ ID NO: 992080 - DNA, 15 bp, Homo sapiens
ggcaccctcctcctg

SEQ ID NO: 992081 - DNA, 15 bp, Homo sapiens
aggcaccctcctcct

SEQ ID NO: 992082 - DNA, 15 bp, Homo sapiens
caggcaccctcctcc

SEQ ID NO: 992083 - DNA, 15 bp, Homo sapiens
tcaggcaccctcctc

SEQ ID NO: 992084 - DNA, 15 bp, Homo sapiens
ctcaggcaccctcct

SEQ ID NO: 992085 - DNA, 15 bp, Homo sapiens
actcaggcaccctcc

SEQ ID NO: 992086 - DNA, 15 bp, Homo sapiens
gactcaggcaccctc

SEQ ID NO: 992087 - DNA, 15 bp, Homo sapiens
ggactcaggcaccct

SEQ ID NO: 992088 - DNA, 15 bp, Homo sapiens
gggactcaggcaccc

SEQ ID NO: 992089 - DNA, 15 bp, Homo sapiens
cgggactcaggcacc

SEQ ID NO: 992090 - DNA, 15 bp, Homo sapiens
gcgggactcaggcac

SEQ ID NO: 992091 - DNA, 15 bp, Homo sapiens
cgcgggactcaggca

SEQ ID NO: 992092 - DNA, 15 bp, Homo sapiens
tcgcgggactcaggc

SEQ ID NO: 992093 - DNA, 15 bp, Homo sapiens
ctcgcgggactcagg

SEQ ID NO: 992094 - DNA, 15 bp, Homo sapiens
tctcgcgggactcag

SEQ ID NO: 992095 - DNA, 15 bp, Homo sapiens
ctctcgcgggactca

SEQ ID NO: 992096 - DNA, 15 bp, Homo sapiens
cctctcgcgggactc

SEQ ID NO: 992097 - DNA, 15 bp, Homo sapiens
gcctctcgcgggact

SEQ ID NO: 992098 - DNA, 15 bp, Homo sapiens
ggcctctcgcgggac

SEQ ID NO: 992099 - DNA, 15 bp, Homo sapiens
gggcctctcgcggga

SEQ ID NO: 992100 - DNA, 15 bp, Homo sapiens
cgggcctctcgcggg

SEQ ID NO: 992101 - DNA, 15 bp, Homo sapiens
ccgggcctctcgcgg

SEQ ID NO: 992102 - DNA, 15 bp, Homo sapiens
cccgggcctctcgcg

SEQ ID NO: 992103 - DNA, 15 bp, Homo sapiens
gcccgggcctctcgc

SEQ ID NO: 992104 - DNA, 15 bp, Homo sapiens
cgcccgggcctctcg

SEQ ID NO: 992105 - DNA, 15 bp, Homo sapiens
tcgcccgggcctctc

SEQ ID NO: 992106 - DNA, 15 bp, Homo sapiens
ctcgcccgggcctct

SEQ ID NO: 992107 - DNA, 15 bp, Homo sapiens
cctcgcccgggcctc

SEQ ID NO: 992108 - DNA, 15 bp, Homo sapiens
tcctcgcccgggcct

SEQ ID NO: 992109 - DNA, 15 bp, Homo sapiens
ttcctcgcccgggcc

SEQ ID NO: 992110 - DNA, 15 bp, Homo sapiens
cttcctcgcccgggc

SEQ ID NO: 992111 - DNA, 15 bp, Homo sapiens
tcttcctcgcccggg

SEQ ID NO: 992112 - DNA, 15 bp, Homo sapiens
atcttcctcgcccgg

SEQ ID NO: 992113 - DNA, 15 bp, Homo sapiens
catcttcctcgcccg

SEQ ID NO: 992114 - DNA, 15 bp, Homo sapiens
gcatcttcctcgccc

SEQ ID NO: 992115 - DNA, 15 bp, Homo sapiens
cgcatcttcctcgcc

SEQ ID NO: 992116 - DNA, 15 bp, Homo sapiens
gcgcatcttcctcgc

SEQ ID NO: 992117 - DNA, 15 bp, Homo sapiens
tgcgcatcttcctcg

SEQ ID NO: 992118 - DNA, 15 bp, Homo sapiens
ctgcgcatcttcctc

SEQ ID NO: 992119 - DNA, 15 bp, Homo sapiens
gctgcgcatcttcct

SEQ ID NO: 992120 - DNA, 15 bp, Homo sapiens
ggctgcgcatcttcc

SEQ ID NO: 992121 - DNA, 15 bp, Homo sapiens
aggctgcgcatcttc

SEQ ID NO: 992122 - DNA, 15 bp, Homo sapiens
caggctgcgcatctt

SEQ ID NO: 992123 - DNA, 15 bp, Homo sapiens
gcaggctgcgcatct

SEQ ID NO: 992124 - DNA, 15 bp, Homo sapiens
agcaggctgcgcatc

SEQ ID NO: 992125 - DNA, 15 bp, Homo sapiens
cagcaggctgcgcat

SEQ ID NO: 992126 - DNA, 15 bp, Homo sapiens
tcagcaggctgcgca

SEQ ID NO: 992127 - DNA, 15 bp, Homo sapiens
atcagcaggctgcgc

SEQ ID NO: 992128 - DNA, 15 bp, Homo sapiens
gatcagcaggctgcg

SEQ ID NO: 992129 - DNA, 15 bp, Homo sapiens
ggatcagcaggctgc

SEQ ID NO: 992130 - DNA, 15 bp, Homo sapiens
cggatcagcaggctg

SEQ ID NO: 992131 - DNA, 15 bp, Homo sapiens
gcggatcagcaggct

SEQ ID NO: 992132 - DNA, 15 bp, Homo sapiens
cgcggatcagcaggc

SEQ ID NO: 992133 - DNA, 15 bp, Homo sapiens
acgcggatcagcagg

SEQ ID NO: 992134 - DNA, 15 bp, Homo sapiens
gacgcggatcagcag

SEQ ID NO: 992135 - DNA, 15 bp, Homo sapiens
ggacgcggatcagca

SEQ ID NO: 992136 - DNA, 15 bp, Homo sapiens
gggacgcggatcagc

SEQ ID NO: 992137 - DNA, 15 bp, Homo sapiens
cgggacgcggatcag

SEQ ID NO: 992138 - DNA, 15 bp, Homo sapiens
gcgggacgcggatca

SEQ ID NO: 992139 - DNA, 15 bp, Homo sapiens
ggcgggacgcggatc

SEQ ID NO: 992140 - DNA, 15 bp, Homo sapiens
gggcgggacgcggat

SEQ ID NO: 992141 - DNA, 15 bp, Homo sapiens
cgggcgggacgcgga

SEQ ID NO: 992142 - DNA, 15 bp, Homo sapiens
ccgggcgggacgcgg

SEQ ID NO: 992143 - DNA, 15 bp, Homo sapiens
gccgggcgggacgcg

SEQ ID NO: 992144 - DNA, 15 bp, Homo sapiens
cgccgggcgggacgc

SEQ ID NO: 992145 - DNA, 15 bp, Homo sapiens
gcgccgggcgggacg

SEQ ID NO: 992146 - DNA, 15 bp, Homo sapiens
ggcgccgggcgggac

SEQ ID NO: 992147 - DNA, 15 bp, Homo sapiens
tggcgccgggcggga

SEQ ID NO: 992148 - DNA, 15 bp, Homo sapiens
ctggcgccgggcggg

SEQ ID NO: 992149 - DNA, 15 bp, Homo sapiens
cctggcgccgggcgg

SEQ ID NO: 992150 - DNA, 15 bp, Homo sapiens
ccctggcgccgggcg

SEQ ID NO: 992151 - DNA, 15 bp, Homo sapiens
tccctggcgccgggc

SEQ ID NO: 992152 - DNA, 15 bp, Homo sapiens
gtccctggcgccggg

SEQ ID NO: 992153 - DNA, 15 bp, Homo sapiens
ggtccctggcgccgg

SEQ ID NO: 992154 - DNA, 15 bp, Homo sapiens
gggtccctggcgccg

SEQ ID NO: 992155 - DNA, 15 bp, Homo sapiens
agggtccctggcgcc

SEQ ID NO: 992156 - DNA, 15 bp, Homo sapiens
gagggtccctggcgc

SEQ ID NO: 992157 - DNA, 15 bp, Homo sapiens
tgagggtccctggcg

SEQ ID NO: 992158 - DNA, 15 bp, Homo sapiens
ctgagggtccctggc

SEQ ID NO: 992159 - DNA, 15 bp, Homo sapiens
tctgagggtccctgg

SEQ ID NO: 992160 - DNA, 15 bp, Homo sapiens
ctctgagggtccctg

SEQ ID NO: 992161 - DNA, 15 bp, Homo sapiens
cctctgagggtccct

SEQ ID NO: 992162 - DNA, 15 bp, Homo sapiens
ccctctgagggtccc

SEQ ID NO: 992163 - DNA, 15 bp, Homo sapiens
tccctctgagggtcc

SEQ ID NO: 992164 - DNA, 15 bp, Homo sapiens
ctccctctgagggtc

SEQ ID NO: 992165 - DNA, 15 bp, Homo sapiens
cctccctctgagggt

SEQ ID NO: 992166 - DNA, 15 bp, Homo sapiens
tcctccctctgaggg

SEQ ID NO: 992167 - DNA, 15 bp, Homo sapiens
tctcctccctctgag

SEQ ID NO: 992168 - DNA, 15 bp, Homo sapiens
ctctcctccctctga

SEQ ID NO: 992169 - DNA, 15 bp, Homo sapiens
gctctcctccctctg

SEQ ID NO: 992170 - DNA, 15 bp, Homo sapiens
agctctcctccctct

SEQ ID NO: 992171 - DNA, 15 bp, Homo sapiens
gagctctcctccctc

SEQ ID NO: 992172 - DNA, 15 bp, Homo sapiens
tgagctctcctccct

SEQ ID NO: 992173 - DNA, 15 bp, Homo sapiens
ttgagctctcctccc

SEQ ID NO: 992174 - DNA, 15 bp, Homo sapiens
tttgagctctcctcc

SEQ ID NO: 992175 - DNA, 15 bp, Homo sapiens
ctttgagctctcctc

SEQ ID NO: 992176 - DNA, 15 bp, Homo sapiens
tctttgagctctcct

SEQ ID NO: 992177 - DNA, 15 bp, Homo sapiens
gtctttgagctctcc

SEQ ID NO: 992178 - DNA, 15 bp, Homo sapiens
ggtctttgagctctc

SEQ ID NO: 992179 - DNA, 15 bp, Homo sapiens
aggtctttgagctct

SEQ ID NO: 992180 - DNA, 15 bp, Homo sapiens
gaggtctttgagctc

SEQ ID NO: 992181 - DNA, 15 bp, Homo sapiens
cgaggtctttgagct

SEQ ID NO: 992182 - DNA, 15 bp, Homo sapiens
gcgaggtctttgagc

SEQ ID NO: 992183 - DNA, 15 bp, Homo sapiens
ggcgaggtctttgag

SEQ ID NO: 992184 - DNA, 15 bp, Homo sapiens
gggcgaggtctttga

SEQ ID NO: 992185 - DNA, 15 bp, Homo sapiens
ggggcgaggtctttg

SEQ ID NO: 992186 - DNA, 15 bp, Homo sapiens
cggggcgaggtcttt

SEQ ID NO: 992187 - DNA, 15 bp, Homo sapiens
gcggggcgaggtctt

SEQ ID NO: 992188 - DNA, 15 bp, Homo sapiens
cgcggggcgaggtct

SEQ ID NO: 992189 - DNA, 15 bp, Homo sapiens
gcgcggggcgaggtc

SEQ ID NO: 992190 - DNA, 15 bp, Homo sapiens
ggcgcggggcgaggt

SEQ ID NO: 992191 - DNA, 15 bp, Homo sapiens
aggcgcggggcgagg

SEQ ID NO: 992192 - DNA, 15 bp, Homo sapiens
aaggcgcggggcgag

SEQ ID NO: 992193 - DNA, 15 bp, Homo sapiens
gaaggcgcggggcga

SEQ ID NO: 992194 - DNA, 15 bp, Homo sapiens
cgaaggcgcggggcg

SEQ ID NO: 992195 - DNA, 15 bp, Homo sapiens
gcgaaggcgcggggc

SEQ ID NO: 992196 - DNA, 15 bp, Homo sapiens
cgcgaaggcgcgggg

SEQ ID NO: 992197 - DNA, 15 bp, Homo sapiens
tcgcgaaggcgcggg

SEQ ID NO: 992198 - DNA, 15 bp, Homo sapiens
ctcgcgaaggcgcgg

SEQ ID NO: 992199 - DNA, 15 bp, Homo sapiens
cctcgcgaaggcgcg

SEQ ID NO: 992200 - DNA, 15 bp, Homo sapiens
tcctcgcgaaggcgc

SEQ ID NO: 992201 - DNA, 15 bp, Homo sapiens
gtcctcgcgaaggcg

SEQ ID NO: 992202 - DNA, 15 bp, Homo sapiens
ggtcctcgcgaaggc

SEQ ID NO: 992203 - DNA, 15 bp, Homo sapiens
tggtcctcgcgaagg

SEQ ID NO: 992204 - DNA, 15 bp, Homo sapiens
ttggtcctcgcgaag

SEQ ID NO: 992205 - DNA, 15 bp, Homo sapiens
gttggtcctcgcgaa

SEQ ID NO: 992206 - DNA, 15 bp, Homo sapiens
ggttggtcctcgcga

SEQ ID NO: 992207 - DNA, 15 bp, Homo sapiens
gggttggtcctcgcg

SEQ ID NO: 992208 - DNA, 15 bp, Homo sapiens
tgggttggtcctcgc

SEQ ID NO: 992209 - DNA, 15 bp, Homo sapiens
ctgggttggtcctcg

SEQ ID NO: 992210 - DNA, 15 bp, Homo sapiens
actgggttggtcctc

SEQ ID NO: 992211 - DNA, 15 bp, Homo sapiens
gactgggttggtcct

SEQ ID NO: 992212 - DNA, 15 bp, Homo sapiens
ggactgggttggtcc

SEQ ID NO: 992213 - DNA, 15 bp, Homo sapiens
gggactgggttggtc

SEQ ID NO: 992214 - DNA, 15 bp, Homo sapiens
ggggactgggttggt

SEQ ID NO: 992215 - DNA, 15 bp, Homo sapiens
cggggactgggttgg

SEQ ID NO: 992216 - DNA, 15 bp, Homo sapiens
gcggggactgggttg

SEQ ID NO: 992217 - DNA, 15 bp, Homo sapiens
cgcggggactgggtt

SEQ ID NO: 992218 - DNA, 15 bp, Homo sapiens
gcgcggggactgggt

SEQ ID NO: 992219 - DNA, 15 bp, Homo sapiens
ggcgcggggactggg

SEQ ID NO: 992220 - DNA, 15 bp, Homo sapiens
aggcgcggggactgg

SEQ ID NO: 992221 - DNA, 15 bp, Homo sapiens
caggcgcggggactg

SEQ ID NO: 992222 - DNA, 15 bp, Homo sapiens
gcaggcgcggggact

SEQ ID NO: 992223 - DNA, 15 bp, Homo sapiens
ggcaggcgcggggac

SEQ ID NO: 992224 - DNA, 15 bp, Homo sapiens
gggcaggcgcgggga

SEQ ID NO: 992225 - DNA, 15 bp, Homo sapiens
ggggcaggcgcgggg

SEQ ID NO: 992226 - DNA, 15 bp, Homo sapiens
tggggcaggcgcggg

SEQ ID NO: 992227 - DNA, 15 bp, Homo sapiens
ctggggcaggcgcgg

SEQ ID NO: 992228 - DNA, 15 bp, Homo sapiens
tctggggcaggcgcg

SEQ ID NO: 992229 - DNA, 15 bp, Homo sapiens
ctctggggcaggcgc

SEQ ID NO: 992230 - DNA, 15 bp, Homo sapiens
gctctggggcaggcg

SEQ ID NO: 992231 - DNA, 15 bp, Homo sapiens
cgctctggggcaggc

SEQ ID NO: 992232 - DNA, 15 bp, Homo sapiens
ccgctctggggcagg

SEQ ID NO: 992233 - DNA, 15 bp, Homo sapiens
gccgctctggggcag

SEQ ID NO: 992234 - DNA, 15 bp, Homo sapiens
agccgctctggggca

SEQ ID NO: 992235 - DNA, 15 bp, Homo sapiens
aagccgctctggggc

SEQ ID NO: 992236 - DNA, 15 bp, Homo sapiens
taagccgctctgggg

SEQ ID NO: 992237 - DNA, 15 bp, Homo sapiens
ctaagccgctctggg

SEQ ID NO: 992238 - DNA, 15 bp, Homo sapiens
tctaagccgctctgg

SEQ ID NO: 992239 - DNA, 15 bp, Homo sapiens
ttctaagccgctctg

SEQ ID NO: 992240 - DNA, 15 bp, Homo sapiens
tttctaagccgctct

SEQ ID NO: 992241 - DNA, 15 bp, Homo sapiens
gtttctaagccgctc

SEQ ID NO: 992242 - DNA, 15 bp, Homo sapiens
agtttctaagccgct

SEQ ID NO: 992243 - DNA, 15 bp, Homo sapiens
gagtttctaagccgc

SEQ ID NO: 992244 - DNA, 15 bp, Homo sapiens
tgagtttctaagccg

SEQ ID NO: 992245 - DNA, 15 bp, Homo sapiens
ctgagtttctaagcc

SEQ ID NO: 992246 - DNA, 15 bp, Homo sapiens
cctgagtttctaagc

SEQ ID NO: 992247 - DNA, 15 bp, Homo sapiens
ccctgagtttctaag

SEQ ID NO: 992248 - DNA, 15 bp, Homo sapiens
gccctgagtttctaa

SEQ ID NO: 992249 - DNA, 15 bp, Homo sapiens
tgccctgagtttcta

SEQ ID NO: 992250 - DNA, 15 bp, Homo sapiens
gtgccctgagtttct

SEQ ID NO: 992251 - DNA, 15 bp, Homo sapiens
tgtgccctgagtttc

SEQ ID NO: 992252 - DNA, 15 bp, Homo sapiens
ctgtgccctgagttt

SEQ ID NO: 992253 - DNA, 15 bp, Homo sapiens
actgtgccctgagtt

SEQ ID NO: 992254 - DNA, 15 bp, Homo sapiens
cactgtgccctgagt

SEQ ID NO: 992255 - DNA, 15 bp, Homo sapiens
tcactgtgccctgag

SEQ ID NO: 992256 - DNA, 15 bp, Homo sapiens
ctcactgtgccctga

SEQ ID NO: 992257 - DNA, 15 bp, Homo sapiens
tctcactgtgccctg

SEQ ID NO: 992258 - DNA, 15 bp, Homo sapiens
ctctcactgtgccct

SEQ ID NO: 992259 - DNA, 15 bp, Homo sapiens
gctctcactgtgccc

SEQ ID NO: 992260 - DNA, 15 bp, Homo sapiens
cgctctcactgtgcc

SEQ ID NO: 992261 - DNA, 15 bp, Homo sapiens
gcgctctcactgtgc

SEQ ID NO: 992262 - DNA, 15 bp, Homo sapiens
tgcgctctcactgtg

SEQ ID NO: 992263 - DNA, 15 bp, Homo sapiens
ctgcgctctcactgt

SEQ ID NO: 992264 - DNA, 15 bp, Homo sapiens
cctgcgctctcactg

SEQ ID NO: 992265 - DNA, 15 bp, Homo sapiens
ccctgcgctctcact

SEQ ID NO: 992266 - DNA, 15 bp, Homo sapiens
gccctgcgctctcac

SEQ ID NO: 992267 - DNA, 15 bp, Homo sapiens
cgccctgcgctctca

SEQ ID NO: 992268 - DNA, 15 bp, Homo sapiens
gcgccctgcgctctc

SEQ ID NO: 992269 - DNA, 15 bp, Homo sapiens
ggcgccctgcgctct

SEQ ID NO: 992270 - DNA, 15 bp, Homo sapiens
aggcgccctgcgctc

SEQ ID NO: 992271 - DNA, 15 bp, Homo sapiens
gaggcgccctgcgct

SEQ ID NO: 992272 - DNA, 15 bp, Homo sapiens
ggaggcgccctgcgc

SEQ ID NO: 992273 - DNA, 15 bp, Homo sapiens
gggaggcgccctgcg

SEQ ID NO: 992274 - DNA, 15 bp, Homo sapiens
cgggaggcgccctgc

SEQ ID NO: 992275 - DNA, 15 bp, Homo sapiens
tcgggaggcgccctg

SEQ ID NO: 992276 - DNA, 15 bp, Homo sapiens
ctcgggaggcgccct

SEQ ID NO: 992277 - DNA, 15 bp, Homo sapiens
cctcgggaggcgccc

SEQ ID NO: 992278 - DNA, 15 bp, Homo sapiens
gcctcgggaggcgcc

SEQ ID NO: 992279 - DNA, 15 bp, Homo sapiens
agcctcgggaggcgc

SEQ ID NO: 992280 - DNA, 15 bp, Homo sapiens
aagcctcgggaggcg

SEQ ID NO: 992281 - DNA, 15 bp, Homo sapiens
gaagcctcgggaggc

SEQ ID NO: 992282 - DNA, 15 bp, Homo sapiens
tgaagcctcgggagg

SEQ ID NO: 992283 - DNA, 15 bp, Homo sapiens
gtgaagcctcgggag

SEQ ID NO: 992284 - DNA, 15 bp, Homo sapiens
tgtgaagcctcggga

SEQ ID NO: 992285 - DNA, 15 bp, Homo sapiens
gtgtgaagcctcggg

SEQ ID NO: 992286 - DNA, 15 bp, Homo sapiens
ggtgtgaagcctcgg

SEQ ID NO: 992287 - DNA, 15 bp, Homo sapiens
cggtgtgaagcctcg

SEQ ID NO: 992288 - DNA, 15 bp, Homo sapiens
gcggtgtgaagcctc

SEQ ID NO: 992289 - DNA, 15 bp, Homo sapiens
ggcggtgtgaagcct

SEQ ID NO: 992290 - DNA, 15 bp, Homo sapiens
cggcggtgtgaagcc

SEQ ID NO: 992291 - DNA, 15 bp, Homo sapiens
ccggcggtgtgaagc

SEQ ID NO: 992292 - DNA, 15 bp, Homo sapiens
gccggcggtgtgaag

SEQ ID NO: 992293 - DNA, 15 bp, Homo sapiens
ggccggcggtgtgaa

SEQ ID NO: 992294 - DNA, 15 bp, Homo sapiens
cggccggcggtgtga

SEQ ID NO: 992295 - DNA, 15 bp, Homo sapiens
ccggccggcggtgtg

SEQ ID NO: 992296 - DNA, 15 bp, Homo sapiens
cccggccggcggtgt

SEQ ID NO: 992297 - DNA, 15 bp, Homo sapiens
gcccggccggcggtg

SEQ ID NO: 992298 - DNA, 15 bp, Homo sapiens
ggcccggccggcggt

SEQ ID NO: 992299 - DNA, 15 bp, Homo sapiens
tggcccggccggcgg

SEQ ID NO: 992300 - DNA, 15 bp, Homo sapiens
ctggcccggccggcg

SEQ ID NO: 992301 - DNA, 15 bp, Homo sapiens
gctggcccggccggc

SEQ ID NO: 992302 - DNA, 15 bp, Homo sapiens
cgctggcccggccgg

SEQ ID NO: 992303 - DNA, 15 bp, Homo sapiens
ccgctggcccggccg

SEQ ID NO: 992304 - DNA, 15 bp, Homo sapiens
tccgctggcccggcc

SEQ ID NO: 992305 - DNA, 15 bp, Homo sapiens
ctccgctggcccggc

SEQ ID NO: 992306 - DNA, 15 bp, Homo sapiens
cctccgctggcccgg

SEQ ID NO: 992307 - DNA, 15 bp, Homo sapiens
gcctccgctggcccg

SEQ ID NO: 992308 - DNA, 15 bp, Homo sapiens
agcctccgctggccc

SEQ ID NO: 992309 - DNA, 15 bp, Homo sapiens
cagcctccgctggcc

SEQ ID NO: 992310 - DNA, 15 bp, Homo sapiens
acagcctccgctggc

SEQ ID NO: 992311 - DNA, 15 bp, Homo sapiens
cacagcctccgctgg

SEQ ID NO: 992312 - DNA, 15 bp, Homo sapiens
tcacagcctccgctg

SEQ ID NO: 992313 - DNA, 15 bp, Homo sapiens
gtcacagcctccgct

SEQ ID NO: 992314 - DNA, 15 bp, Homo sapiens
ggtcacagcctccgc

SEQ ID NO: 992315 - DNA, 15 bp, Homo sapiens
cggtcacagcctccg

SEQ ID NO: 992316 - DNA, 15 bp, Homo sapiens
ccggtcacagcctcc

SEQ ID NO: 992317 - DNA, 15 bp, Homo sapiens
tccggtcacagcctc

SEQ ID NO: 992318 - DNA, 15 bp, Homo sapiens
ctccggtcacagcct

SEQ ID NO: 992319 - DNA, 15 bp, Homo sapiens
gctccggtcacagcc

SEQ ID NO: 992320 - DNA, 15 bp, Homo sapiens
cgctccggtcacagc

SEQ ID NO: 992321 - DNA, 15 bp, Homo sapiens
gcgctccggtcacag

SEQ ID NO: 992322 - DNA, 15 bp, Homo sapiens
ggcgctccggtcaca

SEQ ID NO: 992323 - DNA, 15 bp, Homo sapiens
gggcgctccggtcac

SEQ ID NO: 992324 - DNA, 15 bp, Homo sapiens
ggggcgctccggtca

SEQ ID NO: 992325 - DNA, 15 bp, Homo sapiens
gggggcgctccggtc

SEQ ID NO: 992326 - DNA, 15 bp, Homo sapiens
agggggcgctccggt

SEQ ID NO: 992327 - DNA, 15 bp, Homo sapiens
gagggggcgctccgg

SEQ ID NO: 992328 - DNA, 15 bp, Homo sapiens
agagggggcgctccg

SEQ ID NO: 992329 - DNA, 15 bp, Homo sapiens
cagagggggcgctcc

SEQ ID NO: 992330 - DNA, 15 bp, Homo sapiens
acagagggggcgctc

SEQ ID NO: 992331 - DNA, 15 bp, Homo sapiens
cacagagggggcgct

SEQ ID NO: 992332 - DNA, 15 bp, Homo sapiens
gcacagagggggcgc

SEQ ID NO: 992333 - DNA, 15 bp, Homo sapiens
ggcacagagggggcg

SEQ ID NO: 992334 - DNA, 15 bp, Homo sapiens
cggcacagagggggc

SEQ ID NO: 992335 - DNA, 15 bp, Homo sapiens
gcggcacagaggggg

SEQ ID NO: 992336 - DNA, 15 bp, Homo sapiens
cgcggcacagagggg

SEQ ID NO: 992337 - DNA, 15 bp, Homo sapiens
gcgcggcacagaggg

SEQ ID NO: 992338 - DNA, 15 bp, Homo sapiens
tgcgcggcacagagg

SEQ ID NO: 992339 - DNA, 15 bp, Homo sapiens
gtgcgcggcacagag

SEQ ID NO: 992340 - DNA, 15 bp, Homo sapiens
cgtgcgcggcacaga

SEQ ID NO: 992341 - DNA, 15 bp, Homo sapiens
gcgtgcgcggcacag

SEQ ID NO: 992342 - DNA, 15 bp, Homo sapiens
ggcgtgcgcggcaca

SEQ ID NO: 992343 - DNA, 15 bp, Homo sapiens
cggcgtgcgcggcac

SEQ ID NO: 992344 - DNA, 15 bp, Homo sapiens
gcggcgtgcgcggca

SEQ ID NO: 992345 - DNA, 15 bp, Homo sapiens
cgcggcgtgcgcggc

SEQ ID NO: 992346 - DNA, 15 bp, Homo sapiens
ccgcggcgtgcgcgg

SEQ ID NO: 992347 - DNA, 15 bp, Homo sapiens
gccgcggcgtgcgcg

SEQ ID NO: 992348 - DNA, 15 bp, Homo sapiens
ggccgcggcgtgcgc

SEQ ID NO: 992349 - DNA, 15 bp, Homo sapiens
cggccgcggcgtgcg

SEQ ID NO: 992350 - DNA, 15 bp, Homo sapiens
gcggccgcggcgtgc

SEQ ID NO: 992351 - DNA, 15 bp, Homo sapiens
ggcggccgcggcgtg

SEQ ID NO: 992352 - DNA, 15 bp, Homo sapiens
cggcggccgcggcgt

SEQ ID NO: 992353 - DNA, 15 bp, Homo sapiens
gcggcggccgcggcg

SEQ ID NO: 992354 - DNA, 15 bp, Homo sapiens
ggcggcggccgcggc

SEQ ID NO: 992355 - DNA, 15 bp, Homo sapiens
cggcggcggccgcgg

SEQ ID NO: 992356 - DNA, 15 bp, Homo sapiens
ccggcggcggccgcg

SEQ ID NO: 992357 - DNA, 15 bp, Homo sapiens
cccggcggcggccgc

SEQ ID NO: 992358 - DNA, 15 bp, Homo sapiens
acccggcggcggccg

SEQ ID NO: 992359 - DNA, 15 bp, Homo sapiens
aacccggcggcggcc

SEQ ID NO: 992360 - DNA, 15 bp, Homo sapiens
caacccggcggcggc

SEQ ID NO: 992361 - DNA, 15 bp, Homo sapiens
ccaacccggcggcgg

SEQ ID NO: 992362 - DNA, 15 bp, Homo sapiens
cccaacccggcggcg

SEQ ID NO: 992363 - DNA, 15 bp, Homo sapiens
ccccaacccggcggc

SEQ ID NO: 992364 - DNA, 15 bp, Homo sapiens
accccaacccggcgg

SEQ ID NO: 992365 - DNA, 15 bp, Homo sapiens
taccccaacccggcg

SEQ ID NO: 992366 - DNA, 15 bp, Homo sapiens
ctaccccaacccggc

SEQ ID NO: 992367 - DNA, 15 bp, Homo sapiens
cctaccccaacccgg

SEQ ID NO: 992368 - DNA, 15 bp, Homo sapiens
acctaccccaacccg

SEQ ID NO: 992369 - DNA, 15 bp, Homo sapiens
cacctaccccaaccc

SEQ ID NO: 992370 - DNA, 15 bp, Homo sapiens
tcacctaccccaacc

SEQ ID NO: 992371 - DNA, 15 bp, Homo sapiens
ctcacctaccccaac

SEQ ID NO: 992372 - DNA, 15 bp, Homo sapiens
gctcacctaccccaa

SEQ ID NO: 992373 - DNA, 15 bp, Homo sapiens
cgctcacctacccca

SEQ ID NO: 992374 - DNA, 15 bp, Homo sapiens
ccgctcacctacccc

SEQ ID NO: 992375 - DNA, 15 bp, Homo sapiens
cccgctcacctaccc

SEQ ID NO: 992376 - DNA, 15 bp, Homo sapiens
tcccgctcacctacc

SEQ ID NO: 992377 - DNA, 15 bp, Homo sapiens
ctcccgctcacctac

SEQ ID NO: 992378 - DNA, 15 bp, Homo sapiens
cctcccgctcaccta

SEQ ID NO: 992379 - DNA, 15 bp, Homo sapiens
gcctcccgctcacct

SEQ ID NO: 992380 - DNA, 15 bp, Homo sapiens
agcctcccgctcacc

SEQ ID NO: 992381 - DNA, 15 bp, Homo sapiens
tagcctcccgctcac

SEQ ID NO: 992382 - DNA, 15 bp, Homo sapiens
ctagcctcccgctca

SEQ ID NO: 992383 - DNA, 15 bp, Homo sapiens
cctagcctcccgctc

SEQ ID NO: 992384 - DNA, 15 bp, Homo sapiens
ccctagcctcccgct

SEQ ID NO: 992385 - DNA, 15 bp, Homo sapiens
accctagcctcccgc

SEQ ID NO: 992386 - DNA, 15 bp, Homo sapiens
taccctagcctcccg

SEQ ID NO: 992387 - DNA, 15 bp, Homo sapiens
gtaccctagcctccc

SEQ ID NO: 992388 - DNA, 15 bp, Homo sapiens
tgtaccctagcctcc

SEQ ID NO: 992389 - DNA, 15 bp, Homo sapiens
gtgtaccctagcctc

SEQ ID NO: 992390 - DNA, 15 bp, Homo sapiens
agtgtaccctagcct

SEQ ID NO: 992391 - DNA, 15 bp, Homo sapiens
aagtgtaccctagcc

SEQ ID NO: 992392 - DNA, 15 bp, Homo sapiens
gaagtgtaccctagc

SEQ ID NO: 992393 - DNA, 15 bp, Homo sapiens
cgaagtgtaccctag

SEQ ID NO: 992394 - DNA, 15 bp, Homo sapiens
ccgaagtgtacccta

SEQ ID NO: 992395 - DNA, 15 bp, Homo sapiens
cccgaagtgtaccct

SEQ ID NO: 992396 - DNA, 15 bp, Homo sapiens
ccccgaagtgtaccc

SEQ ID NO: 992397 - DNA, 15 bp, Homo sapiens
accccgaagtgtacc

SEQ ID NO: 992398 - DNA, 15 bp, Homo sapiens
caccccgaagtgtac

SEQ ID NO: 992399 - DNA, 15 bp, Homo sapiens
ccaccccgaagtgta

SEQ ID NO: 992400 - DNA, 15 bp, Homo sapiens
cccaccccgaagtgt

SEQ ID NO: 992401 - DNA, 15 bp, Homo sapiens
ccccaccccgaagtg

SEQ ID NO: 992402 - DNA, 15 bp, Homo sapiens
cccccaccccgaagt

SEQ ID NO: 992403 - DNA, 15 bp, Homo sapiens
tcccccaccccgaag

SEQ ID NO: 992404 - DNA, 15 bp, Homo sapiens
atcccccaccccgaa

SEQ ID NO: 992405 - DNA, 15 bp, Homo sapiens
catcccccaccccga

SEQ ID NO: 992406 - DNA, 15 bp, Homo sapiens
ccatcccccaccccg

SEQ ID NO: 992407 - DNA, 15 bp, Homo sapiens
cccatcccccacccc

SEQ ID NO: 992408 - DNA, 15 bp, Homo sapiens
gcccatcccccaccc

SEQ ID NO: 992409 - DNA, 15 bp, Homo sapiens
cgcccatcccccacc

SEQ ID NO: 992410 - DNA, 15 bp, Homo sapiens
gcgcccatcccccac

SEQ ID NO: 992411 - DNA, 15 bp, Homo sapiens
cgcgcccatccccca

SEQ ID NO: 992412 - DNA, 15 bp, Homo sapiens
gcgcgcccatccccc

SEQ ID NO: 992413 - DNA, 15 bp, Homo sapiens
tgcgcgcccatcccc

SEQ ID NO: 992414 - DNA, 15 bp, Homo sapiens
gtgcgcgcccatccc

SEQ ID NO: 992415 - DNA, 15 bp, Homo sapiens
tgtgcgcgcccatcc

SEQ ID NO: 992416 - DNA, 15 bp, Homo sapiens
atgtgcgcgcccatc

SEQ ID NO: 992417 - DNA, 15 bp, Homo sapiens
catgtgcgcgcccat

SEQ ID NO: 992418 - DNA, 15 bp, Homo sapiens
ccatgtgcgcgccca

SEQ ID NO: 992419 - DNA, 15 bp, Homo sapiens
gccatgtgcgcgccc

SEQ ID NO: 992420 - DNA, 15 bp, Homo sapiens
ggccatgtgcgcgcc

SEQ ID NO: 992421 - DNA, 15 bp, Homo sapiens
cggccatgtgcgcgc

SEQ ID NO: 992422 - DNA, 15 bp, Homo sapiens
gcggccatgtgcgcg

SEQ ID NO: 992423 - DNA, 15 bp, Homo sapiens
ggcggccatgtgcgc

SEQ ID NO: 992424 - DNA, 15 bp, Homo sapiens
tggcggccatgtgcg

SEQ ID NO: 992425 - DNA, 15 bp, Homo sapiens
ctggcggccatgtgc

SEQ ID NO: 992426 - DNA, 15 bp, Homo sapiens
gctggcggccatgtg

SEQ ID NO: 992427 - DNA, 15 bp, Homo sapiens
tgctggcggccatgt

SEQ ID NO: 992428 - DNA, 15 bp, Homo sapiens
ctgctggcggccatg

SEQ ID NO: 992429 - DNA, 15 bp, Homo sapiens
cctgctggcggccat

SEQ ID NO: 992430 - DNA, 15 bp, Homo sapiens
gcctgctggcggcca

SEQ ID NO: 992431 - DNA, 15 bp, Homo sapiens
tgcctgctggcggcc

SEQ ID NO: 992432 - DNA, 15 bp, Homo sapiens
ctgcctgctggcggc

SEQ ID NO: 992433 - DNA, 15 bp, Homo sapiens
tctgcctgctggcgg

SEQ ID NO: 992434 - DNA, 15 bp, Homo sapiens
ctctgcctgctggcg

SEQ ID NO: 992435 - DNA, 15 bp, Homo sapiens
actctgcctgctggc

SEQ ID NO: 992436 - DNA, 15 bp, Homo sapiens
aactctgcctgctgg

SEQ ID NO: 992437 - DNA, 15 bp, Homo sapiens
taactctgcctgctg

SEQ ID NO: 992438 - DNA, 15 bp, Homo sapiens
gtaactctgcctgct

SEQ ID NO: 992439 - DNA, 15 bp, Homo sapiens
agtaactctgcctgc

SEQ ID NO: 992440 - DNA, 15 bp, Homo sapiens
gagtaactctgcctg

SEQ ID NO: 992441 - DNA, 15 bp, Homo sapiens
ggagtaactctgcct

SEQ ID NO: 992442 - DNA, 15 bp, Homo sapiens
cggagtaactctgcc

SEQ ID NO: 992443 - DNA, 15 bp, Homo sapiens
ccggagtaactctgc

SEQ ID NO: 992444 - DNA, 15 bp, Homo sapiens
accggagtaactctg

SEQ ID NO: 992445 - DNA, 15 bp, Homo sapiens
taccggagtaactct

SEQ ID NO: 992446 - DNA, 15 bp, Homo sapiens
ttaccggagtaactc

SEQ ID NO: 992447 - DNA, 15 bp, Homo sapiens
tttaccggagtaact

SEQ ID NO: 992448 - DNA, 15 bp, Homo sapiens
gtttaccggagtaac

SEQ ID NO: 992449 - DNA, 15 bp, Homo sapiens
tgtttaccggagtaa

SEQ ID NO: 992450 - DNA, 15 bp, Homo sapiens
gtgtttaccggagta

SEQ ID NO: 992451 - DNA, 15 bp, Homo sapiens
cgtgtttaccggagt

SEQ ID NO: 992452 - DNA, 15 bp, Homo sapiens
gcgtgtttaccggag

SEQ ID NO: 992453 - DNA, 15 bp, Homo sapiens
ggcgtgtttaccgga

SEQ ID NO: 992454 - DNA, 15 bp, Homo sapiens
tggcgtgtttaccgg

SEQ ID NO: 992455 - DNA, 15 bp, Homo sapiens
ctggcgtgtttaccg

SEQ ID NO: 992456 - DNA, 15 bp, Homo sapiens
cctggcgtgtttacc

SEQ ID NO: 992457 - DNA, 15 bp, Homo sapiens
ccctggcgtgtttac

SEQ ID NO: 992458 - DNA, 15 bp, Homo sapiens
tccctggcgtgttta

SEQ ID NO: 992459 - DNA, 15 bp, Homo sapiens
gtccctggcgtgttt

SEQ ID NO: 992460 - DNA, 15 bp, Homo sapiens
cgtccctggcgtgtt

SEQ ID NO: 992461 - DNA, 15 bp, Homo sapiens
ccgtccctggcgtgt

SEQ ID NO: 992462 - DNA, 15 bp, Homo sapiens
gccgtccctggcgtg

SEQ ID NO: 992463 - DNA, 15 bp, Homo sapiens
cgccgtccctggcgt

SEQ ID NO: 992464 - DNA, 15 bp, Homo sapiens
ccgccgtccctggcg

SEQ ID NO: 992465 - DNA, 15 bp, Homo sapiens
gccgccgtccctggc

SEQ ID NO: 992466 - DNA, 15 bp, Homo sapiens
cgccgccgtccctgg

SEQ ID NO: 992467 - DNA, 15 bp, Homo sapiens
gcgccgccgtccctg

SEQ ID NO: 992468 - DNA, 15 bp, Homo sapiens
cgcgccgccgtccct

SEQ ID NO: 992469 - DNA, 15 bp, Homo sapiens
gcgcgccgccgtccc

SEQ ID NO: 992470 - DNA, 15 bp, Homo sapiens
cgcgcgccgccgtcc

SEQ ID NO: 992471 - DNA, 15 bp, Homo sapiens
gcgcgcgccgccgtc

SEQ ID NO: 992472 - DNA, 15 bp, Homo sapiens
cgcgcgcgccgccgt

SEQ ID NO: 992473 - DNA, 15 bp, Homo sapiens
ccgcgcgcgccgccg

SEQ ID NO: 992474 - DNA, 15 bp, Homo sapiens
cccgcgcgcgccgcc

SEQ ID NO: 992475 - DNA, 15 bp, Homo sapiens
tcccgcgcgcgccgc

SEQ ID NO: 992476 - DNA, 15 bp, Homo sapiens
ctcccgcgcgcgccg

SEQ ID NO: 992477 - DNA, 15 bp, Homo sapiens
cctcccgcgcgcgcc

SEQ ID NO: 992478 - DNA, 15 bp, Homo sapiens
gcctcccgcgcgcgc

SEQ ID NO: 992479 - DNA, 15 bp, Homo sapiens
tgcctcccgcgcgcg

SEQ ID NO: 992480 - DNA, 15 bp, Homo sapiens
ttgcctcccgcgcgc

SEQ ID NO: 992481 - DNA, 15 bp, Homo sapiens
gttgcctcccgcgcg

SEQ ID NO: 992482 - DNA, 15 bp, Homo sapiens
ggttgcctcccgcgc

SEQ ID NO: 992483 - DNA, 15 bp, Homo sapiens
gggttgcctcccgcg

SEQ ID NO: 992484 - DNA, 15 bp, Homo sapiens
tgggttgcctcccgc

SEQ ID NO: 992485 - DNA, 15 bp, Homo sapiens
ctgggttgcctcccg

SEQ ID NO: 992486 - DNA, 15 bp, Homo sapiens
gctgggttgcctccc

SEQ ID NO: 992487 - DNA, 15 bp, Homo sapiens
cgctgggttgcctcc

SEQ ID NO: 992488 - DNA, 15 bp, Homo sapiens
ccgctgggttgcctc

SEQ ID NO: 992489 - DNA, 15 bp, Homo sapiens
cccgctgggttgcct

SEQ ID NO: 992490 - DNA, 15 bp, Homo sapiens
ccccgctgggttgcc

SEQ ID NO: 992491 - DNA, 15 bp, Homo sapiens
gccccgctgggttgc

SEQ ID NO: 992492 - DNA, 15 bp, Homo sapiens
tgccccgctgggttg

SEQ ID NO: 992493 - DNA, 15 bp, Homo sapiens
ttgccccgctgggtt

SEQ ID NO: 992494 - DNA, 15 bp, Homo sapiens
gttgccccgctgggt

SEQ ID NO: 992495 - DNA, 15 bp, Homo sapiens
ggttgccccgctggg

SEQ ID NO: 992496 - DNA, 15 bp, Homo sapiens
gggttgccccgctgg

SEQ ID NO: 992497 - DNA, 15 bp, Homo sapiens
ggggttgccccgctg

SEQ ID NO: 992498 - DNA, 15 bp, Homo sapiens
gggggttgccccgct

SEQ ID NO: 992499 - DNA, 15 bp, Homo sapiens
cgggggttgccccgc

SEQ ID NO: 992500 - DNA, 15 bp, Homo sapiens
gcgggggttgccccg

SEQ ID NO: 992501 - DNA, 15 bp, Homo sapiens
ggcgggggttgcccc

SEQ ID NO: 992502 - DNA, 15 bp, Homo sapiens
aggcgggggttgccc

SEQ ID NO: 992503 - DNA, 15 bp, Homo sapiens
aaggcgggggttgcc

SEQ ID NO: 992504 - DNA, 15 bp, Homo sapiens
aaaggcgggggttgc

SEQ ID NO: 992505 - DNA, 15 bp, Homo sapiens
taaaggcgggggttg

SEQ ID NO: 992506 - DNA, 15 bp, Homo sapiens
gtaaaggcgggggtt

SEQ ID NO: 992507 - DNA, 15 bp, Homo sapiens
ggtaaaggcgggggt

SEQ ID NO: 992508 - DNA, 15 bp, Homo sapiens
aggtaaaggcggggg

SEQ ID NO: 992509 - DNA, 15 bp, Homo sapiens
caggtaaaggcgggg

SEQ ID NO: 992510 - DNA, 15 bp, Homo sapiens
acaggtaaaggcggg

SEQ ID NO: 992511 - DNA, 15 bp, Homo sapiens
gacaggtaaaggcgg

SEQ ID NO: 992512 - DNA, 15 bp, Homo sapiens
ggacaggtaaaggcg

SEQ ID NO: 992513 - DNA, 15 bp, Homo sapiens
cggacaggtaaaggc

SEQ ID NO: 992514 - DNA, 15 bp, Homo sapiens
tcggacaggtaaagg

SEQ ID NO: 992515 - DNA, 15 bp, Homo sapiens
ctcggacaggtaaag

SEQ ID NO: 992516 - DNA, 15 bp, Homo sapiens
gctcggacaggtaaa

SEQ ID NO: 992517 - DNA, 15 bp, Homo sapiens
ggctcggacaggtaa

SEQ ID NO: 992518 - DNA, 15 bp, Homo sapiens
aggctcggacaggta

SEQ ID NO: 992519 - DNA, 15 bp, Homo sapiens
caggctcggacaggt

SEQ ID NO: 992520 - DNA, 15 bp, Homo sapiens
gcaggctcggacagg

SEQ ID NO: 992521 - DNA, 15 bp, Homo sapiens
tgcaggctcggacag

SEQ ID NO: 992522 - DNA, 15 bp, Homo sapiens
gtgcaggctcggaca

SEQ ID NO: 992523 - DNA, 15 bp, Homo sapiens
cgtgcaggctcggac

SEQ ID NO: 992524 - DNA, 15 bp, Homo sapiens
gcgtgcaggctcgga

SEQ ID NO: 992525 - DNA, 15 bp, Homo sapiens
cgcgtgcaggctcgg

SEQ ID NO: 992526 - DNA, 15 bp, Homo sapiens
gcgcgtgcaggctcg

SEQ ID NO: 992527 - DNA, 15 bp, Homo sapiens
ggcgcgtgcaggctc

SEQ ID NO: 992528 - DNA, 15 bp, Homo sapiens
cggcgcgtgcaggct

SEQ ID NO: 992529 - DNA, 15 bp, Homo sapiens
ccggcgcgtgcaggc

SEQ ID NO: 992530 - DNA, 15 bp, Homo sapiens
gccggcgcgtgcagg

SEQ ID NO: 992531 - DNA, 15 bp, Homo sapiens
cgccggcgcgtgcag

SEQ ID NO: 992532 - DNA, 15 bp, Homo sapiens
ccgccggcgcgtgca

SEQ ID NO: 992533 - DNA, 15 bp, Homo sapiens
gccgccggcgcgtgc

SEQ ID NO: 992534 - DNA, 15 bp, Homo sapiens
ggccgccggcgcgtg

SEQ ID NO: 992535 - DNA, 15 bp, Homo sapiens
cggccgccggcgcgt

SEQ ID NO: 992536 - DNA, 15 bp, Homo sapiens
gcggccgccggcgcg

SEQ ID NO: 992537 - DNA, 15 bp, Homo sapiens
cgcggccgccggcgc

SEQ ID NO: 992538 - DNA, 15 bp, Homo sapiens
ccgcggccgccggcg

SEQ ID NO: 992539 - DNA, 15 bp, Homo sapiens
gccgcggccgccggc

SEQ ID NO: 992540 - DNA, 15 bp, Homo sapiens
cgccgcggccgccgg

SEQ ID NO: 992541 - DNA, 15 bp, Homo sapiens
gcgccgcggccgccg

SEQ ID NO: 992542 - DNA, 15 bp, Homo sapiens
ggcgccgcggccgcc

SEQ ID NO: 992543 - DNA, 15 bp, Homo sapiens
cggcgccgcggccgc

SEQ ID NO: 992544 - DNA, 15 bp, Homo sapiens
tcggcgccgcggccg

SEQ ID NO: 992545 - DNA, 15 bp, Homo sapiens
ctcggcgccgcggcc

SEQ ID NO: 992546 - DNA, 15 bp, Homo sapiens
cctcggcgccgcggc

SEQ ID NO: 992547 - DNA, 15 bp, Homo sapiens
ccctcggcgccgcgg

SEQ ID NO: 992548 - DNA, 15 bp, Homo sapiens
cccctcggcgccgcg

SEQ ID NO: 992549 - DNA, 15 bp, Homo sapiens
ccccctcggcgccgc

SEQ ID NO: 992550 - DNA, 15 bp, Homo sapiens
cccccctcggcgccg

SEQ ID NO: 992551 - DNA, 15 bp, Homo sapiens
gcccccctcggcgcc

SEQ ID NO: 992552 - DNA, 15 bp, Homo sapiens
cgcccccctcggcgc

SEQ ID NO: 992553 - DNA, 15 bp, Homo sapiens
ccgcccccctcggcg

SEQ ID NO: 992554 - DNA, 15 bp, Homo sapiens
tccgcccccctcggc

SEQ ID NO: 992555 - DNA, 15 bp, Homo sapiens
ctccgcccccctcgg

SEQ ID NO: 992556 - DNA, 15 bp, Homo sapiens
gctccgcccccctcg

SEQ ID NO: 992557 - DNA, 15 bp, Homo sapiens
agctccgcccccctc

SEQ ID NO: 992558 - DNA, 15 bp, Homo sapiens
aagctccgcccccct

SEQ ID NO: 992559 - DNA, 15 bp, Homo sapiens
caagctccgcccccc

SEQ ID NO: 992560 - DNA, 15 bp, Homo sapiens
ggcaagctccgcccc

SEQ ID NO: 992561 - DNA, 15 bp, Homo sapiens
tggcaagctccgccc

SEQ ID NO: 992562 - DNA, 15 bp, Homo sapiens
ctggcaagctccgcc

SEQ ID NO: 992563 - DNA, 15 bp, Homo sapiens
gctggcaagctccgc

SEQ ID NO: 992564 - DNA, 15 bp, Homo sapiens
ggctggcaagctccg

SEQ ID NO: 992565 - DNA, 15 bp, Homo sapiens
gggctggcaagctcc

SEQ ID NO: 992566 - DNA, 15 bp, Homo sapiens
cgggctggcaagctc

SEQ ID NO: 992567 - DNA, 15 bp, Homo sapiens
gcgggctggcaagct

SEQ ID NO: 992568 - DNA, 15 bp, Homo sapiens
cgcgggctggcaagc

SEQ ID NO: 992569 - DNA, 15 bp, Homo sapiens
gcgcgggctggcaag

SEQ ID NO: 992570 - DNA, 15 bp, Homo sapiens
cgcgcgggctggcaa

SEQ ID NO: 992571 - DNA, 15 bp, Homo sapiens
gcgcgcgggctggca

SEQ ID NO: 992572 - DNA, 15 bp, Homo sapiens
ggcgcgcgggctggc

SEQ ID NO: 992573 - DNA, 15 bp, Homo sapiens
cggcgcgcgggctgg

SEQ ID NO: 992574 - DNA, 15 bp, Homo sapiens
ccggcgcgcgggctg

SEQ ID NO: 992575 - DNA, 15 bp, Homo sapiens
cccggcgcgcgggct

SEQ ID NO: 992576 - DNA, 15 bp, Homo sapiens
ccccggcgcgcgggc

SEQ ID NO: 992577 - DNA, 15 bp, Homo sapiens
gccccggcgcgcggg

SEQ ID NO: 992578 - DNA, 15 bp, Homo sapiens
cgccccggcgcgcgg

SEQ ID NO: 992579 - DNA, 15 bp, Homo sapiens
ccgccccggcgcgcg

SEQ ID NO: 992580 - DNA, 15 bp, Homo sapiens
cccgccccggcgcgc

SEQ ID NO: 992581 - DNA, 15 bp, Homo sapiens
tcccgccccggcgcg

SEQ ID NO: 992582 - DNA, 15 bp, Homo sapiens
gtcccgccccggcgc

SEQ ID NO: 992583 - DNA, 15 bp, Homo sapiens
ggtcccgccccggcg

SEQ ID NO: 992584 - DNA, 15 bp, Homo sapiens
aggtcccgccccggc

SEQ ID NO: 992585 - DNA, 15 bp, Homo sapiens
taggtcccgccccgg

SEQ ID NO: 992586 - DNA, 15 bp, Homo sapiens
ctaggtcccgccccg

SEQ ID NO: 992587 - DNA, 15 bp, Homo sapiens
gctaggtcccgcccc

SEQ ID NO: 992588 - DNA, 15 bp, Homo sapiens
cgctaggtcccgccc

SEQ ID NO: 992589 - DNA, 15 bp, Homo sapiens
ccgctaggtcccgcc

SEQ ID NO: 992590 - DNA, 15 bp, Homo sapiens
cccgctaggtcccgc

SEQ ID NO: 992591 - DNA, 15 bp, Homo sapiens
ccccgctaggtcccg

SEQ ID NO: 992592 - DNA, 15 bp, Homo sapiens
cccccgctaggtccc

SEQ ID NO: 992593 - DNA, 15 bp, Homo sapiens
gcccccgctaggtcc

SEQ ID NO: 992594 - DNA, 15 bp, Homo sapiens
cgcccccgctaggtc

SEQ ID NO: 992595 - DNA, 15 bp, Homo sapiens
ccgcccccgctaggt

SEQ ID NO: 992596 - DNA, 15 bp, Homo sapiens
cccgcccccgctagg

SEQ ID NO: 992597 - DNA, 15 bp, Homo sapiens
ccccgcccccgctag

SEQ ID NO: 992598 - DNA, 15 bp, Homo sapiens
accccgcccccgcta

SEQ ID NO: 992599 - DNA, 15 bp, Homo sapiens
gaccccgcccccgct

SEQ ID NO: 992600 - DNA, 15 bp, Homo sapiens
ggaccccgcccccgc

SEQ ID NO: 992601 - DNA, 15 bp, Homo sapiens
cggaccccgcccccg

SEQ ID NO: 992602 - DNA, 15 bp, Homo sapiens
gcggaccccgccccc

SEQ ID NO: 992603 - DNA, 15 bp, Homo sapiens
tgcggaccccgcccc

SEQ ID NO: 992604 - DNA, 15 bp, Homo sapiens
ctgcggaccccgccc

SEQ ID NO: 992605 - DNA, 15 bp, Homo sapiens
actgcggaccccgcc

SEQ ID NO: 992606 - DNA, 15 bp, Homo sapiens
cactgcggaccccgc

SEQ ID NO: 992607 - DNA, 15 bp, Homo sapiens
tcactgcggaccccg

SEQ ID NO: 992608 - DNA, 15 bp, Homo sapiens
atcactgcggacccc

SEQ ID NO: 992609 - DNA, 15 bp, Homo sapiens
aatcactgcggaccc

SEQ ID NO: 992610 - DNA, 15 bp, Homo sapiens
caatcactgcggacc

SEQ ID NO: 992611 - DNA, 15 bp, Homo sapiens
ccaatcactgcggac

SEQ ID NO: 992612 - DNA, 15 bp, Homo sapiens
cccaatcactgcgga

SEQ ID NO: 992613 - DNA, 15 bp, Homo sapiens
gcccaatcactgcgg

SEQ ID NO: 992614 - DNA, 15 bp, Homo sapiens
cgcccaatcactgcg

SEQ ID NO: 992615 - DNA, 15 bp, Homo sapiens
acgcccaatcactgc

SEQ ID NO: 992616 - DNA, 15 bp, Homo sapiens
tacgcccaatcactg

SEQ ID NO: 992617 - DNA, 15 bp, Homo sapiens
ctacgcccaatcact

SEQ ID NO: 992618 - DNA, 15 bp, Homo sapiens
cctacgcccaatcac

SEQ ID NO: 992619 - DNA, 15 bp, Homo sapiens
tcctacgcccaatca

SEQ ID NO: 992620 - DNA, 15 bp, Homo sapiens
ctcctacgcccaatc

SEQ ID NO: 992621 - DNA, 15 bp, Homo sapiens
gctcctacgcccaat

SEQ ID NO: 992622 - DNA, 15 bp, Homo sapiens
cgctcctacgcccaa

SEQ ID NO: 992623 - DNA, 15 bp, Homo sapiens
ccgctcctacgccca

SEQ ID NO: 992624 - DNA, 15 bp, Homo sapiens
cccgctcctacgccc

SEQ ID NO: 992625 - DNA, 15 bp, Homo sapiens
ccccgctcctacgcc

SEQ ID NO: 992626 - DNA, 15 bp, Homo sapiens
gccccgctcctacgc

SEQ ID NO: 992627 - DNA, 15 bp, Homo sapiens
ggccccgctcctacg

SEQ ID NO: 992628 - DNA, 15 bp, Homo sapiens
cggccccgctcctac

SEQ ID NO: 992629 - DNA, 15 bp, Homo sapiens
gcggccccgctccta

SEQ ID NO: 992630 - DNA, 15 bp, Homo sapiens
ggcggccccgctcct

SEQ ID NO: 992631 - DNA, 15 bp, Homo sapiens
tggcggccccgctcc

SEQ ID NO: 992632 - DNA, 15 bp, Homo sapiens
ctggcggccccgctc

SEQ ID NO: 992633 - DNA, 15 bp, Homo sapiens
gctggcggccccgct

SEQ ID NO: 992634 - DNA, 15 bp, Homo sapiens
ggctggcggccccgc

SEQ ID NO: 992635 - DNA, 15 bp, Homo sapiens
tggctggcggccccg

SEQ ID NO: 992636 - DNA, 15 bp, Homo sapiens
ctggctggcggcccc

SEQ ID NO: 992637 - DNA, 15 bp, Homo sapiens
tctggctggcggccc

SEQ ID NO: 992638 - DNA, 15 bp, Homo sapiens
ctctggctggcggcc

SEQ ID NO: 992639 - DNA, 15 bp, Homo sapiens
gctctggctggcggc

SEQ ID NO: 992640 - DNA, 15 bp, Homo sapiens
agctctggctggcgg

SEQ ID NO: 992641 - DNA, 15 bp, Homo sapiens
cagctctggctggcg

SEQ ID NO: 992642 - DNA, 15 bp, Homo sapiens
ccagctctggctggc

SEQ ID NO: 992643 - DNA, 15 bp, Homo sapiens
cccagctctggctgg

SEQ ID NO: 992644 - DNA, 15 bp, Homo sapiens
gcccagctctggctg

SEQ ID NO: 992645 - DNA, 15 bp, Homo sapiens
agcccagctctggct

SEQ ID NO: 992646 - DNA, 15 bp, Homo sapiens
cagcccagctctggc

SEQ ID NO: 992647 - DNA, 15 bp, Homo sapiens
gcagcccagctctgg

SEQ ID NO: 992648 - DNA, 15 bp, Homo sapiens
tgcagcccagctctg

SEQ ID NO: 992649 - DNA, 15 bp, Homo sapiens
ctgcagcccagctct

SEQ ID NO: 992650 - DNA, 15 bp, Homo sapiens
cctgcagcccagctc

SEQ ID NO: 992651 - DNA, 15 bp, Homo sapiens
ccctgcagcccagct

SEQ ID NO: 992652 - DNA, 15 bp, Homo sapiens
gccctgcagcccagc

SEQ ID NO: 992653 - DNA, 15 bp, Homo sapiens
ggccctgcagcccag

SEQ ID NO: 992654 - DNA, 15 bp, Homo sapiens
cggccctgcagccca

SEQ ID NO: 992655 - DNA, 15 bp, Homo sapiens
gcggccctgcagccc

SEQ ID NO: 992656 - DNA, 15 bp, Homo sapiens
cgcggccctgcagcc

SEQ ID NO: 992657 - DNA, 15 bp, Homo sapiens
gcgcggccctgcagc

SEQ ID NO: 992658 - DNA, 15 bp, Homo sapiens
tgcgcggccctgcag

SEQ ID NO: 992659 - DNA, 15 bp, Homo sapiens
ctgcgcggccctgca

SEQ ID NO: 992660 - DNA, 15 bp, Homo sapiens
cctgcgcggccctgc

SEQ ID NO: 992661 - DNA, 15 bp, Homo sapiens
acctgcgcggccctg

SEQ ID NO: 992662 - DNA, 15 bp, Homo sapiens
aacctgcgcggccct

SEQ ID NO: 992663 - DNA, 15 bp, Homo sapiens
aaacctgcgcggccc

SEQ ID NO: 992664 - DNA, 15 bp, Homo sapiens
gaaacctgcgcggcc

SEQ ID NO: 992665 - DNA, 15 bp, Homo sapiens
tgaaacctgcgcggc

SEQ ID NO: 992666 - DNA, 15 bp, Homo sapiens
gtgaaacctgcgcgg

SEQ ID NO: 992667 - DNA, 15 bp, Homo sapiens
agtgaaacctgcgcg

SEQ ID NO: 992668 - DNA, 15 bp, Homo sapiens
aagtgaaacctgcgc

SEQ ID NO: 992669 - DNA, 15 bp, Homo sapiens
gaagtgaaacctgcg

SEQ ID NO: 992670 - DNA, 15 bp, Homo sapiens
cgaagtgaaacctgc

SEQ ID NO: 992671 - DNA, 15 bp, Homo sapiens
gcgaagtgaaacctg

SEQ ID NO: 992672 - DNA, 15 bp, Homo sapiens
agcgaagtgaaacct

SEQ ID NO: 992673 - DNA, 15 bp, Homo sapiens
gagcgaagtgaaacc

SEQ ID NO: 992674 - DNA, 15 bp, Homo sapiens
ggagcgaagtgaaac

SEQ ID NO: 992675 - DNA, 15 bp, Homo sapiens
cggagcgaagtgaaa

SEQ ID NO: 992676 - DNA, 15 bp, Homo sapiens
gcggagcgaagtgaa

SEQ ID NO: 992677 - DNA, 15 bp, Homo sapiens
cgcggagcgaagtga

SEQ ID NO: 992678 - DNA, 15 bp, Homo sapiens
gcgcggagcgaagtg

SEQ ID NO: 992679 - DNA, 15 bp, Homo sapiens
tgcgcggagcgaagt

SEQ ID NO: 992680 - DNA, 15 bp, Homo sapiens
ctgcgcggagcgaag

SEQ ID NO: 992681 - DNA, 15 bp, Homo sapiens
gctgcgcggagcgaa

SEQ ID NO: 992682 - DNA, 15 bp, Homo sapiens
ggctgcgcggagcga

SEQ ID NO: 992683 - DNA, 15 bp, Homo sapiens
cggctgcgcggagcg

SEQ ID NO: 992684 - DNA, 15 bp, Homo sapiens
gcggctgcgcggagc

SEQ ID NO: 992685 - DNA, 15 bp, Homo sapiens
ggcggctgcgcggag

SEQ ID NO: 992686 - DNA, 15 bp, Homo sapiens
aggcggctgcgcgga

SEQ ID NO: 992687 - DNA, 15 bp, Homo sapiens
caggcggctgcgcgg

SEQ ID NO: 992688 - DNA, 15 bp, Homo sapiens
ccaggcggctgcgcg

SEQ ID NO: 992689 - DNA, 15 bp, Homo sapiens
accaggcggctgcgc

SEQ ID NO: 992690 - DNA, 15 bp, Homo sapiens
gaccaggcggctgcg

SEQ ID NO: 992691 - DNA, 15 bp, Homo sapiens
agaccaggcggctgc

SEQ ID NO: 992692 - DNA, 15 bp, Homo sapiens
cagaccaggcggctg

SEQ ID NO: 992693 - DNA, 15 bp, Homo sapiens
gcagaccaggcggct

SEQ ID NO: 992694 - DNA, 15 bp, Homo sapiens
tgcagaccaggcggc

SEQ ID NO: 992695 - DNA, 15 bp, Homo sapiens
ctgcagaccaggcgg

SEQ ID NO: 992696 - DNA, 15 bp, Homo sapiens
actgcagaccaggcg

SEQ ID NO: 992697 - DNA, 15 bp, Homo sapiens
aactgcagaccaggc

SEQ ID NO: 992698 - DNA, 15 bp, Homo sapiens
aaactgcagaccagg

SEQ ID NO: 992699 - DNA, 15 bp, Homo sapiens
caaactgcagaccag

SEQ ID NO: 992700 - DNA, 15 bp, Homo sapiens
acaaactgcagacca

SEQ ID NO: 992701 - DNA, 15 bp, Homo sapiens
aacaaactgcagacc

SEQ ID NO: 992702 - DNA, 15 bp, Homo sapiens
caacaaactgcagac

SEQ ID NO: 992703 - DNA, 15 bp, Homo sapiens
ccaacaaactgcaga

SEQ ID NO: 992704 - DNA, 15 bp, Homo sapiens
tccaacaaactgcag

SEQ ID NO: 992705 - DNA, 15 bp, Homo sapiens
ctccaacaaactgca

SEQ ID NO: 992706 - DNA, 15 bp, Homo sapiens
gctccaacaaactgc

SEQ ID NO: 992707 - DNA, 15 bp, Homo sapiens
agctccaacaaactg

SEQ ID NO: 992708 - DNA, 15 bp, Homo sapiens
gagctccaacaaact

SEQ ID NO: 992709 - DNA, 15 bp, Homo sapiens
agagctccaacaaac

SEQ ID NO: 992710 - DNA, 15 bp, Homo sapiens
cagagctccaacaaa

SEQ ID NO: 992711 - DNA, 15 bp, Homo sapiens
gcagagctccaacaa

SEQ ID NO: 992712 - DNA, 15 bp, Homo sapiens
cgcagagctccaaca

SEQ ID NO: 992713 - DNA, 15 bp, Homo sapiens
acgcagagctccaac

SEQ ID NO: 992714 - DNA, 15 bp, Homo sapiens
gacgcagagctccaa

SEQ ID NO: 992715 - DNA, 15 bp, Homo sapiens
ggacgcagagctcca

SEQ ID NO: 992716 - DNA, 15 bp, Homo sapiens
tggacgcagagctcc

SEQ ID NO: 992717 - DNA, 15 bp, Homo sapiens
ctggacgcagagctc

SEQ ID NO: 992718 - DNA, 15 bp, Homo sapiens
gctggacgcagagct

SEQ ID NO: 992719 - DNA, 15 bp, Homo sapiens
cgctggacgcagagc

SEQ ID NO: 992720 - DNA, 15 bp, Homo sapiens
gcgctggacgcagag

SEQ ID NO: 992721 - DNA, 15 bp, Homo sapiens
ggcgctggacgcaga

SEQ ID NO: 992722 - DNA, 15 bp, Homo sapiens
cggcgctggacgcag

SEQ ID NO: 992723 - DNA, 15 bp, Homo sapiens
gcggcgctggacgca

SEQ ID NO: 992724 - DNA, 15 bp, Homo sapiens
agcggcgctggacgc

SEQ ID NO: 992725 - DNA, 15 bp, Homo sapiens
cagcggcgctggacg

SEQ ID NO: 992726 - DNA, 15 bp, Homo sapiens
gcagcggcgctggac

SEQ ID NO: 992727 - DNA, 15 bp, Homo sapiens
ggcagcggcgctgga

SEQ ID NO: 992728 - DNA, 15 bp, Homo sapiens
cggcagcggcgctgg

SEQ ID NO: 992729 - DNA, 15 bp, Homo sapiens
gcggcagcggcgctg

SEQ ID NO: 992730 - DNA, 15 bp, Homo sapiens
agcggcagcggcgct

SEQ ID NO: 992731 - DNA, 15 bp, Homo sapiens
cagcggcagcggcgc

SEQ ID NO: 992732 - DNA, 15 bp, Homo sapiens
gcagcggcagcggcg

SEQ ID NO: 992733 - DNA, 15 bp, Homo sapiens
ggcagcggcagcggc

SEQ ID NO: 992734 - DNA, 15 bp, Homo sapiens
cggcagcggcagcgg

SEQ ID NO: 992735 - DNA, 15 bp, Homo sapiens
gcggcagcggcagcg

SEQ ID NO: 992736 - DNA, 15 bp, Homo sapiens
ggcggcagcggcagc

SEQ ID NO: 992737 - DNA, 15 bp, Homo sapiens
cggcggcagcggcag

SEQ ID NO: 992738 - DNA, 15 bp, Homo sapiens
gcggcggcagcggca

SEQ ID NO: 992739 - DNA, 15 bp, Homo sapiens
ggcggcggcagcggc

SEQ ID NO: 992740 - DNA, 15 bp, Homo sapiens
cggcggcggcagcgg

SEQ ID NO: 992741 - DNA, 15 bp, Homo sapiens
gcggcggcggcagcg

SEQ ID NO: 992742 - DNA, 15 bp, Homo sapiens
ggcggcggcggcagc

SEQ ID NO: 992743 - DNA, 15 bp, Homo sapiens
cggcggcggcggcag

SEQ ID NO: 992744 - DNA, 15 bp, Homo sapiens
gcggcggcggcggca

SEQ ID NO: 992745 - DNA, 15 bp, Homo sapiens
tggcggcggcggcgg

SEQ ID NO: 992746 - DNA, 15 bp, Homo sapiens
gtggcggcggcggcg

SEQ ID NO: 992747 - DNA, 15 bp, Homo sapiens
agtggcggcggcggc

SEQ ID NO: 992748 - DNA, 15 bp, Homo sapiens
tagtggcggcggcgg

SEQ ID NO: 992749 - DNA, 15 bp, Homo sapiens
gtagtggcggcggcg

SEQ ID NO: 992750 - DNA, 15 bp, Homo sapiens
ggtagtggcggcggc

SEQ ID NO: 992751 - DNA, 15 bp, Homo sapiens
tggtagtggcggcgg

SEQ ID NO: 992752 - DNA, 15 bp, Homo sapiens
gtggtagtggcggcg

SEQ ID NO: 992753 - DNA, 15 bp, Homo sapiens
ggtggtagtggcggc

SEQ ID NO: 992754 - DNA, 15 bp, Homo sapiens
tggtggtagtggcgg

SEQ ID NO: 992755 - DNA, 15 bp, Homo sapiens
gtggtggtagtggcg

SEQ ID NO: 992756 - DNA, 15 bp, Homo sapiens
agtggtggtagtggc

SEQ ID NO: 992757 - DNA, 15 bp, Homo sapiens
aagtggtggtagtgg

SEQ ID NO: 992758 - DNA, 15 bp, Homo sapiens
caagtggtggtagtg

SEQ ID NO: 992759 - DNA, 15 bp, Homo sapiens
tcaagtggtggtagt

SEQ ID NO: 992760 - DNA, 15 bp, Homo sapiens
atcaagtggtggtag

SEQ ID NO: 992761 - DNA, 15 bp, Homo sapiens
aatcaagtggtggta

SEQ ID NO: 992762 - DNA, 15 bp, Homo sapiens
gaatcaagtggtggt

SEQ ID NO: 992763 - DNA, 15 bp, Homo sapiens
agaatcaagtggtgg

SEQ ID NO: 992764 - DNA, 15 bp, Homo sapiens
aagaatcaagtggtg

SEQ ID NO: 992765 - DNA, 15 bp, Homo sapiens
caagaatcaagtggt

SEQ ID NO: 992766 - DNA, 15 bp, Homo sapiens
gcaagaatcaagtgg

SEQ ID NO: 992767 - DNA, 15 bp, Homo sapiens
tgcaagaatcaagtg

SEQ ID NO: 992768 - DNA, 15 bp, Homo sapiens
ctgcaagaatcaagt

SEQ ID NO: 992769 - DNA, 15 bp, Homo sapiens
gctgcaagaatcaag

SEQ ID NO: 992770 - DNA, 15 bp, Homo sapiens
ctggcatcaattttg

SEQ ID NO: 992771 - DNA, 15 bp, Homo sapiens
tctggcatcaatttt

SEQ ID NO: 992772 - DNA, 15 bp, Homo sapiens
atctggcatcaattt

SEQ ID NO: 992773 - DNA, 15 bp, Homo sapiens
tatctggcatcaatt

SEQ ID NO: 992774 - DNA, 15 bp, Homo sapiens
gtatctggcatcaat

SEQ ID NO: 992775 - DNA, 15 bp, Homo sapiens
ggtatctggcatcaa

SEQ ID NO: 992776 - DNA, 15 bp, Homo sapiens
gggtatctggcatca

SEQ ID NO: 992777 - DNA, 15 bp, Homo sapiens
agggtatctggcatc

SEQ ID NO: 992778 - DNA, 15 bp, Homo sapiens
cagggtatctggcat

SEQ ID NO: 992779 - DNA, 15 bp, Homo sapiens
acagggtatctggca

SEQ ID NO: 992780 - DNA, 15 bp, Homo sapiens
aacagggtatctggc

SEQ ID NO: 992781 - DNA, 15 bp, Homo sapiens
aaacagggtatctgg

SEQ ID NO: 992782 - DNA, 15 bp, Homo sapiens
gaaacagggtatctg

SEQ ID NO: 992783 - DNA, 15 bp, Homo sapiens
tgaaacagggtatct

SEQ ID NO: 992784 - DNA, 15 bp, Homo sapiens
ttgaaacagggtatc

SEQ ID NO: 992785 - DNA, 15 bp, Homo sapiens
gttgaaacagggtat

SEQ ID NO: 992786 - DNA, 15 bp, Homo sapiens
tgttgaaacagggta

SEQ ID NO: 992787 - DNA, 15 bp, Homo sapiens
atgttgaaacagggt

SEQ ID NO: 992788 - DNA, 15 bp, Homo sapiens
aatgttgaaacaggg

SEQ ID NO: 992789 - DNA, 15 bp, Homo sapiens
caatgttgaaacagg

SEQ ID NO: 992790 - DNA, 15 bp, Homo sapiens
tcaatgttgaaacag

SEQ ID NO: 992791 - DNA, 15 bp, Homo sapiens
gtcaatgttgaaaca

SEQ ID NO: 992792 - DNA, 15 bp, Homo sapiens
tgtcaatgttgaaac

SEQ ID NO: 992793 - DNA, 15 bp, Homo sapiens
ctgtcaatgttgaaa

SEQ ID NO: 992794 - DNA, 15 bp, Homo sapiens
gctgtcaatgttgaa

SEQ ID NO: 992795 - DNA, 15 bp, Homo sapiens
agctgtcaatgttga

SEQ ID NO: 992796 - DNA, 15 bp, Homo sapiens
cagctgtcaatgttg

SEQ ID NO: 992797 - DNA, 15 bp, Homo sapiens
tcagctgtcaatgtt

SEQ ID NO: 992798 - DNA, 15 bp, Homo sapiens
atcagctgtcaatgt

SEQ ID NO: 992799 - DNA, 15 bp, Homo sapiens
aatcagctgtcaatg

SEQ ID NO: 992800 - DNA, 15 bp, Homo sapiens
gaatcagctgtcaat

SEQ ID NO: 992801 - DNA, 15 bp, Homo sapiens
tgaatcagctgtcaa

SEQ ID NO: 992802 - DNA, 15 bp, Homo sapiens
ctgaatcagctgtca

SEQ ID NO: 992803 - DNA, 15 bp, Homo sapiens
tctgaatcagctgtc

SEQ ID NO: 992804 - DNA, 15 bp, Homo sapiens
atctgaatcagctgt

SEQ ID NO: 992805 - DNA, 15 bp, Homo sapiens
aatctgaatcagctg

SEQ ID NO: 992806 - DNA, 15 bp, Homo sapiens
aaatctgaatcagct

SEQ ID NO: 992807 - DNA, 15 bp, Homo sapiens
aaaatctgaatcagc

SEQ ID NO: 992808 - DNA, 15 bp, Homo sapiens
caaaatctgaatcag

SEQ ID NO: 992809 - DNA, 15 bp, Homo sapiens
tcaaaatctgaatca

SEQ ID NO: 992810 - DNA, 15 bp, Homo sapiens
ttcaaaatctgaatc

SEQ ID NO: 992811 - DNA, 15 bp, Homo sapiens
tttcaaaatctgaat

SEQ ID NO: 992812 - DNA, 15 bp, Homo sapiens
ttttcaaaatctgaa

SEQ ID NO: 992813 - DNA, 15 bp, Homo sapiens
gttttcaaaatctga

SEQ ID NO: 992814 - DNA, 15 bp, Homo sapiens
tgttttcaaaatctg

SEQ ID NO: 992815 - DNA, 15 bp, Homo sapiens
atgttttcaaaatct

SEQ ID NO: 992816 - DNA, 15 bp, Homo sapiens
aatgttttcaaaatc

SEQ ID NO: 992817 - DNA, 15 bp, Homo sapiens
caatgttttcaaaat

SEQ ID NO: 992818 - DNA, 15 bp, Homo sapiens
acaatgttttcaaaa

SEQ ID NO: 992819 - DNA, 15 bp, Homo sapiens
tacaatgttttcaaa

SEQ ID NO: 992820 - DNA, 15 bp, Homo sapiens
gtacaatgttttcaa

SEQ ID NO: 992821 - DNA, 15 bp, Homo sapiens
tgtacaatgttttca

SEQ ID NO: 992822 - DNA, 15 bp, Homo sapiens
ttgtacaatgttttc

SEQ ID NO: 992823 - DNA, 15 bp, Homo sapiens
cttgtacaatgtttt

SEQ ID NO: 992824 - DNA, 15 bp, Homo sapiens
gcttgtacaatgttt

SEQ ID NO: 992825 - DNA, 15 bp, Homo sapiens
agcttgtacaatgtt

SEQ ID NO: 992826 - DNA, 15 bp, Homo sapiens
cagcttgtacaatgt

SEQ ID NO: 992827 - DNA, 15 bp, Homo sapiens
tcagcttgtacaatg

SEQ ID NO: 992828 - DNA, 15 bp, Homo sapiens
ttcagcttgtacaat

SEQ ID NO: 992829 - DNA, 15 bp, Homo sapiens
tttcagcttgtacaa

SEQ ID NO: 992830 - DNA, 15 bp, Homo sapiens
ttttcagcttgtaca

SEQ ID NO: 992831 - DNA, 15 bp, Homo sapiens
cttttcagcttgtac

SEQ ID NO: 992832 - DNA, 15 bp, Homo sapiens
tcttttcagcttgta

SEQ ID NO: 992833 - DNA, 15 bp, Homo sapiens
ttcttttcagcttgt

SEQ ID NO: 992834 - DNA, 15 bp, Homo sapiens
tttcttttcagcttg

SEQ ID NO: 992835 - DNA, 15 bp, Homo sapiens
gtttcttttcagctt

SEQ ID NO: 992836 - DNA, 15 bp, Homo sapiens
tgtttcttttcagct

SEQ ID NO: 992837 - DNA, 15 bp, Homo sapiens
atgtttcttttcagc

SEQ ID NO: 992838 - DNA, 15 bp, Homo sapiens
gatgtttcttttcag

SEQ ID NO: 992839 - DNA, 15 bp, Homo sapiens
agatgtttcttttca

SEQ ID NO: 992840 - DNA, 15 bp, Homo sapiens
cagatgtttcttttc

SEQ ID NO: 992841 - DNA, 15 bp, Homo sapiens
gcagatgtttctttt

SEQ ID NO: 992842 - DNA, 15 bp, Homo sapiens
tgcagatgtttcttt

SEQ ID NO: 992843 - DNA, 15 bp, Homo sapiens
ctgcagatgtttctt

SEQ ID NO: 992844 - DNA, 15 bp, Homo sapiens
tctgcagatgtttct

SEQ ID NO: 992845 - DNA, 15 bp, Homo sapiens
gtctgcagatgtttc

SEQ ID NO: 992846 - DNA, 15 bp, Homo sapiens
agtctgcagatgttt

SEQ ID NO: 992847 - DNA, 15 bp, Homo sapiens
aagtctgcagatgtt

SEQ ID NO: 992848 - DNA, 15 bp, Homo sapiens
caagtctgcagatgt

SEQ ID NO: 992849 - DNA, 15 bp, Homo sapiens
tcaagtctgcagatg

SEQ ID NO: 992850 - DNA, 15 bp, Homo sapiens
atcaagtctgcagat

SEQ ID NO: 992851 - DNA, 15 bp, Homo sapiens
aatcaagtctgcaga

SEQ ID NO: 992852 - DNA, 15 bp, Homo sapiens
aaatcaagtctgcag

SEQ ID NO: 992853 - DNA, 15 bp, Homo sapiens
caaatcaagtctgca

SEQ ID NO: 992854 - DNA, 15 bp, Homo sapiens
ccaaatcaagtctgc

SEQ ID NO: 992855 - DNA, 15 bp, Homo sapiens
gccaaatcaagtctg

SEQ ID NO: 992856 - DNA, 15 bp, Homo sapiens
ggccaaatcaagtct

SEQ ID NO: 992857 - DNA, 15 bp, Homo sapiens
gggccaaatcaagtc

SEQ ID NO: 992858 - DNA, 15 bp, Homo sapiens
agggccaaatcaagt

SEQ ID NO: 992859 - DNA, 15 bp, Homo sapiens
aagggccaaatcaag

SEQ ID NO: 992860 - DNA, 15 bp, Homo sapiens
caagggccaaatcaa

SEQ ID NO: 992861 - DNA, 15 bp, Homo sapiens
tcaagggccaaatca

SEQ ID NO: 992862 - DNA, 15 bp, Homo sapiens
ttcaagggccaaatc

SEQ ID NO: 992863 - DNA, 15 bp, Homo sapiens
gttcaagggccaaat

SEQ ID NO: 992864 - DNA, 15 bp, Homo sapiens
ggttcaagggccaaa

SEQ ID NO: 992865 - DNA, 15 bp, Homo sapiens
aggttcaagggccaa

SEQ ID NO: 992866 - DNA, 15 bp, Homo sapiens
taggttcaagggcca

SEQ ID NO: 992867 - DNA, 15 bp, Homo sapiens
gtaggttcaagggcc

SEQ ID NO: 992868 - DNA, 15 bp, Homo sapiens
tgtaggttcaagggc

SEQ ID NO: 992869 - DNA, 15 bp, Homo sapiens
ctgtaggttcaaggg

SEQ ID NO: 992870 - DNA, 15 bp, Homo sapiens
gctgtaggttcaagg

SEQ ID NO: 992871 - DNA, 15 bp, Homo sapiens
tgctgtaggttcaag

SEQ ID NO: 992872 - DNA, 15 bp, Homo sapiens
atgctgtaggttcaa

SEQ ID NO: 992873 - DNA, 15 bp, Homo sapiens
catgctgtaggttca

SEQ ID NO: 992874 - DNA, 15 bp, Homo sapiens
acatgctgtaggttc

SEQ ID NO: 992875 - DNA, 15 bp, Homo sapiens
cacatgctgtaggtt

SEQ ID NO: 992876 - DNA, 15 bp, Homo sapiens
tcacatgctgtaggt

SEQ ID NO: 992877 - DNA, 15 bp, Homo sapiens
gtcacatgctgtagg

SEQ ID NO: 992878 - DNA, 15 bp, Homo sapiens
agtcacatgctgtag

SEQ ID NO: 992879 - DNA, 15 bp, Homo sapiens
aagtcacatgctgta

SEQ ID NO: 992880 - DNA, 15 bp, Homo sapiens
aaagtcacatgctgt

SEQ ID NO: 992881 - DNA, 15 bp, Homo sapiens
caaagtcacatgctg

SEQ ID NO: 992882 - DNA, 15 bp, Homo sapiens
ccaaagtcacatgct

SEQ ID NO: 992883 - DNA, 15 bp, Homo sapiens
cccaaagtcacatgc

SEQ ID NO: 992884 - DNA, 15 bp, Homo sapiens
acccaaagtcacatg

SEQ ID NO: 992885 - DNA, 15 bp, Homo sapiens
tacccaaagtcacat

SEQ ID NO: 992886 - DNA, 15 bp, Homo sapiens
gtacccaaagtcaca

SEQ ID NO: 992887 - DNA, 15 bp, Homo sapiens
tgtacccaaagtcac

SEQ ID NO: 992888 - DNA, 15 bp, Homo sapiens
atgtacccaaagtca

SEQ ID NO: 992889 - DNA, 15 bp, Homo sapiens
tatgtacccaaagtc

SEQ ID NO: 992890 - DNA, 15 bp, Homo sapiens
gtatgtacccaaagt

SEQ ID NO: 992891 - DNA, 15 bp, Homo sapiens
agtatgtacccaaag

SEQ ID NO: 992892 - DNA, 15 bp, Homo sapiens
aagtatgtacccaaa

SEQ ID NO: 992893 - DNA, 15 bp, Homo sapiens
aaagtatgtacccaa

SEQ ID NO: 992894 - DNA, 15 bp, Homo sapiens
caaagtatgtaccca

SEQ ID NO: 992895 - DNA, 15 bp, Homo sapiens
ccaaagtatgtaccc

SEQ ID NO: 992896 - DNA, 15 bp, Homo sapiens
cccaaagtatgtacc

SEQ ID NO: 992897 - DNA, 15 bp, Homo sapiens
acccaaagtatgtac

SEQ ID NO: 992898 - DNA, 15 bp, Homo sapiens
tacccaaagtatgta

SEQ ID NO: 992899 - DNA, 15 bp, Homo sapiens
ttacccaaagtatgt

SEQ ID NO: 992900 - DNA, 15 bp, Homo sapiens
gttacccaaagtatg

SEQ ID NO: 992901 - DNA, 15 bp, Homo sapiens
ggttacccaaagtat

SEQ ID NO: 992902 - DNA, 15 bp, Homo sapiens
aggttacccaaagta

SEQ ID NO: 992903 - DNA, 15 bp, Homo sapiens
aaggttacccaaagt

SEQ ID NO: 992904 - DNA, 15 bp, Homo sapiens
caaggttacccaaag

SEQ ID NO: 992905 - DNA, 15 bp, Homo sapiens
ccaaggttacccaaa

SEQ ID NO: 992906 - DNA, 15 bp, Homo sapiens
accaaggttacccaa

SEQ ID NO: 992907 - DNA, 15 bp, Homo sapiens
caccaaggttaccca

SEQ ID NO: 992908 - DNA, 15 bp, Homo sapiens
tcaccaaggttaccc

SEQ ID NO: 992909 - DNA, 15 bp, Homo sapiens
ctcaccaaggttacc

SEQ ID NO: 992910 - DNA, 15 bp, Homo sapiens
cctcaccaaggttac

SEQ ID NO: 992911 - DNA, 15 bp, Homo sapiens
ccctcaccaaggtta

SEQ ID NO: 992912 - DNA, 15 bp, Homo sapiens
cccctcaccaaggtt

SEQ ID NO: 992913 - DNA, 15 bp, Homo sapiens
gcccctcaccaaggt

SEQ ID NO: 992914 - DNA, 15 bp, Homo sapiens
agcccctcaccaagg

SEQ ID NO: 992915 - DNA, 15 bp, Homo sapiens
cagcccctcaccaag

SEQ ID NO: 992916 - DNA, 15 bp, Homo sapiens
tcagcccctcaccaa

SEQ ID NO: 992917 - DNA, 15 bp, Homo sapiens
ctcagcccctcacca

SEQ ID NO: 992918 - DNA, 15 bp, Homo sapiens
actcagcccctcacc

SEQ ID NO: 992919 - DNA, 15 bp, Homo sapiens
gactcagcccctcac

SEQ ID NO: 992920 - DNA, 15 bp, Homo sapiens
agactcagcccctca

SEQ ID NO: 992921 - DNA, 15 bp, Homo sapiens
cagactcagcccctc

SEQ ID NO: 992922 - DNA, 15 bp, Homo sapiens
acagactcagcccct

SEQ ID NO: 992923 - DNA, 15 bp, Homo sapiens
cacagactcagcccc

SEQ ID NO: 992924 - DNA, 15 bp, Homo sapiens
acacagactcagccc

SEQ ID NO: 992925 - DNA, 15 bp, Homo sapiens
aacacagactcagcc

SEQ ID NO: 992926 - DNA, 15 bp, Homo sapiens
caacacagactcagc

SEQ ID NO: 992927 - DNA, 15 bp, Homo sapiens
tcaacacagactcag

SEQ ID NO: 992928 - DNA, 15 bp, Homo sapiens
atcaacacagactca

SEQ ID NO: 992929 - DNA, 15 bp, Homo sapiens
gatcaacacagactc

SEQ ID NO: 992930 - DNA, 15 bp, Homo sapiens
cgatcaacacagact

SEQ ID NO: 992931 - DNA, 15 bp, Homo sapiens
tcgatcaacacagac

SEQ ID NO: 992932 - DNA, 15 bp, Homo sapiens
gtcgatcaacacaga

SEQ ID NO: 992933 - DNA, 15 bp, Homo sapiens
agtcgatcaacacag

SEQ ID NO: 992934 - DNA, 15 bp, Homo sapiens
aagtcgatcaacaca

SEQ ID NO: 992935 - DNA, 15 bp, Homo sapiens
caagtcgatcaacac

SEQ ID NO: 992936 - DNA, 15 bp, Homo sapiens
gcaagtcgatcaaca

SEQ ID NO: 992937 - DNA, 15 bp, Homo sapiens
agcaagtcgatcaac

SEQ ID NO: 992938 - DNA, 15 bp, Homo sapiens
cagcaagtcgatcaa

SEQ ID NO: 992939 - DNA, 15 bp, Homo sapiens
acagcaagtcgatca

SEQ ID NO: 992940 - DNA, 15 bp, Homo sapiens
aacagcaagtcgatc

SEQ ID NO: 992941 - DNA, 15 bp, Homo sapiens
gaacagcaagtcgat

SEQ ID NO: 992942 - DNA, 15 bp, Homo sapiens
ggaacagcaagtcga

SEQ ID NO: 992943 - DNA, 15 bp, Homo sapiens
gggaacagcaagtcg

SEQ ID NO: 992944 - DNA, 15 bp, Homo sapiens
ggggaacagcaagtc

SEQ ID NO: 992945 - DNA, 15 bp, Homo sapiens
tggggaacagcaagt

SEQ ID NO: 992946 - DNA, 15 bp, Homo sapiens
gtggggaacagcaag

SEQ ID NO: 992947 - DNA, 15 bp, Homo sapiens
ggtggggaacagcaa

SEQ ID NO: 992948 - DNA, 15 bp, Homo sapiens
tggtggggaacagca

SEQ ID NO: 992949 - DNA, 15 bp, Homo sapiens
ttggtggggaacagc

SEQ ID NO: 992950 - DNA, 15 bp, Homo sapiens
attggtggggaacag

SEQ ID NO: 992951 - DNA, 15 bp, Homo sapiens
cattggtggggaaca

SEQ ID NO: 992952 - DNA, 15 bp, Homo sapiens
ccattggtggggaac

SEQ ID NO: 992953 - DNA, 15 bp, Homo sapiens
tccattggtggggaa

SEQ ID NO: 992954 - DNA, 15 bp, Homo sapiens
ttccattggtgggga

SEQ ID NO: 992955 - DNA, 15 bp, Homo sapiens
tttccattggtgggg

SEQ ID NO: 992956 - DNA, 15 bp, Homo sapiens
ttttccattggtggg

SEQ ID NO: 992957 - DNA, 15 bp, Homo sapiens
cttttccattggtgg

SEQ ID NO: 992958 - DNA, 15 bp, Homo sapiens
ccttttccattggtg

SEQ ID NO: 992959 - DNA, 15 bp, Homo sapiens
accttttccattggt

SEQ ID NO: 992960 - DNA, 15 bp, Homo sapiens
aaccttttccattgg

SEQ ID NO: 992961 - DNA, 15 bp, Homo sapiens
gaaccttttccattg

SEQ ID NO: 992962 - DNA, 15 bp, Homo sapiens
tgaaccttttccatt

SEQ ID NO: 992963 - DNA, 15 bp, Homo sapiens
atgaaccttttccat

SEQ ID NO: 992964 - DNA, 15 bp, Homo sapiens
catgaaccttttcca

SEQ ID NO: 992965 - DNA, 15 bp, Homo sapiens
acatgaaccttttcc

SEQ ID NO: 992966 - DNA, 15 bp, Homo sapiens
gacatgaaccttttc

SEQ ID NO: 992967 - DNA, 15 bp, Homo sapiens
agacatgaacctttt

SEQ ID NO: 992968 - DNA, 15 bp, Homo sapiens
aagacatgaaccttt

SEQ ID NO: 992969 - DNA, 15 bp, Homo sapiens
caagacatgaacctt

SEQ ID NO: 992970 - DNA, 15 bp, Homo sapiens
tcaagacatgaacct

SEQ ID NO: 992971 - DNA, 15 bp, Homo sapiens
atcaagacatgaacc

SEQ ID NO: 992972 - DNA, 15 bp, Homo sapiens
gatcaagacatgaac

SEQ ID NO: 992973 - DNA, 15 bp, Homo sapiens
tgatcaagacatgaa

SEQ ID NO: 992974 - DNA, 15 bp, Homo sapiens
ctgatcaagacatga

SEQ ID NO: 992975 - DNA, 15 bp, Homo sapiens
actgatcaagacatg

SEQ ID NO: 992976 - DNA, 15 bp, Homo sapiens
tactgatcaagacat

SEQ ID NO: 992977 - DNA, 15 bp, Homo sapiens
ctactgatcaagaca

SEQ ID NO: 992978 - DNA, 15 bp, Homo sapiens
actactgatcaagac

SEQ ID NO: 992979 - DNA, 15 bp, Homo sapiens
gactactgatcaaga

SEQ ID NO: 992980 - DNA, 15 bp, Homo sapiens
tgactactgatcaag

SEQ ID NO: 992981 - DNA, 15 bp, Homo sapiens
ttgactactgatcaa

SEQ ID NO: 992982 - DNA, 15 bp, Homo sapiens
attgactactgatca

SEQ ID NO: 992983 - DNA, 15 bp, Homo sapiens
gattgactactgatc

SEQ ID NO: 992984 - DNA, 15 bp, Homo sapiens
tgattgactactgat

SEQ ID NO: 992985 - DNA, 15 bp, Homo sapiens
gtgattgactactga

SEQ ID NO: 992986 - DNA, 15 bp, Homo sapiens
tgtgattgactactg

SEQ ID NO: 992987 - DNA, 15 bp, Homo sapiens
atgtgattgactact

SEQ ID NO: 992988 - DNA, 15 bp, Homo sapiens
aatgtgattgactac

SEQ ID NO: 992989 - DNA, 15 bp, Homo sapiens
caatgtgattgacta

SEQ ID NO: 992990 - DNA, 15 bp, Homo sapiens
tcaatgtgattgact

SEQ ID NO: 992991 - DNA, 15 bp, Homo sapiens
gtcaatgtgattgac

SEQ ID NO: 992992 - DNA, 15 bp, Homo sapiens
ggtcaatgtgattga

SEQ ID NO: 992993 - DNA, 15 bp, Homo sapiens
tggtcaatgtgattg

SEQ ID NO: 992994 - DNA, 15 bp, Homo sapiens
atggtcaatgtgatt

SEQ ID NO: 992995 - DNA, 15 bp, Homo sapiens
aatggtcaatgtgat

SEQ ID NO: 992996 - DNA, 15 bp, Homo sapiens
aaatggtcaatgtga

SEQ ID NO: 992997 - DNA, 15 bp, Homo sapiens
caaatggtcaatgtg

SEQ ID NO: 992998 - DNA, 15 bp, Homo sapiens
acaaatggtcaatgt

SEQ ID NO: 992999 - DNA, 15 bp, Homo sapiens
gacaaatggtcaatg

SEQ ID NO: 993000 - DNA, 15 bp, Homo sapiens
ggacaaatggtcaat

SEQ ID NO: 993001 - DNA, 15 bp, Homo sapiens
tggacaaatggtcaa

SEQ ID NO: 993002 - DNA, 15 bp, Homo sapiens
ctggacaaatggtca

SEQ ID NO: 993003 - DNA, 15 bp, Homo sapiens
tctggacaaatggtc

SEQ ID NO: 993004 - DNA, 15 bp, Homo sapiens
atctggacaaatggt

SEQ ID NO: 993005 - DNA, 15 bp, Homo sapiens
aatctggacaaatgg

SEQ ID NO: 993006 - DNA, 15 bp, Homo sapiens
taatctggacaaatg

SEQ ID NO: 993007 - DNA, 15 bp, Homo sapiens
ctaatctggacaaat

SEQ ID NO: 993008 - DNA, 15 bp, Homo sapiens
gctaatctggacaaa

SEQ ID NO: 993009 - DNA, 15 bp, Homo sapiens
agctaatctggacaa

SEQ ID NO: 993010 - DNA, 15 bp, Homo sapiens
aagctaatctggaca

SEQ ID NO: 993011 - DNA, 15 bp, Homo sapiens
caagctaatctggac

SEQ ID NO: 993012 - DNA, 15 bp, Homo sapiens
gcaagctaatctgga

SEQ ID NO: 993013 - DNA, 15 bp, Homo sapiens
ggcaagctaatctgg

SEQ ID NO: 993014 - DNA, 15 bp, Homo sapiens
tggcaagctaatctg

SEQ ID NO: 993015 - DNA, 15 bp, Homo sapiens
atggcaagctaatct

SEQ ID NO: 993016 - DNA, 15 bp, Homo sapiens
tatggcaagctaatc

SEQ ID NO: 993017 - DNA, 15 bp, Homo sapiens
gtatggcaagctaat

SEQ ID NO: 993018 - DNA, 15 bp, Homo sapiens
tgtatggcaagctaa

SEQ ID NO: 993019 - DNA, 15 bp, Homo sapiens
atgtatggcaagcta

SEQ ID NO: 993020 - DNA, 15 bp, Homo sapiens
catgtatggcaagct

SEQ ID NO: 993021 - DNA, 15 bp, Homo sapiens
tcatgtatggcaagc

SEQ ID NO: 993022 - DNA, 15 bp, Homo sapiens
ttcatgtatggcaag

SEQ ID NO: 993023 - DNA, 15 bp, Homo sapiens
gttcatgtatggcaa

SEQ ID NO: 993024 - DNA, 15 bp, Homo sapiens
tgttcatgtatggca

SEQ ID NO: 993025 - DNA, 15 bp, Homo sapiens
ttgttcatgtatggc

SEQ ID NO: 993026 - DNA, 15 bp, Homo sapiens
cttgttcatgtatgg

SEQ ID NO: 993027 - DNA, 15 bp, Homo sapiens
tcttgttcatgtatg

SEQ ID NO: 993028 - DNA, 15 bp, Homo sapiens
atcttgttcatgtat

SEQ ID NO: 993029 - DNA, 15 bp, Homo sapiens
tatcttgttcatgta

SEQ ID NO: 993030 - DNA, 15 bp, Homo sapiens
ctatcttgttcatgt

SEQ ID NO: 993031 - DNA, 15 bp, Homo sapiens
tctatcttgttcatg

SEQ ID NO: 993032 - DNA, 15 bp, Homo sapiens
ttctatcttgttcat

SEQ ID NO: 993033 - DNA, 15 bp, Homo sapiens
cttctatcttgttca

SEQ ID NO: 993034 - DNA, 15 bp, Homo sapiens
acttctatcttgttc

SEQ ID NO: 993035 - DNA, 15 bp, Homo sapiens
tacttctatcttgtt

SEQ ID NO: 993036 - DNA, 15 bp, Homo sapiens
ttacttctatcttgt

SEQ ID NO: 993037 - DNA, 15 bp, Homo sapiens
cttacttctatcttg

SEQ ID NO: 993038 - DNA, 15 bp, Homo sapiens
acttacttctatctt

SEQ ID NO: 993039 - DNA, 15 bp, Homo sapiens
aacttacttctatct

SEQ ID NO: 993040 - DNA, 15 bp, Homo sapiens
caacttacttctatc

SEQ ID NO: 993041 - DNA, 15 bp, Homo sapiens
ccaacttacttctat

SEQ ID NO: 993042 - DNA, 15 bp, Homo sapiens
accaacttacttcta

SEQ ID NO: 993043 - DNA, 15 bp, Homo sapiens
taccaacttacttct

SEQ ID NO: 993044 - DNA, 15 bp, Homo sapiens
ctaccaacttacttc

SEQ ID NO: 993045 - DNA, 15 bp, Homo sapiens
tctaccaacttactt

SEQ ID NO: 993046 - DNA, 15 bp, Homo sapiens
ctctaccaacttact

SEQ ID NO: 993047 - DNA, 15 bp, Homo sapiens
actctaccaacttac

SEQ ID NO: 993048 - DNA, 15 bp, Homo sapiens
aactctaccaactta

SEQ ID NO: 993049 - DNA, 15 bp, Homo sapiens
taactctaccaactt

SEQ ID NO: 993050 - DNA, 15 bp, Homo sapiens
ataactctaccaact

SEQ ID NO: 993051 - DNA, 15 bp, Homo sapiens
gataactctaccaac

SEQ ID NO: 993052 - DNA, 15 bp, Homo sapiens
tgataactctaccaa

SEQ ID NO: 993053 - DNA, 15 bp, Homo sapiens
ttgataactctacca

SEQ ID NO: 993054 - DNA, 15 bp, Homo sapiens
attgataactctacc

SEQ ID NO: 993055 - DNA, 15 bp, Homo sapiens
aattgataactctac

SEQ ID NO: 993056 - DNA, 15 bp, Homo sapiens
taattgataactcta

SEQ ID NO: 993057 - DNA, 15 bp, Homo sapiens
ctaattgataactct

SEQ ID NO: 993058 - DNA, 15 bp, Homo sapiens
cctaattgataactc

SEQ ID NO: 993059 - DNA, 15 bp, Homo sapiens
tcctaattgataact

SEQ ID NO: 993060 - DNA, 15 bp, Homo sapiens
ttcctaattgataac

SEQ ID NO: 993061 - DNA, 15 bp, Homo sapiens
tttcctaattgataa

SEQ ID NO: 993062 - DNA, 15 bp, Homo sapiens
gtttcctaattgata

SEQ ID NO: 993063 - DNA, 15 bp, Homo sapiens
ggtttcctaattgat

SEQ ID NO: 993064 - DNA, 15 bp, Homo sapiens
gggtttcctaattga

SEQ ID NO: 993065 - DNA, 15 bp, Homo sapiens
tgggtttcctaattg

SEQ ID NO: 993066 - DNA, 15 bp, Homo sapiens
ctgggtttcctaatt

SEQ ID NO: 993067 - DNA, 15 bp, Homo sapiens
actgggtttcctaat

SEQ ID NO: 993068 - DNA, 15 bp, Homo sapiens
tactgggtttcctaa

SEQ ID NO: 993069 - DNA, 15 bp, Homo sapiens
gtactgggtttccta

SEQ ID NO: 993070 - DNA, 15 bp, Homo sapiens
tgtactgggtttcct

SEQ ID NO: 993071 - DNA, 15 bp, Homo sapiens
ctgtactgggtttcc

SEQ ID NO: 993072 - DNA, 15 bp, Homo sapiens
tctgtactgggtttc

SEQ ID NO: 993073 - DNA, 15 bp, Homo sapiens
ctctgtactgggttt

SEQ ID NO: 993074 - DNA, 15 bp, Homo sapiens
actctgtactgggtt

SEQ ID NO: 993075 - DNA, 15 bp, Homo sapiens
gactctgtactgggt

SEQ ID NO: 993076 - DNA, 15 bp, Homo sapiens
agactctgtactggg

SEQ ID NO: 993077 - DNA, 15 bp, Homo sapiens
tagactctgtactgg

SEQ ID NO: 993078 - DNA, 15 bp, Homo sapiens
atagactctgtactg

SEQ ID NO: 993079 - DNA, 15 bp, Homo sapiens
aatagactctgtact

SEQ ID NO: 993080 - DNA, 15 bp, Homo sapiens
taatagactctgtac

SEQ ID NO: 993081 - DNA, 15 bp, Homo sapiens
ataatagactctgta

SEQ ID NO: 993082 - DNA, 15 bp, Homo sapiens
tataatagactctgt

SEQ ID NO: 993083 - DNA, 15 bp, Homo sapiens
ttataatagactctg

SEQ ID NO: 993084 - DNA, 15 bp, Homo sapiens
attataatagactct

SEQ ID NO: 993085 - DNA, 15 bp, Homo sapiens
aattataatagactc

SEQ ID NO: 993086 - DNA, 15 bp, Homo sapiens
aaattataatagact

SEQ ID NO: 993087 - DNA, 15 bp, Homo sapiens
taaattataatagac

SEQ ID NO: 993088 - DNA, 15 bp, Homo sapiens
ctaaattataataga

SEQ ID NO: 993089 - DNA, 15 bp, Homo sapiens
tctaaattataatag

SEQ ID NO: 993090 - DNA, 15 bp, Homo sapiens
atctaaattataata

SEQ ID NO: 993091 - DNA, 15 bp, Homo sapiens
aatctaaattataat

SEQ ID NO: 993092 - DNA, 15 bp, Homo sapiens
caatctaaattataa

SEQ ID NO: 993093 - DNA, 15 bp, Homo sapiens
acaatctaaattata

SEQ ID NO: 993094 - DNA, 15 bp, Homo sapiens
tacaatctaaattat

SEQ ID NO: 993095 - DNA, 15 bp, Homo sapiens
gtacaatctaaatta

SEQ ID NO: 993096 - DNA, 15 bp, Homo sapiens
ggtacaatctaaatt

SEQ ID NO: 993097 - DNA, 15 bp, Homo sapiens
aggtacaatctaaat

SEQ ID NO: 993098 - DNA, 15 bp, Homo sapiens
gaggtacaatctaaa

SEQ ID NO: 993099 - DNA, 15 bp, Homo sapiens
tgaggtacaatctaa

SEQ ID NO: 993100 - DNA, 15 bp, Homo sapiens
atgaggtacaatcta

SEQ ID NO: 993101 - DNA, 15 bp, Homo sapiens
catgaggtacaatct

SEQ ID NO: 993102 - DNA, 15 bp, Homo sapiens
tcatgaggtacaatc

SEQ ID NO: 993103 - DNA, 15 bp, Homo sapiens
atcatgaggtacaat

SEQ ID NO: 993104 - DNA, 15 bp, Homo sapiens
catcatgaggtacaa

SEQ ID NO: 993105 - DNA, 15 bp, Homo sapiens
tcatcatgaggtaca

SEQ ID NO: 993106 - DNA, 15 bp, Homo sapiens
ttcatcatgaggtac

SEQ ID NO: 993107 - DNA, 15 bp, Homo sapiens
cttcatcatgaggta

SEQ ID NO: 993108 - DNA, 15 bp, Homo sapiens
ccttcatcatgaggt

SEQ ID NO: 993109 - DNA, 15 bp, Homo sapiens
gccttcatcatgagg

SEQ ID NO: 993110 - DNA, 15 bp, Homo sapiens
agccttcatcatgag

SEQ ID NO: 993111 - DNA, 15 bp, Homo sapiens
tagccttcatcatga

SEQ ID NO: 993112 - DNA, 15 bp, Homo sapiens
ttagccttcatcatg

SEQ ID NO: 993113 - DNA, 15 bp, Homo sapiens
gttagccttcatcat

SEQ ID NO: 993114 - DNA, 15 bp, Homo sapiens
agttagccttcatca

SEQ ID NO: 993115 - DNA, 15 bp, Homo sapiens
gagttagccttcatc

SEQ ID NO: 993116 - DNA, 15 bp, Homo sapiens
tgagttagccttcat

SEQ ID NO: 993117 - DNA, 15 bp, Homo sapiens
ttgagttagccttca

SEQ ID NO: 993118 - DNA, 15 bp, Homo sapiens
gttgagttagccttc

SEQ ID NO: 993119 - DNA, 15 bp, Homo sapiens
tgttgagttagcctt

SEQ ID NO: 993120 - DNA, 15 bp, Homo sapiens
ttgttgagttagcct

SEQ ID NO: 993121 - DNA, 15 bp, Homo sapiens
tttgttgagttagcc

SEQ ID NO: 993122 - DNA, 15 bp, Homo sapiens
gtttgttgagttagc

SEQ ID NO: 993123 - DNA, 15 bp, Homo sapiens
ggtttgttgagttag

SEQ ID NO: 993124 - DNA, 15 bp, Homo sapiens
gggtttgttgagtta

SEQ ID NO: 993125 - DNA, 15 bp, Homo sapiens
tgggtttgttgagtt

SEQ ID NO: 993126 - DNA, 15 bp, Homo sapiens
atgggtttgttgagt

SEQ ID NO: 993127 - DNA, 15 bp, Homo sapiens
gatgggtttgttgag

SEQ ID NO: 993128 - DNA, 15 bp, Homo sapiens
tgatgggtttgttga

SEQ ID NO: 993129 - DNA, 15 bp, Homo sapiens
ctgatgggtttgttg

SEQ ID NO: 993130 - DNA, 15 bp, Homo sapiens
tctgatgggtttgtt

SEQ ID NO: 993131 - DNA, 15 bp, Homo sapiens
ttctgatgggtttgt

SEQ ID NO: 993132 - DNA, 15 bp, Homo sapiens
gttctgatgggtttg

SEQ ID NO: 993133 - DNA, 15 bp, Homo sapiens
tgttctgatgggttt

SEQ ID NO: 993134 - DNA, 15 bp, Homo sapiens
ctgttctgatgggtt

SEQ ID NO: 993135 - DNA, 15 bp, Homo sapiens
tctgttctgatgggt

SEQ ID NO: 993136 - DNA, 15 bp, Homo sapiens
gtctgttctgatggg

SEQ ID NO: 993137 - DNA, 15 bp, Homo sapiens
tgtctgttctgatgg

SEQ ID NO: 993138 - DNA, 15 bp, Homo sapiens
gtgtctgttctgatg

SEQ ID NO: 993139 - DNA, 15 bp, Homo sapiens
agtgtctgttctgat

SEQ ID NO: 993140 - DNA, 15 bp, Homo sapiens
cagtgtctgttctga

SEQ ID NO: 993141 - DNA, 15 bp, Homo sapiens
ccagtgtctgttctg

SEQ ID NO: 993142 - DNA, 15 bp, Homo sapiens
tccagtgtctgttct

SEQ ID NO: 993143 - DNA, 15 bp, Homo sapiens
ttccagtgtctgttc

SEQ ID NO: 993144 - DNA, 15 bp, Homo sapiens
gttccagtgtctgtt

SEQ ID NO: 993145 - DNA, 15 bp, Homo sapiens
tgttccagtgtctgt

SEQ ID NO: 993146 - DNA, 15 bp, Homo sapiens
ttgttccagtgtctg

SEQ ID NO: 993147 - DNA, 15 bp, Homo sapiens
tttgttccagtgtct

SEQ ID NO: 993148 - DNA, 15 bp, Homo sapiens
ttttgttccagtgtc

SEQ ID NO: 993149 - DNA, 15 bp, Homo sapiens
attttgttccagtgt

SEQ ID NO: 993150 - DNA, 15 bp, Homo sapiens
cattttgttccagtg

SEQ ID NO: 993151 - DNA, 15 bp, Homo sapiens
tcattttgttccagt

SEQ ID NO: 993152 - DNA, 15 bp, Homo sapiens
gtcattttgttccag

SEQ ID NO: 993153 - DNA, 15 bp, Homo sapiens
tgtcattttgttcca

SEQ ID NO: 993154 - DNA, 15 bp, Homo sapiens
atgtcattttgttcc

SEQ ID NO: 993155 - DNA, 15 bp, Homo sapiens
aatgtcattttgttc

SEQ ID NO: 993156 - DNA, 15 bp, Homo sapiens
aaatgtcattttgtt

SEQ ID NO: 993157 - DNA, 15 bp, Homo sapiens
gaaatgtcattttgt

SEQ ID NO: 993158 - DNA, 15 bp, Homo sapiens
agaaatgtcattttg

SEQ ID NO: 993159 - DNA, 15 bp, Homo sapiens
tagaaatgtcatttt

SEQ ID NO: 993160 - DNA, 15 bp, Homo sapiens
ttagaaatgtcattt

SEQ ID NO: 993161 - DNA, 15 bp, Homo sapiens
tttagaaatgtcatt

SEQ ID NO: 993162 - DNA, 15 bp, Homo sapiens
atttagaaatgtcat

SEQ ID NO: 993163 - DNA, 15 bp, Homo sapiens
tatttagaaatgtca

SEQ ID NO: 993164 - DNA, 15 bp, Homo sapiens
gtatttagaaatgtc

SEQ ID NO: 993165 - DNA, 15 bp, Homo sapiens
ggtatttagaaatgt

SEQ ID NO: 993166 - DNA, 15 bp, Homo sapiens
tggtatttagaaatg

SEQ ID NO: 993167 - DNA, 15 bp, Homo sapiens
atggtatttagaaat

SEQ ID NO: 993168 - DNA, 15 bp, Homo sapiens
gatggtatttagaaa

SEQ ID NO: 993169 - DNA, 15 bp, Homo sapiens
ggatggtatttagaa

SEQ ID NO: 993170 - DNA, 15 bp, Homo sapiens
tggatggtatttaga

SEQ ID NO: 993171 - DNA, 15 bp, Homo sapiens
ctggatggtatttag

SEQ ID NO: 993172 - DNA, 15 bp, Homo sapiens
gctggatggtattta

SEQ ID NO: 993173 - DNA, 15 bp, Homo sapiens
agctggatggtattt

SEQ ID NO: 993174 - DNA, 15 bp, Homo sapiens
gagctggatggtatt

SEQ ID NO: 993175 - DNA, 15 bp, Homo sapiens
agagctggatggtat

SEQ ID NO: 993176 - DNA, 15 bp, Homo sapiens
cagagctggatggta

SEQ ID NO: 993177 - DNA, 15 bp, Homo sapiens
acagagctggatggt

SEQ ID NO: 993178 - DNA, 15 bp, Homo sapiens
gacagagctggatgg

SEQ ID NO: 993179 - DNA, 15 bp, Homo sapiens
agacagagctggatg

SEQ ID NO: 993180 - DNA, 15 bp, Homo sapiens
aagacagagctggat

SEQ ID NO: 993181 - DNA, 15 bp, Homo sapiens
gaagacagagctgga

SEQ ID NO: 993182 - DNA, 15 bp, Homo sapiens
tgaagacagagctgg

SEQ ID NO: 993183 - DNA, 15 bp, Homo sapiens
atgaagacagagctg

SEQ ID NO: 993184 - DNA, 15 bp, Homo sapiens
tatgaagacagagct

SEQ ID NO: 993185 - DNA, 15 bp, Homo sapiens
ctatgaagacagagc

SEQ ID NO: 993186 - DNA, 15 bp, Homo sapiens
cctatgaagacagag

SEQ ID NO: 993187 - DNA, 15 bp, Homo sapiens
gcctatgaagacaga

SEQ ID NO: 993188 - DNA, 15 bp, Homo sapiens
agcctatgaagacag

SEQ ID NO: 993189 - DNA, 15 bp, Homo sapiens
aagcctatgaagaca

SEQ ID NO: 993190 - DNA, 15 bp, Homo sapiens
gaagcctatgaagac

SEQ ID NO: 993191 - DNA, 15 bp, Homo sapiens
tgaagcctatgaaga

SEQ ID NO: 993192 - DNA, 15 bp, Homo sapiens
ctgaagcctatgaag

SEQ ID NO: 993193 - DNA, 15 bp, Homo sapiens
actgaagcctatgaa

SEQ ID NO: 993194 - DNA, 15 bp, Homo sapiens
cactgaagcctatga

SEQ ID NO: 993195 - DNA, 15 bp, Homo sapiens
tcactgaagcctatg

SEQ ID NO: 993196 - DNA, 15 bp, Homo sapiens
ctcactgaagcctat

SEQ ID NO: 993197 - DNA, 15 bp, Homo sapiens
cctcactgaagccta

SEQ ID NO: 993198 - DNA, 15 bp, Homo sapiens
acctcactgaagcct

SEQ ID NO: 993199 - DNA, 15 bp, Homo sapiens
tacctcactgaagcc

SEQ ID NO: 993200 - DNA, 15 bp, Homo sapiens
ttacctcactgaagc

SEQ ID NO: 993201 - DNA, 15 bp, Homo sapiens
tttacctcactgaag

SEQ ID NO: 993202 - DNA, 15 bp, Homo sapiens
atttacctcactgaa

SEQ ID NO: 993203 - DNA, 15 bp, Homo sapiens
gatttacctcactga

SEQ ID NO: 993204 - DNA, 15 bp, Homo sapiens
tgatttacctcactg

SEQ ID NO: 993205 - DNA, 15 bp, Homo sapiens
ctgatttacctcact

SEQ ID NO: 993206 - DNA, 15 bp, Homo sapiens
cctgatttacctcac

SEQ ID NO: 993207 - DNA, 15 bp, Homo sapiens
gcctgatttacctca

SEQ ID NO: 993208 - DNA, 15 bp, Homo sapiens
tgcctgatttacctc

SEQ ID NO: 993209 - DNA, 15 bp, Homo sapiens
ctgcctgatttacct

SEQ ID NO: 993210 - DNA, 15 bp, Homo sapiens
cctgcctgatttacc

SEQ ID NO: 993211 - DNA, 15 bp, Homo sapiens
gcctgcctgatttac

SEQ ID NO: 993212 - DNA, 15 bp, Homo sapiens
ggcctgcctgattta

SEQ ID NO: 993213 - DNA, 15 bp, Homo sapiens
aggcctgcctgattt

SEQ ID NO: 993214 - DNA, 15 bp, Homo sapiens
aaggcctgcctgatt

SEQ ID NO: 993215 - DNA, 15 bp, Homo sapiens
aaaggcctgcctgat

SEQ ID NO: 993216 - DNA, 15 bp, Homo sapiens
caaaggcctgcctga

SEQ ID NO: 993217 - DNA, 15 bp, Homo sapiens
gcaaaggcctgcctg

SEQ ID NO: 993218 - DNA, 15 bp, Homo sapiens
ggcaaaggcctgcct

SEQ ID NO: 993219 - DNA, 15 bp, Homo sapiens
gggcaaaggcctgcc

SEQ ID NO: 993220 - DNA, 15 bp, Homo sapiens
tgggcaaaggcctgc

SEQ ID NO: 993221 - DNA, 15 bp, Homo sapiens
atgggcaaaggcctg

SEQ ID NO: 993222 - DNA, 15 bp, Homo sapiens
catgggcaaaggcct

SEQ ID NO: 993223 - DNA, 15 bp, Homo sapiens
acatgggcaaaggcc

SEQ ID NO: 993224 - DNA, 15 bp, Homo sapiens
aacatgggcaaaggc

SEQ ID NO: 993225 - DNA, 15 bp, Homo sapiens
taacatgggcaaagg

SEQ ID NO: 993226 - DNA, 15 bp, Homo sapiens
ataacatgggcaaag

SEQ ID NO: 993227 - DNA, 15 bp, Homo sapiens
tataacatgggcaaa

SEQ ID NO: 993228 - DNA, 15 bp, Homo sapiens
ctataacatgggcaa

SEQ ID NO: 993229 - DNA, 15 bp, Homo sapiens
tctataacatgggca

SEQ ID NO: 993230 - DNA, 15 bp, Homo sapiens
ttctataacatgggc

SEQ ID NO: 993231 - DNA, 15 bp, Homo sapiens
attctataacatggg

SEQ ID NO: 993232 - DNA, 15 bp, Homo sapiens
aattctataacatgg

SEQ ID NO: 993233 - DNA, 15 bp, Homo sapiens
caattctataacatg

SEQ ID NO: 993234 - DNA, 15 bp, Homo sapiens
ccaattctataacat

SEQ ID NO: 993235 - DNA, 15 bp, Homo sapiens
tccaattctataaca

SEQ ID NO: 993236 - DNA, 15 bp, Homo sapiens
ttccaattctataac

SEQ ID NO: 993237 - DNA, 15 bp, Homo sapiens
tttccaattctataa

SEQ ID NO: 993238 - DNA, 15 bp, Homo sapiens
ctttccaattctata

SEQ ID NO: 993239 - DNA, 15 bp, Homo sapiens
tctttccaattctat

SEQ ID NO: 993240 - DNA, 15 bp, Homo sapiens
ttctttccaattcta

SEQ ID NO: 993241 - DNA, 15 bp, Homo sapiens
gttctttccaattct

SEQ ID NO: 993242 - DNA, 15 bp, Homo sapiens
ggttctttccaattc

SEQ ID NO: 993243 - DNA, 15 bp, Homo sapiens
aggttctttccaatt

SEQ ID NO: 993244 - DNA, 15 bp, Homo sapiens
gaggttctttccaat

SEQ ID NO: 993245 - DNA, 15 bp, Homo sapiens
tgaggttctttccaa

SEQ ID NO: 993246 - DNA, 15 bp, Homo sapiens
ctgaggttctttcca

SEQ ID NO: 993247 - DNA, 15 bp, Homo sapiens
tctgaggttctttcc

SEQ ID NO: 993248 - DNA, 15 bp, Homo sapiens
ctctgaggttctttc

SEQ ID NO: 993249 - DNA, 15 bp, Homo sapiens
actctgaggttcttt

SEQ ID NO: 993250 - DNA, 15 bp, Homo sapiens
cactctgaggttctt

SEQ ID NO: 993251 - DNA, 15 bp, Homo sapiens
ccactctgaggttct

SEQ ID NO: 993252 - DNA, 15 bp, Homo sapiens
accactctgaggttc

SEQ ID NO: 993253 - DNA, 15 bp, Homo sapiens
caccactctgaggtt

SEQ ID NO: 993254 - DNA, 15 bp, Homo sapiens
ccaccactctgaggt

SEQ ID NO: 993255 - DNA, 15 bp, Homo sapiens
accaccactctgagg

SEQ ID NO: 993256 - DNA, 15 bp, Homo sapiens
gaccaccactctgag

SEQ ID NO: 993257 - DNA, 15 bp, Homo sapiens
tgaccaccactctga

SEQ ID NO: 993258 - DNA, 15 bp, Homo sapiens
gtgaccaccactctg

SEQ ID NO: 993259 - DNA, 15 bp, Homo sapiens
agtgaccaccactct

SEQ ID NO: 993260 - DNA, 15 bp, Homo sapiens
aagtgaccaccactc

SEQ ID NO: 993261 - DNA, 15 bp, Homo sapiens
caagtgaccaccact

SEQ ID NO: 993262 - DNA, 15 bp, Homo sapiens
acaagtgaccaccac

SEQ ID NO: 993263 - DNA, 15 bp, Homo sapiens
gacaagtgaccacca

SEQ ID NO: 993264 - DNA, 15 bp, Homo sapiens
tgacaagtgaccacc

SEQ ID NO: 993265 - DNA, 15 bp, Homo sapiens
ctgacaagtgaccac

SEQ ID NO: 993266 - DNA, 15 bp, Homo sapiens
tctgacaagtgacca

SEQ ID NO: 993267 - DNA, 15 bp, Homo sapiens
ctctgacaagtgacc

SEQ ID NO: 993268 - DNA, 15 bp, Homo sapiens
cctctgacaagtgac

SEQ ID NO: 993269 - DNA, 15 bp, Homo sapiens
acctctgacaagtga

SEQ ID NO: 993270 - DNA, 15 bp, Homo sapiens
aacctctgacaagtg

SEQ ID NO: 993271 - DNA, 15 bp, Homo sapiens
caacctctgacaagt

SEQ ID NO: 993272 - DNA, 15 bp, Homo sapiens
ccaacctctgacaag

SEQ ID NO: 993273 - DNA, 15 bp, Homo sapiens
cccaacctctgacaa

SEQ ID NO: 993274 - DNA, 15 bp, Homo sapiens
gcccaacctctgaca

SEQ ID NO: 993275 - DNA, 15 bp, Homo sapiens
tgcccaacctctgac

SEQ ID NO: 993276 - DNA, 15 bp, Homo sapiens
gtgcccaacctctga

SEQ ID NO: 993277 - DNA, 15 bp, Homo sapiens
tgtgcccaacctctg

SEQ ID NO: 993278 - DNA, 15 bp, Homo sapiens
gtgtgcccaacctct

SEQ ID NO: 993279 - DNA, 15 bp, Homo sapiens
ggtgtgcccaacctc

SEQ ID NO: 993280 - DNA, 15 bp, Homo sapiens
aggtgtgcccaacct

SEQ ID NO: 993281 - DNA, 15 bp, Homo sapiens
caggtgtgcccaacc

SEQ ID NO: 993282 - DNA, 15 bp, Homo sapiens
acaggtgtgcccaac

SEQ ID NO: 993283 - DNA, 15 bp, Homo sapiens
cacaggtgtgcccaa

SEQ ID NO: 993284 - DNA, 15 bp, Homo sapiens
tcacaggtgtgccca

SEQ ID NO: 993285 - DNA, 15 bp, Homo sapiens
ctcacaggtgtgccc

SEQ ID NO: 993286 - DNA, 15 bp, Homo sapiens
cctcacaggtgtgcc

SEQ ID NO: 993287 - DNA, 15 bp, Homo sapiens
acctcacaggtgtgc

SEQ ID NO: 993288 - DNA, 15 bp, Homo sapiens
cacctcacaggtgtg

SEQ ID NO: 993289 - DNA, 15 bp, Homo sapiens
ccacctcacaggtgt

SEQ ID NO: 993290 - DNA, 15 bp, Homo sapiens
accacctcacaggtg

SEQ ID NO: 993291 - DNA, 15 bp, Homo sapiens
caccacctcacaggt

SEQ ID NO: 993292 - DNA, 15 bp, Homo sapiens
ccaccacctcacagg

SEQ ID NO: 993293 - DNA, 15 bp, Homo sapiens
cccaccacctcacag

SEQ ID NO: 993294 - DNA, 15 bp, Homo sapiens
ccccaccacctcaca

SEQ ID NO: 993295 - DNA, 15 bp, Homo sapiens
tccccaccacctcac

SEQ ID NO: 993296 - DNA, 15 bp, Homo sapiens
ctccccaccacctca

SEQ ID NO: 993297 - DNA, 15 bp, Homo sapiens
tctccccaccacctc

SEQ ID NO: 993298 - DNA, 15 bp, Homo sapiens
ttctccccaccacct

SEQ ID NO: 993299 - DNA, 15 bp, Homo sapiens
tttctccccaccacc

SEQ ID NO: 993300 - DNA, 15 bp, Homo sapiens
atttctccccaccac

SEQ ID NO: 993301 - DNA, 15 bp, Homo sapiens
catttctccccacca

SEQ ID NO: 993302 - DNA, 15 bp, Homo sapiens
tcatttctccccacc

SEQ ID NO: 993303 - DNA, 15 bp, Homo sapiens
gtcatttctccccac

SEQ ID NO: 993304 - DNA, 15 bp, Homo sapiens
tgtcatttctcccca

SEQ ID NO: 993305 - DNA, 15 bp, Homo sapiens
ctgtcatttctcccc

SEQ ID NO: 993306 - DNA, 15 bp, Homo sapiens
tctgtcatttctccc

SEQ ID NO: 993307 - DNA, 15 bp, Homo sapiens
gtctgtcatttctcc

SEQ ID NO: 993308 - DNA, 15 bp, Homo sapiens
tgtctgtcatttctc

SEQ ID NO: 993309 - DNA, 15 bp, Homo sapiens
atgtctgtcatttct

SEQ ID NO: 993310 - DNA, 15 bp, Homo sapiens
tacactttaatttcc

SEQ ID NO: 993311 - DNA, 15 bp, Homo sapiens
ctacactttaatttc

SEQ ID NO: 993312 - DNA, 15 bp, Homo sapiens
actacactttaattt

SEQ ID NO: 993313 - DNA, 15 bp, Homo sapiens
gactacactttaatt

SEQ ID NO: 993314 - DNA, 15 bp, Homo sapiens
tgactacactttaat

SEQ ID NO: 993315 - DNA, 15 bp, Homo sapiens
ctgactacactttaa

SEQ ID NO: 993316 - DNA, 15 bp, Homo sapiens
actgactacacttta

SEQ ID NO: 993317 - DNA, 15 bp, Homo sapiens
tactgactacacttt

SEQ ID NO: 993318 - DNA, 15 bp, Homo sapiens
gtactgactacactt

SEQ ID NO: 993319 - DNA, 15 bp, Homo sapiens
tgtactgactacact

SEQ ID NO: 993320 - DNA, 15 bp, Homo sapiens
gtgtactgactacac

SEQ ID NO: 993321 - DNA, 15 bp, Homo sapiens
agtgtactgactaca

SEQ ID NO: 993322 - DNA, 15 bp, Homo sapiens
tagtgtactgactac

SEQ ID NO: 993323 - DNA, 15 bp, Homo sapiens
ttagtgtactgacta

SEQ ID NO: 993324 - DNA, 15 bp, Homo sapiens
tttagtgtactgact

SEQ ID NO: 993325 - DNA, 15 bp, Homo sapiens
ctttagtgtactgac

SEQ ID NO: 993326 - DNA, 15 bp, Homo sapiens
actttagtgtactga

SEQ ID NO: 993327 - DNA, 15 bp, Homo sapiens
cactttagtgtactg

SEQ ID NO: 993328 - DNA, 15 bp, Homo sapiens
acactttagtgtact

SEQ ID NO: 993329 - DNA, 15 bp, Homo sapiens
tacactttagtgtac

SEQ ID NO: 993330 - DNA, 15 bp, Homo sapiens
ctacactttagtgta

SEQ ID NO: 993331 - DNA, 15 bp, Homo sapiens
actacactttagtgt

SEQ ID NO: 993332 - DNA, 15 bp, Homo sapiens
gactacactttagtg

SEQ ID NO: 993333 - DNA, 15 bp, Homo sapiens
tgactacactttagt

SEQ ID NO: 993334 - DNA, 15 bp, Homo sapiens
ctgactacactttag

SEQ ID NO: 993335 - DNA, 15 bp, Homo sapiens
ttgtactgactacac

SEQ ID NO: 993336 - DNA, 15 bp, Homo sapiens
attgtactgactaca

SEQ ID NO: 993337 - DNA, 15 bp, Homo sapiens
aattgtactgactac

SEQ ID NO: 993338 - DNA, 15 bp, Homo sapiens
caattgtactgacta

SEQ ID NO: 993339 - DNA, 15 bp, Homo sapiens
ccaattgtactgact

SEQ ID NO: 993340 - DNA, 15 bp, Homo sapiens
tccaattgtactgac

SEQ ID NO: 993341 - DNA, 15 bp, Homo sapiens
ttccaattgtactga

SEQ ID NO: 993342 - DNA, 15 bp, Homo sapiens
tttccaattgtactg

SEQ ID NO: 993343 - DNA, 15 bp, Homo sapiens
atttccaattgtact

SEQ ID NO: 993344 - DNA, 15 bp, Homo sapiens
tatttccaattgtac

SEQ ID NO: 993345 - DNA, 15 bp, Homo sapiens
ttatttccaattgta

SEQ ID NO: 993346 - DNA, 15 bp, Homo sapiens
cttatttccaattgt

SEQ ID NO: 993347 - DNA, 15 bp, Homo sapiens
tcttatttccaattg

SEQ ID NO: 993348 - DNA, 15 bp, Homo sapiens
ctcttatttccaatt

SEQ ID NO: 993349 - DNA, 15 bp, Homo sapiens
actcttatttccaat

SEQ ID NO: 993350 - DNA, 15 bp, Homo sapiens
aactcttatttccaa

SEQ ID NO: 993351 - DNA, 15 bp, Homo sapiens
caactcttatttcca

SEQ ID NO: 993352 - DNA, 15 bp, Homo sapiens
tcaactcttatttcc

SEQ ID NO: 993353 - DNA, 15 bp, Homo sapiens
ctcaactcttatttc

SEQ ID NO: 993354 - DNA, 15 bp, Homo sapiens
tctcaactcttattt

SEQ ID NO: 993355 - DNA, 15 bp, Homo sapiens
ttctcaactcttatt

SEQ ID NO: 993356 - DNA, 15 bp, Homo sapiens
tttctcaactcttat

SEQ ID NO: 993357 - DNA, 15 bp, Homo sapiens
ttttctcaactctta

SEQ ID NO: 993358 - DNA, 15 bp, Homo sapiens
cttttctcaactctt

SEQ ID NO: 993359 - DNA, 15 bp, Homo sapiens
acttttctcaactct

SEQ ID NO: 993360 - DNA, 15 bp, Homo sapiens
gacttttctcaactc

SEQ ID NO: 993361 - DNA, 15 bp, Homo sapiens
tgacttttctcaact

SEQ ID NO: 993362 - DNA, 15 bp, Homo sapiens
ctgacttttctcaac

SEQ ID NO: 993363 - DNA, 15 bp, Homo sapiens
cctgacttttctcaa

SEQ ID NO: 993364 - DNA, 15 bp, Homo sapiens
tcctgacttttctca

SEQ ID NO: 993365 - DNA, 15 bp, Homo sapiens
atcctgacttttctc

SEQ ID NO: 993366 - DNA, 15 bp, Homo sapiens
tatcctgacttttct

SEQ ID NO: 993367 - DNA, 15 bp, Homo sapiens
atatcctgacttttc

SEQ ID NO: 993368 - DNA, 15 bp, Homo sapiens
catatcctgactttt

SEQ ID NO: 993369 - DNA, 15 bp, Homo sapiens
ccatatcctgacttt

SEQ ID NO: 993370 - DNA, 15 bp, Homo sapiens
tccatatcctgactt

SEQ ID NO: 993371 - DNA, 15 bp, Homo sapiens
ctccatatcctgact

SEQ ID NO: 993372 - DNA, 15 bp, Homo sapiens
cctccatatcctgac

SEQ ID NO: 993373 - DNA, 15 bp, Homo sapiens
tcctccatatcctga

SEQ ID NO: 993374 - DNA, 15 bp, Homo sapiens
ttcctccatatcctg

SEQ ID NO: 993375 - DNA, 15 bp, Homo sapiens
attcctccatatcct

SEQ ID NO: 993376 - DNA, 15 bp, Homo sapiens
cattcctccatatcc

SEQ ID NO: 993377 - DNA, 15 bp, Homo sapiens
gcattcctccatatc

SEQ ID NO: 993378 - DNA, 15 bp, Homo sapiens
agcattcctccatat

SEQ ID NO: 993379 - DNA, 15 bp, Homo sapiens
gagcattcctccata

SEQ ID NO: 993380 - DNA, 15 bp, Homo sapiens
ggagcattcctccat

SEQ ID NO: 993381 - DNA, 15 bp, Homo sapiens
gggagcattcctcca

SEQ ID NO: 993382 - DNA, 15 bp, Homo sapiens
agggagcattcctcc

SEQ ID NO: 993383 - DNA, 15 bp, Homo sapiens
tagggagcattcctc

SEQ ID NO: 993384 - DNA, 15 bp, Homo sapiens
ctagggagcattcct

SEQ ID NO: 993385 - DNA, 15 bp, Homo sapiens
actagggagcattcc

SEQ ID NO: 993386 - DNA, 15 bp, Homo sapiens
cactagggagcattc

SEQ ID NO: 993387 - DNA, 15 bp, Homo sapiens
acactagggagcatt

SEQ ID NO: 993388 - DNA, 15 bp, Homo sapiens
gacactagggagcat

SEQ ID NO: 993389 - DNA, 15 bp, Homo sapiens
tgacactagggagca

SEQ ID NO: 993390 - DNA, 15 bp, Homo sapiens
atgacactagggagc

SEQ ID NO: 993391 - DNA, 15 bp, Homo sapiens
catgacactagggag

SEQ ID NO: 993392 - DNA, 15 bp, Homo sapiens
acatgacactaggga

SEQ ID NO: 993393 - DNA, 15 bp, Homo sapiens
aacatgacactaggg

SEQ ID NO: 993394 - DNA, 15 bp, Homo sapiens
taacatgacactagg

SEQ ID NO: 993395 - DNA, 15 bp, Homo sapiens
ctaacatgacactag

SEQ ID NO: 993396 - DNA, 15 bp, Homo sapiens
actaacatgacacta

SEQ ID NO: 993397 - DNA, 15 bp, Homo sapiens
tactaacatgacact

SEQ ID NO: 993398 - DNA, 15 bp, Homo sapiens
ttactaacatgacac

SEQ ID NO: 993399 - DNA, 15 bp, Homo sapiens
tttactaacatgaca

SEQ ID NO: 993400 - DNA, 15 bp, Homo sapiens
atttactaacatgac

SEQ ID NO: 993401 - DNA, 15 bp, Homo sapiens
catttactaacatga

SEQ ID NO: 993402 - DNA, 15 bp, Homo sapiens
acatttactaacatg

SEQ ID NO: 993403 - DNA, 15 bp, Homo sapiens
gacatttactaacat

SEQ ID NO: 993404 - DNA, 15 bp, Homo sapiens
agacatttactaaca

SEQ ID NO: 993405 - DNA, 15 bp, Homo sapiens
aagacatttactaac

SEQ ID NO: 993406 - DNA, 15 bp, Homo sapiens
taagacatttactaa

SEQ ID NO: 993407 - DNA, 15 bp, Homo sapiens
ttaagacatttacta

SEQ ID NO: 993408 - DNA, 15 bp, Homo sapiens
tttaagacatttact

SEQ ID NO: 993409 - DNA, 15 bp, Homo sapiens
atttaagacatttac

SEQ ID NO: 993410 - DNA, 15 bp, Homo sapiens
aatttaagacattta

SEQ ID NO: 993411 - DNA, 15 bp, Homo sapiens
aaatttaagacattt

SEQ ID NO: 993412 - DNA, 15 bp, Homo sapiens
aaaatttaagacatt

SEQ ID NO: 993413 - DNA, 15 bp, Homo sapiens
taaaatttaagacat

SEQ ID NO: 993414 - DNA, 15 bp, Homo sapiens
ataaaatttaagaca

SEQ ID NO: 993415 - DNA, 15 bp, Homo sapiens
tataaaatttaagac

SEQ ID NO: 993416 - DNA, 15 bp, Homo sapiens
gtataaaatttaaga

SEQ ID NO: 993417 - DNA, 15 bp, Homo sapiens
agtataaaatttaag

SEQ ID NO: 993418 - DNA, 15 bp, Homo sapiens
aagtataaaatttaa

SEQ ID NO: 993419 - DNA, 15 bp, Homo sapiens
caagtataaaattta

SEQ ID NO: 993420 - DNA, 15 bp, Homo sapiens
acaagtataaaattt

SEQ ID NO: 993421 - DNA, 15 bp, Homo sapiens
aacaagtataaaatt

SEQ ID NO: 993422 - DNA, 15 bp, Homo sapiens
gaacaagtataaaat

SEQ ID NO: 993423 - DNA, 15 bp, Homo sapiens
ggaacaagtataaaa

SEQ ID NO: 993424 - DNA, 15 bp, Homo sapiens
gggaacaagtataaa

SEQ ID NO: 993425 - DNA, 15 bp, Homo sapiens
agggaacaagtataa

SEQ ID NO: 993426 - DNA, 15 bp, Homo sapiens
cagggaacaagtata

SEQ ID NO: 993427 - DNA, 15 bp, Homo sapiens
ccagggaacaagtat

SEQ ID NO: 993428 - DNA, 15 bp, Homo sapiens
gccagggaacaagta

SEQ ID NO: 993429 - DNA, 15 bp, Homo sapiens
tgccagggaacaagt

SEQ ID NO: 993430 - DNA, 15 bp, Homo sapiens
gtgccagggaacaag

SEQ ID NO: 993431 - DNA, 15 bp, Homo sapiens
tgtgccagggaacaa

SEQ ID NO: 993432 - DNA, 15 bp, Homo sapiens
atgtgccagggaaca

SEQ ID NO: 993433 - DNA, 15 bp, Homo sapiens
aatgtgccagggaac

SEQ ID NO: 993434 - DNA, 15 bp, Homo sapiens
caatgtgccagggaa

SEQ ID NO: 993435 - DNA, 15 bp, Homo sapiens
ccaatgtgccaggga

SEQ ID NO: 993436 - DNA, 15 bp, Homo sapiens
tccaatgtgccaggg

SEQ ID NO: 993437 - DNA, 15 bp, Homo sapiens
ttccaatgtgccagg

SEQ ID NO: 993438 - DNA, 15 bp, Homo sapiens
attccaatgtgccag

SEQ ID NO: 993439 - DNA, 15 bp, Homo sapiens
aattccaatgtgcca

SEQ ID NO: 993440 - DNA, 15 bp, Homo sapiens
gaattccaatgtgcc

SEQ ID NO: 993441 - DNA, 15 bp, Homo sapiens
tgaattccaatgtgc

SEQ ID NO: 993442 - DNA, 15 bp, Homo sapiens
gtgaattccaatgtg

SEQ ID NO: 993443 - DNA, 15 bp, Homo sapiens
tgtgaattccaatgt

SEQ ID NO: 993444 - DNA, 15 bp, Homo sapiens
ctgtgaattccaatg

SEQ ID NO: 993445 - DNA, 15 bp, Homo sapiens
tctgtgaattccaat

SEQ ID NO: 993446 - DNA, 15 bp, Homo sapiens
atctgtgaattccaa

SEQ ID NO: 993447 - DNA, 15 bp, Homo sapiens
catctgtgaattcca

SEQ ID NO: 993448 - DNA, 15 bp, Homo sapiens
ccatctgtgaattcc

SEQ ID NO: 993449 - DNA, 15 bp, Homo sapiens
cccatctgtgaattc

SEQ ID NO: 993450 - DNA, 15 bp, Homo sapiens
tcccatctgtgaatt

SEQ ID NO: 993451 - DNA, 15 bp, Homo sapiens
ctcccatctgtgaat

SEQ ID NO: 993452 - DNA, 15 bp, Homo sapiens
actcccatctgtgaa

SEQ ID NO: 993453 - DNA, 15 bp, Homo sapiens
aactcccatctgtga

SEQ ID NO: 993454 - DNA, 15 bp, Homo sapiens
taactcccatctgtg

SEQ ID NO: 993455 - DNA, 15 bp, Homo sapiens
ttaactcccatctgt

SEQ ID NO: 993456 - DNA, 15 bp, Homo sapiens
attaactcccatctg

SEQ ID NO: 993457 - DNA, 15 bp, Homo sapiens
cattaactcccatct

SEQ ID NO: 993458 - DNA, 15 bp, Homo sapiens
ccattaactcccatc

SEQ ID NO: 993459 - DNA, 15 bp, Homo sapiens
gccattaactcccat

SEQ ID NO: 993460 - DNA, 15 bp, Homo sapiens
agccattaactccca

SEQ ID NO: 993461 - DNA, 15 bp, Homo sapiens
aagccattaactccc

SEQ ID NO: 993462 - DNA, 15 bp, Homo sapiens
aaagccattaactcc

SEQ ID NO: 993463 - DNA, 15 bp, Homo sapiens
gaaagccattaactc

SEQ ID NO: 993464 - DNA, 15 bp, Homo sapiens
agaaagccattaact

SEQ ID NO: 993465 - DNA, 15 bp, Homo sapiens
aagaaagccattaac

SEQ ID NO: 993466 - DNA, 15 bp, Homo sapiens
aaagaaagccattaa

SEQ ID NO: 993467 - DNA, 15 bp, Homo sapiens
aaaagaaagccatta

SEQ ID NO: 993468 - DNA, 15 bp, Homo sapiens
aaaaagaaagccatt

SEQ ID NO: 993469 - DNA, 15 bp, Homo sapiens
aaaaaagaaagccat

SEQ ID NO: 993470 - DNA, 15 bp, Homo sapiens
aaaaaaagaaagcca

SEQ ID NO: 993471 - DNA, 15 bp, Homo sapiens
aaaaaaaagaaagcc

SEQ ID NO: 993472 - DNA, 15 bp, Homo sapiens
aaaaaaaaagaaagc

SEQ ID NO: 993473 - DNA, 15 bp, Homo sapiens
gaggaaaaaaaaaaa

SEQ ID NO: 993474 - DNA, 15 bp, Homo sapiens
tgaggaaaaaaaaaa

SEQ ID NO: 993475 - DNA, 15 bp, Homo sapiens
ctgaggaaaaaaaaa

SEQ ID NO: 993476 - DNA, 15 bp, Homo sapiens
gctgaggaaaaaaaa

SEQ ID NO: 993477 - DNA, 15 bp, Homo sapiens
cgctgaggaaaaaaa

SEQ ID NO: 993478 - DNA, 15 bp, Homo sapiens
acgctgaggaaaaaa

SEQ ID NO: 993479 - DNA, 15 bp, Homo sapiens
gacgctgaggaaaaa

SEQ ID NO: 993480 - DNA, 15 bp, Homo sapiens
agacgctgaggaaaa

SEQ ID NO: 993481 - DNA, 15 bp, Homo sapiens
aagacgctgaggaaa

SEQ ID NO: 993482 - DNA, 15 bp, Homo sapiens
caagacgctgaggaa

SEQ ID NO: 993483 - DNA, 15 bp, Homo sapiens
acaagacgctgagga

SEQ ID NO: 993484 - DNA, 15 bp, Homo sapiens
cacaagacgctgagg

SEQ ID NO: 993485 - DNA, 15 bp, Homo sapiens
ccacaagacgctgag

SEQ ID NO: 993486 - DNA, 15 bp, Homo sapiens
cccacaagacgctga

SEQ ID NO: 993487 - DNA, 15 bp, Homo sapiens
acccacaagacgctg

SEQ ID NO: 993488 - DNA, 15 bp, Homo sapiens
tacccacaagacgct

SEQ ID NO: 993489 - DNA, 15 bp, Homo sapiens
gtacccacaagacgc

SEQ ID NO: 993490 - DNA, 15 bp, Homo sapiens
agtacccacaagacg

SEQ ID NO: 993491 - DNA, 15 bp, Homo sapiens
aagtacccacaagac

SEQ ID NO: 993492 - DNA, 15 bp, Homo sapiens
gaagtacccacaaga

SEQ ID NO: 993493 - DNA, 15 bp, Homo sapiens
agaagtacccacaag

SEQ ID NO: 993494 - DNA, 15 bp, Homo sapiens
gagaagtacccacaa

SEQ ID NO: 993495 - DNA, 15 bp, Homo sapiens
agagaagtacccaca

SEQ ID NO: 993496 - DNA, 15 bp, Homo sapiens
aagagaagtacccac

SEQ ID NO: 993497 - DNA, 15 bp, Homo sapiens
taagagaagtaccca

SEQ ID NO: 993498 - DNA, 15 bp, Homo sapiens
ataagagaagtaccc

SEQ ID NO: 993499 - DNA, 15 bp, Homo sapiens
tataagagaagtacc

SEQ ID NO: 993500 - DNA, 15 bp, Homo sapiens
ctataagagaagtac

SEQ ID NO: 993501 - DNA, 15 bp, Homo sapiens
gctataagagaagta

SEQ ID NO: 993502 - DNA, 15 bp, Homo sapiens
agctataagagaagt

SEQ ID NO: 993503 - DNA, 15 bp, Homo sapiens
cagctataagagaag

SEQ ID NO: 993504 - DNA, 15 bp, Homo sapiens
ccagctataagagaa

SEQ ID NO: 993505 - DNA, 15 bp, Homo sapiens
accagctataagaga

SEQ ID NO: 993506 - DNA, 15 bp, Homo sapiens
taccagctataagag

SEQ ID NO: 993507 - DNA, 15 bp, Homo sapiens
gtaccagctataaga

SEQ ID NO: 993508 - DNA, 15 bp, Homo sapiens
agtaccagctataag

SEQ ID NO: 993509 - DNA, 15 bp, Homo sapiens
aagtaccagctataa

SEQ ID NO: 993510 - DNA, 15 bp, Homo sapiens
caagtaccagctata

SEQ ID NO: 993511 - DNA, 15 bp, Homo sapiens
acaagtaccagctat

SEQ ID NO: 993512 - DNA, 15 bp, Homo sapiens
gacaagtaccagcta

SEQ ID NO: 993513 - DNA, 15 bp, Homo sapiens
agacaagtaccagct

SEQ ID NO: 993514 - DNA, 15 bp, Homo sapiens
cagacaagtaccagc

SEQ ID NO: 993515 - DNA, 15 bp, Homo sapiens
tcagacaagtaccag

SEQ ID NO: 993516 - DNA, 15 bp, Homo sapiens
gtcagacaagtacca

SEQ ID NO: 993517 - DNA, 15 bp, Homo sapiens
ggtcagacaagtacc

SEQ ID NO: 993518 - DNA, 15 bp, Homo sapiens
gggtcagacaagtac

SEQ ID NO: 993519 - DNA, 15 bp, Homo sapiens
ggggtcagacaagta

SEQ ID NO: 993520 - DNA, 15 bp, Homo sapiens
aggggtcagacaagt

SEQ ID NO: 993521 - DNA, 15 bp, Homo sapiens
gaggggtcagacaag

SEQ ID NO: 993522 - DNA, 15 bp, Homo sapiens
ggaggggtcagacaa

SEQ ID NO: 993523 - DNA, 15 bp, Homo sapiens
aggaggggtcagaca

SEQ ID NO: 993524 - DNA, 15 bp, Homo sapiens
aaggaggggtcagac

SEQ ID NO: 993525 - DNA, 15 bp, Homo sapiens
aaaggaggggtcaga

SEQ ID NO: 993526 - DNA, 15 bp, Homo sapiens
taaaggaggggtcag

SEQ ID NO: 993527 - DNA, 15 bp, Homo sapiens
ctaaaggaggggtca

SEQ ID NO: 993528 - DNA, 15 bp, Homo sapiens
actaaaggaggggtc

SEQ ID NO: 993529 - DNA, 15 bp, Homo sapiens
aactaaaggaggggt

SEQ ID NO: 993530 - DNA, 15 bp, Homo sapiens
aaactaaaggagggg

SEQ ID NO: 993531 - DNA, 15 bp, Homo sapiens
caaactaaaggaggg

SEQ ID NO: 993532 - DNA, 15 bp, Homo sapiens
acaaactaaaggagg

SEQ ID NO: 993533 - DNA, 15 bp, Homo sapiens
cacaaactaaaggag

SEQ ID NO: 993534 - DNA, 15 bp, Homo sapiens
tcacaaactaaagga

SEQ ID NO: 993535 - DNA, 15 bp, Homo sapiens
ctcacaaactaaagg

SEQ ID NO: 993536 - DNA, 15 bp, Homo sapiens
gctcacaaactaaag

SEQ ID NO: 993537 - DNA, 15 bp, Homo sapiens
agctcacaaactaaa

SEQ ID NO: 993538 - DNA, 15 bp, Homo sapiens
gagctcacaaactaa

SEQ ID NO: 993539 - DNA, 15 bp, Homo sapiens
ggagctcacaaacta

SEQ ID NO: 993540 - DNA, 15 bp, Homo sapiens
gggagctcacaaact

SEQ ID NO: 993541 - DNA, 15 bp, Homo sapiens
agggagctcacaaac

SEQ ID NO: 993542 - DNA, 15 bp, Homo sapiens
cagggagctcacaaa

SEQ ID NO: 993543 - DNA, 15 bp, Homo sapiens
ccagggagctcacaa

SEQ ID NO: 993544 - DNA, 15 bp, Homo sapiens
cccagggagctcaca

SEQ ID NO: 993545 - DNA, 15 bp, Homo sapiens
gcccagggagctcac

SEQ ID NO: 993546 - DNA, 15 bp, Homo sapiens
cgcccagggagctca

SEQ ID NO: 993547 - DNA, 15 bp, Homo sapiens
ccgcccagggagctc

SEQ ID NO: 993548 - DNA, 15 bp, Homo sapiens
cccgcccagggagct

SEQ ID NO: 993549 - DNA, 15 bp, Homo sapiens
tccccgcccagggag

SEQ ID NO: 993550 - DNA, 15 bp, Homo sapiens
ttccccgcccaggga

SEQ ID NO: 993551 - DNA, 15 bp, Homo sapiens
attccccgcccaggg

SEQ ID NO: 993552 - DNA, 15 bp, Homo sapiens
tattccccgcccagg

SEQ ID NO: 993553 - DNA, 15 bp, Homo sapiens
ttattccccgcccag

SEQ ID NO: 993554 - DNA, 15 bp, Homo sapiens
attattccccgccca

SEQ ID NO: 993555 - DNA, 15 bp, Homo sapiens
cattattccccgccc

SEQ ID NO: 993556 - DNA, 15 bp, Homo sapiens
ccattattccccgcc

SEQ ID NO: 993557 - DNA, 15 bp, Homo sapiens
gccattattccccgc

SEQ ID NO: 993558 - DNA, 15 bp, Homo sapiens
ggccattattccccg

SEQ ID NO: 993559 - DNA, 15 bp, Homo sapiens
aggccattattcccc

SEQ ID NO: 993560 - DNA, 15 bp, Homo sapiens
caggccattattccc

SEQ ID NO: 993561 - DNA, 15 bp, Homo sapiens
gcaggccattattcc

SEQ ID NO: 993562 - DNA, 15 bp, Homo sapiens
tgcaggccattattc

SEQ ID NO: 993563 - DNA, 15 bp, Homo sapiens
ctgcaggccattatt

SEQ ID NO: 993564 - DNA, 15 bp, Homo sapiens
tctgcaggccattat

SEQ ID NO: 993565 - DNA, 15 bp, Homo sapiens
atctgcaggccatta

SEQ ID NO: 993566 - DNA, 15 bp, Homo sapiens
catctgcaggccatt

SEQ ID NO: 993567 - DNA, 15 bp, Homo sapiens
gcatctgcaggccat

SEQ ID NO: 993568 - DNA, 15 bp, Homo sapiens
agcatctgcaggcca

SEQ ID NO: 993569 - DNA, 15 bp, Homo sapiens
tagcatctgcaggcc

SEQ ID NO: 993570 - DNA, 15 bp, Homo sapiens
ctagcatctgcaggc

SEQ ID NO: 993571 - DNA, 15 bp, Homo sapiens
gctagcatctgcagg

SEQ ID NO: 993572 - DNA, 15 bp, Homo sapiens
cgctagcatctgcag

SEQ ID NO: 993573 - DNA, 15 bp, Homo sapiens
tcgctagcatctgca

SEQ ID NO: 993574 - DNA, 15 bp, Homo sapiens
ctcgctagcatctgc

SEQ ID NO: 993575 - DNA, 15 bp, Homo sapiens
actcgctagcatctg

SEQ ID NO: 993576 - DNA, 15 bp, Homo sapiens
cactcgctagcatct

SEQ ID NO: 993577 - DNA, 15 bp, Homo sapiens
gcactcgctagcatc

SEQ ID NO: 993578 - DNA, 15 bp, Homo sapiens
ggcactcgctagcat

SEQ ID NO: 993579 - DNA, 15 bp, Homo sapiens
aggcactcgctagca

SEQ ID NO: 993580 - DNA, 15 bp, Homo sapiens
caggcactcgctagc

SEQ ID NO: 993581 - DNA, 15 bp, Homo sapiens
tcaggcactcgctag

SEQ ID NO: 993582 - DNA, 15 bp, Homo sapiens
gtcaggcactcgcta

SEQ ID NO: 993583 - DNA, 15 bp, Homo sapiens
tgtcaggcactcgct

SEQ ID NO: 993584 - DNA, 15 bp, Homo sapiens
ttgtcaggcactcgc

SEQ ID NO: 993585 - DNA, 15 bp, Homo sapiens
tttgtcaggcactcg

SEQ ID NO: 993586 - DNA, 15 bp, Homo sapiens
ctttgtcaggcactc

SEQ ID NO: 993587 - DNA, 15 bp, Homo sapiens
tctttgtcaggcact

SEQ ID NO: 993588 - DNA, 15 bp, Homo sapiens
ctctttgtcaggcac

SEQ ID NO: 993589 - DNA, 15 bp, Homo sapiens
cctctttgtcaggca

SEQ ID NO: 993590 - DNA, 15 bp, Homo sapiens
tcctctttgtcaggc

SEQ ID NO: 993591 - DNA, 15 bp, Homo sapiens
ctcctctttgtcagg

SEQ ID NO: 993592 - DNA, 15 bp, Homo sapiens
tctcctctttgtcag

SEQ ID NO: 993593 - DNA, 15 bp, Homo sapiens
ttctcctctttgtca

SEQ ID NO: 993594 - DNA, 15 bp, Homo sapiens
cttctcctctttgtc

SEQ ID NO: 993595 - DNA, 15 bp, Homo sapiens
gcttctcctctttgt

SEQ ID NO: 993596 - DNA, 15 bp, Homo sapiens
ggcttctcctctttg

SEQ ID NO: 993597 - DNA, 15 bp, Homo sapiens
gggcttctcctcttt

SEQ ID NO: 993598 - DNA, 15 bp, Homo sapiens
tgggcttctcctctt

SEQ ID NO: 993599 - DNA, 15 bp, Homo sapiens
ctgggcttctcctct

SEQ ID NO: 993600 - DNA, 15 bp, Homo sapiens
cctgggcttctcctc

SEQ ID NO: 993601 - DNA, 15 bp, Homo sapiens
tcctgggcttctcct

SEQ ID NO: 993602 - DNA, 15 bp, Homo sapiens
ctcctgggcttctcc

SEQ ID NO: 993603 - DNA, 15 bp, Homo sapiens
tctcctgggcttctc

SEQ ID NO: 993604 - DNA, 15 bp, Homo sapiens
atctcctgggcttct

SEQ ID NO: 993605 - DNA, 15 bp, Homo sapiens
catctcctgggcttc

SEQ ID NO: 993606 - DNA, 15 bp, Homo sapiens
acatctcctgggctt

SEQ ID NO: 993607 - DNA, 15 bp, Homo sapiens
aacatctcctgggct

SEQ ID NO: 993608 - DNA, 15 bp, Homo sapiens
caacatctcctgggc

SEQ ID NO: 993609 - DNA, 15 bp, Homo sapiens
tcaacatctcctggg

SEQ ID NO: 993610 - DNA, 15 bp, Homo sapiens
ctcaacatctcctgg

SEQ ID NO: 993611 - DNA, 15 bp, Homo sapiens
tctcaacatctcctg

SEQ ID NO: 993612 - DNA, 15 bp, Homo sapiens
ctctcaacatctcct

SEQ ID NO: 993613 - DNA, 15 bp, Homo sapiens
actctcaacatctcc

SEQ ID NO: 993614 - DNA, 15 bp, Homo sapiens
gactctcaacatctc

SEQ ID NO: 993615 - DNA, 15 bp, Homo sapiens
tgactctcaacatct

SEQ ID NO: 993616 - DNA, 15 bp, Homo sapiens
ctgactctcaacatc

SEQ ID NO: 993617 - DNA, 15 bp, Homo sapiens
actgactctcaacat

SEQ ID NO: 993618 - DNA, 15 bp, Homo sapiens
gactgactctcaaca

SEQ ID NO: 993619 - DNA, 15 bp, Homo sapiens
ggactgactctcaac

SEQ ID NO: 993620 - DNA, 15 bp, Homo sapiens
tggactgactctcaa

SEQ ID NO: 993621 - DNA, 15 bp, Homo sapiens
ctggactgactctca

SEQ ID NO: 993622 - DNA, 15 bp, Homo sapiens
gctggactgactctc

SEQ ID NO: 993623 - DNA, 15 bp, Homo sapiens
agctggactgactct

SEQ ID NO: 993624 - DNA, 15 bp, Homo sapiens
gagctggactgactc

SEQ ID NO: 993625 - DNA, 15 bp, Homo sapiens
agagctggactgact

SEQ ID NO: 993626 - DNA, 15 bp, Homo sapiens
cagagctggactgac

SEQ ID NO: 993627 - DNA, 15 bp, Homo sapiens
gcagagctggactga

SEQ ID NO: 993628 - DNA, 15 bp, Homo sapiens
ggcagagctggactg

SEQ ID NO: 993629 - DNA, 15 bp, Homo sapiens
aggcagagctggact

SEQ ID NO: 993630 - DNA, 15 bp, Homo sapiens
caggcagagctggac

SEQ ID NO: 993631 - DNA, 15 bp, Homo sapiens
acaggcagagctgga

SEQ ID NO: 993632 - DNA, 15 bp, Homo sapiens
aacaggcagagctgg

SEQ ID NO: 993633 - DNA, 15 bp, Homo sapiens
taacaggcagagctg

SEQ ID NO: 993634 - DNA, 15 bp, Homo sapiens
ctaacaggcagagct

SEQ ID NO: 993635 - DNA, 15 bp, Homo sapiens
gctaacaggcagagc

SEQ ID NO: 993636 - DNA, 15 bp, Homo sapiens
ggctaacaggcagag

SEQ ID NO: 993637 - DNA, 15 bp, Homo sapiens
aggctaacaggcaga

SEQ ID NO: 993638 - DNA, 15 bp, Homo sapiens
aaggctaacaggcag

SEQ ID NO: 993639 - DNA, 15 bp, Homo sapiens
aaaggctaacaggca

SEQ ID NO: 993640 - DNA, 15 bp, Homo sapiens
gaaaggctaacaggc

SEQ ID NO: 993641 - DNA, 15 bp, Homo sapiens
tgaaaggctaacagg

SEQ ID NO: 993642 - DNA, 15 bp, Homo sapiens
ctgaaaggctaacag

SEQ ID NO: 993643 - DNA, 15 bp, Homo sapiens
tctgaaaggctaaca

SEQ ID NO: 993644 - DNA, 15 bp, Homo sapiens
gtctgaaaggctaac

SEQ ID NO: 993645 - DNA, 15 bp, Homo sapiens
tgtctgaaaggctaa

SEQ ID NO: 993646 - DNA, 15 bp, Homo sapiens
ttgtctgaaaggcta

SEQ ID NO: 993647 - DNA, 15 bp, Homo sapiens
tttgtctgaaaggct

SEQ ID NO: 993648 - DNA, 15 bp, Homo sapiens
atttgtctgaaaggc

SEQ ID NO: 993649 - DNA, 15 bp, Homo sapiens
tatttgtctgaaagg

SEQ ID NO: 993650 - DNA, 15 bp, Homo sapiens
ttatttgtctgaaag

SEQ ID NO: 993651 - DNA, 15 bp, Homo sapiens
tttatttgtctgaaa

SEQ ID NO: 993652 - DNA, 15 bp, Homo sapiens
ctttatttgtctgaa

SEQ ID NO: 993653 - DNA, 15 bp, Homo sapiens
actttatttgtctga

SEQ ID NO: 993654 - DNA, 15 bp, Homo sapiens
aactttatttgtctg

SEQ ID NO: 993655 - DNA, 15 bp, Homo sapiens
caactttatttgtct

SEQ ID NO: 993656 - DNA, 15 bp, Homo sapiens
tcaactttatttgtc

SEQ ID NO: 993657 - DNA, 15 bp, Homo sapiens
ttcaactttatttgt

SEQ ID NO: 993658 - DNA, 15 bp, Homo sapiens
cttcaactttatttg

SEQ ID NO: 993659 - DNA, 15 bp, Homo sapiens
tcttcaactttattt

SEQ ID NO: 993660 - DNA, 15 bp, Homo sapiens
ttcttcaactttatt

SEQ ID NO: 993661 - DNA, 15 bp, Homo sapiens
ccttcttcaacttta

SEQ ID NO: 993662 - DNA, 15 bp, Homo sapiens
gccttcttcaacttt

SEQ ID NO: 993663 - DNA, 15 bp, Homo sapiens
tgccttcttcaactt

SEQ ID NO: 993664 - DNA, 15 bp, Homo sapiens
ctgccttcttcaact

SEQ ID NO: 993665 - DNA, 15 bp, Homo sapiens
cctgccttcttcaac

SEQ ID NO: 993666 - DNA, 15 bp, Homo sapiens
acctgccttcttcaa

SEQ ID NO: 993667 - DNA, 15 bp, Homo sapiens
tacctgccttcttca

SEQ ID NO: 993668 - DNA, 15 bp, Homo sapiens
ctacctgccttcttc

SEQ ID NO: 993669 - DNA, 15 bp, Homo sapiens
gctacctgccttctt

SEQ ID NO: 993670 - DNA, 15 bp, Homo sapiens
tgctacctgccttct

SEQ ID NO: 993671 - DNA, 15 bp, Homo sapiens
ttgctacctgccttc

SEQ ID NO: 993672 - DNA, 15 bp, Homo sapiens
cttgctacctgcctt

SEQ ID NO: 993673 - DNA, 15 bp, Homo sapiens
tcttgctacctgcct

SEQ ID NO: 993674 - DNA, 15 bp, Homo sapiens
ttcttgctacctgcc

SEQ ID NO: 993675 - DNA, 15 bp, Homo sapiens
tttcttgctacctgc

SEQ ID NO: 993676 - DNA, 15 bp, Homo sapiens
ttttcttgctacctg

SEQ ID NO: 993677 - DNA, 15 bp, Homo sapiens
tttttcttgctacct

SEQ ID NO: 993678 - DNA, 15 bp, Homo sapiens
ctttttcttgctacc

SEQ ID NO: 993679 - DNA, 15 bp, Homo sapiens
tctttttcttgctac

SEQ ID NO: 993680 - DNA, 15 bp, Homo sapiens
atctttttcttgcta

SEQ ID NO: 993681 - DNA, 15 bp, Homo sapiens
gatctttttcttgct

SEQ ID NO: 993682 - DNA, 15 bp, Homo sapiens
ggatctttttcttgc

SEQ ID NO: 993683 - DNA, 15 bp, Homo sapiens
aggatctttttcttg

SEQ ID NO: 993684 - DNA, 15 bp, Homo sapiens
caggatctttttctt

SEQ ID NO: 993685 - DNA, 15 bp, Homo sapiens
tcaggatctttttct

SEQ ID NO: 993686 - DNA, 15 bp, Homo sapiens
gtcaggatctttttc

SEQ ID NO: 993687 - DNA, 15 bp, Homo sapiens
ggtcaggatcttttt

SEQ ID NO: 993688 - DNA, 15 bp, Homo sapiens
aggtcaggatctttt

SEQ ID NO: 993689 - DNA, 15 bp, Homo sapiens
gaggtcaggatcttt

SEQ ID NO: 993690 - DNA, 15 bp, Homo sapiens
agaggtcaggatctt

SEQ ID NO: 993691 - DNA, 15 bp, Homo sapiens
cagaggtcaggatct

SEQ ID NO: 993692 - DNA, 15 bp, Homo sapiens
gcagaggtcaggatc

SEQ ID NO: 993693 - DNA, 15 bp, Homo sapiens
agcagaggtcaggat

SEQ ID NO: 993694 - DNA, 15 bp, Homo sapiens
gagcagaggtcagga

SEQ ID NO: 993695 - DNA, 15 bp, Homo sapiens
agagcagaggtcagg

SEQ ID NO: 993696 - DNA, 15 bp, Homo sapiens
cagagcagaggtcag

SEQ ID NO: 993697 - DNA, 15 bp, Homo sapiens
gcagagcagaggtca

SEQ ID NO: 993698 - DNA, 15 bp, Homo sapiens
ggcagagcagaggtc

SEQ ID NO: 993699 - DNA, 15 bp, Homo sapiens
tggcagagcagaggt

SEQ ID NO: 993700 - DNA, 15 bp, Homo sapiens
ttggcagagcagagg

SEQ ID NO: 993701 - DNA, 15 bp, Homo sapiens
tttggcagagcagag

SEQ ID NO: 993702 - DNA, 15 bp, Homo sapiens
ctttggcagagcaga

SEQ ID NO: 993703 - DNA, 15 bp, Homo sapiens
actttggcagagcag

SEQ ID NO: 993704 - DNA, 15 bp, Homo sapiens
cactttggcagagca

SEQ ID NO: 993705 - DNA, 15 bp, Homo sapiens
acactttggcagagc

SEQ ID NO: 993706 - DNA, 15 bp, Homo sapiens
aacactttggcagag

SEQ ID NO: 993707 - DNA, 15 bp, Homo sapiens
aaacactttggcaga

SEQ ID NO: 993708 - DNA, 15 bp, Homo sapiens
aaaacactttggcag

SEQ ID NO: 993709 - DNA, 15 bp, Homo sapiens
aaaaacactttggca

SEQ ID NO: 993710 - DNA, 15 bp, Homo sapiens
taaaaacactttggc

SEQ ID NO: 993711 - DNA, 15 bp, Homo sapiens
ttaaaaacactttgg

SEQ ID NO: 993712 - DNA, 15 bp, Homo sapiens
attaaaaacactttg

SEQ ID NO: 993713 - DNA, 15 bp, Homo sapiens
aattaaaaacacttt

SEQ ID NO: 993714 - DNA, 15 bp, Homo sapiens
taattaaaaacactt

SEQ ID NO: 993715 - DNA, 15 bp, Homo sapiens
gtaattaaaaacact

SEQ ID NO: 993716 - DNA, 15 bp, Homo sapiens
ggtaattaaaaacac

SEQ ID NO: 993717 - DNA, 15 bp, Homo sapiens
aggtaattaaaaaca

SEQ ID NO: 993718 - DNA, 15 bp, Homo sapiens
caggtaattaaaaac

SEQ ID NO: 993719 - DNA, 15 bp, Homo sapiens
ccaggtaattaaaaa

SEQ ID NO: 993720 - DNA, 15 bp, Homo sapiens
tccaggtaattaaaa

SEQ ID NO: 993721 - DNA, 15 bp, Homo sapiens
atccaggtaattaaa

SEQ ID NO: 993722 - DNA, 15 bp, Homo sapiens
gatccaggtaattaa

SEQ ID NO: 993723 - DNA, 15 bp, Homo sapiens
agatccaggtaatta

SEQ ID NO: 993724 - DNA, 15 bp, Homo sapiens
tagatccaggtaatt

SEQ ID NO: 993725 - DNA, 15 bp, Homo sapiens
ctagatccaggtaat

SEQ ID NO: 993726 - DNA, 15 bp, Homo sapiens
gctagatccaggtaa

SEQ ID NO: 993727 - DNA, 15 bp, Homo sapiens
agctagatccaggta

SEQ ID NO: 993728 - DNA, 15 bp, Homo sapiens
cagctagatccaggt

SEQ ID NO: 993729 - DNA, 15 bp, Homo sapiens
acagctagatccagg

SEQ ID NO: 993730 - DNA, 15 bp, Homo sapiens
tacagctagatccag

SEQ ID NO: 993731 - DNA, 15 bp, Homo sapiens
ttacagctagatcca

SEQ ID NO: 993732 - DNA, 15 bp, Homo sapiens
cttacagctagatcc

SEQ ID NO: 993733 - DNA, 15 bp, Homo sapiens
ccttacagctagatc

SEQ ID NO: 993734 - DNA, 15 bp, Homo sapiens
accttacagctagat

SEQ ID NO: 993735 - DNA, 15 bp, Homo sapiens
aaccttacagctaga

SEQ ID NO: 993736 - DNA, 15 bp, Homo sapiens
aaaccttacagctag

SEQ ID NO: 993737 - DNA, 15 bp, Homo sapiens
caaaccttacagcta

SEQ ID NO: 993738 - DNA, 15 bp, Homo sapiens
gcaaaccttacagct

SEQ ID NO: 993739 - DNA, 15 bp, Homo sapiens
ggcaaaccttacagc

SEQ ID NO: 993740 - DNA, 15 bp, Homo sapiens
tggcaaaccttacag

SEQ ID NO: 993741 - DNA, 15 bp, Homo sapiens
gtggcaaaccttaca

SEQ ID NO: 993742 - DNA, 15 bp, Homo sapiens
cgtggcaaaccttac

SEQ ID NO: 993743 - DNA, 15 bp, Homo sapiens
acgtggcaaacctta

SEQ ID NO: 993744 - DNA, 15 bp, Homo sapiens
tacgtggcaaacctt

SEQ ID NO: 993745 - DNA, 15 bp, Homo sapiens
ctacgtggcaaacct

SEQ ID NO: 993746 - DNA, 15 bp, Homo sapiens
actacgtggcaaacc

SEQ ID NO: 993747 - DNA, 15 bp, Homo sapiens
cactacgtggcaaac

SEQ ID NO: 993748 - DNA, 15 bp, Homo sapiens
ccactacgtggcaaa

SEQ ID NO: 993749 - DNA, 15 bp, Homo sapiens
accactacgtggcaa

SEQ ID NO: 993750 - DNA, 15 bp, Homo sapiens
caccactacgtggca

SEQ ID NO: 993751 - DNA, 15 bp, Homo sapiens
tcaccactacgtggc

SEQ ID NO: 993752 - DNA, 15 bp, Homo sapiens
gtcaccactacgtgg

SEQ ID NO: 993753 - DNA, 15 bp, Homo sapiens
tgtcaccactacgtg

SEQ ID NO: 993754 - DNA, 15 bp, Homo sapiens
ctgtcaccactacgt

SEQ ID NO: 993755 - DNA, 15 bp, Homo sapiens
gctgtcaccactacg

SEQ ID NO: 993756 - DNA, 15 bp, Homo sapiens
agctgtcaccactac

SEQ ID NO: 993757 - DNA, 15 bp, Homo sapiens
cagctgtcaccacta

SEQ ID NO: 993758 - DNA, 15 bp, Homo sapiens
tcagctgtcaccact

SEQ ID NO: 993759 - DNA, 15 bp, Homo sapiens
ctcagctgtcaccac

SEQ ID NO: 993760 - DNA, 15 bp, Homo sapiens
cctcagctgtcacca

SEQ ID NO: 993761 - DNA, 15 bp, Homo sapiens
acctcagctgtcacc

SEQ ID NO: 993762 - DNA, 15 bp, Homo sapiens
gacctcagctgtcac

SEQ ID NO: 993763 - DNA, 15 bp, Homo sapiens
agacctcagctgtca

SEQ ID NO: 993764 - DNA, 15 bp, Homo sapiens
tagacctcagctgtc

SEQ ID NO: 993765 - DNA, 15 bp, Homo sapiens
ctagacctcagctgt

SEQ ID NO: 993766 - DNA, 15 bp, Homo sapiens
gctagacctcagctg

SEQ ID NO: 993767 - DNA, 15 bp, Homo sapiens
agctagacctcagct

SEQ ID NO: 993768 - DNA, 15 bp, Homo sapiens
gagctagacctcagc

SEQ ID NO: 993769 - DNA, 15 bp, Homo sapiens
tgagctagacctcag

SEQ ID NO: 993770 - DNA, 15 bp, Homo sapiens
ctgagctagacctca

SEQ ID NO: 993771 - DNA, 15 bp, Homo sapiens
gctgagctagacctc

SEQ ID NO: 993772 - DNA, 15 bp, Homo sapiens
tgctgagctagacct

SEQ ID NO: 993773 - DNA, 15 bp, Homo sapiens
gtgctgagctagacc

SEQ ID NO: 993774 - DNA, 15 bp, Homo sapiens
agtgctgagctagac

SEQ ID NO: 993775 - DNA, 15 bp, Homo sapiens
tagtgctgagctaga

SEQ ID NO: 993776 - DNA, 15 bp, Homo sapiens
gtagtgctgagctag

SEQ ID NO: 993777 - DNA, 15 bp, Homo sapiens
agtagtgctgagcta

SEQ ID NO: 993778 - DNA, 15 bp, Homo sapiens
gagtagtgctgagct

SEQ ID NO: 993779 - DNA, 15 bp, Homo sapiens
tgagtagtgctgagc

SEQ ID NO: 993780 - DNA, 15 bp, Homo sapiens
ctgagtagtgctgag

SEQ ID NO: 993781 - DNA, 15 bp, Homo sapiens
gctgagtagtgctga

SEQ ID NO: 993782 - DNA, 15 bp, Homo sapiens
tgctgagtagtgctg

SEQ ID NO: 993783 - DNA, 15 bp, Homo sapiens
ctgctgagtagtgct

SEQ ID NO: 993784 - DNA, 15 bp, Homo sapiens
cctgctgagtagtgc

SEQ ID NO: 993785 - DNA, 15 bp, Homo sapiens
ccctgctgagtagtg

SEQ ID NO: 993786 - DNA, 15 bp, Homo sapiens
tccctgctgagtagt

SEQ ID NO: 993787 - DNA, 15 bp, Homo sapiens
ttccctgctgagtag

SEQ ID NO: 993788 - DNA, 15 bp, Homo sapiens
cttccctgctgagta

SEQ ID NO: 993789 - DNA, 15 bp, Homo sapiens
gcttccctgctgagt

SEQ ID NO: 993790 - DNA, 15 bp, Homo sapiens
ggcttccctgctgag

SEQ ID NO: 993791 - DNA, 15 bp, Homo sapiens
tggcttccctgctga

SEQ ID NO: 993792 - DNA, 15 bp, Homo sapiens
gtggcttccctgctg

SEQ ID NO: 993793 - DNA, 15 bp, Homo sapiens
tgtggcttccctgct

SEQ ID NO: 993794 - DNA, 15 bp, Homo sapiens
gtgtggcttccctgc

SEQ ID NO: 993795 - DNA, 15 bp, Homo sapiens
tgtgtggcttccctg

SEQ ID NO: 993796 - DNA, 15 bp, Homo sapiens
atgtgtggcttccct

SEQ ID NO: 993797 - DNA, 15 bp, Homo sapiens
catgtgtggcttccc

SEQ ID NO: 993798 - DNA, 15 bp, Homo sapiens
gcatgtgtggcttcc

SEQ ID NO: 993799 - DNA, 15 bp, Homo sapiens
tgcatgtgtggcttc

SEQ ID NO: 993800 - DNA, 15 bp, Homo sapiens
atgcatgtgtggctt

SEQ ID NO: 993801 - DNA, 15 bp, Homo sapiens
aatgcatgtgtggct

SEQ ID NO: 993802 - DNA, 15 bp, Homo sapiens
taatgcatgtgtggc

SEQ ID NO: 993803 - DNA, 15 bp, Homo sapiens
ttaatgcatgtgtgg

SEQ ID NO: 993804 - DNA, 15 bp, Homo sapiens
cttaatgcatgtgtg

SEQ ID NO: 993805 - DNA, 15 bp, Homo sapiens
gcttaatgcatgtgt

SEQ ID NO: 993806 - DNA, 15 bp, Homo sapiens
tgcttaatgcatgtg

SEQ ID NO: 993807 - DNA, 15 bp, Homo sapiens
gtgcttaatgcatgt

SEQ ID NO: 993808 - DNA, 15 bp, Homo sapiens
agtgcttaatgcatg

SEQ ID NO: 993809 - DNA, 15 bp, Homo sapiens
aagtgcttaatgcat

SEQ ID NO: 993810 - DNA, 15 bp, Homo sapiens
caagtgcttaatgca

SEQ ID NO: 993811 - DNA, 15 bp, Homo sapiens
tcaagtgcttaatgc

SEQ ID NO: 993812 - DNA, 15 bp, Homo sapiens
gtcaagtgcttaatg

SEQ ID NO: 993813 - DNA, 15 bp, Homo sapiens
tgtcaagtgcttaat

SEQ ID NO: 993814 - DNA, 15 bp, Homo sapiens
atgtcaagtgcttaa

SEQ ID NO: 993815 - DNA, 15 bp, Homo sapiens
tatgtcaagtgctta

SEQ ID NO: 993816 - DNA, 15 bp, Homo sapiens
ctatgtcaagtgctt

SEQ ID NO: 993817 - DNA, 15 bp, Homo sapiens
cctatgtcaagtgct

SEQ ID NO: 993818 - DNA, 15 bp, Homo sapiens
tcctatgtcaagtgc

SEQ ID NO: 993819 - DNA, 15 bp, Homo sapiens
gtcctatgtcaagtg

SEQ ID NO: 993820 - DNA, 15 bp, Homo sapiens
agtcctatgtcaagt

SEQ ID NO: 993821 - DNA, 15 bp, Homo sapiens
tagtcctatgtcaag

SEQ ID NO: 993822 - DNA, 15 bp, Homo sapiens
ctagtcctatgtcaa

SEQ ID NO: 993823 - DNA, 15 bp, Homo sapiens
actagtcctatgtca

SEQ ID NO: 993824 - DNA, 15 bp, Homo sapiens
gactagtcctatgtc

SEQ ID NO: 993825 - DNA, 15 bp, Homo sapiens
agactagtcctatgt

SEQ ID NO: 993826 - DNA, 15 bp, Homo sapiens
cagactagtcctatg

SEQ ID NO: 993827 - DNA, 15 bp, Homo sapiens
tcagactagtcctat

SEQ ID NO: 993828 - DNA, 15 bp, Homo sapiens
ttcagactagtccta

SEQ ID NO: 993829 - DNA, 15 bp, Homo sapiens
gttcagactagtcct

SEQ ID NO: 993830 - DNA, 15 bp, Homo sapiens
agttcagactagtcc

SEQ ID NO: 993831 - DNA, 15 bp, Homo sapiens
cagttcagactagtc

SEQ ID NO: 993832 - DNA, 15 bp, Homo sapiens
tcagttcagactagt

SEQ ID NO: 993833 - DNA, 15 bp, Homo sapiens
ctcagttcagactag

SEQ ID NO: 993834 - DNA, 15 bp, Homo sapiens
actcagttcagacta

SEQ ID NO: 993835 - DNA, 15 bp, Homo sapiens
aactcagttcagact

SEQ ID NO: 993836 - DNA, 15 bp, Homo sapiens
caactcagttcagac

SEQ ID NO: 993837 - DNA, 15 bp, Homo sapiens
acaactcagttcaga

SEQ ID NO: 993838 - DNA, 15 bp, Homo sapiens
cacaactcagttcag

SEQ ID NO: 993839 - DNA, 15 bp, Homo sapiens
gcacaactcagttca

SEQ ID NO: 993840 - DNA, 15 bp, Homo sapiens
agcacaactcagttc

SEQ ID NO: 993841 - DNA, 15 bp, Homo sapiens
cagcacaactcagtt

SEQ ID NO: 993842 - DNA, 15 bp, Homo sapiens
acagcacaactcagt

SEQ ID NO: 993843 - DNA, 15 bp, Homo sapiens
gacagcacaactcag

SEQ ID NO: 993844 - DNA, 15 bp, Homo sapiens
tgacagcacaactca

SEQ ID NO: 993845 - DNA, 15 bp, Homo sapiens
atgacagcacaactc

SEQ ID NO: 993846 - DNA, 15 bp, Homo sapiens
aatgacagcacaact

SEQ ID NO: 993847 - DNA, 15 bp, Homo sapiens
taatgacagcacaac

SEQ ID NO: 993848 - DNA, 15 bp, Homo sapiens
ataatgacagcacaa

SEQ ID NO: 993849 - DNA, 15 bp, Homo sapiens
aataatgacagcaca

SEQ ID NO: 993850 - DNA, 15 bp, Homo sapiens
caataatgacagcac

SEQ ID NO: 993851 - DNA, 15 bp, Homo sapiens
tcaataatgacagca

SEQ ID NO: 993852 - DNA, 15 bp, Homo sapiens
atcaataatgacagc

SEQ ID NO: 993853 - DNA, 15 bp, Homo sapiens
tatcaataatgacag

SEQ ID NO: 993854 - DNA, 15 bp, Homo sapiens
gtatcaataatgaca

SEQ ID NO: 993855 - DNA, 15 bp, Homo sapiens
tgtatcaataatgac

SEQ ID NO: 993856 - DNA, 15 bp, Homo sapiens
gtgtatcaataatga

SEQ ID NO: 993857 - DNA, 15 bp, Homo sapiens
tgtgtatcaataatg

SEQ ID NO: 993858 - DNA, 15 bp, Homo sapiens
gtgtgtatcaataat

SEQ ID NO: 993859 - DNA, 15 bp, Homo sapiens
agtgtgtatcaataa

SEQ ID NO: 993860 - DNA, 15 bp, Homo sapiens
cagtgtgtatcaata

SEQ ID NO: 993861 - DNA, 15 bp, Homo sapiens
ccagtgtgtatcaat

SEQ ID NO: 993862 - DNA, 15 bp, Homo sapiens
tccagtgtgtatcaa

SEQ ID NO: 993863 - DNA, 15 bp, Homo sapiens
atccagtgtgtatca

SEQ ID NO: 993864 - DNA, 15 bp, Homo sapiens
aatccagtgtgtatc

SEQ ID NO: 993865 - DNA, 15 bp, Homo sapiens
aaatccagtgtgtat

SEQ ID NO: 993866 - DNA, 15 bp, Homo sapiens
aaaatccagtgtgta

SEQ ID NO: 993867 - DNA, 15 bp, Homo sapiens
caaaatccagtgtgt

SEQ ID NO: 993868 - DNA, 15 bp, Homo sapiens
tcaaaatccagtgtg

SEQ ID NO: 993869 - DNA, 15 bp, Homo sapiens
ctcaaaatccagtgt

SEQ ID NO: 993870 - DNA, 15 bp, Homo sapiens
cctcaaaatccagtg

SEQ ID NO: 993871 - DNA, 15 bp, Homo sapiens
tcctcaaaatccagt

SEQ ID NO: 993872 - DNA, 15 bp, Homo sapiens
ctcctcaaaatccag

SEQ ID NO: 993873 - DNA, 15 bp, Homo sapiens
tctcctcaaaatcca

SEQ ID NO: 993874 - DNA, 15 bp, Homo sapiens
gtctcctcaaaatcc

SEQ ID NO: 993875 - DNA, 15 bp, Homo sapiens
tgtctcctcaaaatc

SEQ ID NO: 993876 - DNA, 15 bp, Homo sapiens
ttgtctcctcaaaat

SEQ ID NO: 993877 - DNA, 15 bp, Homo sapiens
tttgtctcctcaaaa

SEQ ID NO: 993878 - DNA, 15 bp, Homo sapiens
ttttgtctcctcaaa

SEQ ID NO: 993879 - DNA, 15 bp, Homo sapiens
tttttgtctcctcaa

SEQ ID NO: 993880 - DNA, 15 bp, Homo sapiens
ttttttgtctcctca

SEQ ID NO: 993881 - DNA, 15 bp, Homo sapiens
cttttttgtctcctc

SEQ ID NO: 993882 - DNA, 15 bp, Homo sapiens
tcttttttgtctcct

SEQ ID NO: 993883 - DNA, 15 bp, Homo sapiens
ttcttttttgtctcc

SEQ ID NO: 993884 - DNA, 15 bp, Homo sapiens
attcttttttgtctc

SEQ ID NO: 993885 - DNA, 15 bp, Homo sapiens
cattcttttttgtct

SEQ ID NO: 993886 - DNA, 15 bp, Homo sapiens
gcattcttttttgtc

SEQ ID NO: 993887 - DNA, 15 bp, Homo sapiens
tgcattcttttttgt

SEQ ID NO: 993888 - DNA, 15 bp, Homo sapiens
ttgcattcttttttg

SEQ ID NO: 993889 - DNA, 15 bp, Homo sapiens
tttgcattctttttt

SEQ ID NO: 993890 - DNA, 15 bp, Homo sapiens
ttttgcattcttttt

SEQ ID NO: 993891 - DNA, 15 bp, Homo sapiens
attttgcattctttt

SEQ ID NO: 993892 - DNA, 15 bp, Homo sapiens
tattttgcattcttt

SEQ ID NO: 993893 - DNA, 15 bp, Homo sapiens
ctattttgcattctt

SEQ ID NO: 993894 - DNA, 15 bp, Homo sapiens
actattttgcattct

SEQ ID NO: 993895 - DNA, 15 bp, Homo sapiens
aactattttgcattc

SEQ ID NO: 993896 - DNA, 15 bp, Homo sapiens
aaactattttgcatt

SEQ ID NO: 993897 - DNA, 15 bp, Homo sapiens
taaactattttgcat

SEQ ID NO: 993898 - DNA, 15 bp, Homo sapiens
ttaaactattttgca

SEQ ID NO: 993899 - DNA, 15 bp, Homo sapiens
attaaactattttgc

SEQ ID NO: 993900 - DNA, 15 bp, Homo sapiens
aattaaactattttg

SEQ ID NO: 993901 - DNA, 15 bp, Homo sapiens
caattaaactatttt

SEQ ID NO: 993902 - DNA, 15 bp, Homo sapiens
acaattaaactattt

SEQ ID NO: 993903 - DNA, 15 bp, Homo sapiens
aacaattaaactatt

SEQ ID NO: 993904 - DNA, 15 bp, Homo sapiens
aaacaattaaactat

SEQ ID NO: 993905 - DNA, 15 bp, Homo sapiens
aaaacaattaaacta

SEQ ID NO: 993906 - DNA, 15 bp, Homo sapiens
gaaaacaattaaact

SEQ ID NO: 993907 - DNA, 15 bp, Homo sapiens
tgaaaacaattaaac

SEQ ID NO: 993908 - DNA, 15 bp, Homo sapiens
atgaaaacaattaaa

SEQ ID NO: 993909 - DNA, 15 bp, Homo sapiens
tatgaaaacaattaa

SEQ ID NO: 993910 - DNA, 15 bp, Homo sapiens
atatgaaaacaatta

SEQ ID NO: 993911 - DNA, 15 bp, Homo sapiens
catatgaaaacaatt

SEQ ID NO: 993912 - DNA, 15 bp, Homo sapiens
ccatatgaaaacaat

SEQ ID NO: 993913 - DNA, 15 bp, Homo sapiens
cccatatgaaaacaa

SEQ ID NO: 993914 - DNA, 15 bp, Homo sapiens
acccatatgaaaaca

SEQ ID NO: 993915 - DNA, 15 bp, Homo sapiens
aacccatatgaaaac

SEQ ID NO: 993916 - DNA, 15 bp, Homo sapiens
taacccatatgaaaa

SEQ ID NO: 993917 - DNA, 15 bp, Homo sapiens
gtaacccatatgaaa

SEQ ID NO: 993918 - DNA, 15 bp, Homo sapiens
tgtaacccatatgaa

SEQ ID NO: 993919 - DNA, 15 bp, Homo sapiens
atgtaacccatatga

SEQ ID NO: 993920 - DNA, 15 bp, Homo sapiens
catgtaacccatatg

SEQ ID NO: 993921 - DNA, 15 bp, Homo sapiens
acatgtaacccatat

SEQ ID NO: 993922 - DNA, 15 bp, Homo sapiens
aacatgtaacccata

SEQ ID NO: 993923 - DNA, 15 bp, Homo sapiens
caacatgtaacccat

SEQ ID NO: 993924 - DNA, 15 bp, Homo sapiens
tcaacatgtaaccca

SEQ ID NO: 993925 - DNA, 15 bp, Homo sapiens
ttcaacatgtaaccc

SEQ ID NO: 993926 - DNA, 15 bp, Homo sapiens
tttcaacatgtaacc

SEQ ID NO: 993927 - DNA, 15 bp, Homo sapiens
atttcaacatgtaac

SEQ ID NO: 993928 - DNA, 15 bp, Homo sapiens
catttcaacatgtaa

SEQ ID NO: 993929 - DNA, 15 bp, Homo sapiens
ccatttcaacatgta

SEQ ID NO: 993930 - DNA, 15 bp, Homo sapiens
accatttcaacatgt

SEQ ID NO: 993931 - DNA, 15 bp, Homo sapiens
caccatttcaacatg

SEQ ID NO: 993932 - DNA, 15 bp, Homo sapiens
acaccatttcaacat

SEQ ID NO: 993933 - DNA, 15 bp, Homo sapiens
aacaccatttcaaca

SEQ ID NO: 993934 - DNA, 15 bp, Homo sapiens
aaacaccatttcaac

SEQ ID NO: 993935 - DNA, 15 bp, Homo sapiens
aaaacaccatttcaa

SEQ ID NO: 993936 - DNA, 15 bp, Homo sapiens
taaaacaccatttca

SEQ ID NO: 993937 - DNA, 15 bp, Homo sapiens
ttaaaacaccatttc

SEQ ID NO: 993938 - DNA, 15 bp, Homo sapiens
tttaaaacaccattt

SEQ ID NO: 993939 - DNA, 15 bp, Homo sapiens
atttaaaacaccatt

SEQ ID NO: 993940 - DNA, 15 bp, Homo sapiens
tatttaaaacaccat

SEQ ID NO: 993941 - DNA, 15 bp, Homo sapiens
atatttaaaacacca

SEQ ID NO: 993942 - DNA, 15 bp, Homo sapiens
tatatttaaaacacc

SEQ ID NO: 993943 - DNA, 15 bp, Homo sapiens
atatatttaaaacac

SEQ ID NO: 993944 - DNA, 15 bp, Homo sapiens
tatatatttaaaaca

SEQ ID NO: 993945 - DNA, 15 bp, Homo sapiens
ctatatatttaaaac

SEQ ID NO: 993946 - DNA, 15 bp, Homo sapiens
cctatatatttaaaa

SEQ ID NO: 993947 - DNA, 15 bp, Homo sapiens
acctatatatttaaa

SEQ ID NO: 993948 - DNA, 15 bp, Homo sapiens
aacctatatatttaa

SEQ ID NO: 993949 - DNA, 15 bp, Homo sapiens
taacctatatattta

SEQ ID NO: 993950 - DNA, 15 bp, Homo sapiens
ttaacctatatattt

SEQ ID NO: 993951 - DNA, 15 bp, Homo sapiens
tttaacctatatatt

SEQ ID NO: 993952 - DNA, 15 bp, Homo sapiens
atttaacctatatat

SEQ ID NO: 993953 - DNA, 15 bp, Homo sapiens
tatttaacctatata

SEQ ID NO: 993954 - DNA, 15 bp, Homo sapiens
ttatttaacctatat

SEQ ID NO: 993955 - DNA, 15 bp, Homo sapiens
tttatttaacctata

SEQ ID NO: 993956 - DNA, 15 bp, Homo sapiens
ttttatttaacctat

SEQ ID NO: 993957 - DNA, 15 bp, Homo sapiens
attttatttaaccta

SEQ ID NO: 993958 - DNA, 15 bp, Homo sapiens
tattttatttaacct

SEQ ID NO: 993959 - DNA, 15 bp, Homo sapiens
atattttatttaacc

SEQ ID NO: 993960 - DNA, 15 bp, Homo sapiens
tatattttatttaac

SEQ ID NO: 993961 - DNA, 15 bp, Homo sapiens
ttatattttatttaa

SEQ ID NO: 993962 - DNA, 15 bp, Homo sapiens
tttatattttattta

SEQ ID NO: 993963 - DNA, 15 bp, Homo sapiens
gtttatattttattt

SEQ ID NO: 993964 - DNA, 15 bp, Homo sapiens
aagtttatattttat

SEQ ID NO: 993965 - DNA, 15 bp, Homo sapiens
caagtttatatttta

SEQ ID NO: 993966 - DNA, 15 bp, Homo sapiens
acaagtttatatttt

SEQ ID NO: 993967 - DNA, 15 bp, Homo sapiens
tacaagtttatattt

SEQ ID NO: 993968 - DNA, 15 bp, Homo sapiens
atacaagtttatatt

SEQ ID NO: 993969 - DNA, 15 bp, Homo sapiens
aatacaagtttatat

SEQ ID NO: 993970 - DNA, 15 bp, Homo sapiens
caatacaagtttata

SEQ ID NO: 993971 - DNA, 15 bp, Homo sapiens
gcaatacaagtttat

SEQ ID NO: 993972 - DNA, 15 bp, Homo sapiens
tgcaatacaagttta

SEQ ID NO: 993973 - DNA, 15 bp, Homo sapiens
ctgcaatacaagttt

SEQ ID NO: 993974 - DNA, 15 bp, Homo sapiens
actgcaatacaagtt

SEQ ID NO: 993975 - DNA, 15 bp, Homo sapiens
aactgcaatacaagt

SEQ ID NO: 993976 - DNA, 15 bp, Homo sapiens
taactgcaatacaag

SEQ ID NO: 993977 - DNA, 15 bp, Homo sapiens
ttaactgcaatacaa

SEQ ID NO: 993978 - DNA, 15 bp, Homo sapiens
tttaactgcaataca

SEQ ID NO: 993979 - DNA, 15 bp, Homo sapiens
gtttaactgcaatac

SEQ ID NO: 993980 - DNA, 15 bp, Homo sapiens
tgtttaactgcaata

SEQ ID NO: 993981 - DNA, 15 bp, Homo sapiens
gtgtttaactgcaat

SEQ ID NO: 993982 - DNA, 15 bp, Homo sapiens
tgtgtttaactgcaa

SEQ ID NO: 993983 - DNA, 15 bp, Homo sapiens
ttgtgtttaactgca

SEQ ID NO: 993984 - DNA, 15 bp, Homo sapiens
tttgtgtttaactgc

SEQ ID NO: 993985 - DNA, 15 bp, Homo sapiens
ctttgtgtttaactg

SEQ ID NO: 993986 - DNA, 15 bp, Homo sapiens
gctttgtgtttaact

SEQ ID NO: 993987 - DNA, 15 bp, Homo sapiens
cgctttgtgtttaac

SEQ ID NO: 993988 - DNA, 15 bp, Homo sapiens
acgctttgtgtttaa

SEQ ID NO: 993989 - DNA, 15 bp, Homo sapiens
tacgctttgtgttta

SEQ ID NO: 993990 - DNA, 15 bp, Homo sapiens
ttacgctttgtgttt

SEQ ID NO: 993991 - DNA, 15 bp, Homo sapiens
tttacgctttgtgtt

SEQ ID NO: 993992 - DNA, 15 bp, Homo sapiens
ttttacgctttgtgt

SEQ ID NO: 993993 - DNA, 15 bp, Homo sapiens
attttacgctttgtg

SEQ ID NO: 993994 - DNA, 15 bp, Homo sapiens
aattttacgctttgt

SEQ ID NO: 993995 - DNA, 15 bp, Homo sapiens
aaattttacgctttg

SEQ ID NO: 993996 - DNA, 15 bp, Homo sapiens
taaattttacgcttt

SEQ ID NO: 993997 - DNA, 15 bp, Homo sapiens
gtaaattttacgctt

SEQ ID NO: 993998 - DNA, 15 bp, Homo sapiens
ggtaaattttacgct

SEQ ID NO: 993999 - DNA, 15 bp, Homo sapiens
tggtaaattttacgc

SEQ ID NO: 994000 - DNA, 15 bp, Homo sapiens
atggtaaattttacg

SEQ ID NO: 994001 - DNA, 15 bp, Homo sapiens
gatggtaaattttac

SEQ ID NO: 994002 - DNA, 15 bp, Homo sapiens
agatggtaaatttta

SEQ ID NO: 994003 - DNA, 15 bp, Homo sapiens
cagatggtaaatttt

SEQ ID NO: 994004 - DNA, 15 bp, Homo sapiens
tcagatggtaaattt

SEQ ID NO: 994005 - DNA, 15 bp, Homo sapiens
ttcagatggtaaatt

SEQ ID NO: 994006 - DNA, 15 bp, Homo sapiens
gttcagatggtaaat

SEQ ID NO: 994007 - DNA, 15 bp, Homo sapiens
ggttcagatggtaaa

SEQ ID NO: 994008 - DNA, 15 bp, Homo sapiens
tggttcagatggtaa

SEQ ID NO: 994009 - DNA, 15 bp, Homo sapiens
atggttcagatggta

SEQ ID NO: 994010 - DNA, 15 bp, Homo sapiens
aatggttcagatggt

SEQ ID NO: 994011 - DNA, 15 bp, Homo sapiens
aaatggttcagatgg

SEQ ID NO: 994012 - DNA, 15 bp, Homo sapiens
taaatggttcagatg

SEQ ID NO: 994013 - DNA, 15 bp, Homo sapiens
ataaatggttcagat

SEQ ID NO: 994014 - DNA, 15 bp, Homo sapiens
aataaatggttcaga

SEQ ID NO: 994015 - DNA, 15 bp, Homo sapiens
aaataaatggttcag

SEQ ID NO: 994016 - DNA, 15 bp, Homo sapiens
gaaataaatggttca

SEQ ID NO: 994017 - DNA, 15 bp, Homo sapiens
agaaataaatggttc

SEQ ID NO: 994018 - DNA, 15 bp, Homo sapiens
tagaaataaatggtt

SEQ ID NO: 994019 - DNA, 15 bp, Homo sapiens
ttagaaataaatggt

SEQ ID NO: 994020 - DNA, 15 bp, Homo sapiens
cttagaaataaatgg

SEQ ID NO: 994021 - DNA, 15 bp, Homo sapiens
acttagaaataaatg

SEQ ID NO: 994022 - DNA, 15 bp, Homo sapiens
cacttagaaataaat

SEQ ID NO: 994023 - DNA, 15 bp, Homo sapiens
acacttagaaataaa

SEQ ID NO: 994024 - DNA, 15 bp, Homo sapiens
tacacttagaaataa

SEQ ID NO: 994025 - DNA, 15 bp, Homo sapiens
gtacacttagaaata

SEQ ID NO: 994026 - DNA, 15 bp, Homo sapiens
agtacacttagaaat

SEQ ID NO: 994027 - DNA, 15 bp, Homo sapiens
cagtacacttagaaa

SEQ ID NO: 994028 - DNA, 15 bp, Homo sapiens
acagtacacttagaa

SEQ ID NO: 994029 - DNA, 15 bp, Homo sapiens
aacagtacacttaga

SEQ ID NO: 994030 - DNA, 15 bp, Homo sapiens
gaacagtacacttag

SEQ ID NO: 994031 - DNA, 15 bp, Homo sapiens
tgaacagtacactta

SEQ ID NO: 994032 - DNA, 15 bp, Homo sapiens
ctgaacagtacactt

SEQ ID NO: 994033 - DNA, 15 bp, Homo sapiens
actgaacagtacact

SEQ ID NO: 994034 - DNA, 15 bp, Homo sapiens
tactgaacagtacac

SEQ ID NO: 994035 - DNA, 15 bp, Homo sapiens
ctactgaacagtaca

SEQ ID NO: 994036 - DNA, 15 bp, Homo sapiens
actactgaacagtac

SEQ ID NO: 994037 - DNA, 15 bp, Homo sapiens
cactactgaacagta

SEQ ID NO: 994038 - DNA, 15 bp, Homo sapiens
acactactgaacagt

SEQ ID NO: 994039 - DNA, 15 bp, Homo sapiens
aacactactgaacag

SEQ ID NO: 994040 - DNA, 15 bp, Homo sapiens
taacactactgaaca

SEQ ID NO: 994041 - DNA, 15 bp, Homo sapiens
ttaacactactgaac

SEQ ID NO: 994042 - DNA, 15 bp, Homo sapiens
cttaacactactgaa

SEQ ID NO: 994043 - DNA, 15 bp, Homo sapiens
acttaacactactga

SEQ ID NO: 994044 - DNA, 15 bp, Homo sapiens
cacttaacactactg

SEQ ID NO: 994045 - DNA, 15 bp, Homo sapiens
gcacttaacactact

SEQ ID NO: 994046 - DNA, 15 bp, Homo sapiens
tgcacttaacactac

SEQ ID NO: 994047 - DNA, 15 bp, Homo sapiens
gtgcacttaacacta

SEQ ID NO: 994048 - DNA, 15 bp, Homo sapiens
agtgcacttaacact

SEQ ID NO: 994049 - DNA, 15 bp, Homo sapiens
aagtgcacttaacac

SEQ ID NO: 994050 - DNA, 15 bp, Homo sapiens
taagtgcacttaaca

SEQ ID NO: 994051 - DNA, 15 bp, Homo sapiens
ataagtgcacttaac

SEQ ID NO: 994052 - DNA, 15 bp, Homo sapiens
aataagtgcacttaa

SEQ ID NO: 994053 - DNA, 15 bp, Homo sapiens
aaataagtgcactta

SEQ ID NO: 994054 - DNA, 15 bp, Homo sapiens
aaaataagtgcactt

SEQ ID NO: 994055 - DNA, 15 bp, Homo sapiens
caaaataagtgcact

SEQ ID NO: 994056 - DNA, 15 bp, Homo sapiens
acaaaataagtgcac

SEQ ID NO: 994057 - DNA, 15 bp, Homo sapiens
aacaaaataagtgca

SEQ ID NO: 994058 - DNA, 15 bp, Homo sapiens
caacaaaataagtgc

SEQ ID NO: 994059 - DNA, 15 bp, Homo sapiens
acaacaaaataagtg

SEQ ID NO: 994060 - DNA, 15 bp, Homo sapiens
cacaacaaaataagt

SEQ ID NO: 994061 - DNA, 15 bp, Homo sapiens
gcacaacaaaataag

SEQ ID NO: 994062 - DNA, 15 bp, Homo sapiens
cgcacaacaaaataa

SEQ ID NO: 994063 - DNA, 15 bp, Homo sapiens
ccgcacaacaaaata

SEQ ID NO: 994064 - DNA, 15 bp, Homo sapiens
gccgcacaacaaaat

SEQ ID NO: 994065 - DNA, 15 bp, Homo sapiens
ggccgcacaacaaaa

SEQ ID NO: 994066 - DNA, 15 bp, Homo sapiens
tggccgcacaacaaa

SEQ ID NO: 994067 - DNA, 15 bp, Homo sapiens
ttggccgcacaacaa

SEQ ID NO: 994068 - DNA, 15 bp, Homo sapiens
attggccgcacaaca

SEQ ID NO: 994069 - DNA, 15 bp, Homo sapiens
gattggccgcacaac

SEQ ID NO: 994070 - DNA, 15 bp, Homo sapiens
agattggccgcacaa

SEQ ID NO: 994071 - DNA, 15 bp, Homo sapiens
gagattggccgcaca

SEQ ID NO: 994072 - DNA, 15 bp, Homo sapiens
ggagattggccgcac

SEQ ID NO: 994073 - DNA, 15 bp, Homo sapiens
tggagattggccgca

SEQ ID NO: 994074 - DNA, 15 bp, Homo sapiens
ctggagattggccgc

SEQ ID NO: 994075 - DNA, 15 bp, Homo sapiens
tctggagattggccg

SEQ ID NO: 994076 - DNA, 15 bp, Homo sapiens
ttctggagattggcc

SEQ ID NO: 994077 - DNA, 15 bp, Homo sapiens
gttctggagattggc

SEQ ID NO: 994078 - DNA, 15 bp, Homo sapiens
agttctggagattgg

SEQ ID NO: 994079 - DNA, 15 bp, Homo sapiens
aagttctggagattg

SEQ ID NO: 994080 - DNA, 15 bp, Homo sapiens
gaagttctggagatt

SEQ ID NO: 994081 - DNA, 15 bp, Homo sapiens
agaagttctggagat

SEQ ID NO: 994082 - DNA, 15 bp, Homo sapiens
aagaagttctggaga

SEQ ID NO: 994083 - DNA, 15 bp, Homo sapiens
gaagaagttctggag

SEQ ID NO: 994084 - DNA, 15 bp, Homo sapiens
tgaagaagttctgga

SEQ ID NO: 994085 - DNA, 15 bp, Homo sapiens
gtgaagaagttctgg

SEQ ID NO: 994086 - DNA, 15 bp, Homo sapiens
ggtgaagaagttctg

SEQ ID NO: 994087 - DNA, 15 bp, Homo sapiens
aggtgaagaagttct

SEQ ID NO: 994088 - DNA, 15 bp, Homo sapiens
aaggtgaagaagttc

SEQ ID NO: 994089 - DNA, 15 bp, Homo sapiens
caaggtgaagaagtt

SEQ ID NO: 994090 - DNA, 15 bp, Homo sapiens
gcaaggtgaagaagt

SEQ ID NO: 994091 - DNA, 15 bp, Homo sapiens
tgcaaggtgaagaag

SEQ ID NO: 994092 - DNA, 15 bp, Homo sapiens
ttgcaaggtgaagaa

SEQ ID NO: 994093 - DNA, 15 bp, Homo sapiens
tttgcaaggtgaaga

SEQ ID NO: 994094 - DNA, 15 bp, Homo sapiens
ttttgcaaggtgaag

SEQ ID NO: 994095 - DNA, 15 bp, Homo sapiens
gttttgcaaggtgaa

SEQ ID NO: 994096 - DNA, 15 bp, Homo sapiens
tgttttgcaaggtga

SEQ ID NO: 994097 - DNA, 15 bp, Homo sapiens
ctgttttgcaaggtg

SEQ ID NO: 994098 - DNA, 15 bp, Homo sapiens
tctgttttgcaaggt

SEQ ID NO: 994099 - DNA, 15 bp, Homo sapiens
ttctgttttgcaagg

SEQ ID NO: 994100 - DNA, 15 bp, Homo sapiens
tttctgttttgcaag

SEQ ID NO: 994101 - DNA, 15 bp, Homo sapiens
atttctgttttgcaa

SEQ ID NO: 994102 - DNA, 15 bp, Homo sapiens
aatttctgttttgca

SEQ ID NO: 994103 - DNA, 15 bp, Homo sapiens
gaatttctgttttgc

SEQ ID NO: 994104 - DNA, 15 bp, Homo sapiens
agaatttctgttttg

SEQ ID NO: 994105 - DNA, 15 bp, Homo sapiens
cagaatttctgtttt

SEQ ID NO: 994106 - DNA, 15 bp, Homo sapiens
acagaatttctgttt

SEQ ID NO: 994107 - DNA, 15 bp, Homo sapiens
tacagaatttctgtt

SEQ ID NO: 994108 - DNA, 15 bp, Homo sapiens
gtacagaatttctgt

SEQ ID NO: 994109 - DNA, 15 bp, Homo sapiens
agtacagaatttctg

SEQ ID NO: 994110 - DNA, 15 bp, Homo sapiens
gagtacagaatttct

SEQ ID NO: 994111 - DNA, 15 bp, Homo sapiens
tgagtacagaatttc

SEQ ID NO: 994112 - DNA, 15 bp, Homo sapiens
atgagtacagaattt

SEQ ID NO: 994113 - DNA, 15 bp, Homo sapiens
aatgagtacagaatt

SEQ ID NO: 994114 - DNA, 15 bp, Homo sapiens
taatgagtacagaat

SEQ ID NO: 994115 - DNA, 15 bp, Homo sapiens
ttaatgagtacagaa

SEQ ID NO: 994116 - DNA, 15 bp, Homo sapiens
tttaatgagtacaga

SEQ ID NO: 994117 - DNA, 15 bp, Homo sapiens
gtttaatgagtacag

SEQ ID NO: 994118 - DNA, 15 bp, Homo sapiens
tgtttaatgagtaca

SEQ ID NO: 994119 - DNA, 15 bp, Homo sapiens
ttgtttaatgagtac

SEQ ID NO: 994120 - DNA, 15 bp, Homo sapiens
gttgtttaatgagta

SEQ ID NO: 994121 - DNA, 15 bp, Homo sapiens
agttgtttaatgagt

SEQ ID NO: 994122 - DNA, 15 bp, Homo sapiens
gagttgtttaatgag

SEQ ID NO: 994123 - DNA, 15 bp, Homo sapiens
ggagttgtttaatga

SEQ ID NO: 994124 - DNA, 15 bp, Homo sapiens
gggagttgtttaatg

SEQ ID NO: 994125 - DNA, 15 bp, Homo sapiens
ggggagttgtttaat

SEQ ID NO: 994126 - DNA, 15 bp, Homo sapiens
tggggagttgtttaa

SEQ ID NO: 994127 - DNA, 15 bp, Homo sapiens
atggggagttgttta

SEQ ID NO: 994128 - DNA, 15 bp, Homo sapiens
aatggggagttgttt

SEQ ID NO: 994129 - DNA, 15 bp, Homo sapiens
aaatggggagttgtt

SEQ ID NO: 994130 - DNA, 15 bp, Homo sapiens
gaaatggggagttgt

SEQ ID NO: 994131 - DNA, 15 bp, Homo sapiens
ggaaatggggagttg

SEQ ID NO: 994132 - DNA, 15 bp, Homo sapiens
gggaaatggggagtt

SEQ ID NO: 994133 - DNA, 15 bp, Homo sapiens
gggggaaatggggag

SEQ ID NO: 994134 - DNA, 15 bp, Homo sapiens
agggggaaatgggga

SEQ ID NO: 994135 - DNA, 15 bp, Homo sapiens
gagggggaaatgggg

SEQ ID NO: 994136 - DNA, 15 bp, Homo sapiens
ggagggggaaatggg

SEQ ID NO: 994137 - DNA, 15 bp, Homo sapiens
gggagggggaaatgg

SEQ ID NO: 994138 - DNA, 15 bp, Homo sapiens
ggggagggggaaatg

SEQ ID NO: 994139 - DNA, 15 bp, Homo sapiens
gggggagggggaaat

SEQ ID NO: 994140 - DNA, 15 bp, Homo sapiens
ggggggagggggaaa

SEQ ID NO: 994141 - DNA, 15 bp, Homo sapiens
tggggggagggggaa

SEQ ID NO: 994142 - DNA, 15 bp, Homo sapiens
ctggggggaggggga

SEQ ID NO: 994143 - DNA, 15 bp, Homo sapiens
gctggggggaggggg

SEQ ID NO: 994144 - DNA, 15 bp, Homo sapiens
agctggggggagggg

SEQ ID NO: 994145 - DNA, 15 bp, Homo sapiens
aagctggggggaggg

SEQ ID NO: 994146 - DNA, 15 bp, Homo sapiens
gaagctggggggagg

SEQ ID NO: 994147 - DNA, 15 bp, Homo sapiens
agaagctggggggag

SEQ ID NO: 994148 - DNA, 15 bp, Homo sapiens
cagaagctgggggga

SEQ ID NO: 994149 - DNA, 15 bp, Homo sapiens
tcagaagctgggggg

SEQ ID NO: 994150 - DNA, 15 bp, Homo sapiens
gtcagaagctggggg

SEQ ID NO: 994151 - DNA, 15 bp, Homo sapiens
tgtcagaagctgggg

SEQ ID NO: 994152 - DNA, 15 bp, Homo sapiens
ttgtcagaagctggg

SEQ ID NO: 994153 - DNA, 15 bp, Homo sapiens
gttgtcagaagctgg

SEQ ID NO: 994154 - DNA, 15 bp, Homo sapiens
ggttgtcagaagctg

SEQ ID NO: 994155 - DNA, 15 bp, Homo sapiens
tggttgtcagaagct

SEQ ID NO: 994156 - DNA, 15 bp, Homo sapiens
gtggttgtcagaagc

SEQ ID NO: 994157 - DNA, 15 bp, Homo sapiens
ggtggttgtcagaag

SEQ ID NO: 994158 - DNA, 15 bp, Homo sapiens
tggtggttgtcagaa

SEQ ID NO: 994159 - DNA, 15 bp, Homo sapiens
atggtggttgtcaga

SEQ ID NO: 994160 - DNA, 15 bp, Homo sapiens
aatggtggttgtcag

SEQ ID NO: 994161 - DNA, 15 bp, Homo sapiens
gaatggtggttgtca

SEQ ID NO: 994162 - DNA, 15 bp, Homo sapiens
agaatggtggttgtc

SEQ ID NO: 994163 - DNA, 15 bp, Homo sapiens
tagaatggtggttgt

SEQ ID NO: 994164 - DNA, 15 bp, Homo sapiens
atagaatggtggttg

SEQ ID NO: 994165 - DNA, 15 bp, Homo sapiens
aatagaatggtggtt

SEQ ID NO: 994166 - DNA, 15 bp, Homo sapiens
aaatagaatggtggt

SEQ ID NO: 994167 - DNA, 15 bp, Homo sapiens
aaaatagaatggtgg

SEQ ID NO: 994168 - DNA, 15 bp, Homo sapiens
gaaaatagaatggtg

SEQ ID NO: 994169 - DNA, 15 bp, Homo sapiens
agaaaatagaatggt

SEQ ID NO: 994170 - DNA, 15 bp, Homo sapiens
cagaaaatagaatgg

SEQ ID NO: 994171 - DNA, 15 bp, Homo sapiens
acagaaaatagaatg

SEQ ID NO: 994172 - DNA, 15 bp, Homo sapiens
gacagaaaatagaat

SEQ ID NO: 994173 - DNA, 15 bp, Homo sapiens
agacagaaaatagaa

SEQ ID NO: 994174 - DNA, 15 bp, Homo sapiens
tagacagaaaataga

SEQ ID NO: 994175 - DNA, 15 bp, Homo sapiens
atagacagaaaatag

SEQ ID NO: 994176 - DNA, 15 bp, Homo sapiens
aatagacagaaaata

SEQ ID NO: 994177 - DNA, 15 bp, Homo sapiens
taatagacagaaaat

SEQ ID NO: 994178 - DNA, 15 bp, Homo sapiens
ttaatagacagaaaa

SEQ ID NO: 994179 - DNA, 15 bp, Homo sapiens
attaatagacagaaa

SEQ ID NO: 994180 - DNA, 15 bp, Homo sapiens
aattaatagacagaa

SEQ ID NO: 994181 - DNA, 15 bp, Homo sapiens
aaattaatagacaga

SEQ ID NO: 994182 - DNA, 15 bp, Homo sapiens
caaattaatagacag

SEQ ID NO: 994183 - DNA, 15 bp, Homo sapiens
tcaaattaatagaca

SEQ ID NO: 994184 - DNA, 15 bp, Homo sapiens
gtcaaattaatagac

SEQ ID NO: 994185 - DNA, 15 bp, Homo sapiens
tgtcaaattaataga

SEQ ID NO: 994186 - DNA, 15 bp, Homo sapiens
ttgtcaaattaatag

SEQ ID NO: 994187 - DNA, 15 bp, Homo sapiens
gttgtcaaattaata

SEQ ID NO: 994188 - DNA, 15 bp, Homo sapiens
agttgtcaaattaat

SEQ ID NO: 994189 - DNA, 15 bp, Homo sapiens
aagttgtcaaattaa

SEQ ID NO: 994190 - DNA, 15 bp, Homo sapiens
gaagttgtcaaatta

SEQ ID NO: 994191 - DNA, 15 bp, Homo sapiens
tgaagttgtcaaatt

SEQ ID NO: 994192 - DNA, 15 bp, Homo sapiens
ctgaagttgtcaaat

SEQ ID NO: 994193 - DNA, 15 bp, Homo sapiens
tctgaagttgtcaaa

SEQ ID NO: 994194 - DNA, 15 bp, Homo sapiens
atctgaagttgtcaa

SEQ ID NO: 994195 - DNA, 15 bp, Homo sapiens
tatctgaagttgtca

SEQ ID NO: 994196 - DNA, 15 bp, Homo sapiens
gtatctgaagttgtc

SEQ ID NO: 994197 - DNA, 15 bp, Homo sapiens
ggtatctgaagttgt

SEQ ID NO: 994198 - DNA, 15 bp, Homo sapiens
aggtatctgaagttg

SEQ ID NO: 994199 - DNA, 15 bp, Homo sapiens
aaggtatctgaagtt

SEQ ID NO: 994200 - DNA, 15 bp, Homo sapiens
taaggtatctgaagt

SEQ ID NO: 994201 - DNA, 15 bp, Homo sapiens
ataaggtatctgaag

SEQ ID NO: 994202 - DNA, 15 bp, Homo sapiens
tataaggtatctgaa

SEQ ID NO: 994203 - DNA, 15 bp, Homo sapiens
atataaggtatctga

SEQ ID NO: 994204 - DNA, 15 bp, Homo sapiens
tatataaggtatctg

SEQ ID NO: 994205 - DNA, 15 bp, Homo sapiens
ttatataaggtatct

SEQ ID NO: 994206 - DNA, 15 bp, Homo sapiens
cttatataaggtatc

SEQ ID NO: 994207 - DNA, 15 bp, Homo sapiens
acttatataaggtat

SEQ ID NO: 994208 - DNA, 15 bp, Homo sapiens
cacttatataaggta

SEQ ID NO: 994209 - DNA, 15 bp, Homo sapiens
tcacttatataaggt

SEQ ID NO: 994210 - DNA, 15 bp, Homo sapiens
ttcacttatataagg

SEQ ID NO: 994211 - DNA, 15 bp, Homo sapiens
tttcacttatataag

SEQ ID NO: 994212 - DNA, 15 bp, Homo sapiens
atttcacttatataa

SEQ ID NO: 994213 - DNA, 15 bp, Homo sapiens
aatttcacttatata

SEQ ID NO: 994214 - DNA, 15 bp, Homo sapiens
aaatttcacttatat

SEQ ID NO: 994215 - DNA, 15 bp, Homo sapiens
taaatttcacttata

SEQ ID NO: 994216 - DNA, 15 bp, Homo sapiens
ataaatttcacttat

SEQ ID NO: 994217 - DNA, 15 bp, Homo sapiens
tataaatttcactta

SEQ ID NO: 994218 - DNA, 15 bp, Homo sapiens
atataaatttcactt

SEQ ID NO: 994219 - DNA, 15 bp, Homo sapiens
tatataaatttcact

SEQ ID NO: 994220 - DNA, 15 bp, Homo sapiens
ctatataaatttcac

SEQ ID NO: 994221 - DNA, 15 bp, Homo sapiens
actatataaatttca

SEQ ID NO: 994222 - DNA, 15 bp, Homo sapiens
tactatataaatttc

SEQ ID NO: 994223 - DNA, 15 bp, Homo sapiens
atactatataaattt

SEQ ID NO: 994224 - DNA, 15 bp, Homo sapiens
aatactatataaatt

SEQ ID NO: 994225 - DNA, 15 bp, Homo sapiens
aaatactatataaat

SEQ ID NO: 994226 - DNA, 15 bp, Homo sapiens
caaatactatataaa

SEQ ID NO: 994227 - DNA, 15 bp, Homo sapiens
gcaaatactatataa

SEQ ID NO: 994228 - DNA, 15 bp, Homo sapiens
agcaaatactatata

SEQ ID NO: 994229 - DNA, 15 bp, Homo sapiens
gagcaaatactatat

SEQ ID NO: 994230 - DNA, 15 bp, Homo sapiens
agagcaaatactata

SEQ ID NO: 994231 - DNA, 15 bp, Homo sapiens
aagagcaaatactat

SEQ ID NO: 994232 - DNA, 15 bp, Homo sapiens
gaagagcaaatacta

SEQ ID NO: 994233 - DNA, 15 bp, Homo sapiens
ggaagagcaaatact

SEQ ID NO: 994234 - DNA, 15 bp, Homo sapiens
tggaagagcaaatac

SEQ ID NO: 994235 - DNA, 15 bp, Homo sapiens
atggaagagcaaata

SEQ ID NO: 994236 - DNA, 15 bp, Homo sapiens
catggaagagcaaat

SEQ ID NO: 994237 - DNA, 15 bp, Homo sapiens
tcatggaagagcaaa

SEQ ID NO: 994238 - DNA, 15 bp, Homo sapiens
gtcatggaagagcaa

SEQ ID NO: 994239 - DNA, 15 bp, Homo sapiens
tgtcatggaagagca

SEQ ID NO: 994240 - DNA, 15 bp, Homo sapiens
ctgtcatggaagagc

SEQ ID NO: 994241 - DNA, 15 bp, Homo sapiens
cctgtcatggaagag

SEQ ID NO: 994242 - DNA, 15 bp, Homo sapiens
gcctgtcatggaaga

SEQ ID NO: 994243 - DNA, 15 bp, Homo sapiens
agcctgtcatggaag

SEQ ID NO: 994244 - DNA, 15 bp, Homo sapiens
aagcctgtcatggaa

SEQ ID NO: 994245 - DNA, 15 bp, Homo sapiens
taagcctgtcatgga

SEQ ID NO: 994246 - DNA, 15 bp, Homo sapiens
ataagcctgtcatgg

SEQ ID NO: 994247 - DNA, 15 bp, Homo sapiens
aataagcctgtcatg

SEQ ID NO: 994248 - DNA, 15 bp, Homo sapiens
aaataagcctgtcat

SEQ ID NO: 994249 - DNA, 15 bp, Homo sapiens
gaaataagcctgtca

SEQ ID NO: 994250 - DNA, 15 bp, Homo sapiens
tgaaataagcctgtc

SEQ ID NO: 994251 - DNA, 15 bp, Homo sapiens
gtgaaataagcctgt

SEQ ID NO: 994252 - DNA, 15 bp, Homo sapiens
agtgaaataagcctg

SEQ ID NO: 994253 - DNA, 15 bp, Homo sapiens
aagtgaaataagcct

SEQ ID NO: 994254 - DNA, 15 bp, Homo sapiens
cgctaagtgaaataa

SEQ ID NO: 994255 - DNA, 15 bp, Homo sapiens
acgctaagtgaaata

SEQ ID NO: 994256 - DNA, 15 bp, Homo sapiens
tacgctaagtgaaat

SEQ ID NO: 994257 - DNA, 15 bp, Homo sapiens
ttacgctaagtgaaa

SEQ ID NO: 994258 - DNA, 15 bp, Homo sapiens
attacgctaagtgaa

SEQ ID NO: 994259 - DNA, 15 bp, Homo sapiens
cattacgctaagtga

SEQ ID NO: 994260 - DNA, 15 bp, Homo sapiens
acattacgctaagtg

SEQ ID NO: 994261 - DNA, 15 bp, Homo sapiens
gacattacgctaagt

SEQ ID NO: 994262 - DNA, 15 bp, Homo sapiens
cgacattacgctaag

SEQ ID NO: 994263 - DNA, 15 bp, Homo sapiens
acgacattacgctaa

SEQ ID NO: 994264 - DNA, 15 bp, Homo sapiens
gacgacattacgcta

SEQ ID NO: 994265 - DNA, 15 bp, Homo sapiens
tgacgacattacgct

SEQ ID NO: 994266 - DNA, 15 bp, Homo sapiens
ctgacgacattacgc

SEQ ID NO: 994267 - DNA, 15 bp, Homo sapiens
cctgacgacattacg

SEQ ID NO: 994268 - DNA, 15 bp, Homo sapiens
ccctgacgacattac

SEQ ID NO: 994269 - DNA, 15 bp, Homo sapiens
accctgacgacatta

SEQ ID NO: 994270 - DNA, 15 bp, Homo sapiens
aaccctgacgacatt

SEQ ID NO: 994271 - DNA, 15 bp, Homo sapiens
gaaccctgacgacat

SEQ ID NO: 994272 - DNA, 15 bp, Homo sapiens
tgaaccctgacgaca

SEQ ID NO: 994273 - DNA, 15 bp, Homo sapiens
atgaaccctgacgac

SEQ ID NO: 994274 - DNA, 15 bp, Homo sapiens
aatgaaccctgacga

SEQ ID NO: 994275 - DNA, 15 bp, Homo sapiens
aaatgaaccctgacg

SEQ ID NO: 994276 - DNA, 15 bp, Homo sapiens
taaatgaaccctgac

SEQ ID NO: 994277 - DNA, 15 bp, Homo sapiens
ataaatgaaccctga

SEQ ID NO: 994278 - DNA, 15 bp, Homo sapiens
gataaatgaaccctg

SEQ ID NO: 994279 - DNA, 15 bp, Homo sapiens
agataaatgaaccct

SEQ ID NO: 994280 - DNA, 15 bp, Homo sapiens
aagataaatgaaccc

SEQ ID NO: 994281 - DNA, 15 bp, Homo sapiens
caagataaatgaacc

SEQ ID NO: 994282 - DNA, 15 bp, Homo sapiens
gcaagataaatgaac

SEQ ID NO: 994283 - DNA, 15 bp, Homo sapiens
tgcaagataaatgaa

SEQ ID NO: 994284 - DNA, 15 bp, Homo sapiens
ttgcaagataaatga

SEQ ID NO: 994285 - DNA, 15 bp, Homo sapiens
gttgcaagataaatg

SEQ ID NO: 994286 - DNA, 15 bp, Homo sapiens
tgttgcaagataaat

SEQ ID NO: 994287 - DNA, 15 bp, Homo sapiens
atgttgcaagataaa

SEQ ID NO: 994288 - DNA, 15 bp, Homo sapiens
catgttgcaagataa

SEQ ID NO: 994289 - DNA, 15 bp, Homo sapiens
acatgttgcaagata

SEQ ID NO: 994290 - DNA, 15 bp, Homo sapiens
gacatgttgcaagat

SEQ ID NO: 994291 - DNA, 15 bp, Homo sapiens
tgacatgttgcaaga

SEQ ID NO: 994292 - DNA, 15 bp, Homo sapiens
ctgacatgttgcaag

SEQ ID NO: 994293 - DNA, 15 bp, Homo sapiens
tctgacatgttgcaa

SEQ ID NO: 994294 - DNA, 15 bp, Homo sapiens
ttctgacatgttgca

SEQ ID NO: 994295 - DNA, 15 bp, Homo sapiens
attctgacatgttgc

SEQ ID NO: 994296 - DNA, 15 bp, Homo sapiens
aattctgacatgttg

SEQ ID NO: 994297 - DNA, 15 bp, Homo sapiens
aaattctgacatgtt

SEQ ID NO: 994298 - DNA, 15 bp, Homo sapiens
gaaattctgacatgt

SEQ ID NO: 994299 - DNA, 15 bp, Homo sapiens
ggaaattctgacatg

SEQ ID NO: 994300 - DNA, 15 bp, Homo sapiens
ggaaggaaattctga

SEQ ID NO: 994301 - DNA, 15 bp, Homo sapiens
aggaaggaaattctg

SEQ ID NO: 994302 - DNA, 15 bp, Homo sapiens
aaggaaggaaattct

SEQ ID NO: 994303 - DNA, 15 bp, Homo sapiens
aaaggaaggaaattc

SEQ ID NO: 994304 - DNA, 15 bp, Homo sapiens
aaaaggaaggaaatt

SEQ ID NO: 994305 - DNA, 15 bp, Homo sapiens
aaaaaggaaggaaat

SEQ ID NO: 994306 - DNA, 15 bp, Homo sapiens
taaaaaggaaggaaa

SEQ ID NO: 994307 - DNA, 15 bp, Homo sapiens
ttaaaaaggaaggaa

SEQ ID NO: 994308 - DNA, 15 bp, Homo sapiens
cttaaaaaggaagga

SEQ ID NO: 994309 - DNA, 15 bp, Homo sapiens
ccttaaaaaggaagg

SEQ ID NO: 994310 - DNA, 15 bp, Homo sapiens
gccttaaaaaggaag

SEQ ID NO: 994311 - DNA, 15 bp, Homo sapiens
agccttaaaaaggaa

SEQ ID NO: 994312 - DNA, 15 bp, Homo sapiens
cagccttaaaaagga

SEQ ID NO: 994313 - DNA, 15 bp, Homo sapiens
tcagccttaaaaagg

SEQ ID NO: 994314 - DNA, 15 bp, Homo sapiens
ttcagccttaaaaag

SEQ ID NO: 994315 - DNA, 15 bp, Homo sapiens
cttcagccttaaaaa

SEQ ID NO: 994316 - DNA, 15 bp, Homo sapiens
ccttcagccttaaaa

SEQ ID NO: 994317 - DNA, 15 bp, Homo sapiens
accttcagccttaaa

SEQ ID NO: 994318 - DNA, 15 bp, Homo sapiens
aaccttcagccttaa

SEQ ID NO: 994319 - DNA, 15 bp, Homo sapiens
caaccttcagcctta

SEQ ID NO: 994320 - DNA, 15 bp, Homo sapiens
acaaccttcagcctt

SEQ ID NO: 994321 - DNA, 15 bp, Homo sapiens
aacaaccttcagcct

SEQ ID NO: 994322 - DNA, 15 bp, Homo sapiens
gaacaaccttcagcc

SEQ ID NO: 994323 - DNA, 15 bp, Homo sapiens
ggaacaaccttcagc

SEQ ID NO: 994324 - DNA, 15 bp, Homo sapiens
tggaacaaccttcag

SEQ ID NO: 994325 - DNA, 15 bp, Homo sapiens
ctggaacaaccttca

SEQ ID NO: 994326 - DNA, 15 bp, Homo sapiens
actggaacaaccttc

SEQ ID NO: 994327 - DNA, 15 bp, Homo sapiens
cactggaacaacctt

SEQ ID NO: 994328 - DNA, 15 bp, Homo sapiens
acactggaacaacct

SEQ ID NO: 994329 - DNA, 15 bp, Homo sapiens
cacactggaacaacc

SEQ ID NO: 994330 - DNA, 15 bp, Homo sapiens
acacactggaacaac

SEQ ID NO: 994331 - DNA, 15 bp, Homo sapiens
cacacactggaacaa

SEQ ID NO: 994332 - DNA, 15 bp, Homo sapiens
acacacactggaaca

SEQ ID NO: 994333 - DNA, 15 bp, Homo sapiens
tacacacactggaac

SEQ ID NO: 994334 - DNA, 15 bp, Homo sapiens
atacacacactggaa

SEQ ID NO: 994335 - DNA, 15 bp, Homo sapiens
tatacacacactgga

SEQ ID NO: 994336 - DNA, 15 bp, Homo sapiens
atatacacacactgg

SEQ ID NO: 994337 - DNA, 15 bp, Homo sapiens
gatatacacacactg

SEQ ID NO: 994338 - DNA, 15 bp, Homo sapiens
tgatatacacacact

SEQ ID NO: 994339 - DNA, 15 bp, Homo sapiens
gtgatatacacacac

SEQ ID NO: 994340 - DNA, 15 bp, Homo sapiens
tgtgatatacacaca

SEQ ID NO: 994341 - DNA, 15 bp, Homo sapiens
atgtgatatacacac

SEQ ID NO: 994342 - DNA, 15 bp, Homo sapiens
tatgtgatatacaca

SEQ ID NO: 994343 - DNA, 15 bp, Homo sapiens
gtatgtgatatacac

SEQ ID NO: 994344 - DNA, 15 bp, Homo sapiens
agtatgtgatataca

SEQ ID NO: 994345 - DNA, 15 bp, Homo sapiens
aagtatgtgatatac

SEQ ID NO: 994346 - DNA, 15 bp, Homo sapiens
gaagtatgtgatata

SEQ ID NO: 994347 - DNA, 15 bp, Homo sapiens
tgaagtatgtgatat

SEQ ID NO: 994348 - DNA, 15 bp, Homo sapiens
atgaagtatgtgata

SEQ ID NO: 994349 - DNA, 15 bp, Homo sapiens
aatgaagtatgtgat

SEQ ID NO: 994350 - DNA, 15 bp, Homo sapiens
aaatgaagtatgtga

SEQ ID NO: 994351 - DNA, 15 bp, Homo sapiens
taaatgaagtatgtg

SEQ ID NO: 994352 - DNA, 15 bp, Homo sapiens
ataaatgaagtatgt

SEQ ID NO: 994353 - DNA, 15 bp, Homo sapiens
gataaatgaagtatg

SEQ ID NO: 994354 - DNA, 15 bp, Homo sapiens
ggataaatgaagtat

SEQ ID NO: 994355 - DNA, 15 bp, Homo sapiens
tggataaatgaagta

SEQ ID NO: 994356 - DNA, 15 bp, Homo sapiens
atggataaatgaagt

SEQ ID NO: 994357 - DNA, 15 bp, Homo sapiens
aatggataaatgaag

SEQ ID NO: 994358 - DNA, 15 bp, Homo sapiens
gaatggataaatgaa

SEQ ID NO: 994359 - DNA, 15 bp, Homo sapiens
tgaatggataaatga

SEQ ID NO: 994360 - DNA, 15 bp, Homo sapiens
atgaatggataaatg

SEQ ID NO: 994361 - DNA, 15 bp, Homo sapiens
gatgaatggataaat

SEQ ID NO: 994362 - DNA, 15 bp, Homo sapiens
ggatgaatggataaa

SEQ ID NO: 994363 - DNA, 15 bp, Homo sapiens
tggatgaatggataa

SEQ ID NO: 994364 - DNA, 15 bp, Homo sapiens
atggatgaatggata

SEQ ID NO: 994365 - DNA, 15 bp, Homo sapiens
gatggatgaatggat

SEQ ID NO: 994366 - DNA, 15 bp, Homo sapiens
tgatggatgaatgga

SEQ ID NO: 994367 - DNA, 15 bp, Homo sapiens
ctgatggatgaatgg

SEQ ID NO: 994368 - DNA, 15 bp, Homo sapiens
cctgatggatgaatg

SEQ ID NO: 994369 - DNA, 15 bp, Homo sapiens
tcctgatggatgaat

SEQ ID NO: 994370 - DNA, 15 bp, Homo sapiens
ctcctgatggatgaa

SEQ ID NO: 994371 - DNA, 15 bp, Homo sapiens
tctcctgatggatga

SEQ ID NO: 994372 - DNA, 15 bp, Homo sapiens
atctcctgatggatg

SEQ ID NO: 994373 - DNA, 15 bp, Homo sapiens
tatctcctgatggat

SEQ ID NO: 994374 - DNA, 15 bp, Homo sapiens
gtatctcctgatgga

SEQ ID NO: 994375 - DNA, 15 bp, Homo sapiens
agtatctcctgatgg

SEQ ID NO: 994376 - DNA, 15 bp, Homo sapiens
aagtatctcctgatg

SEQ ID NO: 994377 - DNA, 15 bp, Homo sapiens
caagtatctcctgat

SEQ ID NO: 994378 - DNA, 15 bp, Homo sapiens
ccaagtatctcctga

SEQ ID NO: 994379 - DNA, 15 bp, Homo sapiens
cccaagtatctcctg

SEQ ID NO: 994380 - DNA, 15 bp, Homo sapiens
acccaagtatctcct

SEQ ID NO: 994381 - DNA, 15 bp, Homo sapiens
aacccaagtatctcc

SEQ ID NO: 994382 - DNA, 15 bp, Homo sapiens
caacccaagtatctc

SEQ ID NO: 994383 - DNA, 15 bp, Homo sapiens
gcaacccaagtatct

SEQ ID NO: 994384 - DNA, 15 bp, Homo sapiens
agcaacccaagtatc

SEQ ID NO: 994385 - DNA, 15 bp, Homo sapiens
aagcaacccaagtat

SEQ ID NO: 994386 - DNA, 15 bp, Homo sapiens
gaagcaacccaagta

SEQ ID NO: 994387 - DNA, 15 bp, Homo sapiens
ggaagcaacccaagt

SEQ ID NO: 994388 - DNA, 15 bp, Homo sapiens
tggaagcaacccaag

SEQ ID NO: 994389 - DNA, 15 bp, Homo sapiens
gtggaagcaacccaa

SEQ ID NO: 994390 - DNA, 15 bp, Homo sapiens
agtggaagcaaccca

SEQ ID NO: 994391 - DNA, 15 bp, Homo sapiens
aagtggaagcaaccc

SEQ ID NO: 994392 - DNA, 15 bp, Homo sapiens
aaagtggaagcaacc

SEQ ID NO: 994393 - DNA, 15 bp, Homo sapiens
aaaagtggaagcaac

SEQ ID NO: 994394 - DNA, 15 bp, Homo sapiens
aaaaagtggaagcaa

SEQ ID NO: 994395 - DNA, 15 bp, Homo sapiens
caaaaagtggaagca

SEQ ID NO: 994396 - DNA, 15 bp, Homo sapiens
ccaaaaagtggaagc

SEQ ID NO: 994397 - DNA, 15 bp, Homo sapiens
gccaaaaagtggaag

SEQ ID NO: 994398 - DNA, 15 bp, Homo sapiens
agccaaaaagtggaa

SEQ ID NO: 994399 - DNA, 15 bp, Homo sapiens
tagccaaaaagtgga

SEQ ID NO: 994400 - DNA, 15 bp, Homo sapiens
atagccaaaaagtgg

SEQ ID NO: 994401 - DNA, 15 bp, Homo sapiens
aatagccaaaaagtg

SEQ ID NO: 994402 - DNA, 15 bp, Homo sapiens
caatagccaaaaagt

SEQ ID NO: 994403 - DNA, 15 bp, Homo sapiens
acaatagccaaaaag

SEQ ID NO: 994404 - DNA, 15 bp, Homo sapiens
cacaatagccaaaaa

SEQ ID NO: 994405 - DNA, 15 bp, Homo sapiens
ctcacaatagccaaa

SEQ ID NO: 994406 - DNA, 15 bp, Homo sapiens
actcacaatagccaa

SEQ ID NO: 994407 - DNA, 15 bp, Homo sapiens
tactcacaatagcca

SEQ ID NO: 994408 - DNA, 15 bp, Homo sapiens
ctactcacaatagcc

SEQ ID NO: 994409 - DNA, 15 bp, Homo sapiens
actactcacaatagc

SEQ ID NO: 994410 - DNA, 15 bp, Homo sapiens
cactactcacaatag

SEQ ID NO: 994411 - DNA, 15 bp, Homo sapiens
gcactactcacaata

SEQ ID NO: 994412 - DNA, 15 bp, Homo sapiens
agcactactcacaat

SEQ ID NO: 994413 - DNA, 15 bp, Homo sapiens
cagcactactcacaa

SEQ ID NO: 994414 - DNA, 15 bp, Homo sapiens
gcagcactactcaca

SEQ ID NO: 994415 - DNA, 15 bp, Homo sapiens
agcagcactactcac

SEQ ID NO: 994416 - DNA, 15 bp, Homo sapiens
tagcagcactactca

SEQ ID NO: 994417 - DNA, 15 bp, Homo sapiens
atagcagcactactc

SEQ ID NO: 994418 - DNA, 15 bp, Homo sapiens
catagcagcactact

SEQ ID NO: 994419 - DNA, 15 bp, Homo sapiens
tcatagcagcactac

SEQ ID NO: 994420 - DNA, 15 bp, Homo sapiens
ttcatagcagcacta

SEQ ID NO: 994421 - DNA, 15 bp, Homo sapiens
gttcatagcagcact

SEQ ID NO: 994422 - DNA, 15 bp, Homo sapiens
tgttcatagcagcac

SEQ ID NO: 994423 - DNA, 15 bp, Homo sapiens
atgttcatagcagca

SEQ ID NO: 994424 - DNA, 15 bp, Homo sapiens
catgttcatagcagc

SEQ ID NO: 994425 - DNA, 15 bp, Homo sapiens
ccatgttcatagcag

SEQ ID NO: 994426 - DNA, 15 bp, Homo sapiens
cccatgttcatagca

SEQ ID NO: 994427 - DNA, 15 bp, Homo sapiens
acccatgttcatagc

SEQ ID NO: 994428 - DNA, 15 bp, Homo sapiens
tacccatgttcatag

SEQ ID NO: 994429 - DNA, 15 bp, Homo sapiens
atacccatgttcata

SEQ ID NO: 994430 - DNA, 15 bp, Homo sapiens
catacccatgttcat

SEQ ID NO: 994431 - DNA, 15 bp, Homo sapiens
gcatacccatgttca

SEQ ID NO: 994432 - DNA, 15 bp, Homo sapiens
tgcatacccatgttc

SEQ ID NO: 994433 - DNA, 15 bp, Homo sapiens
ttgcatacccatgtt

SEQ ID NO: 994434 - DNA, 15 bp, Homo sapiens
tttgcatacccatgt

SEQ ID NO: 994435 - DNA, 15 bp, Homo sapiens
atttgcatacccatg

SEQ ID NO: 994436 - DNA, 15 bp, Homo sapiens
tatttgcatacccat

SEQ ID NO: 994437 - DNA, 15 bp, Homo sapiens
atatttgcataccca

SEQ ID NO: 994438 - DNA, 15 bp, Homo sapiens
gatatttgcataccc

SEQ ID NO: 994439 - DNA, 15 bp, Homo sapiens
agatatttgcatacc

SEQ ID NO: 994440 - DNA, 15 bp, Homo sapiens
aagatatttgcatac

SEQ ID NO: 994441 - DNA, 15 bp, Homo sapiens
aaagatatttgcata

SEQ ID NO: 994442 - DNA, 15 bp, Homo sapiens
aaaagatatttgcat

SEQ ID NO: 994443 - DNA, 15 bp, Homo sapiens
caaaagatatttgca

SEQ ID NO: 994444 - DNA, 15 bp, Homo sapiens
ccaaaagatatttgc

SEQ ID NO: 994445 - DNA, 15 bp, Homo sapiens
cccaaaagatatttg

SEQ ID NO: 994446 - DNA, 15 bp, Homo sapiens
ccccaaaagatattt

SEQ ID NO: 994447 - DNA, 15 bp, Homo sapiens
cccccaaaagatatt

SEQ ID NO: 994448 - DNA, 15 bp, Homo sapiens
tcccccaaaagatat

SEQ ID NO: 994449 - DNA, 15 bp, Homo sapiens
atcccccaaaagata

SEQ ID NO: 994450 - DNA, 15 bp, Homo sapiens
aatcccccaaaagat

SEQ ID NO: 994451 - DNA, 15 bp, Homo sapiens
gaatcccccaaaaga

SEQ ID NO: 994452 - DNA, 15 bp, Homo sapiens
agaatcccccaaaag

SEQ ID NO: 994453 - DNA, 15 bp, Homo sapiens
cagaatcccccaaaa

SEQ ID NO: 994454 - DNA, 15 bp, Homo sapiens
gcagaatcccccaaa

SEQ ID NO: 994455 - DNA, 15 bp, Homo sapiens
agcagaatcccccaa

SEQ ID NO: 994456 - DNA, 15 bp, Homo sapiens
aagcagaatccccca

SEQ ID NO: 994457 - DNA, 15 bp, Homo sapiens
aaagcagaatccccc

SEQ ID NO: 994458 - DNA, 15 bp, Homo sapiens
caaagcagaatcccc

SEQ ID NO: 994459 - DNA, 15 bp, Homo sapiens
tcaaagcagaatccc

SEQ ID NO: 994460 - DNA, 15 bp, Homo sapiens
ttcaaagcagaatcc

SEQ ID NO: 994461 - DNA, 15 bp, Homo sapiens
attcaaagcagaatc

SEQ ID NO: 994462 - DNA, 15 bp, Homo sapiens
aattcaaagcagaat

SEQ ID NO: 994463 - DNA, 15 bp, Homo sapiens
aaattcaaagcagaa

SEQ ID NO: 994464 - DNA, 15 bp, Homo sapiens
aaaattcaaagcaga

SEQ ID NO: 994465 - DNA, 15 bp, Homo sapiens
aaaaattcaaagcag

SEQ ID NO: 994466 - DNA, 15 bp, Homo sapiens
aaaaaattcaaagca

SEQ ID NO: 994467 - DNA, 15 bp, Homo sapiens
aaaaaaattcaaagc

SEQ ID NO: 994468 - DNA, 15 bp, Homo sapiens
caaaaaaattcaaag

SEQ ID NO: 994469 - DNA, 15 bp, Homo sapiens
ccaaaaaaattcaaa

SEQ ID NO: 994470 - DNA, 15 bp, Homo sapiens
tccaaaaaaattcaa

SEQ ID NO: 994471 - DNA, 15 bp, Homo sapiens
atccaaaaaaattca

SEQ ID NO: 994472 - DNA, 15 bp, Homo sapiens
tatccaaaaaaattc

SEQ ID NO: 994473 - DNA, 15 bp, Homo sapiens
atatccaaaaaaatt

SEQ ID NO: 994474 - DNA, 15 bp, Homo sapiens
tatatccaaaaaaat

SEQ ID NO: 994475 - DNA, 15 bp, Homo sapiens
atatatccaaaaaaa

SEQ ID NO: 994476 - DNA, 15 bp, Homo sapiens
tatatatccaaaaaa

SEQ ID NO: 994477 - DNA, 15 bp, Homo sapiens
gtatatatccaaaaa

SEQ ID NO: 994478 - DNA, 15 bp, Homo sapiens
agtatatatccaaaa

SEQ ID NO: 994479 - DNA, 15 bp, Homo sapiens
aagtatatatccaaa

SEQ ID NO: 994480 - DNA, 15 bp, Homo sapiens
caagtatatatccaa

SEQ ID NO: 994481 - DNA, 15 bp, Homo sapiens
ccaagtatatatcca

SEQ ID NO: 994482 - DNA, 15 bp, Homo sapiens
tccaagtatatatcc

SEQ ID NO: 994483 - DNA, 15 bp, Homo sapiens
ttccaagtatatatc

SEQ ID NO: 994484 - DNA, 15 bp, Homo sapiens
cttccaagtatatat

SEQ ID NO: 994485 - DNA, 15 bp, Homo sapiens
acttccaagtatata

SEQ ID NO: 994486 - DNA, 15 bp, Homo sapiens
cacttccaagtatat

SEQ ID NO: 994487 - DNA, 15 bp, Homo sapiens
ccacttccaagtata

SEQ ID NO: 994488 - DNA, 15 bp, Homo sapiens
tccacttccaagtat

SEQ ID NO: 994489 - DNA, 15 bp, Homo sapiens
ttccacttccaagta

SEQ ID NO: 994490 - DNA, 15 bp, Homo sapiens
attccacttccaagt

SEQ ID NO: 994491 - DNA, 15 bp, Homo sapiens
aattccacttccaag

SEQ ID NO: 994492 - DNA, 15 bp, Homo sapiens
caattccacttccaa

SEQ ID NO: 994493 - DNA, 15 bp, Homo sapiens
gcaattccacttcca

SEQ ID NO: 994494 - DNA, 15 bp, Homo sapiens
agcaattccacttcc

SEQ ID NO: 994495 - DNA, 15 bp, Homo sapiens
cagcaattccacttc

SEQ ID NO: 994496 - DNA, 15 bp, Homo sapiens
ccagcaattccactt

SEQ ID NO: 994497 - DNA, 15 bp, Homo sapiens
tccagcaattccact

SEQ ID NO: 994498 - DNA, 15 bp, Homo sapiens
atccagcaattccac

SEQ ID NO: 994499 - DNA, 15 bp, Homo sapiens
gatccagcaattcca

SEQ ID NO: 994500 - DNA, 15 bp, Homo sapiens
tgatccagcaattcc

SEQ ID NO: 994501 - DNA, 15 bp, Homo sapiens
tatgatccagcaatt

SEQ ID NO: 994502 - DNA, 15 bp, Homo sapiens
atatgatccagcaat

SEQ ID NO: 994503 - DNA, 15 bp, Homo sapiens
catatgatccagcaa

SEQ ID NO: 994504 - DNA, 15 bp, Homo sapiens
ccatatgatccagca

SEQ ID NO: 994505 - DNA, 15 bp, Homo sapiens
accatatgatccagc

SEQ ID NO: 994506 - DNA, 15 bp, Homo sapiens
taccatatgatccag

SEQ ID NO: 994507 - DNA, 15 bp, Homo sapiens
ttaccatatgatcca

SEQ ID NO: 994508 - DNA, 15 bp, Homo sapiens
attaccatatgatcc

SEQ ID NO: 994509 - DNA, 15 bp, Homo sapiens
aattaccatatgatc

SEQ ID NO: 994510 - DNA, 15 bp, Homo sapiens
gaattaccatatgat

SEQ ID NO: 994511 - DNA, 15 bp, Homo sapiens
agaattaccatatga

SEQ ID NO: 994512 - DNA, 15 bp, Homo sapiens
tagaattaccatatg

SEQ ID NO: 994513 - DNA, 15 bp, Homo sapiens
atagaattaccatat

SEQ ID NO: 994514 - DNA, 15 bp, Homo sapiens
aatagaattaccata

SEQ ID NO: 994515 - DNA, 15 bp, Homo sapiens
aaatagaattaccat

SEQ ID NO: 994516 - DNA, 15 bp, Homo sapiens
aaaatagaattacca

SEQ ID NO: 994517 - DNA, 15 bp, Homo sapiens
aaaaatagaattacc

SEQ ID NO: 994518 - DNA, 15 bp, Homo sapiens
taaaaatagaattac

SEQ ID NO: 994519 - DNA, 15 bp, Homo sapiens
ttaaaaatagaatta

SEQ ID NO: 994520 - DNA, 15 bp, Homo sapiens
attaaaaatagaatt

SEQ ID NO: 994521 - DNA, 15 bp, Homo sapiens
aattaaaaatagaat

SEQ ID NO: 994522 - DNA, 15 bp, Homo sapiens
caaaaaattaaaaat

SEQ ID NO: 994523 - DNA, 15 bp, Homo sapiens
ccaaaaaattaaaaa

SEQ ID NO: 994524 - DNA, 15 bp, Homo sapiens
cccaaaaaattaaaa

SEQ ID NO: 994525 - DNA, 15 bp, Homo sapiens
ccccaaaaaattaaa

SEQ ID NO: 994526 - DNA, 15 bp, Homo sapiens
tccccaaaaaattaa

SEQ ID NO: 994527 - DNA, 15 bp, Homo sapiens
ttccccaaaaaatta

SEQ ID NO: 994528 - DNA, 15 bp, Homo sapiens
gttccccaaaaaatt

SEQ ID NO: 994529 - DNA, 15 bp, Homo sapiens
ggttccccaaaaaat

SEQ ID NO: 994530 - DNA, 15 bp, Homo sapiens
tggttccccaaaaaa

SEQ ID NO: 994531 - DNA, 15 bp, Homo sapiens
atggttccccaaaaa

SEQ ID NO: 994532 - DNA, 15 bp, Homo sapiens
gatggttccccaaaa

SEQ ID NO: 994533 - DNA, 15 bp, Homo sapiens
tgatggttccccaaa

SEQ ID NO: 994534 - DNA, 15 bp, Homo sapiens
atgatggttccccaa

SEQ ID NO: 994535 - DNA, 15 bp, Homo sapiens
catgatggttcccca

SEQ ID NO: 994536 - DNA, 15 bp, Homo sapiens
gcatgatggttcccc

SEQ ID NO: 994537 - DNA, 15 bp, Homo sapiens
agcatgatggttccc

SEQ ID NO: 994538 - DNA, 15 bp, Homo sapiens
cagcatgatggttcc

SEQ ID NO: 994539 - DNA, 15 bp, Homo sapiens
acagcatgatggttc

SEQ ID NO: 994540 - DNA, 15 bp, Homo sapiens
aacagcatgatggtt

SEQ ID NO: 994541 - DNA, 15 bp, Homo sapiens
gaacagcatgatggt

SEQ ID NO: 994542 - DNA, 15 bp, Homo sapiens
agaacagcatgatgg

SEQ ID NO: 994543 - DNA, 15 bp, Homo sapiens
gagaacagcatgatg

SEQ ID NO: 994544 - DNA, 15 bp, Homo sapiens
ggagaacagcatgat

SEQ ID NO: 994545 - DNA, 15 bp, Homo sapiens
tggagaacagcatga

SEQ ID NO: 994546 - DNA, 15 bp, Homo sapiens
atggagaacagcatg

SEQ ID NO: 994547 - DNA, 15 bp, Homo sapiens
tatggagaacagcat

SEQ ID NO: 994548 - DNA, 15 bp, Homo sapiens
ctatggagaacagca

SEQ ID NO: 994549 - DNA, 15 bp, Homo sapiens
tctatggagaacagc

SEQ ID NO: 994550 - DNA, 15 bp, Homo sapiens
ctctatggagaacag

SEQ ID NO: 994551 - DNA, 15 bp, Homo sapiens
cctctatggagaaca

SEQ ID NO: 994552 - DNA, 15 bp, Homo sapiens
gcctctatggagaac

SEQ ID NO: 994553 - DNA, 15 bp, Homo sapiens
agcctctatggagaa

SEQ ID NO: 994554 - DNA, 15 bp, Homo sapiens
cagcctctatggaga

SEQ ID NO: 994555 - DNA, 15 bp, Homo sapiens
acagcctctatggag

SEQ ID NO: 994556 - DNA, 15 bp, Homo sapiens
cacagcctctatgga

SEQ ID NO: 994557 - DNA, 15 bp, Homo sapiens
gcacagcctctatgg

SEQ ID NO: 994558 - DNA, 15 bp, Homo sapiens
ggcacagcctctatg

SEQ ID NO: 994559 - DNA, 15 bp, Homo sapiens
tggcacagcctctat

SEQ ID NO: 994560 - DNA, 15 bp, Homo sapiens
atggcacagcctcta

SEQ ID NO: 994561 - DNA, 15 bp, Homo sapiens
aatggcacagcctct

SEQ ID NO: 994562 - DNA, 15 bp, Homo sapiens
aaatggcacagcctc

SEQ ID NO: 994563 - DNA, 15 bp, Homo sapiens
aaaatggcacagcct

SEQ ID NO: 994564 - DNA, 15 bp, Homo sapiens
taaaatggcacagcc

SEQ ID NO: 994565 - DNA, 15 bp, Homo sapiens
gtaaaatggcacagc

SEQ ID NO: 994566 - DNA, 15 bp, Homo sapiens
tgtaaaatggcacag

SEQ ID NO: 994567 - DNA, 15 bp, Homo sapiens
gaatgtaaaatggca

SEQ ID NO: 994568 - DNA, 15 bp, Homo sapiens
ggaatgtaaaatggc

SEQ ID NO: 994569 - DNA, 15 bp, Homo sapiens
gggaatgtaaaatgg

SEQ ID NO: 994570 - DNA, 15 bp, Homo sapiens
tgggaatgtaaaatg

SEQ ID NO: 994571 - DNA, 15 bp, Homo sapiens
gtgggaatgtaaaat

SEQ ID NO: 994572 - DNA, 15 bp, Homo sapiens
ggtgggaatgtaaaa

SEQ ID NO: 994573 - DNA, 15 bp, Homo sapiens
tggtgggaatgtaaa

SEQ ID NO: 994574 - DNA, 15 bp, Homo sapiens
ttggtgggaatgtaa

SEQ ID NO: 994575 - DNA, 15 bp, Homo sapiens
gttggtgggaatgta

SEQ ID NO: 994576 - DNA, 15 bp, Homo sapiens
tgttggtgggaatgt

SEQ ID NO: 994577 - DNA, 15 bp, Homo sapiens
ctgttggtgggaatg

SEQ ID NO: 994578 - DNA, 15 bp, Homo sapiens
cctgttggtgggaat

SEQ ID NO: 994579 - DNA, 15 bp, Homo sapiens
ccctgttggtgggaa

SEQ ID NO: 994580 - DNA, 15 bp, Homo sapiens
gccctgttggtggga

SEQ ID NO: 994581 - DNA, 15 bp, Homo sapiens
tgccctgttggtggg

SEQ ID NO: 994582 - DNA, 15 bp, Homo sapiens
gtgccctgttggtgg

SEQ ID NO: 994583 - DNA, 15 bp, Homo sapiens
tgtgccctgttggtg

SEQ ID NO: 994584 - DNA, 15 bp, Homo sapiens
ttgtgccctgttggt

SEQ ID NO: 994585 - DNA, 15 bp, Homo sapiens
cttgtgccctgttgg

SEQ ID NO: 994586 - DNA, 15 bp, Homo sapiens
ccttgtgccctgttg

SEQ ID NO: 994587 - DNA, 15 bp, Homo sapiens
cccttgtgccctgtt

SEQ ID NO: 994588 - DNA, 15 bp, Homo sapiens
acccttgtgccctgt

SEQ ID NO: 994589 - DNA, 15 bp, Homo sapiens
aacccttgtgccctg

SEQ ID NO: 994590 - DNA, 15 bp, Homo sapiens
gaacccttgtgccct

SEQ ID NO: 994591 - DNA, 15 bp, Homo sapiens
ggaacccttgtgccc

SEQ ID NO: 994592 - DNA, 15 bp, Homo sapiens
tggaacccttgtgcc

SEQ ID NO: 994593 - DNA, 15 bp, Homo sapiens
ctggaacccttgtgc

SEQ ID NO: 994594 - DNA, 15 bp, Homo sapiens
actggaacccttgtg

SEQ ID NO: 994595 - DNA, 15 bp, Homo sapiens
aactggaacccttgt

SEQ ID NO: 994596 - DNA, 15 bp, Homo sapiens
aaactggaacccttg

SEQ ID NO: 994597 - DNA, 15 bp, Homo sapiens
gaaactggaaccctt

SEQ ID NO: 994598 - DNA, 15 bp, Homo sapiens
agaaactggaaccct

SEQ ID NO: 994599 - DNA, 15 bp, Homo sapiens
gagaaactggaaccc

SEQ ID NO: 994600 - DNA, 15 bp, Homo sapiens
ggagaaactggaacc

SEQ ID NO: 994601 - DNA, 15 bp, Homo sapiens
tggagaaactggaac

SEQ ID NO: 994602 - DNA, 15 bp, Homo sapiens
gtggagaaactggaa

SEQ ID NO: 994603 - DNA, 15 bp, Homo sapiens
tgtggagaaactgga

SEQ ID NO: 994604 - DNA, 15 bp, Homo sapiens
atgtggagaaactgg

SEQ ID NO: 994605 - DNA, 15 bp, Homo sapiens
tatgtggagaaactg

SEQ ID NO: 994606 - DNA, 15 bp, Homo sapiens
gtatgtggagaaact

SEQ ID NO: 994607 - DNA, 15 bp, Homo sapiens
agtatgtggagaaac

SEQ ID NO: 994608 - DNA, 15 bp, Homo sapiens
aagtatgtggagaaa

SEQ ID NO: 994609 - DNA, 15 bp, Homo sapiens
taagtatgtggagaa

SEQ ID NO: 994610 - DNA, 15 bp, Homo sapiens
gtaagtatgtggaga

SEQ ID NO: 994611 - DNA, 15 bp, Homo sapiens
ggtaagtatgtggag

SEQ ID NO: 994612 - DNA, 15 bp, Homo sapiens
tggtaagtatgtgga

SEQ ID NO: 994613 - DNA, 15 bp, Homo sapiens
ttggtaagtatgtgg

SEQ ID NO: 994614 - DNA, 15 bp, Homo sapiens
gttggtaagtatgtg

SEQ ID NO: 994615 - DNA, 15 bp, Homo sapiens
tgttggtaagtatgt

SEQ ID NO: 994616 - DNA, 15 bp, Homo sapiens
gtgttggtaagtatg

SEQ ID NO: 994617 - DNA, 15 bp, Homo sapiens
agtgttggtaagtat

SEQ ID NO: 994618 - DNA, 15 bp, Homo sapiens
aagtgttggtaagta

SEQ ID NO: 994619 - DNA, 15 bp, Homo sapiens
aaagtgttggtaagt

SEQ ID NO: 994620 - DNA, 15 bp, Homo sapiens
aaaagtgttggtaag

SEQ ID NO: 994621 - DNA, 15 bp, Homo sapiens
aaaaagtgttggtaa

SEQ ID NO: 994622 - DNA, 15 bp, Homo sapiens
aaaaaagtgttggta

SEQ ID NO: 994623 - DNA, 15 bp, Homo sapiens
aaaaaaagtgttggt

SEQ ID NO: 994624 - DNA, 15 bp, Homo sapiens
aaaaaaaagtgttgg

SEQ ID NO: 994625 - DNA, 15 bp, Homo sapiens
aaaaaaaaagtgttg

SEQ ID NO: 994626 - DNA, 15 bp, Homo sapiens
aaaaaaaaaagtgtt

SEQ ID NO: 994627 - DNA, 15 bp, Homo sapiens
aaaaaaaaaaagtgt

SEQ ID NO: 994628 - DNA, 15 bp, Homo sapiens
ctgttaaaaaaaaaa

SEQ ID NO: 994629 - DNA, 15 bp, Homo sapiens
actgttaaaaaaaaa

SEQ ID NO: 994630 - DNA, 15 bp, Homo sapiens
tactgttaaaaaaaa

SEQ ID NO: 994631 - DNA, 15 bp, Homo sapiens
ctactgttaaaaaaa

SEQ ID NO: 994632 - DNA, 15 bp, Homo sapiens
actactgttaaaaaa

SEQ ID NO: 994633 - DNA, 15 bp, Homo sapiens
gactactgttaaaaa

SEQ ID NO: 994634 - DNA, 15 bp, Homo sapiens
tgactactgttaaaa

SEQ ID NO: 994635 - DNA, 15 bp, Homo sapiens
atgactactgttaaa

SEQ ID NO: 994636 - DNA, 15 bp, Homo sapiens
gatgactactgttaa

SEQ ID NO: 994637 - DNA, 15 bp, Homo sapiens
ggatgactactgtta

SEQ ID NO: 994638 - DNA, 15 bp, Homo sapiens
aggatgactactgtt

SEQ ID NO: 994639 - DNA, 15 bp, Homo sapiens
taggatgactactgt

SEQ ID NO: 994640 - DNA, 15 bp, Homo sapiens
ctaggatgactactg

SEQ ID NO: 994641 - DNA, 15 bp, Homo sapiens
tctaggatgactact

SEQ ID NO: 994642 - DNA, 15 bp, Homo sapiens
ctctaggatgactac

SEQ ID NO: 994643 - DNA, 15 bp, Homo sapiens
cctctaggatgacta

SEQ ID NO: 994644 - DNA, 15 bp, Homo sapiens
tcctctaggatgact

SEQ ID NO: 994645 - DNA, 15 bp, Homo sapiens
atcctctaggatgac

SEQ ID NO: 994646 - DNA, 15 bp, Homo sapiens
tatcctctaggatga

SEQ ID NO: 994647 - DNA, 15 bp, Homo sapiens
atatcctctaggatg

SEQ ID NO: 994648 - DNA, 15 bp, Homo sapiens
tatatcctctaggat

SEQ ID NO: 994649 - DNA, 15 bp, Homo sapiens
ctatatcctctagga

SEQ ID NO: 994650 - DNA, 15 bp, Homo sapiens
cctatatcctctagg

SEQ ID NO: 994651 - DNA, 15 bp, Homo sapiens
acctatatcctctag

SEQ ID NO: 994652 - DNA, 15 bp, Homo sapiens
cacctatatcctcta

SEQ ID NO: 994653 - DNA, 15 bp, Homo sapiens
tcacctatatcctct

SEQ ID NO: 994654 - DNA, 15 bp, Homo sapiens
atcacctatatcctc

SEQ ID NO: 994655 - DNA, 15 bp, Homo sapiens
gatcacctatatcct

SEQ ID NO: 994656 - DNA, 15 bp, Homo sapiens
agatcacctatatcc

SEQ ID NO: 994657 - DNA, 15 bp, Homo sapiens
aagatcacctatatc

SEQ ID NO: 994658 - DNA, 15 bp, Homo sapiens
aaagatcacctatat

SEQ ID NO: 994659 - DNA, 15 bp, Homo sapiens
gaaagatcacctata

SEQ ID NO: 994660 - DNA, 15 bp, Homo sapiens
tgaaagatcacctat

SEQ ID NO: 994661 - DNA, 15 bp, Homo sapiens
gtgaaagatcaccta

SEQ ID NO: 994662 - DNA, 15 bp, Homo sapiens
agtgaaagatcacct

SEQ ID NO: 994663 - DNA, 15 bp, Homo sapiens
cagtgaaagatcacc

SEQ ID NO: 994664 - DNA, 15 bp, Homo sapiens
acagtgaaagatcac

SEQ ID NO: 994665 - DNA, 15 bp, Homo sapiens
cacagtgaaagatca

SEQ ID NO: 994666 - DNA, 15 bp, Homo sapiens
gcacagtgaaagatc

SEQ ID NO: 994667 - DNA, 15 bp, Homo sapiens
agcacagtgaaagat

SEQ ID NO: 994668 - DNA, 15 bp, Homo sapiens
aagcacagtgaaaga

SEQ ID NO: 994669 - DNA, 15 bp, Homo sapiens
aaagcacagtgaaag

SEQ ID NO: 994670 - DNA, 15 bp, Homo sapiens
caaagcacagtgaaa

SEQ ID NO: 994671 - DNA, 15 bp, Homo sapiens
ccaaagcacagtgaa

SEQ ID NO: 994672 - DNA, 15 bp, Homo sapiens
tccaaagcacagtga

SEQ ID NO: 994673 - DNA, 15 bp, Homo sapiens
atccaaagcacagtg

SEQ ID NO: 994674 - DNA, 15 bp, Homo sapiens
aatccaaagcacagt

SEQ ID NO: 994675 - DNA, 15 bp, Homo sapiens
aaatccaaagcacag

SEQ ID NO: 994676 - DNA, 15 bp, Homo sapiens
taaatccaaagcaca

SEQ ID NO: 994677 - DNA, 15 bp, Homo sapiens
ataaatccaaagcac

SEQ ID NO: 994678 - DNA, 15 bp, Homo sapiens
tataaatccaaagca

SEQ ID NO: 994679 - DNA, 15 bp, Homo sapiens
atataaatccaaagc

SEQ ID NO: 994680 - DNA, 15 bp, Homo sapiens
aatataaatccaaag

SEQ ID NO: 994681 - DNA, 15 bp, Homo sapiens
aaatataaatccaaa

SEQ ID NO: 994682 - DNA, 15 bp, Homo sapiens
taaatataaatccaa

SEQ ID NO: 994683 - DNA, 15 bp, Homo sapiens
gtaaatataaatcca

SEQ ID NO: 994684 - DNA, 15 bp, Homo sapiens
agtaaatataaatcc

SEQ ID NO: 994685 - DNA, 15 bp, Homo sapiens
cagtaaatataaatc

SEQ ID NO: 994686 - DNA, 15 bp, Homo sapiens
ccagtaaatataaat

SEQ ID NO: 994687 - DNA, 15 bp, Homo sapiens
gccagtaaatataaa

SEQ ID NO: 994688 - DNA, 15 bp, Homo sapiens
agccagtaaatataa

SEQ ID NO: 994689 - DNA, 15 bp, Homo sapiens
aagccagtaaatata

SEQ ID NO: 994690 - DNA, 15 bp, Homo sapiens
taagccagtaaatat

SEQ ID NO: 994691 - DNA, 15 bp, Homo sapiens
ctaagccagtaaata

SEQ ID NO: 994692 - DNA, 15 bp, Homo sapiens
tctaagccagtaaat

SEQ ID NO: 994693 - DNA, 15 bp, Homo sapiens
atctaagccagtaaa

SEQ ID NO: 994694 - DNA, 15 bp, Homo sapiens
aatctaagccagtaa

SEQ ID NO: 994695 - DNA, 15 bp, Homo sapiens
aaatctaagccagta

SEQ ID NO: 994696 - DNA, 15 bp, Homo sapiens
caaatctaagccagt

SEQ ID NO: 994697 - DNA, 15 bp, Homo sapiens
acaaatctaagccag

SEQ ID NO: 994698 - DNA, 15 bp, Homo sapiens
tacaaatctaagcca

SEQ ID NO: 994699 - DNA, 15 bp, Homo sapiens
atacaaatctaagcc

SEQ ID NO: 994700 - DNA, 15 bp, Homo sapiens
catacaaatctaagc

SEQ ID NO: 994701 - DNA, 15 bp, Homo sapiens
ccatacaaatctaag

SEQ ID NO: 994702 - DNA, 15 bp, Homo sapiens
gccatacaaatctaa

SEQ ID NO: 994703 - DNA, 15 bp, Homo sapiens
ggccatacaaatcta

SEQ ID NO: 994704 - DNA, 15 bp, Homo sapiens
tggccatacaaatct

SEQ ID NO: 994705 - DNA, 15 bp, Homo sapiens
gtggccatacaaatc

SEQ ID NO: 994706 - DNA, 15 bp, Homo sapiens
ggtggccatacaaat

SEQ ID NO: 994707 - DNA, 15 bp, Homo sapiens
tggtggccatacaaa

SEQ ID NO: 994708 - DNA, 15 bp, Homo sapiens
gtggtggccatacaa

SEQ ID NO: 994709 - DNA, 15 bp, Homo sapiens
ggtggtggccataca

SEQ ID NO: 994710 - DNA, 15 bp, Homo sapiens
tggtggtggccatac

SEQ ID NO: 994711 - DNA, 15 bp, Homo sapiens
atggtggtggccata

SEQ ID NO: 994712 - DNA, 15 bp, Homo sapiens
tatggtggtggccat

SEQ ID NO: 994713 - DNA, 15 bp, Homo sapiens
ctatggtggtggcca

SEQ ID NO: 994714 - DNA, 15 bp, Homo sapiens
actatggtggtggcc

SEQ ID NO: 994715 - DNA, 15 bp, Homo sapiens
gactatggtggtggc

SEQ ID NO: 994716 - DNA, 15 bp, Homo sapiens
tgactatggtggtgg

SEQ ID NO: 994717 - DNA, 15 bp, Homo sapiens
ttgactatggtggtg

SEQ ID NO: 994718 - DNA, 15 bp, Homo sapiens
cttgactatggtggt

SEQ ID NO: 994719 - DNA, 15 bp, Homo sapiens
tcttgactatggtgg

SEQ ID NO: 994720 - DNA, 15 bp, Homo sapiens
atcttgactatggtg

SEQ ID NO: 994721 - DNA, 15 bp, Homo sapiens
tatcttgactatggt

SEQ ID NO: 994722 - DNA, 15 bp, Homo sapiens
gtatcttgactatgg

SEQ ID NO: 994723 - DNA, 15 bp, Homo sapiens
tgtatcttgactatg

SEQ ID NO: 994724 - DNA, 15 bp, Homo sapiens
ctgtatcttgactat

SEQ ID NO: 994725 - DNA, 15 bp, Homo sapiens
tctgtatcttgacta

SEQ ID NO: 994726 - DNA, 15 bp, Homo sapiens
ttctgtatcttgact

SEQ ID NO: 994727 - DNA, 15 bp, Homo sapiens
gttctgtatcttgac

SEQ ID NO: 994728 - DNA, 15 bp, Homo sapiens
tgttctgtatcttga

SEQ ID NO: 994729 - DNA, 15 bp, Homo sapiens
ttgttctgtatcttg

SEQ ID NO: 994730 - DNA, 15 bp, Homo sapiens
gttgttctgtatctt

SEQ ID NO: 994731 - DNA, 15 bp, Homo sapiens
agttgttctgtatct

SEQ ID NO: 994732 - DNA, 15 bp, Homo sapiens
gagttgttctgtatc

SEQ ID NO: 994733 - DNA, 15 bp, Homo sapiens
tgagttgttctgtat

SEQ ID NO: 994734 - DNA, 15 bp, Homo sapiens
ttgagttgttctgta

SEQ ID NO: 994735 - DNA, 15 bp, Homo sapiens
gttgagttgttctgt

SEQ ID NO: 994736 - DNA, 15 bp, Homo sapiens
ggttgagttgttctg

SEQ ID NO: 994737 - DNA, 15 bp, Homo sapiens
tggttgagttgttct

SEQ ID NO: 994738 - DNA, 15 bp, Homo sapiens
gtggttgagttgttc

SEQ ID NO: 994739 - DNA, 15 bp, Homo sapiens
tgtggttgagttgtt

SEQ ID NO: 994740 - DNA, 15 bp, Homo sapiens
ttgtggttgagttgt

SEQ ID NO: 994741 - DNA, 15 bp, Homo sapiens
cttgtggttgagttg

SEQ ID NO: 994742 - DNA, 15 bp, Homo sapiens
ccttgtggttgagtt

SEQ ID NO: 994743 - DNA, 15 bp, Homo sapiens
tccttgtggttgagt

SEQ ID NO: 994744 - DNA, 15 bp, Homo sapiens
atccttgtggttgag

SEQ ID NO: 994745 - DNA, 15 bp, Homo sapiens
aatccttgtggttga

SEQ ID NO: 994746 - DNA, 15 bp, Homo sapiens
aaatccttgtggttg

SEQ ID NO: 994747 - DNA, 15 bp, Homo sapiens
gaaatccttgtggtt

SEQ ID NO: 994748 - DNA, 15 bp, Homo sapiens
agaaatccttgtggt

SEQ ID NO: 994749 - DNA, 15 bp, Homo sapiens
gagaaatccttgtgg

SEQ ID NO: 994750 - DNA, 15 bp, Homo sapiens
tgagaaatccttgtg

SEQ ID NO: 994751 - DNA, 15 bp, Homo sapiens
atgagaaatccttgt

SEQ ID NO: 994752 - DNA, 15 bp, Homo sapiens
catgagaaatccttg

SEQ ID NO: 994753 - DNA, 15 bp, Homo sapiens
tcatgagaaatcctt

SEQ ID NO: 994754 - DNA, 15 bp, Homo sapiens
atcatgagaaatcct

SEQ ID NO: 994755 - DNA, 15 bp, Homo sapiens
tatcatgagaaatcc

SEQ ID NO: 994756 - DNA, 15 bp, Homo sapiens
gtatcatgagaaatc

SEQ ID NO: 994757 - DNA, 15 bp, Homo sapiens
ggtatcatgagaaat

SEQ ID NO: 994758 - DNA, 15 bp, Homo sapiens
aggtatcatgagaaa

SEQ ID NO: 994759 - DNA, 15 bp, Homo sapiens
aaggtatcatgagaa

SEQ ID NO: 994760 - DNA, 15 bp, Homo sapiens
aaaggtatcatgaga

SEQ ID NO: 994761 - DNA, 15 bp, Homo sapiens
aaaaggtatcatgag

SEQ ID NO: 994762 - DNA, 15 bp, Homo sapiens
aaaaaggtatcatga

SEQ ID NO: 994763 - DNA, 15 bp, Homo sapiens
taaaaaggtatcatg

SEQ ID NO: 994764 - DNA, 15 bp, Homo sapiens
ataaaaaggtatcat

SEQ ID NO: 994765 - DNA, 15 bp, Homo sapiens
tataaaaaggtatca

SEQ ID NO: 994766 - DNA, 15 bp, Homo sapiens
ctataaaaaggtatc

SEQ ID NO: 994767 - DNA, 15 bp, Homo sapiens
gctataaaaaggtat

SEQ ID NO: 994768 - DNA, 15 bp, Homo sapiens
ggctataaaaaggta

SEQ ID NO: 994769 - DNA, 15 bp, Homo sapiens
tggctataaaaaggt

SEQ ID NO: 994770 - DNA, 15 bp, Homo sapiens
gtggctataaaaagg

SEQ ID NO: 994771 - DNA, 15 bp, Homo sapiens
tgtggctataaaaag

SEQ ID NO: 994772 - DNA, 15 bp, Homo sapiens
ctgtggctataaaaa

SEQ ID NO: 994773 - DNA, 15 bp, Homo sapiens
gctgtggctataaaa

SEQ ID NO: 994774 - DNA, 15 bp, Homo sapiens
ggctgtggctataaa

SEQ ID NO: 994775 - DNA, 15 bp, Homo sapiens
tggctgtggctataa

SEQ ID NO: 994776 - DNA, 15 bp, Homo sapiens
gtggctgtggctata

SEQ ID NO: 994777 - DNA, 15 bp, Homo sapiens
ggtggctgtggctat

SEQ ID NO: 994778 - DNA, 15 bp, Homo sapiens
aggtggctgtggcta

SEQ ID NO: 994779 - DNA, 15 bp, Homo sapiens
gaggtggctgtggct

SEQ ID NO: 994780 - DNA, 15 bp, Homo sapiens
agaggtggctgtggc

SEQ ID NO: 994781 - DNA, 15 bp, Homo sapiens
gagaggtggctgtgg

SEQ ID NO: 994782 - DNA, 15 bp, Homo sapiens
agagaggtggctgtg

SEQ ID NO: 994783 - DNA, 15 bp, Homo sapiens
gagagaggtggctgt

SEQ ID NO: 994784 - DNA, 15 bp, Homo sapiens
ggagagaggtggctg

SEQ ID NO: 994785 - DNA, 15 bp, Homo sapiens
gggagagaggtggct

SEQ ID NO: 994786 - DNA, 15 bp, Homo sapiens
agggagagaggtggc

SEQ ID NO: 994787 - DNA, 15 bp, Homo sapiens
gagggagagaggtgg

SEQ ID NO: 994788 - DNA, 15 bp, Homo sapiens
agagggagagaggtg

SEQ ID NO: 994789 - DNA, 15 bp, Homo sapiens
aagagggagagaggt

SEQ ID NO: 994790 - DNA, 15 bp, Homo sapiens
gaagagggagagagg

SEQ ID NO: 994791 - DNA, 15 bp, Homo sapiens
ggaagagggagagag

SEQ ID NO: 994792 - DNA, 15 bp, Homo sapiens
aggaagagggagaga

SEQ ID NO: 994793 - DNA, 15 bp, Homo sapiens
aaggaagagggagag

SEQ ID NO: 994794 - DNA, 15 bp, Homo sapiens
caaggaagagggaga

SEQ ID NO: 994795 - DNA, 15 bp, Homo sapiens
tcaaggaagagggag

SEQ ID NO: 994796 - DNA, 15 bp, Homo sapiens
ctcaaggaagaggga

SEQ ID NO: 994797 - DNA, 15 bp, Homo sapiens
gctcaaggaagaggg

SEQ ID NO: 994798 - DNA, 15 bp, Homo sapiens
tgctcaaggaagagg

SEQ ID NO: 994799 - DNA, 15 bp, Homo sapiens
atgctcaaggaagag

SEQ ID NO: 994800 - DNA, 15 bp, Homo sapiens
aatgctcaaggaaga

SEQ ID NO: 994801 - DNA, 15 bp, Homo sapiens
aaatgctcaaggaag

SEQ ID NO: 994802 - DNA, 15 bp, Homo sapiens
aaaatgctcaaggaa

SEQ ID NO: 994803 - DNA, 15 bp, Homo sapiens
caaaatgctcaagga

SEQ ID NO: 994804 - DNA, 15 bp, Homo sapiens
acaaaatgctcaagg

SEQ ID NO: 994805 - DNA, 15 bp, Homo sapiens
gacaaaatgctcaag

SEQ ID NO: 994806 - DNA, 15 bp, Homo sapiens
tgacaaaatgctcaa

SEQ ID NO: 994807 - DNA, 15 bp, Homo sapiens
atgacaaaatgctca

SEQ ID NO: 994808 - DNA, 15 bp, Homo sapiens
tatgacaaaatgctc

SEQ ID NO: 994809 - DNA, 15 bp, Homo sapiens
atatgacaaaatgct

SEQ ID NO: 994810 - DNA, 15 bp, Homo sapiens
catatgacaaaatgc

SEQ ID NO: 994811 - DNA, 15 bp, Homo sapiens
ccatatgacaaaatg

SEQ ID NO: 994812 - DNA, 15 bp, Homo sapiens
accatatgacaaaat

SEQ ID NO: 994813 - DNA, 15 bp, Homo sapiens
gaccatatgacaaaa

SEQ ID NO: 994814 - DNA, 15 bp, Homo sapiens
tgaccatatgacaaa

SEQ ID NO: 994815 - DNA, 15 bp, Homo sapiens
atgaccatatgacaa

SEQ ID NO: 994816 - DNA, 15 bp, Homo sapiens
aatgaccatatgaca

SEQ ID NO: 994817 - DNA, 15 bp, Homo sapiens
caatgaccatatgac

SEQ ID NO: 994818 - DNA, 15 bp, Homo sapiens
ccaatgaccatatga

SEQ ID NO: 994819 - DNA, 15 bp, Homo sapiens
accaatgaccatatg

SEQ ID NO: 994820 - DNA, 15 bp, Homo sapiens
caccaatgaccatat

SEQ ID NO: 994821 - DNA, 15 bp, Homo sapiens
tcaccaatgaccata

SEQ ID NO: 994822 - DNA, 15 bp, Homo sapiens
atcaccaatgaccat

SEQ ID NO: 994823 - DNA, 15 bp, Homo sapiens
aatcaccaatgacca

SEQ ID NO: 994824 - DNA, 15 bp, Homo sapiens
taatcaccaatgacc

SEQ ID NO: 994825 - DNA, 15 bp, Homo sapiens
ttaatcaccaatgac

SEQ ID NO: 994826 - DNA, 15 bp, Homo sapiens
tttaatcaccaatga

SEQ ID NO: 994827 - DNA, 15 bp, Homo sapiens
atttaatcaccaatg

SEQ ID NO: 994828 - DNA, 15 bp, Homo sapiens
tatttaatcaccaat

SEQ ID NO: 994829 - DNA, 15 bp, Homo sapiens
ttatttaatcaccaa

SEQ ID NO: 994830 - DNA, 15 bp, Homo sapiens
tttatttaatcacca

SEQ ID NO: 994831 - DNA, 15 bp, Homo sapiens
ttttatttaatcacc

SEQ ID NO: 994832 - DNA, 15 bp, Homo sapiens
attttatttaatcac

SEQ ID NO: 994833 - DNA, 15 bp, Homo sapiens
cattttatttaatca

SEQ ID NO: 994834 - DNA, 15 bp, Homo sapiens
acattttatttaatc

SEQ ID NO: 994835 - DNA, 15 bp, Homo sapiens
tacattttatttaat

SEQ ID NO: 994836 - DNA, 15 bp, Homo sapiens
atacattttatttaa

SEQ ID NO: 994837 - DNA, 15 bp, Homo sapiens
aatacattttattta

SEQ ID NO: 994838 - DNA, 15 bp, Homo sapiens
aaatacattttattt

SEQ ID NO: 994839 - DNA, 15 bp, Homo sapiens
aaaatacattttatt

SEQ ID NO: 994840 - DNA, 15 bp, Homo sapiens
taaaatacattttat

SEQ ID NO: 994841 - DNA, 15 bp, Homo sapiens
ttaaaatacatttta

SEQ ID NO: 994842 - DNA, 15 bp, Homo sapiens
attaaaatacatttt

SEQ ID NO: 994843 - DNA, 15 bp, Homo sapiens
tattaaaatacattt

SEQ ID NO: 994844 - DNA, 15 bp, Homo sapiens
atattaaaatacatt

SEQ ID NO: 994845 - DNA, 15 bp, Homo sapiens
aatattaaaatacat

SEQ ID NO: 994846 - DNA, 15 bp, Homo sapiens
caatattaaaataca

SEQ ID NO: 994847 - DNA, 15 bp, Homo sapiens
tcaatattaaaatac

SEQ ID NO: 994848 - DNA, 15 bp, Homo sapiens
gtcaatattaaaata

SEQ ID NO: 994849 - DNA, 15 bp, Homo sapiens
agtcaatattaaaat

SEQ ID NO: 994850 - DNA, 15 bp, Homo sapiens
aagtcaatattaaaa

SEQ ID NO: 994851 - DNA, 15 bp, Homo sapiens
aaagtcaatattaaa

SEQ ID NO: 994852 - DNA, 15 bp, Homo sapiens
gaaagtcaatattaa

SEQ ID NO: 994853 - DNA, 15 bp, Homo sapiens
agaaagtcaatatta

SEQ ID NO: 994854 - DNA, 15 bp, Homo sapiens
gagaaagtcaatatt

SEQ ID NO: 994855 - DNA, 15 bp, Homo sapiens
agagaaagtcaatat

SEQ ID NO: 994856 - DNA, 15 bp, Homo sapiens
cagagaaagtcaata

SEQ ID NO: 994857 - DNA, 15 bp, Homo sapiens
acagagaaagtcaat

SEQ ID NO: 994858 - DNA, 15 bp, Homo sapiens
aacagagaaagtcaa

SEQ ID NO: 994859 - DNA, 15 bp, Homo sapiens
aaacagagaaagtca

SEQ ID NO: 994860 - DNA, 15 bp, Homo sapiens
gaaacagagaaagtc

SEQ ID NO: 994861 - DNA, 15 bp, Homo sapiens
agaaacagagaaagt

SEQ ID NO: 994862 - DNA, 15 bp, Homo sapiens
aagaaacagagaaag

SEQ ID NO: 994863 - DNA, 15 bp, Homo sapiens
aaagaaacagagaaa

SEQ ID NO: 994864 - DNA, 15 bp, Homo sapiens
gaaagaaacagagaa

SEQ ID NO: 994865 - DNA, 15 bp, Homo sapiens
agaaagaaacagaga

SEQ ID NO: 994866 - DNA, 15 bp, Homo sapiens
tagaaagaaacagag

SEQ ID NO: 994867 - DNA, 15 bp, Homo sapiens
gtagaaagaaacaga

SEQ ID NO: 994868 - DNA, 15 bp, Homo sapiens
ggtagaaagaaacag

SEQ ID NO: 994869 - DNA, 15 bp, Homo sapiens
aggtagaaagaaaca

SEQ ID NO: 994870 - DNA, 15 bp, Homo sapiens
aaggtagaaagaaac

SEQ ID NO: 994871 - DNA, 15 bp, Homo sapiens
aaaggtagaaagaaa

SEQ ID NO: 994872 - DNA, 15 bp, Homo sapiens
aaaaggtagaaagaa

SEQ ID NO: 994873 - DNA, 15 bp, Homo sapiens
aaaaaggtagaaaga

SEQ ID NO: 994874 - DNA, 15 bp, Homo sapiens
taaaaaggtagaaag

SEQ ID NO: 994875 - DNA, 15 bp, Homo sapiens
ttaaaaaggtagaaa

SEQ ID NO: 994876 - DNA, 15 bp, Homo sapiens
tttaaaaaggtagaa

SEQ ID NO: 994877 - DNA, 15 bp, Homo sapiens
gtttaaaaaggtaga

SEQ ID NO: 994878 - DNA, 15 bp, Homo sapiens
tgtttaaaaaggtag

SEQ ID NO: 994879 - DNA, 15 bp, Homo sapiens
atgtttaaaaaggta

SEQ ID NO: 994880 - DNA, 15 bp, Homo sapiens
catgtttaaaaaggt

SEQ ID NO: 994881 - DNA, 15 bp, Homo sapiens
ccatgtttaaaaagg

SEQ ID NO: 994882 - DNA, 15 bp, Homo sapiens
gccatgtttaaaaag

SEQ ID NO: 994883 - DNA, 15 bp, Homo sapiens
agccatgtttaaaaa

SEQ ID NO: 994884 - DNA, 15 bp, Homo sapiens
tagccatgtttaaaa

SEQ ID NO: 994885 - DNA, 15 bp, Homo sapiens
gtagccatgtttaaa

SEQ ID NO: 994886 - DNA, 15 bp, Homo sapiens
agtagccatgtttaa

SEQ ID NO: 994887 - DNA, 15 bp, Homo sapiens
tagtagccatgttta

SEQ ID NO: 994888 - DNA, 15 bp, Homo sapiens
ctagtagccatgttt

SEQ ID NO: 994889 - DNA, 15 bp, Homo sapiens
tctagtagccatgtt

SEQ ID NO: 994890 - DNA, 15 bp, Homo sapiens
ttctagtagccatgt

SEQ ID NO: 994891 - DNA, 15 bp, Homo sapiens
tttctagtagccatg

SEQ ID NO: 994892 - DNA, 15 bp, Homo sapiens
ttttctagtagccat

SEQ ID NO: 994893 - DNA, 15 bp, Homo sapiens
tttttctagtagcca

SEQ ID NO: 994894 - DNA, 15 bp, Homo sapiens
atttttctagtagcc

SEQ ID NO: 994895 - DNA, 15 bp, Homo sapiens
catttttctagtagc

SEQ ID NO: 994896 - DNA, 15 bp, Homo sapiens
gcatttttctagtag

SEQ ID NO: 994897 - DNA, 15 bp, Homo sapiens
tgcatttttctagta

SEQ ID NO: 994898 - DNA, 15 bp, Homo sapiens
gtgcatttttctagt

SEQ ID NO: 994899 - DNA, 15 bp, Homo sapiens
tgtgcatttttctag

SEQ ID NO: 994900 - DNA, 15 bp, Homo sapiens
ttgtgcatttttcta

SEQ ID NO: 994901 - DNA, 15 bp, Homo sapiens
attgtgcatttttct

SEQ ID NO: 994902 - DNA, 15 bp, Homo sapiens
aattgtgcatttttc

SEQ ID NO: 994903 - DNA, 15 bp, Homo sapiens
taattgtgcattttt

SEQ ID NO: 994904 - DNA, 15 bp, Homo sapiens
ctaattgtgcatttt

SEQ ID NO: 994905 - DNA, 15 bp, Homo sapiens
tctaattgtgcattt

SEQ ID NO: 994906 - DNA, 15 bp, Homo sapiens
atctaattgtgcatt

SEQ ID NO: 994907 - DNA, 15 bp, Homo sapiens
aatctaattgtgcat

SEQ ID NO: 994908 - DNA, 15 bp, Homo sapiens
aaatctaattgtgca

SEQ ID NO: 994909 - DNA, 15 bp, Homo sapiens
caaatctaattgtgc

SEQ ID NO: 994910 - DNA, 15 bp, Homo sapiens
acaaatctaattgtg

SEQ ID NO: 994911 - DNA, 15 bp, Homo sapiens
cacaaatctaattgt

SEQ ID NO: 994912 - DNA, 15 bp, Homo sapiens
ccacaaatctaattg

SEQ ID NO: 994913 - DNA, 15 bp, Homo sapiens
gccacaaatctaatt

SEQ ID NO: 994914 - DNA, 15 bp, Homo sapiens
agccacaaatctaat

SEQ ID NO: 994915 - DNA, 15 bp, Homo sapiens
cagccacaaatctaa

SEQ ID NO: 994916 - DNA, 15 bp, Homo sapiens
ccagccacaaatcta

SEQ ID NO: 994917 - DNA, 15 bp, Homo sapiens
accagccacaaatct

SEQ ID NO: 994918 - DNA, 15 bp, Homo sapiens
caccagccacaaatc

SEQ ID NO: 994919 - DNA, 15 bp, Homo sapiens
acaccagccacaaat

SEQ ID NO: 994920 - DNA, 15 bp, Homo sapiens
aacaccagccacaaa

SEQ ID NO: 994921 - DNA, 15 bp, Homo sapiens
gaacaccagccacaa

SEQ ID NO: 994922 - DNA, 15 bp, Homo sapiens
agaacaccagccaca

SEQ ID NO: 994923 - DNA, 15 bp, Homo sapiens
cagaacaccagccac

SEQ ID NO: 994924 - DNA, 15 bp, Homo sapiens
acagaacaccagcca

SEQ ID NO: 994925 - DNA, 15 bp, Homo sapiens
aacagaacaccagcc

SEQ ID NO: 994926 - DNA, 15 bp, Homo sapiens
aaacagaacaccagc

SEQ ID NO: 994927 - DNA, 15 bp, Homo sapiens
gaaacagaacaccag

SEQ ID NO: 994928 - DNA, 15 bp, Homo sapiens
tgaaacagaacacca

SEQ ID NO: 994929 - DNA, 15 bp, Homo sapiens
atgaaacagaacacc

SEQ ID NO: 994930 - DNA, 15 bp, Homo sapiens
gatgaaacagaacac

SEQ ID NO: 994931 - DNA, 15 bp, Homo sapiens
agatgaaacagaaca

SEQ ID NO: 994932 - DNA, 15 bp, Homo sapiens
tagatgaaacagaac

SEQ ID NO: 994933 - DNA, 15 bp, Homo sapiens
ttagatgaaacagaa

SEQ ID NO: 994934 - DNA, 15 bp, Homo sapiens
tttagatgaaacaga

SEQ ID NO: 994935 - DNA, 15 bp, Homo sapiens
gtttagatgaaacag

SEQ ID NO: 994936 - DNA, 15 bp, Homo sapiens
tgtttagatgaaaca

SEQ ID NO: 994937 - DNA, 15 bp, Homo sapiens
ctgtttagatgaaac

SEQ ID NO: 994938 - DNA, 15 bp, Homo sapiens
cctgtttagatgaaa

SEQ ID NO: 994939 - DNA, 15 bp, Homo sapiens
gcctgtttagatgaa

SEQ ID NO: 994940 - DNA, 15 bp, Homo sapiens
agcctgtttagatga

SEQ ID NO: 994941 - DNA, 15 bp, Homo sapiens
cagcctgtttagatg

SEQ ID NO: 994942 - DNA, 15 bp, Homo sapiens
ccagcctgtttagat

SEQ ID NO: 994943 - DNA, 15 bp, Homo sapiens
gccagcctgtttaga

SEQ ID NO: 994944 - DNA, 15 bp, Homo sapiens
ggccagcctgtttag

SEQ ID NO: 994945 - DNA, 15 bp, Homo sapiens
aggccagcctgttta

SEQ ID NO: 994946 - DNA, 15 bp, Homo sapiens
gaggccagcctgttt

SEQ ID NO: 994947 - DNA, 15 bp, Homo sapiens
tgaggccagcctgtt

SEQ ID NO: 994948 - DNA, 15 bp, Homo sapiens
gtgaggccagcctgt

SEQ ID NO: 994949 - DNA, 15 bp, Homo sapiens
tgtgaggccagcctg

SEQ ID NO: 994950 - DNA, 15 bp, Homo sapiens
ctgtgaggccagcct

SEQ ID NO: 994951 - DNA, 15 bp, Homo sapiens
tctgtgaggccagcc

SEQ ID NO: 994952 - DNA, 15 bp, Homo sapiens
ctctgtgaggccagc

SEQ ID NO: 994953 - DNA, 15 bp, Homo sapiens
cctctgtgaggccag

SEQ ID NO: 994954 - DNA, 15 bp, Homo sapiens
tcctctgtgaggcca

SEQ ID NO: 994955 - DNA, 15 bp, Homo sapiens
ctcctctgtgaggcc

SEQ ID NO: 994956 - DNA, 15 bp, Homo sapiens
gctcctctgtgaggc

SEQ ID NO: 994957 - DNA, 15 bp, Homo sapiens
agctcctctgtgagg

SEQ ID NO: 994958 - DNA, 15 bp, Homo sapiens
cagctcctctgtgag

SEQ ID NO: 994959 - DNA, 15 bp, Homo sapiens
ccagctcctctgtga

SEQ ID NO: 994960 - DNA, 15 bp, Homo sapiens
tccagctcctctgtg

SEQ ID NO: 994961 - DNA, 15 bp, Homo sapiens
ctccagctcctctgt

SEQ ID NO: 994962 - DNA, 15 bp, Homo sapiens
actccagctcctctg

SEQ ID NO: 994963 - DNA, 15 bp, Homo sapiens
cactccagctcctct

SEQ ID NO: 994964 - DNA, 15 bp, Homo sapiens
acactccagctcctc

SEQ ID NO: 994965 - DNA, 15 bp, Homo sapiens
cacactccagctcct

SEQ ID NO: 994966 - DNA, 15 bp, Homo sapiens
gcacactccagctcc

SEQ ID NO: 994967 - DNA, 15 bp, Homo sapiens
tgcacactccagctc

SEQ ID NO: 994968 - DNA, 15 bp, Homo sapiens
ctgcacactccagct

SEQ ID NO: 994969 - DNA, 15 bp, Homo sapiens
actgcacactccagc

SEQ ID NO: 994970 - DNA, 15 bp, Homo sapiens
cactgcacactccag

SEQ ID NO: 994971 - DNA, 15 bp, Homo sapiens
gcactgcacactcca

SEQ ID NO: 994972 - DNA, 15 bp, Homo sapiens
agcactgcacactcc

SEQ ID NO: 994973 - DNA, 15 bp, Homo sapiens
cagcactgcacactc

SEQ ID NO: 994974 - DNA, 15 bp, Homo sapiens
gcagcactgcacact

SEQ ID NO: 994975 - DNA, 15 bp, Homo sapiens
agcagcactgcacac

SEQ ID NO: 994976 - DNA, 15 bp, Homo sapiens
gagcagcactgcaca

SEQ ID NO: 994977 - DNA, 15 bp, Homo sapiens
agagcagcactgcac

SEQ ID NO: 994978 - DNA, 15 bp, Homo sapiens
tagagcagcactgca

SEQ ID NO: 994979 - DNA, 15 bp, Homo sapiens
ctagagcagcactgc

SEQ ID NO: 994980 - DNA, 15 bp, Homo sapiens
gctagagcagcactg

SEQ ID NO: 994981 - DNA, 15 bp, Homo sapiens
tgctagagcagcact

SEQ ID NO: 994982 - DNA, 15 bp, Homo sapiens
ttgctagagcagcac

SEQ ID NO: 994983 - DNA, 15 bp, Homo sapiens
cttgctagagcagca

SEQ ID NO: 994984 - DNA, 15 bp, Homo sapiens
gcttgctagagcagc

SEQ ID NO: 994985 - DNA, 15 bp, Homo sapiens
ggcttgctagagcag

SEQ ID NO: 994986 - DNA, 15 bp, Homo sapiens
tggcttgctagagca

SEQ ID NO: 994987 - DNA, 15 bp, Homo sapiens
ctggcttgctagagc

SEQ ID NO: 994988 - DNA, 15 bp, Homo sapiens
cctggcttgctagag

SEQ ID NO: 994989 - DNA, 15 bp, Homo sapiens
gcctggcttgctaga

SEQ ID NO: 994990 - DNA, 15 bp, Homo sapiens
agcctggcttgctag

SEQ ID NO: 994991 - DNA, 15 bp, Homo sapiens
aagcctggcttgcta

SEQ ID NO: 994992 - DNA, 15 bp, Homo sapiens
caagcctggcttgct

SEQ ID NO: 994993 - DNA, 15 bp, Homo sapiens
tcaagcctggcttgc

SEQ ID NO: 994994 - DNA, 15 bp, Homo sapiens
gtcaagcctggcttg

SEQ ID NO: 994995 - DNA, 15 bp, Homo sapiens
agtcaagcctggctt

SEQ ID NO: 994996 - DNA, 15 bp, Homo sapiens
gagtcaagcctggct

SEQ ID NO: 994997 - DNA, 15 bp, Homo sapiens
agagtcaagcctggc

SEQ ID NO: 994998 - DNA, 15 bp, Homo sapiens
aagagtcaagcctgg

SEQ ID NO: 994999 - DNA, 15 bp, Homo sapiens
gaagagtcaagcctg

SEQ ID NO: 995000 - DNA, 15 bp, Homo sapiens
ggaagagtcaagcct

SEQ ID NO: 995001 - DNA, 15 bp, Homo sapiens
gggaagagtcaagcc

SEQ ID NO: 995002 - DNA, 15 bp, Homo sapiens
tgggaagagtcaagc

SEQ ID NO: 995003 - DNA, 15 bp, Homo sapiens
gtgggaagagtcaag

SEQ ID NO: 995004 - DNA, 15 bp, Homo sapiens
agtgggaagagtcaa

SEQ ID NO: 995005 - DNA, 15 bp, Homo sapiens
gagtgggaagagtca

SEQ ID NO: 995006 - DNA, 15 bp, Homo sapiens
tgagtgggaagagtc

SEQ ID NO: 995007 - DNA, 15 bp, Homo sapiens
ctgagtgggaagagt

SEQ ID NO: 995008 - DNA, 15 bp, Homo sapiens
cctgagtgggaagag

SEQ ID NO: 995009 - DNA, 15 bp, Homo sapiens
ccctgagtgggaaga

SEQ ID NO: 995010 - DNA, 15 bp, Homo sapiens
gccctgagtgggaag

SEQ ID NO: 995011 - DNA, 15 bp, Homo sapiens
tgccctgagtgggaa

SEQ ID NO: 995012 - DNA, 15 bp, Homo sapiens
gtgccctgagtggga

SEQ ID NO: 995013 - DNA, 15 bp, Homo sapiens
tgtgccctgagtggg

SEQ ID NO: 995014 - DNA, 15 bp, Homo sapiens
atgtgccctgagtgg

SEQ ID NO: 995015 - DNA, 15 bp, Homo sapiens
gatgtgccctgagtg

SEQ ID NO: 995016 - DNA, 15 bp, Homo sapiens
tgatgtgccctgagt

SEQ ID NO: 995017 - DNA, 15 bp, Homo sapiens
gtgatgtgccctgag

SEQ ID NO: 995018 - DNA, 15 bp, Homo sapiens
agtgatgtgccctga

SEQ ID NO: 995019 - DNA, 15 bp, Homo sapiens
aagtgatgtgccctg

SEQ ID NO: 995020 - DNA, 15 bp, Homo sapiens
gaagtgatgtgccct

SEQ ID NO: 995021 - DNA, 15 bp, Homo sapiens
ggaagtgatgtgccc

SEQ ID NO: 995022 - DNA, 15 bp, Homo sapiens
tggaagtgatgtgcc

SEQ ID NO: 995023 - DNA, 15 bp, Homo sapiens
atggaagtgatgtgc

SEQ ID NO: 995024 - DNA, 15 bp, Homo sapiens
catggaagtgatgtg

SEQ ID NO: 995025 - DNA, 15 bp, Homo sapiens
tcatggaagtgatgt

SEQ ID NO: 995026 - DNA, 15 bp, Homo sapiens
ttcatggaagtgatg

SEQ ID NO: 995027 - DNA, 15 bp, Homo sapiens
cttcatggaagtgat

SEQ ID NO: 995028 - DNA, 15 bp, Homo sapiens
gcttcatggaagtga

SEQ ID NO: 995029 - DNA, 15 bp, Homo sapiens
agcttcatggaagtg

SEQ ID NO: 995030 - DNA, 15 bp, Homo sapiens
aagcttcatggaagt

SEQ ID NO: 995031 - DNA, 15 bp, Homo sapiens
taagcttcatggaag

SEQ ID NO: 995032 - DNA, 15 bp, Homo sapiens
gtaagcttcatggaa

SEQ ID NO: 995033 - DNA, 15 bp, Homo sapiens
agtaagcttcatgga

SEQ ID NO: 995034 - DNA, 15 bp, Homo sapiens
gagtaagcttcatgg

SEQ ID NO: 995035 - DNA, 15 bp, Homo sapiens
ggagtaagcttcatg

SEQ ID NO: 995036 - DNA, 15 bp, Homo sapiens
aggagtaagcttcat

SEQ ID NO: 995037 - DNA, 15 bp, Homo sapiens
aaggagtaagcttca

SEQ ID NO: 995038 - DNA, 15 bp, Homo sapiens
caaggagtaagcttc

SEQ ID NO: 995039 - DNA, 15 bp, Homo sapiens
ccaaggagtaagctt

SEQ ID NO: 995040 - DNA, 15 bp, Homo sapiens
cccaaggagtaagct

SEQ ID NO: 995041 - DNA, 15 bp, Homo sapiens
acccaaggagtaagc

SEQ ID NO: 995042 - DNA, 15 bp, Homo sapiens
aacccaaggagtaag

SEQ ID NO: 995043 - DNA, 15 bp, Homo sapiens
caacccaaggagtaa

SEQ ID NO: 995044 - DNA, 15 bp, Homo sapiens
acaacccaaggagta

SEQ ID NO: 995045 - DNA, 15 bp, Homo sapiens
aacaacccaaggagt

SEQ ID NO: 995046 - DNA, 15 bp, Homo sapiens
aaacaacccaaggag

SEQ ID NO: 995047 - DNA, 15 bp, Homo sapiens
caaacaacccaagga

SEQ ID NO: 995048 - DNA, 15 bp, Homo sapiens
ccaaacaacccaagg

SEQ ID NO: 995049 - DNA, 15 bp, Homo sapiens
accaaacaacccaag

SEQ ID NO: 995050 - DNA, 15 bp, Homo sapiens
aaccaaacaacccaa

SEQ ID NO: 995051 - DNA, 15 bp, Homo sapiens
caaccaaacaaccca

SEQ ID NO: 995052 - DNA, 15 bp, Homo sapiens
tcaaccaaacaaccc

SEQ ID NO: 995053 - DNA, 15 bp, Homo sapiens
gtcaaccaaacaacc

SEQ ID NO: 995054 - DNA, 15 bp, Homo sapiens
agtcaaccaaacaac

SEQ ID NO: 995055 - DNA, 15 bp, Homo sapiens
aagtcaaccaaacaa

SEQ ID NO: 995056 - DNA, 15 bp, Homo sapiens
taagtcaaccaaaca

SEQ ID NO: 995057 - DNA, 15 bp, Homo sapiens
ctaagtcaaccaaac

SEQ ID NO: 995058 - DNA, 15 bp, Homo sapiens
cctaagtcaaccaaa

SEQ ID NO: 995059 - DNA, 15 bp, Homo sapiens
tcctaagtcaaccaa

SEQ ID NO: 995060 - DNA, 15 bp, Homo sapiens
ctcctaagtcaacca

SEQ ID NO: 995061 - DNA, 15 bp, Homo sapiens
tctcctaagtcaacc

SEQ ID NO: 995062 - DNA, 15 bp, Homo sapiens
ttctcctaagtcaac

SEQ ID NO: 995063 - DNA, 15 bp, Homo sapiens
attctcctaagtcaa

SEQ ID NO: 995064 - DNA, 15 bp, Homo sapiens
cattctcctaagtca

SEQ ID NO: 995065 - DNA, 15 bp, Homo sapiens
ccattctcctaagtc

SEQ ID NO: 995066 - DNA, 15 bp, Homo sapiens
tccattctcctaagt

SEQ ID NO: 995067 - DNA, 15 bp, Homo sapiens
ttccattctcctaag

SEQ ID NO: 995068 - DNA, 15 bp, Homo sapiens
cttccattctcctaa

SEQ ID NO: 995069 - DNA, 15 bp, Homo sapiens
acttccattctccta

SEQ ID NO: 995070 - DNA, 15 bp, Homo sapiens
cacttccattctcct

SEQ ID NO: 995071 - DNA, 15 bp, Homo sapiens
tcacttccattctcc

SEQ ID NO: 995072 - DNA, 15 bp, Homo sapiens
atcacttccattctc

SEQ ID NO: 995073 - DNA, 15 bp, Homo sapiens
aatcacttccattct

SEQ ID NO: 995074 - DNA, 15 bp, Homo sapiens
taatcacttccattc

SEQ ID NO: 995075 - DNA, 15 bp, Homo sapiens
ctaatcacttccatt

SEQ ID NO: 995076 - DNA, 15 bp, Homo sapiens
gctaatcacttccat

SEQ ID NO: 995077 - DNA, 15 bp, Homo sapiens
tgctaatcacttcca

SEQ ID NO: 995078 - DNA, 15 bp, Homo sapiens
ctgctaatcacttcc

SEQ ID NO: 995079 - DNA, 15 bp, Homo sapiens
tctgctaatcacttc

SEQ ID NO: 995080 - DNA, 15 bp, Homo sapiens
ttctgctaatcactt

SEQ ID NO: 995081 - DNA, 15 bp, Homo sapiens
attctgctaatcact

SEQ ID NO: 995082 - DNA, 15 bp, Homo sapiens
gattctgctaatcac

SEQ ID NO: 995083 - DNA, 15 bp, Homo sapiens
agattctgctaatca

SEQ ID NO: 995084 - DNA, 15 bp, Homo sapiens
aagattctgctaatc

SEQ ID NO: 995085 - DNA, 15 bp, Homo sapiens
caagattctgctaat

SEQ ID NO: 995086 - DNA, 15 bp, Homo sapiens
acaagattctgctaa

SEQ ID NO: 995087 - DNA, 15 bp, Homo sapiens
tacaagattctgcta

SEQ ID NO: 995088 - DNA, 15 bp, Homo sapiens
ttacaagattctgct

SEQ ID NO: 995089 - DNA, 15 bp, Homo sapiens
cttacaagattctgc

SEQ ID NO: 995090 - DNA, 15 bp, Homo sapiens
gcttacaagattctg

SEQ ID NO: 995091 - DNA, 15 bp, Homo sapiens
tgcttacaagattct

SEQ ID NO: 995092 - DNA, 15 bp, Homo sapiens
atgcttacaagattc

SEQ ID NO: 995093 - DNA, 15 bp, Homo sapiens
aatgcttacaagatt

SEQ ID NO: 995094 - DNA, 15 bp, Homo sapiens
aaatgcttacaagat

SEQ ID NO: 995095 - DNA, 15 bp, Homo sapiens
aaaatgcttacaaga

SEQ ID NO: 995096 - DNA, 15 bp, Homo sapiens
taaaatgcttacaag

SEQ ID NO: 995097 - DNA, 15 bp, Homo sapiens
ttaaaatgcttacaa

SEQ ID NO: 995098 - DNA, 15 bp, Homo sapiens
tttaaaatgcttaca

SEQ ID NO: 995099 - DNA, 15 bp, Homo sapiens
gtttaaaatgcttac

SEQ ID NO: 995100 - DNA, 15 bp, Homo sapiens
tgtttaaaatgctta

SEQ ID NO: 995101 - DNA, 15 bp, Homo sapiens
atgtttaaaatgctt

SEQ ID NO: 995102 - DNA, 15 bp, Homo sapiens
aatgtttaaaatgct

SEQ ID NO: 995103 - DNA, 15 bp, Homo sapiens
taatgtttaaaatgc

SEQ ID NO: 995104 - DNA, 15 bp, Homo sapiens
ttaatgtttaaaatg

SEQ ID NO: 995105 - DNA, 15 bp, Homo sapiens
tttaatgtttaaaat

SEQ ID NO: 995106 - DNA, 15 bp, Homo sapiens
atttaatgtttaaaa

SEQ ID NO: 995107 - DNA, 15 bp, Homo sapiens
catttaatgtttaaa

SEQ ID NO: 995108 - DNA, 15 bp, Homo sapiens
tcatttaatgtttaa

SEQ ID NO: 995109 - DNA, 15 bp, Homo sapiens
ctcatttaatgttta

SEQ ID NO: 995110 - DNA, 15 bp, Homo sapiens
gctcatttaatgttt

SEQ ID NO: 995111 - DNA, 15 bp, Homo sapiens
tgctcatttaatgtt

SEQ ID NO: 995112 - DNA, 15 bp, Homo sapiens
atgctcatttaatgt

SEQ ID NO: 995113 - DNA, 15 bp, Homo sapiens
aatgctcatttaatg

SEQ ID NO: 995114 - DNA, 15 bp, Homo sapiens
caatgctcatttaat

SEQ ID NO: 995115 - DNA, 15 bp, Homo sapiens
acaatgctcatttaa

SEQ ID NO: 995116 - DNA, 15 bp, Homo sapiens
tacaatgctcattta

SEQ ID NO: 995117 - DNA, 15 bp, Homo sapiens
ttacaatgctcattt

SEQ ID NO: 995118 - DNA, 15 bp, Homo sapiens
tttacaatgctcatt

SEQ ID NO: 995119 - DNA, 15 bp, Homo sapiens
gtttacaatgctcat

SEQ ID NO: 995120 - DNA, 15 bp, Homo sapiens
tgtttacaatgctca

SEQ ID NO: 995121 - DNA, 15 bp, Homo sapiens
ctgtttacaatgctc

SEQ ID NO: 995122 - DNA, 15 bp, Homo sapiens
gctgtttacaatgct

SEQ ID NO: 995123 - DNA, 15 bp, Homo sapiens
cgctgtttacaatgc

SEQ ID NO: 995124 - DNA, 15 bp, Homo sapiens
ccgctgtttacaatg

SEQ ID NO: 995125 - DNA, 15 bp, Homo sapiens
gccgctgtttacaat

SEQ ID NO: 995126 - DNA, 15 bp, Homo sapiens
tgccgctgtttacaa

SEQ ID NO: 995127 - DNA, 15 bp, Homo sapiens
atgccgctgtttaca

SEQ ID NO: 995128 - DNA, 15 bp, Homo sapiens
aatgccgctgtttac

SEQ ID NO: 995129 - DNA, 15 bp, Homo sapiens
gaatgccgctgttta

SEQ ID NO: 995130 - DNA, 15 bp, Homo sapiens
agaatgccgctgttt

SEQ ID NO: 995131 - DNA, 15 bp, Homo sapiens
aagaatgccgctgtt

SEQ ID NO: 995132 - DNA, 15 bp, Homo sapiens
gaagaatgccgctgt

SEQ ID NO: 995133 - DNA, 15 bp, Homo sapiens
tgaagaatgccgctg

SEQ ID NO: 995134 - DNA, 15 bp, Homo sapiens
ctgaagaatgccgct

SEQ ID NO: 995135 - DNA, 15 bp, Homo sapiens
cctgaagaatgccgc

SEQ ID NO: 995136 - DNA, 15 bp, Homo sapiens
gcctgaagaatgccg

SEQ ID NO: 995137 - DNA, 15 bp, Homo sapiens
tgcctgaagaatgcc

SEQ ID NO: 995138 - DNA, 15 bp, Homo sapiens
ttgcctgaagaatgc

SEQ ID NO: 995139 - DNA, 15 bp, Homo sapiens
tttgcctgaagaatg

SEQ ID NO: 995140 - DNA, 15 bp, Homo sapiens
atttgcctgaagaat

SEQ ID NO: 995141 - DNA, 15 bp, Homo sapiens
tatttgcctgaagaa

SEQ ID NO: 995142 - DNA, 15 bp, Homo sapiens
gtatttgcctgaaga

SEQ ID NO: 995143 - DNA, 15 bp, Homo sapiens
tgtatttgcctgaag

SEQ ID NO: 995144 - DNA, 15 bp, Homo sapiens
ctgtatttgcctgaa

SEQ ID NO: 995145 - DNA, 15 bp, Homo sapiens
actgtatttgcctga

SEQ ID NO: 995146 - DNA, 15 bp, Homo sapiens
aactgtatttgcctg

SEQ ID NO: 995147 - DNA, 15 bp, Homo sapiens
aaactgtatttgcct

SEQ ID NO: 995148 - DNA, 15 bp, Homo sapiens
aaaactgtatttgcc

SEQ ID NO: 995149 - DNA, 15 bp, Homo sapiens
caaaactgtatttgc

SEQ ID NO: 995150 - DNA, 15 bp, Homo sapiens
acaaaactgtatttg

SEQ ID NO: 995151 - DNA, 15 bp, Homo sapiens
aacaaaactgtattt

SEQ ID NO: 995152 - DNA, 15 bp, Homo sapiens
aaacaaaactgtatt

SEQ ID NO: 995153 - DNA, 15 bp, Homo sapiens
aaaacaaaactgtat

SEQ ID NO: 995154 - DNA, 15 bp, Homo sapiens
taaaacaaaactgta

SEQ ID NO: 995155 - DNA, 15 bp, Homo sapiens
gtaaaacaaaactgt

SEQ ID NO: 995156 - DNA, 15 bp, Homo sapiens
ggtaaaacaaaactg

SEQ ID NO: 995157 - DNA, 15 bp, Homo sapiens
aggtaaaacaaaact

SEQ ID NO: 995158 - DNA, 15 bp, Homo sapiens
gaggtaaaacaaaac

SEQ ID NO: 995159 - DNA, 15 bp, Homo sapiens
agaggtaaaacaaaa

SEQ ID NO: 995160 - DNA, 15 bp, Homo sapiens
aagaggtaaaacaaa

SEQ ID NO: 995161 - DNA, 15 bp, Homo sapiens
aaagaggtaaaacaa

SEQ ID NO: 995162 - DNA, 15 bp, Homo sapiens
taaagaggtaaaaca

SEQ ID NO: 995163 - DNA, 15 bp, Homo sapiens
ttaaagaggtaaaac

SEQ ID NO: 995164 - DNA, 15 bp, Homo sapiens
tttaaagaggtaaaa

SEQ ID NO: 995165 - DNA, 15 bp, Homo sapiens
atttaaagaggtaaa

SEQ ID NO: 995166 - DNA, 15 bp, Homo sapiens
aatttaaagaggtaa

SEQ ID NO: 995167 - DNA, 15 bp, Homo sapiens
gaatttaaagaggta

SEQ ID NO: 995168 - DNA, 15 bp, Homo sapiens
ggaatttaaagaggt

SEQ ID NO: 995169 - DNA, 15 bp, Homo sapiens
tggaatttaaagagg

SEQ ID NO: 995170 - DNA, 15 bp, Homo sapiens
atggaatttaaagag

SEQ ID NO: 995171 - DNA, 15 bp, Homo sapiens
catggaatttaaaga

SEQ ID NO: 995172 - DNA, 15 bp, Homo sapiens
ccatggaatttaaag

SEQ ID NO: 995173 - DNA, 15 bp, Homo sapiens
accatggaatttaaa

SEQ ID NO: 995174 - DNA, 15 bp, Homo sapiens
taccatggaatttaa

SEQ ID NO: 995175 - DNA, 15 bp, Homo sapiens
ataccatggaattta

SEQ ID NO: 995176 - DNA, 15 bp, Homo sapiens
tataccatggaattt

SEQ ID NO: 995177 - DNA, 15 bp, Homo sapiens
atataccatggaatt

SEQ ID NO: 995178 - DNA, 15 bp, Homo sapiens
aatataccatggaat

SEQ ID NO: 995179 - DNA, 15 bp, Homo sapiens
gaatataccatggaa

SEQ ID NO: 995180 - DNA, 15 bp, Homo sapiens
cgaatataccatgga

SEQ ID NO: 995181 - DNA, 15 bp, Homo sapiens
ccgaatataccatgg

SEQ ID NO: 995182 - DNA, 15 bp, Homo sapiens
tccgaatataccatg

SEQ ID NO: 995183 - DNA, 15 bp, Homo sapiens
gtccgaatataccat

SEQ ID NO: 995184 - DNA, 15 bp, Homo sapiens
agtccgaatatacca

SEQ ID NO: 995185 - DNA, 15 bp, Homo sapiens
aagtccgaatatacc

SEQ ID NO: 995186 - DNA, 15 bp, Homo sapiens
gaagtccgaatatac

SEQ ID NO: 995187 - DNA, 15 bp, Homo sapiens
tgaagtccgaatata

SEQ ID NO: 995188 - DNA, 15 bp, Homo sapiens
ttgaagtccgaatat

SEQ ID NO: 995189 - DNA, 15 bp, Homo sapiens
tttgaagtccgaata

SEQ ID NO: 995190 - DNA, 15 bp, Homo sapiens
ttttgaagtccgaat

SEQ ID NO: 995191 - DNA, 15 bp, Homo sapiens
tttttgaagtccgaa

SEQ ID NO: 995192 - DNA, 15 bp, Homo sapiens
ctttttgaagtccga

SEQ ID NO: 995193 - DNA, 15 bp, Homo sapiens
actttttgaagtccg

SEQ ID NO: 995194 - DNA, 15 bp, Homo sapiens
tactttttgaagtcc

SEQ ID NO: 995195 - DNA, 15 bp, Homo sapiens
ctactttttgaagtc

SEQ ID NO: 995196 - DNA, 15 bp, Homo sapiens
tctactttttgaagt

SEQ ID NO: 995197 - DNA, 15 bp, Homo sapiens
atctactttttgaag

SEQ ID NO: 995198 - DNA, 15 bp, Homo sapiens
catctactttttgaa

SEQ ID NO: 995199 - DNA, 15 bp, Homo sapiens
ccatctactttttga

SEQ ID NO: 995200 - DNA, 15 bp, Homo sapiens
accatctactttttg

SEQ ID NO: 995201 - DNA, 15 bp, Homo sapiens
taccatctacttttt

SEQ ID NO: 995202 - DNA, 15 bp, Homo sapiens
ctaccatctactttt

SEQ ID NO: 995203 - DNA, 15 bp, Homo sapiens
tctaccatctacttt

SEQ ID NO: 995204 - DNA, 15 bp, Homo sapiens
ctctaccatctactt

SEQ ID NO: 995205 - DNA, 15 bp, Homo sapiens
gctctaccatctact

SEQ ID NO: 995206 - DNA, 15 bp, Homo sapiens
tgctctaccatctac

SEQ ID NO: 995207 - DNA, 15 bp, Homo sapiens
gtgctctaccatcta

SEQ ID NO: 995208 - DNA, 15 bp, Homo sapiens
tgtgctctaccatct

SEQ ID NO: 995209 - DNA, 15 bp, Homo sapiens
atgtgctctaccatc

SEQ ID NO: 995210 - DNA, 15 bp, Homo sapiens
catgtgctctaccat

SEQ ID NO: 995211 - DNA, 15 bp, Homo sapiens
gcatgtgctctacca

SEQ ID NO: 995212 - DNA, 15 bp, Homo sapiens
agcatgtgctctacc

SEQ ID NO: 995213 - DNA, 15 bp, Homo sapiens
aagcatgtgctctac

SEQ ID NO: 995214 - DNA, 15 bp, Homo sapiens
aaagcatgtgctcta

SEQ ID NO: 995215 - DNA, 15 bp, Homo sapiens
gaaagcatgtgctct

SEQ ID NO: 995216 - DNA, 15 bp, Homo sapiens
agaaagcatgtgctc

SEQ ID NO: 995217 - DNA, 15 bp, Homo sapiens
gagaaagcatgtgct

SEQ ID NO: 995218 - DNA, 15 bp, Homo sapiens
tgagaaagcatgtgc

SEQ ID NO: 995219 - DNA, 15 bp, Homo sapiens
ctgagaaagcatgtg

SEQ ID NO: 995220 - DNA, 15 bp, Homo sapiens
gctgagaaagcatgt

SEQ ID NO: 995221 - DNA, 15 bp, Homo sapiens
tgctgagaaagcatg

SEQ ID NO: 995222 - DNA, 15 bp, Homo sapiens
gtgctgagaaagcat

SEQ ID NO: 995223 - DNA, 15 bp, Homo sapiens
ggtgctgagaaagca

SEQ ID NO: 995224 - DNA, 15 bp, Homo sapiens
aggtgctgagaaagc

SEQ ID NO: 995225 - DNA, 15 bp, Homo sapiens
aaggtgctgagaaag

SEQ ID NO: 995226 - DNA, 15 bp, Homo sapiens
gaaggtgctgagaaa

SEQ ID NO: 995227 - DNA, 15 bp, Homo sapiens
tgaaggtgctgagaa

SEQ ID NO: 995228 - DNA, 15 bp, Homo sapiens
ctgaaggtgctgaga

SEQ ID NO: 995229 - DNA, 15 bp, Homo sapiens
cctgaaggtgctgag

SEQ ID NO: 995230 - DNA, 15 bp, Homo sapiens
gcctgaaggtgctga

SEQ ID NO: 995231 - DNA, 15 bp, Homo sapiens
agcctgaaggtgctg

SEQ ID NO: 995232 - DNA, 15 bp, Homo sapiens
cagcctgaaggtgct

SEQ ID NO: 995233 - DNA, 15 bp, Homo sapiens
gcagcctgaaggtgc

SEQ ID NO: 995234 - DNA, 15 bp, Homo sapiens
ggcagcctgaaggtg

SEQ ID NO: 995235 - DNA, 15 bp, Homo sapiens
aggcagcctgaaggt

SEQ ID NO: 995236 - DNA, 15 bp, Homo sapiens
caggcagcctgaagg

SEQ ID NO: 995237 - DNA, 15 bp, Homo sapiens
ccaggcagcctgaag

SEQ ID NO: 995238 - DNA, 15 bp, Homo sapiens
tccaggcagcctgaa

SEQ ID NO: 995239 - DNA, 15 bp, Homo sapiens
ctccaggcagcctga

SEQ ID NO: 995240 - DNA, 15 bp, Homo sapiens
gctccaggcagcctg

SEQ ID NO: 995241 - DNA, 15 bp, Homo sapiens
ggctccaggcagcct

SEQ ID NO: 995242 - DNA, 15 bp, Homo sapiens
aggctccaggcagcc

SEQ ID NO: 995243 - DNA, 15 bp, Homo sapiens
gaggctccaggcagc

SEQ ID NO: 995244 - DNA, 15 bp, Homo sapiens
ggaggctccaggcag

SEQ ID NO: 995245 - DNA, 15 bp, Homo sapiens
gggaggctccaggca

SEQ ID NO: 995246 - DNA, 15 bp, Homo sapiens
tgggaggctccaggc

SEQ ID NO: 995247 - DNA, 15 bp, Homo sapiens
ttgggaggctccagg

SEQ ID NO: 995248 - DNA, 15 bp, Homo sapiens
attgggaggctccag

SEQ ID NO: 995249 - DNA, 15 bp, Homo sapiens
tattgggaggctcca

SEQ ID NO: 995250 - DNA, 15 bp, Homo sapiens
ctattgggaggctcc

SEQ ID NO: 995251 - DNA, 15 bp, Homo sapiens
tctattgggaggctc

SEQ ID NO: 995252 - DNA, 15 bp, Homo sapiens
ctctattgggaggct

SEQ ID NO: 995253 - DNA, 15 bp, Homo sapiens
cctctattgggaggc

SEQ ID NO: 995254 - DNA, 15 bp, Homo sapiens
gacagcattagtact

SEQ ID NO: 995255 - DNA, 15 bp, Homo sapiens
tgacagcattagtac

SEQ ID NO: 995256 - DNA, 15 bp, Homo sapiens
atgacagcattagta

SEQ ID NO: 995257 - DNA, 15 bp, Homo sapiens
gatgacagcattagt

SEQ ID NO: 995258 - DNA, 15 bp, Homo sapiens
cgatgacagcattag

SEQ ID NO: 995259 - DNA, 15 bp, Homo sapiens
acgatgacagcatta

SEQ ID NO: 995260 - DNA, 15 bp, Homo sapiens
tacgatgacagcatt

SEQ ID NO: 995261 - DNA, 15 bp, Homo sapiens
atacgatgacagcat

SEQ ID NO: 995262 - DNA, 15 bp, Homo sapiens
aatacgatgacagca

SEQ ID NO: 995263 - DNA, 15 bp, Homo sapiens
aaatacgatgacagc

SEQ ID NO: 995264 - DNA, 15 bp, Homo sapiens
gaaatacgatgacag

SEQ ID NO: 995265 - DNA, 15 bp, Homo sapiens
agaaatacgatgaca

SEQ ID NO: 995266 - DNA, 15 bp, Homo sapiens
gagaaatacgatgac

SEQ ID NO: 995267 - DNA, 15 bp, Homo sapiens
tgagaaatacgatga

SEQ ID NO: 995268 - DNA, 15 bp, Homo sapiens
atgagaaatacgatg

SEQ ID NO: 995269 - DNA, 15 bp, Homo sapiens
tatgagaaatacgat

SEQ ID NO: 995270 - DNA, 15 bp, Homo sapiens
ctatgagaaatacga

SEQ ID NO: 995271 - DNA, 15 bp, Homo sapiens
gctatgagaaatacg

SEQ ID NO: 995272 - DNA, 15 bp, Homo sapiens
agctatgagaaatac

SEQ ID NO: 995273 - DNA, 15 bp, Homo sapiens
aagctatgagaaata

SEQ ID NO: 995274 - DNA, 15 bp, Homo sapiens
aaagctatgagaaat

SEQ ID NO: 995275 - DNA, 15 bp, Homo sapiens
aaaagctatgagaaa

SEQ ID NO: 995276 - DNA, 15 bp, Homo sapiens
caaaagctatgagaa

SEQ ID NO: 995277 - DNA, 15 bp, Homo sapiens
acaaaagctatgaga

SEQ ID NO: 995278 - DNA, 15 bp, Homo sapiens
aacaaaagctatgag

SEQ ID NO: 995279 - DNA, 15 bp, Homo sapiens
aaacaaaagctatga

SEQ ID NO: 995280 - DNA, 15 bp, Homo sapiens
aaaacaaaagctatg

SEQ ID NO: 995281 - DNA, 15 bp, Homo sapiens
gaaaacaaaagctat

SEQ ID NO: 995282 - DNA, 15 bp, Homo sapiens
tgaaaacaaaagcta

SEQ ID NO: 995283 - DNA, 15 bp, Homo sapiens
atgaaaacaaaagct

SEQ ID NO: 995284 - DNA, 15 bp, Homo sapiens
gatgaaaacaaaagc

SEQ ID NO: 995285 - DNA, 15 bp, Homo sapiens
ggatgaaaacaaaag

SEQ ID NO: 995286 - DNA, 15 bp, Homo sapiens
tggatgaaaacaaaa

SEQ ID NO: 995287 - DNA, 15 bp, Homo sapiens
ctggatgaaaacaaa

SEQ ID NO: 995288 - DNA, 15 bp, Homo sapiens
actggatgaaaacaa

SEQ ID NO: 995289 - DNA, 15 bp, Homo sapiens
cactggatgaaaaca

SEQ ID NO: 995290 - DNA, 15 bp, Homo sapiens
ccactggatgaaaac

SEQ ID NO: 995291 - DNA, 15 bp, Homo sapiens
gccactggatgaaaa

SEQ ID NO: 995292 - DNA, 15 bp, Homo sapiens
agccactggatgaaa

SEQ ID NO: 995293 - DNA, 15 bp, Homo sapiens
gagccactggatgaa

SEQ ID NO: 995294 - DNA, 15 bp, Homo sapiens
tgagccactggatga

SEQ ID NO: 995295 - DNA, 15 bp, Homo sapiens
ctgagccactggatg

SEQ ID NO: 995296 - DNA, 15 bp, Homo sapiens
gctgagccactggat

SEQ ID NO: 995297 - DNA, 15 bp, Homo sapiens
cgctgagccactgga

SEQ ID NO: 995298 - DNA, 15 bp, Homo sapiens
ccgctgagccactgg

SEQ ID NO: 995299 - DNA, 15 bp, Homo sapiens
tccgctgagccactg

SEQ ID NO: 995300 - DNA, 15 bp, Homo sapiens
ttccgctgagccact

SEQ ID NO: 995301 - DNA, 15 bp, Homo sapiens
attccgctgagccac

SEQ ID NO: 995302 - DNA, 15 bp, Homo sapiens
aattccgctgagcca

SEQ ID NO: 995303 - DNA, 15 bp, Homo sapiens
caattccgctgagcc

SEQ ID NO: 995304 - DNA, 15 bp, Homo sapiens
tcaattccgctgagc

SEQ ID NO: 995305 - DNA, 15 bp, Homo sapiens
atcaattccgctgag

SEQ ID NO: 995306 - DNA, 15 bp, Homo sapiens
aatcaattccgctga

SEQ ID NO: 995307 - DNA, 15 bp, Homo sapiens
caatcaattccgctg

SEQ ID NO: 995308 - DNA, 15 bp, Homo sapiens
ccaatcaattccgct

SEQ ID NO: 995309 - DNA, 15 bp, Homo sapiens
cccaatcaattccgc

SEQ ID NO: 995310 - DNA, 15 bp, Homo sapiens
tcccaatcaattccg

SEQ ID NO: 995311 - DNA, 15 bp, Homo sapiens
atcccaatcaattcc

SEQ ID NO: 995312 - DNA, 15 bp, Homo sapiens
aatcccaatcaattc

SEQ ID NO: 995313 - DNA, 15 bp, Homo sapiens
caatcccaatcaatt

SEQ ID NO: 995314 - DNA, 15 bp, Homo sapiens
gcaatcccaatcaat

SEQ ID NO: 995315 - DNA, 15 bp, Homo sapiens
ggcaatcccaatcaa

SEQ ID NO: 995316 - DNA, 15 bp, Homo sapiens
tggcaatcccaatca

SEQ ID NO: 995317 - DNA, 15 bp, Homo sapiens
ttggcaatcccaatc

SEQ ID NO: 995318 - DNA, 15 bp, Homo sapiens
tttggcaatcccaat

SEQ ID NO: 995319 - DNA, 15 bp, Homo sapiens
ttttggcaatcccaa

SEQ ID NO: 995320 - DNA, 15 bp, Homo sapiens
tttttggcaatccca

SEQ ID NO: 995321 - DNA, 15 bp, Homo sapiens
ttttttggcaatccc

SEQ ID NO: 995322 - DNA, 15 bp, Homo sapiens
attttttggcaatcc

SEQ ID NO: 995323 - DNA, 15 bp, Homo sapiens
tattttttggcaatc

SEQ ID NO: 995324 - DNA, 15 bp, Homo sapiens
ttattttttggcaat

SEQ ID NO: 995325 - DNA, 15 bp, Homo sapiens
tttattttttggcaa

SEQ ID NO: 995326 - DNA, 15 bp, Homo sapiens
ttttattttttggca

SEQ ID NO: 995327 - DNA, 15 bp, Homo sapiens
attttattttttggc

SEQ ID NO: 995328 - DNA, 15 bp, Homo sapiens
cattttattttttgg

SEQ ID NO: 995329 - DNA, 15 bp, Homo sapiens
tcattttattttttg

SEQ ID NO: 995330 - DNA, 15 bp, Homo sapiens
atcattttatttttt

SEQ ID NO: 995331 - DNA, 15 bp, Homo sapiens
tatcattttattttt

SEQ ID NO: 995332 - DNA, 15 bp, Homo sapiens
gtatcattttatttt

SEQ ID NO: 995333 - DNA, 15 bp, Homo sapiens
tgtatcattttattt

SEQ ID NO: 995334 - DNA, 15 bp, Homo sapiens
ttgtatcattttatt

SEQ ID NO: 995335 - DNA, 15 bp, Homo sapiens
cttgtatcattttat

SEQ ID NO: 995336 - DNA, 15 bp, Homo sapiens
acttgtatcatttta

SEQ ID NO: 995337 - DNA, 15 bp, Homo sapiens
cacttgtatcatttt

SEQ ID NO: 995338 - DNA, 15 bp, Homo sapiens
tcacttgtatcattt

SEQ ID NO: 995339 - DNA, 15 bp, Homo sapiens
ctcacttgtatcatt

SEQ ID NO: 995340 - DNA, 15 bp, Homo sapiens
tctcacttgtatcat

SEQ ID NO: 995341 - DNA, 15 bp, Homo sapiens
ttctcacttgtatca

SEQ ID NO: 995342 - DNA, 15 bp, Homo sapiens
tttctcacttgtatc

SEQ ID NO: 995343 - DNA, 15 bp, Homo sapiens
atttctcacttgtat

SEQ ID NO: 995344 - DNA, 15 bp, Homo sapiens
tatttctcacttgta

SEQ ID NO: 995345 - DNA, 15 bp, Homo sapiens
ctatttctcacttgt

SEQ ID NO: 995346 - DNA, 15 bp, Homo sapiens
tctatttctcacttg

SEQ ID NO: 995347 - DNA, 15 bp, Homo sapiens
ccaggtctatttctc

SEQ ID NO: 995348 - DNA, 15 bp, Homo sapiens
tccaggtctatttct

SEQ ID NO: 995349 - DNA, 15 bp, Homo sapiens
ctccaggtctatttc

SEQ ID NO: 995350 - DNA, 15 bp, Homo sapiens
cctccaggtctattt

SEQ ID NO: 995351 - DNA, 15 bp, Homo sapiens
ccctccaggtctatt

SEQ ID NO: 995352 - DNA, 15 bp, Homo sapiens
tccctccaggtctat

SEQ ID NO: 995353 - DNA, 15 bp, Homo sapiens
ctccctccaggtcta

SEQ ID NO: 995354 - DNA, 15 bp, Homo sapiens
cctccctccaggtct

SEQ ID NO: 995355 - DNA, 15 bp, Homo sapiens
acctccctccaggtc

SEQ ID NO: 995356 - DNA, 15 bp, Homo sapiens
cacctccctccaggt

SEQ ID NO: 995357 - DNA, 15 bp, Homo sapiens
acacctccctccagg

SEQ ID NO: 995358 - DNA, 15 bp, Homo sapiens
cacacctccctccag

SEQ ID NO: 995359 - DNA, 15 bp, Homo sapiens
acacacctccctcca

SEQ ID NO: 995360 - DNA, 15 bp, Homo sapiens
cacacacctccctcc

SEQ ID NO: 995361 - DNA, 15 bp, Homo sapiens
acacacacctccctc

SEQ ID NO: 995362 - DNA, 15 bp, Homo sapiens
cacacacacctccct

SEQ ID NO: 995363 - DNA, 15 bp, Homo sapiens
acacacacacctccc

SEQ ID NO: 995364 - DNA, 15 bp, Homo sapiens
cacacacacacctcc

SEQ ID NO: 995365 - DNA, 15 bp, Homo sapiens
acacacacacacctc

SEQ ID NO: 995366 - DNA, 15 bp, Homo sapiens
cacacacacacacct

SEQ ID NO: 995367 - DNA, 15 bp, Homo sapiens
aacaacacacacaca

SEQ ID NO: 995368 - DNA, 15 bp, Homo sapiens
caacaacacacacac

SEQ ID NO: 995369 - DNA, 15 bp, Homo sapiens
ccaacaacacacaca

SEQ ID NO: 995370 - DNA, 15 bp, Homo sapiens
accaacaacacacac

SEQ ID NO: 995371 - DNA, 15 bp, Homo sapiens
aaccaacaacacaca

SEQ ID NO: 995372 - DNA, 15 bp, Homo sapiens
taaccaacaacacac

SEQ ID NO: 995373 - DNA, 15 bp, Homo sapiens
gtaaccaacaacaca

SEQ ID NO: 995374 - DNA, 15 bp, Homo sapiens
agtaaccaacaacac

SEQ ID NO: 995375 - DNA, 15 bp, Homo sapiens
aagtaaccaacaaca

SEQ ID NO: 995376 - DNA, 15 bp, Homo sapiens
caagtaaccaacaac

SEQ ID NO: 995377 - DNA, 15 bp, Homo sapiens
gcaagtaaccaacaa

SEQ ID NO: 995378 - DNA, 15 bp, Homo sapiens
agcaagtaaccaaca

SEQ ID NO: 995379 - DNA, 15 bp, Homo sapiens
aagcaagtaaccaac

SEQ ID NO: 995380 - DNA, 15 bp, Homo sapiens
taagcaagtaaccaa

SEQ ID NO: 995381 - DNA, 15 bp, Homo sapiens
ataagcaagtaacca

SEQ ID NO: 995382 - DNA, 15 bp, Homo sapiens
aataagcaagtaacc

SEQ ID NO: 995383 - DNA, 15 bp, Homo sapiens
aaataagcaagtaac

SEQ ID NO: 995384 - DNA, 15 bp, Homo sapiens
aaaataagcaagtaa

SEQ ID NO: 995385 - DNA, 15 bp, Homo sapiens
taaaataagcaagta

SEQ ID NO: 995386 - DNA, 15 bp, Homo sapiens
ataaaataagcaagt

SEQ ID NO: 995387 - DNA, 15 bp, Homo sapiens
aataaaataagcaag

SEQ ID NO: 995388 - DNA, 15 bp, Homo sapiens
aaataaaataagcaa

SEQ ID NO: 995389 - DNA, 15 bp, Homo sapiens
gaaataaaataagca

SEQ ID NO: 995390 - DNA, 15 bp, Homo sapiens
agaaataaaataagc

SEQ ID NO: 995391 - DNA, 15 bp, Homo sapiens
cagaaataaaataag

SEQ ID NO: 995392 - DNA, 15 bp, Homo sapiens
tcagaaataaaataa

SEQ ID NO: 995393 - DNA, 15 bp, Homo sapiens
ctcagaaataaaata

SEQ ID NO: 995394 - DNA, 15 bp, Homo sapiens
tctcagaaataaaat

SEQ ID NO: 995395 - DNA, 15 bp, Homo sapiens
ttctcagaaataaaa

SEQ ID NO: 995396 - DNA, 15 bp, Homo sapiens
gttctcagaaataaa

SEQ ID NO: 995397 - DNA, 15 bp, Homo sapiens
ggttctcagaaataa

SEQ ID NO: 995398 - DNA, 15 bp, Homo sapiens
cggttctcagaaata

SEQ ID NO: 995399 - DNA, 15 bp, Homo sapiens
acggttctcagaaat

SEQ ID NO: 995400 - DNA, 15 bp, Homo sapiens
gacggttctcagaaa

SEQ ID NO: 995401 - DNA, 15 bp, Homo sapiens
tgacggttctcagaa

SEQ ID NO: 995402 - DNA, 15 bp, Homo sapiens
ctgacggttctcaga

SEQ ID NO: 995403 - DNA, 15 bp, Homo sapiens
tctgacggttctcag

SEQ ID NO: 995404 - DNA, 15 bp, Homo sapiens
ctctgacggttctca

SEQ ID NO: 995405 - DNA, 15 bp, Homo sapiens
actctgacggttctc

SEQ ID NO: 995406 - DNA, 15 bp, Homo sapiens
aactctgacggttct

SEQ ID NO: 995407 - DNA, 15 bp, Homo sapiens
caactctgacggttc

SEQ ID NO: 995408 - DNA, 15 bp, Homo sapiens
tcaactctgacggtt

SEQ ID NO: 995409 - DNA, 15 bp, Homo sapiens
ctcaactctgacggt

SEQ ID NO: 995410 - DNA, 15 bp, Homo sapiens
cctcaactctgacgg

SEQ ID NO: 995411 - DNA, 15 bp, Homo sapiens
tcctcaactctgacg

SEQ ID NO: 995412 - DNA, 15 bp, Homo sapiens
atcctcaactctgac

SEQ ID NO: 995413 - DNA, 15 bp, Homo sapiens
aatcctcaactctga

SEQ ID NO: 995414 - DNA, 15 bp, Homo sapiens
aaatcctcaactctg

SEQ ID NO: 995415 - DNA, 15 bp, Homo sapiens
gaaatcctcaactct

SEQ ID NO: 995416 - DNA, 15 bp, Homo sapiens
tgaaatcctcaactc

SEQ ID NO: 995417 - DNA, 15 bp, Homo sapiens
ttgaaatcctcaact

SEQ ID NO: 995418 - DNA, 15 bp, Homo sapiens
tttgaaatcctcaac

SEQ ID NO: 995419 - DNA, 15 bp, Homo sapiens
gtttgaaatcctcaa

SEQ ID NO: 995420 - DNA, 15 bp, Homo sapiens
tgtttgaaatcctca

SEQ ID NO: 995421 - DNA, 15 bp, Homo sapiens
atgtttgaaatcctc

SEQ ID NO: 995422 - DNA, 15 bp, Homo sapiens
catgtttgaaatcct

SEQ ID NO: 995423 - DNA, 15 bp, Homo sapiens
tcatgtttgaaatcc

SEQ ID NO: 995424 - DNA, 15 bp, Homo sapiens
atcatgtttgaaatc

SEQ ID NO: 995425 - DNA, 15 bp, Homo sapiens
aatcatgtttgaaat

SEQ ID NO: 995426 - DNA, 15 bp, Homo sapiens
gaatcatgtttgaaa

SEQ ID NO: 995427 - DNA, 15 bp, Homo sapiens
agaatcatgtttgaa

SEQ ID NO: 995428 - DNA, 15 bp, Homo sapiens
cagaatcatgtttga

SEQ ID NO: 995429 - DNA, 15 bp, Homo sapiens
tcagaatcatgtttg

SEQ ID NO: 995430 - DNA, 15 bp, Homo sapiens
atcagaatcatgttt

SEQ ID NO: 995431 - DNA, 15 bp, Homo sapiens
tatcagaatcatgtt

SEQ ID NO: 995432 - DNA, 15 bp, Homo sapiens
ctatcagaatcatgt

SEQ ID NO: 995433 - DNA, 15 bp, Homo sapiens
gctatcagaatcatg

SEQ ID NO: 995434 - DNA, 15 bp, Homo sapiens
tgctatcagaatcat

SEQ ID NO: 995435 - DNA, 15 bp, Homo sapiens
atgctatcagaatca

SEQ ID NO: 995436 - DNA, 15 bp, Homo sapiens
aatgctatcagaatc

SEQ ID NO: 995437 - DNA, 15 bp, Homo sapiens
aaatgctatcagaat

SEQ ID NO: 995438 - DNA, 15 bp, Homo sapiens
taaatgctatcagaa

SEQ ID NO: 995439 - DNA, 15 bp, Homo sapiens
gtaaatgctatcaga

SEQ ID NO: 995440 - DNA, 15 bp, Homo sapiens
ggtaaatgctatcag

SEQ ID NO: 995441 - DNA, 15 bp, Homo sapiens
cggtaaatgctatca

SEQ ID NO: 995442 - DNA, 15 bp, Homo sapiens
gcggtaaatgctatc

SEQ ID NO: 995443 - DNA, 15 bp, Homo sapiens
tgcggtaaatgctat

SEQ ID NO: 995444 - DNA, 15 bp, Homo sapiens
ttgcggtaaatgcta

SEQ ID NO: 995445 - DNA, 15 bp, Homo sapiens
tttgcggtaaatgct

SEQ ID NO: 995446 - DNA, 15 bp, Homo sapiens
gtttgcggtaaatgc

SEQ ID NO: 995447 - DNA, 15 bp, Homo sapiens
cgtttgcggtaaatg

SEQ ID NO: 995448 - DNA, 15 bp, Homo sapiens
gcgtttgcggtaaat

SEQ ID NO: 995449 - DNA, 15 bp, Homo sapiens
agcgtttgcggtaaa

SEQ ID NO: 995450 - DNA, 15 bp, Homo sapiens
cagcgtttgcggtaa

SEQ ID NO: 995451 - DNA, 15 bp, Homo sapiens
tcagcgtttgcggta

SEQ ID NO: 995452 - DNA, 15 bp, Homo sapiens
atcagcgtttgcggt

SEQ ID NO: 995453 - DNA, 15 bp, Homo sapiens
catcagcgtttgcgg

SEQ ID NO: 995454 - DNA, 15 bp, Homo sapiens
ccatcagcgtttgcg

SEQ ID NO: 995455 - DNA, 15 bp, Homo sapiens
gccatcagcgtttgc

SEQ ID NO: 995456 - DNA, 15 bp, Homo sapiens
tgccatcagcgtttg

SEQ ID NO: 995457 - DNA, 15 bp, Homo sapiens
ctgccatcagcgttt

SEQ ID NO: 995458 - DNA, 15 bp, Homo sapiens
actgccatcagcgtt

SEQ ID NO: 995459 - DNA, 15 bp, Homo sapiens
aactgccatcagcgt

SEQ ID NO: 995460 - DNA, 15 bp, Homo sapiens
caactgccatcagcg

SEQ ID NO: 995461 - DNA, 15 bp, Homo sapiens
gcaactgccatcagc

SEQ ID NO: 995462 - DNA, 15 bp, Homo sapiens
agcaactgccatcag

SEQ ID NO: 995463 - DNA, 15 bp, Homo sapiens
gagcaactgccatca

SEQ ID NO: 995464 - DNA, 15 bp, Homo sapiens
agagcaactgccatc

SEQ ID NO: 995465 - DNA, 15 bp, Homo sapiens
gagagcaactgccat

SEQ ID NO: 995466 - DNA, 15 bp, Homo sapiens
ggagagcaactgcca

SEQ ID NO: 995467 - DNA, 15 bp, Homo sapiens
aggagagcaactgcc

SEQ ID NO: 995468 - DNA, 15 bp, Homo sapiens
aaggagagcaactgc

SEQ ID NO: 995469 - DNA, 15 bp, Homo sapiens
aaaggagagcaactg

SEQ ID NO: 995470 - DNA, 15 bp, Homo sapiens
caaaggagagcaact

SEQ ID NO: 995471 - DNA, 15 bp, Homo sapiens
gcaaaggagagcaac

SEQ ID NO: 995472 - DNA, 15 bp, Homo sapiens
ggcaaaggagagcaa

SEQ ID NO: 995473 - DNA, 15 bp, Homo sapiens
aaggcaaaggagagc

SEQ ID NO: 995474 - DNA, 15 bp, Homo sapiens
taaggcaaaggagag

SEQ ID NO: 995475 - DNA, 15 bp, Homo sapiens
ataaggcaaaggaga

SEQ ID NO: 995476 - DNA, 15 bp, Homo sapiens
tataaggcaaaggag

SEQ ID NO: 995477 - DNA, 15 bp, Homo sapiens
ctataaggcaaagga

SEQ ID NO: 995478 - DNA, 15 bp, Homo sapiens
gctataaggcaaagg

SEQ ID NO: 995479 - DNA, 15 bp, Homo sapiens
agctataaggcaaag

SEQ ID NO: 995480 - DNA, 15 bp, Homo sapiens
tagctataaggcaaa

SEQ ID NO: 995481 - DNA, 15 bp, Homo sapiens
ttagctataaggcaa

SEQ ID NO: 995482 - DNA, 15 bp, Homo sapiens
gttagctataaggca

SEQ ID NO: 995483 - DNA, 15 bp, Homo sapiens
agttagctataaggc

SEQ ID NO: 995484 - DNA, 15 bp, Homo sapiens
cagttagctataagg

SEQ ID NO: 995485 - DNA, 15 bp, Homo sapiens
ccagttagctataag

SEQ ID NO: 995486 - DNA, 15 bp, Homo sapiens
cccagttagctataa

SEQ ID NO: 995487 - DNA, 15 bp, Homo sapiens
tcccagttagctata

SEQ ID NO: 995488 - DNA, 15 bp, Homo sapiens
gtcccagttagctat

SEQ ID NO: 995489 - DNA, 15 bp, Homo sapiens
agtcccagttagcta

SEQ ID NO: 995490 - DNA, 15 bp, Homo sapiens
tagtcccagttagct

SEQ ID NO: 995491 - DNA, 15 bp, Homo sapiens
ctagtcccagttagc

SEQ ID NO: 995492 - DNA, 15 bp, Homo sapiens
tctagtcccagttag

SEQ ID NO: 995493 - DNA, 15 bp, Homo sapiens
ttctagtcccagtta

SEQ ID NO: 995494 - DNA, 15 bp, Homo sapiens
tttctagtcccagtt

SEQ ID NO: 995495 - DNA, 15 bp, Homo sapiens
gtttctagtcccagt

SEQ ID NO: 995496 - DNA, 15 bp, Homo sapiens
tgtttctagtcccag

SEQ ID NO: 995497 - DNA, 15 bp, Homo sapiens
ctgtttctagtccca

SEQ ID NO: 995498 - DNA, 15 bp, Homo sapiens
gctgtttctagtccc

SEQ ID NO: 995499 - DNA, 15 bp, Homo sapiens
agctgtttctagtcc

SEQ ID NO: 995500 - DNA, 15 bp, Homo sapiens
gagctgtttctagtc

SEQ ID NO: 995501 - DNA, 15 bp, Homo sapiens
ggagctgtttctagt

SEQ ID NO: 995502 - DNA, 15 bp, Homo sapiens
tggagctgtttctag

SEQ ID NO: 995503 - DNA, 15 bp, Homo sapiens
atggagctgtttcta

SEQ ID NO: 995504 - DNA, 15 bp, Homo sapiens
gatggagctgtttct

SEQ ID NO: 995505 - DNA, 15 bp, Homo sapiens
tgatggagctgtttc

SEQ ID NO: 995506 - DNA, 15 bp, Homo sapiens
gtgatggagctgttt

SEQ ID NO: 995507 - DNA, 15 bp, Homo sapiens
ggtgatggagctgtt

SEQ ID NO: 995508 - DNA, 15 bp, Homo sapiens
gggtgatggagctgt

SEQ ID NO: 995509 - DNA, 15 bp, Homo sapiens
tgggtgatggagctg

SEQ ID NO: 995510 - DNA, 15 bp, Homo sapiens
ctgggtgatggagct

SEQ ID NO: 995511 - DNA, 15 bp, Homo sapiens
cctgggtgatggagc

SEQ ID NO: 995512 - DNA, 15 bp, Homo sapiens
acctgggtgatggag

SEQ ID NO: 995513 - DNA, 15 bp, Homo sapiens
cacctgggtgatgga

SEQ ID NO: 995514 - DNA, 15 bp, Homo sapiens
tcacctgggtgatgg

SEQ ID NO: 995515 - DNA, 15 bp, Homo sapiens
ctcacctgggtgatg

SEQ ID NO: 995516 - DNA, 15 bp, Homo sapiens
actcacctgggtgat

SEQ ID NO: 995517 - DNA, 15 bp, Homo sapiens
aactcacctgggtga

SEQ ID NO: 995518 - DNA, 15 bp, Homo sapiens
aaactcacctgggtg

SEQ ID NO: 995519 - DNA, 15 bp, Homo sapiens
aaaactcacctgggt

SEQ ID NO: 995520 - DNA, 15 bp, Homo sapiens
taaaactcacctggg

SEQ ID NO: 995521 - DNA, 15 bp, Homo sapiens
ataaaactcacctgg

SEQ ID NO: 995522 - DNA, 15 bp, Homo sapiens
tataaaactcacctg

SEQ ID NO: 995523 - DNA, 15 bp, Homo sapiens
ttataaaactcacct

SEQ ID NO: 995524 - DNA, 15 bp, Homo sapiens
cttataaaactcacc

SEQ ID NO: 995525 - DNA, 15 bp, Homo sapiens
ccttataaaactcac

SEQ ID NO: 995526 - DNA, 15 bp, Homo sapiens
tccttataaaactca

SEQ ID NO: 995527 - DNA, 15 bp, Homo sapiens
ttccttataaaactc

SEQ ID NO: 995528 - DNA, 15 bp, Homo sapiens
tttccttataaaact

SEQ ID NO: 995529 - DNA, 15 bp, Homo sapiens
gtttccttataaaac

SEQ ID NO: 995530 - DNA, 15 bp, Homo sapiens
tgtttccttataaaa

SEQ ID NO: 995531 - DNA, 15 bp, Homo sapiens
atgtttccttataaa

SEQ ID NO: 995532 - DNA, 15 bp, Homo sapiens
tatgtttccttataa

SEQ ID NO: 995533 - DNA, 15 bp, Homo sapiens
ttatgtttccttata

SEQ ID NO: 995534 - DNA, 15 bp, Homo sapiens
cttatgtttccttat

SEQ ID NO: 995535 - DNA, 15 bp, Homo sapiens
ccttatgtttcctta

SEQ ID NO: 995536 - DNA, 15 bp, Homo sapiens
cccttatgtttcctt

SEQ ID NO: 995537 - DNA, 15 bp, Homo sapiens
ccccttatgtttcct

SEQ ID NO: 995538 - DNA, 15 bp, Homo sapiens
cccccttatgtttcc

SEQ ID NO: 995539 - DNA, 15 bp, Homo sapiens
gcccccttatgtttc

SEQ ID NO: 995540 - DNA, 15 bp, Homo sapiens
agcccccttatgttt

SEQ ID NO: 995541 - DNA, 15 bp, Homo sapiens
cagcccccttatgtt

SEQ ID NO: 995542 - DNA, 15 bp, Homo sapiens
ccagcccccttatgt

SEQ ID NO: 995543 - DNA, 15 bp, Homo sapiens
accagcccccttatg

SEQ ID NO: 995544 - DNA, 15 bp, Homo sapiens
gaccagcccccttat

SEQ ID NO: 995545 - DNA, 15 bp, Homo sapiens
agaccagccccctta

SEQ ID NO: 995546 - DNA, 15 bp, Homo sapiens
cagaccagccccctt

SEQ ID NO: 995547 - DNA, 15 bp, Homo sapiens
acagaccagccccct

SEQ ID NO: 995548 - DNA, 15 bp, Homo sapiens
aacagaccagccccc

SEQ ID NO: 995549 - DNA, 15 bp, Homo sapiens
caacagaccagcccc

SEQ ID NO: 995550 - DNA, 15 bp, Homo sapiens
gcaacagaccagccc

SEQ ID NO: 995551 - DNA, 15 bp, Homo sapiens
agcaacagaccagcc

SEQ ID NO: 995552 - DNA, 15 bp, Homo sapiens
aagcaacagaccagc

SEQ ID NO: 995553 - DNA, 15 bp, Homo sapiens
gaagcaacagaccag

SEQ ID NO: 995554 - DNA, 15 bp, Homo sapiens
ggaagcaacagacca

SEQ ID NO: 995555 - DNA, 15 bp, Homo sapiens
gggaagcaacagacc

SEQ ID NO: 995556 - DNA, 15 bp, Homo sapiens
agggaagcaacagac

SEQ ID NO: 995557 - DNA, 15 bp, Homo sapiens
gagggaagcaacaga

SEQ ID NO: 995558 - DNA, 15 bp, Homo sapiens
ggagggaagcaacag

SEQ ID NO: 995559 - DNA, 15 bp, Homo sapiens
aggagggaagcaaca

SEQ ID NO: 995560 - DNA, 15 bp, Homo sapiens
gaggagggaagcaac

SEQ ID NO: 995561 - DNA, 15 bp, Homo sapiens
agaggagggaagcaa

SEQ ID NO: 995562 - DNA, 15 bp, Homo sapiens
caagaggagggaagc

SEQ ID NO: 995563 - DNA, 15 bp, Homo sapiens
acaagaggagggaag

SEQ ID NO: 995564 - DNA, 15 bp, Homo sapiens
tacaagaggagggaa

SEQ ID NO: 995565 - DNA, 15 bp, Homo sapiens
ttacaagaggaggga

SEQ ID NO: 995566 - DNA, 15 bp, Homo sapiens
cttacaagaggaggg

SEQ ID NO: 995567 - DNA, 15 bp, Homo sapiens
gcttacaagaggagg

SEQ ID NO: 995568 - DNA, 15 bp, Homo sapiens
agcttacaagaggag

SEQ ID NO: 995569 - DNA, 15 bp, Homo sapiens
aagcttacaagagga

SEQ ID NO: 995570 - DNA, 15 bp, Homo sapiens
aaagcttacaagagg

SEQ ID NO: 995571 - DNA, 15 bp, Homo sapiens
caaagcttacaagag

SEQ ID NO: 995572 - DNA, 15 bp, Homo sapiens
ccaaagcttacaaga

SEQ ID NO: 995573 - DNA, 15 bp, Homo sapiens
tccaaagcttacaag

SEQ ID NO: 995574 - DNA, 15 bp, Homo sapiens
atccaaagcttacaa

SEQ ID NO: 995575 - DNA, 15 bp, Homo sapiens
tatccaaagcttaca

SEQ ID NO: 995576 - DNA, 15 bp, Homo sapiens
ttatccaaagcttac

SEQ ID NO: 995577 - DNA, 15 bp, Homo sapiens
gttatccaaagctta

SEQ ID NO: 995578 - DNA, 15 bp, Homo sapiens
agttatccaaagctt

SEQ ID NO: 995579 - DNA, 15 bp, Homo sapiens
gagttatccaaagct

SEQ ID NO: 995580 - DNA, 15 bp, Homo sapiens
agagttatccaaagc

SEQ ID NO: 995581 - DNA, 15 bp, Homo sapiens
cagagttatccaaag

SEQ ID NO: 995582 - DNA, 15 bp, Homo sapiens
tcagagttatccaaa

SEQ ID NO: 995583 - DNA, 15 bp, Homo sapiens
ttcagagttatccaa

SEQ ID NO: 995584 - DNA, 15 bp, Homo sapiens
attcagagttatcca

SEQ ID NO: 995585 - DNA, 15 bp, Homo sapiens
aattcagagttatcc

SEQ ID NO: 995586 - DNA, 15 bp, Homo sapiens
aaattcagagttatc

SEQ ID NO: 995587 - DNA, 15 bp, Homo sapiens
taaattcagagttat

SEQ ID NO: 995588 - DNA, 15 bp, Homo sapiens
ctaaattcagagtta

SEQ ID NO: 995589 - DNA, 15 bp, Homo sapiens
tctaaattcagagtt

SEQ ID NO: 995590 - DNA, 15 bp, Homo sapiens
ttctaaattcagagt

SEQ ID NO: 995591 - DNA, 15 bp, Homo sapiens
tttctaaattcagag

SEQ ID NO: 995592 - DNA, 15 bp, Homo sapiens
ctttctaaattcaga

SEQ ID NO: 995593 - DNA, 15 bp, Homo sapiens
tctttctaaattcag

SEQ ID NO: 995594 - DNA, 15 bp, Homo sapiens
atctttctaaattca

SEQ ID NO: 995595 - DNA, 15 bp, Homo sapiens
tatctttctaaattc

SEQ ID NO: 995596 - DNA, 15 bp, Homo sapiens
atatctttctaaatt

SEQ ID NO: 995597 - DNA, 15 bp, Homo sapiens
aatatctttctaaat

SEQ ID NO: 995598 - DNA, 15 bp, Homo sapiens
aaatatctttctaaa

SEQ ID NO: 995599 - DNA, 15 bp, Homo sapiens
gaaatatctttctaa

SEQ ID NO: 995600 - DNA, 15 bp, Homo sapiens
agaaatatctttcta

SEQ ID NO: 995601 - DNA, 15 bp, Homo sapiens
cagaaatatctttct

SEQ ID NO: 995602 - DNA, 15 bp, Homo sapiens
tcagaaatatctttc

SEQ ID NO: 995603 - DNA, 15 bp, Homo sapiens
ttcagaaatatcttt

SEQ ID NO: 995604 - DNA, 15 bp, Homo sapiens
cttcagaaatatctt

SEQ ID NO: 995605 - DNA, 15 bp, Homo sapiens
tcttcagaaatatct

SEQ ID NO: 995606 - DNA, 15 bp, Homo sapiens
atcttcagaaatatc

SEQ ID NO: 995607 - DNA, 15 bp, Homo sapiens
tatcttcagaaatat

SEQ ID NO: 995608 - DNA, 15 bp, Homo sapiens
atatcttcagaaata

SEQ ID NO: 995609 - DNA, 15 bp, Homo sapiens
aatatcttcagaaat

SEQ ID NO: 995610 - DNA, 15 bp, Homo sapiens
aaatatcttcagaaa

SEQ ID NO: 995611 - DNA, 15 bp, Homo sapiens
taaatatcttcagaa

SEQ ID NO: 995612 - DNA, 15 bp, Homo sapiens
ttaaatatcttcaga

SEQ ID NO: 995613 - DNA, 15 bp, Homo sapiens
tttaaatatcttcag

SEQ ID NO: 995614 - DNA, 15 bp, Homo sapiens
ctttaaatatcttca

SEQ ID NO: 995615 - DNA, 15 bp, Homo sapiens
tctttaaatatcttc

SEQ ID NO: 995616 - DNA, 15 bp, Homo sapiens
ttctttaaatatctt

SEQ ID NO: 995617 - DNA, 15 bp, Homo sapiens
cttctttaaatatct

SEQ ID NO: 995618 - DNA, 15 bp, Homo sapiens
ccttctttaaatatc

SEQ ID NO: 995619 - DNA, 15 bp, Homo sapiens
tccttctttaaatat

SEQ ID NO: 995620 - DNA, 15 bp, Homo sapiens
ctccttctttaaata

SEQ ID NO: 995621 - DNA, 15 bp, Homo sapiens
tctccttctttaaat

SEQ ID NO: 995622 - DNA, 15 bp, Homo sapiens
gtctccttctttaaa

SEQ ID NO: 995623 - DNA, 15 bp, Homo sapiens
agtctccttctttaa

SEQ ID NO: 995624 - DNA, 15 bp, Homo sapiens
aagtctccttcttta

SEQ ID NO: 995625 - DNA, 15 bp, Homo sapiens
taagtctccttcttt

SEQ ID NO: 995626 - DNA, 15 bp, Homo sapiens
gtaagtctccttctt

SEQ ID NO: 995627 - DNA, 15 bp, Homo sapiens
tgtaagtctccttct

SEQ ID NO: 995628 - DNA, 15 bp, Homo sapiens
ctgtaagtctccttc

SEQ ID NO: 995629 - DNA, 15 bp, Homo sapiens
tctgtaagtctcctt

SEQ ID NO: 995630 - DNA, 15 bp, Homo sapiens
ctctgtaagtctcct

SEQ ID NO: 995631 - DNA, 15 bp, Homo sapiens
actctgtaagtctcc

SEQ ID NO: 995632 - DNA, 15 bp, Homo sapiens
aactctgtaagtctc

SEQ ID NO: 995633 - DNA, 15 bp, Homo sapiens
caactctgtaagtct

SEQ ID NO: 995634 - DNA, 15 bp, Homo sapiens
tcaactctgtaagtc

SEQ ID NO: 995635 - DNA, 15 bp, Homo sapiens
ttcaactctgtaagt

SEQ ID NO: 995636 - DNA, 15 bp, Homo sapiens
attcaactctgtaag

SEQ ID NO: 995637 - DNA, 15 bp, Homo sapiens
tattcaactctgtaa

SEQ ID NO: 995638 - DNA, 15 bp, Homo sapiens
ttattcaactctgta

SEQ ID NO: 995639 - DNA, 15 bp, Homo sapiens
tttattcaactctgt

SEQ ID NO: 995640 - DNA, 15 bp, Homo sapiens
gtttattcaactctg

SEQ ID NO: 995641 - DNA, 15 bp, Homo sapiens
tgtttattcaactct

SEQ ID NO: 995642 - DNA, 15 bp, Homo sapiens
atgtttattcaactc

SEQ ID NO: 995643 - DNA, 15 bp, Homo sapiens
gatgtttattcaact

SEQ ID NO: 995644 - DNA, 15 bp, Homo sapiens
ggatgtttattcaac

SEQ ID NO: 995645 - DNA, 15 bp, Homo sapiens
aggatgtttattcaa

SEQ ID NO: 995646 - DNA, 15 bp, Homo sapiens
caggatgtttattca

SEQ ID NO: 995647 - DNA, 15 bp, Homo sapiens
ccaggatgtttattc

SEQ ID NO: 995648 - DNA, 15 bp, Homo sapiens
tccaggatgtttatt

SEQ ID NO: 995649 - DNA, 15 bp, Homo sapiens
ttccaggatgtttat

SEQ ID NO: 995650 - DNA, 15 bp, Homo sapiens
attccaggatgttta

SEQ ID NO: 995651 - DNA, 15 bp, Homo sapiens
aattccaggatgttt

SEQ ID NO: 995652 - DNA, 15 bp, Homo sapiens
aaattccaggatgtt

SEQ ID NO: 995653 - DNA, 15 bp, Homo sapiens
aaaattccaggatgt

SEQ ID NO: 995654 - DNA, 15 bp, Homo sapiens
aaaaattccaggatg

SEQ ID NO: 995655 - DNA, 15 bp, Homo sapiens
aagaaaaattccagg

SEQ ID NO: 995656 - DNA, 15 bp, Homo sapiens
aaagaaaaattccag

SEQ ID NO: 995657 - DNA, 15 bp, Homo sapiens
gaaagaaaaattcca

SEQ ID NO: 995658 - DNA, 15 bp, Homo sapiens
agaaagaaaaattcc

SEQ ID NO: 995659 - DNA, 15 bp, Homo sapiens
gagaaagaaaaattc

SEQ ID NO: 995660 - DNA, 15 bp, Homo sapiens
agagaaagaaaaatt

SEQ ID NO: 995661 - DNA, 15 bp, Homo sapiens
tagagaaagaaaaat

SEQ ID NO: 995662 - DNA, 15 bp, Homo sapiens
ttagagaaagaaaaa

SEQ ID NO: 995663 - DNA, 15 bp, Homo sapiens
tttagagaaagaaaa

SEQ ID NO: 995664 - DNA, 15 bp, Homo sapiens
atttagagaaagaaa

SEQ ID NO: 995665 - DNA, 15 bp, Homo sapiens
catttagagaaagaa

SEQ ID NO: 995666 - DNA, 15 bp, Homo sapiens
tcatttagagaaaga

SEQ ID NO: 995667 - DNA, 15 bp, Homo sapiens
ttcatttagagaaag

SEQ ID NO: 995668 - DNA, 15 bp, Homo sapiens
attcatttagagaaa

SEQ ID NO: 995669 - DNA, 15 bp, Homo sapiens
cattcatttagagaa

SEQ ID NO: 995670 - DNA, 15 bp, Homo sapiens
acattcatttagaga

SEQ ID NO: 995671 - DNA, 15 bp, Homo sapiens
gacattcatttagag

SEQ ID NO: 995672 - DNA, 15 bp, Homo sapiens
tgacattcatttaga

SEQ ID NO: 995673 - DNA, 15 bp, Homo sapiens
ctgacattcatttag

SEQ ID NO: 995674 - DNA, 15 bp, Homo sapiens
gctgacattcattta

SEQ ID NO: 995675 - DNA, 15 bp, Homo sapiens
agctgacattcattt

SEQ ID NO: 995676 - DNA, 15 bp, Homo sapiens
aagctgacattcatt

SEQ ID NO: 995677 - DNA, 15 bp, Homo sapiens
gaagctgacattcat

SEQ ID NO: 995678 - DNA, 15 bp, Homo sapiens
tgaagctgacattca

SEQ ID NO: 995679 - DNA, 15 bp, Homo sapiens
ctgaagctgacattc

SEQ ID NO: 995680 - DNA, 15 bp, Homo sapiens
tctgaagctgacatt

SEQ ID NO: 995681 - DNA, 15 bp, Homo sapiens
ctctgaagctgacat

SEQ ID NO: 995682 - DNA, 15 bp, Homo sapiens
tctctgaagctgaca

SEQ ID NO: 995683 - DNA, 15 bp, Homo sapiens
ctctctgaagctgac

SEQ ID NO: 995684 - DNA, 15 bp, Homo sapiens
gctctctgaagctga

SEQ ID NO: 995685 - DNA, 15 bp, Homo sapiens
ggctctctgaagctg

SEQ ID NO: 995686 - DNA, 15 bp, Homo sapiens
gggctctctgaagct

SEQ ID NO: 995687 - DNA, 15 bp, Homo sapiens
tgggctctctgaagc

SEQ ID NO: 995688 - DNA, 15 bp, Homo sapiens
gtgggctctctgaag

SEQ ID NO: 995689 - DNA, 15 bp, Homo sapiens
ggtgggctctctgaa

SEQ ID NO: 995690 - DNA, 15 bp, Homo sapiens
aggtgggctctctga

SEQ ID NO: 995691 - DNA, 15 bp, Homo sapiens
caggtgggctctctg

SEQ ID NO: 995692 - DNA, 15 bp, Homo sapiens
gcaggtgggctctct

SEQ ID NO: 995693 - DNA, 15 bp, Homo sapiens
tgcaggtgggctctc

SEQ ID NO: 995694 - DNA, 15 bp, Homo sapiens
ctgcaggtgggctct

SEQ ID NO: 995695 - DNA, 15 bp, Homo sapiens
tctgcaggtgggctc

SEQ ID NO: 995696 - DNA, 15 bp, Homo sapiens
gtctgcaggtgggct

SEQ ID NO: 995697 - DNA, 15 bp, Homo sapiens
tgtctgcaggtgggc

SEQ ID NO: 995698 - DNA, 15 bp, Homo sapiens
ctgtctgcaggtggg

SEQ ID NO: 995699 - DNA, 15 bp, Homo sapiens
tctgtctgcaggtgg

SEQ ID NO: 995700 - DNA, 15 bp, Homo sapiens
ctctgtctgcaggtg

SEQ ID NO: 995701 - DNA, 15 bp, Homo sapiens
cctctgtctgcaggt

SEQ ID NO: 995702 - DNA, 15 bp, Homo sapiens
gcctctgtctgcagg

SEQ ID NO: 995703 - DNA, 15 bp, Homo sapiens
tgcctctgtctgcag

SEQ ID NO: 995704 - DNA, 15 bp, Homo sapiens
ctgcctctgtctgca

SEQ ID NO: 995705 - DNA, 15 bp, Homo sapiens
actgcctctgtctgc

SEQ ID NO: 995706 - DNA, 15 bp, Homo sapiens
cactgcctctgtctg

SEQ ID NO: 995707 - DNA, 15 bp, Homo sapiens
tcactgcctctgtct

SEQ ID NO: 995708 - DNA, 15 bp, Homo sapiens
gtcactgcctctgtc

SEQ ID NO: 995709 - DNA, 15 bp, Homo sapiens
agtcactgcctctgt

SEQ ID NO: 995710 - DNA, 15 bp, Homo sapiens
gagtcactgcctctg

SEQ ID NO: 995711 - DNA, 15 bp, Homo sapiens
ggagtcactgcctct

SEQ ID NO: 995712 - DNA, 15 bp, Homo sapiens
gggagtcactgcctc

SEQ ID NO: 995713 - DNA, 15 bp, Homo sapiens
ggggagtcactgcct

SEQ ID NO: 995714 - DNA, 15 bp, Homo sapiens
aggggagtcactgcc

SEQ ID NO: 995715 - DNA, 15 bp, Homo sapiens
taggggagtcactgc

SEQ ID NO: 995716 - DNA, 15 bp, Homo sapiens
ttaggggagtcactg

SEQ ID NO: 995717 - DNA, 15 bp, Homo sapiens
tttaggggagtcact

SEQ ID NO: 995718 - DNA, 15 bp, Homo sapiens
gtttaggggagtcac

SEQ ID NO: 995719 - DNA, 15 bp, Homo sapiens
tgtttaggggagtca

SEQ ID NO: 995720 - DNA, 15 bp, Homo sapiens
atgtttaggggagtc

SEQ ID NO: 995721 - DNA, 15 bp, Homo sapiens
aatgtttaggggagt

SEQ ID NO: 995722 - DNA, 15 bp, Homo sapiens
aaatgtttaggggag

SEQ ID NO: 995723 - DNA, 15 bp, Homo sapiens
aaaatgtttagggga

SEQ ID NO: 995724 - DNA, 15 bp, Homo sapiens
gaaaatgtttagggg

SEQ ID NO: 995725 - DNA, 15 bp, Homo sapiens
cgaaaatgtttaggg

SEQ ID NO: 995726 - DNA, 15 bp, Homo sapiens
ccgaaaatgtttagg

SEQ ID NO: 995727 - DNA, 15 bp, Homo sapiens
tccgaaaatgtttag

SEQ ID NO: 995728 - DNA, 15 bp, Homo sapiens
ctccgaaaatgttta

SEQ ID NO: 995729 - DNA, 15 bp, Homo sapiens
actccgaaaatgttt

SEQ ID NO: 995730 - DNA, 15 bp, Homo sapiens
tactccgaaaatgtt

SEQ ID NO: 995731 - DNA, 15 bp, Homo sapiens
atactccgaaaatgt

SEQ ID NO: 995732 - DNA, 15 bp, Homo sapiens
gatactccgaaaatg

SEQ ID NO: 995733 - DNA, 15 bp, Homo sapiens
agatactccgaaaat

SEQ ID NO: 995734 - DNA, 15 bp, Homo sapiens
gagatactccgaaaa

SEQ ID NO: 995735 - DNA, 15 bp, Homo sapiens
agagatactccgaaa

SEQ ID NO: 995736 - DNA, 15 bp, Homo sapiens
aagagatactccgaa

SEQ ID NO: 995737 - DNA, 15 bp, Homo sapiens
caagagatactccga

SEQ ID NO: 995738 - DNA, 15 bp, Homo sapiens
ccaagagatactccg

SEQ ID NO: 995739 - DNA, 15 bp, Homo sapiens
tccaagagatactcc

SEQ ID NO: 995740 - DNA, 15 bp, Homo sapiens
ttccaagagatactc

SEQ ID NO: 995741 - DNA, 15 bp, Homo sapiens
attccaagagatact

SEQ ID NO: 995742 - DNA, 15 bp, Homo sapiens
aattccaagagatac

SEQ ID NO: 995743 - DNA, 15 bp, Homo sapiens
caattccaagagata

SEQ ID NO: 995744 - DNA, 15 bp, Homo sapiens
ccaattccaagagat

SEQ ID NO: 995745 - DNA, 15 bp, Homo sapiens
accaattccaagaga

SEQ ID NO: 995746 - DNA, 15 bp, Homo sapiens
aaccaattccaagag

SEQ ID NO: 995747 - DNA, 15 bp, Homo sapiens
aaaccaattccaaga

SEQ ID NO: 995748 - DNA, 15 bp, Homo sapiens
taaaccaattccaag

SEQ ID NO: 995749 - DNA, 15 bp, Homo sapiens
ttaaaccaattccaa

SEQ ID NO: 995750 - DNA, 15 bp, Homo sapiens
tttaaaccaattcca

SEQ ID NO: 995751 - DNA, 15 bp, Homo sapiens
ctttaaaccaattcc

SEQ ID NO: 995752 - DNA, 15 bp, Homo sapiens
gctttaaaccaattc

SEQ ID NO: 995753 - DNA, 15 bp, Homo sapiens
cagctttaaaccaat

SEQ ID NO: 995754 - DNA, 15 bp, Homo sapiens
ccagctttaaaccaa

SEQ ID NO: 995755 - DNA, 15 bp, Homo sapiens
accagctttaaacca

SEQ ID NO: 995756 - DNA, 15 bp, Homo sapiens
aaccagctttaaacc

SEQ ID NO: 995757 - DNA, 15 bp, Homo sapiens
aaaccagctttaaac

SEQ ID NO: 995758 - DNA, 15 bp, Homo sapiens
gaaaccagctttaaa

SEQ ID NO: 995759 - DNA, 15 bp, Homo sapiens
tgaaaccagctttaa

SEQ ID NO: 995760 - DNA, 15 bp, Homo sapiens
ctgaaaccagcttta

SEQ ID NO: 995761 - DNA, 15 bp, Homo sapiens
tctgaaaccagcttt

SEQ ID NO: 995762 - DNA, 15 bp, Homo sapiens
ctctgaaaccagctt

SEQ ID NO: 995763 - DNA, 15 bp, Homo sapiens
actctgaaaccagct

SEQ ID NO: 995764 - DNA, 15 bp, Homo sapiens
gactctgaaaccagc

SEQ ID NO: 995765 - DNA, 15 bp, Homo sapiens
ggactctgaaaccag

SEQ ID NO: 995766 - DNA, 15 bp, Homo sapiens
tggactctgaaacca

SEQ ID NO: 995767 - DNA, 15 bp, Homo sapiens
gtggactctgaaacc

SEQ ID NO: 995768 - DNA, 15 bp, Homo sapiens
tgtggactctgaaac

SEQ ID NO: 995769 - DNA, 15 bp, Homo sapiens
ttgtggactctgaaa

SEQ ID NO: 995770 - DNA, 15 bp, Homo sapiens
tttgtggactctgaa

SEQ ID NO: 995771 - DNA, 15 bp, Homo sapiens
ctttgtggactctga

SEQ ID NO: 995772 - DNA, 15 bp, Homo sapiens
tctttgtggactctg

SEQ ID NO: 995773 - DNA, 15 bp, Homo sapiens
ttctttgtggactct

SEQ ID NO: 995774 - DNA, 15 bp, Homo sapiens
tttctttgtggactc

SEQ ID NO: 995775 - DNA, 15 bp, Homo sapiens
atttctttgtggact

SEQ ID NO: 995776 - DNA, 15 bp, Homo sapiens
catttctttgtggac

SEQ ID NO: 995777 - DNA, 15 bp, Homo sapiens
ccatttctttgtgga

SEQ ID NO: 995778 - DNA, 15 bp, Homo sapiens
gccatttctttgtgg

SEQ ID NO: 995779 - DNA, 15 bp, Homo sapiens
ggccatttctttgtg

SEQ ID NO: 995780 - DNA, 15 bp, Homo sapiens
gggccatttctttgt

SEQ ID NO: 995781 - DNA, 15 bp, Homo sapiens
agggccatttctttg

SEQ ID NO: 995782 - DNA, 15 bp, Homo sapiens
aagggccatttcttt

SEQ ID NO: 995783 - DNA, 15 bp, Homo sapiens
aaagggccatttctt

SEQ ID NO: 995784 - DNA, 15 bp, Homo sapiens
taaagggccatttct

SEQ ID NO: 995785 - DNA, 15 bp, Homo sapiens
gtaaagggccatttc

SEQ ID NO: 995786 - DNA, 15 bp, Homo sapiens
tgtaaagggccattt

SEQ ID NO: 995787 - DNA, 15 bp, Homo sapiens
ctgtaaagggccatt

SEQ ID NO: 995788 - DNA, 15 bp, Homo sapiens
cctgtaaagggccat

SEQ ID NO: 995789 - DNA, 15 bp, Homo sapiens
tcctgtaaagggcca

SEQ ID NO: 995790 - DNA, 15 bp, Homo sapiens
atcctgtaaagggcc

SEQ ID NO: 995791 - DNA, 15 bp, Homo sapiens
gatcctgtaaagggc

SEQ ID NO: 995792 - DNA, 15 bp, Homo sapiens
ggatcctgtaaaggg

SEQ ID NO: 995793 - DNA, 15 bp, Homo sapiens
aggatcctgtaaagg

SEQ ID NO: 995794 - DNA, 15 bp, Homo sapiens
aaggatcctgtaaag

SEQ ID NO: 995795 - DNA, 15 bp, Homo sapiens
aaaggatcctgtaaa

SEQ ID NO: 995796 - DNA, 15 bp, Homo sapiens
taaaggatcctgtaa

SEQ ID NO: 995797 - DNA, 15 bp, Homo sapiens
ataaaggatcctgta

SEQ ID NO: 995798 - DNA, 15 bp, Homo sapiens
aataaaggatcctgt

SEQ ID NO: 995799 - DNA, 15 bp, Homo sapiens
caataaaggatcctg

SEQ ID NO: 995800 - DNA, 15 bp, Homo sapiens
gcaataaaggatcct

SEQ ID NO: 995801 - DNA, 15 bp, Homo sapiens
agcaataaaggatcc

SEQ ID NO: 995802 - DNA, 15 bp, Homo sapiens
aagcaataaaggatc

SEQ ID NO: 995803 - DNA, 15 bp, Homo sapiens
aaagcaataaaggat

SEQ ID NO: 995804 - DNA, 15 bp, Homo sapiens
aaaagcaataaagga

SEQ ID NO: 995805 - DNA, 15 bp, Homo sapiens
caaaagcaataaagg

SEQ ID NO: 995806 - DNA, 15 bp, Homo sapiens
ccaaaagcaataaag

SEQ ID NO: 995807 - DNA, 15 bp, Homo sapiens
accaaaagcaataaa

SEQ ID NO: 995808 - DNA, 15 bp, Homo sapiens
caccaaaagcaataa

SEQ ID NO: 995809 - DNA, 15 bp, Homo sapiens
ccaccaaaagcaata

SEQ ID NO: 995810 - DNA, 15 bp, Homo sapiens
accaccaaaagcaat

SEQ ID NO: 995811 - DNA, 15 bp, Homo sapiens
aaccaccaaaagcaa

SEQ ID NO: 995812 - DNA, 15 bp, Homo sapiens
taaccaccaaaagca

SEQ ID NO: 995813 - DNA, 15 bp, Homo sapiens
ttaaccaccaaaagc

SEQ ID NO: 995814 - DNA, 15 bp, Homo sapiens
tttaaccaccaaaag

SEQ ID NO: 995815 - DNA, 15 bp, Homo sapiens
ctttaaccaccaaaa

SEQ ID NO: 995816 - DNA, 15 bp, Homo sapiens
gctttaaccaccaaa

SEQ ID NO: 995817 - DNA, 15 bp, Homo sapiens
tgctttaaccaccaa

SEQ ID NO: 995818 - DNA, 15 bp, Homo sapiens
ctgctttaaccacca

SEQ ID NO: 995819 - DNA, 15 bp, Homo sapiens
tctgctttaaccacc

SEQ ID NO: 995820 - DNA, 15 bp, Homo sapiens
ttctgctttaaccac

SEQ ID NO: 995821 - DNA, 15 bp, Homo sapiens
attctgctttaacca

SEQ ID NO: 995822 - DNA, 15 bp, Homo sapiens
gattctgctttaacc

SEQ ID NO: 995823 - DNA, 15 bp, Homo sapiens
agattctgctttaac

SEQ ID NO: 995824 - DNA, 15 bp, Homo sapiens
gagattctgctttaa

SEQ ID NO: 995825 - DNA, 15 bp, Homo sapiens
agagattctgcttta

SEQ ID NO: 995826 - DNA, 15 bp, Homo sapiens
gagagattctgcttt

SEQ ID NO: 995827 - DNA, 15 bp, Homo sapiens
agagagattctgctt

SEQ ID NO: 995828 - DNA, 15 bp, Homo sapiens
cagagagattctgct

SEQ ID NO: 995829 - DNA, 15 bp, Homo sapiens
ccagagagattctgc

SEQ ID NO: 995830 - DNA, 15 bp, Homo sapiens
tccagagagattctg

SEQ ID NO: 995831 - DNA, 15 bp, Homo sapiens
ctccagagagattct

SEQ ID NO: 995832 - DNA, 15 bp, Homo sapiens
tctccagagagattc

SEQ ID NO: 995833 - DNA, 15 bp, Homo sapiens
ctctccagagagatt

SEQ ID NO: 995834 - DNA, 15 bp, Homo sapiens
actctccagagagat

SEQ ID NO: 995835 - DNA, 15 bp, Homo sapiens
tactctccagagaga

SEQ ID NO: 995836 - DNA, 15 bp, Homo sapiens
ttactctccagagag

SEQ ID NO: 995837 - DNA, 15 bp, Homo sapiens
tttactctccagaga

SEQ ID NO: 995838 - DNA, 15 bp, Homo sapiens
ctttactctccagag

SEQ ID NO: 995839 - DNA, 15 bp, Homo sapiens
cctttactctccaga

SEQ ID NO: 995840 - DNA, 15 bp, Homo sapiens
acctttactctccag

SEQ ID NO: 995841 - DNA, 15 bp, Homo sapiens
tacctttactctcca

SEQ ID NO: 995842 - DNA, 15 bp, Homo sapiens
ctacctttactctcc

SEQ ID NO: 995843 - DNA, 15 bp, Homo sapiens
tctacctttactctc

SEQ ID NO: 995844 - DNA, 15 bp, Homo sapiens
gtctacctttactct

SEQ ID NO: 995845 - DNA, 15 bp, Homo sapiens
tgtctacctttactc

SEQ ID NO: 995846 - DNA, 15 bp, Homo sapiens
ctgtctacctttact

SEQ ID NO: 995847 - DNA, 15 bp, Homo sapiens
gctgtctacctttac

SEQ ID NO: 995848 - DNA, 15 bp, Homo sapiens
ggctgtctaccttta

SEQ ID NO: 995849 - DNA, 15 bp, Homo sapiens
gggctgtctaccttt

SEQ ID NO: 995850 - DNA, 15 bp, Homo sapiens
agggctgtctacctt

SEQ ID NO: 995851 - DNA, 15 bp, Homo sapiens
cagggctgtctacct

SEQ ID NO: 995852 - DNA, 15 bp, Homo sapiens
gcagggctgtctacc

SEQ ID NO: 995853 - DNA, 15 bp, Homo sapiens
tgcagggctgtctac

SEQ ID NO: 995854 - DNA, 15 bp, Homo sapiens
ttgcagggctgtcta

SEQ ID NO: 995855 - DNA, 15 bp, Homo sapiens
attgcagggctgtct

SEQ ID NO: 995856 - DNA, 15 bp, Homo sapiens
cattgcagggctgtc

SEQ ID NO: 995857 - DNA, 15 bp, Homo sapiens
acattgcagggctgt

SEQ ID NO: 995858 - DNA, 15 bp, Homo sapiens
gacattgcagggctg

SEQ ID NO: 995859 - DNA, 15 bp, Homo sapiens
agacattgcagggct

SEQ ID NO: 995860 - DNA, 15 bp, Homo sapiens
cagacattgcagggc

SEQ ID NO: 995861 - DNA, 15 bp, Homo sapiens
tcagacattgcaggg

SEQ ID NO: 995862 - DNA, 15 bp, Homo sapiens
ttcagacattgcagg

SEQ ID NO: 995863 - DNA, 15 bp, Homo sapiens
cttcagacattgcag

SEQ ID NO: 995864 - DNA, 15 bp, Homo sapiens
ccttcagacattgca

SEQ ID NO: 995865 - DNA, 15 bp, Homo sapiens
tccttcagacattgc

SEQ ID NO: 995866 - DNA, 15 bp, Homo sapiens
gtccttcagacattg

SEQ ID NO: 995867 - DNA, 15 bp, Homo sapiens
tgtccttcagacatt

SEQ ID NO: 995868 - DNA, 15 bp, Homo sapiens
ctgtccttcagacat

SEQ ID NO: 995869 - DNA, 15 bp, Homo sapiens
cctgtccttcagaca

SEQ ID NO: 995870 - DNA, 15 bp, Homo sapiens
gcctgtccttcagac

SEQ ID NO: 995871 - DNA, 15 bp, Homo sapiens
ggcctgtccttcaga

SEQ ID NO: 995872 - DNA, 15 bp, Homo sapiens
aggcctgtccttcag

SEQ ID NO: 995873 - DNA, 15 bp, Homo sapiens
aaggcctgtccttca

SEQ ID NO: 995874 - DNA, 15 bp, Homo sapiens
gaaggcctgtccttc

SEQ ID NO: 995875 - DNA, 15 bp, Homo sapiens
agaaggcctgtcctt

SEQ ID NO: 995876 - DNA, 15 bp, Homo sapiens
aagaaggcctgtcct

SEQ ID NO: 995877 - DNA, 15 bp, Homo sapiens
aaagaaggcctgtcc

SEQ ID NO: 995878 - DNA, 15 bp, Homo sapiens
gaaagaaggcctgtc

SEQ ID NO: 995879 - DNA, 15 bp, Homo sapiens
agaaagaaggcctgt

SEQ ID NO: 995880 - DNA, 15 bp, Homo sapiens
gagaaagaaggcctg

SEQ ID NO: 995881 - DNA, 15 bp, Homo sapiens
ggagaaagaaggcct

SEQ ID NO: 995882 - DNA, 15 bp, Homo sapiens
aggagaaagaaggcc

SEQ ID NO: 995883 - DNA, 15 bp, Homo sapiens
gaggagaaagaaggc

SEQ ID NO: 995884 - DNA, 15 bp, Homo sapiens
tgaggagaaagaagg

SEQ ID NO: 995885 - DNA, 15 bp, Homo sapiens
gtgaggagaaagaag

SEQ ID NO: 995886 - DNA, 15 bp, Homo sapiens
tgtgaggagaaagaa

SEQ ID NO: 995887 - DNA, 15 bp, Homo sapiens
gtgtgaggagaaaga

SEQ ID NO: 995888 - DNA, 15 bp, Homo sapiens
ggtgtgaggagaaag

SEQ ID NO: 995889 - DNA, 15 bp, Homo sapiens
gggtgtgaggagaaa

SEQ ID NO: 995890 - DNA, 15 bp, Homo sapiens
ggggtgtgaggagaa

SEQ ID NO: 995891 - DNA, 15 bp, Homo sapiens
aggggtgtgaggaga

SEQ ID NO: 995892 - DNA, 15 bp, Homo sapiens
caggggtgtgaggag

SEQ ID NO: 995893 - DNA, 15 bp, Homo sapiens
actgcaggggtgtga

SEQ ID NO: 995894 - DNA, 15 bp, Homo sapiens
gactgcaggggtgtg

SEQ ID NO: 995895 - DNA, 15 bp, Homo sapiens
ggactgcaggggtgt

SEQ ID NO: 995896 - DNA, 15 bp, Homo sapiens
gggactgcaggggtg

SEQ ID NO: 995897 - DNA, 15 bp, Homo sapiens
agggactgcaggggt

SEQ ID NO: 995898 - DNA, 15 bp, Homo sapiens
cagggactgcagggg

SEQ ID NO: 995899 - DNA, 15 bp, Homo sapiens
ccagggactgcaggg

SEQ ID NO: 995900 - DNA, 15 bp, Homo sapiens
gccagggactgcagg

SEQ ID NO: 995901 - DNA, 15 bp, Homo sapiens
agccagggactgcag

SEQ ID NO: 995902 - DNA, 15 bp, Homo sapiens
cagccagggactgca

SEQ ID NO: 995903 - DNA, 15 bp, Homo sapiens
acagccagggactgc

SEQ ID NO: 995904 - DNA, 15 bp, Homo sapiens
cacagccagggactg

SEQ ID NO: 995905 - DNA, 15 bp, Homo sapiens
gcacagccagggact

SEQ ID NO: 995906 - DNA, 15 bp, Homo sapiens
ggcacagccagggac

SEQ ID NO: 995907 - DNA, 15 bp, Homo sapiens
aggcacagccaggga

SEQ ID NO: 995908 - DNA, 15 bp, Homo sapiens
caggcacagccaggg

SEQ ID NO: 995909 - DNA, 15 bp, Homo sapiens
ccaggcacagccagg

SEQ ID NO: 995910 - DNA, 15 bp, Homo sapiens
gccaggcacagccag

SEQ ID NO: 995911 - DNA, 15 bp, Homo sapiens
agccaggcacagcca

SEQ ID NO: 995912 - DNA, 15 bp, Homo sapiens
cagccaggcacagcc

SEQ ID NO: 995913 - DNA, 15 bp, Homo sapiens
acagccaggcacagc

SEQ ID NO: 995914 - DNA, 15 bp, Homo sapiens
aacagccaggcacag

SEQ ID NO: 995915 - DNA, 15 bp, Homo sapiens
aaacagccaggcaca

SEQ ID NO: 995916 - DNA, 15 bp, Homo sapiens
gaaacagccaggcac

SEQ ID NO: 995917 - DNA, 15 bp, Homo sapiens
ggaaacagccaggca

SEQ ID NO: 995918 - DNA, 15 bp, Homo sapiens
gggaaacagccaggc

SEQ ID NO: 995919 - DNA, 15 bp, Homo sapiens
cgggaaacagccagg

SEQ ID NO: 995920 - DNA, 15 bp, Homo sapiens
gcgggaaacagccag

SEQ ID NO: 995921 - DNA, 15 bp, Homo sapiens
tgcgggaaacagcca

SEQ ID NO: 995922 - DNA, 15 bp, Homo sapiens
ttgcgggaaacagcc

SEQ ID NO: 995923 - DNA, 15 bp, Homo sapiens
cttgcgggaaacagc

SEQ ID NO: 995924 - DNA, 15 bp, Homo sapiens
acttgcgggaaacag

SEQ ID NO: 995925 - DNA, 15 bp, Homo sapiens
cacttgcgggaaaca

SEQ ID NO: 995926 - DNA, 15 bp, Homo sapiens
gcacttgcgggaaac

SEQ ID NO: 995927 - DNA, 15 bp, Homo sapiens
ggcacttgcgggaaa

SEQ ID NO: 995928 - DNA, 15 bp, Homo sapiens
tggcacttgcgggaa

SEQ ID NO: 995929 - DNA, 15 bp, Homo sapiens
ctggcacttgcggga

SEQ ID NO: 995930 - DNA, 15 bp, Homo sapiens
tctggcacttgcggg

SEQ ID NO: 995931 - DNA, 15 bp, Homo sapiens
gtctggcacttgcgg

SEQ ID NO: 995932 - DNA, 15 bp, Homo sapiens
tgtctggcacttgcg

SEQ ID NO: 995933 - DNA, 15 bp, Homo sapiens
ctgtctggcacttgc

SEQ ID NO: 995934 - DNA, 15 bp, Homo sapiens
tctgtctggcacttg

SEQ ID NO: 995935 - DNA, 15 bp, Homo sapiens
ttctgtctggcactt

SEQ ID NO: 995936 - DNA, 15 bp, Homo sapiens
attctgtctggcact

SEQ ID NO: 995937 - DNA, 15 bp, Homo sapiens
cattctgtctggcac

SEQ ID NO: 995938 - DNA, 15 bp, Homo sapiens
acattctgtctggca

SEQ ID NO: 995939 - DNA, 15 bp, Homo sapiens
cacattctgtctggc

SEQ ID NO: 995940 - DNA, 15 bp, Homo sapiens
gcacattctgtctgg

SEQ ID NO: 995941 - DNA, 15 bp, Homo sapiens
tgcacattctgtctg

SEQ ID NO: 995942 - DNA, 15 bp, Homo sapiens
gtgcacattctgtct

SEQ ID NO: 995943 - DNA, 15 bp, Homo sapiens
agtgcacattctgtc

SEQ ID NO: 995944 - DNA, 15 bp, Homo sapiens
aagtgcacattctgt

SEQ ID NO: 995945 - DNA, 15 bp, Homo sapiens
aaagtgcacattctg

SEQ ID NO: 995946 - DNA, 15 bp, Homo sapiens
aaaagtgcacattct

SEQ ID NO: 995947 - DNA, 15 bp, Homo sapiens
aaaaagtgcacattc

SEQ ID NO: 995948 - DNA, 15 bp, Homo sapiens
caaaaagtgcacatt

SEQ ID NO: 995949 - DNA, 15 bp, Homo sapiens
ccaaaaagtgcacat

SEQ ID NO: 995950 - DNA, 15 bp, Homo sapiens
gccaaaaagtgcaca

SEQ ID NO: 995951 - DNA, 15 bp, Homo sapiens
agccaaaaagtgcac

SEQ ID NO: 995952 - DNA, 15 bp, Homo sapiens
tagccaaaaagtgca

SEQ ID NO: 995953 - DNA, 15 bp, Homo sapiens
ttagccaaaaagtgc

SEQ ID NO: 995954 - DNA, 15 bp, Homo sapiens
cttagccaaaaagtg

SEQ ID NO: 995955 - DNA, 15 bp, Homo sapiens
acttagccaaaaagt

SEQ ID NO: 995956 - DNA, 15 bp, Homo sapiens
tacttagccaaaaag

SEQ ID NO: 995957 - DNA, 15 bp, Homo sapiens
atacttagccaaaaa

SEQ ID NO: 995958 - DNA, 15 bp, Homo sapiens
catacttagccaaaa

SEQ ID NO: 995959 - DNA, 15 bp, Homo sapiens
acatacttagccaaa

SEQ ID NO: 995960 - DNA, 15 bp, Homo sapiens
aacatacttagccaa

SEQ ID NO: 995961 - DNA, 15 bp, Homo sapiens
gaacatacttagcca

SEQ ID NO: 995962 - DNA, 15 bp, Homo sapiens
agaacatacttagcc

SEQ ID NO: 995963 - DNA, 15 bp, Homo sapiens
tagaacatacttagc

SEQ ID NO: 995964 - DNA, 15 bp, Homo sapiens
atagaacatacttag

SEQ ID NO: 995965 - DNA, 15 bp, Homo sapiens
aatagaacatactta

SEQ ID NO: 995966 - DNA, 15 bp, Homo sapiens
taatagaacatactt

SEQ ID NO: 995967 - DNA, 15 bp, Homo sapiens
ataatagaacatact

SEQ ID NO: 995968 - DNA, 15 bp, Homo sapiens
cataatagaacatac

SEQ ID NO: 995969 - DNA, 15 bp, Homo sapiens
acataatagaacata

SEQ ID NO: 995970 - DNA, 15 bp, Homo sapiens
cacataatagaacat

SEQ ID NO: 995971 - DNA, 15 bp, Homo sapiens
acacataatagaaca

SEQ ID NO: 995972 - DNA, 15 bp, Homo sapiens
cacacataatagaac

SEQ ID NO: 995973 - DNA, 15 bp, Homo sapiens
acacacataatagaa

SEQ ID NO: 995974 - DNA, 15 bp, Homo sapiens
tacacacataataga

SEQ ID NO: 995975 - DNA, 15 bp, Homo sapiens
ttacacacataatag

SEQ ID NO: 995976 - DNA, 15 bp, Homo sapiens
tttacacacataata

SEQ ID NO: 995977 - DNA, 15 bp, Homo sapiens
ttttacacacataat

SEQ ID NO: 995978 - DNA, 15 bp, Homo sapiens
attttacacacataa

SEQ ID NO: 995979 - DNA, 15 bp, Homo sapiens
gattttacacacata

SEQ ID NO: 995980 - DNA, 15 bp, Homo sapiens
ggattttacacacat

SEQ ID NO: 995981 - DNA, 15 bp, Homo sapiens
aggattttacacaca

SEQ ID NO: 995982 - DNA, 15 bp, Homo sapiens
gaggattttacacac

SEQ ID NO: 995983 - DNA, 15 bp, Homo sapiens
agaggattttacaca

SEQ ID NO: 995984 - DNA, 15 bp, Homo sapiens
gagaggattttacac

SEQ ID NO: 995985 - DNA, 15 bp, Homo sapiens
agagaggattttaca

SEQ ID NO: 995986 - DNA, 15 bp, Homo sapiens
gagagaggattttac

SEQ ID NO: 995987 - DNA, 15 bp, Homo sapiens
tgagagaggatttta

SEQ ID NO: 995988 - DNA, 15 bp, Homo sapiens
ctgagagaggatttt

SEQ ID NO: 995989 - DNA, 15 bp, Homo sapiens
actgagagaggattt

SEQ ID NO: 995990 - DNA, 15 bp, Homo sapiens
aactgagagaggatt

SEQ ID NO: 995991 - DNA, 15 bp, Homo sapiens
gaactgagagaggat

SEQ ID NO: 995992 - DNA, 15 bp, Homo sapiens
agaactgagagagga

SEQ ID NO: 995993 - DNA, 15 bp, Homo sapiens
cagaactgagagagg

SEQ ID NO: 995994 - DNA, 15 bp, Homo sapiens
tcagaactgagagag

SEQ ID NO: 995995 - DNA, 15 bp, Homo sapiens
ctcagaactgagaga

SEQ ID NO: 995996 - DNA, 15 bp, Homo sapiens
actcagaactgagag

SEQ ID NO: 995997 - DNA, 15 bp, Homo sapiens
aactcagaactgaga

SEQ ID NO: 995998 - DNA, 15 bp, Homo sapiens
caactcagaactgag

SEQ ID NO: 995999 - DNA, 15 bp, Homo sapiens
tcaactcagaactga

SEQ ID NO: 996000 - DNA, 15 bp, Homo sapiens
ttcaactcagaactg

SEQ ID NO: 996001 - DNA, 15 bp, Homo sapiens
attcaactcagaact

SEQ ID NO: 996002 - DNA, 15 bp, Homo sapiens
tattcaactcagaac

SEQ ID NO: 996003 - DNA, 15 bp, Homo sapiens
atattcaactcagaa

SEQ ID NO: 996004 - DNA, 15 bp, Homo sapiens
gatattcaactcaga

SEQ ID NO: 996005 - DNA, 15 bp, Homo sapiens
cgatattcaactcag

SEQ ID NO: 996006 - DNA, 15 bp, Homo sapiens
tcgatattcaactca

SEQ ID NO: 996007 - DNA, 15 bp, Homo sapiens
atcgatattcaactc

SEQ ID NO: 996008 - DNA, 15 bp, Homo sapiens
aatcgatattcaact

SEQ ID NO: 996009 - DNA, 15 bp, Homo sapiens
gaatcgatattcaac

SEQ ID NO: 996010 - DNA, 15 bp, Homo sapiens
tgaatcgatattcaa

SEQ ID NO: 996011 - DNA, 15 bp, Homo sapiens
ttgaatcgatattca

SEQ ID NO: 996012 - DNA, 15 bp, Homo sapiens
tttgaatcgatattc

SEQ ID NO: 996013 - DNA, 15 bp, Homo sapiens
ctttgaatcgatatt

SEQ ID NO: 996014 - DNA, 15 bp, Homo sapiens
gctttgaatcgatat

SEQ ID NO: 996015 - DNA, 15 bp, Homo sapiens
agctttgaatcgata

SEQ ID NO: 996016 - DNA, 15 bp, Homo sapiens
aagctttgaatcgat

SEQ ID NO: 996017 - DNA, 15 bp, Homo sapiens
taagctttgaatcga

SEQ ID NO: 996018 - DNA, 15 bp, Homo sapiens
ttaagctttgaatcg

SEQ ID NO: 996019 - DNA, 15 bp, Homo sapiens
attaagctttgaatc

SEQ ID NO: 996020 - DNA, 15 bp, Homo sapiens
aattaagctttgaat

SEQ ID NO: 996021 - DNA, 15 bp, Homo sapiens
gaattaagctttgaa

SEQ ID NO: 996022 - DNA, 15 bp, Homo sapiens
tgaattaagctttga

SEQ ID NO: 996023 - DNA, 15 bp, Homo sapiens
gtgaattaagctttg

SEQ ID NO: 996024 - DNA, 15 bp, Homo sapiens
cgtgaattaagcttt

SEQ ID NO: 996025 - DNA, 15 bp, Homo sapiens
gcgtgaattaagctt

SEQ ID NO: 996026 - DNA, 15 bp, Homo sapiens
agcgtgaattaagct

SEQ ID NO: 996027 - DNA, 15 bp, Homo sapiens
cagcgtgaattaagc

SEQ ID NO: 996028 - DNA, 15 bp, Homo sapiens
tcagcgtgaattaag

SEQ ID NO: 996029 - DNA, 15 bp, Homo sapiens
atcagcgtgaattaa

SEQ ID NO: 996030 - DNA, 15 bp, Homo sapiens
catcagcgtgaatta

SEQ ID NO: 996031 - DNA, 15 bp, Homo sapiens
tcatcagcgtgaatt

SEQ ID NO: 996032 - DNA, 15 bp, Homo sapiens
gtcatcagcgtgaat

SEQ ID NO: 996033 - DNA, 15 bp, Homo sapiens
agtcatcagcgtgaa

SEQ ID NO: 996034 - DNA, 15 bp, Homo sapiens
aagtcatcagcgtga

SEQ ID NO: 996035 - DNA, 15 bp, Homo sapiens
caagtcatcagcgtg

SEQ ID NO: 996036 - DNA, 15 bp, Homo sapiens
tcaagtcatcagcgt

SEQ ID NO: 996037 - DNA, 15 bp, Homo sapiens
ttcaagtcatcagcg

SEQ ID NO: 996038 - DNA, 15 bp, Homo sapiens
tttcaagtcatcagc

SEQ ID NO: 996039 - DNA, 15 bp, Homo sapiens
ttttcaagtcatcag

SEQ ID NO: 996040 - DNA, 15 bp, Homo sapiens
attttcaagtcatca

SEQ ID NO: 996041 - DNA, 15 bp, Homo sapiens
gattttcaagtcatc

SEQ ID NO: 996042 - DNA, 15 bp, Homo sapiens
agattttcaagtcat

SEQ ID NO: 996043 - DNA, 15 bp, Homo sapiens
tagattttcaagtca

SEQ ID NO: 996044 - DNA, 15 bp, Homo sapiens
ttagattttcaagtc

SEQ ID NO: 996045 - DNA, 15 bp, Homo sapiens
attagattttcaagt

SEQ ID NO: 996046 - DNA, 15 bp, Homo sapiens
gattagattttcaag

SEQ ID NO: 996047 - DNA, 15 bp, Homo sapiens
agattagattttcaa

SEQ ID NO: 996048 - DNA, 15 bp, Homo sapiens
aagattagattttca

SEQ ID NO: 996049 - DNA, 15 bp, Homo sapiens
caagattagattttc

SEQ ID NO: 996050 - DNA, 15 bp, Homo sapiens
tcaagattagatttt

SEQ ID NO: 996051 - DNA, 15 bp, Homo sapiens
atcaagattagattt

SEQ ID NO: 996052 - DNA, 15 bp, Homo sapiens
aatcaagattagatt

SEQ ID NO: 996053 - DNA, 15 bp, Homo sapiens
gaatcaagattagat

SEQ ID NO: 996054 - DNA, 15 bp, Homo sapiens
agaatcaagattaga

SEQ ID NO: 996055 - DNA, 15 bp, Homo sapiens
tagaatcaagattag

SEQ ID NO: 996056 - DNA, 15 bp, Homo sapiens
gtagaatcaagatta

SEQ ID NO: 996057 - DNA, 15 bp, Homo sapiens
agtagaatcaagatt

SEQ ID NO: 996058 - DNA, 15 bp, Homo sapiens
gagtagaatcaagat

SEQ ID NO: 996059 - DNA, 15 bp, Homo sapiens
cgagtagaatcaaga

SEQ ID NO: 996060 - DNA, 15 bp, Homo sapiens
tcgagtagaatcaag

SEQ ID NO: 996061 - DNA, 15 bp, Homo sapiens
ctcgagtagaatcaa

SEQ ID NO: 996062 - DNA, 15 bp, Homo sapiens
actcgagtagaatca

SEQ ID NO: 996063 - DNA, 15 bp, Homo sapiens
cactcgagtagaatc

SEQ ID NO: 996064 - DNA, 15 bp, Homo sapiens
acactcgagtagaat

SEQ ID NO: 996065 - DNA, 15 bp, Homo sapiens
aacactcgagtagaa

SEQ ID NO: 996066 - DNA, 15 bp, Homo sapiens
aaacactcgagtaga

SEQ ID NO: 996067 - DNA, 15 bp, Homo sapiens
caaacactcgagtag

SEQ ID NO: 996068 - DNA, 15 bp, Homo sapiens
acaaacactcgagta

SEQ ID NO: 996069 - DNA, 15 bp, Homo sapiens
tacaaacactcgagt

SEQ ID NO: 996070 - DNA, 15 bp, Homo sapiens
ctacaaacactcgag

SEQ ID NO: 996071 - DNA, 15 bp, Homo sapiens
tctacaaacactcga

SEQ ID NO: 996072 - DNA, 15 bp, Homo sapiens
atctacaaacactcg

SEQ ID NO: 996073 - DNA, 15 bp, Homo sapiens
tatctacaaacactc

SEQ ID NO: 996074 - DNA, 15 bp, Homo sapiens
atatctacaaacact

SEQ ID NO: 996075 - DNA, 15 bp, Homo sapiens
gatatctacaaacac

SEQ ID NO: 996076 - DNA, 15 bp, Homo sapiens
agatatctacaaaca

SEQ ID NO: 996077 - DNA, 15 bp, Homo sapiens
cagatatctacaaac

SEQ ID NO: 996078 - DNA, 15 bp, Homo sapiens
tcagatatctacaaa

SEQ ID NO: 996079 - DNA, 15 bp, Homo sapiens
ttcagatatctacaa

SEQ ID NO: 996080 - DNA, 15 bp, Homo sapiens
gttcagatatctaca

SEQ ID NO: 996081 - DNA, 15 bp, Homo sapiens
tgttcagatatctac

SEQ ID NO: 996082 - DNA, 15 bp, Homo sapiens
atgttcagatatcta

SEQ ID NO: 996083 - DNA, 15 bp, Homo sapiens
gatgttcagatatct

SEQ ID NO: 996084 - DNA, 15 bp, Homo sapiens
agatgttcagatatc

SEQ ID NO: 996085 - DNA, 15 bp, Homo sapiens
cagatgttcagatat

SEQ ID NO: 996086 - DNA, 15 bp, Homo sapiens
tcagatgttcagata

SEQ ID NO: 996087 - DNA, 15 bp, Homo sapiens
ttcagatgttcagat

SEQ ID NO: 996088 - DNA, 15 bp, Homo sapiens
tttcagatgttcaga

SEQ ID NO: 996089 - DNA, 15 bp, Homo sapiens
ttttcagatgttcag

SEQ ID NO: 996090 - DNA, 15 bp, Homo sapiens
gttttcagatgttca

SEQ ID NO: 996091 - DNA, 15 bp, Homo sapiens
tgttttcagatgttc

SEQ ID NO: 996092 - DNA, 15 bp, Homo sapiens
ctgttttcagatgtt

SEQ ID NO: 996093 - DNA, 15 bp, Homo sapiens
actgttttcagatgt

SEQ ID NO: 996094 - DNA, 15 bp, Homo sapiens
tactgttttcagatg

SEQ ID NO: 996095 - DNA, 15 bp, Homo sapiens
gtactgttttcagat

SEQ ID NO: 996096 - DNA, 15 bp, Homo sapiens
tgtactgttttcaga

SEQ ID NO: 996097 - DNA, 15 bp, Homo sapiens
ctgtactgttttcag

SEQ ID NO: 996098 - DNA, 15 bp, Homo sapiens
tctgtactgttttca

SEQ ID NO: 996099 - DNA, 15 bp, Homo sapiens
ctctgtactgttttc

SEQ ID NO: 996100 - DNA, 15 bp, Homo sapiens
actctgtactgtttt

SEQ ID NO: 996101 - DNA, 15 bp, Homo sapiens
cactctgtactgttt

SEQ ID NO: 996102 - DNA, 15 bp, Homo sapiens
gcactctgtactgtt

SEQ ID NO: 996103 - DNA, 15 bp, Homo sapiens
tgcactctgtactgt

SEQ ID NO: 996104 - DNA, 15 bp, Homo sapiens
ctgcactctgtactg

SEQ ID NO: 996105 - DNA, 15 bp, Homo sapiens
gctgcactctgtact

SEQ ID NO: 996106 - DNA, 15 bp, Homo sapiens
cgctgcactctgtac

SEQ ID NO: 996107 - DNA, 15 bp, Homo sapiens
acgctgcactctgta

SEQ ID NO: 996108 - DNA, 15 bp, Homo sapiens
aacgctgcactctgt

SEQ ID NO: 996109 - DNA, 15 bp, Homo sapiens
gaacgctgcactctg

SEQ ID NO: 996110 - DNA, 15 bp, Homo sapiens
ggaacgctgcactct

SEQ ID NO: 996111 - DNA, 15 bp, Homo sapiens
aggaacgctgcactc

SEQ ID NO: 996112 - DNA, 15 bp, Homo sapiens
caggaacgctgcact

SEQ ID NO: 996113 - DNA, 15 bp, Homo sapiens
acaggaacgctgcac

SEQ ID NO: 996114 - DNA, 15 bp, Homo sapiens
cacaggaacgctgca

SEQ ID NO: 996115 - DNA, 15 bp, Homo sapiens
tcacaggaacgctgc

SEQ ID NO: 996116 - DNA, 15 bp, Homo sapiens
ttcacaggaacgctg

SEQ ID NO: 996117 - DNA, 15 bp, Homo sapiens
attcacaggaacgct

SEQ ID NO: 996118 - DNA, 15 bp, Homo sapiens
aattcacaggaacgc

SEQ ID NO: 996119 - DNA, 15 bp, Homo sapiens
aaattcacaggaacg

SEQ ID NO: 996120 - DNA, 15 bp, Homo sapiens
aaaattcacaggaac

SEQ ID NO: 996121 - DNA, 15 bp, Homo sapiens
taaaattcacaggaa

SEQ ID NO: 996122 - DNA, 15 bp, Homo sapiens
ttaaaattcacagga

SEQ ID NO: 996123 - DNA, 15 bp, Homo sapiens
attaaaattcacagg

SEQ ID NO: 996124 - DNA, 15 bp, Homo sapiens
aattaaaattcacag

SEQ ID NO: 996125 - DNA, 15 bp, Homo sapiens
aaattaaaattcaca

SEQ ID NO: 996126 - DNA, 15 bp, Homo sapiens
caaattaaaattcac

SEQ ID NO: 996127 - DNA, 15 bp, Homo sapiens
ccaaattaaaattca

SEQ ID NO: 996128 - DNA, 15 bp, Homo sapiens
accaaattaaaattc

SEQ ID NO: 996129 - DNA, 15 bp, Homo sapiens
gaaaccaaattaaaa

SEQ ID NO: 996130 - DNA, 15 bp, Homo sapiens
agaaaccaaattaaa

SEQ ID NO: 996131 - DNA, 15 bp, Homo sapiens
cagaaaccaaattaa

SEQ ID NO: 996132 - DNA, 15 bp, Homo sapiens
ccagaaaccaaatta

SEQ ID NO: 996133 - DNA, 15 bp, Homo sapiens
accagaaaccaaatt

SEQ ID NO: 996134 - DNA, 15 bp, Homo sapiens
taccagaaaccaaat

SEQ ID NO: 996135 - DNA, 15 bp, Homo sapiens
gtaccagaaaccaaa

SEQ ID NO: 996136 - DNA, 15 bp, Homo sapiens
agtaccagaaaccaa

SEQ ID NO: 996137 - DNA, 15 bp, Homo sapiens
tagtaccagaaacca

SEQ ID NO: 996138 - DNA, 15 bp, Homo sapiens
gtagtaccagaaacc

SEQ ID NO: 996139 - DNA, 15 bp, Homo sapiens
tgtagtaccagaaac

SEQ ID NO: 996140 - DNA, 15 bp, Homo sapiens
gtgtagtaccagaaa

SEQ ID NO: 996141 - DNA, 15 bp, Homo sapiens
agtgtagtaccagaa

SEQ ID NO: 996142 - DNA, 15 bp, Homo sapiens
aagtgtagtaccaga

SEQ ID NO: 996143 - DNA, 15 bp, Homo sapiens
caagtgtagtaccag

SEQ ID NO: 996144 - DNA, 15 bp, Homo sapiens
tcaagtgtagtacca

SEQ ID NO: 996145 - DNA, 15 bp, Homo sapiens
ttcaagtgtagtacc

SEQ ID NO: 996146 - DNA, 15 bp, Homo sapiens
tttcaagtgtagtac

SEQ ID NO: 996147 - DNA, 15 bp, Homo sapiens
atttcaagtgtagta

SEQ ID NO: 996148 - DNA, 15 bp, Homo sapiens
aatttcaagtgtagt

SEQ ID NO: 996149 - DNA, 15 bp, Homo sapiens
gaatttcaagtgtag

SEQ ID NO: 996150 - DNA, 15 bp, Homo sapiens
ggaatttcaagtgta

SEQ ID NO: 996151 - DNA, 15 bp, Homo sapiens
tggaatttcaagtgt

SEQ ID NO: 996152 - DNA, 15 bp, Homo sapiens
ctggaatttcaagtg

SEQ ID NO: 996153 - DNA, 15 bp, Homo sapiens
actggaatttcaagt

SEQ ID NO: 996154 - DNA, 15 bp, Homo sapiens
tactggaatttcaag

SEQ ID NO: 996155 - DNA, 15 bp, Homo sapiens
ttactggaatttcaa

SEQ ID NO: 996156 - DNA, 15 bp, Homo sapiens
attactggaatttca

SEQ ID NO: 996157 - DNA, 15 bp, Homo sapiens
cattactggaatttc

SEQ ID NO: 996158 - DNA, 15 bp, Homo sapiens
tcattactggaattt

SEQ ID NO: 996159 - DNA, 15 bp, Homo sapiens
atcattactggaatt

SEQ ID NO: 996160 - DNA, 15 bp, Homo sapiens
tatcattactggaat

SEQ ID NO: 996161 - DNA, 15 bp, Homo sapiens
ttatcattactggaa

SEQ ID NO: 996162 - DNA, 15 bp, Homo sapiens
cttatcattactgga

SEQ ID NO: 996163 - DNA, 15 bp, Homo sapiens
tcttatcattactgg

SEQ ID NO: 996164 - DNA, 15 bp, Homo sapiens
atcttatcattactg

SEQ ID NO: 996165 - DNA, 15 bp, Homo sapiens
catcttatcattact

SEQ ID NO: 996166 - DNA, 15 bp, Homo sapiens
ccatcttatcattac

SEQ ID NO: 996167 - DNA, 15 bp, Homo sapiens
cccatcttatcatta

SEQ ID NO: 996168 - DNA, 15 bp, Homo sapiens
tcccatcttatcatt

SEQ ID NO: 996169 - DNA, 15 bp, Homo sapiens
ttcccatcttatcat

SEQ ID NO: 996170 - DNA, 15 bp, Homo sapiens
gttcccatcttatca

SEQ ID NO: 996171 - DNA, 15 bp, Homo sapiens
agttcccatcttatc

SEQ ID NO: 996172 - DNA, 15 bp, Homo sapiens
tagttcccatcttat

SEQ ID NO: 996173 - DNA, 15 bp, Homo sapiens
ttagttcccatctta

SEQ ID NO: 996174 - DNA, 15 bp, Homo sapiens
tttagttcccatctt

SEQ ID NO: 996175 - DNA, 15 bp, Homo sapiens
ttttagttcccatct

SEQ ID NO: 996176 - DNA, 15 bp, Homo sapiens
gttttagttcccatc

SEQ ID NO: 996177 - DNA, 15 bp, Homo sapiens
tgttttagttcccat

SEQ ID NO: 996178 - DNA, 15 bp, Homo sapiens
ctgttttagttccca

SEQ ID NO: 996179 - DNA, 15 bp, Homo sapiens
gctgttttagttccc

SEQ ID NO: 996180 - DNA, 15 bp, Homo sapiens
tgctgttttagttcc

SEQ ID NO: 996181 - DNA, 15 bp, Homo sapiens
ctgctgttttagttc

SEQ ID NO: 996182 - DNA, 15 bp, Homo sapiens
gctgctgttttagtt

SEQ ID NO: 996183 - DNA, 15 bp, Homo sapiens
agctgctgttttagt

SEQ ID NO: 996184 - DNA, 15 bp, Homo sapiens
cagctgctgttttag

SEQ ID NO: 996185 - DNA, 15 bp, Homo sapiens
gcagctgctgtttta

SEQ ID NO: 996186 - DNA, 15 bp, Homo sapiens
ggcagctgctgtttt

SEQ ID NO: 996187 - DNA, 15 bp, Homo sapiens
gggcagctgctgttt

SEQ ID NO: 996188 - DNA, 15 bp, Homo sapiens
ggggcagctgctgtt

SEQ ID NO: 996189 - DNA, 15 bp, Homo sapiens
aggggcagctgctgt

SEQ ID NO: 996190 - DNA, 15 bp, Homo sapiens
gaggggcagctgctg

SEQ ID NO: 996191 - DNA, 15 bp, Homo sapiens
cgaggggcagctgct

SEQ ID NO: 996192 - DNA, 15 bp, Homo sapiens
ccgaggggcagctgc

SEQ ID NO: 996193 - DNA, 15 bp, Homo sapiens
tccgaggggcagctg

SEQ ID NO: 996194 - DNA, 15 bp, Homo sapiens
ttccgaggggcagct

SEQ ID NO: 996195 - DNA, 15 bp, Homo sapiens
tttccgaggggcagc

SEQ ID NO: 996196 - DNA, 15 bp, Homo sapiens
atttccgaggggcag

SEQ ID NO: 996197 - DNA, 15 bp, Homo sapiens
catttccgaggggca

SEQ ID NO: 996198 - DNA, 15 bp, Homo sapiens
tcatttccgaggggc

SEQ ID NO: 996199 - DNA, 15 bp, Homo sapiens
ctcatttccgagggg

SEQ ID NO: 996200 - DNA, 15 bp, Homo sapiens
cctcatttccgaggg

SEQ ID NO: 996201 - DNA, 15 bp, Homo sapiens
ccctcatttccgagg

SEQ ID NO: 996202 - DNA, 15 bp, Homo sapiens
accctcatttccgag

SEQ ID NO: 996203 - DNA, 15 bp, Homo sapiens
gaccctcatttccga

SEQ ID NO: 996204 - DNA, 15 bp, Homo sapiens
cgaccctcatttccg

SEQ ID NO: 996205 - DNA, 15 bp, Homo sapiens
gcgaccctcatttcc

SEQ ID NO: 996206 - DNA, 15 bp, Homo sapiens
tgcgaccctcatttc

SEQ ID NO: 996207 - DNA, 15 bp, Homo sapiens
gtgcgaccctcattt

SEQ ID NO: 996208 - DNA, 15 bp, Homo sapiens
ggtgcgaccctcatt

SEQ ID NO: 996209 - DNA, 15 bp, Homo sapiens
tggtgcgaccctcat

SEQ ID NO: 996210 - DNA, 15 bp, Homo sapiens
gtggtgcgaccctca

SEQ ID NO: 996211 - DNA, 15 bp, Homo sapiens
ggtggtgcgaccctc

SEQ ID NO: 996212 - DNA, 15 bp, Homo sapiens
aggtggtgcgaccct

SEQ ID NO: 996213 - DNA, 15 bp, Homo sapiens
gaggtggtgcgaccc

SEQ ID NO: 996214 - DNA, 15 bp, Homo sapiens
cgaggtggtgcgacc

SEQ ID NO: 996215 - DNA, 15 bp, Homo sapiens
acgaggtggtgcgac

SEQ ID NO: 996216 - DNA, 15 bp, Homo sapiens
aacgaggtggtgcga

SEQ ID NO: 996217 - DNA, 15 bp, Homo sapiens
gaacgaggtggtgcg

SEQ ID NO: 996218 - DNA, 15 bp, Homo sapiens
ggaacgaggtggtgc

SEQ ID NO: 996219 - DNA, 15 bp, Homo sapiens
gggaacgaggtggtg

SEQ ID NO: 996220 - DNA, 15 bp, Homo sapiens
tgggaacgaggtggt

SEQ ID NO: 996221 - DNA, 15 bp, Homo sapiens
ctgggaacgaggtgg

SEQ ID NO: 996222 - DNA, 15 bp, Homo sapiens
tctgggaacgaggtg

SEQ ID NO: 996223 - DNA, 15 bp, Homo sapiens
gtctgggaacgaggt

SEQ ID NO: 996224 - DNA, 15 bp, Homo sapiens
agtctgggaacgagg

SEQ ID NO: 996225 - DNA, 15 bp, Homo sapiens
cagtctgggaacgag

SEQ ID NO: 996226 - DNA, 15 bp, Homo sapiens
tcagtctgggaacga

SEQ ID NO: 996227 - DNA, 15 bp, Homo sapiens
ctcagtctgggaacg

SEQ ID NO: 996228 - DNA, 15 bp, Homo sapiens
cctcagtctgggaac

SEQ ID NO: 996229 - DNA, 15 bp, Homo sapiens
gcctcagtctgggaa

SEQ ID NO: 996230 - DNA, 15 bp, Homo sapiens
agcctcagtctggga

SEQ ID NO: 996231 - DNA, 15 bp, Homo sapiens
cagcctcagtctggg

SEQ ID NO: 996232 - DNA, 15 bp, Homo sapiens
gcagcctcagtctgg

SEQ ID NO: 996233 - DNA, 15 bp, Homo sapiens
tgcagcctcagtctg

SEQ ID NO: 996234 - DNA, 15 bp, Homo sapiens
ctgcagcctcagtct

SEQ ID NO: 996235 - DNA, 15 bp, Homo sapiens
actgcagcctcagtc

SEQ ID NO: 996236 - DNA, 15 bp, Homo sapiens
aactgcagcctcagt

SEQ ID NO: 996237 - DNA, 15 bp, Homo sapiens
caactgcagcctcag

SEQ ID NO: 996238 - DNA, 15 bp, Homo sapiens
tcaactgcagcctca

SEQ ID NO: 996239 - DNA, 15 bp, Homo sapiens
ctcaactgcagcctc

SEQ ID NO: 996240 - DNA, 15 bp, Homo sapiens
tctcaactgcagcct

SEQ ID NO: 996241 - DNA, 15 bp, Homo sapiens
ttctcaactgcagcc

SEQ ID NO: 996242 - DNA, 15 bp, Homo sapiens
attctcaactgcagc

SEQ ID NO: 996243 - DNA, 15 bp, Homo sapiens
cattctcaactgcag

SEQ ID NO: 996244 - DNA, 15 bp, Homo sapiens
gcattctcaactgca

SEQ ID NO: 996245 - DNA, 15 bp, Homo sapiens
agcattctcaactgc

SEQ ID NO: 996246 - DNA, 15 bp, Homo sapiens
aagcattctcaactg

SEQ ID NO: 996247 - DNA, 15 bp, Homo sapiens
caagcattctcaact

SEQ ID NO: 996248 - DNA, 15 bp, Homo sapiens
acaagcattctcaac

SEQ ID NO: 996249 - DNA, 15 bp, Homo sapiens
cacaagcattctcaa

SEQ ID NO: 996250 - DNA, 15 bp, Homo sapiens
acacaagcattctca

SEQ ID NO: 996251 - DNA, 15 bp, Homo sapiens
cacacaagcattctc

SEQ ID NO: 996252 - DNA, 15 bp, Homo sapiens
acacacaagcattct

SEQ ID NO: 996253 - DNA, 15 bp, Homo sapiens
cacacacaagcattc

SEQ ID NO: 996254 - DNA, 15 bp, Homo sapiens
tcacacacaagcatt

SEQ ID NO: 996255 - DNA, 15 bp, Homo sapiens
gtcacacacaagcat

SEQ ID NO: 996256 - DNA, 15 bp, Homo sapiens
tgtcacacacaagca

SEQ ID NO: 996257 - DNA, 15 bp, Homo sapiens
atgtcacacacaagc

SEQ ID NO: 996258 - DNA, 15 bp, Homo sapiens
catgtcacacacaag

SEQ ID NO: 996259 - DNA, 15 bp, Homo sapiens
gcatgtcacacacaa

SEQ ID NO: 996260 - DNA, 15 bp, Homo sapiens
ggcatgtcacacaca

SEQ ID NO: 996261 - DNA, 15 bp, Homo sapiens
gggcatgtcacacac

SEQ ID NO: 996262 - DNA, 15 bp, Homo sapiens
ggggcatgtcacaca

SEQ ID NO: 996263 - DNA, 15 bp, Homo sapiens
aggggcatgtcacac

SEQ ID NO: 996264 - DNA, 15 bp, Homo sapiens
caggggcatgtcaca

SEQ ID NO: 996265 - DNA, 15 bp, Homo sapiens
gcaggggcatgtcac

SEQ ID NO: 996266 - DNA, 15 bp, Homo sapiens
ggcaggggcatgtca

SEQ ID NO: 996267 - DNA, 15 bp, Homo sapiens
tggcaggggcatgtc

SEQ ID NO: 996268 - DNA, 15 bp, Homo sapiens
gtggcaggggcatgt

SEQ ID NO: 996269 - DNA, 15 bp, Homo sapiens
ggtggcaggggcatg

SEQ ID NO: 996270 - DNA, 15 bp, Homo sapiens
gggtggcaggggcat

SEQ ID NO: 996271 - DNA, 15 bp, Homo sapiens
tgggtggcaggggca

SEQ ID NO: 996272 - DNA, 15 bp, Homo sapiens
ctgggtggcaggggc

SEQ ID NO: 996273 - DNA, 15 bp, Homo sapiens
actgggtggcagggg

SEQ ID NO: 996274 - DNA, 15 bp, Homo sapiens
tactgggtggcaggg

SEQ ID NO: 996275 - DNA, 15 bp, Homo sapiens
gtactgggtggcagg

SEQ ID NO: 996276 - DNA, 15 bp, Homo sapiens
tgtactgggtggcag

SEQ ID NO: 996277 - DNA, 15 bp, Homo sapiens
gtgtactgggtggca

SEQ ID NO: 996278 - DNA, 15 bp, Homo sapiens
tgtgtactgggtggc

SEQ ID NO: 996279 - DNA, 15 bp, Homo sapiens
gtgtgtactgggtgg

SEQ ID NO: 996280 - DNA, 15 bp, Homo sapiens
tgtgtgtactgggtg

SEQ ID NO: 996281 - DNA, 15 bp, Homo sapiens
gtgtgtgtactgggt

SEQ ID NO: 996282 - DNA, 15 bp, Homo sapiens
ggtgtgtgtactggg

SEQ ID NO: 996283 - DNA, 15 bp, Homo sapiens
aggtgtgtgtactgg

SEQ ID NO: 996284 - DNA, 15 bp, Homo sapiens
caggtgtgtgtactg

SEQ ID NO: 996285 - DNA, 15 bp, Homo sapiens
tcaggtgtgtgtact

SEQ ID NO: 996286 - DNA, 15 bp, Homo sapiens
ctcaggtgtgtgtac

SEQ ID NO: 996287 - DNA, 15 bp, Homo sapiens
actcaggtgtgtgta

SEQ ID NO: 996288 - DNA, 15 bp, Homo sapiens
gactcaggtgtgtgt

SEQ ID NO: 996289 - DNA, 15 bp, Homo sapiens
tgactcaggtgtgtg

SEQ ID NO: 996290 - DNA, 15 bp, Homo sapiens
atgactcaggtgtgt

SEQ ID NO: 996291 - DNA, 15 bp, Homo sapiens
aatgactcaggtgtg

SEQ ID NO: 996292 - DNA, 15 bp, Homo sapiens
taatgactcaggtgt

SEQ ID NO: 996293 - DNA, 15 bp, Homo sapiens
ctaatgactcaggtg

SEQ ID NO: 996294 - DNA, 15 bp, Homo sapiens
tctaatgactcaggt

SEQ ID NO: 996295 - DNA, 15 bp, Homo sapiens
atctaatgactcagg

SEQ ID NO: 996296 - DNA, 15 bp, Homo sapiens
catctaatgactcag

SEQ ID NO: 996297 - DNA, 15 bp, Homo sapiens
acatctaatgactca

SEQ ID NO: 996298 - DNA, 15 bp, Homo sapiens
gacatctaatgactc

SEQ ID NO: 996299 - DNA, 15 bp, Homo sapiens
tgacatctaatgact

SEQ ID NO: 996300 - DNA, 15 bp, Homo sapiens
gtgacatctaatgac

SEQ ID NO: 996301 - DNA, 15 bp, Homo sapiens
agtgacatctaatga

SEQ ID NO: 996302 - DNA, 15 bp, Homo sapiens
aagtgacatctaatg

SEQ ID NO: 996303 - DNA, 15 bp, Homo sapiens
aaagtgacatctaat

SEQ ID NO: 996304 - DNA, 15 bp, Homo sapiens
taaagtgacatctaa

SEQ ID NO: 996305 - DNA, 15 bp, Homo sapiens
ataaagtgacatcta

SEQ ID NO: 996306 - DNA, 15 bp, Homo sapiens
cataaagtgacatct

SEQ ID NO: 996307 - DNA, 15 bp, Homo sapiens
ccataaagtgacatc

SEQ ID NO: 996308 - DNA, 15 bp, Homo sapiens
gccataaagtgacat

SEQ ID NO: 996309 - DNA, 15 bp, Homo sapiens
tgccataaagtgaca

SEQ ID NO: 996310 - DNA, 15 bp, Homo sapiens
atgccataaagtgac

SEQ ID NO: 996311 - DNA, 15 bp, Homo sapiens
gatgccataaagtga

SEQ ID NO: 996312 - DNA, 15 bp, Homo sapiens
cgatgccataaagtg

SEQ ID NO: 996313 - DNA, 15 bp, Homo sapiens
acgatgccataaagt

SEQ ID NO: 996314 - DNA, 15 bp, Homo sapiens
gacgatgccataaag

SEQ ID NO: 996315 - DNA, 15 bp, Homo sapiens
tgacgatgccataaa

SEQ ID NO: 996316 - DNA, 15 bp, Homo sapiens
gtgacgatgccataa

SEQ ID NO: 996317 - DNA, 15 bp, Homo sapiens
tgtgacgatgccata

SEQ ID NO: 996318 - DNA, 15 bp, Homo sapiens
ctgtgacgatgccat

SEQ ID NO: 996319 - DNA, 15 bp, Homo sapiens
tctgtgacgatgcca

SEQ ID NO: 996320 - DNA, 15 bp, Homo sapiens
ctctgtgacgatgcc

SEQ ID NO: 996321 - DNA, 15 bp, Homo sapiens
tctctgtgacgatgc

SEQ ID NO: 996322 - DNA, 15 bp, Homo sapiens
ttctctgtgacgatg

SEQ ID NO: 996323 - DNA, 15 bp, Homo sapiens
gttctctgtgacgat

SEQ ID NO: 996324 - DNA, 15 bp, Homo sapiens
tgttctctgtgacga

SEQ ID NO: 996325 - DNA, 15 bp, Homo sapiens
ttgttctctgtgacg

SEQ ID NO: 996326 - DNA, 15 bp, Homo sapiens
gttgttctctgtgac

SEQ ID NO: 996327 - DNA, 15 bp, Homo sapiens
agttgttctctgtga

SEQ ID NO: 996328 - DNA, 15 bp, Homo sapiens
cagttgttctctgtg

SEQ ID NO: 996329 - DNA, 15 bp, Homo sapiens
ccagttgttctctgt

SEQ ID NO: 996330 - DNA, 15 bp, Homo sapiens
cccagttgttctctg

SEQ ID NO: 996331 - DNA, 15 bp, Homo sapiens
acccagttgttctct

SEQ ID NO: 996332 - DNA, 15 bp, Homo sapiens
aacccagttgttctc

SEQ ID NO: 996333 - DNA, 15 bp, Homo sapiens
aaacccagttgttct

SEQ ID NO: 996334 - DNA, 15 bp, Homo sapiens
aaaacccagttgttc

SEQ ID NO: 996335 - DNA, 15 bp, Homo sapiens
caaaacccagttgtt

SEQ ID NO: 996336 - DNA, 15 bp, Homo sapiens
ccaaaacccagttgt

SEQ ID NO: 996337 - DNA, 15 bp, Homo sapiens
tccaaaacccagttg

SEQ ID NO: 996338 - DNA, 15 bp, Homo sapiens
ctccaaaacccagtt

SEQ ID NO: 996339 - DNA, 15 bp, Homo sapiens
tctccaaaacccagt

SEQ ID NO: 996340 - DNA, 15 bp, Homo sapiens
ctctccaaaacccag

SEQ ID NO: 996341 - DNA, 15 bp, Homo sapiens
tctctccaaaaccca

SEQ ID NO: 996342 - DNA, 15 bp, Homo sapiens
ctctctccaaaaccc

SEQ ID NO: 996343 - DNA, 15 bp, Homo sapiens
tctctctccaaaacc

SEQ ID NO: 996344 - DNA, 15 bp, Homo sapiens
ttctctctccaaaac

SEQ ID NO: 996345 - DNA, 15 bp, Homo sapiens
attctctctccaaaa

SEQ ID NO: 996346 - DNA, 15 bp, Homo sapiens
cattctctctccaaa

SEQ ID NO: 996347 - DNA, 15 bp, Homo sapiens
acattctctctccaa

SEQ ID NO: 996348 - DNA, 15 bp, Homo sapiens
gacattctctctcca

SEQ ID NO: 996349 - DNA, 15 bp, Homo sapiens
tgacattctctctcc

SEQ ID NO: 996350 - DNA, 15 bp, Homo sapiens
atgacattctctctc

SEQ ID NO: 996351 - DNA, 15 bp, Homo sapiens
catgacattctctct

SEQ ID NO: 996352 - DNA, 15 bp, Homo sapiens
tcatgacattctctc

SEQ ID NO: 996353 - DNA, 15 bp, Homo sapiens
atcatgacattctct

SEQ ID NO: 996354 - DNA, 15 bp, Homo sapiens
catcatgacattctc

SEQ ID NO: 996355 - DNA, 15 bp, Homo sapiens
acatcatgacattct

SEQ ID NO: 996356 - DNA, 15 bp, Homo sapiens
cacatcatgacattc

SEQ ID NO: 996357 - DNA, 15 bp, Homo sapiens
tcacatcatgacatt

SEQ ID NO: 996358 - DNA, 15 bp, Homo sapiens
gtcacatcatgacat

SEQ ID NO: 996359 - DNA, 15 bp, Homo sapiens
agtcacatcatgaca

SEQ ID NO: 996360 - DNA, 15 bp, Homo sapiens
aagtcacatcatgac

SEQ ID NO: 996361 - DNA, 15 bp, Homo sapiens
gaagtcacatcatga

SEQ ID NO: 996362 - DNA, 15 bp, Homo sapiens
tgaagtcacatcatg

SEQ ID NO: 996363 - DNA, 15 bp, Homo sapiens
atgaagtcacatcat

SEQ ID NO: 996364 - DNA, 15 bp, Homo sapiens
aatgaagtcacatca

SEQ ID NO: 996365 - DNA, 15 bp, Homo sapiens
aaatgaagtcacatc

SEQ ID NO: 996366 - DNA, 15 bp, Homo sapiens
gaaatgaagtcacat

SEQ ID NO: 996367 - DNA, 15 bp, Homo sapiens
ggaaatgaagtcaca

SEQ ID NO: 996368 - DNA, 15 bp, Homo sapiens
aggaaatgaagtcac

SEQ ID NO: 996369 - DNA, 15 bp, Homo sapiens
aaggaaatgaagtca

SEQ ID NO: 996370 - DNA, 15 bp, Homo sapiens
caaggaaatgaagtc

SEQ ID NO: 996371 - DNA, 15 bp, Homo sapiens
ccaaggaaatgaagt

SEQ ID NO: 996372 - DNA, 15 bp, Homo sapiens
tccaaggaaatgaag

SEQ ID NO: 996373 - DNA, 15 bp, Homo sapiens
ctccaaggaaatgaa

SEQ ID NO: 996374 - DNA, 15 bp, Homo sapiens
gctccaaggaaatga

SEQ ID NO: 996375 - DNA, 15 bp, Homo sapiens
tgctccaaggaaatg

SEQ ID NO: 996376 - DNA, 15 bp, Homo sapiens
gtgctccaaggaaat

SEQ ID NO: 996377 - DNA, 15 bp, Homo sapiens
agtgctccaaggaaa

SEQ ID NO: 996378 - DNA, 15 bp, Homo sapiens
cagtgctccaaggaa

SEQ ID NO: 996379 - DNA, 15 bp, Homo sapiens
ccagtgctccaagga

SEQ ID NO: 996380 - DNA, 15 bp, Homo sapiens
cccagtgctccaagg

SEQ ID NO: 996381 - DNA, 15 bp, Homo sapiens
tcccagtgctccaag

SEQ ID NO: 996382 - DNA, 15 bp, Homo sapiens
atcccagtgctccaa

SEQ ID NO: 996383 - DNA, 15 bp, Homo sapiens
tatcccagtgctcca

SEQ ID NO: 996384 - DNA, 15 bp, Homo sapiens
ctatcccagtgctcc

SEQ ID NO: 996385 - DNA, 15 bp, Homo sapiens
tctatcccagtgctc

SEQ ID NO: 996386 - DNA, 15 bp, Homo sapiens
ctctatcccagtgct

SEQ ID NO: 996387 - DNA, 15 bp, Homo sapiens
cctctatcccagtgc

SEQ ID NO: 996388 - DNA, 15 bp, Homo sapiens
gcctctatcccagtg

SEQ ID NO: 996389 - DNA, 15 bp, Homo sapiens
agcctctatcccagt

SEQ ID NO: 996390 - DNA, 15 bp, Homo sapiens
gagcctctatcccag

SEQ ID NO: 996391 - DNA, 15 bp, Homo sapiens
agagcctctatccca

SEQ ID NO: 996392 - DNA, 15 bp, Homo sapiens
aagagcctctatccc

SEQ ID NO: 996393 - DNA, 15 bp, Homo sapiens
caagagcctctatcc

SEQ ID NO: 996394 - DNA, 15 bp, Homo sapiens
ccaagagcctctatc

SEQ ID NO: 996395 - DNA, 15 bp, Homo sapiens
cccaagagcctctat

SEQ ID NO: 996396 - DNA, 15 bp, Homo sapiens
acccaagagcctcta

SEQ ID NO: 996397 - DNA, 15 bp, Homo sapiens
aacccaagagcctct

SEQ ID NO: 996398 - DNA, 15 bp, Homo sapiens
taacccaagagcctc

SEQ ID NO: 996399 - DNA, 15 bp, Homo sapiens
ctaacccaagagcct

SEQ ID NO: 996400 - DNA, 15 bp, Homo sapiens
tctaacccaagagcc

SEQ ID NO: 996401 - DNA, 15 bp, Homo sapiens
ttctaacccaagagc

SEQ ID NO: 996402 - DNA, 15 bp, Homo sapiens
cttctaacccaagag

SEQ ID NO: 996403 - DNA, 15 bp, Homo sapiens
gcttctaacccaaga

SEQ ID NO: 996404 - DNA, 15 bp, Homo sapiens
agcttctaacccaag

SEQ ID NO: 996405 - DNA, 15 bp, Homo sapiens
gagcttctaacccaa

SEQ ID NO: 996406 - DNA, 15 bp, Homo sapiens
agagcttctaaccca

SEQ ID NO: 996407 - DNA, 15 bp, Homo sapiens
aagagcttctaaccc

SEQ ID NO: 996408 - DNA, 15 bp, Homo sapiens
caagagcttctaacc

SEQ ID NO: 996409 - DNA, 15 bp, Homo sapiens
ccaagagcttctaac

SEQ ID NO: 996410 - DNA, 15 bp, Homo sapiens
tccaagagcttctaa

SEQ ID NO: 996411 - DNA, 15 bp, Homo sapiens
gtccaagagcttcta

SEQ ID NO: 996412 - DNA, 15 bp, Homo sapiens
tgtccaagagcttct

SEQ ID NO: 996413 - DNA, 15 bp, Homo sapiens
atgtccaagagcttc

SEQ ID NO: 996414 - DNA, 15 bp, Homo sapiens
aatgtccaagagctt

SEQ ID NO: 996415 - DNA, 15 bp, Homo sapiens
taatgtccaagagct

SEQ ID NO: 996416 - DNA, 15 bp, Homo sapiens
ttaatgtccaagagc

SEQ ID NO: 996417 - DNA, 15 bp, Homo sapiens
tttaatgtccaagag

SEQ ID NO: 996418 - DNA, 15 bp, Homo sapiens
ctttaatgtccaaga

SEQ ID NO: 996419 - DNA, 15 bp, Homo sapiens
tctttaatgtccaag

SEQ ID NO: 996420 - DNA, 15 bp, Homo sapiens
ctctttaatgtccaa

SEQ ID NO: 996421 - DNA, 15 bp, Homo sapiens
tctctttaatgtcca

SEQ ID NO: 996422 - DNA, 15 bp, Homo sapiens
ttctctttaatgtcc

SEQ ID NO: 996423 - DNA, 15 bp, Homo sapiens
tttctctttaatgtc

SEQ ID NO: 996424 - DNA, 15 bp, Homo sapiens
atttctctttaatgt

SEQ ID NO: 996425 - DNA, 15 bp, Homo sapiens
gatttctctttaatg

SEQ ID NO: 996426 - DNA, 15 bp, Homo sapiens
tgatttctctttaat

SEQ ID NO: 996427 - DNA, 15 bp, Homo sapiens
ctgatttctctttaa

SEQ ID NO: 996428 - DNA, 15 bp, Homo sapiens
tctgatttctcttta

SEQ ID NO: 996429 - DNA, 15 bp, Homo sapiens
ttctgatttctcttt

SEQ ID NO: 996430 - DNA, 15 bp, Homo sapiens
cttctgatttctctt

SEQ ID NO: 996431 - DNA, 15 bp, Homo sapiens
ccttctgatttctct

SEQ ID NO: 996432 - DNA, 15 bp, Homo sapiens
accttctgatttctc

SEQ ID NO: 996433 - DNA, 15 bp, Homo sapiens
aaccttctgatttct

SEQ ID NO: 996434 - DNA, 15 bp, Homo sapiens
aaaccttctgatttc

SEQ ID NO: 996435 - DNA, 15 bp, Homo sapiens
taaaccttctgattt

SEQ ID NO: 996436 - DNA, 15 bp, Homo sapiens
ctaaaccttctgatt

SEQ ID NO: 996437 - DNA, 15 bp, Homo sapiens
gctaaaccttctgat

SEQ ID NO: 996438 - DNA, 15 bp, Homo sapiens
ggctaaaccttctga

SEQ ID NO: 996439 - DNA, 15 bp, Homo sapiens
aggctaaaccttctg

SEQ ID NO: 996440 - DNA, 15 bp, Homo sapiens
caggctaaaccttct

SEQ ID NO: 996441 - DNA, 15 bp, Homo sapiens
tcaggctaaaccttc

SEQ ID NO: 996442 - DNA, 15 bp, Homo sapiens
gtcaggctaaacctt

SEQ ID NO: 996443 - DNA, 15 bp, Homo sapiens
agtcaggctaaacct

SEQ ID NO: 996444 - DNA, 15 bp, Homo sapiens
cagtcaggctaaacc

SEQ ID NO: 996445 - DNA, 15 bp, Homo sapiens
tcagtcaggctaaac

SEQ ID NO: 996446 - DNA, 15 bp, Homo sapiens
atcagtcaggctaaa

SEQ ID NO: 996447 - DNA, 15 bp, Homo sapiens
tatcagtcaggctaa

SEQ ID NO: 996448 - DNA, 15 bp, Homo sapiens
gtatcagtcaggcta

SEQ ID NO: 996449 - DNA, 15 bp, Homo sapiens
agtatcagtcaggct

SEQ ID NO: 996450 - DNA, 15 bp, Homo sapiens
cagtatcagtcaggc

SEQ ID NO: 996451 - DNA, 15 bp, Homo sapiens
tcagtatcagtcagg

SEQ ID NO: 996452 - DNA, 15 bp, Homo sapiens
ctcagtatcagtcag

SEQ ID NO: 996453 - DNA, 15 bp, Homo sapiens
gctcagtatcagtca

SEQ ID NO: 996454 - DNA, 15 bp, Homo sapiens
agctcagtatcagtc

SEQ ID NO: 996455 - DNA, 15 bp, Homo sapiens
gagctcagtatcagt

SEQ ID NO: 996456 - DNA, 15 bp, Homo sapiens
tgagctcagtatcag

SEQ ID NO: 996457 - DNA, 15 bp, Homo sapiens
atgagctcagtatca

SEQ ID NO: 996458 - DNA, 15 bp, Homo sapiens
aatgagctcagtatc

SEQ ID NO: 996459 - DNA, 15 bp, Homo sapiens
taatgagctcagtat

SEQ ID NO: 996460 - DNA, 15 bp, Homo sapiens
ataatgagctcagta

SEQ ID NO: 996461 - DNA, 15 bp, Homo sapiens
tataatgagctcagt

SEQ ID NO: 996462 - DNA, 15 bp, Homo sapiens
ctataatgagctcag

SEQ ID NO: 996463 - DNA, 15 bp, Homo sapiens
tctataatgagctca

SEQ ID NO: 996464 - DNA, 15 bp, Homo sapiens
atctataatgagctc

SEQ ID NO: 996465 - DNA, 15 bp, Homo sapiens
aatctataatgagct

SEQ ID NO: 996466 - DNA, 15 bp, Homo sapiens
caatctataatgagc

SEQ ID NO: 996467 - DNA, 15 bp, Homo sapiens
tcaatctataatgag

SEQ ID NO: 996468 - DNA, 15 bp, Homo sapiens
gtcaatctataatga

SEQ ID NO: 996469 - DNA, 15 bp, Homo sapiens
tgtcaatctataatg

SEQ ID NO: 996470 - DNA, 15 bp, Homo sapiens
ttgtcaatctataat

SEQ ID NO: 996471 - DNA, 15 bp, Homo sapiens
attgtcaatctataa

SEQ ID NO: 996472 - DNA, 15 bp, Homo sapiens
gattgtcaatctata

SEQ ID NO: 996473 - DNA, 15 bp, Homo sapiens
agattgtcaatctat

SEQ ID NO: 996474 - DNA, 15 bp, Homo sapiens
gagattgtcaatcta

SEQ ID NO: 996475 - DNA, 15 bp, Homo sapiens
agagattgtcaatct

SEQ ID NO: 996476 - DNA, 15 bp, Homo sapiens
gagagattgtcaatc

SEQ ID NO: 996477 - DNA, 15 bp, Homo sapiens
agagagattgtcaat

SEQ ID NO: 996478 - DNA, 15 bp, Homo sapiens
aagagagattgtcaa

SEQ ID NO: 996479 - DNA, 15 bp, Homo sapiens
aaagagagattgtca

SEQ ID NO: 996480 - DNA, 15 bp, Homo sapiens
aaaagagagattgtc

SEQ ID NO: 996481 - DNA, 15 bp, Homo sapiens
aaaaagagagattgt

SEQ ID NO: 996482 - DNA, 15 bp, Homo sapiens
aaaaaagagagattg

SEQ ID NO: 996483 - DNA, 15 bp, Homo sapiens
taaaaaaagagagat

SEQ ID NO: 996484 - DNA, 15 bp, Homo sapiens
tttaaaaaaagagag

SEQ ID NO: 996485 - DNA, 15 bp, Homo sapiens
ttttaaaaaaagaga

SEQ ID NO: 996486 - DNA, 15 bp, Homo sapiens
tttttaaaaaaagag

SEQ ID NO: 996487 - DNA, 15 bp, Homo sapiens
ttttttaaaaaaaga

SEQ ID NO: 996488 - DNA, 15 bp, Homo sapiens
tttttttaaaaaaag

SEQ ID NO: 996489 - DNA, 15 bp, Homo sapiens
cttttttttttaaaa

SEQ ID NO: 996490 - DNA, 15 bp, Homo sapiens
acttttttttttaaa

SEQ ID NO: 996491 - DNA, 15 bp, Homo sapiens
aacttttttttttaa

SEQ ID NO: 996492 - DNA, 15 bp, Homo sapiens
aaactttttttttta

SEQ ID NO: 996493 - DNA, 15 bp, Homo sapiens
gaaactttttttttt

SEQ ID NO: 996494 - DNA, 15 bp, Homo sapiens
ggaaacttttttttt

SEQ ID NO: 996495 - DNA, 15 bp, Homo sapiens
aggaaactttttttt

SEQ ID NO: 996496 - DNA, 15 bp, Homo sapiens
caggaaacttttttt

SEQ ID NO: 996497 - DNA, 15 bp, Homo sapiens
gcaggaaactttttt

SEQ ID NO: 996498 - DNA, 15 bp, Homo sapiens
ggcaggaaacttttt

SEQ ID NO: 996499 - DNA, 15 bp, Homo sapiens
cggcaggaaactttt

SEQ ID NO: 996500 - DNA, 15 bp, Homo sapiens
acggcaggaaacttt

SEQ ID NO: 996501 - DNA, 15 bp, Homo sapiens
cacggcaggaaactt

SEQ ID NO: 996502 - DNA, 15 bp, Homo sapiens
ccacggcaggaaact

SEQ ID NO: 996503 - DNA, 15 bp, Homo sapiens
gccacggcaggaaac

SEQ ID NO: 996504 - DNA, 15 bp, Homo sapiens
agccacggcaggaaa

SEQ ID NO: 996505 - DNA, 15 bp, Homo sapiens
cagccacggcaggaa

SEQ ID NO: 996506 - DNA, 15 bp, Homo sapiens
gcagccacggcagga

SEQ ID NO: 996507 - DNA, 15 bp, Homo sapiens
agcagccacggcagg

SEQ ID NO: 996508 - DNA, 15 bp, Homo sapiens
cagcagccacggcag

SEQ ID NO: 996509 - DNA, 15 bp, Homo sapiens
gcagcagccacggca

SEQ ID NO: 996510 - DNA, 15 bp, Homo sapiens
agcagcagccacggc

SEQ ID NO: 996511 - DNA, 15 bp, Homo sapiens
tagcagcagccacgg

SEQ ID NO: 996512 - DNA, 15 bp, Homo sapiens
gtagcagcagccacg

SEQ ID NO: 996513 - DNA, 15 bp, Homo sapiens
tgtagcagcagccac

SEQ ID NO: 996514 - DNA, 15 bp, Homo sapiens
ctgtagcagcagcca

SEQ ID NO: 996515 - DNA, 15 bp, Homo sapiens
tctgtagcagcagcc

SEQ ID NO: 996516 - DNA, 15 bp, Homo sapiens
ttctgtagcagcagc

SEQ ID NO: 996517 - DNA, 15 bp, Homo sapiens
tttctgtagcagcag

SEQ ID NO: 996518 - DNA, 15 bp, Homo sapiens
ctttctgtagcagca

SEQ ID NO: 996519 - DNA, 15 bp, Homo sapiens
actttctgtagcagc

SEQ ID NO: 996520 - DNA, 15 bp, Homo sapiens
gactttctgtagcag

SEQ ID NO: 996521 - DNA, 15 bp, Homo sapiens
ggactttctgtagca

SEQ ID NO: 996522 - DNA, 15 bp, Homo sapiens
aggactttctgtagc

SEQ ID NO: 996523 - DNA, 15 bp, Homo sapiens
aaggactttctgtag

SEQ ID NO: 996524 - DNA, 15 bp, Homo sapiens
aaaggactttctgta

SEQ ID NO: 996525 - DNA, 15 bp, Homo sapiens
caaaggactttctgt

SEQ ID NO: 996526 - DNA, 15 bp, Homo sapiens
acaaaggactttctg

SEQ ID NO: 996527 - DNA, 15 bp, Homo sapiens
cacaaaggactttct

SEQ ID NO: 996528 - DNA, 15 bp, Homo sapiens
tcacaaaggactttc

SEQ ID NO: 996529 - DNA, 15 bp, Homo sapiens
ttcacaaaggacttt

SEQ ID NO: 996530 - DNA, 15 bp, Homo sapiens
tttcacaaaggactt

SEQ ID NO: 996531 - DNA, 15 bp, Homo sapiens
ctttcacaaaggact

SEQ ID NO: 996532 - DNA, 15 bp, Homo sapiens
gctttcacaaaggac

SEQ ID NO: 996533 - DNA, 15 bp, Homo sapiens
ggctttcacaaagga

SEQ ID NO: 996534 - DNA, 15 bp, Homo sapiens
gggctttcacaaagg

SEQ ID NO: 996535 - DNA, 15 bp, Homo sapiens
ggggctttcacaaag

SEQ ID NO: 996536 - DNA, 15 bp, Homo sapiens
tggggctttcacaaa

SEQ ID NO: 996537 - DNA, 15 bp, Homo sapiens
ctggggctttcacaa

SEQ ID NO: 996538 - DNA, 15 bp, Homo sapiens
gctggggctttcaca

SEQ ID NO: 996539 - DNA, 15 bp, Homo sapiens
ggctggggctttcac

SEQ ID NO: 996540 - DNA, 15 bp, Homo sapiens
aggctggggctttca

SEQ ID NO: 996541 - DNA, 15 bp, Homo sapiens
caggctggggctttc

SEQ ID NO: 996542 - DNA, 15 bp, Homo sapiens
tcaggctggggcttt

SEQ ID NO: 996543 - DNA, 15 bp, Homo sapiens
atcaggctggggctt

SEQ ID NO: 996544 - DNA, 15 bp, Homo sapiens
aatcaggctggggct

SEQ ID NO: 996545 - DNA, 15 bp, Homo sapiens
aaatcaggctggggc

SEQ ID NO: 996546 - DNA, 15 bp, Homo sapiens
gaaatcaggctgggg

SEQ ID NO: 996547 - DNA, 15 bp, Homo sapiens
tgaaatcaggctggg

SEQ ID NO: 996548 - DNA, 15 bp, Homo sapiens
gtgaaatcaggctgg

SEQ ID NO: 996549 - DNA, 15 bp, Homo sapiens
agtgaaatcaggctg

SEQ ID NO: 996550 - DNA, 15 bp, Homo sapiens
tagtgaaatcaggct

SEQ ID NO: 996551 - DNA, 15 bp, Homo sapiens
atagtgaaatcaggc

SEQ ID NO: 996552 - DNA, 15 bp, Homo sapiens
gatagtgaaatcagg

SEQ ID NO: 996553 - DNA, 15 bp, Homo sapiens
tgatagtgaaatcag

SEQ ID NO: 996554 - DNA, 15 bp, Homo sapiens
ttgatagtgaaatca

SEQ ID NO: 996555 - DNA, 15 bp, Homo sapiens
gttgatagtgaaatc

SEQ ID NO: 996556 - DNA, 15 bp, Homo sapiens
ggttgatagtgaaat

SEQ ID NO: 996557 - DNA, 15 bp, Homo sapiens
tggttgatagtgaaa

SEQ ID NO: 996558 - DNA, 15 bp, Homo sapiens
gtggttgatagtgaa

SEQ ID NO: 996559 - DNA, 15 bp, Homo sapiens
agtggttgatagtga

SEQ ID NO: 996560 - DNA, 15 bp, Homo sapiens
aagtggttgatagtg

SEQ ID NO: 996561 - DNA, 15 bp, Homo sapiens
taagtggttgatagt

SEQ ID NO: 996562 - DNA, 15 bp, Homo sapiens
ttaagtggttgatag

SEQ ID NO: 996563 - DNA, 15 bp, Homo sapiens
gttaagtggttgata

SEQ ID NO: 996564 - DNA, 15 bp, Homo sapiens
ggttaagtggttgat

SEQ ID NO: 996565 - DNA, 15 bp, Homo sapiens
tggttaagtggttga

SEQ ID NO: 996566 - DNA, 15 bp, Homo sapiens
gtggttaagtggttg

SEQ ID NO: 996567 - DNA, 15 bp, Homo sapiens
cgtggttaagtggtt

SEQ ID NO: 996568 - DNA, 15 bp, Homo sapiens
ccgtggttaagtggt

SEQ ID NO: 996569 - DNA, 15 bp, Homo sapiens
accgtggttaagtgg

SEQ ID NO: 996570 - DNA, 15 bp, Homo sapiens
taccgtggttaagtg

SEQ ID NO: 996571 - DNA, 15 bp, Homo sapiens
ataccgtggttaagt

SEQ ID NO: 996572 - DNA, 15 bp, Homo sapiens
aataccgtggttaag

SEQ ID NO: 996573 - DNA, 15 bp, Homo sapiens
taataccgtggttaa

SEQ ID NO: 996574 - DNA, 15 bp, Homo sapiens
ttaataccgtggtta

SEQ ID NO: 996575 - DNA, 15 bp, Homo sapiens
attaataccgtggtt

SEQ ID NO: 996576 - DNA, 15 bp, Homo sapiens
aattaataccgtggt

SEQ ID NO: 996577 - DNA, 15 bp, Homo sapiens
aaattaataccgtgg

SEQ ID NO: 996578 - DNA, 15 bp, Homo sapiens
aaaattaataccgtg

SEQ ID NO: 996579 - DNA, 15 bp, Homo sapiens
aaaaattaataccgt

SEQ ID NO: 996580 - DNA, 15 bp, Homo sapiens
gaaaaattaataccg

SEQ ID NO: 996581 - DNA, 15 bp, Homo sapiens
tgaaaaattaatacc

SEQ ID NO: 996582 - DNA, 15 bp, Homo sapiens
ctgaaaaattaatac

SEQ ID NO: 996583 - DNA, 15 bp, Homo sapiens
actgaaaaattaata

SEQ ID NO: 996584 - DNA, 15 bp, Homo sapiens
aactgaaaaattaat

SEQ ID NO: 996585 - DNA, 15 bp, Homo sapiens
caactgaaaaattaa

SEQ ID NO: 996586 - DNA, 15 bp, Homo sapiens
acaactgaaaaatta

SEQ ID NO: 996587 - DNA, 15 bp, Homo sapiens
aacaactgaaaaatt

SEQ ID NO: 996588 - DNA, 15 bp, Homo sapiens
caacaactgaaaaat

SEQ ID NO: 996589 - DNA, 15 bp, Homo sapiens
tcaacaactgaaaaa

SEQ ID NO: 996590 - DNA, 15 bp, Homo sapiens
ttcaacaactgaaaa

SEQ ID NO: 996591 - DNA, 15 bp, Homo sapiens
gttcaacaactgaaa

SEQ ID NO: 996592 - DNA, 15 bp, Homo sapiens
agttcaacaactgaa

SEQ ID NO: 996593 - DNA, 15 bp, Homo sapiens
aagttcaacaactga

SEQ ID NO: 996594 - DNA, 15 bp, Homo sapiens
aaagttcaacaactg

SEQ ID NO: 996595 - DNA, 15 bp, Homo sapiens
aaaagttcaacaact

SEQ ID NO: 996596 - DNA, 15 bp, Homo sapiens
taaaagttcaacaac

SEQ ID NO: 996597 - DNA, 15 bp, Homo sapiens
ttaaaagttcaacaa

SEQ ID NO: 996598 - DNA, 15 bp, Homo sapiens
cttaaaagttcaaca

SEQ ID NO: 996599 - DNA, 15 bp, Homo sapiens
tcttaaaagttcaac

SEQ ID NO: 996600 - DNA, 15 bp, Homo sapiens
atcttaaaagttcaa

SEQ ID NO: 996601 - DNA, 15 bp, Homo sapiens
aatcttaaaagttca

SEQ ID NO: 996602 - DNA, 15 bp, Homo sapiens
aaatcttaaaagttc

SEQ ID NO: 996603 - DNA, 15 bp, Homo sapiens
aaaatcttaaaagtt

SEQ ID NO: 996604 - DNA, 15 bp, Homo sapiens
taaaatcttaaaagt

SEQ ID NO: 996605 - DNA, 15 bp, Homo sapiens
ttaaaatcttaaaag

SEQ ID NO: 996606 - DNA, 15 bp, Homo sapiens
tttaaaatcttaaaa

SEQ ID NO: 996607 - DNA, 15 bp, Homo sapiens
atttaaaatcttaaa

SEQ ID NO: 996608 - DNA, 15 bp, Homo sapiens
aatttaaaatcttaa

SEQ ID NO: 996609 - DNA, 15 bp, Homo sapiens
taatttaaaatctta

SEQ ID NO: 996610 - DNA, 15 bp, Homo sapiens
gtaatttaaaatctt

SEQ ID NO: 996611 - DNA, 15 bp, Homo sapiens
agtaatttaaaatct

SEQ ID NO: 996612 - DNA, 15 bp, Homo sapiens
aagtaatttaaaatc

SEQ ID NO: 996613 - DNA, 15 bp, Homo sapiens
taagtaatttaaaat

SEQ ID NO: 996614 - DNA, 15 bp, Homo sapiens
ttaagtaatttaaaa

SEQ ID NO: 996615 - DNA, 15 bp, Homo sapiens
cttaagtaatttaaa

SEQ ID NO: 996616 - DNA, 15 bp, Homo sapiens
tcttaagtaatttaa

SEQ ID NO: 996617 - DNA, 15 bp, Homo sapiens
gtcttaagtaattta

SEQ ID NO: 996618 - DNA, 15 bp, Homo sapiens
agtcttaagtaattt

SEQ ID NO: 996619 - DNA, 15 bp, Homo sapiens
aagtcttaagtaatt

SEQ ID NO: 996620 - DNA, 15 bp, Homo sapiens
aaagtcttaagtaat

SEQ ID NO: 996621 - DNA, 15 bp, Homo sapiens
taaagtcttaagtaa

SEQ ID NO: 996622 - DNA, 15 bp, Homo sapiens
ttaaagtcttaagta

SEQ ID NO: 996623 - DNA, 15 bp, Homo sapiens
tttaaagtcttaagt

SEQ ID NO: 996624 - DNA, 15 bp, Homo sapiens
ttttaaagtcttaag

SEQ ID NO: 996625 - DNA, 15 bp, Homo sapiens
tttttaaagtcttaa

SEQ ID NO: 996626 - DNA, 15 bp, Homo sapiens
atttttaaagtctta

SEQ ID NO: 996627 - DNA, 15 bp, Homo sapiens
tatttttaaagtctt

SEQ ID NO: 996628 - DNA, 15 bp, Homo sapiens
ctatttttaaagtct

SEQ ID NO: 996629 - DNA, 15 bp, Homo sapiens
actatttttaaagtc

SEQ ID NO: 996630 - DNA, 15 bp, Homo sapiens
gactatttttaaagt

SEQ ID NO: 996631 - DNA, 15 bp, Homo sapiens
agactatttttaaag

SEQ ID NO: 996632 - DNA, 15 bp, Homo sapiens
cagactatttttaaa

SEQ ID NO: 996633 - DNA, 15 bp, Homo sapiens
acagactatttttaa

SEQ ID NO: 996634 - DNA, 15 bp, Homo sapiens
aacagactattttta

SEQ ID NO: 996635 - DNA, 15 bp, Homo sapiens
caacagactattttt

SEQ ID NO: 996636 - DNA, 15 bp, Homo sapiens
gcaacagactatttt

SEQ ID NO: 996637 - DNA, 15 bp, Homo sapiens
agcaacagactattt

SEQ ID NO: 996638 - DNA, 15 bp, Homo sapiens
cagcaacagactatt

SEQ ID NO: 996639 - DNA, 15 bp, Homo sapiens
tcagcaacagactat

SEQ ID NO: 996640 - DNA, 15 bp, Homo sapiens
ctcagcaacagacta

SEQ ID NO: 996641 - DNA, 15 bp, Homo sapiens
gctcagcaacagact

SEQ ID NO: 996642 - DNA, 15 bp, Homo sapiens
ggctcagcaacagac

SEQ ID NO: 996643 - DNA, 15 bp, Homo sapiens
tggctcagcaacaga

SEQ ID NO: 996644 - DNA, 15 bp, Homo sapiens
ctggctcagcaacag

SEQ ID NO: 996645 - DNA, 15 bp, Homo sapiens
tctggctcagcaaca

SEQ ID NO: 996646 - DNA, 15 bp, Homo sapiens
ttctggctcagcaac

SEQ ID NO: 996647 - DNA, 15 bp, Homo sapiens
attctggctcagcaa

SEQ ID NO: 996648 - DNA, 15 bp, Homo sapiens
tattctggctcagca

SEQ ID NO: 996649 - DNA, 15 bp, Homo sapiens
ctattctggctcagc

SEQ ID NO: 996650 - DNA, 15 bp, Homo sapiens
actattctggctcag

SEQ ID NO: 996651 - DNA, 15 bp, Homo sapiens
aactattctggctca

SEQ ID NO: 996652 - DNA, 15 bp, Homo sapiens
aaactattctggctc

SEQ ID NO: 996653 - DNA, 15 bp, Homo sapiens
caaactattctggct

SEQ ID NO: 996654 - DNA, 15 bp, Homo sapiens
acaaactattctggc

SEQ ID NO: 996655 - DNA, 15 bp, Homo sapiens
aacaaactattctgg

SEQ ID NO: 996656 - DNA, 15 bp, Homo sapiens
taacaaactattctg

SEQ ID NO: 996657 - DNA, 15 bp, Homo sapiens
ttaacaaactattct

SEQ ID NO: 996658 - DNA, 15 bp, Homo sapiens
cttaacaaactattc

SEQ ID NO: 996659 - DNA, 15 bp, Homo sapiens
tcttaacaaactatt

SEQ ID NO: 996660 - DNA, 15 bp, Homo sapiens
ttcttaacaaactat

SEQ ID NO: 996661 - DNA, 15 bp, Homo sapiens
tttcttaacaaacta

SEQ ID NO: 996662 - DNA, 15 bp, Homo sapiens
gtttcttaacaaact

SEQ ID NO: 996663 - DNA, 15 bp, Homo sapiens
tgtttcttaacaaac

SEQ ID NO: 996664 - DNA, 15 bp, Homo sapiens
atgtttcttaacaaa

SEQ ID NO: 996665 - DNA, 15 bp, Homo sapiens
catgtttcttaacaa

SEQ ID NO: 996666 - DNA, 15 bp, Homo sapiens
gcatgtttcttaaca

SEQ ID NO: 996667 - DNA, 15 bp, Homo sapiens
tgcatgtttcttaac

SEQ ID NO: 996668 - DNA, 15 bp, Homo sapiens
atgcatgtttcttaa

SEQ ID NO: 996669 - DNA, 15 bp, Homo sapiens
gatgcatgtttctta

SEQ ID NO: 996670 - DNA, 15 bp, Homo sapiens
agatgcatgtttctt

SEQ ID NO: 996671 - DNA, 15 bp, Homo sapiens
aagatgcatgtttct

SEQ ID NO: 996672 - DNA, 15 bp, Homo sapiens
aaagatgcatgtttc

SEQ ID NO: 996673 - DNA, 15 bp, Homo sapiens
caaagatgcatgttt

SEQ ID NO: 996674 - DNA, 15 bp, Homo sapiens
tcaaagatgcatgtt

SEQ ID NO: 996675 - DNA, 15 bp, Homo sapiens
ctcaaagatgcatgt

SEQ ID NO: 996676 - DNA, 15 bp, Homo sapiens
actcaaagatgcatg

SEQ ID NO: 996677 - DNA, 15 bp, Homo sapiens
tactcaaagatgcat

SEQ ID NO: 996678 - DNA, 15 bp, Homo sapiens
ctactcaaagatgca

SEQ ID NO: 996679 - DNA, 15 bp, Homo sapiens
tctactcaaagatgc

SEQ ID NO: 996680 - DNA, 15 bp, Homo sapiens
ttctactcaaagatg

SEQ ID NO: 996681 - DNA, 15 bp, Homo sapiens
gttctactcaaagat

SEQ ID NO: 996682 - DNA, 15 bp, Homo sapiens
agttctactcaaaga

SEQ ID NO: 996683 - DNA, 15 bp, Homo sapiens
tagttctactcaaag

SEQ ID NO: 996684 - DNA, 15 bp, Homo sapiens
ttagttctactcaaa

SEQ ID NO: 996685 - DNA, 15 bp, Homo sapiens
tttagttctactcaa

SEQ ID NO: 996686 - DNA, 15 bp, Homo sapiens
ctttagttctactca

SEQ ID NO: 996687 - DNA, 15 bp, Homo sapiens
actttagttctactc

SEQ ID NO: 996688 - DNA, 15 bp, Homo sapiens
gactttagttctact

SEQ ID NO: 996689 - DNA, 15 bp, Homo sapiens
ggactttagttctac

SEQ ID NO: 996690 - DNA, 15 bp, Homo sapiens
gggactttagttcta

SEQ ID NO: 996691 - DNA, 15 bp, Homo sapiens
agggactttagttct

SEQ ID NO: 996692 - DNA, 15 bp, Homo sapiens
aagggactttagttc

SEQ ID NO: 996693 - DNA, 15 bp, Homo sapiens
caagggactttagtt

SEQ ID NO: 996694 - DNA, 15 bp, Homo sapiens
ccaagggactttagt

SEQ ID NO: 996695 - DNA, 15 bp, Homo sapiens
accaagggactttag

SEQ ID NO: 996696 - DNA, 15 bp, Homo sapiens
caccaagggacttta

SEQ ID NO: 996697 - DNA, 15 bp, Homo sapiens
acaccaagggacttt

SEQ ID NO: 996698 - DNA, 15 bp, Homo sapiens
aacaccaagggactt

SEQ ID NO: 996699 - DNA, 15 bp, Homo sapiens
caacaccaagggact

SEQ ID NO: 996700 - DNA, 15 bp, Homo sapiens
ccaacaccaagggac

SEQ ID NO: 996701 - DNA, 15 bp, Homo sapiens
tccaacaccaaggga

SEQ ID NO: 996702 - DNA, 15 bp, Homo sapiens
ttccaacaccaaggg

SEQ ID NO: 996703 - DNA, 15 bp, Homo sapiens
tttccaacaccaagg

SEQ ID NO: 996704 - DNA, 15 bp, Homo sapiens
ttttccaacaccaag

SEQ ID NO: 996705 - DNA, 15 bp, Homo sapiens
attttccaacaccaa

SEQ ID NO: 996706 - DNA, 15 bp, Homo sapiens
cattttccaacacca

SEQ ID NO: 996707 - DNA, 15 bp, Homo sapiens
gcattttccaacacc

SEQ ID NO: 996708 - DNA, 15 bp, Homo sapiens
ggcattttccaacac

SEQ ID NO: 996709 - DNA, 15 bp, Homo sapiens
gggcattttccaaca

SEQ ID NO: 996710 - DNA, 15 bp, Homo sapiens
agggcattttccaac

SEQ ID NO: 996711 - DNA, 15 bp, Homo sapiens
gagggcattttccaa

SEQ ID NO: 996712 - DNA, 15 bp, Homo sapiens
ggagggcattttcca

SEQ ID NO: 996713 - DNA, 15 bp, Homo sapiens
tggagggcattttcc

SEQ ID NO: 996714 - DNA, 15 bp, Homo sapiens
gtggagggcattttc

SEQ ID NO: 996715 - DNA, 15 bp, Homo sapiens
tgtggagggcatttt

SEQ ID NO: 996716 - DNA, 15 bp, Homo sapiens
gtgtggagggcattt

SEQ ID NO: 996717 - DNA, 15 bp, Homo sapiens
agtgtggagggcatt

SEQ ID NO: 996718 - DNA, 15 bp, Homo sapiens
gagtgtggagggcat

SEQ ID NO: 996719 - DNA, 15 bp, Homo sapiens
ggagtgtggagggca

SEQ ID NO: 996720 - DNA, 15 bp, Homo sapiens
aggagtgtggagggc

SEQ ID NO: 996721 - DNA, 15 bp, Homo sapiens
gaggagtgtggaggg

SEQ ID NO: 996722 - DNA, 15 bp, Homo sapiens
ggaggagtgtggagg

SEQ ID NO: 996723 - DNA, 15 bp, Homo sapiens
tggaggagtgtggag

SEQ ID NO: 996724 - DNA, 15 bp, Homo sapiens
ttggaggagtgtgga

SEQ ID NO: 996725 - DNA, 15 bp, Homo sapiens
tttggaggagtgtgg

SEQ ID NO: 996726 - DNA, 15 bp, Homo sapiens
ttttggaggagtgtg

SEQ ID NO: 996727 - DNA, 15 bp, Homo sapiens
tttttggaggagtgt

SEQ ID NO: 996728 - DNA, 15 bp, Homo sapiens
atttttggaggagtg

SEQ ID NO: 996729 - DNA, 15 bp, Homo sapiens
catttttggaggagt

SEQ ID NO: 996730 - DNA, 15 bp, Homo sapiens
ccatttttggaggag

SEQ ID NO: 996731 - DNA, 15 bp, Homo sapiens
tccatttttggagga

SEQ ID NO: 996732 - DNA, 15 bp, Homo sapiens
atccatttttggagg

SEQ ID NO: 996733 - DNA, 15 bp, Homo sapiens
aatccatttttggag

SEQ ID NO: 996734 - DNA, 15 bp, Homo sapiens
taatccatttttgga

SEQ ID NO: 996735 - DNA, 15 bp, Homo sapiens
ttaatccatttttgg

SEQ ID NO: 996736 - DNA, 15 bp, Homo sapiens
cttaatccatttttg

SEQ ID NO: 996737 - DNA, 15 bp, Homo sapiens
tcttaatccattttt

SEQ ID NO: 996738 - DNA, 15 bp, Homo sapiens
ttcttaatccatttt

SEQ ID NO: 996739 - DNA, 15 bp, Homo sapiens
attcttaatccattt

SEQ ID NO: 996740 - DNA, 15 bp, Homo sapiens
tattcttaatccatt

SEQ ID NO: 996741 - DNA, 15 bp, Homo sapiens
gtattcttaatccat

SEQ ID NO: 996742 - DNA, 15 bp, Homo sapiens
agtattcttaatcca

SEQ ID NO: 996743 - DNA, 15 bp, Homo sapiens
aagtattcttaatcc

SEQ ID NO: 996744 - DNA, 15 bp, Homo sapiens
gaagtattcttaatc

SEQ ID NO: 996745 - DNA, 15 bp, Homo sapiens
tgaagtattcttaat

SEQ ID NO: 996746 - DNA, 15 bp, Homo sapiens
atgaagtattcttaa

SEQ ID NO: 996747 - DNA, 15 bp, Homo sapiens
catgaagtattctta

SEQ ID NO: 996748 - DNA, 15 bp, Homo sapiens
ccatgaagtattctt

SEQ ID NO: 996749 - DNA, 15 bp, Homo sapiens
accatgaagtattct

SEQ ID NO: 996750 - DNA, 15 bp, Homo sapiens
taccatgaagtattc

SEQ ID NO: 996751 - DNA, 15 bp, Homo sapiens
ataccatgaagtatt

SEQ ID NO: 996752 - DNA, 15 bp, Homo sapiens
aataccatgaagtat

SEQ ID NO: 996753 - DNA, 15 bp, Homo sapiens
aaataccatgaagta

SEQ ID NO: 996754 - DNA, 15 bp, Homo sapiens
aaaataccatgaagt

SEQ ID NO: 996755 - DNA, 15 bp, Homo sapiens
gaaaataccatgaag

SEQ ID NO: 996756 - DNA, 15 bp, Homo sapiens
ggaaaataccatgaa

SEQ ID NO: 996757 - DNA, 15 bp, Homo sapiens
gggaaaataccatga

SEQ ID NO: 996758 - DNA, 15 bp, Homo sapiens
tgggaaaataccatg

SEQ ID NO: 996759 - DNA, 15 bp, Homo sapiens
atgggaaaataccat

SEQ ID NO: 996760 - DNA, 15 bp, Homo sapiens
tatgggaaaatacca

SEQ ID NO: 996761 - DNA, 15 bp, Homo sapiens
ctatgggaaaatacc

SEQ ID NO: 996762 - DNA, 15 bp, Homo sapiens
cctatgggaaaatac

SEQ ID NO: 996763 - DNA, 15 bp, Homo sapiens
acctatgggaaaata

SEQ ID NO: 996764 - DNA, 15 bp, Homo sapiens
tacctatgggaaaat

SEQ ID NO: 996765 - DNA, 15 bp, Homo sapiens
ctacctatgggaaaa

SEQ ID NO: 996766 - DNA, 15 bp, Homo sapiens
actacctatgggaaa

SEQ ID NO: 996767 - DNA, 15 bp, Homo sapiens
tactacctatgggaa

SEQ ID NO: 996768 - DNA, 15 bp, Homo sapiens
ttactacctatggga

SEQ ID NO: 996769 - DNA, 15 bp, Homo sapiens
attactacctatggg

SEQ ID NO: 996770 - DNA, 15 bp, Homo sapiens
cattactacctatgg

SEQ ID NO: 996771 - DNA, 15 bp, Homo sapiens
acattactacctatg

SEQ ID NO: 996772 - DNA, 15 bp, Homo sapiens
aacattactacctat

SEQ ID NO: 996773 - DNA, 15 bp, Homo sapiens
taacattactaccta

SEQ ID NO: 996774 - DNA, 15 bp, Homo sapiens
gtaacattactacct

SEQ ID NO: 996775 - DNA, 15 bp, Homo sapiens
ggtaacattactacc

SEQ ID NO: 996776 - DNA, 15 bp, Homo sapiens
tggtaacattactac

SEQ ID NO: 996777 - DNA, 15 bp, Homo sapiens
ctggtaacattacta

SEQ ID NO: 996778 - DNA, 15 bp, Homo sapiens
actggtaacattact

SEQ ID NO: 996779 - DNA, 15 bp, Homo sapiens
tactggtaacattac

SEQ ID NO: 996780 - DNA, 15 bp, Homo sapiens
ttactggtaacatta

SEQ ID NO: 996781 - DNA, 15 bp, Homo sapiens
cttactggtaacatt

SEQ ID NO: 996782 - DNA, 15 bp, Homo sapiens
acttactggtaacat

SEQ ID NO: 996783 - DNA, 15 bp, Homo sapiens
aacttactggtaaca

SEQ ID NO: 996784 - DNA, 15 bp, Homo sapiens
gaacttactggtaac

SEQ ID NO: 996785 - DNA, 15 bp, Homo sapiens
ggaacttactggtaa

SEQ ID NO: 996786 - DNA, 15 bp, Homo sapiens
cggaacttactggta

SEQ ID NO: 996787 - DNA, 15 bp, Homo sapiens
ccggaacttactggt

SEQ ID NO: 996788 - DNA, 15 bp, Homo sapiens
cccggaacttactgg

SEQ ID NO: 996789 - DNA, 15 bp, Homo sapiens
gcccggaacttactg

SEQ ID NO: 996790 - DNA, 15 bp, Homo sapiens
agcccggaacttact

SEQ ID NO: 996791 - DNA, 15 bp, Homo sapiens
aagcccggaacttac

SEQ ID NO: 996792 - DNA, 15 bp, Homo sapiens
gaagcccggaactta

SEQ ID NO: 996793 - DNA, 15 bp, Homo sapiens
tgaagcccggaactt

SEQ ID NO: 996794 - DNA, 15 bp, Homo sapiens
ttgaagcccggaact

SEQ ID NO: 996795 - DNA, 15 bp, Homo sapiens
tttgaagcccggaac

SEQ ID NO: 996796 - DNA, 15 bp, Homo sapiens
ttttgaagcccggaa

SEQ ID NO: 996797 - DNA, 15 bp, Homo sapiens
tttttgaagcccgga

SEQ ID NO: 996798 - DNA, 15 bp, Homo sapiens
ttttttgaagcccgg

SEQ ID NO: 996799 - DNA, 15 bp, Homo sapiens
attttttgaagcccg

SEQ ID NO: 996800 - DNA, 15 bp, Homo sapiens
cattttttgaagccc

SEQ ID NO: 996801 - DNA, 15 bp, Homo sapiens
tcattttttgaagcc

SEQ ID NO: 996802 - DNA, 15 bp, Homo sapiens
atcattttttgaagc

SEQ ID NO: 996803 - DNA, 15 bp, Homo sapiens
aatcattttttgaag

SEQ ID NO: 996804 - DNA, 15 bp, Homo sapiens
aaatcattttttgaa

SEQ ID NO: 996805 - DNA, 15 bp, Homo sapiens
gaaatcattttttga

SEQ ID NO: 996806 - DNA, 15 bp, Homo sapiens
agaaatcattttttg

SEQ ID NO: 996807 - DNA, 15 bp, Homo sapiens
tagaaatcatttttt

SEQ ID NO: 996808 - DNA, 15 bp, Homo sapiens
ttagaaatcattttt

SEQ ID NO: 996809 - DNA, 15 bp, Homo sapiens
cttagaaatcatttt

SEQ ID NO: 996810 - DNA, 15 bp, Homo sapiens
tcttagaaatcattt

SEQ ID NO: 996811 - DNA, 15 bp, Homo sapiens
ttcttagaaatcatt

SEQ ID NO: 996812 - DNA, 15 bp, Homo sapiens
cttcttagaaatcat

SEQ ID NO: 996813 - DNA, 15 bp, Homo sapiens
acttcttagaaatca

SEQ ID NO: 996814 - DNA, 15 bp, Homo sapiens
aacttcttagaaatc

SEQ ID NO: 996815 - DNA, 15 bp, Homo sapiens
aaacttcttagaaat

SEQ ID NO: 996816 - DNA, 15 bp, Homo sapiens
caaacttcttagaaa

SEQ ID NO: 996817 - DNA, 15 bp, Homo sapiens
tcaaacttcttagaa

SEQ ID NO: 996818 - DNA, 15 bp, Homo sapiens
ttcaaacttcttaga

SEQ ID NO: 996819 - DNA, 15 bp, Homo sapiens
cttcaaacttcttag

SEQ ID NO: 996820 - DNA, 15 bp, Homo sapiens
tcttcaaacttctta

SEQ ID NO: 996821 - DNA, 15 bp, Homo sapiens
atcttcaaacttctt

SEQ ID NO: 996822 - DNA, 15 bp, Homo sapiens
aatcttcaaacttct

SEQ ID NO: 996823 - DNA, 15 bp, Homo sapiens
gaatcttcaaacttc

SEQ ID NO: 996824 - DNA, 15 bp, Homo sapiens
tgaatcttcaaactt

SEQ ID NO: 996825 - DNA, 15 bp, Homo sapiens
ctgaatcttcaaact

SEQ ID NO: 996826 - DNA, 15 bp, Homo sapiens
actgaatcttcaaac

SEQ ID NO: 996827 - DNA, 15 bp, Homo sapiens
cactgaatcttcaaa

SEQ ID NO: 996828 - DNA, 15 bp, Homo sapiens
ccactgaatcttcaa

SEQ ID NO: 996829 - DNA, 15 bp, Homo sapiens
tccactgaatcttca

SEQ ID NO: 996830 - DNA, 15 bp, Homo sapiens
gtccactgaatcttc

SEQ ID NO: 996831 - DNA, 15 bp, Homo sapiens
tgtccactgaatctt

SEQ ID NO: 996832 - DNA, 15 bp, Homo sapiens
gtgtccactgaatct

SEQ ID NO: 996833 - DNA, 15 bp, Homo sapiens
tgtgtccactgaatc

SEQ ID NO: 996834 - DNA, 15 bp, Homo sapiens
gtgtgtccactgaat

SEQ ID NO: 996835 - DNA, 15 bp, Homo sapiens
agtgtgtccactgaa

SEQ ID NO: 996836 - DNA, 15 bp, Homo sapiens
aagtgtgtccactga

SEQ ID NO: 996837 - DNA, 15 bp, Homo sapiens
aaagtgtgtccactg

SEQ ID NO: 996838 - DNA, 15 bp, Homo sapiens
aaaagtgtgtccact

SEQ ID NO: 996839 - DNA, 15 bp, Homo sapiens
caaaagtgtgtccac

SEQ ID NO: 996840 - DNA, 15 bp, Homo sapiens
ccaaaagtgtgtcca

SEQ ID NO: 996841 - DNA, 15 bp, Homo sapiens
gccaaaagtgtgtcc

SEQ ID NO: 996842 - DNA, 15 bp, Homo sapiens
tgccaaaagtgtgtc

SEQ ID NO: 996843 - DNA, 15 bp, Homo sapiens
ttgccaaaagtgtgt

SEQ ID NO: 996844 - DNA, 15 bp, Homo sapiens
tttgccaaaagtgtg

SEQ ID NO: 996845 - DNA, 15 bp, Homo sapiens
ttttgccaaaagtgt

SEQ ID NO: 996846 - DNA, 15 bp, Homo sapiens
tttttgccaaaagtg

SEQ ID NO: 996847 - DNA, 15 bp, Homo sapiens
atttttgccaaaagt

SEQ ID NO: 996848 - DNA, 15 bp, Homo sapiens
aatttttgccaaaag

SEQ ID NO: 996849 - DNA, 15 bp, Homo sapiens
caatttttgccaaaa

SEQ ID NO: 996850 - DNA, 15 bp, Homo sapiens
gcaatttttgccaaa

SEQ ID NO: 996851 - DNA, 15 bp, Homo sapiens
agcaatttttgccaa

SEQ ID NO: 996852 - DNA, 15 bp, Homo sapiens
aagcaatttttgcca

SEQ ID NO: 996853 - DNA, 15 bp, Homo sapiens
taagcaatttttgcc

SEQ ID NO: 996854 - DNA, 15 bp, Homo sapiens
ataagcaatttttgc

SEQ ID NO: 996855 - DNA, 15 bp, Homo sapiens
tataagcaatttttg

SEQ ID NO: 996856 - DNA, 15 bp, Homo sapiens
atataagcaattttt

SEQ ID NO: 996857 - DNA, 15 bp, Homo sapiens
gatataagcaatttt

SEQ ID NO: 996858 - DNA, 15 bp, Homo sapiens
agatataagcaattt

SEQ ID NO: 996859 - DNA, 15 bp, Homo sapiens
cagatataagcaatt

SEQ ID NO: 996860 - DNA, 15 bp, Homo sapiens
tcagatataagcaat

SEQ ID NO: 996861 - DNA, 15 bp, Homo sapiens
gtcagatataagcaa

SEQ ID NO: 996862 - DNA, 15 bp, Homo sapiens
tgtcagatataagca

SEQ ID NO: 996863 - DNA, 15 bp, Homo sapiens
atgtcagatataagc

SEQ ID NO: 996864 - DNA, 15 bp, Homo sapiens
tatgtcagatataag

SEQ ID NO: 996865 - DNA, 15 bp, Homo sapiens
atatgtcagatataa

SEQ ID NO: 996866 - DNA, 15 bp, Homo sapiens
aatatgtcagatata

SEQ ID NO: 996867 - DNA, 15 bp, Homo sapiens
caatatgtcagatat

SEQ ID NO: 996868 - DNA, 15 bp, Homo sapiens
gcaatatgtcagata

SEQ ID NO: 996869 - DNA, 15 bp, Homo sapiens
tgcaatatgtcagat

SEQ ID NO: 996870 - DNA, 15 bp, Homo sapiens
atgcaatatgtcaga

SEQ ID NO: 996871 - DNA, 15 bp, Homo sapiens
aatgcaatatgtcag

SEQ ID NO: 996872 - DNA, 15 bp, Homo sapiens
taatgcaatatgtca

SEQ ID NO: 996873 - DNA, 15 bp, Homo sapiens
ataatgcaatatgtc

SEQ ID NO: 996874 - DNA, 15 bp, Homo sapiens
tataatgcaatatgt

SEQ ID NO: 996875 - DNA, 15 bp, Homo sapiens
ttataatgcaatatg

SEQ ID NO: 996876 - DNA, 15 bp, Homo sapiens
tttataatgcaatat

SEQ ID NO: 996877 - DNA, 15 bp, Homo sapiens
ttttataatgcaata

SEQ ID NO: 996878 - DNA, 15 bp, Homo sapiens
cttttataatgcaat

SEQ ID NO: 996879 - DNA, 15 bp, Homo sapiens
acttttataatgcaa

SEQ ID NO: 996880 - DNA, 15 bp, Homo sapiens
aacttttataatgca

SEQ ID NO: 996881 - DNA, 15 bp, Homo sapiens
aaacttttataatgc

SEQ ID NO: 996882 - DNA, 15 bp, Homo sapiens
aaaacttttataatg

SEQ ID NO: 996883 - DNA, 15 bp, Homo sapiens
caaaacttttataat

SEQ ID NO: 996884 - DNA, 15 bp, Homo sapiens
tcaaaacttttataa

SEQ ID NO: 996885 - DNA, 15 bp, Homo sapiens
atcaaaacttttata

SEQ ID NO: 996886 - DNA, 15 bp, Homo sapiens
aatcaaaacttttat

SEQ ID NO: 996887 - DNA, 15 bp, Homo sapiens
taatcaaaactttta

SEQ ID NO: 996888 - DNA, 15 bp, Homo sapiens
ctaatcaaaactttt

SEQ ID NO: 996889 - DNA, 15 bp, Homo sapiens
actaatcaaaacttt

SEQ ID NO: 996890 - DNA, 15 bp, Homo sapiens
cactaatcaaaactt

SEQ ID NO: 996891 - DNA, 15 bp, Homo sapiens
ccactaatcaaaact

SEQ ID NO: 996892 - DNA, 15 bp, Homo sapiens
gccactaatcaaaac

SEQ ID NO: 996893 - DNA, 15 bp, Homo sapiens
agccactaatcaaaa

SEQ ID NO: 996894 - DNA, 15 bp, Homo sapiens
aagccactaatcaaa

SEQ ID NO: 996895 - DNA, 15 bp, Homo sapiens
aaagccactaatcaa

SEQ ID NO: 996896 - DNA, 15 bp, Homo sapiens
gaaagccactaatca

SEQ ID NO: 996897 - DNA, 15 bp, Homo sapiens
agaaagccactaatc

SEQ ID NO: 996898 - DNA, 15 bp, Homo sapiens
aagaaagccactaat

SEQ ID NO: 996899 - DNA, 15 bp, Homo sapiens
aaagaaagccactaa

SEQ ID NO: 996900 - DNA, 15 bp, Homo sapiens
aaaagaaagccacta

SEQ ID NO: 996901 - DNA, 15 bp, Homo sapiens
aaaaagaaagccact

SEQ ID NO: 996902 - DNA, 15 bp, Homo sapiens
aaaaaagaaagccac

SEQ ID NO: 996903 - DNA, 15 bp, Homo sapiens
ttacaaaaaaaaaaa

SEQ ID NO: 996904 - DNA, 15 bp, Homo sapiens
gttacaaaaaaaaaa

SEQ ID NO: 996905 - DNA, 15 bp, Homo sapiens
tgttacaaaaaaaaa

SEQ ID NO: 996906 - DNA, 15 bp, Homo sapiens
ttgttacaaaaaaaa

SEQ ID NO: 996907 - DNA, 15 bp, Homo sapiens
cttgttacaaaaaaa

SEQ ID NO: 996908 - DNA, 15 bp, Homo sapiens
acttgttacaaaaaa

SEQ ID NO: 996909 - DNA, 15 bp, Homo sapiens
tacttgttacaaaaa

SEQ ID NO: 996910 - DNA, 15 bp, Homo sapiens
ttacttgttacaaaa

SEQ ID NO: 996911 - DNA, 15 bp, Homo sapiens
tttacttgttacaaa

SEQ ID NO: 996912 - DNA, 15 bp, Homo sapiens
ctttacttgttacaa

SEQ ID NO: 996913 - DNA, 15 bp, Homo sapiens
tctttacttgttaca

SEQ ID NO: 996914 - DNA, 15 bp, Homo sapiens
ctctttacttgttac

SEQ ID NO: 996915 - DNA, 15 bp, Homo sapiens
tctctttacttgtta

SEQ ID NO: 996916 - DNA, 15 bp, Homo sapiens
ttctctttacttgtt

SEQ ID NO: 996917 - DNA, 15 bp, Homo sapiens
tttctctttacttgt

SEQ ID NO: 996918 - DNA, 15 bp, Homo sapiens
ctttctctttacttg

SEQ ID NO: 996919 - DNA, 15 bp, Homo sapiens
tctttctctttactt

SEQ ID NO: 996920 - DNA, 15 bp, Homo sapiens
ttctttctctttact

SEQ ID NO: 996921 - DNA, 15 bp, Homo sapiens
tttctttctctttac

SEQ ID NO: 996922 - DNA, 15 bp, Homo sapiens
ttttctttctcttta

SEQ ID NO: 996923 - DNA, 15 bp, Homo sapiens
gttttctttctcttt

SEQ ID NO: 996924 - DNA, 15 bp, Homo sapiens
tgttttctttctctt

SEQ ID NO: 996925 - DNA, 15 bp, Homo sapiens
atgttttctttctct

SEQ ID NO: 996926 - DNA, 15 bp, Homo sapiens
catgttttctttctc

SEQ ID NO: 996927 - DNA, 15 bp, Homo sapiens
ccatgttttctttct

SEQ ID NO: 996928 - DNA, 15 bp, Homo sapiens
tccatgttttctttc

SEQ ID NO: 996929 - DNA, 15 bp, Homo sapiens
atccatgttttcttt

SEQ ID NO: 996930 - DNA, 15 bp, Homo sapiens
gatccatgttttctt

SEQ ID NO: 996931 - DNA, 15 bp, Homo sapiens
agatccatgttttct

SEQ ID NO: 996932 - DNA, 15 bp, Homo sapiens
cagatccatgttttc

SEQ ID NO: 996933 - DNA, 15 bp, Homo sapiens
gcagatccatgtttt

SEQ ID NO: 996934 - DNA, 15 bp, Homo sapiens
ggcagatccatgttt

SEQ ID NO: 996935 - DNA, 15 bp, Homo sapiens
aggcagatccatgtt

SEQ ID NO: 996936 - DNA, 15 bp, Homo sapiens
taggcagatccatgt

SEQ ID NO: 996937 - DNA, 15 bp, Homo sapiens
ctaggcagatccatg

SEQ ID NO: 996938 - DNA, 15 bp, Homo sapiens
cctaggcagatccat

SEQ ID NO: 996939 - DNA, 15 bp, Homo sapiens
tcctaggcagatcca

SEQ ID NO: 996940 - DNA, 15 bp, Homo sapiens
ttcctaggcagatcc

SEQ ID NO: 996941 - DNA, 15 bp, Homo sapiens
cttcctaggcagatc

SEQ ID NO: 996942 - DNA, 15 bp, Homo sapiens
acttcctaggcagat

SEQ ID NO: 996943 - DNA, 15 bp, Homo sapiens
gacttcctaggcaga

SEQ ID NO: 996944 - DNA, 15 bp, Homo sapiens
tgacttcctaggcag

SEQ ID NO: 996945 - DNA, 15 bp, Homo sapiens
gtgacttcctaggca

SEQ ID NO: 996946 - DNA, 15 bp, Homo sapiens
ggtgacttcctaggc

SEQ ID NO: 996947 - DNA, 15 bp, Homo sapiens
aggtgacttcctagg

SEQ ID NO: 996948 - DNA, 15 bp, Homo sapiens
gaggtgacttcctag

SEQ ID NO: 996949 - DNA, 15 bp, Homo sapiens
agaggtgacttccta

SEQ ID NO: 996950 - DNA, 15 bp, Homo sapiens
cagaggtgacttcct

SEQ ID NO: 996951 - DNA, 15 bp, Homo sapiens
gcagaggtgacttcc

SEQ ID NO: 996952 - DNA, 15 bp, Homo sapiens
ggcagaggtgacttc

SEQ ID NO: 996953 - DNA, 15 bp, Homo sapiens
aggcagaggtgactt

SEQ ID NO: 996954 - DNA, 15 bp, Homo sapiens
caggcagaggtgact

SEQ ID NO: 996955 - DNA, 15 bp, Homo sapiens
tcaggcagaggtgac

SEQ ID NO: 996956 - DNA, 15 bp, Homo sapiens
ctcaggcagaggtga

SEQ ID NO: 996957 - DNA, 15 bp, Homo sapiens
actcaggcagaggtg

SEQ ID NO: 996958 - DNA, 15 bp, Homo sapiens
gactcaggcagaggt

SEQ ID NO: 996959 - DNA, 15 bp, Homo sapiens
agactcaggcagagg

SEQ ID NO: 996960 - DNA, 15 bp, Homo sapiens
cagactcaggcagag

SEQ ID NO: 996961 - DNA, 15 bp, Homo sapiens
gcagactcaggcaga

SEQ ID NO: 996962 - DNA, 15 bp, Homo sapiens
agcagactcaggcag

SEQ ID NO: 996963 - DNA, 15 bp, Homo sapiens
tagcagactcaggca

SEQ ID NO: 996964 - DNA, 15 bp, Homo sapiens
gtagcagactcaggc

SEQ ID NO: 996965 - DNA, 15 bp, Homo sapiens
agtagcagactcagg

SEQ ID NO: 996966 - DNA, 15 bp, Homo sapiens
aagtagcagactcag

SEQ ID NO: 996967 - DNA, 15 bp, Homo sapiens
caagtagcagactca

SEQ ID NO: 996968 - DNA, 15 bp, Homo sapiens
gcaagtagcagactc

SEQ ID NO: 996969 - DNA, 15 bp, Homo sapiens
tgcaagtagcagact

SEQ ID NO: 996970 - DNA, 15 bp, Homo sapiens
ctgcaagtagcagac

SEQ ID NO: 996971 - DNA, 15 bp, Homo sapiens
cctgcaagtagcaga

SEQ ID NO: 996972 - DNA, 15 bp, Homo sapiens
tcctgcaagtagcag

SEQ ID NO: 996973 - DNA, 15 bp, Homo sapiens
atcctgcaagtagca

SEQ ID NO: 996974 - DNA, 15 bp, Homo sapiens
aatcctgcaagtagc

SEQ ID NO: 996975 - DNA, 15 bp, Homo sapiens
caatcctgcaagtag

SEQ ID NO: 996976 - DNA, 15 bp, Homo sapiens
ccaatcctgcaagta

SEQ ID NO: 996977 - DNA, 15 bp, Homo sapiens
tccaatcctgcaagt

SEQ ID NO: 996978 - DNA, 15 bp, Homo sapiens
ctccaatcctgcaag

SEQ ID NO: 996979 - DNA, 15 bp, Homo sapiens
gctccaatcctgcaa

SEQ ID NO: 996980 - DNA, 15 bp, Homo sapiens
agctccaatcctgca

SEQ ID NO: 996981 - DNA, 15 bp, Homo sapiens
aagctccaatcctgc

SEQ ID NO: 996982 - DNA, 15 bp, Homo sapiens
aaagctccaatcctg

SEQ ID NO: 996983 - DNA, 15 bp, Homo sapiens
aaaagctccaatcct

SEQ ID NO: 996984 - DNA, 15 bp, Homo sapiens
caaaagctccaatcc

SEQ ID NO: 996985 - DNA, 15 bp, Homo sapiens
gcaaaagctccaatc

SEQ ID NO: 996986 - DNA, 15 bp, Homo sapiens
agcaaaagctccaat

SEQ ID NO: 996987 - DNA, 15 bp, Homo sapiens
cagcaaaagctccaa

SEQ ID NO: 996988 - DNA, 15 bp, Homo sapiens
gcagcaaaagctcca

SEQ ID NO: 996989 - DNA, 15 bp, Homo sapiens
tgcagcaaaagctcc

SEQ ID NO: 996990 - DNA, 15 bp, Homo sapiens
ctgcagcaaaagctc

SEQ ID NO: 996991 - DNA, 15 bp, Homo sapiens
tctgcagcaaaagct

SEQ ID NO: 996992 - DNA, 15 bp, Homo sapiens
atctgcagcaaaagc

SEQ ID NO: 996993 - DNA, 15 bp, Homo sapiens
aatctgcagcaaaag

SEQ ID NO: 996994 - DNA, 15 bp, Homo sapiens
taatctgcagcaaaa

SEQ ID NO: 996995 - DNA, 15 bp, Homo sapiens
gtaatctgcagcaaa

SEQ ID NO: 996996 - DNA, 15 bp, Homo sapiens
tgtaatctgcagcaa

SEQ ID NO: 996997 - DNA, 15 bp, Homo sapiens
ctgtaatctgcagca

SEQ ID NO: 996998 - DNA, 15 bp, Homo sapiens
gctgtaatctgcagc

SEQ ID NO: 996999 - DNA, 15 bp, Homo sapiens
agctgtaatctgcag

SEQ ID NO: 997000 - DNA, 15 bp, Homo sapiens
aagctgtaatctgca

SEQ ID NO: 997001 - DNA, 15 bp, Homo sapiens
aaagctgtaatctgc

SEQ ID NO: 997002 - DNA, 15 bp, Homo sapiens
caaagctgtaatctg

SEQ ID NO: 997003 - DNA, 15 bp, Homo sapiens
tcaaagctgtaatct

SEQ ID NO: 997004 - DNA, 15 bp, Homo sapiens
ttcaaagctgtaatc

SEQ ID NO: 997005 - DNA, 15 bp, Homo sapiens
cttcaaagctgtaat

SEQ ID NO: 997006 - DNA, 15 bp, Homo sapiens
acttcaaagctgtaa

SEQ ID NO: 997007 - DNA, 15 bp, Homo sapiens
gacttcaaagctgta

SEQ ID NO: 997008 - DNA, 15 bp, Homo sapiens
tgacttcaaagctgt

SEQ ID NO: 997009 - DNA, 15 bp, Homo sapiens
gtgacttcaaagctg

SEQ ID NO: 997010 - DNA, 15 bp, Homo sapiens
agtgacttcaaagct

SEQ ID NO: 997011 - DNA, 15 bp, Homo sapiens
aagtgacttcaaagc

SEQ ID NO: 997012 - DNA, 15 bp, Homo sapiens
aaagtgacttcaaag

SEQ ID NO: 997013 - DNA, 15 bp, Homo sapiens
taaagtgacttcaaa

SEQ ID NO: 997014 - DNA, 15 bp, Homo sapiens
gtaaagtgacttcaa

SEQ ID NO: 997015 - DNA, 15 bp, Homo sapiens
ccctccttgcatagt

SEQ ID NO: 997016 - DNA, 15 bp, Homo sapiens
accctccttgcatag

SEQ ID NO: 997017 - DNA, 15 bp, Homo sapiens
taccctccttgcata

SEQ ID NO: 997018 - DNA, 15 bp, Homo sapiens
ttaccctccttgcat

SEQ ID NO: 997019 - DNA, 15 bp, Homo sapiens
attaccctccttgca

SEQ ID NO: 997020 - DNA, 15 bp, Homo sapiens
cattaccctccttgc

SEQ ID NO: 997021 - DNA, 15 bp, Homo sapiens
tcattaccctccttg

SEQ ID NO: 997022 - DNA, 15 bp, Homo sapiens
atcattaccctcctt

SEQ ID NO: 997023 - DNA, 15 bp, Homo sapiens
catcattaccctcct

SEQ ID NO: 997024 - DNA, 15 bp, Homo sapiens
acatcattaccctcc

SEQ ID NO: 997025 - DNA, 15 bp, Homo sapiens
aacatcattaccctc

SEQ ID NO: 997026 - DNA, 15 bp, Homo sapiens
aaacatcattaccct

SEQ ID NO: 997027 - DNA, 15 bp, Homo sapiens
aaaacatcattaccc

SEQ ID NO: 997028 - DNA, 15 bp, Homo sapiens
gaaaacatcattacc

SEQ ID NO: 997029 - DNA, 15 bp, Homo sapiens
agaaaacatcattac

SEQ ID NO: 997030 - DNA, 15 bp, Homo sapiens
aagaaaacatcatta

SEQ ID NO: 997031 - DNA, 15 bp, Homo sapiens
aaagaaaacatcatt

SEQ ID NO: 997032 - DNA, 15 bp, Homo sapiens
taaagaaaacatcat

SEQ ID NO: 997033 - DNA, 15 bp, Homo sapiens
gtaaagaaaacatca

SEQ ID NO: 997034 - DNA, 15 bp, Homo sapiens
ggtaaagaaaacatc

SEQ ID NO: 997035 - DNA, 15 bp, Homo sapiens
gggtaaagaaaacat

SEQ ID NO: 997036 - DNA, 15 bp, Homo sapiens
cgggtaaagaaaaca

SEQ ID NO: 997037 - DNA, 15 bp, Homo sapiens
gcgggtaaagaaaac

SEQ ID NO: 997038 - DNA, 15 bp, Homo sapiens
agcgggtaaagaaaa

SEQ ID NO: 997039 - DNA, 15 bp, Homo sapiens
aagcgggtaaagaaa

SEQ ID NO: 997040 - DNA, 15 bp, Homo sapiens
aaagcgggtaaagaa

SEQ ID NO: 997041 - DNA, 15 bp, Homo sapiens
aaaagcgggtaaaga

SEQ ID NO: 997042 - DNA, 15 bp, Homo sapiens
gaaaagcgggtaaag

SEQ ID NO: 997043 - DNA, 15 bp, Homo sapiens
agaaaagcgggtaaa

SEQ ID NO: 997044 - DNA, 15 bp, Homo sapiens
cagaaaagcgggtaa

SEQ ID NO: 997045 - DNA, 15 bp, Homo sapiens
gcagaaaagcgggta

SEQ ID NO: 997046 - DNA, 15 bp, Homo sapiens
agcagaaaagcgggt

SEQ ID NO: 997047 - DNA, 15 bp, Homo sapiens
gagcagaaaagcggg

SEQ ID NO: 997048 - DNA, 15 bp, Homo sapiens
tgagcagaaaagcgg

SEQ ID NO: 997049 - DNA, 15 bp, Homo sapiens
gtgagcagaaaagcg

SEQ ID NO: 997050 - DNA, 15 bp, Homo sapiens
tgtgagcagaaaagc

SEQ ID NO: 997051 - DNA, 15 bp, Homo sapiens
gtgtgagcagaaaag

SEQ ID NO: 997052 - DNA, 15 bp, Homo sapiens
ggtgtgagcagaaaa

SEQ ID NO: 997053 - DNA, 15 bp, Homo sapiens
gggtgtgagcagaaa

SEQ ID NO: 997054 - DNA, 15 bp, Homo sapiens
agggtgtgagcagaa

SEQ ID NO: 997055 - DNA, 15 bp, Homo sapiens
gagggtgtgagcaga

SEQ ID NO: 997056 - DNA, 15 bp, Homo sapiens
ggagggtgtgagcag

SEQ ID NO: 997057 - DNA, 15 bp, Homo sapiens
gggagggtgtgagca

SEQ ID NO: 997058 - DNA, 15 bp, Homo sapiens
ggggagggtgtgagc

SEQ ID NO: 997059 - DNA, 15 bp, Homo sapiens
aggggagggtgtgag

SEQ ID NO: 997060 - DNA, 15 bp, Homo sapiens
aaggggagggtgtga

SEQ ID NO: 997061 - DNA, 15 bp, Homo sapiens
gaaggggagggtgtg

SEQ ID NO: 997062 - DNA, 15 bp, Homo sapiens
ggaaggggagggtgt

SEQ ID NO: 997063 - DNA, 15 bp, Homo sapiens
tggaaggggagggtg

SEQ ID NO: 997064 - DNA, 15 bp, Homo sapiens
gtggaaggggagggt

SEQ ID NO: 997065 - DNA, 15 bp, Homo sapiens
tgtggaaggggaggg

SEQ ID NO: 997066 - DNA, 15 bp, Homo sapiens
gtgtggaaggggagg

SEQ ID NO: 997067 - DNA, 15 bp, Homo sapiens
agtgtggaaggggag

SEQ ID NO: 997068 - DNA, 15 bp, Homo sapiens
tagtgtggaagggga

SEQ ID NO: 997069 - DNA, 15 bp, Homo sapiens
atagtgtggaagggg

SEQ ID NO: 997070 - DNA, 15 bp, Homo sapiens
tatagtgtggaaggg

SEQ ID NO: 997071 - DNA, 15 bp, Homo sapiens
atatagtgtggaagg

SEQ ID NO: 997072 - DNA, 15 bp, Homo sapiens
aatatagtgtggaag

SEQ ID NO: 997073 - DNA, 15 bp, Homo sapiens
aaatatagtgtggaa

SEQ ID NO: 997074 - DNA, 15 bp, Homo sapiens
aaaatatagtgtgga

SEQ ID NO: 997075 - DNA, 15 bp, Homo sapiens
aaaaatatagtgtgg

SEQ ID NO: 997076 - DNA, 15 bp, Homo sapiens
aaaaaatatagtgtg

SEQ ID NO: 997077 - DNA, 15 bp, Homo sapiens
aaaaaaatatagtgt

SEQ ID NO: 997078 - DNA, 15 bp, Homo sapiens
taaaaaaatatagtg

SEQ ID NO: 997079 - DNA, 15 bp, Homo sapiens
ttaaaaaaatatagt

SEQ ID NO: 997080 - DNA, 15 bp, Homo sapiens
tttaaaaaaatatag

SEQ ID NO: 997081 - DNA, 15 bp, Homo sapiens
tttttaaaaaaatat

SEQ ID NO: 997082 - DNA, 15 bp, Homo sapiens
ctttttaaaaaaata

SEQ ID NO: 997083 - DNA, 15 bp, Homo sapiens
tctttttaaaaaaat

SEQ ID NO: 997084 - DNA, 15 bp, Homo sapiens
gtctttttaaaaaaa

SEQ ID NO: 997085 - DNA, 15 bp, Homo sapiens
tgtctttttaaaaaa

SEQ ID NO: 997086 - DNA, 15 bp, Homo sapiens
ctgtctttttaaaaa

SEQ ID NO: 997087 - DNA, 15 bp, Homo sapiens
actgtctttttaaaa

SEQ ID NO: 997088 - DNA, 15 bp, Homo sapiens
cactgtctttttaaa

SEQ ID NO: 997089 - DNA, 15 bp, Homo sapiens
tcactgtctttttaa

SEQ ID NO: 997090 - DNA, 15 bp, Homo sapiens
gtcactgtcttttta

SEQ ID NO: 997091 - DNA, 15 bp, Homo sapiens
agtcactgtcttttt

SEQ ID NO: 997092 - DNA, 15 bp, Homo sapiens
aagtcactgtctttt

SEQ ID NO: 997093 - DNA, 15 bp, Homo sapiens
gaagtcactgtcttt

SEQ ID NO: 997094 - DNA, 15 bp, Homo sapiens
agaagtcactgtctt

SEQ ID NO: 997095 - DNA, 15 bp, Homo sapiens
aagaagtcactgtct

SEQ ID NO: 997096 - DNA, 15 bp, Homo sapiens
caagaagtcactgtc

SEQ ID NO: 997097 - DNA, 15 bp, Homo sapiens
acaagaagtcactgt

SEQ ID NO: 997098 - DNA, 15 bp, Homo sapiens
tacaagaagtcactg

SEQ ID NO: 997099 - DNA, 15 bp, Homo sapiens
ttacaagaagtcact

SEQ ID NO: 997100 - DNA, 15 bp, Homo sapiens
gttacaagaagtcac

SEQ ID NO: 997101 - DNA, 15 bp, Homo sapiens
agttacaagaagtca

SEQ ID NO: 997102 - DNA, 15 bp, Homo sapiens
tagttacaagaagtc

SEQ ID NO: 997103 - DNA, 15 bp, Homo sapiens
gtagttacaagaagt

SEQ ID NO: 997104 - DNA, 15 bp, Homo sapiens
tgtagttacaagaag

SEQ ID NO: 997105 - DNA, 15 bp, Homo sapiens
atgtagttacaagaa

SEQ ID NO: 997106 - DNA, 15 bp, Homo sapiens
catgtagttacaaga

SEQ ID NO: 997107 - DNA, 15 bp, Homo sapiens
gcatgtagttacaag

SEQ ID NO: 997108 - DNA, 15 bp, Homo sapiens
agcatgtagttacaa

SEQ ID NO: 997109 - DNA, 15 bp, Homo sapiens
tagcatgtagttaca

SEQ ID NO: 997110 - DNA, 15 bp, Homo sapiens
ttagcatgtagttac

SEQ ID NO: 997111 - DNA, 15 bp, Homo sapiens
attagcatgtagtta

SEQ ID NO: 997112 - DNA, 15 bp, Homo sapiens
aattagcatgtagtt

SEQ ID NO: 997113 - DNA, 15 bp, Homo sapiens
gaattagcatgtagt

SEQ ID NO: 997114 - DNA, 15 bp, Homo sapiens
agaattagcatgtag

SEQ ID NO: 997115 - DNA, 15 bp, Homo sapiens
cagaattagcatgta

SEQ ID NO: 997116 - DNA, 15 bp, Homo sapiens
ccagaattagcatgt

SEQ ID NO: 997117 - DNA, 15 bp, Homo sapiens
tccagaattagcatg

SEQ ID NO: 997118 - DNA, 15 bp, Homo sapiens
ttccagaattagcat

SEQ ID NO: 997119 - DNA, 15 bp, Homo sapiens
tttccagaattagca

SEQ ID NO: 997120 - DNA, 15 bp, Homo sapiens
atttccagaattagc

SEQ ID NO: 997121 - DNA, 15 bp, Homo sapiens
catttccagaattag

SEQ ID NO: 997122 - DNA, 15 bp, Homo sapiens
tcatttccagaatta

SEQ ID NO: 997123 - DNA, 15 bp, Homo sapiens
atcatttccagaatt

SEQ ID NO: 997124 - DNA, 15 bp, Homo sapiens
aatcatttccagaat

SEQ ID NO: 997125 - DNA, 15 bp, Homo sapiens
taatcatttccagaa

SEQ ID NO: 997126 - DNA, 15 bp, Homo sapiens
gtaatcatttccaga

SEQ ID NO: 997127 - DNA, 15 bp, Homo sapiens
agtaatcatttccag

SEQ ID NO: 997128 - DNA, 15 bp, Homo sapiens
cagtaatcatttcca

SEQ ID NO: 997129 - DNA, 15 bp, Homo sapiens
acagtaatcatttcc

SEQ ID NO: 997130 - DNA, 15 bp, Homo sapiens
aacagtaatcatttc

SEQ ID NO: 997131 - DNA, 15 bp, Homo sapiens
caacagtaatcattt

SEQ ID NO: 997132 - DNA, 15 bp, Homo sapiens
gcaacagtaatcatt

SEQ ID NO: 997133 - DNA, 15 bp, Homo sapiens
ggcaacagtaatcat

SEQ ID NO: 997134 - DNA, 15 bp, Homo sapiens
aggcaacagtaatca

SEQ ID NO: 997135 - DNA, 15 bp, Homo sapiens
taggcaacagtaatc

SEQ ID NO: 997136 - DNA, 15 bp, Homo sapiens
ctaggcaacagtaat

SEQ ID NO: 997137 - DNA, 15 bp, Homo sapiens
actaggcaacagtaa

SEQ ID NO: 997138 - DNA, 15 bp, Homo sapiens
aactaggcaacagta

SEQ ID NO: 997139 - DNA, 15 bp, Homo sapiens
caactaggcaacagt

SEQ ID NO: 997140 - DNA, 15 bp, Homo sapiens
acaactaggcaacag

SEQ ID NO: 997141 - DNA, 15 bp, Homo sapiens
cacaactaggcaaca

SEQ ID NO: 997142 - DNA, 15 bp, Homo sapiens
tcacaactaggcaac

SEQ ID NO: 997143 - DNA, 15 bp, Homo sapiens
gtcacaactaggcaa

SEQ ID NO: 997144 - DNA, 15 bp, Homo sapiens
ggtcacaactaggca

SEQ ID NO: 997145 - DNA, 15 bp, Homo sapiens
aggtcacaactaggc

SEQ ID NO: 997146 - DNA, 15 bp, Homo sapiens
aaggtcacaactagg

SEQ ID NO: 997147 - DNA, 15 bp, Homo sapiens
aaaggtcacaactag

SEQ ID NO: 997148 - DNA, 15 bp, Homo sapiens
gaaaggtcacaacta

SEQ ID NO: 997149 - DNA, 15 bp, Homo sapiens
tgaaaggtcacaact

SEQ ID NO: 997150 - DNA, 15 bp, Homo sapiens
atgaaaggtcacaac

SEQ ID NO: 997151 - DNA, 15 bp, Homo sapiens
aatgaaaggtcacaa

SEQ ID NO: 997152 - DNA, 15 bp, Homo sapiens
caatgaaaggtcaca

SEQ ID NO: 997153 - DNA, 15 bp, Homo sapiens
acaatgaaaggtcac

SEQ ID NO: 997154 - DNA, 15 bp, Homo sapiens
aacaatgaaaggtca

SEQ ID NO: 997155 - DNA, 15 bp, Homo sapiens
aaacaatgaaaggtc

SEQ ID NO: 997156 - DNA, 15 bp, Homo sapiens
gaaacaatgaaaggt

SEQ ID NO: 997157 - DNA, 15 bp, Homo sapiens
agaaacaatgaaagg

SEQ ID NO: 997158 - DNA, 15 bp, Homo sapiens
gagaaacaatgaaag

SEQ ID NO: 997159 - DNA, 15 bp, Homo sapiens
ggagaaacaatgaaa

SEQ ID NO: 997160 - DNA, 15 bp, Homo sapiens
aggagaaacaatgaa

SEQ ID NO: 997161 - DNA, 15 bp, Homo sapiens
aaggagaaacaatga

SEQ ID NO: 997162 - DNA, 15 bp, Homo sapiens
aaaggagaaacaatg

SEQ ID NO: 997163 - DNA, 15 bp, Homo sapiens
gaaaggagaaacaat

SEQ ID NO: 997164 - DNA, 15 bp, Homo sapiens
ggaaaggagaaacaa

SEQ ID NO: 997165 - DNA, 15 bp, Homo sapiens
gggaaaggagaaaca

SEQ ID NO: 997166 - DNA, 15 bp, Homo sapiens
tgggaaaggagaaac

SEQ ID NO: 997167 - DNA, 15 bp, Homo sapiens
atgggaaaggagaaa

SEQ ID NO: 997168 - DNA, 15 bp, Homo sapiens
aatgggaaaggagaa

SEQ ID NO: 997169 - DNA, 15 bp, Homo sapiens
aaatgggaaaggaga

SEQ ID NO: 997170 - DNA, 15 bp, Homo sapiens
aaaatgggaaaggag

SEQ ID NO: 997171 - DNA, 15 bp, Homo sapiens
aaaaatgggaaagga

SEQ ID NO: 997172 - DNA, 15 bp, Homo sapiens
gaaaaatgggaaagg

SEQ ID NO: 997173 - DNA, 15 bp, Homo sapiens
tgaaaaatgggaaag

SEQ ID NO: 997174 - DNA, 15 bp, Homo sapiens
atgaaaaatgggaaa

SEQ ID NO: 997175 - DNA, 15 bp, Homo sapiens
aatgaaaaatgggaa

SEQ ID NO: 997176 - DNA, 15 bp, Homo sapiens
aaatgaaaaatggga

SEQ ID NO: 997177 - DNA, 15 bp, Homo sapiens
caaatgaaaaatggg

SEQ ID NO: 997178 - DNA, 15 bp, Homo sapiens
acaaatgaaaaatgg

SEQ ID NO: 997179 - DNA, 15 bp, Homo sapiens
aacaaatgaaaaatg

SEQ ID NO: 997180 - DNA, 15 bp, Homo sapiens
aaacaaatgaaaaat

SEQ ID NO: 997181 - DNA, 15 bp, Homo sapiens
aaaacaaatgaaaaa

SEQ ID NO: 997182 - DNA, 15 bp, Homo sapiens
taaaacaaatgaaaa

SEQ ID NO: 997183 - DNA, 15 bp, Homo sapiens
ataaaacaaatgaaa

SEQ ID NO: 997184 - DNA, 15 bp, Homo sapiens
cataaaacaaatgaa

SEQ ID NO: 997185 - DNA, 15 bp, Homo sapiens
tcataaaacaaatga

SEQ ID NO: 997186 - DNA, 15 bp, Homo sapiens
gtcataaaacaaatg

SEQ ID NO: 997187 - DNA, 15 bp, Homo sapiens
tagtcataaaacaaa

SEQ ID NO: 997188 - DNA, 15 bp, Homo sapiens
ttagtcataaaacaa

SEQ ID NO: 997189 - DNA, 15 bp, Homo sapiens
cttagtcataaaaca

SEQ ID NO: 997190 - DNA, 15 bp, Homo sapiens
acttagtcataaaac

SEQ ID NO: 997191 - DNA, 15 bp, Homo sapiens
tacttagtcataaaa

SEQ ID NO: 997192 - DNA, 15 bp, Homo sapiens
ttacttagtcataaa

SEQ ID NO: 997193 - DNA, 15 bp, Homo sapiens
attacttagtcataa

SEQ ID NO: 997194 - DNA, 15 bp, Homo sapiens
cattacttagtcata

SEQ ID NO: 997195 - DNA, 15 bp, Homo sapiens
ccattacttagtcat

SEQ ID NO: 997196 - DNA, 15 bp, Homo sapiens
gccattacttagtca

SEQ ID NO: 997197 - DNA, 15 bp, Homo sapiens
tgccattacttagtc

SEQ ID NO: 997198 - DNA, 15 bp, Homo sapiens
gtgccattacttagt

SEQ ID NO: 997199 - DNA, 15 bp, Homo sapiens
agtgccattacttag

SEQ ID NO: 997200 - DNA, 15 bp, Homo sapiens
aagtgccattactta

SEQ ID NO: 997201 - DNA, 15 bp, Homo sapiens
taagtgccattactt

SEQ ID NO: 997202 - DNA, 15 bp, Homo sapiens
ttaagtgccattact

SEQ ID NO: 997203 - DNA, 15 bp, Homo sapiens
tttaagtgccattac

SEQ ID NO: 997204 - DNA, 15 bp, Homo sapiens
atttaagtgccatta

SEQ ID NO: 997205 - DNA, 15 bp, Homo sapiens
tatttaagtgccatt

SEQ ID NO: 997206 - DNA, 15 bp, Homo sapiens
ttatttaagtgccat

SEQ ID NO: 997207 - DNA, 15 bp, Homo sapiens
tttatttaagtgcca

SEQ ID NO: 997208 - DNA, 15 bp, Homo sapiens
ttttatttaagtgcc

SEQ ID NO: 997209 - DNA, 15 bp, Homo sapiens
attttatttaagtgc

SEQ ID NO: 997210 - DNA, 15 bp, Homo sapiens
tattttatttaagtg

SEQ ID NO: 997211 - DNA, 15 bp, Homo sapiens
ttattttatttaagt

SEQ ID NO: 997212 - DNA, 15 bp, Homo sapiens
attattttatttaag

SEQ ID NO: 997213 - DNA, 15 bp, Homo sapiens
tattattttatttaa

SEQ ID NO: 997214 - DNA, 15 bp, Homo sapiens
gtattattttattta

SEQ ID NO: 997215 - DNA, 15 bp, Homo sapiens
tgtattattttattt

SEQ ID NO: 997216 - DNA, 15 bp, Homo sapiens
ctgtattattttatt

SEQ ID NO: 997217 - DNA, 15 bp, Homo sapiens
actgtattattttat

SEQ ID NO: 997218 - DNA, 15 bp, Homo sapiens
tactgtattatttta

SEQ ID NO: 997219 - DNA, 15 bp, Homo sapiens
ctactgtattatttt

SEQ ID NO: 997220 - DNA, 15 bp, Homo sapiens
cctactgtattattt

SEQ ID NO: 997221 - DNA, 15 bp, Homo sapiens
tcctactgtattatt

SEQ ID NO: 997222 - DNA, 15 bp, Homo sapiens
ctcctactgtattat

SEQ ID NO: 997223 - DNA, 15 bp, Homo sapiens
cctcctactgtatta

SEQ ID NO: 997224 - DNA, 15 bp, Homo sapiens
gcctcctactgtatt

SEQ ID NO: 997225 - DNA, 15 bp, Homo sapiens
tgcctcctactgtat

SEQ ID NO: 997226 - DNA, 15 bp, Homo sapiens
ctgcctcctactgta

SEQ ID NO: 997227 - DNA, 15 bp, Homo sapiens
gctgcctcctactgt

SEQ ID NO: 997228 - DNA, 15 bp, Homo sapiens
tgctgcctcctactg

SEQ ID NO: 997229 - DNA, 15 bp, Homo sapiens
ttgctgcctcctact

SEQ ID NO: 997230 - DNA, 15 bp, Homo sapiens
tttgctgcctcctac

SEQ ID NO: 997231 - DNA, 15 bp, Homo sapiens
ctttgctgcctccta

SEQ ID NO: 997232 - DNA, 15 bp, Homo sapiens
cctttgctgcctcct

SEQ ID NO: 997233 - DNA, 15 bp, Homo sapiens
tcctttgctgcctcc

SEQ ID NO: 997234 - DNA, 15 bp, Homo sapiens
ttcctttgctgcctc

SEQ ID NO: 997235 - DNA, 15 bp, Homo sapiens
attcctttgctgcct

SEQ ID NO: 997236 - DNA, 15 bp, Homo sapiens
aattcctttgctgcc

SEQ ID NO: 997237 - DNA, 15 bp, Homo sapiens
aaattcctttgctgc

SEQ ID NO: 997238 - DNA, 15 bp, Homo sapiens
aaaattcctttgctg

SEQ ID NO: 997239 - DNA, 15 bp, Homo sapiens
taaaattcctttgct

SEQ ID NO: 997240 - DNA, 15 bp, Homo sapiens
ataaaattcctttgc

SEQ ID NO: 997241 - DNA, 15 bp, Homo sapiens
cataaaattcctttg

SEQ ID NO: 997242 - DNA, 15 bp, Homo sapiens
tcataaaattccttt

SEQ ID NO: 997243 - DNA, 15 bp, Homo sapiens
ctcataaaattcctt

SEQ ID NO: 997244 - DNA, 15 bp, Homo sapiens
gctcataaaattcct

SEQ ID NO: 997245 - DNA, 15 bp, Homo sapiens
tgctcataaaattcc

SEQ ID NO: 997246 - DNA, 15 bp, Homo sapiens
gtgctcataaaattc

SEQ ID NO: 997247 - DNA, 15 bp, Homo sapiens
tgtgctcataaaatt

SEQ ID NO: 997248 - DNA, 15 bp, Homo sapiens
ctgtgctcataaaat

SEQ ID NO: 997249 - DNA, 15 bp, Homo sapiens
tctgtgctcataaaa

SEQ ID NO: 997250 - DNA, 15 bp, Homo sapiens
gtctgtgctcataaa

SEQ ID NO: 997251 - DNA, 15 bp, Homo sapiens
agtctgtgctcataa

SEQ ID NO: 997252 - DNA, 15 bp, Homo sapiens
aagtctgtgctcata

SEQ ID NO: 997253 - DNA, 15 bp, Homo sapiens
aaagtctgtgctcat

SEQ ID NO: 997254 - DNA, 15 bp, Homo sapiens
taaagtctgtgctca

SEQ ID NO: 997255 - DNA, 15 bp, Homo sapiens
ttaaagtctgtgctc

SEQ ID NO: 997256 - DNA, 15 bp, Homo sapiens
tttaaagtctgtgct

SEQ ID NO: 997257 - DNA, 15 bp, Homo sapiens
ttttaaagtctgtgc

SEQ ID NO: 997258 - DNA, 15 bp, Homo sapiens
gttttaaagtctgtg

SEQ ID NO: 997259 - DNA, 15 bp, Homo sapiens
tgttttaaagtctgt

SEQ ID NO: 997260 - DNA, 15 bp, Homo sapiens
ttgttttaaagtctg

SEQ ID NO: 997261 - DNA, 15 bp, Homo sapiens
attgttttaaagtct

SEQ ID NO: 997262 - DNA, 15 bp, Homo sapiens
cattgttttaaagtc

SEQ ID NO: 997263 - DNA, 15 bp, Homo sapiens
gcattgttttaaagt

SEQ ID NO: 997264 - DNA, 15 bp, Homo sapiens
agcattgttttaaag

SEQ ID NO: 997265 - DNA, 15 bp, Homo sapiens
tagcattgttttaaa

SEQ ID NO: 997266 - DNA, 15 bp, Homo sapiens
ttagcattgttttaa

SEQ ID NO: 997267 - DNA, 15 bp, Homo sapiens
tttagcattgtttta

SEQ ID NO: 997268 - DNA, 15 bp, Homo sapiens
ttttagcattgtttt

SEQ ID NO: 997269 - DNA, 15 bp, Homo sapiens
tttttagcattgttt

SEQ ID NO: 997270 - DNA, 15 bp, Homo sapiens
ttttttagcattgtt

SEQ ID NO: 997271 - DNA, 15 bp, Homo sapiens
cttttttagcattgt

SEQ ID NO: 997272 - DNA, 15 bp, Homo sapiens
ccttttttagcattg

SEQ ID NO: 997273 - DNA, 15 bp, Homo sapiens
cccttttttagcatt

SEQ ID NO: 997274 - DNA, 15 bp, Homo sapiens
tcccttttttagcat

SEQ ID NO: 997275 - DNA, 15 bp, Homo sapiens
atcccttttttagca

SEQ ID NO: 997276 - DNA, 15 bp, Homo sapiens
aatcccttttttagc

SEQ ID NO: 997277 - DNA, 15 bp, Homo sapiens
taatcccttttttag

SEQ ID NO: 997278 - DNA, 15 bp, Homo sapiens
ataatccctttttta

SEQ ID NO: 997279 - DNA, 15 bp, Homo sapiens
aataatccctttttt

SEQ ID NO: 997280 - DNA, 15 bp, Homo sapiens
aaataatcccttttt

SEQ ID NO: 997281 - DNA, 15 bp, Homo sapiens
taaataatccctttt

SEQ ID NO: 997282 - DNA, 15 bp, Homo sapiens
ataaataatcccttt

SEQ ID NO: 997283 - DNA, 15 bp, Homo sapiens
tataaataatccctt

SEQ ID NO: 997284 - DNA, 15 bp, Homo sapiens
ctataaataatccct

SEQ ID NO: 997285 - DNA, 15 bp, Homo sapiens
tctataaataatccc

SEQ ID NO: 997286 - DNA, 15 bp, Homo sapiens
gtctataaataatcc

SEQ ID NO: 997287 - DNA, 15 bp, Homo sapiens
agtctataaataatc

SEQ ID NO: 997288 - DNA, 15 bp, Homo sapiens
aagtctataaataat

SEQ ID NO: 997289 - DNA, 15 bp, Homo sapiens
aaagtctataaataa

SEQ ID NO: 997290 - DNA, 15 bp, Homo sapiens
caaagtctataaata

SEQ ID NO: 997291 - DNA, 15 bp, Homo sapiens
tcaaagtctataaat

SEQ ID NO: 997292 - DNA, 15 bp, Homo sapiens
ctcaaagtctataaa

SEQ ID NO: 997293 - DNA, 15 bp, Homo sapiens
tctcaaagtctataa

SEQ ID NO: 997294 - DNA, 15 bp, Homo sapiens
atctcaaagtctata

SEQ ID NO: 997295 - DNA, 15 bp, Homo sapiens
tatctcaaagtctat

SEQ ID NO: 997296 - DNA, 15 bp, Homo sapiens
ctatctcaaagtcta

SEQ ID NO: 997297 - DNA, 15 bp, Homo sapiens
actatctcaaagtct

SEQ ID NO: 997298 - DNA, 15 bp, Homo sapiens
gactatctcaaagtc

SEQ ID NO: 997299 - DNA, 15 bp, Homo sapiens
agactatctcaaagt

SEQ ID NO: 997300 - DNA, 15 bp, Homo sapiens
tagactatctcaaag

SEQ ID NO: 997301 - DNA, 15 bp, Homo sapiens
ctagactatctcaaa

SEQ ID NO: 997302 - DNA, 15 bp, Homo sapiens
tctagactatctcaa

SEQ ID NO: 997303 - DNA, 15 bp, Homo sapiens
ttctagactatctca

SEQ ID NO: 997304 - DNA, 15 bp, Homo sapiens
tttctagactatctc

SEQ ID NO: 997305 - DNA, 15 bp, Homo sapiens
atttctagactatct

SEQ ID NO: 997306 - DNA, 15 bp, Homo sapiens
tatttctagactatc

SEQ ID NO: 997307 - DNA, 15 bp, Homo sapiens
gtatttctagactat

SEQ ID NO: 997308 - DNA, 15 bp, Homo sapiens
agtatttctagacta

SEQ ID NO: 997309 - DNA, 15 bp, Homo sapiens
tagtatttctagact

SEQ ID NO: 997310 - DNA, 15 bp, Homo sapiens
atagtatttctagac

SEQ ID NO: 997311 - DNA, 15 bp, Homo sapiens
aatagtatttctaga

SEQ ID NO: 997312 - DNA, 15 bp, Homo sapiens
taatagtatttctag

SEQ ID NO: 997313 - DNA, 15 bp, Homo sapiens
ttaatagtatttcta

SEQ ID NO: 997314 - DNA, 15 bp, Homo sapiens
gttaatagtatttct

SEQ ID NO: 997315 - DNA, 15 bp, Homo sapiens
tgttaatagtatttc

SEQ ID NO: 997316 - DNA, 15 bp, Homo sapiens
atgttaatagtattt

SEQ ID NO: 997317 - DNA, 15 bp, Homo sapiens
tatgttaatagtatt

SEQ ID NO: 997318 - DNA, 15 bp, Homo sapiens
ctatgttaatagtat

SEQ ID NO: 997319 - DNA, 15 bp, Homo sapiens
cctatgttaatagta

SEQ ID NO: 997320 - DNA, 15 bp, Homo sapiens
acctatgttaatagt

SEQ ID NO: 997321 - DNA, 15 bp, Homo sapiens
aacctatgttaatag

SEQ ID NO: 997322 - DNA, 15 bp, Homo sapiens
aaacctatgttaata

SEQ ID NO: 997323 - DNA, 15 bp, Homo sapiens
gaaacctatgttaat

SEQ ID NO: 997324 - DNA, 15 bp, Homo sapiens
tgaaacctatgttaa

SEQ ID NO: 997325 - DNA, 15 bp, Homo sapiens
ttgaaacctatgtta

SEQ ID NO: 997326 - DNA, 15 bp, Homo sapiens
attgaaacctatgtt

SEQ ID NO: 997327 - DNA, 15 bp, Homo sapiens
gattgaaacctatgt

SEQ ID NO: 997328 - DNA, 15 bp, Homo sapiens
ggattgaaacctatg

SEQ ID NO: 997329 - DNA, 15 bp, Homo sapiens
tggattgaaacctat

SEQ ID NO: 997330 - DNA, 15 bp, Homo sapiens
atggattgaaaccta

SEQ ID NO: 997331 - DNA, 15 bp, Homo sapiens
catggattgaaacct

SEQ ID NO: 997332 - DNA, 15 bp, Homo sapiens
acatggattgaaacc

SEQ ID NO: 997333 - DNA, 15 bp, Homo sapiens
tacatggattgaaac

SEQ ID NO: 997334 - DNA, 15 bp, Homo sapiens
ctacatggattgaaa

SEQ ID NO: 997335 - DNA, 15 bp, Homo sapiens
actacatggattgaa

SEQ ID NO: 997336 - DNA, 15 bp, Homo sapiens
cactacatggattga

SEQ ID NO: 997337 - DNA, 15 bp, Homo sapiens
acactacatggattg

SEQ ID NO: 997338 - DNA, 15 bp, Homo sapiens
cacactacatggatt

SEQ ID NO: 997339 - DNA, 15 bp, Homo sapiens
acacactacatggat

SEQ ID NO: 997340 - DNA, 15 bp, Homo sapiens
aacacactacatgga

SEQ ID NO: 997341 - DNA, 15 bp, Homo sapiens
aaacacactacatgg

SEQ ID NO: 997342 - DNA, 15 bp, Homo sapiens
gaaacacactacatg

SEQ ID NO: 997343 - DNA, 15 bp, Homo sapiens
agaaacacactacat

SEQ ID NO: 997344 - DNA, 15 bp, Homo sapiens
cagaaacacactaca

SEQ ID NO: 997345 - DNA, 15 bp, Homo sapiens
acagaaacacactac

SEQ ID NO: 997346 - DNA, 15 bp, Homo sapiens
tacagaaacacacta

SEQ ID NO: 997347 - DNA, 15 bp, Homo sapiens
gtacagaaacacact

SEQ ID NO: 997348 - DNA, 15 bp, Homo sapiens
agtacagaaacacac

SEQ ID NO: 997349 - DNA, 15 bp, Homo sapiens
gagtacagaaacaca

SEQ ID NO: 997350 - DNA, 15 bp, Homo sapiens
ggagtacagaaacac

SEQ ID NO: 997351 - DNA, 15 bp, Homo sapiens
gggagtacagaaaca

SEQ ID NO: 997352 - DNA, 15 bp, Homo sapiens
ggggagtacagaaac

SEQ ID NO: 997353 - DNA, 15 bp, Homo sapiens
aggggagtacagaaa

SEQ ID NO: 997354 - DNA, 15 bp, Homo sapiens
aaggggagtacagaa

SEQ ID NO: 997355 - DNA, 15 bp, Homo sapiens
caaggggagtacaga

SEQ ID NO: 997356 - DNA, 15 bp, Homo sapiens
acaaggggagtacag

SEQ ID NO: 997357 - DNA, 15 bp, Homo sapiens
cacaaggggagtaca

SEQ ID NO: 997358 - DNA, 15 bp, Homo sapiens
gcacaaggggagtac

SEQ ID NO: 997359 - DNA, 15 bp, Homo sapiens
tgcacaaggggagta

SEQ ID NO: 997360 - DNA, 15 bp, Homo sapiens
atgcacaaggggagt

SEQ ID NO: 997361 - DNA, 15 bp, Homo sapiens
aatgcacaaggggag

SEQ ID NO: 997362 - DNA, 15 bp, Homo sapiens
aaatgcacaagggga

SEQ ID NO: 997363 - DNA, 15 bp, Homo sapiens
aaaatgcacaagggg

SEQ ID NO: 997364 - DNA, 15 bp, Homo sapiens
taaaatgcacaaggg

SEQ ID NO: 997365 - DNA, 15 bp, Homo sapiens
ctaaaatgcacaagg

SEQ ID NO: 997366 - DNA, 15 bp, Homo sapiens
cctaaaatgcacaag

SEQ ID NO: 997367 - DNA, 15 bp, Homo sapiens
acctaaaatgcacaa

SEQ ID NO: 997368 - DNA, 15 bp, Homo sapiens
gacctaaaatgcaca

SEQ ID NO: 997369 - DNA, 15 bp, Homo sapiens
tgacctaaaatgcac

SEQ ID NO: 997370 - DNA, 15 bp, Homo sapiens
ttgacctaaaatgca

SEQ ID NO: 997371 - DNA, 15 bp, Homo sapiens
tttgacctaaaatgc

SEQ ID NO: 997372 - DNA, 15 bp, Homo sapiens
ctttgacctaaaatg

SEQ ID NO: 997373 - DNA, 15 bp, Homo sapiens
actttgacctaaaat

SEQ ID NO: 997374 - DNA, 15 bp, Homo sapiens
aactttgacctaaaa

SEQ ID NO: 997375 - DNA, 15 bp, Homo sapiens
taactttgacctaaa

SEQ ID NO: 997376 - DNA, 15 bp, Homo sapiens
ttaactttgacctaa

SEQ ID NO: 997377 - DNA, 15 bp, Homo sapiens
tttaactttgaccta

SEQ ID NO: 997378 - DNA, 15 bp, Homo sapiens
ctttaactttgacct

SEQ ID NO: 997379 - DNA, 15 bp, Homo sapiens
cctttaactttgacc

SEQ ID NO: 997380 - DNA, 15 bp, Homo sapiens
acctttaactttgac

SEQ ID NO: 997381 - DNA, 15 bp, Homo sapiens
tacctttaactttga

SEQ ID NO: 997382 - DNA, 15 bp, Homo sapiens
ttacctttaactttg

SEQ ID NO: 997383 - DNA, 15 bp, Homo sapiens
attacctttaacttt

SEQ ID NO: 997384 - DNA, 15 bp, Homo sapiens
aattacctttaactt

SEQ ID NO: 997385 - DNA, 15 bp, Homo sapiens
aaattacctttaact

SEQ ID NO: 997386 - DNA, 15 bp, Homo sapiens
aaaattacctttaac

SEQ ID NO: 997387 - DNA, 15 bp, Homo sapiens
aaaaattacctttaa

SEQ ID NO: 997388 - DNA, 15 bp, Homo sapiens
taaaaattaccttta

SEQ ID NO: 997389 - DNA, 15 bp, Homo sapiens
ttaaaaattaccttt

SEQ ID NO: 997390 - DNA, 15 bp, Homo sapiens
tttaaaaattacctt

SEQ ID NO: 997391 - DNA, 15 bp, Homo sapiens
gtttaaaaattacct

SEQ ID NO: 997392 - DNA, 15 bp, Homo sapiens
tgtttaaaaattacc

SEQ ID NO: 997393 - DNA, 15 bp, Homo sapiens
ttgtttaaaaattac

SEQ ID NO: 997394 - DNA, 15 bp, Homo sapiens
gttgtttaaaaatta

SEQ ID NO: 997395 - DNA, 15 bp, Homo sapiens
tgttgtttaaaaatt

SEQ ID NO: 997396 - DNA, 15 bp, Homo sapiens
atgttgtttaaaaat

SEQ ID NO: 997397 - DNA, 15 bp, Homo sapiens
gatgttgtttaaaaa

SEQ ID NO: 997398 - DNA, 15 bp, Homo sapiens
agatgttgtttaaaa

SEQ ID NO: 997399 - DNA, 15 bp, Homo sapiens
aagatgttgtttaaa

SEQ ID NO: 997400 - DNA, 15 bp, Homo sapiens
aaagatgttgtttaa

SEQ ID NO: 997401 - DNA, 15 bp, Homo sapiens
aaaagatgttgttta

SEQ ID NO: 997402 - DNA, 15 bp, Homo sapiens
caaaagatgttgttt

SEQ ID NO: 997403 - DNA, 15 bp, Homo sapiens
acaaaagatgttgtt

SEQ ID NO: 997404 - DNA, 15 bp, Homo sapiens
gacaaaagatgttgt

SEQ ID NO: 997405 - DNA, 15 bp, Homo sapiens
tgacaaaagatgttg

SEQ ID NO: 997406 - DNA, 15 bp, Homo sapiens
gtgacaaaagatgtt

SEQ ID NO: 997407 - DNA, 15 bp, Homo sapiens
agtgacaaaagatgt

SEQ ID NO: 997408 - DNA, 15 bp, Homo sapiens
aagtgacaaaagatg

SEQ ID NO: 997409 - DNA, 15 bp, Homo sapiens
taagtgacaaaagat

SEQ ID NO: 997410 - DNA, 15 bp, Homo sapiens
ctaagtgacaaaaga

SEQ ID NO: 997411 - DNA, 15 bp, Homo sapiens
gctaagtgacaaaag

SEQ ID NO: 997412 - DNA, 15 bp, Homo sapiens
cgctaagtgacaaaa

SEQ ID NO: 997413 - DNA, 15 bp, Homo sapiens
gcgctaagtgacaaa

SEQ ID NO: 997414 - DNA, 15 bp, Homo sapiens
tgcgctaagtgacaa

SEQ ID NO: 997415 - DNA, 15 bp, Homo sapiens
atgcgctaagtgaca

SEQ ID NO: 997416 - DNA, 15 bp, Homo sapiens
catgcgctaagtgac

SEQ ID NO: 997417 - DNA, 15 bp, Homo sapiens
ccatgcgctaagtga

SEQ ID NO: 997418 - DNA, 15 bp, Homo sapiens
cccatgcgctaagtg

SEQ ID NO: 997419 - DNA, 15 bp, Homo sapiens
tcccatgcgctaagt

SEQ ID NO: 997420 - DNA, 15 bp, Homo sapiens
ctcccatgcgctaag

SEQ ID NO: 997421 - DNA, 15 bp, Homo sapiens
gctcccatgcgctaa

SEQ ID NO: 997422 - DNA, 15 bp, Homo sapiens
cgctcccatgcgcta

SEQ ID NO: 997423 - DNA, 15 bp, Homo sapiens
tcgctcccatgcgct

SEQ ID NO: 997424 - DNA, 15 bp, Homo sapiens
atcgctcccatgcgc

SEQ ID NO: 997425 - DNA, 15 bp, Homo sapiens
catcgctcccatgcg

SEQ ID NO: 997426 - DNA, 15 bp, Homo sapiens
gcatcgctcccatgc

SEQ ID NO: 997427 - DNA, 15 bp, Homo sapiens
ggcatcgctcccatg

SEQ ID NO: 997428 - DNA, 15 bp, Homo sapiens
tggcatcgctcccat

SEQ ID NO: 997429 - DNA, 15 bp, Homo sapiens
ctggcatcgctccca

SEQ ID NO: 997430 - DNA, 15 bp, Homo sapiens
gctggcatcgctccc

SEQ ID NO: 997431 - DNA, 15 bp, Homo sapiens
tgctggcatcgctcc

SEQ ID NO: 997432 - DNA, 15 bp, Homo sapiens
gtgctggcatcgctc

SEQ ID NO: 997433 - DNA, 15 bp, Homo sapiens
agtgctggcatcgct

SEQ ID NO: 997434 - DNA, 15 bp, Homo sapiens
gagtgctggcatcgc

SEQ ID NO: 997435 - DNA, 15 bp, Homo sapiens
tgagtgctggcatcg

SEQ ID NO: 997436 - DNA, 15 bp, Homo sapiens
atgagtgctggcatc

SEQ ID NO: 997437 - DNA, 15 bp, Homo sapiens
catgagtgctggcat

SEQ ID NO: 997438 - DNA, 15 bp, Homo sapiens
acatgagtgctggca

SEQ ID NO: 997439 - DNA, 15 bp, Homo sapiens
tacatgagtgctggc

SEQ ID NO: 997440 - DNA, 15 bp, Homo sapiens
ttacatgagtgctgg

SEQ ID NO: 997441 - DNA, 15 bp, Homo sapiens
tttacatgagtgctg

SEQ ID NO: 997442 - DNA, 15 bp, Homo sapiens
ttttacatgagtgct

SEQ ID NO: 997443 - DNA, 15 bp, Homo sapiens
cttttacatgagtgc

SEQ ID NO: 997444 - DNA, 15 bp, Homo sapiens
tcttttacatgagtg

SEQ ID NO: 997445 - DNA, 15 bp, Homo sapiens
gtcttttacatgagt

SEQ ID NO: 997446 - DNA, 15 bp, Homo sapiens
agtcttttacatgag

SEQ ID NO: 997447 - DNA, 15 bp, Homo sapiens
gagtcttttacatga

SEQ ID NO: 997448 - DNA, 15 bp, Homo sapiens
agagtcttttacatg

SEQ ID NO: 997449 - DNA, 15 bp, Homo sapiens
gagagtcttttacat

SEQ ID NO: 997450 - DNA, 15 bp, Homo sapiens
ggagagtcttttaca

SEQ ID NO: 997451 - DNA, 15 bp, Homo sapiens
aggagagtcttttac

SEQ ID NO: 997452 - DNA, 15 bp, Homo sapiens
caggagagtctttta

SEQ ID NO: 997453 - DNA, 15 bp, Homo sapiens
gcaggagagtctttt

SEQ ID NO: 997454 - DNA, 15 bp, Homo sapiens
tgcaggagagtcttt

SEQ ID NO: 997455 - DNA, 15 bp, Homo sapiens
ttgcaggagagtctt

SEQ ID NO: 997456 - DNA, 15 bp, Homo sapiens
attgcaggagagtct

SEQ ID NO: 997457 - DNA, 15 bp, Homo sapiens
aattgcaggagagtc

SEQ ID NO: 997458 - DNA, 15 bp, Homo sapiens
aaattgcaggagagt

SEQ ID NO: 997459 - DNA, 15 bp, Homo sapiens
caaattgcaggagag

SEQ ID NO: 997460 - DNA, 15 bp, Homo sapiens
gcaaattgcaggaga

SEQ ID NO: 997461 - DNA, 15 bp, Homo sapiens
tgcaaattgcaggag

SEQ ID NO: 997462 - DNA, 15 bp, Homo sapiens
ctgcaaattgcagga

SEQ ID NO: 997463 - DNA, 15 bp, Homo sapiens
cctgcaaattgcagg

SEQ ID NO: 997464 - DNA, 15 bp, Homo sapiens
ccctgcaaattgcag

SEQ ID NO: 997465 - DNA, 15 bp, Homo sapiens
accctgcaaattgca

SEQ ID NO: 997466 - DNA, 15 bp, Homo sapiens
caccctgcaaattgc

SEQ ID NO: 997467 - DNA, 15 bp, Homo sapiens
ccaccctgcaaattg

SEQ ID NO: 997468 - DNA, 15 bp, Homo sapiens
gccaccctgcaaatt

SEQ ID NO: 997469 - DNA, 15 bp, Homo sapiens
ggccaccctgcaaat

SEQ ID NO: 997470 - DNA, 15 bp, Homo sapiens
gggccaccctgcaaa

SEQ ID NO: 997471 - DNA, 15 bp, Homo sapiens
cgggccaccctgcaa

SEQ ID NO: 997472 - DNA, 15 bp, Homo sapiens
tcgggccaccctgca

SEQ ID NO: 997473 - DNA, 15 bp, Homo sapiens
ctcgggccaccctgc

SEQ ID NO: 997474 - DNA, 15 bp, Homo sapiens
cctcgggccaccctg

SEQ ID NO: 997475 - DNA, 15 bp, Homo sapiens
tcctcgggccaccct

SEQ ID NO: 997476 - DNA, 15 bp, Homo sapiens
ttcctcgggccaccc

SEQ ID NO: 997477 - DNA, 15 bp, Homo sapiens
cttcctcgggccacc

SEQ ID NO: 997478 - DNA, 15 bp, Homo sapiens
gcttcctcgggccac

SEQ ID NO: 997479 - DNA, 15 bp, Homo sapiens
tgcttcctcgggcca

SEQ ID NO: 997480 - DNA, 15 bp, Homo sapiens
ctgcttcctcgggcc

SEQ ID NO: 997481 - DNA, 15 bp, Homo sapiens
cctgcttcctcgggc

SEQ ID NO: 997482 - DNA, 15 bp, Homo sapiens
ccctgcttcctcggg

SEQ ID NO: 997483 - DNA, 15 bp, Homo sapiens
tccctgcttcctcgg

SEQ ID NO: 997484 - DNA, 15 bp, Homo sapiens
ctccctgcttcctcg

SEQ ID NO: 997485 - DNA, 15 bp, Homo sapiens
gctccctgcttcctc

SEQ ID NO: 997486 - DNA, 15 bp, Homo sapiens
ggctccctgcttcct

SEQ ID NO: 997487 - DNA, 15 bp, Homo sapiens
tggctccctgcttcc

SEQ ID NO: 997488 - DNA, 15 bp, Homo sapiens
atggctccctgcttc

SEQ ID NO: 997489 - DNA, 15 bp, Homo sapiens
aatggctccctgctt

SEQ ID NO: 997490 - DNA, 15 bp, Homo sapiens
caatggctccctgct

SEQ ID NO: 997491 - DNA, 15 bp, Homo sapiens
gcaatggctccctgc

SEQ ID NO: 997492 - DNA, 15 bp, Homo sapiens
ggcaatggctccctg

SEQ ID NO: 997493 - DNA, 15 bp, Homo sapiens
gggcaatggctccct

SEQ ID NO: 997494 - DNA, 15 bp, Homo sapiens
agggcaatggctccc

SEQ ID NO: 997495 - DNA, 15 bp, Homo sapiens
aagggcaatggctcc

SEQ ID NO: 997496 - DNA, 15 bp, Homo sapiens
caagggcaatggctc

SEQ ID NO: 997497 - DNA, 15 bp, Homo sapiens
gcaagggcaatggct

SEQ ID NO: 997498 - DNA, 15 bp, Homo sapiens
tgcaagggcaatggc

SEQ ID NO: 997499 - DNA, 15 bp, Homo sapiens
ctgcaagggcaatgg

SEQ ID NO: 997500 - DNA, 15 bp, Homo sapiens
tctgcaagggcaatg

SEQ ID NO: 997501 - DNA, 15 bp, Homo sapiens
ctctgcaagggcaat

SEQ ID NO: 997502 - DNA, 15 bp, Homo sapiens
gctctgcaagggcaa

SEQ ID NO: 997503 - DNA, 15 bp, Homo sapiens
ggctctgcaagggca

SEQ ID NO: 997504 - DNA, 15 bp, Homo sapiens
gggctctgcaagggc

SEQ ID NO: 997505 - DNA, 15 bp, Homo sapiens
tgggctctgcaaggg

SEQ ID NO: 997506 - DNA, 15 bp, Homo sapiens
atgggctctgcaagg

SEQ ID NO: 997507 - DNA, 15 bp, Homo sapiens
aatgggctctgcaag

SEQ ID NO: 997508 - DNA, 15 bp, Homo sapiens
caatgggctctgcaa

SEQ ID NO: 997509 - DNA, 15 bp, Homo sapiens
gcaatgggctctgca

SEQ ID NO: 997510 - DNA, 15 bp, Homo sapiens
agcaatgggctctgc

SEQ ID NO: 997511 - DNA, 15 bp, Homo sapiens
cagcaatgggctctg

SEQ ID NO: 997512 - DNA, 15 bp, Homo sapiens
acagcaatgggctct

SEQ ID NO: 997513 - DNA, 15 bp, Homo sapiens
gacagcaatgggctc

SEQ ID NO: 997514 - DNA, 15 bp, Homo sapiens
agacagcaatgggct

SEQ ID NO: 997515 - DNA, 15 bp, Homo sapiens
aagacagcaatgggc

SEQ ID NO: 997516 - DNA, 15 bp, Homo sapiens
aaagacagcaatggg

SEQ ID NO: 997517 - DNA, 15 bp, Homo sapiens
caaagacagcaatgg

SEQ ID NO: 997518 - DNA, 15 bp, Homo sapiens
ccaaagacagcaatg

SEQ ID NO: 997519 - DNA, 15 bp, Homo sapiens
tccaaagacagcaat

SEQ ID NO: 997520 - DNA, 15 bp, Homo sapiens
gtccaaagacagcaa

SEQ ID NO: 997521 - DNA, 15 bp, Homo sapiens
tgtccaaagacagca

SEQ ID NO: 997522 - DNA, 15 bp, Homo sapiens
atgtccaaagacagc

SEQ ID NO: 997523 - DNA, 15 bp, Homo sapiens
aatgtccaaagacag

SEQ ID NO: 997524 - DNA, 15 bp, Homo sapiens
aaatgtccaaagaca

SEQ ID NO: 997525 - DNA, 15 bp, Homo sapiens
taaatgtccaaagac

SEQ ID NO: 997526 - DNA, 15 bp, Homo sapiens
ttaaatgtccaaaga

SEQ ID NO: 997527 - DNA, 15 bp, Homo sapiens
attaaatgtccaaag

SEQ ID NO: 997528 - DNA, 15 bp, Homo sapiens
aattaaatgtccaaa

SEQ ID NO: 997529 - DNA, 15 bp, Homo sapiens
caattaaatgtccaa

SEQ ID NO: 997530 - DNA, 15 bp, Homo sapiens
acaattaaatgtcca

SEQ ID NO: 997531 - DNA, 15 bp, Homo sapiens
aacaattaaatgtcc

SEQ ID NO: 997532 - DNA, 15 bp, Homo sapiens
caacaattaaatgtc

SEQ ID NO: 997533 - DNA, 15 bp, Homo sapiens
tcaacaattaaatgt

SEQ ID NO: 997534 - DNA, 15 bp, Homo sapiens
ttcaacaattaaatg

SEQ ID NO: 997535 - DNA, 15 bp, Homo sapiens
tttcaacaattaaat

SEQ ID NO: 997536 - DNA, 15 bp, Homo sapiens
atttcaacaattaaa

SEQ ID NO: 997537 - DNA, 15 bp, Homo sapiens
catttcaacaattaa

SEQ ID NO: 997538 - DNA, 15 bp, Homo sapiens
acatttcaacaatta

SEQ ID NO: 997539 - DNA, 15 bp, Homo sapiens
tacatttcaacaatt

SEQ ID NO: 997540 - DNA, 15 bp, Homo sapiens
atacatttcaacaat

SEQ ID NO: 997541 - DNA, 15 bp, Homo sapiens
aatacatttcaacaa

SEQ ID NO: 997542 - DNA, 15 bp, Homo sapiens
taatacatttcaaca

SEQ ID NO: 997543 - DNA, 15 bp, Homo sapiens
ctaatacatttcaac

SEQ ID NO: 997544 - DNA, 15 bp, Homo sapiens
cctaatacatttcaa

SEQ ID NO: 997545 - DNA, 15 bp, Homo sapiens
tcctaatacatttca

SEQ ID NO: 997546 - DNA, 15 bp, Homo sapiens
ctcctaatacatttc

SEQ ID NO: 997547 - DNA, 15 bp, Homo sapiens
cctcctaatacattt

SEQ ID NO: 997548 - DNA, 15 bp, Homo sapiens
gcctcctaatacatt

SEQ ID NO: 997549 - DNA, 15 bp, Homo sapiens
ggcctcctaatacat

SEQ ID NO: 997550 - DNA, 15 bp, Homo sapiens
cggcctcctaataca

SEQ ID NO: 997551 - DNA, 15 bp, Homo sapiens
gcggcctcctaatac

SEQ ID NO: 997552 - DNA, 15 bp, Homo sapiens
agcggcctcctaata

SEQ ID NO: 997553 - DNA, 15 bp, Homo sapiens
tagcggcctcctaat

SEQ ID NO: 997554 - DNA, 15 bp, Homo sapiens
ttagcggcctcctaa

SEQ ID NO: 997555 - DNA, 15 bp, Homo sapiens
attagcggcctccta

SEQ ID NO: 997556 - DNA, 15 bp, Homo sapiens
gattagcggcctcct

SEQ ID NO: 997557 - DNA, 15 bp, Homo sapiens
tgattagcggcctcc

SEQ ID NO: 997558 - DNA, 15 bp, Homo sapiens
ttgattagcggcctc

SEQ ID NO: 997559 - DNA, 15 bp, Homo sapiens
attgattagcggcct

SEQ ID NO: 997560 - DNA, 15 bp, Homo sapiens
tattgattagcggcc

SEQ ID NO: 997561 - DNA, 15 bp, Homo sapiens
ctattgattagcggc

SEQ ID NO: 997562 - DNA, 15 bp, Homo sapiens
gctattgattagcgg

SEQ ID NO: 997563 - DNA, 15 bp, Homo sapiens
ggctattgattagcg

SEQ ID NO: 997564 - DNA, 15 bp, Homo sapiens
aggctattgattagc

SEQ ID NO: 997565 - DNA, 15 bp, Homo sapiens
caggctattgattag

SEQ ID NO: 997566 - DNA, 15 bp, Homo sapiens
acaggctattgatta

SEQ ID NO: 997567 - DNA, 15 bp, Homo sapiens
tacaggctattgatt

SEQ ID NO: 997568 - DNA, 15 bp, Homo sapiens
ttacaggctattgat

SEQ ID NO: 997569 - DNA, 15 bp, Homo sapiens
attacaggctattga

SEQ ID NO: 997570 - DNA, 15 bp, Homo sapiens
aattacaggctattg

SEQ ID NO: 997571 - DNA, 15 bp, Homo sapiens
aaattacaggctatt

SEQ ID NO: 997572 - DNA, 15 bp, Homo sapiens
caaattacaggctat

SEQ ID NO: 997573 - DNA, 15 bp, Homo sapiens
ccaaattacaggcta

SEQ ID NO: 997574 - DNA, 15 bp, Homo sapiens
cccaaattacaggct

SEQ ID NO: 997575 - DNA, 15 bp, Homo sapiens
gcccaaattacaggc

SEQ ID NO: 997576 - DNA, 15 bp, Homo sapiens
agcccaaattacagg

SEQ ID NO: 997577 - DNA, 15 bp, Homo sapiens
cagcccaaattacag

SEQ ID NO: 997578 - DNA, 15 bp, Homo sapiens
acagcccaaattaca

SEQ ID NO: 997579 - DNA, 15 bp, Homo sapiens
tacagcccaaattac

SEQ ID NO: 997580 - DNA, 15 bp, Homo sapiens
ttacagcccaaatta

SEQ ID NO: 997581 - DNA, 15 bp, Homo sapiens
tttacagcccaaatt

SEQ ID NO: 997582 - DNA, 15 bp, Homo sapiens
ttttacagcccaaat

SEQ ID NO: 997583 - DNA, 15 bp, Homo sapiens
tttttacagcccaaa

SEQ ID NO: 997584 - DNA, 15 bp, Homo sapiens
gtttttacagcccaa

SEQ ID NO: 997585 - DNA, 15 bp, Homo sapiens
agtttttacagccca

SEQ ID NO: 997586 - DNA, 15 bp, Homo sapiens
aagtttttacagccc

SEQ ID NO: 997587 - DNA, 15 bp, Homo sapiens
aaagtttttacagcc

SEQ ID NO: 997588 - DNA, 15 bp, Homo sapiens
taaagtttttacagc

SEQ ID NO: 997589 - DNA, 15 bp, Homo sapiens
ataaagtttttacag

SEQ ID NO: 997590 - DNA, 15 bp, Homo sapiens
tataaagtttttaca

SEQ ID NO: 997591 - DNA, 15 bp, Homo sapiens
atataaagtttttac

SEQ ID NO: 997592 - DNA, 15 bp, Homo sapiens
aatataaagttttta

SEQ ID NO: 997593 - DNA, 15 bp, Homo sapiens
taatataaagttttt

SEQ ID NO: 997594 - DNA, 15 bp, Homo sapiens
ataatataaagtttt

SEQ ID NO: 997595 - DNA, 15 bp, Homo sapiens
tataatataaagttt

SEQ ID NO: 997596 - DNA, 15 bp, Homo sapiens
ctataatataaagtt

SEQ ID NO: 997597 - DNA, 15 bp, Homo sapiens
tctataatataaagt

SEQ ID NO: 997598 - DNA, 15 bp, Homo sapiens
atctataatataaag

SEQ ID NO: 997599 - DNA, 15 bp, Homo sapiens
tatctataatataaa

SEQ ID NO: 997600 - DNA, 15 bp, Homo sapiens
ttatctataatataa

SEQ ID NO: 997601 - DNA, 15 bp, Homo sapiens
attatctataatata

SEQ ID NO: 997602 - DNA, 15 bp, Homo sapiens
aattatctataatat

SEQ ID NO: 997603 - DNA, 15 bp, Homo sapiens
caattatctataata

SEQ ID NO: 997604 - DNA, 15 bp, Homo sapiens
gcaattatctataat

SEQ ID NO: 997605 - DNA, 15 bp, Homo sapiens
ggcaattatctataa

SEQ ID NO: 997606 - DNA, 15 bp, Homo sapiens
tggcaattatctata

SEQ ID NO: 997607 - DNA, 15 bp, Homo sapiens
gtggcaattatctat

SEQ ID NO: 997608 - DNA, 15 bp, Homo sapiens
agtggcaattatcta

SEQ ID NO: 997609 - DNA, 15 bp, Homo sapiens
aagtggcaattatct

SEQ ID NO: 997610 - DNA, 15 bp, Homo sapiens
taagtggcaattatc

SEQ ID NO: 997611 - DNA, 15 bp, Homo sapiens
ataagtggcaattat

SEQ ID NO: 997612 - DNA, 15 bp, Homo sapiens
aataagtggcaatta

SEQ ID NO: 997613 - DNA, 15 bp, Homo sapiens
aaataagtggcaatt

SEQ ID NO: 997614 - DNA, 15 bp, Homo sapiens
aaaataagtggcaat

SEQ ID NO: 997615 - DNA, 15 bp, Homo sapiens
caaaataagtggcaa

SEQ ID NO: 997616 - DNA, 15 bp, Homo sapiens
tcaaaataagtggca

SEQ ID NO: 997617 - DNA, 15 bp, Homo sapiens
ctcaaaataagtggc

SEQ ID NO: 997618 - DNA, 15 bp, Homo sapiens
gctcaaaataagtgg

SEQ ID NO: 997619 - DNA, 15 bp, Homo sapiens
agctcaaaataagtg

SEQ ID NO: 997620 - DNA, 15 bp, Homo sapiens
tagctcaaaataagt

SEQ ID NO: 997621 - DNA, 15 bp, Homo sapiens
atagctcaaaataag

SEQ ID NO: 997622 - DNA, 15 bp, Homo sapiens
catagctcaaaataa

SEQ ID NO: 997623 - DNA, 15 bp, Homo sapiens
acatagctcaaaata

SEQ ID NO: 997624 - DNA, 15 bp, Homo sapiens
aacatagctcaaaat

SEQ ID NO: 997625 - DNA, 15 bp, Homo sapiens
gaacatagctcaaaa

SEQ ID NO: 997626 - DNA, 15 bp, Homo sapiens
agaacatagctcaaa

SEQ ID NO: 997627 - DNA, 15 bp, Homo sapiens
aagaacatagctcaa

SEQ ID NO: 997628 - DNA, 15 bp, Homo sapiens
caagaacatagctca

SEQ ID NO: 997629 - DNA, 15 bp, Homo sapiens
tcaagaacatagctc

SEQ ID NO: 997630 - DNA, 15 bp, Homo sapiens
atcaagaacatagct

SEQ ID NO: 997631 - DNA, 15 bp, Homo sapiens
aatcaagaacatagc

SEQ ID NO: 997632 - DNA, 15 bp, Homo sapiens
aaatcaagaacatag

SEQ ID NO: 997633 - DNA, 15 bp, Homo sapiens
aaaatcaagaacata

SEQ ID NO: 997634 - DNA, 15 bp, Homo sapiens
aaaaatcaagaacat

SEQ ID NO: 997635 - DNA, 15 bp, Homo sapiens
aaaaaatcaagaaca

SEQ ID NO: 997636 - DNA, 15 bp, Homo sapiens
taaaaaatcaagaac

SEQ ID NO: 997637 - DNA, 15 bp, Homo sapiens
ttaaaaaatcaagaa

SEQ ID NO: 997638 - DNA, 15 bp, Homo sapiens
tttaaaaaatcaaga

SEQ ID NO: 997639 - DNA, 15 bp, Homo sapiens
ttttaaaaaatcaag

SEQ ID NO: 997640 - DNA, 15 bp, Homo sapiens
tttttaaaaaatcaa

SEQ ID NO: 997641 - DNA, 15 bp, Homo sapiens
atttttaaaaaatca

SEQ ID NO: 997642 - DNA, 15 bp, Homo sapiens
aatttttaaaaaatc

SEQ ID NO: 997643 - DNA, 15 bp, Homo sapiens
aaatttttaaaaaat

SEQ ID NO: 997644 - DNA, 15 bp, Homo sapiens
aaaatttttaaaaaa

SEQ ID NO: 997645 - DNA, 15 bp, Homo sapiens
taaaatttttaaaaa

SEQ ID NO: 997646 - DNA, 15 bp, Homo sapiens
ctaaaatttttaaaa

SEQ ID NO: 997647 - DNA, 15 bp, Homo sapiens
gctaaaatttttaaa

SEQ ID NO: 997648 - DNA, 15 bp, Homo sapiens
ggctaaaatttttaa

SEQ ID NO: 997649 - DNA, 15 bp, Homo sapiens
aggctaaaattttta

SEQ ID NO: 997650 - DNA, 15 bp, Homo sapiens
taggctaaaattttt

SEQ ID NO: 997651 - DNA, 15 bp, Homo sapiens
ataggctaaaatttt

SEQ ID NO: 997652 - DNA, 15 bp, Homo sapiens
cataggctaaaattt

SEQ ID NO: 997653 - DNA, 15 bp, Homo sapiens
acataggctaaaatt

SEQ ID NO: 997654 - DNA, 15 bp, Homo sapiens
gacataggctaaaat

SEQ ID NO: 997655 - DNA, 15 bp, Homo sapiens
tgacataggctaaaa

SEQ ID NO: 997656 - DNA, 15 bp, Homo sapiens
atgacataggctaaa

SEQ ID NO: 997657 - DNA, 15 bp, Homo sapiens
gatgacataggctaa

SEQ ID NO: 997658 - DNA, 15 bp, Homo sapiens
agatgacataggcta

SEQ ID NO: 997659 - DNA, 15 bp, Homo sapiens
aagatgacataggct

SEQ ID NO: 997660 - DNA, 15 bp, Homo sapiens
gaagatgacataggc

SEQ ID NO: 997661 - DNA, 15 bp, Homo sapiens
agaagatgacatagg

SEQ ID NO: 997662 - DNA, 15 bp, Homo sapiens
cagaagatgacatag

SEQ ID NO: 997663 - DNA, 15 bp, Homo sapiens
acagaagatgacata

SEQ ID NO: 997664 - DNA, 15 bp, Homo sapiens
tacagaagatgacat

SEQ ID NO: 997665 - DNA, 15 bp, Homo sapiens
ctacagaagatgaca

SEQ ID NO: 997666 - DNA, 15 bp, Homo sapiens
actacagaagatgac

SEQ ID NO: 997667 - DNA, 15 bp, Homo sapiens
aactacagaagatga

SEQ ID NO: 997668 - DNA, 15 bp, Homo sapiens
taactacagaagatg

SEQ ID NO: 997669 - DNA, 15 bp, Homo sapiens
ctaactacagaagat

SEQ ID NO: 997670 - DNA, 15 bp, Homo sapiens
actaactacagaaga

SEQ ID NO: 997671 - DNA, 15 bp, Homo sapiens
tactaactacagaag

SEQ ID NO: 997672 - DNA, 15 bp, Homo sapiens
ctactaactacagaa

SEQ ID NO: 997673 - DNA, 15 bp, Homo sapiens
tctactaactacaga

SEQ ID NO: 997674 - DNA, 15 bp, Homo sapiens
ttctactaactacag

SEQ ID NO: 997675 - DNA, 15 bp, Homo sapiens
cttctactaactaca

SEQ ID NO: 997676 - DNA, 15 bp, Homo sapiens
gcttctactaactac

SEQ ID NO: 997677 - DNA, 15 bp, Homo sapiens
cgcttctactaacta

SEQ ID NO: 997678 - DNA, 15 bp, Homo sapiens
ccgcttctactaact

SEQ ID NO: 997679 - DNA, 15 bp, Homo sapiens
accgcttctactaac

SEQ ID NO: 997680 - DNA, 15 bp, Homo sapiens
caccgcttctactaa

SEQ ID NO: 997681 - DNA, 15 bp, Homo sapiens
acaccgcttctacta

SEQ ID NO: 997682 - DNA, 15 bp, Homo sapiens
aacaccgcttctact

SEQ ID NO: 997683 - DNA, 15 bp, Homo sapiens
aaacaccgcttctac

SEQ ID NO: 997684 - DNA, 15 bp, Homo sapiens
aaaacaccgcttcta

SEQ ID NO: 997685 - DNA, 15 bp, Homo sapiens
aaaaacaccgcttct

SEQ ID NO: 997686 - DNA, 15 bp, Homo sapiens
aaaaaacaccgcttc

SEQ ID NO: 997687 - DNA, 15 bp, Homo sapiens
caaaaaacaccgctt

SEQ ID NO: 997688 - DNA, 15 bp, Homo sapiens
acaaaaaacaccgct

SEQ ID NO: 997689 - DNA, 15 bp, Homo sapiens
aacaaaaaacaccgc

SEQ ID NO: 997690 - DNA, 15 bp, Homo sapiens
aaacaaaaaacaccg

SEQ ID NO: 997691 - DNA, 15 bp, Homo sapiens
caaacaaaaaacacc

SEQ ID NO: 997692 - DNA, 15 bp, Homo sapiens
acaaacaaaaaacac

SEQ ID NO: 997693 - DNA, 15 bp, Homo sapiens
aacaaacaaaaaaca

SEQ ID NO: 997694 - DNA, 15 bp, Homo sapiens
taaaacaaacaaaaa

SEQ ID NO: 997695 - DNA, 15 bp, Homo sapiens
gtaaaacaaacaaaa

SEQ ID NO: 997696 - DNA, 15 bp, Homo sapiens
ggtaaaacaaacaaa

SEQ ID NO: 997697 - DNA, 15 bp, Homo sapiens
aggtaaaacaaacaa

SEQ ID NO: 997698 - DNA, 15 bp, Homo sapiens
caggtaaaacaaaca

SEQ ID NO: 997699 - DNA, 15 bp, Homo sapiens
ccaggtaaaacaaac

SEQ ID NO: 997700 - DNA, 15 bp, Homo sapiens
cccaggtaaaacaaa

SEQ ID NO: 997701 - DNA, 15 bp, Homo sapiens
ccccaggtaaaacaa

SEQ ID NO: 997702 - DNA, 15 bp, Homo sapiens
cccccaggtaaaaca

SEQ ID NO: 997703 - DNA, 15 bp, Homo sapiens
gcccccaggtaaaac

SEQ ID NO: 997704 - DNA, 15 bp, Homo sapiens
tgcccccaggtaaaa

SEQ ID NO: 997705 - DNA, 15 bp, Homo sapiens
ttgcccccaggtaaa

SEQ ID NO: 997706 - DNA, 15 bp, Homo sapiens
attgcccccaggtaa

SEQ ID NO: 997707 - DNA, 15 bp, Homo sapiens
cattgcccccaggta

SEQ ID NO: 997708 - DNA, 15 bp, Homo sapiens
acattgcccccaggt

SEQ ID NO: 997709 - DNA, 15 bp, Homo sapiens
tacattgcccccagg

SEQ ID NO: 997710 - DNA, 15 bp, Homo sapiens
ctacattgcccccag

SEQ ID NO: 997711 - DNA, 15 bp, Homo sapiens
cctacattgccccca

SEQ ID NO: 997712 - DNA, 15 bp, Homo sapiens
acctacattgccccc

SEQ ID NO: 997713 - DNA, 15 bp, Homo sapiens
cacctacattgcccc

SEQ ID NO: 997714 - DNA, 15 bp, Homo sapiens
tcacctacattgccc

SEQ ID NO: 997715 - DNA, 15 bp, Homo sapiens
gtcacctacattgcc

SEQ ID NO: 997716 - DNA, 15 bp, Homo sapiens
ggtcacctacattgc

SEQ ID NO: 997717 - DNA, 15 bp, Homo sapiens
tggtcacctacattg

SEQ ID NO: 997718 - DNA, 15 bp, Homo sapiens
atggtcacctacatt

SEQ ID NO: 997719 - DNA, 15 bp, Homo sapiens
aatggtcacctacat

SEQ ID NO: 997720 - DNA, 15 bp, Homo sapiens
aaatggtcacctaca

SEQ ID NO: 997721 - DNA, 15 bp, Homo sapiens
caaatggtcacctac

SEQ ID NO: 997722 - DNA, 15 bp, Homo sapiens
ccaaatggtcaccta

SEQ ID NO: 997723 - DNA, 15 bp, Homo sapiens
tccaaatggtcacct

SEQ ID NO: 997724 - DNA, 15 bp, Homo sapiens
gtccaaatggtcacc

SEQ ID NO: 997725 - DNA, 15 bp, Homo sapiens
tgtccaaatggtcac

SEQ ID NO: 997726 - DNA, 15 bp, Homo sapiens
gtgtccaaatggtca

SEQ ID NO: 997727 - DNA, 15 bp, Homo sapiens
ggtgtccaaatggtc

SEQ ID NO: 997728 - DNA, 15 bp, Homo sapiens
aggtgtccaaatggt

SEQ ID NO: 997729 - DNA, 15 bp, Homo sapiens
aaggtgtccaaatgg

SEQ ID NO: 997730 - DNA, 15 bp, Homo sapiens
aaaggtgtccaaatg

SEQ ID NO: 997731 - DNA, 15 bp, Homo sapiens
aaaaggtgtccaaat

SEQ ID NO: 997732 - DNA, 15 bp, Homo sapiens
aaaaaggtgtccaaa

SEQ ID NO: 997733 - DNA, 15 bp, Homo sapiens
gaaaaaggtgtccaa

SEQ ID NO: 997734 - DNA, 15 bp, Homo sapiens
tgaaaaaggtgtcca

SEQ ID NO: 997735 - DNA, 15 bp, Homo sapiens
gtgaaaaaggtgtcc

SEQ ID NO: 997736 - DNA, 15 bp, Homo sapiens
tgtgaaaaaggtgtc

SEQ ID NO: 997737 - DNA, 15 bp, Homo sapiens
atgtgaaaaaggtgt

SEQ ID NO: 997738 - DNA, 15 bp, Homo sapiens
catgtgaaaaaggtg

SEQ ID NO: 997739 - DNA, 15 bp, Homo sapiens
ccatgtgaaaaaggt

SEQ ID NO: 997740 - DNA, 15 bp, Homo sapiens
cccatgtgaaaaagg

SEQ ID NO: 997741 - DNA, 15 bp, Homo sapiens
tcccatgtgaaaaag

SEQ ID NO: 997742 - DNA, 15 bp, Homo sapiens
gtcccatgtgaaaaa

SEQ ID NO: 997743 - DNA, 15 bp, Homo sapiens
tgtcccatgtgaaaa

SEQ ID NO: 997744 - DNA, 15 bp, Homo sapiens
gtgtcccatgtgaaa

SEQ ID NO: 997745 - DNA, 15 bp, Homo sapiens
agtgtcccatgtgaa

SEQ ID NO: 997746 - DNA, 15 bp, Homo sapiens
aagtgtcccatgtga

SEQ ID NO: 997747 - DNA, 15 bp, Homo sapiens
aaagtgtcccatgtg

SEQ ID NO: 997748 - DNA, 15 bp, Homo sapiens
aaaagtgtcccatgt

SEQ ID NO: 997749 - DNA, 15 bp, Homo sapiens
caaaagtgtcccatg

SEQ ID NO: 997750 - DNA, 15 bp, Homo sapiens
acaaaagtgtcccat

SEQ ID NO: 997751 - DNA, 15 bp, Homo sapiens
aacaaaagtgtccca

SEQ ID NO: 997752 - DNA, 15 bp, Homo sapiens
aaacaaaagtgtccc

SEQ ID NO: 997753 - DNA, 15 bp, Homo sapiens
caaacaaaagtgtcc

SEQ ID NO: 997754 - DNA, 15 bp, Homo sapiens
acaaacaaaagtgtc

SEQ ID NO: 997755 - DNA, 15 bp, Homo sapiens
aacaaacaaaagtgt

SEQ ID NO: 997756 - DNA, 15 bp, Homo sapiens
aaacaaacaaaagtg

SEQ ID NO: 997757 - DNA, 15 bp, Homo sapiens
caaacaaacaaaagt

SEQ ID NO: 997758 - DNA, 15 bp, Homo sapiens
cacaaacaaacaaac

SEQ ID NO: 997759 - DNA, 15 bp, Homo sapiens
acacaaacaaacaaa

SEQ ID NO: 997760 - DNA, 15 bp, Homo sapiens
cacacaaacaaacaa

SEQ ID NO: 997761 - DNA, 15 bp, Homo sapiens
acacacaaacaaaca

SEQ ID NO: 997762 - DNA, 15 bp, Homo sapiens
cacacacaaacaaac

SEQ ID NO: 997763 - DNA, 15 bp, Homo sapiens
acacacacaaacaaa

SEQ ID NO: 997764 - DNA, 15 bp, Homo sapiens
cacacacacaaacaa

SEQ ID NO: 997765 - DNA, 15 bp, Homo sapiens
aaacacacacacaaa

SEQ ID NO: 997766 - DNA, 15 bp, Homo sapiens
caaacacacacacaa

SEQ ID NO: 997767 - DNA, 15 bp, Homo sapiens
aacaaacacacacac

SEQ ID NO: 997768 - DNA, 15 bp, Homo sapiens
aaacaaacacacaca

SEQ ID NO: 997769 - DNA, 15 bp, Homo sapiens
aaaacaaacacacac

SEQ ID NO: 997770 - DNA, 15 bp, Homo sapiens
aaaaacaaacacaca

SEQ ID NO: 997771 - DNA, 15 bp, Homo sapiens
caaaaacaaacacac

SEQ ID NO: 997772 - DNA, 15 bp, Homo sapiens
tcaaaaacaaacaca

SEQ ID NO: 997773 - DNA, 15 bp, Homo sapiens
ctcaaaaacaaacac

SEQ ID NO: 997774 - DNA, 15 bp, Homo sapiens
tctcaaaaacaaaca

SEQ ID NO: 997775 - DNA, 15 bp, Homo sapiens
gtctcaaaaacaaac

SEQ ID NO: 997776 - DNA, 15 bp, Homo sapiens
cgtctcaaaaacaaa

SEQ ID NO: 997777 - DNA, 15 bp, Homo sapiens
ccgtctcaaaaacaa

SEQ ID NO: 997778 - DNA, 15 bp, Homo sapiens
tccgtctcaaaaaca

SEQ ID NO: 997779 - DNA, 15 bp, Homo sapiens
ctccgtctcaaaaac

SEQ ID NO: 997780 - DNA, 15 bp, Homo sapiens
tcagcctggtgacag

SEQ ID NO: 997781 - DNA, 15 bp, Homo sapiens
ttcagcctggtgaca

SEQ ID NO: 997782 - DNA, 15 bp, Homo sapiens
cttcagcctggtgac

SEQ ID NO: 997783 - DNA, 15 bp, Homo sapiens
acttcagcctggtga

SEQ ID NO: 997784 - DNA, 15 bp, Homo sapiens
cacttcagcctggtg

SEQ ID NO: 997785 - DNA, 15 bp, Homo sapiens
gcacttcagcctggt

SEQ ID NO: 997786 - DNA, 15 bp, Homo sapiens
gccactgcacttcag

SEQ ID NO: 997787 - DNA, 15 bp, Homo sapiens
cgccactgcacttca

SEQ ID NO: 997788 - DNA, 15 bp, Homo sapiens
gcgccactgcacttc

SEQ ID NO: 997789 - DNA, 15 bp, Homo sapiens
tgcgccactgcactt

SEQ ID NO: 997790 - DNA, 15 bp, Homo sapiens
ggattgcgccactgc

SEQ ID NO: 997791 - DNA, 15 bp, Homo sapiens
gggattgcgccactg

SEQ ID NO: 997792 - DNA, 15 bp, Homo sapiens
tgggattgcgccact

SEQ ID NO: 997793 - DNA, 15 bp, Homo sapiens
ctgggattgcgccac

SEQ ID NO: 997794 - DNA, 15 bp, Homo sapiens
gctgggattgcgcca

SEQ ID NO: 997795 - DNA, 15 bp, Homo sapiens
agctgggattgcgcc

SEQ ID NO: 997796 - DNA, 15 bp, Homo sapiens
gagctgggattgcgc

SEQ ID NO: 997797 - DNA, 15 bp, Homo sapiens
tgagctgggattgcg

SEQ ID NO: 997798 - DNA, 15 bp, Homo sapiens
gtgagctgggattgc

SEQ ID NO: 997799 - DNA, 15 bp, Homo sapiens
agtgagctgggattg

SEQ ID NO: 997800 - DNA, 15 bp, Homo sapiens
cagtgagctgggatt

SEQ ID NO: 997801 - DNA, 15 bp, Homo sapiens
aagaggctgaggcag

SEQ ID NO: 997802 - DNA, 15 bp, Homo sapiens
caagaggctgaggca

SEQ ID NO: 997803 - DNA, 15 bp, Homo sapiens
tcaagaggctgaggc

SEQ ID NO: 997804 - DNA, 15 bp, Homo sapiens
ctcaagaggctgagg

SEQ ID NO: 997805 - DNA, 15 bp, Homo sapiens
actcaagaggctgag

SEQ ID NO: 997806 - DNA, 15 bp, Homo sapiens
tactcaagaggctga

SEQ ID NO: 997807 - DNA, 15 bp, Homo sapiens
ctactcaagaggctg

SEQ ID NO: 997808 - DNA, 15 bp, Homo sapiens
gctactcaagaggct

SEQ ID NO: 997809 - DNA, 15 bp, Homo sapiens
agctactcaagaggc

SEQ ID NO: 997810 - DNA, 15 bp, Homo sapiens
aggcgcctgtaatcc

SEQ ID NO: 997811 - DNA, 15 bp, Homo sapiens
caggcgcctgtaatc

SEQ ID NO: 997812 - DNA, 15 bp, Homo sapiens
gcaggcgcctgtaat

SEQ ID NO: 997813 - DNA, 15 bp, Homo sapiens
tgcaggcgcctgtaa

SEQ ID NO: 997814 - DNA, 15 bp, Homo sapiens
ttgcaggcgcctgta

SEQ ID NO: 997815 - DNA, 15 bp, Homo sapiens
gttgcaggcgcctgt

SEQ ID NO: 997816 - DNA, 15 bp, Homo sapiens
ggttgcaggcgcctg

SEQ ID NO: 997817 - DNA, 15 bp, Homo sapiens
tggttgcaggcgcct

SEQ ID NO: 997818 - DNA, 15 bp, Homo sapiens
gtggttgcaggcgcc

SEQ ID NO: 997819 - DNA, 15 bp, Homo sapiens
tgtggttgcaggcgc

SEQ ID NO: 997820 - DNA, 15 bp, Homo sapiens
gtgtggttgcaggcg

SEQ ID NO: 997821 - DNA, 15 bp, Homo sapiens
ggtgtggttgcaggc

SEQ ID NO: 997822 - DNA, 15 bp, Homo sapiens
gggtgtggttgcagg

SEQ ID NO: 997823 - DNA, 15 bp, Homo sapiens
tgggtgtggttgcag

SEQ ID NO: 997824 - DNA, 15 bp, Homo sapiens
ctgggtgtggttgca

SEQ ID NO: 997825 - DNA, 15 bp, Homo sapiens
gctgggtgtggttgc

SEQ ID NO: 997826 - DNA, 15 bp, Homo sapiens
agctgggtgtggttg

SEQ ID NO: 997827 - DNA, 15 bp, Homo sapiens
tagctgggtgtggtt

SEQ ID NO: 997828 - DNA, 15 bp, Homo sapiens
ctagctgggtgtggt

SEQ ID NO: 997829 - DNA, 15 bp, Homo sapiens
actagctgggtgtgg

SEQ ID NO: 997830 - DNA, 15 bp, Homo sapiens
aactagctgggtgtg

SEQ ID NO: 997831 - DNA, 15 bp, Homo sapiens
aaactagctgggtgt

SEQ ID NO: 997832 - DNA, 15 bp, Homo sapiens
aaaactagctgggtg

SEQ ID NO: 997833 - DNA, 15 bp, Homo sapiens
caaaactagctgggt

SEQ ID NO: 997834 - DNA, 15 bp, Homo sapiens
acaaaactagctggg

SEQ ID NO: 997835 - DNA, 15 bp, Homo sapiens
tacaaaactagctgg

SEQ ID NO: 997836 - DNA, 15 bp, Homo sapiens
atacaaaactagctg

SEQ ID NO: 997837 - DNA, 15 bp, Homo sapiens
aatacaaaactagct

SEQ ID NO: 997838 - DNA, 15 bp, Homo sapiens
aaatacaaaactagc

SEQ ID NO: 997839 - DNA, 15 bp, Homo sapiens
aaaatacaaaactag

SEQ ID NO: 997840 - DNA, 15 bp, Homo sapiens
aaaaatacaaaacta

SEQ ID NO: 997841 - DNA, 15 bp, Homo sapiens
taaaaatacaaaact

SEQ ID NO: 997842 - DNA, 15 bp, Homo sapiens
ctaaaaatacaaaac

SEQ ID NO: 997843 - DNA, 15 bp, Homo sapiens
caactaaaaatacaa

SEQ ID NO: 997844 - DNA, 15 bp, Homo sapiens
tcaactaaaaataca

SEQ ID NO: 997845 - DNA, 15 bp, Homo sapiens
ctcaactaaaaatac

SEQ ID NO: 997846 - DNA, 15 bp, Homo sapiens
tctcaactaaaaata

SEQ ID NO: 997847 - DNA, 15 bp, Homo sapiens
atctcaactaaaaat

SEQ ID NO: 997848 - DNA, 15 bp, Homo sapiens
catctcaactaaaaa

SEQ ID NO: 997849 - DNA, 15 bp, Homo sapiens
ccatctcaactaaaa

SEQ ID NO: 997850 - DNA, 15 bp, Homo sapiens
cccatctcaactaaa

SEQ ID NO: 997851 - DNA, 15 bp, Homo sapiens
ccccatctcaactaa

SEQ ID NO: 997852 - DNA, 15 bp, Homo sapiens
accccatctcaacta

SEQ ID NO: 997853 - DNA, 15 bp, Homo sapiens
aaccccatctcaact

SEQ ID NO: 997854 - DNA, 15 bp, Homo sapiens
aaaccccatctcaac

SEQ ID NO: 997855 - DNA, 15 bp, Homo sapiens
gaaaccccatctcaa

SEQ ID NO: 997856 - DNA, 15 bp, Homo sapiens
acaatatggtgaaac

SEQ ID NO: 997857 - DNA, 15 bp, Homo sapiens
gacaatatggtgaaa

SEQ ID NO: 997858 - DNA, 15 bp, Homo sapiens
ggacaatatggtgaa

SEQ ID NO: 997859 - DNA, 15 bp, Homo sapiens
tggacaatatggtga

SEQ ID NO: 997860 - DNA, 15 bp, Homo sapiens
ctggacaatatggtg

SEQ ID NO: 997861 - DNA, 15 bp, Homo sapiens
cctggacaatatggt

SEQ ID NO: 997862 - DNA, 15 bp, Homo sapiens
tcctggacaatatgg

SEQ ID NO: 997863 - DNA, 15 bp, Homo sapiens
atcctggacaatatg

SEQ ID NO: 997864 - DNA, 15 bp, Homo sapiens
catcctggacaatat

SEQ ID NO: 997865 - DNA, 15 bp, Homo sapiens
tcatcctggacaata

SEQ ID NO: 997866 - DNA, 15 bp, Homo sapiens
atcatcctggacaat

SEQ ID NO: 997867 - DNA, 15 bp, Homo sapiens
gatcatcctggacaa

SEQ ID NO: 997868 - DNA, 15 bp, Homo sapiens
agatcatcctggaca

SEQ ID NO: 997869 - DNA, 15 bp, Homo sapiens
gagatcatcctggac

SEQ ID NO: 997870 - DNA, 15 bp, Homo sapiens
cgagatcatcctgga

SEQ ID NO: 997871 - DNA, 15 bp, Homo sapiens
tcgagatcatcctgg

SEQ ID NO: 997872 - DNA, 15 bp, Homo sapiens
atcgagatcatcctg

SEQ ID NO: 997873 - DNA, 15 bp, Homo sapiens
aatcgagatcatcct

SEQ ID NO: 997874 - DNA, 15 bp, Homo sapiens
aaatcgagatcatcc

SEQ ID NO: 997875 - DNA, 15 bp, Homo sapiens
gaaatcgagatcatc

SEQ ID NO: 997876 - DNA, 15 bp, Homo sapiens
ggaaatcgagatcat

SEQ ID NO: 997877 - DNA, 15 bp, Homo sapiens
aggaaatcgagatca

SEQ ID NO: 997878 - DNA, 15 bp, Homo sapiens
caggaaatcgagatc

SEQ ID NO: 997879 - DNA, 15 bp, Homo sapiens
tcaggaaatcgagat

SEQ ID NO: 997880 - DNA, 15 bp, Homo sapiens
gtcaggaaatcgaga

SEQ ID NO: 997881 - DNA, 15 bp, Homo sapiens
agtcaggaaatcgag

SEQ ID NO: 997882 - DNA, 15 bp, Homo sapiens
gagtcaggaaatcga

SEQ ID NO: 997883 - DNA, 15 bp, Homo sapiens
agagtcaggaaatcg

SEQ ID NO: 997884 - DNA, 15 bp, Homo sapiens
cagagtcaggaaatc

SEQ ID NO: 997885 - DNA, 15 bp, Homo sapiens
tcatgggacggcagg

SEQ ID NO: 997886 - DNA, 15 bp, Homo sapiens
ttcatgggacggcag

SEQ ID NO: 997887 - DNA, 15 bp, Homo sapiens
cttcatgggacggca

SEQ ID NO: 997888 - DNA, 15 bp, Homo sapiens
acttcatgggacggc

SEQ ID NO: 997889 - DNA, 15 bp, Homo sapiens
aacttcatgggacgg

SEQ ID NO: 997890 - DNA, 15 bp, Homo sapiens
taacttcatgggacg

SEQ ID NO: 997891 - DNA, 15 bp, Homo sapiens
ttaacttcatgggac

SEQ ID NO: 997892 - DNA, 15 bp, Homo sapiens
gttaacttcatggga

SEQ ID NO: 997893 - DNA, 15 bp, Homo sapiens
agttaacttcatggg

SEQ ID NO: 997894 - DNA, 15 bp, Homo sapiens
gagttaacttcatgg

SEQ ID NO: 997895 - DNA, 15 bp, Homo sapiens
ggagttaacttcatg

SEQ ID NO: 997896 - DNA, 15 bp, Homo sapiens
aggagttaacttcat

SEQ ID NO: 997897 - DNA, 15 bp, Homo sapiens
caggagttaacttca

SEQ ID NO: 997898 - DNA, 15 bp, Homo sapiens
tcaggagttaacttc

SEQ ID NO: 997899 - DNA, 15 bp, Homo sapiens
ctcaggagttaactt

SEQ ID NO: 997900 - DNA, 15 bp, Homo sapiens
tctcaggagttaact

SEQ ID NO: 997901 - DNA, 15 bp, Homo sapiens
ctctcaggagttaac

SEQ ID NO: 997902 - DNA, 15 bp, Homo sapiens
actctcaggagttaa

SEQ ID NO: 997903 - DNA, 15 bp, Homo sapiens
aactctcaggagtta

SEQ ID NO: 997904 - DNA, 15 bp, Homo sapiens
caactctcaggagtt

SEQ ID NO: 997905 - DNA, 15 bp, Homo sapiens
acaactctcaggagt

SEQ ID NO: 997906 - DNA, 15 bp, Homo sapiens
gacaactctcaggag

SEQ ID NO: 997907 - DNA, 15 bp, Homo sapiens
cgacaactctcagga

SEQ ID NO: 997908 - DNA, 15 bp, Homo sapiens
ccgacaactctcagg

SEQ ID NO: 997909 - DNA, 15 bp, Homo sapiens
cccgacaactctcag

SEQ ID NO: 997910 - DNA, 15 bp, Homo sapiens
ccccgacaactctca

SEQ ID NO: 997911 - DNA, 15 bp, Homo sapiens
cccccgacaactctc

SEQ ID NO: 997912 - DNA, 15 bp, Homo sapiens
acccccgacaactct

SEQ ID NO: 997913 - DNA, 15 bp, Homo sapiens
cacccccgacaactc

SEQ ID NO: 997914 - DNA, 15 bp, Homo sapiens
tcacccccgacaact

SEQ ID NO: 997915 - DNA, 15 bp, Homo sapiens
gtcacccccgacaac

SEQ ID NO: 997916 - DNA, 15 bp, Homo sapiens
agtcacccccgacaa

SEQ ID NO: 997917 - DNA, 15 bp, Homo sapiens
cagtcacccccgaca

SEQ ID NO: 997918 - DNA, 15 bp, Homo sapiens
ccagtcacccccgac

SEQ ID NO: 997919 - DNA, 15 bp, Homo sapiens
tccagtcacccccga

SEQ ID NO: 997920 - DNA, 15 bp, Homo sapiens
ctccagtcacccccg

SEQ ID NO: 997921 - DNA, 15 bp, Homo sapiens
tctccagtcaccccc

SEQ ID NO: 997922 - DNA, 15 bp, Homo sapiens
ctctccagtcacccc

SEQ ID NO: 997923 - DNA, 15 bp, Homo sapiens
gctctccagtcaccc

SEQ ID NO: 997924 - DNA, 15 bp, Homo sapiens
agctctccagtcacc

SEQ ID NO: 997925 - DNA, 15 bp, Homo sapiens
gagctctccagtcac

SEQ ID NO: 997926 - DNA, 15 bp, Homo sapiens
tgagctctccagtca

SEQ ID NO: 997927 - DNA, 15 bp, Homo sapiens
atgagctctccagtc

SEQ ID NO: 997928 - DNA, 15 bp, Homo sapiens
aatgagctctccagt

SEQ ID NO: 997929 - DNA, 15 bp, Homo sapiens
caatgagctctccag

SEQ ID NO: 997930 - DNA, 15 bp, Homo sapiens
gcaatgagctctcca

SEQ ID NO: 997931 - DNA, 15 bp, Homo sapiens
tgcaatgagctctcc

SEQ ID NO: 997932 - DNA, 15 bp, Homo sapiens
ctgcaatgagctctc

SEQ ID NO: 997933 - DNA, 15 bp, Homo sapiens
tctgcaatgagctct

SEQ ID NO: 997934 - DNA, 15 bp, Homo sapiens
gtctgcaatgagctc

SEQ ID NO: 997935 - DNA, 15 bp, Homo sapiens
ggtctgcaatgagct

SEQ ID NO: 997936 - DNA, 15 bp, Homo sapiens
tggtctgcaatgagc

SEQ ID NO: 997937 - DNA, 15 bp, Homo sapiens
gtggtctgcaatgag

SEQ ID NO: 997938 - DNA, 15 bp, Homo sapiens
cgtggtctgcaatga

SEQ ID NO: 997939 - DNA, 15 bp, Homo sapiens
acgtggtctgcaatg

SEQ ID NO: 997940 - DNA, 15 bp, Homo sapiens
cacgtggtctgcaat

SEQ ID NO: 997941 - DNA, 15 bp, Homo sapiens
ccacgtggtctgcaa

SEQ ID NO: 997942 - DNA, 15 bp, Homo sapiens
accacgtggtctgca

SEQ ID NO: 997943 - DNA, 15 bp, Homo sapiens
gaccacgtggtctgc

SEQ ID NO: 997944 - DNA, 15 bp, Homo sapiens
ggaccacgtggtctg

SEQ ID NO: 997945 - DNA, 15 bp, Homo sapiens
aggaccacgtggtct

SEQ ID NO: 997946 - DNA, 15 bp, Homo sapiens
gaggaccacgtggtc

SEQ ID NO: 997947 - DNA, 15 bp, Homo sapiens
ggaggaccacgtggt

SEQ ID NO: 997948 - DNA, 15 bp, Homo sapiens
tggaggaccacgtgg

SEQ ID NO: 997949 - DNA, 15 bp, Homo sapiens
ctggaggaccacgtg

SEQ ID NO: 997950 - DNA, 15 bp, Homo sapiens
cctggaggaccacgt

SEQ ID NO: 997951 - DNA, 15 bp, Homo sapiens
ccctggaggaccacg

SEQ ID NO: 997952 - DNA, 15 bp, Homo sapiens
accctggaggaccac

SEQ ID NO: 997953 - DNA, 15 bp, Homo sapiens
caccctggaggacca

SEQ ID NO: 997954 - DNA, 15 bp, Homo sapiens
ccaccctggaggacc

SEQ ID NO: 997955 - DNA, 15 bp, Homo sapiens
gccaccctggaggac

SEQ ID NO: 997956 - DNA, 15 bp, Homo sapiens
agccaccctggagga

SEQ ID NO: 997957 - DNA, 15 bp, Homo sapiens
gagccaccctggagg

SEQ ID NO: 997958 - DNA, 15 bp, Homo sapiens
agagccaccctggag

SEQ ID NO: 997959 - DNA, 15 bp, Homo sapiens
gagagccaccctgga

SEQ ID NO: 997960 - DNA, 15 bp, Homo sapiens
ggagagccaccctgg

SEQ ID NO: 997961 - DNA, 15 bp, Homo sapiens
tggagagccaccctg

SEQ ID NO: 997962 - DNA, 15 bp, Homo sapiens
gtggagagccaccct

SEQ ID NO: 997963 - DNA, 15 bp, Homo sapiens
ggtggagagccaccc

SEQ ID NO: 997964 - DNA, 15 bp, Homo sapiens
aggtggagagccacc

SEQ ID NO: 997965 - DNA, 15 bp, Homo sapiens
aaggtggagagccac

SEQ ID NO: 997966 - DNA, 15 bp, Homo sapiens
gaaggtggagagcca

SEQ ID NO: 997967 - DNA, 15 bp, Homo sapiens
cgaaggtggagagcc

SEQ ID NO: 997968 - DNA, 15 bp, Homo sapiens
ccgaaggtggagagc

SEQ ID NO: 997969 - DNA, 15 bp, Homo sapiens
cccgaaggtggagag

SEQ ID NO: 997970 - DNA, 15 bp, Homo sapiens
acccgaaggtggaga

SEQ ID NO: 997971 - DNA, 15 bp, Homo sapiens
gacccgaaggtggag

SEQ ID NO: 997972 - DNA, 15 bp, Homo sapiens
ggacccgaaggtgga

SEQ ID NO: 997973 - DNA, 15 bp, Homo sapiens
aggacccgaaggtgg

SEQ ID NO: 997974 - DNA, 15 bp, Homo sapiens
caggacccgaaggtg

SEQ ID NO: 997975 - DNA, 15 bp, Homo sapiens
ccaggacccgaaggt

SEQ ID NO: 997976 - DNA, 15 bp, Homo sapiens
accaggacccgaagg

SEQ ID NO: 997977 - DNA, 15 bp, Homo sapiens
taccaggacccgaag

SEQ ID NO: 997978 - DNA, 15 bp, Homo sapiens
ataccaggacccgaa

SEQ ID NO: 997979 - DNA, 15 bp, Homo sapiens
aataccaggacccga

SEQ ID NO: 997980 - DNA, 15 bp, Homo sapiens
aaataccaggacccg

SEQ ID NO: 997981 - DNA, 15 bp, Homo sapiens
gaaataccaggaccc

SEQ ID NO: 997982 - DNA, 15 bp, Homo sapiens
ggaaataccaggacc

SEQ ID NO: 997983 - DNA, 15 bp, Homo sapiens
tggaaataccaggac

SEQ ID NO: 997984 - DNA, 15 bp, Homo sapiens
ctggaaataccagga

SEQ ID NO: 997985 - DNA, 15 bp, Homo sapiens
actggaaataccagg

SEQ ID NO: 997986 - DNA, 15 bp, Homo sapiens
gactggaaataccag

SEQ ID NO: 997987 - DNA, 15 bp, Homo sapiens
tgactggaaatacca

SEQ ID NO: 997988 - DNA, 15 bp, Homo sapiens
ttgactggaaatacc

SEQ ID NO: 997989 - DNA, 15 bp, Homo sapiens
cttgactggaaatac

SEQ ID NO: 997990 - DNA, 15 bp, Homo sapiens
acttgactggaaata

SEQ ID NO: 997991 - DNA, 15 bp, Homo sapiens
cacttgactggaaat

SEQ ID NO: 997992 - DNA, 15 bp, Homo sapiens
ccacttgactggaaa

SEQ ID NO: 997993 - DNA, 15 bp, Homo sapiens
cccacttgactggaa

SEQ ID NO: 997994 - DNA, 15 bp, Homo sapiens
acccacttgactgga

SEQ ID NO: 997995 - DNA, 15 bp, Homo sapiens
aacccacttgactgg

SEQ ID NO: 997996 - DNA, 15 bp, Homo sapiens
aaacccacttgactg

SEQ ID NO: 997997 - DNA, 15 bp, Homo sapiens
gaaacccacttgact

SEQ ID NO: 997998 - DNA, 15 bp, Homo sapiens
tgaaacccacttgac

SEQ ID NO: 997999 - DNA, 15 bp, Homo sapiens
ttgaaacccacttga

SEQ ID NO: 998000 - DNA, 15 bp, Homo sapiens
attgaaacccacttg

SEQ ID NO: 998001 - DNA, 15 bp, Homo sapiens
aattgaaacccactt

SEQ ID NO: 998002 - DNA, 15 bp, Homo sapiens
gaattgaaacccact

SEQ ID NO: 998003 - DNA, 15 bp, Homo sapiens
agaattgaaacccac

SEQ ID NO: 998004 - DNA, 15 bp, Homo sapiens
aagaattgaaaccca

SEQ ID NO: 998005 - DNA, 15 bp, Homo sapiens
caagaattgaaaccc

SEQ ID NO: 998006 - DNA, 15 bp, Homo sapiens
ccaagaattgaaacc

SEQ ID NO: 998007 - DNA, 15 bp, Homo sapiens
cccaagaattgaaac

SEQ ID NO: 998008 - DNA, 15 bp, Homo sapiens
gcccaagaattgaaa

SEQ ID NO: 998009 - DNA, 15 bp, Homo sapiens
agcccaagaattgaa

SEQ ID NO: 998010 - DNA, 15 bp, Homo sapiens
aagcccaagaattga

SEQ ID NO: 998011 - DNA, 15 bp, Homo sapiens
aaagcccaagaattg

SEQ ID NO: 998012 - DNA, 15 bp, Homo sapiens
caaagcccaagaatt

SEQ ID NO: 998013 - DNA, 15 bp, Homo sapiens
gcaaagcccaagaat

SEQ ID NO: 998014 - DNA, 15 bp, Homo sapiens
ggcaaagcccaagaa

SEQ ID NO: 998015 - DNA, 15 bp, Homo sapiens
cggcaaagcccaaga

SEQ ID NO: 998016 - DNA, 15 bp, Homo sapiens
gcggcaaagcccaag

SEQ ID NO: 998017 - DNA, 15 bp, Homo sapiens
ggcggcaaagcccaa

SEQ ID NO: 998018 - DNA, 15 bp, Homo sapiens
gggcggcaaagccca

SEQ ID NO: 998019 - DNA, 15 bp, Homo sapiens
agggcggcaaagccc

SEQ ID NO: 998020 - DNA, 15 bp, Homo sapiens
aagggcggcaaagcc

SEQ ID NO: 998021 - DNA, 15 bp, Homo sapiens
taagggcggcaaagc

SEQ ID NO: 998022 - DNA, 15 bp, Homo sapiens
ataagggcggcaaag

SEQ ID NO: 998023 - DNA, 15 bp, Homo sapiens
cataagggcggcaaa

SEQ ID NO: 998024 - DNA, 15 bp, Homo sapiens
tcataagggcggcaa

SEQ ID NO: 998025 - DNA, 15 bp, Homo sapiens
atcataagggcggca

SEQ ID NO: 998026 - DNA, 15 bp, Homo sapiens
catcataagggcggc

SEQ ID NO: 998027 - DNA, 15 bp, Homo sapiens
tcatcataagggcgg

SEQ ID NO: 998028 - DNA, 15 bp, Homo sapiens
ttcatcataagggcg

SEQ ID NO: 998029 - DNA, 15 bp, Homo sapiens
cttcatcataagggc

SEQ ID NO: 998030 - DNA, 15 bp, Homo sapiens
acttcatcataaggg

SEQ ID NO: 998031 - DNA, 15 bp, Homo sapiens
cacttcatcataagg

SEQ ID NO: 998032 - DNA, 15 bp, Homo sapiens
acacttcatcataag

SEQ ID NO: 998033 - DNA, 15 bp, Homo sapiens
cacacttcatcataa

SEQ ID NO: 998034 - DNA, 15 bp, Homo sapiens
acacacttcatcata

SEQ ID NO: 998035 - DNA, 15 bp, Homo sapiens
cacacacttcatcat

SEQ ID NO: 998036 - DNA, 15 bp, Homo sapiens
acacacacttcatca

SEQ ID NO: 998037 - DNA, 15 bp, Homo sapiens
aacacacacttcatc

SEQ ID NO: 998038 - DNA, 15 bp, Homo sapiens
aaacacacacttcat

SEQ ID NO: 998039 - DNA, 15 bp, Homo sapiens
caaacacacacttca

SEQ ID NO: 998040 - DNA, 15 bp, Homo sapiens
tcaaacacacacttc

SEQ ID NO: 998041 - DNA, 15 bp, Homo sapiens
atcaaacacacactt

SEQ ID NO: 998042 - DNA, 15 bp, Homo sapiens
catcaaacacacact

SEQ ID NO: 998043 - DNA, 15 bp, Homo sapiens
gcatcaaacacacac

SEQ ID NO: 998044 - DNA, 15 bp, Homo sapiens
ggcatcaaacacaca

SEQ ID NO: 998045 - DNA, 15 bp, Homo sapiens
tggcatcaaacacac

SEQ ID NO: 998046 - DNA, 15 bp, Homo sapiens
ctggcatcaaacaca

SEQ ID NO: 998047 - DNA, 15 bp, Homo sapiens
actggcatcaaacac

SEQ ID NO: 998048 - DNA, 15 bp, Homo sapiens
cactggcatcaaaca

SEQ ID NO: 998049 - DNA, 15 bp, Homo sapiens
tcactggcatcaaac

SEQ ID NO: 998050 - DNA, 15 bp, Homo sapiens
ctcactggcatcaaa

SEQ ID NO: 998051 - DNA, 15 bp, Homo sapiens
tctcactggcatcaa

SEQ ID NO: 998052 - DNA, 15 bp, Homo sapiens
ttctcactggcatca

SEQ ID NO: 998053 - DNA, 15 bp, Homo sapiens
tttctcactggcatc

SEQ ID NO: 998054 - DNA, 15 bp, Homo sapiens
gtttctcactggcat

SEQ ID NO: 998055 - DNA, 15 bp, Homo sapiens
agtttctcactggca

SEQ ID NO: 998056 - DNA, 15 bp, Homo sapiens
gagtttctcactggc

SEQ ID NO: 998057 - DNA, 15 bp, Homo sapiens
tgagtttctcactgg

SEQ ID NO: 998058 - DNA, 15 bp, Homo sapiens
ctgagtttctcactg

SEQ ID NO: 998059 - DNA, 15 bp, Homo sapiens
actgagtttctcact

SEQ ID NO: 998060 - DNA, 15 bp, Homo sapiens
gactgagtttctcac

SEQ ID NO: 998061 - DNA, 15 bp, Homo sapiens
agactgagtttctca

SEQ ID NO: 998062 - DNA, 15 bp, Homo sapiens
cagactgagtttctc

SEQ ID NO: 998063 - DNA, 15 bp, Homo sapiens
ccagactgagtttct

SEQ ID NO: 998064 - DNA, 15 bp, Homo sapiens
gccagactgagtttc

SEQ ID NO: 998065 - DNA, 15 bp, Homo sapiens
tgccagactgagttt

SEQ ID NO: 998066 - DNA, 15 bp, Homo sapiens
ctgccagactgagtt

SEQ ID NO: 998067 - DNA, 15 bp, Homo sapiens
cctgccagactgagt

SEQ ID NO: 998068 - DNA, 15 bp, Homo sapiens
gcctgccagactgag

SEQ ID NO: 998069 - DNA, 15 bp, Homo sapiens
agcctgccagactga

SEQ ID NO: 998070 - DNA, 15 bp, Homo sapiens
tagcctgccagactg

SEQ ID NO: 998071 - DNA, 15 bp, Homo sapiens
gtagcctgccagact

SEQ ID NO: 998072 - DNA, 15 bp, Homo sapiens
tgtagcctgccagac

SEQ ID NO: 998073 - DNA, 15 bp, Homo sapiens
ttgtagcctgccaga

SEQ ID NO: 998074 - DNA, 15 bp, Homo sapiens
tttgtagcctgccag

SEQ ID NO: 998075 - DNA, 15 bp, Homo sapiens
ttttgtagcctgcca

SEQ ID NO: 998076 - DNA, 15 bp, Homo sapiens
attttgtagcctgcc

SEQ ID NO: 998077 - DNA, 15 bp, Homo sapiens
aattttgtagcctgc

SEQ ID NO: 998078 - DNA, 15 bp, Homo sapiens
gaattttgtagcctg

SEQ ID NO: 998079 - DNA, 15 bp, Homo sapiens
agaattttgtagcct

SEQ ID NO: 998080 - DNA, 15 bp, Homo sapiens
tagaattttgtagcc

SEQ ID NO: 998081 - DNA, 15 bp, Homo sapiens
gtagaattttgtagc

SEQ ID NO: 998082 - DNA, 15 bp, Homo sapiens
agtagaattttgtag

SEQ ID NO: 998083 - DNA, 15 bp, Homo sapiens
gagtagaattttgta

SEQ ID NO: 998084 - DNA, 15 bp, Homo sapiens
ggagtagaattttgt

SEQ ID NO: 998085 - DNA, 15 bp, Homo sapiens
tggagtagaattttg

SEQ ID NO: 998086 - DNA, 15 bp, Homo sapiens
ttggagtagaatttt

SEQ ID NO: 998087 - DNA, 15 bp, Homo sapiens
cttggagtagaattt

SEQ ID NO: 998088 - DNA, 15 bp, Homo sapiens
tcttggagtagaatt

SEQ ID NO: 998089 - DNA, 15 bp, Homo sapiens
ttcttggagtagaat

SEQ ID NO: 998090 - DNA, 15 bp, Homo sapiens
tttcttggagtagaa

SEQ ID NO: 998091 - DNA, 15 bp, Homo sapiens
atttcttggagtaga

SEQ ID NO: 998092 - DNA, 15 bp, Homo sapiens
tatttcttggagtag

SEQ ID NO: 998093 - DNA, 15 bp, Homo sapiens
gtatttcttggagta

SEQ ID NO: 998094 - DNA, 15 bp, Homo sapiens
ggtatttcttggagt

SEQ ID NO: 998095 - DNA, 15 bp, Homo sapiens
gggtatttcttggag

SEQ ID NO: 998096 - DNA, 15 bp, Homo sapiens
tgggtatttcttgga

SEQ ID NO: 998097 - DNA, 15 bp, Homo sapiens
ctgggtatttcttgg

SEQ ID NO: 998098 - DNA, 15 bp, Homo sapiens
gctgggtatttcttg

SEQ ID NO: 998099 - DNA, 15 bp, Homo sapiens
tgctgggtatttctt

SEQ ID NO: 998100 - DNA, 15 bp, Homo sapiens
ttgctgggtatttct

SEQ ID NO: 998101 - DNA, 15 bp, Homo sapiens
gttgctgggtatttc

SEQ ID NO: 998102 - DNA, 15 bp, Homo sapiens
ggttgctgggtattt

SEQ ID NO: 998103 - DNA, 15 bp, Homo sapiens
aggttgctgggtatt

SEQ ID NO: 998104 - DNA, 15 bp, Homo sapiens
aaggttgctgggtat

SEQ ID NO: 998105 - DNA, 15 bp, Homo sapiens
gaaggttgctgggta

SEQ ID NO: 998106 - DNA, 15 bp, Homo sapiens
agaaggttgctgggt

SEQ ID NO: 998107 - DNA, 15 bp, Homo sapiens
cagaaggttgctggg

SEQ ID NO: 998108 - DNA, 15 bp, Homo sapiens
acagaaggttgctgg

SEQ ID NO: 998109 - DNA, 15 bp, Homo sapiens
aacagaaggttgctg

SEQ ID NO: 998110 - DNA, 15 bp, Homo sapiens
aaacagaaggttgct

SEQ ID NO: 998111 - DNA, 15 bp, Homo sapiens
caaacagaaggttgc

SEQ ID NO: 998112 - DNA, 15 bp, Homo sapiens
acaaacagaaggttg

SEQ ID NO: 998113 - DNA, 15 bp, Homo sapiens
aacaaacagaaggtt

SEQ ID NO: 998114 - DNA, 15 bp, Homo sapiens
gaacaaacagaaggt

SEQ ID NO: 998115 - DNA, 15 bp, Homo sapiens
ggaacaaacagaagg

SEQ ID NO: 998116 - DNA, 15 bp, Homo sapiens
tggaacaaacagaag

SEQ ID NO: 998117 - DNA, 15 bp, Homo sapiens
ttggaacaaacagaa

SEQ ID NO: 998118 - DNA, 15 bp, Homo sapiens
tttggaacaaacaga

SEQ ID NO: 998119 - DNA, 15 bp, Homo sapiens
ctttggaacaaacag

SEQ ID NO: 998120 - DNA, 15 bp, Homo sapiens
gctttggaacaaaca

SEQ ID NO: 998121 - DNA, 15 bp, Homo sapiens
tgctttggaacaaac

SEQ ID NO: 998122 - DNA, 15 bp, Homo sapiens
ttgctttggaacaaa

SEQ ID NO: 998123 - DNA, 15 bp, Homo sapiens
gttgctttggaacaa

SEQ ID NO: 998124 - DNA, 15 bp, Homo sapiens
agttgctttggaaca

SEQ ID NO: 998125 - DNA, 15 bp, Homo sapiens
tagttgctttggaac

SEQ ID NO: 998126 - DNA, 15 bp, Homo sapiens
ctagttgctttggaa

SEQ ID NO: 998127 - DNA, 15 bp, Homo sapiens
gctagttgctttgga

SEQ ID NO: 998128 - DNA, 15 bp, Homo sapiens
agctagttgctttgg

SEQ ID NO: 998129 - DNA, 15 bp, Homo sapiens
aagctagttgctttg

SEQ ID NO: 998130 - DNA, 15 bp, Homo sapiens
taagctagttgcttt

SEQ ID NO: 998131 - DNA, 15 bp, Homo sapiens
ataagctagttgctt

SEQ ID NO: 998132 - DNA, 15 bp, Homo sapiens
gataagctagttgct

SEQ ID NO: 998133 - DNA, 15 bp, Homo sapiens
tgataagctagttgc

SEQ ID NO: 998134 - DNA, 15 bp, Homo sapiens
atgataagctagttg

SEQ ID NO: 998135 - DNA, 15 bp, Homo sapiens
catgataagctagtt

SEQ ID NO: 998136 - DNA, 15 bp, Homo sapiens
gcatgataagctagt

SEQ ID NO: 998137 - DNA, 15 bp, Homo sapiens
tgcatgataagctag

SEQ ID NO: 998138 - DNA, 15 bp, Homo sapiens
ttgcatgataagcta

SEQ ID NO: 998139 - DNA, 15 bp, Homo sapiens
cttgcatgataagct

SEQ ID NO: 998140 - DNA, 15 bp, Homo sapiens
gcttgcatgataagc

SEQ ID NO: 998141 - DNA, 15 bp, Homo sapiens
tgcttgcatgataag

SEQ ID NO: 998142 - DNA, 15 bp, Homo sapiens
ttgcttgcatgataa

SEQ ID NO: 998143 - DNA, 15 bp, Homo sapiens
tttgcttgcatgata

SEQ ID NO: 998144 - DNA, 15 bp, Homo sapiens
atttgcttgcatgat

SEQ ID NO: 998145 - DNA, 15 bp, Homo sapiens
aatttgcttgcatga

SEQ ID NO: 998146 - DNA, 15 bp, Homo sapiens
aaatttgcttgcatg

SEQ ID NO: 998147 - DNA, 15 bp, Homo sapiens
aaaatttgcttgcat

SEQ ID NO: 998148 - DNA, 15 bp, Homo sapiens
caaaatttgcttgca

SEQ ID NO: 998149 - DNA, 15 bp, Homo sapiens
gcaaaatttgcttgc

SEQ ID NO: 998150 - DNA, 15 bp, Homo sapiens
agcaaaatttgcttg

SEQ ID NO: 998151 - DNA, 15 bp, Homo sapiens
cagcaaaatttgctt

SEQ ID NO: 998152 - DNA, 15 bp, Homo sapiens
tcagcaaaatttgct

SEQ ID NO: 998153 - DNA, 15 bp, Homo sapiens
gtcagcaaaatttgc

SEQ ID NO: 998154 - DNA, 15 bp, Homo sapiens
agtcagcaaaatttg

SEQ ID NO: 998155 - DNA, 15 bp, Homo sapiens
gagtcagcaaaattt

SEQ ID NO: 998156 - DNA, 15 bp, Homo sapiens
ggagtcagcaaaatt

SEQ ID NO: 998157 - DNA, 15 bp, Homo sapiens
tggagtcagcaaaat

SEQ ID NO: 998158 - DNA, 15 bp, Homo sapiens
ctggagtcagcaaaa

SEQ ID NO: 998159 - DNA, 15 bp, Homo sapiens
cctggagtcagcaaa

SEQ ID NO: 998160 - DNA, 15 bp, Homo sapiens
gcctggagtcagcaa

SEQ ID NO: 998161 - DNA, 15 bp, Homo sapiens
agcctggagtcagca

SEQ ID NO: 998162 - DNA, 15 bp, Homo sapiens
aagcctggagtcagc

SEQ ID NO: 998163 - DNA, 15 bp, Homo sapiens
aaagcctggagtcag

SEQ ID NO: 998164 - DNA, 15 bp, Homo sapiens
taaagcctggagtca

SEQ ID NO: 998165 - DNA, 15 bp, Homo sapiens
ataaagcctggagtc

SEQ ID NO: 998166 - DNA, 15 bp, Homo sapiens
gataaagcctggagt

SEQ ID NO: 998167 - DNA, 15 bp, Homo sapiens
agataaagcctggag

SEQ ID NO: 998168 - DNA, 15 bp, Homo sapiens
aagataaagcctgga

SEQ ID NO: 998169 - DNA, 15 bp, Homo sapiens
aaagataaagcctgg

SEQ ID NO: 998170 - DNA, 15 bp, Homo sapiens
taaagataaagcctg

SEQ ID NO: 998171 - DNA, 15 bp, Homo sapiens
ctaaagataaagcct

SEQ ID NO: 998172 - DNA, 15 bp, Homo sapiens
cctaaagataaagcc

SEQ ID NO: 998173 - DNA, 15 bp, Homo sapiens
tcctaaagataaagc

SEQ ID NO: 998174 - DNA, 15 bp, Homo sapiens
ttcctaaagataaag

SEQ ID NO: 998175 - DNA, 15 bp, Homo sapiens
tttcctaaagataaa

SEQ ID NO: 998176 - DNA, 15 bp, Homo sapiens
ttttcctaaagataa

SEQ ID NO: 998177 - DNA, 15 bp, Homo sapiens
gttttcctaaagata

SEQ ID NO: 998178 - DNA, 15 bp, Homo sapiens
tgttttcctaaagat

SEQ ID NO: 998179 - DNA, 15 bp, Homo sapiens
ttgttttcctaaaga

SEQ ID NO: 998180 - DNA, 15 bp, Homo sapiens
tttgttttcctaaag

SEQ ID NO: 998181 - DNA, 15 bp, Homo sapiens
ttttgttttcctaaa

SEQ ID NO: 998182 - DNA, 15 bp, Homo sapiens
tttttgttttcctaa

SEQ ID NO: 998183 - DNA, 15 bp, Homo sapiens
ttttttgttttccta

SEQ ID NO: 998184 - DNA, 15 bp, Homo sapiens
tttttttgttttcct

SEQ ID NO: 998185 - DNA, 15 bp, Homo sapiens
gtttttttgttttcc

SEQ ID NO: 998186 - DNA, 15 bp, Homo sapiens
ggtttttttgttttc

SEQ ID NO: 998187 - DNA, 15 bp, Homo sapiens
tggtttttttgtttt

SEQ ID NO: 998188 - DNA, 15 bp, Homo sapiens
ttggtttttttgttt

SEQ ID NO: 998189 - DNA, 15 bp, Homo sapiens
tttggtttttttgtt

SEQ ID NO: 998190 - DNA, 15 bp, Homo sapiens
ctttggtttttttgt

SEQ ID NO: 998191 - DNA, 15 bp, Homo sapiens
actttggtttttttg

SEQ ID NO: 998192 - DNA, 15 bp, Homo sapiens
tactttggttttttt

SEQ ID NO: 998193 - DNA, 15 bp, Homo sapiens
aatactttggttttt

SEQ ID NO: 998194 - DNA, 15 bp, Homo sapiens
taatactttggtttt

SEQ ID NO: 998195 - DNA, 15 bp, Homo sapiens
ataatactttggttt

SEQ ID NO: 998196 - DNA, 15 bp, Homo sapiens
gataatactttggtt

SEQ ID NO: 998197 - DNA, 15 bp, Homo sapiens
tgataatactttggt

SEQ ID NO: 998198 - DNA, 15 bp, Homo sapiens
ctgataatactttgg

SEQ ID NO: 998199 - DNA, 15 bp, Homo sapiens
gctgataatactttg

SEQ ID NO: 998200 - DNA, 15 bp, Homo sapiens
tgctgataatacttt

SEQ ID NO: 998201 - DNA, 15 bp, Homo sapiens
ctgctgataatactt

SEQ ID NO: 998202 - DNA, 15 bp, Homo sapiens
cctgctgataatact

SEQ ID NO: 998203 - DNA, 15 bp, Homo sapiens
acctgctgataatac

SEQ ID NO: 998204 - DNA, 15 bp, Homo sapiens
cacctgctgataata

SEQ ID NO: 998205 - DNA, 15 bp, Homo sapiens
ccacctgctgataat

SEQ ID NO: 998206 - DNA, 15 bp, Homo sapiens
cccacctgctgataa

SEQ ID NO: 998207 - DNA, 15 bp, Homo sapiens
tcccacctgctgata

SEQ ID NO: 998208 - DNA, 15 bp, Homo sapiens
ttcccacctgctgat

SEQ ID NO: 998209 - DNA, 15 bp, Homo sapiens
tttcccacctgctga

SEQ ID NO: 998210 - DNA, 15 bp, Homo sapiens
ctttcccacctgctg

SEQ ID NO: 998211 - DNA, 15 bp, Homo sapiens
tctttcccacctgct

SEQ ID NO: 998212 - DNA, 15 bp, Homo sapiens
atctttcccacctgc

SEQ ID NO: 998213 - DNA, 15 bp, Homo sapiens
aatctttcccacctg

SEQ ID NO: 998214 - DNA, 15 bp, Homo sapiens
aaatctttcccacct

SEQ ID NO: 998215 - DNA, 15 bp, Homo sapiens
aaaatctttcccacc

SEQ ID NO: 998216 - DNA, 15 bp, Homo sapiens
aaaaatctttcccac

SEQ ID NO: 998217 - DNA, 15 bp, Homo sapiens
gaaaaatctttccca

SEQ ID NO: 998218 - DNA, 15 bp, Homo sapiens
agaaaaatctttccc

SEQ ID NO: 998219 - DNA, 15 bp, Homo sapiens
tagaaaaatctttcc

SEQ ID NO: 998220 - DNA, 15 bp, Homo sapiens
atagaaaaatctttc

SEQ ID NO: 998221 - DNA, 15 bp, Homo sapiens
aatagaaaaatcttt

SEQ ID NO: 998222 - DNA, 15 bp, Homo sapiens
caatagaaaaatctt

SEQ ID NO: 998223 - DNA, 15 bp, Homo sapiens
tcaatagaaaaatct

SEQ ID NO: 998224 - DNA, 15 bp, Homo sapiens
ttcaatagaaaaatc

SEQ ID NO: 998225 - DNA, 15 bp, Homo sapiens
tttcaatagaaaaat

SEQ ID NO: 998226 - DNA, 15 bp, Homo sapiens
ttttcaatagaaaaa

SEQ ID NO: 998227 - DNA, 15 bp, Homo sapiens
attttcaatagaaaa

SEQ ID NO: 998228 - DNA, 15 bp, Homo sapiens
aattttcaatagaaa

SEQ ID NO: 998229 - DNA, 15 bp, Homo sapiens
aaattttcaatagaa

SEQ ID NO: 998230 - DNA, 15 bp, Homo sapiens
taaattttcaataga

SEQ ID NO: 998231 - DNA, 15 bp, Homo sapiens
ataaattttcaatag

SEQ ID NO: 998232 - DNA, 15 bp, Homo sapiens
gataaattttcaata

SEQ ID NO: 998233 - DNA, 15 bp, Homo sapiens
ggataaattttcaat

SEQ ID NO: 998234 - DNA, 15 bp, Homo sapiens
gggataaattttcaa

SEQ ID NO: 998235 - DNA, 15 bp, Homo sapiens
agggataaattttca

SEQ ID NO: 998236 - DNA, 15 bp, Homo sapiens
cagggataaattttc

SEQ ID NO: 998237 - DNA, 15 bp, Homo sapiens
tcagggataaatttt

SEQ ID NO: 998238 - DNA, 15 bp, Homo sapiens
gtcagggataaattt

SEQ ID NO: 998239 - DNA, 15 bp, Homo sapiens
tgtcagggataaatt

SEQ ID NO: 998240 - DNA, 15 bp, Homo sapiens
ttgtcagggataaat

SEQ ID NO: 998241 - DNA, 15 bp, Homo sapiens
gttgtcagggataaa

SEQ ID NO: 998242 - DNA, 15 bp, Homo sapiens
agttgtcagggataa

SEQ ID NO: 998243 - DNA, 15 bp, Homo sapiens
gagttgtcagggata

SEQ ID NO: 998244 - DNA, 15 bp, Homo sapiens
tgagttgtcagggat

SEQ ID NO: 998245 - DNA, 15 bp, Homo sapiens
ctgagttgtcaggga

SEQ ID NO: 998246 - DNA, 15 bp, Homo sapiens
gctgagttgtcaggg

SEQ ID NO: 998247 - DNA, 15 bp, Homo sapiens
cgctgagttgtcagg

SEQ ID NO: 998248 - DNA, 15 bp, Homo sapiens
acgctgagttgtcag

SEQ ID NO: 998249 - DNA, 15 bp, Homo sapiens
aacgctgagttgtca

SEQ ID NO: 998250 - DNA, 15 bp, Homo sapiens
aaacgctgagttgtc

SEQ ID NO: 998251 - DNA, 15 bp, Homo sapiens
taaacgctgagttgt

SEQ ID NO: 998252 - DNA, 15 bp, Homo sapiens
ctaaacgctgagttg

SEQ ID NO: 998253 - DNA, 15 bp, Homo sapiens
tctaaacgctgagtt

SEQ ID NO: 998254 - DNA, 15 bp, Homo sapiens
ttctaaacgctgagt

SEQ ID NO: 998255 - DNA, 15 bp, Homo sapiens
tttctaaacgctgag

SEQ ID NO: 998256 - DNA, 15 bp, Homo sapiens
ttttctaaacgctga

SEQ ID NO: 998257 - DNA, 15 bp, Homo sapiens
cttttctaaacgctg

SEQ ID NO: 998258 - DNA, 15 bp, Homo sapiens
tcttttctaaacgct

SEQ ID NO: 998259 - DNA, 15 bp, Homo sapiens
ttcttttctaaacgc

SEQ ID NO: 998260 - DNA, 15 bp, Homo sapiens
tttcttttctaaacg

SEQ ID NO: 998261 - DNA, 15 bp, Homo sapiens
atttcttttctaaac

SEQ ID NO: 998262 - DNA, 15 bp, Homo sapiens
tatttcttttctaaa

SEQ ID NO: 998263 - DNA, 15 bp, Homo sapiens
ttatttcttttctaa

SEQ ID NO: 998264 - DNA, 15 bp, Homo sapiens
tttatttcttttcta

SEQ ID NO: 998265 - DNA, 15 bp, Homo sapiens
ttttatttcttttct

SEQ ID NO: 998266 - DNA, 15 bp, Homo sapiens
attttatttcttttc

SEQ ID NO: 998267 - DNA, 15 bp, Homo sapiens
cattttatttctttt

SEQ ID NO: 998268 - DNA, 15 bp, Homo sapiens
acattttatttcttt

SEQ ID NO: 998269 - DNA, 15 bp, Homo sapiens
cacattttatttctt

SEQ ID NO: 998270 - DNA, 15 bp, Homo sapiens
gcacattttatttct

SEQ ID NO: 998271 - DNA, 15 bp, Homo sapiens
ggcacattttatttc

SEQ ID NO: 998272 - DNA, 15 bp, Homo sapiens
tggcacattttattt

SEQ ID NO: 998273 - DNA, 15 bp, Homo sapiens
gtggcacattttatt

SEQ ID NO: 998274 - DNA, 15 bp, Homo sapiens
agtggcacattttat

SEQ ID NO: 998275 - DNA, 15 bp, Homo sapiens
aagtggcacatttta

SEQ ID NO: 998276 - DNA, 15 bp, Homo sapiens
gaagtggcacatttt

SEQ ID NO: 998277 - DNA, 15 bp, Homo sapiens
ggaagtggcacattt

SEQ ID NO: 998278 - DNA, 15 bp, Homo sapiens
tggaagtggcacatt

SEQ ID NO: 998279 - DNA, 15 bp, Homo sapiens
ctggaagtggcacat

SEQ ID NO: 998280 - DNA, 15 bp, Homo sapiens
tctggaagtggcaca

SEQ ID NO: 998281 - DNA, 15 bp, Homo sapiens
ctctggaagtggcac

SEQ ID NO: 998282 - DNA, 15 bp, Homo sapiens
cctctggaagtggca

SEQ ID NO: 998283 - DNA, 15 bp, Homo sapiens
acctctggaagtggc

SEQ ID NO: 998284 - DNA, 15 bp, Homo sapiens
cacctctggaagtgg

SEQ ID NO: 998285 - DNA, 15 bp, Homo sapiens
gcacctctggaagtg

SEQ ID NO: 998286 - DNA, 15 bp, Homo sapiens
agcacctctggaagt

SEQ ID NO: 998287 - DNA, 15 bp, Homo sapiens
cagcacctctggaag

SEQ ID NO: 998288 - DNA, 15 bp, Homo sapiens
gcagcacctctggaa

SEQ ID NO: 998289 - DNA, 15 bp, Homo sapiens
tgcagcacctctgga

SEQ ID NO: 998290 - DNA, 15 bp, Homo sapiens
atgcagcacctctgg

SEQ ID NO: 998291 - DNA, 15 bp, Homo sapiens
aatgcagcacctctg

SEQ ID NO: 998292 - DNA, 15 bp, Homo sapiens
caatgcagcacctct

SEQ ID NO: 998293 - DNA, 15 bp, Homo sapiens
gcaatgcagcacctc

SEQ ID NO: 998294 - DNA, 15 bp, Homo sapiens
tgcaatgcagcacct

SEQ ID NO: 998295 - DNA, 15 bp, Homo sapiens
ctgcaatgcagcacc

SEQ ID NO: 998296 - DNA, 15 bp, Homo sapiens
actgcaatgcagcac

SEQ ID NO: 998297 - DNA, 15 bp, Homo sapiens
aactgcaatgcagca

SEQ ID NO: 998298 - DNA, 15 bp, Homo sapiens
caactgcaatgcagc

SEQ ID NO: 998299 - DNA, 15 bp, Homo sapiens
acaactgcaatgcag

SEQ ID NO: 998300 - DNA, 15 bp, Homo sapiens
aacaactgcaatgca

SEQ ID NO: 998301 - DNA, 15 bp, Homo sapiens
gaacaactgcaatgc

SEQ ID NO: 998302 - DNA, 15 bp, Homo sapiens
tgaacaactgcaatg

SEQ ID NO: 998303 - DNA, 15 bp, Homo sapiens
ctgaacaactgcaat

SEQ ID NO: 998304 - DNA, 15 bp, Homo sapiens
cctgaacaactgcaa

SEQ ID NO: 998305 - DNA, 15 bp, Homo sapiens
ccctgaacaactgca

SEQ ID NO: 998306 - DNA, 15 bp, Homo sapiens
gccctgaacaactgc

SEQ ID NO: 998307 - DNA, 15 bp, Homo sapiens
agccctgaacaactg

SEQ ID NO: 998308 - DNA, 15 bp, Homo sapiens
tagccctgaacaact

SEQ ID NO: 998309 - DNA, 15 bp, Homo sapiens
ctagccctgaacaac

SEQ ID NO: 998310 - DNA, 15 bp, Homo sapiens
cctagccctgaacaa

SEQ ID NO: 998311 - DNA, 15 bp, Homo sapiens
ccctagccctgaaca

SEQ ID NO: 998312 - DNA, 15 bp, Homo sapiens
gccctagccctgaac

SEQ ID NO: 998313 - DNA, 15 bp, Homo sapiens
ggccctagccctgaa

SEQ ID NO: 998314 - DNA, 15 bp, Homo sapiens
tggccctagccctga

SEQ ID NO: 998315 - DNA, 15 bp, Homo sapiens
ctggccctagccctg

SEQ ID NO: 998316 - DNA, 15 bp, Homo sapiens
cctggccctagccct

SEQ ID NO: 998317 - DNA, 15 bp, Homo sapiens
gcctggccctagccc

SEQ ID NO: 998318 - DNA, 15 bp, Homo sapiens
tgcctggccctagcc

SEQ ID NO: 998319 - DNA, 15 bp, Homo sapiens
ctgcctggccctagc

SEQ ID NO: 998320 - DNA, 15 bp, Homo sapiens
cctgcctggccctag

SEQ ID NO: 998321 - DNA, 15 bp, Homo sapiens
tcctgcctggcccta

SEQ ID NO: 998322 - DNA, 15 bp, Homo sapiens
gtcctgcctggccct

SEQ ID NO: 998323 - DNA, 15 bp, Homo sapiens
tgtcctgcctggccc

SEQ ID NO: 998324 - DNA, 15 bp, Homo sapiens
ttgtcctgcctggcc

SEQ ID NO: 998325 - DNA, 15 bp, Homo sapiens
cttgtcctgcctggc

SEQ ID NO: 998326 - DNA, 15 bp, Homo sapiens
acttgtcctgcctgg

SEQ ID NO: 998327 - DNA, 15 bp, Homo sapiens
cacttgtcctgcctg

SEQ ID NO: 998328 - DNA, 15 bp, Homo sapiens
tcacttgtcctgcct

SEQ ID NO: 998329 - DNA, 15 bp, Homo sapiens
ttcacttgtcctgcc

SEQ ID NO: 998330 - DNA, 15 bp, Homo sapiens
attcacttgtcctgc

SEQ ID NO: 998331 - DNA, 15 bp, Homo sapiens
cattcacttgtcctg

SEQ ID NO: 998332 - DNA, 15 bp, Homo sapiens
ccattcacttgtcct

SEQ ID NO: 998333 - DNA, 15 bp, Homo sapiens
cccattcacttgtcc

SEQ ID NO: 998334 - DNA, 15 bp, Homo sapiens
acccattcacttgtc

SEQ ID NO: 998335 - DNA, 15 bp, Homo sapiens
cacccattcacttgt

SEQ ID NO: 998336 - DNA, 15 bp, Homo sapiens
ccacccattcacttg

SEQ ID NO: 998337 - DNA, 15 bp, Homo sapiens
cccacccattcactt

SEQ ID NO: 998338 - DNA, 15 bp, Homo sapiens
tcccacccattcact

SEQ ID NO: 998339 - DNA, 15 bp, Homo sapiens
gtcccacccattcac

SEQ ID NO: 998340 - DNA, 15 bp, Homo sapiens
tgtcccacccattca

SEQ ID NO: 998341 - DNA, 15 bp, Homo sapiens
ctgtcccacccattc

SEQ ID NO: 998342 - DNA, 15 bp, Homo sapiens
cctgtcccacccatt

SEQ ID NO: 998343 - DNA, 15 bp, Homo sapiens
acctgtcccacccat

SEQ ID NO: 998344 - DNA, 15 bp, Homo sapiens
cacctgtcccaccca

SEQ ID NO: 998345 - DNA, 15 bp, Homo sapiens
ccacctgtcccaccc

SEQ ID NO: 998346 - DNA, 15 bp, Homo sapiens
gccacctgtcccacc

SEQ ID NO: 998347 - DNA, 15 bp, Homo sapiens
agccacctgtcccac

SEQ ID NO: 998348 - DNA, 15 bp, Homo sapiens
gagccacctgtccca

SEQ ID NO: 998349 - DNA, 15 bp, Homo sapiens
ggagccacctgtccc

SEQ ID NO: 998350 - DNA, 15 bp, Homo sapiens
aggagccacctgtcc

SEQ ID NO: 998351 - DNA, 15 bp, Homo sapiens
caggagccacctgtc

SEQ ID NO: 998352 - DNA, 15 bp, Homo sapiens
gcaggagccacctgt

SEQ ID NO: 998353 - DNA, 15 bp, Homo sapiens
ggcaggagccacctg

SEQ ID NO: 998354 - DNA, 15 bp, Homo sapiens
aggcaggagccacct

SEQ ID NO: 998355 - DNA, 15 bp, Homo sapiens
taggcaggagccacc

SEQ ID NO: 998356 - DNA, 15 bp, Homo sapiens
ttaggcaggagccac

SEQ ID NO: 998357 - DNA, 15 bp, Homo sapiens
cttaggcaggagcca

SEQ ID NO: 998358 - DNA, 15 bp, Homo sapiens
ccttaggcaggagcc

SEQ ID NO: 998359 - DNA, 15 bp, Homo sapiens
tccttaggcaggagc

SEQ ID NO: 998360 - DNA, 15 bp, Homo sapiens
gtccttaggcaggag

SEQ ID NO: 998361 - DNA, 15 bp, Homo sapiens
ggtccttaggcagga

SEQ ID NO: 998362 - DNA, 15 bp, Homo sapiens
tggtccttaggcagg

SEQ ID NO: 998363 - DNA, 15 bp, Homo sapiens
gtggtccttaggcag

SEQ ID NO: 998364 - DNA, 15 bp, Homo sapiens
ggtggtccttaggca

SEQ ID NO: 998365 - DNA, 15 bp, Homo sapiens
aggtggtccttaggc

SEQ ID NO: 998366 - DNA, 15 bp, Homo sapiens
gaggtggtccttagg

SEQ ID NO: 998367 - DNA, 15 bp, Homo sapiens
tgaggtggtccttag

SEQ ID NO: 998368 - DNA, 15 bp, Homo sapiens
ctgaggtggtcctta

SEQ ID NO: 998369 - DNA, 15 bp, Homo sapiens
cctgaggtggtcctt

SEQ ID NO: 998370 - DNA, 15 bp, Homo sapiens
gcctgaggtggtcct

SEQ ID NO: 998371 - DNA, 15 bp, Homo sapiens
ggcctgaggtggtcc

SEQ ID NO: 998372 - DNA, 15 bp, Homo sapiens
tggcctgaggtggtc

SEQ ID NO: 998373 - DNA, 15 bp, Homo sapiens
gtggcctgaggtggt

SEQ ID NO: 998374 - DNA, 15 bp, Homo sapiens
agtggcctgaggtgg

SEQ ID NO: 998375 - DNA, 15 bp, Homo sapiens
tagtggcctgaggtg

SEQ ID NO: 998376 - DNA, 15 bp, Homo sapiens
ttagtggcctgaggt

SEQ ID NO: 998377 - DNA, 15 bp, Homo sapiens
gttagtggcctgagg

SEQ ID NO: 998378 - DNA, 15 bp, Homo sapiens
ggttagtggcctgag

SEQ ID NO: 998379 - DNA, 15 bp, Homo sapiens
gggttagtggcctga

SEQ ID NO: 998380 - DNA, 15 bp, Homo sapiens
ggggttagtggcctg

SEQ ID NO: 998381 - DNA, 15 bp, Homo sapiens
aggggttagtggcct

SEQ ID NO: 998382 - DNA, 15 bp, Homo sapiens
aaggggttagtggcc

SEQ ID NO: 998383 - DNA, 15 bp, Homo sapiens
caaggggttagtggc

SEQ ID NO: 998384 - DNA, 15 bp, Homo sapiens
acaaggggttagtgg

SEQ ID NO: 998385 - DNA, 15 bp, Homo sapiens
cacaaggggttagtg

SEQ ID NO: 998386 - DNA, 15 bp, Homo sapiens
ccacaaggggttagt

SEQ ID NO: 998387 - DNA, 15 bp, Homo sapiens
tccacaaggggttag

SEQ ID NO: 998388 - DNA, 15 bp, Homo sapiens
gtccacaaggggtta

SEQ ID NO: 998389 - DNA, 15 bp, Homo sapiens
tgtccacaaggggtt

SEQ ID NO: 998390 - DNA, 15 bp, Homo sapiens
ttgtccacaaggggt

SEQ ID NO: 998391 - DNA, 15 bp, Homo sapiens
gttgtccacaagggg

SEQ ID NO: 998392 - DNA, 15 bp, Homo sapiens
agttgtccacaaggg

SEQ ID NO: 998393 - DNA, 15 bp, Homo sapiens
cagttgtccacaagg

SEQ ID NO: 998394 - DNA, 15 bp, Homo sapiens
acagttgtccacaag

SEQ ID NO: 998395 - DNA, 15 bp, Homo sapiens
cacagttgtccacaa

SEQ ID NO: 998396 - DNA, 15 bp, Homo sapiens
tcacagttgtccaca

SEQ ID NO: 998397 - DNA, 15 bp, Homo sapiens
ctcacagttgtccac

SEQ ID NO: 998398 - DNA, 15 bp, Homo sapiens
actcacagttgtcca

SEQ ID NO: 998399 - DNA, 15 bp, Homo sapiens
tactcacagttgtcc

SEQ ID NO: 998400 - DNA, 15 bp, Homo sapiens
ctactcacagttgtc

SEQ ID NO: 998401 - DNA, 15 bp, Homo sapiens
gctactcacagttgt

SEQ ID NO: 998402 - DNA, 15 bp, Homo sapiens
agctactcacagttg

SEQ ID NO: 998403 - DNA, 15 bp, Homo sapiens
cagctactcacagtt

SEQ ID NO: 998404 - DNA, 15 bp, Homo sapiens
ccagctactcacagt

SEQ ID NO: 998405 - DNA, 15 bp, Homo sapiens
cccagctactcacag

SEQ ID NO: 998406 - DNA, 15 bp, Homo sapiens
acccagctactcaca

SEQ ID NO: 998407 - DNA, 15 bp, Homo sapiens
aacccagctactcac

SEQ ID NO: 998408 - DNA, 15 bp, Homo sapiens
aaacccagctactca

SEQ ID NO: 998409 - DNA, 15 bp, Homo sapiens
aaaacccagctactc

SEQ ID NO: 998410 - DNA, 15 bp, Homo sapiens
gaaaacccagctact

SEQ ID NO: 998411 - DNA, 15 bp, Homo sapiens
ggaaaacccagctac

SEQ ID NO: 998412 - DNA, 15 bp, Homo sapiens
gggaaaacccagcta

SEQ ID NO: 998413 - DNA, 15 bp, Homo sapiens
ggggaaaacccagct

SEQ ID NO: 998414 - DNA, 15 bp, Homo sapiens
gggggaaaacccagc

SEQ ID NO: 998415 - DNA, 15 bp, Homo sapiens
tgggggaaaacccag

SEQ ID NO: 998416 - DNA, 15 bp, Homo sapiens
gtgggggaaaaccca

SEQ ID NO: 998417 - DNA, 15 bp, Homo sapiens
ggtgggggaaaaccc

SEQ ID NO: 998418 - DNA, 15 bp, Homo sapiens
aggtgggggaaaacc

SEQ ID NO: 998419 - DNA, 15 bp, Homo sapiens
caggtgggggaaaac

SEQ ID NO: 998420 - DNA, 15 bp, Homo sapiens
gcaggtgggggaaaa

SEQ ID NO: 998421 - DNA, 15 bp, Homo sapiens
agcaggtgggggaaa

SEQ ID NO: 998422 - DNA, 15 bp, Homo sapiens
cagcaggtgggggaa

SEQ ID NO: 998423 - DNA, 15 bp, Homo sapiens
acagcaggtggggga

SEQ ID NO: 998424 - DNA, 15 bp, Homo sapiens
cacagcaggtggggg

SEQ ID NO: 998425 - DNA, 15 bp, Homo sapiens
gcacagcaggtgggg

SEQ ID NO: 998426 - DNA, 15 bp, Homo sapiens
tgcacagcaggtggg

SEQ ID NO: 998427 - DNA, 15 bp, Homo sapiens
ttgcacagcaggtgg

SEQ ID NO: 998428 - DNA, 15 bp, Homo sapiens
gttgcacagcaggtg

SEQ ID NO: 998429 - DNA, 15 bp, Homo sapiens
agttgcacagcaggt

SEQ ID NO: 998430 - DNA, 15 bp, Homo sapiens
aggaagttgcacagc

SEQ ID NO: 998431 - DNA, 15 bp, Homo sapiens
caggaagttgcacag

SEQ ID NO: 998432 - DNA, 15 bp, Homo sapiens
acaggaagttgcaca

SEQ ID NO: 998433 - DNA, 15 bp, Homo sapiens
cacaggaagttgcac

SEQ ID NO: 998434 - DNA, 15 bp, Homo sapiens
gcacaggaagttgca

SEQ ID NO: 998435 - DNA, 15 bp, Homo sapiens
agcacaggaagttgc

SEQ ID NO: 998436 - DNA, 15 bp, Homo sapiens
aagcacaggaagttg

SEQ ID NO: 998437 - DNA, 15 bp, Homo sapiens
aaagcacaggaagtt

SEQ ID NO: 998438 - DNA, 15 bp, Homo sapiens
caaagcacaggaagt

SEQ ID NO: 998439 - DNA, 15 bp, Homo sapiens
tcaaagcacaggaag

SEQ ID NO: 998440 - DNA, 15 bp, Homo sapiens
ctcaaagcacaggaa

SEQ ID NO: 998441 - DNA, 15 bp, Homo sapiens
cctcaaagcacagga

SEQ ID NO: 998442 - DNA, 15 bp, Homo sapiens
acctcaaagcacagg

SEQ ID NO: 998443 - DNA, 15 bp, Homo sapiens
aacctcaaagcacag

SEQ ID NO: 998444 - DNA, 15 bp, Homo sapiens
caacctcaaagcaca

SEQ ID NO: 998445 - DNA, 15 bp, Homo sapiens
ccaacctcaaagcac

SEQ ID NO: 998446 - DNA, 15 bp, Homo sapiens
tccaacctcaaagca

SEQ ID NO: 998447 - DNA, 15 bp, Homo sapiens
gtccaacctcaaagc

SEQ ID NO: 998448 - DNA, 15 bp, Homo sapiens
agtccaacctcaaag

SEQ ID NO: 998449 - DNA, 15 bp, Homo sapiens
tagtccaacctcaaa

SEQ ID NO: 998450 - DNA, 15 bp, Homo sapiens
ttagtccaacctcaa

SEQ ID NO: 998451 - DNA, 15 bp, Homo sapiens
gttagtccaacctca

SEQ ID NO: 998452 - DNA, 15 bp, Homo sapiens
agttagtccaacctc

SEQ ID NO: 998453 - DNA, 15 bp, Homo sapiens
aagttagtccaacct

SEQ ID NO: 998454 - DNA, 15 bp, Homo sapiens
caagttagtccaacc

SEQ ID NO: 998455 - DNA, 15 bp, Homo sapiens
acaagttagtccaac

SEQ ID NO: 998456 - DNA, 15 bp, Homo sapiens
gacaagttagtccaa

SEQ ID NO: 998457 - DNA, 15 bp, Homo sapiens
agacaagttagtcca

SEQ ID NO: 998458 - DNA, 15 bp, Homo sapiens
aagacaagttagtcc

SEQ ID NO: 998459 - DNA, 15 bp, Homo sapiens
gaagacaagttagtc

SEQ ID NO: 998460 - DNA, 15 bp, Homo sapiens
tgaagacaagttagt

SEQ ID NO: 998461 - DNA, 15 bp, Homo sapiens
ctgaagacaagttag

SEQ ID NO: 998462 - DNA, 15 bp, Homo sapiens
cctgaagacaagtta

SEQ ID NO: 998463 - DNA, 15 bp, Homo sapiens
tcctgaagacaagtt

SEQ ID NO: 998464 - DNA, 15 bp, Homo sapiens
ctcctgaagacaagt

SEQ ID NO: 998465 - DNA, 15 bp, Homo sapiens
gctcctgaagacaag

SEQ ID NO: 998466 - DNA, 15 bp, Homo sapiens
agctcctgaagacaa

SEQ ID NO: 998467 - DNA, 15 bp, Homo sapiens
tagctcctgaagaca

SEQ ID NO: 998468 - DNA, 15 bp, Homo sapiens
ttagctcctgaagac

SEQ ID NO: 998469 - DNA, 15 bp, Homo sapiens
attagctcctgaaga

SEQ ID NO: 998470 - DNA, 15 bp, Homo sapiens
aattagctcctgaag

SEQ ID NO: 998471 - DNA, 15 bp, Homo sapiens
taattagctcctgaa

SEQ ID NO: 998472 - DNA, 15 bp, Homo sapiens
ttaattagctcctga

SEQ ID NO: 998473 - DNA, 15 bp, Homo sapiens
gttaattagctcctg

SEQ ID NO: 998474 - DNA, 15 bp, Homo sapiens
agttaattagctcct

SEQ ID NO: 998475 - DNA, 15 bp, Homo sapiens
cagttaattagctcc

SEQ ID NO: 998476 - DNA, 15 bp, Homo sapiens
acagttaattagctc

SEQ ID NO: 998477 - DNA, 15 bp, Homo sapiens
tacagttaattagct

SEQ ID NO: 998478 - DNA, 15 bp, Homo sapiens
gtacagttaattagc

SEQ ID NO: 998479 - DNA, 15 bp, Homo sapiens
tgtacagttaattag

SEQ ID NO: 998480 - DNA, 15 bp, Homo sapiens
ctgtacagttaatta

SEQ ID NO: 998481 - DNA, 15 bp, Homo sapiens
gctgtacagttaatt

SEQ ID NO: 998482 - DNA, 15 bp, Homo sapiens
ggctgtacagttaat

SEQ ID NO: 998483 - DNA, 15 bp, Homo sapiens
gggctgtacagttaa

SEQ ID NO: 998484 - DNA, 15 bp, Homo sapiens
agggctgtacagtta

SEQ ID NO: 998485 - DNA, 15 bp, Homo sapiens
gagggctgtacagtt

SEQ ID NO: 998486 - DNA, 15 bp, Homo sapiens
ggagggctgtacagt

SEQ ID NO: 998487 - DNA, 15 bp, Homo sapiens
gggagggctgtacag

SEQ ID NO: 998488 - DNA, 15 bp, Homo sapiens
ggggagggctgtaca

SEQ ID NO: 998489 - DNA, 15 bp, Homo sapiens
tggggagggctgtac

SEQ ID NO: 998490 - DNA, 15 bp, Homo sapiens
gtggggagggctgta

SEQ ID NO: 998491 - DNA, 15 bp, Homo sapiens
cgtggggagggctgt

SEQ ID NO: 998492 - DNA, 15 bp, Homo sapiens
gcgtggggagggctg

SEQ ID NO: 998493 - DNA, 15 bp, Homo sapiens
ggcgtggggagggct

SEQ ID NO: 998494 - DNA, 15 bp, Homo sapiens
gggcgtggggagggc

SEQ ID NO: 998495 - DNA, 15 bp, Homo sapiens
ggggcgtggggaggg

SEQ ID NO: 998496 - DNA, 15 bp, Homo sapiens
tggggcgtggggagg

SEQ ID NO: 998497 - DNA, 15 bp, Homo sapiens
gtggggcgtggggag

SEQ ID NO: 998498 - DNA, 15 bp, Homo sapiens
ggtggggcgtgggga

SEQ ID NO: 998499 - DNA, 15 bp, Homo sapiens
gggtggggcgtgggg

SEQ ID NO: 998500 - DNA, 15 bp, Homo sapiens
tgggtggggcgtggg

SEQ ID NO: 998501 - DNA, 15 bp, Homo sapiens
atgggtggggcgtgg

SEQ ID NO: 998502 - DNA, 15 bp, Homo sapiens
tatgggtggggcgtg

SEQ ID NO: 998503 - DNA, 15 bp, Homo sapiens
gtatgggtggggcgt

SEQ ID NO: 998504 - DNA, 15 bp, Homo sapiens
cgtatgggtggggcg

SEQ ID NO: 998505 - DNA, 15 bp, Homo sapiens
ccgtatgggtggggc

SEQ ID NO: 998506 - DNA, 15 bp, Homo sapiens
accgtatgggtgggg

SEQ ID NO: 998507 - DNA, 15 bp, Homo sapiens
gaccgtatgggtggg

SEQ ID NO: 998508 - DNA, 15 bp, Homo sapiens
tgaccgtatgggtgg

SEQ ID NO: 998509 - DNA, 15 bp, Homo sapiens
gtgaccgtatgggtg

SEQ ID NO: 998510 - DNA, 15 bp, Homo sapiens
agtgaccgtatgggt

SEQ ID NO: 998511 - DNA, 15 bp, Homo sapiens
cagtgaccgtatggg

SEQ ID NO: 998512 - DNA, 15 bp, Homo sapiens
gcagtgaccgtatgg

SEQ ID NO: 998513 - DNA, 15 bp, Homo sapiens
tgcagtgaccgtatg

SEQ ID NO: 998514 - DNA, 15 bp, Homo sapiens
atgcagtgaccgtat

SEQ ID NO: 998515 - DNA, 15 bp, Homo sapiens
aatgcagtgaccgta

SEQ ID NO: 998516 - DNA, 15 bp, Homo sapiens
aaatgcagtgaccgt

SEQ ID NO: 998517 - DNA, 15 bp, Homo sapiens
caaatgcagtgaccg

SEQ ID NO: 998518 - DNA, 15 bp, Homo sapiens
ccaaatgcagtgacc

SEQ ID NO: 998519 - DNA, 15 bp, Homo sapiens
accaaatgcagtgac

SEQ ID NO: 998520 - DNA, 15 bp, Homo sapiens
gaccaaatgcagtga

SEQ ID NO: 998521 - DNA, 15 bp, Homo sapiens
tgaccaaatgcagtg

SEQ ID NO: 998522 - DNA, 15 bp, Homo sapiens
ctgaccaaatgcagt

SEQ ID NO: 998523 - DNA, 15 bp, Homo sapiens
gctgaccaaatgcag

SEQ ID NO: 998524 - DNA, 15 bp, Homo sapiens
ggctgaccaaatgca

SEQ ID NO: 998525 - DNA, 15 bp, Homo sapiens
aggctgaccaaatgc

SEQ ID NO: 998526 - DNA, 15 bp, Homo sapiens
caggctgaccaaatg

SEQ ID NO: 998527 - DNA, 15 bp, Homo sapiens
gcaggctgaccaaat

SEQ ID NO: 998528 - DNA, 15 bp, Homo sapiens
agcaggctgaccaaa

SEQ ID NO: 998529 - DNA, 15 bp, Homo sapiens
aagcaggctgaccaa

SEQ ID NO: 998530 - DNA, 15 bp, Homo sapiens
gaagcaggctgacca

SEQ ID NO: 998531 - DNA, 15 bp, Homo sapiens
agaagcaggctgacc

SEQ ID NO: 998532 - DNA, 15 bp, Homo sapiens
aagaagcaggctgac

SEQ ID NO: 998533 - DNA, 15 bp, Homo sapiens
gaagaagcaggctga

SEQ ID NO: 998534 - DNA, 15 bp, Homo sapiens
tgaagaagcaggctg

SEQ ID NO: 998535 - DNA, 15 bp, Homo sapiens
ctgaagaagcaggct

SEQ ID NO: 998536 - DNA, 15 bp, Homo sapiens
cctgaagaagcaggc

SEQ ID NO: 998537 - DNA, 15 bp, Homo sapiens
acctgaagaagcagg

SEQ ID NO: 998538 - DNA, 15 bp, Homo sapiens
gacctgaagaagcag

SEQ ID NO: 998539 - DNA, 15 bp, Homo sapiens
cgacctgaagaagca

SEQ ID NO: 998540 - DNA, 15 bp, Homo sapiens
tcgacctgaagaagc

SEQ ID NO: 998541 - DNA, 15 bp, Homo sapiens
atcgacctgaagaag

SEQ ID NO: 998542 - DNA, 15 bp, Homo sapiens
catcgacctgaagaa

SEQ ID NO: 998543 - DNA, 15 bp, Homo sapiens
gcatcgacctgaaga

SEQ ID NO: 998544 - DNA, 15 bp, Homo sapiens
ggcatcgacctgaag

SEQ ID NO: 998545 - DNA, 15 bp, Homo sapiens
gggcatcgacctgaa

SEQ ID NO: 998546 - DNA, 15 bp, Homo sapiens
agggcatcgacctga

SEQ ID NO: 998547 - DNA, 15 bp, Homo sapiens
gagggcatcgacctg

SEQ ID NO: 998548 - DNA, 15 bp, Homo sapiens
ggagggcatcgacct

SEQ ID NO: 998549 - DNA, 15 bp, Homo sapiens
aggagggcatcgacc

SEQ ID NO: 998550 - DNA, 15 bp, Homo sapiens
aaggagggcatcgac

SEQ ID NO: 998551 - DNA, 15 bp, Homo sapiens
gaaggagggcatcga

SEQ ID NO: 998552 - DNA, 15 bp, Homo sapiens
agaaggagggcatcg

SEQ ID NO: 998553 - DNA, 15 bp, Homo sapiens
cagaaggagggcatc

SEQ ID NO: 998554 - DNA, 15 bp, Homo sapiens
tcagaaggagggcat

SEQ ID NO: 998555 - DNA, 15 bp, Homo sapiens
atcagaaggagggca

SEQ ID NO: 998556 - DNA, 15 bp, Homo sapiens
tatcagaaggagggc

SEQ ID NO: 998557 - DNA, 15 bp, Homo sapiens
gtatcagaaggaggg

SEQ ID NO: 998558 - DNA, 15 bp, Homo sapiens
agtatcagaaggagg

SEQ ID NO: 998559 - DNA, 15 bp, Homo sapiens
gagtatcagaaggag

SEQ ID NO: 998560 - DNA, 15 bp, Homo sapiens
ggagtatcagaagga

SEQ ID NO: 998561 - DNA, 15 bp, Homo sapiens
tggagtatcagaagg

SEQ ID NO: 998562 - DNA, 15 bp, Homo sapiens
atggagtatcagaag

SEQ ID NO: 998563 - DNA, 15 bp, Homo sapiens
gatggagtatcagaa

SEQ ID NO: 998564 - DNA, 15 bp, Homo sapiens
agatggagtatcaga

SEQ ID NO: 998565 - DNA, 15 bp, Homo sapiens
gagatggagtatcag

SEQ ID NO: 998566 - DNA, 15 bp, Homo sapiens
ggagatggagtatca

SEQ ID NO: 998567 - DNA, 15 bp, Homo sapiens
aggagatggagtatc

SEQ ID NO: 998568 - DNA, 15 bp, Homo sapiens
aaggagatggagtat

SEQ ID NO: 998569 - DNA, 15 bp, Homo sapiens
gaaggagatggagta

SEQ ID NO: 998570 - DNA, 15 bp, Homo sapiens
tgaaggagatggagt

SEQ ID NO: 998571 - DNA, 15 bp, Homo sapiens
ctgaaggagatggag

SEQ ID NO: 998572 - DNA, 15 bp, Homo sapiens
cctgaaggagatgga

SEQ ID NO: 998573 - DNA, 15 bp, Homo sapiens
ccctgaaggagatgg

SEQ ID NO: 998574 - DNA, 15 bp, Homo sapiens
cccctgaaggagatg

SEQ ID NO: 998575 - DNA, 15 bp, Homo sapiens
tcccctgaaggagat

SEQ ID NO: 998576 - DNA, 15 bp, Homo sapiens
ctcccctgaaggaga

SEQ ID NO: 998577 - DNA, 15 bp, Homo sapiens
cctcccctgaaggag

SEQ ID NO: 998578 - DNA, 15 bp, Homo sapiens
acctcccctgaagga

SEQ ID NO: 998579 - DNA, 15 bp, Homo sapiens
aacctcccctgaagg

SEQ ID NO: 998580 - DNA, 15 bp, Homo sapiens
caacctcccctgaag

SEQ ID NO: 998581 - DNA, 15 bp, Homo sapiens
ccaacctcccctgaa

SEQ ID NO: 998582 - DNA, 15 bp, Homo sapiens
cccaacctcccctga

SEQ ID NO: 998583 - DNA, 15 bp, Homo sapiens
ccccaacctcccctg

SEQ ID NO: 998584 - DNA, 15 bp, Homo sapiens
gccccaacctcccct

SEQ ID NO: 998585 - DNA, 15 bp, Homo sapiens
ggccccaacctcccc

SEQ ID NO: 998586 - DNA, 15 bp, Homo sapiens
gggccccaacctccc

SEQ ID NO: 998587 - DNA, 15 bp, Homo sapiens
ggggccccaacctcc

SEQ ID NO: 998588 - DNA, 15 bp, Homo sapiens
tggggccccaacctc

SEQ ID NO: 998589 - DNA, 15 bp, Homo sapiens
gtggggccccaacct

SEQ ID NO: 998590 - DNA, 15 bp, Homo sapiens
agtggggccccaacc

SEQ ID NO: 998591 - DNA, 15 bp, Homo sapiens
cagtggggccccaac

SEQ ID NO: 998592 - DNA, 15 bp, Homo sapiens
ccagtggggccccaa

SEQ ID NO: 998593 - DNA, 15 bp, Homo sapiens
tccagtggggcccca

SEQ ID NO: 998594 - DNA, 15 bp, Homo sapiens
gtccagtggggcccc

SEQ ID NO: 998595 - DNA, 15 bp, Homo sapiens
agtccagtggggccc

SEQ ID NO: 998596 - DNA, 15 bp, Homo sapiens
cagtccagtggggcc

SEQ ID NO: 998597 - DNA, 15 bp, Homo sapiens
ccagtccagtggggc

SEQ ID NO: 998598 - DNA, 15 bp, Homo sapiens
cccagtccagtgggg

SEQ ID NO: 998599 - DNA, 15 bp, Homo sapiens
acccagtccagtggg

SEQ ID NO: 998600 - DNA, 15 bp, Homo sapiens
cacccagtccagtgg

SEQ ID NO: 998601 - DNA, 15 bp, Homo sapiens
acacccagtccagtg

SEQ ID NO: 998602 - DNA, 15 bp, Homo sapiens
gacacccagtccagt

SEQ ID NO: 998603 - DNA, 15 bp, Homo sapiens
tgacacccagtccag

SEQ ID NO: 998604 - DNA, 15 bp, Homo sapiens
ttgacacccagtcca

SEQ ID NO: 998605 - DNA, 15 bp, Homo sapiens
cttgacacccagtcc

SEQ ID NO: 998606 - DNA, 15 bp, Homo sapiens
tcttgacacccagtc

SEQ ID NO: 998607 - DNA, 15 bp, Homo sapiens
atcttgacacccagt

SEQ ID NO: 998608 - DNA, 15 bp, Homo sapiens
catcttgacacccag

SEQ ID NO: 998609 - DNA, 15 bp, Homo sapiens
acatcttgacaccca

SEQ ID NO: 998610 - DNA, 15 bp, Homo sapiens
cacatcttgacaccc

SEQ ID NO: 998611 - DNA, 15 bp, Homo sapiens
tcacatcttgacacc

SEQ ID NO: 998612 - DNA, 15 bp, Homo sapiens
ttcacatcttgacac

SEQ ID NO: 998613 - DNA, 15 bp, Homo sapiens
tttcacatcttgaca

SEQ ID NO: 998614 - DNA, 15 bp, Homo sapiens
ctttcacatcttgac

SEQ ID NO: 998615 - DNA, 15 bp, Homo sapiens
gctttcacatcttga

SEQ ID NO: 998616 - DNA, 15 bp, Homo sapiens
agctttcacatcttg

SEQ ID NO: 998617 - DNA, 15 bp, Homo sapiens
aagctttcacatctt

SEQ ID NO: 998618 - DNA, 15 bp, Homo sapiens
taagctttcacatct

SEQ ID NO: 998619 - DNA, 15 bp, Homo sapiens
ataagctttcacatc

SEQ ID NO: 998620 - DNA, 15 bp, Homo sapiens
cataagctttcacat

SEQ ID NO: 998621 - DNA, 15 bp, Homo sapiens
ccataagctttcaca

SEQ ID NO: 998622 - DNA, 15 bp, Homo sapiens
cccataagctttcac

SEQ ID NO: 998623 - DNA, 15 bp, Homo sapiens
tcccataagctttca

SEQ ID NO: 998624 - DNA, 15 bp, Homo sapiens
ctcccataagctttc

SEQ ID NO: 998625 - DNA, 15 bp, Homo sapiens
gctcccataagcttt

SEQ ID NO: 998626 - DNA, 15 bp, Homo sapiens
agctcccataagctt

SEQ ID NO: 998627 - DNA, 15 bp, Homo sapiens
aagctcccataagct

SEQ ID NO: 998628 - DNA, 15 bp, Homo sapiens
aaagctcccataagc

SEQ ID NO: 998629 - DNA, 15 bp, Homo sapiens
taaagctcccataag

SEQ ID NO: 998630 - DNA, 15 bp, Homo sapiens
ttaaagctcccataa

SEQ ID NO: 998631 - DNA, 15 bp, Homo sapiens
cttaaagctcccata

SEQ ID NO: 998632 - DNA, 15 bp, Homo sapiens
ccttaaagctcccat

SEQ ID NO: 998633 - DNA, 15 bp, Homo sapiens
tccttaaagctccca

SEQ ID NO: 998634 - DNA, 15 bp, Homo sapiens
ctccttaaagctccc

SEQ ID NO: 998635 - DNA, 15 bp, Homo sapiens
tctccttaaagctcc

SEQ ID NO: 998636 - DNA, 15 bp, Homo sapiens
gtctccttaaagctc

SEQ ID NO: 998637 - DNA, 15 bp, Homo sapiens
agtctccttaaagct

SEQ ID NO: 998638 - DNA, 15 bp, Homo sapiens
aagtctccttaaagc

SEQ ID NO: 998639 - DNA, 15 bp, Homo sapiens
gaagtctccttaaag

SEQ ID NO: 998640 - DNA, 15 bp, Homo sapiens
tgaagtctccttaaa

SEQ ID NO: 998641 - DNA, 15 bp, Homo sapiens
atgaagtctccttaa

SEQ ID NO: 998642 - DNA, 15 bp, Homo sapiens
catgaagtctcctta

SEQ ID NO: 998643 - DNA, 15 bp, Homo sapiens
ccatgaagtctcctt

SEQ ID NO: 998644 - DNA, 15 bp, Homo sapiens
accatgaagtctcct

SEQ ID NO: 998645 - DNA, 15 bp, Homo sapiens
caccatgaagtctcc

SEQ ID NO: 998646 - DNA, 15 bp, Homo sapiens
ccaccatgaagtctc

SEQ ID NO: 998647 - DNA, 15 bp, Homo sapiens
accaccatgaagtct

SEQ ID NO: 998648 - DNA, 15 bp, Homo sapiens
aaccaccatgaagtc

SEQ ID NO: 998649 - DNA, 15 bp, Homo sapiens
gaaccaccatgaagt

SEQ ID NO: 998650 - DNA, 15 bp, Homo sapiens
ggaaccaccatgaag

SEQ ID NO: 998651 - DNA, 15 bp, Homo sapiens
tggaaccaccatgaa

SEQ ID NO: 998652 - DNA, 15 bp, Homo sapiens
atggaaccaccatga

SEQ ID NO: 998653 - DNA, 15 bp, Homo sapiens
catggaaccaccatg

SEQ ID NO: 998654 - DNA, 15 bp, Homo sapiens
gcatggaaccaccat

SEQ ID NO: 998655 - DNA, 15 bp, Homo sapiens
tgcatggaaccacca

SEQ ID NO: 998656 - DNA, 15 bp, Homo sapiens
ctgcatggaaccacc

SEQ ID NO: 998657 - DNA, 15 bp, Homo sapiens
cctgcatggaaccac

SEQ ID NO: 998658 - DNA, 15 bp, Homo sapiens
acctgcatggaacca

SEQ ID NO: 998659 - DNA, 15 bp, Homo sapiens
cacctgcatggaacc

SEQ ID NO: 998660 - DNA, 15 bp, Homo sapiens
ccacctgcatggaac

SEQ ID NO: 998661 - DNA, 15 bp, Homo sapiens
accacctgcatggaa

SEQ ID NO: 998662 - DNA, 15 bp, Homo sapiens
aaccacctgcatgga

SEQ ID NO: 998663 - DNA, 15 bp, Homo sapiens
gaaccacctgcatgg

SEQ ID NO: 998664 - DNA, 15 bp, Homo sapiens
agaaccacctgcatg

SEQ ID NO: 998665 - DNA, 15 bp, Homo sapiens
cagaaccacctgcat

SEQ ID NO: 998666 - DNA, 15 bp, Homo sapiens
gcagaaccacctgca

SEQ ID NO: 998667 - DNA, 15 bp, Homo sapiens
ggcagaaccacctgc

SEQ ID NO: 998668 - DNA, 15 bp, Homo sapiens
tggcagaaccacctg

SEQ ID NO: 998669 - DNA, 15 bp, Homo sapiens
atggcagaaccacct

SEQ ID NO: 998670 - DNA, 15 bp, Homo sapiens
gatggcagaaccacc

SEQ ID NO: 998671 - DNA, 15 bp, Homo sapiens
ggatggcagaaccac

SEQ ID NO: 998672 - DNA, 15 bp, Homo sapiens
gggatggcagaacca

SEQ ID NO: 998673 - DNA, 15 bp, Homo sapiens
agggatggcagaacc

SEQ ID NO: 998674 - DNA, 15 bp, Homo sapiens
cagggatggcagaac

SEQ ID NO: 998675 - DNA, 15 bp, Homo sapiens
gcagggatggcagaa

SEQ ID NO: 998676 - DNA, 15 bp, Homo sapiens
agcagggatggcaga

SEQ ID NO: 998677 - DNA, 15 bp, Homo sapiens
cagcagggatggcag

SEQ ID NO: 998678 - DNA, 15 bp, Homo sapiens
tcagcagggatggca

SEQ ID NO: 998679 - DNA, 15 bp, Homo sapiens
atcagcagggatggc

SEQ ID NO: 998680 - DNA, 15 bp, Homo sapiens
aatcagcagggatgg

SEQ ID NO: 998681 - DNA, 15 bp, Homo sapiens
aaatcagcagggatg

SEQ ID NO: 998682 - DNA, 15 bp, Homo sapiens
taaatcagcagggat

SEQ ID NO: 998683 - DNA, 15 bp, Homo sapiens
ctaaatcagcaggga

SEQ ID NO: 998684 - DNA, 15 bp, Homo sapiens
gctaaatcagcaggg

SEQ ID NO: 998685 - DNA, 15 bp, Homo sapiens
ggctaaatcagcagg

SEQ ID NO: 998686 - DNA, 15 bp, Homo sapiens
aggctaaatcagcag

SEQ ID NO: 998687 - DNA, 15 bp, Homo sapiens
caggctaaatcagca

SEQ ID NO: 998688 - DNA, 15 bp, Homo sapiens
ccaggctaaatcagc

SEQ ID NO: 998689 - DNA, 15 bp, Homo sapiens
accaggctaaatcag

SEQ ID NO: 998690 - DNA, 15 bp, Homo sapiens
caccaggctaaatca

SEQ ID NO: 998691 - DNA, 15 bp, Homo sapiens
gcaccaggctaaatc

SEQ ID NO: 998692 - DNA, 15 bp, Homo sapiens
ggcaccaggctaaat

SEQ ID NO: 998693 - DNA, 15 bp, Homo sapiens
aggcaccaggctaaa

SEQ ID NO: 998694 - DNA, 15 bp, Homo sapiens
caggcaccaggctaa

SEQ ID NO: 998695 - DNA, 15 bp, Homo sapiens
acaggcaccaggcta

SEQ ID NO: 998696 - DNA, 15 bp, Homo sapiens
cacaggcaccaggct

SEQ ID NO: 998697 - DNA, 15 bp, Homo sapiens
acacaggcaccaggc

SEQ ID NO: 998698 - DNA, 15 bp, Homo sapiens
cacacaggcaccagg

SEQ ID NO: 998699 - DNA, 15 bp, Homo sapiens
acacacaggcaccag

SEQ ID NO: 998700 - DNA, 15 bp, Homo sapiens
cacacacaggcacca

SEQ ID NO: 998701 - DNA, 15 bp, Homo sapiens
acacacacaggcacc

SEQ ID NO: 998702 - DNA, 15 bp, Homo sapiens
gacacacacaggcac

SEQ ID NO: 998703 - DNA, 15 bp, Homo sapiens
ggacacacacaggca

SEQ ID NO: 998704 - DNA, 15 bp, Homo sapiens
tggacacacacaggc

SEQ ID NO: 998705 - DNA, 15 bp, Homo sapiens
gtggacacacacagg

SEQ ID NO: 998706 - DNA, 15 bp, Homo sapiens
agtggacacacacag

SEQ ID NO: 998707 - DNA, 15 bp, Homo sapiens
gagtggacacacaca

SEQ ID NO: 998708 - DNA, 15 bp, Homo sapiens
tgagtggacacacac

SEQ ID NO: 998709 - DNA, 15 bp, Homo sapiens
gtgagtggacacaca

SEQ ID NO: 998710 - DNA, 15 bp, Homo sapiens
cgtgagtggacacac

SEQ ID NO: 998711 - DNA, 15 bp, Homo sapiens
acgtgagtggacaca

SEQ ID NO: 998712 - DNA, 15 bp, Homo sapiens
tacgtgagtggacac

SEQ ID NO: 998713 - DNA, 15 bp, Homo sapiens
gtacgtgagtggaca

SEQ ID NO: 998714 - DNA, 15 bp, Homo sapiens
tgtacgtgagtggac

SEQ ID NO: 998715 - DNA, 15 bp, Homo sapiens
gtgtacgtgagtgga

SEQ ID NO: 998716 - DNA, 15 bp, Homo sapiens
cgtgtacgtgagtgg

SEQ ID NO: 998717 - DNA, 15 bp, Homo sapiens
acgtgtacgtgagtg

SEQ ID NO: 998718 - DNA, 15 bp, Homo sapiens
cacgtgtacgtgagt

SEQ ID NO: 998719 - DNA, 15 bp, Homo sapiens
ccacgtgtacgtgag

SEQ ID NO: 998720 - DNA, 15 bp, Homo sapiens
cccacgtgtacgtga

SEQ ID NO: 998721 - DNA, 15 bp, Homo sapiens
ccccacgtgtacgtg

SEQ ID NO: 998722 - DNA, 15 bp, Homo sapiens
accccacgtgtacgt

SEQ ID NO: 998723 - DNA, 15 bp, Homo sapiens
caccccacgtgtacg

SEQ ID NO: 998724 - DNA, 15 bp, Homo sapiens
ccaccccacgtgtac

SEQ ID NO: 998725 - DNA, 15 bp, Homo sapiens
cccaccccacgtgta

SEQ ID NO: 998726 - DNA, 15 bp, Homo sapiens
ccccaccccacgtgt

SEQ ID NO: 998727 - DNA, 15 bp, Homo sapiens
cccccaccccacgtg

SEQ ID NO: 998728 - DNA, 15 bp, Homo sapiens
tcccccaccccacgt

SEQ ID NO: 998729 - DNA, 15 bp, Homo sapiens
ttcccccaccccacg

SEQ ID NO: 998730 - DNA, 15 bp, Homo sapiens
tttcccccaccccac

SEQ ID NO: 998731 - DNA, 15 bp, Homo sapiens
gtttcccccacccca

SEQ ID NO: 998732 - DNA, 15 bp, Homo sapiens
cgtttcccccacccc

SEQ ID NO: 998733 - DNA, 15 bp, Homo sapiens
acgtttcccccaccc

SEQ ID NO: 998734 - DNA, 15 bp, Homo sapiens
cacgtttcccccacc

SEQ ID NO: 998735 - DNA, 15 bp, Homo sapiens
acacgtttcccccac

SEQ ID NO: 998736 - DNA, 15 bp, Homo sapiens
gacacgtttccccca

SEQ ID NO: 998737 - DNA, 15 bp, Homo sapiens
agacacgtttccccc

SEQ ID NO: 998738 - DNA, 15 bp, Homo sapiens
tagacacgtttcccc

SEQ ID NO: 998739 - DNA, 15 bp, Homo sapiens
gtagacacgtttccc

SEQ ID NO: 998740 - DNA, 15 bp, Homo sapiens
tgtagacacgtttcc

SEQ ID NO: 998741 - DNA, 15 bp, Homo sapiens
ctgtagacacgtttc

SEQ ID NO: 998742 - DNA, 15 bp, Homo sapiens
tctgtagacacgttt

SEQ ID NO: 998743 - DNA, 15 bp, Homo sapiens
atctgtagacacgtt

SEQ ID NO: 998744 - DNA, 15 bp, Homo sapiens
catctgtagacacgt

SEQ ID NO: 998745 - DNA, 15 bp, Homo sapiens
tcatctgtagacacg

SEQ ID NO: 998746 - DNA, 15 bp, Homo sapiens
gtcatctgtagacac

SEQ ID NO: 998747 - DNA, 15 bp, Homo sapiens
cgtcatctgtagaca

SEQ ID NO: 998748 - DNA, 15 bp, Homo sapiens
gcgtcatctgtagac

SEQ ID NO: 998749 - DNA, 15 bp, Homo sapiens
agcgtcatctgtaga

SEQ ID NO: 998750 - DNA, 15 bp, Homo sapiens
tagcgtcatctgtag

SEQ ID NO: 998751 - DNA, 15 bp, Homo sapiens
ttagcgtcatctgta

SEQ ID NO: 998752 - DNA, 15 bp, Homo sapiens
tttagcgtcatctgt

SEQ ID NO: 998753 - DNA, 15 bp, Homo sapiens
atttagcgtcatctg

SEQ ID NO: 998754 - DNA, 15 bp, Homo sapiens
gatttagcgtcatct

SEQ ID NO: 998755 - DNA, 15 bp, Homo sapiens
tgatttagcgtcatc

SEQ ID NO: 998756 - DNA, 15 bp, Homo sapiens
ctgatttagcgtcat

SEQ ID NO: 998757 - DNA, 15 bp, Homo sapiens
actgatttagcgtca

SEQ ID NO: 998758 - DNA, 15 bp, Homo sapiens
aactgatttagcgtc

SEQ ID NO: 998759 - DNA, 15 bp, Homo sapiens
caactgatttagcgt

SEQ ID NO: 998760 - DNA, 15 bp, Homo sapiens
ccaactgatttagcg

SEQ ID NO: 998761 - DNA, 15 bp, Homo sapiens
cccaactgatttagc

SEQ ID NO: 998762 - DNA, 15 bp, Homo sapiens
ccccaactgatttag

SEQ ID NO: 998763 - DNA, 15 bp, Homo sapiens
accccaactgattta

SEQ ID NO: 998764 - DNA, 15 bp, Homo sapiens
gaccccaactgattt

SEQ ID NO: 998765 - DNA, 15 bp, Homo sapiens
agaccccaactgatt

SEQ ID NO: 998766 - DNA, 15 bp, Homo sapiens
tagaccccaactgat

SEQ ID NO: 998767 - DNA, 15 bp, Homo sapiens
gtagaccccaactga

SEQ ID NO: 998768 - DNA, 15 bp, Homo sapiens
agtagaccccaactg

SEQ ID NO: 998769 - DNA, 15 bp, Homo sapiens
gagtagaccccaact

SEQ ID NO: 998770 - DNA, 15 bp, Homo sapiens
agagtagaccccaac

SEQ ID NO: 998771 - DNA, 15 bp, Homo sapiens
tagagtagaccccaa

SEQ ID NO: 998772 - DNA, 15 bp, Homo sapiens
ttagagtagacccca

SEQ ID NO: 998773 - DNA, 15 bp, Homo sapiens
tttagagtagacccc

SEQ ID NO: 998774 - DNA, 15 bp, Homo sapiens
gtttagagtagaccc

SEQ ID NO: 998775 - DNA, 15 bp, Homo sapiens
tgtttagagtagacc

SEQ ID NO: 998776 - DNA, 15 bp, Homo sapiens
ctgtttagagtagac

SEQ ID NO: 998777 - DNA, 15 bp, Homo sapiens
gctgtttagagtaga

SEQ ID NO: 998778 - DNA, 15 bp, Homo sapiens
tgctgtttagagtag

SEQ ID NO: 998779 - DNA, 15 bp, Homo sapiens
atgctgtttagagta

SEQ ID NO: 998780 - DNA, 15 bp, Homo sapiens
aatgctgtttagagt

SEQ ID NO: 998781 - DNA, 15 bp, Homo sapiens
caatgctgtttagag

SEQ ID NO: 998782 - DNA, 15 bp, Homo sapiens
acaatgctgtttaga

SEQ ID NO: 998783 - DNA, 15 bp, Homo sapiens
cacaatgctgtttag

SEQ ID NO: 998784 - DNA, 15 bp, Homo sapiens
acacaatgctgttta

SEQ ID NO: 998785 - DNA, 15 bp, Homo sapiens
cacacaatgctgttt

SEQ ID NO: 998786 - DNA, 15 bp, Homo sapiens
acacacaatgctgtt

SEQ ID NO: 998787 - DNA, 15 bp, Homo sapiens
tacacacaatgctgt

SEQ ID NO: 998788 - DNA, 15 bp, Homo sapiens
ttacacacaatgctg

SEQ ID NO: 998789 - DNA, 15 bp, Homo sapiens
cttacacacaatgct

SEQ ID NO: 998790 - DNA, 15 bp, Homo sapiens
tcttacacacaatgc

SEQ ID NO: 998791 - DNA, 15 bp, Homo sapiens
ttcttacacacaatg

SEQ ID NO: 998792 - DNA, 15 bp, Homo sapiens
cttcttacacacaat

SEQ ID NO: 998793 - DNA, 15 bp, Homo sapiens
gcttcttacacacaa

SEQ ID NO: 998794 - DNA, 15 bp, Homo sapiens
tgcttcttacacaca

SEQ ID NO: 998795 - DNA, 15 bp, Homo sapiens
atgcttcttacacac

SEQ ID NO: 998796 - DNA, 15 bp, Homo sapiens
gatgcttcttacaca

SEQ ID NO: 998797 - DNA, 15 bp, Homo sapiens
ggatgcttcttacac

SEQ ID NO: 998798 - DNA, 15 bp, Homo sapiens
aggatgcttcttaca

SEQ ID NO: 998799 - DNA, 15 bp, Homo sapiens
gaggatgcttcttac

SEQ ID NO: 998800 - DNA, 15 bp, Homo sapiens
tgaggatgcttctta

SEQ ID NO: 998801 - DNA, 15 bp, Homo sapiens
ttgaggatgcttctt

SEQ ID NO: 998802 - DNA, 15 bp, Homo sapiens
cttgaggatgcttct

SEQ ID NO: 998803 - DNA, 15 bp, Homo sapiens
gcttgaggatgcttc

SEQ ID NO: 998804 - DNA, 15 bp, Homo sapiens
agcttgaggatgctt

SEQ ID NO: 998805 - DNA, 15 bp, Homo sapiens
gagcttgaggatgct

SEQ ID NO: 998806 - DNA, 15 bp, Homo sapiens
ggagcttgaggatgc

SEQ ID NO: 998807 - DNA, 15 bp, Homo sapiens
gggagcttgaggatg

SEQ ID NO: 998808 - DNA, 15 bp, Homo sapiens
tgggagcttgaggat

SEQ ID NO: 998809 - DNA, 15 bp, Homo sapiens
ctgggagcttgagga

SEQ ID NO: 998810 - DNA, 15 bp, Homo sapiens
actgggagcttgagg

SEQ ID NO: 998811 - DNA, 15 bp, Homo sapiens
aactgggagcttgag

SEQ ID NO: 998812 - DNA, 15 bp, Homo sapiens
taactgggagcttga

SEQ ID NO: 998813 - DNA, 15 bp, Homo sapiens
ttaactgggagcttg

SEQ ID NO: 998814 - DNA, 15 bp, Homo sapiens
cttaactgggagctt

SEQ ID NO: 998815 - DNA, 15 bp, Homo sapiens
acttaactgggagct

SEQ ID NO: 998816 - DNA, 15 bp, Homo sapiens
tacttaactgggagc

SEQ ID NO: 998817 - DNA, 15 bp, Homo sapiens
ttacttaactgggag

SEQ ID NO: 998818 - DNA, 15 bp, Homo sapiens
gttacttaactggga

SEQ ID NO: 998819 - DNA, 15 bp, Homo sapiens
agttacttaactggg

SEQ ID NO: 998820 - DNA, 15 bp, Homo sapiens
aagttacttaactgg

SEQ ID NO: 998821 - DNA, 15 bp, Homo sapiens
caagttacttaactg

SEQ ID NO: 998822 - DNA, 15 bp, Homo sapiens
tcaagttacttaact

SEQ ID NO: 998823 - DNA, 15 bp, Homo sapiens
gtcaagttacttaac

SEQ ID NO: 998824 - DNA, 15 bp, Homo sapiens
agtcaagttacttaa

SEQ ID NO: 998825 - DNA, 15 bp, Homo sapiens
tagtcaagttactta

SEQ ID NO: 998826 - DNA, 15 bp, Homo sapiens
gtagtcaagttactt

SEQ ID NO: 998827 - DNA, 15 bp, Homo sapiens
agtagtcaagttact

SEQ ID NO: 998828 - DNA, 15 bp, Homo sapiens
aagtagtcaagttac

SEQ ID NO: 998829 - DNA, 15 bp, Homo sapiens
aaagtagtcaagtta

SEQ ID NO: 998830 - DNA, 15 bp, Homo sapiens
aaaagtagtcaagtt

SEQ ID NO: 998831 - DNA, 15 bp, Homo sapiens
taaaagtagtcaagt

SEQ ID NO: 998832 - DNA, 15 bp, Homo sapiens
ataaaagtagtcaag

SEQ ID NO: 998833 - DNA, 15 bp, Homo sapiens
aataaaagtagtcaa

SEQ ID NO: 998834 - DNA, 15 bp, Homo sapiens
aaataaaagtagtca

SEQ ID NO: 998835 - DNA, 15 bp, Homo sapiens
caaataaaagtagtc

SEQ ID NO: 998836 - DNA, 15 bp, Homo sapiens
ccaaataaaagtagt

SEQ ID NO: 998837 - DNA, 15 bp, Homo sapiens
cccaaataaaagtag

SEQ ID NO: 998838 - DNA, 15 bp, Homo sapiens
tcccaaataaaagta

SEQ ID NO: 998839 - DNA, 15 bp, Homo sapiens
ttcccaaataaaagt

SEQ ID NO: 998840 - DNA, 15 bp, Homo sapiens
attcccaaataaaag

SEQ ID NO: 998841 - DNA, 15 bp, Homo sapiens
aattcccaaataaaa

SEQ ID NO: 998842 - DNA, 15 bp, Homo sapiens
aaattcccaaataaa

SEQ ID NO: 998843 - DNA, 15 bp, Homo sapiens
gaaattcccaaataa

SEQ ID NO: 998844 - DNA, 15 bp, Homo sapiens
tgaaattcccaaata

SEQ ID NO: 998845 - DNA, 15 bp, Homo sapiens
ctgaaattcccaaat

SEQ ID NO: 998846 - DNA, 15 bp, Homo sapiens
tctgaaattcccaaa

SEQ ID NO: 998847 - DNA, 15 bp, Homo sapiens
gtctgaaattcccaa

SEQ ID NO: 998848 - DNA, 15 bp, Homo sapiens
agtctgaaattccca

SEQ ID NO: 998849 - DNA, 15 bp, Homo sapiens
tagtctgaaattccc

SEQ ID NO: 998850 - DNA, 15 bp, Homo sapiens
atagtctgaaattcc

SEQ ID NO: 998851 - DNA, 15 bp, Homo sapiens
tatagtctgaaattc

SEQ ID NO: 998852 - DNA, 15 bp, Homo sapiens
ctatagtctgaaatt

SEQ ID NO: 998853 - DNA, 15 bp, Homo sapiens
tctatagtctgaaat

SEQ ID NO: 998854 - DNA, 15 bp, Homo sapiens
ttctatagtctgaaa

SEQ ID NO: 998855 - DNA, 15 bp, Homo sapiens
cttctatagtctgaa

SEQ ID NO: 998856 - DNA, 15 bp, Homo sapiens
gcttctatagtctga

SEQ ID NO: 998857 - DNA, 15 bp, Homo sapiens
agcttctatagtctg

SEQ ID NO: 998858 - DNA, 15 bp, Homo sapiens
gagcttctatagtct

SEQ ID NO: 998859 - DNA, 15 bp, Homo sapiens
agagcttctatagtc

SEQ ID NO: 998860 - DNA, 15 bp, Homo sapiens
gagagcttctatagt

SEQ ID NO: 998861 - DNA, 15 bp, Homo sapiens
agagagcttctatag

SEQ ID NO: 998862 - DNA, 15 bp, Homo sapiens
aagagagcttctata

SEQ ID NO: 998863 - DNA, 15 bp, Homo sapiens
taagagagcttctat

SEQ ID NO: 998864 - DNA, 15 bp, Homo sapiens
ataagagagcttcta

SEQ ID NO: 998865 - DNA, 15 bp, Homo sapiens
cataagagagcttct

SEQ ID NO: 998866 - DNA, 15 bp, Homo sapiens
acataagagagcttc

SEQ ID NO: 998867 - DNA, 15 bp, Homo sapiens
aacataagagagctt

SEQ ID NO: 998868 - DNA, 15 bp, Homo sapiens
aaacataagagagct

SEQ ID NO: 998869 - DNA, 15 bp, Homo sapiens
aaaacataagagagc

SEQ ID NO: 998870 - DNA, 15 bp, Homo sapiens
taaaacataagagag

SEQ ID NO: 998871 - DNA, 15 bp, Homo sapiens
ataaaacataagaga

SEQ ID NO: 998872 - DNA, 15 bp, Homo sapiens
cataaaacataagag

SEQ ID NO: 998873 - DNA, 15 bp, Homo sapiens
acataaaacataaga

SEQ ID NO: 998874 - DNA, 15 bp, Homo sapiens
gacataaaacataag

SEQ ID NO: 998875 - DNA, 15 bp, Homo sapiens
ggacataaaacataa

SEQ ID NO: 998876 - DNA, 15 bp, Homo sapiens
tggacataaaacata

SEQ ID NO: 998877 - DNA, 15 bp, Homo sapiens
ctggacataaaacat

SEQ ID NO: 998878 - DNA, 15 bp, Homo sapiens
tctggacataaaaca

SEQ ID NO: 998879 - DNA, 15 bp, Homo sapiens
atctggacataaaac

SEQ ID NO: 998880 - DNA, 15 bp, Homo sapiens
aatctggacataaaa

SEQ ID NO: 998881 - DNA, 15 bp, Homo sapiens
gaatctggacataaa

SEQ ID NO: 998882 - DNA, 15 bp, Homo sapiens
agaatctggacataa

SEQ ID NO: 998883 - DNA, 15 bp, Homo sapiens
cagaatctggacata

SEQ ID NO: 998884 - DNA, 15 bp, Homo sapiens
acagaatctggacat

SEQ ID NO: 998885 - DNA, 15 bp, Homo sapiens
cacagaatctggaca

SEQ ID NO: 998886 - DNA, 15 bp, Homo sapiens
tcacagaatctggac

SEQ ID NO: 998887 - DNA, 15 bp, Homo sapiens
gtcacagaatctgga

SEQ ID NO: 998888 - DNA, 15 bp, Homo sapiens
ggtcacagaatctgg

SEQ ID NO: 998889 - DNA, 15 bp, Homo sapiens
tggtcacagaatctg

SEQ ID NO: 998890 - DNA, 15 bp, Homo sapiens
gtggtcacagaatct

SEQ ID NO: 998891 - DNA, 15 bp, Homo sapiens
agtggtcacagaatc

SEQ ID NO: 998892 - DNA, 15 bp, Homo sapiens
tagtggtcacagaat

SEQ ID NO: 998893 - DNA, 15 bp, Homo sapiens
ctagtggtcacagaa

SEQ ID NO: 998894 - DNA, 15 bp, Homo sapiens
actagtggtcacaga

SEQ ID NO: 998895 - DNA, 15 bp, Homo sapiens
aactagtggtcacag

SEQ ID NO: 998896 - DNA, 15 bp, Homo sapiens
taactagtggtcaca

SEQ ID NO: 998897 - DNA, 15 bp, Homo sapiens
gtaactagtggtcac

SEQ ID NO: 998898 - DNA, 15 bp, Homo sapiens
agtaactagtggtca

SEQ ID NO: 998899 - DNA, 15 bp, Homo sapiens
cagtaactagtggtc

SEQ ID NO: 998900 - DNA, 15 bp, Homo sapiens
acagtaactagtggt

SEQ ID NO: 998901 - DNA, 15 bp, Homo sapiens
tacagtaactagtgg

SEQ ID NO: 998902 - DNA, 15 bp, Homo sapiens
atacagtaactagtg

SEQ ID NO: 998903 - DNA, 15 bp, Homo sapiens
gatacagtaactagt

SEQ ID NO: 998904 - DNA, 15 bp, Homo sapiens
tgatacagtaactag

SEQ ID NO: 998905 - DNA, 15 bp, Homo sapiens
ctgatacagtaacta

SEQ ID NO: 998906 - DNA, 15 bp, Homo sapiens
tctgatacagtaact

SEQ ID NO: 998907 - DNA, 15 bp, Homo sapiens
ttctgatacagtaac

SEQ ID NO: 998908 - DNA, 15 bp, Homo sapiens
gttctgatacagtaa

SEQ ID NO: 998909 - DNA, 15 bp, Homo sapiens
agttctgatacagta

SEQ ID NO: 998910 - DNA, 15 bp, Homo sapiens
gagttctgatacagt

SEQ ID NO: 998911 - DNA, 15 bp, Homo sapiens
tgagttctgatacag

SEQ ID NO: 998912 - DNA, 15 bp, Homo sapiens
atgagttctgataca

SEQ ID NO: 998913 - DNA, 15 bp, Homo sapiens
gatgagttctgatac

SEQ ID NO: 998914 - DNA, 15 bp, Homo sapiens
tgatgagttctgata

SEQ ID NO: 998915 - DNA, 15 bp, Homo sapiens
ctgatgagttctgat

SEQ ID NO: 998916 - DNA, 15 bp, Homo sapiens
cctgatgagttctga

SEQ ID NO: 998917 - DNA, 15 bp, Homo sapiens
acctgatgagttctg

SEQ ID NO: 998918 - DNA, 15 bp, Homo sapiens
tacctgatgagttct

SEQ ID NO: 998919 - DNA, 15 bp, Homo sapiens
gtacctgatgagttc

SEQ ID NO: 998920 - DNA, 15 bp, Homo sapiens
ggtacctgatgagtt

SEQ ID NO: 998921 - DNA, 15 bp, Homo sapiens
gggtacctgatgagt

SEQ ID NO: 998922 - DNA, 15 bp, Homo sapiens
tgggtacctgatgag

SEQ ID NO: 998923 - DNA, 15 bp, Homo sapiens
gtgggtacctgatga

SEQ ID NO: 998924 - DNA, 15 bp, Homo sapiens
agtgggtacctgatg

SEQ ID NO: 998925 - DNA, 15 bp, Homo sapiens
aagtgggtacctgat

SEQ ID NO: 998926 - DNA, 15 bp, Homo sapiens
taagtgggtacctga

SEQ ID NO: 998927 - DNA, 15 bp, Homo sapiens
ataagtgggtacctg

SEQ ID NO: 998928 - DNA, 15 bp, Homo sapiens
tataagtgggtacct

SEQ ID NO: 998929 - DNA, 15 bp, Homo sapiens
ttataagtgggtacc

SEQ ID NO: 998930 - DNA, 15 bp, Homo sapiens
tttataagtgggtac

SEQ ID NO: 998931 - DNA, 15 bp, Homo sapiens
atttataagtgggta

SEQ ID NO: 998932 - DNA, 15 bp, Homo sapiens
tatttataagtgggt

SEQ ID NO: 998933 - DNA, 15 bp, Homo sapiens
ctatttataagtggg

SEQ ID NO: 998934 - DNA, 15 bp, Homo sapiens
gctatttataagtgg

SEQ ID NO: 998935 - DNA, 15 bp, Homo sapiens
tgctatttataagtg

SEQ ID NO: 998936 - DNA, 15 bp, Homo sapiens
gtgctatttataagt

SEQ ID NO: 998937 - DNA, 15 bp, Homo sapiens
agtgctatttataag

SEQ ID NO: 998938 - DNA, 15 bp, Homo sapiens
cagtgctatttataa

SEQ ID NO: 998939 - DNA, 15 bp, Homo sapiens
tcagtgctatttata

SEQ ID NO: 998940 - DNA, 15 bp, Homo sapiens
atcagtgctatttat

SEQ ID NO: 998941 - DNA, 15 bp, Homo sapiens
gatcagtgctattta

SEQ ID NO: 998942 - DNA, 15 bp, Homo sapiens
agatcagtgctattt

SEQ ID NO: 998943 - DNA, 15 bp, Homo sapiens
cagatcagtgctatt

SEQ ID NO: 998944 - DNA, 15 bp, Homo sapiens
ccagatcagtgctat

SEQ ID NO: 998945 - DNA, 15 bp, Homo sapiens
gccagatcagtgcta

SEQ ID NO: 998946 - DNA, 15 bp, Homo sapiens
agccagatcagtgct

SEQ ID NO: 998947 - DNA, 15 bp, Homo sapiens
cagccagatcagtgc

SEQ ID NO: 998948 - DNA, 15 bp, Homo sapiens
acagccagatcagtg

SEQ ID NO: 998949 - DNA, 15 bp, Homo sapiens
tacagccagatcagt

SEQ ID NO: 998950 - DNA, 15 bp, Homo sapiens
atacagccagatcag

SEQ ID NO: 998951 - DNA, 15 bp, Homo sapiens
tatacagccagatca

SEQ ID NO: 998952 - DNA, 15 bp, Homo sapiens
gtatacagccagatc

SEQ ID NO: 998953 - DNA, 15 bp, Homo sapiens
agtatacagccagat

SEQ ID NO: 998954 - DNA, 15 bp, Homo sapiens
cagtatacagccaga

SEQ ID NO: 998955 - DNA, 15 bp, Homo sapiens
tcagtatacagccag

SEQ ID NO: 998956 - DNA, 15 bp, Homo sapiens
atcagtatacagcca

SEQ ID NO: 998957 - DNA, 15 bp, Homo sapiens
gatcagtatacagcc

SEQ ID NO: 998958 - DNA, 15 bp, Homo sapiens
ggatcagtatacagc

SEQ ID NO: 998959 - DNA, 15 bp, Homo sapiens
tggatcagtatacag

SEQ ID NO: 998960 - DNA, 15 bp, Homo sapiens
atggatcagtataca

SEQ ID NO: 998961 - DNA, 15 bp, Homo sapiens
gatggatcagtatac

SEQ ID NO: 998962 - DNA, 15 bp, Homo sapiens
tgatggatcagtata

SEQ ID NO: 998963 - DNA, 15 bp, Homo sapiens
gtgatggatcagtat

SEQ ID NO: 998964 - DNA, 15 bp, Homo sapiens
agtgatggatcagta

SEQ ID NO: 998965 - DNA, 15 bp, Homo sapiens
tagtgatggatcagt

SEQ ID NO: 998966 - DNA, 15 bp, Homo sapiens
ttagtgatggatcag

SEQ ID NO: 998967 - DNA, 15 bp, Homo sapiens
gttagtgatggatca

SEQ ID NO: 998968 - DNA, 15 bp, Homo sapiens
ggttagtgatggatc

SEQ ID NO: 998969 - DNA, 15 bp, Homo sapiens
aggttagtgatggat

SEQ ID NO: 998970 - DNA, 15 bp, Homo sapiens
caggttagtgatgga

SEQ ID NO: 998971 - DNA, 15 bp, Homo sapiens
acaggttagtgatgg

SEQ ID NO: 998972 - DNA, 15 bp, Homo sapiens
aacaggttagtgatg

SEQ ID NO: 998973 - DNA, 15 bp, Homo sapiens
aaacaggttagtgat

SEQ ID NO: 998974 - DNA, 15 bp, Homo sapiens
aaaacaggttagtga

SEQ ID NO: 998975 - DNA, 15 bp, Homo sapiens
gaaaacaggttagtg

SEQ ID NO: 998976 - DNA, 15 bp, Homo sapiens
agaaaacaggttagt

SEQ ID NO: 998977 - DNA, 15 bp, Homo sapiens
tagaaaacaggttag

SEQ ID NO: 998978 - DNA, 15 bp, Homo sapiens
ctagaaaacaggtta

SEQ ID NO: 998979 - DNA, 15 bp, Homo sapiens
cctagaaaacaggtt

SEQ ID NO: 998980 - DNA, 15 bp, Homo sapiens
tcctagaaaacaggt

SEQ ID NO: 998981 - DNA, 15 bp, Homo sapiens
gtcctagaaaacagg

SEQ ID NO: 998982 - DNA, 15 bp, Homo sapiens
ggtcctagaaaacag

SEQ ID NO: 998983 - DNA, 15 bp, Homo sapiens
gggtcctagaaaaca

SEQ ID NO: 998984 - DNA, 15 bp, Homo sapiens
tgggtcctagaaaac

SEQ ID NO: 998985 - DNA, 15 bp, Homo sapiens
ctgggtcctagaaaa

SEQ ID NO: 998986 - DNA, 15 bp, Homo sapiens
gctgggtcctagaaa

SEQ ID NO: 998987 - DNA, 15 bp, Homo sapiens
cgctgggtcctagaa

SEQ ID NO: 998988 - DNA, 15 bp, Homo sapiens
acgctgggtcctaga

SEQ ID NO: 998989 - DNA, 15 bp, Homo sapiens
tacgctgggtcctag

SEQ ID NO: 998990 - DNA, 15 bp, Homo sapiens
atacgctgggtccta

SEQ ID NO: 998991 - DNA, 15 bp, Homo sapiens
catacgctgggtcct

SEQ ID NO: 998992 - DNA, 15 bp, Homo sapiens
acatacgctgggtcc

SEQ ID NO: 998993 - DNA, 15 bp, Homo sapiens
tacatacgctgggtc

SEQ ID NO: 998994 - DNA, 15 bp, Homo sapiens
ctacatacgctgggt

SEQ ID NO: 998995 - DNA, 15 bp, Homo sapiens
gctacatacgctggg

SEQ ID NO: 998996 - DNA, 15 bp, Homo sapiens
tgctacatacgctgg

SEQ ID NO: 998997 - DNA, 15 bp, Homo sapiens
atgctacatacgctg

SEQ ID NO: 998998 - DNA, 15 bp, Homo sapiens
aatgctacatacgct

SEQ ID NO: 998999 - DNA, 15 bp, Homo sapiens
aaatgctacatacgc

SEQ ID NO: 999000 - DNA, 15 bp, Homo sapiens
caaatgctacatacg

SEQ ID NO: 999001 - DNA, 15 bp, Homo sapiens
acaaatgctacatac

SEQ ID NO: 999002 - DNA, 15 bp, Homo sapiens
tacaaatgctacata

SEQ ID NO: 999003 - DNA, 15 bp, Homo sapiens
atacaaatgctacat

SEQ ID NO: 999004 - DNA, 15 bp, Homo sapiens
aatacaaatgctaca

SEQ ID NO: 999005 - DNA, 15 bp, Homo sapiens
caatacaaatgctac

SEQ ID NO: 999006 - DNA, 15 bp, Homo sapiens
gcaatacaaatgcta

SEQ ID NO: 999007 - DNA, 15 bp, Homo sapiens
tgcaatacaaatgct

SEQ ID NO: 999008 - DNA, 15 bp, Homo sapiens
ctgcaatacaaatgc

SEQ ID NO: 999009 - DNA, 15 bp, Homo sapiens
actgcaatacaaatg

SEQ ID NO: 999010 - DNA, 15 bp, Homo sapiens
aactgcaatacaaat

SEQ ID NO: 999011 - DNA, 15 bp, Homo sapiens
aaactgcaatacaaa

SEQ ID NO: 999012 - DNA, 15 bp, Homo sapiens
gaaactgcaatacaa

SEQ ID NO: 999013 - DNA, 15 bp, Homo sapiens
ggaaactgcaataca

SEQ ID NO: 999014 - DNA, 15 bp, Homo sapiens
gggaaactgcaatac

SEQ ID NO: 999015 - DNA, 15 bp, Homo sapiens
agggaaactgcaata

SEQ ID NO: 999016 - DNA, 15 bp, Homo sapiens
cagggaaactgcaat

SEQ ID NO: 999017 - DNA, 15 bp, Homo sapiens
ccagggaaactgcaa

SEQ ID NO: 999018 - DNA, 15 bp, Homo sapiens
gccagggaaactgca

SEQ ID NO: 999019 - DNA, 15 bp, Homo sapiens
agccagggaaactgc

SEQ ID NO: 999020 - DNA, 15 bp, Homo sapiens
aagccagggaaactg

SEQ ID NO: 999021 - DNA, 15 bp, Homo sapiens
taagccagggaaact

SEQ ID NO: 999022 - DNA, 15 bp, Homo sapiens
gtaagccagggaaac

SEQ ID NO: 999023 - DNA, 15 bp, Homo sapiens
agtaagccagggaaa

SEQ ID NO: 999024 - DNA, 15 bp, Homo sapiens
aagtaagccagggaa

SEQ ID NO: 999025 - DNA, 15 bp, Homo sapiens
caagtaagccaggga

SEQ ID NO: 999026 - DNA, 15 bp, Homo sapiens
acaagtaagccaggg

SEQ ID NO: 999027 - DNA, 15 bp, Homo sapiens
cacaagtaagccagg

SEQ ID NO: 999028 - DNA, 15 bp, Homo sapiens
acacaagtaagccag

SEQ ID NO: 999029 - DNA, 15 bp, Homo sapiens
aacacaagtaagcca

SEQ ID NO: 999030 - DNA, 15 bp, Homo sapiens
aaacacaagtaagcc

SEQ ID NO: 999031 - DNA, 15 bp, Homo sapiens
aaaacacaagtaagc

SEQ ID NO: 999032 - DNA, 15 bp, Homo sapiens
caaaacacaagtaag

SEQ ID NO: 999033 - DNA, 15 bp, Homo sapiens
gcaaaacacaagtaa

SEQ ID NO: 999034 - DNA, 15 bp, Homo sapiens
tgcaaaacacaagta

SEQ ID NO: 999035 - DNA, 15 bp, Homo sapiens
gtgcaaaacacaagt

SEQ ID NO: 999036 - DNA, 15 bp, Homo sapiens
agtgcaaaacacaag

SEQ ID NO: 999037 - DNA, 15 bp, Homo sapiens
cagtgcaaaacacaa

SEQ ID NO: 999038 - DNA, 15 bp, Homo sapiens
tcagtgcaaaacaca

SEQ ID NO: 999039 - DNA, 15 bp, Homo sapiens
atcagtgcaaaacac

SEQ ID NO: 999040 - DNA, 15 bp, Homo sapiens
catcagtgcaaaaca

SEQ ID NO: 999041 - DNA, 15 bp, Homo sapiens
tcatcagtgcaaaac

SEQ ID NO: 999042 - DNA, 15 bp, Homo sapiens
ttcatcagtgcaaaa

SEQ ID NO: 999043 - DNA, 15 bp, Homo sapiens
attcatcagtgcaaa

SEQ ID NO: 999044 - DNA, 15 bp, Homo sapiens
aattcatcagtgcaa

SEQ ID NO: 999045 - DNA, 15 bp, Homo sapiens
aaattcatcagtgca

SEQ ID NO: 999046 - DNA, 15 bp, Homo sapiens
aaaattcatcagtgc

SEQ ID NO: 999047 - DNA, 15 bp, Homo sapiens
caaaattcatcagtg

SEQ ID NO: 999048 - DNA, 15 bp, Homo sapiens
tcaaaattcatcagt

SEQ ID NO: 999049 - DNA, 15 bp, Homo sapiens
gtcaaaattcatcag

SEQ ID NO: 999050 - DNA, 15 bp, Homo sapiens
tgtcaaaattcatca

SEQ ID NO: 999051 - DNA, 15 bp, Homo sapiens
ctgtcaaaattcatc

SEQ ID NO: 999052 - DNA, 15 bp, Homo sapiens
cctgtcaaaattcat

SEQ ID NO: 999053 - DNA, 15 bp, Homo sapiens
ccctgtcaaaattca

SEQ ID NO: 999054 - DNA, 15 bp, Homo sapiens
accctgtcaaaattc

SEQ ID NO: 999055 - DNA, 15 bp, Homo sapiens
taccctgtcaaaatt

SEQ ID NO: 999056 - DNA, 15 bp, Homo sapiens
ttaccctgtcaaaat

SEQ ID NO: 999057 - DNA, 15 bp, Homo sapiens
attaccctgtcaaaa

SEQ ID NO: 999058 - DNA, 15 bp, Homo sapiens
aattaccctgtcaaa

SEQ ID NO: 999059 - DNA, 15 bp, Homo sapiens
caattaccctgtcaa

SEQ ID NO: 999060 - DNA, 15 bp, Homo sapiens
gcaattaccctgtca

SEQ ID NO: 999061 - DNA, 15 bp, Homo sapiens
ggcaattaccctgtc

SEQ ID NO: 999062 - DNA, 15 bp, Homo sapiens
tggcaattaccctgt

SEQ ID NO: 999063 - DNA, 15 bp, Homo sapiens
gtggcaattaccctg

SEQ ID NO: 999064 - DNA, 15 bp, Homo sapiens
agtggcaattaccct

SEQ ID NO: 999065 - DNA, 15 bp, Homo sapiens
aagtggcaattaccc

SEQ ID NO: 999066 - DNA, 15 bp, Homo sapiens
aaagtggcaattacc

SEQ ID NO: 999067 - DNA, 15 bp, Homo sapiens
taaagtggcaattac

SEQ ID NO: 999068 - DNA, 15 bp, Homo sapiens
gtaaagtggcaatta

SEQ ID NO: 999069 - DNA, 15 bp, Homo sapiens
agtaaagtggcaatt

SEQ ID NO: 999070 - DNA, 15 bp, Homo sapiens
aagtaaagtggcaat

SEQ ID NO: 999071 - DNA, 15 bp, Homo sapiens
caagtaaagtggcaa

SEQ ID NO: 999072 - DNA, 15 bp, Homo sapiens
acaagtaaagtggca

SEQ ID NO: 999073 - DNA, 15 bp, Homo sapiens
cacaagtaaagtggc

SEQ ID NO: 999074 - DNA, 15 bp, Homo sapiens
gcacaagtaaagtgg

SEQ ID NO: 999075 - DNA, 15 bp, Homo sapiens
tgcacaagtaaagtg

SEQ ID NO: 999076 - DNA, 15 bp, Homo sapiens
ttgcacaagtaaagt

SEQ ID NO: 999077 - DNA, 15 bp, Homo sapiens
attgcacaagtaaag

SEQ ID NO: 999078 - DNA, 15 bp, Homo sapiens
tattgcacaagtaaa

SEQ ID NO: 999079 - DNA, 15 bp, Homo sapiens
gtattgcacaagtaa

SEQ ID NO: 999080 - DNA, 15 bp, Homo sapiens
agtattgcacaagta

SEQ ID NO: 999081 - DNA, 15 bp, Homo sapiens
cagtattgcacaagt

SEQ ID NO: 999082 - DNA, 15 bp, Homo sapiens
gcagtattgcacaag

SEQ ID NO: 999083 - DNA, 15 bp, Homo sapiens
agcagtattgcacaa

SEQ ID NO: 999084 - DNA, 15 bp, Homo sapiens
cagcagtattgcaca

SEQ ID NO: 999085 - DNA, 15 bp, Homo sapiens
acagcagtattgcac

SEQ ID NO: 999086 - DNA, 15 bp, Homo sapiens
tacagcagtattgca

SEQ ID NO: 999087 - DNA, 15 bp, Homo sapiens
ttacagcagtattgc

SEQ ID NO: 999088 - DNA, 15 bp, Homo sapiens
tttacagcagtattg

SEQ ID NO: 999089 - DNA, 15 bp, Homo sapiens
atttacagcagtatt

SEQ ID NO: 999090 - DNA, 15 bp, Homo sapiens
tatttacagcagtat

SEQ ID NO: 999091 - DNA, 15 bp, Homo sapiens
ttatttacagcagta

SEQ ID NO: 999092 - DNA, 15 bp, Homo sapiens
gttatttacagcagt

SEQ ID NO: 999093 - DNA, 15 bp, Homo sapiens
agttatttacagcag

SEQ ID NO: 999094 - DNA, 15 bp, Homo sapiens
cagttatttacagca

SEQ ID NO: 999095 - DNA, 15 bp, Homo sapiens
gcagttatttacagc

SEQ ID NO: 999096 - DNA, 15 bp, Homo sapiens
tgcagttatttacag

SEQ ID NO: 999097 - DNA, 15 bp, Homo sapiens
ctgcagttatttaca

SEQ ID NO: 999098 - DNA, 15 bp, Homo sapiens
tctgcagttatttac

SEQ ID NO: 999099 - DNA, 15 bp, Homo sapiens
atctgcagttattta

SEQ ID NO: 999100 - DNA, 15 bp, Homo sapiens
aatctgcagttattt

SEQ ID NO: 999101 - DNA, 15 bp, Homo sapiens
aaatctgcagttatt

SEQ ID NO: 999102 - DNA, 15 bp, Homo sapiens
aaaatctgcagttat

SEQ ID NO: 999103 - DNA, 15 bp, Homo sapiens
aaaaatctgcagtta

SEQ ID NO: 999104 - DNA, 15 bp, Homo sapiens
ttaaaaatctgcagt

SEQ ID NO: 999105 - DNA, 15 bp, Homo sapiens
tttaaaaatctgcag

SEQ ID NO: 999106 - DNA, 15 bp, Homo sapiens
gtttaaaaatctgca

SEQ ID NO: 999107 - DNA, 15 bp, Homo sapiens
tgtttaaaaatctgc

SEQ ID NO: 999108 - DNA, 15 bp, Homo sapiens
ttgtttaaaaatctg

SEQ ID NO: 999109 - DNA, 15 bp, Homo sapiens
attgtttaaaaatct

SEQ ID NO: 999110 - DNA, 15 bp, Homo sapiens
gattgtttaaaaatc

SEQ ID NO: 999111 - DNA, 15 bp, Homo sapiens
agattgtttaaaaat

SEQ ID NO: 999112 - DNA, 15 bp, Homo sapiens
aagattgtttaaaaa

SEQ ID NO: 999113 - DNA, 15 bp, Homo sapiens
aaagattgtttaaaa

SEQ ID NO: 999114 - DNA, 15 bp, Homo sapiens
aaaagattgtttaaa

SEQ ID NO: 999115 - DNA, 15 bp, Homo sapiens
taaaagattgtttaa

SEQ ID NO: 999116 - DNA, 15 bp, Homo sapiens
ataaaagattgttta

SEQ ID NO: 999117 - DNA, 15 bp, Homo sapiens
cataaaagattgttt

SEQ ID NO: 999118 - DNA, 15 bp, Homo sapiens
acataaaagattgtt

SEQ ID NO: 999119 - DNA, 15 bp, Homo sapiens
aacataaaagattgt

SEQ ID NO: 999120 - DNA, 15 bp, Homo sapiens
taacataaaagattg

SEQ ID NO: 999121 - DNA, 15 bp, Homo sapiens
ttaacataaaagatt

SEQ ID NO: 999122 - DNA, 15 bp, Homo sapiens
attaacataaaagat

SEQ ID NO: 999123 - DNA, 15 bp, Homo sapiens
aattaacataaaaga

SEQ ID NO: 999124 - DNA, 15 bp, Homo sapiens
aaattaacataaaag

SEQ ID NO: 999125 - DNA, 15 bp, Homo sapiens
aaaattaacataaaa

SEQ ID NO: 999126 - DNA, 15 bp, Homo sapiens
taaaattaacataaa

SEQ ID NO: 999127 - DNA, 15 bp, Homo sapiens
ataaaattaacataa

SEQ ID NO: 999128 - DNA, 15 bp, Homo sapiens
tataaaattaacata

SEQ ID NO: 999129 - DNA, 15 bp, Homo sapiens
ttataaaattaacat

SEQ ID NO: 999130 - DNA, 15 bp, Homo sapiens
tttataaaattaaca

SEQ ID NO: 999131 - DNA, 15 bp, Homo sapiens
ttttataaaattaac

SEQ ID NO: 999132 - DNA, 15 bp, Homo sapiens
tttttataaaattaa

SEQ ID NO: 999133 - DNA, 15 bp, Homo sapiens
atttttataaaatta

SEQ ID NO: 999134 - DNA, 15 bp, Homo sapiens
tatttttataaaatt

SEQ ID NO: 999135 - DNA, 15 bp, Homo sapiens
ttatttttataaaat

SEQ ID NO: 999136 - DNA, 15 bp, Homo sapiens
tttatttttataaaa

SEQ ID NO: 999137 - DNA, 15 bp, Homo sapiens
ttttatttttataaa

SEQ ID NO: 999138 - DNA, 15 bp, Homo sapiens
gttttatttttataa

SEQ ID NO: 999139 - DNA, 15 bp, Homo sapiens
agttttatttttata

SEQ ID NO: 999140 - DNA, 15 bp, Homo sapiens
aagttttatttttat

SEQ ID NO: 999141 - DNA, 15 bp, Homo sapiens
aaagttttattttta

SEQ ID NO: 999142 - DNA, 15 bp, Homo sapiens
gaaagttttattttt

SEQ ID NO: 999143 - DNA, 15 bp, Homo sapiens
tgaaagttttatttt

SEQ ID NO: 999144 - DNA, 15 bp, Homo sapiens
ttgaaagttttattt

SEQ ID NO: 999145 - DNA, 15 bp, Homo sapiens
gttgaaagttttatt

SEQ ID NO: 999146 - DNA, 15 bp, Homo sapiens
agttgaaagttttat

SEQ ID NO: 999147 - DNA, 15 bp, Homo sapiens
tagttgaaagtttta

SEQ ID NO: 999148 - DNA, 15 bp, Homo sapiens
ctagttgaaagtttt

SEQ ID NO: 999149 - DNA, 15 bp, Homo sapiens
actagttgaaagttt

SEQ ID NO: 999150 - DNA, 15 bp, Homo sapiens
aactagttgaaagtt

SEQ ID NO: 999151 - DNA, 15 bp, Homo sapiens
aaactagttgaaagt

SEQ ID NO: 999152 - DNA, 15 bp, Homo sapiens
aaaactagttgaaag

SEQ ID NO: 999153 - DNA, 15 bp, Homo sapiens
caaaactagttgaaa

SEQ ID NO: 999154 - DNA, 15 bp, Homo sapiens
ccaaaactagttgaa

SEQ ID NO: 999155 - DNA, 15 bp, Homo sapiens
accaaaactagttga

SEQ ID NO: 999156 - DNA, 15 bp, Homo sapiens
caccaaaactagttg

SEQ ID NO: 999157 - DNA, 15 bp, Homo sapiens
tcaccaaaactagtt

SEQ ID NO: 999158 - DNA, 15 bp, Homo sapiens
ctcaccaaaactagt

SEQ ID NO: 999159 - DNA, 15 bp, Homo sapiens
gctcaccaaaactag

SEQ ID NO: 999160 - DNA, 15 bp, Homo sapiens
cgctcaccaaaacta

SEQ ID NO: 999161 - DNA, 15 bp, Homo sapiens
acgctcaccaaaact

SEQ ID NO: 999162 - DNA, 15 bp, Homo sapiens
aacgctcaccaaaac

SEQ ID NO: 999163 - DNA, 15 bp, Homo sapiens
aaacgctcaccaaaa

SEQ ID NO: 999164 - DNA, 15 bp, Homo sapiens
caaacgctcaccaaa

SEQ ID NO: 999165 - DNA, 15 bp, Homo sapiens
tcaaacgctcaccaa

SEQ ID NO: 999166 - DNA, 15 bp, Homo sapiens
atcaaacgctcacca

SEQ ID NO: 999167 - DNA, 15 bp, Homo sapiens
aatcaaacgctcacc

SEQ ID NO: 999168 - DNA, 15 bp, Homo sapiens
aaatcaaacgctcac

SEQ ID NO: 999169 - DNA, 15 bp, Homo sapiens
caaatcaaacgctca

SEQ ID NO: 999170 - DNA, 15 bp, Homo sapiens
acaaatcaaacgctc

SEQ ID NO: 999171 - DNA, 15 bp, Homo sapiens
aacaaatcaaacgct

SEQ ID NO: 999172 - DNA, 15 bp, Homo sapiens
aaacaaatcaaacgc

SEQ ID NO: 999173 - DNA, 15 bp, Homo sapiens
caaacaaatcaaacg

SEQ ID NO: 999174 - DNA, 15 bp, Homo sapiens
gcaaacaaatcaaac

SEQ ID NO: 999175 - DNA, 15 bp, Homo sapiens
tgcaaacaaatcaaa

SEQ ID NO: 999176 - DNA, 15 bp, Homo sapiens
gtgcaaacaaatcaa

SEQ ID NO: 999177 - DNA, 15 bp, Homo sapiens
tgtgcaaacaaatca

SEQ ID NO: 999178 - DNA, 15 bp, Homo sapiens
ttgtgcaaacaaatc

SEQ ID NO: 999179 - DNA, 15 bp, Homo sapiens
tttgtgcaaacaaat

SEQ ID NO: 999180 - DNA, 15 bp, Homo sapiens
ttttgtgcaaacaaa

SEQ ID NO: 999181 - DNA, 15 bp, Homo sapiens
attttgtgcaaacaa

SEQ ID NO: 999182 - DNA, 15 bp, Homo sapiens
cattttgtgcaaaca

SEQ ID NO: 999183 - DNA, 15 bp, Homo sapiens
acattttgtgcaaac

SEQ ID NO: 999184 - DNA, 15 bp, Homo sapiens
gacattttgtgcaaa

SEQ ID NO: 999185 - DNA, 15 bp, Homo sapiens
tgacattttgtgcaa

SEQ ID NO: 999186 - DNA, 15 bp, Homo sapiens
ctgacattttgtgca

SEQ ID NO: 999187 - DNA, 15 bp, Homo sapiens
tctgacattttgtgc

SEQ ID NO: 999188 - DNA, 15 bp, Homo sapiens
ctctgacattttgtg

SEQ ID NO: 999189 - DNA, 15 bp, Homo sapiens
tctctgacattttgt

SEQ ID NO: 999190 - DNA, 15 bp, Homo sapiens
ttctctgacattttg

SEQ ID NO: 999191 - DNA, 15 bp, Homo sapiens
tttctctgacatttt

SEQ ID NO: 999192 - DNA, 15 bp, Homo sapiens
gtttctctgacattt

SEQ ID NO: 999193 - DNA, 15 bp, Homo sapiens
tgtttctctgacatt

SEQ ID NO: 999194 - DNA, 15 bp, Homo sapiens
ctgtttctctgacat

SEQ ID NO: 999195 - DNA, 15 bp, Homo sapiens
gctgtttctctgaca

SEQ ID NO: 999196 - DNA, 15 bp, Homo sapiens
agctgtttctctgac

SEQ ID NO: 999197 - DNA, 15 bp, Homo sapiens
cagctgtttctctga

SEQ ID NO: 999198 - DNA, 15 bp, Homo sapiens
tcagctgtttctctg

SEQ ID NO: 999199 - DNA, 15 bp, Homo sapiens
ttcagctgtttctct

SEQ ID NO: 999200 - DNA, 15 bp, Homo sapiens
tttcagctgtttctc

SEQ ID NO: 999201 - DNA, 15 bp, Homo sapiens
atttcagctgtttct

SEQ ID NO: 999202 - DNA, 15 bp, Homo sapiens
aatttcagctgtttc

SEQ ID NO: 999203 - DNA, 15 bp, Homo sapiens
taatttcagctgttt

SEQ ID NO: 999204 - DNA, 15 bp, Homo sapiens
ataatttcagctgtt

SEQ ID NO: 999205 - DNA, 15 bp, Homo sapiens
tataatttcagctgt

SEQ ID NO: 999206 - DNA, 15 bp, Homo sapiens
atataatttcagctg

SEQ ID NO: 999207 - DNA, 15 bp, Homo sapiens
tatataatttcagct

SEQ ID NO: 999208 - DNA, 15 bp, Homo sapiens
atatataatttcagc

SEQ ID NO: 999209 - DNA, 15 bp, Homo sapiens
catatataatttcag

SEQ ID NO: 999210 - DNA, 15 bp, Homo sapiens
tcatatataatttca

SEQ ID NO: 999211 - DNA, 15 bp, Homo sapiens
ttcatatataatttc

SEQ ID NO: 999212 - DNA, 15 bp, Homo sapiens
gttcatatataattt

SEQ ID NO: 999213 - DNA, 15 bp, Homo sapiens
tgttcatatataatt

SEQ ID NO: 999214 - DNA, 15 bp, Homo sapiens
atgttcatatataat

SEQ ID NO: 999215 - DNA, 15 bp, Homo sapiens
catgttcatatataa

SEQ ID NO: 999216 - DNA, 15 bp, Homo sapiens
acatgttcatatata

SEQ ID NO: 999217 - DNA, 15 bp, Homo sapiens
tacatgttcatatat

SEQ ID NO: 999218 - DNA, 15 bp, Homo sapiens
gtacatgttcatata

SEQ ID NO: 999219 - DNA, 15 bp, Homo sapiens
tgtacatgttcatat

SEQ ID NO: 999220 - DNA, 15 bp, Homo sapiens
gtgtacatgttcata

SEQ ID NO: 999221 - DNA, 15 bp, Homo sapiens
cgtgtacatgttcat

SEQ ID NO: 999222 - DNA, 15 bp, Homo sapiens
gcgtgtacatgttca

SEQ ID NO: 999223 - DNA, 15 bp, Homo sapiens
ggcgtgtacatgttc

SEQ ID NO: 999224 - DNA, 15 bp, Homo sapiens
gggcgtgtacatgtt

SEQ ID NO: 999225 - DNA, 15 bp, Homo sapiens
tgggcgtgtacatgt

SEQ ID NO: 999226 - DNA, 15 bp, Homo sapiens
gtgggcgtgtacatg

SEQ ID NO: 999227 - DNA, 15 bp, Homo sapiens
tgtgggcgtgtacat

SEQ ID NO: 999228 - DNA, 15 bp, Homo sapiens
gtgtgggcgtgtaca

SEQ ID NO: 999229 - DNA, 15 bp, Homo sapiens
tgtgtgggcgtgtac

SEQ ID NO: 999230 - DNA, 15 bp, Homo sapiens
atgtgtgggcgtgta

SEQ ID NO: 999231 - DNA, 15 bp, Homo sapiens
gatgtgtgggcgtgt

SEQ ID NO: 999232 - DNA, 15 bp, Homo sapiens
agatgtgtgggcgtg

SEQ ID NO: 999233 - DNA, 15 bp, Homo sapiens
cagatgtgtgggcgt

SEQ ID NO: 999234 - DNA, 15 bp, Homo sapiens
gcagatgtgtgggcg

SEQ ID NO: 999235 - DNA, 15 bp, Homo sapiens
agcagatgtgtgggc

SEQ ID NO: 999236 - DNA, 15 bp, Homo sapiens
tagcagatgtgtggg

SEQ ID NO: 999237 - DNA, 15 bp, Homo sapiens
atagcagatgtgtgg

SEQ ID NO: 999238 - DNA, 15 bp, Homo sapiens
aatagcagatgtgtg

SEQ ID NO: 999239 - DNA, 15 bp, Homo sapiens
taatagcagatgtgt

SEQ ID NO: 999240 - DNA, 15 bp, Homo sapiens
ataatagcagatgtg

SEQ ID NO: 999241 - DNA, 15 bp, Homo sapiens
gataatagcagatgt

SEQ ID NO: 999242 - DNA, 15 bp, Homo sapiens
tgataatagcagatg

SEQ ID NO: 999243 - DNA, 15 bp, Homo sapiens
ctgataatagcagat

SEQ ID NO: 999244 - DNA, 15 bp, Homo sapiens
actgataatagcaga

SEQ ID NO: 999245 - DNA, 15 bp, Homo sapiens
gactgataatagcag

SEQ ID NO: 999246 - DNA, 15 bp, Homo sapiens
tgactgataatagca

SEQ ID NO: 999247 - DNA, 15 bp, Homo sapiens
atgactgataatagc

SEQ ID NO: 999248 - DNA, 15 bp, Homo sapiens
tatgactgataatag

SEQ ID NO: 999249 - DNA, 15 bp, Homo sapiens
ttatgactgataata

SEQ ID NO: 999250 - DNA, 15 bp, Homo sapiens
tttatgactgataat

SEQ ID NO: 999251 - DNA, 15 bp, Homo sapiens
ttttatgactgataa

SEQ ID NO: 999252 - DNA, 15 bp, Homo sapiens
attttatgactgata

SEQ ID NO: 999253 - DNA, 15 bp, Homo sapiens
cattttatgactgat

SEQ ID NO: 999254 - DNA, 15 bp, Homo sapiens
acattttatgactga

SEQ ID NO: 999255 - DNA, 15 bp, Homo sapiens
tacattttatgactg

SEQ ID NO: 999256 - DNA, 15 bp, Homo sapiens
ctacattttatgact

SEQ ID NO: 999257 - DNA, 15 bp, Homo sapiens
gctacattttatgac

SEQ ID NO: 999258 - DNA, 15 bp, Homo sapiens
agctacattttatga

SEQ ID NO: 999259 - DNA, 15 bp, Homo sapiens
cagctacattttatg

SEQ ID NO: 999260 - DNA, 15 bp, Homo sapiens
acagctacattttat

SEQ ID NO: 999261 - DNA, 15 bp, Homo sapiens
cacagctacatttta

SEQ ID NO: 999262 - DNA, 15 bp, Homo sapiens
acacagctacatttt

SEQ ID NO: 999263 - DNA, 15 bp, Homo sapiens
cacacagctacattt

SEQ ID NO: 999264 - DNA, 15 bp, Homo sapiens
acacacagctacatt

SEQ ID NO: 999265 - DNA, 15 bp, Homo sapiens
tacacacagctacat

SEQ ID NO: 999266 - DNA, 15 bp, Homo sapiens
ctacacacagctaca

SEQ ID NO: 999267 - DNA, 15 bp, Homo sapiens
gctacacacagctac

SEQ ID NO: 999268 - DNA, 15 bp, Homo sapiens
agctacacacagcta

SEQ ID NO: 999269 - DNA, 15 bp, Homo sapiens
gagctacacacagct

SEQ ID NO: 999270 - DNA, 15 bp, Homo sapiens
tgagctacacacagc

SEQ ID NO: 999271 - DNA, 15 bp, Homo sapiens
atgagctacacacag

SEQ ID NO: 999272 - DNA, 15 bp, Homo sapiens
tatgagctacacaca

SEQ ID NO: 999273 - DNA, 15 bp, Homo sapiens
atatgagctacacac

SEQ ID NO: 999274 - DNA, 15 bp, Homo sapiens
tatatgagctacaca

SEQ ID NO: 999275 - DNA, 15 bp, Homo sapiens
atatatgagctacac

SEQ ID NO: 999276 - DNA, 15 bp, Homo sapiens
aatatatgagctaca

SEQ ID NO: 999277 - DNA, 15 bp, Homo sapiens
aaatatatgagctac

SEQ ID NO: 999278 - DNA, 15 bp, Homo sapiens
aaaatatatgagcta

SEQ ID NO: 999279 - DNA, 15 bp, Homo sapiens
aaaaatatatgagct

SEQ ID NO: 999280 - DNA, 15 bp, Homo sapiens
caaaaatatatgagc

SEQ ID NO: 999281 - DNA, 15 bp, Homo sapiens
gcaaaaatatatgag

SEQ ID NO: 999282 - DNA, 15 bp, Homo sapiens
agcaaaaatatatga

SEQ ID NO: 999283 - DNA, 15 bp, Homo sapiens
aagcaaaaatatatg

SEQ ID NO: 999284 - DNA, 15 bp, Homo sapiens
caagcaaaaatatat

SEQ ID NO: 999285 - DNA, 15 bp, Homo sapiens
tcaagcaaaaatata

SEQ ID NO: 999286 - DNA, 15 bp, Homo sapiens
ttcaagcaaaaatat

SEQ ID NO: 999287 - DNA, 15 bp, Homo sapiens
cttcaagcaaaaata

SEQ ID NO: 999288 - DNA, 15 bp, Homo sapiens
tcttcaagcaaaaat

SEQ ID NO: 999289 - DNA, 15 bp, Homo sapiens
gtcttcaagcaaaaa

SEQ ID NO: 999290 - DNA, 15 bp, Homo sapiens
cgtcttcaagcaaaa

SEQ ID NO: 999291 - DNA, 15 bp, Homo sapiens
tcgtcttcaagcaaa

SEQ ID NO: 999292 - DNA, 15 bp, Homo sapiens
ttcgtcttcaagcaa

SEQ ID NO: 999293 - DNA, 15 bp, Homo sapiens
attcgtcttcaagca

SEQ ID NO: 999294 - DNA, 15 bp, Homo sapiens
gattcgtcttcaagc

SEQ ID NO: 999295 - DNA, 15 bp, Homo sapiens
ggattcgtcttcaag

SEQ ID NO: 999296 - DNA, 15 bp, Homo sapiens
cggattcgtcttcaa

SEQ ID NO: 999297 - DNA, 15 bp, Homo sapiens
acggattcgtcttca

SEQ ID NO: 999298 - DNA, 15 bp, Homo sapiens
cacggattcgtcttc

SEQ ID NO: 999299 - DNA, 15 bp, Homo sapiens
gcacggattcgtctt

SEQ ID NO: 999300 - DNA, 15 bp, Homo sapiens
tgcacggattcgtct

SEQ ID NO: 999301 - DNA, 15 bp, Homo sapiens
ctgcacggattcgtc

SEQ ID NO: 999302 - DNA, 15 bp, Homo sapiens
actgcacggattcgt

SEQ ID NO: 999303 - DNA, 15 bp, Homo sapiens
tactgcacggattcg

SEQ ID NO: 999304 - DNA, 15 bp, Homo sapiens
gtactgcacggattc

SEQ ID NO: 999305 - DNA, 15 bp, Homo sapiens
tgtactgcacggatt

SEQ ID NO: 999306 - DNA, 15 bp, Homo sapiens
gtgtactgcacggat

SEQ ID NO: 999307 - DNA, 15 bp, Homo sapiens
agtgtactgcacgga

SEQ ID NO: 999308 - DNA, 15 bp, Homo sapiens
aagtgtactgcacgg

SEQ ID NO: 999309 - DNA, 15 bp, Homo sapiens
taagtgtactgcacg

SEQ ID NO: 999310 - DNA, 15 bp, Homo sapiens
ttaagtgtactgcac

SEQ ID NO: 999311 - DNA, 15 bp, Homo sapiens
tttaagtgtactgca

SEQ ID NO: 999312 - DNA, 15 bp, Homo sapiens
ttttaagtgtactgc

SEQ ID NO: 999313 - DNA, 15 bp, Homo sapiens
cttttaagtgtactg

SEQ ID NO: 999314 - DNA, 15 bp, Homo sapiens
acttttaagtgtact

SEQ ID NO: 999315 - DNA, 15 bp, Homo sapiens
tacttttaagtgtac

SEQ ID NO: 999316 - DNA, 15 bp, Homo sapiens
ttacttttaagtgta

SEQ ID NO: 999317 - DNA, 15 bp, Homo sapiens
tttacttttaagtgt

SEQ ID NO: 999318 - DNA, 15 bp, Homo sapiens
gtttacttttaagtg

SEQ ID NO: 999319 - DNA, 15 bp, Homo sapiens
cgtttacttttaagt

SEQ ID NO: 999320 - DNA, 15 bp, Homo sapiens
tcgtttacttttaag

SEQ ID NO: 999321 - DNA, 15 bp, Homo sapiens
gcagtaagtttctaa

SEQ ID NO: 999322 - DNA, 15 bp, Homo sapiens
ggcagtaagtttcta

SEQ ID NO: 999323 - DNA, 15 bp, Homo sapiens
aggcagtaagtttct

SEQ ID NO: 999324 - DNA, 15 bp, Homo sapiens
aaggcagtaagtttc

SEQ ID NO: 999325 - DNA, 15 bp, Homo sapiens
aaaggcagtaagttt

SEQ ID NO: 999326 - DNA, 15 bp, Homo sapiens
gaaaggcagtaagtt

SEQ ID NO: 999327 - DNA, 15 bp, Homo sapiens
agaaaggcagtaagt

SEQ ID NO: 999328 - DNA, 15 bp, Homo sapiens
gagaaaggcagtaag

SEQ ID NO: 999329 - DNA, 15 bp, Homo sapiens
agagaaaggcagtaa

SEQ ID NO: 999330 - DNA, 15 bp, Homo sapiens
tagagaaaggcagta

SEQ ID NO: 999331 - DNA, 15 bp, Homo sapiens
ttagagaaaggcagt

SEQ ID NO: 999332 - DNA, 15 bp, Homo sapiens
attagagaaaggcag

SEQ ID NO: 999333 - DNA, 15 bp, Homo sapiens
cattagagaaaggca

SEQ ID NO: 999334 - DNA, 15 bp, Homo sapiens
gcattagagaaaggc

SEQ ID NO: 999335 - DNA, 15 bp, Homo sapiens
agcattagagaaagg

SEQ ID NO: 999336 - DNA, 15 bp, Homo sapiens
aagcattagagaaag

SEQ ID NO: 999337 - DNA, 15 bp, Homo sapiens
gaagcattagagaaa

SEQ ID NO: 999338 - DNA, 15 bp, Homo sapiens
agaagcattagagaa

SEQ ID NO: 999339 - DNA, 15 bp, Homo sapiens
tagaagcattagaga

SEQ ID NO: 999340 - DNA, 15 bp, Homo sapiens
ctagaagcattagag

SEQ ID NO: 999341 - DNA, 15 bp, Homo sapiens
actagaagcattaga

SEQ ID NO: 999342 - DNA, 15 bp, Homo sapiens
cactagaagcattag

SEQ ID NO: 999343 - DNA, 15 bp, Homo sapiens
acactagaagcatta

SEQ ID NO: 999344 - DNA, 15 bp, Homo sapiens
tacactagaagcatt

SEQ ID NO: 999345 - DNA, 15 bp, Homo sapiens
ttacactagaagcat

SEQ ID NO: 999346 - DNA, 15 bp, Homo sapiens
tttacactagaagca

SEQ ID NO: 999347 - DNA, 15 bp, Homo sapiens
ttttacactagaagc

SEQ ID NO: 999348 - DNA, 15 bp, Homo sapiens
tttttacactagaag

SEQ ID NO: 999349 - DNA, 15 bp, Homo sapiens
gtttttacactagaa

SEQ ID NO: 999350 - DNA, 15 bp, Homo sapiens
agtttttacactaga

SEQ ID NO: 999351 - DNA, 15 bp, Homo sapiens
aagtttttacactag

SEQ ID NO: 999352 - DNA, 15 bp, Homo sapiens
caagtttttacacta

SEQ ID NO: 999353 - DNA, 15 bp, Homo sapiens
gcaagtttttacact

SEQ ID NO: 999354 - DNA, 15 bp, Homo sapiens
tgcaagtttttacac

SEQ ID NO: 999355 - DNA, 15 bp, Homo sapiens
ctgcaagtttttaca

SEQ ID NO: 999356 - DNA, 15 bp, Homo sapiens
tctgcaagtttttac

SEQ ID NO: 999357 - DNA, 15 bp, Homo sapiens
gtctgcaagttttta

SEQ ID NO: 999358 - DNA, 15 bp, Homo sapiens
agtctgcaagttttt

SEQ ID NO: 999359 - DNA, 15 bp, Homo sapiens
aagtctgcaagtttt

SEQ ID NO: 999360 - DNA, 15 bp, Homo sapiens
taagtctgcaagttt

SEQ ID NO: 999361 - DNA, 15 bp, Homo sapiens
ataagtctgcaagtt

SEQ ID NO: 999362 - DNA, 15 bp, Homo sapiens
cataagtctgcaagt

SEQ ID NO: 999363 - DNA, 15 bp, Homo sapiens
acataagtctgcaag

SEQ ID NO: 999364 - DNA, 15 bp, Homo sapiens
tacataagtctgcaa

SEQ ID NO: 999365 - DNA, 15 bp, Homo sapiens
ttacataagtctgca

SEQ ID NO: 999366 - DNA, 15 bp, Homo sapiens
tttacataagtctgc

SEQ ID NO: 999367 - DNA, 15 bp, Homo sapiens
ctttacataagtctg

SEQ ID NO: 999368 - DNA, 15 bp, Homo sapiens
actttacataagtct

SEQ ID NO: 999369 - DNA, 15 bp, Homo sapiens
tactttacataagtc

SEQ ID NO: 999370 - DNA, 15 bp, Homo sapiens
ctactttacataagt

SEQ ID NO: 999371 - DNA, 15 bp, Homo sapiens
cctactttacataag

SEQ ID NO: 999372 - DNA, 15 bp, Homo sapiens
ccctactttacataa

SEQ ID NO: 999373 - DNA, 15 bp, Homo sapiens
gccctactttacata

SEQ ID NO: 999374 - DNA, 15 bp, Homo sapiens
agccctactttacat

SEQ ID NO: 999375 - DNA, 15 bp, Homo sapiens
cagccctactttaca

SEQ ID NO: 999376 - DNA, 15 bp, Homo sapiens
acagccctactttac

SEQ ID NO: 999377 - DNA, 15 bp, Homo sapiens
tacagccctacttta

SEQ ID NO: 999378 - DNA, 15 bp, Homo sapiens
atacagccctacttt

SEQ ID NO: 999379 - DNA, 15 bp, Homo sapiens
gatacagccctactt

SEQ ID NO: 999380 - DNA, 15 bp, Homo sapiens
cgatacagccctact

SEQ ID NO: 999381 - DNA, 15 bp, Homo sapiens
gcgatacagccctac

SEQ ID NO: 999382 - DNA, 15 bp, Homo sapiens
ggcgatacagcccta

SEQ ID NO: 999383 - DNA, 15 bp, Homo sapiens
cggcgatacagccct

SEQ ID NO: 999384 - DNA, 15 bp, Homo sapiens
acggcgatacagccc

SEQ ID NO: 999385 - DNA, 15 bp, Homo sapiens
cacggcgatacagcc

SEQ ID NO: 999386 - DNA, 15 bp, Homo sapiens
gcacggcgatacagc

SEQ ID NO: 999387 - DNA, 15 bp, Homo sapiens
ggcacggcgatacag

SEQ ID NO: 999388 - DNA, 15 bp, Homo sapiens
gggcacggcgataca

SEQ ID NO: 999389 - DNA, 15 bp, Homo sapiens
ggggcacggcgatac

SEQ ID NO: 999390 - DNA, 15 bp, Homo sapiens
gggggcacggcgata

SEQ ID NO: 999391 - DNA, 15 bp, Homo sapiens
tgggggcacggcgat

SEQ ID NO: 999392 - DNA, 15 bp, Homo sapiens
atgggggcacggcga

SEQ ID NO: 999393 - DNA, 15 bp, Homo sapiens
aatgggggcacggcg

SEQ ID NO: 999394 - DNA, 15 bp, Homo sapiens
caatgggggcacggc

SEQ ID NO: 999395 - DNA, 15 bp, Homo sapiens
acaatgggggcacgg

SEQ ID NO: 999396 - DNA, 15 bp, Homo sapiens
gacaatgggggcacg

SEQ ID NO: 999397 - DNA, 15 bp, Homo sapiens
agacaatgggggcac

SEQ ID NO: 999398 - DNA, 15 bp, Homo sapiens
cagacaatgggggca

SEQ ID NO: 999399 - DNA, 15 bp, Homo sapiens
acagacaatgggggc

SEQ ID NO: 999400 - DNA, 15 bp, Homo sapiens
aacagacaatggggg

SEQ ID NO: 999401 - DNA, 15 bp, Homo sapiens
taacagacaatgggg

SEQ ID NO: 999402 - DNA, 15 bp, Homo sapiens
ttaacagacaatggg

SEQ ID NO: 999403 - DNA, 15 bp, Homo sapiens
attaacagacaatgg

SEQ ID NO: 999404 - DNA, 15 bp, Homo sapiens
gattaacagacaatg

SEQ ID NO: 999405 - DNA, 15 bp, Homo sapiens
agattaacagacaat

SEQ ID NO: 999406 - DNA, 15 bp, Homo sapiens
aagattaacagacaa

SEQ ID NO: 999407 - DNA, 15 bp, Homo sapiens
caagattaacagaca

SEQ ID NO: 999408 - DNA, 15 bp, Homo sapiens
acaagattaacagac

SEQ ID NO: 999409 - DNA, 15 bp, Homo sapiens
aacaagattaacaga

SEQ ID NO: 999410 - DNA, 15 bp, Homo sapiens
aaacaagattaacag

SEQ ID NO: 999411 - DNA, 15 bp, Homo sapiens
aaaacaagattaaca

SEQ ID NO: 999412 - DNA, 15 bp, Homo sapiens
aaaaacaagattaac

SEQ ID NO: 999413 - DNA, 15 bp, Homo sapiens
taaaaacaagattaa

SEQ ID NO: 999414 - DNA, 15 bp, Homo sapiens
ataaaaacaagatta

SEQ ID NO: 999415 - DNA, 15 bp, Homo sapiens
tataaaaacaagatt

SEQ ID NO: 999416 - DNA, 15 bp, Homo sapiens
atataaaaacaagat

SEQ ID NO: 999417 - DNA, 15 bp, Homo sapiens
aatataaaaacaaga

SEQ ID NO: 999418 - DNA, 15 bp, Homo sapiens
aaatataaaaacaag

SEQ ID NO: 999419 - DNA, 15 bp, Homo sapiens
aaaatataaaaacaa

SEQ ID NO: 999420 - DNA, 15 bp, Homo sapiens
aaaaatataaaaaca

SEQ ID NO: 999421 - DNA, 15 bp, Homo sapiens
caaaaatataaaaac

SEQ ID NO: 999422 - DNA, 15 bp, Homo sapiens
tcaaaaatataaaaa

SEQ ID NO: 999423 - DNA, 15 bp, Homo sapiens
atcaaaaatataaaa

SEQ ID NO: 999424 - DNA, 15 bp, Homo sapiens
aatcaaaaatataaa

SEQ ID NO: 999425 - DNA, 15 bp, Homo sapiens
caatcaaaaatataa

SEQ ID NO: 999426 - DNA, 15 bp, Homo sapiens
acaatcaaaaatata

SEQ ID NO: 999427 - DNA, 15 bp, Homo sapiens
cacaatcaaaaatat

SEQ ID NO: 999428 - DNA, 15 bp, Homo sapiens
acacaatcaaaaata

SEQ ID NO: 999429 - DNA, 15 bp, Homo sapiens
aacacaatcaaaaat

SEQ ID NO: 999430 - DNA, 15 bp, Homo sapiens
aaacacaatcaaaaa

SEQ ID NO: 999431 - DNA, 15 bp, Homo sapiens
gaaacacaatcaaaa

SEQ ID NO: 999432 - DNA, 15 bp, Homo sapiens
ggaaacacaatcaaa

SEQ ID NO: 999433 - DNA, 15 bp, Homo sapiens
aggaaacacaatcaa

SEQ ID NO: 999434 - DNA, 15 bp, Homo sapiens
aaggaaacacaatca

SEQ ID NO: 999435 - DNA, 15 bp, Homo sapiens
aaaggaaacacaatc

SEQ ID NO: 999436 - DNA, 15 bp, Homo sapiens
aaaaggaaacacaat

SEQ ID NO: 999437 - DNA, 15 bp, Homo sapiens
gaaaaggaaacacaa

SEQ ID NO: 999438 - DNA, 15 bp, Homo sapiens
agaaaaggaaacaca

SEQ ID NO: 999439 - DNA, 15 bp, Homo sapiens
aagaaaaggaaacac

SEQ ID NO: 999440 - DNA, 15 bp, Homo sapiens
aaagaaaaggaaaca

SEQ ID NO: 999441 - DNA, 15 bp, Homo sapiens
aaaagaaaaggaaac

SEQ ID NO: 999442 - DNA, 15 bp, Homo sapiens
ggaccctgtcttaaa

SEQ ID NO: 999443 - DNA, 15 bp, Homo sapiens
aggaccctgtcttaa

SEQ ID NO: 999444 - DNA, 15 bp, Homo sapiens
caggaccctgtctta

SEQ ID NO: 999445 - DNA, 15 bp, Homo sapiens
gcaggaccctgtctt

SEQ ID NO: 999446 - DNA, 15 bp, Homo sapiens
agcaggaccctgtct

SEQ ID NO: 999447 - DNA, 15 bp, Homo sapiens
gagcaggaccctgtc

SEQ ID NO: 999448 - DNA, 15 bp, Homo sapiens
agagcaggaccctgt

SEQ ID NO: 999449 - DNA, 15 bp, Homo sapiens
cagagcaggaccctg

SEQ ID NO: 999450 - DNA, 15 bp, Homo sapiens
acagagcaggaccct

SEQ ID NO: 999451 - DNA, 15 bp, Homo sapiens
gacagagcaggaccc

SEQ ID NO: 999452 - DNA, 15 bp, Homo sapiens
tgacagagcaggacc

SEQ ID NO: 999453 - DNA, 15 bp, Homo sapiens
gtgacagagcaggac

SEQ ID NO: 999454 - DNA, 15 bp, Homo sapiens
agtgacagagcagga

SEQ ID NO: 999455 - DNA, 15 bp, Homo sapiens
cagtgacagagcagg

SEQ ID NO: 999456 - DNA, 15 bp, Homo sapiens
tcagtgacagagcag

SEQ ID NO: 999457 - DNA, 15 bp, Homo sapiens
ctcagtgacagagca

SEQ ID NO: 999458 - DNA, 15 bp, Homo sapiens
cctcagtgacagagc

SEQ ID NO: 999459 - DNA, 15 bp, Homo sapiens
gcctcagtgacagag

SEQ ID NO: 999460 - DNA, 15 bp, Homo sapiens
agcctcagtgacaga

SEQ ID NO: 999461 - DNA, 15 bp, Homo sapiens
cagcctcagtgacag

SEQ ID NO: 999462 - DNA, 15 bp, Homo sapiens
ccagcctcagtgaca

SEQ ID NO: 999463 - DNA, 15 bp, Homo sapiens
tccagcctcagtgac

SEQ ID NO: 999464 - DNA, 15 bp, Homo sapiens
ctccagcctcagtga

SEQ ID NO: 999465 - DNA, 15 bp, Homo sapiens
actccagcctcagtg

SEQ ID NO: 999466 - DNA, 15 bp, Homo sapiens
cactccagcctcagt

SEQ ID NO: 999467 - DNA, 15 bp, Homo sapiens
acagtgagccgagat

SEQ ID NO: 999468 - DNA, 15 bp, Homo sapiens
tacagtgagccgaga

SEQ ID NO: 999469 - DNA, 15 bp, Homo sapiens
ctacagtgagccgag

SEQ ID NO: 999470 - DNA, 15 bp, Homo sapiens
gctacagtgagccga

SEQ ID NO: 999471 - DNA, 15 bp, Homo sapiens
ggctacagtgagccg

SEQ ID NO: 999472 - DNA, 15 bp, Homo sapiens
aggctacagtgagcc

SEQ ID NO: 999473 - DNA, 15 bp, Homo sapiens
gaggctacagtgagc

SEQ ID NO: 999474 - DNA, 15 bp, Homo sapiens
agaggctacagtgag

SEQ ID NO: 999475 - DNA, 15 bp, Homo sapiens
cagaggctacagtga

SEQ ID NO: 999476 - DNA, 15 bp, Homo sapiens
acagaggctacagtg

SEQ ID NO: 999477 - DNA, 15 bp, Homo sapiens
gacagaggctacagt

SEQ ID NO: 999478 - DNA, 15 bp, Homo sapiens
agacagaggctacag

SEQ ID NO: 999479 - DNA, 15 bp, Homo sapiens
gagacagaggctaca

SEQ ID NO: 999480 - DNA, 15 bp, Homo sapiens
ggagacagaggctac

SEQ ID NO: 999481 - DNA, 15 bp, Homo sapiens
gggagacagaggcta

SEQ ID NO: 999482 - DNA, 15 bp, Homo sapiens
tgggagacagaggct

SEQ ID NO: 999483 - DNA, 15 bp, Homo sapiens
ctgggagacagaggc

SEQ ID NO: 999484 - DNA, 15 bp, Homo sapiens
gctgggagacagagg

SEQ ID NO: 999485 - DNA, 15 bp, Homo sapiens
ggctgggagacagag

SEQ ID NO: 999486 - DNA, 15 bp, Homo sapiens
aggctgggagacaga

SEQ ID NO: 999487 - DNA, 15 bp, Homo sapiens
gaggctgggagacag

SEQ ID NO: 999488 - DNA, 15 bp, Homo sapiens
agaggctgggagaca

SEQ ID NO: 999489 - DNA, 15 bp, Homo sapiens
aagaggctgggagac

SEQ ID NO: 999490 - DNA, 15 bp, Homo sapiens
gaagaggctgggaga

SEQ ID NO: 999491 - DNA, 15 bp, Homo sapiens
ggaagaggctgggag

SEQ ID NO: 999492 - DNA, 15 bp, Homo sapiens
aggaagaggctggga

SEQ ID NO: 999493 - DNA, 15 bp, Homo sapiens
caggaagaggctggg

SEQ ID NO: 999494 - DNA, 15 bp, Homo sapiens
gcaggaagaggctgg

SEQ ID NO: 999495 - DNA, 15 bp, Homo sapiens
ggcaggaagaggctg

SEQ ID NO: 999496 - DNA, 15 bp, Homo sapiens
aggcaggaagaggct

SEQ ID NO: 999497 - DNA, 15 bp, Homo sapiens
aaggcaggaagaggc

SEQ ID NO: 999498 - DNA, 15 bp, Homo sapiens
taaggcaggaagagg

SEQ ID NO: 999499 - DNA, 15 bp, Homo sapiens
ctaaggcaggaagag

SEQ ID NO: 999500 - DNA, 15 bp, Homo sapiens
gctaaggcaggaaga

SEQ ID NO: 999501 - DNA, 15 bp, Homo sapiens
ggctaaggcaggaag

SEQ ID NO: 999502 - DNA, 15 bp, Homo sapiens
tatttgggaggctaa

SEQ ID NO: 999503 - DNA, 15 bp, Homo sapiens
ctatttgggaggcta

SEQ ID NO: 999504 - DNA, 15 bp, Homo sapiens
cagctatttgggagg

SEQ ID NO: 999505 - DNA, 15 bp, Homo sapiens
ccagctatttgggag

SEQ ID NO: 999506 - DNA, 15 bp, Homo sapiens
cccagctatttggga

SEQ ID NO: 999507 - DNA, 15 bp, Homo sapiens
tcccagctatttggg

SEQ ID NO: 999508 - DNA, 15 bp, Homo sapiens
gtcccagctatttgg

SEQ ID NO: 999509 - DNA, 15 bp, Homo sapiens
agtcccagctatttg

SEQ ID NO: 999510 - DNA, 15 bp, Homo sapiens
tagtcccagctattt

SEQ ID NO: 999511 - DNA, 15 bp, Homo sapiens
tgtgcctgtagtccc

SEQ ID NO: 999512 - DNA, 15 bp, Homo sapiens
cgtgtgcctgtagtc

SEQ ID NO: 999513 - DNA, 15 bp, Homo sapiens
gcgtgtgcctgtagt

SEQ ID NO: 999514 - DNA, 15 bp, Homo sapiens
agcgtgtgcctgtag

SEQ ID NO: 999515 - DNA, 15 bp, Homo sapiens
tagcgtgtgcctgta

SEQ ID NO: 999516 - DNA, 15 bp, Homo sapiens
gtagcgtgtgcctgt

SEQ ID NO: 999517 - DNA, 15 bp, Homo sapiens
ggtagcgtgtgcctg

SEQ ID NO: 999518 - DNA, 15 bp, Homo sapiens
tggtagcgtgtgcct

SEQ ID NO: 999519 - DNA, 15 bp, Homo sapiens
atggtagcgtgtgcc

SEQ ID NO: 999520 - DNA, 15 bp, Homo sapiens
catggtagcgtgtgc

SEQ ID NO: 999521 - DNA, 15 bp, Homo sapiens
gcatggtagcgtgtg

SEQ ID NO: 999522 - DNA, 15 bp, Homo sapiens
ggcatggtagcgtgt

SEQ ID NO: 999523 - DNA, 15 bp, Homo sapiens
gggcatggtagcgtg

SEQ ID NO: 999524 - DNA, 15 bp, Homo sapiens
cgggcatggtagcgt

SEQ ID NO: 999525 - DNA, 15 bp, Homo sapiens
ccgggcatggtagcg

SEQ ID NO: 999526 - DNA, 15 bp, Homo sapiens
ggccgggcatggtag

SEQ ID NO: 999527 - DNA, 15 bp, Homo sapiens
tggccgggcatggta

SEQ ID NO: 999528 - DNA, 15 bp, Homo sapiens
ttggccgggcatggt

SEQ ID NO: 999529 - DNA, 15 bp, Homo sapiens
attggccgggcatgg

SEQ ID NO: 999530 - DNA, 15 bp, Homo sapiens
aattggccgggcatg

SEQ ID NO: 999531 - DNA, 15 bp, Homo sapiens
aaattggccgggcat

SEQ ID NO: 999532 - DNA, 15 bp, Homo sapiens
aaaattggccgggca

SEQ ID NO: 999533 - DNA, 15 bp, Homo sapiens
aaaaattggccgggc

SEQ ID NO: 999534 - DNA, 15 bp, Homo sapiens
caaaaattggccggg

SEQ ID NO: 999535 - DNA, 15 bp, Homo sapiens
acaaaaattggccgg

SEQ ID NO: 999536 - DNA, 15 bp, Homo sapiens
tacaaaaattggccg

SEQ ID NO: 999537 - DNA, 15 bp, Homo sapiens
atacaaaaattggcc

SEQ ID NO: 999538 - DNA, 15 bp, Homo sapiens
aatacaaaaattggc

SEQ ID NO: 999539 - DNA, 15 bp, Homo sapiens
aaatacaaaaattgg

SEQ ID NO: 999540 - DNA, 15 bp, Homo sapiens
aaaatacaaaaattg

SEQ ID NO: 999541 - DNA, 15 bp, Homo sapiens
aacctcatctctaca

SEQ ID NO: 999542 - DNA, 15 bp, Homo sapiens
aaaacctcatctcta

SEQ ID NO: 999543 - DNA, 15 bp, Homo sapiens
taaaacctcatctct

SEQ ID NO: 999544 - DNA, 15 bp, Homo sapiens
gtaaaacctcatctc

SEQ ID NO: 999545 - DNA, 15 bp, Homo sapiens
ggtaaaacctcatct

SEQ ID NO: 999546 - DNA, 15 bp, Homo sapiens
tggtaaaacctcatc

SEQ ID NO: 999547 - DNA, 15 bp, Homo sapiens
atggtaaaacctcat

SEQ ID NO: 999548 - DNA, 15 bp, Homo sapiens
catggtaaaacctca

SEQ ID NO: 999549 - DNA, 15 bp, Homo sapiens
acatggtaaaacctc

SEQ ID NO: 999550 - DNA, 15 bp, Homo sapiens
aacatggtaaaacct

SEQ ID NO: 999551 - DNA, 15 bp, Homo sapiens
gcaacatggtaaaac

SEQ ID NO: 999552 - DNA, 15 bp, Homo sapiens
ggcaacatggtaaaa

SEQ ID NO: 999553 - DNA, 15 bp, Homo sapiens
gggcaacatggtaaa

SEQ ID NO: 999554 - DNA, 15 bp, Homo sapiens
tgggcaacatggtaa

SEQ ID NO: 999555 - DNA, 15 bp, Homo sapiens
ctgggcaacatggta

SEQ ID NO: 999556 - DNA, 15 bp, Homo sapiens
cctgggcaacatggt

SEQ ID NO: 999557 - DNA, 15 bp, Homo sapiens
taccagcctgggcaa

SEQ ID NO: 999558 - DNA, 15 bp, Homo sapiens
ttaccagcctgggca

SEQ ID NO: 999559 - DNA, 15 bp, Homo sapiens
gttaccagcctgggc

SEQ ID NO: 999560 - DNA, 15 bp, Homo sapiens
agttaccagcctggg

SEQ ID NO: 999561 - DNA, 15 bp, Homo sapiens
gagttaccagcctgg

SEQ ID NO: 999562 - DNA, 15 bp, Homo sapiens
ggagttaccagcctg

SEQ ID NO: 999563 - DNA, 15 bp, Homo sapiens
aggagttaccagcct

SEQ ID NO: 999564 - DNA, 15 bp, Homo sapiens
caggagttaccagcc

SEQ ID NO: 999565 - DNA, 15 bp, Homo sapiens
tcaggagttaccagc

SEQ ID NO: 999566 - DNA, 15 bp, Homo sapiens
ctcaggagttaccag

SEQ ID NO: 999567 - DNA, 15 bp, Homo sapiens
gctcaggagttacca

SEQ ID NO: 999568 - DNA, 15 bp, Homo sapiens
agctcaggagttacc

SEQ ID NO: 999569 - DNA, 15 bp, Homo sapiens
gagctcaggagttac

SEQ ID NO: 999570 - DNA, 15 bp, Homo sapiens
tgagctcaggagtta

SEQ ID NO: 999571 - DNA, 15 bp, Homo sapiens
agatcacctgagctc

SEQ ID NO: 999572 - DNA, 15 bp, Homo sapiens
cagatcacctgagct

SEQ ID NO: 999573 - DNA, 15 bp, Homo sapiens
gcagatcacctgagc

SEQ ID NO: 999574 - DNA, 15 bp, Homo sapiens
gaaccccagcacttt

SEQ ID NO: 999575 - DNA, 15 bp, Homo sapiens
tgaaccccagcactt

SEQ ID NO: 999576 - DNA, 15 bp, Homo sapiens
gtgaaccccagcact

SEQ ID NO: 999577 - DNA, 15 bp, Homo sapiens
tgtgaaccccagcac

SEQ ID NO: 999578 - DNA, 15 bp, Homo sapiens
ctgtgaaccccagca

SEQ ID NO: 999579 - DNA, 15 bp, Homo sapiens
cctgtgaaccccagc

SEQ ID NO: 999580 - DNA, 15 bp, Homo sapiens
acctgtgaaccccag

SEQ ID NO: 999581 - DNA, 15 bp, Homo sapiens
cacctgtgaacccca

SEQ ID NO: 999582 - DNA, 15 bp, Homo sapiens
acacctgtgaacccc

SEQ ID NO: 999583 - DNA, 15 bp, Homo sapiens
cacacctgtgaaccc

SEQ ID NO: 999584 - DNA, 15 bp, Homo sapiens
acacacctgtgaacc

SEQ ID NO: 999585 - DNA, 15 bp, Homo sapiens
cacacacctgtgaac

SEQ ID NO: 999586 - DNA, 15 bp, Homo sapiens
acacacacctgtgaa

SEQ ID NO: 999587 - DNA, 15 bp, Homo sapiens
aacacacacctgtga

SEQ ID NO: 999588 - DNA, 15 bp, Homo sapiens
aaacacacacctgtg

SEQ ID NO: 999589 - DNA, 15 bp, Homo sapiens
taaacacacacctgt

SEQ ID NO: 999590 - DNA, 15 bp, Homo sapiens
ataaacacacacctg

SEQ ID NO: 999591 - DNA, 15 bp, Homo sapiens
aataaacacacacct

SEQ ID NO: 999592 - DNA, 15 bp, Homo sapiens
aaataaacacacacc

SEQ ID NO: 999593 - DNA, 15 bp, Homo sapiens
gaaataaacacacac

SEQ ID NO: 999594 - DNA, 15 bp, Homo sapiens
agaaataaacacaca

SEQ ID NO: 999595 - DNA, 15 bp, Homo sapiens
tagaaataaacacac

SEQ ID NO: 999596 - DNA, 15 bp, Homo sapiens
atagaaataaacaca

SEQ ID NO: 999597 - DNA, 15 bp, Homo sapiens
gatagaaataaacac

SEQ ID NO: 999598 - DNA, 15 bp, Homo sapiens
agatagaaataaaca

SEQ ID NO: 999599 - DNA, 15 bp, Homo sapiens
tagatagaaataaac

SEQ ID NO: 999600 - DNA, 15 bp, Homo sapiens
ttagatagaaataaa

SEQ ID NO: 999601 - DNA, 15 bp, Homo sapiens
attagatagaaataa

SEQ ID NO: 999602 - DNA, 15 bp, Homo sapiens
aattagatagaaata

SEQ ID NO: 999603 - DNA, 15 bp, Homo sapiens
taattagatagaaat

SEQ ID NO: 999604 - DNA, 15 bp, Homo sapiens
ataattagatagaaa

SEQ ID NO: 999605 - DNA, 15 bp, Homo sapiens
aataattagatagaa

SEQ ID NO: 999606 - DNA, 15 bp, Homo sapiens
aaataattagataga

SEQ ID NO: 999607 - DNA, 15 bp, Homo sapiens
taaataattagatag

SEQ ID NO: 999608 - DNA, 15 bp, Homo sapiens
gtaaataattagata

SEQ ID NO: 999609 - DNA, 15 bp, Homo sapiens
tgtaaataattagat

SEQ ID NO: 999610 - DNA, 15 bp, Homo sapiens
gtgtaaataattaga

SEQ ID NO: 999611 - DNA, 15 bp, Homo sapiens
tgtgtaaataattag

SEQ ID NO: 999612 - DNA, 15 bp, Homo sapiens
ttgtgtaaataatta

SEQ ID NO: 999613 - DNA, 15 bp, Homo sapiens
tttgtgtaaataatt

SEQ ID NO: 999614 - DNA, 15 bp, Homo sapiens
gtttgtgtaaataat

SEQ ID NO: 999615 - DNA, 15 bp, Homo sapiens
tgtttgtgtaaataa

SEQ ID NO: 999616 - DNA, 15 bp, Homo sapiens
gtgtttgtgtaaata

SEQ ID NO: 999617 - DNA, 15 bp, Homo sapiens
tgtgtttgtgtaaat

SEQ ID NO: 999618 - DNA, 15 bp, Homo sapiens
ttgtgtttgtgtaaa

SEQ ID NO: 999619 - DNA, 15 bp, Homo sapiens
attgtgtttgtgtaa

SEQ ID NO: 999620 - DNA, 15 bp, Homo sapiens
cattgtgtttgtgta

SEQ ID NO: 999621 - DNA, 15 bp, Homo sapiens
acattgtgtttgtgt

SEQ ID NO: 999622 - DNA, 15 bp, Homo sapiens
tacattgtgtttgtg

SEQ ID NO: 999623 - DNA, 15 bp, Homo sapiens
atacattgtgtttgt

SEQ ID NO: 999624 - DNA, 15 bp, Homo sapiens
aatacattgtgtttg

SEQ ID NO: 999625 - DNA, 15 bp, Homo sapiens
aaatacattgtgttt

SEQ ID NO: 999626 - DNA, 15 bp, Homo sapiens
taaatacattgtgtt

SEQ ID NO: 999627 - DNA, 15 bp, Homo sapiens
ataaatacattgtgt

SEQ ID NO: 999628 - DNA, 15 bp, Homo sapiens
tataaatacattgtg

SEQ ID NO: 999629 - DNA, 15 bp, Homo sapiens
atataaatacattgt

SEQ ID NO: 999630 - DNA, 15 bp, Homo sapiens
tatataaatacattg

SEQ ID NO: 999631 - DNA, 15 bp, Homo sapiens
atatataaatacatt

SEQ ID NO: 999632 - DNA, 15 bp, Homo sapiens
aatatataaatacat

SEQ ID NO: 999633 - DNA, 15 bp, Homo sapiens
caatatataaataca

SEQ ID NO: 999634 - DNA, 15 bp, Homo sapiens
acaatatataaatac

SEQ ID NO: 999635 - DNA, 15 bp, Homo sapiens
cacaatatataaata

SEQ ID NO: 999636 - DNA, 15 bp, Homo sapiens
acacaatatataaat

SEQ ID NO: 999637 - DNA, 15 bp, Homo sapiens
tacacaatatataaa

SEQ ID NO: 999638 - DNA, 15 bp, Homo sapiens
atacacaatatataa

SEQ ID NO: 999639 - DNA, 15 bp, Homo sapiens
gatacacaatatata

SEQ ID NO: 999640 - DNA, 15 bp, Homo sapiens
agatacacaatatat

SEQ ID NO: 999641 - DNA, 15 bp, Homo sapiens
gagatacacaatata

SEQ ID NO: 999642 - DNA, 15 bp, Homo sapiens
agagatacacaatat

SEQ ID NO: 999643 - DNA, 15 bp, Homo sapiens
aagagatacacaata

SEQ ID NO: 999644 - DNA, 15 bp, Homo sapiens
gaagagatacacaat

SEQ ID NO: 999645 - DNA, 15 bp, Homo sapiens
agaagagatacacaa

SEQ ID NO: 999646 - DNA, 15 bp, Homo sapiens
cagaagagatacaca

SEQ ID NO: 999647 - DNA, 15 bp, Homo sapiens
gcagaagagatacac

SEQ ID NO: 999648 - DNA, 15 bp, Homo sapiens
agcagaagagataca

SEQ ID NO: 999649 - DNA, 15 bp, Homo sapiens
tagcagaagagatac

SEQ ID NO: 999650 - DNA, 15 bp, Homo sapiens
gtagcagaagagata

SEQ ID NO: 999651 - DNA, 15 bp, Homo sapiens
tgtagcagaagagat

SEQ ID NO: 999652 - DNA, 15 bp, Homo sapiens
ttgtagcagaagaga

SEQ ID NO: 999653 - DNA, 15 bp, Homo sapiens
attgtagcagaagag

SEQ ID NO: 999654 - DNA, 15 bp, Homo sapiens
cattgtagcagaaga

SEQ ID NO: 999655 - DNA, 15 bp, Homo sapiens
acattgtagcagaag

SEQ ID NO: 999656 - DNA, 15 bp, Homo sapiens
tacattgtagcagaa

SEQ ID NO: 999657 - DNA, 15 bp, Homo sapiens
ttacattgtagcaga

SEQ ID NO: 999658 - DNA, 15 bp, Homo sapiens
tttacattgtagcag

SEQ ID NO: 999659 - DNA, 15 bp, Homo sapiens
atttacattgtagca

SEQ ID NO: 999660 - DNA, 15 bp, Homo sapiens
aatttacattgtagc

SEQ ID NO: 999661 - DNA, 15 bp, Homo sapiens
gaatttacattgtag

SEQ ID NO: 999662 - DNA, 15 bp, Homo sapiens
agaatttacattgta

SEQ ID NO: 999663 - DNA, 15 bp, Homo sapiens
tagaatttacattgt

SEQ ID NO: 999664 - DNA, 15 bp, Homo sapiens
atagaatttacattg

SEQ ID NO: 999665 - DNA, 15 bp, Homo sapiens
catagaatttacatt

SEQ ID NO: 999666 - DNA, 15 bp, Homo sapiens
tcatagaatttacat

SEQ ID NO: 999667 - DNA, 15 bp, Homo sapiens
ctcatagaatttaca

SEQ ID NO: 999668 - DNA, 15 bp, Homo sapiens
tctcatagaatttac

SEQ ID NO: 999669 - DNA, 15 bp, Homo sapiens
ctctcatagaattta

SEQ ID NO: 999670 - DNA, 15 bp, Homo sapiens
actctcatagaattt

SEQ ID NO: 999671 - DNA, 15 bp, Homo sapiens
tactctcatagaatt

SEQ ID NO: 999672 - DNA, 15 bp, Homo sapiens
ctactctcatagaat

SEQ ID NO: 999673 - DNA, 15 bp, Homo sapiens
actactctcatagaa

SEQ ID NO: 999674 - DNA, 15 bp, Homo sapiens
tactactctcataga

SEQ ID NO: 999675 - DNA, 15 bp, Homo sapiens
ttactactctcatag

SEQ ID NO: 999676 - DNA, 15 bp, Homo sapiens
attactactctcata

SEQ ID NO: 999677 - DNA, 15 bp, Homo sapiens
aattactactctcat

SEQ ID NO: 999678 - DNA, 15 bp, Homo sapiens
aaattactactctca

SEQ ID NO: 999679 - DNA, 15 bp, Homo sapiens
aaaattactactctc

SEQ ID NO: 999680 - DNA, 15 bp, Homo sapiens
caaaattactactct

SEQ ID NO: 999681 - DNA, 15 bp, Homo sapiens
acaaaattactactc

SEQ ID NO: 999682 - DNA, 15 bp, Homo sapiens
gacaaaattactact

SEQ ID NO: 999683 - DNA, 15 bp, Homo sapiens
agacaaaattactac

SEQ ID NO: 999684 - DNA, 15 bp, Homo sapiens
cagacaaaattacta

SEQ ID NO: 999685 - DNA, 15 bp, Homo sapiens
acagacaaaattact

SEQ ID NO: 999686 - DNA, 15 bp, Homo sapiens
gacagacaaaattac

SEQ ID NO: 999687 - DNA, 15 bp, Homo sapiens
agacagacaaaatta

SEQ ID NO: 999688 - DNA, 15 bp, Homo sapiens
gagacagacaaaatt

SEQ ID NO: 999689 - DNA, 15 bp, Homo sapiens
tgagacagacaaaat

SEQ ID NO: 999690 - DNA, 15 bp, Homo sapiens
ttgagacagacaaaa

SEQ ID NO: 999691 - DNA, 15 bp, Homo sapiens
gttgagacagacaaa

SEQ ID NO: 999692 - DNA, 15 bp, Homo sapiens
tgttgagacagacaa

SEQ ID NO: 999693 - DNA, 15 bp, Homo sapiens
gtgttgagacagaca

SEQ ID NO: 999694 - DNA, 15 bp, Homo sapiens
agtgttgagacagac

SEQ ID NO: 999695 - DNA, 15 bp, Homo sapiens
cagtgttgagacaga

SEQ ID NO: 999696 - DNA, 15 bp, Homo sapiens
acagtgttgagacag

SEQ ID NO: 999697 - DNA, 15 bp, Homo sapiens
aaaacagtgttgaga

SEQ ID NO: 999698 - DNA, 15 bp, Homo sapiens
aaaaacagtgttgag

SEQ ID NO: 999699 - DNA, 15 bp, Homo sapiens
gaaaaacagtgttga

SEQ ID NO: 999700 - DNA, 15 bp, Homo sapiens
ggaaaaacagtgttg

SEQ ID NO: 999701 - DNA, 15 bp, Homo sapiens
aggaaaaacagtgtt

SEQ ID NO: 999702 - DNA, 15 bp, Homo sapiens
taggaaaaacagtgt

SEQ ID NO: 999703 - DNA, 15 bp, Homo sapiens
ttaggaaaaacagtg

SEQ ID NO: 999704 - DNA, 15 bp, Homo sapiens
cttaggaaaaacagt

SEQ ID NO: 999705 - DNA, 15 bp, Homo sapiens
acttaggaaaaacag

SEQ ID NO: 999706 - DNA, 15 bp, Homo sapiens
aacttaggaaaaaca

SEQ ID NO: 999707 - DNA, 15 bp, Homo sapiens
aaacttaggaaaaac

SEQ ID NO: 999708 - DNA, 15 bp, Homo sapiens
caaacttaggaaaaa

SEQ ID NO: 999709 - DNA, 15 bp, Homo sapiens
ccaaacttaggaaaa

SEQ ID NO: 999710 - DNA, 15 bp, Homo sapiens
accaaacttaggaaa

SEQ ID NO: 999711 - DNA, 15 bp, Homo sapiens
taccaaacttaggaa

SEQ ID NO: 999712 - DNA, 15 bp, Homo sapiens
gtaccaaacttagga

SEQ ID NO: 999713 - DNA, 15 bp, Homo sapiens
tgtaccaaacttagg

SEQ ID NO: 999714 - DNA, 15 bp, Homo sapiens
atgtaccaaacttag

SEQ ID NO: 999715 - DNA, 15 bp, Homo sapiens
tatgtaccaaactta

SEQ ID NO: 999716 - DNA, 15 bp, Homo sapiens
ctatgtaccaaactt

SEQ ID NO: 999717 - DNA, 15 bp, Homo sapiens
actatgtaccaaact

SEQ ID NO: 999718 - DNA, 15 bp, Homo sapiens
tactatgtaccaaac

SEQ ID NO: 999719 - DNA, 15 bp, Homo sapiens
ctactatgtaccaaa

SEQ ID NO: 999720 - DNA, 15 bp, Homo sapiens
gtgcctactatgtac

SEQ ID NO: 999721 - DNA, 15 bp, Homo sapiens
agtgcctactatgta

SEQ ID NO: 999722 - DNA, 15 bp, Homo sapiens
gagtgcctactatgt

SEQ ID NO: 999723 - DNA, 15 bp, Homo sapiens
tctgagtgcctacta

SEQ ID NO: 999724 - DNA, 15 bp, Homo sapiens
atctgagtgcctact

SEQ ID NO: 999725 - DNA, 15 bp, Homo sapiens
catctgagtgcctac

SEQ ID NO: 999726 - DNA, 15 bp, Homo sapiens
gcatctgagtgccta

SEQ ID NO: 999727 - DNA, 15 bp, Homo sapiens
agcatctgagtgcct

SEQ ID NO: 999728 - DNA, 15 bp, Homo sapiens
aagcatctgagtgcc

SEQ ID NO: 999729 - DNA, 15 bp, Homo sapiens
taagcatctgagtgc

SEQ ID NO: 999730 - DNA, 15 bp, Homo sapiens
ttaagcatctgagtg

SEQ ID NO: 999731 - DNA, 15 bp, Homo sapiens
tttaagcatctgagt

SEQ ID NO: 999732 - DNA, 15 bp, Homo sapiens
ctttaagcatctgag

SEQ ID NO: 999733 - DNA, 15 bp, Homo sapiens
cctttaagcatctga

SEQ ID NO: 999734 - DNA, 15 bp, Homo sapiens
tcctttaagcatctg

SEQ ID NO: 999735 - DNA, 15 bp, Homo sapiens
ttcctttaagcatct

SEQ ID NO: 999736 - DNA, 15 bp, Homo sapiens
attcctttaagcatc

SEQ ID NO: 999737 - DNA, 15 bp, Homo sapiens
cattcctttaagcat

SEQ ID NO: 999738 - DNA, 15 bp, Homo sapiens
tcattcctttaagca

SEQ ID NO: 999739 - DNA, 15 bp, Homo sapiens
ttcattcctttaagc

SEQ ID NO: 999740 - DNA, 15 bp, Homo sapiens
attcattcctttaag

SEQ ID NO: 999741 - DNA, 15 bp, Homo sapiens
cattcattcctttaa

SEQ ID NO: 999742 - DNA, 15 bp, Homo sapiens
tcattcattccttta

SEQ ID NO: 999743 - DNA, 15 bp, Homo sapiens
aattcattcattcct

SEQ ID NO: 999744 - DNA, 15 bp, Homo sapiens
caattcattcattcc

SEQ ID NO: 999745 - DNA, 15 bp, Homo sapiens
acaattcattcattc

SEQ ID NO: 999746 - DNA, 15 bp, Homo sapiens
cacaattcattcatt

SEQ ID NO: 999747 - DNA, 15 bp, Homo sapiens
gcacaattcattcat

SEQ ID NO: 999748 - DNA, 15 bp, Homo sapiens
agcacaattcattca

SEQ ID NO: 999749 - DNA, 15 bp, Homo sapiens
aagcacaattcattc

SEQ ID NO: 999750 - DNA, 15 bp, Homo sapiens
aaagcacaattcatt

SEQ ID NO: 999751 - DNA, 15 bp, Homo sapiens
taaagcacaattcat

SEQ ID NO: 999752 - DNA, 15 bp, Homo sapiens
ttaaagcacaattca

SEQ ID NO: 999753 - DNA, 15 bp, Homo sapiens
attaaagcacaattc

SEQ ID NO: 999754 - DNA, 15 bp, Homo sapiens
aattaaagcacaatt

SEQ ID NO: 999755 - DNA, 15 bp, Homo sapiens
gaattaaagcacaat

SEQ ID NO: 999756 - DNA, 15 bp, Homo sapiens
ggaattaaagcacaa

SEQ ID NO: 999757 - DNA, 15 bp, Homo sapiens
tggaattaaagcaca

SEQ ID NO: 999758 - DNA, 15 bp, Homo sapiens
gtggaattaaagcac

SEQ ID NO: 999759 - DNA, 15 bp, Homo sapiens
agtggaattaaagca

SEQ ID NO: 999760 - DNA, 15 bp, Homo sapiens
aagtggaattaaagc

SEQ ID NO: 999761 - DNA, 15 bp, Homo sapiens
aaagtggaattaaag

SEQ ID NO: 999762 - DNA, 15 bp, Homo sapiens
taaagtggaattaaa

SEQ ID NO: 999763 - DNA, 15 bp, Homo sapiens
gtaaagtggaattaa

SEQ ID NO: 999764 - DNA, 15 bp, Homo sapiens
agtaaagtggaatta

SEQ ID NO: 999765 - DNA, 15 bp, Homo sapiens
tagtaaagtggaatt

SEQ ID NO: 999766 - DNA, 15 bp, Homo sapiens
ttagtaaagtggaat

SEQ ID NO: 999767 - DNA, 15 bp, Homo sapiens
tttagtaaagtggaa

SEQ ID NO: 999768 - DNA, 15 bp, Homo sapiens
gtttagtaaagtgga

SEQ ID NO: 999769 - DNA, 15 bp, Homo sapiens
ggtttagtaaagtgg

SEQ ID NO: 999770 - DNA, 15 bp, Homo sapiens
gggtttagtaaagtg

SEQ ID NO: 999771 - DNA, 15 bp, Homo sapiens
tgggtttagtaaagt

SEQ ID NO: 999772 - DNA, 15 bp, Homo sapiens
ttgggtttagtaaag

SEQ ID NO: 999773 - DNA, 15 bp, Homo sapiens
tttgggtttagtaaa

SEQ ID NO: 999774 - DNA, 15 bp, Homo sapiens
atttgggtttagtaa

SEQ ID NO: 999775 - DNA, 15 bp, Homo sapiens
gatttgggtttagta

SEQ ID NO: 999776 - DNA, 15 bp, Homo sapiens
agatttgggtttagt

SEQ ID NO: 999777 - DNA, 15 bp, Homo sapiens
gagatttgggtttag

SEQ ID NO: 999778 - DNA, 15 bp, Homo sapiens
ggagatttgggttta

SEQ ID NO: 999779 - DNA, 15 bp, Homo sapiens
gggagatttgggttt

SEQ ID NO: 999780 - DNA, 15 bp, Homo sapiens
agggagatttgggtt

SEQ ID NO: 999781 - DNA, 15 bp, Homo sapiens
aagggagatttgggt

SEQ ID NO: 999782 - DNA, 15 bp, Homo sapiens
aaagggagatttggg

SEQ ID NO: 999783 - DNA, 15 bp, Homo sapiens
caaagggagatttgg

SEQ ID NO: 999784 - DNA, 15 bp, Homo sapiens
ccaaagggagatttg

SEQ ID NO: 999785 - DNA, 15 bp, Homo sapiens
tccaaagggagattt

SEQ ID NO: 999786 - DNA, 15 bp, Homo sapiens
gtccaaagggagatt

SEQ ID NO: 999787 - DNA, 15 bp, Homo sapiens
tgtccaaagggagat

SEQ ID NO: 999788 - DNA, 15 bp, Homo sapiens
atgtccaaagggaga

SEQ ID NO: 999789 - DNA, 15 bp, Homo sapiens
aatgtccaaagggag

SEQ ID NO: 999790 - DNA, 15 bp, Homo sapiens
caatgtccaaaggga

SEQ ID NO: 999791 - DNA, 15 bp, Homo sapiens
acaatgtccaaaggg

SEQ ID NO: 999792 - DNA, 15 bp, Homo sapiens
aacaatgtccaaagg

SEQ ID NO: 999793 - DNA, 15 bp, Homo sapiens
taacaatgtccaaag

SEQ ID NO: 999794 - DNA, 15 bp, Homo sapiens
ataacaatgtccaaa

SEQ ID NO: 999795 - DNA, 15 bp, Homo sapiens
gataacaatgtccaa

SEQ ID NO: 999796 - DNA, 15 bp, Homo sapiens
agataacaatgtcca

SEQ ID NO: 999797 - DNA, 15 bp, Homo sapiens
tagataacaatgtcc

SEQ ID NO: 999798 - DNA, 15 bp, Homo sapiens
atagataacaatgtc

SEQ ID NO: 999799 - DNA, 15 bp, Homo sapiens
catagataacaatgt

SEQ ID NO: 999800 - DNA, 15 bp, Homo sapiens
acatagataacaatg

SEQ ID NO: 999801 - DNA, 15 bp, Homo sapiens
cacatagataacaat

SEQ ID NO: 999802 - DNA, 15 bp, Homo sapiens
acacatagataacaa

SEQ ID NO: 999803 - DNA, 15 bp, Homo sapiens
aacacatagataaca

SEQ ID NO: 999804 - DNA, 15 bp, Homo sapiens
aaacacatagataac

SEQ ID NO: 999805 - DNA, 15 bp, Homo sapiens
aaaacacatagataa

SEQ ID NO: 999806 - DNA, 15 bp, Homo sapiens
gaaaacacatagata

SEQ ID NO: 999807 - DNA, 15 bp, Homo sapiens
tgaaaacacatagat

SEQ ID NO: 999808 - DNA, 15 bp, Homo sapiens
ttgaaaacacataga

SEQ ID NO: 999809 - DNA, 15 bp, Homo sapiens
tttgaaaacacatag

SEQ ID NO: 999810 - DNA, 15 bp, Homo sapiens
ctttgaaaacacata

SEQ ID NO: 999811 - DNA, 15 bp, Homo sapiens
tctttgaaaacacat

SEQ ID NO: 999812 - DNA, 15 bp, Homo sapiens
ttctttgaaaacaca

SEQ ID NO: 999813 - DNA, 15 bp, Homo sapiens
cttctttgaaaacac

SEQ ID NO: 999814 - DNA, 15 bp, Homo sapiens
acttctttgaaaaca

SEQ ID NO: 999815 - DNA, 15 bp, Homo sapiens
tacttctttgaaaac

SEQ ID NO: 999816 - DNA, 15 bp, Homo sapiens
atacttctttgaaaa

SEQ ID NO: 999817 - DNA, 15 bp, Homo sapiens
tatacttctttgaaa

SEQ ID NO: 999818 - DNA, 15 bp, Homo sapiens
ttatacttctttgaa

SEQ ID NO: 999819 - DNA, 15 bp, Homo sapiens
attatacttctttga

SEQ ID NO: 999820 - DNA, 15 bp, Homo sapiens
gattatacttctttg

SEQ ID NO: 999821 - DNA, 15 bp, Homo sapiens
tgattatacttcttt

SEQ ID NO: 999822 - DNA, 15 bp, Homo sapiens
atgattatacttctt

SEQ ID NO: 999823 - DNA, 15 bp, Homo sapiens
tatgattatacttct

SEQ ID NO: 999824 - DNA, 15 bp, Homo sapiens
ttatgattatacttc

SEQ ID NO: 999825 - DNA, 15 bp, Homo sapiens
attatgattatactt

SEQ ID NO: 999826 - DNA, 15 bp, Homo sapiens
aattatgattatact

SEQ ID NO: 999827 - DNA, 15 bp, Homo sapiens
aaattatgattatac

SEQ ID NO: 999828 - DNA, 15 bp, Homo sapiens
caaattatgattata

SEQ ID NO: 999829 - DNA, 15 bp, Homo sapiens
tcaaattatgattat

SEQ ID NO: 999830 - DNA, 15 bp, Homo sapiens
gtcaaattatgatta

SEQ ID NO: 999831 - DNA, 15 bp, Homo sapiens
tgtcaaattatgatt

SEQ ID NO: 999832 - DNA, 15 bp, Homo sapiens
ctgtcaaattatgat

SEQ ID NO: 999833 - DNA, 15 bp, Homo sapiens
tctgtcaaattatga

SEQ ID NO: 999834 - DNA, 15 bp, Homo sapiens
ttctgtcaaattatg

SEQ ID NO: 999835 - DNA, 15 bp, Homo sapiens
tttctgtcaaattat

SEQ ID NO: 999836 - DNA, 15 bp, Homo sapiens
atttctgtcaaatta

SEQ ID NO: 999837 - DNA, 15 bp, Homo sapiens
gatttctgtcaaatt

SEQ ID NO: 999838 - DNA, 15 bp, Homo sapiens
ggatttctgtcaaat

SEQ ID NO: 999839 - DNA, 15 bp, Homo sapiens
aggatttctgtcaaa

SEQ ID NO: 999840 - DNA, 15 bp, Homo sapiens
aaggatttctgtcaa

SEQ ID NO: 999841 - DNA, 15 bp, Homo sapiens
caaggatttctgtca

SEQ ID NO: 999842 - DNA, 15 bp, Homo sapiens
tcaaggatttctgtc

SEQ ID NO: 999843 - DNA, 15 bp, Homo sapiens
ctcaaggatttctgt

SEQ ID NO: 999844 - DNA, 15 bp, Homo sapiens
tctcaaggatttctg

SEQ ID NO: 999845 - DNA, 15 bp, Homo sapiens
ctctcaaggatttct

SEQ ID NO: 999846 - DNA, 15 bp, Homo sapiens
cctctcaaggatttc

SEQ ID NO: 999847 - DNA, 15 bp, Homo sapiens
gcctctcaaggattt

SEQ ID NO: 999848 - DNA, 15 bp, Homo sapiens
tgcctctcaaggatt

SEQ ID NO: 999849 - DNA, 15 bp, Homo sapiens
ctgcctctcaaggat

SEQ ID NO: 999850 - DNA, 15 bp, Homo sapiens
tctgcctctcaagga

SEQ ID NO: 999851 - DNA, 15 bp, Homo sapiens
ttctgcctctcaagg

SEQ ID NO: 999852 - DNA, 15 bp, Homo sapiens
gttctgcctctcaag

SEQ ID NO: 999853 - DNA, 15 bp, Homo sapiens
agttctgcctctcaa

SEQ ID NO: 999854 - DNA, 15 bp, Homo sapiens
tagttctgcctctca

SEQ ID NO: 999855 - DNA, 15 bp, Homo sapiens
ttagttctgcctctc

SEQ ID NO: 999856 - DNA, 15 bp, Homo sapiens
cttagttctgcctct

SEQ ID NO: 999857 - DNA, 15 bp, Homo sapiens
acttagttctgcctc

SEQ ID NO: 999858 - DNA, 15 bp, Homo sapiens
cacttagttctgcct

SEQ ID NO: 999859 - DNA, 15 bp, Homo sapiens
tcacttagttctgcc

SEQ ID NO: 999860 - DNA, 15 bp, Homo sapiens
ctcacttagttctgc

SEQ ID NO: 999861 - DNA, 15 bp, Homo sapiens
cctcacttagttctg

SEQ ID NO: 999862 - DNA, 15 bp, Homo sapiens
ccctcacttagttct

SEQ ID NO: 999863 - DNA, 15 bp, Homo sapiens
tccctcacttagttc

SEQ ID NO: 999864 - DNA, 15 bp, Homo sapiens
atccctcacttagtt

SEQ ID NO: 999865 - DNA, 15 bp, Homo sapiens
aatccctcacttagt

SEQ ID NO: 999866 - DNA, 15 bp, Homo sapiens
caatccctcacttag

SEQ ID NO: 999867 - DNA, 15 bp, Homo sapiens
ccaatccctcactta

SEQ ID NO: 999868 - DNA, 15 bp, Homo sapiens
cccaatccctcactt

SEQ ID NO: 999869 - DNA, 15 bp, Homo sapiens
gcccaatccctcact

SEQ ID NO: 999870 - DNA, 15 bp, Homo sapiens
tgcccaatccctcac

SEQ ID NO: 999871 - DNA, 15 bp, Homo sapiens
ctgcccaatccctca

SEQ ID NO: 999872 - DNA, 15 bp, Homo sapiens
cctgcccaatccctc

SEQ ID NO: 999873 - DNA, 15 bp, Homo sapiens
ccctgcccaatccct

SEQ ID NO: 999874 - DNA, 15 bp, Homo sapiens
accctgcccaatccc

SEQ ID NO: 999875 - DNA, 15 bp, Homo sapiens
aaccctgcccaatcc

SEQ ID NO: 999876 - DNA, 15 bp, Homo sapiens
gaaccctgcccaatc

SEQ ID NO: 999877 - DNA, 15 bp, Homo sapiens
tgaaccctgcccaat

SEQ ID NO: 999878 - DNA, 15 bp, Homo sapiens
ctgaaccctgcccaa

SEQ ID NO: 999879 - DNA, 15 bp, Homo sapiens
tctgaaccctgccca

SEQ ID NO: 999880 - DNA, 15 bp, Homo sapiens
atctgaaccctgccc

SEQ ID NO: 999881 - DNA, 15 bp, Homo sapiens
catctgaaccctgcc

SEQ ID NO: 999882 - DNA, 15 bp, Homo sapiens
acatctgaaccctgc

SEQ ID NO: 999883 - DNA, 15 bp, Homo sapiens
aacatctgaaccctg

SEQ ID NO: 999884 - DNA, 15 bp, Homo sapiens
taacatctgaaccct

SEQ ID NO: 999885 - DNA, 15 bp, Homo sapiens
ttaacatctgaaccc

SEQ ID NO: 999886 - DNA, 15 bp, Homo sapiens
cttaacatctgaacc

SEQ ID NO: 999887 - DNA, 15 bp, Homo sapiens
tcttaacatctgaac

SEQ ID NO: 999888 - DNA, 15 bp, Homo sapiens
ttcttaacatctgaa

SEQ ID NO: 999889 - DNA, 15 bp, Homo sapiens
gttcttaacatctga

SEQ ID NO: 999890 - DNA, 15 bp, Homo sapiens
tgttcttaacatctg

SEQ ID NO: 999891 - DNA, 15 bp, Homo sapiens
ctgttcttaacatct

SEQ ID NO: 999892 - DNA, 15 bp, Homo sapiens
actgttcttaacatc

SEQ ID NO: 999893 - DNA, 15 bp, Homo sapiens
tactgttcttaacat

SEQ ID NO: 999894 - DNA, 15 bp, Homo sapiens
ttactgttcttaaca

SEQ ID NO: 999895 - DNA, 15 bp, Homo sapiens
cttactgttcttaac

SEQ ID NO: 999896 - DNA, 15 bp, Homo sapiens
gcttactgttcttaa

SEQ ID NO: 999897 - DNA, 15 bp, Homo sapiens
agcttactgttctta

SEQ ID NO: 999898 - DNA, 15 bp, Homo sapiens
gagcttactgttctt

SEQ ID NO: 999899 - DNA, 15 bp, Homo sapiens
tgagcttactgttct

SEQ ID NO: 999900 - DNA, 15 bp, Homo sapiens
ctgagcttactgttc

SEQ ID NO: 999901 - DNA, 15 bp, Homo sapiens
gctgagcttactgtt

SEQ ID NO: 999902 - DNA, 15 bp, Homo sapiens
tgctgagcttactgt

SEQ ID NO: 999903 - DNA, 15 bp, Homo sapiens
ctgctgagcttactg

SEQ ID NO: 999904 - DNA, 15 bp, Homo sapiens
cctgctgagcttact

SEQ ID NO: 999905 - DNA, 15 bp, Homo sapiens
ccctgctgagcttac

SEQ ID NO: 999906 - DNA, 15 bp, Homo sapiens
accctgctgagctta

SEQ ID NO: 999907 - DNA, 15 bp, Homo sapiens
caccctgctgagctt

SEQ ID NO: 999908 - DNA, 15 bp, Homo sapiens
acaccctgctgagct

SEQ ID NO: 999909 - DNA, 15 bp, Homo sapiens
cacaccctgctgagc

SEQ ID NO: 999910 - DNA, 15 bp, Homo sapiens
tcacaccctgctgag

SEQ ID NO: 999911 - DNA, 15 bp, Homo sapiens
atcacaccctgctga

SEQ ID NO: 999912 - DNA, 15 bp, Homo sapiens
aatcacaccctgctg

SEQ ID NO: 999913 - DNA, 15 bp, Homo sapiens
caatcacaccctgct

SEQ ID NO: 999914 - DNA, 15 bp, Homo sapiens
gcaatcacaccctgc

SEQ ID NO: 999915 - DNA, 15 bp, Homo sapiens
agcaatcacaccctg

SEQ ID NO: 999916 - DNA, 15 bp, Homo sapiens
gagcaatcacaccct

SEQ ID NO: 999917 - DNA, 15 bp, Homo sapiens
tgagcaatcacaccc

SEQ ID NO: 999918 - DNA, 15 bp, Homo sapiens
atgagcaatcacacc

SEQ ID NO: 999919 - DNA, 15 bp, Homo sapiens
catgagcaatcacac

SEQ ID NO: 999920 - DNA, 15 bp, Homo sapiens
gcatgagcaatcaca

SEQ ID NO: 999921 - DNA, 15 bp, Homo sapiens
ggcatgagcaatcac

SEQ ID NO: 999922 - DNA, 15 bp, Homo sapiens
aggcatgagcaatca

SEQ ID NO: 999923 - DNA, 15 bp, Homo sapiens
taggcatgagcaatc

SEQ ID NO: 999924 - DNA, 15 bp, Homo sapiens
ataggcatgagcaat

SEQ ID NO: 999925 - DNA, 15 bp, Homo sapiens
tataggcatgagcaa

SEQ ID NO: 999926 - DNA, 15 bp, Homo sapiens
ttataggcatgagca

SEQ ID NO: 999927 - DNA, 15 bp, Homo sapiens
gttataggcatgagc

SEQ ID NO: 999928 - DNA, 15 bp, Homo sapiens
ggttataggcatgag

SEQ ID NO: 999929 - DNA, 15 bp, Homo sapiens
gggttataggcatga

SEQ ID NO: 999930 - DNA, 15 bp, Homo sapiens
agggttataggcatg

SEQ ID NO: 999931 - DNA, 15 bp, Homo sapiens
tagggttataggcat

SEQ ID NO: 999932 - DNA, 15 bp, Homo sapiens
ctagggttataggca

SEQ ID NO: 999933 - DNA, 15 bp, Homo sapiens
gctagggttataggc

SEQ ID NO: 999934 - DNA, 15 bp, Homo sapiens
gagtgctagggttat

SEQ ID NO: 999935 - DNA, 15 bp, Homo sapiens
agagtgctagggtta

SEQ ID NO: 999936 - DNA, 15 bp, Homo sapiens
tagagtgctagggtt

SEQ ID NO: 999937 - DNA, 15 bp, Homo sapiens
ctagagtgctagggt

SEQ ID NO: 999938 - DNA, 15 bp, Homo sapiens
cctagagtgctaggg

SEQ ID NO: 999939 - DNA, 15 bp, Homo sapiens
tcctagagtgctagg

SEQ ID NO: 999940 - DNA, 15 bp, Homo sapiens
ctcctagagtgctag

SEQ ID NO: 999941 - DNA, 15 bp, Homo sapiens
cctcctagagtgcta

SEQ ID NO: 999942 - DNA, 15 bp, Homo sapiens
gcctcctagagtgct

SEQ ID NO: 999943 - DNA, 15 bp, Homo sapiens
agcctcctagagtgc

SEQ ID NO: 999944 - DNA, 15 bp, Homo sapiens
cagcctcctagagtg

SEQ ID NO: 999945 - DNA, 15 bp, Homo sapiens
tcagcctcctagagt

SEQ ID NO: 999946 - DNA, 15 bp, Homo sapiens
ctcagcctcctagag

SEQ ID NO: 999947 - DNA, 15 bp, Homo sapiens
cctcagcctcctaga

SEQ ID NO: 999948 - DNA, 15 bp, Homo sapiens
acctcagcctcctag

SEQ ID NO: 999949 - DNA, 15 bp, Homo sapiens
cacctcagcctccta

SEQ ID NO: 999950 - DNA, 15 bp, Homo sapiens
atcccacctcagcct

SEQ ID NO: 999951 - DNA, 15 bp, Homo sapiens
catcccacctcagcc

SEQ ID NO: 999952 - DNA, 15 bp, Homo sapiens
tcatcccacctcagc

SEQ ID NO: 999953 - DNA, 15 bp, Homo sapiens
atcatcccacctcag

SEQ ID NO: 999954 - DNA, 15 bp, Homo sapiens
aatcatcccacctca

SEQ ID NO: 999955 - DNA, 15 bp, Homo sapiens
caatcatcccacctc

SEQ ID NO: 999956 - DNA, 15 bp, Homo sapiens
gcaatcatcccacct

SEQ ID NO: 999957 - DNA, 15 bp, Homo sapiens
agcaatcatcccacc

SEQ ID NO: 999958 - DNA, 15 bp, Homo sapiens
aagcaatcatcccac

SEQ ID NO: 999959 - DNA, 15 bp, Homo sapiens
caagcaatcatccca

SEQ ID NO: 999960 - DNA, 15 bp, Homo sapiens
tcaagcaatcatccc

SEQ ID NO: 999961 - DNA, 15 bp, Homo sapiens
ctcaagcaatcatcc

SEQ ID NO: 999962 - DNA, 15 bp, Homo sapiens
cctcaagcaatcatc

SEQ ID NO: 999963 - DNA, 15 bp, Homo sapiens
gcctcaagcaatcat

SEQ ID NO: 999964 - DNA, 15 bp, Homo sapiens
ggcctcaagcaatca

SEQ ID NO: 999965 - DNA, 15 bp, Homo sapiens
ttcaaactcctggcc

SEQ ID NO: 999966 - DNA, 15 bp, Homo sapiens
tttcaaactcctggc

SEQ ID NO: 999967 - DNA, 15 bp, Homo sapiens
atttcaaactcctgg

SEQ ID NO: 999968 - DNA, 15 bp, Homo sapiens
gatttcaaactcctg

SEQ ID NO: 999969 - DNA, 15 bp, Homo sapiens
tgatttcaaactcct

SEQ ID NO: 999970 - DNA, 15 bp, Homo sapiens
ctgatttcaaactcc

SEQ ID NO: 999971 - DNA, 15 bp, Homo sapiens
gctgatttcaaactc

SEQ ID NO: 999972 - DNA, 15 bp, Homo sapiens
ggctgatttcaaact

SEQ ID NO: 999973 - DNA, 15 bp, Homo sapiens
aggctgatttcaaac

SEQ ID NO: 999974 - DNA, 15 bp, Homo sapiens
caggctgatttcaaa

SEQ ID NO: 999975 - DNA, 15 bp, Homo sapiens
ccaggctgatttcaa

SEQ ID NO: 999976 - DNA, 15 bp, Homo sapiens
cccaggctgatttca

SEQ ID NO: 999977 - DNA, 15 bp, Homo sapiens
gcccaggctgatttc

SEQ ID NO: 999978 - DNA, 15 bp, Homo sapiens
tgcccaggctgattt

SEQ ID NO: 999979 - DNA, 15 bp, Homo sapiens
ttgcccaggctgatt

SEQ ID NO: 999980 - DNA, 15 bp, Homo sapiens
gttgcccaggctgat

SEQ ID NO: 999981 - DNA, 15 bp, Homo sapiens
tgatggggtctcact

SEQ ID NO: 999982 - DNA, 15 bp, Homo sapiens
gtgatggggtctcac

SEQ ID NO: 999983 - DNA, 15 bp, Homo sapiens
agtgatggggtctca

SEQ ID NO: 999984 - DNA, 15 bp, Homo sapiens
tagtgatggggtctc

SEQ ID NO: 999985 - DNA, 15 bp, Homo sapiens
gtagtgatggggtct

SEQ ID NO: 999986 - DNA, 15 bp, Homo sapiens
ggtagtgatggggtc

SEQ ID NO: 999987 - DNA, 15 bp, Homo sapiens
tggtagtgatggggt

SEQ ID NO: 999988 - DNA, 15 bp, Homo sapiens
ttggtagtgatgggg

SEQ ID NO: 999989 - DNA, 15 bp, Homo sapiens
gttggtagtgatggg

SEQ ID NO: 999990 - DNA, 15 bp, Homo sapiens
tgttggtagtgatgg

SEQ ID NO: 999991 - DNA, 15 bp, Homo sapiens
ttgttggtagtgatg

SEQ ID NO: 999992 - DNA, 15 bp, Homo sapiens
tttgttggtagtgat

SEQ ID NO: 999993 - DNA, 15 bp, Homo sapiens
ttttgttggtagtga

SEQ ID NO: 999994 - DNA, 15 bp, Homo sapiens
attttgttggtagtg

SEQ ID NO: 999995 - DNA, 15 bp, Homo sapiens
tattttgttggtagt

SEQ ID NO: 999996 - DNA, 15 bp, Homo sapiens
ttattttgttggtag

SEQ ID NO: 999997 - DNA, 15 bp, Homo sapiens
tttattttgttggta

SEQ ID NO: 999998 - DNA, 15 bp, Homo sapiens
atttattttgttggt

SEQ ID NO: 999999 - DNA, 15 bp, Homo sapiens
tatttattttgttgg

SEQ ID NO: 1000000 - DNA, 15 bp, Homo sapiens
ttatttattttgttg

SEQ ID NO: 1000001 - DNA, 15 bp, Homo sapiens
tttatttattttgtt

SEQ ID NO: 1000002 - DNA, 15 bp, Homo sapiens
atttatttattttgt

SEQ ID NO: 1000003 - DNA, 15 bp, Homo sapiens
tatttatttattttg

SEQ ID NO: 1000004 - DNA, 15 bp, Homo sapiens
catttatttatttat

SEQ ID NO: 1000005 - DNA, 15 bp, Homo sapiens
acatttatttattta

SEQ ID NO: 1000006 - DNA, 15 bp, Homo sapiens
tacatttatttattt

SEQ ID NO: 1000007 - DNA, 15 bp, Homo sapiens
gtacatttatttatt

SEQ ID NO: 1000008 - DNA, 15 bp, Homo sapiens
tgtacatttatttat

SEQ ID NO: 1000009 - DNA, 15 bp, Homo sapiens
atgtacatttattta

SEQ ID NO: 1000010 - DNA, 15 bp, Homo sapiens
catgtacatttattt

SEQ ID NO: 1000011 - DNA, 15 bp, Homo sapiens
ccatgtacatttatt

SEQ ID NO: 1000012 - DNA, 15 bp, Homo sapiens
accatgtacatttat

SEQ ID NO: 1000013 - DNA, 15 bp, Homo sapiens
caccatgtacattta

SEQ ID NO: 1000014 - DNA, 15 bp, Homo sapiens
ccaccatgtacattt

SEQ ID NO: 1000015 - DNA, 15 bp, Homo sapiens
gccaccatgtacatt

SEQ ID NO: 1000016 - DNA, 15 bp, Homo sapiens
tgccaccatgtacat

SEQ ID NO: 1000017 - DNA, 15 bp, Homo sapiens
atgccaccatgtaca

SEQ ID NO: 1000018 - DNA, 15 bp, Homo sapiens
tatgccaccatgtac

SEQ ID NO: 1000019 - DNA, 15 bp, Homo sapiens
atatgccaccatgta

SEQ ID NO: 1000020 - DNA, 15 bp, Homo sapiens
catatgccaccatgt

SEQ ID NO: 1000021 - DNA, 15 bp, Homo sapiens
gggcatatgccacca

SEQ ID NO: 1000022 - DNA, 15 bp, Homo sapiens
tgggcatatgccacc

SEQ ID NO: 1000023 - DNA, 15 bp, Homo sapiens
atgggcatatgccac

SEQ ID NO: 1000024 - DNA, 15 bp, Homo sapiens
tatgggcatatgcca

SEQ ID NO: 1000025 - DNA, 15 bp, Homo sapiens
ctatgggcatatgcc

SEQ ID NO: 1000026 - DNA, 15 bp, Homo sapiens
actatgggcatatgc

SEQ ID NO: 1000027 - DNA, 15 bp, Homo sapiens
gactatgggcatatg

SEQ ID NO: 1000028 - DNA, 15 bp, Homo sapiens
ggactatgggcatat

SEQ ID NO: 1000029 - DNA, 15 bp, Homo sapiens
aggactatgggcata

SEQ ID NO: 1000030 - DNA, 15 bp, Homo sapiens
taggactatgggcat

SEQ ID NO: 1000031 - DNA, 15 bp, Homo sapiens
ctaggactatgggca

SEQ ID NO: 1000032 - DNA, 15 bp, Homo sapiens
gctaggactatgggc

SEQ ID NO: 1000033 - DNA, 15 bp, Homo sapiens
agctaggactatggg

SEQ ID NO: 1000034 - DNA, 15 bp, Homo sapiens
tagctaggactatgg

SEQ ID NO: 1000035 - DNA, 15 bp, Homo sapiens
gtagctaggactatg

SEQ ID NO: 1000036 - DNA, 15 bp, Homo sapiens
agtagctaggactat

SEQ ID NO: 1000037 - DNA, 15 bp, Homo sapiens
aagtagctaggacta

SEQ ID NO: 1000038 - DNA, 15 bp, Homo sapiens
caagtagctaggact

SEQ ID NO: 1000039 - DNA, 15 bp, Homo sapiens
ccaagtagctaggac

SEQ ID NO: 1000040 - DNA, 15 bp, Homo sapiens
cccaagtagctagga

SEQ ID NO: 1000041 - DNA, 15 bp, Homo sapiens
tcccaagtagctagg

SEQ ID NO: 1000042 - DNA, 15 bp, Homo sapiens
ctcccaagtagctag

SEQ ID NO: 1000043 - DNA, 15 bp, Homo sapiens
atagcctcccaagta

SEQ ID NO: 1000044 - DNA, 15 bp, Homo sapiens
tatagcctcccaagt

SEQ ID NO: 1000045 - DNA, 15 bp, Homo sapiens
ctatagcctcccaag

SEQ ID NO: 1000046 - DNA, 15 bp, Homo sapiens
actatagcctcccaa

SEQ ID NO: 1000047 - DNA, 15 bp, Homo sapiens
cactatagcctccca

SEQ ID NO: 1000048 - DNA, 15 bp, Homo sapiens
ccactatagcctccc

SEQ ID NO: 1000049 - DNA, 15 bp, Homo sapiens
cccactatagcctcc

SEQ ID NO: 1000050 - DNA, 15 bp, Homo sapiens
tcccactatagcctc

SEQ ID NO: 1000051 - DNA, 15 bp, Homo sapiens
ctcccactatagcct

SEQ ID NO: 1000052 - DNA, 15 bp, Homo sapiens
cctcccactatagcc

SEQ ID NO: 1000053 - DNA, 15 bp, Homo sapiens
tcctcccactatagc

SEQ ID NO: 1000054 - DNA, 15 bp, Homo sapiens
atcctcccactatag

SEQ ID NO: 1000055 - DNA, 15 bp, Homo sapiens
tatcctcccactata

SEQ ID NO: 1000056 - DNA, 15 bp, Homo sapiens
ctatcctcccactat

SEQ ID NO: 1000057 - DNA, 15 bp, Homo sapiens
gctatcctcccacta

SEQ ID NO: 1000058 - DNA, 15 bp, Homo sapiens
agctatcctcccact

SEQ ID NO: 1000059 - DNA, 15 bp, Homo sapiens
aagctatcctcccac

SEQ ID NO: 1000060 - DNA, 15 bp, Homo sapiens
caagctatcctccca

SEQ ID NO: 1000061 - DNA, 15 bp, Homo sapiens
tcaagctatcctccc

SEQ ID NO: 1000062 - DNA, 15 bp, Homo sapiens
ctcaagctatcctcc

SEQ ID NO: 1000063 - DNA, 15 bp, Homo sapiens
actcaagctatcctc

SEQ ID NO: 1000064 - DNA, 15 bp, Homo sapiens
tactcaagctatcct

SEQ ID NO: 1000065 - DNA, 15 bp, Homo sapiens
gtactcaagctatcc

SEQ ID NO: 1000066 - DNA, 15 bp, Homo sapiens
tgtactcaagctatc

SEQ ID NO: 1000067 - DNA, 15 bp, Homo sapiens
ctgtactcaagctat

SEQ ID NO: 1000068 - DNA, 15 bp, Homo sapiens
tctgtactcaagcta

SEQ ID NO: 1000069 - DNA, 15 bp, Homo sapiens
ttctgtactcaagct

SEQ ID NO: 1000070 - DNA, 15 bp, Homo sapiens
cttctgtactcaagc

SEQ ID NO: 1000071 - DNA, 15 bp, Homo sapiens
acttctgtactcaag

SEQ ID NO: 1000072 - DNA, 15 bp, Homo sapiens
gacttctgtactcaa

SEQ ID NO: 1000073 - DNA, 15 bp, Homo sapiens
agacttctgtactca

SEQ ID NO: 1000074 - DNA, 15 bp, Homo sapiens
cagacttctgtactc

SEQ ID NO: 1000075 - DNA, 15 bp, Homo sapiens
tcagacttctgtact

SEQ ID NO: 1000076 - DNA, 15 bp, Homo sapiens
ctcagacttctgtac

SEQ ID NO: 1000077 - DNA, 15 bp, Homo sapiens
cctcagacttctgta

SEQ ID NO: 1000078 - DNA, 15 bp, Homo sapiens
gcctcagacttctgt

SEQ ID NO: 1000079 - DNA, 15 bp, Homo sapiens
ccacaatcatagctc

SEQ ID NO: 1000080 - DNA, 15 bp, Homo sapiens
gccacaatcatagct

SEQ ID NO: 1000081 - DNA, 15 bp, Homo sapiens
tgccacaatcatagc

SEQ ID NO: 1000082 - DNA, 15 bp, Homo sapiens
gtgccacaatcatag

SEQ ID NO: 1000083 - DNA, 15 bp, Homo sapiens
agtgccacaatcata

SEQ ID NO: 1000084 - DNA, 15 bp, Homo sapiens
cagtgccacaatcat

SEQ ID NO: 1000085 - DNA, 15 bp, Homo sapiens
gcagtgccacaatca

SEQ ID NO: 1000086 - DNA, 15 bp, Homo sapiens
tgcagtgccacaatc

SEQ ID NO: 1000087 - DNA, 15 bp, Homo sapiens
atgcagtgccacaat

SEQ ID NO: 1000088 - DNA, 15 bp, Homo sapiens
catgcagtgccacaa

SEQ ID NO: 1000089 - DNA, 15 bp, Homo sapiens
gcatgcagtgccaca

SEQ ID NO: 1000090 - DNA, 15 bp, Homo sapiens
agcatgcagtgccac

SEQ ID NO: 1000091 - DNA, 15 bp, Homo sapiens
tagcatgcagtgcca

SEQ ID NO: 1000092 - DNA, 15 bp, Homo sapiens
ctagcatgcagtgcc

SEQ ID NO: 1000093 - DNA, 15 bp, Homo sapiens
gctagcatgcagtgc

SEQ ID NO: 1000094 - DNA, 15 bp, Homo sapiens
ggctagcatgcagtg

SEQ ID NO: 1000095 - DNA, 15 bp, Homo sapiens
aggctagcatgcagt

SEQ ID NO: 1000096 - DNA, 15 bp, Homo sapiens
caggctagcatgcag

SEQ ID NO: 1000097 - DNA, 15 bp, Homo sapiens
ccaggctagcatgca

SEQ ID NO: 1000098 - DNA, 15 bp, Homo sapiens
cccaggctagcatgc

SEQ ID NO: 1000099 - DNA, 15 bp, Homo sapiens
gcccaggctagcatg

SEQ ID NO: 1000100 - DNA, 15 bp, Homo sapiens
tgcccaggctagcat

SEQ ID NO: 1000101 - DNA, 15 bp, Homo sapiens
ttgcccaggctagca

SEQ ID NO: 1000102 - DNA, 15 bp, Homo sapiens
attgcccaggctagc

SEQ ID NO: 1000103 - DNA, 15 bp, Homo sapiens
tattgcccaggctag

SEQ ID NO: 1000104 - DNA, 15 bp, Homo sapiens
ctattgcccaggcta

SEQ ID NO: 1000105 - DNA, 15 bp, Homo sapiens
gctctattgcccagg

SEQ ID NO: 1000106 - DNA, 15 bp, Homo sapiens
tgctctattgcccag

SEQ ID NO: 1000107 - DNA, 15 bp, Homo sapiens
ttgctctattgccca

SEQ ID NO: 1000108 - DNA, 15 bp, Homo sapiens
cttgctctattgccc

SEQ ID NO: 1000109 - DNA, 15 bp, Homo sapiens
tcttgctctattgcc

SEQ ID NO: 1000110 - DNA, 15 bp, Homo sapiens
gtcttgctctattgc

SEQ ID NO: 1000111 - DNA, 15 bp, Homo sapiens
ggtcttgctctattg

SEQ ID NO: 1000112 - DNA, 15 bp, Homo sapiens
gggtcttgctctatt

SEQ ID NO: 1000113 - DNA, 15 bp, Homo sapiens
agggtcttgctctat

SEQ ID NO: 1000114 - DNA, 15 bp, Homo sapiens
cagggtcttgctcta

SEQ ID NO: 1000115 - DNA, 15 bp, Homo sapiens
atttagagacagggt

SEQ ID NO: 1000116 - DNA, 15 bp, Homo sapiens
aatttagagacaggg

SEQ ID NO: 1000117 - DNA, 15 bp, Homo sapiens
taatttagagacagg

SEQ ID NO: 1000118 - DNA, 15 bp, Homo sapiens
ttaatttagagacag

SEQ ID NO: 1000119 - DNA, 15 bp, Homo sapiens
tttaatttagagaca

SEQ ID NO: 1000120 - DNA, 15 bp, Homo sapiens
gtttaatttagagac

SEQ ID NO: 1000121 - DNA, 15 bp, Homo sapiens
tgtttaatttagaga

SEQ ID NO: 1000122 - DNA, 15 bp, Homo sapiens
ttgtttaatttagag

SEQ ID NO: 1000123 - DNA, 15 bp, Homo sapiens
tttgtttaatttaga

SEQ ID NO: 1000124 - DNA, 15 bp, Homo sapiens
ttttgtttaatttag

SEQ ID NO: 1000125 - DNA, 15 bp, Homo sapiens
tttttgtttaattta

SEQ ID NO: 1000126 - DNA, 15 bp, Homo sapiens
ttttttgtttaattt

SEQ ID NO: 1000127 - DNA, 15 bp, Homo sapiens
tttttttgtttaatt

SEQ ID NO: 1000128 - DNA, 15 bp, Homo sapiens
ttttttttgtttaat

SEQ ID NO: 1000129 - DNA, 15 bp, Homo sapiens
tttttttttgtttaa

SEQ ID NO: 1000130 - DNA, 15 bp, Homo sapiens
ttttttttttgttta

SEQ ID NO: 1000131 - DNA, 15 bp, Homo sapiens
acttttttttttgtt

SEQ ID NO: 1000132 - DNA, 15 bp, Homo sapiens
tacttttttttttgt

SEQ ID NO: 1000133 - DNA, 15 bp, Homo sapiens
gtacttttttttttg

SEQ ID NO: 1000134 - DNA, 15 bp, Homo sapiens
agtactttttttttt

SEQ ID NO: 1000135 - DNA, 15 bp, Homo sapiens
gagtacttttttttt

SEQ ID NO: 1000136 - DNA, 15 bp, Homo sapiens
agagtactttttttt

SEQ ID NO: 1000137 - DNA, 15 bp, Homo sapiens
tagagtacttttttt

SEQ ID NO: 1000138 - DNA, 15 bp, Homo sapiens
ctagagtactttttt

SEQ ID NO: 1000139 - DNA, 15 bp, Homo sapiens
aactagagtactttt

SEQ ID NO: 1000140 - DNA, 15 bp, Homo sapiens
aaactagagtacttt

SEQ ID NO: 1000141 - DNA, 15 bp, Homo sapiens
aaaactagagtactt

SEQ ID NO: 1000142 - DNA, 15 bp, Homo sapiens
gaaaactagagtact

SEQ ID NO: 1000143 - DNA, 15 bp, Homo sapiens
agaaaactagagtac

SEQ ID NO: 1000144 - DNA, 15 bp, Homo sapiens
tagaaaactagagta

SEQ ID NO: 1000145 - DNA, 15 bp, Homo sapiens
atagaaaactagagt

SEQ ID NO: 1000146 - DNA, 15 bp, Homo sapiens
catagaaaactagag

SEQ ID NO: 1000147 - DNA, 15 bp, Homo sapiens
gcatagaaaactaga

SEQ ID NO: 1000148 - DNA, 15 bp, Homo sapiens
tgcatagaaaactag

SEQ ID NO: 1000149 - DNA, 15 bp, Homo sapiens
ttgcatagaaaacta

SEQ ID NO: 1000150 - DNA, 15 bp, Homo sapiens
attgcatagaaaact

SEQ ID NO: 1000151 - DNA, 15 bp, Homo sapiens
cattgcatagaaaac

SEQ ID NO: 1000152 - DNA, 15 bp, Homo sapiens
gcattgcatagaaaa

SEQ ID NO: 1000153 - DNA, 15 bp, Homo sapiens
tgcattgcatagaaa

SEQ ID NO: 1000154 - DNA, 15 bp, Homo sapiens
atgcattgcatagaa

SEQ ID NO: 1000155 - DNA, 15 bp, Homo sapiens
aatgcattgcataga

SEQ ID NO: 1000156 - DNA, 15 bp, Homo sapiens
taatgcattgcatag

SEQ ID NO: 1000157 - DNA, 15 bp, Homo sapiens
ataatgcattgcata

SEQ ID NO: 1000158 - DNA, 15 bp, Homo sapiens
tataatgcattgcat

SEQ ID NO: 1000159 - DNA, 15 bp, Homo sapiens
atataatgcattgca

SEQ ID NO: 1000160 - DNA, 15 bp, Homo sapiens
gatataatgcattgc

SEQ ID NO: 1000161 - DNA, 15 bp, Homo sapiens
agatataatgcattg

SEQ ID NO: 1000162 - DNA, 15 bp, Homo sapiens
cagatataatgcatt

SEQ ID NO: 1000163 - DNA, 15 bp, Homo sapiens
gcagatataatgcat

SEQ ID NO: 1000164 - DNA, 15 bp, Homo sapiens
agcagatataatgca

SEQ ID NO: 1000165 - DNA, 15 bp, Homo sapiens
cagcagatataatgc

SEQ ID NO: 1000166 - DNA, 15 bp, Homo sapiens
acagcagatataatg

SEQ ID NO: 1000167 - DNA, 15 bp, Homo sapiens
cacagcagatataat

SEQ ID NO: 1000168 - DNA, 15 bp, Homo sapiens
ccacagcagatataa

SEQ ID NO: 1000169 - DNA, 15 bp, Homo sapiens
tccacagcagatata

SEQ ID NO: 1000170 - DNA, 15 bp, Homo sapiens
atccacagcagatat

SEQ ID NO: 1000171 - DNA, 15 bp, Homo sapiens
aatccacagcagata

SEQ ID NO: 1000172 - DNA, 15 bp, Homo sapiens
aaatccacagcagat

SEQ ID NO: 1000173 - DNA, 15 bp, Homo sapiens
taaatccacagcaga

SEQ ID NO: 1000174 - DNA, 15 bp, Homo sapiens
ctaaatccacagcag

SEQ ID NO: 1000175 - DNA, 15 bp, Homo sapiens
cctaaatccacagca

SEQ ID NO: 1000176 - DNA, 15 bp, Homo sapiens
ccctaaatccacagc

SEQ ID NO: 1000177 - DNA, 15 bp, Homo sapiens
gccctaaatccacag

SEQ ID NO: 1000178 - DNA, 15 bp, Homo sapiens
tgccctaaatccaca

SEQ ID NO: 1000179 - DNA, 15 bp, Homo sapiens
ctgccctaaatccac

SEQ ID NO: 1000180 - DNA, 15 bp, Homo sapiens
actgccctaaatcca

SEQ ID NO: 1000181 - DNA, 15 bp, Homo sapiens
tactgccctaaatcc

SEQ ID NO: 1000182 - DNA, 15 bp, Homo sapiens
atactgccctaaatc

SEQ ID NO: 1000183 - DNA, 15 bp, Homo sapiens
aatactgccctaaat

SEQ ID NO: 1000184 - DNA, 15 bp, Homo sapiens
taatactgccctaaa

SEQ ID NO: 1000185 - DNA, 15 bp, Homo sapiens
ataatactgccctaa

SEQ ID NO: 1000186 - DNA, 15 bp, Homo sapiens
tataatactgcccta

SEQ ID NO: 1000187 - DNA, 15 bp, Homo sapiens
atataatactgccct

SEQ ID NO: 1000188 - DNA, 15 bp, Homo sapiens
gatataatactgccc

SEQ ID NO: 1000189 - DNA, 15 bp, Homo sapiens
tgatataatactgcc

SEQ ID NO: 1000190 - DNA, 15 bp, Homo sapiens
ctgatataatactgc

SEQ ID NO: 1000191 - DNA, 15 bp, Homo sapiens
tctgatataatactg

SEQ ID NO: 1000192 - DNA, 15 bp, Homo sapiens
atctgatataatact

SEQ ID NO: 1000193 - DNA, 15 bp, Homo sapiens
tatctgatataatac

SEQ ID NO: 1000194 - DNA, 15 bp, Homo sapiens
ttatctgatataata

SEQ ID NO: 1000195 - DNA, 15 bp, Homo sapiens
attatctgatataat

SEQ ID NO: 1000196 - DNA, 15 bp, Homo sapiens
aattatctgatataa

SEQ ID NO: 1000197 - DNA, 15 bp, Homo sapiens
aaattatctgatata

SEQ ID NO: 1000198 - DNA, 15 bp, Homo sapiens
aaaattatctgatat

SEQ ID NO: 1000199 - DNA, 15 bp, Homo sapiens
taaaattatctgata

SEQ ID NO: 1000200 - DNA, 15 bp, Homo sapiens
ctaaaattatctgat

SEQ ID NO: 1000201 - DNA, 15 bp, Homo sapiens
cctaaaattatctga

SEQ ID NO: 1000202 - DNA, 15 bp, Homo sapiens
gcctaaaattatctg

SEQ ID NO: 1000203 - DNA, 15 bp, Homo sapiens
tgcctaaaattatct

SEQ ID NO: 1000204 - DNA, 15 bp, Homo sapiens
atgcctaaaattatc

SEQ ID NO: 1000205 - DNA, 15 bp, Homo sapiens
aatgcctaaaattat

SEQ ID NO: 1000206 - DNA, 15 bp, Homo sapiens
aaatgcctaaaatta

SEQ ID NO: 1000207 - DNA, 15 bp, Homo sapiens
caaatgcctaaaatt

SEQ ID NO: 1000208 - DNA, 15 bp, Homo sapiens
ccaaatgcctaaaat

SEQ ID NO: 1000209 - DNA, 15 bp, Homo sapiens
accaaatgcctaaaa

SEQ ID NO: 1000210 - DNA, 15 bp, Homo sapiens
taccaaatgcctaaa

SEQ ID NO: 1000211 - DNA, 15 bp, Homo sapiens
ctaccaaatgcctaa

SEQ ID NO: 1000212 - DNA, 15 bp, Homo sapiens
cctaccaaatgccta

SEQ ID NO: 1000213 - DNA, 15 bp, Homo sapiens
gcctaccaaatgcct

SEQ ID NO: 1000214 - DNA, 15 bp, Homo sapiens
agcctaccaaatgcc

SEQ ID NO: 1000215 - DNA, 15 bp, Homo sapiens
aagcctaccaaatgc

SEQ ID NO: 1000216 - DNA, 15 bp, Homo sapiens
taagcctaccaaatg

SEQ ID NO: 1000217 - DNA, 15 bp, Homo sapiens
ttaagcctaccaaat

SEQ ID NO: 1000218 - DNA, 15 bp, Homo sapiens
tttaagcctaccaaa

SEQ ID NO: 1000219 - DNA, 15 bp, Homo sapiens
atttaagcctaccaa

SEQ ID NO: 1000220 - DNA, 15 bp, Homo sapiens
catttaagcctacca

SEQ ID NO: 1000221 - DNA, 15 bp, Homo sapiens
tcatttaagcctacc

SEQ ID NO: 1000222 - DNA, 15 bp, Homo sapiens
ttcatttaagcctac

SEQ ID NO: 1000223 - DNA, 15 bp, Homo sapiens
attcatttaagccta

SEQ ID NO: 1000224 - DNA, 15 bp, Homo sapiens
cattcatttaagcct

SEQ ID NO: 1000225 - DNA, 15 bp, Homo sapiens
tcattcatttaagcc

SEQ ID NO: 1000226 - DNA, 15 bp, Homo sapiens
gtcattcatttaagc

SEQ ID NO: 1000227 - DNA, 15 bp, Homo sapiens
tgtcattcatttaag

SEQ ID NO: 1000228 - DNA, 15 bp, Homo sapiens
ttgtcattcatttaa

SEQ ID NO: 1000229 - DNA, 15 bp, Homo sapiens
tttgtcattcattta

SEQ ID NO: 1000230 - DNA, 15 bp, Homo sapiens
ttttgtcattcattt

SEQ ID NO: 1000231 - DNA, 15 bp, Homo sapiens
tttttgtcattcatt

SEQ ID NO: 1000232 - DNA, 15 bp, Homo sapiens
ctttttgtcattcat

SEQ ID NO: 1000233 - DNA, 15 bp, Homo sapiens
actttttgtcattca

SEQ ID NO: 1000234 - DNA, 15 bp, Homo sapiens
aactttttgtcattc

SEQ ID NO: 1000235 - DNA, 15 bp, Homo sapiens
taactttttgtcatt

SEQ ID NO: 1000236 - DNA, 15 bp, Homo sapiens
gtaactttttgtcat

SEQ ID NO: 1000237 - DNA, 15 bp, Homo sapiens
agtaactttttgtca

SEQ ID NO: 1000238 - DNA, 15 bp, Homo sapiens
tagtaactttttgtc

SEQ ID NO: 1000239 - DNA, 15 bp, Homo sapiens
ttagtaactttttgt

SEQ ID NO: 1000240 - DNA, 15 bp, Homo sapiens
tttagtaactttttg

SEQ ID NO: 1000241 - DNA, 15 bp, Homo sapiens
atttagtaacttttt

SEQ ID NO: 1000242 - DNA, 15 bp, Homo sapiens
gatttagtaactttt

SEQ ID NO: 1000243 - DNA, 15 bp, Homo sapiens
tgatttagtaacttt

SEQ ID NO: 1000244 - DNA, 15 bp, Homo sapiens
gtgatttagtaactt

SEQ ID NO: 1000245 - DNA, 15 bp, Homo sapiens
agtgatttagtaact

SEQ ID NO: 1000246 - DNA, 15 bp, Homo sapiens
cagtgatttagtaac

SEQ ID NO: 1000247 - DNA, 15 bp, Homo sapiens
gcagtgatttagtaa

SEQ ID NO: 1000248 - DNA, 15 bp, Homo sapiens
ggcagtgatttagta

SEQ ID NO: 1000249 - DNA, 15 bp, Homo sapiens
tggcagtgatttagt

SEQ ID NO: 1000250 - DNA, 15 bp, Homo sapiens
atggcagtgatttag

SEQ ID NO: 1000251 - DNA, 15 bp, Homo sapiens
gatggcagtgattta

SEQ ID NO: 1000252 - DNA, 15 bp, Homo sapiens
tgatggcagtgattt

SEQ ID NO: 1000253 - DNA, 15 bp, Homo sapiens
gtgatggcagtgatt

SEQ ID NO: 1000254 - DNA, 15 bp, Homo sapiens
tgtgatggcagtgat

SEQ ID NO: 1000255 - DNA, 15 bp, Homo sapiens
gtgtgatggcagtga

SEQ ID NO: 1000256 - DNA, 15 bp, Homo sapiens
cgtgtgatggcagtg

SEQ ID NO: 1000257 - DNA, 15 bp, Homo sapiens
ccgtgtgatggcagt

SEQ ID NO: 1000258 - DNA, 15 bp, Homo sapiens
accgtgtgatggcag

SEQ ID NO: 1000259 - DNA, 15 bp, Homo sapiens
aaccgtgtgatggca

SEQ ID NO: 1000260 - DNA, 15 bp, Homo sapiens
aaaccgtgtgatggc

SEQ ID NO: 1000261 - DNA, 15 bp, Homo sapiens
taaaccgtgtgatgg

SEQ ID NO: 1000262 - DNA, 15 bp, Homo sapiens
ataaaccgtgtgatg

SEQ ID NO: 1000263 - DNA, 15 bp, Homo sapiens
tataaaccgtgtgat

SEQ ID NO: 1000264 - DNA, 15 bp, Homo sapiens
gtataaaccgtgtga

SEQ ID NO: 1000265 - DNA, 15 bp, Homo sapiens
tgtataaaccgtgtg

SEQ ID NO: 1000266 - DNA, 15 bp, Homo sapiens
ctgtataaaccgtgt

SEQ ID NO: 1000267 - DNA, 15 bp, Homo sapiens
tctgtataaaccgtg

SEQ ID NO: 1000268 - DNA, 15 bp, Homo sapiens
atctgtataaaccgt

SEQ ID NO: 1000269 - DNA, 15 bp, Homo sapiens
catctgtataaaccg

SEQ ID NO: 1000270 - DNA, 15 bp, Homo sapiens
acatctgtataaacc

SEQ ID NO: 1000271 - DNA, 15 bp, Homo sapiens
gacatctgtataaac

SEQ ID NO: 1000272 - DNA, 15 bp, Homo sapiens
tgacatctgtataaa

SEQ ID NO: 1000273 - DNA, 15 bp, Homo sapiens
ttgacatctgtataa

SEQ ID NO: 1000274 - DNA, 15 bp, Homo sapiens
attgacatctgtata

SEQ ID NO: 1000275 - DNA, 15 bp, Homo sapiens
cattgacatctgtat

SEQ ID NO: 1000276 - DNA, 15 bp, Homo sapiens
tcattgacatctgta

SEQ ID NO: 1000277 - DNA, 15 bp, Homo sapiens
atcattgacatctgt

SEQ ID NO: 1000278 - DNA, 15 bp, Homo sapiens
catcattgacatctg

SEQ ID NO: 1000279 - DNA, 15 bp, Homo sapiens
acatcattgacatct

SEQ ID NO: 1000280 - DNA, 15 bp, Homo sapiens
tacatcattgacatc

SEQ ID NO: 1000281 - DNA, 15 bp, Homo sapiens
atacatcattgacat

SEQ ID NO: 1000282 - DNA, 15 bp, Homo sapiens
aatacatcattgaca

SEQ ID NO: 1000283 - DNA, 15 bp, Homo sapiens
caatacatcattgac

SEQ ID NO: 1000284 - DNA, 15 bp, Homo sapiens
tcaatacatcattga

SEQ ID NO: 1000285 - DNA, 15 bp, Homo sapiens
atcaatacatcattg

SEQ ID NO: 1000286 - DNA, 15 bp, Homo sapiens
aatcaatacatcatt

SEQ ID NO: 1000287 - DNA, 15 bp, Homo sapiens
taatcaatacatcat

SEQ ID NO: 1000288 - DNA, 15 bp, Homo sapiens
ataatcaatacatca

SEQ ID NO: 1000289 - DNA, 15 bp, Homo sapiens
tataatcaatacatc

SEQ ID NO: 1000290 - DNA, 15 bp, Homo sapiens
ctataatcaatacat

SEQ ID NO: 1000291 - DNA, 15 bp, Homo sapiens
tctataatcaataca

SEQ ID NO: 1000292 - DNA, 15 bp, Homo sapiens
ctctataatcaatac

SEQ ID NO: 1000293 - DNA, 15 bp, Homo sapiens
cctctataatcaata

SEQ ID NO: 1000294 - DNA, 15 bp, Homo sapiens
acctctataatcaat

SEQ ID NO: 1000295 - DNA, 15 bp, Homo sapiens
aacctctataatcaa

SEQ ID NO: 1000296 - DNA, 15 bp, Homo sapiens
aaacctctataatca

SEQ ID NO: 1000297 - DNA, 15 bp, Homo sapiens
aaaacctctataatc

SEQ ID NO: 1000298 - DNA, 15 bp, Homo sapiens
gaaaacctctataat

SEQ ID NO: 1000299 - DNA, 15 bp, Homo sapiens
agaaaacctctataa

SEQ ID NO: 1000300 - DNA, 15 bp, Homo sapiens
tagaaaacctctata

SEQ ID NO: 1000301 - DNA, 15 bp, Homo sapiens
gtagaaaacctctat

SEQ ID NO: 1000302 - DNA, 15 bp, Homo sapiens
agtagaaaacctcta

SEQ ID NO: 1000303 - DNA, 15 bp, Homo sapiens
cagtagaaaacctct

SEQ ID NO: 1000304 - DNA, 15 bp, Homo sapiens
acagtagaaaacctc

SEQ ID NO: 1000305 - DNA, 15 bp, Homo sapiens
aacagtagaaaacct

SEQ ID NO: 1000306 - DNA, 15 bp, Homo sapiens
caacagtagaaaacc

SEQ ID NO: 1000307 - DNA, 15 bp, Homo sapiens
gcaacagtagaaaac

SEQ ID NO: 1000308 - DNA, 15 bp, Homo sapiens
agcaacagtagaaaa

SEQ ID NO: 1000309 - DNA, 15 bp, Homo sapiens
cagcaacagtagaaa

SEQ ID NO: 1000310 - DNA, 15 bp, Homo sapiens
gcagcaacagtagaa

SEQ ID NO: 1000311 - DNA, 15 bp, Homo sapiens
tgcagcaacagtaga

SEQ ID NO: 1000312 - DNA, 15 bp, Homo sapiens
atgcagcaacagtag

SEQ ID NO: 1000313 - DNA, 15 bp, Homo sapiens
gatgcagcaacagta

SEQ ID NO: 1000314 - DNA, 15 bp, Homo sapiens
agatgcagcaacagt

SEQ ID NO: 1000315 - DNA, 15 bp, Homo sapiens
aagatgcagcaacag

SEQ ID NO: 1000316 - DNA, 15 bp, Homo sapiens
taagatgcagcaaca

SEQ ID NO: 1000317 - DNA, 15 bp, Homo sapiens
ataagatgcagcaac

SEQ ID NO: 1000318 - DNA, 15 bp, Homo sapiens
aataagatgcagcaa

SEQ ID NO: 1000319 - DNA, 15 bp, Homo sapiens
aaataagatgcagca

SEQ ID NO: 1000320 - DNA, 15 bp, Homo sapiens
aaaataagatgcagc

SEQ ID NO: 1000321 - DNA, 15 bp, Homo sapiens
aaaaataagatgcag

SEQ ID NO: 1000322 - DNA, 15 bp, Homo sapiens
taaaaataagatgca

SEQ ID NO: 1000323 - DNA, 15 bp, Homo sapiens
ataaaaataagatgc

SEQ ID NO: 1000324 - DNA, 15 bp, Homo sapiens
aataaaaataagatg

SEQ ID NO: 1000325 - DNA, 15 bp, Homo sapiens
aaataaaaataagat

SEQ ID NO: 1000326 - DNA, 15 bp, Homo sapiens
caaataaaaataaga

SEQ ID NO: 1000327 - DNA, 15 bp, Homo sapiens
acaaataaaaataag

SEQ ID NO: 1000328 - DNA, 15 bp, Homo sapiens
aacaaataaaaataa

SEQ ID NO: 1000329 - DNA, 15 bp, Homo sapiens
aaacaaataaaaata

SEQ ID NO: 1000330 - DNA, 15 bp, Homo sapiens
taaacaaataaaaat

SEQ ID NO: 1000331 - DNA, 15 bp, Homo sapiens
gtaaacaaataaaaa

SEQ ID NO: 1000332 - DNA, 15 bp, Homo sapiens
tgtaaacaaataaaa

SEQ ID NO: 1000333 - DNA, 15 bp, Homo sapiens
atgtaaacaaataaa

SEQ ID NO: 1000334 - DNA, 15 bp, Homo sapiens
catgtaaacaaataa

SEQ ID NO: 1000335 - DNA, 15 bp, Homo sapiens
acatgtaaacaaata

SEQ ID NO: 1000336 - DNA, 15 bp, Homo sapiens
gacatgtaaacaaat

SEQ ID NO: 1000337 - DNA, 15 bp, Homo sapiens
agacatgtaaacaaa

SEQ ID NO: 1000338 - DNA, 15 bp, Homo sapiens
aagacatgtaaacaa

SEQ ID NO: 1000339 - DNA, 15 bp, Homo sapiens
aaagacatgtaaaca

SEQ ID NO: 1000340 - DNA, 15 bp, Homo sapiens
aaaagacatgtaaac

SEQ ID NO: 1000341 - DNA, 15 bp, Homo sapiens
gaaaagacatgtaaa

SEQ ID NO: 1000342 - DNA, 15 bp, Homo sapiens
agaaaagacatgtaa

SEQ ID NO: 1000343 - DNA, 15 bp, Homo sapiens
aagaaaagacatgta

SEQ ID NO: 1000344 - DNA, 15 bp, Homo sapiens
taagaaaagacatgt

SEQ ID NO: 1000345 - DNA, 15 bp, Homo sapiens
ataagaaaagacatg

SEQ ID NO: 1000346 - DNA, 15 bp, Homo sapiens
aataagaaaagacat

SEQ ID NO: 1000347 - DNA, 15 bp, Homo sapiens
aaataagaaaagaca

SEQ ID NO: 1000348 - DNA, 15 bp, Homo sapiens
aaaataagaaaagac

SEQ ID NO: 1000349 - DNA, 15 bp, Homo sapiens
taaaataagaaaaga

SEQ ID NO: 1000350 - DNA, 15 bp, Homo sapiens
ctaaaataagaaaag

SEQ ID NO: 1000351 - DNA, 15 bp, Homo sapiens
actaaaataagaaaa

SEQ ID NO: 1000352 - DNA, 15 bp, Homo sapiens
cactaaaataagaaa

SEQ ID NO: 1000353 - DNA, 15 bp, Homo sapiens
acactaaaataagaa

SEQ ID NO: 1000354 - DNA, 15 bp, Homo sapiens
gacactaaaataaga

SEQ ID NO: 1000355 - DNA, 15 bp, Homo sapiens
ggacactaaaataag

SEQ ID NO: 1000356 - DNA, 15 bp, Homo sapiens
aggacactaaaataa

SEQ ID NO: 1000357 - DNA, 15 bp, Homo sapiens
aaggacactaaaata

SEQ ID NO: 1000358 - DNA, 15 bp, Homo sapiens
taaggacactaaaat

SEQ ID NO: 1000359 - DNA, 15 bp, Homo sapiens
ttaaggacactaaaa

SEQ ID NO: 1000360 - DNA, 15 bp, Homo sapiens
tttaaggacactaaa

SEQ ID NO: 1000361 - DNA, 15 bp, Homo sapiens
ttttaaggacactaa

SEQ ID NO: 1000362 - DNA, 15 bp, Homo sapiens
cttttaaggacacta

SEQ ID NO: 1000363 - DNA, 15 bp, Homo sapiens
ccttttaaggacact

SEQ ID NO: 1000364 - DNA, 15 bp, Homo sapiens
accttttaaggacac

SEQ ID NO: 1000365 - DNA, 15 bp, Homo sapiens
aaccttttaaggaca

SEQ ID NO: 1000366 - DNA, 15 bp, Homo sapiens
caaccttttaaggac

SEQ ID NO: 1000367 - DNA, 15 bp, Homo sapiens
tcaaccttttaagga

SEQ ID NO: 1000368 - DNA, 15 bp, Homo sapiens
atcaaccttttaagg

SEQ ID NO: 1000369 - DNA, 15 bp, Homo sapiens
tatcaaccttttaag

SEQ ID NO: 1000370 - DNA, 15 bp, Homo sapiens
ttatcaaccttttaa

SEQ ID NO: 1000371 - DNA, 15 bp, Homo sapiens
attatcaacctttta

SEQ ID NO: 1000372 - DNA, 15 bp, Homo sapiens
gattatcaacctttt

SEQ ID NO: 1000373 - DNA, 15 bp, Homo sapiens
tgattatcaaccttt

SEQ ID NO: 1000374 - DNA, 15 bp, Homo sapiens
gtgattatcaacctt

SEQ ID NO: 1000375 - DNA, 15 bp, Homo sapiens
agtgattatcaacct

SEQ ID NO: 1000376 - DNA, 15 bp, Homo sapiens
aagtgattatcaacc

SEQ ID NO: 1000377 - DNA, 15 bp, Homo sapiens
caagtgattatcaac

SEQ ID NO: 1000378 - DNA, 15 bp, Homo sapiens
gcaagtgattatcaa

SEQ ID NO: 1000379 - DNA, 15 bp, Homo sapiens
agcaagtgattatca

SEQ ID NO: 1000380 - DNA, 15 bp, Homo sapiens
cagcaagtgattatc

SEQ ID NO: 1000381 - DNA, 15 bp, Homo sapiens
tcagcaagtgattat

SEQ ID NO: 1000382 - DNA, 15 bp, Homo sapiens
ctcagcaagtgatta

SEQ ID NO: 1000383 - DNA, 15 bp, Homo sapiens
actcagcaagtgatt

SEQ ID NO: 1000384 - DNA, 15 bp, Homo sapiens
cactcagcaagtgat

SEQ ID NO: 1000385 - DNA, 15 bp, Homo sapiens
acactcagcaagtga

SEQ ID NO: 1000386 - DNA, 15 bp, Homo sapiens
cacactcagcaagtg

SEQ ID NO: 1000387 - DNA, 15 bp, Homo sapiens
acacactcagcaagt

SEQ ID NO: 1000388 - DNA, 15 bp, Homo sapiens
aacacactcagcaag

SEQ ID NO: 1000389 - DNA, 15 bp, Homo sapiens
aaacacactcagcaa

SEQ ID NO: 1000390 - DNA, 15 bp, Homo sapiens
gaaacacactcagca

SEQ ID NO: 1000391 - DNA, 15 bp, Homo sapiens
agaaacacactcagc

SEQ ID NO: 1000392 - DNA, 15 bp, Homo sapiens
gagaaacacactcag

SEQ ID NO: 1000393 - DNA, 15 bp, Homo sapiens
tgagaaacacactca

SEQ ID NO: 1000394 - DNA, 15 bp, Homo sapiens
ttgagaaacacactc

SEQ ID NO: 1000395 - DNA, 15 bp, Homo sapiens
tttgagaaacacact

SEQ ID NO: 1000396 - DNA, 15 bp, Homo sapiens
gtttgagaaacacac

SEQ ID NO: 1000397 - DNA, 15 bp, Homo sapiens
tgtttgagaaacaca

SEQ ID NO: 1000398 - DNA, 15 bp, Homo sapiens
ttgtttgagaaacac

SEQ ID NO: 1000399 - DNA, 15 bp, Homo sapiens
attgtttgagaaaca

SEQ ID NO: 1000400 - DNA, 15 bp, Homo sapiens
aattgtttgagaaac

SEQ ID NO: 1000401 - DNA, 15 bp, Homo sapiens
aaattgtttgagaaa

SEQ ID NO: 1000402 - DNA, 15 bp, Homo sapiens
taaattgtttgagaa

SEQ ID NO: 1000403 - DNA, 15 bp, Homo sapiens
ttaaattgtttgaga

SEQ ID NO: 1000404 - DNA, 15 bp, Homo sapiens
attaaattgtttgag

SEQ ID NO: 1000405 - DNA, 15 bp, Homo sapiens
aattaaattgtttga

SEQ ID NO: 1000406 - DNA, 15 bp, Homo sapiens
aaattaaattgtttg

SEQ ID NO: 1000407 - DNA, 15 bp, Homo sapiens
gaaattaaattgttt

SEQ ID NO: 1000408 - DNA, 15 bp, Homo sapiens
tgaaattaaattgtt

SEQ ID NO: 1000409 - DNA, 15 bp, Homo sapiens
ctgaaattaaattgt

SEQ ID NO: 1000410 - DNA, 15 bp, Homo sapiens
cctgaaattaaattg

SEQ ID NO: 1000411 - DNA, 15 bp, Homo sapiens
tcctgaaattaaatt

SEQ ID NO: 1000412 - DNA, 15 bp, Homo sapiens
ctcctgaaattaaat

SEQ ID NO: 1000413 - DNA, 15 bp, Homo sapiens
gctcctgaaattaaa

SEQ ID NO: 1000414 - DNA, 15 bp, Homo sapiens
ggctcctgaaattaa

SEQ ID NO: 1000415 - DNA, 15 bp, Homo sapiens
aggctcctgaaatta

SEQ ID NO: 1000416 - DNA, 15 bp, Homo sapiens
taggctcctgaaatt

SEQ ID NO: 1000417 - DNA, 15 bp, Homo sapiens
gtaggctcctgaaat

SEQ ID NO: 1000418 - DNA, 15 bp, Homo sapiens
tgtaggctcctgaaa

SEQ ID NO: 1000419 - DNA, 15 bp, Homo sapiens
ttgtaggctcctgaa

SEQ ID NO: 1000420 - DNA, 15 bp, Homo sapiens
cttgtaggctcctga

SEQ ID NO: 1000421 - DNA, 15 bp, Homo sapiens
tcttgtaggctcctg

SEQ ID NO: 1000422 - DNA, 15 bp, Homo sapiens
ttcttgtaggctcct

SEQ ID NO: 1000423 - DNA, 15 bp, Homo sapiens
tttcttgtaggctcc

SEQ ID NO: 1000424 - DNA, 15 bp, Homo sapiens
ctttcttgtaggctc

SEQ ID NO: 1000425 - DNA, 15 bp, Homo sapiens
actttcttgtaggct

SEQ ID NO: 1000426 - DNA, 15 bp, Homo sapiens
tactttcttgtaggc

SEQ ID NO: 1000427 - DNA, 15 bp, Homo sapiens
gtactttcttgtagg

SEQ ID NO: 1000428 - DNA, 15 bp, Homo sapiens
cgtactttcttgtag

SEQ ID NO: 1000429 - DNA, 15 bp, Homo sapiens
tcgtactttcttgta

SEQ ID NO: 1000430 - DNA, 15 bp, Homo sapiens
ctcgtactttcttgt

SEQ ID NO: 1000431 - DNA, 15 bp, Homo sapiens
tctcgtactttcttg

SEQ ID NO: 1000432 - DNA, 15 bp, Homo sapiens
atctcgtactttctt

SEQ ID NO: 1000433 - DNA, 15 bp, Homo sapiens
aatctcgtactttct

SEQ ID NO: 1000434 - DNA, 15 bp, Homo sapiens
aaatctcgtactttc

SEQ ID NO: 1000435 - DNA, 15 bp, Homo sapiens
taaatctcgtacttt

SEQ ID NO: 1000436 - DNA, 15 bp, Homo sapiens
ctaaatctcgtactt

SEQ ID NO: 1000437 - DNA, 15 bp, Homo sapiens
actaaatctcgtact

SEQ ID NO: 1000438 - DNA, 15 bp, Homo sapiens
gactaaatctcgtac

SEQ ID NO: 1000439 - DNA, 15 bp, Homo sapiens
tgactaaatctcgta

SEQ ID NO: 1000440 - DNA, 15 bp, Homo sapiens
ttgactaaatctcgt

SEQ ID NO: 1000441 - DNA, 15 bp, Homo sapiens
gttgactaaatctcg

SEQ ID NO: 1000442 - DNA, 15 bp, Homo sapiens
agttgactaaatctc

SEQ ID NO: 1000443 - DNA, 15 bp, Homo sapiens
aagttgactaaatct

SEQ ID NO: 1000444 - DNA, 15 bp, Homo sapiens
caagttgactaaatc

SEQ ID NO: 1000445 - DNA, 15 bp, Homo sapiens
acaagttgactaaat

SEQ ID NO: 1000446 - DNA, 15 bp, Homo sapiens
tccatgttggctagg

SEQ ID NO: 1000447 - DNA, 15 bp, Homo sapiens
ctccatgttggctag

SEQ ID NO: 1000448 - DNA, 15 bp, Homo sapiens
tctccatgttggcta

SEQ ID NO: 1000449 - DNA, 15 bp, Homo sapiens
ttctccatgttggct

SEQ ID NO: 1000450 - DNA, 15 bp, Homo sapiens
tttctccatgttggc

SEQ ID NO: 1000451 - DNA, 15 bp, Homo sapiens
cagacagagtttctc

SEQ ID NO: 1000452 - DNA, 15 bp, Homo sapiens
acagacagagtttct

SEQ ID NO: 1000453 - DNA, 15 bp, Homo sapiens
tacagacagagtttc

SEQ ID NO: 1000454 - DNA, 15 bp, Homo sapiens
gtacagacagagttt

SEQ ID NO: 1000455 - DNA, 15 bp, Homo sapiens
ggtacagacagagtt

SEQ ID NO: 1000456 - DNA, 15 bp, Homo sapiens
tggtacagacagagt

SEQ ID NO: 1000457 - DNA, 15 bp, Homo sapiens
ttggtacagacagag

SEQ ID NO: 1000458 - DNA, 15 bp, Homo sapiens
tttggtacagacaga

SEQ ID NO: 1000459 - DNA, 15 bp, Homo sapiens
ttttggtacagacag

SEQ ID NO: 1000460 - DNA, 15 bp, Homo sapiens
tttttggtacagaca

SEQ ID NO: 1000461 - DNA, 15 bp, Homo sapiens
ttttttggtacagac

SEQ ID NO: 1000462 - DNA, 15 bp, Homo sapiens
attttttggtacaga

SEQ ID NO: 1000463 - DNA, 15 bp, Homo sapiens
tattttttggtacag

SEQ ID NO: 1000464 - DNA, 15 bp, Homo sapiens
ttattttttggtaca

SEQ ID NO: 1000465 - DNA, 15 bp, Homo sapiens
tttattttttggtac

SEQ ID NO: 1000466 - DNA, 15 bp, Homo sapiens
ttttattttttggta

SEQ ID NO: 1000467 - DNA, 15 bp, Homo sapiens
tttttattttttggt

SEQ ID NO: 1000468 - DNA, 15 bp, Homo sapiens
tatgtgccaccacac

SEQ ID NO: 1000469 - DNA, 15 bp, Homo sapiens
ttatgtgccaccaca

SEQ ID NO: 1000470 - DNA, 15 bp, Homo sapiens
gttatgtgccaccac

SEQ ID NO: 1000471 - DNA, 15 bp, Homo sapiens
agttatgtgccacca

SEQ ID NO: 1000472 - DNA, 15 bp, Homo sapiens
cagttatgtgccacc

SEQ ID NO: 1000473 - DNA, 15 bp, Homo sapiens
acagttatgtgccac

SEQ ID NO: 1000474 - DNA, 15 bp, Homo sapiens
tacagttatgtgcca

SEQ ID NO: 1000475 - DNA, 15 bp, Homo sapiens
ttacagttatgtgcc

SEQ ID NO: 1000476 - DNA, 15 bp, Homo sapiens
attacagttatgtgc

SEQ ID NO: 1000477 - DNA, 15 bp, Homo sapiens
gattacagttatgtg

SEQ ID NO: 1000478 - DNA, 15 bp, Homo sapiens
ggattacagttatgt

SEQ ID NO: 1000479 - DNA, 15 bp, Homo sapiens
gggattacagttatg

SEQ ID NO: 1000480 - DNA, 15 bp, Homo sapiens
tgggattacagttat

SEQ ID NO: 1000481 - DNA, 15 bp, Homo sapiens
ctgggattacagtta

SEQ ID NO: 1000482 - DNA, 15 bp, Homo sapiens
gctgggattacagtt

SEQ ID NO: 1000483 - DNA, 15 bp, Homo sapiens
agctgggattacagt

SEQ ID NO: 1000484 - DNA, 15 bp, Homo sapiens
cgcaacctccacctc

SEQ ID NO: 1000485 - DNA, 15 bp, Homo sapiens
ccgcaacctccacct

SEQ ID NO: 1000486 - DNA, 15 bp, Homo sapiens
accgcaacctccacc

SEQ ID NO: 1000487 - DNA, 15 bp, Homo sapiens
caccgcaacctccac

SEQ ID NO: 1000488 - DNA, 15 bp, Homo sapiens
tcaccgcaacctcca

SEQ ID NO: 1000489 - DNA, 15 bp, Homo sapiens
gcgatctcggttcac

SEQ ID NO: 1000490 - DNA, 15 bp, Homo sapiens
tgcgatctcggttca

SEQ ID NO: 1000491 - DNA, 15 bp, Homo sapiens
gtgcgatctcggttc

SEQ ID NO: 1000492 - DNA, 15 bp, Homo sapiens
ggtgcgatctcggtt

SEQ ID NO: 1000493 - DNA, 15 bp, Homo sapiens
tggtgcgatctcggt

SEQ ID NO: 1000494 - DNA, 15 bp, Homo sapiens
gtgcaatggtgcgat

SEQ ID NO: 1000495 - DNA, 15 bp, Homo sapiens
agtgcaatggtgcga

SEQ ID NO: 1000496 - DNA, 15 bp, Homo sapiens
gagtgcaatggtgcg

SEQ ID NO: 1000497 - DNA, 15 bp, Homo sapiens
atttttgcccaggct

SEQ ID NO: 1000498 - DNA, 15 bp, Homo sapiens
tatttttgcccaggc

SEQ ID NO: 1000499 - DNA, 15 bp, Homo sapiens
ctatttttgcccagg

SEQ ID NO: 1000500 - DNA, 15 bp, Homo sapiens
gctatttttgcccag

SEQ ID NO: 1000501 - DNA, 15 bp, Homo sapiens
cgctatttttgccca

SEQ ID NO: 1000502 - DNA, 15 bp, Homo sapiens
tcgctatttttgccc

SEQ ID NO: 1000503 - DNA, 15 bp, Homo sapiens
ttcgctatttttgcc

SEQ ID NO: 1000504 - DNA, 15 bp, Homo sapiens
tttcgctatttttgc

SEQ ID NO: 1000505 - DNA, 15 bp, Homo sapiens
gtttcgctatttttg

SEQ ID NO: 1000506 - DNA, 15 bp, Homo sapiens
agtttcgctattttt

SEQ ID NO: 1000507 - DNA, 15 bp, Homo sapiens
gagtttcgctatttt

SEQ ID NO: 1000508 - DNA, 15 bp, Homo sapiens
ggagtttcgctattt

SEQ ID NO: 1000509 - DNA, 15 bp, Homo sapiens
tggagtttcgctatt

SEQ ID NO: 1000510 - DNA, 15 bp, Homo sapiens
atggagtttcgctat

SEQ ID NO: 1000511 - DNA, 15 bp, Homo sapiens
gatggagtttcgcta

SEQ ID NO: 1000512 - DNA, 15 bp, Homo sapiens
gctctcttttttttt

SEQ ID NO: 1000513 - DNA, 15 bp, Homo sapiens
tgctctctttttttt

SEQ ID NO: 1000514 - DNA, 15 bp, Homo sapiens
ttgctctcttttttt

SEQ ID NO: 1000515 - DNA, 15 bp, Homo sapiens
tttgctctctttttt

SEQ ID NO: 1000516 - DNA, 15 bp, Homo sapiens
ttttgctctcttttt

SEQ ID NO: 1000517 - DNA, 15 bp, Homo sapiens
cttttgctctctttt

SEQ ID NO: 1000518 - DNA, 15 bp, Homo sapiens
tcttttgctctcttt

SEQ ID NO: 1000519 - DNA, 15 bp, Homo sapiens
ttcttttgctctctt

SEQ ID NO: 1000520 - DNA, 15 bp, Homo sapiens
tttcttttgctctct

SEQ ID NO: 1000521 - DNA, 15 bp, Homo sapiens
ctttcttttgctctc

SEQ ID NO: 1000522 - DNA, 15 bp, Homo sapiens
tctttcttttgctct

SEQ ID NO: 1000523 - DNA, 15 bp, Homo sapiens
ttctttcttttgctc

SEQ ID NO: 1000524 - DNA, 15 bp, Homo sapiens
attctttcttttgct

SEQ ID NO: 1000525 - DNA, 15 bp, Homo sapiens
tattctttcttttgc

SEQ ID NO: 1000526 - DNA, 15 bp, Homo sapiens
atattctttcttttg

SEQ ID NO: 1000527 - DNA, 15 bp, Homo sapiens
gatattctttctttt

SEQ ID NO: 1000528 - DNA, 15 bp, Homo sapiens
agatattctttcttt

SEQ ID NO: 1000529 - DNA, 15 bp, Homo sapiens
cagatattctttctt

SEQ ID NO: 1000530 - DNA, 15 bp, Homo sapiens
ccagatattctttct

SEQ ID NO: 1000531 - DNA, 15 bp, Homo sapiens
accagatattctttc

SEQ ID NO: 1000532 - DNA, 15 bp, Homo sapiens
aaccagatattcttt

SEQ ID NO: 1000533 - DNA, 15 bp, Homo sapiens
aaaccagatattctt

SEQ ID NO: 1000534 - DNA, 15 bp, Homo sapiens
aaaaccagatattct

SEQ ID NO: 1000535 - DNA, 15 bp, Homo sapiens
taaaaccagatattc

SEQ ID NO: 1000536 - DNA, 15 bp, Homo sapiens
ttaaaaccagatatt

SEQ ID NO: 1000537 - DNA, 15 bp, Homo sapiens
tttaaaaccagatat

SEQ ID NO: 1000538 - DNA, 15 bp, Homo sapiens
atttaaaaccagata

SEQ ID NO: 1000539 - DNA, 15 bp, Homo sapiens
tatttaaaaccagat

SEQ ID NO: 1000540 - DNA, 15 bp, Homo sapiens
atatttaaaaccaga

SEQ ID NO: 1000541 - DNA, 15 bp, Homo sapiens
catatttaaaaccag

SEQ ID NO: 1000542 - DNA, 15 bp, Homo sapiens
acatatttaaaacca

SEQ ID NO: 1000543 - DNA, 15 bp, Homo sapiens
cacatatttaaaacc

SEQ ID NO: 1000544 - DNA, 15 bp, Homo sapiens
acacatatttaaaac

SEQ ID NO: 1000545 - DNA, 15 bp, Homo sapiens
tacacatatttaaaa

SEQ ID NO: 1000546 - DNA, 15 bp, Homo sapiens
ttacacatatttaaa

SEQ ID NO: 1000547 - DNA, 15 bp, Homo sapiens
tttacacatatttaa

SEQ ID NO: 1000548 - DNA, 15 bp, Homo sapiens
atttacacatattta

SEQ ID NO: 1000549 - DNA, 15 bp, Homo sapiens
tatttacacatattt

SEQ ID NO: 1000550 - DNA, 15 bp, Homo sapiens
atatttacacatatt

SEQ ID NO: 1000551 - DNA, 15 bp, Homo sapiens
catatttacacatat

SEQ ID NO: 1000552 - DNA, 15 bp, Homo sapiens
acatatttacacata

SEQ ID NO: 1000553 - DNA, 15 bp, Homo sapiens
aacatatttacacat

SEQ ID NO: 1000554 - DNA, 15 bp, Homo sapiens
aaacatatttacaca

SEQ ID NO: 1000555 - DNA, 15 bp, Homo sapiens
aaaacatatttacac

SEQ ID NO: 1000556 - DNA, 15 bp, Homo sapiens
caaaacatatttaca

SEQ ID NO: 1000557 - DNA, 15 bp, Homo sapiens
ccaaaacatatttac

SEQ ID NO: 1000558 - DNA, 15 bp, Homo sapiens
tccaaaacatattta

SEQ ID NO: 1000559 - DNA, 15 bp, Homo sapiens
ttccaaaacatattt

SEQ ID NO: 1000560 - DNA, 15 bp, Homo sapiens
tttccaaaacatatt

SEQ ID NO: 1000561 - DNA, 15 bp, Homo sapiens
ctttccaaaacatat

SEQ ID NO: 1000562 - DNA, 15 bp, Homo sapiens
tctttccaaaacata

SEQ ID NO: 1000563 - DNA, 15 bp, Homo sapiens
atctttccaaaacat

SEQ ID NO: 1000564 - DNA, 15 bp, Homo sapiens
catctttccaaaaca

SEQ ID NO: 1000565 - DNA, 15 bp, Homo sapiens
ccatctttccaaaac

SEQ ID NO: 1000566 - DNA, 15 bp, Homo sapiens
tccatctttccaaaa

SEQ ID NO: 1000567 - DNA, 15 bp, Homo sapiens
ctccatctttccaaa

SEQ ID NO: 1000568 - DNA, 15 bp, Homo sapiens
tctccatctttccaa

SEQ ID NO: 1000569 - DNA, 15 bp, Homo sapiens
ctctccatctttcca

SEQ ID NO: 1000570 - DNA, 15 bp, Homo sapiens
actctccatctttcc

SEQ ID NO: 1000571 - DNA, 15 bp, Homo sapiens
tactctccatctttc

SEQ ID NO: 1000572 - DNA, 15 bp, Homo sapiens
ctactctccatcttt

SEQ ID NO: 1000573 - DNA, 15 bp, Homo sapiens
gctactctccatctt

SEQ ID NO: 1000574 - DNA, 15 bp, Homo sapiens
tgctactctccatct

SEQ ID NO: 1000575 - DNA, 15 bp, Homo sapiens
ttgctactctccatc

SEQ ID NO: 1000576 - DNA, 15 bp, Homo sapiens
attgctactctccat

SEQ ID NO: 1000577 - DNA, 15 bp, Homo sapiens
tattgctactctcca

SEQ ID NO: 1000578 - DNA, 15 bp, Homo sapiens
ttattgctactctcc

SEQ ID NO: 1000579 - DNA, 15 bp, Homo sapiens
cttattgctactctc

SEQ ID NO: 1000580 - DNA, 15 bp, Homo sapiens
tcttattgctactct

SEQ ID NO: 1000581 - DNA, 15 bp, Homo sapiens
ttcttattgctactc

SEQ ID NO: 1000582 - DNA, 15 bp, Homo sapiens
tttcttattgctact

SEQ ID NO: 1000583 - DNA, 15 bp, Homo sapiens
ttttcttattgctac

SEQ ID NO: 1000584 - DNA, 15 bp, Homo sapiens
tttttcttattgcta

SEQ ID NO: 1000585 - DNA, 15 bp, Homo sapiens
ttttttcttattgct

SEQ ID NO: 1000586 - DNA, 15 bp, Homo sapiens
gttttttcttattgc

SEQ ID NO: 1000587 - DNA, 15 bp, Homo sapiens
tgttttttcttattg

SEQ ID NO: 1000588 - DNA, 15 bp, Homo sapiens
atgttttttcttatt

SEQ ID NO: 1000589 - DNA, 15 bp, Homo sapiens
catgttttttcttat

SEQ ID NO: 1000590 - DNA, 15 bp, Homo sapiens
tcatgttttttctta

SEQ ID NO: 1000591 - DNA, 15 bp, Homo sapiens
atcatgttttttctt

SEQ ID NO: 1000592 - DNA, 15 bp, Homo sapiens
catcatgttttttct

SEQ ID NO: 1000593 - DNA, 15 bp, Homo sapiens
ccatcatgttttttc

SEQ ID NO: 1000594 - DNA, 15 bp, Homo sapiens
tccatcatgtttttt

SEQ ID NO: 1000595 - DNA, 15 bp, Homo sapiens
atccatcatgttttt

SEQ ID NO: 1000596 - DNA, 15 bp, Homo sapiens
aatccatcatgtttt

SEQ ID NO: 1000597 - DNA, 15 bp, Homo sapiens
caatccatcatgttt

SEQ ID NO: 1000598 - DNA, 15 bp, Homo sapiens
gcaatccatcatgtt

SEQ ID NO: 1000599 - DNA, 15 bp, Homo sapiens
agcaatccatcatgt

SEQ ID NO: 1000600 - DNA, 15 bp, Homo sapiens
tagcaatccatcatg

SEQ ID NO: 1000601 - DNA, 15 bp, Homo sapiens
gtagcaatccatcat

SEQ ID NO: 1000602 - DNA, 15 bp, Homo sapiens
tgtagcaatccatca

SEQ ID NO: 1000603 - DNA, 15 bp, Homo sapiens
ctgtagcaatccatc

SEQ ID NO: 1000604 - DNA, 15 bp, Homo sapiens
actgtagcaatccat

SEQ ID NO: 1000605 - DNA, 15 bp, Homo sapiens
tactgtagcaatcca

SEQ ID NO: 1000606 - DNA, 15 bp, Homo sapiens
atactgtagcaatcc

SEQ ID NO: 1000607 - DNA, 15 bp, Homo sapiens
aatactgtagcaatc

SEQ ID NO: 1000608 - DNA, 15 bp, Homo sapiens
aaatactgtagcaat

SEQ ID NO: 1000609 - DNA, 15 bp, Homo sapiens
taaatactgtagcaa

SEQ ID NO: 1000610 - DNA, 15 bp, Homo sapiens
ctaaatactgtagca

SEQ ID NO: 1000611 - DNA, 15 bp, Homo sapiens
actaaatactgtagc

SEQ ID NO: 1000612 - DNA, 15 bp, Homo sapiens
aactaaatactgtag

SEQ ID NO: 1000613 - DNA, 15 bp, Homo sapiens
gaactaaatactgta

SEQ ID NO: 1000614 - DNA, 15 bp, Homo sapiens
ggaactaaatactgt

SEQ ID NO: 1000615 - DNA, 15 bp, Homo sapiens
tggaactaaatactg

SEQ ID NO: 1000616 - DNA, 15 bp, Homo sapiens
ttggaactaaatact

SEQ ID NO: 1000617 - DNA, 15 bp, Homo sapiens
cttggaactaaatac

SEQ ID NO: 1000618 - DNA, 15 bp, Homo sapiens
tcttggaactaaata

SEQ ID NO: 1000619 - DNA, 15 bp, Homo sapiens
atcttggaactaaat

SEQ ID NO: 1000620 - DNA, 15 bp, Homo sapiens
tatcttggaactaaa

SEQ ID NO: 1000621 - DNA, 15 bp, Homo sapiens
ttatcttggaactaa

SEQ ID NO: 1000622 - DNA, 15 bp, Homo sapiens
tttatcttggaacta

SEQ ID NO: 1000623 - DNA, 15 bp, Homo sapiens
atttatcttggaact

SEQ ID NO: 1000624 - DNA, 15 bp, Homo sapiens
aatttatcttggaac

SEQ ID NO: 1000625 - DNA, 15 bp, Homo sapiens
caatttatcttggaa

SEQ ID NO: 1000626 - DNA, 15 bp, Homo sapiens
acaatttatcttgga

SEQ ID NO: 1000627 - DNA, 15 bp, Homo sapiens
tacaatttatcttgg

SEQ ID NO: 1000628 - DNA, 15 bp, Homo sapiens
gtacaatttatcttg

SEQ ID NO: 1000629 - DNA, 15 bp, Homo sapiens
agtacaatttatctt

SEQ ID NO: 1000630 - DNA, 15 bp, Homo sapiens
tagtacaatttatct

SEQ ID NO: 1000631 - DNA, 15 bp, Homo sapiens
ctagtacaatttatc

SEQ ID NO: 1000632 - DNA, 15 bp, Homo sapiens
tctagtacaatttat

SEQ ID NO: 1000633 - DNA, 15 bp, Homo sapiens
atctagtacaattta

SEQ ID NO: 1000634 - DNA, 15 bp, Homo sapiens
catctagtacaattt

SEQ ID NO: 1000635 - DNA, 15 bp, Homo sapiens
tcatctagtacaatt

SEQ ID NO: 1000636 - DNA, 15 bp, Homo sapiens
ctcatctagtacaat

SEQ ID NO: 1000637 - DNA, 15 bp, Homo sapiens
cctcatctagtacaa

SEQ ID NO: 1000638 - DNA, 15 bp, Homo sapiens
tcctcatctagtaca

SEQ ID NO: 1000639 - DNA, 15 bp, Homo sapiens
ttcctcatctagtac

SEQ ID NO: 1000640 - DNA, 15 bp, Homo sapiens
cttcctcatctagta

SEQ ID NO: 1000641 - DNA, 15 bp, Homo sapiens
gcttcctcatctagt

SEQ ID NO: 1000642 - DNA, 15 bp, Homo sapiens
ggcttcctcatctag

SEQ ID NO: 1000643 - DNA, 15 bp, Homo sapiens
aggcttcctcatcta

SEQ ID NO: 1000644 - DNA, 15 bp, Homo sapiens
aaggcttcctcatct

SEQ ID NO: 1000645 - DNA, 15 bp, Homo sapiens
aaaggcttcctcatc

SEQ ID NO: 1000646 - DNA, 15 bp, Homo sapiens
aaaaggcttcctcat

SEQ ID NO: 1000647 - DNA, 15 bp, Homo sapiens
taaaaggcttcctca

SEQ ID NO: 1000648 - DNA, 15 bp, Homo sapiens
ttaaaaggcttcctc

SEQ ID NO: 1000649 - DNA, 15 bp, Homo sapiens
cttaaaaggcttcct

SEQ ID NO: 1000650 - DNA, 15 bp, Homo sapiens
tcttaaaaggcttcc

SEQ ID NO: 1000651 - DNA, 15 bp, Homo sapiens
ttcttaaaaggcttc

SEQ ID NO: 1000652 - DNA, 15 bp, Homo sapiens
cttcttaaaaggctt

SEQ ID NO: 1000653 - DNA, 15 bp, Homo sapiens
tcttcttaaaaggct

SEQ ID NO: 1000654 - DNA, 15 bp, Homo sapiens
ctcttcttaaaaggc

SEQ ID NO: 1000655 - DNA, 15 bp, Homo sapiens
gctcttcttaaaagg

SEQ ID NO: 1000656 - DNA, 15 bp, Homo sapiens
agctcttcttaaaag

SEQ ID NO: 1000657 - DNA, 15 bp, Homo sapiens
cagctcttcttaaaa

SEQ ID NO: 1000658 - DNA, 15 bp, Homo sapiens
tcagctcttcttaaa

SEQ ID NO: 1000659 - DNA, 15 bp, Homo sapiens
ttcagctcttcttaa

SEQ ID NO: 1000660 - DNA, 15 bp, Homo sapiens
attcagctcttctta

SEQ ID NO: 1000661 - DNA, 15 bp, Homo sapiens
aattcagctcttctt

SEQ ID NO: 1000662 - DNA, 15 bp, Homo sapiens
caattcagctcttct

SEQ ID NO: 1000663 - DNA, 15 bp, Homo sapiens
gcaattcagctcttc

SEQ ID NO: 1000664 - DNA, 15 bp, Homo sapiens
ggcaattcagctctt

SEQ ID NO: 1000665 - DNA, 15 bp, Homo sapiens
tggcaattcagctct

SEQ ID NO: 1000666 - DNA, 15 bp, Homo sapiens
ctggcaattcagctc

SEQ ID NO: 1000667 - DNA, 15 bp, Homo sapiens
cctggcaattcagct

SEQ ID NO: 1000668 - DNA, 15 bp, Homo sapiens
gcctggcaattcagc

SEQ ID NO: 1000669 - DNA, 15 bp, Homo sapiens
cgcctggcaattcag

SEQ ID NO: 1000670 - DNA, 15 bp, Homo sapiens
gcgcctggcaattca

SEQ ID NO: 1000671 - DNA, 15 bp, Homo sapiens
tgcgcctggcaattc

SEQ ID NO: 1000672 - DNA, 15 bp, Homo sapiens
ctgcgcctggcaatt

SEQ ID NO: 1000673 - DNA, 15 bp, Homo sapiens
actgcgcctggcaat

SEQ ID NO: 1000674 - DNA, 15 bp, Homo sapiens
cactgcgcctggcaa

SEQ ID NO: 1000675 - DNA, 15 bp, Homo sapiens
ccactgcgcctggca

SEQ ID NO: 1000676 - DNA, 15 bp, Homo sapiens
ggtcttgaactcccg

SEQ ID NO: 1000677 - DNA, 15 bp, Homo sapiens
tggtcttgaactccc

SEQ ID NO: 1000678 - DNA, 15 bp, Homo sapiens
tttttttttttagta

SEQ ID NO: 1000679 - DNA, 15 bp, Homo sapiens
ttttttttttttagt

SEQ ID NO: 1000680 - DNA, 15 bp, Homo sapiens
ggctaattttttttt

SEQ ID NO: 1000681 - DNA, 15 bp, Homo sapiens
cggctaatttttttt

SEQ ID NO: 1000682 - DNA, 15 bp, Homo sapiens
ccccggctaattttt

SEQ ID NO: 1000683 - DNA, 15 bp, Homo sapiens
accccggctaatttt

SEQ ID NO: 1000684 - DNA, 15 bp, Homo sapiens
caccccggctaattt

SEQ ID NO: 1000685 - DNA, 15 bp, Homo sapiens
ccaccccggctaatt

SEQ ID NO: 1000686 - DNA, 15 bp, Homo sapiens
accaccccggctaat

SEQ ID NO: 1000687 - DNA, 15 bp, Homo sapiens
caccaccccggctaa

SEQ ID NO: 1000688 - DNA, 15 bp, Homo sapiens
ccaccaccccggcta

SEQ ID NO: 1000689 - DNA, 15 bp, Homo sapiens
gccaccaccccggct

SEQ ID NO: 1000690 - DNA, 15 bp, Homo sapiens
agccaccaccccggc

SEQ ID NO: 1000691 - DNA, 15 bp, Homo sapiens
aagccaccaccccgg

SEQ ID NO: 1000692 - DNA, 15 bp, Homo sapiens
taagccaccaccccg

SEQ ID NO: 1000693 - DNA, 15 bp, Homo sapiens
ataagccaccacccc

SEQ ID NO: 1000694 - DNA, 15 bp, Homo sapiens
cataagccaccaccc

SEQ ID NO: 1000695 - DNA, 15 bp, Homo sapiens
gcataagccaccacc

SEQ ID NO: 1000696 - DNA, 15 bp, Homo sapiens
ggcataagccaccac

SEQ ID NO: 1000697 - DNA, 15 bp, Homo sapiens
aggcataagccacca

SEQ ID NO: 1000698 - DNA, 15 bp, Homo sapiens
tgcgatcttggctca

SEQ ID NO: 1000699 - DNA, 15 bp, Homo sapiens
gtgcgatcttggctc

SEQ ID NO: 1000700 - DNA, 15 bp, Homo sapiens
atggtgcgatcttgg

SEQ ID NO: 1000701 - DNA, 15 bp, Homo sapiens
aatggtgcgatcttg

SEQ ID NO: 1000702 - DNA, 15 bp, Homo sapiens
caatggtgcgatctt

SEQ ID NO: 1000703 - DNA, 15 bp, Homo sapiens
actcttgttgcctag

SEQ ID NO: 1000704 - DNA, 15 bp, Homo sapiens
cactcttgttgccta

SEQ ID NO: 1000705 - DNA, 15 bp, Homo sapiens
tcactcttgttgcct

SEQ ID NO: 1000706 - DNA, 15 bp, Homo sapiens
gctcttttttttttt

SEQ ID NO: 1000707 - DNA, 15 bp, Homo sapiens
agctctttttttttt

SEQ ID NO: 1000708 - DNA, 15 bp, Homo sapiens
cagctcttttttttt

SEQ ID NO: 1000709 - DNA, 15 bp, Homo sapiens
tcagctctttttttt

SEQ ID NO: 1000710 - DNA, 15 bp, Homo sapiens
ttcagctcttttttt

SEQ ID NO: 1000711 - DNA, 15 bp, Homo sapiens
attcagctctttttt

SEQ ID NO: 1000712 - DNA, 15 bp, Homo sapiens
gattcagctcttttt

SEQ ID NO: 1000713 - DNA, 15 bp, Homo sapiens
agattcagctctttt

SEQ ID NO: 1000714 - DNA, 15 bp, Homo sapiens
aagattcagctcttt

SEQ ID NO: 1000715 - DNA, 15 bp, Homo sapiens
caagattcagctctt

SEQ ID NO: 1000716 - DNA, 15 bp, Homo sapiens
ccaagattcagctct

SEQ ID NO: 1000717 - DNA, 15 bp, Homo sapiens
gccaagattcagctc

SEQ ID NO: 1000718 - DNA, 15 bp, Homo sapiens
agccaagattcagct

SEQ ID NO: 1000719 - DNA, 15 bp, Homo sapiens
cagccaagattcagc

SEQ ID NO: 1000720 - DNA, 15 bp, Homo sapiens
ccagccaagattcag

SEQ ID NO: 1000721 - DNA, 15 bp, Homo sapiens
cccagccaagattca

SEQ ID NO: 1000722 - DNA, 15 bp, Homo sapiens
gcccagccaagattc

SEQ ID NO: 1000723 - DNA, 15 bp, Homo sapiens
tgcccagccaagatt

SEQ ID NO: 1000724 - DNA, 15 bp, Homo sapiens
ctgcccagccaagat

SEQ ID NO: 1000725 - DNA, 15 bp, Homo sapiens
cctgcccagccaaga

SEQ ID NO: 1000726 - DNA, 15 bp, Homo sapiens
tcctgcccagccaag

SEQ ID NO: 1000727 - DNA, 15 bp, Homo sapiens
atcctgcccagccaa

SEQ ID NO: 1000728 - DNA, 15 bp, Homo sapiens
catcctgcccagcca

SEQ ID NO: 1000729 - DNA, 15 bp, Homo sapiens
ccatcctgcccagcc

SEQ ID NO: 1000730 - DNA, 15 bp, Homo sapiens
gccatcctgcccagc

SEQ ID NO: 1000731 - DNA, 15 bp, Homo sapiens
agccatcctgcccag

SEQ ID NO: 1000732 - DNA, 15 bp, Homo sapiens
gagccatcctgccca

SEQ ID NO: 1000733 - DNA, 15 bp, Homo sapiens
cgagccatcctgccc

SEQ ID NO: 1000734 - DNA, 15 bp, Homo sapiens
acgagccatcctgcc

SEQ ID NO: 1000735 - DNA, 15 bp, Homo sapiens
cacgagccatcctgc

SEQ ID NO: 1000736 - DNA, 15 bp, Homo sapiens
gcacgagccatcctg

SEQ ID NO: 1000737 - DNA, 15 bp, Homo sapiens
ggcacgagccatcct

SEQ ID NO: 1000738 - DNA, 15 bp, Homo sapiens
aggcacgagccatcc

SEQ ID NO: 1000739 - DNA, 15 bp, Homo sapiens
caggcacgagccatc

SEQ ID NO: 1000740 - DNA, 15 bp, Homo sapiens
acaggcacgagccat

SEQ ID NO: 1000741 - DNA, 15 bp, Homo sapiens
tacaggcacgagcca

SEQ ID NO: 1000742 - DNA, 15 bp, Homo sapiens
ttacaggcacgagcc

SEQ ID NO: 1000743 - DNA, 15 bp, Homo sapiens
attacaggcacgagc

SEQ ID NO: 1000744 - DNA, 15 bp, Homo sapiens
gattacaggcacgag

SEQ ID NO: 1000745 - DNA, 15 bp, Homo sapiens
ggattacaggcacga

SEQ ID NO: 1000746 - DNA, 15 bp, Homo sapiens
aggattacaggcacg

SEQ ID NO: 1000747 - DNA, 15 bp, Homo sapiens
taggattacaggcac

SEQ ID NO: 1000748 - DNA, 15 bp, Homo sapiens
ttaggattacaggca

SEQ ID NO: 1000749 - DNA, 15 bp, Homo sapiens
gttaggattacaggc

SEQ ID NO: 1000750 - DNA, 15 bp, Homo sapiens
cgttaggattacagg

SEQ ID NO: 1000751 - DNA, 15 bp, Homo sapiens
gcgttaggattacag

SEQ ID NO: 1000752 - DNA, 15 bp, Homo sapiens
agcgttaggattaca

SEQ ID NO: 1000753 - DNA, 15 bp, Homo sapiens
aagcgttaggattac

SEQ ID NO: 1000754 - DNA, 15 bp, Homo sapiens
aaagcgttaggatta

SEQ ID NO: 1000755 - DNA, 15 bp, Homo sapiens
caaagcgttaggatt

SEQ ID NO: 1000756 - DNA, 15 bp, Homo sapiens
ccaaagcgttaggat

SEQ ID NO: 1000757 - DNA, 15 bp, Homo sapiens
tccaaagcgttagga

SEQ ID NO: 1000758 - DNA, 15 bp, Homo sapiens
ttccaaagcgttagg

SEQ ID NO: 1000759 - DNA, 15 bp, Homo sapiens
cttccaaagcgttag

SEQ ID NO: 1000760 - DNA, 15 bp, Homo sapiens
tcttccaaagcgtta

SEQ ID NO: 1000761 - DNA, 15 bp, Homo sapiens
gtcttccaaagcgtt

SEQ ID NO: 1000762 - DNA, 15 bp, Homo sapiens
ggtcttccaaagcgt

SEQ ID NO: 1000763 - DNA, 15 bp, Homo sapiens
cggtcttccaaagcg

SEQ ID NO: 1000764 - DNA, 15 bp, Homo sapiens
tcggtcttccaaagc

SEQ ID NO: 1000765 - DNA, 15 bp, Homo sapiens
ctcggtcttccaaag

SEQ ID NO: 1000766 - DNA, 15 bp, Homo sapiens
cctcggtcttccaaa

SEQ ID NO: 1000767 - DNA, 15 bp, Homo sapiens
gcctcggtcttccaa

SEQ ID NO: 1000768 - DNA, 15 bp, Homo sapiens
tgcctcggtcttcca

SEQ ID NO: 1000769 - DNA, 15 bp, Homo sapiens
ctgcctcggtcttcc

SEQ ID NO: 1000770 - DNA, 15 bp, Homo sapiens
tctgcctcggtcttc

SEQ ID NO: 1000771 - DNA, 15 bp, Homo sapiens
ttctgcctcggtctt

SEQ ID NO: 1000772 - DNA, 15 bp, Homo sapiens
cttctgcctcggtct

SEQ ID NO: 1000773 - DNA, 15 bp, Homo sapiens
ccttctgcctcggtc

SEQ ID NO: 1000774 - DNA, 15 bp, Homo sapiens
tccttctgcctcggt

SEQ ID NO: 1000775 - DNA, 15 bp, Homo sapiens
atccttctgcctcgg

SEQ ID NO: 1000776 - DNA, 15 bp, Homo sapiens
aatccttctgcctcg

SEQ ID NO: 1000777 - DNA, 15 bp, Homo sapiens
caatccttctgcctc

SEQ ID NO: 1000778 - DNA, 15 bp, Homo sapiens
ccaatccttctgcct

SEQ ID NO: 1000779 - DNA, 15 bp, Homo sapiens
accaatccttctgcc

SEQ ID NO: 1000780 - DNA, 15 bp, Homo sapiens
aaccaatccttctgc

SEQ ID NO: 1000781 - DNA, 15 bp, Homo sapiens
caaccaatccttctg

SEQ ID NO: 1000782 - DNA, 15 bp, Homo sapiens
tcaaccaatccttct

SEQ ID NO: 1000783 - DNA, 15 bp, Homo sapiens
ctcaaccaatccttc

SEQ ID NO: 1000784 - DNA, 15 bp, Homo sapiens
actcaaccaatcctt

SEQ ID NO: 1000785 - DNA, 15 bp, Homo sapiens
gactcaaccaatcct

SEQ ID NO: 1000786 - DNA, 15 bp, Homo sapiens
ggactcaaccaatcc

SEQ ID NO: 1000787 - DNA, 15 bp, Homo sapiens
tggactcaaccaatc

SEQ ID NO: 1000788 - DNA, 15 bp, Homo sapiens
gtggactcaaccaat

SEQ ID NO: 1000789 - DNA, 15 bp, Homo sapiens
cgtggactcaaccaa

SEQ ID NO: 1000790 - DNA, 15 bp, Homo sapiens
tcgtggactcaacca

SEQ ID NO: 1000791 - DNA, 15 bp, Homo sapiens
ctcgtggactcaacc

SEQ ID NO: 1000792 - DNA, 15 bp, Homo sapiens
actcgtggactcaac

SEQ ID NO: 1000793 - DNA, 15 bp, Homo sapiens
aactcgtggactcaa

SEQ ID NO: 1000794 - DNA, 15 bp, Homo sapiens
aaactcgtggactca

SEQ ID NO: 1000795 - DNA, 15 bp, Homo sapiens
taaactcgtggactc

SEQ ID NO: 1000796 - DNA, 15 bp, Homo sapiens
ttaaactcgtggact

SEQ ID NO: 1000797 - DNA, 15 bp, Homo sapiens
cttaaactcgtggac

SEQ ID NO: 1000798 - DNA, 15 bp, Homo sapiens
tcttaaactcgtgga

SEQ ID NO: 1000799 - DNA, 15 bp, Homo sapiens
gtcttaaactcgtgg

SEQ ID NO: 1000800 - DNA, 15 bp, Homo sapiens
cctatgttggccagg

SEQ ID NO: 1000801 - DNA, 15 bp, Homo sapiens
ccctatgttggccag

SEQ ID NO: 1000802 - DNA, 15 bp, Homo sapiens
cccctatgttggcca

SEQ ID NO: 1000803 - DNA, 15 bp, Homo sapiens
tcccctatgttggcc

SEQ ID NO: 1000804 - DNA, 15 bp, Homo sapiens
ttcccctatgttggc

SEQ ID NO: 1000805 - DNA, 15 bp, Homo sapiens
gttcccctatgttgg

SEQ ID NO: 1000806 - DNA, 15 bp, Homo sapiens
ggttcccctatgttg

SEQ ID NO: 1000807 - DNA, 15 bp, Homo sapiens
gggttcccctatgtt

SEQ ID NO: 1000808 - DNA, 15 bp, Homo sapiens
agggttcccctatgt

SEQ ID NO: 1000809 - DNA, 15 bp, Homo sapiens
cagggttcccctatg

SEQ ID NO: 1000810 - DNA, 15 bp, Homo sapiens
acagggttcccctat

SEQ ID NO: 1000811 - DNA, 15 bp, Homo sapiens
gacagggttccccta

SEQ ID NO: 1000812 - DNA, 15 bp, Homo sapiens
agacagggttcccct

SEQ ID NO: 1000813 - DNA, 15 bp, Homo sapiens
gagacagggttcccc

SEQ ID NO: 1000814 - DNA, 15 bp, Homo sapiens
agagacagggttccc

SEQ ID NO: 1000815 - DNA, 15 bp, Homo sapiens
tagagacagggttcc

SEQ ID NO: 1000816 - DNA, 15 bp, Homo sapiens
atagagacagggttc

SEQ ID NO: 1000817 - DNA, 15 bp, Homo sapiens
aatagagacagggtt

SEQ ID NO: 1000818 - DNA, 15 bp, Homo sapiens
aaatagagacagggt

SEQ ID NO: 1000819 - DNA, 15 bp, Homo sapiens
aaaatagagacaggg

SEQ ID NO: 1000820 - DNA, 15 bp, Homo sapiens
aaaaatagagacagg

SEQ ID NO: 1000821 - DNA, 15 bp, Homo sapiens
taaaaatagagacag

SEQ ID NO: 1000822 - DNA, 15 bp, Homo sapiens
ttaaaaatagagaca

SEQ ID NO: 1000823 - DNA, 15 bp, Homo sapiens
tttaaaaatagagac

SEQ ID NO: 1000824 - DNA, 15 bp, Homo sapiens
tattttaaaaataga

SEQ ID NO: 1000825 - DNA, 15 bp, Homo sapiens
ttattttaaaaatag

SEQ ID NO: 1000826 - DNA, 15 bp, Homo sapiens
attattttaaaaata

SEQ ID NO: 1000827 - DNA, 15 bp, Homo sapiens
tattattttaaaaat

SEQ ID NO: 1000828 - DNA, 15 bp, Homo sapiens
ttattattttaaaaa

SEQ ID NO: 1000829 - DNA, 15 bp, Homo sapiens
attattattttaaaa

SEQ ID NO: 1000830 - DNA, 15 bp, Homo sapiens
tattattattttaaa

SEQ ID NO: 1000831 - DNA, 15 bp, Homo sapiens
gtattattattttaa

SEQ ID NO: 1000832 - DNA, 15 bp, Homo sapiens
tgtattattatttta

SEQ ID NO: 1000833 - DNA, 15 bp, Homo sapiens
atgtattattatttt

SEQ ID NO: 1000834 - DNA, 15 bp, Homo sapiens
aatgtattattattt

SEQ ID NO: 1000835 - DNA, 15 bp, Homo sapiens
aaatgtattattatt

SEQ ID NO: 1000836 - DNA, 15 bp, Homo sapiens
aaaatgtattattat

SEQ ID NO: 1000837 - DNA, 15 bp, Homo sapiens
aaaaatgtattatta

SEQ ID NO: 1000838 - DNA, 15 bp, Homo sapiens
caaaaatgtattatt

SEQ ID NO: 1000839 - DNA, 15 bp, Homo sapiens
ccaaaaatgtattat

SEQ ID NO: 1000840 - DNA, 15 bp, Homo sapiens
gccaaaaatgtatta

SEQ ID NO: 1000841 - DNA, 15 bp, Homo sapiens
ggccaaaaatgtatt

SEQ ID NO: 1000842 - DNA, 15 bp, Homo sapiens
cggccaaaaatgtat

SEQ ID NO: 1000843 - DNA, 15 bp, Homo sapiens
ccggccaaaaatgta

SEQ ID NO: 1000844 - DNA, 15 bp, Homo sapiens
accggccaaaaatgt

SEQ ID NO: 1000845 - DNA, 15 bp, Homo sapiens
caccggccaaaaatg

SEQ ID NO: 1000846 - DNA, 15 bp, Homo sapiens
gcaccggccaaaaat

SEQ ID NO: 1000847 - DNA, 15 bp, Homo sapiens
cgcaccggccaaaaa

SEQ ID NO: 1000848 - DNA, 15 bp, Homo sapiens
ccgcaccggccaaaa

SEQ ID NO: 1000849 - DNA, 15 bp, Homo sapiens
accgcaccggccaaa

SEQ ID NO: 1000850 - DNA, 15 bp, Homo sapiens
caccgcaccggccaa

SEQ ID NO: 1000851 - DNA, 15 bp, Homo sapiens
ccaccgcaccggcca

SEQ ID NO: 1000852 - DNA, 15 bp, Homo sapiens
gccaccgcaccggcc

SEQ ID NO: 1000853 - DNA, 15 bp, Homo sapiens
agccaccgcaccggc

SEQ ID NO: 1000854 - DNA, 15 bp, Homo sapiens
gagccaccgcaccgg

SEQ ID NO: 1000855 - DNA, 15 bp, Homo sapiens
tgagccaccgcaccg

SEQ ID NO: 1000856 - DNA, 15 bp, Homo sapiens
attgggattacaggc

SEQ ID NO: 1000857 - DNA, 15 bp, Homo sapiens
tattgggattacagg

SEQ ID NO: 1000858 - DNA, 15 bp, Homo sapiens
gtattgggattacag

SEQ ID NO: 1000859 - DNA, 15 bp, Homo sapiens
agtattgggattaca

SEQ ID NO: 1000860 - DNA, 15 bp, Homo sapiens
aagtattgggattac

SEQ ID NO: 1000861 - DNA, 15 bp, Homo sapiens
aaagtattgggatta

SEQ ID NO: 1000862 - DNA, 15 bp, Homo sapiens
caaagtattgggatt

SEQ ID NO: 1000863 - DNA, 15 bp, Homo sapiens
ccaaagtattgggat

SEQ ID NO: 1000864 - DNA, 15 bp, Homo sapiens
cccaaagtattggga

SEQ ID NO: 1000865 - DNA, 15 bp, Homo sapiens
tcccaaagtattggg

SEQ ID NO: 1000866 - DNA, 15 bp, Homo sapiens
ctcccaaagtattgg

SEQ ID NO: 1000867 - DNA, 15 bp, Homo sapiens
cctcccaaagtattg

SEQ ID NO: 1000868 - DNA, 15 bp, Homo sapiens
gcctcccaaagtatt

SEQ ID NO: 1000869 - DNA, 15 bp, Homo sapiens
agcctcccaaagtat

SEQ ID NO: 1000870 - DNA, 15 bp, Homo sapiens
tacctgcctcagcct

SEQ ID NO: 1000871 - DNA, 15 bp, Homo sapiens
ctacctgcctcagcc

SEQ ID NO: 1000872 - DNA, 15 bp, Homo sapiens
tctacctgcctcagc

SEQ ID NO: 1000873 - DNA, 15 bp, Homo sapiens
atctacctgcctcag

SEQ ID NO: 1000874 - DNA, 15 bp, Homo sapiens
gatctacctgcctca

SEQ ID NO: 1000875 - DNA, 15 bp, Homo sapiens
tgatctacctgcctc

SEQ ID NO: 1000876 - DNA, 15 bp, Homo sapiens
gtgatctacctgcct

SEQ ID NO: 1000877 - DNA, 15 bp, Homo sapiens
ggtgatctacctgcc

SEQ ID NO: 1000878 - DNA, 15 bp, Homo sapiens
aggtgatctacctgc

SEQ ID NO: 1000879 - DNA, 15 bp, Homo sapiens
caggtgatctacctg

SEQ ID NO: 1000880 - DNA, 15 bp, Homo sapiens
tcaggtgatctacct

SEQ ID NO: 1000881 - DNA, 15 bp, Homo sapiens
ctcaggtgatctacc

SEQ ID NO: 1000882 - DNA, 15 bp, Homo sapiens
cctcaggtgatctac

SEQ ID NO: 1000883 - DNA, 15 bp, Homo sapiens
acctcaggtgatcta

SEQ ID NO: 1000884 - DNA, 15 bp, Homo sapiens
ctctgacctcaggtg

SEQ ID NO: 1000885 - DNA, 15 bp, Homo sapiens
actctgacctcaggt

SEQ ID NO: 1000886 - DNA, 15 bp, Homo sapiens
aactctgacctcagg

SEQ ID NO: 1000887 - DNA, 15 bp, Homo sapiens
gaactctgacctcag

SEQ ID NO: 1000888 - DNA, 15 bp, Homo sapiens
cgaactctgacctca

SEQ ID NO: 1000889 - DNA, 15 bp, Homo sapiens
tcgaactctgacctc

SEQ ID NO: 1000890 - DNA, 15 bp, Homo sapiens
ctcgaactctgacct

SEQ ID NO: 1000891 - DNA, 15 bp, Homo sapiens
tctcgaactctgacc

SEQ ID NO: 1000892 - DNA, 15 bp, Homo sapiens
gtctcgaactctgac

SEQ ID NO: 1000893 - DNA, 15 bp, Homo sapiens
ggtctcgaactctga

SEQ ID NO: 1000894 - DNA, 15 bp, Homo sapiens
tggtctcgaactctg

SEQ ID NO: 1000895 - DNA, 15 bp, Homo sapiens
tccaggctggtctcg

SEQ ID NO: 1000896 - DNA, 15 bp, Homo sapiens
atccaggctggtctc

SEQ ID NO: 1000897 - DNA, 15 bp, Homo sapiens
tatccaggctggtct

SEQ ID NO: 1000898 - DNA, 15 bp, Homo sapiens
ttatccaggctggtc

SEQ ID NO: 1000899 - DNA, 15 bp, Homo sapiens
gttatccaggctggt

SEQ ID NO: 1000900 - DNA, 15 bp, Homo sapiens
ggttatccaggctgg

SEQ ID NO: 1000901 - DNA, 15 bp, Homo sapiens
aggttatccaggctg

SEQ ID NO: 1000902 - DNA, 15 bp, Homo sapiens
caggttatccaggct

SEQ ID NO: 1000903 - DNA, 15 bp, Homo sapiens
ccaggttatccaggc

SEQ ID NO: 1000904 - DNA, 15 bp, Homo sapiens
accaggttatccagg

SEQ ID NO: 1000905 - DNA, 15 bp, Homo sapiens
caccaggttatccag

SEQ ID NO: 1000906 - DNA, 15 bp, Homo sapiens
tcaccaggttatcca

SEQ ID NO: 1000907 - DNA, 15 bp, Homo sapiens
ttcaccaggttatcc

SEQ ID NO: 1000908 - DNA, 15 bp, Homo sapiens
tttcaccaggttatc

SEQ ID NO: 1000909 - DNA, 15 bp, Homo sapiens
gtttcaccaggttat

SEQ ID NO: 1000910 - DNA, 15 bp, Homo sapiens
ggtttcaccaggtta

SEQ ID NO: 1000911 - DNA, 15 bp, Homo sapiens
ggggtttcaccaggt

SEQ ID NO: 1000912 - DNA, 15 bp, Homo sapiens
aggggtttcaccagg

SEQ ID NO: 1000913 - DNA, 15 bp, Homo sapiens
gaggggtttcaccag

SEQ ID NO: 1000914 - DNA, 15 bp, Homo sapiens
agaggggtttcacca

SEQ ID NO: 1000915 - DNA, 15 bp, Homo sapiens
aagaggggtttcacc

SEQ ID NO: 1000916 - DNA, 15 bp, Homo sapiens
aaagaggggtttcac

SEQ ID NO: 1000917 - DNA, 15 bp, Homo sapiens
taaagaggggtttca

SEQ ID NO: 1000918 - DNA, 15 bp, Homo sapiens
gtaaagaggggtttc

SEQ ID NO: 1000919 - DNA, 15 bp, Homo sapiens
agtaaagaggggttt

SEQ ID NO: 1000920 - DNA, 15 bp, Homo sapiens
tagtaaagaggggtt

SEQ ID NO: 1000921 - DNA, 15 bp, Homo sapiens
ttagtaaagaggggt

SEQ ID NO: 1000922 - DNA, 15 bp, Homo sapiens
tttagtaaagagggg

SEQ ID NO: 1000923 - DNA, 15 bp, Homo sapiens
ttttagtaaagaggg

SEQ ID NO: 1000924 - DNA, 15 bp, Homo sapiens
tttttagtaaagagg

SEQ ID NO: 1000925 - DNA, 15 bp, Homo sapiens
atttttagtaaagag

SEQ ID NO: 1000926 - DNA, 15 bp, Homo sapiens
tttttttttgtattt

SEQ ID NO: 1000927 - DNA, 15 bp, Homo sapiens
taccacacccagcta

SEQ ID NO: 1000928 - DNA, 15 bp, Homo sapiens
ctaccacacccagct

SEQ ID NO: 1000929 - DNA, 15 bp, Homo sapiens
gctaccacacccagc

SEQ ID NO: 1000930 - DNA, 15 bp, Homo sapiens
tgctaccacacccag

SEQ ID NO: 1000931 - DNA, 15 bp, Homo sapiens
gtgctaccacaccca

SEQ ID NO: 1000932 - DNA, 15 bp, Homo sapiens
tgtgctaccacaccc

SEQ ID NO: 1000933 - DNA, 15 bp, Homo sapiens
atgtgctaccacacc

SEQ ID NO: 1000934 - DNA, 15 bp, Homo sapiens
catgtgctaccacac

SEQ ID NO: 1000935 - DNA, 15 bp, Homo sapiens
gcatgtgctaccaca

SEQ ID NO: 1000936 - DNA, 15 bp, Homo sapiens
agcatgtgctaccac

SEQ ID NO: 1000937 - DNA, 15 bp, Homo sapiens
aagcatgtgctacca

SEQ ID NO: 1000938 - DNA, 15 bp, Homo sapiens
caagcatgtgctacc

SEQ ID NO: 1000939 - DNA, 15 bp, Homo sapiens
acaagcatgtgctac

SEQ ID NO: 1000940 - DNA, 15 bp, Homo sapiens
tacaagcatgtgcta

SEQ ID NO: 1000941 - DNA, 15 bp, Homo sapiens
ttacaagcatgtgct

SEQ ID NO: 1000942 - DNA, 15 bp, Homo sapiens
tggttcaagcgattc

SEQ ID NO: 1000943 - DNA, 15 bp, Homo sapiens
ctggttcaagcgatt

SEQ ID NO: 1000944 - DNA, 15 bp, Homo sapiens
cctggttcaagcgat

SEQ ID NO: 1000945 - DNA, 15 bp, Homo sapiens
ccctggttcaagcga

SEQ ID NO: 1000946 - DNA, 15 bp, Homo sapiens
tccctggttcaagcg

SEQ ID NO: 1000947 - DNA, 15 bp, Homo sapiens
ctccctggttcaagc

SEQ ID NO: 1000948 - DNA, 15 bp, Homo sapiens
cctccctggttcaag

SEQ ID NO: 1000949 - DNA, 15 bp, Homo sapiens
gcctccctggttcaa

SEQ ID NO: 1000950 - DNA, 15 bp, Homo sapiens
cgcctccctggttca

SEQ ID NO: 1000951 - DNA, 15 bp, Homo sapiens
ccgcctccctggttc

SEQ ID NO: 1000952 - DNA, 15 bp, Homo sapiens
tccgcctccctggtt

SEQ ID NO: 1000953 - DNA, 15 bp, Homo sapiens
ctccgcctccctggt

SEQ ID NO: 1000954 - DNA, 15 bp, Homo sapiens
cctccgcctccctgg

SEQ ID NO: 1000955 - DNA, 15 bp, Homo sapiens
acctccgcctccctg

SEQ ID NO: 1000956 - DNA, 15 bp, Homo sapiens
aacctccgcctccct

SEQ ID NO: 1000957 - DNA, 15 bp, Homo sapiens
taacctccgcctccc

SEQ ID NO: 1000958 - DNA, 15 bp, Homo sapiens
ttgtaacctccgcct

SEQ ID NO: 1000959 - DNA, 15 bp, Homo sapiens
attgtaacctccgcc

SEQ ID NO: 1000960 - DNA, 15 bp, Homo sapiens
cattgtaacctccgc

SEQ ID NO: 1000961 - DNA, 15 bp, Homo sapiens
tcattgtaacctccg

SEQ ID NO: 1000962 - DNA, 15 bp, Homo sapiens
ctcattgtaacctcc

SEQ ID NO: 1000963 - DNA, 15 bp, Homo sapiens
gctcattgtaacctc

SEQ ID NO: 1000964 - DNA, 15 bp, Homo sapiens
ggctcattgtaacct

SEQ ID NO: 1000965 - DNA, 15 bp, Homo sapiens
tggctcattgtaacc

SEQ ID NO: 1000966 - DNA, 15 bp, Homo sapiens
ttggctcattgtaac

SEQ ID NO: 1000967 - DNA, 15 bp, Homo sapiens
gttggctcattgtaa

SEQ ID NO: 1000968 - DNA, 15 bp, Homo sapiens
tgttggctcattgta

SEQ ID NO: 1000969 - DNA, 15 bp, Homo sapiens
gtgttggctcattgt

SEQ ID NO: 1000970 - DNA, 15 bp, Homo sapiens
agtgttggctcattg

SEQ ID NO: 1000971 - DNA, 15 bp, Homo sapiens
tagtgttggctcatt

SEQ ID NO: 1000972 - DNA, 15 bp, Homo sapiens
gtagtgttggctcat

SEQ ID NO: 1000973 - DNA, 15 bp, Homo sapiens
tgtagtgttggctca

SEQ ID NO: 1000974 - DNA, 15 bp, Homo sapiens
gtgtagtgttggctc

SEQ ID NO: 1000975 - DNA, 15 bp, Homo sapiens
ggtgtagtgttggct

SEQ ID NO: 1000976 - DNA, 15 bp, Homo sapiens
tggtgtagtgttggc

SEQ ID NO: 1000977 - DNA, 15 bp, Homo sapiens
gtggtgtagtgttgg

SEQ ID NO: 1000978 - DNA, 15 bp, Homo sapiens
agtggtgtagtgttg

SEQ ID NO: 1000979 - DNA, 15 bp, Homo sapiens
cagtggtgtagtgtt

SEQ ID NO: 1000980 - DNA, 15 bp, Homo sapiens
gcagtggtgtagtgt

SEQ ID NO: 1000981 - DNA, 15 bp, Homo sapiens
tgcagtggtgtagtg

SEQ ID NO: 1000982 - DNA, 15 bp, Homo sapiens
gtgcagtggtgtagt

SEQ ID NO: 1000983 - DNA, 15 bp, Homo sapiens
agtgcagtggtgtag

SEQ ID NO: 1000984 - DNA, 15 bp, Homo sapiens
gagtgcagtggtgta

SEQ ID NO: 1000985 - DNA, 15 bp, Homo sapiens
ctcactctattgccc

SEQ ID NO: 1000986 - DNA, 15 bp, Homo sapiens
tctcactctattgcc

SEQ ID NO: 1000987 - DNA, 15 bp, Homo sapiens
gtctcactctattgc

SEQ ID NO: 1000988 - DNA, 15 bp, Homo sapiens
agtctcactctattg

SEQ ID NO: 1000989 - DNA, 15 bp, Homo sapiens
cagtctcactctatt

SEQ ID NO: 1000990 - DNA, 15 bp, Homo sapiens
gcagtctcactctat

SEQ ID NO: 1000991 - DNA, 15 bp, Homo sapiens
tgcagtctcactcta

SEQ ID NO: 1000992 - DNA, 15 bp, Homo sapiens
atgcagtctcactct

SEQ ID NO: 1000993 - DNA, 15 bp, Homo sapiens
gatgcagtctcactc

SEQ ID NO: 1000994 - DNA, 15 bp, Homo sapiens
agatgcagtctcact

SEQ ID NO: 1000995 - DNA, 15 bp, Homo sapiens
gagatgcagtctcac

SEQ ID NO: 1000996 - DNA, 15 bp, Homo sapiens
tgagatgcagtctca

SEQ ID NO: 1000997 - DNA, 15 bp, Homo sapiens
ttgagatgcagtctc

SEQ ID NO: 1000998 - DNA, 15 bp, Homo sapiens
tttgagatgcagtct

SEQ ID NO: 1000999 - DNA, 15 bp, Homo sapiens
ttttgagatgcagtc

SEQ ID NO: 1001000 - DNA, 15 bp, Homo sapiens
tttttgagatgcagt

SEQ ID NO: 1001001 - DNA, 15 bp, Homo sapiens
ttttttgagatgcag

SEQ ID NO: 1001002 - DNA, 15 bp, Homo sapiens
tttttttgagatgca

SEQ ID NO: 1001003 - DNA, 15 bp, Homo sapiens
atttttttgagatgc

SEQ ID NO: 1001004 - DNA, 15 bp, Homo sapiens
attatttttttgaga

SEQ ID NO: 1001005 - DNA, 15 bp, Homo sapiens
tattatttttttgag

SEQ ID NO: 1001006 - DNA, 15 bp, Homo sapiens
ttattatttttttga

SEQ ID NO: 1001007 - DNA, 15 bp, Homo sapiens
attattatttttttg

SEQ ID NO: 1001008 - DNA, 15 bp, Homo sapiens
aattattattttttt

SEQ ID NO: 1001009 - DNA, 15 bp, Homo sapiens
aaattattatttttt

SEQ ID NO: 1001010 - DNA, 15 bp, Homo sapiens
aaaattattattttt

SEQ ID NO: 1001011 - DNA, 15 bp, Homo sapiens
aaaaattattatttt

SEQ ID NO: 1001012 - DNA, 15 bp, Homo sapiens
taaaaattattattt

SEQ ID NO: 1001013 - DNA, 15 bp, Homo sapiens
ttaaaaattattatt

SEQ ID NO: 1001014 - DNA, 15 bp, Homo sapiens
tttaaaaattattat

SEQ ID NO: 1001015 - DNA, 15 bp, Homo sapiens
ttttaaaaattatta

SEQ ID NO: 1001016 - DNA, 15 bp, Homo sapiens
tttttaaaaattatt

SEQ ID NO: 1001017 - DNA, 15 bp, Homo sapiens
atttttaaaaattat

SEQ ID NO: 1001018 - DNA, 15 bp, Homo sapiens
ttatttttaaaaatt

SEQ ID NO: 1001019 - DNA, 15 bp, Homo sapiens
atttattatttttaa

SEQ ID NO: 1001020 - DNA, 15 bp, Homo sapiens
aatttattattttta

SEQ ID NO: 1001021 - DNA, 15 bp, Homo sapiens
aaatttattattttt

SEQ ID NO: 1001022 - DNA, 15 bp, Homo sapiens
aaaatttattatttt

SEQ ID NO: 1001023 - DNA, 15 bp, Homo sapiens
aaaaatttattattt

SEQ ID NO: 1001024 - DNA, 15 bp, Homo sapiens
aaaaaatttattatt

SEQ ID NO: 1001025 - DNA, 15 bp, Homo sapiens
aaaaaaatttattat

SEQ ID NO: 1001026 - DNA, 15 bp, Homo sapiens
taaaaaaatttatta

SEQ ID NO: 1001027 - DNA, 15 bp, Homo sapiens
ttaaaaaaatttatt

SEQ ID NO: 1001028 - DNA, 15 bp, Homo sapiens
cttaaaaaaatttat

SEQ ID NO: 1001029 - DNA, 15 bp, Homo sapiens
gcttaaaaaaattta

SEQ ID NO: 1001030 - DNA, 15 bp, Homo sapiens
agcttaaaaaaattt

SEQ ID NO: 1001031 - DNA, 15 bp, Homo sapiens
aagcttaaaaaaatt

SEQ ID NO: 1001032 - DNA, 15 bp, Homo sapiens
taagcttaaaaaaat

SEQ ID NO: 1001033 - DNA, 15 bp, Homo sapiens
ataagcttaaaaaaa

SEQ ID NO: 1001034 - DNA, 15 bp, Homo sapiens
tataagcttaaaaaa

SEQ ID NO: 1001035 - DNA, 15 bp, Homo sapiens
ttataagcttaaaaa

SEQ ID NO: 1001036 - DNA, 15 bp, Homo sapiens
tttataagcttaaaa

SEQ ID NO: 1001037 - DNA, 15 bp, Homo sapiens
ttttataagcttaaa

SEQ ID NO: 1001038 - DNA, 15 bp, Homo sapiens
tttttataagcttaa

SEQ ID NO: 1001039 - DNA, 15 bp, Homo sapiens
ctttttataagctta

SEQ ID NO: 1001040 - DNA, 15 bp, Homo sapiens
tctttttataagctt

SEQ ID NO: 1001041 - DNA, 15 bp, Homo sapiens
ttctttttataagct

SEQ ID NO: 1001042 - DNA, 15 bp, Homo sapiens
tttctttttataagc

SEQ ID NO: 1001043 - DNA, 15 bp, Homo sapiens
ttttctttttataag

SEQ ID NO: 1001044 - DNA, 15 bp, Homo sapiens
cttttctttttataa

SEQ ID NO: 1001045 - DNA, 15 bp, Homo sapiens
acttttctttttata

SEQ ID NO: 1001046 - DNA, 15 bp, Homo sapiens
aacttttctttttat

SEQ ID NO: 1001047 - DNA, 15 bp, Homo sapiens
caacttttcttttta

SEQ ID NO: 1001048 - DNA, 15 bp, Homo sapiens
tcaacttttcttttt

SEQ ID NO: 1001049 - DNA, 15 bp, Homo sapiens
ctcaacttttctttt

SEQ ID NO: 1001050 - DNA, 15 bp, Homo sapiens
cctcaacttttcttt

SEQ ID NO: 1001051 - DNA, 15 bp, Homo sapiens
gcctcaacttttctt

SEQ ID NO: 1001052 - DNA, 15 bp, Homo sapiens
ggcctcaacttttct

SEQ ID NO: 1001053 - DNA, 15 bp, Homo sapiens
tggcctcaacttttc

SEQ ID NO: 1001054 - DNA, 15 bp, Homo sapiens
ctggcctcaactttt

SEQ ID NO: 1001055 - DNA, 15 bp, Homo sapiens
gctggcctcaacttt

SEQ ID NO: 1001056 - DNA, 15 bp, Homo sapiens
tgctggcctcaactt

SEQ ID NO: 1001057 - DNA, 15 bp, Homo sapiens
atgctggcctcaact

SEQ ID NO: 1001058 - DNA, 15 bp, Homo sapiens
tatgctggcctcaac

SEQ ID NO: 1001059 - DNA, 15 bp, Homo sapiens
ctatgctggcctcaa

SEQ ID NO: 1001060 - DNA, 15 bp, Homo sapiens
actatgctggcctca

SEQ ID NO: 1001061 - DNA, 15 bp, Homo sapiens
tactatgctggcctc

SEQ ID NO: 1001062 - DNA, 15 bp, Homo sapiens
ctactatgctggcct

SEQ ID NO: 1001063 - DNA, 15 bp, Homo sapiens
gctactatgctggcc

SEQ ID NO: 1001064 - DNA, 15 bp, Homo sapiens
agctactatgctggc

SEQ ID NO: 1001065 - DNA, 15 bp, Homo sapiens
gagctactatgctgg

SEQ ID NO: 1001066 - DNA, 15 bp, Homo sapiens
tgagctactatgctg

SEQ ID NO: 1001067 - DNA, 15 bp, Homo sapiens
gtgagctactatgct

SEQ ID NO: 1001068 - DNA, 15 bp, Homo sapiens
tgtgagctactatgc

SEQ ID NO: 1001069 - DNA, 15 bp, Homo sapiens
atgtgagctactatg

SEQ ID NO: 1001070 - DNA, 15 bp, Homo sapiens
gatgtgagctactat

SEQ ID NO: 1001071 - DNA, 15 bp, Homo sapiens
agatgtgagctacta

SEQ ID NO: 1001072 - DNA, 15 bp, Homo sapiens
cagatgtgagctact

SEQ ID NO: 1001073 - DNA, 15 bp, Homo sapiens
acagatgtgagctac

SEQ ID NO: 1001074 - DNA, 15 bp, Homo sapiens
tacagatgtgagcta

SEQ ID NO: 1001075 - DNA, 15 bp, Homo sapiens
ttacagatgtgagct

SEQ ID NO: 1001076 - DNA, 15 bp, Homo sapiens
agattacagatgtga

SEQ ID NO: 1001077 - DNA, 15 bp, Homo sapiens
gagattacagatgtg

SEQ ID NO: 1001078 - DNA, 15 bp, Homo sapiens
tgagattacagatgt

SEQ ID NO: 1001079 - DNA, 15 bp, Homo sapiens
ctgagattacagatg

SEQ ID NO: 1001080 - DNA, 15 bp, Homo sapiens
gctgagattacagat

SEQ ID NO: 1001081 - DNA, 15 bp, Homo sapiens
tgctgagattacaga

SEQ ID NO: 1001082 - DNA, 15 bp, Homo sapiens
ctgctgagattacag

SEQ ID NO: 1001083 - DNA, 15 bp, Homo sapiens
actgctgagattaca

SEQ ID NO: 1001084 - DNA, 15 bp, Homo sapiens
cactgctgagattac

SEQ ID NO: 1001085 - DNA, 15 bp, Homo sapiens
ccactgctgagatta

SEQ ID NO: 1001086 - DNA, 15 bp, Homo sapiens
gccactgctgagatt

SEQ ID NO: 1001087 - DNA, 15 bp, Homo sapiens
tgccactgctgagat

SEQ ID NO: 1001088 - DNA, 15 bp, Homo sapiens
ctgccactgctgaga

SEQ ID NO: 1001089 - DNA, 15 bp, Homo sapiens
tctgccactgctgag

SEQ ID NO: 1001090 - DNA, 15 bp, Homo sapiens
ctctgccactgctga

SEQ ID NO: 1001091 - DNA, 15 bp, Homo sapiens
cctctgccactgctg

SEQ ID NO: 1001092 - DNA, 15 bp, Homo sapiens
tcctctgccactgct

SEQ ID NO: 1001093 - DNA, 15 bp, Homo sapiens
atcctctgccactgc

SEQ ID NO: 1001094 - DNA, 15 bp, Homo sapiens
aatcctctgccactg

SEQ ID NO: 1001095 - DNA, 15 bp, Homo sapiens
caatcctctgccact

SEQ ID NO: 1001096 - DNA, 15 bp, Homo sapiens
gcaatcctctgccac

SEQ ID NO: 1001097 - DNA, 15 bp, Homo sapiens
agcaatcctctgcca

SEQ ID NO: 1001098 - DNA, 15 bp, Homo sapiens
aagcaatcctctgcc

SEQ ID NO: 1001099 - DNA, 15 bp, Homo sapiens
caagcaatcctctgc

SEQ ID NO: 1001100 - DNA, 15 bp, Homo sapiens
tcaagcaatcctctg

SEQ ID NO: 1001101 - DNA, 15 bp, Homo sapiens
ttcaagcaatcctct

SEQ ID NO: 1001102 - DNA, 15 bp, Homo sapiens
cttcaagcaatcctc

SEQ ID NO: 1001103 - DNA, 15 bp, Homo sapiens
tggcttcaagcaatc

SEQ ID NO: 1001104 - DNA, 15 bp, Homo sapiens
ctggcttcaagcaat

SEQ ID NO: 1001105 - DNA, 15 bp, Homo sapiens
cctggcttcaagcaa

SEQ ID NO: 1001106 - DNA, 15 bp, Homo sapiens
tcctggcttcaagca

SEQ ID NO: 1001107 - DNA, 15 bp, Homo sapiens
ctcctggcttcaagc

SEQ ID NO: 1001108 - DNA, 15 bp, Homo sapiens
aaactcctggcttca

SEQ ID NO: 1001109 - DNA, 15 bp, Homo sapiens
caaactcctggcttc

SEQ ID NO: 1001110 - DNA, 15 bp, Homo sapiens
tcaaactcctggctt

SEQ ID NO: 1001111 - DNA, 15 bp, Homo sapiens
ctcaaactcctggct

SEQ ID NO: 1001112 - DNA, 15 bp, Homo sapiens
aggtcttgctatgtt

SEQ ID NO: 1001113 - DNA, 15 bp, Homo sapiens
gaggtcttgctatgt

SEQ ID NO: 1001114 - DNA, 15 bp, Homo sapiens
tgaggtcttgctatg

SEQ ID NO: 1001115 - DNA, 15 bp, Homo sapiens
atgaggtcttgctat

SEQ ID NO: 1001116 - DNA, 15 bp, Homo sapiens
gatgaggtcttgcta

SEQ ID NO: 1001117 - DNA, 15 bp, Homo sapiens
agatgaggtcttgct

SEQ ID NO: 1001118 - DNA, 15 bp, Homo sapiens
gagatgaggtcttgc

SEQ ID NO: 1001119 - DNA, 15 bp, Homo sapiens
agagatgaggtcttg

SEQ ID NO: 1001120 - DNA, 15 bp, Homo sapiens
tagagatgaggtctt

SEQ ID NO: 1001121 - DNA, 15 bp, Homo sapiens
gtagagatgaggtct

SEQ ID NO: 1001122 - DNA, 15 bp, Homo sapiens
tgtagagatgaggtc

SEQ ID NO: 1001123 - DNA, 15 bp, Homo sapiens
atttttttgtagaga

SEQ ID NO: 1001124 - DNA, 15 bp, Homo sapiens
aatttttttgtagag

SEQ ID NO: 1001125 - DNA, 15 bp, Homo sapiens
aaatttttttgtaga

SEQ ID NO: 1001126 - DNA, 15 bp, Homo sapiens
gaaatttttttgtag

SEQ ID NO: 1001127 - DNA, 15 bp, Homo sapiens
agaaatttttttgta

SEQ ID NO: 1001128 - DNA, 15 bp, Homo sapiens
aagaaatttttttgt

SEQ ID NO: 1001129 - DNA, 15 bp, Homo sapiens
aaagaaatttttttg

SEQ ID NO: 1001130 - DNA, 15 bp, Homo sapiens
aaaagaaattttttt

SEQ ID NO: 1001131 - DNA, 15 bp, Homo sapiens
aaaaagaaatttttt

SEQ ID NO: 1001132 - DNA, 15 bp, Homo sapiens
aaaaaagaaattttt

SEQ ID NO: 1001133 - DNA, 15 bp, Homo sapiens
taaaaaagaaatttt

SEQ ID NO: 1001134 - DNA, 15 bp, Homo sapiens
ttaaaaaagaaattt

SEQ ID NO: 1001135 - DNA, 15 bp, Homo sapiens
tttaaaaaagaaatt

SEQ ID NO: 1001136 - DNA, 15 bp, Homo sapiens
atttaaaaaagaaat

SEQ ID NO: 1001137 - DNA, 15 bp, Homo sapiens
aatttaaaaaagaaa

SEQ ID NO: 1001138 - DNA, 15 bp, Homo sapiens
taatttaaaaaagaa

SEQ ID NO: 1001139 - DNA, 15 bp, Homo sapiens
ctaatttaaaaaaga

SEQ ID NO: 1001140 - DNA, 15 bp, Homo sapiens
gctaatttaaaaaag

SEQ ID NO: 1001141 - DNA, 15 bp, Homo sapiens
agctaatttaaaaaa

SEQ ID NO: 1001142 - DNA, 15 bp, Homo sapiens
cagctaatttaaaaa

SEQ ID NO: 1001143 - DNA, 15 bp, Homo sapiens
ccagctaatttaaaa

SEQ ID NO: 1001144 - DNA, 15 bp, Homo sapiens
cccagctaatttaaa

SEQ ID NO: 1001145 - DNA, 15 bp, Homo sapiens
acccagctaatttaa

SEQ ID NO: 1001146 - DNA, 15 bp, Homo sapiens
cacccagctaattta

SEQ ID NO: 1001147 - DNA, 15 bp, Homo sapiens
atgcacaccaccaca

SEQ ID NO: 1001148 - DNA, 15 bp, Homo sapiens
gatgcacaccaccac

SEQ ID NO: 1001149 - DNA, 15 bp, Homo sapiens
agatgcacaccacca

SEQ ID NO: 1001150 - DNA, 15 bp, Homo sapiens
cagatgcacaccacc

SEQ ID NO: 1001151 - DNA, 15 bp, Homo sapiens
acagatgcacaccac

SEQ ID NO: 1001152 - DNA, 15 bp, Homo sapiens
tacagatgcacacca

SEQ ID NO: 1001153 - DNA, 15 bp, Homo sapiens
ctacagatgcacacc

SEQ ID NO: 1001154 - DNA, 15 bp, Homo sapiens
actacagatgcacac

SEQ ID NO: 1001155 - DNA, 15 bp, Homo sapiens
gactacagatgcaca

SEQ ID NO: 1001156 - DNA, 15 bp, Homo sapiens
ggactacagatgcac

SEQ ID NO: 1001157 - DNA, 15 bp, Homo sapiens
gggactacagatgca

SEQ ID NO: 1001158 - DNA, 15 bp, Homo sapiens
tgcctcctgagtagc

SEQ ID NO: 1001159 - DNA, 15 bp, Homo sapiens
ctgcctcctgagtag

SEQ ID NO: 1001160 - DNA, 15 bp, Homo sapiens
tctgcctcctgagta

SEQ ID NO: 1001161 - DNA, 15 bp, Homo sapiens
ctctgcctcctgagt

SEQ ID NO: 1001162 - DNA, 15 bp, Homo sapiens
cctctgcctcctgag

SEQ ID NO: 1001163 - DNA, 15 bp, Homo sapiens
acctctgcctcctga

SEQ ID NO: 1001164 - DNA, 15 bp, Homo sapiens
cacctctgcctcctg

SEQ ID NO: 1001165 - DNA, 15 bp, Homo sapiens
tcacctctgcctcct

SEQ ID NO: 1001166 - DNA, 15 bp, Homo sapiens
ctcacctctgcctcc

SEQ ID NO: 1001167 - DNA, 15 bp, Homo sapiens
actcacctctgcctc

SEQ ID NO: 1001168 - DNA, 15 bp, Homo sapiens
cactcacctctgcct

SEQ ID NO: 1001169 - DNA, 15 bp, Homo sapiens
ccactcacctctgcc

SEQ ID NO: 1001170 - DNA, 15 bp, Homo sapiens
tccactcacctctgc

SEQ ID NO: 1001171 - DNA, 15 bp, Homo sapiens
atccactcacctctg

SEQ ID NO: 1001172 - DNA, 15 bp, Homo sapiens
tatccactcacctct

SEQ ID NO: 1001173 - DNA, 15 bp, Homo sapiens
gtatccactcacctc

SEQ ID NO: 1001174 - DNA, 15 bp, Homo sapiens
tgtatccactcacct

SEQ ID NO: 1001175 - DNA, 15 bp, Homo sapiens
atgtatccactcacc

SEQ ID NO: 1001176 - DNA, 15 bp, Homo sapiens
aatgtatccactcac

SEQ ID NO: 1001177 - DNA, 15 bp, Homo sapiens
caatgtatccactca

SEQ ID NO: 1001178 - DNA, 15 bp, Homo sapiens
tcaatgtatccactc

SEQ ID NO: 1001179 - DNA, 15 bp, Homo sapiens
ttcaatgtatccact

SEQ ID NO: 1001180 - DNA, 15 bp, Homo sapiens
gttcaatgtatccac

SEQ ID NO: 1001181 - DNA, 15 bp, Homo sapiens
ggttcaatgtatcca

SEQ ID NO: 1001182 - DNA, 15 bp, Homo sapiens
gggttcaatgtatcc

SEQ ID NO: 1001183 - DNA, 15 bp, Homo sapiens
tgggttcaatgtatc

SEQ ID NO: 1001184 - DNA, 15 bp, Homo sapiens
ctgggttcaatgtat

SEQ ID NO: 1001185 - DNA, 15 bp, Homo sapiens
cctgggttcaatgta

SEQ ID NO: 1001186 - DNA, 15 bp, Homo sapiens
tcctgggttcaatgt

SEQ ID NO: 1001187 - DNA, 15 bp, Homo sapiens
ctcctgggttcaatg

SEQ ID NO: 1001188 - DNA, 15 bp, Homo sapiens
actcctgggttcaat

SEQ ID NO: 1001189 - DNA, 15 bp, Homo sapiens
acagcctcaaactcc

SEQ ID NO: 1001190 - DNA, 15 bp, Homo sapiens
tacagcctcaaactc

SEQ ID NO: 1001191 - DNA, 15 bp, Homo sapiens
ctacagcctcaaact

SEQ ID NO: 1001192 - DNA, 15 bp, Homo sapiens
actacagcctcaaac

SEQ ID NO: 1001193 - DNA, 15 bp, Homo sapiens
cactacagcctcaaa

SEQ ID NO: 1001194 - DNA, 15 bp, Homo sapiens
tcactacagcctcaa

SEQ ID NO: 1001195 - DNA, 15 bp, Homo sapiens
ctcactacagcctca

SEQ ID NO: 1001196 - DNA, 15 bp, Homo sapiens
agctcactacagcct

SEQ ID NO: 1001197 - DNA, 15 bp, Homo sapiens
tagctcactacagcc

SEQ ID NO: 1001198 - DNA, 15 bp, Homo sapiens
gtggcatgatcatag

SEQ ID NO: 1001199 - DNA, 15 bp, Homo sapiens
agtggcatgatcata

SEQ ID NO: 1001200 - DNA, 15 bp, Homo sapiens
cagtggcatgatcat

SEQ ID NO: 1001201 - DNA, 15 bp, Homo sapiens
ttggagtgcagtggc

SEQ ID NO: 1001202 - DNA, 15 bp, Homo sapiens
cacccaggttggagt

SEQ ID NO: 1001203 - DNA, 15 bp, Homo sapiens
tcacccaggttggag

SEQ ID NO: 1001204 - DNA, 15 bp, Homo sapiens
gtcacccaggttgga

SEQ ID NO: 1001205 - DNA, 15 bp, Homo sapiens
tgtcacccaggttgg

SEQ ID NO: 1001206 - DNA, 15 bp, Homo sapiens
ctgtcacccaggttg

SEQ ID NO: 1001207 - DNA, 15 bp, Homo sapiens
tctgtcacccaggtt

SEQ ID NO: 1001208 - DNA, 15 bp, Homo sapiens
ctctgtcacccaggt

SEQ ID NO: 1001209 - DNA, 15 bp, Homo sapiens
gaggtcttgctctgt

SEQ ID NO: 1001210 - DNA, 15 bp, Homo sapiens
ggaggtcttgctctg

SEQ ID NO: 1001211 - DNA, 15 bp, Homo sapiens
tggaggtcttgctct

SEQ ID NO: 1001212 - DNA, 15 bp, Homo sapiens
ttggaggtcttgctc

SEQ ID NO: 1001213 - DNA, 15 bp, Homo sapiens
tttggaggtcttgct

SEQ ID NO: 1001214 - DNA, 15 bp, Homo sapiens
ttttggaggtcttgc

SEQ ID NO: 1001215 - DNA, 15 bp, Homo sapiens
tttttggaggtcttg

SEQ ID NO: 1001216 - DNA, 15 bp, Homo sapiens
ttttttggaggtctt

SEQ ID NO: 1001217 - DNA, 15 bp, Homo sapiens
tttttttggaggtct

SEQ ID NO: 1001218 - DNA, 15 bp, Homo sapiens
ttttttttggaggtc

SEQ ID NO: 1001219 - DNA, 15 bp, Homo sapiens
tttttttttggaggt

SEQ ID NO: 1001220 - DNA, 15 bp, Homo sapiens
gcagctctttttttt

SEQ ID NO: 1001221 - DNA, 15 bp, Homo sapiens
agcagctcttttttt

SEQ ID NO: 1001222 - DNA, 15 bp, Homo sapiens
cagcagctctttttt

SEQ ID NO: 1001223 - DNA, 15 bp, Homo sapiens
tcagcagctcttttt

SEQ ID NO: 1001224 - DNA, 15 bp, Homo sapiens
ctcagcagctctttt

SEQ ID NO: 1001225 - DNA, 15 bp, Homo sapiens
gctcagcagctcttt

SEQ ID NO: 1001226 - DNA, 15 bp, Homo sapiens
agctcagcagctctt

SEQ ID NO: 1001227 - DNA, 15 bp, Homo sapiens
gagctcagcagctct

SEQ ID NO: 1001228 - DNA, 15 bp, Homo sapiens
tgagctcagcagctc

SEQ ID NO: 1001229 - DNA, 15 bp, Homo sapiens
ctgagctcagcagct

SEQ ID NO: 1001230 - DNA, 15 bp, Homo sapiens
tctgagctcagcagc

SEQ ID NO: 1001231 - DNA, 15 bp, Homo sapiens
ttctgagctcagcag

SEQ ID NO: 1001232 - DNA, 15 bp, Homo sapiens
attctgagctcagca

SEQ ID NO: 1001233 - DNA, 15 bp, Homo sapiens
aattctgagctcagc

SEQ ID NO: 1001234 - DNA, 15 bp, Homo sapiens
gaattctgagctcag

SEQ ID NO: 1001235 - DNA, 15 bp, Homo sapiens
tgaattctgagctca

SEQ ID NO: 1001236 - DNA, 15 bp, Homo sapiens
ttgaattctgagctc

SEQ ID NO: 1001237 - DNA, 15 bp, Homo sapiens
tttgaattctgagct

SEQ ID NO: 1001238 - DNA, 15 bp, Homo sapiens
gtttgaattctgagc

SEQ ID NO: 1001239 - DNA, 15 bp, Homo sapiens
agtttgaattctgag

SEQ ID NO: 1001240 - DNA, 15 bp, Homo sapiens
cagtttgaattctga

SEQ ID NO: 1001241 - DNA, 15 bp, Homo sapiens
ccagtttgaattctg

SEQ ID NO: 1001242 - DNA, 15 bp, Homo sapiens
cccagtttgaattct

SEQ ID NO: 1001243 - DNA, 15 bp, Homo sapiens
gcccagtttgaattc

SEQ ID NO: 1001244 - DNA, 15 bp, Homo sapiens
agcccagtttgaatt

SEQ ID NO: 1001245 - DNA, 15 bp, Homo sapiens
gagcccagtttgaat

SEQ ID NO: 1001246 - DNA, 15 bp, Homo sapiens
agagcccagtttgaa

SEQ ID NO: 1001247 - DNA, 15 bp, Homo sapiens
gagagcccagtttga

SEQ ID NO: 1001248 - DNA, 15 bp, Homo sapiens
tgagagcccagtttg

SEQ ID NO: 1001249 - DNA, 15 bp, Homo sapiens
ttgagagcccagttt

SEQ ID NO: 1001250 - DNA, 15 bp, Homo sapiens
tttgagagcccagtt

SEQ ID NO: 1001251 - DNA, 15 bp, Homo sapiens
atttgagagcccagt

SEQ ID NO: 1001252 - DNA, 15 bp, Homo sapiens
aatttgagagcccag

SEQ ID NO: 1001253 - DNA, 15 bp, Homo sapiens
caatttgagagccca

SEQ ID NO: 1001254 - DNA, 15 bp, Homo sapiens
ccaatttgagagccc

SEQ ID NO: 1001255 - DNA, 15 bp, Homo sapiens
tccaatttgagagcc

SEQ ID NO: 1001256 - DNA, 15 bp, Homo sapiens
atccaatttgagagc

SEQ ID NO: 1001257 - DNA, 15 bp, Homo sapiens
aatccaatttgagag

SEQ ID NO: 1001258 - DNA, 15 bp, Homo sapiens
aaatccaatttgaga

SEQ ID NO: 1001259 - DNA, 15 bp, Homo sapiens
aaaatccaatttgag

SEQ ID NO: 1001260 - DNA, 15 bp, Homo sapiens
gaaaatccaatttga

SEQ ID NO: 1001261 - DNA, 15 bp, Homo sapiens
agaaaatccaatttg

SEQ ID NO: 1001262 - DNA, 15 bp, Homo sapiens
aagaaaatccaattt

SEQ ID NO: 1001263 - DNA, 15 bp, Homo sapiens
aaagaaaatccaatt

SEQ ID NO: 1001264 - DNA, 15 bp, Homo sapiens
aaaagaaaatccaat

SEQ ID NO: 1001265 - DNA, 15 bp, Homo sapiens
taaaagaaaatccaa

SEQ ID NO: 1001266 - DNA, 15 bp, Homo sapiens
ctaaaagaaaatcca

SEQ ID NO: 1001267 - DNA, 15 bp, Homo sapiens
tctaaaagaaaatcc

SEQ ID NO: 1001268 - DNA, 15 bp, Homo sapiens
ttctaaaagaaaatc

SEQ ID NO: 1001269 - DNA, 15 bp, Homo sapiens
attctaaaagaaaat

SEQ ID NO: 1001270 - DNA, 15 bp, Homo sapiens
tattctaaaagaaaa

SEQ ID NO: 1001271 - DNA, 15 bp, Homo sapiens
atattctaaaagaaa

SEQ ID NO: 1001272 - DNA, 15 bp, Homo sapiens
tatattctaaaagaa

SEQ ID NO: 1001273 - DNA, 15 bp, Homo sapiens
atatattctaaaaga

SEQ ID NO: 1001274 - DNA, 15 bp, Homo sapiens
aatatattctaaaag

SEQ ID NO: 1001275 - DNA, 15 bp, Homo sapiens
aaatatattctaaaa

SEQ ID NO: 1001276 - DNA, 15 bp, Homo sapiens
taaatatattctaaa

SEQ ID NO: 1001277 - DNA, 15 bp, Homo sapiens
ataaatatattctaa

SEQ ID NO: 1001278 - DNA, 15 bp, Homo sapiens
tataaatatattcta

SEQ ID NO: 1001279 - DNA, 15 bp, Homo sapiens
ttataaatatattct

SEQ ID NO: 1001280 - DNA, 15 bp, Homo sapiens
attataaatatattc

SEQ ID NO: 1001281 - DNA, 15 bp, Homo sapiens
aattataaatatatt

SEQ ID NO: 1001282 - DNA, 15 bp, Homo sapiens
taattataaatatat

SEQ ID NO: 1001283 - DNA, 15 bp, Homo sapiens
ttaattataaatata

SEQ ID NO: 1001284 - DNA, 15 bp, Homo sapiens
tttaattataaatat

SEQ ID NO: 1001285 - DNA, 15 bp, Homo sapiens
ttttaattataaata

SEQ ID NO: 1001286 - DNA, 15 bp, Homo sapiens
tttttaattataaat

SEQ ID NO: 1001287 - DNA, 15 bp, Homo sapiens
ctttttaattataaa

SEQ ID NO: 1001288 - DNA, 15 bp, Homo sapiens
cctttttaattataa

SEQ ID NO: 1001289 - DNA, 15 bp, Homo sapiens
tcctttttaattata

SEQ ID NO: 1001290 - DNA, 15 bp, Homo sapiens
atcctttttaattat

SEQ ID NO: 1001291 - DNA, 15 bp, Homo sapiens
tatcctttttaatta

SEQ ID NO: 1001292 - DNA, 15 bp, Homo sapiens
ctatcctttttaatt

SEQ ID NO: 1001293 - DNA, 15 bp, Homo sapiens
gctatcctttttaat

SEQ ID NO: 1001294 - DNA, 15 bp, Homo sapiens
ggctatcctttttaa

SEQ ID NO: 1001295 - DNA, 15 bp, Homo sapiens
tggctatccttttta

SEQ ID NO: 1001296 - DNA, 15 bp, Homo sapiens
atggctatccttttt

SEQ ID NO: 1001297 - DNA, 15 bp, Homo sapiens
gatggctatcctttt

SEQ ID NO: 1001298 - DNA, 15 bp, Homo sapiens
agatggctatccttt

SEQ ID NO: 1001299 - DNA, 15 bp, Homo sapiens
aagatggctatcctt

SEQ ID NO: 1001300 - DNA, 15 bp, Homo sapiens
aaagatggctatcct

SEQ ID NO: 1001301 - DNA, 15 bp, Homo sapiens
aaaagatggctatcc

SEQ ID NO: 1001302 - DNA, 15 bp, Homo sapiens
caaaagatggctatc

SEQ ID NO: 1001303 - DNA, 15 bp, Homo sapiens
tcaaaagatggctat

SEQ ID NO: 1001304 - DNA, 15 bp, Homo sapiens
ctcaaaagatggcta

SEQ ID NO: 1001305 - DNA, 15 bp, Homo sapiens
gctcaaaagatggct

SEQ ID NO: 1001306 - DNA, 15 bp, Homo sapiens
agctcaaaagatggc

SEQ ID NO: 1001307 - DNA, 15 bp, Homo sapiens
gagctcaaaagatgg

SEQ ID NO: 1001308 - DNA, 15 bp, Homo sapiens
ggagctcaaaagatg

SEQ ID NO: 1001309 - DNA, 15 bp, Homo sapiens
gggagctcaaaagat

SEQ ID NO: 1001310 - DNA, 15 bp, Homo sapiens
tgggagctcaaaaga

SEQ ID NO: 1001311 - DNA, 15 bp, Homo sapiens
ctgggagctcaaaag

SEQ ID NO: 1001312 - DNA, 15 bp, Homo sapiens
cctgggagctcaaaa

SEQ ID NO: 1001313 - DNA, 15 bp, Homo sapiens
gcctgggagctcaaa

SEQ ID NO: 1001314 - DNA, 15 bp, Homo sapiens
tgcctgggagctcaa

SEQ ID NO: 1001315 - DNA, 15 bp, Homo sapiens
gtgcctgggagctca

SEQ ID NO: 1001316 - DNA, 15 bp, Homo sapiens
ggtgcctgggagctc

SEQ ID NO: 1001317 - DNA, 15 bp, Homo sapiens
tggtgcctgggagct

SEQ ID NO: 1001318 - DNA, 15 bp, Homo sapiens
gtggtgcctgggagc

SEQ ID NO: 1001319 - DNA, 15 bp, Homo sapiens
ggtggtgcctgggag

SEQ ID NO: 1001320 - DNA, 15 bp, Homo sapiens
tggtggtgcctggga

SEQ ID NO: 1001321 - DNA, 15 bp, Homo sapiens
atggtggtgcctggg

SEQ ID NO: 1001322 - DNA, 15 bp, Homo sapiens
gatggtggtgcctgg

SEQ ID NO: 1001323 - DNA, 15 bp, Homo sapiens
agatggtggtgcctg

SEQ ID NO: 1001324 - DNA, 15 bp, Homo sapiens
tagatggtggtgcct

SEQ ID NO: 1001325 - DNA, 15 bp, Homo sapiens
atagatggtggtgcc

SEQ ID NO: 1001326 - DNA, 15 bp, Homo sapiens
aatagatggtggtgc

SEQ ID NO: 1001327 - DNA, 15 bp, Homo sapiens
aaatagatggtggtg

SEQ ID NO: 1001328 - DNA, 15 bp, Homo sapiens
taaatagatggtggt

SEQ ID NO: 1001329 - DNA, 15 bp, Homo sapiens
ataaatagatggtgg

SEQ ID NO: 1001330 - DNA, 15 bp, Homo sapiens
gataaatagatggtg

SEQ ID NO: 1001331 - DNA, 15 bp, Homo sapiens
tgataaatagatggt

SEQ ID NO: 1001332 - DNA, 15 bp, Homo sapiens
atgataaatagatgg

SEQ ID NO: 1001333 - DNA, 15 bp, Homo sapiens
tatgataaatagatg
